(19) United States
(12) Patent Application Publication
(10) Pub. No.: US 2023/0235365 A1
(43) Pub. Date: Jul. 27, 2023

(54) ENGINEERED RETRONS AND METHODS OF USE

(71) Applicant: ReNAgade Therapeutics Management Inc., Cambridge, MA (US)

(72) Inventors: Alim Ladha, Cambridge, MA (US); Vladimir Presnyak, Cambridge, MA (US); Brian Goodman, Cambridge, MA (US); Mario Rodriguez Mestre, Cambridge, MA (US); Devin Scott Quinlan, Cambridge, MA (US); Muthusamy Jayaraman, Cambridge, MA (US); Stephen Scully, Cambridge, MA (US)

(73) Assignee: ReNAgade Therapeutics Management Inc., Cambridge, MA (US)

(21) Appl. No.: 18/087,673

(22) Filed: Dec. 22, 2022

Related U.S. Application Data
(60) Provisional application No. 63/301,936, filed on Jan. 21, 2022.
(60) Provisional application No. 63/370,880, filed on Aug. 9, 2022.
(60) Provisional application No. 63/373,545, filed on Aug. 25, 2022.

(51) Int. Cl. C12N 15/90; C12N 15/11; C12N 9/22; C12N 9/12

(52) U.S. Cl. CPC C12N 15/907; C12N 15/11; C12N 9/22; C12N 9/1276; C12N 2310/20; C12N 2310/531; C12N 2800/80

(57) ABSTRACT

Disclosed are engineered retrons and methods of use such as to modify the genome of a host (e.g., mammalian) cell by delivering the engineered retron or the encoded ncRNA in vitro or in vivo to the host (e.g., mammalian) cell.

### RELATED APPLICATIONS

[0001] This application claims priority under 35 U.S.C. § 119(e) to U.S. Provisional Application Ser. No. 63/301,936, filed Jan. 21, 2022, U.S. Provisional Application Ser. No. 63/370,880, filed Aug. 9, 2022, and U.S. Provisional Application Ser. No. 63/373,545, filed Aug. 25, 2022, each of which are incorporated herein by reference in their entireties.

### SEQUENCE LISTING

[0002] This application contains a sequence listing filed in electronic form in eXtensible Markup Language (XML) format entitled Replacement RTX004_SL.xml, created on Mar. 31, 2023 and having a size of 32,261,692 bytes. The content of the sequence listing is incorporated herein in its entirety.

### TECHNICAL FIELD

[0003] The present disclosure generally relates to systems, methods and compositions used for precise genome editing, including nucleic acid insertions, replacements, and deletions at targeted and precise genome sites, wherein said systems, methods, and compositions are based on novel and/or engineered retrons.

### BACKGROUND OF THE INVENTION

[0004] Precise genome editing by programmable nucleases (e.g., RNA-guided nucleases (e.g., CRISPR nucleases), zinc-finger nucleases (ZFN), and transcription activator-like effector nucleases (TALENS)) typically relies on homology-directed repair (HDR) and the presence of a donor DNA template at the site of a double-strand break (DSB) induced by the programmable nuclease. It is generally accepted that a limiting step for HDR-dependent precise genome editing is the delivery of donor DNA template to the nuclease-induced DSB (e.g., see Ling et al., “Improving the efficiency of precise genome editing with site-specific Cas9-oligonucleotide conjugates,” Science Advances, 2020, Vol. 6, No. 15, pp. 1-8). Various methods aimed at boosting the efficiency of HDR-dependent editing have been reported, many of which involve the physical tethering of the DNA donor to a component of the precise editing system. Exemplary methods have been discussed in: K. Lee et al., “Synthetically modified guide RNA and donor DNA are a versatile platform for CRISPR-Cas9 engineering,” eLife 6, e25312 (2017); J. Carlson-Stevermer et al., “Assembly of CRISPR ribonucleoproteins with biotinylated oligonucleotides via an RNA aptamer for precise gene editing,” Nat. Commun. 8, 1711 (2017); N. Savic, et al., “Covalent linkage of the DNA repair template to the CRISPR-Cas9 nuclease enhances homology-directed repair,” eLife 7, e33761 (2018); and E. J. Aird et al., “Increasing Cas9-mediated homology-directed repair efficiency through covalent tethering of DNA repair template.,” Commun. Biol. 1, 54 (2018), each of which are incorporated herein by reference. Despite these efforts, efficiency of HDR-dependent precise editing remains unsatisfactory.

[0005] Retrons are defined by their unique ability to produce an unusual satellite DNA known as msDNA (multicopy single-stranded DNA). DNA encoding retrons includes a reverse trancriptase (RT)-coding gene (ret) and a nucleic acid sequence encoding the non-coding RNA (ncRNA), which contains two contiguous and inverted non-coding sequences referred to as the msr and msd. The ret gene and the non-coding RNA (including the msr and msd) are transcribed as a single RNA transcript, which becomes folded into a specific secondary structure following post-transcriptional processing. Once translated, the RT binds the RNA template downstream from the msd locus, initiating reverse transcription of the RNA towards its 5′ end, assisted by the 2′OH group present in a conserved branching guanosine residue that acts as a primer. Reverse transcription halts before reaching the msr locus, and the resulting DNA, the msDNA, remains covalently attached to the RNA template via a 2′-5′ phosphodiester bond and base-pairing between the 3′ ends of the msDNA and the RNA template. The external regions, at the 5′ and 3′ ends of the msd/msr transcript (a1 and a2, respectively) are complementary and can hybridize, leaving the structures located in the msr and msd regions in internal positions (see FIG. 1A). The msr locus, which is not reverse transcribed, forms one to three short stem-loops of variable size, ranging from 3 to 10 base pairs, whereas the msd locus folds into a single/double long hairpin with a highly variable long stem of 10-50 bp in length that is also present in the final msDNA form.

[0006] It has recently been reported that retrons may be utilized as a means to provide donor DNA template for HDR-dependent genome editing (e.g., see Lopez et al., “Precise genome editing across kingdoms of life using retron-derived DNA,” Nature Chemical Biology, Dec. 12, 2021, 18, pages 199-206 (2022)), however, producing sufficient levels of donor DNA template intracellularly to sufficiently support efficient HDR-dependent editing remains a significant challenge. Improved retron-based genome modification systems are highly desirous in the art.

### SUMMARY OF THE INVENTION

[0007] In one aspect, the present disclosure provides recombinant retrons comprising one or more genetic modifications which improves the functionality and/or properties of a retron. Such genetic modifications can include a mutation, insertion, deletion, inversion, replacement, substitution, or translocation of one or more contiguous or non-contiguous nucleobases in a nucleic acid molecule encoding a retron or a component of a retron, such as an ncRNA or a reverse transcriptase. In various aspects, the retron that becomes modified with the one or more genetic modifications (i.e., the “pre-modified” or “unmodified” retron or retron component) is a naturally occurring retron or retron component (e.g., naturally occurring ncRNA of Table A or RT) ability to facilitate homology-dependent recombination (or HDR) in a cell, thereby resulting in a relative increase in the concentrations or amounts of msDNA comprising a DNA donor template. In particular embodiments, the recombinant retrons are based on and/or derived from a naturally-occurring retron, such as any retron-related sequence provided by Table X (the introduction of the one or more genetic modifications into a set of 7257 previously unknown retrons discovered through computational methods described herein (e.g., see Examples). In other embodiments, the recombinant retrons are based on introducing the one or more genetic modifications into previously available retron sequences (e.g., the “Mestre et al., Systematic Prediction of Genes Functionally Associated with Bacterial Retrons and Classifcation of The Encoded Tripartite Systems, Nucleic Acids Research, Volume 48, Issue 22, 16 Dec. 2020, Pages 12632-12647” (incorporated herein by reference) to achieve recombinant retrons with the enhanced ability to produce increased concentrations or amounts of msDNA comprising a DNA donor template.

[0008] In another aspect, the present disclosure further provides nucleic acid molecules encoding the recombinant retrons and/or recombinant retron components (e.g., a recombinant ncRNA and/or a recombinant retron RT). In still another aspect, the present disclosure provides genome editing systems comprising recombinant retron components (e.g., recombinant ncRNA and/or recombinant RT), programmable nucleases (e.g., RNA-guided nucleases, such as CRISPR-Cas proteins, ZFPs, and TALENS), and guide RNAs (in the case where RNA-guide nucleases are used in said genome editing systems). In a further aspect, the disclosure provides nucleic acid molecules encoding the described genome editing systems and said components thereof, as well as polypeptides making up the components of said genome editing systems. In yet another aspect, the disclosure provides vectors for transferring and/or expressing said genome editing systems, e.g., under in vitro, ex vivo, and in vivo conditions. In still another aspect, the disclosure provides cell-delivery compositions and methods, including compositions for passive and/or active transport to cells (e.g., plasmids), delivery by virus-based recombinant vectors (e.g., AAV and/or lentivirus vectors), delivery by non-virus-based systems (e.g., liposomes and LNPs), and delivery by virus-like particles. Depending on the delivery system employed, the retron-based genome editing systems described herein may be delivered in the form of DNA (e.g., plasmids or DNA-based virus vectors), RNA (e.g., ncRNA and mRNA delivered by LNPs), a mixture of DNA and RNA, protein (e.g., virus-like particles), and ribonucleoprotein (RNP) complexes. Any suitable combinations of approaches for delivering the components of the herein disclosed retron-based genome editing systems may be employed. In one embodiment, each of the components of the retron-based genome editing system is delivered by an all-RNA system, e.g., the delivery of one or more RNA molecules (e.g., mRNA and/or ncRNA) by one or more LNPs, wherein the one or more RNA molecules form the ncRNA and guide RNA (as needed) and/or are translated into the polypeptide components (e.g., the RT and a programmable nuclease). In yet another aspect, the disclosure provides methods for genome editing by introducing a retron-based genome editing system described herein into a cell (e.g., under in vitro, in vivo, or ex vivo conditions) comprising a target edit site, thereby resulting in an edit at the target edit. In other aspects, the disclosure provides formulations comprising any of the aforementioned components for delivery to cells and/or tissues, including in vitro, in vivo, and ex vivo delivery, recombinant cells and/or tissues modified by the recombinant retron-based genome modification systems and methods described herein, and methods of modifying cells by conducting genome editing and related DNA donor-dependent methods, such as recombineering, or cell recording, using the herein disclosed retron-based genome modification systems. The disclosure also provides methods of making the recombinant retrons, retron-based genome modification systems, vectors, compositions and formulations described herein, as well as to pharmaceutical compositions and kits for modifying cells under in vitro, in vivo, and ex vivo conditions that comprise the herein disclosed genome editing and/or modification systems.

[0009] In an embodiment, this disclosure or the inventions herein provide a gene editing system comprising one or more delivery vehicles, wherein: the delivery vehicle(s) comprise RNA cargo; the RNA cargo comprises (a) at least one mRNA molecule encoding (i) a nucleic acid programmable nuclease and (ii) a retron reverse transcriptase, (b) an engineered retron ncRNA, and (c) guide RNA for the programmable nuclease; and each delivery vehicle contains (a)(i) and/or (a)(ii) and/or (b) and/or (c); whereby one delivery vehicle or more than one delivery vehicle delivers (a)(i), (a)(ii), (b), and (c).

[0010] In an embodiment, in the gene editing system, (a)(i) and (a)(ii) comprise a single mRNA molecule encoding the nucleic acid programmable nuclease and the retron reverse transcriptase.

[0011] In an embodiment, in the gene editing system, (a)(i) and (a)(ii) are encoded and expressed as a fusion protein.

[0012] In an embodiment, in the gene editing system (a)(i) and (a)(ii) are encoded and expressed as a fusion protein and the fusion protein comprises the C-terminal end of the nucleic acid programmable nuclease fused to the N-terminal end of the retron reverse transcriptase (nuclease:RT fusion); or the fusion protein comprises the N-terminal end of the nucleic acid programmable nuclease fused to the C-terminal end of the retron reverse transcriptase (RT:nuclease fusion).

[0013] In an embodiment, in the gene editing system, (a)(i) and (a)(ii) comprise a first mRNA molecule encoding the nucleic acid programmable nuclease and a second mRNA molecule encoding the retron reverse transcriptase.

[0014] In an embodiment, in the gene editing system, (c) is separate from (a)(i), (a)(ii) and (b) or is provided in trans.

[0015] In an embodiment, in the gene editing system, (b) the engineered retron ncRNA, and (c) the guide RNA are fused or are provided in cis.

[0016] In an embodiment, in the gene editing system, (b) the engineered retron ncRNA, and (c) the guide RNA are fused or are provided in cis and the guide RNA is fused to the 5′ end of the retron ncRNA.

[0017] In an embodiment, in the gene editing system, (b) the engineered retron ncRNA, and (c) the guide RNA are fused or are provided in cis and the guide RNA is fused to the 3′ end of the retron ncRNA.

[0018] In an embodiment, in the gene editing system, (b) the engineered retron ncRNA, and (c) the guide RNA are fused or are provided in cis and the engineered ncRNA comprises a first guide RNA fused to the 5′ end of the retron ncRNA, and a second guide RNA fused to the 3′ end of the retron ncRNA, and the first and second guide RNAs target different sequences. Thus, on a broader scale, in an embodiment, in the gene editing system, (c) guide RNA for the programmable nuclease, can comprise one or more guides that target the same or different target sequences. Such guide RNA(s) in an embodiment, can be single guide RNA(s) or sgRNA(s); for instance, when the nucleic acid programmable nuclease comprises a Cas9.

[0019] In an embodiment, in the gene editing system, the one or more delivery vehicles comprise a liposome or a lipid nanoparticle (LNP).

[0020] In an embodiment, in the gene editing system, (a) the at least one mRNA molecule encoding (i) the nucleic acid programmable nuclease and (ii) the retron reverse transcriptase, and (b) the engineered retron ncRNA, are in the same delivery vehicle.

[0021] In an embodiment, in the gene editing system, (a) the at least one mRNA molecule encoding (i) the nucleic acid programmable nuclease and (ii) the retron reverse transcriptase, and (b) the engineered retron ncRNA, are in separate delivery vehicles.

[0022] In an embodiment, in the gene editing system, the nucleic acid programmable nuclease and the retron reverse transcriptase are encoded on separate mRNA molecules and those separate mRNA molecules of (a)(i) and (a)(ii) are contained in the same delivery vehicle.

[0023] In an embodiment, in the gene editing system, the nucleic acid programmable nuclease and the retron reverse transcriptase are encoded on separate mRNA molecules and those separate mRNA molecules of (a)(i) and (a)(ii) are contained in different delivery vehicles.

[0024] In an embodiment, in the gene editing system, the engineered retron ncRNA includes a sequence of interest encoding a donor polynucleotide comprising an intended edit to be integrated at a target sequence in a cell, and wherein the donor polynucleotide is flanked by a 5′ homology arm that hybridizes to a sequence 5′ to the target sequence and a 3′ homology arm that hybridizes to a sequence 3′ to the target sequence. In an embodiment, the donor polynucleotide can be heterologous to the cell. In an embodiment, the donor polynucleotide can be endogenous to the cell; for instance, the cell can contain a sequence that is typical for those in a population having a disease state and the donor polynucleotide can be a sequence that is typical for those in the population not having a non-disease state (e.g., the donor can be for a genetic correction or repair of a cell to modify the cell from having a mutation or modification that gives rise to a disease state to having a sequence typical of not having the disease state). Such can be done in an animal cell, or a mammalian cell (e.g., a primate, a non-human primate, or a domesticated mammal such as a cat or dog or horse) or a human cell; for instance to correct, address, treat, mitigate a genetic condition in the animal, mammal, domesticated mammal, cat, dog, horse or human. Such can be done in plant cells to introduce mutations that give rise to favorable phenotypic characteristics such as disease resistance or other favorable plant trait(s).

[0025] In an embodiment, in the gene editing system, the nucleic acid programmable nuclease comprises a Cas9 nuclease, a TnpB nuclease, or a Cas12a nuclease.

[0026] In an embodiment, in the gene editing system, the engineered retron ncRNA comprises: A) a pre-msr sequence having a first complementary region of the retron ncRNA; B) an msr sequence including an msr stem-loop structure; C) an msd sequence including an msd stem-loop structure and a sequence of interest, wherein said msd sequence templates a single strand DNA product (RT-DNA) in the presence of the retron reverse transcriptase; and D) a post-msd sequence having a second complementary region, wherein the first and second complementary regions form an a1/a2 duplex region of the retron ncRNA, wherein the msr stem-loop structure, the msd stem-loop structure, or the a1/a2 duplex comprise a modification which result in increased editing efficiency in the presence of a nucleic acid programmable nuclease that associates with the one or more guide RNAs, and wherein optionally one or more of the guide RNAs of (c) are coupled to the pre-msr sequence, the post-msd sequence, or both the pre-msr sequence and the post-msd sequence. In such an embodiment where the engineered retron ncRNA comprises A), B), C) and D), wherein the sequence of interest can encode a donor polynucleotide comprising an intended edit to be integrated at a target sequence of a cell, wherein the donor polynucleotide is flanked by a 5′ homology arm that hybridizes to a sequence 5′ to the target sequence and a 3′ homology arm that hybridizes to a sequence 3′ to the target sequence. In such an embodiment where the engineered retron ncRNA comprises A), B), C) and D) (either with the sequence of interest encoding a donor polynucleotide or simply being a sequence of interest), the ncRNA has a nucleotide sequence of Table B, or a nucleotide sequence having at least 75%, 80%, 85%, 90%, 95%, 99%, or 100% sequence identity with a sequence from Table B. The donor polynucleotide can be heterologous to a cell. Alternatively, the donor polynucleotide can be endogenous to the cell. For instance, the cell can contain a sequence that is typical for those in a population having a disease state and the donor polynucleotide can be a sequence that is typical for those in the population not having a non-disease state (e.g., the donor can be for a genetic correction or repair of a cell to modify the cell from having a mutation or modification that gives rise to a disease state to having a sequence typical of not having the disease state).

[0027] In an embodiment of the gene editing system, the gene editing system can comprise any combination(s) of the foregoing embodiments of the gene editing system.

[0028] In an embodiment, this disclosure or the inventions herein provide a cell, such as an isolated cell comprising the gene editing system disclosed herein, such as in any of the foregoing paragraphs. In an embodiment the cell, e.g., isolated cell, can be a eukaryotic cell. In an embodiment the eukaryotic cell can be a plant cell or an animal cell or a mammalian cell, e.g., an isolated plant cell or an isolated animal cell or an isolated mammalian cell. In an embodiment, the mammalian cell, e.g., an isolated mammalian cell, can be a human cell. In an embodiment, the cell can be a prokaryotic cell, e.g., a bacterial cell. In such an embodiment where the cell is a bacterial cell, the donor polynucleotide can code for antibiotic susceptibility; and thus, the invention can involve a means for addressing antibiotic resistant bacteria by rendering such bacteria susceptible to antibiotics (and a subject to whom the gene editing system is administered can also then receive antibiotics to which the bacteria are rendered susceptible by the gene editing system).

[0029] In an embodiment, this disclosure or the inventions herein provide a composition comprising: a) the gene editing system disclosed herein, such as in any of the foregoing paragraphs; and b) a pharmaceutically or veterinarily acceptable carrier. In an embodiment, in the composition the delivery vehicle can comprise a lipid nanoparticle comprising: a) one or more ionizable lipids; b) one or more structural lipids; c) one or more PEGylated lipids; and d) one or more phospholipids. In an embodiment, in the composition the one or more ionizable lipids comprises an ionizable lipid set forth in Table 2.

[0030] In an embodiment, this disclosure or the inventions herein provide uses of the gene editing system embodiments and/or the compositions disclosed herein, such as in any of the foregoing paragraphs; for instance, use in modifying a cell or genetically modifying a cell, e.g., a eukaryotic or a prokaryotic cell and/or an animal cell and/or a mammalian and/or a human cell and/or a bacterial cell and/or a plant cell, in vivo, in vitro or ex vivo (e.g., any cell discussed herein wherein the cell comprises an isolated cell). In an embodiment this disclosure or the inventions herein provide uses of the gene editing system embodiments and/or the compositions disclosed herein, such as in any of the foregoing paragraphs; for instance, use in treating or addressing a genetic condition of a subject,

[0031] In an embodiment, this disclosure or the inventions herein provide methods of genetically modifying a cell comprising: contacting a gene editing system as herein discussed, such as in any of the foregoing paragraphs, or a composition as herein discussed, such as in any of the foregoing paragraphs (which comprises a gene editing system as herein discussed, such as in any of the foregoing paragraphs), advantageously a gene editing system that includes a sequence of interest encoding a donor polynucleotide comprising an intended edit to be integrated at a target sequence in a cell, said method comprising contacting the composition or the gene editing system with the cell, thereby delivering the RNA cargo to the cell, wherein: the nucleic acid programmable nuclease forms a complex with the guide RNA, wherein said guide RNA directs the complex to the target sequence; the nucleic acid programmable nuclease creates a double-stranded break in in the target sequence; the retron reverse transcriptase and engineered retron ncRNA create RT DNA that comprises the donor polynucleotide; and the donor polynucleotide becomes integrated at the target sequence; whereby editing the cell is genetically modified. In an embodiment, the cell can be a eukaryotic or a prokaryotic cell or an animal cell or a mammalian cell or a human cell or a bacterial cell or a plant cell.

[0032] Additional exemplary and non-limiting aspects and embodiments of the disclosure are summarized as follows in the form of numbered paragraphs.

1. An engineered nucleic acid construct comprising:
[0033] a) a first polynucleotide encoding a non-coding RNA (ncRNA), said first polynucleotide comprising:
   [0034] 1) an msr locus encoding the msr RNA portion of a multi-copy single-stranded DNA (msDNA); and
   [0035] 2) an msd locus encoding the msd RNA portion of the msDNA; and
[0036] b) one or more heterologous nucleic acids inserted at or within a location selected from: the msd locus, upstream of the msr locus, upstream of the msd locus, and downstream of the msd locus,
[0037] wherein the ncRNA comprises:
[0038] (I) an ncRNA listed in Table B, or an ncRNA having at least 50%, at least 55%, at least 60%, at least 65%, at least 70%, at least 75%, at least 80%, at least 85%, at least 90%, at least 91%, at least 92%, at least 93%, at least 94%, at least 95%, at least 96%, at least 97%, at least 98%, at least 99%, at least 99.1%, at least 99.2%, at least 99.3%, at least 99.4%, at least 99.5%, at least 99.6%, at least 99.7%, at least 99.8% or at least 99.9% sequence identity with an ncRNA listed in Table B; and/or
[0039] (II) an ncRNA having a conserved structure of any one of the ncRNA structures of FIGS. 2-27; and
[0040] wherein the ncRNA optionally excludes any ncRNA associated in nature with any one of the retron reverse transcriptases of Table X.
   2. The engineered nucleic acid construct of paragraph 1, further comprising a second polynucleotide encoding a reverse transcriptase (RT), or a portion thereof, wherein the encoded RT or portion thereof is capable of synthesizing a DNA copy of at least a portion of the msd locus encoding the msDNA.
   3. The engineered nucleic acid construct of paragraph 2,
[0041] wherein the second polynucleotide comprises:
[0042] III) a polynucleotide listed in Table A, or a polynucleotide having at least 50%, at least 55%, at least 60%, at least 65%, at least 70%, at least 75%, at least 80%, at least 85%, at least 90%, at least 91%, at least 92%, at least 93%, at least 94%, at least 95%, at least 96%, at least 97%, at least 98%, at least 99%, at least 99.1%, at least 99.2%, at least 99.3%, at least 99.4%, at least 99.5%, at least 99.6%, at least 99.7%, at least 99.8% or at least 99.9% sequence identity to a polynucleotide listed in Table A; and/or
[0043] IV) encodes a consensus amino acid sequence of Table C, or encodes an amino acid sequence having at least 50%, at least 55%, at least 60%, at least 65%, at least 70%, at least 75%, at least 80%, at least 85%, at least 90%, at least 91%, at least 92%, at least 93%, at least 94%, at least 95%, at least 96%, at least 97%, at least 98%, at least 99%, at least 99.1%, at least 99.2%, at least 99.3%, at least 99.4%, at least 99.5%, at least 99.6%, at least 99.7%, at least 99.8% or at least 99.9% sequence identity to an amino acid sequence listed in Table C; and/or
[0044] wherein the second polynucleotide encodes:
[0045] V) a polypeptide listed in Table A, or a polypeptide having at least 50%, at least 55%, at least 60%, at least 65%, at least 70%, at least 75%, at least 80%, at least 85%, at least 90%, at least 91%, at least 92%, at least 93%, at least 94%, at least 95%, at least 96%, at least 97%, at least 98%, at least 99%, at least 99.1%, at least 99.2%, at least 99.3%, at least 99.4%, at least 99.5%, at least 99.6%, at least 99.7%, at least 99.8% or at least 99.9% sequence identity to a polypeptide listed in Table A; and/or
[0046] VI) a polypeptide comprising a polypeptide consensus sequence listed in Table C, or a polypeptide having at least 50%, at least 55%, at least 60%, at least 65%, at least 70%, at least 75%, at least 80%, at least 85%, at least 90%, at least 91%, at least 92%, at least 93%, at least 94%, at least 95%, at least 96%, at least 97%, at least 98%, at least 99%, at least 99.1%, at least 99.2%, at least 99.3%, at least 99.4%, at least 99.5%, at least 99.6%, at least 99.7%, at least 99.8% or at least 99.9% sequence identity to an amino acid sequence listed in Table C; and/or
[0047] wherein the second polynucleotide optionally does not encode an amino acid sequence listed in Table X.
   4. An engineered nucleic acid construct comprising:
[0048] a) a first polynucleotide encoding a non-coding RNA (ncRNA), said first polynucleotide comprising:
   [0049] 1) an msr locus encoding the msr RNA portion of a multi-copy single-stranded DNA (msDNA); and
   [0050] 2) an msd locus encoding the msd RNA portion of the msDNA;
[0051] b) one or more heterologous nucleic acids inserted at or within a location selected from: the msd locus, upstream of the msr locus, upstream of the msd locus, and downstream of the msd locus; and
[0052] c) a second polynucleotide encoding a reverse transcriptase (RT), or a portion thereof, wherein the encoded RT or portion thereof is capable of synthesizing a DNA copy of at least a portion of the msd locus encoding the msDNA, and,
[0053] wherein the non-coding RNA (ncRNA) of the first polynucleotide optionally has a conserved structure of any one of the ncRNA structures of FIGS. 2-27;
[0054] wherein the second polynucleotide comprises:
[0055] I) a polynucleotide listed in Table A, or a polynucleotide having at least 50%, at least 55%, at least 60%, at least 65%, at least 70%, at least 75%, at least 80%, at least 85%, at least 90%, at least 91%, at least 92%, at least 93%, at least 94%, at least 95%, at least 96%, at least 97%, at least 98%, at least 99%, at least 99.1%, at least 99.2%, at least 99.3%, at least 99.4%, at least 99.5%, at least 99.6%, at least 99.7%, at least 99.8% or at least 99.9% sequence identity to a polynucleotide listed in Table A; and/or
[0056] wherein the second polynucleotide encodes:
[0057] II) a polypeptide listed in Table A, or a polypeptide having at least 50%, at least 55%, at least 60%, at least 65%, at least 70%, at least 75%, at least 80%, at least 85%, at least 90%, at least 91%, at least 92%, at least 93%, at least 94%, at least 95%, at least 96%, at least 97%, at least 98%, at least 99%, at least 99.1%, at least 99.2%, at least 99.3%, at least 99.4%, at least 99.5%, at least 99.6%, at least 99.7%, at least 99.8% or at least 99.9% sequence identity to a polypeptide listed in Table A; and/or
[0058] IV) a polypeptide comprising a polypeptide consensus sequence listed in Table C, or a polypeptide having at least 50%, at least 55%, at least 60%, at least 65%, at least 70%, at least 75%, at least 80%, at least 85%, at least 90%, at least 91%, at least 92%, at least 93%, at least 94%, at least 95%, at least 96%, at least 97%, at least 98%, at least 99%, at least 99.1%, at least 99.2%, at least 99.3%, at least 99.4%, at least 99.5%, at least 99.6%, at least 99.7%, at least 99.8% or at least 99.9% sequence identity to a polypeptide listed in Table C; and
[0059] wherein the second polynucleotide optionally does not encode an amino acid sequence of Table X.
   4a. An engineered nucleic acid construct, comprising:
[0060] 1) an msr locus (that encodes the msr RNA portion of an msDNA);
[0061] 2) an msd locus encoding the msd RNA portion of the msDNA;
[0062] 3) a sequence encoding a retron reverse transcriptase (RT), wherein said msd RNA is capable of being reverse transcribed to form the msDNA by the retron reverse transcriptase (RT); and,
[0063] 4) a heterologous nucleic acid inserted at or within the msd locus, upstream of the msr locus, upstream or downstream of the msd locus;
[0064] wherein the engineered nucleic acid construct optionally has (a) a secondary structure of a wild-type ncRNA of any one of FIGS. 2-27 or
[0065] b) a variant of a), having:
   [0066] i) up to 1, 2, or 3 (e.g., up to 1) nucleotide changes per 10 red lettered-nucleotides;
   [0067] ii) up to 4, 5, or 6 (e.g., up to 1 or 2) nucleotide changes per 10 black lettered-nucleotides; and/or
   [0068] iii) up to 7, 8, or 9 (e.g., up to 3 or 4) nucleotide changes per 10 grey lettered-nucleotides; and/or
   [0069] optionally further comprising:
   [0070] i) 7, 8, 9, or 10 (e.g., 9 or 10) nucleotides present per 10 red-circled nucleotides;
   [0071] ii) 6, 7, 8, 9, or 10 (e.g., 8, 9 or 10) nucleotides present per 10 black-circled nucleotides;
   [0072] iii) 4, 5, 6, 7, 8, 9, or 10 (e.g., 6, 7, 8, 9 or 10) nucleotides present per 10 grey-circled nucleotides; and/or
   [0073] iv) 2, 3, 4, 5, 6, 7, 8, 9, or 10 (e.g., 4, 5, 6, 7, 8, 9, or 10) nucleotides present per 10 white-circled nucleotides.
      5. The engineered nucleic acid construct of any one of paragraphs 1 to 4a, comprising one or more sequence modifications (e.g., an insertion, deletion, and/or substitution of one or more nucleotide(s)) in the msr locus and/or the msd locus that:
[0074] a) modulates (e.g., enhances) reverse transcription, processivity, accuracy/fidelity, and/or production of the msDNA (e.g., in the mammalian cell);
[0075] b) modulates (e.g., reduces) immunogenicity of ncRNA encoded by the engineered retron (e.g., the msr locus and/or the msd locus) in a host (e.g., a host comprising the mammalian cell);
[0076] c) modulates (e.g., inhibits, either permanently or transiently) a function of the msDNA; and/or
[0077] d) modulates (e.g., improves) efficiency of targeted genome editing/engineering.
   6. The engineered nucleic acid construct of any one of paragraphs 1 to 4, wherein said engineered nucleic acid construct has a secondary structure of a wild-type retron encoding a wild-type retron ncRNA encompassed by:
[0078] a) any one of the structures as depicted in FIGS. 2-27, or
[0079] b) a variant of a), having:
   [0080] i) up to 1, 2, or 3 (e.g., up to 1) nucleotide changes per 10 red lettered-nucleotides;
   [0081] ii) up to 4, 5, or 6 (e.g., up to 1 or 2) nucleotide changes per 10 black lettered-nucleotides; and/or
   [0082] iii) up to 7, 8, or 9 (e.g., up to 3 or 4) nucleotide changes per 10 grey lettered-nucleotides; and/or
[0083] optionally further comprising:
   [0084] i) 7, 8, 9, or 10 (e.g., 9 or 10) nucleotides present per 10 red-circled nucleotides;
   [0085] ii) 6, 7, 8, 9, or 10 (e.g., 8, 9 or 10) nucleotides present per 10 black-circled nucleotides;
   [0086] iii) 4, 5, 6, 7, 8, 9, or 10 (e.g., 6, 7, 8, 9 or 10) nucleotides present per 10 grey-circled nucleotides; and/or
   [0087] iv) 2, 3, 4, 5, 6, 7, 8, 9, or 10 (e.g., 4, 5, 6, 7, 8, 9, or 10) nucleotides present per 10 white-circled nucleotides.
      7. The engineered nucleic acid construct of any one of paragraphs 1-6, wherein the nucleic acid construct is engineered by introducing the one or more sequence modifications into a wild-type retron encoding a wild-type ncRNA listed in Table B.
      8. The engineered nucleic acid construct of any one of paragraphs 1-7, wherein the one or more sequence modifications in the ncRNA comprises one or more of:
[0088] (i) a modified (e.g., mutated, reduced, or eliminated) bulge in a1, a2, or both a1 and a2;
[0089] (ii) an extension or shortening of a1, a2, or both a1 and a2;
[0090] (iii) an extension or shortening of a spacer sequence between hairpin loops (e.g., S1, S2, S3, and/or S4);
[0091] (iv) an additional or modified (e.g., mutated or eliminated) bulge in hairpin loops (e.g., L2 and/or L3 (e.g., by removing unpaired bases in the bulge, or by replacing unpaired bases with an equivalent number of base pairs));
[0092] (v) a modified (e.g., extended or shortened) length of hairpin loops (e.g., L1, L2, L3, and/or L4);
[0093] (vi) an alternative L1 and/or L2 having complement, reverse, or reverse complement sequences;
[0094] (vii) a modified (e.g., increased) number of unpaired bases at the tip of hairpin loops (e.g., L1, L2, L3, and/or L4);
[0095] (viii) a modified (e.g., increased or decreased) GC content in hairpin loops (e.g., L1, L2, L3, and/or L4);
[0096] (ix) an insertion of the heterologous nucleic acid in spacer sequences between hairpin loops (e.g., S1, S2, S3 and/or S4), or at the tip of hairpin loops (e.g., L1, L2, L3, and/or L4);
[0097] (x) a deletion of one or more hairpin loops (e.g., L1, L2, L3 and/or L4);
[0098] (xi) an addition of a new loop in a spacer sequence between hairpin loops (e.g., S1, S2, S3, and/or S4);
[0099] (xii) circularization of the ncRNA with the 5′ end and the 3′ end of the ncRNA being connected either directly, or via a spacer sequence;
[0100] (xiii) a repositioned branching guanosine capable of initiating reverse transcription priming;
[0101] (xiv) a staggered end sequence that reduces immunogenicity of the retron ncRNA, created by, e.g., adding or removing the 5′ a1 nucleotides and/or the 3′ a2 nucleotides; and/or,
[0102] (xv) an antisense sequence complementary to a CRISPR/Cas guide RNA (gRNA) sequence encoded by the heterologous nucleic acid, wherein the antisense sequence hybridizes to and inhibits said gRNA in the encoded retron ncRNA, and wherein said antisense sequence is removed upon reverse transcription of the msDNA.
   9. The engineered nucleic acid construct of any one of paragraphs 1-8, wherein the one or more heterologous nucleic acid sequences comprise:
[0103] a) a heterologous nucleic acid (such as the coding sequence for an RNA aptamer or a ribozyme) inserted into the msr locus or the msd locus (such as in an S region (e.g., S1, S2, S3 and/or S4), or the tip of an L region (e.g., L1, L2, L3 and/or L4), or upstream or downstream of either the msr locus or the msd locus; or
[0104] b) a first heterologous nucleic acid inserted into the msd locus, and a second heterologous nucleic acid inserted either upstream of the msr locus or downstream of the msd locus, wherein the second heterologous nucleic acid encodes a guide RNA.
   10. The engineered nucleic acid construct of any one of paragraphs 1-9, wherein said heterologous nucleic acid encodes:
[0105] (a) a protein or peptide of interest, or wherein said heterologous nucleic acid comprises;
[0106] (b) a DNA donor template sequence;
[0107] (c) a functional DNA element selected from a promoter, an enhancer, a protein binding sequence, a methylation site, a homology region for assisting gene editing, and the like; or
[0108] (d) a coding sequence for a functional RNA element selected from a guide RNA and a ncRNA.
   11. The engineered nucleic acid construct of paragraph 10, wherein said protein or peptide of interest comprises a therapeutic protein useful in treating a disease.
   12. The engineered nucleic acid construct of paragraph 10, wherein said DNA donor template sequence corrects/repairs/removes a mutation at the target genome site.
   13. The engineered nucleic acid construct of any one of paragraphs 1-12, further comprising or encoding a sequence-specific nuclease (such as a CRISPR/Cas effector enzyme, a ZFN, a TALEN, a meganuclease, TnpB, IscB, or a restriction endonuclease (RE)), and/or a DNA-repair modulating biomolecule.
   13b. The engineered nucleic acid construct of paragraphs 1-13 wherein the engineered nucleic acid is an all-RNA component system.
   13c. The engineered nucleic acid construct of paragraphs 1-13 wherein the engineered nucleic acid is an all-DNA molecule system.
   14. The engineered nucleic acid construct of paragraph 13, wherein the sequence-specific nuclease is fused to the RT, optionally via a flexible linker (e.g., a flexible linker comprising Gly and Ser rich sequences such as G4S repeats or GS repeats) or by a generally disordered protein sequence (such as unstructured hydrophilic, biodegradable protein polymer, e.g., an XTEN peptide polymer).
   15. The engineered nucleic acid construct of paragraph 13 or 14, wherein the nuclease is a CRISPR/Cas effector enzyme that forms a complex with a guide RNA (gRNA) recognizing a target sequence, wherein the gRNA is linked to the ncRNA and/or the msDNA, either directly or through a linker/spacer polynucleotide.
   16. The engineered nucleic acid construct of paragraph 13, wherein the DNA-repair modulating biomolecule is a regulatory protein that modulates (e.g., enhances) HDR, and the regulatory protein is fused to the RT or to the sequence-specific nuclease, optionally via a flexible linker (e.g., the flexible linker comprising Gly and Ser rich sequences such as G4S repeats or GS repeats) or by a generally disordered protein sequence (such as unstructured hydrophilic, biodegradable protein polymer, e.g., an XTEN peptide polymer).
   17. A vector system comprising one or more vectors comprising the engineered nucleic acid construct of any one of paragraphs 1-16, wherein the vector system is optionally all-RNA.
   18. The vector system of paragraph 17, wherein the msr locus, the msd locus, and the polynucleotide encoding the RT are comprised within the same vector.
   19. The vector system of paragraph 17 or 18, wherein the same vector further comprises a promoter operably linked to the msr locus and/or the msd locus.
   20. The vector system of paragraph 19, wherein the promoter is further operably linked to the polynucleotide encoding the RT.
   21. A vector system comprising one or more vectors, comprising the engineered nucleic acid construct of paragraph 1 or 2, wherein the vector system further comprises a second polynucleotide encoding a reverse transcriptase (RT), or a portion thereof, wherein the encoded RT is capable of synthesizing a DNA copy of at least a portion of the msd locus encoding the msDNA, and wherein the msr locus, the msd locus, and the second polynucleotide encoding the RT are provided by at least two different vectors.
   22. The vector system of paragraph 21, wherein:
   [0109] a) the second polynucleotide comprises:
      [0110] i) a polynucleotide listed in Table A, or a polynucleotide having at least 50%, at least 55%, at least 60%, at least 65%, at least 70%, at least 75%, at least 80%, at least 85%, at least 90%, at least 91%, at least 92%, at least 93%, at least 94%, at least 95%, at least 96%, at least 97%, at least 98%, at least 99%, at least 99.1%, at least 99.2%, at least 99.3%, at least 99.4%, at least 99.5%, at least 99.6%, at least 99.7%, at least 99.8% or at least 99.9% sequence identity to a polynucleotide listed in Table A; and/or
   [0111] b) the second polynucleotide encodes:
      [0112] i) a polypeptide listed in Table A, or a polypeptide having at least 50%, at least 55%, at least 60%, at least 65%, at least 70%, at least 75%, at least 80%, at least 85%, at least 90%, at least 91%, at least 92%, at least 93%, at least 94%, at least 95%, at least 96%, at least 97%, at least 98%, at least 99%, at least 99.1%, at least 99.2%, at least 99.3%, at least 99.4%, at least 99.5%, at least 99.6%, at least 99.7%, at least 99.8% or at least 99.9% sequence identity to a polypeptide listed in Table A; and/or
      [0113] ii) a polypeptide listed in Table C, or a polypeptide having at least 50%, at least 55%, at least 60%, at least 65%, at least 70%, at least 75%, at least 80%, at least 85%, at least 90%, at least 91%, at least 92%, at least 93%, at least 94%, at least 95%, at least 96%, at least 97%, at least 98%, at least 99%, at least 99.1%, at least 99.2%, at least 99.3%, at least 99.4%, at least 99.5%, at least 99.6%, at least 99.7%, at least 99.8% or at least 99.9% sequence identity to a polypeptide listed in Table C; and
   [0114] wherein the second polynucleotide optionally does not encode a polypeptide listed in Table X.
      23. The vector system of paragraph 21 or 22, wherein the polynucleotide encoding the RT is provided in trans with respect to the msr gene and/or the msd gene.
      24. The vector system of any one of paragraphs 17-23, wherein the one or more vectors comprise a viral vector.
      25. The vector system of paragraph 24, wherein the viral vector is a retroviral vector, a lentiviral vector, an adenoviral vector, an adeno-associated viral vector, a vaccinia viral vector, a poxviral vector, or a herpes simplex viral vector.
      26. The vector system of any one of paragraphs 17-23, wherein the one or more vectors comprise a non-viral vector.
      27. The vector system of paragraph 26, wherein the non-viral vector comprises a plasmid.
      28. The vector system of paragraph 26, wherein the non-viral vector comprises a liposome, a lipid nanoparticle (LNP), a cationic polymer, a vesicle, or a gold nanoparticle.
      29. The vector system of any one of paragraphs 17-28, comprising a vector encoding a sequence-specific nuclease.
      30. The vector system of paragraph 29, wherein the sequence-specific nuclease comprises an RNA-guided sequence-specific nuclease (e.g., a CRISPR/Cas effector enzyme, an engineered RNA-guided FokI-nuclease (e.g., dCas-FokI), an RNA-guided DNA endonuclease, TnpB, IscB, or a transposon-associated nuclease), or a non-RNA-guided sequence-specific nuclease (e.g., a meganuclease, a zinc finger nuclease (ZFN), a TALE nuclease (TALEN), or a restriction endonuclease (RE)).
      31. The vector system of paragraph 30, wherein the Cas effector enzyme is a Class 1, Type I, II, or III Cas; a Class 2, Type II Cas (e.g., Cas9); or a Class 2, Type V Cas (e.g., Cpf1).
      32. The vector system of paragraph 30, wherein:
   [0115] 1) the RNA-guided sequence-specific nuclease comprises the CRISPR/Cas effector enzyme, the engineered RNA-guided FokI-nuclease (e.g., dCas-FokI), the RNA-guided DNA endonuclease, TnpB, IscB, IsrB, or the transposon-associated nuclease; or,
   [0116] 2) non-RNA-guided sequence-specific nuclease comprises the meganuclease, the zinc finger nuclease (ZFN), the TALE nuclease (TALEN), or the restriction endonuclease (RE).
      33. The vector system of any one of paragraphs 17-32, further comprising a vector encoding a homologous recombination enhancer protein.
      34. An RNA molecule encoded by the engineered nucleic acid construct of any one of paragraphs 1-16.
      35. An engineered nucleic acid-enzyme construct comprising:
   [0117] a) a non-coding RNA (ncRNA) comprising:
      [0118] i) an msr locus encoding the msr RNA portion of a multi-copy single-stranded DNA (msDNA); and
      [0119] ii) an msd locus encoding the msd RNA portion of the msDNA;
   [0120] b) a heterologous nucleic acid inserted at or within a location selected from: the msd locus, upstream of the msr locus, upstream of the msd locus, and downstream of the msd locus; and
   [0121] c) a sequence encoding a reverse transcriptase (RT), or a domain thereof comprising:
      [0122] i) a polypeptide listed in Table A, or a polypeptide having at least 50%, at least 55%, at least 60%, at least 65%, at least 70%, at least 75%, at least 80%, at least 85%, at least 90%, at least 91%, at least 92%, at least 93%, at least 94%, at least 95%, at least 96%, at least 97%, at least 98%, at least 99%, at least 99.1%, at least 99.2%, at least 99.3%, at least 99.4%, at least 99.5%, at least 99.6%, at least 99.7%, at least 99.8% or at least 99.9% sequence identity to a polypeptide listed in Table A; and/or
      [0123] ii) a polypeptide listed in Table C, or a polypeptide having at least 50%, at least 55%, at least 60%, at least 65%, at least 70%, at least 75%, at least 80%, at least 85%, at least 90%, at least 91%, at least 92%, at least 93%, at least 94%, at least 95%, at least 96%, at least 97%, at least 98%, at least 99%, at least 99.1%, at least 99.2%, at least 99.3%, at least 99.4%, at least 99.5%, at least 99.6%, at least 99.7%, at least 99.8% or at least 99.9% sequence identity to a polypeptide listed in Table C; and
   [0124] wherein, the RT optionally does not comprise a polypeptide listed in Table X.
      36. An engineered nucleic acid-enzyme construct comprising:
   [0125] a) a non-coding RNA (ncRNA) comprising:
      [0126] i) an msr locus encoding the msr RNA portion of a multi-copy single-stranded DNA (msDNA); and
      [0127] ii) an msd locus encoding the msd RNA portion of the msDNA;
   [0128] wherein the ncRNA comprises:
      [0129] i) an ncRNA listed in Table B, or an ncRNA having at least 50%, at least 55%, at least 60%, at least 65%, at least 70%, at least 75%, at least 80%, at least 85%, at least 90%, at least 91%, at least 92%, at least 93%, at least 94%, at least 95%, at least 96%, at least 97%, at least 98%, at least 99%, at least 99.1%, at least 99.2%, at least 99.3%, at least 99.4%, at least 99.5%, at least 99.6%, at least 99.7%, at least 99.8% or at least 99.9% sequence identity to an ncRNA listed in Table B; and/or
      [0130] ii) an ncRNA having a conserved structure of any one of the ncRNA structures of FIGS. 2-27; and
      [0131] wherein the ncRNA optionally excludes any ncRNA associated in nature with any one of the retron reverse transcriptases of Table X;
   [0132] b) a heterologous nucleic acid inserted at or within a location selected from: the msd locus; upstream of the msr locus; upstream of the msd locus; and downstream of the msd locus; and
   [0133] c) a reverse transcriptase (RT), or a portion thereof, wherein the RT is capable of synthesizing a DNA copy of at least a portion of the msd locus encoding the msDNA.
      37. An engineered nucleic acid-enzyme construct comprising:
   [0134] a) a non-coding RNA (ncRNA) comprising:
      [0135] i) an msr locus encoding the msr RNA portion of a multi-copy single-stranded DNA (msDNA); and
      [0136] ii) an msd locus encoding the msd RNA portion of the msDNA;
   [0137] wherein, the ncRNA comprises:
      [0138] i) an ncRNA listed in Table B, or an ncRNA having at least 50%, at least 55%, at least 60%, at least 65%, at least 70%, at least 75%, at least 80%, at least 85%, at least 90%, at least 91%, at least 92%, at least 93%, at least 94%, at least 95%, at least 96%, at least 97%, at least 98%, at least 99%, at least 99.1%, at least 99.2%, at least 99.3%, at least 99.4%, at least 99.5%, at least 99.6%, at least 99.7%, at least 99.8% or at least 99.9% sequence identity to an ncRNA listed in Table B; and/or
      [0139] ii) an ncRNA having a conserved structure of any one of the ncRNA structures of FIGS. 2-27; and
      [0140] wherein the ncRNA optionally excludes any ncRNA associated in nature with any one of the retron reverse transcriptases of Table X;
   [0141] b) a heterologous nucleic acid inserted at or within a location selected from: the msd locus, upstream of the msr locus, upstream of the msd locus, and downstream of the msd locus; and
   [0142] c) a reverse transcriptase (RT) or a domain thereof:
   [0143] wherein the RT comprises:
   [0144] i) an RT listed in Table A, or an RT having at least 50%, at least 55%, at least 60%, at least 65%, at least 70%, at least 75%, at least 80%, at least 85%, at least 90%, at least 91%, at least 92%, at least 93%, at least 94%, at least 95%, at least 96%, at least 97%, at least 98%, at least 99%, at least 99.1%, at least 99.2%, at least 99.3%, at least 99.4%, at least 99.5%, at least 99.6%, at least 99.7%, at least 99.8% or at least 99.9% sequence identity to an RT listed in Table A; and/or
   [0145] ii) a consensus sequence listed in Table C, or a polypeptide having at least 50%, at least 55%, at least 60%, at least 65%, at least 70%, at least 75%, at least 80%, at least 85%, at least 90%, at least 91%, at least 92%, at least 93%, at least 94%, at least 95%, at least 96%, at least 97%, at least 98%, at least 99%, at least 99.1%, at least 99.2%, at least 99.3%, at least 99.4%, at least 99.5%, at least 99.6%, at least 99.7%, at least 99.8% or at least 99.9% sequence identity to an amino acid sequence listed in Table C; and
   [0146] wherein the RT does not optionally comprise an RT listed in Table X.
      38. An isolated host cell comprising the engineered nucleic acid construct of any one of paragraphs 1-16, the vector system of any of paragraphs 17-33, the RNA molecule of paragraph 34, or the engineered nucleic acid-enzyme construct of any one of paragraphs 35-37.
      39. The isolated host cell of paragraph 38, wherein the host cell is a prokaryotic, archeon, or eukaryotic host cell.
      40. The isolated host cell of paragraph 38, wherein the eukaryotic host cell is a mammalian host cell.
      41. The isolated host cell of paragraph 39, wherein the eukaryotic host cell is a non-human host cell.
      42. The isolated host cell of paragraph 40, wherein the mammalian host cell is a human host cell.
      43. The isolated host cell of any one of paragraphs 38-42, wherein the host cell is an artificial cell or genetically modified cell.
      44. A pharmaceutical composition comprising:
   [0147] a) the engineered nucleic acid construct of any one of paragraphs 1-16, ncRNA encoded by the engineered nucleic acid construct of any one of paragraphs 1-16, the vector system of any one of paragraphs 17-33, the RNA molecule of paragraph 34, the engineered nucleic acid-enzyme construct of any one of paragraphs 35-37, and/or the isolated host cell of any one of paragraphs 38-43; and
   [0148] b) a pharmaceutically acceptable carrier.
      45. A pharmaceutical composition comprising:
   [0149] a) a lipid nanoparticle (LNP); and
   [0150] b) the engineered nucleic acid construct of any one of paragraphs 1-16, ncRNA encoded by the engineered nucleic acid construct of any one of paragraphs 1-16, the vector system of any one of paragraphs 17-33, the RNA molecule of paragraph 34, and/or the engineered nucleic acid-enzyme construct of any one of paragraphs 35-37.
      46. The pharmaceutical composition of paragraph 45, wherein the LNP encapsulates the engineered nucleic acid construct, ncRNA, vector system, RNA molecule, and/or engineered nucleic acid-enzyme construct.
      47. The pharmaceutical composition of paragraph 45 or 46, wherein the lipid nanoparticle comprises:
   [0151] a) one or more ionizable lipids;
   [0152] b) one or more structural lipids;
   [0153] c) one or more PEGylated lipids; and
   [0154] d) one or more phospholipids.
      48. The pharmaceutical composition of paragraph 47, wherein the one or more ionizable lipids is selected from the group consisting of those disclosed in Table 2.
      49. The pharmaceutical composition of paragraph 47 or 48, wherein the one or more structural lipids are selected from the group consisting of cholesterol, fecosterol, beta sitosterol, sitosterol, ergosterol, campesterol, stigmasterol, brassicasterol, tomatidine, tomatine, ursolic acid, alpha-tocopherol, prednisolone, dexamethasone, prednisone, and hydrocortisone.
      50. The pharmaceutical composition of any one of paragraphs 47-49, wherein the one or more PEGylated lipids are selected from the group consisting of PEG-c-DOMG, PEG-DMG, PEG-DLPE, PEG-DMPE, PEG-DPPC, and PEG-DSPE.
      51. The pharmaceutical composition of any one of paragraphs 47-50, wherein the one or more phospholipids are selected from the group consisting of 1,2-distearoyl-sn-glycero-3-phosphocholine (DSPC), 1,2-dioleoyl-sn-glycero-3-phosphoethanolamine (DOPE), 1,2-dilinoleoyl-sn-glycero-3-phosphocholine (DLPC), 1,2-dimyristoyl-sn-glycero-phosphocholine (DMPC), 1.2-dioleoyl-sn-glycero-3-phosphocholine (DOPC), 1,2-dipalmitoyl-sn-glycero-3-phosphocholine (DPPC), 1,2-diundecanoyl-sn-glycero-phosphocholine (DUPC), 1-palmitoyl-2-oleoyl-sn-glycero-3-phosphocho line (POPC), 1,2-di-O-octadecenyl-sn-glycero-3-phosphocholine (18:0 Diether PC), 1-oleoyl-2-cholesterylhemisuc cinoyl-sn-glycero-3-phosphocholine (OChemsPC), 1-hexadecyl-sn-glycero-3-phosphocholine (C16 Lyso PC), 1,2-dilinolenoyl-sn-glycero-3-phosphocholine, 1,2-diarachidonoyl-sn-glycero-3-phosphocholine, 1,2-didocosahexaenoyl-sn-glycero-3-phosphocholine, 1,2-diphytanoylsn-glycero-3-phosphoethanolamine (ME 16.0 PE), 1,2-distearoyl-sn-glycero-3-phosphoethanolamine, 1,2-dilinoleoyl-sn-glycero-3-phosphoethanolamine, 1,2-dilinolenoyl-sn-glycero-3-phosphoethanolamine, 1,2-diarachidonoyl-sn-glycero-3-phosphoethanolamine, 1,2-didocosahexaenoyl-sn-glycero-3-phosphoethanolamine, 1,2-dioleoyl-sn-glycero-3-phospho-rac-(1-glycerol) sodium salt (DOPG), and sphingomyelin.
      52. The pharmaceutical composition of any one of paragraphs 47-51, wherein the lipid nanoparticle comprises about 48.5 mol % ionizable lipid, about 10 mol % phospholipid, about 40 mol % structural lipid, and about 1.5 mol % of PEG lipid.
      53. The pharmaceutical composition of any one of paragraphs 47-52, wherein the lipid nanoparticle comprises about 48.5 mol % ionizable lipid, about 10 mol % phospholipid, about 39 mol % structural lipid, and about 2.5 mol % of PEG lipid.
      54. The pharmaceutical composition of any one of paragraphs 47-53, wherein the LNP further comprises a targeting moiety operably connected to the LNP.
      55. The pharmaceutical composition of any one of paragraphs 47-54, wherein the LNP further comprises one or more additional components selected from the group consisting of DDAB, EPC, 14PA, 18BMP, DODAP, DOTAP, and C12-200.
      56. The pharmaceutical composition of paragraph 45, wherein the lipid nanoparticle comprises at least one cationic lipid selected from the group consisting of: a lipid in Table 2, a lipid having a structure of Formula (I), a lipid having a structure of Formula (II), a lipid having a structure of Formula (III), a lipid having a structure of Formula (IV), a lipid having a structure of Formula (V), a lipid having a structure of Formula (VI), and combinations thereof.
      57. A kit comprising the engineered nucleic acid construct of any one of paragraphs 1-16, ncRNA encoded by the engineered nucleic acid construct of any one of paragraphs 1-16, the vector system of any one of paragraphs 17-33, the RNA molecule of paragraph 34, the engineered nucleic acid-enzyme construct of any one of paragraphs 35-37, the host cell of any one of paragraphs 38-43, or the pharmaceutical composition of any one of paragraphs 44-56, and instructions for genetically modifying a cell with said engineered nucleic acid construct, ncRNA, vector system, host cell, or pharmaceutical composition.
      58. A method of modifying a target DNA sequence in a host (e.g., mammalian) cell, the method comprising introducing into the mammalian cell the engineered nucleic acid construct of any one of paragraphs 1-16, ncRNA encoded by the engineered nucleic acid construct of any one of paragraphs 1-16, the vector system of any one of paragraphs 17-33, the RNA molecule of paragraph 34, the engineered nucleic acid-enzyme construct of any one of paragraphs 35-37, or the pharmaceutical composition of any one of paragraphs 44-56, to allow production of the msDNA in the host (e.g., mammalian) cell, wherein the heterologous nucleic acid in the msDNA is integrated into the genome of the host (e.g., mammalian) cell at the target DNA sequence by homology-dependent recombination.
      59. The method of paragraph 58, wherein the modifying comprises introducing an insertion, deletion and/or substitution into the target DNA sequence.
      60. A method of treating a disease or condition in a subject in need thereof, the method comprising administering a therapeutically effective amount of the engineered nucleic acid construct of any one of paragraphs 1-16, ncRNA encoded by the engineered nucleic acid construct of any one of paragraphs 1-16, the vector system of any one of paragraphs 17-33, the RNA molecule of paragraph 34, the engineered nucleic acid-enzyme construct of any one of paragraphs 35-37, the host cell of any one of paragraphs 38-43, or the pharmaceutical composition of any one of paragraphs 44-56 to the subject, thereby treating the disease or condition in the subject.
      61. A method of treating a disease or condition in a subject in need thereof, the method comprising administering a therapeutically effective amount of the host cell of any one of paragraphs 38-43 to the subject, thereby treating the disease or condition in the subject.
      62. The method of paragraph 61, wherein the host cell is autologous to the subject.
      63. The method of paragraph 61, wherein the host cell is allogeneic to the subject.

### BRIEF DESCRIPTION OF THE DRAWINGS

[0155] The following drawings form part of the present specification and are included to further demonstrate certain aspects of the present disclosure, which can be better understood by reference to one or more of these drawings in combination with the detailed description of specific embodiments presented herein.

[0156] FIG. 1A is a schematic that depicts naturally occurring retrons from genomic DNA stage through production of the msDNA chimeric microsatellite molecule. Retrons are encoded in the bacterial genome and comprise a non-coding RNA (ncRNA) portion and a portion encoding a specialized reverse transcriptase (RT). The ncRNA and the RT initially are transcribed from the retron DNA as a single polycistronic message. The initial transcript is processed resulting in the removal or separation of the transcript encoding the retron RT. The remaining transcript is the ncRNA, which undergoes folding to form a secondary structure having several characteristic stem-loops and a duplex formed between the 5′ and 3′ regions of the ncRNA (i.e., the a1/a2 duplex). The folded ncRNA is recognized by the accompanying RT which is separately translated and provided in trans. The translated RT typically recognizes certain secondary structures in the ncRNA, and binds the RNA template downstream from the msd region. The RT initiates reverse transcription of the RNA towards its 5′ end, starting from the 2′-end of a conserved guanosine (G) residue found immediately after a double-stranded RNA structure (the a1/a2 region) within the ncRNA. A portion (i.e., the msd region) of the ncRNA serves as a template for reverse transcription, and reverse transcription terminates before reaching the msr locus. During reverse transcription, cellular RNase H degrades the segment of the ncRNA that serves as template, but not other parts of the ncRNA. The result of the reverse transcription, the msDNA (lower right of schematic), remains covalently attached to the RNA template via the 2′-5′ phosphodiester bond, and base-pairs with the RNA template using the 3′ end of the msDNA.

[0157] FIG. 1B is a schematic depicting an embodiment of a recombinant retron contemplated by this disclosure. In this embodiment, a nucleic acid molecule comprises a nucleotide sequence encoding a retron ncRNA region (the msr/msd region) is depicted at the top left. The msr region has been modified by introducing one or more nucleotide modifications (e.g., a nucleotide substitution, deletion, or insertion). For example, it may be desirable to introduce one or more nucleotide substitutions in the msr to enhance functionality (e.g., binding of the corresponding ncRNA to RT, improved stability, improved folding, etc.). The modified msr is referred to as msr′. In addition, the msd has been modified by introducing a heterologous nucleotide sequence encoding an HDR donor template. Lastly, the retron DNA has been modified to introduce a nucleotide sequence encoding a guide RNA at the 3′ end of the retron DNA sequence. is configured on a DNA vector (e.g., a plasmid). The DNA is shown to be transcribed as a polycistronic message that includes the msr′/msd′ region (forming the ncRNA) which is fused at its 3′ end to the guide RNA (in other embodiments, the guide RNA could be fused to the 5′ end of the retron ncRNA. This intermediate is shown to form a complex with a reverse transcriptase provided in trans (e.g., by way of a separate expression vector or delivered mRNA). The top right schematic shows the formation of a complex between the recombinant ncRNA and the RT and the beginning of reverse transcription from the covalently-linked conserved guanosine (G) (i.e., the “priming G” or “priming guanosine”) using the msd RNA as a template sequence. Following the completion of reverse transcription and RNaseH degradation of the template RNA sequence, a recombinant msDNA is formed which comprises three modifications, as shown: (a) a guide RNA linked to the 3′ end of the msDNA, (b) a nucleotide change in the msr′, and (c) the reverse-transcribed single-strand DNA comprises a region that is an HDR donor template. Such a recombinant msDNA could then facilitate various genome modification applications in the cell, including genome editing with an RNA-guided nuclease provided to the cell in trans.

[0158] FIG. 1C is a schematic depicting a recombinant retron-based genome editing system described herein. In the case of genome editing involving an RNA-guided nuclease, the components of such a system may include (a) a guide RNA provided in cis (e.g., fused to the recombinant retron msDNA) and/or in trans (e.g., separately expressed in a cell), (b) a recombinant ncRNA (including at least a sequence encoding an HDR donor template and optionally a guide RNA fused to the ncRNA), (c) a reverse transcriptase, and (d) a programmable nuclease. These components are provided to a cell in the form of DNA and/or RNA and/or protein by a delivery means (e.g., LNPs, liposomes, virus-based delivery, or passive/active transport). Once inside the cell, the recombinant msDNA is formed. The msDNA and the programmable nuclease translocate to the nuclease to conduct gene editing at a target DNA site, thereby producing an edited DNA target.

[0159] FIG. 1D provides a simplified schematic of a the natural lifecycle of a retron. Retrons typically comprise a reverse transcriptase (RT) and two non-coding contiguous inverted sequences (msr and msd) transcribed as a single RNA that is folded into a specific secondary structure. The conserved NAXXH motif and VTG triplet in retron RTs are indicated. The RT binds downstream from the msd locus in the RNA, initiating reverse transcription of the RNA template towards its 5′ end, assisted by the 2′OH group present in a conserved branching G residue acting as a primer. Reverse transcription halts before the msr region is reached, and the resulting msDNA remains covalently attached to the RNA template via a 2′-5′ phosphodiester bond and base-pairing of the 3′ ends of the molecules.

[0160] FIG. 1E provides a detailed representation of the natural biological pathway of a retron in a cell, concluding with the generation of the msDNA satellite molecule. This figure parallels FIG. 1D but more completely depicts the stages of msDNA production. (1) depicts the retron locus which includes an ncRNA locus having an msr locus and a msd locus (both of which are non-coding) and a reverse transcriptase (RT) locus. The ncDNA locus and the RT locus are transcribed as a single RNA transcript, which is depicted in (2). The colors representing each component in (1) are carried through each of stages (2) through (6). Stages (3) and (4) depict the folding of the ncRNA portion into a series of stem loops, wherein the 5′ end and the 3′ ends of the ncRNA form a duplex. In addition, the position of the conserved branching guanosine residue having a 2′OH group is show. The branching guanosine serves as a future priming site for the reverse transcriptase. Stage (4) further shows that the region of the transcript encoding the reverse transcriptase is removed, separately being translated to produce the reverse transcript as enzyme. In stage (5), the reverse transcriptase associates with the folded ncRNA and begins polymerization of a single strand of DNA (i.e., the reverse transcription product) from the primer site (i.e., the conserved branching guanosine residue having the 2′OH end) and using the msd RNA sequence as a template. Reverse transcription terminates at the msr region. The msd RNA template is exonucleotically removed, thereby resulting in a chimeric molecule comprising the msr RNA region which is covalently joined to the ssDNA transcription product through covalent linkage to the conserved guanosine primer residue. There is also a short duplex region that forms between the 3′ end of the msr RNA and the 3′ of the ssDNA reverse transcript product. The complete molecule is referred to as the “msDNA.”

[0161] FIG. 1F is a schematic depicting that the herein disclosed recombinant retron-based genome modification systems may be implemented as (a) cell recorder systems, (b) genome editing systems, and (c) recombineering systems. These uses are not intended to be limiting.

[0162] FIG. 1G is a schematic depicting various configurations contemplated for the recombinant retron disclosed herein. (1) shows the operonic structure of a wild type retron; (2) shows the operonic structure of a recombinant retron configured to encode an HDR donor template in the final msDNA molecule; (3) shows (2) but further modified to encode a guide RNA at the 3′ end of the retron; (4) shows (2) but further modified to encode a guide RNA in trans.

[0163] FIG. 1H is a schematic that emphasizes that any suitable configuration for presenting the components of the recombinant retron-based genome modification systems disclosed herein to a cell are contemplated, including where the RT and/or the programmable nuclease are provided in trans relative to the retron ncRNA. In some embodiments, the RT and the programmable nuclease may be provided as a fusion protein.

[0164] FIG. 1I depicts that the RT and programmable nuclease may be provided as fusion proteins (top, middle) or provided separate from one another.

[0165] FIG. 1J depicts that nuclear localization signals may be engineered into the polypeptides of the disclosure (e.g., a RNA-guide nuclease) to facilitate translocation into the nuclease of cell where editing occurs.

[0166] FIG. 1K is a schematic (not to scale) representation depicting an embodiment of genome editing, in which double-stranded break (DSB) created by a suitable nuclease (such as a CRISPR/Cas effector enzyme, a ZFN, TALEN, meganuclease, TnpB, IscB, or restriction enzymes (Res)) promotes the insertion of a donor or template sequence (shown here as a “marker” flanked by homologous sequences matching those flanking the DSB, provided on a “donor vector”).

[0167] FIG. 2 is a schematic representation of a consensus secondary structure of a retron ncRNA msr/msd of Type IA/IIA1 retron produced by computational structural alignment of ncRNA sequences from Table B as described in Example 3.

[0168] The colored dots represents the probability a base is at that location (e.g., red circle represents the presence of a base in 97% of the cases, black represents the presence of a base in 90-97% of the cases, grey represents the presence of a base in 75-90% of the cases, and white represents the presence of a base in 50-75% of the cases), as opposed to a gap (no base), whereas the colored letters represent bases that are conserved to different degrees (e.g., with red representing 97%+ conserved, black being 90%+ conserved, and grey at least 75% conserved). Each highlighted base-pair represents a significantly covarying basepairs.

[0169] FIG. 3 is a schematic representation of a consensus secondary structure of a retron ncRNA msr/msd of Type IB1 retrons produced by computational structural alignment of ncRNA sequences from Table B as described in Example 3.

[0170] The colored dots represents the probability a base is at that location (e.g., red circle represents the presence of a base in 97% of the cases, black represents the presence of a base in 90-97% of the cases, grey represents the presence of a base in 75-90% of the cases, and white represents the presence of a base in 50-75% of the cases), as opposed to a gap (no base), whereas the colored letters represent bases that are conserved to different degrees (e.g., with red representing 97%+ conserved, black being 90%+ conserved, and grey at least 75% conserved). Each highlighted base-pair represents a significantly covarying basepair.

[0171] FIG. 4 is a schematic representation of a consensus secondary structure of a retron ncRNA msr/msd of Type IB2 retrons produced by computational structural alignment of ncRNA sequences from Table B as described in Example 3.

[0172] The colored dots represents the probability a base is at that location (e.g., red circle represents the presence of a base in 97% of the cases, black represents the presence of a base in 90-97% of the cases, grey represents the presence of a base in 75-90% of the cases, and white represents the presence of a base in 50-75% of the cases), as opposed to a gap (no base), whereas the colored letters represent bases that are conserved to different degrees (e.g., with red representing 97%+ conserved, black being 90%+ conserved, and grey at least 75% conserved). Each highlighted base-pair represents a significantly covarying basepair.

[0173] FIG. 5 is a schematic representation of a consensus secondary structure of a retron ncRNA msr/msd of Type IC retrons produced by computational structural alignment of ncRNA sequences from Table B as described in Example 3.

[0174] The colored dots represents the probability a base is at that location (e.g., red circle represents the presence of a base in 97% of the cases, black represents the presence of a base in 90-97% of the cases, grey represents the presence of a base in 75-90% of the cases, and white represents the presence of a base in 50-75% of the cases), as opposed to a gap (no base), whereas the colored letters represent bases that are conserved to different degrees (e.g., with red representing 97%+ conserved, black being 90%+ conserved, and grey at least 75% conserved). Each highlighted base-pair represents a significantly covarying basepair.

[0175] FIG. 6 is a schematic representation of a consensus secondary structure of a retron ncRNA msr/msd of Type HA other retrons produced by computational structural alignment of ncRNA sequences from Table B as described in Example 3.

[0176] The colored dots represents the probability a base is at that location (e.g., red circle represents the presence of a base in 97% of the cases, black represents the presence of a base in 90-97% of the cases, grey represents the presence of a base in 75-90% of the cases, and white represents the presence of a base in 50-75% of the cases), as opposed to a gap (no base), whereas the colored letters represent bases that are conserved to different degrees (e.g., with red representing 97%+ conserved, black being 90%+ conserved, and grey at least 75% conserved). Each highlighted base-pair represents a significantly covarying basepair.

[0177] FIG. 7 is a schematic representation of a consensus secondary structure of a retron ncRNA msr/msd of Type IIA2 retrons produced by computational structural alignment of ncRNA sequences from Table B as described in Example 3.

[0178] The colored dots represents the probability a base is at that location (e.g., red circle represents the presence of a base in 97% of the cases, black represents the presence of a base in 90-97% of the cases, grey represents the presence of a base in 75-90% of the cases, and white represents the presence of a base in 50-75% of the cases), as opposed to a gap (no base), whereas the colored letters represent bases that are conserved to different degrees (e.g., with red representing 97%+ conserved, black being 90%+ conserved, and grey at least 75% conserved). Each highlighted base-pair represents a significantly covarying basepair.

[0179] FIG. 8 is a schematic representation of a consensus secondary structure of a retron ncRNA msr/msd of Type IIA3 retrons produced by computational structural alignment of ncRNA sequences from Table B as described in Example 3.

[0180] The colored dots represents the probability a base is at that location (e.g., red circle represents the presence of a base in 97% of the cases, black represents the presence of a base in 90-97% of the cases, grey represents the presence of a base in 75-90% of the cases, and white represents the presence of a base in 50-75% of the cases), as opposed to a gap (no base), whereas the colored letters represent bases that are conserved to different degrees (e.g., with red representing 97%+ conserved, black being 90%+ conserved, and grey at least 75% conserved). Each highlighted base-pair represents a significantly covarying basepair.

[0181] FIG. 9 is a schematic representation of a consensus secondary structure of a retron ncRNA msr/msd of Type IIA4 retrons produced by computational structural alignment of ncRNA sequences from Table B as described in Example 3.

[0182] The colored dots represents the probability a base is at that location (e.g., red circle represents the presence of a base in 97% of the cases, black represents the presence of a base in 90-97% of the cases, grey represents the presence of a base in 75-90% of the cases, and white represents the presence of a base in 50-75% of the cases), as opposed to a gap (no base), whereas the colored letters represent bases that are conserved to different degrees (e.g., with red representing 97%+ conserved, black being 90%+ conserved, and grey at least 75% conserved). Each highlighted base-pair represents a significantly covarying basepair.

[0183] FIG. 10 is a schematic representation of a consensus secondary structure of a retron ncRNA msr/msd of Type IIA5 retrons produced by computational structural alignment of ncRNA sequences from Table B as described in Example 3.

[0184] The colored dots represents the probability a base is at that location (e.g., red circle represents the presence of a base in 97% of the cases, black represents the presence of a base in 90-97% of the cases, grey represents the presence of a base in 75-90% of the cases, and white represents the presence of a base in 50-75% of the cases), as opposed to a gap (no base), whereas the colored letters represent bases that are conserved to different degrees (e.g., with red representing 97%+ conserved, black being 90%+ conserved, and grey at least 75% conserved). Each highlighted base-pair represents a significantly covarying basepair.

[0185] FIG. 11 is a schematic representation of a consensus secondary structure of a retron ncRNA msr/msd of Type IIIA1 retrons produced by computational structural alignment of ncRNA sequences from Table B as described in Example 3.

[0186] The colored dots represents the probability a base is at that location (e.g., red circle represents the presence of a base in 97% of the cases, black represents the presence of a base in 90-97% of the cases, grey represents the presence of a base in 75-90% of the cases, and white represents the presence of a base in 50-75% of the cases), as opposed to a gap (no base), whereas the colored letters represent bases that are conserved to different degrees (e.g., with red representing 97%+ conserved, black being 90%+ conserved, and grey at least 75% conserved). Each highlighted base-pair represents a significantly covarying basepair.

[0187] FIG. 12 is a schematic representation of a consensus secondary structure of a retron ncRNA msr/msd of Type IIIA2 retrons produced by computational structural alignment of ncRNA sequences from Table B as described in Example 3.

[0188] The colored dots represents the probability a base is at that location (e.g., red circle represents the presence of a base in 97% of the cases, black represents the presence of a base in 90-97% of the cases, grey represents the presence of a base in 75-90% of the cases, and white represents the presence of a base in 50-75% of the cases), as opposed to a gap (no base), whereas the colored letters represent bases that are conserved to different degrees (e.g., with red representing 97%+ conserved, black being 90%+ conserved, and grey at least 75% conserved). Each highlighted base-pair represents a significantly covarying basepair.

[0189] FIG. 13 is a schematic representation of a consensus secondary structure of a retron ncRNA msr/msd of IIIA3 retrons produced by computational structural alignment of ncRNA sequences from Table B as described in Example 3.

[0190] The colored dots represents the probability a base is at that location (e.g., red circle represents the presence of a base in 97% of the cases, black represents the presence of a base in 90-97% of the cases, grey represents the presence of a base in 75-90% of the cases, and white represents the presence of a base in 50-75% of the cases), as opposed to a gap (no base), whereas the colored letters represent bases that are conserved to different degrees (e.g., with red representing 97%+ conserved, black being 90%+ conserved, and grey at least 75% conserved). Each highlighted base-pair represents a significantly covarying basepair.

[0191] FIG. 14 is a schematic representation of a consensus secondary structure of a retron ncRNA msr/msd of Type IIA4 retrons produced by computational structural alignment of ncRNA sequences from Table B as described in Example 3.

[0192] The colored dots represents the probability a base is at that location (e.g., red circle represents the presence of a base in 97% of the cases, black represents the presence of a base in 90-97% of the cases, grey represents the presence of a base in 75-90% of the cases, and white represents the presence of a base in 50-75% of the cases), as opposed to a gap (no base), whereas the colored letters represent bases that are conserved to different degrees (e.g., with red representing 97%+ conserved, black being 90%+ conserved, and grey at least 75% conserved). Each highlighted base-pair represents a significantly covarying basepair.

[0193] FIG. 15 is a schematic representation of a consensus secondary structure of a retron ncRNA msr/msd of Type IIIA5 retrons produced by computational structural alignment of ncRNA sequences from Table B as described in Example 3.

[0194] The colored dots represents the probability a base is at that location (e.g., red circle represents the presence of a base in 97% of the cases, black represents the presence of a base in 90-97% of the cases, grey represents the presence of a base in 75-90% of the cases, and white represents the presence of a base in 50-75% of the cases), as opposed to a gap (no base), whereas the colored letters represent bases that are conserved to different degrees (e.g., with red representing 97%+ conserved, black being 90%+ conserved, and grey at least 75% conserved). Each highlighted base-pair represents a significantly covarying basepair.

[0195] FIG. 16 is a schematic representation of a consensus secondary structure of a retron ncRNA msr/msd of Type IIIunk retrons produced by computational structural alignment of ncRNA sequences from Table B as described in Example 3.

[0196] The colored dots represents the probability a base is at that location (e.g., red circle represents the presence of a base in 97% of the cases, black represents the presence of a base in 90-97% of the cases, grey represents the presence of a base in 75-90% of the cases, and white represents the presence of a base in 50-75% of the cases), as opposed to a gap (no base), whereas the colored letters represent bases that are conserved to different degrees (e.g., with red representing 97%+ conserved, black being 90%+ conserved, and grey at least 75% conserved). Each highlighted base-pair represents a significantly covarying basepair.

[0197] FIG. 17 is a schematic representation of a consensus secondary structure of a retron ncRNA msr/msd of Type IV retrons produced by computational structural alignment of ncRNA sequences from Table B as described in Example 3.

[0198] The colored dots represents the probability a base is at that location (e.g., red circle represents the presence of a base in 97% of the cases, black represents the presence of a base in 90-97% of the cases, grey represents the presence of a base in 75-90% of the cases, and white represents the presence of a base in 50-75% of the cases), as opposed to a gap (no base), whereas the colored letters represent bases that are conserved to different degrees (e.g., with red representing 97%+ conserved, black being 90%+ conserved, and grey at least 75% conserved). Each highlighted base-pair represents a significantly covarying basepair.

[0199] FIG. 18 is a schematic representation of a consensus secondary structure of a retron ncRNA msr/msd of Type IX retrons produced by computational structural alignment of ncRNA sequences from Table B as described in Example 3.

[0200] The colored dots represents the probability a base is at that location (e.g., red circle represents the presence of a base in 97% of the cases, black represents the presence of a base in 90-97% of the cases, grey represents the presence of a base in 75-90% of the cases, and white represents the presence of a base in 50-75% of the cases), as opposed to a gap (no base), whereas the colored letters represent bases that are conserved to different degrees (e.g., with red representing 97%+ conserved, black being 90%+ conserved, and grey at least 75% conserved). Each highlighted base-pair represents a significantly covarying basepair.

[0201] FIG. 19 is a schematic representation of a consensus secondary structure of a retron ncRNA msr/msd of Type V retrons produced by computational structural alignment of ncRNA sequences from Table B as described in Example 3.

[0202] The colored dots represents the probability a base is at that location (e.g., red circle represents the presence of a base in 97% of the cases, black represents the presence of a base in 90-97% of the cases, grey represents the presence of a base in 75-90% of the cases, and white represents the presence of a base in 50-75% of the cases), as opposed to a gap (no base), whereas the colored letters represent bases that are conserved to different degrees (e.g., with red representing 97%+ conserved, black being 90%+ conserved, and grey at least 75% conserved). Each highlighted base-pair represents a significantly covarying basepair.

[0203] FIG. 20 is a schematic representation of a consensus secondary structure of a retron ncRNA msr/msd of Type VI retrons produced by computational structural alignment of ncRNA sequences from Table B as described in Example 3.

[0204] The colored dots represents the probability a base is at that location (e.g., red circle represents the presence of a base in 97% of the cases, black represents the presence of a base in 90-97% of the cases, grey represents the presence of a base in 75-90% of the cases, and white represents the presence of a base in 50-75% of the cases), as opposed to a gap (no base), whereas the colored letters represent bases that are conserved to different degrees (e.g., with red representing 97%+ conserved, black being 90%+ conserved, and grey at least 75% conserved). Each highlighted base-pair represents a significantly covarying basepair.

[0205] FIG. 21 is a schematic representation of a consensus secondary structure of a retron ncRNA msr/msd of Type XI Group 1 retrons produced by computational structural alignment of ncRNA sequences from Table B as described in Example 3.

[0206] The colored dots represents the probability a base is at that location (e.g., red circle represents the presence of a base in 97% of the cases, black represents the presence of a base in 90-97% of the cases, grey represents the presence of a base in 75-90% of the cases, and white represents the presence of a base in 50-75% of the cases), as opposed to a gap (no base), whereas the colored letters represent bases that are conserved to different degrees (e.g., with red representing 97%+ conserved, black being 90%+ conserved, and grey at least 75% conserved). Each highlighted base-pair represents a significantly covarying basepair.

[0207] FIG. 22 is a schematic representation of a consensus secondary structure of a retron ncRNA msr/msd of Type XI Group 2 retrons produced by computational structural alignment of ncRNA sequences from Table B as described in Example 3.

[0208] The colored dots represents the probability a base is at that location (e.g., red circle represents the presence of a base in 97% of the cases, black represents the presence of a base in 90-97% of the cases, grey represents the presence of a base in 75-90% of the cases, and white represents the presence of a base in 50-75% of the cases), as opposed to a gap (no base), whereas the colored letters represent bases that are conserved to different degrees (e.g., with red representing 97%+ conserved, black being 90%+ conserved, and grey at least 75% conserved). Each highlighted base-pair represents a significantly covarying basepair.

[0209] FIG. 23 is a schematic representation of a consensus secondary structure of a retron ncRNA msr/msd of Type XII retrons produced by computational structural alignment of ncRNA sequences from Table B as described in Example 3.

[0210] The colored dots represents the probability a base is at that location (e.g., red circle represents the presence of a base in 97% of the cases, black represents the presence of a base in 90-97% of the cases, grey represents the presence of a base in 75-90% of the cases, and white represents the presence of a base in 50-75% of the cases), as opposed to a gap (no base), whereas the colored letters represent bases that are conserved to different degrees (e.g., with red representing 97%+ conserved, black being 90%+ conserved, and grey at least 75% conserved). Each highlighted base-pair represents a significantly covarying basepair.

[0211] FIG. 24 is a schematic representation of a consensus secondary structure of a retron ncRNA msr/msd of Type XIII retrons produced by computational structural alignment of ncRNA sequences from Table B as described in Example 3.

[0212] The colored dots represents the probability a base is at that location (e.g., red circle represents the presence of a base in 97% of the cases, black represents the presence of a base in 90-97% of the cases, grey represents the presence of a base in 75-90% of the cases, and white represents the presence of a base in 50-75% of the cases), as opposed to a gap (no base), whereas the colored letters represent bases that are conserved to different degrees (e.g., with red representing 97%+ conserved, black being 90%+ conserved, and grey at least 75% conserved). Each highlighted base-pair represents a significantly covarying basepair.

[0213] FIG. 25 is a schematic representation of a consensus secondary structure of a retron ncRNA msr/msd of Type XIV retrons produced by computational structural alignment of ncRNA sequences from Table B as described in Example 3.

[0214] The colored dots represents the probability a base is at that location (e.g., red circle represents the presence of a base in 97% of the cases, black represents the presence of a base in 90-97% of the cases, grey represents the presence of a base in 75-90% of the cases, and white represents the presence of a base in 50-75% of the cases), as opposed to a gap (no base), whereas the colored letters represent bases that are conserved to different degrees (e.g., with red representing 97%+ conserved, black being 90%+ conserved, and grey at least 75% conserved). Each highlighted base-pair represents a significantly covarying basepair.

[0215] FIG. 26 is a schematic representation of a consensus secondary structure of a retron ncRNA msr/msd of Ec107 retrons produced by computational structural alignment of ncRNA sequences from Table B as described in Example 3.

[0216] The colored dots represents the probability a base is at that location (e.g., red circle represents the presence of a base in 97% of the cases, black represents the presence of a base in 90-97% of the cases, grey represents the presence of a base in 75-90% of the cases, and white represents the presence of a base in 50-75% of the cases), as opposed to a gap (no base), whereas the colored letters represent bases that are conserved to different degrees (e.g., with red representing 97%+ conserved, black being 90%+ conserved, and grey at least 75% conserved). Each highlighted base-pair represents a significantly covarying basepair.

[0217] FIG. 27 is a schematic representation of a consensus secondary structure of a retron ncRNA msr/msd of Outgroup A retrons produced by computational structural alignment of ncRNA sequences from Table B as described in Example 3.

[0218] The colored dots represents the probability a base is at that location (e.g., red circle represents the presence of a base in 97% of the cases, black represents the presence of a base in 90-97% of the cases, grey represents the presence of a base in 75-90% of the cases, and white represents the presence of a base in 50-75% of the cases), as opposed to a gap (no base), whereas the colored letters represent bases that are conserved to different degrees (e.g., with red representing 97%+ conserved, black being 90%+ conserved, and grey at least 75% conserved). Each highlighted base-pair represents a significantly covarying basepair.

[0219] FIG. 28 is a phylogenetic tree of RT sequences constructed in accordance with Example 3.

[0220] FIG. 29 is a structural representation of the retron loci associated with each retron type in FIG. 28.

[0221] FIG. 30 shows the position of certain retrons (EcoI, Eco3, Eco5, AcoI, RTX003_2042, RTX003_6083v1, and RTX003_6943) within the phylogenetic retron tree of FIG. 28.

[0222] FIG. 31A is a plasmid map of an exemplary retron (EcoI) tested in the Examples herein.

[0223] FIG. 31B is a linear representation in 5′ to 3′ direction of the plasmid map of FIG. 31A.

[0224] FIG. 31C is a plasmid map of an exemplary retron (RTX3_6083v1) tested in the Examples herein.

[0225] FIG. 31D is a linear representation in 5′ to 3′ direction of the plasmid map of FIG. 31C.

[0226] FIG. 32 is a representation of a plasmid-based assay used to measure retron precise edits and indels as performed in the Examples. In Step 1, a plasmid (e.g., that of FIG. 31A or FIG. 31C) is transfected into human cells (e.g., HEK293t cells) which are engineered to express Cas9. Editing is allowed to occur for 72 hours at 37° C. In Step 2, the genomic DNA is extracted from the cells and used to prepare a next-generation sequencing (NGS) library for sequencing. The library is sequenced over the target site (e.g., EMX1) of editing to generate sequence reads. In Step 3, the sequencing reads are analyzed to obtain a frequency of sequence reads containing the desired edit (percentage of precision editing) and a frequency of indels at the desired edit site (percentage of indels).

[0227] FIG. 33 is an equivalent representation of FIG. 32.

[0228] FIG. 34 is a representation of a methodology for transfecting HEK293T cells. Cells were seeded in 24 well plate one day prior to transfection. Appropriate amount of plasmid and transfection reagent (e.g., Lipofectamine 3000) were mixed and transferred to cells. After 72 hours incubation, genomic DNA was extracted and the target edit region was amplified into sequencing libraries. Sequencing data was analyzed by CRISPResso2 and percentage of precise edit and indels were calculated.

[0229] FIG. 35 is an example of reference sequence and desired editing outcome for Eco3 retron at he EMX1 genomic site. Analysis of editing outcomes is performed using CRISPresso2 pipeline. In this example, the editing template inserts a 10 bp insertion into the FMXI gene (TTACGTCTGC) along with a 6 bp substitution to mutate the PAM sequence (GAAGGG>AAAGTT).

[0230] FIG. 36 shows the results of plasmid-based assay (e.g., according to FIG. 33) demonstrating up to about 0.3% precise edits and as low as 40% indels with Eco1 retron in Cas9 expressing HEK293T cells. The plasmid that encodes Eco1 RT and Eco1 ncRNA-sgRNA fusion targeting EMX1 was transfected via lipofection using two different amounts of Lipofectamine.

[0231] FIG. 37 shows the results of plasmid-based assay (e.g., according to FIG. 33) demonstrating up to about 0.1% precise edits and as low as 3% indels with AcoI. Aco1 retron has not been experimentally validated to produce msDNA. Precise editing activity observed in this experiment strongly support that Aco1 retron is capable of generating msDNA inside human cells.

[0232] FIG. 38 shows the results of plasmid-based assay (e.g., according to FIG. 33) demonstrating up to about 0.3% precise edits and as low as 5% indels with RTX003_2042. This retron can achieve a comparable precise editing to Eco1 but with significantly lower indels (10-fold). RTX003_2042 is a novel retron and precise editing activity observed in this experiment strongly support that RTX003_2042 retron could generate msDNA inside human cells.

[0233] FIG. 39A shows the results of plasmid-based assay demonstrating up to about 0.05-0.08% precise edits and as low as 2.5-4% indels with RTX003_6083vl and 6943. Both are novel retrons and precise editing activity observed in this experiment strongly support that RTX003_6083v1 and 6943 retron could generate msDNA inside human cells.

[0234] FIG. 39B shows follow up experiments using the same assay of FIG. 39A indicated that RTX3_6083v1 and RTX3_6943 generated 3-4 fold more precise edits than Eco1 while indels generated from these two retrons were 2-3 fold lower. RTX3_2042 showed precise editing at similar frequencies to Eco1 but had more variability than other samples.

[0235] FIG. 39C shows follow up experiments using the same assay of FIG. 39A indicated that RTX3_6083v1 and RTX3_6943 generated 3-4 fold more precise edits than Eco1 while indels generated from these two retrons were 2-3 fold lower. RTX3_2042 showed precise editing at similar frequencies to Eco1 but had more variability than other samples.

[0236] FIG. 40 is a representation of an two-RNA editing assay used in the Examples to measure the relative editing efficiency of exemplary retrons using electroporation-based delivery of two RNA components into HEK293T cells. Appropriate amount of RT mRNA and ncRNA-sgRNA fusion were mixed and electroporated to cells. After 72 hours incubation, genomic DNA was extracted and the targeting region was amplified into sequencing libraries. Sequencing data was analyzed by CRISPResso2 and precise edit and indels were calculated.

[0237] FIG. 41 shows the results of two-RNA system (RT mRNA+ncRNA-sgRNA fusion) delivered to Cas9 expressing HEK293T cells by electroporation. Eco1, Eco3 and Eco5 retrons were tested. Results showed precise edits (left graph) up to 0.4% for Eco3 and as low as 10% indels (right graph) for Eco3. Precise edits mediated by Eco3 increased with augmenting amount of ncRNA-sgRNA fusion from 1:2 to 1:4 ratio between RT mRNA and ncRNA-sgRNA fusion.

[0238] FIG. 42 shows the results of titration of two-component Eco3 RNA system (RT mRNA+ncRNA-sgRNA fusion) delivered to Cas9 expressing 293T cells by electroporation. The RT mRNA and the ncRNA were mixed at ratios of 1:2, 1:3, 1:4, 1:5, 1:8, 1:10, respectively, and delivered at two different amounts of RT mRNA (0.2 or 0.5 μg). On left, data showed that Eco3 at 0.5 μg produced highest percentage of precise edits at a 1:3 and 1:5 ratio of RT mRNA to ncRNA. On right, data further showed that a more equivalent ratio of RT mRNA to ncRNA resulted in a trend of lower percentage of indels.

[0239] FIG. 43 is a representation of a three-RNA retron editing system which involves delivery by electroporation of three RNA components (RT mRNA, retron ncRNA-sgRNA fusion, and Cas9 mRNA) into HEK293T cells. Appropriate amount of RT mRNA, ncRNA-sgRNA fusion, and Cas9 mRNA were mixed and electroporated to cells. After 72 hours incubation, genomic DNA was extracted and targeting region was amplified into sequencing libraries. Sequencing data was analyzed by CRISPResso2 and precise edit and indels were calculated.

[0240] FIG. 44 shows the results of Cas9 mRNA titration of three-component Eco3 RNA system (RT mRNA+ncRNA-sgRNA fusion+Cas9 mRNA) delivered to 293T cells by electroporation. The RT mRNA and the ncRNA-sgRNA fusion were mixed at given amounts on the graph and the amount Cas9 mRNA was titrated. At 0.2 μg of Cas9 mRNA, up to 0.1% of precise editing was observed. While the editing efficiency is an order of magnitude lower than two RNA system, the editing occurred by specific action of Cas9 and retron, since absence of either abrogated the editing.

[0241] FIG. 45 depicts a process of lipofection using three RNA system in HEK293T cells. Cells were seeded in 96 well plate one day prior to transfection. Appropriate amount of RT mRNA, ncRNA-sgRNA fusion, Cas9 mRNA and Lipofectamine reagent were mixed and transferred to cells. After 72 hours incubation, genomic DNA was extracted and targeting region was amplified into sequencing libraries. Sequencing data was analyzed by CRISPResso2 and precise edit and indels were calculated.

[0242] FIG. 46 shows the results of three-component Aco1 RNA system (RT mRNA+ncRNA+Cas9 mRNA) delivered to HEK293T cells by lipofection. The RT mRNA, the ncRNA and the Cas9 mRNA were mixed at amounts indicated in the graph and transfected to HEK293T cells. 56 bp insertion and 6 bp deletion at EMX1 locus was scored as precise edits and ˜0.1% of cell population has undergone precise editing on the left graph. The editing was dependent on Cas9 nuclease since its absence abrogated the editing. The frequency of indels was about 1.5% on the right graph.

[0243] FIG. 47 shows the results of minimal Cas9 nuclease activity when sgRNA is fused to ncRNA of Eco3 retron. Cas9 activity was evaluated by frequency of indels. 1 μg of ncRNA-sgRNA fusion shows 20-fold lower activity than equimolar separated sgRNA alone. In parallel, activity of chemical modified vs unmodified sgRNA was compared and the former shows 6-fold higher activity than the latter at the condition described in the graph.

[0244] FIG. 48 is a representation of the all-RNA editing assay used in the Examples to measure the relative editing efficiency of the sample retrons in an all-RNA format, modified with a step of in trans guide RNA spike-in. Electroporation using three RNA system+sgRNA trans spike-in in HEK293T cells. Appropriate amount of RT mRNA, ncRNA-sgRNA fusion, Cas9 mRNA, and sgRNA were mixed and electroporated to cells. After 72 hours incubation, genomic DNA was extracted and targeting region was amplified into sequencing libraries. Sequencing data was analyzed by CRISPResso2 and precise edit and indels were calculated.

[0245] FIG. 49 shows the results of guide RNA spike-in in all RNA system (RT mRNA+ncRNA-sgRNA fusion+Cas9 mRNA+sgRNA) delivered to HEK293T cells by electroporation. At given amount of Cas9 and RT mRNA on the graph, the amount of guide RNA spike-in is titrated at 50, 100 and 200 ng. The titration was done at two different ratios of RT mRNA: ncRNA-sgRNA fusion=1:6 or 1:8. The guide RNA spike-in in all RNA system increased precise editing up to ˜50 fold. The increasing amount of guide RNA gradually increased precise editing and 1:8 of RT mRNA:ncRNA-sgRNA fusion performed slightly better than 1:6, reaching 13% of precise editing. On the right graph, frequency of indels is shown for respective conditions.

[0246] FIG. 50 represents a lipofection process using three RNA system+gRNA trans spike-in in HEK293T cells. Cells were seeded in 96 well plate one day prior to transfection. Appropriate amount of RT mRNA, ncRNA-sgRNA fusion, Cas9 mRNA, sgRNA and Lipofectamine reagent were mixed and transferred to cells. After 72 hours incubation, genomic DNA was extracted and targeting region was amplified into sequencing libraries. Sequencing data was analyzed by CRISPResso2 and precise edit and indels were calculated.

[0247] FIG. 51 shows the results of guide RNA spike-in (i.e., delivering a separate molecule bolus of guide RNA which in all RNA system (RT mRNA+ncRNA-sgRNA fusion+Cas9 mRNA+sgRNA) delivered to HEK293T cells by lipofection. At given amount of RT mRNA, ncRNA-sgRNA fusion, and Cas9 mRNA on the graph, the amount of guide RNA spike-in is titrated at 2, 5 and 10 ng. The guide RNA spike-in in all RNA system increased precise editing up to 3.5 fold, 12% of efficiency. The increasing amount of guide RNA at this range did not further increase precise editing. The precise editing is completely dependent on the presence of Retron machinery. On the right graph, frequency of indels is shown for respective conditions.

[0248] FIG. 52 shows the results of ncRNA-sgRNA fusion separation in all RNA system (RT mRNA+Cas9 mRNA+either ncRNA-sgRNA fusion OR separate ncRNA+sgRNA) delivered to HEK293T cells by lipofection. At given amount of RT mRNA and Cas9 mRNA on the graph, the amount of guide RNA spike-in is titrated at 0, 2, 5, 10, 50 and 100 ng. At 10 ng guide RNA, precise editing peaked at 2.23% compared to 1.78% with ncRNA-sgRNA fusion. The increasing amount of guide RNA at this range did not further increase precise editing. On the right graph, frequency of indels is shown for respective conditions.

[0249] FIG. 53 is a schematic of improved templates used for in vitro transcription to produce ncRNA (left or A) and ncRNA modifications (right or B). (A) relates to the optimization of RNA production by in vitro transcription. Previously made in vitro transcription experiments to produce RNA used a double-stranded DNA template containing a 3′ overhang (on same strand as T7 promoter sequence). A new template with a blunt end was designed and tested and as shown in FIG. 54 results in increased precise editing efficiency. (B) relates to modified ncRNAs which are modified by addition of an MS2 stem loop hairpin at the 3′ end of the ncRNA. Without being bound by theory, the MS2 loop helps stabilize the ncRNA and results in significantly improved precise editing efficiency, as shown in FIG. 54.

[0250] FIG. 54 shows the results of ncRNA-sgRNA fusion separation in 4 component all-RNA system (RT mRNA+Cas9 mRNA+ncRNA+sgRNA) delivered to HEK293T cells by Lipofectamine MessengerMAX. All RNA was transfected at a fixed amount as shown on the graphs. Using RNA generated from linearized plasmid template containing a 3′ overhang produced 1.35% precise edits. Using RNA generated from the improved linearized plasmid template containing a blunt end increased precise editing to 5.94%. Adding an MS2 stem loop to the 3′ end of the ncRNA (blunt end) further increased precise editing to 12.39%. On the right graph, frequency of indels is shown for respective conditions.

[0251] FIG. 55 provides schematics for end protection of RNA from cellular nuclease activity by capping and tailing. In (A), a 7-methylguanosine cap0 was added to 5′ triphosphate of RNA. In (B), a poly-A tail was added to the 3′ end by enzymatic addition. Tail length is estimated over 50 nucleotides. In (C), RNA containing both a 5′ cap and a 3′ tail is shown. Results are shown in FIG. 56.

[0252] FIG. 56 shows the result of end protection of ncRNA-sgRNA fusion by cap and tail in 4 component all-RNA system (RT mRNA+Cas9 mRNA+ncRNA+sgRNA) delivered to HEK293T cells by Lipofectamine MessengerMAX. All RNA was transfected at a fixed amount RT mRNA 100 ng, ncRNA-sgRNA 400 ng, Cas9 mRNA 100 ng, and sgRNA 5 ng. ncRNA-gRNA fusion was either capped (+cap −tail) or poly-A tailed (−cap +tail) or both capped and poly-A tailed (+cap +tail). Using RNA without end protection (−cap −tail) produced ˜4.5% precise edits and the editing was dependent on retron since the absence of RT abrogated precise editing. Using RNA with either or both protection by cap and tail produced lower precise editing (left graph) but lowered indels (right graph) than without cap and tail.

### DEFINITIONS

[0253] All technical and scientific terms used herein have the meaning commonly understood by a person skilled in the art to which this invention belongs. The following references provide one of skill with a general definition of many of the terms used in this invention: Singleton et al., Dictionary of Microbiology and Molecular Biology (2nd ed. 1994); The Cambridge Dictionary of Science and Technology (Walker ed., 1988); The Glossary of Genetics, 5th Ed., R. Rieger et al. (eds.), Springer Verlag (1991); and Hale & 62/1005 Marham, The Harper Collins Dictionary of Biology (1991).

[0254] General methods in molecular and cellular biochemistry can be found in such standard textbooks as Molecular Cloning: A Laboratory Manual, 3rd Ed. (Sambrook et al., HaRBor Laboratory Press 2001); Short Protocols in Molecular Biology, 4th Ed. (Ausubel et al. eds., John Wiley & Sons 1999); Protein Methods (Bollag et al., John Wiley & Sons 1996); Nonviral Vectors for Gene Therapy (Wagner et al. eds., Academic Press 1999); Viral Vectors (Kaplift & Loewy eds., Academic Press 1995); Immunology Methods Manual (I. Lefkovits ed., Academic Press 1997); and Cell and Tissue Culture: Laboratory Procedures in Biotechnology (Doyle & Griffiths, John Wiley & Sons 1998), the disclosures of which are incorporated herein by reference.

[0255] Where a range of values is provided, it is understood that each intervening value, to the tenth of the unit of the lower limit unless the context clearly dictates otherwise, between the upper and lower limit of that range and any other stated or intervening value in that stated range, is encompassed within the disclosure. The upper and lower limits of these smaller ranges may independently be included in the smaller ranges, and are also encompassed within the disclosure, subject to any specifically excluded limit in the stated range. Where the stated range includes one or both of the limits, ranges excluding either or both of those included limits are also included in the disclosure.

[0256] It must be noted that as used herein and in the appended claims, the singular forms “a,” “an,” and “the” include plural referents unless the context clearly dictates otherwise. Thus, for example, reference to “a ncRNA” includes a plurality of ncRNAs and reference to “the reverse transcriptase” includes reference to one or more RTs and equivalents thereof known to those skilled in the art, and so forth. It is further noted that the claims may be drafted to exclude any optional element. As such, this statement is intended to serve as antecedent basis for use of such exclusive terminology as “solely,” “only” and the like in connection with the recitation of claim elements, or use of a “negative” limitation. For example, claims may be drafted to exclude certain RT sequences.

[0257] It is appreciated that certain features of the invention, which are, for clarity, described in the context of separate embodiments, may also be provided in combination in a single embodiment. Conversely, various features of the invention, which are, for brevity, described in the context of a single embodiment, may also be provided separately or in any suitable sub-combination. All combinations of the embodiments pertaining to the invention are specifically embraced by the present invention and are disclosed herein just as if each and every combination was individually and explicitly disclosed. In addition, all sub-combinations of the various embodiments and elements thereof are also specifically embraced by the present invention and are disclosed herein just as if each and every such sub combination was individually and explicitly disclosed herein.

### Biologically Active

[0258] As used herein, the term “biologically active” refers to a characteristic of an agent (e.g., DNA, RNA, or protein) that has activity in a biological system (including in vitro and in vivo biological system), and particularly in a living organism, such as in a mammal, including human and non-human mammals. For instance, an agent when administered to an organism has a biological effect on that organism, is considered to be biologically active.

### Bulge

[0259] As used herein, the term “bulge” refers to a small region of unpaired base(s) that interrupts a “stem” of base-paired nucleotides. The bulge may comprise one or two single-stranded or unbase-paired nucleotides joined at both ends by base-paired nucleotides of the stem. The bulge can be symmetrical (viz., the two unbase-paired single-stranded regions have the same number of nucleotides), or asymmetrical (viz., the unbase-paired single stranded region(s) have different or unequal numbers of nucleotides), or there is only one unbase-paired nucleotide on one strand. A bulge can be described as A/B (such as a “2/2 bulge,” or a “1/0 bulge”) wherein A represents the number of unpaired nucleotides on the upstream strand of the stem, and B represents the number of unpaired nucleotides on the downstream strand of the stem. An upstream strand of a bulge is more 5′ to a downstream strand of the bulge in the primary nucleotide sequence.

cDNA

[0260] As used herein, the term “cDNA” refers to a strand of DNA copied from an RNA template, e.g., by a reverse transcriptase.

### Complementary

[0261] As used herein, the terms “complementary” or “substantially complementary” are meant to refer to a nucleic acid (e.g., RNA, DNA) that comprises a sequence of nucleotides that enables it to non-covalently bind, i.e., form Watson-Crick base pairs and/or G/U base pairs, “anneal”, or “hybridize,” to another nucleic acid in a sequence-specific, antiparallel, manner (i.e., a nucleic acid specifically binds to a complementary nucleic acid) under the appropriate in vitro and/or in vivo conditions of temperature and solution ionic strength. Standard Watson-Crick base-pairing includes: adenine (A) pairing with thymidine (T), adenine (A) pairing with uracil (U), and guanine (G) pairing with cytosine (C) [DNA, RNA]. In addition, for hybridization between two RNA molecules (e.g., dsRNA), and for hybridization of a DNA molecule with an RNA molecule (e.g., when a DNA target nucleic acid base pairs with a guide RNA, etc.): guanine (G) can also base pair with uracil (U). For example, G/U base-pairing is at least partially responsible for the degeneracy (i.e., redundancy) of the genetic code in the context of tRNA anti-codon base-pairing with codons in mRNA. Thus, in the context of this disclosure, a guanine (G) is considered complementary to both a uracil (U) and to an adenine (A). For example, when a G/U base-pair can be made at a given nucleotide position of a dsRNA duplex of a guide RNA molecule, the position is not considered to be non-complementary, but is instead considered to be complementary.

[0262] It is understood that the sequence of a polynucleotide need not be 100% complementary to that of its target nucleic acid to be specifically hybridizable or hybridizable. Moreover, a polynucleotide may hybridize over one or more segments such that intervening or adjacent segments are not involved in the hybridization event (e.g., a bulge, a loop structure or hairpin structure, etc.). A polynucleotide can comprise 60% or more, 65% or more, 70% or more, 75% or more, 80% or more, 85% or more, 90% or more, 95% or more, 98% or more, 99% or more, 99.5% or more, or 100% sequence complementarity to a target region within the target nucleic acid sequence to which it will hybridize. For example, an antisense nucleic acid in which 18 of 20 nucleotides of the antisense compound are complementary to a target region, and would therefore specifically hybridize, would represent 90 percent complementarity. In this example, the remaining noncomplementary nucleotides may be clustered or interspersed with complementary nucleotides and need not be contiguous to each other or to complementary nucleotides. Percent complementarity between particular stretches of nucleic acid sequences within nucleic acids can be determined using any convenient method. Example methods include BLAST programs (basic local alignment search tools) and PowerBLAST programs (Altschul et al., J. Mol. Biol., 1990, 215, 403-410; Zhang and Madden, Genome Res., 1997, 7, 649-656), the Gap program (Wisconsin Sequence Analysis Package, Version 8 for Unix, Genetics Computer Group, University Research Park, Madison Wis.), e.g., using default settings, which uses the algorithm of Smith and Waterman (Adv. Appl. Math., 1981, 2, 482-489), and the like.

### DNA-Guided Nuclease

[0263] As used herein, an “DNA-guided nuclease” is a type of “programmable nuclease,” and a specific type of “nucleic acid-guided nuclease.” An example of a DNA-guided nuclease is reported in Varshney et al., DNA-guided genome editing using structure-guided endonucleases, Genome Biology, 2016, 17(1), 187, which may be used in the context of the present disclosure and is incorporated herein by reference. As used herein, the term “DNA-guided nuclease” or “DNA-guided endonuclease” refers to a nuclease that associates covalently or non-covalently with a guide RNA thereby forming a complex between the guide RNA and the DNA-guided nuclease. The guide RNA comprises a spacer sequence which comprises a nucleotide sequence having complementarity with a strand of a target DNA sequence. Thus, the DNA-guided nuclease is indirectly guided or programmed to localize to a specific site in a DNA molecule through its association with the guide RNA, which directly binds or anneals to a strand of the target DNA through its complementarity region via Watson-Crick base-pairing.

### DNA Regulatory Sequences

[0264] As used herein, the terms “DNA regulatory sequences,” “control elements,” and “regulatory elements,” can be used interchangeably herein to refer to transcriptional and translational control sequences, such as promoters, enhancers, polyadenylation signals, terminators, protein degradation signals, and the like, that provide for and/or regulate transcription of a non-coding sequence (e.g., guide RNA) or a coding sequence and/or regulate translation of a mRNA into an encoded polypeptide.

### Donor Nucleic Acid

[0265] By a “donor nucleic acid” or “donor polynucleotide” or “donor DNA” or “HDR donor DNA” it is meant a single-stranded DNA to be inserted at a site cleaved by a programmable nuclease (e.g., a CRISPR/Cas effector protein; a TALEN; a ZFN; a meganuclease) (e.g., after dsDNA cleavage, after nicking a target DNA, after dual nicking a target DNA, and the like). The donor polynucleotide can contain sufficient homology to a genomic sequence at the target site, e.g. 70%, 80%, 85%, 90%, 95%, or 100% homology with the nucleotide sequences flanking the target site, e.g., within about 200 bases or less of the target site, e.g., within about 190 bases or less of the target site, e.g., within about 180 bases or less of the target site, e.g., within about 170 bases or less of the target site, e.g., within about 160 bases or less of the target site, e.g., within about 150 bases or less of the target site, e.g., within about 140 bases or less of the target site, e.g., within about 130 bases or less of the target site, e.g., within about 120 bases or less of the target site, e.g., within about 110 bases or less of the target site, e.g., within about 100 bases or less of the target site, e.g., within about 90 bases or less of the target site, e.g., within about 80 bases or less of the target site, e.g., within about 70 bases or less of the target site, e.g., within about 60 bases or less of the target site, e.g., 50 bases or less of the target site, e.g., within about 30 bases, within about 15 bases, within about 10 bases, within about 5 bases, or immediately flanking the target site, to support homology-directed repair between it and the genomic sequence to which it bears homology.

### Encodes

[0266] As used herein, a DNA sequence that “encodes” a particular RNA is a DNA nucleotide sequence that is transcribed into RNA. A DNA polynucleotide may encode an RNA (mRNA) that is translated into protein (and therefore the DNA and the mRNA both encode the protein), or a DNA polynucleotide may encode an RNA that is not translated into protein (e.g. tRNA, rRNA, microRNA (miRNA), a “non-coding” RNA (ncRNA), a guide RNA, etc.). In the case of retrons, the retron DNA may encode the ncRNA loci (which includes the msr and msd regions) as well as a retron RT.

### Engineered Retron

[0267] As used herein, the term “engineered retron” or equivalently, “recombinant retron,” refers to a retron that does not occur in nature. In one embodiment, engineered retrons can include wildtype or naturally-occurring retrons that are modified to contain at least one modification, including a single nucleotide substitution, insertion, or deletion, or a substitution, insertion, or deletion of more than one nucleotide, i.e., up to 2, 3, 4, 5, 6, 7, 8, 9, 10, 11, 12, 13, 14, 15, 16, 17, 18, 19, 20, 21, 22, 23, 24, 25, 26, 27, 28, 29, 30, 31, 32, 33, 34, 35, 36, 37, 38, 39, 40, 41, 42, 43, 44, 45, 46, 47, 48, 49, 50, 51, 52, 53, 54, 55, 56, 57, 58, 59, 60, 61, 62, 63, 64, 65, 66, 67, 68, 69, 70, 71, 72, 73, 74, 75, 76, 77, 78, 79, 80, 81, 82, 83, 84, 85, 86, 87, 88, 89, 90, 91, 92, 93, 94, 95, 96, 97, 98, 99, or up to 100, or up to 200, 300, 400, 500, 600, 700, 800, 900, 1000, 1100, 1200, 1300, 1400, 1500, 1600, 1700, 1800, 1900, or up to 2000 nucleotides substituted, inserted, or deleted from a starting point retron (e.g., a wildtype retron). Where more than one nucleotide of a starting point retron (e.g., a wildtype retron) is substituted, deleted, or inserted, the nucleotides may be contiguous or non-contiguous. While an engineered retron as a whole is not naturally-occurring, it may include components such as nucleotide sequences that do occur in nature. For example, an engineered retron can have nucleotide sequences from different organisms (e.g., from different bacteria species), or from completely synthetic/artificial/recombinant nucleic acid sequences. Thus, an engineered retron can have a bacterial nucleotide sequence, a human nucleotide sequence, a viral nucleotide sequence, and/or a synthetic/artificial/recombinant nucleotide sequence, and/or combinations of such sequences. An example of modifications of the recombinant retrons disclosed herein include the insertion of a heterologous nucleic acid sequence in a retron, for example, inserted into the ncRNA locus, such as in the msr or the msd loci. Linking guide RNA molecules to the 5′ and/or 3′ ends (i.e., linking one at the 5′ end of a ncRNA and/or one at the 3′ end of a ncRNA) also represent another modification envisioned by the recombinant retrons disclosed herein. In such embodiments, the guide RNA molecules may also be categorized or referred to more generally as types of heterologous nucleic acid sequences used to modify starting point retrons.

### Exosomes

[0268] As used herein, the term “exosomes” refer to small membrane bound vesicles with an endocytic origin. Without wishing to be bound by theory, exosomes are generally released into an extracellular environment from host/progenitor cells post fusion of multivesicular bodies the cellular plasma membrane. As such, exosomes can include components of the progenitor membrane in addition to designed components (e.g. engineered retron). Exosome membranes are generally lamellar, composed of a bilayer of lipids, with an aqueous inter-nanoparticle space.

### Expression Vector

[0269] As used herein, the term “expression vector” or “expression construct” refers to a vector that includes one or more expression control sequences, and an “expression control sequence” is a DNA sequence that controls and regulates the transcription and/or translation of another DNA sequence. Suitable expression vectors include, without limitation, plasmids and viral vectors derived from, for example, bacteriophage, baculoviruses, tobacco mosaic virus, herpes viruses, cytomegalovirus, retroviruses, vaccinia viruses, adenoviruses, and adeno-associated viruses. Numerous vectors and expression systems are commercially available, such as from Novagen (Madison, Wis.), Clontech (Palo Alto, Calif.), Stratagene (La Jolla, Calif.), and Invitrogen/Life Technologies (Carlsbad, Calif.). The present invention comprehends recombinant vectors that may include viral vectors, bacterial vectors, protozoan vectors, DNA vectors, or recombinants thereof.

### Heterologous Nucleic Acid Sequence

[0270] As used herein, the term “heterologous nucleic acid” refers to a genotypically distinct entity from that of the rest of the entity to which it is compared or into which it is introduced or incorporated. For example, a polynucleotide introduced by genetic engineering techniques into a different cell type is a heterologous polynucleotide (e.g., DNA or RNA) and, if expressed, can encode a heterologous polypeptide. Similarly, a cellular sequence (e.g., a gene or portion thereof) that is incorporated into a viral vector is a heterologous nucleotide sequence with respect to the vector. In some embodiments, the heterologous sequence inserted into the wild-type retron regions does not naturally insert into such regions (e.g., the engineered retron with the inserted heterologous sequence is not naturally existing). For example, the heterologous sequence can be from the same species of bacteria in which the wild-type retron is normally found, so long as the heterologous sequence is not naturally inserted in the wild-type retron at the location in which the heterologous sequence is inserted. In certain embodiments, the heterologous sequence is a mammalian sequence (e.g., a human sequence), or a reverse complement thereof. Heterologous nucleic acid sequences introduced into retrons can including without limitation guide RNA sequences, HDR donor templates, protein-encoding genes, or non-coding functional RNA elements (e.g., stem-loops, hairpins, and bulges).

### Lipid Nanoparticle (LNP)

[0271] As used herein, the term “lipid nanoparticle” or LNP refers to a type of lipid particle delivery system formed of small solid or semi-solid particles possessing an exterior lipid layer with a hydrophilic exterior surface that is exposed to the non-LNP environment, an interior space which may aqueous (vesicle like) or non-aqueous (micelle like), and at least one hydrophobic inter-membrane space. LNP membranes may be lamellar or non-lamellar and may be comprised of 1, 2, 3, 4, 5 or more layers. In some embodiments, LNPs may comprise a nucleic acid (e.g. engineered retron) into their interior space, into the inter membrane space, onto their exterior surface, or any combination thereof. In some embodiments, an LNP of the present disclosure comprises an ionizable lipid, a structural lipid, a PEGylated lipid (aka PEG lipid), and a phospholipid. In alternative embodiments, an LNP comprises an ionizable lipid, a structural lipid, a PEGylated lipid (aka PEG lipid), and a zwitterionic amino acid lipid.

[0272] Further discuss of liposomes can be found, for example, in Tenchov et al., “Lipid Nanoparticles—From Liposomes to mRNA Vaccine Delivery, a Landscape of Diversity and Advancement,” ACS Nano, 2021, 15, pp. 16982-17015 (the contents of which are incorporated by reference).

### Linker

[0273] As used herein, the term“linker” refers to a molecule linking or joining two other molecules or moieties. The linker can be an amino acid sequence in the case of a linker joining two fusion proteins. For example, an RNA-guided nuclease (e.g., Cas12a) can be fused to a retron reverse transcriptase by an amino acid linker sequence. The linker can also be a nucleotide sequence in the case of joining two nucleotide sequences together. For example, in the instant case, a ncRNA at its 5′ and/or 3′ ends may be linked by a nucleotide sequence linker to one or more guide RNAs. In other embodiments, the linker is an organic molecule, group, polymer, or chemical moiety. In some embodiments, the linker is 5-100 amino acids in length, for example, 5, 6, 7, 8, 9, 10, 11, 12, 13, 14, 15, 16, 17, 18, 19, 20, 21, 22, 23, 24, 25, 26, 27, 28, 29, 30, 30-35, 35-40, 40-45, 45-50, 50-60, 60-70, 70-80, 80-90, 90-100, 100-150, or 150-200 amino acids in length. Longer or shorter linkers are also contemplated.

### Liposomes

[0274] As used herein, the term “liposomes” refer to a type of lipid particle delivery system comprising small vesicles that contain at least one lipid membrane surrounding an aqueous inner-nanoparticle space that is generally not derived from a progenitor/host cell. Liposomes are a versatile carrier platform in that they are capable of transporting hydrophobic or hydrophilic molecules, including small molecules, proteins, and nucleic acids into cells. They were the earliest developed generation of nanoscale medicine delivery platform. Numerous liposomal drug formulations have been approved for human medicines, e.g., Doxil, a lipid nanoparticle formulation of the antitumor agent doxorubicin. Further discuss of liposomes can be found, for example, in Tenchov et al., “Lipid Nanoparticles—From Liposomes to mRNA Vaccine Delivery, a Landscape of Diversity and Advancement,” ACS Nano, 2021, 15, pp. 16982-17015 (the contents of which are incorporated by reference).

### Loop

[0275] As used herein, the term “loop” in a polynucleotide refers to a single stranded stretch of one or more nucleotides, such as 2, 3, 4, 5, 6, 7, 8, 9, or 10 nucleotides, wherein the most 5′ nucleotide and the most 3′ nucleotide of the loop are each linked to a base-paired nucleotide in a stem.

### Micelles

[0276] As used herein, the term “micelles” refer to small particles which do not have an aqueous intra-particle space.

### Nanoparticle

[0277] As used herein, the term “nanoparticle” refers to any nanoscale particle typically ranging in size from about 1 nm to 1000 nm.

### Nuclear Localization Sequence (NLS)

[0278] As used herein, the term“nuclear localization sequence” or “NLS” refers to an amino acid sequence that promotes import of a protein (e.g., a RNA-guided nuclease) into the cell nucleus, for example, by nuclear transport. Nuclear localization sequences are known in the art. For example, NLS sequences are described in Plank et al., international PCT application, PCT/EP2000/011690, filed Nov. 23, 2000, published as WO/2001/038547 on May 31, 2001, the contents of which are incorporated herein by reference for its disclosure of exemplary nuclear localization sequences.

### Nucleic Acid

[0279] As used herein, the term “nucleic acid” or “nucleic acid molecule” or “nucleic acid sequence” or “polynucleotide” generally refer to deoxyribonucleic or ribonucleic oligonucleotides in either single- or double-stranded form. The term may also encompass oligonucleotides containing known analogues of natural nucleotides. The term also may also encompass nucleic acid-like structures with synthetic backbones, see, e.g., Eckstein, 1991; Baserga et al., 1992; Milligan, 1993; WO 97/03211; WO 96/39154; Mata, 1997; Strauss-Soukup, 1997; and Samstag, 1996. The term encompasses both ribonucleic acid (RNA) and DNA, including cDNA (including RT DNA), genomic DNA, synthetic, synthesized (e.g., chemically synthesized) DNA, and/or DNA (or RNA) containing nucleic acid analogs. The nucleotides Adenine (A), Thymine (T), Guanine (G) and Cytosine (C) also may (or may not) encompass nucleotide modifications, e.g., methylated and/or hydroxylated nucleotides, e.g., Cytosine (C) encompasses 5-methylcytosine and 5-hydroxymethylcytosine.

### Nucleic Acid-Guided Nuclease

[0280] As used herein, the term “nucleic acid-guided nuclease” or “nucleic acid-guided endonuclease” refers to a nuclease that associates covalently or non-covalently with a guide nucleic acid (e.g., a guide RNA or a guide DNA) thereby forming a complex between the guide nucleic acid and the nucleic acid-guided nuclease. The guide nucleic acid comprises a spacer sequence which comprises a nucleotide sequence having complementarity with a strand of a target DNA sequence. Thus, the nucleic acid-guided nuclease is indirectly guided or programmed to localize to a specific site in a DNA molecule through its association with the guide nucleic acid, which directly binds or anneals to a strand of the target DNA through its complementarity region via Watson-Crick base-pairing. In some embodiments, the nucleic acid-guided nuclease will include a DNA-binding activity (e.g., as in the case for CRISPR Cas9). Most commonly, the nucleic acid-guided nuclease is programmed by associating with a guide RNA molecule and in such cases the nuclease may be called “RNA-guided nuclease.” When programmed by a guide DNA, the nuclease may be called a “DNA-guided nuclease.” Nucleic acid-guided, RNA-guided, or DNA-guided nucleases may also be referred to as “programmable nucleases,” which also include other classes of programmable nucleases which associate with specific DNA sequences through amino acid/nucleotide sequence recognition (e.g., zinc fingers nucleases (ZFN) and transcription activator like effector nucleases (TALEN)) rather than through guide RNAs. In addition, any nuclease contemplated herein may also be engineered to remove, inactivate, or otherwise eliminate one or more nuclease activities (e.g., by introducing a nuclease-inactiving mutation in the active site(s) of a nuclease). A nuclease that has been modified to remove, inactivate, or otherwise eliminate all nuclease activity may be referred to as a “dead” nuclease. A dead nuclease is not able to cut either strand of a double-stranded DNA molecule. A nuclease that has been modified to remove, inactivate, or otherwise eliminate at least one nuclease activity but which still retains at least one nuclease activity may be referred to as a “nickase” nuclease. A nickase nuclease cuts one strand of a double-stranded DNA molecule, but not both strands. For example, a CRISPR Cas9 naturally comprises two distinct nuclease activity domains, namely, the HNH domain and the RuvC domain. The HNH domain cuts the strand of DNA bound to the guide RNA and the RuvC domain cuts the protospacer strand. One can obtain a nickase Cas9 by inactivating either the HNH domain or the RuvC domain. One can obtain a dead Cas9 by inactivating both the HNH domain and the RuvC domain. Other RNA-guided nuclease may be similarly converted to nickases and/or dead nucleases by inactivating one or more of the existing nuclease domains.

### Operably Linked

[0281] As used herein, the term “operably linked” or “under transcriptional control,” when used in conjunction with the description of a promoter, refers to the correct location and orientation in relation to a polynucleotide (e.g., a coding sequence) to control the initiation of transcription by RNA polymerase and expression of the coding sequence, such as one for the msr gene, msd gene, and/or the ret gene. Other transcriptional control regulatory elements (e.g., enhancer sequences, transcription factor binding sites) may also be operably linked to a gene if their location relative to a gene controls or regulates the expression of the gene.

### Programmable Nuclease

[0282] As used herein, the term “programmable nuclease” is meant to refer to a polypeptide that has the property of selective localization to a specific desired nucleotide sequence target in a nucleic acid molecule (e.g., to a specific gene target) due to one or more targeting functions. Such targeting functions can include one or more DNA-binding domains, such as zinc finger domains characteristic of many different types of DNA binding proteins or TALE domains characteristic of TALEN proteins. Such targeting function may also include the ability to associate and/or form a complex with a guide RNA, which then localizes to a specific site on the DNA which bears a sequence that is complementary to a portion of the guide RNA (i.e., the spacer of the guide RNA). In some embodiments, the programmable nuclease may be a single protein which comprises both a domain that binds directly (e.g., a ZF protein) or indirectly (e.g., an RNA-guided protein) to a target DNA site, as well as a nuclease domain. In other embodiments, the programmable nuclease may be a composite of two or more separate proteins or domains (from different proteins) which together provide the necessary functions of selective DNA binding and nuclease activity. For example, the programmable nuclease may comprise a (a) nuclease-inactive RNA-guided nuclease (which still is capable of binding a guide RNA, localizing to a target DNA, and binding to the target DNA, but not capable of cutting or nicking the strands) fused to a (b) nuclease protein or domain, such as a FokI nuclease.

### Promoter

[0283] As used herein, the term“promoter” is art-recognized and refers to a nucleic acid molecule with a sequence recognized by the cellular transcription machinery and which is able to initiate transcription of a downstream gene. A promoter can be constitutively active, meaning that the promoter is always active in a given cellular context, or conditionally active, meaning that the promoter is only active in the presence of a specific condition. For example, a conditional promoter may only be active in the presence of a specific protein that connects a protein associated with a regulatory element in the promoter to the basic transcriptional machinery, or only in the absence of an inhibitory molecule. Within the promoter sequence will be found a transcription initiation site, as well as protein binding domains responsible for the binding of RNA polymerase. Eukaryotic promoters will often, but not always, contain “TATA” boxes and “CAT” boxes. Various promoters, including inducible promoters, may be used to drive expression by the various vectors of the present disclosure.

### Recombinant Nucleic Acid

[0284] A “recombinant nucleic acid” or “recombinant nucleotide” refers to a molecule that is constructed by joining nucleic acid molecules, which optionally may self-replicate in a live cell.

### Retron

[0285] As used herein, the term “retron” refers to a specific type of naturally-occurring and distinct DNA sequence found in the genome of many bacteria which typically encodes three distinct components, namely, (a) a non-coding RNA (“ncRNA”) (comprising contiguous inverted sequences (msr and msd), (b) a reverse transcriptase (RT)-coding gene (ret), and (c) in many cases, a retron-associated gene of unknown function. Retrons are particularly defined by their unique ability to produce a satellite DNA known as msDNA (multicopy single-stranded DNA). The ncRNA (comprising the msr and msd elements) and the ret gene are transcribed as a single polycitronic RNA transcript which processed into the ncRNA transcript and a transcript encoding the ret gene. The ncRNA then becomes folded into a specific secondary structure. Once translated, the RT then binds the folded ncRNA and reverse transcribes the msd region to form a single strand of cDNA (the msDNA) that remains covalently attached to the RNA template via a 2′-5′ phosphodiester bond and base-pairing between the 3′ ends of the msDNA and the RNA template. See FIG. 1A which provides a schematic of the production of an msDNA from a naturally-occurring retron.

### Retron Component

[0286] As used herein, the term “retron component” refers to a distinct element or feature of a retron, namely (a) a non-coding RNA (“ncRNA”) (comprising contiguous inverted sequences (msr and msd), (b) a reverse transcriptase (RT)-coding gene (ret), and (c) in many cases, a retron-associated gene of unknown function.

### RNA-Guided Nuclease

[0287] As used herein, an “RNA-guided nuclease” is a type of “programmable nuclease,” and a specific type of “nucleic acid-guided nuclease.” As used herein, the term “RNA-guided nuclease” or “RNA-guided endonuclease” refers to a nuclease that associates covalently or non-covalently with a guide RNA thereby forming a complex between the guide RNA and the RNA-guided nuclease. The guide RNA comprises a spacer sequence which comprises a nucleotide sequence having complementarity with a strand of a target DNA sequence. Thus, the RNA-guided nuclease is indirectly guided or programmed to localize to a specific site in a DNA molecule through its association with the guide RNA, which directly binds or anneals to a strand of the target DNA through its complementarity region via Watson-Crick base-pairing.

### Sequence Identity

[0288] As used herein, the term “sequence identity” refers to the overall relatedness between polymeric molecules, e.g., between polynucleotide molecules (e.g., DNA molecules and/or RNA molecules) and/or between polypeptide molecules. Calculation of the percent identity of two polynucleotide sequences, for example, can be performed by aligning the two sequences for optimal comparison purposes (e.g., gaps can be introduced in one or both of a first and a second nucleic acid sequences for optimal alignment and non-identical sequences can be disregarded for comparison purposes). For example, the length of a sequence aligned for comparison purposes is at least 30%, at least 40%, at least 50%, at least 60%, at least 70%, at least 80%, at least 90%, at least 95%, or 100% of the length of the reference sequence. The nucleotides at corresponding nucleotide positions are then compared. When a position in the first sequence is occupied by the same nucleotide as the corresponding position in the second sequence, then the molecules are identical at that position. The percent identity between the two sequences is a function of the number of identical positions shared by the sequences, taking into account the number of gaps, and the length of each gap, which needs to be introduced for optimal alignment of the two sequences. The comparison of sequences and determination of percent identity between two sequences can be accomplished using a mathematical algorithm. For example, the percent identity between two nucleotide sequences can be determined using methods such as those described in Computational Molecular Biology, Lesk, A. M., ed., Oxford University Press, New York, 1988; Biocomputing: Informatics and Genome Projects, Smith, D. W., ed., Academic Press, New York, 1993; Sequence Analysis in Molecular Biology, von Heinje, G., Academic Press, 1987; Computer Analysis of Sequence Data, Part I, Griffin, A. M., and Griffin, H. G., eds., Humana Press, New Jersey, 1994; and Sequence Analysis Primer, Gribskov, M. and Devereux, J., eds., M Stockton Press, New York, 1991; each of which is incorporated herein by reference. For example, the percent identity between two nucleotide sequences can be determined using the algorithm of Meyers and Miller (CABIOS, 1989, 4:11-17), which has been incorporated into the ALIGN program (version 2.0) using a PAM120 weight residue table, a gap length penalty of 12 and a gap penalty of 4. The percent identity between two nucleotide sequences can, alternatively, be determined using the GAP program in the GCG software package using an NWSgapdna. CMP matrix. Methods commonly employed to determine percent identity between sequences include, but are not limited to those disclosed in Carillo, H. and Lipman, D., SIAM J Applied Math., 48:1073 (1988); incorporated herein by reference. Techniques for determining identity are codified in publicly available computer programs. Exemplary computer software to determine homology between two sequences include, but are not limited to, GCG program package, Devereux, J., et al., Nucleic Acids Research, 12(1), 387 (1984)), BLASTP, BLASTN, and FASTA Altschul, S. F. et al., J. Molec. Biol., 215, 403 (1990).

### Subject

[0289] As used herein, the term“subject” refers to an individual organism, for example, an individual mammal. In some embodiments, the subject is a human. In some embodiments, the subject is a non-human mammal. In some embodiments, the subject is a non-human primate. In some embodiments, the subject is a rodent. In some embodiments, the subject is a sheep, a goat, a cattle, a cat, or a dog. In some embodiments, the subject is a vertebrate, an amphibian, a reptile, a fish, an insect, a fly, or a nematode. In some embodiments, the subject is a research animal. In some embodiments, the subject is genetically engineered, e.g., a genetically engineered non-human subject. The subject may be of either sex and at any stage of development. The terms “individual,” “subject,” “host,” and “patient,” used interchangeably herein.

### Stem

[0290] As used herein, the term “stem” refers to two or more base pairs, such as 3, 4, 5, 6, 7, 8, 9, 10, 11, 12, 13, 14, 15, 16, 17, 18, 19, 20 or more base pairs, formed by inverted repeat sequences connected at a “tip,” where the more 5′ or “upstream” strand of the stem bends to allows the more 3′ or “downstream” strand to base-pair with the upstream strand. The number of base pairs in a stem is the “length” of the stem. The tip of the stem is typically at least 3 nucleotides, but can be 4, 5, 6, 7, 8, 9, 10, 11, 12, 13, 14, 15 or more nucleotides. Larger tips with more than 5 nucleotides are also referred to as a “loop.” An otherwise continuous stem may be interrupted by one or more bulges as defined herein. The number of unpaired nucleotides in the bulge(s) are not included in the length of the stem. The position of a bulge closest to the tip can be described by the number of base pairs between the bulge and the tip (e.g., the bulge is 4 bps from the tip). The position of the other bulges (if any) further away from the tip can be described by the number of base pairs in the stem between the bulge in question and the tip, excluding any unpaired bases of other bulges in between.

### Synthetic or Artificial Nucleic Acid

[0291] A “synthetic or artificial nucleic acid” refers nucleic acids that are non-naturally occurring sequences. Such sequences do not originate from, or are not known to be present in any living organism (e.g., based on sequence search in existing sequence databases). Recombinant nucleic acids and synthetic nucleic acids also include those molecules that result from the replication of either of the foregoing. Engineered nucleic acid constructs of the present disclosure, such as the engineered retron described herein, may be encoded by a single molecule (e.g., encoded by or present on the same plasmid or other suitable vector) or by multiple different molecules (e.g., multiple independently-replicating vectors).

### Target Site

[0292] As used herein, a “target site” as used herein is a polynucleotide (e.g., DNA such as genomic DNA) that includes a site or specific locus (“target site” or “target sequence”) targeted by a recombinant retron genome modification system disclosed herein. In the context of retron genome modification systems disclosed herein that comprise an RNA-guided nuclease, a target sequence is the sequence to which the guide sequence of a guide nucleic acid (e.g., guide RNA) will hybridize. For example, the target site (or target sequence) 5′-GTCAATGGACC-3′ within a target nucleic acid is targeted by (or is bound by, or hybridizes with, or is complementary to) the sequence 5′-GGTCCATTGAC-3′. Suitable hybridization conditions include physiological conditions normally present in a cell. For a double stranded target nucleic acid, the strand of the target nucleic acid that is complementary to and hybridizes with the guide RNA is referred to as the “complementary strand” or “target strand”; while the strand of the target nucleic acid that is complementary to the “target strand” (and is therefore not complementary to the guide RNA) is referred to as the “non-target strand” or “non-complementary strand.”

### Treatment

[0293] As used herein, the terms“treatment,” “treat,” and“treating,” refer to a clinical intervention aimed to reverse, alleviate, delay the onset of, or inhibit the progress of a disease or disorder, or one or more symptoms thereof, as described herein. In some embodiments, treatment may be administered after one or more symptoms have developed and/or after a disease has been diagnosed. In other embodiments, treatment may be administered in the absence of symptoms, e.g., to prevent or delay onset of a symptom or inhibit onset or progression of a disease. For example, treatment may be administered to a susceptible individual prior to the onset of symptoms (e.g., in light of a history of symptoms and/or in light of genetic or other susceptibility factors). Treatment may also be continued after symptoms have resolved, for example, to prevent or delay their recurrence.

### Upstream and Downstream

[0294] As used herein, the terms “upstream” and “downstream” are terms of relativity that define the linear position of at least two elements located in a nucleic acid molecule (whether single or double-stranded) that is orientated in a 5′-to-3′ direction. A first element is said to be upstream of a second element in a nucleic acid molecule where the first element is positioned somewhere that is 5′ to the second element. Conversely, a first element is downstream of a second element in a nucleic acid molecule where the first element is positioned somewhere that is 3′ to the second element.

### Variant

[0295] As used herein the term“variant” should be taken to mean the exhibition of qualities that have a pattern that deviates from what occurs in nature, e.g., a variant retron RT is retron RT comprising one or more changes in amino acid residues as compared to a wild type retron RT amino acid sequence. The term“variant” encompasses homologous proteins having at least 75%, or at least 80%, or at least 85%, or at least 90%, or at least 95%, or at least 99% percent identity with a reference sequence and having the same or substantially the same functional activity or activities as the reference sequence. The term also encompasses mutants, truncations, or domains of a reference sequence, and which display the same or substantially the same functional activity or activities as the reference sequence.

### Vector

[0296] As used herein, the term “vector” permits or facilitates the transfer of a polynucleotide from one environment to another. It is a replicon such as a plasmid, phage, or cosmid into which another DNA segment may be inserted so as to bring about the replication of the inserted segment (e.g., the subject engineered retron). Generally, a vector is capable of replication when associated with the proper control elements. The term “vector” may include cloning and expression vectors, as well as viral vectors and integrating vectors.

### Wild Type

[0297] As used herein the term “wild type” is a term of the art understood by skilled persons and means the typical form of an organism, strain, gene, protein, or characteristic as it occurs in nature as distinguished from mutant or variant forms.

### DETAILED DESCRIPTION

[0298] The present disclosure provides systems, methods and compositions used for precise genome editing, including installing nucleic acid insertions, replacements, and deletions at targeted and precise genome sites, wherein said systems, methods, and compositions are based on novel and/or modified retrons or components thereof, such as modified versions of the retron RTs of Table X, modified versions of the ncRNAs of Table A, and modified versions of the RTs of Table B.

[0299] In one aspect, the present disclosure provides recombinant retrons comprising one or more genetic modifications which improves the functionality and/or properties of a retron. Such genetic modifications can include a mutation, insertion, deletion, inversion, replacement, substitution, or translocation of one or more contiguous or non-contiguous nucleobases in a nucleic acid molecule encoding a retron or a component of a retron, such as an ncRNA or a reverse transcriptase. In various aspects, the retron that becomes modified with the one or more genetic modifications (i.e., the “pre-modified” or “unmodified” retron or retron component) is a naturally occurring retron or retron component (e.g., naturally occurring ncRNA of Table A or RT) ability to facilitate homology-dependent recombination (or HDR) in a cell, thereby resulting in a relative increase in the concentrations or amounts of msDNA comprising a DNA donor template. In particular embodiments, the recombinant retrons are based on and/or derived from a naturally-occurring retron, such as any retron-related sequence provided by Table X (the introduction of the one or more genetic modifications into a set of 7257 previously unknown retrons discovered through computational methods described herein (e.g., see Examples). In other embodiments, the recombinant retrons are based on introducing the one or more genetic modifications into previously available retron sequences (e.g., the “Mestre et al., Systematic Prediction of Genes Functionally Associated with Bacterial Retrons and Classification of The Encoded Tripartite Systems, Nucleic Acids Research, Volume 48, Issue 22, 16 Dec. 2020, Pages 12632-12647” (incorporated herein by reference) to achieve recombinant retrons with the enhanced ability to produce increased concentrations or amounts of msDNA comprising a DNA donor template.

[0300] In another aspect, the present disclosure further provides nucleic acid molecules encoding the recombinant retrons and/or recombinant retron components (e.g., a recombinant ncRNA and/or a recombinant retron RT). In still another aspect, the present disclosure provides genome editing systems comprising recombinant retron components (e.g., recombinant ncRNA and/or recombinant RT), programmable nucleases (e.g., RNA-guided nucleases, such as CRISPR-Cas proteins, ZFPs, and TALENS), and guide RNAs (in the case where RNA-guide nucleases are used in said genome editing systems). In a further aspect, the disclosure provides nucleic acid molecules encoding the described genome editing systems and said components thereof, as well as polypeptides making up the components of said genome editing systems. In yet another aspect, the disclosure provides vectors for transferring and/or expressing said genome editing systems, e.g., under in vitro, ex vivo, and in vivo conditions. In still another aspect, the disclosure provides cell-delivery compositions and methods, including compositions for passive and/or active transport to cells (e.g., plasmids), delivery by virus-based recombinant vectors (e.g., AAV and/or lentivirus vectors), delivery by non-virus-based systems (e.g., liposomes and LNPs), and delivery by virus-like particles. Depending on the delivery system employed, the retron-based genome editing systems described herein may be delivered in the form of DNA (e.g., plasmids or DNA-based virus vectors), RNA (e.g., ncRNA and mRNA delivered by LNPs), a mixture of DNA and RNA, protein (e.g., virus-like particles), and ribonucleoprotein (RNP) complexes. Any suitable combinations of approaches for delivering the components of the herein disclosed retron-based genome editing systems may be employed. In one embodiment, each of the components of the retron-based genome editing system is delivered by an all-RNA system, e.g., the delivery of one or more RNA molecules (e.g., mRNA and/or ncRNA) by one or more LNPs, wherein the one or more RNA molecules form the ncRNA and guide RNA (as needed) and/or are translated into the polypeptide components (e.g., the RT and a programmable nuclease). In yet another aspect, the disclosure provides methods for genome editing by introducing a retron-based genome editing system described herein into a cell (e.g., under in vitro, in vivo, or ex vivo conditions) comprising a target edit site, thereby resulting in an edit at the target edit. In other aspects, the disclosure provides formulations comprising any of the aforementioned components for delivery to cells and/or tissues, including in vitro, in vivo, and ex vivo delivery, recombinant cells and/or tissues modified by the recombinant retron-based genome modification systems and methods described herein, and methods of modifying cells by conducting genome editing and related DNA donor-dependent methods, such as recombineering, or cell recording, using the herein disclosed retron-based genome modification systems. The disclosure also provides methods of making the recombinant retrons, retron-based genome modification systems, vectors, compositions and formulations described herein, as well as to pharmaceutical compositions and kits for modifying cells under in vitro, in vivo, and ex vivo conditions that comprise the herein disclosed genome editing and/or modification systems.

[0301] Described herein are engineered retrons comprising one or more heterologous nucleic acids. The one or more heterologous nucleic acids may be inserted, for example, at or within a location selected from: the msd locus, upstream of the msr locus, upstream of the msd locus, and downstream of the msd locus. In some embodiments, the engineered retrons have structural improvements over their naturally existing counterparts or wild-type retrons at least with respect to the encoded ncRNA and/or the reverse transcriptase (RT), such that the engineered retron or the encoded ncRNA thereof, when delivered to a host cell, such as a mammalian host cell, exhibits various functional improvements over its naturally existing/wild-type retron elements.

[0302] Exemplary (non-limiting functional improvements) may include any one or more of the features described herein. For example, in some embodiments, the engineered retron may comprise a sequence modification (e.g., insertion, deletion, and/or substitution of one or more nucleotide(s)) in the msr locus and/or the msd locus that: i) modulates (e.g., enhances) reverse transcription, processivity, accuracy/fidelity, and/or production of the msDNA (e.g., in the mammalian cell); ii) modulates (e.g., reduces) immunogenicity of the ncRNA encoded by the engineered retron (e.g., encoded by the msr locus and/or the msd locus) in a host (e.g., a host comprising the mammalian cell); iii) comprises a nucleotide sequence that modulates (e.g., inhibits or antagonizes) a function of the msDNA; and/or iv) modulates (e.g., improves) efficiency of targeted genomic engineering.

[0303] Thus, in general, the engineered retron is an engineered nucleic acid construct comprising: a) a first polynucleotide encoding a non-coding RNA (ncRNA), said first polynucleotide comprising: i) an msr locus encoding the msr RNA portion of a multi-copy single-stranded DNA (msDNA); and ii) an msd locus encoding the msd RNA portion of the msDNA; and

[0304] b) one or more heterologous nucleic acids inserted at or within a location selected from: the msd locus, upstream of the msr locus, upstream of the msd locus, and downstream of the msd locus.

[0305] The engineered nucleic acid construct (e.g., the engineered retron) may further comprise a second polynucleotide encoding a reverse transcriptase (RT), or a portion thereof, wherein the encoded RT is capable of synthesizing a DNA copy of at least a portion of the msd locus encoding the msDNA.

[0306] In certain embodiments, the engineered retron of the invention encodes a reverse transcriptase (RT) or a functional domain thereof, comprising: i) a polypeptide listed in Table A, or a polypeptide having at least 50%, at least 55%, at least 60%, at least 65%, at least 70%, at least 75%, at least 80%, at least 85%, at least 90%, at least 91%, at least 92%, at least 93%, at least 94%, at least 95%, at least 96%, at least 97%, at least 98%, at least 99%, at least 99.1%, at least 99.2%, at least 99.3%, at least 99.4%, at least 99.5%, at least 99.6%, at least 99.7%, at least 99.8% or at least 99.9% sequence identity to a polypeptide listed in Table A; and/or ii) a polypeptide listed in any one of Table C. In some embodiments, the RT does not comprise a polypeptide listed in Table X.

[0307] In certain embodiments, the engineered retron of the invention encodes a reverse transcriptase (RT) or a functional domain thereof, comprising: i) a polynucleotide listed in Table A, or a polynucleotide having at least 50%, at least 55%, at least 60%, at least 65%, at least 70%, at least 75%, at least 80%, at least 85%, at least 90%, at least 91%, at least 92%, at least 93%, at least 94%, at least 95%, at least 96%, at least 97%, at least 98%, at least 99⁰/a %, at least 99.1%, at least 99.2%, at least 99.3%, at least 99.4%, at least 99.5%, at least 99.6%, at least 99.7%, at least 99.8% or at least 99.9% sequence identity to a polynucleotide listed in Table A; and/or ii) a consensus polynucleotide sequence listed in Table C. In some embodiments, the polynucleotide encoding the RT does not comprise a polynucleotide of Table X.

[0308] In certain embodiments, the engineered retron of the invention encodes an ncRNA comprising: (I) an ncRNA listed in Table B, or an ncRNA having at least 50%, at least 55%, at least 60%, at least 65%, at least 70%, at least 75%, at least 80%, at least 85%, at least 90%, at least 91%, at least 92%, at least 93%, at least 94%, at least 95%, at least 96%, at least 97%, at least 98%, at least 99%, at least 99.1%, at least 99.2%, at least 99.3%, at least 99.4%, at least 99.5%, at least 99.6%, at least 99.7%, at least 99.8% or at least 99.9% sequence identity to an ncRNA in Table B.

[0309] In certain embodiments, the engineered retron of the invention encodes an ncRNA and a reverse transcriptase (RT) or a functional domain thereof, wherein the ncRNA and the RT or functional domain thereof are as described above.

[0310] Specifically, in such embodiment, the ncRNA may comprise: (I) an ncRNA listed in Table B, or an ncRNA having at least 50%, at least 55%, at least 60%, at least 65%, at least 70%, at least 75%, at least 80%, at least 85%, at least 90%, at least 91%, at least 92%, at least 93%, at least 94%, at least 95%, at least 96%, at least 97%, at least 98%, at least 99%, at least 99.1%, at least 99.2%, at least 99.3%, at least 99.4%, at least 99.5%, at least 99.6%, at least 99.7%, at least 99.8% or at least 99.9% sequence identity to an ncRNA listed in Table B.

[0311] Also in such embodiment, the reverse transcriptase (RT) or functional domain thereof comprises: (A) i) a polypeptide listed in Table A, or a polypeptide having at least 50%, at least 55%, at least 60%, at least 65%, at least 70%, at least 75%, at least 80%, at least 85%, at least 90%, at least 91%, at least 92%, at least 93%, at least 94%, at least 95%, at least 96%, at least 97%, at least 98%, at least 99%, at least 99.1%, at least 99.2%, at least 99.3%, at least 99.4%, at least 99.5%, at least 99.6%, at least 99.7%, at least 99.8% or at least 99.9% sequence identity to a polypeptide listed in Table A; and/or ii) a polypeptide listed in Table C; optionally, the RT does not comprise a polypeptide listed in Table X; OR (B) i) a polynucleotide listed in Table A, or a polynucleotide having at least 50%, at least 55%, at least 60%, at least 65%, at least 70%, at least 75%, at least 80%, at least 85%, at least 90%, at least 91%, at least 92%, at least 93%, at least 94%, at least 95%, at least 96%, at least 97%, at least 98%, at least 99%, at least 99.1%, at least 99.2%, at least 99.3%, at least 99.4%, at least 99.5%, at least 99.6%, at least 99.7%, at least 99.8% or at least 99.9% sequence identity to a polynucleotide in Table A; and/or optionally, the polynucleotide encoding the RT does not comprise a polynucleotide in Table X.

[0312] In certain embodiments, the engineered nucleic acid construct comprises: 1) an msr locus (that encodes the msr RNA portion of an msDNA); 2) an msd locus encoding the msd RNA portion of the msDNA; 3) a sequence encoding a retron reverse transcriptase (RT), wherein said msd RNA is capable of being reverse transcribed to form the msDNA by the retron reverse transcriptase (RT); and, 4) a heterologous nucleic acid inserted at or within the msd locus, upstream of the msr locus, upstream or downstream of the msd locus; wherein the engineered nucleic acid construct is engineered based on and/or to resemble a secondary structure of a wild-type or consensus retron encoding a wild-type or consensus retron ncRNA encompassed by: a) any one of the sequences and/or structures as depicted in any one of SEQ ID NOs: of Table B and/or FIGS. 2-27; or b) a variant of a), having: i) up to 1, 2, or 3 (e.g., up to 1) nucleotide changes per 10 red lettered-nucleotides; ii) up to 4, 5, or 6 (e.g., up to 1 or 2) nucleotide changes per 10 black lettered-nucleotides; and/or iii) up to 7, 8, or 9 (e.g., up to 3 or 4) nucleotide changes per 10 grey lettered-nucleotides; and/or optionally further comprising: i) 7, 8, 9, or 10 (e.g., 9 or 10) nucleotides present per 10 red-circled nucleotides; ii) 6, 7, 8, 9, or 10 (e.g., 8, 9 or 10) nucleotides present per 10 black-circled nucleotides; iii) 4, 5, 6, 7, 8, 9, or 10 (e.g., 6, 7, 8, 9 or 10) nucleotides present per 10 grey-circled nucleotides; and/or iv) 2, 3, 4, 5, 6, 7, 8, 9, or 10 (e.g., 4, 5, 6, 7, 8, 9, or 10) nucleotides present per 10 white-circled nucleotides; wherein the ncRNA does not comprise an ncRNA associated with the sequences of Table X.

[0313] The engineered nucleic acid construct (e.g., the engineered retron) may comprise one or more sequence modifications (e.g., an insertion, deletion, and/or substitution of one or more nucleotide(s)) in the msr locus and/or the msd locus that: a) modulates (e.g., enhances) reverse transcription, processivity, accuracy/fidelity, and/or production of the msDNA (e.g., in the mammalian cell); b) modulates (e.g., reduces) immunogenicity of ncRNA encoded by the engineered retron (e.g., the msr locus and/or the msd locus) in a host (e.g., a host comprising the mammalian cell); c) modulates (e.g., inhibits, either permanently or transiently) a function of the msDNA; and/or d) modulates (e.g., improves) efficiency of targeted genome editing/engineering.

[0314] In some embodiments, the engineered nucleic acid construct (e.g., the engineered retron) is engineered based on and/or to resemble a secondary structure of a wild-type or consensus retron encoding a wild-type or consensus retron ncRNA encompassed by: a) the sequence of any one of Table B ncRNA sequences and/or the structure depicted in any one of FIGS. 2-27; or b) a variant of a), having: i) up to 1, 2, or 3 (e.g., up to 1) nucleotide changes per 10 red lettered-nucleotides; ii) up to 4, 5, or 6 (e.g., up to 1 or 2) nucleotide changes per 10 black lettered-nucleotides; and/or iii) up to 7, 8, or 9 (e.g., up to 3 or 4) nucleotide changes per 10 grey lettered-nucleotides; and/or optionally further comprising: i) 7, 8, 9, or 10 (e.g., 9 or 10) nucleotides present per 10 red-circled nucleotides; ii) 6, 7, 8, 9, or 10 (e.g., 8, 9 or 10) nucleotides present per 10 black-circled nucleotides; iii) 4, 5, 6, 7, 8, 9, or 10 (e.g., 6, 7, 8, 9 or 10) nucleotides present per 10 grey-circled nucleotides; and/or iv) 2, 3, 4, 5, 6, 7, 8, 9, or 10 (e.g., 4, 5, 6, 7, 8, 9, or 10) nucleotides present per 10 white-circled nucleotides.

[0315] Another aspect of the disclosure provides a vector system comprising a vector comprising the engineered retron described herein.

[0316] Another aspect of the disclosure provides an isolated host cell comprising the engineered retron described herein, or the vector system described herein.

[0317] Another aspect of the disclosure provides a pharmaceutical composition comprising the engineered retron described herein, or the vector system described herein.

[0318] Another aspect of the disclosure provides a delivery vehicle comprising the engineered retron described herein or the ncRNA encoded by the engineered retron described herein, the vector or vector system described herein, the host cell described herein, or the pharmaceutical composition described herein.

[0319] Another aspect of the disclosure provides a kit comprising the engineered retron described herein or the ncRNA encoded by the engineered retron described herein, and optionally instructions for genetically modifying a cell using the engineered retron described herein or the ncRNA encoded by the engineered retron described herein.

[0320] Another aspect of the disclosure provides a method of modifying a target DNA sequence in a host cell (e.g., a mammalian cell), the method comprising introducing into the host cell (e.g., the mammalian cell) the engineered retron of the invention, the ncRNA encoded by the engineered retron of the invention, or the vector/vector system described herein, to allow the production of the msDNA in the host cell (e.g., mammalian cell), wherein at least a part of the heterologous nucleic acid in the msDNA is integrated into the genome of the host (e.g., mammalian) cell at the target DNA sequence. Optionally, the target sequence is recognized by a suitable nuclease, such as a CRISPR/Cas effector enzyme, a ZFN, a TALEN, a meganuclease, TnpB, IscB, or a restriction endonuclease (RE), and a double-stranded break (DSB) is created by the nuclease to facilitate/promote the insertion of the part of the heterologous nucleic acid into the target sequence. Further optionally, the target sequence modified/inserted by the part of the heterologous nucleic acid can no longer be recognized by the nuclease to re-create a DSB.

[0321] Another aspect of the disclosure provides a use of the engineered retron in the various methods described herein.

[0322] Another aspect of the disclosure provides a genome editing system comprising: a) nuclease capable of acting at a target site on a genome (e.g. human genome), such as a CRISPR/Cas effector enzyme, a ZFN, a TALEN, a meganuclease, TnpB, IscB, or a restriction endonuclease (RE); and b) an engineered retron described herein, or an ncRNA encoded thereby, or a vector or a vector system comprising or encoding the same. Optionally, the nuclease may be linked to one or more element(s) of the engineered retron or the encoded ncRNA. For example, in one embodiment, the nuclease may be linked (e.g., fused or conjugated) to the reverse transcriptase of the engineered retron described herein. In another embodiment, the nuclease may engage/bind to form a complex with a nucleic acid guide sequence (such as a single-guided RNA of a Cas enzyme), wherein the guide sequence is linked to the ncRNA and/or msDNA of the engineered retron described herein.

[0323] Another aspect of the disclosure provides an enhanced genome editing system, comprising the genome editing system of the disclosure connected to a biomolecule that modulates host DNA repair, in order to, for example, modulate (e.g., enhance) the incorporation of the heterologous nucleic acid sequence into a genome (e.g., human genome).

[0324] With the general aspect of the disclosure described herein, specific aspects and embodiments of the disclosure are further described in the sections below. It should be understood that any one embodiment of the disclosure, including those described only in the examples or the claims, or only in one section herein below, can be combined with any one or more additional embodiments of the invention, unless such combination is expressly disclaimed or are improper.

[0325] A. Recombinant Retrons

[0326] The present disclosure provides engineered retrons, as well as compositions, systems, and methods that include or utilize the engineered retrons for genome modification, such as genome editing, cell recording, and recombineering.

[0327] Retrons were originally discovered in 1984 in Myxococcus xanthus bacterium when a short, multi-copy single-stranded DNA (msDNA) that is abundantly present in the bacterial cell was identified. Since then, a number of naturally existing retrons have been found in many prokaryotes such as bacteria.

[0328] As depicted in FIG. 1A, retrons encode and transcribe as a single RNA, which comprises a non-coding RNA (ncRNA) portion and a portion encoding a specialized reverse transcriptase (RT). The retron ncRNA (msr and msd) is the precursor of the hybrid molecule that eventually forms, and it initially folds into a typical RNA secondary structure that is recognized by the accompanying RT. The translated RT typically recognizes certain secondary structures in the ncRNA, and binds the RNA template downstream from the msd region. The RT initiates reverse transcription of the RNA towards its 5′ end, starting from the 2′-end of a conserved guanosine (G) residue found immediately after a double-stranded RNA structure (the a1/a2 region) within the ncRNA. A portion of the ncRNA serves as a template for reverse transcription, and reverse transcription terminates before reaching the msr locus. During reverse transcription, cellular RNase H degrades the segment of the ncRNA that serves as template, but not other parts of the ncRNA. The result of the reverse transcription, the msDNA, remains covalently attached to the RNA template via the 2′-5′ phosphodiester bond, and base-pairs with the RNA template using the 3′ end of the msDNA. See FIG. 1A for a general or typical organization of the retron coding sequence, including the RT encoding sequence and the msr and msd loci, as well as the synthesis of the msDNA by reverse transcription of the initial ncRNA transcript.

[0329] Many retrons also contain an accessory protein (not depicted in FIG. 1A), which may have a variable function that may not be fully understood. In certain embodiments, the engineered retrons described herein do not comprise the accessory protein naturally associated with the wild-type or template retron.

[0330] Applicant has discovered, analyzed, and phylogenetically classified 7257 previously unknown retrons from nature based on multiple criteria, including sequence homology and conserved predicted secondary structures, and has grouped these retrons into different phylogenetic clades based on sequence homology and/or conserved predicted secondary structures. These clades include Type IA_IIA1 (FIG. 2), Type 1B1 (FIG. 3), Type 1B2 (FIG. 4), Type 1C (FIG. 5), Type IIA1 other (FIG. 6), Type IIA2 (FIG. 7), Type IIA3 (FIG. 8), Type IIA4 (FIG. 9), Type IIA5 (FIG. 10), Type IIIA1 (FIG. 11), Type IIIA2 (FIG. 12), Type IIIA3 (FIG. 13), Type IIIA4 (FIG. 14), Type IIIA5 (FIG. 15), Type IIIunk (FIG. 16), Type IV (FIG. 1X), Type V (FIG. 19), Type VI (FIG. 20), Type XI Group 1 (FIG. 21), Type XI (Group 2) (FIG. 22), Type XII (FIG. 23), Type XIII (FIG. 24), Type XIV (FIG. 25), Eco107-like (FIG. 26), and Outgroup A (FIG. 27). The disclosure further describes the engineering and/or modification of these newly discovered retron sequences as a starting point to obtain useful recombinant retrons, such as those depicted in FIG. 1B.

[0331] FIG. 1B.1 depicts an embodiment of a recombinant retron construct (e.g., a nucleotide sequence cloned into an expression vector) contemplated by the present disclosure. In the top left schematic, the single thin black line represents a double-stranded nucleotide sequence (e.g., as cloned into an expression vector, such as a plasmid). The recombinant retron is constructed by modifying a starting point retron DNA sequence encoding a ncRNA (the msr/msd region) (such as any one of the herein disclosed 7257 newly discovered retron sequences, and specifically any one of the 7257 ncRNA sequences of Table B. A starting point retron DNA sequence encoding an ncRNA may be modified in any number of ways and can including one modification or more than one modification. For example, the retron DNA may modified to contain at least one nucleotide modification, including a single nucleotide substitution, insertion, or deletion, or a substitution, insertion, or deletion of more than one nucleotide, i.e., up to 2, 3, 4, 5, 6, 7, 8, 9, 10, 11, 12, 13, 14, 15, 16, 17, 18, 19, 20, 21, 22, 23, 24, 25, 26, 27, 28, 29, 30, 31, 32, 33, 34, 35, 36, 37, 38, 39, 40, 41, 42, 43, 44, 45, 46, 47, 48, 49, 50, 51, 52, 53, 54, 55, 56, 57, 58, 59, 60, 61, 62, 63, 64, 65, 66, 67, 68, 69, 70, 71, 72, 73, 74, 75, 76, 77, 78, 79, 80, 81, 82, 83, 84, 85, 86, 87, 88, 89, 90, 91, 92, 93, 94, 95, 96, 97, 98, 99, or up to 100, or up to 200, 300, 400, 500, 600, 700, 800, 900, 1000, 1100, 1200, 1300, 1400, 1500, 1600, 1700, 1800, 1900, or up to 2000 nucleotides substituted, inserted, or deleted from a starting point retron (e.g., a wildtype retron). Where more than one nucleotide of a starting point retron (e.g., a wildtype retron) is substituted, deleted, or inserted, the nucleotides may be contiguous or non-contiguous. While an engineered retron as a whole is not naturally-occurring, it may include components such as nucleotide sequences that do occur in nature. For example, an engineered retron can have nucleotide sequences from different organisms (e.g., from different bacteria species), or from completely synthetic/artificial/recombinant nucleic acid sequences. Thus, an engineered retron can have a bacterial nucleotide sequence, a human nucleotide sequence, a viral nucleotide sequence, and/or a synthetic/artificial/recombinant nucleotide sequence, and/or combinations of such sequences. An example of modifications of the recombinant retrons disclosed herein include the insertion of a heterologous nucleic acid sequence in a retron, for example, inserted into the ncRNA locus, such as in the msr or the msd loci. Linking guide RNA molecules to the 5′ and/or 3′ ends (i.e., linking one at the 5′ end of a ncRNA and/or one at the 3′ end of a ncRNA) also represents another modification contemplated by the recombinant retrons disclosed herein. In such embodiments, the guide RNA molecules may also be categorized or referred to more generally as types of heterologous nucleic acid sequences used to modify starting point retrons. These modifications are depicted in FIG. 1B.

[0332] In addition to the DNA encoding the ncRNA, the DNA encoding the RT may also be modified to obtain a recombinant RT. For example, the RT-encoding DNA may modified to contain at least one nucleotide modification, including a single nucleotide substitution, insertion, or deletion, or a substitution, insertion, or deletion of more than one nucleotide, i.e., up to 2, 3, 4, 5, 6, 7, 8, 9, 10, 11, 12, 13, 14, 15, 16, 17, 18, 19, 20, 21, 22, 23, 24, 25, 26, 27, 28, 29, 30, 31, 32, 33, 34, 35, 36, 37, 38, 39, 40, 41, 42, 43, 44, 45, 46, 47, 48, 49, 50, 51, 52, 53, 54, 55, 56, 57, 58, 59, 60, 61, 62, 63, 64, 65, 66, 67, 68, 69, 70, 71, 72, 73, 74, 75, 76, 77, 78, 79, 80, 81, 82, 83, 84, 85, 86, 87, 88, 89, 90, 91, 92, 93, 94, 95, 96, 97, 98, 99, or up to 100, or up to 200, 300, 400, 500, 600, 700, 800, 900, 1000, 1100, 1200, 1300, 1400, 1500, 1600, 1700, 1800, 1900, or up to 2000 nucleotides substituted, inserted, or deleted from a starting point retron (e.g., a wildtype retron) within the RT gene.

[0333] Such modifications to the DNA encoding ncRNA and/or RT may modulate the function of the ncRNA and/or RT in various ways, including i) modulating (e.g., enhancing) reverse transcription, processivity, accuracy/fidelity, and/or production of the msDNA (e.g., in the mammalian cell); ii) modulating (e.g., reducing) immunogenicity of ncRNA (msr locus and msd locus) encoded by the engineered retron in a host (e.g., a host comprising the mammalian cell); iii) modulating (e.g., inhibits, either permanently or transiently) a function of the msDNA; and/or iv) modulating (e.g., improving) efficiency of targeted genome editing/engineering.

[0334] In one embodiment, the present disclosure provides recombinant retrons having the general structure of: a) an msr locus; b) an msd locus encoding the msd RNA portion of the msDNA; c) a sequence encoding a retron reverse transcriptase (RT) (optionally in trans to the ncRNA), wherein the msd RNA is capable of being reverse transcribed (e.g., in a host cell such as a mammalian cell) to form an msDNA by the retron reverse transcriptase (RT); d) a heterologous nucleic acid (e.g., heterologous DNA) capable of being transcribed with the msr locus and/or the msd locus, optionally, the heterologous nucleic acid is inserted at or within the msd locus, upstream of the msr locus, upstream or downstream of the msd locus.

[0335] The engineered retrons of the invention are optionally structurally further modified to include one or more heterologous nucleic acids. The engineered retron may be further modified to provide various functional improvements, such as (without limitation), to enhance the production of msDNA in a cell (e.g., a mammalian cell, including a human cell).

[0336] In certain embodiments, the disclosure provides engineered retrons based on their conserved predicted secondary structures, such as those in FIGS. 2-27.

[0337] In other embodiments, the disclosure provides engineered retrons based on their sequence identity. Exemplary RT amino acid sequences and ret gene nucleic acid sequences are provided in Table A. Exemplary RT consensus amino acid sequences and/or ret gene nucleic acid sequences are provided in Table C. Exemplary ncRNA sequences are provided in Table B.

[0338] Retron sequences provisioned out of the scope of the invention are provided in Table X.

[0339] In certain embodiments, exemplary engineered retrons of the invention (1) are engineered based on or engineered to resemble the secondary structures as depicted in any one of FIGS. 2-27, and/or (2) are provided in Table B. Sequences with significant sequence percentage identity (e.g., at least 50%, at least 55%, at least 60%, at least 65%, at least 70%, at least 75%, at least 80%, at least 85%, at least 90%, at least 91%, at least 92%, at least 93%, at least 94%, at least 95%, at least 96%, at least 97%, at least 98%, at least 99%, at least 99.1%, at least 99.2%, at least 99.3%, at least 99.4%, at least 99.5%, at least 99.6%, at least 99.7%, at least 99.8% or at least 99.9% sequence identity) are also within the scope of the invention.

[0340] In certain embodiments, the engineered nucleic acid construct comprises: 1) an msr locus (that encodes the msr RNA portion of an msDNA); 2) an msd locus encoding the msd RNA portion of the msDNA; 3) a sequence encoding a retron reverse transcriptase (RT), wherein said msd RNA is capable of being reverse transcribed to form the msDNA by the retron reverse transcriptase (RT); and, 4) a heterologous nucleic acid inserted at or within the msd locus, upstream of the msr locus, upstream or downstream of the msd locus; wherein the engineered nucleic acid construct is engineered based on and/or to resemble a secondary structure of a wild-type or consensus retron encoding a wild-type or consensus retron ncRNA encompassed by: a) any one of the sequences and/or structures as depicted in any one of SEQ ID Nos of Table B and/or FIGS. 2-27; or b) a variant of a), having: i) up to 1, 2, or 3 (e.g., up to 1) nucleotide changes per 10 red lettered-nucleotides; ii) up to 4, 5, or 6 (e.g., up to 1 or 2) nucleotide changes per 10 black lettered-nucleotides; and/or iii) up to 7, 8, or 9 (e.g., up to 3 or 4) nucleotide changes per 10 grey lettered-nucleotides; and/or optionally further comprising: i) 7, 8, 9, or 10 (e.g., 9 or 10) nucleotides present per 10 red-circled nucleotides; ii) 6, 7, 8, 9, or 10 (e.g., 8, 9 or 10) nucleotides present per 10 black-circled nucleotides; iii) 4, 5, 6, 7, 8, 9, or 10 (e.g., 6, 7, 8, 9 or 10) nucleotides present per 10 grey-circled nucleotides; and/or iv) 2, 3, 4, 5, 6, 7, 8, 9, or 10 (e.g., 4, 5, 6, 7, 8, 9, or 10) nucleotides present per 10 white-circled nucleotides; wherein the ncRNA does not comprise an ncRNA associated with the sequences of Table X.

[0341] In certain embodiments, the engineered retron of the invention encodes a reverse transcriptase (RT) or a functional domain thereof, comprising: i) a polypeptide listed in Table A, or a polypeptide having at least 50%, at least 55%, at least 60%, at least 65%, at least 70%, at least 75%, at least 80%, at least 85%, at least 90%, at least 91%, at least 92%, at least 93%, at least 94%, at least 95%, at least 96%, at least 97%, at least 98%, at least 99%, at least 99.1%, at least 99.2%, at least 99.3%, at least 99.4%, at least 99.5%, at least 99.6%, at least 99.7%, at least 99.8% or at least 99.9% sequence identity to a polypeptide listed in Table A. In some embodiments, the RT does not comprise a polypeptide identified in Table X.

[0342] In certain embodiments, the engineered retron of the invention encodes a reverse transcriptase (RT) or a functional domain thereof, comprising: i) a polynucleotide listed in Table A, or a polynucleotide having at least 50%, at least 55%, at least 60%, at least 65%, at least 70%, at least 75%, at least 80%, at least 85%, at least 90%, at least 91%, at least 92%, at least 93%, at least 94%, at least 95%, at least 96%, at least 97%, at least 98%, at least 99%, at least 99.1%, at least 99.2%, at least 99.3%, at least 99.4%, at least 99.5%, at least 99.6%, at least 99.7%, at least 99.8% or at least 99.9% sequence identity to a polynucleotide of Table A and/or ii) a consensus polynucleotide sequence listed in Table A. In some embodiments, the polynucleotide encoding the RT does not comprise a polynucleotide identified in Table X.

[0343] In certain embodiments, the engineered retron of the invention encodes an ncRNA comprising: (I) an ncRNA listed in Table B, or an ncRNA having at least 50%, at least 55%, at least 60%, at least 65%, at least 70%, at least 75%, at least 80%, at least 85%, at least 90%, at least 91%, at least 92%, at least 93%, at least 94%, at least 95%, at least 96%, at least 97%, at least 98%, at least 99%, at least 99.1%, at least 99.2%, at least 99.3%, at least 99.4%, at least 99.5%, at least 99.6%, at least 99.7%, at least 99.8% or at least 99.9% sequence identity to an ncRNA of Table B.

[0344] In certain embodiments, the engineered retron of the invention encodes an ncRNA and a reverse transcriptase (RT) or a functional domain thereof, wherein the ncRNA and the RT or functional domain thereof are as described above.

[0345] Specifically, in such embodiments, the ncRNA may comprise: (I) an ncRNA listed in Table B, or an ncRNA having at least 50%, at least 55%, at least 60%, at least 65%, at least 70%, at least 75%, at least 80%, at least 85%, at least 90%, at least 91%, at least 92%, at least 93%, at least 94%, at least 95%, at least 96%, at least 97%, at least 98%, at least 99%, at least 99.1%, at least 99.2%, at least 99.3%, at least 99.4%, at least 99.5%, at least 99.6%, at least 99.7%, at least 99.8% or at least 99.9% sequence identity to an ncRNA listed in Table B; and wherein the ncRNA optionally excludes the ncRNA associated with the sequences identified in Table X.

[0346] Also in such embodiment, the reverse transcriptase (RT) or functional domain thereof comprises: (A) i) a polypeptide listed in Table A, or a polypeptide having at least 50%, at least 55%, at least 60%, at least 65%, at least 70%, at least 75%, at least 80%, at least 85%, at least 90%, at least 91%, at least 92%, at least 93%, at least 94%, at least 95%, at least 96%, at least 97%, at least 98%, at least 99%, at least 99.1%, at least 99.2%, at least 99.3%, at least 99.4%, at least 99.5%, at least 99.6%, at least 99.7%, at least 99.8% or at least 99.9% sequence identity to a polypeptide listed in Table A; and/or ii) a polypeptide listed in Table C; optionally, the RT does not comprise a polypeptide identified in Table X; OR (B) i) a polynucleotide listed in Table A, or a polynucleotide having at least 50%, at least 55%, at least 60%, at least 65%, at least 70%, at least 75%, at least 80%, at least 85%, at least 90%, at least 91%, at least 92%, at least 93%, at least 94%, at least 95%, at least 96%, at least 97%, at least 98%, at least 99%, at least 99.1%, at least 99.2%, at least 99.3%, at least 99.4%, at least 99.5%, at least 99.6%, at least 99.7%, at least 99.8% or at least 99.9% sequence identity to a polynucleotide listed in Table A; optionally, the polynucleotide encoding the RT does not comprise a polynucleotide associated with the sequences identified in Table X.

[0347] In certain embodiments, the heterologous nucleic acid is between >20 nucleotides and about 10,000 nucleotides.

[0348] The engineered retron may further comprise a sequence modification (e.g., insertion, deletion, and/or substitution of one or more nucleotide(s)) in the msr locus and/or the msd locus that: i) modulates (e.g., enhances) reverse transcription, processivity, accuracy/fidelity, and/or production of the msDNA (e.g., in the mammalian cell); ii) modulates (e.g., reduces) immunogenicity of ncRNA (msr locus and msd locus) encoded by the engineered retron in a host (e.g., a host comprising the mammalian cell); iii) comprises a nucleotide sequence that modulates (e.g., inhibits, either permanently or transiently) a function of the msDNA; and/or iv) modulates (e.g., improves) efficiency of targeted genome editing/engineering.

[0349] Retron msr gene, msd gene, and RT nucleic acid sequences (e.g., the ret gene) as well as the encoded retron reverse transcriptase protein sequences that may serve as the template of the engineered retron described herein may be derived from any source, such as those in Table A, optionally excluding those associated with the sequences of Table X.

[0350] In some embodiments, template or wild-type (wt) sequences of the msr gene, msd gene, and the RT coding sequence (viz., the ret gene) used in the engineered retron are derived from a bacterial retron.

[0351] In some embodiments, representative template/wild-type retrons are from gram negative bacteria. In some embodiments, the retron is from a bacterium listed in Table X.

[0352] In some embodiments, the engineered retrons are engineered based on clades defined on retron/retron RTs, in which the retrons are associated with a tripartite system composed of the ncRNA, the RT and an additional protein or RT-fused domain with diverse enzymatic functions. See, for example, “Mestre et al., Systematic Prediction of Genes Functionally Associated with Bacterial Retrons and Classification of The Encoded Tripartite Systems, Nucleic Acids Research, Volume 48, Issue 22, 16 Dec. 2020, Pages 12632-12647” (incorporated herein by reference). While the clades are based primarily upon naturally occurring ncRNA and retron/retron RT, and an additional protein or RT-fused domain, the clades, for the purpose of serving as the templates for the subject engineered retrons, are not limited to naturally occurring sequences. Rather, the clades can also encompass non-naturally occurring ncRNA and RT, including, without limitation, recombinant, modified or altered, chimeric, hybrid, synthetic, artificial, etc.

[0353] Thus, according to the instant disclosure, retrons may be considered phylogenetically related based on a Neighbor-Joining algorithm of at least 75% (of at least 1000 replicates) and a Poisson correction distance measurement of no more than 0.05, based on alignment of the retron RT. Alternatively or in addition, retrons may be considered phylogenetically related when/if the same RT, or closely related RT, can recognize the secondary structures of the ncRNA of the retrons and reserve transcribe the retrons to produce msDNA.

[0354] In certain embodiments, sequence alignments between different retron sequences (e.g., ncRNA and/or RT (protein and/or nucleic acid) sequences) or secondary structure generations are based on software known to one of ordinary skill in the art.

[0355] The retron ncRNA sequences including msr and msd sequences within the same clade may be highly conserved at certain positions, while being less conserved at other positions.

[0356] Exemplary consensus sequences based on clade members were generated (see, for example, the corresponding FIGS. 2-27, respectively) to show these conserved sequences and/or secondary structures, including the highly conserved nucleotides with at least 97% sequence conservation at red lettered-nucleotides, those with between 90-97% sequence conservation at black lettered-nucleotides, and 75-90% nucleotide sequence identity at grey-lettered nucleotides. Further structural limitations of the consensus sequences for the clades are provided as colored circles indicating the probability of having a base at that specific position, including red circles representing a base in 97% of the cases, black circles representing a base in 90-97% of the cases, and grey circles representing a base in 75-90% of the cases.

[0357] In some embodiments, the template ncRNA based on which the subject engineered retron is modified (including the msr and msd region sequences) is a consensus sequence for the various retron ncRNA (including msr and msd nucleic acid sequences) clades, as provided in any one of SEQ ID NOs: of Table B and the corresponding FIGS. 2-27, respectively, including the bases that are highly conserved and depicted by a specific-colored letters or circles, and optionally further including bases that may be present at specific locations by specific-colored circles.

[0358] In some embodiments, the engineered retron is engineered, based on and/or to resemble a secondary structure of a wild-type or consensus retron encoding a wild-type or consensus retron ncRNA encompassed by: 1) the sequences and/or structures as depicted in any one of SEQ ID NOs: of Table B and the corresponding FIGS. 2-27, respectively; or 2) a variant of 1), having: A) up to 1, 2, or 3 (e.g., up to 1) nucleotide changes per 10 red lettered-nucleotides; B) up to 4, 5, or 6 (e.g., up to 1 or 2) nucleotide changes per 10 black lettered-nucleotides; and/or C) up to 7, 8, or 9 (e.g., up to 3 or 4) nucleotide changes per 10 grey lettered-nucleotides. Optionally, the variant of 1) further comprises: a) 7, 8, 9, or 10 (e.g., 9 or 10) nucleotides present per 10 red-circled nucleotides; b) 6, 7, 8, 9, or 10 (e.g., 8, 9 or 10) nucleotides present per 10 black-circled nucleotides; c) 4, 5, 6, 7, 8, 9, or 10 (e.g., 6, 7, 8, 9 or 10) nucleotides present per 10 grey-circled nucleotides; and/or d) 2, 3, 4, 5, 6, 7, 8, 9, or 10 (e.g., 4, 5, 6, 7, 8, 9, or 10) nucleotides present per 10 white-circled nucleotides.

[0359] The engineered retron may be engineered by introducing the sequence modifications (e.g., deletions, additions, or substitutions) into the wild-type retron encoding wild-type retron ncRNA, or into the retron encoding the consensus retron ncRNA.

[0360] For example, a variant retron may not satisfy the sequence and/or structural requirements of any one of SEQ ID NOs: of Table B and the corresponding FIGS. 2-27, respectively, but may still be a suitable template for the engineered retron described herein, so long as one or more of the conditions set forth in A)-C) and/or a)-d) are met.

[0361] In certain embodiments, the highly conserved sequences in the template retrons are preserved/conserved or substantially preserved/conserved in the engineered retron described herein.

[0362] In certain embodiments, all or substantially all the red lettered-nucleotides (i.e., those conserved in about 97% or more of the retrons in the same clade) are preserved/conserved in the engineered retron described herein. In certain embodiments, no more than 1, 2, or 3 (e.g., up to 1) nucleotide change(s) (e.g., deleted or substituted) occur per 10 red lettered-nucleotides in the engineered retron described herein. In certain embodiments, no more than about 0.3%, 0.5%, 1%, 2%, 3%, 4%, or 5% of the red lettered-nucleotides are changed (e.g., deleted or substituted) in the engineered retron described herein.

[0363] In certain embodiments, all or substantially all the black lettered-nucleotides (i.e., those conserved in about 90-97% of the retrons in the same clade) are preserved/conserved in the engineered retron described herein. In certain embodiments, no more than 1, 2, 3, 4, 5, 6, 7, 8, 9, or 10 (e.g., up to 1 or 2) nucleotide change(s) (e.g., deleted or substituted) occur per 10 black lettered-nucleotides are changed in the engineered retron described herein. In certain embodiments, no more than about 3%, 4%, 5% or 10% of the black lettered-nucleotides are changed (e.g., deleted or substituted) in the engineered retron described herein.

[0364] In certain embodiments, all or substantially all the grey lettered-nucleotides (i.e., those conserved in about 75-90% of the retrons in the same clade) are preserved/conserved in the engineered retron described herein. In certain embodiments, no more than 1, 2, 3, 4, 5, 6, 7, 8, 9, 10, 11, 12, 13, 14, or 15 (e.g., up to 3 or 4, or up to 7, 8, or 9) nucleotide change(s) (e.g., deleted or substituted) occur per 10 grey lettered-nucleotides are changed in the engineered retron described herein. In certain embodiments, no more than about 5%, 10%, 15%, 20%, or 25% of the grey lettered-nucleotides are changed (e.g., deleted or substituted) in the engineered retron described herein.

[0365] In certain embodiments, all or substantially all the red circled-nucleotides (i.e., those with a nucleotide in about 97% or more of the retrons in the same clade) are present in the engineered retron described herein. In certain embodiments, no more than 1, 2, or 3 (e.g., 0.3, 0.5, or up to 1) nucleotides are absent (e.g., deleted) per 10 red circled-nucleotides in the engineered retron described herein. In certain embodiments, 7, 8, 9, or 10 (e.g., 9 or 10) nucleotides are present per 10 red circled-nucleotides in the engineered retron described herein. In certain embodiments, no more than about 0.3%, 0.5%, 1%, 2%, 3%, 4%, or 5% of the red circled-nucleotides are absent (e.g., deleted) in the engineered retron described herein.

[0366] In certain embodiments, all or substantially all the black circled-nucleotides (i.e., those with a nucleotide in about 90-97% of the retrons in the same clade) are present in the engineered retron described herein. In certain embodiments, no more than 1, 2, 3, or 4 (e.g., up to 1 or 2) nucleotides are absent (e.g., deleted) per 10 black circled-nucleotides in the engineered retron described herein. In certain embodiments, 6, 7, 8, 9, or 10 (e.g., 8, 9 or 10) nucleotides are present per 10 black circled-nucleotides in the engineered retron described herein. In certain embodiments, no more than about 1%, 2%, 3%, 5% or 10% of the black circled-nucleotides are absent (e.g., deleted) in the engineered retron described herein.

[0367] In certain embodiments, all or substantially all the grey circled-nucleotides (i.e., those with a nucleotide in about 75-90% of the retrons in the same clade) are present in the engineered retron described herein. In certain embodiments, no more than 1, 2, 3, 4, or 5 (e.g., up to 2, 3, or 4) nucleotides are absent (e.g., deleted) per 10 grey circled-nucleotides in the engineered retron described herein. In certain embodiments, 4, 5, 6, 7, 8, 9, or 10 (e.g., 6, 7, 8, 9 or 10) nucleotides are present per 10 grey circled-nucleotides in the engineered retron described herein. In certain embodiments, no more than about 5%, 10%, 15%, 20%, or 25% of the grey circled-nucleotides are absent (e.g., deleted) in the engineered retron described herein.

[0368] In certain embodiments, all or substantially all the white circled-nucleotides (i.e., those with a nucleotide in about 50-75% of the retrons in the same clade) are present in the engineered retron described herein. In certain embodiments, no more than 1, 2, 3, 4, 5, 6, or 6 (e.g., up to 2, 3, 4, 5, 6) nucleotide are absent (e.g., deleted) per 10 white circled-nucleotides in the engineered retron described herein. In certain embodiments, 2, 3, 4, 5, 6, 7, 8, 9, or 10 (e.g., 4, 5, 6, 7, 8, 9 or 10) nucleotides are present per 10 grey circled-nucleotides in the engineered retron described herein. In certain embodiments, no more than about 5%, 10%, 15%, 20%, 30%, 40%, or 50% of the white circled-nucleotides are absent (e.g., deleted) in the engineered retron described herein.

[0369] In some embodiments, the engineered retron is synthetically produced. In other embodiments, the synthetically produced engineered retron comprises the sequences and/or secondary structures as depicted in any one of SEQ ID NOs: of Table B and the corresponding FIGS. 2-27, respectively, and at least the conserved color lettered nucleotides according to their respective levels of sequence identity (e.g., red, black and gray letters), and/or at least the conserved colored circle nucleotides according to their respective levels of probability of sequence presence (e.g., red, black and gray circles).

[0370] In some embodiments, the sequence modification in the engineered retrons leads to/results in the encoded retron ncRNA having the desired functional improvement.

[0371] In certain embodiments, the one or more sequence modifications comprises, in the ncRNA, one or more of: (i) a modified (e.g., mutated, reduced, or eliminated) bulge in a1, a2, or both a1 and a2; (ii) an extension or shortening of a1, a2, or both a1 and a2; (iii) an extension or shortening of a spacer sequence between hairpin loops (e.g., S1, S2, S3, and/or S4 in FIG. 2, or any of the S regions in an one of FIGS. 2-27); (iv) an additional or modified (e.g., mutated or eliminated) bulge in hairpin loops (e.g., L2 and/or L3 in FIG. 2, or any of the L regions in an one of FIGS. 2-27 (e.g., by removing unpaired bases in the bulge, or by replacing unpaired bases with an equivalent number of base pairs)); (v) a modified (e.g., extended or shortened) length of hairpin loops (e.g., L1, L2, L3, and/or L4 in FIG. 2, or any of the L regions in an one of FIGS. 2-27); (vi) an alternative L1 and/or L2 (in FIG. 2, or any of the L regions in an one of FIGS. 2-27) having complement, reverse, or reverse complement sequences; (vii) a modified (e.g., increased) number of unpaired bases at the tip of hairpin loops (e.g., L1, L2, L3, and/or L4 in FIG. 2, or any of the L regions in an one of FIGS. 2-27); (viii) a modified (e.g., increased or decreased) GC content in hairpin loops (e.g., L1, L2, L3, and/or L4 in FIG. 2, or any of the L regions in an one of FIGS. 2-27); (ix) an insertion of the heterologous nucleic acid in spacer sequences between hairpin loops (e.g., S1, S2, S3 and/or S4 in FIG. 2, or any of the S regions in an one of FIGS. 2-27), or at the tip of hairpin loops (e.g., L1, L2, L3, and/or L4 in FIG. 2, or any of the L regions in an one of FIGS. 2-27); (x) a deletion of one or more hairpin loops (e.g., L1, L2, L3 and/or L4 in FIG. 2, or any of the L regions in an one of FIGS. 2-27); (xi) an addition of a new loop in a spacer sequence between hairpin loops (e.g., S1, S2, S3, and/or S4 in FIG. 2, or any of the S regions in an one of FIGS. 2-27); (xii) circularization of the ncRNA with the 5′ end and the 3′ end of the ncRNA being connected either directly, or via a spacer sequence; (xiii) a repositioned branching guanosine capable of initiating reverse transcription priming; (xiv) a staggered end sequence that reduces immunogenicity of the retron ncRNA, created by, e.g., adding or removing the 5′ a1 nucleotides and/or the 3′ a2 nucleotides; and/or, (xv) an antisense sequence complementary to a CRISPR/Cas guide RNA (gRNA) sequence encoded by the heterologous nucleic acid, wherein the antisense sequence hybridizes to and inhibits said gRNA in the encoded retron ncRNA, and wherein said antisense sequence is removed upon reverse transcription of the msDNA.

[0372] Unless specifically indicated otherwise, the a1 and a2 regions are both single-stranded and substantially reverse complementary to each other, forming a stem with optional interruption by a symmetric or asymmetric bulge, with optional one or more 5′ and/or 3′ overhang/unpaired nucleotide(s), wherein the a1 region generally ends before (e.g., ends immediately 5′ to) the conserved branching guanosine (G) providing the 2′-OH for reverse transcription priming.

[0373] In some embodiments, the sequence change comprises a mutated, reduced, or eliminated bulge in the a1/a2 stem region, including sequence change(s) in one (i.e., a1 or a2) strand, or both a1 and a2 strands.

[0374] For example, in some embodiments, the sequence change comprises deleting nucleotides from a1, a2, or both a1 and a2, such that the size of the bulge is reduced, or a symmetrical bulge becomes asymmetrical or vice versa, or a bulge is eliminated.

[0375] In some embodiments, the sequence change comprises replacing/substituting nucleotides in a1, a2, or both a1 and a2, such that previously unpaired bases in the bulge become base-paired.

[0376] In some embodiments, the sequence change comprises replacing an unpaired purine base with one or more unpaired pyrimidine base(s).

[0377] In some embodiments, the sequence change comprises replacing an unpaired pyrimidine base with one or more unpaired purine base(s).

[0378] In some embodiments, the sequence change comprises replacing one unpaired purine base (e.g., A or G) with another unpaired purine base (e.g., G or A, respectively).

[0379] In some embodiments, the sequence change comprises replacing one unpaired pyrimidine base (e.g., T/U or C) with another unpaired pyrimidine base (e.g., C or T/U, respectively).

[0380] In some embodiments, the sequence change comprises an extension or shortening of a1, a2, or both a1 and a2.

[0381] For example, the length of a1 can be shortened by deleting 5′ overhang, deleting any upstream bulge nucleotides, deleting bases involved in base-pairing. Likewise, the length of a1 can be extended by adding 5′ overhang, adding any upstream bulge nucleotides, adding bases involved in base-pairing.

[0382] In some embodiments, the length of a2 can be shortened by deleting 5′ overhang, deleting any downstream bulge nucleotides, deleting bases involved in base-pairing. Likewise, the length of a2 can be extended by adding 5′ overhang, adding any downstream bulge nucleotides, adding bases involved in base-pairing.

[0383] In some embodiments, the spacer sequences between hairpin loops as depicted in any one of FIGS. 2-27, (e.g., S1, S2, S3 and/or S4 in FIG. 2) can be extended or shortened. In some embodiments the modification can be by inserting a heterologous nucleic acid sequence in spacer sequences between hairpin loops (e.g., S1, S2, S3 and/or S4 in FIG. 2). In certain embodiments, one or more heterologous nucleic acid sequences is inserted in a spacer sequence in the msd region. In some embodiments, the modification of the spacer region can be by interrupting the spacer with additional bulges or hairpin loops.

[0384] In other embodiments, a bulge in the hairpin loops are mutated or eliminated (e.g., by removing unpaired bases) in the bulge, such that, for example, a symmetric bulge becomes an unsymmetrical bulge, or an unsymmetrical bulge becomes a symmetric one or an even more unsymmetrical one. In certain embodiments, unpaired bases in the bulge is replaced with an equivalent number of base pairs. The additional base pairs may be merged into the stem at one or both ends of the previous bulge, or may bisect a previous bulge to create two bulges.

[0385] In some embodiments, the length of one or more hairpin loops as depicted in any one of FIGS. 2-27, (e.g., L1, L2, L3 and/or L4 of FIG. 2) can be extended or shortened. For example, the number of unpaired bases within the tip or loop can be increased or decreased. Further, a heterologous nucleic acid sequence of interest can be inserted within the tip or the hairpin loop. In certain embodiments, the heterologous nucleic acid sequence of interest is inserted within the tip or the hairpin loop in the msd locus.

[0386] In other embodiments, the GC content in the tip or hairpin loops are increased or decreased.

[0387] In still other embodiments, a hairpin loop can be deleted.

[0388] In some embodiments, the ncRNA with the 5′ end and the 3′ end of the ncRNA can be circularized by being connected either directly, or via a spacer sequence.

[0389] In some embodiments, one or more hairpin loops (e.g. L1, L2, L3 and/or L4 of FIG. 2) are modified to have complement, reverse, or reverse complement sequences.

[0390] In certain embodiments, the branching guanosine (G) capable of initiating reverse transcription priming is repositioned. For example, the G can be placed further downstream of the end of the a1 sequence by, for example, 1, 2, 3, 4, or 5 additional nucleotides.

[0391] In certain embodiments, immunogenicity of the retron ncRNA is reduced by, e.g., adding or removing the 5′ a1 nucleotides and/or the 3′ a2 nucleotides.

[0392] In certain embodiments, the one or more heterologous nucleic acid sequences (inserted into the subject engineered retron) comprise: a) a heterologous nucleic acid (such as the coding sequence for an RNA aptamer or a ribozyme) inserted into the msr locus or the msd locus (such as in an S region (e.g., S1, S2, S3 and/or S4 in FIG. 2, or any of the S regions in any one of FIGS. 2-27), or the tip of an L region (e.g., L1, L2, L3 and/or L4 in FIG. 2, or any of the L regions in any one of FIGS. 2-27), or upstream or downstream of either the msr locus or the msd locus; or b) a first heterologous nucleic acid inserted into the msd locus, and a second heterologous nucleic acid inserted either upstream of the msr locus or downstream of the msd locus, wherein the second heterologous nucleic acid encodes a CRISPR/Cas guide RNA (gRNA).

[0393] In certain embodiments, an antisense sequence complementary to a CRISPR/Cas guide RNA (gRNA) sequence encoded by the heterologous nucleic acid can be included, wherein the antisense sequence hybridizes to and inhibits the gRNA in the encoded retron ncRNA, and wherein the antisense sequence is removed upon reverse transcription of the msDNA.

[0394] In certain embodiments, said heterologous nucleic acid encodes a protein or peptide of interest, or wherein said heterologous nucleic acid comprises or encodes a donor/template sequence (e.g., a donor that corrects/repairs/removes a mutation at the target genome site, such as a mutated exon in a disease gene; a functional DNA element (such as a promoter, an enhancer, a protein binding sequence, a methylation site, a homology region for assisting gene editing, etc.); or a coding sequence for a functional RNA element (ncRNAs, etc.)).

[0395] In certain embodiments, the protein or peptide of interest comprises a therapeutic protein (such as a wildtype protein defective in a disease cell, or a therapeutic antibody or antigen-binding fragment thereof) useful in treating a disease.

[0396] Other heterologous nucleic acids of the invention are described in other section of the specification, all incorporated herein by reference.

[0397] In some embodiments, the template/wild-type retron for the engineered retron encodes a wild-type or consensus retron ncRNA polynucleotide having a consensus secondary structure shown in any one of FIGS. 2-27, which are described individually below:

[0398] Variants of this template, which can also be used in the engineered retron of the invention, include a variant having: A) up to 1, 2, or 3 (e.g., up to 1) nucleotide changes per 10 red lettered-nucleotides; B) up to 4, 5, or 6 (e.g., up to 1 or 2) nucleotide changes per 10 black lettered-nucleotides; and/or C) up to 7, 8, or 9 (e.g., up to 3 or 4) nucleotide changes per 10 grey lettered-nucleotides; and/or optionally further comprising: a) 7, 8, 9, or 10 (e.g., 9 or 10) nucleotides present per 10 red-circled nucleotides; b) 6, 7, 8, 9, or 10 (e.g., 8, 9 or 10) nucleotides present per 10 black-circled nucleotides; c) 4, 5, 6, 7, 8, 9, or 10 (e.g., 6, 7, 8, 9 or 10) nucleotides present per 10 grey-circled nucleotides; and/or d) 2, 3, 4, 5, 6, 7, 8, 9, or 10 (e.g., 4, 5, 6, 7, 8, 9, or 10) nucleotides present per 10 white-circled nucleotides.

[0399] In some embodiments, the engineered retron is entirely synthetically produced and having the conserved nucleotides as denoted by the colored letters as shown in SEQ ID NO. XX and FIGS. 2-27.

[0400] In some embodiments, the non-coding RNA (ncRNA) portion of the engineered retron comprises a polynucleotide (e.g., a DNA molecule) encoding an ncRNA listed in Table B, or an ncRNA having at least 50%, at least 55%, at least 60%, at least 65%, at least 70%, at least 75%, at least 80%, at least 85%, at least 90%, at least 91%, at least 92%, at least 93%, at least 94%, at least 95%, at least 96%, at least 97%, at least 98%, at least 99%, at least 99.1%, at least 99.2%, at least 99.3%, at least 99.4%, at least 99.5%, at least 99.6%, at least 99.7%, at least 99.8% or at least 99.9% sequence identity to an ncRNA listed in Table B. In some embodiments, the ncRNA does not comprise an ncRNA associated with the sequences of Table X.

[0401] Amplification of an engineered retron described herein may be performed, for example, before transfection of cells or ligation into vectors. Any method for amplifying the engineered retron may be used, including, but not limited to polymerase chain reaction (PCR), isothermal amplification, nucleic acid sequence-based amplification (NASBA), transcription mediated amplification (TMA), strand displacement amplification (SDA), and ligase chain reaction (LCR). In one embodiment, the engineered retron comprise common 5′ and 3′ priming sites to allow amplification of retron sequences in parallel with a set of universal primers. In another embodiment, a set of selective primers is used to selectively amplify a subset of retron sequences from a pooled mixture.

[0402] In some embodiments, the template/wild-type retron for the engineered retron encodes a wild-type or consensus retron ncRNA polynucleotide having a consensus secondary structure shown in FIG. 2-27, and as described individually below:

Type IA/IA1 retron (FIG. 2)

[0403] In some embodiments, the template/wt retron for the subject engineered retron encodes a wild-type retron ncRNA polynucleotide having a consensus secondary structure that can be described as:

a1-S1-L1-L2-S2-L3-S3-a2-S4-L4,

wherein:
a1/a2 is a stem 8 bp in length;
L1 is a stem of 5 bps with a 10-nt tip;
L2 is a stem of 7 bps with a 5-nt tip, and a 1/1 bulge 3 nt from the tip;
L3 is a stem of 23 bps with a 22-nt tip, and a 2/2 bulge 21 bps from the tip;
L4 is a stem of 11 bps with a 5-nt tip;
S1 is a single-stranded spacer region between the a1/a2 stem and L1, with no spacer between L1 and L2;
S2 is a single-stranded spacer region between L2 and L3;
S3 is a single-stranded spacer region between L3 and the a1/a2 stem; and
S4 is a single-stranded spacer region between the a1/a2 stem and L4, and
the conserved nucleotides are as shown in SEQ ID NO: 1 and FIG. 2, and wherein the colored circled nucleotides are present at the respective levels of certainty (e.g., at least about 97% of the red-circled nucleotides, at least about 90-97% of the black-circled nucleotides, at least about 75-90% of the grey-circled nucleotides, and at least about 50% of the white-circled nucleotides are present).

[0404] In some embodiments, the engineered retron is entirely synthetically produced and having the conserved nucleotides as denoted by the colored letters as shown in FIG. 2.

### Type IB1 Retron (FIG. 3)

[0405] In some embodiments, the template/wt retron for the subject engineered retron encodes a wild-type retron ncRNA polynucleotide having a consensus secondary structure that can be described as:

a1-S1-L1-S2-L2-S3-a2,

wherein:
a1/a2 is a stem 6 bps in length with a 2/2 bulge 3 bps from the tip, wherein a1 has a 2-nt overhang and a2 has a 6-nt overhang;
L1 is a stem of 14 bps with a 3-nt tip, a 1/0 bulge 4 bps from the tip, and a 0/6 bulge 10 bps from the tip;
L2 is a stem of 23 bps with a 5-nt tip, a 1/1 bulge 4 bps from the tip, and a 0/1 bulge 18 bps from the tip;
S1 is a single-stranded spacer region between a1/a2 and L1;
S2 is a single-stranded spacer region between L1 and L2;
S3 is a single-stranded spacer region between L2 and a1/a2,
the conserved nucleotides are as shown in FIG. 3, and wherein the colored circled nucleotides are present at the respective levels of certainty (e.g., at least about 97% of the red-circled nucleotides, at least about 90-97% of the black-circled nucleotides, at least about 75-90% of the grey-circled nucleotides, and at least about 50% of the white-circled nucleotides are present).

[0406] In some embodiments, the engineered retron is entirely synthetically produced and having the conserved nucleotides as denoted by the colored letters as shown in FIG. 3.

### Type IB2 Retron (FIG. 4)

[0407] In some embodiments, the template/wt retron for the subject engineered retron encodes a wild-type retron ncRNA polynucleotide having a consensus secondary structure that can be described as:

a1-S1-L1-L2-S2-L3-S3-L4-S4-a2,

wherein:
the a1/a2 stem is 16 bp in length, with a 17-base 5′ overhang and a 16-base 3′ overhang;
L1 is a stem of 6 bps with a 4-nt tip;
L2 is a stem of 4 bps with a 4-nt tip, with a 2/2 bulge 2 nts from the tip;
L3 is a stem of 3 bps with a 5-nt tip;
L4 is a stem of 9 bps with a 5-nt tip, and a 1/1 bulge 4 nts from the tip;
S1, S2, S3, and S4 are single-stranded spacer regions between the a1/a2 stem and L1, L2 and L3, L3 and L4, and L4 and the a1/a2 stem, respectively, with no spacer between L1 and L2; wherein the last 5 nts of S1 and the 5^{th}-9^{th} nts of S2 form a 5-bp stem, and,
the conserved nucleotides are as shown in FIG. 4, and wherein the colored circled nucleotides are present at the respective levels of certainty (e.g., at least about 97% of the red-circled nucleotides, at least about 90-97% of the black-circled nucleotides, at least about 75-90% of the grey-circled nucleotides, and at least about 50% of the white-circled nucleotides are present).

[0408] In some embodiments, the engineered retron is entirely synthetically produced and having the conserved nucleotides as denoted by the colored letters as shown in FIG. 4.

### Type 1C Retron (FIG. 5)

[0409] In some embodiments, the template/wt retron for the subject engineered retron encodes a wild-type retron ncRNA polynucleotide having a consensus secondary structure that can be described as:

a1-S1-L1-S2-L2-S3-a2,

wherein:
a1/a2 is a stem 13 bps in length;
L1 is a stem of 9 bps with a 3-nt tip;
L2 is a stem of 10 bps with a 5-nt tip;
S1 is a single-stranded spacer region between a1/a2 and L1;
S2 is a single-stranded spacer region between L1 and L2;
S3 is a single-stranded spacer region between L2 and a1/a2,
the conserved nucleotides are as shown in FIG. 5, and wherein the colored circled nucleotides are present at the respective levels of certainty (e.g., at least about 97% of the red-circled nucleotides, at least about 90-97% of the black-circled nucleotides, at least about 75-90% of the grey-circled nucleotides, and at least about 50% of the white-circled nucleotides are present).

[0410] In some embodiments, the engineered retron is entirely synthetically produced and having the conserved nucleotides as denoted by the colored letters as shown in FIG. 5.

### Type IIA1 Retron (FIG. 6)

[0411] In some embodiments, the template/wt retron for the subject engineered retron encodes a wild-type retron ncRNA polynucleotide having a consensus secondary structure that can be described as:

a1-S1-L1-S2-L2-S3-L3-S4-a2,

wherein:
a1/a2 is a stem 10 bps in length with a 1-nt overhang on a2;
L1 is a stem of 10 bps with a 3-nt tip;
L2 is a stem of 7 bps with a 5-nt tip;
L3 is a stem of 27 bps with a 8-nt tip and a 0/2 bulge 26 bps from the tip;
S1 is a single-stranded spacer region between a1/a2 and L1;
S2 is a single-stranded spacer region between L1 and L2;
S3 is a single-stranded spacer region between L2 and L3;
S4 is a single-stranded spacer region between L3 and a1/a2,
the conserved nucleotides are as shown in FIG. 6, and wherein the colored circled nucleotides are present at the respective levels of certainty (e.g., at least about 97% of the red-circled nucleotides, at least about 90-97% of the black-circled nucleotides, at least about 75-90% of the grey-circled nucleotides, and at least about 50% of the white-circled nucleotides are present).

[0412] In some embodiments, the engineered retron is entirely synthetically produced and having the conserved nucleotides as denoted by the colored letters as shown in FIG. 6.

### Type IIA2 Retron (FIG. 7)

[0413] In some embodiments, the template/wt retron for the subject engineered retron encodes a wild-type retron ncRNA polynucleotide having a consensus secondary structure that can be described as:

a1-S1-L1-S2-L2-L3-S3-a2,

wherein:
a1/a2 is a stem 7 bp in length with no overhangs;
L1 is a stem of 8 bps with a 3-nt tip;
L2 is a stem of 30 bps with a 8-nt tip, a 1/1 bulge 2 bps from the tip, and a 1/1 bulge 27 bps from the tip;
L3 is a stem of 8 bps with a 5-nt tip, and a 0/1 bulge 3 nt from the tip;
S1 is a single-stranded spacer region between the a1/a2 stem and L1;
S2 is a single-stranded spacer region between L1 and L2; and,
S3 is a single-stranded spacer region between L3 and the a1/a2 stem;
the conserved nucleotides are as shown in FIG. 7, and wherein the colored circled nucleotides are present at the respective levels of certainty (e.g., at least about 97% of the red-circled nucleotides, at least about 90-97% of the black-circled nucleotides, at least about 75-90% of the grey-circled nucleotides, and at least about 50% of the white-circled nucleotides are present).

[0414] In some embodiments, the engineered retron is entirely synthetically produced and having the conserved nucleotides as denoted by the colored letters as shown in FIG. 7.

### Type IIA3 Retron (FIG. 8)

[0415] In some embodiments, the template/wt retron for the subject engineered retron encodes a wild-type retron ncRNA polynucleotide having a consensus secondary structure that can be described as:

a1-S1-L1-L2-S2-L3-S3-a2,

wherein:
a1/a2 is a stem 6 bps in length;
L1 is a stem of 8 bps with a 9-nt tip;
L2 is a stem of 8 bps with a 3-nt tip;
S1 is a single-stranded spacer region between a1/a2 and L1;
S2 is a single-stranded spacer region between L2 and L3;
S3 is a single-stranded spacer region between L3 and a1/a2,
the conserved nucleotides are as shown in FIG. 8, and wherein the colored circled nucleotides are present at the respective levels of certainty (e.g., at least about 97% of the red-circled nucleotides, at least about 90-97% of the black-circled nucleotides, at least about 75-90% of the grey-circled nucleotides, and at least about 50% of the white-circled nucleotides are present).

[0416] In some embodiments, the engineered retron is entirely synthetically produced and having the conserved nucleotides as denoted by the colored letters as shown in FIG. 8.

### Type IIA4 Retron (FIG. 9)

[0417] In some embodiments, the template/wt retron for the subject engineered retron encodes a wild-type retron ncRNA polynucleotide having a consensus secondary structure that can be described as:

a1-a2-L1-S1-L2-L3-S2-L4-S3,

wherein:
a1/a2 is a stem 3 bp in length with no overhangs and a 7-nt tip;
L1 is a stem of 7 bps with a 3-nt tip;
L2 is a stem of 6 bps with a 4-nt tip;
L3 is a stem of 40 bps with a 5-nt tip, and a 2/2 bulge 3 bps from the tip, a 5/4 bulge 10 bps from the tip, and a 12/15 bulge 30 bps from the tip;
L4 is a stem of 4 bps with a 9-nt tip;
S1 is a single-stranded spacer region between L1 and L2/L3;
S2 is a single-stranded spacer region between L2/L3 and L4;
S3 is a single-stranded spacer region between L4 and the 3′ end of the ncRNA; and
the conserved nucleotides are as shown in FIG. 9, and wherein the colored circled nucleotides are present at the respective levels of certainty (e.g., at least about 97% of the red-circled nucleotides, at least about 90-97% of the black-circled nucleotides, at least about 75-90% of the grey-circled nucleotides, and at least about 50% of the white-circled nucleotides are present).

[0418] In some embodiments, the engineered retron is entirely synthetically produced and having the conserved nucleotides as denoted by the colored letters as shown in FIG. 9.

### Type IIA5 Novel Retron (FIG. 10)

[0419] In some embodiments, the template/wt retron for the subject engineered retron encodes a wild-type retron ncRNA polynucleotide having a consensus secondary structure that can be described as:

a1-S1-L1-S2-L2-S3-L3-S4-a2,

wherein:
a1/a2 is a stem 15 bps in length with a 1-nt overhang on a1, a 13-nt overhang on a2, and a 7/5 bulge 13-nt from the tip;
L1 is a stem of 10 bps with a 3-nt tip;
L2 is a stem of 35 bps with a 3-nt tip;
L3 is a stem of 6 bps with a 5-nt tip;
S1 is a single-stranded spacer region between a1/a2 and L1;
S2 is a single-stranded spacer region between L1 and L2;
S3 is a single-stranded spacer region between L2 and L3;
S4 is a single-stranded spacer region between L3 and a1/a2,
the conserved nucleotides are as shown in FIG. 10, and wherein the colored circled nucleotides are present at the respective levels of certainty (e.g., at least about 97% of the red-circled nucleotides, at least about 90-97% of the black-circled nucleotides, at least about 75-90% of the grey-circled nucleotides, and at least about 50% of the white-circled nucleotides are present).

[0420] In some embodiments, the engineered retron is entirely synthetically produced and having the conserved nucleotides as denoted by the colored letters as shown in FIG. 10.

### Type IA1 Retron (FIG. 11)

[0421] In some embodiments, the template/wt retron for the subject engineered retron encodes a wild-type retron ncRNA polynucleotide having a consensus secondary structure that can be described as:

a1-S1-L1-L2-S2-L3-S3-a2,

wherein:
a1/a2 is a stem 2 bps in length with a 1-nt overhang on a2;
L1 is a stem of 8 bps with a 4-nt tip;
L2 is a stem of 9 bps with a 3-nt tip and a 1/1 bulge 3 bps from the tip;
L3 is a stem of 20 bps with a 3-nt tip and a 1/2 bulge 3 bps from the tip;
S1 is a single-stranded spacer region between a1/a2 and L1;
S2 is a single-stranded spacer region between L2 and L3;
S3 is a single-stranded spacer region between L3 and a1/a2,
the conserved nucleotides are as shown in FIG. 11, and wherein the colored circled nucleotides are present at the respective levels of certainty (e.g., at least about 97% of the red-circled nucleotides, at least about 90-97% of the black-circled nucleotides, at least about 75-90% of the grey-circled nucleotides, and at least about 50% of the white-circled nucleotides are present).

[0422] In some embodiments, the engineered retron is entirely synthetically produced and having the conserved nucleotides as denoted by the colored letters as shown in FIG. 11.

### Type IIIA2 Retron (FIG. 12)

[0423] In some embodiments, the template/wt retron for the subject engineered retron encodes a wild-type retron ncRNA polynucleotide having a consensus secondary structure that can be described as:

a1-S1-L1-S2-L2-S3-L3-S4-L4-S5-a2,

wherein:
a1/a2 is a stem 15 bp in length;
L1 is a stem of 6 bps with a 4-nt tip;
L2 is a stem of 13 bps with a 5-nt tip;
L3 is a stem of 4 bps with a 8-nt tip;
L4 is a stem of 20 bps with a 4-nt tip and a 2/2 bulge 6 bp from the tip;
S1 is a single-stranded spacer region between a1/a2 and L1;
S2 is a single-stranded spacer region between L1 and L2;
S3 is a single-stranded spacer region between L2 and L3;
S4 is a single-stranded spacer region between L3 and L4;
S5 is a single-stranded spacer region between L4 and a1/a2;
the conserved nucleotides are as shown in FIG. 12, and wherein the colored circled nucleotides are present at the respective levels of certainty (e.g., at least about 97% of the red-circled nucleotides, at least about 90-97% of the black-circled nucleotides, at least about 75-90% of the grey-circled nucleotides, and at least about 50% of the white-circled nucleotides are present).

[0424] In some embodiments, the engineered retron is entirely synthetically produced and having the conserved nucleotides as denoted by the colored letters as shown in FIG. 12.

### Type IA3 Retron (FIG. 13)

[0425] In some embodiments, the template/wt retron for the subject engineered retron encodes a wild-type retron ncRNA polynucleotide having a consensus secondary structure that can be described as:

a1-S1-L1-S2-L2-S3-L3-S4-L4-L5-L6-S5-a2,

wherein:
a1/a2 is a stem 24 bps in length and having a 1/0 bulge 15 bps from the tip, and a 1/1 bulge 19 bps from the tip;
L1 is a stem of 7 bps with a 4-nt tip;
L2 is a stem of 9 bps with a 8-nt tip;
L3 is a stem of 8 bps with a 4-nt tip;
L4 is a stem of 4 bps with a 9-nt tip, and a 2/2 bulge 3 bps from the tip;
L5 is a stem of 19 bps with a 18-nt tip;
L6 is a stem of 5 bps with a 3-nt tip;
S1 is a single-stranded spacer region between a1/a2 and L1;
S2 is a single-stranded spacer region between L1 and L2;
S3 is a single-stranded spacer region between L2 and L3;
S4 is a single-stranded spacer region between L3 and L4;
S5 is a single-stranded spacer region between L6 and a1/a2;
the conserved nucleotides are as shown in FIG. 13, and wherein the colored circled nucleotides are present at the respective levels of certainty (e.g., at least about 97% of the red-circled nucleotides, at least about 90-97% of the black-circled nucleotides, at least about 75-90/6 of the grey-circled nucleotides, and at least about 50% of the white-circled nucleotides are present).

[0426] In some embodiments, the engineered retron is entirely synthetically produced and having the conserved nucleotides as denoted by the colored letters as shown in FIG. 13.

### Type IA4 Retron (FIG. 14)

[0427] In some embodiments, the template/wt retron for the subject engineered retron encodes a wild-type retron ncRNA polynucleotide having a consensus secondary structure that can be described as:

a1-S1-L1-S2-L2-S3-L3-S4-a2,

wherein:
a1/a2 is a stem 5 bps in length with a 1/2 bulge 2 bps from the tip;
L1 is a stem of 8 bps with a 6-nt tip;
L2 is a stem of 8 bps with a 5-nt tip;
L3 is a stem of 13 bps with a 14-nt tip and a 1/0 bulge 2 bps from the tip;
S1 is a single-stranded spacer region between a1/a2 and L1;
S2 is a single-stranded spacer region between L1 and L2;
S3 is a single-stranded spacer region between L2 and L3:
S4 is a single-stranded spacer region between L3 and a1/a2,
the conserved nucleotides are as shown in SEQ ID NO: 19 and FIG. 20, and wherein the colored circled nucleotides are present at the respective levels of certainty (e.g., at least about 97% of the red-circled nucleotides, at least about 90-97% of the black-circled nucleotides, at least about 75-90% of the grey-circled nucleotides, and at least about 50% of the white-circled nucleotides are present).

[0428] In some embodiments, the engineered retron is entirely synthetically produced and having the conserved nucleotides as denoted by the colored letters as shown in FIG. 14.

### Type IIIA5 Retron (FIG. 15)

[0429] In some embodiments, the template/wt retron for the subject engineered retron encodes a wild-type retron ncRNA polynucleotide having a consensus secondary structure that can be described as:

a1-S1-L1-S2-L2-L3-L4-S3-a2,

wherein:
the a1/a2 stem is 11 bp in length with no overhang;
L1 is a stem of 9 bps with a 3-nt tip;
L2 is a stem of 14 bps with a 5-nt tip;
L3 is a stem of 9 bps with a 7-nt tip;
L4 is a stem of 15 bps with a 7-nt tip;
S1, S2, and S3 are single-stranded spacer regions between the a1/a2 stem and L1, L2 and L3, and L4 and the a1/a2 stem, respectively, with no spacer between L1 and L2, and no spacer between L2 and L3; wherein the 5^{th}-2^{nd} last nts of S2 and the 3^{rd}-6^{th} nts of S3 forms a 4-bp stem, and, the conserved nucleotides are as shown in FIG. 15, and wherein the colored circled nucleotides are present at the respective levels of certainty (e.g., at least about 97% of the red-circled nucleotides, at least about 90-97% of the black-circled nucleotides, at least about 75-90% of the grey-circled nucleotides, and at least about 50% of the white-circled nucleotides are present).

[0430] In some embodiments, the engineered retron is entirely synthetically produced and having the conserved nucleotides as denoted by the colored letters as shown in FIG. 15.

### Type IIIunk Retron (FIG. 16)

[0431] In some embodiments, the template/wt retron for the subject engineered retron encodes a wild-type retron ncRNA polynucleotide having a consensus secondary structure that can be described as:

a1-S1-L1-S2-L2-S3-L3-S4-a2,

wherein:
a1/a2 is a stem 11 bps in length;
L1 is a stem of 12 bps with a 2-nt tip;
L2 is a stem of 21 bps with a 1-nt tip;
L3 is a stem of 20 bps with a 4-nt tip;
S1 is a single-stranded spacer region between a1/a2 and L1;
S2 is a single-stranded spacer region between L1 and L2;
S3 is a single-stranded spacer region between L2 and L3;
S4 is a single-stranded spacer region between L3 and a1/a2,
the conserved nucleotides are as shown in FIG. 16, and wherein the colored circled nucleotides are present at the respective levels of certainty (e.g., at least about 97% of the red-circled nucleotides, at least about 90-97% of the black-circled nucleotides, at least about 75-90/6 of the grey-circled nucleotides, and at least about 50% of the white-circled nucleotides are present).

[0432] In some embodiments, the engineered retron is entirely synthetically produced and having the conserved nucleotides as denoted by the colored letters as shown in FIG. 16.

### Type IV Retron (FIG. 17)

[0433] In some embodiments, the template/wt retron for the subject engineered retron encodes a wild-type retron ncRNA polynucleotide having a consensus secondary structure that can be described as:

a1-S1-L1-L2-S2-L3-S3-a2,

wherein:
a1/a2 is a stem 9 bp in length with no overhang;
L1 is a stem of 5 bps with a 6-nt tip;
L2 is a stem of 9 bps with a 4-nt tip;
L3 is a stem of 26 bps with a 5-nt tip, a 0/1 bulge 7 bps from the tip, and a 0/1 bulge 9 bps from the tip;
S1 is a single-stranded spacer region between the a1/a2 stem and L1, with no spacer region between L1 and L2;
S2 is a single-stranded spacer region between L2 and L3; and,
S3 is a single-stranded spacer region between L3 and the a1/a2 stem;
the conserved nucleotides are as shown in FIG. 17, and wherein the colored circled nucleotides are present at the respective levels of certainty (e.g., at least about 97% of the red-circled nucleotides, at least about 90-97% of the black-circled nucleotides, at least about 75-90% of the grey-circled nucleotides, and at least about 50% of the white-circled nucleotides are present).

[0434] In some embodiments, the engineered retron is entirely synthetically produced and having the conserved nucleotides as denoted by the colored letters as shown in FIG. 17.

### Type IX Retron (FIG. 18)

[0435] In some embodiments, the template/wt retron for the subject engineered retron encodes a wild-type retron ncRNA polynucleotide having a consensus secondary structure that can be described as:

a1-L1-S1-L2-S2-a2,

wherein:
a1/a2 is a stem 12 bp in length, wherein a1 has a 14-nt overhang and a2 has a 2-nt overhang;
L1 is a stem of 11 bps with a 3-nt tip and a 1/3 bulge 7 bp from the tip;
L2 is a stem of 25 bps with a 7-nt tip;
S1 is a single-stranded spacer region between L1 and L2;
S2 is a single-stranded spacer region between L2 and a1/a2;
the conserved nucleotides are as shown in FIG. 18, and wherein the colored circled nucleotides are present at the respective levels of certainty (e.g., at least about 97% of the red-circled nucleotides, at least about 90-97% of the black-circled nucleotides, at least about 75-90% of the grey-circled nucleotides, and at least about 50% of the white-circled nucleotides are present).

[0436] In some embodiments, the engineered retron is entirely synthetically produced and having the conserved nucleotides as denoted by the colored letters as shown in FIG. 18.

### Type V Retron (FIG. 19)

[0437] In some embodiments, the template/wt retron for the subject engineered retron encodes a wild-type retron ncRNA polynucleotide having a consensus secondary structure that can be described as:

a1-S1-L1-S2-L2-S3-a2,

wherein:
a1/a2 is a stem 13 bps in length;
L1 is a stem of 20 bps with a 4-nt tip and a 6/4 bulge 6 bps from the tip;
L2 is a stem of 14 bps with a 4-nt tip and a 1/0 bulge 5 bps from the tip;
S1 is a single-stranded spacer region between a1/a2 and L1;
S2 is a single-stranded spacer region between L1 and L2;
S3 is a single-stranded spacer region between L2 and a1/a2,
the conserved nucleotides are as shown in FIG. 19, and wherein the colored circled nucleotides are present at the respective levels of certainty (e.g., at least about 97% of the red-circled nucleotides, at least about 90-97% of the black-circled nucleotides, at least about 75-90% of the grey-circled nucleotides, and at least about 50% of the white-circled nucleotides are present).

[0438] In some embodiments, the engineered retron is entirely synthetically produced and having the conserved nucleotides as denoted by the colored letters as shown in FIG. 19.

### Type VI Retron (FIG. 20)

[0439] In some embodiments, the template/wt retron for the subject engineered retron encodes a wild-type retron ncRNA polynucleotide having a consensus secondary structure that can be described as:

a1-S1-L1-S2-L2-S3-L3-L4-S4-a2,

wherein:
a1/a2 is a stem 4 bp in length with a 1 bp 5′ overhang;
L1 is a stem of 7 bps with a 4-nt tip;
L2 is a stem of 8 bps with a 4-nt tip;
L3 is a stem of 16 bps with a 6-nt tip, a 3/4 bulge 3 bps from the tip, a 2/3 bulge 5 bps from the tip, and a 3/1 bulge 8 bps from the tip;
S1 is a single-stranded spacer region between the a1/a2 stem and L1;
S2 is a single-stranded spacer region between L1 and L2;
S3 is a single-stranded spacer region between L2 and L3, with no spacer region between L3 and L4;
S4 is a single-stranded spacer region between L4 and the a1/a2 stem; and,
the conserved nucleotides are as shown in FIG. 20, and wherein the colored circled nucleotides are present at the respective levels of certainty (e.g., at least about 97% of the red-circled nucleotides, at least about 90-97% of the black-circled nucleotides, at least about 75-90% of the grey-circled nucleotides, and at least about 50% of the white-circled nucleotides are present).

[0440] In some embodiments, the engineered retron is entirely synthetically produced and having the conserved nucleotides as denoted by the colored letters as shown in FIG. 20.

### Type XI Group 1 Retron (FIG. 21)

[0441] In some embodiments, the template/wt retron for the subject engineered retron encodes a wild-type retron ncRNA polynucleotide having a consensus secondary structure that can be described as:

a1-S1-L1-S2-L2-S3-a2,

wherein:
a1/a2 is a stem 16 bps in length with a 5-nt overhang on a1, and a 3-nt overhang on a2;
L1 is a stem of 9 bps with a 3-nt tip;
L2 is a stem of 7 bps with a 13-nt tip;
S1 is a single-stranded spacer region between a1/a2 and L1;
S2 is a single-stranded spacer region between L1 and L2;
S3 is a single-stranded spacer region between L2 and a1/a2,
the conserved nucleotides are as shown in FIG. 21, and wherein the colored circled nucleotides are present at the respective levels of certainty (e.g., at least about 97% of the red-circled nucleotides, at least about 90-97% of the black-circled nucleotides, at least about 75-90% of the grey-circled nucleotides, and at least about 50% of the white-circled nucleotides are present).

[0442] In some embodiments, the engineered retron is entirely synthetically produced and having the conserved nucleotides as denoted by the colored letters as shown in FIG. 21.

TYPE XI Group 2 retron (FIG. 22)

[0443] In some embodiments, the template/wt retron for the subject engineered retron encodes a wild-type retron ncRNA polynucleotide having a consensus secondary structure that can be described as:

a1-S1-L1-S2-L2-S3-a2,

wherein:
a1/a2 is a stem 13 bps in length with a 1-nt overhang on a2;
L1 is a stem of 7 bps with a 3-nt tip and a 2/2 bulge 1 bp from the tip;
L2 is a stem of 8 bps with a 20-nt tip;
S1 is a single-stranded spacer region between a1/a2 and L1;
S2 is a single-stranded spacer region between L1 and L2;
S3 is a single-stranded spacer region between L2 and a1/a2,
the conserved nucleotides are as shown in FIG. 22, and wherein the colored circled nucleotides are present at the respective levels of certainty (e.g., at least about 97% of the red-circled nucleotides, at least about 90-97% of the black-circled nucleotides, at least about 75-90% of the grey-circled nucleotides, and at least about 50% of the white-circled nucleotides are present).

[0444] In some embodiments, the engineered retron is entirely synthetically produced and having the conserved nucleotides as denoted by the colored letters as shown in FIG. 22.

### Type XII Retron (FIG. 23)

[0445] In some embodiments, the template/wt retron for the subject engineered retron encodes a wild-type retron ncRNA polynucleotide having a consensus secondary structure that can be described as:

a1-S1-L1-S2-L2-S3-a2,

wherein:
a1/a2 is a stem 13 bps in length with a 1-nt overhang on a2;
L1 is a stem of 7 bps with a 3-nt tip, and a 2/2 bulge 1 bp from the tip;
L2 is a stem of 8 bps with a 19-nt tip;
S1 is a single-stranded spacer region between a1/a2 and L1;
S2 is a single-stranded spacer region between L1 and L2;
S3 is a single-stranded spacer region between L2 and a1/a2,
the conserved nucleotides are as shown in FIG. 23, and wherein the colored circled nucleotides are present at the respective levels of certainty (e.g., at least about 97% of the red-circled nucleotides, at least about 90-97% of the black-circled nucleotides, at least about 75-90% of the grey-circled nucleotides, and at least about 50% of the white-circled nucleotides are present).

[0446] In some embodiments, the engineered retron is entirely synthetically produced and having the conserved nucleotides as denoted by the colored letters as shown in FIG. 23.

### Type XIII Retron (FIG. 24)

[0447] In some embodiments, the template/wt retron for the subject engineered retron encodes a wild-type retron ncRNA polynucleotide having a consensus secondary structure that can be described as:

a1-S1-L1-S2-L2-L3-S3-a2,

wherein:
a1/a2 is a stem 7 bp in length with no overhangs;
L1 is a stem of 8 bps with a 3-nt tip;
L2 is a stem of 30 bps with a 8-nt tip, a 1/1 bulge 2 bps from the tip, and a 1/1 bulge 27 bps from the tip;
L3 is a stem of 8 bps with a 5-nt tip, and a 0/1 bulge 3 nt from the tip;
S1 is a single-stranded spacer region between the a1/a2 stem and L1;
S2 is a single-stranded spacer region between L1 and L2; and,
S3 is a single-stranded spacer region between L3 and the a1/a2 stem;
the conserved nucleotides are as shown in FIG. 24, and wherein the colored circled nucleotides are present at the respective levels of certainty (e.g., at least about 97% of the red-circled nucleotides, at least about 90-97% of the black-circled nucleotides, at least about 75-90% of the grey-circled nucleotides, and at least about 50% of the white-circled nucleotides are present).

[0448] In some embodiments, the engineered retron is entirely synthetically produced and having the conserved nucleotides as denoted by the colored letters as shown in FIG. 24.

### Type XIV Retron (FIG. 25)

[0449] In some embodiments, the template/wt retron for the subject engineered retron encodes a wild-type retron ncRNA polynucleotide having a consensus secondary structure that can be described as:

a1-S1-L1-L2-S2-L3-S3-a2,

wherein:
the a1/a2 stem is 15 bp in length with no overhang, and a 4/2 bulge 7 bps from the 5′ end of a1;
L1 is a stem of 8 bps with a 5-nt tip;
L2 is a stem of 7 bps with a 5-nt tip;
L3 is a stem of 13 bps with a 2-nt tip, a 5/9 bulge 5 bps from the tip, and a 5/5 bulge 8 bps from the tip;
S1, S2, and S3 are single-stranded spacer regions between the a1/a2 stem and L1, L2 and L3, and L3 and the a1/a2 stem, respectively, with no spacer between L1 and L2; and wherein the 5^{th}-3^{rd} last nts of S1 and the 2nd-5th 4 nts of S2 forms a 3-bp stem; and,
the conserved nucleotides are as shown in FIG. 25, and wherein the colored circled nucleotides are present at the respective levels of certainty (e.g., at least about 97% of the red-circled nucleotides, at least about 90-97% of the black-circled nucleotides, at least about 75-90% of the grey-circled nucleotides, and at least about 50% of the white-circled nucleotides are present).

[0450] In some embodiments, the engineered retron is entirely synthetically produced and having the conserved nucleotides as denoted by the colored letters as shown in FIG. 25.

### Ec107-Like Retron (FIG. 26)

[0451] In some embodiments, the template/wt retron for the subject engineered retron encodes a wild-type retron ncRNA polynucleotide having a consensus secondary structure that can be described as:

a1-S1-L1-S2-L2-S3-L3-S4-a2,

wherein:
a1/a2 is a stem 12 bp in length;
L1 is a stem of 4 bps with a 8-nt tip;
L2 is a stem of 8 bps with a 3-nt tip;
L3 is a stem of 22 bps with a 3-nt tip, a 4/6 bulge 6 bp from the tip, a 3/3 bulge 13 bp from the tip, and a 1/1 bulge 18 bp from the tip;
S1 is a single-stranded spacer region between a1/a2 and L1;
S2 is a single-stranded spacer region between L1 and L2;
S3 is a single-stranded spacer region between L2 and L3; and
S4 is a single-stranded spacer region between L3 and a1/a2,
the conserved nucleotides are as shown in FIG. 26, and wherein the colored circled nucleotides are present at the respective levels of certainty (e.g., at least about 97% of the red-circled nucleotides, at least about 90-97% of the black-circled nucleotides, at least about 75-90% of the grey-circled nucleotides, and at least about 50% of the white-circled nucleotides are present).

[0452] In some embodiments, the engineered retron is entirely synthetically produced and having the conserved nucleotides as denoted by the colored letters as shown in FIG. 26.

### Outgroup A Retron (FIG. 27)

[0453] In some embodiments, the template/wt retron for the subject engineered retron encodes a wild-type retron ncRNA polynucleotide having a consensus secondary structure that can be described as:

a1-S1-L1-S2-L2-S3-L3-S4-a2,

wherein:
a1/a2 is a stem 5 bps in length with a 2-nt overhang on a2;
L1 is a stem of 11 bps with a 4-nt tip;
L2 is a stem of 8 bps with a 3-nt tip;
L3 is a stem of 18 bps with a 3-nt tip;
S1 is a single-stranded spacer region between a1/a2 and L1;
S2 is a single-stranded spacer region between L1 and L2;
S3 is a single-stranded spacer region between L2 and L3;
S4 is a single-stranded spacer region between L3 and a1/a2,
the conserved nucleotides are as shown in FIG. 27, and wherein the colored circled nucleotides are present at the respective levels of certainty (e.g., at least about 97% of the red-circled nucleotides, at least about 90-97% of the black-circled nucleotides, at least about 75-90% of the grey-circled nucleotides, and at least about 50% of the white-circled nucleotides are present).

[0454] In some embodiments, the engineered retron is entirely synthetically produced and having the conserved nucleotides as denoted by the colored letters as shown in FIG. 27.

[0455] Amplification of an engineered retron described herein (e.g., in FIGS. 2-27) may be performed, for example, before transfection of cells or ligation into vectors. Any method for amplifying the engineered retron may be used, including, but not limited to polymerase chain reaction (PCR), isothermal amplification, nucleic acid sequence-based amplification (NASBA), transcription mediated amplification (TMA), strand displacement amplification (SDA), and ligase chain reaction (LCR). In one embodiment, the engineered retron comprise common 5′ and 3′ priming sites to allow amplification of retron sequences in parallel with a set of universal primers. In another embodiment, a set of selective primers is used to selectively amplify a subset of retron sequences from a pooled mixture.

[0456] Variants of these templates, which can also be used in the engineered retron of the invention, include a variant having: A) up to 1, 2, or 3 (e.g., up to 1) nucleotide changes per 10 red lettered-nucleotides; B) up to 4, 5, or 6 (e.g., up to 1 or 2) nucleotide changes per 10 black lettered-nucleotides; and/or C) up to 7, 8, or 9 (e.g., up to 3 or 4) nucleotide changes per 10 grey lettered-nucleotides; and/or optionally further comprising: a) 7, 8, 9, or 10 (e.g., 9 or 10) nucleotides present per 10 red-circled nucleotides; b) 6, 7, 8, 9, or 10 (e.g., 8, 9 or 10) nucleotides present per 10 black-circled nucleotides; c) 4, 5, 6, 7, 8, 9, or 10 (e.g., 6, 7, 8, 9 or 10) nucleotides present per 10 grey-circled nucleotides; and/or d) 2, 3, 4, 5, 6, 7, 8, 9, or 10 (e.g., 4, 5, 6, 7, 8, 9, or 10) nucleotides present per 10 white-circled nucleotides.

[0457] In some embodiments, the non-coding RNA (ncRNA) portion of the engineered retron comprises a polynucleotide (e.g., a DNA molecule) encoding an ncRNA listed in Table B, or an ncRNA having at least 50%, at least 55%, at least 60%, at least 65%, at least 70%, at least 75%, at least 80%, at least 85%, at least 90%, at least 91%, at least 92%, at least 93%, at least 94%, at least 95%, at least 96%, at least 97%, at least 98%, at least 99%, at least 99.1%, at least 99.2%, at least 99.3%, at least 99.4%, at least 99.5%, at least 99.6%, at least 99.7%, at least 99.8% or at least 99.9% sequence identity to an ncRNA listed in Table B. In some embodiments, the ncRNA does not comprise an ncRNA associated with the RT sequences of Table X.

[0458] B. Heterologous Nucleotide Sequence (HNS)

[0459] The engineered retron may comprise or encodes a heterologous nucleic acid (e.g., DNA or RNA) within the msr locus or the msd locus (such as in an S region or the tip of an L region in the consensus structure in any one of FIGS. 2-27, and variants thereof), or upstream or downstream of either the msr locus or the msd locus. In some embodiments, the heterologous nucleic acid is inserted within the msd locus. In some embodiments, the heterologous nucleic acid is inserted upstream of the msr locus. In some embodiments, the heterologous nucleic acid is inserted upstream or downstream of the msd locus. In other embodiments, the heterologous nucleic acid is inserted in spacer sequences (e.g., S1, S2, S3 and/or S4 as depicted in FIG. 2) between hairpin loops and/or within hairpin loops (e.g., L1, L2, L3 and/or L4 as depicted in FIG. 2), e.g., the tip or loop region, or within a bulge. In some embodiments, the heterologous nucleic acid sequence can be inserted in the tip of an L region or hairpin loop (e.g., L1, L2, L3 and/or L4 as depicted in FIG. 2). In some embodiments, one or more heterologous nucleic acids are inserted into the msd locus. In some embodiments, a first heterologous nucleic acid is inserted into the msd locus, and a second heterologous nucleic acid is inserted either upstream of the msr locus or upstream or downstream of the msd locus.

[0460] In some embodiments, the heterologous nucleic acid comprises flanking contiguous nucleotides (also referred to as homologous arms) that are substantially complementary to a target site genomic sequence of a cell to facilitate insertion of at least part of the heterologous nucleic acid into the genome of the cell at the target site via homology directed repair (HDR). In some embodiments, the heterologous nucleic acid is between >20 nucleotides and 10,000 nucleotides (e.g., including the flanking homologous arms).

[0461] In some embodiments, one or both of the homology arm(s) on the heterologous nucleic acid are 100% identical to a target genomic sequence. In some embodiments, one or both of the homology arm(s) on the heterologous nucleic acid are less than 100% complementary to the target genomic sequence, for example, 99%, 98%, 97%, 96%, 95%, 94%, 93%, 92%, 91%, or 90% identical to a target genomic sequence.

[0462] The part of the heterologous nucleic acid to be inserted into the target genome sequence is sometimes referred to as a donor sequence. The donor sequence may be partially identical to the full length or portions thereof of a target genomic sequence, or may be unrelated to the target genomic sequence. The donor sequence may be used, for example, to introduce modifications (e.g., substitutions, deletions, insertions, or a combination thereof) such as mutations or other genetic changes (e.g., genetic elements such as stop codons or a shift in an open reading frame on the target polynucleotide) into its target sequence.

[0463] In some embodiments, the heterologous nucleic acid sequence is or encodes a biologically active molecule such as, but not limited to, a therapeutic protein.

[0464] Any therapeutic proteins may be encoded by the heterologous nucleic acid.

[0465] In some embodiments, the heterologous nucleic acid sequences encodes one or more prophylactically- or therapeutically-active proteins, polypeptides, or other factors.

[0466] As a non-limiting example, the heterologous sequences may be or encode an agent that enhances tumor killing activity such as, but not limited to, TRAIL or tumor necrosis factor (TNF), in a cancer. As another non-limiting example, the heterologous sequences may be or encode an agent suitable for the treatment of conditions such as muscular dystrophy (e.g., heterologous sequences are or encode dystrophin or a functional fragment or variant thereof such as the numerous dystrophin minigenes or microdystrophine coding sequences known in the art), cardiovascular disease (e.g., heterologous sequences are or encode SERCA2a, GATA4, Tbx5, Mef2C, Hand2, Myocd, etc.), neurodegenerative disease (e.g., heterologous sequences is or encodes NGF, BDNF, GDNF, NT-3, etc.).

[0467] As additional non-limiting example, the heterologous nucleic acid sequence may be or encode an agent that enhances tumor killing activity such as, but not limited to, TRAIL or tumor necrosis factor (TNF), in a cancer. As another non-limiting example, the heterologous nucleic acid sequence may be or encode an agent suitable for the treatment of conditions such as muscular dystrophy (e.g., heterologous nucleic acid sequence is or encodes Dystrophin), cardiovascular disease (e.g., heterologous nucleic acid sequence is or encodes SERCA2a, GATA4, Tbx5, Mef2C, Hand2, Myocd, etc.), neurodegenerative disease (e.g., heterologous nucleic acid sequence is or encodes NGF, BDNF, GDNF, NT-3, etc.), chronic pain (e.g., heterologous nucleic acid sequence is or encodes GlyRal), an enkephalin, or a glutamate decarboxylase (e.g., heterologous nucleic acid sequence is or encodes GAD65, GAD67, or another isoform), lung disease (e.g., heterologous nucleic acid sequence is or encodes CFTR), hemophilia (e.g., heterologous nucleic acid sequence is or encodes Factor VIII or Factor IX), neoplasia (e.g., heterologous nucleic acid sequence is or encodes PTEN, ATM, ATR, EGFR, ERBB2, ERBB3, ERBB4, Notch1, Notch2, Notch3, Notch4, AKT, AKT2, AKT3, HIF, HI F1a, HIF3a, Met, HRG, Bcl2, PPARalpha, PPAR gamma, WT1 (Wilms Tumor), FGF Receptor Family members (5 members: 1, 2, 3, 4, 5), CDKN2a, APC, RB (retinoblastoma), MEN1, VHL, BRCA1, BRCA2, AR (Androgen Receptor), TSG101, IGF, IGF Receptor, Igf1 (4 variants), Igf2 (3 variants), Igf1 Receptor, Igf2 Receptor, Bax, Bcl2, caspases family (9 members: 1, 2, 3, 4, 6, 7, 8, 9, 12), Kras, Ape), age-related macular degeneration (e.g., heterologous nucleic acid sequence is or encodes Aber, Ccl2, Cc2, cp (ceruloplasmin), Timp3, cathepsin D, Vldlr), schizophrenia (e.g., Neuregulin (Nrgl), Erb4 (receptor for Neuregulin), Complexin-1 (Cplx1), Tph1 Tryptophan hydroxylase, Tph2 Tryptophan hydroxylase 2, Neurexin 1, GSK3, GSK3a, GSK3b, 5-HIT (Slc6a4), COMT, DRD (Drdla), SLC6A3, DAOA, DTNBPI, Dao (Dao1)), trinucleotide repeat disorders (e.g., HTT (Huntington's Dx), SBMA/SMAXI/AR (Kennedy's Dx), FXN/X25 (Friedrich's Ataxia), ATX3 (Machado-Joseph's Dx), ATXNI and ATXN2 (spinocerebellar ataxias), DMPK (myotonic dystrophy), Atrophin-1 and Atn1(DRPLA Dx), CBP (Creb-BP-global instability), VLDLR (Alzheimer's), Atxn7, Atxn10), fragile X syndrome (e.g., heterologous nucleic acid sequence is or encodes FMR2, FXRI, FXR2, mGLUR5), secretase related disorders (e.g., heterologous nucleic acid sequence is or encodes APH-1 (alpha and beta), Presenilin (Psen1), nicastrin (Ncstn), PEN-2), ALS (e.g., heterologous nucleic acid sequence is or encodes SOD1, ALS2, STEX, FUS, TARD BP, VEGF (VEGF-a, VEGF-b, VEGF-c)), autism (e.g., heterologous nucleic acid sequence is or encodes Mecp2, BZRAP1, MDGA2, Sema5A, Neurexin 1), Alzheimer's disease (e.g., heterologous nucleic acid sequence is or encodes E1, CHIP, UCH, UBB, Tau, LRP, PICALM, Clusterin, PS1, SORL1, CR1, Vldlr, Uba1, Uba3, CHIP28 (Aqp1, Aquaporin 1), Uch11, Uch13, APP), inflammation (e.g., heterologous nucleic acid sequence is or encodes IL-10, IL-1 (IL-Ia, IL-Ib), IL-13, IL-17 (IL-17a (CTLA8), IL-17b, IL-17c, IL-17d, IL-171), 11-23, Cx3crl, ptpn22, TNFa, NOD2/CARD15 for IBD, IL-6, IL-12 (IL-12a, IL-12b), CTLA4, Cx3cll), Parkinson's Disease (e.g., x-Synuclein, DJ-1, LRRK2, Parkin, PINK1), blood and coagulation disorders, such as, e.g., anemia, bare lymphocyte syndrome, bleeding disorders, hemophagocytic lymphohistiocytosis disorders, hemophilia A, hemophilia B, hemorrhagic disorders, leukocyte deficiencies and disorders, sickle cell anemia, and thalassemia (e.g., heterologous nucleic acid sequence is or encodes CRAN1, CDA1, RPS19, DBA, PKLR, PK1, NT5C3, UMPH1, PSNI, RHAG, RH50A, NRAMP2, SPTB, ALAS2, ANH1, ASB, ABCB7, ABC7, ASAT, TAPBP, TPSN, TAP2, ABCB3, PSF2, RING11, MHC2TA, C2TA, RFX5, RFXAP, RFX5, TBXA2R, P2RX1, P2X1, HF1, CFH, HUS, MCFD2, FANCA, FAC A, FA1, FA, FA A, FAAP95, FAAP90, FLJ34064, FANCB, FANCC, FACC, BRCA2, FANCDI, FANCD2, FANCD, FACD, FAD, FANCE, FACE, FANCF, XRCC9, FANCG, BR1PI, BACH1, FANCJ, PHF9, FANCL, FANCM, KIAA1596, PRF1, HPLH2, UNC13D, MUNC13-4, HPLH3, HLH3, FHL3, F8, FSC, PI, ATT, F5, ITGB2, CD18, LCAMB, LAD, EIF2B1, EIF2BA, EIF2B2, EIF2B3, EIF2B5, LVWM, CACH, CLE, EIF2B4, HBB, HBA2, HBB, HBD, LCRB, HBA1), B-cell non-Hodgkin lymphoma or leukemia (e.g., heterologous nucleic acid sequence is or encodes BCL7A, BCL7, ALI, TCL5, SCL, TAL2, FLT3, NBS1, NBS, ZNFN1AI, 1KI, LYF1, HOXD4, HOX4B, BCR, CML, PHL, ALL, ARNT, KRAS2, RASK2, GMPS, AFIO, ARHGEF12, LARG, KIAA0382, CALM, CLTH, CEBPA, CEBP, CHIC2, BTL, FLT3, KIT, PBT, LPP, NPMI, NUP214, D9S46E, CAN, CAIN, RUNXI, CBFA2, AML1, WHSC1LI, NSD3, FLT3, AF1Q, NPMI, NUMA1, ZNF145, PLZF, PML, MYL, STAT5B, AF1Q, CALM, CLTH, ARL11, ARLTS1, P2RX7, P2X7, BCR, CML, PHL, ALL, GRAF, NF1, VRNF, WSS, NFNS, PTPNII, PTP2C, SHP2, NS1, BCL2, CCND1, PRAD1, BCL1, TCRA, GATA1, GF1, ERYF1, NFE1, ABLI, NQO1, DIA4, NMOR1, NUP214, D9S46E, CAN, CAIN), inflammation and immune related diseases and disorders (e.g., heterologous nucleic acid sequence is or encodes KIR3DL1, NKAT3, NKB1, AMB 11, K1R3DS1, IFNG, CXCL12, TNFRSF6, APT1, FAS, CD95, ALPS1A, IL2RG, SCIDX1, SCIDX, IMD4, CCL5, SCYA5, D17S136E, TCP228, IL10, CSIF, CMKBR2, CCR2, CMKBR5, CCCKR5 (CCR5), CD3E, CD3G, AICDA, AID, HIGM2, TNFRSF5, CD40, UNG, DGU, HIGM4, TNFSFS, CD40LG, HIGM1, IGM, FOXP3, IPEX, AIID, XPID, PIDX, TNFRSF14B, TACI), inflammation (e.g., heterologous nucleic acid sequence is or encodes IL-10, IL-1 (IL-IA, IL-IB), IL-13, IL-17 (IL-17a (CTLA8), IL-17b, IL-17c, IL-17d, IL-171), 11-23, Cx3crl, ptpn22, TNFa, NOD2/CARD15 for IBD, IL-6, IL-12 (IL-12a, IL-12b), CTLA4, Cx3cII), JAK3, JAKL, DCLREIC, ARTEMIS, SCIDA, RAG1, RAG2, ADA, PTPRC, CD45, LCA, IL7R, CD3D, T3D, IL2RG, SCIDXI, SCIDX, IMD4), metabolic, liver, kidney and protein diseases and disorders (e.g., heterologous nucleic acid sequence is or encodes TTR, PALB, APOA1, APP, AAA, CVAP, ADI, GSN, FGA, LYZ, TTR, PALB, KRT18, KRT8, CIRHIA, NAIC, TEX292, KIAA1988, CFTR, ABCC7, CF, MRP7, SLC2A2, GLUT2, G6PC, G6PT, G6PT1, GAA, LAMP2, LAMPB, AGL, GDE, GBE1, GYS2, PYGL, PFKM, TCF1, HNF1A, MODY3, SCOD1, SCO1, CTNNB1, PDGFRL, PDGRL, PRLTS, AX1NI, AXIN, CTNNB1, TP53, P53, LFS1, IGF2R, MPRI, MET, CASP8, MCH5, UMOD, HNFJ, FJHN, MCKD2, ADMCKD2, PAH, PKU1, QDPR, DHPR, PTS, FCYT, PKHD1, ARPKD, PKD1, PKD2, PKD4, PKDTS, PRKCSH, G19P1, PCLD, SEC63), muscular/skeletal diseases and disorders (e.g., heterologous nucleic acid sequence is or encodes DMD, BMD, MYF6, LMNA, LMN1, EMD2, FPLD, CMDIA, HGPS, LGMDIB, LMNA, LMNI, EMD2, FPLD, CMDIA, FSHMD1A, FSHD1A, FKRP, MDC1C, LGMD2I, LAMA2, LAMM, LARGE, KIAA0609, MDC1D, FCMD, TTID, MYOT, CAPN3, CANP3, DYSF, LGMD2B, SGCG, LGMD2C, DMDA1, SCG3, SGCA, ADL, DAG2, LGMD2D, DMDA2, SGCB, LGMD2E, SGCD, SGD, LGMD2F, CMD1L, TCAP, LGMD2G, CMD1N, TRIM32, HT2A, LGMD2H, FKRP, MDCIC, LGMD21, TTN, CMD1G, TMD, LGMD2J, POMT1, CAV3, LGMD1C, SEPN1, SELN, RSMD1, PLEC1, PLTN, EBS1, LRP5, BMND1, LRP7, LR3, OPPG, VBCH2, CLCN7, CLC7, OPTA2, OSTMI, GL, TCIRG1, TIRC7, OC116, OPTB1, VAPB, VAPC, ALS8, SMN1, SMA1, SMA2, SMA3, SMA4, BSCL2, SPG17, GARS, SMAD1, CMT2D, HEXB, IGHMBP2, SMUBP2, CATF1, SMARD1), neurological and neuronal diseases and disorders (e.g., heterologous nucleic acid sequence is or encodes SOD1, ALS2, STEX, FUS, TARDBP, VEGF (VEGF-a, VEGF-b, VEGF-c), APP, AAA, CVAP, ADI, APOE, AD2, PSEN2, AD4, STM2, APBB2, FE65LI, NOS3, PLAU, URK, ACE, DCPI, ACEI, MPO, PAC1PI, PAXIPIL, PTIP, A2M, BLMH, BMH, PSEN1, AD3, Mecp2, BZRAP1, MDGA2, Sema5A, Neurexin 1, GLO1, MECP2, RTT, PPMX, MRX16, MRX79, NLGN3, NLGN4, KIAA1260, AUTSX2, FMR2, FXR1, FXR2, mGLUR5, HD, IT15, PRNP, PRIP, JPH3, JP3, HDL2, TBP, SCA17, NR4A2, NURR1, NOT, TINUR, SNCAIP, TBP, SCA17, SNCA, NACP, PARK1, PARK4, DJI, PARK7, LRRK2, PARK8, PINK1, PARK6, UCHL1, PARK5, SNCA, NACP, PARK1, PARK4, PRKN, PARK2, PDJ, DBH, NDUFV2, MECP2, RTT, PPMX, MRX16, MRX79, CDKL5, STK9, MECP2, RTT, PPMX, MRX16, MRX79, x-Synuclein, DJ-1, Neuregulin-1 (Nrgl), Erb4 (receptor for Neuregulin), Complexin-1 (Cplx1), Tph1 Tryptophan hydroxylase, Tph2, Tryptophan hydroxylase 2, Neurexin 1, GSK3, GSK3a, GSK3b, 5-HTT (Slc6a4), CONT, DRD (Drdla), SLC6A, DAOA, DTNBP1, Dao (Daol), APH-1(alpha and beta), Presenilin (Psenl), Nicastrin, (Ncstn), PEN-2, Nos1, Parp1, Nat1, Nat2, HTT, SBMA/SMAX1/AR, FXN/X25, ATX3, TXN, ATXN2, DMPK, Atrophin-1, Atn1, CBP, VLDLR, Atxn7, and AtxnlO), and ocular diseases and disorders (e.g., Aber, Ccl2, Cc2, cp (ceruloplasmin), Timp3, cathepsin-D, Vldlr, Ccr2, CRYAA, CRYA1, CRYBB2, CRYB2, PITX3, BFSP2, CP49, CP47, CRYAA, CRYAI, PAX6, AN2, MGDA, CRYBA1, CRYB1, CRYGC, CRYG3, CCL, LIM2, MP19, CRYGD, CRYG4, BFSP2, CP49, CP47, HSF4, CTM, HSF4, CTM, MIP, AQPO, CRYAB, CRYA2, CTPP2, CRYBB1, CRYGD, CRYG4, CRYBB2, CRYB2, CRYGC, CRYG3, CCL, CRYAA, CRYAI, GJA8, CX50, CAE1, GJA3, CX46, CZP3, CAE3, CCM1, CAM, KRIT1, APOA1, TGFBI, CSD2, CDGG1, CSD, BIGH3, CDG2, TACSTD2, TROP2, M1SI, VSX1, RINX, PPCD, PPD, KTCN, COL8A2, FECD, PPCD2, PIP5K3, CFD, KERA, CNA2, MYOC, TIGR, GLCIA, JO AG, GPOA, OPTN, GLC1E, FIP2, HYPL, NRP, CYP1BI, GLC3A, OPA1, NTG, NPG, CYP1BI, GLC3A, CRB1, RP12, CRX, CORD2, CRD, RPGRIPI, LCA6, CORD9, RPE65, RP20, AIPL1, LCA4, GUCY2D, GUC2D, LCA1, CORD6, RDH12, LCA3, ELOVL4, ADMD, STGD2, STGD3, RDS, RP7, PRPH2, PRPH, AVMD, AOFMD, and VMD2).

[0468] In some embodiments, the heterologous nucleic acid sequence is or encodes a factor that can affect the differentiation of a cell. As a non-limiting example, the expression of one or more of Oct4, Klf4, Sox2, c-Myc, L-Myc, dominant-negative p53, Nanog, Glis1, Lin28, TFIID, mir-302/367, or other miRNAs can cause the cell to become an induced pluripotent stem (iPS) cell.

[0469] In some embodiments, the heterologous nucleic acid sequence is or encodes a factor for transdifferentiating cells. Non-limiting examples of factors include: one or more of GATA4, Tbx5, Mef2C, Myocd, Hand2, SRF, Mesp1, SMARCD3 for cardiomyocytes; Ascii, Nurr1, Lmx1A, Bm2, Myt11, NeuroD1, FoxA2 for neural cells; and Hnf4a, Foxa1, Foxa2 or Foxa3 for hepatic cells.

[0470] In certain embodiments, the heterologous nucleic acid encodes a therapeutic antibody, or an antigen-binding fragment thereof.

[0471] In certain embodiments, the heterologous nucleic acid encodes a protein for replacement therapy. The protein may be defective in a disease cell or a disease organism/individual, and the wild-type protein or a functional fragment or variant thereof, when delivered by the heterologous nucleic acid to the disease cell/tissue/organism/individual, at least partially or fully restores the lost function of the protein the disease cell/tissue/organism/individual.

### HNS=Donor DNA Template

[0472] In some embodiments, the heterologous nucleic acid sequence is a donor DNA template that can be integrated into a host genome via HDR.

[0473] In some embodiments, the heterologous nucleic acid sequence is a donor DNA that can serve as a template or primer for recombineering during replication.

[0474] In certain embodiments, the heterologous nucleic acid comprises or encodes a donor/template sequence, wherein the donor/template corrects/repairs/removes a mutation at the target genome site. For example, the mutation may be a mutated exon in a disease gene.

[0475] In certain embodiments, the donor/template may encode or comprises a functional DNA element, such as a promoter, an enhancer, a protein binding sequence, a methylation site, or a homology region for assisting gene editing, etc.

[0476] By “donor DNA” or “donor DNA template” it is meant a single-stranded DNA to be inserted at a site cleaved by a gene-editing nuclease (e.g., a CRISPR/Cas effector protein; a TALEN; a ZFN) (e.g., after dsDNA cleavage, after nicking a target DNA, after dual nicking a target DNA, and the like). The donor DNA template can contain sufficient homology to a genomic sequence at the target site, e.g., 70%, 80%, 85%, 90%, 95%, or 100% homology with the nucleotide sequences flanking the target site, e.g. within about 50 bases or less of the target site, e.g. within about 30 bases, within about 15 bases, within about 10 bases, within about 5 bases, or immediately flanking the target site, to support homology-directed repair between it and the genomic sequence to which it bears homology.

[0477] Approximately 25, 50, 100, or 200 nucleotides, or more than 200 nucleotides, of sequence homology between a donor DNA template and a genomic sequence (or any integral value between 10 and 200 nucleotides, or more) can support homology-directed repair. Donor DNA template can be of any length, e.g., 50 nucleotides or more, 100 nucleotides or more, 250 nucleotides or more, 500 nucleotides or more, 1000 nucleotides or more, 5000 nucleotides or more, etc. A suitable donor DNA template can be from 50 nucleotides to 100 nucleotides, from 100 nucleotides to 500 nucleotides, from 500 nucleotides to 1000 nucleotides, from 1000 nucleotides to 5000 nucleotides, or from 5000 nucleotides to 10,000 nucleotides, or more than 10,000 nucleotides, in length.

[0478] As noted above, the donor DNA template comprises a first homology arm and a second homology arm. The first homology arm is at or near the 5′ end of the donor DNA; and comprises a nucleotide sequence that is at least partially complementary to a first nucleotide sequence in a target nucleic acid. The second homology arm is at or near the 3′ end of the donor DNA; and comprises a nucleotide sequence that is at least partially complementary to a second nucleotide sequence in the target nucleic acid. The first and second homology arms can each independently have a length of from about 10 nucleotides to 400 nucleotides; e.g., from 10 nucleotides (nt) to 15 nt, from 15 nt to 20 nt, from 20 nt to 25 nt, from 25 nt to 30 nt, from 30 nt to 35 nt, from 35 nt to 40 nt, from 40 nt to 45 nt, from 45 nt to 50 nt, from 50 nt to 75 nt, from 75 nt to 100 nt, from 100 nt to 125 nt, from 125 nt to 150 nt, from 150 nt to 175 nt, from 175 nt to 200 nt, from 200 nt to 225 nt, from 225 nt to 250 nt, from 250 nt to 275 nt, from 275 nt to 300 nt, from 325 nt to 350 nt, from 350 nt to 375 nt, or from 375 nt to 400 nt.

[0479] In certain embodiments, the donor DNA template is used for editing the target nucleotide sequence. In certain embodiments, the donor DNA template comprises one or more mutations to be introduced into the target polynucleotide. Examples of such mutations include substitutions, deletions, insertions, or a combination thereof. In certain embodiments, the mutation causes a shift in an open reading frame on the target polynucleotide. In certain embodiments, the donor polynucleotide alters a stop codon in the target polynucleotide. In certain embodiments, the donor polynucleotide corrects a premature stop codon. The correction can be achieved by deleting the stop codon, or by introducing one or more sequence changes to alter the stop codon to a codon. In certain embodiments, the donor polynucleotide addresses loss of function mutations, deletions, or translocations that may occur, for example, in certain disease contexts by inserting or restoring a functional copy of a gene, or functional fragment thereof, or a functional regulatory sequence or functional fragment of a regulatory sequence. A functional fragment includes a fragment less than the entire copy of a gene but otherwise provides sufficient nucleotide sequence to restore the functionality of a wild type gene or non-coding regulatory sequence (e.g., sequences encoding long non-coding RNA).

[0480] In certain embodiments, the donor DNA template may be used to replace a single allele of a defective gene or defective fragment thereof. In another embodiment, the donor DNA template is used to replace both alleles of a defective gene or defective gene fragment. A “defective gene” or “defective gene fragment” is a gene or portion of a gene that when expressed, fails to generate a functioning protein or non-coding RNA with functionality of the corresponding wild-type gene.

[0481] In certain example embodiments, these defective genes may be associated with one or more disease phenotypes. In certain example embodiments, the defective gene or gene fragment is not replaced but the heterologous nucleic acid is used to insert donor polynucleotides that encode gene or gene fragments that compensate for or override defective gene expression such that cell phenotypes associated with defective gene expression are eliminated or changed to a different or desired cellular phenotype. This can be achieved by including the coding sequence of a therapeutic protein, such as a therapeutic antibody or functional fragment thereof, or a wild-type version of a defective protein associated with one or more disease phenotypes.

[0482] In certain embodiments, the donor may include, but not be limited to, genes or gene fragments, encoding proteins or RNA transcripts to be expressed, regulatory elements, repair templates, and the like. According to the invention, the donor polynucleotides may comprise left end and right end sequence elements that function with transposition components that mediate insertion.

[0483] In certain embodiments, the donor DNA template manipulates a splicing site on the target polynucleotide. In certain embodiments, the donor DNA template disrupts a splicing site. The disruption may be achieved by inserting the polynucleotide to a splicing site and/or introducing one or more mutations to the splicing site. In certain embodiments, the donor polynucleotide may restore a splicing site. For example, the polynucleotide may comprise a splicing site sequence.

[0484] In certain embodiments, the donor DNA template to be inserted has a size from 10 bp to 50 kb in length, e.g., from 50 bp to ˜40 kb, from 100 bp to ˜30 kb, from 100 bp to ˜10 kb, from 100 bp to 300 bp, from 200 bp to 400 bp, from 300 bp to 500 bp, from 400 bp to 600 bp, from 500 bp to 700 bp, from 600 bp to 800 bp, from 700 bp to 900 bp, from 800 bp to 1000 bp, from 900 bp to 1100 bp, from 1000 bp to 1200 bp, from 1100 bp to 1300 bp, from 1200 bp to 1400 bp, from 1300 bp to 1500 bp, from 1400 bp to 1600 bp, from 1500 bp to 1700 bp, from 1600 bp to 1800 bp, from 1700 bp to 1900 bp, from 1800 bp to 2000 bp nucleotides in length.

[0485] In certain embodiments, the homologous arm on one or both ends of the sequence to be inserted is independently about 20 bp, 40 bp, 60 bp, 80 bp, 100 bp, 120 bp, or 150 bp.

[0486] The first homology arm and the second homology arm of the donor DNA flank a nucleotide sequence (“a nucleotide sequence of interest” or “an intervening nucleotide sequence”) that is to be introduced into a target nucleic acid. The nucleotide sequence of interest can comprise: i) a nucleotide sequence encoding a polypeptide of interest; ii) a nucleotide sequence encoding an exon of a gene; iii) a promoter sequence; iv) an enhancer sequence; v) a nucleotide sequence encoding a non-coding RNA; or vi) any combination of the foregoing.

[0487] The donor DNA can provide for gene correction, gene replacement, gene tagging, transgene insertion, nucleotide deletion, gene disruption, gene mutation, etc. For example, the donor DNA can be used to add, e.g., insert or replace, nucleic acid material to a target DNA (e.g. to “knock in” a nucleic acid that encodes a protein, an siRNA, an miRNA, etc.), to add a tag (e.g., 6×His, a fluorescent protein (e.g., a green fluorescent protein; a yellow fluorescent protein, etc.), hemagglutinin (HA), FLAG, etc.), to add a regulatory sequence to a gene (e.g. promoter, polyadenylation signal, internal ribosome entry sequence (IRES), 2A peptide, start codon, stop codon, splice signal, localization signal, enhancer, etc.), to modify a nucleic acid sequence (e.g., introduce a mutation), and the like. For example, the donor DNA can be used to modify DNA in a site-specific, i.e. “targeted”, way; for example gene knock-out, gene knock-in, gene editing, gene tagging, etc., as used in, for example, gene therapy, e.g. to treat a disease; or as an antiviral, antipathogenic, or anticancer therapeutic, the production of genetically modified organisms in agriculture, the large scale production of proteins by cells for therapeutic, diagnostic, or research purposes, the induction of pluripotent stem cells, biological research, the targeting of genes of pathogens for deletion or replacement, etc.

[0488] In some cases, the donor DNA comprises a nucleotide sequence encoding a polypeptide of interest. Polypeptides of interest include, e.g., a) functional versions of a polypeptide that comprises one or more amino acid substitutions, insertions, and/or deletions and that exhibits reduced function, e.g., where the reduced function is associated with or causes a pathological condition; b) fluorescent polypeptides; c) hormones; d) receptors for ligands; e) ion channels; f) neurotransmitters; g) and the like.

[0489] In some cases, the donor DNA comprises a nucleotide sequence that encodes a wild-type protein that is lacking in the recipient cell. In some cases, the donor DNA encodes a wild type factor (e.g. Factor VII, Factor VIII, Factor IX and the like) involved in coagulation. In some cases, the donor DNA comprises a nucleotide sequence that encodes a therapeutic antibody. In some cases, the donor DNA comprises a nucleotide sequence that encodes an engineered protein or receptor. In some cases, the engineered receptor is a T cell receptor (TCR), a natural killer (NK) receptor (NKR), or a B cell receptor (BCR). In some cases, the engineered TCR or NKR targets a cancer marker (e.g., a polypeptide that is expressed (e.g., over-expressed) on the surface of a cancer cell). In some cases, the donor DNA comprises a nucleotide sequence that encodes a chimeric antigen receptor (CAR). In some cases, the CAR targets a cancer marker. Donor DNAs encoding CAR, TCR, and/or NCR proteins may be folded into DNA origami structures (DNA nanostructures) and delivered into T cells or NK cells in vitro or in vivo.

[0490] Non-limiting examples of polypeptides that can be encoded by a donor DNA include, e.g., IL1B (interleukin 1, beta), XDH (xanthine dehydrogenase), TP53 (tumor protein p53), PTGIS (prostaglandin 12 (prostacyclin) synthase), MB (myoglobin), IL4 (interleukin 4), ANGPT1 (angiopoietin 1), ABCG8 (ATP-binding cassette, sub-family G (WHITE), member 8), CTSK (cathepsin K), PTGIR (prostaglandin 12 (prostacyclin) receptor (IP)), KCNJ11 (potassium inwardly-rectifying channel, subfamily J, member 11), INS (insulin), CRP (C-reactive protein, pentra)(in-related), PDGFRB (platelet-derived growth factor receptor, beta polypeptide), CCNA2 (cyclin A2), PDGFB (platelet-derived growth factor beta polypeptide (simian sarcoma viral (v-sis) oncogene homolog)), KCNJ5 (potassium inwardly-rectifying channel, subfamily J, member 5), KCNN3 (potassium intermediate/small conductance calcium-activated channel, subfamily N, member 3), CAPN10 (calpain 10), PTGES (prostaglandin E synthase), ADRA2B (adrenergic, alpha-2B-, receptor), ABCG5 (ATP-binding cassette, sub-family G (WHITE), member 5), PRDX2 (peroxiredoxin 2), CAPN5 (calpain 5), PARP14 (poly (ADP-ribose) polymerase family, member 14), MEX3C (mex-3 homolog C (C. elegans)), ACE angiotensin I converting enzyme (peptidyl-dipeptidase A) 1), TNF (tumor necrosis factor (TNF superfamily, member 2)), IL6 (interleukin 6 (interferon, beta 2)), STN (statin), SERPINE1 (serpin peptidase inhibitor, clade E (nexin, plasminogen activator inhibitor type 1), member 1), ALB (albumin), ADIPOQ (adiponectin, C1Q and collagen domain containing), APOB (apolipoprotein B (including Ag(x) antigen)), APOE (apolipoprotein E), LEP (leptin), MTHFR (5,10-methylenetetrahydrofolate reductase (NADPH)), APOA1 (apolipoprotein A-I), EDN1 (endothelin 1), NPPB (natriuretic peptide precursor B), NOS3 (nitric oxide synthase 3 (endothelial cell)), PPARG (peroxisome proliferator-activated receptor gamma), PLAT (plasminogen activator, tissue), PTGS2 (prostaglandin-endoperoxide synthase 2 (prostaglandin G/H synthase and cyclooxygenase)), CETP (cholesteryl ester transfer protein, plasma), AGTR1 (angiotensin II receptor, type 1), HMGCR (3-hydroxy-3-methylglutaryl-Coenzyme A reductase), IGF1 (insulin-like growth factor 1 (somatomedin C)), SELE (selectin E), REN (renin), PPARA (peroxisome proliferator-activated receptor alpha), PON1 (paraoxonase 1), KNG1 (kininogen 1), CCL2 (chemokine (C-C motif) ligand 2), LPL (lipoprotein lipase), vWF (von Willebrand factor), F2 (coagulation factor II (thrombin)), ICAM1 (intercellular adhesion molecule 1), TGFB1 (transforming growth factor, beta 1), NPPA (natriuretic peptide precursor A), IL10 (interleukin 10), EPO (erythropoietin), SOD1 (superoxide dismutase 1, soluble), VCAM1 (vascular cell adhesion molecule 1), IFNG (interferon, gamma), LPA (lipoprotein, Lp(a)), MPO (myeloperoxidase), ESR1 (estrogen receptor 1), MAPK1 (mitogen-activated protein kinase 1), HP (haptoglobin), F3 (coagulation factor III (thromboplastin, tissue factor)), CST3 (cystatin C), COG2 (component of oligomeric Golgi complex 2), MMP9 (matrix metallopeptidase 9 (gelatinase B, 92 kDa gelatinase, 92 kDa type IV collagenase)), SERPINC1 (serpin peptidase inhibitor, clade C (antithrombin), member 1), F8 (coagulation factor VIII, procoagulant component), HMOX1 (heme oxygenase (decycling) 1), APOC3 (apolipoprotein C-III), IL8 (interleukin 8), PROK1 (prokineticin 1), CBS (cystathionine-beta-synthase), NOS2 (nitric oxide synthase 2, inducible), TLR4 (toll-like receptor 4), SELP (selectin P (granule membrane protein 140 kDa, antigen CD62)), ABCA1 (ATP-binding cassette, sub-family A (ABC1), member 1), AGT (angiotensinogen (serpin peptidase inhibitor, clade A, member 8)), LDLR (low density lipoprotein receptor), GPT (glutamic-pyruvate transaminase (alanine aminotransferase)), VEGFA (vascular endothelial growth factor A), NR3C2 (nuclear receptor subfamily 3, group C, member 2), IL18 (interleukin 18 (interferon-gamma-inducing factor)), NOS1 (nitric oxide synthase 1 (neuronal)), NR3C1 (nuclear receptor subfamily 3, group C, member 1 (glucocorticoid receptor)), FGB (fibrinogen beta chain), HGF (hepatocyte growth factor (hepapoietin A; scatter factor)), ILIA (interleukin 1, alpha), RETN (resistin), AKT1 (v-akt murine thymoma viral oncogene homolog 1), LIPC (lipase, hepatic), HSPD1 (heat shock 60 kDa protein 1 (chaperonin)), MAPK14 (mitogen-activated protein kinase 14), SPP1 (secreted phosphoprotein 1), ITGB3 (integrin, beta 3 (platelet glycoprotein 111a, antigen CD61)), CAT (catalase), UTS2 (urotensin 2), THBD (thrombomodulin), F10 (coagulation factor X), CP (ceruloplasmin (ferroxidase)), TNFRSF11B (tumor necrosis factor receptor superfamily, member lib), EDNRA (endothelin receptor type A), EGFR (epidermal growth factor receptor (erythroblastic leukemia viral (v-erb-b) oncogene homolog, avian)), MMP2 (matrix metallopeptidase 2 (gelatinase A, 72 kDa gelatinase, 72 kDa type IV collagenase)), PLG (plasminogen), NPY (neuropeptide Y), RHOD (ras homolog gene family, member D), MAPK8 (mitogen-activated protein kinase 8), MYC (v-myc myelocytomatosis viral oncogene homolog (avian)), FN1 (fibronectin 1), CMA1 (chymase 1, mast cell), PLAU (plasminogen activator, urokinase), GNB3 (guanine nucleotide binding protein (G protein), beta polypeptide 3), ADRB2 (adrenergic, beta-2-, receptor, surface), APOA5 (apolipoprotein A-V), SOD2 (superoxide dismutase 2, mitochondrial), F5 (coagulation factor V (proaccelerin, labile factor)), VDR (vitamin D (1,25-dihydroxyvitamin D3) receptor), ALOX5 (arachidonate 5-lipoxygenase), HLA-DRB1 (major histocompatibility complex, class II, DR beta 1), PARP1 (poly (ADP-ribose) polymerase 1), CD40LG (CD40 ligand), PON2 (paraoxonase 2), AGER (advanced glycosylation end product-specific receptor), IRS1 (insulin receptor substrate 1), PTGS1 (prostaglandin-endoperoxide synthase 1 (prostaglandin G/H synthase and cyclooxygenase)), ECE1 (endothelin converting enzyme 1), F7 (coagulation factor VII (serum prothrombin conversion accelerator)), URN (interleukin 1 receptor antagonist), EPHX2 (epoxide hydrolase 2, cytoplasmic), IGFBP1 (insulin-like growth factor binding protein 1), MAPK10 (mitogen-activated protein kinase 10), FAS (Fas (TNF receptor superfamily, member 6)), ABCB1 (ATP-binding cassette, sub-family B (MDR/TAP), member 1), JUN (jun oncogene), IGFBP3 (insulin-like growth factor binding protein 3), CD14 (CD14 molecule), PDE5A (phosphodiesterase 5A, cGMP-specific), AGTR2 (angiotensin II receptor, type 2), CD40 (CD40 molecule, TNF receptor superfamily member 5), LCAT (lecithin-cholesterol acyltransferase), CCR5 (chemokine (C-C motif) receptor 5), MMP1 (matrix metallopeptidase 1 (interstitial collagenase)), TIMP1 (TIMP metallopeptidase inhibitor 1), ADM (adrenomedullin), DYT10 (dystonia 10), STAT3 (signal transducer and activator of transcription 3 (acute-phase response factor)), MMP3 (matrix metallopeptidase 3 (stromelysin 1, progelatinase)), ELN (elastin), USF1 (upstream transcription factor 1), CFH (complement factor H), HSPA4 (heat shock 70 kDa protein 4), MMP12 (matrix metallopeptidase 12 (macrophage elastase)), MME (membrane metallo-endopeptidase), F2R (coagulation factor II (thrombin) receptor), SELL (selectin L), CTSB (cathepsin B), ANXA5 (annexin A5), ADRB1 (adrenergic, beta-1-, receptor), CYBA (cytochrome b-245, alpha polypeptide), FGA (fibrinogen alpha chain), GGT1 (gamma-glutamyltransferase 1), LIPG (lipase, endothelial), HIF1A (hypoxia inducible factor 1, alpha subunit (basic helix-loop-helix transcription factor)), CXCR4 (chemokine (C-X-C motif) receptor 4), PROC (protein C (inactivator of coagulation factors Va and Villa)), SCARB1 (scavenger receptor class B, member 1), CD79A (CD79a molecule, immunoglobulin-associated alpha), PLTP (phospholipid transfer protein), ADD1 (adducin 1 (alpha)), FGG (fibrinogen gamma chain), SAA1 (serum amyloid A1), KCNH2 (potassium voltage-gated channel, subfamily H (eag-related), member 2), DPP4 (dipeptidyl-peptidase 4), G6PD (glucose-6-phosphate dehydrogenase), NPR1 (natriuretic peptide receptor A/guanylate cyclase A (atrionatriuretic peptide receptor A)), VTN (vitronectin), KIAA0101 (KIAA0101), FOS (FBJ murine osteosarcoma viral oncogene homolog), TLR2 (toll-like receptor 2), PPIG (peptidylprolyl isomerase G (cyclophilin G)), ILIR1 (interleukin 1 receptor, type I), AR (androgen receptor), CYP1A1 (cytochrome P450, family 1, subfamily A, polypeptide 1), SERPINA1 (serpin peptidase inhibitor, clade A (alpha-1 antiproteinase, antitrypsin), member 1), MTR (5-methyltetrahydrofolate-homocysteine methyltransferase), RBP4 (retinol binding protein 4, plasma), APOA4 (apolipoprotein A-IV), CDKN2A (cyclin-dependent kinase inhibitor 2A (melanoma, p16, inhibits CDK4)), FGF2 (fibroblast growth factor 2 (basic)), EDNRB (endothelin receptor type B), ITGA2 (integrin, alpha 2 (CD49B, alpha 2 subunit of VLA-2 receptor)), CAB INI (calcineurin binding protein 1), SHBG (sex hormone-binding globulin), HMGB1 (high-mobility group box 1), HSP90B2P (heat shock protein 90 kDa beta (Grp94), member 2 (pseudogene)), CYP3A4 (cytochrome P450, family 3, subfamily A, polypeptide 4), GJA1 (gap junction protein, alpha 1, 43 kDa), CAV1 (caveolin 1, caveolae protein, 22 kDa), ESR2 (estrogen receptor 2 (ER beta)), LTA (lymphotoxin alpha (TNF superfamily, member 1)), GDF15 (growth differentiation factor 15), BDNF (brain-derived neurotrophic factor), CYP2D6 (cytochrome P450, family 2, subfamily D, polypeptide 6), NGF (nerve growth factor (beta polypeptide)), SP1 (Sp 1 transcription factor), TGIF1 (TGFB-induced factor homeobox 1), SRC (v-src sarcoma (Schmidt-Ruppin A-2) viral oncogene homolog (avian)), EGF (epidermal growth factor (beta-urogastrone)), PIK3CG (phosphoinositide-3-kinase, catalytic, gamma polypeptide), HLA-A (major histocompatibility complex, class I, A), KCNQ1 (potassium voltage-gated channel, KQT-like subfamily, member 1), CNR1 (cannabinoid receptor 1 (brain)), FBN1 (fibrillin 1), CHKA (choline kinase alpha), BEST1 (bestrophin 1), APP (amyloid beta (A4) precursor protein), CTNNB1 (catenin (cadherin-associated protein), beta 1, 88 kDa), IL2 (interleukin 2), CD36 (CD36 molecule (thrombospondin receptor)), PRKAB1 (protein kinase, AMP-activated, beta 1 non-catalytic subunit), TPO (thyroid peroxidase), ALDH7A1 (aldehyde dehydrogenase 7 family, member A1), CX3CR1 (chemokine (C-X3-C motif) receptor 1), TH (tyrosine hydroxylase), F9 (coagulation factor IX), GH1 (growth hormone 1), TF (transferrin), HFE (hemochromatosis), IE17A (interleukin 17A), PTEN (phosphatase and tensin homolog), GSTM1 (glutathione S-transferase mu 1), DMD (dystrophin), GATA4 (GATA binding protein 4), F13A1 (coagulation factor XIII, A1 polypeptide), TTR (transthyretin), FABP4 (fatty acid binding protein 4, adipocyte), PON3 (paraoxonase 3), APOC1 (apolipoprotein C-I), INSR (insulin receptor), TNFRSF1B (tumor necrosis factor receptor superfamily, member IB), HTR2A (5-hydroxytryptamine (serotonin) receptor 2A), CSF3 (colony stimulating factor 3 (granulocyte)), CYP2C9 (cytochrome P450, family 2, subfamily C, polypeptide 9), TXN (thioredoxin), CYP11B2 (cytochrome P450, family 11, subfamily B, polypeptide 2), PTH (parathyroid hormone), CSF2 (colony stimulating factor 2 (granulocyte-macrophage)), KDR (kinase insert domain receptor (a type III receptor tyrosine kinase)), PLA2G2A (phospholipase A2, group IIA (platelets, synovial fluid)), B2M (beta-2-microglobulin), THBS1 (thrombospondin 1), GCG (glucagon), RHOA (ras homolog gene family, member A), ALDH2 (aldehyde dehydrogenase 2 family (mitochondrial)), TCF7L2 (transcription factor 7-like 2 (T-cell specific, HMG-box)), BDKRB2 (bradykinin receptor B2), NFE2L2 (nuclear factor (erythroid-derived 2)-like 2), NOTCH1 (Notch homolog 1, translocation-associated (Drosophila)), UGT1A1 (UDP glucuronosyltransferase 1 family, polypeptide A1), IFNA1 (interferon, alpha 1), PPARD (peroxisome proliferator-activated receptor delta), SIRT1 (sirtuin (silent mating type information regulation 2 homolog) 1 (S. cerevisiae)), GNRH1 (gonadotropin-releasing hormone 1 (luteinizing-releasing hormone)), PAPPA (pregnancy-associated plasma protein A, pappalysin 1), ARR3 (arrestin 3, retinal (X-arrestin)), NPPC (natriuretic peptide precursor C), AHSP (alpha hemoglobin stabilizing protein), PTK2 (PTK2 protein tyrosine kinase 2), IL13 (interleukin 13), MTOR (mechanistic target of rapamycin (serine/threonine kinase)), ITGB2 (integrin, beta 2 (complement component 3 receptor 3 and 4 subunit)), GSTT1 (glutathione S-transferase theta 1), IL6ST (interleukin 6 signal transducer (gp130, oncostatin M receptor)), CPB2 (carboxypeptidase B2 (plasma)), CYP1A2 (cytochrome P450, family 1, subfamily A, polypeptide 2), HNF4A (hepatocyte nuclear factor 4, alpha), SLC6A4 (solute carrier family 6 (neurotransmitter transporter, serotonin), member 4), PLA2G6 (phospholipase A2, group VI (cytosolic, calcium-independent)), TNFSF11 (tumor necrosis factor (ligand) superfamily, member 11), SLC8A1 (solute carrier family 8 (sodium/calcium exchanger), member 1), F2RL1 (coagulation factor II (thrombin) receptor-like 1), AKR1A1 (aldo-keto reductase family 1, member A1 (aldehyde reductase)), ALDH9A1 (aldehyde dehydrogenase 9 family, member A1), BGLAP (bone gamma-carboxyglutamate (gla) protein), MTTP (microsomal triglyceride transfer protein), MTRR (5-methyltetrahydrofolate-homocysteine methyltransferase reductase), SULT1A3 (sulfotransferase family, cytosolic, IA, phenol—preferring, member 3), RAGE (renal tumor antigen), C4B (complement component 4B (Chido blood group), P2RY12 (purinergic receptor P2Y, G-protein coupled, 12), RNLS (renalase, FAD-dependent amine oxidase), CREB1 (cAMP responsive element binding protein 1), POMC (proopiomelanocortin), RAC1 (ras-related C3 botulinum toxin substrate 1 (rho family, small GTP binding protein Racl)), LMNA (lamin NC), CD59 (CD59 molecule, complement regulatory protein), SCN5A (sodium channel, voltage-gated, type V, alpha subunit), CYP1B1 (cytochrome P450, family 1, subfamily B, polypeptide 1), MIF (macrophage migration inhibitory factor (glycosylation-inhibiting factor)), MMP13 (matrix metallopeptidase 13 (collagenase 3)), TIMP2 (TIMP metallopeptidase inhibitor 2), CYP19A1 (cytochrome P450, family 19, subfamily A, polypeptide 1), CYP21A2 (cytochrome P450, family 21, subfamily A, polypeptide 2), PTPN22 (protein tyrosine phosphatase, non-receptor type 22 (lymphoid)), MYH14 (myosin, heavy chain 14, non-muscle), MBL2 (mannose-binding lectin (protein C) 2, soluble (opsonic defect)), SELPLG (selectin P ligand), AOC3 (amine oxidase, copper containing 3 (vascular adhesion protein 1)), CTSL1 (cathepsin LI), PCNA (proliferating cell nuclear antigen), IGF2 (insulin like growth factor 2 (somatomedin A)), ITGB1 (integrin, beta 1 (fibronectin receptor, beta polypeptide, antigen CD29 includes MDF2, MSK12)), CAST (calpastatin), CXCL12 (chemokine (C-X-C motif) ligand 12 (stromal cell-derived factor 1)), IGHE (immunoglobulin heavy constant epsilon), KCNE1 (potassium voltage-gated channel, Isk-related family, member 1), TFRC (transferrin receptor (p90, CD71)), COL1A1 (collagen, type I, alpha 1), COL1A2 (collagen, type I, alpha 2), IL2RB (interleukin 2 receptor, beta), PLA2G10 (phospholipase A2, group X), ANGPT2 (angiopoietin 2), PROCR (protein C receptor, endothelial (EPCR)), NOX4 (NADPH oxidase 4), HAMP (hepcidin antimicrobial peptide), PTPN11 (protein tyrosine phosphatase, non-receptor type 11), SLC2A1 (solute carrier family 2 (facilitated glucose transporter), member 1), IL2RA (interleukin 2 receptor, alpha), CCL5 (chemokine (C-C motif) ligand 5), IRF1 (interferon regulatory factor 1), CFLAR (CASP8 and FADD-like apoptosis regulator), CALC A (calcitonin-related polypeptide alpha), EIF4E (eukaryotic translation initiation factor 4E), GSTP1 (glutathione S-transferase pi 1), JAK2 (Janus kinase 2), CYP3A5 (cytochrome P450, family 3, subfamily A, polypeptide 5), HSPG2 (heparan sulfate proteoglycan 2), CCL3 (chemokine (C-C motif) ligand 3), MYD88 (myeloid differentiation primary response gene (88)), VIP (vasoactive intestinal peptide), SOAT1 (sterol O-acyltransferase 1), ADRBK1 (adrenergic, beta, receptor kinase 1), NR4A2 (nuclear receptor subfamily 4, group A, member 2), MMP8 (matrix metallopeptidase 8 (neutrophil collagenase)), NPR2 (natriuretic peptide receptor B/guanylate cyclase B (atrionatriuretic peptide receptor B)), GCH1 (GTP cyclohydrolase 1), EPRS (glutamyl-prolyl-tRNA synthetase), PPARGC1A (peroxisome proliferator-activated receptor gamma, coactivator 1 alpha), F12 (coagulation factor XII (Hageman factor)), PEC AMI (platelet/endothelial cell adhesion molecule), CCL4 (chemokine (C-C motif) ligand 4), SERPINA3 (serpin peptidase inhibitor, clade A (alpha-1 antiproteinase, antitrypsin), member 3), CASR (calcium-sensing receptor), GJA5 (gap junction protein, alpha 5, 40 kDa), FABP2 (fatty acid binding protein 2, intestinal), TTF2 (transcription termination factor, RNA polymerase II), PROS1 (protein S (alpha)), CTF1 (cardiotrophin 1), SGCB (sarcoglycan, beta (43 kDa dystrophin-associated glycoprotein)), YME1L1 (YME1-like 1 (S. cerevisiae)), CAMP (cathelicidin antimicrobial peptide), ZC3H12A (zinc finger CCCH-type containing 12A), AKR1B1 (aldo-keto reductase family 1, member B1 (aldose reductase)), DES (desmin), MMP7 (matrix metallopeptidase 7 (matrilysin, uterine)), AHR (aryl hydrocarbon receptor), CSF1 (colony stimulating factor 1 (macrophage)), HDAC9 (histone deacetylase 9), CTGF (connective tissue growth factor), KCNMA1 (potassium large conductance calcium-activated channel, subfamily M, alpha member 1), UGT1A (UDP glucuronosyltransferase 1 family, polypeptide A complex locus), PRKCA (protein kinase C, alpha), COMT (catechol-b-methyltransferase), S100B (S100 calcium binding protein B), EGR1 (early growth response 1), PRL (prolactin), IL15 (interleukin 15), DRD4 (dopamine receptor D4), CAMK2G (calcium/calmodulin-dependent protein kinase II gamma), SLC22A2 (solute carrier family 22 (organic cation transporter), member 2), CCL11 (chemokine (C-C motif) ligand 11), PGF (placental growth factor), THPO (thrombopoietin), GP6 (glycoprotein VI (platelet)), TACR1 (tachykinin receptor 1), NTS (neurotensin), HNF1A (HNF1 homeobox A), SST (somatostatin), KCND1 (potassium voltage-gated channel, Shal-related subfamily, member 1), LOC646627 (phospholipase inhibitor), TBXAS1 (thromboxane A synthase 1 (platelet)), CYP2J2 (cytochrome P450, family 2, subfamily J, polypeptide 2), TBXA2R (thromboxane A2 receptor), ADH1C (alcohol dehydrogenase 1C (class I), gamma polypeptide), ALOX12 (arachidonate 12-lipoxygenase), AHSG (alpha-2-HS-glycoprotein), BHMT (betaine-homocysteine methyltransferase), GJA4 (gap junction protein, alpha 4, 37 kDa), SLC25A4 (solute carrier family 25 (mitochondrial carrier; adenine nucleotide translocator), member 4), ACLY (ATP citrate lyase), ALOX5AP (arachidonate 5-lipoxygenase-activating protein), NUMA1 (nuclear mitotic apparatus protein 1), CYP27B1 (cytochrome P450, family 27, subfamily B, polypeptide 1), CYSLTR2 (cysteinyl leukotriene receptor 2), SOD3 (superoxide dismutase 3, extracellular), LTC4S (leukotriene C4 synthase), UCN (urocortin), GHRL (ghrelin/obestatin prepropeptide), APOC2 (apolipoprotein C-II), CLEC4A (C-type lectin domain family 4, member A), KBTBD10 (kelch repeat and BTB (POZ) domain containing 10), TNC (tenascin C), TYMS (thymidylate synthetase), SHC1 (SHC (Src homology 2 domain containing) transforming protein 1), LRP1 (low density lipoprotein receptor-related protein 1), SOCS3 (suppressor of cytokine signaling 3), ADH1B (alcohol dehydrogenase IB (class I), beta polypeptide), KLK3 (kallikrein-related peptidase 3), HSD11B1 (hydroxysteroid (11-beta) dehydrogenase 1), VKORC1 (vitamin K epoxide reductase complex, subunit 1), SERPINB2 (serpin peptidase inhibitor, clade B (ovalbumin), member 2), TNS1 (tensin 1), RNF19A (ring finger protein 19A), EPOR (erythropoietin receptor), ITGAM (integrin, alpha M (complement component 3 receptor 3 subunit)), PITX2 (paired-like homeodomain 2), MAPK7 (mitogen-activated protein kinase 7), FCGR3A (Fc fragment of IgG, low affinity 111a, receptor (CD16a)), LEPR (leptin receptor), ENG (endoglin), GPX1 (glutathione peroxidase 1), GOT2 (glutamic-oxaloacetic transaminase 2, mitochondrial (aspartate aminotransferase 2)), HRH1 (histamine receptor HI), NR112 (nuclear receptor subfamily 1, group I, member 2), CRH (corticotropin releasing hormone), HTR1A (5-hydroxytryptamine (serotonin) receptor 1A), VDAC1 (voltage-dependent anion channel 1), HPSE (heparanase), SFTPD (surfactant protein D), TAP2 (transporter 2, ATP-binding cassette, sub-family B (MDR/TAP)), RNF123 (ring finger protein 123), PTK2B (PTK2B protein tyrosine kinase 2 beta), NTRK2 (neurotrophic tyrosine kinase, receptor, type 2), IL6R (interleukin 6 receptor), ACHE (acetylcholinesterase (Yt blood group)), GLP1R (glucagon-like peptide 1 receptor), GHR (growth hormone receptor), GSR (glutathione reductase), NQOl (NAD(P)H dehydrogenase, quinone 1), NR5A1 (nuclear receptor subfamily 5, group A, member 1), GJB2 (gap junction protein, beta 2, 26 kDa), SLC9A1 (solute carrier family 9 (sodium/hydrogen exchanger), member 1), MAOA (monoamine oxidase A), PCSK9 (proprotein convertase subtilisin/kexin type 9), FCGR2A (Fc fragment of IgG, low affinity Ila, receptor (CD32)), SERPINF1 (serpin peptidase inhibitor, clade F (alpha-2 antiplasmin, pigment epithelium derived factor), member 1), EDN3 (endothelin 3), DHFR (dihydrofolate reductase), GAS6 (growth arrest-specific 6), SMPD1 (sphingomyelin phosphodiesterase 1, acid lysosomal), UCP2 (uncoupling protein 2 (mitochondrial, proton carrier)), TFAP2A (transcription factor AP-2 alpha (activating enhancer binding protein 2 alpha)), C4BPA (complement component 4 binding protein, alpha), SERPINF2 (serpin peptidase inhibitor, clade F (alpha-2 antiplasmin, pigment epithelium derived factor), member 2), TYMP (thymidine phosphorylase), ALPP (alkaline phosphatase, placental (Regan isozyme)), CXCR2 (chemokine (C-X-C motif) receptor 2), SLC39A3 (solute carrier family 39 (zinc transporter), member 3), ABCG2 (ATP-binding cassette, sub-family G (WHITE), member 2), ADA (adenosine deaminase), JAK3 (Janus kinase 3), HSPA1A (heat shock 70 kDa protein IA), FASN (fatty acid synthase), FGF1 (fibroblast growth factor 1 (acidic)), Fll (coagulation factor XI), ATP7A (ATPase, Cu++ transporting, alpha polypeptide), CR1 (complement component (3b/4b) receptor 1 (Knops blood group)), GFAP (glial fibrillary acidic protein), ROCK1 (Rho-associated, coiled-coil containing protein kinase 1), MECP2 (methyl CpG binding protein 2 (Rett syndrome)), MYLK (myosin light chain kinase), BCF1E (butyrylcholinesterase), LIPE (lipase, hormone-sensitive), PRDX5 (peroxiredoxin 5), ADORA1 (adenosine A1 receptor), WRN (Werner syndrome, RecQ helicase-like), CXCR3 (chemokine (C-X-C motif) receptor 3), CD81 (CD81 molecule), SMAD7 (SMAD family member 7), LAMC2 (laminin, gamma 2), MAP3K5 (mitogen-activated protein kinase kinase kinase 5), CF1GA (chromogranin A (parathyroid secretory protein 1)), IAPP (islet amyloid polypeptide), RFIO (rhodopsin), ENPP1 (ectonucleotide pyrophosphatase/phosphodiesterase 1), PTF1LF1 (parathyroid hormone-like hormone), NRG1 (neuregulin 1), VEGFC (vascular endothelial growth factor C), ENPEP (glutamyl aminopeptidase (aminopeptidase A)), CEBPB (CCAAT/enhancer binding protein (C/EBP), beta), NAGLU (N-acetylglucosaminidase, alpha), F2RL3 (coagulation factor II (thrombin) receptor-like 3), CX3CL1 (chemokine (C-X3-C motif) ligand 1), BDKRB1 (bradykinin receptor B1), ADAMTS13 (ADAM metallopeptidase with thrombospondin type 1 motif, 13), ELANE (elastase, neutrophil expressed), ENPP2 (ectonucleotide pyrophosphatase/phosphodiesterase 2), CISF1 (cytokine inducible SF12-containing protein), GAST (gastrin), MYOC (myocilin, trabecular mesh work inducible glucocorticoid response), ATP1A2 (ATPase, Na+/K+ transporting, alpha 2 polypeptide), NF1 (neurofibromin 1), GJB1 (gap junction protein, beta 1, 32 kDa), MEF2A (myocyte enhancer factor 2A), VCL (vinculin), BMPR2 (bone morphogenetic protein receptor, type II (serine/threonine kinase)), TUBB (tubulin, beta), CDC42 (cell division cycle 42 (GTP binding protein, 25 kDa)), KRT18 (keratin 18), F1SF1 (heat shock transcription factor 1), MYB (v-myb myeloblastosis viral oncogene homolog (avian)), PRKAA2 (protein kinase, AMP-activated, alpha 2 catalytic subunit), ROCK2 (Rho-associated, coiled-coil containing protein kinase 2), TFPI (tissue factor pathway inhibitor (lipoprotein-associated coagulation inhibitor)), PRKG1 (protein kinase, cGMP-dependent, type I), BMP2 (bone morphogenetic protein 2), CTNND1 (catenin (cadherin-associated protein), delta 1), CTF1 (cystathionase (cystathionine gamma-lyase)), CTSS (cathepsin S), VAV2 (vav 2 guanine nucleotide exchange factor), NPY2R (neuropeptide Y receptor Y2), IGFBP2 (insulin-like growth factor binding protein 2, 36 kDa), CD28 (CD28 molecule), GSTA1 (glutathione S-transferase alpha 1), PPIA (peptidylprolyl isomerase A (cyclophilin A)), APOF1 (apolipoprotein FI (beta-2-glycoprotein I)), S100A8 (S100 calcium binding protein A8), IL11 (interleukin 11), ALOX15 (arachidonate 15-lipoxygenase), FBLN1 (fibulin 1), NR1F13 (nuclear receptor subfamily 1, group FI, member 3), SCD (stearoyl-CoA desaturase (delta-9-desaturase)), GIP (gastric inhibitory polypeptide), CF1 GB (chromogranin B (secretogranin 1)), PRKCB (protein kinase C, beta), SRD5A1 (steroid-5-alpha-reductase, alpha polypeptide 1 (3-oxo-5 alpha-steroid delta 4-dehydrogenase alpha 1)), F1 SD11B2 (hydroxy steroid (11-beta) dehydrogenase 2), CALCRL (calcitonin receptor-like), GALNT2 (UDP-N-acetyl-alpha-D-galactosamine:polypeptide N-acetylgalactosaminyltransferase 2 (GalNAc-T2)), ANGPTL4 (angiopoietin-like 4), KCNN4 (potassium intermediate/small conductance calcium-activated channel, subfamily N, member 4), PIK3C2A (phosphoinositide-3-kinase, class 2, alpha polypeptide), HBEGF (heparin-binding EGF-like growth factor), CYP7A1 (cytochrome P450, family 7, subfamily A, polypeptide 1), HLA-DRB5 (major histocompatibility complex, class II, DR beta 5), BNIP3 (BCL2/adeno virus E1B 19 kDa interacting protein 3), GCKR (glucokinase (hexokinase 4) regulator), S100A12 (S100 calcium binding protein A 12), PADI4 (peptidyl arginine deaminase, type IV), HSPA14 (heat shock 70 kDa protein 14), CXCR1 (chemokine (C-X-C motif) receptor 1), H19 (H19, imprinted maternally expressed transcript (non-protein coding)), KRTAP19-3 (keratin associated protein 19-3), insulin, RAC2 (ras-related C3 botulinum toxin substrate 2 (rho family, small GTP binding protein Rac2)), RYR1 (ryanodine receptor 1 (skeletal)), CLOCK (clock homolog (mouse)), NGFR (nerve growth factor receptor (TNFR superfamily, member 16)), DBH (dopamine beta-hydroxylase (dopamine beta-monooxygenase)), CHRNA4 (cholinergic receptor, nicotinic, alpha 4), CACNA1C (calcium channel, voltage-dependent, L type, alpha 1C subunit), PRKAG2 (protein kinase, AMP-activated, gamma 2 non-catalytic subunit), CHAT (choline acetyltransferase), PTGDS (prostaglandin D2 synthase 21 kDa (brain)), NR1H2 (nuclear receptor subfamily 1, group H, member 2), TEK (TEK tyrosine kinase, endothelial), VEGFB (vascular endothelial growth factor B), MEF2C (myocyte enhancer factor 2C), MAPKAPK2 (mitogen-activated protein kinase-activated protein kinase 2), TNFRSF11 A (tumor necrosis factor receptor superfamily, member 11a, NFKB activator), HSPA9 (heat shock 70 kDa protein 9 (mortalin)), CYSLTR1 (cysteinyl leukotriene receptor 1), MAT1A (methionine adenosyltransferase I, alpha), OPRL1 (opiate receptor-like 1), IMPA1 (inositol(myo)-1(or 4)-monophosphatase 1), CLCN2 (chloride channel 2), DLD (dihydrolipoamide dehydrogenase), PSMA6 (proteasome (prosome, macropain) subunit, alpha type, 6), PSMB8 (proteasome (prosome, macropain) subunit, beta type, 8 (large multifunctional peptidase 7)), CHI3L1 (chitinase 3-like 1 (cartilage glycoprotein-39)), ALDH1B1 (aldehyde dehydrogenase 1 family, member B1), PARP2 (poly (ADP-ribose) polymerase 2), STAR (steroidogenic acute regulatory protein), LBP (lipopolysaccharide binding protein), ABCC6 (ATP-binding cassette, sub-family C(CFTR/MRP), member 6), RGS2 (regulator of G-protein signaling 2, 24 kDa), EFNB2 (ephrin-B2), cystic fibrosis transmembrane conductance regulator (CFTR), GJB6 (gap junction protein, beta 6, 30 kDa), APOA2 (apolipoprotein A-II), AMPD1 (adenosine monophosphate deaminase 1), DYSF (dysferlin, limb girdle muscular dystrophy 2B (autosomal recessive)), FDFT1 (farnesyl-diphosphate farnesyltransferase 1), EDN2 (endothelin 2), CCR6 (chemokine (C-C motif) receptor 6), GJB3 (gap junction protein, beta 3, 31 kDa), IL1RL1 (interleukin 1 receptor-like 1), ENTPD1 (ectonucleoside triphosphate diphosphohydrolase 1), BBS4 (Bardet-Biedl syndrome 4), CELSR2 (cadherin, EGF LAG seven-pass G-type receptor 2 (flamingo homolog, Drosophila)), F1IR (F11 receptor), RAPGEF3 (Rap guanine nucleotide exchange factor (GEF) 3), HYAL1 (hyaluronoglucosaminidase 1), ZNF259 (zinc finger protein 259), ATOX1 (ATX1 antioxidant protein 1 homolog (yeast)), ATF6 (activating transcription factor 6), KHK (ketohexokinase (fructokinase)), SAT1 (spermidine/spermine Nl-acetyltransferase 1), GGFI (gamma-glutamyl hydrolase (conjugase, folylpolygammaglutamyl hydrolase)), TIMP4 (TIMP metallopeptidase inhibitor 4), SLC4A4 (solute carrier family 4, sodium bicarbonate cotransporter, member 4), PDE2A (phosphodiesterase 2 A, cGMP-stimulated), PDE3B (phosphodiesterase 3B, cGMP-inhibited), FADS1 (fatty acid desaturase 1), FADS2 (fatty acid desaturase 2), TMSB4X (thymosin beta 4, X-linked), TXNIP (thioredoxin interacting protein), LIMS1 (LIM and senescent cell antigen-like domains 1), RFIOB (ras homolog gene family, member B), LY96 (lymphocyte antigen 96), FOXO1 (forkhead box 01), PNPLA2 (patatin-like phospholipase domain containing 2), TRH (thyrotropin-releasing hormone), GJC1 (gap junction protein, gamma 1, 45 kDa), SLC17A5 (solute carrier family 17 (anion/sugar transporter), member 5), FTO (fat mass and obesity associated), GJD2 (gap junction protein, delta 2, 36 kDa), PSRC1 (proline/serine-rich coiled-coil 1), CASP12 (caspase 12 (gene/pseudogene)), GPBAR1 (G protein-coupled bile acid receptor 1), PXK (PX domain containing serine/threonine kinase), IL33 (interleukin 33), TRIB1 (tribbles homolog 1 (Drosophila)), PBX4 (pre-B-cell leukemia homeobox 4), NUPR1 (nuclear protein, transcriptional regulator, 1), 15-Sep (15 kDa selenoprotein), CILP2 (cartilage intermediate layer protein 2), TERC (telomerase RNA component), GGT2 (gamma-glutamyltransferase 2), MT-COl (mitochondrially encoded cytochrome c oxidase I), UOX (urate oxidase, pseudogene), a CRISPR/Cas effector polypeptide, an enzymatically active CRISPR/Cas effector polypeptide (e.g., is capable of cleaving a target nucleic acid) and a CRISPR/Cas effector polypeptide that is not enzymatically active (e.g., does not cleave a target nucleic acid, but retains binding to the target nucleic acid). In some cases, the donor DNA encodes a wild-type version of any of the foregoing polypeptides; i.e., the donor DNA can encode a “normal” version that does not include a mutation(s) that results in reduced function, lack of function, or pathogenesis.

[0491] In some cases, the donor DNA comprises a nucleotide sequence encoding a fluorescent polypeptide. Suitable fluorescent proteins include, but are not limited to, green fluorescent protein (GFP) or variants thereof, blue fluorescent variant of GFP (BFP), cyan fluorescent variant of GFP (CFP), yellow fluorescent variant of GFP (YFP), enhanced GFP (EGFP), enhanced CFP (ECFP), enhanced YFP (EYFP), GFPS65T, Emerald, Topaz (TYFP), Venus, Citrine, mCitrine, GFPuv, destabilized EGFP (dEGFP), destabilized ECFP (dECFP), destabilised EYFP (dEYFP), mCFPm, Cerulean, T-Sapphire, CyPet, YPet, mKO, HcRed, t-HcRed, DsRed, DsRed2, DsRed-monomer, J-Red, dimer2, t-dimer2(12), mRFP1, pocilloporin, Renilla GFP, Monster GFP, paGFP, Kaede protein and kindling protein, Phycobiliproteins and Phycobiliprotein conjugates including B-Phycoerythrin, R-Phycoerythrin and Allophycocyanin. Other examples of fluorescent proteins include mHoneydew, mBanana, mOrange, dTomato, tdTomato, mTangerine, mStrawberry, mCherry, mGrape1, mRaspberry, mGrape2, m PI urn (Shaner et al. (2005) Nat. Methods 2:905-909), and the like. Any of a variety of fluorescent and colored proteins from Anthozoan species, as described in, e.g., Matz et al. (1999) Nature Biotechnol. 17:969-973, can be encoded.

[0492] In some cases, the donor DNA encodes an RNA, e.g., an siRNA, a microRNA, a short hairpin RNA (shRNA), an anti-sense RNA, a riboswitch, a ribozyme, an aptamer, a ribosomal RNA, a transfer RNA, and the like.

[0493] A donor DNA can include, in addition to a nucleotide sequence encoding one or more gene products (e.g., an RNA and/or a polypeptide), one or more transcriptional control elements, e.g., a promoter, an enhancer, and the like. In some cases, the transcriptional control element is inducible. In some cases, the promoter is reversible. In some cases, the transcriptional control element is constitutive. In some cases, the promoter is functional in a eukaryotic cell. In some cases, the promoter is a cell type-specific promoter. In some cases, the promoter is a tissue-specific promoter.

[0494] The nucleotide sequence of the donor DNA is typically not identical to the target nucleic acid (e.g., genomic sequence) that it replaces. Rather, the donor DNA may contain at least one or more single base changes, insertions, deletions, inversions or rearrangements with respect to the target nucleic acid (e.g., genomic sequence), so long as sufficient homology is present to support homology-directed repair (e.g., for gene correction, e.g., to convert a disease-causing base pair or a non-disease-causing base pair). In some cases, the donor DNA comprises a non-homologous sequence flanked by two regions of homology, such that homology-directed repair between the target DNA region and the two flanking sequences results in insertion of the non-homologous sequence at the target region. Donor DNA may also comprise a vector backbone containing sequences that are not homologous to the DNA region of interest (the target nucleic acid) and that are not intended for insertion into the DNA region of interest (the target nucleic acid). Generally, the homologous region(s) of a donor sequence will have at least 50% sequence identity to a target nucleic acid (e.g., a genomic sequence) with which recombination is desired. In certain cases, 60%, 70%, 80%, 90%, 95%, 98%, 99%, or 99.9% sequence identity is present. Any value between 1% and 100% sequence identity can be present, depending upon the length of the donor polynucleotide.

[0495] The donor DNA may comprise certain nucleotide sequence differences as compared to the target nucleic acid (e.g., genomic sequence), where such difference include, e.g. restriction sites, nucleotide polymorphisms, selectable markers (e.g., drug resistance genes, fluorescent proteins, enzymes etc.), etc., which may be used to assess for successful insertion of the donor DNA at the cleavage site or in some cases may be used for other purposes (e.g., to signify expression at the targeted genomic locus). In some cases, if located in a coding region, such nucleotide sequence differences will not change the amino acid sequence, or will make silent amino acid changes (i.e., changes which do not affect the structure or function of the protein). Alternatively, these sequences differences may include flanking recombination sequences such as FLPs, loxP sequences, or the like, that can be activated at a later time for removal of the marker sequence. In some cases, the donor DNA will include one or more nucleotide sequences to aid in localization of the donor to the nucleus of the recipient cell or to aid in the integration of the donor DNA into the target nucleic acid. For example, in some case, the donor DNA may comprise one or more nucleotide sequences encoding one or more nuclear localization signals (e.g. PKKKRKV (SEQ ID NO:1), VSRKRPRP (SEQ ID NO:2), QRKRKQ (SEQ ID NO:3), and the like (Frietas et al (2009) Cun-Genomics 10:550-7). In some cases, the donor DNA will include nucleotide sequences to recruit DNA repair enzymes to increase insertion efficiency. Fiuman enzymes involved in homology directed repair include MRN-CtIP, BLM-DNA2, Exo1, ERCC1, Rad51, Rad52, Ligase 1, RoIQ, PARP1, Ligase 3, BRCA2, RecQ/BLM-ToroIIIa, RTEL, Roid, and Roth (Verma and Greenburg (2016) Genes Dev. 30 (10): 1138-1154). In some cases, the donor DNA is delivered as reconstituted chromatin (Cruz-Becerra and Kadonaga (2020) eLife 2020; 9:e55780 DOI: 10.7554/eLife.55780).

[0496] In some cases, the ends of the donor DNA are protected (e.g., from exonucleolytic degradation) by any convenient method and such methods are known to those of skill in the art. For example, one or more dideoxynucleotide residues can be added to the 3′ terminus of a linear molecule and/or self complementary oligonucleotides can be ligated to one or both ends. See, for example, Chang et al. (1987) Proc. Natl. Acad Sci USA 84:4959-4963; Nehls et al. (1996) Science 272:886-889. Additional methods for protecting exogenous polynucleotides from degradation include, but are not limited to, addition of terminal amino group(s) and the use of modified internucleotide linkages such as, for example, phosphorothioates, phosphoramidates, and O-methyl ribose or deoxyribose residues. As an alternative to protecting the termini of a linear donor DNA, additional lengths of sequence may be included outside of the regions of homology that can be degraded without impacting recombination.

### HNS=Functional RNA Element

[0497] In certain embodiments, the donor/template comprises a coding sequence for a functional RNA element (ncRNAs, siRNA, shRNA, sgRNA, etc.).

[0498] In some embodiments, the heterologous nucleic acid sequences encode a functional non-translated RNA. In some embodiments, the functional non-translated RNA is an RNA aptamer or a ribozyme.

[0499] In some embodiments, the heterologous nucleic acid of the engineered retrons further includes a unique barcode to facilitate multiplexing. Barcodes may include one or more nucleotide sequences that are used to identify a nucleic acid or cell with which the barcode is associated. Such barcodes may be inserted for example, into the tip/loop region of the msd-encoded DNA. Barcodes can be 3-1000 or more nucleotides in length, 10-250 nucleotides in length, or 10-30 nucleotides in length, including any length within these ranges, such as 3, 4, 5, 6, 7, 8, 9, 10, 11, 12, 13, 14, 15, 16, 17, 18, 19, 20, 21, 22, 23, 24, 25, 26, 27, 28, 29, 30, 40, 50, 60, 70, 80, 90, 100, 200, 300, 400, 500, 600, 700, 800, 900, or 1000 nucleotides in length.

[0500] In some embodiments, barcodes are also used to identify the position (viz., positional barcode) of a cell, colony, or sample from which a retron originated, such as the position of a colony in a cellular array, the position of a well in a multi-well plate, the position of a tube in a rack, or the location of a sample in a laboratory. In particular, a barcode may be used to identify the position of a genetically modified cell containing a retron. The use of barcodes allows retrons from different cells to be pooled in a single reaction mixture for sequencing while still being able to trace a particular retron back to the colony from which it originated.

[0501] In addition, adapter sequences can be added to engineered retron to facilitate high-throughput amplification or sequencing. For example, a pair of adapter sequences can be added at the 5′ and 3′ ends of a retron construct to allow amplification or sequencing of multiple engineered retron simultaneously by the same set of primers.

### HNS=Guide RNA

[0502] In some embodiments, the functional non-translated RNA is a CRISPR/Cas guide RNA (gRNA) specific for a target sequence in the mammalian cell. FIG. 1G depicts various configurations of a recombinant retron ncRNA which is modified by inserting a guide RNA at the 5′ end or the 3′ of the ncRNA. The guide RNA also may be provided in trans as a separate construct. In addition, guide RNAs may be placed at both ends of a recombinant retron ncRNA.

[0503] The skilled person will understand that selection of an appropriate guide RNA is informed by which RNA-guided nuclease is utilized.

[0504] A guide RNA provides target specificity to the complex (the RNP complex) by including a targeting segment, which includes a guide sequence (also referred to herein as a targeting sequence), which is a nucleotide sequence that is complementary to a sequence of a target nucleic acid. The term “guide RNA”, as used herein, refers to an RNA that comprises: i) an “activator” nucleotide sequence that binds to a CRISPR/Cas effector polypeptide (e.g., a class 2 CRISPR/Cas effector polypeptide such as a type II, type V, or type VI CRISPR/Cas endonuclease) and activates the CRISPR/Cas effector polypeptide; and ii) a “targeter” nucleotide sequence that comprises a nucleotide sequence that hybridizes with a target nucleic acid. The “activator” nucleotide sequence and the “targeter” nucleotide sequence can be on separate RNA molecules (e.g., a “dual-guide RNA”); or can be on the same RNA molecule (a “single-guide RNA”). A guide nucleic acid in some cases includes only ribonucleotides. In some cases, a guide nucleic acid includes both ribonucleotides and deoxyribonucleotides.

[0505] In some cases, a CRISPR/Cas guide RNA comprises one or more modifications, e.g., a base modification, a backbone modification, a sugar modification, etc., to provide the nucleic acid with a new or enhanced feature (e.g., improved stability, such as improved in vivo stability). Suitable nucleic acid modifications include, but are not limited to: 2′O-methyl modified nucleotides, 2′ fluoro modified nucleotides, locked nucleic acid (LNA) modified nucleotides, peptide nucleic acid (PNA) modified nucleotides, nucleotides with phosphorothioate linkages, and a 5′ cap (e.g., a 7-methyIguanyIate cap (m7G)). Suitable modified nucleic acid backbones containing a phosphorus atom therein include, for example, phosphorothioates, chiral phosphorothioates, phosphorodithioates, phosphotriesters, aminoalkylphosphotriesters, methyl and other alkyl phosphonates including 3-aIkyIene phosphonates, 5′-alkylene phosphonates and chiral phosphonates, phosphinates, phosphoramidates including 3′-amino phosphoramidate and aminoalkylphosphoramidates, phosphorodiamidates, thionophosphoramidates, thionoalkylphosphonates, thionoalkylphosphotriesters, selenophosphates and boranophosphates having normal 3′-5′ linkages, 2′-5′ linked analogs of these, and those having inverted polarity wherein one or more internucleotide linkages is a 3′ to 3′, 5′ to 5′ or 2′ to 2′ linkage. Suitable oligonucleotides having inverted polarity comprise a single 3′ to 3′ linkage at the 3′-most internucleotide linkage i.e. a single inverted nucleoside residue which may be a basic (the nucleobase is missing or has a hydroxyl group in place thereof). Various salts (such as, for example, potassium or sodium), mixed salts and free acid forms are also included. A CRISPR-Cas guide RNA can also include one or more substituted sugar moieties. Suitable polynucleotides comprise a sugar substituent group selected from: OH; F; O-, S-, or N-alkyl; O-, S-, or N-alkenyl; O-, S- or N-alkynyl; or O-alkyl-O-alkyl, wherein the alkyl, alkenyl and alkynyl may be substituted or unsubstituted Ci to Cio alkyl or C2 to C10 alkenyl and alkynyl. Particularly suitable are O((CH₂)ₙO)ₘCH₃, O(CH₂)ₙOCH₃, O(CH₂)ₙNH₂, O(CH₂)ₙCH₃, O(CH₂)ₙONH₂, and O(CH₂)ₙON((CH₂)ₙCH₃)₂, where n and m are from 1 to about 10. Other suitable polynucleotides comprise a sugar substituent group selected from: Ci to Cio lower alkyl, substituted lower alkyl, alkenyl, alkynyl, alkaryl, aralkyl, O-alkaryl or O-aralkyl, SH, SCH₃, OCN, Cl, Br, CN, CF₃, OCF₃, SOCH₃, SO₂CH₃, ONO₂, NO₂, N₃, NH₂, heterocycloalkyl, heterocycloalkaryl, aminoalkylamino, polyalkylamino, substituted silyl, an RNA cleaving group, a reporter group, an intercalator, a group for improving the pharmacokinetic properties of an oligonucleotide, or a group for improving the pharmacodynamic properties of an oligonucleotide, and other substituents having similar properties. A suitable modification includes 2′-methoxy ethoxy (2′-O—CH₂CH₂OCH₃, also known as 2′-O-(2-methoxyethyl) or 2′-MOE) (Martin et al., Helv. Chim. Acta, 1995, 78, 486-504) i.e., an alkoxyalkoxy group. A further suitable modification includes 2′-dimethylaminooxyethoxy, i.e., a O(CH₂)₂ON(CH₃)₂ group, also known as 2′-DMAOE, as described in examples herein below, and 2′-dimethylaminoethoxyethoxy (also known in the art as 2′-O-dimethyl-amino-ethoxy-ethyl or 2′-DMAEOE), i.e., 2′-O—CH₂—O—CH₂—N(CH₃)₂.

[0506] Examples of various CRISPR/Cas effector proteins and CRISPR/Cas guide RNAs (as well as information regarding requirements related to protospacer adjacent motif (PAM) sequences present in targeted nucleic acids) can be found in the art, for example, see Jinek et al., Science. 2012 Aug. 17; 337(6096):816-21; Chylinski et al., RNA Biol. 2013 May; 10(5):726-37; Ma et al., Biomed Res Int. 2013; 2013:270805; Hou et al., Proc Natl Acad Sci USA. 2013 Sep. 24; 110(39):15644-9; Jinek et al., Elife. 2013; 2:e00471; Pattanayak et al., Nat Biotechnol. 2013 September; 31(9):839-43; Qi et al., Cell. 2013 Feb. 28; 152(5): 1173-83; Wang et al., Cell. 2013 May 9; 153(4):910-8; Auer et al., Genome Res. 2013 Oct. 31; Chen et al., Nucleic Acids Res. 2013 Nov. 1; 41(20):e19; Cheng et al., Cell Res. 2013 October; 23(10):1163-71; Cho et al., Genetics. 2013 November; 195(3):1177-80; DiCarlo et al., Nucleic Acids Res. 2013 April; 41(7):4336-43; Dickinson et al., Nat Methods. 2013 October; 10(10):1028-34; Ebina et al., Sci Rep. 2013; 3:2510; Fujii et al., Nucleic Acids Res. 2013 Nov. 1; 41(20):e187; Hu et al., Cell Res. 2013 November; 23(1):1322-5; Jiang et al., Nucleic Acids Res. 2013 Nov. 1; 41(20):e188; Larson et al., Nat Protoc. 2013 November; 8(1):2180-96; Mali et al., Nat Methods. 2013 October; 10(10):957-63; Nakayama et al., Genesis. 2013 December; 51(12):835-43; Ran et al., Nat Protoc. 2013 November; 8(1):2281-308; Ran et al., Cell. 2013 Sep. 12; 154(6):1380-9; Upadhyay et al., G3 (Bethesda). 2013 Dec. 9; 3(12):2233-8; Walsh et al., Proc Natl Acad Sci USA. 2013 Sep. 24; 110(39):15514-5; Xie et al., Mol Plant. 2013 Oct. 9; Yang et al., Cell. 2013 Sep. 12; 154(6):1370-9; Briner et al., Mol Cell. 2014 Oct. 23; 56(2):333-9; and U.S. patents and patent applications: U.S. Pat. Nos. 8,906,616; 8,895,308; 8,889,418; 8,889,356; 8,871,445; 8,865,406; 8,795,965; 8,771,945; 8,697,359; 20140068797; 20140170753; 20140179006; 20140179770; 20140186843; 20140186919; 20140186958; 20140189896; 20140227787; 20140234972; 20140242664; 20140242699; 20140242700; 20140242702; 20140248702; 20140256046; 20140273037; 20140273226; 20140273230; 20140273231; 20140273232; 20140273233; 20140273234; 20140273235; 20140287938; 20140295556; 20140295557; 20140298547; 20140304853; 20140309487; 20140310828; 20140310830; 20140315985; 20140335063; 20140335620; 20140342456; 20140342457; 20140342458; 20140349400; 20140349405; 20140356867; 20140356956; 20140356958; 20140356959; 20140357523; 20140357530; 20140364333; and 20140377868; all of which are hereby incorporated by reference in their entirety.

[0507] Examples and guidance related to type V or type VI CRISPR/Cas endonucleases and guide RNAs (as well as information regarding requirements related to protospacer adjacent motif (PAM) sequences present in targeted nucleic acids) can be found in the art, for example, see Zetsche et al., Cell. 2015 Oct. 22; 163(3):759-71; Makarova et al., Nat Rev Microbiol. 2015 November; 13(11):722-36; and Shmakov et al., Mol Cell. 2015 Nov. 5; 60(3):385-97.

[0508] C. Reverse Transcriptases (RTs)

[0509] Reverse transcriptases (RTs, also known as RNA-directed DNA polymerases) are enzymes present in all three domains of life, which are DNA polymerase using RNA as a template. Reverse transcriptases of the present disclosure are used to reverse transcribe template msd RNA into single-stranded msDNA.

[0510] The reverse transcriptase or a functional domain thereof that may be used in the instant invention includes prokaryotic and eukaryotic RT, provided that the RT functions within the host to generate a donor polynucleotide sequence from the RNA template (e.g., an RNA template from the retron transcript ncRNA).

[0511] In certain embodiments, suitable RT sequences (including amino acid sequences and the encoding polynucleotide sequences) are provided in Table A.

[0512] In certain embodiments, the nucleotide sequence of a native or wild-type RT is modified, for example, using known codon optimization techniques, so that expression within the desired host is optimized.

[0513] In certain embodiments, the RT domain of a reverse transcriptase is used in the present invention, so long as it is compatible with the engineered retron of the invention. The domain may include only the RNA-dependent DNA polymerase activity. In certain embodiments, the RT domain is non-mutagenic, i.e., does not cause mutation in the donor polynucleotide (e.g., during the reverse transcriptase process). In certain embodiments, the RT domain may be non-retron RT in origin, e.g., a viral RT or a human endogenous RTs. In certain embodiments, the RT domain is retron RT or DGRs RT. In certain embodiments, the RT may be less mutagenic than a counterpart wildtype RT. In certain embodiments, the RT is not mutagenic.

[0514] In some embodiments, a reverse transcriptase is encoded by a retron ret gene, which may accompany the cognate msr and msd loci and specifically recognize the secondary structure of the cognate ncRNA transcript.

[0515] In some embodiments, the RT may be obtained from prokaryotic or eukaryotic cells. Most reverse transcriptases (80%) can be phylogenetically clustered into three major lineages: group II introns, diversity-generating retroelements (DGRs), and retrons. Other clades of RTs include abortive infection (Abi) RTs, CRISPR-Cas-associated RTs, Group II-like (G2L), the unknown groups (UG), and rvt elements.

[0516] In some embodiments, the RT gene is a cognate RT, a retron RT from a species within the same species or clade of the cognate RT, or a retron RT not within the same clade of the cognate RT such as an unrelated RT or an engineered RT. In some embodiments, the non-retron related RT are RTs from group II introns, diversity-generating retroelements (DGRs), abortive infection (Abi) RTs, CRISPR-Cas-associated RTs, Group II-like (G2L), the unknown groups (UG), and rvt elements. See Mestre et al., Nucleic Acids Research, Volume 48, Issue 22, 16 Dec. 2020, Pages 12632-12647; and Mestere et al., UG/Abi: “A Highly Diverse Family of Prokaryotic Reverse Transcriptases Associated With Defense Functions,” doi.org/10.1101/2021.12.02.470933 (incorporated herein by reference).

[0517] In some embodiments, the RT are from clades related to retron/retron-like sequences. In some embodiments, the RT are selected from RTs provided in Table A. In some embodiments, the RT is not an RT associated with the sequences identified in Table X.

[0518] In prokaryotic retron systems, the RT gene is typically located downstream from the ncRNA (msr and msd) locus. In the engineered retron, the RT position can differ from the natural or wild type retrons. In some embodiments, the RT gene can be provided in cis, such as either upstream or downstream of the msr locus or the msd locus. In certain embodiments, the RT gene is provided in trans, such as provided separately in a vector of the vector system described herein, wherein the ncRNA coding msr and msd sequences are provided in a different vector of the vector system described herein.

[0519] In some embodiments, the RT is modified (e.g., insertion, deletion, and/or substitution of one or more nucleotide(s)) or codon optimized to enhance activity or processivity.

[0520] In certain embodiments, a cryptic stop signal is removed from the RT thereby allowing generation of longer ssDNAs.

[0521] In certain embodiments, the RT is from a retron which encodes msDNA as described in U.S. Pat. Nos. 6,017,737; 5,849,563; 5,780,269; 5,436,141; 5,405,775; 5,320,958; CA2,075,515; all of which are incorporated by reference herein in their entireties.

[0522] In some embodiments, the engineered retron further comprises a polynucleotide (e.g., a DNA molecule) encoding a reverse transcriptase (RT) or a portion thereof. In some embodiments, the encoded RT or portion thereof is capable of synthesizing a DNA copy of at least a portion of the msd locus encoding the msDNA.

[0523] In some embodiments, the polynucleotide (e.g., a DNA molecule) encoding the RT comprises a polynucleotide listed in Table A, or a polynucleotide having at least 50%, at least 55%, at least 60%, at least 65%, at least 70%, at least 75%, at least 80%, at least 85%, at least 90%, at least 91%, at least 92%, at least 93%, at least 94%, at least 95%, at least 96%, at least 97%, at least 98%, at least 99%, at least 99.1%, at least 99.2%, at least 99.3%, at least 99.4%, at least 99.5%, at least 99.6%, at least 99.7%, at least 99.8% or at least 99.9% sequence identity to a polynucleotide listed in Table A.

[0524] In some embodiments, the polynucleotide encoding the RT encodes a polypeptide listed in Table A, or a polypeptide having at least 50%, at least 55%, at least 60%, at least 65%, at least 70%, at least 75%, at least 80%, at least 85%, at least 90%, at least 91%, at least 92%, at least 93%, at least 94%, at least 95%, at least 96%, at least 97%, at least 98%, at least 99%, at least 99.1%, at least 99.2%, at least 99.3%, at least 99.4%, at least 99.5%, at least 99.6%, at least 99.7%, at least 99.8% or at least 99.9% sequence identity to a polypeptide listed in Table A; and/or a polypeptide of Table C.

[0525] In some embodiments, the polynucleotide encoding the RT does not comprise a polynucleotide listed in Table X.

[0526] Once translated, the RT binds the ncRNA template downstream from the msd locus, forming an RT-RNA complex, and initiating reverse transcription of the RNA towards its 5′ end. Accordingly, in certain aspects the disclosure relates to an engineered nucleic acid-enzyme construct comprising: a. a non-coding RNA (ncRNA) comprising: i) an msr locus encoding the msr RNA portion of a multi-copy single-stranded DNA (msDNA); and ii) an msd locus encoding the msd RNA portion of the msDNA; b. a heterologous nucleic acid inserted at or within a location selected from: the msd locus, upstream of the msr locus, upstream of the msd locus, and downstream of the msd locus; and c. a reverse transcriptase (RT), or a domain thereof comprising: i) a polypeptide listed in Table A, or a polypeptide having at least 50%, at least 55%, at least 60%, at least 65%, at least 70%, at least 75%, at least 80%, at least 85%, at least 90%, at least 91%, at least 92%, at least 93%, at least 94%, at least 95%, at least 96%, at least 97%, at least 98%, at least 99%, at least 99.1%, at least 99.2%, at least 99.3%, at least 99.4%, at least 99.5%, at least 99.6%, at least 99.7%, at least 99.8% or at least 99.9% sequence identity to a polypeptide listed in Table A; and/or ii) a polypeptide listed in Table C. In some embodiments, the RT does not comprise a polypeptide listed in Table X.

[0527] In certain aspects, the disclosure relates to an engineered nucleic acid-enzyme construct comprising: a) a non-coding RNA (ncRNA) comprising: i) an msr locus encoding the msr RNA portion of a multi-copy single-stranded DNA (msDNA); and ii) an msd locus encoding the msd RNA portion of the msDNA, b) a heterologous nucleic acid inserted at or within a location selected from: the msd locus; upstream of the msr locus; upstream of the msd locus; and downstream of the msd locus; and c) a reverse transcriptase (RT), or a portion thereof, wherein the RT is capable of synthesizing a DNA copy of at least a portion of the msd locus encoding the msDNA, and wherein the ncRNA and/or the RT is any one of the invention described herein.

[0528] In certain aspects, the disclosure relates to an engineered nucleic acid-enzyme construct comprising: a) a non-coding RNA (ncRNA) comprising: i) an msr locus encoding the msr RNA portion of a multi-copy single-stranded DNA (msDNA); and ii) an msd locus encoding the msd RNA portion of the msDNA; b) a heterologous nucleic acid inserted at or within a location selected from: the msd locus, upstream of the msr locus, upstream of the msd locus, and downstream of the msd locus; and c) a reverse transcriptase (RT) or a domain thereof: wherein the RT comprises: i) an RT listed in Table A, or an RT having at least 50%, at least 55%, at least 60%, at least 65%, at least 70%, at least 75%, at least 80%, at least 85%, at least 90%, at least 91%, at least 92%, at least 93%, at least 94%, at least 95%, at least 96%, at least 97%, at least 98%, at least 99%, at least 99.1%, at least 99.2%, at least 99.3%, at least 99.4%, at least 99.5%, at least 99.6%, at least 99.7%, at least 99.8% or at least 99.9% sequence identity to an RT listed in Table A; and/or ii) a consensus sequence listed in Table C; and wherein, the RT does not comprise a sequence from Table X.

[0529] In some embodiments of the nucleic-acid enzyme constructs described herein, the ncRNA comprises: i) an ncRNA listed in Table B, or an ncRNA having at least 50%, at least 55%, at least 60%, at least 65%, at least 70%, at least 75%, at least 80%, at least 85%, at least 90%, at least 91%, at least 92%, at least 93%, at least 94%, at least 95%, at least 96%, at least 97%, at least 98%, at least 99%, at least 99.1%, at least 99.2%, at least 99.3%, at least 99.4%, at least 99.5%, at least 99.6%, at least 99.7%, at least 99.8% or at least 99.9% sequence identity to an ncRNA listed in Table B; and/or optionally wherein the ncRNA is not an ncRNA from the retons of Table X.

[0530] In some embodiments, the RT is linked to components such as RNA-guided and non-RNA guided nucleases. The linked maybe via s peptide bond or a short linker peptide in a fusion protein. Suitable linker peptides include flexible linkers such as those comprising G or S repeats, such as G₄S repeat units or GS repeat units, with 1-20 repeats, e.g., 1, 2, 3, 4, 5, 6, 7, or 8 repeats.

[0531] In certain embodiments, the RT is chemically linked or conjugated to the RNA-guided and non-RNA guided nucleases via non-peptide bonds. Such protein conjugates may be delivered directly to a host cell, either together with the nucleic acid component of the engineered retron described herein, or separately.

[0532] In some embodiments, the RT is linked to a DNA-repair modulating biomolecule (e.g., NHEJ peptide inhibitors.

[0533] D. Programmable Nucleases (RNA-Guided Nucleases)

[0534] In certain embodiments, the engineered retron (e.g., an engineered nucleic acid construct or engineered nucleic acid-enzyme construct as described herein) may comprise or encode, as one heterologous nucleic acid, a guide RNA (gRNA) suitable for guiding a nuclease to target a particular genomic sequence to be modified. The gRNA includes sequences complementary to a genomic sequence, and therefore can mediate binding of the nuclease-gRNA complex to the genomic target site by hybridization between the guide sequence and the target site sequence.

[0535] In certain embodiments, the gRNA can be linked to the ncRNA and/or the msDNA encoded by the engineered retron described herein at the 5′ end of the ncRNA and/or the msDNA. In certain embodiments, the gRNA can be linked to the ncRNA and/or the msDNA encoded by the engineered retron described herein at the 3′ end of the RNA of the ncRNA and/or the msDNA after reverse transcription.

[0536] In some embodiments, the nuclease that can form a complex with the gRNA can be any one of the art-recognized clustered regularly interspersed short palindromic repeats (CRISPR) system Cas effector enzymes, which are useful for, e.g., genome editing, including genome editing in mammalian cells or human cells.

[0537] For example, a gRNA that can be loaded into a Cas9 or variant thereof may be encoded by the engineered retron, such that the gRNA is transcribed as part of the msDNA. In some embodiments, the gRNA may be linked to the 5′ end of the a1 region of the msr-encoded sequence in the retron ncRNA, as well as the msDNA after reverse transcription. In some embodiments, the gRNA may be part of the modified msr-region present in the ncRNA and the msDNA produced after reverse transcription (viz., the encoded gRNA is not degraded by the synthesis of the msDNA through reverse transcription of the ncRNA).

[0538] Any art recognized CRISPR/Cas effector enzymes or variants thereof (“Cas enzymes”) known to be useful for CRISPR-based genome editing can be used with the engineered retron, though such Cas enzymes may not necessarily be part of the engineered retron, and can (but is not required to) be provided separately. For example, the Cas enzymes can be provided as part of the vector system described herein. The coding sequence of the suitable Cas enzyme can be present on the same vector that provides the engineered retron, or on different vectors. When the engineered retron and the Cas enzymes are present on the same vector, they may be under the transcriptional control of the same promoter, enhancer, or other transcriptional regulatory elements, or may be separately regulated by different promoters, enhancers, and/or other transcriptional regulatory sequences in the vector system.

[0539] In some embodiments, the Cas enzyme is a Class 2, Type II CRISPR/Cas effector enzyme, such as Cas9. In some embodiments, the Cas9 is from Streptococcus pyogenes (SpCas9), and the gRNA encoded by the engineered retron comprises both the crisprRNA (crRNA) and the tracrRNA linked together as the single guide RNA (gRNA).

[0540] In some embodiments, the Cas9 is from Staphylococcus aureus Cas9 (SaCas9), or an engineered variant thereof such as SaCas9-HF (a high-fidelity variant with genome-wide activity), KKHSaCas9 (which recognizes a 5′-NNGRRT-3′ PAM, and has a 2-4× broader range of target sites in the human genome than the wildtype SaCas9), and microABE1744 (an engineered SaCas9 variant adapted for use in adenine base editing (ABE), with significantly improved on-target editing compared to other nucleases, with a reduced RNA off-target footprint).

[0541] In some embodiments, the Cas9 is from Streptococcus thermophilus (StCas9), Neisseria meningitidis (NmCas9), Francisella novicida (FnCas9), or Campylobacter jejuni (CjCas9).

[0542] In some embodiments, the Cas9 is from Streptococcus canis (ScCas9), with a less stringent PAM sequence requirement of 5′-NNG-3′ (instead of the more stringent 5′-NGG-3′ for SpCas9).

[0543] In some embodiments, the Cas9 is from Staphylococcus auricularis (SauriCas9) (which recognizes a 5′-NNGG-3′ PAM sequence, has high editing activity).

[0544] In some embodiments, the Cas enzyme is a Cas9 variant with mutated catalytic domain that retains cleavage specificity, but only nicks a single DNA strand at a desired target sequence instead of creating a double-strand break (DSB). Two such Cas9 nickase variants targeting different strands of the same target sequence may be used together to increase fidelity of creating the DSB, each using a different gRNA that can be provided by the engineered retron.

[0545] In some embodiments, the Cas enzyme is a high fidelity Cas9 variant with weakened DNA phosphate backbone interaction (such as SpCas9-HF1) that displays genome-wide specificity and undetectable off-target effects.

[0546] In some embodiments, the Cas enzyme is a Cas9 variant known as eSpCas9, which has weakened interactions between the eSpCas9 and its gRNAs with non-exact complementarity with the target DNA sequence, thus providing improved specificity and lower off-target editing rates.

[0547] In some embodiments, the Cas enzyme is a hyper-accurate Cas9 variant (HypaCas9), which improves proofreading before cleavage, and thus drastically reduces off-target cleavage.

[0548] In some embodiments, the Cas enzyme is a Cas9 variant (FokI-Fused dCas9), which combines the DNA recognition ability by dCas9 with the specificity of an active nuclease FokI. The resulting nuclease cuts the target sequence only after dimerization, which is more difficult to occur at off-target sites, thus resulting in enhanced specificity.

[0549] In some embodiments, the Cas enzyme is a Cas9 variant xCas9, which recognizes a broad range of PAM sequences, thus increasing the target sites to 1 in 4 in the genome. In addition, the xCas9 variant also exhibits lower off-target rates than the commonly used SpCas9.

[0550] In some embodiments, the Cas enzyme is a Cas9 variant with altered PAM sequence specificities, including the SpG variant with an expanded target range of PAM sequences, and the SpRY variant that can target almost all PAM sequences.

[0551] In some embodiments, the Cas enzyme is dCas9 having inactivated catalytic nuclease domains while maintaining the recognition domains that allow guide RNA-mediated targeting to specific DNA sequences. The dCas9 may be further linked to a functional domain with a distinct biological function, such as transcriptional activation/depression, DNA methylation, demethylation, endonuclease (such as FokI), or fluorescent dye. Representative (non-limiting) dCas9-linked functional domains include including dCas9-SAM, dCas9-SunTag, dCas9-VPR, and dCas9-KREB.

[0552] In some embodiments, the dCas9 is fused with a catalytic enzyme with cytidine deaminase activity, which converts GC basepair to AT basepair.

[0553] In some embodiments, the dCas9 is fused with an engineered RNA adenosine deaminase, which converts AT basepair to GC basepair.

[0554] In some embodiments, the Cas enzyme is a Class 2, Type V CRISPR/Cas effector enzyme, such as Cas12a (Cpf1) (Type V-A), Cas12b (C2c1) (Type V-B), Cas12c (C2c3) (Type V-C), Cas12d (CasY) (Type V-D), Cas12e (CasX) (Type V-E), Cas12f (Cas14, C2c10) (Type V-F), Cas12g (Type V-G), Cas12h (Type V-H), Cas12i (Type V-I), Cas12k (C2c5) (Type V-K), or C2c4/C2c8/C2c9 (Type V-U).

[0555] In some embodiments, the Cas enzyme is Cas12a or Cpf1 (CRISPR from Prevotella and Francisella 1). Unlike Cas9, Cas12a is well-suited for targeting AT-rich DNA sequences because of its AT-rich PAM sequences. In some embodiments, the Cas12a is FnCas12a (that recognizes PAM sequence 5′-TTN-3′), or AsCas12a or LbCas12a (that recognize 5′-TTTV-3′ PAM sequence), where V is A, G, or C nucleotide. Further, Cas12a creates staggered double-stranded breaks in the target DNA, rather than the blunt-ends generated by SpCas9, thus rendering it more useful for HDR repair. In this embodiment, the subject engineered retron encodes a gRNA suitable for use for Cas12a, in that the gRNA does not require a tracer RNA, and only requires the crRNA.

[0556] In some embodiments, the Cas enzyme is a Cas12a variant from Acidaminococcus sp. (enAsCas12a), which has an expanded target range of PAM sequences and significantly higher editing activity compared to wild type Cas12a.

[0557] In some embodiments, the Cas enzyme is a high-fidelity Cas12a variant (enAsCas12a-HF1) that reduces off-target editing.

[0558] In some embodiments, the Cas enzyme is Cas12b or C2c1. In some embodiments, the Cas12b is form Alicyclobacillus acidoterrestris (AacCas12b), or from Alicyclobacillus acidiphilus Cas12b (AapCas12b).

[0559] In some embodiments, the Cas enzyme is a Cas12b variant that functions at 37° C., such as one form Bacillus hisashii (BhCas12b).

[0560] In some embodiments, the Cas enzyme is a BhCas12b variant with higher specificity than SpCas9.

[0561] In some embodiments, the Cas enzyme is CasX or Cas12d.

[0562] In some embodiments, the Cas enzyme is CasY or Cas12e, and the subject engineered retron encodes a short-complementarity untranslated RNA (scoutRNA) together with crRNA (rather than tracrRNA used in other CRISPR-Cas systems).

[0563] In some embodiments, the Cas enzyme is Cas14, from archaea bacteria. Cas14 targets single-stranded (ss) DNA target sequences, does not require PAM sequence for activation, and has collateral activity (i.e., cuts other non-target ssDNA strands non-specifically upon binding the target sequence). Unlike Cas12a, Cas14a requires high fidelity complementarity to the target ssDNA, and is very sensitive to internal seed region mismatches of the ssDNA target substrate.

[0564] In some embodiments, the gRNA nuclease is an engineered RNA-guided Fok1 nuclease. RNA-guided Fok1 nucleases comprise fusions of inactive Cas9 (dCas9) and the Fok1 endonuclease (FokI-dCas9), wherein the dCas9 portion confers guide RNA-dependent targeting on Fok1. For a description of engineered RNA-guided Fold nucleases, see, e.g., Havlicek et al. (2017) Mol. Ther. 25(2):342-355, Pan et al. (2016) Sci Rep. 6:35794, Tsai et al. (2014) Nat Biotechnol. 32(6):569-576; herein incorporated by reference.

[0565] In other embodiments, the RNA-guided nuclease can be a non-CRISPER/Cas related nuclease such as transposon-encoded nucleases, IscBs, IscR, or TnpBs.

[0566] In some embodiments, the Cas enzyme is a Cas9

[0567] In some embodiments, the retron-based editing systems described herein can include any Cas9 equivalent. A Cas9 equivalent is a Cas9-like protein that provides the same or substantially the same function as Cas9. For instance, if Cas9 refers to a type II enzyme of the CRISPR-Cas system, a Cas9 equivalent can refer to a type V or type VI enzyme of the CRISPR-Cas system.

[0568] For example, Cas12e (CasX) is a Cas9 equivalent that reportedly has the same function as Cas9 but which evolved through convergent evolution. Thus, the Cas12e (CasX) protein is contemplated to be used with the retron-based editor systems described herein. In addition, any variant or modification of Cas12e (CasX) is conceivable and within the scope of the present disclosure.

[0569] In some embodiments, Cas9 equivalents may refer to Cas12e (CasX) or Cas12d (CasY), which have been described in, for example, Burstein et al., “New CRISPR-Cas systems from uncultivated microbes.” Cell Res. 2017 Feb. 21. doi: 10.1038/cr.2017.21, the entire contents of which is hereby incorporated by reference. Using genome-resolved metagenomics, a number of CRISPR-Cas systems were identified, including the first reported Cas9 in the archaeal domain of life. This divergent Cas9 protein was found in little-studied nanoarchaea as part of an active CRISPR-Cas system. In bacteria, two previously unknown systems were discovered, CRISPR-Cas12e and CRISPR-Cas12d, which are among the most compact systems yet discovered. In some embodiments, Cas9 refers to Cas12e, or a variant of Cas12e. In some embodiments, Cas9 refers to a Cas12d, or a variant of Cas12d. It should be appreciated that other RNA-guided DNA binding proteins may be used as a nucleic acid programmable DNA binding protein (napDNAbp), and are within the scope of this disclosure.

[0570] In some embodiments, the Cas9 equivalent comprises an amino acid sequence that is at least 85%, at least 90%, at least 91%, at least 92%, at least 93%, at least 94%, at least 95%, at least 96%, at least 97%, at least 98%, at least 99%, or at least 99.5% identical to a naturally-occurring Cas12e (CasX) or Cas12d (CasY) protein. In some embodiments, the napDNAbp is a naturally-occurring Cas12e (CasX) or Cas12d (CasY) protein. In some embodiments, the napDNAbp comprises an amino acid sequence that is at least 85%, at least 90%, at least 91%, at least 92%, at least 93%, at least 94%, at least 95%, at least 96%, at least 97%, at least 98%, at least 99%, or at least 99.5% identical to a wild-type Cas moiety or any Cas moiety provided herein.

[0571] In various embodiments, the nucleic acid programmable DNA binding proteins include, without limitation, Cas9 (e.g., dCas9 and nCas9), Cas12e (CasX), Cas12d (CasY), Cas12a (Cpf1), Cas12b1 (C2c1), Cas13a (C2c2), Cas12c (C2c3), Argonaute, and Cas12b1. One example of a nucleic acid programmable DNA-binding protein that has different PAM specificity than Cas9 is Clustered Regularly Interspaced Short Palindromic Repeats from Prevotella and Francisella 1 (i.e, Cas12a (Cpf1)). Similar to Cas9, Cas12a (Cpf1) is also a Class 2 CRISPR effector, but it is a member of type V subgroup of enzymes, rather than the type II subgroup. It has been shown that Cas12a (Cpf1) mediates robust DNA interference with features distinct from Cas9. Cas12a (Cpf1) is a single RNA-guided endonuclease lacking tracrRNA, and it utilizes a T-rich protospacer-adjacent motif (TTN, TTTN, or YTN). Moreover, Cpf1 cleaves DNA via a staggered DNA double-stranded break. Out of 16 Cpf1-family proteins, two enzymes from Acidaminococcus and Lachnospiraceae are shown to have efficient genome-editing activity in human cells. Cpf1 proteins are known in the art and have been described previously, for example Yamano et al., “Crystal structure of Cpf1 in complex with guide RNA and target DNA.” Cell (165) 2016, p. 949-962; the entire contents of which is hereby incorporated by reference.

[0572] In still other embodiments, the Cas protein may include any CRISPR associated protein, including but not limited to, Cas12a, Cas12b1, Cas1, Cas1B, Cas2, Cas3, Cas4, Cas5, Cas6, Cas7, Cas8, Cas9 (also known as Csn1 and Csx12), Cas10, Csy1, Csy2, Csy3, Cse1, Cse2, Csc1, Csc2, Csa5, Csn2, Csm2, Csm3, Csm4, Csm5, Csm6, Cmr1, Cmr3, Cmr4, Cmr5, Cmr6, Csb1, Csb2, Csb3, Csx17, Csx14, Csx10, Csx16, CsaX, Csx3, Csx1, Csx15, Csf1, Csf2, Csf3, Csf4, homologs thereof, or modified versions thereof.

[0573] In various other embodiments, the RNA-guided nuclease can be any of the following proteins: a Cas9, a Cas12a (Cpf1), a Cas12e (CasX), a Cas12d (CasY), a Cas12b1 (C2c1), a Cas13a (C2c2), a Cas12c (C2c3), a GeoCas9, a CjCas9, a Cas12g, a Cas12h, a Cas12i, a Cas13b, a Cas13c, a Cas13d, a Cas14, a Csn2, an xCas9, an SpCas9-NG, or an Argonaute (Ago) domain, or a variant thereof.

[0574] Amino acid sequences of RNA-guided nucleases are readily available and known in the art. Exemplary RNA-guided nucleases and their amino acid sequences can be found, for example, in WO 2017/070633, US 2020/0010835, US 2022/0204975, U.S. Ser. No. 11/071,790, WO 2020/191233, U.S. Ser. No. 11/447,770, U.S. Ser. No. 10/858,639, and U.S. Ser. No. 10/947,530, each of which are incorporated herein by reference in their entireties.

[0575] E. Programmable Nucleases (Other)

[0576] In addition to the CRISPR/Cas system, the subject engineered retron can also be used in combination with sequence-specific nucleases that do not use a guide RNA to recognize a target sequence, such as non-CRISPR/Cas sequence-specific nucleases including TALENs, ZFNs, meganucleases, and restriction enzymes, as well as other sequence-specific nucleases that use other RNA guides, such as transposon-encoded IscBs, IscR, or TnpBs.

[0577] For example, the subject engineered retron may encode or provide a msDNA that can serve as a donor or template sequence for HDR-mediated genome editing. Optionally, the RT of the engineered retron is fused to such sequence-specific nuclease, such that the msDNA, by way of being generated by the RT close to the site of HDR-mediated genome editing, can be more efficiently participate in the HDR-mediated genome editing.

[0578] In some embodiments, the non-CRISPR/Cas sequence-specific nuclease is or comprises a TALE Nuclease, a TALE nickase, Zinc Finger (ZF) Nuclease, ZF Nickase, meganuclease, or a combination thereof. In some embodiments, the non-CRISPR/Cas sequence-specific nuclease is or includes two, three, four, or more of an independently selected TALE Nuclease, TALE nickase, Zinc Finger (ZF) Nuclease, ZF Nickase, Meganuclease, restriction enzymes or a combination thereof. In some embodiments, the combination is or comprises a TALE Nuclease/a ZF Nuclease; a TALE Nickase/a ZF nickase.

[0579] In some embodiments, the non-CRISPR/Cas sequence-specific nuclease is or comprises a TALE Nuclease (Transcription Activator-Like Effector Nucleases (TALEN)). TALENs are restriction enzymes engineered to cut specific target DNA sequences. TALENs comprise a TAL effector (TALE) DNA-binding domain (which binds at or close to the target DNA), fused to a DNA cleavage domain which cuts target DNA. TALEs are engineered to bind to practically any desired DNA sequence. Thus in some embodiments, the TALEN comprises an N-terminal capping region, a DNA binding domain which may comprise at least one or more TALE monomers or half-monomers specifically ordered to target the genomic locus of interest, and a C-terminal capping region, wherein these three parts are arranged in a predetermined N-terminus to C-terminus orientation. Optionally, the TALEN includes at least one or more regulatory or functional protein domains.

[0580] In some embodiments, the TALE monomers or half monomers may be variant TALE monomers derived from natural or wild type TALE monomers but with altered amino acids at positions usually highly conserved in nature, and in particular have a combination of amino acids as RVDs that do not occur in nature, and which may recognize a nucleotide with a higher activity, specificity, and/or affinity than a naturally occurring RVD. The variants may include deletions, insertions and substitutions at the amino acid level, and transversions, transitions and inversions at the nucleic acid level at one or more locations. The variants may also include truncations.

[0581] In some embodiments, the TALE monomer/half monomer variants include homologous and functional derivatives of the parent molecules. In some embodiments, the variants are encoded by polynucleotides capable of hybridizing under high stringency conditions to the parent molecule-encoding wild-type nucleotide sequences.

[0582] In some embodiments, the DNA binding domain of the TALE has at least 5 of more TALE monomers and at least one or more half-monomers specifically ordered or arranged to target a genomic locus of interest. The construction and generation of TALEs or polypeptides of the invention may involve any of the methods known in the art.

[0583] Naturally occurring TALEs or “wild type TALEs” are nucleic acid binding proteins secreted by numerous species of proteobacteria. TALEs contain a nucleic acid binding domain composed of tandem repeats of highly conserved monomer polypeptides that are predominantly 33, 34 or 35 amino acids in length and that differ from each other mainly in amino acid positions 12 and 13. A general representation of a TALE monomer which is comprised within the DNA binding domain is X1-11-(X12X13)-X14-33 or 34 or 35, where the subscript indicates the amino acid position and X represents any amino acid. X12X13 indicate the RVDs. In some polypeptide monomers, the variable amino acid at position 13 is missing or absent and in such monomers, the RVD consists of a single amino acid. In such cases the RVD may be alternatively represented as X*, where X represents X12 and (*) indicates that X13 is absent. The DNA binding domain may comprise several repeats of TALE monomers and this may be represented as (X1-11-(X12X13)-X14-33 or 34 or 35)z, where z is optionally at least 5-40, such as 10-26.

[0584] The TALE monomers have a nucleotide binding affinity that is determined by the identity of the amino acids in its RVD. Polypeptide monomers with an RVD of NI preferentially bind to adenine (A), monomers with an RVD of NG preferentially bind to thymine (T), monomers with an RVD of HD preferentially bind to cytosine (C), monomers with an RVD of NN preferentially bind to both adenine (A) and guanine (G), monomers with an RVD of IG preferentially bind to T, monomers with an RVD of NS recognize all four base pairs and may bind to A, T, G or C. Thus, the number and order of the polypeptide monomer repeats in the nucleic acid binding domain of a TALE determines its nucleic acid target specificity. The structure and function of TALEs is further described in, for example, Moscou et al., Science 326:1501 (2009); Boch et al., Science 326:1509-1512 (2009); and Zhang et al., Nature Biotechnology 29:149-153 (2011), each of which is incorporated by reference in its entirety.

[0585] In some embodiments, the TALE is a dTALE (or designerTALE), see Zhang et al., Nature Biotechnology 29:149-153 (2011), incorporated herein by reference.

[0586] In some embodiments, the TALE monomer comprises an RVD of HN or NH that preferentially binds to guanine, and the TALEs have high binding specificity for guanine containing target nucleic acid sequences. In come embodiments, polypeptide monomers having RVDs RN, NN, NK, SN, NH, KN, HN, NQ, HH, RG, KH, RH and SS preferentially bind to guanine. In some embodiments, polypeptide monomers having RVDs RN, NK, NQ, HH, KH, RH, SS and SN preferentially bind to guanine. In some embodiments, polypeptide monomers having RVDs HH, KH, NH, NK, NQ, RH, RN and SS preferentially bind to guanine. In some embodiments, the RVDs that have high binding specificity for guanine are RN, NH RH and KH. In some embodiments, polypeptide monomers having an RVD of NV preferentially bind to adenine and guanine as do monomers having the RVD HN. Monomers having an RVD of NC preferentially bind to adenine, guanine and cytosine, and monomers having an RVD of S (or S*), bind to adenine, guanine, cytosine and thymine with comparable affinity. In more embodiments, monomers having RVDs of H*, HA, KA, N*, NA, NC, NS, RA, and S* bind to adenine, guanine, cytosine and thymine with comparable affinity. Such polypeptide monomers allow for the generation of degenerative TALEs able to bind to a repertoire of related, but not identical, target nucleic acid sequences.

[0587] In certain embodiments, the TALE polypeptide has a nucleic acid binding domain containing polypeptide monomers arranged in a predetermined N-terminus to C-terminus order such that each polypeptide monomer binds to a nucleotide of a predetermined target nucleic acid sequence, and where at least one of the polypeptide monomers has an RVD of HN or NH and preferentially binds to guanine, an RVD of NV and preferentially binds to adenine and guanine, an RVD of NC and preferentially binds to adenine, guanine and cytosine or an RVD of S and binds to adenine, guanine, cytosine and thymine.

[0588] In some embodiments, each polypeptide monomer of the nucleic acid binding domain that binds to adenine has an RVD of NI, NN, NV, NC or S.

[0589] In certain embodiments, each polypeptide monomer of the nucleic acid binding domain that binds to guanine has an RVD of HN, NH, NN, NV, NC or S.

[0590] In certain embodiments, each polypeptide monomer of the nucleic acid binding domain that binds to cytosine has an RVD of HD, NC or S.

[0591] In some embodiments, each polypeptide monomer that binds to thymine has an RVD of NG or S.

[0592] In some embodiments, each polypeptide monomer of the nucleic acid binding domain that binds to adenine has an RVD of NI.

[0593] In certain embodiments, each polypeptide monomer of the nucleic acid binding domain that binds to guanine has an RVD of HN or NH.

[0594] In certain embodiments, each polypeptide monomer of the nucleic acid binding domain that binds to cytosine has an RVD of HD.

[0595] In some embodiments, each polypeptide monomer that binds to thymine has an RVD of NG.

[0596] In certain embodiments, the RVDs that have a specificity for adenine are NI, RI, KI, HI, and SI.

[0597] In certain embodiments, the RVDs that have a specificity for adenine are HN, SI and RI, most preferably the RVD for adenine specificity is SI.

[0598] In certain embodiments, the RVDs that have a specificity for thymine are NG, HG, RG and KG.

[0599] In certain embodiments, the RVDs that have a specificity for thymine are KG, HG and RG, most preferably the RVD for thymine specificity is KG or RG.

[0600] In certain embodiments, the RVDs that have a specificity for cytosine are HD, ND, KD, RD, HH, YG and SD.

[0601] In certain embodiments, the RVDs that have a specificity for cytosine are SD and RD.

[0602] FIG. 4B of WO 2012/067428 provides representative RVDs and the nucleotides they target, the entire content of which is hereby incorporated herein by reference.

[0603] In certain embodiments, the variant TALE monomers may comprise any of the RVDs that exhibit specificity for a nucleotide as depicted in FIG. 4A of WO2012/067428. All such TALE monomers allow for the generation of degenerative TALEs able to bind to a repertoire of related, but not identical, target nucleic acid sequences.

[0604] In certain embodiments, the RVD SH may have a specificity for G, the RVD IS may have a specificity for A, and the RVD IG may have a specificity for T.

[0605] In certain embodiments, the RVD NT may bind to G and A. In certain embodiments, the RVD NP may bind to A, T and C. In certain embodiments, at least one selected RVD may be NI, HD, NG, NN, KN, RN, NH, NQ, SS, SN, NK, KH, RH, HH, KI, HI, RI, SI, KG, HG, RG, SD, ND, KD, RD, YG, HN, NV, NS, HA, S*, N*, KA, H*, RA, NA or NC.

[0606] The predetermined N-terminal to C-terminal order of the one or more polypeptide monomers of the nucleic acid or DNA binding domain determines the corresponding predetermined target nucleic acid sequence to which the TALE or polypeptides of the invention may bind.

[0607] As used herein the monomers and at least one or more half monomers are “specifically ordered to target” the genomic locus or gene of interest. In plant genomes, the natural TALE-binding sites always begin with a thymine (T), which may be specified by a cryptic signal within the non-repetitive N-terminus of the TALE polypeptide; in some cases this region may be referred to as repeat 0. In animal genomes, TALE binding sites do not necessarily have to begin with a thymine (T) and polypeptides of the invention may target DNA sequences that begin with T, A, G or C. The tandem repeat of TALE monomers always ends with a half-length repeat or a stretch of sequence that may share identity with only the first 20 amino acids of a repetitive full length TALE monomer and this half repeat may be referred to as a half-monomer (FIG. 8 of WO 2012/067428). Therefore, it follows that the length of the nucleic acid or DNA being targeted is equal to the number of full monomers plus two (see FIG. 44 of WO 2012/067428).

[0608] In certain embodiments, nucleic acid binding domains are engineered to contain 5, 6, 7, 8, 9, 10, 11, 12, 13, 14, 15, 16, 17, 18, 19, 20, 21, 22, 23, 24, 25, or more polypeptide monomers arranged in a N-terminal to C-terminal direction to bind to a predetermined 5, 6, 7, 8, 9, 10, 11, 12, 13, 14, 15, 16, 17, 18, 19, 20, 21, 22, 23, 24, 25 nucleotide length nucleic acid sequence.

[0609] In certain embodiments, nucleic acid binding domains are engineered to contain 5, 6, 7, 8, 9, 10, 11, 12, 13, 14, 15, 16, 17, 18, 19, 20, 21, 22, 23, 24, 25, 26 or more full length polypeptide monomers that are specifically ordered or arranged to target nucleic acid sequences of length 7, 8, 9, 10, 11, 12, 13, 14, 15, 16, 17, 18, 19, 20, 21, 22, 23, 24, 25, 26, 27 and 28 nucleotides, respectively. In certain embodiments, the polypeptide monomers are contiguous. In some embodiments, half-monomers may be used in the place of one or more monomers, particularly if they are present at the C-terminus of the TALE.

[0610] Polypeptide monomers are generally 33, 34 or 35 amino acids in length. With the exception of the RVD, the amino acid sequences of polypeptide monomers are highly conserved or as described herein, the amino acids in a polypeptide monomer, with the exception of the RVD, exhibit patterns that effect TALE activity, the identification of which may be used in preferred embodiments of the invention.

[0611] In certain embodiments, when the DNA binding domain may comprise (X1-11-X12X13-X14-33 or 34 or 35)z, wherein X1-11 is a chain of 11 contiguous amino acids, wherein X12X13 is a repeat variable diresidue (RVD), wherein X14-33 or 34 or 35 is a chain of 21, 22 or 23 contiguous amino acids, wherein z is at least 5 to 26, then the preferred combinations of amino acids are LTLD or LTLA or LTQV at X-4, or EQHG or RDHG at positions X30-33 or X31-34 or X32-35. Furthermore, other amino acid combinations of interest in the monomers are LTPD at X1-4 and NQALE at XI 6-20 and DHG at X32-34 when the monomer is 34 amino acids in length. When the monomer is 33 or 35 amino acids long, then the corresponding shift occurs in the positions of the contiguous amino acids NQALE and DHG. In certain embodiments, NQALE is at X15-19 or X17-21 and DHG is at X31-33 or X33-35.

[0612] In certain embodiments, amino acid combinations of interest in the monomers, are LTPD at X1-4 and KRALE at X16-20 and AHG at X32-34 or LTPE at X1-4 and KRALE at XI 6-20 and DHG at X32-34 when the monomer is 34 amino acids in length. When the monomer is 33 or 35 amino acids long, the corresponding shift occurs in the positions of the contiguous amino acids KRALE, AHG and DHG. In certain embodiments, the positions of the contiguous amino acids may be (LTPD at X1-4 and KRALE at X15-19 and AHG at X31-33) or (LTPE at X1-4 and KRALE at X15-19 and DHG at X31-33) or (LTPD at X1-4 and KRALE at X17-21 and AHG at X33-35) or (LTPE at X1-4 and KRALE at X17-21 and DHG at X33-35).

[0613] In certain embodiments, contiguous amino acids [NGKQALE] are present at positions X14-20 or X13-19 or X15-21. These representative positions put forward various embodiments of the invention and provide guidance to identify additional amino acids of interest or combinations of amino acids of interest in all the TALE monomers (see FIGS. 24A-24F, and 25 of WO 2012/067428).

[0614] Exemplary amino acid sequences of conserved portions of polypeptide monomers are provided below. The position of the RVD in each sequence is represented by XX or by X* (wherein (*) indicates that the RVD is a single amino acid and residue 13 (X13) is absent).

LTPAQVVAIASXXGGKQALETVQRLLPVLCQDHG
LTPAQVVAIASX*GGKQALETVQRLLPVLCQDHG
LTPDQVVAIANXXGGKQALATVQRLLPVLCQDHG
LTPDQVVAIANXXGGKQALETLQRLLPVLCQDHG
LTPDQVVAIANXXGGKQALETVQRLLPVLCQDHG
LTPDQVVAIASXXGGKQALATVQRLLPVLCQDHG
LTPDQVVAIASXXGGKQALETVQRLLPVLCQDHG
LTPDQVVAIASXXGGKOALETVORVLPVLCODHG
LTPEQVVAIASXXGGKQALETVQRLLPVLCQAHG
LTPYQVVAIASXXGSKQALETVQRLLPVLCQDHG
LTREQVVAIASXXGGKQALETVQRLLPVLCQDHG
LSTAQVVAIASXXGGKQALEGIGEQLLKLRTAPYG
LSTAQVVAVASXXGGKPALEAVRAQLLALRAAPYG

[0615] A further listing of TALE monomers excluding the RVDs which may be denoted in a sequence (X1-11-X14-34 or X1-11-X14-35), wherein X is any amino acid and the subscript is the amino acid position is provided in FIG. 24A-F of WO 2012/067428, which is incorporated herein by reference.

[0616] In certain embodiments, TALE polypeptide binding efficiency is increased by including amino acid sequences from the “capping regions” that are directly N-terminal or C-terminal of the DNA binding region of naturally occurring TALEs into the engineered TALEs at positions N-terminal or C-terminal of the engineered TALE DNA binding region. Thus, in certain embodiments, the TALE polypeptides described herein further comprise an N-terminal capping region and/or a C-terminal capping region.

[0617] An exemplary amino acid sequence of a N-terminal capping region is:

MDPIRSRTPSPARELLSGPQPDGVQPTADRGVSPPAGGPL
DGLPARRTMSRTRLPSPPAPSPAFSADSFSDLLRQFDPSL
FNTSLFDSLPPFGAHHTEAATGEWDEVQSGLRAADAPPPT
MRVAVTAARPPRAKPAPRRRAAQPSDASPAAQVDLRTLGY
SQQQQEKIKPKVRSTVAQHHEALVGHGFTHAHIVALSQHP
AALGTVAVKYQDMIAALPEATHEAIVGVGKQWSGARALEA
LLTVAGELRGPPLQLDTGQLLKIAKRGGVTAVEAVHAWRN
ALTGAPLN

[0618] An exemplary amino acid sequence of a C-terminal capping region is:

REALESIVAQLSRPDPALAALTNDHLVALACLGGRPALDA
VKKGLPHAPALIKRTNRRIPERTSHRVADHAQWRVLGFFQ
CHSHPAQAFDDAMTQFGMSRHGLLQLFRRVGVTELEARSG
TLPPASQRWDRILQASGMKRAKPSPTSTQTPDQASLHAFA
DSLERDLDAPSPMHEGDQTRAS

[0619] As used herein the predetermined “N-terminus” to “C terminus” orientation of the N-terminal capping region, the DNA binding domain comprising the repeat TALE monomers and the C-terminal capping region provide structural basis for the organization of different domains in the d-TALEs or polypeptides of the invention.

[0620] The entire N-terminal and/or C-terminal capping regions are not necessary to enhance the binding activity of the DNA binding region. Therefore, in certain embodiments, fragments of the N-terminal and/or C-terminal capping regions are included in the TALE polypeptides described herein.

[0621] In certain embodiments, the TALE (including TALEs) polypeptides described herein contain a N-terminal capping region fragment that included at least 10, 20, 30, 40, 50, 54, 60, 70, 80, 87, 90, 94, 100, 102, 110, 117, 120, 130, 140, 147, 150, 160, 170, 180, 190, 200, 210, 220, 230, 240, 250, 260 or 270 amino acids of an N-terminal capping region. In certain embodiments, the N-terminal capping region fragment amino acids are of the C-terminus (the DNA-binding region proximal end) of an N-terminal capping region. N-terminal capping region fragments that include the C-terminal 240 amino acids enhance binding activity equal to the full length capping region, while fragments that include the C-terminal 147 amino acids retain greater than 80% of the efficacy of the full length capping region, and fragments that include the C-terminal 117 amino acids retain greater than 50% of the activity of the full-length capping region.

[0622] In some embodiments, the TALE polypeptides described herein contain a C-terminal capping region fragment that included at least 6, 10, 20, 30, 37, 40, 50, 60, 68, 70, 80, 90, 100, 110, 120, 127, 130, 140, 150, 155, 160, 170, 180 amino acids of a C-terminal capping region. In certain embodiments, the C-terminal capping region fragment amino acids are of the N-terminus (the DNA-binding region proximal end) of a C-terminal capping region. In certain embodiments, C-terminal capping region fragments that include the C-terminal 68 amino acids enhance binding activity equal to the full length capping region, while fragments that include the C-terminal 20 amino acids retain greater than 50% of the efficacy of the full length capping region.

[0623] In certain embodiments, the capping regions of the TALE polypeptides described herein do not need to have identical sequences to the capping region sequences provided herein. Thus, in some embodiments, the capping region of the TALE polypeptides described herein have sequences that are at least 50%, 60%, 70%, 80%, 85%, 90%, 91%, 92%, 93%, 94%, 95%, 96%, 97%, 98% or 99% identical or share identity to the capping region amino acid sequences provided herein. Sequence identity is related to sequence homology. Homology comparisons may be conducted by eye, or more usually, with the aid of readily available sequence comparison programs. These commercially available computer programs may calculate percent (%) homology between two or more sequences and may also calculate the sequence identity shared by two or more amino acid or nucleic acid sequences. In some preferred embodiments, the capping region of the TALE polypeptides described herein have sequences that are at least 95% identical or share identity to the capping region amino acid sequences provided herein.

[0624] Sequence homologies may be generated by any of a number of computer programs known in the art, which include but are not limited to BLAST or FASTA. Suitable computer program for carrying out alignments like the GCG Wisconsin Bestfit package may also be used. Once the software has produced an optimal alignment, it is possible to calculate % homology, preferably % sequence identity. The software typically does this as part of the sequence comparison and generates a numerical result. % homology may be calculated over contiguous sequences, i.e., one sequence is aligned with the other sequence and each amino acid or nucleotide in one sequence is directly compared with the corresponding amino acid or nucleotide in the other sequence, one residue at a time. This is called an “ungapped” alignment. Typically, such ungapped alignments are performed only over a relatively short number of residues.

[0625] Additional sequences for the conserved portions of polypeptide monomers and for N-terminal and C-terminal capping regions are included in the sequences with the following gene accession numbers: AAW59491.1, AAQ79773.2, YP_450163.1, YP_001912778.1, ZP_02242672.1, AAW59493.1, AAY54170.1, ZP_02245314.1, ZP_02243372.1, AAT46123.1, AAW59492.1, YP_451030.1, YP_001915105.1, ZP_02242534.1, AAW77510.1, ACD11364.1, ZP 02245056.1, ZP 02245055.1, ZP 02242539.1, ZP 02241531.1, ZP 02243779.1, AAN01357.1, ZP_02245177.1, ZP_02243366.1, ZP_02241530.1, AAS58130.3, ZP_02242537.1, YP_200918.1, YP_200770.1, YP_451187.1, YP_451156.1, AAS58127.2, YP_451027.1, UR_451025.1, AAA92974.1, UR_001913755.1, ABB70183.1, UR_451893.1, UR_450167.1, ABY60855.1, UR 200767.1, ZR_02245186.1, ZR_02242931.1, ZR_02242535.1, AAU54169.1, UR_450165.1, UR_001913452.1, AAS58129.3, ACM44927.1, ZR_02244836.1, AAT46125.1, UR_450161.1, ZR_02242546.1, AAT46122.1, UR_451897.1, AAF98343.1, UR_001913484.1, AAY54166.1, UR_001915093.1, UR_001913457.1, ZR_02242538.1, UR_200766.1, UR_453043.1, UR_001915089.1, UR_001912981.1, ZR_02242929.1, UR_001911730.1, UR_201654.1, UR_199877.1, ABB70129.1, UR_451696.1, UR_199876.1, AAS75145.1, AAT46124.1, UR_200914.1, UR_001915101.1, ZR_02242540.1, AAG02079.2, UR_451895.1, YP 451189.1, UR_200915.1, AAS46027.1, UR_001913759.1, UR_001912987.1, AAS58128.2, AAS46026.1, UR_201653.1, UR_202894.1, UR_001913480.1, ZR_02242666.1, R_001912775.1, ZR_02242662.1, AAS46025.1, AAC43587.1, BAA37119.1, NPJ544725.1, AB077779.1, BAA37120.1, ACZ62652.1, BAF46271.1, ACZ62653.1, NPJ544793.1, AB077780.1, ZR_02243740.1, ZR_02242930.1, AAB69865.1, AAY54168.1, ZR_02245191.1, UR_001915097.1, ZR_02241539.1, UR_451158.1, BAA37121.1, UR_001913182.1, UR_200903.1, ZR_02242528.1, ZR_06705357.1, ZR_06706392.1, ADI48328.1, ZR_06731493.1, ADI48327.1, AB077782.1, ZR_06731656.1, NR_942641.1, AAY43360.1, ZR_06730254.1, ACN39605.1, UR_451894.1, UR_201652.1, UR_001965982.1, BAF46269.1, NPJ544708.1, ACN82432.1, AB077781.1, P14727.2, BAF46272.1, AAY43359.1, BAF46270.1, NR_644743.1, ABG37631.1, AAB00675.1, YP 199878.1, ZR_02242536.1, CAA48680.1, ADM80412.1, AAA27592.1, ABG37632.1, ABP97430.1, ZR_06733167.1, AAY43358.1, 2KQ5_A, BAD42396.1, ABO27075.1, UR_002253357.1, UR_002252977.1, ABO27074.1, ABO27067.1, ABO27072.1, ABO27068.1, UR_003750492.1, ABO27073.1, NR_519936.1, ABO27071.1, AB027070.1, and AB027069.1, each of which is hereby incorporated by reference.

[0626] In some embodiments, the TALEs described herein also include a nuclear localization signal and/or cellular uptake signal. Such signals are known in the art and may target a TALE to the nucleus and/or intracellular compartment of a cell. Such cellular uptake signals include, but are not limited to, the minimal Tat protein transduction domain which spans residues 47-57 of the human immunodeficiency virus Tat protein: YGRKKRRQRRR.

[0627] In some embodiments, the TALEs described herein include a nucleic acid or DNA binding domain that is a non-TALE nucleic acid or a non-TALE DNA binding domain.

[0628] As used herein the term “non-TALE DNA binding domain” refers to a DNA binding domain that has a nucleic acid sequence corresponding to a nucleic acid sequence which is not substantially homologous to a nucleic acid that encodes for a TALE protein or fragment thereof, e.g., a nucleic acid sequence which is different from a nucleic acid that encodes for a TALE protein and which is derived from the same or a different organism.

[0629] In certain embodiments, the TALEs described herein include a nucleic acid or DNA binding domain that is linked to a non-TALE polypeptide.

[0630] A “non-TALE polypeptide” refers to a polypeptide having an amino acid sequence corresponding to a protein which is not substantially homologous to a TALE protein or fragment thereof, e.g., a protein which is different from a TALE protein and which is derived from the same or a different organism. In this context, the term “linked” is intended include any manner by which the nucleic acid binding domain and the non-TALE polypeptide could be connected to each other, including, for example, through peptide bonds by being part of the same polypeptide chain or through other covalent interactions, such as a chemical linker. The non-TALE polypeptide may be linked, for example to the N-terminus and/or C-terminus of the nucleic acid binding domain, may be linked to a C-terminal or N-terminal cap region, or may be connected to the nucleic acid binding domain indirectly.

[0631] In certain embodiments, the TALEs or polypeptides of the invention comprise chimeric DNA binding domains. Chimeric DNA binding domains may be generated by fusing a full TALE (including the N- and C-terminal capping regions) with another TALE or non-TALE DNA binding domain such as zinc finger (ZF), helix-loop-helix, or catalytically-inactivated DNA endonucleases (e.g., EcoRI, meganucleases, etc.), or parts of TALE may be fused to other DNA binding domains. The chimeric domain may have novel DNA binding specificity that combines the specificity of both domains.

[0632] In certain embodiments, the TALE polypeptides of the invention include a nucleic acid binding domain linked to the one or more effector domains. In certain embodiments, the effector domain is a nickase or nuclease.

[0633] In certain embodiments, the sequence-specific nuclease is a zinc finger nuclease (ZFN), such as an artificial zinc-finger nuclease having arrays of zinc-finger (ZF) modules to target new DNA-binding sites in a target sequence (e.g., target sequence or target site in the genome). Each zinc finger module in a ZF array targets three DNA bases. A customized array of individual zinc finger domains is assembled into a ZF protein (ZFP). The resulting ZFP can be linked to a functional domain such as a nuclease.

[0634] ZF nucleases (ZFN) may be used as alternative programmable nucleases for use in retron-based editing in place of RNA-guide nucleases. ZFN proteins have been extensively described in the art, for example, in Carroll et al., “Genome Engineering with Zinc-Finger Nucleases,” Genetics, August 2011, Vol. 188: 773-782; Durai et al., “Zinc finger nucleases: custom-designed molecular scissors for genome engineering of plant and mammalian cells,” Nucleic Acids Res, 2005, Vol. 33: 5978-90; and Gaj et al., “ZFN, TALEN, and CRISPR/Cas-based methods for genome engineering,” Trends Biotechnol. 2013, Vol. 31: 397-405, each of which are incorporated herein by reference in their entireties.

[0635] In certain embodiments, the ZF-linked nuclease is a catalytic domain of the Type IIS restriction enzyme FokI (see Kim et al., PNAS U.S.A. 91:883-887, 1994; Kim et al., PNAS U.S.A. 93:1156-1160, 1996, both incorporated herein by reference).

[0636] In certain embodiments, the ZFN comprises paired ZFN heterodimers, resulting in increased cleavage specificity and/or decreased off-target activity. In this embodiment, each ZFN in the heterodimer targets different nucleotide sequences separated by a short spacer (see Doyon et al., Nat. Methods 8:74-79, 2011, incorporated herein by reference).

[0637] In certain embodiments, the ZFN comprises a polynucleotide-binding domain (comprising multiple sequence-specific ZF modules) and a polynucleotide cleavage nickase domain.

[0638] In certain embodiments, the ZFs are engineered using libraries of two finger modules.

[0639] In certain embodiments, strings of two-finger units are used in ZFNs to improve DNA binding specificity from polyzinc finger peptides (see PNAS USA 98: 1437-1441, incorporated herein by reference).

[0640] In certain embodiments, the ZFN has more than 3 fingers. In certain embodiments, the ZFN has 4, 5, or 6 fingers. In certain embodiments, the ZF modules in the ZFN are separated by one or more linkers to improve specificity.

[0641] In certain embodiments, the ZF of the ZFN includes substitutions in the dimer interface of the cleavage domain that prevent homodimerization between ZFs, but allow heterodimers to form.

[0642] In certain embodiments, the ZF of the ZFN has a design that retains activity while suppressing homodimerization.

[0643] In certain embodiments, the ZFN is any one of the ZF nucleases in Table 1 of Carroll et al., Genetics 188(4):773-782, 2011, incorporated herein by reference.

[0644] General principles and guidance for generating ZF, ZF arrays, and ZFN can be found in the art, such as the modular design (where the different modules can be rearranged and assembled into new combinations for new targets) of the ZF or ZF arrays in the ZFN as taught in Carroll et al., Nat. Protoc. 1: 1329-1341, 2006 (incorporated herein by reference); the new three-finger sets for engineered ZFs generated by using partially randomized libraries; profiling the DNA-binding specificities of engineered Cys2His2 zinc finger domains using a rapid cell-based method (see Nucleic Acids Res. 35: e81, incorporated by reference). ZFs for certain DNA triplets that work well in neighbor combination are described in Sander et al., 2011. Selection-free zinc-finger-nuclease engineering by context-dependent assembly (CoDA) is taught in Nat. Methods 8: 67-69). ToolGen describes the individual fingers in their collection that are best behaved in modular assembly (Kim et al., 2011). Preassembled zinc-finger arrays for rapid construction of ZFNs are taught in Nat. Methods 8:7.

[0645] Additional, non-limiting ZFs and AFNz that can be adapted for use in the instant invention include those described in WO2010/065123, WO2000/041566, WO2003/080809, WO2015/143046, WO2016/183298, WO2013/044008, WO2015/031619, WO2017/136049, WO2016/014794, WO2017/091512, WO1995/009233, WO2000/023464, WO2000/042219, WO2002/026960, WO2001/083793; U.S. Pat. Nos. 9,428,756, 9,145,565, 8,846,578, 8,524,874, 6,777,185, 6,599,692, 7,235,354, 6,503,717, 7,491,531, 7,943,553, 7,262,054, 8,680,021, 7,705,139, 7,273,923, 6,780,590, 6,785,613, 7,788,044, 7,177,766, 6,453,242, 6,794,136, 7,358,085, 8,383,766, 7,030,215, 7,013,219, 7,361,635, 7,939,327, 8,772,453, 9,163,245, 7,045,304, 8,313,925, 9,260,726, 6,689,558, 8,466,267, 7,253,273, 7,947,873, 9,388,426, 8,153,399, 8,569,253, 8,524,221, 7,951,925, 9,115,409, 8,772,008, 9,121,072, 9,624,498, 6,979,539, 9,491,934, 6,933,113, 9,567,609, 7,070,934, 9,624,509, 8,735,153, 9,567,573, 6,919,204, US2002-0081614, US2004-0203064, US2006-0166263, US2006-0292621, US2003-0134318, US2006-0294617, US2007-0287189, US2007-0065931, US2003-0105593, US2003-0108880, US2009-0305402, US2008-0209587, US2013-0123484, US2004-0091991, US2009-0305977, US2008-0233641, US2014-0287500, US2011-0287512, US2009-0258363, US2013-0244332, US2007-0134796, US2010-0256221, US2005-0267061, US2012-0204282, US2012-0252122, US2010-0311124, US2016-0215298, US2008-0031109, US2014-0017214, US2015-0267205, US2004-0235002, US2004-0204345, US2015-0064789, US2006-0063231, US2011-0265198, US2017-0218349, all incorporated herein by reference.

[0646] Polynucleotides and vectors capable of expressing one or more of the ZFNs are also provided herein, which can be part of the vector system of the invention. The polynucleotides and vectors can be expressed in a cell, such as a eukaryotic cell, a mammalian cell, or a human cell. Suitable vectors, cells and expression systems are described in greater detail elsewhere herein, and can be suitable for use with the TALEs, the meganucleases, and the CRISPR-Cas nucleases.

[0647] In certain embodiments, the sequence-specific nuclease is a meganuclease.

[0648] Meganucleases are a class of sequence-specific endonucleases that recognize large DNA target sites (>12 bp). These proteins can cleave a unique chromosomal sequence without affecting overall genome integrity. Meganucleases create site specific DNA DSBs, and, in the presence of donor DNA, such as one present in the heterologous nucleic acid encompassed by or encoded by the engineered retron of the invention, promotes the integration of the donor DNA at the cleavage site through homologous recombination (HR).

[0649] In certain embodiments, the meganuclease is a homing endonuclease, which is a widespread class of proteins found in eukaryotes, bacteria and archaea. In certain embodiments, the meganuclease is of the LAGLIDADG family of homing endonucleases.

[0650] In certain embodiments, the meganuclease is I-Scel, I-Cre-I, I-Dmol, or an engineered or a naturally occurring variant thereof. The hallmark of these proteins is a well conserved LAGLIDADG peptide motif, termed (do)decapeptide, found in one or two copies. Homing endonucleases with only one such motif, such as I-Crel or I-Ceul, function as homodimers. In contrast, larger proteins bearing two (do)decapeptide motifs, such as I-Scel, Pl-Scel and I-Dmol are single chain proteins.

[0651] Additional homing nucleases are found at the website of homingendonuclease.net, which provides a database listing basic properties of known LAGLIDADG homing endonucleases. See also Taylor et al., Nucleic Acids Research 40 (W1): W110-W116, 2012 (all incorporated herein by reference).

[0652] In certain embodiments, specificity (or polynucleotide recognition) of the meganuclease is modified by altering the amino acids within the meganuclease, and/or by fusing other effector domains with the meganuclease.

[0653] In certain embodiments, the meganuclease is a megaTAL, which includes a DNA binding domain from a TALE.

[0654] In certain embodiments, the meganuclease is engineered to have nickase activity.

[0655] Additional suitable natural and engineered meganucleases and megaTALs are described in WO2006/097853, WO2004/067736, WO2012/030747, WO2007/123636, WO2010/001189, WO2018/071565, WO2007/049095, WO2009/068937, WO2005/105989, WO2008/102198, WO2007/057781, WO2019/126558, WO2010/046786, US2010-0151556, US2014-0121115, US2011-0207199, US2012-0301456, US2013-0189759, US2011-0158974, US2010-0144012, US2014-0112904, US2013-0196320, US2010-0203031, US2010-0167357, US2012-0272348, US2012-0258537, US2011-0072527, US2013-0183282, US2014-0178942, US2012-0260356, US2013-0236946, US2010-0325745, US2011-0041194, US2014-0004608, US2011-0263028, US2011-0225664, US2013-0145487, US2013-0045539, US2012-0171191, US2015-0315557, US2014-0017731, US2011-0091441, US2014-0038239, US2010-0229252, US2009-0222937, US2010-0146651, US2013-0059387, US2011-0179507, US2013-0326644, US2006-0078552, US2004-0002092, US2012-0052582, US2009-0162937, US2010-0086533, US2009-0220476, U.S. Pat. Nos. 8,802,437, 7,842,489, 8,715,992, 8,426,177, 8,476,072, 9,365,864, 9,540,623, 9,273,296, 9,290,748, 8,163,514, 8,148,098, 8,143,016, 8,143,015, 8,133,697, 8,129,134, 8,124,369, 8,119,361, 7,897,372, 9,683,257, U.S. Ser. No. 10/287,626, U.S. Ser. No. 10/273,524, U.S. Ser. No. 10/000,746, U.S. Ser. No. 10/006,052, U.S. Pat. Nos. 7,919,605, 9,018,364, U.S. Ser. No. 10/407,672, U.S. Pat. Nos. 8,211,685, 9,365,864, 7,476,500, all incorporated herein by reference.

[0656] In certain embodiments, the sequence-specific nuclease is TnpB, which is a programmable RNA-guided DNA endonuclease. It is believed that TnpB is a functional progenitor of the CRISPR-Cas nucleases.

[0657] Transposons are mobile genetic elements that contain only the genes required for their transposition and its regulation. These elements encode the tnpA transposase, which is essential for mobilization, and often carry an accessory tnpB gene, which is dispensable for transposition. TnpB has been shown to be a nuclease that is guided by an RNA, derived from the right-end element of a transposon, to cleave DNA next to the 5′-TTGAT transposon-associated motif, and TnpB can be reprogrammed to cleave DNA target sites in human cells.

[0658] In certain embodiments, tnpB is from D. radiodurans ISDra2 of the IS200/IS605 family.

[0659] In certain embodiments, tnpB is from transposon PsiTn554.

[0660] In certain embodiments, the sequence-specific nuclease is a TnpB-like protein, such as Fanzor1 or Fanzor2. These proteins are widespread in diverse eukaryotic transposable elements (TEs), and in large double-stranded DNA (dsDNA) viruses infecting eukaryotes. Fanzor and TnpB proteins share the same conserved amino acid motif in their C-terminal half regions: D-X(125, 275)-[TS]-[TS]-X-X-[C4 zinc finger]-X(5,50)-RD, but are highly variable in their N-terminal regions. Fanzor1 proteins are frequently captured by DNA transposons from different superfamilies including Helitron, Mariner, IS4-like, Sola and MuDr. In contrast, Fanzor2 proteins appear only in some IS607-type elements.

[0661] In certain embodiments, the sequence-specific nuclease is IscB.

[0662] ISC (insertion sequences Cas9-like) is a novel group of bacterial and archaeal DNA transposons that encode Cas9 homologs. The ISC transposon-encoded two nuclease domain-containing proteins are the likely ancestors of the CRISPR-associated Cas9. The homology region includes the arginine-rich helix and the HNH nuclease domain that is inserted into the RuvC-like nuclease domain. ISC genes, however, are not linked to Cas genes or CRISPR. They represent a distinct group of nonautonomous transposons, with many diverse families of full-length ISC transposons. Their terminal sequences (particularly 3′ termini) are similar to those of IS605 superfamily transposons that are mobilized by the Y1 tyrosine transposase encoded by the TnpA gene, and often also encode the TnpB protein containing the RuvC-like endonuclease domain. The terminal regions of the ISC and IS605 transposons contain palindromic structures that are likely recognized by the Y1 transposase. The transposons from these two groups are inserted either exactly in the middle or upstream of specific 4-bp target sites, without target site duplication.

[0663] In certain embodiments, the sequence-specific nuclease is a restriction endonuclease (RE), such as an RE with stringent/long recognition sequence of at least 8 nts.

[0664] In certain embodiments, the RE is a rare-cutter RE with seven and eight base pair recognition sequences. Exemplary rare-cutter RE enzyme include NotI, which cuts after the first GC of a 5′-GCGGCCGC-3′ sequence.

[0665] In certain embodiments, the components of the system—e.g., the retron encoded ncRNA or msDNA in complex with the RT, the sequence-specific nuclease, and the DNA-repair modulating biomolecule, may form multiple complexes in a so-called split complex configuration. The multiple complexes may be brought together to form a functional complex.

[0666] For example, in some embodiments, a first component in the system may be a split protein or domain. A fragment of the split protein or domain may associate with a second component of the system, while another fragment of the split protein or domain may associate with a third component of the system. The two fragments of the split protein or domain may be brought together (e.g., along with the other components of the system) to form a functional complex.

[0667] In certain embodiments, the split protein or domain is the sequence-specific nuclease, e.g., a CRISPR/Cas effector enzyme (e.g., Cas protein such as Cas9 or Cas12), a ZFN, a TALEN, a meganuclease, TnpB, IscB, or a restriction endonuclease (RE).

[0668] In certain embodiments, the split protein or domain is the reverse transcriptase domain.

[0669] In certain embodiments, the split protein or domain is the DNA-repair modulating biomolecule.

[0670] For example a first fragment of the sequence-specific nuclease may associate with the reverse transcriptase domain and a second fragment of the sequence-specific nuclease may associate with the DNA-repair modulating biomolecule. The two fragments of the split protein or domain may be brought together (e.g., along with the reverse transcriptase domain and the DNA-repair modulating biomolecule) to form a functional complex. The associations between the parts of the split protein or domain may be through adaptor proteins or linkers described herein (e.g., those used for associating Cas proteins with function domains).

[0671] In certain embodiments, the split protein or domain is split in the sense that the two parts of the split protein or domain substantially comprise a functioning split protein or domain. Ideally, the split should always be so that the catalytic domain(s) are unaffected. That split protein or domain may function as a sequence-specific nuclease or it may be a dead-Cas which is essentially an RNA-binding protein with very little or no catalytic activity, due to typically mutation(s) in its catalytic domains.

[0672] Each fragment of the split protein or domain may be fused to a dimerization partner. For example, rapamycin sensitive dimerization domains enables a chemically inducible split protein or domain for temporal control of the split protein or domain's activity. The split protein or domain can thus be rendered chemically inducible by being split into two fragments and that rapamycin-sensitive dimerization domains may be used for controlled reassembly of the split protein or domain. The two parts of the split protein or domain can be thought of as the N′ terminal part and the C′ terminal part of the split protein or domain. The fusion is typically at the split point of the split protein or domain. In other words, the C′ terminal of the N′ terminal part of the split protein or domain is fused to one of the dimer halves, whilst the N′ terminal of the C′ terminal part is fused to the other dimer half.

[0673] The split protein or domain does not have to be split in the sense that the break is newly created. The split point is typically designed in silico and cloned into the constructs. Together, the two parts of the split protein or domain, the N′ terminal and C′ terminal parts, form a full split protein or domain, comprising preferably at least 70% or more of the wildtype amino acids (or nucleotides encoding them), at least 80% or more, at least 90% or more, at least 95% or more, and at least 99% or more of the wildtype amino acids (or nucleotides encoding them). When the two parts are brought together, the desired split protein or domain function is restored or reconstituted. The dimer may be a homodimer or a heterodimer.

[0674] In certain embodiments, the protein components of the system—e.g., the RT, the sequence-specific nuclease (a CRISPR/Cas effector enzyme, a ZFN, a TALEN, a meganuclease, TnpB, IscB, or a restriction endonuclease (RE)), and the DNA-repair modulating biomolecule, may further comprise one or more additional functional domains.

[0675] In certain embodiments, the functional domain comprises a nuclear localization signal (NLS). In certain embodiments, one or more C-terminal or N-terminal NLSs are attached. In certain embodiments, a C-terminal NLS is attached for expression and nuclear targeting in eukaryotic cells, e.g., human cells. In certain embodiments, the NLS(s) may be at a location that is not at the C-terminus or N-terminus, for example, the NLS(s) may be between two polypeptides.

[0676] Non-limiting examples of NLSs include an NLS sequence derived from: the NLS of the SV40 virus large T-antigen; the NLS from nucleoplasmin (e.g., the nucleoplasmin bipartite NLS); the c-myc NLS; the hRNPA1 M9 NLS; the NLS of the IBB domain from importin-alpha; the NLS of the myoma T protein; the NLS of human p53; the NLS of mouse c-abl IV; the NLS of the influenza virus NS1; the NLS of the Hepatitis virus delta antigen; the NLS of the mouse Mx1 protein; the NLS of the human poly(ADP-ribose) polymerase; and the NLS of the steroid hormone receptors (human) glucocorticoid. Exemplary NLS sequences include those described in paragraph [00106] of Feng Zhang et al. (WO2016/106236), all incorporated herein by reference.

[0677] In certain embodiments, the functional domain comprises at least two NLS domains. The one or more NLS domain(s) may be positioned at or near or in proximity to a terminus of a polypeptide and, if two or more NLSs, each of the two may be positioned at or near or in proximity to a terminus of the polypeptide.

[0678] In any of the fusion proteins, the fusion between the two domains (such as the RT and Cas enzyme, or the Cas and the DNA-repair modulating biomolecule) may be linked through a linker.

[0679] A “linker” as used herein includes a peptide which joins two proteins or domains to form a fusion protein. Generally, such molecules have no specific biological activity other than to join or to preserve some minimum distance or other spatial relationship between the proteins/domains. However, in certain embodiments, the linker may be selected to influence some property of the linker and/or the fusion protein such as the folding, net charge, or hydrophobicity of the linker. Suitable linkers for use in the present disclosure are well-known to those of skill in the art and include, but are not limited to, straight or branched-chain carbon linkers, heterocyclic carbon linkers, or peptide linkers. However, as used herein, the linker may also be a covalent bond (carbon-carbon bond or carbon-heteroatom bond).

[0680] In particular embodiments, the linker is used to separate the sequence-specific nuclease (a CRISPR/Cas effector enzyme, a ZFN, a TALEN, a meganuclease, TnpB, IscB, or a restriction endonuclease (RE)) and the RT and/or the DNA-repair modulating biomolecule by a distance sufficient to ensure that each protein domain retains its required functional property.

[0681] Preferred peptide linker sequences adopt a flexible extended conformation and do not exhibit a propensity for developing an ordered secondary structure. In certain embodiments, the linker can be a chemical moiety which can be monomeric, dimeric, multimeric or polymeric. In certain embodiments, the linker comprises amino acids. Typical amino acids in flexible linkers include Gly, Asn and Ser. Accordingly, in particular embodiments, the linker comprises a combination of one or more of Gly, Asn and Ser amino acids. Other near neutral amino acids, such as Thr and Ala, also may be used in the linker sequence.

[0682] In certain embodiments, the linker comprises a GlySer-rich sequence, such as a GₙS linker (n=1, 2, 3, 4, or 5, such as GS or G4S), or repeats thereof (such as 1, 2, 3, 4, 5, 6, 7, 8, 9, 10, 11, 12, 13, 14, 15, 16, 17, 18, 19, or 20 repeats, optionally with an overall length of about 4-30 residues, 4-20 residues, or 4-10 residues).

[0683] In certain embodiments, the linker comprises a G4S linker with 3, 6, 9, or 12 repeats.

[0684] In certain embodiments, the linker is one disclosed in Maratea et al., Gene 40: 39-46, 1985; Murphy et al., PNAS USA 83: 8258-62, 1986; U.S. Pat. No. 4,935,233; or U.S. Pat. No. 4,751,180, all incorporated by reference.

[0685] In certain embodiments, the linker comprises a GlySer linker such as GGS, GGGS, GSG, GGGGS, optionally with repeats of 3 (such as (GGS)₃, (GGGGS)₃), 4, 5, 6, 7, 8, 9, 10, 11, or 12 or more, to provide suitable lengths.

[0686] In certain embodiments, the linker comprises (GGGGS)₃₋₁₅, such as (GGGGS)₃₋₁₁, e.g., GGGGS with 1, 2, 3, 4, 5, 6, 7, 8, 9, 10, or 11 repeats.

[0687] In certain embodiments, the linker comprises

LEPGEKPYKCPECGKSFSQSGALTRHQR
THTR.

[0688] In yet an additional embodiment, the linker is an XTEN linker.

[0689] In certain embodiments, N- and/or C-terminal NLSs also function as linker (e.g., PKKKRKVEASSPKKRKVEAS).

[0690] The gRNA and the various nucleases and fusions thereof can be provided in the form of a protein, optionally where the nuclease is complexed with a gRNA, or provided by a nucleic acid encoding the RNA-guided nuclease, such as an RNA (e.g., messenger RNA) or DNA (expression vector). In some embodiments, the RNA-guided nuclease and the gRNA are both provided by vectors. Both can be expressed by a single vector or separately on different vectors. The vectors encoding the RNA-guided nuclease and gRNA may be included in the vector system comprising the engineered retron msr gene, msd gene and ret gene sequences.

[0691] Codon usage may be optimized to improve production of the engineered retron e.g., retron reverse transcriptase, ncRNA and/or RNA-guided nuclease in a particular cell or organism. For example, a nucleic acid encoding an ncRNA, RNA-guided nuclease or reverse transcriptase can be modified to substitute codons having a higher frequency of usage in a the particular cell such as a eukaryotic cell (e.g., yeast cell, a human cell, a non-human cell, a mammalian cell, a rodent cell, a mouse cell, a rat cell), or any other host cell of interest, as compared to the naturally occurring polynucleotide sequence. When a nucleic acid encoding the reverse transcriptase or ncRNA is introduced into cells, the protein can be transiently, conditionally, or constitutively expressed in the cell.

[0692] F. RT-PN Fusion Proteins

[0693] The recombinant retron-based editing system described herein contemplates fusion proteins comprising a programmable nuclease (PN) and a RT, optionally joined by a linker. The application contemplates any suitable programmable nuclease and RT (e.g., retron RTs of Table A) to be combined in a single fusion protein. In one embodiment, the RT is joined to the N-terminus of the PN. In another embodiment, the RT is joined to the C-terminus of the PN. The Examples of PNs and RTs are each defined herein.

[0694] In various embodiments, the fusion proteins may comprise any suitable structural configuration. For example, the fusion protein may comprise from the N-terminus to the C-terminus direction, a PN fused to a RT. In other embodiments, the fusion protein may comprise from the N-terminus to the C-terminus direction, a RT fused to a NP. The fused domain may optionally be joined by a linker, e.g., an amino acid sequence.

[0695] G. Nuclear Localization Signals

[0696] In various embodiments, any of the polypeptide components of the retron-based editing systems may be engineered with one or more nuclear localization signals, which help promote translocation of a protein into the cell nucleus. The polypeptides of the retron-based editing system may comprise any known NLS sequence, including any of those described in Cokol et al., “Finding nuclear localization signals,” EMBO Rep., 2000, 1(5): 411-415 and Freitas et al., “Mechanisms and Signals for the Nuclear Import of Proteins,” Current Genomics, 2009, 10(8): 550-7, each of which are incorporated herein by reference.

[0697] In various embodiments, the polypeptides disclosed herein may include one or more, preferably, at least two nuclear localization signals. The NLSs may be any known NLS sequence in the art. The NLSs may also be any future-discovered NLSs for nuclear localization. The NLSs also may be any naturally-occurring NLS, or any non-naturally occurring NLS (e.g., an NLS with one or more desired mutations). The term“nuclear localization sequence” or “NLS” refers to an amino acid sequence that promotes import of a protein into the cell nucleus, for example, by nuclear transport. Nuclear localization sequences are known in the art and would be apparent to the skilled artisan. For example, NLS sequences are described in Plank et al., International PCT application PCT/EP2000/011690, filed Nov. 23, 2000, published as WO/2001/038547 on May 31, 2001, the contents of which are incorporated herein by reference. In some embodiments, an NLS comprises the amino acid sequence PKKKRKV.

[0698] A representative nuclear localization signal is a peptide sequence that directs the protein to the nucleus of the cell in which the sequence is expressed. A nuclear localization signal is predominantly basic, can be positioned almost anywhere in a protein's amino acid sequence, generally comprises a short sequence of four amino acids (Autieri & Agrawal, (1998) J. Biol. Chem. 273: 14731-37, incorporated herein by reference) to eight amino acids, and is typically rich in lysine and arginine residues (Magin et al., (2000) Virology 274: 11-16, incorporated herein by reference). Nuclear localization signals often comprise proline residues. A variety of nuclear localization signals have been identified and have been used to effect transport of biological molecules from the cytoplasm to the nucleus of a cell. See, e.g., Tinland et al., (1992) Proc. Natl. Acad. Sci. U.S.A.89:7442-46; Moede et al., (1999) FEBS Lett. 461:229-34, which is incorporated by reference. Translocation is currently thought to involve nuclear pore proteins.

[0699] Most NLSs can be classified in three general groups: (i) a monopartite NLS exemplified by the SV40 large T antigen NLS (PKKKRKV); (ii) a bipartite motif consisting of two basic domains separated by a variable number of spacer amino acids and exemplified by the Xenopus nucleoplasmin NLS (KRXXXXXXXXXXKKKL); and (iii) noncanonical sequences such as M9 of the hnRNP A1 protein, the influenza virus nucleoprotein NLS, and the yeast Gal4 protein NLS (Dingwall and Laskey 1991). Nuclear localization signals appear at various points in the amino acid sequences of proteins. NLS's have been identified at the N-terminus, the C-terminus and in the central region of proteins. Thus, the disclosure provides polypeptides that may be modified with one or more NLSs at the C-terminus, the N-terminus, as well as at in internal region of a polypeptide (including a fusion protein).

[0700] The present disclosure contemplates any suitable means by which to modify a polypeptide to include one or more NLSs. In one aspect, a polypeptide (e.g., a programmable nuclease) may be engineered to express with a translationally fused NLS at its N-terminus or its C-terminus (or both), i.e., to form a polypeptide-NLS fusion construct. In addition, the NLSs may include various amino acid linkers or spacer regions encoded between a polypeptide and the N-terminally, C-terminally, or internally-attached NLS amino acid sequence, e.g, and in the central region of proteins.

[0701] Thus, the present disclosure also provides for nucleotide constructs, vectors, and host cells for expressing fusion proteins that comprise a polypeptide and one or more NLSs.

[0702] H. DNA-Repair Modulating Biomolecules

[0703] In certain embodiments, the engineered retron described herein (e.g., an engineered nucleic acid construct or engineered nucleic acid-enzyme construct described herein) further comprises or encodes a DNA-repair modulating biomolecule, which may further enhance the efficiency of integration of a transgene on the heterologous nucleic acid by homology dependent repair (HDR).

[0704] In certain embodiments, the DNA-repair modulating biomolecule comprises a Nonhomologous end joining (NHEJ) inhibitor.

[0705] In certain embodiments, the DNA-repair modulating biomolecule comprises a homologous directed repair (HDR) promoter.

[0706] In certain embodiments, the DNA-repair modulating biomolecule comprises a NHEJ inhibitor and an HDR promoter.

[0707] In certain embodiments, the DNA-repair modulating biomolecule enhances or improves more precise genome editing and/or the efficiency of homologous recombination, compared to the otherwise identical embodiment without the DNA-repair modulating biomolecule.

[0708] HDR promoters and/or NHEJ inhibitors can, in some embodiments, comprise one or more small molecules. Systems bearing recombination enhancers such as small molecules that activate HDR and suppress NHEJ locally at the genomic site of the DNA damage can be tailored in their placement on the engineered systems to further enhance their efficiency. In general, the small molecule recombination enhancers can be synthesized to bear linkers and a functional group, such as maleimide for reacting with a thiol group on a Cys residue of a protein, for chemical conjugation to the engineered systems. Use of commercially available functionalized PEG linkers (alkyne, azide, cyclooctyne etc.) can also be employed for conjugation, and orthogonal conjugation chemistries can be utilized for the multivalent display.

[0709] Conjugation sites can be readily identified where modifications do not affect the potency of the recombination enhancers selected.

[0710] In certain embodiments, multivalent display of one or more DNA-repair modulating biomolecule can be affected, including multiple moieties of NHEJ inhibitors, HDR promoters, or a combination thereof. See, for example, “Genomic targeting of epigenetic probes using a chemically tailored Cas9 system” by Liszczak et al., Proc Natl Acad Sci U.S.A. 114: 681-686, 2017 (incorporated herein by reference). In certain embodiments, multivalent display of small molecule compounds can be achieved through sortase loop proteins used as a scaffold for their display.

[0711] In some embodiments, the DNA-repair modulating biomolecule may comprise an HDR promoter. The HDR promoter may comprise small molecules, such as RSI or analogs thereof. In certain embodiments, the HDR promoter stimulates RAD51 activity or RAD52 motif protein 1 (RDMl) activity. In certain embodiments, the HDR promoter comprises Nocodazole, which can result in higher HDR selection.

[0712] In certain embodiments, the HDR promoter may be administered prior to the delivery of the engineered retron described herein.

[0713] In certain embodiments, the HDR promoter locally enhances HDR without NHEJ inhibition. For example, RAD5l is a protein involved in strand exchange and the search for homology regions during HDR repair. In certain embodiments, the HDR promoter is phenylbenzamide RSI, identified as a small-molecule RAD51-stimulator (see WO2019/135816 at [0200]-[0204], specifically incorporated herein by reference).

[0714] In certain embodiments, the DNA-repair modulating biomolecule comprises C-terminal binding protein interacting protein (CtIP) or a functional fragment or homolog thereof. CtIP is a key protein in early steps of homologous recombination. According to this embodiment, the CtIP or the functional fragment or homolog thereof can be linked (e.g., fused) to the RT or the sequence-specific nuclease (e.g., a CRISPR/Cas effector enzyme, a ZFN, a TALEN, a meganuclease, TnpB, IscB, or a restriction endonuclease (RE)), and stimulates transgene integration by HDR.

[0715] In certain embodiments, the CtIP fragment is a minimal N-terminal fragment of the wild-type CtIP, such as the N-terminal fragment comprising residues 1-296 of the full-length CtIP (the HE for HDR enhancer), as described in Charpentier et al. (Nature Comm., DOI: 10.1038/s41467-018-03475-7, incorporated herein by reference), shown to be sufficient to stimulate HDR. The activity of the fragment depends on CDK phosphorylation sites (e.g., S233, T245, and S276) and the multimerization domain essential for CtIP activity in homologous recombination. Thus alternative fragments comprising the CDK phosphorylation sites and the multimerization domain essential for CtIP activity are also within the scope of the invention.

[0716] In certain embodiments, the DNA-repair modulating biomolecule comprises a dominant negative 53BP1.

[0717] In certain embodiments, the DNA-repair modulating biomolecule comprises a cell cycle-specific degradation tag, such as the degradation domain of the (human) Geminin, and the (murine) CyclinB2.

[0718] In certain embodiments, the DNA-repair modulating biomolecule comprises CyclinB2, a member of the B-type cyclins that associate with p34cdc2, and an essential component of the cell cycle regulatory machinery. CRISPR-mediated knock-in efficiency may be increased by promoting the relative increase in Cas9 activity in G2 phase of the cell cycle, when HDR is more active. In certain embodiments, the degradation domains of the (human) Geminin and (murine) CyclinB2 can be used as either N- or C-terminal fusion (e.g., fusions with a Cas, such as Cas9, or the retron RT) to serve as the DNA-repair modulating biomolecule. These domains are known to determine a cell-cycle specific profile of chimeric proteins, namely an increase in their relative concentration in S and G2 compared to G1, high-jacking the conventional CyclinB2 and Geminin degradation pathways. This produces active Geminin-Cas9 and CyclinB2-Cas9 chimeric proteins, which are degraded in a cell-cycle-dependent manner. Such chimeras shift the repair of the DSBs to the HDR repair pathway compared to the commonly used Cas9.

[0719] While not wishing to be bound by particular theory, it is believed that the application of such cell cycle-specific degradation tags permits/promotes more efficient/secure gene editing.

[0720] In certain embodiments, the DNA-repair modulating biomolecule comprises a Rad family member protein, such as Rad50, Rad51, Rad52, etc., which functions to promote foreign DNA integration into a host chromosome. Specifically, Rad52 is an important homologous recombinant protein, and its complex with Rad51 plays a key role in HDR, mainly involved in the regulation of foreign DNA in eukaryotes. Key steps in the process of HR include repair mediated by Rad51 and strand exchange. Co-expression of Rad52 as a DNA-repair modulating biomolecule significantly enhances the likelihood of HDR by, e.g., three-fold.

[0721] In certain embodiments, the DNA-repair modulating biomolecule comprises a RAD52 protein as, e.g., either an N- or a C-terminal fusion.

[0722] In certain embodiments, the DNA-repair modulating biomolecule comprises a RAD52 motif protein 1 (RDM1) that functions similarly as RAD52. RDM1 has been shown to be able to repair DSBs caused by DNA replication, prevent G2 or M cell cycle arrest, and improve HDR selection.

[0723] In certain embodiments, the DNA-repair modulating biomolecule comprises a dominant negative version of the tumor suppressor p53-binding protein 1 (53BP1). The wild-type protein 53BP1 is a key regulator of the choice between NHEJ and HDR—it is a pro-NHEJ factor which limits HDR by blocking DNA end resection, and also by inhibiting BRCA1 recruitment to DSB sites. It has been shown that global inhibition of 53BP1 by a ubiquitin variant significantly improves Cas9-mediated HDR frequency in non-hematopoietic and hematopoietic cells with single-strand oligonucleotide delivery or double-strand donor in AAV.

[0724] In certain embodiments, the dominant negative (DN) version of the 53BP1 comprises the minimal focus forming region, but lacks domains outside this region, e.g., towards the N-terminus and tandem C-terminal BRCT repeats that recruit key effectors involved in NHEJ, such as RIFI-PTIP and EXPAND, respectively. The 53BP1 adapter protein is recruited to specific histone marks at sites of DSBs via this minimal focus forming region, which comprises several conserved domains including an oligomerization domain (OD), a glycine-arginine rich (GAR) motif, a Tudor domain, and an adjacent ubiquitin-dependent recruitment (UDR) motif. The Tudor domain mediates interactions with histone H4 dimethylated at K2023.

[0725] In certain embodiments, a dominant negative version of 53BP1 (DN1S) suppresses the accumulation of endogenous 53BP1 and downstream NHEJ proteins at sites of DNA damage, while upregulating the recruitment of the BRCA1 HDR protein. Such a DN version of the 53BP1 can be used as the DNA-repair modulating biomolecule, either as an N- or a C-terminal fusion (such as a Cas9 fusion, to locally inhibit NHEJ at the Cas9-target site defined by its gRNA, while promoting an increase in HDR, and does not globally affect NHEJ, thereby improving cell viability).

[0726] In certain embodiments, the DNA-repair modulating biomolecule comprises an NHEJ inhibitor, such as an inhibitor of DNA ligase IV, a KU inhibitor (e.g., KU70 or KU80), a DNA-PKc inhibitor, or an artemis inhibitor.

[0727] In certain embodiments, the NHEJ inhibitor inhibits the NHEJ pathway, enhances HDR, or modulates both. In certain embodiments, the NHEJ inhibitor is a small molecule inhibitor.

[0728] In certain embodiments, the small molecule inhibitor of the NHEJ pathway comprises an SCR7 analog, for example, PK66, PK76, PK409.

[0729] In certain embodiments, the NHEJ inhibitor comprises a KU inhibitor, for example, KU5788, and KU0060648.

[0730] In certain embodiments, a small molecule NHEJ inhibitor is linked to a polyglycine tripeptide through PEG for sortase-mediated ligation, as described in WO2019/135816, Guimaraes et al., Nat Protoc 8:1787-99, 2013; Theile et al., Nat Protoc 8:1800-7, 2013; and Schmohl et al., Curr Opin Chem Biol 22:122-8, 2014 (all incorporated herein by reference). The same means can also be used for attaching small molecule HDR enhancers to protein.

[0731] An exemplary method for conjugating a small molecule DNA-repair modulating biomolecule without loss of activity is described in WO2019135816, where SCR-7 conjugation of a poly-glycine peptide with the para-carboxylic moiety at ring 4 retained activity of the inhibitor, with rings 1, 2 and 3 of the molecule having involvement in the target-engagement, providing a simple and effective strategy to ligate a small molecule NHEJ inhibitor to the system described herein (e.g., to the sequence-specific nuclease including Cas enzymes, or to the RT) to precisely enhance HDR pathway near a nucleic acid target site.

[0732] In certain embodiments, a nucleic acid targeting moiety conjugates based on small molecule inhibitor of DNA-dependent protein kinase (DNA-PK) or heterodimeric Ku (KU70/KU80) can be utilized. KU-0060648 is one potent KU-inhibitors, which can also be functionalized with poly-glycine and used for recombination enhancement.

[0733] In certain embodiments, the DNA-repair modulating biomolecule comprises the Tumor Suppressor p53. p53 plays a direct role in DNA repair, including HR regulation, where it affects the extension of new DNA, thereby affecting HDR selection. In vivo, p53 binds to the nuclear matrix and is a rate-limiting factor in repairing DNA structure. p53 regulates DNA repair processes in almost all eukaryotes via transactivation-dependent and -independent pathways, but only the transactivation-independent function of p53 is involved in HR regulation. Wild-type p53 protein can link double stranded breaks to form intact DNA, as well as also playing a role in inhibiting NHEJ. p53 interacts with HR-related proteins, including Rad51, where it controls HR through direct interaction with Rad51.

[0734] I. Vectors for Expression of Engineered Retrons

[0735] Delivery of an engineered retron to a cell can generally be accomplished with or without vectors. Delivery of the ncRNA encoded by the engineered retron generally does not require a vector used to produce the ncRNA from the engineered retron. For example, the ncRNA can be packaged directly into a delivery vehicle such as a lipid nanoparticle and delivered into a host cell, as described in other sections.

[0736] The engineered retrons (or vectors containing them) may be introduced into any type of cell, including any cell from a prokaryotic, eukaryotic, or archaeon organism, including bacteria, archaea, fungi, protists, plants (e.g., monocotyledonous and dicotyledonous plants); and animals (e.g., vertebrates and invertebrates). Examples of animals that may be transfected with an engineered retron include, without limitation, vertebrates such as fish, birds, mammals (e.g., human and non-human primates, farm animals, pets, and laboratory animals), reptiles, and amphibians.

[0737] The engineered retrons can be introduced into a single cell or a population of cells. Cells from tissues, organs, and biopsies, as well as recombinant cells, genetically modified cells, cells from cell lines cultured in vitro, and artificial cells (e.g., nanoparticles, liposomes, polymersomes, or microcapsules encapsulating nucleic acids) may all be transfected with the engineered retrons.

[0738] The engineered retrons can be introduced into cellular fragments, cell components, or organelles (e.g., mitochondria in animal and plant cells, plastids (e.g., chloroplasts) in plant cells and algae).

[0739] Cells may be cultured or expanded after transfection with the engineered retron.

[0740] Methods of introducing nucleic acids into a host cell are well known in the art. Commonly used methods include chemically induced transformation, typically using divalent cations (e.g., CaCl₂)), dextran-mediated transfection, polybrene mediated transfection, lipofectamine and LT-1 mediated transfection, electroporation, protoplast fusion, encapsulation of nucleic acids in liposomes, and direct microinjection of the nucleic acids comprising engineered retrons into nuclei. See, e.g., Sambrook et al. (2001) Molecular Cloning, a laboratory manual, 3rd edition, Cold Spring Harbor Laboratories, New York, Davis et al. (1995) Basic Methods in Molecular Biology, 2nd edition, McGraw-Hill, and Chu et al. (1981) Gene 13:197; herein incorporated by reference in their entireties.

[0741] Methods for genetic transformation of plant cells are known in the art and include those set forth in US2022/0145296, and U.S. Pat. Nos. 8,575,425; 7,692,068; 8,802,934; 7,541,517; each of which is herein incorporated by reference in its entirety. See, also, Rakoczy-Trojanowska, M. (2002) Cell Mol Biol Lett. 7:849-858; Jones et al. (2005) Plant Methods 1:5; Rivera et al. (2012) Physics of Life Reviews 9:308-345; Bartlett et al. (2008) Plant Methods 4:1-12; Bates, G. W. (1999) Methods in Molecular Biology 111:359-366; Binns and Thomashow (1988) Annual Reviews in Microbiology 42:575-606; Christou, P. (1992) The Plant Journal 2:275-281; Christou, P. (1995) Euphytica 85:13-27; Tzfira et al. (2004) TRENDS in Genetics 20:375-383; Yao et al. (2006) Journal of Experimental Botany 57:3737-3746; Zupan and Zambryski (1995) Plant Physiology 107:1041-1047; and Jones et al. (2005) Plant Methods 1:5.

[0742] The plant cells that have been transformed may be grown into a transgenic organism, such as a plant, in accordance with conventional methods. See, for example, McCormick et al. (1986) Plant Cell Reports 5:81-84.

[0743] Plant material that may be transformed with the engineered retrons described herein includes plant cells, plant protoplasts, plant cell tissue cultures from which plants can be regenerated, plant calli, plant clumps, and plant cells that are intact in plants or parts of plants such as embryos, pollen, ovules, seeds, leaves, flowers, branches, fruit, kernels, ears, cobs, husks, stalks, roots, root tips, anthers, and the like. Progeny, variants, and mutants of the regenerated plants are also included within the scope of the disclosure, provided that these parts comprise the genetic modification introduced by the engineered retron. Further provided is a processed plant product or byproduct that retains the genetic modification introduced by the engineered retron.

[0744] The engineered retrons described herein may be used to produce transgenic plants with desired phenotypes, including but not limited to, increased disease resistance (e.g., increased viral, bacterial of fungal resistance), increased insect resistance, increased drought resistance, increased yield, and altered fruit ripening characteristics, sugar and oil composition, and color.

[0745] In some embodiments, the retron msr gene, msd gene, and/or ret gene are expressed in vitro from a vector, such as in an in vitro transcription system. The resulting ncRNA or msDNA can be isolated before being packaged and/or formulated for direct delivery into a host cell. For example, the isolated ncRNA or msDNA can be packaged/formulated in a delivery vehicle such as lipid nanoparticles as described in other sections.

[0746] In some embodiments, the retron msr gene, msd gene, and/or ret gene are expressed in vivo from a vector within a cell. The retron msr gene, msd gene, and/or ret gene can be introduced into a cell with a single vector or in multiple separate vectors to produce msDNA in a host subject.

[0747] In other embodiments, the retron msr gene, msd gene, and/or ret gene, and any other components of the retron-based genome editing systems described herein (e.g., guide RNA in trans, programmable nuclease (e.g., in trans)) may be expressed in vivo from RNA delivered to the cell. The retron msr gene, msd gene, and/or ret gene can be introduced into a cell with a single vector or in multiple separate vectors to produce msDNA in a host subject.

[0748] Vectors and/or nucleic acid molecules encoding the recombinant retron-based genome editing system or components thereof can include control elements operably linked to the retron sequences, which allow for the production of msDNA either in vitro, or in vivo in the subject species. For example, the retron msr gene, msd gene, and/or ret gene can be operably linked to a promoter to allow expression of the retron reverse transcriptase and/or the msDNA product. In some embodiments, heterologous sequences encoding desired products of interest (e.g., polynucleotide encoding polypeptide or regulatory RNA, donor polynucleotide for gene editing, or protospacer DNA for molecular recording) may be inserted in the msr gene and/or msd gene.

[0749] Any eukaryotic, archaeal, or prokaryotic cell, capable of being transfected with a vector or retron delivery system comprising the engineered retron sequences, may be used to produce the msDNA in vivo. The ability of constructs to produce the msDNA along with other retron-encoded products can be empirically determined. For example the transfected cell can be assayed either through phenotypic changes that occur due to the introduced sequences or by direct DNA sequencing.

[0750] In some embodiments, the engineered retron is produced by a vector system comprising one or more vectors. In the vector system, the msr gene, the msd gene, and/or the ret gene may be provided by the same vector (i.e., cis arrangement of all such retron elements), wherein the vector comprises a promoter operably linked to the msr gene and/or the msd gene. In some embodiments, the promoter is further operably linked to the ret gene. In other embodiments, the vector further comprises a second promoter operably linked to the ret gene. Alternatively, the ret gene may be provided by a second vector that does not include the msr gene and/or the msd gene (i.e., trans arrangement of msr-msd and ret). In yet other embodiments, the msr gene, the msd gene, and the ret gene are each provided by different vectors (i.e., trans arrangement of all retron elements).

[0751] Numerous vectors are available for use in the vector or vector system, including but not limited to, linear polynucleotides, polynucleotides associated with ionic or amphiphilic compounds, plasmids, and viruses.

[0752] Examples of viral vectors include, but are not limited to, adenoviral vectors, adeno-associated virus (AAV) vectors, retroviral vectors, lentiviral vectors, and the like. An expression construct can be replicated in a living cell, or it can be made synthetically.

[0753] In some embodiments, the nucleic acid comprising an engineered retron sequence is under transcriptional control of a promoter. In some embodiments, the promoter is competent for initiating transcription of an operably linked coding sequence by a RNA polymerase I, II, or III.

[0754] Exemplary promoters for mammalian cell expression include the SV40 early promoter, a CMV promoter such as the CMV immediate early promoter (see, U.S. Pat. Nos. 5,168,062 and 5,385,839, incorporated herein by reference in their entireties), the mouse mammary tumor virus LTR promoter, the adenovirus major late promoter (Ad MLP), and the herpes simplex virus promoter, among others. Other nonviral promoters, such as a promoter derived from the murine metallothionein gene, will also find use for mammalian expression.

[0755] Exemplary promoters for plant cell expression include the CaMV 35S promoter (Odell et al., 1985, Nature 313:810-812); the rice actin promoter (McElroy et al., 1990, Plant Cell 2:163-171); the ubiquitin promoter (Christensen et al., 1989, Plant Mol. Biol. 12:619-632; and Christensen et al., 1992, Plant Mol. Biol. 18:675-689); the pEMU promoter (Last et al., 1991, Theor. Appl. Genet. 81:581-588); and the MAS promoter (Velten et al., 1984, EMBO J. 3:2723-2730).

[0756] In additional embodiments, the retron-based vectors may also comprise tissue-specific promoters to start expression only after it is delivered into a specific tissue. Non-limiting exemplary tissue-specific promoters include B29 promoter, CD14 promoter, CD43 promoter, CD45 promoter, CD68 promoter, desmin promoter, elastase-1 promoter, endoglin promoter, fibronectin promoter, Flt-1 promoter, GFAP promoter, GPIIb promoter, ICAM-2 promoter, INF-b promoter, Mb promoter, Nphs1 promoter, OG-2 promoter, SP-B promoter, SYN1 promoter, and WASP promoter.

[0757] These and other promoters can be obtained from or incorporated into commercially available plasmids, using techniques well known in the art. See, e.g., Sambrook et al., supra.

[0758] In some embodiments, one or more enhancer elements is/are used in association with the promoter to increase expression levels of the constructs. Examples include the SV40 early gene enhancer, as described in Dijkema et al., EMBOJ (1985) 4:761, the enhancer/promoter derived from the long terminal repeat (LTR) of the Rous Sarcoma Virus, as described in Gorman et al., Proc. Natl. Acad. Sci. USA (1982b) 79:6777, and elements derived from human CMV, as described in Boshart et al., Cell (1985) 41:521, such as elements included in the CMV intron A sequence. All such sequences are incorporated herein by reference.

[0759] In one embodiment, an expression vector for expressing an engineered retron, including the msr gene, msd gene, and/or ret gene comprises a promoter operably linked to a polynucleotide encoding the msr gene, msd gene, and/or ret gene.

[0760] In some embodiments, the vector or vector system also comprises a transcription terminator/polyadenylation signal. Examples of such sequences include, but are not limited to, those derived from SV40, as described in Sambrook et al., supra, as well as a bovine growth hormone terminator sequence (see, e.g., U.S. Pat. No. 5,122,458).

[0761] Additionally, 5′-UTR sequences can be placed adjacent to the coding sequence to further enhance the expression. Such sequences may include UTRs comprising an internal ribosome entry site (IRES). Inclusion of an IRES permits the translation of one or more open reading frames from a vector. The IRES element attracts a eukaryotic ribosomal translation initiation complex and promotes translation initiation. See, e.g., Kaufman et al., Nuc. Acids Res. (1991) 19:4485-4490; Gurtu et al., Biochem. Biophys. Res. Comm. (1996) 229:295-298: Rees et al., BioTechniques (1996) 20:102-110; Kobayashi et al., BioTechniques (1996) 21:399-402; and Mosser et al., BioTechniques (199722 ISO-161)c. A multitude of IRES sequences are known and include sequences derived from a wide variety of viruses, such as from leader sequences of picomaviruses such as the encephalomyocarditis virus (EMCV) UTR (Jang et al. Virol. (1989) 63:1651-1660). the polio leader sequence, the hepatitis A virus leader, the hepatitis C virus IRES, human rhinovirus type 2 IRES (Dobrikova et al., Proc. Natl. Acad. Sci. (2003) 100(251:15125-151301)). an IRES element from the foot and mouth disease virus (Ramesh et al., Nucl. Acid Res. (1996) 24:2697-2700), a giardiavirus IRES (Garlapati et al., J Biol. Chem. (2004) 279(51):3389-33971) and the like. A variety of nonviral IRES sequences will also find use herein, including, but not limited to IRES sequences from yeast, as well as the human angiotensin II type 1 receptor IRES (Martin et al., Mol. Cell Endocrinol. (2003) 212:51-61), fibroblast growth factor IRESs (FGF-1 IRES and FGF-2 IRES, Martineau et al. (2004) Mol. Cell. Biol. 24(17): 7622-7635), vascular endothelial growth factor IRES (Baranick et al. (2008) Proc. Natl. Acad Sci. U.S.A. 105(12):4733-4738, Stein et al. (1998) Mol. Cell. Biol. 18(6):3112-3119, Bert et al. (2006) RNA 12(6): 1074-1083), and insulin-like growth factor 2 IRES (Pedersen et al. (2002) Biochem. J. 363(Pt 1):37-44).

[0762] These elements are commercially available in plasmids sold, e.g., by Clontech (Mountain View, Calif.), Invivogen (San Diego, Calif.), Addgene (Cambridge, Mass.) and GeneCopoeia (Rockville, Md.). See also IRESite: The database of experimentally verified IRES structures (iresite.org). An IRES sequence may be included in a vector, for example, to express multiple bacteriophage recombination proteins for recombineering or an RNA-guided nuclease (e.g., Cas9) for HDR in combination with a retron reverse transcriptase from an expression cassette.

[0763] In some embodiments, a polynucleotide encoding a viral self-cleaving 2A peptide, such as a T2A peptide, can be used to allow production of multiple protein products (e.g., Cas9, bacteriophage recombination proteins, retron reverse transcriptase) from a single vector or a single transcription unit under one promoter. One or more 2A linker peptides can be inserted between the coding sequences in the multicistronic construct. The 2A peptide, which is self-cleaving, allows co-expressed proteins from the multicistronic construct to be produced at equimolar levels. 2A peptides from various viruses may be used, including, but not limited to 2A peptides derived from the foot-and-mouth disease virus, equine rhinitis A virus, Jhosea asigna virus and porcine teschovirus-1. See, e.g., Kim et al. (2011) PLoS One 6(4): e18556, Trichas et al. (2008) BMC Biol. 6:40, Provost et al. (2007) Genesis 45(10): 625-629, Furler et al. (2001) Gene Ther. 8(11):864-873; herein incorporated by reference in their entireties.

[0764] In some embodiments, the expression construct comprises a plasmid suitable for transforming a bacterial host. Numerous bacterial expression vectors are known to those of skill in the art, and the selection of an appropriate vector is a matter of choice. Bacterial expression vectors include, but are not limited to, pACYC177, pASK75, pBAD, pBADM, pBAT, pCal, pET, pETM, pGAT, pGEX, pHAT, pKK223, pMal, pProEx, pQE, and pZA31 Bacterial plasmids may contain antibiotic selection markers (e.g., ampicillin, kanamycin, erythromycin, carbenicillin, streptomycin, or tetracycline resistance), a lacZ gene (b-galactosidase produces blue pigment from x-gal substrate), fluorescent markers (e.g., GFP. mCherry), or other markers for selection of transformed bacteria. See, e.g., Sambrook et al., supra.

[0765] In other embodiments, the expression construct comprises a plasmid suitable for transforming a yeast cell. Yeast expression plasmids typically contain a yeast-specific origin of replication (ORI) and nutritional selection markers (e.g., HIS3, URA3, LYS2, LEU2, TRP1, METIS, ura4+, leu1+, ade6+), antibiotic selection markers (e.g., kanamycin resistance), fluorescent markers (e.g., mCherry), or other markers for selection of transformed yeast cells. The yeast plasmid may further contain components to allow shuttling between a bacterial host (e.g., E coif) and yeast cells. A number of different types of yeast plasmids are available including yeast integrating plasmids (Yip), which lack an ORI and are integrated into host chromosomes by homologous recombination; yeast replicating plasmids (YRp), which contain an autonomously replicating sequence (ARS) and can replicate independently; yeast centromere plasmids (YCp), which are low copy vectors containing a part of an ARS and part of a centromere sequence (CEN); and yeast episomal plasmids (YEp), which are high copy number plasmids comprising a fragment from a 2 micron circle (a natural yeast plasmid) that allows for 50 or more copies to be stably propagated per cell.

[0766] In other embodiments, the expression construct does not comprise a plasmid suitable for transforming a yeast cell.

[0767] In other embodiments, the expression construct comprises a virus or engineered construct derived from a viral genome. A number of viral based systems have been developed for gene transfer into mammalian cells. These include adenoviruses, retroviruses (g-retroviruses and lentiviruses), poxviruses, adeno-associated viruses, baculoviruses, and herpes simplex viruses (see e.g., Wamock et al. (2011) Methods Mol. Biol. 737:1-25; Walther et al. (2000) Drugs 60(2):249-271; and Lundstrom (2003) Trends Biotechnol. 21(3): 117-122; herein incorporated by reference in their entireties). The ability of certain viruses to enter cells via receptor-mediated endocytosis, to integrate into host cell genomes and express viral genes stably and efficiently have made them attractive candidates for the transfer of foreign genes into mammalian cells.

[0768] For example, retroviruses provide a convenient platform for gene delivery systems. Selected sequences can be inserted into a vector and packaged in retroviral particles using techniques known in the art. The recombinant virus can then be isolated and delivered to cells of the subject either in vivo or ex vivo. A number of retroviral systems have been described (U.S. Pat. No. 5,219,740; Miller and Rosman (1989) BioTechniques 7:980-990; Miller, A. D. (1990) Human Gene Therapy 1:5-14; Scarpa et al. (1991) Virology 180:849-852; Bums et al. (1993) Proc. Natl. Acad. Sci. USA 90:8033-8037; Boris-Lawrie and Temin (1993) Cur. Opin. Genet. Develop. 3:102-109; and Ferry et al. (2011) Curr. Pharm. Des. 17(24): 2516-2527). Lentiviruses are a class of retroviruses that are particularly useful for delivering polynucleotides to mammalian cells because they are able to infect both dividing and nondividing cells (see e.g., Lois et al. (2002) Science 295:868-872; Durand et al. (2011) Viruses 3(2): 132-159; herein incorporated by reference).

[0769] A number of adenoviral vectors have also been described. Unlike retroviruses which integrate into the host genome, adenoviruses persist extrachromosomally thus minimizing the risks associated with insertional mutagenesis.

[0770] Additionally, various adeno-associated vims (AAV) vector systems have been developed for gene delivery. AAV vectors can be readily constructed using techniques well known in the art. See, e.g., U.S. Pat. Nos. 5,173,414 and 5,139,941; International Publication Nos. WO 92/01070 (published 23 Jan. 1992) and WO 93/03769 (published 4 Mar. 1993); Lebkowski et al., Molec. Cell. Biol. (1988) 8:3988-3996; Vincent et al., Vaccines 90 (1990) (Cold Spring Harbor LaboratoryPress); Carter, B. J. Current Opinion in Biotechnology (1992) 3:533-539; Muzyczka, N. Current Topics in Microbiol and Immunol. (1992) 158:97-129; Kotin, R. M. Human Gene Therapy (1994) 5:793-801; Shelling and Smith, Gene Therapy (1994) 1:165-169; and Zhou et al., J. Exp. Med. (1994) 179:1867-1875.

[0771] Another vector system useful for delivering nucleic acids encoding the engineered retrons is the enterically administered recombinant poxvirus vaccines described by Small, Jr., P. A., et al. (U.S. Pat. No. 5,676,950, issued Oct. 14, 1997, herein incorporated by reference).

[0772] Other viral vectors include those derived from the pox family of viruses, including vaccinia virus and avian poxvirus. By way of example, vaccinia virus recombinants expressing a nucleic acid molecule of interest (e.g., engineered retron) can be constructed as follows. The DNA encoding the particular nucleic acid sequence is first inserted into an appropriate vector so that it is adjacent to a vaccinia promoter and flanking vaccinia DNA sequences, such as the sequence encoding thymidine kinase (TK). This vector is then used to transfect cells which are simultaneously infected with vaccinia. Homologous recombination serves to insert the vaccinia promoter plus the gene encoding the sequences of interest into the viral genome. The resulting TK-recombinant can be selected by culturing the cells in the presence of 5-bromodeoxyuridine and picking viral plaques resistant thereto.

[0773] In some embodiments, avipoxviruses, such as the fowlpox and canarypox viruses, can also be used to deliver the nucleic acid molecules of interest. The use of an avipox vector is particularly desirable in human and other mammalian species since members of the avipox genus can only productively replicate in susceptible avian species and therefore are not infective in mammalian cells. Methods for producing recombinant avipoxviruses are known in the art and employ genetic recombination, as described above with respect to the production of vaccinia viruses. See, e.g., WO 91/12882; WO 89/03429; and WO 92/03545.

[0774] Molecular conjugate vectors, such as the adenovirus chimeric vectors described in Michael et al., J. Biol. Chem. (1993) 268:6866-6869 and Wagner et al., Proc. Natl. Acad. Sci. USA (1992) 89:6099-6103, can also be used for gene delivery.

[0775] Members of the alphavirus genus, such as, but not limited to, vectors derived from the Sindbis virus (SIN), Semliki Forest virus (SFV), and Venezuelan Equine Encephalitis virus (VEE), will also find use as viral vectors for delivering the polynucleotides of the present invention. For a description of Sindbis-virus derived vectors useful for the practice of the instant methods, see, Dubensky et al. (1996) J. Virol. 70:508-519; and International Publication Nos. WO 95/07995, WO 96/17072; as well as, Dubensky, Jr., T. W., et al., U.S. Pat. No. 5,843,723, issued Dec. 1, 1998, and Dubensky, Jr., T. W., U.S. Pat. No. 5,789,245, issued Aug. 4, 1998, both herein incorporated by reference. Particularly preferred are chimeric alphavirus vectors comprised of sequences derived from Sindbis virus and Venezuelan equine encephalitis virus. See, e.g., Perri et al. (2003) J. Virol. 77: 10394-10403 and International Publication Nos. WO 02/099035, WO 02/080982, WO 01/81609, and WO 00/61772; herein incorporated by reference in their entireties.

[0776] A vaccinia-based infection/transfection system can be conveniently used to provide for inducible, transient expression of the nucleic acids of interest (e.g., engineered retron) in a host cell. In this system, cells are first infected in vitro with a vaccinia virus recombinant that encodes the bacteriophage T7 RNA polymerase. This polymerase displays exquisite specificity in that it only transcribes templates bearing T7 promoters. Following infection, cells are transfected with the nucleic acid of interest, driven by a T7 promoter. The polymerase expressed in the cytoplasm from the vaccinia virus recombinant transcribes the transfected DNA into RNA. The method provides for high level, transient, cytoplasmic production of large quantities of RNA. See, e.g., Elroy-Stein and Moss, Proc. Natl. Acad. Sci. USA (1990) 87:6743-6747; Fuerst et al., Proc. Natl. Acad. Sci. USA (1986) 83:8122-8126.

[0777] In other approaches to infection with vaccinia or avipox virus recombinants, or to the delivery of nucleic acids using other viral vectors, an amplification system can be used that will lead to high level expression following introduction into host cells. Specifically, a T7 RNA polymerase promoter preceding the coding region for T7 RNA polymerase can be engineered. Translation of RNA derived from this template will generate T7 RNA polymerase which in turn will transcribe more templates. Concomitantly, there will be a cDNA whose expression is under the control of the T7 promoter. Thus, some of the T7 RNA polymerase generated from translation of the amplification template RNA will lead to transcription of the desired gene. Because some T7 RNA polymerase is required to initiate the amplification, T7 RNA polymerase can be introduced into cells along with the template(s) to prime the transcription reaction. The polymerase can be introduced as a protein or on a plasmid encoding the RNA polymerase. For a further discussion of T7 systems and their use for transforming cells, see, e.g., International Publication No. WO 94/26911; Studier and Moffatt, J. Mol. Biol. (1986) 189:113-130; Deng and Wolff, Gene (1994) 143:245-249; Gao et al., Biochem. Biophys. Res. Commun. (1994) 200:1201-1206; Gao and Huang, Nuc. Acids Res. (1993) 21:2867-2872; Chen et al., Nuc. Acids Res. (1994) 22:2114-2120; and U.S. Pat. No. 5,135,855.

[0778] Insect cell expression systems, such as baculovirus systems, can also be used and are known to those of skill in the art and described in, e.g., Baculovirus and Insect Cell Expression Protocols (Methods in Molecular Biology, D. W. Murhammer ed., Humana Press, 2nd edition, 2007) and L. King The Baculovirus Expression System: A laboratory guide (Springer, 1992). Materials and methods for baculovirus/insect cell expression systems are commercially available in kit form from, inter alia, Thermo Fisher Scientific (Waltham, Mass.) and Clontech (Mountain View, Calif.).

[0779] Plant expression systems can also be used for transforming plant cells. Generally, such systems use virus-based vectors to transfect plant cells with heterologous genes. For a description of such systems see, e.g., Porta et al., Mol. Biotech. (1996) 5:209-221; and Hackland et al., Arch. Virol. (1994) 139:1-22.

[0780] To obtain expression of the engineered retron or the ncRNA encoded thereby, the expression construct or the ncRNA must be delivered into a cell. This delivery may be accomplished in vitro, as in laboratory procedures for transforming cells lines, or in vivo or ex vivo, as in the treatment of certain disease states. One mechanism for delivery is via viral infection where the expression construct is encapsulated in an infectious viral particle.

[0781] Several non-viral methods for the transfer of expression constructs into cultured cells also are contemplated. These include the use of calcium phosphate precipitation, DEAE-dextran, electroporation, direct microinjection, DNA-loaded liposomes, lipofectamine-DNA complexes, cell sonication, gene bombardment using high velocity microprojectiles, and receptor-mediated transfection (see, e.g., Graham and Van Der Eb (1973) Virology 52:456-467; Chen and Okayama (1987) Mol. Cell Biol. 7:2745-2752; Rippe et al. (1990) Mol. Cell Biol. 10:689-695; Gopal (1985) Mol. Cell Biol. 5:1188-1190; Tur-Kaspa et al. (1986) Mol. Cell. Biol. 6:716-718; Potter et al. (1984) Proc. Natl. Acad. Sci. USA 81:7161-7165); Harland and Weintraub (1985) J. Cell Biol. 101:1094-1099); Nicolau & Sene (1982) Biochim. Biophys. Acta 721:185-190; Fraley et al. (1979) Proc. Natl. Acad. Sci. USA 76:3348-3352; Fechheimer et al. (1987) Proc Natl. Acad. Sci. USA 84:8463-8467; Yang et al. (1990) Proc. Natl. Acad. Sci. USA 87:9568-9572; Wu and Wu (1987) J. Biol. Chem. 262:4429-4432; Wu and Wu (1988) Biochemistry 27:887-892; herein incorporated by reference). Some of these techniques may be successfully adapted for in vivo or ex vivo use.

[0782] Once the expression construct has been delivered into the cell the nucleic acid comprising the engineered retron sequence may be positioned and expressed at different sites. In some embodiments, the nucleic acid comprising the engineered retron sequence may be stably integrated into the genome of the cell. This integration may be in the cognate location and orientation via homologous recombination (gene replacement) or it may be integrated in a random, non-specific location (gene augmentation). In yet further embodiments, the nucleic acid may be stably maintained in the cell as a separate, episomal segment of DNA. Such nucleic acid segments or episomes encode sequences sufficient to permit maintenance and replication independent of or in synchronization with the host cell cycle. How the expression construct is delivered to a cell and where in the cell the nucleic acid remains is dependent on the type of expression construct employed.

[0783] In some embodiments, the expression construct may simply consist of naked recombinant DNA or plasmids comprising the engineered retron. Transfer of the construct may be performed by any of the methods mentioned above which physically or chemically permeabilize the cell membrane. This is particularly applicable for transfer in vitro but it may be applied to in vivo use as well. Dubensky et al. (Proc. Natl. Acad. Sci. USA (1984) 81:7529-7533) successfully injected polyomavirus DNA in the form of calcium phosphate precipitates into liver and spleen of adult and newborn mice demonstrating active viral replication and acute infection. Benvenisty & Neshif (Proc. Natl. Acad. Sci. USA (1986) 83:9551-9555) also demonstrated that direct intraperitoneal injection of calcium phosphate-precipitated plasmids results in expression of the transfected genes. It is envisioned that DNA encoding an engineered retron of interest may also be transferred in a similar manner in vivo and express retron products.

[0784] In still another embodiment, a naked DNA expression construct may be transferred into cells by particle bombardment. This method depends on the ability to accelerate DNA-coated microprojectiles to a high velocity allowing them to pierce cell membranes and enter cells without killing them (Klein et al. (1987) Nature 327:70-73). Several devices for accelerating small particles have been developed. One such device relies on a high voltage discharge to generate an electrical current, which in turn provides the motive force (Yang et al. (1990) Proc. Natl. Acad. Sci. USA 87:9568-9572). The microprojectiles may consist of biologically inert substances, such as tungsten or gold beads.

[0785] In a further embodiment, the expression construct may be delivered using liposomes. Liposomes are vesicular structures characterized by a phospholipid bilayer membrane and an inner aqueous medium. Multilamellar liposomes have multiple lipid layers separated by aqueous medium. They form spontaneously when phospholipids are suspended in an excess of aqueous solution. The lipid components undergo self-rearrangement before the formation of closed structures and entrap water and dissolved solutes between the lipid bilayers (Ghosh & Bachhawat (1991) Liver Diseases, Targeted Diagnosis and Therapy Using Specific Receptors and Ligands, Wu et al. (Eds.), Marcel Dekker, NY, 87-104). Also contemplated is the use of lipofectamine-DNA complexes.

[0786] In some embodiments, the liposome may be complexed with a hemagglutinating virus (HVJ). This has been shown to facilitate fusion with the cell membrane and promote cell entry of liposome-encapsulated DNA (Kaneda et al. (1989) Science 243:375-378). In other embodiments, the liposome may be complexed or employed in conjunction with nuclear non-histone chromosomal proteins (HMG-I) (Kato et al. (1991) J. Biol. Chem. 266(6):3361-3364).

[0787] In yet further embodiments, the liposome may be complexed or employed in conjunction with both HVJ and HMG-I. Where a bacterial promoter is employed in the DNA construct, it also will be desirable to include within the liposome an appropriate bacterial polymerase.

[0788] Other expression constructs which can be employed to deliver a nucleic acid into cells are receptor-mediated delivery vehicles. These take advantage of the selective uptake of macromolecules by receptor-mediated endocytosis in almost all eukaryotic cells. Because of the cell type-specific distribution of various receptors, the delivery can be highly specific (Wu and Wu (1993) Adv. Drug Delivery Rev. 12:159-167). Receptor-mediated gene targeting vehicles generally consist of two components: a cell receptor-specific ligand and a DNA-binding agent. Several ligands have been used for receptor-mediated gene transfer. The most extensively characterized ligands are asialoorosomucoid (ASOR) and transferrin (see, e.g., Wu and Wu (1987), supra; Wagner et al. (1990) Proc. Natl. Acad. Sci. USA 87(9):3410-3414). A synthetic neoglycoprotein, which recognizes the same receptor as ASOR, has been used as a gene delivery vehicle (Ferkol et al. (1993) FASEB J. 7:1081-1091; Perales et al. (1994) Proc. Natl. Acad. Sci. USA 91(9):4086-4090), and epidermal growth factor (EGF) has also been used to deliver genes to squamous carcinoma cells (Myers, EPO 0273085).

[0789] In other embodiments, the delivery vehicle may comprise a ligand and a liposome. For example, Nicolau et al. (Methods Enzymol. (1987) 149:157-176) employed lactosy 1-ceramide, a galactose-terminal asialoganglioside, incorporated into liposomes and observed an increase in the uptake of the insulin gene by hepatocytes. Thus, it is feasible that a nucleic acid encoding a particular gene also may be specifically delivered into a cell by any number of receptor-ligand systems with or without liposomes. Also, antibodies to surface antigens on cells can similarly be used as targeting moieties.

[0790] In some embodiments, the promoters that may be used in the retron delivery systems described herein may be constitutive, inducible, or tissue-specific. In some embodiments, the promoters may be a constitutive promoters. Non-limiting exemplary constitutive promoters include cytomegalovirus immediate early promoter (CMV), simian virus (SV40) promoter, adenovirus major late (MLP) promoter, Rous sarcoma virus (RSV) promoter, mouse mammary tumor virus (MMTV) promoter, phosphoglycerate kinase (PGK) promoter, elongation factor-alpha (EFla) promoter, ubiquitin promoters, actin promoters, tubulin promoters, immunoglobulin promoters, a functional fragment thereof, or a combination of any of the foregoing. In some embodiments, the promoter may be a CMV promoter. In some embodiments, the promoter may be a truncated CMV promoter. In other embodiments, the promoter may be an EFla promoter. In some embodiments, the promoter may be an inducible promoter. Non-limiting exemplary inducible promoters include those inducible by heat shock, light, chemicals, peptides, metals, steroids, antibiotics, or alcohol. In some embodiments, the inducible promoter may be one that has a low basal (non-induced) expression level, such as, e.g., the Tet-On® promoter (Clontech). In some embodiments, the promoter may be a tissue-specific promoter. In some embodiments, the tissue-specific promoter is exclusively or predominantly expressed in liver tissue. Non-limiting exemplary tissue-specific promoters include B29 promoter, CD14 promoter, CD43 promoter, CD45 promoter, CD68 promoter, desmin promoter, elastase-1 promoter, endoglin promoter, fibronectin promoter, Flt-1 promoter, GFAP promoter, GPIIb promoter, ICAM-2 promoter, INF-b promoter, Mb promoter, Nphs1 promoter, OG-2 promoter, SP-B promoter, SYN1 promoter, and WASP promoter.

[0791] J. Delivery Systems and Methods of Delivery

[0792] The engineered retrons can be delivered by any known delivery system such as those described above. Non-limiting examples of delivery vehicles include lipid particles (e.g. Lipid nanoparticles (LNPs)), non-lipid nanoparticles, exosomes, liposomes, micelles, viral particles, Stable nucleic-acid-lipid particles (SNALPs), lipoplexes/polyplexes, DNA nanoclews, Gold nanoparticles, iTOP, Streptolysin O (SLO), multifunctional envelope-type nanodevice (MEND), lipid-coated mesoporous silica particles, inorganic nanoparticles, and polymeric delivery technology (e.g., polymer-based particles).

### All-RNA Delivery System and RNA Ratios

[0793] In various embodiments, the retron editing systems disclosed herein may be delivered in an “all-RNA” format. As used herein, the term “all-RNA” format refers to the fact that each of the components of a retron editing system (e.g., the retron RT, the programmable nuclease, the sgRNA, and the ncRNA) are delivered and/or administered as RNA. In some embodiments, the RNA components may be delivered to cells and/or tissues by direct means, such as electroporation or transfection. In other embodiments, the RNA components may be delivered to cells and/or tissues by way of a delivery vehicle, such as an LNP or liposome.

[0794] In various embodiments, the retron editing systems described herein may comprise a coding RNA (e.g., linear or circular mRNA) that encodes a retron reverse transcriptase (e.g., any RT from Table X or Table A), a coding RNA (e.g., linear or circular mRNA) that encodes a programmable nuclease, a retron ncRNA (e.g., a ncRNA from Table B), and a guide RNA.

[0795] In some embodiments, RT and nuclease components may be encoded on the same coding RNA molecule. The proteins may also be expressed from separate coding RNA molecules. In still other embodiments, the RT and the nuclease components can be fused together as a singular fusion polypeptide having an RT domain and a nuclease domain optionally joined by a linker.

[0796] In addition, in some embodiments, the ncRNA and the guide RNA may be fused together as a single RNA molecule. For example, the guide RNA may be located at the 5′ end of the ncRNA. In other embodiments, the guide RNA may be located at the 3′ end of the ncRNA. In some embodiments, the ncRNA may comprise a guide RNA at both the 3′ and the 5′ ends of the ncRNA.

[0797] In still other embodiments, the ncRNA and the guide RNA may be separate molecules, i.e., delivered separately.

[0798] In still other embodiments, the retron editing system may include both a ncRNA-guide RNA fusion and an additional guide RNA provided as a separate molecule.

[0799] In various embodiments, the different RNA components of the all-RNA retron editing system can be combined and administered (e.g., directly or within a delivery vehicle) in different ratios. In some embodiments, the ratios of such RNA components or species can be expressed as molar ratios.

[0800] For example, the molar ratio of RT coding RNA to nuclease coding RNA can be about 1:1, about 1:1.5, about 1:2, about 1:2.5, about 1:3, about 1:4, about 1:5, about 1:6, about 1:7, about 1:8, about 1:9, about 1:10, about 1:12, about 1:15, about 1:20. Useful ranges include from 1:1 to 1:2, from 1:1.5 to 1:4, from 1:2 to 1:4, from 1:2 to 1:8, from 1:2 to 1:10, from 1:3 to 1:9, from 1:3 to 1:12, from 1:3 to 1:15, from 1:4 to 1:8, from 1:4 to 1:12, from 1:4 to 1:20, from 1:5 to 1:10, from 1:5 to 1:15, from 1:5 to 1:20, from 1:10 to 1:20, or from 1:10 to 1:40.

[0801] In another example, the molar ratio of nuclease coding RNA to RT coding RNA can be about 1:1, about 1:1.5, about 1:2, about 1:2.5, about 1:3, about 1:4, about 1:5, about 1:6, about 1:7, about 1:8, about 1:9, about 1:10, about 1:12, about 1:15, about 1:20. Useful ranges include from 1:1 to 1:2, from 1:1.5 to 1:4, from 1:2 to 1:4, from 1:2 to 1:8, from 1:2 to 1:10, from 1:3 to 1:9, from 1:3 to 1:12, from 1:3 to 1:15, from 1:4 to 1:8, from 1:4 to 1:12, from 1:4 to 1:20, from 1:5 to 1:10, from 1:5 to 1:15, from 1:5 to 1:20, from 1:10 to 1:20, or from 1:10 to 1:40.

[0802] In still another example, the molar ratio of ncRNA or ncRNA-guide RNA fusion to separate guide RNA can be about 1:1, about 1:1.5, about 1:2, about 1:2.5, about 1:3, about 1:4, about 1:5, about 1:6, about 1:7, about 1:8, about 1:9, about 1:10, about 1:12, about 1:15, about 1:20. Useful ranges include from 1:1 to 1:2, from 1:1.5 to 1:4, from 1:2 to 1:4, from 1:2 to 1:8, from 1:2 to 1:10, from 1:3 to 1:9, from 1:3 to 1:12, from 1:3 to 1:15, from 1:4 to 1:8, from 1:4 to 1:12, from 1:4 to 1:20, from 1:5 to 1:10, from 1:5 to 1:15, from 1:5 to 1:20, from 1:10 to 1:20, or from 1:10 to 1:40.

[0803] In still another example, the molar ratio of separate guide RNA to ncRNA or ncRNA-guide RNA fusion can be about 1:1, about 1:1.5, about 1:2, about 1:2.5, about 1:3, about 1:4, about 1:5, about 1:6, about 1:7, about 1:8, about 1:9, about 1:10, about 1:12, about 1:15, about 1:20. Useful ranges include from 1:1 to 1:2, from 1:1.5 to 1:4, from 1:2 to 1:4, from 1:2 to 1:8, from 1:2 to 1:10, from 1:3 to 1:9, from 1:3 to 1:12, from 1:3 to 1:15, from 1:4 to 1:8, from 1:4 to 1:12, from 1:4 to 1:20, from 1:5 to 1:10, from 1:5 to 1:15, from 1:5 to 1:20, from 1:10 to 1:20, or from 1:10 to 1:40.

[0804] In still another example, the molar ratio of ncRNA to separate guide RNA can be about 1:1, about 1:1.5, about 1:2, about 1:2.5, about 1:3, about 1:4, about 1:5, about 1:6, about 1:7, about 1:8, about 1:9, about 1:10, about 1:12, about 1:15, about 1:20. Useful ranges include from 1:1 to 1:2, from 1:1.5 to 1:4, from 1:2 to 1:4, from 1:2 to 1:8, from 1:2 to 1:10, from 1:3 to 1:9, from 1:3 to 1:12, from 1:3 to 1:15, from 1:4 to 1:8, from 1:4 to 1:12, from 1:4 to 1:20, from 1:5 to 1:10, from 1:5 to 1:15, from 1:5 to 1:20, from 1:10 to 1:20, or from 1:10 to 1:40.

[0805] In still another example, the molar ratio of separate guide RNA to ncRNA can be about 1:1, about 1:1.5, about 1:2, about 1:2.5, about 1:3, about 1:4, about 1:5, about 1:6, about 1:7, about 1:8, about 1:9, about 1:10, about 1:12, about 1:15, about 1:20. Useful ranges include from 1:1 to 1:2, from 1:1.5 to 1:4, from 1:2 to 1:4, from 1:2 to 1:8, from 1:2 to 1:10, from 1:3 to 1:9, from 1:3 to 1:12, from 1:3 to 1:15, from 1:4 to 1:8, from 1:4 to 1:12, from 1:4 to 1:20, from 1:5 to 1:10, from 1:5 to 1:15, from 1:5 to 1:20, from 1:10 to 1:20, or from 1:10 to 1:40.

[0806] In still another example, the molar ratio of a coding RNA (e.g., encoding RT and/or nuclease) to ncRNA or ncRNA-guide RNA fusion, as the case may be, can be about 1:1, about 1:1.5, about 1:2, about 1:2.5, about 1:3, about 1:4, about 1:5, about 1:6, about 1:7, about 1:8, about 1:9, about 1:10, about 1:12, about 1:15, about 1:20. Useful ranges include from 1:1 to 1:2, from 1:1.5 to 1:4, from 1:2 to 1:4, from 1:2 to 1:8, from 1:2 to 1:10, from 1:3 to 1:9, from 1:3 to 1:12, from 1:3 to 1:15, from 1:4 to 1:8, from 1:4 to 1:12, from 1:4 to 1:20, from 1:5 to 1:10, from 1:5 to 1:15, from 1:5 to 1:20, from 1:10 to 1:20, or from 1:10 to 1:40.

[0807] In still another example, the molar ratio of a coding RNA encoding a retron RT to ncRNA or ncRNA-guide RNA fusion, as the case may be, can be about 1:1, about 1:1.5, about 1:2, about 1:2.5, about 1:3, about 1:4, about 1:5, about 1:6, about 1:7, about 1:8, about 1:9, about 1:10, about 1:12, about 1:15, about 1:20. Useful ranges include from 1:1 to 1:2, from 1:1.5 to 1:4, from 1:2 to 1:4, from 1:2 to 1:8, from 1:2 to 1:10, from 1:3 to 1:9, from 1:3 to 1:12, from 1:3 to 1:15, from 1:4 to 1:8, from 1:4 to 1:12, from 1:4 to 1:20, from 1:5 to 1:10, from 1:5 to 1:15, from 1:5 to 1:20, from 1:10 to 1:20, or from 1:10 to 1:40.

[0808] In still another example, the molar ratio of a coding RNA encoding a programmable nuclease to ncRNA or ncRNA-guide RNA fusion, as the case may be, can be about 1:1, about 1:1.5, about 1:2, about 1:2.5, about 1:3, about 1:4, about 1:5, about 1:6, about 1:7, about 1:8, about 1:9, about 1:10, about 1:12, about 1:15, about 1:20. Useful ranges include from 1:1 to 1:2, from 1:1.5 to 1:4, from 1:2 to 1:4, from 1:2 to 1:8, from 1:2 to 1:10, from 1:3 to 1:9, from 1:3 to 1:12, from 1:3 to 1:15, from 1:4 to 1:8, from 1:4 to 1:12, from 1:4 to 1:20, from 1:5 to 1:10, from 1:5 to 1:15, from 1:5 to 1:20, from 1:10 to 1:20, or from 1:10 to 1:40.

[0809] In still another example, the molar ratio of a coding RNA encoding a retron RT or a nuclease to a separate guide RNA can be about 1:1, about 1:1.5, about 1:2, about 1:2.5, about 1:3, about 1:4, about 1:5, about 1:6, about 1:7, about 1:8, about 1:9, about 1:10, about 1:12, about 1:15, about 1:20. Useful ranges include from 1:1 to 1:2, from 1:1.5 to 1:4, from 1:2 to 1:4, from 1:2 to 1:8, from 1:2 to 1:10, from 1:3 to 1:9, from 1:3 to 1:12, from 1:3 to 1:15, from 1:4 to 1:8, from 1:4 to 1:12, from 1:4 to 1:20, from 1:5 to 1:10, from 1:5 to 1:15, from 1:5 to 1:20, from 1:10 to 1:20, or from 1:10 to 1:40.

[0810] In still another example, the molar ratio of a separate guide RNA to a coding RNA encoding a retron RT or a nuclease can be about 1:1, about 1:1.5, about 1:2, about 1:2.5, about 1:3, about 1:4, about 1:5, about 1:6, about 1:7, about 1:8, about 1:9, about 1:10, about 1:12, about 1:15, about 1:20. Useful ranges include from 1:1 to 1:2, from 1:1.5 to 1:4, from 1:2 to 1:4, from 1:2 to 1:8, from 1:2 to 1:10, from 1:3 to 1:9, from 1:3 to 1:12, from 1:3 to 1:15, from 1:4 to 1:8, from 1:4 to 1:12, from 1:4 to 1:20, from 1:5 to 1:10, from 1:5 to 1:15, from 1:5 to 1:20, from 1:10 to 1:20, or from 1:10 to 1:40.

[0811] In certain embodiments, the amount of ncRNA-sgRNA relative to RT mRNA is augmented. In certain embodiments the RT mRNA: ncRNA-sgRNA ratio is about 1:1.5, about 1:2, about 1:2.5, about 1:3, about 1:4, about 1:5, about 1:6, about 1:7, about 1:8, about 1:9, about 1:10, about 1:12, about 1:15, about 1:20. Useful ranges include from 1:1 to 1:2, from 1:1.5 to 1:4, from 1:2 to 1:4, from 1:2 to 1:8, from 1:2 to 1:10, from 1:3 to 1:9, from 1:3 to 1:12, from 1:3 to 1:15, from 1:4 to 1:8, from 1:4 to 1:12, from 1:4 to 1:20, from 1:5 to 1:10, from 1:5 to 1:15, from 1:5 to 1:20, from 1:10 to 1:20, or from 1:10 to 1:40. In certain embodiments, an RT-Cas9 (or Cas9-RT) fusion is encoded by an mRNA. In certain embodiments, the RT-Cas9 mRNA: ncRNA-sgRNA ratio is about 1:1.5, about 1:2, about 1:2.5, about 1:3, about 1:4, about 1:5, about 1:6, about 1:7, about 1:8, about 1:9, about 1:10, about 1:12, about 1:15, about 1:20. Useful ranges include from 1:1 to 1:2, from 1:1.5 to 1:4, from 1:2 to 1:4, from 1:2 to 1:8, from 1:2 to 1:10, from 1:3 to 1:9, from 1:3 to 1:12, from 1:3 to 1:15, from 1:4 to 1:8, from 1:4 to 1:12, from 1:4 to 1:20, from 1:5 to 1:10, from 1:5 to 1:15, from 1:5 to 1:20, from 1:10 to 1:20, or from 1:10 to 1:40. In certain embodiments, multiple genetic loci are targeted hence the ncRNA-sgRNA includes a mixture of ncRNA-sgRNA species and the same ratios and ranges are applicable.

Format of ncRNA and Guide RNA

[0812] In certain embodiments, the ncRNA and the guide RNA can be delivered as a single molecule, i.e., with the guide RNA fused to the 5′ and/or 3′ end of the ncRNA. The ncRNA may have guide RNAs located at both ends in some embodiments.

[0813] In other embodiments, the guide RNA and ncRNA may be provided and/or delivered as separate components. As shown in Example 4, separation of the guide RNA from the ncRNA can result in increased editing efficiency.

[0814] In still other embodiments, a ncRNA-gRNA fusion may be co-delivered with a separate guide RNA.

Modified ncRNAs

[0815] In still other embodiments, the ncRNAs disclosed herein may be modified by introducing additional RNA motifs into the ncRNAs, e.g., at the 5′ and 3′ termini of the ncRNAs, or even at positions therein between (e.g., in the msr or msd regions) to improve transcriptional production and/or stability and/or function (e.g., RT-DNA production). Such structures may include, but are not limited to RNA hairpins, RNA step-loops, RNA quadruplexes, cap structures, and poly(A) tails, or ribozyme functions and the like. Also, ncRNAs could also be modified to include one or more nuclear localization sequences.

[0816] Additional RNA motifs could also improve RT processivity of the ncRNA or enhance ncRNA activity by enhancing RT binding. Addition of dimerization motifs—such as kissing loops or a GNRA tetraloop/tetraloop receptor pair—at the 5′ and 3′ termini of the ncRNA could also result in effective circularization of the ncRNA, improving stability. Additionally, it is envisioned that addition of these motifs could enable the physical separation of ncRNA components, e.g., separation of the msr and msd regions. Short 5′ extensions or 3′ extensions to the ncRNA that form a small toehold hairpin at either or both ends of the ncRNA could also compete favorably against the annealing of intracomplementary regions along the length of the ncRNA. Finally, kissing loops could also be used to recruit other RNAs or proteins to the genomic site and enable swapping of RT activity from one RNA to the other.

[0817] ncRNAs could be further improved via directed evolution, in an analogous fashion to how protein function can be improved. Directed evolution could enhance ncRNA recognition by RT and/or reduce off-site targeting and/or indels and/or improve precise editing efficiency.

[0818] The present disclosure contemplates any such ways to further improve the stability and/or functionality of the ncRNAs disclosed here.

[0819] In some embodiments, the RNAs (including the guide RNAs and the ncRNAs) used in the compositions of the disclosure have undergone a chemical or biological modification to render them more stable. Exemplary modifications to an RNA include the depletion of a base (e.g., by deletion or by the substitution of one nucleotide for another) or modification of a base, for example, the chemical modification of a base. The phrase “chemical modifications” as used herein, includes modifications which introduce chemistries which differ from those seen in naturally occurring RNA, for example, covalent modifications such as the introduction of modified nucleotides, (e.g., nucleotide analogs, or the inclusion of pendant groups which are not naturally found in such mRNA molecules).

[0820] Other suitable polynucleotide modifications that may be incorporated into the RNAs used in the compositions of the disclosure include, but are not limited to, 4′-thio-modified bases: 4′-thio-adenosine, 4′-thio-guanosine, 4′-thio-cytidine, 4′-thio-uridine, 4′-thio-5-methyl-cytidine, 4′-thio-pseudouridine, and 4′-thio-2-thiouridine, pyridin-4-one ribonucleoside, 5-aza-uridine, 2-thio-5-aza-uridine, 2-thiouridine, 4-thio-pseudouridine, 2-thio-pseudouridine, 5-hydroxyuridine, 3-methyluridine, 5-carboxymethyl-uridine, 1-carboxymethyl-pseudouridine, 5-propynyl-uridine, 1-propynyl-pseudouridine, 5-taurinomethyluridine, 1-taurinomethyl-pseudouridine, 5-taurinomethyl-2-thio-uridine, 1-taurinomethyl-4-thio-uridine, 5-methyl-uridine, 1-methyl-pseudouridine, 4-thio-1-methyl-pseudouridine, 2-thio-1-methyl-pseudouridine, 1-methyl-1-deaza-pseudouridine, 2-thio-1-methyl-1-deaza-pseudouridine, dihydrouridine, dihydropseudouridine, 2-thio-dihydrouridine, 2-thio-dihydropseudouridine, 2-methoxyuridine, 2-methoxy-4-thio-uridine, 4-methoxy-pseudouridine, 4-methoxy-2-thio-pseudouridine, 5-aza-cytidine, pseudoisocytidine, 3-methyl-cytidine, N4-acetylcytidine, 5-formylcytidine, N4-methylcytidine, 5-hydroxymethylcytidine, 1-methyl-pseudoisocytidine, pyrrolo-cytidine, pyrrolo-pseudoisocytidine, 2-thio-cytidine, 2-thio-5-methyl-cytidine, 4-thio-pseudoisocytidine, 4-thio-1-methyl-pseudoisocytidine, 4-thio-1-methyl-1-deaza-pseudoisocytidine, 1-methyl-1-deaza-pseudoisocytidine, zebularine, 5-aza-zebularine, 5-methyl-zebularine, 5-aza-2-thio-zebularine, 2-thio-zebularine, 2-methoxy-cytidine, 2-methoxy-5-methyl-cytidine, 4-methoxy-pseudoisocytidine, 4-methoxy-1-methyl-pseudoisocytidine, 2-aminopurine, 2,6-diaminopurine, 7-deaza-adenine, 7-deaza-8-aza-adenine, 7-deaza-2-aminopurine, 7-deaza-8-aza-2-aminopurine, 7-deaza-2,6-diaminopurine, 7-deaza-8-aza-2,6-diaminopurine, 1-methyladenosine, N6-methyladenosine, N6-isopentenyladenosine, N6-(cis-hydroxyisopentenyl)adenosine, 2-methylthio-N6-(cis-hydroxyisopentenyl)adenosine, N6-glycinylcarbamoyladenosine, N6-threonylcarbamoyladenosine, 2-methylthio-N6-threonyl carbamoyladenosine, N6,N6-dimethyladenosine, 7-methyladenine, 2-methylthio-adenine, and 2-methoxy-adenine, inosine, 1-methyl-inosine, wyosine, wybutosine, 7-deaza-guanosine, 7-deaza-8-aza-guanosine, 6-thio-guanosine, 6-thio-7-deaza-guanosine, 6-thio-7-deaza-8-aza-guanosine, 7-methyl-guanosine, 6-thio-7-methyl-guanosine, 7-methylinosine, 6-methoxy-guanosine, 1-methylguanosine, N2-methylguanosine, N2,N2-dimethylguanosine, 8-oxo-guanosine, 7-methyl-8-oxo-guanosine, 1-methyl-6-thio-guanosine, N2-methyl-6-thio-guanosine, and N2,N2-dimethyl-6-thio-guanosine, and combinations thereof. The term modification also includes, for example, the incorporation of non-nucleotide linkages or modified nucleotides into the mRNA sequences of the present invention (e.g., modifications to one or both of the 3′ and 5′ ends of an mRNA molecule encoding a functional protein or enzyme). Such modifications include the addition of bases to an mRNA sequence (e.g., the inclusion of a poly A tail or a longer poly A tail), the alteration of the 3′ UTR or the 5′ UTR, complexing the mRNA with an agent (e.g., a protein or a complementary nucleic acid molecule), and inclusion of elements which change the structure of an RNA molecule (e.g., which form secondary structures).

[0821] In some embodiments, RNAs (e.g., ncRNAs) include a 5′ cap structure. A 5′ cap is typically added as follows: first, an RNA terminal phosphatase removes one of the terminal phosphate groups from the 5′ nucleotide, leaving two terminal phosphates; guanosine triphosphate (GTP) is then added to the terminal phosphates via a guanylyl transferase, producing a 5′5′5 triphosphate linkage; and the 7-nitrogen of guanine is then methylated by a methyltransferase. Examples of cap structures include, but are not limited to, m7G(5′)ppp (5′(A,G(5′)ppp(5′)A and G(5′)ppp(5′)G. Naturally occurring cap structures comprise a 7-methyl guanosine that is linked via a triphosphate bridge to the 5′-end of the first transcribed nucleotide, resulting in a dinucleotide cap of m7G(5′)ppp(5′)N, where N is any nucleoside. In vivo, the cap is added enzymatically. The cap is added in the nucleus and is catalyzed by the enzyme guanylyl transferase. The addition of the cap to the 5′ terminal end of RNA occurs immediately after initiation of transcription. The terminal nucleoside is typically a guanosine, and is in the reverse orientation to all the other nucleotides, i.e., G(5′)ppp(5′)GpNpNp.

[0822] Additional cap analogs include, but are not limited to, a chemical structures selected from the group consisting of m7GpppG, m7GpppA, m7GpppC; unmethylated cap analogs (e.g., GpppG); dimethylated cap analog (e.g., m2,7GpppG), trimethylated cap analog (e.g., m2,2,7GpppG), dimethylated symmetrical cap analogs (e.g., m7Gpppm7G), or anti reverse cap analogs (e.g., ARCA; m7,2′OmeGpppG, m72′dGpppG, m7,3′OmeGpppG, m7,3′dGpppG and their tetraphosphate derivatives) (see, e.g., Jemielity, J. et al., “Novel ‘anti-reverse’ cap analogs with superior translational properties”, RNA, 9: 1108-1122 (2003)).

[0823] Typically, the presence of a “tail” serves to protect the RNA (e.g., ncRNA) from exonuclease degradation. A poly A or poly U tail is thought to stabilize natural messengers and synthetic sense RNA. Therefore, in certain embodiments a long poly A or poly U tail can be added to an RNA molecule thus rendering the RNA more stable. Poly A or poly U tails can be added using a variety of art-recognized techniques. For example, long poly A tails can be added to synthetic or in vitro transcribed RNA using poly A polymerase (Yokoe, et al. Nature Biotechnology. 1996; 14: 1252-1256). A transcription vector can also encode long poly A tails. In addition, poly A tails can be added by transcription directly from PCR products. Poly A may also be ligated to the 3′ end of a sense RNA with RNA ligase (see, e.g., Molecular Cloning A Laboratory Manual, 2nd Ed., ed. by Sambrook, Fritsch and Maniatis (Cold Spring Harbor Laboratory Press: 1991 edition)).

[0824] Typically, the length of a poly A or poly U tail can be at least about 10, 50, 100, 200, 300, 400 at least 500 nucleotides. In some embodiments, a poly-A tail on the 3′ terminus of mRNA typically includes about 10 to 300 adenosine nucleotides (e.g., about 10 to 200 adenosine nucleotides, about 10 to 150 adenosine nucleotides, about 10 to 100 adenosine nucleotides, about 20 to 70 adenosine nucleotides, or about 20 to 60 adenosine nucleotides). In some embodiments, mRNAs include a 3′ poly(C) tail structure. A suitable poly-C tail on the 3′ terminus of mRNA typically include about 10 to 200 cytosine nucleotides (e.g., about 10 to 150 cytosine nucleotides, about 10 to 100 cytosine nucleotides, about 20 to 70 cytosine nucleotides, about 20 to 60 cytosine nucleotides, or about 10 to 40 cytosine nucleotides). The poly-C tail may be added to the poly-A or poly U tail or may substitute the poly-A or poly U tail.

[0825] RNAs according to the present disclosure (e.g., ncRNAs) may be synthesized according to any of a variety of known methods. For example, RNAs according to the present invention may be synthesized via in vitro transcription (IVT). Briefly, IVT is typically performed with a linear or circular DNA template containing a promoter, a pool of ribonucleotide triphosphates, a buffer system that may include DTT and magnesium ions, and an appropriate RNA polymerase (e.g., T3, T7 or SP6 RNA polymerase), DNAse I, pyrophosphatase, and/or RNAse inhibitor. The exact conditions will vary according to the specific application. An improved method of IVT of a ncRNA is disclosed in Example 5 herein.

[0826] In a particular embodiment (as exemplified in Example 6 herein), the ncRNAs can comprise an MS2 modification, as specific RNA hairpin structure recognized in nature by a certain MS2-binding protein. This domain can help to stabilize the ncRNA and improve the editing efficiency. The disclosure contemplates other similar modifications. A review of other such MS2-like domains are described in the art, for example, in Johansson et al., “RNA recognition by the MS2 phage coat protein,” Sem Virol., 1997, Vol. 8(3): 176-185; Delebecque et al., “Organization of intracellular reactions with rationally designed RNA assemblies,” Science, 2011, Vol. 333: 470-474; Mali et al., “Cas9 transcriptional activators for target specificity screening and paired nickases for cooperative genome engineering,” Nat. Biotechnol., 2013, Vol. 31: 833-838; and Zalatan et al., “Engineering complex synthetic transcriptional programs with CRISPR RNA scaffolds,” Cell, 2015, Vol. 160: 339-350, each of which are incorporated herein by reference in their entireties. Other systems include the PP7 hairpin, which specifically recruits the PCP protein, and the “com” hairpin, which specifically recruits the Com protein. See Zalatan et al. The nucleotide sequence of the MS2 hairpin (or equivalently referred to as the “MS2 aptamer”) is:

GCCAACATGAGGATCACCCATGTCTGCAGGGCC

### Lipid Nanoparticles

[0827] In some embodiments, the lipid delivery sytem includes lipid nanoparticles (LNP). In some embodiments the LNP are small solid or semi-solid particles possessing an exterior lipid layer with a hydrophilic exterior surface that is exposed to the non-LNP environment, an interior space which may aqueous (vesicle like) or non-aqueous (micelle like), and at least one hydrophobic inter-membrane space. LNP membranes may be lamellar or non-lamellar and may be comprised of 1, 2, 3, 4, 5 or more layers. In some embodiments, LNPs may comprise a nucleic acid (e.g. engineered retron) into their interior space, into the inter membrane space, onto their exterior surface, or any combination thereof.

[0828] In some embodiments, an LNP of the present disclosure comprises an ionizable lipid, a structural lipid, a PEGylated lipid (aka PEG lipid), and a phospholipid. In alternative embodiments, an LNP comprises an ionizable lipid, a structural lipid, a PEGylated lipid (aka PEG lipid), and a zwitterionic amino acid lipid. In some embodiments, an LNP further comprises a 5^{th} lipid, besides any of the aforementioned lipid components. In some embodiments, the LNP encapsulates one or more elements of the active agent of the present disclosure. In some embodiments, an LNP further comprises a targeting moiety covalently or non-covalently bound to the outer surface of the LNP. In some embodiments, the targeting moiety is a targeting moiety that binds to, or otherwise facilitates uptake by, cells of a particular organ system.

[0829] In some embodiments, an LNP has a diameter of at least about 20 nm, 30 nm, 40 nm, 50 nm, 60 nm, 70 nm, 80 nm, or 90 nm. In some embodiments, an LNP has a diameter of less than about 100 nm, 110 nm, 120 nm, 130 nm, 140 nm, 150 nm, or 160 nm. In some embodiments, an LNP has a diameter of less than about 100 nm. In some embodiments, an LNP has a diameter of less than about 90 nm. In some embodiments, an LNP has a diameter of less than about 80 nm. In some embodiments, an LNP has a diameter of about 60-100 nm. In some embodiments, an LNP has a diameter of about 75-80 nm.

[0830] In some embodiments, the lipid nanoparticle compositions of the present disclosure are described according to the respective molar ratios of the component lipids in the formulation. As a non-limiting example, the mol-% of the ionizable lipid may be from about 10 mol-% to about 80 mol-%. As a non-limiting example, the mol-% of the ionizable lipid may be from about 20 mol-% to about 70 mol-%. As a non-limiting example, the mol-% of the ionizable lipid may be from about 30 mol-% to about 60 mol-%. As a non-limiting example, the mol-% of the ionizable lipid may be from about 35 mol-% to about 55 mol-%. As a non-limiting example, the mol-% of the ionizable lipid may be from about 40 mol-% to about 50 mol-%.

[0831] In some embodiments, the mol-% of the phospholipid may be from about 1 mol-% to about 50 mol-%. In some embodiments, the mol-% of the phospholipid may be from about 2 mol-% to about 45 mol-%. In some embodiments, the mol-% of the phospholipid may be from about 3 mol-% to about 40 mol-%. In some embodiments, the mol-% of the phospholipid may be from about 4 mol-% to about 35 mol-%. In some embodiments, the mol-% of the phospholipid may be from about 5 mol-% to about 30 mol-%. In some embodiments, the mol-% of the phospholipid may be from about 10 mol-% to about 20 mol-%. In some embodiments, the mol-% of the phospholipid may be from about 5 mol-% to about 20 mol-%.

[0832] In some embodiments, the mol-% of the structural lipid may be from about 10 mol-% to about 80 mol-%. In some embodiments, the mol-% of the structural lipid may be from about 20 mol-% to about 70 mol-%. In some embodiments, the mol-% of the structural lipid may be from about 30 mol-% to about 60 mol-%. In some embodiments, the mol-% of the structural lipid may be from about 35 mol-% to about 55 mol-%. In some embodiments, the mol-% of the structural lipid may be from about 40 mol-% to about 50 mol-%.

[0833] In some embodiments, the mol-% of the PEG lipid may be from about 0.1 mol-% to about 10 mol-%. In some embodiments, the mol-% of the PEG lipid may be from about 0.2 mol-% to about 5 mol-%. In some embodiments, the mol-% of the PEG lipid may be from about 0.5 mol-% to about 3 mol-%. In some embodiments, the mol-% of the PEG lipid may be from about 1 mol-% to about 2 mol-%. In some embodiments, the mol-% of the PEG lipid may be about 1.5 mol-%.

i. Ionizable Lipids

[0834] In some embodiments, an LNP disclosed herein comprises an ionizable lipid. In some embodiments, an LNP comprises two or more ionizable lipids.

[0835] In some embodiments, an ionizable lipid has a dimethylamine or an ethanolamine head. In some embodiments, an ionizable lipid has an alkyl tail. In some embodiments, a tail has one or more ester linkages, which may enhance biodegradability. In some embodiments, a tail is branched, such as with 3 or more branches. In some embodiments, a branched tail may enhance endosomal escape. In some embodiments, an ionizable lipid has a pKa between 6 and 7, which may be measured, for example, by TNS assay.

[0836] In some embodiments, an ionizable lipid has a structure of any of the formulas disclosed below, and all formulas disclosed in a reference publication and patent application publication cited below. In some embodiments, an ionizable lipid comprises a head group of any structure or formula disclosed below. In some embodiments, an ionizable lipid comprises a bridging moiety of any structure or formula disclosed below. In some embodiments, an ionizable lipid comprises any tail group, or combination of tail groups disclosed below. The present disclosure contemplates all permutations and combinations of head group, bridging moiety and tail group, or tail groups, disclosed herein.

[0837] In some embodiments, a head, tail, or structure of an ionizable lipid is described in US patent application US20170210697A1.

[0838] In some embodiments, a compound has a structure according to formula 1:

[chemical structure]

wherein:
R¹ is selected from the group consisting of C₅₋₃₀ alkyl, C₅₋₂₀ alkenyl, —R*YR″, YR″, and —R″M′R′;
R² and R³ are independently selected from the group consisting of H, C1-14 alkyl, C2-14 alkenyl, —R*YR″, —YR″, and —R*OR″, or R² and R³, together with the atom to which they are attached, form a heterocycle or carbocycle;
R⁴ is selected from the group consisting of a C3.6 carbocycle, —(CH₂)nQ, —(CH2)nCHQR, —CHQR, CO(R)₂, and unsubstituted C1.6 alkyl, where Q is selected from a carbocycle, heterocycle, —OR, —O(CH₂)nN(R)₂, —C(O)OR, —OC(O)R, —CX₃, —CX₂H, —CXH₂, —CN, N(R)₂, —C(O)N(R)₂, —N(R)C(O)R, —N(R)S(O)₂R, —N(R)C(O)N(R)₂, —N(R)C(S)N(R)₂, —N(R)R⁸, —O(CH₂)ₙOR, —N(R)C(═NR⁹)N(R)₂—N(R)C(═CHR⁹)N(R)₂, —OC(O)N(R)₂, —N(R)C(O)OR, —N(OR)C(O)R, —N(OR)S(O)₂R, —N(OR)C(O)OR, —N(OR)C(O)N(R)₂, —N(OR)C(S)N(R)₂, —N(OR)C(—NR)N(R)—N(OR)C(═CHR)N(R)₂, —C(═NR⁹)N(R)₂, —C(═NR⁹)R, —C(O)N(R)OR, and —C(R)N(R)₂, C(O)OR, and each n is independently selected from 1, 2, 3, 4, and 5 or a head group disclosed in Table 1;
each R⁵ is independently selected from the group consisting of C1-3 alkyl, C2-3 alkenyl, and H;
each R⁶ is independently selected from the group consisting of C1-3 alkyl, C2-3 alkenyl, and H;
M and M′ are independently selected from —C(O)O—, —OC(O)—, —C(O)N(R′)—, —N(R′)C(O)—, —C(O)—, —C(S)—, —C(S)S—, —SC(S)—, —CH(OH)—, —P(O)(OR′)O—, —S(O)—, —S—S—, an aryl group, and a heteroaryl group;
R⁷ is selected from the group consisting of C1-3alkyl, C2-3 alkenyl, and H;
R⁸ is selected from the group consisting of C3-6 carbocycle and heterocycle;
R⁹ is selected from the group consisting of H. CN, NO₂, C1-6 alkyl, —OR, —S(O)2R, —S(O)₂N(R)₂, C2-6 alkenyl, C3-6 carbocycle and heterocycle;
each R is independently selected from the group consisting of C1-3 alkyl, C2-3 alkenyl, and H;
each R′ is independently selected from the group consisting of C1-18 alkyl, C2-18 alkenyl, —R*YR″, —YR″, and H;
each R″ is independently selected from the group consisting of C3-14 alkyl, C3-14 alkenyl, and H;
each R* is independently selected from the group consisting of C1-12 alkyl and C2-12 alkenyl:
each Y is independently a C3-6 carbocycle;
each X is independently selected from the group consisting of F, Cl, Br, and I;
each Q is —OH, —NHC(S)N(R)₂, —NHC(O)N(R)₂, —N(R)C(O)R, —N(R)S(O)₂R, —N(R)R⁸, —NHC(═NR⁹)N(R)₂, —NHC(═CHR)N(R⁹)₂, —OC(O)N(R)₂, —N(R)C(O)OR, heteroaryl or heterocycloalkyl; and
m is selected from 5, 6, 7, 8, 9, 10, 11, 12, and 13:
and wherein when R⁴ is —(CH₂)ₙQ, —(CH₂)ₙCHQR, —CHQR, or —CQ(R)₂, then (i) Q is not —N(R), when n is 1, 2, 3, 4 or 5, or (ii) Q is not 5, 6, or 7-membered heterocycloalkyl when n is 1 or 2.

[0839] In some embodiments, R⁴ is in Table 1.

[0840] In some embodiments, R⁴ in formula 1 is selected from head groups 1-47.

TABLE 1
Ionizable lipid head groups

| Head | |
|---|---|
| number | Structure |
| 1 | [chemical structure] |
| 2 | [chemical structure] |
| 3 | [chemical structure] |
| 4 | [chemical structure] |
| 5 | [chemical structure] |
| 6 | [chemical structure] |
| 7 | [chemical structure] |
| 8 | [chemical structure] |
| 9 | [chemical structure] |
| 10 | [chemical structure] |
| 11 | [chemical structure] |
| 12 | [chemical structure] |
| 13 | [chemical structure] |
| 04 | [chemical structure] |
| 15 | [chemical structure] |
| 16 | [chemical structure] |
| 17 | [chemical structure] |
| 18 | [chemical structure] |
| 19 | [chemical structure] |
| 20 | [chemical structure] |
| 21 | [chemical structure] |
| 22 | [chemical structure] |
| 23 | [chemical structure] |
| 24 | [chemical structure] |
| 25 | [chemical structure] |
| 26 | [chemical structure] |
| 27 | [chemical structure] |
| 28 | [chemical structure] |
| 29 | [chemical structure] |
| 30 | [chemical structure] |
| 31 | [chemical structure] |
| 32 | [chemical structure] |
| 33 | [chemical structure] |
| 34 | [chemical structure] |
| 35 | [chemical structure] |
| 36 | [chemical structure] |
| 37 | [chemical structure] |
| 38 | [chemical structure] |
| 39 | [chemical structure] |
| 40 | [chemical structure] |
| 41 | [chemical structure] |
| 42 | [chemical structure] |
| 43 | [chemical structure] |
| 44 | [chemical structure] |
| 45 | [chemical structure] |
| 46 | [chemical structure] |
| 47 | [chemical structure] |
| 48 | [chemical structure] |
| 49 | [chemical structure] |
| 50 | [chemical structure] |
| 51 | [chemical structure] |
| 52 | [chemical structure] |
| 53 | [chemical structure] |
| 54 | [chemical structure] |
| 55 | [chemical structure] |
| 56 | [chemical structure] |
| 57 | [chemical structure] |
| 58 | [chemical structure] |
| 59 | [chemical structure] |
| 60 | [chemical structure] |
| 61 | [chemical structure] |
| 62 | [chemical structure] |
| 63 | [chemical structure] |
| 64 | [chemical structure] |
| 65 | [chemical structure] |
| 66 | [chemical structure] |
| 67 | [chemical structure] |
| 68 | [chemical structure] |

[chemical structure]

[0841] In some embodiments, a subset of the compounds of formula 1 are also described by formula 1b:

[chemical structure]

wherein 1 is selected from 1, 2, 3, 4, and 5; M¹ is a bond or M′; R⁴ is unsubstituted C1-3 alkyl, or —(CH2)nQ, in which n is 2, 3, or 4, and Q is —OH, —NHC(S)N(R)₂, —NHC(O)N(R)₂, —N(R)C(O)R, —N(R)S(O)₂R, —N(R)R⁸, —NHC(═NR⁹)N(R)₂, —NHC(═CHR)N(R)₂, —OC(O)N(R)₂, —N(R)C(O)OR, heteroaryl or heterocycloalkyl; M and M′ are independently selected from —C(O)O—, —OC(O)—, —C(O)N(R′)—, —P(O)(OR′)O—, —S—S—, an aryl group, and a heteroaryl group; and R² and R3 are independently selected from the group consisting of H, C1-14 alkyl, and C2-14 alkenyl. In some embodiments, a head, tail, or structure of an ionizable lipid is described in international patent application PCT/US2018/058555.

[0842] In some embodiments, an ionizable lipid has a structure according to formula 2:

[chemical structure]

wherein:
one of L¹ or L² is —O(C═O)—, —(C═O)O—, —C(═O)—, —O—, —S(O)x-, —S—S—, —C(═O)S—, SC(═O)—, —NRaC(═O)—, —C(═O)NRa—, NRaC(═O)NRa—, —OC(═O)NRa— or —NRaC(═O)O—, and the other of L¹ or L² is —O(C═O)—, —(C═O)O—, —C(═O)—, —O—, —S(O)x-, —S—S—, —C(═O)S—, SC(═O)—, —NRaC(═O)—, —C(═O)NRa—, NRaC(═O)NRa—, —OC(═O)NRa— or —NRaC(═O)O— or a direct bond;
Ra is H or C1-C12 alkyl;
R^{1a} and R^{1b} are, at each occurrence, independently either (a) H or C1-C12 alkyl, or (b) R^{1a} is H or C1-C12 alkyl, and R^{1b} together with the carbon atom to which it is bound is taken together with an adjacent R^{1b} and the carbon atom to which it is bound to form a carbon-carbon double bond;
R^{2a} and R^{2b} are, at each occurrence, independently either (a) H or C1-C12 alkyl, or (b) R^{2a} is H or C1-C12 alkyl, and R^{2b} together with the carbon atom to which it is bound is taken together with an adjacent R^{2b} and the carbon atom to which it is bound to form a carbon-carbon double bond;
R^{3a} and R^{3b} are, at each occurrence, independently either (a) H or C1-C12 alkyl, or (b) R^{3a} is H or C1-C12 alkyl, and R^{3b} together with the carbon atom to which it is bound is taken together with an adjacent R^{3b} and the carbon atom to which it is bound to form a carbon-carbon double bond;
R^{4a} and R^{4b} are, at each occurrence, independently either (a) H or C1-C12 alkyl, or (b) R^{4a} is H or C1-C12 alkyl, and R^{4b} together with the carbon atom to which it is bound is taken together with an adjacent R^{4b} and the carbon atom to which it is bound to form a carbon-carbon double bond;
R⁵ and R⁶ are each independently methyl or cycloalkyl;
R⁷ is, at each occurrence, independently H or C1-C12 alkyl;
R⁸ and R⁹ are each independently unsubstituted C1-C12 alkyl; or R⁸ and R⁹, together with the nitrogen atom to which they are attached, form a 5, 6 or 7-membered heterocyclic ring comprising one nitrogen atom;
a and d are each independently an integer from 0 to 24;
b and c are each independently an integer from 1 to 24;
e is 1 or 2; and
x is 0, 1 or 2.

[0843] In some embodiments, an ionizable lipid has a structure according to formula 3:

[chemical structure]

wherein:
one of L¹ or L² is —O(C═O)—, —(C═O)O—, —C(═O)—, —O—, —S(O)x-, —S—S—, —C(═O)S—, SC(═O)—, —NRaC(═O)—, —C(═O)NRa—, NRaC(═O)NRa—, —OC(═O)NRa— or —NRaC(═O)O—, and the other of L¹ or L² is —O(C═O)—, —(C═O)O—, —C(═O)—, —O—, —S(O)x-, —S—S—, —C(═O)S—, SC(═O)—, —NRaC(═O)—, —C(═O)NRa—, NRaC(═O)NRa—, —OC(═O)NRa— or —NRaC(═O)O— or a direct bond;
G1 is C1-C2 alkylene, —(C═O)—, —O(C═O)—, —SC(═O)—, —NRaC(═O)— or a direct bond:
G2 is —C(═O)—, —(C═O)O—, —C(═O)S—, —C(═O)NRa— or a direct bond;
G3 is C1-C6 alkylene;
Ra is H or C1-C12 alkyl;
R^{1a} and R^{1b} are, at each occurrence, independently either: (a) H or C1-C12 alkyl; or (b) R^{1a} is H or C1-C12 alkyl, and R^{1b} together with the carbon atom to which it is bound is taken together with an adjacent R^{1b} and the carbon atom to which it is bound to form a carbon-carbon double bond;
R^{2a} and R^{2b} are, at each occurrence, independently either: (a) H or C1-C12 alkyl; or (b) R^{2a} is H or C1-C12 alkyl, and R^{2b} together with the carbon atom to which it is bound is taken together with an adjacent R^{2b} and the carbon atom to which it is bound to form a carbon-carbon double bond;
R^{3a} and R^{3b} are, at each occurrence, independently either (a): H or C1-C12 alkyl; or (b) R^{3a} is H or C1-C12 alkyl, and R^{3b} together with the carbon atom to which it is bound is taken together with an adjacent R^{3b} and the carbon atom to which it is bound to form a carbon-carbon double bond;
R^{4a} and R^{4b} are, at each occurrence, independently either: (a) H or C1-C12 alkyl; or (b) R⁴¹ is H or C1-C12 alkyl, and R^{4b} together with the carbon atom to which it is bound is taken together with an adjacent R^{b} and the carbon atom to which it is bound to form a carbon-carbon double bond;
R⁵ and R⁶ are each independently H or methyl;
R⁷ is C4-C20 alkyl;
R⁸ and R⁹ are each independently C1-C12 alkyl; or R⁸ and R⁹, together with the nitrogen atom to which they are attached, form a 5, 6 or 7-membered heterocyclic ring;
a, b, c and d are each independently an integer from 1 to 24; and x is 0, 1 or 2.
In some embodiments, an ionizable lipid has a structure according to formula 4:

[chemical structure]

wherein:
one of L¹ or L² is —O(C═O)—, —(C═O)O—, —C(═O)—, —O—, —S(O)x-, —S—S—, —C(═O)S—, SC(═O)—, —NRaC(═O)—, —C(═O)NRa—, NRaC(═O)NRa—, —OC(═O)NRa— or —NRaC(═O)O—, and the other of L¹ or L² is —O(C═O)—, —(C═O)O—, —C(═O)—, —O—, —S(O)x-, —S—S—, —C(═O)S—, SC(═O)—, —NRaC(═O)—, —C(═O)NRa—, NRaC(═O)NRa—, —OC(═O)NRa— or —NRaC(═O)O— or a direct bond;
G¹ and G² are each independently unsubstituted C1-C12 alkylene or C1-C12 alkenylene;
G³ is C1-C24 alkylene, C1-C24 alkenylene, C3-C8 cycloalkylene, C3-C8 cycloalkenylene;
Ra is H or C1-C12 alkyl;
R¹ and R² are each independently C6-C24 alkyl or C6-C24 alkenyl;
R³ is H, OR5, CN, —C(═O)OR4, —OC(═O)R⁴ or —NR5C(═O)R4;
R⁴ is C1-C12 alkyl;
R⁵ is H or C1-C6 alkyl; and
x is 0, 1 or 2.

[0844] In some embodiments, an ionizable lipid has a structure according to formula 5:

[chemical structure]

wherein:
one of G or G² is, at each occurrence, —O(C═O)—, —(C═O)O—, —C(═O)—, —O—, —S(O)y, —S—S—, —C(═O)S—, SC(═O)—, —N(Ra)C(═O)—, —C(═O)N(Ra)—, —N(Ra)C(═O)N(Ra)—, —OC(═O)N(Ra)— or —N(Ra)C(═O)O—, and the other of G1 or G2 is, at each occurrence, —O(C═O)—, —(C═O)O—, —C(═O)—, —O—, —S(O)y, —S—S—, —C(═O)S—, —SC(═O)—, —N(Ra)C(═O)—, —C(═O)N(Ra)—, —N(Ra)C(═O)N(Ra)—, —OC(═O)N(Ra)— or —N(Ra)C(═O)O— or a direct bond;
L is, at each occurrence, ˜O(C═O)—, wherein ˜ represents a covalent bond to X;

### X is CRa;

[0845] Z is alkyl, cycloalkyl or a monovalent moiety comprising at least one polar functional group when n is 1; or Z is alkylene, cycloalkylene or a polyvalent moiety comprising at least one polar functional group when n is greater than 1;
Ra is, at each occurrence, independently H, C1-C12 alkyl, C1-C12 hydroxylalkyl, C1-C12 aminoalkyl, C1-C12 alkylaminylalkyl, C1-C12 alkoxyalkyl, C1-C12 alkoxycarbonyl, C1-C12 alkylcarbonyloxy, C1-C12 alkylcarbonyloxyalkyl or C1-C12 alkylcarbonyl;
R is, at each occurrence, independently either: (a) H or C1-C12 alkyl; or (b) R together with the carbon atom to which it is bound is taken together with an adjacent R and the carbon atom to which it is bound to form a carbon-carbon double bond;
R¹ and R² have, at each occurrence, the following structure, respectively:

[chemical structure]

[0846] a¹ and a² are, at each occurrence, independently an integer from 3 to 12;
   b¹ and b² are, at each occurrence, independently 0 or 1;
   c¹ and c² are, at each occurrence, independently an integer from 5 to 10;
   d¹ and d² are, at each occurrence, independently an integer from 5 to 10;
   y is, at each occurrence, independently an integer from 0 to 2; and
   n is an integer from 1 to 6,
   wherein each alkyl, alkylene, hydroxylalkyl, aminoalkyl, alkylaminylalkyl, alkoxyalkyl, alkoxycarbonyl, alkylcarbonyloxy, alkylcarbonyloxyalkyl and alkylcarbonyl is optionally substituted with one or more substituent.

[0847] In some embodiments, an ionizable lipid has a structure according to formula 6:

[chemical structure]

wherein:
one of G¹ or G² is, at each occurrence, —O(C═O)—, —(C═O)O—, —C(═O)—, —O—, —S(O)y, —S—S—, —C(═O)S—, SC(═O)—, —N(Ra)C(═O)—, —C(═O)N(Ra)—, —N(Ra)C(═O)N(Ra)—, —OC(═O)N(Ra)— or —N(Ra)C(═O)O—, and the other of G1 or G2 is, at each occurrence, —O(C═O)—, —(C═O)O—, —C(═O)—, —O—, —S(O)y-, —S—S—, —C(═O)S—, —SC(═O)—, —N(Ra)C(═O)—, —C(═O)N(Ra)—, —N(Ra)C(═O)N(Ra)—, —OC(═O)N(Ra)— or —N(Ra)C(═O)O— or a direct bond;
L is, at each occurrence, ˜O(C═O)—, wherein ˜ represents a covalent bond to X;

### X is CRa;

[0848] Z is alkyl, cycloalkyl or a monovalent moiety comprising at least one polar functional group when n is 1; or Z is alkylene, cycloalkylene or a polyvalent moiety comprising at least one polar functional group when n is greater than 1;
Ra is, at each occurrence, independently H, C1-C12 alkyl, C1-C12 hydroxylalkyl, C1-C12 aminoalkyl, C1-C12 alkylaminylalkyl, C1-C12 alkoxyalkyl, C1-C12 alkoxycarbonyl, C1-C12 alkylcarbonyloxy, C1-C12 alkylcarbonyloxyalkyl or C1-C12 alkylcarbonyl;
R is, at each occurrence, independently either: (a) H or C1-C12 alkyl; or (b) R together with the carbon atom to which it is bound is taken together with an adjacent R and the carbon atom to which it is bound to form a carbon-carbon double bond;
R¹ and R² have, at each occurrence, the following structure, respectively:

[chemical structure]

R′ is, at each occurrence, independently H or C1-C12 alkyl;
a¹ and a² are, at each occurrence, independently an integer from 3 to 12;
b¹ and b² are, at each occurrence, independently 0 or 1;
c¹ and c² are, at each occurrence, independently an integer from 2 to 12;
d¹ and d² are, at each occurrence, independently an integer from 2 to 12;
y is, at each occurrence, independently an integer from 0 to 2; and
n is an integer from 1 to 6,
wherein a¹, a², c¹, c², d¹ and d² are selected such that the sum of a¹+c¹+d¹ is an integer from 18 to 30, and the sum of a²+c²+d² is an integer from 18 to 30, and wherein each alkyl, alkylene, hydroxylalkyl, aminoalkyl, alkylaminylalkyl, alkoxyalkyl, alkoxycarbonyl, alkylcarbonyloxy, alkylcarbonyloxyalkyl and alkylcarbonyl is optionally substituted with one or more substituent. In certain embodiments of Formula (V), G¹ and G² are each independently —O(C═O)— or —(C═O)O—.

[0849] In some embodiments, an ionizable lipid has a disulfide tail.

[0850] In some embodiments, an ionizable lipid includes short peptides of 12-15 mer length as head groups.

[0851] In some embodiments, the head of an ionizable lipid comprises the structure of Vitamin A, D, E, or K as described in the published Patent Application WO2019232095A1, which is incorporated by herein by reference in its entirety.

[0852] In some embodiments, a lipid is described in international patent applications WO2021077067, or WO2019152557, each of which is incorporated herein by reference in its entirety.

[0853] In some embodiments, an LNP described herein comprises a lipid, e.g., an ionizable lipid, disclosed in US 2019/0240354, which is incorporated herein by reference in its entirety.

[0854] In some embodiments, the lipids disclosed in US 2019/0240354 are of Formula I:

[chemical structure]

or salts thereof, wherein:
R¹ and R² are either the same or different and are independently hydrogen (H) or an optionally substituted C₁-C₆ alkyl, C₂-C₆ alkenyl, or C₂-C₆ alkynyl, or R¹ and R² may join to form an optionally substituted heterocyclic ring of 4 to 6 carbon atoms and 1 or 2 heteroatoms selected from the group consisting of nitrogen (N), oxygen (O), and mixtures thereof;
R³ is either absent or is hydrogen (H) or a C₁-C₆ alkyl to provide a quaternary amine; R⁴ and R⁵ are either the same or different and are independently an optionally substituted C₁₀-C₂₄ alkyl, C₁₀-C₂₄ alkenyl, C₁₀-C₂₄ alkynyl, or C₁₀-C₂₄ acyl, wherein at least one of R⁴ and R⁵ comprises at least two sites of unsaturation; and
n is 0, 1, 2, 3, or 4.

[0855] In some embodiments, the lipids disclosed in US 2019/0240354 are of Formula II:

[chemical structure]

wherein R¹ and R² are either the same or different and are independently an optionally substituted C₁₂-C₂₄ alkyl, C₁₂-C₂₄ alkenyl, C₁₂-C₂₄ alkynyl, or C₁₂-C₂₄ acyl; R³ and R⁴ are either the same or different and are independently an optionally substituted C₁-C₆ alkyl, C₂-C₆ alkenyl, or C₂-C₆ alkynyl, or R³ and R⁴ may join to form an optionally substituted heterocyclic ring of 4 to 6 carbon atoms and 1 or 2 heteroatoms chosen from nitrogen and oxygen; R⁵ is either absent or is hydrogen (H) or a C₁-C₆ alkyl to provide a quaternary amine; m, n, and p are either the same or different and are independently either 0, 1, or 2, with the proviso that m, n, and p are not simultaneously 0; q is 0, 1, 2, 3, or 4; and Y and Z are either the same or different and are independently O, S, or NH. In some embodiments, q is 2.
In some embodiments, the cationic lipid of Formula II is 2,2-dilinoleyl-4-(2-dimethylaminoethyl)-[1,3]-dioxolane, 2,2-dilinoleyl-4-(3-dimethylaminopropyl)-[1,3]-dioxolane, 2,2-dilinoleyl-4-(4-dimethylaminobutyl)-[1,3]-dioxolane, 2,2-dilinoleyl-5-dimethylaminomethyl-[1,3]-dioxane, 2,2-dilinoleyl-4-N-methylpepiazino-[1,3]-dioxolane, 2,2-dilinoleyl-4-dimethylaminomethyl-[1,3]-dioxolane, 2,2-dioleoyl-4-dimethylaminomethyl-[1,3]-dioxolane, 2,2-distearoyl-4-dimethylaminomethyl-[1,3]-dioxolane, 2,2-dilinoleyl-4-N-morpholino-[1,3]-dioxolane, 2,2-Dilinoleyl-4-trimethylamino-[1,3]-dioxolane chloride, 2,2-dilinoleyl-4,5-bis(dimethylaminomethyl)-[1,3]-dioxolane, 2,2-dilinoleyl-4-methylpiperzine-[1,3]-dioxolane, or mixtures thereof. In some embodiments, the cationic lipid of Formula II is 2,2-dilinoleyl-4-(2-dimethylaminoethyl)-[1,3]-dioxolane.

[0856] In some embodiments, the lipids disclosed in US 2019/0240354 are of Formula III:

[chemical structure]

or salts thereof, wherein: R and R² are either the same or different and are independently an optionally substituted C₁-C₆ alkyl, C₂-C₆ alkenyl, or C₂-C₆ alkynyl, or R¹ and R² may join to form an optionally substituted heterocyclic ring of 4 to 6 carbon atoms and 1 or 2 heteroatoms selected from the group consisting of nitrogen (N), oxygen (O), and mixtures thereof, R³ is either absent or is hydrogen (H) or a C₁-C₆ alkyl to provide a quaternary amine; R⁴ and R⁵ are either absent or present and when present are either the same or different and are independently an optionally substituted C₁-C₁₀ alkyl or C₂-C₁₀ alkenyl; and n is 0, 1, 2, 3, or 4.

[0857] In some embodiments, the lipids disclosed in US 2019/0240354 are of Formula C:

X-A-Y—Z¹; (Formula C)

or salts thereof, wherein:

### X is —N(H)R or —NR₂;

[0858] A is absent, C₁ to C₆ alkyl, C₂ to C₆ alkenyl, or C₂ to C₆ alkynyl, which C₁ to C₆ alkyl, C₂ to C₆ alkenyl, and C₂ to C₆ alkynyl is optionally substituted with one or more groups independently selected from oxo, halogen, heterocycle, —CN, —OR^{x}, —NR^{x}R^{y}, —NR^{x}C(═O)R^{y}, —NR^{x}SO₂R^{y}, —C(═O)R^{x}, —C(═O)OR^{x}, —C(═O)NR^{x}R^{y}, —SOₙR^{x}, and —SOₙNR^{x}R^{y}, wherein n is 0, 1, or 2, and R^{x} and R^{y} are each independently hydrogen, alkyl, or heterocycle, wherein each alkyl and heterocycle of R^{x} and R^{y} may be further substituted with one or more groups independently selected from oxo, halogen, —OH, —CN, alkyl, —OR^{x′}, heterocycle, —NR^{x′}R^{y′}, —NR^{x′}C(═O)R^{y′}, —NR^{x′}SO₂R^{y′}, —C(═O)R^{x′}, —C(═O)OR^{x′}, —C(═O)NR^{x′}R^{y′}, —SO_{n′}R^{x′}, and —SO_{n′}NR^{x′}R^{y′}, wherein n′ is 0, 1, or 2, and R^{x′} and R^{y′} are each independently hydrogen, alkyl, or heterocycle;
Y is selected from the group consisting of absent, —C(═O)—, —O—, —OC(═O)—, —C(═O)O—, —N(R^{b})C(═O)—, —C(═O)N(R^{b})—, —N(R^{b})C(═O)O—, and —OC(═O)N(R^{b}).;
Z¹ is a C₁ to C₆ alkyl that is substituted with three or four R^{x} groups, wherein each R^{x} is independently selected from C₆ to C₁₁ alkyl, C₆ to C₁₁ alkenyl, and C₆ to C₁₁ alkynyl, which C₆ to C₁₁ alkyl, C₆ to C₁₁ alkenyl, and C₆ to C₁₁ alkynyl is optionally substituted with one or more groups independently selected from oxo, halogen, heterocycle, —CN, —OR, —NR^{x}R^{y}, —NR^{x}C(═O)R^{y}, —NR^{x}SO₂R^{y}, —C(═O)R^{x}, —C(═O)OR^{x}, —C(═O)NR^{x}R^{y}, —SOₙR^{x}, and —SOₙNR^{x}R^{y}, wherein n is 0, 1, or 2, and R^{x} and R^{y} are each independently hydrogen, alkyl, or heterocycle, wherein any alkyl and heterocycle of R^{x} and R^{y} may be further substituted with one or more groups independently selected from oxo, halogen, —OH, —CN, alkyl, —OR^{x′}, heterocycle, —NR^{x′}R^{y′}, —NR^{x′}C(═O)R^{y′}, —NR^{x′}SO₂R^{y′}, —C(═O)R^{x′}, —C(═O)OR^{x′}, —C(═O)NR^{x′}R^{y′}, —SO_{n′}R^{x′}, and —SO_{n′}NR^{x′}R^{y′}, wherein n′ is 0, 1, or 2, and R^{x′} and R^{y′} are each independently hydrogen, alkyl, or heterocycle;
each R is independently alkyl, alkenyl, or alkynyl, that is optionally substituted with one or more groups independently selected from oxo, halogen, heterocycle, —CN, —OR^{x}, —NR^{x}R^{y}, —NR^{x}C(═O)R^{y}, —NR^{x}SO₂R^{y}, —C(═O)R^{x}, —C(═O)OR^{x}, —C(═O)NR^{x}R^{y}, —SOₙR^{x}, and —SOₙNR^{x}R^{y}, wherein n is 0, 1, or 2, and R^{x} and R^{y} are each independently hydrogen, alkyl, or heterocycle, wherein any alkyl and heterocycle of Rand R^{y} may be further substituted with one or more groups independently selected from oxo, halogen, —OH, —CN, alkyl, —OR^{x′}, heterocycle, —NR^{x′}R^{y′}, —NR^{x′}C(═O)R^{y′}, —NR^{x′}SO₂R^{y′}, —C(═O)R^{x′}, —C(═O)OR^{x′}, —C(═O)NR^{x′}R^{y′}, —SO_{n′}R^{x′}, and —SO_{n∝0}NR^{x′}R^{y′}, wherein n′ is 0, 1, or 2, and R^{x′} and R^{y′} are each independently hydrogen, alkyl, or heterocycle; and
each Ra is H or Ci to Calkyl.

[0859] In some embodiments, an LNP described herein comprises a lipid, e.g., an ionizable lipid, disclosed in US 2010/0130588, which is incorporated herein by reference in its entirety.

[0860] In some embodiments, the lipids disclosed in US 2010/0130588 are of Formula I:

[chemical structure]

wherein R¹ and R² are independently selected and are H or C₁-C₃ alkyls, R³ and R⁴ are independently selected and are alkyl groups having from about 10 to about 20 carbon atoms, and at least one of R³ and R⁴ comprises at least two sites of unsaturation. In some embodiments, R³ and R⁴ are both the same, i.e., R³ and R⁴ are both linoleyl (C¹⁸), etc. In some embodiments, R³ and R⁴ are different, i.e., R³ is tetradectrienyl (C₁₄) and R⁴ is linoleyl (C₁₈).

[0861] In some embodiments, the lipid of Formula I is 1,2-dilinoleyloxy-N,N-dimethylaminopropane (DLinDMA) or 1,2-dilinolenyloxy-N,N-dimethylaminopropane (DLenDMA).

[0862] In some embodiments, the lipids disclosed in US 2010/0130588 are of Formula II:

[chemical structure]

wherein R¹ and R² are independently selected and are H or C₁-C₃ alkyls, R³ and R⁴ are independently selected and are alkyl groups having from about 10 to about 20 carbon atoms, and at least one of R³ and R⁴ comprises at least two sites of unsaturation.

[0863] In some embodiments, an LNP described herein comprises a lipid, e.g., an ionizable lipid, disclosed in US 2021/0087135, which is incorporated herein by reference in its entirety.

[0864] In some embodiments, the lipids disclosed in US 2021/0087135 are of Formula (A):

[chemical structure]

or its N-oxide, or a salt or isomer thereof,
wherein R′^{a} is R′^{branched} or R′^{cyclic}; wherein

### R′^{branched} is:

[chemical structure]

### R′^{cyclic} is:

[chemical structure]

wherein:

[chemical structure]

denotes a point of attachment;
wherein R^{aα} is H, and R^{aβ}, R^{aγ}, and R^{aδ} are each independently selected from the group consisting of H, C₂₋₁₂ alkyl, and C₂₋₁₂ alkenyl, wherein at least one of R^{aβ}, R^{aγ}, and R^{aδ} is selected from the group consisting of C₂₋₁₂ alkyl and C₂₋₁₂ alkenyl;
R² and R³ are each C₁₋₁₄ alkyl;
R⁴ is selected from the group consisting of —(CH₂)₂OH, —(CH₂)₃OH, —(CH₂)₄OH, —(CH₂)₅OH and

[chemical structure]

wherein:

[chemical structure]

denotes a point of attachment;
R¹⁰ is N(R)₂; each R is independently selected from the group consisting of C1.6 alkyl, C₂₋₃ alkenyl, and H; and n2 is selected from the group consisting of 1, 2, 3, 4, 5, 6, 7, 8, 9, and 10;
each R⁵ is independently selected from the group consisting of OH, C₁₋₃ alkyl, C₂₋₃ alkenyl, and H;
each R⁶ is independently selected from the group consisting of OH, C₁₋₃ alkyl, C₂₋₃ alkenyl, and H;

### R⁷ is H;

[0867] M and M′ are each independently selected from the group consisting of —C(O)O— and —OC(O)—;
R′ is a C₁₋₁₂ alkyl or C₂₋₁₂ alkenyl;
Y^{a} is a C3.6 carbocycle;
R*″^{a} is selected from the group consisting of C₁₋₁₅ alkyl and C₂₋₁₅ alkenyl;
1 is selected from the group consisting of 1, 2, 3, 4, and 5;
s is 2 or 3; and
m is selected from the group consisting of 5, 6, 7, 8, 9, 10, 11, 12, and 13.

[0868] In some embodiments, an LNP described herein comprises a lipid, e.g., an ionizable lipid, disclosed in US 2021/0128488, which is incorporated herein by reference in its entirety

[0869] In some embodiments, the lipids disclosed in US 2021/0128488 are of structure (I):

[chemical structure]

or a pharmaceutically acceptable salt, prodrug or stereoisomer thereof, wherein:
L is —O(C═O)R′, —(C═O)OR¹, —C(═O)R¹, —OR¹, —S(O)ₓR¹, —S—SR¹, —C(′O)SR′, —SC(═O)R′, —NR^{a}C(═O)R¹, —C(═O)NR^{b}R^{c}, —NR^{a}C(═)NR^{b}R^{c}, —OC(═O)NR^{b}R^{c} or —NR^{a}C(═O)OR¹;
L² is —O(C═O)R², —(C═O)OR², —C(═O)R², —OR², —S(O)ₓR², —S—SR², —C(═O)SR², —SC(═O)R², —NR^{d}C(═O)R², —C(═O)NR^{e}R^{f}, —NR^{d}C(═O)NR^{e}R^{f}, —OC(═O)NR^{e}R^{f}; —NR^{d}C(═O)OR² or a direct bond to R²;
G¹ and G² are each independently C₂-C₁₂ alkylene or C₂-C₁₂ alkenylene;
G³ is C₁-C₂₄ alkylene, C₂-C₂₄ alkenylene, C₃-C₈ cycloalkylene or C₃-C₈ cycloalkenylene;
R^{a}, R^{b}, R^{d} and R^{e} are each independently H or C₁-C₁₂ alkyl or C₁-C₁₂ alkenyl;
R^{c} and R^{f} are each independently C₁-C₁₂ alkyl or C₂-C₁₂ alkenyl;
R¹ and R² are each independently branched C₆-C₂₄ alkyl or branched C₆-C₂₄ alkenyl;
R³ is —N(R⁴)R⁵;
R⁴ is C₁-C₁₂ alkyl;
R⁵ is substituted C₁-C₁₂ alkyl; and
x is 0, 1 or 2, and wherein each alkyl, alkenyl, alkylene, alkenylene, cycloalkylene, cycloalkenylene, aryl and aralkyl is independently substituted or unsubstituted unless otherwise specified.

[0870] In some embodiments, an LNP described herein comprises a lipid, e.g., an ionizable lipid, disclosed in US 2020/0121809, which is incorporated herein by reference in its entirety.

[0871] In some embodiments the lipids disclosed in US 2020/0121809 have a structure of Formula II:

[chemical structure]

or a pharmaceutically acceptable salt, tautomer, prodrug or stereoisomer thereof, wherein: one of L¹ or L² is —O(C═O)—, —(C═)O—, —C(═O)—, —O—, —S(O)x-, —S—S—, —C(═O)S—, SC(═O)—, —NR^{a}C(═O)—, —C(═O)NR^{a}—, NR^{a}C(═O)NR^{a}—, —OC(═O)NR^{a}— or —NR^{a}C(═O)O—, and the other of L¹ or L² is —O(C═O)—, —(C═O)O—, —C(═O)—, —O—, —S(O)ₓ—, —S—S—, —C(═O)S—, SC(═O)—, —NR^{a}C(═O)—, —C(═O)NR^{a}—, NR^{a}C(═O)NR^{a}—, —OC(═O)NR^{a}— or —NR^{a}C(═O)O— or a direct bond;
G¹ is C₁-C₂ alkylene, —(C═O)—, —O(C═O)—, —SC(═O)—, —NR^{a}C(═O)— or a direct bond;
G² is —C(═O)—, —(C═O)O—, —C(═O)S—, —C(═O)NR^{a}— or a direct bond;
G³ is C₁-C₆ alkylene;
R^{a} is H or C₁-C₁₂ alkyl;
R^{1a} and R^{1b} are, at each occurrence, independently either: (a) H or C₁-C₁₂ alkyl; or (b) R^{1a} is H or C₁-C₁₂ alkyl, and R^{1b} together with the carbon atom to which it is bound is taken together with an adjacent R^{1b} and the carbon atom to which it is bound to form a carbon-carbon double bond;
R^{2a} and R^{2b} are, at each occurrence, independently either: (a) H or C₁-C₁₂ alkyl; or (b) R^{2a} is H or C₁-C₁₂ alkyl, and R^{2b} together with the carbon atom to which it is bound is taken together with an adjacent R^{2b} and the carbon atom to which it is bound to form a carbon-carbon double bond;
R^{3a} and R^{3b} are, at each occurrence, independently either (a): H or C₁-C₁₂ alkyl; or (b) R^{3a} is H or C₁-C₁₂ alkyl, and R^{3b} together with the carbon atom to which it is bound is taken together with an adjacent R^{3b} and the carbon atom to which it is bound to form a carbon-carbon double bond;
R^{4a} and R^{4b} are, at each occurrence, independently either: (a) H or C₁-C₁₂ alkyl; or (b) R^{4a} is H or C₁-C₁₂ alkyl, and R^{4b} together with the carbon atom to which it is bound is taken together with an adjacent R⁴ and the carbon atom to which it is bound to form a carbon-carbon double bond;
R⁵ and R⁶ are each independently H or methyl;
R⁷ is C₄-C₂₀ alkyl;
R⁸ and R⁹ are each independently C₁-C₁₂ alkyl; or R⁸ and R⁹, together with the nitrogen atom to which they are attached, form a 5, 6 or 7-membered heterocyclic ring;
a, b, c and d are each independently an integer from 1 to 24; and
x is 0, 1 or 2.

[0872] In some embodiments, the lipids disclosed in US 2020/0121809 have a structure of Formula III:

[chemical structure]

or a pharmaceutically acceptable salt, prodrug or stereoisomer thereof, wherein: one of L or L² is —O(C═O)—, —(C═O)O—, —C(═O)—, —O—, —S(O)ₓ—, —S—S—, —C(═O)S—, SC(═O)—, —NR^{a}C(═O)—, —C(═O)NR^{a}—, NR^{a}C(═O)NR^{a}—, —OC(═O)N^{a}— or —NR^{a}C(═O)O—, and the other of L¹ or L² is —O(C═O)—, —(C═)O—, —C(═O)—, —O—, —S(O)ₓ—, —S—S—, —C(═O)S—, SC(═O)—, —NR^{a}C(═O)—, —C(═O)NR^{a}—, NR^{a}C(═O)NR^{a}—, —OC(═O)NR^{a}— or —NR^{a}C(═O)O— or a direct bond;
G¹ and G² are each independently unsubstituted C₁-C₁₂ alkylene or C₁-C₁₂ alkenylene;
G³ is C₁-C₂₄ alkylene, C₁-C₂₄ alkenylene, C₃-C₈ cycloalkylene, C₃-C₈ cycloalkenylene;
R^{a} is H or C₁-C₁₂ alkyl;
R¹ and R² are each independently C₆-C₂₄ alkyl or C₆-C₂₄ alkenyl;
R³ is H, OR⁵, CN, —C(═O)OR⁴, —OC(═O)R⁴ or —NR⁵C(═O)R⁴;
R⁴ is C₁-C₁₂ alkyl;
R⁵ is H or C₁-C₆ alkyl; and
x is 0, 1 or 2.

[0873] In some embodiments, the lipids disclosed in US 2020/0121809 have a structure of Formula (IV):

[chemical structure]

or a pharmaceutically acceptable salt, prodrug or stereoisomer thereof, wherein: one of G¹ or G² is, at each occurrence, —O(C═O)—, —(C═)O—, —C(═O)—, —O—, —S(O)_{y}—, —S—S—, —C(═O)S—, SC(═O)—, —N(Ra)C(═O)—, —C(═O)N(R^{a})—, —N(R^{a})C(═O)N(R^{a})—, —OC(═O)N(R^{a})— or —N(R^{a})C(═O)O—, and the other of G¹ or G² is, at each occurrence, —O(C═O)—, —(C═O)O—, —C(═O)—, —O—, —S(O)_{y}—, —S—S—, —C(═O)S—, —SC(═O)—, —N(R^{a})C(═O)—, —C(═O)N(R^{a})—, —N(R^{a})C(═O)N(R^{a}—, —OC(═O)N(R^{a})— or —N(R^{a})C(═O)O— or a direct bond;
L is, at each occurrence, —O(C═O)—, wherein - represents a covalent bond to X;

### X is CR^{a};

[0874] Z is alkyl, cycloalkyl or a monovalent moiety comprising at least one polar functional group when n is 1; or Z is alkylene, cycloalkylene or a polyvalent moiety comprising at least one polar functional group when n is greater than 1;
R^{a} is, at each occurrence, independently H, C₁-C₁₂ alkyl, C₁-C₁₂ hydroxylalkyl, C₁-C₁₂ aminoalkyl, C₁-C₁₂ alkylaminylalkyl, C₁-C₁₂ alkoxyalkyl, C₁-C₁₂ alkoxycarbonyl, C₁-C₁₂ alkylcarbonyloxy, C1-C₁₂ alkylcarbonyloxyalkyl or C₁-C₁₂ alkylcarbonyl;
R is, at each occurrence, independently either: (a) H or C₁-C₁₂ alkyl; or (b) R together with the carbon atom to which it is bound is taken together with an adjacent R and the carbon atom to which it is bound to form a carbon-carbon double bond;
R¹ and R² have, at each occurrence, the following structure, respectively:

[chemical structure]

a¹ and a² are, at each occurrence, independently an integer from 3 to 12;
b¹ and b² are, at each occurrence, independently 0 or 1;
c¹ and c² are, at each occurrence, independently an integer from 5 to 10;
d¹ and d² are, at each occurrence, independently an integer from 5 to 10;
y is, at each occurrence, independently an integer from 0 to 2; and
n is an integer from 1 to 6,
wherein each alkyl, alkylene, hydroxylalkyl, aminoalkyl, alkylaminylalkyl, alkoxyalkyl, alkoxycarbonyl, alkylcarbonyloxy, alkylcarbonyloxyalkyl and alkylcarbonyl is optionally substituted with one or more substituent.

[0875] In some embodiments, an LNP described herein comprises a lipid, e.g., an ionizable lipid, disclosed in US 2013/0108685, which is incorporated herein by reference in its entirety.

[0876] In some embodiments, the lipids disclosed in US 2013/0108685 are represented by the following formula (I):

[chemical structure]

wherein:
R¹ and R² are, the same or different, each linear or branched alkyl, alkenyl or alkynyl having 12 to 24 carbon atoms, or R¹ and R² are combined together to form dialkylmethylene, dialkenylmethylene, dialkynylmethylene or alkylalkenylmethylene,
X¹ and X³ are hydrogen atoms, or are combined together to form a single bond or alkylene,
X³ is absent or represents alkyl having 1 to 6 carbon atoms, or alkenyl having 3 to 6 carbon atoms, when X³ is absent,
Y is absent, a and b are 0, L³ is a single bond, R³ is alkyl having 1 to 6 carbon atoms, alkenyl having 3 to 6 carbon atoms, pyrrolidin-3-yl, piperidin-3-yl, piperidin-4-yl, or alkyl having 1 to 6 carbon atoms or alkenyl having 3 to 6 carbon atoms substituted with 1 to 3 substituent(s), which is(are), the same or different, amino, monoalkylamino, dialkylamino, trialkylammonio, hydroxy, alkoxy, carbamoyl, monoalkylcarbamoyl, dialkylcarbamoyl, pyrrolidinyl, piperidyl or morpholinyl, and L¹ and L² are —O—,
Y is absent, a and b are, the same or different, 0 to 3, and are not 0 at the same time, L³ is a single bond, R³ is alkyl having 1 to 6 carbon atoms, alkenyl having 3 to 6 carbon atoms, pyrrolidin-3-yl, piperidin-3-yl, piperidin-4-yl, or alkyl having 1 to 6 carbon atoms or alkenyl having 3 to 6 carbon atoms substituted with 1 to 3 substituent(s), which is(are), the same or different, amino, monoalkylamino, dialkylamino, trialkylammonio, hydroxy, alkoxy, carbamoyl, monoalkylcarbamoyl, dialkylcarbamoyl, pyrrolidinyl, piperidyl or morpholinyl, L¹ and L² are, the same or different, —O—, —CO—O— or —O—CO—,
Y is absent, a and b are, the same or different, 0 to 3, L³ is a single bond, R³ is a hydrogen atom, and L¹ and L² are, the same or different, —O—, —CO—O— or —O—CO—, or
Y is absent, a and b are, the same or different, 0 to 3, L³ is —CO— or —CO—O—, R³ is pyrrolidin-2-yl, pyrrolidin-3-yl, piperidin-2-yl, piperidin-3-yl, piperidin-4-yl, morpholin-2-yl, morpholin-3-yl, or alkyl having 1 to 6 carbon atoms or alkenyl having 3 to 6 carbon atoms substituted with 1 to 3 substituent(s), which is(are), the same or different, amino, monoalkylamino, dialkylamino, trialkylammonio, hydroxy, alkoxy, carbamoyl, monoalkylcarbamoyl, dialkylcarbamoyl, pyrrolidinyl, piperidyl or morpholinyl, wherein at least one of the substituents is amino, monoalkylamino, dialkylamino, trialkylammonio, pyrrolidinyl, piperidyl or morpholinyl, and L¹ and L² are, the same or different, —O—, —CO—O— or —O—CO—, and
when X³ is alkyl having 1 to 6 carbon atoms or alkenyl having 3 to 6 carbon atoms, Y is a pharmaceutically acceptable anion, a and b are, the same or different, 0 to 3, L³ is a single bond, R³ is alkyl having 1 to 6 carbon atoms, alkenyl having 3 to 6 carbon atoms, pyrrolidin-2-yl, pyrrolidin-3-yl, piperidin-2-yl, piperidin-3-yl, piperidin-4-yl, morpholin-2-yl, morpholin-3-yl, or alkyl having 1 to 6 carbon atoms or alkenyl having 3 to 6 carbon atoms substituted with 1 to 3 substituent(s), which is(are), the same or different, amino, monoalkylamino, dialkylamino, trialkylammonio, hydroxy, alkoxy, carbamoyl, monoalkylcarbamoyl, dialkylcarbamoyl, pyrrolidinyl, piperidyl or morpholinyl, L¹ and L² are, the same or different, —O—, —CO—O— or —O—CO—).

[0877] In some embodiments, an LNP described herein comprises a lipid, e.g., an ionizable lipid, disclosed in US 2013/0195920, which is incorporated herein by reference in its entirety.

[0878] In some embodiments, the lipids disclosed in US 2013/0195920 are of formula (I), which has a branched alkyl at the alpha position adjacent to the biodegradable group (between the biodegradable group and the tertiary carbon):

[chemical structure]

or a salt thereof (e.g., a pharmaceutically acceptable salt thereof), wherein
R′ is absent, hydrogen, or alkyl (e.g., C₁-C₄ alkyl);
with respect to R¹ and R²,
(i) R¹ and R² are each, independently, optionally substituted alkyl, alkenyl, alkynyl, cycloalkylalkyl, heterocycle, or R¹⁰;
(ii) R¹ and R², together with the nitrogen atom to which they are attached, form an optionally substituted heterocylic ring; or
(iii) one of R¹ and R² is optionally substituted alkyl, alkenyl, alkynyl, cycloalkyl, cycloalkylalkyl, or heterocycle, and the other forms a 4-10 member heterocyclic ring or heteroaryl (e.g., a 6-member ring) with (a) the adjacent nitrogen atom and (b) the (R)ₐ group adjacent to the nitrogen atom;
each occurrence of R is, independently, —(CR³R⁴)—;
each occurrence of R³ and R⁴ are, independently H, halogen, OH, alkyl, alkoxy, —NH₂, R¹⁰, alkylamino, or dialkylamino (In some embodiments, each occurrence of R³ and R⁴ are, independently H or C₁-C₄ alkyl);
each occurrence of R¹⁰ is independently selected from PEG and polymers based on poly(oxazoline), poly(ethylene oxide), poly(vinyl alcohol), poly(glycerol), poly(N-vinylpyrrolidone), poly[N-(2-hydroxypropyl)methacrylamide] and poly(amino acid)s, wherein (i) the PEG or polymer is linear or branched, (ii) the PEG or polymer is polymerized by n subunits, (iii) n is a number-averaged degree of polymerization between 10 and 200 units, and (iv) wherein the compound of formula has at most two R¹⁰ groups (preferably at most one R¹⁰ group); the dashed line to Q is absent or a bond;
when the dashed line to Q is absent then Q is absent or is —O—, —NH—, —S—, —C(O)—, —C(O)O—, —OC(O)—, —C(O)N(R⁴)—, —N(R⁵)C(O)—, —S—S—, —OC(O)O—, —O—N═C(R⁵)—, —C(R⁵)═N—O—, —OC(O)N(R⁵)—, —N(R⁵)C(O)N(R⁵)—, —N(R⁵)C(O)O—, —C(O)S—, —C(S)O— or —C(R⁵)═N—OC(O)—; or
when the dashed line to Q is a bond then (i) b is 0 and (ii) Q and the tertiary carbon adjacent to it (C*) form a substituted or unsubstituted, mono- or bi-cyclic heterocyclic group having from 5 to 10 ring atoms (e.g., the heteroatoms in the heterocyclic group are selected from O and S, preferably O);
each occurrence of R⁵ is, independently, H or alkyl (e.g. C₁-C₄ alkyl);
X and Y are each, independently, alkylene or alkenylene (e.g., C₄ to C₂₀ alkylene or C₄ to C₂₀ alkenylene);
M¹ and M² are each, independently, a biodegradable group (e.g., —OC(O)—, —C(O)O—, —SC(O)—, —C(O)S—, —OC(S)—, —C(S)O, —S—S—, C(R⁵)═N—, —N═C(R⁵)—, —C(R)═N—O—, —O—N═C(R⁵)—, —C(O)(NR⁵)—, —N(R⁵)C(O)—, —C(S)(NR⁵)—, —N(R⁵)C(O)—, —N(R⁵)C(O)N(R⁵)—, —OC(O)O—, —OSi(R⁵)₂O—, —C(O)(CR³R⁴)C(O)O—, —OC(O)(CR³R⁴)C(O)—, or

[chemical structure]

wherein R¹¹ is a C₂-C₈ alkyl or alkenyl;
each occurrence of R^{z} is, independently, C₁-C₈ alkyl (e.g., methyl, ethyl, isopropyl, n-butyl, n-pentyl, or n-hexyl);
a is 1, 2, 3, 4, 5 or 6;
b is 0, 1, 2, or 3; and
Z¹ and Z² are each, independently, C₈-C14 alkyl or C₈-C₁₄ alkenyl, wherein the alkenyl group may optionally be substituted with one or two fluorine atoms at the alpha position to a double bond which is between the double bond and the terminus of Z¹ or Z².

[0879] In some embodiments, the lipids disclosed in US 2013/0195920 are of formula (II), which has a branched alkyl at the alpha position adjacent to the biodegradable group (between the biodegradable group and the terminus of the tail, i.e., Z¹ or Z²):

[chemical structure]

or a salt thereof (e.g., a pharmaceutically acceptable salt thereof), wherein
R′ is absent, hydrogen, or alkyl (e.g., C₁-C₄ alkyl);
with respect to R¹ and R²,
(i) R¹ and R² are each, independently, optionally substituted alkyl, alkenyl, alkynyl, cycloalkylalkyl, heterocycle, or R¹⁰;
(ii) R¹ and R², together with the nitrogen atom to which they are attached, form an optionally substituted heterocylic ring; or
(iii) one of R¹ and R² is optionally substituted alkyl, alkenyl, alkynyl, cycloalkyl, cycloalkylalkyl, or heterocycle, and the other forms a 4-10 membered heterocyclic ring or heteroaryl (e.g., a 6-member ring) with (a) the adjacent nitrogen atom and (b) the (R)ₐ group adjacent to the nitrogen atom;
each occurrence of R is, independently, —(CR³R⁴)—;
each occurrence of R³ and R⁴ are, independently H, halogen, OH, alkyl, alkoxy, —NH₂, R¹⁰, alkylamino, or dialkylamino (In some embodiments, each occurrence of R³ and R⁴ are, independently H or C₁-C₄ alkyl);
each occurrence of R¹⁰ is independently selected from PEG and polymers based on poly(oxazoline), poly(ethylene oxide), poly(vinyl alcohol), poly(glycerol), poly(N-vinylpyrrolidone), poly[N-(2-hydroxypropyl)methacrylamide] and poly(amino acid)s, wherein (i) the PEG or polymer is linear or branched, (ii) the PEG or polymer is polymerized by n subunits, (iii) n is a number-averaged degree of polymerization between 10 and 200 units, and (iv) wherein the compound of formula has at most two R¹⁰ groups (preferably at most one R¹⁰ group); the dashed line to Q is absent or a bond;
when the dashed line to Q is absent then Q is absent or is —O—, —NH—, —S—, —C(O)—, —C(O)O—, —OC(O)—, —C(O)N(R⁴)—, —N(R⁵)C(O)—, —S—S—, —OC(O)O—, —O—N═C(R⁵)—, —C(R⁵)═N—O—, —OC(O)N(R)—, —N(R)C(O)N(R)—, —N(R⁵)C(O)O—, —C(O)S—, —C(S)O— or —C(R⁵)═N—O—C(O)—; or
when the dashed line to Q is a bond then (i) b is 0 and (ii) Q and the tertiary carbon adjacent to it (C*) form a substituted or unsubstituted, mono- or bi-cyclic heterocyclic group having from 5 to 10 ring atoms (e.g., the heteroatoms in the heterocyclic group are selected from O and S, preferably O);
each occurrence of R⁵ is, independently, H or alkyl;
X and Y are each, independently, alkylene (e.g., C₆-C₈ alkylene) or alkenylene, wherein the alkylene or alkenylene group is optionally substituted with one or two fluorine atoms at the alpha position to the M or M² group
M¹ and M² are each, independently, a biodegradable group (e.g., —OC(O)—, —C(O)O—, —SC(O)—, —C(O)S—, —OC(S)—, —C(S)O, —S—S—, C(R⁵)═N—, —N═C(R⁵)—, —C(R)═N—O—, —O—N═C(R⁵)—, —C(O)(NR⁵)—, —N(R⁵)C(O)—, —C(S)(NR⁵)—, —N(R⁵)C(O)—, —N(R⁵)C(O)N(R⁵)—, —OC(O)O—, —OSi(R⁵)₂O—, —C(O)(CR³R⁴)C(O)O—, —OC(O)(CR³R⁴)C(O)—, or

[chemical structure]

wherein R¹¹ is a C₂-C₈ alkyl or alkenyl;
each occurrence of R^{z} is, independently, C₁-C₈ alkyl (e.g., methyl, ethyl, isopropyl);
a is 1, 2, 3, 4, 5 or 6;
b is 0, 1, 2, or 3; and
Z¹ and Z² are each, independently, C₈-C₁₄ alkyl or C₈-C₁₄ alkenyl, wherein (i) the alkenyl group may optionally be substituted with one or two fluorine atoms at the alpha position to a double bond which is between the double bond and the terminus of Z¹ or Z²;
and (ii) the terminus of at least one of Z¹ and Z² is separated from the group M¹ or M² by at least 8 carbon atoms.

[0880] In some embodiments, the lipids disclosed in US 2013/0195920 are of formula (III), which has a branching point at a position that is 2-6 carbon atoms (i.e., at the beta (p), gamma (γ), delta (δ), epsilon (ε) or zeta position (ζ) adjacent to the biodegradable group (between the biodegradable group and the terminus of the tail, i.e., Z¹ or Z²):

[chemical structure]

or a salt thereof (e.g., a pharmaceutically acceptable salt thereof), wherein
R′, R¹, R², R, R³, R⁴, R¹⁰, Q, R⁵, M¹, M², R^{z}, a, and b are defined as in formula (I);
L¹ and L² are each, independently, C₁-C₅ alkylene or C₂-C₅ alkenylene;
X and Y are each, independently, alkylene (e.g., C₄ to C₂₀ alkylene or C₆-C₈ alkylene) or alkenylene (e.g., C₄ to C₂₀ alkenylene); and
Z¹ and Z² are each, independently, C₈-C₁₄ alkyl or C₈-C₁₄ alkenyl, wherein the alkenyl group may optionally be substituted with one or two fluorine atoms at the alpha position to a double bond which is between the double bond and the terminus of Z¹ or Z².
and with the proviso that the terminus of at least one of Z¹ and Z² is separated from the group M¹ or M² by at least 8 carbon atoms.

[0881] In some embodiments, the cationic lipid disclosed in US 2013/0195920 is a compound of formula (IV), which has a branching point at a position that is 2-6 carbon atoms (i.e., at beta (β), gamma (γ), delta (δ), epsilon (ε) or zeta position (ζ) adjacent to the biodegradable group (between the biodegradable group and the terminus of the tail, i.e., Z¹ or Z²):

[chemical structure]

or a salt thereof (e.g., a pharmaceutically acceptable salt thereof), wherein
R′, R¹, R², R, R³, R⁴, R¹⁰, Q, R⁵, M², R^{z}, a, and b are defined as in formula (I);
L¹ and L² and are each, independently, C₁-C₅ alkylene or C₂-C₅ alkenylene;
X and Y are each, independently, alkylene or alkenylene (e.g., C₁₂-C₂₀ alkylene or C₁₂-C₂₀ alkenylene); and
each occurrence of Z is independently C₁-C₄ alkyl (preferably, methyl).

[0882] For example, in some embodiments, -L¹-C(Z)₃ is —CH₂C(CH₃)₃. In some embodiments, -L¹-C(Z)₃ is —CH₂CH₂C(CH₃)₃.

[0883] In some embodiments, the lipids disclosed in US 2013/0195920 are of formula (V), which has an alkoxy or thioalkoxy (i.e., —S-alkyl) group substitution on at least one tail:

[chemical structure]

or a salt thereof (e.g., a pharmaceutically acceptable salt thereof), wherein
R′, R¹, R², R, R³, R⁴, R¹⁰, Q, R⁵, M¹, M², a, and b are defined as in formula (I); X and Y are each, independently, alkylene (e.g., C₆-C₈ alkylene) or alkenylene, wherein the alkylene or alkenylene group is optionally substituted with one or two fluorine atoms at the alpha position to the M¹ or M² group;
Z¹ and Z² are each, independently, C₈-C₁₄ alkyl or C₈-C₁₄ alkenyl, wherein (i) the C₈-C₁₄ alkyl or C₈-C₁₄ alkenyl of at least one of Z¹ and Z² is substituted by one or more alkoxy (e.g., a C₁-C₄ alkoxy such as —OCH₃) or thioalkoxy (e.g., a C₁-C₄ thioalkoxy such as —SCH₃) groups, and (ii) the alkenyl group may optionally be substituted with one or two fluorine atoms at the alpha position to a double bond which is between the double bond and the terminus of Z¹ or Z².

[0884] In some embodiments, the lipids disclosed in US 2013/0195920 are of formula (VIA), which has one or more fluoro substituents on at least one tail at a position that is either alpha to a double bond or alpha to a biodegradable group:

[chemical structure]

or a salt thereof (e.g., a pharmaceutically acceptable salt thereof), wherein
R¹, R², R, a, and b are as defined with respect to formula (I);
Q is absent or is —O—, —NH—, —S—, —C(O)—, —C(O)O—, —OC(O)—, —C(O)N(R⁴)—, —N(R⁵)C(O)—, —S—S—, —OC(O)O—, —O—N═C(R⁵)—, —C(R⁵)═N—O—, —OC(O)N(R⁵)—, —N(R⁵)C(O)N(R⁵)—, —N(R⁵)C(O)O—, —C(O)S—, —C(S)O— or —C(R⁵)═N—O—C(O)—;
R′ is absent, hydrogen, or alkyl (e.g., C₁-C₄ alkyl); and
each of R⁹ and R¹⁰ are independently C₁₂-C₂₄ alkyl (e.g., C₁₂-C₂₀ alkyl), C₁₂-C₂₄ alkenyl (e.g., C₁₂-C₂₀ alkenyl), or C₁₂-C₂₄ alkoxy (e.g., C₁₂-C₂₀ alkoxy) (a) having one or more biodegradable groups and (b) optionally substituted with one or more fluorine atoms at a position which is (i) alpha to a biodegradable group and between the biodegradable group and the tertiary carbon atom marked with an asterisk (*), or (ii) alpha to a carbon-carbon double bond and between the double bond and the terminus of the R⁹ or R¹⁰ group; each biodegradable group independently interrupts the C₁₂-C₂₄ alkyl, alkenyl, or alkoxy group or is substituted at the terminus of the C₁₂-C₂₄ alkyl, alkenyl, or alkoxy group, wherein
(i) at least one of R⁹ and R¹⁰ contains a fluoro group;
(ii) the compound does not contain the following moiety:

[chemical structure]

wherein [symbol] is an optional bond; and
(iii) the terminus of R⁹ and R¹⁰ is separated from the tertiary carbon atom marked with an asterisk (*) by a chain of 8 or more atoms (e.g., 12 or 14 or more atoms).

[0885] In some embodiments, the terminus of R⁹ and R¹⁰ is separated from the tertiary carbon atom marked with an asterisk (*) by a chain of 18-22 carbon atoms (e.g., 18-20 carbon atoms).

[0886] In some embodiments, the lipids disclosed in US 2013/0195920 are of formula (VIB), which has one or more fluoro substituents on at least one tail at a position that is either alpha to a double bond or alpha to a biodegradable group:

[chemical structure]

or a salt thereof (e.g., a pharmaceutically acceptable salt thereof), wherein
R′, R¹, R², R, R³, R⁴, R¹⁰, Q, R⁵, M¹, M², a, and b are defined as in formula (I);
X and Y are each, independently, alkylene (e.g., C₆-C₈ alkylene) or alkenylene, wherein the alkylene or alkenylene group is optionally substituted with one or two fluorine atoms at the alpha position to the M¹ or M² group; and
Z¹ and Z² are each, independently, C₈-C₁₄ alkyl or C₈-C₁₄ alkenyl, wherein said C₈-C₁₄ alkenyl is optionally substituted by one or more fluorine atoms at a position that is alpha to a double bond, wherein at least one of X, Y, Z¹, and Z² contains a fluorine atom.

[0887] In some embodiments, the lipids disclosed in US 2013/0195920 are of formula (VII), which has an acetal group as a biodegradable group in at least one tail:

[chemical structure]

or a salt thereof (e.g., a pharmaceutically acceptable salt thereof), wherein
R′, R¹, R², R, R³, R⁴, R¹⁰, Q, R⁵, a, and b are defined as in formula (I);
X and Y are each, independently, alkylene (e.g., C₆-C₈ alkylene) or alkenylene, wherein the alkylene or alkenylene group is optionally substituted with one or two fluorine atoms at the alpha position to the M¹ or M² group
M¹ and M² are each, independently, a biodegradable group (e.g., —OC(O)—, —C(O)O—, —SC(O)—, —C(O)S—, —OC(S)—, —C(S)O, —S—S—, C(R⁵)═N—, —N═C(R⁵)—, —C(R⁵)═N—O—, —O—N═C(R⁵)—, —C(O)(NR⁵)—, —N(R⁵)C(O)—, —C(S)(NR⁵)—, —N(R⁵)C(O)—, —N(R⁵)C(O)N(R⁵)—, —OC(O)O—, —OSi(R⁵)₂O—, —C(O)(CR³R⁴)C(O)O—, —OC(OXCR³R⁴)C(O)—, or

[chemical structure]

wherein R¹ is a C₄-C₁₀ alkyl or C₄-C₁₀ alkenyl;
with the proviso that at least one of M¹ and M² is

[chemical structure]

and
Z¹ and Z² are each, independently, C₄-C₁₄ alkyl or C₄-C₁₄ alkenyl, wherein the alkenyl group may optionally be substituted with one or two fluorine atoms at the alpha position to a double bond which is between the double bond and the terminus of Z¹ or Z².

[0888] In some embodiments, an LNP described herein comprises a lipid, e.g., an ionizable lipid, disclosed in US 2015/0005363, which is incorporated herein by reference in its entirety.

[0889] In some embodiments, an LNP described herein comprises a lipid, e.g., an ionizable lipid, disclosed in US 2014/0308304, which is incorporated herein by reference in its entirety.

[0890] In some embodiments, the lipid disclosed in US 2014/0308304 is a compound of formula (I):

[chemical structure]

or a salt thereof (e.g., a pharmaceutically acceptable salt thereof), wherein
Xaa is a D- or L-amino acid residue having the formula —NR^{N}—CR¹R²—(C═O)—, or a peptide of amino acid residues having the formula —{NR^{N}—CR¹R²—(C═O)}ₙ—, wherein n is 2 to 20;
R¹ is independently, for each occurrence, a non-hydrogen, substituted or unsubstituted side chain of an amino acid;
R² and RN are independently, for each occurrence, hydrogen, an organic group consisting of carbon, oxygen, nitrogen, sulfur, and hydrogen atoms, or any combination of the foregoing, and having from 1 to 20 carbon atoms, C₍₁₋₅₎alkyl, cycloalkyl, cycloalkylalkyl, C₍₃₋₅₎alkenyl, C₍₃₋₅₎alkynyl, C₍₁₋₅₎alkanoyl, C₍₁₋₅₎alkanoyloxy, C₍₁₋₅₎alkoxy, C₍₁₋₅₎alkoxy-C₍₁₋₅₎alkyl, C₍₁₋₅₎alkoxy-C₍₁₋₅₎alkoxy, C₍₁₋₅₎alkyl-amino-C₍₁₋₅₎alkyl-, C₍₁₋₅₎dialkyl-amino-C₍₁₋₅₎alkyl-, nitro-C₍₁₋₅₎alkyl, cyano-C₍₁₋₅₎alkyl, aryl-C₍₁₋₅₎alkyl, 4-biphenyl-C₍₁₋₅₎alkyl, carboxyl, or hydroxyl;
Z is NH, O, S, —CH₂S—, —CH₂S(O)—, or an organic linker consisting of 1-40 atoms selected from hydrogen, carbon, oxygen, nitrogen, and sulfur atoms (preferably, Z is NH or O);
R^{x} and R^{y} are, independently, (i) a lipophilic tail derived from a lipid (which can be naturally-occurring or synthetic), phospholipid, glycolipid, triacylglycerol, glycerophospholipid, sphingolipid, ceramide, sphingomyelin, cerebroside, or ganglioside, wherein the tail optionally includes a steroid; (ii) an amino acid terminal group selected from hydrogen, hydroxyl, amino, and an organic protecting group; or (iii) a substituted or unsubstituted C₍₃₋₂₂₎alkyl, C₍₆₋₁₂₎cycloalkyl, C₍₆₋₁₂₎cycloalkyl-C₍₃₋₂₂₎alkyl, C₍₃₋₂₂₎alkenyl, C₍₃₋₂₂₎alkynyl, C₍₃₋₂₂₎alkoxy, or C₍₆₋₁₂₎-alkoxy-C₍₃₋₂₂₎alkyl;
one of R^{x} and R^{y} is a lipophilic tail as defined above and the other is an amino acid terminal group, or both R^{x} and R^{y} are lipophilic tails;
at least one of Rand R^{y} is interrupted by one or more biodegradable groups (e.g., —OC(O)—, —C(O)O—, —SC(O)—, —C(O)S—, —OC(S)—, —C(S)O—, —S—S—, —C(R⁵)═N—, —N═C(R⁵)—, —C(R⁵)═N—O—, —O—N═C(R⁵)—, —C(O)(NR⁵)—, —N(R⁵)C(O)—, —C(S)(NR⁵)—, —N(R⁵)C(O)—, —N(R⁵)C(O)N(R⁵)—, —OC(O)O—, —OSi(R⁵)₂O—, —C(O)(CR³R⁴)C(O)O—, —OC(O)(CR³R⁴)C(O)— or

[chemical structure]

(wherein R¹¹ is a C₂-C₈ alkyl or alkenyl), in which each occurrence of R⁵ is, independently, H or alkyl; and each occurrence of R³ and R⁴ are, independently H, halogen, OH, alkyl, alkoxy, —NH₂, alkylamino, or dialkylamino; or R³ and R⁴, together with the carbon atom to which they are directly attached, form a cycloalkyl group (in some embodiments, each occurrence of R³ and R⁴ are, independently H or C₁-C₄ alkyl)); and
R^{x} and R^{y} each, independently, optionally have one or more carbon-carbon double bonds. In some embodiments, the lipid disclosed in US 2014/0308304 is a compound of formula (IA):

[chemical structure]

or a salt thereof (e.g., a pharmaceutically acceptable salt thereof), wherein
Z and Xaa are as defined with respect to formula (I) (the variables which are used in the definition of Xaa, namely R^{N}, R¹ and R², are also as defined in formula (I));
each occurrence of R is, independently, —(CR³R⁴)—;
each occurrence of R³ and R⁴ are, independently H, halogen, OH, alkyl, alkoxy, —NH₂, alkylamino, or dialkylamino (in some embodiments, each occurrence of R³ and R⁴ are, independently H or C₁-C₄ alkyl);
or R³ and R⁴, together with the carbon atom to which they are directly attached, form a cycloalkyl group, wherein no more than three R groups in each chain between the —Z-Xaa-C(O)— and
Z² moieties are cycloalkyl (e.g., cyclopropyl);
Q¹ and Q² are each, independently, absent, —O—, —S—, —OC(O)—, —C(O)O—, —SC(O)—, —C(O)S—, —OC(S)—, —C(S)O—, —S—S—, —C(O)(NR⁵)—, —N(R⁵)C(O)—, —C(S)(NR⁵)—, —N(R)C(O)—, —N(R⁵)C(O)N(R⁵)—, or —OC(O)O—;
Q³ and Q⁴ are each, independently, H, —(CR³R⁴)—, cycloalkyl, heterocyclyl, heterocyclylalkyl, aryl, heteroaryl, or a cholesterol moiety;
each occurrence of A¹, A², A³ and A⁴ is, independently, —(CR⁵R⁵—CR⁵═CR⁵)—;
M¹ and M² are each, independently, a biodegradable group (e.g., —OC(O)—, —C(O)O—, —SC(O)—, —C(O)S—, —OC(S)—, —C(S)O—, —S—S—, —C(R⁵)═N—, —N═C(R⁵)—, —C(R)═N—O—, —O—N═C(R⁵)—, —C(O)(NR⁵)—, —N(R⁵)C(O)—, —C(S)(NR⁵)—, —N(R⁵)C(O)—, —N(R⁵)C(O)N(R⁵)—, —OC(O)O—, —OSi(R)₂O—, —C(O)(CR³R⁴)C(O)O—, —OC(O)(CR³R⁴)C(O)—, or

[chemical structure]

(wherein R¹¹ is a C₂-C₈ alkyl or alkenyl));
each occurrence of R⁵ is, independently, H or alkyl (e.g., C₁-C₄ alkyl);
Z² is absent, alkylene or —O—P(O)(OH)—O—;
each [symbol] attached to Z² is an optional bond, such that when Z² is absent, Q³ and Q⁴ are not directly covalently bound together;
c, d, e, f, i, j, m, n, q and r are each, independently, 0, 1, 2, 3, 4, 5, 6, 7, 8, 9, or 10;
g and h are each, independently, 0, 1 or 2;
k and l are each, independently, 0 or 1, wherein at least one of k and 1 is 1;
o and p are each, independently, 0, 1 or 2; and
Q³ and Q⁴ are each, independently, separated from the —Z-Xaa-C(O)— moiety by a chain of 8 or more atoms (e.g., 12 or 14 or more atoms).
In some embodiments the lipids disclosed in US 2014/0308304 are of the formula (IC):

[chemical structure]

or a salt thereof (e.g., a pharmaceutically acceptable salt thereof), wherein
Z and Xaa are as defined with respect to formula (I) (the variables which are used in the definition of Xaa, namely R^{N}, R¹ and R², are also as defined in formula (I));
each of R⁹ and R¹⁰ are, independently, alkylene or alkenylene;
each of R¹¹ and R¹² are, independently, alkyl or alkenyl, optionally terminated by COOR^{D} wherein
each R¹³ is independently unsubstituted alkyl (e.g., C₁-C₄ alkyl such as methyl or ethyl), substituted alkyl (such as benzyl), or cycloalkyl;
M¹ and M² are each, independently, a biodegradable group (e.g., —OC(O)—, —C(O)O—, —SC(O)—, —C(O)S—, —OC(S)—, —C(S)O—, —S—S—, —C(R⁵)═N—, —N═C(R⁵)—, —C(R⁵)═N—O—, —O—N═C(R⁵)—, —C(O)(NR⁵)—, —N(R⁵)C(O)—, —C(S)(NR⁵)—, —N(R⁵)C(O)—, —N(R⁵)C(O)N(R⁵)—, —OC(O)O—, —OSi(R⁵)₂O—, —C(O)(CR³R⁴)C(O)O—, —OC(O)(CR³R⁴)C(O)—, or

[chemical structure]

wherein R¹¹ is a C2-C₈ alkyl or alkenyl, in which each occurrence of R⁵ is, independently, H or alkyl; and each occurrence of R³ and R⁴ are, independently H, halogen, OH, alkyl, alkoxy, —NH₂, alkylamino, or dialkylamino; or R³ and R⁴, together with the carbon atom to which they are directly attached, form a cycloalkyl group (in some embodiments, each occurrence of R³ and R⁴ are, independently H or C₁-C₄ alkyl));
R⁹, M¹, and R¹¹ are together at least 8 carbon atoms in length (e.g., 12 or 14 carbon atoms or longer); and
R¹⁰, M², and R¹² are together at least 8 carbon atoms in length (e.g., 12 or 14 carbon atoms or longer).

[0891] In some embodiments, the lipid disclosed in US 2014/0308304 is a compound of the formula II:

[chemical structure]

or a salt thereof (e.g., a pharmaceutically acceptable salt thereof), wherein:
s is 1, 2, 3 or 4; and
R⁷ is selected from lysyl, ornithyl, 2,3-diaminobutyryl, histidyl and an acyl moiety of the formula:

[chemical structure]

t is 1, 2 or 3;
the NH₃⁺ moiety in the acyl moiety in R⁷ is optionally absent; each occurrence of Y⁻ is independently a pharmaceutically acceptable anion (e.g., halide, such as chloride);
R⁵ and R⁶ are each, independently a lipophilic tail derived from a naturally-occurring or synthetic lipid, phospholipid, glycolipid, triacylglycerol, glycerophospholipid, sphingolipid, ceramide, sphingomyelin, cerebroside, or ganglioside, wherein the tail may contain a steroid; or a substituted or unsubstituted C₍₃₋₂₂₎alkyl, C₍₆₋₁₂₎cycloalkyl, C₍₆₋₁₂₎cycloalkyl-C₍₃₋₂₂₎alkyl, C₍₃₋₂₂₎alkenyl, C₍₃₋₂₂₎alkynyl, C₍₃₋₂₂₎alkoxy, or C₍₆₋₁₂₎alkoxy-C₍₃₋₂₂₎alkyl;
at least one of R⁵ and R⁶ is interrupted by one or more biodegradable groups (e.g., —SC(O)—, —C(O)S—, —OC(S)—, —C(S)O—, —S—S—, —C(O)(NR^{a})—, —N(R^{a})C(O)—, —C(S)(NR^{a})—, —N(R^{a})C(O)—, —N(R^{a})C(O)N(R^{a})—, or —OC(O)O—);
each occurrence of R is, independently, H or alkyl; and
R⁵ and R⁶ each, independently, optionally contain one or more carbon-carbon double bonds.

[0892] In some embodiments, the lipids disclosed in US 2014/0308304 are of the formula (IIA):

[chemical structure]

or a salt thereof (e.g., a pharmaceutically acceptable salt thereof), wherein:
R⁷ and s are as defined with respect to formula (II);
each occurrence of R is, independently, —(CR³R⁴)—;
each occurrence of R³ and R⁴ are, independently H, halogen, OH, alkyl, alkoxy, —NH₂, alkylamino, or dialkylamino (in some embodiments, each occurrence of R³ and R⁴ are, independently H or C₁-C₄ alkyl);
or R³ and R⁴, together with the carbon atom to which they are directly attached, form a cycloalkyl group, wherein no more than three R groups in each chain attached to the nitrogen N* are cycloalkyl (e.g., cyclopropyl);
Q¹ and Q² are each, independently, absent, —O—, —S—, —OC(O)—, —C(O)O—, —SC(O)—, —C(O)S—, —OC(S)—, —C(S)O—, —S—S—, —C(O)(NR⁵)—, —N(R⁵)C(O)—, —C(S)(NR⁵)—, —N(R⁵)C(O)—, —N(R⁵)C(O)N(R⁵)—, or —OC(O)O—;
Q³ and Q⁴ are each, independently, H, —(CR³R⁴)—, aryl, cycloalkyl, heterocyclyl, heterocyclylalkyl, heteroaryl, or a cholesterol moiety;
each occurrence of A¹, A², A³ and A⁴ is, independently, —(CR⁵R⁵—CR⁵═CR⁵)—;
M¹ and M² are each, independently, a biodegradable group (e.g., —OC(O)—, —C(O)O—, —SC(O)—, —C(O)S—, —OC(S)—, —C(S)O—, —S—S—, —C(R⁵)═N—, —N═C(R⁵)—, —C(R)═N—O—, —O—N═C(R⁵)—, —C(O)(NR⁵)—, —N(R⁵)C(O)—, —C(S)(NR⁵)—, —N(R⁵)C(O)—, —N(R⁵)C(O)N(R⁵)—, —OC(O)O—, —OSi(R⁵)₂O—, —C(O)(CR³R⁴)C(O)O—, —OC(O)CR³R⁴)C(O)—, or

[chemical structure]

wherein R¹¹ is a C₂-C₈ alkyl or alkenyl;
each occurrence of R⁵ is, independently, H or alkyl;
Z is absent, alkyne or —O—P(O)(OH)—O—;
each [symbol] attached to Z is an optional bond, such that when Z is absent, Q³ and Q⁴ are not directly covalently bound together;
c, d, e, f, i, j, m, n, q and r are each, independently, 0, 1, 2, 3, 4, 5, 6, 7, 8, 9, or 10;
g and h are each, independently, 0, 1 or 2;
k and l are each, independently, 0 or 1, where at least one of k and 1 is 1; and
o and p are each, independently, 0, 1 or 2.

[0893] In some embodiments the lipid disclosed in US 2014/0308304 are of the formula (IIC):

[chemical structure]

or a salt thereof (e.g., a pharmaceutically acceptable salt thereof), wherein:
R⁷ and s are as defined with respect to formula (II);
each of R⁹ and R¹⁰ are independently alkyl (e.g., C₁₂-C₂₄ alkyl) or alkenyl (e.g., C₁₂-C₂₄ alkenyl);
each of R¹¹ and R¹² are independently alkyl or alkenyl, optionally terminated by COOR^{D} where each R¹³ is independently alkyl (e.g., C₁-C₄ alkyl such as methyl or ethyl);
M¹ and M² are each, independently, a biodegradable group (e.g., —OC(O)—, —C(O)O—, —SC(O)—, —C(O)S—, —OC(S)—, —C(S)O—, —S—S—, —C(R⁵)═N—, —N═C(R⁵)—, —C(R⁵)═N—O—, —O—N═C(R⁵)—, —C(O)(NR⁵)—, —N(R⁵)C(O)—, —C(S)(NR⁵)—, —N(R)C(O)—, —N(R⁵)C(O)N(R⁵)—, —OC(O)O—, —OSi(R⁵)₂O—, —C(O)(CR³R⁴)C(O)O—, —OC(O)(CR³R⁴)C(O)—, or

[chemical structure]

wherein R¹¹ is a C₂-C₈ alkyl or alkenyl;
in which each occurrence of R⁵ is, independently, H or alkyl; and each occurrence of R³ and R⁴ are, independently H, halogen, OH, alkyl, alkoxy, —NH₂, alkylamino, or dialkylamino; or R³ and R⁴, together with the carbon atom to which they are directly attached, form a cycloalkyl group (in some embodiments, each occurrence of R³ and R⁴ are, independently, H or C₁-C₄ alkyl));
R⁹, M¹, and R¹¹ are together at least 8 carbons atoms in length (e.g., 12 or 14 carbon atoms or longer); and
R¹⁰, M², and R¹² are together at least 8 carbons atoms in length (e.g., 12 or 14 carbon atoms or longer).

[0894] In some embodiments, the lipid disclosed in US 2014/0308304 is a compound of the formula (4):

[chemical structure]

wherein:

### X is N or P;

[0895] R¹, R², R, a, b, M¹, and M² are as defined with respect to formula (I);
Q is absent or is —O—, —NH—, —S—, —C(O)O—, —OC(O)—, —C(O)N(R⁴)—, —N(R⁵)C(O)—, —S—S—, —OC(O)O—, —O—N═C(R⁵)—, —C(R⁵)═N—O—, —OC(O)N(R⁵)—, —N(R⁵)C(O)N(R⁵)—, —N(R⁵)C(O)O—, —C(O)S—, —C(S)O— or —C(R⁵)═N—O—C(O)—;
R′ is absent, hydrogen, or alkyl (e.g., C₁-C₄ alkyl);
each of R⁹ and R¹⁰ are independently alkylene, or alkenylene; and
each of R¹¹ and R¹² are independently alkyl or alkenyl, optionally terminated by COOR¹³ where each R¹³ is independently alkyl (e.g., C₁-C₄ alkyl such as methyl or ethyl);
R⁹, M¹, and R¹¹ are together at least 8 carbons atoms in length (e.g., 12 or 14 carbon atoms or longer); and
R¹⁰, M², and R¹² are together at least 8 carbons atoms in length (e.g., 12 or 14 carbon atoms or longer).

[0896] In some embodiments, the lipid disclosed in US 2014/0308304 is a compound of the formula (5)

[chemical structure]

wherein:

### X is N or P;

[0897] R¹, R², R, a, and b are as defined with respect to formula (I);
Q is absent or is —O—, —NH—, —S—, —C(O)O—, —OC(O)—, —C(O)N(R⁴)—, —N(R⁵)C(O)—, —S—S—, —OC(O)O—, —O—N═C(R⁵)—, —C(R⁵)═N—O—, —OC(O)N(R⁵)—, —N(R⁵)C(O)N(R⁵)—, —N(R⁵)C(O)O—, —C(O)S—, —C(S)O— or —C(R⁵)═N—O—C(O)—; R′ is absent, hydrogen, or alkyl (e.g., C₁-C₄ alkyl);
each of R⁹ and R¹⁰ are independently C₁₂-C₂₄ alkyl or alkenyl substituted at its terminus with a biodegradable group, such as —COOR¹³ where each R¹³ is independently alkyl (preferably C₁-C₄ alkyl such as methyl or ethyl).

[0898] In some embodiments the lipids disclosed in US 2014/0308304 are of Formula A:

[chemical structure]

or a pharmaceutically acceptable salt or stereoisomer thereof, wherein:
n is 0-6 (e.g., n is 0, 1 or 2);
R¹ and R² are independently selected from H, (C₁-C₆)alkyl, heterocyclyl, and a polyamine, wherein said alkyl, heterocyclyl and polyamine are optionally substituted with one or more substituents selected from R′,
or R¹ and R² can be taken together with the nitrogen to which they are attached to form a monocyclic heterocycle with 3-7 (e.g., 4-7) members optionally containing, in addition to the nitrogen, one or two additional heteroatoms selected from N, O and S, said monocyclic heterocycle is optionally substituted with one or more substituents selected from R′;
R³ is selected from H and (C₁-C₆)alkyl, wherein said alkyl is optionally substituted with one or more substituents selected from R′, or R³ can be taken together with R¹ to form a monocyclic heterocycle with 3-7 (e.g., 4-7) members optionally containing, in addition to the nitrogen, one or two additional heteroatoms selected from N, O and S, said monocyclic heterocycle is optionally substituted with one or more substituents selected from R′;
each occurrence of R⁴, R^{3′} and R^{4′} is independently selected from H, (C₁-C₆)alkyl and O-alkyl, said alkyl is optionally substituted with one or more substituents selected from R′; or R^{3′} and R^{4′} when directly bound to the same carbon atom form an oxo (═O) group, cyclopropyl or cyclobutyl;
or R³ and R⁴ form an oxo (═O) group;
R⁵ is selected from H and (C₁-C₆)alkyl; or R⁵ can be taken together with R¹ to form a monocyclic heterocycle with 4-7 members optionally containing, in addition to the nitrogen, one or two additional heteroatoms selected from N, O and S, said monocyclic heterocycle is optionally substituted with one or more substituents selected from R′;
each occurrence of R′ is independently selected from halogen, R″, OR″, SR″, CN, CO₂R″ and CON(R″)₂;
each occurrence of R″ is selected from H and (C₁-C₆)alkyl, wherein said alkyl is optionally substituted with one or more substituents selected from halogen and OH;
L¹ is a C₄-C₂₂ alkyl or C₄-C₂₂ alkenyl, said alkyl or alkenyl is optionally interrupted by or terminated with one or more biodegradable groups; and said alkyl or alkenyl is optionally substituted with one or more substituents selected from R′; and
L² is a C₄-C₂₂ alkyl or C₄-C₂₂ alkenyl, said alkyl or alkenyl is optionally interrupted by or terminated with one or more biodegradable groups; and said alkyl or alkenyl is optionally substituted with one or more substituents selected from R′;
with the proviso that the CR^{3′}R^{4′} group when present adjacent to the nitrogen atom in formula A is not a ketone (—C(O)—).

[0899] In some embodiments the lipids disclosed in US 2014/0308304 are of formula B:

[chemical structure]

### Formula B

[0900] or a pharmaceutically acceptable salt or stereoisomer thereof, wherein:
n is 0, 1, 2, 3, 4, or 5;
R⁶ and R⁷ are each independently (i) C₁-C₄ linear or branched alkyl (e.g., methyl or ethyl) optionally substituted with 1-4 R′, or (ii) C3-C₈ cycloalkyl (e.g., C₃-C₆ cycloalkyl); or R⁶ and R⁷ together with the nitrogen atom adjacent to them form a 3-6 membered ring;
L¹ is a C₄-C₂₂ alkyl or C₄-C₂₂ alkenyl, said alkyl or alkenyl optionally interrupted by or terminated with one or more biodegradable groups; and said alkyl or alkenyl is optionally substituted with 1-5 substituents selected from R′; and
L² is a C₄-C₂₂ alkyl or C₄-C₂₂ alkenyl, said alkyl or alkenyl optionally interrupted by or terminated with one or more biodegradable groups; and said alkyl or alkenyl is optionally substituted with 1-5 substituents selected from R′;
each occurrence of R′ is independently selected from halogen, R″, OR″, SR″, CN, CO₂R″ and CON(R″)₂; and
each occurrence of R″ is independently selected from H and (C₁-C₆)alkyl, wherein said alkyl is optionally substituted with one or more substituents selected from halogen and OH.

[0901] In some embodiments, lipids disclosed in US 2014/0308304 are of formula C:

[chemical structure]

or a pharmaceutically acceptable salt or stereoisomer thereof, wherein:
n is 0, 1, 2, 3, 4, or 5;
L¹ is a C₄-C₂₂ alkyl or C₄-C₂₂ alkenyl, said alkyl or alkenyl optionally has one or more biodegradable groups; each biodegradable group independently interrupts the alkyl or alkenyl group or is substituted at the terminus of the alkyl or alkenyl group, and said alkyl or alkenyl is optionally substituted with 1-5 substituents selected from R′; and
L² is a C₄-C₂₂ alkyl or C₄-C₂₂ alkenyl, said alkyl or alkenyl optionally interrupted by or terminated with one or more biodegradable groups; and said alkyl or alkenyl is optionally substituted with 1-5 substituents selected from R′;
each occurrence of R′ is independently selected from halogen, R″, OR″, SR″, CN, CO₂R″ and CON(R″)₂; and
each occurrence of R″ is independently selected from H and (C₁-C₆)alkyl, wherein said alkyl is optionally substituted with one or more substituents selected from halogen and OH.

[0902] In some embodiments, the lipid disclosed in US 2014/0308304 are of formula D:

[chemical structure]

### Formula D

[0903] or a pharmaceutically acceptable salt or stereoisomer thereof, wherein
m is 0, 1, 2, or 3;
n is 0, 1, 2, 3, 4, or 5;
R⁶ and R⁷ are each independently (i) C₁-C₄ linear or branched alkyl (e.g., methyl or ethyl) optionally substituted with 1-4 R′, or (ii) C₃-C₈ cycloalkyl (e.g., C₃-C₆ cycloalkyl); or R⁶ and R⁷ together with the nitrogen atom adjacent to them form a 3-6 membered ring;
L¹ is a C₄-C₂₂ alkyl or C₄-C₂₂ alkenyl, said alkyl or alkenyl optionally interrupted by or terminated with one or more biodegradable groups; and said alkyl or alkenyl is optionally substituted with 1-5 substituents selected from R′; and
L² is a C₄-C₂₂ alkyl or C₄-C₂₂ alkenyl, said alkyl or alkenyl optionally interrupted by or terminated with one or more biodegradable groups; and said alkyl or alkenyl is optionally substituted with 1-5 substituents selected from R′;
each occurrence of R′ is independently selected from halogen, R″, OR″, SR″, CN, CO₂R″ and CON(R″)₂; and
each occurrence of R″ is independently selected from H and (C₁-C₆)alkyl, wherein said alkyl is optionally substituted with one or more substituents selected from halogen and OH.

[0904] In some embodiments lipid disclosed in US 2014/0308304 are of formula E:

[chemical structure]

or a pharmaceutically acceptable salt or stereoisomer thereof, wherein
n is 0, 1, 2, 3, 4, or 5;
the group “amino acid” is an amino acid residue;
L¹ is a C₄-C₂₂ alkyl or C₄-C₂₂ alkenyl, said alkyl or alkenyl optionally interrupted by or terminated with one or more biodegradable groups, and said alkyl or alkenyl is optionally substituted with 1-5 substituents selected from R′; and
L² is a C₄-C₂₂ alkyl or C₄-C₂₂ alkenyl, said alkyl or alkenyl optionally interrupted by or terminated with one or more biodegradable groups, and said alkyl or alkenyl is optionally substituted with 1-5 substituents selected from R′;
each occurrence of R′ is independently selected from halogen, R″, OR″, SR″, CN, CO₂R″ and CON(R″)₂; and
each occurrence of R″ is independently selected from H and (C₁-C₆)alkyl, wherein said alkyl is optionally substituted with one or more substituents selected from halogen and OH.

[0905] The amino acid residue in formula E may have the formula —C(O)—C(R⁹)(NH₂), where R⁹ is an amino acid side chain.

[0906] In some embodiments, the lipid disclosed in US 2014/0308304 are of formula F:

[chemical structure]

or a pharmaceutically acceptable salt or stereoisomer thereof, wherein:
R⁶ and R⁷ are independently (i) C₁-C₄ linear or branched alkyl (e.g., methyl or ethyl) optionally substituted with 1-4 R′, or (ii) C₃-C₈ cycloalkyl (e.g., C₃-C₆ cycloalkyl); or R⁶ and R⁷ together with the nitrogen atom adjacent to them form a 3-6 membered ring;
L¹ is a C₄-C₂₂ alkyl or C₄-C₂₂ alkenyl optionally interrupted by or terminated with one or more biodegradable groups, and said alkyl or alkenyl is optionally substituted with 1-5 substituents selected from R′; and
L² is a C₄-C₂₂ alkyl or C₄-C₂₂ alkenyl optionally interrupted by or terminated with one or more biodegradable groups, and said alkyl or alkenyl is optionally substituted with 1-5 substituents selected from R′;
each occurrence of R′ is independently selected from halogen, R″, OR″, SR″, CN, CO₂R″ and CON(R″)₂;
each occurrence of R″ is independently selected from H and (C₁-C₆)alkyl, wherein said alkyl is optionally substituted with one or more substituents selected from halogen and OH.

[0907] In some embodiments, the lipid disclosed in US 2014/0308304 are of formula G:

[chemical structure]

or a pharmaceutically acceptable salt or stereoisomer thereof, wherein:
n is 0, 1, 2, 3, 4, or 5;
q is 1, 2, 3, or 4
R⁶ and R⁷ are independently (i) C₁-C₄ linear or branched alkyl (e.g., methyl or ethyl) optionally substituted with 1-4 R′, or (ii) C₃-C₈ cycloalkyl (e.g., C₃-C₆ cycloalkyl);
L¹ is a C₄-C₂₂ alkyl or C₄-C₂₂ alkenyl optionally interrupted by or terminated with one or more biodegradable groups, and said alkyl or alkenyl is optionally substituted with 1-5 substituents selected from R′; and
L² is a C₄-C₂₂ alkyl or C₄-C₂₂ alkenyl optionally interrupted by or terminated with one or more biodegradable groups, and said alkyl or alkenyl is optionally substituted with 1-5 substituents selected from R′;
each occurrence of R′ is independently selected from halogen, R″, OR″, SR″, CN, CO₂R″ and CON(R″)₂;
each occurrence of R″ is independently selected from H and (C₁-C₆)alkyl, wherein said alkyl is optionally substituted with one or more substituents selected from halogen and OH.

[0908] In some embodiments, an LNP described herein comprises a lipid, e.g., an ionizable lipid, disclosed in US 2013/0053572, which is incorporated herein by reference in its entirety.

[0909] In some embodiments, the lipids disclosed in US 2013/0053572 are of Formula A:

[chemical structure]

wherein:
n is 0, 1 or 2;
R¹ and R² are independently selected from H, (C₁-C₆)alkyl, heterocyclyl, and a polyamine, wherein said alkyl, heterocyclyl and polyamine are optionally substituted with one or more substituents selected from R′, or R¹, and R² can be taken together with the nitrogen to which they are attached to form a monocyclic heterocycle with 4-7 members optionally containing, in addition to the nitrogen, one or two additional heteroatoms selected from N, O and S, said monocyclic heterocycle is optionally substituted with one or more substituents selected from R′;
R³ is selected from H and (C₁-C₆)alkyl, wherein said alkyl is optionally substituted with one or more substituents selected from R′, or R³ can be taken together with R¹ to form a monocyclic heterocycle with 4-7 members optionally containing, in addition to the nitrogen, one or two additional heteroatoms selected from N, O and S, said monocyclic heterocycle is optionally substituted with one or more substituents selected from R′;
R⁴ is selected from H, (C₁-C₆)alkyl and O-alkyl, said alkyl is optionally substituted with one or more substituents selected from R′;
R⁵ is selected from H and (C₁-C₆)alkyl; or R⁵ can be taken together with R¹ to form a monocyclic heterocycle with 4-7 members optionally containing, in addition to the nitrogen, one or two additional heteroatoms selected from N, O and S, said monocyclic heterocycle is optionally substituted with one or more substituents selected from R′;
R′ is independently selected from halogen, R″, OR″, CN, CO₂R″ and CON(R″)₂;
R″ is selected from H and (C₁-C₆)alkyl, wherein said alkyl is optionally substituted with one or more substituents selected from halogen and OH;
L₁ is a C₄-C₂₂ alkenyl, said alkenyl is optionally substituted with one or more substituents selected from R′; and
L₂ is a C₄-C₂₂ alkenyl, said alkenyl is optionally substituted with one or more substituents selected from R′;
or any pharmaceutically acceptable salt or stereoisomer thereof.

[0910] In some embodiments, an LNP described herein comprises a lipid, e.g., an ionizable lipid, disclosed in US Application publication US2017/0119904, which is incorporated by reference herein, in its entirety.

[0911] In some embodiments, an LNP described herein comprises a lipid, e.g., an ionizable lipid, disclosed in PCT Application publication WO2021/204179, which is incorporated by reference herein, in its entirety.

[0912] In some embodiments, an LNP described herein comprises a lipid, e.g., an ionizable lipid, disclosed in PCT Application PCT/US2022/031383, which is incorporated by reference herein, in its entirety.

[0913] In some embodiments, an LNP described herein comprises an ionizable lipid of Table 2:

TABLE 2
Exemplary Ionizable Lipids

| Compound # | Structure |
|---|---|
| L-1 | [chemical structure] |
| L-2 | [chemical structure] |
| L-3 | [chemical structure] |
| L-4 | [chemical structure] |
| L-5 | [chemical structure] |
| L-6 | [chemical structure] |
| L-7 | [chemical structure] |
| L-8 | [chemical structure] |
| L-9 | [chemical structure] |
| L-10 | [chemical structure] |

ii. Structural Lipids

[0914] In some embodiments, an LNP comprises a structural lipid. Structural lipids can be selected from the group consisting of, but are not limited to, cholesterol, fecosterol, fucosterol, beta sitosterol, sitosterol, ergosterol, campesterol, stigmasterol, brassicasterol, tomatidine, cholic acid, sitostanol, litocholic acid, tomatine, ursolic acid, alpha-tocopherol, and mixtures thereof. In some embodiments, the structural lipid is cholesterol. In some embodiments, the structural lipid includes cholesterol and a corticosteroid (such as prednisolone, dexamethasone, prednisone, and hydrocortisone), or any combinations thereof. In some embodiments, a structural lipid is described in international patent application WO2019152557A1, which is incorporated herein by reference in its entirety.

[0915] In some embodiments, a structural lipid is a cholesterol analog. Using a cholesterol analog may enhance endosomal escape as described in Patel et al., Naturally-occuring cholesterol analogues in lipid nanoparticles induce polymorphic shape and enhance intracellular delivery of mRNA, Nature Communications (2020), which is incorporated herein by reference.

[0916] In some embodiments, a structural lipid is a phytosterol. Using a phytosterol may enhance endosomal escape as described in Herrera et al., Illuminating endosomal escape of polymorphic lipid nanoparticles that boost mRNA delivery, Biomaterials Science (2020), which is incorporated herein by reference.

[0917] In some embodiments, a structural lipid contains plant sterol mimetics for enhanced endosomal release.

iii. PEGylated Lipids

[0918] A PEGylated lipid is a lipid modified with polyethylene glycol. In some embodiments, the LNP comprises a compound of Formula I or a pharmaceutically acceptable salt thereof, as described herein above. In some embodiments, the LNP comprises a compound of Formula II or a pharmaceutically acceptable salt thereof, as described herein above.

[0919] In some embodiments, an LNP comprises an additional PEGylated lipid or PEG-modified lipid. A PEGylated lipid may be selected from the non-limiting group consisting of PEG-modified phosphatidylethanolamines, PEG-modified phosphatidic acids, PEG-modified ceramides, PEG-modified dialkylamines, PEG-modified diacylglycerols, PEG-modified dialkylglycerols, and mixtures thereof. For example, a PEG lipid may be PEG-c-DOMG, PEG-DMG, PEG-DLPE, PEG-DMPE, PEG-DPPC, or a PEG-DSPE lipid.

[0920] In some embodiments, the LNP comprises a PEGylated lipid disclosed in one of US 2019/0240354; US 2010/0130588; US 2021/0087135; WO 2021/204179; US 2021/0128488; US 2020/0121809; US 2017/0119904; US 2013/0108685; US 2013/0195920; US 2015/0005363; US 2014/0308304; US 2013/0053572; WO 2019/232095A1; WO 2021/077067; WO 2019/152557; US 2015/0203446; US 2017/0210697; US 2014/0200257; or WO 2019/089828A1, each of which is incorporated by reference herein in their entirety.

v. Phospholipids

[0921] In some embodiments, an LNP of the present disclosure comprises a phospholipid. Phospholipids useful in the compositions and methods may be selected from the non-limiting group consisting of 1,2-distearoyl-sn-glycero-3-phosphocholine (DSPC), 1,2-dioleoyl-sn-glycero-3-phosphoethanolamine (DOPE), 1,2-dilinoleoyl-sn-glycero-3-phosphocholine (DLPC), 1,2-dimyristoyl-sn-glycero-phosphocholine (DMPC), 1.2-dioleoyl-sn-glycero-3-phosphocholine (DOPC), 1,2-dipalmitoyl-sn-glycero-3-phosphocholine (DPPC), 1,2-diundecanoyl-sn-glycero-phosphocholine (DUPC), 1-palmitoyl-2-oleoyl-sn-glycero-3-phosphocholine (POPC), 1,2-di-O-octadecenyl-sn-glycero-3-phosphocholine (18:0 Diether PC), 1-oleoyl-2-cholesterylhemisuccinoyl-sn-glycero-3-phosphocholine (OChemsPC), 1-hexadecyl-sn-glycero-3-phosphocholine (C16 Lyso PC), 1,2-dilinolenoyl-sn-glycero-3-phosphocholine, 1,2-diarachidonoyl-sn-glycero-3-phosphocholine, 1,2-didocosahexaenoyl-sn-glycero-3-phosphocholine, 1,2-diphytanoylsn-glycero-3-phosphoethanolamine (ME 16.0 PE), 1,2-distearoyl-sn-glycero-3-phosphoethanolamine, 1,2-dilinoleoyl-sn-glycero-3-phosphoethanolamine, 1,2-dilinolenoyl-sn-glycero-3-phosphoethanolamine, 1,2-diarachidonoyl-sn-glycero-3-phosphoethanolamine, 1,2-didocosahexaenoyl-sn-glycero-3-phosphoethanolamine, 1,2-dioleoyl-sn-glycero-3-phospho-rac-(1-glycerol) sodium salt (DOPG), and sphingomyelin. In some embodiments, an LNP includes DSPC. In certain embodiments, an LNP includes DOPE. In some embodiments, an LNP includes both DSPC and DOPE.

[0922] In some embodiments, a phospholipid tail may be modified in order to promote endosomal escape as described in U.S. 2021/0121411, which is incorporated herein by reference.

[0923] In some embodiments, the LNP comprises a phospholipid disclosed in one of US 2019/0240354; US 2010/0130588; US 2021/0087135; WO 2021/204179; US 2021/0128488; US 2020/0121809; US 2017/0119904; US 2013/0108685; US 2013/0195920; US 2015/0005363; US 2014/0308304; US 2013/0053572; WO 2019/232095A1; WO 2021/077067; WO 2019/152557; US 2017/0210697; or WO 2019/089828A1, each of which is incorporated by reference herein in their entirety.

[0924] In some embodiments, phospholipids disclosed in US 2020/0121809 have the following structure:

[chemical structure]

wherein R₁ and R₂ are each independently a branched or straight, saturated or unsaturated carbon chain (e.g., alkyl, alkenyl, alkynyl).
vi. Targeting Moieties

[0925] In some embodiments, the lipid nanoparticle further comprises a targeting moiety. The targeting moiety may be an antibody or a fragment thereof. The targeting moiety may be capable of binding to a target antigen.

[0926] In some embodiments, the pharmaceutical composition comprises a targeting moiety that is operably connected to a lipid nanoparticle. In some embodiments, the targeting moiety is capable of binding to a target antigen. In some embodiments, the target antigen is expressed in a target organ.

[0927] In some embodiments, the target antigen is expressed more in the target organ than it is in the liver.

[0928] In some embodiments, the targeting moiety is an antibody as described in WO2016189532A1, which is incorporated herein by reference. For example, in some embodiments, the targeted particles are conjugated to a specific anti-CD38 monoclonal antibody (mAb), which allows specific delivery of the siRNAs encapsulated within the particles at a greater percentage to B-cell lymphocytes malignancies (such as MCL) than to other subtypes of leukocytes.

[0929] In some embodiments, the lipid nanoparticles may be targeted when conjugated/attached/associated with a targeting moiety such as an antibody.

vii. Zwitterionic Amino Lipids

[0930] In some embodiments, an LNP comprises a zwitterionic lipid. In some embodiments, an LNP comprising a zwitterionic lipid does not comprise a phospholipid.

[0931] Zwitterionic amino lipids have been shown to be able to self-assemble into LNPs without phospholipids to load, stabilize, and release mRNAs intracellular as described in U.S. Patent Application 20210121411, which is incorporated herein by reference in its entirety. Zwitterionic, ionizable cationic and permanently cationic helper lipids enable tissue-selective mRNA delivery and CRISPR-Cas9 gene editing in spleen, liver and lungs as described in Liu et al., Membrane-destablizing ionizable phospholipids for organ-selective mRNA delivery and CRISPR-Cas gene editing, Nat Mater. (2021), which is incorporated herein by reference in its entirety.

[0932] The zwitterionic lipids may have head groups containing a cationic amine and an anionic carboxylate as described in Walsh et al., Synthesis, Characterization and Evaluation of Ionizable Lysine-Based Lipids for siRNA Delivery, Bioconjug Chem. (2013), which is incorporated herein by reference in its entirety. Ionizable lysine-based lipids containing a lysine head group linked to a long-chain dialkylamine through an amide linkage at the lysine α-amine may reduce immunogenicity as described in Walsh et al., Synthesis, Characterization and Evaluation of Ionizable Lysine-Based Lipids for siRNA Delivery, Bioconjug Chem. (2013).

viii. Additional Lipid Components

[0933] In some embodiments, the LNP compositions of the present disclosure further comprise one or more additional lipid components capable of influencing the tropism of the LNP. In some embodiments, the LNP further comprises at least one lipid selected from DDAB, EPC, 14PA, 18BMP, DODAP, DOTAP, and C12-200 (see Cheng, et al. Nat Nanotechnol. 2020 April; 15(4): 313-320.; Dillard, et al. PNAS 2021 Vol. 118 No. 52.).

ix. LNP Pharmaceutical Compositions

[0934] In some embodiments, a nanoparticle includes an ionizable lipid, a phospholipid, a PEG lipid, and a structural lipid. In certain embodiments, the lipid component of the nanoparticle composition includes about 30 mol % to about 60 mol % ionizable lipid, about 0 mol % to about 30 mol % phospholipid, about 18.5 mol % to about 48.5 mol % structural lipid, and about 0 mol % to about 10 mol % of PEG lipid, provided that the total mol % does not exceed 100%. In some embodiments, the lipid component of the nanoparticle composition includes about 35 mol % to about 55 mol % ionizable lipid, about 5 mol % to about 25 mol % phospholipid, about 30 mol % to about 40 mol % structural lipid, and about 0 mol % to about 10 mol % of PEG lipid. In a particular embodiment, the lipid component includes about 50 mol % ionizable lipid, about 10 mol % phospholipid, about 38.5 mol % structural lipid, and about 1.5 mol % of PEG lipid. In another particular embodiment, the lipid component includes about 40 mol % ionizable lipid, about 20 mol % phospholipid, about 38.5 mol % structural lipid, and about 1.5 mol % of PEG lipid. In another particular embodiment, the lipid component includes about 48.5 mol % ionizable lipid, about 10 mol % phospholipid, about 40 mol % structural lipid, and about 1.5 mol % of PEG lipid. In another particular embodiment, the lipid component includes about 48.5 mol % ionizable lipid, about 10 mol % phospholipid, about 39 mol % structural lipid, and about 2.5 mol % of PEG lipid. In some embodiments, the phospholipid may be DOPE or DSPC. In other embodiments, the PEG lipid may be PEG-DMG and/or the structural lipid may be cholesterol. The amount of active agent in a nanoparticle composition may depend on the size, composition, desired target and/or application, or other properties of the nanoparticle composition as well as on the properties of the active agent. For example, the amount of active agent useful in a nanoparticle composition may depend on the size, sequence, and other characteristics of the active agent. The relative amounts of active agent and other elements (e.g., lipids) in a nanoparticle composition may also vary. In some embodiments, the wt/wt ratio of the lipid component to an enzyme in a nanoparticle composition may be from about 5:1 to about 60:1, such as 5:1, 6:1, 7:1, 8:1, 9:1, 10:1, 11:1, 12:1, 13:1, 14:1, 15:1, 16:1, 17:1, 18:1, 19:1, 20:1, 25:1, 30:1, 35:1, 40:1, 45:1, 50:1, and 60:1. The amount of a enzyme in a nanoparticle composition may, for example, be measured using absorption spectroscopy (e.g., ultraviolet-visible spectroscopy).

[0935] In some embodiments, a nanoparticle composition comprising an active agent of the present disclosure is formulated to provide a specific E:P ratio. The E:P ratio of the composition refers to the molar ratio of nitrogen atoms in one or more lipids to the number of phosphate groups in an RNA active agent. In general, a lower E:P ratio is preferred. The one or more enzymes, lipids, and amounts thereof may be selected to provide an E:P ratio from about 2:1 to about 30:1, such as 2:1, 3:1, 4:1, 5:1, 6:1, 7:1, 8:1, 9:1, 10:1, 12:1, 14:1, 16:1, 18:1, 20:1, 22:1, 24:1, 26:1, 28:1, or 30:1. In certain embodiments, the E:P ratio may be from about 2:1 to about 8:1. In other embodiments, the E:P ratio is from about 5:1 to about 8:1. For example, the E:P ratio may be about 5.0:1, about 5.5:1, about 5.67:1, about 6.0:1, about 6.5:1, or about 7.0:1.

[0936] The characteristics of a nanoparticle composition may depend on the components thereof. For example, a nanoparticle composition including cholesterol as a structural lipid may have different characteristics than a nanoparticle composition that includes a different structural lipid. Similarly, the characteristics of a nanoparticle composition may depend on the absolute or relative amounts of its components. For instance, a nanoparticle composition including a higher molar fraction of a phospholipid may have different characteristics than a nanoparticle composition including a lower molar fraction of a phospholipid. Characteristics may also vary depending on the method and conditions of preparation of the nanoparticle composition. Nanoparticle compositions may be characterized by a variety of methods. For example, microscopy (e.g., transmission electron microscopy or scanning electron microscopy) may be used to examine the morphology and size distribution of a nanoparticle composition. Dynamic light scattering or potentiometry (e.g., potentiometric titrations) may be used to measure Zeta potentials. Dynamic light scattering may also be utilized to determine particle sizes. Instruments such as the Zetasizer Nano ZS (Malvern Instruments Ltd, Malvern, Worcestershire, UK) may also be used to measure multiple characteristics of a nanoparticle composition, Such as particle size, polydispersity index, and Zeta potential.

[0937] The mean size of a nanoparticle composition may be between 10s of nm and 100s of nm, e.g., measured by dynamic light scattering (DLS). For example, the mean size may be from about 40 nm to about 150 nm, such as about 40 nm, 45 nm, 50 nm, 55 nm, 60 nm, 65 nm, 70 nm, 75 nm, 80 nm, 85 nm, 90 nm, 95 nm, 100 nm, 105 nm, 110 nm, 115 nm, 120 nm, 125 nm, 130 nm, 135 nm, 140 nm, 145 nm, or 150 nm. In some embodiments, the mean size of a nanoparticle composition may be from about 50 nm to about 100 nm, from about 50 nm to about 90 nm, from about 50 nm to about 80 nm, from about 50 nm to about 70 nm, from about 50 nm to about 60 nm, from about 60 nm to about 100 nm, from about 60 nm to about 90 nm, from about 60 nm to about 80 nm, from about 60 nm to about 70 nm, from about 70 nm to about 100 nm, from about 70 nm to about 90 nm, from about 70 nm to about 80 nm, from about 80 nm to about 100 nm, from about 80 nm to about 90 nm, or from about 90 nm to about 100 nm. In certain embodiments, the mean size of a nanoparticle composition may be from about 70 nm to about 100 nm. In a particular embodiment, the mean size may be about 80 nm. In other embodiments, the mean size may be about 100 nm.

[0938] A nanoparticle composition may be relatively homogenous. A polydispersity index may be used to indicate the homogeneity of a nanoparticle composition, e.g., the particle size distribution of the nanoparticle compositions. A small (e.g., less than 0.3) polydispersity index generally indicates a narrow particle size distribution. A nanoparticle composition may have a polydispersity index from about 0 to about 0.25, such as 0.01, 0.02, 0.03, 0.04, 0.05, 0.06, 0.07, 0.08, 0.09, 0.10, 0.11, 0.12, 0.13, 0.14, 0.15, 0.16, 0.17, 0.18, 0.19, 0.20, 0.21, 0.22, 0.23, 0.24, or 0.25.

[0939] The Zeta potential of a nanoparticle composition may be used to indicate the electrokinetic potential of the composition. For example, the Zeta potential may describe the surface charge of a nanoparticle composition. Nanoparticle compositions with relatively low charges, positive or negative, are generally desirable, as more highly charged species may interact undesirably with cells, tissues, and other elements in the body. In some embodiments, the Zeta potential of a nanoparticle composition may be from about −10 mV to about +20 mV, from about −10 mV to about +15 mV, from about −10 mV to about +10 mV, from about −10 mV to about +5 mV, from about −10 mV to about 0 mV, from about −10 mV to about −5 mV, from about −5 mV to about +20 mV, from about −5 mV to about +15 mV, from about −5 mV to about +10 mV, from about −5 mV to about +5 mV, from about −5 mV to about 0 mV, from about 0 mV, to about +20 mV, from about 0 mV to about +15 mV, from about 0 mV to about +10 mV, from about 0 mV to about +5 mV, from about +5 mV to about +20 mV, from about +5 mV, to about +15 mV, or from about +5 mV to about +10 mV.

[0940] The efficiency of encapsulation of a payload describes the amount of payload that is encapsulated or otherwise associated with a nanoparticle composition after preparation, relative to the initial amount provided. The encapsulation efficiency is desirably high (e.g., close to 100%). The encapsulation efficiency may be measured, for example, by comparing the amount of payload in a solution containing the nanoparticle composition before and after breaking up the nanoparticle composition with one or more organic solvents or detergents. Fluorescence may be used to measure the amount of free payload in a solution. For the nanoparticle compositions described herein, the encapsulation efficiency of a therapeutic and/or prophylactic may be at least 50%, for example 50%, 55%, 60%, 65%, 70%, 75%, 80%, 85%, 90%, 91%, 92%, 93%, 94%, 95%, 96%, 97%, 98%, 99%, or 100%. In some embodiments, the encapsulation efficiency may be at least 80%. In certain embodiments, the encapsulation efficiency may be at least 90%.

[0941] Lipids and their method of preparation are disclosed in, e.g., U.S. Pat. Nos. 8,569,256, 5,965,542 and U.S. Patent Publication Nos. 2016/0199485, 2016/0009637, 2015/0273068, 2015/0265708, 2015/0203446, 2015/0005363, 2014/0308304, 2014/0200257, 2013/086373, 2013/0338210, 2013/0323269, 2013/0245107, 2013/0195920, 2013/0123338, 2013/0022649, 2013/0017223, 2012/0295832, 2012/0183581, 2012/0172411, 2012/0027803, 2012/0058188, 2011/0311583, 2011/0311582, 2011/0262527, 2011/0216622, 2011/0117125, 2011/0091525, 2011/0076335, 2011/0060032, 2010/0130588, 2007/0042031, 2006/0240093, 2006/0083780, 2006/0008910, 2005/0175682, 2005/017054, 2005/0118253, 2005/0064595, 2004/0142025, 2007/0042031, 1999/009076 and PCT Pub. Nos. WO 99/39741, WO 2017/117528, WO 2017/004143, WO 2017/075531, WO 2015/199952, WO 2014/008334, WO 2013/086373, WO 2013/086322, WO 2013/016058, WO 2013/086373, WO2011/141705, and WO 2001/07548 and Semple et. al, Nature Biotechnology, 2010, 28, 172-176, the full disclosures of which are herein incorporated by reference in their entirety for all purposes.

[0942] A nanoparticle composition may include any substance useful in pharmaceutical compositions. For example, the nanoparticle composition may include one or more pharmaceutically acceptable excipients or accessory ingredients such as, but not limited to, one or more solvents, dispersion media, diluents, dispersion aids, suspension aids, granulating aids, disintegrants, fillers, glidants, liquid vehicles, binders, surface active agents, isotonic agents, thickening or emulsifying agents, buffering agents, lubricating agents, oils, preservatives, and other species. Excipients such as waxes, butters, coloring agents, coating agents, flavorings, and perfuming agents may also be included. Pharmaceutically acceptable excipients are well known in the art (see for example Remington's The Science and Practice of Pharmacy, 21^{st} Edition, A. R. Gennaro: Lippincott, Williams & Wilkins, Baltimore, Md., 2006). Other different lipids or liposomal formulations including nanoparticles and methods of administration include, but are not limited to, U.S. Patent Publication 20030203865, 20020150626, 20030032615, and 20040048787, which are specifically incorporated by reference to the extent they disclose formulations and other related aspects of administration and delivery of nucleic acids. Methods used for forming particles are also disclosed in U.S. Pat. Nos. 5,844,107, 5,877,302, 6,008,336, 6,077,835, 5,972,901, 6,200,801, and 5,972,900, which are incorporated by reference for those aspects.

[0943] In some embodiments, the LNP encapsulates the engineered retron, e.g., an engineered nucleic acid construct, ncRNA, vector system, RNA molecule, and/or engineered nucleic acid-enzyme construct as described herein.

[0944] In some embodiments, the lipid nanoparticle comprises: one or more ionizable lipids; one or more structural lipids; one or more PEGylated lipids; and one or more phospholipids. In some embodiments, the one or more ionizable lipids is selected from the group consisting of those disclosed in Table X.

[0945] In some embodiments, the one or more structural lipids are selected from the group consisting of cholesterol, fecosterol, beta sitosterol, sitosterol, ergosterol, campesterol, stigmasterol, brassicasterol, tomatidine, tomatine, ursolic acid, alpha-tocopherol, prednisolone, dexamethasone, prednisone, and hydrocortisone. In some embodiments, the one or more PEGylated lipids are selected from the group consisting of PEG-c-DOMG, PEG-DMG, PEG-DLPE, PEG-DMPE, PEG-DPPC, and PEG-DSPE.

[0946] In some embodiments, the one or more phospholipids are selected from the group consisting of 1,2-distearoyl-sn-glycero-3-phosphocholine (DSPC), 1,2-dioleoyl-sn-glycero-3-phosphoethanolamine (DOPE), 1,2-dilinoleoyl-sn-glycero-3-phosphocholine (DLPC), 1,2-dimyristoyl-sn-glycero-phosphocholine (DMPC), 1.2-dioleoyl-sn-glycero-3-phosphocholine (DOPC), 1,2-dipalmitoyl-sn-glycero-3-phosphocholine (DPPC), 1,2-diundecanoyl-sn-glycero-phosphocholine (DUPC), 1-palmitoyl-2-oleoyl-sn-glycero-3-phosphocholine (POPC), 1,2-di-O-octadecenyl-sn-glycero-3-phosphocholine (18:0 Diether PC), 1-oleoyl-2-cholesterylhemisuccinoyl-sn-glycero-3-phosphocholine (OChemsPC), 1-hexadecyl-sn-glycero-3-phosphocholine (C16 Lyso PC), 1,2-dilinolenoyl-sn-glycero-3-phosphocholine, 1,2-diarachidonoyl-sn-glycero-3-phosphocholine, 1,2-didocosahexaenoyl-sn-glycero-3-phosphocholine, 1,2-diphytanoylsn-glycero-3-phosphoethanolamine (ME 16.0 PE), 1,2-distearoyl-sn-glycero-3-phosphoethanolamine, 1,2-dilinoleoyl-sn-glycero-3-phosphoethanolamine, 1,2-dilinolenoyl-sn-glycero-3-phosphoethanolamine, 1,2-diarachidonoyl-sn-glycero-3-phosphoethanolamine, 1,2-didocosahexaenoyl-sn-glycero-3-phosphoethanolamine, 1,2-dioleoyl-sn-glycero-3-phospho-rac-(1-glycerol) sodium salt (DOPG), and sphingomyelin.

[0947] In some embodiments, the lipid nanoparticle comprises about 48.5 mol % ionizable lipid, about 10 mol % phospholipid, about 40 mol % structural lipid, and about 1.5 mol % of PEG lipid.

[0948] In some embodiments, the lipid nanoparticle comprises about 48.5 mol % ionizable lipid, about 10 mol % phospholipid, about 39 mol % structural lipid, and about 2.5 mol % of PEG lipid. In some embodiments, the LNP further comprises a targeting moiety operably connected to the LNP. In some embodiments, the LNP further comprises one or more additional components selected from the group consisting of DDAB, EPC, 14PA, 18BMP, DODAP, DOTAP, and C12-200.

[0949] In some embodiments, the engineered retron can be used for gene transfer, which may be performed under ex vivo or in vivo conditions. Ex vivo gene therapy refers to the isolation of cells from a subject, the delivery of a nucleic acid into cells in vitro, and the return of the modified cells back into the subject. This may involve the collection of a biological sample comprising cells from the subject. For example, blood can be obtained by venipuncture, and solid tissue samples can be obtained by surgical techniques according to methods well known in the art.

[0950] Usually, but not always, the subject who receives the cells (e.g., the recipient) is also the subject from whom the cells are harvested or obtained, which provides the advantage that the donated cells are autologous. However, cells can be obtained from another subject (e.g., a donor), a culture of cells from a donor, or from established cell culture lines. Accordingly, in some embodiments the cells are allogeneic to the recipient. Cells may be obtained from the same or a different species than the subject to be treated, but preferably are of the same species, and more preferably of the same immunological profile as the subject. Such cells can be obtained, for example, from a biological sample comprising cells from a close relative or matched donor, then transfected with nucleic acids (e.g., comprising an engineered retron), and administered to a subject in need of genome modification, for example, for treatment of a disease or condition.

[0951] In other embodiments, the engineered retron can be introduced in vivo (e.g., used in gene therapy) by physically delivering the engineered retron to a subject. Examples of physically introducing the engineered retron includes via injections, electroporation and transfection (e.g., calcium-mediated or liposome tranfection, or the like).

[0952] K. Kits

[0953] Also provided are kits comprising engineered retrons (e.g., engineered nucleic acid constructs, or engineered nucleic acid-enzyme constructs) as described herein.

[0954] In some embodiments, the kit provides an engineered retron construct or a vector system comprising such a retron construct. In some embodiments, the engineered retron construct, included in the kit, comprises a heterologous sequence capable of providing a cell with a nucleic acid encoding a protein or regulatory RNA of interest, a cellular barcode, a donor polynucleotide suitable for use in gene editing, e.g., by homology directed repair (HDR) or recombination-mediated genetic engineering (recombineering), or a CRISPR protospacer DNA sequence for use in molecular recording. Other agents may also be included in the kit such as transfection agents, host cells, suitable media for culturing cells, buffers, and the like.

[0955] In the context of a kit, agents can be provided in liquid or solid form in any convenient packaging (e.g., stick pack, dose pack, etc.). The agents of a kit can be present in the same or separate containers. The kits may contain any one or more of the components described herein in one or more containers. The components may be prepared sterilely, packaged in a syringe and shipped refrigerated. Alternatively it may be housed in a vial or other container for storage. A second container may have other components prepared sterilely. Alternatively the kits may include the active agents premixed and shipped in a vial, tube, or other container.

[0956] The kits may have a variety of forms, such as a blister pouch, a shrink wrapped pouch, a vacuum sealable pouch, a sealable thermoformed tray, or a similar pouch or tray form, with the accessories loosely packed within the pouch, one or more tubes, containers, a box or a bag. The kits may be sterilized after the accessories are added, thereby allowing the individual accessories in the container to be otherwise unwrapped. The kits can be sterilized using any appropriate sterilization techniques, such as radiation sterilization, heat sterilization, or other sterilization methods known in the art. The kits may also include other components, depending on the specific application, for example, containers, cell media, salts, buffers, reagents, syringes, needles, a fabric, such as gauze, for applying or removing a disinfecting agent, disposable gloves, a support for the agents prior to administration, etc. Some aspects of this disclosure provide kits comprising a nucleic acid construct comprising a nucleotide sequence encoding the various components of the retron-based editing system described herein.

[0957] In addition to the above components, the subject kits may further include (in some embodiments) instructions for practicing the subject methods. These instructions may be present in the subject kits in a variety of forms, one or more of which may be present in the kit. One form in which these instructions may be present is as printed information on a suitable medium or substrate, e.g., a piece or pieces of paper on which the information is printed, in the packaging of the kit, in a package insert, and the like. Yet another form of these instructions is a computer readable medium, e.g., diskette, compact disk (CD), flash drive, and the like, on which the information has been recorded. Yet another form of these instructions that may be present is a website address which may be used via the internet to access the information at a remote site. In some embodiments, information provided on the website is periodically updated to provide, for example, the most up-to-date information. The written instructions may be in a form prescribed by a governmental agency regulating the manufacture, use, or sale of pharmaceuticals or biological products, which can also reflect approval by the agency of manufacture, use or sale for animal administration. As used herein, “promoted” includes all methods of doing business including methods of education, hospital and other clinical instruction, scientific inquiry, drug discovery or development, academic research, pharmaceutical industry activity including pharmaceutical sales, and any advertising or other promotional activity including written, oral and electronic communication of any form, associated with the disclosure.

[0958] Other aspects of this disclosure provide kits comprising one or more nucleic acid constructs (e.g., one or more mRNA or circular RNA molecules encoding the components of the retron-based genome editing system) In various embodiments, all nucleic acid constructs can be based on RNA molecules, i.e., and “all-RNA system.” For example, each of the components of the editing system could be expressed from a mRNA molecule, which would be delivered to a target cell by one more more delivery methods (e.g., LNP delivery).

[0959] L. Cells

[0960] One aspect of the disclosure provides an isolated host cell that includes one or more of the compositions described herein, including, but not limited to, engineered retrons and/or retron components, engineered ncRNAs, engineered msDNA, engineered RT, nucleic acid molecules encoding the engineered retrons and/or retron components, and vector or vector systems encoding the engineered retrons and/or retron components, and any combinations thereof. In some embodiments, the host cell is a prokaryotic cell, an archaeal cell, or a eukaryotic host cell. In some embodiments, the eukaryotic host cell is a mammalian cell, such as a human cell, a non-human cell, or a non-human mammalian cell. In some embodiments, the host cell is an artificial cell or genetically modified cell. In some embodiments, the host cell is in vitro, such as a tissue culture cell. In some embodiments, the host cell is within a living host organism.

[0961] Cells that may contain any of the compositions described herein. The methods described herein are used to deliver recombinant retrons or components thereof into a eukaryotic cell (e.g., a mammalian cell, such as a human cell). In some embodiments, the cell is in vitro (e.g., cultured cell. In some embodiments, the cell is in vivo (e.g., in a subject such as a human subject). In some embodiments, the cell is ex vivo (e.g., isolated from a subject and may be administered back to the same or a different subject).

[0962] The present disclosure contemplates the use of any suitable host cell. For example, the cell host can be a mammalian cell. Mammalian cells of the present disclosure include human cells, primate cells (e.g., vero cells), rat cells (e.g., GH3 cells, OC23 cells) or mouse cells (e.g., MC3T3 cells). There are a variety of human cell lines, including, without limitation, human embryonic kidney (HEK) cells, HeLa cells, cancer cells from the National Cancer Institute's 60 cancer cell lines (NCI60), DU145 (prostate cancer) cells, Lncap (prostate cancer) cells, MCF-7 (breast cancer) cells, MDA-MB-438 (breast cancer) cells, PC3 (prostate cancer) cells, T47D (breast cancer) cells, THP-1 (acute myeloid leukemia) cells, U87 (glioblastoma) cells, SHSY5Y human neuroblastoma cells (cloned from a myeloma) and Saos-2 (bone cancer) cells. In some embodiments, the cells can be human embryonic kidney (HEK) cells (e.g., HEK 293 or HEK 293T cells). In some embodiments, the cells can be stem cells (e.g., human stem cells) such as, for example, pluripotent stem cells (e.g., human pluripotent stem cells including human induced pluripotent stem cells (hiPSCs)). A stem cell refers to a cell with the ability to divide for indefinite periods in culture and to give rise to specialized cells. A pluripotent stem cell refers to a type of stem cell that is capable of differentiating into all tissues of an organism, but not alone capable of sustaining full organismal development. A human induced pluripotent stem cell refers to a somatic (e.g., mature or adult) cell that has been reprogrammed to an embryonic stem cell-like state by being forced to express genes and factors important for maintaining the defining properties of embryonic stem cells (see, e.g., Takahashi and Yamanaka, Cell 126 (4): 663-76, 2006, incorporated by reference herein). Human induced pluripotent stem cells express stem cell markers and are capable of generating cells characteristic of all three germ layers (ectoderm, endoderm, mesoderm).

[0963] Some aspects of this disclosure provide cells comprising any of the compositions disclosed herein, including, but not limited to, engineered retrons and/or retron components, engineered ncRNAs, engineered msDNA, engineered RT, nucleic acid molecules encoding the engineered retrons and/or retron components, and vector or vector systems encoding the engineered retrons and/or retron components, and any combinations thereof. In some embodiments, a host cell is transiently or non-transiently transfected with one or more delivery systems described herein, including virus-based systems, virus-like particle systems, and non-virus-base delivery, including LNPs and liposomes. In some embodiments, a cell is transfected as it naturally occurs in a subject. In some embodiments, a cell that is transfected is taken from a subject, i.e., ex vivo transfection. In some embodiments, the cell is derived from cells taken from a subject, such as a cell line. A wide variety of cell lines for tissue culture are known in the art. Examples of cell lines include, but are not limited to, C8161, CCRF-CEM, MOLT, mIMCD-3, NHDF, HeLa-S3, Huh1, Huh4, Huh7, HUVEC, HASMC, HEKn, HEKa, MiaPaCell, Panc1, PC-3, TF1, CTLL-2, CIR, Rat6, CV1, RPTE, A10, T24, J82, A375, ARH-77, Calu1, SW480, SW620, SKOV3, SK-UT, CaCo2, P388D1, SEM-K2, WEHI-231, HB56, TIB55, Jurkat, J45.01, LRMB, Bcl-1, BC-3, IC21, DLD2, Raw264.7, NRK, NRK-52E, MRC5, MEF, Hep G2, HeLa B, HeLa T4, COS, COS-1, COS-6, COS-M6A, BS-C-1 monkey kidney epithelial, BALB/3T3 mouse embryo fibroblast, 3T3 Swiss, 3T3-L1, 132-d5 human fetal fibroblasts; 10.1 mouse fibroblasts, 293-T, 3T3, 721, 9L, A2780, A2780ADR, A2780cis, A 172, A20, A253, A431, A-549, ALC, B16, B35, BCP-1 cells, BEAS-2B, bEnd.3, BHK-21, BR 293. BxPC3. C3H-IOTI/2, C6/36, Ca1-27, CHO, CHO-7, CHO-IR, CHO-K1, CHO-K2, CHO-T, CHO Dhfr −/−, COR-L23, COR-L23/CPR, COR-L23/5010, COR-L23/R23, COS-7, COV-434, CML T1, CMT, CT26, D17, DH82, DU145, DuCaP, EL4, EM2, EM3, EMT6/AR1, EMT6/AR10.0, FM3, H1299, H69, HB54, HB55, HCA2, HEK-293, HeLa, Hepa1c1c7, HL-60, HMEC, HT-29, Jurkat, JY cells, K562 cells, Ku812, KCL22, KG1, KYO1, LNCap, Ma-Mel 1-48, MC-38, MCF-7, MCF-10A, MDA-MB-231, MDA-MB-468, MDA-MB-435, MDCK II, MDCK 11, MOR/0.2R, MONO-MAC 6, MTD-1A, MyEnd, NCI-H69/CPR, NCI-H69/LX10, NCI-H69/LX20, NCI-H69/LX4, NIH-3T3, NALM-1, NW-145, OPCN/OPCT cell lines, Peer, PNT-1A/PNT 2, RenCa, RIN-5F, RMA/RMAS, Saos-2 cells, Sf-9, SkBr3, T2, T-47D, T84, THP1 cell line, U373, U87, U937, VCaP, Vero cells, WM39, WT-49, X63, YAC-1, YAR, and transgenic varieties thereof.

[0964] Cell lines are available from a variety of sources known to those with skill in the art (see, e.g., the American Type Culture Collection (ATCC) (Manassas, Va.)). In some embodiments, a cell transfected with one or more retron delivery systems described herein is used to establish a new cell line comprising one or more nucleic acid molecules encoding the recombinant retron-based gene editing systems described herein, or encoding at last a component of said systems (e.g., a recombinant ncRNA or a recombinant retron RT).

[0965] M. Pharmaceutical Compositions

[0966] The engineered retron-based genome editing systems described herein, or one or more components thereof (e.g., engineered ncRNAs, engineered msDNA, engineered RT, nucleic acid molecules encoding the engineered retrons and/or retron components, guide RNAs, programmable nucleases) may be provided as pharmaceutical compositions. For example, one or more LNPs or other non-virus-based delivery system comprising one or more circular or linear RNA molecules encoding each of the components of the retron-based genome editing system may be formulated as a pharmaceutical composition for administering to a subject in need (e.g., a human in need of gene editing).

[0967] Formulations can include, without limitation, saline, liposomes, lipid nanoparticles, polymers, peptides, proteins, cells transfected with viral vectors (e.g., for transfer or transplantation into a subject) and combinations thereof.

[0968] Formulations of the pharmaceutical compositions described herein may be prepared by any method known or hereafter developed in the art of pharmacology. As used herein the term “pharmaceutical composition” refers to compositions comprising at least one active ingredient and optionally one or more pharmaceutically acceptable excipients.

[0969] In general, such preparatory methods include the step of associating the active ingredient with an excipient and/or one or more other accessory ingredients. As used herein, the phrase “active ingredient” generally refers an engineered retron as described herein.

[0970] A pharmaceutical composition in accordance with the present disclosure may be prepared, packaged, and/or sold in bulk, as a single unit dose, and/or as a plurality of single unit doses. As used herein, a “unit dose” refers to a discrete amount of the pharmaceutical composition comprising a predetermined amount of the active ingredient. The amount of the active ingredient is generally equal to the dosage of the active ingredient which would be administered to a subject and/or a convenient fraction of such a dosage such as, for example, one-half or one-third of such a dosage.

[0971] Other aspects of the present disclosure relate to pharmaceutical compositions comprising any of the various components of the recombinant retron-based genome editing systems described herein, including, but not limited to, engineered retrons and/or retron components, engineered ncRNAs, engineered msDNA, engineered RT, nucleic acid molecules encoding the engineered retrons and/or retron components, programmable nucleases (e.g., RNA-guided nucleases), guide RNAs, and vector or vector systems encoding the engineered retrons and/or retron components, and any combinations thereof. The term“pharmaceutical composition”, as used herein, refers to a composition formulated for pharmaceutical use. In some embodiments, the pharmaceutical composition further comprises a pharmaceutically acceptable carrier. In some embodiments, the pharmaceutical composition comprises additional agents (e.g. for specific delivery, increasing half-life, or other therapeutic compounds).

[0972] As used here, the term “pharmaceutically-acceptable carrier” means a pharmaceutically-acceptable material, composition or vehicle, such as a liquid or solid filler, diluent, excipient, manufacturing aid (e.g., lubricant, talc magnesium, calcium or zinc stearate, or steric acid), or solvent encapsulating material, involved in carrying or transporting the compound from one site (e.g., the delivery site) of the body, to another site (e.g., organ, tissue or portion of the body). A pharmaceutically acceptable carrier is“acceptable” in the sense of being compatible with the other ingredients of the formulation and not injurious to the tissue of the subject (e.g., physiologically compatible, sterile, physiologic pH, etc.).

[0973] Some examples of materials which can serve as pharmaceutically-acceptable carriers include: (1) sugars, such as lactose, glucose and sucrose; (2) starches, such as corn starch and potato starch; (3) cellulose, and its derivatives, such as sodium carboxymethyl cellulose, methylcellulose, ethyl cellulose, microcrystalline cellulose and cellulose acetate; (4) powdered tragacanth; (5) malt; (6) gelatin; (7) lubricating agents, such as magnesium stearate, sodium lauryl sulfate and talc; (8) excipients, such as cocoa butter and suppository waxes; (9) oils, such as peanut oil, cottonseed oil, safflower oil, sesame oil, olive oil, corn oil and soybean oil; (10) glycols, such as propylene glycol; (11) polyols, such as glycerin, sorbitol, mannitol and polyethylene glycol (PEG); (12) esters, such as ethyl oleate and ethyl laurate; (13) agar; (14) buffering agents, such as magnesium hydroxide and aluminum hydroxide; (15) alginic acid; (16) pyrogen-free water; (17) isotonic saline; (18) Ringer's solution; (19) ethyl alcohol; (20) pH buffered solutions; (21) polyesters, polycarbonates and/or polyanhydrides; (22) bulking agents, such as polypeptides and amino acids (23) serum component, such as serum albumin, HDL and LDL; (22) C₂-C₁₂ alcohols, such as ethanol; and (23) other non-toxic compatible substances employed in pharmaceutical formulations. Wetting agents, coloring agents, release agents, coating agents, sweetening agents, flavoring agents, perfuming agents, preservative and antioxidants can also be present in the formulation. The terms such as“excipient”, “carrier”, “pharmaceutically acceptable carrier” or the like are used interchangeably herein.

[0974] In some embodiments, the pharmaceutical composition is formulated for delivery to a subject, e.g., for gene editing. Suitable routes of administrating the pharmaceutical composition described herein include, without limitation: topical, subcutaneous, transdermal, intradermal, intralesional, intraarticular, intraperitoneal, intravesical, transmucosal, gingival, intradental, intracochlear, transtympanic, intraorgan, epidural, intrathecal, intramuscular, intravenous, intravascular, intraosseus, periocular, intratumoral, intracerebral, and intracerebroventricular administration.

[0975] In some embodiments, the pharmaceutical composition described herein is administered locally to a diseased site (e.g., tumor site). In some embodiments, the pharmaceutical composition described herein is administered to a subject by injection, by means of a catheter, by means of a suppository, or by means of an implant, the implant being of a porous, non-porous, or gelatinous material, including a membrane, such as a sialastic membrane, or a fiber.

[0976] In other embodiments, the pharmaceutical composition described herein is delivered in a controlled release system. In one embodiment, a pump may be used (see, e.g., Langer, 1990, Science 249:1527-1533; Sefton, 1989, CRC Crit. Ref. Biomed. Eng. 14:201; Buchwald et al., 1980, Surgery 88:507; Saudek et al., 1989, N. Engl. J. Med. 321:574). In another embodiment, polymeric materials can be used. (See, e.g., Medical Applications of Controlled Release (Langer and Wise eds., CRC Press, Boca Raton, Fla., 1974); Controlled Drug Bioavailability, Drug Product Design and Performance (Smolen and Ball eds., Wiley, New York, 1984); Ranger and Peppas, 1983, Macromol. Sci. Rev. Macromol. Chem. 23:61. See also Levy et al., 1985, Science 228:190; During et al., 1989, Ann. Neurol. 25:351; Howard et al., 1989, J. Neurosurg. 71:105). Other controlled release systems are discussed, for example, in Langer, supra.

[0977] In some embodiments, the pharmaceutical composition is formulated in accordance with routine procedures as a composition adapted for intravenous or subcutaneous administration to a subject, e.g., a human. In some embodiments, pharmaceutical composition for administration by injection are solutions in sterile isotonic aqueous buffer. Where necessary, the pharmaceutical can also include a solubilizing agent and a local anesthetic such as lignocaine to ease pain at the site of the injection. Generally, the ingredients are supplied either separately or mixed together in unit dosage form, for example, as a dry lyophilized powder or water free concentrate in a hermetically sealed container such as an ampoule or sachette indicating the quantity of active agent. Where the pharmaceutical is to be administered by infusion, it can be dispensed with an infusion bottle containing sterile pharmaceutical grade water or saline. Where the pharmaceutical composition is administered by injection, an ampoule of sterile water for injection or saline can be provided so that the ingredients can be mixed prior to administration.

[0978] A pharmaceutical composition for systemic administration may be a liquid, e.g., sterile saline, lactated Ringer's or Hank's solution. In addition, the pharmaceutical composition can be in solid forms and re-dissolved or suspended immediately prior to use. Lyophilized forms are also contemplated.

[0979] The pharmaceutical composition can be contained within a lipid particle or vesicle, such as a liposome or microcrystal or LNP, which is also suitable for parenteral administration. The particles can be of any suitable structure, such as unilamellar or plurilamellar, so long as compositions are contained therein. Compounds can be entrapped in “stabilized plasmid-lipid particles” (SPLP) containing the fusogenic lipid dioleoylphosphatidylethanolamine (DOPE), low levels (5-10 mol %) of cationic lipid, and stabilized by a polyethyleneglycol (PEG) coating (Zhang Y. P. et al., Gene Ther. 1999, 6:1438-47). Positively charged lipids such as N-[1-(2,3-dioleoyloxi)propyl]-N,N,N-trimethyl-amoniummethylsulfate, or “DOTAP,” are particularly preferred for such particles and vesicles. The preparation of such lipid particles is well known. See, e.g., U.S. Pat. Nos. 4,880,635; 4,906,477; 4,911,928; 4,917,951; 4,920,016; and 4,921,757; each of which is incorporated herein by reference.

[0980] Further, the pharmaceutical composition can be provided as a pharmaceutical kit comprising (a) a container containing a recombinant retron-based genome editing system or one or more components thereof in lyophilized form and (b) a second container containing a pharmaceutically acceptable diluent (e.g., sterile water) for injection. The pharmaceutically acceptable diluent can be used for reconstitution or dilution of the lyophilized system of the invention. Optionally associated with such container(s) can be a notice in the form prescribed by a governmental agency regulating the manufacture, use or sale of pharmaceuticals or biological products, which notice reflects approval by the agency of manufacture, use or sale for human administration.

[0981] In another aspect, an article of manufacture containing materials useful for the treatment of the diseases described above is included. In some embodiments, the article of manufacture comprises a container and a label. Suitable containers include, for example, bottles, vials, syringes, and test tubes. The containers may be formed from a variety of materials such as glass or plastic. In some embodiments, the container holds a composition that is effective for treating a disease described herein and may have a sterile access port. For example, the container may be an intravenous solution bag or a vial having a stopper pierce-able by a hypodermic injection needle. The active agent in the composition is a compound of the invention. In some embodiments, the label on or associated with the container indicates that the composition is used for treating the disease of choice. The article of manufacture may further comprise a second container comprising a pharmaceutically-acceptable buffer, such as phosphate-buffered saline, Ringer's solution, or dextrose solution. It may further include other materials desirable from a commercial and user standpoint, including other buffers, diluents, filters, needles, syringes, and package inserts with instructions for use.

[0982] N. Use and Methods of Use

[0983] The engineered retron comprising the heterologous nucleic acid sequence can be used in a variety of applications, several non-limiting examples of which are described herein. In general, the engineered retron can be used in any suitable organism. In some embodiments, the organism is a eukaryote.

[0984] In some embodiments, the organism is an animal. In some embodiments, the animal is a fish, an amphibian, a reptile, a mammal, or a bird. In some embodiments, the animal is a farm animal or agriculture animal. Non-limiting examples of farm and agriculture animals include horses, goats, sheep, swine, cattle, llamas, alpacas, and birds, e.g., chickens, turkeys, ducks, and geese. In some embodiments, the animal is a non-human primate, e.g., baboons, capuchin monkeys, chimpanzees, lemurs, macaques, marmosets, tamarins, spider monkeys, squirrel monkeys, and vervet monkeys. In some embodiments, the animal is a pet. Non-limiting examples of pets include dogs, cats horses, wolfs, rabbits, ferrets, gerbils, hamsters, chinchillas, fancy rats, guinea pigs, canaries, parakeets, and parrots.

[0985] In some embodiments, the organism is a plant. Plants that may be transfected with an engineered retron include monocots and dicots. Particular examples include, but are not limited to, corn (maize), sorghum, wheat, sunflower, potato, cotton, rice, soybean, sugarbeet, sugarcane, tobacco, barley, and oilseed rape, Brassica sp., alfalfa, rye, millet, safflower, peanuts, sweet potato, cassava, coffee, coconut, pineapple, citrus trees, cocoa, tea, banana, avocado, fig, guava, mango, olive, papaya, cashew, macadamia, almond, oats, vegetables, ornamentals, and conifers. Vegetables include, but are not limited to, crucifers, peppers, tomatoes, lettuce, green beans, lima beans, peas, and members of the genus Cucumis such as cucumber, cantaloupe, and musk melon. Ornamentals include, but are not limited to, azalea, hydrangea, hibiscus, roses, tulips, daffodils, petunias, carnation, poinsettia, and chrysanthemum.

[0986] In some embodiments, heterologous nucleic acid sequences can be added to the subject engineered retron to provide a cell with a heterologous nucleic acid encoding a protein or regulatory RNA of interest, a cellular barcode, a donor polynucleotide suitable for use in gene editing, e.g., by homology directed repair (HDR) or recombination-mediated genetic engineering (recombineering), or a CRISPR protospacer DNA sequence for use in molecular recording, as discussed further below. Such heterologous sequences may be inserted, for example, into the msr locus or the msd locus such that the heterologous sequence is transcribed by the retron reverse transcriptase as part of the msDNA product.

[0987] In some embodiments, the engineered retrons described herein may be used for research tools, such as kits, functional genomics assays, and generating engineered cell lines and animal models for research and drug screening. The kit may comprise one or more reagents in addition to the engineered retron, such as a buffer, a control reagent, a control vector, a control RNA polynucleotide, a reagent for in vitro production of the polypeptide from DNA, and adaptors for sequencing. A buffer can be, for example, a stabilization buffer, a reconstituting buffer, a diluting buffer, a wash buffer, or a buffer for introducing a polypeptide and/or polynucleotide of the kit into a cell. In some instances, a kit can comprise one or more additional reagents specific for plants. One or more additional reagents for plants can include, for example, soil, nutrients, plants, seeds, spores, Agrobacterium, a T-DNA vector, and a pBINAR vector.

### Production of Protein or RNA

[0988] In some embodiments, the single-stranded msDNA generated by the engineered retron of the invention can be used to produce a desired product of interest in cells.

[0989] In some embodiments, the retron is engineered with a heterologous sequence encoding a polypeptide of interest to allow production of the polypeptide from the retron msDNA generated in a cell. The polypeptide of interest may be any type of protein/peptide including, without limitation, an enzyme, an extracellular matrix protein, a receptor, transporter, ion channel, or other membrane protein, a hormone, a neuropeptide, an antibody, or a cytoskeletal protein, a functional fragment thereof, or a biologically active domain of interest. In some embodiments, the protein is a therapeutic protein, therapeutic antibody for use in treatment of a disease, or a template to fix a mutation or mutated exon in the genome.

[0990] Non-limiting examples of polypeptides of interest include: growth hormones, insulin-like growth factors (IGF-1), Fat-1, Phytase, xylanase, beta-glucanase, Lysozyme or lysostaphin, Histone deacetylase such as HDAC6, CD163, etc.

[0991] In other embodiments, the retron is engineered with a heterologous sequence encoding an RNA of interest to allow production of the RNA from the retron in a cell. The RNA of interest may be any type of RNA including, without limitation, a RNA interference (RNAi) nucleic acid or regulatory RNA such as, but not limited to, a microRNA (miRNA), a small interfering RNA (siRNA), a short hairpin RNA (shRNA), a small nuclear RNA (snRNA), a long non-coding RNA (IncRNA), an antisense nucleic acid, and the like.

### Gene Editing

[0992] In some embodiments, the retron is used for genome editing a desired site. A retron is engineered with a heterologous nucleic acid sequence encoding a donor polynucleotide suitable for use with nuclease genome editing system. The nuclease is designed to specifically target a location proximal to the desired edit (the nuclease should be designed such that it will not cut the target once the edit is properly installed). The nuclease (e.g., CAS or non-CAS) is linked to the retron, either by direct fusion to the RT or by fusion of the msDNA to the gRNA (only applicable for RNA-guided nucleases). A heterologous nucleic acid sequence is inserted into the retron msd. See for example FIG. 3, which shows a marker representing the edit.

[0993] In some embodiments, the heterologous nucleic acid sequence has 10-100 or more bp of homologous nucleic acid sequence to the genome on both sides of the desired edit. The desired edit (insertion, deletion, or mutation) is in between the homologous sequence.

[0994] In some embodiments, donor polynucleotides comprise a sequence comprising an intended genome edit flanked by a pair of homology arms responsible for targeting the donor polynucleotide to the target locus to be edited in a cell. The donor polynucleotide typically comprises a 5′ homology arm that hybridizes to a 5′ genomic target sequence and a 3′ homology arm that hybridizes to a 3′ genomic target sequence. The homology arms are referred to herein as 5′ and 3′ (i.e., upstream and downstream) homology arms, which relate to the relative position of the homology arms to the nucleotide sequence comprising the intended edit within the donor polynucleotide. The 5′ and 3′ homology arms hybridize to regions within the target locus in the genomic DNA to be modified, which are referred to herein as the “5′ target sequence” and “3′ target sequence,” respectively.

[0995] The homology arm must be sufficiently complementary for hybridization to the target sequence to mediate homologous recombination between the donor polynucleotide and genomic DNA at the target locus. For example, a homology arm may comprise a nucleotide sequence having at least about 80-100% sequence identity to the corresponding genomic target sequence, including any percent identity within this range, such as at least 80%, 81%, 82%, 83%, 84%, 85%, 86%, 87%, 88%, 89%, 90%, 91%, 92%, 93%, 94%, 95%, 96%, 97%, 98%, 99% or 100% sequence identity thereto, wherein the nucleotide sequence comprising the intended edit can be integrated into the genomic DNA by HDR at the genomic target locus recognized (i.e., having sufficient complementary for hybridization) by the 5′ and 3′ homology arms.

[0996] In some embodiments, the corresponding homologous nucleotide sequences in the genomic target sequence (i.e., the “5′ target sequence” and “3′ target sequence”) flank a specific site for cleavage and/or a specific site for introducing the intended edit. The distance between the specific cleavage site and the homologous nucleotide sequences (e.g., each homology arm) can be several hundred nucleotides. In some embodiments, the distance between a homology arm and the cleavage site is 200 nucleotides or less (e.g., 0, 10, 20, 30, 50, 75, 100, 125, 150, 175, and 200 nucleotides). In most cases, a smaller distance may give rise to a higher gene targeting rate. In some embodiments, the donor polynucleotide is substantially identical to the target genomic sequence, across its entire length except for the sequence changes to be introduced to a portion of the genome that encompasses both the specific cleavage site and the portions of the genomic target sequence to be altered.

[0997] A homology arm can be of any length, e.g. 10 nucleotides or more, 15 nucleotides or more, 20 nucleotides or more, 50 nucleotides or more, 100 nucleotides or more, 250 nucleotides or more, 300 nucleotides or more, 350 nucleotides or more, 400 nucleotides or more, 450 nucleotides or more, 500 nucleotides or more, 1000 nucleotides (1 kb) or more, 5000 nucleotides (5 kb) or more, 10000 nucleotides (10 kb) or more, etc. In some instances, the 5′ and 3′ homology arms are substantially equal in length to one another. However, in some instances the 5′ and 3′ homology arms are not necessarily equal in length to one another. For example, one homology arm may be 30% shorter or less than the other homology arm, 20% shorter or less than the other homology arm, 10% shorter or less than the other homology arm, 5% shorter or less than the other homology arm, 2% shorter or less than the other homology arm, or only a few nucleotides less than the other homology arm. In other instances, the 5′ and 3′ homology arms are substantially different in length from one another, e.g. one may be 40% shorter or more, 50% shorter or more, sometimes 60% shorter or more, 70% shorter or more, 80% shorter or more, 90% shorter or more, or 95% shorter or more than the other homology arm.

[0998] The donor polynucleotide may be used in combination with an RNA-guided nuclease, which is targeted to a particular genomic sequence (i.e., genomic target sequence to be modified) by a guide RNA. A target-specific guide RNA comprises a nucleotide sequence that is complementary to a genomic target sequence, and thereby mediates binding of the nuclease-gRNA complex by hybridization at the target site. For example, the gRNA can be designed with a sequence complementary to the sequence of a minor allele to target the nuclease-gRNA complex to the site of a mutation. The mutation may comprise an insertion, a deletion, or a substitution. For example, the mutation may include a single nucleotide variation, gene fusion, translocation, inversion, duplication, frameshift, missense, nonsense, or other mutation associated with a phenotype or disease of interest. The targeted minor allele may be a common genetic variant or a rare genetic variant. In some embodiments, the gRNA is designed to selectively bind to a minor allele with single base-pair discrimination, for example, to allow binding of the nuclease-gRNA complex to a single nucleotide polymorphism (SNP). In particular, the gRNA may be designed to target disease-relevant mutations of interest for the purpose of genome editing to remove the mutation from a gene. Alternatively, the gRNA can be designed with a sequence complementary to the sequence of a major or wild-type allele to target the nuclease-gRNA complex to the allele for the purpose of genome editing to introduces a mutation into a gene in the genomic DNA of the cell, such as an insertion, deletion, or substitution. Such genetically modified cells can be used, for example, to alter phenotype, confer new properties, or produce disease models for drug screening.

[0999] In some embodiments, the RNA-guided nuclease used for genome modification is a clustered regularly interspersed short palindromic repeats (CRISPR) system Cas nuclease. Any RNA-guided Cas nuclease capable of catalyzing site-directed cleavage of DNA to allow integration of donor polynucleotides by the HDR mechanism can be used in genome editing, including CRISPR system Class 1, Type I, II, or III Cas nucleases; Class 2, Type II nuclease (such as Cas9); a Class 2, Type V nuclease (such as Cpf1), or a Class 2, Type VI nuclease (such as C2c2). Examples of Cas proteins include Cas1, Cas1B, Cas2, Cas3, Cas4, Cas5, Cas5e (CasD), Cas6, Cas6e, Cas6f, Cas7, Cas8a1, Cas8a2, Cas8b, Cas8c, Cas9 (Csn1 or Csx12), Cas1O, Cas1Od, CasF, CasG, CasH, Csy1, Csy2, Csy3, Csel (CasA), Cse2 (CasB), Cse3 (CasE), Cse4 (CasC), Csc1, Csc2, Csa5, Csn2, Csm2, Csm3, Csm4, Csm5, Csm6, Cmr1, Cmr3, Cmr4, Cmr5, Cmr6, Csb1, Csb2, Csb3, Csx7, Csx14, Csx1O, Csx16, CsaX, Csx3, Csx1, Csx15, Csf1, Csf2, Csf3, Csf4, and Cu1966, and homologs or modified versions thereof.

[1000] In some embodiments, a Class 1, type II CRISPR system Cas9 endonuclease is used. Cas9 nucleases from any species, or biologically active fragments, variants, analogs, or derivatives thereof that retain Cas9 endonuclease activity (i.e., catalyze site-directed cleavage of DNA to generate double-strand breaks) may be used to perform genome modification as described herein. The Cas9 need not be physically derived from an organism but may be synthetically or recombinantly produced. Cas9 sequences from a number of bacterial species are well known in the art and listed in the National Center for Biotechnology Information (NCBI) database. See, for example, NCBI entries for Cas9 from: Streptococcus pyogenes (WP 002989955, WP_038434062, WP_011528583); Campylobacter jejuni (WP_022552435, YP 002344900), Campylobacter coli (WP 060786116); Campylobacter fetus (WP 059434633); Corynebacterium ulcerans (NC_015683, NC_017317); Corynebacterium diphtheria (NC_016782, NC_016786); Enterococcus faecalis (WP 033919308); Spiroplasma syrphidicola (NC 021284); Prevotella intermedia (NC 017861); Spiroplasma taiwanense (NC 021846); Streptococcus iniae (NC 021314); Belliella baltica (NC 018010); Psychroflexus torquisl (NC O 18721); Streptococcus thermophilus (YP 820832), Streptococcus mutans (WP 061046374, WP 024786433); Listeria innocua (NP 472073); Listeria monocytogenes (WP 061665472); Legionella pneumophila (WP 062726656); Staphylococcus aureus (WP_001573634); Francisella tularensis (WP_032729892, WP_014548420), Enterococcus faecalis (WP 033919308); Lactobacillus rhamnosus (WP 048482595, WP_032965177); and Neisseria meningitidis (WP_061704949, YP_002342100); all of which sequences (as entered by the date of filing of this application) are herein incorporated by reference in their entireties. Any of these sequences or a variant thereof comprising a sequence having at least about 70-100% sequence identity thereto, including any percent identity within this range, such as 70, 71, 72, 73, 74, 75, 76, 77, 78, 79, 80, 81, 82, 83, 84, 85, 86, 87, 88, 89, 90, 91, 92, 93, 94, 95, 96, 97, 98, or 99% sequence identity thereto, can be used for genome editing, as described herein. See also Fonfara et al. (2014) Nucleic Acids Res. 42(4):2577-90; Kapitonov et al. (2015) J. Bacterid. 198(5): 797-807, Shmakov et al. (2015) Mol. Cell. 60(3):385-397, and Chylinski et al. (2014) Nucleic Acids Res. 42(10):6091-6105); for sequence comparisons and a discussion of genetic diversity and phylogenetic analysis of Cas9.

[1001] The genomic target site will typically comprise a nucleotide sequence that is complementary to the gRNA and may further comprise a protospacer adjacent motif (PAM). In some embodiments, the target site comprises 20-30 base pairs in addition to a 3 or more base pair PAM. Typically, the first nucleotide of a PAM can be any nucleotide, while the two or more other nucleotides will depend on the specific Cas9 protein that is chosen. Exemplary PAM sequences are known to those of skill in the art and include, without limitation, NNG, NGN, NAG, and NGG, wherein N represents any nucleotide. In some embodiments, the allele targeted by a gRNA comprises a mutation that creates a PAM within the allele, wherein the PAM promotes binding of the Cas9-gRNA complex to the allele.

[1002] In some embodiments, the gRNA is 5-50 nucleotides, 10-30 nucleotides, 15-25 nucleotides, 18-22 nucleotides, or 19-21 nucleotides in length, or any length between the stated ranges, including, for example, 10, 11, 12, 13, 14, 15, 16, 17, 18, 19, 20, 21, 22, 23, 24, 25, 26, 27, 28, 29, 30, 31, 32, 33, 34, or 35 nucleotides in length. The guide RNA may be a single guide RNA comprising crRNA and tracrRNA sequences in a single RNA molecule, or the guide RNA may comprise two RNA molecules with crRNA and tracrRNA sequences residing in separate RNA molecules.

[1003] In another embodiment, the CRISPR nuclease from Prevotella and Francisella 1 (Cpf1, or Cas12a) is used. Cpf1 is another class II CRISPR/Cas system RNA-guided nuclease with similarities to Cas9 and may be used analogously. Unlike Cas9, Cpf1 does not require a tracrRNA and only depends on a crRNA in its guide RNA, which provides the advantage that shorter guide RNAs can be used with Cpf1 for targeting than Cas9. Cpf1 is capable of cleaving either DNA or RNA. The PAM sites recognized by Cpf1 have the sequences 5′-YTN-3′ (where “Y” is a pyrimidine and “N” is any nucleobase) or 5′-TTN-3′, in contrast to the G-rich PAM site recognized by Cas9. Cpf1 cleavage of DNA produces double-stranded breaks with a sticky-ends having a 4 or 5 nucleotide overhang. For a discussion of Cpf1, see, e.g., Ledford et al. (2015) Nature. 526 (7571):17-17, Zetsche et al. (2015) Cell. 163 (3):759-771, Murovec et al. (2017) Plant Biotechnol. J. 15(8):917-926, Zhang et al. (2017) Front. Plant Sci. 8:177, Fernandes et al. (2016) Postepy Biochem. 62(3):315-326; herein incorporated by reference.

[1004] C2c1 (Cas12b) is another class II CRISPR/Cas system RNA-guided nuclease that may be used. C2c1, similarly to Cas9, depends on both a crRNA and tracrRNA for guidance to target sites. See, e.g., Shmakov et al. (2015) Mol Cell. 60(3):385-397, Zhang et al. (2017) Front Plant Sci. 8:177; herein incorporated by reference.

[1005] In yet another embodiment, an engineered RNA-guided Fok1 nuclease may be used. RNA-guided Fok1 nucleases comprise fusions of inactive Cas9 (dCas9) and the Fok1 endonuclease (FokI-dCas9), wherein the dCas9 portion confers guide RNA-dependent targeting on Fok1. For a description of engineered RNA-guided Fold nucleases, see, e.g., Havlicek et al. (2017) Mol. Ther. 25(2):342-355, Pan et al. (2016) Sci Rep. 6:35794, Tsai et al. (2014) Nat Biotechnol. 32(6):569-576; herein incorporated by reference.

[1006] In other embodiments, any other Cas enzymes and variants described in other sections of the application (all incorporated herein) can be used similarly.

[1007] In some embodiments, the RNA-guided nuclease is provided in the form of a protein, optionally where the nuclease is complexed with a gRNA to form a ribonucleoprotein (RNP) complex. In some embodiments, the RNA-guided nuclease is provided by a nucleic acid encoding the RNA-guided nuclease, such as an RNA (e.g., messenger RNA) or DNA (expression vector). In some embodiments, the RNA-guided nuclease and the gRNA are both provided by vectors, such as the vectors and the vector system described in other parts of the application (all incorporated herein by reference). Both can be expressed by a single vector or separately on different vectors. The vectors encoding the RNA-guided nuclease and gRNA may be included in the vector system comprising the engineered retron msr gene, msd gene and ret gene sequences. In some embodiments, the RNA-guided nuclease is fused to the RT and/or the msDNA.

[1008] The RNP complex may be administered to a subject or delivered into a cell by methods known in the art, such as those described in U.S. Pat. No. 11,390,884, which is incorporated by reference herein in its entirety. In some embodiments, the endonuclease/gRNA ribonucleoprotein (RNP) complexes are delivered to cells by electroporation. Direct delivery of the RNP complex to a subject or cell eliminates the need for expression from nucleic acids (e.g., transfection of plasmids encoding Cas9 and gRNA). It also eliminates unwanted integration of DNA segments derived from nucleic acid delivery (e.g., transfection of plasmids encoding Cas9 and gRNA). An endonuclease/gRNA ribonucleoprotein (RNP) complex usually is formed prior to administration.

[1009] Codon usage may be optimized to further improve production of an RNA-guided nuclease and/or reverse transcriptase (RT) in a particular cell or organism. For example, a nucleic acid encoding an RNA-guided nuclease or reverse transcriptase can be modified to substitute codons having a higher frequency of usage in a yeast cell, a bacterial cell, a human cell, a non-human cell, a mammalian cell, a rodent cell, a mouse cell, a rat cell, or any other host cell of interest, as compared to the naturally occurring polynucleotide sequence. When a nucleic acid encoding the RNA-guided nuclease or reverse transcriptase is introduced into cells, the protein can be transiently, conditionally, or constitutively expressed in the cell.

[1010] In some embodiments, the engineered retron used for genome editing with nuclease genome editing systems can further include accessory or enhancer proteins for recombination. Examples of recombination enhancers can include nonhomologous end joining (NHEJ) inhibitors (e.g., inhibitor of DNA ligase IV, a KU inhibitor (e.g., KU70 or KU80), a DNA-PKc inhibitor, or an artemis inhibitor) and homologous directed repair (HDR) promoters, or both, that can enhance or improve more precise genome editing and/or the efficiency of homologous recombination. In some embodiments, the recombination accessory or enhancers can comprise C-terminal binding protein interacting protein (CtIP), cyclinB2, Rad family members (e.g. Rad50, Rad51, Rad52, etc).

[1011] CtIP is a transcription factor containing C2H2 zinc fingers that are involved in early steps of homologous recombination. Mammalian CtIP and its orthologs in other eukaryotes promote the resection of DNA double-strand breaks and are essential for meiotic recombination. HDR may be enhanced by using Cas9 nuclease associated (e.g. fused) to an N-terminal domain of CtIP, an approach that forces CtIP to the cleavage site and increases transgene integration by HDR. In some embodiments, an N-terminal fragment of CtIP, called HE for HDR enhancer, may be sufficient for HDR stimulation and requires the CtIP multimerization domain and CDK phosphorylation sites to be active. HDR stimulation by the Cas9-HE fusion depends on the guide RNA used, and therefore the guide RNA will be designed accordingly.

[1012] Using the gene editing system described herein, any target gene or sequence in a host cell can be edited or modified for a desired trait, including but not limited to: Myostatin (e.g., GDF8) to increase muscle growth; Pc POLLED to induce hairlessness; KISS1R to induce bore taint; Dead end protein (dnd) to induce sterility; Nano2 and DDX to induce sterility; CD163 to induce PRRSV resistance; RELA to induce ASFV resilience; CD18 to induce Mannheimia (Pasteurella) haemolytica resilience; NRAMP1 to induce tuberculosis resilience; Negative regulators of muscle mass (e.g., Myostatin) to increase muscle mass.

### Recombineering

[1013] Recombineering (recombination-mediated genetic engineering) can be used in modifying chromosomal as well as episomal replicons in cells, for example, to create gene replacements, gene knockouts, deletions, insertions, inversions, or point mutations. Recombineering can also be used to modify a plasmid or bacterial artificial chromosome (BAC), for example, to clone a gene or insert markers or tags.

[1014] The engineered retrons described herein can be used in recombineering applications to provide linear single-stranded or double-stranded DNA for recombination. Homologous recombination may be mediated by bacteriophage proteins such as RecE/RecT from Rac prophage or Redobd from bacteriophage lambda. The linear DNA should have sufficient homology at the 5′ and 3′ ends to a target DNA molecule present in a cell (e.g., plasmid, BAC, or chromosome) to allow recombination.

[1015] The linear double-stranded or single-stranded DNA molecule used in recombineering (i.e. donor polynucleotide) comprises a sequence having the intended edit to be inserted flanked by two homology arms that target the linear DNA molecule to a target site for homologous recombination. Homology arms for recombineering typically range in length from 13-300 nucleotides, or 20 to 200 nucleotides, including any length within this range such as 13, 14, 15, 16, 17, 18, 19, 20, 22, 24, 26, 28, 30, 32, 34, 36, 38, 40, 42, 44, 46, 48, 50, 55, 60, 65, 70, 75, 80, 85, 90, 95, 100, 105, 110, 115, 120, 125, 130, 135, 140, 145, 150, 155, 160, 165, 170, 175, 180, 185, 190, 195, or 200 nucleotides in length. In some embodiments, a homology arm is at least 15, at least 20, at least 30, at least 40, or at least 50 or more nucleotides in length. Homology arms ranging from 40-50 nucleotides in length generally have sufficient targeting efficiency for recombination; however, longer homology arms ranging from 150 to 200 bases or more may further improve targeting efficiency. In some embodiments, the 5′ homology arm and the 3′ homology arm differ in length. For example, the linear DNA may have about 50 bases at the 5′ end and about 20 bases at the 3′ end with homology to the region to be targeted.

[1016] The bacteriophage homologous recombination proteins can be provided to a cell as proteins or by one or more vectors encoding the recombination proteins, such as the vector or vector system. In some embodiments, one or more vectors encoding the bacteriophage recombination proteins are included in the vector system comprising the engineered retron msr gene, msd gene, and/or ret gene sequences. Additionally, a number of bacterial strains containing prophage recombination systems are available for recombineering, including, without limitation, DY380, containing a defective 1 prophage with recombination proteins exo, bet, and gam; EL250, derived from DY380, which in addition to the recombination genes found in DY380, also contains a tightly controlled arabinose-inducible flpe gene (flpe mediates recombination between two identicalfrt sites); EL350, also derived from DY380, which in addition to the recombination genes found in DY380, also contains a tightly controlled arabinose-inducible ere gene (ere mediates recombination between two identical loxP sites; SW102, derived from DY380, which is designed for BAC recombineering using a galK positive/negative selection; SW105, derived from EL250, which can also be used for galK positive/negative selection, but like EL250, contain an ara-inducible Flpe gene; and SW106, derived from EL350, which can be used for galK positive/negative selection, but like EL350, contains an ara-inducible Cre gene. Recombineering can be carried out by transfecting bacterial cells of such strains with an engineered retron comprising a heterologous sequence encoding a linear DNA suitable for recombineering. For a discussion of recombineering systems and protocols, see, e.g., Sharan et al. (2009) Nat Protoc. 4(2): 206-223, Zhang et al. (1998) Nature Genetics 20: 123-128, Muyrers et al. (1999) Nucleic Acids Res. 27: 1555-1557, Yu et al. (2000) Proc. Natl. Acad. Sci U.S.A. 97 (11):5978-5983; herein incorporated by reference.

### Molecular Recording

[1017] In some embodiments, the heterologous sequence in the engineered retron construct comprises a synthetic CRISPR protospacer DNA sequence to allow molecular recording. The endogenous CRISPR Cas1-Cas2 system is normally utilized by bacteria and archaea to keep track of foreign DNA sequences originating from viral infections by storing short sequences (i.e., protospacers) that confer sequence-specific resistance to invading viral nucleic acids within genome-based arrays. These arrays not only preserve the spacer sequences but also record the order in which the sequences are acquired, generating a temporal record of acquisition events.

[1018] This system can be adapted to record arbitrary DNA sequences into a genomic CRISPR array in the form of “synthetic protospacers” that are introduced into cells using engineered retrons. Engineered retrons carrying the protospacer sequences can be used for integration of synthetic CRISPR protospacer sequences at a specific genomic locus by utilizing the CRISPR system Cas1-Cas2 complex. Molecular recording can be used to keep track of certain biological events by producing a stable genetic memory tracking code. See, e.g., Shipman et al. (2016) Science 353(6298): aafl 175 and International Patent Application Publication No. WO/2018/191525; herein incorporated by reference in their entireties.

[1019] In some embodiments, the CRISPR-Cas system is harnessed to record specific and arbitrary DNA sequences into a bacterial genome. The DNA sequences can be produced by an engineered retron within the cell. For example, the engineered retron can be used to produce the protospacers within the cell, which are inserted into a CRISPR array within the cell. The cell may be modified to include one or more engineered returns (or vector systems encoding them) that can produce one or more synthetic protospacers in the cell, wherein the synthetic protospacers are added to the CRISPR array. A record of defined sequences, recorded over many days, and in multiple modalities can be generated.

[1020] In some embodiments, the engineered retron comprises an msd protospacer nucleic acid region or an msr protospacer nucleic acid region. In the case of a msr protospacer nucleic acid region, the protospacer sequence is first incorporated into the msr RNA, which is reverse transcribed into protospacer DNA. Double stranded protospacer DNA is produced when two complementary protospacer DNA sequences having complementary sequences hybridize, or when a double-stranded structure (such as a hairpin) is formed in a single stranded protospacer DNA (e.g., a single msDNA can form an appropriate hairpin structure to provide the double stranded DNA protospacer).

[1021] In some embodiments, a single stranded DNA produced in vivo from a first engineered retron may be hybridized with a complementary single-stranded DNA produced in vivo from the same retron or a second engineered retron or may form a hairpin structure and then used as a protospacer sequence to be inserted into a CRISPR array as a spacer sequence. The engineered retron(s) should provide sufficient levels of the protospacer sequence within a cell for incorporation into the CRISPR array. The use of protospacers generated within the cell extends the in vivo molecular recording system from only capturing information known to a user, to capturing biological or environmental information that may be previously unknown to a user. For example, an msDNA protospacer sequence in an engineered retron construct may be driven by a promoter that is downstream of a sensor pathway for a biological phenomenon or environmental toxin. The capture and storage of the protospacer sequence in the CRISPR array records the event. If multiple msDNA protospacers are driven by different promoters, the activity of those promoters is recorded (along with anything that may be upstream of the promoters) as well as the relative order of promoter activity (based on the relative position of spacer sequences in the CRISPR array). At any point after the recording has taken place, the CRISPR array may be sequenced to determine whether a given biological or environmental event has taken place and the order of multiple events, given by the presence and relative position of msDNA-derived spacers in the CRISPR array.

[1022] In some embodiments, the synthetic protospacer further comprises an AAG PAM sequence at its 5′ end. Protospacers including the 5′ AAG PAM are acquired by the CRISPR array with greater efficiency than those that do not include a PAM sequence.

[1023] In some embodiments, Cas1 and Cas2 are provided by a vector that expresses the Cas1 and Cas2 at a level sufficient to allow the synthetic protospacer sequences produced by engineered retrons to be acquired by a CRISPR array in a cell. Such a vector system can be used to allow molecular recording in a cell that lacks endogenous Cas proteins.

### Therapeutic Applications

[1024] Also provided herein are methods of diagnosing, prognosing, treating, and/or preventing a disease, state, or condition in or of a subject, using the engineered retron of the invention.

[1025] Generally, the methods of diagnosing, prognosing, treating, and/or preventing a disease, state, or condition in or of a subject can include modifying a polynucleotide in a subject or cell thereof using a composition, system, or component thereof of the engineered retron as described herein, and/or include detecting a diseased or healthy polynucleotide in a subject or cell thereof using a composition, system, or component thereof of the engineered retron as described herein.

[1026] In some embodiments, the method of treatment or prevention can include using a composition, system, or component of the engineered retron to modify a polynucleotide of an infectious organism (e.g. bacterial or virus) within a subject or cell thereof.

[1027] In some embodiments, the method of treatment or prevention can include using a composition, system, or component of the engineered retron to modify a polynucleotide of an infectious organism or symbiotic organism within a subject.

[1028] In some embodiments, the composition, system, and components of the engineered retron can be used to develop models of diseases, states, or conditions.

[1029] In some embodiments, the composition, system, and components of the engineered retron can be used to detect a disease state or correction thereof, such as by a method of treatment or prevention described herein.

[1030] In some embodiments, the composition, system, and components of the engineered retron can be used to screen and select cells that can be used, for example, as treatments or preventions described herein.

[1031] In some embodiments, the composition, system, and components thereof can be used to develop biologically active agents that can be used to modify one or more biologic functions or activities in a subject or a cell thereof.

[1032] In general, the method can include delivering a composition, system, and/or component of the engineered retron to a subject or cell thereof, or to an infectious or symbiotic organism by a suitable delivery technique and/or composition. Once administered, the components can operate as described elsewhere herein to elicit a nucleic acid modification event. In some embodiments, the nucleic acid modification event can occur at the genomic, epigenomic, and/or transcriptomic level. DNA and/or RNA cleavage, gene activation, and/or gene deactivation can occur.

[1033] The composition, system, and components of the engineered retron as described elsewhere herein can be used to treat and/or prevent a disease, such as a genetic and/or epigenetic disease, in a subject; to treat and/or prevent genetic infectious diseases in a subject, such as bacterial infections, viral infections, fungal infections, parasite infections, and combinations thereof, to modify the composition or profile of a microbiome in a subject, which can in turn modify the health status of the subject; to modify cells ex vivo, which can then be administered to the subject whereby the modified cells can treat or prevent a disease or symptom thereof, or to treat mitochondrial diseases, where the mitochondrial disease etiology involves a mutation in the mitochondrial DNA.

[1034] Also provided is a method of treating a subject, e.g., a subject in need thereof, comprising inducing gene editing by transforming the subject with the polynucleotide encoding one or more components of the composition, system, or complex or any of polynucleotides or vectors described herein of the engineered retron, and administering them to the subject.

[1035] Also provided is a method of treating a subject, e.g., a subject in need thereof, comprising inducing transcriptional activation or repression of multiple target gene loci by transforming the subject with the polynucleotides or vectors described herein, wherein said polynucleotide or vector encodes or comprises one or more components of composition, system, complex or component of the engineered retron, and comprising multiple Cas effectors.

[1036] Also provided is a method of treating a subject, e.g., a subject in need thereof, comprising inducing gene editing by transforming the subject with the Cas effector(s), and encoding and expressing in vivo the remaining portions of the composition, system, (e.g., RNA, guides), complex or component of the engineered retron. A suitable repair template may also be provided by the engineered retron as described herein elsewhere.

[1037] Also provided is a method of treating a subject, e.g., a subject in need thereof, comprising inducing transcriptional activation or repression by transforming the subject with the systems or compositions herein.

[1038] Also provided is a method of inducing one or more polynucleotide modifications in a eukaryotic or prokaryotic cell or component thereof (e.g. a mitochondria) of a subject, infectious organism, and/or organism of the microbiome of the subject. The modification can include the introduction, deletion, or substitution of one or more nucleotides at a target sequence of a polynucleotide of one or more cell(s). The modification can occur in vitro, ex vivo, in situ, or in vivo.

[1039] In some embodiments, the method of treating or inhibiting a condition or a disease caused by one or more mutations in a genomic locus in a eukaryotic organism or a non-human organism can include manipulation of a target sequence within a coding, non-coding or regulatory element of said genomic locus in a target sequence in a subject or a non-human subject in need thereof comprising modifying the subject or a non-human subject by manipulation of the target sequence and wherein the condition or disease is susceptible to treatment or inhibition by manipulation of the target sequence including providing treatment comprising delivering a composition comprising the particle delivery system or the delivery system or the virus particle of any one of the above embodiment or the cell of any one of the above embodiment.

[1040] Also provided herein is the use of the particle delivery system or the delivery system or the virus vector (in viral particle) of any one of the above embodiment or the cell of any one of the above embodiment in ex vivo or in vivo gene or genome editing; or for use in in vitro, ex vivo or in vivo gene therapy.

[1041] Also provided herein are particle delivery systems, non-viral delivery systems, and/or the virus particle of any one of the above embodiments or the cell of any one of the above embodiments used in the manufacture of a medicament for in vitro, ex vivo or in vivo gene or genome editing or for use in in vitro, ex vivo or in vivo gene therapy or for use in a method of modifying an organism or a non-human organism by manipulation of a target sequence in a genomic locus associated with a disease or in a method of treating or inhibiting a condition or disease caused by one or more mutations in a genomic locus in a eukaryotic organism or a non-human organism.

[1042] In some embodiments, target polynucleotide modification using the subject engineered retron and the associated composition, vectors, system and methods comprises addition, deletion, or substitution of 1-about 10 k nucleotides at each target sequence of said polynucleotide of said cell(s). The modification can include the addition, deletion, or substitution of at least 1, 5, 10, 11, 12, 13, 14, 15, 16, 17, 18, 19, 20, 21, 22, 23, 24, 25, 26, 27, 28, 29, 30, 35, 40, 45, 50, 75, 100, 200, 250, 300, 500, 1000, 1500, 2000, 2500, 3000, 3500, 4000, 5000, 6000, 7000, 8000, 9000, 10,000 or more nucleotides at each target sequence.

[1043] In some embodiments, formation of system or complex results in cleavage, nicking, and/or another modification of one or both strands in or near (e.g. within 1, 2, 3, 4, 5, 6, 7, 8, 9, 10, 20, 50, or more base pairs from) the target sequence.

[1044] In some embodiments, a method of modifying a target polynucleotide in a cell to treat or prevent a disease can include allowing a composition, system, or component of the subject engineered retron to bind to the target polynucleotide, e.g., to effect cleavage, nicking, or other modification as the composition, system, is capable of said target polynucleotide, thereby modifying the target polynucleotide, wherein the composition, system, or component thereof, complex with a guide sequence, and hybridize said guide sequence to a target sequence within the target polynucleotide, wherein said guide sequence is optionally linked to a tracr mate sequence, which in turn can hybridize to a tracr sequence. In some embodiments, modification can include cleaving or nicking one or two strands at the location of the target sequence by one or more components of the composition, system, or component thereof.

[1045] In some embodiments, the engineered retron and the associated compositions, systems, vectors, uses, and methods of use, can be used to treat diseases of the circulatory system. In some embodiments, the treatment can be carried out by using an AAV or a lentiviral vector to deliver the engineered retron, composition, system, and/or vector described herein to modify hematopoietic stem cells (HSCs) or iPSCs in vivo or ex vivo. In some embodiments, the treatment can be carried out by correcting HSCs or iPSCs as to the disease using a composition, system, herein or a component thereof, wherein the composition, system, optionally includes a suitable HDR repair template (e.g., a template in the msDNA of the engineered retron).

[1046] In some embodiments, the treatment or prevention for treating a circulatory system or blood disease can include modifying a human cord blood cell. In some embodiments, the treatment or prevention for treating a circulatory system or blood disease can include modifying a granulocyte colony-stimulating factor-mobilized peripheral blood cell (mPB) with any modification described herein. In some embodiments, the human cord blood cell or mPB can be CD34*. In some embodiments, the cord blood cells or mPB cells modified are autologous. In some embodiments, the cord blood cells or mPB cells are allogenic. In addition to the modification of the disease genes, allogenic cells can be further modified using the composition, system, described herein to reduce the immunogenicity of the cells when delivered to the recipient. The modified cord blood cells or mPB cells can be optionally expanded in vitro. The modified cord blood cell(s) or mPB cells can be derived to a subject in need thereof using any suitable delivery technique.

[1047] The composition and system may be engineered to target genetic locus or loci in HSCs. In some embodiments, the components of the systems can be codon-optimized for a eukaryotic cell and especially a mammalian cell, e.g., a human cell, for instance, HSC, or iPSC and sgRNA targeting a locus or loci in HSC, such as circulatory disease, can be prepared. These may be delivered via particles, such as the lipid nanoparticle delivery system described herein. The particles may be formed by the components of the systems herein being admixed.

[1048] In some embodiments, after ex vivo modification the HSCs or iPCS can be expanded prior to administration to the subject. Expansion of HSCs can be via any suitable method such as that described by, Lee, “Improved ex vivo expansion of adult hematopoietic stem cells by overcoming CUL4-mediated degradation of HOXB4.” Blood. 2013 May 16; 121(20):4082-9. doi: 10.1182/blood-2012-09-455204. Epub 2013 Mar. 21.

[1049] In some embodiments, the HSCs or iPSCs modified are autologous. In some embodiments, the HSCs or iPSCs are allogenic. In addition to the modification of the disease genes, allogenic cells can be further modified using the composition, system, described herein to reduce the immunogenicity of the cells when delivered to the recipient.

[1050] In some embodiments, the engineered retron and the associated compositions, systems, vectors, uses, and methods of use, can be used to treat neurological diseases. In some embodiments, the neurological diseases comprise diseases of the brain and CNS.

[1051] Delivery options for the diseases in the brain include encapsulation of the systems in the form of either DNA or RNA into liposomes and conjugating to molecular Trojan horses for trans-blood brain barrier (BBB) delivery. Molecular Trojan horses have been shown to be effective for delivery of B-gal expression vectors into the brain of non-human primates. The same approach can be used to delivery vectors or vector systems of the invention. In other embodiments, an artificial virus can be generated for CNS and/or brain delivery.

[1052] In some embodiments, the engineered retron and the associated compositions, systems, vectors, uses, and methods of use, can be used to treat hearing diseases or hearing loss in one or both ears. Deafness is often caused by lost or damaged hair cells that cannot relay signals to auditory neurons. In some embodiments, the composition, system, or modified cells can be delivered to one or both ears for treating or preventing hearing disease or loss by any suitable method or technique known in the art, such as US20120328580 (e.g., auricular administration), by intratympanic injection (e.g., into the middle ear), and/or injections into the outer, middle, and/or inner ear; administration in situ, via a catheter or pump (U.S. 2006/0030837) and Jacobsen (U.S. Pat. No. 7,206,639). Also see US20120328580. Cells resulting from such methods can then be transplanted or implanted into a patient in need of such treatment.

[1053] In some embodiments, the engineered retron and the associated compositions, systems, vectors, uses, and methods of use, can be used to treat diseases in non-dividing cells. Exemplary non-dividing cells include muscle cells or neurons. In such cells, homologous recombination (HR) is generally suppressed in the G1 cell-cycle phase, but can be turned back on using art-recognized methods, such as Orthwein et al. (Nature. 2015 Dec. 17; 528(7582): 422-426).

[1054] In some embodiments, the engineered retron and the associated compositions, systems, vectors, uses, and methods of use, can be used to treat diseases of the eye.

[1055] In some embodiments, the engineered retron and the associated compositions, systems, vectors, uses, and methods of use, can be used to treat muscle diseases and cardiovascular diseases.

[1056] In some embodiments, the engineered retron and the associated compositions, systems, vectors, uses, and methods of use, can be used to treat diseases of the liver and kidney.

[1057] In some embodiments, the engineered retron and the associated compositions, systems, vectors, uses, and methods of use, can be used to treat epithelial and lung diseases.

[1058] In some embodiments, the engineered retron and the associated compositions, systems, vectors, uses, and methods of use, can be used to treat diseases of the skin.

[1059] In some embodiments, the engineered retron and the associated compositions, systems, vectors, uses, and methods of use, can be used to treat cancer.

[1060] In some embodiments, the engineered retron and the associated compositions, systems, vectors, uses, and methods of use, can be used in adoptive cell therapy.

[1061] In some embodiments, the engineered retron and the associated compositions, systems, vectors, uses, and methods of use, can be used to treat infectious diseases.

[1062] In some embodiments, the engineered retron and the associated compositions, systems, vectors, uses, and methods of use, can be used to treat mitochondrial diseases.

[1063] All publications, published patent documents, and patent applications cited herein are hereby incorporated by reference to the same extent as though each individual publication, published patent document, or patent application was specifically and individually indicated as being incorporated by reference.

[1064] O. Sequences

[1065] The instant Specification discloses and claims recombinant retrons and components thereof (e.g., recombinant ncRNAs and recombinant retron RTs), as well as genome modification systems comprising said recombinant retrons and/or recombinant components thereof. Without limitation, such systems include recombinant retron-based genome editing systems, recombineering systems, and cell-recording systems. The Specification also discloses and claims the various components and aspects making up the systems, as well as their uses and applications, including without limitation: (a) recombinant nucleic acid molecules encoding recombinant retrons and retron-based genome modification systems, (b) vector systems (including viral and non-viral) comprising one or more components of said retron-based genome modification systems, including all-DNA vector systems, all-RNA vector systems, and DNA/RNA vector systems, (c) delivery systems for delivering said vector systems and/or components of the retron-based genome modification systems (e.g., lipid particles, lipid nanoparticles, and other delivery vehicle formats), (d) formulations comprising any of the aforementioned components for delivery to cells and/or tissues, including in vitro, in vivo, and ex vivo delivery, (e) cells modified by the recombinant retron-based genome modification systems and methods described herein, and (f) methods of modifying cells by conducting genome editing, recombineering, or cell recording using the herein disclosed retron-based genome modification systems, (g) methods of making the recombinant retrons, retron-based genome modification systems, vectors, and formulations described herein, and (h) pharmaceutical compositions and kits for modifying cells under in vitro, in vivo, and ex vivo conditions.

[1066] The recombinant retrons and retron-based genome modification systems described herein can be made, in various embodiments, by introducing one or more modifications into a known retron, e.g., a retron that is publicly known (Group I retrons) or a novel retron that is found in nature but which has not previously been recognized or described (Group II retrons). Examples of such retron sequences (and in some cases sequences of their components) are disclosed herein and summarized below:

TABLE X
Previously known retron reverse transcriptases

| | | | SEQ |
|---|---|---|---|
| | | | ID |
| | | | NO: |
| | | Retron | 19413 |
| | | name (if | -to- |
| NCBI Accession^{a} | Species/strain | applicable) | 21341 |
| fig\|670897.3.peg.2382 | Escherichia coli 2362-75 | | 19413 |
| WP_000111473.1 | Escherichia coli | Retron- | |
| | | Eco7 | |
| | | (Ec78) | |
| fig\|286156.4.peg.5031 | Photorhabdus australis | | |
| fig\|171439.3.peg.1995 | Photorhabdus luminescens subsp. | | |
| | luminescens | | |
| fig\|1004151.3.peg.110 | Photorhabdus khanii NC19 | | |
| fig\|1736225.3.peg.2969 | Erwinia sp. Leaf53 | | |
| fig\|1897730.3.peg.2912 | Citrobacter sp. CFSAN044567 | | |
| fig\|286156.4.peg.5031 | Aeromonas australiensis | | |
| fig\|1460083.3.peg.4429 | Serratia liquefaciens FK01 | | |
| fig\|585.10.peg.2369 | Proteus vulgaris | | |
| WP_140315795.1 | Vibrio parahaemolyticus | Retron- | |
| | | Vpa1 | |
| | | (Vp96) ^{g} | |
| fig\|670.147.peg.3463 | Vibrio parahaemolyticus | | |
| fig\|1516159.4.peg.4737 | Vibrio coralliirubri | | |
| fig\|190893.12.peg.246 | Vibrio coralliilyticus | | |
| fig\|643674.5.peg.820 | Paenalcaligenes hominis | | |
| fig\|1122619.3.peg.2381 | Oligella ureolytica DSM 18253 | | |
| fig\|29489.5.peg.3423 | Aeromonas enteropelogenes | | |
| fig\|1899355.18.peg.3566 | Oceanospirillaceae bacterium | | |
| fig\|49186.3.peg.4362 | Marinobacterium stanieri | | |
| fig\|672.375.peg.4377 | Vibrio vulnificus | | |
| fig\|584.202.peg.1668 | Proteus mirabilis | | |
| fig\|394935.10.peg.4407 | Chromobacterium haemolyticum | | |
| fig\|1196083.117.peg.637 | Snodgrassella alvi | | |
| fig\|1196083.120.peg.2046 | Snodgrassella alvi | | |
| fig\|1196083.114.peg.825 | Snodgrassella alvi | | |
| fig\|550.250.peg.2975 | Enterobacter cloacae | | |
| fig\|680.27.peg.793 | Vibrio campbellii | | |
| fig\|1348393.3.peg.352 | Pseudoalteromonas sp. H105 | | |
| fig\|644.85.peg.4392 | Aeromonas hydrophila | | |
| fig\|1234128.4.peg.4777 | Vibrio parahaemolyticus SNUVpS-1 | | |
| fig\|69219.6.peg.2213 | Enterobacter cloacae subsp. | | |
| | dissolvens | | |
| fig\|208224.13.peg.2962 | Enterobacter kobei | | |
| fig\|672.332.peg.2758 | Vibrio vulnificus | | |
| fig\|1777131.3.peg.2267 | Chromobacterium sp. F49 | | |
| fig\|945550.3.peg.1167 | Vibrio sinaloensis DSM 21326 | | |
| fig\|648.75.peg.922 | Aeromonas caviae | | |
| fig\|1238221.3.peg.2053 | Vibrio parahaemolyticus VPTS-2009 | | |
| fig\|56192.3.peg.3860 | Photobacterium iliopiscarium | | |
| fig\|1806667.7.peg.3169 | Marinomonas gallaica | | |
| fig\|272773.3.peg.1019 | Salinivibrio costicola subsp. alcaliphilus | | |
| WP_073265166.1 | Pseudomonas punonensis | | |
| fig\|1946584.3.peg.2789 | Halomonas sp. UBA3074 | | |
| fig\|2030880.3.peg.665 | SAR86 cluster bacterium | | |
| fig\|80854.14.peg.530 | Moritella viscosa | | |
| fig\|1902503.3.peg.1072 | Marinomonas sp. QM202 | | |
| fig\|1122212.3.peg.1985 | Marinospirillum minutulum DSM 6287 | | |
| fig\|40576.4.peg.4387 | Xenorhabdus bovienii | | |
| fig\|287094.3.peg.78 | Alteromonas addita | | |
| fig\|1805633.3.peg.1469 | Acinetobacter sp. SFA | | |
| fig\|1945927.3.peg.1017 | Acinetobacter sp. UBA1497 | | |
| fig\|202956.9.peg.1680 | Acinetobacter towneri | | |
| fig\|1811612.3.peg.155 | Moraxellaceae bacterium REDSEA-S32 B1 | | |
| fig\|573.14330.peg.438 | Klebsiella pneumoniae | | |
| fig\|470.1294.peg.971 | Acinetobacter baumannii | | |
| fig\|762966.3.peg.2452 | Parasutterella excrementihominis | | |
| | YIT 11859 | | |
| fig\|470.3514.peg.1550 | Acinetobacter baumannii | | |
| fig\|470.2538.peg.3022 | Acinetobacter baumannii | | |
| fig\|48296.130.peg.276 | Acinetobacter pittii | | |
| fig\|663.91.peg.4688 | Vibrio alginolyticus | | |
| fig\|296199.3.peg.4813 | Vibrio gigantis | | |
| fig\|1367490.3.peg.3583 | Aliivibrio fischeri ETJB5C | | |
| fig\|326537.3.peg.3698 | Colwellia polaris | | |
| fig\|1175631.4.peg.4191 | Pectobacterium wasabiae CFBP 3304 | | |
| WP_001403504.1 | Escherichia coli | Retron- | |
| | | Eco4 | |
| | | (Ec83) | |
| fig\|549.21.peg.1734 | Pantoea agglomerans | | |
| fig\|140100.3.peg.2972 | Vibrio cholerae | | |
| fig\|693153.4.peg.1176 | Vibrio atlanticus | | |
| fig\|1238430.3.peg.1911 | Vibrio nigripulchritudo AM115 | | |
| fig\|1123036.3.peg.144 | Psychromonas arctica DSM 14288 | | |
| fig\|173990.3.peg.3319 | Rheinheimera pacifica | | |
| fig\|1869214.4.peg.3809 | Rheinheimera sp. | | |
| fig\|1898113.7.peg.1514 | Idiomarinaceae bacterium | | |
| fig\|29484.39.peg.1876 | Yersinia frederiksenii | | |
| fig\|1761793.3.peg.274 | Marinobacter sp. DSM 26671 | | |
| fig\|587.48.peg.2666 | Providencia rettgeri | | |
| fig\|573.4147.peg.1684 | Klebsiella pneumoniae | | |
| fig\|1263833.3.peg.2872 | Serratia marcescens VGH107 | | |
| fig\|1690502.3.peg.467 | Pantoea sp. CFSAN033090 | | |
| fig\|1029989.3.peg.5037 | Salmonella enterica subsp. | | |
| | enterica serovar Agona str. 0292 | | |
| fig\|211759.3.peg.770 | Serratia marcescens | | |
| fig\|29483.5.peg.2283 | Yersinia aldovae | | |
| fig\|1268238.3.peg.3466 | Escherichia coli O5:K4(L):H4 str. | | |
| | ATCC 23502 | | |
| fig\|548.121.peg.2368 | Klebsiella aerogenes | | |
| fig\|196024.6.peg.1825 | Aeromonas dhakensis | | |
| fig\|386429.3.peg.3784 | Pseudoalteromonas sp. BSi20495 | | |
| fig\|666.2089.peg.3167 | Vibrio cholerae | | |
| WP_159353404.1 | Vibrio cholerae | Retron- | |
| | | Vch1 | |
| | | (Vc95) | |
| fig\|670.362.peg.2186 | Vibrio parahaemolyticus | | |
| fig\|615.398.peg.1671 | Serratia marcescens | | |
| fig\|571.188.peg.5401 | Klebsiella oxytoca | | |
| fig\|1389422.3.peg.2794 | Klebsiella pneumoniae LAU-KP1 | | |
| fig\|1082704.3.peg.1242 | Lonsdalea britannica | | |
| fig\|1686379.3.peg.3365 | Citrobacter sp. MGH104 | | |
| fig\|83655.55.peg.221 | Leclercia adecarboxylata | | |
| fig\|550.532.peg.617 | Enterobacter cloacae | | |
| fig\|349965.6.peg.153 | Yersinia intermedia ATCC 29909 | | |
| fig\|1947028.3.peg.31 | Pantoea sp. UBA2708 | | |
| fig\|29484.34.peg.3725 | Yersinia frederiksenii | | |
| fig\|314608.4.peg.222 | Shewanella benthica KT99 | | |
| fig\|585.16.peg.3620 | Proteus vulgaris | | |
| fig\|1117313.3.peg.4128 | Pseudoalteromonas arctica A 37-1-2 | | |
| fig\|1236543.3.peg.1328 | Shewanella putrefaciens JCM 20190 = | | |
| | NBRC 3908 | | |
| fig\|550.520.peg.1818 | Enterobacter cloacae | | |
| fig\|592316.4.peg.43 | Pantoea sp. At-9b | | |
| fig\|1903177.3.peg.4556 | Vibrio sp. 10N.261.45.E1 | | |
| fig\|1435069.3.peg.925 | Vibrio tritonius | | |
| fig\|666.3258.peg.1211 | Vibrio cholerae | | |
| fig\|1579504.3.peg.1822 | Shewanella sp. ECSMB14102 | | |
| fig\|727.548.peg.1576 | Haemophilus influenzae | | |
| EIJ70524.1 | Haemophilus parahaemolyticus HK385 | | |
| fig\|1121935.3.peg.14 | Hahella ganghwensis DSM 17046 | | |
| fig\|400668.8.peg.2509 | Marinomonas sp. MWYL1 | | |
| fig\|1777491.3.peg.1212 | Alteromonas sp. Mac1 | | |
| fig\|2013797.3.peg.1728 | Gammaproteobacteria bacterium | | |
| | HGW-Gammaproteobacteria-15 | | |
| fig\|1008297.7.peg.4158 | Salmonella enterica subsp. | | |
| | enterica serovar Typhimurium str. 798 | | |
| EDM6246721.1 | Salmonella enterica subsp. | Retron- | |
| | enterica serovar Typhimurium | Sen2 | |
| | | (St85) | |
| fig\|421.19.peg.3278 | Methylomonas methanica | | |
| fig\|758.17.peg.102 | Rodentibacter pneumotropicus | | |
| fig\|726.60.peg.864 | Haemophilus haemolyticus | | |
| fig\|1035188.3.peg.348 | Haemophilus pittmaniae HK 85 | | |
| fig\|670.79.peg.3738 | Vibrio parahaemolyticus | | |
| fig\|1481663.12.peg.913 | Vibrio metoecus | | |
| fig\|1123402.3.peg.611 | Thorsellia anophelis DSM 18579 | | |
| fig\|668.83.peg.3088 | Aliivibrio fischeri | | |
| fig\|290110.6.peg.2319 | Xenorhabdus budapestensis | | |
| fig\|568766.10.peg.822 | Dickeya sp. NCPPB 3274 | | |
| fig\|470.4268.peg.2217 | Acinetobacter baumannii | | |
| fig\|1977881.3.peg.1569 | Acinetobacter sp. ANC 4470 | | |
| fig\|548.171.peg.2395 | Klebsiella aerogenes | | |
| fig\|584.105.peg.1823 | Proteus mirabilis | | |
| fig\|1275975.3.peg.1756 | Salmonella enterica subsp. | | |
| | enterica serovar Newport str. Henan_3 | | |
| fig\|615.474.peg.3994 | Serratia marcescens | | |
| fig\|61647.13.peg.3699 | Pluralibacter gergoviae | | |
| fig\|549.22.peg.222 | Pantoea agglomerans | | |
| fig\|991944.3.peg.3216 | Vibrio cholerae HE-25 | | |
| WP_001022871.1 | Vibrio cholerae | Retron- | |
| | | Vch2 | |
| | | (Vc81) | |
| fig\|1638949.3.peg.1051 | Vibrio sp. ECSMB14106 | | |
| fig\|73010.3.peg.2815 | Aeromonas encheleia | | |
| fig\|1444141.3.peg.3893 | Escherichia coli 3-373-03_S3_C1 | | |
| fig\|232.5.peg.l080 | Alteromonas sp. | | |
| fig\|1175295.3.peg.21 | Pseudoalteromonas sp. PAMC 22718 | | |
| fig\|265726.7.peg.3430 | Photobacterium halotolerans | | |
| WP_009585554.1 | Acinetobacter | | |
| fig\|2004649.3.peg.1632 | Acinetobacter sp. WCHA29 | | |
| fig\|1324350.3.peg.2817 | Acinetobacter equi | | |
| fig\|2048003.3.peg.1682 | Alteromonas flava | | |
| fig\|571.171.peg.5963 | Klebsiella oxytoca | | |
| fig\|573.4060.peg.3574 | Klebsiella pneumoniae | | |
| fig\|1173850.3.peg.2995 | Salmonella enterica subsp. | | |
| | enterica serovar Indiana str. ATCC 51959 | | |
| fig\|1123516.3.peg.1267 | Hydrogenovibrio halophilus DSM 15072 | | |
| fig\|1981674.3.peg.1814 | Pseudomonas sp. R9(2017) | | |
| fig\|1947311.3.peg.2053 | Pseudomonas sp. UBA2684 | | |
| fig\|1198309.3.peg.4291 | Pseudomonas fluorescens ICMP 11288 | | |
| fig\|715451.3.peg.1743 | Alteromonas naphthalenivorans | | |
| fig\|316.285.peg.730 | Pseudomonas stutzeri | | |
| fig\|1190606.3.peg.313 | Enterovibrio calviensis 1F-211 | | |
| WP_009176189.1 | | | |
| WP_097050713.1 | Thalassospira xiamenensis | | |
| fig\|1208323.3.peg.893 | Celeribacter baekdonensis B30 | | |
| KZK95863.1 | Pseudovibrio sp. Ad46 | | |
| fig\|101571.310.peg.3956 | Burkholderia ubonensis | | |
| fig\|1882791.3.peg.1790 | Burkholderia sp. CF099 | | |
| fig\|1736536.3.peg.4809 | Variovorax sp. Root434 | | |
| PIG30812.1 | Janthinobacterium sp. 35 | | |
| fig\|1798244.3.peg.1046 | Gallionellales bacterium | | |
| | GWA2_55_18 | | |
| fig\|1131551.3.peg.1124 | Methylotenera sp. 1P/1 | | |
| fig\|1843082.3.peg.1574 | Macromonas sp. BK-30 | | |
| fig\|279058.16.peg.4721 | Collimonas arenae | | |
| fig\|1548123.6.peg.1144 | Pusillimonas sp. T2 | | |
| fig\|380394.4.peg.276 | Acidithiobacillus ferrooxidans | | |
| | ATCC 53993 | | |
| WP_080292858.1 | | | |
| fig\|101571.162.peg.3605 | Burkholderia ubonensis | | |
| fig\|1382803.3.peg.22 | Chromobacterium amazonense | | |
| fig\|930.4.peg.3851 | Acidithiobacillus thiooxidans | | |
| fig\|1261658.3.peg.1787 | Bibersteinia trehalosi Y31 | | |
| fig\|1679001.3.peg.631 | Pasteurellaceae bacterium NI1060 | | |
| fig\|1334187.3.peg.653 | Haemophilus influenzae KR494 | | |
| fig\|1581107.3.peg.1286 | Neisseria sp. HMSC15G01 | | |
| fig\|486.24.peg.152 | Neisseria lactamica | | |
| fig\|1953412.3.peg.1956 | bacterium UBP10 UBA1160 | | |
| WP_090322045.1 | Nitrosomonas oligotropha | | |
| fig\|2013740.3.peg.1400 | Deltaproteobacteria bacterium | | |
| | HGW-Deltaproteobacteria-13 | | |
| fig\|1907413.3.peg.3170 | Rhizobium sp. RU33A | | |
| fig\|1817963.3.peg.856 | Roseomonas deserti | | |
| fig\|2035448.3.peg.1752 | Rhizobium sp. C5 | | |
| WP_014077019.1 | | | |
| fig\|1648404.4.peg.2797 | Erythrobacter atlanticus | | |
| fig\|359.11.peg.6331 | Agrobacterium rhizogenes | | |
| fig\|887144.4.peg.573 | Rhizobium taibaishanense | | |
| fig\|1116389.3.peg.333 | Devosia insulae DS-56 | | |
| fig\|121719.10.peg.3421 | Pannonibacter phragmitetus | | |
| fig\|34002.6.peg.3570 | Paracoccus alcaliphilus | | |
| fig\|1940281.4.peg.1560 | Hoeflea sp. | | |
| fig\|1040981.5.peg.1561 | Mesorhizobium ciceri WSM4083 | | |
| fig\|410764.3.peg.807 | Rhizobium multihospitium | | |
| fig\|1825934.3.peg.3111 | Rhizobium anhuiense | | |
| fig\|1952824.3.peg.3061 | Rhodobiaceae bacterium UBA3976 | | |
| fig\|1871086.3.peg.2153 | Brevundimonas sp. | | |
| fig\|1588932.9.peg.647 | Brevundimonas naejangsanensis | | |
| fig\|1951751.3.peg.1538 | Erythrobacteraceae bacterium UBA1460 | | |
| fig\|1843368.3.peg.904 | Sphingobium sp. RAC03 | | |
| fig\|155892.10.peg.3219 | Caulobacter vibrioides | | |
| fig\|43057.4.peg.4537 | Rhodobacter azotoformans | | |
| fig\|1514904.3.peg.974 | Ahrensia marina | | |
| fig\|1338034.3.peg.722 | Vibrio parahaemolyticus O1:Kuk | | |
| | str. FDA R31 | | |
| fig\|150340.18.peg.1837 | Vibrio antiquarius | | |
| fig\|196024.5.peg.3821 | Aeromonas dhakensis | | |
| fig\|244366.32.peg.1886 | Klebsiella variicola | | |
| fig\|180957.35.peg.1654 | Pectobacterium brasiliense | | |
| fig\|55601.149.peg.665 | Vibrio anguillarum | | |
| fig\|121723.5.peg.2901 | Photobacterium sp. SKA34 | | |
| fig\|1584.170.peg.837 | Proteus mirabilis | | |
| fig\|40324.136.peg.3276 | Stenotrophomonas maltophilia | | |
| fig\|1122188.5.peg.411 | Lysobacter spongiicola DSM 21749 | | |
| fig\|2032566.3.peg.2826 | Xanthomonadaceae bacterium | | |
| | NML93-0792 | | |
| fig\|287.1731.peg.2578 | Pseudomonas aeruginosa | | |
| fig\|251702.3.peg.1529 | Pseudomonas syringae pv. antirrhini | | |
| fig\|1960829.3.peg.5912 | Pseudomonas sp. MF6394 | | |
| fig\|76759.17.peg.5093 | Pseudomonas monteilii | | |
| fig\|1981678.3.peg.5241 | Pseudomonas sp. R45(2017) | | |
| fig\|1699620.3.peg.3028 | Pseudomonas sp. RIT-PI-r | | |
| fig\|191391.4.peg.2140 | Pseudomonas salomonii | | |
| fig\|1844093.4.peg.7190 | Pseudomonas sp. 22 E 5 | | |
| fig\|287.1744.peg.1414 | Pseudomonas aeruginosa | | |
| fig\|287.1987.peg.910 | Pseudomonas aeruginosa | | |
| fig\|287.4372.peg.4481 | Pseudomonas aeruginosa | | |
| fig\|1856685.4.peg.2159 | Pseudomonas sp. TCU-HL1 | | |
| fig\|1718920.3.peg.3357 | Pseudomonas sp. ICMP 8385 | | |
| fig\|1781066.3.peg.2816 | Duganella sp. HH101 | | |
| fig\|95485.5.peg.60 | Burkholderia stabilis | | |
| fig\|1572871.6.peg.588 | Janthinobacterium sp. BJB304 | | |
| WP_034208069.1 | Burkholderia cepacia | | |
| WP_074283015.1 | Burkholderia sp. GAS332 | | |
| fig\|1168169.3.peg.2570 | Methylomonas sp. 11b | | |
| fig\|1899355.16.peg.1328 | Oceanospirillaceae bacterium | | |
| WP_093197597.1 | Variovorax sp. YR750 | | |
| fig\|1660091.3.peg.1650 | Bordetella sp. SCN 67-23 | | |
| fig\|134375.17.peg.4387 | Achromobacter sp. | | |
| fig\|1426114.10.peg.1990 | Thiomonas arsenitoxydans | | |
| fig\|1947551.3.peg.1903 | Stenotrophomonas sp. UBA2302 | | |
| fig\|1914330.4.peg.2242 | Salinisphaera sp. | | |
| fig\|1947037.3.peg.890 | Pantoea sp. UBA5707 | | |
| WP_094422719.1 | Kosakonia cowanii | | |
| WP_079496884.1 | | | |
| WP_088126255.1 | Enterobacter kobei | | |
| WP_049614309.1 | Yersinia | | |
| WP_048263135.1 | Pectobacterium peruviense | | |
| WP_040197602.1 | Klebsiella pneumoniae | | |
| fig\|669.34.peg.1586 | Vibrio harveyi | | |
| fig\|672.219.peg.1032 | Vibrio vulnificus | | |
| fig\|670.1028.peg.1775 | Vibrio parahaemolyticus | | |
| WP_065207673.1 | Photobacterium phosphoreum | | |
| fig\|1869214.3.peg.2231 | Rheinheimera sp. | | |
| WP_029795910.1 | Vibrio parahaemolyticus | | |
| fig\|1191302.3.peg.1081 | Vibrio crassostreae 9ZC77 | | |
| fig\|668.70.peg.1192 | Aliivibrio fischeri | | |
| fig\|28229.4.peg.4229 | Colwellia psychrerythraea | | |
| fig\|1855726.3.peg.270 | Burkholderia sp. KK1 | | |
| fig\|1674888.3.peg.829 | Burkholderiales bacterium Beta 02 | | |
| fig\|687412.4.peg.1108 | Pseudorhodobacter aquimaris | | |
| WP_092465129.1 | Donghicola eburneus | | |
| fig\|1120653.3.peg.5479 | Ensifer sp. LC384 | | |
| fig\|121719.5.peg.401 | Pannonibacter phragmitetus | | |
| fig\|1798804.3.peg.1597 | Rhizobium sp. 58 | | |
| fig\|1946675.3.peg.3089 | Kordiimonas sp. UBA4487 | | |
| fig\|36861.5.peg.1400 | Thiobacillus denitrificans | | |
| fig\|1115835.3.peg.1003 | Methylotenera versatilis 79 | | |
| fig\|1797188.3.peg.1508 | Acidobacteria bacterium | | |
| | RIFCSPLOWO2_12_FULL_60_22 | | |
| fig\|57320.3.peg.123 | Pseudodesulfovibrio profundus | | |
| fig\|1267534.3.peg.1238 | Acidobacteriaceae bacterium KBS 89 | | |
| fig\|1951344.3.peg.527 | Acidobacteriaceae bacterium UBA1307 | | |
| WP_006226461.1 | Achromobacter marplatensis | | |
| fig\|1503054.4.peg.5764 | Burkholderia stagnalis | | |
| WP_006159686.1 | Cupriavidus basilensis | | |
| WP_090191767.1 | unclassified Duganella | | |
| fig\|539.8.peg.1698 | Eikenella corrodens | | |
| fig\|1946925.3.peg.2129 | Micavibrio sp. UBA5701 | | |
| WP_047031309.1 | Hoeflea sp. IMCC20628 | | |
| fig\|1946134.3.peg.1092 | Brevundimonas sp. UBA6547 | | |
| WP_093914930.1 | Sulfitobacter marinus | | |
| fig\|1862950.3.peg.1234 | Rhizobiales bacterium NRL2 | | |
| fig\|1166078.4.peg.1483 | Aureimonas phyllosphaerae | | |
| fig\|709015.3.peg.734 | Pontibacter actiniarum DSM 19842 | | |
| WP_092160028.1 | Desulfovibrio ferrireducens | | |
| fig\|2026749.3.peg.3364 | Ignavibacteriae bacterium | | |
| WP_033771991.1 | Pantoea agglomerans | | |
| WP_097097099.1 | unclassified Enterobacteriaceae | | |
| | (miscellaneous) | | |
| fig\|1444151.3.peg.2733 | Escherichia coli 2-177-06_S3_C2 | | |
| WP_137545672.1 | Escherichia coli | Retron- | |
| | | Eco3 | |
| | | (Ec73) | |
| fig\|573.14856.peg.3852 | Klebsiella pneumoniae | | |
| WP_072021595.1 | Serratia marcescens | | |
| fig\|29571.3.peg.478 | Halomonas subglaciescola | | |
| WP_004534676.1 | | | |
| WP_095622523.1 | Halomonas sp. WRN001 | | |
| fig\|376427.4.peg.3223 | Halomonas gudaonensis | | |
| fig\|862908.3.peg.745 | Halobacteriovorax marinus SJ | | |
| SCJ40239.1 | uncultured Clostridium sp. | | |
| fig\|717962.3.peg.287 | Coprococcus catus GD/7 | | |
| WP_014642259.1 | Halobacillus halophilus | | |
| fig\|2009042.3.peg.2106 | Pseudomonas sp. Irchel 3H7 | | |
| fig\|1981718.3.peg.4346 | Pseudomonas sp. B39(2017) | | |
| fig\|665135.13.peg.1401 | Pseudomonas sp. In5 | | |
| fig\|1949067.3.peg.5629 | Pseudomonas sp. PICF141 | | |
| WP_007948552.1 | Pseudomonas sp. GM21 | | |
| SFB61662.1 | Delftia tsuruhatensis | | |
| WP_011615687.1 | | | |
| WP_014778098.1 | | | |
| fig\|1429083.4.peg.2612 | Pseudomonas hussainii | | |
| WP_095024014.1 | Pseudomonas | | |
| WP_090203690.1 | Pseudomonas asplenii | | |
| fig\|1564423.8.peg.1646 | Pseudomonas tolaasii NCPPB 2192 | | |
| WP_078802277.1 | Pseudomonas fluorescens | | |
| WP_090453229.1 | Pseudomonas | | |
| fig\|1306420.5.peg.1032 | Burkholderia pseudomallei MSHR5848 | | |
| fig\|1357270.3.peg.1923 | Pseudomonas syringae UB246 | | |
| fig\|2018067.3.peg.2950 | Pseudomonas sp. FDAARGOS_380 | | |
| fig\|317.311.peg.3241 | Pseudomonas syringae | | |
| fig\|287.2309.peg.126 | Pseudomonas aeruginosa | | |
| WP_039522442.1 | Pectobacterium brasiliense | | |
| WP_080861357.1 | Klebsiella pneumoniae | | |
| WP_014542745.1 | Erwinia sp. Ejp617 | | |
| OSL25696.1 | Escherichia coli TA255 | | |
| fig\|1125693.3.peg.761 | Proteus mirabilis WGLW4 | | |
| KMK80587.1 | Pectobacterium atrosepticum ICMP 1526 | | |
| fig\|550.717.peg.2037 | Enterobacter cloacae | | |
| ACS86154.1 | Dickeya paradisiaca Ech703 | | |
| WP_050122514.1 | Yersinia frederiksenii | | |
| WP_081334048.1 | Alteromonas macleodii | | |
| WP_055016254.1 | Pseudoalteromonas sp. P1-13-1a | | |
| fig\|56799.5.peg.478 | Colwellia sp. | | |
| fig\|666.3375.peg.2486 | Vibrio cholerae | | |
| PIW62005.1 | Shewanella sp. | | |
| | CG12_big_fil_rev_8_21_14_0_65_47_15 | | |
| OCA54994.1 | Photorhabdus namnaonensis | | |
| CNK75559.1 | Yersinia frederiksenii | | |
| WP_024248662.1 | Escherichia | | |
| WP_088618141.1 | Methylovulum psychrotolerans | | |
| WP_051669880.1 | | | |
| PCJ98666.1 | Alteromonadaceae bacterium | | |
| WP_081919471.1 | Acidithiobacillus ferrivorans | | |
| WP_055769167.1 | Stenotrophomonas | | |
| WP_039422954.1 | Xanthomonas vesicatoria | | |
| WP_078568253.1 | Xanthomonas campestris | | |
| WP_093486747.1 | unclassified Pseudoxanthomonas | | |
| WP_077445058.1 | Rhodanobacter sp. C05 | | |
| WP_092576562.1 | Achromobacter sp. NFACC18-2 | | |
| fig\|1330528.3.peg.2198 | Escherichia coli NCCP 15656 | | |
| fig\|83655.67.peg.2965 | Leclercia adecarboxylata | | |
| fig\|573.10044.peg.2850 | Klebsiella pneumoniae | | |
| WP_071888955.1 | Enterobacterales | | |
| fig\|1799789.3.peg.4357 | Paraglaciecola hydrolytica | | |
| fig\|2024839.8.peg.1563 | Marinovum sp. | | |
| fig\|1381081.7.peg.1167 | Vibrio panuliri | | |
| fig\|670.908.peg.3444 | Vibrio parahaemolyticus | | |
| fig\|626887.3.peg.2431 | Marinobacter nanhaiticus D15-8W | | |
| fig\|1913989.101.peg.1616 | Gammaproteobacteria bacterium | | |
| fig\|262489.9.peg.2938 | delta proteobacterium MLMS-1 | | |
| fig\|12035207.3.peg.545 | Janthinobacterium sp. 67 | | |
| fig\|28095.13.peg.1040 | Burkholderia gladioli | | |
| fig\|941449.3.peg.1262 | Desulfovibrio sp. X2 | | |
| fig\|1768806.3.peg.778 | Rhodospirillaceae bacterium CCH5-H10 | | |
| WP_083634830.1 | Desulfovibrio sp. DV | | |
| fig\|1231.4.peg.574 | Nitrosospira multiformis | | |
| fig\|604089.3.peg.1142 | Flavobacterium | | |
| | sinopsychrotolerans | | |
| fig\|357523.3.peg.1851 | Flavobacterium sp. 11 | | |
| fig\|1423323.5.peg.321 | Flavobacterium sp. AED | | |
| fig\|178356.3.peg.502 | Flavobacterium xinjiangense | | |
| fig\|1946545.3.peg.3457 | Flavobacterium sp. UBA4120 | | |
| fig\|150146.3.peg.2822 | Flavobacterium gillisiae | | |
| fig\|229203.4.peg.1981 | Flavobacterium degerlachei | | |
| fig\|280093.5.peg.432 | Flavobacterium granuli | | |
| fig\|728056.4.peg.1154 | Flavobacterium oncorhynchi | | |
| fig\|143224.8.peg.2343 | Zobellia uliginosa | | |
| fig\|1225176.3.peg.4300 | Cecembia lonarensis LW9 | | |
| fig\|1434700.3.peg.581 | Moheibacter sediminis | | |
| fig\|996.47.peg.468 | Flavobacterium columnare | | |
| fig\|172045.56.peg.2231 | Elizabethkingia miricola | | |
| fig\|12024823.3.peg.2086 | Altibacter sp. | | |
| fig\|2026728.18.peg.4090 | Crocinitomicaceae bacterium | | |
| fig\|980584.3.peg.2930 | Aquimarina agarivorans | | |
| fig\|1946744.3.peg.1682 | Leeuwenhoekiella sp. UBA1003 | | |
| fig\|1046627.3.peg.2526 | Bizionia argentinensis JUB59 | | |
| fig\|906888.15.peg.37 | Nonlabens ulvanivorans | | |
| fig\|407022.4.peg.2865 | Olivibacter domesticus | | |
| fig\|1500282.3.peg.3713 | Chryseobacterium sp. CF365 | | |
| WP_084550290.1 | Chryseobacterium scophthalmum | | |
| fig\|190304.8.peg.741 | Fusobacterium nucleatum subsp. | | |
| | nucleatum ATCC 25586 | | |
| fig\|1352.1731.peg.603 | Enterococcus faecium | | |
| fig\|1428.658.peg.666 | Bacillus thuringiensis | | |
| fig\|1497681.3.peg.3095 | Listeria newyorkensis | | |
| fig\|1396.1440.peg.4237 | Bacillus cereus | | |
| fig\|1917876.3.peg.2997 | Blautia sp. Marseille-P3087 | | |
| fig\|1952168.3.peg.215 | Lachnospiraceae bacterium UBA7480 | | |
| fig\|1907659.3.peg.1085 | Blautia sp. Marseille-P3201T | | |
| fig\|1265309.16.peg.461 | Epibacterium mobile F1926 | | |
| fig\|853.163.peg.215 | Faecalibacterium prausnitzii | | |
| fig\|1264.5.peg.4 | Ruminococcus albus | | |
| fig\|1500289.3.peg.4469 | Chryseobacterium sp. OV705 | | |
| fig\|1197728.3.peg.2386 | Prevotella conceptionensis 9403948 | | |
| fig\|1947486.3.peg.2515 | Sphingobacterium sp. UBA1897 | | |
| fig\|529.12.peg.1303 | Ochrobactrum anthropi | | |
| fig\|1523429.3.peg.2936 | Rhizobium sp. AAP116 | | |
| fig\|1761878.3.peg.469 | Paenibacillus sp. cl6col | | |
| fig\|1462996.4.peg.2634 | Paenibacillus yonginensis | | |
| fig\|582475.4.peg.4724 | Lysinibacillus xylanilyticus | | |
| fig\|1773.7915.peg.7638 | Mycobacterium tuberculosis | | |
| fig\|360310.3.peg.4853 | Bacillus sp. CDB3 | | |
| fig\|1396.515.peg.2936 | Bacillus cereus | | |
| fig\|662367.4.peg.242 | Spirosoma endophyticum | | |
| fig\|1895719.3.peg.2950 | Bacteroidales bacterium 45-6 | | |
| fig\|906888.9.peg.926 | Nonlabens ulvanivorans | | |
| fig\|694433.3.peg.2346 | Saprospira grandis DSM 2844 | | |
| fig\|1167006.5.peg.2941 | Desulfocapsa sulfexigens DSM 10523 | | |
| fig\|649724.3.peg.304 | Clostridium sp. ATCC BAA-442 | | |
| fig\|1505.32.peg.2959 | Paeniclostridium sordellii | | |
| fig\|1953142.3.peg.1858 | Bacteroidetes bacterium UBA1947 | | |
| fig\|2029590.3.peg.2754 | Mucilaginibacter sp. MD40 | | |
| fig\|29581.33.peg.2300 | Janthinobacterium lividum | | |
| fig\|40324.292.peg.236 | Stenotrophomonas maltophilia | | |
| fig\|1403329.3.peg.287 | Listeria monocytogenes Lm25180 | | |
| fig\|1121865.3.peg.1262 | Enterococcus columbae DSM 7374 = | | |
| | ATCC 51263 | | |
| fig\|1120746.3.peg.3113 | bacterium MS4 | | |
| fig\|1952299.3.peg.221 | Ruminococcaceae bacterium UBA2656 | | |
| fig\|1965604.3.peg.686 | Anaeromassilibacillus sp. An250 | | |
| fig\|1673717.3.peg.805 | Anaeromassilibacillus | | |
| | senegalensis | | |
| WP_116884683.1 | Victivallis vadensis | | |
| fig\|1948697.3.peg.196 | Lentisphaeria bacterium UBA4640 | | |
| fig\|1232460.3.peg.46 | Clostridiales bacterium VE202-28 | | |
| WP_007864340.1 | Clostridiales | | |
| WP_055649738.1 | Hungatella hathewayi | | |
| fig\|1226325.3.peg.2005 | Clostridium sp. KLE 1755 | | |
| fig\|1432052.10.peg.3166 | Eisenbergiella tayi | | |
| fig\|208479.8.peg.4376 | Enterocloster bolteae | | |
| fig\|1298920.3.peg.1959 | [Desulfotomaculum] guttoideum DSM 4024 | | |
| fig\|1776047.3.peg.4241 | Clostridium sp. C105KSO15 | | |
| fig\|1946596.3.peg.2399 | Hungatella sp. UBA4396 | | |
| fig\|1946603.3.peg.924 | Hungatella sp. UBA7603 | | |
| fig\|1410651.3.peg.407 | [Clostridium] aerotolerans DSM 5434 | | |
| fig\|1697784.3.peg.9617 | Clostridia bacterium UC5.1-1D4 | | |
| fig\|1745713.3.peg.3865 | Bariatricus massiliensis | | |
| fig\|180332.3.peg.1515 | Robinsoniella peoriensis | | |
| WP_072851604.1 | Lactonifactor longoviformis | | |
| WP_003507561.1 | Clostridiales | | |
| fig\|1111728.3.peg.587 | Budvicia aquatica DSM 5075 = ATCC 35567 | | |
| fig\|1122977.4.peg.2473 | Pragia fontium DSM 5563 = ATCC 49100 | | |
| fig\|1950915.3.peg.189 | Clostridiales bacterium UBA644 | | |
| fig\|1950927.3.peg.912 | Clostridiales bacterium UBA7187 | | |
| ERK60856.1 | Oscillibacter sp. KLE 1728 | | |
| WP_009260579.1 | Flavonifractor plautii | | |
| fig\|1235797.3.peg.2409 | Oscillibacter sp. 1-3 | | |
| fig\|1520815.3.peg.1262 | Ruminococcaceae bacterium D5 | | |
| fig\|1855302.3.peg.1138 | Pseudobutyrivibrio sp. JW11 | | |
| fig\|43305.5.peg.3631 | Butyrivibrio proteoclasticus | | |
| fig\|411463.15.peg.1791 | Eubacterium ventriosum ATCC 27560 | | |
| fig\|1235792.3.peg.3837 | Lachnospiraceae bacterium M18-1 | | |
| fig\|97139.3.peg.669 | Schaedlerella arabinosiphila | | |
| fig\|1291051.3.peg.1165 | Mediterraneibacter | | |
| | glycyrrhizinilyticus JCM 13369 | | |
| fig\|1532.6.peg.4793 | Blautia coccoides | | |
| fig\|1121114.4.peg.5478 | Blautia producta ATCC 27340 = DSM 2950 | | |
| fig\|1262776.3.peg.1908 | Clostridium sp. CAG:149 | | |
| fig\|1262792.3.peg.1164 | Clostridium sp. CAG:299 | | |
| fig\|1262995.3.peg.2852 | Firmicutes bacterium CAG:646 | | |
| fig\|537007.17.peg.3146 | Blautia hansenii DSM 20583 | | |
| fig\|1965569.3.peg.1928 | Lachnoclostridium sp. An169 | | |
| fig\|1952411.3.peg.2018 | Ruminococcaceae bacterium UBA6353 | | |
| fig\|1965578.3.peg.1947 | Pseudoflavonifractor sp. An187 | | |
| WP_001775049.1 | Escherichia coli | Retron- | |
| | | Eco5 | |
| | | (Ec107) | |
| WP_012602583.1 | | | |
| WP_015962464.1 | Enterobacteriaceae bacterium | | |
| | strain FGI 57 | | |
| fig\|1005999.3.peg.3342 | Leminorella grimontii ATCC 33999 = | | |
| | DSM 5078 | | |
| fig\|1378073.3.peg.795 | Enterobacter sp. CC120223-11 | | |
| fig\|911023.3.peg.138 | Yokenella regensburgei ATCC 49455 | | |
| fig\|1834193.3.peg.4113 | Enterococcus sp. 9E7_DIV0242 | | |
| fig\|1649188.10.peg.406 | Listeria goaensis | | |
| fig\|1430899.3.peg.278 | Listeria fleischmannii 1991 | | |
| fig\|1211844.4.peg.748 | Candidatus Stoquefichus | | |
| | massiliensis AP9 | | |
| fig\|1658109.3.peg.34 | Candidatus Stoquefichus sp. SB1 | | |
| fig\|1262793.3.peg.950 | Clostridium sp. CAG:302 | | |
| fig\|1262908.3.peg.1120 | Mycoplasma sp. CAG:956 | | |
| fig\|1674844.3.peg.242 | Clostridiales bacterium Firm_06 | | |
| fig\|1410672.3.peg.2823 | Ruminococcus flavefaciens ND2009 | | |
| fig\|1947424.3.peg.1718 | Ruminococcus sp. UBA4310 | | |
| fig\|1265.9.peg.2602 | Ruminococcus flavefaciens | | |
| fig\|1336236.3.peg.1817 | Ruminococcus flavefaciens ATCC 19208 | | |
| CDC65895.1 | Ruminococcus sp. CAG:57 | | |
| WP_092946213.1 | Ruminococcaceae bacterium YRB3002 | | |
| fig\|1307.1644.peg.1532 | Streptococcus suis | | |
| WP_050516365.1 | Escherichia coli | | |
| WP_097505494.1 | Escherichia coli | Retron- | |
| | | Eco6 | |
| | | (Ec48) | |
| fig\|573.15585.peg.2343 | Klebsiella pneumoniae | | |
| WP_023581669.1 | Proteus hauseri | | |
| WP_079656969.1 | Serratia marcescens | | |
| WP_090085157.1 | Phytobacter sp. SCO41 | | |
| fig\|573.15584.peg.1543 | Klebsiella pneumoniae | | |
| WP_023330997.1 | Enterobacter cloacae complex | | |
| fig\|72407.673.peg.2552 | Klebsiella pneumoniae subsp. | | |
| | pneumoniae | | |
| CNM01182.1 | Yersinia pseudotuberculosis | | |
| CNG88012.1 | Yersinia enterocolitica | | |
| fig\|1925763.3.peg.649 | Marinobacter salexigens | | |
| PKW24121.1 | Marinobacter sp. LV10R510-8 | | |
| WP_045597342.1 | Vibrio vulnificus | | |
| WP_098972386.1 | Aeromonas sp. CU5 | | |
| WP_005172873.1 | Yersinia enterocolitica | | |
| WP_052979504.1 | Enterobacteriaceae | | |
| WP_083069261.1 | Pantoea vagans | | |
| WP_053911905.1 | Pseudoalteromonas sp. SW0106-04 | | |
| fig\|1916082.18.peg.39 | Alteromonadaceae bacterium | | |
| WP_046555216.1 | Arsukibacterium sp. MJ3 | | |
| KPW01986.1 | Pseudoalteromonas sp. P1-8 | | |
| WP_094277737.1 | Oceanimonas baumannii | | |
| fig\|1414654.3.peg.2005 | Oceanisphaera psychrotolerans | | |
| WP_008133621.1 | unclassified Pseudoalteromonas | | |
| KQA22543.1 | Vibrio metoecus | | |
| WP_000284440.1 | Vibrio cholerae | | |
| WP_011261677.1 | Aliivibrio fischeri | | |
| KEE40622.1 | | | |
| WP_012982829.1 | | | |
| ALL66139.1 | Paraburkholderia caribensis MBA4 | | |
| WP_093223969.1 | Pseudomonas vancouverensis | | |
| fig\|12015553.3.peg.2940 | Pseudomonas sp. PGPPP1 | | |
| WP_096082869.1 | Pseudomonas aeruginosa | | |
| ONM67687.1 | Pseudomonas aeruginosa | | |
| fig\|316.213.peg.2906 | Pseudomonas stutzeri | | |
| WP_078734267.1 | Pseudomonas fluorescens | | |
| WP_079384669.1 | Pseudomonas aeruginosa | | |
| WP_095948157.1 | Variovorax boronicumulans | | |
| WP_011625020.1 | Shewanella sp. MR-7 | | |
| WP_100292553.1 | Aeromonas cavernicola | | |
| WP_055021484.1 | Pseudoalteromonas sp. P1-26 | | |
| PHS01491.1 | Oceanobacter sp. | | |
| fig\|2024618.3.peg.1141 | Acinetobacter sp. BS1 | | |
| WP_114139108.1 | Klebsiella pneumoniae | | |
| WP_077749737.1 | Pseudomonas sp. FSL W5-0299 | | |
| WP_078451378.1 | Pseudomonas aeruginosa | | |
| WP_007245785.1 | Pseudomonas syringae group | | |
| fig\|316.280.peg.1454 | Pseudomonas stutzeri | | |
| WP_086822222.1 | Pseudomonas aeruginosa | | |
| WP_073268605.1 | Pseudomonas punonensis | | |
| WP_095280108.1 | Lelliottia jeotgali | | |
| WP_095715328.1 | Citrobacter sp. TSA-1 | | |
| WP_050111525.1 | Yersinia | | |
| WP_013724211.1 | Aeromonas veronii | | |
| WP_021140819.1 | Aeromonas salmonicida | | |
| fig\|1094342.5.peg.1611 | Alcanivorax xenomutans | | |
| fig\|1932666.4.peg.1886 | Haliea sp. | | |
| WP_087148323.1 | Crenothrix polyspora | | |
| WP_064022638.1 | Methylomonas sp. DH-1 | | |
| PIY64876.1 | Shewanella sp. | | |
| | CG_4_10_14_0_8_um_filter_42_13 | | |
| WP_006710190.1 | Vibrio ichthyoenteri | | |
| WP_045040928.1 | Photobacterium iliopiscarium | | |
| WP_054543201.1 | Vibrio splendidus | | |
| WP_080540293.1 | Vibrio vulnificus | | |
| fig\|2032624.3.peg.2540 | Halomonas sp. WN018 | | |
| KJT50308.1 | Salmonella enterica subsp. | Retron- | |
| | enterica serovar Heidelberg str. | Sen1 | |
| | RI-11-014588 | (Se72) | |
| WP_005761319.1 | | | |
| ODQ05744.1 | Shigella sp. FC130 | | |
| KKW01006.1 | Candidatus Saccharibacteria | | |
| | bacterium GW2011_GWC2_48_9 | | |
| KMZ12260.1 | Candidatus Burkholderia humilis | | |
| SFQ04394.1 | Ralstonia sp. NFACC01 | | |
| WP_025373922.1 | Advenella mimigardefordensis | | |
| WP_093341200.1 | Variovorax sp. PDC80 | | |
| WP_091453700.1 | Giesbergeria anulus | | |
| SAY51889.1 | Neisseria weaveri | | |
| WP_065255232.1 | Moraxella lacunata | | |
| WP_049330876.1 | Neisseria | | |
| fig\|1196095.197.peg.151 | Gilliamella apicola | | |
| WP_072956843.1 | Vibrio gazogenes | | |
| fig\|857087.3.peg.3286 | Methylomonas methanica MC09 | | |
| fig\|1952222.3.peg.1307 | Methylococcaceae bacterium UBA3127 | | |
| WP_039486261.1 | Vibrio sinaloensis | | |
| WP_065545234.1 | Vibrio scophthalmi | | |
| WP_033094845.1 | Colwellia psychrerythraea | | |
| WP_057552475.1 | Vibrio cholerae | | |
| WP_004726393.1 | Vibrio furnissii | | |
| fig\|2020862.3.peg.1934 | Halobacteriovorax sp. | | |
| fig\|624.1260.peg.1437 | Shigella sonnei | | |
| WP_011516221.1 | Burkholderiales | | |
| fig\|1947370.3.peg.1923 | Pusillimonas sp. UBA4517 | | |
| WP_038400955.1 | Yersinia pseudotuberculosis | | |
| fig\|1951903.3.peg.117 | Halieaceae bacterium UBA3099 | | |
| WP_024914507.1 | Chania multitudinisentens | | |
| WP_042893228.1 | Enterobacteriaceae | | |
| WP_038238211.1 | Xenorhabdus szentirmaii | | |
| EXI65661.1 | Candidatus Accumulibacter sp. SK-12 | | |
| WP_016452106.1 | Delftia | | |
| WP_013517170.1 | Alicycliphilus denitrificans | | |
| OXC73828.1 | Caballeronia sordidicola | | |
| AIO65205.1 | Burkholderia oklahomensis | | |
| WP_013234866.1 | Herbaspirillum seropedicae | | |
| WP_082884385.1 | Piscirickettsiaceae bacterium NZ-RLO1 | | |
| fig\|2006849.4.peg.371 | Xanthomonadales bacterium | | |
| WP_074262787.1 | Paraburkholderia phenazinium | | |
| WP_009906786.1 | Burkholderia thailandensis | | |
| WP_022524328.1 | | | |
| WP_081817450.1 | Halomonas sp. HL-48 | | |
| WP_020312233.1 | Pseudomonas syringae | | |
| KPY75916.1 | Pseudomonas amygdali pv. tabaci | | |
| fig\|1793966.3.peg.180 | Pseudomonas fluvialis | | |
| fig\|1891229.16.peg.2033 | Pseudomonadales bacterium | | |
| WP_099454886.1 | Pseudomonas putida | | |
| WP_092400423.1 | Pseudomonas sp. NFACC39-1 | | |
| WP_012315430.1 | Pseudomonas putida | | |
| WP_020799819.1 | Pseudomonas sp. G5(2012) | | |
| WP_004574016.1 | | | |
| fig\|1435425.3.peg.787 | Pseudomonas sp. QTF5 | | |
| WP_045490543.1 | Pseudomonas sp. StFLB209 | | |
| WP_011506503.1 | Chromohalobacter salexigens | | |
| fig\|1609967.3.peg.3047 | Halomonas sp. HG01 | | |
| fig\|1492738.3.peg.2698 | Flavobacterium seoulense | | |
| WP_092849245.1 | Algibacter pectinivorans | | |
| WP_025835957.1 | Bacteroides | | |
| fig\|2025877.3.peg.668 | Parabacteroides sp. AT13 | | |
| fig\|246787.6.peg.2081 | Bacteroides cellulosilyticus | | |
| fig\|1339287.3.peg.1113 | Bacteroides fragilis str. 3986 T (B) 9 | | |
| fig\|1946017.3.peg.1516 | Alistipes sp. UBA940 | | |
| WP_038655380.1 | Mucinivorans hirudinis | | |
| WP_093669272.1 | Tenacibaculum sp. MAR_2009_124 | | |
| WP_073241067.1 | Flavobacterium flevense | | |
| WP_096193803.1 | Cytophagales bacterium TFI 002 | | |
| WP_076357635.1 | | | |
| WP_073238193.1 | Pedobacter caeni | | |
| WP_076451370.1 | | | |
| WP_091906542.1 | Porphyromonadaceae bacterium KH3R12 | | |
| WP_051365712.1 | Flavobacterium saliperosum | | |
| fig\|1938609.3.peg.1765 | Flavobacterium sp. LM4 | | |
| SDJ72221.1 | Flavobacterium noncentrifugens | | |
| fig\|1985174.3.peg.2584 | Chitinophagaceae bacterium IBVUCB2 | | |
| WP_092737749.1 | Riemerella columbipharyngis | | |
| fig\|192149.3.peg.42 | Muricauda sp. | | |
| fig\|418630.3.peg.1685 | Rhodobacter megalophilus | | |
| fig\|1915314.3.peg.3469 | Thioclava sp. DLFJ5-1 | | |
| fig\|2030815.3.peg.2725 | Marinosulfonomonas sp. | | |
| fig\|2035451.3.peg.4632 | Rhizobium sp. L18 | | |
| WP_043872258.1 | Celeribacter indicus | | |
| WP_055683826.1 | Jannaschia rubra | | |
| fig\|1947537.3.peg.498 | Sphingopyxis sp. UBA6198 | | |
| WP_069065961.1 | Sphingobium sp. RAC03 | | |
| WP_084280100.1 | Novosphingobium sp. B1 | | |
| fig\|1895845.3.peg.487 | Sphingobium sp. 66-54 | | |
| GAK73419.1 | Agrobacterium rubi TR3 = NBRC 13261 | | |
| WP_090966398.1 | Aureimonas phyllosphaerae | | |
| WP_091860144.1 | Bosea robiniae | | |
| WP_085092006.1 | Azospirillum oryzae | | |
| fig\|1528100.4.peg.28 | Methylomagnum ishizawai | | |
| fig\|132057.3.peg.9515 | Calothrix sp. PCC 7103 | | |
| fig\|103690.10.peg.3571 | Nostoc sp. PCC 7120 = FACHB-418 | | |
| fig\|1137095.11.peg.15 | Scytonema sp. HK-05 | | |
| CDZ48826.1 | Neorhizobium galegae bv. officinalis | | |
| WP_072340070.1 | Devosia enhydra | | |
| OYR18277.1 | Ochrobactrum thiophenivorans | | |
| WP_093509439.1 | Sphingopyxis sp. YR583 | | |
| WP_081799025.1 | Novosphingobium resinovorum | | |
| PIY55545.1 | Zetaproteobacteria bacterium | | |
| | CG_4_10_14_0_8_um_filter_49_80 | | |
| SDT44912.1 | Bradyrhizobium canariense | | |
| WP_096350346.1 | | | |
| WP_074962594.1 | Jannaschia rubra | | |
| WP_038724888.1 | Burkholderia pseudomallei | | |
| WP_012217410.1 | Burkholderia multivorans | | |
| WP_100428762.1 | Janthinobacterium sp. 67 | | |
| WP_082161008.1 | Candidatus Competibacter | | |
| | denitrificans | | |
| AFL73219.1 | Thiocystis violascens DSM 198 | | |
| WP_014427842.1 | | | |
| fig\|364030.3.peg.3554 | Thiomonas delicata | | |
| KGW20495.1 | Burkholderia pseudomallei MSHR2451 | | |
| SFE83076.1 | Variovorax sp. OK212 | | |
| WP_013028226.1 | Sideroxydans lithotrophicus | | |
| WP_080311424.1 | Burkholderia pseudomallei | | |
| fig\|337.13.peg.3872 | Burkholderia glumae | | |
| WP_082643860.1 | Pseudomonas | | |
| CKH90039.1 | Pseudomonas aeruginosa | | |
| WP_083287254.1 | unclassified Janthinobacterium | | |
| WP_122648546.1 | Burkholderia pseudomallei | | |
| WP_082706753.1 | unclassified Pseudomonas | | |
| WP_080936076.1 | Klebsiella pneumoniae | | |
| WP_000746343.1 | Enterobacteriaceae | | |
| EMX54653.1 | Escherichia coli MP020980.2 | | |
| WP_053270700.1 | Escherichia coli | | |
| fig\|1736224.3.peg.3731 | Serratia sp. Leaf51 | | |
| fig\|1175299.4.peg.709 | Dickeya zeae ZJU1202 | | |
| WP_001461245.1 | Enterobacteriaceae | | |
| fig\|617145.3.peg.3535 | Vibrio splendidus 1F-157 | | |
| fig\|1440054.3.peg.3851 | Vibrio sp. OY15 | | |
| fig\|617135.3.peg.594 | Aliivibrio fischeri ZF-211 | | |
| WP_023267764.1 | Shewanella decolorationis | | |
| fig\|1481663.36.peg.3628 | Vibrio metoecus | | |
| fig\|670.893.peg.2716 | Vibrio parahaemolyticus | | |
| fig\|680.33.peg.5391 | Vibrio campbellii | | |
| fig\|298386.8.peg.4344 | Photobacterium profundum SS9 | | |
| fig\|663.73.peg.714 | Vibrio alginolyticus | | |
| fig\|1333511.3.peg.3208 | Pseudoalteromonas haloplanktis TAB23 | | |
| WP_064574154.1 | Hafnia paralvei | | |
| WP_064645509.1 | Obesumbacterium proteus | | |
| fig\|630.105.peg.4248 | Yersinia enterocolitica | | |
| fig\|1400673.7.peg.1969 | Legionella pneumophila str. Corby | | |
| WP_092678546.1 | Rosenbergiella nectarea | | |
| WP_069476513.1 | Raoultella ornithinolytica | | |
| fig\|1267535.3.peg.2394 | Bryobacterales bacterium KBS 96 | | |
| WP_000446053.1 | Acinetobacter baumannii | | |
| fig\|1948587.3.peg.786 | Gammaproteobacteria bacterium | | |
| | UBA1902 | | |
| WP_014949305.1 | Alteromonas macleodii | | |
| fig\|1797397.3.peg.2386 | Bdellovibrionales bacterium | | |
| | RIFOXYC1_FULL_54_43 | | |
| fig\|1386968.3.peg.847 | Francisella tularensis subsp. | | |
| | novicida PA10-7858 | | |
| WP_074900850.1 | | | |
| fig\|1975705.3.peg.898 | Psychrobacter sp. FDAARGOS_221 | | |
| WP_066184577.1 | Arcobacter | | |
| fig\|1780380.4.peg.4010 | Eubacteriaceae bacterium CHKCI004 | | |
| fig\|556261.3.peg.2546 | Clostridium sp. D5 | | |
| fig\|1193534.6.peg.2375 | uncultured Flavonifractor sp. | | |
| fig\|1042163.3.peg.3771 | Brevibacillus laterosporus LMG 15441 | | |
| WP_062492190.1 | Paenibacillus sp. 320-W | | |
| WP_081674606.1 | Lactobacillus harbinensis | | |
| WP_050781686.1 | Lactobacillus coryniformis | | |
| WP_021109137.1 | Enterococcus faecium | | |
| WP_046309803.1 | Staphylococcus | | |
| CBL03706.1 | Gordonibacter pamelaeae 7-10-1-b | | |
| WP_090944285.1 | Pelosinus propionicus | | |
| WP_077305443.1 | Clostridium beijerinckii | | |
| fig\|410072.5.peg.40 | Coprococcus comes | | |
| WP_011669870.1 | Leptospira borgpetersenii | | |
| WP_015565235.1 | Faecalibacterium prausnitzii | | |
| CUO23478.1 | Faecalibacterium prausnitzii | | |
| WP_085748688.1 | Rhizobacter gummiphilus | | |
| WP_093270014.1 | Psychrobacillus sp. OK032 | | |
| SHE86352.1 | Atopostipes suicloacalis DSM 15692 | | |
| WP_000346292.1 | unclassified Streptococcus | | |
| WP_080465410.1 | Lactobacillus plantarum | | |
| WP_080662531.1 | Lactobacillus brevis | | |
| WP_093131554.1 | Salinibacillus kushneri | | |
| WP_093336905.1 | Salibacterium halotolerans | | |
| fig\|1974627.3.peg.386 | Candidatus Levybacteria bacterium | | |
| | CG_4_9_14_0_2_um_filter_35_21 | | |
| fig\|1802603.3.peg.453 | Candidatus Woykebacteria bacterium | | |
| | RIFCSPHIGHO2_12_FULL_45_10 | | |
| fig\|392734.5.peg.3006 | Terriglobus roseus | | |
| AGL61879.1 | Candidatus Saccharimonas | | |
| | aalborgensis | | |
| fig\|319224.16.peg.2726 | Shewanella putrefaciens CN-32 | | |
| fig\|1720343.3.peg.1263 | Pseudoalteromonas sp. | | |
| | 1_2015MBL_MicDiv | | |
| fig\|1136158.3.peg.3691 | Vibrio cyclitrophicus 1F97 | | |
| fig\|666.3017.peg.1000 | Vibrio cholerae | | |
| fig\|1909458.3.peg.2277 | Salinivibrio sp. ML198 | | |
| fig\|1638949.3.peg.831 | Vibrio sp. ECSMB14106 | | |
| fig\|1493915.3.peg.158 | Pseudoalteromonas sp. NJ631 | | |
| BAC94535.1 | Vibrio vulnificus YJ016 | | |
| fig\|1191313.3.peg.1135 | Vibrio splendidus 1S-124 | | |
| fig\|670.1244.peg.3807 | Vibrio parahaemolyticus | | |
| fig\|1659714.3.peg.4264 | Citrobacter braakii | | |
| fig\|1192730.4.peg.1976 | Salmonella enterica subsp. | | |
| | enterica serovar Kintambo | | |
| fig\|550.1216.peg.4296 | Enterobacter cloacae | | |
| WP_072269713.1 | Serratia | | |
| WP_053898075.1 | Escherichia coli | | |
| fig\|624.1264.peg.1635 | Shigella sonnei | | |
| fig\|1181777.3.peg.78 | Escherichia coli KTE233 | | |
| fig\|1802256.3.peg.310 | Sulfurimonas sp. | | |
| | RIFOXYB12_FULL_35_9 | | |
| PHR73342.1 | Arcobacter sp. | | |
| fig\|2014260.3.peg.3813 | bacterium (Candidatus | | |
| | Blackallbacteria) | | |
| | CG13_big_fil_rev_8_21_14_2_50_49_14 | | |
| WP_042497590.1 | Vibrio maritimus | | |
| WP_063522799.1 | Vibrio sp. HI00D65 | | |
| WP_004186757.1 | Enterobacteriaceae | | |
| WP_040122746.1 | Vibrio | | |
| WP_086046550.1 | Vibrio harveyi group | | |
| WP_063849005.1 | Enterobacter cloacae | | |
| WP_023486614.1 | Enterobacteriaceae | | |
| WP_070992278.1 | Pseudoalteromonas byunsanensis | | |
| fig\|1005665.3.peg.2532 | Kosakonia oryzendophytica | | |
| fig\|1219066.3.peg.3636 | Vibrio parahaemolyticus NBRC 12711 | | |
| fig\|1225184.4.peg.1222 | Pantoea sp. A4 | | |
| fig\|675814.3.peg.1256 | Vibrio coralliilyticus ATCC BAA-450 | | |
| SFR59865.1 | Pseudobutyrivibrio sp. NOR37 | | |
| fig\|853.16.peg.1112 | Faecalibacterium prausnitzii | | |
| fig\|1965572.3.peg.1423 | Pseudoflavonifractor sp. An176 | | |
| fig\|588581.3.peg.3589 | Ruminiclostridium papyrosolvens | | |
| | DSM 2782 | | |
| fig\|1396.1409.peg.4169 | Bacillus cereus | | |
| fig\|1428.538.peg.4047 | Bacillus thuringiensis | | |
| fig\|1465.16.peg.946 | Brevibacillus laterosporus | | |
| WP_087385137.1 | | | |
| AIF42417.1 | Virgibacillus sp. SK37 | | |
| WP_076543941.1 | Halanaerobium kushneri | | |
| fig\|1121093.3.peg.3089 | Bacillus panaciterrae DSM 19096 | | |
| fig\|29367.3.peg.2029 | Clostridium puniceum | | |
| WP_089719707.1 | Halanaerobium congolense | | |
| fig\|307249.3.peg.3585 | uncultured Sporomusa sp. | | |
| WP_072949666.1 | Ruminococcus flavefaciens | | |
| CCX81854.1 | Ruminococcus sp. CAG:108 | | |
| fig\|1491.669.peg.2217 | Clostridium botulinum | | |
| fig\|1872455.3.peg.401 | Alkaliphilus sp. | | |
| fig\|576117.5.peg.4005 | Celeribacter halophilus | | |
| fig\|1225647.3.peg.1829 | Phaeobacter sp. 11ANDIMAR09 | | |
| fig\|1380380.4.peg.1574 | Ahrensia sp. 13_GOM-1096m | | |
| fig\|293.7.peg.2956 | Brevundimonas diminuta | | |
| WP_095437634.1 | Rhizobium sp. 11515TR | | |
| fig\|1912891.7.peg.702 | Sphingobium sp. | | |
| fig\|1736574.3.peg.4024 | Pseudoxanthomonas sp. Root630 | | |
| fig\|227946.13.peg.4105 | Xanthomonas translucens pv. poae | | |
| fig\|1761791.3.peg.4793 | Lysobacter sp. yr284 | | |
| fig\|1560195.5.peg.485 | Janthinobacterium sp. BJB301 | | |
| fig\|1503054.43.peg.6257 | Burkholderia stagnalis | | |
| fig\|1207504.10.peg.4279 | Burkholderia pseudomultivorans | | |
| WP_092172515.1 | unclassified Pseudomonas | | |
| WP_074815429.1 | Pseudomonas syringae | | |
| fig\|150146.3.peg.3162 | Flavobacterium gillisiae | | |
| fig\|76832.8.peg.3775 | Myroides odoratimimus | | |
| fig\|1202724.3.peg.994 | Flavobacterium akiainvivens | | |
| fig\|1805473.3.peg.3678 | Chryseobacterium timonianum | | |
| fig\|253.33.peg.3826 | Chryseobacterium indologenes | | |
| WP_076561634.1 | Chryseobacterium indoltheticum | | |
| fig\|12024823.3.peg.95 | Altibacter sp. | | |
| fig\|1250278.4.peg.3462 | Salegentibacter sp. Hel I 6 | | |
| fig\|1797342.3.peg.689 | Bacteroidetes bacterium GWF2_33_38 | | |
| WP_084184261.1 | Chryseobacterium ureilyticum | | |
| fig\|1948560.3.peg.3003 | Deltaproteobacteria bacterium UBA6106 | | |
| fig\|1392.364.peg.2564 | Bacillus anthracis | | |
| fig\|872970.3.peg.1713 | Amphibacillus marinus | | |
| fig\|1385514.3.peg.313 | Pontibacillus yanchengensis Y32 | | |
| fig\|76853.4.peg.2614 | Solibacillus silvestris | | |
| fig\|1423774.3.peg.1262 | Lactobacillus nantensis DSM 16982 | | |
| fig\|1410670.3.peg.2844 | Ruminococcus flavefaciens MA2007 | | |
| fig\|169435.7.peg.1348 | Anaerotruncus colihominis | | |
| fig\|1946597.3.peg.2104 | Hungatella sp. UBA4568 | | |
| fig\|1948087.3.peg.796 | Firmicutes bacterium UBA6113 | | |
| fig\|642492.3.peg.2638 | Cellulosilyticum lentocellum DSM 5427 | | |
| fig\|1950841.3.peg.2383 | Clostridiales bacterium UBA2436 | | |
| fig\|1555512.3.peg.1251 | Salipiger marinus | | |
| fig\|383381.3.peg.2538 | Erythrobacter sp. JL475 | | |
| WP_081629462.1 | | | |
| fig\|1736258.3.peg.3392 | Methylobacterium sp. Leaf112 | | |
| fig\|1950192.3.peg.426 | Anaerolineales bacterium UBA2232 | | |
| fig\|170623.6.peg.4661 | Azotobacter beijerinckii | | |
| fig\|170623.7.peg.704 | Azotobacter beijerinckii | | |
| fig\|1981099.3.peg.513 | Niveispirillum lacus | | |
| fig\|1250539.3.peg.3491 | Pelagibaca abyssi | | |
| fig\|1947582.3.peg.2979 | Sulfitobacter sp. UBA1132 | | |
| fig\|1909294.17.peg.3456 | Rhizobiales bacterium | | |
| fig\|1735583.3.peg.1657 | Pseudovibrio sp. W64 | | |
| fig\|670.1220.peg.4688 | Vibrio parahaemolyticus | | |
| fig\|1004786.3.peg.925 | Alteromonas mediterranea DE1 | | |
| fig\|2013797.3.peg.2109 | Gammaproteobacteria bacterium | | |
| | HGW-Gammaproteobacteria-15 | | |
| fig\|1948580.3.peg.3400 | Gammaproteobacteria bacterium | | |
| | UBA1012 | | |
| fig\|1714300.3.peg.306 | Marinobacterium profundum | | |
| fig\|1961547.3.peg.1371 | Desulfobulbaceae bacterium UBA2273 | | |
| fig\|441162.10.peg.6621 | Burkholderia oklahomensis C6786 | | |
| fig\|615.307.peg.4666 | Serratia marcescens | | |
| fig\|631.3.peg.1883 | Yersinia intermedia | | |
| fig\|1763535.3.peg.1547 | Hydrogenophaga crassostreae | | |
| fig\|43263.5.peg.2702 | Pseudomonas alcaligenes | | |
| fig\|244366.46.peg.3595 | Klebsiella variicola | | |
| fig\|1224150.8.peg.3856 | Dickeya paradisiaca NCPPB 2511 | | |
| fig\|61645.10.peg.2019 | Enterobacter asburiae | | |
| fig\|1948706.3.peg.2225 | Opitutae bacterium UBA1333 | | |
| fig\|2026771.13.peg.1697 | Opitutae bacterium | | |
| fig\|2026771.11.peg.1955 | Opitutae bacterium | | |
| fig\|2026772.5.peg.424 | Opitutales bacterium | | |
| fig\|2026801.20.peg.1798 | Verrucomicrobiales bacterium | | |
| fig\|2026801.14.peg.1176 | Verrucomicrobiales bacterium | | |
| fig\|1951369.3.peg.1157 | Akkermansiaceae bacterium UBA6946 | | |
| fig\|1977087.12.peg.1918 | Proteobacteria bacterium | | |
| fig\|12026779.14.peg.4171 | Planctomycetaceae bacterium | | |
| fig\|12026779.28.peg.3264 | Planctomycetaceae bacterium | | |
| fig\|12026779.30.peg.3181 | Planctomycetaceae bacterium | | |
| fig\|2026779.29.peg.2310 | Planctomycetaceae bacterium | | |
| fig\|1797235.3.peg.3 | Acinetobacter sp. | | |
| | RIFCSPHIGHO2_12_41_5 | | |
| fig\|316.284.peg.937 | Pseudomonas stutzeri | | |
| fig\|296.11.peg.442 | Pseudomonas fragi | | |
| fig\|1981714.3.peg.993 | Pseudomonas sp. B5(2017) | | |
| fig\|150340.44.peg.6020 | Pseudomonas fuscovaginae | | |
| fig\|1761897.3.peg.509 | Pseudomonas sp. ok272 | | |
| fig\|1402514.3.peg.154 | Pseudomonas aeruginosa BWHPSA014 | | |
| fig\|1938440.3.peg.5997 | Pseudomonas sp. T | | |
| fig\|1566250.3.peg.959 | Pseudomonas sp. NFACC02 | | |
| fig\|316.357.peg.479 | Pseudomonas stutzeri | | |
| fig\|287.4433.peg.2945 | Pseudomonas aeruginosa | | |
| fig\|1970515.3.peg.709 | Hydrogenophilales bacterium 12-61-10 | | |
| fig\|95486.85.peg.1748 | Burkholderia cenocepacia | | |
| fig\|292.61.peg.8104 | Burkholderia cepacia | | |
| fig\|1408450.3.peg.3766 | Methylobacter tundripaludum 21/22 | | |
| fig\|157910.3.peg.5727 | Paraburkholderia tuberum | | |
| fig\|279058.16.peg.4239 | Collimonas arenae | | |
| fig\|1537272.3.peg.1916 | Janthinobacterium sp. HH100 | | |
| fig\|1218081.3.peg.1751 | Paraburkholderia kururiensis | | |
| | subsp. thiooxydans NBRC 107107 | | |
| fig\|573.14059.peg.3113 | Klebsiella pneumoniae | | |
| fig\|40324.192.peg.51 | Stenotrophomonas maltophilia | | |
| fig\|1219041.3.peg.4613 | Sphingomonas azotifigens NBRC 15497 | | |
| fig\|1561196.3.peg.560 | Burkholderia sp. E7m39 | | |
| fig\|1882750.3.peg.1035 | Burkholderia sp. GAS332 | | |
| fig\|1736266.3.peg.1145 | Duganella sp. Leaf126 | | |
| fig\|2015350.3.peg.1640 | Burkholderia sp. AU18528 | | |
| fig\|58133.4.peg.815 | Nitrosospira sp. NpAV | | |
| fig\|1691980.3.peg.1912 | Rhodocyclaceae bacterium Paddy-1 | | |
| fig\|305.393.peg.1023 | Ralstonia solanacearum | | |
| fig\|56449.3.peg.3604 | Xanthomonas bromi | | |
| fig\|1281282.5.peg.1894 | Xanthomonas campestris pv. | | |
| | campestris str. CN14 | | |
| fig\|40324.334.peg.1103 | Stenotrophomonas maltophilia | | |
| fig\|1349793.3.peg.2529 | Hydrogenophaga taeniospiralis | | |
| | NBRC 102512 | | |
| fig\|1842727.3.peg.1491 | Rhodoferax koreense | | |
| fig\|1619952.3.peg.5158 | Burkholderiaceae bacterium 16 | | |
| fig\|1970380.3.peg.1914 | Halothiobacillus sp. 14-55-98 | | |
| fig\|2015568.3.peg.2963 | Burkholderiales bacterium PBB6 | | |
| fig\|1752215.3.peg.2312 | Gammaproteobacteria bacterium | | |
| | Ga0077554 | | |
| fig\|1706231.5.peg.3125 | Janthinobacterium sp. CG23_2 | | |
| fig12013716.3.peg.2169 | Betaproteobacteria bacterium HGW- | | |
| | Betaproteobacteria-4 | | |
| fig\|1946997.3.peg.3049 | Nitrospira sp. UBA7655 | | |
| fig\|765913.3.peg.2527 | Thiorhodococcus drewsii AZ1 | | |
| fig\|1743159.3.peg.1891 | Polynucleobacter yangtzensis | | |
| fig\|1597955.3.peg.3923 | Limnohabitans sp. DM1 | | |
| fig\|1184267.3.peg.1626 | Bdellovibrio exovorus JSS | | |
| fig\|101571.190.peg.3007 | Burkholderia ubonensis | | |
| fig\|123899.5.peg.1710 | Bordetella trematum | | |
| fig\|463035.3.peg.3900 | Bordetella genomosp. 12 | | |
| fig\|1395608.4.peg.211 | Bordetella genomosp. 5 | | |
| fig\|1947379.3.peg.2784 | Rhodoferax sp. UBA5149 | | |
| WP_074294985.1 | Paraburkholderia phenazinium | | |
| fig\|1324617.3.peg.820 | Paraburkholderia aspalathi | | |
| fig\|80868.3.peg.3458 | Acidovorax cattleyae | | |
| fig\|1388764.3.peg.1840 | Pseudogulbenkiania ferrooxidans | | |
| | EGD-HP2 | | |
| fig\|251747.15.peg.4695 | Chromobacterium subtsugae | | |
| fig\|670.1020.peg.382 | Vibrio parahaemolyticus | | |
| fig\|1055803.3.peg.1434 | Pseudoalteromonas sp. TB51 | | |
| fig\|1201036.3.peg.177 | Pseudochrobactrum sp. AO18b | | |
| fig\|1220581.4.peg.1434 | Agrobacterium rhizogenes NBRC 13257 | | |
| fig\|398.6.peg.6695 | Rhizobium tropici | | |
| fig\|931866.6.peg.8184 | Bradyrhizobium ottawaense | | |
| fig\|142585.3.peg.1658 | Bradyrhizobium sp. C9 | | |
| fig\|1082933.13.peg.1537 | Mesorhizobium amorphae CCNWGS0123 | | |
| fig\|1768789.3.peg.791 | Methylobacterium sp. CCH7-A2 | | |
| fig\|1381123.3.peg.3819 | Aliihoeflea sp. 2WW | | |
| fig\|1297570.3.peg.1970 | Mesorhizobium sp. STM 4661 | | |
| fig\|935546.3.peg.3816 | Mesorhizobium loti NZP2037 | | |
| fig\|1128253.3.peg.1960 | Bradyrhizobium japonicum CCBAU 15354 | | |
| fig\|1444315.4.peg.3983 | Lysobacter capsici AZ78 | | |
| fig\|1185327.3.peg.1608 | Xanthomonas axonopodis pv. | | |
| | manihotis str. Xam668 | | |
| fig\|1881043.3.peg.2597 | Pseudoxanthomonas sp. GM95 | | |
| ALN84423.1 | Lysobacter capsici | | |
| fig\|56460.15.peg.1977 | Xanthomonas vesicatoria | | |
| fig\|1317116.6.peg.2759 | Oceanicola sp. 22II-s10i | | |
| fig\|564137.3.peg.4320 | Roseicitreum antarcticum | | |
| fig\|1952800.3.peg.3583 | Rhodobacteraceae bacterium UBA2553 | | |
| fig\|218673.12.peg.3041 | Sulfitobacter dubius | | |
| fig\|1912092.3.peg.2119 | Nioella sediminis | | |
| fig\|1736558.3.peg.5006 | Ensifer sp. Root558 | | |
| fig\|91360.5.peg.3717 | Desulforhopalus singaporensis | | |
| fig\|1948756.3.peg.2576 | Spirochaetia bacterium UBA2205 | | |
| fig\|1855322.3.peg.103 | Bradyrhizobium sp. Rc3b | | |
| fig\|1437360.11.peg.2429 | Bradyrhizobium erythrophlei | | |
| fig\|1871052.3.peg.1026 | Afipia sp. | | |
| fig\|1038860.3.peg.8756 | Bradyrhizobium elkanii WSM2783 | | |
| fig\|1898112.54.peg.3758 | Rhodospirillaceae bacterium | | |
| fig\|1660129.3.peg.4854 | Phenylobacterium sp. SCN 70-31 | | |
| fig\|1482074.3.peg.4109 | Hartmannibacter diazotrophicus | | |
| fig\|1970306.3.peg.552 | Acidocella sp. 35-58-6 | | |
| fig\|1686310.5.peg.1409 | Bartonella apis | | |
| fig\|1798192.3.peg.1953 | Thalassospira sp. KO164 | | |
| fig\|1235461.17.peg.11 | Sinorhizobium meliloti GR4 | | |
| fig\|442.12.peg.222 | Gluconobacter oxydans | | |
| fig\|1938607.3.peg.1954 | Sphingomonas sp. LM7 | | |
| fig\|1231624.3.peg.39 | Asaia bogorensis NBRC 16594 | | |
| fig\|1121271.3.peg.4112 | Gemmobacter nectariphilus DSM 15620 | | |
| fig\|33059.16.peg.1690 | Acidithiobacillus caldus | | |
| fig\|502025.10.peg.925 | Haliangium ochraceum DSM 14365 | | |
| fig\|1734406.3.peg.691 | Alphaproteobacteria bacterium | | |
| | BRH_c36 | | |
| fig\|1979207.3.peg.4304 | Parvularcula sp. | | |
| fig\|1953057.3.peg.74 | Parvularculaceae bacterium | | |
| | UBA4496 | | |
| fig\|858423.3.peg.10004 | Bradyrhizobium arachidis | | |
| fig\|1267128.3.peg.2015 | Sphingopyxis granuli | | |
| fig\|582667.3.peg.5553 | Methylobacterium pseudosasicola | | |
| fig\|1187852.3.peg.2712 | Methylobacterium tarhaniae | | |
| fig\|582675.3.peg.1247 | Methylobacterium gossipiicola | | |
| fig\|1951640.3.peg.515 | Deferribacteraceae bacterium | | |
| | UBA6799 | | |
| fig\|1948417.4.peg.1606 | Alphaproteobacteria bacterium | | |
| | UBA6187 | | |
| fig\|45074.5.peg.981 | Legionella santicrucis | | |
| fig\|1434232.4.peg.2927 | Magnetofaba australis IT-1 | | |
| fig\|1945950.3.peg.3568 | Acinetobacter sp. UBA6526 | | |
| fig\|106654.22.peg.994 | Acinetobacter nosocomialis | | |
| fig\|1977883.3.peg.3023 | Acinetobacter sp. ANC 3903 | | |
| fig\|1945948.3.peg.700 | Acinetobacter sp. UBA5984 | | |
| fig\|1226327.3.peg.2796 | Acinetobacter kookii | | |
| fig\|1879049.4.peg.5949 | Acinetobacter sp. WCHAc010034 | | |
| fig\|1945955.3.peg.1951 | Acinetobacter sp. UBA7614 | | |
| fig\|1675530.3.peg.2149 | Acinetobacter genomosp. 33YU | | |
| fig\|1310638.3.peg.1006 | Acinetobacter baumannii 1437282 | | |
| fig\|1400001.4.peg.34 | Necropsobacter massiliensis | | |
| fig\|1132496.5.peg.136 | Pasteurella multocida subsp. | | |
| | multocida str. HN06 | | |
| fig\|1908263.4.peg.2604 | Rodentibacter trehalosifermentans | | |
| fig\|375432.4.peg.200 | Haemophilus influenzae R3021 | | |
| fig\|400668.8.peg.3776 | Marinomonas sp. MWYL1 | | |
| fig\|1913989.193.peg.841 | Gammaproteobacteria bacterium | | |
| fig\|856793.5.peg.1975 | Micavibrio aeruginosavorus ARL-13 | | |
| SBW23286.1 | Citrobacter europaeus | | |
| fig\|1736225.3.peg.985 | Erwinia sp. Leaf53 | | |
| fig\|29486.12.peg.818 | Yersinia ruckeri | | |
| fig\|914128.3.peg.2502 | Serratia symbiotica str. Tucson | | |
| fig\|1796497.3.peg.952 | Grimontia celer | | |
| fig\|1095649.3.peg.3298 | Vibrio cholerae O1 str. EM-1676A | | |
| fig\|137584.4.peg.1627 | Thalassomonas viridans | | |
| fig\|173990.3.peg.1773 | Rheinheimera pacifica | | |
| fig\|1720343.3.peg.3189 | Pseudoalteromonas sp. | | |
| | 1_2015MBL_MicDiv | | |
| fig\|1202962.4.peg.1481 | Moritella marina ATCC 15381 | | |
| fig\|669.50.peg.2993 | Vibrio harveyi | | |
| fig\|691.32.peg.1517 | Vibrio natriegens | | |
| fig\|156578.3.peg.2521 | Alteromonadales bacterium TW-7 | | |
| fig\|661.14.peg.380 | Photobacterium angustum | | |
| fig\|654.94.peg.1733 | Aeromonas veronii | | |
| fig\|703.9.peg.319 | Plesiomonas shigelloides | | |
| fig\|589873.36.peg.1971 | Alteromonas australica | | |
| fig\|28107.3.peg.3571 | Pseudoalteromonas espejiana | | |
| fig\|1547444.3.peg.4264 | Pseudoalteromonas sp. PLSV | | |
| fig\|629266.7.peg.847 | Pseudomonas syringae pv. | | |
| | actinidiae str. M302091 | | |
| fig\|251722.19.peg.4059 | Pseudomonas amygdali pv. aesculi | | |
| fig\|587851.4.peg.1470 | Pseudomonas chlororaphis subsp. | | |
| | aureofaciens | | |
| fig\|1265490.3.peg.2330 | Pseudomonas sp. URMO17WK12:I8 | | |
| fig\|316.101.peg.3534 | Pseudomonas stutzeri | | |
| fig\|1916993.3.peg.4917 | Pseudomonas putida | | |
| fig\|1628833.3.peg.2448 | Pseudomonas sp. ES3-33 | | |
| fig\|1283291.4.peg.1991 | Pseudomonas sp. URMO17WK12:I11 | | |
| fig\|83963.5.peg.3885 | Pseudomonas syringae pv. papulans | | |
| fig\|1206777.3.peg.4334 | Pseudomonas sp. Lz4W | | |
| fig\|113268.3.peg.3785 | Bathymodiolus platifrons | | |
| | methanotrophic gill symbiont | | |
| fig\|1131284.3.peg.1562 | zeta proteobacterium SCGC AB-137-C09 | | |
| fig\|2026807.7.peg.2258 | Zetaproteobacteria bacterium | | |
| fig\|281689.4.peg.2060 | Desulfuromonas acetoxidans DSM 684 | | |
| fig\|1188231.4.peg.1200 | Mariprofundus ferrooxydans M34 | | |
| fig\|1367489.3.peg.682 | Aliivibrio fischeri SA1G | | |
| fig\|1873135.3.peg.4249 | Shewanella sp. SACH | | |
| fig\|663.73.peg.2465 | Vibrio alginolyticus | | |
| fig\|1588629.3.peg.1134 | Aeromonas sp. L 1B5 3 | | |
| fig\|1121922.3.peg.3454 | Glaciecola pallidula DSM 14239 = | | |
| | ACAM 615 | | |
| fig\|351745.9.peg.2506 | Shewanella sp. W3-18-1 | | |
| fig\|29497.20.peg.3798 | Vibrio splendidus | | |
| fig\|1367486.3.peg.187 | Aliivibrio fischeri CB37 | | |
| fig\|511062.4.peg.1890 | Oceanimonas sp. GK1 | | |
| fig\|654.12.peg.188 | Aeromonas veronii | | |
| fig\|29497.21.peg.4482 | Vibrio splendidus | | |
| fig\|1659713.3.peg.560 | Enterobacter bugandensis | | |
| fig\|1124991.3.peg.3617 | Morganella morganii subsp. | | |
| | morganii KT | | |
| fig\|104623.3.peg.1381 | Serratia sp. ATCC 39006 | | |
| fig\|1256989.3.peg.902 | Providencia alcalifaciens R90-1475 | | |
| fig\|1125694.3.peg.1143 | Proteus mirabilis WGLW6 | | |
| fig\|574096.6.peg.2693 | Pantoea allii | | |
| fig\|1095774.3.peg.2623 | Pantoea ananatis PA13 | | |
| fig\|869692.4.peg.2910 | Escherichia coli 3003 | | |
| WP_140159440.1 | Escherichia coli | Retron- | |
| | | Eco2 | |
| | | (Ec67) | |
| fig\|550.437.peg.1444 | Enterobacter cloacae | | |
| fig\|573.13605.peg.2600 | Klebsiella pneumoniae | | |
| fig\|550.285.peg.3783 | Enterobacter cloacae | | |
| fig\|1265672.3.peg.3869 | Salmonella enterica subsp. | | |
| | enterica serovar Agona str. 70.E.05 | | |
| fig\|573.10028.peg.542 | Klebsiella pneumoniae | | |
| fig\|749537.3.peg.218 | Escherichia coli MS 115-1 | | |
| ANK06786.1 | Escherichia coli O25b:H4 | | |
| fig\|670.880.peg.975 | Vibrio parahaemolyticus | | |
| fig\|1192730.4.peg.3 | Salmonella enterica subsp. | | |
| | enterica serovar Kintambo | | |
| fig\|1224144.4.peg.4030 | Dickeya sp. CSL RW240 | | |
| fig\|568766.10.peg.2937 | Dickeya sp. NCPPB 3274 | | |
| fig\|1076549.3.peg.4260 | Pantoea rodasii | | |
| fig\|548.102.peg.3401 | Klebsiella aerogenes | | |
| fig\|630.90.peg.1795 | Yersinia enterocolitica | | |
| fig\|79883.5.peg.266 | Bacillus horikoshii | | |
| fig\|180861.3.peg.3762 | Bacillus thuringiensis serovar | | |
| | sumiyoshiensis | | |
| fig\|1390.157.peg.339 | Bacillus amyloliquefaciens | | |
| fig\|293386.15.peg.304 | Bacillus stratosphericus | | |
| fig\|1053181.3.peg.3820 | Bacillus cereus BAG2X1-3 | | |
| fig\|1884375.3.peg.681 | Paenibacillus sp. PDC88 | | |
| fig\|1334735.5.peg.923 | Sporosarcina koreensis | | |
| fig\|79884.3.peg.1120 | Bacillus pseudalcaliphilus | | |
| fig\|1628206.3.peg.4802 | Bacillus sp. LK2 | | |
| fig\|1396.1605.peg.6235 | Bacillus cereus | | |
| fig\|182710.3.peg.317 | Oceanobacillus iheyensis | | |
| fig\|860.10.peg.486 | Fusobacterium periodonticum | | |
| fig\|1855308.3.peg.1467 | Trichococcus ilyis | | |
| fig\|931626.3.peg.151 | Acetobacterium woodii DSM 1030 | | |
| fig\|1965575.3.peg.2547 | Lachnoclostridium sp. An181 | | |
| fig\|1352.2757.peg.71 | Enterococcus faecium | | |
| fig\|1299895.3.peg.900 | Listeria monocytogenes | | |
| | CFSAN002349 | | |
| fig\|53346.29.peg.1591 | Enterococcus mundtii | | |
| fig\|1649188.10.peg.1545 | Listeria goaensis | | |
| fig\|158847.6.peg.432 | Megamonas hypermegale | | |
| fig\|1121289.3.peg.2775 | Clostridiisalibacter paucivorans | | |
| | DSM 22131 | | |
| fig\|1950885.3.peg.858 | Clostridiales bacterium UBA4693 | | |
| fig\|1965576.3.peg.1978 | Pseudoflavonifractor sp. An184 | | |
| fig\|1952416.3.peg.1629 | Ruminococcaceae bacterium UBA642 | | |
| fig\|1262803.3.peg.8 | Clostridium sp. CAG:413 | | |
| fig\|28037.216.peg.60 | Streptococcus mitis | | |
| fig\|1074052.3.peg.33 | Streptococcus sobrinus TCI-9 | | |
| fig\|1304.207.peg.1536 | Streptococcus salivarius | | |
| fig\|1154859.3.peg.955 | Streptococcus agalactiae LMG 14609 | | |
| fig\|1080071.3.peg.332 | Streptococcus orisasini | | |
| fig\|1139219.3.peg.2194 | Enterococcus dispar ATCC 51266 | | |
| fig\|1834176.3.peg.811 | Enterococcus sp. 3G1_DIV0629 | | |
| fig\|1622.15.peg.947 | Lactobacillus murinus | | |
| fig\|565651.6.peg.1942 | Enterococcus faecalis ARO1/DG | | |
| fig\|1473546.3.peg.703 | Lysinibacillus sp. BF-4 | | |
| fig\|37734.13.peg.137 | Enterococcus casseliflavus | | |
| fig\|492670.92.peg.623 | Bacillus velezensis | | |
| fig\|1639.1907.peg.2641 | Listeria monocytogenes | | |
| fig\|1123489.3.peg.170 | Veillonella magna DSM 19857 | | |
| fig\|1280687.3.peg.1880 | Butyrivibrio fibrisolvens YRB2005 | | |
| fig\|1262889.3.peg.680 | Eubacterium sp. CAG:38 | | |
| fig\|1235800.3.peg.2226 | Lachnospiraceae bacterium 10-1 | | |
| fig\|1897035.3.peg.445 | Firmicutes bacterium | | |
| | GAG:552 39 19 | | |
| fig\|199.588.peg.774 | Campylobacter concisus | | |
| fig\|1111133.4.peg.219 | Peptoniphilus sp. BV3AC2 | | |
| fig\|936589.3.peg.875 | Veillonella sp. AS16 | | |
| WP_070600378.1 | | | |
| fig\|1896998.3.peg.1750 | Coprococcus sp. CAG:131- | | |
| | related_45_246 | | |
| fig\|41170.3.peg.3013 | Exiguobacterium acetylicum | | |
| fig\|159620.44.peg.897 | uncultured Clostridium sp. | | |
| fig\|1262843.3.peg.313 | Clostridium sp. CAG:813 | | |
| fig\|1262834.3.peg.1287 | Clostridium sp. CAG:715 | | |
| fig\|1256219.3.peg.760 | Lactobacillus paracasei subsp. | | |
| | paracasei Lpp230 | | |
| fig\|115778.31.peg.1994 | Leuconostoc gelidum subsp. | | |
| | gasicomitatum | | |
| fig\|29385.174.peg.531 | Staphylococcus saprophyticus | | |
| fig\|1295.21.peg.75 | Staphylococcus schleiferi | | |
| fig\|148814.13.peg.1360 | Lactobacillus kunkeei | | |
| fig\|1282.1242.peg.673 | Staphylococcus epidermidis | | |
| fig\|1581078.3.peg.1186 | Staphylococcus sp. HMSC10C03 | | |
| fig\|1891097.3.peg.280 | Macrococcus goetzii | | |
| WP_080703103.1 | | | |
| fig\|1214184.3.peg.1129 | Streptococcus suis 22083 | | |
| fig\|1154771.3.peg.209 | Streptococcus agalactiae FSL C1-487 | | |
| fig\|1415765.3.peg.1578 | Streptococcus mitis 21/39 | | |
| fig\|1581074.3.peg.720 | Granulicatella sp. HMSC31F03 | | |
| fig\|1349.233.peg.712 | Streptococcus uberis | | |
| fig\|1946281.3.peg.392 | Catabacter sp. UBA5893 | | |
| fig\|1328309.5.peg.1889 | Lactobacillus plantarum IPLA88 | | |
| fig\|1214190.3.peg.2034 | Streptococcus suis YS17 | | |
| fig\|29385.135.peg.2098 | Staphylococcus saprophyticus | | |
| fig\|1715184.3.peg.1265 | Aerococcus sp. HMSC035BO7 | | |
| fig\|1881068.3.peg.2940 | Sphingomonas sp. OV641 | | |
| fig\|1522072.3.peg.3829 | Sphingobium sp. bal | | |
| fig\|1802172.3.peg.237 | Sphingopyxis sp. | | |
| | RIFCSPHIGHO2_12_FULL_65_19 | | |
| fig\|1128204.3.peg.2189 | Bradyrhizobium elkanii CCBAU 43297 | | |
| fig\|1708715.5.peg.4517 | Ensifer aridi | | |
| fig\|195105.3.peg.2062 | Haematobacter massiliensis | | |
| fig\|1283312.3.peg.4182 | Sphingomonas wittichii DC-6 | | |
| fig\|1120654.4.peg.406 | Ensifer sp. LC499 | | |
| fig\|529.36.peg.3144 | Ochrobactrum anthropi | | |
| fig\|1194716.3.peg.4774 | Sinorhizobium meliloti AK75 | | |
| fig\|1660088.4.peg.2967 | Agrobacterium sp. SCN 61-19 | | |
| fig\|1951259.3.peg.2515 | Sphingomonadales bacterium | | |
| | UBA6174 | | |
| fig\|1912891.5.peg.2102 | Sphingobium sp. | | |
| fig\|1670800.3.peg.1844 | Mesorhizobium oceanicum | | |
| fig\|12032658.3.peg.157 | Alphaproteobacteria bacterium | | |
| | WMHbin7 | | |
| fig\|1819565.5.peg.2208 | Flavimaricola marinus | | |
| fig\|1245469.3.peg.1160 | Bradyrhizobium oligotrophicum S58 | | |
| fig\|1615890.4.peg.173 | Bradyrhizobium sp. LTSP849 | | |
| fig\|56454.3.peg.3464 | Xanthomonas hortorum | | |
| fig\|40324.384.peg.1060 | Stenotrophomonas maltophilia | | |
| fig\|1801972.3.peg.1832 | Planctomycetes bacterium | | |
| | RBG_19FT_COMBO_48_8 | | |
| fig\|1978765.3.peg.3488 | Nitrospira sp. ST-bin5 | | |
| fig\|2009322.3.peg.2770 | Leptolyngbya ohadii IS1 | | |
| fig\|1325564.3.peg.3733 | Nitrospira japonica | | |
| fig\|43662.9.peg.1688 | Pseudoalteromonas piscicida | | |
| fig\|670.134.peg.4439 | Vibrio parahaemolyticus | | |
| fig\|998520.3.peg.3325 | Pseudoalteromonas agarivorans | | |
| fig\|1723759.3.peg.401 | Pseudoalteromonas sp. P1-26 | | |
| fig\|672.133.peg.585 | Vibrio vulnificus | | |
| fig\|1324960.19.peg.585 | Aeromonas salmonicida subsp. | | |
| | pectinolytica 34mel | | |
| fig\|196024.16.peg.3965 | Aeromonas dhakensis | | |
| fig\|654.27.peg.4266 | Aeromonas veronii | | |
| fig\|1802253.3.peg.1045 | Sulfurimonas sp. | | |
| | RIFCSPLOWO2_12_36_12 | | |
| fig\|636.16.peg.3905 | Edwardsiella tarda | | |
| fig\|1124958.3.peg.5012 | Salmonella enterica subsp. | | |
| | enterica serovar Muenster str. 0315 | | |
| fig\|573.10007.peg.225 | Klebsiella pneumoniae | | |
| fig\|1946737.3.peg.4002 | Leclercia sp. UBA1284 | | |
| fig\|1398203.3.peg.3712 | Xenorhabdus bovienii str. | | |
| | kraussei Quebec | | |
| fig\|615.247.peg.2151 | Serratia marcescens | | |
| fig\|52441.3.peg.3752 | Nitrosomonas aestuarii | | |
| fig\|1951948.3.peg.242 | Hyphomonadaceae bacterium UBA2389 | | |
| fig\|165186.29.peg.27 | uncultured Ruminococcus sp. | | |
| fig\|2013842.3.peg.1881 | Synergistetes bacterium | | |
| | HGW-Synergistetes-1 | | |
| fig\|411484.7.peg.436 | Clostridium sp. SS2/1 | | |
| fig\|460384.4.peg.447 | Enterocloster lavalensis | | |
| fig\|1761781.3.peg.2961 | Clostridium sp. DSM 8431 | | |
| fig\|1451.25.peg.614 | Paenibacillus amylolyticus | | |
| fig\|1776378.3.peg.2009 | Paenibacillus phocaensis | | |
| fig\|1866315.3.peg.2122 | Bacillus sp. N35-10-4 | | |
| fig\|1034836.4.peg.4077 | Bacillus amyloliquefaciens XH7 | | |
| fig\|1397.14.peg.5097 | Bacillus circulans | | |
| fig\|1497681.5.peg.772 | Listeria newyorkensis | | |
| fig\|1053224.3.peg.4333 | Bacillus cereus VD021 | | |
| fig\|1374.4.peg.2798 | Pianococcus kocurii | | |
| fig\|458233.11.peg.419 | Macrococcus caseolyticus JCSC5402 | | |
| fig\|417368.6.peg.944 | Enterococcus thailandicus | | |
| fig\|1353.16.peg.736 | Enterococcus gallinarum | | |
| fig\|1639.1307.peg.2578 | Listeria monocytogenes | | |
| fig\|1649188.4.peg.450 | Listeria goaensis | | |
| fig\|333990.5.peg.1279 | Carnobacterium sp. AT7 | | |
| fig\|1121085.3.peg.4805 | Bacillus aidingensis DSM 18341 | | |
| fig\|659243.6.peg.1163 | Bacillus siamensis | | |
| fig\|1965645.3.peg.1428 | Alistipes sp. An54 | | |
| fig\|1950664.3.peg.363 | Bacteroidales bacterium UBA5918 | | |
| fig\|681398.3.peg.1596 | Paludibacter jiangxiensis | | |
| fig\|1947481.3.peg.1596 | Sphingobacterium sp. UBA1498 | | |
| fig\|1946424.3.peg.2345 | Dysgonomonas sp. UBA4861 | | |
| fig\|188932.3.peg.968 | Pedobacter cryoconitis | | |
| fig\|1505249.7.peg.1802 | Arcobacter marinus | | |
| fig\|1802259.3.peg.374 | Sulfurimonas sp. | | |
| | RIFOXYD12_FULL_33_39 | | |
| fig\|1872629.13.peg.663 | Arcobacter sp. | | |
| fig\|497650.4.peg.949 | Sulfurovum sp. enrichment culture | | |
| | clone C5 | | |
| fig\|1981711.3.peg.707 | Pseudomonas sp. B8(2017) | | |
| fig\|287.926.peg.3808 | Pseudomonas aeruginosa | | |
| fig\|157782.3.peg.183 | Pseudomonas parafulva | | |
| fig\|1225174.5.peg.576 | Pseudomonas mendocina S5.2 | | |
| fig\|237610.8.peg.4301 | Pseudomonas psychrotolerans | | |
| fig\|1116369.3.peg.182 | Hoeflea sp. 108 | | |
| WP_080858354.1 | | | |
| fig\|1679460.3.peg.2715 | Marinibacterium profundimaris | | |
| fig\|1811547.3.peg.510 | Maritimibacter sp. REDSEA-S28_B5 | | |
| fig\|93684.8.peg.518 | Roseivivax halotolerans | | |
| EMZ69714.1 | Escherichia coli 174900 | | |
| fig\|103796.87.peg.3165 | Pseudomonas syringae pv. actinidiae | | |
| WP_078828851.1 | Pantoea ananatis | | |
| fig\|2018067.3.peg.1734 | Pseudomonas sp. FDAARGOS_380 | | |
| fig\|294.255.peg.5151 | Pseudomonas fluorescens | | |
| fig\|287.4271.peg.5445 | Pseudomonas aeruginosa | | |
| fig\|46677.3.peg.3237 | Pseudomonas agarici | | |
| fig\|83964.10.peg.849 | Pseudomonas coronafaciens pv. porri | | |
| fig\|1932113.4.peg.2793 | Pseudomonas sp. PA1(2017) | | |
| fig\|1712677.3.peg.189 | Pseudomonas sp. 2822-15 | | |
| fig\|1479235.3.peg.2741 | Halomonas sp. HL-48 | | |
| fig\|227946.12.peg.3247 | Xanthomonas translucens pv. poae | | |
| fig\|40324.220.peg.2801 | Stenotrophomonas maltophilia | | |
| fig\|227946.13.peg.35 | Xanthomonas translucens pv. poae | | |
| fig\|487909.15.peg.4212 | Xanthomonas translucens pv. | | |
| | undulosa | | |
| fig\|40324.145.peg.2120 | Stenotrophomonas maltophilia | | |
| fig\|1182783.3.peg.8 | Xanthomonas campestris JX | | |
| fig\|1736581.3.peg.4144 | Lysobacter sp. Root667 | | |
| fig\|470.4256.peg.2128 | Acinetobacter baumannii | | |
| fig\|1804984.3.peg.4735 | Burkholderia sp. OLGA172 | | |
| fig\|1882792.3.peg.5959 | Burkholderia sp. CF145 | | |
| fig\|1458357.5.peg.7849 | Caballeronia jiangsuensis | | |
| fig\|674703.3.peg.3992 | Rhodoplanes sp. Z2-YC6860 | | |
| fig\|1230476.3.peg.595 | Bradyrhizobium sp. DFCI-1 | | |
| fig\|1752222.3.peg.1730 | Rhizobiales bacterium Ga0077525 | | |
| fig\|1948848.3.peg.320 | Patescibacteria group bacterium | | |
| | UBA6220 | | |
| fig\|1860092.3.peg.3966 | Alphaproteobacteria bacterium | | |
| | MedPE-SWcel | | |
| fig\|398.7.peg.3301 | Rhizobium tropici | | |
| fig\|418630.3.peg.960 | Rhodobacter megalophilus | | |
| fig\|56.40.peg.5712 | Sorangium cellulosum | | |
| fig\|1660160.3.peg.2510 | Acidobacteria bacterium SCN 69-37 | | |
| fig\|1661042.3.peg.2224 | Pseudomonas sp. NBRC 111127 | | |
| fig\|1712678.3.peg.4198 | Pseudomonas sp. 2822-17 | | |
| fig\|1736561.3.peg.128 | Pseudomonas sp. Root562 | | |
| fig\|76760.8.peg.1730 | Pseudomonas rhodesiae | | |
| fig\|1295133.4.peg.7170 | Pseudomonas putida JCM 18798 | | |
| fig\|1718917.3.peg.3132 | Pseudomonas sp. ICMP 460 | | |
| fig\|237306.3.peg.591 | Pseudomonas syringae pv. persicae | | |
| fig\|1079060.3.peg.1479 | Pseudomonas savastanoi pv. | | |
| | phaseolicola 1644R | | |
| fig\|1981714.3.peg.1068 | Pseudomonas sp. B5(2017) | | |
| fig\|1419583.3.peg.4516 | Pseudomonas mandelii PD30 | | |
| fig\|1718918.3.peg.4166 | Pseudomonas sp. ICMP 561 | | |
| fig\|64988.7.peg.76 | Alcanivorax jadensis | | |
| fig\|1961564.3.peg.685 | Desulfovibrionaceae bacterium | | |
| | UBA5546 | | |
| fig\|2004648.3.peg.1747 | Acinetobacter sp. WCHA39 | | |
| fig\|1080187.3.peg.399 | Cupriavidus sp. UYPR2.512 | | |
| fig\|76114.8.peg.258 | Aromatoleum aromaticum EbN1 | | |
| fig\|196367.9.peg.6286 | Caballeronia sordidicola | | |
| fig\|1217418.3.peg.694 | Cupriavidus sp. HPC(L) | | |
| fig\|1752216.3.peg.4007 | Nitrosomonadales bacterium | | |
| | Ga0074132 | | |
| fig\|1249621.3.peg.3614 | Cupriavidus sp. HMR-1 | | |
| fig\|179879.8.peg.6514 | Burkholderia anthina | | |
| fig\|1246301.3.peg.4482 | Variovorax paradoxus B4 | | |
| WP_092746164.1 | Acidovorax valerianellae | | |
| fig\|536.30.peg.857 | Chromobacterium violaceum | | |
| fig\|1961112.3.peg.115 | Planctomycetes bacterium UTPLA1 | | |
| fig\|44574.5.peg.4575 | Nitrosomonas communis | | |
| fig\|265901.4.peg.190 | Photobacterium sp. J15 | | |
| fig\|80852.21.peg.1289 | Aliivibrio wodanis | | |
| fig\|1136159.3.peg.2534 | Vibrio cyclitrophicus 1F111 | | |
| fig\|24.6.peg.4539 | Shewanella putrefaciens | | |
| fig\|888433.3.peg.1974 | Pseudoalteromonas sp. GutCa3 | | |
| fig\|196024.6.peg.3651 | Aeromonas dhakensis | | |
| fig\|1352943.3.peg.5028 | Vibrio harveyi E385 | | |
| WP_088124663.1 | Vibrio cholerae | | |
| fig\|29497.15.peg.1220 | Vibrio splendidus | | |
| fig\|670.413.peg.1227 | Vibrio parahaemolyticus | | |
| fig\|584.91.peg.3337 | Proteus mirabilis | | |
| fig\|263819.5.peg.201 | Yersinia aleksiciae | | |
| fig\|1656094.3.peg.1449 | Alteromonas confluentis | | |
| fig\|634.5.peg.607 | Yersinia bercovieri | | |
| fig\|630.85.peg.4080 | Yersinia enterocolitica | | |
| fig\|1212491.3.peg.1847 | Legionella fallonii LLAP-10 | | |
| fig\|1498499.3.peg.2812 | Legionella norrlandica | | |
| fig\|1844092.4.peg.3143 | Pseudomonas sp. 8 R 14 | | |
| fig\|1441629.3.peg.2119 | Pseudomonas cichorii JBC1 | | |
| WP_092369835.1 | Pseudomonas seleniipraecipitans | | |
| fig\|477228.3.peg.2040 | Pseudomonas stutzeri TS44 | | |
| fig\|317.249.peg.4299 | Pseudomonas syringae | | |
| fig\|1597.16.peg.2055 | Lactobacillus paracasei | | |
| fig\|1184720.6.peg.2708 | Rhizobium anhuiense | | |
| fig\|1566263.3.peg.185 | Rhizobium sp. NFR03 | | |
| fig\|1951216.3.peg.1622 | Rhizobiales bacterium UBA1909 | | |
| fig\|1219052.3.peg.3572 | Sphingomonas pruni NBRC 15498 | | |
| fig\|376620.8.peg.l22 | Gluconobacter japonicus | | |
| fig\|1736587.3.peg.2638 | Devosia sp. Root685 | | |
| WP_011269850.1 | Xanthomonas campestris | | |
| fig\|1195246.3.peg.467 | Alishewanella agri BL06 | | |
| fig\|1931276.3.peg.1294 | Haliangium sp. UPWRP 2 | | |
| fig\|1931204.4.peg.12 | Confluentimicrobium sp. | | |
| fig12052957.3.peg.3497 | Pseudorhodobacter sp. MZDSW-24AT | | |
| fig\|1952825.3.peg.2772 | Rhodobiaceae bacterium UBA4205 | | |
| fig\|1189622.3.peg.1716 | Pseudomonas amygdali pv. tabaci | | |
| | str. 6605 | | |
| fig\|294.173.peg.2741 | Pseudomonas fluorescens | | |
| fig\|294.122.peg.3307 | Pseudomonas fluorescens | | |
| fig\|1198456.3.peg.4053 | Pseudomonas guguanensis | | |
| fig\|1855380.3.peg.1951 | Pseudomonas sp. Z003-0.4C(8344-21) | | |
| fig\|1144330.3.peg.3879 | Pseudomonas sp. GM48 | | |
| fig\|86265.3.peg.2799 | Pseudomonas thivervalensis | | |
| fig\|1881035.3.peg.3817 | Mitsuaria sp. PDC51 | | |
| fig\|511.8.peg.774 | Alcaligenes faecalis | | |
| fig\|1095552.3.peg.2955 | Methylobacter luteus IMV-B-3098 | | |
| fig\|1690268.3.peg.1172 | Acidovorax sp. SD340 | | |
| fig\|871652.3.peg.1451 | Poseidonocella sedimentorum | | |
| fig\|1946868.3.peg.175 | Methylophaga sp. UBA1490 | | |
| fig\|1924940.3.peg.1147 | Mameliella sp. | | |
| fig\|1912891.7.peg.5370 | Sphingobium sp. | | |
| fig\|1236503.3.peg.1539 | Acetobacter persici JCM 25330 | | |
| fig\|1745182.3.peg.1942 | Paracoccus sp. MKU1 | | |
| fig\|1112.5.peg.2875 | Porphyrobacter neustonensis | | |
| WP_051585410.1 | Sphingomonas paucimobilis | | |
| fig\|1082931.4.peg.3584 | Pelagibacterium halotolerans B2 | | |
| fig\|1907665.3.peg.5475 | Agrobacterium sp. DSM 25558 | | |
| fig\|1841652.4.peg.3782 | Agrobacterium sp. 13-626 | | |
| fig\|1736312.3.peg.3441 | Rhizobium sp. Leaf262 | | |
| fig\|1768770.3.peg.4687 | Caulobacter sp. CCH5-E12 | | |
| fig\|355591.9.peg.1867 | Marinobacter vinifirmus | | |
| fig\|1869214.4.peg.1848 | Rheinheimera sp. | | |
| fig\|1946470.3.peg.3546 | Erythrobacter sp. UBA2510 | | |
| fig\|1860090.3.peg.231 | Roseobacter sp. MedPE-SWde | | |
| fig\|12020902.8.peg.1814 | Ponticaulis sp. | | |
| fig\|940286.3.peg.3612 | Komagataeibacter oboediens 174Bp2 | | |
| fig\|1736380.3.peg.1842 | Rhizobium sp. Leaf453 | | |
| fig\|665126.3.peg.2283 | Prosthecomicrobium hirschii | | |
| fig\|2029410.3.peg.1956 | Mesorhizobium sp. WSM4311 | | |
| WP_003169203.1 | Brevundimonas diminuta | | |
| fig\|1884373.3.peg.3317 | Mesorhizobium sp. YR577 | | |
| fig\|989436.3.peg.3203 | Pseudovibrio sp. Ad5 | | |
| fig\|1736359.3.peg.3976 | Rhizobium sp. Leaf386 | | |
| fig\|104102.12.peg.3797 | Acetobacter tropicalis | | |
| fig\|1500305.3.peg.4736 | Rhizobium sp. OK665 | | |
| fig\|1842535.30.peg.6 | Blastomonas sp. RAC04 | | |
| fig\|70775.16.peg.91 | Pseudomonas plecoglossicida | | |
| fig\|287.4262.peg.2063 | Pseudomonas aeruginosa | | |
| WP_017702484.1 | Pseudomonas syringae | | |
| fig\|1357292.3.peg.4700 | Pseudomonas syringae pv. pisi str. PP1 | | |
| fig\|287.2436.peg.3554 | Pseudomonas aeruginosa | | |
| fig\|76758.3.peg.4722 | Pseudomonas orientalis | | |
| fig\|1904755.3.peg.3469 | Pseudomonas sp. 43NM1 | | |
| fig\|47879.37.peg.693 | Pseudomonas corrugata | | |
| fig\|1771311.3.peg.1935 | Pseudomonas sp. ATCC PTA-122608 | | |
| fig\|2008975.3.peg.1976 | Pseudomonas sp. Irchel 3E13 | | |
| fig\|1259798.3.peg.1121 | Pseudomonas sp. LAMO17WK12:I2 | | |
| fig\|1736487.3.peg.2103 | Noviherbaspirillum sp. Root189 | | |
| fig\|1706231.5.peg.1557 | Janthinobacterium sp. CG23_2 | | |
| fig\|1804984.3.peg.4700 | Burkholderia sp. OLGA172 | | |
| fig\|54067.3.peg.2925 | Xylophilus ampelinus | | |
| fig\|40324.357.peg.1426 | Stenotrophomonas maltophilia | | |
| fig\|1967657.4.peg.913 | Salmonella enterica subsp. | | |
| | enterica serovar Telelkebir | | |
| fig\|573.14330.peg.816 | Klebsiella pneumoniae | | |
| fig\|615.357.peg.16 | Serratia marcescens | | |
| fig\|1122616.3.peg.231 | Oceanospirillum beijerinckii DSM 7166 | | |
| fig\|314276.4.peg.1389 | Idiomarina baltica OS145 | | |
| fig\|1038921.4.peg.2790 | Pseudomonas chlororaphis subsp. | | |
| | aureofaciens 30-84 | | |
| fig\|292.72.peg.3280 | Burkholderia cepacia | | |
| fig\|1899355.18.peg.947 | Oceanospirillaceae bacterium | | |
| fig\|2015356.3.peg.5401 | Burkholderia sp. AU33647 | | |
| fig\|206665.3.peg.1731 | Desulfonauticus submarinus | | |
| fig\|1987165.3.peg.2564 | Sphingobium sp. GW456-12-10-14-TSB1 | | |
| fig\|1283312.3.peg.2182 | Sphingomonas wittichii DC-6 | | |
| fig\|1223566.3.peg.1810 | Bradyrhizobium sp. CCGE-LA001 | | |
| fig\|76761.16.peg.744 | Pseudomonas veronii | | |
| PIY00499.1 | Hydrogenophilales bacterium | | |
| | CG_4_10_14_3_um_filter_58_23 | | |
| fig\|305.94.peg.4778 | Ralstonia solanacearum | | |
| fig\|1758178.5.peg.2546 | Celeribacter ethanolicus | | |
| fig\|1354263.4.peg.2524 | Hafnia paralvei ATCC 29927 | | |
| fig\|1125979.3.peg.1941 | Rhizobium sp. PDO1-076 | | |
| fig\|1338032.3.peg.3393 | Vibrio parahaemolyticus O1:K33 | | |
| | str. CDC_K4557 | | |
| fig\|1898112.54.peg.3344 | Rhodospirillaceae bacterium | | |
| fig\|1432558.3.peg.4265 | Klebsiella pneumoniae ISC21 | | |
| fig\|333962.3.peg.2767 | Providencia heimbachae | | |
| fig\|60552.10.peg.2414 | Burkholderia vietnamiensis | | |
| WP_011808964.1 | Verminephrobacter eiseniae | | |
| fig\|1844107.4.peg.2966 | Pseudomonas sp. 58 R 12 | | |
| fig\|1952916.3.peg.906 | Synergistaceae bacterium UBA5549 | | |
| fig\|1458817.8.peg.542 | Shewanella halifaxensis HAW-EB4 | | |
| fig\|1674859.3.peg.1291 | Spirochaetales bacterium Spiro_03 | | |
| fig\|1121434.3.peg.22 | Halodesulfovibrio aestuarii DSM 10141 | | |
| fig\|1262899.3.peg.286 | Fusobacterium sp. CAG:439 | | |
| fig\|57320.3.peg.1084 | Pseudodesulfovibrio profundus | | |
| fig\|1736444.3.peg.3753 | Acinetobacter sp. Root1280 | | |
| fig\|1310670.3.peg.2122 | Acinetobacter sp. 907131 | | |
| fig\|505345.6.peg.150 | Gallibacterium genomosp. 3 | | |
| fig\|670.887.peg.4391 | Vibrio parahaemolyticus | | |
| fig\|196024.16.peg.2750 | Aeromonas dhakensis | | |
| fig\|663.48.peg.1321 | Vibrio alginolyticus | | |
| fig\|28141.133.peg.4717 | Cronobacter sakazakii | | |
| fig\|1117315.3.peg.3 | Pseudoalteromonas haloplanktis | | |
| | ATCC 14393 | | |
| fig\|1917164.4.peg.2739 | Shewanella sp. UCD-KL21 | | |
| fig\|2006083.3.peg.3222 | Photobacterium sp. CECT 9192 | | |
| fig\|584.227.peg.2146 | Proteus mirabilis | | |
| fig\|1792834.4.peg.1793 | Marinicella sediminis | | |
| fig\|1333513.3.peg.3775 | Pseudoalteromonas haloplanktis TAE56 | | |
| fig\|1305826.3.peg.1246 | Streptomyces sp. Ame12xC10 | | |
| WP_048809063.1 | Microbacterium ginsengisoli | | |
| fig\|1987376.3.peg.4246 | Pseudonocardia sp. N23 | | |
| fig\|164115.3.peg.6832 | Streptomyces niveiscabiei | | |
| fig\|285676.33.peg.4994 | Micromonospora saelicesensis | | |
| SFF52649.1 | Streptomyces alni | | |
| fig\|1100822.3.peg.6408 | Streptomyces sp. AmelKG-E11A | | |
| WP_098467790.1 | | | |
| fig\|1190417.3.peg.2916 | Geodermatophilus telluris | | |
| SDS16714.1 | Agrococcus carbonis | | |
| fig\|692370.5.peg.1108 | Altererythrobacter dongtanensis | | |
| fig\|1736370.3.peg.1383 | Sphingomonas sp. Leaf412 | | |
| fig\|1759074.3.peg.2615 | Sphingopyxis sp. HIX | | |
| fig\|1120928.3.peg.922 | Acinetobacter tjernbergiae DSM 14971 = | | |
| | CIP 107465 | | |
| fig\|470.4268.peg.2032 | Acinetobacter baumannii | | |
| fig\|1217627.3.peg.995 | Acinetobacter baumannii NIPH 67 | | |
| fig\|28450.149.peg.5786 | Burkholderia pseudomallei | | |
| fig\|2032650.3.peg.3543 | Magnetococcales bacterium HCHbin5 | | |
| fig\|101571.169.peg.3909 | Burkholderia ubonensis | | |
| fig\|396597.7.peg.2128 | Burkholderia ambifaria MEX-5 | | |
| fig\|869212.3.peg.3514 | Turneriella parva DSM 21527 | | |
| fig\|1196083.80.peg.1885 | Snodgrassella alvi | | |
| fig\|1304886.3.peg.1257 | Desulfotignum balticum DSM 7044 | | |
| fig\|555.16.peg.1362 | Pectobacterium carotovorum subsp. | | |
| | carotovorum | | |
| fig\|1421338.3.peg.151 | Enterobacter asburiae L1 | | |
| fig\|443144.3.peg.785 | Geobacter sp. M21 | | |
| fig\|1265503.3.peg.1271 | Colwellia piezophila ATCC BAA-637 | | |
| fig\|55601.100.peg.1601 | Vibrio anguillarum | | |
| fig\|299766.9.peg.4890 | Enterobacter hormaechei subsp. | | |
| | steigerwaltii | | |
| fig\|243231.5.peg.1360 | Geobacter sulfurreducens PGA | | |
| fig\|1263083.3.peg.558 | Klebsiella variicola CAG:634 | | |
| fig\|57706.9.peg.1106 | Citrobacter braakii | | |
| fig\|1619244.3.peg.1323 | Enterobacter bugandensis | | |
| SHO56340.1 | Vibrio quintilis | | |
| fig\|688.15.peg.906 | Aliivibrio logei | | |
| fig\|663.75.peg.4800 | Vibrio alginolyticus | | |
| fig\|1967612.3.peg.4508 | Salmonella enterica subsp. | | |
| | houtenae serovar 50:z4, z23:- | | |
| fig\|82985.3.peg.3508 | Pragia fontium | | |
| fig\|55207.5.peg.1840 | Pectobacterium betavasculorum | | |
| fig\|582.25.peg.388 | Morganella morganii | | |
| fig\|1006598.5.peg.80 | Serratia plymuthica RVH1 | | |
| fig\|82977.3.peg.3268 | Buttiauxella agrestis | | |
| CRY53703.1 | Yersinia intermedia | | |
| fig\|595494.3.peg.706 | Tolumonas auensis DSM 9187 | | |
| fig\|1217694.3.peg.3300 | Acinetobacter sp. CIP 64.2 | | |
| fig\|470.2679.peg.715 | Acinetobacter baumannii | | |
| fig\|1879050.4.peg.2797 | Acinetobacter wuhouensis | | |
| fig\|2004650.3.peg.1818 | Acinetobacter chinensis | | |
| fig\|648.80.peg.1405 | Aeromonas caviae | | |
| fig\|1217722.3.peg.1866 | Pseudomonas sp. S13.1.2 | | |
| fig\|294.88.peg.4234 | Pseudomonas fluorescens | | |
| fig\|629262.5.peg.1917 | Pseudomonas syringae pv. japonica | | |
| | str. M301072 | | |
| WP_053932309.1 | Pseudomonas coronafaciens | | |
| fig\|1844101.3.peg.4702 | Pseudomonas sp. 31 R 17 | | |
| fig\|380021.13.peg.6149 | Pseudomonas protegens | | |
| fig\|287.3716.peg.2163 | Pseudomonas aeruginosa | | |
| fig\|287.3208.peg.1464 | Pseudomonas aeruginosa | | |
| fig\|1952221.3.peg.555 | Methylococcaceae bacterium UBA2780 | | |
| fig\|1869214.3.peg.3542 | Rheinheimera sp. | | |
| fig\|375286.7.peg.830 | Janthinobacterium sp. Marseille | | |
| fig\|536.26.peg.4616 | Chromobacterium violaceum | | |
| fig\|983548.3.peg.2977 | Dokdonia sp. 4H-3-7-5 | | |
| fig\|1307480.5.peg.1780 | Chryseobacterium vrystaatense | | |
| fig\|1262921.3.peg.2213 | Prevotella sp. CAG:1185 | | |
| fig\|1965649.3.peg.4193 | Butyricimonas sp. An62 | | |
| fig\|1951558.3.peg.3731 | Chitinophagaceae bacterium UBA4411 | | |
| fig\|1950669.3.peg.2035 | Bacteroidales bacterium UBA6192 | | |
| fig\|1869230.3.peg.3025 | Chryseobacterium sp. CBo1 | | |
| fig\|1500294.3.peg.2814 | Chryseobacterium sp. YR485 | | |
| fig\|1756149.11.peg.2545 | Elizabethkingia bruuniana | | |
| fig\|1137281.3.peg.1436 | Xanthomarina gelatinilytica | | |
| fig\|1964365.5.peg.2525 | Sneathiella sp. | | |
| fig\|28450.428.peg.5049 | Burkholderia pseudomallei | | |
| fig\|1628751.3.peg.813 | Nostoc linckia z16 | | |
| fig\|60137.10.peg.1138 | Sulfitobacter pontiacus | | |
| fig\|1580596.3.peg.2701 | Phaeobacter piscinae | | |
| fig\|1041141.4.peg.4741 | Rhizobium leguminosarum bv. | | |
| | viciae 128C53 | | |
| WP_063290764.1 | unclassified Pseudovibrio | | |
| fig\|1816219.4.peg.1873 | Colwellia sp. PAMC 21821 | | |
| fig\|651.3.peg.13 | Aeromonas media | | |
| fig\|134375.17.peg.3222 | Achromobacter sp. | | |
| WP_011296194.1 | Cupriavidus pinatubonensis | | |
| fig\|1513890.4.peg.2322 | Pseudomonas chlororaphis subsp. piscium | | |
| fig\|294.193.peg.980 | Pseudomonas fluorescens | | |
| fig\|287.2516.peg.114 | Pseudomonas aeruginosa | | |
| fig\|2006083.3.peg.3219 | Photobacterium sp. CECT 9192 | | |
| fig\|1458817.8.peg.538 | Shewanella halifaxensis HAW-EB4 | | |
| fig\|1073383.3.peg.1289 | Aeromonas veronii AMC34 | | |
| fig\|190893.14.peg.2110 | Vibrio coralliilyticus | | |
| fig\|663.144.peg.2659 | Vibrio alginolyticus | | |
| fig\|55601.106.peg.926 | Vibrio anguillarum | | |
| fig\|669.51.peg.5531 | Vibrio harveyi | | |
| fig\|1250059.5.peg.3511 | Tenacibaculum sp. MAR_2009_124 | | |
| fig\|906888.6.peg.2449 | Nonlabens ulvanivorans | | |
| WP_042276051.1 | Nonlabens sediminis | | |
| fig\|1953167.3.peg.1254 | Bacteroidetes bacterium UBA6221 | | |
| fig\|991.14.peg.629 | Flavobacterium hydatis | | |
| fig\|1121890.3.peg.5 | Flavobacterium frigidarium DSM 17623 | | |
| fig\|387094.4.peg.1115 | Flavobacterium hercynium | | |
| fig\|1946558.3.peg.2413 | Flavobacterium sp. UBA7665 | | |
| fig\|253.27.peg.2882 | Chryseobacterium indologenes | | |
| fig\|1685010.5.peg.4376 | Chryseobacterium glaciei | | |
| fig\|1500289.3.peg.4103 | Chryseobacterium sp. OV705 | | |
| fig\|1500298.3.peg.2823 | Chryseobacterium sp. YR561 | | |
| fig\|1797331.3.peg.2180 | Bacteroidetes bacterium GWE2_29_8 | | |
| fig\|1947498.3.peg.1366 | Sphingobacterium sp. UBA4616 | | |
| WP_074239321.1 | Chitinophaga niabensis | | |
| fig\|192149.7.peg.174 | Muricauda sp. | | |
| fig\|718222.3.peg.4924 | Bacillus cereus TIAC219 | | |
| fig\|1053210.3.peg.211 | Bacillus cereus HuB4-10 | | |
| fig\|2026089.3.peg.6077 | Paenibacillus sp. XY044 | | |
| fig\|1938610.3.peg.3678 | Flavobacterium sp. LM5 | | |
| fig\|1947482.3.peg.632 | Sphingobacterium sp. UBA1575 | | |
| fig\|1948844.3.peg.823 | Patescibacteria group bacterium | | |
| | UBA6130 | | |
| fig\|986.7.peg.83 | Flavobacterium johnsoniae | | |
| fig\|1950382.3.peg.461 | Bacteroidales bacterium UBA1181 | | |
| fig\|1947145.3.peg.376 | Prevotella sp. UBA3765 | | |
| fig\|1122989.3.peg.367 | Prevotella oris DSM 18711 = JCM 12252 | | |
| fig\|1896974.3.peg.2001 | Bacteroides sp. 43 108 | | |
| fig\|2014804.3.peg.4306 | Lewinellaceae bacterium SD302 | | |
| fig\|1428.517.peg.2380 | Bacillus thuringiensis | | |
| fig\|1428.574.peg.3351 | Bacillus thuringiensis | | |
| fig\|1428.590.peg.5685 | Bacillus thuringiensis | | |
| fig\|1720554.3.peg.188 | Hungateiclostridium clariflavum | | |
| | DSM 19732 | | |
| fig\|1122203.4.peg.2283 | Marinococcus halotolerans DSM 16375 | | |
| fig\|1462525.3.peg.3489 | Thalassobacillus sp. TM-1 | | |
| fig\|1395513.3.peg.363 | Sporolactobacillus laevolacticus | | |
| | DSM 442 | | |
| fig\|1262834.3.peg.1229 | Clostridium sp. CAG:715 | | |
| SCI87282.1 | uncultured Roseburia sp. | | |
| fig\|1952116.3.peg.2349 | Lachnospiraceae bacterium UBA6480 | | |
| WP_069150959.1 | Lachnospiraceae | | |
| fig\|1265.10.peg.3100 | Ruminococcus flavefaciens | | |
| fig\|1120998.3.peg.2858 | Anaerovorax odorimutans DSM 5092 | | |
| WP_072702499.1 | Butyrivibrio hungatei | | |
| fig\|1232453.3.peg.2795 | Clostridiales bacterium VE202-21 | | |
| fig\|39485.11.peg.251 | Lachnospira eligens | | |
| WP_072832325.1 | | | |
| fig\|1509.24.peg.2487 | Clostridium sporogenes | | |
| SCI88558.1 | uncultured Clostridium sp. | | |
| fig\|1490.6.peg.2635 | Paraclostridium bifermentans | | |
| fig\|1947399.3.peg.1322 | Hungateiclostridiaceae bacterium | | |
| | UBA3548 | | |
| fig\|1953138.3.peg.796 | Bacteroidetes bacterium UBA1312 | | |
| fig\|1950875.3.peg.364 | Clostridiales bacterium UBA4139 | | |
| fig\|1396.1518.peg.4860 | Bacillus cereus | | |
| fig\|1305675.3.peg.2174 | Bacillus solimangrovi | | |
| fig\|1423.436.peg.4365 | Bacillus subtilis | | |
| fig\|361277.6.peg.1539 | Terribacillus saccharophilus | | |
| fig\|1392.356.peg.4724 | Bacillus anthracis | | |
| fig\|1053189.3.peg.4219 | Bacillus cereus BAG5X1-1 | | |
| WP_079442297.1 | Clostridium chromiireducens | | |
| fig\|1953262.3.peg.783 | Candidatus Omnitrophica bacterium | | |
| | UBA1562 | | |
| fig\|1797955.3.peg.2304 | Elusimicrobia bacterium | | |
| | RIFOXYA12_FULL_51_18 | | |
| fig\|1953111.3.peg.2436 | Acidobacteria bacterium UBA7540 | | |
| WP_099010551.1 | Escherichia coli | Retron- | |
| | | Eco1 | |
| | | (Ec86) | |
| fig\|1005565.3.peg.1153 | Escherichia coli 3006 | | |
| fig\|158822.8.peg.1905 | Cedecea neteri | | |
| fig\|1444060.3.peg.4830 | Escherichia coli 4-203-08_S1_C1 | | |
| fig\|29484.22.peg.4571 | Yersinia frederiksenii | | |
| fig\|529823.3.peg.332 | Cellvibrio sp. OA-2007 | | |
| fig\|48296.218.peg.3142 | Acinetobacter pittii | | |
| fig\|550.518.peg.3445 | Enterobacter cloacae | | |
| fig\|204773.6.peg.4 | Herminiimonas arsenicoxydans | | |
| fig\|670.190.peg.4348 | Vibrio parahaemolyticus | | |
| fig\|44577.7.peg.209 | Nitrosomonas ureae | | |
| fig\|1125747.3.peg.1 | Paraglaciecola agarilytica NO2 | | |
| fig\|1338034.3.peg.2437 | Vibrio parahaemolyticus O1:Kuk | | |
| | str. FDA_R31 | | |
| fig\|1952844.3.peg.2619 | Rhodocyclaceae bacterium UBA5533 | | |
| fig\|1288788.3.peg.2384 | Vibrio parahaemolyticus 3631 | | |
| fig\|644.31.peg.975 | Aeromonas hydrophila | | |
| fig\|498292.3.peg.28 | Flavobacterium swingsii | | |
| fig\|1948088.3.peg.4515 | Firmicutes bacterium UBA6132 | | |
| fig\|1408433.3.peg.3094 | Crocinitomix catalasitica ATCC 23190 | | |
| WP_074236572.1 | Chryseobacterium zeae | | |
| fig\|1127353.3.peg.1738 | Salmonella enterica subsp. | | |
| | enterica serovar Newport str. #11-4 | | |
| fig\|1881110.4.peg.120 | Pantoea sesami | | |
| fig\|34038.6.peg.27 | Rahnella aquatilis | | |
| fig\|630.95.peg.4256 | Yersinia enterocolitica | | |
| fig\|149387.11.peg.1139 | Salmonella enterica subsp. | | |
| | enterica serovar Brandenburg | | |
| fig\|1343738.3.peg.2232 | Vibrio cholerae 2012EL-1759 | Retron- | |
| | | Vch3 | |
| | | (Vc137) | |
| fig\|1423.175.peg.4339 | Bacillus subtilis | | |
| fig\|2021695.3.peg.3399 | Bacillus sp. 7894-2 | | |
| fig\|189426.10.peg.597 | Paenibacillus odorifer | | |
| fig\|2020949.3.peg.856 | Romboutsia weinsteinii | | |
| fig\|1243664.3.peg.1004 | Bacillus massiliogorillae | | |
| fig\|1855345.3.peg.2971 | Bacillus sp. RRD69 | | |
| fig\|1946358.3.peg.2514 | Clostridium sp. UBA4108 | | |
| fig\|1520.90.peg.2502 | Clostridium beijerinckii | | |
| fig\|79672.3.peg.288 | Bacillus thuringiensis serovar | | |
| | medellin | | |
| fig\|189426.19.peg.3973 | Paenibacillus odorifer | | |
| fig\|1497.3.peg.4049 | Clostridium formicaceticum | | |
| fig\|169760.4.peg.4269 | Paenibacillus stellifer | | |
| WP_073588670.1 | Anaerocolumna xylanovorans | | |
| fig\|1950815.3.peg.1585 | Clostridiales bacterium UBA1341 | | |
| fig\|1897004.3.peg.2166 | Eubacterium sp. 45_250 | | |
| fig\|1946293.3.peg.290 | Catabacter sp. UBA7571 | | |
| fig\|1796620.3.peg.3489 | Acutalibacter muris | | |
| fig\|76857.53.peg.2245 | Fusobacterium nucleatum subsp. | | |
| | polymorphum | | |
| fig\|2013784.3.peg.1260 | Firmicutes bacterium HGW- | | |
| | Firmicutes-3 | | |
| fig\|79884.3.peg.1106 | Bacillus pseudalcaliphilus | | |
| fig\|135461.47.peg.1552 | Bacillus subtilis subsp. subtilis | | |
| WP_016122013.1 | Bacillus cereus group | | |
| fig\|1499688.3.peg.3214 | Bacillus sp. LF1 | | |
| fig\|1318.8.peg.1495 | Streptococcus parasanguinis | | |
| fig\|1381091.3.peg.1173 | Streptococcus equi subsp. | | |
| | zooepidemicus SzAM60 | | |
| fig\|1409369.3.peg.815 | Staphylococcus aureus AMMC6050 | | |
| fig\|1497681.5.peg.3014 | Listeria newyorkensis | | |
| fig\|1095727.3.peg.409 | Streptococcus sp. SK643 | | |
| fig\|1318.12.peg.313 | Streptococcus parasanguinis | | |
| fig\|1681184.3.peg.4899 | Lysinibacillus sp. ZYM-1 | | |
| fig\|561879.29.peg.3569 | Bacillus safensis | | |
| fig\|1884359.3.peg.2978 | Psychrobacillus sp. OK028 | | |
| fig\|29367.3.peg.1112 | Clostridium puniceum | | |
| fig\|1225345.3.peg.1103 | Clostridium chromiireducens | | |
| fig\|1345695.10.peg.2438 | Clostridium saccharobutylicum DSM | | |
| | 13864 | | |
| fig\|119641.3.peg.784 | Clostridium uliginosum | | |
| fig\|1761781.3.peg.88 | Clostridium sp. DSM 8431 | | |
| fig\|1946346.3.peg.2999 | Clostridium sp. UBA1056 | | |
| fig\|1492.48.peg.3952 | Clostridium butyricum | | |
| fig\|1121302.3.peg.4511 | Clostridium cavendishii DSM 21758 | | |
| fig\|398512.4.peg.5301 | Pseudobacteroides cellulosolvens | | |
| | ATCC 35603 = DSM 2933 | | |
| fig\|1946357.3.peg.500 | Clostridium sp. UBA3947 | | |
| fig\|642492.3.peg.3338 | Cellulosilyticum lentocellum DSM 5427 | | |
| fig\|1946690.3.peg.1553 | Lachnoclostridium sp. UBA3320 | | |
| fig\|397290.3.peg.150 | Lachnospiraceae bacterium A2 | | |
| fig\|97138.3.peg.1713 | Clostridium sp. ASF356 | | |
| fig\|1965545.3.peg.499 | Tyzzerella sp. An114 | | |
| fig\|1047063.3.peg.240 | WS1 bacterium JGI 0000059-K21 | | |
| fig\|1192034.3.peg.1508 | Chondromyces apiculatus DSM 436 | | |
| AAA88323.1 | Myxococcus xanthus | Retron- | |
| | | Mxa2 | |
| | | (Mx65) | |
| fig\|33.8.peg.8196 | Myxococcus fulvus | | |
| fig\|215803.3.peg.1485 | Enhygromyxa salina | | |
| fig\|1406225.3.peg.2150 | Archangium violaceum Cb vi76 | | |
| fig\|1952931.3.peg.5137 | Verrucomicrobia subdivision 3 | | |
| | bacterium UBA6082 | | |
| fig\|1972460.3.peg.279 | Anaerolineaceae bacterium 4572_78 | | |
| fig\|1950201.3.peg.3297 | Anaerolineales bacterium UBA2796 | | |
| WP_015247705.1 | | | |
| fig\|1799658.3.peg.2777 | Planctomycetaceae bacterium SCGC | | |
| | AG-212-F19 | | |
| fig\|214688.26.peg.6659 | Gemmata obscuriglobus UQM 2246 | | |
| fig\|12023130.3.peg.4250 | Rhodopirellula sp. MGV | | |
| fig\|52.7.peg.9046 | Chondromyces crocatus | | |
| fig\|448385.16.peg.2914 | Sorangium cellulosum So ce56 | | |
| fig\|888845.4.peg.14202 | Minicystis rosea | | |
| fig\|1752210.3.peg.1275 | Deltaproteobacteria bacterium | | |
| | Ga0077539 | | |
| fig\|1391654.3.peg.3562 | Labilithrix luteola | | |
| fig\|1752218.3.peg.3670 | Planctomycetaceae bacterium | | |
| | Ga0077529 | | |
| WP_006981058.1 | Chthoniobacter flavus | | |
| fig\|1952939.3.peg.2584 | Verrucomicrobiaceae bacterium | | |
| | UBA1938 | | |
| fig\|2024858.3.peg.3711 | Sandaracinus sp. | | |
| WP_009096166.1 | Rhodopirellula sp. SWK7 | | |
| fig\|595453.3.peg.1506 | Rhodopirellula sp. SM50 | | |
| fig\|1263868.3.peg.4100 | Rhodopirellula europaea SH398 | | |
| fig\|167547.3.peg.303 | Prochlorococcus marinus str. MIT 9311 | | |
| fig\|1499501.3.peg.459 | Prochlorococcus sp. SS52 | | |
| fig\|1905359.3.peg.4335 | marine bacterium AO1-C | | |
| WP_002700020.1 | Microscilla marina | | |
| fig\|1913989.145.peg.263 | Gammaproteobacteria bacterium | | |
| WP_073154989.1 | Seinonella peptonophila | | |
| fig\|46223.3.peg.3648 | Thermoflavimicrobium dichotomicum | | |
| fig\|1329796.3.peg.1947 | Risungbinella massiliensis | | |
| fig\|1123252.3.peg.3225 | Shimazuella kribbensis DSM 45090 | | |
| fig\|714067.3.peg.3719 | Kroppenstedtia eburnea | | |
| fig\|1341151.3.peg.628 | Laceyella sacchari 1-1 | | |
| fig\|2026763.3.peg.3089 | Myxococcales bacterium | | |
| fig\|1797895.3.peg.2518 | Deltaproteobacteria bacterium | | |
| | RIFOXYA12_FULL_58_15 | | |
| fig\|373672.4.peg.4082 | Chryseobacterium gambrini | | |
| fig\|1416778.5.peg.4374 | Chryseobacterium arachidis | | |
| fig\|1603293.4.peg.829 | Flavobacterium sp. 316 | | |
| CCB70859.1 | Flavobacterium branchiophilum FL-15 | | |
| fig\|1986952.3.peg.951 | Sphingobacteriaceae bacterium | | |
| | GW460-11-11-14-LB5 | | |
| fig\|1476464.3.peg.4304 | Pedobacter xixiisoli | | |
| fig\|1761785.3.peg.3112 | Flavobacterium sp. ov086 | | |
| fig\|1664068.3.peg.3690 | bacterium 336/3 | | |
| fig\|880071.3.peg.3500 | Bernardetia litoralis DSM 6794 | | |
| fig\|1121902.3.peg.2906 | Eisenibacter elegans DSM 3317 | | |
| fig\|1509483.4.peg.1923 | Flectobacillus sp. BAB-3569 | | |
| fig\|1166018.3.peg.5312 | Fibrella aestuarina BUZ 2 | | |
| fig\|634771.3.peg.967 | Chitinophaga eiseniae | | |
| fig\|29529.3.peg.396 | Chitinophaga arvensicola | | |
| fig\|1891659.3.peg.6032 | Chitinophaga sp. CB10 | | |
| fig\|2033437.3.peg.3442 | Chitinophaga sp. MD30 | | |
| fig\|1004.4.peg.1677 | Chitinophaga sancti | | |
| fig\|1881041.3.peg.3698 | Chitinophaga sp. YR627 | | |
| fig\|1123078.3.peg.2010 | Runella zeae DSM 19591 | | |
| fig\|1354355.3.peg.1846 | Niastella yeongjuensis | | |
| fig\|1951546.3.peg.1574 | Chitinophagaceae bacterium | | |
| | UBA1946 | | |
| fig\|1812911.3.peg.633 | Flavihumibacter sp. CACIAM 22H1 | | |
| fig\|477680.4.peg.4668 | Filimonas lacunae | | |
| fig\|221126.7.peg.3781 | Algibacter lectus | | |
| fig\|342954.4.peg.734 | Lacinutrix algicola | | |
| fig\|1871037.5.peg.2180 | Flavobacteriaceae bacterium | | |
| fig\|669041.3.peg.843 | Tenacibaculum dicentrarchi | | |
| WP_074538568.1 | Cellulophaga baltica | | |
| fig\|1248440.3.peg.1511 | Polaribacter franzmannii ATCC 700399 | | |
| fig\|1121007.3.peg.1574 | Aquimarina muelleri DSM 19832 | | |
| fig\|688867.3.peg.2332 | Ohtaekwangia koreensis | | |
| fig\|926565.3.peg.717 | Sporocytophaga myxococcoides DSM | | |
| | 11118 | | |
| fig\|1257021.3.peg.5265 | Flammeovirgaceae bacterium 311 | | |
| fig\|12044937.5.peg.2350 | candidate division KSB3 bacterium | | |
| fig\|1499966.3.peg.180 | Candidatus Moduliflexus | | |
| | flocculans | | |
| fig\|1948269.3.peg.1254 | Verrucomicrobia bacterium UBA6053 | | |
| fig\|694433.3.peg.3103 | Saprospira grandis DSM 2844 | | |
| fig\|2008677.3.peg.3337 | Mitsuaria noduli | | |
| fig\|946333.3.peg.3570 | Rhizobacter gummiphilus | | |
| fig\|1736433.3.peg.5559 | Rhizobacter sp. Root1221 | | |
| fig\|1500265.3.peg.5760 | Methylibium sp. YR605 | | |
| fig\|1121349.4.peg.2836 | Comamonas composti DSM 21721 | | |
| fig\|1082851.3.peg.91 | Comamonas serinivorans | | |
| fig\|1121480.5.peg.5468 | Pseudoduganella violaceinigra DSM 15887 | | |
| fig\|2045208.3.peg.1247 | Massilia violaceinigra | | |
| fig\|1736455.3.peg.3692 | Massilia sp. Root133 | | |
| fig\|34073.25.peg.8569 | Variovorax paradoxus | | |
| fig\|1884311.3.peg.7121 | Variovorax sp. OK202 | | |
| fig\|1123487.3.peg.1763 | Uliginosibacterium gangwonense | | |
| | DSM 18521 | | |
| fig\|2029111.3.peg.3032 | Comamonadaceae bacterium | | |
| | NML120219 | | |
| fig\|1977087.20.peg.1226 | Proteobacteria bacterium | | |
| fig\|754436.4.peg.4454 | Photobacterium aphoticum | | |
| fig\|265726.7.peg.1038 | Photobacterium halotolerans | | |
| fig\|1121867.3.peg.59 | Enterovibrio calviensis DSM 14347 | | |
| fig\|1238431.3.peg.2655 | Vibrio nigripulchritudo BLFn1 | | |
| fig\|1384589.3.peg.2721 | [Erwinia] teleogrylli | | |
| fig\|1261127.3.peg.2947 | Citrobacter amalonaticus Y19 | | |
| fig\|349521.8.peg.3588 | Hahella chejuensis KCTC 2396 | | |
| fig\|1525918.3.peg.1501 | Thiothrix caldifontis | | |
| fig\|1737490.4.peg.4974 | Agarilytica rhodophyticola | | |
| fig\|251229.3.peg.427 | Chroococcidiopsis thermalis PCC 7203 | | |
| fig\|1245923.3.peg.9587 | Scytonema millei VB511283 | | |
| fig\|1503470.5.peg.10896 | cyanobacterium TDX16 | | |
| fig\|2005460.3.peg.1118 | Chondrocystis sp. NIES-4102 | | |
| fig\|179408.3.peg.4679 | Oscillatoria nigro-viridis PCC 7112 | | |
| fig\|1612423.3.peg.5384 | Nostoc linckia z1 | | |
| fig\|63737.11.peg.472 | Nostoc punctiforme PCC 73102 | | |
| fig\|224013.5.peg.7163 | Nostoc piscinale CENA21 | | |
| fig\|1932621.3.peg.7363 | Nostoc sp. T09 | | |
| fig\|373994.3.peg.3383 | Rivularia sp. PCC 7116 | | |
| fig\|2005463.3.peg.257 | Calothrix sp. NIES-4105 | | |
| fig\|2005459.3.peg.7019 | Tolypothrix sp. NIES-4075 | | |
| fig\|184925.3.peg.2602 | Chlorogloeopsis fritschii PCC 9212 | | |
| fig\|454136.5.peg.3127 | Phormidium ambiguum IAM M-71 | | |
| fig1203124.6.peg.2732 | Trichodesmium erythraeum IMS101 | | |
| fig\|2040638.3.peg.3067 | Tychonema bourrellyi FEM_GT703 | | |
| fig\|1880991.4.peg.2927 | Oscillatoriales cyanobacterium | | |
| | USR001 | | |
| fig\|1173028.3.peg.7115 | Oscillatoria sp. PCC 10802 | | |
| fig\|568701.4.peg.2073 | Moorea bouillonii PNG | | |
| fig\|927677.3.peg.4187 | Synechocystis sp. PCC 7509 | | |
| fig\|179408.3.peg.6267 | Oscillatoria nigro-viridis PCC 7112 | | |
| fig\|1710894.3.peg.2079 | Aphanizomenon flos-aquae LD13 | | |
| fig\|1947888.3.peg.4484 | Cyanobacteria bacterium UBA6047 | | |
| fig\|1705388.3.peg.1178 | Planktothricoides sp. SR001 | | |
| fig\|454136.5.peg.4162 | Phormidium ambiguum IAM M-71 | | |
| fig\|2005458.3.peg.378 | Nostoc sp. NIES-4103 | | |
| fig\|1947874.3.peg.4590 | Cyanobacteria bacterium UBA1583 | | |
| fig\|1781255.3.peg.802 | Desertifilum sp. IPPAS B-1220 | | |
| fig\|1128427.4.peg.2346 | filamentous cyanobacterium ESFC-1 | | |
| fig\|1946321.3.peg.3928 | Chloracidobacterium sp. UBA7656 | | |
| fig\|118173.3.peg.1030 | Pseudanabaena sp. PCC 6802 | | |
| fig\|1922337.4.peg.4802 | Leptolyngbya sp. ‘hensonii’ | | |
| fig\|927668.3.peg.2766 | Pseudanabaena biceps PCC 7429 | | |
| fig\|1173020.3.peg.6191 | Chamaesiphon minutus PCC 6605 | | |
| fig\|329726.14.peg.4440 | Acaryochloris marina MBIC11017 | | |
| fig\|215803.3.peg.1649 | Enhygromyxa salina | | |
| fig\|1920190.3.peg.9548 | Archangium sp. Cb G35 | | |
| fig\|1961464.3.peg.5181 | Myxococcales bacterium UBA2376 | | |
| fig\|765913.3.peg.336 | Thiorhodococcus drewsii AZ1 | | |
| fig\|1396141.3.peg.2891 | Haloferula sp. BvORR071 | | |
| fig\|1961463.3.peg.5253 | Myxococcales bacterium UBA1671 | | |
| AAL40743.1 | Nannocystis exedens | Retron- | |
| | | Nex2 | |
| | | (Ne144) | |
| fig\|54.3.peg.4123 | Nannocystis exedens | | |
| fig\|53367.3.peg.3417 | Asanoa ferruginea | | |
| fig460265.11.peg.3882 | Methylobacterium nodulans ORS 2060 | | |
| fig\|298794.3.peg.462 | Methylobacterium variabile | | |
| fig\|190148.4.peg.3492 | Bradyrhizobium paxllaeri | | |
| fig\|1075417.3.peg.445 | Catalinimonas alkaloidigena | | |
| fig\|1429438.4.peg.7505 | Candidatus Entotheonella factor | | |
| fig\|1977087.12.peg.1756 | Proteobacteria bacterium | | |
| fig\|92487.3.peg.3972 | Thiothrix eikelboomii | | |
| fig\|1977087.20.peg.1473 | Proteobacteria bacterium | | |
| fig\|1123400.3.peg.3276 | Thiofilum flexile DSM 14609 | | |
| fig\|34062.8.peg.73 | Moraxella osloensis | | |
| fig\|1699623.3.peg.1502 | Psychrobacter sp. P11G3 | | |
| fig\|1123509.3.peg.848 | Zooshikella ganghwensis DSM 15267 | | |
| fig\|2026735.3.peg.2222 | Deltaproteobacteria bacterium | | |
| fig\|1977087.12.peg.2982 | Proteobacteria bacterium | | |
| fig\|2026763.4.peg.1195 | Myxococcales bacterium | | |
| fig\|1977087.12.peg.510 | Proteobacteria bacterium | | |
| fig\|1123508.3.peg.7252 | Zavarzinella formosa DSM 19928 | | |
| fig\|214688.26.peg.3091 | Gemmata obscuriglobus UQM 2246 | | |
| fig\|1908690.5.peg.1204 | Fimbriiglobus ruber | | |
| fig\|1805126.3.peg.4431 | Deltaproteobacteria bacterium | | |
| | CG2_30_63_29 | | |
| fig\|1882752.4.peg.1962 | Singulisphaera sp. GP187 | | |
| fig\|1636152.3.peg.5364 | Planctomyces sp. SH-PL62 | | |
| APR75442.1 | Minicystis rosea | | |
| fig\|54.3.peg.8798 | Nannocystis exedens | | |
| fig\|980254.4.peg.4083 | Roseimaritima ulvae | | |
| fig\|1856297.3.peg.3627 | Gammaproteobacteria bacterium | | |
| | 45_16_T64 | | |
| fig\|1219077.3.peg.1945 | Vibrio azureus NBRC 104587 | | |
| fig\|1334629.3.peg.167 | Myxococcus fulvus 124B02 | | |
| AAA25405.1 | Myxococcus xanthus | Retron- | |
| | | Mxa1 | |
| | | (Mx162) | |
| fig\|378806.16.peg.4444 | Stigmatella aurantiaca DW4/3-1 | | |
| WP_002615305.1 | Stigmatella aurantiaca | Retron- | |
| | | Sau1 | |
| | | (Sa163) | |
| fig\|48.3.peg.757 | Archangium gephyra | | |
| fig\|448385.16.peg.2083 | Sorangium cellulosum So ce56 | | |
| fig\|52.7.peg.5100 | Chondromyces crocatus | | |
| fig\|1752210.3.peg.5621 | Deltaproteobacteria bacterium | | |
| | Ga0077539 | | |
| fig\|2024858.3.peg.6345 | Sandaracinus sp. | | |
| WP_012826728.1 | Haliangium ochraceum | | |
| fig\|927083.3.peg.3408 | Sandaracinus amylolyticus | | |
| WP_006977315.1 | Plesiocystis pacifica | | |
| fig\|1400863.5.peg.627 | Candidatus Competibacter | | |
| | denitrificans Run_A_D11 | | |
| fig\|1961463.3.peg.4303 | Myxococcales bacterium UBA1671 | | |
| fig\|1898731.3.peg.3099 | Curtobacterium sp. MCBA15_001 | | |
| fig\|1279028.3.peg.3374 | Curtobacterium sp. 314Chir4.1 | | |
| fig\|1898733.3.peg.2056 | Curtobacterium sp. MCBA15_004 | | |
| fig\|1795630.3.peg.3476 | Frondihabitans sp. PAMC 28766 | | |
| fig\|2033654.3.peg.3461 | Curtobacterium sp. ‘Ferrero’ | | |
| fig\|1736329.5.peg.1436 | Frondihabitans sp. Leaf304 | | |
| fig\|1736292.3.peg.1083 | Rathayibacter sp. Leaf185 | | |
| fig\|1736327.3.peg.206 | Rathayibacter sp. Leaf296 | | |
| fig\|1736311.3.peg.3668 | Curtobacterium sp. Leaf261 | | |
| fig\|1736308.3.peg.2333 | Frigoribacterium sp. Leaf254 | | |
| fig\|656366.8.peg.2905 | Arthrobacter alpinus | | |
| fig\|494023.3.peg.138 | Paeniglutamicibacter antarcticus | | |
| ASN40093.1 | Arthrobacter sp. 7749 | | |
| fig\|1494608.3.peg.465 | Arthrobacter sp. PAMC 25486 | | |
| fig\|656366.4.peg.2620 | Arthrobacter alpinus | | |
| fig\|656366.3.peg.1944 | Arthrobacter alpinus | | |
| fig\|1132441.3.peg.1888 | Arthrobacter sp. 35W | | |
| fig\|1704044.3.peg.520 | Arthrobacter sp. ERGS1:01 | | |
| fig\|1496689.3.peg.681 | Arthrobacter sp. L77 | | |
| fig\|1681197.3.peg.149 | Arthrobacter sp. RIT-PI-e | | |
| fig\|37921.12.peg.1481 | Arthrobacter agilis | | |
| fig\|1736303.3.peg.982 | Arthrobacter sp. Leaf234 | | |
| fig\|1312978.3.peg.1472 | Arthrobacter sp. H41 | | |
| fig\|1348338.3.peg.1472 | Leifsonia rubra CMS 76R | | |
| fig\|1452536.3.peg.1955 | Microbacterium sp. Cr-K20 | | |
| fig\|1736525.3.peg.446 | Leifsonia sp. Root4 | | |
| fig\|1529318.3.peg.434 | Cryobacterium sp. MLB-32 | | |
| fig\|1267973.3.peg.3479 | Arthrobacter sp. H5 | | |
| fig\|150121.3.peg.1900 | Agreia pratensis | | |
| fig\|123316.3.peg.955 | Agreia sp. VKM Ac-2052 | | |
| fig\|1052260.3.peg.3617 | Klenkia soli | | |
| fig\|1566299.3.peg.3962 | Klenkia marina | | |
| fig\|1736356.3.peg.3150 | Modestobacter sp. Leaf380 | | |
| fig\|1736354.3.peg.1787 | Geodermatophilus sp. Leaf369 | | |
| fig\|479431.6.peg.3115 | Nakamurella multipartita DSM 44233 | | |
| fig\|1090615.3.peg.2397 | Nakamurella panacisegetis | | |
| fig\|1306174.4.peg.4778 | Kineosporia aurantiaca JCM 3230 | | |
| fig\|546871.3.peg.1120 | Friedmanniella luteola | | |
| fig\|630515.4.peg.525 | Microlunatus soli | | |
| fig\|546874.3.peg.1181 | Friedmanniella sagamiharensis | | |
| BAK35674.1 | Microlunatus phosphovorus NM-1 | | |
| fig\|1380390.4.peg.72 | Solirubrobacterales bacterium | | |
| | URHD0059 | | |
| fig\|1283299.3.peg.2784 | Conexibacter woesei Iso977N | | |
| fig\|929712.3.peg.3165 | Patulibacter minatonensis DSM 18081 | | |
| fig\|1123262.3.peg.3125 | Solirubrobacter soli DSM 22325 | | |
| fig\|1861.4.peg.5240 | Geodermatophilus obscuras | | |
| fig\|1137993.4.peg.1318 | Geodermatophilus africanus | | |
| fig\|1070870.3.peg.778 | Geodermatophilus nigrescens | | |
| fig\|1190417.3.peg.1785 | Geodermatophilus telluris | | |
| fig\|477641.3.peg.1023 | Modestobacter marinus | | |
| fig\|1798228.3.peg.3756 | Blastococcus sp. DSM 46838 | | |
| WP_091929708.1 | Blastococcus sp. DSM 46786 | | |
| SHH20361.1 | Jatrophihabitans endophyticus | | |
| fig\|1844.3.peg.1151 | Nocardioides luteus | | |
| fig\|748909.6.peg.1418 | Nocardioides alpinus | | |
| fig1402596.3.peg.987 | Nocardioides exalbidus | | |
| fig\|1736322.3.peg.1963 | Nocardioides sp. Leaf285 | | |
| fig\|1445613.3.peg.3490 | Sciscionella sp. SE31 | | |
| fig\|543632.4.peg.9742 | Actinoplanes subtropicus | | |
| fig\|1036182.3.peg.2958 | Actinoplanes atraurantiacus | | |
| fig\|1246995.3.peg.737 | Actinoplanes friuliensis DSM 7358 | | |
| fig\|56427.3.peg.3052 | Couchioplanes caeruleus subsp. | | |
| | caeruleus | | |
| fig\|1710355.3.peg.2225 | Actinoplanes sp. TFC3 | | |
| fig\|649831.3.peg.2352 | Actinoplanes sp. N902-109 | | |
| fig\|35754.4.peg.6321 | Dactylosporangium aurantiacum | | |
| fig\|1881.4.peg.2703 | Micromonospora viridifaciens | | |
| fig\|47863.3.peg.3975 | Micromonospora globosa | | |
| fig\|285665.4.peg.2050 | Micromonospora coriariae | | |
| fig\|1192034.3.peg.4668 | Chondromyces apiculatus DSM 436 | | |
| fig\|1198133.3.peg.2442 | Myxococcus xanthus DZ2 | | |
| fig\|33.8.peg.521 | Myxococcus fulvus | | |
| fig\|394193.3.peg.7794 | Amycolatopsis saalfeldensis | | |
| fig\|369932.4.peg.5621 | Amycolatopsis niigatensis | | |
| fig\|1238180.3.peg.5340 | Amycolatopsis azurea DSM 43854 | | |
| fig\|589385.3.peg.7940 | Amycolatopsis xylanica | | |
| fig\|1068980.3.peg.1527 | Amycolatopsis nigrescens CSC17Ta-90 | | |
| fig\|1854586.3.peg.2100 | Amycolatopsis antarctica | | |
| fig\|587909.3.peg.3086 | Yuhushiella deserti | | |
| fig\|2030.3.peg.3051 | Kibdelosporangium aridum | | |
| fig\|1382595.4.peg.3164 | Saccharopolyspora erythraea D | | |
| WP_013675061.1 | Pseudonocardia dioxanivorans | | |
| fig\|1660131.3.peg.2805 | Pseudonocardia sp. SCN 72-86 | | |
| fig\|366584.3.peg.4349 | Pseudonocardia oroxyli | | |
| fig\|1885031.4.peg.5241 | Pseudonocardia sp. Ae331 Ps2 | | |
| fig\|1690815.5.peg.5350 | Pseudonocardia sp. HH130630-07 | | |
| fig\|1123023.3.peg.3229 | Pseudonocardia acaciae DSM 45401 | | |
| fig\|1449976.3.peg.8114 | Kutzneria albida DSM 43870 | | |
| WP_007238159.1 | | | |
| fig\|1220583.3.peg.1582 | Gordonia aichiensis NBRC 108223 | | |
| GAB07179.1 | Gordonia amarae NBRC 15530 | | |
| fig\|1223545.3.peg.704 | Gordonia soli NBRC 108243 | | |
| fig\|1223540.3.peg.3237 | Gordonia desulfuricans NBRC 100010 | | |
| fig\|1112204.3.peg.4913 | Gordonia polyisoprenivorans VH2 | | |
| AFR49048.1 | Gordonia sp. KTR9 | | |
| fig\|402289.3.peg.1558 | Rhodococcus sp. HA99 | | |
| fig\|1077144.3.peg.224 | Dietzia alimentaria 72 | | |
| fig\|1344003.3.peg.1864 | Williamsia sterculiae | | |
| fig\|1463823.3.peg.3407 | Microbispora sp. NRRL B-24597 | | |
| fig\|1903117.3.peg.1566 | Williamsia sp. 1138 | | |
| fig\|1603258.4.peg.1828 | Williamsia herbipolensis | | |
| fig\|644548.3.peg.652 | Gordonia neofelifaecis NRRL B-59395 | | |
| fig\|1136941.3.peg.1310 | Gordonia phthalatica | | |
| fig\|1223542.3.peg.3439 | Gordonia malaquae NBRC 108250 | | |
| fig\|47312.10.peg.4232 | Tsukamurella pulmonis | | |
| fig\|57704.14.peg.421 | Tsukamurella tyrosinosolvens | | |
| fig\|521096.6.peg.2443 | Tsukamurella paurometabola DSM 20162 | | |
| fig\|1123241.3.peg.3642 | Nakamurella lactea DSM 19367 | | |
| fig\|1210073.4.peg.1031 | Nocardia salmonicida NBRC 100378 | | |
| fig\|1206740.4.peg.4617 | Nocardia thailandica NBRC 100428 | | |
| fig\|1210064.4.peg.2434 | Nocardia altamirensis NBRC 108246 | | |
| fig\|1123258.3.peg.1651 | Smaragdicoccus niigatensis DSM 44881 = | | |
| | NBRC 103563 | | |
| fig\|1443888.3.peg.2891 | Rhodococcus fascians 02-815 | | |
| fig\|1517936.4.peg.882 | Rhodococcus sp. CUA-806 | | |
| fig1398843.6.peg.4214 | Rhodococcus kyotonensis | | |
| fig\|1813677.3.peg.4031 | Rhodococcus sp. EPR-157 | | |
| WP_008711873.1 | | | |
| fig\|1381122.3.peg.6103 | Rhodococcus erythropolis DN1 | | |
| fig\|1736210.3.peg.2766 | Rhodococcus sp. Leaf7 | | |
| fig\|1736300.3.peg.1279 | Rhodococcus sp. Leaf225 | | |
| fig\|1219012.3.peg.1705 | Rhodococcus corynebacterioides | | |
| | NBRC 14404 | | |
| fig\|1219023.3.peg.2791 | Rhodococcus rhodnii NBRC 100604 | | 21339 |
| fig\|616997.3.peg.2548 | Hoyosella altamirensis | | 21340 |
| fig\|1303689.4.peg.2934 | Rhodococcus koreensis JCM 10743 = | | 21341 |
| | NBRC 100607 | | |

^{a}Accession in Patric database (https://www.patricbrc.org/) or NCBI (https://www.ncbi.nlm.nih.gov/protein/)

[1067] Table X provides non-limiting examples of 1928 retron reverse transcriptases (AA sequences associated with each NCBI Accession No. assigned to sequence identifiers SEQ ID NO: 19413-21341) that may be modified in accordance with the herein methods to obtain a recombinant retron reverse transcriptase for use in the compositions, systems, and methods described herein. These retron sequences were reported in Mestre et al., “Systematic Prediction of Genes Functionally Associated with Bacterial Retrons and Classification of The Encoded Tripartite Systems,” Nucleic Acids Research, Volume 48, Issue 22, 16 Dec. 2020, Pages 12632-12647, the contents of which are incorporated herein by reference. In some embodiments, the Table X retrons are meant to be excluded from the scope of the claimed subject matter.

Thus, in various aspects, the present disclosure describes making recombinant retrons and retron-based genome editing sy tables summarize the amino acid and nucleotide sequences disclosed herein, each being ascribed an individual sequence identifier (i.e., SEQ ID NO). In some instances, the sequences are disclosed in the body of the Specification. In other instances, the sequences are disclosed in the Sequence Listing, which forms a part of the instant Specification.

[1068] The following is a sequence key to summarize and identify the enclosed sequences. The sequence key accompanies the visual summary provided in FIGS. 28 and 29.

Table A and Sub-Tables A1-A45:
Novel Retron Reverse Transcriptase Sequences

| | Seq ID Nos | | |
|---|---|---|---|
| | RT Amino | RT Nucleic | Functional |
| Table | Acid Sequence | Acid Sequence | Types |
| A1 | 3980-4178 | 11231-11429 | I-A |
| A2 | 4671-4825 | 11922-12075 | I-B1 |
| A3 | 4980-5143 | 12229-12392 | I-B2 |
| A4 | 367-368, 427-441, | 7624-7625, 7684- | I-C |
| | 494-521, 526-527, | 7698, 7751-7778, | |
| | 536, 626, 649, | 7783-7784, 7793, | |
| | 660-668, 675, 679, | 7883, 7906, 7917- | |
| | 687-692, 695, 697, | 7925, 7932, 7936, | |
| | 703, 716, 721-722, | 7944-7949, 7952, | |
| | 751-763, 767, 770- | 7954, 7960, 7973, | |
| | 1411, 1456-1462 | 7978-7979, 8008- | |
| | | 8020, 8024, 8027- | |
| | | 8667, 8712-8718 | |
| A5 | 1529-1569 | 8784-8823 | I-D |
| A6 | 6697-6701 | 13943-13947 | II |
| A7 | 4179-4670 | 11430-11921 | II-A1 |
| A8 | 4884-4909 | 12134-12159 | II-A1 other |
| A9 | 6919-6972 | 14163-14215 | II-A2 |
| A10 | 2786-2866, | 10039-10119, | II-A3 |
| | 2887-2938 | 10140-10191 | |
| A11 | 4826-4863 | 12076-12113 | II-A4 |
| A12 | 4864-4875 | 12114-12125 | II-A4 fused |
| A13 | 6974-7002 | 14217-14244 | II-A5 |
| A14 | 2598-2600, | 9851-9853, | III |
| | 2759-2785 | 10012-10038 | |
| A15 | 2445-2582 | 9699-9836 | III-A1 |
| A16 | 1983-2158 | 9237-9412 | III-A2 |
| A17 | 1612-1982 | 8866-9236 | III-A3 |
| A18 | 2601-2678 | 9854-9931 | III-A4 |
| A19 | 2679-2758 | 9932-10011 | III-A5 |
| A20 | 3442-3603 | 10694-10855 | IV |
| A21 | 3604-3708 | 10856-10959 | V |
| A22 | 2939-3441, | 10192-10693, | VI |
| | 3709-3979, | 10960-11230, | |
| | 5177-5192 | 12426-12441 | |
| A23 | 7003-7033 | 14245-14275 | VII-A1 |
| A24 | 7054-7133 | 14296-14374 | VII-A2 |
| A25 | 7034-7049 | 14276-14291 | VIII |
| A26 | 6835-6918 | 14079-14162 | IX |
| A27 | 6823-6834 | 14068-14078 | X |
| A28 | 298-366, 369-373, | 7555-7623, 2626- | XI |
| | 442-493, 522-525, | 7630, 7699-7750, | |
| | 528-535, 537, 551- | 7785-7792, 7794, | |
| | 554, 557, 560-625, | 7808-7811, 7814, | |
| | 672-674, 680-681, | 7817-7882, 7929- | |
| | 684-686, 696, 698, | 7931, 7937-7938, | |
| | 702, 723-742, 764- | 7941-7943, 7953, | |
| | 766, 1412-1450, | 7955, 7959, 7980- | |
| | 1452-1453, 1463- | 7999, 8021-8023, | |
| | 1466, 1571-1577 | 8668-8706, 8708- | |
| | | 8709, 8719-8722, | |
| | | 8825-8831 | |
| A29 | 374-426, 539-550, | 7631-7683, 7796- | XII |
| | 555-556, 558-559, | 7807, 7812-7813, | |
| | 671, 682-683, 743, | 7815-7816, 7928, | |
| | 745-750 | 7939-7940, 800, | |
| | | 8002-8007 | |
| A30 | 5942-6665 | 13189-13911 | XIII |
| A31 | 1-297, 715, 1580- | 7258-7554, 7972, | XIV |
| | 1603 | 8834-8857 | |
| A32 | 705-714 | 7962-7971 | XV |
| A33 | 6681-6694 | 13927-13940 | XVI |
| A34 | 6788-6803 | 14033-14048 | XVII |
| A35 | 1469-1526, 5147- | 8725-8781, 12396- | CRISPR- |
| | 5151 | 12400 | associated |
| A36 | 2159-2428 | 9413-9682 | Ec107-like |
| A37 | 646-648 | 7903-7905 | RT-atpase |
| A38 | 2592-2595 | 9846-9849 | RT-DUF4116 |
| A39 | 676-678, 717-720 | 7933-7935, 7974- | RT-HTH |
| | | 7977 | |
| A40 | 538, 669, 704, | 7795, 7926, 7961, | RT-pddex |
| | 1454 | 8710 | |
| A41 | 670, 699-701 | 7927, 7956-7958 | RT-unk |
| A42 | 4917-4979 | 12167-12228 | Phage |
| A43 | 4910-4916 | 12160-12166 | Jumbophage |
| A44 | 5195-5941 | 12444-13188 | Outgroup |
| A45 | 627-645, 650-659, | 7884-7902, 7907- | unclassified |
| | 693-694, 744, 768- | 7916, 7950-7951, | |
| | 769, 1451, 1455, | 8001, 8025-8026, | |
| | 1467-1468, 1527- | 8707, 8711, 8723- | |
| | 1528, 1570, 1578, | 8724, 8782-8783, | |
| | 1579, 1604-1611, | 8824, 8832-8833, | |
| | 2429-2444, 2583- | 8858-8865, 9683- | |
| | 2591, 2596-2597, | 9698, 9837-9845, | |
| | 2867-2886, 4876- | 9850, 10120-10139, | |
| | 4883, 5144-5146, | 12126-12133, 12393- | |
| | 5152-5176, 5193- | 12395, 12401-12425, | |
| | 5194, 6666-6680, | 12442-12443, 13912- | |
| | 6695-6696, 6702- | 13926, 13941-13942, | |
| | 6787, 6804-6822, | 13948-14032, 14049- | |
| | 6973, 7050-7053, | 14067, 14216, 14292- | |
| | 7134-7257 | 14295, 14375-14498 | |

[1069] Table A provides non-limiting examples of retron reverse transcriptases that may be modified in accordance with the herein methods to obtain a recombinant retron reverse transcriptase or use in the compositions, systems, and methods described herein.

[1070] In particular, Table A provides sequence identifiers corresponding to the novel retron RTs identified as a result of the computational discovery work described in the Examples. The table provides sequence identifiers corresponding to the contents of the Sequence Listing included as part of this Specification. The table includes both RT amino acid sequences and RT nucleic acid sequences. The table is organized into forty-five sub-tables each of which represents those sequences forming a single phylogenetic clade of related retron RTs as determined by the computational work described in the Examples.

Table B and Sub-Tables B1-B45:
Exemplary ncRNA Sequences

| | | Functional |
|---|---|---|
| Table | Seq ID Nos | Types |
| B1 | 16886-17078 | I-A |
| B2 | 17478-17622 | I-B1 |
| B3 | 17677-17756 | I-B2 |
| B4 | 14831-14833, 14838, 14847, 14850-15460 | IC |
| B5 | N/A | ID |
| B6 | N/A | II |
| B7 | 17079-17477 | II-A1 |
| B8 | 17660-17676 | II-A1 other |
| B9 | 19031-19080 | II-A2 |
| B10 | 16414-16516 | II-A3 |
| B11 | 17623-17659 | II-A4 |
| B12 | N/A | II-A4 fused |
| B13 | 19081-19108 | II-A5 |
| B14 | 16397-16413 | III |
| B15 | 16195-16320 | III-A1 |
| B16 | 15779-15925 | III-A2 |
| B17 | 15476-15778 | III-A3 |
| B18 | 16321-16366 | III-A4 |
| B19 | 16367-16396 | III-A5 |
| B20 | 16705-16814 | IV |
| B21 | 16815-16885 | V |
| B22 | 16517-16704 | VI |
| B23 | N/A | VII-A1 |
| B24 | N/A | VII-A2 |
| B25 | N/A | VIII |
| B26 | 18949-19030 | IX |
| B27 | N/A | X |
| B28 | 14657-14716, 14778-14824, 14834, | XI |
| | 14835-14836, 14839, 15461-15475 | |
| B29 | 14717-14777, 14841-14846 | XII |
| B30 | 18413-18936 | XIII |
| B31 | 14499-14656 | XIV |
| B32 | N/A | XV |
| B33 | 18939 | XVI |
| B34 | N/A | XVII |
| B35 | N/A | CRISPR- |
| | | associated |
| B36 | 15926-16178 | Ec107-like |
| B37 | N/A | RT-atpase |
| B38 | N/A | RT-DUF4116 |
| B39 | N/A | RT-pddex |
| B40 | N/A | RT-HTH |
| B41 | 14837 | RT-unk |
| B42 | N/A | Phage |
| B43 | N/A | Jumbophage |
| B44 | 17757-18412 | Outgroup |
| B45 | 14825-14830, 14840, 14848-14849, | unclassified |
| | 16179-16194, 18937-18938, 18940-18948 | |

[1071] Table B provides non-limiting examples of retron ncRNA sequences that may be modified in accordance with the herein methods to obtain a recombinant retron ncRNA sequences for use in the compositions, systems, and methods described herein.

[1072] In particular, Table B provides sequence identifiers corresponding to the novel retron RTs identified as a result of the computational discovery work described in the Examples. The table provides sequence identifiers corresponding to the contents of the Sequence Listing included as part of this Specification. The table is organized into forty-five sub-tables each of which represents those sequences forming a single phylogenetic clade of related retron ncRNAs as determined by the computational work described in the Examples.

[1073] In various embodiments and in the claims, the disclosure provides recombinant retron-based genome editing systems which comprise combining in a cell through various delivery strategies a retron RT together with an ncDNA. In various aspects, the retron RTs and the ncDNA constituting the recombinant retron-based genome editing system can be based on pairing together such components that are naturally found associated to one another in nature, i.e., sourced from the same bacterial species. These are referred to as the “cognate” pairings of retron RT and retron ncRNA. In various other aspects, the retron RT component and the ncRNA component can be from different bacterial species, i.e., are not found together in nature as cognate pairs. In still other embodiments, the retron RT component and the ncRNA component can both be from the same phylogenetic functional type (e.g., Type I-A, Type I-B1, Type I-B2, Type IC, etc.). For example, a recombinant retron-based genome editing system may be comprised of a retron RT from Type I-A (i.e., SEQ ID Nos: 3980-4178 for AA and SEQ ID Nos: 11231-11429 for NT—see Table A) and a retron ncRNA also from Type I-A (i.e., SEQ ID Nos: 16886-17078—see Table B).

TABLE C
Consensus RT amino acid sequence

| RT Type | Consensus Amino Acid Sequence | SEQ ID NO: |
|---|---|---|
| TypeIIA | YKVYXIPKRXXGXRXIAXPXXXLKXXQXXXXXXXXXXXXXHXXXXAYXXXXXIKXNAXXHXXXXYXLK | 19109 |
| | XDXXXFFNSIXXXXXXXXXXXXXXXXXXXXXXXXXXXXFWXXXXXXXXXLXLSXGAPSSPXXSNXXMXXFDXXXXX | |
| | XCXXXXXXYXRYADDXTFSTXXXXXLXXXPXXXXXXLXXXXXXXXXXNXXKTXFSSKAHNRHXTGXTXXNXXXXSX | |
| | GRXXKRXIXXLXXXXXXX | |
| TypeIIA1 | YKXXXIXKXXGXXRXIXXPXXXXKXXQXXXXXXXXXXXXXHXXAXAYXXXXXIXXNAXXHXXXXXXXX | 19110 |
| | XDFXXFFXSIXXXXXXXXXXXXXXXXXXXXXXXXXXXXXXXXXXXXXXXXLXIGXPXSPXXSNXXXXXXDXXXXXX | |
| | XXXXXXXYXRYADDXXXSXXXXXXXXXXXXXXXXXXXXXXXXXXXXNXXKTXXXXXXXXXXXTGXXXXXXXXXXXG | |
| | RXXKRXXXXXXXXXXXX | |
| TypeIIB1 | XXXXXXXXXXXXXXXXXLKXXXXFXXXXXXXXXXXXXXXVXSYRKGXXXXXAVXXHXXXXXFXXXDXX | 19111 |
| | XFFXSIXXXXXXXXXXXXXXXXPXXDXXXXXXXXXXXXXXXXXLPXGXXTSPXXSNXXLXXFDXXXXXXCXXXXXX | |
| | YTRYXDDXIXSXXXXXXXXXXXXXXXXXLXXXXXXXXXXNXXKXKXXXXGXXXKXLGXXILPXGXXXXXXXXKXXX | |
| | EXXXXXXXXX | |
| TypeIB2 | XXXXXXXXXXXXXXXXXXXXXXXXXXXXXXXXXXXXXXXXXXXXXXXXXXXSYXXXXXXHXXXXXXXR | 19112 |
| | XDIXXFFXSIXXXXXXXXXXXXXXXXXXXXXXXXXXXXXXXXXXXXXXXXXXXXXXPXGXXXSPXXSNXXFRXXDX | |
| | XIXXXCXXXXXXYXRYADDXLFSXXXXXXXXXXXXFXXXIXXXXXXXXXXXNXXKXXXXXXXXSLNGXXXXXXXXX | |
| | XXXSXXKXXXXXXXXXXXXXX | |
| TypeIIC | YXXFXIXKXXGXXRXIXAPXXXLKXXQXXLXXXLXXXXXXXXXXXXXXXXXXHXFXXXXXIXXNAXXH | 19113 |
| | XXXXXVXNXDLXXFFXXXXFGRVXGXFXXXXXFXXXXXXAXXXAQXXCXXXXLPQGXPXSPXIXNXIXXXLDXXXX | |
| | XXAXXXXXXYXRYADDXTFSTXXXXXXXXXXXXXXXXXXXXXXXXXXXXXXGFXXNXXKTRXXXXXXRQXVTGLXV | |
| | NXXXNXXXXYXXXXRXXXXXXXXX | |
| TypeIID | YXXXXXXKKXGGXRXIXXPXXXLXXXQXXLXXXLXXXYXXXXXXXXXGFXXXXXXXXXXXXIXXNAXX | 19114 |
| | HXXKXXXLNXDXXXFFXSIXXXXXXXXXXXXXFXXXXXXAXXXXLLXTXXXXLPXGAPXSPXXSNXXCXXXDXXLX | |
| | XXXXXXXXXYXRYADDLTFSXXXXXXXXXXXXXXXXIXXXXFXXNXKKXRXXXXXXXQXVTGXXVNXKXNXXRXXX | |
| | XXXRAXXHXXXXX | |
| TypeIID | YXXXXXXKKXGGXRXIXXPXXXLXXXQXXLXXXLXXXYXXXXXXXXXGFXXXXXXXXXXXXIXXNAXX | 19115 |
| | HXXKXXXLNXDXXXFFXSIXXXXXXXXXXXXXFXXXXXXAXXXXLLXTXXXXLPXGAPXSPXXSNXXCXXXDXXLX | |
| | XXXXXXXXXYXRYADDLTFSXXXXXXXXXXXXXXXXIXXXXFXXNXKKXRXXXXXXXQXVTGXXVNXKXNXXRXXX | |
| | XXXRAXXHXXXXX | |
| TypeIIAl | YXXXXXXXXXXXXRXXXXPXXXLKXXQXWXXXXXXXXXXXXXXXXAYXXXXSXXXXAXXHXXXXXXXX | 19116 |
| | XDIXXFFXSXXXXXXXXXXXXXXXXXXXXXXXXXXXXXXXXXXXXLXXGXXXSPXIXNXXMXXXDXXXXXXXXXXX | |
| | XXYXRYXDDIXXSSXXXIXXXXXXXXXXXLXXXXXXXNXXKTXXXXXXXXXXXTGXXXXXXXXXXGXXXXXXXXXX | |
| | XYXXXXX | |
| TypeIIA2 | YRXFXXXKXXGXXRXIXXPRXFXKXXQXXXXDXXLXXLXXHXXXXXXXXXXSXXXNAXXHXXXXXXXX | 19117 |
| | XDIXXXFXXIXXXXXXXXXXXXXXXXXXXXXXXXXXTXXXXLPQGAPTSPXXSNXXLXXFDXXXXXXXXXXXXXYX | |
| | RYXDDXTXSXXXXXXXXXXXXXXXXXLXXXXXXXNXXKXRXXXXXXXQXVTGXXXNXXXXPXRXXRXXXRAXXXXA | |
| | XX | |
| TypeIIA3 | YXXXXXXKXXXXXRXIXXPXXXLKXXQXWILXXILXXXXXSXXXXXFXXXXXXXXNAXXHXXXXXXLX | 19118 |
| | XDXXXFFXXXXXXXVXXXFXXXGYXXXXXXXLXXXCXXXXXLPQGXXXSPXXXNLXXXXLDXRXXXXXXXXXXXYT | |
| | RYADDXXXSXXXXXXXXXXXXXXXXIXXXEXXXXNXXKXXXXXXXXXXXXTGXXXXXXXXXXXXXXXXXRXXXXXX | |
| | XX | |
| TypeIIA4 | XXXXXIXXXXXXRKIXTXXXXXXXXXXXHXXXXXXXXXXXXXXXFXKAYXXXXSIXXNAXXHMYNDXF | 19119 |
| | XXXDIXXFFXXIXHXXLXXXLXXXXXXXXXXXXXXXXXXXXXXXXXXXXXGLXXGXXXSPXLXNXYXKXFDXIXYG | |
| | XLKXXXXXXXIYTRYADDXXISFKXXXXXXXXXXXIXXXXXXXLXXXXLXXNXXKXXXXXXXXSNHVXITGXXIXX | |
| | XXXXXRXXXVGXXXXXXLXXXAXXXXXX | |
| TypeIIA4 | XXXXXXXXXXKXRXXXXXXXXXXGXXXXXXHXXXXXXXXXXXXXXXXSYAYXXXXSIXXCXXXHXXXX | 19120 |
| | XFXKXDIXXFFNSIXXXXLXXXXXXXXXXXXXXXXXXXXXXXXXXXXXXXPXGLXXSPXXSDXYXXXXXXXXXXXX | |
| | XXXXXXYTRYADDIXISXXXXXXXXXXXXIXXXXXXXLXXXXLXXNXXKXXXXXXXXXXXXXXXXGXNIXXXXXXX | |
| | XXXVGXXXXXXXXXXXXXXXXX | |
| TypeIIA5 | YRXFXXXKXXGXXRXIXXPXTYLKVXQWWIXDXIXXXXXXXXXXXGFXXGXXXXXNAXXHXXXXXXLN | 19121 |
| | XDXXXFFXSXXXXXXXXXFXXXGXXXXXXXXLXXLXXXXXXXPXGAPTSPXXXNXXXXXXDXXLXXXXXXXXXXYX | |
| | RYADDXTFSXXXXXXXXXXXXXXXXXXXXGFXXXXXKTXXXGXXXRXXVTGXXXNXXXXXXXXXRXXXRXXXHXXX | |
| | XX | |
| TypeIIIA | YRXXXIXKXXGXXRXIXEPLPXLKXIQXWILXXILXXXXXSXXAKAXXXXXXXXXNXXXHXXXXXXXX | 19122 |
| 1 | XDXXXFFXXIXXXXXXXXFXXXGYXXXXXXXLXXLCXXXXXLPQGAPTSPXLSNXXXXXXDXXXXXXXXXXXXXYT | |
| | RYADDXXFSGXXXXXXXXXXXXXXXXXXXXXXNXXKXXXXXXXXXQXVTGXVVNXKXQXXXXXRXXXRXXXXXIXK | |
| TypeIIIA | YRXFXIXKXXGGXRXIXXPXXXLXXXQXXIXXXILXXXXXXXXXXXXXXXXSXXXNAXXHXXXXXXLK | 19123 |
| 2 | XDXXXFFXSIXXXXXXXXFXXXGYXXXXXXXLXXXCXXXXXLPQGAXTSPXLSNXXXXXXDXXLXXXXXXXXXXYX | |
| | RYADDXXXSGXXXXXXXXXXXXXXXXXXGXXXNXXKXXXXXXXXXXIXTGXXXXXXXXXXPXXXXRXXXXXXXXXX | |
| | XX | |
| TypeIIIA | YXXXXXXKXXXXXRXIXXPXXXLXXXQXXIXXXXLXXXXXHXXXXAXXXXXXXXXXAXXHXXXXWXXK | 19124 |
| 3 | XDXXXFFXXXXEXXXXXXFXXXGYXXLXXXEXARXCTXXXXXXXXXXXXXXXXXXXXXXXXXXXGXLPQGAPTSXX | |
| | LXNLXXXXXDXXXXXXAXXXXXXYTRYXDDXXXSXXXXXXXXXXXXXXXXXXXXXXXXGXXXXXXKXXXXXPGXXX | |
| | XVLGLXVXXXXXXLXXXXXXXXXXHXXXXXXX | |
| TypeIIIA | YXXXXXXKXXGGXRXIXXPXXXLXXXQXWIXXNILXXXXXXXXXXGFXXXXSIXXNAXXHXXXXXXLX | 19125 |
| 4 | XDLXXFXXXIXXXXXXXXFXXXGYXXXXXXXXAXXXTXXXXXXXXXXXXXXXXXXXXLPQGAPXSPXXXNXXXXXX | |
| | DXRXXXXXXXXXXXYXRYADDXTFSXXXXXXXXXXXXXXIXXXEXXXXNXXKXXXXXXXXXXXVTGLXXXXXXXXX | |
| | XXXXXXXXXXXXXXCXK | |
| TypeIIIA | YXXXXIXKXXGXXRXXXXPXXXLKXXQXWILXXILXXXXXXXXXXGFXXXXSIXXNAXXHXXXXXXXX | 19126 |
| 5 | XDXXXFFPXIXXXXXXXXFXXXGYXXXXXXXXXXXCTXXXXLPQGXPXSPXXXNXXXXXXDXRXXXXXXXXXXXYX | |
| | RYADDXTXSGXXXXXXXXXXXXXIXXXXXXXXNXXKXXXXXXXXXQXVTGXXVNXXXXXXXXXXXXXXXXIYXXXK | |
| | X | |
| TypeIIIu | YXXXXXXXXXXXXRXXXXPXXXLKXXQXWIXXNILXXXXXXXXXXXXXXXXSIXXNAXXHXXXXXXXX | 19127 |
| nk | XDIXXFFXSIXXXXXXXXFXXXXXXXXXXXXXXXXXXXXXXXLXQGXPXSPXXXNXXXXXXDXXXXXXXXXXXXXY | |
| | XRYADDXXXSXXXXXXXXXXXXXXXXXXXXXXXXNXXKTXXXXXXXXXXXTGXXXXXXXXXXXXXXXXXXXEXXYC | |
| | XX | |
| TypeIIV | YXXXXXXKXXGXXRXXXXPXXXXRXXQXRINXRIFXXXXXWPXXXXGSXPXXXXXXXXXXXDYXXCAX | 19128 |
| | XHCXXKXXLKXDIXXFFXNXXXXXVXXXFXXXXXXXXXXXXXLXXXCXXXXXXXQGXXTSSYXAXLXLXXXEXXXX | |
| | XXXXXKXLXYTRXVDDITXSSXXXXXXFXXXXXXXXXMLXXXXLPXNXXKXXXXXXXXXXLXVHGLRXXXXXPRXP | |
| | XXEXXXIRXXVXXXXXX | |
| TypeV | YXXXXXXXXXXXKXRXXXXPXXXLKXXQKRINXXIFXXXXXPXYLXGGXXXXXXXRDYXXNXXXHXXX | 19129 |
| | XXXIXLDXXXFYXXIXXXXVXXXXXXXXXFXXXVXXXLXXLXTXXXXXPQGXCTSSYXANLXXXXXEYXXXXXXXX | |
| | XXXXYXRLLDDXTXSXXXXXXXXXXXXXIXXXXXXXXXXXLXXXXXKXXXXXXXXXXXXXXVTGLWXXXXXPXXXX | |
| | XXRXXIRXXVXXCXXX | |
| TypeVI | XXXXXXXXXXXXXRXXXXXXXXLXXXXXXXXXXXXXXXXPXXXXXXXXXXXXXXNAXXHXXXXXXXXX | 19130 |
| | DXXXFXXXXXXXXXXXXXXXXXXXXXXXXXXXXXXXXXXXXXXXGXXXSXXXXXXXXXXXXXXXXXXXXXXXXXXX | |
| | XXXDDXXXSXXXXXXXXXXXXXXXXXXXXXXXXXXXKXXXXXXXXXXXXTGXXXXXXXXXXXXXXXXXXXXXXXXX | |
| TypeVIIA | XXXXXXXXXXXXXXXRXVWEXXXXXXXXXKXXXRXXXXFXXXXXXXXPHXXXXGYXXGRXXRXNAXXH | 19131 |
| 1 | XGXXXXXXXDXXXFFPSIXXXRXXXXXXXXGXXXXXXXXLXXFXTIXXXLPLGLXXSPXXXNXXXXXXDXXLXXLA | |
| | XXXXXXYXRYXDDXXXSXXXXXPXXXXXXXXXXXXXFXXXXXKXXXSKXGQXHXVTGLSXXXXXXPHXPRXXKXXL | |
| | RQELXXXXXX | |
| TypeVIIA | XXXXXXXXXXXXXRXXXXXXXXXXXXXKXXXXXXXXXXXXXXXXGFXXXXXXXXNAXXHXXXXXXXXX | 19132 |
| 2 | DXXXFFXXIXXXXXXXXXXXXXXXXXXXXXXXXXXTXXXXLXXGXXTSPXXXNXXXXXXDXXXXXXXXXXXXXXRY | |
| | XDDXXFSXXXXXXXXXXXXXXXXXXXXXXXXNXXKXXXXXXGXXQXVTGLXXXXXXXPRXXXXXKXXXRXXXXXXX | |
| | X | |
| TypeVIII | YXXXXXXKRXXXXXGEXRXVXXAXXXXXXXXHRXXXXXXXXXXXFGXHVQGFXXXRSXXXNAXXHXXX | 19133 |
| | XXXXHADIXXFFXXITXXQVXXXXXXXXXXXXXAXXXAXXCTIDGXLXQGTRCSPXXXNXVCXXXDXXXLXLAXXX | |
| | XXXXXRYADXXTFSGXXXXXXXXXXXXXXXXGFXLRXXXCYXQXXGXXQXVTGLXVXDXXXPRLPKXXKXXLRLXX | |
| | XXXXKX | |
| TypeIX | YRXFXIXXXXXXXRXIXAPXVXLKXXQXWXXXXXXXXXXXXXXVXGFXXGXXXXXAAXXHXXAXWXXS | 19134 |
| | XDXXXFFXXXXXXXXXXXLXXXGYXXXXXXXXXXXXXXXXXLXQGXPXSPXXSNXXXXXXDXXXXXXXXXXXXXXX | |
| | RYADDXXFSGXXXXXXXXXXXXXXXXXXXXWXXXXXKXXXXXXPXRLKVHGLLVXXXXXXLTKGYRNXXRAXXHXX | |
| TypeX | YXXXPXXXXXXXXRWIEAPXXXLKXXQRXXLXXXXYXXXXXXXAHGFXXGRSIXXNAXXHXGXXXWX | 19135 |
| | XDXXXFFPXXXXXXXXXXXXXXXXXXXXXXXXXXLXXXXXXLPQGAPTSPXLXNLVXXXXDXXLXXXAXXXXXXYT | |
| | RYADDLXFSXXXXXXXXXXXXXXXXXXIXXXXGXXXXXXKXXXXXXXQRQXVTGXVVNXXXXLPXXXRRXLRAXXX | |
| | XXXXX | |
| TypeXI | YXXFXIXKXXGXXRXIXXPXXXLKXXQXXXXXXLXXXXXXXXXXXGFXXXXSXXXNAXXHXXXXXXXN | 19136 |
| | XDLXXFFXXIXXXRXXXXXXXXXXXXXXXXAXXXAXXXXXXXXLPQGAPXSPXXSNXXXXXXDXXLXXXAXXXXXX | |
| | YTRYADDXTXSXXXXXXXXXXXXXXXXXXXXXXXXXXXXXXXXXFXXNXXKXXXXXXXXXXXVTGXXXNXXXNXXR | |
| | XXXXXXXXXXXXXXXX | |
| TypeXII | YXXFXXXKXXGGXRXIXAPXXXLXXXQXXXXXXXXXXXXXXXXAHGFXXXXSXXXNAXXHXXXXXXXX | 19137 |
| | XDXXXFFPXXXXXRVXGXFXXXGYXXXXAXXXAXXXTXXXXXXXXXXXXXXXXXXXXRXLPQGAXXSPXXXNXXXX | |
| | XLDXRLXXXAXXXXXXYTRYADDXTFSXXXXXXXXXXXXXXXXXXXXXXEGFXXXXXKXXXXXXXXXQXVTGXXVN | |
| | XXXXXXRXXXXXXRAXXXXXXXX | |
| TypeXIII | YXXFXXPKXXGGXRXIXAPXXXLXXXQXXXLXXXXXXXXXXXXAHGFXXXXSXXXNAXXHXXXXXXXX | 19138 |
| | XDXXXFFPXXXXXRVXGXFXXXGYXXXXAXXXXLXXTXXXXXXXXXXXXXXXXXXXXRXLPQGAXXSPXXXNXXXX | |
| | XLDXRLXXXAXXXGXXYTRYADDLTFSXXXXXXXXXXXXXXXXXXXXXXEGFXXXXXKXXXXRXXXXQXVTGXWN | |
| | XXXXXXRXXXXXXRAXXXXXXXX | |
| TypeXIV | YXXFXIXKKXGXXRXIXXPXXXLXXXXXXXXXXXXXXXXXXXXXXGFXXXXSXXXNAXXHXXXXXVXN | 19139 |
| | XDLXDFFXSXXXXRXXXXXXXXPXXXXXXXXAXXXXXLCXXXXXXXXXXXXXLPQGXPXSPXXXNXXCXXLDXXLX | |
| | XXAXXXXXXYXRYADDXTFSXXXXXXXXXXXFXXXXXXIXXXXXXXXNXXKTRXXXXXXRQEVTGXXVXXXXNVXX | |
| | XYXXXXRXXLXXWXXX | |
| TypeXV | YXXFXXXKKSGGXRXIXXPXKSLXIXQXKLSQXLYXXYXPXXXVHGXXXXXSIXTNAXXHXXKXFXLN | 19140 |
| | XDIXDFFXSINXGRVRGXFIAXPYXLXXXVATXXAXICCXXNKLPQGAPXSPIXSNLICXXXDXELQXFAXXXXXX | |
| | YTRYADDITXSXXXXXLPXXLXXXXXXXXXXXXLGXELXXIIXXNGFXINXXKXRLXYXXQXQXVTGLXVNXXVNV | |
| | XRKYIRNXXXXLHAWEKX | |
| TypeXVI | YXXFXXXKXXGXXRXIXAPXXXLKXXQXXILXXXLXXVXLXXXAXGFRXXRSIXTNAXXHXXXXXXXK | 19141 |
| | XDXKXFFPSXXXXRVXGXXXXLGYPXXXXXXLTXLXTXXXXLPXGAPTSPXXXNXXXXRXDXRXXXLXXKXXFXYS | |
| | RYADDXXXSSXXXXXXXXIPFFXXIXXXEGFXXNEXKXXIXRXGXRQXXTGXVVNXKXNXXXXEXXXLRAVXXNCX | |
| | XX | |
| TypeXVII | YRXFXXXKXDGXXRXXXXPXXXLKXXQXXXXXXXLXXXXXHPXAXXFXXXXSXXXXAXXHAXXXXXXT | 19142 |
| | XDXXDFFXXTXXXRVXXXXXXXXXXXXXXXXLXXLXXXXXXLPQGAPTSPXLSNXVNXXXDXXXXXXXXXXXXXYT | |
| | RYXDDXXFSWXXXXXPXXFXXXXXXXLXXXGYXXXPXKXXXXXXXXXXPXXTGXXLXXXGXXXXPXXXXXXXXXXX | |
| | X | |

[1074] Table C provides a consensus amino acid sequence for each type of RT identified in Table A.

### EXAMPLES

### Example 1: Retron Engineering

[1075] This example demonstrates that an engineered (or recombinant) retron as described herein can be engineered based on existing sequence information in a sequence database.

[1076] Specifically, retron-like reverse transcriptases (RTs) are first identified from various genomic or metagenomic sequence databases. The identified ncRNA regions of the retrons are then predicted in silico, and/or are determined empirically by, for example, reconstituting the putative retron system in a living cell, to assay for msDNA production.

[1077] Once a particular wild-type retron is identified and confirmed, one or more sequence elements of the retron are modified based on the methods described herein, and/or the associated RT is modified or engineered to enhance the overall activity and/or processivity of the retron. For example, the wild-type retron can be engineered by one or more of the following methods: (a) addition of a heterologous nucleic acid sequence of interest (e.g., a nucleotide sequence encoding an HDR donor template) to the various portions and structures of the msd locus; (b) performing any/all of the structural modifications described herein; (c) optionally linking the engineered retron ncRNA to one or more CRISPR gRNA, e.g., a gRNA linked to the 3′ end of a retron ncRNA, or a gRNA linked to the 5′ end of a retron ncRNA, or a pair of gRNAs linked one to the 3′ end and one to the 5′ end of a retron ncRNA.

[1078] The engineered retron or its encoded ncRNA are optionally linked to a sequence-specific nuclease such as CRISPR/Cas enzyme and/or gRNA, ZFN, TALEN, TnpBs, or IscBs, and the like

[1079] For example, the RT is fused to the CRISPR/Cas enzyme (such as Cas9 or Cpf1) as a N- or C-terminal fusion, optionally further fused to a nuclear localization signal (NLS) at the N- and/or C-terminal of the fusion. The ncRNA or the resulting msDNA after reverse transcription is also linked to a guide RNA (gRNA) at the 5′ or 3′ end, and can be used with the cognate CRISPR/Cas enzyme in the method of the invention.

[1080] In another example, the RT is linked to a DNA-repair modulating biomolecule, such as a HDR promoter and/or an NHEJ peptide inhibitor, as described herein above.

### Example 2: Genome Engineering

[1081] This example demonstrates that the engineered retron can be used to introduce a heterologous nucleic acid sequence (e.g., a targeting DNA donor or template) into a host cell genome (e.g., a human cell).

[1082] First, a targeting DNA is introduced into the msd portion of the engineered retron, as shown in FIG. 3 as a “marker.” The heterologous nucleic acid sequence is designed such that it is flanked by 10-100 or more base pairs of homologous sequence substantially identical/homologous to the genomic sequence at the target site. Thus, the desired edit on the “marker” is in between the homologous sequence arms, and includes an insertion, a deletion, and/or other mutations.

[1083] A sequence-specific nuclease, such as a Cas9 nuclease, forms a complex with a guide RNA that specifically targets a location at or near the desired editing site on the genomic sequence. The nuclease is designed such that it does not cut the target once the edit is properly installed. In this experiment, the Cas9 nuclease is linked to the retron reverse transcriptase (RT) as a fusion protein. The Cas9 gRNA is also linked to the ncRNA or msDNA produced by the engineered retron.

[1084] The engineered retron encoding the sequence-specific nuclease (and the fused RT) as well as the ncRNA (and the linked gRNA) are then introduced into a host cell, such as a human cell.

[1085] The engineered retron is introduced as part of a plasmid for transfection into the cell, or as part of a viral vector (such as an AAV vector) for infecting the cell.

[1086] Alternatively, the transcribed ncRNA (and the linked gRNA) can be formulated in vitro in, for example, the lipid nanoparticle or delivery system of the invention, for direct delivery into the host cell. The sequence-specific nuclease (and the fused RT) can either be separately delivered into the host cell (using transfection of plasmid or infection by AAV, etc.), or delivered with the ncRNA in lipid nanoparticles. For example, the coding sequence (e.g., mRNA) of the Cas9-RT fusion is formulated with the ncRNA in the same lipid nanoparticle, or separately formulated as lipid nanoparticles to be delivered together, either simultaneously or one after another.

[1087] Once present inside the cell, the Cas9-RT fusion is translated by the host cell translation machinery, while the ncRNA is transcribed from the engineered retron (if the ncRNA is not directly delivered into the cell). The RT portion of the fusion proceeds to reverse transcribe the ncRNA and convert it to msDNA, which includes the heterologous nucleic acid sequence as the cargo/donor/template. Meanwhile, double-stranded breaks (DSBs) are generated at the target site by the CRISPR/Cas9 nuclease. The cargo/donor/template sequence is then integrated into the host genome at the target site, via host cell DNA repair (e.g., HDR) after the Cas9 nuclease forms the DSB.

[1088] The cells of interest are then assayed for correct installation of the edit on the heterologous nucleic acid sequence, either through phenotypic changes that occur due to the edit, or by direct DNA sequencing of the target site, or both.

### Example 3: Computational Discovery of Novel Retrons and Phylogenetic Analysis to Increase Retron Diversity for Genome Editing Applications

[1089] Reverse transcriptases (RTs), also called RNA-directed DNA polymerases, are enzymes capable of synthesizing DNA using RNA as a template. Although they are present in the three domains of life and viruses; prokaryotic RTs have been traditionally less explored in comparison with their eukaryotic counterparts. Prokaryotic RTs can be divided into 6 main groups: (1) Group II introns, (2) CRISPR-associated RTs, (3) Diversity Generating Retroelements, (4) Retrons, (5) Abi (Abortive infection) RTs and (6) Unknown Groups of RTs (UG). In the last five years, a burst of research has increased the knowledge about prokaryotic RTs that led to the discovery of novel putative systems with potential antiphage properties, including retrons. In this Example, a systematic search of public databases was performed with the aim of increasing the number and diversity of known retrons for possible use in genome editing applications. As a result, new types of retrons have been identified, and the increase in data has allowed the identification of new associated ncRNAs.

[1090] As a first step in this work, a set of known retron RTs was manually curated, trimmed, and aligned to create suitable input, which was then used to train an HMM model for identifying new retron RTs. Next, this model was applied to existing databases of protein sequences (e.g., nr database from NCBI) to identify potential candidate retron RTs. As a next step, the identified candidates were then grouped by sequence identity and individual representative sequences from each group were chosen. These RT domains of these representative candidates were then aligned, and a phylogenetic tree was built (data not shown). Using information about other known classes of RTs, the full phylogeny was separated into bonafide retron RT candidates and RTs that could belong to other classes (such as group II introns, DGRs, CRISPR-Cas RTs, etc). A new alignment and phylogenetic tree were then constructed from these verified candidates, as shown in FIG. 28. For all sequences in the new alignment, a matrix of the protein neighborhood was built, indicating which proteins were present in the vicinity of the candidate retron RTs. From there, types and subtypes of retrons were defined based on the RT phylogeny and identity of associated effector proteins.

[1091] To predict ncRNAs proximal to the candidate retron RTs, genomic regions proximal to the candidate retron RTs were extracted, aligned, and analyzed for structural covariance using an iterative convergence model.

[1092] ncRNA classification methodology:

[1093] To identify what type of ncRNA a sequence may belong to, sequences can be checked against the covariance model of existing ncRNA types. The Infernal suite (http://eddylab.org/infernal/) provides tools to do this. Briefly, covariance models can be built from structural alignment of known ncRNAs for each type, then collated into a CM database. From there, new sequences can be searched against the databases to verify whether the sequence fits with any of the represented families.

### Example 4: Retron-Mediated Precise Genome Editing: Unique Ability to Produce Donor DNA Template Known as msDNA (Multicopy Single-Stranded DNA) Inside Cells Beyond Current Limit of Insertion Size Using an all-RNA System and in the Presence of Guide RNA Provided in Trans

[1094] Current genome editing methods can efficiently disrupt target genes by inserting and deleting genetic information using programmable nucleases. However, gene disruption that does not discriminate mutant from wild type allele impairs not only mutant allele in pathogenesis but also wild type allele in normal physiology of the organism. In Transthyretin (TTR) induced amyloidosis, for example, mutated TTR alleles cause the disease but non-pathogenic wild type allele plays a role in neuro protection and injury response (1). As a single nucleotide exchange is a dominant variant in TTR (2), the vast majority of pathogenic alleles in human differ from their nonpathogenic counterparts by small modifications that require much more precise editing technologies to correct. Homology-directed repair (HDR) stimulated by nuclease-mediated DNA breaks has been widely used to install precise editing. However, HDR relies on the delivery of exogenous donor DNA, that can trigger strong immune response and has been shown inefficient to deliver universally high abundance in recipients (3). Current therapeutical ex-vivo and in vivo delivery of donor DNA relies on AAV (adeno-associated virus) transduction. However, AAV manufacturing is complicated and expensive. Additionally, AAV has raised safety concerns in 30% of 255 complete or ongoing clinical trials surveyed by meta-analysis (4). RNA delivery in contrast, successfully demonstrated its safety, easier manufacturing and efficacy in two SARS-Covid2 vaccines. Based on this amenability of RNA as a cargo, we searched the system, where donor DNA for precise editing could be generated from delivered RNA within cells.

[1095] Retrons are defined by their unique ability to produce an unusual satellite DNA known as msDNA (multicopy single-stranded DNA) from RNA inside the cell (5). These bacterial elements are involved in phage defense (6) and consist of a non-coding RNA and a reverse transcriptase (RT) that can reverse transcribe non-coding RNA (ncRNA) into msDNA. Their tightly defined sites of reverse transcription enable to insert donor DNA sequences in non-coding RNA substrate. Moreover, their compact size is amenable to deliver along with programmable nuclease in all RNA format. These features place retron an attractive tool for precise genome editing in therapeutic application.

[1096] Independent approach to generate new DNA sequences by reverse transcription in the cell is prime editing and its virus originating RT can achieve up to 44 bp insertion (7). Retron in natural sequence can produce up to 163 nucleotide single strand DNA (8), suggesting that longer insertion in retron mediated editing is feasible. In line with this, newly characterized retron Aco1 could insert 56 bp with 6 bp deletion in EMX1 locus of HEK293T cells in S. pyogenes Cas9 nuclease system.

Evidence of Retron from Different Clades in Precise Editing

[1097] As a first step, over 7,000 retron/retron-like RTs in bacterial genomes were identified and analyzed. Phylogenetic analysis of the over 7,000 retrons produced the phylogenetic tree of FIG. 28 Non-coding RNA gene was searched in the genomic neighborhood of the retron/retron-like RT sequences for conserved RNA secondary structures resembling characterized msr-msd transcripts: self-hybridizing inverted repeat at the ends, hairpin structures in msr and msd, such as those represented by FIGS. 2-27. Using covariance models and consensus structure detection, ncRNAs were identified with a high degree of confidence in certain RTs. To evaluate gene editing applicability of retron across diverse phylogeny, Eco1, Eco3, Eco5, Aco1, RTX3-2042, 6083 v1 and 6943 were selected for further analysis (FIG. 30). Eco1, Eco3 and Eco5 were previously experimentally validated retrons to show msDNA production (9). Aco1 was recently annotated in the literature but has not been experimentally validated as producing msDNA (10). RTX3-2042, 6083 v1 and 6943 are novel retrons.

[1098] A gene editing assay was first performed in plasmid DNA format. Retron elements are assembled in a plasmid, where RT is transcribed under CAG promoter and ncRNA fused with single guide RNA (sgRNA) of Cas9 nuclease under U6 or H1 RNA polymerase III promoter (see FIGS. 31A and 31B). As described in FIGS. 32 and 33, the plasmid was transfected to Cas9 expressing human embryonic kidney 293T (HEK293T) cells via lipofection. Three days after transfection, EMX1 target genomic locus was amplified by PCR and sequences were analyzed by next generation sequencing (NGS). The precise edit assayed is characterized as a 10 bp insertion and a 6 bp substitution and its percentage is calculated by CRISPResso 2 analysis among other editing outcomes. A representative editing outcome is shown in FIG. 35. Eco1 (FIG. 36), Aco1 (FIG. 37), RTX3-2042 (FIG. 38), RTX3-6083 v1 and 6943 (FIG. 39A) showed precise editing efficiency of 0.3%, 0.1%, 0.25%, 0.06% and 0.05% (left graph in FIGS. 36, 37, 38, and 39, respectively). Undesired editing outcome defined as indels that incorporated random nucleotides or deleted sequences near Cas9 cutting site amounted to 50%, 3%, 5%, 2% and 4% (right graph in FIGS. 36, 37, 38, and 39A, respectively). Follow up experiments using the same assay indicated that RTX3_6083v1 and RTX3_6943 generated 3-4 fold more precise edits than Eco1 while indels generated from these two retrons were 2-3 fold lower (FIGS. 39B and 39C). RTX3_2042 showed precise editing at similar frequencies to Eco1 but had more variability than other samples (FIGS. 39B and 39C). These data demonstrated that recently reported (Aco1) and three novel retrons (RTX3-2042, RTX6083 v1, RTX3-6943) enable precise gene editing in human cells, in addition to previously characterized Eco1 (11).

Evidence of Retron-Mediated Gene Editing in all-RNA System

[1099] To establish RNA-based editing system, gene editing assay with two RNA components (RT mRNA and ncRNA fused to sgRNA of Cas9 nuclease) was performed first, in HEK293T cells constitutively expressing Cas9 nuclease. With RT and ncRNA being separated in RNA format, the condition for higher precise editing and lower indels could be easier identified than when they are together in the same plasmid by optimizing the ratio between RT enzyme and its substrate. RT mRNA and ncRNA fused to sgRNA of Cas9 nuclease were produced by in vitro transcription. Following experimental scheme in FIG. 40. Eco1, Eco3 and Eco5 mediated gene editing activities were compared at two different ratios of RT mRNA and ncRNA-sgRNA fusion in Cas9 expressing HEK293T cells. More amount of ncRNA than RT mRNA was transfected to maximize msDNA production for precise gene editing. Results showed precise edits up to 0.4% for Eco3 and as low as 10% indels for Eco3 (FIG. 41). Precise editing frequency in RNA based assay is comparable to that in plasmid-based assay.

[1100] Given that Eco3 produced highest editing, RNA load and RT mRNA: ncRNA-sgRNA fusion ratio was further optimized in Eco3 retron system. To 0.2 or 0.5 μg of RT mRNA, ncRNA-sgRNA fusion was added at ratios of RT mRNA to ncRNA, 1:2, 1:3, 1:4, 1:5, 1:8, 1:10, respectively. 0.5 μg of RT mRNA gave rise to more precise editing than 0.2 μg at any ratio and increasing ncRNA correlated with higher precise editing (FIG. 42, left). Indels was as low as 6% (FIG. 42, right). With two RNA components, precise editing was achieved up to 1% of cell population.

[1101] Next, Cas9 mRNA was added to RT mRNA and ncRNA-sgRNA fusion, making all RNA editing system in HEK293T cells (FIG. 43). At the optimized RNA load and ratio of RT mRNA and ncRNA-sgRNA fusion, the amount of Cas9 mRNA was titrated with Eco3 retron (FIG. 44). Precise editing was observed up to 0.1% of cell population with 0.2 μg of Cas9 mRNA and adding more it did not increase editing efficiency. While the precise editing frequency is an order of magnitude lower than two RNA system, the editing occurred by specific action of Cas9 nuclease and retron, since the absence of either abrogated the precise editing.

[1102] The delivery of all RNA system to cells was also made via lipofection using MessengerMAX reagent (FIG. 45). This approach is more resembling in vivo delivery of therapeutic RNAs loaded in lipid nanoparticle (LNP), in terms of formation of RNA/lipid complexes and cell uptake mechanism. When applied to Aco1 retron system that consists of Aco1 RT mRNA, Aco1 ncRNA-sgRNA fusion, and Cas9 mRNA, precise editing of 56 bp insertion with 6 bp deletion was observed in 0.1% of cell population and the frequency of indels was about 1.5% (FIG. 46). Aco1 retron was recently annotated but has not been experimentally validated yet (10). The precise gene editing mediated by Aco1 strongly suggest that Aco1 retron could produce msDNA inside cells. Moreover, the length of insertion in precise editing exceeds those made by other reverse transcriptase mediated editing (7).

Elevated Retron-Mediated Gene Editing in all-RNA System with sgRNA Spike-In

[1103] In all experiments above, retron ncRNA fused with sgRNA of Cas9 nuclease was used. This fusion RNA serves as a template of RT and at same time sgRNA portion could complex with Cas9 nuclease. Two enzymes acting on a single RNA piece could create steric effects that affect the activity of either enzyme. In line with this hypothesis, frequency of indels that tells overall Cas9 nuclease activity is only about 1.5% with 400 ng of ncRNA-sgRNA fusion (FIG. 46, right).

[1104] To test systematically the hypothesis, Cas9 nuclease activity by frequency of indels was compared between equimolar amounts of ncRNA-sgRNA fusion and separated sgRNA. When electroporated with 200 ng of Cas9 mRNA, 1 μg (7.5 pmol) of ncRNA-sgRNA fusion shows 20-fold lower activity than 0.266 μg (7.5 pmol) of separated sgRNA alone (FIG. 47) The result suggests that ncRNA-sgRNA fusion might inhibit either formation of complex with Cas9 protein or the activity of Cas9-sgRNA complex or both. In addition, chemically modified sgRNA shows 6-fold higher activity than unmodified sgRNA. These results indicate that affected Cas9 cleavage activity by ncRNA-sgRNA fusion could limit precise editing and addition of separated sgRNA could compensate for it. Modification of separated sgRNA is expected to further enhance precise editing.

[1105] FIG. 48 summarizes the assay of sgRNA spike-in in all RNA system and Fig. R. shows the results using Eco3 retron. At 0.2 μg of Cas9 mRNA and 0.5 μg of RT mRNA, the amount of sgRNA spike-in is titrated at 50, 100, and 200 ng (Fig. R, left). The titration was performed at two different ratios of RT mRNA: ncRNA-sgRNA fusion=1:6 or 1:8. With addition of 50 ng of sgRNA spike-in to 1:6 ratio, the precise editing was achieved 40-fold and gradually increased with more sgRNA, reaching up to 50-fold increase at 200 ng. 1:8 ratio of RT mRNA:ncRNA-sgRNA fusion responded similarly to sgRNA spike-in and obtained slightly higher activity than 1:6, up to 13% of precise editing. Higher precise editing with sgRNA spike-in came along with higher indels on the right graph.

[1106] The effect of sgRNA spike-in in precise editing was confirmed using orthogonal delivery method, lipofection (FIG. 50). Although overall amount of RNA to transfect was five times lower than in electroporation, 3.4% of precise editing was obtained without sgRNA spike-in, which is 7.5-fold higher than that achieved by electroporation (FIG. 49 and FIG. 51, left graph). With addition of sgRNA as low as 2 ng, precise editing further increased up to 3.5-fold, reaching 12% efficiency (FIG. 51, left). Increasing the amount of sgRNA up to 10 ng did not further change the efficiency. The precise editing observed is dependent on retron since the absence of retron components (RT mRNA and ncRNA-sgRNA fusion) completely abrogated the editing.

[1107] These data support that physical fusion of ncRNA and sgRNA of Cas9 nuclease could be a limiting factor for Cas9 activity and consequently precise editing and either spike-in of sgRNA demonstrated here or separation of ncRNA and sgRNA would be an improved strategy for efficient precise editing.

Separation of ncRNA and sgRNA

[1108] The impact of separating sgRNA from ncRNA on editing was tested in Eco3 retron system comparing the editing efficiency between ncRNA-sgRNA fusion and separated ncRNA and sgRNA side by side (FIG. 52). Increasing amount of sgRNA was added to 300 ng of ncRNA that is equimolar amount of 400 ng of ncRNA-sgRNA fusion. With no sgRNA added, no precise editing was observed as expected. With 10 ng of sgRNA, precise editing peaked at 2.23% compared to 1.78% obtained with ncRNA-sgRNA fusion (FIG. 52, left). The increasing amount of sgRNA beyond 10 ng did not further improve precise editing. Frequency of indels (FIG. 52, right) showed a similar trend as precise editing.

[1109] These data demonstrates that separation of ncRNA and sgRNA could achieve comparable or even higher precise editing than ncRNA-sgRNA fusion.

### Materials and Methods:

[1110] Mammalian cell culture HEK293T (ATCC CRF-3216) or 293T-Cas9 (Genecopoeia SL502) cells were cultured in Dulbecco's modified Eagle's medium (DMEM) plus GlutaMAX (Thermo Fisher Scientitic), supplemented with 10% (v/v) fetal bovine serum (Gibco). Cells were maintained at 37′C with 5% CO2.

[1111] Genomic DNA extraction After incubation, the media was removed from the cells and genomic DNA was extracted by the addition of prepGEM reagent (Thomas Scientific: PUN0050) directly into each well of the tissue culture plate. Lysed cells were transferred to a 96 well PCR plate and incubated at 72° C. for 10 minutes, followed by 95° C. enzyme inactivation step for 2 minutes.

[1112] High-throughput DNA sequencing of genomic DNA samples Human EMX1 gene locus was amplified from genomic DNA samples and sequenced on an Illumina NextSeq. Briefly, amplification primers containing Illumina forward and reverse adapters were used for a first round of PCR (PCR1) amplifying EMX1 targeting site. 25 μl PCR1 reactions were performed with 0.3 μM of each forward and reverse primer, 1 μl of genomic DNA extract and 12.5 μl of KAPA HIFI HOTSTART PCR master mix. PCR reactions were carried out as follows: 95° C. for 1 minute, then 25 cycles of [98° C. for 20 seconds, 65° C. for 15 seconds, and 72′C for 15 seconds], followed by a final 72° C. extension for 2 minutes. PCR reactions were purified using Ampure XP beads (Beckman Coulter) and eluted in 20 μl H20. Unique Illumina barcoding primer pairs were added to each sample in a secondary PCR reaction (PCR2). Specifically, 25 μl PCR2 reactions were performed with 5 μl of IDT for Illumina UDI primers (Illumina), 1 μl of purified PCR1 reaction, and 12.5 μl of KAPA HIFI HOTSTART PCR master mix. PCR reactions were carried out as follows: 95° C. for 3 minutes, then 10 cycles of [95° C. for 30 seconds, 55° C. for 30 seconds, and 72′C for 30 seconds], followed by a final 72° C. extension for 5 minutes. PCR2 reactions were purified by SequalPrep Normalization plate kit (Thermo Fisher Scientific) and pooled. Size and purity were evaluated by Tape station D1000 assay (Agilent). DNA concentration was measured by fluorometric quantification (Qubit, ThermoFisher Scientific) and libraries were sequenced with 30% PhiX sequencing control on an Illumina NextSeq 2000 instrument using P1 or P2 300 cycle kit. Sequencing reads were demultiplexed and alignment of amplicon sequences to a reference sequence was performed using CRISPresso2. CRISPresso2 was run in HDR mode using the desired allele as the expected allele and precise editing yield was calculated as the number of HDR aligned reads divided by total aligned reads.

[1113] Plasmid based gene editing Plasmids encoding retrons were synthesized by Twist Bioscience. For transfections, 25,000 293T-Cas9 cells (Genecopoeia: SL502) were transfected using Lipofectamine 3000 (Thermofisher: L3000001) according to the manufacturer's protocol. Transfected cells were incubated at 37° C. for 72 hrs before lysis in prepGEM reagent (Thomas Scientific: PUN0050) according to the manufacturer's protocol. A 1 uL aliquot of crude lysate was used as template for amplification of the EMX1 CRISPR target site by PCR. Illumina adaptors and UDIs were added in a second round of PCR before loading onto an Illumina NextSeq. The resulting FASTQ files were used as input for CRISPResso2 which quantified precise editing and indels at the EMX1 locus.

[1114] In vitro transcription Plasmid templates were synthesized by Twist Bioscience. T7 promoter was inserted upstream of RT or ncRNA sequences. Plasmid was linearized by Sbfl-HF enzyme (NEB, R3642S) for 16 hour at 37′C and the linearization was checked by agarose gel electrophoresis. RT mRNA was synthesized for 16 hour at 37′C using HiScribe T7 mRNA kit with CleanCap Reagent AG (NEB, E2080S) and ncRNA using HiScribe T7 High Yield RNA synthesis kit (NEB, 2040S). After DNAse1 treatment, RNA was purified using Qiagen RNeasy midi kit (Qiagen, 75144). RNA concentration was measured by Nanodrop (Thermo Fisher) and purity and size were evaluated by RNA ScreenTape analysis on Tape station (Agilent). RT mRNA was further poly (A) tailed by E. Coli Poly(A) polymerase (NEB, M0276) and purified by Qiagen RNeasy midi kit.

[1115] RNA Transfection by Neon Electroporation system HEK293T (ATCC CRF-3216) or 293T-Cas9 (Genecopoeia SL502) cells were harvested and resuspended in R buffer. 50,000 cells with 1 μl of RNA mixture were electroporated by 10 μl Neon tip at 1150 voltage, 20 pulses. Electroporated cells were gently transferred to 96 well plate (VWR) containing culture media and cultured for 72 hours before genomic DNA extraction.

[1116] RNA Transfection by Lipofectamine MessengerMAX 20,000 HEK293T (ATCC CRF-3216) cells were seeded in 96 well plates. 16-24 hours post-seeding, cells were transfected with 0.3 μl of Lipofectamine MessengerMax (Thermo Fisher Scientific) with appropriate amount of RNA mixture. Cells were cultured for 72 hours before genomic DNA extraction.

Sequences Utilized in Example 4
EMX1 s.p Cas9 gRNA
GAGTCCGAGCAGAAGAAGAA
Eco1 ncRNA + HDR_Template
TGATAAGATTCCGTATGCGCACCCTTAGCGAGAGG
TTTATCATTAAGGTCAACCTCTGGATGTTGTTTCG
GCATCCTGCATTGAATCTGAGTTACTGTCTGTTTT
CCTACAAACGGCAGAAGCTGGAGGAGGAAGGGCCT
GAGTCCGAGCAGAAGAAAAAGTTCTCCCATCACAT
CAACCGGTGGCGCATTGCCACGAAGCAGGCCAATG
GGGAGGACATCGATGTCAAGGAAACCCGTTTCTTC
TGACGTAAGGGTGCGCAT
ACGGAATCTTATCA
Aco1 ncRNA + HDR Template
CCGTAGTGGGAGCCTCAGGCGAGGGTGTGTATCAT
GCCCGTTCTGCCAAGACCCACCAAAGAAGGGCACC
GTGGAGGACAAACGGCAGAAGCTGGAGGAGGAAGG
GCCTGAGTCCGAGCAGAAGAAAAAGTTCTCCCATC
ACATCAACCGGTGGCGCATTGCCACGAAGCAGGCC
AATGGGGAGGACATCGATGTCACCTCCACGGTGC
AATGCGAAAGCAACTTGAGGCTT
TGCTTAGTATGAGGCTCCCACTACGG
RTX3_2042 RT
MKDDQYSQWKKYYESRGILPEIQDKLLNYAKIHID
NNTPVIFNFEHLTLLLGREKNYLSSVVNSPDSHYR
KFKIKKRSGGEREITAPYLSLLEMQYWIYRNILIN
VKIHYAAHGFAQDKSIITNSRNHLGQKHLLKMDLK
DFFPSIKLNRIIYIFKSLGYPNIIAFYLASICSYK
GHLPQGSPTSPILSNIVSITLDNRLVKFARKMKLR
YSRYADDLTFSGDKIPTNYIKYITDIINDEGFEVN
DTKTKLYLKAGKRIVTGISVIGNDPKLPREYKRKL
KQELHYIFTYGIGSHMAKKKIKKINYLYRII
GKVNFWLNIEPDNEYARNAKAKLLLLIDN*
RTX3_2042 ncRNA + HDR_Template
GTTAAGGTGGTTATATTCTAGTATTTATGAAGTGT
AGTCGCTTCGATCGTTAAGGCTGATTTTAACCTCT
GCATAATAATATCGGTAGATATTATTATGCACGCT
CCCTTTAGCAGAGCTAAGAATCGCTCACTCAGGCA
CAAGCTTTGAGGACAAACGGCAGAAGCTGGAGGAG
GAAGGGCCTGAGTCCGAGCAGAAGAAAAAGTTCTC
CCATCACATCAACCGGTGGCGCATTGCCACGAAGC
AGGCCAATGGGGAGGACATCGATGTCACCTCAAAG
CTTGTGCCTGAGTGAGAGCTAAAGAAA
AGAAAAGTAGAATAAGCCACCTTAAC
RTX3_6083v1 RT
MSNPQPTRAEIFERIKQSSKQEVILEEMQRLGFWP
RSEGQPEVAADLIQREGELQRELAELNKKLAVKRN
PERALREMRKQRMKDARDKREVTKRAQAQQRYDKA
LLWHEKRASHVAYLGPGVSASLHENSSATQEQGDK
GKPKRARDRAVPDLQRLTLNGLPALISAAQLAESM
GVSVAELRFLSFHREVARTNHYHSFTLPKKTGGER
LISAPMPRLKRAQYWVLDNVLAKMPAHDAAHGFLA
GRSIISNAKPHAGQDVVINLDVKDFFPSIAFGRIK
GVFRQLGYGESIATVFALLCSENRAQAWQVDGERL
FVGGKARERVLPQGAPTSPMLTNLLCRRMDRRLLG
LAKQLGFVYTRYADDLTFSASGEPARDNVGKLLSR
VRWILRDEGFTPHPDKERVMRKGRRQEVTGLVVNS
DTPSVSRETRRRLRAALHRASQPDAASKPAHWQGH
TAQPSQLLGLATFVHQIDPKQGKTLLADAQQLMRS
PIDRANDAAKSASRADAAQQSFRVLAAAGKPPVLA
DGKNWWQPAPPATPVLEKTDQQRREERQATRRQQA
AAAAPPPSSTRRNERPQQAAHEQQGDAQPQNEAPP
RFDPDQYAPPPRNVMTYWAQIAISFFLGSILHNRL
ITIFAMVAVIALYYMRRQRWDVFMGILVVATLLGY
LVRGMG*
RTX3_6083v1 ncRNA + HDR Template
GCTCCGGAGCAATGAGCAGGCTCTTGCAATCCGGG
CGGTGTTTCGCCGCCCTTGTGAACTGCCGTTTCAT
GCACCACGGGCGCCGTTTTCACTGTGCCACCCCAG
CCACGGTAGTGCTACAAACGGCAGAAGCTGGAGGA
GGAAGGGCCTGAGTCCGAGCAGAAGAAAAAGTTCT
CCCATCACATCAACCGGTGGCGCATTGCCACGAAG
CAGGCCAATGGGGAGGACATCGATGTCAGGGGAGG
ACATCGATGTCAAGCACTACCGTGGCGG
GGTGGCGTCGAGCGAACAGCTCCCGTCCCGTGAGC
CCTACAGGCTCTTCGACGAGATGCACATTGCTCCG
GAGC
RTX3_6943 RT
MEESTNYKLLVWGLSVIQPATPNEVLNYLTSTLND
NGLLPDVEKMIHYFELLDQLGYIHQVSKRNNLYSL
TPRGNERLTPALKRLRDKIRLFMLDNCHSISKLGV
LASTDTENMGGDSPSLQLRHNLKEVPHPSLSWAAG
TLPSSPRQAWVRIYEQLNIGSMSSDEASTPTTARN
APLSFVGRLGFSLNYYSFNKIDEPLFNNDGVTAIA
SCIGISPGLITAMVKSPKRYYRTFNLRKKSGGFRS
ILAPRKFIKTIQYWLKDHVLNRLKIHSSCYSYRSG
VSIKDNAINHVKKKFVASIDISDYFGSINKKMVKD
CFYKNNIPDHIVNTISGIVTYNDVLPQGAPTSPII
SNAILFEFDEEMTAHALTLDCIYTRYSDDISISSD
YKENIAILINIAEANLLSAGFTLNRQKQRIASDNS
RQVVTGILVNESIRPTRCYRKKIRSAFDHALKEQD
GSQLTINKLRGYLNYLKSFETYGFKFNEKKYKETL
DFLIALKQS*
RTX3_6943 ncRNA + HDR Template
GCGGAGTGCTGGCCTCAACTGATACAGAGAATATG
GGCGGTGATTCGCCGTCTTTACAGTTAAGGCACAA
TTTAAAAGAGGTTCCGCACCCAAGCCTGTCTTGGG
CTGCACAAACGGCAGAAGCTGGAGGAGGAAGGGCC
TGAGTCCGAGCAGAAGAAAAAGTTCTCCCATCACA
TCAACCGGTGGCGCATTGCCACGAAGCAGGCCAAT
GGGGAGGACATCGATGTCAGCAGCCCAAGACAGGC
TTGGGTGCGGATCTACGAG
CAATTAAATATTGGTTCGATGTCCAGTGATGAGGC
CAGCACCCGC
Eco1 RT
Coding sequence only. RNA was produced
from a CRO and proprietary 5′ cap,
5′ UTR, 3′
UTR and encoded polyA of around
120 bases were added. Full
substitution with IN-methyl-
pseudouridine)
AUGAAAUCUGCAGAGUAUCUGAAUACGUUCCGCCU
UAGGAAUUUGGGCCUCCCCGUGAUGAACAAUCUCC
ACGAUAUGAGCAAGGCGACUCGAAUAUCCGUGGAA
ACGCUGAGACUGCUCAUCUAUACAGCAGACUUUCG
GUACAGGAUCUACACGGUCGAAAAGAAGGGGCCUG
AGAAACGCAUGCGAACAAUUUAUCAACCUAGCCGA
GAGCUCAAGGCGUUGCAGGGCUGGGUUCUUCGAAA
CAUCCUUGACAAACUCUCAUCAUCACCCUUUAGUA
UUGGGUUUGAAAAGCACCAAAGCAUCCUUAACAAC
GCGACGCCACACAUAGGUGCCAAUUUCAUAUUGAA
CAUCGACUUGGAGGAUUUUUUUCCGAGCCUCACAG
CCAAUAAAGUGUUCGGUGUUUUUCACAGUCUUGGG
UACAAUCGCCUUAUUAGUUCCGUUCUUACCAAGAU
UUGUUGUUACAAGAAUCUCUUGCCCCAGGGAGCAC
CCAGCAGUCCGAAAUUGGCGAAUUUGAUUUGUUCC
AAGCUCGAUUAUCGAAUACAAGGGUACGCGGGCAG
CCGGGGACUCAUCUAUACCCGCUACGCAGACGAUC
UUACGCUGUCUGCCCAAUCAAUGAAGAAGGUCGUA
AAGGCGCGGGAUUUCUUGUUUUCUAUCAUCCCGUC
CGAGGGCUUGGUAAUUAAUUCCAAAAAGACUUGUA
UCUCAGGACCACGAUCUCAGCGAAAAGUGACAGGA
CUCGUCAUUUCUCAAGAAAAAGUCGGUAUAGGGAG
AGAGAAGUAUAAGGAAAUCCGCGCGAAGAUCCACC
ACAUAUUCUGUGGCAAGAGCAGCGAGAUAGAACAC
GUCCGAGGCUGGUUGUCCUUCAUACUGAGCGUGGA
CUCAAAAAGCCACCGCCGGUUGAUCACCUAUAUUU
CAAAACUGGAAAAGAAAUAUGGAAAGAACCCACUC
AACAAAGCUAAAACACCACCAAAGAAGAAAAGAAA
GGUCUGA
Eco1 ncRNA
ncRNA-sgRNA fusion (6 bp
substition in EMX1 gene)
GAAAUGAUAAGAUUCCGUAUGCGCACCCUUAGCGA
GAGGUUUAUCAUUAAGGUCAACCUCUGGAUGUUGU
UUCGGCAUCCUGCAUUGAAUCUGAGUUACUGUCUG
UUUUCCUACAAACGGCAGAAGCUGGAGGAGGAAGG
GCCUGAGUCCGAGCAGAAGAAAAAGUUCUCCCAUC
ACAUCAACCGGUGGCGCAUUGCCACGAAGCAGGCC
AAUGGGGAGGACAUCGAUGUCAAGGAAACCCGUUU
CUUCUGACGUAAGGGUGCGCAUACGGAAUCUUAUC
AGAGUCCGAGCAGAAGAAGAAGUUUCAGAGCUAUG
CUGGAAACAGCAUAGCAAGUUGAAAUAAGGCUAGU
CCGUUAUCAACUUGAAAAAGUGGCACCGAGUCGGU
GCUUUUUUUUUUUU
Eco3 RT
Coding sequence only. RNA was
produced from a CRO and
proprietary 5′ cap, 5′ UTR,
3′ UTR and encoded polyA of
around 120 bases were added.
Full substitution with IN-methyl-
pseudouridine
AUGCGCAUUUACUCUCUGAUCGACAGCCAAACCUU
AAUGACCAAAGGGUUCGCAUCCGAGGUCAUGAGGA
GCCCAGAACCCCCUAAGAAGUGGGACAUUGCGAAG
AAGAAGGGCGGAAUGCGUACGAUAUACCAUCCCUC
UUCUAAGGUGAAGCUGAUACAGUACUGGCUGAUGA
ACAACGUGUUCUCCAAAUUGCCGAUGCACAACGCC
GCGUACGCUUUCGUGAAGAAUAGAUCUAUCAAGUC
UAACGCACUGCUGCACGCAGAGAGUAAGAACAAAU
ACUACGUUAAGAUUGACCUGAAGGACUUCUUUCCA
AGCAUCAAGUUCACAGACUUCGAAUAUGCCUUUAC
CCGGUACCGUGACAGAAUAGAGUUCACGACCGAGU
ACGACAAAGAACUGCUUCAGCUGAUUAAGACCAUU
UGUUUCAUUUCUGACUCUACACUGCCAAUAGGCUU
CCCCACUUCCCCUCUUAUAGCCAAUUUCGUCGCCA
GGGAGCUGGACGAGAAGCUCACUCAGAAGCUGAAC
GCUAUAGACAAGCUCAACGCUACGUACACUCGCUA
CGCAGACGACAUAAUCGUGAGCACGAACAUGAAGG
GCGCCUCUAAGCUGAUCUUAGACUGCUUCAAGCGG
ACCAUGAAGGAAAUCGGACCCGAUUUCAAGAUCAA
UAUCAAGAAGUUCAAAAUAUGCUCUGCCAGUGGCG
GCUCAAUUGUCGUGACGGGCCUUAAGGUCUGUCAU
GACUUCCACAUAACUCUGCACCGGUCUAUGAAGGA
CAAGAUCCGCCUGCACCUCUCUCUCCUGUCCAAAG
GUAUUCUGAAGGACGAGGACCACAACAAGCUGUCC
GGGUACAUCGCCUACGCUAAGGACAUCGAUCCACA
CUUCUACACCAAGCUCAAUAGGAAGUACUUCCAGG
AGAUCAAGUGGAUACAAAACCUGCAUAAUAAGGUG
GAGCCACCAAAGAAGAAAAGAAAGGUCUGA
Eco3 ncRNA
ncRNA-sgRNA fusion (10 bp
insertion in EMX1 gene)
GAAAUGAUAAGAUUCCGUAAGAGCCAAACCUAGCA
UUUUAUGGGUUAAUAGCCCAUCGGGCCAUGAGUCA
UGGUUUCGCCUAGUAUUUUAGCUAUGCCCGUCGUU
CAGUUCGCUGAACAAACGGCAGAAGCUGGAGGAGG
AAGGGCCUGAGUCCGAGCAGAAGAAUUACGUCUGC
AAAGUUCUCCCAUCACAUCAACCGGUGGCGCAUUG
CCACGAAGCAGGCCAAUGGGGAGGACAUCGAUGUC
AUCAGCGAACUGAUCGACGUGCUCAAGUAGGUUUG
GCUCUUACGGAAUCUUAUCAGAGUCCGAGCAGAAG
AAGAAGUUUCAGAGCUAUGCUGGAAACAGCAUAGC
AAGUUGAAAUAAGGCUAGUCCGUUAUCAACUUGAA
AAAGUGGCACCGAGUCGGUGCUUUUUUUUUUUU
Eco5 RT
Coding sequence only. RNA was
produced from a CRO and
proprietary 5′ cap, 5′ UTR,
3′ UTR and encoded polyA of
around 120 bases were added.
Full substitution with IN-methyl-
pseudouridine
AUGGACGCUACCAGAACGACUCUCCUUGCAUUGGA
UCUCUUCGGAUCUCCAGGUUGGUCCGCCGAUAAAG
AAAUUCAGAGGCUUCAUGCGCUCAGUAAUCAUGCU
GGAAGGCAUUACAGAAGGAUUAUAUUAAGUAAAAG
GCACGGCGGACAGCGUCUUGUGCUUGCACCUGAUU
ACUUGUUAAAGACCGUUCAGCGCAACAUUUUGAAG
AACGUUUUGAGUCAAUUUCCACUGUCACCAUUUGC
UACAGCCUACAGACCGGGAUGCCCAAUCGUGUCUA
ACGCGCAGCCACACUGCCAACAGCCACAGAUCUUG
AAACUCGAUAUAGAAAACUUCUUCGAUUCUAUUAG
UUGGUUGCAGGUGUGGCGGGUGUUUCGCCAGGCCC
AGUUGCCCCGAAAUGUCGUAACGAUGCUCACUUGG
AUAUGUUGUUAUAACGACGCACUUCCGCAGGGUGC
CCCUACAUCCCCUGCAAUUUCCAAUCUCGUCAUGA
GAAGGUUUGAUGAACGGAUUGGAGAAUGGUGUCAG
GCUCGAGGGAUUACCUACACUCGCUACUGCGAUGA
CAUGACGUUUAGUGGACACUUCAAUGCAAGGCAGG
UCAAGAAUAAAGUCUGCGGUCUCUUAGCUGAGCUG
GGCCUUUCCCUGAAUAAACGGAAAGGCUGCCUCAU
AGCGGCUUGUAAGCGCCAGCAAGUCACCGGCAUUG
UUGUGAAUCACAAGCCACAGCUUGCCCGAGAAGCC
AGGCGUGCCCUGCGUCAGGAAGUGCACCUGUGCCA
GAAAUAUGGAGUUAUCUCUCAUCUCUCACAUAGAG
GUGAACUGGAUCCUAGCGGAGAUCUGCACGCUCAG
GCGACAGCGUAUCUCUAUGCACUCCAGGGGAGAAU
UAACUGGCUUCUUCAAAUUAACCCUGAGGAUGAGG
CGUUUCAACAGGCCCGGGAGUCCGUUAAGAGGAUG
UUAGUUGCCUGGCCACCAAAGAAGAAAAGAAAGGU
CUGA
Eco5 ncRNA
ncRNA-sgRNA fusion (10 bp
insertion in EMX1 gene)
GAAAUGAUAAGAUUCCGUACGCCAGCAGUGGCAAU
AGCGUUUCCGGCCUUUUGUGCCGGGAGGGUCGGCG
AGUCGCUGACUUAACGCCAGUAGUAUGUCCAUAUA
CCCAAAGUCGCUUCAUUGUAACAAACGGCAGAAGC
UGGAGGAGGAAGGGCCUGAGUCCGAGCAGAAGAAU
CCUUCGAGCAAAGUUCUCCCAUCACAUCAACCGGU
GGCGCAUUGCCACGAAGCAGGCCAAUGGGGAGGAC
AUCGAUGUCAUACAGUUACGCGCCUUCGGGAUGGU
UUAAUGGUAUUGCCGCUGUUGGCGUACGGAAUCUU
AUCAGAGUCCGAGCAGAAGAAGAAGUUUCAGAGCU
AUGCUGGAAACAGCAUAGCAAGUUGAAAUAAGGCU
AGUCCGUUAUCAACUUGAAAAAGUGGCACCGAGUC
GGUGCUUUUUUUUUUUU
EMX1 sgRNA modified
Contains chemical modifications
from Synthego: 2′-F, 2′-O-methyl,
phosphorothioates
GAGUCCGAGCAGAAGAAGAAGUUUCAGAGCUAUGC
UGGAAACAGCAUAGCAAGUUGAAAUAAGGCUAGUC
CGUUAUCAACUUGAAAAAGUGGCACCGAGUCGGUG
CUUUUU
EMX1 sgRNA unmodified
No modifications
GAGUCCGAGCAGAAGAAGAAGUUUCAGAGCUAUGC
UGGAAACAGCAUAGCAAGUUGAAAUAAGGCUAGUC
CGUUAUCAACUUGAAAAAGUGGCACCGAGUCGGUG
CUUUUU

### REFERENCES

[1117] [1] Are we creating a new phenotype? MF, Dohrn. 2021, Neurological Research and Practice.
[1118] [2] Val50Met hereditary transthyretin amyloidosis:not just a medical problem but a psychosocial burden. J, Gonzalez-Moreno. s.l.: Orphanet Journal of Rare Diseases, 2021, Vol. 16.
[1119] [3] synthetic DNA delivery systems. D, Luo. 2000, Nature Biotechnology, pp. 33-37.
[1120] [4] rAAV immunogenicity, toxicity, and durability in 255 clinical trials: A meta-analysis. W, Shen. 2022, Frontiers in Immunology.
[1121] [5] Reverse transcriptase associated with the biosynthesis of the branched RNA-linked msDNA in myxococcus xanthus. S, inouye. s.l.: Cell, 1989, Vol. 56. 709-717.
[1122] [9] Bacterial retrons function in anti-phage defense. A, Millman. s.l.: Cell, 2020, Vol. 183. 1551-1561.
[1123] [7] Search-and-replace genome editing without double-strand breaks or donor DNA. AV, anzalone. 2019, Nature, pp. 149-157.
[1124] [8] Branched RNA covalently linked to the 5′ end of a single-stranded DNA in Stigmatella aurantiaca. T, Furuichi. 1, s.l.: Cell, 1987, Vol. 48. 47-53.
[1125] [9] Retrons and their applications in genome engineering. A J, Simon. 21, s.l.: Nucleic Acids Research, 2019, Vol. 47.
[1126] [10] Systematic prediction of genes functionally associated with bacterial retrons and classification of the encoded tripartite system. MR, Mestre. 22, s.l.: Nucleic Acids Research, 2020, Vol. 48.
[1127] [11] Precise genome editing across kingdoms of life using retron-derived DNA. SC, lopez. 2, s.l.: Nature Chemical Biology, 2021, Vol. 18.

### Example 5: Improved ncRNAs Generated by Transcription from Template Linearized Plasmid Having Blunt Ends Show Higher Precise Editing Efficiency

[1128] Previously made in vitro transcription experiments to produce ncRNA used a double-stranded DNA template containing a 3′ overhang (on same strand as T7 promoter sequence). A new template with a blunt end was designed and tested. See FIG. 52. As shown in FIG. 53, four RNAs (cas9 mRNA, Eco3 RT mRNA, gRNA targeting EMX1 locus and ncRNA) were transfected into 293T cells using MessengerMAX lipofection reagent. Cells were harvested after 3 days, genomic DNA isolated, the EMX1 locus amplified, the Illumina libraries produced and sequenced on NextSeq. The percent of precise edits improves more than 5-fold for ncRNA produced using blunt end template as compared to the precise editing by ncRNA produced using overhang template.

### Example 6: Improved ncRNAs with MS2 Hairpin

[1129] Additional elements can be added to the ncRNA by encoding them on the plasmid template. FIG. 53 shows a modified Eco3 ncRNA that comprises an MS2 stem loop hairpin structure added to its 3′ end. As shown in FIG. 54, the precise editing of ncRNA comprising the 3′ MS2 structure resulted in nearly 15-fold increase in precise editing compared to an ncRNA generated from a overhang template, and nearly 3-fold increase in precise editing compared to an ncRNA generated from a blunt end template.

### Example 7: Modified ncRNAs with Caps and/or Tails

[1130] ncRNA performance can be modified by adding a cap structure to the 5′ end and/or adding a poly(A) tail at the 3′ end, as depicted in FIG. 55. As shown in FIG. 56, using ncRNA with either or both protection by cap and tail lowered indels as compared uncapped/untailed ncRNAs. In this experiment, a 4 component all-RNA system (RT mRNA+Cas9 mRNA+ncRNA-sgRNA+sgRNA) was delivered to HEK293T cells by Lipofectamine MessengerMAX. All RNA was transfected at a fixed amount RT mRNA 100 ng, ncRNA-sgRNA 400 ng, Cas9 mRNA 100 ng, and sgRNA 5 ng. ncRNA-gRNA fusion was either capped (+cap −tail) or poly-A tailed (−cap +tail) or both capped and poly-A tailed (+cap +tail). Using RNA without end protection (−cap −tail) produced ˜4.5% precise edits and the editing was dependent on retron since the absence of RT abrogated precise editing. Using RNA with either or both protection by cap and tail produced lower precise editing (left graph) but lowered indels (right graph) than without cap and tail.

1. A gene editing system comprising one or more delivery vehicles, wherein:
the delivery vehicle(s) comprise RNA cargo,
said RNA cargo comprises (a) at least one mRNA molecule encoding (i) a nucleic acid programmable nuclease and (ii) a retron reverse transcriptase, (b) an engineered retron ncRNA, and (c) guide RNA for the programmable nuclease,
each delivery vehicle contains (a)(i) and/or (a)(ii) and/or (b) and/or (c),
whereby one delivery vehicle or more than one delivery vehicle delivers (a)(i), (a)(ii), (b), and (c).

2. The gene editing system of claim 1, wherein (a)(i) and (a)(ii) comprise a single mRNA molecule encoding the nucleic acid programmable nuclease and the retron reverse transcriptase.

3. The gene editing system of claim 2, wherein (a)(i) and (a)(ii) are encoded and expressed as a fusion protein.

4. The gene editing system of claim 3, wherein the fusion protein comprises the C-terminal end of the nucleic acid programmable nuclease fused to the N-terminal end of the retron reverse transcriptase (nuclease:RT fusion).

5. The gene editing system of claim 3, wherein the fusion protein comprises the N-terminal end of the nucleic acid programmable nuclease fused to the C-terminal end of the retron reverse transcriptase (RT:nuclease fusion).

6. The gene editing system of claim 1, wherein (a)(i) and (a)(ii) comprise a first mRNA molecule encoding the nucleic acid programmable nuclease and a second mRNA molecule encoding the retron reverse transcriptase.

7. The gene editing system of claim 1, wherein (c) is separate from (a)(i), (a)(ii) and (b) or is provided in trans.

8. The gene editing system of claim 1, wherein (b) the engineered retron ncRNA, and (c) the guide RNA are fused or are provided in cis.

9. The gene editing system of claim 8, wherein the guide RNA is fused to the 5′ end of the retron ncRNA.

10. The gene editing system of claim 8, wherein the guide RNA is fused to the 3′ end of the retron ncRNA.

11. The gene editing system of claim 8, wherein the engineered ncRNA comprises a first guide RNA fused to the 5′ end of the retron ncRNA, and a second guide RNA fused to the 3′ end of the retron ncRNA, and the first and second guide RNAs target different sequences.

12. The gene editing system of claim 1, wherein the one or more delivery vehicles comprise a liposome or a lipid nanoparticle (LNP).

13. The gene editing system of claim 1, wherein (a) the at least one mRNA molecule encoding (i) the nucleic acid programmable nuclease and (ii) the retron reverse transcriptase, and (b) the engineered retron ncRNA are in the same delivery vehicle.

14. The gene editing system of claim 1, wherein the (a) the at least one mRNA molecule encoding (i) the nucleic acid programmable nuclease and (ii) the retron reverse transcriptase, and (b) the engineered retron ncRNA are in separate delivery vehicles.

15. The gene editing system of claim 1, wherein the nucleic acid programmable nuclease and the retron reverse transcriptase are encoded on separate mRNA molecules and those separate mRNA molecules of (a)(i) and (a)(ii) are contained in the same delivery vehicle.

16. The gene editing system of claim 1, wherein the nucleic acid programmable nuclease and the retron reverse transcriptase are encoded on separate mRNA molecules and those separate mRNA molecules of (a)(i) and (a)(ii) are contained in different delivery vehicles.

17. The gene editing system of claim 1, wherein the engineered retron ncRNA includes a sequence of interest encoding a donor polynucleotide comprising an intended edit to be integrated at a target sequence in a cell, and wherein the donor polynucleotide is flanked by a 5′ homology arm that hybridizes to a sequence 5′ to the target sequence and a 3′ homology arm that hybridizes to a sequence 3′ to the target sequence.

18. The gene editing system of claim 1, wherein the nucleic acid programmable nuclease comprises a Cas9 nuclease, a TnpB nuclease, or a Cas12a nuclease.

19. The gene editing system of claim 18, wherein the nucleic acid programmable nuclease comprises a Cas9 nuclease.

20. The gene editing system of claim 1, wherein the retron reverse transcriptase has an amino acid sequence of Table A, or an amino acid sequence having at least 90%, 95%, 99%, or 100% sequence identity with any amino acid sequence of Table A.

21. The gene editing system of claim 1, wherein the engineered retron ncRNA comprises:
A) a pre-msr sequence having a first complementary region of the retron ncRNA;
B) an msr sequence including an msr stem-loop structure;
C) an msd sequence including an msd stem-loop structure and a sequence of interest, wherein said msd sequence templates a single strand DNA product (RT-DNA) in the presence of the retron reverse transcriptase; and
D) a post-msd sequence having a second complementary region, wherein the first and second complementary regions form an a1/a2 duplex region of the retron ncRNA,
wherein the msr stem-loop structure, the msd stem-loop structure, or the a1/a2 duplex comprise a modification which result in increased editing efficiency in the presence of a nucleic acid programmable nuclease that associates with the one or more guide RNAs, and
wherein optionally one or more of the guide RNAs of (c) are coupled to the pre-msr sequence, the post-msd sequence, or both the pre-msr sequence and the post-msd sequence.

22. The gene editing system of claim 21, wherein the sequence of interest encodes a donor polynucleotide comprising an intended edit to be integrated at a target sequence of a cell, wherein the donor polynucleotide is flanked by a 5′ homology arm that hybridizes to a sequence 5′ to the target sequence and a 3′ homology arm that hybridizes to a sequence 3′ to the target sequence.

23. The gene editing system of claim 21, wherein the ncRNA has a nucleotide sequence of any sequences of Table B, or a nucleotide sequence having at least 90%, 95%, 99%, or 100% sequence identity with any sequence of Table B.

24. An isolated cell comprising the gene editing system of claim 1.

25. The isolated cell of claim 24, wherein the isolated cell is a mammalian cell.

26. The isolated cell of claim 25, wherein the mammalian cell is a human cell.

27. A composition comprising:
a) the gene editing system of claim 1; and
b) a pharmaceutically or veterinarily acceptable carrier.

28. The composition of claim 27, wherein the delivery vehicle is a lipid nanoparticle comprising:
a) one or more ionizable lipids;
b) one or more structural lipids;
c) one or more PEGylated lipids; and
d) one or more phospholipids.

29. The composition of claim 28, wherein the one or more ionizable lipids comprises an ionizable lipid set forth in Table 2.

30. A method of genetically modifying a cell comprising:
contacting the gene editing system of claim 17 with the cell, thereby delivering the RNA cargo to the cell,
wherein:
the nucleic acid programmable nuclease forms a complex with the guide RNA, wherein said guide RNA directs the complex to the target sequence,
the nucleic acid programmable nuclease creates a double-stranded break in in the target sequence,
the retron reverse transcriptase and engineered retron ncRNA create RT DNA that comprises the donor polynucleotide, and
the donor polynucleotide becomes integrated at the target sequence.

The application's sequence listing, which the Patent Office published only in electronic form, follows.

SEQUENCE LISTING (19108 sequences)

SEQ ID NO: 1 - protein, 486 aa, Phocaeicola salanitronis
  source 1..486: note = Related to NC_015164.1
MDKTEIVQIASQMSTREDLLALLNRIKQDEIRESGFDADKFYPFTMKQLLYYCNPNHAFHRYRQFKIKKKSGGFRLITTPRNRSFMMLLRSVNEILKAIYTPSDYAMGFTEKRSVVTNAAVHRNQNYVFNIDLKDFFPSVEQGRVMKRLTLEPFNFSPQIALLISGLCSMRVKREQPLETKRYDLDKQFMYVLPQGAPTSPVITNTICDTLDRRLAGLAKRFGLRYTRYADDITFSSMHYVYSKNSEFIKELIRIINTQGFMINEAKTRLQKLGSRQEVTGIIVSDKLNVTKKYVREIRSLLYIWDKYGYSAAMSRFFPKYKAEKGHIKKGNPELTNVLDGKLLYLKMVKGDTDSVYIKLYTKFQELVNRDSGPDKTNSYGISYIESFPILEFEKDKNTNITIFHKDGNKRYATFRMGETHQVASINKDVTPDDEQQKEKLAISCCKNFRGEQFWLIHLLDKVTVFKPKPVDIDELNNDLDLLLGI

SEQ ID NO: 2 - protein, 486 aa, unidentified
  source 1..486: note = Related to JAFSKF010000035.1; note = Bacteroidales bacterium
MDKTQIAQIASQMSTREDLLALLNRIKQDEIRDLGFDTDKFYPFTMKQLLYYCNPNHAFHRYRQFKIKKKSGGYRQITAPRNQSFMILLQSVNEILKSIYTPSEYAMGFTENRSVVTNAAVHRAQNYVFNIDLKDFFPSVEQGRVMKRLTLAPFNFSPQIALAVSGLCSMRVKREQPLETKQHDLDKQFMYVLPQGAPTSPIITNMICDTLDRRLAGLAKRFGLCYTRYADDITFSSMHYVYSEKGEFRNELARIISTQGFVINEAKTRLQKLGSRQEVTGVIVSEKLNVTKKYVREIRSLLYIWDKYGYSAAMSKFYPKYKAEKGHVKKGNPDLTNVLDGKLMYLKMVKGDDDSVYVRLYTKFQELVNRDTGSDKTNSYGITYVETMPLMKFEKDKNTNIIISQKDVNKRYATFELGKVHQIASINKAVTPEDEQHKEKLAISYCRNPKGELFWLIHLLDKATTFKGKPVDVDELNNDLDALLST

SEQ ID NO: 3 - protein, 486 aa, unidentified
  source 1..486: note = Related to JAFZXH010000011.1; note = Bacteroidaceae bacterium
MDKTQIAQIASQMSTREDLLALLNRIKQDEIRELGLDADKFYPFTMKQLLYYCNPNHAFHRYRQFKIKKKTGGYRQIDAPRNKSYMMLLKTVNEVLKSIYIPSTYAMGFTEKRSVVTNATVHKGQNYVFNIDLKDFFPSVEQGRVMKRLTLSPFLFSPEIALLISGLCSMRVKREILVEDKKHDLDKQFLYVLPQGAPTSPIITNMICDTLDRRLAGLAKRFGLHYTRYADDITFSSMHHVYSKEGEFRKELERIIESQGFTMNDKKTRLQKLGSRQEVTGIIVSDKLNVTRKYVREIRSLLYIWEKYGYTTAMSRFYPKYIAEKGHVKKVNPDMTNVLDGKLMYLKMVKGDSDSVYINLYTKFQELVARDSGSEKTNSYGLTYIESVPLLKFEKDKKTNVTISKKDGNKRYATFKLGEVHQIATINKAVTPDDELHKEKLVISYCRNPKGETFWLIHLLDKVTTFKPYPVNIDELNNDLDSLLST

SEQ ID NO: 4 - protein, 486 aa, Prevotella corporis
  source 1..486: note = Related to NZ_KQ957209.1
MDKTQITQIASQMSTREDLLALLNRIKQDEIRELGYDTDKFYPFTMKHLLYYCNPNHVFHRYHQFKIKKKSGGFRQITAPRNQSFMMLLQTVNEILKAMYSPSDYAMGFTEERSVVTNASVHKGQNYVFNIDLKDFFPSVEQRRVLKRFGAKPFNFNPEIALLLSGLCSMRVKREQADETQTHDLDKEFVYVLPQGAPTSPIITNMICDTLDRRLAGLARRFGLRYSRYADDITFSSMHYVYAEKGEFRKELARIIGSQGFTINDTKTRLQKRGSRQEVTGIIVSDKLNVTKKYVREIRSLLYIWEKYGYSATMAKFLPKYKAEKGHVKKGNPDLTNVLDGKLMYLKMVKGESDIVYARLFEKFQQLVARDSGGDKKNPYGITYMETVPLLKFEQDKNTEVAIFHKEEGKRYATFEFNGVKQVVSINKDVSQNDEMQKEKLAISNCRNPKGEQFWLIHLVNKVTVYNLKPVDIDELNNDLDSLLST

SEQ ID NO: 5 - protein, 481 aa, unidentified
  source 1..481: note = Related to JAFWZP010000094.1; note = Bacteroidales bacterium
MDKAQIVQIASQMSTREDLLALLNSIKQDEISKSCSDGDKFYPFTMKHLLYYCNPNHVFHRYRKFRIKKKSGGFRQITSPRNRSFMMLLQSVNEILKAMYTPSDYAMGFTEKRSVVTNARIHQGQNYVFNIDLKDFFPSVEQPRIWKRLQLAPFNFPISIANVLAGLCSMREVRKDIDGKDVFVYVLPQGAPTSPIITNMICDTLDRRLVGLAKRFGLHYSRYADDITFSSMHYVYAKNGEFRKELIRIIKSQGFTINEEKTRLQKQGSRQEVTGIVVSESKLNVPKKYVREIRSLLYIWEKYGYSVAMSRFLPKYKLEKGHVKKGNPDLINVLEGKLMYLKMVKGDMDPVYVRLYSKFQELVAKDFSLNKTNSYGITYIETIPLLKFEEDNNTNVIIHLKDCNKRYAVFKLGGINQFASINKNVPSDYEQQKEKLGISNCRNSKGKQFWLIHLVDKVIVQNSNMVDIDELNNDLNLLLDI

SEQ ID NO: 6 - protein, 482 aa, unidentified
  source 1..482: note = Related to JAFSTV010000046.1; note = Bacteroidales bacterium
MDKNQIAQVANQIQEREDLLSLLNKIRKDIVGDNGSESKFFPFTMKHLLYYCNPNHTFHRYTQFKIKKKSGGFRLITSPRNSSYMFLLQSLNELLKSMYTPAQSAMGFTEGRSVVTNANVHKGQNYVFNLDLKDFFPSIEQPRIWKRLQLAPFNFPSSIANVIAGLCSMKETRTDTTGNDVVTYVLPQGAPTSPIITNMICDTLDRRLLGLSKRFGLRYTRYADDITFSSMHYVYAKDGVFRKELTRIIESQGFTINEAKTRLQKLGSRQEVTGIIVSDKLNVSKKYIRNIRNLLYIWERYGYSVAMSRFLPKYRADKGHVKKGTPNLINVLDGKLMYLKMVKGEFDSVYVRLHDKFQELVKRDFGAEKTNSLGITYIDTKPLLEFEKEMQTTISFQHKKNEKRAASFLIEGITHCASVNKNVTPDSEQQKEKLSISNCQNEKGEQFWLIHLVDKKTVFKSKPVDIDELNKDLDSLLNTYNG

SEQ ID NO: 7 - protein, 487 aa, Phocaeicola dorei
  source 1..487: note = Related to VVZB01000003.1
MDKKQIVKQASQLKSKEDLLNLLNRIKRDEIEEMGFDAFKFHPFTMRHLNYYCNPNNVFHRYRQFHIKKKSGGSRVITAPRNRSFMMMLQAVNEILKAIYSPSDYAMGFTEGRSVVTNATIHKGQNYIFNIDLKDFFPSVEQSRVWKRLQLKPFNFSKQMANIIAGLCSMRQVKDVIDETKEHNNDKKFKYVLPQGSPVSPIITNMICDTLDRRLAGLARRFGLHYSRYADDITFSSMHYVYASNGKFRTELCRLITEQGFTINEDKTRLQKLGARQEVTGIIVSQKLNVTKEYVRDIRSILYIWDRYGYTAAIAQFLPKYTAAKGHVKKGNPDLQNVIDGKLMYLKMVKGDEDSVYTRLYSKFQSLIQRDTSSEKTNSYGISYVETTTVSKFEQINKTTINFVQDGDGKRHAEFTLGGKKQYATFMTIVKTDEIKDNLAISNCRNPKGEMFWLIHKVDKVTVPAKPIINIDELNNDLDTLLNLPHG

SEQ ID NO: 8 - protein, 486 aa, Phocaeicola sp.
  source 1..486: note = Related to NZ_JADNRM010000003.1
MDKKQIVKQVSQIKSKEDLLNLLNCIKRDELEEMGFDASKFHPFTIRHLNYYCNPNNVFHRYRQFHIKKKSGGTRVITAPRNRSFMMMLQAVNEILKALYSPSDYAMGFTEGRSVVTNATIHKGQNYVFNIDLKDFFPSVEQFRVWKRIQLKPFNFPKQIANIVAGLCFMRQVRNVIDETKEHDNDKKFKYVLPQGSPVSPIITNMVCDTLDRRLAGLARRFGLHYSRYADDITFSSMHYVYAPNGKFHTELYRLITEQGFIINKDKTRLQKLGSRQEVTGIIISQKLNVTKKYVRDIRNILYIWDRYGYTTAISKFLPKYKAAKGHVKKGNPDLQNVIDGKLMYLKMVKGDEDSVYVKLYTKFQELVNRDSSSDKTNSYGITYIESLPFLKFEKDKNTIITIHHKDCNKRYATFKIGETTQIVSINKSVTPDDEQQKEKLAISYCRDSKGERFWLIHLVDKMTEFKPKPVDIDELNNDLDLLLSI

SEQ ID NO: 9 - protein, 484 aa, unidentified
  source 1..484: note = Related to BK014950.1; note = Myoviridae sp.
MDKKQIVKQASQLNSKEDLLNLLNRIKRDEIEEMGFDASKFHPFTMRHINYYCNPNNVFHRYRQFHIKKKSGGTRIITAPRNRSFMMILQAVNEILKAIYTPSDYAMGFTEGRSVVSNATIHKGQNYVFNIDLKDFFPSVEQFRVWKRLQLKPFNFPKQIANIIAGLCSMRQTREIIDETKEHKNDKRYKYVLPQGSPVSPIITNMICDTLDRRLAGLAHRFGLCYSRYADDITFSSMHYVYAPNGKFRTELCRIISDQGFTLNEDKTRLQKVGARQEVTGIIVSKKLNVTKKYVRDIRNILYIWDRYGYTAAIAKFLPKYKAAKGHVKKGNPDLQNVIDGKLMYLKMIKGEEDSVYIKLYTKFQSLVNRDTSLDKTNTYGISYVETTPILKFEHTNGTIVVFVHDEGGKRHAEFILGEKKQYATIMSVVKTEEVKENLAISNCRNSNGEMFWLIHSLDKVTTFKPEPVDIDELNNDLDLLLST

SEQ ID NO: 10 - protein, 479 aa, Prevotella sp.
  source 1..479: note = Related to JAFWQO010000014.1
MDRTEITKMAMQMKTKEDLLSLLNLIKRAELEEIGLQDQFHPFTMKHINYYCNPNNAFHRYRQFKVKKKSGGFRLITTPRNRSFMMVLSAINELLKSLYTPSDYAMGFSEGRSVVSNASIHKGQNYVFNIDLKDFFPSIEQPRVWKRLQLAPFNFPEKIASLIAGMCSMKEIRSFEDGHQETFYVLPQGAPTSPIITNMICDTLDRRLAGLAKRFGLHYSRYADDITFSSMHYVYQEDGDFRKELRRIIADQHFTINDDKTRLQKKGARQEVTGIIVSDKLNVTQKYVRDVRNILYIWNRYGYPSALAKFIPKYKEEKGHVKKGNPNLENVIDGKLMYLKMVKGEEDSVYQRLHNKFVTLVEKMKEKSITTEQKVTYIETWALLEFEKKYSTEVVITTSENSHRYAHFIFGSKKAKASVNKNIIPDEEKDKKQLAISLCIDGKGDTFWFVHRIDKVIVPKKTEVDIDELNNDLNLLLNI

SEQ ID NO: 11 - protein, 534 aa, Prevotella bryantii
  source 1..534: note = Related to FNHC01000010.1
MLFLLCYDVFMLYIICYIYIKKIVSGWDLSRPLINIFERRRQMDKEQIRQTALQMKTREDLLTLLNRIKRDEMEKLDFADKFHPFTAKHMNYYCNPKNAFHRYRQFKIKKKSGGFRQIMAPRNRSFMFMLDCLNEVLKAVYTPSQYAMGFTEGRSVVLNASKHKGANYVFNIDLKDFFPSIEQPRVWKRLQLQPFNFPVPVASAIAGLCCMKETREMSDGTKKDFYVLPQGAPTSPIITNMICDKLDHRLGGLARRFGLNYTRYADDITFSSMHNVYQENSEFRKELARIIGNQGFTMNEQKTRLLKRGSRQEVTGITISDRLNVSQKYVRDIRNILYIWEKYGYAVAYSKFLPKYKEEKGHVKKGNPDLMNVIDGKLMYLKMVKGKEDSVYKRMYAKFQILVEKSYDIKKTNEKNITYIETTPLLEFEKKIGSPVEIVISNQESQSEAEKKKNDKGRYAYYKLANGSKIKASISKYLSDAEIKTKDKLAISTCRDAKSKEFMFIHRAGIVTVPPPKPIDIDELNNELDSLLSS

SEQ ID NO: 12 - protein, 492 aa, Bacteroides sp.
  source 1..492: note = Related to NZ_JNLA01000055.1
MDKEQIKHIALQMESREDLLSLLNRIKRDEMEELGYADKFHPFTIRHMNYYCNPKNAFHRYRQFKIKKKAGGFRQITAPRNRSFMFLLDCLNEVLKAVYTPSQYAMGFTEGRSVVTNACKHKGANYVFNIDLKDFFPSIEQPRVWKRLQLQPFNFPVSVANAIAGLCCMRETRITSDGIKKDYYILPQGAPTSPIITNMICDKLDHRLGGLAHRFGLNYTRYADDITFSSMHNVFQENSDFRKELLRIIGDQGFVMNEKKTRLQKRGSRQEVTGIIISDKLNVSQKYVRNIRNILYMWEKYGYTVAYAKFFPRYMEEKGHVKKGNPDLVNVIDGKLMYLKMVKGKDDSVYQRLYAKFQSLVAQMRDPKKTNDKHIAYVETMPLLDFEKKIGSSVEIVIPPKEEKNSEGEMSQSGKGRFAYYLLVGTKQLISISKYLSETEIKAKDKLAISQCRDGKGKEFMLIHRINIVTVPPPKPVDIDELNNELDSLLSS

SEQ ID NO: 13 - protein, 517 aa, unidentified
  source 1..517: note = Related to JAGBTN010000007.1; note = Bacteroidaceae bacterium
MDKEQIAKLAHQMETKDDLVTLLNRIKKEEMAEMGFADKYYPFSQKLMNYYCNPKNSFHRYKQFKIKKKSGGFRQITAPRNRSFMLMLSYVNVILKALYTPSKYTMGFTEGRSVVDNAQKHLGMNYVLNLDLKDFFPSIVQPRVWKRLQLKPFNFPVPVASAIAGLCCMKEIREDTDGKKTEHFVLPQGAPTSPIITNMICDKLDHRLAGLAKRFGLNYTRYADDITFSSMHNVYQKHGEFFAELYRIIEGQGFTVNEKKTRLQKNGSRQEVTGITVSEKLNVTQKYVNDLRNIIYIWDRYGYSVAYSKFFPKYKQEKGHVKKGNPDLVNVIDGKLMYLKMVKGDEDSVYKRLHGKFIKLLSNLNDPAKKTEQNITYVDTLPLLEFEKRNNTEVLVCFSEEKYELTFDNGIVVQMSEEHYEILKDKTPKEEIKSTRFVPSRRYAYFKLHNKKVYVSINKSVKPEEEHNKELLAISVCRDSKNKEFWLLHKLDKVTVSTQVELDLDELNNDLDSLLNS

SEQ ID NO: 14 - protein, 350 aa, Prevotella sp.
  source 1..350: note = Related to FR901644.1
MEREQIAKMAAAMADKEDLLDLLNKIKQDEMIATGFGDKFYPFSIKHINYYCNPNNSFHRYRQFKIKKKSGGERIITAPRNRSFKLILSYINEILKSMYTPSTYAMGFAEGRSIADNAKKHRGMNYVFNLDLKDFFPSIEQARVWKRLQLAPFNFPLPVANIIAGMCCMKEVVQAEGGSQTARYVLPQGAPTSPIITNMICDNLDRRLAGVAKRFGLNYTRYADDITFSSMHNVYQENGEFRKEVRRIIEEQKFTINDKKTRLQKKGSRQEVTGIIVSDKINVTRDYVRDIRNILYMWEKYGYGVAFAKFFPKYKADKGHVKKGNPDLINVLDGKLQYLKMVKGEEDSVW

SEQ ID NO: 15 - protein, 486 aa, Aeriscardovia sp.
  source 1..486: note = Related to JAGAGC010000402.1
MKREQIAQLARNMENRSDLLALLNRIKHDDVVEEGVQFFPFTMKQIRFYCNPNHAFHRYRQFKIKKKSGGFRLITTPRNRTYKMLLQYVNIILKALYSPSDYAMGFTEGRSVVTNAEKHLGQNYVLNLDLKDFFPSIDQARVWKRLQLAPFNFPVEIASIIAGLCCMKFKDDEVEKTRYVLPQGAPTSPIITNMICDKLDRRLVGLAKRFGLHYTRYADDITFSSMHNVYQPNGDFWTELRRIIADQNFTINEDKTRLQKRGSRQEVTGVMVTEKLNVSQKYVRDIRNILYIWERHGFNVAYSRFFPKYKSEKGHVKKGMPDLVNVLDGKLMYLKMVKGENDPVYLRLYRKFKALADQARDILTANNGGINYIETTPILEFEQKNNTEVVILWTEDKTDGDKMIPARRYAYFMLDGKRIKASVNKVITKEEESQKELLAISSCRDGNDKPFWLVHKKDKVTVFPPEPVNIEQLNNELDALLNKQDG

SEQ ID NO: 16 - protein, 496 aa, Bacteroides gallinaceum
  source 1..496: note = Related to NZ_JACJJF010000108.1
MDKTEIAALAHRMESKDDILALLNHLKQDEMEEMGQIDKFYPFTMKHITFYCNPNHTFHRYKQFKIKKKSDGYRQITAPRNQSFMLLLRYVNEIFKAVYSPSDYAMGFTEQRSVVTNANVHKGQNYIFNIDLKDFFPSIEQPRVWKRLQLEPFNFPIPVANVLAGICSMKETRTLENGTKKDFYVLPQGAPTSPIITNMICDTLDRRLAGLAKRFGLRYTRYADDITFSSMHNVYQKDGDFRKELVRIIQSQGFTINEKKTRLQKIGGRQEVTGIIVSDKLNVTQKYVRDIRNILYIWDRYGYGVTYSKFFPKYKEEKGHVKKGNPDLVNVLDGKLMYMKMVKGENDSVYKRLHDKFEKLVRETRDPLKTTAHSITYVETTPLLDFEKQNTTEVIITESETSVEQTMTDSGEQARPHRYAYFMLDGKKIFASVNNGIKPEMEKRKEQLSISICRDKNDKQFWLIHLSKKVTVPPFEPIDVDELNKELDALLDIGHG

SEQ ID NO: 17 - protein, 396 aa, unidentified
  source 1..396: note = Related to JAFTVS010000063.1; note = Bacteroidaceae bacterium
YAMGFAEGRSVVTNANVHKGQNYVFNIDLKDFFFSIEQPRVWKRLQLKPFNFPLPVANVIAGLCSMKEVRELEDGTKQEIFVLPQGAPTSPILTNMICDKLDHRLAGLAKRFGLHYTRYADDITFSSMHNVYQPKSEFMKELQRIILDQGFHINNKKTRLQKLGSRQEVTGIIVSNKLNVTQKFIRDIRNILYMWDRYGYSVAYSNFFPKYKNEKGHVKKGNPDLINVIWGKLMYLKMIKGEEDSVYKRLHDKFISLVEKTFDENKTTDQHITYVETTPISEFEKRNNTQIFIEISQPYVELEKDENNPDKTKEVEKTSHRYAYFMLNGKKIYASVNKCIKTEEESKKDYLAISTCRDAKGKPFWLVHKIDKVTVPSQLAVDIDELNNELDSLLNM

SEQ ID NO: 18 - protein, 507 aa, unidentified
  source 1..507: note = Related to JAFXRB010000011.1; note = Bacteroidaceae bacterium
MNKGKIIKYATVMQTKVDLLKLLNSIKKMELEDCGLSKEFHPITMKQLNYYCNPKHTFHRYKQFVIPKKTGGKRIITAPQKGSFRLMLSALNQLFKFLYTPSDYAMGFTEGRSIVTNADVHKGQNYVFNIDLKDFFPSIRQPRVWKRIQLPPFNFTKEVANVIAGLCSMQIKKEDGTLDYVLPQGAPTSPIITNMICDKLDRRLAGLAKRFGLHYTRYADDITFSSLHYVYSLNGEFRKELERIIADQGFTINDKKTRLQTRAMRQEVTGITVSDKLNVTQKYVREIRNLLYIWEKYGYVDAVSKFLPKYKVEKQRKGNPDLINVLSGKLLYLKMVKGEEDSVYIRLSQKFNKLVADFMDVTRRSATGLMYIKTYTIDEFEKRFNTKIKIETFETNTKEKEINVKTENEGQAKKKTHRYASFILSNEEGEDIKQNISIRRNVKWNDDPKTKRKLAVSQCQKGNAKPFWLLHYRAEKQAVEQKDVSIEDLNNVLDNLLSTLDDGTTIS

SEQ ID NO: 19 - protein, 482 aa, unidentified
  source 1..482: note = Related to DVLS01000070.1; note = Candidatus Avibacteroides faecavium
MDKTRIARLAHLMKGKDDLLSLLNDIKRDMMAQAGAGGSFYPFTMKHINYYCNPGNTWHRYKSFQISKKSGGTRQITAPRNESFKLILRCLNELLKAVYSPSAYAMGFTEGRSVVTNAEVHKGMNYVFNIDLKDFFPSIEQARVWKRLQIAPFNFPVPVASVIAGLCSMQDARTMDDGTTAVRYVLPQGAPTSPIITNMVCDKLDRRLAGLAKRFGVRYTRYADDITFSSMHNVYQVGGEFRQELQRIIAGQGFTMNEAKTRLQKRGARQEVTGIVVNDKLNVTQAYVRSIRNILYIWDRHGYGVAYAKFLPVYKADKGHVRRGNPDLVNVIDGKLMYLKMVKGDADSTYLRLRAKFDKLSGDVHDPSKTTDHAITYVETTPLPEFERRNATTVVIATPEPCDGGAAAHRYAYFEIGGKKVYASVNKAVKPEDEGRKDLLSISSCRDKDDKPFWLVHLSSKTVTPALVDVDALNTELDSLLD

SEQ ID NO: 20 - protein, 446 aa, unidentified
  source 1..446: note = Related to RKDY01000002.1; note = Porphyromonadaceae bacterium
MNKELFLEEKYIKTKKKYRKIVTYVDGENLLREKHERIVSLLKQECSDSIFAKAYIEHSSIVKNAKAHMYNDIFLFFDVKDFFPSIHQARVWKRLQLKPLFFKQPIANILAGLCSMKEKAEDGSIRYVLPQGAPTSPVITNMICDNLDRRLAGLAKRFGVVYSRYADDITFSSMHNVYNTSGEFRKELKRIVEGQGFTMNEAKTRLQKLGSRQEVTGIIVSDKLNVSQKYVRDIRNILYIWRKYGYDTAFNKFFPKYKEAKGHVKKGNPDMVNVLDGKLMYLKMVKGEDDSVCKRLRSQFDELCNSLHDDTKTTQQGITYVETLPVLEFERKHNTTIAIMTTKPKEFFIVQKNQEATEDTQKSISENFIPHRYASFKLGGRMQKASVNKSLKKEEETQKDLLSISNCRDAKGKLFWLVHRSDKVTVPPAKPVDIDELNDDLDKLLN

SEQ ID NO: 21 - protein, 499 aa, Alloprevotella rava
  source 1..499: note = Related to NZ_JACICA010000001.1
MDKNSISKATQQLETKEDLLRLLNQIKQDEMTEYGMSDKFYPFTMKHLNYYCNPNNSFHRYKQFKIKKKSGGFRLITAPRNQSFMLLLRYVNEVFKAVYTPSDYAMGFTEGRSVVTNANKHKGHNYVFNTDLKDFFPSIHQARVWKRLQLKPLLFKQSIANILAGLCSMKEKTEDGNIKFVLPQGAPTSPIITNMICDNLDRRLAGLAKRFSVVYSRYADDITFSSMHNVYQTSGEFRKELKRIIESQGFTMNEAKTRLQKFGSRQEVTGIIVSDKLNVSQKYVRDIRNILYIWHKYGYDTAFNKFFPKYKEAKGHVKKGNPDMVNVLDGKLMYLKMVKGEDDSVYKRLRSQFDALCNSLHDDTKTTLQGITYVETLPVLEFEKKNNTTITIVTTKPKEFYTEHTSQEATEDTQKSISENFIPHRYVSFKLGGRMQKASVNKSLKKEDEDRKELLSISNCRDAKGKLFWLVHRSDKVTVSPAQPVDIDELNDDLDKLLN

SEQ ID NO: 22 - protein, 483 aa, Prevotella sp.
  source 1..483: note = Related to JXQI01000021.1
MDKNDIAKAAQLLETKEDLLHLLNKIKQDEMAECGMSDKFYPFTMKHLNYYCNPNNSFHRYKQFKIKKKSGGFRLITAPRNQSFMLLLRYVNEIFKAVYTPSDYAMGFTENRSVVTNANLHKGRNYIFNIDLKDFFPSIHQARVWKRLQLKPLSFKQPIANVVAGLCSMKEKMEDGSIRYVLPQGAPTSPIITNMICDNLDRRLAGLAKRFGVVYSRYADDITFSSMHNVYHPMGEFRKELKRIVESQGFVINKDKTRLQKLGSRQEVTGIIVSDKLNVSQKYVRDIRNILYIWRKYGYATAFNKFFPRYKDAKGHVKKGNPDMVNVLDGKLMYLKMVKGEDDSVYMRLKTQFDELRHKLHNTSQATPRGITYVETTPVLEFEKKNGATIEITRSKPSEKAIEPFVSHRYATFPLGGKRQWASVNKTLKPEEETQKDLLAISHCRDANGKLFWLIHRADKMMVRPPESVNIDELNKELDDLLA

SEQ ID NO: 23 - protein, 476 aa, Bacteroides sp.
  source 1..476: note = Related to HF986315.1
METKEDLLDLLNKMKKDEMAESGMSHKFFPFTMTYLNYYCNPNNTFHCYKQFKIRKKSGGFRQITAPRNRGFILLLHYVNEIFKAVYSPSDHAMGFTEGRSVVTNAGMHKGQNYVFNIDLKDFFPSIQQARVWKRIQLKPLCFKQSIANMIAGLCSMKEILEDGSNRYVLPQGAPTSPILTNMVCDKLDRRLAGLAKRFGLNFSRYADDITFSSMHNVYQGNGEFRKELKRIIEDQGFTINEAKTRLQKLGSRQEVTGIIVSHKLNVTQKYVRDIRNILYIWKKYGYSTAFNLFFSKYKQDKGHVKKGKPDMVNVLSGKLMYLKMVKGAEDSVYVRLRTRFDELTIALKDAHNTTTQGVTYVETIPLLEFEKNNHTDVVITTFKAREEVNAEDENKVIAHRYAYFTLGGHKELASVNKSLRSEEEKDKSPLSISSCRDAKGKPFWLIHRSGKVVVPTLSPVNIDDLNNDLDTLLSI

SEQ ID NO: 24 - protein, 482 aa, unidentified
  source 1..482: note = Related to JAFULJ010000027.1; note = Muribaculaceae bacterium
MDKTHIIKHSLQLQQKEDLLNLLNQLKFDEMNAIGIGDKYHPFILKHIDYYCNPNNTFHRYRQFKIKKKTGGFREITAPRNRSYVLLLRYVNEILKALYMPSKYAMGFTDGRSIATNAGKHINSNYIFNIDLKDFFPSINRARIIKRLQIRPFNFSPKIALLIAGLCCMRKELLSDDGKIFYSYILPQGAPTSPIITNMICDKLDHQLAGLAKRFGLTYTRYADDITFSSNHNVYHDNSIFRKELERIIKSQGFNINEKKTRLQKLGHRQEVTGIIVSDKLNVSQHYVRDIRNILYIWDRYGYNIAYARFFSKYKAEKGHIKKGNPNLINVLDGKLMYLKMIKGEKDSVYQRLYSKFKMLSNYIDNNNPISPQSVKYIETMTISDFETKNNTEIVFKIDDNNSTPKRSAYFTLNRTKISISIKKNISNSKLNKEHLAISTCIDANNRQFWLIHPINVERTPSPIDIDALNNDLESLLNLQYG

SEQ ID NO: 25 - protein, 481 aa, Prevotella sp.
  source 1..481: note = Related to JAFRQB010000001.1
MDRKQIAQQASQLKDKGDLLNLLNLIKKAEIEDMGFDSSMYHPFTEKQLNFYCNPNHTFHRYRQFKIKKKSGGTRQITAPRTQSFMMMLSAVNELFRSIYTPSEYAMGFTDGRSVVTNASAHLGMDYILNIDLKDFFPSIHQARVWKRLQVPPFNFNQPVANLLAGLCCMKESCEDENGNKKDVFVLPQGAPTSPIITNMICDKLDYYLSRLAKRFNMNYTRYADDITFSSMRYVYSKKGKFVLELERIIKEQGFTINEAKTRLQKRGDRQEVTGIIVSDKLNVTQKYVRDVRNILYMWDRYGYNVAYGKFFPKYKEEKGHVKKGNPDLINVIDGKLMYLKMVKGENDSVYEKLHAKFQKLANKDVISEKTNSKGVTYLETIGVKEFEKKNFTTVTFAISEKGKHYAYFMLNDKKMLVTVNKTLTIEEEQDKDVLAISSCRGKDEKPFWLIHRKDKVMVPPPPAIDVDELNAELDSLLNTC

SEQ ID NO: 26 - protein, 487 aa, unidentified
  source 1..487: note = Related to JAFQZK010000038.1; note = Muribaculaceae bacterium
MDRNYIAQQAAKMETKHDLLSLLNRIKISWFEDMGMTVKFHPFTMKQLNYYSNPNHTFHRYSQFKIKKKTGGFRQITAPRSKTFKLMLMCLNEMFKSIYSPSDFAMGFTEGRSVVSNASIHKGQNYIFNIDLKDFFPSIYRVRVRARLQAKPFCFNENIAMLLAGLCSMKISSGHNDGRDYVLPQGSPTSPIITNMICDNLDRRLAGLAKRFGLRYSRYADDITFSSMHNVYQTNGEFRTELRRIIEGQGFTINEAKTRLQKQGSRQEVTGLIVSDKLNVTQHYVRDIRNILFIWEHYGYNAAFTRFFPRYKAEKGHVKKGVPDLINVLDGKLMYLKMVKGAEDSVYIRLFSKYRTLADKAHSIDNTTEHGVTYVETIPLHDFEVNNSTEVIIDWVVPTSDDENGQPKPKRRTASFTLDGKRVYASVNKNVKKEDEQKKELLAISNCRDAKNKQFWLIHYVNKVTVPPAEPVNIEELSNELDALLNS

SEQ ID NO: 27 - protein, 474 aa, unidentified
  source 1..474: note = Related to JAFXWY010000545.1; note = Bacteroidales bacterium
MDREFIINYHGDFLTLLNKVKKVMLEENGMGDLFHPFSLRQITYYSNPNHTKNRYQQFEIKKKTGGMRLITAPRNKTFKMILQCLNEIFKAIYTPSDYAMGFTEGRSSVTNASIHKNQNYVLNIDLKDFFPSITQSRICNRLRTKPFEFPDKIALVISGLCCMKITTKDENGNDVVRYVLPQGAPTSPVITNMICDKLDRRLAGVAKRFGLKYSRYADDITFSSMHNVYQKDGEFWNELNRVITAQGFSINEKKTRLQTKRMRQEVTGIVVNKKLNVLQKYVRNIRNILYIWGKYGFIAAQSRFLPKYKADKGHVKKGNPDMINVLEGKLLYLKMVKGEDDSVYQRLREKFDRLKNDALGILKTNTFSNVTYIETLPLSDFENKNGEVVITYSEKKHKRYAYFNLDGNKKLVSVSLDITEEEEKAKDNFAISLCQDAKGKRFWLLHKKTKVTVPTPKPVDLDELNNDLDSLLNI

SEQ ID NO: 28 - protein, 483 aa, Prevotella sp.
  source 1..483: note = Related to RKEV01000037.1
MVKNTIAMQARQITSKEDLLNLLNRMKMDEMAESGMADSFCPFTMKHINYYCNPNNVFHRYKQFCIKKKSGGTRQITAPRNKSFRLMLQYVNEIFKSLYEPSDYAMGFTEGRSVVTNANIHKGQNYVFNIDLKDFFPSIEQARVWKRLQLEPLNLQKQAANLLAGMCFMKVSSEDGAVKFVLPQGAPTSPILTNMICDKLDRRLGGLAKRFGLHYSRYADDITFSSMHNVYKMDGAFRKELERIINDQGFKMNPEKTRLQKLGARQEVTGLIVSDKLNVTQKYVRDIRNILYIWSRYGYDTAFNKFFPKYKAEKGHVKKGNPDMANVLDGKLMYLKMVKGEDDGVYLRLKTKFDILARRLNDTSNASARGVTYVETTALLDFEKKNGTSIEITMSKRPENATESFTPHRYAIFTLGGKNHMASVNKTLKPEEEKRKDILSISHCRDAKGKQFWLIHRTDKVMVRPDELVNIDELNKELDDLLS

SEQ ID NO: 29 - protein, 408 aa, unidentified
  source 1..408: note = Related to JAFXTE010000053.1; note = Bacteroidales bacterium
MDREEIANTIRLIETKNDFLELLNRIKRENIDFADNQDQKTYPFTMRQLNFYINPKHTTGRYKEFYIKKKSGGMRRITAPRTKTFQLMLSAVNEILKAVYVPTQFATGFVEGRSIVDNAVPHQNQYYVFNTDLKDFFPSIDQARVWKRLQVKPYIFPEKIANLIAGLCSMQMISKEDGEDTIRYVLPQGAPTSPILTNMICERLDRQLAGLAKRYGLRYTRYADDITFSSLHNIYQEGGEFRKELEHIIKEQRFTINNEKTRLQKAGERQEVTGLVVNQRVNVPNQYVRNIRNLLYIWDRYGYDVAYNCFLPKYQKEKGHVKKEKPNLSNVIEGKLLYLKMVKGENDPVYRRLFDKFNSLTTPDHAQEIEMSEGVSIEQLVALMEPDISDIDKLNNDLDELLMRSYGG

SEQ ID NO: 30 - protein, 399 aa, Porphyromonas sp.
  source 1..399: note = Related to NZ_KV793777.1
MEKKILATKVRSLATVGDFLTLLNQMKREDQGVEEDPHPFTLKHINYYRNPSHEGRYRSFKIPKKSGGCRVISAPRNKTFRLILRYVNEMLKALYTPSEYAMGFAEGRSVVTNAQIHLRQNYVFNTDLKDFFPSVDQARVWARLQIKPLSLQRPIAGIIAGLCSVRLETDEGTVRYVLPQGAPTSPILTNMVCDTLDRRLGGVAKRFGLRYSRYADDITFSSMHNVYEVGGDFRSELRRIVEDQRFVINEKKTRLQKRGARQEVTGLTVGERLNVPQSYVRGIRNLLYIWRKYGEGEARARFEESYMAEKGHLREKCPDMILVLEGKLCYLRMVKGPNDSVYRRLSTDFDRLLHADEGAVEPLPSGGERLLAEGLALTASAPVDLEALNFDLDQLLNNG

SEQ ID NO: 31 - protein, 536 aa, unidentified
  source 1..536: note = Related to JAEUGO010000081.1; note = Muribaculaceae bacterium
MDKQTVINKAQDLETRHDLLNLLNEIKADMLGSAAYPFSMKKLLILCNPKNDGDKKQERYRTFSIPKKSGGERTISAPCGNLKWMQLCLNEIFKALYTSSPYAMGFAEGRSIVDNARMHTNQNYVFNIDLKDFFPSIDQTRVWKRLQLAPFNFNPKIASIIAGLCSMRTIRYRENLPFEEAFVLPQGAPTSPLLTNAICDTLDRRLHGLAKRFGLHYSRYADDITFSSMHNVYQPGSDFRKELERIIFDQRFTINAKKTRLQHCSVRQEVTGITVGQKLNVTRKYVKDVRAILHIWEKYGINAAYATFYPRYKSEKCQLHRGEPNLENVISGKLCYLKMVKGETDPAYARLSAQFSRLTSSANPTQKPRDIDYLFTMPLLAFEKKLGCKLEYRTRTHDNKPYACFHFQDRFFVVAVSKNLDVNNLPENVEISLTRMAVPIPFYLAPGEPIPEVKPTKAQVGYLLHKPYTGKKRKAVDNDQSASTGVPDSLREFVLDLATKFPKLQLQDEMGIIAGQQEDDMLSRLVDSNFDLSILP

SEQ ID NO: 32 - protein, 538 aa, unidentified
  source 1..538: note = Related to RIBI01000006.1; note = Muribaculaceae bacterium Isolate-102 (HZI)
MDKQTIKEKAKALETRFDLLNLLNEVKADLLGSTAYPFTMKKLLIFCNPKNDGEKKQERYRSFSIPKKSGGERTISAPCGNLKWMQLCINEIFQALYSPSPYAMGFAEGRSIVDNARMHTNQNYVFNIDLKDFFPSIDIKRVWNRLQRAPFNFNAKVAYTIAGLCTMRTIHYREDLPFEEAFVLPQGAPTSPLLTNAICDTLDRRLHGLAKRFGLHYSRYADDITFSSMHNVYQPDGDFRKELERIITTQRFMINAKKTRLQHCSVRQEVTGITVGQKLNVSRKYVKDVRAILHIWEKYGINAAYATFYPRYKSEKCQLHRGEPNIVNVISGKLCYLKMVKGESDSVYTKLFAQFTRLTSTEKPVTKPNDIDYLFTMPLIAFEKKLGCKLEYRTRSHDNKPYACFNFQDRFFIVAVSKNIDINNLPGNVEISLTRMAAPLPFYVAEGDPIPEIKPTKIQVGYLLHKHYTGKKRKNEIVTITSDESNDVSDGLREFVLGLAEQYPEFQFRDDMGIIESQQENDILSRLVDSNFDLSILP

SEQ ID NO: 33 - protein, 538 aa, unidentified
  source 1..538: note = Related to BK020991.1; note = Siphoviridae sp.
MDKQTLIEKAQALETRRDLLKLLNEVKAELLGSSAYPFTMKKLLILCNPKNDGDKKQERYRSFSIPKKSGGERTISAPCGNLKWMQLCLNEIFKALYTASPYAMGFVEGRSIVDNARMHTNQNYVFNIDLKDFFPSIDQARVWKRLQLSPFNFNAKVASVITGLCCMRTIRYRVDLPFEEAFVLPQGAPTSPLLTNAICDTLDRRLHGLAKRFGLHYSRYADDITFSSMQNVYQPNGDFRKELERIISDQHFTINSKKTRLQHCSQRQEVTGITVGQKLNVARKYVKDVRALLHIWEKYGINAAYATFYPRYKSEKCQLHRGEPNIVNVISGKLCYLKMVKGETDPVYTKLFAQFTRLTSTENPVAQTKDIDYLFTIPLIAFEKKLGCKLEYRTRIHDNKPYACFQFQDRFFIVAVSKNLDINNLPGNVEISLVHTAHYNTNFHSSEDTDLNFKISQLKVGYLLHKHYTGKKRIDEASAPSPNTTLDVPDSLREFVLGLAEQFPELQLRDDMGIIESQQETDILSRLVDSNFDLSILP

SEQ ID NO: 34 - protein, 530 aa, unidentified
  source 1..530: note = Related to JAGAST010000027.1; note = Muribaculaceae bacterium
MDKETLVSKARALETPKDFLYLMNEIKADLLGDNSYPFSVRQLHILCNPKNDKKRYFSFEIPKKSGESRQICTPSGNLKWFQICLNELFKALYTPSPYAMGFAVGKSIVDNARMHTNQNYVFNIDLKDFFPSIDQARVWKRLQIAPFNFNAKIAGIMAGLCSIKSLRYSGEEPFQECFVLPQGAPTSPLLTNAICDTLDRRLHGLAKRYGLHYSRYADDITFSSMHNVYQSDSVFRKELQRIITEQRFTINPKKTRLNHCSLRQEVTGLTVGLKINVSRKYVKDIRAILHIWEKYGYNAAYATFYPRYKSEKCQLHRGEPNLENVISGKLCYLKMVKGESDPVYSKLYSQFIRLTEATIIAQDKHNIDYLFTMSKCDFENKLGVSIEFRERADDKKKYGCFYFQDRFFVVAVSKNIDINNLPENLQISLTRMQKPVEFYLRPGEPRAAALPTITRIGYLLHKPLRGYKPEPKAGNISNDISNELKSFVINLANTYPELQLKDDMGIIESSNEDNLLARLVQSNFDLSILP

SEQ ID NO: 35 - protein, 513 aa, unidentified
  source 1..513: note = Related to JAFXFD010000128.1; note = Muribaculaceae bacterium
MEKRYLTEKAQALNTTVDLFNLLNEIKCDILGDNSFPFKWNRFLALSTPGDYLHRYYSFKIPKKSGGFRSIYAPLYNLRWIQICLNEIFKAIYTPSPYAMGFAAGRSIVDNARMHTNQNYVFNIDLQDFFHSIDRHRVYKRLQFAPFNFNPEIANVIAGFCTIKSFVRSGGSSSIDCYVLPQGAPTSPLLTNAICDTLDRRLQGLAKRFGLHYSRYADDITFSSMHNVYQEQSEFRQELERIIADQGFTINPKKTRLSHCSKRQEVTGLVVSQKVNVNPKFVKDIRAILHIWEKYGYNAAYSSFYPKYLSEKCQLNRGYMNLANVISGKLCFLKMVKGAKDPIYIKLNEQFASILKSQKSTKGESERIKYLMTMTKRDFEKKIGTKIHFNRSRYDAKIYGYFYYHGKSFLVAVSQNLDITNLPDETQISLCEFVKYLDCEYDSDPRKLKSSQRYYGVVYLLHKPHYGLNMKNKKIPKQVKEMVINFANRFPELELKDEFGIIDEYNKTQIDKN

SEQ ID NO: 36 - protein, 544 aa, Sodaliphilus pleomorphus
  source 1..544: note = Related to VULT01000011.1
MDKELLISKIRNTTTRWKLLDLLNEIKADLAGTAAYPFTMSKMMRLCNPRIGLDRYHSFEIPKKSGGVRLIFAPEGNLKWMQLCLNEIFKALYTPSPYAMGFTQGRSIVSNAVRHLHQNYVFNIDLCDFFPSISQARVWKRLQLPPFNFTKDVASVVAGLCSIRMLDIVDGNVRLVSYKLPQGAPTSPLLTNAICDTLDRRLAGLARRFGLHYTRYADDITFSSMHNVYQDGSPFRHELERIVSGQHFKINAKKTRLNHRGERQEVTGLTVGEKVNVARRYVKDVRAILHIWERYGMNAAVAKFYPRYKTEKGSLHNGDPDMENVIAGKLCYLKMVKGQHDPVYVKLQEQFDRLTSAKPEAHDLEISWEYLQTLPTSDFEAQLGVKIDYGISNLGKQYASFVFNGKKIYASVSRNISISNLPKSLYISLCRQIDYKVKYTGEASQRHAVIDPGTPYGRMMLGCPLPEDLAVRYIYVVHRALPKDKPLKYVHTPQVAPELKDIVGKLNELMPGALTADGALLAGDRPKDTLTQLVESGFDLSILP

SEQ ID NO: 37 - protein, 544 aa, Bacteroides sp.
  source 1..544: note = Related to JAAVDT010000061.1
MDKELLVSKIRSTTTRMELLDLLNEIKVDLAGSAAYPFTMQKMMRLCNPKLGENRYRRFEIPKKSGGVRTIFAPNGNLKWMQLCLNEIFKTLYTPSSYAMGFTQGRSIVDNAKKHLNHNYVFNIDLSDFFPSIDQARVWKRLQMPPFSFSKEIANVIAGLCAIEMVYDEDDKDPVKTYKLPQGAPTSPLLTNAICDTLDRRLAGLAKRFGLHYTRYADDITFSSLHNVYQEGSAFRNELERIVIGQNFRINPRKTRLQHRSKRQEVTGLSVGEKINVCRMYVKDLRALLHIWEKYGINAAIAKFYPRYKAEKGYIHKGEPNIENVLSGKLCYLKMVKGKFDPVYCRLQEQFNRLTLTSTNKKNVELSWEYLQTTPVNDFETQLGVKIEYAVSKRGKPYSYFMLKGERIMISVSQNISIDKLPKNLYISLCRQVDYKLRYTKQQFSVPEVIDNTTAYGRMKLGCPRMEDLAVRYLYVIHRQLPKNHPSKYIRTPEVTPELKDVVNKLSELIPSLFDVDCVQATDVEPKDTLTRLVESGFDLSILS

SEQ ID NO: 38 - protein, 544 aa, Bacteroides sp.
  source 1..544: note = Related to JAAVCQ010000011.1
MDKELLISKIQNTTTRWELLNLLNEIKADLVSSTAYPFTIQKMMRLCNPKLGNNRYRKFEIPKKSGGVRTIFAPNGNLKWMQLCLNEIFKALYTPSPYAMGFVEGRSIVNNAEKHLKQNYVFNIDLSDFFPSIDQARVWRRLQLPPFNFSKEVANIIAGLCSIEMKKEGDETPPVKSYKLPQGAPTSPLLTNAICDTLDRRLAGLAKRFGLRYTRYADDITFSSMHNVYQNGSQFRIELERIISGQHFKINPKKTRLHHRGQRQEVTGLTVGEKINVCRSYVKDIRAILHIWGKYGINAAVAKFYPRYKAEKGYLNKGEPNIANVISGKLCYLKMVKGEMDPVYSRLNDQFSRLVDTNSGAKDIEISWEYLQTLSTDDFEKQLGVKIKFSVSKQSKQYAYFILKDEKIMVSVSRNISIDHLPKNLYISLCRQIDYKLKYTGELYTRPDVIDNSTAYGRMKLGCPIPGDLAVRYIYVIHRAIAKDKPTKYIHTPEVAPEIKNVINKLNEFMPGAFTVGRVESTSVKPKDTLTRLVESGFDLSILP

SEQ ID NO: 39 - protein, 605 aa, unidentified
  source 1..605: note = Related to JAGHUA010000031.1; note = Bacteroidales bacterium
MENNEIVARVSKISDVESLYKLLDDIRKSDRETYIRKMDFTLAHIKRYANPNLTYKRFSLVNIPKKSGGTRQICIPNVRLGVILHCLNEVFKALYTPNEFATAFCVGRSIVNNAKVHIGHNYVYSIDLEDFFGSIQQARVWKRLQLPPFNFRQPLVNAIAGMCCVKMQPSIKNNRSTADYILPQGAPTSPLLSNAICDTLDRRLTGLAKRFGLCYSRYADDITFSSNHNVFQDNSDFCNELNRIIADQKFTINVKKTRLQKRGSRQEVTGLIVCEKVNLCRKYVRSIRQILYIWKWYGVHDAYSSYRKNNNISEYKGEEGFKLIILGKLNYLKMVKGETDPVYIKLRTEYDNIVNGTYHHQSSSIHFKFVNTQSLEDFESEHGRIGIAVGKSGKRYAYWKKLNRYLRFISISNSIKEFNREDLCISECATAGGGKFYLLRNKSKRKKYTDVLEADFKKSLIWETCSKLSQSKPYEFDIVTMWNSGMFDVGEYSHDDSYHYINIAETQYTGTWTNLQQELTRELKRICFDIKFINGQTSFIVKGKSIGLSLQWPWNPPYEEELNNTAVLVQAKIPKNKYPEMEAFIKSYFELVVSEQMYYDSLNIF

SEQ ID NO: 40 - protein, 526 aa, Barnesiella viscericola
  source 1..526: note = Related to NZ_CP007034.1
MEKNVIIKRASNLETKEDLLLLLNDIVKDELGKDDAFSFSMKQLMYYCNPNNVRGRYSHFSIPKKSGGCRNIAVPSRGLGNLLHYVNIMLKAIYQPSDYAMGFVEGRCVVDNAMRHVGQNYIFNTDLENFFPSIEQPRVWKRFQLSPFNFKRPIANILAGLCCIKEKNDDGSFIYVVPQGAPTSPLITNSICDVLDRRLNGLARRFNLHYSRYADDITFSSMHNVYKVGGDFRTELKRIVEDQHFRMKESKTRLQKIGERQEVTGLIVSSKVNTSAAYVAEIRNLLHIWEKYGYNEVYKRFYPKYKADKGYIKKGEPLLENVLYGKLQYLKMVKGYKDSVYAALQARYDRLTSPINASSEQKYDYLRSFTLAEFEEIVGNQIRYSLSKNGNLYGRVNLNDNDIIVSITNAAKVQLVKNKIITDESMIASVKTSKSTIPANSRPGLYVVLTAKNGKSLFWMMTYYDPTVTDIDLSSVSVSELVDIWEQEGINAAIEAYENGILFKQDNKSFEKLKGGKQKFYRPSSF

SEQ ID NO: 41 - protein, 594 aa, unidentified
  source 1..594: note = Related to nan
MEKSEIRKRATEIESKEDLLLLLNDIVKDELGKDDAFSFSMQQLNYYSNPNNVRGRYHHFSIPKKSGGKRNIAAPSKGLGHILYYVNILLKSIYQPSDFAMGFVEGRCVVDNAMRHIGQNYVFNTDLENFFPSIEQPRVWKRFQLKPFNFKQPIANLLAGLCCIKEKHDDGTFKYVVPQGAPTSPLITNAICDTLDRRLNGLARRFNLHYSRYADDITFSSMRNVFKAGGDFRMELKRIIEGQNFKMNEAKTRLQKKGERQEVTGLTVSNKVNTSSAYVAEIRNILHIWEKFGYNDAYKRFYPKYKESKGHVKKGEPLLENVLYGKLQYLKMVKGVKDPVYVALQARYDKLTSPVNAEVKQKYDYLRSFTLAEFEEIVECQISYALSKEDNLYGKVILNGKDIIISISNEAKTQLVKNKIVTDEALVASVKPIKNVISVNSKPGLYVVLTAKNGKAPFWMMTYYDPTVTDIDLSQVSVAELVNIWEKNGIDAAIKAYEDGILLTSEDASMANKNSKDKKNTPMQKRKSASSKDESVYMGDIDFIDVADIAAIEEEIKSGNLGEVKLSFSKNDEADNSGNDELDTIIDEGSFDDL

SEQ ID NO: 42 - protein, 592 aa, Prevotella sp.
  source 1..592: note = Related to NPIZ01000015.1
MEKSVIRKRAAELQSKEDLLLLLNEIVKDELGKDDAFSFSMQQLTYYSNPNNVRGRYRHFSIPKKSGGKRNIAAPSKGLGHILYYVNILLKAIYQPSDYAMGFVEGRSVVDNAIRHIGQNYVFNTDIENFFPSIEQPRVWKRFQLKPFNFKKPIANILAGLCCIKEKNDDGTVKYILPQGAPTSPLITNAICDTLDRRLSGLARRFNLHYSRYADDITFSSMHNVYKEDGDFRTELKRIIEGQNFTMNEAKTRLQKIGERQEVTGLTISNKVNASTAYVAEIRNLLHIWEKYGYNEAYKRFYPIYKESKGHVKKGEPLLENVLYGKLQYLKMVKGYKDPVYAALQARYDKLTSPVNAEVEQKFDYLRSFTLAEFEEIVDGQINYALSKEGNLYGKVVLNGKDIIISISNDAKSQLVKNKIVTDETLVASVKPTKSAIPVNSKPGLYVVLTAKNGRVPFWMMTYYDPTVTDIDLSEVPVTELVNIWEKNGIDAAIEAYENGILLKGEGANKAAKDAKGKKKTKKPQKGVFLPSMSESVSLDVDYIDVADIAAVEEEIRSGKPTKLSSSFTDEYNDLDSDELDTIVDEGSFDDL

SEQ ID NO: 43 - protein, 562 aa, unidentified
  source 1..562: note = Related to JAFRTY010000007.1; note = Bacteroidaceae bacterium
MEKREIAQRASMLQNKEDLLQLLNDILKDEISSDHSFSFSMRQLSYYCNPNNVRGRYRHFSIPKKSGGQRHISAPSRGLSHILYYVNIMLKAVYLPSDYAMGFVEGRSVVDNASRHIGQNYVFNTDLENFFPSIAQPRVWKRFQLAPFNFNQQIASILAGLCCIREKQEDGKFTFILPQGAPTSPLITNAICDKLDRRLSGLARRFRLHYSRYADDITFSSMCNVYHENGDFRTELKRIIEDQGFHMNIAKTRLQKRGERQEVTGLTVSNRVNTSREYVAEIRNLLHIWEKYGYNDVFKRFYPQYKANKGHVKKGEPMLENVLYGKLQYLKMVKGYKDPVYAALQARYDRLTSPVNAEAKQGLDYLRSFTIAEFEEIVGSPISYYLSKDNKIYGKSMLNGKEIAISITRAAKHQLAKSKIITDESLLASIKPVKYNVTANSNPGLFVVLAARNGHTPFWLMTYYDPTVTDIDMSNVPPTELINIWEEKGIDAAILAYTEGKDQGPNKKQEKSKKKGKRSETKKLVSNIDLLDFDIDGALDIDDISSLVADFDEASAISLDDL

SEQ ID NO: 44 - protein, 506 aa, unidentified
  source 1..506: note = Related to JAFXXQ010000016.1; note = Bacteroidaceae bacterium
MEKREIVHRASQLQNKEDLLQLLNDIVKDELSNERAFSFSLKQLSYYCNPNNVRGRYRHFSIPKKSGGQRNIAAPSRGLSHLLYYVNIMLKAIYRPSDYAMGFVEGRNVVDNASRHIGQNCVFNTDLENFFPSIAQPRVWKRFQLPPFNFNKQVASILAGLCCIREKHVDGKLTYILPQGAPTSPLITNAICDNLDRRLSGLAHRFGLHYSRYADDLTFSSMHNVYQENGEFQTELKRIIEGQGFRMNIGKTRLQKLGERQVVTGLTVSNRVNTSSEYVAEIRNLLHIWEKYGYNDAFKNFYSHYKDKKGHIKKGEPMLENVLYGKLQYLKMVKGSNDPVYAALQARYDKLTSPVNAEIKQSLDYLRSFTIAEFEEIVGSPINYRLSKDNNLYGQAMLNGKEIAISITGAAKHQLAKSKIITDETLLSSIKPIKYSVTSKSKPGLFVVLTARNGHAPFWMMTYYDPTVTDIDMSNVPASELVDIWEKEGIDAAINAFEEGFLEDFV

SEQ ID NO: 45 - protein, 553 aa, Prevotella nanceiensis
  source 1..553: note = Related to JABZTC010000018.1
MEKSELLKKILALQTKEDLLQLLNLIVKDELRQENAFTFSMAQLMYFCNPNNVRGRYTHFSIPKKLGGKRQIAAPTAGLRNILYYINIMLKAVYTPSDYAMGFVEGRNVVSNATLHVGKNYVFNTDLENFFSSIEQPRVWKRLQLPPFNFSRPIANIIAGLCCIREKQENGQFIYVLPQGAPTSPLLTNAICDSLDRKLAGLARRFGLHYSRYADDITFSSMHNVYQNNREFITELKHIIIGQNFHINEAKTRLQKHRERQEVTGLTVNSGVNTSKKYKAEIRNLLHIWEKYGYKEAYKRFYPHYKETKGHTKKGEPMLENVLYGKLQYLRMVKGAKHPVYVALQERYNKLTSPINGHSKESFDFLRAFSLSDFEIMTNNPVQFAISSTHNLYAYTMLEGKKILISLTNAVKEILIKKGDITNNTATSHEEIIKSYIPFNSTTQLYVVLTAKKGHAPFWLMTDYDPTTTGLHFCSMPISQLIDIWETKGIDEAIATYEKNSTFTKVKNIESSSEKNESVFDKFPIKENSDEDIQFLHKLFEDGTQKNDTLFTL

SEQ ID NO: 46 - protein, 790 aa, Phocaeicola sartorii
  source 1..790: note = Related to JABVZU010000003.1
MDKGEIAKKARILQTKTDLLALLNEIKADDLGEKGYPFVLRQINYYCNPKNTKGRFVTFAILKKSGGIRNIAAPSNGLKMLQTYLNVILGSLYTPSSHVMGFVKGRSVITNASRHLNQNYVFNIDLKDFFSSIPQARVWKRLQLPPFSFPQEIANVIAGLCCIEMIVQDEQGQVRTKYVLPQGAPTSPVITNMICDTLDRRLSGLAARFGLNFSRYADDITFSSLHYVYSENGAFRKELKRIVEGQNFTINEAKTRLQKKGDRHEVTGLIVSDRVNVSRTYVRNLRSLLYIWEKYGYDAANEKFVYYYLDDKPASSTCMPNMVNVIEGKLQYLKMVKGGDNPVYLNLYSKFELLQYIYHNKDNGEEQSMSDVESMLHQSSMSVEGVVAQWKNRDIFSITGTLLNECKRSVSPLIVKKVAASLMAYLSASLVNNIKKRAELQWYMLRDINDAMNGQPRTRKIDGEEEKIHRPKLVVAFLKQFTSTENLKYTTHTWERMIDGKYKWTDFDQFFHSYESELKDKTGSGIPIFDIYNCNIHLYNLVRNFLLPPSKEEYPWQTDYGLKLSYCTPEGVIQNWMKENPDKQPMEIPLSVFPESYRPKQRVQGQTLVDFRDVIDIFKNAIEYRDDNLYWDVSDIFKLTDFSLDDSVLDTLSGITFYTDTILVREALKIIADNIIVRPQHRHLKVQAIRGKDGDQKYVSLEILHVESFSNKSLDDDKLQLKGNKGQLSAVKQKLVSLCDFSVESRFRKGDEMGDYRIDYLYSEEVNAEPRVTKLDAPAEGFKYILKFYL

SEQ ID NO: 47 - protein, 476 aa, unidentified
  source 1..476: note = Related to JAFVAP010000165.1; note = Bacteroidales bacterium
MDLPQIKKKATELETKENLLDLLNEIKQEDLQEQAYPFTIKQLNYYCNPNRTKNRYITFEIPKKAGGTRVISSPSNGLKSILHYLNYILQSIHTPSKFAMGFVKGKSIIDNASQHTNQNYVFNIDLKDFFPSIHQARVWKRLQLPPFNFNKEIASIVAGLCCMKVEPQEENEKPLYVLPQGAPTSPTITNIICDNLDRRLGGLAKRFGLRYSRYADDITFSSMHNVYQNDSDFRKELERIITDQHFTINEKKTRLQKLGSRQEVTGLIVSHKINVTKKYVREIRSLLYMWEKYGYNVAYCKFFPKYTEEKGRIYEGIPDLISVIAGKLMYLKMVKGDGDTMYTRLFAKFQKLANKETIAEKTNLAGVTYLGTIGILEFEKYISTTIIFEITEKCNLYAYFKFNEKKIMVSVNKSLKHSLTLEEAMDKGELAISLCRGKEGKPFWLIHRKDKVLVPPLPLVDVDELNVKLDSLLLFS

SEQ ID NO: 48 - protein, 506 aa, Alistipes sp.
  source 1..506: note = Related to JAGBAX010000023.1
MERSEIHYQASGVKTTLDLAQLLSEIKEDALGIIKARAFQEKQITYYCNPKRTDRKRYINFTIPKKSGGERTISAPVRGLKSILFSLNTLLQALYEPSKYAMGFTQGRSVVDNAKIHIGQRYIYNIDLKDFFPSIDKSRVWKRLTLPPFNFNSDIAHTIAGLCTMRIVEDGKERFVLPQGAPTSPILTNAICDTLDRRLGAVAKRFGLRYSRYADDITFSSMHYVYGKDSEFIKELHRVIKSQNFTINESKTRLQSLGYRQEVTGVIISDKINVAKRYTREIKTLLHIWDRYGYMAACESYTKSHHVKNDNFKRVGYPKLESVIAGKLQYMKMVKGAEDAVYQTLQTKFSTLVKGIKKIEFTIGGRDIAYLQTMTREQFRKEKLADITIDATNKVAYYEFGDQKHNIVISRSISEDILSQLATSPANDECWNKYRISLCENNNVQFYLLHKCFKERKFRVRTDIKLEDIDNIFTYLDSPNNRNENNKITDKKSSNIFERVIGWLRR

SEQ ID NO: 49 - protein, 497 aa, Alistipes sp.
  source 1..497: note = Related to JAFYXB010000050.1
MISTDEIKHDFAAIEAPKDLLNLLNKVKRSVLGGKYHPFSFDQLFYYSNPRREDVVRYHSFTIPKRSGGTRTISSPVAGLKSILTTLNDIFQAIYRPSKQAMGFAAKRSVVTNAQIHVGQRYIFNTDLKDFFTSINRSRVWRRLTLKPFSLSDDIADIVAGLCTMRDRDANGRVRYVLPQGAPTSPIITNMICDRLDAKLARLAKRFGLRYSRYADDITFSSMHFVYGKGGRFISELHDIITAEGFEINDTKTRLQHLGIRQKVTGLVVSERVNVSKEYARELKLLIHIWLRYGYLHALDSYTQKHQHTKGGIANLEAIIKGKLNYMRMVKGANDAMVQRLQAAFNELKHDSIRLEHRFDSWLPTLTFNATYTRSEIEALEGISLKLRVDTTKVCAYLAIDGNEYPVTISRHISSATRLELMHSESNSAVWRNHRISICSNEAGSFILLHKRLRRYKPKAEAETESYKVIDIDTFIAMLNATEQDFHLETLCLNAPF

SEQ ID NO: 50 - protein, 503 aa, unidentified
  source 1..503: note = Related to JAFVXG010000004.1; note = Rikenellaceae bacterium
MNRQEIQQAVAAIKSTEDFVLLLNKVKREALGGKAYDFKLKQITYYCDPKRENIERYRHFTIPKKGGGERQISAPVPPLKSILFSLNTILQAIYEPSSHVMGFVQGRSVVDNAKMHIGQTYVYNIDLKDFFPSIDKSRVWKRLTLPPMNLSSDLAHLVAGLCTMRLEEGENVRYVLPQGAPTSPVITNMICDNLDRQLLKLAKRFGLRYSRYADDITFSSMHYVYNENGAFVKALRRIIEKQRFTINPRKTRLQQPNQRREVTGLVVSDKVNVTRQYTRELKTLLHIWQTYGYMDARESYRRARIKSMTVFDKKEGFDLAAVVSGKLLYMKMVKGEDDPVYRRLYKQYRDVYVNKQSEIYEAQATYIEYIQTMTKAEFEEKMQTRISINLDKSLNWAATYGEGESRGRLRLSSKITKEVLAELAADTTGEGAWSKYCISLCNNGASQFYMVHRPLVPKQYTTAVRFLMEELQAELEEIGIDNLLEELDDLKANPEKLNVVKTL

SEQ ID NO: 51 - protein, 503 aa, Alistipes sp.
  source 1..503: note = Related to JAFWYW010000205.1
MNTQEIRQTVKAMKSTEDLLHLLNQVKQDALGDKSHPFHLKQITYYCNPKRENVVRYRHFTIPKKGGGERQISAPVNGLKSILFSLNTILQAIYEPSSYAMGFVAGRSVVNNAKMHIGQRYVYNIDLKDFFPSIDKSRVWKRLTLPPMNLSSDLAHLVAGLCTMRLEEGENVRYVLPQGAPTSPVITNMICDSLDRQLAKLAKRFGLRYSRYADDITFSSMHYVYSENGAFVQALNKIIEKQHFTINPRKTRLQQPNQRREVTGLVVSNKVNVTRQYTRELKTILHIWEKYGYMAARESYRRARIKSMTFFDKKDGFDLAPVVLGKLLYMKMVKGENDSVYKRLMGQYRDLTKADNGVTYQAKHTKLTYLQTMAKAEFERQLLTSLMIDVEAPKLRKVYFAEGESNRYLRTSGKITDEVLAELAADVEGVGIWSKYRISLCDNGHSQFYMLHKKLVEVQYTEAVLLQLEELQAELEEIGIDNLMAEFANFQAHPEQYEVLLTL

SEQ ID NO: 52 - protein, 536 aa, Alistipes sp.
  source 1..536: note = Related to JAFXAS010000015.1
MGREQIRTAALEIKNIKDLRRVLNLVKRDALGDKAHPFHLKQITYYSNPRRAEVVRYKDFTIPKKCGGVRNISAPVAGLKSILTSLNTILQAIYEPSKYAMGFVPGRSVVDNAKIHLGQNYIYNIDLQDFFPSIDKSRVWKRLTLPPFNFTSELADVIAGLCAMRMEIEGNGSRCVLPQGAPTSPTLTNIICEKLDRQLGGLAKRFGARYSRYADDITFSSMQYIYAADGEFMAELHHIIATNRFTINEKKTRLQKKGERQEVTGLVLSDKVNVMRRYARELRTLLHIWEKYGHLAACESYMKVRKANPVYRHKGGMPTLDAVLMGKLQYLKMVKGEEDTTYKALYARFCKLTNKAPQGVKYPTPYSSHIVYLHTMSRSEFEEALRTTIKYREDKEPKLYFVIGDVERPITWSHSVPIGQLLENSEDGYKLWGKYQISLCDNGTTQFYMLHKRLVAPPYTNDGRKLTERLQKELAALVDSDIFTQVLGVDEEPMCPKIDPSEGEQLALKNEKWNDALDIMARLEDMDIPEPPEVTL

SEQ ID NO: 53 - protein, 458 aa, unidentified
  source 1..458: note = Related to JAGBZI010000078.1; note = Proposed Tidjanibacter sp.
MRDIRDLRSLLNRVKRDALGDNAHPFHLRQITYYSDPRRTDVVRYKSFAIPKKSGGVRAISAPVAGLKSILTSLNTILQAAYEPTRYAMGFVEGRSVVDNARVHLGQNYVFNIDLEDFFPSIDKSRVWRRLTLPPFNFSVELADVVAGLCTMRVEAECEGDKPRYVLPQGAPTSPTISNIICESLDRQLAGLAKRFGAKYSRYADDITFSSMTYIYSAEGEFVAELRRIIAANRFTINEKKTRLQKVGQHQEVTGLVLSDKVNVARNYTRELRTLLHIWDKHGFMNATVCLMRARDKNPVHRHKWGKPSLEAVVGGKLNYLKMVKGEKDSTYRNLYEIFERCYSRDKRYFAREDTKVGGLKFLITMDVFTFMATMNILLEYNKGGSPEVFFRWGDYKCPISVSRMVPVAKLFENAGEGICKMNNFELSLCDDGSTRFFLLHRRLPISSWMKFKLVDEL

SEQ ID NO: 54 - protein, 529 aa, unidentified
  source 1..529: note = Related to JAFTUI010000023.1; note = Proposed Tidjanibacter sp.
MERTEIRTTALAMKNIKDLRRLLNQVKQDALGDKFRPFHLNQITYHCNPKRATHQRYKNFTIPKKSGGERVISAPVAGLKSILFSLNTILQAIYEPSKYAMGFVQGRSVVDNAKLHLGQNYIYNLDLKDFFPSIDKSRLWKRLTLPPFNFPSELSDVIAGLCTMRLEEDGKETRYVLPQGAPTSPTITNIICEKLDRQLGGLAKRFGAKYSRYADDITFSSMNYIYSNEGEFIKELHRIIADNHFTINEKKTRLQKVGERQEVTGLILSDKVNVVRTYTREVRTLLHIWEKFGHMAACESYMRARKLNPTHRHKGGMPSLDAVLMGKLQYLKMVKGAEDATYKALNSRFAKLQGQELAPIKYAKKPLAYVHTMNREEFEETLSSQIEYNPETTPALFFKVGDDIRPITVSQTVPVKELFAKGDEAAELWRKYQISLCDNGISLFYMLHKKLVAPQHTKAGKRKTVELQEELSALVESDIFSQVLNEDKVDGKNYKVVSMEDIASDRVEIANRERLIALMEADIPEPDNL

SEQ ID NO: 55 - protein, 518 aa, Alistipes sp.
  source 1..518: note = Related to JAFNYI010000087.1
MRDVRDLRLLLNRAKRGALGAKAYPIHLRQITYYADPRREDVLRYRNFPIPKKSGGERLISLPVDGLKSILRALNTLLQALYQPTAYAMGFVQGRSVVDNARVHLGQNYVYNIDLKDFFTSIDKSRVWRRLTLPPYNLPSQLADIVAGLCTMRLEEGDKVRYVLPQGAPTSPTLTNIICEKLDRQLAGLARRFGLRYTRYADDITFSSMHYVYSSDGEFVTSLRQIIEQNHFVINETKSRLQYRGERQEVTGIVLSDRLNVARQYTRELRTLLHIWQRYGYLAARESYLNHHAEGSKCRLCIRDTRLESSIMGKLQYLRMVKGETDALYMRLKQRFDELMKEKGSAVKYAKYGEFSYLYTVDVPLFESTFNTRICYNAESDVKLYFVDGGVIKPIALSSRLDAGKLFASDNDENRWHGLQISLCESHSTQFYMLHRRLVNPLFSKPRHKKRSSPMDEYVELFNSNANSALIDEFFFRNYGRRMTIDDLGDVVAQSDESGAISELAHILDADITVLAPK

SEQ ID NO: 56 - protein, 473 aa, unidentified
  source 1..473: note = Related to JAFUSZ010000030.1; note = Bacteroidaceae bacterium
MEREVLIMRVERMKDKEDLLALLNDVKADELGDKSYPFTMKQINFYCNPTSVPNSKRYNDFFIAKKSGGMRHISAPVNGLKSIQTYLNIIFQAIYEPSQWAMGFAQHRSVVNNAQMHIGQNYVFNLDIKDFFPSIPQARIWGRLQVKPFNFNKQLANVIAGLCCMKVVTEESERYILPQGAPTSPLLTNAICDKLDFKLSRLAQRYGLNYSRYADDITFSSMHNVYQKESRFLRTLFQIIQEQGFCINEAKTRLQKRGSRQEVTGLIVSNKVNVTRKYTEDIRNILYIWQRYGLTVAYQKFSKYYKKEKGHVKQGEPTMENVLAGKLDYLKMVKGESDSTYLKLKGTYDTLMNHILEGADGSIKYIDTHSISDFEKNLKTKIEIKKSKKGKQFASFILDGDEKIVSISKNAEDITRDKLFISLCEDNEKKRFYFIHRQMWKRGLETKRTEENSLDLDEILAQLCNSNFDLSLL

SEQ ID NO: 57 - protein, 473 aa, Prevotella sp.
  source 1..473: note = Related to SUYG01000053.1
MDREKIKLRVEHMKDKTDLLALLNDIKADELGDRGFPFTMKQINFYCNPFSIPNSKRYHDFFIAKKSGGARHISAPVNGLKSIQTYLNIIFQAIYEPSRWAMGFAQNRSVVDNAQMHIAQNYVFNMDLKDFFPSIPQARVWGRLKVPPFNFNPELASVIAGLCCMKLVNEDSEKYILPQGAPTSPLLTNAICDKLDYKLAKLASHYGLIYSRYADDITFSSMHNVYQKDSRFMKTLFKIIQEQGFQVNEVKTRLQKKGSRQEVTGLIVSDKVNVTRKYVEDIRNILYIWQKYGLTTAYQRFIVHYQLEKGHIKKGAPHLENVIAGKLDYLKMVKGEDDSTYVKLRKLYNVLMGVPLYGNSETAIKYLDTQRITDFEKRIGTKVEMKLSKNGKKYASFLIDGEKQVATISKNSEKLEFTNLVISLCENQQKERFYFVHRPFGKDVDVKKKKHSSMTLDEILAKLCETNFDLSYL

SEQ ID NO: 58 - protein, 382 aa, unidentified
  source 1..382: note = Related to SUWU01000046.1; note = Lentimicrobiaceae bacterium
MDKERIIETLNTHDCKTALLTLLNDAKQEYLGDKAYPFELRQITFYSNPASDVKRYKDFEIPKKSGGTRKISAPVEGLKIILKCMNMILQEIYEPSKYAMGFAKNRSVVDNAKRHINQNYVFNIDLKDFFPSITRARICARLKVKPFEFSDDIARMISGLCTMKVTDGENIKYVLPQGAPTSPTLTNIICDKLDHKLAGLAKRFGLNYSRYADDITFSSSHNVYQEESDFRKELQRIITEDGFVINDKKTRLQKRGGRQEVTGVIVCEKANVTKKYVKEIRNLLYIWERYGYDEAVKRFHPRYKAEKGYTKKGNPNLDAVLGGKLLYLKMVKGENDSVYKRLQGKYDHLMEVKNPIINQTDNQTNNEALISELENLLDELLK

SEQ ID NO: 59 - protein, 789 aa, Prevotella sp.
  source 1..789: note = Related to JAFUDU010000007.1
MTQSDIISLVSQLETKEDLLALLNKLKFEDLGERSFSFNIRQLNYYANPNHTKGRYRSFEVPKKKKGAMRTISAPSNGLKMLLRYVNVILQALYRPGENTMGFVHGRSVRDNASRHNHQNYILNLDLADFFPSISQARVWKRLQCPPYNLAKPIADIIAGLTAVKEVTTDESGNECVRYVLPQGAPTSPVLTNIICERLDRRLQGVGKRFGANYTRYADDITFSSMHNIYQQDGEFMQEVIRIIQDQGFAVNKEKTRLLKKGSRQEVTGVIVGDKVNVGRDYIRSIRSLLHIWEAFGYTAASAKFRQQHLKDKNGYVKGEPAMESVIAGKLQYVRMLKGYDDPVYQRLRQKLDWLLGMSDPEAAILQNPDYKVLETMPLPTFEEQNACQVQFSMSPNGNRYAFYHQRDNRMTVSVSHDITQTVKPFLAISLCQRRDGSRFHLIHKPIPQVPVRQEPAVKEIEIRHWHQPAMVTGFLRRFTEKGALKYTTHLWTPAEDGSYQWQDFETFYQSYRKELYEKKDDQININDLYHYVPTLNALIRNFLIESKSPSLYWSKEYKLAVSYGSPKGFIADWMRQTGKQPFEMPLAELPKEYVPAAPVQGRTLVYFNDVVGIFKNAIEFRDDQFYYAVKGIFKSVYHHVDQQKLSTLRGLSFYTDTFQVKKALRLIASNMESRTEYPEVEISAQYIDGDDNSPRRLRVTILQRDSFSDKSIYDDKLLLRHGSGQMGSIKSLLRSLCDFSVESRFRAHDDFLHYRIDYLYTTDADAPPCLVQLDKPTEGFKYILTFAL

SEQ ID NO: 60 - protein, 515 aa, unidentified
  source 1..515: note = Related to JAFRXO010000051.1; note = Bacteroidales bacterium
MTKEAIVTAASKVQTTRDFLNLLNKIKMDDLGDKGHPFIMPHLNYFIHPARNKKSYKEFRIPKKTGGFRVISAPKALLKSFLTYTNKLLQAFYDAPDYVTGFVPEKSVVDNAEKHIGMNYVFNTDLQDFFPSISKSRVWATLKFPPFNFNDTVADAISGLCCTEIYVNGETRRALPQGSPCSPILTNIVCRNLDRRLHRLAKEYNLRFSRYADDITFSSNRNVFQKGSEFRNKLEGIITEQHFIFNEKKTRLQTKCQRQEVTGLIVSDRVNVTREFVRELDNLLFIWEKYGEADAYAKFLLHYTPKQNFHSYKPNMQAVIQGKLLYIKMVKGADNEVWRRLQRRFNKLSGAKPSTVEATLKYKYTIADFEKKIGQALDFELNKDGVIYCTFSLNGKKTSVALSHYVRTRISNILAKSDTAALEKFKTSYMLVFYEQDNTNFWRIERKRTWVKTNLADLIDTSSLAEALLSASAISEKGDELTSTPMKSTDEVLAALVDSDFDLKILDEWDKIRSS

SEQ ID NO: 61 - protein, 521 aa, unidentified
  source 1..521: note = Related to JAFQZW010000007.1; note = Bacteroidales bacterium
MNKEAIVEEASKLESTHDLLILLNKIKMDELGDKGYPFTMPQLNYYINPIRNKKSYRNFRIPKKSGGYREISAPKAILKSLLTYTNKILQALYEAPGSITGFVTGKSVVDNAEKHIGRNYIFNIDLQDFFPSISKSRVWATLKLPPYKFNDTIADAIAGLCCTEIVIDGETRRALPQGSPCSPILTNIVCRNLDRQLNKLAKKYNLTYSRYADDITFSSNHNVYQKDSEFRQELDDIIKKQNFSINSKKTRLQQKNHRQEVTGLVVSDRVNVTKDYVRDIDNILYIWDHYSEDDAYARFLTHYSPKHNLKHRIPNLSSIIQGRLNYLKMVKGADNEVWRRLQRKFNKLTGTNKSSNDENANIKYIYSIPDFEKKVETQIIVTLGSNDNVYCYFTINNYKTSVNLSKYVKTRLKNIVSENNQDLLKRFMANCILIFYEKEGSCYWKIERRRKHSMISDPKDFDLNLLLLKIEEVTLEPKKSSIAQTDNTSTSKSTTDEILDELVDSGFDLNILDKWDKIKSS

SEQ ID NO: 62 - protein, 515 aa, unidentified
  source 1..515: note = Related to JAFZZI010000013.1; note = Bacteroidaceae bacterium
MTKEAIVAAAAKVKSTHDLLILLNKIKMDDLGGKGYPFIMPHLNYFIHPARNKKSYKEFRIPKKSGGFRVISAPKNMLKSFLTYTNKLLQAFYEGPEYVTGFVPEKSVVDNAERHVGMNYVFNTDLKDFFPSITKSRVWATLKRPPFNFNDTVADAIAGICCTEMVIDGETRWVLPQGSPASPILTNIVCRNLDRMLHKLAKKYNLRYSRYADDITFSSNRNVFHKNGDFQKELIKIISSQNFSINEKKTRVQNKNQRHEVTGLVVSDRVNVTREYVRGLDNLLYIWEKHGEADAYAKFLAHYTPKQNLHPHKPNMRVVIQGKLLYLKMVKGADNEVWRRLQRRFNKLSGAKPSTVEATLKYKYTIADFEKKIGQTLAFEPNIDGVIFCSFNLNGKKTSVTLSQYVRTRLSNILVKNDAAALEKFKTSYMLVFYEHDNSGFWRIERKRTWVKTNLADLIDTSSLVEAPLSAAAIPEEREESTNTAGKSTDEVLAALVESDFDLKTLDEWDKIKSN

SEQ ID NO: 63 - protein, 454 aa, unidentified
  source 1..454: note = Related to JAFSJL010000028.1; note = Paludibacteraceae bacterium
MTKEAIIAAAKDIKTTHDLLKLLNNIKMSELGDKGYPFIMPHLNYFIHPARNKNSYKTFSIPKKSGGERTISAPTRLLKSFLTFTNRLLQAFYEAPDYVTGFVPEKSVVDNAERHIGMNYVFNTDLKDFFPSITKSRVWATLKHQPFNFNDTIADAIAGLCCTEMEIGGKSQWVLPQGSPCSPVLTNIVCRTLDHKLHKLAKKFNLRYSRYADDITFSGNRNVFHKDGEFIKKLNRVIAQQNFTVNEKKTRIQNKNQRQEVTGLVVSDRVNVTREYVRSLDNLLYIWEKHGESEAYTKFIVHYIPKQNPYKERPNMRSVILGKLQYLKMVKGSDNEVWRRLQSRFNQLSGVTPSIESAVIKYLYKVSDFEKKIGQKLKFEIFDKKVVRCFFPLNNQHTDVMLSRYARTRFSNLIVQDDFVKLEQIKSSYMLIFYEQGGSGFWRIERKRRQKLKT

SEQ ID NO: 64 - protein, 526 aa, unidentified
  source 1..526: note = Related to JAFUYF010000001.1; note = Bacteroidales bacterium
MTDKAIVAAASKLESTFDLLTLLNKIKEDELGDKAYPFKMDHLNYFINPKRNRASYRTFTIPKKSGGVRTISAPVKLLKSFLTYTNILLRAFYEAPDCVTGFVPAKSVVDNAEKHVGMNYVFNTDLKDFFPSISKSRVWATLKTRPFCFNDTVADAIAGLCCTYVNEKGEEDNIALPQGSPCSPILTNIVCHNLDWKLSGLARRFGLNYSRYADDITFSSMHNVYQEGGEFMAELRRIIEGQHFRINEKKTRLQKKGERQEVTGLVVSDRVNVAREYVRDLDNLLYIWKKHGRAAAFAKFSGRYIPKQDLKAPAFDMDRVVAGRLAYLRMVKGEESQVWRRLQKRYNTLSGKKEKTVGTDIKYLNFYTIENFSAATGLELHLVMDTISIPRETPEEAGVMRVPVAYFMSGDRRIDVELSHYMQTRLRNILESGDGKALAEFKHKYIIAYCHSSTGYFWMIIRSMPKMGNNADVSEKGAGFILSDLFCSEGESVLSDDKSTDQILSQLVASNFDLKILDQWDKIKNS

SEQ ID NO: 65 - protein, 487 aa, unidentified
  source 1..487: note = Related to JAFZME010000158.1; note = Bacteroidales bacterium
MTDTAIRQAASLMECQSDLLSLLNHIKVDELGGKAFPFTHDQLYHFCSPRRNRKHYHTFTIPKKSGGVRTISAPTKMLKSLLRCTNTLLKAFYDAPEDVTGFVRERSIVDNARAHAGMNYVFNTDLKDFFPSISKSRVWATLKTSPFNFNDRIADAVAGLCCTCLNGEDEPERIALPQGSPASPVLTNIVCRNLDRRLRGLARRFGLHYTRYADDITFSSMHNVYQEGGEFMAELRRIVLGQHFELNEKKTRLQVRSARQEVTGLVVNDKVNISRAYIRDLDNLLYIWQRHGRSAAFLKFVGRYVPKGVWFGQAHNMERVVAGRLAYIRMVKGECRAWRRLQDRFDRLIARGNHPVGSGGKDFIYTSFYTLDNFMKFSGLELQFILEDGRPKVFFVKDGVRTDITLSHYVRTRLRNILQSGSKEELRKFTARYIIAHCAFTYMSDAEGLFWLIIRSVPRKKIASLGNKDLAELITDLSLEKVEDEAL

SEQ ID NO: 66 - protein, 556 aa, unidentified
  source 1..556: note = Related to JAFUDT010000010.1; note = Bacteroidales bacterium
MNRDAIIKAASQMETLEDLRRLLNEIKEDEFGDKAYPFSERQLKYYINPKRNKQSYRQFTIPKKSGGVRAISAPIRILKSLQLCTNRILQAFYEAPDYVTGFVPARSVVDNAERHLGMNYVFNTDLKDFFPSISKSRVWATLKTRPFSFNDTIADAIAGLCCTELELDGETRVALPQGSPCSPVLTNIVCHNLDWKLNGLARRFHLRYSRYADDITFSSNHNVYQPEGEFMIELRRIVNDQRLTINEKKMRVQKKGQRQEVTGLVVSDRVNVTREYVRSLDSLLFIWEKHGEDVAFSNFLKHYVPKHNRRFRSPDMSKVILGKLMYLKMVKGEDSPVWQRLQVCYENLAHREPAASSDIQYLHSFAIDVFEKGSGVQLTFSMTDGKLKCLMEYKGREIRVCLSQYVQKRLAPIVESNNLEALEKLKKQLHIGYCMASLLETSVVNHFWLLYRKRPVVKDLPITLTEEKEIQSHIERYLKESAGVRKASDRNINAGESMKESVSVTSEIGTEEKKVKAESEADSKTGKTIDEVLDVLVSKNFRDLSILDKWDKIKTN

SEQ ID NO: 67 - protein, 517 aa, unidentified
  source 1..517: note = Related to JAFYYM010000038.1; note = Bacteroidales bacterium
MTREAIVHAASKLETTHDLLVLLNRIKMDELGDKGHPFTMPQLNYFINPKRNSSHYKTFYIPKKSGGQREISAPTHILKSLQTYMNRILQAFYEAPEYVTGFVPSKSIVDNAERHIGMRYIFNSDLKDFFPSIPQARVWGTLQTRPFSFSKEIASAIAGLCCVEARDENGKLIHVLPQGSPCSPTLTNIVCHNLDWKLNGLAKRFHLKYSRYADDITFSSDHYVYQDDGEFFREFRRIVAEQHFKLNEKKTRTQKRGERQEVTGLVVSDRANVAREYVRDLDNLLYIWEKHGHNAAFAKFIARYTPKQDLKQSSPDMKSVIMGRLMYLRMVKGEDSLVWRRLQKRFNRLADKKESCGGTNIQYLHAYPIEAFEKAVGTDVSFTLEDDFVRCSFTLNGSAHSARLGKYAKTRIRSILESGNEDAMLKFKEKFHIGFCHMDGTPEEDHFWLIFRRPPRAKGLEITDVDEILSLTDYVGLPENGETDSADSLTTDATLEALVSSDFDLNTLDKWDKIKSN

SEQ ID NO: 68 - protein, 360 aa, unidentified
  source 1..360: note = Related to JAGBPC010000032.1; note = Bacteroidales bacterium
MTNLEIAHAASRVANLPGLLALLNRIKEDEFGNRVYPFTLQELNYYINPKRSRSGYRIFSIPKKNGGDRTIASPVKILKSFQICVNRLLQALYEVPECVCGFVPGRSVADNAARHTGMRFVFNADLQDFFTSIPQARVWGALKTRPFSFPPVIASALAGLCCMEVDGADGPRYVLPQGGPASPVITNIVCHNLDWKLSGLARRFHLHYSRYADDITFSGDHFVYEEGGVFLTEFRRIVAEQNFRLNDKKTRLNRRGERQEVTGLVVSDRVNVPREYVRDLDNLLFIWERYGRDAAYAKFLSRYTPKKGRMVKKPDMEAVVRGRISYLKMVKGADSPVWKRLRKRFDILIGRAYFSTTTCS

SEQ ID NO: 69 - protein, 503 aa, unidentified
  source 1..503: note = Related to JAAYJQ010000010.1; note = Bacteroidales bacterium
MNRQEIIAATAKLETRYDLLILLNRIKVDELGEKAHPFTIRQLNHFCHPHRNTCSYKVFTIPKKSGGFRTISAPGRLLLSLLTYTNRIFQAVYEAPSCTVGFVPGRSVVDNAKMHVGRDYVFNTDLQDFFPSITQARVWATLQLPPFSFNKTIANALAGLCCSEILINGEIRNALPQGAPTSPVLTNIICQKLDRRLTGLAKRFHVHYSRYADDITFSSDHDVYQEGGPFLTELKRIIGEQHFTINESKTRVQKKGARQEVTGLVVSDKVNVTREYVRGLDSLLYIWERYGRKEAVSSFLRHYTAKHNLKKQVPSMERVLRGRLMYMRMVKGEDDPVWRRLQRKFNGLSERETFPGNDVKYEASYRIEEFEQAIGTKVEFLSSGTESSTSRPSNAQPQAVFSLHGIIRSIYLSKYCKTRLEKVLDSGSEEEMDKFRKQCIISLCHRADDPDYHFWLIHRPGRVRSSVTVLEILGADEVFHSAESAAKDILNKLIDSNFDLSVL

SEQ ID NO: 70 - protein, 556 aa, unidentified
  source 1..556: note = Related to JAFOQL010000759.1; note = Bacteroidales bacterium
MVRNDLIIQECSRLASLKDLLFLLNRVKREEYGFGAHPFTMEQMLHFSDPRRNRRHYDTFAIPKRSGGQRTITAPRGMLKSFQKVANRVFQAFYNAPPCVQGFVTGRSVVGNAGIHVGMNYVFNSDLKDFFPSITQARIWTVLQAPPFNFPKRIASVLAGLCCTDLEYVMARCADGGTSVKGTSKAKSVLPQGSPASPILSNVVCKNLDRRLSGLAKRFGLRYSRYADDITFSSQHNVYQKDGPFMKEFQRIVRTEGFTINENKTRLSRRGQRQAVTGLTVNDMVNVPRKYVRDLDCLIHIWKRYGASDAYAKFLSRNMAKVSGAGLTYFPKMEDVLKGRLAYIGMVKGRHSPVYQRLLGKMDTVRHRTSLGAFRYVHSWRISEFESLTGFSLDMEKDPSGKWYCRFGPEGHRVFVCMSRWCRSRLTGILETNDQAALNEFKRMNRIGLCFDARSMNMEARCESQIVDELSPYLDGPYSGHRFFWMIFRRVSPNSGPHKSFFELVDKRVSKEGRELMKTLGLKPVSISKGPLLTNTDPVSPTDCFDDTYDFYIRPF

SEQ ID NO: 71 - protein, 491 aa, unidentified
  source 1..491: note = Related to JAFRXO010000051.1; note = Bacteroidales bacterium
MERQEIREAASLMTNRHSLLTLLNSLKKDDLGDKAHPFTMAQLNYFCHPTRNAKHYKVFTIPKKSGGVREISAPVKMLKSFQTYTNMLLQALYEPTSAAMGFVPGRSVVDNAMNHVGMNYVLNLDLKDFFPSIPQARVWGALKSKAIGFNQEVASAVAGLCCTEIDFYDGKPVLTTVDLPKGAKTEKRNVLPQGAPTSPILTNIVSRNLDRRLKHLAARFGLNYTRYADDITFSSMHNVYQEEGEFMTELRKIVAEQNFTINEKKTRFQKKGSRQEVTGLIVSDRVNVTREYVRSIGSLLYIWERYGYDSAFARFFQHYTLKVNRVSPPSMERVLQGKLMYLKMVKGEESLVWQRLQDRFDKVCSKKPVKVSDINYVAAYTMPAFEKQFSTEISFFAKEIPGKKEKGPVISYGASFKSGNEGIIISVSDSCKELIASAIGDEKAVTDLKKMLYVAYCKRGEFPYWLVMKSRPRNIYASTVRRKEGDLFFHG

SEQ ID NO: 72 - protein, 607 aa, unidentified
  source 1..607: note = Related to JAFYOT010000249.1; note = Bacteroidales bacterium
MNIILHNIIYYFRLNGNKLPVHKEKTIQVCLERFINVSMTQKQIIGKVHGLKTKMDLLNLLNALKKEDLGKDYHRFTLAQLNYYCNPNRTPHKRYRNFTIPKKSGGVRNISAPVRGLKSMLTYLNIVLQAMYQPTDAAMGFVPGRSIADNAAMHTCRNYVFNTDLKDFFPSIQQPRIWKILQLKPFSLNKELASVIAGLCCMQDANGNGVLPQGSPCSPILTNIVCRNLDRRLTGLAKRFNLKYSRYADDITFSSDYNVFQDDSEFMNEFMRIVADQNFTINEKKTRLQKSGQRQEVTGLIVNKKVNIAKEYYRDIRSLLYIWSRYGKEQAYAKFCVRYKASKAYNAKKKGMPSMPAVISGKLLYLKMVMGEDSTAYAKLRDNFLKLCPEQKNVLKNTNLTYLASYRLDEFESAFGTNVKFEYKPFSNVSGKSKTMGSFLLEEEIVSVSVNVRCDSIVDKYLANPDEKELEKIKRRLYISLSERGNDRFWLITIARMNNEHKKSYKGSYVAKVKVRPEEIKKEGIELKREVYAEIIRPTEILENNDLDPTHPGPHYYNSTYRKWVPVDDEQFEDIPDSEEIDAMLASLVSSGFDLNTLKEWDKIKKN

SEQ ID NO: 73 - protein, 550 aa, unidentified
  source 1..550: note = Related to JAGBVU010000006.1; note = Bacteroidales bacterium
MSRTFISVGMNKQQIIEKVRGLKTKVDLLNLLNALKRDDLGKDCYRFTLNQINFYCNPNHNPSRRYKDFTIPKKSGGVRTISAPKGSLKSILTYLNVIFQAMYEPSEAAMGFVPGRSIADNAAMHVGRNYVFNTDLKDFFPSIHQARIWKMLQLKPFSLSTELASVIAGLCCMQDPNGTVDKSGKIIGVLPQGSPCSPILTNIICRNLDRKLLGLAKRFNIRYTRYADDITFSSDYNVFQEGSEFMKEFTRIVTEQRFKINGSKTRLQKSGQRQEVTGLVVNKKVNVTRDYYRDLRSLLYIWQRYGKEQAYAKFCIRYKESKTYKRKQNEMPDIVAVVSGKLLYMKMVMGEESTAYLSLKNKFISLCPEQKQILDTNLHYLASYRLDEFERAFNTQVVFAYKPQNRVVGKSKTMGTFVLGEEKHVVAINIRCDSIIDKYLSAPDDKLMKGLRKRLYITLSERGSERFWLVTIARMNNEHSRSFNESYKAKVRNEIETNSGEPVDVIDSMYEMDVYDCFPENIDIDGLLSEFVKSEFDFNTLNSWDKIRKN

SEQ ID NO: 74 - protein, 664 aa, Prevotella sp.
  source 1..664: note = Related to NPJH01000006.1
MKDISTLRCEIKKMRTHLDLFYVLNEVKKHYAETEGISFYPINRSNFEYYISSKTNRNQYYKEFDIRKKYNDGKRHIIAPFMGLKDIQKAISLMLQLIYTPYNNVNGFVQGRCIMQNAYPHVFQNYIFNIDIKDFFPSIHQARVWKKLQLPPLNFPVAIANAIANVCCYELINDDDTKIGVLPQGAPSSPILSNIVCERLDWKLRKLARENNLIYTRYADDMTFSGMYNAFSPKSEFIIKLYATIHEENFVVNESKTSLMKRGAHQEVTGLVISDKVNVPRSYIREIRSLLYIWERFGEKTASYRFALHNSNRKDKTLSEIGTLENVLLGKIEYVKMVKGANDSTYLALKGRLDKLLGAELSKKEKRRESREKKLRKVVPHNLEETQKFFHLFDYPEGFKYLTHDFPEGEEWSVDKLKEQCIGILKNYSNYSQIPTSLWALVNVFVIGKYYKKTDWIDYEGHDQRITYSDFVGGEGHPILGDHKEVIERFKNTIRVRMRCLYNLCVSWNDPKYGLNITMDKNELNKADFYTNVFILKKSVQRIFQMFASRNDKKDVNIHYHKEDIKNRRCHILTITQQDSYSEKGVDELRPKLHGGGGDFATLKHDLSGYCNWSVLSVWNEKPAKWNILRESDVDEIEEVTDKPVGFTHILTFYGNKLEEDIHH

SEQ ID NO: 75 - protein, 628 aa, Prevotella sp.
  source 1..628: note = Related to NZ_LT985324.1
MAKEFGVEYYPISWEDYCYFSSPKRSVRNYISFEIPKKSGGYRHISAPVRGLKEIQKCLNYLLELMYYPKDNVTGFVRGKSIVDNASPHIGKNYIFNVDLQDFFPSIDQARVWKKLQLRPLCLTKEVASAIAGLCSMEIEDEKGNKRYVLPQGAPTSPMLSNIVCERLDWKLSGVARRFGLTYTRYADDITFSSMHNVYQHDGDFCKELRHIIEDEHFTLNTSKVKLQKRGGHQEVTGLVISDKVNVPKAYVREIRSLLFMWECYSYAVASQKYALYHNAYVKHRTYGEFVSLENVLDGKIEYLKMIKGCKNPLYLTLRSRLDKLIGKSTKKNKDCEVIEVVNNKKEVKKHDIEATYEVLHLFEEPNGLKFLTHDFPDASWSIDKLLKQCRTVFNEEAKGHPNIPQSLYSLVHTFMSGVSNNIKGWLGYDEKLHTETWNDWEKKKEHPIKRYGDIIDIFRNTIRIRSPKLFDLIKALEGQNTQFVFDYDSKELKKADFYTNVYMLRWCLVHVLLMFGQYPEHKELNISCTRSSMNGWIVYTIQFTQVGSFPSADINDAIKRVNEGAGDLGVIKEKMRSYCNWSIISKWNDKNLRWNILRSEGVKEIEEIAEQTIGFTHEFVFYKIKSN

SEQ ID NO: 76 - protein, 380 aa, unidentified
  source 1..380: note = Related to JAFZIR010000019.1; note = Bacteroidales bacterium
MNRETIAEKAEKMTEKQDLLHLLNEVKVDMLGDKAHPFSLRQLCYYCNPRVNRKRYTDFEIPKKSGGKRRISAPVNGLKSILSCLNIIFQAMYEPSENAMGFAVGKSVVDNAKIHVGKNYVFNTDLKDFFPSIHQARVWKRLQLPPFNFNQNIANVMAGLCCMKVSSPEGDKYVLPQGAPTSPIITNMICDKLDRRLNGLANRFGLTYTRYADDITFSSMHNVYQEDGEFIKELRRIIEDQNFTINDSKTRLQRKGSRQEVTGLTVCAAPNVTKQYVHNIRSLLAIWEHHGYDIAYRRFLPRYIGEKGHVKKGSPNLDSVLAGKLLYLKMVKGADNPLYAKLQCRFDNLIGTMNGEMTSDTELRFLYTMGAKEFDFTHSK

SEQ ID NO: 77 - protein, 523 aa, Prevotella sp.
  source 1..523: note = Related to NZ_CP091788.1
MDKFETRKRVSSLQTKADLLKLLNDLKVNDLQENAYPIPMKAINFYCNPAHEKRYKSFSIPKKSGGQRVISAPCRGLMSILTYLNVMFEAMYEPAPCVCGFAIGKSVVDNANNHVGKNYVFNLDMKDFFPSIQQARVWARLQAAPYNMKKDVANIIAGLCCMKTSDGKFVLPQGAPTSPILTNMICERLDRRLTGLARRFGLSYSRYADDITFSSMHFVYSGDGDFMKELNRIVSEEHFSLNDKKTRLQKNNVRQEVTGITVNEKANVTRKYVREIRQLLYIWKKYGYNDAYSKFYPKYKAEKGHVKKGEPVLENVLSGKLLYLKMVKGEEDSTYLRLRKQFDKLSGDTILHKSTSDEFKYILTYDLSNFIAVNSIIPFKLHIKDEDLQTTASGNYKGKMELNGEYMSVFISKGVLKQIRTAEQGDYTDMWKCYISLCESAKGRFWLIHRGKHDEATHNPAPQKTISQIIDIWAKKGLEKAKEVFENVHYPTGDSIDIKAILDVWEEKGADAAEQLYEQYVKQ

SEQ ID NO: 78 - protein, 555 aa, Prevotella sp.
  source 1..555: note = Related to HF989231.1
MIAERAAQMKTRADLLLLLNDIRHDELAEAGREEDYHPFTQPKFNFYINPNHTQGRYREFYIPKRSGGRRRISAPRTGTYKYMLHALNLLLGSLYTPSLSAMGFAPGRSIVTGAEKHVGQHYVFNTDLRDFFPSVRRARVKARLLLPPFGFTEEVAIAVAGLCTVRVEAPGDDGQPARPIYVLPQGAPTSPLLTNAVCDRLDRRLTGLARRCGANYTRYADDITFSSPHNLCVEGSAFRAELARILAVEGFEMNEAKTRVQRSGQRQEVTGLVVNRRVNVCRHYVRSLRAVLYVWRRYGYDAALAALLRHDRVVPERRGRRRLPDLTRVIEGRLLFVRQVRGTADPLYARLQAAFDALVASMSAQKCENGLTFIWTVPLEQFEKQYGATVKIHFFPAEPTSQPTSSDSAAETNAPSADAQSAPTAMASCRFTLPRNRAKGGDTYDAQVELPLTVSRRLTPQTPREGMAVSFCRATKGIPFLLLHRQGAVTVAIITGSGMAGGSQPAGNAPGIFATLPVYGKRRLASAVQADQGEPPVDVDALLAELENYLTDHNG

SEQ ID NO: 79 - protein, 468 aa, unidentified
  source 1..468: note = Related to JAFZPB010000162.1; note = Muribaculaceae bacterium
MLYLLNDIITDAYGSQAATINMWQFNYFSNPNRCKGRYRSFQIPKKSGGARTISAPCKSLKYILRIVNILLQAIHKPSTAAKGFVPRLSIVDNAAPHVGKNYVLNLDLKDFFPSISEARVRARLMAKPFNFTDEVATTLAGLCSYRPYSKETAHQRIAPCVLPQGAPTSPTLTNAICDRLDMLLSGVARRFNLTYTRYADDITFSSNHYVFSRDGEFMTEVRRIIADQGFEINEKKTRLQRRHEHQEVTGLTVNEKVNTARRYARDIRNLLYIWNYHGIADAERSFLWNYDKRQRRVPDMINAISGKLEYLKMVKGANDPVYVRLSKKFESLQNGNTVLGYKIHKTWTINRFRFTHGYISVGYERNELLDRLKYDDIPDLFKNAVCIDGPHPYFYIEKRIKYQGQLYLHRQFLRVLRNIETEFLEFLNGGECRRTFFVSECTRKNKDGRLWKGFLVHHAISRDGSHFL

SEQ ID NO: 80 - protein, 575 aa, Phocaeicola vulgatus
  source 1..575: note = Related to MNQV01000214.1
MNDLRTLISKINNLSDLTKVLNYFKHRETNSEENLFTEDVLESYANPSKKVARRYKTFYIPKKNGKLREISAPNRNLKEILHYLNMMLAEVYQAGPSAMGFVKGRSIVDNANLHVGQNYVLNLDLSDFFTSISQSRICKRLQLAPFNFNENVAKAISGLCCKKVVKGGKKGYALPQGSPTSPILTNAVCDFLDKKLRHLSTRNGVKYSRYADDMTFSSMHNIYQENDTFMKNLFSIIKEERFTVNPDKTRLQKRGERQEVTGLTVNDKVNTAHKYTRELRNVLYMWEKYGYKDTYTSFYKHYKATKGHIKKGEPVLENVIIGKLDFLKMVKGENDVVYTKLRSRFEALNPNIYDSKNTNSRSKVNYIELYSVVEFEKAFKTKIKFIMSGEGKLSAVYKNGKKENSIYVSNAVKDIVFTEKAKPRKNCRFTISSMESFFVALCRSNCVNYWMMLANEPARERHIHPKYNNLPINQLLKEWEEKGLEAAADLLSSILVDETFSSNGDRKEPALPKLGKKKRKKKSSMGVLEELMIEDYMDDMELQASLTDFEDEETIEYNTKAIMKLLKGDKDGKEE

SEQ ID NO: 81 - protein, 580 aa, unidentified
  source 1..580: note = Related to JAFRRT010000017.1; note = Muribaculaceae bacterium
MMERDKIFELSQKMKTVRHLAFILNKMKCEEFGTMEFPITAKQLRHFSSPKIADKRYKTFQIKKKSGGIREINAPCYQLKIILYFLNKILKAVFTPNDCVNGFAEGRSVVSNAQCHVGHHYVFNIDLKDFFPSIPQPRVWARLQLPPFNFSQEIANVVAGLCCHPNADGTNVLPQGAATSPLLTNAICDTLDRRMKGVAKRFGLHYSRYADDMTFSSMHNVYHEGSDFRLEIKRIIEEQGFKMNEKKTRLLRDGQRQEVTGLTVNSTVNVSRHYVKYLRWILHIWETEGYSKAYSKFYPKYKKEKGYIKKGEPVMENVIGGKLNYLRMVRGSNNAAYLKLQARYDKLQQLVFIDNETDKGESYIYVQPYKMAEFCQDFSTSIVLEISARNKLVGRCVLCGMDKTIAISKSTQKKLCPDLEKKKPGDVITSDLLPECHVTLCRSKGKNFWLITEFKPLRSIYLSIQNAQVNIDELLDIWDTLGLDSAVSAFMNSINVSNFKNNNSKEGSNINENGVLSKENNPGVLESSQEKHEQYIVGLGEKLPQNTKKVIDQHRQYDTGTDSSIIDVDDVDWDVLEYSI

SEQ ID NO: 82 - protein, 573 aa, unidentified
  source 1..573: note = Related to JAGCXD010000267.1; note = Paludibacteraceae bacterium
MKTVKHLAVLLNKMKCDEFGSRKHPITAKQLLHFSTPKIALKRYKTFQIRKKSGGVREINAPCYQLSIILYFLNQLLKAIFTPNECVNGFTEGRSVVTNAQRHIGHHYVFNIDLKDFFPSIPQPRVWARLQLPPFNFSQEIANVVAGLCCHPNADGTMNVLPQGAATSPLLTNAICDTLDRRMRGVAKRFGLHYSRYADDMTFSSMHNVYQDGSDFRLELKRIIEEQGFKMNEKKTRLLRDGQRQEVTGLTVNSSVNVSRKYIKDLRWILHIWETEGYAMAYSRFYPKYKKEKGYIKKGEPVMENVIGGKLNYLRMVRGDNNAAYLKLQARYDKLQQLVFVDNETDKGESYIYVQPYSIADFCNDFATSISLEVSTRKNLIGKCDLFGIEKIIAISKSTQRKLCPNLDSKEPGDIISSELLTKCHVTLCRSKGRNFWLITEFLPHRSKCLSIQNAQVDIDELLEIWDELGVEAAIKAFTDSFVADCVNLKTTVEPKDGPASKNTNAVVQVSGINPTDIERLLAMAGQAEQDPISFAEPISADDWDELNMGTDVDDVDFDDLNDIDKDNPIASI

SEQ ID NO: 83 - protein, 568 aa, Pseudoprevotella muciniphila
  source 1..568: note = Related to NZ_CP033459.1
MEKAEIRDKAMVMKTTKNLARLLNTIKQEEFGSKRYKITPRQLYHFAYTNIAPNRYKTFHIHKKSGGLREINAPCYQLGIILYFLNKVFKSLYTPSSSVTGFTEGRSVYDNAKMHVGHHYVFNIDLKDFFPSISQGRVWTRLQLPPFNFTQEIANVVAGLCCHKNAGSTLNVLPQGAATSPILTNAVCDKLDRRMRGVAKRFGLHYSRYADDMTFSSMHNVYQEGSEFRCEVKRIIEEQGFQMNDAKTRLLRDGVRQEVTGLTVNSVVNVSRKYISDLRWIIRVWEKEGYAKAYSKFYPKYKKEKGYIKKGEPIMENVIGGKLNYLKMIRGENNPAYKKLQERYNRLQQVVYVDNETDKGTSYVYVQSYTMKEFQKYFATTVTLEVSAKGKLVGKCLLAGMEKIIPISLSTQKKLCPDLESKKSGEQVISKMLTKCHVTLCRAKGKNFWLITKYEPKRSKCFSIQNTKIDIDTLLNIWEQYGTEGAVDVFQQSIYNGQRISKEGIDGLILNFILESKYPKLDTNKTQKPQKSESETLSEEEMAQLSEFADLIDSSDIDELPFTIQLNP

SEQ ID NO: 84 - protein, 569 aa, unidentified
  source 1..569: note = Related to JAGCXD010000191.1; note = Paludibacteraceae bacterium
MEKNEIKYRLKNVKNLEDFAKLLNDVKIDEFKTAKYKITEKQLLHFCNPKTVPNRYKAFYIKKKSGGLREINAPCYQLGTILYILNIVFKAVYTPSESAMGFTEERSVVTNATFHIGHHYVFNIDLENFFPSIPQARVWKRIQHPPFNFPKEVANVVAGLCCHTNADKTKNVLPQGAATSPLLTNAICDTLDRRMRGVAKYYGLHYSRYADDMTFSSMHNVFEEGGDFRLEIKRIIEDQGFKINDKKTRLQRDNERQEVTGLTVNQRVNVSRKYVHDIRWILHCWEKDGYGKAYALFYDYYKRTKGYIKKGEPVMENVIGGKLNYMRMVKGENNATYRKLLERFLKLQGLVYVDTETDKGMSYIYVYSYPVSEFNALFKTDLSLEVSAKNKLIGKFQIEQRDKVLAISKRTQDYLCKDIAQKQPGEEVKTERLTSCFVTLCRAKGKNFWLLTKSEMKRSKCLSLLNAHIDIDKLLDIWEKRDINEASEALNYAITEGKPILTFEERMFENLNLSGFGILETVKGKSHSKSVSFESIADQLSKFESLENIEELLMENDLDDSLDIGEFKD

SEQ ID NO: 85 - protein, 530 aa, Prevotella sp.
  source 1..530: note = Related to FR900399.1
MKLLNEIKLHEFGTNKHPITVKQLMHFSNAKLGDKRYTVFSIKKKSGGLREISKPCYQLKCILYVLNIFLRSLYTPRECVMGFTTGRSVVGNAAVHAAHHYVFNIDLKDFFPSIPQARVWARLQLKPFYFSKEVASIIAGLCCNRNSEGKNVLPQGAATSPLLTNAICDKLDRRMCGVAKRFGLHYSRYADDMTFSSMHNVYKDDSDFRKEIKRIIEDQGFTMNDKKTRLLRDGRRQEVTGLTVNSKVNVSRKYMQDLRWYISMWEKEGYAKAYSRFYISYKKEKGYIKKGEPVMENVIGGKLNYLRMVRGASDAAYQKLQQRFDKLQELVFVDNQTDKGAQFVYVQPYTYKEFTSLFNTDIQLEVSAGNKLVGKCTIDGIDKFISIVKAAQRQLCPTLDGRKAGDIVESSGLSKCYIALCRSKGKNFWLMSLKPLRRSKTLSIQNAKVNVDDLFALWNNEGFEKAAAAFDDFVNKSKAIPECKEKPKKEYLDGNNTLDIQSENNIVERSTSGCNFSEDDLLAAGADVDF

SEQ ID NO: 86 - protein, 955 aa, unidentified
  source 1..955: note = Related to JAFPVK010000006.1; note = Bacteroidales bacterium
MKKGNDILIPPAYFLNDYKEGFYIERPERDWSQCELWKNLPFVLEVGDNTIATIVKGADKRRLKYVYVHIYQSTNDGRWFLSPTWSDKILTEYPFQEVKTQEEIESRIAILKEKVKKLNEEQEQEIKLPIDEFIKKHISEIDTTRKLALFITKLMKTLFSEKHFVTEKQLLYFSTPKAGKRYKTFKIRKKNGGLREINAPVHHLDKILFVLNIIFKSLYTPNNAVMGFTEGKSIVDNAARHTGQHYVFNIDLKDFFTSIPQARVWGRIQCAPFNFSRAVANVVAGLCCATNSETGKNVLPQGAPTSPLLTNAICDRLDRQLTALSKKYGLHYSRYADDITFSSMHNVYQEDSDFRKKLKTIIEDQNFCINDKKTRLLRTGQRQEVTGLTVNSKVNVTRKYVRDIRYILHLWESKGYAFAYSKFYKFYKTEKGYIKKGEPVMENVIGGKLNYLRMIKGAGNECYQKLLQCYNKLQQIIYVDNNTDKGHNYVYVQQYTLTDFENDFKTKITLQISDDEKLVGKCNLFGMDKTISISHKTQEELCPIISHLKVGDTFTSELLKNCFVTLCRQKGKNFWLITHKELDRSRCLSIQNAQIESEKLLKEWEQKGFEFVVKQFQTEILKKSDVPDYVSERDIKEFIYFVTHSKNFDRKQKLQRDSLLARDMAKRKAQPQEFKPMSVSYTANFLANFNRPDGFKYLTHDFDTESNMTLPDLREQSYKLLESEKGKIPDSLYVLIYAYLSGKTWRDAFGDNNNISINDKKWIQWSKENDNAHPITNSDFESEILKFKKAIRIVPPLLQTIVDKICEKYELHVTTKKLDKADFYTNTYILSNVLDRILQMMKRRNENVDYQRDVEVSYKREITNDVVYKKIIILQKDSFPENTFEDVSTRMNNNTEAGDLGAIRKILNGYCYWSIETKWDDKSLRWNILSDDDAPETEPIEDTLAVGFRHILTFM

SEQ ID NO: 87 - protein, 1037 aa, unidentified
  source 1..1037: note = Related to JAFYAR010000035.1; note = Bacteroidales bacterium
MDKNKYITIKNAVFDNYNEDCFFFEIPSMDLSNANSWHHPFLLYDGTNIYSILRGADKSKLRFAYCYIHQSKKSGQFFFNISLTDKIIQKYNCKKISTKDEFETLKEQLKQKVKLLNKEYSQDVLPLDEFIKKNINSLNNTRDLAFFLTKIMKVIFSENHFVTENQLKYFCSPNIPNRYKTFKIQKKSGGLREINAPTNRLNKILCALNIVFKTIYTPHNAVSGFTQGKSIADNAIKHIGQNYVFNIDLKDFFTSIPQKRIWGRLHVHPFNLRGQVANVVAGLCCCKNSETGENVLPQGAPTSPLLTNAVCDKLDKQLFKLSKKYGLHYSRYADDITFSSMHNVYQEDSDFRRELKIIIEGQNFCINDKKTRLLRSGQRQEVTGLIVNSKTNVTRKYVRDLRYILHVWETKGYAVAYSIFYRFYKKEKGYIKKGEPVMENVIGGKLNYLRMIKGTSNECYQKLAQQFDRLQQIIYVDEDTDNSKQYVFVQSYTINEFEHLFNTKITLQISARKKLVGKCELYGSEKIIPISHLTQDELCPEITKFHVGDIVKNEKLDSFYITLCRQKGKNFWLIINKELIRSRCLSINDIIIDTENFFHLWETEGFIIVVKLFQFVLNKYGNFDTEKVVNFINDLSKRNEISKKKRLTKKRKLQIEEALKDDSFKKIKETEIQEFVYFITHYKQFTYKQKMYVNRLLTRDLATKYIEKTEIVIDDGKHRCGVRCEYISPKKLQKFLFDFNQDEVLKYTCHPIDSEEVIEEINKQCKTDIYSVEAHSKLILERFESKFKNVKSSRNMQGLIFAYLKGPKEWSSNRVVINWSSNELISWSNENKGKIASPGKNIAAKQKNYGFKLPNPFVSSINGQRVATFTNLVIFFKTLFHIRRDNSLKNIITYNNKSIENVNITFSSNFNENIELFTDVDKLLQAYKNIIKICTDCSLEGEQPVFEISFYKEENNVYFCIHHINTKYGKTLDDSLKRIGESQSNLIKNQINGLCDLFIEADFGNKEYARINLWDESDELKAQNIAEMQGVKYILRF

SEQ ID NO: 88 - protein, 892 aa, unidentified
  source 1..892: note = Related to JAFZLC010000057.1; note = Paludibacteraceae bacterium
MNFCFPDKMITNCENNILENERNLKISLKEHFEPIENIEEQGVSNKDNTKSLSIDKLIKEHIFKTDSPNKLAWLISKIMKEVISENYFVTEKQLKYLSTPKVSNRYKTFKIKKKSGGTREINAPTNRLNNILYSLNLIFKSLYSPHEAVCGFTEGRSIRDNALRHVGHHYVFNIDLKDFFTSIPQARIWARIQCAPFNFSPSVANVVAGLCCVYNEELGKNVLPQGAPTSPLLTNAICDKMDRKLAALAKKYGLHYSRYADDITFSSMHNVYQEESEFRKEMKNIIEGQGFCLNDKKTRLLKSGQRQEVTGLTVNSKVNVTRKYVKDLRCLLHIWETKGYNTAYSYFYPLYKKEKGHIKKGEPVMENVIGGKLNYLRMIKGESNACYQKLQQRYDKLQKIIYIDNNIDKDITFVYQQFVLQDFEKNFSTKISLQISPKEKLIGKCNIFGMEKMLSITLNTQKELCPNLNTLNVGDTVNSPILKDCYVSLCCQRGRNFWLISHKQLEGSKYLTIPYIKINPDILLKKWEETNLEYVAWKFYFAISNKIDISTLENSIQEFVYFVTHNKHFNNTQKLQVAKLLARDYQKSCEEQNDKLIYSQENKNNEGKIIEQQKIFDPIDTARFLSLFNEPTGLKYLTHDFDPDNCPETINELIEQTENVLKTKKRIPESLYALIENFSFGKKEWLDTFGKSHSSSIDKTDWIEWSENFHSHPINNPNFRNEIEIFRGTVRIDKGLLSKIIDVAAQNTALKIEKEKIDTADFYTNTYLLYLSIKRIFEMMNHRTEFPNVFVSYKRGHDENGAMLRKIIISQKGSFPQKTLQESIDRLNNHKEAGDFGAIKKYLNGYCFWSVETRWEGKSSRWNILRNANTPETEELDLESDGFTHILTFYLV

SEQ ID NO: 89 - protein, 649 aa, unidentified
  source 1..649: note = Related to JAAVFW010000009.1; note = Bacteroidales bacterium
MNLKDQNLINSDSKNKTKKRVLAHQFQGIFFNMGNSDLTEKRKKISTAEELAAVLDEIKQIEFASVRYSISVKMLRHFSSDKITPKRFRTFHIRKKSGGLREIKAPCKQLDVILTCVNILLKSIYEPSDVAMGFAPGRSVLNNAQVHVGHNYVFNIDLKDFFPSIPQARVWKRLQLAPFNFSQEIANILAGLCCSYDANVNANVLPQGSPASPLLTNTICDKLDRRMKGVAKRFGLHYSRYADDMTFSSMHNVYQAGSEFRLEIQRIISEQGFRMNDSKTRLQKRGFRQEVTGLTVNDIANVSRKYISDLRWMLHVWEKEGYAKAYALFYPKYKHEKEYIKKGEPVMENVIGGKLNYLRIVRGENNPAYRKLQARYNALQELVFVDNETDKSKSYVYVQPYALADFQELFNTTISLTVTREKKLVGKCIIDNREKTLSISKSTQKTLCPNLGNLNTGELVNSEELAECYVTLCRHKGKNFWLITKFEPKRSRCLSIQNLKITPDEILDYWDRYGLEKTIEDLTQFIQYADPEDSFKDWRLLADFEHTIDRGKFKISKKDLIVFFLKNKNVTSLHRKKAMQLMIDSIPINTDSENIDIEKLLDIWEEKGLDEAVLAWKEMSRKKKSKKKNPDPDPIVNDDAPQFDLVFDW

SEQ ID NO: 90 - protein, 650 aa, Bacteroides sp.
  source 1..650: note = Related to JAAVDW010000016.1
MEKLDLTEKLKNINTAEQLATVLDEIKQIEFGSVRYSISVKMLRHFSSDTIAPKRFRTFHIRKKSRGLREIKAPCKQLDVILTCVNILLKSIYEPSDVVMGFTSGRSVLNNAQVHIGHNYVFNIDLKDFFPSIPQARVWKRLQLAPFNFSQEIANILAGLCCSYDANVKANVLPQGSPASPLLTNAICDKLDRRMKGVAKRFGLHYSRYADDMTFSSMHNVYQEGSEFRLEIQRIVSDQGFRMNDSKTRLQKTGSRQEVTGLTVNAIANVSRKYLSDLRWILHVWEKEGYAKAYAIFYPKYKDEKGYIKKGEPVMENVISGKLNYLRMVRGENNPAYRKLQARYDSLQELVFVDNETDKSKSYVYVQPYTVVDFEELFKTKLTLTVTRDKKLVGKCEIDNREKTLAISKTTQKLLCDNLDNLNAGDIVHSEELSECYVTLCRHKGKNFWLITKFEPKRSRCLSIQNLRIAPEEILDYWEKYGIEKTTEKLVLFVQFANPGDSLKDWNPSENSEHTIDRGSFKISKDDLIVFFLKNKNVTSLQRKKAMQLMIDSIPVNRYSENIDIEKLLDIWEEEGLDAAVLAWKEMSKINKSKPISHKKKANTKNQSSQDTFLEEIGISEEELASIQQEMAKCGGKPIGKPIAGSYSLV

SEQ ID NO: 91 - protein, 661 aa, Bacteroides sp.
  source 1..661: note = Related to JAAVCY010000011.1
MENSNLTEKLKYISTAQELAVVLDEIKQIEFGSVRYSISVNMLKHFSSDTIAPKRFRTFHIRKKSGGLREIKAPCKQLEVILTCVNILLKTIYKPSDVAMGFTSGRSVLNNAQVHVGHNYVFNIDLKDFFPSIPQARVWKRLQLAPFNFSQEIANILAGLCCSYDPNVNANVLPQGSPASPLLTNAICDKLDRRMKGVAKRFGLHYSRYADDMTFSSMHNVYQEGSKFRIEIQRIISEQGFYMNERKTRLQKTGSRQEVTGLTVNAIANVSHKYISDLRWILHVWEKEGYAKAYAMFYPKYKHEKGYIKKGEPVMENVIGGKLNYLRMVRGENNPAYRKLQTRYDALQELVFVDNETDKSKSYVYVQPYTLVDFQELFSTTISLAVTREKKLVGKCVIDNREKTLAISKSTQKSLCPNLDNLNAGDLVISEELAKCYVTLCRHKGKNFWLITKFEPKRSCCLSIQNLRIAPEDILDYWEKYGIEKTVEELTLFVQFANSGDSLQNWNHSENFEQTIDRGGFNISKNDIIDFFLKNKNVTSLHRKKAMQLMIDSIPVNTDSENIDIVKLLDIWEEKGLDAAVLAWKEMSKTKKLKPNSTKKKATERDRSSQNTFLKEIGISVEDLAALQQEIGEGGGTPIDLDIDWDDIPFADDDSEIIGEL

SEQ ID NO: 92 - protein, 657 aa, unidentified
  source 1..657: note = Related to MNQI01000006.1; note = Bacteroidales bacterium 43_36
MNKTDILEQLKTMKTVEDLAVLLDAIKQDEFGSVRYSISAPMLKHFSSDKIAPKRFRVFHIRKKSGGEREIKAPCQQLYVILTCLNVMLKACYEPSDAAMGFTSGKSVLNNAQVHVGHNYVFNIDLKDFFPSIPQARVWKRLQLSPFNLSQDVANVLAGLCCAFDAEAGHNVLPQGSPASPLLTNSICDKLDRRMKGVAKRFGLHYSRYADDMTFSSMHNVYQDGSEFRQEILRIIEEQGFCMNDKKTRLQKKGARQEVTGLTVNAVANVSHKYISDLRWILHVWEKDGYAKAYALFYPKYKHEKGYIKKGEPVMENVIGGKLDYLRMVRGENNPAYQRLQARYYALQQLVFVDNETDKSNSYVYVQPYSMPEFHELFHTEVKLVITREGKLVGKCEIDGREKTLAISKSTQKSLCPDIESMHTGEIITSDELAKCFVTLCRNKGKNFWLITKFEPKRSRCLSIQNLNVSPEDILTLWEKEGLASTVEELTLYIQYANPTDSILSWNPLADSKNTIDRGSFNFTKEDIIAFFLKNKNVTASHRKRAMQLMMANIHEQSDGDGINVVELLNIWEKDGLDAAVKAWKESTNKQVQQKTKAKKSKSNSASKFTRETGFSKEAFGTFRQEIALDGGTPVEIDIDWDDIPFDIDDSGVIGGL

SEQ ID NO: 93 - protein, 488 aa, Barnesiella sp.
  source 1..488: note = Related to JAAVFD010000014.1
MDKLVVIEQLKKMKTVKDVAVILDTIKRYEFGSISYNISEKMLKHFSSDTIARKRFRTFYIRKKSGGFREIKAPCQQLQVILTCLNILFKSIYEPSDVAMGFTSGRSVLNNAQIHVGFNYVFNIDLKDFFPSISQARVWKRLQLPPFNFSLEIANVLAGLCCTYDESLKLNVLPQGSPTSPLLTNAICDKLDRRMKGVAKRFGIHYSRYADDMTFSSMHNVYQEDGDFRVEISRIIDEQGFHINESKTRLQKKDTRQEVTGLTVNAVANVSRKYISDLRWILAIWEKDGYDKAQALFNPKYQQEKGYIKKCEPALVNVISGKLNYLRMIRGESNFAYQKLAKRFEVLQEIIFIHHKNDVKNFRINTKFELKYSRCLRNQNLKVSLDGLLDIWEKGGIESAVEELAESGYMSITSRDSIVSGNEHLLNYFLNNPKLTMTHRKRLIRLLLAYIPSKPLKTDIEQLLSIWEKEGLDAAVREWKKLKDNKAN

SEQ ID NO: 94 - protein, 523 aa, unidentified
  source 1..523: note = Related to JAFUKZ010000065.1; note = Muribaculaceae bacterium
MKKLEIRNRLIAIKTVEDLAELLNEIKKDEFGTNRYEITDKQLKFYSSDKYTSKRYRTFHIRKKSGGLREIKAPCYQLNIILRILNIALGAVFEPDSVAMGFAPGRSVVNNAQKHVGHNYVFNIDLKDFFPSIPQARVWKRLQLAPFNFSQEIANVVAGLCCSYNEERGQNVLPQGAPTSPLLTNAICCNLDRKMKGLAKRFGLHYSRYADDMTFSSMHNVYQEGGEFRKELLKIISEQGFTINDKKTRLLKTGCRQEVTGLTVNAIANVSRKYIQELRWILNAWEKYGYAKAYALFYPRYKSEKGYIKKGEPVMENVIGGKLDYMRMVRGANNVAYKRLQTRFDKLQQVVFIGSEEEQTQAKKFMYVQPYTMAEFKEYFHTEVSLTVTKNGKLVGKCTIAEMEKTLAISHATQDYLCPDLKQHKEGDCVESKKLEKCNVILCRAKGKNYWMITNKDHKRDKILSIQNVKINPDDLLDLWEKEGYKAAAEEITIDNRKGMPVLLTLPGLELERSFDIKRKDNE

SEQ ID NO: 95 - protein, 466 aa, unidentified
  source 1..466: note = Related to JAFYUK010000058.1; note = Muribaculaceae bacterium
MEKLEIRNSLIAIKSVEDLAELLNNIKNDKFKTSRHKITDKQLKYYSNNKYAPKRYRTFHIRKKNGGLREIKAPCYQLNIILRMLNIAFESVFEPDSVAMGFAPGRSVVNNAQMHIRHNYVFNLDLKDFFLSIPQARVWKRLQLAPFNFSLEIANVVAGLCCSYNEERDQNVLPQGAPTSPLLTNAICGNLDRKMKGLAKRFGLHYSRYADDMTFSSMHNVYKEGGEFRTELLKIISEQGFTVNDKKTRLHKAEHRQEVTGLTVNTKANVSRKYIQELRWILNVWDKYGYAKAYALFYPRYKSEMGHIKKGEPVMENVIGGKLDYLRMVRGATNPAYKKLQERFDKLQQVVFLETEEEQPKTQKFMYVQPYTMTEFKEYFLTEVSLIVTKKGKLVGKCTIAGMEKNLSISHAAQDFLCPKLNLCKEGDSVVNEKLNNCYVILCRAKGKNYWMIGLIGQKRNILKMK

SEQ ID NO: 96 - protein, 529 aa, unidentified
  source 1..529: note = Related to JAAVBM010000118.1; note = unidentified bacterium
MDNNTIIDRYKKIHDAGAFLGLLNAMKIEEYGEKTEKFSTRDLKVFIWPNNPERYSTFTIPKKSGGVRHISKPCPKLKYMLRYVKQFLQAFYNPMPCVQGFTTGRSVVGNAGMHLHQNYVYNVDLSDFFPSISQGRVWKRLQLPPYNFPVGLCNIIAGLACAPYETPEGVKYNALPQGAPTSPILSNIVCEQLDRRLTGLAKRFGLHYSRYADDMTFSSMHNVYQDNSEFIRELQRLITQQGFRFNEKKTRLQIRGSRQEVTGLTVGTKVNVSRRYIKELRSVLHVWEKFGYSEAFAWFYSRYKRDKGSLKKGEPVLEQVIEGKLNYLKMVKGNSDSTYKTLAGRIEACMTALDEERPKHGKRNVLVSYELKDFSTRFSNVSMDFSTSPDGIVSGSLTVDSVATPIYFDKIFRKLSSANKAKVLKAISQDTSDWFISEIEDLDKRYRNKFNHFWLISRYRPHQSTTVDKSEITRLLLELWEKDGLDAAVDEWKKLIKYDPSQKSESMQATSLQNPQNVLDSFFYEHLNK

SEQ ID NO: 97 - protein, 486 aa, Veillonella sp.
  source 1..486: note = Related to JABUTH010000081.1
MERTEIANRVKAMISQEDLLQLINELKAEDLGDNAYPFSMRQLRYFCNPNNESRRYIHFDIKKKSGKEPRHITAPQKTLKMILTYLNQILQAVYEPLPCVMGFVSNRSVADNASKHIGKLYVYNIDLKDFFPSIDQARIWKKMQCPPFNFCNQEDPNAPQRRVLADMIAGFCCMKKPMEDGEIKQRYVLPQGSPCSPVLTNIICERMDRRLTGLAIRFGATYTRYADDMTFSSMHNIYQDDSEFIKELHRIISDQNFRINPAKTRLCTTKMRQEVTGLTVNEKANVSRKYLKELRRNLHNWEYYGYNEAYKRFYARYKMEVGHKKHGEPVMENVLGGKLLYLKMVKGESDPTYQKLQKRFDILVEAKEGRMSQYADSKFRYIVTYRIAEFEDIISTKIQIGVSDNGYKYAFYENGSKRTYISLSKNIGKEGIHTLFISLCENQKGKRFYLIHRAIEEKAKVETKQTLHLDAMLDKLLETNFDIDSI

SEQ ID NO: 98 - protein, 529 aa, unidentified
  source 1..529: note = Related to JAFZQM010000005.1; note = Bacteroidales bacterium
MTPNEIANEAKSLQTPTDLLELINKIRLSEDAQTHRALSLKELALYCNPDSSKVKRFRTFFIPKKSGGKREISAPVSKLDAFLWPLDLILKSVYEPKSCVMGFTYGRSIVDNAKAHLGQNYVLNLDLENFFPSITQGRVWKRLQVAPYNFAPKVASVIAGLCSIKKVNDDGETRYVLPQGAPTSPVLTNIICERLDRRLLGVAKRFNLRYTRYADDITFSSMHNALKIGGEAFQEIKHVIEEQGFAINSKKTRLQKVGERQEVTGLILSEKVNTPRSYVRDLDQILYVWDKWGYEKAYARMMLVKGEKAYRKNGLTTLERVIGGKLDYLKMVKGENDKVYLKYLSLFNRLKKQGAHSDDSLNYVATYTVASFQELFKTDLIFKEEGEHIRASFRLNDVFHPVRITSFASKAISDKGKEKESLYISLCEDENLFWLIHIREPKAAPSTDLILPIKKIIKIWEEKGLAAAIKAEEEARKKQSRAEETKKPTLRAMMMAKYFPELAEIEGEFKDLPSLMDMINHLEEDGETN

SEQ ID NO: 99 - protein, 584 aa, unidentified
  source 1..584: note = Related to JAFXVO010000013.1; note = Paludibacteraceae bacterium
MDENEIKDRVGKLRTKEDLLDLLNSLKVAEYGEGVHLFTMKQLNFYCNPKYGKRYQSFRIPKKKKGEFRTISAPVAALKSIQHFINVILSVLYKPTDVVTGFVKNKSVVDNALRHVGMNYVLNIDLENFFPSIPQVRIWWLLQQKPYGFSKEIANVIAGLCAIKQPKKEVESPKNAIEDYDYVLPQGSPTSPILSNISCEHLDHKLQKLARSFGMNYSRYADDITFSSEEYVYSRKGKFWTQLRRIISEHKFSINENKTRLLRKGVRQEVTGLTVNKTANVSKKYIKEIRRHLNTWEKYGYAIAFKNFYPIYKLEKGHVKKGEPDLMNVLSGKLLYLKMVRGESDPVYSKLNTRFKNLTTGEDSSIVFGSMSYHNTQKVTEFEKTMDTEIKINRTQGTLKSYFFETKSIATKKRRKKENSPSEPQVTKVDVRISENANFEHKKDLFISLCRNEKGETFYLMHKELFSTDEKNERKLELDKMLSALVRGGKVHLEVLEKDIVNEEKPIYEDTMSVVEFEKKHRCKVELSEDKKYAVAKYKVKRENIKISPKVNPEEYREHSISKYTKGSDSSYYLIHRKPRTDKK

SEQ ID NO: 100 - protein, 445 aa, unidentified
  source 1..445: note = Related to JAFXDI010000014.1; note = Bacteroidales bacterium
MEIDIVSSVKKLRTKSDLLRLINRIKEIKFVEVGLQKKFSPVTIKQLEYYSDPNNTYRRYRKFSIPKKSGELREIHAPRNANYKVILRTLNEILNTVYEPSEYTMGFVRGKSVVTNALSHVGKNYVYNIDLKDFFPSIDYLRIAKRLQLSPFCFPRQIAIIIAGLASIRTDEGDAVLPQGSPLSPILTNIICDKLDRKLSRLAEKFGLSYSRYADDITFSSYHNVYHQDGEFCKKLKSIIEKQGFKINENKTRLQKRGQRQLVTGIKVNTETNVDRSYINQIRNLLYIWKRYGYSVAEQRYYEWRLKNKPLSYKRTSLASYLNGKIQYLRAVKASGYSTAYIHFLFEYEYLYKETFKKKKRYGINYIETTPLEQFEKKLGVQIDINKKVDADGQSHRFSVFEYKFIPTFISVSKDITPEDETNKSKLSISRCIDQRKKEFWLIHY

SEQ ID NO: 101 - protein, 321 aa, unidentified
  source 1..321: note = Related to JAGBVR010000009.1; note = Bacteroidales bacterium
MDIKDTNTLVSTIETIAPYNVGWALTDRVGDINNLASARLRTLSYKEFDIPKKSGGTRRITAPVGKLKDVLKCLSVILTPYYEPGGCVHGFTTQRSVASNASVHMGKNYVLNIDLKDFFPSITATRVQKALQKHGLNSEVAHLISRLTTLPMAIEDSQTLRNVLPQGSPCSPLLSNMVCSDLDRKLMGLARRFRVDYTRYADDMTFSSNHHVYAAGGEFFAELRSIIEDCGFTINERKTRLQKRGSRQEVTGVIVNEKTNAHRSFRKNLRAAVFAAETFGCTRKEYNSIMGKISYLSMLLNEERGCIYKYKAIMSKVMIKK

SEQ ID NO: 102 - protein, 321 aa, unidentified
  source 1..321: note = Related to JAFYOT010000249.1; note = Bacteroidales bacterium
MELKDTDALTRAIEEIAPYCAGWALTEKVGDINRLASARHRILAYKEFKIPKKSGGTRKITAPTGKLKGVLKCLSQILTTYYEPHESAHGFMPGRSVATNADVHVGKNYVLNIDLKDFFQSISSQRITRALTRHGLSQDVAELISRLATIPTVKEGSDISIHALPQGSPCSPILSNMVCVDLDKRLSGLAKQFRVDYTRYADDMTFSSNHNVYSADGRFFEALRSIVVECGFVLNEKKTRLQKRGSRQEVTGILVNTKRNSHRSFRKNLRAAVFSAETNGCTHREYMRIMGRISYLSMLRGKEDPCVKRMQAIMSKVAVTK

SEQ ID NO: 103 - protein, 338 aa, unidentified
  source 1..338: note = Related to JABUTR010000154.1; note = Bacteroidales bacterium
MSFTVPITVPLPETLPQLHEEMARIAVSTSGWAVHNPGGREFLSKAESRSFRQRFYREFSIPKKSGGRRRITAPTGYLKGAQKAIAVLLERLYEAPDMVNGFTGDRSVLTNAEAHVGRNYVFNTDLRDFFPSITAGMVRKTLEKEGVSPEVARYISVVCTITTGDGDLSEDVLPQGSPASPILSNMVCLQMDRHLDWLARRYGLTYTRYADDITFSSMHSVYGKNSPFLKGLKEIIEEYGFSINEEKTRLQKKGSRQEVTGLIVSDRVNVCRRYLKNLRAEVFRMEMQGFTIEEYRRVMGKIAFVGMVRGREDPLYRKLHNRIRSIKRHPEGFLAQPR

SEQ ID NO: 104 - protein, 338 aa, unidentified
  source 1..338: note = Related to JAFXUH010000085.1; note = Candidatus Methanomethylophilaceae archaeon
MKAMKPFKNIPDTLEQMCERIMIRLPLVCRKPQLLGMDDILPYRRRKVRMNSYHEFGIPKRSGGMRVIQAPCEELNYIQKAVNSLLREQWTPADEVCGFVQGRSVGMGAAQHVGMHYVFNTDLHDFFPSITAPKVFEMLMRELGMKPAVARLICDLCTIPVKEGYDVLPQGSPASPILSNIACARMDRRLKGLAECFGLTYTRYADDITFSAPYNAFKEGGTFRICLERIIREEGFSLNEAKTRLQKRGGRQEVTGLTVNEKVNVPRKWLKGLRACIHRMEVDGFSPEEMDAARGKVAWLRHARGGLDPLSQKMVMRLNALEVALYFDELPDEDGSKI

SEQ ID NO: 105 - protein, 328 aa, unidentified
  source 1..328: note = Related to JAFUHQ010000138.1; note = Bacteroidales bacterium
MNAFLYNLGPESLPVGTPDELCMSIMLALPAVCRRTLLPGTGSIRKFRHPARRTAAYRRFEIPKKSGGVRTIMAPTGDLKDILTTVNSLLSLYWEPKHSYVHGFTSGRSVVSGAEPHVGKNYVFNLDLKDFFPSITKQMVARGLERAGFDRRTARFLSEICTVPGDDGREILPQGAPTSPLLSNISCMMLDLRLAGLAAEFSLDYTRYADDMTFSAQYNAFGPRGDFRSLMETVIREEGFRINEKKTRLQKRGSRQEVTGLTVCRKVNVARKWIKDLRAQIHRMETVGFTPAEYRSVCGKVGWIRQVRGAVPMYRKLRARLRALPLPA

SEQ ID NO: 106 - protein, 337 aa, unidentified
  source 1..337: note = Related to JAFYCU010000158.1; note = Muribaculaceae bacterium
MTEDLRDYLRGCISTASIADMCVSINEIGPFVSGLSISNPVSVSLLLYYTDVRVRRAAYHEFQIPKKSGGFRNILSPCGELKEIMHTLAFILKELYVATPPAMAYIAGKSIVDNACCHLGRNYVFNVDLSDFFPSITAMMVEHHLVKIGVSPLVATVIATLCTYPTIIDHHVVNIVPQGAPTSPVISNICATTLDHRLSGLAKRFHLSYTRYADDITFSSNHNVYHPDGDFMIELCRIIDECHFTINRNKTHLQKRGDRQMVTGLLVCEKPNVGRKFIKDLRAHIHKIKFEEEPTLHDINVVRGKLNFLRMVKGAEDTTYLSHIKKLNMAIKGKHFV

SEQ ID NO: 107 - protein, 342 aa, unidentified
  source 1..342: note = Related to JAFRPT010000056.1; note = Muribaculaceae bacterium
MNAELREELRSHINVDTIEGLCKSINEIGPYVSFLGMDSSISVSTLKYFTQVSARRDAYRQFHIPKKTGGVRTITAPDGQLKDIMFTLAFILSELYIPSPEAMAFVPQRSIVDNAQQHLCKNYVLNLDLCDFFTSITSYMVERGLCELGISPVVAQCLSTICTYPEFKENRVQNVVPQGAPTSPVISNICARRLDRRLSGLARSFHLSYTRYADDITFSSNHNVYHQDGAFMAELYRIITDCHFAVNEKKTRLQKRGARQEVTGLSVSEKPNVSRKHVKNLRALIHKISLEGAPEMHDINVARGKLNFLRMVKGETDSTYIRLIIKLNKAVAGKHFADSIKA

SEQ ID NO: 108 - protein, 341 aa, unidentified
  source 1..341: note = Related to JAFUDZ010000100.1; note = Muribaculaceae bacterium
MSLQEYLIDHICLDTRESLCESINEIGPYVSGLSIDNTITVKHLRRHANARIRLGCYHEFRIPKKSGGFRTITAPDGQLKHIMTALAFILTYIYHPTPTAMAFVPCRSIVDNARMHVNHNYVFNIDLCDFFSSITADMIEYSLIRQGINSMVARDISTICCYPVSDGTHTRNILPQGAPTSPVLSNICAQTLDQRLTGLAQRFHLTYTRYADDITFSSDHNVYHDNGAFIQELRAIIAECHFVINTKKTRLQKRGSRQEVTGLTVNERPNVSRRYIKNLRAMIHHIELDEHPSCHAINVARGKLNFLRMVKGENDSTYIRLVIKLNLAVRGKHFASDTPTV

SEQ ID NO: 109 - protein, 338 aa, unidentified
  source 1..338: note = Related to JAFYQJ010000016.1; note = Paludibacteraceae bacterium
MDIDVSSRDALYNSIYKVMPYVSNTLLASPSVLYKKIRFYNNVKNRLSAYHEFLIPQKTGGTRKILAPNSDLKSLMSAIAFILNTMYMPSDSVMGFVKQRSVLTNAKKHVGNNYVFNIDLSDFFPSITDSMIEAQLLKMNIPPLATRIISSVCTYPQKMEGGTYRQVLPQGSSASPILSNICCISLDKALEGLAKRFHLTYSRYADDITFSSNHSVYQEDGEFMTELQKIIATHHFFINPKKTRLQKRGTRQEVTGVSVNEKTNVSRKYVKNLRALIHQIALAKKLSTKKVNVARGKLNYLRMIKGVNDNTYKTLCIKLNLALKGKHFTPKKKRSYVK

SEQ ID NO: 110 - protein, 393 aa, Duncaniella sp.
  source 1..393: note = Related to CP039547.1
MHSLVHSAHCRSLDHPAHTKVRPMFSLLSQIDKIMRDQIVKYLKDITIGNPKELFDVLNFIAPLIDGWSLTEPKSGRQIMRFASVKARQSAYVDFTIPKKSGGYRKISAPVKPLKAIQSAINILLQAIFVPDEHATGFVLNRSVKENALIHVGQTCIFNMDLENFFPSITKLMVRQALHRELGDRLQSNDVINIICRLCTVSDSEGVEVLPQGAPTSPVLSNIVLKSLDKDMSKLAERMECKYSRYADDITFSHSKSIRRMSPFWQSRLYNIIAKYGLKVNEKKTKTFVPGTRREVTGVVVSDKINVPRSYIKQLRVLLHLWEKYGYAQAQIIFTRDFCKGMEKNLVNVIDGKINYLEMIKGKDDPTYRKFKSRFSHLQWKEKQYSNQIQNAI

SEQ ID NO: 111 - protein, 359 aa, Bacteroides sp.
  source 1..359: note = Related to JAAVDH010000018.1
MREQVAEYLKNVTISSRKQLFDALNFIAPLIDVWSLAAPKSGQQFLRFSSAKSRTTGYVDFTIPKKTGGVRKISAPVKPLKEVQSAINTLLQLIFIPDEHATGFVLGKSVKDNALIHVGQTCIFNTDLENFFPSITKKMVRRALHTELGHILNSNDVINTICRLCTVPNSDGIEVLPQGAPTSPILSNIVLAGLDRDMAKLADRMECKYSRYADDITLSHSKPVRKMSSYLQSKIHRIILKYGLKVNEIKTKTYVPGRRQEVTGVVVSSKINVARTYVKNLRILLHLWEKYGYIQAQLIFIRDFCHGKEKNLENVIDGKINYLEMIKGKDDSTYLKFKRRLKLLQYKERQKTTYTKRAI

SEQ ID NO: 112 - protein, 359 aa, Muribaculum gordoncarteri
  source 1..359: note = Related to NZ_CP039393.1
MRTQIADYLKDLTIGNRKELFEVLNFIAPLVDCWSLAEPKSGKQIMRYASANARKSAYVEFSIPKKSGGQRTISAPIKPLKAIQSAINILLQSIFVPDNHATGFVLDRSVKDNALIHVGQTCIFNTDLENFFPSITKIMIRKALHRELGDKLQSKEVINIICRLCTVPNSSGIEVLPQGAPTSPALSNIVLKSFDKDMSKLAERMGCKYSRYADDITFSHSKSIRRMSLFWQSRIYNIIAGYGLKVNEKKTKTLVRGTRQEVTGVVVGDKINVPRSCVKHLRVLLHLWKKYGYTQAQIIFTRDFCKGKEKNLVNVIDGKINYLEMIKGKDDSTYRKLKSWFNRLQWKEKQRSNQMQKAI

SEQ ID NO: 113 - protein, 359 aa, unidentified
  source 1..359: note = Related to DVIH01000092.1; note = Candidatus Avibacteroides excrementipullorum
MLDQIADYFKDKTIGNRKDFFDALNFISPLIDGWGLCEPLSGRRILRFVTKKSRQNGYVDFTIPKKSGGVRKISAPVKPLKEIQSAINILLQSIFIPSDSAMGFVAGRNVMDNALIHVGQTCIFNTDIENFFPSITKIMVRKALQRELSNKLTSHDVINIICSLCTVPNNVGVEVLPQGAPSSPILSNIVLKSLDNEMSKLAGRAGFRYSRYADDMTFSHSKPIRRMNPFWKSRILNIIEQHGLKINDSKTKTFVRGIHQEVTGVIVSDKLNVSRQYVKQLRVLLHLWEKYGYEQAQTIFSRDFCKGGTKNLCNVIDGKINYLEMIKGKEDSTYCRFKQRLKTLIWKQKQLSTNKTASV

SEQ ID NO: 114 - protein, 339 aa, unidentified
  source 1..339: note = Related to JAEKDI010000013.1; note = Muribaculaceae bacterium
MTGISGNYIRRFLSKNSRRKAYKSFKIPKKSGGFRSISSPVNDLKDIQRAINALLLSIFEPSPYAMGFCRNRGVDTNAKIHIGQTCIFNTDLENFFPSITKQMVRKALHRELGDVISSNEAINYICSLCTVPNDEGIEVLPQGSPASPVLSNIVLKALDRKLALYAELWECRYTRYADDITFSHNSTVRKFSQFKQLRIRSIIEEFGLKINEKKTKVLVQGERLEVTGVTVSSNKANVARKYIKQLRTLMHLWDKYGYEQAQHIYVRDFCGGIEKSLTSVINGKINYLCMIKGKQDSTYRRFKSRYETAEKKRKALSKTKVVLYRRSRNWNKKSSPAHL

SEQ ID NO: 115 - protein, 321 aa, Alistipes sp.
  source 1..321: note = Related to NZ_NFHT01000005.1
MTDRPERTVRHFLPARVRAASYVEFTIPKKTGGTRLICAPVQPLKAVQRALGTMLQTLFQPSDAAMGFVTDRSVATNARCHLHQNCVLNLDLENFFPSITKARVRRALERELADRIPSSEVRSLICSLCTIPNQSGIEVLPQGAPTSPVLSNIVLKGLDRRLAAFAGAHGYNYTRYADDITFSHDRPIRRFSPFFMERVRTIIEEYGLKINDRKTKVSVKGERLEVTGLTVGEKVNVPKNYIKRLRTLLHLWEHYGYEQARLIYSRDFSQGTGKSLKTVIYGKINYLAMVKGREDPTVVGYRNRFRRLVRIAKAEERTSIS

SEQ ID NO: 116 - protein, 322 aa, unidentified
  source 1..322: note = Related to DWXH01000006.1; note = Candidatus Alistipes merdigallinarum
MTERPERIVRRFLPARVRADSYVEFTIPKKAGGSRSICAPIQPLKKVQRALGTLLQALFQPSEEAMGFVAGRNIAANARCHLNQSCILNLDLENFFPSITKTLVRQALKRELADRIPSSEVRNLICRLCTIPNQSGIEVLPQGAPTSPVLSNIVLKGLDRRLSAFAEAHGYNYTRYADDITFSHNHPIRRFSPFFIEKIRSIIEEYGLKINDEKTKVSIKGERQEVTGLTVGEKVNVPRNYIKQLRTLLHLWEHYGYEQAQLIYDQDFCQGTGKSLKTVIYGKINYLAMVKGRDDSTVIGYRNRFRKLVRVTKAKEQASFTS

SEQ ID NO: 117 - protein, 351 aa, Bacteroides sp.
  source 1..351: note = Related to JAAVDA010000014.1
MKESHIAEAAREYLGTGTVKSPRDLAVAICRCGELLDLWPLGELTLSHLRRLSTKAVRKECYRTFSIPKRSGGARQIAAPTGRLRDIQRAINLLLQARVGVMECATGFVCGRSVTDNALPHIGSHVVVNLDIENFFPSVTKRMVRESLKRETREWLESHEAVNMLCSLVSMPDGEKGEMLPQGAPSSPMISNIVLGRLDRRLAGFARERGYAYTRYADDLTLSGREIRKMSAADMKLIERIVAEEGFKLNRRKIKQQGAGHRQSVTGLTVNERINVSRDFVKNLRVCLHLWETRGYEEASGIYRRDFRGGEDVDFARAIKGKINYIAMVKGRRDPVFMAFSRRLRLLTGRK

SEQ ID NO: 118 - protein, 441 aa, Prevotella multiformis
  source 1..441: note = Related to NZ_CP072358.1
MATRTINGREYTKADFENQLRYLNDAQELANLLNELKAPYIYSDFRGKQLSFFADTNNIRRRCKTFRLRKKHGGYREITAPKGRLHDVLHILNIVLQTYDEPTPWAYGFVCGRSVVDNARPHVGKRYILNLDLKNFFPTITRRQVADCLMAEPFGFSSLAAELVSGLATVRTDNGEEVLAQGFATSPTLSNFICREMDKEIAGVAAAQGVTFTRYADDLTFSSDADILRPQGELAQQVKTIVERYGFILNEAKTHLQRRGRRQEVTGLMVTEKVNVSRRYVREIRSLLYIWERYGYEDACQAAWKSYKQQHGKTKGHQHHVPLNKVLGGKLHYMKMVRGSDDPLYLRFASRYTSLQQRSKGDIKEVEYKAYMGKCLSKSGKDRVTRTTVLSNDNTSTRQRGVTSSNPYDPGKKNKRILNFIVMVIIFAAIILIKLFLKSRL

SEQ ID NO: 119 - protein, 441 aa, Prevotella jejuni
  source 1..441: note = Related to CP023863.1
MATRIINGREYTKADFENKLCHLSDAQELAAMLNELKLPWYYSDFRGKQLSFLADTNNVQRRCKTFRLRKKHGGYREITAPKGGLRGILNALNILLQTYDEPTPWAYGFVCGRSVVDNARPHVGKRYILNLDLKDFFPTITRQQVADCLTAEPFGFSSLAAKLISGLATVRTKNNEEVLAQGFATSPTLSNFICREMDKEIASIATAQGITFTRYADDLTFSADTDILRPQGELVQQVKAIVERYGFRLNEEKTHLQRRGRRQEVTGLMVTEKVNVSRRYVREIRSLLYIWERYGYEDACQAAWKSYRQQHGKTKGHQHCVPLNAVLRGKLNYMKMVRGADDPLYQRFVSRYTSLQQRSKGDIKEVAYKAYMGKYLSISAKDRTTSANVLPNDNTSSRQLGATSSNPYDPRKKSKRILNFIVMVIILVAIILIKLFLKSLL

SEQ ID NO: 120 - protein, 330 aa, Prevotella fusca
  source 1..330: note = Related to NZ_BAKO01000003.1
MATRTVNGREYTKADFENRLRYLNDAQELAKLLNELKAPYIYSDFRGKQLSFFADTNNIRRRCKTFRLRKKHGGYREITAPKGRLHDVLHILNIVLQTYDEPTPWAYGFVCGRSVVDNARPHVGKRYILNLDLKNFFPTITRRQVADCLMAEPFGFSSLAAELVSGLATVRTDNGEEVLAQGFATSPTLSNFICREMDKEIAGVAAAQGVTFTRYADDLTFSSDADILRPQGELAQQIKTIVERYGFILNEAKTHLQRRGRRQEVTGLMVTEKVNVSRRYVCEIRSLLYIWERYGYEDACQVRGRATSCSTERQRGIRTTYLLIKFWVVS

SEQ ID NO: 121 - protein, 440 aa, Prevotella denticola
  source 1..440: note = Related to NZ_CP072374.1
MATRTVNGNEFTKTDFDSRLRWLNEPKELSALLNEVLDAFCFTKSRPAQLRFFANTYNTQRRCRTFRLRKKHGGYREIIAPKGKLRDILHALNIVLQTFDDPTPWAYGFVCGRSVVDNARPHVGKRYVLGLDLKDFFPSITRRQVADCLTTEPLGFSSVAADLVAGLASVRTDEGQEVLAQGFATSPTLSNFVCQEMDREIADVAAAQNITFTRYADDLTFSSDADILRPQGAFVQQIKTIVERHGFRLNEAKTHLQRRGRRQEVTGLMVTEKVNVSRRYVREVRSLLYIWERYGYENACKAAWKSYKLQHGKTKGHLHHVPLNRVLAGKLNYMKMIRGASDPLYQRLAGRYAALRDANRDGIMNVEYNAYMGEYVPNSHRRRPAGDDGLYTENTAGRHRRSGTRDIYSPERKGNRILKFILKVAMWAAIILAYLYFRSR

SEQ ID NO: 122 - protein, 437 aa, Prevotella sp.
  source 1..437: note = Related to FOHY01000003.1
MTSKTFARTDFDRQLRQLSSPAELAALLNGVLPAFFYAICRPAQLRFFANTANIERRTRTFRLRKKHGGYREIIAPKGAFADISRVLNTVLQTYDEPTPWACGFVRGRSVVDNARPHVGKRYVLSLDLKDFFPSITRQQVADCLAAEPFGFSPGAVELVSGLCTARLDGQDVLAQGFATSPTLSNFVCRKMDEQLAELAGQQAVTYTRYADDLTFSSDADVLRPTGDFVQRVEDIVRSHGFELNGSKTHLQRRGRRQAVTGLMVTDKVNVARRYVRQVRSQLYIWERYGYAEACNAAWKHYRLQHGKTKGQGHFVNLDAVLRGKLNYLKMVRGAEDALYQRLQSRYDRLWAKDRSAIGHAVRKAYAENYEAKQGQHGRQSWLTVGSKPTSAPAEDRYRAGSIDNPLPAEGSRSGVKRILKIALWVAALAAVAYFLLH

SEQ ID NO: 123 - protein, 478 aa, unidentified
  source 1..478: note = Related to FNBQ01000003.1; note = Bacteroidales bacterium KHT7
MIRQKQNLKFDKETVDRQLKNLESAKQLAQILYDAVNDVRREPYWLRTNSKNGYLYDSMPLEWRSVSQLNYYVDTAKDDYNRLRIFNIPKRKGGFREIVAPKPAFRVRLKAILKILQSYEEATPWAYGFVQGRSVADNAALHTGKNFVLNIDLSNFFPSITREQVKQVLSAKPFEFSPFAVDFISGLCTYRKDGVDVLAQGFPTSPLLSNFVCRQMDEDIAKVAAENNVTFSRYADDITFSSDVNVFDFNGAFYNKIKEIISSYGFVINQKKVRLQSKTRHQEVTGIVVNKKLNVSRRYIREIRTLLFVWKKYGYEAACCCAYRNNRKKDYHKYYHSIEVSKFLRGKINYLGIVRGKDDSIYLRFKAQFDELYKNESDVMKSYSDMLEKHRLRRENNSECEEMSDKSCGVSTNDEAGNSVSANSSTDGNGYQTRIDRNSYLRDADDKERRKKDRRTIILICFAFLIIFRLLVFIFFKA

SEQ ID NO: 124 - protein, 401 aa, Prevotella shahii
  source 1..401: note = Related to NZ_BAIZ01000017.1
MAQVNRDVDLKALVGNQLQYIYSAEELTNVLNTLASNVGVPSDFRRNQMLCFADTRNDYRRVKRYFMHKKHGGRRPIVAPHHSLMHMLQGFNVLLQQYNPPTPWCYGFVRGRSVVQNAQLHVGKRYILNVDIKDFFPSITRQMVEDVLTAAPLRCSTEAAQLLSGLCTVIEPVGDVLPQGFPTSPTLSNMVCRKMDEELAAAAQRIGATYSRYADDMTFSCDNDVLRTTGSFYLQVSTIVEKYGFRLNDRKTRLQRRGRRQQVTGIVVSHKVNVSREYARQIRSLLYMWERYGYWETAKAALHAYREQNGKTRRHGEYLTLYTVLRGRLNYMKMVKGETDPTYLKLWNKYNQLMLRDKPKRRRVLTALTRIDQRLQAPTIILANRNERVARVLWQSLWRLH

SEQ ID NO: 125 - protein, 412 aa, Prevotella sp.
  source 1..412: note = Related to NZ_HE999452.1
MARNHRDVNLKALIGNQLQYIYSADELTNVLNTLAYNIGEHSGFRRNQMLCFADTTKDNRRAKRYRMHKKHGGTRAIVAPHQSLLYMLKGFNALLQQYYEPTTWCYGFVKGRSVVQNAQQHVGKRYILNIDIKDFFPSITRQMVEDVLLAEPLKCSTEAARLLSGLCTAAEPQGDVLPQGFPTSPTLSNMVCRKMDEELAAAAQRIGATYSRYADDMSFSSDKDVLRPTGSFYLQVSGIVEKYGFRLNDRKTRLQRRGRRQQVTGVVVSNKVNVAREYARQIRSLLYMWERYGYWETAKAALRGYCEQYGKTRGHGEYLTLYAVLRGRLNYMKMVKGGTDPTYLKLWNKYNQLMQRDTPKRRRGTYGTNAHRPEPSSTNDYLGEPQRKGCAGVVALFVVLTLAGLLACNLLA

SEQ ID NO: 126 - protein, 412 aa, Prevotella loescheii
  source 1..412: note = Related to KL205516.1
MARRNQNINLKTTIGNQLQYIYSADELTNVLNDVAKQIGVQAGFRTNQLQCFADTGKDDRRTTRYRMRKKHGGTRAIVAPHSSLLFMLQAFNALLQDFYVPTPWCYGFVRDKSVAQNAQQHVGKRYILNIDLKDFFPSITRQMVEDVLLAEPIKCSTEAAKLLSGLCTATEPQGDVLPQGFPTSPTLSNMVCRKMDEELAAAAQRIGATYTRYADDMTFSSDNDVLRTTGSFYMQLSTIVEKYGFRLNERKTRLQRRGRRQQVTGVVVSDKVNVTREYARQIRTLLYMWERYGYEDASEKALWNYRNQHGKTKGHSKRINLSAVLRGRLSYMKMVKGEADPTYLKLWNKYCALHAAGYPKSKTRKRGMRPANDDSMHVGGYLGDPPRRGCALVIAFFALLTFAGLLAWNLYA

SEQ ID NO: 127 - protein, 1015 aa, Alistipes sp.
  source 1..1015: note = Related to JAFWXI010000025.1
MMTFIGFWTAINGLAAVNNQAAFGKLECLRYGDTTLPDRYKMYNIPKKFQKKGLSVRAIYAPNDRLKYFLKFANNILSEQYVQNNYAYGYVKGRNIVSNARLHTNKHYVCNLDLKDFFPSISYDRAYLAAKKHFKDIEPSILELCIKASCVSVDHKCFLAQGSPLSPLLSNVVCIDLDNRLYSYCSDNGFSYSRYADDMTFSTNHTDKSAIELHINTIKQIIKQSSFNINEEKCRIQSNQYNQSVTGLTVNEFPNVKKEYIKDLRNILYIWERYGYIDANRRYQRKYRIAKRIKPLSDIILPRMEDVIRGRIQFLKTVKGSNDNQYQRFNNKYTSLLNRDCNFIPTHKPNKYIEGSNFKIYHSILKDQDGNNYIQLDKFERAIVPDNCLSLLKLCQSNAWSKIIKTIFNIRPINKANYKWALQLNSNTRKNAVKYGLRAYNKREGGYEDAANLLRIAIELGNYNYFDQYLISCKLSNQSHNLIPENIEYLEANEYGTLLKKYAGYYSAKGFKISQIIGKSNGDSTVDLYKTPIHPIREEHNVTENIQWHNTTGVGIYLGVNEYRCLDIDNVNGDIERVIIMMLHLLHLPLDYSWVIKSGSGKGFHIIFKAENIEGFKADIVAFSTNKKNHRAFERIELRWQECFLVLPPSLHRSGNFYGFRNGDIPTYNPMHVKHNDINTLLDYFCGWTKFIELKYNNIDFDLVYRSKWGADSSCGSVSINLPIEWLSACNSPVCANELAIRYLIGESVSPDNNKAVQLFRKANNTLSAYNLASLIAIGYIDDIGEFNSLISKCKDHIDEIDVHFNNSKHRIERVIQIFNQTHQKKLYVFFDTETTGIPLDYNAPISDIDNWPRLVQLSWMITDEDGKLIKENDYIVYPKGFDIPTSSSAIHGITNEYANKKGIDIETVLAEFIEDLKGVSLVIGHNINFDINIVQAELFRLGMTDIFNDKRKVCTMKSSVDFCAIPNKYGYKWPTLQELHQKLFGEIFTDSHNALSDIRATKRCYFELKEKGIL

SEQ ID NO: 128 - protein, 656 aa, unidentified
  source 1..656: note = Related to JAFQZD010000117.1; note = Bacteroidales bacterium
MDEVIYFSDSDITERYRLASIPKRDSNGRFTKRRKVYMPTPRLKFFLQQANSLLSAIYSPPPCSFAFIKGRTIVGNATPHTNKKYILSLDIKDFFNSISIQKAVNAIKSAFPWQFRGEFIQAIVGASSLNGHLVQGSPLSPTISNIVCLNLDKRISSYCESLKISFTRYADDFTFSSNDFDFKRDSSFLDNITKLISEEGFALNNEKTHIQLYNNKQVVTGLVVNSKVNVARRYIKEIRNILYIWKRFGYDEALESFRFHYLHISRKIGSSLRSRISYEDEKRILHSRMVKKATNYSPRLDQHILGRLNFLKMVRGENDYQYLQLTQKFNELSKKLPYKKDKDGSYSFKSIQHFEWALGCLVLTDDVKNENGTQFFKMNNGGKAIISTKLLSFLSSVEPEYYSVALSLIKSKCRVKAINLEANLFIIWATPLDLKKYRWAIIDAVYRAARDRYESIHCLAKVERSEIESLHKDFQFAMNNGNYAMIHAYLDICNFLNLDSGLYPENFDLLNSNDKSILLQKWGWNYYSLYIDTVPTDKDGVPLSESTFDNYRRQWGSNFAHLRWKGADGIALVAGTNKWVIEVTDRNLDEDDVMRELLSNKEIEVCIIRKPTLLLVVNKDVLQEKEYQGFTIHKSGYYSIYPYKGEPMEIKTIELS

SEQ ID NO: 129 - protein, 489 aa, Alistipes sp.
  source 1..489: note = Related to JAFQCA010000048.1
MPNCSNCYKTLDEGLNFCPYCGARVSHSGDKLCPSCNQIFNEYDGSFCGRCGSRLIVYEREQSTNGQHVINSVDDLIATINSFIPKIDSKADSISKEELLSFGNINNDRRYEIFYIPKKRRKYRMISSPTPRLKLILRCLNEIIYQHFAPAGYVTGFVRNLSIVDNGRIHVGQRYVYTIDLANFFESVTPDMIIPYLCKAPYNLNPEVADIVAKISCVKNRRKNSIGLSQGSPLSPVLSNIVCADLDKKLNGLASLYRAKYSRYADDITFSSSNNLYLQVNDFEKRIIEAVESSNFKINYNKIHLCGPQSRHYVTGIVTNSKVNVPREYISNIRNLLYIWSRYGVKEAYKRFDVWYKKYRKGKPTPFIGDFLRGKIEYLGAVRGKNDPIYKKFKNCLESLSQINFKTFYERPKRMKVSFNLSEPLVKYGRTYYTAETRYRGELVLISPKLNAYIESGVDYSPARVLATNCVVYKIFDKDGVKLLMTTEN

SEQ ID NO: 130 - protein, 381 aa, Alistipes sp.
  source 1..381: note = Related to JAFSDP010000008.1
MATHLSTICSAEELRQAINRSITQSGYSPLSPARYKFLTTSVTMPYLYRHFTIPKRHGGGRKIDAPKKMMQAIQSALLPLLEGSFVPSSAVCGFVKNRSVVNNALPHIGCGVLLNIDIKDFFPSITHQMVTDALVSELKMGQEAAHALGWLCTIPKKGQRVLPQGSCTSPILSNIVCSRMDRELLTLCAAHGVTYTRYADDLSFSAKENCFEAGSEFRQRMEEIIKATSLKLNNRKTHIAYPGRRMEVTGLVVERRANVARDYILELRQLLYIWEKYGEKEAAISFSKHHGERTHRSPIRQIIQGKLAFMSQVRGNDDPIVKRYSSWFERLKKRPRKQQRKATPPPQPTPVTPPAKGGYLGMVALLVGLSMLMVVAVAAVF

SEQ ID NO: 131 - protein, 377 aa, unidentified
  source 1..377: note = Related to JAFPOK010000749.1; note = Alphaproteobacteria bacterium
MKSVDDFIKLLNGLRYSRYGEKCKPITRNLLYYYASNKVPISNLYTDIYIPKKSGGKRKIQIPCRGLKEIQGYIAEILNALFTPQSCVTGFVRGKNIIDNAKPHVGHKYLLSWDIKDFFSSIYAKLVKYCLVNDPFNFPDDIANLITNICGVRIEEDSCKRVLPQGSPCSPILSNIVFAVFDKYIVDHCTWRGVIYTRFADDMTFSADHDFYYDSRFSWGRVLPSNGQFYHNKHLRQFFYLAKRLNINKKKTRKCKQGQRKIVTGIVVNDKLNVKREYVREIRNLLFIWEKYGYNDAKARFNNHVHKSTPNAKPSELLNVLVGRIYFIKQVKGKNDPIFLRFKTKLKYLCSIMNTSKAVSIRLKTGLFIKGNLISLD

SEQ ID NO: 132 - protein, 424 aa, unidentified
  source 1..424: note = Related to JAFYYM010000038.1; note = Bacteroidales bacterium
MEDIDTKPRSGPSTVFHLLGLLNKAKRQEFGYRAWPFTLEQLFFFSDPKKNHIYYLHHFIPKKSGGVREISSPSWMLKMFQASAKRLLQDKYVAPDNVMGFVSGRSVADNAARHIGKNYVFNADLKDFFPSITRDRVISSLMKPPFCFGKEAALLLSGICCAHADLTQKGKDTYWVVRGEGKRGKLMDASNYHPAVPATLPQGAPSSPVLSNAVCLTLDKRLDGLAKRYKVTYTRYADDITFSSNHNVFREGDSFLKEFRNIIKSEGFILNEDKLRLQNKGQRQEVTGLIVNKKISVSRQYIRSIGSLLYIWERYGVDAAYGRFLKYKTDLEVTADNRQLCTYVHPHLLETMQGRIAYVRMVRGEDDPVWKRLNERFLKLKAQYESRGVIGNPTRILHSWTIKRFEQLSGFHLRYGPLYSFMSP

SEQ ID NO: 133 - protein, 521 aa, unidentified
  source 1..521: note = Related to JAFVPD010000015.1; note = Muribaculaceae bacterium
MTYEEKALREKAFDIETKEDLLSLLNDIKADLTHETSYPFTMQTMMRYSRPGVYSWRYKKIFVPKKTGGAREVYASWGTLKWLQVCVNELLQALYDPSDYAMGFVKRRSVVDNAKAHVYQNYVFNIDLKDFFPSITYSQVKNSLQQLPFGFNEEIAKIIAGLCTISDDTPDLMPKGKKERKRYFLPQGAPSSPVLSNAVCISLDRKLAGLARRFGLTFTRYADDITFSSMHNVYQEGSAFRIELENIIFKQGFRINAQKVRLHHRSRRQEVTGLIVGRKVNVPKQYIKDLRAVLHIWKKYGEGAAAASYYPRYRAGIKKETQFNLKAVMLGKLCYLKMVRGEDDPVYKRLSDQFDEVTSKRKKKCQPGVEYLGSCTLKTFERRLNVVIDIGEEVCKNKFTRIRLKNGTTLPIYISRLMPPNSRKDRVWVSLCRRTFEAGGFSVFYMLHNSYAIKSFVPPLKSDIFDETVSKVVDLVVAFPILHVEDECGVIQPKYIPQKISEVIDQFLAEKNISHKENIPF

SEQ ID NO: 134 - protein, 377 aa, unidentified
  source 1..377: note = Related to JAFSQF010000025.1; note = Bacteroidales bacterium
MNRTAILPPKKAVATAVTTRICDLWGCLHTKKDLLKLVNVALEGLYGERVCSVSMAQLNKAAYSSLNPDRYCTFKIPKKKKGEFRTIDAPEHSLKYIQQGLNMVLQTIYAPHPAAMGFVPRRSVVTGARMHLGQRLVYNIDLKDFFHTITSGRLYSRLTSKPFCLDGKVAGIIADICCYSGPDGRNVLPMGAPTSPTITNIICERMDTKLTRLAKAYGMQYSRYADDITFSGMANVFGEDSRFIKSLRNIIEREEGFTINPDKTRLCHRGMRQEVTGVTVNEKENVPRWYVGQLRTMLHNWEMDGHDRAQAVFERHYVPKFTRPSSGLPPIHHIENVIAGKLLYLKMVKGETDTTYKALNRRFAALMDCFIQTSQTI

SEQ ID NO: 135 - protein, 371 aa, unidentified
  source 1..371: note = Related to JAGCUU010000036.1; note = Bacteroidales bacterium
MRLDRNILDREAAKNAVKCRISDLCGCLHTKKDLLKLINVALEGLYGEKASMVTMSQLDKSLKSSPNTVRYYRFLIPKKKKGELRTIDAPEPTLKYIQQGLNLVLQTIYSPHSAAMGFVSHRSVVTGARMHIGQRFVYNIDLKDFFHTVTSGRLYNRLTTKPFNLDRKVAGIITDLCCYAGPEGKNVLPMGAPTSPTITNIICERMDIKLTRLAKAYGLKYTRYADDITFSGMANVFDEGSHFIQSMRNIIENEEGFTINPEKTRLCHRGMRQEVTGVTVNEKENVPREYAKQLRTMLHNWEMDGYDKAQAVFEHHYQADNPRYAATHSDFRPNLESVVAGKLLYLKMVKGETDATYKALNRRFNALRCDV

SEQ ID NO: 136 - protein, 380 aa, unidentified
  source 1..380: note = Related to JAGCVI010000021.1; note = Bacteroidales bacterium
MKKVAEITDRRAEVKAAETRIHDLWSCLHTKRDLLRLVNVALEGLYGMDARTVTMRQLNLSAYSSLNAHRYRTFQIPKKRKGEFRTIDAPDPTLKYIQQGLNFVLQTVHTPHPAAMGFVPHRSTVTGAKVHLGQRFVYNIDLKDFFHTVTSGRLYKRLTLEPFCLDGEVAGLITDLCCYMGPDGRNVLPMGAPTSPAVTNIICERMDGKLSRLARVYGLKYSRYADDITFSGMADVFAEDGRFIMSMRNIIVNEEGFTINPEKTRLCHWGMRQEVTGITVNSRENVPRKYVKQLRTMIHNWEMDGHDKAQAVFEKYYMEQNYTHNPDVKHHIENVVAGKLLYLKMVKGETDPTYRALDRRFRALTETGGRDTQGTGKNRL

SEQ ID NO: 137 - protein, 457 aa, unidentified
  source 1..457: note = Related to JAFYBP010000010.1; note = Bacteroidales bacterium
MKLDEHIKRQELLVQPDAKGASNGQLPDAQAAERGNVFERLPYYGKSSPEARQKAAERMPDLWRCLNTKGDLLHLLNVALGGLYGEWPQKITIQQLNKFAYTSLGAKRYTSFKIPKKRQGEFRTIDAPVPMLKYIQRGLNFALQCHYTPHMSAMGFVQHRSVVDNAKVHVGQRLVYNIDLKDFFPSITAGRLHKRLMAKPFSLSKEMASIITDLCCYTNAEGKHVLPQGAPTSPTLTNIICERMDRKLSRLAKAYGLKYTRYADDITFSGMANVFHENSRFLKSMRNIIENEEHFTINTDKTRLCHQGMRQEVTGLSVNRQENVSRKYVKQLRTMLHNWEMNGYEKAQEVFAKHYSETKKSNLLMKGTHHIENIIDGKLMYLKMVKGGNDCTYKSLDARFRALMDHLPATRIDGNNSPKVTVEIPMVPKEDDECWETIYNLEKILNNENNNNDGRQV

SEQ ID NO: 138 - protein, 470 aa, unidentified
  source 1..470: note = Related to JAFWTB010000069.1; note = Bacteroidales bacterium
MEIDEHIKQQEQQTHADSLEVTLGEPLEFTFVENANVFAQLPVHGVSANPNKNGISDTIVRVQDLWRCMKTRKDLLHLLNVALAGMYGEQSTILTMKQLCGYAYSTIEAKSYTTFQIPKKKKGEFRTIDAPVPMLKYIQRGLNFILQCVYTPHTAAMGFVQHRSVVDNAKVHTGQRLVYNIDLKDFFPSITAGRLYHRLMSKPFSLNEKVASIITDLCCYTNADGKHVLPQGAPTSPTITNIICERLDRKLARLARAYGLKYTRYADDISFSGMGNVFAEDSRFVKSMHNIIEQEEHFIINKDKTRLCHRGMRQEVTGLSVNQQENVSRTYIKQLRTLLHNWEMNGYDKAQEVFAKHYAETNTRNLKNKGTHHVENIIAGKLMYLKMVKGETDCTYKNLFARFKLLLENHTDTKIDKSKFSDDQAQNIPVDEGPKHVTNNETVQSVDIENSDEILSTFSSLEELLNNENE

SEQ ID NO: 139 - protein, 382 aa, unidentified
  source 1..382: note = Related to JAFTCA010000013.1; note = Bacteroidales bacterium
MNVAKHGQSKSLVPKPLELTQEKRRALADRVAILWPRLKTKADLKQLLNITLSGLFGPHSTFLTMNQLNYSIYSTIESKRYSSFRIPKKNKGEFRTIDAPMPLLKYVQQGLNFILQSVYTPHIAAMGFVPRRSVVDNAKVHTGQRLVYNIDLQDFFPSITAGRLFKRLMAKPFSLNKEVASLITDLCCHTHENGKNVLPQGAPTSPTISNIICEQLDRKLSQLAKAYGLKYTRYADDITFSGMANLFAENSKFCKSLKHIIEDEEGFVINPNKTRLCHQGMRQEVTGLSVNRFENVPRTYVKQLRTLIHNWEMNGYDKAQAVFAKHYTKNDPRHLLRKYAGRIENVISGKLMFLKMVKGENDDTYKSLVGRYNALMMAAGCL

SEQ ID NO: 140 - protein, 1078 aa, unidentified
  source 1..1078: note = Related to JAFXCG010000006.1; note = Bacteroidales bacterium
MEDLHIKNGIKTLWQNMSSKNELLSILNKAASILYGDDAKKIEMSHLTYHSYSTNNKKRYISFQIPKKKKGEYRIIDAPCKGLKLIQQCLNVLFHEIYAPNVAAVGFVQNKSIVDGAKIHLQQKFVYNIDLKDFFPSITSGRLFKRLQSKPFCLNEEIASIITDLCCNTNAEGKSVLPQGAPTSPTITNFICERLDQKLTNLAHAYGLKYTRYADDITFSGMANVFAESGKFCKSLRHIIEEEEKFKINTSKTRLLHRGNRQEVTGITVNERLNVSRRYIKQLRTMIHNWETKGYIEAQYIFQKKYNETNIKNSNGIHYIENIICGKLDYLKMIKGEKDRTYIKLKERFDKLLFGNTYSPLNNHIDKIFETLIASRFNEYKDKNASDENENKKEGKNYVNKSINTLVSELDSPMTLEEATETLVEGIDVISVRNGFTSTESRVIVEVSTIKKDTKSPSINLAVLTVPIGETSLIINDEIQEGKLFIDELKSLNDNPEDSNNLNIAKNIMGQNSRIRSVHAILNNVLNKLSEDPNNFRIYNNGRVGFTEDAQAFIRKELNRISRHLYLSDSATPMLGLTNNNEIVFTILDDNTFEDVLVPTGIVLGNTNVADAANSIKGAENIFHKNATKLTEYTTARIVRDLITKVEGNERVVRKNGKGYEAVKWQLRYDRLQKEADISNTSNKTAKEQIDAHNESREAYIRTAVKEGIIIINFNKDSLESNNYLKHKYLNRKNIAKILLNKMGKCFVTEEQVLNIVSQKKYVTEERAIELIRKYGGHNKKEIGKSNVVEYPDPKQTYQFLSFFSQNDGGLKNLTHDFNYGYIDYDVFIAQCKKEFEEIKKRFPNVQESVVRRIEEFAFKESPNWYIRLGNDKKYIRYGWSEPSFVEWYRTNKIHPAKDTHYNAEMIVPFKNSIQVRADNKNLIGLLSSLVTMAFGQNPCCNVEITQNVGEAQFYTDVDRLGQAIYQIFSTIKDYSEQNFCDKVIVDYYTENDFKILTITHIDSKPTKKSDDKDYLGGNGTTIKKALFGLCNYEVQAEFPDGAYRKIILSDNYEDFKKGRYLIDKDSIDGYKHIMKFY

SEQ ID NO: 141 - protein, 480 aa, unidentified
  source 1..480: note = Related to JAFPVH010000008.1; note = Bacteroidales bacterium
MSKKKANSKSDLKKVLDRNRHKEEKVAAKVGMQMEAEEEVAIIDFDDDSASSSEDVQIETTGNPKTEQKEDGVKQVTHPLSEEEKKECLEEIRERWPRIKTKESLLSILNIALILLYGRDARKLTLRMLNYYAYSSHNKKRYITFQVPKKKKGEFRTIDAPCAGLKMIQRALNLIFQTIYTPHEAAMGFVPHRSVVTNARVHVGQKYVYNIDLKDFFPSITSGRLFKRLLVAPFSMDKKMASIVTDLCCYTNADGKNVLPQGAPTSPTITNFISEHLDRKLSKLARAYGMKYTRYADDITFSCSSNMFAEDGKFCKSLRNIIENEEHFKINTDKTRLCHSGERQEVTGLTVNEQTNVTRKYVKQIRLFLHIWEAKGLPEAQRLFEKHYTPKTTRPNVGIPHIENVIAGKLLYLKMVIGEDRDMYKRLASRLDILVGNTQESNSTDISPKDKGVLSVPEKGKLPAEKEILIELNTLIELLE

SEQ ID NO: 142 - protein, 491 aa, unidentified
  source 1..491: note = Related to JAFSJF010000074.1; note = Bacteroidales bacterium
MAKKKNITKKQNLKKKLGQTSASKKTEVSELVSSGSEKAEEVLFAIEPIEDDLVRVAAAVTELEDIDSAKVSDEETISTQADALSKIDELPKYGGSPLTGEDLKQQLAKIVEGWHSMNGIDDLCVVLNMALQALHGMDAVKTTVGRLKLMVRKGRYVTFKIPKKKKGEFRTIDAPCSELKNIQQALNFVLQEVYSPNAAAMGFVKGKSVVTNAQVHLGQNYVYNIDLKDFFPSITSGRVFKRLLVKPFCLNEKVASLISDLCCYQKGENKVLPQGAPTSPTITNIICEKLDFKLTRLAKAYGLKYTRYADDITFSGMKNVFAEDGKFCTSLRNIIENEEGLKINSDKTRLCHRGMRQEVTGLTVNSKTNVSRKYIKQLRPLIHNWEVKGYDEAQAIFAKHYAETNIRNLRFKGEHHVENIISGKLMYLKMVKGETDSTYKSYANRFEKLCNDTFGAGSQKSQTLLTPLMDDGNVLSVLNDLATLIETNTSE

SEQ ID NO: 143 - protein, 436 aa, unidentified
  source 1..436: note = Related to JAFZPH010000008.1; note = Bacteroidales bacterium
MKNRIKNDMDYNTVINEIWRNLESKTDIVALINVSLKDLYGDKASKISLRKLNYYAYSKVNANRYVSFDIPKKDGSMRRIDAPCRGLRTIQRALNHVFQIVYTPHEAAMGFVPGKSVATNAKMHIGQRYVYNLDLKDFFPSISSGRVFKRLQAKPFGLKEDISRIITDLCCYENGEHRHVLPQGAPTSPTITNFICERLDVKLSRLAKAYGLNYTRYADDITFSGMNDLFDIDGKFCKSLHHIIEDEEHFVINQKKTRRCHAGMRQEVTGVTVNQNTSVSRKYVKQLRTLIHNWEVKGHDEAQAIFLSNYSSTKYHNFRGVHHIENVIEGKLLYMSMINGNEDSTYSQLVVRFKSLLETIVSGKANAEKGLGNDTSSLGKGGNCITISDILDIWGKSGMVDALEVFKENIGILTQKDTFPTGFKTSDGDPFLDSNL

SEQ ID NO: 144 - protein, 386 aa, unidentified
  source 1..386: note = Related to JAFPVX010000018.1; note = Bacteroidales bacterium
MRLTDCIGLQAQPQSVSPAPKDVSVRLRDLWRCLESKQDLLRLINIALEGLYGDMAQMITMKQLINMVYTANGEHRYTSFQIPKKKKGEFRTIDAPIPTLKNIQRGLNSVLQAVYKPHQAAKGFVKGFSVVDNARAHISQRYIFNIDLKDFFPSIHSGRVYARLLAKPFSLPPEIASIICDLCCFTNSEGHKALPQGAPTSPTLTNIICERMDRKLLKLAKAYNLQYTRYADDITFSGSTFMFAPEGRFCTLLQHIIEEEEHFTINRNKTRMGHRGTRQEVTGLTVNNKPNVSRNYVRQLRTLLHNWEMKGYQKAQTEFLAHYAEINTKNLQWDGTHKIENIIAGKLLYMKMVKGETDSTYKGLKIRFDQLMQNRRKYIKSLTNPI

SEQ ID NO: 145 - protein, 397 aa, unidentified
  source 1..397: note = Related to JAFZTV010000005.1; note = Bacteroidales bacterium
MTKQEIDEKIKAQWSAMETKQDFLRLLNLSNCALYAEKAQPFTFRQLLFHAHTTRNKKRYVSFKIPKKKKGEFRVIDAPNPTLKSMQRALNYALQVIYEPHAAAMGFVPGRSIVSNAQSHTNKRFVYNIDLKNFFPSISSGRVFARFQAKPFSCNKEVASLIADLCCYRNDFGTVLPQGAPTSPTITNIICDRLDVKLTRLATAYGLHYTRYADDITFSGMSNMFAEDGRFCQSVKHIVEDEEHFTINKDKTRLCHRGIRQEVTGITVNEKPNVTREYVKQLRTMIHNWESQGYERAQARFLEIYNKTNTRYHKAKGNHHIENIISGKLLFLKMVKGENNAQYKKLDERLVALESTHTDPIPQNRSNAVIPPAMGDNIISNEKEILEEFMTLNKLLE

SEQ ID NO: 146 - protein, 337 aa, unidentified
  source 1..337: note = Related to JAGCFV010000210.1; note = Salinivirgaceae bacterium
MDKDKLSLLSSLSKEELFNLFSTFVESQNAVQNTDSETVDFANQAKEMWHKLSNEADLRALINTVSVKVFGKFQYTEAQFGHCFNINHSRYTTFEIPKKKPGEYRTIKAPNPTLMGMQQCLNYVFQQLYQPIECATGFVPGRSIVDGARVHLSQKYVYNIDLKDFFTSVTAQRLVNRLQIEPFGLSEDMAQLVANLCCDKTKYDKFVLPQGAPTSPTITNFICDSLDRKLIKLAAAHNLRYSRYADDITFSGMQNVFAANGRFCKSLRHIIEREERFTINPAKNASLSSRNAARSNRHNCKPKTECFASLYQTVTCAVKQLGEKRIRHSASRILETL

SEQ ID NO: 147 - protein, 405 aa, unidentified
  source 1..405: note = Related to JAFUVT010000003.1; note = Bacteroidales bacterium
MPESEQKTEEKEAKVELLRILNVMKKKLYGDNSYPITMKQLNYHAYSKNNPKRYVQFQIPKKKAGEFRTITAPNAGLKAIQRCINALLLEQFEAHPAANGFVPGKSIVDNARVHLGQKYVYNIDLKDFFPSVTIGRVFACLQLPPFSFDKHTASLIADLCCHEGVLPQGAPTSPTLTNIVCSRLDWRLSKLARRFDLRYSRYADDITFSGMSNIFHEDGAFVKDLRHFVEKEGFLINETKTRTNSYYQRQEVTGLTINEKPNVTQRYVKQIRTMLHNWEASGYEAAQSVFFKHYHPTKNVNAEHHIENIIGGKLDYLKMVKGVDDATYIKLRDRFGDLLSGREKTNSTARPGNVIPVVDISVLNEGNIIDIELVNEEEQKSKDTHGLLDEKLQQLCESGFDLSIL

SEQ ID NO: 148 - protein, 357 aa, unidentified
  source 1..357: note = Related to JAFXXO010000127.1; note = Bacteroidales bacterium
MEQLNKFKKELYGENCHAITMQQLNFHAYSEHNSKRYIQFQIPKKKKGEFRTITAPNKGLKCIQRCLNAMLLRQFAPHPAANGFVPGKSIVDNARVHVGQKYIYNIDLKDFFPSVTIGRVFACLQLPPFKYDRETASLIADLCCHEGVLPQGAPTSPTITNIVCQRLDWRLSRLALRYNLHYSRYADDITFSGMTNLFHEDGDFVKALHHFVEKEGFTINEAKTRVNSYYQRQEVTGLTINEKPNVTQRYVKQIRTMLHNWEVNGYKYAQSEFLKHYHTTKYINFKGEHHIENVISGKLDFMKMVKGEKDHTYLKLKERFDRLTIIDVSGILDVWEKEGIDAAMDLFMNVKKHNGDE

SEQ ID NO: 149 - protein, 432 aa, Campylobacter sp.
  source 1..432: note = Related to NZ_MJLH01000003.1
MEKSLKDEINAIIDDCCAKYSSFSIETFIDIVNEIHSKVFQESYLIEIETLKKIANSVDKYDKFEIPKRSGGVREIYAPKKNLKKILYYLNFIFQNIYVRNFSLYISPNGFIPNRSVVTNAKRHLCKNYVFNIDLEDFFPSIKQYKVSFMLQIAPFNMSKNDANLMAKLICYQDQNGESFLPQGAPTSPIISNFACRFLDIKLVNLAKQFRLTYSRYADDITFSSNYNVYDDKFMDALTLVIEEEGFKINKNKTRLQKRNMRQEVTGVIVNYKLNVYRTYIKKLRVLLHMVKKYGYEKANEIYNQKEQSDKQKDLKSTIAGKLNYLKMIKGSNDTTYMGLMNSYVELFDIKQKNKPPIPDDESLIVCETAEKLLKELTASNNLILTNIKNESNYLNLPKTQNVSNSKVANSEKAITTESLVDRILSKLREIL

SEQ ID NO: 150 - protein, 663 aa, Helicobacter sp.
  source 1..663: note = Related to NZ_NHYM01000017.1
MNIKSINGIKNINDLIDIIYYYNDEHNIENNLHIETSTINFLAFYAKKKYKKFEIPKNNGEFRTIYAPTKYLKTILKSLNYAFQAIYKNNQVAHGFLPNKSVATNAKKHISKNYVFNMDLKDFFQSIHQARIWKMLQISPFNLPKDMANLLAGLLCYQYPRESKEKSFLPQGAPTSPIISNFICYRLDKSLLELAKKHNAIYTRYADDITFSSNINLYKKDSEFLQKIYRIINNEGFSINENKIRLQGKGYRQEVTGIIVNEKINVSKKYIKNLRALIYMLEKYGEKEANEFYYTNHAKSLNMVISGKLNYLKMIKGESDSTYLKLKEKFEKLAKNDVLIKEPNKESAQKTKRNPKQNPNAKHNPKALVDILRKFSQSDSPFKATVHNESNYPSYNGYDNFMTSLNKEWNEIQKDLNAYSYRLYNKLLGFLFKSTEELTNADNYKGWGESNVKIGWSSSEISEYCKANDKNNPFEYKLPDRYIIEHKNGSITTFGDICMKIFKYEIEFRDENQQFFKLIQDNRKKLGSGFNVKIDEKIQGVSFYSDTHLVSEAINKIFNQFIERKKYINIRVSMETTDEYHKFIFSQLESKCNKGSKEMLKEIKDGDFEDIKKRLFSLCDWSIEAKCSDGNFRINYLKSDNEKDIDKLPDAPEGFTHILRFYK

SEQ ID NO: 151 - protein, 545 aa, unidentified
  source 1..545: note = Related to JACXTV010000190.1; note = Campylobacterales bacterium
MSKTRVYELAKILKVTSKEIISKANELNIAVKSHSSSLDEDALKLITDAFATKPQIKNNTSATIKITLKDKEQTSLNEHIQKAFNELRNIEDLASLINKVNKTIYEHTHKIKVKHLTYHAYHSKDKYQVFKIPKKSGGEREIYSPSKGLKYILKTLNIIFQALYKPQSVAHGFLPNRSVVTNAKLHVNKNYVYNIDLENFFPNIHQARIWKRLQHPPFNLNGKRIEIANLLANLVCFQYEKSSNEKNFLPQGAPTSPMLSNIICHRLDKKLLELAKAYNVKYTRYADDMTFSSDHNVYQKNSEFLQKLFSIIQSENFKINPKKIRLQKRGYKQEVTGLIVNEKINVSRSYIKNTRALIHLVEKYGDEKAQKIFVEKNGSKNLDLVIFGKLQYLKMVKGSEDSTYTTLYQKAMNAYKMIEVEVTKSNNDEKKQTEIIKKNTINEQHNPKELVKILRNFTTCEKPPCALKAAVHSEEEYYQFNGYEDYIRNLKSAWRKIDNPLRNLSKRLHGKIYAFLFASDLGTQERVDKSKSKNSGWGDSGMTFG

SEQ ID NO: 152 - protein, 668 aa, Aliarcobacter butzleri
  source 1..668: note = Related to JAKKOW010000003.1
MPINKVTPDQKNKIEILFNKISNIDDFLSLINKVNKIQYQEYKKLELKQLTYYAFINKSKYTTFEIKKKSGGNREIYSPKTGLKYILSAINIILQSVYKPTIATHGFINHRSIVTNAKNHTDKIYVYNIDLENFFPSIHQARVWKKLQLPPFNLCENKIQISELIANLVCYQHIEKTTEKNFLPQGAPTSPIISNIICERLDRRLLGLAKRFNLKYTRYADDITFSSNHNVYQKNSDFIKELNSIISKENFKINSKKTRLQKKEYKQEVTGIIVNKKTNVSKKFIKELRTQIYLLEKYGVKKSKSIYKEYYKKINGDIELIPNMMNVIYGKLKYLKMVKGQNDSTYLKLNNRFENCFKNKKHFASQNFTSYELKEFSNHQPQKMVELLKKFTSEEPLKSSTHPTKNNECYLDFIKELRVTWKIYEEEYKDFINEKLISKIYTFLCNPNPKNGWGIDNIKLGWTSSKLKKWCEKNPNLMPNKFPIENTIYTFQDIINYFKMEIEITPNRNNLYSFLFDIMDNELCQFEKLTDEETEEILDEAKFFIDTQWIKEGLELIFNEINQRSSVSKRIRIQAKKNKEFIELKITHINSFSKFSPEKLLERLENGVGSFPYIQQKFTSLCDIALQSKYHSSIFKINILNNYNDEEKLIKDINTEEEGFTYIFRFYR

SEQ ID NO: 153 - protein, 569 aa, unidentified
  source 1..569: note = Related to DQSZ01000242.1; note = Flavobacteriaceae bacterium
FVLNKSNVTNAKVHIDKNYIYTIDLKDFFSSIHQARFWKRLQFPPYNLDGTKIELANLIANLVFLQTEKQEEKNFLPQGAPTSPIVSNIICERLDRRLLGLAKRFNVKYTRYADDITFSSNHNVYQKDSELIIELNRIIANENFEINPKKTRLQKKGYRQEVTGIVVNSKANVRRKYIKEVRTYFYLIEKYGLEKAERVFVQHQYKNNPNLKNYKYLSSVLLGKLEYLKSVKGKEDSTYLKLKNRYDICFPKEETSKEKNLKLKKEPIHNPKEVVAILNLFTQNNNILKYTTHNWDKEELDSLDNFLKEIKIEWNKVNNRLKELTPRLHAKIISFLFSKKLGTLNLTDNRNKVWRWGMSQIQFGWSSPKLREWTKEGNSPFSYVLDEKYRKKIDGKSIDRFSDIVEVFKNEIEIRSDNNQLKKLFISKQKKYLGFDFNVEFVNLEGVDFYTDVQHLDFGLNEIFKEIKQRKLFPKIKIEAIKNIEAGFIELCITHIDSFPNKTKEEMIKEVEDGDFSKIKEKFTSICDWSIASKLSDGNYKINYLGGEESFEKLNEEPIGFTHILKFYK

SEQ ID NO: 154 - protein, 690 aa, Chryseobacterium gregarium
  source 1..690: note = Related to NZ_KE387264.1
MELDSKDKIYIYNSFYKMNNKLDLLQLINFCKKKIYGEEAHPISLKQFNYHINPLYNNFRYNSFIVKKKSGGDRIIFSPNNGLKVIQKCLNLILQVVYKNPSKYATGFISGRSIVDNAKIHVNRNYVFNIDLKDFFYSIDQARVWGRLQVQPFNFSKKENKLELANIVASLCCHSIEVERFVEGTWIKNQKNVLPQGAPTSPVISNIICERLDYYLSAVAKRFGLKYTRYVDDITFSSDQNVYQVDGDFRKELEKIVQQEGFYFNVNKTRLQKRGFRQEVTGVIVNEKVNTNKHFVKRLKKWIYLWENYGYERASIFFKSEYEADKLNFKTTPSLVSVLRGKLNYLKMLKGDKDSLYLNLNSKFDKLLNGSIDQKSSLIKITKPAIPVIHQPQKLVAILKKFTTNNTALKYSTHTWDGGKDTEIFANIEDFLIMAEREYKTISYDLSILSKPLNAKIWTFLFSDNFSKNGWGMFNVRFGWNSMELHKYLNGNPNNKPESYILPEEFQQNIKKYGKSFLIQSFKNVIDLFKNEIEIRDENSTLEDIVISLHKTYLNGFNILKIENLANKNFYTDVDYLYKALELVFHNIQKRPQYPNVGYIGYDFEDYFCLEIMHFESNAKGKSFKDSKFTLKEGDFGTISNYLKNLCDWSIESSFSEGTYQVNFLSSKNISPYKLKSSSEGFKYIFKFYK

SEQ ID NO: 155 - protein, 690 aa, Chryseobacterium sp.
  source 1..690: note = Related to NZ_QDFZ01000026.1
MELNSNDKRYIQATFFKMKNKADLLYLINFCKKKIYGEDAYDISMVQFNYHIVPSYNNYRYITFKVKKKSGGDRTIFSPNNGLKVIQKCLNLIFQIIYNLPSKSTTGFVPGRSIVDNAKVHINRNYVFNVDLKDFFNSIDQARIWGRLQIQPFYFSKKEKRLELANIIASLCCHPIEVERFVDGCWIKQIKNVLPQGAPTSPIISNIVCERLDFYLNAVARRFNLKYTRYVDDITFSSDHNVYQSDGEFRKELVRIITKEGFYFNTNKTRLQKRYFRQEVTGVIVNEKVNANKRFTKRLKKWIYLWENYGYRKASLFFISEYKDDKINLTSIPALEDVIRGKINYLKMLKGDKDSLYLTLKSRFDKLLNGPINHESQIIKIIKPPIPIIHTPKELVSILKKFSSNNTALKYSTHTWDGGKDNEVFDSIDDFLIKAEMEYKLISYELSILSKWLHAKIWTFLFSTDFSKKGWGMFNVRFGWSSIELRDFLNANPYNRPENYILPEKYQQGIKRYGRNFIINNFKNVIDLFKNEIEIRDENSILEDIIISLHKTHLNGFNIDKLENLSNKNFYTDVDYLYKALELVFHNIQKRPQYPKVGYYGYDFEDYFCLEIIHYESNAKGKSFKDSKFKLKEGDFGTISVYLRNLCDWSIESGFLEGDYRINFLASESIMPYEKIDFSEGFKYIFKFYK

SEQ ID NO: 156 - protein, 400 aa, Chryseobacterium sp.
  source 1..400: note = Related to SEAO01000540.1
MTILPDQKDYIQKHFEAMQNKIEFLSLLNYAKSILFGEKGEPFVIRQLNYYINTASKAASYQAFEIKKKNGGTRNILAPNQGLKAIQSCLSLILQEIYIVNAAAKGFVKGRSIVDNASIHIQQYYVFNIDLKDFFSSIDQARVWARLKMAPINLNSSTNRQELSNIIAKLCCHELEVERLNMEGEWEKQKKNVLPQGAPTSPVLSNLICEKLDKRLTGVARRFGLRYSRYADDITFSSLHHVYNNEGDFVREITRIINEQNFHIKETKTRMQGQGYRQEVTGLIVNERVNVPKRYTKELRKWLYLWENYGHDRAYLFFKQSYLNDKIRDNRFKPDMIKILAGKLDFLKMIRGAEDHMYKKLQQRFLALIPKTSSLSKVLDTWEELGIEKAMEEYYAHRTA

SEQ ID NO: 157 - protein, 701 aa, Mucilaginibacter rubeus
  source 1..701: note = Related to NZ_BMKD01000001.1
MELQKPQVEYIRKSFRKMQSKKDFLTLLNYVKNILYGEKFHPIVLKSLNYHSNPANNNRRYIKFSIKKKSGGSRIIHAPNKGLKVIQRCLNIILQALYDVDEHAFGFVPGRSIADNAHLHIGKAYVYNIDLKDFFTGVDQARIWARLKVKPFQLNGSVGRHELANLIAGLCCQSMIVERKGEDGAWLKEVRNVLPQGAPTSPVLTNIICQQLDYYLGRVALRFGLTYSRYADDITFSSSHFVYQKEGEFINELERQITDHGFYIKYSKTRLQKRGYRQEVTGLVVNSKLNVQRRYIKDLRKWLYYWENYGYKKASVFFESAYSADKGYLGATNPVMAKVIRGKLDFLKMVKGKDDPTFFKLNQRFEILTDIVKEELQNQNTAEPNCVAVPVIDGLPVLHTPLEVVKILKMFSINESALKFATHSWEAGLDDKIFKNYPDFIRKAKKEFNVVSSSLNELNPQLRAKILSFLFNKRVGIKWGMRRVRFGWSSPELKEAMERTPEMMPENMVLPEHAQFRVTSQRGGTQTIQKFKQVIDIFKNEIEIRNDGPVLEELIYDYHFKHLQSFEIMEFTNLNDKNFYTDVDYLHKALDLVFGNIAKYPGNEKLVGYRLIDDPSYYQLAIINYGSRLRGVSIASEKFLLTKGDFGTIKKRLNNLCDWSIETEFAEGSYRLNFLASDPNTASVEPIQYAVGFTYLFTFYK

SEQ ID NO: 158 - protein, 405 aa, Pontibacter arcticus
  source 1..405: note = Related to NZ_QMDV01000006.1
MKLAEEKSQHILTAFSNLKSKEDFLELLNYTKIIIYGDKAIPFTLKQVNYYSNPRINIERYAAFTIKKKSGATRVIHAPTKGLKAIQKCLNLILQIVYEQHQHKAATGFIPSKSIVDNALLHVRSIYVYNIDLKDFFPSIDQARIWGRLKFPPFNLNDKTGRLEIANIIASLCCHEMEVERIKPDGSWQKEKRNVLPQGAPTSPTLTNIICQQLDFYLTAVAKRFNLKYSRYADDITFSSHHNVYQEGSIFLHELHRIIAAQNFHIKPSKTRLQKQGYRQEVTGIVVNEDVNVPKRFVKQLRMWLYYWEQYGYERAYTYFLQQYSADKGHTKKGRPDMANVILGKLKYLKMVRGADNHMYQKLAYRFEQLSKENLNQEDRPAHLNKVLSILIHKGLDEAMDFYKR

SEQ ID NO: 159 - protein, 742 aa, Pontibacter flavimaris
  source 1..742: note = Related to NZ_LVWA01000005.1
MSIKEEQSQYILSSFSSMKSKEDFVGLLNYAKVIIYGDKAVPFTLKHLNYHSNPQVSKNRYTAFTIKKKSGANRTIHAPSKGLKAIQKCLNLLLQIVYAQHQHKAATGFVPGKSIVDNAKLHTNSIYVYNLDLKDFFPSIDQARVWGRLKFPPFNLNEKSGRLELANMIASLCCHQLEVERLQPDGSWQKDVRNVLPQGAPTSPTLTNIICQQLDFYLSAVAKRFNLKYSRYADDITFSSQHNVYHEGGEFLNELHRIIAAQNFHVKPSKTRLQKRGYRQEVTGIVVNEHASVPKRYIKQLRMWLYYWEQYGYDRAYSYFVQQYKVDKGYTKKGKPNMANVIKGKLDYLKMVKGSDSAVYQKLTERYDLLRKEEPAKTKLTIFSTISETSESDSSFIKIVVENSASPSIPDKLTREINIPKDTVLPHVLLIDNKLVIEGTTPTKKLLPHNPMHTVSFLKKFKIADGSGFKELVHDVILSDEIVDDIISKVKSHPNFIYHYKQERVSNIEYINVGIQSEVIQLINLFESEGIPFYKETGKHPFNNDEKYTEFAKKFKKKYRYGSGSEYSKLHQDILNIAIDQKIPQDCIEFLPDERAFNIRSGFFTWQPLIYRGLRHIFQCIADHSNIHGESLKHVDDKEVLVKAEKGDADGHKFIEVSILDKNSKATIDSDLLLHFYKESTAFKQDFRNLCDWFIECDFTAEPPKRINLLIARRLGSESVEIEPLSNPVGGFKHVLRFYDVR

SEQ ID NO: 160 - protein, 724 aa, Rufibacter roseus
  source 1..724: note = Related to NZ_LRML01000007.1
MKTKKDFLGLLNYTKGILLGDKAVPFELKHLNYHSNPKANPKRYVAFAVKKKAGGTRTIHSPAKGLKAIQKCLNLILQVVYANHQHKAANGFVPNKSIVDNARVHANSLYVYNLDLKDFFPSIDQARVWGRLKFPPFNLNEKTGRLDLAGIIASLCCHSMEVERLDDAGNWKKEIRNVLPQGAPTSPTITNIICQQLDFYLTAVARRFQLKYSRYADDITFSSQHNVYHKDGEFLQELHRLIAAQNFHIKESKTRLQKQGYRQEVTGLVVNEEPNVPKRYIKQLRMWLYYWEQYGYDRAYSYFMQQYKADKGHLIKGKPDMANVIKGKLDYLKMVKGTESTGYQKLAERYILLTKQEPVAEEFTVSNDISGMSELVSSVIKVTLENSGLPSNPNKLIKAINIPKDTILPSVLLIDNKITTESTSSNKLFPHNPLHTVSFLKKFKIADGSGFKELVHDIILSDEVVKDIITKVKSHPNFIYHYKKERVLSIDYLNIGIRGEVIQLIDLFESEGIPFYKETGKHPFNNDEVYTVFAKEFKKKYRYGSGSEYSKLQQDILSIASDQKIALDCIEFLPDERAFNIRSGFFTWQPLIYKGLRHIFQGIADHSNINGEDIKCINGREVQVRAEKGEANFCKFIEISILDKNSKAKIESDLLLHYYKESTAFKQDFRNLCDWIIECDFTVEPSKRINLLTASHFNYNIDEIEPLDHLVGGFKHILRFYDIR

SEQ ID NO: 161 - protein, 705 aa, Chryseobacterium viscerum
  source 1..705: note = Related to PPEG02000007.1
MKLDQATINHINTTFHKMKSKNDFLSLLNFVKGKIYGEKIHAFEIKNLNYYINTKSKQNRYTKFIIKKKSGEDRIIHSPAPGLKAIQKCINVIFQSIYEVNPAATGFVIGKSIVDNGIVHSGKNYVFNLDLKDFFSSIDQARIWGRLKVPPFNLNEQNGNLEIANIIASLCCHEMEVERFDAINNKWEKVIKNVVPQGAPTSPTLINIICQKLDFYLSAVAKRFSLRYTRYADDITFSSDHNVYHNNGEFLTEIKRIIKSERFDIKDSKTHLQKRGYRQEVTGLVVNVKPNVHSKYVKQIRHWLYIWEKHGYEYASKFFINPYLKNKINPKDNIPDLYIILRGKLNYLKMIKGSDNSTYIKLSNRFDLLNSSEKKVLQEQSERIILSKILPTTENDKVYILPIIHTPKEVVKILNKFTLNNSALKYSTHNWDSGQNEDIFKDLADFIKKARSEFYPASEQLKMLKKELHAKIFSFLFNEKVAEKGWGIHRIKFGWSSPELLKEMENNIIKPENCILPKNAQFILKTNTGNQTIQKFKQVIDIFKNEIEIRDENSILLNLLLEKHDMHLNGFEIKEAKDLENTNFFTDVDYFSKALTLVFENIQKRPEHKIVSYVIKEKSDSYILEIMHHNSTAKGKSYKDKKLSLQSGDFGTIKMHLLNLCEWSVESEFKEGPTRINFLHSNEDTLPYEKIDDVKGFKHVFKFYK

SEQ ID NO: 162 - protein, 689 aa, Chryseobacterium luteum
  source 1..689: note = Related to NZ_JPRO01000006.1
MKSKNDFLSLLNFVKGKIYGGKIHAFELKNLNYYINTKSKQNRYTKFTIKKKSGEDRIIHSPVPGLKAIQKCINVIFQSIYEVNSAATGFVIGKSIVDNGIVHSGKNYVFNLDLKDFFSSIDQARVWGRLKVSPFNLNEQNGNLEIANIIASLCCHEMDVERYDAINNRWYNVTKNVVPQGAPTSPTLINIICQRLDYYLSAVAKRFSLNYTRYADDITFSSNHNVYQSGGEFITEIERIIRSEKFDIKDSKTNLQKRGYRQEVTGLVVNIKPNVHSKYIKQIRHWLYAWEKHGYEYASNFFIKQYLKDKINPKTNTPDLYSVLRGKLNYLKMVKGFENSTYLKLSNRFNLLIDFSDKNVTLTQSNQVTVSEVLPDLKNNKISKLPIIHTPKEVVRILNKFTLNNSALKYSTHTWDAGQNEDVFKDLPDFLKKANREFNPVSESLKTLRKELHAKIISFLFYDKVAEKGWGIHRVKFGWSSPELLAEMQITNIKPENFTIPEKAQFSLETTRGIQTIQKFKQVIDIFKNEIEIRDENSVLRELLIEKHNTHLNGFNIREMRNLENTNFFTDVDYFSKALTLIFENIQKRPQHKFVSYILKDEEDSYILEIIHHDSTAKGKSIKDNKLSLESGDFGTVRMHLLNLCEWSVESEFREGPTRINFLDSNQDTPPYVKIDQAEGFKYIFKFYK

SEQ ID NO: 163 - protein, 706 aa, Flavobacterium collinsii
  source 1..706: note = Related to QJQY01000044.1
MKLDQTVIDYINTTFHEMKSKDDFLSLLNFVKKKIYGELTHPFEIKNINYYISSKSKQNRYTRFVIKKKSGGDRIIHSPVPGLKALQKCINIIFQCTYKVNPAATGFVIGKSIFDNAIVHSGKNYVFNLDLKDFFSSIDQARLWGRLKAAPFNLNESSGRLELANIIACLCCHEMEVERYDPINNQWYKAIKNVVPQGAPTSPTLINIICQRLDYYLSAVAKRFSVNYTRYADDITFSSDHNVYQKNGEFITEVERIIKVENFNIKDSKTHLQKRGYRQEVTGLVVNHNPNVHNKYIKQIRHWLYAWEKDGYEYASNFFIEAYLKDKINPKATTPDLSNVLSGKLNYLKMIKGFDNPTYIKLNARFESLLIKGDKKNKETTADQSLTMDGLSEIEYSKVSNLPVEHTPKEVVRILNKFTLNNSALKYSTHNWDAGQDDGIFKDLPSFLKKANSEFNPVSEHLKMLRKELHAKIISFLFYDKVAEKGWGTYRIKFGWSSPELLLEMQNNNIKPENFILPQSVQFLLETNTGVQTIQKFKQVIDIFKNEIEIRDENSMLRDLLLEKHDKHLEGFNIREMKNLENTNFFTDVDYFGKALTLIFENIQKRPEHRFVSYVLIDESDGYILEIIHHGSNAKGKSIKDKKLSLESGDFGTIKTHLLNLCEWSVESEFKEGPTRINFLDSDKNTLPYVKLDQADGFKYIFKFYT

SEQ ID NO: 164 - protein, 705 aa, Flavobacterium sp.
  source 1..705: note = Related to NZ_VAHC01000003.1
MKLDQTLIDYINTTFHEMKSKDDFLSLLNFVKKKIYGEDTHPFEIKNINYYISSKSKQNRYTRFVIKKKSGGDRTIHSPVSGLKALQKCINLIFQSTYKVNPAATGFVIGKSIVDNAIVHSGKNYVFNLDLKDFFSSIDQARLWGRLKVAPFNLNEQTGRLELANIIACLCCHEMEVERFDTINNQWNKVIKNVIPQGAPTSPTLINIVCQRLDYYLLAVAKRFSLNYTRYADDITFSSDHNVYQKNGEFIAEVQRIIEKENFNIKDSKTRLQKRGYRQEVTGLVVNHKPNVHNNYIKQIRHWIYVWEKFGYEYASNFFIKQYLKDKINPKTNTPDLSNVLSGKLNYLKMIRGFDNSTYIKLNDRFELLLNISIQKNENIVADQSTLLGMPEVENNENFKLPVLHTPKELVRILNKFTLNNSALKYSTHNWDAGQDEDIFKDLPDFLKKASKEFNPVSEYLKSLKKELHAKIMSFLFNEKVGEKGWGIYRVKFGWSSPELLKEMQISDIKPENFTLPQNAQFRLETNRGNETIQKFKQVIDIFKNEIEIRDENSILQDLLLEKHDKHLNGFEIKEMQNLENTNFFTDVDYFSRALTLIFENIQKRPEHRFVSYILVDEPDSNILEIIHHGSTAKGKSIKDKKLSLESGDFGTISMHLRNLCEWSIESEFKEGPIRINFLDSDKDTPPYVKIDQVDGFKYIFKFYK

SEQ ID NO: 165 - protein, 686 aa, Flexibacter sp.
  source 1..686: note = Related to MTQF01000001.1
MILKTENIIFIKETFQNMKSKHDFLDLLNYVKPFIYGEKTQSFDLNHLNFHSNSNTKKYKSFIVKKKSGADRTINSPSKGLKAIQKCLNLIFQTIYDVHPSVYGFVKSKSIVNNANIHSGNHYIYNIDLKDFFSSIDQARIWGRLQYPPFNLNKERDLLEVANMISSLCCFKIDVERLDENNEWQIVNRNVLPQGAPTSPTITNIICQQLDFYLTAVAKRFGLRYSRYADDITFSSMHNVYNENSDFIKELNRVISSQNFHIKQSKTRLQKKGYRQEVTGLIVNAKPNVNSRYIKQLRMWLFYWENHGYEKANLFFGSQYFKDRGYVKKRVPNLEFVLDGKLNFLKMVKGAENGTYLKLYERFRVLSEKKISFQAVQISNIKEVKHDPQETVKLLKFFKYDNKYSFKQLVHKPVNENDFNFIEILKTANKQFMDFSVDNNNKLNIPKDLISGVQNLFEILRTSGIDFYNINNLHPLEDKNIGAKIQLFKGDYRFGNEKSESSILSDLIIRTALKKEFSDQINNIVYSFGENDNSGLFDYKQIIFYPELQKFQSKANFFTWVPNVKIALSIIFESILKHSNVNGNRNFTLEEKGIIINIERKAVNDLIKIELSILDKNSLLMGSIDNILSDMRRDFFPVLVGICDFKVQFKSIMEENYECRVLPYASKVKPIDEDPQGFKYIFTFYD

SEQ ID NO: 166 - protein, 692 aa, Flavobacterium sp.
  source 1..692: note = Related to NZ_LEKS01000017.1
MKLTQTDISFIKESFEKMRDKSDLVALLNYIKPILYGEKTYLFTVHDLNYHINNKNDNRYEKFEIRKKSGKSRVIHSPNNVLKSFQKCLNLVFQTVYKFHSSATGFIGGKSIVDNAKIHVGSNYVYNIDLRDFFPSIDQARLWGRLQYPPFNLNKENDNIQLANIIAYLCCHKYKVKRLIDGKWKIVEKSVLPQGAPTSPVVSNIICQRLDFYLSAVAKRFGAKYSRYADDITFSSVHHIYKENHAFILEVQKIIANENFTINPQKTRLQEGAYKQMVTGLVVNQNVNVSKKYIKELRMWLFFWETYGVQKATVKFNLYRAGQDIGSSSNMIKVIRGKLDFLKMVKGANNLAYLKLLKRFTELVSAQNSMQKKLDKQKHIETFKISDFNLHQKTTHHEPQKLVSLLNNFTAGSNLKYATHGWEEHETYDEFIIKLTRDWQKIEDDLFDLKKTFATKISVFLDSEKVEEIGWGAKTANERIYFGWKSKSLVEWSHANPNKSPFYFPIPQDKKVFFDGIQTNYFYDVTEIFKRQIEIREENNHLHNLFMDLRKNYLGYDFKLTSINTKGITFFTDVNTLKNGIIKIFESIKKRPQFPKIKIVVEHLENSIEIKIIHVDSICNRPINDNKILLANTGDFADLNKYFTNLCDWSIESNFIDGKSYRINYLDSRVGIDKISTISKREGFTFILRFYL

SEQ ID NO: 167 - protein, 442 aa, Flavobacterium sp.
  source 1..442: note = Related to NZ_CP089095.1
MILTPEFKFQVQTAFKEMQSKSDFLELLNIAKQMMYGDKTVPFSEKQLNYFITKDSQVIKSRVDFRIDLSKFEPFIEENVVIEKKNINRKDCYVPFIIKKKSGQDRTIHAPVKGLKEFQKALNIILQCLHEPHTAATGFVIGKSIVDNAKKHIGQTYVYNIDLKDFFPSVDRSRVWGRLLVAPFNLGTTVERKNIANFIATLCCTPMEVERFKEGNWIKITTSVLPQGAPTSPTLTNIICEKLDKRLNGVAKRFGLNYSRYADDITFSSKHNAYEVSPTKVEKIFASGTTFDCEVRKIITEQNFHIKETKVRLQKRGYRQEVTGLVVNDKINVTRLYVKQLRQWLYLWERYGYDKSYAIFLNIYLADKGHVKSEQPNMAMVIEGKLLYLKMVKGADDGTYLKLKKRFDLLLGTTSKNNSEAVNILDLIFDVGLDEAMTHYKK

SEQ ID NO: 168 - protein, 425 aa, Flavobacterium aciduliphilum
  source 1..425: note = Related to NZ_QLSZ01000003.1
MQTKSDFLSLLNLAKLEIYGEKTIPFSEKQFNYYLTKDSSTFKSKIDFQIDLSGDSVVINENVIVEKKNQQRKSCYTSFAIKKKSGKDRTIHAPIKGLKEFQKALCLVLQCLYEPHSAATGFVLGKSIVDNAKKHVGQTYVYNIDLKDFFPSIDKSRVWGRLLVAPFNLGNSNERRTLANFIATICCTPMEVERFQEGKWITVTTSVLPQGAPTSPAITNIICEKLDRRLTGVAKRFGLNYTRYADDITFSSKHNTYEVSDSKVEKIFVAGSSFDCEVRKIISEQNFHIKESKVRLQKRGYRQEVTGLVVNDKINVTRRYVKQLRQWLYFWERYGYDKAYAFFLNYYLSDKGHIKFEKPNMAMVVEGKLLYLKMVKGANDGTYLKLKERFDLLVGTASKNNNEKATIVDLIFDVGLDEAMTHYKK

SEQ ID NO: 169 - protein, 452 aa, Flavobacterium sp.
  source 1..452: note = Related to NZ_OU957226.1
MKITLEQSKTIQEAFKKMDSKNDFLALLNEAKKLMYGDKTIPFEEKQLNYYISKDSIKNKSVKSEKNISTVLLKEETSFKASVRKPSYTSFTIKKKSGSDRTIYAPVKGLKELQKALNIILQAIHEPHIAATGFVLGKSIVDNAKVHVGQIYVYNLDLKDFFPSVDKARVWGRLLVAPFNLNTSDERKKIANMIAGLSCTPMEVERFIDNNWVKITTAVLPQGAPTSPTLTNTICERMDKQLSGVAKRFGLNYTRYADDITFSSKHNSYEVSPNKFEKIFVSGSTFDKEVRKIIANQNFHVKESKVRLQQEGFRQEVTGLVVNEKVNVTRRYIKQLRLWLYYWETYGYDKSYSFFLQKYCREKGNVKKGQPNMAMVLDGKLLYLKMVKGEKDETYLKMKNRFDVLVLNTTPSKSLVPNKLLEVKDTKENIGKNIVDLILEIGLEGAMKNYKS

SEQ ID NO: 170 - protein, 452 aa, Flavobacterium sp.
  source 1..452: note = Related to JABSNN010000002.1
MKLALEQINNLKTAFEKMDSKEDFLALLNLAKSFLYGENTVVFEMKQLNYYINKDQKTTNKKVNLEGLLNTGDDRFKTAVRKPAYTSFSIKKKSREDRILHAPVKGLKEFQKALNLIFQCVYEPHKAATGFVLGKSIVDNAKLHVNQNYVYNLDLKDFFPSIDQARVWGRIKAAPFNLETTVERQKIANMIAALCCTPMEVERNTNGEWKKITLPVLPQGAPTSPTLTNAICERLDLRLAGVAKRFGLNYSRYADDITFSSKHNSFEKTKNVFENIYLKDSTFDKEVRKIIASQNFHIKESKVRLQKQGYRQEVTGIVVNDKVNINQKYIKQLRQWLFYWETFGYDRAYQYFLQKYVANKGHVKKGQPNMAMVLDGKLLYLKMVKGETDPAYLKLRERFEKLIGSKSNISEILDLWETKGIDEAMKAFYFAKQQDVLPKVSTRLNVEDIFYL

SEQ ID NO: 171 - protein, 426 aa, Chryseobacterium sp.
  source 1..426: note = Related to LMQN01000015.1
MKFTQEQKSQIRSLFDKMNSKSDFLFLLNKAKMIEYEDKMIDFEEKQLNFYINKDSTNKKDAESLTKNSKNFFYNSFSIKKKSGKERIINAPVTGLKNFQKSLNIILQCVFDCHDAATGFVPGKSIVDNAKIHVGQTYVYNIDLKDFFSSIDKSRIWGRLLFPPFNLNTSSQRKKIANMIAGLACTPMEVERFIDGYWCNIENSVLPQGSPMSPIITNIICERLDRQLTGVSKRFGLNYSRYADDITFSGKHNTYLKGLGVVEKIFEKNSTFDLEVRRIINNEKFHIQEDKVRLQKEGYRQEVTGLVVNNKVNVSKRYIKQLRQWIYYLETYGYDKSYSLFLSNYIDGKKNSSSQTPNMLMVIRGKLLYLKMVKGDKNETYLKLKNRFDSVIMPHSSISFIIDIWKNDGIEKAMEIYYNQKVKNEK

SEQ ID NO: 172 - protein, 442 aa, Flavobacterium branchiophilum
  source 1..442: note = Related to NC_016001.1
MKTNVDQQTEIKELFQNMKKEADLWHLINVAKKHIHGTKASNFKPKLLQHLILKDAKEFNLENSTSVFYHQFEIKKKSGGIRTIHAPHPKLKEVQEALNYIFQCVYLPHPNATGFVVGKSIVDNAKKHVNQKYVYNLDLKDFFPSIDKSRVWGRLLIAPFNLKNSPKGIKIANMIASICCTKLDVERIKDGVSHTILTSVLPQGAPTSPTLTNAICEKMDIRLAGAAKRFGLQYSRYADDITFSSNHNACEYAKGKFEKIYKKNSVFDKEVRRIITDQNFRINESKVRLQVKNVKQEVTGITVNEKLNVSRDYIKQLRKWLYYWESYGFDKASTFFTQNYMAEKGHLVSKKPNMTHVLEGKLLYLKMVKGAEDSTYIGLKTRFEKLSGRVNKIDQLLDVWEKEGVEAAISFYNFGKKAKKIATIVDFESFLIDNINIDNKIL

SEQ ID NO: 173 - protein, 460 aa, Polaribacter pectinis
  source 1..460: note = Related to NZ_CP060695.1
MKLAIDQEKKIKQLFAKMNSKEEFLQLLNFSKKIIYKEETIPFTITQLNFYISKDSNKFNSKKKYYHTFEIKKKSGAPRTIHAPCKGLLEFQKSLNIILQALHKPHEAATGFVPNKSIVENAKKHINKNYVYNIDLKDFFPSVDAARVWGRLKVAPFNLGSSDNRKQIANMIKSLCCHKMKVERFVDNNWIKLEKLVLPQGAATSPTLTNAICERMDIKLTGLANRFNLDYTRYADDITFSSNHNTYKISLEKEEAIFEKDTTFDIELRRIIKEQNFHIKETKVRLQKRGYRQEVTGLVVNDKINIKRSYIKSVRHNLYLWERFGYDKAYELFLNNYLKEKGHTKKGNPNMLMVLEGKLLYLKMVKGESDSTYLKLKSRFDKLSITPQPVEKIKKRLTLKEKRLKTDNAKNKSDISSIEFMKLVAKAKAKKEANKKKNINKILDVLFEKGLDEAMKLYDK

SEQ ID NO: 174 - protein, 440 aa, Mariniflexile fucanivorans
  source 1..440: note = Related to NZ_SLUP01000001.1
MKPTPNQKYTIRQLFAEMKTKEDFLSLLNYSKEVLYREKMIPFSMKQLNFYGSPKFNIHRFDKKFYHEFEIPKKSGLKRLIHAPTKGLKEFQKALNLILHCVYEPHYAATGFVPDKSIVDNSKPHVGKLYVYNIDLKDFFPSIDASRVWGRLLVTPFNLGTTNERRYIANMIKILCCHYLPAERFVDNVWVTEKRHVLPQGAATSPTLTNAICERLDIRLSGVAKRFGLTYTRYADDITFSSMHNSFPNKEGVAETIFKKGSTFDLELRKVIESQNFHIKENKVRLQKKGYKQEVTGLVVNDKINVPRSYIKDLRHWIYFWERYGYDKAYELFLKKYSNNRGHVKKGKPNMGMVIEGKLLYLKMVKGSEDSTYLGLRERFKTICDENSNDNNKTVNTHIEGLLEEFFLKMDKPIENTNTQKILDLIFEEGLDRAMELYKT

SEQ ID NO: 175 - protein, 434 aa, Gilvibacter sp.
  source 1..434: note = Related to NZ_CP019333.1
MKLNTYQTEYIRDLFANMSSKKDFLFLLNKVKELIYKEKTIAFSEQQLNYYINLNPNVKMEKKYFSFSIEKKSGGTRTIHAPSEGLKEFQKAVSIILSAIHQPHDNATGFIQNRSIVNNARKHIGKNYVYNIDLKDFFPSIDANRVWARLLIEPFNLGTSVERKKIANMIKAICCTNMEVQRLIDDKWESVNLNVLPQGASTSPVLTNIICDRLDKRLTGVAKRFGLNYTRYADDITFSSNHNVYRLDSGDTETIYTANSSFDREVRRIIVGQKFHVKESKVRLQKRGYRQEVTGLTVNEKVNVPKRYIKEIRHWIYFWERYGYDKATELFRVKYRKDKGHIKNDSPNLIMVLEGKLLYLKMVKGEYDPTYVKLRSRFRELLNPDSAITINLSDDNYESIILDTIFSDGLDEAMKEYDPVYIEIMSPEQRNKDV

SEQ ID NO: 176 - protein, 377 aa, unidentified
  source 1..377: note = Related to NZ_JAFIDN010000022.1; note = Proposed Natronogracilivirgula saccharolytica
MEDLLSLIKLVNEMLYGETAKAVKLKSLTYYSNPSLRGDVYEKFKIPKKSGGVRVIHSPVSGLKSIQKAIAHILQSVFEPHPNATGFVTDKSVVDNAKPHTGKNFVFNTDLKDFFPSIDKPRFWKRLQYPPFNLNRNNGRLELANRISAICFTDLEVERKVEGHWKKQVKDVLPQGAPTSPIITNIICYRLDVKLTSLAEQFGCAYTRYADDITFSSNHNIYNKDGEFRASLKKLIKEENFHVKHQKTRLNTKTERQEVTGLTVNEKVNVNRRYIKQLRHWIYFWEQYGKEKAEELILNNYKADKGHVKNGEPDIENVIDGKLRYLKMVKGANDHSYRKLQHRFEVLTGISINFNPDRLFEVWDSDGIVAAMEYYYG

SEQ ID NO: 177 - protein, 454 aa, unidentified
  source 1..454: note = Related to SEFL01001225.1; note = Sphingobacteriales bacterium
MQFSAEHITHIRQEFATMATKEEFVALLNYAKEILIGDKYQPFELKQITYYANAKVSGVRYKKFEIKKKSGGVRVIHSPIKGLSIIQRCLNAILQCVFTPHDAAKGFVLGRSIVDNAKKHVGRNYVYNIDLKDFFPSVDQARVWKCLQLPPFNLVDSEKSQIVTRKTIKSEVLALMKANGLGEDRQTLNRALDKVSPQINKGRIHLAHIIASLSCTEMIVERCIDGEWQEVKKNVLPQGAATSPILTNLVCQRLDYLLTGVAKRFGLRYTRYADDITFSSQHNIFKEDGEFIKELRRIIAEQGFHIKESKVRLQQAAFRQEVTGLIVNKTVNVNQNYIKQLRMWLYNWERYGYDRAYNYFLPSYFASKTTPVKGKPDMANVIGGKLNYLKMVKGENNEMYLKLKERFDFLISNCLPIRSILDIWEHEGIEKAMGSFYNVKADQQVLSIIKGDLL

SEQ ID NO: 178 - protein, 401 aa, Tenacibaculum ovolyticum
  source 1..401: note = Related to NZ_BDCW01000118.1
MKIEKKHINYIRNAFEKMQSSNDFLKLLNYTKPLVYGENYVPFELKQIVFYSNPKNTSKAYTEFQIKKKSGGIRTINAPDNHLKIIQKVLAFILQCIFQPHEAAKGFVKGKSIIDNAREHTGKNYVYNIDFKDFFSSIDKARIKGSLKNEPFNLNNKQALANIISEICCTEMDVEHKNEKGNWIRIKSNVLPQGAPTSPIFSNIICKEVDVKLTGVAKRFNLKYTRYADDITFSSMHNIYQENGDFLKELNRVIKVESFHIKESKTRLKKTGYRQEVTGLVVNDSVNVRKRYVKQIRMWLYYWEKYGYNKAKTIFLRDYIKDKGLLKSMKPNFKNVLSGKLEYLKMVKGASNSTYISLNLRFEKLSNKNNHIDRVLEEWERNGINKAILEYYRKPQQLFIQ

SEQ ID NO: 179 - protein, 480 aa, Polaribacter sp.
  source 1..480: note = Related to NZ_JHZZ01000001.1
MKIEKEHIKYIQDEFATMQSREDFLDLLNYAKPLIYGDNYIPFELKQITYYANPKRSRKAYKEFQIKKKSGGVRTIYAPENGLKTIQKTIALILQCVFEPHEAAKGFVMGKSIVDNAKDHVGKNYVYNIDLKDFFPSIDQARVWACLKLAPFNLIDQKTSKEFDFKKLETGIRRFTTEFDEEIFYQLKGGTFLLVNDKKGNYKAYQKRLKKLDKDVFKDAAKYITTDANLKELEKLTVHREKLANMIASLSCTKMQVERKDENGSWVKVIRNVLPQGAPTSPVFSNIICQRLDKKLSGVAKRFHLNYTRYADDITFSSMHNVYQENGKFLKELTKVIKGQNFDIKESKTRLQKTGYRQEVTGLIVNDKVNVRKRYVKQVRMWLYYWEKYGYNKAESIFLKDYFIDKGHVKNAKPNFGNVLSGKLEYLKMVKGFENTTYLSLNKRFEKLLGVIDPIERILNEWENNGIDSAMKIYKTDIHE

SEQ ID NO: 180 - protein, 752 aa, Haliscomenobacter hydrossis
  source 1..752: note = Related to NC_015510.1
MQLEQEQVEIIRTMFQQIKSKNDLLKLINFAKKLLFGEAAHAVPLKTLTYYGNANLASDAYRTFSIRKKSGGKRPIHAPVKGLKPIQKALNLILQCLFTPHHAANGFVPERSIVDNAKVHQGAHYVYNIDLKDFFPSIDLSRVAACLRLPPFNLIDTAEEPLAFLVANLCCTPILVERQNESGEWINKILNVLPQGAPTSPTITNIVAQRLDKRLTGLARRFGANFSRYADDITFSSMHNIYKQDEAFTIELTRIIESQGFYINPSKTRLQKTGFRQEVTGLVVNEKVNVHRRYVKQIRHWLYLWERYGYAQAEQIFKREYVKDKGYAKKGNPKLENVLEGKLLFMKMVKGGEDGTFLGLWRRFDHLLIELNEVRDNTSIPEEAFTEKEQLTRTIKISLLPIDDGKFIQTLQHDKLIPMGVALPYEETFENNIEETYEKPSLQHNPINTMNFLKNFKYDNASGFKELVHAPFDVDNFDFEKILDTVKNHPNFILTFKNTRAEKFTGELPLGLWKKAKELINHLSTEGLDLFKLTKQHPIESEKFLTEIQDFKKNYRFSSDDTESSILKKLIIHVAKKAEHKNSDKNIVFSFGNTDQSGQFSDDQLVFLPDERIFGLRSGFFTWVPNVRNTLAWIFKGILQHSNVNGSRTFEKKSKKIVVEINRFRDKDIGLTKVQLTISDEFSVLKKSPDQFLEDLLNSEPCKHYLRNIADWAIECDCDNGESYLFQILPKNDYKRLERKVNSFKHIITFYD

SEQ ID NO: 181 - protein, 418 aa, unidentified
  source 1..418: note = Related to JACJYR010000001.1; note = Lewinellaceae bacterium
MQINQEHIDTIKARFQQMKTKEELLELVNFAKTLVYGEKAKPVPLRTLTYYGNIQVAGSAYKEFSIRKKSGGVRKIHSPVKGLKPIQKALNLILQCVFTPHQAATGFVPEKSIVDNARVHRGMNYVYNIDLKDFFPSVDMNRVKACLRLPPFNVIYTDEAPLAFLIANLCCTPIEVERKNDKGEWEKKVMNVLPQGAPTSPTVTNIICQRLDRKLTGLARKYGAQYTRYADDITFSSMHNIYEESSEFIKLNEGYRNFIRDMVKIIEGQRFSINPKKTRLQKSAYRQEVTGLVVNEKVNVRRRYVKQIRRWLYLWERYGYVQAEAIFRNDYRADKGHVKKGEPSLQNVLDGKLLFLKMVKGGGDGTFSKLLERFTKLTDSLEQVRSENVDLDSVLDVLLNKGLDDAMNLFDKFKSLGQ

SEQ ID NO: 182 - protein, 429 aa, unidentified
  source 1..429: note = Related to NZ_JAAORA010000001.1; note = Candidatus Chlorobium masyuteum
MKIEQSHILEVRSVFEKMHSREDFLNLLNQVKPLVYGVKTVPIELKQLTWYANPNLGGKRYSDFSIKKKSGADRLIHAPVSGMKSIQKALSFILQCVFEPHKAATGFVIGRSIVDNARIHQGCNYVFNIDLKDFFPSINQSRVWACLQMEPFNLNEKKSIAPTESADKYFMVRSRTIAGRKQIANMIAAICCTEMTVERQDEKGEWVQVKQNVLPQGAPTSPVITNIVCKKLDHRLTGVANRFGLRYSRYADDITFSSMHNVYQKDGEFLKELHRIITDQGFHINEKKTRLQKTGHRQEVTGLVVNEKVNVQKRYIKQLRMWLYYWERYGYEKAERIFLEQYMDDRGHLLDGGKPNMINVLAGKLDYLRMVKGADNSAYKKMKKHFDNLIIENRSNVITDPLRVKELDDVLNTFFESGFDVAMNKYSMN

SEQ ID NO: 183 - protein, 382 aa, unidentified
  source 1..382: note = Related to JADJUM010000002.1; note = Saprospiraceae bacterium
MTNREDLLTLLNLANKHLHSNKALDFELKQLNWYSNPAINKRRYKTFSIQKKSGAERKIHAPVKTLKYIQQALCFVLECVFEPHKAAYGFVKNKSIVDNAQNHVGQIYVYNIDLKDFFPSIEAGRLFSRLQYPPFSLSDKRDVANVITWLCTEKLEVERFNKENSTWEAKELNVLPQGAPTSPLITNIICYKLDYVLSAVAKRFGLKYSRYADDITFSSMHNVYQKNSEFLTELKRVIQDQNFHIKESKTRLQKDGFRKEVTGLLVHESANVHKRYIKQLRMWLYYWERYGYEKAYGFFLPQYVGDRGNVKKGNPNMENVIGGKLEYLKMVKGVENELYLKLKDRLSILIGYTEPINQILDVWEIEGIEKLWKFIIRINETK

SEQ ID NO: 184 - protein, 716 aa, unidentified
  source 1..716: note = Related to JACJZT010000003.1; note = Flavobacteriales bacterium
MKLEEAHIKSIKSSFEKMKDKEDLLQLLNFVKPLVYGEKTIPFKLKQLTWYANSTLKGRRYKEFNIKKKSGEHRTINSPVSGLKAIQRILNFILQCVYEPHKAAMGFVNGKSIVDNARLHTGNHYVYNIDLKDFFPSIEAGRIWSRFQHPPFNLNDRTNRKELANIITWLCCCEMEVERLDEKNQWHIVKRNVLPQGAPTSPTISNIVCHQLDFYLSAVAKRFGLKYSRYADDITYSSMHNVYQKGSEFLSEVHRIISAQSFHINVNKTRLQKAGYRQEVTGLLVNENVNLQTRYIKQLRMWLYYWERYGYERASGFFLQQYVADKGHVKNGKPDLANVISGKLDYLKMVKGSENDLYLKLKNRFNQLTTKTIDQIDLSKVKKISKPSERESIIEENIDINNNNSYPILHNPQKTITLLKSFSVNEKDLKYSTHSWEEGKYNSYEEYIEKIRIEWNEIKDELKNQSPRLFAKISNFLFNNKLGQKNEEGYYISWGEKRLKFGWSSANLKDHMSDPGNSPFSCPIPDQIRELDKRHDLLYFKDYADVFKNEIEFREDSNNFKKMILELWEKELSYDFNIKGVEQFAGFSFFTDVHLVKESLRTVFRDMYKVKPQFPTIIIEKISSFNERGYHLIKVTQKDSFITRDVNDPKLTSPSGNLFSIIRNLKNLSDYSIVSRFRDGRNYRLNYLTSTKTDFIETLTQDENTLGFSHEFKFYL

SEQ ID NO: 185 - protein, 755 aa, Chryseobacterium sp.
  source 1..755: note = Related to SEAO01000392.1
MITEKDKEYIDIAFHKMRNREDLLSLLNYAKTILFGQEASQIALHQLSYYANPKAGGKRYHTFRIAKKTGGSRKIHAPVEGLRVIQQCLNLILKCVYKTQQQAHGFAQGKSIKTNAAMHVGSYYVFNIDLKDFFPSIDQARVWKVLQLEPFNLLNREPAEQEGIDNYEIANLTAALCCTSMMVERIDEEGELIKVRRNVLPQGAPTSPLLSNVICQRLDFLLAGVAKRFGLKYSRFADDITFSSLHNVFQSHSPFTKELTRIIYDQGFRINEQKVRLQRSAYRQMVTGIVVNEKTNLTKKYLVSLRKWIYLWETYGFARTLEIYRQEYKLEQIKPLDIDLVAILRGKIAFLKNVLGDTNPRYKQYKYRFDALNAPTLAENMPVQGDAREMAKKLDRIDELLKSNKIPSVDASIEELREFVSLVHLRSEIPLIDNPSKETNLEDDIHDPRFVVSLLSKFTEETNLKYTVHMWDSENRYGSFQDFSSAIFADIRQYKLRSLPRYNSRLYWKIIYPFIIQEHTLKKKSGEPFEYAWGRYNLKLGYHYPSTLAQWMDSNPNKSPFMMPISKDLRPAEPIKGRSISYFEDVVDIFKQAIEFRGNDLYYLFKELTGSLLFDFNIELLNLKGISFFTDTHQVEKALRIIFSSIRKYTESPQIRVSGTYISEAHYFDIEILQLGSFCDKPIDDPKITLKGNKGDFNTIRTLLHSLCNWSVESRFRVGDKYKFYRLNYLNSSASDEIEEMDAAEGFKHRLRFYI

SEQ ID NO: 186 - protein, 739 aa, Pedobacter sp.
  source 1..739: note = Related to NZ_CAKKMW010000005.1
MKSREDLLDLINYSKKALYGEDVEPITISQLTFYSNPSAGGKRYRQFNIAKSSGQYRAIHAPVQGLLLIQRCLNLILSCIYKPTPQAHGFTPGRSVKTNAFVHVGNYYVFNVDLKDFFPSIDQARIWRMLQLPPFNLVAKNDSRISPKNRYELASMISAICCTSMLVDRIDRKGNLTRVVRNVLPQGAPTSPFFSNMICQRLDQRLMGVAKRFGLKYTRYADDITFSSLHNVFHSHNPFIVEMRRIITEQGFTVNEDKVRLQRTGYRQMVTGLVVNEKVNVTREFIKSLRKSLYLLERYNEEKASQAYIKDNKLDDVSINDIDIQAIVTGKIAYLKDILGKNSPRYLSYKTRIDQLYPGKGTTVPVEKVDAKTLARNIDRVKHNLLNNELPTENASFEELRAFVRLLRDENSVSALLVDKAGQAEEDEIHDPNFVVSVLEKFTSETHLKYATHYWDTQDRYKNYNVFRKSIMEDVRLFKLRLLPRYNSHLYWKVIHPFLIRDKPDEKKSGEKFEYQWGRHKLKVGLQYPGILEEWMQENPGKSPFSMPIPKELRPPFRISGKSLTYFEDFVDEFKNEIEFRRNDLHYLIKDITSSMEFDFDISITNLKGLSFYTDTYQVEQALRIIFNAIRKYPGAPKIIVNGSYDTEAKFIDIDILHIDSFCDRPLNDRKLQLMDKRGDFFTIRKLLNSLCDWSIQSRFRVGNEYTSYTIHYLNSTGAQNPEKSADALGFLHKLRFYL

SEQ ID NO: 187 - protein, 761 aa, Pedobacter sp.
  source 1..761: note = Related to NZ_JAFVME010000001.1
MKIEKDQKDYVVKAFHSMRDRDDFVKLLNYAKKIIYGEKTVFFDLRQLTYYSNPNVNFKRYKSFEIAKKNGKSRKIHAPVKGLLVIQKCLNLILNCIFQPTVFATGFVMGKSIVDNAAFHAGNYYVYNIDLKDFFHSVDQARVWKCLQLKPINLSLFQNPEDNKYNSSLEIVNIISALTCTELLVTRTDRNGKEIEVNKNVLPQGAPTSPLITNLVCQKLDYLLSATAKRFGLKYSRYADDITFSSLHNVYQQNSDFLIELNRIIKDQGFVINEEKVRLQKDGFKQMVTGLVVNKHPNVSKSFINNIKIDLYYWEHYGYVKATKFFLRRYKHTKESTKKVNVDMSNVICGRLQYLKMIKGANNKTYTSLALKYQKLLAKKQKSELNPEDVHFKSVESSGYDLTENGLINPDLKTFMVSILNSDQIALAEKQEIFANVNLELSRLVNNDNTGKNSLGSSSSINSSSVTTDGWKSEHSPKDVARFMSLFNKRDGLKYLTHDFDEEGKFEISFFLEKWRSIFEQSLRGKNGFEIPSSLYRIVNEFAFSGKPNWTSVNDRLVNEGWSTDKWIKWSSKNMLHPFRNTGLKVIIEDFRRLIRVESPNLEFLVNEAFSDALIDENNKYSLKLDQVSKADFYTHIPSLKRALFAIFSAMGKYGGDRDISVSYQRSTEDDFFVRKLIISQTNSYPTKELEQILIEWNTDKGAMGGIKHNLYGYCDWSIETKIDNTPYRINILKDKKTPKFDVIGMEEIIGFKHILKFYYI

SEQ ID NO: 188 - protein, 765 aa, Pararcticibacter amylolyticus
  source 1..765: note = Related to NZ_QEAS01000037.1
IQRMKQQASKNIYIMKLTKNQCEYIVKRFREMRTREDFLHLANYAKKIIYGEKAYDFKLNQLTYYSNPRVNPNRYRTFTVKKKSGGVRMIHAPTKGLMEIQKSLNLILNCVFNAHSSAFGFVPGKSIRDNAAVHAGNYYVYNIDLKDFFFSIDQARVWKCFQLAPFLLGKKTDTLNDEKGKNLEVVNMISALCCAEIETGMQQTDGTLNIVKKNVVPQGAPTSPIVTNIVCQRLDFLLAAAAKRFGLKYSRYADDITFSSLHNVYQTDSDFIAEIKRVIKEQGFQINSSKTRLQKMDERQTVTGLVVNKNVNVPRNYIKKMRSWLYLWERYGYEKTYSFFLNDYIRDKGHLKKRTPDMANVLRGKLEFLKIVKGTDDKVYQQLNNRYTVLIARNRKDSLNDRLLNYWELHGLHAAWEHFKAETGIMTIDKFLDKLLKETVTDDERKNKLLKLIQSSLNTSSLLTKSTSKFTIPDNEKLNMPKRVADFMSLFDDPAGLKYLTHDFDESDQIFDIESFLPQTRKVFEDKTKPGNLTIPSSLWKIVYEFAFSETPDWNKGCKDGWSLPDRIKWSIDSKKHLKRNEGFAATIESFRKLTRIEAPELKRLINQIVKEKLGDKYPECTIKLKDCEKADFYTHVAYFSEAIKLLLDGFNKRIGECKEIAITYTRKNDDPYRLRIITLEHVGSFPMKPLDDFFRDLGNGKGELADARNKLTGYCDWAIETIWDSKLVRITLLGAGNEIEYLPNTKEVSNRITGFTHILTFYQK

SEQ ID NO: 189 - protein, 461 aa, Aquirufa sp.
  source 1..461: note = Related to NZ_CP049834.1
MKPTKEQIDSIKTKFSAMQTTEDLLDLLNFSKSIIYGEKVIPFKLKDITFYCNPKRTIDHKWKFFHQYQEFTIAKKSGGTRTIYAPKKGLKAVQRSIAFVFQCIFEPHKSTMGFTKERSIVHNAQLHINSYYVLNIDLKDFFPSVDQARVWKCLQQAPFNLNQATSKVFETFAIDEFKIKYPEQSKKIHPNKKFVISDIDSNYFKATNRIPKAARLELANMLAAICCTEMEVESILADGSVEKIKKNVLPQGAPTSPILSNVVCQKLDLRLAGVAKRFGLLYSRYADDITFSSLHNVFQVDSEFKKELYRIILDQGFRINEKKTRLQKDGYKKEVTGLLVHGQVNVQKSFIKDLRMWLNLWERYGYEKANNIFLNENGPLLNTTAKIKKAELRNTLEGKLNYLSMVKGLNNITYVKLNNRFRTLKPTIKIHTEDRSAHIEKTLELLLNNGINDAMAFYQPQ

SEQ ID NO: 190 - protein, 402 aa, Chryseobacterium sp.
  source 1..402: note = Related to NZ_CP094531.1
MDTKEITIEQKKKIVEFFGVVNTSFGFCVLLNYCQRILYPKTVYQISQFELRTLAHPDSKKRYKTFTIRKKNGGTRTIHAPKPELKMVLRCINLILQCVYTVHENANGFVEGKSVVDNAKLHCNNNYIFNIDLKDFFPSIEIGRVLNRLSYPPFNFKKEKGTEEIGNYIAWLACENTLVERELDGNIIKTVKRVLPQGSPTSPILSNIICERLDRRLTGLANRFGLRYSRYADDVTFSSMHNVYQKDGEFRKEMERIISEQYFTINQSKVRLQKSIMRQEVTGITVNKQVNVSQKYIKQLRMWLYYWESYGTVKGLSLFLQSYIKDKSHVKKVVPTPEFMEAVIGGKLNYLSMVKGTENSTYLKLKERFDKLSSNYVDIDNILSVWEENGIDEAINLYSKTV

SEQ ID NO: 191 - protein, 402 aa, Chryseobacterium balustinum
  source 1..402: note = Related to CP033935.1
MVTKEITIEQKKIISDTFRWVKNVSDFCLVLNYCQSIVYPQTYFDISEYLLKTLAHPNSKNRYKTFKIKKKNGGTRTIHSPKPELKILLRCINLILQCTYTVHQNAYGFVEGKSVVDNAKLHCNNNYVFNIDLKDFFPSIEIGRVLNRLSFPPFNLKKENGNEKIGNYIAWLACENILVERELNGKIIKTVKRVLPQGSPISPILTNIICERLDRRLTGLANRFGVRYSRYADDITFSSMHNVYQKDGEFRKEMERIISEQYFTINQSKVRLQKSTVRQEVTGITVNKQVNVSQKYIKQLRMWLYFCETYGTNKGLSLFLKSYIKDKTHVKKAIPTPEFMEAVIVGKLNYLSMVKGVENSTYLKLKERFDNLSSTYVDVENILAVWEENGIDEAMDLYSKIV

SEQ ID NO: 192 - protein, 417 aa, Chryseobacterium sp.
  source 1..417: note = Related to VOXE01000004.1
MVKNISIEQAEFIKKFFKSMKDLRDFCMLIDICQDILYPEFKDRTRIDEYVIKTLAHPKSKNRYHSFEIKKKNGGMRTIHAPQPELKVVLQCINLMFQTVFTPHSAAYGFVKDASVVDNANLHCGNNYVFNIDLKDFFPSIEIGRVLNRLSFPPFNFNKENGREELGNYIAWLACENTIVERLVDGKIQKAEKRVLPQGSPLSPILTNIICERLDRRLTGLAKRFGVKYSRYADDITFSSMQNVYQEEGAFRKELGRIVSDQYFIINQDKVRLQKSGTRQEVTGITVNEFSNVTRTYVKRIRLWLSFWEKFGAEKAFNLFLNGYIKDKGHVKNLGKTSFFMENVIEGKLNYLKMVKGENNSTYLGLKERFEKLSLRNKSVDQLLDTWEKNGIDEAMSKFYADPSPRVDKVADQIALL

SEQ ID NO: 193 - protein, 401 aa, unidentified
  source 1..401: note = Related to nan
MEVKDISAEEKSLIARFFRICDSEKMFCHLLTYCQRLLYQQKIVNIIPQTLKALSHPNSSRRFKTFEISKKNGGKRTIHAPKADLKVVLKCLNLIMHSLYEPHNAAYGFVHGKSVVDNAKLHSNSLYVFNLDLKDFFPSIEIGRILNRLNHPPFNLKGEGKDKIALYIAWLSCENMIVEREIEGKLQKTVRRVLPQGSPVSPIFTNIICERLDYLLSAVAKRFGAVYSRYADDITFSSNHNIYQKDGAFRQEVERIIADQHFQINRSKVRLQKSNVRQEVTGITVNKEPNVARRYIKQIRMWLYFWETYGTDKAFSLFLKSYLKGKGHVKVPGNTPLFMEAVIRGKLDYLKMVKGESNSTYSQLLSRFEKVSSTPNHIDHILDVWENDGIETAIIKFETDG

SEQ ID NO: 194 - protein, 367 aa, Kaistella jeonii
  source 1..367: note = Related to NZ_LR134503.1
MYPFELVKIDEYKVRTLAQQNSVLRYKTFEIKKKNGGVRHIHAPKSELKVLLKCINLIFHCIYTPHDSAYGFVDGRSVVDNARLHCRNNYVFNLDLKDFFPSIEIGRILKRFNFPPFNLNKENGRQEIGNYIAWLCCENMMVERELMGETKKVFKRVLPQGSPVSPILTNIICERLDYKLSAVAKKFGIKYTRYADDITFSSMHNVYHKEGDFRKEVERIIKEQYFVINQSKVRLQKTNVRQEVTGITVNSETNVPRRYVKQIRMWLYYWENYGDSKALSLFLQSYMKDKSHIKKAVPTLGFMTAVIGGKLNYLSMVKSEGNSTYLKLKDRFEIIAEKQIKISGISENTNDEKLKKFVSSSFNYDFL

SEQ ID NO: 195 - protein, 399 aa, Chryseobacterium sp.
  source 1..399: note = Related to JAFIBT010000001.1
MNKYISSEDKVKIKEKFEKMSDLKEFCNLLNHCYSILFSDESNFIDEEKLKRFANQNSQNRYHYFEIKKKDGSTRIIHAPSSELKVLLKCLNLIFHSIFIPHHASYGFIYGRSILDNAKIHCKNNYVFNLDLQDFFSSIEIGRILKRFNYPPFSLNKDNGREIIGNYIGWIACEEIDLEEEVNGKLLKIKKKVLPQGSPLSPILTNIICERLDYKLTGVAKRFNVTYSRYADDITFSSMHNVYQEKSIFRNEVEKIIGEQYFRIKEKKTRLQKRNVRQKVTGIVVNEKVNVTKNYIKLIRLWLSMWEKYGAEKAYHLFINSYIKEKGFTKYIGSTPVFMENVIDGKLNYLKMIKGESNSTYQSLRERFNRLSIKNAKMNKILDLWEFESIEKAIEYYYR

SEQ ID NO: 196 - protein, 413 aa, unidentified
  source 1..413: note = Related to JADJJD010000012.1; note = Saprospiraceae bacterium
MKIKQSHIEHIRKQFTELQSKDDLVNLLSDAKNILWGEESTPVQLKSLTYYANPALCKKRYRTFTIKKKSGADRIIHAPVKGLKSILRSLNFVFQCMYKPHEAATGFIPEKSIVDNAKKHVGHHYVLNMDLKDFFHTFDLYRVKYGLLTEVWGINSIKKFKEHNEERFLEIDKIAFLIASLCTHPFKIDGEEKTVLPQGSPTSPTLTNILCKKLDSRLTGLAKRFGATYTRYADDITFSSPHNIYNDEAFNQELKRIIEEDQKLVINPKKTRLQKSVYRQEATGLIVNDKVNVRRRYVKQIRMWLYYWEKYGYGKAEEKFKRDYIADKGHVKNINAHLVNVLDGKLEFLKMVKGKEDDTYKKLKKRLDGLTDRESPITKILNIWENEGIEAAMATRDITEDDLSTNGRIIVIF

SEQ ID NO: 197 - protein, 457 aa, Algoriphagus aquaeductus
  source 1..457: note = Related to QKTX01000002.1
MNLLIKNIQRFISIQIEYQAGVFKVLNIFKMKIEQVHIDQIRKQFAGLQTKEDLAKLLSFADIVLYGEARKPVRLKALTYYANPALCKKRYQTFIIKKKSGADRTIHAPVKGLKSLLQSLNLVLQCIHEPHEAATGFVLEKSIVDNAKKHVGHHYVLNIDLKDFFHSFDLYRVKFGLLNEVWGIKTISKFRKENGASFQKMDELAFLMASLCTHSFEIDGELKTVLPQGSPTSPTMTNILCKKLDRRLTGLANRFGATYTRYADDITFSSPHNIYEEVENPVLNQKGAYDDFLSELKRLIKEEKLTINPKKTRLQKAGYRQEATGLIVNDKVNVRRRYVKQIRMYLNFWEKYGYEKAEQIFKRDYLHDRGNVKLLKEGKLKVNFPKMKDVLGGKLEFLKMVKGVEDNTYLSLKDRLNNLNTTIVQNPIPKSVDLNSVLEVFTRKGLMEAMELFKKCK

SEQ ID NO: 198 - protein, 402 aa, unidentified
  source 1..402: note = Related to JADZFD010000065.1; note = Saprospiraceae bacterium
MKIEQTHIDQIRKQFAELQSKEDLVKLLSGAKNILYGKECKPVQLKSLTYYANPTLCKKRYQTFTIKKKSGADRTIHAPVKGLKSILRSLNYVLQCVNEPHEAATGFVLEKSIVDNAKKHVGHHYVLNMDLKDFFHSFDLYRVKFGLLHEAWSIGNISKYRETNEQQFQQKEELAFLLACLCTHPFKIDGEEKTVLPQGSPTSPTLTNILCKKLDRRLTGLANRFGATYTRYADDITFSSPHNIYTNGEFNKELKRIIEEDQKLVINPKKTRLQKAGYRQEATGLIVNDKVNVHRRYVKQIRMWLYYWEKYGNEKAEQIFKRDYIADKGHVKNINAHLVNVLDGKLEFLKMVKGVNDRTYIKLKNRYDKLTEKDSPINQLLDIWDTDGIDQAMSIYYKDKLE

SEQ ID NO: 199 - protein, 396 aa, unidentified
  source 1..396: note = Related to VGMK01000021.1; note = Bacteroidetes bacterium
MKIEQAHINQIRQQFAELQSKEDLVKLLSEAKNLLYGEKCKPVQLKSLTYYANPELCKKRYQTFTIKKKSGADRTINSPVKGLKSILRSLNFVLQCVYEPHEAATGFVLEKSIVDNAKKHVGHHYVLNMDLKDFFHTFDRNRVKMGFIYEPFNLSGDKEPLAFLLASLCTHPFEIDGKEKTVLPQGSPTSPTLTNILCKKLDRRLTGLANRFGATYTRYADDITFSSQHNIYTDEVFNNELKRIIEEDQKLIINPKKTRLQKAGYRQEATGLIVNDKVNVHRRYVKQIRMWLYYWEKYGYEKAEQIFKRDYLVDKGNVKNLNAKLENVLDGKLEFLKMVKGIEDVTYKGLKERFDLLNGIKVKKENEKIDLENVVNTILNKGLIEGINLYDRYKKS

SEQ ID NO: 200 - protein, 396 aa, Flavobacterium cyanobacteriorum
  source 1..396: note = Related to NZ_NOXV01000174.1
MKIEQAHIDQIRKQFAELQSKEELVKLLSDAKNMLYGEECKPVQLKSLTYYANPTLCKKRYQTFTIKKKSGADRIIHAPVKGLKSILRSLNFVLQCVYESHEAATGFVLEKSIVDNAKKHVGHHYVLNMDLKDFFHTFDRNRVKMGFIYEPFNLNGDKEPLAFLLASLCTHPFEIDGEVKTVLPQGSPTSPTLTNILCKKLDRRLTGLANRFGATYTRYADDITFSSPHNIYTDEEFNKELKRIIEEDQKLIINPKKTRLQKAGYRQEATGLIVNDKVNVRRRYLKQIRMWLYYWEKYGYEKAEQIFKRDYIADKGHVKNINAHLVNVLDGKLEFLKMVKGTEDGTYKRLKERFDNLTGFKETKDQSKIDLSSVLNTLVNQGLNKAMSLYSRFKNQ

SEQ ID NO: 201 - protein, 403 aa, Elizabethkingia miricola
  source 1..403: note = Related to QNTX01000003.1
MKIEQIHIKQIRKQFAELKSKEDLVILLSDAKNILHSEECKPFQLKSLTYYANPKLCKKRYQTFTIKKKSGADRTINAPVKGLKSILRSLNFVLQCVYEPHEAATGFVLQKSIVDNAKKHIGHHYVLNMDLKDFFHTFDRNRVKMGFIYAPFNLNGDKEPLAFLLASLCTHSFGIEGEVKTILPQGSPTSPTLTNILCSKLDRRLNGLANRFGATYTRYADDITFSSPHNIYNNEDFNKELKRIIEEDQKLVINPKKTRLQKAGFRQEVTGLIVNDKVNVQRRYVKQIRMWLYLWEKWGYEIAQQKFLNDYIVDKGHVKNINAHLVDVLDGKLEFLKMVKGIEDGTYMGLKQRFDRLVGVTDPINQLLDIWEKAGIESAMNNYYKNETTSLDKGSSNIEDLFK

SEQ ID NO: 202 - protein, 396 aa, unidentified
  source 1..396: note = Related to JAGPCT010000008.1; note = Saprospiraceae bacterium
MKIEQAHIEQIRKQFIELQSKEDLVKLLSDAKNMMYGEVCKPIQLKSLTYYANPSLCKKRCQTFTIKKKSGADRTIHSPVKGLKSILRSLNFVLQCVYEPHEAATGFVLEKSIVDNAKKHVGHHYVLNMDLKDFFHTFDRNRVKMGFMYEPFALNGDKEPLAFLLASLCTHPIEIEGEGKTVLPQGSPTSPTVTNILCKKLDRRLTGLANRFGATYTRYADDITFSSPHNIYTDEDFIKELKRIIEEDQKLVINPKKTRLQKTGHRQEVTGLIVNDKVNVHRSYVKQIRMWLYYWEKYGYEKADQIFKRDYIADKGHVKNKNAHLDNVLDGKLEFLKMVKGIEDRTFKGLKKRFDKLTGMNDPMNQLLDLWENKGIEDAMKNYYKSPPEMTIIFTL

SEQ ID NO: 203 - protein, 718 aa, unidentified
  source 1..718: note = Related to JAAZMS010000454.1; note = Bacteroidales bacterium
MKIEQAHIDQIRKEFAELQSKEDLVKLLSDAKNMLYGKECKPVQLKSLTYYANPTLCKKRYQTFTIKKKSGADRTINAPVKGLKSILRSLNFVLQCVCDPHEAATGFVLGKSIVDNAKKHVEHHYVLNMDLKDFFHTFDRNRVKMGFMYEPFNLNGDKEPLAFLLASLCTHPFEIDGEVKTVLPQGSPTSPTLTNILCKKLDRRLTGLANRFGATYTRYADDITFSSPHNIYTNEAFNKELKRIIEEDQKLVINPEKTRLQKAGYRQEATGLIVNDKVNVRRRYVKQIRMWLYYWEKYGYEKAQQIFILDYTTDKGHVKKGKPNLANVLDGKLEFLKMVKGENDSTYETLKKRFDKLYVIENSFSKVLDIWENEGILKNTDKNTGQKTSEHIIHNPKHITKFLRQFKENTDLKWTTHSWDNIKYASIDDFINALNENKKEFNRLYKHNRDLYNLIQYFIYQPKSNPIENGIPKYGWVNLQAMKFGWQFPDNKFLLWCKENYDNKSYDERKKPFQYLLPKELRPSKTVKGKEIKYFQDVVEIFKTEIQFREEYLYKEIRKRIHRISDFNFSGLDELKKLDFYTYTPGVLSAIDHIFEQIKRNETAIDINISYIIHNQKIILSITQINSFPSKELDINNTKSFLGGHLNAIAESLFSLADFSIESNFKYNGKIIPGELQITYENMIGKRVASNITLTQEPIFIESNNKLPGFTYKLTFYI

SEQ ID NO: 204 - protein, 389 aa, unidentified
  source 1..389: note = Related to NZQO01000147.1; note = Flavobacteriaceae bacterium
MKIDQSHIDHIRKQFADLQSKEELVILLSEAKNLLYGEECKPVQLKSLTYYANPEICKKRYQTFTIKKKSGADRTINAPVKGLKSILRSLNFVLQCIYEPHKAATGFVRDKSIVDNAKKHVGHHYVFNLDLKDFFHSFDRNRVKMGFIYEPFNLGGDKEPLAFLLASLCTHPFEVDGELKTVLPQGSPTSPTLTNILCKKLDRRLNGLANRFGATFTRYADDITFSSPHNIYNDEAFNNELKRIIEEDQELAINPKKTRLQKEGYRQEATGLIVNEKVNVRRKYVKQIRMWLYYWEKYGYEKAEQIFKRDYIADKGHVKNTNAHLMNVLDGKLEFLKMVKGGNDSTYLTLKNRFEKQIGLAAPISSVLNIWQNEGIEKAMKIFNQLQRN

SEQ ID NO: 205 - protein, 717 aa, Echinicola pacifica
  source 1..717: note = Related to BMWX01000006.1
MKVEQEHIDQIRKQFAELHNKEELINLLSYAKNMFYGEECKPVQLKSLTYYANPEICKKRYQTFTIKKKSGADRTINAPVNGLKSILRSLNFVLQCMYEPHEVATGFVMDKSIVDNAKKHLGHHYVLNLDLKDFFHTFDRNRVKMGFIYEPFNLSGDKEPLAFLLASLCTHPFEIDEELKTVLPQGSPTSPTLTNILCKKLDRRLNGLANRFGATFTRYADDITFSSPHNIYNDEAFNNELKRIIEEDQELAINPKKTRLQKAGYRQEVTGLIVNEKVNVGRRYVKQIRMWLYYWEKYGYEKAEQIFTRDYIADKGHVKKGGANMANVLDGKLEFLKMVKGAADTTYLGLKGRLDKLVINQDTNKTEIAELTNKGLRFSNENEVLHDPDFVVKRLKQFTIDPIMKWTTHFWDIPTETDTDVHSLRDIADHFAAVNSRFDEFVALQKYNNNLWWKVIYPFIFQKKPKKNENKDNPYRWGEYNLHIGWQYPKFVAEWSKDNYDIPPPALKKTPFEMPLPSELITDLANQKYRELFGKEIRYFGDAIQMFKREIEFREDTKDLYYEVKVLARQELTEFSVNGLESLKQLSFFTYTAPVLKAIRRIFRMIQSRTEQREVIIECKKLTDLRLIELRIIHKNSLSHRESTDDKITKPSGDLLEVIKNLISICNFEIESSFNDGIFRITYLRPNTNVIKLNHLRPLKQSLDSLHGFTYVLKFPI

SEQ ID NO: 206 - protein, 735 aa, Echinicola sp.
  source 1..735: note = Related to NZ_CP080025.1
MKIDQTHINQIQKQFNELESKEDLVKLLSDARNMLYGQECKPFQLKALTYYSNPKVCRKRYKTFNIKKKSGADRTINAPVKGLKAILRSFNFVLQCLYKPHENAIGFVLDKSIVDNAQKHVGHHYVLNLDLKDFFHSFDKKWVKYGLMSPPFNLHGDKEPLAFLLASLVTHPFEVEGEVKNVLPQGSPTSPTLTNILCQKLDRRLNGLANRFGATFTRYADDITFSSPHTIYNDEAFNNELKRIIEEDQKLAINPKKTRLQKADYRQEATGLIVNDKVNVRRRYVKQIRMWLYYWEKYGYEKAEQIFKRDYIADKGHVKNINAHLVNVLDGKLEFLKMVKGIEDGTYKGLKERFDKLTQSYPSPTILKLSDDNQNRMLENETVSISNGTPSELLNNNKINNIELIVRPLGNSTVEELMVDKYLVKGLKLPHIEIFENPDKYKPSLPHNPEQTTILLTEFKNDGSGFKELVHKPFDEITPYKVLEEVKNHPNFSEYFKKGRKSGFKGNINREVQNSVIGLINSFERIGNMHWDQFKEYPFGEHGSSEYTTYAMNFKKNYRFGPRQDGYTSLEELIRFTFLKEITRFDSKLIFLPDDRRFNLRGSFYTWVPSVKKGLEFIAQGINEHSNICGSSSFSTKEIYFELRRDTFLNTISLLITDSDSVAKRPAEDILKDLRLSEVFKKYFRSICDWTIYLKNEDGNFQLRVLKRIQDTGKEDIISIEGTKGFTHKITFYGT

SEQ ID NO: 207 - protein, 389 aa, Echinicola sp.
  source 1..389: note = Related to NZ_JACYTQ010000004.1
MNIEPFQKEQIRKNFAELQNKEDLVNILSDAQRMLYGENCKDVQLKSLTYYANPEICKMRYQTFTIKKKSGADRTIHAPVKGLKSILRSLNFVFQCISEPHEAATGFVLDKSIVDNAKKHVGNHYVLNMDLKDFFHSFDRNRVKMGLMYEPFSLGGDKEPLAFLLASLCTHPFEIDGEVKTVLPQGSPTSPTITNILCKKLDRRLNGLANRFGATFTRYADDITFSSPHNIYNDETFIKELKRIIEEDQNLVINPKKTRLQKAGYRQEATGLIVNDKVNVRRRYVKQIRMWLYYWEKYGYEKAEQIFKRDYMADKGHVKNVNAHLVNVLDGKLEFLKMVKGSEDGTYQRLKERFDFLVGFTEPINDVLDIWEKYGIDKAMDVYYKNKLG

SEQ ID NO: 208 - protein, 398 aa, unidentified
  source 1..398: note = Related to JADYZM010000024.1; note = Flavobacteriales bacterium
MKIEQAHIDQIRKQFAELQSKDDLVKLLSDAKNMLYSEECKPIQLKSLTYYANPVLCKKRYQTFIIKKKSGADRIIHAPAEGLTSILRALNFVLQCMYVPHKAVTGFVLEKSIVDNAKKHVGHHYVLNIDLKDFFHSFDRNRVKMGFMFEPFNLNGDKEPLAFLLASLCTHPFEIDGEVKTVLPQGSPTSPTITNILCKKLDRRLTGLANRFGVTYTRYADDITFSSPHNIYNDEAFNKELKRIIEEDQKLVVNPKKTRLQKTGYRQEVTGLIVNDKVNVRRRYVKQIRMWLYYWEKYGYAKAEQIFKRDYVADKGHVKNINVHLVNVLDGKLEFLKMVKGTKDETYKKLKERYENLAEEINPISQLLNVWEKEGIEKAMEVYYDKEENSNILIEDLF

SEQ ID NO: 209 - protein, 725 aa, Tenuifilum thalassicum
  source 1..725: note = Related to NZ_CP041345.1
MKVDKVHIEQLRKQFAEMQSKDDLLKLLNNAKKMLYGENSMPFQKKSLTYYANPDLCKKRYQTFTIKKKSGEDRIIHSPVSGLKSILRVLNFVLQCIYEPHKAATGFVLNKSIVDNAKKHLGQNYVYNIDLKDFFHSFDRNRVKIGFMYEPFNLKGDKESLAFLLACLCTHPLEVDGEIKTVLPQGSPTSPTLTNILCKKLDRRLTGLAKRFGATYTRYADDITFSSLHNIYKDDDFIKELKRIIEEDQKLVINPNKTRLQKAGYRQEATGLIVNEKVNVHRRYIKQIRMWLYYWEKYGYEKAEQIFKRDYIADKGHVKNMNAHLVNVLDGKLEFLKMVKGFKDSTYQGLKKRFDRLTKSENPIENNEIIEQNRTQEHLNVLSEDKKAIFHDPKLVINKLEQFTSDPIMKWLTHFWDTSPDINSESNSSTENYFKAVNSRYEEFVFLQKYNANLWWNVIYPFVFQKKISTNKEGKEIPFKWGKYGIKIGWQYPDSVINWIVENYDNKPHALKKTPFEMSISDDLVSAEANQKYRLMYGKEIRFFGDIINLFKREIAFREETRDFYYEINNLVLQELREFKVSGLETLKYESFTVYTVPVLKAIRRIFRMIQTRTENREVEISCNRLSNQNLILLKIIHIGSHPLKNSEHSKFMKPSGDLEEVIKPLISICDFEVAAHFTDGDFVLKYLYPNVKISHENSQFHIAEIKKEDCIVKGFTYILKFYLP

SEQ ID NO: 210 - protein, 396 aa, unidentified
  source 1..396: note = Related to QMPL01000018.1; note = Bacteroidetes bacterium
MKIEQQHIDHIRQRFAEMQTKEELVSLLSDAKNIMYGKECKPFHLKSLTYYANPKLCKKRYTKFSIKKKSGKERIINAPVGGLKSLLRSLNFVLQCIYEPHHAATGFVLDKSIVDNANLHTGNHNVYNLDLKDFFHSFDRNRVKMGYIYEPFNLGGDREPLAFLLASLCTHPFEIEGEIKTVLPQGSPTSPTITNILCKKLDRRLTGLANRFGAKYSRYADDITFSSPHNIYKDEEFLRELSRIIEDDQKLAINPDKTRLQKAGYRQEVTGLIVNEKANVRKRYVKQIRMWLYYWEKYGYEKAQQIFKRDYLTDKGHVKKGEPNFANVLDGKLEFLKMVKGLEDSTYKTLKKRFDKLTDVKEKTQQEKVDLDAVIDTIINKGLDQGISLYDKYKST

SEQ ID NO: 211 - protein, 409 aa, unidentified
  source 1..409: note = Related to JAGPFM010000063.1; note = Bacteroidales bacterium
MKIEQQHIDQIRQKFASMQNKADLVSLLSEAKNILYGKECKPFELKSLTYYANPDLCKKRYAKFTIKKKSGGERTINAPVSGLKSILRSLNFILQCVYEPHNAATGFVLGKSIVDNAKVHVGNHHVYNLDLKDFFHSFDRNRVKLGFIYEPFNLNGEREPLAFLLASLCTHPFEVNGEIKNVLPQGSPTSPTITNILCKKLDRRLTGLANRFGAKYTRYADDITFSSPHNIYNEEEFQKELERIIADDNLLKINGKQKEIGPQLNINTDKTRLQKSVYRQEVTGLIVNEKVNVRQRYIKQIRMWLYYWEKYGYEKAQQIFTRDYITDKGHVKKGKPNLINVLDGKLEFLKMVKGAEDSTYLTLKNRFDKLPQVKEKIQSEKVDLDAVLNTLINKGLNPAMVLYDRYKNG

SEQ ID NO: 212 - protein, 402 aa, Cyclobacterium sp.
  source 1..402: note = Related to NZ_WOFO01000011.1
MKIGHEQTERIRKQFKNLQTRQDLVDLLSEAKDMMYEDKTKPFKLKTLTYYANPENCKFRYSTFFVKKKSGGQRTIHAPTKGLRSVLRSLNYVLQCMHVPHQAATGFVRDRSIVDNAQKHVGHHYVLNLDLKDFFHSYDRNKVKLAFMYSPFNLRGCTEKEKLAFFLACLCTHPFEIEGATKTLLPQGSPTSPTITNILCERLDRRLTGLANRFGATYTRYADDITFSSPHNIYQEETNPSLNPKGSYENFRAELERLIEEEKLTINPKKTRLQKSGYRQEATGLIVNEKVNVRRRYVKQIRMWLYYWEKYGYERAEQIFRSDYMIDKGHVKKGKPDLMNVLDGKLEFLKMVKGKEDGTYKGLKERFYELIGHEDPINRVLNVWETEGIDQAINIYYKDKLE

SEQ ID NO: 213 - protein, 409 aa, Mariniradius saccharolyticus
  source 1..409: note = Related to AMZY02000008.1
MKIDPQHIAQVRKQFENLQSKEDLLQLLNAAKKMMYGEKFKPLELRALTYYADPKLCTRRYSKFSIKKKSGGVRTIHAPTNGLKSILRSLNFVLQCIHEPHRTATGFVLDKSIVDNAKNHVGNHYVLNLDLKDFFHSFDRNKVKLAFMFTPFNLGVSKEKEKIAFLLASLCTHPLEVDGITKLVLPQGSPTSPTITNILCERLDRRLNGLAKRFGANYSRYADDITFSSPHNIYHIEDNPSLNQKGRFDNFRAEFGRLIEEEKLSINPKKTRLQRSGFRQEATGLIINDKVNVRRQYVKELRMWLYYWESYGYEKAEQIFKQDYMADKGHVKNMNAHLVNVIKGKLEFLKMVKGNEDGTYKGLKERFSKLDLAKGKQDFEKIDLETVVTTILNKGLDEGINLYERFKNS

SEQ ID NO: 214 - protein, 718 aa, unidentified
  source 1..718: note = Related to nan
MKIEYKYIKQIKEQFANIQNKQDLANLLSFANKILYGNKSKPIKLNALTYYANPSICKNRYYSFSIKKKSGDKRIIHAPSKGLKTILQTLNFVFQCLYSPPKVATGFVTGKSIVDNARKHEGHRYILNLDLKDFFYSFDRNRVKLAFMYEPFNLIGEKEPLAFLLASLCTHPIEVNGETKVVLPQGSPASPILTNILCKKLDRRLNGLAKRFGASYSRYADDITFSSQYNFYNNKEFVDELNRIIEIDQKLNINSKKIRIQKSTFRQEVTGLIVNEKVNVRRRYIKLIRMWLYYWEKYGYDKAEQIFQKDYIADKGHVKKGNAKLIDVLKGKLAFVKMVKGYEDTTYQKLKKRFDSLIKNKIIQNLNKNKVVGMKLENNKSSNSILSESLLEYLEKHLKEFLNKKTYPIIHTPQKTIEILKLFSSNDKHLKYTTHSWEEEKYETYNNFMGKIKDEWEDIDKNLKGLSNRLHAKISNFLFNKKLGQKKSKGDYISWGDKRLKFGWSSKELMEFMKKNPSSSPFDCPIPENIKNLDNDYGKFFRDYVDVFKNEIEFREDTKYFKNMVISLYEDILRPNGFSIEGLENLDGFSCYTDTQQIKNAIKRIFEMFVNGEYKNYNKIIIERSSNLTGQSFHLIKITQLNSFIKRSGDDPKIKEPTGDLGNIIELLKNLADYSIVSKFNNKDCYRINYLSADQKDQIEKIDCNEINGFTHEIKFYL

SEQ ID NO: 215 - protein, 400 aa, unidentified
  source 1..400: note = Related to JADJXZ010000008.1; note = Crocinitomicaceae bacterium
MTFEKTYIDQIKEDFANMQDVSDLAVVLSKARNILYDKECKPFNSETLYYFAYPQNCKHRFKEFSIKKKSGAIRTIHSPTRELKSILRALNFVFQCIFTPHSAATGFVPKKSIVDNAKKHTGKHYVLNMDMKDFFYSFDRNRVKMGFLAEPFNLKGTKEPIAFLIACLCTHPVEIGSEIIHVLPQGSPCSPIVTNILCARLDRRLKGLANRHGVVYSRYADDITFSSLHNAFNREAEPVIGEKGHYNNFIAEFERLIGQEKLNINHKKTRLQKSGYCQEATGLIVNEKVNVRRRYVKQLRMWLYYWEKYGYEKAEQIFKRDYITDKGHVKNINAHLVNVLDGKLEFLKMVKGAEDGTYKGLKERFDILVGFTDPINQILNAWQTEGIDQAMSIYYKDKLE

SEQ ID NO: 216 - protein, 400 aa, unidentified
  source 1..400: note = Related to JAJTAY010000029.1; note = Bacteroidia bacterium
MKIEQANINQIRKQFSELQTREDLAKLLSDAKNMLYGEKCSPVQLKSLTYYANPLICNDRYTTFSIRKKSGASRTIHAPVKGLKSILRALNFVLQCMTEPHAAATGFVPDKSIVDNAARHVGHRYVYNLDLRDFFHSFDRNRVKLAFMNEPFNLRDGREPLAFLLASLCTHPMEIEGEIKSVLPQGSPTSPTLTNILCKKLDRRLSGLAKRFGATYTRYADDITFSADRNVFNDEEFLNELRRIIEDDQKLAINPQKTRLQKADYRQEATGLVVNEKVNVRRRYVKQIRMWLYYWEKYGYETASRHFGKFYRADKGHLKKSNAQLINVLDGKLEFLKMVKGADDSTYKALKKRLDKLTGIKQKTDAEKVDLDLVVDTILIKGLDAGIELYERFKNTLNDG

SEQ ID NO: 217 - protein, 389 aa, unidentified
  source 1..389: note = Related to DOXR01000029.1; note = Bacteroidales bacterium
MQIEQKHIDTLRAHFAEMQNKEELALLLSAAKNILYGKVCKPISVKSLNYYANPEYCKQRYKTFAIKKKSGGTRTIHAPVEGLKTKLRALNFALQCLYDPHKAATGFVREKSIVDNAKCHVGHNYVFNIDLKDFFHSFDRNRVKIGFMSEPFNLNGEKEPLAFLLASLCTHPFEIDGIQQIVLPQGSPTSPTITNILCRKLDHRLSGLAKRFGATYTRYADDMTFSSDHNIYGNEDFRNELVRIIEEDQKLKINPDKTRLQKTGYRQETTGLVVNDKVNVTRRYVKQIRMYIYYWEKYGYEKAEQVFKKDYTLDKGSTKKKTPSLINVIDGKLNFLKMVKGSEDGTYKGLRGRFDSLAGVFDPINEVLDAWEKNGIDEAVSLYFKLNAD

SEQ ID NO: 218 - protein, 424 aa, unidentified
  source 1..424: note = Related to JAHUUM010000008.1; note = Weeksellaceae bacterium TAE3-ERU29
MKIEQQHIDFVKEEFAKIQTKEDLLCLLNNAKKIIYKGKCTPISLRQLTYFANPNFCKERYRSFTIKKKSGADRLIHAPEKGLKSILRPLNFILQCIDDPHKSATGFVLDKSIVDNAKKHIDKPYVYNIDIKDFFHSFTKSWVKYGFMTAPFNLGKEKEDLAFLLASLCTHPFEIDGKIQNVLPQGSPTSPTITNILCKRLDRRLSGLAKRFGATYTRYADDITFSAMYNIFKEEENPQLNEKGRYDNFIAELERLITQENLIIKEEKVRLQNKDARQEVTGLVVNDKVNVRRRYVKQLRMWLYYWEKYGYNKASEIFSRDYKADKGHVKKGTPNFANVLDGKLQFLKMVKGEQDATYKKLKERFDVLKAEIDPINEVLDIWEEEGIEKAMDFYSKRKKTQPKKKKNPVVRTMTMEKLMALFGK

SEQ ID NO: 219 - protein, 392 aa, unidentified
  source 1..392: note = Related to JACIVM010000140.1; note = Bacteroidales bacterium
MNIEQAKVDEIKKLFAEMQTKEDLVSLLNFANNLLYDNECLLINPKTLSYYANPLISKNRYREFTIKKKSGSNRTIHAPVKELKHILRSLNLVLQCVSDPHPSATGFVLNKSIIDNAKKHVGHRYVYNLDLKDFFYSFDGNSLKLAFMYKPFNLNGEREYLAFLLASLCTHPIEIDGEIKFVLPQGSPTSPTLTNILCRRLDRRLSGLAKRFGAVYTRYADDITFSSYHNIFKKDENPQLNDRGCYDNFIAELERLLQEEGLKINPQKTRLQKSGWHQEATGLVVNEKVNVKRRYVKQLRMWLYYWEKYGYKKAEQIFIQDYISDRGHVKKRKPNLANVIKGKIEFLKMVKGCEDSTYQGLRERFDKLVLNQPPKKTEKKTITTNVFRPSNE

SEQ ID NO: 220 - protein, 399 aa, Nitritalea halalkaliphila
  source 1..399: note = Related to NZ_AJYA01000040.1
MKPEPHQNQQIREAFAALRTKKDLAELLNLANQFLYGEEAAPLYLKTLTYYADPRKAKDRYQTFTIQKKSGAERLIHAPVKGLKTILRALNFILQCIHSPHQAATGFVTDKSIVDNARQHIGSPYVYNLDLKDFFHSFDRNRVKLGLMYAPFHLNGPREPLAFLLASLCTHPLDCDGEVRTVLPQGSPTSPTLTNILCQKLDHRLNGLAKRFGLVYTRYADDITFSSGYDCFRNPEFQSELRRIIEEDQQLRIHPDKTRLQRLGYRQEATGLIVNEKVNVRRRYVKQLRMWIYFWERYGYAKAQQIFLRDYLRDKGHLKDVSTSSLQQVCSGKLEFLKMVKGPEDSTYQQLASRFHALTTKEKASASGATNLERVVDTILGQGLEQGLRLYDSFKTNKR

SEQ ID NO: 221 - protein, 390 aa, Lewinella maritima
  source 1..390: note = Related to NZ_CAKLPZ010000001.1
MNITPEQVKQITTQLAAVETKTDLAALLSEAQNILHGKTCKPITATAFAYHMNPYMNKNRYRNFTIKKKSGGARVIYAPTNDLKAILRALNLILQCMYTPARVVTGFVPGRSIVDNAKCHIGHRYVYNIDVKDFFHSFDRNRVKLAFMYAPFNLRDKREPLAFFLASLCTQAFRFPGEVVKAILVQGSPTSPTLTNIICATLDRRLTGLARRFGVTYSRYADDITFSSEHCPYNREDFQRELLRIIEGQGLTLNPDKTRLQNLAHRQEVTGLIVNEKVNVRRRYVKQLRMYLYYLEKYGFYKAEAIFLRDYLADRKHNVKGNPQMLNVLGGKLDFLRMVKGQEDSTYISLLQRFQRFDFRPTKISKTLDAWEMGGIKEGMKIYYGQDKEK

SEQ ID NO: 222 - protein, 443 aa, Lewinella antarctica
  source 1..443: note = Related to NZ_JAATJH010000004.1
MKATEAQREEIKSLVAELSSKKGLVNLLSKARTMLYGQETKPVKLKLLTYYANPTICPRRYRKSTIPKKSGGVRTIHAPVKGLKAILQPLNFVLQCMHTPHCAATGFVQGRSIVDNARKHVGQNYVLNLDLKDFFHSFNRNRVKLGFMFGPLQLNGSKEPLAFLLASLCTQPLYENGDIKVGHRPPSRFVGESIFMSEDDPNYELIMQILQENEVINSKRRVKLRIARGAVKTVLPQGSPTSPTITNMLCEKLDRRLTGLGNRFGATYSRYADDITFSSLHNIYNQDEFNDELVRIIEEDQGFKINPKKTRLQRRGYCQEVTGLSVSEKVNVRRRYVKQLRMWLYYWEKYGIEKAEDIFARDYVGDKGHVKMHVPEMSRVIGGKLEFLRMVKGETDSTYLGLKDRYEKLMLPLDPLTKILDLWEEKGIDAAMNAYYGEEVTEE

SEQ ID NO: 223 - protein, 396 aa, unidentified
  source 1..396: note = Related to PXTU01000456.1; note = Bacteroidetes bacterium SW_10_40_5
MPINQEDKAYIRDKFAAMQTKEDLVNLLSEAKDMRYRERTKPFKLNYFTYYANPKLCKQRYKTFTISKKSGGQRVIHAPVMGLNFLLQSVNFVLNCMYEPHKAATGFVPEKSIVDNARGHAEKPFVYNIDLQDFFHSFGKPRVKYGFMRSPFNLNGDREYLAFLLASLCTHPFEVNGEVKRVLPMGSPTSPTITNILCHTLDRRLNGLAKRFGATYSRYADDITFSSIHNIYRKKDFQKELYRIVEANQGLKIKPEKTRLQKEGYRKEATGLVVNEKVNVKRRYVKDLRKWLYLWEKYGNEKAQQLFTKDYVADKGHVKKGEPNLENVLDGKLDFMKMVKGVQDGTYLKLRDRFDKLTQQSSTSNSKKVSLDDVLDTILNQGLIQGIDLYQKLRKP

SEQ ID NO: 224 - protein, 391 aa, Bizionia paragorgiae
  source 1..391: note = Related to NZ_FNQK01000004.1
MKLEKQHTEQLIKQFRSLKTKDDLLVLINKVNLLLYGDDFKSLTLKGLNYYTNPNYSDKRYSSFSIKKKSGGERIINSPVNGLKHILKPLNVILNCIATPHPKATGFVLGKSIVDNAKQHVGNHYVYNIDLKDFFHSFDRNRVKLGFMYPPFNLSGDLEPLAFLLASLCTHPFEVEGKLKTVLPQGAPTSPTITNILCVKLDRRLNGLAKRFKVNYSRYADDITFSSHVNVFKNEVFLKELNRIIVEDQNLILNDKKTRLQQTGTRQEVTGLTVNTKVNVNSKYIKQLRMWLYYWEKYGFNKAESIFLRDYAKDKGHIKTGKPNFQNVLMGKLEYLKMVKGHGDSTYVKLNARFTRLTRTESMLEKTLMAWEENGIEKAMEIYKFNNTTMF

SEQ ID NO: 225 - protein, 389 aa, Psychroserpens sp.
  source 1..389: note = Related to NZ_CP039451.1
MKLEKQHTEQIIKQFKALRTKDDLVVLINKVNLILYGDKFISLTVKGLNYYANPEYSDKRYSSFSIKKKSGGERIINAPVNGLKHILRPLNIILNSIAMPHAKATGFVLGKSIVDNAQAHVGYNYVYNIDLKDFFHSFDRNRVKLGFICAPFNLNGLLEPIAFLLASLCTHPFEIDGVINTVLPQGAPTSPTITNILCVKLDRRLNGLAKRFKANYTRYADDITFSCNVNIFKNDEFLKELNRIIAEDQNLILNDKKTRLQQTGNRQAVTGLTVNTKVNVNSKYIKQLRMWLYYWEKYGFNKAESIFLRDYAVEKGQLKKGKPNFKSVLGGKLEYLKMVKGFNDSTYLKLNTRFTKLSKTESKLEQTLKAWENNGIEKAMEIYKLAKIN

SEQ ID NO: 226 - protein, 395 aa, Maribacter ulvicola
  source 1..395: note = Related to FTMA01000004.1
MGFKSFINLIMKTTKEDIALIREKFNSLSTKEDLVNLLNVANVLLYGEDAFTLKESTLAYYANPAFCTERYTSFEINKKSGGTRTINAPVKGLKSILKTLNFVLQCISEPHHKATGFVINKSVVTNAKFHVGNHYVYNIDLKDFFHSFDRNRVKLGFMQKPFNLNKDREPIAFLLSCLCTHPFKVDDNLKIVLPQGAPTSPTISNILCSTLDRRLNGLAKKFKINYSRYADDITFSSQVSVFKRKDFQKELLRIITEDQGLVLNEKKTRLQQSGYRQEVTGLIVNEKVNVSRRYIKNLRMWLYYWEKYGFKRAEIIFKKNYILDRGHIKKSEPNFINVITGKLEYLKMVKGPFDSTFIKLNSRFELLLQNESMLEQILKVWENQGIEKAMELYNK

SEQ ID NO: 227 - protein, 464 aa, Tenacibaculum finnmarkense
  source 1..464: note = Related to NZ_WXXU01000001.1
MNNDNKDYQVSILKEFIKIDKMEIQQKHIEKMKSLFSKMENKQDLVNLLNGVYNLLYKKNETTDNSYDPFKIVSDTKTVYFNLMFSEEEFNLKSKTKKNTYIQLSSLSYYANYSLCKKRYSQFKIKKKSGAERIINAPVEGLKIILKLLNFVLQHVYKPHKSATGFVLNKSIVDNAKKHIDSNYVYNIDLKDFFHSFDIKRVKLGFMEELFNSKTDREPLAFLLACLCTHPFEVAGEIKNVLPQGSPTSPTITNILCKTLDNRLTGLANRFGLRYTRYADDITFSSQHNVYNKEDFQKELKRIIENNQNLLINHKKTRLQKRGYKQEVTGLVVNDKVNVRKRYVKQVDKYLYLWEKYSFEKAKQIFIREYPQEKAHLRNYKPNLTNVLRGKLDFLKMVKGAEDSTYLKLKKRFDKLTGKQNPINEILDIWEKEGIEQAIKAFEIATEVNQNSIDLSKFFKNERD

SEQ ID NO: 228 - protein, 517 aa, Tenacibaculum finnmarkense
  source 1..517: note = Related to JAAGBU010000002.1
MKIEQQHIELIRTTFSTLQTKEDLLSLLNLANTLLYPKNSFKFELKQLTYFANPKLVKNRYAEFTIKKKSGANRIINAPTQGLKSILKTLNFVLQCMCEPHKAATGFVRGKSITDNAKKHIDSNYVYNIDLKDFFHSFDLNRVKLGFMQTPFNLRNESFPIAFILACLSTYTFKIDGEIKQVLPQGSPTSPTITNILCRRLDKRLTGLANRFGLRYTRYADDITFSSQHNVYNKEDFQNELHKIIVTDEKFAFNTKKTRLQKHGYQQEVTGLIVNEKVNVRSRYVKQVRMWLYYWEKYGYNKAEQVFRKDYIKDKGHVKKTLPNLDNVLEGKLLFLKMVKGEYDGTYMKLQNRFEKLNRKQNHIDEILALWDSKGIDLAKNKFYNNDDDDENSHNTIVTDTEKLSKINETDKQYDIANFCFRNITGFKKLYLKKVIIDHDILYKYWENSSRTMILVSEEAFKVLSEASNFDSKNIVQSIEKYNISENKKTKKTEKGDYNQRSFFVKKKSIEKYKLMF

SEQ ID NO: 229 - protein, 403 aa, Antarcticibacterium arcticum
  source 1..403: note = Related to NZ_CP042476.1
MKTNPDQKTYIRKKFAAMTCKRDLLVLLNEAQGMMYGEKGRHFRLKDLTYYANPDLCKKRYSTFIIAKKNGGERTINAPVKGLRIILRSLNFILQAISEPHAAATGFVPDRSIVDNARAHVGKHYVYNLDIKDFFHSFDRNRVKMGFMRKPFNLKANENKEKLAFFLSCLCTHPFEVEGEMKTVLPQGSPTSPTITNILCKNLDRRLNGLAKKYNLSFTRYADDITFSSSHNIFKDEEFQKELQRIIEEDQQLVINPTKTRLQKTCYRQEATGLIVNEKVNVKRDYVKQLRMWLYYWEKYGEVRAEQIFQRNYNLDKGHVKPEHPGMANVIAGKLEFLKMVKGDEDPTYKKLRERFLKLHPGSPFVEKLLQTWETRGIDEAIKIHTLRIKTSKVILNTNMYTL

SEQ ID NO: 230 - protein, 402 aa, Gramella sp.
  source 1..402: note = Related to JAJSON010000015.1
MKASPDQQTYIRKKFALLESKEDLLVLLNEAKRMMYGDECKVFRLKALNYYANPDFCKKRYTSFDIPKKNGAKRIINAPVKGLRSILRVLNFILQAVYEAHPAATGFVQEKSIVDNAQPHVDKHYVYNLDLQDFFHSFDRNRVKLGFMKKPFNLRKDRNKEQLAFFLSCLCTHPFKIDGNIKTVLPQGSPTSPTISNILCRDLDRRLKGLAKRFNLNFTRYADDITFSSSHNVYNKNEFQSELTRIIEEDQLLKINPSKTRLQKTGFRQEATGLVVNEKINVPKNYTKQLRMWLYYWEKYGTKKAEQIFTQDYLKDKGHVKPDHPEMENVLAGKLEFLKMVKGTDDPTYKKLQGRFLKLSMGSPLVDRVLKVWDEEGLNKAMELYYEKKESSEALTTTILTL

SEQ ID NO: 231 - protein, 669 aa, unidentified
  source 1..669: note = Related to DMXI01000354.1; note = Microscillaceae bacterium
MKIKQTEINLLRAQFAAIQSKEDLVKILTKAKKLLYGEKATKIHLKSLTYYANPAICKSRYTPFHVKKKSGDNRVIHAPVRGLRIVLSSLNFLLQCLHEPHKTATGFVPGKSIVDNARIHTNSNYVYNIDLKDFFHSFNRNKVKMAFMYQPFGLKKSQEPLAFLLASLCTHPIEIDGKTQMILPQGSPTSPTLSNILCIKLDRRLNGLAKRFGAKYTRYADDITFSSSDNIYTQADFQAELQRIIVDDQKLTINAQKTRLQTKYERQQVTGLVVNDKNVNVHRAYVKQIRMWLYYWETYGKIKAERLFQQDYQKSAVNAQKKAPPLQRILEGKLNFLKMVKGKKNNTYRRLKQRFDELASVAGNNDTKPKKPKRKSSKPLPRPQETKGFLSLFNNSKGLKYLTHKFNDITPPDYTEFMALCKEEFDQGQKKYPNVPTALLERIQQYTFASAPEWFTRKGEEKNYHHMGWSEPKFVEWYQKSSLHPASNAKWNQEMILPFKHTIEVRAGYLPAIIDEAITLALGDSRSSFDIQISNDTIKVAEFYTDVDRFQLALYHIFSTIKTHGEANFCYGLTIDFIKEKSGSTHIKKLIITHVDSEATKPANDEGFIKGDLNTIKTLLWGLCNYNIEAKFPDGFQSKTILADKQNLGKSSEEEEKHIKGFTHILKFY

SEQ ID NO: 232 - protein, 426 aa, Empedobacter brevis
  source 1..426: note = Related to NZ_KB908302.1
MKNKITALQISEIKADFLKIESLDDLCNVLNLINELTQFKNKIEINQLVKLSNPSLAKNRYKEFTIKKKSGTNRTINAPIRELNTILKSLNNLFNLIYNPHTNAFGFVTGKSIVDNAKIHTNKKYVYNIDLKDFFHSFDRNRVKMGIWYQLFGGDKSKEKISFILACLTTHPLMIDGVSGIVLPQGSPTSPFLTNLLCYKLDRQLKGLAKRFRLMYSRYADDITFSSNYDVYSNPTFTLELNRIITTQNLVINPTKTRLQGNGYRKEVTGVIVNEQINVSQNYIKQLRMWIYYIEKYGIEKATEIFKKDYAKEKGHIKSMQASMQNVIEGKLLYLEMVRGKDDKKFLTLKRRFYKSIGKVSKIDKVLIAWDEKGISKAMDIYYNYNRISLAAFLDNDATNVILDELRFEAKDSNNNRKKSNIIFTL

SEQ ID NO: 233 - protein, 425 aa, Empedobacter stercoris
  source 1..425: note = Related to CP053698.1
MKNSLTVAQITEIKENFLKIESLNDLCIVLNQTNELTQIKHTIEVEQLAKLSNPALAKNRYREFTIKKKSGADRKINAPISELNLILKSLNQLFNFIYTPHTNAFGFVSGKSIVDNAKMHTNKKYVYNIDLKDFFHSFDRNRVKMGIWYQLFEGDKSKEKISFILACLTTHPLMIEGETKIVLPQGSPTSPSLTNLLCYKLDRQLKGLAKRFKLTYSRYADDITFSSNYDVYSNPIFTLELNRIITAQNLMINPAKTRLQGNGYRKEVTGITVNEYANVSQKYVKQLRMWIFFIEKYGIEKATEIFKKDYSKEKGHVKSMNASMLNVIEGKLLYLGMVRGKDDEKFLTLKNRFYKSIGKVSKIDKVLNAWEEAGISKAMDIYFNNKRISLADFLDNDAINSILDIMGFDADDSNNKKNSNIIFTL

SEQ ID NO: 234 - protein, 407 aa, Kaistella daneshvariae
  source 1..407: note = Related to NZ_RJUG01000002.1
MRTRLTEEQKEVIKDQTALLQSKSDFVALLNDVAVMIYGDDGKKAFHLKHLTYYGNPKISSKRYATFEIKKKSGKTRIIHSPSSGLKSILKCFRYVLESVYEPHPAAMGFAPGRSVVDNAQKHVQMLYVYNIDLQDFFHNFDRNRVKMGLWRNLFNVEKNKEELSFFLAALCTHPIEINGEVKIVLPQGSPVSPVLTNMLCVSLDRRLQGLAKRYRIRYSRYADDITFSSNRNVFVETEFQLELHRIIEEDQKLKINPDKTRLQKRGYRQEVTGVIVNEKLNVHRKYVKQVRMWLYYMEKYGPEKAEQLFRADYIREKSHVKNITNPMLSVLIGKLQYLKMVKGQHDPTYLSLLNRFTKLLDKSNFPLRQKSTDLADKSAMLKNKNIIDLIIELGVEKALQNYVINE

SEQ ID NO: 235 - protein, 423 aa, unidentified
  source 1..423: note = Related to JAAFAH010000017.1; note = unidentified bacterium
MEQQVKQLKEGFLQMQTKQELADVLNLAKKVLYPNDDQKIELKNITYHGNSKFSKNRYKTFVVKKKSGGERIIQAPKKEFKSILKPLNLVFQTVFEPHKNAFGFVPQKSIVDNANRHVSKNFVYNLDLKDFFHSFDRNAVKMGIWFYGFKMDKTKESLAYLLACLCTHETEIGGKSEFVLPQGNPCSPTLTNLLCTKLDRRLNGLARRFGAEYSRYADDITFSANKNAFKNEDFQKELKRIIEDDQQLEIQPKKTRLQGRNYRQDATGLTVNEKVNVQPRYTKQIRHYLYLWKKYGYNKAATIFTAGYSDNRGHVKSPNAKLENVLSGKLEYLKMVKGEDDSTYQTLKKRFDILANRDVEIEKIVAIWEKEGIEAAAKANEKRKQSKTANKLNNKKFSTFTDINELFDFSDDLAAEKVETYGK

SEQ ID NO: 236 - protein, 395 aa, Myroides odoratus
  source 1..395: note = Related to CP068107.1
MSLDQEQIEELKQEFLAIKSKEDLLIILNKTSALLAKDNPDFNPSPIELKTLTYYANPKLCKQRYSSFKIKKKAGDDRTIYAPCPGLKRILRTLNYLLQITFESHDFAMGFVQGKSIVDNAILHVNKNFVYNVDLEDFFYSFDFYKVKFAFEGAPFNFNKEKEPLAFFLACLCTHPLELEKGTKVTLPQGAPTSPFITNILCYRMDRKLRGLAKRFDLVYSRYADDITFSGRFNFSLSKDFTNELERIITKEKLKLKPSKTRMQSSFYRQSVTGIVVNEKVNNYKSYIKDLRMWIFYLERHGLEKTQTIYRQRVQDDKNKGRDILNVISGKLLYMKMVKGQTNPAYIKLVDRMEAFLIGSGTKKEDSKPKPDKFERVVNSLLKDGDIEKAMKLFR

SEQ ID NO: 237 - protein, 398 aa, Myroides profundi
  source 1..398: note = Related to CP010817.1
MKLEQEQVIELRRLFLKANTKEDLLKVINKSIKYQNNGTKEFKYISLKTLTYYANANVCKDRYTSFEILKKSGSKRTIHSPHLILNKILKALNLILQCSFEPHQAAMGFVKNRSIVDNAKYHLNHSYVYNIDLKDYFYCFDLKRVKFGFFNVPFDFSKNQESLAFFIACLCTHPLDINGELKTVLPQGAATSPTLTNILSYRLDRKLTGLAKRFNLLYSRYADDITFSGDFDFSKNKDFIAELDRIITKEGFEINKDKTRMQSKAFRQQITGLVVNEKVNVHKGFIKQLRMWIHYIEKYGLEKAQSIFDKSEIKPLNAKYDLANVLKGKIEFLKHVKGQEDPTYIKLNQRLRACLIKAGRIEENLTEKKSSEDIKFEKAISLLIKQGDIESAMNLFFK

SEQ ID NO: 238 - protein, 411 aa, Bergeyella zoohelcum
  source 1..411: note = Related to UYIV01000001.1
MKKLTKEQKLYIKNSFENLQSLDDLVSIINYTLTEVFSFVGITKKNILFNTNPSNQRYRSFTIKKKTGGERVINAPKLLLVRTQKALSVIFTICMEIHPKAMGFTEGKSVVTNAQLHIGKNYVYNIDLKDFFHSFKKWQIKRIFTQTSFQFSEEIANCLTNLCVYALAIDDKKEFVLPQGAPTSPILTNILCRKMDIALDKLAKKYKATYSRYADDITFSSNKAVFNNPNFLQELEAIIHKNKLQINPKKTRLQKKSERQEVTGITVNEKLNTTRKYVKQIRMWLYLIEKYGVEKAETIFRKDYIKEKGHIKYNQNPMFSVIGGKLLYLKMVKSQEDSTYQKLAQRFDKICGFNVDTILDVWEKEGKEKAMEVFEATKSEKWKKSQNIGVSVFEFSDDDELSEMILDKDIL

SEQ ID NO: 239 - protein, 439 aa, Capnocytophaga canis
  source 1..439: note = Related to BOQK01000032.1
MKTLTTEEKQELKNRFENILSIDDLVEVINYVYQELLAGNEISKDDVLSNADLSNKRYHTFSIRKKTGGERIINAPESSLEKIQKALNTILNECVTVHPKAMGFAKGKSVVTNARLHLGKNYVYNIDLKDFFHSFKKWQVKRVFAQSPFQFPEEVANCLTNLCVYDLEIDDKKAFVLPQGAPTSPILTNILCRKMDIALDKLAKKYKATYSRYADDISFSSNVSVFNNSVFLEELEAIISRNKLEINPKKTRLQKKNTRQEVTGITVNEKLNTTRKYVKQIRMWLYLIEKYGAKKAETIFRKDYAKEKGHTKPEKNPMLSVIGGKLLYLKMVKGAEDSTYLKLAQRFDKVCGFDADKILDTWQQKGEKEAQKLFEETKNNKWKNLAAGRPKPKRQKLGKHLMEKSRSMEEQAEYVAQIRKNIAERQAKRKAAMKKIRGE

SEQ ID NO: 240 - protein, 393 aa, Capnocytophaga canis
  source 1..393: note = Related to NZ_CDOI01000090.1
MKTLTTEEKQELKNRFENILSIDDLVEVINYVYQELLAGNEISKDDVLSNADLSNKRYHTFSIRKKTGGERVINRPMGALGMMQKALSVIFTICMKIHPKAMGFTEGKSVVTNAQLHIGKNYVYNIDLKDFFHSFKKWQIKRIFTQTPFQLPEEIANYLASLCVHTIDIDGKKEQVLPQGAPTSPILTNILCKKMDIALDKLAKKYKATYSRYADDITFSSNKSVFNNPIFLQELEAIIHKNKLQINPKKTRLQKKTNRQEVTGITVNEKLNTTRKYVKQIRMWLYLIEKYGAKKAETIFRKDYIKEKGHIKYNQNPMFSVIGGKLLYLKMVKSQEDSTYQKLAQRFDKICGFNVDAILDVWEKEGKEKAMEVFEATKSEKWKKIQNIRSFYF

SEQ ID NO: 241 - protein, 433 aa, Capnocytophaga sp.
  source 1..433: note = Related to NZ_JAGDYP010000005.1
MTTFTNEELKDIAEKGDELIIEKFASLNSYKDILEMFNIAQVILYGEKATLFKLEDLIFYASLNFSEKDRYFTFTIKKKSGGERIINAPCEELKGLLQCFNYILQVLFTPHIKAMGFVRERSVVSNAQLHTNKNYVYNIDLKDFFHSFGRQWVKWVLMQEPFNLSGEREPLAFWLASLCTHSLEIEGSTKIVLPQGAPTSPTLTNILCYPLDKKLNGLAKRFGATYSRYADDITFSSNKSIFKNEVFLKELERIVKSQKLTINEKKTRLQKKEYRQEVTGLIVNEKVNTYRHYVKQLRMWLYYIEKYGMEKAEAFFRRDYIKEKGHIKWKENPMKNVLQGKLLYLKMVKGAEDATYLNLVQRFDRAFGFDVEAILKIWEEKGIAAAEGLYYNSKPNRLIKYKKADFHYILSEEEIAELRTNYPELFMEEGFLQ

SEQ ID NO: 242 - protein, 457 aa, Capnocytophaga sp.
  source 1..457: note = Related to ALNN01000005.1
MKTLTTEQISYIQTTFASLKRKESFLDLLNEVKKFMEGENATPFSLSFFTQYANPKFCEYDRYYIFKIKKKSGGERTIMAPYDTFGELLRYFNVVLQTLFTPHTNAMGFVPGKSIATGAQMHIGKNYVYNIDLKDFFHSFERKRVKWMFTQAPFNLSGEREPLAFFLASLCTHPIEIEGQTRIILPQGAPTSPTLTNILCYGLDKKLSGLAKRFGATYSRYADDITFSSNKSIFKKEAFLSELQRIITSQGLTINEKKTRLQQKEYRQEVTGLIVNEKVNTYRRYVKQLRMWLHYIETYGYKKAEILFKKDYVKDKGHIKEASSMKLVLEGKLLYLKMVKGEQDSTYLKLQDRFNKAFGLDIEKLLQVWETYGIEKAEQVYREMGIENFKICSGATEKEAASFITLLEENGMKNSLLNIRISRNRIGKLLSPSEMIEIFDKEDPKEIMESMKGRIIK

SEQ ID NO: 243 - protein, 409 aa, Ornithobacterium rhinotracheale
  source 1..409: note = Related to NZ_RJJL01000016.1
MEIIQQHKDYIKEKFKLIKSGSDLVQILIFVSKEVLKSKQDLNLDLFKKCLDTEAKDRYQTFKIKKKSGGFRTINAPNIHLKHILSCVNIVIQCVDEPHRAATGFVRGKSVIENAKMHIGKNYVLNIDLKDFFHSFDKEKVKECFMRKPFNFNGEKEILAIFLAELCTHPFEIDCVKKAVLPQGAPSSPTITNVICKSMDWDLTELANRYGATYTRYADDMTFSSNHDLYSDAFYEELFQIINSHELTVNSKKTRLQKKGYKQEVTGLVVNEKVNVPRRYVKQLRMWIYLWEKYGYEKAESLFAKDYRKDKGHVKKDKNTMLSVIKGKLNYLKMVKGETDPTYKKLYLRYFHLTNYLFIDEILGVWETEGLNAAISVYEKHKRKEMNYPEPIDVNKLLELFAKAGIKFE

SEQ ID NO: 244 - protein, 398 aa, Belliella aquatica
  source 1..398: note = Related to BMFD01000020.1
MDKFREEFNPEIHPIQKIKGKSDFVRLINYLRLTNISGNIKPIPLKHFTFYANHLLSPNRFESFEIVKKNGGNRTIHAPKRGLKSILTGLNLFFKQHYKTHPNVTGFAEGKSIVDNAKPHIGKKYVLNIDLKDFFHAFERKHVKWAMMNAPFFIKEEKEPLAFFIASLCTHPIEINGETKFILPQGSPCSPILTNLLCRRLDKQLKNLAQEYQAKYTRYADDITFSSNHHKISEKDFYNKLEYVISNHNHQINTKKVRLQKEGYKQEVTGIIVNEKPNLPKRYIKQLRMWLAYWEKYGYLKADKLFKNDYLKERGHRIEGTPHLLSVMDGKLQFLKMVKGDKDPTYKKLESRFHKLNGDKKLTQAHLELMKINPFKPSLKNQQSLEEVLIKLARKKIL

SEQ ID NO: 245 - protein, 415 aa, unidentified
  source 1..415: note = Related to JAFYGY010000028.1; note = Bacteroidales bacterium
MKDNVDIQAIIRDEFPKMETQEDLLVLMNKVKRYLEKGSKEEFIPLIMQSLNYYKNIKVSGERRYKTFSIKKKSGAFRTINAPCTGLKVFQYCLNYMLQTLYQSNPNACGFVPGRSIADGAKKHVGKNFVLNIDLKDFFDTIELHRVKAIFTLPPFNLKDDKENSNSLPYILANLCCHPKEVTRIDKDGNPYQCVRNVTPQGAPTSPIITNLICRQLDRRLLGLAKRFRVSYSRYADDITFSSNNKDVFEEGSAFRVELKRIIEEDQKFRINEEKTRVQSRAYRQEVTGLVVNNKVNVTKRYVKQIRMWLYLWERYGYNKASEHFQKDYNRYKGQAEHGTRMENVIGGKLNYMKMIVGADNAAYRKLAERFEKLVLDIIGENKTLNTDVKIETSICKEDLNAILNELKELDKLLK

SEQ ID NO: 246 - protein, 412 aa, unidentified
  source 1..412: note = Related to JAFXYI010000020.1; note = Bacteroidales bacterium
MDNNADIKTTILDEFPKMKTQEDLLALLNKVKRVIDSNHQRDFTPINEKSFNYYKNIKASKNKRYKTFSIKKKSGKLRTINAPCAGLKIIQTCLNYILQVFYQPNNYACGFVPGRSIADGAKKHVHKQYVLNIDLKDFFDTIEHHRVKSLFTLPPFNLKDDKENPNSVPYILANLCCHPKDVTRFDKDGNTFVCKRNVTPQGAPTSPIITNLICAQLDRRLAGLAKRFKLSYSRYADDITFSSNYKNIFKEGSAFRLELTRIIESDQKFRINEEKTRIQSNAFRQEVTGLIVNEKVNVTHRYVKQIRMWLYLWEHYGYDKAFKCFSKDYSLSKGSAAHGTNMDNVIAGKLNYMKMIVGAENPTYKNLSKRFKKLINIQENGINVTAILDVWENEGIESALETYKRFKDYNNK

SEQ ID NO: 247 - protein, 419 aa, unidentified
  source 1..419: note = Related to JAFWPN010000020.1; note = Bacteroidaceae bacterium
MNNSAEDIHRLILDEFPRVRTQEDLLALLNKIKQLLVGCADEETCKSLTMSSLNYYKNVKVSLRHRYHLFNIKKKSGKLRQICAPVEGLKILQSCLREIFNAFYEPTPNVCGFVNARSIADGAKRHIGKNYVLNIDLKDFFDSIEYHRVKAMLCCAPFNLRDNRDSTQSLPFVIANLCCTPKEVIRFDKDGKEYRCRRSVLPQGAPTSPILTNLICRQMDRKLYLLAKKYHCAYSRYADDITFSANKNIFKVDSDFYSELRHIIEVECKLKINEEKTRIQSRKYRQEVTGLVVNKKVNVAKRYIKQIRMWLYLWETYGYKKAQNLFIHDYLHDKGHVKPETVHLENVLRGKLDYLKMIVGEENHTYSSLCERYEKLIECENKPNPSVVKQEKTGKKNNLQELTEDCSIVELLEMLIDKI

SEQ ID NO: 248 - protein, 448 aa, unidentified
  source 1..448: note = Related to JAGCWE010000009.1; note = Paludibacteraceae bacterium
MNQQKANIQQIIRKEFPKITTEADLLQLLNRINSELHKEFFAAKDKKVPPIKLATLKYYKNYKVSGAKRYKTFTIKKKSGKDRFINAPAKGLKLIQQCLNEILQTYYQINDNACGFIPDRSIVYGAKLHTDKPYVLNIDLKDFFDTITFPRVKKVLALPPFNLTGSKEPVAYIITSLCCHPKAVAKVDENGEKITEIKQVLPQGAPTSPILTNIVCRNLDRHLAGLAKRFKANYSRYADDITFSAHKNIFQQDSVFMLELKRIIEDEQGLTINPEKTRVQSKRQRQEVTGLVVNKKVNVPQRYVKQLRLWIHYWEKFDIEKAQHFFLQQYITQRGNVKSHKSHIENVIGGKLDYMRMVVGESNPAYKKLRRRLDNLIQIEEHKKSTSAPQQTSSYKQKQCAKTNKEYIADGNGIQSLSSEQLPFTHKDDLEVLLDGLINDLSKENQSL

SEQ ID NO: 249 - protein, 474 aa, unidentified
  source 1..474: note = Related to JAACZX010000460.1; note = Chitinophagaceae bacterium
MILTVEHIKAIRDQFQLLRTKEDLLALLNFIAYPQLYATGYVPDDIDFSKIELPDDATTAEKLGLVFNSSSKKRRKQITAKQLTYFSTSFSDAEKKRKRYYRFHILKKSGKKREIHAPVSKLKQIQSCIYHMLQSVYETQPQAYGFVAGKSIADNASLHTGKAFVLNVDLKDFFPSVHFRRVKAMLEKPPFYLSGEKEPLAYLISNLCTENGVLPQGAPTSPFFTNVICQRLDQKLERLAKKFQTTYSRYADDLTFSANAYVFSKRFMLELEQIVKGERFQINEEKTRVQGSAYRQEVTGLTVNEKVNVNKHYLRSYRTLLHLYKTKGPLVAYEYHYKRMPESVRVIKQQRTVTSATSHIQNVIWGKYLFLKMIKGDSVPMPPFTRNKYAKMVIEKSISLIKPEPENITGDDDTKTETKKYHQPVVQTILLEASVPNEPVEPNTKKETVVEQLLTAWEKEGLEKAIELLKTKTT

SEQ ID NO: 250 - protein, 671 aa, Mucilaginibacter sp.
  source 1..671: note = Related to CP014773.1
MNNPFNDLKPEQVEGINERFHGLNSSKDFYLLLVDLLDILNVKDEEKEIFKAWITQFIRLRFPRRYTYFTIRKASGKDRIIHSPNDILKFIQRLFNLVLNTVFVPHPNSFGFSKSQSIRDNAAVHVNYNYVFNIDLIDFFTTIDAERIKSAFKESPFNLSGEKRELINHLVYLTCIPIKLGQDKENDTSIGTLKVLPQGAPTSPIISNIVCYAMDHQLAELADKFKINYTRYADDITFSSNRNLYQEGSKFRHMLESIVISQGFALNGNKTRLQKKHSRQVVTGLVVNERTNVNRDYIRSLRMYLHYWEKYGYQKAEQLYNKDVDTELFFGEPKSLFDLLKGRIDFLKMVKGADDNVYKNLKKRWLRLTNPDSRTIEFRDEYFNTHKPKDVANFLRLFQDSAGLKYLTHDFDTPGAKFSYEKIMDTANTEFSTGFTKYAITRALYARIKQFAFTERPSWWRWVNGEKSTYNLGWKSTKLKNWINENPGVHPIRFKIFRDELITPFKDSIQIRAPKFKELIENSIKEKFQDYKSEFNISFKYLETAEFYTDVDIIMGGIRHLFDGIIERLSLSNEIIISFKRTEINGRLIKVVEITHVNSSCFKEAKINDLLSGNFIEAKRAFQGLCNWSITASFADGNYKLNMLNDSDPYIEREPIASDEILGFTHSLYFY

SEQ ID NO: 251 - protein, 671 aa, Mucilaginibacter rigui
  source 1..671: note = Related to JACWMW010000002.1
MNSPFSDLKPEIITDIRGRFEALRTKDDLYDLFQSVIRELPAGETKREHFEQEIAWLYKNGYPRDYHFFKIKKTSGKDRQIASPQGPLKTVQRIIAVILSSVFQPHPHSFGFRKGSSVVDNARMHVGFHYVFNIDLADFFTSISLKRVKRSLEGSPFGLDLSREPIAAQLARICCIELIVPGANSRRAFLPQGAPSSPVLSNIVCQKMDERLNGLAKRFHLNFSRYADDITFSANHNVFREGSEFRLELADIVTASGFQINPIKTRLQRQKNRQEVTGLTVNQKVNICRKYVKELRRYLYYWERYGLTKAYELYLKDQHEFLLSGSGVPMAAIIKGKLDFLHMVKGDTGDYLKLLARFHKMDKGGPRKVVKGENATHHQEAEQFQQHQPHNVAIFLRLFQDSAGLKYLTHEFDIGDEVFNLEQTVELAGREFQAAYQKHPITRALYARIKQFAFEKNPKWWRWQDGKMREINLGWSAPSVRTWAQKFPGTHPMLLLPYREEMILPFKESIRIRAPKLKELINANIKAKFREAAADWDVELNDLERADIYTDVDMLLGGIRHLLDGILERGEVSRKLLITYRKTVVSGREMKMIEIIHTASICYKDAAISELLNGNFLEAKNAFYGLCNWSVTAIFNDGAYRLNILKDDVDMPEREAVMVKVLGFTHHLYFY

SEQ ID NO: 252 - protein, 669 aa, Pedobacter planticolens
  source 1..669: note = Related to NZ_WNXD01000002.1
MAEEHRSELKAKFQEVATKKDFFDLLMRAIECLPISNSETHRFKERLKNFHITDSRENYHSFTVRKSSGKDRLINAPVAPLKFFQRLVNVVLSCVFEAHPNAFGFRKNGSIVQNASLHVNQHYVFNIDLKDFFTSIDDVMLISALENAPFGFKGKKSLLGQEIVRLCTMKMDLAMPGQGTQSSKEVRVLPQGAPTSPLLSNVVCLNLDIKLTGLAKRFGITYSRYADDITFSSNRMVFGQSSSFLQELKKIIIEQKFSINESKTRLQHMSQRQEVTGLVVNKKINVEQKFIKAVRMYLYYWEKYGYPNAQGKYYADQGIDYYYPESKSLLDTLDGRLNFLKMVKGEDDSTYVKLAQRFKKLSGSLSTRKHANLNPTSSEVFEEHRPVDVATFLRLFQHGEGLKYLTHDYDLPGREFQYDKIMDLAGREFNGAFRSYSITRSLYARAKHFCFERRPKWWRWENGKKIDINVGWGSPELKEWIADNPGVHPIRMKVFRDQFIRPFKESIQFRAPMLHQAVVQTLEEKFGEEFQNFEIELINLESAEFFTDVDIFLGGVRHILDGILERVDVSKRIRIEFKRQIFGNHNMKILEITHIRSKCHRDANIVDLMNGNFREVARAFKGLCNWSITSSFSDGNYTLKVLDDNPGSPSKMSVDEDAVYGFTHTLSFY

SEQ ID NO: 253 - protein, 688 aa, Pedobacter metabolipauper
  source 1..688: note = Related to SNYC01000005.1
MTYYIEFASPHPFTNLKDPLKQITQEQRQEVASKFHACASQQEFYQILVHLVSLLDINDLGQTYCCQILSQFEIGEDSPTYSNFSIKKRSGRYRHISAPSEELMLIHRLINFLLSCVFQGHQCSHGFKKGSSVVSNAVVHVGKKYVFNIDLKDFFPSIDSEMVKEALMRPPFNLSGERKSIAEHLSGLCTMRAPLKKGIRNSSRKFILPQGAPTSPLLSNAVCQNLDNLLESLAKANQLVYTRYADDITFSGNNNVFEEGSAFLIELVRIISEQGFQINESKTRLLGKSARQEVTGIVVNEKTNVKREYLKPLRMYIYYWEKYGYHEAEIKFFNDRSLISDKEMESTLHSTLDGRLNYMKMVTGENHPTYLKLSKRFKKLANKRFAEKKQKSSSTHKGDFSEHRPKDLARFLRFFQDSDGLKYLTHDFDMVDAVFDYDRIMMYAVRDFFRGVKENYITKQLYARVYQFAFEEEPNWWKYEDGKRIEINIGWSSKQIKEWVRLNPGTHPIRSKLIRDNLIRPFKESIQFRPPALRNRIESTVREKFGEDYDELQIDYSNLEAAEFYTDVELVLSGVRHLLDGILERIGISKTIHIAFSKQEVNGSLMKVLEITHVGSRCYKNALPKELLNGNFSDALKLFHGLCNWAVRASFADGDFEVDMLSDKEKLSQKRPVNKELISGFTHLLRFY

SEQ ID NO: 254 - protein, 426 aa, unidentified
  source 1..426: note = Related to JAFDXN010000025.1; note = Bacteroidetes bacterium
MAKKIENTDLIIQRFAAMQSITDLLELLNLVKKELYGEKANPFSLRQLNYYSLSKLQAQHYRQWSIPKKNGGERTIHAPVNGLKHVQACLNAILQVLFEPHYAAMGFLPGKSIVDNAKKHASKGFVYNLDLKDFFPSIPRERVWACLLLPPFNLGSSTERRQLANRISFLCTASIEITDAERGKILNTFLPQGAPTSPTITNIIARKLDRRLQGVANKYHLTYSRYADDITFSGNSNVFKKSGEVVLEIRRIIEDQKFQVNDKKVRLQQQGYRQEVTGLIVNEKVNVPRRYYRQLRNWLYLWETYGKEKASKLFLKDYRADKGYKRDGLPDMDCVIGGKLDYLKMVKGQDDPLFAKLNARYLRLSNIESQQGESRSYIKTSQESSKKEKKKNVEEGKEPRKLIETVLEMINRDSFEKAMEYFLSKK

SEQ ID NO: 255 - protein, 423 aa, unidentified
  source 1..423: note = Related to JACJYQ010000002.1; note = Lewinellaceae bacterium
MKADPEKIPEIRASFARMETKDDLVKALNLAKEILYGKGVNEFSLKNITYYADTRFQRKRYSEFQIPKKQGGTRTIHAPVPGLKAILRCLNLLLLSVYEDGYENEAMGFIPGKSIKNNAEWHTGKSFVFNIDLKDFFPSIDLYRVKTIFQLPPFNLKGEKEPLAYLMARLCCEKMEVVRKDNLGAEIKKVATVLPQGAPTSPAITNFIARKMDRRLKGVAKRFGVAYTRYADDITFSSNHNVYKKGGDFLLEVEKIISEQGFCINESKVRLQQREYRQEVTGLIVNEHPNVPRKFVKQMRQWIYLWEHYGYEKANLFFRRDYSQKAGRVLAFIPPLDLVLDGKLKYMKMVVGPEHTTWMKLNSRYSLLTQDRVISDPDLLDINKALESLFVEMRKNIDEFIAEVNYHQETNQAINIDDNEATD

SEQ ID NO: 256 - protein, 404 aa, unidentified
  source 1..404: note = Related to JAGOPY010000019.1; note = Bacteroidales bacterium
MKADQKQIQEIRDRFAKMQNKTDLLDLLNFAKGILFLQKSNSKSLRLSTLNWYADPRLSAGKRYIEFSIPKKNGGQRKIHSPARSLKTIQRCLNLILQCIYDPHPAAMGFRPGFSVVDNATKHTGKNFVYNLDLKEFFPSIELHRVKACFKNPPFNLTGDREPLAFFLANLCCHEQEVEREGKPLVLSVLPQGAPTSPTITNIVANKLDRKLSGLANRFGACYSRYADDITFSSIHYIYGRNGDFINELKKIIANQKFKINSLKTRLQTKSKRQEVTGLIVNEHVNVNNIYLKNIRQTLHIWKKFGIDNAWKYYTENEDTRTTNKENSSLLVQIMNGKLQYALTVRGKEDFLINKYFTILKDLMADKRSIPDQNLELILQVLLTEGLDEAMEKYTNNISQGNGK

SEQ ID NO: 257 - protein, 401 aa, unidentified
  source 1..401: note = Related to JAFGOZ010000659.1; note = Bacteroidales bacterium
MKLTKENIEEIGKDFFEMKSREDLLNLLNKTKFYLFGDKSKPIQLKILTYYANPNIAGKRYVEFTIPKKSGSIRRINAPVKSLKYIQMCLNVILNIVFKPSPFAMGFVPGRSIVTNAMIHQNCRYVYNIDLSDFFHSIELHRVKAVLKLKPFNLCSEREPLAFLIANLCCTELDVNRLENGNQIAVVRSVLPQGAPTSPVLTNIVAQRLDRRLYGLAKRFNINYSRYADDITFSASMNIFKQKGEFNHELTRIIANEGFSINKDKIRLQDRCFRQEVTGLIVNEKVNIRRRYIKNIRLWLYYWERYGYEKAAQYYEQYYRKDKMYIKIVPSLEKSILGKLTFIKMVKGDKDPVFRGLWTRFETLVKRFKESKSAMLDYNIILEILFNQGITAAMEAYSKVK

SEQ ID NO: 258 - protein, 741 aa, Bacteroides sp.
  source 1..741: note = Related to JAFTKP010000042.1
MTTYEEQHIRKQVALSFSEMESTNDLVRLINKVWSFFSGENYQPIPAKVIYHFSNHQHSQDAYRSFEIPKKNGKMRTIQSPCHALKRIQFCLNFILSSVYDDPHPAAKGFVRGRSILDAARPHVKMPYIYHVDLKDFFPSISFFRIKACLEIPPFNLSGSKKNIAFCIANLCCLYDGEQSRLPQGAPTSPILSNIVCQRLDKKLTGLAKRFNARYTRYADDLTFSSYINLAGEKDFQEELARIIDGQQFCVQEDKTHQENRQYRQRVLGLTVNEKLNISKEYVKSIKMYLYLWESYGYGRACRLFEADWDKSAKNTRSIPSLRNYLSGKLEYMRLVKGSDDPTFQSLYQRFTDVCMENDIPDWKQFKKEMELFCQKAYNPTYDAKELLRWYQERLVDIDVRLLKESNLYFSITKAFTYLSKKLYANQPLMTKVAVHDARRLPFFLYTHFSKQEPLKFLTHTWDQYAESTSFTDYEDFIQKTNEAFKRITPEFKELDRQLYACFYAFLNNDGNGRGWGQYHLKTSWKSDWIKAWCNKHTDSSPWDCPIPEAYKQINDNLRVNYFSDIIELFKEEFQIRTENQQLKRMVRRLVNKHLNPGFNVRINVPPTKLYTNVSLLSHALDTLLYNLSQRKEFTDIEITTIDQSDYIDLSVCQIGSIYYADREQLLQETESGDFEEIRKKLTNRCDWMVQTTCKDGGNYQIAYLNSLAPNGSTKELDKVKGFTHILRFYKPQAYEKNTDY

SEQ ID NO: 259 - protein, 691 aa, Bacteroides koreensis
  source 1..691: note = Related to NZ_VJZV01000025.1
MTYFSNYKLAKDAYYKFLIPKKNGKTREIQAPVKDLKRLQICLNFILSSLYHPHPAAKGFILGQNISDAAKPHVRMPYVFHLDLKDFFTSISLYRVKACLSLPPFNLNGDKERIAYCIANICCTNDGSRTFLPQGAPTSPILSNIVSLRLDRKLTGLAKRFSARYTRYADDITFSSYQDIASDTEFQQELARIISGQNFQIQPSKTRAEGRGYRQTVCGLTINEKVNVSKSYVKEIRLYLYLWERYGYERAQMYLDSDIKKTKENHSDIPQLSHYLNGKIQYMRMIKGNSDDTYKTLRNKFIYLYIPQWKEWEKNILDFCDAVQNSKLSIEELNKWYKTISTNINIHLLKDTPLYTSLTKALSCLTLKASDIPTQTVFKEPIHNATLLPSFLYENFSKNDPLKFITHIWDGNADNCKFEGYEDFIRKEQMAFKEITGRFKTIDKNLFYCFYGFLHNPLNNRGWGQYKIKSGWSSSWLKAWCSEHPERSPFDCPIPENKREIANNVKLNYFSDIVELFKSEFQLRPETRQLKKLLRELVRQYLNFDFHVTFELTDVKLYTNVYMIRNILSDILHDMAQRKQFPDILVRVEDLGSDYVDIILCQKDSDYYATHLQLIQETESGDFCELKRKMANLCDWYVETQCKDGAFRINYLDSIQPDRTIAEPLLSDGVKGFTHRIRIYKHYAYENPNYR

SEQ ID NO: 260 - protein, 394 aa, Spirosoma sp.
  source 1..394: note = Related to JACMPG010000245.1
MLVDQPQIDHLRQQFASLQSKADLLALLNEAKAMLFEKGDQYPLQLTSLTWYANTSLGVKRYTAFEIPKKRGGHRLIFAPKDPLKVIQRCLNLVLQCVFSPHKAATGFVPGKSITDNARPHVGKHYVYNLDLKDFFTSVDLHRVKACLKLPPFNLTGDREPLAFLIANLCCIRQVGEPSRAFLPQGAPTSPLLTNVVCQQLDRRLTGLAKRFGATYTRYADDMTFSSFVNIYQPDSAFCVELNRIITDQRFVINPAKTRLQRPGYRQEVTGLVVNERVNVPRRFWREIRALLHNWETLDYDEANTRFQKLYALNKARPSQKAPALANVLSGKLLFMKMVRGANDELYQHYARQLDALTNQTTDEISVDVERILDIWEKQGLEKAMTAFEQYKDL

SEQ ID NO: 261 - protein, 394 aa, Spirosoma sp.
  source 1..394: note = Related to NZ_JACXAA010000017.1
MSLDQQQIDSIRQQFASMQNKEELLVLLNLAKSLLFEKGTEKSIKLHSLTWYSNTSLNAVRYQSFTIRKKSGGERTIHAPVGPLKTIQQCLNFVLQCVFVPHPAATGFVIAKSIADNARPHVGHPYVYNLDLKDFFPSVNFQRVKACLKLPPFNLNETREPLAFLIANLCCVRNPIDPKQAFLPQGAPTSPVLTNIVCQQLDRRLTGLAKRFGASYTRYADDMTFSSFTNVYQPGSEFCQELNRIISGQRFVINPSKTRLQRTGYRQEVTGLVVNNKVNVNRRYLRTLRAMLHNWETLGYDEADRRFKQAYALDRAYTGKKAPALLNVLMGKLEFTKMVRGQEDVLYSHYKQVFETLLAETTDQKPVELEQILDIWEEQGIEKAMILFERYKAL

SEQ ID NO: 262 - protein, 395 aa, Arcicella aurantiaca
  source 1..395: note = Related to NZ_QGGO01000004.1
MQLTEEQKETIKICFSTMESIDDLVVLLNFVNPLLYPENYEGKINAIQKKSVTFYANPKLSGDKRYAEFSIRKKSGGDRKIAAPHKSLKLIQSALNFIFSVIYEPKEYVTGFVPEKSIVDNAKVHVGRNYVYNIDLENFFPSIELNRVKAVLKLPPFSLEGTEREKIAYLIACLACKDGRLPQGSPTSPVLSNIVCQKMDRRLRGFAKAFHCRFTRYADDITFSANKDVFNQTFKTELKRIIEDQNFTINEKKVRLQGRGYKQEVTGLIVNEKLNVSKKYVREVRAMLNNWDKLGYEKASEKFKKHYYEDKGHVKKGEASMQNVVWGKLQFLKMVKGEEDAVVLKYEAQYKKLNPQPLQVNLDNPTLSDILAIWENDINGKGIEDAMELYYSKFK

SEQ ID NO: 263 - protein, 381 aa, Runella sp.
  source 1..381: note = Related to DMIU01000281.1
MIRLKFNTLNSIEDIATLINEVYALLFPNAKPLPKTKKPFHISLTSLNYLAYSEHFRQKRYKTFRIPKKKKGEFREISAPTYTLKAVQRCLNAVFFCLFEPYKANELPENQQHLTGKKIFPHKAAKGFLPNRSIVDNAKLHVGKRFVYNIDLEGFFPNTSFARVRQVLKLAPFNLKNERDDLGKLITALCCQDDCLPQGAPTSPTLTNMVCQRLDRKLYKLAKENHANYTRYADDITFSSDKTIFNEHLKEAIEKTINEEGYKINKAKERLQGKGIHQEVTGIVVNKKLNVTRRYIRDLYFWFSHWEKDGYASTKAYFDLKYVNQKGYLRYKGKIPPMENVLWGKIQFLGMVRGKNDELYQKFLEKWKVCSQSKDVPIIEN

SEQ ID NO: 264 - protein, 396 aa, Sphingobacterium multivorum
  source 1..396: note = Related to NZ_CP068224.1
MSNDNLFQENIKSIFYSIDSIEDFCNLLNQIYQHIFPSRDTKLNVVISVKDLNYYAFDRSRNKYKTFAIRKKDGGSRIIKAPNYKLKTILKCLNWLFNTLFIPHNNAYGFVRNKNVANNAVPHVGKLFVYNIDLLNFFPSTSFRRVKSVFELPPFYLNGDKSKLANREKLGFLIANLCCDAGFLPQGAPTSPVLTNIVCRRMDKKLYKFSKQNNCTYTRYADDITFSSYKQVFDESFKKGIKSIIENEENYKINDKKERLQSYGERQIVTGLVVNQKLNVTRDYNKDIRFWLWSWKKWGYEQTQLRFAEEFVYKKSYQKYNGKAPSFVNYLSGKIRYLSMIRGRDDERVKRYIDNFNKMVSDTVKTFTTVDLLQIFRKIDTHGKDSIDYSFKKNIA

SEQ ID NO: 265 - protein, 425 aa, unidentified
  source 1..425: note = Related to JADJRO010000003.1; note = Saprospiraceae bacterium
MRLTPENIEEIKVRFAKTETVEELAQLLSWVYALKFPKRSEKTTIIIEAKHLNYYAFKPVNRYKQFTIKKKSGGERTISAPRYKLKTIQKCIHEILNAVFTPHFTATGFVPRKSIVDNAKVHIGKQFVFNTDLKDFFPSTEFRRIKAVLGLAPFNLTDANEINSNKDKKKTSDEKGKGYLGYLIANLCCDNGCLPQGAPTSPTLTNLICQRLDKKLYKYAKSINATYSRYADDITFSANKPVFDETFKKILIDLIEVQEKFKINFEKERLQGGGERQSVTGIIVNRKSNVDRKYLKDVRFWLMCWKKFGTNATQQKFLVQFPEKKGFLRYNGTTPQFYNYLNGKILFLGMVRGAKDEIFLKQKMNFDELYSEVTGKNNKTEIGTVIQRDSNYESSDLSKGILEILNELDRNGYTNANNKLKTIFK

SEQ ID NO: 266 - protein, 315 aa, unidentified
  source 1..315: note = Related to JADKCE010000010.1; note = Bacteroidetes bacterium
MKLSETIQQEINQKFQTIKSVEDLVILMTFVYGHLYPNIQTKIEINKRKLHFIAFSKKERYKSFTIPKKSGGERKIFAPIYTLKVYQKILNEILQIVFTPHKSSHGFLPGKSIVSNANLHYGKQHVYNIDLKDFFPSTSFRRVKTVLQLSPFNLNQDRESLGFLIANLCCNDNGLPQGAPTSPILTNIVCQRLDRKLLRFAAQYKSSYTRYADDITYSSNQNKFSAEFESKLQEIIHEEGFEINSNKTRLQDFKRRQEVTGLIVNRKVNLNIEFIKQVRFWLYVWEKFGYASFHERLSSDYIKSGNTSKRKGGIH

SEQ ID NO: 267 - protein, 590 aa, Salegentibacter sp.
  source 1..590: note = Related to NZ_JQNQ01000001.1
MSGVFLDKLLIENTKKRFDQMTNLTDFVSLLNYIEQRVFKNKKKPLTVPHLYYLSKTKNTRYEEFEIPKKNGKPRKIKSPENRLKRVQSLINILLQIIFEDHSHYSANGFLFGKDIRRNALPHINKNYLLNIDIKNFFPSIPFRRVKVVLEFAPFNLIDDRERIGFLIANLGTFKNALPQGAPTSPILSNIVTQNLDRNILKYCLNKKIKYTRYADDLSFSSNWNIFDQQVIKEIEAIIIAENFILNPKKTRVRNFMQRQEVTGLIVNTKLNVKREYLQKVRAMINNWEKGGLSFAISQFRKHQPPEKVNYNFKEVLLGHISFLKLIKGDTNSVVQNLQIRYNFLVNLLDYSFIEEDNVRLKLEEDDQKMEKIAFENDQTKKETFISFCTSAFHQIENLLNYYFWKKFPEIDDLKDYMWHNNPLFQDRWKKLKKLDKKERLNRLNNFKTVRDFDINTLVYLFEKEFYFDQHLSYGKKLTHLREIRNDESHRCTVLDTNEQVIINQFEEIKKERKAKKEKGKQFILSPKQKKEEMNYLTLKYIEEKNYKNVRNILREVKNNIKNTLPNIEPLQITGKVEQKEILETSEVFN

SEQ ID NO: 268 - protein, 543 aa, Dokdonia donghaensis
  source 1..543: note = Related to CP015125.1
MKNLTDFVALLNYLEFRIYKTNLKPLNIKYLYYLSKTKDDRYVVFEIPKKNGKTRKIKSPDKLIKRAQSLINLLLQIIFENHSHYSTNGFLLGKDIRRNAVPHINKNYLLNIDIKNYFPSINFRRVKVVLELAPFNLRNERETIGFLIANLCTHGNSLPQGAPTSPILSNIVTQNLDRKLSKFSNENRIKYTRYADDLSFSSNWNIFKPTFIKEIEKIVNSENFSLNSKKTRVRSFMQRQEVTGLIVNTKLNVKREYLQKVRAMLNNWEKGGLYFATSRFKAHQTKSKKNLDFKEVLLGHLSFLKLIKGEDNQLIKRLLEKYNNLYNQIEYGYIDIENVEKKLIEDNLKMEKIFLDQELPDKDKFISFCTIAFHQIENLLNYYYYRKFENFEDLLNELIINNPKFKKRYRTTEKANQSFKKISDLNINVLVFIYEKEFFFDKKISYDKHITMLREIRNDDSHRCSVIDFDKEEIIKEYQKIEKERKGKESRGKNFEYSNQQARIKLNYDTLKFLDRKNYKSVRYNLKNISSNIRNTLHKKELS

SEQ ID NO: 269 - protein, 566 aa, Lutibacter sp.
  source 1..566: note = Related to JAAZUI010000052.1
MSSIFLDKKIKDNIKQKFYKVKDLEEFATLLNFVERQFFKNFKAEKLIDVDYLYYLSKTKSSRYTQFEIPKKNGSVRVINSPDTTLKRIQKLINIILQIIFEDYSHYNSNGFILGKDIRRNAIPHINKNYVLNIDIKNFFPSINFRRIKVVLELSPFKLNNNREKISFLIANLATTDGTLPQGSPISPIISNIVTQKLDRKLSKFCLKSKIKYSRYADDLTFSSNKKVFNSEFIEKIEGILNQENFLINNQKTRIKSSMERQEVTGLVVNKKLNIKREFLQKTRAMLNNWEKGGLNYAKKEFKKHQPESKKNYEFKDVLLGQISFIRLVKGIESPIVNKISLKFNYLNNLIDYTFISNENVKKKLINDNIKMEKLLFDKNESEEDIFIPFCTSAFHQIENLLNYYYWRKFPVFLDLLKTLLENNPNFKRRYRNLKNANNHFKKISDLNINVLVYLYEKEFFFDKNRYYDKRITHLREVRNDDSHRCQIIDIDKDSLKKDYELLQDKIKIQDKKGKQFDYKKEDKKLIRSYETLKFIEKKDFKKVRNSLRIMSYQIKNTLPNNVHKK

SEQ ID NO: 270 - protein, 562 aa, Flavobacterium araucananum
  source 1..562: note = Related to NZ_QGGJ01000001.1
MAGVFLNDLFKSEIKVRFERIRNVREFVSLLNYIESQISTSTEEIFELTFSHLYYLSKSKDSRYTEFAILKKSGKLRQINSPDKLLKRVQSLINILLQIIFESQSHYCSNGFLLGRDIKRNAIPHTNKKFVLNVDIEDFFPSINFRRVKVVLGLSPFNLIDEREKIAFIIANLGTYKNYLPQGSPLSPLLSNIVTQKLDRKISKFCLTHRIKYSRYADDLSFSTNRNILDESFVKSIKNIVEDENFRINDEKTRLRTSRESQEVTGLVVNEKVNIKREYLQKVRAMLNNWEKGGLRSAEETFKKHQPPNKLNYDFRSVLLGHLSFLKLIRGDDDQTVKRLRLKFSFLNNLIDYSFIDNEKVKVRLEKDNKTMEKIFFDIDMSEDKFISFCTSAFHQIENLMNYFYWKKFEHDELLNELLINNARFKKRYKTLEKAQEEIKTIRNLDINVLVYLYEKEFFFDKKVYYNKHITMLREIRNDGSHRCSIFGLDVQKLKDDYVLIENERNDKKKRGKNFELSLDQAKKELNFLTYSFLERQNYKEVRENLRNITKTINGALKLKIK

SEQ ID NO: 271 - protein, 565 aa, Tenacibaculum discolor
  source 1..565: note = Related to NZ_RCCS01000004.1
MPGIFLDDVSREKVIQKFNKISSINEFASLLNFIEKNNTHLLDKKKFTPINSKYLYHLSITKDKRYKEFSISKKSGNLRKIETPDELLKRVQKLINFLLQVIFEPYSHYSSNGFLFGKGILRNAKPHVNKNYVLNLDIKDFFPSINFRRVKVVLELNPFNLKDERERISFLIANICTYKNHLPQGVPTSPILSNIVTQRLDRKLTKECLDLNIKYTRYADDLTFSSNQNILNPNFVKKVEQIIQSENFELNNNKTRLQTSMQRQQVTGLIVNEKLNIKREYLQKVRAMLNNWEKGGLDYAEQIFRNHQPIEKKEYPFKNVLLGYISFIKQIKGSDNGISLKLVEKYTLLNNLIDYSFIKNSAVKEKLISDNYKMEQIPLFNNQPENDKFISFCTSAFHQIENLLNYYYWSKFSDFINLLEHLLLHNPSFKKRYKNLDKAKSHFKKISDLNINLIVYLYEKEFFFDKKIYYKQEITKLREIRNDDSHRCSVIGVNKDEINNEYAKLEAKKNDFKKRGKNLIYSNKEKKFILKYETFLFLEDKNYKEVRRILKHITLNIKNTLPKTS

SEQ ID NO: 272 - protein, 421 aa, Algibacter aquaticus
  source 1..421: note = Related to NZ_MDJD01000054.1
MSGIFLDENSREKVIKKFNKINSVNEFVSLLNFIEKNNDNLKDKNAFKPINSKQLYHISKTKDKRYLEFSIPKKNGGKRKIKTPDEILKRVQKLINYLLQLVFEPYAHYSSNGFLFGKGIIRNATPHIGKEYVLNLDIKDFFPSINFRRVKVVLELNPFNLKNEREPISFIIANLCTHKDQLPQGAPTSPILSNIVTQKLDRKLTKISLSKNIKYTRYADDVTFSKKNILKHIFINKVSKIIQEENFIVNEDKTRLQKSTERQQVTGLIVNKKLNVKREYLQKVRAMLNNWEKGGLEYAINVFKKHQPTEKVDYPFKEVLLGHISFIRQIKGIDNNVSIKLTEKFSLLNNLIDYNFIKNDIVKKRLIDDNHKMERFLLVENLTDNDKFISFCTSAFHQIENLVNYYYWSKFDNIELLLNYL

SEQ ID NO: 273 - protein, 561 aa, unidentified
  source 1..561: note = Related to JAEINU010000004.1; note = Bacteroidales bacterium
MTHEEITIEFEKLKTTSQLATLLNKVEKNRALQTEKLQKLKAKDLNFLAISKDSRYREFKIFKKSGKERIIDAPDNYLKRVQTLINDLLQIIFEPKVHNATNGFLLNRDIVRNARVHVNKRYLLNLDIEDFFPTISFRRVKSVLELAPFNLNTEKENLAFIIANICSLKGKLPQGAPTSPILSNIVTQQLDRRITKYCLKKNVKYSRYADDLSFSSNLDVFDKAFIKGLTIIVKKEGFKINKEKTRMNSNMERQQVTGIIVNEKLNVKRDYIQKVRAMLNNWEKGGLDYAKAQFIKHYGKSKYKPDFRKALKGHINFIGLVRGKEDPLFSRLLLKYNYLNYQIDCNYISNKVVQEVLERDNKEMESIPLRSVRINEDNFIAFCTSAFHQIENLLNYFYWRKFPEIEDLLQYIMDYNEAFHWKSIEKCKKRFPKISKIQIWAKVYIFEKEFYFDKKIPYNKDITILREIRNDDSHRCAVISYNRDGIKMDYKELKIKCMQYKEEHKKNMEKSSGENILEQKYKVIKFLEERNYNSVRRILKGVSDNIKNYPFVKPVELEESN

SEQ ID NO: 274 - protein, 845 aa, unidentified
  source 1..845: note = Related to REAZ01000005.1; note = Cytophagales bacterium
MKIEFKKVILIKQYFDTTENIDGLADLLNFVGNTLYEKTFSKKQLSKKLLTFFAFKKEDKYQRFTIKKKSGENRFILAPHRYLKLIQKCLNVVLNVVFEPHWASHGFVLDKNIVTNARKHIGKNYVLNVDLEDFFPSISFRRVKTVLQLPPFNLNDELAFLIANLCCYENSLPQGAPTSPTLSNIVCQKLDRKLARFAKENRVSYSRYADDITFSARTDLFDEDFLNRLKEIILSENFKVNENKTRIQSFAQRQIVTGLTVNQKVNVSQQYIKEIRAILNNWEKKGFEQAQYVFIKNYIKDNPNIKNPSMIEVLRGKLNFLGMVRKKDNLYQKYFNQFNKLLDSYNQKEEGDIIYIKNVLSKYKTETNTSKTNRDVRKSCKHNPIRVTEFLRVFSEDRNFGLNMLVHEAEDIDLEEKLKEINLEFAKYGKQFEEEKYQIPIWLYTHIKKDLIDLYNGKGLSIYRELGKHPFQNDREFTKTIFDFKKTYRFGQDKGEETSLRDTIIRCLSKVRYGDRDILSKFQIAVFEPINQLDFDLIAAIKTDVIRVELAIRIILSSYLKHSNGSGRLKFELQEIQNQIILNIIDLDSICTKNYENLQGGDFNEIIQKLWSLCDVNVISKFKDGKTRIVPILPENKDSKLYDKEVEGFTFQLVFYNLPRVLLLDNKGRVKEVNNEYKPYIAIESDISENDLLRYNALIIHKSIPNYVNLFKRAIKENIPVVSSGGGSGGEEGIVENVGNISIAFDLMQKNLPLFLKKIKEDYVVDINIFLFANKINYKKAVKIKEEIINIIENHNLLFPELSLEVINKIKVLAKSNDIPSFENKKSLSKFLQEKLKLIEYETAN

SEQ ID NO: 275 - protein, 551 aa, Pelagihabitans pacificus
  source 1..551: note = Related to NZ_VIKU02000001.1
MEPIDIKSENILKQFNSISGIHDFVEVLNEIYKLYFPEGEKKLFRVGSINYYAFHAQKRYYTFDIPKKNGSTRRINAPVYQLKLLQQCINQLLHLIFKPHHTAHGFLLGRNVVTNAGIHAGKQEVLNVDLQDFFSSIKFRRVKAVLELPPFNLTGKKEKVAFLISNLCCNNGVLPQGAPTSPLLTNIVCQRLDRKLFQLAKTSKARYSRYADDITFSSNNAIFNDEFIKELNYQIENEGFLLNEAKTRIQDRRQRQEVTGLVVNKKVNINRDFIRKIRAIFHNYQKGGQKFAQKQFAKHWSKPITPPDFRSSLKGQIEYLGMVRGKSDSIYLKYKQTYLRLFSSNFIDYSFISHKGVRAQLELDYKRMEAARIRLTMSDEERFTEYCLTAAFQLEELVNYYLAQKMDFDKLVNELVTHTWATTSGLNGKNNVSEIPAVYKYFLFEKYFYYKPGVFYDSVITKLRNIRNQKLHRATVVQRSEEQILMEYKALMAKASNHKINSDGRVYQMSKSEARLNNEAKAVYFFREKNYKAVFEAVKDVSDKIRMDLAN

SEQ ID NO: 276 - protein, 377 aa, Hymenobacter gelipurpurascens
  source 1..377: note = Related to NZ_FYEW01000004.1
MSIPPSSSNTNGNEQPASVPATKVDLTASFQKVTDVHQLARVLNVALTLELAENPEHKDKPISAKLLNYYAYHKKETRYRTFRIPKRTRGEVRIIKAPDRGLLRLQRLLLSCLTATFTTSHPASHGFVLGRSVLTNAQPHAGHRFVLNLDLRDFFPSTSIGRVVAVLQLPPFSLSKEGAYLIANLCCDQGCLPQGAPTSPLLTNAVCQRLDRRLQQLATHHRCTYTRYADDLTFSCNRPVFRDRFHQELNTIITAEGYQQNEQKQRLQTPEIRQEVTGIVVNERPNVPREYVRQIRAMLHNWETRGYEAATSTLQQHYATSKAHARHRGNVPKLERVLAGKIAYWGMVRGWEDVNYISSLLKLRKLTDKQKRHERYT

SEQ ID NO: 277 - protein, 372 aa, Hymenobacter sp.
  source 1..372: note = Related to NZ_JNLX01000031.1
MFVHVPSSTNNGAVQPASGPVTEAVLATNFRLITDVHQLAQVLNSALLLDLAENPTHQDKPISAKLLNYYAYHKKETRYRTFQIPKRTRGEVRTIKAPDRGLLRLQRLLLSCLTAAFTGNHPASHGFVPGRSILTNAQPHAGHRFVLNLDLRDFFPSTSIGRVIAVLQLPPFGLVKEVAYLIANLCCDQGCLPQGAPTSPLLTNVVCQRLDRRLQQLAIRHRCTYTRYADDLTFSSNRPVFRDRFHQELNTIIAEEGYQQNQQKQRLQTPEFRQEVTGVVINERPNVPREYVRQIRAMLHNWETKGYETAAATLREKYTISKAKARHKGQVPKIERVLAGKIAYLGMIRGKNDALFLELSMKLMQVMKKQKL

SEQ ID NO: 278 - protein, 333 aa, Hymenobacter monticola
  source 1..333: note = Related to NZ_CP094534.1
MAFALNAALQQDLDENPQHKPKLITPKLLNYYAYHKKETRYRTFQIAKRTRGEFRTIKAPDHGLLRLQRLLLRCLTAAFTTSHPASHGFVPGRSVLTNALPHVGHRFVLNLDLRNFFPSTSVGRVMAVLQLPPFSLAKESAYLVANLCCDQGSLPQGAPTSPLLTNAVCQRLDRRLQQLATRHRCTYTRYADDLTFSCNRPVFRAAFHQELNATLAAEGYQQNEQKQRLQTPETRQEVTGIVVNDRPNVPREYVRQIRAMLHNWETKGYEAASATLRQHYPTSKAHARHNGKVPKLERVLAGKIAYLGMVRGQNDSAFLNLIKSFLRIKDAGQ

SEQ ID NO: 279 - protein, 458 aa, Hymenobacter sp.
  source 1..458: note = Related to NZ_JAHLZY020000001.1
MSEQDPPEQPTDEPGPGQEEFEGAFEESQREHSEEEAELLAEIKAELQAELYADLEADLRSEMQNELASESLFGTYSANKSLSDDVIEEIKRWGAFMAVLTAATTLNDLAEPFRRATNAKYLAAVLNAVLRLNLLENPSRKAKPVSFKLLNYYAFHKGERRYRTFLISKRTPGEQREIKAPDYGLMRLQRLLLGCLTAAFSTCDDAAHGFVSGRSVLTNALPHAGRRYVLNLDLENFFPNTPVQRVVKVLQLQPFGLVKPVAHLIASLCCDQGSLPQGAPTSPLLTNAVCQRLDRRLRQLAFRHRCTYTRYADDLTFSSNRPAFQELFHKELNAILTLEGYKQNPNKQRLQTPNQRQEVTGVVVNQRPNVTREYARQIRAMLHNWETKGYAVASTTLRQFYPQTKAHARHEGKVPKLEKVLAGKIAYLGMLRGKADVMFLDFKSKLSTLSAAALPHDN

SEQ ID NO: 280 - protein, 426 aa, Hymenobacter sp.
  source 1..426: note = Related to JAFLQZ010000025.1
MAETPDQLPTPPHDNEPAAGGPADHPGNPLAGFVIKNGWLQQVKPGYQPALPAAEELAELAEHFRAVTDAISLARVLNAALELHRKQHPKGSPKTVSPGLLLYYAHHKKERYQTFQVPKRTRGQFRDIKAPEHGLRRIQRLLLLCLTAAFTTCDEAAHGFVPGRSVLTNAQTHAGRRFVLNLDLKDFFPSTRVGRVLKVLQLEPFDLPKEAAHLIANLCCDQGSLPQGAPTSPLLTNVVCVWLDRKLRALAKRHRCHYTRYADDITFSSQRPAFTAAFQAELNAVLVDEGYEQNPAKQRLQTPETRQEVTGVVVNERPNVPREFVQDIRFLLHVWQKHGYAAASKAMGQNYGGSKAHARYRGNIPKLEKVLAGKIAYLGMVRGKKGIVYASLYEQLQDLNGVTALHILEELTIIGLQVEFDKNQNL

SEQ ID NO: 281 - protein, 411 aa, Hymenobacter sp.
  source 1..411: note = Related to JAIZZH010000003.1
MAETPDQLPPTPNENEPAAGAPADQPGEPLAGFIVTDDKLQPALPAATELAELAEHFRAVTDATSLALVLNSALELHRKRHPKGRTKTVAPGLLLYYAHHKKERYRTFQVPKRTRGQFRDIKAPEHGLLRIQRLLLLCLTATFTTCDEAAHGFVPGRNVLTNAQPHAGRRFVLNLDLKDFFSSTRVGRVLKVLQLAPFNLPKEAAHLIANLCCDQGSLPQGAPTSPLLTNVVCVWLDRKLRALAKKHRCRYTRYADDITFSSQRPAFTPAFHAELNAVLADEGYEQNPAKQRLQTPETRQEVTGVVVNERPNVPREFVQDIRFLLHVWQKHGYVEASKAMTRKYGSSKAHARYKGSTPKLEKVLAGKIAYLGMVRGKEDVAFEQFAHSLVTLSSPEYREIEMLISILSRIG

SEQ ID NO: 282 - protein, 432 aa, Hymenobacter sp.
  source 1..432: note = Related to MVBC01000032.1
MPQPPDDLFPPSPDAAAGREEDAAGIPNQGSSMPDEPASIPQPDRIRDAADLLAMLDALDDIQPDPLTDNLAAQPFPLPVPTKLADLAEPFRAVTSAVSLARVLNAALHLHRLRYPRSQAKPVSAKLLRYYAHHKQARYHTFQIPKRTRGQFRDIKAPDHGLRRVQRLLLLCLTAAFTTCDEAAHGFVPGRSVLTNAQPHTKRRFLLNLDLKNFFPSTSVGRVLAVLQLAPFNLNKEAAHLVANLCCDAGVLPQGAPTSPLLTNAVCQRLDKKLRRLAARHHCRYTRYADDLTFSSQRPAFTPTFHAELNAVLTEEGYEQNPAKQRLQTPATRQEVTGVVVNERPNVPREYVRDIRFLLHVWQKHGYAVATQAMRAKYGSSKAHARYQQKIPKLEKLLAGKITYLGMVRGKEEVVYRTLLRKLEIVKKKQKL

SEQ ID NO: 283 - protein, 445 aa, Hymenobacter elongatus
  source 1..445: note = Related to NZ_SRLD01000019.1
MPEDLPPDAISATPDQPDAGTEEAAGQALEAVQHAELLRVLSPEYQAGFWAMLNAQKGRQPRPAPLLEIIDTAGLAVPFREVMDADTLARVLNAALALDVAENPQHKPKPLIGKVLNYYAFHKKTTRYSTFEIPKRTRGEMRVIKAPDHGLRRIQRLLLLCLTAAFTTCDKAAHGFVPGRSVLTNAQPHAGRRFVLNLDLKDFFTNTHYGRVERVLQLPPFSLLPAVARLVANLCCDQGSLPQGAPTSPLLTNAVCQRLDRRLRQLAKCHRATYTRYADDLTFSSQRPAFREPFYAELKVILDAEGYQENAQKRRLQLPNARQEVTGIVVNDQPNVPREYVRQIRAMLHNWETKGYEAASTTLRAHYRESKAGARHKGTAPKLEQVLAGKIAYLGMVRGSDSVEYTVFSQKLKSLGFDKENLAIMGILKVIKEKGVKEAIASKQV

SEQ ID NO: 284 - protein, 432 aa, Hymenobacter rubripertinctus
  source 1..432: note = Related to NZ_QYCN01000007.1
MPEDLPPDAASATPDQPDAGIGEAAEQAPEVAQHAELLRILSPEYQAGFWAMVNAQKDQQQRPLPLPEIIDTAGLAVPLGEVKDADTLAQVLNAALKLDVVENPLHKPKPLTGKVLNYYAFHKKATRYSTFQIPKRTRGEMRVIKAPDHGLRRIQRLLLLCLTAAFTTCDEAAHGFVPGRSVLTNAQPHAGRRFVLNLDLKDFFTNTHYGRVESVLRIAPFGLQPAVARLVANLCCDQGSLPQGAPTSPLLTNAVCQRLDRRLRQLATRHRATYTRYADDLTFSSQRPAFREQFHSELKEILDAEGYQENALKRRLQLPNTRQEVTGIVVNEQPNVPREYVRQIRAMLHNWETKGYEVASATLRSHYRESKAGARHKGTVPNLERVLAGKIAYLGMVRGIENPEFINFTRVLQELTITQKFRFSLDLVMPKL

SEQ ID NO: 285 - protein, 354 aa, Runella zeae
  source 1..354: note = Related to NZ_AUIF01000011.1
MEFTSDEIQTIKTALQSGKNLADLTDLLNLVSDWIAQKLVLEYKPFSIKQVYHYYYNLESKYKEHRISKKSGGERVIHAPEETLKRIQRRLNVILSHLYKPTEAAHGFVMNRSIVSNAQPHLGKKNVFNLDLQDFFPTIHFGRIKAVLQLPEYGLTSEFAHIVANFCCFQGKLPQGSPVSPILTNIVCRRMDYRISGLAAKHGFTYTRYADDITLSFDELSKEAKQKMGLGLGKILKEEGFKVNSKKTRLLKPNQRQEVTGVVVNEKLNVNREYVRTIRAILHNWQKHGLEVTQAKFLNHYPEEKGFKRNKTIPDLRKVLLGKIQFLRMVRGGSDEAFKEYLIIFDKLAKNNLK

SEQ ID NO: 286 - protein, 354 aa, Spirosoma lacussanchae
  source 1..354: note = Related to NZ_SWJG01000001.1
MEFTPDELQTITNTLRSGRNLADLTTLLNLTGELIAKKLELEHKSFSVRQVYHYYYNLESKYKEHRMPKKSGGERIIHAPEERLKQIQRLLNVVFSHLYQPSEAAHGFVRNRSIVTNARPHVGKQHVFNIDLKDFFPTIHFGRVKAVLQLPDYGLTPELAHIVANFCCLQGRLPQGSPASPIITNLVCKRLDYRISGLAAKHGLTYTRYADDISLSFDQLSHESRKSFSYGLGKILDEEGFMVNGKKTRLLRPNQRQEVTGVVINEKINVNRDYIRNLRAILHNWQKQGEETTQVRFEQLYPKTAVFQRKRKIPKLQNVLYGKIQFLKMVRGGEDKDIQNFLIQINLLSNNVRK

SEQ ID NO: 287 - protein, 348 aa, Adhaeribacter aerolatus
  source 1..348: note = Related to NZ_BJYS01000005.1
MELSQYYIDEIKARVANGTTLEDVTSLINFIINIQNETLGTTYRFISTKRLAYYFVHRDERYLSFEIPKKSGGVRQITAPDPFLKKVQRRLNFILEVLFRPKAAAHGFVTGRSIVTNAKVHVGKNYVYNVDLKDFFPTIHYGRIKAVLQLNSFRMKPDFAHIIAHLCCYKGILPQGAPTSPIITNITCQQLDKNLVDYAKLNSCYYTRYADDITFSADKNVFKDKFHENLKLHLEAAGFKLNDKKTRKQKRTQRQEVTGIIVNEKLNLQRTYIKKIRAMLYNWERDGLPACQREFNKYYPLEKGFVKSRILPPFENVLMGKILFLGMVRGKEDKYFMEFTSKYQSLKS

SEQ ID NO: 288 - protein, 348 aa, Rufibacter sp.
  source 1..348: note = Related to NZ_JAFFJV010000014.1
MELSHKQTEYIKYFVSNGETLEDLKSLINYIIKLQNDTLGTTYKPVSIKQLTFYFANRDKQYFNFEIPKKTGGVRKITAPDLFLKKIQRRINFALDLLFKPKAAAHGFVTGRSIVSNAKVHVGKKYVYNVDLKDFFPTIHFGRIKAVLQLHPFKMKPKFAQLIAHICCFEGILPQGAPTSPIITNIICQQLDKNLVSFAKFYKCYYTRYADDLTFSSDKNSFKEKFYEDLVLHLTNAGFALNEKKTRKQTRTQRQEVTGIIVNEKLNLQRSYIKKIRAMLYNWEKDGLHACQKNFNQYYPLEKGFFKNKSVPPFENVVMGKILFLGMVRGKDDKYFLEFFSKYQNLSK

SEQ ID NO: 289 - protein, 354 aa, unidentified
  source 1..354: note = Related to NYVE01000064.1; note = Flavobacteriaceae bacterium
MDLTNKHIEYIKLLLHKGSTRDDLVSLINFVIELQNEQLQTNYKTISNNQLGYYLAKRDEKYIHFEIPKKSGGVRRISSPSKVLKKIQRRIAFVLEVLFTPRLSTNGFVKQRSIVTNAKGHIGRKYIYNIDIKDFFPSTHYGRVKAVLQIFPFKASEEMAHLIAHLSCYKGILPQGSPLSPILTNIVCQSLDYHLVKLAQDHKCFYSRYADDITFSSNKNIYLNEKFLIKLKKVVNDQGFNINEKKTRLRSNAQRQEVTGVIVNTKPNLKRTYIKKLRAMLYNWENKGLKYCQNKLTIHYPYEKGFIRNKVVPDFENVLQGKIQFLGMIRGKDDHYYKTFNRKFNELKKVKNGY

SEQ ID NO: 290 - protein, 353 aa, unidentified
  source 1..353: note = Related to JADKEM010000006.1; note = Bacteroidetes bacterium
MDFTQTEISEILTQLQQGQKIEDLVELLNHVIKLQNEKDKTTYKPLTNKRVKFYYANINKRYVNFEIPKKTGGKRTITAPDKYLKKVQRRIDLILRLLFVPKPAAHGFLANRSIVSNAKIHVGKKYVLNIDLKDFFPSVHFGRIRAVLQLYPFRLKPEYAHVVANFCCFESKLPQGAPTSPIITNIVCQKLDYKLVQLAKEHHCYFTRYADDITFSCDKARFDDEFLKKLDEIVKAEGFVINEKKTRIQKRAFRQEVTGVTVNEKLNLQPDYIRNVRAMLHNWEKYGYEIANAKFAKFYPKEKGFLRNKIIPPLESVVSGKIMFLGMVRGKEDALYLRYSNQLKTLTDLKNTK

SEQ ID NO: 291 - protein, 330 aa, unidentified
  source 1..330: note = Related to MKTC01000008.1; note = Bacteroidetes bacterium 37-13
MYKKISAKRLKHYYANINKKYINFEIPKKTGGKRTITAPDKFLKAIQRRINLLLTLFFEPKPAAHGFLENRSIVTNAKIHVGKKYVLNIDLKDFFPSIHFGRIKAVLQLPVFGIKANQFKQGDSISFELLAKFGLKPEFAQIIANFCCFESKLPQGAPTSPIVTNIVSQRLDYKLVKLAKEYHCFYTRYADDITFSCDKNRFKEEFMIKLDEIIKSEGFVMNDKKTRTQKKAVRQEVTGITVNEKLNLQRTYVKKVRAALSNWEKYGYEKANAKFASSYPQEKGFLRNKTIPPMEAVLSGKVMFLGMVRGQDDTLYLKYKNKLSELLITK

SEQ ID NO: 292 - protein, 359 aa, unidentified
  source 1..359: note = Related to JADHMR010000076.1; note = Bacteroidia bacterium
MKERKEMIMQLVKNCDNLKDFCELINSSNLLVSKIQSQKPLYTSGKQFGYLLANKEHLYKQFDIPKKSGGRRKINAPLDNLKVVQYMIKNLLQLFYNTPFEWQEKLEEISKNNATVLPCVHGFVNGRGIVSNAYLHLKQDFVLNFDLKDFFPSIGNGKIIETLCLAPFNFSRFTSKIIANLCTLENHLPQGACTSPLLSNIVSQRMDNRFMSLANKYPTMQFSRYADDITFSCMYHVFDDSFMEIIEDIVRAESYVINPKKTRLQRQSQRQEVTGLIVNERLNIPRKKIRMLRAVLHNWKVNGYESAQAKFKDAFGMKKDLKLSIGGFLNFLKMVRGDQDALYQKYYEEFKILTNEITN

SEQ ID NO: 293 - protein, 328 aa, unidentified
  source 1..328: note = Related to JAJTDX010000012.1; note = Cryomorphaceae bacterium
MEITKEKIKELLEKGKTMEDFLEAYNCFLLYLNSRDGKDRKLWEKNSFLYLYRSVNRQYIEFSIPKKSGEERKICAPKKQLKLVQKKITQILELYYKPNANCHGFVKQRSIVTNAEIHTNKTFVLNLDLEDFFPSIKTNRIIDSLIIEPFNFSTEMAKIISRIACKEGGLPQGSPMSPMISNVCCEKMDLDLKDFSKKYKLNYSRYADDLTFSGYRKIFNNTFFSELGRIIGKKHHFRIKKSKTRIQNRNNRQEVTGVVVNDKLNVNRKYIRELRALIHYHKLGKAEENALYVISGKLEFLKMIKGKDRVYRNLLIQFKSQKNGQRNN

SEQ ID NO: 294 - protein, 356 aa, unidentified
  source 1..356: note = Related to JAGAYZ010000097.1; note = Muribaculaceae bacterium
MEKYRTARWRLTMYSERHIITILNRIRRRRDILNCKGYFKLSTLQKYASGNYYKFFSIPKKNGGKRIISAPERELAFIQLCIAVLFNSIYKPNKCVFGFVDKRSIVQNAQQHINKEILFNIDLKDYFSSISYNDIIEKLIRQPYYFSYPAAKFLTDILVVETQDGKRVLPQGAPSSPIVTNMIADHLDVRLSKFAEKHDLTYTRYADDITFSFSRSKLRGWRSHGLTKGIRDIIFDIIETEGFLINKRKTRISFINQRHEVTGLVVNKKVNVKREYIKRLRTEIHNWERDGYVIASYKFLKHYEKTHLGKLKSMENVIEGKLSFIKMVKGENDTTFMKLYNRFMLLMQRDKVFINS

SEQ ID NO: 295 - protein, 580 aa, Lewinella lacunae
  source 1..580: note = Related to NZ_JACSIT010000096.1
MPRPALLSSSFGLLSVQDLCQYLNSIPVSEPLLKQAYTPLSLQALSEVASSCYKELHLPKKNGSLRIIHGPNPHLKAVQKGLCTLLNEYQKELKSPSAYGFVPGRNIVDNAARHTGKNVVINLDLLNFFPTINSSMVAEALAKPPASIPLVSQLNQVMTNLMCREDRLPQGAPSSPAMANLVCHSLDLNLRALAQKHRFTYTRYADDLTFSSNYPKVAEEVFINIIYQRCEKLGFKVNKEKTRIQRSSGRQSVTGLVVNSKVSVKKKYCRITRAMLHNWKKLGYEEAEALFKANYPKGPLYNLSNVLLGRIEFIGMVDNHKLPLRQRKNQLLSDTRYMKLLAEYWELMNGQNYSFIQNQKIFQRLVRFNRLAENVAMIKNNQFSSRDRFIRYCTYTFVQLEELYKVYFLIKFQEDYSKIGRHFFDNNDAFKRMLLGKKKEDHSPEDVERARKEAENKTSFADYKTYMLESQFLNDCYYAKGRNPPKLPRLLRQLRNFYVHGSEFTKRDEASLKQTLEGIPAKNAAYKKKHQKDRVMPKDEVKAQEEYLVFKWIDGGDYDSVRAFLGDIVALVRYEFEDRN

SEQ ID NO: 296 - protein, 679 aa, Fibrella aquatilis
  source 1..679: note = Related to JAFMYU010000013.1
MISTQYDTNVLISLLREGESLDDLLTLLNGVVEWQNFVHQSKRRLFTRKQLSFFYKNVDKKYHSFQVPKKSGALRTINAPDGTLKAIQRCITDLLQIIYQPPFSVNGYVKGRSVVSNALMHTNKNFVLNIDLQDFFPNIKFGRVSAVLKLKPIAVKPKFAYLLTKYCCYNGALPQGAPTSPVLSNLICQRLDFRLTELTRSEHLSYSRYADDLTFSSDQPFQNGFLTRLEEIIQEEGFLINPGKVRLLGRDVRQEVTGVTVNDKTNVSRKYIRKIRAMLYNWTNLGYEKAQDRFLSSYKPPANVVKNKKSDPQLSNVVGGKIDYLKMVRGADDSIYRQCKEAFEQLLKGELIFQISEKILRTQTVEHQPRQVVSFLRNFKVINQTGFRELLHDPDVSDFDFKTNLAKVNEQMPALSAVLPASLYTKLESFVAVYNTDGQAYHEKYGLLPLKGQKKTNPNNLIDILSRKKKNKVVEDMVLTTRVQAEDILPDNKVTQAAKDFRTQIRIGNDYFHDWILINSLKPIVNELNSRELVSISYEPSEEEFSLNCEFFTDTKEVWKAIRSLLKDLAENPYYDVKDERIILLRSATIKRNLNGESFFATIIYLNLQNAFIVNELKAFQQSRLTKNQQRLHKLADWSTVYQDESGQLSEHLFLASPETRSDNQLTEGITHKLTFYHS

SEQ ID NO: 297 - protein, 665 aa, Runella slithyformis
  source 1..665: note = Related to CP002859.1
MAPIQSDIVTLQNSLQKAEDFHDFLSVLNDALEFPFSQKKLYFHLKNVDKLYHSFQVPKKSGGLRTINAPNKSLKFIQHCLAFILQGAYQPTYSVNGYVTGRSVVSNAHVHANKKFVLNLDLENFFPSITFGRVHAVLQLKPILAKPNVAQMIAKLCCYEGVLPQGAPTSPVLSNMICQRLDRRIESLVSGYQITYTRYADDLTFSSDKPFENGFLSRLDEIIKAEGFTINLEKVRLQLKNSRQEVTGLTVNEKVNVTQRFIREIRAMLHNWGTLGYDSAQAKFLTHYSPKVSKKKKSEPQLRNVVAGKINYLKMVRGNEDTVYQQFKAELTRLEKGEEIPQKKPKLPVWQPSIDHNPRRVVQFLRNFRVVNDTGFRELLHDPDVSDFDFMANLAKVNTQMDGLKSVLTPKLHQKLSVFVNAYNTAGVTYFQEHGLLPLKGRPKQTVSLLARLLLKKAKMPVLEQQTTEQVAVAPDRAVSKAAKVFREQIRVGSDYFQDLILVNALKPIVETLNASDSVNVSFQPGENEFGINCSFFTDTWESVKTLRSVLKDLAQNTDYQTPTNQRNIWLRSAVIQREAEKEAFFATVIYIHLEGGKIESENAFKHIRLLKTQQRLCSLADWSVLYQDANSQTQEFFFLNSDANRSHQAPNYEGITHKLTFYHS

SEQ ID NO: 298 - protein, 498 aa, Brucella anthropi
  source 1..498: note = Related to NZ_WBWZ01000001.1
MSEAEMKKIWWFRNRMYNQFVVTSKHGKARRINAPDLRLKMLQRSIAKLLDQLYAPRNPVHGFVNDRSVITNASSHLRSKFIVNLDIENFFPSISENRVEGLLRAIGIDDNVSSIIARICTRQGVLPQGAPTSPVLSNMICFRLDRELLALSKASRCIYTRYADDITFSSYQKPELLFGAGVPPTGRFSPELLATNLSAAFTDNGFTLNADKSQYGDKHSRRIVTGLKINSGLNVDRRFVRNIRAALYSVEARGLAAAQKKFKDRHNGTTDLELHLKGKISWLGSVKGQFDPVFRAIASRFNAAFPAHMIKINPSPEDIRSRAVWVLEHFHGDFAQGTAFFLKGVGLVTAAHCVSDALGEEIDVHHHSKPSNTFKVKVKQHHVIRDLAILEHTIPSNEYYELELTKQALNIGDSVRAIGYPGYAPGDGLNIRPGQISSFSVKSTVPLVEVTQKLTQGMSGGPIIDDQNGVIGIIHKGGPHEGRDFAVNVEALVAWLDE

SEQ ID NO: 299 - protein, 530 aa, Brucella sp.
  source 1..530: note = Related to NZ_LT599047.1
MPKPFIMFGSLNLRTSIPPELADYSTFLGYLCLSQAELKKIWWFRKKMYKDFKITSKYGKTRRINAPDRRLKMLQRNISPLLDKLYSPRNPVHGFIHERSVMTNASSHLSNKFVVKLDIENFFPSISENRVAGLLHALGVDESVSAIIARLCTNRGVLPQGAPTSPVLSNMICFRLDKELLKLAKTARCIYTRYADDVTFSSYQKPELLFEVGAPQPGRFSPELLASNISAAFTNNGFKLNANKSQYADKNSRRVVTGLKINSGLNVDRRFVRNIRSALYSVETLGLSAAQKKFADQYGGKCDLTQHLKGKISWLGSVKGHSDPVFRATVLRFNSSFPSQPIKMNPSSDEIRNRGVWVLEHFHGDFAQGTAFFMKGVGLVTAAHCVADAIGEEIDVHHHTKPSNSFKVKVKRHHFIKDLAILEHAIPSNEYYELELTDQDLQVGDTVTAVGYPAFAPGDGLNVRSGQISSFSVKSTVPLVEVTQKLTQGMSGGPILDEKNRVIGIIHKGGPNEGRDFAVHVKALMEWLQE

SEQ ID NO: 300 - protein, 458 aa, Rhizobium azooxidifex
  source 1..458: note = Related to NZ_JACIEE010000022.1
MLQRALVPLLGEIYSPRKPVHGFVRDRSVITNAASHLKSKFVINLDIERFFPSISENRVIGLLKALGVDEDVSSIIARLCSNQGTLPQGAPTSPVLSNMICFRLDKEMQVIAKAAHCIYTRYADDITFSSYQPLSALFAAGVPSTGNFAPDLLAPQLLAAFINNGFKVHPDKTHYGDRHSRRIVTGLKVNSGLNVDRRFVRNVRSTLFSIETTGLAAAQKKFDDHYGGRRDIARFLRGRISWIGNVKGQSDPVYRSIATRFNASFPMQPIMVLPTRTEIRRRAVWILEHAHGEWAQGSAFFLKDVGLVTAAHCVQDAIGKEIDVYHPTKPANIFKVKVKKHHKIRDLALLEHSIPSNEFYELEMTNTTYVIGDVLTAAGYPGFAPGDGLNERLGHISSFSVKSGVPLIEVTQKLTQGMSGGPVFDDNDLVAGVIHKGGPDEGRDFAVHIDALTAWLDE

SEQ ID NO: 301 - protein, 531 aa, Ensifer sp.
  source 1..531: note = Related to NZ_CP083370.1
MPHPLRVFGGVSFRVRIPSEMTDLTTFLDHLCLSEAELRKIWWFRGRMYKDFPLLSKSGKPRIISAPDRRLKMLQRTIAPLLDQIYSPRNPVHGFVPDRSVRTNATSHLKSKFVVNLDVERFFPSISENRVAGLLKAVGIDESVAVVVARLCTNQGVLPQGAPTSPVLSNMVCFKLDKELQAIAKAAHCIYTRYADDVTFSSYQPPGGLFAEGVPPTGNFVPDLLSPRLIGAFTNNGFKLNPSKSHYGDKHSRRIVTGLKINSGLNVDRRFVRNIRSTLYSIETLGADTAQKKFEVEYGGKCRLSQHLKGEISWLGSVKGQSDPIFRAIAARFNSSFPTQPIKVSPTRAQIRSRAVWVIEHFEGKFAQGSAFFLKDVGLVTAAHCIEEALGQEIDVYHPSKPSNVFKARVKQHHTVRDLAILDHEIPAHEFFELEMATRAPSLGDALTAVGYPGYGPGDSLNVRSGHISSFAVKSAVPLIEVTQKLTQGMSGGPVLDDEDRVAGVIHKGGPEEGRDFAVHIDALTAWLDGR

SEQ ID NO: 302 - protein, 540 aa, Agrobacterium sp.
  source 1..540: note = Related to MEDN01000012.1
MPTPRSMFGGNLTRSRVPLELTSIDELLRHLCVSEAELQKIWWYRSRMYSEFNISKKAGKSRLISAPDRRLKMIQRALAQLLDGMYQRRNAVHGFVADRSVMTNARSHMRSKFVLNLDIENFFPTISENRVVGVLKALGVIEDVARIVARLCCNNGVLPQGAPTSPVLSNMICFRLDKDLHGVAKASHCIYTRYADDITLSSYQPPVALFAGGVPPTGNFSTELLAPVLVEAFAHNGFKLNAHKAHYGDRNSRRIVTGLKINEGLNVDRRFIRNVRSALYSIETLGIETAQAKFKSEYGGKCGVANHLRGKISWIKSVKGQSDPVFRGIAARFNKLFPAEPIKVQPTRTEMRDRAVWVLEHTHGDWAQGSAFFLEGVGLVTAAHCIQDAVGQEIDLYHPSRPSNIFKVKVRAHHAVRDLALLDHSIPSTEYFELQLSARTHAVGDYLIAVGYPGFAAGDNINVRSGQISSFSVKSTVPLIEVTQKLTQGMSGGPVLDIDGRVAGVIHKGGPDEGRDFAVNTDALMAWLSELVTAVGAPVS

SEQ ID NO: 303 - protein, 485 aa, Agrobacterium rhizogenes
  source 1..485: note = Related to SGOC01000001.1
MYSDFEIAKPSGKSRVINAPDDRLKMLQRYIANLLDQIYKPRNPVHGFVLDRSVRTNASSHLRSKFVVNLDIENFFGSISENRVIGLLKALGVDEGAAEIVARICCNKGHLPQGAPSSPVLSNMICFRLDKDLQQIAKKVYCIYTRYADDITFSSYQPLSSLFEAAVPPAGNFDFDMLVPELKQSFLNNGFKVNASKVHYADRNSRRIVTGLKINEGLNVDRRFIRDIRSALFSVEKDGLVVAQQKYAEKYGGTCSIDLYLKGKISWIGSVKGRSDPVFRGLASRFNLSFSFNRVKLLATQAEIRERAVWVLEHWEGNCAQGSAFFLEDVGLVTAWHCVAEAANKGEIDVYHPTKRSNIFKVKVASHCAVRDLAILEHSIPDNEFYELQASTHVVGIGDSVTAIGYPSYGPGDGINVRSGQVSALPVKSAVQLVEVTQKLSQGMSGGPVLDDEDKVAGVIHKGGPHEARDFAVSIKALIDLAAGK

SEQ ID NO: 304 - protein, 488 aa, Rhizobium leguminosarum
  source 1..488: note = Related to WIEG01000017.1
MYNDFEVAKPSGKKRVINAPDERLKMLQRYIAELLDHIYRPRDPVHGFVFDRSVRTNASSHLRSKFSLNLDIENFFGSISENRIIGLLKALGIEDDAAEIVARICCNKGQLPQGAPSSPVLSNMICFRLDKELQRIAKKTHCIYTRYADDITFSSYQPLSGLFDGVPPPAGNFDVELLTAELKQSFANNGFKVNAAKVHYADRNSRRIVTGLKINEGLNLDRRFIRDVRSALYSVEKDGLAAAQKKFEDAYGGKCPIDFYLKGKIAWIGSVKGRSDPVFRGLASRFNASFLKNRIKLQATPSEIRERAVWVLEYWEDNGDGAQGTAFFLKDVGLVTAWHCVAKAETVGLDIDVYHPTKRSNVFKVKVVKHCAVRDLAILEHSIPDNEFYELEPSTRNSVIGDGVTAIGYPSFGPGDGINIRSGQISALTMKSAVPYIEVTQKLAQGMSGGPVTDIDHKVVGVIHKGGPQEARDFAVDVKALMNLAVGK

SEQ ID NO: 305 - protein, 512 aa, Rhizobium leguminosarum
  source 1..512: note = Related to SIJW01000001.1
MTSEAALLDYLGVTSAELKKIWWFRGRMYQTFEIAKAVGKSRIISAPDRRLKMLQRNIATLLDAIYKPRHPVHGFVPDRSVLTNASSHLRSKFVVNLDIEGFFSAISENRVAGLLKALGVQSRAADIVARICCNRGCLPQGAPSSPVISNMICFGMDKELQRFAKTAHCIYTRYADDISFSSYQPLTALFDGAVPSSGNFDHDTLAPRLRAAFVNNGFTINKAKAHYADKHSRRIVTGLKINEGLNVDRRFIRDVRSTLYSIDSLGLADAQKKFEDKYGGTCDLSSFLKGKISWIGSVKGRSDPVFRSLAGHFNVKFPTRAFKLQPTRDEVRKRAVWVIEHFEGEFAQGSAFFLKGVGLVTASHCVAEAAAAGAEIDVYHPTKPSNIFKATVKQHCEIRDLAILDHNIPENEFYELEVSGEKFAVGDPLTALGYPKFAPGDGMNIRSGNISAFSVKSSVPLIEVTQMLTQGMSGGPVIDRHDKLAGIIHKGGPEEGRDFAVHVKALMDWLTS

SEQ ID NO: 306 - protein, 498 aa, unidentified
  source 1..498: note = Related to JAIUOD010000004.1; note = Proteobacteria bacterium
MSKSELKKIWFYRERMYHNFNVSGAKETKRLISAPDHRLKMLQRKIAASLDTLYCPRKSVHGFVRHRSVKTNAASHLSAKYLLNLDLSDFFGSISENRVNGLFVSLGIDKEVALILARLSCYKNHLPQGAPTSPVISNMICFRLDKELLSIAKQNRCIYTRYADDITFSSYKPLTVLFDGVTPNTGKCDIKLLGGRLLTTFQNNGLIINPEKMYYADKSARQTVTGLRVNELVNVDRKYVRNVRSALHVVEKSGVLEAQRVLKDKYLRNSTIEAHLQGKIAWLGHVKGRSDPVFRKLAAKYNNLFPKKAIKLEPTKEEVRNRAVWIVEYSDHENYSQGSAFFLKGVGLVTAWHCVNGHESYDLYHPSKPSNKFTVTVSRSCKSRDLALLNHNIPFTEFYELSLPDRTFHVGESLYAAGYPGFGPGDKLNVRLGAISSFPIKFGIQMVEVTQKLPSGMSGGPLVDSANRVAGIIHKGGEDEPRDFAVHIDVLKAWVSLP

SEQ ID NO: 307 - protein, 496 aa, Brucella intermedia
  source 1..496: note = Related to WBWG01000001.1
MSPDELNKIRWFRGRMYRKFDISKGKSKKRTINSPNYRLKMLQKKISIQLAKIYKPRNSVHGFVSHRSVKTNAQSHIKQKYILNIDIKDFFPSITESRVRGLLEAIGLDENVSAAITWICCNDGCLPQGAPSSPLISNMICFRLDKNLQAFAKRTRCIYTRYADDITFSSHQPLSLLFAESVPRAGHFPVIQLSEGLRNLFTSNGFTLNDNKAHYADKHSRRTVTGIRVNEVLNIDRKFIRNVRAALYKIETIGLKDAQKELMSRFSSNASIEDYLRGKIAWLGHIKGVSDPIFRGLAARFNRSFAKSAIKIQPTQAEMRDRAVWVIEHFDGEMCQGSAFFLESVGLVTAAHCVEGSTEIELYHPSKPSNKFSGKIKSICSHRDLAIIEHNIPSVEYFELRRSLKDAQIGEELIAAGYPGFGPGDKLNIRPGTVSSRPVKSAVNYIEVTQKLAQGMSGGPLLDTDNNVSGVIHKGGALENRDFAVHIGELYLWLGI

SEQ ID NO: 308 - protein, 532 aa, Bradyrhizobium sp.
  source 1..532: note = Related to VKHP01000048.1
MPSFASFFVTPVRVSVPNELTSEAELLKFLALSTAELKKIWWFRGRMYQKFEISKGEGKKRVISAPDHRLKMLQTKIASSLTPICRPRNPVHGFVDGRSVKTNATAHRRSKFVMNLDIEGFFSAITEGRVSGLMSALGIDSRVAEILARICCNEGVLPQGAPSSPIISNMICFRMDKELQTIAKESRCIYTRYADDITFSSYQPLTLLFEGPTPPAGKFSPELLKDRLRGAFRSNGFAINPQKVHYADKYSRRTVTGLKINELVNVDRKFVRNIRAALFVTEKQGATSAQKILKDKYGREAALASHLRGRISWVGHIKGPSDPIFRGLALRYNKLFPSEKLEILPTIFEIRERAVWVVEHWGDTTTEGSVQGTAFFLKSVGLVTASHCVEGATEIEIYHPSKPSNKFKVTVAKNDTHRDLAVLTHEIPATEYYEFDISKRTLKVGDITTALGFPSFGAGDKINVRSGPITSLPTKSAVPMIEVTQKLSQGMSGGPLLDEDGAVAGINHKGGPGEARDFAVHVKALTDWLSGA

SEQ ID NO: 309 - protein, 531 aa, Ensifer sp.
  source 1..531: note = Related to NZ_LUFV01000044.1
MTNPFAFLDIAYRIDLPDELKDEERLLLHLGVSQAELKKIWWYRSRMYHHFDVAKGKRKKRIISAPDPRLKMLQRTIAASLNVVYKPRRPVHGFVIDRSVKSNALSHLNSKFVLNLDLKDFFPSITENRVSGLLNALGIDARVSEIIARICCDKSQLPQGAPSSPVISNMICFKLDKELQVIAKAARCIYTRYADDITFSSYQPLTLLFEGVAPPAGNISPELLSKQLREAFQNNGFTINSEKAHYADRHSRRTVTGLKVNEILNVDRKYVRNVRAALYTVEKAGVEAAQKRLEEKYNKRSSIASHLRGRIAWIGNIKGWNDPTFRSIALRFNNCFPKDQLKIEPDREEIINRSVWLVEHSLGSVKKMAQGTAFFLKGVGLVTAAHCVQNGKGIVVYHPSKPSNKFPVNVANSCKYRDLAILSHSISDQEFYELNASERSFKAKDNLTAYGYPGFGPGDKLNVRPGYVNSLPVKSSIQLIEVSQKLAQGMSGGPILDDDGHVAGVIHKGGPEEARDFGVHIEVLMKWLKEL

SEQ ID NO: 310 - protein, 537 aa, Qipengyuania nanhaisediminis
  source 1..537: note = Related to NZ_FOWZ01000002.1
MTNGWLGFGIPTSIHLPIPPELSSKTALLSYLGVSPAEMKKIWYHREKMYHCFDVAKKSGKPRLINAPDRRLKFLQRRIANLLDQLYRVRNPVHGYVQGKSVKSNATSHLKQRFILNLDIRDFFGSISERRVFGVLHAIGVPRDAAETVARICCYSGHLPQGGPASPVLSNMVCFRLDRALLKLAKDSKCIYTRYADDISLSSLRPLTALFDGTLPTTGRVDPELLSAALQAAFTSNGFALNPEKIHYADRHSRRVVTGLKVNEGLNVDRRFVRNIRAALYEVEKDAVAAQARYAADFGGKADISSHLKGKIAWLGNVKGLADPVYRALALRFNTAFPKRAIKVQPTRHERLDRSVWVIEHHLNDIEKYAQGSVFFLAGVGLVTAAHCVAGVKDAIVHHPSRPSNKFKVSVAHYSKHRDLAILTHSIPATDFYELSKSAAAAVTGDPIVAIGYPDFSPADKVNFREGTVSSTTVKSLINLLEVNFKFIQGMSGGPVINSNDEVVGIVHKGGPKEKRDFAIVIEEFDSWNAAGLPSDY

SEQ ID NO: 311 - protein, 395 aa, Sphingomonas sp.
  source 1..395: note = Related to SLXW01000017.1
MPNGWQRFGIPAPVHVPIPPELVSKAALLVHLSVSPAELKKIWYHREKMYENFDVAKKSGKPRPINAPDRRLKFLQRQIAELLDTLYPVRKPVHGYVSGKSVKSNATSHLKQRFILNLDIKDFFGSITERRVSGILNAIGVPSDVAETVARICCYGGHLPQGGPASPVLSNMVCFRLDRALLKLAKDAKCIYTRYADDISLSSLRPLAPLFDGALPPTGQVAPELLSDALQAVFANNGFTLNPDKIHYADKHSRRVVTGLKVNEGLNVDRRFVRNVRAALYAVEKDVAAAQTRYAADFGGKADVGTHLKGKIAWLGNVKGLADPVYRALALRFNTAFPKQSIKVQPTRHERLNRSVWVDLLPINHAIGKLARQMETSDAARPIYRGSDHWRAARA

SEQ ID NO: 312 - protein, 535 aa, Sphingopyxis sp.
  source 1..535: note = Related to NZ_CP039250.1
MPSVWSMFGTAVQIPLPPEFGDEGTLLAYLGLSQAELKKIWYHREKMYKNFNVAKKSGKPRPINSPDRRLKFLQRQIATKLDMIYPRRNPVHGYVKERSVKSNAAAHQNQRFVLNLDIKDFFLTITEGRIVGVLTAIGVPDRVSAIIARICCYGGRLPQGGPASPVLSNMICFRLDRALLKVAKEGRCIYTRYADDISLSGLRPLSPLFENGLPPSGPISPELLSSALQSAFANNGFVLNPEKIHYADKFSRRVVTGVKVNEGLNVDRRFVRNIRAALFEVEKDHLAAQARYLSKFGGSTTISAHLKGKIAWLGFIKGSADPVYRSLALRFNKSFQSQAITVQATREEQIDRSVWVIEHGSVLDDTYRQGSVFFLDGVGLVTAAHCVAGVKEATVHHPSRPSNKFKVQVLHYSKHRDLAILSHAIPPTDFFQFAKSLIPAAAGDAVTAFGYPDFNPADKINIRSGTVSSTTVKSLIPLVEVNFKLSQGMSGGPLINSSDAVVGIIHKGGPEMPRDFAIVISELDKWIAAGCPDDF

SEQ ID NO: 313 - protein, 528 aa, Sphingopyxis sp.
  source 1..528: note = Related to MIAM01000006.1
MPSPAMMFGPPPRVTIPPALETEAALLAHLGLSSAELKRIWWFRHRMYRDFNIAKGAGKLRIITAPQDRLKHLQRRIADLLTPMYRVRHPVHGFVADKSVKTNARSHVKSKFVLNLDIRDFFGAITENRVEGLFRSLGIDRRVAEILARLCCNQNRLPQGAPSSPVISNMVCFRLDKELLAVAKATRCIYTRYADDISFSSYRPLSGLFEAALPPTGNVSPDLLSTDLRSAFETNGFAINPEKAHYADRHSRRIITGVRINEGLNLDRRFIRNLRSGLYSIEKLGETAAEAKYHAKHGGTASLESHLRGKLSWLSDIKGASDPVFRNLAKRFNLLFPKAPIGIEPTPAEVRDRAVWVIEHSGPKGRQGTAFFLKDYGLVTAAHCVSEASEPIIVYHPSRLSNKIPVTVAKTCPHRDLAIIAHAVPPNEYYELEVTEKPPAVEDHVTSVGYPQFGFGDRLNVRKGTVSSLPVKHAVQQIDVGIRITEGMSGGPLLAEDGKVIGINHKGGIDEDRDLAIHIQQLVKFASE

SEQ ID NO: 314 - protein, 434 aa, Acetobacter tropicalis
  source 1..434: note = Related to NZ_LHZT01000034.1
MHIVIARIICLTWRDWKGDPVPRSASIFGRAIRVKLPPELLTEVNLLTHLGMSRGELNVINWYARRMYHSFDIKKKSGKPRVINAPERRLKLLQRKIADLLMPLYRRRNPVHGFVADRSVKTNAQSHLNSKFVVNLDLKDFFPSISQKRIVGVLRSLGIDRGVADAISTICCLNGCLPQGAPSSPVLSNMICFRLDKELLEFAKQAKCIYTRYADDLSFSSYQPLGSLFQTSPPSPGHFSPDLLGEKLRHIFTANGFILNPDKAHYADRHSRRTVTGIRINELLNVDRRFVRNLRAALYSVEAQGIATAEAKFHASYNGKSDIGKHLQGKIAWLGYIKGASDPVFRGIASRFNKAFPSLKLEIQPTPQEIRERAVWLIEHWERTGDQGTAFFLEGVGLVTAEHCVSPSGIVELYHPSKPSTRKSHRRVVHRVRL

SEQ ID NO: 315 - protein, 513 aa, Sphingobium yanoikuyae
  source 1..513: note = Related to NZ_JH992904.1
MKLPPELMSEASLLAHLGVGRAELNVISWYAGRMYHKFDIKKKSGKARVINAPDRRLKMLQRKIADLLTPLYRRRNPVHGFVIGRSVKTNAQSHLGSKFIVNLDLKDFFPSISYGRVTGVLRSLGMKREVAEAIATICCLNGTLPQGAPSSPILSNMVCFRLDRRLRELAKDARCIYTRYADDLSFSSYQPLMGLFETTPPASGHFSPDLLSEKLKQIFSGNGFVLNPDKAHYADKHSRRTVTGIRINEALNVDRRFVRNLRAALYSVETLGLAAAQAKFKSLHGGKADVGQHLQGKVSWLGYIKGASDPVFRSVASRFNAAFPPLALDILPSPQEIRERSVWLIEHWETGGDQGTAFFMKGVGLVTAEHCISPSGIVELYHPTKPSNKFAASVKHRCPDRDLAVLDHAIPNNEFYELETAGKAAATGDATTAIGYPGYGPGDRLNIRPGAVTSLPTKSAVKMVEVQQMLTPGMSGGPLLDVDDRVVGVVHKGGHDHGRQLAIAISELHAWLP

SEQ ID NO: 316 - protein, 526 aa, Sphingomonas corticis
  source 1..526: note = Related to JAAVJH010000001.1
MPRPARAFGPPIRVKLPVEVASEGAILAHLAVSPAEAKKIRYYRARMYRTFSIQKKSGKARIITAPDRRLKMLQRRICDLLTPVYRRRNPVHGFVADRSVRTNAEAHLGSKYVVNIDLKDFFPSISERRVTGVLMSLGIGRDVAEILSSICCVNGCLPQGAPSSPLLSNMICFRLDKELMAFAKRTRCIYTRYADDITFSSYQPLAGLFEAVPPSPGRFAPDLLSAEVAAIFAANGFVINPEKAHYADRHSRRTVTGLRVNEAINVDRRFVRNLRAALFSVEKLGAAAAQAKFHATHGGRVALGNHLQGKLSWLGYVKGQSDPVFRSMASRFNRSFPDRALTIQPTRDEIRDRAVWLVEHWENGGDQGTAFFLRGVGLVTASHCVSPSGAVEVYHPSKPSNKFTANVKHRCEHRDLAVLDHAIAATEFFELEAAATAVVTGDATVAVGYPGFGPGDKLNVRTGNVTSLPIKSGVQMVEVQQMLTQGMSGGPLTDPDDGVIGIIHKGGPEHGRQLSVAIEVLRDWLA

SEQ ID NO: 317 - protein, 500 aa, Sphingomonas sp.
  source 1..500: note = Related to NZ_JACYUG010000002.1
MKHLGLGAAEAKKIRYYRSKMYRTFDIRKKSGKARVINAPDRRLKILQRKICDLITPLYRRRNPVHGFVADRSVKTNAQSHLGGKFIVNLDLKDFFPSISERRIVGVLMALGLKRDVAERLSSICCVDNGLPQGAPSSPILSNMICFRMDKQLMAFAKSARCIYTRYADDITFSSYRPLTGLFESVPPPSGSFPPELLSSELLGIFGSNGFTIHPDKAHYADRNSRRTVTGLRVNENLNVDRRFVRNLRAALYSVEKLGEKPAETKFHADHGGRAPIGRHLQGKLAWLGHIKGPADPVFRSIASRFNAAFPSLALKILPTQLEIRERTVWLIEHWEGTGAQGTAFFLTGVGLVTADHCVSPSGAVEMYHPSKPSNRFAAMAKHRSSDRDLAVLDHAIPPNEFYELDASNVGSVTGDATVAIGYPGFGPGDKVNVRSGNVTSLPTKSGIQKIEVQQTLTPGMSGGPLLNSIGQVIGVIHKGGAEEERQLAIDISVLQKWVP

SEQ ID NO: 318 - protein, 526 aa, Actibacterium ureilyticum
  source 1..526: note = Related to NZ_NSBT01000026.1
MPSAFYLFGGTSRTIIPAELSTKSELLKHLGVSPAELKKIWWFRGRMYSHFNISKRSGKVRLISAPDYRLKMLQQKIARSLSGLYNPRNPVHGFVPDRSVRSNAEAHLRRRFILNVDIKNFFPAITEARVQGLLESIGVDTDVAETITRICTNNGCLPQGAPSSPVISNMICFRLDKSLMNFSKEHRLLYTRYADDITLSSFQPPTALFEGDRPDSGRLPPEKLSGELLSILGNNGFELNPEKIHYADKNSRRMVTGIKINEGLNVDRRYVRKIRSALFKVESASVAAAEAELKTRFGKSCKIQAHLQGKISWVGFVKGQSDPVFRGLAERYNACFPASPIKVHPTQAELLDRSVWVLETEKNTGTAFFLRGVGLVTAAHCVNGASSIEVFHPGKPANTFMVGVQHICTHRDLALLSHSIPSTDYFELEEFGGFPATGANTIAAGFPSYGPGDRLNIRPGTISSLTIKHAVNLIEVTQKLSQGMSGGPLMTQDHAVMGVIHKGGPDEPRDFAVTLSEMKSWIATLP

SEQ ID NO: 319 - protein, 547 aa, Litorivita pollutaquae
  source 1..547: note = Related to QFVT01000013.1
MCTWGDWRGNLVPSPFNLFGGASRTKIPPELTSKDELLKHLGVSPAELKKIWWFRGRMYSHFNISKRSGKTRLISAPDYRLKMLQQKIARSLAKLYNPRKPVHGFVPDRSVRSNAESHLRRRFILNVDLKNFFPTITEPRVQGLLESIGINKDVAETVARICANNDCLPQGAPSSPVISNMICFRLDKALMKFSKEHRLLYTRYADDITLSSFQPPTALFEGDRPDPGKVAEEKLSDELRSIIRNNGFELNPEKIHYADKNSRRIVTGIKINEGMNVDRRYVRNVRTALFKVEKHGPAAAQAELEARFGKTCKIQAHLQGKISWVGFVKGQSDPVFRGLAKRYNACFPACPIKVHPTQAEIVDRAIWVVETEDDTGTAFFLKGVGLVTAAHCVNSASEIEVFHPLKTANRFKVTIKHICAHRDLAILEHSISSTEYFELESFTGSPVVGTNTLAAGFPTYGPGDQLNIRQGSISSLTTKSAVPLIEVSQMLGQGMSGGPLMNKNNEILGIIHKGGPVAYVAKDGSVSPQRQLAVAISELKAWVSALP

SEQ ID NO: 320 - protein, 367 aa, Sulfitobacter sp.
  source 1..367: note = Related to CH959310.1
MICFRLDKTLINFSKEHRLLYTRYADDITLSSFQPPTALFEGDRPDPGRLALEKLSDDLRMIFKNNGFELNPEKVHYADKNSRRMVTGIKINEGLNVDRRYVRNVRSALFRVETTGLAAAQAELKTRFGKSCKVQAHLQGKISWIGFVKGQSDPVFRGLAKRYNASFPASPIKVHPTKDEIFDRAVWVVETDDDTGTAFFLDGVGLVTAAHCVNGASEIEVFHPLRTSNKFKVTIKHICAHRDLAILEHLIPSTEFFGLEAFEGSVTVGTNTLAAGFPTYGPGDRLNVRQGSISSLTTKSAVPLIEVSQMLGQGMSGGPLMDEDHAVFGIIHKGGPVAYVTKDGSVSPQRQLAVAISELKAWVATFP

SEQ ID NO: 321 - protein, 533 aa, Leisingera sp.
  source 1..533: note = Related to NZ_JAKFZM010000082.1
MFYLFGGTSRAKIPGELSSRSELLKYLGVSPEELKKIWWFRGRMYSHFDISKRSGKSRTISAPDYRLKMLQQKLARSLSGLYSPRNPVHGFVPDRSVRTNAETHLRRRFILNIDIQNFFPSITEARVQGLLTSIGVDTNVAEIVARICSNNGCLPQGAPSSPVLSNMICFRLDKSLMRFSKEHRLLYTRYADDITLSSFQPPTSLFEGERPAPGRLSPEKLHAELRMIFQNNGFELNPEKIHFADRNSRRIVTGIKVNEGLNVDRRYVRNVRSALFKVERSGLAAAQTELKSRFGKSCKIQSHLQGKISWVGFVKGQSDPVFRGMAKRYNACFPANPIKVHPTRAEIVDRAIWVVETEFDNGTAFFLDGVGLVTAAHCVDGASKIDIFHPLRTSNRFKVTIKNICTHRDLAILEHSVASTEYFELGSFTGSPTIGANTRAAGFPTYGPGDQLNVRQGSISSLTTKSAVPLIEVSQMLGQGMSGGPLMTEDDSVLGIIHKGGPVAYVAKDGSVSPQRQLAVAISELSAWVATLP

SEQ ID NO: 322 - protein, 546 aa, unidentified
  source 1..546: note = Related to JACZKS010000020.1; note = Rhodospirillales bacterium
MPEDVRQSWRDWKEGLVSYRGALFGKPIRITIPAELADEAALLAYLGLGAAELKKIWHFRGRMYQHFSIAKGPNKVRLISAPDQRLKFLQRRLADKFTELYRPRHPVHGFVVGRSVKTNALAHLHRRFVVNIDLKDFFPTIAQNRVEGMLFSLGIDARVAEIIARICCNRGHLPQGAPSSPVLSNMICFRLDKQLLDVAKETRCIYTRYADDITFSGHRPPTALFDAALPPAGRFSPDLLAPKLLDIFQQNGFSINPDKAHYADRHSRRTVTGLKVNQLLNVDRRYVRNIRAALHSIATLGLKEAEKKFHEKHGGNSGLAAHLRGKISFLSHIKGQSDSVVRSLTLRFNKCFPAQPIKVMPTSTEIRDRAVWVVEHNLDRDHGKQGTAFFLKGVGLVTAAHCVEGVSEIEVFHPSKHANAFKATVRKRDEHRDLAILDHSIPATEYFELDPVSHAIVTGDSMTAVGYPAWAPGDPLNIRPGFVSTLTVRSAVQYIEVTQKLTPGMSGGPLLDANDAVAGIIHKGGPEEGRDFAVHIEVLEAWLKEG

SEQ ID NO: 323 - protein, 527 aa, unidentified
  source 1..527: note = Related to JADGCC010000015.1; note = Alphaproteobacteria bacterium
MTYWGALFGKPIRITIPPEFANEAALLAYLGLGPNELKKIWYFRARMYRHFSIAKAQNKVRLISAPDERLKFLQHKIAEKLTDLYRPRKQVHGFVAGKSVKTNALAHLGRRFVVNIDLKDFFPTITQKRVAGLLLSLGLDNQVTTLIAHICCNDGNLPQGAPSSPVISNMICFRLDKKLLGIAKEARCVYTRYADDITFSSHQPPTALFEVALPPAGRFSPDLFTPKLLEVFQQNGVAINPNKTHYADRNSRRIVTGLKINELVNVDRRFVRNIRAALHAVEAQGIVEAQKTFQEKYGGSSLVAHLQGKISFLSHIRGQSDPVVRSVTLRFNKCFPKHLIKVTPTPSEIRDRSAWVIEDKNGDVVQGTAFFLKDIGLVTAAHCVEPNTEFQIYHPSKPANKFAVRVKKKCTHRDLALLEHEIPATEFFELARSLNAASQGDQLTAVGYPCFGPGDGVNTRLGTVSSLPVKRDVKLIEVTQTLTQGMSGGPLLDANNGVVGVIHKGGPEEGRNFAIAIEVLSEWIESS

SEQ ID NO: 324 - protein, 525 aa, unidentified
  source 1..525: note = Related to WHTM01000007.1; note = Hyphomicrobiales bacterium
MPRWGALFGQPARVAIPAELADEAALLAYLGLGAGELKKIWYYRGRMYQHFSIAKGPNKVRTISAPDGRLKFLQRKLADKLTELYRPRNPVHGFVAERSVKTNALAHMHRRFVVNIDLKDFFPTISQNRIEGMLASLGIDARVAEILARICCNNGHLPQGAPSSPVLSNMICFRLDKKLMGIAKEARCIYTRYADDITLSSHQPPTALFEATIPQAGRFSPDLLAPELRNAVHQNGFAINPNKAHYADRHSRRTVTGLKINELLNVDRRYVRNIRAALHSIETLGIKDAEKKFHEKHSGRASLAAHLHGKISFLTHIKGHSDPVVRSVTLRFNKCFPTRTIMVAPTPSEMRDRAVWVVEHSENHGTAFFLKGVGLVTAAHCVEGVDEVEIFHPSKHANKFKATVRKSDEHRDLAILDHQIPATEYFELDSISRTIAISDPMTALGYPSWGPGDRLNIRPGVVSTVTVKSAVQLIEVTQKLTQGMSGGPLLDGNGAVAGIIHKGGPNEGRDFAVHIEMLQDWLREG

SEQ ID NO: 325 - protein, 426 aa, unidentified
  source 1..426: note = Related to JAIEST010000134.1; note = Beijerinckiaceae bacterium
MGAIFGQPIRIIVPAELANEAALLAYLGVSADELRKIWYYRKRMYRHFSISKKPNKNRLISAPNDRLKFLQRALAVKLNELYSRRNPVHGFVPDRSIRTNALAHLRRRFIVNLDLKDFFPTIGQKRIEGVLVSLNIDARVAEIISCICCVNGHLPQGAPTSPVLSNMICFRLDKKLMDFAKEARCIYTRYADDITFSSHQPPTALFETTIPAAGRVAPDRLAPRLRDLFQQNGFVINPTKVHYADSHSRRIVTGIKVNEMLNVDRRFVRNIRAALHSIETLGIEAAEEKFHDKHGGRSNLVAHLRGKISFLNYIKGQSDPVVRSIALRFNSRFPAIPIKTAPTPSEIRDRAIWIVEQSKSQGTAFFLNGVGLVTAAHCVEGFAEVDVFHPSKLANKFKARVGKLDRHRDLAILDHGIPATEYFELQ

SEQ ID NO: 326 - protein, 426 aa, Rhodovibrio sodomensis
  source 1..426: note = Related to NZ_NRRL01000154.1
MFGKTVHISIPPELADEASLLTYLGLGADELKKIRYYRASMYHNFPIGTDGRKRRIINAPDARLKFLQRRISDKLADIYRRRNPVHGFVAERSVKTNALAHMRRKYVVNIDLANFFPTISQNRVEGMLLSLNLDASVAQIIGIICCNKGILPQGAPSSPLLSNMICFKLDKGLMNFSKEARCIYTRYADDLTFSSFHPPAALFETAPPPAGRLSSEQLASQLRRLIIQNGFSINERKLHYADRDSRRLVTGLKINQILNVDRRYVRNIRAALFSVERNGIKGAEKTYHKEHGGRGSLAEHLRGKISFLSHIKGQHDPVVRGLAIRFNQCFPHWPITVTPTKNEVRDRAVWVVENETSSQGTAFFLRGVGLVTAAHCVEGVNEVDIFHPSKPSNKFKAKIFKREPHLDLAVLSHAIPENEYFELSKS

SEQ ID NO: 327 - protein, 527 aa, Acidisphaera sp.
  source 1..527: note = Related to NZ_LMUJ01000012.1
MPLFGAFFGAPVRVTIPEALADETSLLTYLNLSGPELKKIWFYRARMYRHFSIAKSSTKVRLISAPDQRLKFLQRQLADKLDELYRPRNPVHGFVADRSVKTNALSHLHRRFLLNIDLAEFFPTITENRVQGLLISLGIDSRVADIIARICCNDGQLPQGAPSSPVLSNMICFRLDKQLMTIAKDTRCIYTRYADDITFSSYQPPVGLFEATLPPSGRFLPDLLTPALRGVIQQNGFVINPEKAHYADRHSRRIVTGLKVNELLNVDRRYVRNIRATLYSVEKLGAKEAEQKFHDSHGGRSSLAAHLQGKIAFLTHIKGRWDPVVRGITLRFNKCFPERALKVRPTPQEIRGRSVWVVENDPAQQQGSAFFLKDVGLVTAAHCVENTDEVEVYHPTKPANKFVARVSKKCEHRDLALLEHSISSTEFLELIRSERAVSQGDPLTAVGYPRFHVGDRLNARPGNVISLVARSGVEMIEVNQTLTQGMSGGPVLNGDDGVVGIIHKGGPGEGRDFAVSIAMLNKWLEEK

SEQ ID NO: 328 - protein, 526 aa, Mesorhizobium sp.
  source 1..526: note = Related to SUEQ01000018.1
MPSAARIFGKHFPIPIPPQLADEATLLAHLGLSTKELKKIWWYRGRMYHQFSIAKGAGKVRLITAPDRRLKILQSKLAPLLDQLYSVRHPVHGFVPARSVKTNAEAHGRRRFVVNLDLQDFFPTITENRVRGLLTSLNVDARVTEIIARLCCFNNHLPQGAPTSPVISNMICYRLDTELLRIGKGARAIYTRYADDITFSSYQPPALLFEGALPPVGRFSRDLLALPLRGTFQSNGFTINPDKSHYADRNSRRIVTGVKINAGLNVDRRYVRHIRALLHSIETLGLADANAKFVAAGGKGSIAAHLRGKISYIAHLKGRTDPVVRTLALRYNTSFSHQPIKLVPTVEERRDRSVWIVEHSANGGEQGTAFFLKDVGLVTAAHCVEGVSDFIVYHPTKPSNQASVTVLKRCEHRDLAILGHAIHDTEYFELGAASRAIAVDDVVKAYGYPGYGPGDKINVRSGAVSSLPIKSAVQMIEVTQELAQGMSGGPILDAHGEVIGVIHKGGPNEGRQLAIHIGVLQKWAQE

SEQ ID NO: 329 - protein, 526 aa, unidentified
  source 1..526: note = Related to REES01000140.1; note = Rhodospirillales bacterium
MPSVMRIFGNLIPIAIPPELAAEPPLLTHLGLSAKELKKIWWYRGRMYKQFSIAKNSGKVRLITAPDRRLKILQRKLAPLLDQLYLVRNPVHGFVPARSVKTNAEAHGRRRYVVNLDLQDFFATITENRIRGLLISLDIDTRVADIVARLSCVHGHLPQGAPTSPVLSNMICYRLDTELLRVAKGARAIYTRYADDITFSSYQPPAPLFEGALPAVGRFSPEVLAPRVRQTFDTNGFTINPDKAHYADRNSRRIVTGVKINAGLNVDRRYVRHIRALLHSIETMGLADAQAKYTATGGKGSLAAHLRGKISYITHLKGLTDPVVRALALRYNRSLGHRPIKLAPTIEERRERSIWIVENSAKAGKQGTAFFLKDVGLVTAAHCVEGDSDITVYHPTKPTNHAKVTVLKRCKHRDLAILGHTIHETDYFELEPTDHVVVVGDFVIAYGYPGYGPGDKINVRGGSVTSLPMKSAVHIIEVDQELAPGMSGGPILDARGDVIGIVHKGGPDEGRQLAVHLDELQTWVQE

SEQ ID NO: 330 - protein, 507 aa, Sphingomonas sp.
  source 1..507: note = Related to RCVT01000005.1
MADEASLLRHLGLSPRELKKIWWYRGRMYQQFSIAKGGGKVRLIMAPDRRLKILQSKLAPLLDQLYRVRNPVHGFVQLRSVKTNAEAHGRRRFVINLDLQDFFPTITENRVKGLLKSILIDPRVAEIVARLCCVESHLPQGASTSPVLSNMICFRLDTQLLQIAKSARAIYTRYADDITFSSYQPPAPLFEGALPAVGRFSPDMLAAPLRGAFESNGFIINPVKAHYADRNSRRIVTGVKINGGLNVDRRYVRRIRALLHSIELLGLDDAQQKYGSGGGKGAIADHLRGTISYITHLKGSVDPVVRSLATRYNRSFPARPIMLAPTVEERRDRAVWIVEHSADGGQQGTAFFLKNVGLVTASHCVEGDSDFVVYHPSKPSNRSKVTVLKRCAHRDLALLGHAAHSTDYFDLDVAARSAAVGDDVVAFGYPGFGPGDKINVRGGSVTSLPIKSGVPMIEVSQELAQGMSGGPILDAHGAVVGIVHKGGPEEARQLAIEIGVLLKWLAE

SEQ ID NO: 331 - protein, 524 aa, Sphingomonas olei
  source 1..524: note = Related to NZ_SSTI01000022.1
MSSAARIFGKRIPIPIPPEFADESTLLAFLGLSPRELKRIWWFRGRMYHQFEIAKGGGKSRLITAPDQRLSILQSKLRPLLNTLYRVRNPVHGFVPARSVKSNAEAHGRRRFIVNLDLQHFFPTITENRVRGVLEALGVDQRVAEIIARLCCFESHLPQGASTSPVLSNMICYRLDTDLLRLAKTGRAIYTRYADDITFSSNQPPAPLFDGALPTVGRFSPELLASALRDAFQTNGFILHPDKAHYADRNSRRMVTGVKINDGLNVDRRYIRRIRALLHSIETLGLADAQSKFAGLGGRGALAAHLRGKIAYISHLKGATDPVVRALAQRYNKSFGATPITLVPTPQERRDRSVWVVDHIDQYGSAFFLKGVGLVTAAHCVKGLSEVEILHPSKHTTTFSAKVLKRHDHRDLALLDTSTIPATEYFELDLATTPPLVGDPVTAVGYPNWAPGDRLNHRPGVVSLITPQAGVRKIEVSQMLTQGMSGGPILDANAGVVGIIHKGGPGEGRQLAIHLSVLQEWLKE

SEQ ID NO: 332 - protein, 536 aa, Rhizorhabdus sp.
  source 1..536: note = Related to JAGMXV010000066.1
MGDWRDWKGDLVSVARIFGKHFPLQIPQELADEASLLAHLGLGPKELKKIWWYRGRMYERFDIAKGGGKIRQITAPDKRLKILQSKLTPLLDQLYRVRNPVHGFVPERSVKTNAEAHGRRRFVVNLDLKDFFPTITESRVKGLLGALAVDDRVAEIIARLCCVNDHLPQGAPTSPVLSNMICFRLDTELLRVAKAARSIYTRYADDITFSSYQPPAPLFEGALPAVGRFSPDTLAPTLRNVFAGNGFVVNPDKAHYADRNSRRIVTGVKINASLNVDRRYVRHIRALLHSVETLGLGDAQQKYTDAGGKGVIAEHLRGKIAYVTHLKGLTDPVVRSLAMRFNKSFTARPIRLAPTVEEQRDRAVWIVEHSANGGKQGTAFFLKDIGLVTASHCVEGESDFTVYHPSKPSNQFKVSVAKRCEHRDLALLGHAIPTTDYFELVVATHPVAVGAVVTAFGYPGFGPGDKLNVRGGSVTSLPIKGGVQRVEVSQELAQGMSGGPVVDAQDCVVGIVHKGGPEEARQLAVAISALQDLAAE

SEQ ID NO: 333 - protein, 526 aa, Sphingopyxis granuli
  source 1..526: note = Related to NZ_CP093335.1
MPSAARIFGKHFPLPIPPELADESSLLAHLGLSPQELKKIWWYRGRMYAQFSIAKGGGKVRQITAPDKRLKILQNKLAPLLNQLYRVRNPVHGFVPARSVKTNAEAHGQRRFVVNLDLKDFFPTITENRITGLLRSLGVDDRVAEIIARLCCFNSHLPQGAPTSPVLSNMICFRLDTELLRAAKGARSIYTRYADDITFSSYQPPAPLFEGALPAVGRFSPDTLAPSLRDTFTRNGFAVNPDKAHYADRNSRRVVTGVKINAGLNVDRRYVRRIRALLHSVEKLGLRDAQQKYADAGGKGVIAEHLRGKISYITHLKGATDPVVRSLAIRFNKNFRARPIKLAPTIEEQRDRAVWLVEHSANCGQQGTAFFLKDIGLVTASHCVEGVSDFTVYHPSKPSNRFEVTVAKRCPHRDLAVLDHAIPASDYFELEAAAQSVAVGDAVTAFGYPGFGPGDKMNVRGGSVTSLPVKSGVHLVEVSQELAQGMSGGPIVDGHDGVVGIVHKGGPEEARQLAIAIGVLQKWVAE

SEQ ID NO: 334 - protein, 501 aa, Brevundimonas sp.
  source 1..501: note = Related to CP038440.1
MTSARRMFGKQIRIPLPPELANPDALLAYLEVSPAELKKIWWFRGRMYSEFNIAKRSGKVRTITAPDRRLKIIQSKLAPLLDQLYRPRHPVHGFVPNRSVKTNAEAHGRRRFVVNLDLKDFFPTITEKRVVGLLRALGVEKGVAEIVARLCCHMGQLPQGAPTSPVLSNMICYRLDTDLQQVAKSARAIYTRYADDITFSSYQPPTTLFETAVAGAGRFSPEVLAPQLRGAIASNGFLINPDKAHYADRNSRRMVTGVKINAGLNVDRRYIRRIRAMMHSFERVGLAEAQAKYASGGGKGSLAAHLRGKIAYVAHLKGQTDPVVRSLAQRYNKSLPAKPIRLTPTVEERRDRAVWVIEVPLKHNGTAFFLAGVGLVTAAHCVEGLSEVEVLHPSRHTTTFTVKVRHYDKHRDVAVLDHGTIPATEFYELEPATKPAAVGDAVVALGYPLWGLGEGLNIRPGEVSSLTVRSTSAGFSARRPSKRSERGPSLSGVDCASASRS

SEQ ID NO: 335 - protein, 360 aa, Mesorhizobium tianshanense
  source 1..360: note = Related to NZ_VLKT01000135.1
MSNMICYRLDTELLRVAKSARAIYTRYADDITFSGYQPPAPLFEAGPPPVGRFSSDLLSTALRVAIEGNGFTINPQKAHYADRNSRRIVTGVKINSGLNVDRRYVRDIRAKLNSVEKHGLKASQARHSAKNGKGDICSHIRGKIAYVVHLKGLADPVVRSLALRYNRSFADQPMKVTPTDSERRDRSVWIVEHSGNEGEQGTAFFLSGVGLVTAAHCVENPEDLLLYHPSTPSNQTRVSVRKRCEHHDLAILDHAIHPNEFFEMEAATVAAAVGDDVTACGYPGYGPGDRLNIRNGTVTSLPRKSAIDRVEVSQELSQGMSGGPVLDAGGRVVGIIHKGGPNEGRQIATAIHELKKWAAS

SEQ ID NO: 336 - protein, 526 aa, Aquibium oceanicum
  source 1..526: note = Related to NZ_CP018171.1
MPSAARVFGKLYPINIPAALGDEATLLAHLGMSPPELKKIWWYRGKMYRRFSITKGSGKTRTICAPDSRLKILQRKLAPLLGQIYRVRNPVHGFVLDRSVKTNAEAHGARRFVVNLDLQDFFPTITENRIVGLLTSVGLERRVAEIVARVACYDGHLPQGAPTSPVLSNMICYRLDKALLRIAKSARTIYTRYADDITFSGYQPPVALFEAGPPSVGNFSPELLSAALRTAVQGNGFIINPHKLHYADRNSRRIVTGVKINSGLNVDRRYVRDIRAKLSSIERHGLKASQATYFSKGGKGDIGTHIRGKIAYVGHLKGLADPVVRSLALRYNRSFADHPVKITPTESERRDRSVWIVEHSGNGGEQGTAFFLSGVGLVTAAHCVEDPEDLLVYHPSTPSNQANVSVRRRCQHRDLAILDHAISSNEFFEMEAATTAVAVGDDVIAYGYPGYGPGDRLNIRSGKVTSLPRKHAIDRVEVSQELSQGMSGGPVLDASGKVVGVIYKGGPNEGRQIATAIHELKKWTAV

SEQ ID NO: 337 - protein, 524 aa, Breoghania corrubedonensis
  source 1..524: note = Related to NZ_QAYG01000015.1
MPRNPFGPPIRAAVPAELASEAALLAHLGMTVGELNKIRWYRDQMYQTFEIAKSGGKSRLISAPNKRLKHIQRQLLPLLYQLYQTRSPVHGFVFNRSVKTNAQSHLRRRFVLNLDLQDFFPTITENRVVGMLKAIGIGATVAVAIGYLCCIHGHLPQGAPTSPVLSNMICFRLDRELLAFAKASRCIYTRYADDITLSSHQPMSALFEGSPPPAGNFANDLLVSALTAIVVGNGFTINPMKAHYANRHSRRMVTGLKINDLLNVDRRYIRNIRAVLHSVETLGFVGAQTKYATSGGTGSLAAHLRGKIAWISHIKGPSDPVVRSIALRFNTCFADRKIMVTPTPIERRERSVWIVEHDDGQGTGFFLSGVGLVTAAHCVTGKREVEVFHPSKHANTFKATVLQRDDHLDLAILGHEIPATEYYELNRAALPVVTGDPMTAVGYPKWAPGDPLNVRPGVVSTVTIKSAVRLIEVTQKLTQGMSGGPLLDANGDVAGVVHKGGPEEGRDFAIHVEVLNSWLAHLAS

SEQ ID NO: 338 - protein, 495 aa, Methylobacterium sp.
  source 1..495: note = Related to JAIETD010000062.1
MTAKELNKIRWHRGGMYQSFEIAKNKDKGRLISAPDDRLKHLQRQLLRLLDPLYTVRNPVHGFVLQRSVKTNALSHLRRSFVLNLDLQDFFPTITENRIVGMLEALGIGSSVAAAIGYLCCINGHLPQGAPTSPLLSNMICFRLDRELLNFAKVTRCIYTRYADDITFSSHRPMTALFEGPLPLAGHFAPNLLVPSLVALFAGNGFTINPSKAHYADRHSRRMVTGLKVNELLNVDRRYIRNIRAALHSVETLGTVGAQAKYEASGGSASLASHLLGKIAWISYIKGSSDPVVRSIALRFNWCFPDCKIEVLPTPIERRDRAVWVVEHDDGQGTGFFLNGVGFITAAHCVAGKKEVEIFHPSKHSNSFKAIVLKSDDDMDLAVLSHEIPATEYYKLDQAALPIATGALMIAVGYPKWAPGDPLNVRPGVVSTITVKSAVRLIEVTQKLTQGMSGGPLLDADGAVAGVIHKGGPEEGRDFAIHIDVLNSWLAAAAP

SEQ ID NO: 339 - protein, 560 aa, unidentified
  source 1..560: note = Related to JAFBAI010000383.1; note = Xanthobacteraceae bacterium
MSREDVRAIRLLREWRDWRGDLVPQNPFGPPVRIDIPAELASEAALLSHLGLSVMELKKIRWCRGRMYQSFDIAKVKNKIREINAPDSRLKHLQRQLLPLLDQLYRVRKPVHGFVADRSVKTNALAHLRKHFVLNLDLKDFFPSITENRVVGVLKALGIDGSVAAVIGYLCCVNGQLPQGAPTSPVLSNIICFRLDRKLLAFAKDARCIYTRYADDITFSSYQPMTTLFEGPLPPAGHFVPDLLAAAFASIFVVNGFAINPAKAHYADRHSRRMVTGLKINELLNVDRNYVRNIRAALHSIETIGGIAAQRKFEARGGTGSLAAHLLGKLSWLRHIRGQTDPVFRSVAVRFNNAFPTHKIDVTPTPAEVRDRAVWVIEHYEGDIDQWYQGSAFFLRGVGLVTAAHCVTGASEAEVYHPGKPANKFKVTVLKIDDHRDLAILAHMIPETEYLELERSTQVITVGMLLTAVGYPSFGSGDRLNVRDGNVSSLPVKHGVQYIEVQQKLSPGMSGGPLLDAYNAVTGVVHKGGPSEPRDFAIHIDVLNAWLASASASFGPNGSA

SEQ ID NO: 340 - protein, 419 aa, Erythrobacter sp.
  source 1..419: note = Related to NZ_CP021912.1
MVAYLSLTEAELKKIRWFRRGMYHYFELAKGNGKRRRIMAPDARLKHLQRALLPLMENLYRVRNPVHGFVRDKSVKTNAAAHLRRRNLLNIDLKDFFGAITENRVVGVLEAIGVPGDVAAAIGYLCCCEGSLPQGAPSSPLLSNMVCFRLDRELMRYAKEHRCIYTRYADDITLSSHQPMASAFDGPIPPAGTVQSELLDPELRGIIGSNGFELNPDKIHYADRNSRRMVTGLKVNELLNVDRRFVRNLRAMLHSIEIKGHADAKARFASLGHSGSMSAHIRGKIEWLASIKGTSDPVVRGIILRYNACFPGKAIAVSPTDEERQDRATWITENKNGQGSLFFLKGVGLVTAAHCVADLLNLEIFHPSKHANRFGATVTKYDKDRRRLRLGLKRVLDPIEAEMCACLTAPLFGTGPRIL

SEQ ID NO: 341 - protein, 545 aa, unidentified
  source 1..545: note = Related to JAGOQV010000032.1; note = Alphaproteobacteria bacterium
MHNPFGPSTPPRISIPQELENKESILAYLDVNPEELKKIWWFREKMYQAFEIQKRGGKARVISAPDDRLKYLQHKILLLLNRLYRVRNPVHGFVPQKSVKTNATAHLRKRFILNIDLKDFFPSITENRIIGVLKSIGIDDQVAQIISRICCSNGCLPQGAPTSPVLSNIICFRLDKNLMSLAKDTRCIYTRYADDLTFSSHQPMIKLFEGVITPAGHVSPELLSLHLRNIFLANGFIINPDKVHYADRNSRRMVTGLKVNEFVNLDRRYIRNIRAILHSIKVSDVKAVETKYKQDYGGKVDLGKYLRGKITWLGFIRGQSDPIFRAIAIRFNEEFPDLKIETTPTFIEIRDRAVWVIEYCVDTLAGLKAFQGSCFFLKDVGLVTAAHCVLDENEPMKELELELHHPSKPANKFKAKICMFDKHRDLAILSHKIPATEYYELELSTKTISVDDELTAVGYPSFGPGDQTNIKKGTVSSLPKKSDVQLIEVTQKLAQGMSGGPLHDSNFAVVGVIHKGGPSEGRDFAVHFDELNKWLSTPPISKILG

SEQ ID NO: 342 - protein, 500 aa, Mesorhizobium sp.
  source 1..500: note = Related to SUEX01000026.1
MSGKELKKIWWFRGRMYHQFEIAKREGKTRIINAPDKRLKHLQRQIAPLLDQLYSVRNPVHGFVTGKSVKTNALAHLRNRFVLNIDLKDFFPSITENRINGVLESLGVDSGVSRIIARLCCHNAQLPQGAPTSPVLSNMICFRLDKELLAFAKSMRCIYTRYADDITFSSHQPMVALFEGSAQPSGAFALDLLSSTLRNIVNGNGFAINPEKAHYADRHSRRTVTGIKINEFLNVDRRYVRNIRAALHSVEQVGKKAAQEKFEKDHKGKCDLGAHLGGKLSWLRYIRGQSDPVFRAIAIRFNANFPDRKIDVTPTSHEVRDRAVWVVEYCEGEGENLKMLQGTCFFLKDVGLVTAAHCVEGVEEVEVYHPSKRSNVFTATVVKRDKDRDLAILEHSIPTTEYFEIERSAQAVAMGDELTAVGYPSFGPGDGLNVRDGKVSSLPVKSSLKLIEVTQKLSQGMSGGPLLNGDNTVVGVIHKGGPGEARDFAIHIEMLNAWLS

SEQ ID NO: 343 - protein, 542 aa, Rhodopseudomonas palustris
  source 1..542: note = Related to CP019966.1
MRAWRDWKGDLVTLPLFNSSIRTSIPAELADETAFFLYLQMSPREMIKIWWFRRRMYHQFEIAKGKGKTRIIEAPDDRLKHLQRKLLPLLDQLYCVRHPVHGFVAGKSVKTNAQAHLRKRFVLNIDLKDFFPSITENRVAGVLEALNIDGRVSRLIARLCCHNGHLPQGAPTSPILSNMICFRLDKELLVFAKSMRCIYTRYADDITFSSHQPMAAMFEGAAAPLGRFNSDLLIQPFRNIIASNGFSLNADKAHYADRNSRRMVTGIKVNELLNVDRRYVRNIRAALYSVEKLGKKGAQDKFESEHGGTSKLAAHLAGKIAWLAHIRGQSDPVFRAIAVRFNKNFPEARIAVTPTSEEIRDRAVWVVEHEEAQGTAFFLKGVGLITAAHCVEGVKEAQLYHPSKRANEFTVRVVNRDKDRDLALLEHTIPSTEYFELDRSNQPVAVGQELTAVGYPSFGPGDRLNVRDGKVSSLTVQHGVRLIEVTQKLPQGMSGGPLLSSQCAVVGIIHKGGPDEGRDFAIHMDVLAAWLAEKPPGDGCTS

SEQ ID NO: 344 - protein, 525 aa, Mesorhizobium sp.
  source 1..525: note = Related to NZ_WOAC01000030.1
MPPSFFGIPVVRVAIPPELASEAALLAYLGVSAKELKKIWWFRGRMYHQFEIAKGNGKSRIINAPDKRLKYLQRKIAALLYHLYRVRNPVHGFVAGKSVKTNALAHLRKRFVLNIDLKDFFPSITENRVTGVLESLGIDSRVASIIGRLCCHNSHLPQGAPTSPVLSNMICFRLDKELLAFAKASRCIYTRYADDITLSSHQPMTALFEAVPPSGHFAPDQLKPAFRNIIVTNGFAINHDKAHYADQHSRRTVTGLKINELLNVDRRYVRNIRAAIYSVENLGKKTAQKKFESSHGGTSDLGKHLEGKITWLRHIRGQSDPVFRSIAVRFNTSFPERKIEVTPTAAEVRDRAVWVVEHFEGDMAQGSAFFLKDVGLVTAAHCVAGVEEVEVYHPSKPSNAFKAKVLKRDEPRDLAILEHAIPPTEYFELEQSNHSVVVGEGLVAVGYPSFGPGDRLNVRDGKVSSLPVKHGVKLIEVTQKLSQGMSGGPLLDHNDAVAGIIHKGGPGEGRDFAILIEMLNDWLAE

SEQ ID NO: 345 - protein, 513 aa, Notoacmeibacter sp.
  source 1..513: note = Related to JAIOIW010000047.1
MDNETALLKYLGVSADELKKIWWFRVRMYHQFEIAKGKDKTRTITAPDERLKYLQRQIAPLLDQLYRVRNPVHGFVDGKSVKTNALTHLRKRFVLNIDLKSFFPSITENRVIGLLEALGIDNCVASITARLCCYNSHLPQGAPTSPVLSNMICFRLDRELLAFAKGTRCIYTRYADDITFSSHQPMAALFEGSAPPSGHFSPDLLIPALRNTFASNGFTINPHKAHYADRHSRRMVTGLKVNELLNVDRRYVRNIRAALYSVETLGKAAAQTKFASNHGGTSDLGAYLQGKITWLRFIRGQSDPVFRAIAVRFNASFPDRKIEVTPTADEVRDRAVWVVEYCEGEGEKLKTLQGSGFFLKDVGLVTAAHCVEGVDEVEVHHPSKPANKFKATVVKRDKDRDLAILEHTIPATEYFQLNGATQAVAVGDELTAVGYPGFGPGDRVNVREGKVSSLATKHAVELIEVTQKLSQGMSGGPLLNSDNAVVGVIHKGGPDEGRDFAVRIEMLNTWLAE

SEQ ID NO: 346 - protein, 527 aa, Rhizorhabdus wittichii
  source 1..527: note = Related to CP021181.1
MPNLPPPFGASIRLALPRELADENALLVYLGLSPKELRKIWWCRARMYQHFDIAKGRDKVRTISAPDKRLKYLQRKLAALLTQIYRPRHPVHGFVVGRSVKTNAVAHLQKRYILNIDVKDFFPSITENRVEGLLHSLGVDMRVAAIITRIVCNEGCLPQGAPTSPILSNMICFTLDRRLMALARDNRCIYTRYADDITFSSHQPLASLFEGASPSAGQITPDLLSPALRDTFVHNGFALNPDKAHYADRHSRRTVTGLKVNELLNVDRRFVRNLRAALHSVETLGIAAAQQVYQDRYGGSASLGAHLEGKIGWLRHIRGQSDPVFRALALRFNACFPDRELRLTPTVSEIRDRAVWLVENDETIEQGTAFFLAGAGLVTAAHCVEKATELTLYHPSKPANKFVATVLKCDAHRDLALLGHDIPPTEYFELERSTAAVLVGQELTAAGYPGFGPGDRLNVRLGTVTSLPIKRGVHMIEVSQKLGQGMSGGPVLDEMLGLVGVIHRGGPGEARDFAIHLDVLNCWLAEE

SEQ ID NO: 347 - protein, 477 aa, Caulobacter sp.
  source 1..477: note = Related to QHJY01000004.1
MYQQFDIAKSGKKVRSISAPDKRLKHLQRQIAPLLDSLYRVRHPVHGFVANKSVKTNAQAHLRKRFILNLDLKDFFPSITEGRIGGLLQSIGIDSRVADIIARLCTNDGRLPQGAPTSPVLSNMICFRQDKQLMSFAKENRCIYTRYADDITFSSDQPMAALFESAVPSPGRFPPDLLVTRLRAIFMANGFEINADKTHYADRHSRRMVTGLKVNELINVDRRYVRNIRAALYSVRTLGAEEAQKKFETKLGGKSNIGSHLEGKIAWLRFIRGQSDPVVRAMALRFNAAFPDRKIDVVPTRDEVRDRAVWVVDNDTDISQGSAFFLKGVGLVTAAHCAKGAKEVEVYHPSKRSNKFKATVVKRDEQFDLAILNHEIPTTEYYELERSLTAVAVGDDLTAIGYPDFGPGDGLNVRGGKVSSLPVKNGVSMIEVTQKLSQGMSGGPLLDDNDAVVGVTHKGGPDEGRDFVVRIEMIDKL

SEQ ID NO: 348 - protein, 545 aa, Methylobacterium oryzihabitans
  source 1..545: note = Related to SACP01000011.1
MPSSSAFGFPIVSVAIPCELKSEEKLLEYLAISTKELKFVWWYRERMYRKFELGSKKGKVRAIAAPNNRLKYIQRRIAVLLNQIYRVRNPVHGFVKEKSVKTNALSHLKKKYIVNIDLKDFFPSITENRVIGVLNSLGIERSVSQIIAKFCCCNGHLPQGAPTSPVISNMICFKMDKSLMSMAKEMRLIYTRYADDITFSGYRPMTVLFEGAAPFPGRFDPNQLASELRQIISGNGFVLNANKAHYADPNMRRMVTGLKINEIINVDRRYIRNIRSALYSVQTIGETAAQDKYQIKYGGRSSLGAHLEGKITWLRYIRGQSDPVFRAIAVRYNLCFPNRRKIEVIPTPEEVRDRAVWVVEHSEGDMAQGSAFFLKGVGLVTAAHCVEEATGLQQISLYHPSKPNNLFAATVVGIDKHRDIAILEHSIPLTEFFELESSFRVVQVGDNMTAVGFPGFAKGDRLNVREGKISSLPAKSGVRLVEVTQKLTQGMSGGPLLDSDNKVVGIIHRGGPGEGRDFATHIGVLNDWLRERPEGVSKKIEEVRG

SEQ ID NO: 349 - protein, 455 aa, Martelella mediterranea
  source 1..455: note = Related to SMAR01000071.1
MPNFFGDFHTPRVKLPEEFSSKEAFHQYLGLSTAELKKIWWYRERMYKQFPLAKKNGKNRLISAPDKRLKFLQGRLLLLLNQIYRARNPVHGFVFDRSVKTNAEAHLRKRYVLNIDLKDYFLSITEKRIVGLLESLGIDTEVACIAARLCCLNSRLPQGAPTSPILSNMICFRLDKRLQKFSKENRFIYTRYADDITLSSQQPMTSMFKSGTIVSGSISPDDLNATFVDIISGNGFQINPQKVHYADRNSRRIVTGIKINELLNLDRRYVRNIRAALYSVNTLGQIEAQRKFEDVHGGDCDLSRHLRGKITWLGYVRGRSDPVFRSIARRFNGCYPDMKIETVPTAKEVRNRAVWVIEHFEGDWAQGTAFFLKGVGLVTAAHCVKGAEKIKIYHPEKRSNEFDVHVVKINEDLDLAVLHHSIPTTEFYEFDQTTKDVAVGDELIALGYPGNPPEK

SEQ ID NO: 350 - protein, 479 aa, Segnochrobactrum spirostomi
  source 1..479: note = Related to NZ_VWNA01000001.1
MYHNFNIGHHGRKLRVINAPNDRLKYIQRRLLKVISGIYSVRDPVHAYVEGRSIKTNAASHLKSKYIVNLDLSDFFPSITEDRIVGLMNSLCITPRVSAIIGRLCCMGGYLPQGAPTSPMLSNMICFRMDRDFLSIAKRYRYIYTRYADDITISSRSPLTNLFASGAPPVGHFDANILSKDVISIIYTNGFNINSQKCHYADRHSRRMVTGLKVNEFVNLDRKFIRNIRSTLYSIEKFGIAKATDEFISKHAGKGTLHAHLRGEIEWHGHIRGRSDPVFRKNADRFNLLFKPKILVEPTYEEIRKFAVWIVDNNTACDQGTCFFVHDIGLITAAHCVEGATDIDVYNPLNPTQKYKANVQKIDKHLDLAILSHSIPTSQYRNIKISKVRASVGQSIIAAGYPDYGPGDSLSIRTGTVCSLSMKSGVGRVEVTQKLSSGMSGGPLIDRDNCVFGVIHKGGSTEEKDIAVEISELTKLVHA

SEQ ID NO: 351 - protein, 563 aa, Cereibacter sphaeroides
  source 1..563: note = Related to CP031750.1
MNGGEHLVPSGSYIFGSGKPRIGIPDELTTLSKMLDYLGISDKELLKIRLSRSFMYSEFTIPSPKKARLISAPDARLKFLQGRLKSSFEKFYRPRLSTHGFVSGRSIITNAAIHARKRHVLSLDLKAFFPSITENRVRGLFRNLGFATDVCDAITTICCHAGYLPQGAPTSPIISNLICFSLDRDLHSFAKKQNLVFTRYADDISISTNGTPAGLFSATVPSPGKLDISALSVDLIDVVVKNGFFLNEEKIRFSSGSHRKIVTGLIVNEFPNVPRTYISNIRAILFSIMKDGYAVAEAKFRQKRPSAKRSLEQYLRGKLNHLANVRGKGDPIYRSLADKFNKEFLPSLATEPTPRERQSSGIWIIEWQYNDRKIDKLYGEAEANGQGIMSVTEGAQGTAFFLDGVGLVSAEHCAPPEEIDLEFFRVFHPSAPNLKFEVKVAKRCKVRDICILKHDVPENKFEGLKPCRVPARGGDVVRAFGFTDYQVGDAVTTSRGEVSHVATRSGVKLLNLSFKIGQGMSGGPIMDRMERVVGVVHKGGPLELRDYAVTLNAVLSLHEEASL

SEQ ID NO: 352 - protein, 535 aa, Bradyrhizobium cytisi
  source 1..535: note = Related to VSSR01000016.1
MLCIGREGGGAPFTMPTLPKALGSANDFYAYLGVGAGERKFLEKHAFHRYKRVIVPKRRGGTRVLMVPDRRLKFLQRKAHQLLNQLYRPRTPVHGFVKQKGAISNANEHQRRPYLFNIDLRNFFGVISRRRVLGMLISMGLPDDAAEAVCSVCLTANQLPQGAPTSPILSNLVAYRLDRDLMKFAKTYRLKYTRYADDISFSSYAPPLALFNAGLPIPGRVKSDQLSVELSTVLATNGFEIAPDKVWFAGPKSRKEVTGLVVNEFTNLKRSFVRNVRAALYKTEKLGLAAAQSAYQKKYTTNATLEQVLRGRLEWIAQVRGRSFDPYRTLAKRFNNLFPNSPLPILPTHEETAERAVWVVEFFADEDNCAQGTAFFLAGVGLVTAHHVLEKLPPGAHADLYRPSGGGNKFKATPSKRSCPIRDLMILEHDVPTTDYLSLPVVTSPEQRDDKIVALGFPDYGPGDQLSRRGGQIYGRATKHGVKLLEVSAILSDGISGGPVVNDQHQVIGIAKKGGIEERKQLAVEVSELLKLADE

SEQ ID NO: 353 - protein, 484 aa, Bradyrhizobium sp.
  source 1..484: note = Related to JADPJU010000115.1
MLSDTAYFTYLGVGAKERQFLEKHAFYRYSEATIPKRRGGTRTLLVPERRLKFLQRRTHLLLTQLYSPRAPVHGFVAHRGAITNANAHQSRPYLLNIDLRNYFGTITRRRVLGMLQSMGLDEAVALAVCSICMTRNQLPQGAPTSPVLSNLIAYSLDRDLMKFAKDYRFRYTRYADDISLSSYAPPVALFEQGVPPPGKMTVEQLSASLRSVITSNGFEIAPEKIWFAGPKSRKEVTGLVVNEFTNLKRTFVRDLRAALHKVETMGGAAAEKDFQARYKTTASLEKILRGRLEWIAQVRGRSFSAYRTLAKRFNQQFPASAVTILPTYAEIAEHAVWVIDFFNGTVCEQGTAFFLEGVGLVTADHVLQNLPVGVSAEIYRPSGGGKKFKATPSSRRCPYRDLAIVDHDIPTGGYLSRPVTSSPERRDDDIIAMGFPNYGPGDQLSKRRGHIIGSATKHGVKFIEVSAMLPGGISGGPILMIAIR

SEQ ID NO: 354 - protein, 526 aa, Bradyrhizobium sp.
  source 1..526: note = Related to NZ_JYMS01000026.1
MPTVPAELKTANALFAHLGVGSAERKFLEHHAFYRYTEVAIPKRRKGERKLLVPERRLKFLQREMLKLLSQLYVPRDPVHGFVVGRGALTNASAHEKRPYLLNIDLKNFFGVIARRRVRGMLLSFHLEEEIAEAICDICTTRNQLPQGAPTSPMLSNMIAYRLDRDLINFSKTHRLRYTRYADDISLFSYTPPMGLFNAGLPNSGRVAEEQLSTGLRSVFSTNGFETAPEKIWYSGPDFRKEVTGLIVNEFPNVKRTFVRNLRSSLYKAETMGISAAEKDYQKRYGTTASLQQVLRGRLEWIAQVRGRSFGAYRTLAKRFNAIFPASPIAVLPTYDEVAEQAIWVIDFCEDVAGKPEPTCAQGTAFFIANIGLVTAHHVLADLPPGYSAVLHRPSLPGKKFKATPTKRQCPYRDLMILEHNVPATDYLSLSAATSPERRNAPIVALGFPSFNAGDELGTRSGLVVGNATRHGVKMLEVSALLLSGISGGPIVNDRAQVVAVAHKGGYEENKQLGVIVSELIALANE

SEQ ID NO: 355 - protein, 518 aa, unidentified
  source 1..518: note = Related to nan
MAALPPQLTSVAALHAYLGVGAGEARFLSRYAHHRYRAVNIPKRRGGFRNLLVPEDRLKFLQRKMLELLEPRYKPRPAAHGFVVGRSAITNANSHQARPYLLNLDLENYFGNITRNRVHGMLQAIGFAPEVARAICHICIVNNQLPQGAPTSPLLANMVSFRLDKDLTQFSKANRIRYTRYADDITFSSYVRPVALFSEPLQEAGALSVEGLSKELRLIISSNNFTINPVKTRYADRKSRKEVTGLIVNEFTNVRRTFIRDLRASLYKIDKLGLSAAQTSYNEKYGSDALLKDVLRGRLEWLAQVRSRSFYTYRTLAQRYNKHFPDNPAPIDPTNEEVAKSAIFVIEHFDGDGAQGTAFLLDGVGLVTAFHTLDGMVSEWADLYRPHEPTKKFRAKVGGKFCKHRDIALLEHDIPAEDQASLRPATGAEHVKSSIIALGYPEFASGDGLSERTGKIVGRSTKSAVRYVEVDAILGDGLSGGPIVNDRYEVIALTHKGGLLESKQLGVDIVEITKVAEA

SEQ ID NO: 356 - protein, 517 aa, unidentified
  source 1..517: note = Related to SDYD01000559.1; note = Alcaligenaceae bacterium
MPTLPPELMTVPALYAKLGIGGAEAKFLAHYVRHRYRASQIPKRRGGYRTLLAPDNRLKFHQRELLDLLTPLYRPKPAVHGFVAERSPITNANAHQGRPYLLNLDISNYFGVITRNRVRGVLIAVGMPAAVADAVCNLTVVDNQLPQGAPTSPLLANMVTFRLDRDLTSFAKTHRLRYTRYADDLTFSSYVRPTALFAEAEPAPGLIDIAELAPVLSGLITGNNFNLNPVKARYCVSKTRKQVTGLVVNEFTNIRRDFLRNVRSSLYRMETLGVADAEAEYQSKYDPKAKLHSVVRGRLEWIAQVRGRSFEPYRILAGRFNALYPAATPLPINPTNDELLAKAVFVIDYGKGKNMAQGTAFFLEGAGLVTAHHVLAKMQSGSATLYRADEPTKKYKARFSARVCSHRDLAILDHDVPVSEQTFLKQAAGIDRIKSTVTVVGYPEFGPGDSLVQMEGRIVGRNTKSAVRYVQVDMQVGDGLSGAPIINDRYEVVAVGHKGGPSESKQLGIDVAEVHGL

SEQ ID NO: 357 - protein, 567 aa, Roseomonas sp.
  source 1..567: note = Related to JADCGG010000223.1
MTRRVNATFDRMLPQDVAVAFGGLPAIRRRRRLSFMRHIPQQLASESELLVHLGVGAEELAFLRRWTGFKYRTVKISKRSGGERTLLIPDDRLKFLQKKILGILLNLYRPRAPVHGFTKDRSALTNAKAHEGRRFLLNLDLKDYFASVSRNRVVGLLEKLGIDAAVADVIAAFCIFRDQLPQGAPTSPILANMVTFRMDRELMEFGQKHHLKYTRYADDLTFSSYRPPTLLFKDGLPKEGKITEKALSDEIRLIINSNGFDLNSDKIWFSATRSRKEVTGIIVNQFPNVKRSFIRELRVLLHKAETLGLPQTEKDYQSFSGKNAPLEQVLRGRLEWISQIRGRDFPCYQILATRFNALYAKKPLRLPPSQEDVLQKSIWVIEYHPKESEKRECLIDIQGTCFFLKQVGLVTAHHVVSELPKGTRFSVFRPTHSWQKYEAWSSEITCQYRDLAILHHNIPPHAFLELEAANSQAVDQTRIKALGFPNFGPGDTLARIPGEVIRTLTKSAVKQIEVTAALPSGISGGPIIDAAQLRVLAVAVKGGATEDRQVAVAISELQTLFKEHPGS

SEQ ID NO: 358 - protein, 526 aa, Yangia pacifica
  source 1..526: note = Related to JAIVAG010000015.1
MPYNPFVVHRKPKVPEGLRTLPVFLSDLGVSESELRLISAKKVEQYHLVSVRKRSGGMRTLSVPNERLKYIQKHTASLLAPLYQPRWCVQGFVKGRSALQNAQRHLGRKHLVKVDLKDYFNQVTVSRAKGVLRYFELDAGVIDAILTFCTLFGKLPQGAPSSPLLANMVTFSLDQELVRYARTNRLKYTRYADDIVLSSFSKPRLLRPSVTADYCKLTIEDVQEDFAKIFSNQGFELNEEKMRYCGQRASRTVTGYTINEFANVPREHIRRIRSILNDIEKRGYPLAQRRFSETTHSIKSLKASLKGRLNWVSSTKGVSDPVYRRLALRFNGLFPDDCLEIGPDYSKLAQLSTWVIEAERKTNGVPEAQGTAFFLKGVGLVSAAHCLPGGCNYSVFNIDNPSKTYPATIAKTHNHIDLAILDHSIPAESYLALELSDRQANLGEEVFSWGYPEHGPGKRITQKSGRVSSKPRVSGVDMYAVDMKLYQGTSGGPILNSSSAVIGVTHKGGHGEAHDLAILIKHLKDL

SEQ ID NO: 359 - protein, 311 aa, Epibacterium ulvae
  source 1..311: note = Related to NZ_PHJF01000002.1
MPTAISVAFGKTPTPPVEFSSMAALKTHLKISDKELLVIRKHRSKMYSHFIIPKKSGGVRFIDAPKPRLLYLQRRLLEVLVKMHKPRNPVHGFVRKRSAITNAEEHLNRKHVMNIDLKDFFPTITQDRVSSLLRILGIPSDVRAAILSICCANGRLPQGAPTSPVFSNMICLRMDRQLMGFCKTRRIKYSRYADDLTFSLYTAPHQLFSESVPSPGKLASSQISRELKSIILDNGFVLNEDKLRYFGPSSRKEVTGLIVSDFVNVPRKFVRNIRATIFDIEKNGFPAAQIKFSTLYRKTNPLSEHLRGKIV

SEQ ID NO: 360 - protein, 549 aa, Stenotrophomonas sp.
  source 1..549: note = Related to NZ_CP025996.1
MDIGSLRCAYDYDKLGTLFGVPGAALKKNLYSSRGYTDFTIPKKSGGVRLISAPGRLRKQLQRKLLPVLDDVYKMGPAVHGFAKGRSVRTNALPHESKGLVINFDLKDFFPSISFQRIRGVFLGHPFRLDWTVANILAQMCSLDGVMPAGAPTSPVLSNIICAKLDKRLSALAARLGGTYTRYADDLTFSFDRPLAKLSSIAMIDEEGKPAVGASVSEIVTSEGFAINVEKFRIAAKGSRKAVTGLVVNERVNVKRSWYLKLESAIYAVEKFGLNPVAAKMFPQEEVPGVAPARLLRQLHGKISYLRMIRGKGDWLAAEMAHRFNTLHGNVRLRVPSVEMISNPNRQVRGVHIVVAYAAAVPVFDPTEEQGTAFTTPSGLLVTAAHVLEHEDTKTLLPFVYVMNERKLSLVACDVLAVDWDRDIAILRVRDDKNRVSAERSRYGLGQDPHQGETLISIGYPDYARGQHGSAFETPVTKLFKIKVPGGQEILKARVGGPIQGGMSGGPAIDSNFDVRGVILKGVANPGGVPEIIAISEVRRVAQANGLNL

SEQ ID NO: 361 - protein, 550 aa, Xanthomonas sp.
  source 1..550: note = Related to NQYP01000025.1
MDIESLRCVHSYDSLGALFGVPGSTLKNNLYKSRGYTDFTIPKKSGGVRLISAPGRLRKKLQHKLLPVLYSAYKMGPNVHGFAKGRNVRTNALPHATRKVVINFDLKDFFSSISFQRIRGVFLGTPLRLDWSVANILAQICSLDGVMPAGAPTSPVLSNIICAKLDKRLSALAARLGGSYTRYADDLTFSFDRPLTQLRSVAILDDEGKPLVGASISEIVTSEGFSINMEKLRIATKGSRKTVTGLVVNEKVNVKRPWYFALESTIYAMEKFGVDEVAAQKFPEEKTPGVAPARLLRQIHGKVSYLSMVRGKGDWLASDIAHRFNKLHETLQLRVPSVELISQLVRRARGVHIVNASTDPLFVFDLGQSQGTAFTTSSGIMVTAAHVVERDDTKTILPFVYVMNERRLALVICDVIAIDWNRDIALLRVRNDKHRLDLERSRYRLGRDPNQGDNLVTVGYPDYTRGEHATAVNSPVTRVFKNKATSGAHDIRKARVDGPIQSGMSGGPALDSKFEVRGVVHKGVLNPGGVAEIIAISEVLRVAQANGLSV

SEQ ID NO: 362 - protein, 518 aa, Stenotrophomonas maltophilia
  source 1..518: note = Related to NZ_MQXX01000031.1
MGIRALRFPRNPGGVRAISAPGRLRKTLQRQLLPVLYDAYKMGPNVHGFARGRSVRTNAQPHAARNVVINFDLKDFFPSISFQRIRGVFLANPMRLDWSVANILAQMCSLDGVMPAGAPTSPVLSNIICAKLDKRLSALAARLGGSYTRYADDLTFSFDRPLAQLRSIAMLDEEGKAVVGASISEIVKSEGFSINMDKFRISVKGSRKTVTGLVVNEKVNVKRSWYLKLESTIYAMDKFGIPAVAAQVFPDEKIPAVASAKLLRQIHGKVSYLSMIRGKGDWLAADIAHRFNGLHGEAQLRVPSVELISQAGRRARGVHIVNASTEELLVFDLAASQGTAFTIPSGLMVTAAHVVEKDDTKTVLPHVYIMNERRKALAACDVLAVDWDRDIAILRVNDEKHRLDLERSRYKLGLDPAQGDHLVTVGYPDYTLGERATAVNSPVSRIFKSKAATHGAPDVNKARVDGPIQGGMSGGPALDSKFEVRGVIHKGVLNPGGVAEIIAVSEVRRVALTHGLKV

SEQ ID NO: 363 - protein, 540 aa, Xanthomonas hortorum
  source 1..540: note = Related to LR828257.1
MLTIKNLQGVHSYGALAPLFSVTPAALKAQLYSAKGYSSFNIPKKSGGFRLIHAPTKIRKQLQRALLPVLNEAYKAPSFVHGFVDKRSVRSNAQPHVQARTVVNVDLADFFQSISFKRIRGVFLAPPFRFDWTISNILAQICCYGGALPAGGVTSPTLSNMICARMDKKLVRLSRRLGGEYSRYADDLTFSFRRPLAQLSSIVAVDASGNYLPGAALLEIFNAEGFSLNPVKFRVATGAARKLVTGVVVNHRTNVPRKWLRALESKIYAITRFGVGAIAAQEFPDVAPESARYRLLRQLHGRISYLRMIRGAGDWVASDLAYRFNKAHGENQLRVPCTELISNPQRVPRGVWVLGCSASTMHFFDPQNQGTAFVTSSGLLVTAAHVLLLDSGDVAGYIYIINERAKKLRRCELLAIDVEADVAILKASEHNLEVERSRFSLGNDPQSQDSVVAVGYSDYGSGDTATMLQASVQKVFKFNSIKKAQVGAFISGGMSGGPVVDSACRVRGLVHKGVSSAAGVSEIICVEAIIRVAVSNSLSL

SEQ ID NO: 364 - protein, 534 aa, unidentified
  source 1..534: note = Related to JAHFXB010000114.1; note = Proposed Aureobasidium melanogenum
SAHTHESLAAALGLAPAGMLKALYKRKGYTVWLIPKKNGQHRTIASPSRLRRHIQIQLKAVLEQVYKPDASVHGFLQGHSIVTNAKPHVRRRTIINLDIKDCFGSISFFRVRGLLLKAPFNLPWVTANILAQATTFENALPPGGITSPILANIVMAGLDKRLSRMMIRYGGRYTRYADDLTFSFPAPPGRLGEFVEKSAVGNYQIAPKLSAVLKEEGFESNQLKFRCLTGASSKRVTGLKVSDKVNLPRRWIRELDCKIYAMEKFGVNAVAAADHPDSPVEAAKARLLRHIHGKIAFASMVRGRADFITAAMANRLNQLHERSDLYLSDIEIISRGDRASRAVWVVTAAPEGEDHYFAPEGNGTAFCIRGGLLVTAAHVIEDHEGKTKAPYPVVCVRRADQPGTYLGCNVIAFDRDRDLAVLQLLVPRPDLTRFQFALGKVPVTDESMTSIGFPNYVVGNRSATEVHVVQDVRPRYGVLRIRATGNIMGGASGGPLLNKKFEVAGITHKGLLMKWEANEFISVGELRTVLNEIK

SEQ ID NO: 365 - protein, 542 aa, Brevundimonas sp.
  source 1..542: note = Related to JACVCG010000003.1
MVDITLVPPRQSLRDITTTRELAALMGVSYSREFAYILYRFPPTGRYRSFNIAKKSGGDRQINAPIRLLKKLQRRLVPLLAEIYDAPPCVRGFQGGQSILTNASDHVGQRYVLNLDLNDFFPSIHFKRVSGILQTRRYSLSRDVAVAIAQIACHGGQLPIGAPTSGILANMVCGPLDSSLLRLAKAHKLRYTRYADDITFSTSNSRHLNEATGIHVGDRFVIRGTEELSDSFHALFTQNGFSLNPNKAVLMSRRVRQSVTGLTVNRKTNVSKEFYRNLKSSINAIENYGYEAAQSVYIDRFRKPNESLQLRENLLGRLAFLGHVLNYSERYNKLARRTARLFEERSIPRPRDDREKAIYVLTNEQDLMMGTAFHTGGGKFLTAAHIFADRPGVLRCELACPPHYPEQITAVVSHIDRERDIALVRATGTFDLSRHSIPTDGKSVRIGDDVFACGFPQYEDGNSISTISTRITAERYISGNQRLEVDRPLSHGSSGGPVFSRDGFLVGQINTGPRIGEDYSPMSYTITPFRPHADLVATWLAA

SEQ ID NO: 366 - protein, 527 aa, Brevundimonas sp.
  source 1..527: note = Related to NZ_LR732816.1
MRQLALLLNVDYGKTLSFALYRANQTSAYRAFSIPKRDGSERIITAPKRARKSLQQSLLPLLEQLYDPAPCVHGAVKGRSVKTNAAPHVARRYILNVDIDDFFPTIHFKRVVGILSSSRYGVHPTVATAVAQICCHQGRLPTGAPTSPILANMVCGKLDSALLRLAKKNKLRYTRYYDDITLSSSTSGHLTAATGIDLSSDHIAHGADRLSDEFKDIFTNNGFSINSKKVWGTTRKVRQQVTGLVVNKKHNVPIAFVRSTRAMIHSIEKMGIKSAQEKFLRSRKDNDSLDLESHISGRLAYIGYITDYGLRYTTLAKRFMAVSQGTKLPLPLLERERSVYVAVSKPGNEQATAFHVGHGFFVTAAHLVDPNKKPIFILVHSPDYYESPIATKIVHINYATDVALLKNVGAVAVNDRPAIKLTSRQSSRGDQVEAYGFENYIPGNKLGVVKTEISSVRQLDGQTRHSVSAPWPHGMSGGPVFDTQGVFLGIVFSGPLYGEKISPYGTAFTPSNLFAAELEQWLIDQAS

SEQ ID NO: 367 - protein, 569 aa, Deinococcus sp.
  source 1..569: note = Related to JAIQXU010000019.1
MQTKDDLANALGISKSKLTYFAYAVSDKRKYVSFYVKKRSGGKRVIHAPNRGLKAIQRSLAILLSEIYQPSNPHCNHGFGRNRDIITNAQSHIGRRYLFKCDLKDFYPSINGARIFGVLTAAPFNFSDEVAHLIAMLSTKDGALPQGAPTSPVLSNIIIRKLDRKMMNFAKSSGGLYTRYADDITISYRTISMTRSAIDSDGNISDRLRHIIEHEDFTLNESKTRLLTKRNRQIVTGVVINEKLNVKRGYIRDLRNLIYILVRYGESDAVNAYNKHHLFDKSAKDIKRVIEGRIKFLERVRGREDAVVLKLIGMYQQHDKGFRTDKAPPYDDNKIETFKVRLLAEGKTDYKHLQIAFEFFAESNLYPSLDLNLEPHPDIEGIKHLEAHVKVLEKVTLEHLHIAIYDSDDKTINERYANGPKQLGSDLYGFTLPRPGHLPADQPFCIEMLYTPKDLTTPDENGRRIFLIDEFDRNTNHHKQDKRITTNNKSWDKLIIDDKVFRLDENHNIESINLSKAAFASFIEKRKTAGDPPDLHAFKAIFDMIDKIARTYYGKNTSELGEKIDIIKT

SEQ ID NO: 368 - protein, 555 aa, Deinococcus sp.
  source 1..555: note = Related to LIYN02000006.1
MKTTKELAQHLGIELKTLMFYAFALPDTKKYYHFEIKKRNGDSRRIDAPIITIKNIQSSLSLLLQNEYEKSAPKSVYGFRPGRGIIKNASAHLNKRVTIKVDLKDYFNSITGGMIVETLTSRPFGMDKQVARVIAGLCTIGGRLPQGAPTSPVLANIITRTLDIKLISFAHKTRGTYTRYADDLTFSYSHENTARQCAIYSEDGIVLNAEIIKHIESKGFTVNSNKLRYKKSTSRQMVTGIITNNKIPGLPREYIRETKLLIHILLKYGEKEAAEAYRRKYAQNRYGHRNNLDISAIVRGRLEYIKSVKGVKSSAYCKLALRYKAFNPQYKFEEEEQAVFNPEEIIILCEGKTDYKHLSAALAHFQRNGQFNSLKLDLTDKERGGYDGLQKQIDALLKVKLRQKHIAIFDADVPSISKKYYDPNDLYKVHENLFVIITPRPDHVESGENFCIEMLYKDKDLKRVSSEGRRIFLSNEFDAKTSKHKKEPYYVQDRIKDKLIVESPVYRFTDEGESLNYCRSKDDFAKEIEACHMTQPIDFSGFLPLFKKIYEVHSS

SEQ ID NO: 369 - protein, 409 aa, unidentified
  source 1..409: note = Related to VXRZ01000402.1; note = Rhodothermaceae bacterium
MVFSPSRPAEGSNSFMSPCITVYHDGIGSESPRRFGKFYPKVVEAVARTLHVMPKVAPCLRPQWADIPNQRFSQTIKSLSSVQDLARFWDLPVKQLNYHAYHATDASEYHNFSITRRNGRKRKISAPNRSLKYIQRIIHETLSKLYWPDTTVHGFVSQRSTITNAKTHLARKYVLNADLKDFFQTITRPRIIARLKVAPYELQPPVAVLIGFLATDGDGQLPQGSPCSPVIANIMAASMDTQLKELCKKLRCTYTRYADDLTISTDCEPFPPEIARYPSAAGTVQVVLGDSFLDIIENNGFQINHMKSRLQNHWTRQICTGLVVNREKLSLPRSYKRRLRALIHNWKSLGWEKAAKRMHEKEYRPLFHNRDRFVHHVYGRINYMRMIYGVDYIGAKKLLSALEEIPKDQ

SEQ ID NO: 370 - protein, 355 aa, Adlercreutzia mucosicola
  source 1..355: note = Related to NZ_AUGK01000007.1
MTTGSSSIFTPNIFSVNSCAKLASLLNTTESRLESLVDQAGNYRSFRIPKKDGTTRLIQAPQNELKKIQSQLSEMLLCAWEPSPFSYGFLHSRSIVSNAREHLGKRWVLNVDLKDFFPSITSQQIKKALVSAPCDMKPEVADLIARIACNNNTLPQGSPSSPILSDIVASPLDDSLASLAQSRDCTYSRYADDITISTSQNLFPVEIARPIGRQIVLGAPIKDPIIRHGFKINMRKVSLNSNSHHQEVTGVVVNEKTNVRRQYISQLRSILYNCLESGVYPQALRYIKRNRHKTPAAVIERMDDIAYIEHWFSMVLKGKVEYIRMVKGNDSPTFFMMADRYNSVFGSTFNIPPKS

SEQ ID NO: 371 - protein, 366 aa, unidentified
  source 1..366: note = Related to DPRH01000152.1; note = Flavobacteriales bacterium
MEEHLSTHLRTGQDVQTLTRFLNAMLLRRAEKDGWTPWRWQERQIDAMLTDPSWFYRSFTIPKKSGGLRHIDAPKRTLKLVQWALVPLFSEMFTPSSQVYGFVKGRGIVDNASVHLGQSAVLNVDIQGFFPSVSRARIEAILKDGPVLRLSEYMARSIARLCTLHGGLPQGSPASAVLTNLVTVRLDARLAGLAEQFGCRYSRYVDDITLSASSRAALDRALPKLEMILLSEGFALNTNKTRIQTLSMRREVTGLVLSGERIGVPAVNVPRPYRRQVRAMLHHWRKHGISEAAARNGFDGDHGVRPDLAFVRQLQGRIAHLRHVNPTPEVERFYTDLSDLLVSEGFRTSPDTDLECCADLESAKAI

SEQ ID NO: 372 - protein, 321 aa, unidentified
  source 1..321: note = Related to DNBY01000055.1; note = Flavobacteriales bacterium
MTPFEEVTQFINDGLSVLKEAAPKKHREVFEVSLDQVFGVFKNLDTSYIAFEIPKKSGEMRQIEAPNRKLKWMQKGLKAQLETLFEAEPGAHGFVPERSIQSNAGVHVGQRYVLNLDIAGFFPSVKRGRVQTVLQLEPIGLSKPAARILAQFCTRNRALPQGAPTSPTLTNLVCMRLDRKLEKLARHYRCRYSRYADDITISGPSKDLMYHLLKRITLILKTEGFEVQESKTRILPTSQRQEVTGLSVHAFVNSPRTYRRHLRATLHTWQSRGMETAMEALQITDKAQFIAVIRGRLQHAQHTNNTAEVQRMRATFHQLIA

SEQ ID NO: 373 - protein, 554 aa, unidentified
  source 1..554: note = Related to PABJ01000186.1; note = Ectothiorhodospiraceae bacterium
MSLNKCNTLSDLALHLGISTSRLRWLLYHKQSDLYDSFQIPKHNGVSRTIDAPCMSLKDVQNRILNSLATYYKPPRCAHGFIDSKSIITNAKLHVRKKLILRIDLEDYFPSIHIGRIQGLLKKGLGCNPTISWAISRLCTLDSVLPQGAPTSPLIANMITKRLDHQLASFASSYSCRYTRYADDITISTTKKAFPRRILKRSELSRLDIEDLADEMIAIITENGFHINESKLRLYHCNQRQTVTGLTVNQKVNLPRKREKQVRAMIHDWETNGLSNAAKKYISRYDYKKRPDNTSSGLLFKKVVLGRLSYIRMIKGPDDWIVQKYAHRLSLLDSEFFEQYESKWKVIVRAFQAIECIRLIEVEYSKNGVEYYSQGTGVYIKNIGLLTCYHVLDPDFTGTTSSNIDVSLVQEKLISGKLIYSKKELGAGVLLKADKDCDLALLKVDNDRPNSITLSSNDPILGESIITLGYPNYTPGRSAHVQNTSIGSQKMYMGKTHFTISDDIFKGMSGGPVLNSNYQLVGLMIVGNEITCTKYKRSESSFIVLSHIVEFLRK

SEQ ID NO: 374 - protein, 546 aa, Dickeya sp.
  source 1..546: note = Related to SZVX01000028.1
MGWVVSLHDKLLILGLTNTIKGVKDPIPDLPRMEPEPYKAGKKLKWDNKKLENHSQASKEEIIDICEKIINKDIVITSANDVANILEVPVGQLLYILYHKKGNYRQFDIEKKGGGSRTISAPQGGMAILQEKLKPIIEYFYRPKKSAHGFIIGKSIYTNAANHTKKRYVVNIDLEGYFDSVTFARVYGIFKSKPFNFSHPAASVLAQLCTRDGILPQGACTSPALANLASTSLDKQLTQLARRKNITYTRYADDITFSFNQEQIKDIITLGDEDEFELSETVISIIERCGFKVNLRKFRVQEKNVCQKVTGLVVNEKVNIDRKYLRVTRSMIHKWREDKLKASLIFFAAKGLETINNEHAISIFRNHIYGRLSFIKMIRGDDFPLYLKLMAQMSHNDPRKTKEGLRAMRVTENYDVFICHASEDKDTIAIPIYDALVALNISAFIDHVEIKWGDSLIEKINSALVKSKYVMAILSASSVNKDWPRKELNSVLAREISEGKVKLLTLVKKEDEEIVASVLPLLQDKLYMSYENNPQDVAENIKSLLE

SEQ ID NO: 375 - protein, 535 aa, Klebsiella quasipneumoniae
  source 1..535: note = Related to CP055010.1
MLRLATANKQATDQVPDLPKMEPEPYKTGGRIKWNNKKLKNNSQTPNEDIIKICQKIENKSIIITSANDIANVLEVPVGQLLYILYDKKDNYRQFEIEKKNGKSRIINAPQGGLAILQEKLKPIIEHFYRPKKPAHGFIKGKSIYTNALNHTKKKYVVNIDLEDYFGSVTFARVYGIFKSKPFNFSHPAASIAAQICTKEGKLPQGACTSPVLANLASAALDKQLTQLARRKNITYTRYADDITFSFNQRQVKEIITLDEENNFELGETIISVIEKNGFKINTQKFRVQKRNESQKVTGLVVNDKVNVERKYLRVTRSMIHKWREDKLKASLLFASKKGIKTNSNEHAISVFRNHIYGRLSFIRMIRGGDFPLYLKLMAEMSHNDPVKTKEGLRTMKVTETYDVFICHASEDKATIAIPIYDELNKLNISAFIDHVEIKWGDSLIEKINSALVKSKYVIAILSANSVDKEWPKKELNAVLAREIAEGDVKLLTLVKEEDEKIVAESLPLLRDKLYMAYTDNASEVAARVHALLDR

SEQ ID NO: 376 - protein, 535 aa, Enterobacter sp.
  source 1..535: note = Related to CP012871.1
MLSLSSANKEENETIPELPKLEPQPYQAGKNLKWGNKELKNHPITSKIDINVICKKIENKSIVITSANDVANLLEVPVGQLLFILYNKKDNYRTFEIKKKNGKSRIINAPQGGLSILQEKLKPVIEYFYRPKKPAHGFIKNKSILTNAEKHTKKKYVVNVDLENYFGSVTFARVYGIFKSKPFNFSHPAASILAQLCTKDGKLPQGACTSPILANLASASLDKHLTQLARRKNITYTRYADDITFSFNQQQVREIITLDNENNFELGEAVISVIEKSGFSINTSKFRVQKRNERQKVTGLVVNEKANVERKYLRVTRSLVHKWREDKLTSALLFVTKKGFKATNNEHAISIFRNHIYGRLSFIKMIRGDDFPLYLKLMAEMSHHDPLKTKEGLRAMRETETYDVFICHASEDKISIAIPIYEELTELNISTFIDHVEINWGDSLIQKINSALVKSKYVIAILSANSVDKHWPKKELHSVLAREIAEGEVKLLTLVKEADEAIVAASLPLLSDKLYITYKDNPAEVADKVRALLNK

SEQ ID NO: 377 - protein, 535 aa, Edwardsiella tarda
  source 1..535: note = Related to PDDV01000006.1
MLNLTTTNKEAKGLAPQLPNVEPNPNTIGKSVTWENKKLKNYPIASESDIRTICSKIENGSISITSTTDVANLLEVPIGQLLYILYQKKDNYKSFKITKKNGGVRIIDAPCGSLSILQEKLKPIIEYFYRPKKSAHGFIKNKSILTNAEKHIKKKYVINIDLEDYFGSVTFARVYGIFKSKPFNFSHSAASILAQLCTKDGKLPQGACTSPVLANLASASLDKHLTQLAQKKQITYTRYADDITFSFKQKQVRDIIIKNKENDFELSKTIVDIVERNGFKINFNKFRVQKKSERQKVTGLVVNKKVNIERSYLRVTRSMIHKWRTNRSESASLFSIQKGYTSKNKDEEISIFRNHIYGRLSFIRMIRGNDFPAYLKLMAEMSHHDTVKTREGLRAMKETETYDVFICHASEDKESIATPIYNELVKLNIATFIDHIEIKWGDSLVDKINSSLVKSKYVIAILSTNSIRKHWPRKELHSVLSREINDNKVKLLPLIKKDDTGIVLSELPLLCDKLYVTYDNNPEEIANMIQSRLGK

SEQ ID NO: 378 - protein, 547 aa, Citrobacter koseri
  source 1..547: note = Related to LR134204.1
MSLHIKILLNNLTSTNHADLLPNLPQVEPQPNLSPSKTEWDNKKLSNRSLLTDDERNKILSGIENSKIIISSPTDVANLLEVPTGQLLYILYKRKNNYRSFIVKKKNGKNRIINSPYSGLAILQQRFKLILDYFYRPKKSAHGFIKDKSIISNAEKHIKKKYVVNLDLEDYFGTITFPRIYGIFKSRPFNFSHPAATVLAQLCTHEGKLPQGACTSPVLANLVSASLDKQLTQLAKRKNITYTRYADDITFSFKQNGINEVIKLSEDEKYEIGDQLISIIEKNGFKINQDKFRVQKRNNKQVVTGLTVNDKVNINKKYIRLTRSMIHKWSQDKTTAALMYTATHGIKTRDNDHAISIFRNHIYGRLSFIRMIRGKNFSTYLKLMSRMSHSDPKKTNEGRRAMSETETYDIFICHASEDKELIAIPLYKALCDKNIPTFIDHVEIAWGDSLIDKINNALAKAKYVVAILSENSVEKKWPKKELNSVLAREISNGKVKLLTLVKKEDEEAIADKIPLTHDKRYMVYDDNADFIADEVRKMLDNQASINQ

SEQ ID NO: 379 - protein, 534 aa, Escherichia coli
  source 1..534: note = Related to CP057087.1
MHNFALANKKSPDFISELPQIEPKPYSNGHKIKWINHTLTSTEVTPPDNLIKICILIESGEIAITSVSDIANLLGVPAGQLLYILYRKKDNYRTFEIEKKNGKKRVINAPCGGLSILQTRLKPVLEYFYRPKKSAHGFIKGKSIITNAGMHIKKKFVVNIDLENYFESISFARVYGIFKSKPFNFSHPAATVLAQLCTHNGKLPQGACTSPILANIASASLDKQLTQFAGRKKISYSRYADDITFSFNQRNIDIIKKNDDGSYSLSETIDNIISKNGFKINYDKFRVQTRNTRQSVTGLVVNDKVNINRRYIRITRSMIHRWTDDKLKYALLFATEKGYQAKDNNHAIQIFRNHIYGRLSFIKMVRGKDYPGYLKLMSYMSHNDPLKTQEGLRAMKETENFDVFICHASEDKKDIAIPIYDELTKLKISAFIDHVEIKWGDSLIEKINAALVKSKYVIAILSANSVNKEWPQKELRAVLASEISSGDVKLLTLLKKEDKEVVNLSLPLLSDKFYMVYDNNPEVVANNIKSLLQR

SEQ ID NO: 380 - protein, 543 aa, Klebsiella variicola
  source 1..543: note = Related to NZ_CAKLOR010000001.1
MSLHDKLLMHNLALANKENADVISELPQVEPTPYKNGNKVKWRNKKLNNKAAIEPDSLMKICMLIESGKLLITSVSDVANLLEIPVGQLLYILYRKKDNYRTFEIEKKSGKKRIINAPVGGLSILQTKLKPVIEYFYRPKKSAHGFIKGKSIITNANMHIKKKYVVNVDLENYFESITFARVYGIFKSKPFNFGHPAATVLAQLCTHNGKLPQGACTSPILANLASTSLDKQLTQLAGRKKISYSRYADDITFSFNQEKVIDIIERSEDGSYIIGETIDNIISKNGFKINHEKFRVQTKNTRQSVTGLVVNEKVNIDRKFIRITRSMIHRWKEDKVKYALLFTTEKGYQTEDNNQAIEIFRNHIYGRLSFIKMVRGGDYPGYLKLMSYMSYNDPSKTKEGVRAMKETENFDVFICHASEDKEDIAMPIYEELSKMKISAFIDHVEIHWGDSLIEKINSALVKSKYVIAILSADSVNKEWPQKELRAVLASEISEGKTKLLTLVKKNDEEIVTKALPLLQDKLYMVYDNNPDMVAESIKKRLQS

SEQ ID NO: 381 - protein, 535 aa, Proteus mirabilis
  source 1..535: note = Related to CP063440.1
MYNLVSVNKKNQDIVPELPQVEPVPYKNGNKIKWRNKKLKNKTITNCENLIKICKLIESNEILITSSNDIANLLEIPIGQLLYILYHKKDNYRTFEIEKKSGKKRIINAPNGGVAILQGRLKPIIEYFYRPKKSAHGFIKGKSIITNASMHTKKKFVVNIDLENYFESITFARVYGIFKKKPFNFAHPAATILAQLCTHNGKLPQGACTSPILANLASTSLDKQLTQLASRKNISYSRYADDITFSFNQSNVFNIIVKNNKGNYEVSENIDSIISKNGFKINHEKFRIQTKNTRQSVTGLVVNEKVNIDRKYIRITRSMIHRWKVDKVKYALLFTIEKEYQTKDNNQAIEIFRNHIYGRLSFIKMVRGENYPGYLKLMSYMSHNDPLKTKEGLRAMKETENFDVFICHASEDKNDIAIPVFNQLDRINISAFIDHVQIKWGDSLVEKINSALVKSKYVIAILSANSVNKEWPQKELRAVLASEISDGNIKLLTLIKKDDEEIVKTALPLLRDKYYMVYNENPEVIADKIRELLHR

SEQ ID NO: 382 - protein, 535 aa, Erwinia persicina
  source 1..535: note = Related to CP082141.1
MHSLTFANKENPDSIPEIPQVEPEPYKDGKNVKWRNKKLKNKSTIDHESLINLCKLIESGSIVITSASDIANLLEIPVGQLLYILYHKKDNYRTFEIEKKNGKKRIINAPNGGVSILQEKVKPIIEYFYRPKKSAHGFIKERSIITNAFMHTKKKFVVNIDIENYFDSITFARVYGIFKSKPFNFAHPAATVLAQLCTHNGKLPQGACTSPILANLASTSLDKQLTQLAGRKSISYSRYADDITFSFNQKKVPDIIEQNDDGSYEISEALEGIILRNGFRVNSDKFRVQTKNTRQSVTGLVVNDKVNVDRKYIRITRSMIHRWKYDKVKYSLLFTTEKGYKTKDNKQAMDIFRNHIYGRLSFIKMVRGKDYPGYLKLMSYMSHNDPLKTKEGLRAMKETENFDVFICHASEDKEDIATPVYDELTKINISAFIDHVEIKWGDSLIEKINSALVKSKYVIAILSASSVNKEWPQKELRAVLASEISDGDVKLLTLVKKDDEEIVKTALPLLRDKLYMVYEENPEVVADRVRTLLHR

SEQ ID NO: 383 - protein, 550 aa, Serratia plymuthica
  source 1..550: note = Related to CP065673.1
MQLRKQIIAFNEKCRAEGLDEDRLIPLLKDTEPSSVKVGNTVIWNNSFKGNVFSLTEQEVSKVCAAISRGDVNIESVQDVANLLEVPVGNLIHLLYRSSSIKYKSFTIPKKNGGERIILSPQGGIKILQERARKYLDAFYRPKISAHGFILNKGIFTNAEKHVKKKYVLNIDLKDFFESITFPRIYGVLKKHPFNMGRPAAAVLAQLCVHNGKMPQGAPTSPVLSNIIASALDKTLVRLAGKYRMRYTRYADDITFSFNQSPPLDIAKKIEDTGGYELGDSLRHAIENNGFKINEEKFRLQLKTERQVVTGLTVNEKVNLDRKYIRLTRAMIDGWGKDKVQAANKYHKIRYGKCDKNDEFAVESFRNHIYGRLSFIRMIRGAEWPLYLKLSAWMSSNDDNPTIEGRRAMKAMEMFDVFLCHASEDKESIVMPIYDELCKLHIHAFVDTKYIEWGDSLTEKINGALARSKFVVAVLSSNSVEKRWPLKELHSVLAREIAEGDKKLLTLVKDGDEELIKAKLPLLADKLYAVYKGDPIEIAHGLSSLLTGKK

SEQ ID NO: 384 - protein, 543 aa, Serratia rubidaea
  source 1..543: note = Related to CP065717.1
MAFNSKCKKEGLDEEQFLPLLNDNEPSSVKVGNSFLWDNRANRNAFSLTERDISKLCVAISKGDINITEVQDVANLLEVPVGNLIYLLYRTSSVKYKEFTIPKKNGDERKILSPQGGVKILQERAKKYFDAFYRPKISAHGFILNKGILTNAEKHVKKKYVLNVDLKDFFESITFPRIYGVLKKHPFNMGHPAATVLAQLCVHNGKMPQGAPTSPVLSNIIASALDKTLVRLAGKYRMRYTRYADDITFSFNQSPPSEIAKKIENTDGYELGDSLRHAIENNGFKINEDKFRLQSKTERQVVTGLTVNEKVNLERKYIRLTRAMIHGWGKDKVTAAKKYHKTRYGNFDKDDNYLVANFRDHIYGRLSFIRMIRGAEWPLYLKLSAWMASNDDNPTTEGRRAMRAMEMFDVFLCHASEDKNDIVIPIYDELCKLDVHAFVDNKYIRWGDSLTEKINSALARSKFVVAVLSRNSVEKEWPLKELNSVLAREIADGDKKLLTLLKEGDEELIQAKLPLLADKLYAVYTGDPIKVAQDLKALLSDGE

SEQ ID NO: 385 - protein, 550 aa, Xenorhabdus bovienii
  source 1..550: note = Related to HG427573.1
MGLREKIASFNNELNYGVDYKDSLIPLLKNNEPLAIHMGNKVLWNNFFKKNEFSLTDIDVYKITTAISKKNIYIISPQDVAALLEVPVGNLLYLLYKSNSNKYREFTIPKKNGDKRTILSPQGGVKILQERAKKYLDAFYRPKASAHGFILNKSIFTNAEKHVKKKYVLNVDIKDFFESITFPRIYGVLKKHPFNMGNSAAAVFAQLCVHEGRLPQGAPTSPVVSNIIASSLDKTLVRLARKYKMSYTRYADDITFSFNQYPPVGIARKIDGTNDFELGDSLRNAIESNGFKINNSKFRLQSRAEKQVVTGLTVNEKVNINRDYIRTTRAMIDGWGKDRFQAAKKYHKIRYGKCDKSNQSAIISLRNHIYGRLSFIRMIRGAEWPLYLKLISRMANNDDSPTVEGKRAMKIMEMFDVFLCHASEDKDDIVEPLYEELVNLRVNAFLDTKYIKWGDSLIEKINGALAKSKFVIAVLSRNSVEKKWPLKELNSVLAREITGEDKKLLILVKDGDEELIKDKFPLLVDKLYLVYKNNPEIIAGELLSLLAGKQ

SEQ ID NO: 386 - protein, 546 aa, Serratia fonticola
  source 1..546: note = Related to QRAU01000016.1
MLLKQQIIAANFIRGESGKAFLPTLLYVEPKSIKTGSKYKWMNPRSIRAYSLSENDIHSLLSAVLTGEIEIKTANHVAEILEIPVGQLIYILYKKTTENYVEFEVKKKMGGVRKIYSPQGSVKIIQNRVKKILDFFYRPKAAAHGFIKEKSIKTNAKKHIGKKYVLNIDLSNFFESITFARIYGVFKARPFNFGHDAASILAHACTYNGVLPQGAPTSPTLSNIVAASLDKKLVTLARRFKIQYTRYADDITFSFNQKPPEDLVKVLDGEGLCEVGDLLNEVIESCGFKVNSKKTRLQSKTQRQEVTGLVVNNKVNVNRDYIRITRSMIHGWCKDRAFSARKHFNITDECSVEKEKNIIESFRNHIYGRLSFIRMIRGVDFPCYLKLMAYMSHNDPKQTKEGKRAMKETETYDIFICHASEDKDEIAVPVYDELNNLSIVTFIDHLSIKWGDSLVDKINNALAKSKYVIAILSKNSVEKNWPIRELNSVLAREIKGGKVKLLTLIKASDEEYVQDKLPLLADKLYMVYNGNPAEVASRVRDLLGHP

SEQ ID NO: 387 - protein, 544 aa, Yersinia mollaretii
  source 1..544: note = Related to NZ_CABHYS010000030.1
MLLKQQIITENFIRDENGKSLLPAPSYVEPKSIKSGNKYRWINPKSIRKYSLSESEIHSLLSAILTGELKINTVNHVAEILEIPVGHLIYILYKKISSNYVEFEIPKKMGGVRKIKAPHGSIKIIQGRVKTILDFFYRPKTAAHGFIKGKSIKSNAKKHIGKKYVLNIDLSNFFETITFARVYGVFKSRPFNFGHDAASVLAQACTYNGVLPQGAPTSPALSNIIAASLDKKLVTLARKFKIQYTRYADDITFSFNQKPPEDLVKVIDGGALCEIGDLLNEIIESCGFKVNLKKLRLQSRTQRQEVTGLIVNNKVNVSRDYIRITRAMIHGWCRDSTLAARKHFNITDGQGEDKSLVNSFRNHIYGRLSFIKMIRGAEFPCYLKLMAYMSHNDPKQTKEGKRAMQETETYDVFICHASEDKTEIAIPVYEELSKLGIVTFIDHLSIKWGDSLVEKINNALVKSKFVIAILSENSVEKKWPIKELNSVLSREVKGGKVKLLTLIRDSDEEYVQEKLPLLSDKLYMVYKGNPVDIASKVEDLLRNS

SEQ ID NO: 388 - protein, 528 aa, Pseudoalteromonas sp.
  source 1..528: note = Related to LKDX01000002.1
MLTFNKLQFRLQATEPTRLYNNYWVKWLNPSLSPTLSRNIETSRELILGLQSSNDVANLLEIPVGQLLYILYTLEPKYKSFTVTKKSGKKRLIDSPNESIKILQDKVRPLIEAHYRVKKPVHGFVGGGKGIVTNAMQHKKKNYVLNIDLSDFFHSVNFGRVQGIFRNAPFNMGSAAATVLAQLCTHNKCLPQGASTSPVLSNLAASTLDRKLVQLAKKFHLTYTRYADDITFSSNKPFSGKIVENRKEESGLETHRVGKLLEQIITDSGFQVNHTKTRLQYKSQRQEVTGLVVNEGVNVNRKFIRKTRAMIHEWSNDLISAEARFIMQRYNVSDSEVGNDRDGSIFKRAVYGNLSFIKMVKGEEHSPYLNLCRKVLELDNEPPSFISKLKDVLDMYDVFICHARENKNEVAIPLYEALKSKGINTFIDSSAINWGDSLVSKINTALQKAKYVIAIISDDSLNKSWPMHELRSVLSTEIRSGEIKLLPLMVGDADALISQIPLLADKRFIHFEDNIDDVVEEIQKLLKD

SEQ ID NO: 389 - protein, 330 aa, Agarivorans litoreus
  source 1..330: note = Related to NZ_BLPI01000001.1
MSNLAATSLDKKLVQIAKKFHLTYTRYADDLTFSSNKPFPSILVERKTQDNGQDKHRVGKLLEQVIKDAGFEISHDKTRLQHKSQRQEVTGLVVNEGVNVNRKFVRKTRAMINEWGKDLRAAEIRFIKHRYHVTDSEINMENLDGSIYKRAIYGNLSFIKMVKGEEHSPYLNLCKKVLELESNPPEFIKKLKGVFDMYDIFICHASENKSDVALPLHAALAERGINAFVDCFEIKWGDSLVAKINTALQKSKYVIAVISEESVKKSWPMKELNAVLSSEIGSEQTKLLPLMVGDDESLLKQLPLLGDKLFVNFDDNIEEIAGKVDSLLRG

SEQ ID NO: 390 - protein, 531 aa, Vibrio vulnificus
  source 1..531: note = Related to CP009984.1
MSTPLGSLLFNLESFEPEKIPNKKTYSWKNPKLSPTLTRDLEVAKTHFVGLQTDNDVANILEIPVGQLLHILYYQKQNYNSFTIKKKSGKTRLIDSPKASIKILQDKVKPLIEAHYRVKKPVHGFVGDGKGIITNAFQHRKKNYVLNIDLQDFFHSVNFGRVQGIFRNTPFNMGIPAATVLAQLCTHNGRLPQGASTSPVISNLASTSLDKKLVQIAKKFHLTYTRYADDLTFSSNKPFPTILVEREIDENGKEIHKVGRLLEQAIKDSGFEVSHHKTRLQHKSQRQEVTGLVVNEGVNVNRKFIRKTRAMINDWSKGLAQAEIRFLKQRYHLTDSEIKTDGLDGSIFKRAVYGHLSFIRMVKGEEHSPYLKLCEQVLALDSKPPEFIRKLKGVFDMYDVFICHASEDKAEVALPLYDALAKREIKAFIDCFAIDWGDSLVSKINTALKKSKYVIAVVSDESVKKSWPMKELNTVLAAEISSEETKLLPLMVGDGEELLKEIPLLGDKLFVNFNDNIDEIADKVEKLLQRS

SEQ ID NO: 391 - protein, 436 aa, Aeromonas salmonicida
  source 1..436: note = Related to NZ_CP051883.1
MQEKIKPLIEAHYRVKKPVHGFVGGGKGIVSNAEQHKKKDYVLNIDLQDFFHSINFGRVQGIFKNTPFNMATPAASVLAQLCTHNGRLPQGACTSPVISNLAATSLDKKLVQIAKKFHLTYTRYADDLTFSSNKPLPSILVEKIAEDNGQYKYKVGRIIEQAIIDSGFNINHNKTRLQHKSQRQEVTGLVVNEGVNIDRRFIRKTRAMINEWRKNLLEAEIRFIKKRYNLSDSEIKNRKLNGSIYKRAIYGNLSFIKMIKGEEHSPYLTLCKQVLELDNNPPYFVRKLKGIFDMYDIFICHASEDKDKVAIPLYDELIKRDINTFIDCFAIKWGDSLVSKINTALKKSKFVIAVISDSSVKKSWPMKELHAVLSSEIGSEETKLLPLMVGDGEALLKELPLLADKLFVAFDNNIEEIADKVETLLKKYNLYDISQR

SEQ ID NO: 392 - protein, 531 aa, Pseudoalteromonas agarivorans
  source 1..531: note = Related to NZ_CP033065.1
MTKLMDFLSFHSNAFEPTKSSKNAGYTWINPSLTPHLTRELDFVQRQFLGLQSDNDVANILEIPVGQLLYILYSQKDTYVNFTVKKKSGENRNIESPCSSIKILQDKVRPLIEAHYRVKKPVHGFVGNGKGIISNAEQHKKKTYVLNIDLKDFFHSVNFGRVQGIFKNIPFNMGTPAATVLAQLCTHKRRLPQGASTSPVLSNLASTTLDKKLTKIAKKFYLTYTRYADDITFSSNEPFSQALLEKDKLDDGQYIYRVGNVLEAAVISSGFSINHKKTRLQHKSQRQEVTGLVVNKGVNINRKFIRKTRAMINEWDKNLIEAEKRFIKVRYHAQETEIDMSKLDGSIYKRAVYGNLSFIRMVRGEDHSPYLTLCKKVLELDHNPPAFINKLKGIFEMYDVFICHASEDKESVALPLYESLEKRNINAFIDCFAINWGDSLVAKINTALQKSKYVIAIISEDSVKKSWPMKELNAVLSAEIAADKTRLLPLMVGDGEALVRQLPLLADKLFVGYKDNIEEITDMIESLLTEK

SEQ ID NO: 393 - protein, 529 aa, Vibrio crassostreae
  source 1..529: note = Related to VFNK01000001.1
MATTFSSLSFYLVSFEPKKVPYKKSIVWKNPNLSSTLTRDANVAKEKFIGLKTDNDVANILEVPVGQLLHILYSQKQNYDSFVIKKKSGKSRIIESPKTSVRILQNKVRPLIEAHYRVKKPVHGFVGGGKSIVSNAEQHKKKNYVLNIDLVDFFHSVNFGRVQGIFRNTPFNMGIPAATVLAQLCTHNGRLPQGASTSPVLSNLASTTLDKKLVQIAKKFHLKYTRYADDLTFSSNKPFSSILVDKEIQEDGQYKYKAGRVIEQAIKESGFSINHNKTRLQHKSQRQEVTGLVVNDGVNINRKFIRKTRAMINGWRQDLLEAERRFIKIRYHAAESDIDASKLDGSIFKRAVYGNLSFIKMVKGEEHSPYLTLCKQVLALDNNPPEFVKKLKGVFDMYDIFICHASEDKAEVAIPLYNSLKERDINTFIDCYGLMWGDSLVAKINTALQKSKYVIAIISEDSVKKTWPMKELNAVLSAEIGSEETKLLPLMVGDGEALLEQLPLLRDKLFVSYDDNIEEIVGKVEALLI

SEQ ID NO: 394 - protein, 527 aa, Pseudoalteromonas galatheae
  source 1..527: note = Related to NZ_PNCO02000001.1
MNQANFVFRDFEPKKFSYSGNQYWVNPSLSHELAGDIDNAIQQFIGLKTSADLASILEVPVGQLLHILYAQNNQYTSFEVKKKSGKSRLIESPRNSIRILQNKVRPLIEAHYRVKKPVHGFVGGGKGIVSNAEQHKKKNYLLNIDLQDFFHSVNFGRVQGIFRNTPFNMGKSAATVLAQLCTYNQRLPQGASTSPVLSNLAAASLDKKLVKIAKRHHLTYTRYADDITFSSNKPFSTMLVDREILEDGTYKYRAGKLIDQAVEDSGFKINHSKTRVQHKSQRQEVTGLVVNDGVNVNRKFIRKTRAMINEWRKDILAAEIRFIKERYHADEAEIDVSKLDGSILKRAVYGHLSFIRMVKGEEHSPYLTLCKQVLELDGNPPDFVKKLKGIFNMYDVFICHASEDKEAVATPLYESLTKLGINTFIDSEAIKWGDSLVSKINTALKKSKYVVAVISEESINKSWPMKEINAVLSLEIGEENTKLLPLMVGDGDALLKQLPLLGDKLFESFNNNAEEIARKLAERLQKS

SEQ ID NO: 395 - protein, 490 aa, Pseudoalteromonas piscicida
  source 1..490: note = Related to NZ_JXXX01000040.1
MTQTNFFFGDFEPKKYSYRGNQYWVNPSLSHELTGDLDNAIQQFIGLKTSADLASVLEIPVGQLLHILYAQNNQYTSFEVKKKSGKCRLIESPRNSIRILQNKVRPLIEAHYRVKKPVHGFVGGGKGIVSNAEQHKKKNYLLNIDLQDFFHSVNFGRVQGIFRNTPFNMGKSAATVLAQLCTYNQRLPQGASTSPVLSNLAAASLDKKLVKIAKRHHLTYTRYADDITFSSNKPFSTMLVDREILEDGTYKYRAGKLIDQAVEDSGFKINHSKTRVQHKSQRQEVTGLVVNDGVNVNRKFIRKTRAMINEWRKDILAAEIRFIKERYHVDEAEIDVLKLDGNPPDFIKKLKGIFNMYDVFICHASEDKEAVATPLYESLTKLGINTFIDSEAIKWGDSLVSKINTALKKSKYVVAVISEESINKSWPMKEINAVLSLEIGEENTKLLPLMVGDGDALLKQLPLLGDKLFESFNNNAEEIALKLAERLQKN

SEQ ID NO: 396 - protein, 492 aa, Aeromonas dhakensis
  source 1..492: note = Related to NZ_CP023141.1
MNTDTSSDISVTTSFEPKRIIAYNGHQWINPKLSPTILSDQLKAAEKIIGLKEASDVANILEIPVGQLLYILYQQNKKYTSFTIKKKSGKERLIEKPNNSLQILQSKIKPLIEAHYRVKKPVHGFVSGGKGIVSNAEQHKKKNFILNIDLLDFFHSVNFGRVQGIFRNIPFNMDVPAATILAQLCTYNGRLPQGASTSPIISNLAAATLDKKLVQIAKRFHLTYTRYADDITFSSNREFPAVIVQRDVNTQDKLKYIVGPLLERAITDSGFHVNHNKTRVQHKCQRQEVTGLVVNNGVNINRQLIRNTRAMINEWRKDLQSAEIRFIKHRYHVNENDIEINKLDGSIYKRAIYGKLSFIKMVRGEDHSPYLKLCKQVLELDSNPPPFIKKLKGVFDMYDVFICHACEDKNRVAIPLYHALEKKGIKTFIDCFAIGWGDSLVGKINTALQKSKFVISIISEASIDKSWPMKEIHTVLSMEIRNTKTKLLPLIV

SEQ ID NO: 397 - protein, 525 aa, Vibrio parahaemolyticus
  source 1..525: note = Related to CP040101.1
MQQPLEFSEFEPIKFGNGDETIWGNPTLSPRLTRDHKVAETLLLNLESDNDVANLLEIPTGQLLYILYEKPKRYTIFSIKKKSGKPRLIESPNSSIRILQNKLRPLLEAQYKIKKPVHGFVGNGKSIISNAEQHKKKNYLLNIDLLDFFHSVNFGRVQGIFRNTPFNMGYKAATVLAHLCTHNKRLPQGAPTSPVLSNLASTTLDKKLVQLAKRFQLTYTRYADDITFSSNRPFPPLLVETIHLEDGTSHHRVGKALKQAVEDSGFAVNPNKTRVQHRSQRQEVTGLIVNEGVNVNRKFIRNTRAMLHSWRKDLIEAELTYLKNRYHAVDVNKSNLTGDIFKRAIYGRLSFIKMVKGQEHGPYLNLCRQALELDNNPPKSIAKLKGVFEMFDVFICHASEDKEAIALPLYDELNTLGVKTFIDKVEIQWGDSIVGKINSALQKSKFVVAIISESSIGKAWPLKELHAVLGMEIGSGDTKLLPLIVGNEEELLMQLPLIKDKAYLPYTNNCSEIAKILKDKLDTSN

SEQ ID NO: 398 - protein, 523 aa, Neiella sp.
  source 1..523: note = Related to JACXAF010000008.1
MQLTLEFLDISEFEPKRIEASWSNPRLSPTLKRERDAVAQRLIGIQTDNELANLLEIPVGQLLHILYEEKKRYHEFYIKKKSGQLRVIESPNKSLKILQHKVKPLIEYHYRVKKSCHGFVGNGKGIVSNAEKHKKKQYVLNIDLKDFFHSVHFGRVRGIFMNVPFNMGNSAASVLAQLCTNHSRLPQGAPTSPVLSNLAASSLDTALTKIAKRYHLTYTRYADDITFSSNRKFPLAIVDRFETDLGKVEWRVGSLLRQSIEESGFTVNDSKTRVQHRSQRQEVTGLVVNDGVNVSRKFIRNTRAMLNSWSKDLVEAERRFLMTRYHMSESEIDSKKLDGRYFKNAIYGRLSFIKMIRGEDNSSYLTLCKKILELEPSPPKSIAKLKERFEMYDVFVCHASEDKDDVAIPLHRALEDKGIKAFIDCFEIKWGDSLVAKINTALQKSKYVVAIISQHSVNKAWPMKELNAVLSSEIDSKQTKLLPLIVGDQNALIEELPLLADKLFKVFDDDIDQIASELEMRLK

SEQ ID NO: 399 - protein, 521 aa, Aeromonas veronii
  source 1..521: note = Related to NZ_LKJS01000005.1
MMTLFRDDFQPRKTRNQFGESSWLNPKLNPYLTAGQEEVNQKLKNLNDVSDVANLLELPTGQLTYILYNKKPAYKTFGIKKKSGKVRIIDSPNNSILILQNKIKPVIESYYRVKKPVHGFVSGRSIISNAEQHKKSKYILNLDLKDFFHAVNFGRVKGIFKSTPFNFGDKAATVLAQLCTYQGRLPQGAPTSPLLSNLAATSLDRELVHLAKRFHMTYTRYADDITFSSNKKFDEQIVTFLIEKECFEVGVLLRKKIEESGFEISESKTRVSHRSQRQEVTGLTVNDKVNVPRKYIRETRAMLHSWGLGLLEAERKYLSLKKGWTSEKLNSTKLDGSYFKRAIYGRLGFIKSIQGEDSSPYLSLCKKAITLDSNPPKFIQVAKEKLDMYDVFICHASEDKEAIVFPLEKALVAKGVKVFVDSSVIKWGDSLVDKINHGLRVSKFVIAVLSPASVNKAWPKKEINAIMSMEIKAEKKKLLPLLAGSDDLINEFPLMSDKLYKKFDNNVDEIVDGLCEMLQET

SEQ ID NO: 400 - protein, 468 aa, Neorhizobium huautlense
  source 1..468: note = Related to NZ_PVBM01000010.1
MKDIDDLARVLEVPKGNLVYIAYTRGLSAQYKTFEIRKKSGGTRIIHMPKGGLRVLQQKLKKIFDFLDRKPKCSHAYHKGKSFLTNAVEHKKKRFVFNMDLEEFFPSIHFGRVQGVLRAAYKMPPSVATFIAHLCCYNGSIPQGAPTSPSISNLVSNNLDKKILALAIKHHVSYTRYADDITFSYRYRNFPPAIGHFAATGQLFGPAAVGATLEQLIKDQGFQVNHKKTRLQYNHYQQSVTGVIVNQFPNVRRRKVLEVRKLIYLWRTFGLEKAETFRFEKAEGGDYFRAVLFGNLAYLKGVRGENDKIVRSFCRDILRITTKVPNWVRVAAEEFQVKDVFLSHASEDKVAVAKPLFDACQAVGISVFYDAEDIKWGDSVIEKINHGLGEAKIIVPVISETFLEKKWPVRELNVALSRFMKDKARILPIIYNIDHLDDYPLLSDFHYKKWEDNPAELVALLKERLNSI

SEQ ID NO: 401 - protein, 502 aa, Rhizobium mongolense
  source 1..502: note = Related to NZ_VISO01000003.1
MNVFISSLEDPIVSLRFAHSVQDVASVLGLDPARFFYVVQNADNGSYYKQFQIPKKKGGKRDISKPVRGLALAQDRLAAILAQKYSPKQYVKGYVKGESFLTNAQYHERQRWILNIDIKDFFPSINFARVRGLFMSSYFGFNDRVATILARITTFNDGLPQGATTSPIIANLIAHNLDKKLLSIAISERLRYSRYADDITFSSNQKTVPASVIRSWEPLHGERSVELGNAIREAFRSARFEVNEEKTRILFSSERQEVTGLIVNRKANVWRGDVALLRMKLHSARVHGAQNAAKLWLKTTDNPDHFWRHIEGWLAYISQVRGRDDPVTAKLCKMAVLSGLKGAEWIEKYADMVREFDVFLSHATEDKPTVVKLKRKLESLGIKVFFDVDSIQWGDSIVEKINHGLLKSSFFVPFLSDTFSAKGWTNKELNSAIAMNINRKGRILPICEANFSIADNYPLLNETLYQRWPEDPALEAAFVTSVADQILKIVQQEKSKPNDLSD

SEQ ID NO: 402 - protein, 510 aa, Rhizobium sophorae
  source 1..510: note = Related to NZ_JABFCN010000062.1
MVKSEGQALETRETPINNALLQLRMAHSVTDVAFSLGLEPSKFFYVVQNADNGRYYKEFQIPKKKGGMRHIAKPVRGLALAQDRLAAILRDKYEPKPFVKGYVKGQSFLTNARYHERQKWVLNIDIKDFFPSIGFARVRGLFMSSYFGFNDRVATILARITTFKDGLPQGATTSPVIANIVAHNLDKKLLAIAVKERLRYSRYADDITFSSSQKAVPPSVVRGWEPMHGPRTVDLGGAVLEAFRSARFEINDEKTRILLASERQEVTGLIVNRGANVWRRDISLLRMKLHSARVHGPEKAAKLWLKTTESPVHFWQHIEGWLSYISQVRGGDDPVTAKLCKMAVLSGFKGTTWIEAYAEMVREFDVFLSHASEDKPKVRILKNKLEYYGIKVFFDADSIEWGDTIVEKINHGLLKSSYFVPFLSKTFSSKGWTNKELNSAIAMNVNRRGRILPICDGDFSIEENYPLLNETLYKTWPSDPTEEDQFVTSVADEILKRVQDKQSQQNDLSG

SEQ ID NO: 403 - protein, 501 aa, Rhizobium laguerreae
  source 1..501: note = Related to JAAXST010000004.1
MTITLGLDDPLLLLRLAHSIQDVAFALGLEPAKFFYVVKNSDNGRYYKQFQIPKKKGGMRDIAKPVRGLALAQDKFAAILAQKYEPKQFVKGYVKGQSFLTNAQYHERQKWILNIDIKDFFPSISFARVRGLFMSSYFGFNDRVATILARITTFNDGLPQGASTSPIIANIIAHNLDKKLVEIAIRERLRYTRYADDITFSSSQKAVPSSVVKSWEPLNGARTIALGNDVIDAFRSARFEINDEKTRILFPSERQEVTGLIVNRKANVWRRDISLLRMKLHSARVHGPSKAAKLWLKTTENPVHFWQHVEGWLSYVGQIRGPNDAVVAKLCKMAVLSGLKGSEWVERYADMVREFDVFLSHASEDKPKIRKLKDKLESYGLKVFFDETSISWGDSIVEKINHGLLKSSFFVPFLSETFSTKGWTNKELNSAISLNINRKGRILPICDGNFSVENNYPLLNETLYKKWPTDAAQEEEFLVSVSDAILKKVQDAQATSNDLSG

SEQ ID NO: 404 - protein, 505 aa, Chelatococcus asaccharovorans
  source 1..505: note = Related to JAHBRY010000004.1
MSDPQAKVDLIDLTADPMFRLLTAHSVVDVAHALHLDPARFFYVVQHAQDGTYYKSFSIAKKKGGVRHISAPKKGLRLAQARLAAVLLKAYKPKPFVHGYVKGQSFLTNAKLHQRQRWVLNLDIKDFYPSITFPRVRGLFMSSAFGFNDRVATILARITTTSNGLPQGARTSPVIANMIAYTLDRKLIELATRHRLTYTRYADDVTLSSSRKEVPADVVKSWSPPFGERQLDLGGVLSAAFQTAGFQINDAKTRLSFQYERQEVTGVVVNQKANVWRKDISRMRMILHSARKHGAAQAATVWVGKDANADRFWRFVAGWLSFFAQVRGRDDPVVAKLCKLAVFAGLKGIEWIEKGADMVREFDVFLSHASEDKERVRKLNDRLVDLGVTVFFDESSIGWGDSIVEKINHGLLKSSFFVPFLSDSFARKGWTNKELNSAIAMNINRKGRILPIKDIGFSLEDNYPLLNETLYRTWPAGGEDEAACSLADEILLKVQTAHEIRSDLG

SEQ ID NO: 405 - protein, 481 aa, unidentified
  source 1..481: note = Related to JAGRAU010000490.1; note = Bdellovibrionales bacterium
MQDVAFALNLDPAKFFYVVQHADDGSYYREFVIPKKRGGVRSISAPQKGLALAQTRFYELLLEKYKPKPFVKGYVKGESFLTNAKYHEKQKWILNIDIKDFYPSITFARVYGLFLSPYFGFNRRVSAILARITTYRNELPQGARTSPIIANIIASNLDKKLVSLAADLKLKYSRYADDITFSSSQRRIPAGLVKGWEPSFGDREIKLGAALLEAFNGAGFRVNDAKTRLLFSYERQEVTGLVVNQQANVWRKDISRLRMIIHSARKHGPREAASIWVGKNASEEEFWQFLCGWLAYVAQVRGQSDPVVAKLCKLAVIAGLKGPKWIDRSADMVREFDVFLSHASEDKPRVRLLYEKLVEVGVTVFFDEDSIAWGDSIPEKINHGLLKSNFFIPFLSKRFSEKGWTNKELNSAISMNISRKGRILPIIDGHFSVEENYPLLNETLYKKWPIEVELQAKFISTTADEILKKVVAEKLKKHDLG

SEQ ID NO: 406 - protein, 476 aa, Hoeflea sp.
  source 1..476: note = Related to NZ_KB890024.1
MAFALGLDPEKFFYVVQHAADGTYYREFQVPKKRGGVRNISAPRKGLALAQNRLAEVIRSHYVPKKFVKGYVRGESFLSNARYHEKQKWILTVDIQDFYPSIGFARVRGLFLSRYFGFNERVATILARITTYRDGLPQGASTSPLIANIIAHNLDKKLVAIAVKGQLKYTRYADDITFSSSRRAVSSDVVQSWEPAFGRREVHLGQSITEAFKHSGFEINHTKSRILFPFERQEVTGLVVNRKANVWRRDIARLRMKLHSIKRFGATEAAKVWLGPGGDKQKMWSHVAGNLAFIRQVRGMTDPVLAKLCKDAVIAGMTGPSWVLQMAEMVREFDVFLSHASEDKEKIRRLKDKLEECGVKVFFDETSIKWGDSIVEKINNGLLKSSYFIPFLSKTFSEKGWTNKELNSAISMNVSRKGRILPIIDSNFSVEENYPLLGETLYKKWPADESSEDAFIGEVADAILHLIEKKVTSVAT

SEQ ID NO: 407 - protein, 510 aa, Shinella sp.
  source 1..510: note = Related to NZ_MYFQ01000014.1
MKGKDRGSSILLPENPFSDPIFRLKIAHSVQDVASALGLDSAKLFYVIRHCDDGRYYKKFKIPKKSGGFRDISRPIRGLAMAQDRLATILTAHYKPKSFVKGYVKGESFLSNAQYHERQKWVMNIDIEDFFPSIGFARVRGLFLSSYFGFNSNVSTILARITTFNNQLPQGASTSPILANILANNLDKGILSTAIRGRLRYSRYADDITISSSQRHVPSLIVKNWEPDKGKREIRVGNDIVDAFKKAHFKINEKKTRIQFTYERQEVTGLVVNKKANVWRKDVSKIRMKLHSAKKYGAENAAKLWLGKDKSGKDFWIHIEGWLAYIRQVRGVDDPVLAKLCKQAILSGLKASKWIQRCSDMVREFDVFLSHASEDKEKVRILKNALEIRGIKVFFDEDSIEWGDSIVEKINHGLLKSSFFIPILSDKFSKKGWTNKELNSAIHININRKGRILPIAINGFSIAENYPLLNETLYKVWPNNEIEQNIFIEEVSDQLLLKIQKTHSESAGLG

SEQ ID NO: 408 - protein, 497 aa, Rhizobium sp.
  source 1..497: note = Related to NZ_CAKKMZ010000001.1
MSVFDDPITKLRLAHSVQDVAFALNLDPAKFFYVIQNSENGSYYKKFEIPKKSGGVRQISRPLRGLALAQDRLSAVLTAHYKPKSFVKGYIKGESFFTNAKYHERQKWVLNLDIKDFFPSIHFGRVRGLFISQMFGFNEQVSTVLARIVTFENGLPQGASTSPIIANIIANNLDKQLIAIAAKERLRYTRYADDITFSSSQKTVPSALIKLWEPDKGNRQITLSSAVHDAFRQSNFAINEDKVRIQFPYERQEVTGLIVNKKANVWRRDVSKLRMKIHAARKHGAESAAKIFIGESADGEKFWQHITGWLAYVRQIRGNDDPVVAKLCKQAILAGLNGAEWIRRYADMVREFDIFLSHASEDKEKVRKLKDKLEGKDVRVFFDESSISWGDSIVEKINHGLLKSLYFVPVLSETFAKKGWTNKELNSAIQSNIGRKGRILPIVMPGFSVAENYPLLNETLYRSWPAQEQKEGEFLEEISDQILLKIQKSHHEKTDLG

SEQ ID NO: 409 - protein, 498 aa, Shimia sp.
  source 1..498: note = Related to NZ_VCDK01000006.1
MALPENFDPEQAHLFLGFAYSIQDIASALHMRPDGIFHITKTSEDGGYYRSFRIPKKNGGERSIDQPLRGMAMAQERLAAILRATYVPKSHVHGYVCDRSFLTNAQYHVGQKWILNVDIEDFFGSITFPRVRGLFQTYFGYSDRVATTLARICTYQGKLPQGAKTSPVLANLIAHNLDKSLLAIATKHSLRFSRYADDITFSTSQRRFPPSLVTAWEPLYGDREIQLGGPLKDAFMKAGFRINQTKTRIQRYDERQVVTGLVVNKKANVWRSDIKRLRMKLHSAHKFSADEAAKIWIGPSATQEDFVAHVEGWLAFIRQVRGKNDAVLSKLCQQAVVAGVTQQAWVKELAKTVHEFDVFLSHASEDKPKVRLLRDALEHLGVNVFFDEDSITWGDSIVEKINEGLLRSSFFVPFLSETFAAKGWTNKELNSAITNNVQRKGRILPITDAGFEVEDNYPLLNDILYKSWPAEGPEQSAQIEELADQLLAVIEKNKLKAQ

SEQ ID NO: 410 - protein, 498 aa, Marinibacterium profundimaris
  source 1..498: note = Related to NZ_AQQR01000002.1
MGLPNHFDPATAHLLIGVAHSVQDVAGALMMRPGGLLRILKNTETGEYYKTFEIPKKRGGTRTIDKPLRGLAMAQERFAAVLLEVYNPKPFVHGYVSGRSFLSNAQYHQRQRWILNIDIEDFFGSIGFARIRGIFMSKLFGYNDRVATILARICTYQDRLPQGAKTSPALANLIAHNLDKELIALAAKENLRFSRYADDITFSSSSKRIPRTLIKAWEPEYGDRVVELGERLEEAFRGSSFQINRDKTRVQLFGERQVVTGLIVNQCPNVWRKDVKRLRMKLYSAKKYGLEQAASLWIGLDAKPEAFWSHVEGWLGYIKQVRGEGDPVLSKLCKQAMEANPKSSDWIQEHAHMIHQFDLFLSHASEDKPRVKKLHDKLVVLGVKVFFDQSSISWGDSIVEQINIGLMKSNFFVPFLSNTFAEKGWTNRELNSAISININRKGRILPICDHDFHVGRNYPLLADILYESWPGPDADEEAKLNEIADKLLAAAEKAKHSQ

SEQ ID NO: 411 - protein, 486 aa, Phaeobacter inhibens
  source 1..486: note = Related to CP010623.1
MLLGVAHSVQDVAHALSMPAGGLFYVLQNADNGKYYQSFEIPKKREGTRPIDKPVRGLALAQERLAAVLKQSYRPKSFIHGYVTERSFLTNARYHEKQKWVLNIDIEDFFGSIGFARIRGLFMSQFFGFNHRVATILARLTTYKDALPQGARTSPILSNIIAHNLDKHLVEIAVKERLKYSRYADDITFSSSRRKIPPSLVRTWEPEYGDREVILGEKITDAFKTAHFRINPDKTRIQLFRERQVVTGLIVNEGVNVFRKDISRLRMKLHSGKKFGLEQAAKVWIGPTATVKDYWAHIEGWLGHIKQVRGDDDPVLSKLCKQAADINPAAPEWIIRHAEMVREFDIFLSHASEDKPRVRKLKKKLEAVGIKVFFDEESITWGDSIVQRINHGLLKSTFFVPFLTNTFAAKGWTNRELNSAISANVNRQKRILPICDHDFHVGKNYPMLEDVLYKTWPKAGPKEDEWLNAITDELLALVEKVKLETS

SEQ ID NO: 412 - protein, 507 aa, Pseudohoeflea suaedae
  source 1..507: note = Related to SMSI01000004.1
MANRGARIEVKNEEQALLLPSEEEKALFSLQYAHSIQDVAFALGLDPAKFFYVVKNCDSGEYYKSFTIPKKNGGERKISKPLRGLALAQVRLLIILKHVYKPKGYVKSYVEGESFLTNANYHSNQKWVLNFDIEDFFGTITFPRVRGLFMSKFFGFNPRVSTILARICTHEGSLPQGAPTSPILSNIIGNALDKNLVALAREYKLKYTRYADDITFSSSQKLPPGAVISLWEPKFGKREITLGKDIREAVKNAGFRINPEKTRIQFPYERQVVTGLVVNKKANIRRADIARLRMKIHSAQRFGAESAAKVWLGPNATASSLQSHIEGHLSYVRQVRGKDDVVLAKLCKSAIIAGLANATWMKAQADMVREFDVFLSHASEDKEKYGKLNKALKAVGVKTFFDVDVIQWGDSIPEKVNFGLLKSDYFIPFLSNNFTRKGWTNKELNSAISININRKGRILPIIDSDFSVDDNYPILAENLYKKWPEKESEEDDFIEEICAEITKRIVR

SEQ ID NO: 413 - protein, 506 aa, Shimia sp.
  source 1..506: note = Related to JAGHRO010000004.1
MKSKERGSSQVKASIVFHTDFRLIQLRAAHSVRDVALALGLDPKKFFHVLKHTDDGRYYRDFEIPKKTGGYRQISKPVKGLALAQDRLSTILDHVYNPGSYVKAFVKKTSFVENARYHKAQRWILNIDLKDFFPSISFPRVRGLFLSTLFGFNERVATILARICTYKGSLPQGASTSPRLANIIAKSLDKKILEIAKSHQLKYTRYSDDISLSSSKKVIPTLVVKNFHDNPDGRDVILGDGLKNAVRSSGFFINASKTRLMMPNNRQEVTGLVVNKRVNVRRTDIAKLRMKIHSVKKVGFSEAAKVWVDGNEAQLKNHLVGWLAHIRQVRGPSDPVLAKLCLQAHEAGLTEIKWIEELADMSKEFDVFLSHASEDKERVRRLQAELEERKVSVFFDESTIKWGDSIVEKVNHGLLKSTFFIPFLTETFSKKGWTNRELNSAIQMNMTRKRRILPIKSPDFDVDSKYPLLNDTLYKTWPRDPADEAAFISEISDELVALIEMEKSSV

SEQ ID NO: 414 - protein, 493 aa, Paenirhodobacter enshiensis
  source 1..493: note = Related to NZ_JFZB01000068.1
MNELDLCLFQLKIAHSVKDVSFALKLDPEKFFYVLQHTDDGRYYHTFEIPKKNGGKRAIAKPLRGLALAQDRLAPLLHHVYNPGPHVKAFVTGSSFVSNASYHKGQRWILNIDLSDFFPSITFPRIRGLFLSKLFGFNPNVSTILARICTFQGSLPQGASTSPVLANIIANSLDRKFLEIARSEKIKYSRYSDDITFSSSKKSIPKCLVKSFHDHEDGREIILGNDLQDAVRAAGFSLNDQKTRLMTPNNRQEVTGLTVNERVNVRRSDINRLRMVIHSAKKVGFEEASKVWLPDGKNNLREHILGWLAHIRQVRGASDPVLAKLCLQAHGAGLTKVGWIEELADMSKDFDVFLSHASEDKDRVRKLSDALTAGGVKVFFDESSIKWGDSIVEKVNHGLLKSRFFIPFLTTTFSKKGWTNKELNSSISMNISRKGRILPIKSEDFEIGDRYPILNETLYKTWPKSSVDETAFIQEVVDSIIKLIEEDKAAPSV

SEQ ID NO: 415 - protein, 505 aa, Roseivivax halotolerans
  source 1..505: note = Related to FOXV01000005.1
MRVDKVKSEGRADTVKSEAEVLFSLQTAHSVKDVAYALGLDPEKFFYVVQRADDGHYYDTFKIPKKSGGERDIAKPKKGLALAQARLVPILSFVYSPGECVKGFVKGSSFLDNAHYHHAQRWVLNIDLLDFFPSVTFARVRGLFMSSLFSFNPRVATILARICTFQGGLPQGATTSPILANLIAKSLDKRLTGLARTHRLKYSRYSDDITLSCSKAYVPKSIVSEIIEIDSAWEVQLGSELKDIIRHSGFRVNDKKTRLMRRNNRQEVTGLVVNEKANIRRADIQRLRMKIYSTRKYGQAEASLLWLGDSSKSISMHLVGWLAYIRQVRGQSDPVLAKLCQQVVAAGISDIEWIVRLADMTKEFDVFLSHASDDKSKVRPLYESLNSAGVKVFFDESSIKWGDSIVERVNHGLLKSRFFVPVLSSTFSRKGWTNKESNSAIAMNISRKGRILPIKFSEFDLDGRYPTLNDTLYKTWPEDSGKEDDFIREVTDDLIALVEQDKQLG

SEQ ID NO: 416 - protein, 492 aa, Halomonas sp.
  source 1..492: note = Related to JAINWD010000002.1
MKLLNPSSRSIAKLNSLDELCNLLGINKGHLLFICYKRPDELKYKSFEMRKKRGGFRKIDSPQKGLRVIQGKLAELLEENVEFKTCVQGFVKERGVLENATLHKKSNWVLNVDIKNFFGSINFGRVRAVFVAKPFEIHPDVATVIAQICCFKNYLPQGAATSPIVSNIVASTLDNQIIRRIRNHRLLYSRYADDITISAKRVFPRELAYISEGRTIVGEDLVNIFSRASFEINQKKSRLQSKYSRQEVTGLIVNRKVNVPAEYKNKLRAAIHHWVDDPREAERKYYVDILGLTPEEAELTDDGSKLRRNIYGRLSFLNMVKGGDDPTYIKLILKMAEHDPLPPKFVKNIKAEYKMYDVFLCHASEDKADIVEPLYQELSKIGVHAFYDKKEIGWGDSLVGTINKALLKSKYVIAVMTDNSVGKSWPQQEINSVLNGDISGGTKRLLPLIFGDKEKILNNNFLMNDKLYVEWKDNPTEIAQKVQELLAQKSNE

SEQ ID NO: 417 - protein, 491 aa, Pseudomonas aeruginosa
  source 1..491: note = Related to NZ_QBEO01000006.1
MKLLSPLNRSIAKLSSLDELCGLLGVQKGHLLYICYKRSDNAKYKSFEMRKKRGGFRKIDSPQKGLRVIQNQLAGLLQENIEFKSCVKGFIKERGILDNAALHKKSDWVLNVDIKDFFGSINFGRVRAVFIAKPFEIHPDVATVIAQICCFNNYLPQGAATSPIVANIVASTLDNRIIKHIRNHRLLYSRYADDITISAKRIFPRQIAYINDGQTIVGEDLASIFARSGFEINEKKSRLQAKFSRQEVTGLIVNKKLNVPAEYKNKLRTAIHHWVDNPVEAERKYYIDILGLSPEEAELTEDGSKLKRNIYGRLSFLALVKGADDPTYVKLILKMAEHDSTPPKFIKSIKAEYKMYDVFLCHASEDKEEIVKPLYDELEKLGVHAFYDAKEISWGDSLVGTINKALLKSKFVIAVMTDNSVGKAWPQQEINSVLNGDISGGTKRLLPLIYGDKDSILNNNFLMSDKLYVEWKGNPEEIAQKVKDLLTQKAQ

SEQ ID NO: 418 - protein, 495 aa, Pseudomonas sp.
  source 1..495: note = Related to NZ_NEIO01000001.1
MKLLNPPSRSILKLNSIDELCSILGVQKGHLLYICYKRSDDLKYQSFEMRKKRGGFRKIDSPQKGLRVIQKKLAEIFEENIEFKSCVQGFIKSRGILENAALHKKSNWILNVDIKDFFGSINFGRVRAAFIAKPFEFHPNVATVVAQICCFKNYLPQGAATSPIVANIVASTLDNRILKYIRSQRLIYSRYADDITISAKRVFPNEVAHINDGKTIIGEDLANIFSRASFEINEKKSRLQSKYSRQEVTGLIVNKKVNVPAEYKNKLRTAIHHWIDDPVDAERKYYIDVLGLSPEDAELTKDGSKLKQNIYGRLSFLSMVKGKDDPTYIKLVLKMAEHDPSPPKFIKSIKAEYKMYDVFLCHASEDKEKIVEPLYQELSKIGIHAFYDTKEIGWGDSLVGVINKALLKSKYVIAVMTDSSVGKAWPQQEINSVLNGDISGGTKRLLPLIYGNKDNILGNNFLMNDKLYVEWKNNPDEIAKKVQELLTHNESLNSR

SEQ ID NO: 419 - protein, 491 aa, Pseudomonas parafulva
  source 1..491: note = Related to NZ_CP009747.1
MKLLNPPSRSILKLSSLDSLCELLEVQKGHLLYICYKRADDLKYQSFEMPKKRGGFRKIDVPQKGLRVIQQSLAKLLEENVEFKPCVQGFIKKRGILENANLHRKSNWVLNVDIKDFFGSINFGRVRAVFIAKPFEMHPDVATVIAQICCFNNYLPQGAATSPIISNIVASTLDNRIIKHIRSHRLIYSRYADDISISAKRVFPREIAHISEGKTIIGEDLSNIFSRARFEINEKKSRLQSKYSRQEVTGLITNKKVNVPAEYKHKLRTAIHHWIDNPVEAERKYYIDILGLKVEDAGLTGDGSKLKRNIYGRLSFLAMVKGSDDPTYVKLILKMAKHDPSPPKFIKPLKEQYQMYDVFLCHASEDKAEIVEPLYNELNKLNIHAFYDAKEIGWGDSLIGTINKALLKSRYVIAVMTDKSVGKAWPQQEINSVLNGDISGGTKRLLPLIHGDKETILGNNFLMNDKLYVEWNNNPAEIAQKVQALLAQKAE

SEQ ID NO: 420 - protein, 488 aa, Pseudomonas lundensis
  source 1..488: note = Related to NZ_CP075180.1
MKLLNPPSRSIHKLDSLDLLCNLLGVKKGHLLFICYKRADEKKYKSFEIPKKRGGLRKIDSPQKGLRVIQQKLAELLTENLEFKPCVQGFIKGRGILQNAILHKKSNWVLNVDIKDFFGSINFGRVRAVFIAKPFEIHPDVATVIAQICCFNNYLPQGAATSPVVSNIVASILDNRIIKHVRSHRLIYSRYADDITLSAKRNFPREIAHVSDGRTIIGEDLANIFSRASFEINEKKSRLQSKYDRQEVTGLITNKKVNIPAEYKNKVRAAIYHWIQDPKEAERKYFIDILKLNPDEVELTEDGRKLKHNIYGRLSFIAMVKGKDDPTYVKLILKMAEHDKTPPKFLKSIKEEYKMYDVFLCHASEDKAAIVEPLYEALTKIGVHAFYDSKEIAWGDSLIETINKALIKSQYVIAVMTDNSVVKAWPQKEINAVLNGDISGGTKRLLPLIHGDKEKILNNNFLMSDKLYVVWQENPDEIAQKIKALLAS

SEQ ID NO: 421 - protein, 488 aa, Pseudomonas sp.
  source 1..488: note = Related to NZ_JYKS01000054.1
MKLLTPPNRSIYKLASLDRLCELLGVKKGNLLFICYKRADALKYKSFEIPKKRGGLRKIDAPQKGLRVVQNKLAELLNENLEFKNCVQGFVKKRGILQNAMLHKKSSWVLNVDIKDFFGSINFGRVRAVFIAKPFEIHPDVATVIAQICCFNNYLPQGAATSPIVSNIVASTLDNRIIKHVRSHHLTYSRYADDVTISSRRAFPREIAHIIDGQTIVGEELSSIFARARFEINEKKSRLQSKYDRQEVTGLVTNKKVNVPAEYKNNVRAAIYQWVKDPKEAEKHYYIDVLGLKPEDISLTDDGSRLKHNLYGRLSFIAMVKGKDDPTYVKLILKMAEHDKSPPKFLNAIKEEYEMYDVFLCHASEDKETIVEPLYNELKKLGVHAFYDTKVIAWGDSLIETINKGLIKSKYVVAIMTENSVIKAWPQKEINAVLNGDISGGTKRLLPLIHGDKEKILSSNYLMSDKLYVEWKENPEEIAKKIKDLLAS

SEQ ID NO: 422 - protein, 496 aa, Pseudomonas sp.
  source 1..496: note = Related to RHQN01000003.1
MALKLLNPTANPLFRLNSLDALSGLLEVKKGHLLYICYKRADVHKYKSFEIPKKNGGIRKIDAPLKGLRLIQNRLAAILTENIEFKSCVKAFVKGEGIFNNAVLHKKSDWVLNVDVKDFFGSINFGRVRAVFIAKPFEMHPDVASVVAQICIFQNSLPQGAATSPVVANIVASMLDNKIIKHINGVKSGRLVYSRYADDITISAKRFFPSEIAHLSEGKTIVGESLVNLFSRSGFVINDSKSRLQPKINRQEVTGLVVNKKVNIPSEYKNKLRSAISQWILNPKEAERKYFVDILGLNESEFEASATGENLKRNIYGRLSFMSMVKGKDDPTYLKLILKMAEHDDSPPKFVRLIRAQHNMYDVFICHASEDKAEIAEPLYHALTALGLNVFYDAESIEWGDSLIETINKGLYKSKYVIAIMTDNSVVKKWPQKEINAVLNSDISGGQNRLLPLIHGDAENILSANFLMSDKLYEVWKGNAEEIAGKVKVKIEGRAR

SEQ ID NO: 423 - protein, 490 aa, Pseudomonas mendocina
  source 1..490: note = Related to CP013124.1
MKLVEPDKNPLLKLATLDELCSLLNVKKGQLLHICYDRSGPAKYSSFDMKKKRGGVRKIEVPLKGLGLVQKRLSILLSDFIAFKPCVKGFVEGESICTNASLHKKSKWILNVDIQDFFGSINFGRVRATFLAKPFEMSNEVATVIAQICTFENHLPQGAPTSPVVANIIASMLDNKMLRLAQKYRLRYSRYADDITLSSPRGFPGEVATATEGRTILGEELKLIFDKARFTINPNKSRLQAKNSRQEVTGLIVNKKLNIPAEYKHKLRTAIKHWTSDPEEAERNFYLNIKGEDPATFAVSKGGERLKGNIYGRLSFISMVKGSDDPTYIKLVLKMAEHDTQPPKFIQKIKSEHNMYDVFLCHASEDKDAIVKPLYDELKELGLSVFLDGEEIGWGDSLIDIINKALHKSKYVIAVMTENSVDKKWPQKEINAVLSNEIKHDKNKLLPLIHGDAEEILGKNFLMSDKLYKKWEGDPKKIAQDVLALLQKNA

SEQ ID NO: 424 - protein, 489 aa, unidentified
  source 1..489: note = Related to JAAYGA010000118.1; note = Pseudomonadaceae bacterium
MKLVKSDKNPLLKLSTLDDLCSLLSVKKGQLLFICYKRSDKAKYSSFDMKKKSGGVRKIEVPIKGLGLIQKRLSVLLSELITFKPCVKGFVKGESICSNASLHKKSKLVLNIDVQDFFGSINFGRVRATFMAKPFEMSNEVATVVAQICTFENHLPQGAPTSPVVANIIASMLDNRVLRLAQKYRLKYSRYADDITLSSPRKFPPEVAATVEGRTVLGEELKTIFEKARFVINPNKTRLQAANSRQEVTGLIVNKKLNIPKEYKHKLRAAIKHWISDPVEAERKFYVDIKGELSEEFVSQGGERLKNNIYGRLSFMSMVKGIDDPTYIKLALKMAENDNQPPKFIKTIKSEHNMYDVFLCHAAEDKETIVRPLYDELKKLNLNVFLDSEEIHWGDSLIDIINRALHKSKYVIAVMSENSVEKKWPQKEINAVLSNEIKHDKSKLLPLIHGNAEEILGTNFLMSDKLYKEWENNPEEIAQAVLKLLQKAG

SEQ ID NO: 425 - protein, 490 aa, Pseudomonas rhizoryzae
  source 1..490: note = Related to NZ_SULN01000012.1
MRLVESDKNPLVKLSSLDALCALLNVKKGQLLYICYQRSNKAKYDSFEVKKKRGGVRKIEVPQKGLAVVQKRLCKLLSEWIEFKPCVKGFVTGESICSNALVHKKSKWVLNVDIQDFFGSINFGRVRAAFLAKPFEMSSEVASVVAQICTFENHLPQGAPTSPVVANIIASMLDNKILRLAQKHRLRYSRYADDITLSSLRSFPGEVAKLLDGRTFVGEELRLVFERSRFSINPQKSRLQAKNSRQEITGIIVNKKLNVPIEYKQKLRAAIKQWALDPEAAERNFYIDIKGEDPETFKVIEGGRRLRDNIYGRLSFVSMVKGCDDPTYINLALKMARHDTHPPKFIKKIEGEHNMYDVFLCHASEDKDAIVKPLYDELKRLGLNVFLDDEEIGWGDSLVDIINKALHRSKYVIAVMTENSVDKKWPQKEINAVLSSEIKHDKSKLLPLIHGDAEIILGKNFLMSDKLYKKWEGNPEKIAQDVLALLRKKT

SEQ ID NO: 426 - protein, 488 aa, Salinicola acroporae
  source 1..488: note = Related to NZ_PZJW01000002.1
MKLIEKEENPLRDIKSIDDLLSVLNIEKGKLFYVLYEVGVDKRYKKFSIPKKRGGERPISAPTKGLRLAQYRLFKLLTDNIEFKQCATGFVSKRGIIKNAKVHKGTKWILNVDIEDFFGTINFGRVRGVFMSSPFDMPKQVATLIAKICTFNNALPQGAPTSPVISNIIASSLDNKLLRLSKQYRLRYTRYADDITLSGFGQPPQDIAKIVEQKTVLSEKLVAAFTKSGFKVNESKTRLQKKVVRQEVTGLVINSKVNVPVEFKKSLRAAIHQWCDNPEEAERKFLASTGKIKEGEEVTQGGQILKRNIYGRLSYLAQAKGNEDPTYIKLAMKMGRADPEPPKFLRRIMEKYHEYQVFICHASEDKTKIASPLYEALEEREISTFIDNKVIEWGDSLVDTINHALYKAKLVVAVVSENSLGKSWPQKEINAVLASEIQGESKLLVLVDGDGQELLGRLFLLQDKLYRQWEDNPDELADEIARIAMKIQ

SEQ ID NO: 427 - protein, 564 aa, Xanthomonas campestris
  source 1..564: note = Related to AE008922.1
MPPLPDYASTELLLGLKTRKDLASWLGVSDRALRYMLYRLGDGDKYSTFSIRKRNGGLREIHAPKKALKYLQNKVAHALAGVVPVRQIAKGYVPGRSIYDHAKMHRSKKWVVLVDLKSFFPSINFGRVLGLLRAPPFSLENEVAVAVAQLCTRAGELPQGAPSSPVISNLICRKLDRQLLELAKQAGCGVSRYADDICFSTNRKRVSVEICDFVNEHGWVPGAGLKQLICSNGFEINFSKFRVHEGRDRKLVTGLVVNKGVSTPSRWRDQLRSSLHVIDKYGEAAGVEIISGWTSGFFRKEPGDVLRTIRGKLGYLKWIDKVANHLATDALRRNFPSLASLMPISNDGVSFRIMAEGPTDLLHLEAALDYLRKSGGFLDVRPRFQNFLGDVGDSELWETLLRIAKADVNELTIGVFDCDSPAFMKKTSLVPGGNIQLGPRVYAFCLAPPGTSISNNFCIESLYSRSDATLVDGSGRRLFFGDEFDSASGFSHDGLYKCLHPKKKAIVVSDQVARVHDGASVLLSKAGFASQVKDKAPPFDVVSFDGFRPTWLGIRALAIAAVRK

SEQ ID NO: 428 - protein, 562 aa, Stenotrophomonas sp.
  source 1..562: note = Related to DOBS01000129.1
MPPPSSTVEVFLSLKTRADLASWLGVSDRALRYILYRLEEAEKYKTFLVRKRDGGFREIDAPKPALKYLQEKIASALIEVMPVRQIAKGYVPGRSIYDHAKVHRTKRWVVLVDLKQFFPSINFGRVLGLLRSAPFNLEQEVAVAVAQLCTKAGALPQGAPSSPVISNLICRKLDRQLLELAKNAGCSVSRYADDICLSTNRRQVSKSICEILPEHGWVPGVGLKQVISSNGFEINISKFRVASGRERKLVTGLVVNRGVSVPRRWRDELRSSLHVVSKYGELRGAEIISQWNSGFFRGDGSNALRTIKGKLNYLDWIDRVARRSAIGALRRQFPSLGTLMPRPRGGIPFRVMAEGPTDLLHLKAAFDRFRDDGHLFDILPRFQNFSGDVGDSELWETLRRIAKADVHELTVGIFDCDSPAFLRKSSLAPGGHVQVGEKVYAFCLAAPNSSLSGEFCIESLYSREDATMLDGSGRRLFFGDEFDATNGLSHDGEFRRLHPQKKSIVVSDQVTRVSGGGSVLLSKANFASLISEKVPPFDRVSFEGFKETWRGIRELVIANSRK

SEQ ID NO: 429 - protein, 327 aa, Pseudoxanthomonas sp.
  source 1..327: note = Related to JAGOCJ010000020.1
MSVKSRSDLAGWLGVSERALRYILYKLPDERKYSTFEIKKRNGNARVIDAPSPALKFLQSKLAETLSEIAPPRQLAKGYVRERSIFDHAKVHRSKRWLVLADIKDFFPSINFGRVGVFRAAPFSFGHEVAVCLAQLCTKGGQLPQGAPTSPVISNIVCRRLDRELLELSKRSRCSVSRYADDVCFSTNTRDISARVADFVGEAGWVPGLELKSVFQRNGFQINPNKFMVRCGRERKLVTGLSVNSGVSIPRSWRRQLRSALHVIRKYGEVPGDSIVLSWRPAFQRGSAVNIGQVIRGKVRYAHWIDRLAGRGSVEALHRNYRAGSMG

SEQ ID NO: 430 - protein, 564 aa, Lysobacter sp.
  source 1..564: note = Related to NZ_LMHF01000016.1
MGPLSLSPEAIAFSGLKTRAELAGWLGLTDKKLCYLLYVLPATQKYITFQVAKRDGSSRTIDAPHPALKQIQRKLLSVFRELAPATGVAKGYVNGVGVIDHARLHRRQRHVVLVDLENFFPSITFPRVRGALLGKPFLFPPKVATCIAQLCCKDGVLPQGAPTSPVLSNLICRSLDHKLLALAKANRCRVSRYADDICFSTSLVEVPSIIATLYDGNYLVGPALIAAIHASGFTINQKKFKAKSQRTQQLVTGLVVNRGVSLPRRWRRQLRVLLHLADKKGAARATEIASAWTKPVAFRRGSGSIEQLVRGKTNYAQHVDLRCDKSFSESIYRNYGGVRKLMPRPLRGIAFRVMTEGKTDLLHLESALKWFQERAEFAEFKPRFLNFPGDIGDVELLKTLQRIAKSDVPELTVGVFDYDNIKDMNKIGLAPGAHLQLGSRVYAMCLGEPAGFTGTRFCIENLYQKNQLVAMTSEARRVFLPEDFDQDGISLDGLFKRAQPRATAAIVSDKVVRLSDGFSASLSKAEFAEMIFRSVHPFDQIDFSGFGPTFNALRRIVEEVSLAG

SEQ ID NO: 431 - protein, 563 aa, Lysobacter sp.
  source 1..563: note = Related to NZ_JAHXYK010000004.1
MGPHSYSPGALAFLNLKTRADLAGWLGLTDRKLCYLLYALDASKKYTSFQIAKKKGGVRTIDAPHPALKYIQRKLMHVLVELAPPTGIAKGYVAGVSTIDHAWLHRRQRHIILADLDSFFPSITFQRVRGALLAKPLSLTAKVATCIAQLCCKDGALPQGAPTSPVFSNLICRSLDHKLLALAKAHRCKVSRYADDICFSTDLKVIPTTIASWVGDRYLAGPSLISAVSSSGFSLNPSKFKVRSKESQQLVTGLVVNDGVSLPRHWRRQLRVILHLSSKRGLVRAKEITDGWARPAASRCEADSLEHFIRGKTYFAQYVDFRCRRKFSESIYRNYSGMRKLMPRPLSGASFRVMAEGKTDLLHLEVALKWFQSNGEFTDFRPRFVNFHGETGDVELMKTLERIAKSDIPELTIGIFDCDNSKFMLKNGLSPATHQSLGGKVYAMCLGAPLALTKSTFCIELLYPRSQLLTMTSGGRRIFLPDEFDLNSGLTPDGLYKNKFPKATAPIVSDHVERVVDGFSALLSKADFADMVHQAVHPFDAMDFSGFRATFDAVRRVVDEVYS

SEQ ID NO: 432 - protein, 551 aa, Lysobacter sp.
  source 1..551: note = Related to NZ_JAKPBV010000011.1
MALSSRQDLAKWLGLTDRELRYVLYALSSDKKYTTFTIKKRTGADRVIEAPHPALKNLQRKLLTAISEIAPASGLAKGYVLGRSTIDHAWLHRRKRFVILADLKEFFPTITFRRVRGALLAKPFQLPSAVATCVAQLCCKDGVLPQGAPTSPVLSNLICRSLDHKLLQLAKKHRLAVSRYVDDICFSTSRPTIPGNIAVPHGAEWEAGPELTEAIRVSGFELNHSKFKVRSRETTQLVTGLVVNHGVSLPRRWRRQLRVLLHLVKKHGEKKAGEIAASWVRPTASRRGFASIEQVIRGKSHFAQYVDRRCNRAYSDALFRSYPGQRRLLPRPLRGVQLRLMAEGKTDLLHLEAAHRAFNTAGEYAHIRPRFVNFPSDTGDVELLKTLNRIAKSDIPELTIGVFDCDNPKFMKDAGLQPAGYVQLGSNVFCMCLAPPPSLAGVPFCIELLYERDELCAMTTDARRVFLPDEFDQATGLSHDGLYRRTNPKKSALVVSDQVVRVSDGYSSLLGKADLATLVSQQVPPFEEMNFGGFQPTFDLIGSIIDMVHGR

SEQ ID NO: 433 - protein, 577 aa, Stenotrophomonas sp.
  source 1..577: note = Related to NZ_LXXZ01000065.1
MSASPPPIKKTSLLSPNAIAFRSIKSRSELANWIGIKESTLIYILYRLPTSKKYTDFLIPKRNGGTRMISAPRKALKYAQKRISSVLYDISPPRNLSKGYIPGRGIFDHAYRHRRRSTVVTADIKGFFPSINFGRVRGMFAAAPFGLPLDVATMLAQLCCKDGELPQGSPSSPAISNIICRSLDLDLAGFSRKHRITVTRYADDVCFSTNMRKNLFPLVERNDLLGEVPGGEVSRIFEKNGFELNLKKFNLSKSNSRQMITGLIVNSHVNVPRQWKRQLRTLLHLRSRMEDAQATEIANTWARPQASRKGVTESIDHLIRGKASFAAYIDSRSGTRHIASLHRGYPKLRQMLPRMNPSFPVRIMAEGPTDLLHLEAALRHCSDRIDFSNVALRLHNYQGDVGDTDMIKTLHRINKVDVEELTIGIFDHDNPSFLKEISLNEGSHVRLGRMVFAACLSRPKFVTGNYCIESLYRRIDSSRVTSEGRRLYFSDEFDAEGLHSQGVLRRQYPKKTALVLSERVFDPKDPNVSLTLSKTDFAAMVNAGAAPFSDMDFSGFLPTLAHLRKMIDEAMYFSGNS

SEQ ID NO: 434 - protein, 578 aa, Xanthomonas translucens
  source 1..578: note = Related to CP076250.1
MPSSPPVKKNSQQLSDRALEFKAMASRSDLAQWIGIKEKTLLYILYKLSDSEKYKDFTISKRDGGTRLISAPLKALKFSQKRISAILQEISPPRHLAKGYVPGKGIFDHAFLHKHRKTVVTADITNFFPSINFGRVRGMFLSPPFSLPTSLATMLAQLCCKDGQLPQGSPSSPAISNIICRSLDLELLEFSKRHRISVSRYADDICFSTNMRKPIFGLYEINSQFGNFPGTELSDIFTRNGFTLNIKKFKVSKSNSRQMVTGLIVNDRVNIPRAWRRQLRVLLHLRSRMEDAATTKVVNSWSSPLPSRKGETSSIDNLIQGKASFAAYIDRRSGTNHIGGLYRSYPKLRGMLPRVTQTFPVRIISEGPTDLLHLQAALEHYGSKLDLSNISIKFHNYQSDQGDADTLQTLRRIAKVDVEELTIGIFDYDNPKLLRDLSLDAGGYVRLGRMVFAACLARPAQTNGMYYCIESLYRRDQASRTTTEGRRLFFADEFKEDGSSQDGSLRREHPKKSALVLSERVFDPAKPEVSLTLSKTDFASMVFTKAAPFSDMDFSGFLPTLTLLRRMVDEAMRYQGIK

SEQ ID NO: 435 - protein, 574 aa, Xanthomonas campestris
  source 1..574: note = Related to JAJUAC010000002.1
MPVKPPSLSNRSLQFLAIRTRADLANWIGLSEKALLYILYKLSPERKYTTFLIKKRNGQFRRISAPQKALKFSQHQISLAIQEITPPRHIAKGYVKGKSISDHARQHVRKKIVVISDLKNFFPSINFGRVRGLFLSPPYSFPTDIATILAQISCKDGELPQGSPSSPAISNAICRKLDRQILQLASRNRVSVSRYADDICFSSNKKISLSICDTSLITGDVAGQALRGIIQNNGFQVNDAKFHRIPYNQRQMVTGLVVNEGISIPRKWRRQLRAILHLRSKFDDPRSTEIVNSWSSPQASRSGKITSVDHLIKGKASFAKHIDRTSGRRVVESLHRGYPSLSELFPRVSPEFPVRIMTEGSTDLIHLDAALQRYEKQLELFNISIKLHNYIGDTGDVDVLSTLRRIAKVDVDELTIGLFDCDNPRLMKEISLEAGSYVRLGRMVFAAALAPPNSSTVPPFCIESLYPREQSTRRTKEGRRLFFGDEFDKSGKFIGEDINREFPQKTAVALSEKVYSSSDPSTSLTLSKVDFANMVSSGAHPFEDIDFSGFLPTLNLLRAMIDDATRHRYRGKER

SEQ ID NO: 436 - protein, 527 aa, Xanthomonas axonopodis
  source 1..527: note = Related to NZ_CP031059.1
MSPEKKYKSFRISKRNGGEREISAPTSVLKKIQKRIAFGVDGVRKKSLISNGFEKGRSIFDHAQPHKRKSLVITADVKDFFPSINFGRVRGVFLSPPFGFNNKVATLLAQLCTDGASLPQGAPSSPSIANVVCVQFDRLLVTLAGKCRCSVTRYADDICFSTGMADVPKYIAVRKDGNYVPSQALIKTFKDGGFEINLDKFRVVDGKDALVTGLKYRGGIGLPRKWRRRLRTELNLLRKYGDGAEKIIASWGGVTEVAGLPESQGSPRILGKIGFLRWLDGKAGSSNALRMARSYPQLRKEFRAVIPYENIDLLVEGVTDKVLLLAALSALQAKGSFSDLKLNFPESAMKGGPDLEKTVRLVASTGARRNLTIALFDSDDSEVLARAGLAPQSGVYYRAIASGVYVMALKPPPWMLVESFCIENLLRNDTFSVEDSHGRRMFLANEFSENGLHQSKEFFRTRPNKKAIVVDSDVYSVKSGKSMALAKYAFSELVANGQAPEEDYYGFHGTFSLIQEVSYDFALDKVR

SEQ ID NO: 437 - protein, 527 aa, Stenotrophomonas maltophilia
  source 1..527: note = Related to JADUNR010000014.1
MSAEKKYRSFQIRKKNGGQRAITAPTDVLKRIQKRIAFGVDGVRKRSLISHGFEKGRSIFDHARPHKSKSFVITADIKDFFPSINFGRVRGVFLSAPFGFNNKVATLLAQLCTEGNCLPQGAPSSPSIANVVCVQLDRLLVLLAGKCRCSVSRYADDVCFSTGSSTVPKYLSVRKDGKYVPSQALLKTFKDCGFEVNLEKFRVVDGKDALVTGLKYRGGIGLPRKWRRRLRTELNLLRKHGSGANKIISGWSGVQEIAGITEKSDCPGISGKIGFSHWLDVKAGSSRTLRMARSYPQLRKEFKAVIPHQKIDLLVEGVTDKVLLLAALAALQVRGGFSDLSFNFPDSAMKGGPDLEKTIRLIASTGARRNLTIALFDSDDSEVLAKVGLSPQTGIYYRAVAEGVYVMALKPPDWVISEIFCIENLLRKDTFAVQDANGRRIFLASEFSENGLHQSKNFYRIRPNKKAIVVDSDVYSVTTGESMALAKHAFSELVAAGEAAGEDYNGFRYTFSLIQEVSYEFALEKSR

SEQ ID NO: 438 - protein, 574 aa, Xanthomonas translucens
  source 1..574: note = Related to CP043540.1
MASLSPNSFGLTDADLIRFLSMASRNELAAWLGVSERQLKYVVYAMPLHKKYKVFRIKKKNGGEREISSPTDILKRIQRRIASAVDSARTRSLISNGFEKGRSIFDHARPHKGRVFVITADIKDFFPSINFGRVRGVFLAPPFRFNNVVATLLAQLCTDGESLPQGAPSSPSIANIVCVQLDRLLMELAKKSKCSVTRYADDICFSTGIAQVPKYLAVKNGDDYIPSQALCKILNNNGFEINLEKFRVCRGKDALVTGLKYRGGIGLPRKWRRRLRSELQVSRKYGAAAANIIAAWDGSDEPKLTGENNELLCVSGKIGFSKWLDGKVGAQRTLALARSYPQLRGVFKAVIPHREIDLLVEGVTDRILLIAALLALQKRGLFLSLKFNFLSSAMKGGADLEKTVKLLAATGARRNLTIALFDSDDGEILAKVGLVPASGVYYRAIAEGVYAVALKPPSWLTAETFCIENLLHPDTFSIEDDLGRRIFLATEFSERNGFHQSGKFFRVKPNKKAIVVDSDVYSTTSGEPVALAKHAFSELVAQGAAPSEDFYGFHETFSLIQEIAYEFGLAAGRT

SEQ ID NO: 439 - protein, 565 aa, Xanthomonas sp.
  source 1..565: note = Related to JAGHWV010000014.1
MAPPLSKKEIVNFLAISNRSELATWLSVSERQLKFVVYALPIDCRYRKFKIAKKNGGTREISAPVEVLATMQRKIGSAIDSIRKRSLISNGFERGRSIYDHAKAHKGKSKIITVDIEDYFNSINFGRVRGIFLSSPFLFSPTVATLLAQICTDGKSLPQGAPSSPSIANLACVRLDRMLVEIASKARCSVSRYADDICFSTGLSEVPKFLAYEDDGSYLPSNVLADIFKSNGFSINKDKFAVRSRNKAMVTGLKFHGGIGMPRKWRRRLRSELQVCRKYGDEAASIISSWTFGPNRVQLKSHGISSVAGKVGYLHWLDGKSGADKVRRLAESYGQLAGIFGPLMSFGEIDLLVEGMSDEILLNAALRNLQKKGMFEGLKFNFLELGKKGGPELEKSVRLLVTTGARRNLTIALFDCDDNDVLTKVGLEPANGINFRRLSDGIYVAALRPAGWTQSDQYCIESLLRRDTFELSDISGRKLFLSSEFSDNGLHHSMNFYRTTPKKKTLVVDSEVYCVRTGASMALSKIVFAQIVASGTGVAEDFYGFVETFKMLYEIHLNHRVVAVK

SEQ ID NO: 440 - protein, 561 aa, Thermomonas sp.
  source 1..561: note = Related to NZ_CP049872.1
MPLEEREAEFLALRTREALACWLGITDKQLRFLLYKKLDQSYRTFVIPKARGGSREITAPSKFLARLQRKIALVVAAISPPRGLAKGFVKGLSVLDHAALHANKRWVVCLDLKNFFPSINYGRVLGVFRSRPFEFPDAVAIPLSQICCYLGLLPQGAPSSPAISNVVARQLDRRLAEFARKNKLSVSRYADDISFSTNARIVPVGLMLEDRSPGNEILELLVQSGFVINGEKFRVRHASERQQVTGLIVNDRPRMPRFWRRQTRVLMHLRRVHGDENALSIAKDFRSKRKLSDVKSIEALVRGRATFASHLDDRFQTDFVESLARAFPEQRSVLESRRKVAHIRVVAEGKTDKKYIAQAFSALSGHDSRYRRVKIEFSDLPDKSEGFGDVALRKHVQEISTVQLPVFTIALFDCDNSKLMADLNLTAASYVPLSPTLAIACLPQPAHVSDAAFCIEHFIPAHIRALRDSKGRRIFTVDEFDSTNGRHRTESLYRIHPKQATLIVDSDVFSMTSAESVALSKSQFCDLVCERAPPFEDFDWEVFRPVIDFLLSVYEGATSRR

SEQ ID NO: 441 - protein, 563 aa, Xanthomonas arboricola
  source 1..563: note = Related to NZ_QREQ01000002.1
MAPPDLSLQAASLLAVSNRAELAEWLGTTDKRLRYMLYGRGNIGLYKVFEVAKRSGGTRKIAAPKPFLKALQRRLAAVFPLISAARGISMAYTAGRGIIENAKVHRRKRWVVATDLEEFFPSINLGRIRGLFLSEPFNFPKEVATVLAQVCCYQGALPQGAPTSPALSNIICRSLDRKLVEFARRSGIAVTRYADDIVFSFNFKECPDSLVNKVDGRWIVSDILSEIIESSGFKVNHKKTRVTPRSQRQLVTGLVVNQRPAMPREWRRRNRVILRLLQTYGKERASQIISEWKGLRRPGADAEAIIRGATAFASNLDKNFNGTYTSSLRRNYPLLSQVISYSPDLVPVEVLTEGKTDRLLLEFAYAQLRLLPEFQDLRLKFSRLSDTAGDGALAKRLDELAARGVRTLTIGLFDADNDQYLSKYRIAAGEFSAVSKTSDYVYSGIIPKPTDDAPSRFCIEHYFPRDFISRTDEFERRLYFLDEFDKRNGRHKSLPLYKISEKSTLIVDDKVFSIMTDDDRNYAMTKADFAEKVVSRTPPYEDADVNWFSPVFKMLKNFSLRYS

SEQ ID NO: 442 - protein, 541 aa, unidentified
  source 1..541: note = Related to JAFWYH010000002.1; note = Clostridia bacterium
MKDIKTYEDLCMVLEINQGYFYSVLNKIKNKKGYTKFSIPKKNGGAREILAPSPIIKSLQLKIKAYIEGKYFPHTCAKGFKKGCCNVDNAKMHVKRNWCLNLDLKDFFPSINFGRVYGLLMSEPFNANKKIAVALAHILCYDNELPQGAPSSPLISNLIAYSLDNKLLALAKEYHCNYSRYADDISFSSNSTHMPKQLVVFDDLIHEWIIGDDLQNTIESCGFSINHGKTRLLKKNQRQEVTGIIVNSKLNLNRKYYREIRSIFHKIKVNGIKEVAKQNHERYGKCKDNSEFGLISFINGKLAYYKSVVGEDNPCYNKLCKLYNNTIEYKYKNCKSSKQELIDNAMFIIETSEGQGTAFLLKDLGLVTCKHCLGFKHDDFCTEEELIIFNKQNEDIIYAYRVSNPENRFKLKLKKIFKESDLAILELLTDEILQYYFYPSKERLDIHSKNCTLLGFPNHSKGSSISEINNIQVSSKKAYFGRDYYCLDKPIITGNSGGPLLNEQNEVLGIACKGAGDITSASETDFNGVIPIELLYTEKDA

SEQ ID NO: 443 - protein, 690 aa, Cupriavidus necator
  source 1..690: note = Related to CP074390.1
MTKLPSMDQIIEALVRSSPSFFSRRVLGMSYDHLKAIVYPRPSYQSFTIKKRDGTDRTIHEPRKPLKIIQVKVLAFLKERSSPLKPAVHGFVAKRSILTNALVHCSPKTKHVFNVDLEDFFPSITFYRVRGVLLHHPFNFSHQVATVIAHICTLDNVLPQGAPTSPFLSNLVCRTMDRDLTDLARRSMARYSRYADDITFSFRVSKTLKLPAAVCSVNGDGDLAIGTELHDIIVNKHHFKINSAKTRLSDRTRRMEVTGLTINRFPNVPRVFIDRIRGALNAWEKHGYDQADKAWQARITAAATGAYEKKPWKRQIRTGKAPALKNVLWGKLLYLRMVRGKDDLIYTRLAERYNAAAAATTAAGSFSAPTLPVEPVVRDKETALDACFVVDWYGDYKHPALGDEMPMAQGTAFVYRELGLIITCNHVFEWEGQVGKVDTVIDYESPYLTNKILQLIQPGTKKSWPAKVLFRDKPMDFAILAFAEEPPQHRYFSAMDTPIEPGAQGVLIGYPAWKQWTLPDFNDQKVLNRTSPHAGMNSFTITGAGSIRPGNSGGPFTDDRFRVAGMAQRGAYMGSGHDESLCFEIIDDLIAKYKASLVPPPAAISVPPAAPVIGSGAPPATPPASIPVLPAPPAPAPPNAGCTRTCRSADATGPTARVRRMNRTTAQADYAITRRRLSRSSDRLRSGTAV

SEQ ID NO: 444 - protein, 638 aa, Burkholderia gladioli
  source 1..638: note = Related to PDDY01000004.1
MAILLGTDQITEALVRSNPSFFSRRVLGMPYDRLKAIVYPQPPYKSFILKKRDGTDRTIHEPRKALKIIQNKVLAFLEERSPALKPTVHGFVAKRSILTNAMVHCSHKTQHVFNIDLEDFFPSITFYRVRGVLLHHPFKLSHQLATVIAHICTLENVLPQGAPTSPFLSNLVCRSMDRDLADLARRSLARYSRYADDITFSFRVSKTLKLPAAVCSVDISGNLTIGTELHDIIVNKHHFKINSAKTRISDRARRMEVTGLTINRFPNVPRVFIDRIRGALNAWEKYGYDQANKTWQARVTEGATGTYEKKPWKRQTRGGQVPALKNVLWGKLLYLRMVRGKDDLIYTRLAERYNAMVATSTAAGQFSASTLPVEPVVRDKETALDACFVVEWYGDYKDPTLGEEMPIAQGTAFVYRELGLIVTCNHVFEWAGHVGTVETVIDYESPYLTNKVLRLIQPGTKASWPAKIVFRHKPMDFAILAFVGEPPQHRYFSAMDAPIEPSAQGVLIGYPAWKQWTPPDFNDLKVLNRTFPHAGMNSFTISGAGSIRPGNSGGPFTDDRLRVAGMAQRGAYMGTGHDESLCFQIIDELIATYKASLLPPLAASTLGAAAPPTTSPAPISHPPSHPAPPVQDAPASDT

SEQ ID NO: 445 - protein, 1224 aa, unidentified
  source 1..1224: note = Related to BKCJ010000001.1
MTTLSELNRCDVATFIDRLRGIYEHSPWIPERAATHRPFANETALKLALQAVVTHATEGEQLGLIREHPELAGKAAVAGELTMESTSEQAASGLHLCSADEYATLHQLNADYNAKFGFPFILAVKGPTGKGLTRRQVIAAFTRRLKNQRADEIAECLRQIKRIAEIRLNDLLGVSLEFGPAIMQWAETIAAWSDADNAADADFDLTCAYMTPAHRRTADQLRDWMTDAGMDAHIDAVGNVVGVYRSPVPGAKTLMTGSHYDTVRNGGKYDGRLGILLPIAIVRHLYLRGETLPFHLEVVGFAEEEGVRFKSTFLGSNAITGHFDLSLLDQVDADGVSMRDALTAAGHDVARIPALARQPEDILAFVEVHIEQGPVLLQRDLALGVVTAIAGSSRYLVQLTGLASHAGTTPMSMRKDAAAAAAEIVLLVEQRCAQGQSLVGTVGQLEVPGGSVNVIPGACKLSLDIRAADDAVRLAAVQDVLDGIASICAERQVAFALERIVDASAAPCAPHLMQQLGAAIERAGLPRFELLSGAGHDAMAMAAITDVAMLFTRCGNGGISHNPLETMTADDADIAARASHEVTPRATDRRLYNWAIIQVQEKDTGGRLLFSIRAYMAILPNMDQIIETLVRSSPSFFSQNILGINYNELRAIIYPRPSYQSFTIPKRNGTVRTIHEPSKTLKIIQLKVLNFLLERSSPLKPAVHGFVANRSILTNALVHCSSKTQHVFNIDLKDFFPSITFYRVRGVLTHHPYNFSHEVATVIAHTCTLNNSLPQGAPTSPYLSNLVCRTMDRDLTELARRSLARYSRYADDITFSFRVSKTSKLPAAVCSVDSDGDLVIGSELHDIIVNKHHFNINSAKTRLSNRTRRMEVTGLTINRFPNVPRVFIDRIRGALNAWEKYGYIDAEKKWQERVTSAATLAYEKKPWKRKTRAGRVPALKNILWGKLLYLRMVRGKDDLVYTRLAERYNAAVLTATSAGPFSAPKLPVEPVVRDKETALDACYVVEWYADFNDPTIGEEMPLGQGTAFVYRELGLIVTCNHVLEWNGEINNIGITIDYENKYLTNKVLKLIQPGTKKSWAAKVIFRNKQMDFAILAFADEPPPHRYFAAMDAPIEPEANGMLVGYPAWKQWALPDFNEQKVLNRTTPHAGMNSFTITGAGSIRPGNSGGPFTDDRFRIAGMAQRGAYMGEGHDENLCFQIMDDLISKYRATLRIHVAIPPASGA

SEQ ID NO: 446 - protein, 647 aa, Burkholderia pseudomallei
  source 1..647: note = Related to NZ_RSFB01000003.1
MDQIIEALVRKHTSSFSQRVLGMPYDALKALIYPRPSYRSFTIKKRDGSDRTIHEPRKALKNVQLKVLAFLQERSSPFKPAVHGFVADHSIFTNALVHCSPKTQHVFNLDLEDFFPSITFYRVRGVLLNHPFKFSHQVATVIAHICTLDNMLPQGAPTSPFLSNLVCRTMDRDLTELARHGLARYTRYADDITFSFHVSKTSKLPASICSVDDDGALVVGSELRAIIVDKHHFKINAAKTRLSDRTRRMEVTGLTINRFPNVPRIFIDRVRGALRAWETYGYENAEKVWHARVAAAATGPYEKKPWKRQTRAGGPPALKNVLWGKLLYLRMVRGKDDLIYTRLAERYNAAVLNEQAAGAFVAATLPVEPVVRDKSNVLDACFVLEWYGDYSSPTLGEEMVGGQGTAFVYRELNLLVTCSHVFEWSGKIGKVDAEIDINDPCIATKTLQLVQPGTKKAWPAKILFRDKPMDFAIVAFEDPPPHRYFSAMDNPIEPSAQGFLIGYPDWKQWNLPDINGLTVLNRTMPHAGMNSFTITGAGSIRPGNSGGPFTDDRFRVAGMAQRGAYIGRGHDENLCFKIIDALIAKYKATLPSPPPLAPAVMAASAPASAAPIVVPTSTDALSATPSAAGATPIVPPSEGESPPPDAI

SEQ ID NO: 447 - protein, 639 aa, Aromatoleum aromaticum
  source 1..639: note = Related to CR555306.1
MAILLSLDQIVEALVRSEPASFSRDVLGMPYDSLKAIIYPRPPYKSFTIKKRDGSDRTIFEPRKRLKVIQLKVLDFLQKRSTPLKPAVHGFVAKRSILTNAQVHCSPKNHHIFNIDLEDFFPSITFYRVRGVLLHHPFKFSHEVATVIAHICTLDKTLPQGAPTSPFLSNLVCRTLDRDLTELARRCLARYSRYADDITFSFRTRKTIKLPAAICSVDSDGDTVIGTELHDIIVNQHHFKINSAKTRLCDRNRRMEVTGLTINQFPNVPRVFIDRIRGALIAWESHGYAAANKVWNERVTAARSGAYEKKPWKRQTRRGQVPDLKNVLWGKLLYLRMVRGKDDLIYTRLAERYNSAVLITAATGTFTAPKLPVEPVVRDKETARDACFVVEWMGDYDEPGVGTEVPISQGTAFVYRELNLLVTCNHVLEWQNGEEGKFLAQIDYESPFLSDKALKLIQPGTKKSWDAKILYRNEQMDFALLAFEDPPQHRYFSAMDNPIEPGAKGFLIGYPAWKQWNLADVNSQTVLNRTSPHAGMNSFTITGAGSIRPGNSGGPFTDDRFRVAGMAQRGAYMGDGHDENLCIEIIDELIAAYKASLVAPAVLVPAASAAAPASPATAAPSAKPTAPPPAPTPPPPVMP

SEQ ID NO: 448 - protein, 664 aa, Burkholderia sp.
  source 1..664: note = Related to NZ_QMFZ01000074.1
MAIVASIDEIIESLVRNNPAWFSRRILGIPYSTLKEIVYPRPPYKRFTIKKRDGTDRVIFEPRNRLKIIQQRTLKFLLDRSGPLKPAVHGFVSKRSILTNAQVHCSPKVHHVFNIDLEDFFPNISFYRVRGVLEKHPFNCSHQVATVIAHICTLDKVLPQGAPTSPLLSNLVCRSLDRDLTDLARRSFARYSRYADDITFSFPVRKTSRLPAAICHVDEDGDLLIGTELHGVITKHNFKINPAKTRLRDRSRRMEVTGLTINRFPNVPRRFIDRIRGALHAWEKYGYDAAEKAWSERVEKATTGPYEKKPWKRQMRRGRLPKLKNILWGKLLYLRMVRGKDDLIYTRLAERYNDAVLAAHAAGPFTAPRLPVQPLVRDKETARDACFVVEWLGDYQSAAGVTDDIPMGQGTAFVYRELNLLITCDHVFEGKANVGHFEVEMDYEDVELVNKTLNLVKPDTHQKWPAKILYRNAQMDLALLAFDHPPQHRYFSAMDNPIESGAQGILIGYPAWKQWNLPDFNDQKVLNRTTPHAGMNSFTISGAGSIRPGNSGGPFTDGRFRVAGMAQRGAYMGDGHDECLCFEIIDDLIDKYRASLVPPAPVPAPTPAVGAAAGLAAAMSAAPPAPIPIPAAVASYTEAPSVSASAIGSVATPVQPPPSDEPLM

SEQ ID NO: 449 - protein, 660 aa, Burkholderia pseudomallei
  source 1..660: note = Related to QXFE01000005.1
MAILASLDQIIEGLVRNHTAWFSSRILGIPYSTLKGIIYPRPPYKRFTIKKRDGTDRVIFEPRNRLKIIQERTLKFLQERCGPFKPAVHGFVSKRSILTNAQVHCSQKIHHVFNIDLEDFFPSISFYRVRGVLEKHPFNCSHQVATVIAHICTLDKMLPQGAPTSPFLSNLVCRSMDRDLTDLARKSLARYSRYADDITFSFPVRKTSRLPASICHVDEDGELLIGTELHDIVTKHSFKINAAKTRLSDRTRRMEVTGLTINRFPNVPRVFIDRIRGALHAWEKYGYDAAEKAWSKRVVKAALMGAPYEKKPWKRQVRRGRMPKLKNVLWGKLLYLKMVRGKDDLIYTRLAERYNEAVLRAQAAGPFTAPRLPVQPVVRDKETALEACFVVEWLGDYQSTAGVTDDILMGQGTAFVYRELNLLVTCHHVLEGKANVGHFQVEMDYEDAELVNKTLNLVKPDTKQKWPAKILYRNAQMDLALLAFDYPPQHRYFSAMDNPIEPGAQGVLIGYPAWKQWNLPDFNDQKVLNRTTPNVGMDSFTISGAGSIRPGNSGGPYTDDRFRVAGMAQRGAYMGDGHDECLCFEIIDDLIAEYRASLAPAPVPAVSTAATSATVTAGTTPAAVSAPAAAAMSASAAIVPSSAMSSLGTLVQPPPRADDT

SEQ ID NO: 450 - protein, 643 aa, Burkholderia sp.
  source 1..643: note = Related to QTPQ01000002.1
MRTHLSIEAILEELARQKVFWFSTHVLGIAYSELKAIIYPQPPYKHFTIKKRNGTDRVILEPRKRLKIIQEKVLAYLQNRAGSIKPAVHGFVRKRSILTNAQAHCSPKNHHVFNIDLEDFFPSITFYRVRGVLEKQPFNFSHEVATVIAHICTLDKKLPQGAPTSPFLSNMVCRTMDRDLADLARRNLARYTRYADDITFSFPVRKTSRLPAAICRVDDDGDVLIGTELHDLIANKHHFKVNSAKTRLSDRTRRMEVTGLTINRFPNVPRIFIDRVRGALHAWEKYDYAAASKVWSDRVVAASTGPYEKKPWKRQTRSGKVPELKNVLWGKLLYVRMVRGKDDLIYTRLAERYNAAVLKTRAAGPFVAPRLPVEPVVRDKTTAREACFVVEWWGDYQSAPGHTDDIPMGQGTAFVYRELNLLVTCNHVFEGVATVNKHSFNTDFDAPEMVNKTLTLVQPSTKQSWPAKILYRNPQMDFALLAFEDPPSHRYFSAMDCAIESGAQGILIGFPAYQQWNLPDFNEQKVLNRTLPNAGMISFTLSNSGSVRPGNSGGPFTDDRFRVAGMAQRGAYMGTGHDECLCMEVIDALISEYKATLASSAPVTPASALDAAPIVAPSGAVIAPRTAAPAPADPEGPRPPADA

SEQ ID NO: 451 - protein, 650 aa, Paraburkholderia gardini
  source 1..650: note = Related to CAJQYY010000007.1
MASIPNFDAITESAVRSNIGFFSRRVLGISYDRLKAIIYPRAPYRSFIIKKRDGTARLIHEPRKRLKILQEKVLAFLDERSGPVKPSVHGFVRKRSILTNARVHCSPKTQHLLNIDLEDFFPSITFYRVRGVLRKHPFNFSHEVATVIAHLCTLDRTLPQGAPTSPFFSNLICRSMDRDLTELARHSLARYTRYADDITFSFHVRNAARLPAAICSVDAEGAVQIGQELHDVLVNKHHFNLNSSKTRLSDRSRRLEVTGLTINRFPNVPRIFIDRIRGALNAWEKHGYDAAEKTWQARVVAQSNGAYEKKPWKRQTRSGKVPELKNVLWGKLLYLRMVRGKDDLIYTKLAERYNAAVGAAQATGVFHAPKLPVQPVVRDKVTAQEACFVVEWYGDYNEPGIGAEMPYVQGTAFVYRELNVLITCNHALVWENEEGKFPAVIDYESAHLSGKVLSLVRPGTKEKWPAKVIYRNKPMDFALLAFDGAPPLHRYFSAMDNPIEPGAQGFLIGYPAWKRWNLPDINQQTVLNRTSPHIGMNSFTVTGAGSIRPGNSGGPFTDDRFRVAGMAQRGAHMGVGHDENLCIEIIDDLIAKYRASMVPPPPAAPAPADPAASVSAPVLGVPPPAPSAPAAPASSQNAAPVALPPPQTDT

SEQ ID NO: 452 - protein, 635 aa, Rhodocyclus tenuis
  source 1..635: note = Related to NZ_SSSP01000009.1
MAIVKMNEMHEALSRNFVTWFSNNALGIPYSSLKGIIYPRPPYKQFVIKKRDGSARVIAEPRNRLKVIQQKVLTFLTERAGPFKPVVHGFVPKRSILTNAQIHCTPKNHHVLNIDLKDFFPSITFFRVRGVLRKHPFNFSHEVATVIAHICTLDGTLPQGAPTSPFLSNLVCRSMDRDLTDLARRNLARYSRYADDITFSFPVRKTSRLPAAVCIVDDDGHLQVGAELQDLITNKHHFTINPAKSRLRDRGRRMEVTGLTINQFPNVPRVFIDRIRGALHAWEKYGYEAADKQWNDLVKNAVTGAFEKKPWKRQTRRGKTPELKNVLWGKLLYLRMVRGKDDMIYTRLAERFNNAVLATHVAGPFSAPKLPVQPVVRDITTARDACFVVEWVGEFHSTPGTCDDVMCKQGTAFVYRELNLLVTCNHLFEHIATINKHEFPTDYEAPEIFNKTLNLVHPGTKQHWPAKILYRNAPMDLALLAFEGPVPPHRYFPAIDSPIEPGKQGILIGYPAWKQWNLPDFNDQRVLNRTSPHAGMNSFTITGAGSIRPGNSGGPFTDDHFRVAGMAQRGAYMGDGHDECLCIQIIDDLILKYKASLTLLTVPALAAVSPDEAAVAATSTPALTSPAPTTPAVTV

SEQ ID NO: 453 - protein, 594 aa, Paraburkholderia panacisoli
  source 1..594: note = Related to NZ_VTUZ01000025.1
MLRNHVTWFSRNALGVDYEKLKRMIYPRPKYKHFTITKRNGSPRVISEPRKRLKIIQERVLAFLEPRSGPLKPAVHGFVPKRSILTNARVHCSPKNHHILNLDLQDFFPSITFYRVRGVLRKHPFNLSHHVATVIAHICTLDGTLPQGAPTSPFLSNLVCRSMDRDLTDLARRNLARYTRYADDLTFSFPLKKTSNLPAAVCVVDEDGGITLGAELHDLITNKHHFAINPAKTRLSDRGRRMEVTGLTINKFPNVPRIFIDRIRGALNAWERNGYDAAEKGWEERIGKAATGPYEKKPWKRQTRGGAAPKLKNVLWGKLLYLKMIRGNDDLIYTRLAERYNAAILKEMAAGPFSAPKLPVQPVVRDYKTAREAVFVVEWLADYHSSPGHHECPIEAQGTAFAYRELNLLVTCDHVLVGKAEFAGMEVPADFDAPEVVNKMLTVVRPETQESWAARVVYRNKQFDFAILQFEEQPPHHRFFSAMDTPIAPHADGVLIGFPAYQNWNLPDINPQKVLNRTLPNAGMVSFTIANTGSIRPGNSGGPFTDDRLRVAGMAQRGAYMGVGHDECLCFEVMDKFIGEWKAKSAAAAPPAVP

SEQ ID NO: 454 - protein, 636 aa, Burkholderia plantarii
  source 1..636: note = Related to JAEDZX010000001.1
MVAIPSADALFESLARNNVNWFSHHILGISYAHLKRMIYPRPPYKHFSITKRNGSPRVISEPRRRLKVVQERVLAFLEARRGPLKPAVHGFVSKRSIVTNARAHCSPKNHHILNLDLQDFFPSITFYRVRGVLRKHPFNFSHHVATVIAHICTLDGTLPQGAPTSPLLSNLVCRSMDRDLTDLARRNLARYTRYADDITFSFPVKKTSRLPAAICVVDDDGGVTIGAELHDLIATKHHFTINAAKTRLSDRFRRMEVTGLTINKFPNVRRIFIDRIRGALNAWERNDYAAAEKGWQDRVQKASAGAYEKKPWKRQTRGSAVPKLKNVLWGKLLYLRMVRGKDDLIYTRLAERYNAAVDKEMAAGPFAAPKLPVEPVVRDHDTAEEAVFVLEWFGDYQSQPGHTDDMVMAQGTAFVYGELNLLVTCSHVFEAEAKVGKMMVPTDFQAVEMANKTLQLVRPGTQQAWPAHILYRNKQMDFALVAFDDPVPQHRYFSVMDNPIQARADGILIGFPAYQNWNLPDFNDQKVLNRTIPNAGMNSFTIANAGSIRPGNSGGPFTDDRFRVAGVAQRGAYMGTGHDECLCFEIADALIAAWKATLVPPAPPPAPAAVVPPPAPPPIAPAGHAPTAPPTPPTTP

SEQ ID NO: 455 - protein, 609 aa, Advenella faeciporci
  source 1..609: note = Related to NZ_BMYS01000009.1
MVAITSAMALNESMLRTSVTWFSSHVLGVPYSQLMRMIYPRPPYKRFTITKRNGSPRAIAEPRQRLRIVQEQVLAFLKERSGTVRPAVHGFVVDRSIVTNAKVHCLPKTQHILNLDLQDFFPSITFYRVRGVLRKHPFNFSHHVATVVAHICTLDGKLPQGAPTSPFLSNLICRSMDRDLTELARRNRATYTRYADDITFSFNVRTASRLPVAICVVDDDGHVTLGTELHDLITAKHHFAINAAKTRLSDRHRRMEVTGLTINKFPNVRRIFIDRIRGALNAWERNGYEAAEQGWQDRVIIGGKVPYEKVLWKRQTRSRVVPKLKNVLWGKLLYLRMVRGKDDVLYTRLAGRFNALVDFEQSFGSFAAPKLPIEPVVRDHDTAQEGVFVVEWAGDYHSSPGRHEDTLQAQGTAFAYRELNLLVTCDHVFEVDATVGSLKAPTDYEAPEIVNKSLRLVRPGTKDSWPARIVYRNRQFDFAILQFEGPVPPHRYFSAMDTPIKPRADGLLIGFPAYQNWNLPDQNEQKVLNRTEPNRSMFSFTISGAGSIRPGNSGGPFTDDRFRVAGMAQRGAYMGDGHDECLCFEVMDTFVTAWRSSTKSTPTTSEIPA

SEQ ID NO: 456 - protein, 601 aa, Herbaspirillum sp.
  source 1..601: note = Related to NZ_VIUO01000001.1
MPNPFLFPALTDSLIRNDVAQFSRRILGLPYSQLQKLIYPQPNYRVFTLTKRNGKLRSIAEPFANIKAFQLLILEYLTKKSSPFKPSVHGFVPHRSILTNANAHCSPRTQHVLNIDLQDFFPSISFYRIRGVLQKRPFNFSHAVASVVAHICTFDGSLSQGAPTSPFFSNLVCRSMDRDLQDLARRHKAAYTRYADDITFSFTTRNSLSLPKNICMEAPDGRVVIGAELNDLITVKHSFAINADKTRLSNRARRMEVTGLTINENPNVRRIFIDRIRGALRAWETHGYNAAQSVWQAKVAKSILAPHENKIWKRQTRTGSTPQLRNSIWGKLLYLKMVRGGTDPLYNHLAERYNAVVEIEKSLGTFVAPRLPVDPVVRDERGARKAVFVVEWFGDFELSATAADVVSGQGTAFAYRESNLLITCDHLFEATATIKDKSYPADINAPEIKNLALFAILPDIPKKTWPVRILYRNAYDDIAILCFEGEPPPHKYFNPMSAPITRNTNGILMGYPAYKQWNLPDFNRQSVLNRFLPAAGMSSFTITGAGSIRPGNSGGPFTDLEYRVAGMAQRGSYEGRGHDACLCFEIIDKHLQKWKASTTLN

SEQ ID NO: 457 - protein, 623 aa, unidentified
  source 1..623: note = Related to nan
MGLTIEQITKILIRSRVSDFCDEILGVPYSEIKKLLYPRAPYLFFELKKRSGGVRRIAKPTKRLKEIQLRVLEFLEKNRGPYKASVHGFISRRSIVTNARTHCSPKTHQILNLDLEDFFPSITFYRVRGALQSHPYHCSHAVATVIAQVCTVDGVLPQGAPTSPFLSNLICRSLDADLNNLARRNRAKYTRYADDITFSFATRSSTGLPAAICSVGADGRVTLGAELNDLITTKHNFKIKESKTRVSNRATRMEVTGITINKHPNVPRIFIDRVRGALNAWKKYGYAAAESAWQKRVRESGTVAYEKKPWKRQTRLGVPPLLKNVLWGKLLYLRMVRGSEDLLYTRLAERYNALVEFEQSIGPFSAPKLPVVPVVRDHKTAMDATFVVEWSADYRISKEDVDSIIGQGTAFSYRQQNFLVTCSHVFEGKATVGSMEVPVDIDTAELENLSIHVVHPHLKERWPAKVLYRNRQFDFAIMCFDGEIPPHRFYPALESPIEVRDEGMLIGFPAYKNWNLPDMNELAVLNRSEPHRGMRSFTITGAGTIRPGNSGGPFTDMRFRVAGMAQRGAYLGNGHDECLCFEVMDDLIAKWREKIAAECANATTKAAMAENKVDASGSLEQLP

SEQ ID NO: 458 - protein, 673 aa, Burkholderia vietnamiensis
  source 1..673: note = Related to NZ_CADFFK010000002.1
MAAAVMEKDGRGRHPDLSEARIQSLEEVAERITRTDVPIFCRSVLGIEYRQLAPIIYPTPPYKHFAITKRDGSPRYIAEPRKRLKILQYKLLEFLTERMTPLKPAVHGFVPNKSIVTNALAHAHRRNHFILNLDLDDFFPTISFKRVRGVMMNRPFNFSFEVATVIAQMCCLNLKLPQGAPTSPFLSNLVCRTMDRDLTDLARRNRATYTRYADDITFSFIVRSRKSLPAAICTADDEGHLALGAELQELITTKHHFTINEAKTRLSDRNRRMEVTGLTINKFPNVRRKFIDRIRGALNAWERNDYAKVQKGWEDRIAAAEKLHVDLKPWKRQYRSGRLAQLKNVLWGQLLYVRMVRGKDDLLYTRLAERYNAVVAKERAAGPFAAKVLPVEPVVRDKTTLRDACFVVEWTGDYDEPGGGSEIPYSQGTAFVYRELNLLVTCNHVLEWENEDASKFPAMIDYESPYLTGKSLNLVQPGTRLSWPAKILYRNKPMDFAILAFEDPPPHRYFSAMDNPIQPGAHGYLVGYPAWKRWNLPDVNAQTVLNRTSPHHGMDSFTITGAGSIRPGNSGGPFTDDRLRVAGMAQRGAHMGSNHDESLCLEIINTLIDTYKATLAPPAPVGAADVVALPPAPAPIAVPSAQVAPVPTAPAEGTAAPIAPPTGAGAPDGLQPT

SEQ ID NO: 459 - protein, 612 aa, Cupriavidus sp.
  source 1..612: note = Related to NZ_AMPR02000466.1
MEVNIFDLEEIGERLTRTDVPMFSRSVLGIEYSKLASIIYPTPPYKHFTIKKRDGSSRHLAEPRRRLKDLQYKVLGFLTERMTALKPAVHGFVPNRSIVSNANAHAHRKNHFILNLDLEDFFPSITFYRVRGVLTSRPFNFSHQVATVIAHMCTLHGTLPQGAPTSPFLSNLVCRTMDRDLTELARRNRATYTRYADDITFSFIVRARRGLPSAICTADDEGHLALGAELQELITNTHHFSINEAKTRLSDRHRRMEVTGLTINKFPNVRRKFIDRIRGALNAWERNGYAAAQKGWQDRIAASASHAYEERPWKRQYRSGGTAELKNVLWGKLLYLRMVRGKDDLIYTRLAERYNAQVQKEQEAKPFTASLLPVEPVVRDHATALEACFVVEWFGEYCSRAGVVDDIPMGQGTAFVYRELNLLVTCDHVFEAFANVNGHSFKTDYEAQEVINKTLNLIRPDTQQRWPAKILYRNAQLDFALLAFEDPVPPHRYFSPMDNPIERRSDGVLIGFPDWKQWNLPDFNDQKVLNRTEPNKGMISFTITGAGSIRPGNSGGPFTDNRLRVAGMAQRGAHMGSGHDECLCLDIINNLIAKYKAALTTVASTPTTYAVD

SEQ ID NO: 460 - protein, 661 aa, Pandoraea iniqua
  source 1..661: note = Related to NZ_CABPSF010000003.1
MDIHSLDDLGELLTRTDVAVFSRSVLGIEYSKLASIIYPTPPYKHFIIKKRDGSPRYIAEPRKRLKVLQYKVLSFLTERMTPLKPAVHGFVPHRSIVSNAKAHTSRKNHFVLNLDIEDFFPSITFFRVRGVLTSRPFNFSHQVATVIAHMCTLGGKLPQGAPTSPLLSNLVCRTMDRDMTDLARRNRATYTRYADDITFSFSVRARRSLPQAICAADDEGHVALGAELQDLITTKHHFSINTAKTRLSDRHRRMEVTGLTINQFPNVRRKYIDRIRGALNAWERNDYAAAQKGWEARIAASTTLLYEQKPWKRQYRSGGIAELKNVLWGKLLYLRMVRGKYDSIYTRLAERYNALVQKEQAAGPFAAPILPVAPVVRDHPTALEACFVVEWLGEYHSTPGVSDDIPMGQGTAFVHRELNLLVTCNHVFEAVAHVNGHPFETDYEAVEVVNKTLNLIRPDTQQKWPAKILYRNAQMDFAILAFEDPVPPHRYFSPMDKPIERRADGTLIGFPDWKTWNLPDFNDQRVLNRTEPNKGMFSFTITGAGSIRPGNSGGPFTDDRLRVAGMAQRGAHMGSGHDECLCLDIINDLISKYKATLAPPAAHANAPAVSATMPAPVASPPIRLLAPLPLSDPAPEAPAQAASPPTAPPLAANSEPPLGDV

SEQ ID NO: 461 - protein, 658 aa, Caballeronia sordidicola
  source 1..658: note = Related to NBTY01000203.1
MVIPSLNVIFEQLTRTFVPSFSQAALGIPYAQLKDIIYPSPPYKHFQIKKRNGSPRFIAEPRQRLKVMQEKVLTFLEERMSPLKPAVHGFVPKRSIVTNARAHCSRKTQFVLNLDLQDFFPTITFFRVRGVLRNRPFNFSHEVATVIAHMCTLNGSLPQGAPTSPFLSNLVCRTMDRDLTDLARRNRATYTRYADDITFSFAVRTASRLPAAICVVDEDGHLTLGAELQDLITGKHHFTINPPKTRLSDRARRMEVTGLTINKFPNVRRKFIDRIRGALNAWERNGYAKAESGWQARVANAESGPYEKKPWKRQTRTGAPPKLQNVLWGKLLYLRMVRGKDDLIYTRLAERYNKAVLKEQAAGPFKAPKLPVEPVVRDKVTAQDACFVVDWYGDYKDPTLGEEMPMAQGTAFVYRELGLLVTCNHVFEWEGKVGKADTVIDYESPYLTSKILQLIQPGTKKSWPAKILYRDKQMDFALLAFEGDPPQHRYFSAMDNPIESGAQGVLIGYPAWKQWTWPDFNDQKVLNRTFPHVGMNSFTISGAGSIRPGNSGGPFTDDRFRVAGMAQRGAYMGTGHDECLCLEILDGLIAKYKATLVPPVPPAPATVLGAPPTPAAGSAALPLPVPAAPAATVNGAAAPAARAPAHPVPAAPIPPTLP

SEQ ID NO: 462 - protein, 624 aa, Zoogloea sp.
  source 1..624: note = Related to WBTZ01000029.1
MNLDAFDEMQKRTSVSWFSHIVLGTPYSQLKTVVYPKPHYKSFVIKKQNGGPRVIHEPRKELKLIQKKILAFLSERAGPIKPAVHGFVHKRSILTNALKHCSPTTHHILNLDLKDFFPSITFRRVRGALRKHPFDCSHEVATLIAHICTFNGTLPQGAPTSPFLSNMLCRRMDRDLTDLARRYRATYTRYADDLTFSFNVRSAERLPSAICMVEDGNVAPGTELTELITTKHGFAINPTKTRLNDRFGRMEVTGLTVNNFPNVRRNFIDRIRGALNAWETYGYAAAQLEWEKRNATYIAAPYITKLWRRQTRANFVPKLKNVLWGKLLFVRMVRGKEDALYTRLAERYNKACAAEQGTVPFVYEKLPIEPVVRDYGSAEDAVFVLEWMGDYHSSPGVFEDMVCSQGTAFAYRELNLFVTCDHLLSGAKAKVGTFEVEADYDAKEMVNKTLQLVHPFTKQSWPAKVLYRNAQLDIALIAFDMPQPPPHRYFAAMENSIRVRTSGILIGFPAYKNWNRPDFLEEKVLNRTEPNKGMASFTITGAGSIRPGNSGGPFVDDRFRVAGVAQRGAYMGDGHDECLCFEVLNQLIDKWKAPQAKSVLPENKIAATIVATSPGAVSTAAPQT

SEQ ID NO: 463 - protein, 601 aa, Thiobacillus sp.
  source 1..601: note = Related to JAJPEP010000007.1
MTTTLSTISLNDILLRHDVHHMSSKILGVPYSTLKALIYPLPPYKSFVITKRNGSPRLIQEPRRALKELQYKALDYFYEQCGLPKPCVHGFTKDRSIVSNAKSHCSDQTQHLLNLDLEDFFPSITFYRVRGVLQKKPFELSHQVATVLAHLCTFKGVLPQGAPTSPLLSNLICRSMDRDLMSLAKRHRATYTRYADDLTFSFSVRRSESLPSNICSFDGGNLTLGNELQAIIAAHSFRINAEKTRLSTRLHRLEVTGITINEFPNVRRVFIDQIRGALNAWEKYGYNLAQKDWERRITDGVASAYEKRPWKRQIRANSPPDLKNVLWGKLLYVRMVRGKDDVIYTRLAERYNAICETEDAKGPFAFSRLPVELIVRNAQDAERAVFVVEWSGDYQPEGNTAPLDVVLSQGTAFAYKDVGLVTCDHVLSYSGKIGGVTYTTDVQSSDVINKTLTVRNPVTGASWRVKVVHRDATRDLAILVFDEAPPAHRHFSSMVAPMNQGMRGILMGFPNWSPGRRVNQTKADVLSCYARSALKRFEISTNIRQGNSGGPFVDESYRVAGVAQQGARQDAGNDECLCVTDLDAWIAQWKASAMGTMAASS

SEQ ID NO: 464 - protein, 602 aa, unidentified
  source 1..602: note = Related to JACXUH010000009.1; note = Betaproteobacteria bacterium
MNDILLRNDVHYMSSKVLGVPYSTLQALIYPRPPYKSFTINKRNGSPRLIQEPRRALKALQYKVLDYLYEHSGLPKPCVHGFTKNRSIVSNAKAHCNRQTQHLLNIDLEDFFPTISFYRVRGVLQKKPFEFSHQVATVLAHLCTFNGILPQGAPTSPLLSNLVCRSMDRDLMALAKRHRATYTRYADDITFSFSVRRSESLPANICSFDSGILTLGHELQATIATHNFRVNAAKSRLSTRLHRLEVTGITINEFPNVKREFIDRIRGALHAWEKHGYDLAQRAWEKLVSDGAIGTYTRRPWKRQTRIGKLPPLKNILWGKLLHVRMVRGKDDVIYTRLAERYNAVCEAENVKGPFAYSRLPVGLIVRNAQDAERAVFVVEWDGDYQPIGSAAPLDMVSSQGTAFAYKDVGLITCDHVLSYSGMIDGKSFTTDVQSGDVINKTFTVRHPATGESWKVKVVHRDAARDLAILEFDDEIPSYRYFSCMAAPTNQNMRGLLIGFPNWSPGRPANQSKADVLSYYPRSGLKRFEISTNIRQGNSGGPFVDEFFRVAGIAQQGARQDGGNDECLCVTELDAWVAQWKAATTASISAPTLVEPVAKSFP

SEQ ID NO: 465 - protein, 595 aa, unidentified
  source 1..595: note = Related to JAHIHT010000028.1; note = Gammaproteobacteria bacterium
MAVHVPLTPSALHTLLIRNNLPYMSRHVLGVSYDTLQAMIYPLPPYKTFALMKRNGTPRVIHEPRQRLKVLQERVLAFLYEHAAPAKPCVHGFTPKRSIVTNAQMHCSQKTQHLLNIDIEDFFPSITFYRVRGVFQKKPFEFSFPVATVLAHLCTFSGVLPQGAPTSPLLSNLVCRSLDRDLMTLAKRHRATYTRYADDLTLSFSVRRAESLPSNICSFDSGILTLGHELQALIEHHSFRINPNKSRLSTRLHRLEVTGITINEFPNIKRKFTDRIRGALHAWDKYGYDHAQLEWERRVNKAAEEAYAKRPWKRQTRTRTVPALKNVLWGKLLYVRMVRGATNTLYLRLAERYNALCARERLKSEFVCSSVPIDSIVRNSNQAKKAVFVVEWYGELDGKDVGGLGTAFKYEDVGLITCEHVIKHQDHGPYADDIPRSEIFVRDAETDETWPVRIVHRDKDHDLAILQFDTANPPVSRHFIRGEKPITVNESGVLIGFPNPTRGRQANQVNAQVVNVFPRAGLPRFEIKERIRQGNSGGPFVDENYRVVGIAQQGAEQGKGNDECLCITEVNRWLDAWKTSLVVAVAVASAPDPIP

SEQ ID NO: 466 - protein, 565 aa, unidentified
  source 1..565: note = Related to DPRS01000035.1; note = Oxalobacteraceae bacterium
MSDQLFGITYSELQALLYPRQPYKTFIIAKRNGSPRVIHEPRIALKVVQEKLLHFLYENAGMAKPCVQGFTPGRSIVTNAQKHCSPRTLHLLNIDIENFFPSITFYRVRGLFLKKPFEFSHQVATVLAQICTYQGILPQGAPTSPMVANLICRSLDKDLTLLAKRHRAIYTRYCDDITFSLSVRDIAKLPVNICSFDSGVLTLGDELQSIFVKNSFRINPLKSRLGNRRHRLEVTGITINKSPNVKRSFIDSIRGALHAWDKYGYEAATAEWEKRPYKRQRRIGGIPSLKNVLWGKLLYVRMVRGGDDVLYTRLAERYNMLCEKEQAARKSFTYSSLPIEAVVRNAADAENAVFVLEWLGDYKGEPVGGQGTAFAYKDVGLLTCEHVFHTVTENGEPVSFDEVKGATLTLQNPSTGKFWPAKLIHKDPYRDLAVVHFDTRIPPAHRHFSALEAQINRNSKGILIGFPNWSPGKRANQLYVTVLNRFPITGLQRIEINGSVRKGNSGGPFVDELFRVAGVAQQGATQANGNDQCLCVTELDKWLVEIKGLAHGLSLDALPDTPVAD

SEQ ID NO: 467 - protein, 581 aa, Polynucleobacter sp.
  source 1..581: note = Related to JACVPM010000001.1
MTVNFHEILIRCDVDYMSKHIFSTSYADLAKLIYPSPRYKAFVISKRDGTPRVIEEPFRKLKRLQYKLLDYLSRNSSTPKVCVHGFIKERSILSNARVHCSSKTSYLLNVDIENFFHSITFYRIRGVFQGEPYNFSYEISTVLAQLSTFNGRLPQGAPTSPFLSNLICRSLDGELMRLAKSHRGMYTRYADDLTFSFSARTPLGLPKNICEFDGGNLHIGNELLSIIEKNSFKLNEKKSRISSRKHRLEVTGLTINEFPNVRRNYVDQIRGAIHAWDVHGYEAAQKRWIEKNNVAVKVRQTRNLYAPQLKNYLWGKLLHLKMIRSRGDPIYTRLAEKYNTLCAKESGKGFIFAPKLPIEPIVRNANDIESAVFVLEWSGDYILNEASPEHTEVVGAQGTAFIYKDFGLITCDHVLSSMLRIGGVDVSVDIDSDRILNKKLYVCNPLLAKSLPVRVIHRDRHLDLAVLEFVDGVVGNRYFSSAERPILRNEQCTLVGFPNWTVGRGVNLLPVSVVIRFFRSLFNRIEISGAIRKGYSGGPLIDSSFRVIGIAQEGATQADGNDECLCITEVDKWLSGLTVRP

SEQ ID NO: 468 - protein, 621 aa, Undibacterium sp.
  source 1..621: note = Related to NZ_AP018441.1
MKDVEVATAWAHMTDSDIHFDVLNLPFREALIRTNVEFMSRYLLGIPYSEVKKIIYPTPSYKIFLITKRNGKARIIQEPRKALKELQLKVLSFLETRGGNPKACVHGFTKRRSILTNALRHCSTQTHHLLNIDLQDFFPSINFFRVRGVFQSKPFECSYSVATVLAHLCTHRNELPQGAPTSPILANLVCRKMDSELMALARRHRATYTRYADDISFSFSIRDAVRLPENICRFESGTLTLGQELQSIILENSFNINSTKNRLSNRLNRLEVTGITINEFPNVKRNFIDRIRGALHAWEVFGYIKARDQWDALISEGLRLTREKRIWLRQRRTRAVPELANVLWGKLLYLRMVRGADDAIYTRLAERYNVLCAKEVEEGRNFFFSKLPVEPIVRNSHDVDHAVFVVEWGGLYPVEGAKAPEFVCGQGTAFLYQSNNCLVTCEHVFRYKESVKITKYGEEVEEILDTGYMSPDVYEKNITIHSPVRGQTWDAKLVHYDSDRDLAILEFVSPPENVRHFTSLDAPIKKNEPGYLIGFPNWNPGRFSNQTNASVLNRFPRKGLQRIEVSTNVRKGNSGGPYVDELFRVAGIAQEGATQSGGNDECLCVSELNTWLKNSTNKKET

SEQ ID NO: 469 - protein, 573 aa, Janthinobacterium sp.
  source 1..573: note = Related to JACHCH010000008.1
MSKNLLGMPYSEIQKIIYPTPPYKVFVITKRSGGPRLIQEPRRKLKELQLKVLAFLEEHGGKPKPCVHGFTKNRSIVTNARKHCSRQTQHLLNIDLKDFFPSIGFFRVRGVLQKRPFACSHSVATVLAHLCTHRNELPQGAPTSPMLANLVCRRLDSDLMDLARRHRSTYTRYADDLTFSFSVRDTSRLPENICAFESGGLTIGHELLSIIDKHNFDINPTKSRLSTRLHRLEVTGITINEFPNVKRIFIDRIRGALHAWEKHGFDAASAEWERRITKGKTCIYEKRPWKRQTRTRKIPELINVLWGKLLYVRMIRGADDVIYTRLAERYNVLCEHEQGLSADFSFSRLPIESIVRNANDAERAVLVVSWLGDYQPVGVAESEAVGGQGTAFPYQSNNCLVTCDHVLRWEGVVNENNVSTDCTSVDVHGANLKVISPALGLEWPVRVVHRDVDRDLAILEFIGPPPNIRHFAGLDAPIKRNETGYLIGYPNWNAGRVANQVNVVVTNRFARRTFQRLEISTTIRQGNSGGPFVDDLFRVAGVAQEGATQVSGNDECLTVDELDTWIATWKTRN

SEQ ID NO: 470 - protein, 579 aa, Undibacterium sp.
  source 1..579: note = Related to JACOGB010000003.1
MSTFPLGILTRNFVESLSANLFGMPYSDLQKIIYPSPRYKSFIINKRNGSPRVIHEPRAKLKALQDKVLLFLEENAAPVKPCVHGFIIGRSIVTNAKKHCSPQTKFLLNVDLKNYFPSINFYRVRGIFMKKPFSCSHAVATVLAQICTHNNELPQGAPTSPFLANLASRRLDTELMDLAKRHRASYTRYADDLTFSFSVRKASSLPENICSYDSGVLTLGKELISTIEHNSFNINPVKSRISTPLHRMEVTGLTINEFPNVKRNFVDWVRGTLHAWDKYGLAATQVEWERKMEAAKTSPYEKKPWRRQRRCKGFPSFYKILWGKLLYLRMVRGPNDALYTRFAERFNGLYQRDMGGAALLLPIENIVRNAADVERAVFVVSWMGDYQLEGGASEFCASQGTAFAYMSANKLITCEHVLRCELEVNGQVLMVDFQDAQMRNGEMTAHSPTLGFSVPVRVVHRDQDRDLAVLEFVNPPPANIRHFVGRDSLIKRNEHGILVGYPNWNPGRIANQAAANVLNRFPRRGLQRIEISTNIRRGNSGGPYVDELFRVAGVAQEGATQADGNDECLCVEELDKWLD

SEQ ID NO: 471 - protein, 597 aa, unidentified
  source 1..597: note = Related to JACPOI010000015.1; note = Burkholderiales bacterium
MKDVEVTPPMPVVSSPIDLHGVFLKVDADYFSRHVFGVPYSSLKAVLYPTPRYRAFIIAKRNGSPRIIHEPKRQLKEFQLKLLSFMESQVTQIKPCVHGFVKGRSIVSNAERHLETQPHHLLNLDLEDFFPSISFYRVRGVFKKAPFGLSHEVATVLAQLCTYSNSLPQGAPTSPMLSNLVCRSLDRDLTALARRHRATYTRYADDLTFSFTVRDPNRLPSNICSFDSGIVNLGHELQALIQEQHHFRINPKKTRMSTRFHRMEVTGLTINEFANVKREFIDRIRGALSAWKKYGYGKSQASWQDRVIDGQTKPYEQRLWRRQVRGGGVPELKNVLWGKLLYVRMVRGRDDSIYTRLADLYNELCKQEKKVDKDFLFSSLPVEKIVRNAVDAERAVFVIEWSGDYCPPGASASEMVGGQGTAFAYKKADQLITCDHVFNWEGQYAGASVSVNCQSSDVHGLTLRAVNPATGLSWPVTIVRRDAPRDLAVLQIAGGSLAHRHFVAIEAPLKRNTRGFLIGYPNWSPGRVANQVTANVQSLYNRSALARFEISTLIRQGNSGGPFVDAQFRLVGVAQQGATQQSGNDECLSVLELEKWL

SEQ ID NO: 472 - protein, 587 aa, Variovorax sp.
  source 1..587: note = Related to JACIBG010000006.1
MAFLGVKEFHDYMLRSDVPYFSRHIFRAEYSSVEGYLYPHPRYTSFVLAKANGKNRFIAEPSKKIKELQYRALRYLEKTVPQPKACVHGFVEGRSILTNARKHLERRPYHILNLDLTDFFPSITFFRVRGALMAPPMKFSFGVATMLAHLCTHEGTLPQGAPTSPFLANLICRSLDSQLTLLSKRHRATYTRYADDLTFSFSHRHANRLPANIVNFDGGTVSIGSELRSIIESNSFGINNDKTRVSTRMRRMEITGVVVNEDPNVTRKFIDKIRGALHAWDRYGYVAALANWNARVAETLKEPRAGKQWARQTRTGNIPSLQNVLWGRLLFVRMIRGDDDLLYTRLAEKYNHLCRTHKAIDPEFRAASLPIALQVKNSLDADFATFVFEWSADYAASDAHESEPLVSQGSAFAYGDGRRFITCDHVLKGQSADGEVDVANPRVRNLTMNLRNPVTRIDFQARVLHRDAHLDLAVLELVDPAARAKRYFDGRTEPLERDARARLIGFPNWTQGRTANNSVVSVQQRFPRAGLQRIEIGGSMIRQGNSGGPLVDASYKLAGVAQQGASQSSGNDECLCIMELDRWLASL

SEQ ID NO: 473 - protein, 586 aa, Variovorax paradoxus
  source 1..586: note = Related to NC_022247.1
MAILGKNEFHDFLLRADVPYFSRHIFGAEYWKIEGLLYPTPRYTNFVIAKANGKNRHIAEPSKKIKALQYRALAYLKGTVPPAKPCVHGFVEGRSILTNAEKHLERRPYHILNLDLSDFFPTITFFRVRGALMAPPMKFSFEMATMLAHLCTHEGSLPQGAPTSPFLANLICRTLDSQLTLLSKRHRATYTRYADDLTFSFSHRSAERLPANVVAFDGGTVSIGSELRSIIESNSFHINEGKTRISTRLRRMEITGVVVNEFPNVTRKFIDKIRGALHAWEAHGYVAAQATWTARITEKLKNPPRERPWARQTRTGNIPSLQNVLWGRLLFVRMIRGNDDLLYTRLAEKYNHLCRLHQTIDPGFRGASLPIDLQVRNTLDVDFATFVLEWSGDYTAPGTDESEPLVSQGTAFAYGTGRRFITCNHVLTGQSKDEEIDISNPFVQNVSIVLRNPLTGTVSPARVLNRDSARDLALLEFVDSETRAQRYFDGRPEPLERSAQARLIGFPNWTPGRTANNTEVSVQHRFARAGLQRLEIGQTIRQGNSGGPLVDSSYKLAGVAQQGASQSSGNDECLCVMELDRWLTAL

SEQ ID NO: 474 - protein, 642 aa, Cupriavidus sp.
  source 1..642: note = Related to NZ_CP017754.1
MNTPNTILIQALVENQDLMDAWERMDVHVFSTGVLGVPYEQVQKILYPHPPYRAFLMAKRSGGFRLIREPRRRLKVLQEKVLAHLYERAGTPKPCAHAFIKDRSIVTNARRHLERRPTFVLNLDLEAFFPSISFYRVRGVLKKPPFNYSHEVATVLAQMCVVGNELPQGAPTSPFLSNQVCRSMDRDLMALAKRHRATYTRYADDITFSFSAPTRAALPSNICTFDSGVVTLGQELVGIINQHNFQINPSKTRMSTRRRRMEVTGIVINEFANVKRIFIDKIRGALHAWDRYGYAAAQAAWEQRVTNGTTLAYEKRPWKRQTRTGQTPALKNVLWGKLLYVRMVRGDSDAIYTRLAEKYNRLVARERDGNADFAASTLPVEAIVRNVEDAERAVFVVEWAADYQPPVPGQPTMVGGQGTAFAYKQRNRLITCDHVFRAEGEYQLGDGPNAQEIPFTTDINEAAVQGLNVTAIDPVSGQRWPLRVVHRHAHRDLALLEFEGAPPDHRHFSGMEAPINRHAPTHLIGFPNWNNGRRANIEPAIVTARFPRTGLQRFEINQLIRKGNSGGPVVDELFRVAGVAQQGAQQDAGNNECLCVLELDAWLAEYDADVAAPADVPAAEPAAPAAAAEAPAAPVAPAEPAA

SEQ ID NO: 475 - protein, 628 aa, Pandoraea cepalis
  source 1..628: note = Related to NZ_CABPRY010000003.1
MTTPLLTAKDAAEAAKWAEIWARTDVHLFAADVFDLAYEEIQNIIYPTPPYKAYLLAKRSGGQRVIREPRRRLKDLQVKLLKYLIERAGTPKPCAHAFTEGRSIVTNARKHLERRPHFVLNLDLEGFFPSISFYRIRGVLRKAPFNLAHPVATMLAHMCTVNNELPQGAPTSPFFSNQVCRSLDRDLMALAKRHQATYTRYVDDITFSFSTPNQIALPANICTFDSGVVTLGQELVGIIGQHNFRINPAKTRMSTRRRRMEVTGIVINQFPNVKRAFIDKIRGALHAWDRHGYKAAEENWQARVSNGARLAYEKRPWKRQARLGQPPELKTVLWGKLLFLRMVRGADDTIYTRLAEKYNRLVERERAGDAPFVSATLPVEAIVRNAEDAERAVFVVQWLADYHPPNAGTQEAVGGQGTAFAYKRHNRLITCDHLFRADGEYRRGEDPQAPRVPFTTDLTSPQVRGAMVSVTDPVTGQEWAVRVVHRDAHRDLAILEFDEEPPAHRHFSGMDAPITRHAPGHLVGFPNWNNGRRANIEHAIVSARFPRTGLQRFEINQLIRKGNSGGPFVDELFRVAGVAQQGAQQDAGNNECLCVAELDAWIEAYEATRVRPPPAPPAPAAVERGPAA

SEQ ID NO: 476 - protein, 606 aa, Ralstonia solanacearum
  source 1..606: note = Related to NZ_CDQJ01000001.1
MLQKTQVNSFSSAILGAPYATVQGILYPRPPYRSFELAKRSGGIRVIREPRKRLKLLQLKALEDLEQRAGRPKPCAHGFVKDRSIVTNARKHLERKPHFLLNLDLEKFFPSINFFRVRGVLKKPPFGFSHEVATVLAQMCVLDNELPQGAPTSPFLSNEICRGLDRDLMALARRHRATYTRYADDITFSFSTPNATSLPANICTFDGGLVTLGQELISIITSHSFQIHPTKTRMSTRRRRMEVTGVVINEFPNVKRVFIDRIRGALHAWDRYGYDLAQKAWANRVQAGASTAYEKRPWKRQTRSGNPPELKNVLWGKLLFVRMVRGADDAIYTRLAEKYNHLIQRERGTKPDFAASSLPVEAIVRNAEDAERAVFVVEWSGDYLPTGTTEATMAYGQGTAFAYKKKDRLITCDHVFTARCEIAGASVDVDIQSKDLREVSLEAHDPATGNRWPLRIVHRDAPRDLAILQFEGEPAAQRFFSGMDAPINRHAPGHLIGFPNWSPGRRANVEPAIVTNRFRRSALQRVEINQLIRKGNSGGPYVDELFRVAGVAQKGATQDDGNNECLCVAELDAWINASGEAPPPAASTASAGGGRAGEPLRRRPTR

SEQ ID NO: 477 - protein, 557 aa, Xanthomonas translucens
  source 1..557: note = Related to NZ_CP090000.1
MHVFGVQYSELEKLLYPRPSYRAFLIPKKDGGLRAIHSPRLHLKIIQKKLLEYLERVGNPPKASAHGFCKDRSIVTNAAKHSLARTRFILNIDLENFFPSINFFRVRGLLLAPPFGLSYPVASLVAHICTYQNELPQGAPTSPYISNQIARSLDRDLMNLAMRHRATYTRYVDDITFSFSVRSEAALPANICSFDSGILSLGAELQALIAKNGFKLNEKKSRISSSRRRMEVTGLKINRFPNVRRNFIDEIRGALKACETHGYLNADAHWKRSFRSDFGVKRANTYRALRDDKYQPELKDFLRGKILFVKMVRGEDDLIYNRLAERFNAVMPSTTVRPLKVYPVVKTEDDLRRACFVIYWQAAIMDTASGERKMLSGQGTGFLYGDGNLITCDHIFYDTTALEGVQKDVHITDRELEDIKCVAIDHQHMEHDLTLMRWDVPRDLALLHFDRNAPHNKHLTPALSSAKRHDRGWLAGYPDWTSGRPANVVEAQVDNSYVRSGLARLELNQTIRSGYSGGPYVDKSYRLIGIAHRGATQSSGTNECLASHELDKWIASP

SEQ ID NO: 478 - protein, 568 aa, Acidovorax sp.
  source 1..568: note = Related to RBIT01000001.1
MADAFDEMVLAIDVRYFASTVLLEDYKKIAALIYPKPRYREFNIPKKSGGKRAIAAPRKKLKILQQRLLSYLVAKIDPPKACVHGFVPGRNVVTNASKHSERNPRFILNVDLENFFPTITFYRVRGVFLKRPFNLSYSVASMLAHLCCHNGVLAQGSPTSPILSNLVCRKLDNDLSALARKYRAVYTRYCDDITMSFVAKMADNLPANICSFNGEAVNIGDELKAVIAANGFALNDEKSRLSSSSHRQEITGLTVNDFPNVRRQYIDSIRGALHSWEVHGYKLAEARWQETPYKRIRVSNTVPKLCFNLKGRLLYLKMVRGGDDEIYGRLASKFNKLVAIGVVGEVPPCKPLPIDYSVTTANGARHAVFVLQAQWFEKNELIFERQGTAFFVGQGYLLTCEHVVSNELSSDEKDDAMGELEQARHTVLIPGGKEYPVELVAVHEHYDVALLKFSGDGPEYIRRFKLSQASATVGQKSCLLGFPNWSNGRPVTVVNGEVTSVYSRSATQKLETSQQIRKGNSGGPLLNAELEVVGMATDGATYEKGNNECLTSGQIRQWLIDIKAEVQL

SEQ ID NO: 479 - protein, 553 aa, Acidovorax valerianellae
  source 1..553: note = Related to NZ_FMZC01000029.1
MEYEKVGSVIYPSPLYTQFTLPKKSGGVRIIDAPFQELKELQHKLLVFLKTLVDPPKSCVHGFVSGRSIVTNALAHSERSPKFVLNIDLKNFFPTISFYRVRGIFLKRPFSFSHQIASLIAHMCCKDGFLVQGASTSPLISNLICRNLDNQLRGLSLRHNSVYTRYCDDLTFSFPRERAESLPGSICSFAGEIVTLGAMSLEIIASNGFEINSDKTRISSSKRRLEVTGLVINKFPNVSRDYVDRLRGALHAWDVHGYPRALRSWKNKIPYERAGRRPRPPLAGIVRGRLLFLKMVRGADDDLYVRLATKFNILRQRDSIYRKIRALKSLSVDSVAKTATAARKAVYVIEVVWTDAADDMPLVDRRGTVFVTEYDLLISCHHVIDPDFSDDERKEISGKILNRSVKLIVPETNDTYSIDVIKFDSHLDIALLKFSEAKPAGLRKLLFSERSPVQSSGTTLLGFPNWKQGRPLTSASGEITSIYPRSNTNRLEASQAIRQGNSGGPLVDPDFRVIGMAIEGATYDRGNNECLAANEIINWIQPEVDKLKSQLKF

SEQ ID NO: 480 - protein, 575 aa, Delftia lacustris
  source 1..575: note = Related to NZ_AP025556.1
MASLEFDIRKIDVELMAQDIFGRPYAEISKIVYPRPKYKYFVLPKKSGEYRSIVAPSLKLKNIQESLLDFLQREFPLAKSCVHGFHRGRSVVTNAQAHCNRDTSFVLNIDLEDFFPSISYYRVRGVFENSPFGYARNTASALAHICCNNGILAQGAPTSPIISNLICRGLDKDLSALARKHRAIYTRYCDDITFSFKSGRVDRLPASICKFDGDVLGIGDELTEIISSHGFRIKHTKNRISSRQRRMEVTGIVINKFPNVRRLYVDKIRGALHAWETYGYEMASKIWEEKKYSRSLRTGAIPRLYKNLYGKLLYLKMVKGDSDDVYRLLAMKYNRVFLKSQSLGELGDGKLLSLGSRVVNASHVKSAVFVIHARWGLDELGLPEEEVQGTIFCLVGKILITCSHVIEKPEHIKTDTVEYYLVEPTSGKEHRLNLICNDSHKDIAVLRFVEQGVPDARELVLSEQPISQNADVMLYGFPNWTRGRALNSLPGTVTSTFIRSNIDCLEVDCSIRQGNSGGPLLNVGMRLVGMATQGADVKSGNNECVTVSEIRDFILRCSTSHPLHFDKSFNISNLF

SEQ ID NO: 481 - protein, 566 aa, Nitrosomonas sp.
  source 1..566: note = Related to NZ_FOUB01000063.1
MAIHKNIFSKISTLDELAYKLAGIPYNLLAKLIYPTPRYKCFDLIKKSGGVRTINAPRRKIKKIQRETLELIKEYYQSVKSPVHSFVKDKSIVTNAQQHIGKSFIFNIDLENFFTSIHFGRIRGIFLKKPFEFSYDISTVLAHICSKDGILPQGAPTSPIISNLICRSLDSDLQKLARKYRATYTRYCDDITFSFTVRRISDLPKQIVDLSVAPANIGTELLAIIDKHELKVNSRKVRLEGRSNRMQVTGLTVNEQPNVPRTFVHEIRGMLHAWERYGLKKAQDQLKTKYSRQLRTTEIPPFYNVLRGKLLFLKMVIGETSLVYARLAMRYNKLIDRDNLKQNSKLPLSREIANDIDAKRAVLAIECCEDIPRLKESPLVSMGTAFIYRKKYIITCWHVISQKVESLGEDITFHETSIELYDYKKKKLEVTILAGCPRRDVAILAPKFDITVYPYFSPATTPPLSGDSLQMLGFPNYQVNKKISYTKTKLLTEEYTKSCVQYIEIRDTIRKGNSGGPVFNSNWEIVGIAVEGATQADGDNGVVVTSEIDRVIDSSEFKYQQKDKNH

SEQ ID NO: 482 - protein, 559 aa, unidentified
  source 1..559: note = Related to JAJFTF010000030.1; note = Betaproteobacteria bacterium
MAIHTPLSTIPDLEKLADRLVGNSYSVLADLIYPKPRYKTFSIAKKSGGIRTIDAPKKKIKAIQWKTLALIKEYYQCVKTPVHGFAKGKSIVTNAQQHLEKTFVFNVDLEDFFPSIHFGRVRGIFLKKPFEFSYDIASVLAHICCKDGKLPQGAPTSPVISNLACRRLDSDLQELARKYRATYTRYCDDITFSFSVKRITDLPKQIVDQRAFPVNPGTELLAIIEKHSFRVNSGKVRLEGRSKRMQVTGLTVNEQPNVPRIFVHEIRGMIHAWERYGRNGAETYLASKYSRQLRNPVSPPFHNVLRGKLLFLKMVRGASSPVYARLAARYNSLIDHDKLQPNSKLPISRTVANDIDAVRATFAIECVQDFPELAGLELSPLVSSGTAFIYREKYIVTCWHVISPRIEKLGKSFTFDEASIEIYDYKKKKLQVTVLAKCKDRDVVILAPKFDVTEYPYFSPAQLSPSSGDILQILGFPNYQMSKKVSRTKTELITEQYAKHGVQYIEVKDTIRKGNSGGPVLDSNRGVVGLAVEGATQAEGDNGVAVTLEIDHVIDSIVV

SEQ ID NO: 483 - protein, 561 aa, unidentified
  source 1..561: note = Related to MWTD01000011.1; note = Planctomycetes bacterium UTPLA1
MPAPLSKEATQLLTLKTHEDVARFFGYPNYVSLQSLIYPRPLYTSFVIPKRTGSIRIISAPRRRIKDVQRLLSTALLDLYGHGRKPVHSFMKGRSVVTNARQHAQSRFVLRVDLRDFFGSIHFGRVRGVLLNRPFALPEPVATVLAHICCLDGKLPQGAPTSPIISNLVCRGLDTALMKLAGECRATYTRYCDDLVFSFSIRQAGKLSARIVASEGGVVGVGHELETAIKREGFEINVAKTRLYHYGARQTVTGLVVNEFPNVSKKYYRSLRTALYAWEKHGYESASLNVPGTIQHRRYRSGKPRCLHRLLWGKLQYMRMVKGERDASLISLVHRFNRLLARDAAVVEKPVPPAIHVKPTVARAKDARAGTWMLEAITHRDTPDELLNEGTAFYVRGVGFITCAHCLLNTYVSPPTAHNEFFLHSHDRRYKYQVTPHQFDYGLDLAVLAPDSSFVENEHLAFEIDPALPAVGTAVVLCGYPGNSPSRPPVIYQSDVSRTVTVSGVSRIEIDKPVHPGSSGGPLLSALTGKVLGVVATFKKGDAGADAAIAIAEISRLGAPK

SEQ ID NO: 484 - protein, 547 aa, Nitrosococcus sp.
  source 1..547: note = Related to NZ_CP038033.1
MNKEDFLKITTHNELASMFGMSYAKLTKIIYKTDGVYKYHQFQIPKKNGGHREIASPSKKLKKIQSELKELFYEIYPSKPSAHGFAKNKSIVTNAERHLDKRFIFNIDLSNFFGSIHFGRIRNLFKSSPFNFNNSIATILAQICCFDNSLPQGAPTSPILSNMIAWKLDTQLQSLAKMTNGTYTRYADDISFSFTTTKGRLPEEIVILRGGEAAPGHALTHIIEENGFFINYDKVRLCSRLSRMEVTGLTVNELTNVRRKYVRQLSSMLHAWRKHGYELAEKDFNEKYDTRYRASGKPKSFLHVVKGKLAFLRSVKTERDPIYIKLATQFNDLVTDEHKFKIKVPSDPEKNAINALWVIEACYDNEEGEAMVPQGSGFQLEDIGIVTCAHVVSEKGKIFEDLEAFKHDDSTVKYKLRVERICSHRDIAICSLLVEEGKEPPKHSVSRSANNVEMGQDVKLLGFPAYAPGHSYFMVDTKVAKIYTQSLVRKFEINALIREGNSGGPIIDSKSSVVGIALEGARKEAGNNGCLTIPELEDVLSDDKYKI

SEQ ID NO: 485 - protein, 547 aa, unidentified
  source 1..547: note = Related to QNFF01000108.1; note = Gammaproteobacteria bacterium
MNKDDFLKITRHNELASYFGITYPVLTKIIYKTDDAYKYHQFQIPKKNGGYRKIASPSKKLKLIQEQLKDVFYEIYPTKPSAHGFAKDKSIVTNAERHLDKRFIFNIDLSDFFGSIHFGRVRNLFKSSPFYFNNTVSTILAQICCFNNSLPQGAPTSPILSNMIAWKLDSQLQHLAKLTNSTYTRYADDISFSFTSKKRRLPEEIIILRDDEGSPGHALTHIIEENGFNINYEKVRLCSAFSRMEVTGLTVNEFLNVRRQYVRQISSMLYAWRKHGYVLAANEFNEKYDKRYRASKKPKSFLYVVKGKLAFLRSVRTGRDAIFNKLAKQFNDLVEDEYKFKIIEVTDPEINAISALWIIEACYDDEKGEAVITQGSAFQLKGIGIVTCAHVVSEKGKVFGSLEAFKHSDPTVRYELKVERICAHRDVAICSILVKEGIEPPEYGIEKSLNPIEMQQSVKLLGFPAYAPGQSHYIVDSKVAKVYKQSAVNKFEIDSLIREGNSGGPIIDAESNAVGIALEGARKESGNNGCLVISEIDDVIGTDEYKI

SEQ ID NO: 486 - protein, 547 aa, Thiohalophilus thiocyanatoxydans
  source 1..547: note = Related to NZ_SOQX01000007.1
MKDAFLNIKTHQELAKYFGLSYADLSKIIYKTDFEYKYHHFVIPKKSGGERHINAPSKKLKLIQITLKDVLYDIYPTKPAAHGFVKNKSIVTNAEKHLDKRYIFNIDIENFFGEIHFGRVRNLFKSSPFNFNNTVATILAQICCFENALPQGAPTSPIISNMIAWKLDSQLQQLAKITNCTYTRYADDISFSFTCNKNRLPEEIVSVSEGDARPGRTLTGIIEDNGFRINYSKVRLRGKYSRMEVTGLTVNEFINVKRKFIRQLSSMLHAWRKFGYDKAEEEYNNKYNRKHRASGKETSYLHVVKGKLAFLNNIRSKRDPVYIKYAKQFNELVGNEHKFIIVEITEPEQNAINSIWVVEACYDYNDEVRVSQGTGFHLSDVGIITCAHVVSNDDGEIYEEIEVFKYSETTKRYTIKVDRICRHRDIAICSLVVDEDENPPNNELQKSQSIPYIQQQVKLLGFPGYAPGHSYSIVDANITMTFVESGVNKVEINQLIRSGDSGGPIVDADSNVIGMAQKGVDEKYKRNSCVVLQEIEAVYNSDGYKTE

SEQ ID NO: 487 - protein, 543 aa, unidentified
  source 1..543: note = Related to JAHBUO010000087.1; note = Ignavibacteriaceae bacterium
MKLKEFQKIETSEDLAKIFGMSYKELSKIIYKLPFEYRYTYFEISKKNGTKRLISKPNKKLKQIQNKLSETLYSIYKPRPSVHGFVKQRSVISGAEKHLNKQSILNIDLENFFDSIHYGRIKYLFMAHPFNCNETIATILAHIFCHENKLPQGASSSPILTNMICYKLDKELQNLAKHCNATYTRYADDITFSFTTNKKKISKQIVEDTEVLTISPVLQQIIENNGFKINYNKVHLYKKNQRMLVTGIKVNEFTNVQRKYISKIRSMLYSWEEHGYINAKKEFESKYLTERHRVFSSLPEYRNVIRGKLNYLKMVRSKRDVLYIKYAKWFNKLVDEFSEPHLEYLEITPEEKLLMQSVLVIEILYDNSEGECVCNQGTGFYLKDVGIVTCAHVVTDDKNNPLDNIDVFRYDKITEKFRCTIQKIDSILDLAILQPVDPESLKDIQPLEQSSETIDSLHTVKMIGYPAYKIGQTPYIVDAKIASIYCQSTINKFEIDSLIREGNSGGPILNSNNKVVGIAAEGAEKSGGNNAVLRIDMLERIKS

SEQ ID NO: 488 - protein, 545 aa, unidentified
  source 1..545: note = Related to JABHWU010000021.1; note = Deltaproteobacteria bacterium
MPEKSFLSVKSPKELSLYFNLEYAAFSKIFYKTASDYKYKKFYLSKKTGGKRIISSPNRKIKEIQRCLAYTLKNIYQVRPSVHGFVEKHSIVTNAMPHLDKKFVLNLDIKNFFDSIHFGRVKHLFMSQPFNFVHSVATVLAQICCFENKLPQGAPTSPILTNMICWKMDAQLQHLAKINHCTYTRYVDDITFSFTCNKKQIPKSILIQPESELVVGQDLKIIIEKNGFEINLAKLRLYGRNQRMEVTGLTTNEFPNVRRKYIKQIQSMLHAWRKYGYGLAEKDFKEKYYKKHRASQKIPSFENVIIGKLAFLKSVRGLRSQVFIKLAKQFNDLTESGKMKFNYIEKTKDETDISNSLWVIEVLYNDKNGILKAGQGTGFYFENKGLITCAHVVSENDENFEKINAFQFDKPSKKYLLKIKKIDNHRDIALCEFSDCTMNDIQINKLDSITVSNDQISQFLEVKLFGFPAYKIGQTPYIADAKIATIYTQSAVSKFEIDHQIREGNSGGPILNKDNKLIGVALEGAEKGSGSNGCLQLDEIVKFIN

SEQ ID NO: 489 - protein, 560 aa, Simkania sp.
  source 1..560: note = Related to JAGROM010000229.1
MTSLETLQALTTSQDVATLFGKSYTELSKIIYRTPEKYRYRVFTIPKKTGGLRTIASPRRKILEIQRRISILLQDTYQPPPSSHGFVRTKSIVSNAERHLNKRFIFNVDLEGFFDSLTFGRVKRFFMAQPFNIPNEPATVLAHICCFQKRLPQGAPTSPIITNLICRKMDRQLQALANQNHATYTRYADDLTFSFTRGMSKLPSAIVSHKDGLPGSGLMEIIKENGFKINPQKTRLNSKHQRLEVTGLIVNKFINVHRKFIRRTTSMLYAWEKFGLEMAEKEYLSVYSNLIRPYASGHHPKFHEVVKGRLAFLHMVRGKRDPLYIKLAKRFNAVLDDKTSSLPYIETSSYELSLSEAIYVIEILYDKKVKKGKNVSEEAVVMQGTGFFLKDIGFVTAAHVLLDNKGVEHPEIEVFSPKNSGVRYKLSIQTLDIHRDLAVGILFGPDKKKHTSSNQLTAQKSLPVQRDAITLVGFPGHKVGHTKPYIDDGKIGNVYTHQGVQVYDITTQIREGNSGGPVLLGSTYEVIGVASRGAEGKTGSNTVIAVSELFNLLSKSNSKK

SEQ ID NO: 490 - protein, 595 aa, Limnohabitans sp.
  source 1..595: note = Related to NESO01000004.1
MHLNPLSKALSSVSYSDLTASFLQVKTPEDLALWFGFSKYAALGFLIFPRPKYTAFLIKKKNGSERLIQVPNKKLKEIQKRLLHVLNELDNSRPSAHGFRKKLSVVSNAEQHSGHKKHYVFNLDLKDFFPSITFPRVRGVFLSEPFKFPANVATVLARICTCNGALPQGAPTSPPLSNYICRGLDGSLQQIAKASYSTYTRYADDLTFSFTNKKRHRLSPNLINTAVENATVSLKLKEIIEDHGFKINFEKVRLRSRHARMEVTGLTVNEFPNVKRKFVDEIRGMLHAWETYGLEKAQEGFLSRLYKRQLRSGGVPAFENVLRGKLLYLRQVKGADDKVYNTLARRFNACSNLIGKNFQMAVPMIDVALSEQDLEKAIYVISCVHEEYDFEIKGTCFFLKGVGVVTCEHVMRYPLNVDEKGNKIHNFPRELTESYFGLSHGRIFIQDTIENPLCELEIVWLDRNADVVVLRPKDEIKIEHLTLIGATAETKTKEVRLVGFPFHTPGKSLSVAEGKIRSRYRHFGYENYDITSLIRQGNSGGPVLNSDFHVVGVAKEGERQDGGNNGVLMLAELIKLHAHYKNVQGPLPKNKVWSS

SEQ ID NO: 491 - protein, 550 aa, Chromobacterium piscinae
  source 1..550: note = Related to NZ_JAJNRU010000001.1
MPLVDNIHQILIKSDVQPFSRYYFDLSYEELSKIIYPTPKYQTFHIKKKNGTDRVIHSPSYKVKQLQYIVIEKILKETIVPRPSVHGFVKDRSIVSNAKLHVGKRHVFNVDLKDFFPSINFHRVKGLFRGKPFNFANNIAVCLAQICCYKTKLPQGAPTSPILSNIICRGLDGELQVLAKNSHATYTRYCDDITFSFTKPNPSKIPRHIVQVDSNVASAGEKLNDIVVAHGFEINCEKTRMYDWKRRMEVTGLTVNKFPNVKRKNIDRIRMILHCWEKFGYKKAQENYIEFTKIEKSDFRGKCFLSYTRGYLNFIKSVKGMDDPVYRKLAKKFNTLIDFEFDGKRKDLPVGSVVKIREELDKAIFLIQCENAAGQCQQGTAFFLKDVGFVTCDHVRWLNEENIPTDEYIGYFFEREIKILNSEEQEVCKVRIKKYDARKDFLILEPTEQVIVNMALLPQVNIPQQGDPLILCGYPSPFIHRQTLTIINTTLITNYNTFGADHIEISTQIRKGNSGGPVLNSSFEVVGIAKTGSEQHGGKDSVLCIREIFN

SEQ ID NO: 492 - protein, 523 aa, unidentified
  source 1..523: note = Related to PHET01000006.1; note = Actinobacteria bacterium HGW-Actinobacteria-7
MTQRFIEIQSTDELAAFFGLDYKRLAAALYRTDASHRYHEFRIPKRSGGARTIHAPNRRIKALQRRLAGELDALYVPPPCVYGFVNGRGIRKNADVHAGRTFVFNVDLKEFFPSIHFGRVRGVFEKAPFHFTREVATVLAQLCCHQNGLPQGAPTSPVISNWICRGMDRELMALAKSSLATYTRYADDLTFSFTCSYRRLPGALVDVRGRKAETGDALQKIIENHRFKVNTDKVRLAGKSTRMEVTGLTVNEFPNVQRKYVRQVRSMLYAWREHGLPDAEREFNEKYDRGHRPSGRPKSFTAVVAGKLAYLLDVRGAENPTYNRLAAEYNRLVGEQGDHLPLAPPGPLERDLMGLQAMRKGKAHAKQYENIVESLLTQLLSPSLENPQNQVRINGGRKIVDITLDNHATSGFFHYIALNYNAPHIIVECKNYSGDPANPELDQLVGRFAQNRGRVGILVCRSFGSAAKKKRFLERCRDTANAGNGFVIALDDTDMALLVEERLRYGEKQSYRLLMERFKALVM

SEQ ID NO: 493 - protein, 541 aa, unidentified
  source 1..541: note = Related to JAIEMN010000007.1; note = Gemmatimonadaceae bacterium
MATLTTRRSIAELIEMSPTLLDGLANSLNRRAYHRFHVPKKSGGSRVITAPTARLKEVQRRLYRVLSALTVPPTCAFGFIERRSTVHNAQSHTRSRWVLNIDLEEFFPSIHFGRVHGMLMAPPYHIPELGAQRIAALCCHESVLPQGAPTSPILANMIARGLDFALRDFANQNRCHYTRYADDLTFSQFRKRFPSALVTRGVDNVTRVSDELRQIVESHGFRLNAKKTRLAHYSERQEVTGLIVNSKRPNVPREFIRNLRAMLHAWERYGEEAAEATYRRTFAPRDASDHVGLFRETLLGRLSYLAMVKGRSDPVYVELIRRARERVDRKHGTNYFDTMPIPEDGVAVLMTTEGRDRAGEQGTGFVLRNIGVVTCYHVVRRAVTVEAFPWHAPLRATNLFMDRFNVDWDLAILRGNYGAKYQFEAGDDAQLRIGMPVRIVGFPNWAPDRPMSITETVIQGMNSDYFGARRFTVRDAIFGGNSGGPVLNGAGKVIGVAMTGMFQTGGGTENMITPISYVRRLAEQPAYDPFSNVASKTREHS

SEQ ID NO: 494 - protein, 570 aa, unidentified
  source 1..570: note = Related to JAIOJS010000294.1; note = Thermoanaerobaculia bacterium
MNLDTAQRLLECETRADLAEWLGEDPRRLAFYAYVLPEHRRYSHFTIEKRAGGSRHIHAPIAPIKEHLRLISAALSHFYNPRNVVMGFVKERNIVDNANKHSRQEWILRVDLKDFFPTIHFGRVVGVLQAAPFQLRSEVAQTIAQLACHQGVLAQGAPTSPIFSNLVCRGLDHELLNLARRGRCRFTRYADDLNFSTSRKRFPDLLAARQLGSEGHTCEVSAALLQVISKHGFTLNDSKTRLVHRSQRQTVTGLVCNETATVSRRYYRGLRAVLHVWRKYGEDSAAEWFLANHYKRNKPSGSDFSFKKVVIGRVQFIGYVCGWSAPKYQKLANLLSQLDPTFRKKTAKTPPPEKPSGLVIWGEGETDYLHFFMAWNSLHQDYPNLTIEFPHPAKRTKGAPMLEKMLAVLEKTPPLEATVCVFDTDEPKITSRFEPVEGSAYLKLGTNLFVVLLPTPSFRSGRDPLCVELLYEDPASLRDERGRRLYLKDEFQAEEPYHKKEPGVMRLKPRSNSLVVEDVHNGTTQQNVALSKMGFANLVQSKSTSFEGFRALFDVLNGIVETELTLSNGS

SEQ ID NO: 495 - protein, 569 aa, Pseudomonas viridiflava
  source 1..569: note = Related to CP074412.1
MDASLFPFPIAPKCKVANNKELAALLGITTAKLTYYAYHLADDEKYKEFTIKKRNGGDRLIEAPIKGLKDIQESIADILEENYKPRACVFAYVKDRGIVEHAATHIGQRWLLRLDLKDFFHTISFIRIAGILRRSPYNFAETPAKTSALLCTKGQRLPQGSPASPVISNILCKGLDYKLKELAALNKCYYTRYADDIFISNNGSKFPPSIAIRDEDGSAELSDTLKKIIIDAGFEVNLDKTILRKRSERQLVTGVVVNRKSNVPKELIKSIRAALYAWEQHGLEAAEDYWKRKIDKSNRFDGESPQMKLVLRGKITHVGHVKGYSDGTFLTLVKRLQALDSDYHIDEQKISRTITGEIHIYTEGVTDTKHFQAALRAFQRSGEFAGLNLIFRNSKKTGSSGLKALCENLCETLQRHLTICIFDRDERPIINEMSGSPGNYRDHTNNVFSLIIPTPEFRDPSDLICIEHLYQDAQIYTPDSQGRRLYSKDEFDSLGCHKDNPQLFCRVSKQSLIYDDQVINLQEKKNIALPKNKFADYIFNGAPPFSNVDFSGFRGTFTQIVAIAASYSR

SEQ ID NO: 496 - protein, 568 aa, Pseudomonas putida
  source 1..568: note = Related to NZ_CP083988.1
MDAFFPFDPSPKYKISNNKELAALLGISTAKLTYYAYYLADDDKYKSFKIKKRAGGERLIEAPNKGLKEIQKNISVFLAQSYKPRACVFAYIQDRGIVEHAATHIGQRWLLRLDLKDFFHSISLARVSGVLRRAPYNFAESPANTTARLCTLGRRLPQGSPASPIISNILCRGLDYKLKELAASNKCYYTRYADDIFISNNGSAFPASIAIRSEDGSAELSDTIKKIITDAGFNINFEKTILRKRSERQLVTGVVVNRISNVPKDFIKSIRAALYAWEKHGLEAAEEYWKRSIAQTNRFDGESPQMKLVVRGKVTHVGHVKGYSDGTFLTLAKRLQALDSEYRIDEQKVLRNITGEIHIYTEGVTDTKHFQTALRALQRRGEFVGLNLSFRNSRKPGSSGLKLLCESLSETLQRHLTICIFDRDERQIINEMGGSPGNYRDHANNVFSLIIPTPEFRDSGDLICIEHLYRDAQIYLTDNQGRRLYSKEEFDSLGCHKSEPDLFCRTTKQSLIYDDQVINLQEKKNVALPKNKFADYIAAGAPPFSNIDFEGFRGTFTQIVEIASSYSR

SEQ ID NO: 497 - protein, 568 aa, Klebsiella oxytoca
  source 1..568: note = Related to NZ_LR607350.1
MDTFFPFNTSPKYKIENNKELAELLGVTTAKLTYYAYYLRDDDKYHSFKIRKRINGERLIEAPNRGLKDIQKTISHFLERNYTPRSCVFAYVKERDIVEHASIHVGQRWLLRLDLKDFFHSISSARVSGVLRRAPFCFAKSPANTVARLCTKDGRLPQGSPASPVISNILCKGLDYKLKQLASSNKCYYTRYADDIFISNNGSVFPSAIAIRGDDGNVELSEEIKNIIINSGFEVNAGKTTLRKKSERQLVTGVVVNKKTNIPKEYIKSIRAGLYAWEKFGLVAAEEYWKKEIERSNKFDGQPPQMKLVIRGKIIHVGHVKGYTDATFLTLVKRLQALDSEFKIDEQKFRREITDEIHIYTEGVTDTKHFQAALNAFQKRDEFLDLKIIFKNSSKPGSASLKTLCENLRETSQKHLTLCIFDRDEKNIVNEMSGSPGNYRDHGNNVFSLIIPIPEFRKGNDSICIEHLYRDSLLFTYDSEGRRLYFKDEFDSLNCHKTDPNLFCRISKSSLVYDDNVINLSERKNVALPKNKFADYVCSGQPPFNKVDYGGFYEVFKQILEIASTYNK

SEQ ID NO: 498 - protein, 568 aa, Pantoea ananatis
  source 1..568: note = Related to FUXY01000001.1
MKEPKFMQNLPSYKISNNKDLALLFGVPTATLTYYAYHLSDERKYKSFKIIKRSGGERLIEAPIKGLKDLQKTFSNFLSENFKPRACVYAYVKDRGIVEHAATHIGQRWVLRIDLKDFFHSITSTRITGLLRKSPYNFAKSPAETVARLCTIDGRMPQGSPVSPIFSNIICRGLDYKLKELSSLNKCYYTRYADDIFISNNGSLFPSAIASRNDDGSVQLSDAIKDIITKAGFVINIEKVILRKRSERQLVTGVVVNKKSNVPKVFVKSIRSSLYAWEKFGLPAAEDYWKREIYKNNTHNGEIPSFNLVIRGKVTHVGHVKGYADPTYLSLAKRLQALDSEFHIDEEKIFNTITSEIHIYTEGVTDTKHFQAALNFFKSKGDFQALNLVFKNPRKTGSANLKALCENLSETQQKHLSICIFDRDEPAIIKEMSGSPVNYRDHNNNVFSLIISVPDFRRDLDYICIEHLYKDSDLYIADLEGRRLYSKDEFDNLGCHKYLDNLFCRSSKSSLIYDNMVIDLPTKTNVALPKNKFAEYIINAKAPFNDIDFEGFRPTFNQIFEIASTYRK

SEQ ID NO: 499 - protein, 572 aa, unidentified
  source 1..572: note = Related to CP026511.1; note = Pseudomonadaceae bacterium SI-3
MDSFYPFIPNPPYKISNNTELANLLKIPVARLTYYAYYLPDEQKYTSFNIRKRNGNPRLIEAPIKGLKDIQRAISVYLYEQYKPRSCVFAYVQGKGIVEHASIHIGQRWLLRFDLKDFFHTIKTSRISGLLRRPPYSLAKGPAETIARICSKDGRLTQGSPSSPVISNLLCKGLDYKIKELAAKNKCYYSRYADDIFISNNGSVFPSAIAIRTLEGTAELSLALQEIVSASGFQINKSKTTLRMRSERQIVTGIIVNRKSNIPKEFLNSVRAALYAWERFGLEAAENYWRKNIDPKNGFNQEDKEGPRLRWVIRGKINHIAHVKGYSDSTFLSLARRLQSLDSSYKIDEQKILHALTDEIHIYTEGITDTKHIESALKNFKKNQEFSNLNLVLKTPRKPGSASLKSLCESLSVAPQKQLTICIFDRDEPNIIKEMGGSSSNYRDHTNNVFSMIIPTPDFRDANEPLCIEHLYKDEAIYIKDSHGRRLYSKHEFDSLGCHTLEPGLFCRISKNTLIYDDNVIELSKKANIALSKNKFADYISNGAPPFCNIDFSGFRNMFSQITQIAGLYKSN

SEQ ID NO: 500 - protein, 568 aa, Pseudomonas sp.
  source 1..568: note = Related to CP023969.1
MDASLPFGQFPKISISSNKELAVLLGISVNKLTYYAYYLDEESKYKTFNISKRNGGVRVIEAPVKGLKDIQKNIVTLIEPNYKARSCVFAYVKGRGIVEHAAVHTNQRWLLRFDLKDFFHTISAVRVAGLFRHPPFNFSKNVAETIARLCTKAGRLTQGAPTSPIISNILCRGLDYKLKELASQNKCYYTRYSDDVFISNNGSLFPSAIAERGSNGVVKLSDDVLEIIGGAGFQLNLSKTILRNRAERQLATGVIVNRKLNVPKEYIKSVRAALYAWDKYDLKQAEEYWREHIDDRNRWGDSLPRLSWVIRGKINHIGHVKGYNDPVFLTLAKKLQSLDPTYRLDERKILRSLTDEIHVYAEGITDCKHLETALKFFKARGEFTNLNLNFRNTRKPGSSVLKALCEHLSEAPQKHLTICVFDRDERPIISEMGGSPGNYRDHTNNVFSLIIPVPDFRDSDIICIEHLYNDSQLYIPDNQGRRLYSKEEFDSLGCFKGEAHLFCRMNKQSLIYDDNVIDMVERRNVALPKNKFADYIVSGAPPFSNIDFSGFRGVFSQIVEIAGFYGKR

SEQ ID NO: 501 - protein, 578 aa, Pseudomonas syringae
  source 1..578: note = Related to JAHARZ010000001.1
MVLLNFPLKEQAPEYTISNNKQMAQVLGIKPSTLPYYAYYLPDNKKYTSFNISKRGGGLRLIEAPNKRLKDLQRAIAEYLGEHYKPRACVFAYVGKRGIVEHASVHVCQRWLLRLDLKDFFHSITAPRLAGLLSAPPFLLAPNLARTLSFICTKDGRLTQGAPVSPVVSNIICRGLDYSLKAYAAKNKCYYTRYADDIFFSNNGAIFPSSLARKDEAGTVILGDELQEIIKASGFIINESKTFLRSRAERQIVTGVVVNKKLNVPREYVRQIKAALHSWRKFGLEAAEKYWNEKIDKRNRWSGASTSFKLAVRGQINHVGHVKGYSDSVYLLLARKLSQLDNTFNFDESAIAESIAEEIHVFCEGESDILHLGHAFRCLKPRYPSLNLIFKLPGIGKGDGSSVLKSFCDTVRNHPQRHLTICLFDRDEPSIIREMAGSAVSYKDYGGNVFSLVMPPPSFRKNDNICIEFLYQDIDLLRRDTQGRRLYLGEEFDQNSCFKGEEMLFKKFPKNSLILDSDIIDARTGNNVALSKIKFAEYISSKVDPFSSVDVSGFAIIFDEIAAIRETYMRPFHDVDGD

SEQ ID NO: 502 - protein, 572 aa, Pseudomonas sp.
  source 1..572: note = Related to NZ_AZVL01000013.1
MVSLNFYLKEQAAEYKVLSNKHMAQILGVKTSVLAYYAYYLPDNKKYNSFNIAKRGGGFRLIEAPNKRLKDLQRIIAEYLGGYYKPRACVFAYVGKRGIVEHASVHVCQRWLLRLDLKDFFHSITAPRLAGLLSAPPFLLAPGVARTISFICTKDGRLTQGAPVSPVISNIICRGLDYSLKTYAAKNKCYYTRYADDIFFSNNGAVFPSSLARKDEAGTVILGDELKDIIKASGFLINDNKTFLRSRAERQIVTGVVVNKKSNVPREYIRQIKSALHSWKKFGLESAENYWSEKIDKRNRWNGASISFKLALRGQINHVGHVKGYSDSVYLMLARKLSQLDNTFNFDERSIAESIAEEVHVFCEGESDILHLRHAFQCLKSEYPSLNLIFKLPGIGKGDGSSVLKNFCDMVKNHTQRHLTICLFDRDEPNIIREMSGSAVPYKDYGGNVFSLVMPSPDFRNENICIEFLYKDVDLLRQDTQGRRLYLGEEFDQNSRFKGQGTIFKKIPKSSLILDSDIIDYQTGNNVALSKVKFAEYISNGVAPFDSVDVSAFSVIFNQIAAIRDSYMSLGV

SEQ ID NO: 503 - protein, 577 aa, Pseudomonas fluorescens
  source 1..577: note = Related to MSDE01000014.1
MSAQDAIDENLNIYSISTNRELAKILKTKTSTLSFYAHYLPDKKKYKTHTISKRGGGARIIDAPNKNLKTLQKSIASFLNEHYKARACVFAYVANRGIVEHGEVHVNQRWLLRLDIKDFFHSITTARLVGLLIAPPFCIAPNVARTISFICTKDGRLPQGSPASPVISNIICRGLDYKLKTIASKNKCYYTRYADDIFLSNNGAIFPPSLALKNDTGIVALGPEISEIITSSGFSINEEKTFLRSRGERQIVTGLVVNKKLNVPKEFVRNIKSALHSWRKFGFEAAQKYWRDKIDKRNRWLVEHADYKLSVRGQINHVGFVKGYSDPIYLSLARKLSELDSTFSFDEEALANSIAEEIHVFCEGDTDLLHLEHAFQKLKNEYPTLNLTFKLPNTGKGDGSSILKNFCNSVRTIPQKHLTICLFDRDEPTIIREMAGSALPYRDFGSNIFSLVIPQPDFRDHECICIEHLYKNDDLLKKDSHGRRLYLNEEFDSNSRHTGGELLFKKIPKATLILDADVIDFKTGENVALSKSKFANYIYNETPPFTSIDVSGFKVIFDQIATIREAYSNGMHGQKTI

SEQ ID NO: 504 - protein, 578 aa, Pseudomonas agarici
  source 1..578: note = Related to NZ_CP014135.1
MSVPEVSPLPASFLDLLAPAVKIKNNKELAAELGISLGRLTYYAYFLPDHKKYKTFTISKRGGGERIIEAPVKGLKDLQKTILGKFEPYYKPRACVFAYVQDRGIVENADVHDFQRWVLRVDLKDFFHSITQRRVIGIFSSPPFSLSRDAARTLSFLCTKDGRLTQGAPTSPLISNLVCKGLDYTLKELAAKNKCYYTRYADDIFFSNSGAMFPRIIAEKMEDGSVKIGEELKNLIEGAGFAINEEKAFLRSRAERQIVTGLVVNKKVNVPREFTREVRAALYSWEKHGLESAENFWKEKVDKKSRHSESDSRFKWVVRGKINHIGHVKGYSDPVFLSLARRLKALDDTYKLDERKITVAIAQEIHIYTEGVTDNKHLKNAYEHFKRSNQFDDLNILFKETKKSGSPALKALCENLSEALQRHLTICIFDRDEKDIISNMGGSPGSYKDHGNNVFSLVIPVPDFRDTQFVCIEHLYKDEQLFQEDIEGRRLFSKDEFDSLSCFKGEKPLFCRLPNKQSLIYDSEIIDMSKKVNVALSKNKFADYILSRVAPFDKIDLSGFTGTFEQIREIARSYGNKR

SEQ ID NO: 505 - protein, 578 aa, Pseudomonas aeruginosa
  source 1..578: note = Related to AP017302.1
MLNIAGKPLFVPFLDAPLPEVKIKNNKELAGFLGISLGRLTYYAYYLPENKKYASFKIKKRGGGERLIEAPVKGLKDIQREVVRKFEDDFKPRACVYSYVKGRGIVENADIHDLQRWILRIDLKDFFHSITQKRVAGIFSSPPFMLSPDAARTLSFICTKDGRLTQGAPSSPFLSNLVCRGLDYRLKELAAKNKCYYTRYADDIFFSNSGAIFPRSLAERLEDNSLKLGEELTNIIQGAGFSINENKAFLRSRAERQIVTGLVVNKKVNVPKEFIRSVRASLYSWEKFGLELAEKHWREKVDKRSRHERESPRFKWVVRGQINHIGHVKGYSDPVFLSLARRLQALDSQYKLDEIKIINSIAEEIHIYSEGITDIKHLKNAYIELQRSGEINDLNIVFKETKKSGSPALKALCENLSEALQRHLTICIFDRDERDIITSMGGSPGSYKDHGNNVFSLVIPVPEFRETEFVCIEHLYRDEHLFLEDQDGRRLFARDEFDSVSCFKKERPLFCRYPNKQSLIYDSDVIDLAERKNVALPKNKFAEYVTSKTPPFDNMDISGFRCVFEQIRDIAKSYRSKR

SEQ ID NO: 506 - protein, 581 aa, Pseudomonas sp.
  source 1..581: note = Related to NZ_CP025263.1
MAKLPRKFSFSSFLNSPAPEVKIKNNKELAEVLGISVGRLTYYAYYLSADEKYSSFNISKRGGGERLIEAPVKGLKDLQKKIVEYLTTFFKPRSCVFAYVEGRGIVENADVHDLQRWILRVDLTDFFHSITQKRLVGVFSSQPFSMSHDAARTLSFLCTMNGRLAQGAPTSPILSNIICRGLDYKLKELSAKNKCYYTRYADDIFISNSGASFPRTIAEKLEDGSVELSESFCEVVSNAGFKVNLKKVFLRSRAERQIVTGLVVNKKINVPREFVRSIRAALYSWESFGLEDAEKFWARNIDKKSRHERSSPRFRWVLRGQINHVGHVKGYSDSVYLGLARRLAALDDSFKLDERKIRKAIAEEIQIYTEGPTDIKHLSNAFEVYQSRGEFQDLKLIFNRTKKAGSSVLKVLCENLSEAQQRHLTICIFDRDEREYIKSMGGSPGSYKDHGNNVFSLVIPVPDFRDTDLVCIEHLYRDEDLYREDVEGRRLFSKEDFDAVSCFKGDRPLFCRIPNKNSLIYDSDIIDMVEKKNVALSKNAFADNIVTKTAPFNNVDLSGFTETFEQIRIIAGSYRNRGVGV

SEQ ID NO: 507 - protein, 578 aa, Pseudomonas oleovorans
  source 1..578: note = Related to QRDL01000002.1
MAKPDEFLDLPLQPPIKIKNNKELADFLEIKVNKLTYYAYHLDDRKKYTTFEIKKRSGGLRKIDAPIKGLKDIHRQVLLKLDPYYKPRSCVFAYIKKRGIVENADLHKGQRWILRIDLVDFFNTITFERLKGLFASQPFSMSENASRTLSMICTKDGHLTQGSPASPLLSNIICRGLDYKLKEISAKNKCYYSRYADDIFISNNGAIFPNAIAEKKSDGSVELNPQILSTIYDAGFSPNKEKITLRSRAERQIVAGVIVNRKTNTPREYIKSIRATLYSWRKYGLESAEEYWLKHIFRQSPHGDNQPRMRWVLRGQINHVGHVKGYSDPVYIGLAKKLKSLDPTFKFNEQNAIDFVREEIHIYSEGITDRKHLENALLSLKSQGLFTELNLVFRETSTDSKKQGSAALRSLCETLCAATQKHLTICLFDRDEKEITESMGGSTRTYKDHGNNVWSLIIPAPEFRTLTSFCIEHLYRDEQLYQYDQEGRRLYSNSEFDDNQCHRDPDKLVFQKHPNKKALILDDAVIDITTKTNVALPKNKFADYISSKTAPFDDMDFSGFIPTFDQIIEIAARYTSNK

SEQ ID NO: 508 - protein, 558 aa, Pseudomonas syringae
  source 1..558: note = Related to NZ_CP067024.1
MAIPQIKNNQDLADFIGVKKGVVAYYAYYLDSAKAYTSFTIKKRSGGDRTIDAPVRGLKQLQRTILNKLSPEAAFRHCVYGYVPGRDILQNSAIHVRQRWVLRVDIKNFFPSITTLRVSGMFRSPPFDMEPKAARALALICTKDGLLPQGSPLSPWITNVICKGLDYNLKRLASKHKCYYSRYADDLFFSTSNGLFPTALARKSDTESNVIIGEELKSEILSAGFLPNEEKTSLKPISQRQVVTGIVVNSRTNVPREYIRNLRAALYSWDKFGLEAAEEHWRNKVDLKNRVGEQPRFRWVVRGQINFVKHVKGEADPVYLSLAKKLKKLDEKFTFDPKVSALSVTEEVQIFVEGITDKKHIEKAFRNAQGQGLYLDLNLTFPNQREYGSSNLKSLCETLSANAQRCLTICIFDRDEQPYVKSMGGSSGDYMDHNNNVFSLIIPRPEFRVEPDICIEHLYKDSDLFKHDLAGRRLYSKSEFDKHSCHCEDPNIFIRTPPKSLICDSGVINISTKASVALSKFDFATNIYDGVPPFDSISFEGFLPLFTKIQQIKNLFRK

SEQ ID NO: 509 - protein, 558 aa, Pseudomonas sp.
  source 1..558: note = Related to MSXU01000002.1
MAIPPINNNQDLANYIGVKKGVIAYYAYYLVSSKAYTSFAIKKRSGGERTIDAPIRGLKELQRTILDKLSPETNFRHCVYGYIPGRGILQNSAIHVRQKWVLRVDIKDFFPSITTARISGMLKSPPFNMAPKAARALALISTKDGVLPQGSPLSPWITNVICKGLDYNLKRLASKHKCYYSRYADDLFFSTSNSFFPTALARRGDAEKNVIIGEDLELEILRAGFLPNEEKTSLTPISQRQVITGVIVNSRTNVPREFVKNVRAALYSWEKFGLKAAEEHWRSKVDSRNRAGDPPRFRWVLRGQINFIKHVKGEADPVYISLAKKLKKLDDNFTFDAKASALSVIEEVQIFVEGITDKKHIEKAFIDAQKQGLYSDLNLTFPNQREYGSSNLKSLCETLSANVQRCLTICIFDRDEPAYVKNMGGSSGDYMDHNNNVFSLIIPRPTFRSEGDICIEHLYKDADLFKYDTAGRRLYSKSEFDKHSCHIKDPLIFIRTPPKSLICDSGVINISTKASVALSKADFATNIYEEIPPFNKVSFEGFLPLFTKIQEIKHLFKK

SEQ ID NO: 510 - protein, 559 aa, Pseudomonas sp.
  source 1..559: note = Related to LJRY01000136.1
MAIPPIVTLQDLANYLSIKRGKLAYYAYYIKPADAYNTFAIKKRSGKDRSIDAPIKGLKDIQKLVYENFSGEIEFRKCAFGYIPGRGILQNSERHVRQRWVLRVDLKDFFPSVTAVRVAGMFSSQPFNLSYKTARALALIATKHGTLPQGSPLSPWITNVICRGLDYNLQKLASRYKCYYSRYADDLYFSTSNSLFPLALAHKSENDSNVIIGEELKAVILTAGFTPNEEKTSLRPTSQRQMVTGIVINSKPNVPKEFIKQIRAALYAWENHGLVAAEEHWAKKSDFRNRFEKAKPRFRWVLRGKINHLRHIKGESDPVFLKLATRLKKLDPTYSFDPKLSAQSITQEVCLFVEGITDRKHIETAFKDAQNRGLYGDLNLKFNEPKENGSSNLQKLCHNLSATPQRCLTICLFDRDEPSYIKSMGGSSSDYLDHNNNVYSLILPYPKFRAEPDICIEHLYEDKDLFMPDSKGRRLFSRDEFDKHSCHIKEPNVFIKLPAKSLIVDSNVIDISTKESIALSKNDFASQIYTATPPFDNVSFSGFIPLFDKIQEIKNLFIR

SEQ ID NO: 511 - protein, 558 aa, Pseudomonas aeruginosa
  source 1..558: note = Related to JADTFG010000022.1
MALPAINSLQDLANFLSVKRGLLAYYAFYVSPGDAYSNFSIKKRSGSDRSIDAPVKGLRDIQTIIYKKFSGEIEFRKCAFGYIPGRGIFQNSERHIRQRWVLRIDLKDFFPSITAVRVAGIFSAQPFNISYKAARTLALIATKNGVLPQGSPLSPWISNVVCRGLDYTLQKLASRHKCYYTRYADDLYFSTSNSVFPSALAHRSEKESIIVIGDELKAAIIAAGFTPNEEKTSLRPASQRQIVTGVVVNSKPNVPKEFVKGIRAALYAWEKHGLLSAEENWQKNVDVRNRWDSANPRFRWVLRGKINHLRHIKGEADPVYIKLASRLKSLDNTYSFDPKLSALSITQEVSVFSEGITDKKHLEIAFKHAQSKGLYPDLNLKFYVPNEAGSSNLQKLCYGLSSTPQRCLTICLFDRDESQYIKSMGGSSSDYLDHNNNVYSLILPHPAFRTEPDICIEHLYEDKYLYMPDSKGRRFYSKNEFDKHNCYIKEQNIFIKATSKSLIIDSNVIDISKKTSIALAKNEFASLIYTSTPPFDKISFDGFLPLFDKIREIKNLFK

SEQ ID NO: 512 - protein, 564 aa, Vibrio chagasii
  source 1..564: note = Related to MSCI01000001.1
MEISSVKNLDDLAKCLGQSKKTLAYLAYHAPVDKKYKTFSIRKRSGGNRTITAPCSKLKSIQYSIYNQLNSFYQPKKSVHGYVKDKSIVSNASIHVGQRWLGKVDVKSYFPSITTKRVVGLLRNEPFNLPNKIAATVGLLVTYNGYLPLGSPCSPIISNLITRRLDAKLSALSRGYKCYFTRYADDIFFSTNRKVFPRELIHHNEDGVSTIGHKLNEVFEEEGFTVNTDKVSLKDKSQRQVVTGIVVNERMNVPKEYIRELRAMLYSWEKHGLEAAEKDWLKKYVNLNRNGQDIPSQPRYRWMVRGKLNHIAAVRGSNDEVYLKYAKRLARIDNTFKIDPKAITASIASEIKVHIEGKTDAIHMRAAMHALHGAGKYTSLKLSFPNEDTAKGDGELIKACKVMSSSNQTHLTIFLFDSDVDKTTREMKGSTLAYKDHGNNVYSVVMPNPSFRNDEKICIEHLYTDEDIMKKTENGLRIFKSDEFNKKNGLHIEEKGIIRLYPNNSTLIVDSNVIDVESGENVALSKAKFAELIESKRAPFDSVSFDGFEPLLDIFEKLHTDYIK

SEQ ID NO: 513 - protein, 463 aa, Halomonas xianhensis
  source 1..463: note = Related to SOEC01000021.1
DAAGGLRGRSQEISRWTRHTSIVLLLELETTELCEVLGIKTSYLNYLLYKLNEGERYESFEIKKRGGGARRIDAPIKPLKVIQRKLGDLLKEIYSPRIGVYGYVEGRGIKENAEVHLGCNEVCRIDVKDFFPSIHIGRVIGLFKSKPFLFPEPLSVLLAQICCKDGALPQGAPTSPVISNMICWLMDKELYRYARISGCRYTRYADDIFFSTVRKRLSRRICSVEHSEFDFSIALSPAVISIIEKHGFKINVHKTYMADKSQKQVLSGVIVNEKLNVDREFVLKLRAMLHCWEMEGLEKAEKKFHSKFARNYIVPPLFMQVVRSKVEYLGYIKGYDDPVYLKYADKLSRLHPHYTYNKRKVVAHGGNLIRVYTEGPTDKIHFNAALEWFRGRGEYASLGVVFEHLPEANGGDSLMKHAKTISTEARADRKVFYSIKMCQKLIRKLIRSQERITDFLLTTFGWP

SEQ ID NO: 514 - protein, 565 aa, unidentified
  source 1..565: note = Related to nan
MDVNIQKFLNIESKAQLSAFLGISTEKLNYLLFKLPHEEKYNSFEISKKTGGKRIIDAPIKPLKLLQRQIATILFEVYKPKTGVYGYVKNGGVKRNAEVHLRSKVLFRADIKNFFPSIHIGRVIGLFSSKPFSFPRNIAVLLAQICCKEDVLPQGSPASPIISNFICRGLDRDLLEYARSVRCKYSRYADDIFISTYKKFMPGSICKLEHDDGVGFCNINDGLEDIFETHGFSLNKNKLSVAYKHNRQIAAGIKINEKLNVDREYVLNLRAMLHSWRKDGYDVAAAKYNELKPNPSYARAFKNAVRSKLEYLGYVKGYGDPVYLKYAMWLSRLDDGYTFNKRSYEMENNKKLVVYTEGVTDQLHIQAAKNYFREKGEFMHLDFRFDDKSEVNGAPDLEKYLIQDRKEPNQEFKVYLFDDDLKKVTSKLDIAPGESSRWFGNKIWAALTPKPQHRKDDELFCIEMYYFDADLERKDSSNRRIYLNSEFDAKGFHNTESVVKTKPGSGLIVDNDAYSMVSKEKVSLSKIAFAENILYKKQGFEDVNFEGFRPLFELLQNIYNQAYLH

SEQ ID NO: 515 - protein, 614 aa, Paraburkholderia bryophila
  source 1..614: note = Related to JACCAU010000001.1
MSGEADQRGMSPGMQAAIDRLNLMGTNTQEALFSGFAQLTSKAQLCQFLGIKTAKLNFLLYKLKPAHRYKTETIKKRNGDDRLLRVPVPLLKQIQRIIASELAKEYRPRQHVYGYVKGKNIAQKARIHVAQKWVARVDLKDFFPSVNFGRVLGIFRGHPFHFNDELATVLTQIVMDGNELPQGAPTSPIISNLICRSLDFELKRMAKEHRCFYTRYADDLVFSTSLKRLSPQICSPAAPDGVSIQANVGDGLRTLIARQGFTINDAKTRIFDRSSRQQVTGLTVNEKVNVSREYVRGLRAVLHAWFKFGEESAASWFFANHYKRNRPDWKSTPADFREVIRGRLAFIRFVKGADDTTYLALAKKLAKLDDGFQLGVEEQIQVNSPRLMLYTEGVTDTIHLRHALQRFKADGQYSDLNIDWADHSDRPRGEGKLWQNCLNDAKRDEFRHQTQVYVFDRDSDFAKKAEDKYGKLKHHGNNTYSLVLPIPEHRQGRAQICIEHLYVDDFLWQQDVQGRRLFAREEFEHDGNHVGNVEVMYRHPKATTLIVDTDVVGYGSLRSKPVVMSKKQFADAVELGVKPFDAPSLVGFQGVFDMLRDLTKNLTGEVKADASAFV

SEQ ID NO: 516 - protein, 592 aa, Paraburkholderia tropica
  source 1..592: note = Related to NZ_JAGIXD010000027.1
MSNTTQAALFNAFPFLTSKEQLCQYFGVPPRKLNFLLYKLAPADRYKTVVIKKRSGADRQLRVPVPLLKQIQKIIAAELAKEYRPRQHVYGYVKGKNIAQKARIHVAQKWVARIDLKDFFPSINFGRVHGLFKSHPFQFNDEVATILTQLVMDGNELPQGAPTSPIISNFICRSLDTELKQMAKEHRCLYTRYADDLVFSTNLKRLSPQICSPAAPDGVSIQANVGEGLRAVIQRHGFTVNDVKTRIFDNSARQQVTGLTVNEKVNVSREYVRGLRMVLHVWQKIGEASASAWFFEKHYKRNRPGWKRAEPDFREIVRGRLTFVRFIKGANDTTYLTLAKKLSKLDDGFRLGLDEEIQLSSPRLMVYTEGVTDTIHLRHALQQFKARGVYNDLNIDWADHADRPRGEGKLWQNCLSDAKRDEFRHQNQIYVFDRDSDYAKKAEDSYGKVKHHGNNVYSLVLPIPEHRRGRKQICIEHLYEDAFLWQSDAQGRRLFPREDFDQEGHHTKGLEVIYRHPKSATLIVDADVLGYGPLKSKPVVMSKKQFADAIDQGVKPFDSPSLEGFEGVFNILRELTNSLAGEVRSDVIDLVS

SEQ ID NO: 517 - protein, 607 aa, Caballeronia sp.
  source 1..607: note = Related to JAJUBH010000003.1
MSRETEQPDRRVAGLSATIGRLNRMGTTNQTTLFGSFLEVGSKQDLCAFLGLSESKLNFLLYKLTSAERYKTEVIKKRNGSPRTLRIPIAPLKKIQKVIAGELSNLYRPRQHVYGYVKGKSIIQNAQVHLAQRWVARIDLKDFFPSINFGRTHGVFKGHPFHFNDEVATLLAQIATDQNELPQGAPTSPIISNFICRSLDLELKQMAKEHRCFYTRYADDLIFSTNLKRLSPQICVPAAPEGVSVQAHVGDGLRAIIEKQGFSVNDIKTRIFDRSGRQQVTGITVNEKLNVSREYIRGLRSVLHVWSKHGEPHAAAWFFSNEYHRNRPGWRPDPPDFREVIRGKLGFVRSVKGAEDTTYLTLARKLSLLDDNFKLSQAEQQQAESPRLMVYTEGVTDAMHLRHALHQFKADGLFTDLNIDWADHTDRATGEGKLWQTCLSDAKREEFRHQTQIFLFDRDSDFAKKAESKPGKLKHHGNNVYSFCLPVPAHRVDRTQICIEHLYHDEFLFQKDTQGRRLFAREEFEQDGNHVRHEDVFCRYSKATLIVDSNVSGIGSLRGKPVVLSKKQFADYVEQAVAPFQSPSLDGFQGVFEVLQQFVHNQIQGDA

SEQ ID NO: 518 - protein, 591 aa, Caballeronia sp.
  source 1..591: note = Related to NZ_CADFFT010000001.1
MGTDNQQSMFNSFTSLTSKVQLCQFLGITTTRLNFLLYGLPCERRYKTHAIKKRNGGERRIREPIPPLKKIQKIIAGELAKQYRPRQHVYGYTKNKNIVQKARVHVAQKWVARVDLKDFFPSVNFGRVKGLFRGHPFDFNHEIATLLAQLVMDGNELPQGAPTSPIISNFICRSLDYELKRMAKAHRCFYTRYADDLVFSTSQKRLSPQVCSPLAADGISVQAVVGDGLRAVVERQGFVVNDAKTRIFSKSSRQQVTGITVNEKVNVSREYIRGLRAVLHAWRKHGEEAAASWFFANHYKRNRPHWKSQPADFREVIRGRMTFVRFVKGGDDTTYLTLAKKLAQLDDGFQLDAAEQLQAMSPRLMVYTEGVTDTIHLRHALSRMKGDGRYVDLNVDWADHSDRPRGEGKLWQNCVNDSRREEFRHQIQVYLFDRDSDFAKKAEDKYGKLKHHGNNVYSLVLPIPEHRHGRQQVCIEHLYRDEFLWQKDAQGRRLFPREDFDLDGHHIGGLEVLYRHPKAGTLIVDSDVVGYGGLRGKPVVMSKKQFADAVDLRVEPFHAPSFAGFEAIFDTLSELSRSLGGGHRPEASDLL

SEQ ID NO: 519 - protein, 617 aa, Paraburkholderia phytofirmans
  source 1..617: note = Related to NZ_CP014579.1
MGTLNITSLLDESVQPPLISPFLLLRSVEDLCSFLDISHRRLNFLLYVLTPGDRYRSYELKKKKSSGTRTIKSPIKPLKEIQRRLANELSAVYKTPLNVYGYVKHRDVVDKAKQHVGQRWVARIDLENFFGTFNFGRVRGMFRAKPFNFPDSLATVLAQICVDTNELPQGAPTSPIISNILFWRLDARLRRLAREHRCVYTRYADDLVFSTNKRHMSSGICTVLDELSETPTIRVGETLRKEIEGEGFKVSDSKTRLFGRTARQQVTGLTVNEKVNLGREYVKELRAILYACRKFGVEAAKERFMASHYGKNVPPGKAAPAFAEIIRGRVMYVGRIKGYSSRAFLALARGMPILDPNFRVPEEHAAPRAYLFTEGVTDYLHLDAALKRFRKAGEFADVTVEWDDHTKREQMGDKRLLQICDDIAKGPKQDRLCIFVFDRDVPDTITKAEAPDGSPKLRGNGVVSMCLPVPKHRDQSSPMCIEHLYSDEFLYQYDADGRRLFARDEFLPSGFHKSEDFLSRQPKTSLIVDSDVVLSAGERRGTSVALSKRQFAMFVNLQTAPFSEPDLSGFRPFFEALRQLMEAHEAIQAMPVTPPANDRGQRVPPPGTGAGATQIEA

SEQ ID NO: 520 - protein, 607 aa, Paraburkholderia hospita
  source 1..607: note = Related to FUZX01000002.1
MGTPNLKSLNFEPEQAALIHPFLLLRSVDALCQHLGVSKRRLSFLLYVLPAAQRYRSFELKKRKSKATRTIKNPVKPLKEIQQHLAKDLLDIYRAPLNVYGYVKDRDIVDKAERHVGQRWVARIDLENFFGSFNFGRVRGMFRAKPFYFPDALATVLAQLCVDSNELPQGAPTSPVISNILMWRLDARLRRMAREHRCVYTRYADDLVFSTNTRRMSSGICNVLNADSDAPIVRPGDALLKEIRDEGLAVNDSKTRLYGRTERQQVTGLTVNEKVNLDRDYVKQLRAVLYACSKVGVEAAAERFFASHYPKNVPPGKRVPQFADVIMGRVMYVGRIKGYSSGAFLALASRLKILVPDFRVPEMPVTPRVYIHTEGATDYLHLHAALKKLQSGGEFTDLSVGWDDHSKREQLGDKRLLQLCEDTANGPRQDRLNVFVFDRDIADTVTKAEREGEPRVRGNGVVSLCLPVPAHRPASSLMCIEHLYTDEFLYQQDTAGRRLFSREEFRPDGFHNTEDYLYRQPKTTLIVDSDVLVTSGENRGKSIALSKKQFARYVSEQVEPFAAPDLSGFRPFFERLRHIIEAHEFLHDVPKRGGEGSDISRVAVDTP

SEQ ID NO: 521 - protein, 542 aa, unidentified
  source 1..542: note = Related to JAFDWE010000089.1; note = Actinomycetia bacterium
MAKVELRILTWLAWGLNEQRKYTTFSIARRNGSVRQISAPIKPLKEFQQALAESLLEGYRAPAHVHGFTTGRGPRTNAEVHVDKFHVFRADLADFFPSITYRRVRGLFRRWPFEHPDDLAKVLARLCCHQDALPQGAPTSPIISNFICRRMDRELAQLAAAERCHFSRYADDLVFSTNQHLFPPAIGLVEEGTAVAGDRLKGIVTTNGFSINADKTTLTRETQRQRVTGIVVNEKINPPREYVRSLRSLLYIWKTYGQPAAEAALAKHDPPSGNRPPGKSLPRFEQVVRGRVQYVGSLKEFRNPTYYRLAKQLSEVDEGFSPPPMPIIEANLYTEGPSDWRHVLAAQRHFNELGEFTDFHLVKGKEASREGESQLRKFAERLGEREQSEFSVCLFDSDVKPALEAVGPDGWRRYGPRVVAVGLAVPAAMDRREPLFIEKLYSEEVLKTKLANGRRVYLGTEFNPKSGHHLEEDCSIVGEGKEFIQQSVHAFDTHSVISLTKVDFSKAVYDDPEHFGTEIFEGFRPTFERIDEALRDSWEVLQ

SEQ ID NO: 522 - protein, 552 aa, unidentified
  source 1..552: note = Related to JAHBZD010000017.1; note = Xanthobacteraceae bacterium
MLTHQLRARRRETMRCPAQYQERQKRHDRADYYFMTLNSAYSFSSLAAVLGITPKQLGYYLHKRPLASQYKQFKIPKKSGDYRVISAPATNLKLIQKSIAKQLNEIRLFKPCVNGFVPKRNIRRNASMHVGRRFILNIDLEDFFGSITFARVYGMLQKEPYFLAQPVAAAIAKACTLDGVLPQGAPSSPVITNLICAKMDAELTRFAESNRCKYSRYADDITFSTTRPTMPFASALKDAEGTTVYELNPTLRDIIETNGFKINEKKVRLRDATARQEVTGLIVNKRVNVKRRAVREIRAMLHAWRTFGLPAAATMGKDKYGLKGNFEAVLRGKIEFVGHIRGRPDPLFRKLADQFNSLPVAGRIRTVLTPEEIARNATWIIESDGDVQGTAFFVDGVGLVSCSHCVGPNAYILHPTDPTKKHRVKIIKEDSHRDIAILECPNGFSVPGFQLHAASIVKDGTEIVLLGYPNHRAGSTIRVEAGKLLRRIVSSAVEHYEITPKIIGGNSGGPIVNSDYEVVGIAVRGLSGKAKFSDVEFIGINSSELKLVLSGK

SEQ ID NO: 523 - protein, 517 aa, Rhodoplanes sp.
  source 1..517: note = Related to NZ_CP007440.1
MPLNKIHNLTGLAYLLGCRAQQLGYYIYKRPLITQYRTFEIPKRRGGTRTIAAPSTNLKIIQRNLAKELDALFTFKSCVNGFVTDRDIKRNATTHVGERFVLNIDLENFFGSINYGRVFGLLSKPPHSLNRTVAAAIAKACTLNDALPQGAPTSPVISNLICAKMDSELLRFAAANRCKYTRYADDLTFSTNRTSMPFATASKAADGKTYCEINASLRTIIESNGFQINTNKLRLRDNTARQEVTGLIVNERVNVKRRFIRETRAMLHAWRKFGLLAAAAEHKNKFGGGTAFESIVRGKIEFIGQIRGRPDLVFRRLAVQFNALTTSGKIRTALSPEEIVKQATWVIEHSGDGQGTAFFIEKYGLITCAHCLGSNPYIYHPENPAKKIAVTVLSQDNHRDLAALEIPAELKTISPIPLYKGPPLKDGASITLCGYPNHFLAKPIRIEQGKLIRTFPKSAVSYLEVTPKIIGGNSGGPLVTEDFSVAGVAVLGLSGSVTLSQAEFFAVNIAELVAWLK

SEQ ID NO: 524 - protein, 519 aa, Bradyrhizobium sp.
  source 1..519: note = Related to CP069300.1
MDLSKAYDLTSLAILLDCSAKQLGYYVYKRDLATQYKQFQIKKRSGGARIIKAPATNLKIIQRSIVRELERLVRFKPCVTGFVKGRDIKRNAVLHVGQRHVLNVDLQDFFNTINYGRVYGLLTKKPYGIAPKVAAAIAKACTLDNALPQGAPTSPILSNLICAKMDAELSRYALANKCIYTRYADDLTFSTNRQFMPMAALNLNSDGTPITELARPLREIIEANGFVINERKVRLSTRGRRQVVTGLVVNERVNVRRSAIREARALLHAWRKFGLVKASSVFNEKFGGAGRDFEAVVRGKIGFIGQIRGRPDESFKKLALEFNKLTANGKIRTALSRSEIAAQAIWVIEHDGDSQGTAFFLDGVGIVTCAHCLGENPFIYHPSDHTKRFKLKVRAEDKHRDLAILYVPVELENVVPLSAYKGVALANGADVSLWGYPNHFAATPIRMERGKLIRSFVKSAVSYLEISPKIIGGNSGGPVLNDGYQVIGIAAVGFGGSTKFTGVEFMAVNGIELSALLSK

SEQ ID NO: 525 - protein, 534 aa, Tsuneonella troitsensis
  source 1..534: note = Related to NZ_QTTB01000004.1
MRVNSKQDLACAIGIPLELLERRAFGIPQHILYSRHEYPKRDGSTRLIYSPHWPLRHIQSRLANLLDEIYEPSSRVSGFVKGRGIRYNASLHVGKRLLLNFDLSDFFPTIHFGRIRGRLRARPYQLNAVIATTIARLCTLDGNLPIGAPSSPVLANIICSHLDGLLTRLAREHGCFYSRYADDITFSTNRRSFPNSLATVDHENGLAAVGALISAAVTEAGFIVNPRKTRILDKSSRQEVSGVVINQFLNVPRSFMREIRGALNAWEKHGHIASEQYFKEKYNWRSSQSFENHLRGRIQHVIHIRGSDDLVVWRLVNRFNNLPDRAHSSISYDRPKDERDRLSLAVCRVESGNDELMEYNQGSGIKLPNGNVLTNFHNIEICGTVAPIIEIYLTDNAPVPVPMRVLKHDFAKDVAILEPIDPEWKMPIAAASAELSFSECKVGDDVKVGGFPSYQLGDSCQIATGEVRAFSKIEGITYFRVSVPIVKGNSGGPVFNIDGQVVGIASRGIDTHEITNAAFNGCLELFRFEKFLQS

SEQ ID NO: 526 - protein, 406 aa, Acinetobacter calcoaceticus
  source 1..406: note = Related to KB849143.1
MKFPPTSPILSNLIVMKMDGQLSKLAKDNLCFYTRYCDDIYFSTNRKKFPQNIAFFDHSSDNRFCQIGGDLEKIIKSNDFIINEKKVYLSDKSNRQFVTGLVVNEKINVNRKFIKNIRPILKKLQKDENFKKEYFEKFNKNILSQLRGKIEFIGNIRGYDDPVYRKYALALSKLDPSYIFNKRNLSFGDGQLVEIYCEGITDYLFLKEYLRLFKNRGMFTDLEIRFREDSNFTGGDTQLLDAYKKIQQMNSSLNNHLTIFIFDKDNQNIIKYFENLENELDGLKHLFLPCPDGYSNSEYCIEHLFKFEDILKVIDNENRRIYLKSEFNSKGFHEEENLIYMRMNQKTLVADDEVLCLRTQKNVALSKANFADLATGKYLTLLDLSNFEKLFLEITYLKNEFYKSPQ

SEQ ID NO: 527 - protein, 511 aa, Acinetobacter soli
  source 1..511: note = Related to NZ_KB849643.1
MPKKDGGIRQLYVPNQLIKKIQKQIFDDLQPIYSPRACAFAYVKGRNIKEHAKKHVNKRWILRVDLQDFFPNIHFGRVRGIFKLLGCNEEISTYLAQLCCYEGKLPQGTSTSPLISNILASKMDRQLSEMAKQNQCFYTRYCDDLYFSTNRKLFPQNLAFFDNSSGNRFCQLGEDLKNIIDSNDFIVNEKKVYLSDKSNRQFVTGLIVNEKLNINRKFVRSLRPDLKKLKDNPNYKNEYFEKYNKNLLAKIRGKIEFIGYIRGYEDTLYRKYALELSKLDSSYIFNKRNLSFGDGNLVEIYCEGVTDYLLLKEFLKFFKSNGMFTDLEIKFREDSNFTGGDSQLLDAYKKIQQMNSNLNSHLTIFIFDKDNQIIVKYFEALKNELKGLKYLFLPCPIGYEKKEYCIEHLFKFDDILKVVDEENRRIYLKDEFNAKGFHNNGECIYMRINQKTLIADDEVLSLSNQNNIALSKSKFAELATGKYLKELDLSNFEKLFIEITNLKNEFYTLSH

SEQ ID NO: 528 - protein, 529 aa, unidentified
  source 1..529: note = Related to JACCQO010000001.1; note = Desulfovibrionaceae bacterium
MKRIKNLTAFERQALTEKDICSYLGVYDSEVNKIIRLPTKYKYKVFTIPKKNGAQRTIQAPTYRLKEIQKRISILLCDLYPPKKSASAFIKKRGICYNANFHINNNLILNIDLENFFPSIHFGRIFGLLKSTPYNLSFIVSKIIANLCCVDGRLPQGAPSSPVIANMICGKLDAQLYKIARENQCLYTRYCDDITFSTKQNSFRGIATIHDDEFALVQLSDKLEDIIEDNGFYVNKDKVHFASKKSRQSITGIVVNEKMNVRRTYVRNLRSAIYKMEKDIDAAESEYIAKYKKSMNYASSSSIFDHISGKLSYLKMIKGDKDKTYKLLKHRFDLLLGKQSFFFSTQREQLTAAIWAIEDKNTIETGTGFMLKGVGIITCAHVIRDNPCAILDTRPGAPLRKIDMEIIKRDEALDIAILRPLGVDIRKYYALEKSDAEFHNTPEQLILAGYPGYRLGHTLSIKETYCISHRVEHAIQLIELSDQIHKGNSGGPVLDSELKVVGIAAKGGEPGQQDLAIHIGMLSSLVIRG

SEQ ID NO: 529 - protein, 557 aa, Paracoccus sp.
  source 1..557: note = Related to NZ_JAEHFP010000009.1
MSLKPFANLRQIAFALRRNYRKRFVYIAYGLAPGARYKEFTIPKKSGGTRRICAPRIALLGLQRDILRLLESDYRPRAHVHGFVGGHQRSIVSNARQHVGKRWVLNIDLEDYFETIHFGRIRGRLMAPPYDYPEEIAQFIAHIACFQTEKEVEGSLRTTHVLMPGAALSPILANIVSDKLDAELARFCRQLGCTYTRYADDITISSNRRTFPAPIGRFANPDSHDDFILSDTFQQMIEDNGFRINHAKTRLLGAAFQQEVTGLVVNEKVNVKRKFVRDVRAMLHDWEFNGYAAASARHFNDKRPDRGRLPEQEATNFEWVLRGKIEFIRQVKGSTDQVFRGLAARFNALSSGGQFSIPLVEDSEVLNAAVWYLENDTDGGSVGTCFAVAENLFATCAHCLGPNLRIFPRQSPAFAMEADEVARDEHNDLALIRLRTPMPAFNPAATLQMASTAEAGALGIRSAVQAAGYPSNLDSTSLTIRDTEVTGFSRQTFDGTPATSDNVIALLSGTYEGMSGGPVLFSGKVVGVIVRGPNDDDRTIPFLAVRSEFVDALLATL

SEQ ID NO: 530 - protein, 534 aa, Labrenzia sp.
  source 1..534: note = Related to JADOUJ010000023.1
MTYIAYGLAVGARYKEFNIPKKNGGTRRICAPRIALLELQRDILRLLEGDYKPRAPVHGFVGGHKRSIVSNAQQHVGKRWVLNIDLEDYFESIHFGRVRGRLMAPPYDYSEEIAQFVAHIGCFQTEKEVDGNVRTTHVLMPGGALSPLLANIVSDKLDAELSRFCRQLGCTYTRYADDISISSNRRTFPASIGRFANPDSQKEFVLSDTFQQMIEDNGFRINHSKTRLLGHAFQQEVTGLVVNESVNVKRKFVRDVRAMLHDWKLNGCEVASARHFNKKRPDRGRLPEQEATNFEWVVRGKIEFIRQVKGSTDQVFRGLAARFNELCLGRRFSIPLVEDTEVLDATVWYLENDTDAGSVGTCFAISENLFVTCAHCLGPNLRVFPRKNPEFQMEAEEVARDDHHDLALIRIREPLPAYNPATVLRIASTADASELGIRSAVQIAGYPSNLDNNSLTIRATEVTGFSRQTFDSTPTMSDNVVELLSGTFEGMSGGPVLFSGKVVGVIVRGPNKHDRTEPCLAVRSEFVDALLATL

SEQ ID NO: 531 - protein, 561 aa, Phaeobacter gallaeciensis
  source 1..561: note = Related to QOCE01000017.1
MSLRRFANLRQVAFHLHRDYRRRMFHIAYGLPAGARYREFTIPKRSGGTRRICAPRKALLNLQRDMLRLIEPDYQPRAHVHGFVSGRQRSIVSNARQHVGKRWVLNIDLEDFFETIHFGRVRGRLVAPPYNYPEEIAQFVAHIACFETEKEVNGTRRTTSVLMPGGALSPLLANVVTDKLDAELARFCRQLGCTYTRYADDVTISSNRRTFPAPIGRFADPESFLEFTLSDSFQQIVEDNGFRINHDKTRLLGQAFQQDVTGLVVNEKVNVKRKFVREVRAMLHDWEFNGLAQASARHFDEKRPNRGRLPEQEASNFEWVVRGKIEFIRQVKGSTDQVFRALAARYNDQCSGQEFHIPLVEDQDVLNAAVCYLENDADGGAVGTCFAIEDDLYVTCAHCLGPNLRVYPRQNPAFPLEADVVAQDDHNDLALIRIRTPLPAFRPAAFLQLAEATEAASVDIRSAVQTAGYPSNLHSASLTMNSTEVTGFSRQSFDGTPPTSDNVISLLSGTFEGMSGGPVLHEGKVVGVIVRGPNEDDRTIPFLATRVSFLETLRAGVSSAS

SEQ ID NO: 532 - protein, 557 aa, unidentified
  source 1..557: note = Related to REBV01000319.1; note = Puniceicoccaceae bacterium
MSLKKFKNLRQVANALGRDYRKQVLNIAYGLPPKERHTEFAIPKKGGGTRRICAPRAALLGLQHDCLDLLQMDYRPKAQVHGFVSGRGRSIVSNARQHVGKRWVLNIDLEDYFESIHFGRVRGRLLASPYNYSSEIAQFVAHIACFQTTKEFDGVHRFNSVLMPGGALSPLLANIVSDRLDAEIGRLCRRLGCTYTRYADDISISTDRRTFPAPIGRCSDPERLRDFTLSDGFQEIIENNGFRVNNSKTRMLGREFRQEVTGLVVNDKVNVKRTFVREVRAMLHDWEFNGYDVAADRHFNEKRPDRGRLPAYEATNFEWVVRGKIEFIRQVKGAADQVFRALAARFNQLTSGQAFVIPLVEDREVLDAAVWYLENDVDAGSVGTCFAVGENLFVTCAHCLGPGLRVFSRRSPNFSLNAIEIARDEKNDLALIRVESLPSGLKPEAILRLATLAECGNVPTGAAVQAAGYPCNLHPDSLTVTPAQVAGFSRQTFDGSQHTEDNCIGLLSGTYAGMSGGPILHEGKVVGVIVRGPNDSDRTLQCLAVRSMYLERLLQGL

SEQ ID NO: 533 - protein, 554 aa, Rhizobium leguminosarum
  source 1..554: note = Related to JACJHV010000001.1
MTLKSVPDLRFLAAALGRNLKRRLTYIAYKLPSSSKFREFTIPKRSGGTRNIQAPKVALLNLQKSIKPLIEKDYRPRVNVHGFVAGQGRSIVSNAEKHVLKKWVLNIDLENYFGSIHFGRIAGRLQSKPYNYAPEIARFVAHIACYPTQTVIAGQIQDSSVLMTGGAISPLLANIVTDKLDSEIARFCSQLGCTYTRYADDITISSNRNKFPGKIARFEDPDDQKSVVLSEEFLDLIEGNGFAVNHAKTRLLSRIFSQEVTGLIVNKKVNVPRTFIRQVRSMLHDWEANGYAAAQENHFTKYRPNRGRLPAYEAKDFQWVVRGKIEFIKQVKGATDQVFQTLARKYNSLTSGKKIAIPIVETNRIIEEAVWYLHTEKDIISTGTCFAVEGGAFITCAHCIGPNMTVFPKAAPKFPVATAALNVDGVNDLALLDLTALLPAHAPKGLLKLANVAEVSALQVGDKVQIAGFPGNLNPDAVTIAEATITRFSKTTLDGSIPASNNVMVLDGGTFSGMSGGPVLFKGKVVGVVVRGPNDNDPNEKCEAVFSTLVLPMF

SEQ ID NO: 534 - protein, 554 aa, Sinorhizobium medicae
  source 1..554: note = Related to VITA01000024.1
MTLKSIPDLRFLAAALGRNLKRRVTYIAYKLPPSSKFRVFTIPKRSGGTRTIQAPRIALLSLQRSVRLLLERDYSPRVNVHGFVPGHGRSIVSNAEKHVLKKWVLNIDLENYFGSIHFGRIAGRLQSKPYGYTPEIAKFVAHIACYPTQALIDGKIQDSSVLMTGGALSPLLANIVSDKLDSEIARFCSQLGCTYTRYADDITISSNRNKFPGKIARLEDPEDHRSVVLSEAFLDLIEGNGFAVNHAKTRLLPRSFGQEVTGLVVNKKVNVPRSFIRQIRAMLHDWETNGYAAAQIRHFSKFRPNRGRLDAHEAKHFQWVVRGKIEFVRNVKGSTDQTFQTLARKYNSLTSGGKITIPIVETNRIIEEAVWYLVNENKVVTTGTCFAIEGSKYITCAHCIGPNMTVTPKSAPKFPVSVKALKQDRVNDLATLDLSALLPAHTPKGMLKLASIAEVGALKVGDKVQIAGFPGNLNEEAVTISEATITRFSKTTLDGSIPASNNVMVLDGGTFSGMSGGPVLFKGKVVGVVVRGPNDDDPNEKCEAVFSTLILPLI

SEQ ID NO: 535 - protein, 558 aa, Bradyrhizobium sp.
  source 1..558: note = Related to NZ_LFJD01000004.1
MPAPTPLLNSIFLPRQLASVIGVGFRRFAYIVYVIQGSLKYRNFKLPKRRGGERLIEAPRWPLLRIQKELRPLVDELYRPRGVVHGFLKDRSVLTNARVHLKARWVLSLDLQDFFHAVTFGRIKGRLEANPFNLTPPIAHAIANAACVSGRLPQGGALSPVLSNMVADRLDGELSRLCRKFRCRYTRYADDITISTGAARFPHALAHLDDGEKRTLIIGEALRALIESNDFKLNESKSRLSGRGDRQEVTGLIVNEKLNVPRTFVRQIRAMMHAWEKFGRVAAEAEHLTKWRKSDGRLRKHDRDNFEHILRGKLEFLKCVQGENEPVCRKLLLRFNALPDRSTTSFRLLPASAIELLRESTYCLDITKYVGPSSEGSAHVREYFTGTAFFLKGVGLVTCEHCTGDEMQIYHPDRKHLKYRVHPLKVDALADVAILEVLDTMLPSPRVELEAAVSAVAIGDEVRVAGFPAKFPEGSISIARTEVIATYDRSRHPVIWKGDATVRYLIEKGVPDGVSGGPVLDARGMVIGLGVKGPSEDDPLVPCEVVPISAVQRLLRTS

SEQ ID NO: 536 - protein, 579 aa, Halodesulfovibrio spirochaetisodalis
  source 1..579: note = Related to NZ_JXMS01000023.1
MKNKTTLPTPTKELLQASSNKDLARLLGFRTSSLCYILYKLPSRPYKKFGIPKKSKGVRIICAPRKPITTLQEKVYHLLLPLYRPKKSASAFIKNRSIVFGADKHSRKRHLVTFDLKDFFDSIHFGRVQGLLMATPFNIHPDVAQSLANIICYEDKLPQGGITSPLISNMICWKLDTQLTELAVNTGCTYTRYADDISISTWKKELPPEIGTLSKYDITLSEEVQKIVNDNGFEVNPSKTRYTHPSTRMEVTGLTVNRRPNIQRKKIRNLRALLHDWDINGYVEAEQRYRDKSSNPPREEATLEEIVCGKLAFLKMVRGENDPVYRKLKRKHLILSTGSIPTGLLDAVPTLNADSNYLFGEGQTDWKHLYAAFRYFRNQGLYNGLNLVISPPPAVWEGGFSNLKMMVERYKLLHNTNSKLFFLFDTDEQQAVKYARGRKDNSNLYHHQGSNVYTLLLSHTPNLCIEHLYPEEELKRANSAGRRLYLSNEFTEQGVLKDNSSITYCSEKKPFDKRWVHKKHILDADVIKTINGKKKNIACSKKDFSSQVLARPDTELVFTFDEFKPIFDAIEKALAAYKA

SEQ ID NO: 537 - protein, 537 aa, Collimonas arenae
  source 1..537: note = Related to NZ_CP009962.1
MLITLSALTPPNFLDLKSFSDLALFFGIPSNKLGYLLYALQDSDKYKSFNVPKKTGGTRQISEPHPLLKKIQRKLADSLLELYKPKQSVHGYLKDKSIVSNAKMHLRKRYLLNFDLADFFTSINFGRVRGLFLNHPFNFPQEVATALARISTKENSLPQGAPSSPVISNFMCWGLDNYLRKFCYQLGCTYTRYADDISISTNRENFPTEIANVKHDPYSAVISEILTTKIEQNGFTINNAKTRFSTPRQSQVVTGLKVNEFANVSRKYVRNLRAMLHAWEKFGLDKAESEFREKYVSKHRAPFLPPVSFKQVLHGKLTFLRSVRGPNDDIYQKLLGRYSLVADLRRLTKFGFPKQINRALWILESDLFEDDYYQGTGFCLDGIGIVTCAHVLKPGTKARRIYNHLESLNIEIVERNDALDYAIIKVIGGVEEVSLIADLDFNHQLGGQVRTIGFPAHDGTASVAYEDGVIVQSRYNAAGQKWFRVNTNIVAGSSGGPVLNSEMKVIGIVAYGATNLSGGGDPINSGYIPIQCLNGPA

SEQ ID NO: 538 - protein, 504 aa, unidentified
  source 1..504: note = Related to JAHBTD010000003.1; note = Fimbriimonadaceae bacterium
MRIITSLWQLEEEWGYEAGTLAFVAYRTNIDSRYTTYNIRKRTQGYRQIDEPDELLKGVQRKIKEFLEDKYVPTTSAYAYVSNRSPVKNAALHTRKKWIVNIDIKDFFPSIHFGRICGVLQSKPFHLEASTAKVLATICTRNHALPQGAPSSPILSNIISYSLDIALIQFARSHGFYYTRYADDITFSTWQSKFPNQLLTVDHEGTRVADSLEQIISGNGFTVNGLKTRCLERRQRQSVTGLTVNKFVNVRRKYIRQVRGMIHAWQKYGEESAQKTFEEKHLNKHYVPSGRIPKFRWVLLGRLQYIGHVRGWQDPVYRKYFRQLSELWPDLSKRMRDRFDILAQNFLELSNMTDHRAKGYALEKFIYELCDDGTVGVSGQFRRQNNIEQIDGAISFNSNAVLIECKFYSERIGALLIDPFSMKLARSGAGTQGLLISMSGYTSEALETIKLNPGQNLMLLTDADLQVWLDRRLTTYEVIAAKLKALQVLREPALSLAESVEIEE

SEQ ID NO: 539 - protein, 546 aa, unidentified
  source 1..546: note = Related to JADMJM010000027.1; note = Hyphomonadaceae bacterium
MPSDTSTPTQRKAREPGPPAITINGRALQTPFDVAQYFKVAHSHMMWVLFKAPAASRYRTFEIPKRTGGMRLISAPNGLVRDLQTKLAPALAAAYEAHPSAHGFLKAKSVVTNAHEHIGQRLVVNIDLEDFFPTINFGRIRGLFMSRPFYMGAGAASVMAQIVTHRNGLPQGAPTSPALSNFIAATLDRRLTRLAKENRLRYTRYADDITFSTNQPTFPPSIVMTDVATGRVVPAETLERAIAAAGFAINRKKVRLQTRHQRQTVTGLVVNSSTNVHRARIRKIRAMIHAWEKFGLDAAASEHFAVHRGSSGKMPDHPAAAFRNIVYGQLSFVKMVRGKADPVFLKLCAKLIDLDPNPSKFIRQMVFGADDYDVFISHASEDKETIARPIFEACARRGVKAFLDEAHIGWGEDFTKKINTALGSARTVLCVISQVSVTKEWPLAEVNTALSMDVIGQKRVVPLIVGSPDLSKLPLIRGRDQLVWRGDAEIVAAELVKVVRPPKPEVTKGGAAVPVIAPNSPAEAKRAAQAKGAKKGGGFFGLFQKK

SEQ ID NO: 540 - protein, 545 aa, unidentified
  source 1..545: note = Related to JAEUMP010000020.1; note = Hyphomonadaceae bacterium
MPSEPGSEKPVRDPGPPAILWRGKPLETPFDVAGYFGVAHNHLMWALYKAPPQTRYRTFEIPKRTGGMRLISAPNGLVRDLQTKLAPVLAAAYDAHPAAHGFLSGKSVVSNAREHADQRLVLNIDLEDFFPTINFGRVRGLFMARPFFMGAGAAAVMAQIVTHRNGLPQGAPTSPVLSNFIAATLDRRLTRLAKENRLRYTRYADDITFSTNQPTFPPSIVITDQASGKIVPAETLERAIAAAGFAINRKKVRLQTRHQRQSVTGLVVNTAPNVHRARVRKVRAMIHAWEKFGLQSAAYEHFRKYRGASGAMPDDPSTAFRNIVYGQLSFVKMVRGRDDKVFLKLCAKLIDLDPNPSKFIKQMVFGADDFDVFISHASEDKETIARPIYEACARLGVKAFLDEAHIGWGEDFTKKINTALGAARTVLCVISQTAVTKEWPLAEINTALSMDVIGQKKVVPLIVGQPDLSKLPLLKARDQMVWRGDAEMVAREVAKIAKPPKPDVVKGGASLPVIAPNSTIEAKRAAQEAGGKKKGGGLFGWFGKK

SEQ ID NO: 541 - protein, 571 aa, unidentified
  source 1..571: note = Related to WGOB01000084.1; note = Alphaproteobacteria bacterium
MPPSTSDAPPEPPQAGAPVPPPPLGALAIDGAPLRNAYDVARYFGVAHGTMVWVLYTAPENQRYRTFEIPKRSGGMRRIDAPTGLVRQMQKKLAPILAGAYEAHPSAHGFIKERGVLSNAKGHAGQRLVLNIDLEDFFPSINFGRIRGLFMAAPFLCGPGAATVLAQICTLRNGLPQGAPTSPALSNFIAASLDRRLTRLAKDHNLRYSRYADDITFSTNQGVFPPAVAMKVQTEGASLGVRPGEALDRAIAAAGFAINLRKVRLQSRSVRQNVTGLTVNVAANVERSRIRKVRAMLHAWEKFGLDAAGSEHFLKHRGAKPKKGRGPVTPGAAFRNVVYGQLAYIKMVRGPADPVFLKLCGRVLDLDPNPSKFIKQMVFGAENFEVFISHASEDKELIARPIYEACERLGLKTFLDEPHIGWGENFTKKINTALGSARTVLAIVSSNSVAKDWPVLEINTALAMEVNGQKRVVPLIVGKPDLAKFPLLKGKNHVVWASDPDKVALRLLDAARPPPKPRAARPASRTAVPATGAYQPVPAGPNALPPLFAPYPPRAPKPKRSFLEWIFGRRG

SEQ ID NO: 542 - protein, 560 aa, unidentified
  source 1..560: note = Related to JAEUMQ010000020.1; note = Hyphomonadaceae bacterium
MQPPPTDGEASKPAAPAPSPLSIDGVPLRSAEEVARFLSVPYGRMIYTLYKSPDKARYRGFEIPKRSGGMRLIQSPNGLLREMQEKLGPVLQAAYEAHPAAHGFIKTRSVVSNARLHVAQRLVLNIDLEDFFPNVNFGRVRGIFMAPPFSCAPAAASVLAQICTHRNGLPQGAPTSPALSNLASATLDRRLTRLAKENGLRYSRYADDITFSSNHSQFPPAVAIFTEDGKKGLAVRPGEALERAIAAAGFSINLRKVRLQPRHVRQAVTGLTVNAAPNVERKRIRRVRAMLHAWAKFGAEAAGAEHLLKYRGAHSPGEQSARAFRNALYGELAYIKMVRGQEDRIFLNLCAKVLELDPNPSRFIRQMVFGADDYDVFISHASEDKDEIARPIFEACGRAGLKAFLDEAHIGWGQSFTQKINSALGAARTVLVIVSSTSVSKDWPVLEVNTALQFEAAGQKKVVPVIVGKPDLSRLPLLSGKDGMVWSGDADAVATRLQAAVKGDAPRRPERGAAKPPARAAPPQPPPRAAGRPGRTAVPVTAPRGPRRGFWSWLFGARPR

SEQ ID NO: 543 - protein, 563 aa, unidentified
  source 1..563: note = Related to WGNI01000003.1; note = Alphaproteobacteria bacterium
MPDPSTPSDRTRAPAFGELRLETVSDIARLLRTHPGQLSWTLYKAPETARYRAFEIPKRSGGMRQIHAPIAHVRDWQTRLAPILQAAYEAHPSAHGFLRERGIMTNARTHVGQRLVLNIDLEDFFPSVNFGRVRGLFMRSPFNCGPAAATVLAQICTHRNGLPQGAPTSPALSNFAAAALDRRLTRLARDNNLRYSRYADDITFSTNQPQFPPAVAEMRAGEGDALKVRAGEALERAVAAAGFSINHKKVRLQRRSQRQSVTGVVVNARTNLTRQCVRRVRAMLHAWKKYGLEAAGAEHFDRWRGAQANKRATTVGRAFRHIVYGELSFLKMVRGADDPVFLKLCAQLIELDPNPSKFVRQMAFGADDYDVFISHASEDKDAVARPIFEACSRLGVKAFLDEAHIGWGQSFTTKINTALGASRTVLAIVSSHSVTKDWPVLEVNTALALEANGFKKVVPLFVGAPDLSKLPLLQAKDAMVWKGDPDMVAKRVQAALKGEAPRRPAEVAPRPRWMGGRSATALPIVGVAPRGVAVRVDPPPILPPPRRTLWEWIFGRRGPPSSR

SEQ ID NO: 544 - protein, 556 aa, unidentified
  source 1..556: note = Related to JAEUMS010000023.1; note = Hyphomonadaceae bacterium
MPSSSQAETAETALLHNGRPILTAYDAAKFFGAPLGKLAGVLYRAPEEERYKSFEIPKRTGGMRPILAPIGLTRELQEKLAPVLLERYSAHPAAQGFLKERSILTNARVHAGQRLVLNIDLEDFFPSINFGRVRGLFMAEPFKLGPAAAALFAQLCTYRNGLPQGAPTSPALSNFIAADLDRRLARLARESNVRYTRYADDITFSSNQPTLPQTLIVTVAGEGRASVQVAEPLERAITASGFAINHKKVRLQTRHQRQSVTGLHVNAKPNVSRARIRRMRAMLHAWERFGLDAAAYEHFLKHRGMLKPPRDPSRAYRNVVYGQLSFIKMVRGGDDPVFLGLAAKLIKLDPNPSRFIRQMAFGGDDFDVFISHASEDKDEVARPIFEACARLGVKAFLDEAHIGWGQSFTQKINTALGSARTVLAIVSQTSVTKEWPVIEVNTALSLEASGQKKVVPLIVGKPDMSRLPLIHGKDAMAWNGDAANVARRLKAAVDGAAPRRPAAQPATTAVPVTTDKPLALRARSQAPLAIQERGPWRPPPKPKRGLFDWLGGRKRP

SEQ ID NO: 545 - protein, 487 aa, unidentified
  source 1..487: note = Related to DPWD01000203.1; note = Hyphomonadaceae bacterium
MLLHEGKPILTAYDAAKYFGVSVGKLARALYRSADEERYVRFEIAKRSGGMRPISAPVGLTRELQTRLAPVMQARYSAHPAAQGFIKERSILTNARVHVGQRLVLNVDLEDFFPSVNFGRVRGLFMAEPFKLGPAAASVFAQLCTYKNGLPQGAPTSPALSNFIAADLDRRLARLARESNVRYTRYADDITFSSNQQSLPQTLIVHAQGGDGHGVAVAETLERAITASGFNINHKKVRLQTRHQRQSVTGLQVNSRANVSRERIRRVRGMLHAWEKFGLPAAARDHFLKHRGMLRPPKDPPRAFRNVVYGQLAFIKMVRGADDPVFLNLAAKLIKIDPNPSRFVRQMAFGGDDFDIFISHASEDKDAIARPIFEACAKLGMKAFLDEAHIGWGQSFTQKINTALGSARTVLAIVSQVSVTKEWPVTEVNTALSLEVSGQKKVVPLLVGRPDLSRLPLVQGKDCMAWNGDAAAVARRLKAAVEGAAPR

SEQ ID NO: 546 - protein, 556 aa, Vitreimonas flagellata
  source 1..556: note = Related to NZ_SBJL01000001.1
MPLTSIEDAEGLRLPDGRLVLSARDAAIYFGVSFGKLTHALYRADDEQRYRAFEIPKRTGGMRQIYAPHGIIRECQEKLAPVLQEFYAAHPAAHGFIKERSILSNAKLHTGQRYVLNVDLEDFFPSINFGRVRGLFMAAPFKLGPAAASVFAQLCTHRNGLPQGAPTSPPLSNFISAQLDRALSRLARENGVRYSRYADDITFSTNQGAFPPAIAVTSRGEDGGEGVRTGEALERAVIASGFAINHRKVRLQKRDQRQSVTGLNVNEKANVARKRIRRIRAMLHAWQKHGLEAAAAEHYLRHRGMLQLPQNFDRAYRNVVYGQLAFVKMVRGADDPVFLNLCAKVLEIDPNPSRFIRQMVFGADDYDVFISHASEDKHEIARPIFEACAKLGLKAFLDEAHIGWGQSFTQKINTALGSARTVLAVVSSTSVSKEWPIVEVNTALALEVSGQKKVVPLIVGKPDLSKLPLIRGKDAMVWNGDSAAVAKRLKAAVSGDAPRRPVITPSRTALPPVSAAPASATAPLRQAPVGTGPWAPPPPRKRKLSFFELLFGRRKR

SEQ ID NO: 547 - protein, 589 aa, unidentified
  source 1..589: note = Related to JAGWZE010000002.1; note = Alphaproteobacteria bacterium
MHADRRPDDAPPQAPAILVSGRAPQSASDVAALFDVSASWLTYVLYRADESQRYRAFEIPKRSGGVREINAPIGVVRDCQEKLAPLLLAAYRAHPGAHGFIPERSILTNAKAHAGQRLVFNVDLKDFFPTVNFGRVRGLFMASPFFMGPAAATIMAQVCTHKNGLPQGAPTSPVLSNFVATALDRRLTRLARENGVRYSRYADDITFSTNQTGFPAAIVAFEQDGEKRRAVVGDALAKAIADSGFAVNFGKVRLQTRHERQSVTGLVVNAMPNIERARVRRIRAMLHAWSKFGLEAAGEEHFRRWRRAKPKVKDGTAGTAFRNVVYGELAFVKMIRGREDPVFLKLCAQVLALDPNPSKFVREMAFGAADYDVFISHASEDKDTIARPIFEACEKLGLKAFLDEAHIAWGASFTEKINVALGSARTVLTIVSPASVAKDWPVLEVNTALALEVSGEKTVVPLIVGKPDLSKLPLIKTKDQLVWTGDAMFVAKNLKAAVEGRVGVKQRRTPDGGLAPAPAATGAPGPAVAARAESSRGAAQGWTPGWQSTAPKPFEIRRKSKSGGRWFVTALWAALAAALAAAAFLFGFG

SEQ ID NO: 548 - protein, 511 aa, unidentified
  source 1..511: note = Related to JAHQVS010000037.1; note = Rhodobacteraceae bacterium
MSEKFSAQELDQLLNLKLETANDVSKFLKISKPQLLFALYRASDEQKYDSWEIPKRSGGMRRIDSPRRVIRDGQKALLPYLEARQNAHPASHGFLSDRGIVTNADAHKGQRIVLNIDLANFFPSVNFGRVRGLLMKPPFEMGEAAATICAQLCTFRNGLPQGACTSPILSNFIATSLDRRLLRLARATRMRYSRYADDITFSTNAEAFPEQIVKVFSAAPLTDEALEAAMEGPASKAPKPAAPAPKIGPALERALTQCGFKVNPAKVRVQRRDERQTVTGLTVNQFPNVERRRIRRIRAMIHAWEKFGLQKAGHEHFHRYAPRQTSPGFDVARAFRNAVYGQLAFVKMVRGAEDPVFLKLCSKLTTLDPNPSKFIRRMVFGADDYDVFISHAAEDKDAVARPVFEACERMGLKAFLDEAHIGWGENYTTKINAAMGSARCVLLIISSHSASKPWPLAEINTALSLEVIGEKMAAPLVVGKPDLSKIPLIKGKDYIEWSDNPDLVARRLKDL

SEQ ID NO: 549 - protein, 558 aa, unidentified
  source 1..558: note = Related to JAHJSN010000196.1; note = Alphaproteobacteria bacterium
MPENPASTAGPPTPPTPPALPQHLRLRGRPLQTSQDVADYLGIRHRLMIDTLYNQPPNARYRHFEIPKRTGGMRPIHAPVGHTRAMQDRLLTDFKALYRPHPNAHGFIEKRSVTSNATCHTGQRWVLNIDLEGFFPSINFGRVRGLFMRPPFEMGQAAATVCAQIVTFRNGLPQGAPTSPVLSNFIAAQLDRTLSRLARQNRLVYSRYADDITFSTNLTQFPASVVVREMVVGGGYKVRAGDALELAIQKSGFEINEKKVRLQAHYFHQDVTGLCVNERVNVARERVRKLRAMLHAWRKFGLERAGQEHFAKHRGSRRLKPPSQPGAAFRNVVYGNLSFVKMVRGADDPVFLKLCAQVLALDPNPSKFLRQMVYGADDYDVFISHASEDKEAIARPLFEACNRLGLKAFLDEAHIGFGQSFAAKINTALGASRTILAVVTPHSTTKDWPLQEINTALALEISGEKKVVPVMVGSPDLTHLPLLRTKRWISWEGNADSVIRQMKQQVGPLREAKKAGSVPGIAGKKAARPVPQAKPMSGAQSQTTPRSDGWISRLFGKK

SEQ ID NO: 550 - protein, 561 aa, unidentified
  source 1..561: note = Related to JAGWZH010000139.1; note = Alphaproteobacteria bacterium
MLSSDTSNPAPETPKETLQEPPLEPHPFAWGALQTVADVAEFLGARRSDLAYWLYTASPDKRYTEFEIPKRTGGMRLISAPTDQIKTWQNRVAEKLAQSYRPHPSAHGFLEKRSVLTNARDHTGVRFVLNVDLKDFFPSINFGRVRGLFIKPPFAMAPPAATVLAQLCTFRNGLPQGAPTSPILSNFVASELDRRLTRLAKSNGVAYSRYADDISFSCNRAEFPPDLAHYEVDAGGLKTLRLGAALAKEISAAGFAPNLGKLRLQTRAMRQAVTGLTVNAKANVQRRRIRRVRAMLHAWEKFGLQAAGQEHFSRYRPSAAALRDPGPRFRHGVYGQLSFIKMVRGVDDPLFLRLCARVLDLDPNPSRFLKKMVFGDELYDVFISHASEDKDAIARPIAQALARQGLKAFLDEAHIGWGENFTKKINTALGASRYVLAIVSSHSVTKDWPILELNAALAMEANGLKTVIPVVVGKPDLGKLPLLQAKDWYVWKDDVEALALRVRQVVKGELRGAARRQAVEARGSSASAVPTEVAQEGTGPPVASSDINKKPGFFARLFRKQ

SEQ ID NO: 551 - protein, 502 aa, unidentified
  source 1..502: note = Related to JACQOS010000129.1; note = Chloroflexi bacterium
MFRAIVSVRDVADLLELDWSQLYYITSRAADRYSYRTFAIPKKGGGERVIQTPHPTVRILQHKLLEVLSLVYQPHPAAHGFVHERSIKTNATPHVNRRWVLNYDLQDFFPSITFPRVRGIFIKRFRLPPGPATVLARLCCNTGDTPDHLPQGAPTSPIISNMICHSLDHQFVQLAKRNGVFYTRYADDLTFSTNRTAFPLGIAETSGAQLIGVGNDVKEIIKHNHFDLNHRKARISGRASRQDVTGLTVNKRINVRRRLPREIRSMLHKWKAHGYEAAEVEFHTKFDVYGRGANYRNVVSGKLAFLRNVRGIDDRVFRRLYGWAKELDNDSFSELPPLATNAPSLAEAVRDFPTITASDNKQTRRGYLKRMFASARGTLWVVDPNLKADLLTDLVASIEPGRVSDIRLLSRDERLSSRQKVKYTTSRQSLLAKGVNLEWRVLPPPQRYFHDRWLADDSDCVSIGGPFSSIYDPRPPLGQNLLARRPEQFDTWWNRATPLTTG

SEQ ID NO: 552 - protein, 593 aa, Corallococcus praedator
  source 1..593: note = Related to NZ_RAWI01000336.1
MASNHPEVPSDPRQLRASFVALKTPQEVAKLIGISYGQLCSIIYAKPGKFPYETFFIPKKNGTLRTISKPHPAVRSLQNKLLPFLTSAYRPKPSAHGFVVQRSIVSNARPHVGKRFILNIDLEDFFPSIHFGRVRGMLMAVPYQLPSSVASVLARICSNEGVLPQGAPTSPIISNMICARMDADLQRLAGKHRCTYSRYADDLTFSTTSRRFPEQLAVPRHGLVGENLQIGEPLIATITANGFRINTAKQRLQPRHHHQEVTGITVNRFLNPRKKLVRQARAMIFAWKKFGLQAAAAEFREKYDPKPRRASKPQPSFIRVVLGKVEHIRNVGGEGHPGYRKLLAALHQADPHHFEKPAEARTWNPRPADTSSWGYLAKRFRNSVFHLEVTNKEGDLQNGTSFLWDAGYLATAHHNLIGPVSVMINGISSPVGAGDQLHHPKANEGVDAALLKVAHTATAGKLAFKTRESAIEIGESVAALGFPTVPMYDSALIVRTGIVEGTAPQYSNQIDGIQVSIKLTGGFSGGPVIDSSGRLVGVVMEATFEKTAAGVPGGEFQHILPARYLTEISKDSAETSPQLPLQLKVVDSKQDTD

SEQ ID NO: 553 - protein, 472 aa, unidentified
  source 1..472: note = Related to VBNI01000253.1; note = Gammaproteobacteria bacterium
MLTEMYVPKAAAHGFVLTRSIASNARRHVRRELLLNVDVENFFGSIHFGRVRGMFGKPPFSFPGVVAATLAQLCTDTGTLPQGAPTSPMISNFICRRFDNDLLRLAGKHRCVYTRFADDISVSTQELAFHESIVKSFDSYGADVTLGAELVALFGKHKFTVNAKKTRVQSRHRRQEVTGLIVNRRLNVPRIYTRRLRSIIHSWRKFGKTGAETVFKTLDAGRKTRSGASPDIRSHLRGKIEFLRMVRGGGDLIYTKYALAASKLVGYDRPGRIEGAAAAIFEFYREALWVVVGRDALGSLISQGTAFFLDGVGFVSALHVLYPADSSITKWTLIRGCAPYDEFAVVGCTRHPALDLTILQTDARTHALLRGDEGQTLPGQAVVVLGFPNWHTSADKPLRADALIVQQKTISGCKLASVNYPLLSGASGGPVLNAEGWVVGVTVHNATSPVLPNSFLAIEHFASIVGSPFHAL

SEQ ID NO: 554 - protein, 557 aa, unidentified
  source 1..557: note = Related to MEDJ01000019.1; note = Acidobacteria bacterium SCN 69-37
MAKRDQVNDVEPLGTDAHLREAFPRLMTRWDVARLLRVDSKDLHYWCYRNGARYREFQLPKKSGGYRTISAPEGGIRLVQRKLCQILNAIYVPRHSVHGFVPIKGRGILTNAEPHVKQRWVLNVDLSDFFDSIHFGRVRGVFERFGAGPDAADLMARICCFRGRLPQGVPTSPVVTNLVCRSLDRALQAFAKTHRCAVTRYADDITLSTGRAGFDDAVVSVKHDEGRRVAEIGHGLRFLIESHNFSVNESKVRLSGTLDRQEVTGLIVNRKKNVPREYVRNVRAMIHAVERYGVGEAERVFHDRFSRSRRPDLPAADFLRALRGRLEFIRMVKGDHDATFVSLWNRAARFHQWLTPRIVDLSHVEQALWIVESEVATQGVSIRRHGTAFVLKDVGLVTAGHCVGERMRIWHPTRPAERFPARIRALCTASDLCVLEPPPRDRLPALDRGDAGTVAEGVEIGTAGFPDEPVKVAQLEGRVSMIRLRFGHRNLFPSFETRKGMSGAPLLDARLRVVGVVLYGPDRSPSGEEDRVPSSAVAIDLIDELPKFTGSSPALLT

SEQ ID NO: 555 - protein, 488 aa, unidentified
  source 1..488: note = Related to JAGQQN010000044.1; note = Planctomycetaceae bacterium
MVDRPVKSLLSVRTITNLADLLDVTPNQLKYLMRGLRSEERYLRFHIPKRNGGLRVIYSPRRELKAIQERFSRLLVGIYNPPGPAHGFTAARSILTNAIPHVRCRCVLNVDLEDFFPSINFGRIRGLFKSLGVPESGATVMAQLCCHDGILPQGAPTSPVLSNMVCLSLDRKLVKLAAVHRCRYTRYADDITFSHKHQILPSELAYVDDKGEPVVGHELYRAIKESGFEVNVKKVRLFDNRHRQEVTGLTVNEKPNVPRRLIRQIRAMIHAWRKHGEAAAEEEHFQCYYRRVGRRSPTNSFRDVLVGKMHFVRMIKGADDRTYRNLQRQLAHVYPEYLAVMQKENLTLKKRHLFICHASEDKESFVRPLVDQLLLRGVSVWYDEYELTVGDNLREKIDEGLKSSLYAAAVLSTSFFGDKKTWTTREIGGVTALEDADLRPRMLPIWYNLRQSEVANYAPTLAGIVALSSPRQTIEEIADELAKKVLKK

SEQ ID NO: 556 - protein, 472 aa, unidentified
  source 1..472: note = Related to JACCRE010000240.1; note = Planctomycetaceae bacterium
MASLLDVSSRQLNYLLYVRGESERYIAFSIPKRRGGIRQILAPHDDLRHVQHRLAEVLNSLYAPPDVAHGFVAGRSILSNADAHVRRRHVLNVDLEGFFPSINFGRVRGMLLSPPYSLTAQAATVFAQICCHNNELPQGAPTSPVVSNMICRRLDRQLSRLAGNHGCGYTRYVDDLTFSRRTGAFPPQLARWGESRRCIVSDELRCMIEENGFSINPRKTWLFSRCHRQEVTGLTVNTKRNVPRKYVRQIRAMIHAWSRYGIERAGQVHAAEFYRRQGRQGDVPPFALIVRGKLEFLRSVKGTTDPVYKNLQSQLVRLDPAYLQVMLRENAMLNRRDVFISHASEDKDVIARPLAEELIRLGLTVWFDEYEISIGDSLRQKIDDGLSQSAFGVVVLSHSFFAKRWTRRELDGLTAQEDATNRNRILPVWHEITHAEVSKHSPTLAGVRAARTSDQTVQQIAHEIAEVIRNAS

SEQ ID NO: 557 - protein, 571 aa, unidentified
  source 1..571: note = Related to JACQVF010000034.1; note = Gemmatimonadetes bacterium
MADLRLTSPPYVLVAAFRSLTSVGDLATLLQVRPDQLRHYTYGRGYRYRAFTIKKRRGGVRTLKEPHSGLKIVQQKLAQVLTTLYEAPDCVHGFVAGRSIATNAHLHIGSEWVFNVDLKDFFPSINFGRVRGLFIKRYGLPANVATVIARICTHKNELPQGAPSSPIVSNMVAERLDRDLQRLARRYRSAYTRYADDLTFSRNDRFPDAIGYWDPIALPVRQSRVGHLLEAAVMKNGFEINPAKVHLRLKDERQVVTGLVVNRKVNVRKLFVRRIRAMLHAWETHGEKEAEQEYFNRYDTKDRAPHAIFSFRRVVKGHIDFLGMIRGTDHSWYRRFVMQYAHLVPGYVARPEHCRRPNHLRTWKDAIWVLETEESQGTAFELTGYGLVTAAHVVRDTTLPGHPPYSNPHVFSPRNEALKHPVRIAAYDADLDLAILEFDAPTRCALRTRMAPAAVAGDPIRAAGFPSYAPGSQLWEESGWINHVRRHITAPRYVVTTPIIAGASGSPVMDLEGRVIGVATTGVLSFSAAAARSTGAAGLPDYGVVPIALLARVSVAATPASFSAPDAHGSP

SEQ ID NO: 558 - protein, 497 aa, unidentified
  source 1..497: note = Related to JAJFUI010000046.1; note = Planctomycetaceae bacterium
MAATEVVSALGGVRTRSDVANLLATSDAQLRYLLYGRHEDSRYCTFRVPKRKRGFRTIEAPREDLKLLQRRLVVILSAIYQPRAGVHGFTVGRSIVTNARQHCGRRYVLNVDLKDFFTSINFGRVFGLFRAPPISASYETATVLAQLCCHRNVLPQGAPTSPIVSNMICARLDRQLSKLAQRNWCRFTRYADDITFSKQRGEFPEEIGYLDREDVAQPGSELRRIIEANGFAINPSKVSLRTKKRSQSVTGLTVNEKCNVHRNFVRQVRAMIHSWQKFGFDAAHNEHTSRYYRRLGKLGNPPRLDQIIRGKLAFVRMVRGGLDPVYKNLQLQLCRVDPSYLDVMRKENDRMKRRDVFLSHASEDKETLVRPLADSLIAAGISVWYDEYEIQLGDSLREKIDEGLAKSRFGVVVLSRHFFSKRWPRRELDGLTAREDASHGNMILPVWHGLSKADVAGYSPTLAGLKALLTDGKPLAEVAVELVAQLRGRLKKTGGWS

SEQ ID NO: 559 - protein, 492 aa, unidentified
  source 1..492: note = Related to nan
MRIWTVSFEPTVFQEVTSIVDVANLLGTSVKQLIYLLYVRWETERYTSFAIAKRTGGTRTISAPKPELKRIQRRLADFLQDNLTPKTCAHGFARGRNIASNAEEHVHHRIVLNIDLSDFFPTINFGRVRGVFMAQPFGASPKVATLLAQICCHEGSLPQGAPTSPVVSNMICFRMDAQLMRLAKEHGCFYTRYADDISFSKRKGEFPAELATVGDNGKAVVGKSLRDIIEHNGFRVHPLKVHLHHNTTRQMVTGLTVNNRVNVPRAFIRNIRAMIHDWRVNGYEAAETRHHANYYSHPHRSVKPPLRKIIEGKLSFLKMISGVDDPVRQNLQRQFVNVCEEYKAVMEDEGIMHDFFICHASEDKDDLVRPLAEALRSWGVSVWYDEYMLTIGDDLREMIDAGLANSRYGIVVLSPRFFGVKKTWPKREVGALFAMEDADGKSRVLPIWHEVTQPDVAKRSPTLARILAWHSADFSPEELAAKFRDFIVTRRR

SEQ ID NO: 560 - protein, 558 aa, Vibrio cholerae
  source 1..558: note = Related to NZ_ACFQ01000009.1
MFGIPAGLHECFTVSDLYQFLGVDPETTGGFLYGDATKYRVFSVPKKSGGEREIVAPTKRLKYLQNKVKAELESYYSPRKCVHGFVSGRSVISNAQSHVRKEYVLNIDLEDFFGSINFGRVSKLFQRPPLNLPHGVASVLAHICCHRGVLPQGAPTSPIISNMIAFKLDRQLRELAYKCSCTYTRYADDISFSFTNRKKSLPKAIAFFDSNDELVLGKELKDIIEDNWFKINDKKTRIQHRTQRQSVTNITVNEKVNVNRKFIRQTSSMLNALFKYGAVEAEREYFEKYHKGYIANRQRAKMSEQPGKLFTQKIRGRLNFIRSVRGSSCNVWRSLMYRYTVAIGNPNEIYNRSWWEIAAESTYILYDLSAEGNGQGSGFLLDGIGLVTNEHVIAGVEQNNIVDTLSIEWLPNTKKEFIGLNVAWKNAEKDLAVITSDFVFNDTVPLTLERNPNYSVGTEIFAIGYPAYETRGANKATILQAKITGEVVREGQDRVVIDQPIIHGHSGGVVLNTDGRVIGVVANGNAEGEVRTTPSAFIPISVLLEEHDRQTKASSVEA

SEQ ID NO: 561 - protein, 558 aa, unidentified
  source 1..558: note = Related to nan
MFGTPNGLHECMTVSDLYRFLGYDEKNTGGFLYGSAIKYRAFSVAKKGGGERKIYSPIKKLKNLQHIVKSELESYYVPRQCVHGFVSGKNIISNAQPHVRKEYVLNIDLEDFFGSINFGRVRKLFQSSPLSLPPSVASVLAHICCYRGALPQGAPTSPIVSNMIAFRLDRQLRELAYKNSCSYTRYADDISFSFTNRKKSLPKAIAFFNGEDELVLGKDLKDIIENNWFKVNDKKTRIQHRTQRQSVTNITVNEKVNVNRKFIRQTSSMLHAIIKYGAVKAEQEYFEKYHKGYIANKHQAKMREEPGKLFVQKVRGRLNYIGSVRGNSCDVWRKLMYKYTLAIGSPNEAYNRSWWEIAEESTYILYDLSEVGKGQGSGFLLEGIGLITNEHVVTGVEQSNIVDSLVIEWLPNQSKQFIDLNVAWKDVDKDLAVITSDSIFNDTEPLKVEPNPNYSRGTEVYAIGYPAYESRGDKSATTLKAKITGATKREGQDRIVIDKPIIHGHSGGAVFNLDGRVIGIVANGNAEGAIKATPSAFIPISTLLDEHDIRMKAQSTQT

SEQ ID NO: 562 - protein, 563 aa, Vibrio splendidus
  source 1..563: note = Related to NZ_PDMZ01000012.1
MFGVPTKLHECLTVTDLYQFLGVDEDKTVGLLYGDNIRYRSFQIPKKGGGERTIFAPVKSLKNIQKKVQAELETYYKPRKSVHGFVAGRSVLTNAKPHVRKEFVLNIDLNDFFGSINFGRVSRLFQSPPLSLNQNVASVLAQICCYEGVLPQGAPTSPVISNMISFRLDRQLRNLAHRHSCTYTRYADDISFSFTNKKRSLPKEIAFFDSNDELALGHGLTSIIESNWFEINDKKTRIQHRTQRQSVTNVTVNEKVNVNRKFIRQTSSMLNALLKFGAIEAEREYFEKYHRGYIANRQHIKIAKSPGKIFLQKVRGRLNYIRSVRGKTCSVWRKLMFDYTVAIGKPDETYKKCFWEIAAESTYIVYDITAEGDGQGSGFLLEGVGLVTNEHVIEGVTNENIVDALVLRWLPNESKEFIGLELAWKNKAKDLAVITSDFIFKDNNPLEIEPEPDYSEGATVFAIGYPSFESEHGNRATILKAKIKRQMTRESQPRILIDEPIIHGHSGGVVLNEHGRVVGVVANGNAKGALRLAPDAFIPIQVLIEEHANRQSAKKAAVLQAVN

SEQ ID NO: 563 - protein, 557 aa, Vibrio parahaemolyticus
  source 1..557: note = Related to ABFKIQ010000002.1
MFVTPTGLHECKTVSDLYRFLGCDPATFGNYIYGNGIKYKEFTIPKKNGDSRTILAPVKKLKFLQQKIKAELESYYTPRQCTHGFIPKRSIISNAKSHVRKEFVLNIDLEGFFSSINFGRVSKLFQSPPMNLPPNVASVLAHICCYKGCLPQGAPTSPVISNMIAYRLDRQLRELAYKNSCSYSRYADDITFSFTNKKKSLPKSIVFFNGEDELTLGNDLTTVIEGNWFKVNEQKTRIQHRTQRQSVTSITVNEKVNVNRKYIRQTSAMLNALLKYGAEEAEREHFEKYHKGYIANRQYSKITERPGLLFTQKVRGRLNFILSVRGQSCETWRKLMYKYTLAIGEPKEQYNKSWWEIAAESTYVLYDISQDGDGQGSGFLLEGIGLITNEHVIEGVEQQNIIDTLNIEWLSNPSKTFLALELAWKDKQKDLAVITSSLAFNDVEPLKVEPNPDFSVGTEIVAIGYPAYEARGLNEATILKAKITGTQKRENQPRIVIDKPIVHGHSGGVVLNKDGRVIGVVANGNAEGSVRATPSAFIPITVLIDEHEHQKIKKTEP

SEQ ID NO: 564 - protein, 565 aa, Proteus mirabilis
  source 1..565: note = Related to NZ_CP041391.1
MIKPPPIFFSWDILNMFCSVTKLHECKNVEQLYYFLGCEAAEISKFLYSGVIKYRSFSILKKNGNLRNIRAPVKYLKEIQYKIKDELEKYYTPKSCAHGFITGRNIITNARPHVRKEFILNVDLKNFFDSINFGRVSRLFQSQPLNLPENVAHVLAHICCYNKALPQGAPTSPIISNMISYRLDRQLKELARNNACTYTRYADDITFSFTKTKKYLPKSIVSLSKDNNIILGHEFKKVIEDNWFEINEEKIRLQHKTQRQSVTNITVNTKINISRKFKKQTSAMVNALFKYGAAEAEREYFSKYHKGYIAERQYNKIKEKPGLLFTQKVRGRLNYIRLVCGKNNESWRKLMYKYTLAIGQPNEEYNRTLWDIAGDSTFILWANSSQGSGFFLENIGLVTNEHVIKGIEDSNINNDLIILWLPNERKEYIELHLAWKDDNTDLAVITSNISFLDIKPLQVEPVPIYDIGTEVYAVGYPNYDARGSIGKPTIITAKITSIITRERQKRIVIDQPIVHGHSGGVVLNADGRVIGIVANGNAEGELRVVPNAFIPIETLLNEHKSRTKL

SEQ ID NO: 565 - protein, 535 aa, Shewanella vesiculosa
  source 1..535: note = Related to NZ_RKKD01000014.1
MLSYLYSKDIKYRNFEIDKKNGKKRKIVAPVKKLKFLQYKVKAALEPYYKPKKCNHGFVKDRDIVTNAQAHLRKEFVLNIDLVDYFGNITFGRVKRLFESNPLNLSHSVATVLAQICCHNGCLPQGAPSSPIVSNMVTFKLDNQLRALAIKSSCSYSRYADDITFSFTNRERSLPKMIAFYKNEKLQLGSSLEKVIEENGFSINDDKTRMQHRTQRQSVTNITVNEKINVNRRFIRSTSAMINALIKYGPAAAEKEHFEKYLKGYIPARHHMKMAKYPGKMFIQKVRGRLNFIRMVRGNTCDVWRKMMYLYTVAIGAPNEDYNMSWLELAAESTLVIHTYTDSNMAQGSGFIVEDIGIITNEHVVRGITSKNIKDGLEMHRWNNETAKFSFVELIGMDEDIDLAIFEPSIHLATFTPLKIENNPDYSNGTIVHTIGYPNYQSGEEPTYITAKIIGKTKRMLQPRIKIDENIRHGNSGGVVMNTDGKVIGVVSNGNAIGATSQNDSSFIPIQTLLEYHEKLRNLVARPFLDEVDSL

SEQ ID NO: 566 - protein, 565 aa, Idiomarina piscisalsi
  source 1..565: note = Related to PIQA01000014.1
MRQNPPAFLRELRYLMDSQTVLPPRAKLANCSTLDQLASLLNTEVDKLLKLIYPHNRQYISFSIPKKDGSRRLISTPKPTLKNYQMIIASELHHHYIPRASAHAFIEQKSVLTNASPHVNKRYVLNLDLEDFFGTITFGRVKRLLQSPPLSLTHNVATVVAHICCYKGRLPQGAPSSPIISNMIAFKLDNQLLKLAKQYRFTYTRYADDITLSFNQKRKTSLPTDIVKFDEDSLALGRLLLRTIESNGFSVNDDKTRLATKNDRQAVTNLTVNQFVNVNRLFLRQTSAMINALNVYGAQDAEIEYLKKYHKGYLSPRKQLKHKNEPGKFFKQMVRGRLNFIRMVKGKDSLVWRKLMYRYTVAIGEPNARYALSPAELAKRSLFVIHNLTDDSEGVGTGFKLNTFGMVTNQHVIAYLDNSNLADFCVIEWIEKMDQQFPSVQLILSDEKSDIAIVEGASMNIVPALDASTSPDYTPGTTCTLLGFPNYKTEDSPTVIECRIVREIEVDNEPRIVVDEKVTHGMSGGPVIDSDGLVIGIISNGSKYNSTDDRVNAFIPIKTLLLTKN

SEQ ID NO: 567 - protein, 573 aa, Idiomarina sp.
  source 1..573: note = Related to JAFIFP010000014.1
MFTLEDHINPTRLEHCSDLHILSRLLGVRRDYLLKLLYSENRLYYHFDISKKNGDKRTIHAPIEPLKNLQRKIKVELEKYYIPRGSTHGFVKKRNIITNATPHLRKRHVFNIDLADFFGTITFGRVQRVLQSSPFNMPYNVATVVAQICCHEGALPQGAPTSPIVSNIIAFKLDNQLLKLAQKYRCTYTRYADDISFSFRQQRNKLPEAIVSFNGDKVIPGAKLTDVISKNGFKINSSKTRLQSKQNRQAVTNITVNEKLNVNRRFLRRTSSMLNAALRYGFPKAESVHFEHFHSDYIPPRHSKKMHEEPGLLFRQKLRGRLNFIREVRGKSCPVWRKLMYMYTVATEEPNEDYNLSIDAITARSTVVIWDLSNSCGETFSGSGFMLKGAGLVTNQHVVKGIISGREATELQIDWLEKKCLNFLDARIVIADGCADVALITSSIADRHMEPLDIEPYPDYSVGRAVKLIGYPDYREGDTFSVTDTVIVREYGQADSRRIEVREQIFHGMSGGVVLNEDGRVIGIVSNGIKYGTTSQLPSSFIPISTLTAKVTNFRKVKIEQLLSIFASSINST

SEQ ID NO: 568 - protein, 553 aa, Paraglaciecola aquimarina
  source 1..553: note = Related to NZ_JAKGAS010000007.1
MFDIIDPKTLNECFTVELLAKFLNTDYPNLSKLIYGKKSPYRTFYIPKKSGGTREIKAPIKTLKLIQQKLKVEFEDYSSPRVASHGFVKGRSILTNAKLHINRNYVLNVDLESFFNSINFGRIKKLFESTPFKFTSPVATVLAQICCHENSLPQGAPTSPILSNMIAFKLDGELMRLAKKINFRYTRYVDDLTISCQSLAQLEKHKIIYRSKEAKYEAGFTLSRLIEKNGFKINNEKTRLQQRTEHQGVTGLTVNVKLNVSRTFIRQTSSMINALIIHGAEKSEHEHFTKYFDGYVPNRQQQRISKKPGDLFIKKVKGRVNYIKMIRGAACPVYRKLAYQLTCGLGCPNEDYNKDWLDWISDSVLVLDNNLDILQGTAFYADGLGIVTNQHNLESITEDNIAGNITLVEPLNYSKKYQLLGLNKTSEKYDIALIDFGVHAKSKRALEIADSPLYKTGTTVYAIGYPNHSEGTKPTILECKIVNKTKWQGECRYKIDQNIHHGFSGGPVIDTDGKVIGIVSNGNAVGASKSTEDMFIPVETVMKFANDAKPEDC

SEQ ID NO: 569 - protein, 548 aa, Alteromonas lipotrueae
  source 1..548: note = Related to NZ_JAESDJ010000002.1
MFGITEPKTLNECFTVESLAKFLGTDYSSLAKLLYSKRSNYRTFYIPKKTGGTREIKAPTKRLRFIQQKLKVIFEEYSSPRAASHGFVKKRSIVTNAQHHVGRAFVLNVDLEDFFGSINFGRIKRLFESQPFNLAHPIATVLAQICCHEGCLPQGAPTSPLLSNMIAFKLDGALMKMAKGVNFRYTRYVDDLTISCQSLTQLIKHKIVQCDKDGKYSVGFILNQLIEQNGFKTKSDKTRLQKRGEHQGVTGLTVNEKINVSRTFIRQTSSMIHALIKFGAEKAEKEHFTKYFDGYIPIRQQQRLSKFPGDLFIKKLKGRVNYIKMIRGSACPVYRKLAYQLTIGLGCPNEDYNKDWLNWISESVLVLDNNLDSLQGTAFFAKDIGFVTNQHNLKSITKDNFSGKIKLTEPLNYSKSYPLISFLKSSEELDIALIDFNIHEKSKRPLEIAESFVCRAGQTVYAIGYPNHAEGSPPTILECKIIDRAKWDNQLRIKIDQNIHHGFSGGAVIDTDGKLVGIVSNGNAVGAPHSTDNMFIPIETLLTFASED

SEQ ID NO: 570 - protein, 545 aa, Alteromonas confluentis
  source 1..545: note = Related to MDHN01000015.1
MLFGTTPKDLKSCNTVEGLAHLLGTDYNSLGKLLYGKKTLYRAFDIVKKSGGVREITTPIPSLKVLQRKLKDLIEPFTSHREAAHGFIRKRGVLTNATRHVGKKHVLNTDLEDFFGTINFGRVKRLFESSPFELSSQVATVLAQIVCYKNRLPQGAPTSPIISNMIAFKLDGNLTSLARKAKSTYTRYADDLTFSCHSSMLLEKNGIIKFDKDNKAIAGKELVAIIKSNGFEINHQKTRLQSRGSHQGVTGITVNEKPNVSRTFIRKTSSILYAINRWGAEQAEEEHFAKYRRGYSPPRAQLRRKKKPGDLILKMVKGQVNYNRMIRGESCPVYRKLAYQLTIALGCPNEDLNKDWRSWIAESTFIVDNVEDICQGSCVLIKDIGFVSNQHVLNSITKSNFTANVTICDPYDYSRKYPLISLLKMSIEKDIALIDAGVHALSLRGLEVAESPNYKIGTKVIAIGFPNHTEGTPPTILDCKIIGRTKWHHEPRIKVDSNIHHGFSGGAVVDLDGKVIGIVANGTAVGAPKAADNLFIPIETVAQYA

SEQ ID NO: 571 - protein, 549 aa, Idiomarina fontislapidosi
  source 1..549: note = Related to QJST01000027.1
MIDFFPKKLSDCANVEMLAYLLDTNYEALGSFLYSKRKLYRSFEIPKKSGGMREITTPIKPLKEIQRKLKPLIEPYTSHREAAHGFIEGKSIVSNASRHVRKNFVFNLDLLDFFGSINFGRVKRLFESAPFNLPAKVATVVAQIVCFDNQLPQGAPTSPLISNLIAFKLDGNLTALARRAGVNYSRYADDLTFSSNSLNLLKNHGILTIDESAQVKVGKDLKNIIKANGFDINVNKTRLQGRGQHQGVTGITVNRKVNVTRSFVRKTASILYSICKWGSANAEREHLKKYRTKSLSPRARQRTFLNEGDLILKIVKGRVNYIRMVKGEASPVYRRLAYRLTVALGCPNEDYNKDWETLLAESVYVLHNYYDSTQGSCVLIENLGFVTNKHVLKCVTTSNFEGHVVITGPFDYAKDLPLISFLGASDTNDVALICPSVHQHSQPSLKIASSPDYRKGTKVVAIGFPNHTEGTPPEILYCTIQGKTKFQKNDRYLLSCNIHHGFSGGAVLNLDGDVIGIVSNGNEVGARKSVGNMFIPIQDVAEALSHISK

SEQ ID NO: 572 - protein, 601 aa, Yersinia aleksiciae
  source 1..601: note = Related to NZ_CGBL01000001.1
MAAFEFNFPTTICVGHFSTAVLHSKFADKFVAQLAIEKTWPPLFHIRIFMPSFSLKECNDVWKLCDLLGVNFENLSKKVYPSNNRLYRCFFIPKKSGGLREIYCPIKSLKNLQKKIKIELEKEIKYRSPAHGFIKGKSIITNAEQHIGKTIVLNLDLEDFFKNIHFGRIKKLFESSPLNLKHSVSTFLAHICCRGGVLIAGSPTSPIISNMICYKLDGQLQRLAKKNHCTYTRYADDITFSFTCSERKLPRGIVHIDESSLLGFKLGDELSEIISSNNFTLNESKIRLSRKSQRQEVTGLIVNSKVNVKRDFIRRTSSMIHALKIHGAEDAEKEHYLKYKKTYIPERQNKRQKDKPGDLYTKVIKGRLNYLRMVRGEDCNLWRKLMYDFTVAMKNPDESYKRTWLDDAAESTVIFNTYDGCGSGFLINHDIKKYPNGLIITNYHVIPEINSDNISNIEVHTWMNPSKGFLLLKFVASSKDLDIAILTADIPFPVSKFLVVNSCPNYRPGIKIHTIGYPDYSSGEDPTFISTKIKGKTTYHGQLRYQIIDEIKHGNSGGPVFDSDRKVIGIVSNGNEKGAPKNNKSSFIPIETLLDFINCQK

SEQ ID NO: 573 - protein, 548 aa, Vibrio renipiscarius
  source 1..548: note = Related to JTKH01000003.1
MQVPLPNNLKDCSCVEGLAQYLGFTNYDDLKTLIYPSVDHLYKGFSIPKKNGEFRLIDAPKKELKKIQRFLANELAQVYTPRNATHGFVKERSIVTNASKHVDKKYVLNLDLEDFFGSIHFGRVRNLFQSHPLNLHHSVATVLSHLCCHNGKLPQGAPTSPIISNMIAYRLDKQLQTLASKNRCTYTRYADDITFSFTQTRGRLPKPIAVLTRDLQLSLGNELKELITENGFVINSDKTRIAARSNRQEVTGVIVNERMNVSRKYIKQTRSMLYAWKKFGLEDTEETYLRQFHGKTVFEKHQRRIDEKKGQFFKKIVKGRINFIKMVRGADDLIYRKVAYEFSVLIGKPKPELVQTPLDKACDSIFVVENLLDDSQGTAFLLKGIGIVTNEHVVRGIDEDLSELLELFRHHEQETKRPVKFQKSCRSRDLAILKPTTSFNGIKRLQVGDDSQIGIGSVVTVLGFPQYSPGETPYINTGKIIQSKVLFGERVWLLDIPVIHGNSGGPVLNDRQEVIGVAAIGSPTHDLSTKLHGFIPISTLLAYVEECN

SEQ ID NO: 574 - protein, 571 aa, Shewanella chilikensis
  source 1..571: note = Related to NZ_CP045857.1
MVDIAKIAAIAASSSFTSVPVPVQLKDCTCVEGLAKYLGFKDYDELKGIVYPSTSHHYKSFRIPKKNGDFRTIEAPRKQLKKLLKRISTSLEEVYSPRNATHGFVKGRSIVTNASKHADKKYVLNLDLNDFFGTIHFGRLRNLFQSHPLNLSHSVATVLSHICCHNGKLPQGSPASPIISNMIAYRLDKQLQTLASKNRSTFTRYADDLTFSFTQTRGRLPKQIVSLSRDLQLKLGHELTDIVNENGFSINSSKTRISARSHRQDVTGIIVNERMNVTRKYIKQTKSMIYAWKKFGIENAEDEYLKNYHGKKIFEKHQRRINEKKGQFFRKIVKGRVNFIKMVRGSDDLIYRKLAYDFSALIGKPKPDLIRTPLDKACDSIFIIENMLDQSQGTGFLLKGIGIVTNEHVVSDIDEDLSDLLELFRHHEQDIKRPVKFQKSCKSRDLAILKPTTSYNGIKRLPVGDDSQLGVGSKVTVLGFPQYSPGETPYINTGKIIQSKLLYNEKIWLLDIPVIHGNSGGPVLNERQEVVGVAAIGSPKHDNSTKLHGFIPISTLINYAQENNKSNNNNN

SEQ ID NO: 575 - protein, 559 aa, Photobacterium sp.
  source 1..559: note = Related to NZ_LSNH01000001.1
MTSAISIFSLISPITTPTTLNQCVCVERLARFLGFASYSELQNLFYPSTSIHYRGFHIPKKNGEYRLIEAPKKKLKEIQKLISKELSALYSPRKSTHGFVPERSIVSNASCHVDKKYVLNLDLLDFFGSIHFGRVRNLFQSHPVNLPLPVATVLAHLCCHNGKLPQGAPTSPIISNMIAYRLDKQLQTLAANNRCSYTRYADDITFSFTQTRGRLPNQIVTVTRELQLYLGTELKNVISENGFTINSQKTRIASRSQKQAVTGIIVNERMNVSRKFIRQTRSMLYAWKRFGLEQAESEYLQSYHGKTVFEKHQRRINEKAGQFFRKIVKGRINFIKMVRGADDLIYRKIAYDYSVRIGKPKHDLIKTPLDKACESIFIIESELDYAQGTAFLLKDIGLITNEHVVDGIDEELSELLNVYRYFEQDKKRLVNFEKSCKSRDLAILKPTTDFNGIKRLKVGDDSMLNIGSKVTVLGFPQYSPGETPYINTGKIIQSKMLYGEKLWLLDIPVIHGNSGGPVLNDKYEVIGIAAIGSPKHDNSTKLHGFIPISTLLAYAKEKS

SEQ ID NO: 576 - protein, 555 aa, Pseudoalteromonas sp.
  source 1..555: note = Related to NZ_CP013139.1
MLNFSTSLIIKTPTCLKECKCVEGLARFLGFTSYSQLDELVYPSINHLYYSFKIPKKNGHKRIIKAPRKSLKSIQELINIELGNYFSPRNSTHGFIKNRSIVSNAAKHVDKKYVLNLDLENFFDSIHFGRVRNLFCSYPLVLSKPVATVLSHLCCYQGKLPQGAPTSPIISNMIAYRLDKEIQYLASNNRCTYTRYADDLTFSFTQKRRKLPRSIVKVSSDLDITIGHDLKEIISKNGFTINDSKTRISSKCQRQEVTGITVNERMNVPRSFIKQTRSMLYAWKTFGLENAEFHYLDKYHKKTLFEKHKRKIDKKEGVFFQKIVKGRINFIKMVRGSEDIIYRKIAYDYSVLTGKPNSDLIKTPLDKVCDSIFIIENMLDTAQGTAFLLKDIGMITNEHVVDGIDEDNPELLEFFRHFEQTNKKNVTFKKSCKSRDLAILKPTKDFNGIKRLDVGDDSSLDIGSEVTVLGFPQYSPDETPYINTGKIIQSKILYDQKIWLLDIPIIHGNSGGPVLDKDQKVIGIASRGSAKHDQSTKLHGFIPISTLLKYFKEKY

SEQ ID NO: 577 - protein, 565 aa, Aeromonas sp.
  source 1..565: note = Related to NZ_CP077209.1
MTLPNTILLSLKTAKLQLNPTKPTCITGCHSTDSLALFLGFQNYNELQKLIYPSVKNLYRAFYIDKKNGDKRLISAPKKKLKSIQRIISQSLSNVYSPRKSAHGFIQGKSILTNASMHVDKKFVLNIDLLGFFDCLHFGRVRNLFQSYPLNLTPSVATVLAHICCLNGKLPQGAPTSPIISNMIAYKLDKDLHQLALANRSTYTRYVDDITFSFTQSRRRLPRDIVTVLKGNNLKLGEKITSIIEKNGFKINTDKTRCFSQNFRQVVTGLVVNERANVSRNFIRQTRSMIYAWKKFGLVNAALEYLSKYHDKSILEKHEFFIKKNKDKGVFFSKIVLGRIYFIGMVRGKSDRLFREILYSYTECIGKPNRALINTPLDKIGESIFIIDNLLDDSQGTGFLLDGVGLITNQHVVDGIEKENSELLEIYRYYEQDKKRKSNFEKACRARDLAILKPTTEFNGIKRLKVGDDSILKIGSKVTVMGFPQYSPGETPYINSGKIVQSKKLFENNVWLVDIPVIHGNSGGPVLNDKLEVIGIASIGSARHDQSTKLHGFIPISTLINYVNE

SEQ ID NO: 578 - protein, 566 aa, Vibrio parahaemolyticus
  source 1..566: note = Related to ABBBER010000002.1
MIYINYFVSQLSTQLPKITLRPWVRSLKHCTSVDDLAHFLGFNSYGELNSLVYPHTKNLYKSFSISKKSGGERNIKAPKSKLKSIQRWIGQDLENYYRPRSASHGFINGKSIITNAKGHVDKRFVLNIDLEDFFTTIHFGRVKSLFQAHPLNLSHSVATVLAHICCNEGVLPQGAPTSPIISNMIAYKLDKELTNLAIKNRCTYTRYVDDITFSFTQKLGRLPRSIIKVTKQNKQILGNDLLGVISTNGFRINSKKTRLLSRDQRQEVTGLTVNDKLNIPRTFIRETRSMLYAWKKHGLIEAEEEYIKKYHKKTLTYNQQRMLKHNKGNFFRKIVHGKVNYIKMVRGEDDPIYRKIAYQYLSRIGKPDKDLLKTPHDLIADSTFIIECYLDQGQGTGFLLENIGLVTNEHVIEGIDASDADLLEIYRYYEMDNKRKVSFGKSDKSLDLGILKPTTDFNGIKRLKIGDDSTLSVGQKVTVIGFPQYSPNDTPYINTGKIIQSKVLFGQQIWLLDIPVIHGNSGGPVVNENNEVIGVATRGAEKHDQSTKFHGFIPISRLVEYHTTDT

SEQ ID NO: 579 - protein, 551 aa, Yersinia bercovieri
  source 1..551: note = Related to CHYZ01000002.1
MFDPFKVAPPKLKLHQCVDVHELSAILGTNYNQLSKLIYPTTQNSYYCFSIDKMNGNKRVINAPKNKLKSIQRRLAYLLNEYYPVRDVAHGFIKNKSIVSNAEQHVLKNCVFNIDLENFFGQIHFGRIRNLLFSPPFNFSTSVSTVISHICCSDGFLPQGAPTSPIISNLICYKLDNELRRLAVYHKCTYTRYVDDITFSFTCKANRIPSQIVVSSGNTVTPGNEINAIITRNGFSINDKKTRLQQKNERQIVTGIVVNKRTNVQRSFVRKTNSMLYAWEKFGAILAEKDYFDKYNSKIKTIKLKDFIDNPGELFKSIVKGRINYIKMVRGKDDVIYRKFAHRISCLFGKFDNRYLKTPYDFAIESTFVLENRCDDSQGTAFLLERIGLVTNHHVVEDICDITDEFIDLFLWNEIGNIRKTKFIMSNKLFDIAVFERTSDFDNITPLKIGDDSGIKNGTVITVIGFPQYSPGESAYVNTGKVIQSKTMYGNKFWLIDIPVIHGNSGGPVLNDKFEVIGIASIGTAKNDSSSKLHGFIPISTLLRYTGEDKP

SEQ ID NO: 580 - protein, 549 aa, Yersinia proxima
  source 1..549: note = Related to NZ_CABHZI010000111.1
MFNPSNILPPKIKLNKCGDVHILAALFNLTYEELSKLIYPTPNRSYYQFAIDKKNGSKRVISAPKKKLKIVQKKIADELLTLYPIRDVSHGFIKGKSIVSNAEKHVLKSCVLNIDLEDFFGSIHFGRVRNLLTSPSFNIPLPVATVISNICCYNGSIPQGAPTSPIISNLICYKLDNELRQLAGKYNCTYTRYVDDITFSFTYKAKRIPHQLVTSDANIINIGVELEEIITRNGFSINKNKTRLQSKNERQTVTGIVVNKKTNLQRKFIRQTSSMLYAWEKHGVVAAENEHFVKYNEKKKLIKLRDFVDKPGELFKRIVKGRINYIKMVRGEDDIIYRKFAHRISCLFGNVNNRYLKTPSDFAIDSIFILENEVDISQGTAFLLEDVGIVTNYHVVPSIDEYNDIDLSLFRYNELDNKRKVKFIMSNKLYDLAIFDTNGNFDDIKKFSIGDDSNLKVGSEISVIGFPQYTTGEYPYINTGKIVQSKALFNNKIWLVDIPIIHGNSGGPVFNEKFEIIGVASNGTERNDQSSKLHGFIPISTLIKFISSK

SEQ ID NO: 581 - protein, 598 aa, Pseudomonas taeanensis
  source 1..598: note = Related to NZ_AWSQ01000001.1
MDIDEIFKDLFGPGFKSLDGFCQLLKVDQDKLLNFLYKRKGSHYVSFSILKKNKTHRTIKAPKRVMKKIQHALLPHLEKYYSPKPSSHGFVKGRNVKTNAQIHSRKRYVFNIDLKDFFESIHFGRVRNLFMAHPFSAPHNVATVMAQICCSDGKLAQGAPTSPLISNMICRKLDSQLQALAKSGKCHFTRYADDITFSFTSTAKYLPKDIVEVSEDGRAIPGRELEEIIKSNGFIINSEKTRLQHRTQRQMVTGLVVNEMPNVTREFIRLTSSMINALKRYGPELAEAKYLEILKGENQRLQPRQILRTKDSAGDFFIKVVKGRLNYIQMVRGRGDNIYRRLAYEFTVAIGKENPEFKKSPEEILGNSIFVVNNIIEECQGTAFLLEGVGIVTNEHVVTGVSKTIARHSISFSRAGDTREYSAELILSDKKADLAIFHPNEEFRNIPALRKSDKTIVRPTDPVLSIGFPKHRDGTTHYIAKGHTTQRRRQVDLDLWLVDFTLMEGNSGGPIFNDSMEVIGVTARGAKNNIDAALYGFIPLDSLNSFTSRADFLLLKRLYDYLGNGSLSLLPGILGKGIFSSAYQTKLHKERLQKAKAA

SEQ ID NO: 582 - protein, 598 aa, Pseudomonas amygdali
  source 1..598: note = Related to CP026558.1
MDIDSIFKDLFGPGFQSLDGFCRLLEVDQNKLLNFLYNRKGSHYVSFSILKKNKTHRSIKAPKRVMKKIQHALLPHLEKFYSPKSSSHGFVKGRNVKTNAQIHSRKRYVFNIDLKDFFESIHFGRVRNLFMAHPFNAPHNVATVIAQICCSYGKLAQGAPTSPLISNMICRKLDSQLQALAKTSKCHFTRYADDITFSFTSTEKHLPKDIVEVSEDGRAIPGRELEEIIRAAGFAINSEKTRLQHRTQRQMVTGLVVNEMPNVTREFIRLTSSMINALKSYGPELAEAKYLEILKAKNHTLQPRQLLRTNDGNGDFFIKVVKGRLNYIQMIRGRGDKIYRRLAYEFTVALGKENPEFKKSPEEILGNSIFVVNNIISESQGAAFLLEGVGIVTNEHVVSGVSKTIARHSISFHRAGDTKEYSAELILSDKKADLAVFRPNEEFRNIPVLKKSDKTIVRAMDAVLSIGFPKYRDGTAHYIARGHTTQRRRQVDLDLWLVDFMLLEGNSGGPMFNDSMEVIGVTARGAKNNIDAALYGFIPLESLNSFTSRSDFILLNRLHDYIGNGSLSLLPQTLGKGVLSITYQAMLRKQHLLPLTEN

SEQ ID NO: 583 - protein, 598 aa, Pseudomonas fluorescens
  source 1..598: note = Related to CABVIC010000001.1
MNIEEIFKNLFIPGFSSLDNLCRLLKVEQDKLLAFLYKKKSSHYVSFFIPKKNGTRRTIKAPKRVMKRLQRELLVHLEKFYSPKSSSHGFVKGRSIKTNAQVHAGKRYVFNIDLKDFFENVHFGRVRNLFMAEPFKAPHNVATVMAQICCSEGRLAQGAPTSPLISNMICRKLDAQLQALAKSGKCHFTRYADDISFSFTSTLRHLPKDIVEISEDRRAIPGRMLEEIIKANGFTINSEKTRLQHRSQRQMVTGLVVNEVPNVTRDFVRLTSSMINALKRYGAELAEAKYLEILKGDSQPLQVRQNVRVRENAGDFFIKVVKGRLNYIQMVRGRSDRVYRRLAYDFTVAIGRENPEFKKSPEEILGNSIFVVKNITDDSQGTAFLLDGVGIVTNEHVVSGVSKTMAPHMISFQRVGENKEYAAELILSDKKADLAIFQPNGEFRNIPPLRKANRTTIRPMESVLSIGFPKYRDGSAHYIARGHTTQRRRQVDLDLWLVDFTLIEGNSGGPFFNDSMEVIGVAARGASNNIESALYGFIPLESLNRFIARKDFVFLKKIHELSGSKLLGPLTMRSGNGVFSEVYLAGKYGGCRLKPAKI

SEQ ID NO: 584 - protein, 596 aa, Pseudomonas chlororaphis
  source 1..596: note = Related to NZ_CP054866.1
MNIEEIFKNLFRPGFSDLDNLCRLLKVDQKKLLSFLYKKNSSHYVSFSIPKRNGTPRAIVAPKRVLKRLQRELLEHLEKFYTPKSSTHGFVEGRSIKTNAQIHSGKKYVFNIDLKDFFGSIHFGRVRNLFMAQPFNAPRNVATVIAHICCSDGRLAQGSPTSPLISNMICRKLDAQLQALAKTGKCHFTRYADDITFSFTTPLKYLPKDIIEVSEDRRAIPGRELEEIIKANGFMINPEKTRLQHRSQRQMVTGLIVNERPNVTREFVRLTSSMINALKRHGCELAEAKYLELLKGESHPLQPRQIIRTKDNAGDFFIKVVKGRLNYIQMIRGRGDKVYRRLAYDFTVAIGKANPEFKKTPEEILGNSIFVVNNMTDDSQGTAFLLDGVGIVTNEHVVRGVSKSMAPHMISFQRANEEKEYTAELILSDKKADLAIFHPSAEFRSIPSLRKAERSIIRPMESVLSIGFPRHRDGAAHYIARGHTTQRRRQVDLDLWLVDFTLFEGNSGGPFFNDSMEVIGVAARGAKNNIESALFGFIPLESLNTFIARKDFVFYKKLHDLLGGCLLKALPKRSGDGVFTEIHHQRTERVTARLQE

SEQ ID NO: 585 - protein, 594 aa, Pseudomonas protegens
  source 1..594: note = Related to MOAT01000002.1
MNIDKILQDLFMPGFGSLEGFCQLLEVDQKKLLNFLYKRRTNHYVSFSISKKNGTHRSIKAPKRTLKFLQRKLLAHIEKFYSPKPSSHGFVPGRSIKTNAQTHSGKRYVFNIDLKEFFDSIHFGRVRNLFMAQPFNAPHNVATVMAHICCSDGRLAQGAPTSPLISNMICRKLDTQLQTLAKSGKCHITRYADDITFSFTSTLRHLPKNIVEVSEDGRPIPGRELENIIEANGFVINSEKTRLQHCSQRQMVTGLVVNETPNVPRDFVRLTSSMINAMRRYGPQLAEARYLEILKSESQVIPTRQTNRARDNAGDFFIKVVKGRLNYIQMIRGRSDNVYRKLAYAFTVALGKENLEFKKSPEEILGNSIFVVNNILDDSQGTAFLLDGVGIVTNEHVVSGITKTTAPHVISFKRADDPKEYTAELILSDKIADLAVFYPNAEFKNIPGLRKADKETIRAMDPILSIGFPKHREGAAHYITRGNTTQLRYQVDLPLWLVDVPLIEGNSGGPIFNDSMEVIGVASRGSSNNIQAALYGFIPLECLNRFAKRKDFAFYRKLHEILAGGKLVRAASVRGGGVLSTRLQILLISHLNSP

SEQ ID NO: 586 - protein, 584 aa, Pseudomonas seleniipraecipitans
  source 1..584: note = Related to NZ_FNBM01000007.1
MTLDFLSKDLAFSKFQSLSSFCKLLQVDQDKLLKFLYKKSSSHYVSFTISKKDGSLRSIKAPKKVTKMLQHRLLSHLEEFYTPKSSSHGFIKGRSIKTNGQMHVGKNYVFNIDLKNFFESIHFGRVRNLFMAAPFNAAYNVATVMAQICCCENKLAQGAPTSPLISNMICRRLDAQLQTLAKAQKCHMTRYADDISFSFTSRLRHLPKEIVEISEDGRVIPGQALETLIKTNGFAINSDKTRLQHRSQRQMVTGLVVNKLPNVPREFVRLTSSMINAMKRYGPAQAEARYLEILAQTKQIVPERQLARVKSNAGDFFIKVVKGRLNYIQMIRGRSDNVYRKLAYDFTVALGKENIEFKKTPEEILGNSIFVVTNILDDSQGTAFLLEGVGLVTNQHVVSGATHALASHVISFKRAGDERSYTAELIFSDLKSDLAVFYPGPEFKNIPHLQKADKHIIRAMDPVLSIGFPKYRDGSAHYITKGSTTQLRRQVDIDLWLVDMPLIEGNSGGPIFNDSMEVIGIASRGSVNNLQAALYGFIPIDSLTRFISRPAFGLARRVHDLLAGDKFKPLSKTGHTRLLLKCAP

SEQ ID NO: 587 - protein, 588 aa, Pseudomonas stutzeri
  source 1..588: note = Related to AJXE01000010.1
MNLDDLLKAMFAPSLGSLPSFCNLLGVEQDKLLSFLYKRTSSHYISFHIPKKNGATRVIKAPKKALKELQKRLASHLDKFHSPKPSSHGFIKGRSIKSNALPHINKTFVFNVDLKDFFETIHFGRVKNLFMSEPFSAPHNVATVMAHICCHDGKLVQGAPTSPLISNMICRKLDSQLQSLAKAQKCHVTRYADDITFSFTSSIKHLPTDIVEVTQDGMAIPGRELEQIVRVNGFTINAEKTRLQHRSQRQMVTGLVVNKFPNVPRAFIRKTSSMINALRRYGPVLAEEKYLQILKGDKQALPARQHRRIKDNAGDFFIKVIKGRLNYIQMVRGRSDSTYRRLAYDFTVAIGKENPEFRKSPEEILGNSIFIVSNLTDDSQGTAFLLGGVGLVTNQHVISGVSKTMAPHMISFTRVGDDTEFSADLIISDAKEDLAVFYPNEQFDRIPMLKKASKESIRPMEPILSIGFPRHRDGAAHYITKGTTTQLRRQVDLDLWLVDVPLIEGNSGGPIFNDSMEVIGVAARGATQNNINAALYGFIPIASLNRFVAKPEFKLANSLHMSLRGKPCRPLCEATGKYIRKMTICSFG

SEQ ID NO: 588 - protein, 587 aa, Pseudomonas dryadis
  source 1..587: note = Related to NZ_QJUN01000007.1
MIIDDILKALFTPGLGNLSGFCDLLGVEQEKLLDFLYKRKSSHYAAFHIPKKNGATRVVKAPKKAMKELQKSLALHLNKFYYPKPSSHGFVKGRSIKSNALPHVNKNLVFNIDLKDFFETIHFGRVKNLFMSAPFNAPHNVATVIAHICCHDGKLVQGAPTSPLISNMICWKLDSQLQALAKSKKCHVTRFVDDITFSFTSSLKHLPAGVVEVTQDGMAIPGRELEQIVKANGFLINAEKTRLQHRSQRQMVTGLVVNKFPNVPREFIRKTSSMINALRRYGPELAEEKYLQILAGNKQVVPARQHRRIKDNAGDFFIKVLKGRLNYIQMIRGRSDNMYRRLAYDFTVAIGKENLEFRKSPEEILGNSIFVVKNLTDDSQGTAFLLDGVGLITNQHVISGVSKTLAPHMISFLRAGDEAEFSAELILSDVKEDLAIFYPGEKFDQIPRLRKANKEAIRPMEPILSIGFPKHRDGAAHYITKGNTTQLRRQVDLDLWLVDVPLIEGNSGGPIFNDSMEVIGVAARGAAQSNINTALYGFIPIASLNRFVARSEFKFTSSLYAVLDGKAFRPLCEVAGKYARRGCFFIF

SEQ ID NO: 589 - protein, 588 aa, Pseudomonas fluorescens
  source 1..588: note = Related to NZ_CP075566.1
MILYNFLAAIYAPGLSSLPAFCKLLGVDQNKLLHFLYKRKQSNYVSFHIPKKSGATRVINAPKKTLKVLQRSLAEHLEKFYYPKSSSHGFVRARSIKTNAQPHVDKNYVFNIDLKDFFDTIHFGRVRNLFMSEPFNAPHNVATVMAHICCHDGRLAQGAPTSPLISNMICRKLDSQLQALAKSKKCHVTRYADDITFSFTSSLRHLPPDVVEVTGDGVVIPGRELEHIIKANGFLINSEKTRLQHRSQRQMVTGLVVNEFPNLPRAFLRKTSSMINALRRYGPVLAESKYLEILNGDKQSIPARQHIRVKDNAGDFFIKVVKGRLNYIQMIRGRGDNVYRKLAYDFTVAIGKENREFRKSPEEILGNSIFVVKNISDDSQGTAFLLDGVGLVTNQHVVSGISRLTAPHMISFIRAGLDEAEISAELILSDEKADLAIFYPGPEFDKVPRLKKSKKELIRPMDPVLSIGFPKYRDGAAHYITRGNTTQLRRQVDLDLWLIDVPLIEGNSGGPVFNDSLEVIGVAARGAAQNNIQAAMYGFIPISSLNKFVQQSEFKVTRSILDILGGKLFQPLANAKGKFVRRKILIPF

SEQ ID NO: 590 - protein, 605 aa, Pseudomonas syringae
  source 1..605: note = Related to NZ_KE695189.1
MSSVPFSFADIFKPGLSGLPNLARLLGTNQNALLELLYPNNVRNYKNFQIKKKNGNSRSIHAPKKVLKALQRNMADYLTTLHTPKPSSHGFLIERSIKSNSIPHAGKEYVFNIDLEDFFESIHFGRVKNLFMSRPFNAPHNVAVVLAQLCCYDGKLAMGAPTSPIISNMICRKLDSQLQLLAAGKNCYYTRYADDITFSFTSSKKLLPSDIVQITEGGVGVPGGALLSIIERNGFRVNPTKTRLRHRSQRQIVTGLTVNKFPNVSRSFIRRTASMIHALKKFGAVDAEQRYLEILSRQEIDLAPRQAKRTTDSKGDFFPKVINGRLNFIQMVRGKNDSIYRKLAYAFSVAVNEEDKDLLKSAQEILGESVFSVLNLADANSEGSAFLLSGVGIVTNQHVIDGIDFDSPLELLEFSTTENPSRKLNPQLIYKSKVPDIAIFYPGEEFDRIRPLVISKQKHIRPLDPILAVGFPGGFDSCPSPYINGGKVVQGRHIYEQQHWLVDIPLLQGNSGGPIFDTSMEVIGVASRGSKKNNLESILHAFIPIDTVVKAIRKPEFLYRQRYIELRLNRKTGKVVYTRCVFAEDCIFKSAIELYWPLSKSFSYS

SEQ ID NO: 591 - protein, 617 aa, Pseudomonas viridiflava
  source 1..617: note = Related to NZ_UUIZ01000014.1
MDNRNILEKTFEGLFSTAPFTPGFHNLDGLALLLDTDLTRLLYILYKSDSPKYNHFKIQKRNGNSRSIHAPIPEIKKLQKKLATLLQALHVPKLSSHGFLADRSVKTNALPHTKKKFVFNIDLKDFFETVHFGRVKNLFMSRAVGAPHNVATVMAHLCCFNGRLAQGAPTSPIISNMICLKLDAQLQALAHKEKCHYTRYADDITFSFTCSKNKLPKDILVYSELDAISAGKGLEIIIEANGFKINPDKTRVRHKSQRQLVTGLTVNDFPNVSREYIRRTSAMINALRKYGEVLAERKYVEINKINAVPLAARQLKRLERKEGDFFIKVVKGRLNYIQMIRGRGDPIYRKLAYYFSVAVKKENKEFLKTAEELLGEALFIVKNSLDEDSQGTAFLLDGVGIVTNHHVIDGVDLITAPHCIEFITTEKIPRVLSAELIFTSKSMDLAVFHPSSDFETLRPLQMSRRKRLKALDPILAMGFPSHIRGATPYINTGKIVQSREAYRSTFWLVDIPLLRGNSGGPVFNSSMEVIGVATMGSKNHDRTTIMHGFLPNDGISTILKNPDFLYRREILKTKKTGIRSISTRLKGVQTLAFYEHKHVGPYPLIHASWPFLSGAGG

SEQ ID NO: 592 - protein, 585 aa, Pseudomonas corrugata
  source 1..585: note = Related to JAEIKZ010000029.1
MTTIPNFAFSLIKVKPGFGSIESLALLLGTTQDALLGLLYPQTKINYVTFTIPKKNGDIRTIHAPKNHLKHFQRLLAKYLLTTHNAKSCTHGFVENKSIKTNAQPHIGKEYVFNIDLKDFFQTIHYGRVKRLFMAYPFNAPENVATVIAQLCCFNGHLAQGAPTSPIISNMIALKLDGQILSVASKNQCHYTRYVDDLTFSFTCKKHRLPKDIVKISNEDEATPGDTLTNIILKNGFTVNPEKTRLKHRSQRQVAAGVTVNEFTNLPRSYIRLTGSLIYALEKFGPINAEIKYVEGLNEIHQLTPYQLDKIKRSNGEFFKTVVKGRLDFLKMIRGKSDSIYRKLAYRFSKAIGKEDKNLMKSAQDILGESVFVVEEMMSESQGTAFLLDGVGVVTNFHVVGGITQELAPDCVSFITNEATSRTLSAQLIFSCKERDLAVFYPDHSFDTIRPLKTRKKNGLTRVLDPILSMGYPNHSAGTPPYFNTGKIVQQRNVLGRNYWLVDIPLLKGNSGGPIFNSSMEVIGIATIGTTRNDLASILHGFLPVEKLKEIIKLPEFIYRKRYLALKNNQPNLSCLLPKSRPYYY

SEQ ID NO: 593 - protein, 610 aa, Marinobacterium mangrovicola
  source 1..610: note = Related to SMFU01000008.1
MTLPLGENFFSTAQTIANELGMSYKQLSSFIYPTTNKSYRTFTIKKKGGGERTISVPKKNLKKIQRMIVDKIMKYYNPKLSCHGFTESRSIVTNAYRHVGKQFVFNVDLKDFFGTIHFGRVRNLFISKPFLYSHSAATVLAQICCKDGVLPQGAPTSPIISNLICWKLDAQLQTLAAKNNCHYTRYADDITFSFSCNKKYIPKSILDFDNDGVVVVGSSLERIIKENGFNINYEKVRLKGRSQRQEVTGITVNEFTNVERKFIRKTRSMIHAWRKFGSIKAQEHYISNYLEKDILPRQAKSIAKNDGEFFIDVVKGRVNYIQMVRGRADPIYRKLAYQMTLAMGKPNHLFLRKAEEVISDSVFIVENNLLCEQGSAFLLDDIGIVTNQHVVEGIDHENHELVDFYREDDVKNKMNSSFVYSSASKDIAIFLATANFNNIPPLPIGNDKNLRVGDSIIVVGYPDYSEGETAYINRGKIVQSILRFGKRFWLIDIPVIHGNSGGPVLNEKLEVVGIATLGSAINDGKNKFNGFVPISTLTGILNTPQYNKIYRYSLLHSKKPKVEIEKDLFYVDGLTYCKKCFLDKKQAITVYKTKSNVFFNCKICGKTYRK

SEQ ID NO: 594 - protein, 557 aa, Micavibrio sp.
  source 1..557: note = Related to DUBU01000004.1
MIDFSDTILPSQEAIAKKFGYTYDQLSSLIYPKVNKSYHSFTISKKNGELREINAPKILLLKVQQTLAEELSSCYTPKNATHGFIKERSIVTNAKKHIGKRNVFNIDLKDFYGSIHFGRVRNLLMSKPFMYSQSEATILAQICCYNGALPQGAPTSPIISNLICWKMDALLQNLASENRCTYTRYADDITFSFNVKKSKLPSSIVRFDLKKDRAIVGYELSKIIEESGFVINEEKVRLAGKNQRQEVTGITVNKKPNVSRKFIRQTASMLYAWKKFGAEQAEHDYLDKYRVKKLTNWQSEKFKGAKGEFFIKVVKGRVNYIQMVRGRDDKIYRKLAFKLTDALGKPNIHFTKSREELATYVIEWMEAQGTGFLLDGVGIVTNEHVISGITSDNYAMCNVYRCYEEDKKQKCPLIFADKAIDLAVLDPTSYLSDVKPYKIGEDKYLEIGDTVKVIGFPKFGPGSTPNISEGIITSKKKIHGIDAFIVNTPITDGASGGPVLDNNNEVIGVAFWGPEHNDGSNPINGFIPISTLKNALEQHSLTNSFGAKKPVKQQKEK

SEQ ID NO: 595 - protein, 543 aa, Legionella fallonii
  source 1..543: note = Related to NZ_LN614827.1
MDNIDFKDCRTVKDLSHFLGMNYKKLSSLIYPNTNRLYVTFIIPKKSGEDRTIDAPKPILKAIQRKLSIEFNKIYNPRKNTHGFICGKSIVTNANQHINKRYIFNIDFKDFFHSIHFGRIRNLFMSDLFAFTYEVATVLAHICCHNNRLPQGAPTSPVLTNIISFKLDNDLFKLSFDNKCSVTRYADDVSFSFSCNKRNFPKDILYFNKAKEIVPGIKLREVIEKNGFEINNNKVRLQNKTQRQQVTGITVNQKLNIHRSYIIKTRSMLHAWDKYGLEQAAKEYLSKYIEKDYSNNDKNRINSNESLFFKQVISGRINYIGMVRGINDEIYRKIRYKYSCLIGVPDENLKKSLDDILSESVFILENNIGIAQGTAFLVEQLGLVTAYHVIEDINEENSCLIDFFRCNEVDKKRKATLFKTSQKNDIAIFTLNNNFQDITPLKLGDASKLKRGVEIKLFGFPGYNTGDECHCDNGKITQKKKLYGFDVWLVDIPITHGISGGPVLNANNEVIGIAIVGSEKNDKSTISQGFIPITKALAMLQDQ

SEQ ID NO: 596 - protein, 541 aa, Legionella pneumophila
  source 1..541: note = Related to CP016868.1
MEQTINKNFNSLDTLVSLFGINYSNLAKLIYPTTNNLYHSFSIPKKSGELREINAPNRILKEIQYKLLNELQSYYSKRNCTHGFINERNVVTNARPHVKKNIILNLDLKEFFQSIHFGRVRNLFMSNPFNFNKNVATVLAQICCHKGHLPQGAPTSPLITNLICYKLDKELSKLAFNNNCTVTRYVDDITFSFNCSHDKIPRDILDGISGESISISKKLVNIINKNGFEINYKKVRLSSSNQRQQVTGIVTNVKVNLPRKYIKKTQSMLYAWKNFSLPNAEQAHINNYLEKPYKYQRFIRYNKDKSYFNLMIKGRINYIGMVRGQSDCIYRKLLYQYTELIGNPNKELLKSVDDCLADSVFITEYPIESKQGTAFFLKDIGLVTAAHVVEGIHETNSCFLDFFRHYEVKIKRKATLFKKSEEKDIAIFYVGDDFKNLPSLKVGDDSKLAIGDQIKLIGFPDYNYHDSYLSNLGKIIQKKTMYNLDVWIVDLPINFGVSGGPVFNNKNEVIGVALQGSKKHDQSTYSHYFVPISKVIEMAQN

SEQ ID NO: 597 - protein, 538 aa, Acinetobacter sp.
  source 1..538: note = Related to NZ_NHRP01000030.1
MNFLQLQTTQDLANFFEIDLKHLMYLVHVMPGHIKYKSFKIITKKKERLISSPFFRLKKIQYRLKEEFEKIYKPRKSVYGFIKDKSIKENAINHLNKRYIFNIDLQDFFGSITAIRIKYLLQSYPFNFPSIVAEIISKLICYQGVLPQGSPCSPIISNMIAHRMDGELSFLAKKNNATYTRYVDDITFSFTKRFKALPKDILTFENGDLNVGAKLDQIINSNGFIVNQKKVRLGKRSTRMEVTGITVNEKLNVPRKYIRKIRTLLHLVEKYGEQEADRIFSTYKRTRVSKYPPRIEKAIFGMLTYLAQIVGYNNMVYYNLAKKYNSLEFKSKLLIIKPVDLQIIDALWVILLPTCEEGTAFSISNNLVVTAAHVVINEDTNQPFEEIQIYKSFAQDQIYHLEVLKYNIDADVAICKIMENYKDDSFFELGGNIENKLKLLGFPQFQPNQHKPHSADCDLMFKTTIKEYKYFSINTPIIGGNSGGPVIDSCKRVVGVASKGYFGQGIIDQGSLVNKSIHVTIMGHNLCSDIQNVKDLID

SEQ ID NO: 598 - protein, 564 aa, Pseudomonas brassicacearum
  source 1..564: note = Related to NZ_MOBC01000433.1
MNGGFFLKFSPTLSPSTTPIELAELLGTDYAKIKRLYYHGDMQRHYLAFDIPKKSGGKRRILAPSDKLKTLQGRLASLLKKIYKPRDPVMAFRDGSSIVTNAHAHCRKKYVFNIDLENFFGTITFARVRGMLISKPYSLTAETATVIAHLATINGALPQGAPSSPILSNMICASLDRDLYSLAKSYRAVYTRYADDITLSFYCLAEFLPTEIVEYSLSNGKPNHYFSKVGNELGSLVRRHGFIINEQKVRLQGPGERRTVTGLVTNQKPNVPRPYIRKTAALIHSFEKLGEQAANILYKQKNPNSSGILESHLQGRLLFIKQVAGLESVVYRRLAQRYNMLPLKSKVPNTPIATTEDSDNFKVGEFIKNKCWVTEISENVEDELVHIQGTAFMIQGSLLVTCEHNLSYQTKQKRHEYGECLVYRVGEGQAVYEAKVIIRDKDLDIAVLRISDAPAGLEHFTLEETREPNIGDRVAILGFPNHKTGPYVGILKCRVTNKYPLHNVQHSEVDKTLYAGNSGGPVINSSYHVVGIAAKGAEGNPNGKNSFIRVTELVKYLEKSGFEM

SEQ ID NO: 599 - protein, 563 aa, Pseudomonas sp.
  source 1..563: note = Related to NZ_LJRZ01000537.1
MNGGFFLNFLSLSPSTSPAELAQLLGTDYGKIKRLYYRGDRQRHYLAFDIPKKNGGKRRILAPSDKLKTLQSRLASLLKKIYKPREPVKAFLDGGSIVSNAYPHCRKPYVFNIDLENFFGTITFARIRGMLISKPYSLTPETATVIAHLATINGILPQGAPSSPILSNMLCASLDRDLYSLAKRNRAVYTRYADDITLSFYCPAEFLPPGVVEYSISNGKPNHYYSRTGQELQSLVRQHGFTINFDKVRLQGPGERRTVTGLVTNQKPNVPRPYIRKTAALIHSLEKNGVEAANAIYKQKNPNSSGVLESHLQGRLLFIKQVVGESSVVYRRLAQRYNMLPIRSKVPNAPIATTEDSDNFKVGEFIKTKCWVTEISERIEDNLVQIQGTAFMIQGGLIVTCEHNLSYQTKERRHEYDECLVYRVGEDEGVYEAQVIIRNKYLDLAVLKIKNAPDDLEHFTLEVTKEPNIGDRVAVLGFPNHKTGFHVGILKCRITNKYPLHDVQHSEVDKTLYAGNSGGAVINSSYHVVGVAAKGAEGNPNGKNTFIRVSELIGYLQKSGFDM

SEQ ID NO: 600 - protein, 564 aa, Pseudomonas sp.
  source 1..564: note = Related to NZ_BCBD01000043.1
MNGGFFLSLFQLSSSTTPGELAQLLGTDYGKIKRLYYTGDMHRHYLAFDIPKKSGGKRRILAPSEKLKTLQARLATLLNKIYTPREPVKAFREGSSIVANAYPHCRKKYVFNIDLENFFGTITFRRIRGMLISEPYSLSAETASVIAHLATVNGILPQGAPSSPILSNMLCASLDRDLYSLAKRNRAVYTRYADDITFSFYSPAEFLPQNVVEYSLSNGKPNHYYSKVGQELETIVRQHGFTINLTKVRLQGPSERRIVTGLVTNQKPNVPRTYVRKTAALIHSIEKNGEEAANAIYKKKNPNSSGILESHLQGRLLYIKQVVGEDSEVYRRLAQRYNMLPIKSKVPNTPITTTEDSDNFKVGEFIKSKCWVTEVSENINGKLEQIQGTAFMIQGGLLVTCEHNLTYRDKDNKRHEFNQCCVYRVGEGEGLYEANVIIRCEKLDLAVLSIKEAPTGLEHFTLEVTREPNIGERVAVLGFPNHKTGSHVGILKCRVTNKYPLYEIQHSEVDKTLYAGNSGGPVINSSYHVVGVAAKGAEGNPNGKNTFIRISELIKYLQKKGFEM

SEQ ID NO: 601 - protein, 564 aa, Pseudomonas simiae
  source 1..564: note = Related to PVUL01000002.1
MNGGFFLNFVALNPSTTPIELAEHLGTDYGKIKHLYYRGGMLRHYLEFEIPKKNGEKRKILAPSDKLKTLQSRLAGLLKKIYNPREPVKAFREGSSIVANAWPHCRKKFVFNIDLENFFGTITFSRIRGMLIAKPYSLTPETATVIAHLTTVNGILPQGAPSSPILSNMLCASMDRVLYSLAKHNRAVYTRYADDITFSFYCPIEFIPSSMVESSVSNDRPNHYYSKVGYELQSVIDQHGFTINTRKVRLQGPGERRTVTGLVTNQKPNVPRPYIRKTAALIHSIEKHGEQAANAIYKEKNPNTSGVLESHLQGRLLFIKQVVGESSVVYRRLAQRYNMLPTKSKVPNTPQATDEDSDNFKVGEFIKDKCWITEVEQKLDNDLVQIQGSAFMIQGGLLITCEHNLSHKIGDKWFEFNECLVYRVGEGESMYEAKVIIRDKKLDLAVLKIQEPPLGLKHFTLEVSKEPNIGERVAVLGFPNHKSGSHHVGILKCRLTNKYPLHDVQHSEVDKNLYSGNSGGPVINSSYHVVGVAAKGAEGNPHGKNTFIRVSELIKYLEKSGVIL

SEQ ID NO: 602 - protein, 563 aa, Pseudomonas sp.
  source 1..563: note = Related to NZ_LMGK01000001.1
MNGGFFLNFVALNPNTSPDELAALLGTDYGKIKHFYYRGEMQRHYLAFDIPKKNGAKRRILAPTDKLKTIQARIANLLSKLYTPREPVKAFLEGTSIVANARPHCRKKYVFNVDLENFFGTITFARVRGMLIAKPYSLSPETATVIAHLTTVNSILPQGAPSSPILSNMLCASLDRDLYSLAKRHRSVYTRYADDITFSFYCPIDFVPAELVDWSESNGRANHYFSQVGYELGSAIERHGFKVNQSKVRLQGPHERRIVTGLVTNQKPNVPRTYIRKTAALIHSIEKYGVEAANIVFREKNPNSTATVESHLQGRLLYIKQVVSEDSEVYRRLAQRYNMLPIKSKVPNAPQATREDSDNFRVGKFVRDKCWITNIEEYRNGKLVMIQGSAFLMKGGLLVTCEHVLSAIVDDSREEFNECLVSRIGDDESIYEAKVIIRNKELDIAVLKIKDAPADLETFTLEEVKEPNIGDRVAVLGFPNFKEGSKDVGILKCRITNKYPLFGVSHSEVDKTLYSGNSGGPVINSSYHVVGIAAKGAAGNPQGKNSFIRVSELRKYLEKSGAI

SEQ ID NO: 603 - protein, 563 aa, Pseudomonas fluorescens
  source 1..563: note = Related to SMCJ01000008.1
MNGGFFLNFTTLNPYTAPEDLATLLGTDYGKIKHFYYRGEMKRHYLAFEISKKSGGKRKILAPTDKLKTIQGRIAGLLSKLYKPRAPVKAFLVGQSIVANARPHCRKKYVFNIDLENFFGTITFRRVRGMLMAKPYSLSPETASVIAHLTTVDGLLPQGAPSSPVISNMICASLDRELYSLAKRHRAVYTRYADDMTFSFYTPIQYVPRELVEWCELDGRPNHYSSKVGHELAAVIATQGFKINEDKVRLQGGRERQLVTGLVTNQKPNVPRPYIRKTAALVHSVEKFGLEVSTSIFKEKNPNSTANIETHLQGRLLYIKQVVGEESKVYRRLAQRYNMLPIKSKVPNTPIATPEDSDNFKIGKFIKDKCWVIEINEEINGKLVSSQGSAFLIGGRLLVTCEHVLAENFIDGERIEVNECLIRRMGDENIYEAKVIIRSKDLDIAVLKIVDPPAGLEVFSLEDIKEPNIGDRVAVLGFPNFKEGSNDVGVLKCRLTNKYPLSGVMHSEVDKTLYSGNSGGPVINTSYHVVGIAAQGAAGNPEGKNSFIRVSELKRYLDKSGAI

SEQ ID NO: 604 - protein, 559 aa, Pseudomonas otitidis
  source 1..559: note = Related to NZ_BQIA01000029.1
MEAFLNLIGLTPHTTPQELAQLLGTDYSKIKRLYYRSPITRHYHEFNIPKKNGDKRKILAPSEKLKTLQLRISALLNKLYDPRAPAKAFIQGRSIVDNAAPHCRKSFVFNIDLNNFFPSITFGRVRGLLMAKPYSLSSETATVIAHLSTVNGSLPQGSPCSPVISNMICAGLDRELYSLAREHRAFYTRYADDITFSFYCPLGFISRKIVIPSLSNQHTNHYDSKVGELLNEIIISHGFTINQGKVRLQGSNERQVVTGLTTNQKPNVPRTFIRKTAALIHSIEKTGLEQANLIFREKNPNSKGTLDSHIRGRLLYIKQVVSEESVVYRRLAHRYNMLPISAKVPNPAISAIENNENFKIGEFIKNKCWIVNLCEDIDGDVVVLQGTAFTIKNRLLVTCAHVLQYSGKDFDDCEIFRVHEAQKTLKAKVIIRDNQSDIAILKILEPPSNLEPFTLEEEKEPNIGERVAILGFPNFKEGATSVGILRSRITNKYPLFAPPVMHSEVDKTLYAGNSGGPVINSSYHVVGIASKGAAGSPTGQNSFIRISELIKILERYETN

SEQ ID NO: 605 - protein, 559 aa, Pseudomonas sp.
  source 1..559: note = Related to NZ_NEIR01000012.1
MDGGTFLLGTLGPTTTPDELARMLGTSYSKIKHFYYSRDMGSNYRQFTIPKKNGEKRVILAPENWLKTLQLRLAKRLQLLYKPRKGVTGFVKNSGIADNANLHKRSRYLFNIDLKDFFPSIKFHRIRGLLIAKPYSLMPETASVIAHLCTFRGSLPQGAPTSPILSNMFCASLDRELYTLAVRHNATYSRYADDISFSFYCPLRSLPPEIVVTSERQGELNHYKATIGDKLREAILRFGFEENERKVRLLSRTEKQLVTGLVSNCKANIDRRYVRSTAAMIHSLEKDGETVANERRKAKHPDSTTPVAAHVQGRLLFMHQILGKNSPVYARLANRFNVLPLKFKVPPPSLSTSEREASIAVNRFVRAKCWVVEVAIDVPGDCIISQGSGFMIEGGLLVTCAHVLEEKGVLVDECEIYHVDDDAQRYNATVLHRDRNADIALLKIEDCSENEYFHLESDEEPNIGDRVVILGFPNVKNGAKVGVLQAQVSNKYPLYDPEIMHSEVDKLLYPGNSGGPVINARQRVVGIAAKGAAGSAEGQNSFIRVSELFKVLKAADGLN

SEQ ID NO: 606 - protein, 559 aa, Pseudomonas oryzicola
  source 1..559: note = Related to NZ_JABWRZ020000002.1
MDGGILINDCLNPSTTPEDLAFMLGTSYNKIKRFYYDRDMSANYRHFTIPKKNGEPRHILAPENWLKTLQIRLARRLTLLYTPRKGVTGFIKESGIVVNADKHKRSSYVFNVDLQDFFPSINFHRLRGMLIAKPYSLLPQTASVIAHLCTYRGSLPQGAPTSPVLSNMFCASMDRKLYELAIRHKATYSRYADDITFSFYCPLRYVSSAIVKASGRQGELSHYKATLGDELKSIINNFGFVENERKVRLLSRTEQQLVTGLLANAKANIDRRYIRKTAAMIHSLERDGETVANERRKEQNADSSTPLAAHVQGRLLFLHQVLGKTSPVYARLANRFNVLPLKFKVPPPQLTTSEREAIIAVSKFVRAKCWVVQVAIDVNDDCIIAQGSGFMIESGILVTCAHVLEEKGVTVDECEIYQVDDDGQKLTAEVIYRNRAIDIAILKVHDCGTQEFFHLETDEEPNIGDQVVILGFPNVKDGARVGVIQARISNKYPLYKPEVMHSEVDKMLYPGNSGGPVINSRQRVVGIAAKGAAGSSEGQNSFIRVSELIKILPALKERL

SEQ ID NO: 607 - protein, 558 aa, Pseudomonas savastanoi
  source 1..558: note = Related to JAAFOZ010000019.1
MGGVFLLSDRLGPTTTANELAVMLGTSYAKIKYFYYSRPIGDCYKQFSIPKKSGGKRLILAPDDKLKTLQTRLAIRLAEIYTPRKGVTGFIPGSNITKNAKLHSRSKYVFNIDLENFFPSIKFYRIRGLLTAQPYSLMPETATVIAHLCTLNGALPQGAPTSPILSNMFCASMDRMLYSLAVKFKATYSRYADDISFSFKCPLRFIPEDIVKVFSRQGELSNYKAELGSVLSVIIADFGFSENKKKTRLLSRSEKQIVTGLVVNTKANVDRRYVRKTAAMIHSLEQVGEEVSNERRAEKTPGSTTPLAAHVQGRLLFIHQVLGKTSPVYARLSNRFNVLPLKYKVPSSMVLTSEREASIAVNKFVRSKCWVVEVAIDIPGDCIISQGSGFMISKNMLVTCAHVLEEKGVRVNECEIYQVDNDAVRHQAEVLFQDFNTDIAVLKLLDFQVDEFFHLEEGEEPSIGDPVVVLGFPNVKNGAKVGVMRAQVTNKYPLSKPPVMHSEVDKMLYPGNSGGPVINARQHVVGIAAKGAAGSAEGQNSFIRVSELSKLLAANKPA

SEQ ID NO: 608 - protein, 561 aa, Pseudomonas sp.
  source 1..561: note = Related to NZ_CP081943.1
MNGGFFLSSDHLGPTTTPDQLATMLGTDYAKLKYFYYRSGMQQHYREFKIPKKSGGVRTILAPGDKLKTLQLRLAKRLTRMYRPRKSVKAFVEGTSITHNAAAHCGKKFVFNIDLKDFFTSITFARVRGLLIAKPYSLMPETATVIAHLTTVGGVLPQGAPSSPVLSNMLCASLDRDLYSLAVKNHAAYTRYADDISFSFYCQISYLPSELVVTTGSSDNSNHYNSLAGEELSRLISRHGFRVNEKKVRLQAYTERQVVTGLIVNRKPNVDRRYIRKTSALIHALEKLGAEEANAVRKVKQPDSTTPLEAHIQGRLLFIKQVVGLESEVYKRLADRFNMLPIQYKVPKPVSEKLEKDLNFRIGKYVLDRCWVVDVCIDVPGGCVVSQGSAFMMKGQLLITCAHVLAEKKITVNECEVFRVDSPDERYEAKVIYRNDHVDIAILKIQDGLENYESFNLEEAEEPNIGDRVVVLGFPNFKEGSTSVGVIRTKISNKYPLDKPGVMHSEVDKLLYPGNSGGPVLDSANHVVGIAARGAAGNAEGQNSFIRVSELLKILKARQVV

SEQ ID NO: 609 - protein, 565 aa, Pseudomonas sp.
  source 1..565: note = Related to NZ_QYYB01000004.1
MDGDISSPKPTLDSSTTPELLATILGTSYGKIKYFYYGRSGSRTASFYTRFEINKKNGGVREIYAPNKQLKVLQGRIASLLSNLYKPKKYVTAFVKGTSLYDNAINHTRKSFVFNIDLKDFFPTITFARVRGLLISKPYSLDPSTASVIAHLTTVNGHLPQGAPSSPVISNMICASLDRQLNSLAKQHRAQYTRYADDITFSFYCPLKYLPLEIVNTQANPEKINHYNARTGSKLREIISTNGFIVNPGKVRLQFKHERQVVTGLTVNKKVNVDRRYIRKTSAMIHSIESLGIEGAKFLNIALNPSKENPDEAAFELEPHIQGRLLFIKQIKGESCPVYRNMAIKFNSLSEEYKVPLSSHESKDNISINANVVDKCWILEIEETISQGSGFIVEGGLLVTCAHVVASKDDADKPVESCTVFRVSNKSDQYKAIVVHYDKHRDIALLKIDHDTHKFPFFRIEEKIPVKQNDKVSVYGFPDYKPASTYVGCVWARVVNGFIASAVTYYEVDKVLYSGNSGGPVLNSNLHIVGIAAKGAVDGHELNAFLCKSELEKVITTYSALHNDA

SEQ ID NO: 610 - protein, 580 aa, Pseudomonas syringae
  source 1..580: note = Related to NZ_LGLH01000057.1
MDEGSLPEESLKLTSESSVDDLAAILGTTYPKIKYFYYSSSVAGHYSKFSIAKKGGGKREILAPDNHLKVLQKRLAHQLSFLYKPNPRATAFLSNSSIVRNASFHTRKRFVFNIDLKDFFPSITFARVRAMLMSKPYSLTPQTATVIAHLATVKGKLPQGSPCSPVISNMICSSLDMQLRTLAKRHKASYTRYADDITFSFYVPMQYLPEDIVVLGGDDGEKTHHAVSVGTALSEIITKKGFVIHPGKVRLQRRDEKQVVTGLVVNQMANVDRRYIRKTSAMIHSLSTLGLETANLIHKSKSPDLTSKLSAHVFGRLLFIHQVKGVDSPVYRRLGMRFNQLESQYKVPLAKLLESYSDAGMKHNQLNIRRCWVLENEKWGTQATGFMLENNLMITCAHAFNYVLNPEIDSDVECCIEHDCKEVWFDDCTAYRVNDRSIKYTVKVLFLDKHRDLAVVSFSETNEKFEYFRLEYDLQAEIGDKVSILGFPNFKVGSTDVFRFWAAVSGRYVRSTIECGSIDKVVYSGNSGGPLINSNQHVVGVIRRGAAGDPEGTNEFVCASEVANVLTQYLSTLVVAPERV

SEQ ID NO: 611 - protein, 576 aa, Pseudomonas viridiflava
  source 1..576: note = Related to NZ_UWFG01000172.1
MDEGSSVDESLRLTSESDVDDLANILGTTYPKIKYFYYSRRVASHYSTFSIPKKSGGKRQILAPDNHLKVLQKRLARQLSFLYKPNPRATAFLSNSSIVRNASFHTRKKFVFNIDLKDFFPSITFARVRAMLISKPYSLTPETATVIAHLATVDGKLPQGSPCSPVISNMICASLDTQLRTLAKKHKASYTRYADDITFSFYVPMLYLPEDIVVLDDNEGGKTHHVVSVGPVLSEIISKKGFKINSKKVRLQRRDEKQVVTGLVVNQKVNVDRRYIRKTSAMIHSLFTIGVDKANIIHKAKSPESSSELSAHVFGRLLFIHQVKGVDSPVYRRLAMRFNQLETPYKAPLAKFVEVHEDAGMKHNQLNIRRCWVIENEQWGTQATGFMLENNLMITCAHAFNYKLSDKIDSDIEYAIENNCDEVLFKDCVVYRVNERAKKYSAKAIFLDKHRDLAIVSIDQTDERFEFFRLEENLEVEIGDKVSVLGFPNFKIGSTDVCRFWAAVSGKYIRSTIECGSIDKVVYSGNSGGPLINSNQHVVGVIRRGAAGDPEGTNEFVCTSEVFKVLKEYQSTLVVG

SEQ ID NO: 612 - protein, 576 aa, Pseudomonas synxantha
  source 1..576: note = Related to NZ_CM001514.1
MDEGSSVDESLRLTSESDVDDLANILGTTYPKIKYFYYSRRVASHYSTFSIPKKNGGKRQISAPDNHLKVLQKRLARQLSFLYKPNPRATAFLSNSSIVRNATFHTRKKFVFNIDLKDFFPSITFARVRAMLISKPYSLTPETATVIAHLATVDGKLPQGSPCSPVISNMICASLDTQLRTLAKKHKASYTRYADDITFSFYVPMLYLPEDIVVLDDKEGGKTHHVVSVGTVLSEIISKKGFKINSKKVRLQRRDEKQVVTGLVVNQKVNVDRRYIRKTSAMIHSLFIIGVDKANIIHKAKSPESSSELSAHVFGRLLFIHQVKGVDSPVYRRLAMRFNQLETPYKAPLAKFVEVHEDAGMKHNQLNIRRCWVIENEQWGTQATGFMLENNLMITCAHAFNYKLSEKIDSDIEYAIENNCDEVLFKDCVVHRVNERAKKYSAKAIFLDKHRDLAIVSIDQTDERFEFFRLEENLEVEIGDKVSVLGFPNFKIGSTDVCRFWAAVSGKYIRSTIECGSIDKVVYSGNSGGPLVNSNQHVVGVIRRGAAGDPEGTNEFVCTSEVFKVLKEYQSTLVVG

SEQ ID NO: 613 - protein, 531 aa, Pseudomonas sp.
  source 1..531: note = Related to NZ_RWIM01000011.1
MSAYYRSFSIPKKSGGVRTIFAPSNRLKVLQARLKVQLSNLYLPSPCAKAFLKDTSIVSNANAHIRKKFVFNLDLKDFFPTISFARVRGLLISKPYCLKPETASVIAHLATINGNLPQGAPCSPVISNMMCSSLDRELRALAIKHRANYTRYADDITFSFYTPMEYLPADIVIVNAGTLTSHHLATVGPELLKIISGKGFQVNFSKVRLQRQDEKQVVTGLLVNKKVNVERRYIRKVAAQIHSMMCIGLDAANAIHKANDPDANTTLEGHVFGKLLFIKQVKGVDSSVYRRLAMKFNQLDAPYKVPLAKLEEFSGDAGLKHNQLNIRKCWVLENEDWGTQATGFMLENNIMVTCAHAFNYKLNEDNDSDADYMFEHNVTEVWFEECVAYRANERSKKYAAKVLYMDRHRDVAIISIVDADRRFEFFRLEENIQVEVGDRVSVFGFPNQKPGSTDVCRFWADVNDRYVRSMIQCASIDKVMYAGNSGGPVLNLNQHVVGIVRRGAAGDPLGTNEFVCSSEIFKVLEDMNKVV

SEQ ID NO: 614 - protein, 555 aa, Pseudomonas syringae
  source 1..555: note = Related to RBNR01000201.1
MSKLDSAIDVDGLASLLGTSYTKLRHFYYKPDTSAYYSTFEIDKKSGGKRTIMSPEKRLKTLQSRLKVLLEGIYVAKKQVNAFVKDRSIVTNARAHTRKKFVFNIDLENFFPSITFARIRGMLMAKPYSLQSGVATVIAHLATVRGFLPQGSPCSPILSNMICSSLDRQLLTLAKKHRGEYSRYADDMTFSFYDDLQFVSEEIVRCLKGDGLSNHYHCRVGFYLESVILKSGFKINESKVRLQGRYERQIVTGLVVNKKVNIERQYIRKTSAMIHSMSSDGLDFAREKFKSKAKESSVMLDAHLQGRLLFIKQVVSVDSPVYKRLAKKFNLLGLKYKVPLGKSKNIRGAESRRYSKWYDDRCWVIESELTTADVYDCAQGTGFVIKDGYVITCAHVVKFNGVIANEIQLFRVSSRGDVCKASVVMCDEDRDLAILRILDPALQDLPYFDLSDTSADIGDGVDVLGFPNDKLGATHVGRQKVSVRNKFSISAVTFCQIDKELYAGNSGGPALNEDGDLVGVVTAGNDGDGYNDHSRFVCISELKKVLHLLIGVKDA

SEQ ID NO: 615 - protein, 558 aa, Pseudomonas karstica
  source 1..558: note = Related to NZ_WLYI01000015.1
MKLDSTLSVDGLASLLGTSYIKIKHFYYKPNTSAYYSTFEIDKKSGGKRKIMSPEERLKTLQRRLKLLLEGVYVSKKQVNAFVKDRSIVTNAKSHTRKKFVLNIDLEDFFTTITFARVRGLLIAKPYALQPSVATVIAHLATVHGFLPQGSPCSPILSNMVCSSMDRQLLSLAKAHRAEYSRYADDISFSFYDNLQFISEDIVETVKSDGLHNHYQCQTGQALESIILRSGFKINESKVRLQGRYERQVVTGLVVNKKVNVDRQYIRKTSAMIHSISTDGLALAREKFKSKVKDSSVMLDAHLQGRLLFIKQVVTVDSVVYKRLAKKFNLLEIDYKVPLGKSKSVRGLESRRYSKWYDERCWVIESELSTAEEFDCSQGTGFAIKGGYIITCAHVVKLKGGIANDISLCRVSKRGEVYKASVIVCDDNRDLAVLKIVEPALAILPYFDMSETIADIGDGVDILGFPNDKLGATHVGRQKVSVRNKFAISAVTFCQIDKELYSGNSGGPALNDDGDLIGVVTSGNDGGGFNDHSRFVCISELKKVLQDLVVAANEQALA

SEQ ID NO: 616 - protein, 574 aa, Pseudomonas benzenivorans
  source 1..574: note = Related to NZ_FNCT01000024.1
MSKLKLCKSVDELAALLGTTYGKIRYFYYLHPTSESYSTFEIKKKSGGVREISAPSDKLKTLQGRLKVFLSEIYEPKKYVTGFVNGKSIVANAKPHTRKKFVFNLDLQNFFPSITFARVRGLLISKPYSLNSSVATVIAHLVTVNGKLPQGGPCSPVISNMICSSLDRKLKTLAVKNRAEYTRYADDITFSFYDDLEYVASDIVQILKGDELPNHYFARCGRSLERLIIDAGFKVNYLKVRLQGRYERQVVTGLVVNKKPNVNRQYVRKTGAMIHSIETKGLEEARRIHSEKIIKQEKKSGSGKEEEIKVPPVEAHIQGRLLFLKQVVGLESQVYRRLALRFNLLRLKYRVPLGVSKNKFSEDFRKFTKWYDSKCWVVEVEGEIRGEFECGQGSGFMISDQVLVTCSHVLDLKGVKLDEATVYQASSRSRSYKANLLYRDDHRDIALLKISVDKSEFDYFDLETSVLADVGDEVSILGFPQDKLGAQSAGNQTAFVRNKFPISGVGFVEVDKELYAGNSGGPVLNQDSRVVGIVGVGNDGEYCDHSRFICVSELLKVLERFKAASVDKSKLEPA

SEQ ID NO: 617 - protein, 566 aa, Pseudomonas fluorescens
  source 1..566: note = Related to NZ_CABVIZ010000005.1
MTKLNSTTDVDGFAALLGTSYQNIRYYYYSKPMSLYYNSFEIPKKNGGVRVIMAPSEQLKTLQDRLKVLLDELYTPKSSATAFIKGRSIVDNAKQHTRKKYVFNIDLSDFFTSITFPRVRGLLMAKPYSLQSGVATVVAHLCTVSGVLPQGSPCSPVISNMICSTMDRQLKGLAIRNRARYSRYADDITFSFYDDIKYISGELVACLKGDDLPNHYFSRCGKVLNSIIESCGFKVNSSKVRLQSRYERQVVTGLVVNKKANVERAYIRQTSAMIHSIEKNGLAFARQRFSEKNPPDPKSGTKLVLDAHLHGRLLFIKQVVSIESEVYRRLAMRFNFLDLNYKLPLGVSKNHRGIEFRKSTPWYDKRCWIVDTEFDLVFGQGSAFFVNDEFLITCSHVSEFDGCFVDVAEVYRAGSRGDKYSAKVVYRDVARDIAILIIDTDRPLAFETFDVATKMADVGDVLSVVGFPKDKLGAQHAGRQSVEVRNKFASSGVKYFEVDKELYAGNSGGPVLDADNNVVGIVAKGNDGDYCDHSRFICISELASVLQGYEKQKHVAPVVELELEKA

SEQ ID NO: 618 - protein, 558 aa, Pseudomonas putida
  source 1..558: note = Related to NZ_CP061723.1
MSKLNSSIDVDELAGLLGTSYGKIRYYYYSKPIPDYYKTFEISKKSGGVRVISAPHDQLKVLQERLKILLDELYTPKSSAMAFIKGRSIVENAKQHTRKKFVFNLDLSDFFSSITFPRVRGLLMAKPYSLQSGVATVIAHLCTLNGILPQGSPCSPVLSNMICSGLDRQLKSFAIKHRARYSRYADDITFSFYDDLNYISPDMVSVLMGDGVSNHYYVKCGRPLVTIIESCGFGINLSKVRLQGRYERQIVTGLVVNKKVNVERSYIRKTSAMIHAIETKGLGFARERFAASNPPVDPDTGVQVVLDAHLHGRLLFIKQVVGVESEVYRRLAMRFNFLDLNFKLPLGVSKNRRGVEFRRSTPWYDKRCWIVETELDLEFGQGSAFFVADNVLVTCSHVSEFTGRFTSESEVYRANARGKKYNAGVVYRDKARDISILKLNDESLVFEKFEISTRLADVGDVLSVLGFPNDKLGAQHAGRQTVVVRNKFSMSGVQYFEVDKELYAGNSGGPVLDEDNNLVGVVAKGNDGHYCDHSRFICVSELLVVLEDYKKAILQVSV

SEQ ID NO: 619 - protein, 554 aa, Pseudomonas sp.
  source 1..554: note = Related to LKBT01000034.1
MTIPRLKACTNVDDLASILNTSYKKIAYFYYEVDYSKKRYYENFEIPKKNGNKRTISAPLAQLKNLQKKIAVLLGELYIPNPNAHGFIAEKSIITNAKIHTRKKYVFNVDLNDFFNTITFPRVFGLLTSQPYLINEKVASVIAHLCTLDGCLPQGAPTSPVISNMICQKLDRQLSRLAFTHRAVYSRYADDLSFSFYAPELHVSGEIVVFEQGAGNYYAKAGEQLNRIVNINRFSINPGKTRLQDRFERQTVTGLVVNKKINVPRQFVRKTCAMIHSIESFGLKTAQERFLIENPNSKSSIDNVIFGRILYMKSVVGYSSVVYKRVALRFNQLDLERKVPLSSSKDGKFSAKYLNWVNRRCWVIDNHETIEQGSGFMMAGNLLITCAHVVGNAKEIEVYRTCDTEKYKATVCYVSPDKAVDVAIALIQNPPTRFEEFHHKEETPNIEVGDLLTVLGFPKYKDDAKNVWINKASIVNQIKSSSSLIGYLDKELYGGNSGGPVLNEDGSLVGIVIKGNKDAEGIDDIYVDHSAFLHLSYVLACVKSLKEKYAADDI

SEQ ID NO: 620 - protein, 549 aa, Pseudomonas mandelii
  source 1..549: note = Related to NZ_AZQQ01000096.1
MSKLQECLNTQDLADALGTNYKKIAYFYYDVDYSKKSYYENFEIPKKNGGSRVIKAPVARLKNLQKKLSFLLDEMFVPHSCAHGFVKEKSIVTNAKNHSRKKYVFNIDLNNFFTTITFPRLYGLLISKPYSLNNDVASVIAHLCTVDGCLPQGAPTSPILSNMICRSLDRQLRRLARLHRADYSRYADDITFSFYAPESFVNESIVVFKDGSGNYFSSAGNTLKKIIDKNKFSINESKTRLQDRFERQLVTGLVVNKKLNVPRAFIRKTCAIIHSIENFGIASAQARYIKENPCSMARVENVIFGRILHIKNVVGFDSVVYKRIALRFNQLNINRKAPLSNGKNGVVSAKFCNWANRRCWVIENNDEISQGSGFMISENLLITCAHVIGSAKVVEVFRAGENIKYEAVVCYTSSDPHIDVAILKIKDAPAPFEEFHYKDEAEALNSGETLTILGFPKYKHDAKNVWINKALLINQVKTASSSYGYIDKELYAGNSGGPVLSENGALVGLVIKGNNDAAEVDDIYVDHSAFLSFSDVLTCVKALKAKYTM

SEQ ID NO: 621 - protein, 550 aa, Pseudomonas entomophila
  source 1..550: note = Related to NZ_CP034337.1
MNTPILQQCRSVDHLSAALGTNYKKISYFYYDLDSTKISYYEPFLIPKKSGGTRQILAPKPQLKNLQKKLQDLLEDLFKPHACAHGFISERSICTNATPHTRKKYVFNIDLQDFFSSITFARIFGLLISKPYSIEKSVASVVAHLCTVNGHLPQGAPTSPIISNMICRTLDRQLTLLAVANRAAYSRYADDITFSFYSPQEHTSSELVKFEKNSGNYFALPGEILSQIISRNKFKINPKKTRLQDRFERQIVTGLVVNKKINVRREFVRTTCAMMHSIESFGLASSQARYEIENPGSQSKVENVILGKILHIKNVASFASPVYKRLARRFNRLELSLKAPLSSTNEDNFDAKYCNWVNRRCWVIDNNDTISQGTGFMIQENFLITCAHVADGAKELEVYRACDETKYTAWVLGTYPQVDVAILKIQNSPGIFEEFHSRETPRKLNIGDNLHVLGFPKFKSNTKTVWINKAKLIGHTIVHNSNVNYIDKELYGGNSGGPVLDEDGALIGIVIKGNNDTDKVSDIYVDHSAFLDFQHVLDCLKLLKEKYSTT

SEQ ID NO: 622 - protein, 587 aa, Halomonas populi
  source 1..587: note = Related to RZHD01000010.1
MPITSAQIAASGTPLRLKCKLVMRKVKPKRRPMLDTKTTPHELAVLLGTTYSKLCYTLYKKHTDNLYKDFTIPKKNGGVRKISSPKPILKNLQSKLKLLLDDIYRPHPSASAFIANRGLIYNTTPHIKKALIFNIDLKSFYGSIHFGRVKGMLISKPYCLREDTAQLIAHICCYYKTIPQGAPTSTTISNMICRRLDRELSFLAKKNHAYYTRYADDLTFSFHKIKPNEICAFEDNIWKPSDRLINVISNNTFKINNTKTRGETSRCRQVVTGLKVNTKVNVDRRYIRTTKAMIHSLSLDIESANEYFSSIRKGENEATLETVVAGRINFIGMVKGTECSIYQTLAHKFNNLNIDLKVPTRSNIDTTSQNDNQLKTLEYRKQEKLKKCIWVVSFDGIEGIELDEQLTQGTAFMIKGQKLLTCNHTFEKAGNPSYCLIHRIDDSSIKYYARLVKVDKHRDVALLEIDSKDKVFFDHLEIYFNDDMHSGYKVNLAGFPEYRSGHRDVTVLPSTIIRHEVVSLVKHYSVNSELLGGFSGGPVLNLYNQVVGMVTKGRYISHDKDAGQSTLEGSNSFISAVEFEKFLGSSN

SEQ ID NO: 623 - protein, 546 aa, Halomonas sp.
  source 1..546: note = Related to NZ_JABUZC010000043.1
MLDSNTTPRRLAALLGTTYPNLCLTVYKVRPNNLYTTFKIAKKSGGVRTIAAPDKRLIYLQDKLKSLLEELYSPHPAATAFIKDRGIIYNASPHVGKALVFNIDLADFYGHINFGRVRGLLSAPPYNLRPDTSQLIATICCLNGSIPQGAPTSPVLSNMISRQLDRRLSLLAKKNHAFYTRYADDITFSFRNNNFEGVCFSVNGVFQPSSELIKLVEKSGFYLNKQKTRGEVSRSRQVVTGLKVNKKINVDRRYVRTTKAMIHALSGDIDTANVVFWQKFPEKEPKRLENVVAGRINFIGMIKGVNSRVYQMLAKKFNRLPLKQKLSTRTSKLVDTDQKYRDMAKQRELQKCVWILDFEGAPNVTDEAEFIQGTAFMVKGQQVLTCSHTFNKADDAEYCYISRIHERGVKYLMKVAKRCKHRDIAELEFVNEPNEIFQSLDIYHKEEMFPGYQVSLVGFPDYMSGHTTVSVINTSITSHVNISTVDNYEVDAEIGAGYSGGPVINDFHQVIGMIVSGRTTSVDFETQESALTGRNAFISAHHFLQF

SEQ ID NO: 624 - protein, 544 aa, Alcanivorax sp.
  source 1..544: note = Related to NYSM01000021.1
MISSKTTPRALAHSLGTTLPKLNYTVYKLGVSRFYNEFEIEKSDGGKRTINAPEGRLKIIQDRLKVLLDELYSPHPSASAYIKERGIVYNAKKHVKRKVVANIDLKNFFGTIHFGRVRGVLIAKPYCLRADTATLIAHICCLDGVLPQGSPASPVISNMISRRMDRELSLMAKKNRAHYSRYADDITFSFKSKKDTELFDFKNRSVGSKIVRCIEENGFSLNERKTRIQFSSERQTVTGLKVNKKINIDRRYIRETKAMVHSLSFGSLEANKKFIDKYGRDDAQLEDVVFGRVAYIGMIKGRDSSVYQGLARKFNNLDWDRKLSINPGKILKDLEWSGFAFKAEGYRARFEQCVWVVSFDGVKGLGLDEMLVSGSAFSLKGGRVLTAFHVFVKAGMPDYCYLYRINKPGKKYKAKIKSVYEDRDVLELKFDEEVENIRYLDVAPNKFPGTGYELAVLGFPQLHPGHQSLTILPCKVVNTYIGSTFRYCEVDAQISGGNSGGPVVNAYMQVVGMALRGVDVASHEDRVELEGSNAFISAEHFPSP

SEQ ID NO: 625 - protein, 544 aa, Marinobacter maritimus
  source 1..544: note = Related to NZ_VCGW01000002.1
MIQPTTSPSDLASLLGTTHSKLNYTLYSFPLEYSYTKFTIEKKNGSSRQIRAPNPKLKIIQKRLKNHLEKLYRPHSAATAFVAGRGIVDNAKRHIKRECVFNLDLDSFFDYIHFGRVKGLLVAPPYNLRDDTAKLIAHICCLNGRLPQGAPTSPLISNMVARSLDHKLSRLAKKYKARYSRYADDITFSFQKKTDGIIFHVDEGVVKPSVELVDIIENAGFLINIRKTRVQYYDQRQVVTGLKVNSVVNVDRRYIRTTRAMLFSLSQGVESANMKFFEKVGGDPERRLENVVHGRIAFIGMVKGRGGSVYQTLSQKFNDLGLDIQSPIGPAEIKDELEQKLHFYSYKNRARLQRCVWVVDFGGVPGLDMDQELVQGTAFMIGGQRILTSAHTFAKAGNPVQCKLYLVNEPGKKYSAEVVNINNNSDIAELKLINVDGSFPVLKVAPNLKTNTGYKVSIAGFPQLQPGHQSVAITPCTVINTLNISSHRYIEVDTPIQGGSSGSPVLNVYMQVVGMAAMGVSVTKDGEDVQLEGTNAFVSAVHFP

SEQ ID NO: 626 - protein, 585 aa, unidentified
  source 1..585: note = Related to nan
MNNKPSLSLFDDPQVASFLAANTKMELAAAINEPYRRFTYLLFAIDPDRQYKSFDIAKGNGKSRIIDAPVTALKNIQKKICAILSKIYVPPYPANAFIFGRSIVTNAIPHVKAKSVLKLDLQDYFPSIHFGRVRGLFMAPPFSFNQDVATTLARACCKGGCLPQGAPTSPILSNMISLKMDAQLNRIAKSNRCNYSRYADDITFSSTKDIFPLVVTNAKGLYEPAQEITDCILRNGFAVNTYKTKFMVGRDSKFVAGIKVNSKINTSRKHVRAVRAMLHALEKFGPEASVAEHLRRWRRRHTISSPTNFLQILKGKISFIRMVKGGGDLSVVRLENRLDEWMSLYSGAQVDVRRVETLIAQDDTYHAVVYTEGKTDALHLRYALKRLQKLSLYNNMKLIFYDFPPDTTSGETELKKILGTAKVANNTGKLKIVIFDRDVTGDVGDSRRPKYWGSNVWSFKLPCPGPRTLYENVISIEHYYPDKILFKQDNEGRRLFFVDEFDANTLAHKSIAGVICRKDVIGKKRPGVVICEGVRDQQGKSLTLSKSDFSKNIARGQFFVSDTEMLEFKPVFSAIERLIKKNHYC

SEQ ID NO: 627 - protein, 353 aa, Nostoc parmelioides
  source 1..353: note = Related to JACJQL010000002.1
MKDSSKLVLTDTPESLREKFYSLKQASDIADLLGVSYPRLVYHIYVVDPNQRYTTFEIAKKSGGVRQISTPITALKIIQRKLNQVLQAVYEIKPSVHGFVMGKNIVTNAQAHAKKRYVFNIDLKDFFPSINFGRVRGMFMATPYGLHPEVATVLAQICCHNNQLPQGAPTSPIITNMICAKMDSQLQRLAKECKATYTRYADDITFSTTLPKFPRDLAYIVNDENEEKLNVGDTLIQIISENGFEVNESKVRLQIKGNHQEVTGLTTNIFPNIDRNYIRQVRAMLHAWAKFGLEDAEKEYQRKHEFRSRFNQKEQHSFKQIILGKIEFIGMVKGKNDTIYKKYMQQYKILASL

SEQ ID NO: 628 - protein, 338 aa, Nostoc parmelioides
  source 1..338: note = Related to NZ_JACJQL010000002.1
MREKFYSLKQASDIADLLGVSYPRLVYHIYVVDPNQRYTTFEIAKKSGGVRQISTPITALKIIQRKLNQVLQAVYEIKPSVHGFVMGKNIVTNAQAHAKKRYVFNIDLKDFFPSINFGRVRGMFMATPYGLHPEVATVLAQICCHNNQLPQGAPTSPIITNMICAKMDSQLQRLAKECKATYTRYADDITFSTTLPKFPRDLAYIVNDENEEKLNVGDTLIQIISENGFEVNESKVRLQIKGNHQEVTGLTTNIFPNIDRNYIRQVRAMLHAWAKFGLEDAEKEYQRKHEFRSRFNQKEQHSFKQIILGKIEFIGMVKGKNDTIYKKYMQQYKILASL

SEQ ID NO: 629 - protein, 401 aa, Anabaenopsis elenkinii
  source 1..401: note = Related to NZ_CP063311.1
MISVVDPATVYFTVSFNPDVHPDNCFILSRISENIPASDIFLLSTTDKVPKKSHLFLQRSPELLREKFYSLKQPVEIADLLEISYSRLIYHIYLVTPEERYKSFGIPKKSGGIRQITTPITALKIIQSKLNQVLQAVYDIKPSVHGFVMGKNIVTNAQAHVKKRYVLNIDLKDFFPSINFGRVRGMFMATPYGLHPEVATVLAQICCHNNHLPQGAPTSPIISNMICGKMDSQLQRLAKDCKATYTRYADDITFSTTLSQFPRDLAYITNDEDGEKLVIGNSLLNIINTNGFEINQSKVRLQTRGNHQEVTGLTTNVFPNVDRTYVRQVRAMLHAWAKFGLEAAEKEYLSKYEFKNRLPQKAKPTFKQVLRGKIEFIGVVKGKDDTIYNKFITQYNILKKW

SEQ ID NO: 630 - protein, 377 aa, Trichormus sp.
  source 1..377: note = Related to NZ_LZQD01000011.1
MQKNSKLFLTETPEALKEKFYSLKKPTDIADLLEVCYSNLIYHIYVVKPEKRYKIFDIPKKSGGIRQISTPITALKIIQRKLNQVLQAVYETKPSVHGFVSSRNVVTNAQNHVKKRYVLNIDLKDFFPSVNFGRVRGMFMATPYGLHPDVATVLAQICCYNHELPQGAPTSPIITNMICAKMDGQLQRLAKECKATYTRYADDITFSTSLSKLSKDLAYIVNEEDQEKLIIGDTLFKIIKQNGFELNDNKVRLQTRGNHQEVTGLTTNVFPNVDRNYVRQIRAMLHAWSKFGLEAAAKEYSIKYESKSRLINNEKLEFKPVIREKIEFLGIVEGKKDQLKFKKVIRGKIEFLGMVKGKNDPVYQKYFNIYQQLIKSV

SEQ ID NO: 631 - protein, 330 aa, Nostoc calcicola
  source 1..330: note = Related to JACJRQ010000001.1
MDIADLLEVSYSRLVYHIYLVEPDKRYKTFEISKKSGGIRQISTPITALKIIQKKLNQVLQTVYEIKPSVHGFVTGKNIVTNAQAHTKKRYVLNLDLTDFFPSINFGRVRGMFMATPYGLHPDVATVLAQICCHNNQLPQGAPTSPIVTNMICAKMDSQLQRLAKEYKATYTRYADDITFSTTLPKFPEELAYIVAEEDVDTVFIGNRLLSIINDNGFEVNNHKNRLQVKGNHQEVTGLTTNLFPNVDRKYVRQVRAMLHAWAKFGLEAVEKDYQDKYESKSRLSTKGEPNFRQVLRGKIEFIGMVKGIDDSIYQKYLKQYQLLSTLVIS

SEQ ID NO: 632 - protein, 330 aa, Nostoc sp.
  source 1..330: note = Related to JACJSJ010000006.1
MDIADLLEVSYPRLVYHIYLVEPDKRYKTFEIPKKSGGIRQISTPITALKIIQKKLNQVLQTVYEIKPSVHGFVMGKNIVTNAQAHTKKRYVLNLDLTDFFPSINFGRVRGMFMATPYGLHPDVATVLAQICCHNNQLPQGAPTSPIVTNMICAKMDSQLQRLAKEYKATYTRYADDITFSTTLPKFPEELAYIIAEEDVEKIFIGNRLLSIINENGFEVNQEKVRLQSRDDHQAVTGLTTNQFPNIDRKYVRHIRAMLHAWSKFGLEAAEEQYLTKYENKSKLPIKDNPTFHQVLRGKIEFISMVKGKDDPIYRKYIKQYKNLVSFSRI

SEQ ID NO: 633 - protein, 362 aa, Cylindrospermum stagnale
  source 1..362: note = Related to NC_019757.1
MQKDSHLILTDSPETLRERFYSLTKPIDIAHLLGISYRRLVYHIYLVEPEKRYKTFDIPKKSGGIRQISTPITALKLIQRKLNQVLQAVYQTKPSVHGFVSGKNIVSNAQAHAKKRYVLNLDIKDFFPSVNFGRVRGMFMAKPYNLHPDVATVLAQICCHNNQLPQGAPTSPIITNMICAKMDSQLQRLAKDCKATYTRYADDMTFSTTLPKFPEELAYIVAEEECKKIVIGNRLTAVINENGFEVNQQKNRLQVKGNHQEVTGLTTNLFPNVDRKYVRQVRAMLYAWAKFGLEAAENEYFEKYLFKSRLPIKKDLKFQQILRGKIEFIGIVKGKNDFIYQKYSNQYKILTKLSISNKIRED

SEQ ID NO: 634 - protein, 362 aa, Richelia sp.
  source 1..362: note = Related to CP021056.1
MQKGSNFILKYKPEFLAEKFYALKNPMDIADLLGISYGRLVYHIYVIESENRYKIFDIPKKSGGIRQISTPITALKIIQQKLNQVLKTVYKPKASVHGFVSDKNIVTNAQAHTKKRYVLNIDLKDFFPSMNFGRVRGMFMATPYNLPPDVATVLAQICCHNNQLPQGAPTSPIITNMICAKMDSRLQRLAKDCKATYTRYADDITFSTTLPQFPNDLAYTGTEEDTEKILIGNRLLAIIHENGFEVNEQKIRLQVKGNHQEVTGLTTNIFPNVDRKYVRQIRAMLYAWAKFGLEAAENEYFEKYVSKSRLSIKPKLEFQQVLRGKIEFIGMVKGKEDSIYQKYMNQYKILARLSIVNKNSED

SEQ ID NO: 635 - protein, 330 aa, Anabaena sp.
  source 1..330: note = Related to JADEWB010000105.1
MDIADLLEISYSRLIYHTYIVYPERRYKTFEIPKKSGGIRQISTPITALKILQRKLNQVLKAVYEPKASVHGFVTGKNIVTNAQAHVKKRYVLNIDLKDFFHSINFGRVRGMFMATPYGLHPNVATVLAQICCYKNQLPQGAPTSPIITNMICAKMDGQLQRLAKTYKLTYTRYADDITFSTTLPHFPRELAYILTEEDNEKIVIGDNLLRIIHENGFEVNEQKIRLQVKGNHQEVTGLTTNVFPNVDRKFVRQVRAMLYAWAKFGIESAESEYLTKNRYESIFPGKEKPTFQQALRGKIEFIATVKGKNDPIYRKYLSIYKQLIKPESV

SEQ ID NO: 636 - protein, 359 aa, Dolichospermum sp.
  source 1..359: note = Related to JACGCP010000001.1
MQQDSQLLLKLTSETLREKFYDLRRVLDIAELLEVSYDHLVHHIYLIESEHRYTTFEIPKKSGGIRQISTPITAIKIIQKKLNQVLQAVYQTKPSVHGFVNGKNIVTNAQSHCKKCYVFNIDLKDFFPSINFGRVRGMLMATPYNLPPDVATVLAQICCYNNQLPQGAPTSPIITNMICAKMDSQLQRLAKDCKATYTRYADDITFSTTLPKFPNKLAYVLTGEDTEKVFIGNRLLAIIHENGFEVNEQKIRLQVKGNHQEVTGLTTNLFPNVDRKYVRQVRAMLYAWAKFGLEAAENEYFDKYVSNSRLPIKQKLKFKQVLRGKIEFIGMVKGKEDSIYQKYINQYKILRNKKSTNSY

SEQ ID NO: 637 - protein, 373 aa, unidentified
  source 1..373: note = Related to LWHC01000033.1; note = Cyanobacterium sp. IPPAS B-1200
MTINFPQGQLISPPWDKKSLLLLNRSPEELKNDFYQLKTPLDVAKLLNIPHKRLVYHLYLVDSQRRYKTFTIPKKSGGQRQISTPITALKIIQQKLNQVLQAVYQVKPSVHGFVQDKNIVTNAKAHAKKRYVLNLDLENFFPSVNFGRVRGMFMAIPYHLPPDVATILAQICCQNNELPQGAPTSPIVTNMICGKMDSQLQRLAKDCKATYTRYADDITFSTTLKNFSTDLAYVVNEGEAEKVVLGDLLSGIIRENGFNVNEKKTRLQTKGNHQEVTGLTTNQFPNVDRRYVRQVRAMLHAWAKFGLEAAQKEFEEKYNHKARFSGKQIPHFQDVLKGKVEFIGMVKGKDDLIYQKYINEYKQLLNLNFPKNI

SEQ ID NO: 638 - protein, 369 aa, Geminocystis herdmanii
  source 1..369: note = Related to NZ_CM001775.1
MTINLPQWQLIFPHLHNQNPLLLQDSPEELSKKFYELKTPLDVAKLLNIPHKRLVYHLYLVDSQKRYKTFTIPKKSGGERQISTPITALKIIQQKLNQVLQAVYQVKPSVHGFVQDKNIVTNAKAHVKKRYVLNLDLENFFPSVNFGRVRGMFMAIPYHLPPDVATVLAQICCHNNQLPQGAPTSPMVTNMICAKMDSQLQRLAKDCKATYTRYADDITFSTTLKDFPPHLAYIVDYGNNEKVMLGESLLNIIRENGFSVNEKKTRLQTKGNHQEVTGLTTNQFPNVDRRYVRQIRAMLHAWAKFGLESAQKEFEEKYHHSARFSGKEIPRFQDVLKGKIEFIGMVKGKDDSIYQKYISQYYQLLKIYF

SEQ ID NO: 639 - protein, 374 aa, Halothece sp.
  source 1..374: note = Related to NC_019779.1
MVINLPQGQLIEKKRSKREQKSSLLLLKKSPEELRTKFFELNSPRDVAKLLGISYGRLVYHIYIVSEANRYKTFEIPKRSGGVRQISTPRTALKIIQWKLNQVLQAVYKPKPSAHGFVPNKNIVTNAQAHSKKRYVLNLDLKDFFPSVNFGRVRGMFMGTPYSLNANVATVLAQICCHNNQLPQGAPTSPIITNMICAKMDSQLQHLAKSCKATYTRYADDITFSTTLKQFPESLARVITEEGEERVILGEPLLGIIAENGFEVNEQKIRLQTKGNHQEVTGLTTNQFPNVDRRFVRQIRAMLHAWQKFGLEAAEAEHRERYRNKANFPGKSESNFKEVLRGKIEFIGMVKGRNNEIYQKYLQWYVKLLKFGSN

SEQ ID NO: 640 - protein, 367 aa, unidentified
  source 1..367: note = Related to PXPI01000109.1; note = Cyanobacteria bacterium SW_9_44_58
MVINFPKGQLIPENSNIKSKSYAHLLLKDNPETLREKFFSLSTARDLAKLLNVEYRRLVYHIYIVPPSKRYKTFELPKNSGGTRQISTPQTALKIIQWKLNQVLQTIYEPKPSVHGFVSGKSIVTNAQAHAKKRYILNLDLKDFFPSINFGRVRGMFIAAPYGLTPEVATVLAQICCHNNQLPQGAPTSPIITNMICAKMDSQLQQLAKACKATYTRYGDDITFSTTLKEFPESLAKVVTEEGKEKVALGEPLLGIIAENGFQVNENKIHLQAKGNHQEVTGLTANKFPNVNRKFVRQVRAMLHAWAKFGLEAAEKEFQEKYASKSRLPSKSTASFKEVLRGKIEFIGMVKGKEDKIYSKFIDKFNI

SEQ ID NO: 641 - protein, 376 aa, Synechocystis sp.
  source 1..376: note = Related to NZ_CP063659.1
MLNSAVQEKINIHPLDHQAQIKERFTLPGSPEELRQKFLALQTPDDLASLLNLTYPRLAHHIYRVPSDKKYKTFTLPKKMGGERTISTPISALKIIQWKLNQILTAVYEVKPSAHGFVPGKNIVTNAKAHAGKRFVLNLDLADFFGSVNFGRVRGLFMATPYNLPAKVATVLAQICCHEDKLPQGAPTSPIITNMLCAKMDSQLQRLAKECRATYTRYADDITFSTTLKEFPEALAYAIETEDGDKLLLGDRLLGIITENGFKINEKKVRLQVRGNHQEVTGLTTNEFPNVKRTYVRQIRAMLHAWAKFGLEAAEKEYYQKYEEKVKFSLKKKASFSQVVKGKIEFLGMIKGKDDDLYQKMLKSYLKLKKSAPVTN

SEQ ID NO: 642 - protein, 374 aa, Synechocystis sp.
  source 1..374: note = Related to NZ_CP054306.1
MLSSVIENKVIVHPLDRQAQAKERFVLPGSQTELRQKFLKLQTPDDVARLLNLDYRRLAHHIYHVPTEQKYKTFTLPKKTGGERTISTPVSALKIIQWKLNQLLTAVYEVKPSAHGFVQGKNIVTNAKVHAGKRFVLNLDLADFFGSVNFGRVRGLFMATPYNLPAKVATVLAQICCHEDKLPQGAPTSPIITNMLCAKMDSQLQRLAKECRATYTRYADDITFSTTLKEFPEALAYAVETEDGDKLLLGDRLLNIIADNGFNINEKKVRLQVRGNHQEVTGLTTNEFPNVKRTYVRQIRAMLHAWAKFGLEAAEKEYHERYNFKARFALKEEASFKQVLKGKIEFLGMVKGKKNLAYNKFLKSYYNLTNFGKK

SEQ ID NO: 643 - protein, 339 aa, Synechococcus sp.
  source 1..339: note = Related to CP000955.1
MQTPQNVAVLLDVEYDKLIYHIYSSNVDERYKKFEVYKKSGGIRTITTPVTSLKFIQWKLNQVLNAVYQPKPAVHGFTLNKNILTNAQAHVGKRFVLNLDLEDFFPSINFGRVRGLFMAPPYQLPAGVATVLAQICCYDNQLPQGAPTSPIVSNMICAKMDTQLQRLAKECRATYTRYADDITFSTTLREFPEDLAYPVKTEEGTQFVLGDHLLQIIAENGFKINNQKTRLQTKGSHQEVTGLTVNQFPNVKRTYVRQIRAMLYAWEKFGLQQASQEYYFFYKDYNRLPLKFNNKSSEDDFVQVIKGKIEYLGMIRGKQDSIYRKYISKFNYLKNYNGR

SEQ ID NO: 644 - protein, 371 aa, Synechococcus sp.
  source 1..371: note = Related to NZ_JALAAD010000001.1
MESNLPEHQAVNPESSKRSFQRKKGCLNLTQTPEELRAAFLALKTPRDIARLLNVRYDRLVYHIYKVPLENRYTTFEIPKKSGGTRTISAPVTALKLIQRKLNQVLQAVYEPKPSVHGFTPGRNIVSNAKPHVKRRYVLNLDLKDFFPSINFGRVRGMFMGIPYHLPEPVATVLAQICCHNNQLPQGAPTSPVITNMLCAQMDSRLQRLAQKLKCTYTRYADDITFSTNMPEFPADLAIEVTTDEGTRIKIGEPLRQIIESSGFLINDKKVRLQKRGHHQEVTGLTTNEFPNVDRRYVRQIRAMLHAWRKYGNQNILSVTSKSNHPISYESFDNFKQVLRGRIEYVGLVRGKEDPIYIKFLNQLKMFEEVF

SEQ ID NO: 645 - protein, 371 aa, unidentified
  source 1..371: note = Related to RFIJ01001009.1; note = Bacteroidetes bacterium
MRDRLKGTPDQLREAFLKLRSPRDVAELLDVRYDRLVYHIYVVPEAKRYTVFHIPKKSGGQREILAPATPLKLIQKKLNQVLQAVYQPKPSAHGFLPARNIRTNAEPHAGKRYVLNIDLKDFFPSINFGRVRGLFLSKPYNLPDEVATVLAQIACYTHPEDTWQHNGKVVRRSYLPQGAPTSPIITNMICAGMDAELQRLAKRCRATYTRYADDLTFSTTLRTFPEDLAQVVDDTEGRKRVFLSETLRSIIEKHGFEVNDKKVRLQDRRFRQEVTGLTVNEFPNVRRSFVRQVRAMLHAWDKYGLEQAEREYRVKYESKHRGPYHAAPSFAHIVRGKLEFIGMVKGKGDPVYLKYLGHYYSLIERDKLASK

SEQ ID NO: 646 - protein, 753 aa, Nostoc sp.
  source 1..753: note = Related to AP018322.1
MSLYDFSPELVAKTIGVDYHSLIELLEQVDEIYRDFKIPKKSGGVRTIRTPRSTEYEDGDITLLDIQKKISKEILQPVYQPKPCVHGFTAKKSIVTNAKAHTKKKYVLNLDIQDFFTSIKFERVRKMFMAQPYNANDEVANLLAQICCYEDQLPQGAPTSPIVSNMVCAKMDGQLLDIARQYKATYTRYADDITFSTNLEEFPEALGYVVNEGSIRRFFVGHELQEIFNSNNFEVNERKVRLQTQNCRQEVTGLTVNHFPNVNRQFVRQIRAMLYAWQKFGINNAASEYISKYGRYGEFYKIILNYKSGVEAKRFHHVLRGKIEFLGLVRGKNDPIYKKYLAQYKRLLYEEIAQEPRLPSVLKTKGWQEGRLSLNNHDWNANIRKRGLLLPNYIKTSYLLSVLTSLYTGQIVLLNGSVGIGKTSLVEKSAKIFNGNSKIIPVRPAWTDSTDLLGFYNPVNDSFHPSIFLTALQQASENFEQIFLVCLDELNLAKIENYAADLLSCLEYSKTGQGAQKLILYSPSIEVQIRQEIKLLQSQKSKTFEQSNRLAKLQNLLNTYPAEFLLPKNLVLIGTLNSDETTYDISPKVIDRSFVITYPLPDFAEDTKATPSSNPITGTYIPSLFQELDNKILQAHSSSDEFNDSWYTLLNWNSRYLSQCGIPLGYRVKRDYKVFYAASQIIGLTVEECLGYFLFTKLMPRLSFFKDESRENICLEWLEEIENNYSQFGTPDVIENLRNQIQDIRRRNVRYWG

SEQ ID NO: 647 - protein, 753 aa, Merismopedia glauca
  source 1..753: note = Related to NZ_PVWJ01000139.1
MSLYNLSPELVAEQLGVNYHSLIELLQQLDEIYRDFVIPKKSGGVRTIKTPMSIREIIRGYEDGYFPLLDIQKKLSKEILQPVYQPKPCVHGFTAKKSIVTNAKAHTKKKYVLNLDIQDFFSSINFERVRKMFMAQPYNANDEVANLLAQICCYEDLLPQGAPTSPIVSNMVCAKMDSQLLTLAKKYKATYTRYADDITFSTNLDEFPEALGSVADEGGIRRFVVGEELREILNSNNFEVNERKVRLQTQNSRQEVTGLTVNRFPNVDRKFVRQIRSMLYAWQRFGIEQAAGEYSSRYDKKYKYLINRSGEEAKRFHHVLRGKIEFLGMVRGKNDPIYKKHLAQYKRLLYEELAQKPRLSSSLKTKGWQDRVSLNNQDWNTHIRVAGLLLPDYIKTSYLLAILTSLYTGQIILLNGSVGIGKTSLVEKSAEILNGNSKIIPVRPAWTDSTDLLGFYNPVNDSFIPSSFLTALQKASENFEQFFLVCLDELNLARIENYAADLLSCLEYSKSGQQAQKLILYSPSIEVQIRQEISLLQSQKTKTSEQSNRLAKLQNLLSTYPAEFSIPKNLVLMGTLNSDETTYDISPKVIDRSFIITYPFPDLAGDTNATPSNNPITGTYIPSLFKELDNKILQERSTNDEFNESWYIISNWNSRYLSQCGIPLGYRVKRDYKVFYAASQIVGLTVEECIGYFLFTKLIPRISFFKDDSRENICLEWLEEIENNYSHFVTPDVMGNLRNQIQDIRRRNVRYWG

SEQ ID NO: 648 - protein, 757 aa, Dolichospermum flosaquae
  source 1..757: note = Related to NZ_CP051206.1
MNLKDLYCLSPELVAEKLGVNYHSLIELLEQVDEIYREFKIPKKSGDVRTIRTPISSSERYKIYEGEGYFPLLDIQKKLSKEILQPVYQPKPCVHGFTAKKSIVTNAKAHTKKKYVLNLDIQDFFASINFERVRAMFMAQPYNANDKVANLLAKICCYKDQLPQGAPTSPIVSNMVCAKMDRQLLELAKKHKATYTRYADDVTFSTNLEEFPEALGYVINDGSVRKFVVGEELREIINSNNFEVNERKVRLQTQNYRQEVTGLTVNHRPNVNRKFVRQIRALLHAWQKFGIEKAADEYSSRYDKKYKYLKIRSSENTKRFHHVVRGKIEFLGMVRGKNDPIYKKYLSQYKRLIYEELAQEPKLSFVLKTKGGKERVSLNYQDWNANIRARGLLLPNYIKTSYLLSVLTSLYAGQIILLNGSVGVGKTSLVEKSATILNGNSKIIPVRPAWIDSSDLLGFYNPVNDSFNPSSFLTALQQAQEKFEQFFLVCLDELNLARIENYAADLLSSLEYSKSGQGAQKLILYSPSIEVQIRQEIKLLQSQKSKTSEQSNRLAKLQNFLNTYPAEFSIPKNLILVGTLNSDETTYNISPKVIDRSFVITYPLPDFAEDTNATPSSNPIAKTYIPSLFKELDNKILQADNSNDEFNDSWYTISNWNSLYLSQCGIPLGYRVKRDYKVFYAASRIIELTAQECIGYFLFTKLLPRISFFKDEERENICLEWLEEIENNYSHFGTPDVIENLRNQIHDTRRRNVSYWG

SEQ ID NO: 649 - protein, 581 aa, unidentified
  source 1..581: note = Related to JACRMK010000078.1; note = Chloroflexi bacterium
MSILLESADTTLRERFHNLRDFADLADLLEIKKSLLYYYAFKARGVDHYKVFQVPKKSGGTRQICSPSSPLKLIQRKLNQIFQSVYVPKASVHGFVKDRSIVTNARRHIDGTPRKRYVLNIDIADFFPSITEGRIKGLLMATPYNLPRDLAHVIAGLVCLDGRLPQGAPTSPVLSNMICARMDTQLRRLAQKYRCVYTRYADDITFSTSLPRFPAGLATGNDTNRQIVVGDELASVISGNGFAVNQKKVRLRSKDNRQEVTGLTINRFPNVTRSYVRQIRAMLHSWERYGYENANHEYAQKYFAGDEDKAPSLRQVLYGKMEFLRMVRGSDNSIFLSFREKLRRIDPEYKPLELTPINASIPIYVVTEGKTDWKHLKAALHRLKEQGLFIGLEIEFWEYEDDVSMNDAELLKRCKYKDDIDLPKLYIYVFDRDKPDIVRQVTGTDGDFKQWRRRLYSMAIPVPAHRVGNPDLCIELLYDDDSVKQKDSHGRRLFLSSEFDKHSCRHLTEDLNCTDNNKVKQPLAIIDNAVFDSNRKNVALSKSEYATNVLTKVPGFTTFDVAAFKLVFETLERIIKYDNQH

SEQ ID NO: 650 - protein, 382 aa, Leptolyngbya sp.
  source 1..382: note = Related to NZ_NKFP01000006.1
MFRSRIKRSSTLLLCKNCDELKQEFLSLKTAKDIATLLEVPYYQLAYHLYKVAENEKYREFSIPKKSGDSRTITAPAKALKILQRKLSQVLYSVYEPKKPVHGFVPARSILTNAKQHSHKRFVLNIDLKDFFDSIHFGRVKGIFIKPPCNLPEEVATILARICCHSGKLPQGAPTSPVVSNMVCARLDRQLRLLAEEFRCTYTRYADDITFSTTMSDFPKEIAFANPEGDNLESLLGERLILTIWDNDFEINENKIRLQHKGQHQSVTGLTVNQFPNVKRAYVRKISSMLHAWDKFGLASVQQRYVEKHYKESGKFNKEIPSFQEVLRGKINFLGMIRGKDDEIYRKYLTWYRNLSVREIPIDLSQLDSKTQPSQSHPTDRG

SEQ ID NO: 651 - protein, 337 aa, Myxacorys chilensis
  source 1..337: note = Related to JAHHHP010000108.1
MKTPKDVARLLEVTYDRLVYHLYISSENTKYIEFSIPKKSGDSRTITAPSTALKILQRKLSQVLYSVYKPSDSVHGFVAGRSILTNAKQHLRKRFVLNIDLKAFFDSIHFGRVRGIFIAPPYNLPKEVATVLAQICCHSNKLPQGAPTSPIVSNMICVRLDRQLRLLAKKYKCTYTRYADDITFSTTLPNFPKEIAFESPGGDDLESLLGEELILTVWDNGFEINENKIRLQHKNNHQGVTGLTVNRFPNVNRDYVRKINSMLYIWQEFGLASAQKGYIEKYNEKSGKFNEEIPLFQEVLRGKINFLGMVRGKDNEIYLKYLDWYCSLSNQEEISKE

SEQ ID NO: 652 - protein, 361 aa, unidentified
  source 1..361: note = Related to JAAURG010000500.1; note = Leptolyngbyaceae cyanobacterium RM2_2_4
MLKENSTLILYKNCNELRQEFLALKSPRDIAELLEVKYEQLVYHLYKAPGSSKYKEFSISKKSGHSRTISAPSSALKILQRKLSQVLYSVYDPKYPVHGFLPEHSIVTNAKQHLRKKFVLNIDLKNFFDAIHFGRVRGIFLAPPYKLPEEVATVLAQICCHSNKLPQGAPTSPVVSNIVCTRIDSQLRLLAKELRCNYTRYADDITLSTTRPNFPIEIAYESSEDNKVKIVLGERLISIVQNNGFEINDRKIRLQHRSQHQEVTGLTVNQFPNVKRDYVREISSMLHVWDKFGLASASQRYAEKRSRELEISQEEVPSFQEVLRGKINFLGMVRGKENEIYRKYLNWYYILSNRSETPSGG

SEQ ID NO: 653 - protein, 363 aa, Nodosilinea nodulosa
  source 1..363: note = Related to NZ_JH976537.1
MLTETEINSSLILLEDCEKLKKKFLSLKDPRDVAALLDVTYDRLIYHIYRVPDSEKYLEFKVPKKSGQMRKISAPSTALKIIQRKLSQVLYSVYDPKAPVHGFVPSRSILTNARPHLRKRFVLNIDLKDFFDSIHFGRVRGIFMAPPYNLPADVSRVLAQICCFSRKLPQGAPTSPVVSNMICARLDSQLRLLAKENHCTFTRYADDITFSTTLPVFPKRLAYIDSDVKEDEEKTVLGSSLVSIVRENGFEINWKKVRLQHKSHHQEVTGITVNQFPNVKRDFVRKISMMLHIWDKYGLDSARKRHAELLSKSLEIPEEEVTDFREMLRGKINFLGMVRGKNDSIYVKYLNWYCNLSARERRM

SEQ ID NO: 654 - protein, 359 aa, Coleofasciculus sp.
  source 1..359: note = Related to JAIUYC010000141.1
MSDSKFKENSTLLLYKNCDELKEEFLSLQTPRDVARLLEVSYDRLVYHLYIVPENRKYAEFSVPKKSGDTRIISAPATALKILQRKLSQVLYSVYEPKAAVHGFVPSRSILTNAKQHLHKRFILNIDLKDFFNSIHFGRVRGIFMAPPYKLPEEVATVLAKICCYSGKLPQGAPTSPIVSNMVCPRMDSQLRLLAKEFKCTYTRYADDITFSTTLPNFPKEIAYINIEEDKPKILVGERLISVIQDNGFEINENKVRLQYKTKHQEVTGLTVNQFPNVKRDYVRKISSMLHAWDKFGLDSVQKRYIEKCSKELGIPAEEVPPFQEVLRGKINFLGMVRGKDNEIYRKYLNWYRRLSNRE

SEQ ID NO: 655 - protein, 378 aa, Alkalinema sp.
  source 1..378: note = Related to JACMPV010000402.1
MSSSSFTDLNSQHNKGSSLFLYQNCDELRESFKSLKTPRDIARLLDVSYNKLTYHISILPENERYRDFLIPKKSGQSRTISAPCTPLKILQRKLSQVLYSVYEPKSSVHGFVPNRSILTNAKRHVHKRYVLNIDLKDFFHSIHFGRVQGIFMKPPYNLPKEVAVVLAKICCYSGRLPQGAPTSPIVSNMICARMDSELRKLTVEFKCTSYTRYADDITFSTTLSKFPVEIAYQEKSGDDNSQKLILGERLSSIIQSNGFAINESKIRLQHKSQHQEVTGITVNQFPNVKRSFVREISSMLHIWDRFGLKSAEQRFRDKAAEDLKTSAYTLPSFQEIPSFKEVLRGKINFLRMVRGKDNATYLTYSKWFYELSRKEAIK

SEQ ID NO: 656 - protein, 376 aa, unidentified
  source 1..376: note = Related to JACQYI010000059.1; note = Oscillatoriophycideae cyanobacterium NC_groundwater_1537_Pr4_S-0.65um_50_18
MENLSLLLERSCEDLCEDFHSLKTPRDVAALLDVPYKRFVYHLYKEENRYTSFEIPKKSGDRRTISAPVIGLKIIQRKLSQVLYCVYNPKPSVHGFVPAKSILTNALPHVKKRYVLNADLKDFFPSINFGRVRGLFMAAPYGLSPEVATVLAQICCYEGKLPQGAPTSPVVSNMICARMDRQLQHLAKEYRSTYTRYADDITFSTTVPKFPKALAYVPEEGDEKKLILGEKLAEIIISNDFRVNEQKVRLQDKRSHQEVTGLTVNEFPNVDRRYVRSIRAILHAWDKFGLQKAQEVYLEKYAPTPRYPQQEKSSLKQVLHGKIEFLAMVRGKEDQIYQKHIKKYFELSQRDSIPHKAILVRQEAVHEQTGTSNDEV

SEQ ID NO: 657 - protein, 333 aa, Microcoleus sp.
  source 1..333: note = Related to JACJPD010000044.1
MKTPRDVAQLLEIPYQRLVYHLYQVPLEERYLTFELKKKSGGVRIVSAPASALKLIQKKLNQVLQCAYQPKPSVHGFTFSKNITTNAKAHTGKRYVLNIDLKDFFPSINFGRVRGMFIAMPYSFSPDIATILAQICCYNNQLPQGAPSSPIVSNMVCAKLDSQLQQLARKLRCTYTRYADDITFSTTVPKFPKELAYLIDINEQQKLVLGDGLLSIIKDNGFQINEKKIRLQSKDEHQEVTGLTVNQFTNVNRNYIRQIRAMLHAWEKFGLELAEREHRIKYYFKQKSPYKNIPSFKQVLRGKIEFVGMVRGKEDQIYQKYLNHYLRLNNPVI

SEQ ID NO: 658 - protein, 364 aa, Planktothrix agardhii
  source 1..364: note = Related to JAKGPC010000001.1
MAKTRNSKSSIQPTLRKEGDELRKEFFLMKIPRDVAQLLEIPYQRLVYHIYIVPLEDRYLTFDIKKKSGGNRNICAPATALKIIQKKLNQVLQFVYKPKPSVHGFVLNKNIATNAKPHAKKRYVLNVDLKDFFPSINFGRVRGLFMALPYGLSSEVATVLAQICCYNNQLPQGAPTSPIVSNMICAKMDSQLQQLAKKLRCTYTRYADDITFSTTLPKFPKELAYFIEIENQQKLILGDDLLSIIKENNFEVNERKIRLQSKDSHQEVTGLTVNQFVNIDRNYIRQVRAMLHAWEKFGLEDAEREHQEKYYSKYKSPYKVIPNFKHILRGKIEYIGMIKGKDDRIYKKYLNHYIKLHKNSQNKK

SEQ ID NO: 659 - protein, 382 aa, Nodularia sp.
  source 1..382: note = Related to NZ_BDUB01000001.1
MSENYEKKSQVIKALKPCLDKNCDELIKKFYSLKSGRDVARLLEVPYGDLVYYLYVIPYEQRYTTFQIPKKLGGYRIISTPATSLKLIQKKLNQVLQCVYQVKPSVHGFVKDKNIVTNAKAHIGKRYVLNFDLKDFFVSINFGRVRGMFMALPYALNPEVATVIAQICCHDNQLPQGAPTSPIVSNMLCAKLDSQFQKLAKKYRFTYTRYADDITFSTTRPNLPEEIAYIIITEEPEKLEKVVLGKDIYSIVKENSFEVNQLKVRIQNDKQHQEVTSITVNTFPNVDRNYIRQIRAMIHAWEKFGLESSELEYINKYEFKARLFSGDTPKFKQVLRGKIEFLGMVKGKNDTIYKKYLTQYLELNKRDKNFFYRLFSWREGNL

SEQ ID NO: 660 - protein, 592 aa, Plectonema radiosum
  source 1..592: note = Related to NZ_JADEWL010000096.1
MGTTALSRTEEELKEDFYKLKTRQDIAQLLEISDYQLRYHLYIYPRDKAYTKFQIPKKTGDYRIISAPITSLKIIQRKVNQILKCIYKSKPSTYGFVTGKSIVTNAKQHLRQRHVLNLDIKDFFPSINFGRVRGLLMAVPYSCTEEVATILAQICCHENQLPQGAPTSPIISNMICAKLDSQLQRLAKKYQCIYTRYADDITFSTSRTKFPGHLAWFSQEADVLILGNDLKNIIENNGFIVNDSKLRLYNRYKHQEVTGITVNQKLNVKRSYIRQIRAMLHAWEKYGIVNAEVEFWNKFDRKSSFKKDRKSFKSIVKSKIEFIGAVKGKDDTIYLNFLRWLKRLAPELVSDKKLNQYSDKLLENNFRLKATIWTEGKTDIKHLKSALKWLKYQGKEFNVELEFKEDLDDQKQGDGELLNVCQQFCKEKKIIPIIAVFDRDVPNIIPRVHDDTMGFKVWGNGVYSFALPIPLHRKENKDICIEFYYTDEEIQKLDEDGRRIYLSSEFNSKSGRHITFDVNTTDKNKLKPNQLKIIDNDVFDKNNKNIALSKNNFADYIFEQKSGFNDFNFRAFEEVFIIIEKIIKYHAEIIKE

SEQ ID NO: 661 - protein, 591 aa, Nostoc sp.
  source 1..591: note = Related to CP046703.1
MGTINLSLTEEELKERFSQLKTRKDIASLLEISDYQLRYHLYIYPRDKAYTTFQIPKKTGEYRTISVPHTSLKIIQRKLNQVFKCVYQPKPSTQGFVTGKSIVTNAKQHLRQRYVLNIDIKDFFSSINFGRVRGLLMASPYNCTEEIATVLAQICCHENKLPQGAPTSPIVSNMISARLDSQLQRLAKKYHCIYTRYADDITFSTSRPKFPGHLAWFSEEAEKLIISDDLKKTIEDNGFIVNESKSRLYSKHRHQEVTGITVNKKLNVKRKYIRQIRAMLHAWEKYGLDNAQAEFYNQFDNKSSYLKKQKSFQYIIKSKIEFVGTVRGKDDQIYLNFLRWLKRLAPELVSNEKLNVYNLLENQNKSSIKASIWTEGKTDIKHLNSALKWLEDQGRKFDFEINFKDDLDPQKQGSSQLLEMCKQLCKTKHQQPMIAIFDRDEPNITKQVNDDSLGFKNWKNGMFSFALPIPQHRHGQNDICIEHYYKDNEIQRQDVNGRRLFLSNEFHDETGRHFKDDLNCTDRNKYKYDGKIIDQDVFNRNNEKVTLSKNDFADNIFNKKEKFDDFQFEAFEEVFLIIEKIVKSYAEELQE

SEQ ID NO: 662 - protein, 489 aa, Leptolyngbya sp.
  source 1..489: note = Related to QBMH01000079.1
MGTTLLSLSKDELKDLFYKLKTREDIAALLQISDYQLRYHLYIYPRKYPLKKAYTAFKISKKSGGSRSILAPNTSLKIIQQKLNQVLKSIYQPKPSTHGFVVEKSIVTNAKQHLRQRYVLNLDLKDFFPTINFGRVRGLLISPPYGCTDEVATVLAQICCYENQLPQGAPTSPIISNMICAKLDSQLQRLSRRYQCIYTRYADDITFSTSRSRFPPHLTWFSREAEKAILGDELKAIIEENGFLVNESKVRLQSRYKRQEVTGITVNEKLNINRKYIRQIRAVLHAWEKYGLENTEAEFWRKDKKHRFQANSDSFRKIIRGRIDFIGTVRGKDDQIYLNFLGWLKKLAPDLVSDSKLSLASPKILLENQKKNRQEAVLWTEGKTDIKHLKSALRWLENRKISYEFKLNFKDDLDEQKQGDDQLLKMCEQFCKEARSKPIIAIFDRDKPDYVRKAHDETQGFKIWGSGVYSFAIPIPCHRQDVRDICIEL

SEQ ID NO: 663 - protein, 601 aa, Pseudanabaena yagii
  source 1..601: note = Related to NZ_JAAVJL010000001.1
MNTTFLNLSEEELREEFCRLRTREDIAKLFQISDYQLRYHLYVNPSQKAYVIFEIKKKSGGIRSISAPKTALKIIQHKSNQLFQSVYKPKPSTHGFTSNKSIVTNAKQHLRQRYVLNLDLKDFFPSINFGRVRGLLMANPYNCTEEVATVFAQICCHNQQLPQGAPSSPTISNMICAKLDTQLQRLAKKYQCIYSRYADDITFSTSRSRFPSHLAWFSRDSEKLNIGSELKDIIEGNGFQINESKVRLQNRYNHQEVTGITVNEKLNIKRKYIRQIRAVLHAWEKYGLENAEMIFWQKYEKHRHTEFNPDSFRQVIRGRIEYVGSVRGKDDHLYLKLLRWLSKLAPDLVNKTKFDIANINESSEEQKDLPQVIIWTEGKTDIKHLRSAHRWLQNNKTTRYKIEIKFKDDLDDQKQGSPELLKMCEQFCKEKRNNPIIAIFDRDEPDLIRKVHNETTGFKSWNNGVYSFAIPIPQHRKDNHSICIEFYYKDEEIKRHDNDGRRLFLSNEFNPISGRHIIDRDLVTQETKKIKKNEIKIIDSNVFDSNDTNVALSKDNFANYILQESANFNDFDFNPFLEIFEVINRISKHHEENIKSEHITH

SEQ ID NO: 664 - protein, 585 aa, Phormidesmis priestleyi
  source 1..585: note = Related to NZ_LXYR01000030.1
MESNDGIKQLLGGLESRQDVATLLDVTDRQLRYLLYSPRYKKYEKFEIKKKMGGVRLIYSPSHALKNLQRRLNAILQQVYQPKPSTYGFVKGKGIVKNAEQHLRQKCVLNLDLKDFFSSINFGRVQGLLKAAPYNLLHEVATVLAQICCHEFEVDGQLNRRLPQGAPTSPVISNMIYAPLDSQLQRLAKRHKCIYTRYADDITFSTSKSKFPSSLAFYSVGDEKWLLGKELLEVVEGNGFSVNEKKTRLATKYQHQEVTGITVNQDLNVKRDYVREIRSMLYVWRTHGLEKAEATFLEKFDKKHRLNSITPSFRSVVKGKIEFLGSVKGKSDPIYLKFTDELRVLAPELVSIDKLLNSPIVRAQIMTEGKTDIYHLRAAFSNLQKKGLFLSLAIDFVDLPPEKQGDSNLEKHCESLCIVTPQFPVIAIFDRDNSAILKKVHDDSKGFKSWGNGVYSFALPVPSHRHEDPEVCIELYYSNEEVTRLNLQDRRLFLNSEFSKKSYRHSENKILSTTKFNEVKNNSLKIIDSEVHDDADNNVALSKNDFAKCILNSNPGFDNFDFSEFSAIFEVIEKILQRHNLDSAV

SEQ ID NO: 665 - protein, 612 aa, Crocosphaera subtropica
  source 1..612: note = Related to CP000806.1
MGNKLEYNAKYLAFLFLLTDMGTTSLDLPQEELKKHFEQLKTRQDVARLLQVSDYQLRYHLYIHPRDKAYTTFKIPKKSGGHRLITTPQTSLKIIQHKLNQVLSSVYQVKPSVHGFAIQKSIVTNAKIHLKQRYILNLEDQDFFPSINFGRVRGLFIAKPYNCTQEVATILAQICCYNNQLPQGAPTSPIISNMICARLDSQLQKLAKKYRCIYTRYADDITFSTSRFKFPHRLAYFSQDSETFVLADELITVIKDNGFSVNLSKLRLQNRYQRQEVTGIIVNEKLNVKRKYIRQVRAILHAWKKYGLENAEAEFYKGFNENNNNMKSRDCFRKMVQGKINFIGLVRGDTDHIYLKFLKQLKVLVPDLADDSKINFITSKLSEIKSSNNLHKAIIWTEGKTDIKHLKVAWKWLINKKIVDYFDLDYKDDLEPDKQGSSQLFDVCKQFCKEKRNIPLIAIFDRDEPNIIKKIHDDSQGFKDWDNGVYSFALPIPKHRQDVKEICIEHYYQDSEIKRTDKKNKRLFLSNEFHRESGRHLSKPQLTTTDNKFKSNQLKIIDGKVFDSDNNNVALPKDDFATYIYDKEEGFNDFDFTAFKEVFEIIEKILNRHYSQ

SEQ ID NO: 666 - protein, 581 aa, unidentified
  source 1..581: note = Related to SLTK01000007.1; note = Chloroflexi bacterium
MSTELFASNEVLIAAFFQLKTRHDIAKLLEVTELQLNYYLYIVPRDKRYKRFEIPKKHGGSREIYAPATALKIIQQKLNQVLQSVYKVKPSAHGFVQKKSILSNAIPHVSKRYVLNLDLKDFFPSINFGRVRGLFMAPPYLRNNEVATTLAQICCFNGYLPQGAPTSPIVSNMICSKLDSQLQKLAKKHRSTYTRYADDITFSTSRPKFPSGLAYFLEETGKLEIGDELKALILENGFEINERKNRLQPYSKRQEVTGLTVNVFPNVRRDYVREIRGMLHAWQRYGYDAAEMTYREKYAGKHPESKREQISFKRVVQGKLNFLKMVKGENNRVYVNLAKWFWQLAPEFAQSEVLTPLHLPKPIIFTEGKTDWKHLKVAFTSLKKMGMFTELDVQFHEFGDDVQMGHGELLKMCKAYCKRENRQPNIFIFDRDVPAVVNEVMEKDKDYKNWDNNVFSLAVPIPAHRTNTTDVCIELYYQDKDIKRKDGDGRRLYLSDEFDSNNNSHKQQNDVYTLSNKTRRLVGVTIVDSQVFNFITKESVALSKDSFAELIANDDPNFHNVDFSEFGKIFDVIVTILREHQ

SEQ ID NO: 667 - protein, 576 aa, unidentified
  source 1..576: note = Related to JACPVE010000065.1; note = Chloroflexi bacterium
MSTELSASKDELRATFFQLQTRQEIAEMLDIPEKQLNYYLYILPEHRRYKRFEISKKRGGNREIFAPATALKVIQQKLNQVLQSVYEVKPSAHGFVPEKSIVSNAQPHARKRYVLNLDLKDFFPSINFGRVRGLFMGYPYHRNHEVATTLAQICCFKSYLPQGAPTSPIVSNMLCAKLDAQLQRLAKKYRSTYTRYADDITFSTSRPNFPSALAYFSDDTGKIEIGDELKSIIQENGFKIHERKSRLQPNSRRQEVTGLTVNVFPNVKRDFVREIRGMLNAWGKYGYEAAEQIYRQKYAGKHPENEREHLSFKRVVQGKLNFLKMVKGENNRVYLNLIKWFWKLAPELAKPEVIAPLPLVKPMVYTEGKTDWKHLKTAFYALKKMGLFEQLDIQFLEYGDETPMGDSELLKTCQGGSKMLHETPQIFIFDRDKPDVVKHVTDTDKPYKVWGNNVFSLAIPIPAHRVDINDVCIEFYYQDKDIRRSDENGRRLYLSDEFDSKNGKHNSLNVYTRSEKIRKITIIDSQVFDFAGASVALSKDMFAELIANGNPQFQNVDFSEFGKIFDVIVAILRENS

SEQ ID NO: 668 - protein, 582 aa, unidentified
  source 1..582: note = Related to JACNJY010000485.1; note = Chloroflexi bacterium
MTLVLSAKPENLRKGFLSLQSAKDIAGLLEIDLQLLYYHLYIRPESSRYTSFEIPKRSGGSRSILAPISALKIIQRKLNQVLLSVYSVKPPVHSFVLGKSIVTNASVHVKRNYVLNVDLLDFFPSINFGRVRGLFMGKPYCLNPKVATILAQICCFKGNLPQGAPTSPIVSNMICARMDSHLTQLAKKNRSDYTRYADDITFSTNKGVFPSDFAVINELEQLELGKELVRIISDNGFQINHTKTRLRSRKQRQEVTGVTVNKFTNVRRSYLRSIRAMLHAWEKYDLEKAQEKFWHDYDKGKYRSPYKSKPSFKRVVRGKIEYLGMIRGKDDPLYQRLLGQLRVLAPELAKKAKKIQPVYLQGSQAIVYTEGKTDILILETAWKKLYPDKLIPFILKPCDFNPADKAHGTGGASFLSNFIKYVSPDSPNVIIGIFDRDHDGIRAYEGIGESFPEKKGLGSKLAKHGKAGAILLPIPKGKEKYAKYKNLCIEFYFSEKTLNRKNEGGKGLDFQFGTEAIHVAGKPASGSKPSAIRETRTIIRGKDVFSNDIVPQLPTSAFRNFKLLFDVIIATLEKCKTKVASH

SEQ ID NO: 669 - protein, 522 aa, unidentified
  source 1..522: note = Related to QMXJ01000455.1; note = Candidatus Bathyarchaeota archaeon
MYKIELSANPEKLKARFLALKKPEDIAELLEVSYKDFVYWIYRTPEKYRYVSFTIPKKHGTPRYIDAPNNNIKILQQKLNYILQIVFSPKYCVHGFTNGRSVVTNARKHVGRRYVLNIDLKDFFPSIHFGRVRGMFMGKPYNLPSKVATFLAHLCCYKKVLPQGAPTSPVISNMICAKMDSELQRLAASNRCSYTRYADDISFSTSKHSFPSALATINDLGQVEVGKELVRIITENGFQIHPEKIWLRRKDRRQEVTGIIVNERTNLPRKFTNNIRAMLHAWEKYGLESAQKHFEEKFDKKHRAPWKKKPRFQDVLKGKIEYLGMVKGKESSTYLRFLDQLGRLAPKLTGGRGTPQDLLFRRYQALLKSDDPQGRGYLLQSLLHDVFTFLNVTIEKSFTRNRNGEQIDGAFIFEGWHYIVECRWREKVSDIRQVDGLLGQVLRSGKQTMGVFFSINGWSQNVPTLLKQNPSKSIILMHGDDFHALLSQKISLDKLLKGKISELNLKSEPFISAEEIIKKDDT

SEQ ID NO: 670 - protein, 483 aa, unidentified
  source 1..483: note = Related to JACPTZ010000059.1; note = Planctomycetes bacterium
MSLWLADPPHVLKARFHALLRPFDIAALLDVPFGDFFYWTYRVPPSRRYTTFYIEKHSGAPRRIDAPELNIKILQQKLNQVLRAVYVPKRCVHGFVPGRSVLTNAQAHAGRRHVFNIDLRDFFPSINFGRVRGMFMGKPYRLPPKVATVLANLCCFDRRLPQGAPTSPVVSNMICARMDSQILGLAYRHRCTYTRYADDMTFSTSRRPFPAEMATLNDLGQVAVGAELRGIIEGNGFRVHPEKIWLRGRDRRQEVTGLTVNVEPNVRRRYVNQIRAMLHAAGKYGLPSAQSEREQRYDHKHRAPWNDPPSFERALQGKIEYLGMVRGHACPKYLKMLDDLGRLAPHLFIIRGTPRERLLRRYRALLTSPNHQARGYQLQALFEEGARPGRAGRGGISATPDRGGICPGTPSLRGRTLAPRFPASHPTTARGSEGHVQAPYESHPRPRIQPRHGPVDEQVERHEKRAVHRHPARDEIVVPVHHS

SEQ ID NO: 671 - protein, 511 aa, unidentified
  source 1..511: note = Related to JAEUJA010000134.1; note = Phycisphaerae bacterium
MSDGPPSKPLPLPLSPTLAKSDADIKAAFRVLQSVTDVADLLEVRETQLTYAIWRTPEEKRYSTWSIRKRSGGTRTIDAPRKTHKILQRKLAYVLSLVAQRRSVAHGFSPGKSIVTNAAAHARCRWVFNADLKEFFPTINFGRVRGMLMGKPYRVGERAATAIAQLCCHKRLLPQGAPTSPVISNMVCARLDGELRRLAEHYGCNYTRYADDITFSTNKKTFPEELATLIGEGTKAAVGSALSRVIESNGFQVNPDKVRLQGKRTRQEVTGLVVNRRPNVRRAFVRQIRAMLHAWERYGYDAAQKEFLDKYDSKHRPDGASGRTYERVIRGKLAFLKQVRGKDDNRYLAMRRRLRRLLGEVDAGVGRGVEMEYDVFICHASEEKTTVVVPLAKALNDAGIRVWLDEEKIGWGDSVTKEINDGLAKSKFVVVVLSAAFMKKKWPAKEMNAVLNKEIASDITCALPLIVGDSSDKKIILETYPLLADKHYKEWSPSDIGTIVGALKAMLSRYA

SEQ ID NO: 672 - protein, 544 aa, Anaeromyxobacter sp.
  source 1..544: note = Related to NZ_JALCZB010000001.1
MQVRLSQSSADELRRRFFACRTARDVARLLEVPYSVLHYHACKSPVSIRYETFTVPKSTGGSRQILAPATALKLLQRKLNVVLQAVYRPRPSAHGFLPARSILTNARCHSGRSYVLNVDLEDFFGSINFGRVRGMFMARPYNLGEGAATVIAQLCCHLNRLPQGAPTSPIVANMICARLDGELQRLAIRHRCTYTRYADDLSFSCHSHTFPEALATYSPGTGTSARVGPELSRVVHQNGFRPNPSKVRLQRPSERQEVTGLIVNRDPNVHRTFVRQVRAMLHAWRKFGLEAAEAEFIAKYGWRHRAPERATPRFRRVVKGKLDFLRMIRGRYDPLYRKLLREYCTLSDEHFEEAPTAPTVEALIARAVWVLECDICLRQGTAFYLRGNGLVSCDHVVCDHIRAFRPDAPGTKFNIDIVGRHSVVDLAVLRLRDADFSDDGLRAGTASALQTGDELTVWGFPNFRLGDTVQVHPGRVAGFRQVSGIRRILVSAPIVRGASGGPVLNRRNEVIGVAVTGAETMETAHETEDHGVLPINALEHVPLR

SEQ ID NO: 673 - protein, 537 aa, unidentified
  source 1..537: note = Related to JAIPEW010000016.1; note = Clostridiales bacterium
MEIKLRADDSTLIEKFIALQSRKEVADLLEIDVKTLIYFLYRRKDKDNYKIFYLRKRSGKERTICAPINSLKIIQRKLNYILSLIYKPKPSAHGFIVERSILTNAQAHLKNNNMLNVDILDFFPNINFGRVRGMFMANPYNIPPEPATVLAQICSCNNQLPQGAPTSPIISNMICAQLDSQLQKLAKKHSCTYTRYGDDLSFSTWQYKFPKELGYKTKTGEVIVGISLEKIIRQNGFKHNKDKVTLKSRKSRLSVTGLIVNEIPNVPRKFVRQIRAMLHSWEKDGLIKAEQIHLNKYRYKQKNPKAFQPKFSNIVRGKINYIRMIKGEENPVYQKLASKFNDLNGGGFPKYYHNLREELEAAVWIIEGEGGTNQGTGFMLEGFGMITCAHVLTKSMEAFRCNDYGNKFPVEIISYDNENDVAVLKIKGNENYHYLRVGDSDEIDVGSEIKLSGFPNYNIGDSIYIDDGKVTLCRKSLGRTRYLISARIVKGNSGGPVLNKNNEVIGIAAKGAPCFEDKNMDEKFEVIPITIINPEPL

SEQ ID NO: 674 - protein, 551 aa, unidentified
  source 1..551: note = Related to JADHXR010000104.1; note = Phycisphaerae bacterium
MRNRLDIQLRKNIDEAVGEFQSLSSPHDVAALLEIPYKVLNFHLYVAHPTRRYKTFTVHKKSGGVREICAPVTAIKIIQQKLNYILQNLYKTIYKKKFSVHGFIYGKSVRTNAQSHTRKDYVFNIDLLDFFPSINFGRVRGMFMANPYRLPPKVATVLAQICCFNNQLPQGAPTSPIISNMICARMDDELYRLAKRFDCKYTRYVDDMTFSTNRPNFPAELANVTRLESGWRLKADVGKELNKIIEENKFSVNTSKVWIQHRNCRQKVTGLIVNEFPNVSRKYTNQIRAMLHDWDKHGLIAAENRFVNDYDKKKRWPYEPGILFKNVVKGKINFLKMVRGDRNPTYQKFSEKLASLDPDFSFIRIVREADSDNLQQAVFVLESPRGQGTAFMLRGIGLVTSAHNLKNDKLDTYLYKTDEPADKQRLKVKHINTNLDFAIIEVAQGWAKASLVRGDSTILKTRDTVKVIGFPNYAKGKSIHIHDGKITGRGRWFKVKTLNVSARIIYGNSGGPVLNDKNEVVGIAFYGAPDPEKADRIESGVIPIEILDKLM

SEQ ID NO: 675 - protein, 580 aa, Salinibacter altiplanensis
  source 1..580: note = Related to NZ_NCQY01000020.1
MSISLDASEEELQNDFHNLEDLEDVADLLDVESSNLIYHIRESPEEGRYKTFTLDKSGGGEREISAPVSALKIIQQKLNQILQAVYTPKAAVHSFLPDRNIRTNAEQHVKQRFVFCVDLKDFFHEINYGRVWGLLQAVPYELPEDVATVLAQICCHNNRLPQGAPTSPIVSNMLCAQLDSELLRLAESNKCIYTRYADDLTFSTSMRQFPDELATGGEDGNVKVGKELREVVDKNGFELNEDKTRLQHEDYRQMVTGLIVNEKVNVPREFVREIRAMLHAWKAHGYEAAEEEFLREYDTKNRKSEKEEPVFSRVIRGKLEFLSMVRGKDDKIYKKYLTEYSRLSNTPINIDNQEEPENDTSKLIVYTEGKTDWKHLKRAIRELAVNQSSELPDLEFNETESDRGDDELLEKCRHTSESEGQHQHAHVFLFDRDQPNQVQEVTEDDQSFRSWGNNVFSAAIPPPPHREDVNISIELYYEDDDLLKRDGNSRRIFLGQEFHKTSGKHKEEAKINCSLLNKTGDENRIIDDRVFNEENENISLSKNDFAEYILNEEPPFDDINFKPFARIFDLLSEIEERVDS

SEQ ID NO: 676 - protein, 529 aa, unidentified
  source 1..529: note = Related to JAGQYO010000133.1; note = Flavobacteriales bacterium
MITELTAPDIVLTDKFFALASPEDVADLLELKSYAFLQHLIFILPSSKRYKEFVIPKRRGGKRYLLEPSPNLKIVQKKLSYVLQLVYKPKRSVHGYVNGRSIVTNAIQHVGRRYLLNIDLEDFFPSIHFGRVRGMFMSYPYNFNGRVATTLAQICSLRNCLPQGAPTSPIISNMVCAKLDSELQKLAKQHRCYYTRYADDLTFSTSIKQFPTALAVSIVEGKRLRVEAGNELSEVINRNGFTINVKKIRLQKHSQRQEVTNLTTNEFVNVNRKFIRQIRAMLHAWRKFGYVAAEIEFRNEYNKKPPNKPYKKQPSFKNVIKGKIEFVQMVRGKNDRIFIMLNNQAAQLERIQNIEPYQFQILEDEDHEIVSLIASGETEWVEFKEGACLDPHTGENNKKNMSHKILRAVASLINSKVEGRVLIGIKDNGAITGVEREYALADPSKVNWDGYELYLTNFLNDSLSIENAHNFFKISRHAINDKIVCCISTRMADKPVLVHEKLYIRSGNQSKEIKGTEKVDFILKWATSS

SEQ ID NO: 677 - protein, 481 aa, unidentified
  source 1..481: note = Related to JADJXK010000002.1; note = Anaerolineaceae bacterium
MTIKLTSTDTVLTDKFFALTSPEDVADLLELKSYSFLEYLIFILPSSKRYREFIIPKRRGGKRYLLEPIPNLKIVQKKLSYVLQLIYKPKHAVHGYVNGKSIVTNATQHIGRRYLLNIDLEDFFPSIHFGRVRGMFMSYPYNFNGRVATTLAQICSLRNCLPQGAPTSPIISNMICAKMDSELQKLAKQHRCYYTRYADDLTFSTSIKQFPPAMVVTLVESKRLRVEVGIELSEIINRNGFNVNMSKIRLQKDSQRQEVTNLTTNEFVNVNRKYIRQIRAMLHAWRKFGYVAAENEYRNVYNKKPPDKPYKNAPSLKRVIKGKIDFVKMVRGQEDKLFIKLNNQAAQLERAERIEPYFFDILQEPDHELMTVIANGETDLVEFKEGACVNPHTGKDDKRNMSSKILRAVASLMNSKSNGVVLIGVADNGAISGVEREYSVANPAKANWDGYELYLNNLLNDSLSVENAYKYFNISSLTMLN

SEQ ID NO: 678 - protein, 525 aa, unidentified
  source 1..525: note = Related to JAGRDB010001140.1; note = Anaerolineales bacterium
MAIYLESTPEIIEGRFRDLATPEGIAELLELSSLAFLKYCLYTLPQARRYRTFTIPKRSGGERIILEPEPNLKIIQQKLLQVLTLVYQPKRAVHGFVDERSIVTNASPHINRRAILNVDLLDFFPSIHFGRVRGMFMAFPFHFNDKVATILAQICSLPHCLPQGAPTSPIIANLICAKMDSQLTQLARTHHCYYTRYADDLTFSTSLAHFPKSLATIISEEGERTVEIREELARIIHKNGFRINPKKVRLQTRDHQMEVTGLVVNRKVNVKRSYIRHVRAILHAWQQYGYQAAADEYFAKYFGKAPDKPYKTLPGIRQVIKGKLSFIAMVRGQEDHLYIRYNNQAAQLERRDLPEPHIFRILAEPDNAIVRLVAEGESVCIEFKVGACLNPHTNKQDKKMKDKIVRAVASMINSLPVGHLLIGVKDNGEIIGVEREFPVADSSKQNRDGYELYLANILNDSLQVNNAQQLFTITFHNVGSHTVCQVQTTKSMQPVLVNNQLFIRSQAQTRELSGQEMVEYIQQYS

SEQ ID NO: 679 - protein, 584 aa, Herpetosiphon aurantiacus
  source 1..584: note = Related to CP000876.1
MSLHLSSDPDTLRQQFFQLKSRDDLLNLLDISQQQLLYYLYICPENKRYRHLRLRKKRGGYRTIYAPATHLKIVQQKLSSILQLIYEQKPAVHGFVPHKSIVSNAAMHLNKTYVLNLDLQDFFPSINFGRVRGLFMNQPYYLNEEVATILAQICCHRNTLPQGAPTSPVISNMICAKLDRELLRFAQANRCVYTRYADDLTFSTNTRQPPSKLVRRTEATASIELGRDLVSIITANGFQVHPEKSRLQVKGRRQEVTGLTVNHFPNVPRRLIRQIRAMLHAWRKFGLDAAQQHYYAHYCHRQYPVFKPRPPFRQVLIGKIAFVGMVRGKHDQLYLRLRDQLLNLDPTYRAAVEKKAEETFILSTPLIKTEGKTDWKHIKHALRVLQAQGLYAGLSLDFDESLTEGGSSELKKTCYYLSRVKQAQIIIALFDRDEPNIIREVADGDRFKAWGNQVFSFVLPIPDHRTHTPDICIEFLYPDNNLLLVDEHGRRLYLSSEFHETSGRHKENPAISCLLSSKFKKDAKLSIIDASVFDANHRSIALAKDAFADYILHDQVPFNRMNLDGFKPIFDMIIAILRAETNKT

SEQ ID NO: 680 - protein, 562 aa, unidentified
  source 1..562: note = Related to JACPQA010000272.1; note = Chloroflexi bacterium
MLSAALAISRIGGQVSLRIHPVPTSTQTRHLTASDDDFRQSFASLIDRDDVVRLLEVTDSTLIYLLYRPRPRYTTFTVPKRGGGIRKIMAPVGSLKIVQQKLNQVLNAVYRVRPSVHGFAIDRNVKTNALPHVGKRWVLNIDLLDFFPSITFPRVRGMFMGRPYAIPERAATVLAQICCKDSLPQGAPTSPVVSNMICGKMDSELRRLATHYRCVYTRYADDMTFSCNSKEFPADLATTYLDGEMRPIVTVGDVLVKAIQANHFSINNSKSTLRGHGTRLAVTNVTVNEFPNVPRTYIRQARSMLHAWRKYGVESADDSYRASRGLRPADDRSRGQVFRRVVLGKLEYVRMMKGDTDPVYINLKNRLADADPRYPRVPTIVTEQQLGAALWVVVSQRGEEIRQGTAFMLQGFGLVTCDHVILDRTEVYQISDPTNAFDATPVKRNGHIDLAILSIDQKPEAQFTGAGRAAILGEDVTLIGFPNLGPGDTERTERGHVTGLRTRFGVKHILISPTIYSGHSGSPVLDAELRVIGIAQRGIDYRNDDPDAIEPSAIAIDEVNKL

SEQ ID NO: 681 - protein, 564 aa, Labilithrix sp.
  source 1..564: note = Related to JAHBWB010000001.1
MAKAYSRELKDPPSVLASRFASLRDYRDVAALLEVDAPTLGFLLYRSPPSVRYHTYDVPKRRGGSRTISAPMASLKFVQRKLNQVLQAVYSVKPSVHGFVDEKSIISNADCHDRRRFVLNVDLENFFGVINFGRVRGMFMGKPYRLPERAATVLAQICCFNNQLPQGAPTSPVVSNMICGQLDAQLQRLARDHKLTYSRYADDLTFSGTNHVPSELGADRRAPKTFDVGPRLTAVISANGFAINRKKVRLATAAERQEVTGLVVNRKVNVPRKYIRQVRAMLHAWRKFGLAAAEAEFFARYDKKHRPVSKRPTFRRVVRGRLEFIGMVRGKDDPLFQNLLAQYDACVAPSGRSTPRAPNDVIRGALWVVEEDHSEMYQGTAFAVSADSLPEHLRVAVRAAGVEWTLITCDHCLLSGMKAYHPANSGAFFPVEVVARDNTLDLAVLAVRTASLGTLPLDLSATMTDGMSLRVAGFPNYGPGMTAPIYSGTVVGTRAWHGRQLPILDATIVAGMSGGPALNNSGAVIGVAVTGAIDHASAKATEKHGAVPIAALSELQALPKPEPL

SEQ ID NO: 682 - protein, 506 aa, unidentified
  source 1..506: note = Related to JAIOHN010000449.1; note = Anaerolineae bacterium
MSTELHSNPEVLREQFYGLEHPKDIAKMLEISYLTLNYYLYRLPENKHYTIIEIPKRSGGKRSLRVPISPLKILQSKLYEVLLCIYQPRASVHGFARGQSILTNAEAHLQRKNRTFILNIDIEDFFPSINFGRVRGMFMARPYNRSEKVATVLAQICCVDNQLPQGSPTSPIIANMICAKLDSQLQRLAKEHRCFYTRYADDITFSTSLSSFPRALAKVEHNTSGNPLIPGSKLNEIVEKNGFTINPDKVRLQSSDRRQEITGLTVNKLPNVPRKFLNQVRAMLHDWEKNGYGRAQENHFQNWRKGYSSPYSSPTSFAAIVRGKIEYIGMIRGTQNRTYRKLLKKLSELDPTFKKSGLVDMREQIFISYSHKDKKWLEELKRHLTVLEHNHKLVVWDDTKIEAGSKWRQEIEKALNSAKAAILLVSDNFLVSDFIREHELPPLLQAAEKEGLKILWIPVTSTMYEYTEIVEYQCLTEPSRPLNSLKKSERNRELVEICRKIAELAS

SEQ ID NO: 683 - protein, 513 aa, unidentified
  source 1..513: note = Related to JAFGJA010000607.1; note = Anaerolineae bacterium
MDIELSASPEDLQKRFFALQTSEDIAELLEIPYDYLIYYLYRVPFEHQYTTFFIPKKSGGTRKITAPISPLKIIQRKLNQVLQAVYIPKPSVHGFVPGRSIVTNAEAHMYKRIQKKKSQKVEKPRNYILNIDLEDFFPSINFGRVRGMFMAVPYKCPERVATVLAQICCAYNELPQGAPTSPIVSNMLCSKLDSQLQRLAQKYRCHYTRYADDITFSTSLLSFPRALATTEYSSQSGYQVVVGPELNVIVEENGFRINRQKVRLQTPDRRQEITGLTVNEFPNVRRQYINQIRAMLYAWKKFGHDNAEERYRELHDNQEYQCPDKLLPSFRSIVRGKIEFLGMVRGKQDRTYLRFLEKLAEVDPEFRANWEMNKIKKGGTNKQVFISYSRKDEDFARKLVNALSNRNIGAWLDVNEISPGENWVNVIQNGLVVCELMLVIISPDSMSSSQVAEEWQYFLSQSKPVIPLLYKNTNTIPYKLDTKQRIDFQEHYEFDSAMDILLRALNRENIASN

SEQ ID NO: 684 - protein, 554 aa, unidentified
  source 1..554: note = Related to JACDEG010000211.1; note = Pyrinomonadaceae bacterium
MTDVEHREDTGARFSALKDARDVASLLDVSYEYLRHHLYRAPAGERYTLFTIRKKSGGVREIMAPRRPLKLLQHRLAKVLECVYEPKSSTHGFTRKRNVLTNAHIHARRKHVLNIDLLDFFPSINFGRVRGMFMANPYRCPPEVATVLAQICSHNNQLPQGAPTSPVISNMLCARMDRHLQEVAKQYRCAYTRYADDLTFSTYLDEFPPELASMQTEHGVDRCVPGRTLVNIVTKRNGFRINESKVRLQNNKQRQEVTGLTTNKFPNVQRAYVRVVRAMLHNWKKHGLEAAQRQYLSKYNKQHRPPESVQPLFRYMVKGKIEYLGMVRGKDDAIYQRFLKRLRELAPDLVKASSVDDPYAKILDRLWVLETEEIGKCSQGTAFYIQDYGFVTCAHVLGESELAIITAHTRHDASQKYRVKVTAKDDQIDLARLEVIGVTPQVGLKVGASESLQIGDAIKLAGFPNHHIDDTGIVASGTVIGRRNAPVTREPRILISANIIAGNSGGPVLDSNNRVIGVAVRGGANEEESRNTEFHGVVPIEALGRLVVAGVGGN

SEQ ID NO: 685 - protein, 553 aa, unidentified
  source 1..553: note = Related to JACMJZ010000029.1; note = Pyrinomonadaceae bacterium
MTASPQREEIRTQFTSLRSRSDVASLLGVTDRALRYRLYGLPIPSQYVVFEIRKKSGGLRSIAAPIPPLKILQRRLRKILECVYEPKDVVHGFTVERSIKTNATRHEKSKHVLNVDISEFFLSINLGRVRGMFMAAPYKCEKEVATVLAQIACLEGKLPQGAPTSPIISNMLCARLDAHMNRLAGSFKCTYSRYADDLTLSTLQTKFPREVAELRIVDGQPKCFAGPKLIRVLTRRNGFKINLSKIRLANRSQRQEVTGLVVNEKVNVPRLFVREIRAMLHNLHKKGVEKCQQDYETNYARHRRPSSPVPPFLWVLRGKVSYVGMIRGENDELYRKLLKRLDELAPGLVKVPVIKDELDSIFEHLWAIQVETEAGDGGQGTAFMLRGVGLVTASHVLGTKKILGIKMQSSDGRVEREATVFRRDGLLDLAILESPDLDPSRGLEASTLKSTRKMAVTLLGFPNHNTGDPGHFDQGIVTSMRRSPLSEDQMFLISCPIIHGHSGGPILDSSSKVLGVAVRGAISRKEAALTEFHAGMPIAAIEKLTNEMAEPEK

SEQ ID NO: 686 - protein, 544 aa, Nitrospira sp.
  source 1..544: note = Related to MSXN01000018.1
MPYHLTKSLDLLREEFKKLNSPQAVAALLEVDYKRLIYHLHKVPPSKRYTVFTIPKKSGAARQITAPISPLKILQKKLSFILSSVVDSKHSVHGFVRGRSIRTNSRVHAGKKYVFTIDLENFFPSINFGRVRGLFMAPPFKFNAETATILAQICTFENSLPQGAPTSPVVSNILCRKMDQQLSRLARNYKCDYTRYADDITFSTAKETFPKSIAFTLPDSKEPHCGDELSRIISDSGFTINAKKVRLIERCRQQKVTGLVSNEFPNVDRRFIRQIRAMLHAAQKFGFTAAEKDFHARYYNKLLKPGGKKPSFKKVLKGKIDFVGMVRGKLDRLYLKLIRKLQLLDETLVRAVPSEAWINEIKAALFVIDVHKPAEKPGVPTIEQGTGFLLKGIGLVTCAHVINERIGKLEVYQGADPSKLYDVDVSIEDLDADIAVLTIHGFTGPQLLQGDDGIVREDTEVILAGYPGYARGHSGTIGRGRVVGTNLHFDKKRMLIDAVIFPGNSGGPVLNNERRVIGIAAKGDGGQNSIVPISAIKEAMIRSR

SEQ ID NO: 687 - protein, 585 aa, unidentified
  source 1..585: note = Related to WYDU01000005.1; note = Chloroflexi bacterium AL-N5
MSISLSLLNEELKERLFNLQSRKDLADLLEIDEKQLIYHLYIIPPDQKYKKFIISKGHGSVRRIDAPISALKIIQRKLLKVLTCVYRVKKPVHGFVYGRSILSNAKTHRRRRYVLNLDLQDFFPSINFGRVRGMFMARPYHLNSAVATVLAQICCFNNQLPQGAPTSPIVSNMVCAKLDDELQRLSGKYRCMYTRYADDITISTNLPAFPSNIATLSDKTGQPELGVELQRIIDENGFVVHKDKTRLQIKSQRQQVTGLTVNRKVNVRRSFINQVRAMLHAWDKYGLEAAQEEFINKYDMRSRSPYKNKNGVSFARVVKGKIDYLGMIRGQDDTIYLKYYAQYCRLAGIPNRRALTYPVDETLLPLIVTEGKTDWKHLKIALSKLQSEGIFQNLNISFHEYEDNMEAGDNRIIQMCRDRALLPNNVITIFIFDRDNKEVIKKVTENGQEYKTWNNNVFSFAIPVPNHRTETPDVCIELYYRNEEITREDGNKRRLYLSREFNPESARNHDGSLNCTDMNKIRDQRKVNVIDSNIYNSSKENVALPKSDFADYILHQEENFNDFDYTEFKAIFEIIQRIIQENPIT

SEQ ID NO: 688 - protein, 477 aa, unidentified
  source 1..477: note = Related to JAFGRA010000087.1; note = Anaerolineales bacterium
MGKLLSRSNSQIIERFDALETPKDIADLLEVDYQHFDSILFKTARATLYRECLIPKKNGEFRQINVPAVQLKNIQRRLHEALQVIHKSKLPSHGFERERSIVTNAEAHVKQKFVLNLDLKDFFPSINAGRVWGMFQTVPFNCNEKVASILANICTFKNELPQGAPTSPIVSNMLCRKLDSELQKLAKKYNATYTRYADDITISFSYGEIPKNIATTNELGQLELGNEIKNVIKNNGFRINYDKFRLQSKNMRQEVTGLTVNEFVNVNRKYVRQIRAMLHAWDKYGYEKAEEEFRREYDNKYRPHWKSNPSFKKVVKGKIDFLGMVRGKDDKVYIKYREKLRELAPDIISEPPPPPESESPQSMVPIIRTEGKTDWKHLKAALRWLIDRGEISDLQIEFDEFEETLGEPLLLQDCEALCRHKQPRPIIAIFDRDTKNVNKFHNEKKGYKDWGNNVFSFAIPVPAHRKNTPKVCIELYY

SEQ ID NO: 689 - protein, 580 aa, unidentified
  source 1..580: note = Related to JACSRT010000201.1; note = Ignavibacteria bacterium
MKNLLQYSPEILKNKFHSLTTHFDLCDLLEIKYKDLIYYLYRIDPDVQYKTFYIPKKNGSFREINSPISTIKIIQKKLAQILNAVYLPKEPAHGFIIEKSILSNARLHVRRKYVLNLDLENFFPTINFGRIRGMFLKKPYNFDPKTATIIAQICCYKGFLPQGAPTSPILSNMICSKLDSNLSFLASKNKCIYTRYADDLSFSTSLTNFPKAIAKPNPTGLVELGEELKKIIRDNGFEVNSDKIRLQYKQQRQEVTGLVVNEFPNVKRKFVRQIRAMLHAWEKFGYDSANYEYSTVYNNKTRFASSSVDFAKVVAGKIEFLGFIKGKDNQIYQSFLNKLIALDPEKFKYLEKFVISSTNYVNPLVFTEGKTDLKHLRAALNHFQKNGEFTEIKLEFDEEEKEMGDEELLKLCKNYVKMTGNAKPIIFIFDRDNEKIISQVDNKGSYKIWGNNVYSFSIPIPDHRTDLTYSPIEFYYKNEDLKICDVKSRRLFLSDEFDKNSGRHLFEKELSCNNLKKIKDSKLNIIDNSVFNSESVNVSLSKNDFAENILLGIGKFADVDFASFKKIFDLILQIIKIQDN

SEQ ID NO: 690 - protein, 488 aa, Dehalogenimonas sp.
  source 1..488: note = Related to CP058566.2
MSHKLNSPPQDLAKSFSALKDGRDVAKLLEVEYAHLVYHLYKIPQEARYSQFKVKKRGTNEFRTISIPNGSLKIIQTKLVQVLEAVYFPRIAVHGFIKGKSILSNARIHANQKWVFNADLEGFFPSINFGRVRGLFIAKPYVLPDNVATVLAQICCYNNELPQGAPTSPILSNMVCAKLDSELRILAQHSRCNYTRYADDLTFSTSSPKFPPQIASIDGDSQNTIIELGEQLRTIIGNNGFCVNAQKTRLQTKTHRQEVTGLVTNQFPNVSRQFIRQVRAMLHAWEKFGLEKAQTEYLMLYRDQQRNPLKNDPKYRNVSLKDVILGKIGFIGSIRGKTDFIYIKLLNKVISLSPELAKQKDKISALMSSGPAPLIRVTTEGPTDWMHIETAFNNLQSKGLFAGLAFDLVRYEHDMGHSRLLSICEAYATLPIPGGLSHVFIFDRDEPQIVNKVNEHGDVRKWPNNVYSFSIPIPTHRTKTPEICIELN

SEQ ID NO: 691 - protein, 544 aa, unidentified
  source 1..544: note = Related to JAGQGA010000179.1; note = Anaerolineales bacterium
MPEAQRYTTFKLAKASGGFRIISVPNHSLKILQQKLNHILQMVYQPKASVHGFLQGKSILTNAERHVKRKYVLNLDIEAFFPSINFGRVRGMFIAAPYNLPENVATVLAQICCYQNQLPQGAPTSPIISNMICSRMDVALKRLAQTYKCTYTRYADDITFSTSKPQFPPQIASIFNKQETSVIVLGTELNHVIESNGFEVNSSKVRLQTKNHRQEVTGVTVNRFPNVKRAYIREIRAMLHSWRENGFTEAEQIFREKYDSKQENRNPNLPIPSFAKVLRGKIEFLGAVRGKNDHIYLRYLNELSSLAPPGTIKLPKSVGKSNIIKLKPTVYVEGKTDKKILSIAWAKLFESRPIPFNIEDSNLSQTDQGGGLGGAEILKQFISVVREDHLHLAIAMFDHDQEGIKCYNSLPKYFDQVSELEAKISRHGKAAAFLLPASDQKSEYIKYENFVIEYLFSDAALAKTTEDAQGLIFQQASIEQRIVGSGKSFRLSSTPSSIPETRTIKEGKVVFAERIVPHLDKSEFTEFRFVFAKIQQIITYMASL

SEQ ID NO: 692 - protein, 564 aa, unidentified
  source 1..564: note = Related to JAGOBP010000036.1; note = Thermoflexales bacterium
MNNLSPVLSASAEELRKKFQELQTREDVANLLEIDESRLNYYLYIIPEPHRYTTFQIPKKSGKFRTISVPATALKILQRKLNQVLLAVYQPKAAVHGFVLGKSIVTNAQMHLRQKFVLNIDLKDFFPSINFGRVRGMFVAPPYKLPPMVATILAQICCWNNQLPQGAPTSPIVSNLICAKMDSQLLRLAEKHRCVYTRYADDITFSTSTSQFPIAIARKSEVTNQVEVGGDLGRVINENGFEINSDKIRLQTRQQRQEVTGLIANGKTPNKTPNVQRRYLKQIRAMLHAWEKFGLDNAEKDFLEKHDGHYRHPNLNEPSFKKVVCGKIEFLGMVRGKDDVTYHRFRDKLWSLAPELARFDPEIESTNIPTSVLIITEGQTDWKHLKAALQQLKEAGDFSDLNIEFREYDDSIQMGDGELVKLCIQMAKIPQSKITICLFDSDAPSTLKPLALSDAMYKHMGGNVFAMVLPTPNHRQGLPGVCIEHYYQDSEITREDTHGRRLYLSNEFHEKSMLHRTKHGISTSDRRVHDLKKVVCQVLCKLGGAGQALVSTVMRRNFRLRITA

SEQ ID NO: 693 - protein, 652 aa, Chlorogloea purpurea
  source 1..652: note = Related to JADQBB010000011.1
MVNVDEELIKNFQNLKSVKGLYLLLQKFHTGPASFPDYSTFRQILFNQWQDEPYESFKMAKKNGSHRTIEVPKPEIKLLQQSLNTILRGIYEPKASVHGFTIKKNIISNAQNHCGKKYVFNIDLADFFHSITQQRIRGVFMKPPYSLPSKVATAISHLCCYNDRLPQGAPTSPIISNIVCAKLDSGLRLLAKENNCFYTRYADDITFSTTRKNFPTDLGVIYGGGTQDIKIGDKLASILAENGFTVNAAKTRIQINTLRQEVTGLTVNTKVNVSRDYIRHVRAILHDWELNGYVKANSNHWSHCSKKHLRHGNIDDVLGGKLAFIGQVRGNEDLLYKKLLQKYAGLIVNEMARDLALKFDNKLYELWSGVIDQYLEQAVIDYVANENITNEDIKNGFEELKKLKPINGRDYKQRQDPDYNQVGVPVAYTFLYLPRKIMAATAILTHYFGQKNSRIPYNILDIGSGTNAVSIAIGLFLFTDKININLTALEPSHYMRHFCSYQPNFSHLNISYREGMVGEWQDVLHSNYYELIFMSSVLQNSFNDQQDTWWEDRCRELYNCCKNNGTFIIVEPNAKMDLLNSLVNAMQKIGWSFKERLFLSNLLPKVSKNDELIKMQKLTDLKKEYKCDYHNYSVCNWNPNPKYNEIIYIFEK

SEQ ID NO: 694 - protein, 643 aa, Sphaerospermopsis reniformis
  source 1..643: note = Related to BJCE01000167.1
MRYLLREASEIVESFRKINSFQDFADLLEVDYFWFKQELFAVPLEEKYTSFTIPKRNGESREIYSPVSGIREIQARLNEVLRLVYEPERKQSVHGFTTSRNIVTNAKNHCNKKFVLNLDIKDFFPTITQQRIRGVMMSPPYNLPSQIATTISHICCYEGKLPQGAPTSPIISNIVCAKLDSELRLLAKQNKCFYTRYADDITFSTIVKNFPLSIAKITGLKITDVSLSDNLISIFKSNGFQINFNKVRIQGDNQRQEVTGLTVNNKPNVSRKYIRQVRAMLHDWHKNGYVQAYINDSAIRYQKNKNRVNFSSALRGKIEFIGQVRQKDDFIYQKLLTFYEKLIEREIIRQRSLKFDDKDYNNWCDSVDEYALHIINNYIDAISVDIDNMKECIQQGFDELDKLRKKQDPDYDLPGVPIAYAFKYLPRKIIAMTAVLSHYFREENVPIPEKILDVGSGTDAVGIALGLFRQKMSFQITAIEPCSYMRQFAMFRPSLPNLEVLNVNGRLGDWFNYLNNNYFNLIFMSSILQNSFENLGNSWWLEWANELYQASTNNARLILIEPSVKVKLVNKMKWAMESSGWILREQLLLSDLFPNVFNKGCQLKKLTSLKQELIGNYCPWPVSGWNTYYKYNEVIHIYSKNNQ

SEQ ID NO: 695 - protein, 574 aa, unidentified
  source 1..574: note = Related to JACZJC010000064.1; note = Anaerolineales bacterium
MTKTLLSITPIEQREAFFALKTRRDIAVLLGYRYDGLVYQIYKIPAEKKYETFFVPKKSGELRTIHAPSPKIKRIQRLLNEVLQNVYKPKPVVFGFTSGKNIVDNASKHKKKNWVLNVDLENFFPSINFGRVRGMFMHKPYNLPDEVATTLAKICCFENSIPQGAPTSPVISNMICAQMDSQLQDLAWKHRCFYTRYADDITFSTTLHEFPLEIAKVNSVLSIDLGQELINIIQQNGFEINHGKVRAFAYFQRQEVTGLTVNKFPNVRRKFVMQIRSMLHAWDKKGLQTAEAEHYELYNKRHHNQNSKLPAYKKVVKGKIDFFGMVKGLNNSRYMEFKREYLRLSRRDKNVPFKNISAKTESKIIIYTEGPTDPPILKTAWQKLYQDEILFIITPVEIKPGIATGATALAAELNTHRKQHGIVIGIFDRDAEGIKAYKSLHSGEFEEKDGFKISIDRNAAAIILPIPTGKEKLAELDKLWIENYFSETALNTKTTDGKGLAFEYKPVVVTKKIGDKIIEETKTDERSLETAVIKDGGKRIFAEKIVPTLPVDEFKGFELVFEKINEIAELLQEL

SEQ ID NO: 696 - protein, 553 aa, unidentified
  source 1..553: note = Related to JAHRVL010000217.1; note = Kordiimonadaceae bacterium
MSPHLPHFVARIVLLKNLLDVNTSRELATFLKINYENQLIFHAYRVPSHEKYLTFEIPKKSGGTRRILAPATALKLIQRSLAEKLLEIYKPRASTYGFCLGRGVVDNAKQHLGKRVILNVDFENFFPSINFGRVRGLLMAKPYSMPKEVATIVAQICCHDNQLPQGAPTSPVVSNMICRSLDRQLQIMARKHNCWYTRYVDDITISTNRRRFPPQIAQRTDDLSATEAQLGEEFKGIVENAGFNFNPSKTRILTNMERKEVTGVTINEFPNVPRSYVRQIRAMLHAWEHYGFAAAQEEYIKKYQPACRNDKKGAVNFEWVVRGKLEYLRQVRGTQDPIFIKQASRFNLLASSSIKLPLAAETTDVTTSTWIVQSTSADGKTLQEGTAFFLEGVGLVTCEHCIIGPTIIFSASSPTIEFPVVASKKNAYTDVAILNFTDDLQPTKTQDLRRNKGLGDNLPPPLTDIRLIGYPNWALGAGMSIRLGRVTSINHDEPRYFQIDASIISGNSGGPVLDAEGFVLGMASRGAPNQEDAQKTNDHRVVPIQAIFDLCNQ

SEQ ID NO: 697 - protein, 590 aa, unidentified
  source 1..590: note = Related to JAAXWZ010000064.1; note = Chlorobiales bacterium
MSLSNPLPPRNAASLTELSILQTKREVASLLGIKYKYLIYYIHKYPHDKRYTSFQIPKKSGGVREILSPIGPLKFIQRRLSEVLLKDYKVKPSVYGFVKEKSILKNAQRHVGKRYVFNADLKDFFPSINSGRVRGMFMSPPYSLNKEVATFLTQICCHNNALPAGAPTSPIISNIICRSLDNQLQELAKENRCTYTRYVDDITFSTTLRSFPQSIAHINEAGQIEAGSRLNQIVSANGFQFNSKKVRLQAKNKRQEVTGLTVNEKPNITRKFSNQIRAIIHAIEKYGLEAAEKEFLAKHQKKHRNPKLPTASLLRVLKGKIDFLGMVRGKCDPLYLKFLRQLKAIAPQMVKDLPEPRKECTKVEVWTEGKTDWKHLKAAFTNLKGQGYYINLEIDFKEFEDSMGEGELFKHCPIWSKTTHQSPLICIFDRDIPTRTKEVMNNGRFKDWTNNVFSFTIPVPEHRQSTQEVCIELYYKDSELKREDSNARRLFLSNEFDAKTTIHKEIPGLICPDKKAKDAKKLTVIDNNVYHSLNHKRENIALPKDDFASKVLAGEKNFDDFDFSQFKKIFDVIVEIADFSRRNYPSNLSP

SEQ ID NO: 698 - protein, 546 aa, unidentified
  source 1..546: note = Related to JAHJHP010000073.1; note = Candidatus Omnitrophica bacterium
MEKMQLKLTASDDEQITKFKTLKNYYDIANLLEVESRYLKYLLYHPKKTHYKIFFIKKKSGNLRKICAPISSLKIIQQKLAHVLYLIYAAKPSTHGFCPNKSIVTNAQLHIKKKYVFNIDIKDFFPSINFGRVYGMFNGWPYGLPSRVSAVLSKICCNDNELPQGAPTSPIISNMICAKLDSKLQELAKRCNITYSRYADDITFSSTSRLPKEIVEFEILDSSVAITTGERLRGVLNNNGFEINNEKVRLKYKTNRQEVTGLTVNEITNTKRRYVKQVRAMLNAWEKYGLKKADEEHFNKFNIKQRNPEFKKASFMQIVEGKISFIKMVKGEKSPVYRKLANRFINLSGKKKLKYFIDPNDEIKAALWVLEDDITGYQGSAFMLSGVGLVTCQHVLSKNIQAFKCEDPSKKYRVSSVLQDKDCDLAILKIDTEDSHYLKAGRSEVIRHGELITIAGFPQYRLGGSLIIIESKVAGFYPRFNFKRILIDKQIVGGNSGGPALNRDNEVIGIVATGAENFETTTKTIEYGIIPIELIFEMLKKSEICI

SEQ ID NO: 699 - protein, 536 aa, unidentified
  source 1..536: note = Related to JAHJDL010000235.1; note = Candidatus Thermoplasmatota archaeon
MNNYIEVDKNVLREFKNLKNERDVANLLQIPYNVLHYYIVINRNNNYKKFIIKKKNGEIRTIYAPISSLKILQRKLHKILSEFYKVYYRPSVYGFRDNLSIVDNARKHQDKKNIFHIDIKDFFPSISYKRVIGLLSSGIFNFPYSVSIILTKICCYQGMLPQGAPTSPILSNIICSKLDYELQLISKDNYCTYTRYSDDIVFSNTANTFPKDIATDGKCSDKLVSILLRNGFKINDSKVYLQRNIQRQVVTGLTVNQFPNVKRIYVKKIRAILHSWEKYGLKNTESIYCKKREVEKENRKEFMCSLVKVIEGKIAFLKMVKGKDNYTYLKIYKRFCDLIGREFPYHDLLNALKVEKRVMLNKYAKSIRKCIYRCNQSYAYDIFKPTNDLINSLDNLGIDARDYHRFGDRIDDLYMIFYEGTGYIERLKEHSLDRTIITEINILRTYYRHDIDHGKTNEIRRKRIKTMKVIQKYINKNSIINASELDLYIFQKKLYDNVMIFLEELEESINKNTYNNDTTGNIRRLIKEIISSLKRL

SEQ ID NO: 700 - protein, 509 aa, unidentified
  source 1..509: note = Related to LCSE01000017.1; note = Parcubacteria group bacterium GW2011_GWA1_59_11
MQAFFKASNLELINRFHKVDGLIDLANLLEVDSSELLLLFYGLRRGGGYYKEFSIPKKTGGERKILAPDSRLKFVQRKLAYVLSLVYFGRPSVHGFRLGRSIITNAECHARKKCLLNIDLKDFFPTIHFGRVRGLLQAKPYGLSKTGATAVAGICCFWGKLPQGAPTSPVISNMVCAKLDYELQALARGEGATYSRYADDITFSTQRRNLSENIVKFENSSFIAGPKLVEIIRKNGFEINKDKIRMRFLTERQEATGLVVNKFPNVKRSFIREIRIMLHMWRKFNLETASLFYGMKFPGREIYFPEIVRGKINFVKLVKTERDPTYLGLAEKFNDLVGKPVFKIVPIKDWPDEEYIPAGHRYRAIETLETIFANADKEILISDNFLRKDIVGLLEKQVGRSPRLKIRLLFSRGRYKSEERKYAECIEAIKKMVSLHKDLSIDCREVLPGGPHGRNIIIDREEVYHSGHSLDQLGSRADSIIRMRIQSAKRDALQDIETWFANSAEIPLI

SEQ ID NO: 701 - protein, 322 aa, unidentified
  source 1..322: note = Related to JACPLU010000002.1; note = Parcubacteria group bacterium
MRPDLLNSPEVLKEKFRNLKTLIDVADILEIDCKTLIYLVYRKNKPTNYKEFVIKKKSGGERRILAPTSTLKILQRKLNYILSICYEPRPSVQGFVNNRNIVSNASAHSGKKIVFNLDLKDFFPSINFGRVRGLFLKPPFSLPAPVATALANLCCHNNQLPQGAPTSPIISNLICSRMDGAFQALVKKYNAVYTRYADDITISTRQAFFHKEIVESGSAPLCGKGILSIIASNGFIINDAKTRILRTGRRQEVTGLVTNRTPNIKREYIREIRVLLDKWRKYDLRVAEEAYFKNRLKERAPHIKSVEFSKIIEGKINFVKDG

SEQ ID NO: 702 - protein, 551 aa, Nitrospira sp.
  source 1..551: note = Related to NZ_LT828648.1
MDTQLKASQDTIISLFAALRTPRDVAKLLEVPYGLLIYHLHKTPPSTRYISFAIRKRAGGERIISAPGTALKILQIKLNYVLKTVYRPNSCIYGFIVNGGIVKNASVHANRRLVFNLDLKDFFPSIHFGRVKGMFSSPPYNCPSEVSTVLAQICCLPKTYPSLAPYAQLPQGAPTSPIVSNMVCSSLDSQLLRLAKKYKCSYSRYADDITFSTNLPRFHEAILVESQAEEGRISVTAGSELKAIISSNTFRINENKVRLQRAMQRQSVTGLTTNKFPNPPRRLIRQIRAILHAWTKYGYENAQNEFRSRYFNRTRNPNKMAPELKHVLHGKINYVGMVRGQTDPLYLSYLKQLKALAPELIIRQVIDVMDALWVLESDGAYAQGTGFSLKGYGIVTCYHVLRARTKLFKANTPAKKYNIEVIIQDQELDIAVLATDGPQGPELLLEEGERPRQDDWILLTGYPSYSAHATGVVRRGRVTGYYQFFGTERMLIDTPIVYGNSGGPVLNQSNKVVGIAAKGPVSLNDAQKTEKFEVIPISILRRLAPPAPTAQ

SEQ ID NO: 703 - protein, 528 aa, Ruminiclostridium sp.
  source 1..528: note = Related to DOHN01000106.1
MNTELKSSDEELKKKFFALKNKHDICALLEIDIKTLIYILYRKMPSTNYSTFTIQKRSGGLRVINAPSTSLRILQQKLNYIFQLIGMIAPCAHGYINGKSIVSNAKPHAKKRYVFNLDIEDFFPSINFGRVRGLFMSYPYYLPKEAATILAQICTYENELPQGAPTSPIISNMICVKMDKQLMKLAYDTKSYYTRYADDMTFSTTLRMFPSELAYNKASGEIVASSSLTKVIIDNGFKINNSKIRLQKSTQSQQVTGLTINQMPNVKRTYIRNIRAMLHSWEKYGLDKAEEEYLSKYNYRNKDYIKPCFQDIVKGKINFVKMVKSEDSKVFRNLAIKYNQLAGSGFSDYTINQPSEEILLQIYTEGKNTEHIEKAIHILDKDLSALIYNGKIKIVNGVEHRSGDQQLKTTYEIMSKSKNSNKFLFVWDCDSKNKINSLVEENNFFKFVFASNTDNTKVEKGIENLYPESLFTQDLYSLEETKNDYGGKKSEEKFDKSKFLNKIKEETDPYVFENFKPLFREIRNILDM

SEQ ID NO: 704 - protein, 527 aa, Aliifodinibius sp.
  source 1..527: note = Related to NSKE01000007.1
MDVELNYSNRELKQKFANLKSLREVSDLLEISSDKLKYYLYILDDEKKYNEFKIPKRSGGTRSISAPNDSLKILQQKLNHILRLFYNPRVCVYGFVNDRDIVEGASKHTDKKYVLNVDIKDFFPSINFGRVWGLFQAKPFNLPEEAATVLAQICIFKNSLPQGAPTSPVISNFICAKLDSELTRLAKKHKVTYTRYADDLTFSTTIPVFPKSLAKINDAGQTIVGSELEEIINDNGFEVNHDKVKLMNSSQRQEVTGITVNEFTNVNRSYVRKIRAMLHAWEKFGYENAEDTFHREYCNPGINPERSKPPLDKVIKGKLEHLGKVKGKHDPVFLKYYHKLVKLDDKYEREHYNKKYQLLDHNEYPFILDRLNDRFQDIKKLKPHPRGYAFEDFLNELFKTYSLEPRKPFKNVGEQIDGSLNFEGNAYLIEAKWQDKNIEAKHLNNFQVKVDSKASWARGIFISISPFTDGCLKNFREGKSTKLLGILGDEIESMLKHKIDLREVLKYKARKSVETGDFFTRIENELK

SEQ ID NO: 705 - protein, 364 aa, Nostoc sp.
  source 1..364: note = Related to CP046703.1
MSKDTSHSLLLYDSCKELSEKFKKLESPQDVAQLLEVPYKNLIYYIYRKSEDSRYNTFIVPKKSGGSRTIHSPNKSLAIIQRKLSQVLYTIYRPRASVHGFAAKRSIVTNAKAHIKKKFILNLDLKDFFDSINFGRVRGVFIAKPYEVNEKVATILAQICCFNNKLPQGAPSSPIISNLICAKMDSELQRFAEEYGLFYTRYADDITFSINRDELPSALVDSYKKGLPHVVLGKELKSIIEKNGFQINDAKVRLAYKTQRQAVTGLIVNKSVNVNRKYIRNLYGALHAWEKYGLEQAVETYISKYAKKPILPEKDIPAFLDSLRGKIEFIGSVRGKDDDLYQKLLNIFNGLRRKEADKESIAVE

SEQ ID NO: 706 - protein, 364 aa, Anabaena sp.
  source 1..364: note = Related to JAAVWA010000002.1
MSKNLSHSILLYDSCEELSKKFKELKSPRDVARLLEVPFGDLNYYLYRKSEDSRYKTFIVPKKSGGSRTIYSPHKSLSIIQRKLSQVLYAVYRPRASVHGFAVQRSIISNAKAHTKKKFILNLDIKDFFDSINFGRVRGVFIGKPYELNDQVATILAQICCFDNKLPQGARTSPIISNLICAKMDSELQRFAEKYGFFYTRYADDITFSITREELPTELVACYKKGLPKVVLGTELRSIIETNGFEINEAKVRLAYKTQKQEVTGLIVNNKSVNVNRKYIRNIYGTFHAWEKYGLEKALEIYKSKYAKKSILPEKDIPHFLDSLRGKIEFIGSVRGKDDNLYQKLLTIFNDLKSKETNAENIEK

SEQ ID NO: 707 - protein, 377 aa, Phormidesmis priestleyi
  source 1..377: note = Related to NZ_LXYR01000055.1
MKKKAYLSLFLYESCEELSKKFQELQSPHDIAQLLQVPYEYLTYYLYRIPHGSRYTEFRVLKKSGGYRTIHSPKGSLGIVQRKLSQVLYAVYRPRPSVHGFAASRSIVTNAKAHVNKKFVLNVDIKDFFGSINFGRVRGMFIANPYKLDEKVATVLAQICCFDNKLPQGAPTSPVVSNLICAKMDSELQRFSKQHGLLYTRYADDITLSSNRNELPTSLVSHYEKGLPNVMLGDELRSVIERNGFQINEAKVRLAYKTQRQEVTGLIVNQTVNVSRKYVRNIDGALHAWERYRLEAATETYRAKYAKKTTFPEKESALFLDSLRGKIEFVGSARGKDDHLYQKLLKKFNDLRTREAIDQKTTETEPLQTTLELPFND

SEQ ID NO: 708 - protein, 358 aa, Nodularia sp.
  source 1..358: note = Related to REBL01000169.1
MNKNSSLSILLYDSCEELSKKFKQLQSPQDVARLLQIPYDYLIYYLYRRPDDLRYTTFSIPKKSGSHRTIHSPHKSLAIVQRKLSQVLYAVYSPRPSVHGFAASRSIVTNAKAHTKKKFVLNIDIKDFFDSINFGRVRGLFIAKPYELNEKVATILAQICCFNNKLPQGAPSSPIISNLICAKMDSELQRFSKENGLFYTRYADDITFSLTRNELPPGLVSSYQKGFSQVVLGNKLRSIIENNGFQINNSKVRLAYRNQRQEVTGLIVNQGVNVNRKYIRNVYGALHAWEKYGLEEAVKVYISEYAKKSVSPKQKYIQDYPDYLTSLRGKIEFIGSVRGKDDGLYQKLLNIFNELINK

SEQ ID NO: 709 - protein, 366 aa, Anabaena subtropica
  source 1..366: note = Related to JACJRF010000019.1
MKKNISLSPLLYDSCEDLSSKFLQLKSPRDVARLLQIPYNYLIYAIYRKDESLRYRTFNIPKKSGDYRVISSPHKSLAIIQRKLSQILYAVYKPRPSIHGFAAKRSIITNAQAHTKKKFILNIDIKDFFDSINFGRVRGLFMAKPYELNEKVATILAQICCFNNKLPQGAPSSPIISNLICSKMDSELQRFAKEYSLFYTRYADDLTLSLTRDELPSELVASYKKGFSQVVIGNEVRSIIEQNGFQINNSKVRLAHRTQRQEVTGLIVNKNVNVNRKYIRNIFGTLHAWEKYGLEESVKTYISKYAKQPILSQKDVPTFLDSLRGKIEFVGSVRGKEDPIYQKLLSIFHGLKNKEIDNAIVVDSEN

SEQ ID NO: 710 - protein, 354 aa, Amazonocrinis nigriterrae
  source 1..354: note = Related to NZ_JAECZC010000098.1
MYESCEDLGKKFKELKSARDVAQILKVPYNYLIYYIYRTSENSKYQTFNLEKKSGGYRTIHCPNNSLEILQRKLSQVLYSVYNPKPCVHGFAANRSIVTNAKVHTRKKFVLNIDIKDFFDAINFGRVRSLFIAKPYQLNKEVATILAQICCFKNKLPQGAPTSPIVSNLICAKMDKELQNFAKENGIFYTRYADDITFSINRENLPSGLVSSYSKGFSKVILGDELRSIIENNGFQINESKVRLAYINQRQEATGLVVNKGVNINRKCIRNLYGTLHAWEKFGLEQAQKTYIFEYAIKPVSPNNKVPPFLDSLRGKIEFIGSVRGKDDPLYRKLLNIFHELKEKESDKNNIIVP

SEQ ID NO: 711 - protein, 364 aa, Leptolyngbya sp.
  source 1..364: note = Related to JAAHFU020000005.1
MESRSDFLQPLLYESCEELAKSFKSLKSPRGLASLLKIPYEYLVYYVYRFPQDRKYRAFKILKSSGGHRAILVPNKSLKIVQRKLSQVLYSIYNPRPCVHGYVPGKSIITNAKSHTRRKFILNIDIKSFFKSINYGRVRGLFIAKPYCLNPPVATFIAQICCHENHLPIGAPTSPVVSNLICSKMDSELQRFAKEHGCFYTRYVDDMTFSINKKNLPSALIANHGPGFSEVVLGNQLREIIEEDNGFQINSSKIRLRHYTQKQEVTGLTVNKFVNVDRKYIRNLLATIHAWEKHGFQNTIDMYMKKYAKESVLPGKETPNFLSYLRGKIEFVGSVRGKNDLTYKKLLNKFFELKTRDSKMIRGI

SEQ ID NO: 712 - protein, 372 aa, Synechococcus sp.
  source 1..372: note = Related to NZ_PCGE01000062.1
MRNQKTISLEGRTDDLQQDFLKVLNNRDLAKLLEISYPQLIYHSLKTINSVTRYQTFQVQKKSKGTRKICVPNKSLKIIQTKISQILYSIYEPKSCVHGYVVEKSIITNAKSHRRKEFILNLDIRDFFGSINLGRVRGLFIAKPFSLPKEVATTIANLCCHENKLPQGAPSSPILSNLICQQLDRELQYFAQKNRLYYTRYADDITFSSEYLESLKSLIKNLELVTENYPILLNNELEYIFTKNGFTINQKKVRLLYPHQKQQVTGLIVNEKLNVDRKYIRNLRAALYAWEKFGLEEASQVYLEKYAKTPTLRRKKKSSFIEAIRGKIEFLKNVRGESDPITRKFLDKYSELYEEYKKNVIQAKEEPDSQST

SEQ ID NO: 713 - protein, 369 aa, Synechococcus sp.
  source 1..369: note = Related to NZ_CP016483.1
MRNQKTIFLEGKTDDLQQDFLKVLNNRDLAKLLEISYPQLIYYSLKTINSDTRYRTFQIQKKTKGTRTICVPNKSLKILQTKISQILYSIYTPKSCVHGYVFGKNMITNAAAHRRKAFVLNLDIQDFFGSINLGRVRGLLMAEPFSLSNTVATTISNLCCYQNKLPQGSPSSPILSNLICQKLDRELSHFAKKHRFYYTRYADDITFSSKSLDALPFLIKNLDLVKEKYPILLSDELEYIFTSNGFTLNQNKIRILYPHQKQQVTGLVVNKKLNVNRKYIRNLRAALYAWEEFGLEKTSQVYLEKYAKTPTLKQKKKSPFVEAIRGKIEFLKNVRGKSDPITQKFLDKYSELYSRDVTQAKDDQDSQST

SEQ ID NO: 714 - protein, 351 aa, Synechococcus sp.
  source 1..351: note = Related to NZ_CP016477.1
MYLESSCERLKHDFLKLENNRELAELLNISFSRITYYVVRIPDSARYRSFQIKKRSGGFRKIDTPIKSLKIIQQKLSQVLYSVYQEKSCVHGFVVNKDIISNARAHTKKDFVLNIDLENFFGTINFGRVRGLFIGEPYNLPQDVATMIANICCYNNQLPQGAPTSPIISNMICERLDRKLQQFARKYKLFYTRYADDITLSATRKEIPSSLATVSPENRNKIELGDELQKIIYENGFSINHKKTRIAYSDQSQKVTGLIVNKTVNVPRKYIRDVRAALHDWDKNGYSKAQEKYHLKYAKQPSLQSKDSPSLHDSLRGSIEFIGHVRGRKDKVFCRLIAKLTVLKYRDLSKS

SEQ ID NO: 715 - protein, 715 aa, unidentified
  source 1..715: note = Related to JADZAP010000042.1; note = Ignavibacteria bacterium
MIEYDNKYNQYLHKFTKIKTSLSEDKFRLVEINLKTILSTKTFNGLLFTNECLNYFINKDKNKFPDWFINNIESEIKRRDELLTLKNNFFKIKHEHELAGILGLDYGTLVYHIFKVPDNRKYKIFKIPKKTGGYRTLCSPISNIKLIQKKLSEILYEIYIPRINAHGFIPGRGIVTNARIHVKQNAILNIDIKDFFPTINFGRVRGLFLNKPFYFPKWIATLIAQICTYQNQLPQGSPVSPIISNMICSKLDNKLSAISKKYFCYFSRYADDITFSTKKYDFPEELIRKIRIIIEEEGFIVNNNKFRIQKKNQRKEVTGITVNEKLNVKRKYIRKIRAMLSSWEKLGYENANNTFNKKIKPTYPHINFLPRLDNSLHGMIEYVGQVRGKEDNIYLKFLEKYNALNKTPHSERAINNNETDSKVEKREEHNQNPQHVPIKVCELLNSFKKEGSYLKKLVHNDEDKPDLPKILDGAKNEINTKKSILPYELYSNIWVNLIRLYEKEGMGVWNRNDKKHPISITKFNDKIIQFKKDIRFGASSDQTSMFTTIQSIIKELPNKQLENKIKVNPNLDKLDIYTDVQHIRNGLKIIIEHVIKYIDKGNGIRINLSELKWVNEKLYKYEISICNLNSSSYINKQVLIKRFNDLEHDLPKLKDKHSSKGHLFNRCDWYIEAIFDGQISKINVLSKDNPDGSTFEDANPKSNDGFTHILVFYGM

SEQ ID NO: 716 - protein, 549 aa, unidentified
  source 1..549: note = Related to JACKBS010000010.1; note = Ardenticatenaceae bacterium
MVYIYKIEPNRRYTIFSIPKHSKGERKISVPFKSLKFIQKKLSNILQTVYEPSIQTHGFIQERSILTNAKLHSRKKYVLNLDLKDFFPSINFGRVRGLFIHHYNFSPAIATVLAQICCFDNQLPQGSPTSPIISNMICSRMDNELAKLAKRYNCIYSRYADDLTFSTSEYYFPHELARTKIVNNFTITRLGEELRDTIEDNGFRINNEKVRLQKTNERQIVTGLVVNKFPNTTRKYVRQIRAMLYAWGKFGLQPAEEEYFKKYDKKYRAPYKIKPSYKNIVRGKIAFLGMVKGKEDKVFIRYWNQLVALAPEFGKPIVPSTISAFIPPIIYTEGKTDPKHMEAALQHLKKRGTFHDLIIKFHQEEGDSGLGHDNLLKMCQNFSKTPNSEARIFLFDRDVPGNVKSRVTGKGEFKSWGNNVFSFLLPIPTHRENNADSVCIELYFEDKDLMLKDEFGRRIFLNREFSNLSGRHKSLDLICSDRNKIKSSLLEIIDSSVYDSNDQNVALSKNDFSNLILERKHPFDQVDFSAFLKIFKVIGDIISKVNANA

SEQ ID NO: 717 - protein, 564 aa, unidentified
  source 1..564: note = Related to JAFQYI010000015.1; note = unidentified bacterium
MKKYTVKLNENEIKRRIADFCDDSKGEKTIEDFLDTSLKGLKIKLYKNYNELYKEKMILKRNGEQRILRVPNNYLKKIQRNLNYIIQTIYKGKFTSHAFEKASEGKSKNIITNAKIHTNKKFILKIDLKDFFPSISFPRIYGVFQKPPFNFDNKTARLLAHICIFQKSLSKDDVGELPQGAPTSPILSNLVCRNLDNQLFKLCSKNKCQYSRYADDITISTNLSIMPNEIYSNNDISTQIKEIIKQNGFIINQEKTKLLTQKRRQMVTGLVVNKKVNLKRNYIKNIRAMLFQWQQKRIKYMRILKNKKNIFTIIKLIKKSNFKNINSKNKNERKKIIKDLLSNDKYNNTIYFIAMKSALLDVEKEMHDKYYQNKFDKPKFKRVLSGRIGFVRKVRGDEDDIYRKLWNQYCYLNNKKKKIKPLIIKNVSDDPIWNIINKGESMELELKQEYSEQHLLETINAFLNSKFNGTLIFGVEDLTHIIYGIDKELKTKSKDAFRNEIIHKIFDTFNPQKQLPVMCKFYERYKKTICIIEVQPYGERIYLDAKNKIYFERMDGYSQKRQDP

SEQ ID NO: 718 - protein, 576 aa, unidentified
  source 1..576: note = Related to DVOD01000049.1; note = Candidatus Limenecus avicola
MKKKFQHDLKASKQQILEKLDKISNNPLATKKDVADLLERNLQALCIKLYVNTDDLYEISKIQKKNGKERIIFKPNPYLKQVQRNLLYILNLKYESKFCSHGFEKDKSIKTNAATHVSKKYILKCDIENFFPTINFKRVYGVFKSPPYNFNPEIAAFLAHICIYQVSTTDKHDLGILPQGAPTSPLIANLVCRTLDNQLFKLAKNNKCYYTRYADDMYFSTYLTNFPEKLYTNGKLSNEIEEIIYNNDFRINYDKTKLMYNNQRQAVTGIITNKKLNVKRSYIKNTRTMLYLWEKFKNKYTLQLFNATSEKDTVLHLLSLCKSLIFFPSKSEFKKYHTLNVTEQEDLVQKYLNDDNKRKNMYYAIATELSLYEAEQLMHEKLYKNKVKKPFFKNVLRGKIGYIKLIRGEDDNLYRKLWNRYCKIINSNQFKPLIYPNTPDNRIYNMLHSVKEGLDVEFKEYYDKKKLLETVNSFLNSDKGGQLIFGINDITMEITGIDKEINKQQKGEDGLRTMITNIICSKFHPTSQLNITCKFHKIYNKTICRIEVQPYHNKPIYYEPGKYYIRQDGRKQLVQT

SEQ ID NO: 719 - protein, 578 aa, unidentified
  source 1..578: note = Related to LBOR01000005.1; note = Candidatus Peregrinibacteria bacterium GW2011_GWC2_33_13
MKKNEHKPKHNLFFSDEIILEKISSLQNNVFAEKKDMAALLKSNIIAIGIKLYKHNHLLYKSISITKRDGTTRTIREPNAYLKQLQRNLVHILNLIYKGKFCSHGFEKGKSIVTNAKFHTNKKYIFKIDLKDFFPSITFARVYGVFCSPPFNFNKDISILLAHLCIYQETLSSDSEGELPQGAPTSPIISNLICRSLDNDLFKLSKKYKCNYTRYADDITFSTNLSVFPKELYDNSQIGTELNKIIIKHQFQINESKVRLVSNKRRQIVTGIVVNKKTNTKQSYIKNIRTMLHNWEKAKYKYVHILLDSKVTLEKKIQLVKLSKIPIIKPCSEEVQVENFKKFFDEENKKNNIHNIIKLAIELGLQEAEAEMYEKLYKDIEKKPSFQRVLLGKMGHLKNVRGEDDNVYIKLWNRYCRIVNMNKYKQYSVKDIKEDGLWFLLYSQEENLNIEFKENYQKDTVLKVINSYLNSETGGVLILGVSDYPREIVGIDHEIKKHQKGEDGFKLSMQNAIIDKFKPNKSLNINYKFHKFCNKTICVIDIKHEKEPIYFSPEEKEFYVRQNGNTSKLNHSNPSETI

SEQ ID NO: 720 - protein, 533 aa, unidentified
  source 1..533: note = Related to SUTT01000012.1; note = Cyanobacteria bacterium SIG27
MKHNLKRKPKDIIEKFKALSSREDVADLLEISDKQLRYYLYSLSDTEKYTKFNIPKKNGGSRDITAPIKNFKLIQKNLAHILYLIHNPRICSYGFEKNYKNKEQETVYKGICPNAKLHINKNNVLNVDLKDFFTSINFGRVRGMFMALPHNFSSDVATVIAQICCTNNALPQGAPTSPIISNMILKSFDSKMLKLVKPLKCTYSRYADDITISTNLKTLPKEIYDYTQNSISTDLNSIIEDNGFEVNKQKIRLQTKIQRQSVTGLIVNKKTNVPRDYIKNIRALLFRWEKDGEENADKYFQEHFKKCKLRRVLLGRISHIGNVRGVEDPIFIKLWNKYHILIGQSDKIKALISEDKEILTLISKGENSELEFKQAYEYSQDEKRCNNKLYYRPQGKKEDIPTMKHKVLKTVCAFLNSNSGGTLLLGVEDNSTIRGLKEDIKNNKNNLDSLALSIDHAIKDNITPSPIGNIKTKFYKIHNKYICKIDIEPYYDPVYLKTHGGIFYVRHDVESVEIKEKDKIDQWIRAHNKLQRN

SEQ ID NO: 721 - protein, 570 aa, Muricauda sp.
  source 1..570: note = Related to NZ_QBTW01000011.1
MKKNFTDLKTKNDLAEFLDITIKQLDYNAYNEDKKYNKFHVPKKNGSKREIYAPIPSLKTIQKKLSKELTKLYLPKKHVHSYTSKKGIRTNAKIHVNQRFVFNIDLENFFPSINFGRVSGVFKAPPFNFNNEVAYILAQLCCHQNSLPQGSPCSPVISNLICRSLDNDLKRLAKNNKCFYSRYADDITFSTSLRRFPDSLCKIVKHEIQIGEKLNEIICKNRFSINPNKSSLKRPYEHQYVTGLTVNQKVNVKRKFLKQVRAMLHAWETFGLSNAAQEHFNKYSVRHKSKKDDSLFIRIIEGKLLFVADIRGKNDPIFKKLLAKFKVLAPKDTLKNYLSYQGDKILVYTEGNTDWMHLKHALESFNVINNYLQVNSAIKIYEYDETLTIGDKKLMEILRGHLLSDNTRPIIGVFDSDNPQTLGEFNPTRNRKYLNFDNRVFTFYLPQPFHRKTDKNCIEHYYKNHDLCIKDEYGRRIFLSNEFNDQSGEHIEMENVRCDFGQKKLRMTDGIIDSKVYDLEERSLALSKKDFARNILSKHDNFKKVNIDSFRLIFDRIQEIIKDIESIKNE

SEQ ID NO: 722 - protein, 598 aa, unidentified
  source 1..598: note = Related to JABFSO010000101.1; note = Cyclobacteriaceae bacterium
MESNKLSPEELAKKNEELRNSFLATDSIKKLAVFFNLRHSVLTYRVYKVPEDEKYKEFKLKKKNGGIRIILSPNEKLKFLQRKISDVIYLIYRPLIYSHGFEKGKSVKTNAQIHAKQRFILNIDLKDFFSSINFGRVRGMFMSPPFAFSPEIATILAQICCYKNALPQGAPSSPVISNIICLKLDRQLSKFALENKCYYSRYADDITFSTSCKKFPKQISSIKTGKVKLNTKLESIISKNGFEINEEKISFRSEYQQQIVTGVVVNVSPNVKRKYVRQVRAMLNAWGKYGLEEAEREHFEKYSTKNRNILRQRPSLRDIISGKVHYIGYIRKKLTGSDKLYIKLKKDLEKLIKEEDSIPKYQDNGSQLPLIITEGHTDWKHLKNALSHFKGFKKDAIDVEFWEYEQNLKFGDSVLKKFCLKESHKPKSRKYICIFDRDSPEIIKSMNGDNNSSFKYWGNNVYSFCLPTPSNRENYSNISVEMYYTDSEVNTIDTDTGKSLFFTNQIKETIEVNLTNNTTTQKREILKTPLAINEFDKKIFDYKVDLIKNTTGVQVAHSKTVFASRVYNSHKDFSNFDLSEFEKVFTIISEIIKHNSSQ

SEQ ID NO: 723 - protein, 543 aa, Azospirillum sp.
  source 1..543: note = Related to FR885511.1
MKFTELKANIQLAAKLNMDYSYFTYLIYKRTDDQNYIPYIIPKKSGGYRKIAAPCKTLKYIQRQIANFIYDEIQVKDCVHGFARGKDIKTNANYHLKRKHILNLDLKDFFDSITVNRVYGVFHGHPFNFPEKLSSCLAKIATYYGSLTQGSPLSPIISTLVCRRLDNDLKAFAVKYGLRYSRYADDITFSSIRTMKELFKENPVTNKIILCKELVDIITRNDFQINEDKVRYRNKTQRMEVTGLIINDKPNLVRNYRDQIRAMLHAWKKFGYENAEKEYLSKFSRGHKSFKQVIYGKLNFYKSVRGVTDHYYQQMAKLFNTLSPDMKLLLKPTPEEIIQKAVWVIDNTVNAEKNDSPIERMSQGTCFFLKNIGIVTAAHVLFPNKKNTTDEFDVDFNQSPMSNFYILNPTNPSHRVNVQLVNLDKNRDWAVLSLKNTNDLSINRDYFELESCCKIQTGTEIMLCGYPSFELGHQIRKETGQIVAKKTEHAVKKFEITADIRHGNSGGPILNNKMQVLGWADAADPSIVNEIGELLDNYKSTSV

SEQ ID NO: 724 - protein, 556 aa, Acidisphaera sp.
  source 1..556: note = Related to NZ_LMUJ01000063.1
MNDPTEQAKLEQAFRGLKTRDGVAALLGVNRRSLAYQVFRHPKPYISFAIKKRSGGMRTISAPNPSLKKIQRSLSKYLCAVYRTRNPVHGFALERSIATNGNVHLDKRYILKIDLNEFFDSIHIGRVIGLFEKVFHFNKDVATLLAQICCRTGSLPQGAPTSPVLSNLICWNLDNELRRVAMTHRCSYTRYADDITFSTNQARFPKDLATIAEIDGVAAVTVGAAIIGVVTANGFTINQSKVRLLTKTQRQEVTGVVVNVKRNVDRRFIRNIRATLFKWEKLGTLHLQKQYEDVYRRSANPSRPPAAIEDVIRGRIEHIAYIRGQRDTLYAGLATRFNKLAEKWLIIPATAFEAFTARLRRAVWVIECDGDKLSPDSEPSDGALMQGTAFYLEGTGWVTCAHCVEWDGIDNSKVKYLFRPDNPSKRYSFKISRSQPTVDVAVISADIPASEYEPLQIAATAPSRNNLVQVVGWPEFRLGDEITVMDSRIISFTMVSGIRRMRVSAPIIGGNSGGPGLNADGQVIGVVVTGSHKGEQTINNALIPISALSYLEDTPD

SEQ ID NO: 725 - protein, 378 aa, Clostridium algidicarnis
  source 1..378: note = Related to JACKWW010000005.1
MICSPLDTQLIRLAKKYGIVYTRYVDDITLSTFNDSFPEAIVKGEVSNLIIGSELENILKRNSFSVNLDKVFLNNNFTRQEVTGLIVNRFPNVKREYIKNLRAILHNCFKEGIYETALEYICKGYCKNKDIIKNSDNKECVNNWFKYVLKGKINFIREIKGANDYIFLKYAQQLNRLFNEELFNLDFLDEFIYNVVVLETMNPDNIVQGSGFFIKDRGLFTNYHVTENNEFYSVKTYKMENLGAVLKGMNEINSNIDIDYALYDLKSSKISGLELGESKNIKIGDKIVVIGYPEYCDNDSPNIQTCNIISRTNYLGECLYTISGRIVHGSSGGVVLNMNHKVIGIIKAGVVTLNESDTSSKQGFIPIHLALEHLNKGV

SEQ ID NO: 726 - protein, 554 aa, unidentified
  source 1..554: note = Related to JAAYMO010000138.1; note = Clostridiales bacterium
MLRDEFYRLSTREDVAKILEIEEKSLRYFLYAKKPDNMYTTFKIAKKSGGTREISAPAKELKAIQRKLAYILNLVYRVKPSVYGFFHERNIKDNASKHTRRKVILNIDLKDFFSQIHFGRVRGMLMNKPYGIGQEAATVIAQLACYKGILPQGAPSSPVLTNMICSPLDTQLTNLAKKHGLVYTRYADDITFSTFNPVFPKDIIERDLSSIIIGQELDAILKKNSFSVNPKKIFLNNNKVRQEVTGLVVNKFPNIKREYIKSIRAILHNCFKNGVYETAIDYVARGFCKNKDIEENIDNIEYRDIIILWFKSVLKGKINYIKEIRGSDDYTFLQYADQLNRLFGEEIFNVEKHNEFFNKIAYNVVILENRNKLVQGSGFFLKDVGLVTGYHVTEDRGFFMVTTYKGENIGIVSKEMNEIISDKNIDYAIYNLNNSSMEGLELGDSNEIEIGDKVTVVGYPDYIEGDTPYVHTCEVTSKTKYLGECLYTVSARIIHGASGGAVLNKDNKVIGIIKAGVVSYEEKEDVGKHGFVPIHIALKHWMSQQENQKINTEG

SEQ ID NO: 727 - protein, 554 aa, Clostridium perfringens
  source 1..554: note = Related to NZ_PJSO01000011.1
MINIFSKNDDELKKAFYALKSRNDLANLLEIEEKTLRYFLYGKSDDDKYNTFEIPKKNGQFRKIAAPISPLKTIQRKLTYVLSLVYKVKPCAYGFLKDRNIKSNAKNHSKKKVLLNIDLKDFFSQVHFGRIRGMLISKPYDIGIEAATSIAQLTCYKGVLAQGAPSSPILTNMICSPMDTQLIKLAKKYKLQYTRYADDITFSNYNEQFPQGIIKGEINNLIIGDELNNILTKNGFEVNMNKVFLNDNFTRQEVTGLIVNKFPNVKREYVKSLRAILYNCSRDGVYNTAKEYISKGFCKNKNVLENQDNEELVINWFKMVLKGKIDFIKEIRGSNNNIFLKYAQILNKVFNEDIYDLNILNKLTNNVVILNYEDNKCMIQGSGFFVKDVGLFTSYHVTESGAFFSVKTQYLETIGSVANEFNEISKDKRIDYAIYDIKKSTIEGFEVGNSKDIKVGDKVIIIGYPEYQEKDTPTIQTCNITSMTTYLKAPLCIVSGRIIHGASGGVVLDMNHKAIGIIKAGAASTEKEYKGKQGFIPIHLALEHMKNNKKSISN

SEQ ID NO: 728 - protein, 421 aa, Clostridium sp.
  source 1..421: note = Related to DMUT01000367.1
MVNIFKKSDEELKKEFYNMISRKDVAKLLDIEDKSLRYFLYSDKNKSMYTTFEIPKKKGNPRRINAPNEELKNIQRKLSYVLNLIYKVKPCAYGFINNKNIKDNAKNHVKKKMILNIDLKDFFTQIHFGRVRGMLMKPPYGIGVQAATVIAQIACYDGVLPQGAPSSPILTNMICSPLDTQLTNLAKKYTLKYTRYADDITFSTYESTLPKSILDYQVNSLTIGNELNHILNKNSFSVNPDKVHLNNNYTRQEVTGLVVNKFPNIKREYIKTLRAILNNCTKIGVYETALEYINKGYCKNKEIATSKEDKEKVCNWFKCVLKGKISYVSQIRGYKDYIFLKYAQKLNRIFNEEIFNLDYVDDFIYNVVVLETSNLDNVSQGSGFFIKDIGLFTNYHVTENGEFYNVKTYKMEILGVVSKEL

SEQ ID NO: 729 - protein, 552 aa, Clostridium sp.
  source 1..552: note = Related to JAHLDU010000027.1
MFKKTDQQIKDCFYKLKNRSDVSDLLEIEDKSLRYFLYVKRPENLYVTFTVLKKNGNKRIINAPQAELKSIQRKLAYILNLVYKIKPSTHGFVIGKNIVTNANNHCKRKAILNIDLKDFFTQIHFGRVLGMLVKGPYDISKDAAIVISQIACCNAVLPQGAPSSPIITNMICSPLDTRLTRLAKKNNSKYTRYADDITFSTFDKQFSSNMINSDILNLKLGKDLNKAIKDNGFVVNEDKIFLNTKNTRQEVTGLVVNKFTNIKREYLKNIRAILHNCEKDNVYNTAKTYVKKGYCKNGQIKANIDDKNYETQVVLWFKAVIKGKINFIKDIRGKNDFIYLKCAEKANIIFKDQIFNISKLKDFKDKIISNVLVLKGDNNGVQGSGFLLKDFGLVTSFHVTQDNAFYKAYHYNEYEETSLCVISKEINEIKSDLNIDYAIYKFNKDNENFLEAGSSVEVGDKVKIIGYPNFMKGNSYNVQTCYITSRKYYMGAIFFTVGGTVFHGASGGVVLNDQNKVVGIIKGGVVSNTESETNENQGFVPLDIVLTHFHQQ

SEQ ID NO: 730 - protein, 572 aa, Clostridium sp.
  source 1..572: note = Related to FPBY01000132.1
MFKASDDELIEKFNNLKNRADVAELLEVDEKSLRYILYVKRLENMYKKFNISKKKGGFRTINAPEGSLKTIQKKLSYIFSLIYNKKACAYGFIKGRDIRGNSKQHIKRNFILNIDLENFFDSINFDRVICMFQKPPYNVEKDAATVLSQLVCCDGILPQGAPSSPIITNMICRPLDTQLVRLAKKFSLNYTRYADDITFSCNKSTFPKEMAYYDMQEKLCIGKSLQEVISRNGFKINTNKVFLNYKDRGQEVTGLIVNRFPNLRREYLKEIRAILYNCRRYDIYSQAKKYIKESSYTNKNIMRISMLEDKKSKEIIYNWFKNVIIGKIRFIGNIRGKESPCYIKYALECNKLFDEEIFKIIKSKSQELIENTVFVVKIEKGSKYIQGSGFFIKDLGFVTSMHVTPDIDETYDVFTPKEDIPRKLCLFNNKANNQELDYSIYDLKNPTSNYLKLGDSSNLNIGDRITVCGYPMYDKGDSIYIQNGEITNLKKDYFGSRIYTVSQRLIHGISGGAVLNTNNEVIGIIKAGAENMDEEDESIQGFIPINDVIEDVKSQGIELRPKSILVKSNNYN

SEQ ID NO: 731 - protein, 554 aa, Enterocloster sp.
  source 1..554: note = Related to JAKNTH010000001.1
MLEEPNMVREKFFNMKSREDVADILGIKEKSLRYFLYSIKPDNMYVEFSISKKNGGERVICAPNDKLKAIQRKLAVILNMVYKTKPAAHGFVLDKNVATNAKGHVKKKYVFNIDLENFFDQIHFGRVRGMLMKPPYNLGEEAALVISQIACYKGKLPQGAPTSPILTNMVCAPLDTQLTKLAKKYNLQYSRYADDITFSTYKADFPVEIAYVDFNGVHVGTVLEELIKKNNFLINYNKVRISDYRQRQIVTGLVVNQFVNLRRDYIKEIRALLYSCKVKGLLESAKLYVEKGKCKNPKIIEAVNSGKSEKEDEIINWFLQVLKGKIEYIKSIRGDNNPTYLKYASELNRVSGKIFFRVDEYLDFIKQIEKSVFIIEINALDDYIQGSGFLLDPDLLLTNHHVTKKEGFYKVTTFKEDQIGIISNDIKFLKRNENIDYACYNGFGREDLIPWELGDSDDIKIGSKIIMIGYPDYNLGNTPDVQTVYVTGERTFMGQKLITVSGRIVHGASGGVVLNEEHKVIGMIRCGVVSYCETDTTNNHGFIPINDIMKDIKS

SEQ ID NO: 732 - protein, 553 aa, unidentified
  source 1..553: note = Related to JAFQLB010000113.1; note = Lachnospiraceae bacterium
MRQDSEQIKEKFLTLETREDVAALLGIQDKSLRYFLYSIKPDNMYSEFIIKKKNGEDRHIYAPDRRLKNIQRKMAQILNCVYKIKPAAHGFVLDKNIVTNAENHIKRKYIFNIDLENFFEQIHFGRVRGMLMKPPYSIGSEAALVIAQIACYKGKLPQGAPTSPILTNMVCSPLDTQLTKLAKKYNLHYTRYADDISFSSYRDELPTGIVYEDLEGIHIGKELREILSQNSFAVNSKKTRVFDYRKRQEVTGLVVNEFVNIRRAYIKKIRAILYHCKQDGIYETAKEYVEKGNCKNSSIIEMIKNETEENKERVAEWFKEVLKGKIGYIKFVRGKNDYVFLKYAKEINELYGEEVFSIETELKLIDKIEKSVFVLEFESEDNYVQGSGFIVRDIGLLTNYHVTDNNEIYTVNTYKGEKKCCVSNEMNLIKNNESIDYACYLYGKTSEDALELGNSDELDIGSEVLVIGYPDYYTGNSPEIQHVNIISQRPFMGQKIFTISGRIVHGASGGVVLNMSYQVVGVIRCGSVTLKETESNSLQGFIPINEIVNDLMA

SEQ ID NO: 733 - protein, 564 aa, Variimorphobacter saccharofermentans
  source 1..564: note = Related to NZ_JACEGA010000001.1
MINARTDIETEKLFYQMQSREDVADILQIEDKSLRYFLYAIKPDNMYTEFKIPKKNGEYRKISAPNKKLRSIQRKLADILNIAYKVKPASYGFVKNKSIYQNADNHCKRKNVLNIDLKDFFTQIHFGRVRGLFMKPPYNLGEEAAMVIAQIACYRGVLPQGAPTSPIITNMICSPLDTQLTHLAKKNQVVYTRYADDITFSCYKNSFPEALVYLDKGDIHIGKELEFILKKNNFVVNMNKVRLMDNRRRQEVTGLVVNKFTNLKREYIKEVRAILHCCKNKGIYDSAKIYVNKGKCNNHRIKAYIQNEDKVDRKEDVSNWFEQVLKGKIGYIKLIKGNDNPTFLKYAKQLNIISNKKIFNIDEYDKFHNMIDDNIFILQCTSKNVARQGSGFLLKTYGLMTSYHVIPDDNFYSVKKNTGKQVGVITKSSNLYKESYEIDYACYINICNNFDKSQNGFELGDSSNLKAGDKVIIIGYPNYMDGDTPYIHTCYITNKTSYFGQELYTISGRIAKGASGGVVLDLLHEVVGIIKGGVTSLEEDDESNDPEFKHGFIPIHDVIEHMRN

SEQ ID NO: 734 - protein, 326 aa, unidentified
  source 1..326: note = Related to JAAZLI010000107.1; note = Bacteroidales bacterium
MEISALKHVKDKFYTLETRQDVSELLGIEDRSLRYFLFKRRPENLYYKFRIPKGMDGFREINAPKDELKTIQRKLANILNEVYEAKICAYGFIPGKDIIQNARSHVGRNLVLNIDLKDFFIQIHFGRIRGMLMNPPYSLGREAATTIAQIACLNGTLPQGAPTSPVLSNMICAPLDNSLMKLAKKTKCTYTRYADDLTFSTHRKEMDKALVYFDNNNDVVLGAGILSLLRKHSFKVNPDKIAFRTRYDRQEVTGLTVNVFPNVRRSYIKRLRAILHKCKKDGVYGTAKEYAIKRQIKNRVWFVNHADSSQKKELINWFRQVLIGKI

SEQ ID NO: 735 - protein, 560 aa, unidentified
  source 1..560: note = Related to JAFVSK010000006.1; note = Clostridia bacterium
MNRDEVKKAFLELKTREDVAELLGIKERSLRYFLFKRRPERLYTTFTITKRNGKPREISVPCREWKEIQRKLADVLSCVYAPKICAYGFIPGKSIVDNARQHTKRHLVLNIDLKDFFTQIHFGRVRGLLTSPPYGIGEEAATTIAQIACVNGVLPQGAPCSPVLTNMICVPLDNSMMKFAKATDCVYTRYADDISLSTFKRSFDPEVVYLDGEKLCIGSKLQHIFDKHSFQINPEKVAVRRNTERQEVTGLTVNVFPNLRRSYIRNLRAILDHCQRDGVHQTAKTYIEKGFCKNPSILATYKCDEARGSVEDWFISVLKGKIEYIRNVKGAESLTYLSFAQKLNEIVGVEILDISLLNRLETIAEKNTFVLECNQGESFYQGSAFYVPNIGLITSYHVVESGEFFYGYTHMDYPSKPAMVIGLSLNRVADNREIDYAIFSPPLTDLGEYALKIGDSKKLRVGNNVTIIGYPNHQIGNTPFIQNCAITSEKTFMSAPFFTVSGSIVHGASGGLVLNTGFEVVGIIKGGIQSLDDDDVSGNQGFIPIHLVLEDMAEKRKDVK

SEQ ID NO: 736 - protein, 566 aa, unidentified
  source 1..566: note = Related to JAFUCD010000004.1; note = Oscillospiraceae bacterium
MESKEIKTKFFQLKTRTDVADILGIDERSLRFFLFKVRPENMYIRFQIAKRGGGFREICAPNRKLKSIQRKLADILEIVYREKACAYGFVRGKNIVQNARNHTKSELVLNIDLKDFFSQIHFGRVRGMLIKPPYGLGEEAATTIAQIACLDGKLPQGAPCSPVITNMICASLDNQLMRLAKKTGCIYTRYADDITFSTNKKQFDDEIIFLNGGSLELGKGLSNVLTKNSFIVNPDKITLRAKSSRQEVTGLVVNQFPNLRREYVKQLRAIIYNCSKNGVYHTAQQYIEKGFCNNTKIATVVHDPNHREEVENWFRQVIVGKINYIRQIKGAGHATYKSFALRYNRLVGEDFFEVPQDDLLAELMRSVYVLESEERQGSGFAVKGIGLFTSNHVTGDGAKYEVFLPDGQGDVEIKGIISNGDNLIDSDDTIDFALFDVPFANESNLEIGDSDEVKFGSDVIIASFPDYAKGNSVRIEHRTVAGEARLFGSKIIIIDGVIFHGASGGVVVNDKNKVIGIVKAGIQDAVSKDELLSNQRHGFVPINLVMQHIREHQRPASEENHQETMT

SEQ ID NO: 737 - protein, 555 aa, Ruminococcus sp.
  source 1..555: note = Related to FMHA01000009.1
MFKRSDNEIKELFSIAKTRTDIADMLEIDEKSLRYFLFVLRPENMYRSFFISKKNGGTRQIFAPSKKLRNIQRKLAYILNLMYKPKICAYGFIKNKTILGNALQHTKKAEILNIDLKDFFSQFHFGRVVGLLCSKPYSIGKEAATTIAQIACLNGILPQGAPTSPVLTNMLCVPLDNQLMQYAKKYGLVYTRYADDITFSSYNRCISDNIISKVGDKILLDDSLKKVLDKNSLIVNDEKITFRTKNLRQEVTGVIVNKFPNVKREYYKNIRALLHNCIQNGIYIEALKYIDKGYCKNRNIISFRSDPKKQPLIEEWYKSVLIGKIHFIKQIKGEHSFTFYSLALEANKVFSKNIFDLTYFNQMNEIINKNVFVLQSTDEMKQGSGFYVPGYGLFTSYHVTEDKDFYYLWQNDVKAVISPISADINQVSADKIIDYALYNISIANVASLSMGNSSNLKIGDTVVIAGFPNYIKGDTITKEECKITGKTKLFGAPFYKVSGKIVHGASGGIVLNTNHQVVGIIKGGCSSEDEDNTSIKQGFVPIDLVISDLKAKSVL

SEQ ID NO: 738 - protein, 568 aa, unidentified
  source 1..568: note = Related to PGXO01000004.1; note = Synergistetes bacterium HGW-Synergistetes-1
MDGNLPEKKLFYELKTQKDVAALIGCKERSLRYFLYAGNCIVKYRTFTLKKTDGSQRIISAPIPPLKKIQRKLANILNVVYKPKACVYGFVPKKNFIENAKQHVGCKYILNIDLKNFFNQIHFGRVRGVLMAKPYQLSQEAAGAIAQLACFNGTLPQGAPSSPILTNMVFRSFDNELIKFAANNGIKYTRYADDMTFSSYRNKIPEELATVSGNNVRLGTFLEKLLEKNNFEINPNKIHLFLKNQHQEVTGLTVNAIVNINRRYLGLLRVILYNCDKKNIDNPIYESAKRYIKLGYCKNNNIIELAKNDKNKDKIEKWFKQVLIGKVRFIKQVKGADSFSYYYFATRYNKVFKDTVFDLSLFNYVNMRIQQNVFIVEAGTNQGSGFYLKGYGFITCYHVVEKNKEEKKENEKEIYDSVCIYRCVDRSKQPFKRLRKEEIILKDKFLDYALYRLDENEVESAYKIGNSEKVELGEQVTIIGFPNYLEQDTFSLIKTHITSKSNFMNAPAFLVDSKIFHGTSGGAVLNKDSEIIGLVVAGSQDTAYELKNAFVPIHEIMASLSSKNIHEL

SEQ ID NO: 739 - protein, 549 aa, Anaerostipes hadrus
  source 1..549: note = Related to NC_021016.1
MEDNVKRKFKQLNSREDVANILEIEDKSLRYFLYCVKPDNMYKNFEINKRNGGTRIISAPNKKLKNIQRKLLQILENVYTPKICAYGFINGKSIYDNASIHLKRRQILNLDLKDYFLQINFGRVRGMLLKKPYELGEEAATVIAQIVCYKGKLPQGAPTSPIIANMICAPMDNHFMKLAKANNMKYTRYADDLTFSTRTEFPTSIVRIENDTVVVGKKILQILKKDGFLLNEEKIYLRSKDKRQEVTGLVVNKKVNVRRDYVRELRAILHNYKNMGAEDAIKLYVKKKKSTNISAVNIDTLSDKKRQETINQFNEILKGKINFIKDIRGEDDLIYIKYANELNRICNKEIFNLDKQKAFMEKLKNSIFILQSRYTCVQGTGFLLKGIGLITNYHVTEDDDFYDVCMCNKNKIAVISNKLNLIKRSKRIDYASYKILDAKEDQFLDCGDSSNLQIGSELKMISYPEYNDEDTPNIQTIEITGSREYMKNKIITISGRVIHGSSGGVILDQKHKVVGVVNCGPVSLEETDDTIIQGFIPINTILKDISMPT

SEQ ID NO: 740 - protein, 360 aa, unidentified
  source 1..360: note = Related to RBMT01000022.1; note = Planctomycetes bacterium
MLFLRQAEASPVIDFGCDPQPATCLFPTSACPVALRHAGCSGREAECRRTSALPLLHSQPQPFLRASDNELRTKFRALRALEDVADLLEIQPRSLRWYLYVDKVRCQYKERSLPKSHGGTRRICVPPIPLRILQDKLLRILTLIYAAKPCVTGFVLGRSVANNANPHVCKQHVLTIDLDNFFPSIHFGRVRGILQSPPYGVAPPAASVLAQLACHDDGHLPQGAPTSPIVANMVCGPLDSAMLQMASNNRLTYTRYADDITLSTNLRTFPSDIVRQDEHDTCEVGVVLRDLLAEHGFTIREGKTRLRSRLRRQTVTGLVVNEVVNVRRSYVRQLRALIHSCSTVGLLPSGYCQELCIECA

SEQ ID NO: 741 - protein, 454 aa, unidentified
  source 1..454: note = Related to JAFGTG010000124.1; note = Sedimentisphaerales bacterium
MEIVLRTNKEELKKKFGRLKSRADVADLLEVSDHFLCKILYGVKERRKYRIFEIQKKSSKTRQISAPPKNIAILQSKLNTILSLVYEPKPCVHGFAEGRNILSNAQHHTKRRHVVNIDLKDFFPSIYLGRVKGALMSKPFCVGRIAAEVISQICCRDDGILPQGGATSPIISNIICRSLDNDLMSFARKNRCKYTRYADDITLSTSSFRLPTAVGKVENGNLILSDTLVLIVEKHKFIINPKKVRYTPPFLRQDVTGLIVNEFPNVRRSYVREVLGALHAWEKHGYRAANKRYMSHFRLRGQAGLDLENVLRGKISFIRMILGDNSPIFRKLARKYNGLASNKIAIIQIEETDPYPLRGGNTRIQMWNRWFNRYKAAIFFIETTNSKGDKSAGTAFYIGNNLFATAGHNLEYGKPIFYFGDSPKAVDTFTEYNKKSTDIGLIRNMGEILGSELD

SEQ ID NO: 742 - protein, 558 aa, Posidoniimonas polymericola
  source 1..558: note = Related to SJPO01000018.1
MNSRQDVATYLGISDARLCAILYGYCDRRRYTEFQIPKASGGHRKILAPPKRLKWLQSTLLRRLEGQYTPKVCVHGFVKNRSIVTNARVHCGRRLTASFDLEDFFPSIHIGRVKGIFKNPPFSFGEDASEVLAQICCCDDGKLPQGGVMSPYLSNLACRSLDNDLLRLSRQHRLRYSRYADDLTFSSNDRYFPHEVVELDVEQPQPGERLVELITSNDFRLNHSKMVFRTSTRRQEVTGLTVNAFPNVSRKFVRGIEAALSSWRRFGYDAAQAHFLEKYHEGGGSELSSVLRGRIAFLSMVRGKDDFIVRRLSREFNDLGQPSINVKPLTTARPSPRHNSRAEWQTWIRKYSEGVLHLLFTSPEGDPSCGTAFHIGKGTFATARHNVFTECGAVHDDLRLKHDGNEFVANVLAPLDADANTPDVALLSCNALSKLARIPTQVRLPELGEEIVAIGFPSIPQRNVTQVVHSGIVEALPVNYSDRLRFIQVSFQSGGGLSGGSLIDAGGNLLGVVVENVFMQAADAGGITAPSRPYGQAVPVEYLDDLLKSYDRQQRPIR

SEQ ID NO: 743 - protein, 515 aa, Nitrosococcus sp.
  source 1..515: note = Related to CP038033.1
MRLRVHLAQGARGKAHLSKLQFHLNKPLEEAAAQIVGAQTADDIAEVLEVPKGQLLHILYSYPDEKKYISFDIKKKNGGYRNIKAAKGGLRVLQSKLAPLLASHYRLKNPVHGFVKERNIVSNATQHKRKRYVFNVDLSDFYGTINFGRVRGLFRAKPFEMGEKAASVVAQICIFKNSLPQGAATSPIISNFIASELDRKLSRLARRYKLTYTRYADDITFSSNNRNFPEGIAFYDGNNPITNDCFVGQVLEETVSGCGFSINHEKTRLQIRGVRQDVTGLTVNEFPNVRRSYIRNIRALLHAWRKFGPDGVEVIYRRKYAKNKSRLVDTERHYFKEALYGMLAFLRMVRGEDELYLKLCLQTAELDKAPPELIKRMKEQYKMYDVFISHASEDKIDIVRPIYDACKSLGISAFLDEEEIDWGDSLTEVLNHALGKSKLFLAVLSNNSVGKKWPRKEINAALARQMDGKQKFLPLVVGSPDMDIFGLTNDLLYVNWKNNPDEIAEKLKFILSKYA

SEQ ID NO: 744 - protein, 303 aa, unidentified
  source 1..303: note = Related to JAKITL010000008.1; note = Gammaproteobacteria bacterium
MSKLQYQLVKSLDIAVKQIVKLQTAEDIAQLLEVPKGQLLHILYSYPAEKKYILFDIAKKNGGFRNIKAPKGGLRILQQKLAPILYSHYKRRNQVHGFVKDKSILTNAKIHKRKRYVFNIDLHDFYGSINFGRIRGIFKAKPFQMGDKAATVLAQICTFENSLPQGASTSPILSNFIASSLDQKLSRISRRYKLTYTRYADDITFSSNARDFPEAIAFFDGGNPITGDCYAGRILEETIVSSGFAINHAKTRLQIKGVRQDVTGLTVNEFPNVRRSYIRNIRALIHAWNKYGDSGVEDVYRSQ

SEQ ID NO: 745 - protein, 509 aa, Nitrosomonas sp.
  source 1..509: note = Related to FOSP01000012.1
MPEKLKPELNKNLDESVRAISQLSSVSDVASYFEIPEGQLLYILYKLPDNKKYRFFEIKKRRGGHRLIKAPIGGTAILLKKLKPALHQLYKTKSCVHGFVNGKSIVSNAKQHKKKRYVLNVDLANFYDNINFGRIRGLFMSKPFNMAPNAATLMAQLCTHDNSLPQGSPVSPVLSNFIASNLDKRLTLLAKKYGLQYSRYADDITFSTSKKDFPKSFGYYEGNNPITGNMVIGKLLEDQILASGFVINYDKVRLQYHGVRQEVTGLTVNEFPNVERSFVRKIRAMIHAWKKFGLIEAEKTYISCYAKPTLDISSDNLNGAYYKSVVYGRLAFLKMVRDEEDEVYMKLCLKVAEIDSNAPRKILETKEMFNKFDIFISHASEDKDDVALPIYEACKKIGVNAFLDVKYIRWGDSLTEKINHALGQSKFVLAILSENSVGKTWPSKEINAALAREIEGKQKILPLIVGSPDLSSVSLLVDKLHFPWEKDASKVAHRIKELTYEKYQISNCK

SEQ ID NO: 746 - protein, 504 aa, unidentified
  source 1..504: note = Related to JABIUT010001148.1; note = Candidatus Scalindua sp.
MLNVKLKSTIGNTVKIFLSSQNTEDVANVLEIPTRQLLYLIYTLTDEERYSTFFLPKKRGGQREISAPRKGISILQKKLLTIIDSIWHPKPWVQGFTNSRSILTNARHHKKKSYVLNIDLKDFYGSINFGRVRGLFMSYPFKLGHKAATIIAQLVTFNNLLPQGASTSPIISNMIAFKLDNMLVKIARRYHLTYTRYADDITFSTTKSNFPKEIAEIEGTNPSTGNIKLGHILEKAIKESGFSVNYKKVRLQIPFVRQEVTGLTVNEFPNVERRFIRNVRAMVYAWRKHGLIEAEREYINKYASRKLEIPSGKLKGSYYKNVLYGKLAYIKMIRGEDDQIFIKYCLQLAELDSDPPKQIQKAKEMHEQYDVFLCHASEDKEDIAKPIFEDLSNAGIIVFLDDKYIKWGDSFVEKINHALGKAKYVIAILSSNSVTKAWPVKEINASIAREIVGKQKFLPLMVGDGKEIQSFQDEMPLISDKKYLIWKNDTSEIVDKIKSLMSSK

SEQ ID NO: 747 - protein, 528 aa, unidentified
  source 1..528: note = Related to CP066225.1; note = Planctomycetes bacterium
MRYPKIAKPTTELVRPTEDSVKLFKAAHTFGDVAELLEVHPGHLKRWLYKYPGHSGYKDFEIPKKNGKPRQISAPPKNISILQQKFKTILDAVYQPKDCVFGFVNKRSVVGGANIHKKQSRWVLNIDLEDFYTSIHFGRVRGLFMSFGAGENASTTLAHLVTKDGVLPQGACTSPVISNMIAFKLDRKLINIANKYNLKYSRYADDITFSYRYCTFPKHIAILDKYSGDDQEQHKEGQYKSGLEPENITLGPLLVHAITKSGFTINTNKNRLFSKRQRQEVTGLTVNEFTNVNRKFIRQIRAMIHAIRKFGPELAGIEYIEKYRAPYKNCEVNNHAEYFLNVLYGKLSFLRMVRGKTDVCYLDFCLSMSKIDPEPPTFIKEAVKMRQKFDLFIIHASEDKNEIATPLHEHLTKIGLNVFIDEKYIKIGDSFIEKINHALGQSKHIIAILSSHSVEKSWPKHELQAVLARHIASDGNGKIIPIMAGNKYEIQTILDKWPLLSDKRYHKWEGDPDAAAQEIADSIGTVIS

SEQ ID NO: 748 - protein, 533 aa, unidentified
  source 1..533: note = Related to JAFLKZ010000048.1; note = Campylobacteraceae bacterium
MKGQKINIKLKKPFKESMTLFENLQTQEDVANFFEVEHRYLMYLAYKDKRPHYKELVIPKKTGGTRKISKPVKSIDILQKKLLPFLQEKYKIKKPVHGFVKGKSILTNSQQHLKKKFILNIDLKDFYDSIHFGRIKGLFMSETFKMGENAATLVAHLCCNNTKIPQGACTSPILSNFIVSQLDKKLMEFAKTSHCTYTRYADDITLSSSKNISNTVIKDENSSFPINGFELSSELEKLIHFCNFTINYKKVRLESKYIRQEVTGITVNDFPNVKRTFIRQIRAMLHSWEKDGLDIASQKHLSFKKREYSISSPEKFFKNVIIGKLAYLKMIRGEEDIILRKLCLKFTALVSNDEVLPKFIRNIKMKYEEFQVFICHASEDKEKIARPLYDELVKLGIKSFLDEKYIEWGDSLTEKINHALGQSRYVIAILSDNSIEKKWPKKEINSTLSREISGDKVLLPILAGDERKIFKVFPLLHDKLYKLWNNDAKFMANEIKNLLSSTEDYEINHEVNTSESSILEKIKDFLTKIKILK

SEQ ID NO: 749 - protein, 503 aa, Sulfurimonas sp.
  source 1..503: note = Related to MIBX01000109.1
MTKKLHIKLQKTFEESLELFNNLTTASDVASFLEIPLQTLIYILYKDTKLHYKEFKIKKKSGKDRIINKPIGSISILQKKLLPFLQFKYKIKKPVHGFVNKKSVLSNAEQHLKKKFILNIDLKDFFSSINFGRVRGLFISYPFNMGNDAATLIAQICCHKNGLPQGTCTSPILSNFIASRLDVELIKYANATHTTYTRYADDITFSSTKKLSSKMIIYDMDSNPVINGFILSDSLKELIKFMGFDINYDKVRLETKNIRQEVTGITVNDFPNVKRNFIKQIRAILHSWENLGLEEAEKKHLETKKLKMDISSIKNDGKYLKNVVIGKLAYLKMIRGENDIVFIKLALKLASLSSDNLPKFIKEIKLKSEEFDVFICHASEDKEKVARPLYRELTELGINAFLDEEYIEWGDSLTAKINHALGRSKYVIAILSNSSINKEWPLKEINSTLAREISGDKKLLSILVGDEQEIFKVLPLLADKLYKPWNNNAKTLAIEIKTMLIPK

SEQ ID NO: 750 - protein, 511 aa, unidentified
  source 1..511: note = Related to JAGBOM010000008.1; note = Opitutales bacterium
MLITHSKLLPKIKKDITEQESLFSKLQTTKDVADLLEVPYKQLLYILYKQDDSKKYETFSIPKKMGGMRIISKPKGSISILQSKLLPLITSKYTAKSCVHGFVKGKSILTNAGAHKITQHTKILNIDIKDFYDSINFGRVRGLMMSHPFNMGNKAATVVAQILCWKNKLPQGACTSPVISNMILHRLDSKLTKLCEDLKSVYYTRYADDITISSNCPVFPETIATWDPKTKEVRLNQDFENIFKSENFNINYSKVRLKSNKERQEITGLTVNEFPNVRRVFIRQIKAMIHAWNKFGLEAAAKEYIEKYDRKKFNAENSNVVDYFKNVVYGKLAYLYMVRGKEGADRICQRFAERILNIDDEVPNFIKNMKESKYDIFLSHASEDKCIAERIYKECTSNNINAFFDKECIKVGDSIPERINDALRTSKIFVIIASYMYSEKKWTCEELWSAVNKTIETGEIRIYPIVIGDINEFKRNYPLLGHRKAMRWENNESEIVKDLENFLRVQENEVK

SEQ ID NO: 751 - protein, 591 aa, Pedobacter cryoconitis
  source 1..591: note = Related to NZ_CP014504.1
MKKKEELAPEYLERFLQLNSIKELSTFLNLRISALEYFLFYAPDEKKYRIFKIQKRNGNLRSISTPTERLKEIQQILQIIFQYLYAGKPSVHGFVQNKSIITNAKLHINKKILVNIDLSDFFSSISFGRIKGIFLNHPFNFNEEVSNALTRICCHDGSLPQGAPTSPILSNFVCRQLDNQFMKLSKTSKVLYSRYADDITISTNLKSLPQSIGIIETDKLELSNEIKKILHKNGFKINYNKVRFALKTNRQEVTGLIVNKFINIKRDYLRQVKSMLNAWEKYGLYLAAFEHFSKFNPKTYMPGDIELAYTKELAGKINYIGIVRGRDDGIYEKLYTRIKVLAPSVMLSIIRRQIQSSKDPILFTEGKSDIKHIEAAFSHFRSQGLYHNLSLHFHHYKEEDKMSNGELLKFCETFSKSHETGSIVICLFDRDDENFLANVASTKNTFKEWGNKVFSMVLPIPDHRKFTDICIEHFYTDKEITTKDKNGRRIYLSNEFNKETGQHAKEKLTIKHVNKLQARRVQIIDSGVINTENINFALSKNQFAENIFNKVDGFDSFNFEAFKLIFDNIQTVIDYANDEAKKSNKIEMSIL

SEQ ID NO: 752 - protein, 576 aa, unidentified
  source 1..576: note = Related to JABFRS010000002.1; note = Cyclobacteriaceae bacterium
MTPEEIKELTDRFLAIKTPRQLAKVLDVEFKILTYYLYKVPELKKYNEFDIRKRNGNARRIIAPIGGIKRIQRSLNFILQTLYPTKKAVHGFTLGKSIKTNALAHVKKNLIINIDIKDFFPSIHFGRVMGLMMARPFNFNEPLARVIAQICCHKASLPQGAPTSPIISNFICRKIDNAFLRLTSYNRCTYSRYADDITISTNQKKWPTEIARIENGKVLLSNIIQGIFHSNGFLINEDKTRHATRVNRQEVTGLVVNESININRKYYQHVRAMIHAVEKYGITLAANEHFLKYNIKSKEPDNIELSFQNELVGKLGFIGFIKGKENSTYKKLAARINTAEPGIRLKIVQNEIDEAANPIIFGEGKTDWRHLSKALTKLKKEGMFKSLFLRFNRYENLEINNEQLLDICKSLPKGEPSKKIVICLFDRDTKKINNAVVENGKDFKSWGNNVFSLLMPIPVHRKFDEICIEHYYLDTELKRTDHDGRRIFTSDEFDKVTGIHKQENLQYPYIGYLQPNFPRIIDSHVRNDIGQNVALSKNNFSNNILNDVPLFDDFTFSHFKIIFDRIEEIITSHPVG

SEQ ID NO: 753 - protein, 579 aa, Apibacter sp.
  source 1..579: note = Related to NZ_SAYM01000002.1
MEEDFDKDILNSFLEVETDRQLASVLDIPYKNLIYNIYKLPDEKKYEIFEISKRNKSKRQICAPISGIKNIQKKLSIILNNLHSPKYCAHGYVKDKSIKTNAQIHVKKRILINIDLKDFFTSINFGRIRGLFKSYPFNFNDKVATILAQVCCYNGCLPQGAPSSPILSNYICRRLDNQILDLSQKCKVDYTRYADDLTFSTNLKELPKEIGVIRDNELFLSNELISIIESNGFVINRQKIRFALKNNRQEVTGLIVNNRININRKFVRHVRAMLHAWEKYGLENAAIEHFEKYNYKNKKVENYIFSFLKEISGKIGYIGYIKGKNNSVYRNLFRRIKELNPEIKLPVPKDIIESNTAIVFCEGKTDAIHIETALKYLKSKGDFIDLNIGFHPYEGKEISNSTLYDICKNWSITKKSDRVDIFLFDGDDRRYNRKNICQYPNFYKHWGDKVYSVMLPIPPHRDFEEICIEHYYTDDEIKTKGNKERRLYLSTEFDPNTCFHKEENVNFANRKTIRSSYPKIIDGNDRVLNEFGVNVALTKMAFAENIANKTGEFKKISLENFKVLFDVLLKILEDSKDEN

SEQ ID NO: 754 - protein, 570 aa, Paludibacter jiangxiensis
  source 1..570: note = Related to NZ_BDCR01000003.1
MEELSKDNFLASTNKRELAASLGIKYSTLAYLLYHLTDERRYSEFEIKKKNGKSRMIAAPTVGIKHVQSNLAYILLDIYPSKKNVHAYLKKRNIKSNASHHLHKKLLINIDLKDFFPSINFGRVRGLFMSHPFKFNEEVATILAKICCYKNTLPQGAPTSPILSNFICRKLDNQLVDLAQKGRFSYTRYADDITFSTNLSPLSQVLGTISDNKIVLSEELTSIITSNGFTVNQDKTRYATNANHQEVTGLVVNEFPNVKRQYVRHIRAMLHAWEQYGLTLAAQEHFSKYNTKHKIISNPEISYKNEIAGKIGFVGSIKGKDDDIYRKMCIRLRELDPDIKLAVAFSNFHNENKPVIYGEGKTDWKHLKAALRYFQHKGEFLDLNIHITEYSEQVKINNAELLAMCKSKALDANKHKLIFLFDRDNHQINSEASLNESNYKYWGNNVYSVLLPKPDHRDFNEICIEFLYEDEIIQRKDNNGYRLFINNEFSKDTGRHLINEKLQLSNLGIIRCPYPRIIEHDVMDIETGKNKALPKNNFATYILEQQPPFDNVSFEHFRGIFELLTTIATE

SEQ ID NO: 755 - protein, 577 aa, Alistipes sp.
  source 1..577: note = Related to NFLR01000001.1
MQTEMPDIQSTFQAVTTKRELAERLGSSLKMLAYYLYKLPPEQQYKKYDIPKRAGGTREIYAPISGIKQIQKRLSHILQNYQPAKFCVHGYVKERSIKTNAYIHRRKRIVINLDLKDFFPSINFGRVRGLFKSAPFGFNDEVATTLAQICCHDGKLPQGAPTSPVISNYICRRLDNELIAFARKHKINYSRYADDITFSTNLQFLPTAVGHIKEHKIVLSNTLQKIFQDNGFTINEEKTRYALRTNRQEVTGLIVNAGINVPRKYIMRIRAMLHAWEKYGLEAAAKEHFEKFNYKHKHPDYPEIAFKNELTGMLNYVGQMKGIGNRVYIALYYRIKRLDSNIKLSIPEYIPAPEGTTVVFCEGKTDPLHLETALSWFHQQGEFSDLDLHFFKWRSDLDINNDTLLQMCQTRPQAKRDNRIEIYLFDRDVPRYIQKAAEKDKSYKHWEANVYSALLPVPEHRDFNEICIEHFYPDEDLLKEDKDGRRLYTTREFDPESGCHLKLKEVYYAGTRAQLRCKYPKILDSNVRKTGSDENIALSKNNFAKNIFHKTGSFKEVSFSYFKVIFELFEEIMAQAK

SEQ ID NO: 756 - protein, 575 aa, Alistipes sp.
  source 1..575: note = Related to JAFXLG010000026.1
MDGFDSNMIEFCEIDSRRDLAAYLGCQYKDLIYNLFVLPDDKRYKKIQIPKRNGDTRDILAPSSGIKRAQRMLATILSDLYKRKSCVHGYVKKHSILTNASVHKNKRIVINIDLKDFFPSINFGRVRGLFLNPPFSCCEEVATFMAQICCFDGVLPQGAPTSPIISNYICRSLDNELLKFARKYRLDYTRYADDITFSTNLREIPSRLGVIQENKLVLSEYFTSIIEENGFKINPSKVRYSYHTGHQEVTGLVVNKIVNVHRKYVKRIRAMIHAWEKYGLTATANEHFEKYNYKHRLPESPDYAFKLELQGMMGFLAAVKGKNNQVYARLYERLILLDKHTILQPPLRITAPRDSVVIYGEGKTDVVHLAAAYRHFQQQGEFLGLKLHFHRWGNHDVNNEFVYNMCRTRSESKENDNLEIYIFDRDVARYVKDTTENGKGFKRWSDRVYSAVLPIPPHRDFNDICIEHFYSDQDLARRDKSGRRIYTSFDFNPQSGNLKDSNDIYYPYRQELKRTYPKIIDDKVMRISSGENIALSKNNFALYISRGIGEFADVDFENFRPIFKLIEEIVHNSMR

SEQ ID NO: 757 - protein, 570 aa, unidentified
  source 1..570: note = Related to JAFXAT010000041.1; note = Bacteroidaceae bacterium
MKNKEYRDFLLLGTREDVAKFLGGSLKNLSFLLYILPKEKQYHDFSIPKKNGGKRQISSPISSIKRYQRELADILSEYYHVKSTVHGYVKGKNIKTNAIMHCNKKWIVNIDLKDFFSSIHFGRVLGVFKSKPFEFNDKVATLLAQICCFDGKLPQGAPTSPIISNYVCRNLDNNLINYAKKNKLTYSRYADDITFSTNMSSLPENLGKISEDHELRLSDELLGIITNNNFAVNSTKVHYANRNNRQEVTGLIVNKKVNIKRTYIRRIRAMLHAWQKFGLSNAAIEHFNKYSIKTQIPDFPDLAFKKRITGQIGFIGHIKGSNDNIYRNLYKRIKELDPMTKLTLPNIISSPESCNAIILCEGKTDSIHLETALKYFIERGEFVNLKIHFYKYPDEAKINNSYLYKLCEARDLILHDVRIVCLFDCDDAKYVKHCCEGKKLYKNWGNNLYSCLLPQPMHRDFKEICIEHFYTDDILLKTNNKGRRIYLSNEFVYETGFHKTENIQIRKRDDAKSPYPKIIDSGVFKSNGENIAMSKNDFANSIAAGEKPFDNISFETFRPIFDLISDIVNE

SEQ ID NO: 758 - protein, 574 aa, Alistipes sp.
  source 1..574: note = Related to JAFVOO010000133.1
MEENKNYEDFLQVTTRSDVATYLGGSLKNLSYNFYVLPKEKQYTKFAIQKKGGGERHICAPASSIKLYQRRLATILSPYYSTKPTVHGYALNKSIKTNAKVHCRRRWIVNIDLKDFFQSMHFGRVRGVFLSNPFAFNDQVATTLTQICCFEGVLPQGAPTSPIISNFICRRLDNELLEFAKRHKLSYSRYADDITFSTNLAAIPAELGTIREDNILTLSKELRDIIENNQFIVNESKIRFAGRNNRQEVTGLIVNEKINVKRTYIRRIRSMLHAWEKFGIANAAKEYFEKYATNNKMPDYPDVVFKRILVGRIAFIKQIKGIDDKVYRNLFGKIKALDPTIRLTLPTLITSPDTCRAVVLCEGKTDGIHLHAALQYFIERGEFVDLNVYFYKYPTEADLSNSYLYKYCESSNLRQQKKRTICLFDCDDSRFVAKCQEEGKLYKYWGNNLYSCILPKPAHRGFDEICIEHFYTDEVLCRESNKHRRIYLSNEFDPITGKHRTEDLIMRKRTDAKSSYPKIIDSGVFKPNGENVALSKNDFANLIATRNAPFHDISFEEFRPIFELLSRIVNAASE

SEQ ID NO: 759 - protein, 586 aa, unidentified
  source 1..586: note = Related to JADILV010000021.1; note = Bacteroidetes bacterium
MDTGNGNILNGFTDLKSKAEVAEYLGGSLKNLSYVFYVLPKEKQYKTFSITKRNGKKRTINAPVSSIRLYQKRLAEILSGFYKRKPCVHGYAKGCSIKSNAKIHCRKKWVVNIDLKDFFPSIHFGRVRGMFLSQPFEFNGTVATTLAQICCFEGALPQGAATSPIISNFICRRLDNDLISFAKKHRLTYSRYADDITFSTNLPALPESVGTIASDGSLELSDDLRRLIEKNSFNINESKIRYSDRHNRQEVTGLTVNEKTNVRRTYVRRVRAMLHAWQQYGLKDAAREHFEKYSDKVMPEYPELTFSRIATGRIRFIRQIKGPDDHVYRNMFRQIKALDASIKLDLPAFFNTPDGCNAVVLCEGKTDGLHLQAALRYFIGKGEFTGLKIYFHRYPDKMDINNSILYKCCETSVTRQSNILRICLFDRDDRTFMKKCREGDSLYKDWGNRLYSCVLPQPEHRDFSEVCIEHFYSDEVLRTKSPKGRRIYLSNEFDPGTGKHLSEDLTCRKRTDASCCYPKIIDSGVFKPNGDNVALSKNDFANLIFNREGDFADISFEHFRPVFELLSEIIEKDGALKEKLRASSSA

SEQ ID NO: 760 - protein, 570 aa, unidentified
  source 1..570: note = Related to SUYX01000009.1; note = Bacteroidales bacterium
MTGGCFYMSIENRDILFYNAATKEMLAAALGTRLNRLVYYLYVVPDSERYTKKCILKKSGKVRNVAAPRSGLKFIQRNLASILNTSVPQKSCVHGFVPKKSIISNASVHLKRNFVINLDLKDFFPSINFGRVLGLFKSAPFNFNDEVAVTLAQICCFEGSLPQGAPSSPIISNLICRSLDNDLMRLAKSLKLSYSRYADDITFSTNLKELPKGLGEEVEGKFIPSEALVDIIGRNGFELNFNKLRCRRKCQRQEITGIVSNEKLNVPRNYVRRVRAMIHAWEVYGLEKAAYEHFGKYSRRRFLYPEASFRKRVAGMVGYIGMIKGVDSPVYLKLYEKLKSLDDSIKLKIPEYSGSADMVVYCEGPTDPMHLKAALYHFRSKGMFNSLKVDFHMYRDDMTVGHGELYNYMVRKHLMKKDNVIEVYLFDNDLKQYVQKLDGKPFITVGHPKIYMALLPKPEHRDFFEVCIEHFYKDEDLCRKDANGRRLYFAREFDKDTGAHVTEDVRSVKLHPLKQPGYTIIDNRILDKDDRSVALSKKDFALAIMHRKKSHSDVDFSAFKAIFEMLQMLV

SEQ ID NO: 761 - protein, 570 aa, unidentified
  source 1..570: note = Related to JAFTHV010000023.1; note = Bacteroidales bacterium
MGAFFMDYDERYMRFYEADTRELLAVALGTKPNRLSYYLYVLPESERYKKKSILKKSGKVRNVAAPTGGLKFIQRNLADILTGSLAQKSCVHGFAPDRSIVTNAKVHLRRNLVINLDLKDFFPSINFGRVYGLFKSHPFNFNELVAATLAQICCFEGSLPQGSPCSPVISNLICRSLDNQLMHLAKSLKMSYSRYADDITFSTNLKEIPEEIGSIVDGRFVPSEKLTGIIERNGFSLNVNKTRCRNRNQRQEVTGIVTNQIPNVPRNYVRRIRAMLHAWEAYGLQKAAEEHFSRYSRKHCVYPEASFKKRLAGMIGYVGMVKGRDSSVYISLFEKLKAIDETIRLRLPEYSGDAKMVVYCEGITDPMHLKAALRHFRSKGLFGGLKIDFHMYRDDVPVGHGELYKIMEGRHLVKKDDVIEVYLFDNDQKDYVTKLNGKAFMTYRHPKVFMALLPQPAHRDFYEVCIEHFYSDSDLMRKDAKGRRIYFVHEFDKSTGFHKTESVRCLKLSPLKQKEYTPIVDGILNEKDQSVALSKKDFALAVLNGKQSHADVDLDAFKSIFEMFENIYIS

SEQ ID NO: 762 - protein, 561 aa, unidentified
  source 1..561: note = Related to JAGAPQ010000482.1; note = Bacteroidales bacterium
MELSKAESREDVLLALCSSWKNLAYYIYRLGDRRYEKMEIVKKSGKLRNIASPVRGLKYIQRNLSAALSYGYRQKGCVHGFVPQRSILTNASVHVNRRYVINLDLKDFFPSIHFGRVVGMFVGPPFGFNHEVAVTLAQICCFERVLPQGAPSSPVISNIVCRKLDNELLGLAKECRLNYSRYADDITFSTNLCEIPERLGRVEGERFIISDGLRRIIADNGFELNDEKVRWSSEYYRQDVTGLVVNEKVNVPRTYIRRIRSMLHAWQKFGLQAAAKEHYSRFSFKKTNNCEESYRRRVTGMIGYVGMVKGRDSKVYLSLVSKLYDLDKGMSLAVPDLKDKTGMVVYCEGKTDPIHLKAALSAFRKRGLYHELDVCFHMYKPDKSISNSTLYEIYAKRDVVKEGNQIEVYLLDSDDKRYTDKVKADGKCYTKGGQNIYLAVLPKPEHRNFDTVCIEHFYTDDDLRRCDKNNRRIYLSGEFDKNTGLHLVESGLRTTKLSPLAKSDYAIISEGVLDCHDVNHALSKNEFARAVSCRAASHKDVEFSHFSVIFDMLMDIQKDAL

SEQ ID NO: 763 - protein, 566 aa, Pedobacter duraquae
  source 1..566: note = Related to NZ_SNWM01000001.1
MNLLNIKSKEDLLDYIGIEEAQLNHLLYRLPNAYKYHTFEVKKKNGSSRIINSPNPELKVIQTKLKDDLVEFFGKKNCVHGFVKDKNILSNASSHLKKQILINIDLKDFFSTIHFGRVRGMFLSSPFSFPERIATLLAQICCFNGLLPQGAPTSPIISNFICRKLDNSFIQFSKKNSFFYTRYADDITFSSNIRSLSSELGIFNKDQFEISKSILNQIHNNGFTINESKVRMASRFNNQTVTGIKVNVKPNVSRFYIKQIRAILHACEKHGVEKTAIVHFQKNEIDLNRLKSPIDFFIKRLVGKISFIGFVRGKDDFLFKKLYDRVKVIVPNARLSIIYKKIDESKNTLILTEGKTDWKHIKAALIKLQAQGAYNNLNLTFADYLDEHKVSNSELFKICESIPKLGMQKNKTICIFDRDDKNFIPKVTSINDFYKDWTNNVYSMVLPVPKHRNFENICIEHYYTDDDLFTYDHNNRRIFVSSEFENNGNHKLEKYRYKGNLEKLKNRFPTIFDSQVVDSSGASIALSKNDFADYVYNNNPRYNSFDVEAFKEIFNHIYVIENTTPK

SEQ ID NO: 764 - protein, 539 aa, Acidiphilium sp.
  source 1..539: note = Related to FR898423.1
MRSQEFLKIKTEADLANFLNISEGTLKYYSNPITPSKAYTTTILKKKNGEDRIVCAPVRILKYIQRQISDVLYELYKPSRCVTGYVRKKSICDNARPHTSKRMIICLDLKDFFTSIHFGRVRGMFLNQPFNFNTTISTVLANLTCRNGCLPQGAPSSPIISNYICRRFDGDFMKLCAKYKLVYTRYCDDITISTKAYSFPHSIIYFSTTWSLGDDIRELIQKHNFILNESKFRVVTNKTRQMVTGLVTNQKVNIPKNKYRKLRAELYYTLKNGLDEAAKHDGYIHNKIVDKNAFLNHLRGGVNFFKSVLAVDNPRYKWLANEFNKIVGENYFFVPSSWDELKNKAIFVLMNNKETSQGTAFYVTDIGLITCLHTVCAISGRPSKSDVETALNDYYAFLPNTEYNHIKLSYCWHSNDLDLLVLKFVDYTIRIGYEIEKNIVLSDGINHLKALGYPEYGLGCSCCFIQDMSITSNRVLCGLKLYVVDKTFYTGASGGPVFNSANKVVGYIDRGNEIGSDEERYNAFCSIAPLLDEFNKGTL

SEQ ID NO: 765 - protein, 554 aa, unidentified
  source 1..554: note = Related to JAFSEX010000061.1; note = Bacilli bacterium
MYNEFGRIQHFKNIETKDDLLYVLNISSRKYNYLVYQKKNLYTSFYINKKQGGFRKILSPCYDLKKIQKELNIIMSNNYEFNNETVHGFVKEHSIKTNATVHKDANYIVNIDLKNFFDNIHFGRVRGMFMKPPFNFSDYIATNLAKLTCYEKKLPQGAPTSPTISNIICYRMDRELSYLCNKYNCRYTRYADDITISTKMLYLPKEIAKFRDGQVILSSNITDTIKNEGFTINIDKLKISPNTDRQEVTGLIVNKKVNVQKVYIKKLRALLNNVSKYGFYLEGCKYFEKTLNDCSNKDYVEHRFINVLKGKIEFLKMIRGIDDYVYIKYASLFNELIGYEYFDTDYGLTMKEFIEKRVYPLISYDEMVQGTCFMADEIGMITSTHVLISPQSFITENKYKEIELKDKFNFCTVGSKPFYILDHYNRKYIINPEITREQINSDILFYKCIPSKKRFKINMTYEPKIGETVYLAGYGEFKDFKTSTINYIKSNVTGYTEFLGRKVACINSKIYHGMSGGPVLNSNREVIGIIYAGLNLEDDDNGVISKTNGFVLFQ

SEQ ID NO: 766 - protein, 516 aa, unidentified
  source 1..516: note = Related to JABFRH010000087.1; note = Proposed Sideroxydans sp.
MNFIDIKSTQDLADYFELDYNILARITYGPSRSNLYKVFEIPKKSGGSRIIHSPEKTLRVIQRKLADELKQHYRRHDAAFGFVDKYSITDNASKHINQDWILNLDLADFFPSIHFGRIRGLFQKTPFAFPDKVAQWIAQLATFNGTLPQGAPSSPILTNMICLRLDKDLKKLARRHDLSYTRYADDITLSSKKYFPKEIAKMEKSDNESLATLGADVVSIIEKNGFKVNPSKTRLVSKSGRQEVTGIVVNEKSNLPRHYINTIRGEIGQLRYLDGEAKDALQLRVLGRLGHLKKVVGEYDPRYIKLKAKLHGIKLSCSPNETMYRAVNWIVENDDGVYGTAFHVDHLGWITACHVITKPAAILNFKLFHPDDSQNKYAIQLKSNFFDADIDYVIFNAPIKPIISARIAPKQIENGEACVLSGYPNHNHKNNSVSIIEAKITSTQTIFKAPRFVIDANIFHGMSGGSVFNKENQLVGLVTHGNEDGGTTVLQSAFTSIHLVMNDITNKSPQRIIRTE

SEQ ID NO: 767 - protein, 577 aa, Gluconobacter frateurii
  source 1..577: note = Related to NZ_BEWN01000005.1
MSHLAKLKSATSRKELALILGYKPKSMTAIVYKTPTADKYATFDIDKKSGGKRTIKAPAPKLKNLQSHLSHVLYQCLAEIDRARDAKPISFGFRQDRSITENASRHKRRRWVLNLDLEDFFPSFNFGRVRGFFLKDKAFDLHPEVATTIAQIACDGTALPQGSPCSPVISELIAQILDMRLVRLAKKHGVTYTRYADDITFSTSQKDFPAGLAQVDESDPSVWHLSDELTRKIVTSGFAINNAKTRMNFRGSRQIVTGLVVNEKVNIRSDYYRRARAMCDTLFQTGQYYKAVIKPDDADEEPKPEVTSNLNPLQGILGHIYAVTQSAERREVSEQRQNPRAIRKLFRRFLFYKYCIVLNEPLIVTEGKTDPVYLREAVKSRVKFQPMLGAHGKDGFKHAVRYFNYGGLAHEVMDLGGGTGDLKSIPLDYLRNLKPSKGTHKPFAYKPMKYPVIIVLDNDDGLAAVASTVKKNFGTEIDKKSTQDFYNVIDNLYIVKTPEDGSKNTCIEDMFPKEWREYKINGKKLNTASKIDPSKDLSKEAFAKSVVKANADKIDFSGFDPLLERICKAVQHYAAKS

SEQ ID NO: 768 - protein, 365 aa, Mesorhizobium sp.
  source 1..365: note = Related to SAQI01000010.1
MTAIVYKTPLALKYTTFEIDKKSGGKRTIKAPAPKLKKLQAHLSHVLYQCLAEIERGSDAKPISFGFRRDRSISENALRHKRRRWVLNLDLEDFFPSFNFGRVRGFFLKDKAFGLHPEVATTIAQIACDGAALPQGSPCSPVISELIAQILDMRLVRLAKKYGVTYTRYADDITFSTSQKDFPTGLGSVDPNDPAVWHLSEELVGKIVTSGFAINDAKTRMHFRSSRQTVTGLVVNEKVNIRSDYYRRARAMCDTLFQTGQYYKVVIQPDEDEEPKPDVTSNLSPLQGPLIPFAQGHTISREETCGIVCCLLMLLKDVAVWCRTIATQKIRFGAVCRPIPRECNPRSTGKCDAFCTATNTGLVRS

SEQ ID NO: 769 - protein, 322 aa, Entomobacter blattae
  source 1..322: note = Related to CP060244.1
MSYLHKLKSATSRKGLAEILGYRPKALTSIVYMTPLDQKYTIFEIDKNSGGKRTIKAPVPKLKKLQSHLSHVLNGCLAEIERERSAKPISFGFRKGRSIAENARRHKRKHWVLNLDLEDFFPSFNFGRVRGFFLKDKAFGLHPEVATTIAQIACDGAALPQGSPCSPVISELIAQILDMHLVRLAKKYSVTYTRYADDITFSTSQREFPTGLATVDTNDPPVWHLSDELVDKIVTSGFTVNAAKTRMHFQDSRQMVTGLVVNEKVNIRSDYYRRARAMCDVLFQTGQYYKVMTQPDDDNEGPKPDLTSNLNPLQASLAIFTQ

SEQ ID NO: 770 - protein, 579 aa, Qipengyuania flava
  source 1..579: note = Related to JAGHQS010000002.1
MNVTHLKKLRAASSRKELAVILGYKPKTLTAIIYQTPPALKYTTFEIDKKSGGKRTIKAPEPRLKKLQTHLSHALYQCLAEIEKDRGAKPISFGFRKDRSIAENASRHKRRRWVLNIDLEDFFPSFNFGRVRGFFLKDKAFALNPEVATTIAQIACDGTALPQGSPSSPVISELIAQILDMRLVRFAKKYGVTYTRYADDITFSTSQKNFPNGLATVDPNDPTVWHLSEELVGKIVSSGFTINNAKTRMHFRGSRQMVTGLVVNEKVNIRSDYYRRARAMCDMLFQTGQYYKVVIQPDEEDEEPKPDLTSNLNPLQGILGHIYSVTQTEERREISEQRQKPRAIRKLFRRFLFYKYCMALKEPLIITEGKTDPVYLREAVKSRTKFHPALGAPGKDGFEHAVRYFNYGGLAHEVMDLGGGTGDLKSIPLDYLRNLKPSKGSHKPFAHKPMMHPVIIVLDNDEGLAAVGSTVKKNFGVAIDIKSTDDYYNVTENLYIVKTPENGTKNTCIEDMFPKKWRDHKIKGKKLNTASKIDPTKDLSKEAFAKSVVKANADKIDFSGFDPLLERIDKAIQHHAAKP

SEQ ID NO: 771 - protein, 577 aa, Thalassospira xiamenensis
  source 1..577: note = Related to JAINWB010000007.1
MSHLKKLKAATSRKELAAVLGYAPASMTAIVYKMPKDRKYTTFEIDKKSGGKRTIKAPVAKLKKLQSHLSHVLYQCLSEIEKDRGAKPISFGFRRDRSIAENASRHKRRRWVLNLDLEDFFPSFNFGRVRGFFLKDKAFHLHPEVATTIAQIACDGTALPQGSPCSPVISELIAQILDMRLVRLAKKYSVTYTRYADDITFSTSQKEFPKGLAHVDANDPSIWHLSDELVGEITGSGFVINNTKIRMHFRGSRQMVTGLVVNEKVNIRSDYYRRARAMCDSLFQTGKYFTVTQPPAGEGEEPVPELIDSLSPLEGILGHIYTVTQSEERRSVQEQRQQPRAIRKLYRRFLFYKYFMALKAPLIVTEGKTDPIYLREAIQSRADSHPVLGVLGEDGFNHAVRYFNYEGLAHEIMDLGGGTGDLKSIPLDYLRNLRPSKEAHKPLLHKPMEHPVIIVLDNDEGLASVASTVKKNFGVSINLKSTSDFYNVTDNLYIVKTPENGSNGTCIEDLFPKEWRNYKVNGKKLNTASKIDPLKDLSKEAFAKSVVRPNADSIDFSKFDSLLGRISKAIEHYAAKP

SEQ ID NO: 772 - protein, 572 aa, unidentified
  source 1..572: note = Related to JADGDA010000026.1; note = Alphaproteobacteria bacterium
MSRKDLAGILGYNPSSLTAIIYKTPNASKYTTFEIDKKSGGKRTIKAPSPKLKKLQSHLSHVLYQCISEIEKNRECKLKPISFGFRKDRSIFENAARHKRRRWVLNIDPENFFPSFNFGRVRGFFLKDRAFALNPEVATTIAQIACDGAALPQGSPCSPVISELIAQILDMRLVRLAKKFGVTYTRYADDITFSTSQKEFPTGLARPDGTNPTIWHLSDDLVGKITNSGFTINSNKTRMHFRGSRQMVTGLVVNEKVNIRSDYYRRARAMCHHLFRNGQYFKSMLPQEKDGEEPKPELTGNLNPLEGILSYVYAVTQREERRNDQDQRQKPRAIRKLYRRFLFYKYFIALKAPLIVTEGKTDPIHLREAVKSRTKFHPALGKPGKDRFDHAVRYFNHGGLASEILDLAGGGTSNLRSIPIDYKRNLHANKKEQKAIARCPMRFPVILVLDNDDGLKTISSTIKEMFKVEFVVSSDADFYHVTDNLYVVKTPENGNKNTSIEDLFPDKWRNMELRGKKFSSANKIDSSKEYGKEVFAKSVVKPNACQIDFSAFDPLLERLCKVIEHHSGARAS

SEQ ID NO: 773 - protein, 568 aa, Rhizobium pusense
  source 1..568: note = Related to NZ_QAYR01000012.1
MAEILGYPPSSLTAIIYKTPTASKYTTFTVDKKSGGQRIISAPIPKLKKLQSHLSHVLYECLDEIEKGRAASPISFGFRAGRSIAENAAKHKRRRWVLNIDLEDFFPSFNFGRVRGFFLKDQSFSLHPEVATTIAQIACDGVALPQGSPCSPIISELISQILDSRLLRLAKKYGVTYTRYADDITFSTSKKEFPAGLATQDATDPTLWNLSDELSGKITSSGFVVNNSKTRMQFRGSRQMVTGLVVNDKVNIRSDYYRRARAMCDSLFETGKYFSSMVPPAKVGDDAVPNRTDNLNPLEGILSHIYHITQAEERRDVQEQRQTPRAIRKLYRRFLFYKYFIALKEPLIVTEGKTDPVYLREAVRRLPQFHPALGTPGAKGFKHVPRYFGYGGLVSELLDLGGGGTSNLKSIPLDYRRNLNPTKKEPKAFGFRPMSFPVILVLDNDDGLSPIAGTIKKTFNIQISQSSTEDFYHIIGNFYVVKTPEILATGNPPQSTYIEQFFPQKWRDYPLNGKKFSTKNEIDINREYSKEVFAKSVIKPNAAAIDFSGFIPLLKRIEKVMKHHAAQT

SEQ ID NO: 774 - protein, 582 aa, Labrenzia sp.
  source 1..582: note = Related to JADOUL010000002.1
MSHLKKLKAATSRKELAQFLGYKPSSLTAVVYKIANDDKYKIFEIDKKTGGKRIIKAPIPKLKKLQSHLSNMLYQCLEEIEKDRQLKPISFGFRKDRSIADNASKHKRRRWVLNLDLADFFPTFNFGRVRGFFLKDHAFELHPEVATTIAQIACDGTALPQGSPCSPVISELICQILDMRMLRLAKKYGVTYSRYADDITFSTNQKEFPTGLASQDTGDFTIWHLSEELVGKIENAGFTVNDEKTRMHFRGSRQTVTGLVVNEKVQVPSDYHRRARAMCHALFETGKYYRSEVESEDEDKEGELEPELIDNLNPLEGILSFIYSVAKHGDHRPIEEQRKHPTAIARLYRRFLFYKYFVAPKKPLILTEGKTDPVYLREAVKRRDSFHPGLGKPEKDGFKHAVRYFNYGGLAHDIMGLGGGGTSNLKSVPLDYARNLYPKRGKPRAIKHRPMKFPVVVVLDNDDGLGPLASTIKDTFGVRITQKSTDDFYHVTDNLYVVKTPEDADKKTFIEGLFPEKWLKKELNGKSFNAENKIDPDKEYSKEVFAKSVIKPNAKDIDFSGFDPLLERIQKAILDYQTKLGS

SEQ ID NO: 775 - protein, 571 aa, Angulomicrobium tetraedrale
  source 1..571: note = Related to NZ_JACICD010000010.1
MSQLEKLKAAKDRKELATVLGYKPSALTAIIYHPPAKDRYTNFEIDKKSGGKRTIKAPDAKLKKLQSHLSHLLYACLDEIEKERDAKPLSFGFRRDRWIADNATRHKRRKWVLNLDLADYFPSFNFGRVRGFFLKDNSFALQPEVATTIAQIACDGTALPQGSPCSPIIAELIGQVLDMRLVRLAKKYGVTYSRYADDITFSTSQKDFPAGLASQDPTDATIWHLSDELLGKITASGFAVNPAKTRVQFRGSRQTVTGLVVNEKVNIPSEYYRNARAMCDALFSSGQYFTSMKASAPEPDLTSNLNPLEGVLGHIYAVTQTEDRRDVREQRIKPRAIRSLYRRFLFYKYFVALQAPLIVTEGKTDPVYLREAVKARTAFHPVLGAKTAGRFEHAVRYFNYGGLAHEILDLSGGGSGNLRSIPLDYRRNFQPSKNDPRAIAHTPLAHPVILVLDNDDGLASVASTIWDNFKVKIDVKTTAHFYHIIQNLYVVKTPEAGGKSAIESLFPDVWLNIELNGKKFNCSNTINPETEYSKEVFANSVVKPNAGNIDFSGFDLLLERIVAAIEHHRAK

SEQ ID NO: 776 - protein, 425 aa, Acidocella sp.
  source 1..425: note = Related to NCFD01000067.1
MSQLEKLKATTYRKELAALLGFKPQALTSIVYKTPLSERYTTFEIDKKTGGKRTIKAPSPKLKKLQTHLSHLLYQCLDEIEKQRGEQPLAFGFRRKLWIADNAARHKGRRWVLNLDLKDFFPSFNFGRVRGFFLKDKSFELKPEVATTIAQIACDGVALPQGSPCSPVISEMITRILDMRMVGLAKKYKVTYSRYADDITFSTNHKNFPVGIAVPDGEDATNWNLSNELLGKITSCGFEVNSEKTRMQFDGSRQIVTGLIVNEKVNVASEYYRRARAMCDSLFSTGSYFRSMKEPKEDNDEPTPDLINGLNPLNGILGHIYAVTETEERRAISEQRIKPRAIRKLYRRFLFYKYFVALEVPLIVTEGKTDPVYLRSAVRRRPDFHPVLGKMKGDSFIHAVSYFNYGGLAHEVLDLGGGGVGNLKS

SEQ ID NO: 777 - protein, 573 aa, unidentified
  source 1..573: note = Related to JAFKKU010000016.1; note = Hyphomicrobiales bacterium
MSYLSKLKAAQSRKELAEILGYSAQSLTAIVYQTPDTSKYTTFEIPKRSGGTRTIKAPIPKLKKLQTHLSHALYQSLDEIENGREARPLSFGFRKGRSISENASCHKRRRWVLNLDLEDFFPSFNFGRVRGFFLKDSSFGLHPEVATTIAQIACDGVSLPQGSPCSPIISELIGHVLDMRLVRLAKKYKVTYSRYADDITFSTSQKDFPAGIALPDPANSANWMLSEELLSKISNSGFSVNQSKTRMHFRGSRQSVTGLVVNEKVNIRSEYYRNARSMCFSLFANGVYYKKNAATGEREPTDNPNPLEGMLSHIYYVTQSSEKREIQEQRINPRASRKLYRRFLFYKYFLRLDRPLIVTEGKTDPIYLKEAIERLDAFHPALGQKRNGQFHHTARYFNYKGTAHEILDLGGGGTANLKSIPIDYRRNLMPYKKEPRAISHRPMLHPVILLVDNDDGLGALASTVKEMFGTNISLKTTNSYYHIVENLFLVKTPENNEKKTCIEDMFPLSVLKRELNGKKFNPSNQIDITKEYSKDIFANHVVKAEADTIDFSGFTPLLDRIKKVIEDYKISHG

SEQ ID NO: 778 - protein, 577 aa, unidentified
  source 1..577: note = Related to JACKIO010000012.1; note = Rhodospirillales bacterium
MSYLEKLKNAKNRKDLARLLGFKPSALTAIIYMIPVEEKYTTFEIPKKSGGTRTIKAPAPKLKKLQTHLAHWLYECLAEIEEGRDSTPVAYGFRRKGTIAANAHNHKRRRYVLNLDLEDFFPSFNFGRVQGFFLKDKAFELNKEVATTIAQIACDGTALPQGSPCSPVISELIGQILDLRLLRFSKKHGVRYSRYADDITFSTNQKNFPVALAIQDSLDLSKWTLGEALINEIEQAGFKINANKTRMHCRGSRQMVTGLVVNEKVNIRSDYYRKARAMCDSLFQTGKYFKTLKVSDDPKEEPQPDFTSNLNPLEGILSHIYDITQKEDRRGVSEQRKEPRAIRALYRRFLFYKYCVAPKAPLIVTEGKTDPVYLREAIKYRDSFHPRLGKPGKNGFEFAVKFFNYGGQAHEVMDLGGGGSGNLKSIPLDYLRNLDATKKGRKAFKSKPMAYPVILVLDNDDGLRDIAGTLKTNFSISIKTNTSSDFYHITENLYLIKTPETSGQSCIEDMFPEKWKEKPLKGKKFNPNSKIDPQKEYGKEVFANSVVKPNANEIDFSGFDPLLSRIVSVLDDYKAAS

SEQ ID NO: 779 - protein, 575 aa, unidentified
  source 1..575: note = Related to JABGZD010000203.1; note = Proteobacteria bacterium
MSYLKKLKSAKNRKALASILGFTPSALTSIVYQTPLEKKYTTFKIPKKSGGDRIIKAPNPKLKKLQTHLAHCLYSCLSEIEEGRNATPVAYGFRKGGTIAANAKNHKRRRYVLNLDLEDFFPSFNFGRVRGFLLKDKAFKLEEEVATTIAQIACDGEALPQGSPCSPVISELIGQVLDLRLLRFAKKHGVRYSRYADDLTFSTNQKDFPPDFAQQDASDLSKWTLGNELVQKIEGAGFKINAGKTRMQCRGSRQMVTGLVVNEKANIKSEYYRNARAMCDSLFQTGQYFKTVISPDIPNDKPMPDLTDNINRLEGILSHIYDVTQSEERRPIADQRKEPRAIRLLYRRFMFYKYCVAPKVPLIITEGKTDPVYLREAIRHRNSYHPRLGNPGKDGFEFAVRFFNYVGQAHEIMDLGGGTGDLKSLPLDYLRNLDPNRKGRKPFKHKPMACPVILVLDNDDGLSGVAGTIKKNFDVTVSIKTTDDFYHITENLYLIKTPEAKKKSCIEDLFPQQLKGTLLNGKKFSAKAKIDPQTEYSKEIFANSVIKPNASKIDFSGFDPLLDRIVSVLDHYSPQ

SEQ ID NO: 780 - protein, 578 aa, unidentified
  source 1..578: note = Related to VYFW01000066.1; note = Gammaproteobacteria bacterium
MNYRDKLKAAKDRKDLARLLGYKPSALTSIIYVTPPERKYTTFEIAKKSGGIRTIKAPNPQLKKLQSHLAHYLYGCLAEIEEERQARPVSYGFRKTRTIASNAKNHKRRRYVLNIDIEDFFPSFNFGRVRGFFLKDKAFALKEQVATTIAQIACDGEALPQGSPCSPVISELIGQILDLRLLRIAKKHGVRYSRYADDITFSTSQRDFPEALAVQDSESLFGWAPGAELVHEIRRAGFKINPSKTRMHCRGSRQMVTGLVVNEKVNIRSEYYRKARAMCDSLFQSGTYFRSFTPPVSPGVDPQPDLTVNLNPLEGILSHIYAVTQSEDRRGIKDQRLKPRAIRTLYRRFLFYKYCIALDAPLIITEGKTDPIYLREAIRFREIFHPQLGEPGESGFKFAIRFFNYTGQAHEIIDLGGGTGDLKSIPLDYLRNFDARKRKPFQHVPMAYPVILVLDNDNGLESIGSTVRKNFGISITVDSTDDFYHITKNLYLIKTPETKEQSCIEDLFPAEWKNKRLNEKKFNPSGSIDTQTEYGKKMFAKYVVRPNSHKIDFSGFDPLLERIVAVLDHYSAEGKQSL

SEQ ID NO: 781 - protein, 580 aa, Henriciella algicola
  source 1..580: note = Related to NZ_QWGA01000003.1
MSQLENLRSAKNRKELASLLGFQPSALTSIIYKTPLADRYSTFEIPKKSGGTRTIKAPNDKLKKLQRHLAHLLYNCLAEIEDELSIASVSYGFRQNGSIIANAKNHKRRRYVLNIDIENFFPSFHFGRVRGFFLKNKFFALEDEVATTIAQIACDGEALPQGSPCSPVISELIANILDLRLLRLAKEHGVRYSRYADDLTFSTNSKKFPDAIASEGALGNWTLGNELVEEIDDAWFTINHAKTRMHCRGNRQLVTGLVVNEKANIKSEYYRNARAMCDSLFTQGRYYKSKTSPEDADAVPQPIWTSNLNPLEGILSHIYDVTQSEERRPVPEQRNAPRAIRALYRRFLFYKKCVALTAPLIITEGKTDPIYLREAIRHRNVFQPVLGSMGDEAFEFAVNFFNYEGSSHELMDLGGGSGDLRSIPLDYRRNLAPAKEKKRKPMIHTPMSYPVILVLDNDDGLSAVTGTIKKNFGVQIDKTTTDDFYQVIQNLYVVKVPETTSDAQIESLFPDSVQSIKLNGKAFSTKDKIDPEKEYSKAIFAKSVVRPNADKIDFSGFDPLLHRIVAAIDHYDANGPKAFS

SEQ ID NO: 782 - protein, 572 aa, Gluconobacter oxydans
  source 1..572: note = Related to NZ_BARJ01000009.1
MSYLKKLKAAKDRKELAKLLGYEPSSLTAIIYMTPLPAKYSTFDIPKKNGGVRTIKAPEPKLKKLQTHLAHLLQACLVEIEADKLSRPVSFGFRKKGRITDNAKVHKGRRYVLNIDLADFFPSFHFGRVRGFFLKDKNFELSDQVATTIAQIACDGAALPQGSPCSPVISELIGHVLDVRLLRLSKKHHVTYSRYADDITFSTNNKAFPTALASQDPADPAKWVLGDELINKVQNSGFQINPAKTRMSCRGSRQMVTGLVINSKVNIKSEYYRNARAMCDSLFQKGWYFRDSTPPVEDGDPPTPNYIISLSPLEGILSFAYNITQSEDRREIAEQRKKPRAIRELYRRFLFYKYCVAPSQPLLITEGKTDPIYLREAIIRRTAYHPTLGTFGPTGFKFAIRFFNYEGQVHEIMDLGGGTGDLKSVPMDYLRNFKPYRKRKPFKHKPMQHPVIIVLDNDKGLQGVASFLKENFDTIISLTTKNNFYHIIENLYVIKTPESSPMTCIESMFPKIWLKHSLNGKTFNPDKPDITKEFGKEIFAKSVVKPNAGSIDFSGFDPFLDRIIAVFNHFYG

SEQ ID NO: 783 - protein, 577 aa, Rhizobium sp.
  source 1..577: note = Related to NWSX01000001.1
MSYLAKLKATKDRKDLARLLGFTPSAMTSIVYQTMPAAKYTEFEIPKKSGGKRVIKAPFPKLKKLQTHLAHVLYGCLAEIEQNFDAKSVSYGFRKGRGIEGNAKIHKRKRFVLNLDLADFFPTFNFGRVRGFFLKDTSFALTNEVATTIAQIACDGVALPQGSPCSPVISELICHILDVRLLRLARTYGLRYSRYADDITFSTNRREFPADIARVNQTDPSTWVIGKELASRIDDCGFAINFTKTRMHCRGSRQMVTGLIVNEKVNIRSEYYRNARAMCDSVFRQGAYFHSHQTPTVAGGTPIPEMTDNLAPLEGILNHIYSVTQTEERRSVQDQRSAPRAIRSLYRRFLFYKRFIALEAPLIVTEGKTDPVYLREAIRHLPSWQPRLGEPTVNGFKFSLSFFNYGGKSHEIMDLGGGTGDLKSIPLDYLRNLDSSKSDRKPMQHKPMKFPVIMVLDNDDGLGDVAGTIKKNFNVGMSVTSTQDFYHVCENLYVVKTPEAGGKSSMESMFPKSWTTIVLNGKKFNPSNKIDITKEYGKEVFATSVVKANAAKIDFSGFNPLLDRIVKVIDHYAPPAS

SEQ ID NO: 784 - protein, 674 aa, Bradyrhizobium erythrophlei
  source 1..674: note = Related to NZ_LT670818.1
MSILHTLRTAKTRYDVAALLGYKPSALSYIVFQIPTAEKYKTFEIKKKGGGKRRIDAPIPMLKGLQRRLADVLYECLRELEEPEKRKNKLSHAFRKDYSIITNAKAHKSRRYVLNLDLQNFFPSLNFGRVRGFFLKNNQFKLAEPVATILAQIACNDGVLPQGSPCSPILSELLTHFLDIRLVKLAAKNQCSYTRYADDITFSTNQKEFPVALAVAVGEGWILGDEVKSRIEGAGFTINDTKTRMQVRGSRQTVTGLTVNEKVNVPQRYCKLARAMTHSFLATGAYKRDGVDDSSVPRLEGVLDHIYHIKERQIDIAIDAEKNKEKRHKLHADRTKHKNEYPSAIRLIYFQLVFFKHFIDPSKPLIICEGPTDSIYLKSAIRKLAALHPKLASTKDGKLSLDIHFFKYSKQSKDLLQLRGGSPDLKFFLEAWRDKLAKFKHRPMKHPVIVLIDNDDGATQIFKLAQSKKFGVTIGHATDLPFYHLGGHLYLVKTPIKGPDNKSCPEDFSTRPCWQPRSTARPLIPTRSTTRLASSERSSLQSVSCGRRRAASTSQALIPFSLALTPYSMITPNAGLRAQRPRHRRRSQRCRHRQRRSARRQPPPWPRPNVGCASQSIDLGRNRAGGGAAGRVNPVQDSSREASMLFPNLNTALMESKMKRASAFSKKTLSWARL

SEQ ID NO: 785 - protein, 607 aa, Bradyrhizobium sp.
  source 1..607: note = Related to JADPKY010000194.1
MSILQSLRAAKTRYDLAALLGYSPSGLSFIVYQIPKAAKYTTFDVKKKDGGQRRIDAPIPMLKALQKRLAGILYECLRELEESDKRRNNLSHAFRKNRSIITNAMAHRSRRYVLNLDLQNFFPSLNFGRVRGFFLNNNQFKLAEPVATTLAQIACNDGVLPQGSPCSPILSELLTHFLDMRMVKLATKSRCSYTRYADDITFSTNLKAFPASLAVAVGSGWALGDELKSRIESAGFTINEAKTRMQVRGSRQTVTGLTVNEKVNIPQSYYKLARAMTNSLLTTGTYKRDGVNDSSVQRLEGVLNHIYHIKERQIDLAIDAEKNKEKRHALHAERTTQKNEYPSAIRLIYFQLVFFKHFIDLAKPLILCEGPTDSVYLKSAIRKQAALHPKLISTKDGKTSLNVHFFKYSKQSKDLLQLRGGSPDLKFFLEAWKETLVKFKHRPMKHPVIVLIDNDDGATQIFKLLQSKKFGVTIGLATDLPFYHLGENLYLVKTPIRGPDNKSCPEDFFDPAVLSTKIDGKTFNPNKEHDAPGEFGKVVFAERIVRPQAGTIDFSGFDPLLARIDAVLDDYAKRTAPGPAAAPSPPAAGAAPKMKKRPRAATAAAQP

SEQ ID NO: 786 - protein, 577 aa, Bradyrhizobium sp.
  source 1..577: note = Related to JACIHF010000027.1
MSALQALRSARNRYDVAAILGYKPSALSYIVFQIPTANKYTVFEIDKKGGGQRRIDAPIEKLKGLQRRLADTLYECLRELESTDKVKNKLSHAFREDFSIITNAKAHRARRFVLNLDLSDFFPSLNFGRVRGFFMRNRSFRLAEPVATIIAQIACNNGVLPQGSPASPIISELMTHFLDIRLVRLAARNRCSYTRYADDITFSTNLEEFPAALATAEGQSWKLSDELRSRIRDAGFEINDAKTRMQVRGSRQTVTGLTVNEKVNVQQYYYKSARAMTHAFITTGKYIRNGDEETSVQRLEGILNHIYHIKERLIDIGIEAQENDEKRHKLHADRTKQKNEYPSAIRLLYYQLVFFKHFVDPSRPLIVCEGPTDPVYLKCALRSLATSHPKLATAVDGKISLAVNFFKYSDQSRDLLQLRGGAPDLKFFLQTWKDKLAKYKHRPMKHPVIILIDNDDGATEIFKLLQSRKKFGIDISHATDLPFYHLGNHLYLIKTPINGPNNKSCPEDFFETSVRETPIDGKRFNPDKEHEAPGEYGKVVFAERVVRPQAANIDFSRFDPILARIEAVIDDYAARKS

SEQ ID NO: 787 - protein, 601 aa, Bradyrhizobium sp.
  source 1..601: note = Related to FOUS01000020.1
MSSLHALRAATTRNDLAVLLGYKPSALSFIVYLTPPTAKYTTFDIAKKGGGTRRIDAPTPRLKGLQKRLADLLYECLREIEESEPRKNKLSHAYRKQFSIITNAKSHKSRRYVLNLDLEGFFPSLNFGRVRGFFLTNNHFKLARPIATLIAQIACNNGTLPQGSPCSPIISELLTHFLDMRLVRLAGRNKCSYTRYADDITFSTNQKEFPEALAVAVAEGWSLGDELRSRIEDAGFSINESKTRMQVRGSCQTVTGLTVNEKVNVPQRYYKLARAMTHSLLSTGSYLRDGISETSVQRLEGILDYIYNIRERQIDIALSAEKDAAKRKKLLSDRVEHTNEYPSAIRKIYYRLVFFKHFVDPTKPLIICEGPTDPVYLKSAIRRLASAHPKLTSVRGSDILLNVAFFKYSKQSRDLLQMRGGSGDLKYFLEGWKEELARHKHRPMKHPIIVLIDNDDGAKSIFGILRGKFGQSIGLATDLPFYHLDGPLYLVKTPTRGADHKSCPEDFFESHVLATKVDGKIFNPDKEHDAPGEYGKVIFAEKVIRPLAGSIDFSGFEPLLARIEAVIEDYSKRTATRPPPPLAAVRPTASRAKRAVVAAKP

SEQ ID NO: 788 - protein, 576 aa, Arboricoccus pini
  source 1..576: note = Related to NZ_FYEH01000004.1
MAALLSYSPSAVSYIIHITRPATRYMTFDIPKRSGGVRTIDAPNDRLKGLQRSLSKLLFKCLREIEAKDPRRNKLSHAFRPGASIISNAKTHHRRRYVLNLDLKDFFPAFNFGRVRGFFLKNEHFRLAEPVATLLAQIACKDGKLPQGSPCSPIITELMTHFLDIRLVKLAARHKCTYTRYADDITISTNQREFPSALAELDGTQWKLGEELVSRIHDAGFEVNDAKTRMQLRGSRQMVTGLTVNEKVNVAQAYYKRVRATAHRFLTTGAYELDGATCNSVPRLEGMINHIYHVRERQIDIAIANEGNKEKQHKLHAERTKTKNERPSAIRVVYYELIFFKNFINPPQPLIICEGPTDPVYLKSAIRRLAAAHPLLASVVGGKPELKVNFFKYSDQARDFLQLRGGSGDLLSFLISWKEAFNRYNFRPAEHPVIVLIDNDDGAGDIFNYLKNKKNYGLDIALEKHDPFFHLHGSLYLVKTPALGANHKSCPEDFFDPALLAEKLDGKSFNKENKINPATEYGKAVFATRVVRPKAGAINFAGFTPLLERIEAVIRDYAARKAAAAAPVPAAAAPTP

SEQ ID NO: 789 - protein, 568 aa, Bradyrhizobium elkanii
  source 1..568: note = Related to NZ_AXAP01000106.1
MAHLLGYQPSGLSYLLYKLPVGAKYTTFTIPKKSGGVRQIDAPAPRIKRLQRELAKILYKCIAEIEAQPGRKNTLSHAFRYGHSILTNAKAHRKRRYVLNLDLQDFFPTLNFGRVRGYFLKNRDFLLSEKAGTLIAQIACHEQTLPQGSPCSPVISELLAHFLDIRLATLAKKHRCTYTRYADDLTFSTNQKDFPAALAVETEAGWILGDGIVQKIQSAHFTIHPSKTRMQLRARRQTVTGLVVNEKTNVRSDYYKTARAMVDSLFRTGTYVIDGAPETALAPIEGILNHIYHVRESVIDAAIEAELDPERKKKRKSERAKAKRETPSAIRVLYHRLLFYKHFIAPSQPVLLGEGPTDSIYIKTAIRRLPAYHAALTELKQGKQVQRLDFFRYSKQAKEILQLGGGTGDFKYLLTAYKKFAPQYKHAPMAHPVILLIDNDSGSNPVFSVMASLFHVTASIKTDLPFYKLASNLYVVKSPPVELDGSSYIEQFFDPALLTTTIDGKTFNPNKEHEAAGEYGKVWFAEKVIRPNEANIDFTNFGPILARIAAVLEDHAASKAAVLPQAAQ

SEQ ID NO: 790 - protein, 595 aa, Bradyrhizobium sp.
  source 1..595: note = Related to JAFCMB010000001.1
MSKLSLLKSASSLSDVADLLGFSPSGLSFVLYKQSALAKYKKFEIHKKTGGTRDICAPIGAMKAIQRELATVLNACRAEILEATPRRPLSHGFRESLSIITNAQNHTARRHVLNVDLADFFPTFNFGRVRGFFLKDKDFFLNEKAATVLAQIACFENTLPQGSPCSPVIADMIAHVLDVRLVGLAKKNRVTYSRYADDLTFSTNQKDFPEDLAKPGAGPADPWIVGDELLKKIEGAAFKVNPTKTRMQFRGSRQVVTGLTVNTKVNISQRYWRSIRSMCHALFQKGEYHHPAPKAGTPPGSALVMINSLEPLAGMLSHAYHVKRKSLRFPDEKKEDVVFGQTDHRRFWFYKAFVAPTRPLIVCEGPTDNIYLRNAIRRLTAYHPKLGNMTPHGFKYGVALFSYTNQIHKILGISGGIGPLLTLVHGYKKQLKEYKFRPMAHPVIVLVDNDTALGQKVCNSLKKHFGVDVTHHSPSSFFHLTDNLYLVKTPLVGILAMTCIEDLFDAATKAMPLDGKTFHTEKAGFDPTKHIGKAPFATKVVSPNAAAISWNGFVPLLDRIVAVQNDYSAKLGTTPLAALPHTPTLAPLSPAAGHP

SEQ ID NO: 791 - protein, 554 aa, Phenylobacterium sp.
  source 1..554: note = Related to MEEX01000061.1
MSFVLYKQHPALKYAKFEIPKKDGGTREICAPLGPLKAIQRELATLLNECRAEILEATKRAPLSHGFREDLSIVTNAHNHTARRYVLNVDLADFFPTFNFGRVRGFFLKDKDFELHEKVATVLAQIACFENSLPQGSPCSPVIADMIAHVLDARLVGLAKKAKVTYSRYADDLSFSTNQKSFPEGLAKPSAVGSGVWVAGDDLVKKIEASGFKLNPAKTRMQFRGSRQVVTGLTVNAKVNVSQKYWRGIRSMCRALYTTGAYHLPSPKAGAPAGDPPEKIASLRVLAGMLSHVYHVKRESGFAPDGEKEEIVFGHTDHERFWFFRSFVALDRPLILCEGVTDNVYLRNAMRQKAAAFPQLAAKTPEGYKFAVALFSYDNLIHKILGITGGIGPVLKLIHGYRRRLKAFKYRPFLHPVIVVVDNDTALNAKTCNALKKHFGVDITHGSADDFFYLTNNLYLVKTPLVGTKAMTCIEDLFDDATLKKDLDGKVFHTEKEGFDASKHIGKKLFATKVIAPEAATISWDGFEPLLARVAAVLNAYAAKVAADASSSTT

SEQ ID NO: 792 - protein, 549 aa, Brevundimonas diminuta
  source 1..549: note = Related to NZ_JAENJN010000015.1
MAGLLDVEPRQLSFALYKLTPQQKYDTFEIPKKGGGVRTIHAPRGVLKDIQARLAALLYDCVDEIQVAKPRRPVSHGFRRSLSIITNAARHTNRRYVFNLDLEDFFPTFNFGRVRGFFLKDQDFLLSEKAATLIAQIACRDGALPQGSPCSPIIADLIAHILDVRLLSLAKTSKVTYSRYADDLTFSTNQKIFPPAIATGGAGPEDAWVIGSPLARVIERAGFSINTRKTRMQERASRQLVTGLTVNSKVNVTQSYWRSIRSMCHSLFQTGAYYRPIRTGEPPTLLMSLSPLAGMLSHVHHVKRESGVRPDRPGKDFQFGHKEQEDFWFYATFIALTQPLIVTEGKTDGVYLRNAIRNLPAFHPALGHITPEGFSFGVRIFNYENQTHQRLRITGGIGPLSTFMIHYGARLKRYGHRPLAAPVIVLIDNDTALTKELRAALDRNYGVKVDLLTPASFYHLTDNLYLVKTPELGASGVSCIEDFFDTATRKLPLDGKTFHADGKGFDPTRHIGKSPFAKKIVAPRAATIDWTGFAPLLSRIAAVVAHYKH

SEQ ID NO: 793 - protein, 572 aa, Oricola thermophila
  source 1..572: note = Related to NZ_CP054836.1
MTILKKLQDAKDLEDLAKILGFSPKGISYIIYKLEENSKYKKFKIKKSHGGEREICAPIEPLKTLQRRLANVLYASVDSIEAEKGINSTSHGFRRGHSIISNARKHKRRRYVLNLDLKDFFPTFNFGRVRGFFISDNRFGFHENVATLISQIACHENSLPQGSPCSPIIADLIANILDARLVRLAKDHKVTYSRYADDITFSTSLKKFPAALAQPVAGEGPDWKLADPLTKAIEGAGFKINPDKTRMQFRDGRQLVTGLTVNDKVNIRPEYYRYARSMCHQAFKSGKYYRPSKVSVVGEKEPEMIESLNPLEGILSHIHHVKDTIDVRIEPEKRRHGTAARQLYRRFLIFKKFVCLDQPLVICEGKTDSIYLKCALRKLTPSFPELAKIKDEKFTSKISFFNYTGRVHSVLELGGGTEDLKFFFIKTRYHEIINRFGHKPLQHPVIVLIDNDDGAKGLFKTIKQNFGITIDLQSDDKFYHITDNLYLVKTIEKGESGKSCIEDCFEPSLLETKVKGKKFNSLKYGGASGGYGKFVFAEQVVRPNADKIDFNGFKPLLERITAAIVDYKSRVP

SEQ ID NO: 794 - protein, 563 aa, unidentified
  source 1..563: note = Related to PBKC01000100.1; note = Rhodospirillaceae bacterium
MAYILYKIPDSAKYQKFTIPKSGGGEREICAPVERLKTLQRHLANALYACRDEIDRESGLRPLSHAFRRTVIVTNDRRHKLSIITNARRHKRQRYVLNLDLQDFFPTFNFGRVRGFFIHNNDFKLNDKVATIIAQIACFENALPQGSPCSPIVADLIAHLLDVRLAQLAKKHQLTYSRYADDLTFSTSRRDFPPSIAAPVTPESPEWAPGRELAKVIDKSGFVINPTKTRMQFRMSRQLVTGLTVNAKVNIRPEYYRRARAMCHSLFETGQYYRPLSVPETEAEDGEDVKLEPVTSLNPLQGILSHIHHVKDAIDDRPEPEKRMDATAARKLYARFLKYRYFVRLDRPLIVCEGKTDNIYLKHAIRQLTDFHPKLGEWEDNSFKSAIRFFNYTGQAHKLLELGGGASDLKYFFIKNRYAEDVRGFKHRPLAHPVVILIDNDDGADGKKGLLSTIKTNFNINIDLKSNDSFFHITDNLYLVKTPGKGKKVKSCIEDFFDPKLLKTKLNGKKLNLKKDHGADGEYGKYLFAEKVVRPNADKIDFSDFKPLLERITAVIDHYKPPD

SEQ ID NO: 795 - protein, 572 aa, Brevundimonas sp.
  source 1..572: note = Related to NZ_JAGHQP010000025.1
MAALLGYKPKSLAYILYKIPDGAKYTTFTIPKKTGGEREICAPIAQLKLLQRRLANILYACRDEIDKSSKLGSLSHGFRRGHSIVSNAKPHRRRRYVLNLDLKDFFPSFNFGRVRGFFIKSKAFELNEKVATLIAQIACHNNALPQGSPCSPVISDLLAHLLDARLAKMAKAQGVTYSRYADDLTFSTSKKEFPAALATSKEGETNVWELGEELVSRIVDAGFAINPDKTRMQCHASRQLVTSLTVNAKVNIRQEYYRRTRAMCDALFKTGQYADVPFNKSLARRQDSVTANEGGATGSGPWAPAKAGIKSLGPLGGRLAHIHYVKDTIDTREEIDKRKHMTAFRMLYYRFLFYKNFVALDKPLVLTEGKTDNVYLSLAVRHLPKFHPKLGQPSAKGFQSALRYFNHVNKTSKVMELDGGSGNFKFFVLRYADLIAKFGHKPQLHPVIMLLDNDDGAKDILAVIKKNYGIEIKPSSTNSFFHITDNLYVVTTPHVGKKVKTCIEDFFEPSLLKEELNGKTLNLGTPNPATEYGKHIFAEKVVRPNASTLKWDGFEPLLQRLSDVLDHYEPPT

SEQ ID NO: 796 - protein, 587 aa, Hartmannibacter diazotrophicus
  source 1..587: note = Related to NZ_LT960614.1
MSILKSLKAAEDVDDLAVLLGYKPKSLTYILYKLPDAAKYTTFKIPKKTGGEREICAPTDQLRLLQRRLANILYTCRDEIDHESGKGSLSHGFRRGHSIVTNAKPHHRRRFVLNLDLKDFFPSFNFGRVRGFFIKSKAFELNEKVATLIAQIACHQNALPQGSPCSPIISDLLAHLLDTRLAKMAKKEGVTYSRYADDLTFSTNKRVFPTALAIQNGDNAKLWELGEELTSRIADTGFTINPDKTRMQCRMSRQLVTSLTVNAKVNVRMEYYKRTRAMCDTLFKTGLYSDIPFNKSLARRRDNALAVAGSEKDKDGVKAAKTSITSLGPLSGRLAHIHHVKDRIDTREEWEKRKHKTTFRMLYCRFLFYRNFAALDKPLILTEGKTDNVYLSLAVKNSPKFHPKLGQLTAKGFQSNLRYFNHLNETHKIMELDGGSGNFKFFIIRYKEIMDSFKHKPMLHPVVLVVDNDGGAKDIFATIKTNYGISINHDGKHGFYHVTHNLYLVKTPHVGKKQQTCIEDMFEPALLKEELGGKKLNLGKLDPAKEYGKHLFAEKVVRPKASTLKWDGFEPLLQRVVEVLDHYKPPT

SEQ ID NO: 797 - protein, 559 aa, Bradyrhizobium sp.
  source 1..559: note = Related to NZ_PSRS01000004.1
MSVLGDLKAATSLSDLAKLIGYKPSALSFLIHHAPATSKYTSFSVPKKSGGVRLINAPSPKLKTLQQHLVTLLTKCRKEIDEASNLKPLSHGFRKGQSIITNANPHIRRRYVLNLDLEDFFPSINFGRVRGYFIKNNDFKLHKDVATVIAQIACHANSLPQGAPTSPIISDLVAHLLDVRLVRLAKKNNCTYTRYADDLTFSTNVKVFPTSLALQTSPSDWELGKPLSDVITDVGFKVNPLKTRMQLRGSRQTVTGLTVNQKVNIQAGYYRRVRSMCYELFKTGLYFQQGSAPVSALPVVEGQLNHCFRVKHEVAYSRKVDIQNDKRDRGVRKLYRRFLFYKHFVQLTKPLLICEGKTDVIYLKLALRSLAASFPSLVTTTAAGEVRNVGFFNHTDIADNLLKLGGGSGGMQLLIKDYASVLKYFRSKPLAHPVILVIDNDDGADDIFAAIYNVTKTKVSRTSTADFYHIVNNLFLVKTPESGIHGTSRIEDLFKPSVLKTVVDGKIFNPAKKIDPTKEYGKIVFAEKVVRPNANKIDFSAFNKFLGRIEAILKHYKPP

SEQ ID NO: 798 - protein, 593 aa, Lichenihabitans sp.
  source 1..593: note = Related to NZ_CP085136.1
MLLELRQADTLERFAALLNYTPSGLSFILYKMDAASKYTTFEVTKASGGVRMIHAPHIKLKRLQKALANILLACNVEIETATPRRPLSHGFEKKRSIFTNAWEHKNRRYVLNLDIEDFFPTINFGRVRGFFIKSHDFTLPEKTATLIAQIACRDGKLPQGSPCSPIIANLVAHLLDVRLVGLAKRSNCSYTRYADDITFSTNQQEFPAELAAEDPPRSGTWVLSEALIAQITRTGFTVNNAKTRMQCRPSQQLVTGLTVNQKVNIRAAYYARARIMCSSLFNHGHYHVEMEPAPAPAPGGTPGKPKPKLLTKTATLEGILSHIYHIKHAQELKSNPETYKAKDPEAKKKTNQKREYPGYRKLYKKFLYFRHFVSPTAPLVMCEGKTDNIYLRSALKGLDPSYPRLAEVKDGKLFTKGRFLKHSRAEHDILELSGGSGNIANFIAHYRSAVFNYKHRPMKYPVIILLDNDSGGNAVFNQAKEMFKIRVGYDTTEAFYHLCHNLYLIKTPEMGRTGESCMEDLFDEKTRKELVDGKTFNPKADKDTATQYGKMVFADRVVRANYAMINFDKFKPLLERIVAVLDHFDANKPKAAT

SEQ ID NO: 799 - protein, 587 aa, Methylobacterium tarhaniae
  source 1..587: note = Related to NZ_LABZ01000002.1
MLSQLKSASTIDRFAAALGYKPAALAFILFKMTDAEKYQTFTIAKASGGVRTIHAPTEKLKRLQKRLANVLADCRKEIHDKKPLSTLSHGFEPDRSIFTNAWAHKNRRYVLNLDLEDFFPTINFGRVRGYFINNRDFQLPIKAATLIAQIACFQGKLPQGSPSSPIISNLIAHLLDVRMARLAKSNTCTYSRYADDLTFSTNQKQFPPDIATQVPDEPGNWVLGNRLTGEIVRTGFTINHQKTRMQSRPSQQLVTGLTVNEKVNIRASYYRHARKMCSSFFNHGVYYNEMEFVFGVEGPRPKLIDTPSVLEGILSHIYHIKNLQLTRSTEPEELKQKSNKIKYPAYRHLYKKFLYFRHFINLDAPLIVCEGKTDNIYLRSALKALYPAFPVLADVKKGELRSKVKFLKHSRIEHNILELSGGSGNIANFIAHYRGAVYNYKYRSMKHPVIVLVDNDSGQKGSVFPQANKLNGKIDINYSSKEPFYHLCHNLYLIKTPEIGLTGESCMEDLFDAATLATKVDGKTFNRKDDKDTSTQYGKMVFADKVVRANYDKIDFSLFVPLLERITKVIAHYKSNPSASASSHVKS

SEQ ID NO: 800 - protein, 504 aa, Chlorobaculum sp.
  source 1..504: note = Related to SDGU01000027.1
MSTLLRLRTAKNLKDLSVILGYEPKKLSYILYKIPEQEKYNSFEINKKDGGKRLIEAPIPQIKKLQKHLCNILTLCSVELAKDSPNNILSHGFKKGSSIQTNAQKHKNKRFVLNFDIKDFFWSINFGRVRGFFIKNKDFLLDDKVATIIAQIACYNGRLPQGSPTSPIISNLIAHLLDIRLVGVAKKYGCVYSRYADDITFSTNQKEFPLDLVRRSSENPELLLLGTPIEEEVKRSGFCVNPLKTRLKYRDTRQVVTGLVVNKKINVRSEYYRLARAMCHSYYKTGKYLIPSKISPIDIPSTLCDSDVKADLNRLGGILNYIFYTRNYSDQRCLRDKQDNKSGIWKMYRDFIYFKIFGALERPLILCEGPTDSIYLKAAIKSLHNEYPELIEKCSERFIYNISFLKYSKTIRELLHLTGGTGELANFVGYYASMAKQYVIWNPMHPVIIVTDNDGKRKNAATKVFAAVKQNSKNSHPTTEDDSDFFHINNNLYLVKMPHINNKK

SEQ ID NO: 801 - protein, 583 aa, Legionella santicrucis
  source 1..583: note = Related to NZ_LNYU01000023.1
MAYLEKLKAASTIQDLAALLNLKASHLAYVLFVLPDETKYKQFEIPKKAGGERIINAPHERLKHIQRCLAHLLQYCVLEIEHSKPQPTPRVLSHGFRKKTEVNPNRKSDISIGIHTNAYSHQNKKYVLNFDLSGFFGSFNFGRVRGFFIKNNDFGLHPSVATLIAQIACFKNELPQGSPCSPIITNLIAHILDIRLVRWAKKNRCSYSRYVDDITLSTNQEIPQKLATQSEELMKWSLNKEIENIITHSGFQINPLKTRLQMHSSRQIVTGLVVNKKINVKKEYYRSTRAMCHALYCTGSFFLLGDKSKPGTLQQLNGILEYIYFIKQKNHCNKEPCYKTNVEQHNITNLYSQFLYFRYFIALEKPLIICEGKTDVAYLKIAIKQLKKQGKYLLPHQIDFFHFTERISEVMHINAGTSLLKKFIENYKKNIAFTKQIPRSPVIVLLDNDKAAGDVIQCLENKFKKTNVNYDRKKNFIYPVIENLYVVLLPIRNPPEDIIIENFFEKSVLETKLGEKIFSPENGNGFDSQRHYSKQVLVEKVIRPKQDTINFSGFTDILDNLVTAIEQYKPGPDKIQDQAVSII

SEQ ID NO: 802 - protein, 580 aa, Neoasaia chiangmaiensis
  source 1..580: note = Related to NZ_CP014691.1
MSSLAKLQSAKSLDELAAILGYKPAALAYLLYHLPTARKYTTFTIPKRDGTPRDILAPTPKLKLLQRRLANVLYLALADIDKAGAPRRHLSHGFAKHLSIVTNANVHRRRRYVLNLDLKDFFPSINFGRVRGMFIKDKRFALDPKIATLIAQIACHNNVLPQGSPCSPVISNVIGHLLDIRLVRLAKAQKCTYSRYADDITFSTNAKLFPADMAALVAGTEHEWTLGAALIEEIDKAGFAINPVKTRMQYRGSRQVTTGLLVNEKPNILPEYYRPVRAMCWSLFNNGSYYRVVPATLAGGKPGDPDVQEPATSLAPLQGMLGHIYHVRDQIDQRSSAEKKKETTATATRKLYHRFLFYRNFIVAPKPLIIPEGKTDSIYLQAAIEKLIAYHPQLGRMDKGKFKSALKFMNFSSTVHAVLQLGSGSGDLFHFIRKYHELLKHYHHRPLPNPVIVLIDNDDGAKEIFGAAKGLGAIGISLTSTDAFYRLGPNLYLIKTPETGPKGKSCIEDLFDPTLLKAEIDGKKFDVNKKHGEPGKYGKQIFAEKVVRPKKDIIDFSKFSGLLDRIVSALDDYTASPPPP

SEQ ID NO: 803 - protein, 468 aa, Altererythrobacter sp.
  source 1..468: note = Related to AP018498.1
MLNLDIKDFFPSINFGRVRGMFIKDKRFALDPKIATLIAQIACHDHVLPQGSPCSPVISNVVGHLLDIRLVRFAKAQKCTYSRYADDITFSTNAKAFPPDIAAPVAGSEHDWTLGAALLKEIEKAGFEVNPTKTRMQYRGSRQVATGLLVNEKPNVRPEYYRTVRAMCWSLFNSGTYYRMVPAALAGGKAGDPDVPEPATSLAPLQGMLGHVYHVRDQVDTRPSADKKKDATATATRKLYIRFLFYRNFVVAPKPLIIPEGKTDTVYLRAAMEKLTAYHPRLGAMDKGKFKPALKFMKFSSTIHDVLQLGNGAGDLFHFIRRYPDALKRYRHRPLPNPIIVLIDNDDGAKEIFGAAKGLGAAHIARTSTDPFYRLAPNLYLIKTPEIGAQGISCIEDLFDPALLKTVIDGKVFDPNKKHGEAGKYGKARFAEKVVQPQKDTIDFSKFAGLLDRIVAALDDYVANPPPP

SEQ ID NO: 804 - protein, 578 aa, Sphingopyxis witflariensis
  source 1..578: note = Related to NZ_NISJ01000021.1
MSSLAKLQAAKSLDDLAAILGYKPAALAYLLYHLPDAQKYTAFTIPKRNGNPRPILAPTPKLKLLQRRLANVLYLALADIDKAGAPRRPLSHGFAKHLSIVTNAAVHRRQRYVLNLDLKDFFPSINFGRVRGMFIKDKRFGLDPKVATLIAQIACHDHVLPQGSPCSPVISNIVGHLLDIRLVRFAKAQKCTYSRYADDITFSTNAKALPAEVAVPIPGSEHDWTLGAALLKEIDKAGFEVNPAKTRMQYRGSRQVTTGLLVNEKPNIRPEYYRTVRAMCWSLFNSGTYYRMVPAALAGGKPGDPDVQEPATSLAPLQGTLGHVYHVRDQVDTRSSVDKKKEATATRKLYIRFLFYRHFVVAPKPLIIPEGKTDSVYLRAAMEKLAAYHPQLGAMDKGKFKPALKFMNFSSTVHDVLQIGNGAGDLLHFIRKYPDALKHYRHRPLPNPIIVLIDNDDGAKDIFSVAKNFGAPNISRTSTDPFHRLAANLYLIKTPEIGAKGTSCIEDSFDPALLKTVIDGKVFDPNKKHGEPGKYGKARFAEKVVQPQKDTIDFSKFTSLLDRIVAALDDYAANPPPP

SEQ ID NO: 805 - protein, 536 aa, Sphingobium sp.
  source 1..536: note = Related to NZ_CP046252.1
MPKRDGTQRQILAPTPKLKLLQRRLANVLYLALADIDKAGTPRRQLSHGFAKHLSIVTNAAVHKRRRYVLNLDLKDFFPSINFGRVRGIFIKDKRFALDPKVATLIAQIACHDHVLPQGSPCSPVISNIVGHLLDIRLVRFAKAQKCTYSRYADDITFSTNAKAFPADVAAPVSGSEHDWALGAALLKELKKADFEVNPAKTRMQYRGSRQVATGLLVNEKPNVRPEYYRTVRAMCWSLFNSGTYYRMVPAALAGGKPGDPDVQEPASSLAPLQGMLGYIYHVRNQVDTRPAAEKKKEETSTATRKLYVRFLFYRNFVVAPKPLIIPEGKTDSIYLRAAIEKLTAYQPRLGEMDKGKFKPALKFMNFSAAIHDVLQIGNGAGDLKHFIRKYPDALKHYRHRPLPNPVIVLIDNDDGANDIFSVAKNLGAPHISRTSTDPFYRLAPNLYLIKTPEMGSKGTSCIEDLFEPALRKTVIDGKVFDPNKKHGEAGKYGKARFAEKVVQPQKDKIDFSKFADLLDRIVAVLDDYAANPPPP

SEQ ID NO: 806 - protein, 571 aa, Erythrobacter sp.
  source 1..571: note = Related to JAACTB010000013.1
MKAATSLEDFATLLGYSPAGLSYILYRQPPALKYRSFTIPKRSGEERLIFAPKPKLKLLQRRLADLLYAVLADIDKAGNPRKPLSHGFAKNLSIVTNAKNHKRKRFVLNFDLKNFFPSINFGRVRGVFINDRRFQFDPTIATLIAQVACHENALPQGSPCSPVISNIIGNLLDIRLVRFARAHKCTYSRYADDITFSTNAKHFPPEVAEPLSFLGDEWVVGANLEAEVSKAGFQINPGKTRMQLRGSRQQTTGLVVNEKPNICSEYYRSVRAMCSSLFNTGSYYRMVPAALSGGEPGEPDVRDQTTKLAPLQGLLGHIYHVRNQIDRRTSSEKKQKPTATRSLYQRFLFYRNFVVAPQPLVVPEGKTDSIYLRAAIERLSEYHPRLGSFEDGKFKQSVKFLNFSPAIHDVLQLGGGYGDLQFFVRQYRISLKRFRHRPLPNPVIVLVDNDSGGKQVFNAAKGLGIDGISLKSSDPFYRLTENLYLVKTPELGNEGTSCIENFFKPELFKEKINGKEFDPAKKHGAPDKYSKQVFAEKIVRAKKAEIDFSDFAPLLGRIVAVLDDYAANPTN

SEQ ID NO: 807 - protein, 580 aa, Bradyrhizobium arachidis
  source 1..580: note = Related to CP030050.1
MGGRVSLLLKLKTAKSLDDIASLLGYQPQGLAYILYKIPESVKYTTFTIAKRSGELREIKAPIPHLKILQRRLANLLNSCLGEIENAGERRRPISHGFVPSLSIITNASVHKRRRYVLNLDLEHFFPSINFGRVRGVLIRDRRFELDSKVATVVAQIACHENSLPQGSPCSPVLSNIVGHLLDIRLVRFARQHKCTYSRYVDDITFSTNRTAFPTELAAQQESGSWGLSQSLVSEIERAGFRVHARKTRMQVRGSRQLTTGLLVNEKVNVRPEYYRTTRSMCAALFNKGTYYEMKPATLAGGNVGDAAVKEVANSLDLLEGRLGYIYHIRNTVDRRESAEKKKNSTATRKLFHKFLFYKNFVALERPLIITEGKTDSIYLRCAIRSLSSFHGKLTIDRGSKPRLSVSFLNFTSTVHDVLQLGGGTGDFKFLMLRYKQLLDEFKHAPLIHPVILLIDNDDGAREIFGVAKQLGVADVSLVSRAAFYRICANLYLIKTPEGTSQNPKTCIEDLFDSSVRNTLLGGKSFDPDKKHNEEGKYGKAHFAERVIRPQSTDIDFSKFEMLLDRIVAVIEDYAPAKGI

SEQ ID NO: 808 - protein, 582 aa, Methylobacterium sp.
  source 1..582: note = Related to JAKSYA010000167.1
MSVVKSLKEAKSLTDLAKILNYKPSGLSAILYHIPDANKYTEFSIPKQSGGLRTIKAPVDRLNLLQKRLSDLLYSYLDEIEPKKNGFKTVSHGFIKDRSIITNAQVHKRRRYVLNIDLNEFFSTINFGRVRGIFIKDKRFEFHQDVATIIAQIACHANSLPQGSPCSPIISNIVGRLLDVRLIRLARLYKCTYSRYADDITFSTNRAQFPSELAHPDPAGSPRWVLGFALTSEITNRGFQVNNNKTRMQFKASRQLVTGLIVNDKVNIKQEYYRNVRSMCSLLFKSGKYYRVTPAVFAGGSANDPPVKVEFDTLGSLGGMLSYVYHVKNTIDRRASVEKKKEATSAAIRKLYHLFLFYKNFVDLKSPLIVTEGKTDAIYLKSAVEMLSKFHPQLGSLNGGKFVHTVRYLKFTSTVRDVLQLGGGSSDIKFFIERYAKILRKFKHGSLSHPVIILIDNDEGAKDIFSVVRGNTPHKDISLDKTDKFYRIYSNLYLVKTPEVGKVKNMTCIESFFEDIVLKTVLETKTLDLNKKHLAPGKYGKQVFAEKVVRPNKKSINFSGFDPLLERIVAVIDDYKTNPSSI

SEQ ID NO: 809 - protein, 585 aa, Methylobacterium pseudosasicola
  source 1..585: note = Related to NZ_FOTK01000017.1
MTVSIVKDLKAAKSLDDLALLLGFSASGLSYILYKSNSAARYTEFQIPKRKGGTRTIKAPEPKLKLLQTRLAEILYNYLDGIEEKKKPFKAVSHGFAEGKSIITNAAVHKRRRYVLNIDLEDFFPTINFGRVRGVFIKDRRFEFDPKIATIIAQIACHDHSLPQGSPCSPVISNIVGRLLDVRLVRLAKEHKCTYSRYADDLTFSTNQSTFPAALAAPDPAAAGKWIVGNALDAEIVGTGFKINHGKTRMQFRDSRQTVTGLLVNEKVNIVPEYYRAARSMCSAFFQTGKYYHRVPAALVGGKAEDPMEDIVYDTPPVLEGILSHIYLIKNTVDRRTSAEKKKEENVTAIRKLYHHFLFYKNFVISVRPLIVTEGKTDPIYLKAAIERLPKFHPKLGAFKGGKFQTTVRFLNFTSTVRDVLQLGGGSGDLMHFIEKYFKILSKFKHAPLAAPVIVLIDNDDGAGKIFGKIQGLTKCPPISTLTTEPFYYITANLYMIKTPEIGKDKGMTCIETFFEDTVLKTVLGGKTLSLNKKHLEPGKYGKAIFAEKVIRPNKATIKFDAFEPLLDRITAVLDHHAAKAPPAA

SEQ ID NO: 810 - protein, 580 aa, Methylobacterium terricola
  source 1..580: note = Related to NZ_VDDA01000005.1
MSIVNKLKGAKTLDELADLLGFTPSGFSYILYRLPNAIKYKSFSIPKRGGGARTIEAPDDRLKLLQRRLANVLYLYLDEIEKSGKEHTPVAHGFARSLSIITNAACHKRRRYVLNLDLAEFFPAINFGRVRGVFLKDKRFEFAPKIATLIAQIACHNHALPQGSPCSPVISNIVARLLDVRLVRLAKQHKCTYSRYADDITFSTNQKEFPVDLALPDPSGKGPWVVGPALTAEITGTGFVINASKTRMQIRGSRQLATGLLVNEKVNVCPEYYRTVRSMCARLFSTGEYFAMVPAMMAGGKVGDPDVRTSFKTFPLIEGRLGFIYLVRDGLDRRDGVEKKKSPTATRVLYHHLLFYKHFVAGARPLVITEGKTDRVYLRAAIEKLTSFHPRLGKIESGAFSSSIRFMNFSRIVHDVLQLGGGTGDLKFFMLHYADTLRKFKHAPLKAPIIVLIDNDLGTKDIFGVMREKTVHKTISTQTTAPFYRVHANLYLVKTPETGKDKGMTCIEDLFEPCVLATKIDGLVFDPDKKHKEPGKYGKAVFAEKVVRPNKSAIVFDGFDPLLQRICDVIDDYATHPGHI

SEQ ID NO: 811 - protein, 586 aa, unidentified
  source 1..586: note = Related to JAGWBW010000022.1; note = Candidatus Latescibacteria bacterium
MTYLKKIREAQTLKDIAHILGVQPKTVSYLLYILPDAEKYRPFEIPKRNGGKRLINAPEPRLKMVQRRLANVLYECIAEAEKCAPPRRPLAHGFARPRVIGTDASKNKKRRYALGIFSNAAIHKNRRYVLNLDLEDFFPSLNFGRVRGFFIKDKRFELNEKVATVIAQIACHRNELPQGSPCSPIISNLLGHLLDVRLFRLARKYKCTYSRYADDITFSTNRKDFPAALAKPIPEKVSYWQLGSPLVKQIQRAGFKVNNDKTRMQWRGSRQMATGLIVNKKVNIRSEYYRTARAICNRLFSTGEYYISDPEKSLDGLNKIEGILSHIHYIKDRADLREKEEKKKDPLAIRKLYRRFLFYKHFVALEKPLIVTEGKTDPIYLRAAISKLPKYHPQLGEFVNGKFSSAIRFLKYSDTIDKILRLSGGTGNLKDFILKNYKKDINSFKFQPLAYPVIILIDNDQGARDIFNMVTKRFEIKISPETTQSFYHLHKNLYIVKTPENGKNSISCIEDLFDPELRETPIDGKTFDFSKKNKADDKHGKTVFATKVIRPQADQIDFSRFEKLLDRIIVVLDDYYVRQKSSSVDS

SEQ ID NO: 812 - protein, 569 aa, unidentified
  source 1..569: note = Related to VXMB01000009.1; note = Gemmatimonadetes bacterium
MENLERLREATSLKDIARIFGVQPKTISFLIYVLPAEHRYHTFEIPKQSGGMRTINAPEPRLKMIQRRLADCLYKCTGEIYGEPPKRLLSHGFLRSRSIFTNASIHNSRRYVLNLDLEDFFPSFNFGRVRGFFIKDSRFKLHQKVATIIAQIACHQNELPQGSPCSPIITNLIGHMLDVRLVKLARKYNCLYSRYADDITFSTNLTNFPVDLAKQSDGDLSKWQLGKKLTKEIEDSGFDINKSKTRMQWKCSRQTTTGLTVNKKVNIRSEYYRRARAICHQLFTSGSYYTFDVESQSENLNKIEGILSHIYHIKQQSAVAFERSTQRTWDAKTTGLYAIRKLYRSFLIYRYFNVSVKPAIVTEGVTDPIYLKLAIKKIKAYQPQLGEFTNGRFQYKMSFIKHSGNTGEVLQLDGGVSKLNSLIKNYRKDLDRFKYTLLTNPVVVLIDNDKGAKEVFNTVKNQYGLEISHKKEKPFYHLHANLYLVKTPLTNNRSESCIEDCFDQDTLDIELDGRKFDPAKKNGSEDTYGKTTFAREVIIPNADVVSFEGFDEVLSRISAVLDDYRVRRQ

SEQ ID NO: 813 - protein, 562 aa, unidentified
  source 1..562: note = Related to JAIPDZ010000080.1; note = Deltaproteobacteria bacterium
MSRLIKLREAKSLSDLAVLLGFKPKAVSYILYKIPENNKYIEFEISKKNGGKRLIKAPTEKLKKLQRRLADLLNECFNQISKESGKKSLAHGFIENHSIVSNAKNHKNKRYVFNVDIQDFFPSINFGRVRGFFIKNRHFSLDPNVATVIAQIACHNNELPQGSPCSPIISNLIGHLLDIRMANLSKRAKCTYSRYADDLTFSTNRKDFPESIAIMQDDNNWVAGSRLIKEIDKVGFSLNTKKTSMQFKTSRQMATGLIVNEKVNIKREYYKIARSMCHELFNTGEFYLNNKDDSSGETDNNEDKGTTISQLEGILNFIYQIKRPHDTAKLGDRRFHPNAITKLHRDFLFYKHFHSMQMPVIVCEGKTDIIYLKCALKQLAKTYNEFIELNDDGTEYKINFLNFSKKLRDVFAISTGTSGLKHLMEIFEKNMCTFNVGGKSFPVVVIIDNDDGAEDIKKKLKIKNSEEIKEFYHFVENLYVLIIPKDKGKAIEDLFEPEVLMKKVDGKVFNRQKELDAEKEYGKIVFAEKVVRENQQHINFDGFKEVFDKLKTVIDDYRTKNV

SEQ ID NO: 814 - protein, 561 aa, unidentified
  source 1..561: note = Related to JAGGXD010000009.1; note = Bacteroidales bacterium
MSRLEKLRKTKSLSDLAKLLGFQPRAVSYILYKIPEDRKYIEFEIPKKNGGKRIIKAPTEKLKQLQNRLADLLNECFDQISKESNNKSLSHGFRKKHSIVTNAKNHKNKRYVFNVDLQDFFPSINFGRVRGFFIKNHHFGLEPKVATVIAQIACHNNELPQGSPCSPIISNLIGHLLDVRMVNLAKKAKCTYSRYADDLTFSTNKKNFSPLITIKQDENNWMAGDRLVKEIKKVGFTLNTEKTSMQFKTARQMTTGLIVNEKINVRREYYKNARSMCYELFRTGEFYIDKKDIPLNNEEGHKEIGTINQLEGILSFIYQIKRPHDKAKLGNRRFHPTAITKLYRDFLFYKHFYFMEMPVILCEGKTDIIYLKCALRQLAKSYTEFVEMNDDGTSYKIKFLNSSRNFRDVFSISTGTSGLNHLMEIYEKNISKFKVKGKAYPVIIIIDNDDGSKEIKKRLNIKNDEKIKDFYHFVENLYVLIIPKDKDKAIEDLFDTGVRKTKIDGKVFNRGKKIDEKKEYGKIVFAEKVIKANQQKINFDRFKEVFDEVQKIIEDYKKRNV

SEQ ID NO: 815 - protein, 553 aa, unidentified
  source 1..553: note = Related to JAKISH010000034.1; note = Gammaproteobacteria bacterium
MSQLEKLRKSTCLSDLATILGYKPKSVSFIIYKIPEDKKYIEFEIPKKNGKTRKINAPVDQLKHLQRRLADLLNNCFNEISSEAQKKSLSHGFRKNNSIITNANNHKNKRYVFNVDLKDFFPSINFGRVRGFLIKNNDFSLNEKVATVIAQIACHNNELPQGSPCSPTISNLIAYLLDIRMVNLAKHSKCNYSRYADDLTFSTNRKDFPNLIAIKKDDKSWDASKKLIPEIEKVGFCINPDKTSMQFRTSRQVTTGLIVNEKVNIKSEYYKKARSMCHAVFNTGQFYIEGDDTEKENTIKQLEGILSFIYYAKRPHEPSKDGSRKYNPTAITTLYRKFLFYKHFYSLEKPLILCEGKTDIIYLKCALKQLSNTYSDFVDTSKDKITYKVSFLNFSKNLRDVFSISTGTSGLDFIIDNYKKLSPTFKAPRKPYPVVVIVDNDDGSKEIKKKLKINNGDAITDFYHFSDNLYILIAPKNKTGAIEDFFDDNILSTKIGGKSFNREKKIDPNSEYGKMVFAEKVVAANQKSISFDKFKEVFDGMRKIVRDCDDKIV

SEQ ID NO: 816 - protein, 564 aa, unidentified
  source 1..564: note = Related to JAFDMD010000032.1; note = Deltaproteobacteria bacterium
MTKLEKLQKTTSLSKFAKLLNYQPKTISYILYKIPEEDKYNQFEIFKKNGEKRKIQAPIKKLKLLQRRLANLLNECFDEICNKNKKTKSLSHGFRKKHSIITNAKKHKNRRYVFNVDLQNFFPSINFGRVIGFFIKNNHFSLKPEVATVIAQIACHDNALPQGSPCSPIISNLIGHLLDIRMVNLAKKTKCTYSRYADDLTFSTNKKEFPEKIAIKKNESDWVAGRALTKEIEKMGFSVNAKKTSMQYRTSRQMATGLIVNKKINVKKEYYKKARAMCHNLFKSDNFYIDKNSEKEGTLKQLEGIISFIYQVKSPHYIENKKPTAITALYRKFLFYKHFFSIDKPLIVCEGKTDIIYLKCALKQLENEYKELMGKSDKGINFKIKFLNISKNFKEVLNVAEGTTGLLSLINMYKDGFKHFKGKGKKYPVIIVLDNDKATGKIKSRIQEQLKLNNDKTADKKKQKQKLDTNKYYHFAHNLHIMFAIKEDGKEIEDLFDKEVLDTNVEGKKFSRKDKIDTKQEYSKTIFAEKVIKANQTKINFEGFKPVFNKVKNIIKEYSKKNSQ

SEQ ID NO: 817 - protein, 585 aa, Nitrospira sp.
  source 1..585: note = Related to JAGQKD010000345.1
MSHLENLKKTTTLAELALLLGYKPKALSYILYKIPQINKYKDFTIPKKNGGERRIQAPVDKVKHLQKRLAVLLSQCFDEISKKANHKRSLSHGFRKDHSISTNANNHTNKRHVFNIDLMDFFPSINFGRVRGFFIKNSHFGLKPKIATIIAQIACHNNELPQGSPCSPIISNLIGHLLDIRMANFAKKTKCTYSRYADDLTFSTNRKEFPEKIASQNNGNEWATSRTLKKEIEKVGFKVNEKKTSLQYKTSRQIATGLVVNKKVNIKKEYYRQTRSMCHSLFQSNEFFLGNTYSAKPAISENAKINSTSPATNSKTPLPKNPQGKIKQLESILSYIYSVKRRHDRDNAGKRKNYPNAITKLYRKFLFYKHFFSLNCPLIICEGKTDIVYLKCALRQLANEYGEFIEKTGPSFILKIDFLNLTKNLKDVLAISEGTGGLGSLMGIYEIYMKPFKGEGKKHPVIILIDNDSGSKEIIEIMKRKKKWDPSKPFAFFTENLYVVHISSESGTSEMAIEDLFDDQTQNTTVDGKKFNRKPKIDSASEYGKIVFAEKVIRANENSINFDGFKKVLNSFKAATQDYNKRITV

SEQ ID NO: 818 - protein, 386 aa, unidentified
  source 1..386: note = Related to JAGNKF010000015.1; note = Syntrophaceae bacterium
MSKLERLREAKSLSDLANLLGYKPKAVSYILYKIPSEKKYSAFTIPKKTGGDRRIKAPIDPLKDLQGRLADLLNTCFDEICIKSKHKRSLSYGFRKGESIVTNAINHRNKRHVFNVDLQDFFPSINFGRVRGFFIKNKHFELDPDVATVIAQIASHENELPQGSPCSPVISNLIGHLLDIRMVNLAKKAKCTYSRYADDLTFSTNRNEFPEIIAMPEKSGSNIWLAGETLEKEIKKVGFTINKNKTTMQYKARRQMVTGLVVNKKINVKREYYKHARSMCYSLFQSDQYYIDKHLTIPSAGTTILDDGAADKKSEPTKEYEKIVGNMAQLEGILNFIYYVKDMHDKREKREKRKNRSAMVELYRKFLFYKYFFSVERPLIVCEGKN

SEQ ID NO: 819 - protein, 583 aa, Geomonas sp.
  source 1..583: note = Related to NZ_CP087999.1
MSSLEKLKKAVTLSDLAVLLGYKPKAVSYILYKLSLEEKYTVFTIPKKGGGERTIKAPTEQLKRLQKRLADHLGKCYEEIYTKGPHKNPLCHAFRKKFSIVTNAENHVNRRHVFNADIKDFFPTIHFGRVRGFFIKNVHFTLEPKVATVIAQIACCGDELPQGSPCSPVISNLVAGHLDIRMATLAKKAKCTYSRYADDLTFSTNRKEFPDLIAVLKEGSDKEWTAGPGLLKELKRADFTINERKTSLQNSTGRQIATGLVVNDKVNVRREYYKQARSMCYSLFLNGDFYRGSHHVSTIEQPVASSDVQAEASAEKHAKSGTLNYLEGVLSYIYSVKASHDQRKTCAKRSYPSAVMKLYRQFLHYKHFFVLQKPLIICEGKTDVIYLKCALRQLGKSHPSLIKLNGKEFVYEVSFLNMSKNLKEVFAMSEGTPGLASIMENFHKNMAGFEGEGKKHPVILLVDNDSGAKEIKKKIDHKNPAKTFHRYADNLYVILIPNKPGQEETAIEHLFDAKTLSTTIDGKKFNSSAELNPKTEYGKIVFAEKVIKANQQNIDFSGFDSILQQFEAVIVDYNKQQTQSVTS

SEQ ID NO: 820 - protein, 569 aa, Desulforhopalus singaporensis
  source 1..569: note = Related to NZ_FNJI01000013.1
MSNLERLQLATTLSDLADILGYKPSALSYIVYKIPSTSKYTTFDIPKKSGGTRLINAPDERLKRLQKSLAKLLMKCEIEINDKLNHKNNISHGFKKKFSIITNAIPHKSKRHVFNVDLKDFFPSINFGRVRGFFIKNKHFQLCDKIATIIAQIACHDNSLPQGSPCSPVISNLVGHLLDIRMVNLAKRAKVTYTRYADDLTFSTNKKEFPCLIAYKKSGSDSEWLPSKKLTKEIDKVGFTLNSDKISMQYKTSRQIATGLVVNKKVNVKREYYKKTRAMCHSLFRNDEYYFETLDPATKTIVKSPGNFKQLEGYLSFTYQVRSSNKLRKDKQNQKKNFIGNIKKFNGTSNTAKIYRDFLFYKHCFALEKPLIICEGKTDRIYLQCALKKLASAYPTLIDTTPAVSYLITFLNKTKNFLNVCNLADGTSGLEGIMDRYEKQMGYYHGTGQKHPVIILVDDDKGAKEIKKKIIKKNGKVEPYQKYTDNLYVVFIPRVSSKNTAIEDLFDPSVLATVIDGKTFNKENDIDRDKEYSKQVFAHKVVKANQDSINFDNFRGVFDLFLDVISDYA

SEQ ID NO: 821 - protein, 456 aa, unidentified
  source 1..456: note = Related to DNTK01000207.1; note = Bacteroidales bacterium
MTRLEALHNAKSIYDLSKLLGFKAKSISYFLYHSTEEKYYTFEIPKKNGEFRKIQAPTDKLKKLQSRLATLLSDCFEEIDRNQGYPNSLSHGFRRKHSIISNANLHKNKRYVFNIDLKDFFPTFNFGRVRGFFIKNKHFQLSPKIATIIAQIACFDNGLPQGSPCSPIITNLIAHLIDVRLVNLAKHAKCTYSRYADDITFSTNRKDFPKEIAYKTNANQWVVGNNLNAEITKLGFTINDKKTNMQYRMSRQVATGLIVNEKVNVKREYYKKARACCQLLFEIDDFYLSEGKSGSLNQLDGILNFIYQVKRPHDKENIGPRRFKPNAITKLYREFLSYRHFFSGDKPLIICEGKTDITYLKCALKRLHPDFNQLIEFKDGKTKHKVSFLRFSDRLKDVFAISEGTPGLTALMEMYADLLKRFKGVGLIHPVIIVLDTDSGNKEIRKKLEEKTYEFP

SEQ ID NO: 822 - protein, 594 aa, Geomonas paludis
  source 1..594: note = Related to BLXY01000001.1
MSDLEKLKSCKSLNDLAVVLKYKPSALAYILYKLPDSQKYEEFTIPKKSGGSRKIRAPKERLMALQKRLSEVLNNCYSEVIKNYGNPLSHGFRKDCSIVTNALLHRNRRFVFNIDLKDFFPSINFGRVRGFFIYNKHFSLEPKVATVIAQIVCYDNELPQGSPCSPVVSNLVGHLLDIKLVQLAKLHKCSYSRYADDITFSTNKKDFPEEIAYIAAGGDWEPGPKLTATINKMGFAVNERKVSMQSKTRRQVVTGLVVNKKVNVKKEYYRIARAMCHSLFNNGSFYISTMGNDTTQSGTIDSNNNCTAKQLEGILSYIYMIKGVHDSRTNVEKRNKPASIMKAYRQFLFYKHFYQAEKPVLICEGKTDHIYIRCALKQLHQHYPALIEKTTEGWSWKITFLKMSENFREVLSIAEGTSGLAALMDMYKKNIGIFKDGTGKKHPVVMLIDNDKGAKEIKSKLKKTEDGKGYKPYFTENLYVMTLPQGANGEEIEIEDLFDKDLLETKVAGKSFNKKTKTDTKTEYSKIIFAEKVIKPKQHIINFSNFMPVLNHLNGIILSYQHLKGSAPTEKETEALNVLLPTQTPQPPIYVPGV

SEQ ID NO: 823 - protein, 559 aa, unidentified
  source 1..559: note = Related to NZ_LVJN01000020.1; note = Proposed Magnetofaba australis
MARLLGFRPKALSFLLYKLPDNSKYTTFKIPKKSGGEREINAPDPRLKGLQKRLANLLQNCFEEIYGRERYNHSLSHAFRKDHSIITNARAHKNKRYVFNIDLIDFFPSINFGRVRGYFIKNTDFGLHPNVATVIAQIVCYNNELPQGSPTSPVLSNLIGHILDVRLVILAKKTKCQYSRYADDITFSTREKQFPSTIATQDDAGCWHPSSKLLCIIRKSGFEVNHNKTTMQHHAYRQVTTGLVVNRKVNIKASYYRQARAMCSSLFKTGAFYIGTEVRKGRSASISGKDLGSINVLRGVLSHIYNVKRLNDKRDQKERWGKPTAIHKLYEKFVLFEKFHNLRKPLIFCEGKTDSVYLKCALYSLASEYPDLIQVSNGEVNYAIDFFKHSKSNQDLLQFSGGTGDSRYLIKDYNKKMKPFLCKGKRFPVIILVDSDQGSKKVFSAAKEVIGNNENVTGDEDFYYITQNLYLIALPKINNVSSVAIEDFFEKSVRETKIDGKSLAKSNESDNRKYYSKHIFAEKVIRPNKGKINFERFKGILDRILKVIQDYESRRETKS

SEQ ID NO: 824 - protein, 581 aa, unidentified
  source 1..581: note = Related to CP064988.1; note = Rhodospirillales bacterium
MSVLQKLKDAKSLKELAILLSFKPSRVSYLLYKLDAEKKYSKFQIPKKSGGIREIQAPEPRLKALQKSLADLLYECTLEIESNGKKRPSLSHGFRKHHSIVTNARGHNGRRYVLNVDLEGFFPSINFGRVRGFFIADKSFSLNEKVATVVAQIACFENKLPQGSPCSPVISNLIGHLLDVRLVRLAKAQKCSYSRYADDITFSTNQKNFPPAMAVQDEKNPEKWIAGTTLSKTIENAWFKVNHAKTRLQSRTKRQSVTGVVVNKHVNVEASYYKNVRAMCHSVFAKGEYHKPIVKSGDPSKGAEPSGPEMLKNIAPLEGMLAHIDYVKFGRDSPRSTVENASGKSRPPATRRLYEKFLFFKHFVYLDKPLVLCEGKTDNVYLHAAIRQLKAHHSTFIGGSDQKPEMKIRFFKYSRTSNGILGLNGGSGHLANLIAYYSKNLKDYNFAPLLQPVIVLIDNDDGAPPIFKTIKQNYKVTIDHSSADLFYRICHNLYLVKTPEKATTYKSYIEELFDDTVLQKKLNGKTFTTKKDYDKATQYGKEYFSKYIVRPNEASINFTKFSPLLDRIASAVSHYGAAADK

SEQ ID NO: 825 - protein, 589 aa, Methylobacterium sp.
  source 1..589: note = Related to JAKSYD010000289.1
MFKLQALRDAKKLEDVARLVGFTPKGLSFVLYKLPDSKKYNSFEIAKRGGGKRQIKAPEPSLSLLQRRLATLLTECLEELKKAAPPRRSLAHGFEKGRSIITNAQLHKRRRYVFNVDLADFFPSINFGRVRGFFINDKNFSLQPPVATVLAQIACFENQLPQGSPCSPVISNLIGHVLDGRLARFAKTHKCTYSRYVDDITFSTSRKHFPPEIGTPIAGTAAWQASNELRSRIENAGFKINDKKTRMQYHASRQVATGLVVNEKVNVRQEYFRAARNMCDALFKTGSYFRMVPATLTGGAVGDPPVKNVITSHNQLGGMLAHIYQVKNSTDLRADDVKKAKPTATRSLYFRFLFYKNFVANKTPVIVPEGKTDTVYLRAAIRYSSAYHPRLGELKSGKLETKIRFMNFSKIVHDVMQLGHGTSEQKFLIADYERNLRGYRHAPLAHPVIVLFDNDDGAKSLFGYAKNKRHSKIGLDSTDPFYYLGYNLYLVKTPEFGGGKKSCIEDLFPSGLLKTIIDGKVFDPNKEHEEAGKYGKVVFAKQVVTPNASTIDFSGFAPLLDRIVAVLDHHATLKKAPPAPLAAALVATS

SEQ ID NO: 826 - protein, 524 aa, Gemmobacter nectariphilus
  source 1..524: note = Related to NZ_AUCM01000028.1
MDADHPRSGVLIASRSTRKQENSRFWFASHGFHKGRTIISNAEVHRRRRFVFNLDLEDFFGTINFGRVRGFFIHDTMFSLEPKVATLIAQIACHENALPQGSPCSPVISNLIGNILDSRLLALARDAHCTYTRYADDLTFSTNETLFPTEIAVNVHGADWEVGVKLRKTIEGTGFFINLAKTRMSLRQSRQTVTGLVVNAKANINQDYYRAARAMCNSLFQTGYYFRPGDNPASATDKLGPLDGTLSHIHFVKARRDRHPKVNKLAKAAGEFHPPRAPEELYRKFLFYKYFAAPTAPLIVTEGVSDITYLQCAIRALVKKFPLLAEEVDGKAVRLVHFLKSSGTSRELLNLGHGAAGQGALISRYENMLEDFKHKPMAHPVIILCDNDDGLKSVIKNAKSKISKIVSTTTTDPFYHLGLNLYLVKVPEGAPPVDKDIESLFDPALLATLLDGKKFNPKKEHADHTEYGKVIFAEAVVRANAGTVDFSGFEGLLTRIEDVLRHYAALMTAAAIPAAAAPGAAAAP

SEQ ID NO: 827 - protein, 589 aa, Ruegeria pomeroyi
  source 1..589: note = Related to JAGQAF010000003.1
MSSLEKLQKAKSLTDLAKLLGFTPKGVSYVLYKMDAAKKYRSFDIPKKSGGVRTIHAPEPQLALLQTRLAELLYACVHEKKKTDRRFWFASHGFHQGRTIVSNAEVHRRRRFVFNLDLENFFGTINFGRVRGFFIHDSMFSLEPKVATIIAQIACHDNALPQGSPCSPVISNLIGNILDSRLLALARDARCTYTRYADDLTFSTNEKLFPTEIAVNVHGADWEVGKKLRKEIEKSGFFINPAKTRMSLRRSRQTVTGLVVNEKANINQDYYRAARAMCNSLFQTGFYFKPGDDPADATDNLNPLEGTLSHIYFVKARRDRKPRVNKLARAAGEFNPPRAPEDLYRKFLFYKYFAAPKAPLIVTEGISDITYLQCAIRALVKKFPLLGKEEDGKVIRLVHFLKPTGTSRDILNLGHGAAGQASLISSYTNNLKNYAHKPMANPVIILCDNDDGPKTVFKNAEKKGGTKITTTTIDPFYYLGENLYLVKVPEGATPHPREIEELFQPALLATKLNGKSFDPKKDHGDDTHYGKVAFAESVVRANASTVDFSGFEKLLERIEAVLKHYAALLAAPAAPAAAPAAPAAGTATP

SEQ ID NO: 828 - protein, 585 aa, Rhizobium leguminosarum
  source 1..585: note = Related to JAGIOQ010000002.1
MSQLERLKQAKNLTDLAKLLGFTPTGVSFILYKMDPAKKYRSFDIPKKSGGVRTIHAPEAQLALLQSRLADLLYACVRIRKKENARFWCASHGFHQGRTIVSNAEAHRRKRFVFNLDLMDFFGTINFGRVRGFFIHDSMFGLEPSIATLIAQIACHDNALPQGSPCSPVISNLIGNILDARLLALARDARCTYTRYADDLTFSTNEKLFPSEIAVNVHGAEWEVSAKLKKAIEKTGFFINPVKTRMSLRRSRQTVTGLVVNDKVNVSQDYYRAARAICNALFQTGKYHKPGDDLADASDNLNPVEGMLSHIYFVKARRDRLPKVNKLATVAGEFRSPRAPEELYRKFLFYKYFAAPKAPLIVTEGVSDITYLQCAIRALVQKFPLLAKEENGKVVRLVHFLKSSGTSRDILNLGHGAAGQGALISQYENALKKYPHKPMSNPVIILCDNDDGLKSVIKNAKSKIGKIVSTTTTDSFYHLGLNLYLVKVPEGVPPADKDIESLFDPALLTTLLDGKSFNPKKEHADHTEYGKVVFAEAVVRSNAGAVDFSGFEGLLTRVEDVLKHYAALSAATVAAPAAGAASAAN

SEQ ID NO: 829 - protein, 411 aa, Acidithiobacillus caldus
  source 1..411: note = Related to NZ_LZYE01000077.1
MSSLTQLQRAKDLADLAKLLGFTPKGVSFVLYKMGETKKYRSFEIPKKSGGFRIIHAPEPQLALLQRRLAKFLYDCVQERKKKYPRFWFASHGFHQGRTIVSNAEVHKRRRFVFNIDLENFFGMINFGRVRGFFLHDSMFVLEPKIATIIAQIACHENVLPQGSPCSPVISNLIGNILDSRLLALARDARCTYTRYADDLTFSTNEKFFPTEIAVNVHGADWQVASKLKKTIEKTGFLINPAKTRMSLRRSRQTVTGLVVNDKVNINQDYYRTARAMCHNLFHTGLYFKPGHGPADATDNLNPLEGTLSHIYFIKKRRDRCQRVNKLAENAREFYPPKAPEALYRKFLFYKYFAAPAAPLLITEGVSDIIYLQCAIRALAQKFPLLGKEEAGKVKSLVRFLRPSSTSRDVL

SEQ ID NO: 830 - protein, 590 aa, Paracoccus luteus
  source 1..590: note = Related to NZ_SDEA01000026.1
MSSLENLRKAKSLTDLAKLLGFTPKGVSYVLYKIDAAEKYRSFEIPKKSGGTRVIHAPEPQLALLQSRLAEMLYACVQERQKVNRRFWFASHGFHQGRTIISNAEVHKRRRFVFNLDLEDFFGTINFGRVRGFFINDQMFSLEPKVATIIAQIACHDNALPQGSPCSPVISNLIGNILDSRLLALARDAHCTYTRYADDLTFSTNEKLFPTEVAVNLHGAEWQVGVKLKKAIEKTGFSINPTKTRMSFRRSRQTVTGLVVNDKANINQDYYRAARAMCHSLFRTGCYFKPGDDAANPTDNLNPLEGALSHIYFVKSRRDRKPKVNKVAKAAGEFNPPRAPENLYRKFLFYKYFAAPTAPIIVTEGISDITYLQCAIRALGKKFPLLAKEQGGKITRQVHFLKPSGTSREILNLGHGAAGQASLVSSYTSNLKHYTHKPMANPVIILCDNDDGPKTVFKNAKTKAGVAISTTTADPFYYLGDNLYLVKVPEKLAAIPREIEDLFQPALLGTTLNGKTFDPKKDHGDAKHYGKVAFAESVVRPNAGTVDFSGFEDLLTRIEDVLKHYAGLSAASAMTTLNTSAVAAGTSAAP

SEQ ID NO: 831 - protein, 574 aa, Labrenzia sp.
  source 1..574: note = Related to JAGHRJ010000002.1
MSRLQSLQQAENLDDLAKLLGFSPTGLSYVLYRIPEDKKYRVFDVPKKGGGVRIIKAPNDRLGLLQLRLAELLSDCGEEIRKKKQNHWHSSHGFRKGRNIISNADAHRRRRFVFNLDLEDFFGTINFGRVRGLFIADKAMALRPNIATLIAKIACHDNALPQGSPCSPVISNFVGNILDSRMLALARDGRCTYTRYADDLTFSTNEKIFPKEIAVNLFGADWGIGERLRKEVEGAGFQINHGKTRMFLRQSRQTVTGLVVNAKTNINQDYYRTVRAMCHSVFKSGTYHRETPAGAKTTTNLAPLEGMLSHIYFVKARRDRTYKNNSAARDAGEFRPPEAPVRLYDKFLFYRRFVALPAPLIVPEGKTDNVYVHSAIRNLVSSFPRLGTMSGTKFECLVDFLKPTPITKDVMNIGHGASGQNALISKYAKQVKRYPHKPLDHPVIILCDNDDGPRAVFSSAGRLAGKTITKQTTDPFYYLGDNLYLVKVPEGTPATDRDMEDLFDPVLLAQKVGGKPFDKKKEHGDGTAYGKEIFANQIVRPNWQTVNFENFRELLERIDQCITDYSSRKPAGSP

SEQ ID NO: 832 - protein, 577 aa, Rhizobium leguminosarum
  source 1..577: note = Related to NZ_JAAXDY010000025.1
MKRLKAAKSLDDLALMLGFTPKGLAYILYVMADAAKYSTFEIPKKTGGSRTISAPIPHLKLLQGRLADLLTKCVTEISKEKKNYWRASHGFQPGKTVVSNAEVHKLRRFVFNLDLSDFFGTINFGRVRGFFIRDKTFELDPAVATVIAQIACHDNALPQGSPCSPVISNLIGNILDVRLLALARDCGCTYTRYADDMTFSTNEVLFPTEIAVNILGAEWTIGKRLDGEIKRAGFAVNPAKTRMSLRRSRQTVTGLVVNAKANINIDYYRTARSMCHSLFKTGQYFRRDGEQIESLGPLEGILSHIYFVKTRRDRGARINKLAKEANEFRPPEAAVALYRKFLAYKYFVNPAAPVIVTEGISDITYIKCAIRSLGKDFPLLEESKDGTSKRLVNFLRSTPTTRDVLNLGNGTAGQASLVSQYAKTVAAFPSRPMKHPVIILCDNDDGPKNVFKNAKTKAHVEISHTTTEQFYYLGENLYLVKVPEGVPPEMREIEKLFTAELLATQIDGKSFDMKKDHGNENAYGKVVFAEKIVRLQWKTTDFSGFAPLLSRLEACITHYQALTSAQVETEAVAATAA

SEQ ID NO: 833 - protein, 583 aa, unidentified
  source 1..583: note = Related to JAHJTN010000036.1; note = Bacteroidetes bacterium
MDTLERLQGAKNLTDFAKLLGFTPKGMSYVLYQLPNDTKYRTFEIPKKAGGTRTIRAPEHRLALLQTRLGEMLDECVGELKQRNRKFWRASHGFQKGRTIVSNAEVHRRRRFVFNVDLEDFFGTINFGRVRGFFINDKSFSLHPSIATLIAQIACHENVLPQGSPCSPVISNLIGNILDARLLALARDEHCTYTRYADDLTFSSNEGLFPTRIAVNVHGAEWKVGRKLRQEIEGAGFKLNETKTRMSLRCSRQTVTGLVVNAKPNIKQDYYRGVRSMCHSLFRNGEYHRRVAEREDTTNALTPLEGMLSHIYFVKARRDRAYKVNKLAIEAAEFRPPRAPVELYRKFLKYKHFVAPPAPLIVTEGISDITYLECAIRALAASFPVLAKNDGGKIVRLVNFLRPSGTARDILNLGHGASGQAALIGQYRNMLKEYRHMPMVHPVIVLCDNDDGPKEVFKSAAKRSGLTISTTTTRPFYHLGDNLYLVKVPEGALPQSKEIEELFQPALLATKVDNKPFDPKKDHGDEAAYGKVIFAEKVVRPHWASIDFSNFTELLSRIEQCLTHYAAVKSATTAAPAAAASSP

SEQ ID NO: 834 - protein, 590 aa, Ciceribacter sp.
  source 1..590: note = Related to JAGRRC010000006.1
MTGIDLLKQAKSLTDIAKLVGFTPAGLSYILYRMPESAKYRAFEIPKRSGGTRTIKAPMRELALLQSRLNTFLGQCAEELARDNPRFWAAAHGFRKGRTIVTNANAHRSRRYVFNVDIANFFDSINFGRVRGVFIKDRAFNLEPTVATIIAQIACFENALPQGSPCSPIISNFVAGILDARLLRLAKHARCTYTRYADDLTFSTNERLFPTEIARELAGPDWCVGPRLSEVVEASGFQLNPGKTRMSLRRSRQTVTGLVVNEKPNIKQKYYRDTRSMCSSLFSSGKWHHGTGVDEQQTSNLRPLEGRLAHIYYVKARHDRSQKQNKHAEYVPPTAPVELYRKFLFYKHFVANDLPTVVTEGVSDITYLKCAIRSLSAKFPSLIGMSRGKLKVDLQFLNPTGTSRSVLNLGHGASGQASLIQQYSNRLKNYKNRPLAMPVIILCDNDDGPKEVFKNASGKTGKTISKSTTDPFYYLGDNLYLVKVPENGTQSRDMEDMFPASVLDELLENKPFNKKKEHGDGTAYGKVIFAEKVVRPKTGTSIFNDFEDLLTRIIACIAHYAAIRATKAAASSPAPALSVPTAAAVAAPTT

SEQ ID NO: 835 - protein, 589 aa, unidentified
  source 1..589: note = Related to JAIERP010000170.1; note = Mycobacteriaceae bacterium
MSKLERLKKTKNLSDLAKLLGFTPKGLSYVIYQIPDTKKYKVFDIPKKTGGIRTIKAPVDQLSLLQSRLAELLTECVEELIKDNPRYWTASHGFRKSRTIVSNADAHRKRRYVFNVDLADFFGTINFGRVRGYFIKDNSFGLDPAVATVIAQIACHENALPQGSSCSPVISNLVANILDARLLRLAKAAGCTFTRYADDLTFSTNKSIFPSEIAKELAGANWEVGKQLQDLIERSGYTLNIAKTRMSLRQSRQTVTGLVVNEKPNISKDYYRCVRAMCHSVFTTGSWYRPVQAAGAVPVPTASLRPVEGMLSHIYFVKARRDRSQRMNKDAGFITPKTSTRLYKEFLFYKHFVASPSPMIVTEGISDITYIKCAIRALAAKFPLLASVKGGNVTPEVAFLNPTGTSRSVLNLGHGASGQGNLVDQYASSLKCYRHLPLTSPVIILCDNDDGPKEVFSKAQKKSGVPISLTTTSSFYHLGQNLYLVKVPEGVPSAKRDIEDLFPAALLGQLVDGKPFDKKKAHGDHTAYGKVIFAEKVVRPNAAKIDFTAFEELLERIEGCIKHYAAIVAAKALAATASAPAAKTSATGP

SEQ ID NO: 836 - protein, 584 aa, Denitrobaculum tricleocarpae
  source 1..584: note = Related to NZ_ML660062.1
MSELNKLKAAKNLSDVAQLLGFSPKGLAYVLYKQKPEQKYKHFEIPKKTGGTRSICAPTSQLALLQERLGEHLYQSVLELKKKEPYLWAASHGFHKGRTIVSNAQVHRRRRFVFNVDIEDFFGAINFGRVRGYFIKDRAFELDPKVATIIAQIACHENALPQGSPCSPIISNLIGNILDLRLIALAKNAKCTYTRYADDLTFSTNLKRFPSKIAISVEQGKWVAGDRLVTEIGRAGFNLNSVKTRMSHRQSRQTVTGLIVNKKVNIRQEYYRTVRVMCNSVFQTGVYYRPIKDEETEPIFLNNLNPLEGMLSHIYFVKARRDRQPGVNKLAKFANELVVPEAPTQLYRKFLCYKHFVALASPLIVTEGVSDITYLKCAIKSLSNQFPNLVENNNGMRQVAIKFLKPTGISRDILNLAHGATGQASLISNYANQLKKYTHKPIDHPVIILCDNDDGPKTVFKNARSKTGKDVSKTTIDSFYHLVENLYLVKVPEGDPPGIRELEDLFPNEWFDVKINGKPFNRKKDHGDTTAYGKVIFAESVVRPNTHKIDFAGFVPLLSRIEGCIAHYKSRKLAEMTTTAASGL

SEQ ID NO: 837 - protein, 580 aa, unidentified
  source 1..580: note = Related to JACKJA010000002.1; note = Rhodospirillales bacterium
MSTLERLKNAKDLSGLATILGFTPKGVSYVLYKLKPDEKYRTFKIPKKTGGERTIQAPEPRLALMQKRLAEHLYECVAEIQHEYPHYWRASHGFQKRKTIVGNAAVHTRRRYVFNVDIEDFFGSINFGRVRGFFISDKTFALEPAVATVIAQIACHENALPQGSPCSPIISNHIGNILDLRLLALARDAHCTYTRYADDLTFSTNLKEFPDEIAVDPGTGRWEEGHRLRKVIEDSGFRLNPIKTRMTLRQSRQSVTGLVVNAKPNIDQDYYRRVRAMCNSLFGTGQYHRVVGGKDEVTSNLNPLEGMLSYVYFVKARRDRSLRVNKRSKNEGEFNPPRAPIELYRKFLFYKHFVSPPLPLIVTEGVSDIVYIECAIRALAKSFPRLAKEEDGKIKRQVNFLRPSDTTRDVLTLGHGASGQANLIGQYTSSLKKYAHQPMAHPVIVLCDNDDGPKKVFKNAKDKCDMAISTSTIDPFYYLGDNLYLVKVPEGAAAHPREIEELFKPEILAYKIGGKPFDRKKEHGDETAYGKVKFAEEVVKPNASTIDFSDFSELLSRIDQCLAHYGTVVAASPVAAAAAS

SEQ ID NO: 838 - protein, 568 aa, Haliangium ochraceum
  source 1..568: note = Related to NC_013440.1
MSYLDRLKSAKNLSDIARLLGFTPKGLSYVLYKTGDTSNYREFFIPKKTGGTRKILAPERRLALLQSRLGDLLYGCVEELKRKDPYFWHSSNGFQKGRSTISNAKAHSRRRYVFNVDLEDFFGTINFGRVRGFFIHDRNFRIEPPAATIIAQIACHKNSLPQGSPCSPVISNMIGNILDVRLLALARNTHCTYTRYADDLTFSTNERVFPNEIAVTLEGKGWELGNKLREEIERAGFRVNDKKTRMSLRDSRQTVTGLVVNAKPNINQDYYRSARAMCNALFQTGKYHGADKQETANLNSLEGMLSYIYHVKIRRDRTHRINKLARQANEFRAPSAPIELYRRFLFYKYFIASSLPTIVTEGVSDITYIRCAIQSLTPSFPLLAEKVDKKIRLSVRFLKPSGTTRDVLNLGHGTSGQVKLISEYKNNLNHYKHKPMAHPVIILCDNDKGASNIFKEAARKSGTAIHLESEENFYHISNNLYLIKVPEGEPPAERAIEDLFMPELLAQTLDGKPFDRKKEHGDKAAFGKVMFAEYVVRPNRTSINFSKFSQLLSRIEACIKHDSAQRTS

SEQ ID NO: 839 - protein, 544 aa, Bosea sp.
  source 1..544: note = Related to NZ_MZXU01000017.1
MKTITRLKGADKLDELAKLLSFTPRGLSFVVYKIDTMNKYRVFEIAKKSGGTRTIHAPEKQLALLQTRLANLLYSCVAELQQEKPKLWHASHGFQKQKTTISNANPHRRRRFVFNLDLEDFFGSINFGRVRGFFINDKNFKLNPKIATIIAQIACHRNALPQGSPCSPVISNLIGNILDLRLIALARETKCTYTRYADDLTFSTNEMLFPTEIATNPQGSTWEVGIKLHKEIEQTGFKINPRKTRMSLRRSRQTVTGLVVNSKVNIKKDYYRSARAMCNAVFSTGEYHIIDKDKNISDLRSLEGILSHIFFVKARRDRAPKTNKMAIEANEFKLPSAPVELYRKFLFYRLFVAPKAPLVVTEGISDITYIQCAIRALAKSFPALALEKDGKHTRLLSFLNPSGTTRDVLNLGHGASGQASLIMQYFGNLKKYKHKPLDHPVIILCDNDDGPKTVFKNAKSKSGLTISTSTTDQFYHLGENLYIVKVPEGNPATIKEIENLFDSKLLTEKLDGKSFDPKKEHGDPTSYGKVVFAEKIVRPNAGEG

SEQ ID NO: 840 - protein, 562 aa, unidentified
  source 1..562: note = Related to PDSV01000021.1; note = Gammaproteobacteria bacterium
MSRFQLLKDATTINDIASLLNYKAKTLSYILYVLSKQDDYYTSFEVPKKNGGVRLIQAPNKKLKQVQTNLSGLLNECVNEIIEKEPKYFYASHGFLADKTIITNANKHKKKRYVFNVDIENFFGSINFGRVMGFFMNDRHFRLDKKVATIIAQIACHENALPQGSPCSPIISNLIGNIIDIRLITLAKKHKCTYTRYADDITFSTNVKQFPTSIAKKRDETWEVGTKLSREIQKLGFNINEKKTRMSFNNSQQMVTGIVVNKKINFSQAYYRELRSQCHNLFKNGSYHVNNEVCSNLNKLQGKLAYLYFIQNNKKNIKIDKNEEANFGSGLNKLYRKFLFYKYFVASEKPVIVTEGATDIGHLKLAIDALDEKDMNLKFFNPSKTGIKLLNLGEGTGGQNKLIFNYRSMMNKLGKNMPAPFSPVILLCDNDEGASDIFKTINNKKNKFSCEISLSTTDPFYKLCHNLYLIKVPESKGAETSIEDLYEETVLDTKLGEKTFNKTNKKLGDNEYGKQYFLDYVVRKNKNSIDFSGFTPLLDRIKLCISNWESQEKSSHNSTNSH

SEQ ID NO: 841 - protein, 570 aa, unidentified
  source 1..570: note = Related to JAFECG010000019.1; note = Proteobacteria bacterium
MSTLQKLKNARTRSDLAKILGVTPSGLTYALFVIPQEAKYHKFQIPKRSGGHREISAPNSHIKLVQRRLASKLYECTKEIENAQPNRKKVTHGFQPGRSIITNADRHKNRRYVFNVDVKDFFDSINFGRVRGFFNKDREFLLDKEICTAIAQIACWENSLPQGSPCSPVISNLIGHILDVKMLKLAKESKCRYTRYADDMTFSTNEREFPSSIAIRDAQDPGKWSVSTKLEGLIKQAGFEINPQKTRMQIVGSRQLATGLVVNKKVNIKEEYCRQTRAMCNHLFKKDAYFLQNTKEGEAPKLIKNLDILEGKLCHIHAVKTRVDLTDQQKKSRKFDPPPGTLRLYKKFLFYKNFFAQERPLIITEGASDIIYLRTAIRHSKKKFPLLFDKTLQIRFLKNSKTVKEVLGLGDGCGGIGKLVATYAKEISAFGRPSAFPIIILIDNDDGSKKSIFKVAKDAAKATLKKDIEISIESNDCWHHLGDNLYLVKVPHGGSKSPKSIEELFPEKWLKFSVDGKIFDPSKKHGDHTSLGKVAFAKKVVETHAGEIDFGGFDSLFSLIEGAIADYRKN

SEQ ID NO: 842 - protein, 523 aa, unidentified
  source 1..523: note = Related to LOEV01000045.1; note = Alphaproteobacteria bacterium BRH_c36
MGLVQRRLATRLYECVLEIEEKQPNRRRVTHGFQKGRSIITNADRHHSRRYVFNIDIQDFFQSINFGRVRGFFQKDSTFALNDEVATTIAQIACWQNGLPQGSPCSPVIANLVGHILDVKLLKLAKQARCRYTRYADDISFSTSERNFPSLIAARADGKPAVWEPSENLASAIRQAGFAINPAKTRMQIRGSRQMATGLMVNEKVNIRPEYYNETRAMCHRLFTTGRYEIPRWPDRQETDQLGALEGRLSHIFAVKARLDLSSKRRKERHVKVPSGTIELCRRFLFYKNFVVNPLPVIITEGPSDVIYLRAALRARGKEFPKLYDARQEQKFLVRFVNHSHFMRENLLGHGVGGLGTLISRYHATLQEYAQEGQTAPVVLLVDNDEESDKAFKAAKKAIKEDGNGAASISVESNDAWHHLIDNLYLVKIPHGGAEQKKRVIEQLLPEEWLKHEVDGKRFDPSKKHGDHSSLGKVFFAKKVVEANADKINFGAFDALFSLLDGALRDFEDKRKQEAGGKVMAAS

SEQ ID NO: 843 - protein, 584 aa, Parvularcula sp.
  source 1..584: note = Related to PAIP01000075.1
MGRLDELKAAKTRSDLAKLLHFTPKGLAYVLYKTPAADKYSIFTIPKKGGGERRIEAPEPRLKLLQTQLAAVLYDCLEEIESETPNRRSISHGYHRGRSIVTNAVPHRRHRYVLNIDLSDFFGTINFGRVRGFFIKDSNFALTDEAATTIAQIACHEGRLPQGSPCSPVISNLIARILDVRLARLAKSTGCTYTRYVDDLTFSTAQRTFPPKLAKKIATSPHKWRLMRSLRDEIKNAGFKINTAKTRMQICGSRQEATGLVINEKINISQPAYRTIRSMTHTLFSTGKYFVPGGELDPSGAPKWISELAPLEGRLAHLYFVKARRDRSEQLNKRENFKTPRAVKELYRRFLFYKYCVAPEAPLIVTEGKTDVMYLKSALKARGALHPQLASEEKGKSKRQIRFLPASYMNNTVLELGSSASQLTKLIESYSNRLKLYRHRPLSAPVIVIADNDDGVDRILKAANKRSELEVKAGTPQCMFHIVDNLYLVKTPHVGEKAKTCIEDLFSDRLKSQKVKGKPFDIKKDHGDETSYGKSRFAEEVVAKLAQAPDFAGFEPLLNAIEGAISDYSSRMMNKERSAALIGT

SEQ ID NO: 844 - protein, 565 aa, Ruegeria atlantica
  source 1..565: note = Related to WVQY01000005.1
MKHLQALRDAKNIQDLANILGYKAKGLSYVLYKYPEDKKYTRFTIPKRSGEPRVISAPCKPLKLLQRRLADYLYICEKEIEEAQPHRKRLSHGFHKGRSIISNADLHRNRRYVLNVDIEDFFGTINFGRVRGFFIKDKNFLLNDKVATILAQIACHANALPQGSPCSPVISNLVGRIMDVRLAQLAKSCYCTYSRYADDLTFSTNKSGFPEQLAIMKADSDGSWGVGKALQNEVERAGFKVNNSKTRLQFRSSRQSVTGLVTNKKVNVSKEFWRNARSMSFQLFSTGKYNCQHKQPNVPTTSLAPLTGVLAHIYQVKSRRDLDETQIEERSFSAPKGHETLYRKFLDFKYFVALDKPVLLTEGPTDIVYLREAIKSRAAKFPSLYSGGEHQLKFLRPTDTVKELLSVGTGFGDLLGLMSEYEERVAKFPYCPLSHPVIMLLDNDDATSALSKMKYLKRKKIVIKTSSTADYYHIAKNLYVVKTPEGSPTNETCIEDCFDAATRGVTIDGKPFDPNKKHGDHSSFGKQVFAERVVKPNSSTIDFTGFDPLLDRITKVVSGYVPPAP

SEQ ID NO: 845 - protein, 584 aa, Mesorhizobium albiziae
  source 1..584: note = Related to NZ_FOSL01000011.1
MSELNNLKAAKTLPQFAHLLKLKSETVSYALYWYRRRSPYSHFTISKKNGGRRHIAAPNSRLKLVQSRLAELLGRIETEMEMKRTTKVRVLSHGFKKGFSIITNANQHRNKRWVFNVDIRDFFPSINFGRVYGFFVKDRNFQLDPKIATIIAQIACYQNRLPQGSPCSPVVSNLITHILDIKLNKLANDLHCTYTRYADDLTFSTNEKEFPEQIARLVRGNDDKWVAGDGLLYLVYRAGFQLNHEKTRMQRRDSRQDTTGLIVNQKLNVRHEYYKQVRAMCHHLFNHGFAFSDPGKVPVSNHTVEGMLSFIYQIRRIRSQNLVVEKEPERNSFFQTDQAGFTELYRRFLNYRSFYGMIKPTIICEGKTDNIYLLAAIRKLAPKFPKLIDPAQKLPLKVQFFNYSHRSALFQGLSGGGDEMYKLIKDFRERMKFFKHVPTQPVIMIIDNDAASTGIFTYVGTVHGTGPVSGLDPFYHVFENLYIVPVPTTAGVKAVIEDLFDPVVKKPISGRTFNSSNKSFDQTKFYGKNEFATKIVAPERATIDFTKFEPLLQAICDVMDHFAATLAAKSIVLPAPVVVAEAAP

SEQ ID NO: 846 - protein, 359 aa, Hoeflea sp.
  source 1..359: note = Related to JAHRFK010000006.1
MSELSNLKATKTLPQFARILDLDGQTVSYALYWYKRRNPYEHFTIPKKNGGVRHIAAPNSRLKVVQSRLAELLGRIESEMELKRTTKARVLSHGFKKGFSIITNANQHRNKRWVFNVDIRDFFPSINFGRVYGFFLKDRNFQLDPKIATIIAQIACYQNELPQGSPCSPVISNLITHILDIKLNKLANELHCTYTRYADDLTFSTNEKEFPERIARLVRGSDDKWVAGDGLSYLIYRAGFQLNHEKTRMQRRDSRQDTTGLIVNQKLNVRHEYYKQVRAMCHHLFNHGFAYSGPSKVPVSNHTLEGMLSFIYQIRRIKKPELLFGACPVGRRFRPEHDRHKFSKCRRIFGSDEIKCQRT

SEQ ID NO: 847 - protein, 582 aa, Mesorhizobium sp.
  source 1..582: note = Related to JAIUHW010000003.1
MSELSNLRDVTTLPQLARLLDFPAENLSFALYWHRRRRPYHHFTIAKKNGGRRVIAAPNGKLKFVQGRLADLLGRIESEMELKRTTRSRVLSHGFKKTFSIITNANQHRNRRWVFNADIKDFFPSINFGRVYGFFLKDNNFELHPKIATIIAQIACYQNQLPQGSPCSPVISNLITHILDIKLNRLANDLHCTYTRYADDITFSTNEKEFPERIARLVRGSDDKWVAGDGLLHLLYRAGFQINHDKTRMQRRDSRQDTTGLIVNQKLNVRHEYYKQVRAMCHHLFKEGFAYSEPSRIPVSNHTLEGMLSFIYQIRRLRSLSIVVEDEIERNTFFKRDQPGFTELYGRFLNYRSFYGMIKPTIICEGKTDNIYLLAAIKKLAPKFLKLIDPIQKVPMKVQFFNYSHQSALFQSLSGGGDEMYKLMKEFKERIEFFKHGLSHPVIMVIDNDKASKGIFSYIGTVHGTGPVSGLDPFYYVYENLYVVPVPTTADVTAIIEDLFDPSVKRPINGRTFSDSNKKFDLTKHYGKNEFATTIVAPERDTIDFTKFEPMLQAICDVMDHFAAILAAKPEAAVPPLAATGT

SEQ ID NO: 848 - protein, 579 aa, Rhizobium sp.
  source 1..579: note = Related to NZ_JACIFL010000022.1
MSELSNLKAAKTLPQLARLLNLNGETLSYALYWYRRSAPYTYFTVAKKSGGRRAIAAPNSRLKLVQSRLGQLLARIETDMELKRTTKSRVLSHGFKAGFSIVTNAKHHRNKRWVFNVDLKEFFPSINFGRVYGFFLKDRNFELDPKIATIIAQIACHDNKLPQGSPCSPVISNLIAHILDIKLNKLANDLHCTYTRYADDLTFSTNEKHFPEAIARLVRGSDDKWVAGDGLLNLIYRAGFQLNHEKTRMQHRDSRQDATGLVVNQKVNVRHEYYKQARAMCHHLFTNGYAYSRTEFAPVSNDAVEGMMNFIYQIRAVRSPDFTATDPRGFFKSDQPGFSELYGRLLNYCSFYGMLRPTIICEGKTDNIYLLAAIKQLAAKFPQLIDPAQKVPMKVQFFNYSERTALFQGLSGGGDEMYKLMKEFRERMRFFKHGPSKPVIMVVDNDDASKGIFSYIGTVMGTGPVSGLDPFYYVFENLYVVPVPKVAGTSAIIEDLFDAAVKKPINGRIFNSSNKKFDLTKYYGKNELATKIVAPERSSIDFTKFEPMLQSFADIIMDYGARLAAKPAMVPVKNAVAGP

SEQ ID NO: 849 - protein, 571 aa, Agrobacterium vitis
  source 1..571: note = Related to NZ_WPHT01000004.1
MSDLTALRNARNLPQLARLLKLKGEYVSHSLYWYQQQKPYSHFTIPKKGGGKRSIEAPNSRLKLLQRRLAELLMRIEAEMEGQRTTKARVLAHGFKPNFSIMTNAALHRNKRWVFNMDLKDFFHTINFGRVYGFLLKNRNFALAPKTAAVISQIACYRNHLPQGSPCSPVISNFIAHVLDIKLNKLANKLRCTYTRYADDITFSTNEKEFPEDIARLVRGSDDKWVVGDKVLREVYRAGFKINHDKTRMQRRDSRQDTTGLIVNQKLNVRHEYYKQARAMCHHLFVHGYAHSGTDRGSVPIKNEVVEGMLGFIHQIRSLKNAEFFKADQPGFSSLYGKFLDYQSFYGILRPRIIGEGKTDNIYIKSAIKSLAAKFPALVDATEPLTTAVDFFRYNKRSSIFQDLSGGTGEMNKLLASYRHRMASFKHIARHPVIMVVDNDSGSASLFNYVSKVLGTPIGGLDPYYHVFENLYLVPIPKTSGHVAIEDLFDAALLAETIDSRTFERRNNKFDSTKFYGKNEFATKIVAPKRATIDFSKFEPLLQAFVDIMADYEKRHAAAIVAARPPVVAAA

SEQ ID NO: 850 - protein, 571 aa, Agrobacterium rhizogenes
  source 1..571: note = Related to JAAMEU010000005.1
MSDLSALRNATTLPRLARLLKLKGEYLSHSLYWYRQSNPYATFSILKKGGGRRLIEAPNSRLKLVQSRLADLLMRIEAEMENKRTTKARVLAHGFKPGYSIMTNAALHRNKRWVFNIDLKDFFHSINFGRVYGFLLKDRNFELAPKTAAVIAQIACHNNRLPQGSPCSPVISNLIAHVLDLKLNKLANAHRCTYTRYADDITFSTNEKEFPEAVARLIRGSEDKWVAGDKILREVYRAGFKINHDKSRMQRRDSRQDTTGLIVNQKLNVRHEYYKQVRAMCHHLFVHGYAHSGLGAGRDPVKNESVDGMLGFIHQVRSLKNAGFFKTDQPGFSSLYGKFLDYQAFYGILRPRIIGEGKTDNIYIRSAIKRLAGKFPSLIEPSSPLAEAVDFFHYNTRSALFQDLSGGTDEMHKLLSSYRARTSSFKHIARHPVIMVVDNDAASAKIFAHLSNILGTAVGGMDPFYHVYENLYLAPIPKTTGHVAVEDLFDATVLAQTINGRTFNPSNKKFDQSVYYGKNEFATKIVAPQRATIDFTKFEPLLAAFVDIMADYEKRYAGALAALKGGIAAAA

SEQ ID NO: 851 - protein, 571 aa, Pseudochrobactrum sp.
  source 1..571: note = Related to NZ_ANNO01000019.1
MSDLSALRNTKNLPQLARLLKLKGEFVSHTLYWYRPNTPYSCFTIPKKNGGRRLIEAPNSRLKLLQSRLANLLMRIESEMEGKRTTKARVLAHGFKPGFSIITNAALHRNKRWVFNIDLKDFFHSINFGRVYGFLIKDRNFELAPKTAAIIAQIACHKNHLPQGSPCSPVISNLITHLLDIKLNKLANKLHCTYTRYADDITFSTNEKEFPAAIARLVRGSHDKWVAGDAVLREVYRAGFKVNHDKSRMQRRDSRQDTTGLIVNQKLNVRHEYYRQARAMCHHLFVHGYAYNGADTRNNPIKNETLDGMLGFIHQVRSLKNAEFFKEDQPGFSSLYGKFLDYQAFYGILRPRIIGEGKTDNIYIRSAIKSLAAKFPSLVNPSIPATAALDFFHYNTRSALFQGLSGGTDEMHKLLSSYRSRISSFKHIARHPVIMVVDNDAASTKIFAHLSNILGYPVNGMEPFYHVYENLYLAPVPKTTGHVAIEDLFDASVRAQQIDGRSFNPSNKKFDLSIYYGKNEFATKVVSPHRATIDFSQFEPLLTAFVEIIADYNKRYAAILGAAKGDVLSAA

SEQ ID NO: 852 - protein, 572 aa, Mesorhizobium sp.
  source 1..572: note = Related to NZ_AP023262.1
MSELSELKSATTLPQLARLLKLKGETVSYALYWYRRANPYDYFEIPKKNGGRRLIAAPNSRLKLVQTRLAGLLGRIEAELEGKRATKARVVSHGFKTGFSIVTNAAHHRNRRWVFNADLQDFFPSINFGRVYGFFIKDRNFQLDPKIATIIAQIACHNNKLPQGSPCSPVISNLIAHILDIQLNKMASKHHCTYTRYADDLTFSTNEKEFPEAVARLVRGSRDKWTAGDGILRLVYRAGFKVNHEKSRMQKRDSRQDTTGLIVNQKLNVRHEYYKQSRAMCRHLFQHGWAHTGTKRGERPVSNDSLDGMLSFIYQIRRIKNDAFFTDDQPGFSKLFGYFLDYQSFYGIVRPRIICEGKTDNIYLRAAIKSLHLKFPRLVDATPKFSLLVDFFHYNSRTARFQDLSGGGDEMNKLLSSYRQRMKPFKHGASQPVIMVVDNDSGSTKIFNHLTNILGKPIDGSDPFYYVYENLYVVPIRKVAGASTAIEDLFDGSVLAEKIGVREFNRSNKKFDQTKFYGKNEFATEIIAPKRATIDFSRFEPLQKACCDVVDHYQVLSKAAPIPTPVQVAALP

SEQ ID NO: 853 - protein, 580 aa, Aurantimonas coralicida
  source 1..580: note = Related to JAJGNB010000034.1
MANEYPQATSPISELAQLRSVNTLTHLAHLMGLEGWTLSHALYQQGQKRGYTYFSIPKKRGGFRQIAAPNSRLKMVQSKLAGLLSRIEAEMEGKRARQQCILSHGFKPGYSIITNAAQHRNKRYVFNADLKEFFPSINFGRVRGFFIHDKNFQLNHKIATIIAQIACHNNQLPQGSPCSPVISNLIAHMLDVKLNKVARRSRCTYTRYADDLTFSTNEKEFPTEIARLVRGAHDKWVPGNSVVRSVYKAGFTLNELKTRMQYRDSRQDATGLIVNEKLNVPHEYYKLARARCRHLFRNGYAYDQHSGTEISDEAVEGMMSYIYQIRRARTEDFWKEQSGFAKLYKQLLDHRSFWGITKPRIVCEGKTDNIYLRAALQSLAAKFPELYEAGAEPQDRLKVCFFNHTKRAEIFQIGSGGSELAKLVGAYKSRTKSFEAGMPPHPVIVVADNDSGSTGLFSAMSKILGTSVGGENLRYYLGDNLYVVPIPKKNGHTAIEDLFDNQVLDEKIDGRSFDRKGKQADKTKWYGKNEFATKIVHAKRHELDFAGFEAVLTAFSEVIVDYERKKKEIAGAKAALKVAA

SEQ ID NO: 854 - protein, 574 aa, Mesorhizobium sp.
  source 1..574: note = Related to NZ_VFVY01000001.1
MSELEKLKSCSTLPQLAHLLGIKGETLSSVLYWLKPSQKYVHFTVPKKNGTRRLIAAPTDRLKYVQGQLAELLSKIEAELEGRRTTKYCVLSHGFKKGFSIVTNADVHRNRRHVFNADLRDFFPSINFGRVYGFFQKDRNFHLSPKIATIIAQIACHDNQLPQGSPCSPVISNLIAHVLDIKLNKIASAGRCSYTRYADDLTFSTNEREFPASIARLVRGSHDKWVAGDLLLERVYRSGFSLNEAKTRMQHRDSRQDATGLIVNQKLNVPNEYYKLARSMCHQLFTDGYCYVGPDRAYVPDAKLEGMLAFIYQIRKIKIENFKADQAGFSKLYGRFLDYRSFYGLAQPRIICEGKTDNVYIRSALKALAVKYPSLIDPGKKPPLKVDLFNYTKRAATFQDLSGGSDELKKLINNYATRTARFKHGAPHPVLVIVDNDAGSVGIFQMLTKLLGKPIGGLDPFYHVIENLYVVPIPKVATPVAIEDLFDPALLARKIDGKDFDRTGKEKDGSKWYGKNEFATKIVAPERGTIKFDGFEPLLNAVVDAIQHYEGVKAAAAAKAAALKAAKPAVVAIP

SEQ ID NO: 855 - protein, 567 aa, Bradyrhizobium sp.
  source 1..567: note = Related to NWTG01000019.1
MTKLSQLRGAKTLPQLARVIGVQPHGLSYALYWLTEDQKYESFTIPKRGGGRRIITAPKNYLKVIQTKLAKLLLDIHIELEGSRSKSQCRLSHGFKRGYSIVTNAAAHRNKRYVFNADLKDFFPSINFGRVLGFLTRDRNFALEPKVATIIAQIACHNNQLPQGSPCSPVISNLIAHVLDIHLNRIARNANCTYTRYVDDLTFSTNEKEFPPSIARLVSGNTSAWVPGDSLIRYVYRSGFKLNHDKTRMQRRDSRQDATGLIVNKKVNVRNEYYKAARAKCHHLFQHGFCYSDHDKTALSDAALEGTMSFIYHIRRLKTVDWKLEQKSFYQLYRQFLDYRAFYGLTRPRIICEGKTDNIYLRCAIGALSAKFPQFIHPDPKAGLNIDFFYYTDTSATFQDLSGGTGELNKLLGSYRARASSFKHGPTQPVFMVVDNDSGSNGLFRHLAGILGKPVGGMDPFYHVFDNLYVVPIPKAGVAAAIEDLFEAVLLTRTINGRAFDRTGKQKDLSKWYSKFDFATQIVKPERAKINFAGFEPLLQAISDARKDFASRVSAGAAAAAVKAAAA

SEQ ID NO: 856 - protein, 564 aa, Bradyrhizobium sp.
  source 1..564: note = Related to JAGKJI010000032.1
MTKLSQLRGARTLPQLARVLGVKPASLSFVLYWLADDQKYETFTIPKKGGGRRLITAPKPRLKMIQTKLADLLLDIHVELESARSRVQCQLAHGFKPDFSIVTNATAHRNKRYVFNADLKDFFPSINFGRVLGFFTKDHNFSLEPKVATVIAQIACHNNQLPQGSPCSPVISNLIAHVLDIHLSKVARAGRCTYTRYVDDLTFSTNEKEFPASVARLVSGRSDAWVPGDSLVKHVYRSGFKLNYDKTRMQRRGSRQDATGLIVNKKVNVRNEYYKIARAKCHHLFLNGFSYSDKDKKAISDNALEGTMSFIYHIRRLKTVDWQREQQSFYKLYRQFLDYRAFHGLLRPRIICEGKTDNIYIRSAIKALGAKFPEFIHSDPSKGLTVDFFNYTEAAVIFQDLSGGTGELKKLLTSYRPRLSSFKHAAPQPVIMIVDNDKGSTGLFHQLAHIIGKPVGGVDPFYHVLDNLYVVPVPKTGTEAAIEDLFDSALLKKTIKGRSFDRTGKAKDFTKWYSKVDFATQIVKPERSTIDFSGFEPLLKAILDVRKDFSLRPPVATAVARAAE

SEQ ID NO: 857 - protein, 572 aa, Bradyrhizobium sp.
  source 1..572: note = Related to NZ_CP086136.1
MTQLARLRGVKTLPQLARVLGVQPASLSFVLYWLPDQQKYEQFTIPKKGGGWRLITAPKPRLKMIQTKLADLLLDIHVELEQSRSRSQCQLAHGFKRGLSIVTNATAHRNKRFVFNADLKDFFPSINFGRVRGFFQWDNNFSLDPKVATIIAQIACRDNQLPQGSPCSPVISNLIAHILDIHLNRLARAGRCTYTRYVDDITFSTNEKEFPSSIARLVRGSTDKWVPGDSLVKRVYSSGYSLNYDKTRMQRRDSRQDTTGLIVNKKVNVRNEYYKTARAKCDHLFKNGFCFSDKDRKPIFDDALDGTMGFIRQIRGLKTKDWQSEQNSFFKLYRQFLDYRAFHGITRPKIICEGKTDNIYLRCAFQRLRARFPAFIHPDPLVGLTVDLFNYTEAAATFQDLSGGTNDLSKLLSHYAARVSPFKLSPDQPVIMIVDNDKGSADLFRKLTKMLGRVVGGLDPFYYVCANLYVVPVPKGITTLEAAIEDLFEPALLARTIKGKNFDRTGKEKDRSKWYSKVEFATEVVKPERATINFSGFEPLLQAISDACKDFTGRRAAPSKPLPSASASAGSP

SEQ ID NO: 858 - protein, 491 aa, Sinorhizobium medicae
  source 1..491: note = Related to RPJW01000006.1
MGRQWLKSYRYLTIANEYPRALPPIVTQSASRLSNVKSLDQLAAVLEEQTKVLSYWLYKAEPSKKYLEYSIPKKNGGWRHITAPKDGLKRIQGKLARLLAEIYNDIEQRRSNGSFDSSRASESVLAHGFKDKYSIITNARVHVGKRYVFNTDLEDFFPSITFGRVRAFFIADNNFRLSPPVATMIAQLACYRNQLPQGAPTSPIISNFIAHILDIKLNKMARAGNCSYTRYADDLTFSTNEARFPSAIARLVAGTTDRWVAGDGLLGRVYASGFRVNHDKSRMQLPKSRQEATGLTVNQNVNVASTYYKLARSMCDHLFTGGTCFETIDGKWVEFPAHKLQGRMDFIYSVRRSRIGISLDHVSKKQHPIAYREREAEFCKRQSSFTKLYRNLLNYQSFHGMEKPVIVGEGITDGLYIRAAIQSTGGLFPKLYDPTGDGEVLVSFYRHSDKKNLSNWGGRFATQAVHHRVYEVDGAVQNKAKAARNSYRRQR

SEQ ID NO: 859 - protein, 570 aa, Agrobacterium rhizogenes
  source 1..570: note = Related to JAAMCX010000003.1
MLEEQTKVLSYWLYKAEPSKKYFEYSIPKRNGGWRQITAPKDGLKRIQGKLARLLAEIYNDLEQRRLNAEFDSSRVSDCVLSHGFKDKYSIITNARVHVGKRYVFNADLEDFFPSITFGRVRAFFIADNNFRLNPSVATMIAQLVCHRNQLPQGAPSSPIISNFIGHMLDIKLNKMAKVGNCSYTRYADDLTFSTNETRFPSAIARLVVGTADRWVAGDGLLARVYASGFRVNHDKTRMQLPKSRQEATGLTVNQNVNVASTYYKRARSMCDHLFTGGTCFEMIDGKWIEFPVSKLQGRMDFIYSVRRSRLRMSLDHVSKKQHAIAYRERETEFCKQQRSFTTLYRNLLNYQSFHGMEKPIIVGEGITDGLYIRAAIKTIGASFPKLYDATGDGGVLVSFYKHSDKRKFYQIGEGASQLKPFITEYTKLMDAFKTRPKQPVILIVDNDDEGQSVLNVAGNRWKKDVKTATPFYHLVSNLYIIPIPAKTGLISTAIEDLFDAAWLAAQDIGGRKFTKDNDFNSATHFGKAELLGQIVRPSRATINWTNFQTLLQGIQGAILDYEVKLAVSP

SEQ ID NO: 860 - protein, 627 aa, Rhizobium smilacinae
  source 1..627: note = Related to NZ_VDMN01000001.1
MVDYAVTVNAEYSTDRYTVKSYRHLTVANEYPRALPPIVTQSVSRLRNVKSLDQLAAVLKEQTKVLSFWLYKAAPHQKYVDYQIPKKNGGWRHITAPKDGLKRIQGKLARLLSEIYNDLEQRRIDPAFDGSHPSSCVLAHGFKDKYSITTNATVHVKKRYVFNADLEDFFPSISFGRVRAFFVADQNFKLDPAIATMIAQLVCFRNQLPQGAPTSPVISNFIGHILDVQLNKLAANGNCSYTRYADDLTFSTNEKAFSPAIARLVSGTTDRWVAGDGLVGRVYASGFRINHDKSRMQLPKSRQDVTGLTVNQAVNVSATYYKLARSMCDHLFTGGTCHEKINGEWHRFPAYKLQGRMDFIYSIRRSRLKVSIDYLPKKQQPVAFREREAEFCKQQKSFTTLYRHLLNYRSFHGMEKPVIVGEGITDGLYISAAIKSLGALFPTLFDAGGDGEVKASFYKHTDKRKFYQIGEGASNLKPFITEYTKIMEPFKTIPRHPVIIVVDNDDEGRAVLSVAGNRWKKDLKTTAAFYHLVSNLYIIKIPFGSSASSSAIEDLFDSAWLSAQDIGGRKFSKDNDFDSATHFGKADLVGQIVRPKRTTIDWAGFVPLLAAIEGAIIDYDSKLNSVP

SEQ ID NO: 861 - protein, 592 aa, Ensifer sp.
  source 1..592: note = Related to JACVAS010000003.1
MPPIVTQSSSRLSNVKSLDQLAAVLGEQTKVLSYWLYKAEPARKYEQYSIPKKSGGWRHISAPRDGLKRIQGKLSRLLAEIYNDREQRRVNGSFDGSRTSPYVLAHGFKDKYSIITNAQMHVGKRFVFNTDLEDFFPSISFGRVRSFFRLDTDFRLDPAVATMIAQLTCFRNQLPQGAPTSPIISNFIGHMLDIKLNKMARKGNCSYTRYADDLTFSTNEESFPPAIARLVAGTTDEWVAGDGLLARVYASGFRVNHDKSRMQVASSRQDATGLTVNRTVNVSATYYKLARAMCDHLFTGGTCHEMKGGKWTVLPPHRLQGRLDFIYSVRRSRLKIPLDHVAKKQFPIEYMKREALFCDQQKAFSTLYKNMMNYMTFHGIEKPMIVGEGITDGLYIRAAIKTVGPAYPKLYHPSGDGEVLVNFYKHTDKRKFYQIGEGAAPLRSFIAEYPKLMGRFKTKPKQPVILIVDNDKEGRDVLKAAGSRWQKDTSVPSPFYHLVSNLYIIPLPKPGATDVCIEDLFDQTWLAAQNIGARKFTKKNDFDSATYFGKADLVGQIVRPQRATIDWSGFVPLLEAVQGAISDYEVKLSLTP

SEQ ID NO: 862 - protein, 600 aa, Mesorhizobium sp.
  source 1..600: note = Related to SADI02000019.1
MAYEYPRALPPITTQSVSRLRNAHSRAQLAAILGEQSKVLSYWLYKADLSTKYTQYSIPKKNGGWRYITAPQNGLKRIQTKLARLLADIYNDIEQRRLNESFDGVTVSECVLSHGFKDSYSIITNAKVHVGKNFVFNSDLENFFPSISFGRVRGFFINDRNFRLHEDVATAIAQIACYQNQLPQGAPCSPIISNFIAHMLDIKLNKMAKKGNCSYTRYADDLTFSTNEKHFPAEIARLVAGTTDRWVAGNGLISRVYASGFRINHDKSRMQLPMSRQETTGLTVNQKVNVPATYYKAARSMCDRLFKEGYCFEIVSGKWVEVPSVKLQGRMDFIHSVRMGRLGISLDHLPKKRFPTAYRDRENIFRGQQKAFSSIYEKLLNYRSFHEMVKPIIVGEGITDGLYINAAIRTIGGLYPRLFDPAGNGTLLVDFYKHSDKRKIYQIGEGAKPLGAFVKDYAKLMEPFKAKPSNPVIVVIDNDKEGREVLTAIGKRWGKTIDGKSSFYHLVSNLYVVPVPATGGVLTSIEDLFDSTWLAAQDISGRKFTKDNDFDSSTHFGKTQFAGQIVRPKRASIKWDGFKPLLQGIQDTILDFELQSSPGT

SEQ ID NO: 863 - protein, 566 aa, Rhizobium sp.
  source 1..566: note = Related to VCHT01000005.1
MSKLDALKQAKSLSDLAYILGEQPKVLSYVLYMIPSTLKYTPFLIPKKSGGTRTIQAPIDRLKRIQRALADLLQDIQEEISTKRKVDKRHAVSHGFKRKLSIITNARNHRNKTYVFNSDLENFFPSINFGRVYGFFVHNETFSLDPKVATVIAQIACHDNSLPQGSPCSPIISDYIGHILDMRLSRLASRHRCTYTRYVDDLSFSTSQPNFPKEIAYQHEGDHKWLAGDALVKNVFKTGFKLNHAKTRVQYKLSRQEATGLIVNRKVGVPTEFYHLTRAMCHSLFNQGFAFVVKDGIAQPVSDAVVRGRLSYIHHVRSMQNTLEKGPSLQGTAPFRLYQRYLNFKSFYGISQPVIIGEGVTDTIYLKAALNQLAGKFPNLIDVGHGTKEHKLTFFKYGKSSRELMGLSGGTGELKNLLGDYRKRISGFKFGGANPVIILVDNDDGAEKFFKTLGSMTKTKVTGTDPFYYVYANLYAVPIPPTGGPVAAIEGLFDPSLLNIPHEGKKLDLTNKETDGTKFYSKHTFAKSVVRPNQDKIDFTGFEPLLLAIEQVIADFAGRLAAGTAP

SEQ ID NO: 864 - protein, 567 aa, Rhizobium lusitanum
  source 1..567: note = Related to CP050308.1
MSKLEALKKAKSLSDLASILGEQPRVLSFILYKIPSNLKYKSFEITKKSGGKRTIHAPVARLKRIQRSLADLLQDIQDEIKIQRKVNDNCVVSHGFKRKLSIITNARNHRNKTYVFNSDLKDFFPSINFGRVYGFFVRNQEFALDPKVATVIAQIACQGNSLPQGSPCSPIISDFIGHILDMRLSRMAARHRCTYTRYVDDLSFSTNKRSFPKAIAYQNEDNSHEWLAGDALLKNVFKSGFKLNNAKTRVQYKSSRQEATGLIVNKKVAVPTEFYHTTRAMCHNLFKDGFAFIVKDGTPKPISDAVLRGRLSYIHHVRSTQNKLENGPPLKTTAPFKLYQQYLNYISFFGSSMPVIIGEGVTDTIYLKAALNQLAAKYPNLITVVDKKKEHKLQFFKYSNSSRELMGLSGGTGELKNLLGEYRKRISGFKFGGTQPVIILVDNDDGAKAFFSTLGSITKTKVSGTDPFYYVYANLYAVPIPPTGNPVTAIEGLFEPALLNTIYDGKKLDLTNKEPDGSKFYSKHTFAKNVVRPNQDKIDFKGFEPLLTAIDHVMADYAARLVAGTAP

SEQ ID NO: 865 - protein, 567 aa, Rhizobium grahamii
  source 1..567: note = Related to NZ_KZ857258.1
MSKLEALKKAQSLSDLACILEEQPKVLSYVLYKIPTNSKYKAFQIPKKSGGTRTIQAPVDRLKRIQKSLASLLQDIHLEIQKKRGVKANCIVSHGFKPKLSIITNARNHRNKTYVFNSDLKDFFPSINFGRVYGFFVKNEDFALDPKVATVIAQLACHGNSLPQGSPCSPIISDLIGHILDMRLSKVATRYRCTYTRYVDDLTFSTNESTFPKAIAYEDKDNQHKWVAGDALLKSVFKSGFKLNDAKTRVQYQSSRQEATGLIVNRKVAVPTEYYHATRAMCHNLFKEGFAFTVKDGVAKPVSDAVLRGRLSYIHHVRSMQNKLENGPSLKLTAPFKLYQQYLNYVSFFGISKPVIIGEGITDTIYLKAALNQLAGKFPSLVEVAGGENVHKLGFFKYGNSSRELMGLSGGTGELKNLLGEYRKRISGFKFGGAHPVIILVDNDDGAKAFFSTLGTITKTKVSGTDAFYYVYANLYAVPIPPTGNSVAAIEGLFDPTLLKTIYDGRQLDLTNKEPDGSKFYSKHIFAKSVVRPNQDKIDFKGFEPLLTAIDQVITDYAARRAARSAP

SEQ ID NO: 866 - protein, 569 aa, Rhizobium mongolense
  source 1..569: note = Related to JACIGM010000003.1
MSFELVALKNAVDLTDVAVLLGVKPKDLSYALYIQPSSAKYRAFEIPKKGGGFRLITAPEPRLRSIQRRLADLLLTIQQELEVQRTKSKGIVAAHGFKKSLSIITNARCHRGKSFVFNGDLKDFFPSMNFGRVYGFFLKNRDFELHPKVATVLAQIACFENRLPQGSPCSPVISNFIAGILDRHLSKLAAENRCTYTRYADDLTFSTNEAIFPEQVARLVRGANDKWVAGYELAGRVARSGFQINELKTRLQYRNSRQDVTGLVVNEKLNVPSEYYKLARAMCHHLFKDGTAFRTIDGIKIPVSDERVRGILSHIHHVRTSQGGPKHPPGDPKAPGHQKLYRRFLDYVSFFGHQQPTIICEGKTDNVYIKTAMQMLAPKFPDLVEVAGNKFDLKVKFFKYGRASAQIQNLGGGSGALKTLLMEYEKRLKGFAGTASQPVIMVLDVDKGTTQIWSEISKILGTAVAGHGPDPFYHVRNNLYVVPIPAKPGVETCIEDLFDAKTLAIPHDGKVFDKESDKDKPGTYSKNTFANQVVRENRHSIDFSGFEPLLEAINAAIKNYSTKVAAMTA

SEQ ID NO: 867 - protein, 560 aa, Rhizobium leguminosarum
  source 1..560: note = Related to SIOG01000001.1
MSPELKLLKAANGLSDVASLLNVRPADLSYALYILPNEVKYRTFQIPKKGGGFRVIAAPESRLRYIQKQLADLLVAIELGLEAGRTQRKFIVSHGFKKKMSIVTNAKNHRNKEFVFNSDLKDFFPSINFGRVIGFFVKNRDFGLKPKVATVLAQIACFNNKLPQGSPCSPVISNLIAGILDRHLSKMAVQHRCTYTRYADDLTFSTNERVFPEAIARRVRGAEDKWVAGHELVGRVARSGFQVNELKTRLQYRSSRQDTTGLVVNEKLNVPAEYYKLTRAMCFHLFRDGTAFAVDDNARMPISDERLRGRLAHLYHIRGLENGHKKYPQKKGPAYVKLYGKFLDYIAFYGHQRPTIICEGKTDNIYIKTAIQMLAPKFPELVDVVGAEYKLKVKFFKYGKASSNLQDLSGGAGQLKTLIMDYGNRLSGFTSGAKNPVIMVLDVDKGTTQIWAELSKILGKSVAGHDPYYHVRDNLYVVPVPVSSGAEGDMEDLFDKKTLELEYDQKKFDKKSDKDMPGTYSKNTFANHVIRDNRATIDFSGFEPLLKSIRDVIADYAAKI

SEQ ID NO: 868 - protein, 575 aa, Enterovirga sp.
  source 1..575: note = Related to NZ_JABEPP010000002.1
MSVESLLLLRLRACTDLSSVARVLGLTPAVLSFVLYKIPTQARYRTFSIAKRAGGSRAIMAPNERLKMVQRRLASVLLQIQTEQERSRTKKACILSHGFKRELSILTNARNHRNKRFVFNLDLEDFFPTFNFGRVRGFFMRDQNFQLHPAAATVLAQIACHNNHLPQGSPCSPVISNLLAHMLDLRLNKIARRHKCTYTRYADDLTFSTNKKDFPEVIGATSPGDPNKWSAGNDLLASVYLSGHKINHSKTRMQYRDSRQETTGLVVNRKINVSVDYYKLVRAMCDRLFASGIAFRQDKNKIEPVSRSHLQGKLAFIYHIRGQETSHRKLQKKDQPGYYRLYSQFLDYCNLYDVDRPTIICEGKTDNVYIRSAIEALSSKVPGLLDSEKKLTVRLFKYTKITSTIQDLAGGTDQLKKLVREYANRTQMFKTTPSHPLILVTDVDKGSTEFFKAVSAILGTTVAGADPFYHLIKNLYVVPVPKIKHPETAIEDLFDDTLLNEKVDGKSFDRTNKEKDGTKFYGKHVFATRVVWPNRSTINFARFEPLLRAFEDVKSHYKTLTSTSVKSPAPIAAAA

SEQ ID NO: 869 - protein, 573 aa, Methylobacterium sp.
  source 1..573: note = Related to NZ_LSKN01000098.1
MPAASPELQRLKKATDLHGVAALLNVKPSRLSYALYYMPPATKYRSFTVPKKRGGTRTISAPHGGLKYIQKQLATLLLSIEKELEGDRRKNSILAHGFKKELSIITNAIRHRNKRWVFNIDLRDFFPSINFGRVRGFFIANNQFALTPKTSTILAQLACHDNVLPQGSPCSPPISNLIARSLDYRLNRLARECNCTYTRYADDITFSTNEPEFPERIAVLAGPHAWQPSEELASRIVSSGFEINPDKTRMQYRDSRQDTTGLIVNRHLNVPVEYWKQTRAMCHRLFVDGQAYRVFDGEKEPISLDSLRGRLNFIYYIRSLTLGKANLEKPKGIPGYRKIFARFLNYNAFWSIEKPVIVCEGKTDGIYLRSAIRSLHAKFPDFFETVDGKVKIRPTFFKYTTNTREVQDLSGGNGQLKNLVAQYAHRTKGFKGTPKAPVIIVTDCDKGAVHLFEEVSKILGRTVAGADPFYYLHTNLYVVPIPKLGLPETAIEDLFDKTLLDTKIDGKTFDKTNHEKDGAKFYSKFTFATKVIAASKVPVDYSGFEPLLQAMLDVEADFAARLATVPPTVLPAH

SEQ ID NO: 870 - protein, 582 aa, Rhizobium laguerreae
  source 1..582: note = Related to JAAXSB010000004.1
MSVSSLDLGRLKRAATLTDLAAVLGVEASTLSFALYIMPVHERYHTFTVPKKRGGERIINAPNERLKFIQKKLADILLRIERDLEAPLREAANNGAKKLPILSHGFKKELSIVTNAHKHKNRRFVFNLDLADFFPSLNFGRVRGFFLHNNHFQLPEKVATLLAQIACFQNELPQGSPCSPPIANLIANILDVRLNALARSCQCSYTRYADDITFSTNNKEFPSHIAAQNSDGHWVPSDKLISRISASGFRINESKTRMQFRDSRQEATGLIVNRKLNVPVEYYKETRALCHYLFHGRVPVLKIEGGSIPVTTSSLRGRLNHIFHIRGIETGHKKPEKSKYPGYFKLYAQFLDYVSFWGIEQPTIICEGKTDNIYLKNAMRALKPTFPHFWKFVDGKEQQTINFFKYTKCSNIIQDLSGGNGQLKNLVHEFEKRTRKFRSLPKAPVIIITDVDKGATDLFKAMKKILGYTVDGDKSWYYLRDNLYIVPVPKGGRAEVAIEDLFDPALLEVELEGKKFDRTNHESDGEKVYSKFTFATKVVAARRDEIDFGRFQPLLQAILDVQADYAQKIAHAVPSPAQATAA

SEQ ID NO: 871 - protein, 577 aa, Mesorhizobium amorphae
  source 1..577: note = Related to NZ_CP015318.1
MTVKSLTLERLKKSTDLTEVAILLGVKPSALSHALYITPTAKKYHTFSIPKKRGGERIITAPNERLKLIQARLAALLLQIEQDLEATQSKSCILAHGFKNELSIITNAAKHRNRRFVFNVDLKDFFPSINFGRVRGFFMANRDFQLSEKAATILAQIACHQNKLPQGSPCSPPISNLIGQILDVHLNKLAKECRCTYTRYADDITFSTNQKKFPEKIAVLQAGSEHTWVPSDELSFRIIRAGFELNKQKTNMQYRDSRQTTTGLIVNQKLNVPVEYYKTVRATCHKLFTTGTAFRKLGSKLIPTTPPKIRGQLSFLFHIKGLETGHRKLPKPEMPNFYKLYAQFLNFMSFWAISQPTLVCEGKTDNIYIRSAIRALSAKFPDLVEKKDGKERIKLTFFKYTGIAKTIQDLSGGNGQLKNLVREYPGRTEKFKVQPAHPVIVVTDVDKGAVDLFKAVSDEVGKTILGHEQPWYFLRDNLYVVPVPKGAGAETAIEDLFDSALLTTEIDGKKFDRTNHEKDGDKFYSKFTFATKVISASKTPIDYGGFEPLLQAILDVQADYAARIAAPPVGTAAAAAS

SEQ ID NO: 872 - protein, 590 aa, Mesorhizobium sp.
  source 1..590: note = Related to VFVE01000003.1
MTVVSLRLELFKKAKDLTDVAKILDLMPAHISFALYKLDRPGFEPKYEEFTVPKKTGGIRTIKAPHRALKAVQKRLAKDLLEIEQALETTRVKKVDCILAHGFKKRLSIMTNGENHRKRRYVFNVDLKDFFPTLNFGRVRGFFMKHKDFQLNKDVATILAQIACHDNHLPQGSPSSPVISNLIAGVLDIRLNELAQQYNCTYTRYADDITFSTSEKLFPSAIGRPEPGSINLWEAGPKLLKAITRAGFELNPVKTRMLLDWSRQEVTGVVVNQKVNVPADYYALAAAMCHHLFMDGACFTTVGGVKKPYPLTKLRGRLAYIYQVRGRGPKPKPAVDDAEDKPKLGKPWASTNLFQKFLDYADLYGIEKPVLLCEGVTDNIYLKAAIQSLAPKYPTLTTAAGELKVKLFKYTRSSAALQQLSGGGGGLGVLAYAYPQRVRKFKSGGKHPLILIGDNDEGSEKLFGAIKAKTGKKVDGSEPWYYLGQNMYVVPIPKVGGIDTPIERLFEPSLLATQYEGKTFNKTNASKDPAKYYDKKVFATQVVAKDKANVNFDGFEPFLDAIVSVINHHKAKVGSIPVPAAAVTIATAAP

SEQ ID NO: 873 - protein, 589 aa, Aminobacter aminovorans
  source 1..589: note = Related to CP015005.1
MTLPLKLSLYRKARDLTDVAKILDLKPAHLSYALYKLDKPGFPPKYKEFTVPKKAGGVRTIMAPHKVLKAVQKRLANDLLEIEQVLEKTRVKKADCILAHGFKKNLSIMTNGENHRKRRYVFNVDLKDFFPSLNFGRVRGFFMKHNDFELDTDVATILAQIACHENQLPQGSPCSPVVSNLIASVLDIRLNELARQHNCTYTRYADDITFSTNEKLFPTAIGRREHGSLNLWEAGSKLVKVIERAGFELNPAKTRMLLDWSRQEVTGVVVNQKVNIPADYYATAAAMCHHLFMDGACFTMVGGVKQPFSLTKLRGRLAYIYQVRGRGPKTKPAADGTEDKPKSGKLWASTDLFQKFVDYADLYGIERPVLLCEGVTDNIYLKAAIQALAPKYPALATAAGELNVKLFKYTKTSAALQHLGGGGGDLGKLANVYAQRTRKFKSGGKYPLILIGDNDEGSEKLFGAVKAKTGKKVDGSDPWYYLGQNMYVVPIPKVGGIDTPIERLFEPKLLATQYEGKTFNKTNASKDPTKFYDKKVFATKVVAKDKANVNFDGFEPLLNAIVSIINHHKAKIAPIPAPAPAVLVAAVGP

SEQ ID NO: 874 - protein, 588 aa, Mesorhizobium sp.
  source 1..588: note = Related to JAIUGR010000007.1
MTVVSLKLELYRKAEDITDLAKILGLKPAHISYALYHLPLGDRYEEFTVPKKTGGVRTIKAPHRTLKAIQKRLAKDLLEIEQALEQSRVKKTNCILAHGFKKKLSIMTNGENHRKRRYVFNVDLKDFFPTINFGRVRGFFMKHNDFELKPAVATVLAQIACHDNELPQGSPCSPVISNLIASVMDIRLNELAHRHNCTYTRYADDITFSSSEKIFAPAIGRRNVSSINLWEAGISLSRVIKKAGFKVNAAKTRMQLDYSRQEVTGVVVNQKVNVPANYYAEAAAMCHHLFMDGECFVKIAGVKQPLPRRKLRGRLAYIYQVRGRGPLIKAAPEDQEERPKGGKLWASSKLFERFVDYVDLYGIERPVVLCEGVTDNIYIKSAIQALAPIYPTLTNPAGELKIKLFKYTKTSAALQQLSGGAGELGKLANTYPSRIRKFKSGGQHPLIIIGDSDDGSKKLFAAVESKTGKKVDGSQTWYHMGANLYVVPIPKIGNKDTDIERLFDVALLKTNYDGKTFDKTNAEKDGTKFYGKKVFATKVVAANKATVNFDGFKPLLATIAEVIDHHKTTVVSPTVAAVSSSAVAAGGP

SEQ ID NO: 875 - protein, 591 aa, Mesorhizobium sp.
  source 1..591: note = Related to CAAF010000028.1
MTVVSLKLEQYRKAEDITDLAKIFDSKPAHISYALYKLDQAPAPSKYTEFTVPKKSGGVRTIKAPHPALKAIQKNLAKDLLEIEQVLEETRVKKPDCILAHGFKKKLSIMTNGENHRKRRYVFNVDLKDFFPTINFGRVRGFFMKHKDFELKPAVATVLAQIACHDNQLPQGSPCSPVISNLIASVLDIRLNELAHQYNCTYTRYADDITFSTSEKNFPTAIGRRYVGSINLWEAGPKLLKAISRAGFELNPAKTRMQLDYSRQEVTGVVVNQKVNIPADYCATVAAMCHHLFMDGECFIQVAGAKQPFPLKKLRGRLAYIYQVRGKGPKVRITPEDAEEKPKTPKPWASTKLFEKFADYADLYGIERPVLLCEGVTDNIYIKAAIQALALKFPSLTNAAGDLKIKLFKYTKTSAALQQLSGGAGELGKLAFTYASRIRKFKSGAKHPLILIGDSDSGSQKLFDAVEKKTGKKVDGSQAWYHLGSNLYVVPIPKVGNKDTPIERLFDQALLDTPYESKKFDKTNAEKDGNKFYGKKVFATKVVAANKGTVNFGGFEPLLTAIAEVIEFHKTKVAPPANSVQAIAPVAAAGP

SEQ ID NO: 876 - protein, 587 aa, Mesorhizobium mediterraneum
  source 1..587: note = Related to NZ_JHQU01000117.1
MNIVSLKLEQYRKATSLIDISHVLALEPAHISFALYKLDKPGFAPKYTEFSVAKKAGGERTIKAPHKALKAVQKRLAQDLLMIEQQLEATRVKRSDCILAHGFKKKLSIMTNGENHRHRRYVFNIDLKDFFPTINFGRVRGFFMKHKSFELQESVATILAQIACHNNQLPQGSPCSPVISNLIASVLDIRLNELAHQYNCTYTRYADDITFSTSEQNFPTAIGRRDVGSVNLWEAGPKLLKTIQRAGFELNPTKTRMQHSYSRQEVTGVVVNQKVNIAADYYDEVAAMCHHLFMDGECFIKISGAKQPFPIKKLRGRLAYIYQVRGKGPKVIQKGEDGESKGTQKFWASFNLFERFLNYADLYAVDRPLVLCEGVTDNIYIKSAIQALAVAYPTLTSPSGELKVKLFKYTKTSTAVQQLGGGSGELLKLITKYHLRTNKFKAGGKHPLIVIVDLDEGSKTIFKEVEKKTGKKIGTQPWFHWDKNLYIVPIPKVGGADTPIERLFPQALLEATYDGKTFDLTNSEKDGSKFFGKKVFATKVVAADKGAINFGGFAPLLAAIVEVIEHHKTKMSLPLAAAAAPVAAAAP

SEQ ID NO: 877 - protein, 591 aa, unidentified
  source 1..591: note = Related to nan
MTTAAALKLDLYRKAEDIRDLAAILGLAPAHISYALFKMPDANKYKVFTVPKKTGGVRTIKAPHKTLKAIQKRLAQDLMGIEAHLEAVRVKKRDCILAHGFKKKLSIMTNGENHRHRRYVFNVDLKDFFPSINFGRVYGFFQKNQSFNLKPKVAAAIAQLACFENQLPQGSPCSPVISNLIAGILDVRLNELAQQYNCSYTRYADDITFSTSEQNFPSAIGQRHPGSINLWEAGPKLLKAIKRAGFELNATKTRMQLSYSRQDVTGIIVNQKVNIPVDYYETVAAMCHHLFMDGACFTKVGGVRHPFPLKRLRGRLAYIYQVRGKGPKPKTVDEAGEPKGGAKFWASTNLFERFLNYADLYGAERPVLLCEGVTDNIYIRSALHALAAKYPTMITPASELKVKLFKYTKTSAAIQQLGGGSGELVKLLREYRKRTAKFKSGAKHPLILIADSDEGSKELFKEVTKRTGHKVDGTHAWYRIMTNLYVVPIPKVGAADTPIERLFEQVVLDKTYDGKKFDMTNSETDGSKFYGKKVFATKVVAANRGAIKFDGFEPLLTAIAEVIEDYKTKVAPVLALIPAAAAPAPPAPVPA

SEQ ID NO: 878 - protein, 595 aa, Mesorhizobium sp.
  source 1..595: note = Related to SAKE01000022.1
MTIVSLKLEQYKKADTLTDVARILDLKPAHISYALYKLSNTSKYDEFTVPKKSGGDRIIRAPHKTLKAVQKRLAKDLLLIEQELEASRVKKRNCILAHGFKKKLSIITNGENHRDQRYVFNVDLKDFFPAINFGRVFGFFTKHKDFAIKRKVAAVLTQIASFENQLPQGSPCSPVISNLIASVMDIRLNELARQNHCTYTRYADDITFSTSEQLFPSPIGRRVNGSINLWEAGPKLVKMIARAGFELNHAKTRMQYYYSRQDVTGVVVNQKVNIASDYYATVAAMCHHLFMDGSCHVKVNGTKQPFSLAKLRGRLAFIHQVRGRGPKLCQVPDEKDEQTKAPPQKVWASFKLFERFLNYADLYGADRPVVLCEGVTDNIYIKSALHNLAAKYPALTSPAGELKIKLFKYTRSSAAVQQLGGGCGDLTKLARMYSARIKGFKSGGKHPVIMVVDSDEGSKDLFKHVQHVTKKKVDGTDSWYFLESNLYVIPIPKIGGADTPIEKLFEQALLDKPYEGKKFDMKLKETDGATHISKKTFASKVVAVNKATINFGGFEPVLNAVVEVIEDYKKRVGSVIPSAPTAAVVALAIIAGGPQ

SEQ ID NO: 879 - protein, 585 aa, Mesorhizobium sp.
  source 1..585: note = Related to RZTV01000003.1
MTVVSLKLEQYRDAEDLSDIAHILDLKPAHISYALYKLPTHQKYREFTVPKKSGGVRTIKAPHNTLKVIQKRLAQDLLLIEQQLEQARVKERDCILAHGFKKKLSIMTNGENHRGRRYVCNVDLQDFFPSINFGRVFGYFSKNNDFALKPKVATVLAQIACHENQLPQGSPCSPVISNLIGRILDIRLNELARRYHCRYTRYADDITFSTSEKHFPIAIGMRELGSINLWAAGPKLLDAIARTGFEINPKKTRMQYHYSRQEVTGVVVNQKVNISADYYATVSAMCDHLFKKGECHIDVGGTKQPFSIRKLRGRLAYIYQVRGKGPKHRQTADDKDDQVKGSQQRLWSSFKLFERFLNYADLYGVDRPVILCEGVTDNIYIKSAIQALAAKYPTLTNAVGDLKVKLFKYTKTSASVQQLGGGSGELLKLVNTYSSRTRKFKIAPKNPLILVADSDDGSKPLFKVIENRTGKKVDGSHAWYHLESNLYVVPIPKVGAADTPIEGLFEQILLDTTYEGKKFDRTNSEKDGTKFYGKKTFATKVVAANKGSINFGRFEPLLTAITEVIEDYKPKIAPSPVPALAPALV

SEQ ID NO: 880 - protein, 584 aa, Bradyrhizobium japonicum
  source 1..584: note = Related to NZ_AJQB01000700.1
MAHLTKLRAASSLNDLAFLLGVKPSSLAYVLYKIPDEKKYTQFPISKKTGGERIISAPDPRLKMIQRRLAKLLAKCQIEVEEKLKVKPQCTLAHGFKSGFSIQTNAANHRGQRWVFNADLHDFFPSINFGRVNGFFVKNQYYSLNSKIALLIAQIACHEKTLPQGSPCSPIISNIIAHLLDIRLNELASANGCTYTRYADDLTFSTNEKTFPTSLAKRDPANLNKWTVGSGLAKRIAKAGFIINSKKTRMQYRDSRQEATGLVVNEKVNVKSDYYKLARSICWQLMKEGKAFTKVNGDSVPLKLKSVRGMIAFIYHVKRWDDERKQVPIDEIEKRAYFRLYAEFLNYMWFFGQSRPTIVCEGKTDNIYIKCAIRSLAQSYPSLVKSSGEKRGLLVQLFGFTKTADQVQKLSGGAPQLNILLRDYRKKTANCKGMPQQPTILVVDNDSGPQSLYSHLGNILKTKVDGSEPFYWAYGNLYVVPVPKIGGAPTAMEELFEQEVLATKLNGRTLDLSNKEADGTKFYSKNEFSIQVVQKKQKSIKFDGFKPLLDNLVAVQKDYASKVEAAKKLSAAKKVAAAPTAAMP

SEQ ID NO: 881 - protein, 583 aa, Bradyrhizobium sp.
  source 1..583: note = Related to JACIHC010000005.1
MTHLAKLKAASSLNDLALLLGVKPSGLAYVLYKIPDENKYTRFTVPKKTGGERTISAPDPRLKMIQRRLAKLLAKCQVEVEEKLKVKPRCTLAHGFKSGFSIQTNAANHRGQRWVFNVDLHDFFPSINFGRVRGFFIKNKYYALNSRVALLIAQIACHEKKLPQGSPVSPIISNIIAHLLDIRLNELASANGCTYTRYADDLTFSTSEKSFPTSLAKRDPANLNKWTVGSGLAKRISKAGFAINSQKTRMQYRDSRQEATGLVINEKVNVRSDYYKLARSICWHLMKEGKAFKKIDGDSKPLSLKSVRGMMAFVYHVKRWDDERKQVSVAEIEKRAYFRLYADFLHYMWFFGQTRPTIVCEGKTDNVYIKCALRSLAQSYPTLVKTAGKKTSFLVQLFGFTKTATQVLKLSGGAPQLNNLLRDYRRNTANCKGMPQQPTMLIVDNDSGSQSLYSHLGRILKTDVDGSEPFYWVYGNLYVVPLPKIGSGPTAIEQLFEKEVLDTELEGRTLDLTNKETDGTKFYSKHEFSIHVVQKKQKSITFDGFRPLLDNMVAVQKDYASRVAAAAKPRTASKVLAAATASP

SEQ ID NO: 882 - protein, 582 aa, Bradyrhizobium diazoefficiens
  source 1..582: note = Related to NZ_AP022641.1
MAHLTKLKSAATLNDVALLLGVQPASLAFILYKIPEHQKYTKFPVPKKSGGERIISAPDPRLKMVQKRLAKLLKNCQLEVEAILKVKSQCVLAHGFKPGLSIQTNAANHRGQRWVLNADLQDFFPSINFGRVYGFFIKNQHYMLNKKVATIISQIACHENTLPQGSPCSPVLSNMIAHMLDIRLNELASSNRCTYTRYADDLTFSTSERVFPSRIAKRDPSSLHKWVAGAGLSKRVEKAGFAINGKKTRLQYRDSRQDATGLVVNEKVNVKSEYYKLARAMCWHLMTKGSAHLKVGSIPVPVDAKKVRGMLAFIYHVKRWDDDRTKVPKEEIEKRAYYRVYADFLNYISFFGQPHMTIVCEGKTDNVYLRCAVRSLAALYPSLIQVKGKKRNFLLQLFKFTKTADAVQHLSGGASQLSNLLSEYRKRIKNCKGTPQHPTVLVVDNDSGPEKLFKHLSSLLKKDVDGSDPFYFVYENLYVVPVPKIGGAFTAMEQLFESHVLKEKLNGRILDLTNKEPDGTKFYSKNEFSVEIIQKKQASIKFDGFKPLLNALVAVQNDYAGKIAAKKAAIPAPAPVPALAAP

SEQ ID NO: 883 - protein, 611 aa, Mesorhizobium amorphae
  source 1..611: note = Related to NZ_JHQS01000008.1
MLGWIAHLRFLQFIDVSSCLGVSASRLPSGVSVTGSTLKTLQAIQNLHGFAAFLGVTPKALGHAIHGIPEVSKYTKFEIAKKSGGKREICAPVPHLKRIQRRLANKLKEIEMSLEGELTTNEHVLSHGFKPNLSIATNARAHRGRRWVFNIDLADFFPSINFGRVYGFFLKNSRYGVSKTVATLIAQIACYENQLPQGSPSSPVISNIVAHILDIRLHELAASLNCTYTRYADDLTFSTNEKGFPGAIAKRSQDEDDVWKIGKKVKSIIKQSGFEINPKKTRMQYRISRQDVTGLVVNEKVNVRAEYSRTARAMCHQLWTKGAAFQKDGKLKLAKTPEQVRGIMNFVYHIKECEEVRQSDGAEFDPSAPLPGYARIYAKLLDYLSFWGTDKPVLLCEGKTDNIYIKCAIENLAASFPTLIESSGGVIEPAVRFFNRSDVKDTKDSLTWKLQKLAGGVTELTSFLGEYRERIKDFKHGGKYPLVIVVDNDQESKGMFSHIKNIIKSAAPVDGSAPFYYIYANLYVVAIPKIGSKDTYIERLFSDKVLKKTLDGKTFDVTGKKNNKTHYFKSDFAKKVIKKNKANIDFKRFKPLLERIAAVKADYATRIKTTP

SEQ ID NO: 884 - protein, 570 aa, Mesorhizobium loti
  source 1..570: note = Related to NZ_KB913026.1
MLLGMKPAALAYILYKLPAGAKYKSFEIEKKSGGVRKIMAPEPRLKMLQRRLADLLLACQSEIEASMKIKDDCALAHGFKPRLSIFTNAEKHRNRRWVFNADIEDFFPTINFGRVYGFFQKNHHFALPKPVATIIAQIACHENQLPQGSPCSPVISNIIAHILDIHLNDLAYRHNCTYTRYADDLTFSTNEKQFPRAIAKRQVGDIHEWIPGSGLKKALKSNGFKLNGSKTRMQYCDSRQEVTGLVTNEKVNVKQQYYKQARAMTRELVTGKKPFVTVAGKKVEVARDHLRGMLNFIYFIKSKENKRIGFTFDKENDKLPTFHAIYKQFLDYIWFYGIDEPTIICEGKTDNIYLKAAIKARAAHFPELVKTVEGVTKIRPRFFKYSDTAAELQDLSGGTGELNNLLAHYRNRITTFRGGANQPVIIIVDNDSGATAIFSHIYNILNPKIKSTGGKKGGATPAAPVDGSEQFYYLYENLYIVPVPKVAGAETPIERLFDPKLLKTVWNGKQLDLTGDKDPAKYYFKNDFAVHVVKEGGAGVKFDDFDPLLSAIVAVKADYAKRVALLAAVA

SEQ ID NO: 885 - protein, 312 aa, Phenylobacterium sp.
  source 1..312: note = Related to JACIZA010000145.1
MNTPLSKIKSCTNRSDLALLLGVKPAALSYILYKIPDENKYYSFSIPKRNGDQRQISAPIPALKMLQRRLSEHLYECLNEIEYLEAVDPQCVVAHGFKKHLSIATNGSHHRSKRWVFNCDIEEFFSSINFGRVKGYFERNRHFQLQPEVALVVAQICCHEGVLPQGAPTSPIISNLIGSILDDRISRLANELRCTYTRYADDLTFSTNMAHFPRQIAVADEKSPSRWRIGDKLLSRVAQAGFRINHEKSRMAMPNSRQTVTGLTVNKTVNVATTYYKMTRAMCHHLFTTGSYSSGGLNDAPKGRELAALEGR

SEQ ID NO: 886 - protein, 579 aa, Rhizobium leguminosarum
  source 1..579: note = Related to JACJIU010000009.1
MKVEIYKFGLKELKACVDLSDVAFLLDVEPKFLSKQIYKTDAAVKYHSFTLPKKDGSSRLINAPNKNLKFIQSRLSRLLYQCYFDIHGKPEFPGRVISHGFQKQRDLSIYTNAIRHIGKRHVFNVDLEDFFPSFNFGRVRGYFIKNERFALNPTVATVLAQTACHDNVLPQGAPTSPIISELISQVLDYRLQAVASKYRCTYSRYADDITFSTNLPEFPHQIGSQDAGVWTAGLSIEKAVSSCGLKLNADKTRMQLGQQRQATTGLTVNRKVNVGRHYYKGVRFCAHAMMTTGKADAPSYLKIPEKQLNSHQIWGMLCHIDDIKGRENNHAPIRHFSSSHPAPHYLRLMRDFFHFHRIHTNPKPVIICEGKTDYIYLKEAIRWNVGDPMVATLLDVVPHTKKSKGDHWNVDFVRHSDTAGDLLELAGGGGDLPKFAEYHLGRVDKLYNGEAAKPVIIIVDNDGGSDGMWTWIKRVTESATKIDGSKPYYHIGKNLYVVPIPSGGQADFYIEKLFPQPWLNAKLGTKTLKLIQKKGDKLSPNEYGKGEFATKVIRANRGKVDCSSFLPLLHTLFEIIHLK

SEQ ID NO: 887 - protein, 518 aa, Rhizobium leguminosarum
  source 1..518: note = Related to CP090117.1
MKEKIYKFGLKELKSCIDLSDVAVLLDVEPKFLSKQIYKTDAAVKYHSFALPKKDGSSRLINAPNKNLKFIQSRLSRLLYQCYFDIHGKPEFPGRVISHGFQKQRDLSIYTNAIRHTGKRHVFNLDLEDFFPSFNFGRVRGYFIKNERFALNPTVATVLAQTACHDNVLPQGAPTSPVVSELISQVLDYRLQAVASKYRCTYSRYADDITFSTNLPEFPSQIGSQDAGVWTAGPSIEKAISSCGLKLNAAKTRMQLGQQRQATTGLTVNRKVNVGRHYYKGVRFCAHAMMTTGKAEAPKYLKIPEKQLNSHQIWGMLCHIHDIKGRENNHAPIRHFNNGHSAPHYLKLMRDFFHFHRIHTNPKPVIICEGKTDYIYLKEAIRWNIGDPMAAPLLDVVPHTKKSKGDHWNVDFVRHTDTAGDLLELAGGGGICRSLRNTIWADLKSSTMAMQQSQSSLSSITIVGVKACGVGSRSSRNPRRRSMDRSRTTTLAKTSTLFPSRVRGKATFTSRSSFPHNG

SEQ ID NO: 888 - protein, 579 aa, Rhizobium sp.
  source 1..579: note = Related to NZ_CP054023.1
MTKKIYRYGLKELKSCIDLSGVAFLLDVEPKFLSKQIYKTDPGVKYHIFQVPKKDGSSRLINAPNKNLKFIQSRLSRLLYQCYFDIHGKPEFPARAISHGFQKKRDLSIYTNAFRHTGKRHVFNADLEDFFPSFNFGRVRGYFVKNKHFALNDTVATVLAQTACFDNALPQGAPSSPIISELISQALDYRLQAIARKHRCTYSRYADDITFSTNLPEFPEQIGLADAGGWIAGSSLEKAVTSSGFKLNAKKVRMQFGDQRQSTTGLTVNRKVNVGRHYYKGVRFCAHAMMTAGKAEAPAILKLPEKELSSHQIWGMLCHVHDIKGRQSDHAAIRSFTKSHPAPHYLRLMRDFFHYHRIHTNPKPLVICEGKTDYIYLKEAIRWNITDPKVAKLLNVSPLTKTSKGDHWHVDFLRHTDMAGDLLDLAGGGGDLPKFAAYHLDRFEKLHKAEATKPVIIIVDNDNQSAGMWSYIKEAIGSKGVIDGSQPYYHVGKNLYVVPIPSAGKKDFYIEKLFPPKWMKEKLGTKSFKIMQKKGEKLGPDEYGKGEFATKVIRANRGKVDCSNFLPLLQTLSDITDIE

SEQ ID NO: 889 - protein, 584 aa, unidentified
  source 1..584: note = Related to JAHIXO010000053.1; note = Alphaproteobacteria bacterium
MTKQIYEYGLADLKLCNDLGDLARLLHVRPKFLSKQIYHTPDSVKYSEFELPKKDGSKRSISAPNKNLKFIQSRLSRLLYQCYFDIHGVPENTGRVLSHGFQKGRDLSIYTNAKKHINRRYVFNTDIENFFPSFNFGRVRGYFIKNQHFDLKPTVATVIAQTACFQNALPQGAPSSPVITELITQTLDYRLQALARKYRCTYSRYADDITFSTNLKEFPAAIAFRPEGENTWREGPSLIKAVESSDLKIKVTKSRMQQSYQRQATTGLTVNDKVNIAVYYYKGVRFCAYAMMTKGKAVATNKLLVSKNGDLSKQQIWGMMCHVNDIKRRELPYEALRAFKPAPIPSYLKLMKDFYHFYRIHTAEKPLIICEGKTDYIYLKEAIRWNVSDTRVAKTLLNGPPLQNVTSDKGDHWAVDFVNHSEMAGNLLDLAGGGGDLPKFATYHLERVQKLFSEKPPVPVIIIVDNDSQSAGMWTTIKKLTEASKPIDGSAPYYHVGKNLYVVPIPSNGAKDFYIEKLIPKNWLDQKLDGKTLKLNQQKDEKLKPSEYGKMDFATKVIRANRGKVDLSSFLPLLHNICDIIDSA

SEQ ID NO: 890 - protein, 584 aa, Agrobacterium tumefaciens
  source 1..584: note = Related to JAALYX010000005.1
MTKKIYHFGLAELTSCVDLGDLARLLEIQPKFLSKQIYHTPYGQKYTHFPMPKKDGSTRNISAPNKNLKFIQSRLSRLLYQCYFDIHGAPEFPGRALSHGFQKGRDLSIFTNAKRHTNRRFVFNTDIENFFPSFNFGRVRGYFIKNQHFQLKPTVATVIAQTACFMNILPQGAPSSPIISELISQTLDYRLQALARKYRCSYSRYADDITFSTNLKEFPSAIAFCPPGEVNWREGPSLEKAVLSSNLKLNSKKARMQQSYQRQATTGLTVNDKVNISTYYYKGVRFCAHAMMTKGKAVANNKLSVAPNGKLSKYQLWGMLCHINDIKGRELPHKALRAFKSSPVPSYLKLMKDFYHYYRIHTAEKPLIICEGKTDYIYLKEAIRWNVSDARVVKNLISGPALINFTSDKGDHWGVDFVNHSNMAGNLLDLAGGGGDLPKFATYHVERVKKLFAEKPPMPVIIVVDNDKQSEGMWTTIKSLTGSPTPIDGSAPYYHVGENLYVVPIPSAGKKDFYIEKLIPSKWLKKTLNGKTLKLNQKKDEKLKPTEYGKMDFANKVIRANRGNVDLTSFLPLLHTICDIIELP

SEQ ID NO: 891 - protein, 586 aa, Sinorhizobium meliloti
  source 1..586: note = Related to NZ_RPKX01000022.1
MTNAIYKYGIKELKTCVDLSDIAFLLEVEPKFLSKQIYKTSDEIKYYSFEIPKKDGSKRAIYAPNKNLKFIQSRLSRLLYQCYFDLHGEPKFPARSISHGFQKGRGLSIYTNAIRHTGRKYVFNADIEDFFPTFNFGRVRGYFIKNKHFELNETAATVIAQIGCFQNMLPQGAPSSPIISEFITQHLDYRLQALAKKHRCTYSRYADDITFSTNLTEFPAQIGVLSTDQEAWTAGAGFEKAISSCGFKLNVKKIRMQQGYQRQATTNLTVNRKVNIGSHYYKGVRLCAHAMMTKGKATAPGKVSTPPGDELNSHRIWGMLCHIHDIKGRGLPHRALRNYSPTHPAPHYLRLMRDFFHYHRIHTSPKPLVICEGKTDYIYLKEAIRWNMADERVGKLLVKADQLPHLKKSSKGDHWLVDFVNHSDMAGDLLGLAGGGGDLPKFADYHLDRIGKLHADAPPGPVIIIVDNDSQSEGMWTFIKKATGSTTKVDGSKPYYHVGKNLYVVPIPSGGAKDFYIEKLFPDNWLKEKLAGKSFKIIQKKGEKLGPNDYGKGDFATKIIKANRGKVDCSNFLPLLHTLCDVIQGK

SEQ ID NO: 892 - protein, 584 aa, Sinorhizobium meliloti
  source 1..584: note = Related to WISN01000076.1
MTKRIYDYGLEELKACGNLSHLAFLLGVEPKFLSRQIYKTDDQLKYHSFEIAKKNGTKRTINAPNKNLKFIQSRLSRLLYQCYFDIHGKPDFPARATSHGFQKNRDLSIYTNAVRHIGRKYVLNADIENFFPTFNFGRVRCYFIKNKHFTLSETVATVIAQTACFQNALPQGAPSSPIISEFITQALDYKLQSLAKKYRCTYSRYADDITFSTNLSEFPSHIGFLSPDTENWSVGKSFEKSVLSSGFKLNATKIRMQQQNQRQATTNLTVNRKVNIGSYYYKGVRFAAYSMMKNGKAIATGKLSLTAKELNSHQIWGMLCHVHDIKGRGLHHTALRNYTNAHPAPHYLRLIKDFFHYHRIHTSAKPIVICEGKTDYIYLKEAIRWNVANQRIGKLLVKSGKLSDLKNTKGDHWLVDFVNHSDMAGDLLDLAGGGGDLPKFMTYHLDRFDKLHSDAPPKPVIIIVDNDSQSDGMWSTIKRITGSKAAVDGTKPYYHVGKNLYVVPIPAGGAKDFYIEKLFPDHWLKEKLGGKSLKIIQKKGEKLTADHYGKTDFANKVIKANRGKVDCSAFLPLLLTLCDIIESK

SEQ ID NO: 893 - protein, 580 aa, Sulfitobacter dubius
  source 1..580: note = Related to NZ_FOPG01000001.1
MSIYRYGIKDLKGCADLGDLARLLEVQPKFLSKQIYHVDDADKYHVFPIPKKNGSLRQIHAPNSNLKFIQSRLSRLLYQCYFDLHGKPKNLSKVLSHGFQRDRDLSIFTNANRHTNKRYVFNADIDNFFPSFNFGRVRGYFIKNEHFKLTETVATVIAQTACFQNSLPQGAPSSPIITEFITQVLDYRLQSIAKRNRCTYSRYADDLTFSTNLGEFPSKIGYPFPLPEVWVAGPGLERAIAKSGFKLNEKKIRMQHAQQRQATTNLTVNQKVNVGSYYYKGVRLCANAMMRHGAAVRPKKAIEPGTPLTANQILGMLAHVHDIKGRELEHKALRKYGKFQPAPHYLRLMGDFYHYKRIHINPRPIVICEGKTDYIYLKEAIRWNVADPRVSSRLVDPVRLLAPTGKGDQWLIDFLKHTKTADNFLGLAGGGGDLKNFVNIHLGRIKIFHDNPLLQPVIIVVDNDSQSTEMWSTIKKASGSTNKIDGSEPFYHVAKNLYVVPIPSGGKSNFYIEKLFDDSWLKEDLNGRTFKVLQRKDEKLKDTEYGKGEFADKVIRANRGKVDCSSFLPLLHTICDIIDK

SEQ ID NO: 894 - protein, 588 aa, Sinirhodobacter populi
  source 1..588: note = Related to NZ_SAUW01000046.1
MTKIYNYGLAELQQCSDLSDIAHLLGVKPKFLSKSIYKTPGENKYQAFKIKKKNGTDREILAPNPDLKFIQSRLSRLLYQCYFDIYGAPKNPMRVLSHGFQKKRDLSIYTNACRHTSRRFVFNTDLEDFFPSFNFGRVRGFFLKHNKFKLGEKAATTISQLACFENSLPQGAPSSPIISEFLAQPLDVALQKLAKDHRCTYSRYVDDISFSTNLREFPSKIAFPFPIPEKWIVGPKLEHEINRCGFKINTSKTRMQARTHWQSVTNLTVNQGVNIKKHYYKGARFCAHAMMTNGKAYAGNKLNIAYNELSSDQIWGKLRHICDVKDRSGAVQPLRNYNGSNPAPHYLRLSGDYFHYHRIHISPKPLVICEGKTDYTYLKEAILWHKGDARVAANLVDISRFPTKWKKTKGDHWGVDFVKHSKSADRFLDISGGGGNLVKFCKLHIERTKKFHSVTGQNPVIVIVDNDNQSEGMWSFIKDETNSSTKVDGSKPYYKVSNNLYVVPIPKPKGFAGDVYIEMLFPDPWLKYEIDGRKLKIKQKKGEKLKPSEYGKGEFADKVIRANRGSVDCSAFAPLLGTLCDIVDGTAT

SEQ ID NO: 895 - protein, 627 aa, Pelagivirga dicentrarchi
  source 1..627: note = Related to NZ_QNQP01000022.1
MFIVMVGRNAGQICSSSSFAVLRIVEILACVRVPEGYFLEVELVNKLVQLQATKSRSDLARLIGVKPKHLSFTLYKIPENSRYTQFTIPKASGGTRDIHAPNSHLKAIQSRTSGLLYECYHIIYPKNDIANLELSHAFQKNRGLSIASNGSKHRNKRFVFNMDLKDFFGSFNFGRVRGFLLSNNQFGLNAEVATTVAQICCHENKLPQGAPTSPIVTEFITRILDIRLSKIAKRNGCTYSRYADDLTFSTNKREFPVEVAFLGLDGQWTAGSAIANKIHTSGFEINPNKYRMQFADSRQETTGLVVNKKVNVSKNYTKQVRYMAHSLFQKGECFIQEPQTKLPIMVSNHVLGGKLAHQFHIKSQEYLDSKGKAFPVARFEKEGKKAPAYYRKYADFIYFQNFFHSSKPTILCEGVTDNIYIKCAIKSLYSKVPSLGYASKAASKIQLLCGFYNYSPTAQAVTKLTGGANPLKTFIETYGITFARFKAASIEVPVIVVVDNDAANNGLWKMLQEKFGIAGADGSHDFYHVTKNLYVVPIPKIGGADTFIEHLFDAKTLASQLKGKSFDFGQKGKKIAPNKYGKMAFAKDVVRKKRASIDFSGFLPVLVNVEKALSEHKKMLSTQKATS

SEQ ID NO: 896 - protein, 575 aa, Nioella sediminis
  source 1..575: note = Related to NZ_MNBL01000032.1
MSKLASLKSVRTRGELADLLNYSRSALAYAVYKVPEEQRYKEFKVAKRSGGERIIHAPCPELKGLQKRLSNYLYDCHREIWPPLEFPRHSYSHGFQKNRGLSIFSNAWKHRNKRFVFNVDLKDYFPSFNFGRVRGYFQKNRSFELHQDIATLIAQIVCYDNSLPQGAPTSPIVSELITSILDQRLGRLSKKHHCTYSRYADDITFSTNQAGFPEPIADFSPQADGAWKAGSELVGLVERSGFEINPNKTRMQLATSRQSATGLVVNRKVNIPKQYYDDVRAMSNSLFKTGVCHHPDTKEAASLAVLKGKLEFVLAAKTYPKGLVSFSDLELASKAPGGTPVPSHYKLYRRFLAYEKFHANARPLVICEGKTDNTYIRCAIASLNSKFPLLQPTTDAEGSVRQALSFFKHSDKHAKLLSISGGAGELHKFVGKYGSLLKDFHSGGEQQPVIVIVDNDNAAKPMWSVIKEKMGSEDKVDGSANFYHVKRNLFVVPIPIKSGKFASIEDLFDKKTLATVNKGKKFNPHLKSHQTTNQYGKEIFAKWVIEANAENIDFSGFEPLLGRLEEVLKVELQGS

SEQ ID NO: 897 - protein, 574 aa, Ensifer sp.
  source 1..574: note = Related to LMGC01000024.1
MTLSSFRACKDLADLAHLLRVSPKGLSYILYKIPSHLKYTHFEIPKKSGGVRTISSPDRRLKFVQSRLAELLYTCQREILPVEKNIKKVLSHGFQKNRDLSIHTNAYKHTNRRFVLNLDLEDFFPSLNFGRVRGFFLKNRDFQLKEALATVVAQIVCHGNELPQGAPTSPIISDLMARVMDVHLSKMAASYGCTYSRYVDDLTFSTNLAEFPPALATEDPATGAWSAGAELRSRIWRQGFALNNKKTRMQARTSRQEVTGLVVNKFVNVRTEVEASNRILVHTLVKKGNCFQKDPVSGTTKALSLEQIGGRLSYQFQTKAARHSFRSAREFEKAGEPIPRFYRDYASYINYCSFHANDLPTIVCEGKTDVIYLKTAIRVLYAKFPKLAGISAGEYASDVRFFGHSRHHTAATKLSGGAGDIQQFVREYSKIVHPFHPGGQLRPVIVFVDNDKATNGIWSFIKERTGSKTLIDGSAPFYHIERNLYVVAVPGKVGTTERIVEDLFDAKTKSMTWNGKTVDLKQKRGHPPGKGKMSKERFATKVIRDQRDNIDFSGFEPVLQAFSDIIDIKLPAST

SEQ ID NO: 898 - protein, 574 aa, Sinorhizobium meliloti
  source 1..574: note = Related to AGVV01000148.1
MTLKTFRACKNLSDLAHLLRVSPKGLSYILYKIPSHLKYTKFDVPKKSGGTRTISSPDRRLKFVQTRLAKLLYACQREIVPVENNTKKVLSHGFQKKRGLSIHTNANKHTSRRFVLNVDLEGFFPSVNFGRVRGFFMKNRDFQLSEACATVVAQIVCHDNELPQGAPTSPIVSDLMARVMDVHLSKMAASYGCKYSRYVDDLTFSTNLAEFPTALAVEEPRTGTWSAGSELRGRIWRQGFALNDQKTRMRRRTSRQEVTGLVVNKFVNVRAEVEASNRVLVHTQVKKGSCFLKDPKSGATTPLSLEQLGGRLSHQFETKAARHNFMSAREFEKAREAIPKFYRDYSAYIYYRNFHVNDLPTIVCEGITDAIYLKTAIRVLHAKFPNLAGTSAGKYVSDVRFFGYSRHHTAATKLSGGAGDVQHFVKEYGKIVHPFHAGGQLKPVIVFVDNDKATNGIWSYIKEKTGSKTPIDGSDPFYHIERNLYVVAVPGKVGGAERVVEDLFDAATKSMAWEGKTVDLKQKRGHPPAKGKMSKERFATKVIRDQRDKIDFSGFEPVLEAFSEIIDIKLAGSK

SEQ ID NO: 899 - protein, 574 aa, Rhizobium leguminosarum
  source 1..574: note = Related to NZ_SIQZ01000001.1
MTLKNLRACKDLSDLAHLLSASPKGLSYILYKIPPHLKYTRFEVPKKSGGTRTISSPERRLKFVQSRLTELLYACQREIVPVEENIKKVLSHGFQKKRGLSIQTNAGKHTNRRFVLNVDLEDFFPSLNFGRVRGSFLKNRDFQLPEPVATVIAQIVCHDNELPQGAPTSPIVSDLMARVMDVHLSKMAAAHGCTYSRYVDDLTFSTNLAEFPPALALENPLTGKWDAGHELRGRIWRQGFTINDQKTRMQTRASRQEVTGLIVNEFVNVRTEIEARNRVLVHALMKKGTCFQKDPKSGAATPMSLEEVGGRLSHQFQIKAARHGFKSAREFEKAGDDIPKFYRDYAHYINYCSFHVNPVPTIVCEGKTDVIYLKTAIQVLHAKFPKLGGLSGGKYASDVRFFGQSRHHTAATRLSGGAGDVQHFVRDYNKIVLPFHAGGQLSPVIVFVDNDKATNGIWSFIKERTGSATPIDGSDPFYHIERNLFVVAVPGKVGNTERIVEDLFDAATKAMTWDGKTVDLKQKRGQPPAKGKMSKERFATKIVRDQRSKIDFSGFEPVLKAFSDIIDTKLTPSK

SEQ ID NO: 900 - protein, 571 aa, Sphingomonas sp.
  source 1..571: note = Related to NZ_CP053347.1
MLDDLKSCTSRSGLAVLLGVKPSELSYTLYKIPDAAKYTSFCISKKSGGTRQIQAPCPPLKWLQGRLLDLLYQCEDDISAASGLKRNLHSGFRRGVNIYENANAHRGKRFVFNIDIESFFDQYNFGRVRAFFINDRDFALQPAVATTIAQIVCFNNVLPQGSPTSPHIANLLTQFFDNRMARFLRPRRCGYTRYADDITISTNVREFPADVAIMTPADPQGWSIAPELAAIFGRANLPPNPSKTRMSAYSSRQTVTGLVVNQRPNVTREYYLHTRAMCDRLFKTGTIQIPDITSSYGKNCPVSDDAEPEADVDPLKVLEGRLSHIHHIREKSDLRNIQEKQDNPTQFWNMLQDFFLFKYFVANSKPLILTEGPSDIFYLRSAIINNTTLLVPELKKVVSGKPEILPTFFRFNTVAAKVIGLTGGAGNIKRFLYLYHKQEKRFNRSLRHKPVIIIIDNDSGGADVINMVNGIYKTNISLSDPIMAHKITDGLILVKTPHVGSKTHTAIEDLLPASVKAVKLNGKSFSAAKKFDATKHFGKIALGSYVQANASSISFQGFDDFIVAINGAITM

SEQ ID NO: 901 - protein, 569 aa, Asaia bogorensis
  source 1..569: note = Related to NZ_BJVS01000002.1
MLDDLKACRNRSDLAHLLGVKPSSLAYTLFKIPDVSKYSKFCISKKRGGTRQIMAPCVRLKNLQTRLLAILYQCEDDIEKASGIHRSLHLGFRREVNIYDNARLHRKRRYVFNIDIEKFFDNYNFGRVRSFFIKDHDFSLHPDVATTIAQIACFNNVLPQGSPTSPHIANLLSQFFDNRMSRFLGHRRCAYSRYADDITISTNLKEFPSDIASVTTTVPQGWVIAPELLSILTRSGLPPNLAKTRMSLRSSRQMVTGLVVNKHPSVPREYYLQTRAMCDYLFKGKIPHIPDITSDYGENCPSSLGHKKKKPDYMRVIEGRLSYISYIRKRSAKFSTEYKNDKNSQFNNLFIDFLIFKNFYMNEKPIILTEGPSDILYIKSAIRSSTLSLPHLKRINSGKLEIIPRFFRFHSASSKTLGLTGGTGNLKNFLNLYKKRSSKFRVSPNENKIIIVVDNDSGGKDTICAINSLYKKNIQISDPTIIHKITEKLTLVKTPHVGIKKETTIEDLLPDDVKSVTINGKTFSAEKILDETKNFGKIKLASYVHDNASVIDFTAFNDFLSELDSGFTT

SEQ ID NO: 902 - protein, 569 aa, Sphingomonas sp.
  source 1..569: note = Related to NZ_CP019511.1
MLSDLKACQDRKGLAILLGVSPKEFAYTLFHIPGDQKYESFCVSKKNGGTRNILAPVPRLKWLQRRLLEILYQCAEDISVSAGESPNLHFGFRPQFNIYENAFVHRRRRFVLNLDIVDYFDQFNFGRVQGFFLKDKNFELVPAVATAIAQIACFDNKLPQGSPCSPHIANLVSQFFDNRMARFLRSRRCSYSRYADDITISTNLRVFPSDVAEASDSPQGWQISPILTDIFQRSGFAINDTKVRMGVFHSRQTVTGLTVNKHPNISRDFYLNSRAMCNSLIKSGSFIVQDISGSFGNSCNPDLPPPIKSPLMVLEGRLSHIHNIKEKNDGRDLKYKQASPTQFWKLLRKFYQYKYFVINDYPLIITEGPSDIFYLKSAIRNTKLLVPNLYADEKGGRRILPQFFNLSNLPSKVLALNGGAGNIKKFIHQYSIEMRNFFTLNRTNPVVMVVDNDSGGEDVFGQIKKSFGLSVKTSDKDCMVKVSDYLYLIKTPHIGPQDKTSVEDMLPSAVRGVALNGKTFSTASKFDTSKHFGKVALASYVHANSGSVDFSGFDPLLLALDRAIADSKS

SEQ ID NO: 903 - protein, 569 aa, Tsuneonella amylolytica
  source 1..569: note = Related to NZ_CP032570.1
MLTDLKDCTTRAALASILGVEAKELAYVLYKIDQGSKYTSFCISKKNGGTRQIQAPIPKLRFIQSRLQQISMACCDDIADLGIYKGKLSFAFQKDRNIFENARPHVGKRFILNLDIRDFFHQCNFGRVRGYFIHSKEWKLDPAVATVIAQIACVDEGLPQGSPSSPIIANLLGQILDVRLTRFLHPRRCTYTRYCDDITISTDMRVFPRDVAVQDDSWPSGWALAAPLEDIFVRADFPINYNKLRMSFDCSKKVVTGLTVNRFPNIDRKFYRDTRLLLDRYAQTSSCKYIEFTGNFGNNCDNTETKNKNPILRLGGRLAFIHHIKSRTSLIGYPGIVHPQNPQFYGMVQTYAFAKDFVFNSIPTVVTEGPSDIIHLKAAIRANPAWAPHIFDSKENRFLVKFARHDGLFATVLGMSGGTGNIGRFLDLYYSRFKRINYKIRTQPSVIVVDNDKGSHGILKRLSNIHKMKLSTGDGLVVKKLQPFFYICKTPQLAGKAETAIEDLLPSAITGMVVGGKTFEPDTKKFESSKNFGKIFLAKMVATQHSATAYANFQQFITGLDDAVAGVAK

SEQ ID NO: 904 - protein, 444 aa, Sphingopyxis sp.
  source 1..444: note = Related to JADBDT010000001.1
MLIDLKACKDKRDLAHLLGFQLKTITYQINIAPDAEKYKKICISKKNGNSRTVFSPNPILKSIQNSLLEIITSCYDQIHGGMNYPVSFGFIPNLNIYDNAKRHIGKRWVFNVDIKDYFDSINYGRVWRYLQKNKNFLLNAEIATMISQIVCFDGRLPQGAPTSPMMANLVSGSLDYRLRSLASEHKCTYSRYADDITFSTNLRDFPEEVARYDEPSGSWLPGKGLLSCVSRAWFSLNDGKTRMSYRRSKQVVTGLIVNKKVNVDREYFKLVRANIHHLLTGRPVILQEFCDPYGENCDGKEVKNKNGMSLIEGRINFCFEINDQGDERTDNAKFFKPSSVRKTYRDFLIYKYFIHGDRPILITEGESDIVYMAAYLKARSLPLANLVDVSPPDNRKILIDFYQFPKRPSKIIGMTGGTSGVAFALKWVGEILPRLGKNVSRRKF

SEQ ID NO: 905 - protein, 613 aa, Bartonella apis
  source 1..613: note = Related to LXYU01000002.1
MTEPKNLEKLKSITKREELADLLGLSRRRLFCTLYMEPMSSKYNTFSIPKKSGSDLRIIKAPNSHLKFIQWRLAKYLSECLEEIKKKEKFPHLSFAFQKKLSIKDNALKHINKRWVLNLDISDFFSSISFNRVNRFFLKNKFFQLNDEIATTIAQIACDEQALPQGSPCSPIISEFITQSLDVRLLKLAKQYHLTYSRYADDITLSTNQKVFPREVAYPDSSAENGWQVSETLRSIIQRSGFKINEEKTRMQKNCVRQVATGLVINKKPNVADNYYRTVRSMCHHVFEKGAYYRSPEDKDNPTCDLNPLAGKLNFIHDIKKNSDETNSSSLRGGNNLTLSGFDGLYKKFLFYRLFLCLNKPMIVTEGKTDPIYLRCAIKHGNKIKNAYGKTVGRYITQSILFFSRERSYAEAFNFKEGGSNNLLDIIKLYKEYLHSSKKRQIQSRPCAFPVILLFDNDDGIKTTSSYVKKNFDIILTTETTDDFYYLFDNLYIVKTVEKKYNTEYEKNDDKNHQYDNIKNKVKNKKNLIKNSESCIEDCFFKKTLEKTLHGKKFTKNNNGHSNTEYSKDKFATEIVSAEPWSIDFSGFDGLLDRIRKVIEDYKKLHNHPTINR

SEQ ID NO: 906 - protein, 568 aa, Novosphingobium sp.
  source 1..568: note = Related to NZ_JABVZR010000003.1
MALKAATNRHDLAALLRFQTKMMTSIVYATHESLKYKTFKVPKKSGGDRTIAAPIPQLKLLQRRLADLLMDCHAAIMDTHPHRKGLQFGYLPELSVVDNAYRHRRRRMVLNVDLADFFSSINFGRVRGFFLSDAAFQLHPVVATTIAQIACWNNELPQGSPCSPIISGLIGGILDRRLGALAREHGCTYSRYVDDLTFSTNADTFPNELAALDPATGRWAVGGKLSHAVGKAGFLVNPDKTRLFGMTGRQTVTGLVVNDKVNINRDYEMRTRAAVHHFIRKGVYTVPASLESVAAGKPPEKETSPHRLEGMLQWIYSVRDFSDDRKDGSKRHHPTSFSKVYREFLFAKHFLFMDKPLILCEGKTDNVYLNSALKRLAASYPSLGSWVGADFKSNLRLFRYTSKSLQILHLGGGCGDIVQLVRDYRRLWTRLVHRQIAQPVVLVVDNDEGGASVFKAIKEVGGPDIKIAEPKILFHVFHNLYIIKTPCGSGTPKSCVEDLFDAATLGQTLGGKTFNPACDEETAKHYGKKIFAEGVIRPNWKTIDFAGFHSILASLEDAIKGYYGMLVP

SEQ ID NO: 907 - protein, 646 aa, Vibrio parahaemolyticus
  source 1..646: note = Related to NZ_CP013248.1
MSQLQQLKNCKSLSDFALLLGYNAKGLSYILYKIDDSAKYTSFQIDKKSGGKRTISKPCLKLKMLQRKLANLLYDCIEEKKPNGERLTDFKGSDKTLPKRKRAAKSISHGYEKGLSIATNAEMHIKKRYVYNIDLESFFPSFNFGRVRGFFIKNKQFKLHPKVATIIAQIACHQNQLPQGSPCSPVISNMICKNLDYYLLGIAKENGCVYTRYVDDLTFSTNKKKFPVAIAENRLKFFGKQSWSLGKEVEEAILKAGFKVNRKKCRMQTSYSRQEVTGLTVNRKVNTSSAYYRNVRAMCHSVFKHGYYTLPQQKEPPKKQGWLSKLTSIFGLKIGVNEPNIAQLEKQTSLESLQGKLAHIYNIKSYRNKFSRRGYRPTKHDGIRTNNSKNPFPPLDRSETYTDDNHIVALDGIKNLYGKFLFFKHFYANKKPTIICEGKTDNIYLKCALESLVAKYPRLSKDKNGNFQVHFFNRTETSSEMLKLVEGSPGLVYLVEIYKRFTKLFNSNGQEYPVIIVVDNDDAGRGVIKKADKIRQENRNAKSIKKVRRSDYFFENLYIVKVPSTAGEKDKEIEDLFDPILLQTKLNGKTFHRNNTGLDPNKHFGKAHFSEYVVTPNKGSIDFRGFEPLLDIINDIVNNFNPNDLD

SEQ ID NO: 908 - protein, 653 aa, Pseudoalteromonas sp.
  source 1..653: note = Related to NZ_CP058972.1
MSQLEALRKSKSINDLAPILGYKPKSLAFILFKIPDQDKYTCFNVAKKSGGKRTISKPCDKLKALQRKLADLLYSCSDELKPINQSIKSFKGGNKQIPLSERAKKSISHGYEKGLSIASNASMHTNKRYVYNIDIKSFFPSFNFGRVRGFFIKNKNFRLHPKVATLIAQIACFENELPQGSPASPVISNLICKSLDIELLSIAKRYSCIYTRYVDDLTFSTNQKLFPKEIAIKPRFGFGRENWRLGKEVEATIIKSGFQINTKKCRMQYKTSSQEVTGLTVNKKVNVRNLYYRNVRAMANSLFKYGFYYRPAPSTSKIRDESKKSLYQRIYSIFFRRVVRAAPTKKKVKQIESADPLIGMLAYIFNIKSYRNKFVRRGFRPDIHNGIRTKSNGSITFPTVDRSESYEDDNHVIALDGIKNLYGKVLFYKYFYALEKPLIIGEGKTDNIYLKCAIEGLANTFPQLAKNSSGSQQVSFFNRTPTNTDMLRLAEGTPGLEYLISIYKRFMSFYKCEGKQHPVIFIVDNDDAGRGFINKASKIRDQIRSAKKVKTQRHKYYYFENVYIVPIPKQKFNGNKVKDIEDLFDDSVLAEKLEGKSFYNNNKGLDTSKHYGKAYLSEYVIKPNKNKINFNEFQPILADIADIIKSYDNNNLD

SEQ ID NO: 909 - protein, 651 aa, Aliidiomarina halalkaliphila
  source 1..651: note = Related to NZ_VJWL01000003.1
MSKLTQLKQSSSLSDVASLLGYKPSALAFILYRMDDVDKYFTFDVPKKSGGHRVICAPCDKLKKLQRKLADLLYDCIEEDKPSEETLGEFRGENSDLPLRKRARKSMSHGYEKGLSIATNAEMHVGKRFVYNIDLTSFFDCFNFGRVRGYFLKNSRFRLNSKVATILAQIACFQNKLPQGSPCSPVISNLISKHLDYHLLSIAKNHSCTYTRYVDDLTFSTNQKAFPKAIAKRRFLTLEKGSWRLGSAVKGAIENAGFSVNENKSRMQYRDSRQEVTGLTVNKRVNVSSSSYRQIRSMCHSMFKFGYYFKSSARTVSKPKTNSILTRLYNKFALKYFRVHTQDDELGDTQGQECTSLASLDGMLAHIYHIKSYQNRFSRKGHRPSSHDGIRTKFNESSSYPPIVRGDTYASDNHRVALDGIKNLYRKFMFFRYFYYNEKPLIICEGKTDNIYLKAAISRLGNAYPELYDATTKRCRISFFSKSDRNLEILKMAEGTSGLSYLIKSYKRLCSKYKIKGGSHPVIVIVDNDDAGRGVIKKAEKIKNDTIKSKGIAANYRLDYFFENLYILAVPSGAGDADIEDLFDSSVLNRELSGKKFSRKNKKSDGSTYGKAWFAERVIKAEREKINFAKFAPLLDQVRDIIKAHDSRNLI

SEQ ID NO: 910 - protein, 647 aa, Photobacterium damselae
  source 1..647: note = Related to JABWTP010000017.1
MTTSLNSLKKCSSLNDFALLLGYQPKSLAYVLYKIEDKKKYTSFEIPKKSGGVRVIQKPNVKLKLLQKKLAVLLYECIEELKPEGEKLVDFNGGKNKLPIRKRAKKALSHGYEKGLSISTNAEQHINKKYVYNIDIESFFPSFNFGRVRGFFLKNKNFRLNPKVATVIAQIACFENCLPQGSPCSPVISNLIAKNLDYMLLSIARRNSCTYSRYVDDLTFSTNMREFPKSIAYQRILTLRKNPWILGHEVENAIKDAGFKINPKKSRMQMNHSRQEVTGLTVNKKVNISSGYYKMVRAMCHQFFMEGYFYKPQKEKKNISKSYFNKLIDIFKKERFEVINDESIERVKLDSPDILQGMLAHIYNVKSYRNRFARRGYRPTRHDGIFTKHKNPSPFPPLDRCDSYTDINHIVALDGIRNLYGRFLFFKYFYLLKKPLILCEGKTDITYLRCAIDQLATSYPYLRNDKGNNQVSFFNKTKINVEMLKLAEGTSGLTYLIDIYKRFSSQYKCEGQLHPVILLVDCDAAGNGVLNKAAAIRDSNRKAKKIEKQRHADYYFENLYIVKIPAKNKGKTDIENLFPDEVLNMELNKKKFNPKNKGADSDTEYGKAYFAEYVVRANKNKIDFSGFKPLLDNIQDIITTYDHNELD

SEQ ID NO: 911 - protein, 647 aa, Vibrio splendidus
  source 1..647: note = Related to PIEV01000027.1
MTTSLHSLKKCSSFNDFAILLGYQPSSLAYVLYKIQEKDKYTTFEIPKKSGGVRTIQKPNPKLKLLQKKLANLLYGCIEELKPQGEKLEEFKGSFKSPPLRKRAKNALSHGYEKGLSISTNAERHVNKRYVYNIDIESFFPSFNFGRVRGFFLKNKNFRIHPKVATVIAQIACHDNQLPQGSPCSPVISNLIAKNLDYMLLSIAKNNSCTYSRYVDDLTFSTNLNEFPKAIASKSVLTLRQNPWLLGKEVEKAISDAGFKINPKKSRMQLNNSRQEVTGLVVNRKVNVSSGYYKMVRAMCHQLFTEGYFYKPKEEVKLTKKTLFSRLIRILKTSTAEKVKEEIETVKLDSPDMLQGMLAHIYNVRSYRNRFARKGYRPTQHDGINTKHNNNNKFPPLDRCDSYTDVNHVLALDGIRNLYGRFLFFKYFYFLKKPLIVCEGKTDNIYLKCAIDSLAKDYPILCKSKENDNQVSFFNKTKTNSEMLKLAEGTPGLTYLIEIYKRFSSQYKCEGQHFPVIILVDCDKAGLGVLRKAASIRDNNRKAKNITQARHKDYYFENLYIVKVPSEDEKKVDIEYLFPDEVLKKELNGKKFNPNNTGGDNEHEYGKAYFAEYIVKANKKDIDFSGFKPLLDNIQDIITSYDPTKLD

SEQ ID NO: 912 - protein, 587 aa, Paracoccus sp.
  source 1..587: note = Related to NZ_CP025583.1
MSSLSRLKSCKSLSNLAHLVGYEPKKLSYILYKIPDEAKYTEFEIPKATKGVRKISAPIPELKLAQSRLAKVLQNCLTEIEKEQANGENCILSHGFKPHLSISTNGAQHVDRKWVLNFDLKDFFPSINFGRVRGFFMKNKHFMLEEKVATIIAQLACHNGSLPQGAPTSPVISNLVANHLDIRLSRISGKNRCTYTRYADDITFSTNKSEFPEGIAANRDDENSAGDWKLSKRIRTEVKRSGFEINPDKTRMQYRRSRQDVTGLVVNKKVNVKRELYKQVRAQVQNFIKNDTCSKKVKIGGVESEVEVTEAALQGFLSHIFWVKGAEFEYKRLNKATGPAEPGFYKEYRRFLDYKTFVASQQPVVLCEGVTDNIYLQCAIKRSKTARPKLQDSGSSNGLAVKLFQYPKIGSKLRVPSSVQHLNGGTGDLKELIHKYKVRTADLGKRGFISPVILLVDNDQGSRDGLWGAIKTTSGSKKNVDGKKKFYHVTKNLYVIPTPKLAGGKDSMIEDFLPPAVVSQVLGGKTFNPDEKTFDKKKHYGKRILAEKVSKDQATINFDAFSPILDIMEEILDHFSALPKKQGRVVF

SEQ ID NO: 913 - protein, 587 aa, Litoreibacter arenae
  source 1..587: note = Related to NZ_KE557310.1
MSSLSRFRSCKNVSDLAYLVGYQPKKLSYILYKIPDESKYMEFEIPKATKGVRKISAPIPELKLAQSRLAHVLQDCLAEIEKGQASGENCIISHGFKRHLSISTNGARHVNRKWVLNFDLKDFFPSINFGRVRGFFMKNKHFLLDEKVATIVAQLACHKGALPQGAPTSPVISNLIANHLDIRLSRVATKNRCTYTRYADDITFSTNKKDFPKGIAANRDDGSPSGDWELSKRIRSEVRRSGFEINAKKTRMLFRRSRQDVTGLVVNTKVNVKRELYKQVRAQVHSFIKDDVCFKKVKIGGVKREVKVSEAALEGMLSHIFWVKGAEFNYKRLNRPTGPNEPGFYREYRRFLDYKTFVASPQPVVICEGITDSIYIKCAIKRSKAARPKLQDAKSLSGLAIKLFQYPKIGSKLRVPSSVQHLNGGTGDLKELIHKYKVRTNSLANRGFVSPVILLVDNDQGSREGLWGAVKTASGATKKVDGTKGYYHVTKNLYVVPTPKLTGGKDSMIEDFLPSSVVTQKLGGKFFNPDEKTFDRKKHYGKRILAEKVSRDHASIDFASFSPVLDRIEEVLDHFSAFPMVQGRVKF

SEQ ID NO: 914 - protein, 568 aa, Jannaschia marina
  source 1..568: note = Related to NZ_JABVAX010000004.1
MKSIEQLKAAAGLSDIAHIIGFKPKSLAYVLYVLPPASRYAQFSIPKSSGGTRDILAPVPQLKLAQRRLCEHLQNCLHDIEAQLTVKSDCILAHGFKRDLSIVTNASIHVGRRWVLNLDLKDFFPSINFGRVRGFFIKNKHFCLQPDAATVLAQIICHDNQLPQGAPTSPVVSNLIAGLLDIRLNKMATQNRCSYTRYADDITFSTNTRDFPQSLAKIDQDGVWTLGNRLHKRIKQSGYAINSKKTRMQFRRSRQEVTGLTVNTEVGIKRERLKNTRAQVDNLVRNGVCHARGNPMQPVGSVSLQGHLAHIAWVKGRYVDHSRSDGHWKREPAYVQTYRKFLDHQTFVASPQPVIICEGKTDNTYFRCSINRIAGAPANLTDKANPTGLAVRLFQFTRTTSWVQRLNGGTGDIKNFIEWYAERMRVLSATKFISPVVLVVDNDSGVKKGGLNSLVKSKTKSAVAIDGSSDFYHVGQNLYLVHTPKSATGGDTMIEDFLPAAVKGQTLGGKTLELDESKFDPKKNYGKVPLAETIVKRQQDKINFDAFLPLLMRVSKALDHFDKSAFKA

SEQ ID NO: 915 - protein, 563 aa, Vibrio parahaemolyticus
  source 1..563: note = Related to AAXMXP010000003.1
MSSLAKLKSCSSRSDLAKLLEIELKHFTYLLYGLSDSEKYFEFSIPKKTGGLREIVAPIDELKDLQKKLSNILQECLSEIEAKSSRKSPSHGFKKERSIITNAKSHTRKRYVINIDLENFFHTFNFGRVRGFFLTNKHFELNEEVSTSIAQIACYKRHLPQGAPSSPVITNLICNILDVRLSNLAKKNKCKYSRYADDITFSSRSKVISKELVRQENHKWSVSGKLKKEIKRADFIVNDKKTRVQYKNSKQDVTGLVVNEKISIPSKYWRTVRAMVDNLLYCGHFTITKRVLEEEELKEVKIEGKIEQLNGMLSYIDSVDLHNAKKGSVQVDLNQRERTYRDFLYFNKFYANNKPTIICEGKTDHVYLRCALKKQYQDHNILIEKSGDDLVSKVSFYKYTELETRLLGVTGGSSLLKAFIANYPKVIRKFSVPASNNPVIILIDNDKGAKEIFSQIKSITDSRSTIDGSELFYKLYDNFYVIATPAEKGKMSMIENFFPKSLLKTELGGKTLELDEKKFDKSKHYGKAYFADRVIAPNYKKIDCSEFSKIFYRIEAAIRDSRR

SEQ ID NO: 916 - protein, 562 aa, Vibrio metschnikovii
  source 1..562: note = Related to NZ_JAHAMV010000022.1
MSDLATLKECQTKFDLAKLLQIEPQNLTYLIYGLSDEEKYNEFTIPKKTGGVRRIHAPIKELKDLQRRLSNILQSCLIEIESESKRSPPSHAYKKECSIITNAKSHTRMKWVLNLDLEDFFPSLHFGRVRGYFITNKHFELTEEVSTIIAQIACYDKKLPQGAPCSPVITNLICNILDVRLSKLARENKCKYSRYADDITFSSRSGDISKNIVKNNDHLWEISGKLKKEIVRAGFSINKKKTRVQYKNSRQDVTGLVVNEKVSIPSKYWRTVRAMVDNLLYCGFFTINKIVEEEGERKEVKIMGKLSQLEGMLSHIESIDSYNKKINPTKTLNQREKTYRDFLYYKKFYANDKPVIICEGKTDHVYLRCALKNLSLDFPKLIEKVDGKLRSNLSFYKYSDLEMKLLGITGGSDLLRAFISNYPKVIKKFSAKASSNPVIIVIDNDKGAKEIFSQIKSITRSASPIDGSSNFYQLYDRFYVIATPAAKKSMSMIEDFFPKALLRTKLNGKTFEPDEKKFNKDIHYSKAYFADHVVARTYKTIDCSGFKAIFNRIEAAIEHSKT

SEQ ID NO: 917 - protein, 602 aa, Micavibrio sp.
  source 1..602: note = Related to NC_016026.1
MSKLAALKSANSVSDLARLLKSKPDTFAYFLYKVPEKNKYTSFSIPKKTGGERKIDAPSDQLSYIQKQLAKYLQDCIEEIGELEKQKLGKKKFSSAAHGFTKDRSIITNARPHRRKRWVLNLDLKDFFPSINFGRIRGFFIKNKNFNLDPDVASAIAHICCYEGKLPQGSPCSPIISNLIGHLLDVRLIKIAKKYSCTYTRYADDITFSSDLRKFPKEIAHKKLFSKKSWELSNSIKQEIEKSGFFVNEKKTRMQYQESRQDVTSLVVNKKVNVKRELYKTLRAQCHTLFRTGGCYEIAYQRPENEKISYLQRILDKIFYRPKKIKEKKEDRKYKTLDQIQGMLNFVYQVRHDRDKKLGIAERKEIESSIKSLYRKFLFFINFYYIDRPLIICEGKTDPIYLKCALKSLHLKYPGLIEKTSEGFDFRIKFFTYSDTTLDILNLGGGCGDLAKLIREYNESCTPYKCSGLLHPVIIIVDNDNEPTEKLFPAIKGITHSKTPILGDKPFYTVTRNLYVIPIPQKNGKSTCIEHYFEESVFDKDINGRKFHPDKGPADGFSCSKNDFAEKIICKQQGSINFSMFSDIFDKIVDVTIHYRTRRSSP

SEQ ID NO: 918 - protein, 570 aa, Alteriqipengyuania halimionae
  source 1..570: note = Related to NZ_WTYR01000001.1
MNEKKIEQLKACVDRKDLARLLGFKPKALSYILYQRTPCQNYRTFKIPKRKGGERVIDAPNPELLFLQKRASNLLQDCLDEIVQDEGHKRTIHHGFQRKKSIITNARVHRARKFVFNVDLTDFFPSVNFGRILGFFQKNRHFTLEREVAVTLAQICCYDGQLPQGAPTSPVVSNLICQPLDIRLSRLAEKFGCSYSRYADDITFSTSTRKFPRAISRKSLISSKWYSGRILKKEIKSAGFAINPKKTRMQYAQSRQTVTGLIVNDKINVPADYTRLCRAMVDAYVKSGTYFIRKEKLSKSGKVKVTKEPGTDLQLIGRYSFIHNVKSSNFSKENPRPKDLFSYEKDYRRLLLFSKFHFSKIPLILTEGKTDTIYIKAALRRLHKSYPTLITKKGRSFEYNFDFFKFSPTNRRILGIDGGTSHLAGFLSTYRKEAKSFCPILNQKPVICIIDNDNGAKKFFKWTDSSGNKINRDGEVYHLFENVYLLLTPLKNGTEDSKIEDFFTKHTLNEKIGGKSFNPENVGVTEAEYGKAWFASKVVWPKKSTINFNNFKPLLDLIENTAMKVHNPKK

SEQ ID NO: 919 - protein, 556 aa, Salinarimonas rosea
  source 1..556: note = Related to NZ_AUBC01000017.1
MTSKLTSLRSAKTVYDLASLLGFSPSSITFILYNLPPATKYKTFSIAKRSGGTRLISAPEPRLKSLQRRLADLLQECRDEINALPENKKSRSHGFERQRSILTNANIHKRKRYVFNIDLENFFPSFNFGRVRGFFIKNKKFQLEPKIATLIAQIAIHNNELPQGSPCSPVISNLVADALDRRLDRLARQNRCRYSRYADDITFSARVRDFPADIAVPTGANFDPSAVLQSIIASSGFAINPNKTRMQYSMSRQIVTGLVVNEKPNIRKEYRRTLRAQVDSYAKTGSFTYVDSSGTPIPGRARQLEGKISHACAVKMHNAGPLNDSMRVGEIFKIARKFWLSHLFARRLKPVILCEGKTDNAYLRAALKSLALQYPSMVDSSARNATFKVEFVNLNSLAAEVIGLGGTANLCKLIHNYDKEVLKFSRSRPLHPLIIVVDNDSGAKGVFGKIKEATGKTVDINTKEHFYRIKDNMYVVKVPEGRLNEERAIEHLFDPPVLNTPLHGKIFHPGDKNFDPTKHYGKEAFAQNVVRPQANTLNFRGFVPLLDRIEEVLKDY

SEQ ID NO: 920 - protein, 507 aa, unidentified
  source 1..507: note = Related to JAAUTN010000370.1; note = Leptolyngbyaceae cyanobacterium SM1_4_3
MLGRNNGDSASDNQAKTFSQVSHGFKRKLSIRTNARKHRNRRYVFNIDLTDFFGSINFGRVRGFFIKDKRFRLNSKVATIFAQIACFKKSLPQGSPCSPVISNLIGNILDTHLVRLAARTGCTYTRYADDLTFSTNKRCFPRSIAIQSDDDNHVWIPGPELLRLVNQSGFEINPKKTRMQYHSSRQEVTGLVVNKKVNIRREYRHNVRAMAHRLFTKGSFLLPIYEKDENGDYLLEMKPGSLNQLHGRLGFIDGIDRYNIEILSASKESQIKSKETIYRRFLFYKEFYAASKPVLICEGWTDYVYIENALLKLAPNYPSLVSLDDNGKGSFLIKRFKYSRSHTTKILGIKGGVGDFINFINSYKREFERFSVPGMREPVILLIDNDDGGKKVFNCIRSILGTDLEEMRKAPYIHVHRNLYLISTPLQGNQQKSQIEDLFDFSTLEVKIDGKSFDRSDEKVTETTYSKAVFAQKVVKEMASSINFQGFMPLLDRIAKVIESHYAQRKE

SEQ ID NO: 921 - protein, 304 aa, unidentified
  source 1..304: note = Related to JAAUQZ010000187.1; note = Leptolyngbyaceae cyanobacterium RM1_406_9
MSALKKLRDAESIADVASILGFRTKALSYILYVQPDSLKYKEFDIPKKSGGVRRIAAPQSRLKLLQKRLADLLQDCLDEINGDSASDNQAKTFSQVSHGFKRKLSIRTNARKHRNRRYVFNIDLTDFFGSINFGRVRGFFIKDKRFRLNSKVATIFAQIACFKKSLPQGSPCSPVISNLIGNILDTHLVRLAARTGCTYTRYADDLTFSTNKRCFPRSIAIQSDDDNHVWIPGPELLRLVNQSGFEINPKKTRMQYHSSRQEVTGLVVNKKVNIRREYRHNVRAMAHRLFTKGSFLLPIYEKMK

SEQ ID NO: 922 - protein, 585 aa, unidentified
  source 1..585: note = Related to JAAUUH010000063.1; note = Oscillatoriales cyanobacterium SM2_2_1
MSALKKLKDATTIAEIADILGFKTKALAYILYRQPDSLKYKEFDIPKKSGGVRHIAAPQGGLKLLQRQLADVLQECLDEINNATVGDQARPFVDISHGFKRKLSIRTNAKKHRNRRYVFNVDLIDFFGSINFGRVRGFFMKDARFCLSPKIATILAQIACFKQSHPQGSPCSPVISNLIGNVLDMHLVKLAARRGCIYTRYADDLTFSTNKRCFPKSIAVQSDDDNHVWIPGSELFRLVKHSGFEINPKKTRMQYHCSRQEVTGLVVNKKVNIRREYRHNVRAMAYRLFTKGSFLLPVYEKNANGDYSLEMKPGNLNQLHGRLGFIDGIDRYNIERVSTAKESQIKSKETIYRRFLFYKEFYAASKPVLICEGWTDYVYIENALRSLASNYPSLISLNDNEKVNFLIKCFKYSKSHTTEILGMNGGVGDLKRFIPLYKSEFERFSAPGMEQPIILLVDNDRAGNEVLGVVNNMVKGNKRTKTKVDNNEPYVHIHHNLYLILTPLQPGQSESQIEDLFDASTLAIKIDGKSFNRSDESVTETTYSKAVFARKVVEERASSINFEGFAPLLDRIAQVIESHYAKGKK

SEQ ID NO: 923 - protein, 579 aa, unidentified
  source 1..579: note = Related to PHCH01000051.1; note = Betaproteobacteria bacterium HGW-Betaproteobacteria-4
MFFLHSLKSATSLKDVADLLGFKASALAYILYKKDGASKYKSFEIPKKHGGIRKILAPSDELKLMQRRLSDLLLDYNSEIKAHDGLKNQISHGFEPDKSIVTNAECHRNRRYVFNADIKDFFGTINFGRVRGFFLKDKNFELHETVATILAQIVCHDNSLPQGSPCSPVISNLIGHVLDVHFVKLAARSGCYYTRYADDLTFSTNLKTFPKAIATNVDGENHSWIPGKELARLIKHCGFELNPQKTRMQYRDSRQEVTGLVVNRKVNIRNEYRHHVRAMVHRLFSTGNFDFEQTVVDEKGNSTKTKTPGTLSQLHGMLGFIHGIDVYNKDRLHTPHYDHQHSKLPRSKETIYRRFLLFKEFYAASAPVIICEGKTDNVYLVHAIRRLASDFPKLAAIEKDGAIKLMTRIFRYSDTSTGKILGITGGGPCLKNFINLYRAEIKQFTAPGRFHPVILLVDNDSGANEIYSTLKQIVKPPPSRNDPFVHVFGNLYVVPTPLLPGGGQSMIEDFFDSGIKSSVVSGKTFHPDSDADTETHYGKVIFAHKVIRTNADTIDFSGFKEILANLTAVIDEHAKRFPS

SEQ ID NO: 924 - protein, 586 aa, Halothiobacillus sp.
  source 1..586: note = Related to NCKJ01000107.1
MTHLDGLRSAKSFHDIASLLGFKPRALAYIIYKIPVDQRYESFDIPKKRGGYRKISAPNSKLKLVQQRLANILQNCVEELNKSKRINDHISHGLKRKRSILTNAKKHRNRRYVFNIDLNDFFGSINFGRVRGFFIKDTNFKLEPNIATILAQICCHDHSLPQGAPTSPVISNLIGHILDIHLVKLASTNGCSYTRYADDITFSTNKRNFPENIAKQENINIHDWAPGHDLDQLIKISGFTVNPTKTRMQYCDSRQEVTGLIVNKKINVRSDYRHTVRAMVHHLFTHGFYYLPQNKPPKETEISEENKGTMDQLHGMLGFIDSVDLYNKKNASSAVVPRTEKQKLTSKESIYRRFLLFKLFYKAKAPVIICEGKTDNIYITHAIRSLAKNHPNLASINNDGSIQLKVRLFKYSETSTGRILGINGGTGELTKFIPLYHNETKKFKALGCDQPIIIIVDNDSGSNGNGRTFNAVRAIKKDADPKHAPFTHITQNLYLIATPLSLDGSDSMIEDFFTPETLSIEVGGKTFNRGNGINLNKEYGKNIFAQHVVKTMADSIDFRGFNPILSTIETVITTHAKTITSESEET

SEQ ID NO: 925 - protein, 572 aa, unidentified
  source 1..572: note = Related to JYOD01000041.1; note = Burkholderiaceae bacterium 16
MSLLAELKEATTIHDIASLLGFKTAALSYILYVKSDASKYKTFDIPKRSGGVRQISAPYSDLKLLQRRLADLLQNCADEITKNQGRGDEGKNPDRISHGFRRRRSIITNAKQHCKRRHVFNIDIENFFGSINFGRVRGFFIKDNNFDLNPKIATILAQIACTNGSIPQGSPCSPVISNLIGHILDTHLVRLAKRAGCTYSRYADDLTFSTSLRDFPDTIATRCPVNEHDWQPSHELERIITQCGFSLNNSKTRMQYQEARQEVTGLVVNKKVNVRSAYRRTVRAMVHQLFTTGKFHIPGTPETQGSLNQLHGMLGFVDGIDLYNRSLRAKNSGSLGDKEKMYRQFLLFKEFYSADVPVLLCEGKTDNVYITHAIRSLADKYPKLATKKTDGSVTIDFRRFRFTGTSTGRILRLQGGTPDLKAFAELYREESVRFKAPGMKHPVILLIDNDDGARRIYGFIQGITGKRPDGSESFVHVFKNFYVCATPLLAGAKESKIEDFFDPKTLDTKIGAKTFNSKNEIDTAMHYGKAVFAYKVVEAHADKIDFSAFAAIFDNLVKILDYHAAKFVTETA

SEQ ID NO: 926 - protein, 605 aa, unidentified
  source 1..605: note = Related to NKIH01000004.1; note = Burkholderiales bacterium PBB6
MSQLTALKSASTLHDVAAILGFKPSALSYLLYVCSEATKYRTFDIPKRSGGTRQIAAPVGPLKLLQRRLADVLQNCVDEINRTNKRSDDDKQPDCIAHGFKRKRSIITNARQHRNKRFVFNLDLEDFFGTINFGRVRGFFLKDKNFALQPKVATILAQIACYQRALPQGSPCSPVISNLIGHVLDIHLVRLATLTGCTYTRYADDLTFSTNKQAFPSMVARSAVGNEHVWEPGKELGRLVTKSGFAINTNKTRMQYRDSRQEVTGLVVNSKVNVRQEYRHTVRAMVHRLLSTGSFDFEYTTTDSAGVKSTIKTLGRLTQLHGMLAFIDGVDLSNKSVLPKASGISLTSKELMYRRFLLYKDFYAATTPIVMCEGKTDNVYIAHAIRSLATLYPKLATVGSSGKITLTIRRFKYPGKKTRKHQSRNAGNSTGRILGVNGGSNDVGNFMRTYAAEIGRFRAPGKLHPIIVLIDNDSGAAPVYNTIQRLTGTKPTGTEPFIHIIGNLYVVPTPLLTTKASMIEDFFDSATRAIQYKGKPFDPSNKFDSKTHYGKADFAYKVVQPNADKIDFNGFKAILDRFSDVIDQHAKTHNAVPLSIPAVAAAAAP

SEQ ID NO: 927 - protein, 602 aa, unidentified
  source 1..602: note = Related to JACZJU010000112.1; note = Burkholderiales bacterium
MSQLNALKTATTLADIAKLLNSEASGLAYVLYKVPEALKYKEFDVPKRYGGTRKISAPSDALRLLQQRLSNLLQNCLKEIEESGGRRHDVSHGFKRGRSIMSNGESHRRKRYVFNVDLKDFFPSINFGRVRGFFIKDKNFLLSPKAATFLAQIACYKNALPQGSPCSPVISNLVSHVLDTHLVRLAAKEGCRYTRYADDLTFSTNKTEFPKSIAKRTDGAPHDWIPGAALVKLVEKSGFAINPSKTRMQYHDSRQEVTGLVVNRKVNVRSDYRRTVRQMTHRLMTKGNFESVHKMVNSDGTKSVTKIPGTVPGLHGMLAFIDQIDLYNLKQVEKGLADSDKVKERIKLATKESVYRRFLLFSQFYAAPKPIVLCEGSTDNVYLVHAIRSLVADLPTLATKLPSGEIEINVRFYRYFKRRKKKLANEHSKAISSTGRILDLKGGSGELLKFAKVYKTHLAKITAPGAYQPVILLIDNDKGANDMFGYIKGVTQIKEPKNEPFVHLLRNLYVVPTPLTPDKPNATMIEDFFSDDWKKTLVEGKPFNPEKDHEDHTCYGKVIFAHRVVRPNAEKIDFSQFKQLLLNISSVIESHRKTHPPPGKAS

SEQ ID NO: 928 - protein, 344 aa, unidentified
  source 1..344: note = Related to SHXF01000114.1; note = Betaproteobacteria bacterium
MSQLKAIKTATSLAEIAKLLEFETSSLAFILYKLPDALKYKEFDVPKRYGGTRTISAPVDRLRLVQQRLSNLLQNCLSEIENNGGRKHDVSHGFKRWRSIMSNGENHRKQRYVFNVDLQDFFHSINFGRVRGFFIKDKNFLLNVKVATFLAQIACYKNVLPQGSPCSPVISNLVSHILDTHVVRLASKEGCRYTRYADDLTFSTNKTKFPASIAIRAGSAPHNWIPGTTLVKLVEKSGFAINQSKTRMQYCDSRQEVTGLVVNRKVNVRNDYRRTVRAMTHRLMTKGDFEFVHKTVSGDGTESVSKIPGAATRLHGMLAFIDQLDLYNMNQVKKGLIDTDKVTE

SEQ ID NO: 929 - protein, 589 aa, Sulfuritalea sp.
  source 1..589: note = Related to JADJFI010000002.1
MPRLAILKGAANLSDVAHLLGFKPSSLSYLLYKLPAPLKYTEFDIPKRHGGLRKISAPIDSLKNLQQHLSQLLQDCLDELEEAGLRKNNSAHGFTRHRTIMTNAMEHRNRRFVFNADIKDFFPSINFGRVRGFLIKDKHFALNPAVATVIAQIACHNNALPQGSPSSPVISNLIAYVLDTHLVSLAQHTGCHYTRYADDLTFSTNMPNFPNAIAVCVGGNAHNWAAGQSLTAIVSKSGFSLNSAKTRMQYRDSRQEVTGLVVNEKINVRSEYRHKLRALTFRLINKGEFSIIHKSVDILGNITTNVIPATPAQLKGMLAFVDAVDIAQRDDAIRQFHDKHQDGQIKYERYKLVRKENTYRRFLMFNEFFATPKPVVLCEGPTDRVYLRCAVKRLAADFPTLATINAAGEVSLNFRRYKYADSNTNRILKIHGGASQLMGFISEYRSAAEKFLAPGPFEPVIVLVDNDDGPEELFKYLAKVNKVKAPRTEPFVHVCANIYVVPTPLGPNGEPTCIEDFFPSHLFKEEVAGKTFNPKKKHGDNEKFYSKEIFAEKVIAKKAGTIDFDAFKPLLSNIERAINTHRKNHPKPK

SEQ ID NO: 930 - protein, 590 aa, Janthinobacterium sp.
  source 1..590: note = Related to FAOS01000003.1
MILLAKLRSAKTIHHLAAILGFKASALAYILYGKGGASNYKKFDIPKRYGGARHISAPMPELKLLQSRLSDVLQNCLAEINEAAGRSDKIFDRVNSRADRISHGFRRHRSIITNAREHRNRKFVLNVDLKDFFGSINFGRVRGYFIKDKKFLLSPEIATMIAQIACYENTLPQGSPCSPILSNLIGHVLDVHLVGLAAKKGCVYSRYADDLTFSTSKPVFPSSIASSDPTNEHLWLPGKELVRLVEKSGFEINPSKTRMQYRNSRQEVTGLIVNKKVNVRSEYRNTVRAMVHHLFTTGTFEILQRVSDGKGGVTISQVPGKVNQLHGMLGFIDGVDLYNKKLIGVAKGASNLPSKETMYRRFLLYKEFYATTSPVIVCEGKTDNIYILHAIRSLAATYPKLATTNADGTIKLNVRIFKYSGTSTGRILKMHGGTGDLGNFMLDYRTECARFKAPGQQSPVIFLVDNDSGASSIYNIVKQITKKKVTGTEPFVHVTGNLYLCATPLIAGATESMIEDFFDSATKAITIGGKTFDPDLDDETAKHYGKVVFAHKVIRANANKIDFKEFNPILSNIVAAIDAHSEKVVSAGVP

SEQ ID NO: 931 - protein, 576 aa, Bordetella trematum
  source 1..576: note = Related to NZ_CP036357.1
MWATHPPPFMTQLKKLKAAKDIYDISTLLNYKAGKLSYILYVIDESDKYSSFEIPKKGGGTRTIKSPIPKLKRLQKNLSNLLQNCLDELRSENSYVDPMSHGFEKKRNIITNAEVHRAKRYIFNIDIKDFFGSINFGRVRGFFIKDNRFELDPKIATIIAQICCHENSLPQGSPCSPVISNIIGHILDVRLLSLAIKNGCSYTRYADDITFSTNKKKFPSSIAAKDDDGHGWSVGKELSDILKTNKFSENKNKTRMQYKTSRQSVTGLVVNKKINVRSEYRKQVRAMVHSLFSKGTFFIPKAGVAPMDEFPEGTLNQLHGMLGFIDSIDQNNVLRQGLEAASITQKEKTYRKFLLYKDFYLSTRPIILCEGKTDNIYLKCAIKSLAGQHQLLGERVGVDSFKMKVRFYKYAETSTGRILGLSGGTGDFPKFINSYLSGISKFTALELNHPVIMIIDNDSGAKGIYSKLREILNRQISPAEEYIYAGENLYIVPTPIAKHGQHSMIEDCFDKDTKKILVDGKKFNPDDKASIDMFYGKSVFATQVIERFSEKINFNGFSVFLSRIESAINHFHNMKG

SEQ ID NO: 932 - protein, 558 aa, Bordetella sp.
  source 1..558: note = Related to NZ_NEVN01000010.1
MATILSFQPKTLSYLLYVASDTQKYRSFELPKKTGGTRTISAPTDKLKRLQSNLADLLQRCLDDLKISAEYSDSASHGFQRGKSIISNAAQHRAKRYVFNIDIANFFGAINFGRIRGFLIKDTRFALHPTIATIIAQIACRENSLPQGSPCSPIIANLVGNILDRRLIALAAKYGCTYTRYADDLTFSTNKKVFPPRIASRTTDHTWAAGEELLAVLQASRFSPNPQKTRMQYKTSRQEVTGLIANKKVNVRSDYRKRVRAMVHRLFSTGSFNLPENPTPGAGRTRDAEPGTLNQLHGMLSFIDSVDQYNIQRSKLKLDQLSQKEKTYRKFLLYKDFYLAEQAIILCEGKTDNIYLRNAIKGLPNDFPLLGSNDSPDQFKINVRFYRYAESSTGRILGLSGGTGDFPNFINAYLTALAQFPALKIRHPVIILIDNDSGARPLYSSLAQRLHRKIDPRESFIHVESNLYVVATPIIEPASESMIEDFFDETTKKLVVKNRHFDPRDDADQRYFYGKNTFATEVVERFSDSIDFSGFSELLCRIEMAIRHFHSAHSPANS

SEQ ID NO: 933 - protein, 577 aa, Bordetella sp.
  source 1..577: note = Related to NEVU01000001.1
MTQLQKLKEAKNLHDVATLLNFKPNKLSYLLYIAEDEEKYKTFEIAKRSGGTRSIAAPDPRLKQLQRNLSVLLLNCLDELREKKLYKDDMAHGFLRKKGIVTNAVTHRAKRFVFNIDISDFFGSINFGRLRGFLIKDDRFELNPNVATILAQIACRNHTLPQGSPCSPVISNLIGHILDVRLAGLAAKNGCRYSRYADDITFSTNKKEFPQAIAMREPDSHAWVVGAELEVVLSANNYSLNTKKTRMQYCDSRQTVTGLVVNRKVNVRSEYRRRVRAMVHRLFTTGQFAVPSTKVAATAAGAVSSEEPGSLPQLHGMLGFIDGVDQYNIRKHGLRLEELSEKEKTYRKFLLYKDFFLAERPVVLCEGKTDIIYLKNAVRQLAAKYPKLGEQTGENKFQHNVRFYKFADSSTGRILGLSGGGGDFQKFAHAYLSEVGQFPTHPIAGLKHPVIIMMDNDSGANAVCSYALKRTKISVDRGGDFFRLGENLYLVLTPFLHGEKPSTIEDFFDDAVKLRTVEGKAFDPGDEHDTGTHYGKAIFAKEVVEKYADEIDFNAFRGILSRIEGVMSDYYASRLAL

SEQ ID NO: 934 - protein, 572 aa, Quisquiliibacterium transsilvanicum
  source 1..572: note = Related to NZ_JACHGB010000002.1
MSKLESLRKASTLHDLARLLGFKAKALAYVLYVIPEAKKYTEYKIPKRSGGARTIQAPVAELKLLQRRTSNLLQDCIGELADKGQRSDPFVHGFRRHRSIITNASRHRNRRLVVNLDISDFFGSINFGRVRGLLIKDDAFSLNPSVATVIAQIACHENALPQGSPCSPVLANLVARPLDLRLLAHAKRRGFVYTRYADDITFSTRLKNPPAAIVQHKPGTGLHAWEAAPTLVRAIEKSGFSVNASKTRAQYRDSRQDVTGLVVNRRVNVPREYRRQVRAMVHRLTTTGAFEIRKNVLAAGSTTLRAIPGNFEELQGMLGYIASIDAAAEHNRKDNAIAARSQRETYRRFLFYREFFCVDRPVIVCEGKTDNVYLRSALRKLAPLFPSLASVTASGELRMNVRLYKADGKKTSSLMGLTGGAAPLLAFLREYRKASETFVSKGNRFPLIVVVDNDGASKDIFSFIKKITGSHKMIDGSEPYYRLMPMVFVVPIPKPPSSTTAAIESLFDSSLLSTIHKGKIFHGSDKGFDEDKHYTKSVFAKEVVEPHFDKINFDGFKPLLDAISEVVGLSSP

SEQ ID NO: 935 - protein, 579 aa, Acidithiobacillus ferriphilus
  source 1..579: note = Related to JAAZTX010000005.1
MSRLAELKASTTLSDVAHLLGYKPKAVSYILYMLPTDQKYTTFEISKRNGGQRTINAPVEKLKVLQRRLADLLQDCLDEINNAKGLKDRAAHGFKRKLSIITNARQHRHRRWVFNVDLENFFPSINFGRIRGFFIKNRDFQLHEKVATVLAQIACHDHSLPQGSPCSPVISNLVAHLLDMRLVKLAQIAGCTYSRYADDLTFSTNKKQFPLEIGWPATDQGPDSHIWLPGDALRKTINRAGFTINPNKTHLMYRTSRQRVTGLVVNKKINIRWEYRHNVRAMVNKLVNTGEFELNGIVHKDGNVSIEKRPGRLNELHGMLGFVNDIDVYNSRQTNDKPPGFSSTERVYREFLIYSIFYAAQMPVILCEGDTDNVYITHAIRSLAREFPDLAEVRADDKIVLKVRLYKYPKSSTSHLLGLGDGGSSVLSKFISEYKKEISRFKAPGLAHPVIIVYDNDDGARSIRNTIKQITKSTPKVTNPFDHVTKNMYAVPTPIPEGEAASKIEDFFGEMIKSTVVNGKIFNDGNNIDATQHYGKRVFAHKVVRPKAQMIDFTGFRQLLSNIVEVIKYHKAAVVMPPP

SEQ ID NO: 936 - protein, 582 aa, unidentified
  source 1..582: note = Related to QHVH01000010.1; note = Blastocatellia bacterium AA13
MSRLASLKAATSLSDVAKLLAFKPKAVSYILYKQPAATKYRTFQIPKRNGGERTIKAPDEALKLLQRRLSELLQDCVDEINTVKQRKDRTAHGFKRKRSIITNARQHRHRRWVFNVDLEDFFPSINFGRVRGFFLKNRDFELHEDVATVIAQIACHENALPQGSPCSPVISNLVAHLLDMRLVRLASDAGCTYSRYADDLTFSTNKREFPANIAVSSGNEGDASHLWLPGEALRKVIKRTGFRINAKKTHQMYRASRQNVTGLVVNKKINVRWEYRHNVRAMVHSLVRTGAFQILGVTSKDGHAVLEKRPGDLNELHGMLGFIYSIDVYNKTHPSDAFAEGMSASEKVYREFLIYSTFYAAEAPIVICEGETDNVYLTHAIRSLAAEFPSLAEVRSDGKIHLRVRLYKYPHSSTARLLGLNDGGSGVLSKFIAAYKKETKHFTAPGLTDAVVILYDNDAGAKGIRQAIKNVSGVKATGDEPFVHVIKNLYAVSTPVEAPATQSKIEDFFDATIKATVIDGKMFNEGDGFNADQHYGKKVFAQQVVRSKADIIDFTGFRALLTNLTEAINSHKASVVPQPPEP

SEQ ID NO: 937 - protein, 576 aa, unidentified
  source 1..576: note = Related to JADBLS010000169.1; note = Chloroflexi bacterium
MSRLAALKASTSLSDLARLLDFKPQALAYILYKQPEAKKYTTFQIPKRNGGQRTIKAPVDALKLAQRRLSHLLQDCLEEINTNQNRKDRTAHGFKRKRSIITNARQHRHRRYVFNLDLEDFFPSINFGRVRGFLIKNRDFALHEHVATVIAQIACHENSLPQGSPCSPVISNLVAHLLDMRLVSLASAAGCTYSRYADDLTFSTNKKEFPTEIAVPLGTEGGESHLWGPGDELQKVIERMGFRISAAKTHLMYRTSRQDVTGLVVNEKINVRWEYRHNVRAMVHRLITTGAFEIYGVTQRDGKAALEKRQGPLNELHGMLGFIDSIENYNKKNTHDSPSDRPSSMELVYRQFLIYRNFYAAESPVVICEGDTDNIYLTHAIRNLAAEFLDLAEVKEGKIRLKVRLFKYPHSSTARILDLGDGGSGVLSDFIGTYKREIGHFTAPSSQSPVVIIYDNDSGARGIRSAIRSVSKVQPTGTEPYVHVVKNLYALATPLVGTTTESKIEDFFDDAIKATVIDGKTFNDKNKIDAAKHYSKTVFAHRVVRPNADTINFSGFRPLLTNLVAVINAHKASIAV

SEQ ID NO: 938 - protein, 590 aa, unidentified
  source 1..590: note = Related to CP047423.1; note = Candidatus Nitrospira kreftii
MSRLAGLKAATSISDLATLLGFKPKAISYLLYKQPSEYKYTTFQIPKRSGGQRTIQAPVERLKLLQRRLSDLLQDCHDEINASAKRKDQIAHGFKRDRSIITNAKHHRNRRWVFNIDLEDFFPSINFGRVRGYFLRNRDFMLQERVATVIAQISCHENSLPQGSPCSPIISNLVTHVLDMRLVKLASECGCTYSRYADDLTFSTNKKDFPFQIAGPSAISADRAHLWLPGEPLKQVIERTGFRVNSKKTRMMYRDSRQNVTGLVVNKKINVAREYRHNIRAMVHRLVTTGQFEILGPVTRDKKVVLEKRPGTLNELHGMLGFVDSVECFNHSRTDEYSASLKATYRRFLFYSTFYAASAPVLICEGETDNVYLTHAIVSLASEFPELAELAGAGKTRLKIRIYKYPRTSTARILGLKDGGSAVLCNFIKDYPKEVARFSGPGLAQPVIVIYDNDEGCKGIRSVIANISKVKPTGTEPFTYVYKNLYAVPTPLQEGVTSSKIEDLFEARIKETIIEGKTFNEGNSLDPHKHYGKKVFAHKVIRPNADKVDFTGFRSLLTFPRFHRHLYKEEFDEIGGQHEHQDQTAVYGRV

SEQ ID NO: 939 - protein, 579 aa, unidentified
  source 1..579: note = Related to JACQSX010000029.1; note = Acidobacteria bacterium
MSRLNNLKSTATLSDLARLLQFKPSGLSYILFKQPAATKYKTFEILKRKGGTRTIKAPSNPLKLVQQRLSILLQDCVDEINKAKNRKDRIAHGFKRKRSIITNARQHRNRRYVFNIDLEDFFPSINFGRVRGYFIRDRSFALNEDVATVIAQIACHENALPQGSPCSPVISNLIAHVLDMHLVRLASKVGCTYSRYADDLTFSTNKKDFPADIAKPSETEPHLWLPGAELQRLIAHAGFRINTAKTHMKYRTSRQEVTGLVVNQKINVRREYSHNVRAMVHSLLKEGSFELYAATEKAGAVTIEKRRGTVNELHGMLGFIDSIDLYNKKNAPESKDSGRLSSKELMYRQFLIYKDFYIAEAPVIICEGKTDNVYLTHAIRRLVAEFPDLAEITTQSKIRLKVRLYKYQRSSTARILGLRDGGSSCLTKFIETYKKETDKFTAPGQKNPVIILYDNDSGASNIRSLLKQTFKLTVGTEQFVRVVRNMYVVPTPLLNGANESKIEDCFDAATKATVIGGKTFNDKNGLDTAKHYGKKIFADQVVRDREDSINFEGFRQLLTNLVAVIQSHTTAVSGASAPQ

SEQ ID NO: 940 - protein, 578 aa, unidentified
  source 1..578: note = Related to JADZCM010000017.1; note = Bryobacterales bacterium
MPRLASLQSAATLSDLARLLRFEPSGLSYILYRKPAAKKYSTFEIPKRHGGTRTITAPDDDLKLVQQRLSDLLQDCVDEINTAKNRKDKLAHGFKRKRSIITNARQHRKRRWVFNLDLEDFFPCINFGRVRGFFLRDHNFQLQKHVATTIAQIACHANGLPQGSPCSPVISNLIAHVMDMHLVRLSSKVGCTYSRYADDLTFSTNKKEFPPEIAKPSATDPHLWLPGPDVQALVNHAGFRINNSKTRMNYRTSRQDVTGLVVNEKINVRHDYRHNVRAMVHRLFSTGEFELWGIIDKGGTKTLEKRPGSLDELHGRLGFIDSIDQFNKKIASDVNYTRYPAGRESMYRQFLIYRDFYAASKPVILCEGETDNVYLTHAIRSLAASFPELAEIDSNGKRHLKVRIYKYARSSTARILGLKDGGTGHLKHFIGTYSRETDRFKAPGLKQPVIVLYDNDNGANPIRSAIREVSKKAVKATDAYTHVVRNLYAVPTPLLNNAKESKIEDFFDAAIKATVIGGKTFVAANDYDSTKHYGKKIFAHQVVRPKADTINFKGFGPLLTNIARIVKDHAAVVGATAP

SEQ ID NO: 941 - protein, 633 aa, Achromobacter sp.
  source 1..633: note = Related to JABBJN010000001.1
MTKLEQLRRATTLRDLAELLGVTAPGLAYILYHKPRDQLYRAFEIPKRKGGTRSISAPADELKTIQKKLSSLLQECWAEIGDGKNSGRHPGRKGRVAHGFLPGRSISTNARQHRRKRFVFNVDLEDFFGSINFGRVFGLLRQDNNFKLQPRVAAVIATIACFENKLPQGSPCSPIISNLVARILDARIAGLAAKVGVNYSRYADDLSFSCNGRIFPPEIAKKIEGDDHSWVVGKALNSVIEKTGYRVNLSKTRMQYEDSRQEVTGLVVNRRVNVRSEYRRAVRAMGHRLFSTGAFDVPKVALTKGNDFPMQSVQGTIPQLHGMMSFVASIDRLHREAALSRGDAIEETSAEKLYRNFLYYRFFYKNDAPIILCEGITDNIYLRCAIRALRESYPLLVKPKAEPGDLLIKFYKYRGAAVDTVLKLKDGGAGNLQNFMVAYKKACQLFLGAGKENPVILIVDNDEGGRKVMGAAKELSGKAYDGSQAYLHVFGNLYLIATHPTAVVDGGQKKMAQKGARPSDSCIEEYFSSEVRSTKLNGKTLTLKNDSSGVAHYGKMDFAKHIVENLRGADSFSGFARLLDRINLVVTAHASSSTEAAVSGAAASQLSNGGLGAAIPPTGETIAGFTEIAEAAD

SEQ ID NO: 942 - protein, 593 aa, Massilia sp.
  source 1..593: note = Related to NZ_CP088952.1
MTQLAALKKASSLNDVADLLGYKPAALAYILYQISDENKYTSFSIPKRSGGVREIKAPIDKVKALQKKLANVLDHCLDELNAVHQYRYQSSHAFRKNKSIFTNASNHRAKRWVFNIDLENFFTAINFGRVRGYFIRDRQFELAPSIATILAQIACSGNSLPQGSPCSPVISNLIGHILDVHLAKLAARVGCRYTRYADDITFSTNDPQFPSAIAICDVEDSRVWHIGNELQCLIESSGFAVNIKKTRMQFKDSRQDVTGLIVNRKINVKKEYRRTVRAMVNRLLTVGHFERKRRVKNNAGEWVLADVAGTAEELHGMLGFIESVDKYNSSLPLKKGGKRKEGEKTGVDEKRLTASTGKDNLYRRFLLYKEFFAAPCPVILCEGETDNVYLIHAIRSRAADFPMLAKVSETNEITITPRLYKYVKTNSGRMLGLGSGGTGDLGKLIKNYLSELHRFVRPKQQHPFIILIDNDAGAIGGGRPLEVLRKKGVDIDRTAPYIFVMGNLYLVPTPLLGKEESMIEDLFGQNVLDESLDGKTFCRKNKADNGRHFGKTVFAHKIVRPNADHIDFSGFDPLLINITAVIEDFYKKHPRVA

SEQ ID NO: 943 - protein, 606 aa, Massilia sp.
  source 1..606: note = Related to NZ_CP080379.1
MTQLAALKASTSLIDIAHLLGYKPSALAYILYKIDDEVKYANFEIPKRSGGKRLVSAPIPELKALQRKLAELLENCSIELTEAGKHDDKSSHGFKKGKSIFSNAKGHRNKRWVFNIDLENFFGTINFGRVRGYFIKDRNFQLSPTVATIIAQIACHKNCLPQGAPSSPAISNLIGHILDIHLSKLAAKFGCHYSRYADDLTFSTNKPSFPHQIASPDSIDPQAWTPGSELSRLIDNSRFSINSLKTRMQYRDSRQDVTGLVVNKKLNVKAEYRRLVRAMVNRLLTLGHFEREKRLSDEKGNLVLTKVPGKTDELHGMLGFIDSVDRYNLNLSIPAGGKVHDEKKKAAADEKNTRPGLTGKDHLYRRFLIYKEFFAPSRPVILCEGDTDNIYLIHAIRSLSAKYPLLAKLQNEKLEILPRIYKYVDTSTGRILGLNSGGTGDLGKLIRSYLAEINRFIRPANQHPFILLVDNDKGAIGGGRPPDVVKKVVGKEMDRSAPFLYVAGNLYLVPTPLLDGKLESMIEDFFDDKTRSRDIDGKVFNPANKADNSKYFGKKVFAHKVIRPNAEDIDFSRFSSLLDNITLALEDFYKKHPHSATVDKPAKKAA

SEQ ID NO: 944 - protein, 605 aa, Massilia atriviolacea
  source 1..605: note = Related to NZ_RXLQ01000009.1
MTQLAALKAASSLHGIAHLLGFKPAALAYILYKLNDSQRYKQFEIPKRSGGKRTIKAPTAELKLLQRKMASLLENCISEINVANKRADLFAHGFKKGRSIFSNARPHRNRQWVFNIDLENFFGSINFGRVRGFFLKDRDFALHQGAATIIAQVACVDNALPQGSPCSPIISNLIGHLLDVHLAKLAASCGCHYSRYADDLTFSTNAPQFPSRIATRTRGAAGDEWMPGAELHRIIQHARFAINPQKTRMQFKDSRQDVTGLVVNKKLNVKTEYRRSVRAMVHRLLTHGHFERTKRVDDGAGNHVLDAVKGTTAELHGMLGFIDSVEHYNRNLVLPKGGKPKVEKKKKGTEPNKPRVALTGKEVLYRRFLLYKEFFATSNPVLICEGETDNIYLVHAIRSLATHFPLLATVVKPGEIKIIPRIFKYVETSTGRILGLGSGGTGDLGNLIRQYDKEIKRFVRPATQHPFILVVDNDAGAVGAGRPLQASKQVTGLDVNRHAPFTNVCGNLYLVPTPFLAGAAQSMIEDFFTKETLDETIDGKSFCASNKQDSAKQYGKKVFAHKVVKVKADTIDFKGFFKLLENITLAIEDFYKKHPSAPITSAQAI

SEQ ID NO: 945 - protein, 570 aa, Variovorax sp.
  source 1..570: note = Related to JAHCDN010000001.1
MSQLIALKSCINLSDVAVLLGYKPSTLSYLLYKIGEESKYSSFEIPKKGGGTRRIEAPQKELKLLQRKVADLLQNCFESADLTSPKYKSNPVSYGFIRGLSIIDNAQNHRSQRFVFNIDIQDFFGSINFGRVRGFFIKDRDFSLQPQVATVIAQIACFKNRLPQGSPCSPVISNLVGHILDMHLIKLAARTGCRYSRYADDLTFSTSKRDFPRQVAFYDEEKGLWHVGDELKRLLELSGFTLNSGKTRMQNRDSRQQVTGLVVNKRVNVSKEYRKTTRAMVHRLFTKGSFFFTDESNLEVKAQKESSDIGRLHGMLGHIYHVDTKCKTKIESSTNPPQKNASTYRRFLIYKELYATNKPIIICEGKTDPVYLVHAIRSLHRDFPMLAYRDAENQIRLSVRLLKYADKSMASILGLNGGVGDLRTFIDSYRSDIKRFNAPGKFHPVIILIDNDDGAKPILSIVKSINPNSTFDRDSFSHIVGNLYVVKTPLLGSEKSCIEDFFDGDLKSTMIDGKQFSLEKDANPEHYFGKVVFAHKVVRPQADKIDFSNFRHILKSMQDIITEFSSQKRI

SEQ ID NO: 946 - protein, 585 aa, Burkholderia cenocepacia
  source 1..585: note = Related to NZ_JAGSTT010000006.1
MSQLALLTSATELHQVASLLNFKASALSYVLYKLPAAQKYTTFQIPKRSGGMRTIQAPCPQLKILQHNLSNTLQNCLEEINAREKRKNSFSNGFTRNRSIVDNAAPHRTKRFVFNIDLRNFFGTINFGRVRGFLIKDRNFRLEPKIATILAQIACHNNELPQGSPCSPVISNLIGHVLDVHLVGLARRSGCTYSRYADDITFSTNKPEFPADIATRTEPSHQWEIGEELKRLIKLSGFDVNSEKTRMQYCDSRQEVTGLLVNKKVNVRPEYRRTVRAMVHRLFTTGEFHIPEVVDDGTGKASITMTPGEMSKLHGMLGFVDQIDLYNKKNRPSGSNNDNLSSKESIFRDFLFYREFYSCDKPVLLCEGKTDNVYLKHAIHALAAHFPSLASVNAKGEVTRNIRIFKYTDSSTGRILGINGGTAPLSGFMRTYADATSRFKAPGENNPLILVLDNDSGVKGKGKIFNAVKQICKVEMTGAEKFVHVAGNMYVTLTPLLPGGADSMMEDLFDLNTKATIIDGKSFNPNNNLDSASHYGKHVFAQKIIAANPQSVDFGGFTQLLDNISAVIDAHKIKVSERQTANAIN

SEQ ID NO: 947 - protein, 583 aa, Paraburkholderia sp.
  source 1..583: note = Related to SORC01000001.1
MPNLANLKAAASRQDLAELLGVKAGMLSYAIYKIPEANRYSRFEIPKRHGGIREILAPTPELKLIQRRLSVLLQDCAAEINSAHGHAEDGTRFGIAHGFKRHHNIMTNGRVHVTRRFVFNVDLHDFFGTINFGRVRGFFLKDKNFALHADVATVIAQIACFDNKLPQGSPCSPVVSNLLAHSLDIQLVRLAAKNGVSYTRYADDLTFSTNKPSFPAEIAAPGDTHSWKPGADLERIVANSGFSFNPSKTRLQYRDSRQEVTGLTVNRKVNVPATYRYTVRAMVDCLFRTGKFQFIYKKKDEQGKVVLELSHAGRNEQLHGMLSYIDQVDLFNQKVCKENGREPESTTGRVELFRRFLYFDTFYAAPEPIVVCEGKTDNVYLKCAIKSLVAKYPKLVAAGSPPKLKLRFFKYAETRTGQVTDLTGGVGGICKLLKSYDEDVKEVFKAPVSKFPVIVLIDNDSGAHGIYQVIAGINKKPKPQGLADFIHVTSNLYVVPTPFGPSKSHTAIEDFFDKPTLETKLNGKTFSRESKLDETSEYGKAAFARDVVAKNAGTIDFSGFQAILDRVIKVLDDYEIRFKNAKK

SEQ ID NO: 948 - protein, 618 aa, Paraburkholderia susongensis
  source 1..618: note = Related to FXAT01000001.1
MACEIKVPGFAPRISSALSELRRLRKSIREPLPLRHMSSLQKLKAAAARRDLAIILDVSPRNLAYILYKTAPDTKYTRFTIPKRHGGEREILAPSLGLKLVQQKLASVLQDCSDEIALSHVKPGNGRRHGIAHGFKRHHTIMTNGRVHVTRRFVFNADLHDFFGTINFGRVRGFFIKDRNFALHPDVATVIAQIACFENKLPQGSPCSPVISNLLAHPMDILLSSLAAKHSASYTRYADDLTFSTNNPTFPPEIAALNGDHTWVPGAELDRLVSRSGFAFNPSKTRLQYRDSRQEVTGLTVNQKVNVPATYRYTVRAMAHSLFTTGAFEFVYKKRDTNGTIILENRKAGENKQLLGMLSYIDHVDRFNHKLAIENGREFESTAGRVALFRRFLYFDLFYGLREPIIVCEGKTDNVYLRCAMKALSATYPSLVEAGAPPKLKVRFYKYAETRTGEITELTGGVGGICKLLKHYHTDVQHCFKAPAPRFPVIVLIDNDKGAHSVYEAIAGITKKKKPQGLADFIHVTSNLYVVPTPRGPNNSETAIEDFFDEATLKEELNGRKFDRSNHTDDKPGFYGKGHFARDVVAKKAGTINFDGFTAILDRIIKVTDDYQAKLAKP

SEQ ID NO: 949 - protein, 581 aa, Paraburkholderia guartelaensis
  source 1..581: note = Related to SMOD01000073.1
MRMINLTNLKSTTSRRDLSKLLDVKPGMLSFAIYKNPEAVRYRRFEIPKRHGGTREILAPASELKLLQQRLSVLLQDCVAEITAARGFAEDGAHFGIAHGFKRYHTIMTNGRVHVTRRFVFNVDLHDFFGTINFGRVRGFFLKDRNFALHPEVATAIAQIACFENKLPQGSPCSPVISNLLAHSLDIQLARLAARHGASYTRYADDLTFSTNKPAFPAEIGVLDDAHNCSPGAELERIVTRSGFSFNPAKTRLQYRDSRQEVTGLTVNRKVNVPASYRYTVRAMVDRLFKTGAFEFIYKKKDAQGNVVLERRVAAKNGQLLGMLSYIDQVDRFNQKICETNGREPESTAGRVELFRRFLYFDTFYATRQPVIVCEGKTDNVYLRCAIKSLAAKYPNLVTPGVQPKLNVRFFKYTETRTGQVMDLTGGVGGICKLLKSYSEDIEGIFRAPAPTFPVIVLIDNDKGAHGVYEVIAGITKKPKPLGLADFIHVTSNLYVVPTPFGPKKAHTAIEDFFDAFTLETELNGKKFNRNNKLDDSKEYGKAAFARDVVAKNAATIDFTKFHAIFDRVMKVLDDYEARRK

SEQ ID NO: 950 - protein, 580 aa, Duganella sp.
  source 1..580: note = Related to NZ_LMNW01000004.1
MSSLQALKAASARRDLADLLGVKPGMLTYAIYITPEADRYTRSTIPKKHGGDREICAPNNDLKLIQRRLSTLLQDCLDEINVARGHKEDRVRFGIAHGFKRNHTIMTNGRAHITRRFVFNADLHDFFGTINFGRVRGFFLKDKNFSLQPEVATTIAQIACFENKLPQGSPCSPIISNFLAHPLDIRLVRLAAKHGVTYTRYADDLTFSTNKPAFPVEIASPIDSHGWIPGPELECVVTESGFSFNPSKTRLQYRDSRQEVTGLTVNRKVNVPATYRYTVRAMVNTLFKTGSFEFIYRKRGDDGKVTSENREPGTMPQLLGMLSYIDQVDLFNEKLCKDNDREPQPVVGRTALFRRFLYFDTFFSAQRPTIVCEGKTDNVYMRCAIKSLAAAYPRLIGGEKLLVRFFKYTESRTGRVMDLTGGVGGICNLLKSYHEDLKFYFKAPISKFPVIVLIDNDSGAHSIYEAVAGITKKKKPQGVADFIYVTGNVYIVPTPFGPGKSFTAIEDFFDAKTLATELNSKKFNRKNKKEDSEDFYSKAAFARDVVAKGASTIDFGNFKVILDRIEKVLDDYAVRRKTMT

SEQ ID NO: 951 - protein, 595 aa, Burkholderia sp.
  source 1..595: note = Related to QMFZ01000026.1
MRRSIRESFLLPIKMSSLKDLKAATARRDLAALLHVKPGMLTYAIYKSPEANRYRKFEIKKRHGGEREILAPENGLKLLQRRLSTLLQDCIAEINSLHGHVEDEGRFGIAHGFKRNHTIMTNGRAHVARRYVFNVDLHDFFGTINFGRVRGFFLKDRNFALHPEVATVIAQIACFENKLPQGSPCSPVISNLIAHSLDIHLVRLAAKHGATYTRYADDLTFSTNRPEFPPEIATLKDTHSWIPGVDLERIVTRNGFSFNPSKTRLQYRDSRQEVTGLTVNRKVNVPATYRYTVRAMVDKLFKTGQFEFVHKKRDAQGNVVFENRCVGENKQLLGMLSYIDQVDRFNHKLCTDNGREPASTEGRIALFRRFLYFDTFYAAREPIIVCEGKTDNVYLRCAIKSLATEYPRLIDKGTPPKLEVRFFKHAETRTGHIADLTGGVGGICKLLKNYHEDVTEWFKAPVSKFPVIVLIDNDNGAHSIYEAIAGITKKPKPEGRADFIHVTSNLYVVPTPFGPKKKQTAIEDFFDEHTLATQLNGKTFNRSNKSDDSDKFYGKGAFARDVVAKQANTIDFTKFRAILDRVMKVLDHYEESQKK

SEQ ID NO: 952 - protein, 582 aa, Glaciimonas immobilis
  source 1..582: note = Related to JAAOZT010000003.1
MPSLKQLQATTSLRELAPLLDIKPGMLSYLLYKKPKLDLYKKFTIPKRHGGVREINAPEGDLKLLQYRLSLLLQKCIVEINAEHGHAEDDEHLGIAHGFKRYHSIMTNGRAHVTRRYVFNVDLHDFFGSMNFGRVRAFFLKNNNFKLHANVATVIAQIACHENKLPQGSPCSPVISNLIGHTMDIPLARLARDEGATYTRYADDLTFSTNNPSFSHKIAVQGCDQKWLPGESLQRIVTKSGFSFNAQKTRMQYRDSRQEVTGLTVNRKVNVPATYRYKVRSMVDKLFKTGEFEFIYKKLDTLGKEVAFNYQGKRKQLLGMLSYIDQVDRFNSKLCEKNGLEPHPTTGRTTLFRRFLYFDAFFAPVEPIIVCEGKTDNVYLRCAIKNLAAAYPKLVVAGTKPLLKVRFLKYAERRTSQITELTGGVGGVCNLLKHYHDDVRTKFKAPAPKHPVIVFIDNDSGADSIYGAIAGITKQPKPAGRASFIHVIANLYVVPTPLGPKNKKTAIEDFFDKTTLATKLSDKTFSRDNKMENLKHYGKAAFAINVIAKNANTVNFNKFAPLLDRMVAVIDDYAKRLKVPLN

SEQ ID NO: 953 - protein, 580 aa, Nitrosospira sp.
  source 1..580: note = Related to NZ_JXQM01000003.1
MSNLKQLQDATSLRQLAKLLNIQFGMLSYLLFKKPKSKLYKKFDIPKRHGGMREIHAPERDLKLLQYRLSVLLQKCADEIKASHGHVEDEKHWGIAHGFKRHHSIMTNGRAHTARRFVFNVDLHDFFGSLNFGRVRGFFIKDKNFKLHESVATGIAQIACYENKLPQGSPCSPVMSNLIGHTMDIPLAQLAASEGVTYTRYADDLTFSTNNSSFPEKIAYKSGNHTWELGRQLLRIVQRSGFSFNDKKTRMQLQDSRQEVTGLTVNRKVNVTATYRYTVRSMANALFNTGNFEFIYKKLDDSGVEQVYRSKGKPKQLIGMLSYIDQVDQFNRKLWVENGLEPDPTLGRIKLFRRVLYFDKFYALNQPLIVCEGVTDNVYLRCAIKSLAALYPKIVAAGAPPKPMVGFLKYADRRTSEITQLTGGVGGICKLLKNYHEDLGTRFRAPAPKHPVIVLIDNDGGADSVYGAIAGITKKPKPNKKASSIHVTGNLYVVPTPQLPGLSKTAIEDFFDAPTLATVVNGRTFSKENNYDGSKHYGKATFAHEVVAKNANVIDFKNFAPLLERIVAVIDAYGAKLKAK

SEQ ID NO: 954 - protein, 585 aa, Ralstonia solanacearum
  source 1..585: note = Related to NCTK01000001.1
MSILKKLQEAKTRGQVAALLDVKPAMLSFILYKKPKATLYTKFSIPKKHGGTRDILAPEGNLKLLQHRLCQVLQDSLDEINVANGHGESRERQGVAHGFKRLHTIMTNGRPHVARRYVFNVDLHDFFGSINFGRVRGFFIKNKNFLLHEDVATVIAQIACHENKLPQGSPCSPVISNLISHSLDMKLVQLAARVGATYTRYADDLTFSTNNPDFPQYIALRKGTHEWVAGRGLEKIVMKEGFSLNPSKTRMQYRDSRQEVTGLTVNRKVNSPAAYRLTVRAMVNSLFKTGLFEHVRKKKGAAGGISVTKFAGEKKQILGMLSHIDQVDLFNRRLREKNGLEPHNTSGRVALFRRFLYFENFYALDAPLIVCEGKTDNVYLKCAIKSLASSYPKLATSDSLPKLKIRFFKYSERRAGDVIGLSGGVGGICKLLKNYHEDVREKFKAPSPKHPVIVLIDNDSGANSVYEAIAGITKKPKPAGMADFIHVTGNLYVVPTPLGRGGKKTAIEDFFDDKTLSVALNGKTFSRDKNIDETVHYGKVPFAINVVAKNADTIDFTKFKKILDRVVRVIDDYAIKMLASSHSAS

SEQ ID NO: 955 - protein, 582 aa, Pelomonas sp.
  source 1..582: note = Related to JAJTWU010000005.1
MSQLKQLKAATTLSDVARLLEVKPGMLSFVLYKKPKAALYSKFDIPKRHGGTREIWAPDKDLKLVQHRLANLLQNCVEEINSSRGHVEDGKRHGVAHGFKRKHTIMTNARVHVTRRYVFNVDLHDFFGTINFGRVRGFFLKDKNFALHEKVATVIAQIACHENKLPQGSPCSPVISNLIGHVMDIMLVRLASATGCSYSRYADDLTFSSNKSKFSSRVARQDDADKDLWLPGQGLKRLVAKAGFSFNDKKTRMQYRDSRQDVTGLVVNRKVNVPATYRYTVRAMVDHALKTGAFERIFKKLDAAGVETTFKQPGTNRQLIGMLSYIDQVDLYNRKLREDNGLEPHDTSGRTEQFRRFLYFDAFHAIGSPVIVCEGPTDNIYLRHAIKRLAPKYPMLAAGTPPKLLLRLFKYGQRRTSEITQLTGGVGGLCHLMKHYHSDFINKIKASAPKYPVIVLVDNDAGAKDIYGAISGITKKPRPTGREQFIHVVGNMYVVPTPLGAGGAKTAIEDFFDAKTLAETLGTKTFSRAPKFDDTKHFGKAAFAREIVDKKADSIDFSGFSAILDGVVAVVADYAKRHPPVP

SEQ ID NO: 956 - protein, 582 aa, Ottowia sp.
  source 1..582: note = Related to JAGREY010000320.1
MSQLTRLKAATSLSDVARLLEVKPGMLSFLLYKKPKAALYAKFSIPKRHGGTREIWAPDKDLKLVQHRLANLLQNCVDEINAARGHAEDDKRHGIAHGFKRKHTIMTNARVHVTRRYVFNVDLHDFFGTINFGRVRGFFLKDKNFTLHERVATVIAQIACHDNKLPQGSPCSPVISNLIGHMMDILLVRLASATGCSYSRYADDLTFSSNRSNFSPRVARQDDDDKDLWLPGQGLKRLVAKAGFSFNDRKTRMQYRDSRQDVTGLVVNRKVNVPATYRHTVRAMVDHAIKTGSFERIFKKVDAAGIETAFRQPGTNRQLIGMLSYIDQVDLFNRKLREDHGLEPHNTSGRTELFRRFLYFDSFHAIESPVIVCEGPTDNIYLRHAIKRLAPAYPTLASGTPPQLSVRLFRYGQRRISQVTQLTGGVGGLCHLMKHYNSDFTTKIKAPAPRYPVIVLVDNDAGAKPIYGAISGITKKPRPTGAERFIHVVGNMYVVPTPLGAGDAATAIEDFFDAKTLNEKLGTKTFSRAAKFDDTKHFGKAAFAREVVERKADFIDFSRFSDILDRVVAVMSDYAKRYPSLP

SEQ ID NO: 957 - protein, 480 aa, Ralstonia solanacearum
  source 1..480: note = Related to WSYX01000004.1
MSNARAHVTRRYVFNVDLHDFFGTINFGRVRGFFLKDRNFSLQPKVATVLAQIACYENKLPQGSPCSPVISNLIGHMLDIALVQLAAVSGCTYTRYADDLTFSSNKPTFPIQIARQIDKSADKWAPGRSLERIVTKAGFTFNDKKTRMQYRDSRQEVTGLVVNRKINSPAIYRNTVRAMVDSALKRGTFDFIHKKVDAKGVATVVKQPGRNSQLLGMLAHIDQVDLFNKRLCEKADIEPPSTAGRIELFRQFLYFDAFYDISMPVIVCEGPTDNTYIRHAIRSLAFGYPMLVTGNAPPKLNVRLFKYAERRTSEVTQLTGGVGGLCHLIKSYHTDVTEKIKAPPPKHPTIVLVDNDSGANAIYGAISGITKKPRPTGKEPFIHIVGNMYVIPTPLGLHGEKTAIEDFFDAATLATKLGTKSFSREKKIDETTQYGKAAFAREVIEKNAGSIDFSRFSAILDRIAAVLADYSKKHPTSAVL

SEQ ID NO: 958 - protein, 580 aa, Herbaspirillum seropedicae
  source 1..580: note = Related to NZ_CP034395.1
MSSLADLKNTKTLSDLGALLDIKAGMLSFQLYKRPKEVLYTKFSIPKKYGGLREISAPDPTLKLIQHRLSDLLQECLLEITKINGHVNDAKSFGISHGFKPGHTIMTNARGHVGMRYVFNLDLHDFFGSLNFGRVRGFFIKDRNFQLTPAVATVIAQIACADNKLPQGSPCSPVISNLIGHTLDIPLVRLAATLGMRYTRYADDLTFSTNQRIVPDEIALMDPVHKWIPGRELVRIIKRNGFAINESKTRMQYCDSRQEVTGLTVNHKVNVPATYRYRVRAMAHRLFTTGEFEFIYKNNEKTVVSSSKGSPQQLLGMLSYIDHVDQYNEKIKLENNLPVTETAGRTELFRQFLYFDAFFAPERPIVVCEGKTDNIYLRCAIKKLAAKYPDLATVARGVSLNVRFFKYSEQRTGSVIGLTGGVGGICKLLKHYHEDVSTRFKAPRPQHPVIVLIDNDSGANSIYEAIAGITKRKKPLGRAPFIHVFSNLYVVPTPFGPKNAYTAIEDCFDAATLARPLDGRTFSRDNKHDSSKHYGKKDFATRVVAKNVNTLNFHGFEPLLEQMVAVIKDYKTRISGAVVA

SEQ ID NO: 959 - protein, 592 aa, Xanthomonas campestris
  source 1..592: note = Related to JAJFMU010000006.1
MALIYSTPVLDSLKAATSLHDLAQLLKLKPAVLAMQIYKKDKRTDWYTSFEIKKKHGGVRKINAPEKHLKLIQSRLSKILQDCQLEIALLNGHKEGPDRQGIAHGFKRHHSIMTNGRPHVNRQFVFNVDLQDFFETINFGRVRAFFQKNKNFALNPKVSEILAHIICYKGSIPQGSPCSPVVSNLISHSMDTLLAKAAKINGATYTRYADDLTFSTNRKVFPALIAKKISANEWEPGATLLGVVTKSGFCFNKNKTRMQYKDSRQEVTGLSVNKKVNVTADYRYTTRAMVHKLFTDGKFVFCYKVKNSHGEKEIFQEIEGRASQLLGRLTHIDHVDQFNELIRKKNGLPSALPEGRLKLFRNFLYFYHFYMPDQPVILCEGKTDNIYLKCALKANAAAFPKIVEVSTGSPPTLKVRLFKYSERRTGVVTDLSGGVGGICKLLKNFDSNLSMWNSGPKPAHPVIIVIDNDSGAQKIYQAIAGITKKPKPSGRNKFIHVIENIYVVPTPPAKGITNTDIECLFADATLNEELSGKKFNKSKEIEDSSEYGKTAFAINIVAKKSGEIDFTGFVPLLERIQEAMDHYYKSIKKFKK

SEQ ID NO: 960 - protein, 586 aa, Xanthomonas bromi
  source 1..586: note = Related to FLTX01000075.1
MAKIFSTPALDSLKAASSLHDLAPLLGLKPAVLAMQLYKKDKRTGWYTSFEIKKKYGGVRSINAPEKHLKLIQSRLSKILQDCLLEIALIKNHKESPDRQGIAHGFKRYHSIMTNGRPHINRRFVFNTDLQDFFGAINFGRVRAFFEKNKNFSLDPKVSEILAHIICHKGSIPQGSPCSPVVSNLIAHSMDTLLAKAAKKNGVTYTRYADDLTFSTNKKEFPLAIAKKITSNEWVPGKEVSVIVEKSGFFFNEKKTRMQYKDSRQEVTGLSVNKKVNVTSDYRYTTRAMVSSLFKTGKFKFCFKAKNLAGEKEVVQEFEGRPAQLLGRLTHIDYVDQFNESLRKKNGLPPALPEGRLKLFRNFLYYYHFYMPEQPVILCEGKTDNIYIKCALKAHANAFPSMVKPGSPPELKVRLFKYSERRTGIVTDLSGGVGGICKLLKNFHANLSMWESAPQPTHPVIVVIDNDSGADNIYQAIAGITKKPKPKGYAKFIHVTQNIYVVPTPPVKGKKNTDIECLFSDATLKEELNGKKFNKSKEIEDSSEYGKTAFAINVVAKKAHEINFAGFTPLLQRIKEAMDHYYKSIK

SEQ ID NO: 961 - protein, 619 aa, Xanthomonas oryzae
  source 1..619: note = Related to NZ_CP092971.1
MSRDMPSDILCSKYVVQVAPGSVRESFNQSRKSMVKTYSTPALDSLKAARSLHDLAQLLRLKPEILAMQLYVKDKRTGWYTSFDIKKKYGGVRTINAPEKHLKSIQSRLSKILQDCLLEIALISGHKEGPDRLGIAHGFKRYHSIMTNARPHTNRRFVFNADLQDFFGTINFGRVRAFFSKNKNFELDAKVSEILAHIICYRGSLPQGSPCSPVVSNLIAHSMDTLLAKAARTNGVTYTRYADDLTFSTNQKEFPSSIAERLVGNEWGVGRTVVRIVEESGFSFNQNKTRMQYKDSRQEVTGLSVNKKTNVTADYRYTTRAMVHSLFKTGKFKFYFKVKNASGAKVVINEAEGSPTQLLGRLSHIDHVDQFNESIRKINGLPAALPAGRLKLFRDFLYFYHFYMPEKPIILCEGKTDNIYIKCALKAKAASFPSLVTHSSPPELKVILFKYSDRRTGIITNLSGGVGGICKFLKNFNSNLSMWISAPIPAHPVIVVIDSDSGADKIYQAIAGITRNKKPKGSEKYIHVTKNIYVVPTPRKINEQTTDIESLFTQETLDTELNGKKFNKSKELDDASEYGKAAFATNVVAKRASEINFDGFIPLLNNINEAMTHYYRTIK

SEQ ID NO: 962 - protein, 588 aa, unidentified
  source 1..588: note = Related to DMZZ01000357.1; note = Comamonadaceae bacterium
MKLEELKAATSLRDVATLLQVKPAMLSYILYTKPKPELYTKFEIPKRTGGVREISAPYSHLKLIQQRLAAILLECTKELREKNASKSKNKNFEIRSVAHGFMPGHNIMTNGQSHITRRFVFNVDLSDFFGSINFGRVRGFFIKDNNFALDEKVATILAQIACYENKLPQGSPCSPVISNLLGHILDVALIDLARKNKCTYTRYADDLTFSTNRRVFPLAIAFAIQEDKNSWLPGKELIRIVQHNGFEFNKKKTRMQYKDSRQEVTGLSVNRKVNVPASYRYTVRAMASNLFRTGKFEHIVRYKNSSGEEVVSKVDGKTSQLLGMLSYIHQVDMYNEALAVKNNQPLADTPGRLELYRRAIYFDAFYAPERTVVVCEGKTDNTYIKNAIYRLFQGYPLLGELDAEGKPQLKIRLFKYADRRTASITKLSGGVGGLCHLIKYYNSDIVQKFRAPPAKFPVILLIDNDSGADSVYGAIAGILNIQKPKGKKPFIHVYENLYVVPTPFGLDGEKTSIEDFFDQATRATQLNGKSFERKNDADNQHHYGKAAFARDVISKNASTINFDGFRPILDRIEAVMKDYVGRIHQLAG

SEQ ID NO: 963 - protein, 584 aa, Hydrogenophaga taeniospiralis
  source 1..584: note = Related to NZ_BCWR01000008.1
MKLEELKAATNLRDVARLLQVKPGMLSYVLYTKPKSELYTKFEIPKRTGGVREVSAPFSHLKLIQQRLAAILLECTKELREKHASKSKNKNFEFRGVSHGFMPGHSIMTNGQAHTTRRFVFNVDLSDFFGSINFGRVRGFFIKDNNFALDEKTATILAQIACFDNKLPQGSPCSPVISNLLGHILDVALVELARKNKCTYTRYADDLTFSTNKRIFPSEIALATEDDGNSWLPGNELIRVVRRNGFDFNERKTRMQYKDSRQEVTGLSVNRKVNVPASYRYTVRAMASSLFRTGKFEHIIKYKSASGDEIVSKCDGKINQLLGMLSFIHQVDVYNEALAVKNNHPIIETPGRLELYRRVIYFDAFYAPERPIIVCEGKTDNTYIKNAIHRLSQNYPLLGGLDSEGKPQLKIRLFKYADRRTASITKLGGGVGGLCHLIKYYKADIASKFSAPRPKHPVIMLVDNDSGADAIYGAIAGILNVQKPKGKRPFIRVYENLYVVPTPFGSNGEKTSIEDFFDKATLAVQLNGKSFERKNDADNEHHYGKAAFARDVIAKNAAAIDFNGFKPILDRIEAAIKDYATQTQ

SEQ ID NO: 964 - protein, 583 aa, Rhodoferax sp.
  source 1..583: note = Related to NZ_CP019236.1
MTLANLKGATDLHGVAKLLDVKAGMLSYILYKQPKPDLYKKFEISKKTGGVREISAPCPHLKLIQQRLAAILLGCSLELKAKHATAVKNKNYVRREVSHGFTKGRSIVSNGEEHITRRFVFNADLSDFFGTINFGRVRGFFIKDENFSLFPAVATILAQIACSENKLPQGSPCSPIISNLIGHLLDMRLVEFALRQGCTYTRYADDLTFSTNKPEFPTAIAVQKEGDPHKWIPGGGLQKIVQKCGFSLNEKKTRLQYRDSRQEVTGLTVNKKVNVPATYRYAARAMANNLFKTGKFQHTIHFTDKDGAAQELRRDGHAGELRGMLSYVDQIDLYNSCREEANSLVPLGAPGRLQLYRRVIYFDSFYALSKPMIVCEGKTDNTYIKHAILQLAGHYPTLASASITGGKPELKVRLYKYADRRSAVVTDIGGGVGGLCHLIKNYHADVVNKFRAPRPMHPVILLIDNDLGADSIYGAISGLLKIKKPKGLRPFIHLFSNLYVVPTPLGPGNSQTMIEDFFDAATQAVTLNGKTFSRQDEDSSKHYGKAAFARDVVAKNADSIDFNGFRSILDRLRDVLLDYPTRP

SEQ ID NO: 965 - protein, 633 aa, Achromobacter mucicolens
  source 1..633: note = Related to CADIKS010000002.1
MAKEGNVRDICPRRTLLLHNHSVILLKECPQALSPEMALKKIEELKKVRTRIELAELLEVKPSRLAYELYKKKDSDRYQHFEIPKKYGGTREILAPNPTLKTIQRRLAIYLQDCLEEVIASTDSERHRGGGIKLGFSHGFMRDRTIITNARPHRAKRFVFNCDIVDFFGTINFGRVRGFFIKDKQFALAQEIATFLAQISCFQNVLPQGSPCSPVIANLIARKLDIKLGRLAYQTGMTYTRYADDLTFSTNKKIFSHSVGVQDASGFWRAGTELTKIVRASGFELNPNKTRLQQRDSHQEVTGLTVNRKVNTNSSYRYTARAMVNSVLKTGEFCFSYSIKNAPESLEAPEKKKGNLKQLLGILSHIDYVDRFNFELRKSNLAHLANKKNQKAVDDQLFPSLSRQETFKKFVYFYWFYACDEPVIICEGKTDNIYLKCAIKALKLRYPDLISNDKNNEKLKIRFFEYKESRAKSLSQLSGGVGGLCHFLENYHKYLNGAFFAPKPKHPVIVLIDNDNGGQSVYSKVAGITKKKKPTGKESFIRIEKNLYIIPTPLGPEGQQTAIEDFFDKAVLDEQLNGKSFSRDDDFDKSKFYGKAAFSRDVVLKNREKIDFQGFDSILSRINSVLRDYHLTP

SEQ ID NO: 966 - protein, 567 aa, Limnohabitans sp.
  source 1..567: note = Related to NZ_CXOO01000052.1
MSKLQHLKSTSNLHSVANLLGLKPAHLAYNLYKKPDAEKYTKFEIPKRYGGKRIISAPNADLKHIQRLLAAVLMDCLNELNAKYNRQAAHGFITQRSILTNAHQHRGRGHVLNLDLQDFFGSINFGRVRGFFIADKDFSLHPAVATVLAQIACFENTLPQGSPASPVISNLIGNVLDTHLIKLARKHGCVYTRYADDLTFSTNLPNFPEELAYSKFGVWTTGTSLLKVIKQSGFDVNTSKVRMQLEDSQQNVTGLVVNQKANTAASYRSSIRAMAKNLFKTGNFTHDSFIKDSAGNVSKNSELGTVAQLQGMFGHIKHVDEFNLQIRRQEIPTGRASLYKRFFLFSQFFCSSKPVILCEGKTDNIYLLHAIRSRANHFPQLAETNATGSISLLIRIFKYVERKAGRTLGMSGGDGEISKFIGTYLTEVSKHFKAPGVSQHPVILVVDHDSGGKGPYETASKKVGKTLDILNPFEHVAANLYLVATPLPFGATSSCIEDCFQPTTLAKTLGGKTFNYKTKHLKPTEYGKSYFAEHVVQADAGTIDFSGFDPLLDRINSVIVHYAKLPK

SEQ ID NO: 967 - protein, 588 aa, Polynucleobacter yangtzensis
  source 1..588: note = Related to NZ_LOJI01000040.1
MTLLAGLKSARTIQDVARLLNTKASALAFMLYKESPDTLYTEFSIPKKYGGFRAIAAPIPKLKLVQRKLADILQICLQEINEKENYSDKVAHGFKRGRSIVTNAQCHKRKRLVFNLDLEDYFGSINFGRVRGFFMADRNFQLHPSTATILAQIACYKNSLPQGSPCSPIISNLVGNILDVRLVRLAKESGLTYTRYADDLTFSTNAQSFPESIAVSSADSLHSWMVGKGLNELIERSGFRVNSSKVRVQYRHSRQEVTGLVVNKRVNIPSTYRRKVRAMVYSLVTEGYFEFKEIGEKDAESAQPTKKGSLNQLHGMLSYIYQLDSSNRKELSAANFKDGVPVSERDVPLTTTEKVFRRFLFFKNFYSTQKPVIICEGKTDNIYLHYALLSLATRFPNLVVKQAQKYSFAFSLHRYSRSSTERILGIQGGSGDLKMFMLNYLTSYNFFKVKVKKQPVILLIDNDDGANDIFSMAKNYLGYKPTGQEPFLHVDGNLYLMPTPLLNSRTKSTIEDFFDDKVKSVQVSGRSFDPKRKHNGSASTYGKNEFAREVVAKQANSIDFSKFSYVFKNIEDIIADFQSKVAAGKIKP

SEQ ID NO: 968 - protein, 577 aa, Thiorhodococcus sp.
  source 1..577: note = Related to NZ_AFWT01000016.1
MSKLSRLRACKDLRDLAKLLGFRPSAVSYILYMESDSAKYREFEIPKTTGGTRQISAPHPKLKLLQTRLSNLLQDCLGELDKLNADAHRLDSLAHGFKRGRSIVTNAQRHRNRRWVFNLDLDGFFNDINFGRVRGYFIKDRNFLLQPKVATVIAQIACHKGSLPQGSPSSPVISNMVGRIIDLRLCRLAARAGCRYTRYADDLTFSTNKRSFPEAIAARDSQNDSSWSPGDELIKIIKESGFSINSKKTRMQYRESRQEVTGLVVNDRVNVPATYRHTVRAMVHRLCMTGTFDIQKATISSTKQSNQSDPGNLRQLHGMLGFIDAVDRFHQKNKPNDAHDKQKPRASELIYRRFLIYQNFYAAEKPVLICEGKTDNIYITCAIRSLAQQFPDLARIDKSGKISLEIRRFRYAKTSTGRILGLNDGGAPVLKNFIWEYKKEISKFRATISKHPIIILIDNDSASKQIFASLGKITTSKVCGNEPFIHAFANLYVVATPIPEGKDSSDIEDLFDQETLGATIDGKRFSRIVEDESRHYGKAVFAYKVVKPRADKIDFSGFRELLARFVRAIEDYQAKIH

SEQ ID NO: 969 - protein, 560 aa, Sphingomonas azotifigens
  source 1..560: note = Related to NZ_BCTR01000096.1
MATSLSDVALLLGFHPKAFAWVIYKQTAKYAVFDIPKSRGGTRTIKAPEPRLKNIQARLAELLQDCIADINEARSQKEKLSHGFRRGHSIITNAYQHRGRRFVLNVDLADFFGTINFGRVRGFLITNRHFALHERAATVIAQIVCDDNSLPQGAPTSPVVSNLIAHILDVRLAKLARRFGLHYTRYADDLTFSTNSRDFPEEVAVPNDAGQWVAGPALDTAIQRAGFALNPQKTRVQMRQSRQDVTGLIVNEKVNIRSEYYREARAKCDHLFRTGAYRTKQLVRKDDGTAAVEEVPGTLDQMEGVLSFIDSVKRYKRPADRDHKLTGSEQTYRKFLVYRYFYAPSMPVILCEGKTDNIYLRCAIQAFADDYPGLAEKQGSAATLKVRLFNYSEHTKRLLGIAGGSGHFNNLIRDYRKNLKPFTAPHAERFPVILLVDNDSGADGIYKVVKATTKTACDGKESFYYVGDNLYVVPTPLGPSDAQTMIEDFLPAKWRAEKLGGKTLNLGKDCDITKEYGKALFAEHVIKRNRKDVDFTAMRVILDRIVTVIDDYAAMMGAGP

SEQ ID NO: 970 - protein, 572 aa, Acetobacter oeni
  source 1..572: note = Related to NZ_WOTA01000025.1
MVGGNVKRIDQLRLTNCLADVAELLGFQPKLFAWVIYKQPYKYATFEIPKSRGGVRLIKAPEDRLKNVQSRLAKLLQDCISDINEKREQTEKLSHGFRRGYSIITNAYQHRSRRFVLNVDLTDFFGSINFGRVRGFLMTNKHFALQERTATVIAHIVCDDNSLPQGAPTSPVVSNLIAHILDVRLAKLARKYGLHYTRYADDLTFSTNSRSFSTEVATPDAAGHWVAGKALEKVITRAGFSLNTSKTRMQLQQSRQDVTGIIVNKKVNIRSEYYREARAKCHHLFCTGTYLTKKVVRKEDGTSAVESVIGTLDQLEGILSFIDSVKRFKMTFDREYKLTGPERLYRNFLYYRHFYAPPLPMILCEGKTDNIYLRCAIQKFASDYGQLAQEEGDAIKLRVRLFNYSDHTKRLMSLGGGTGQIKDLLSNYCKIMKPFLSMGERNPVIVLIDNDSGAKSIFSWISSTTGRRCDGKESFYYLGENLYLVPTPRTDEDGDTMIEDFLPLKWREEKLGGKTLNLGSNINRDKEYGKALFAEYVIKKNRKDVDFVQMKLVLDRIVAVINDYAAMMATST

SEQ ID NO: 971 - protein, 568 aa, Sphingomonas hankookensis
  source 1..568: note = Related to NZ_JAKREV010000015.1
MKRIDDLKMATSLTDVALLLGFHPKAFAWVIYKQQPRYTVFEIPKSRGGTRTIKAPEPKLKNVQARLAELLQDCIADINEARSQKEKLSHGFRRGHSIITNAYQHRSRRFVLNVDLADFFGTINFGRVRGFLMTNKHFALHERVATVLAHIVCYENSLPQGAPTSPVVSNLIAHILDVRLAKLARRFGLHYTRYADDLTFSTNGRTFPEEVAAIDADGQWIAGPTLKGAIQRAGFELNPVKTRMQLRQSRQDVTGLIVNEKVNIRSEYYRDTRAKCHRLFKTGKYQIKQTIRKDDGSTIVEDADGALDQMEGVLSFIDSVKRHKQVVERDHKLSGVEQIYRAFLLYRHFYAPSMPTILCEGKTDNIYVRCAIQAFADDYAKLADKKGEAVSVKVKLFNYSDHTKRLLGIAGGSGHFNNLIKDYRKNLKPFTAPYAERFPVILLIDNDAGADGIYKVVRAITKGTCDGKDPFYFIGDNLYVVPTPLTDTGAATMIEDFLPSKWRDEKLGGKTLNLGKDIDITKEYGKSLFAEYVIKKNRKIVEFDAMRAILDRIVTVIDDYAAMMAAGS

SEQ ID NO: 972 - protein, 418 aa, Sphingomonas sp.
  source 1..418: note = Related to JACTGR010000001.1
MKRIDELKLATSLSDVALLLGFQPKPFAWVIYKQPAKYSVFEIPKSRGGMRVIKAPEPKLKAVQARLAELLQDCIADINEARSQTEKLSHGFRRGHSIITNAYQHRSRRFVFNVDLADFFGTINFGRVRGFLMTNKHFALHERAATVLAHIVCDDNSLPQGAPTSPVVSNLIAHILDVRLAKLSRRFGLYYTRYADDLTFSTNSRTFAPEIAINDGAGGWAAGPALIKAIQRSGFALNPKKTRMQLRQSRQDVTGLVVNEKVNIRSEYYRDARAKCDRLFKTGKYQTKHLLRKEDGTFAIEELDGTLDQLEGTLSFIDSVKRHKQTIGRDHKRSGAERLYRSFLLYHHFYASQMPVILCEGKTDNIYVRCAVQAFVADYAKWPWRRKMGLNSRYGCSTIQTTQSACSVSLADQVTLMA

SEQ ID NO: 973 - protein, 562 aa, Sphingomonas sp.
  source 1..562: note = Related to NZ_LR733875.1
MAYILGVTPKGLAYTIRIQPLANRYSSFTIPKKTGGSRNIDAPEVGLKLVQSRLADVLQDCISDIDKERGYPEKISHGFRRGHSIITNARNHSNRRFVLNVDIADFFQTINFGRVLGYFLKNRDFCLDKNAAVTLAQIACHNNGLPQGAPSSPVISNLITHILDIRLAKIAKNYGCYYTRYADDLTFSTNLRDFPEKLARLDSVSGKWIVGRSLEKAITQSGFALNASKTRVQLKQSRQDVTGIVVNDGVNVRREYYKNARAYCAELFKTGKFYINVKDIDENGQVSLKKIDGTRQQLKGILSFIDQVKSHRPKITLEKTTPDRKGVKGFNLLYKRFFYFDAFFANDKPMILCEGKTDNIYIQSAVAAMFNKFPTLSGEKNGKADFKFKLFNYTKTSLKIIGIGGGTGQLNAFISNYKSNVGDFKYKGEKHPVIIVIDNDSGSSSIYKTMKTILNIDVKGDKPFYFMGENLYIVPTPRGVNGEETMIESFLPQKWIDYKLNGKKFNMNNKGLDTKAEIGKALFAEYVVKKFKKDISFDNFSPLLDNITSAINDYYAMVAIKP

SEQ ID NO: 974 - protein, 447 aa, unidentified
  source 1..447: note = Related to SCRQ01000059.1; note = Sinobacteraceae bacterium
MLIAKECQPAAYFSLQHGVMNRLALLRSAKTINDLADLLGVKHSGLSFILYKKPTETKYQSFTVPKKAGGVRAIHAPTSELKLFQRRLADLLQECLNEIEATFRKTSEDRRPEKISHGFHPGRSIITNAIQHRRRRYVLNVDLKDFFGTCNFGRVRGLLIKNEHFLLHDRVATVIAHLACHEGALPQGAPSSPVISNLIGRVLDIRLVKLANSVGCSYSRYADDLTFSTNDRQFPPQLAAEIPPSSGRWEPGPALLGEIASSGFSLNPKKTRMQLHESRQMVTGLVVNTRVNVSSDYRHLIRAMVHRLLTKGEYEISTAAGPIKGTTEQLQGMLSFIDSIDEFNRKRFKERDVPFPRQRDETFRDFVFYRHVYQASRPTLICEGKTDNVYLTHAIRAMAKLFPDLASPGFYPVSADTSKKAEDGHKECLCRSEGSTALSSSVVLWSR

SEQ ID NO: 975 - protein, 599 aa, Pseudomonas syringae
  source 1..599: note = Related to AP019411.1
MSELYQLQKATSLHDLAAILNYTPSALSYLVYKRPGKYTKFTIPKSNGSPRQICAPCDELKALQKQVKTLLDKCLATIESTGKARGAISHGFKAGHSIITNAETHKKRRYVFNVDLEGFFDSIHMGRIRGFLINNKDFQLNPKVATVLAQIMCHDDKLPQGSPTSPVASNLIGHLLDLRLVQLAKRNGCSYSRYADDLTFSTNKKNFPEEIASSDEGGNSWAAGPSLTKIIQKSGFELNHSKTRMQYRTNRQSVTGLVVNQVTNTPAEVRRTARAMAFHLFNKGYYLIKNEVVGEEKATAPMIRDYTQLASLDGLFSFIYMVDQFNRKKLVKNSTVKIESIKKTALEIIHGDFLFYKNFYASPTPTIMCEGKTDNIYLACAMKSLMERFPRLCKPNKDGKPALRVRFINYSELTHRALGLNGGSADLAAFIRSYAKNCGKYKAHPPLSPTIIVVDNDSGSDPIFKAIKDVTGNRYVIANGKGTILDKSQTTYYIAQNLAVVLTPLKKDGKPTMMEDFFPAKVLQTPWNNKTFEILTKSPNKNTYSKNTFAQKIVKADRANIEFKGFSPILKSISQIIRCYHVDKSLIDKSLRPKSINAQ

SEQ ID NO: 976 - protein, 598 aa, Pseudomonas protegens
  source 1..598: note = Related to NZ_CP060289.1
MSELHQLRKATSLHDLAAILNYTPSALSYLVYKRPAKYTQFSIPKSNGSTRQICAPCDELKALQRRVKILLDECLATIENSSLARGAISHGFKQGHSIITNAETHKKRRYVFNVDLKGFFDSIHMGRVRGYLISNNDFKLNPNVATVMAQIMCHDNKLPQGSPTSPVVSNLIGHLLDLRLVQLAKRNGCSYSRYADDLTFSTNKKTFPKEIALSDENDNSWAAGPALTKVIQKSGFELNHDKTRMQYRTNRQSVTGLVVNQITNTPAEVRRTARAMAFHLFNKGHYLIKGEATGAEKAKALEVKDYTQLASLDGLFSFIYMVNNFNRKKIVENSSIKIESFKKTSLEMIHGDFLFYKNFYASPLPTIMCEGKTDNIYLTCAMKSLIDKFPQLCKLNKDGKPALKVRFINYSELTHRVLDLNGGSADLAAFIRTYAKNCGKYKAHPPLNPTIIVVDNDSGSDPIFKAIKDVTGNRYSIPNGKGAILDKTKTTYYIAQNLSVVLTPLRKDGQPTMMEDFFPANVLKAVWDNKTFEILSKSPSKNTYNKNTFAQRIVKADRPNIEFKRFAPILRSISEVIEGYHVEKSVIEQNLPPKPAKP

SEQ ID NO: 977 - protein, 596 aa, Pseudomonas sp.
  source 1..596: note = Related to NZ_FYDY01000001.1
MSKLHQLQKATSLHDLAAILNYTPSALSYLVYKRPGKYTQFSIPKSNGSPRLISAPCDELKALQKQVKVLLDECLATIEKVGAERGAISHGFKDGYSIVTNAEVHKKRRFVFNVDLQGFFDSIHGGRVRGFLISNKDFKLHPKVATVLAQIMCHDDKLPQGSPTSPVASNLIGHLLDLRLVQLSKKNGCSYSRYADDLTFSTNKKIFPAEIASSDNGSNPWVAGPALAKIIKKSGFKLNHDKTRMQYRTNRQSVTGLTVNQITNTPVEVRRTVRAMAHCLFNNGFYFVKDKASVSDKKNKPEIKDHTQLEKIDGYFSYIYMVDQFNRKKIVDNSSVKIESIKKAALEKIHGDFLFYKNFYASSQPTILCEGKTDNVYLTCAMKSLMDRFPRLCKPNKDGNPALRVRFINYSELTHRVLDLNGGSADLAAFIRFYAKNCAKYKAHPPLHPTIIVVDNDSGSDPIFKAIKESTGSRYSIANGKGTVLDKSQTIYYIAQNLYVVLTPLKGGQPTMMEDFFPSSTLQKVWEGKTFEVLSKPSKTTYNKNTFAQRIVKANRTDIEFKRFAPVLRSISEAIKDYPRIKKSVIEQNLALKSKA

SEQ ID NO: 978 - protein, 587 aa, Pseudomonas fragi
  source 1..587: note = Related to NZ_CP021132.1
MSTLHKLQQASSLHDLAAILNYSPSSLAYLIYKKPVKYKQFEIPKSNGSPRVINAPCDELKALQRKIKLLLDKCLDAIEQAQGVRGSISHGFRRGHSIVSNADVHKRRTYVFNVDLEGFFDSIHIGRIRGFLITNNDFRLHPNVATVLAQIICHDDKLPQGSPTSPLASNLIGHLLDLRLIQLAKKTGCSYSRYADDLTFSSNKSEFPAEVSYKIDDGHTWIPGSSLLKVIYKCGFKLNHNKTRMQYARGRQSVTGLTVNQTPNTSAELRRAVRAMTHSLFLDGQYHTIKQPGDNDDSEKITKSYTQLAPLEGYFSYIYMVDNFNRKKIIENSSTKMENIPKTALENLHGDFLFYRYFYANSKPTIVCEGKTDNIYLTCAIKSLMGSFPRLCKSNKEGKANLKVRFINYSELTHRMLGLNGGSADLAALIRAYAKKCAPYKAHPPLHPTIIVVDNDAGSDPIFRAIKDTTGNRYAIPKGKGTVLDQSKTLYYIAQNLYVVLTPLKKDGGPTMMENFFTTKLLASRWEGKEFEVFNKNSPSGTYSKQIFAQRIVKSDQANIDFRKFKPILSSITEAIRHYPAIKVPKK

SEQ ID NO: 979 - protein, 584 aa, Pseudomonas syringae
  source 1..584: note = Related to JACYWS010000004.1
MPTLKKLKSLTSLHDLAAMLNYTPTALSYLVYKRTGKYTSFQIPKSNGSPREILAPCDELKALQRKVKSLLDDCLDSIEKSKPLIGSLSHGFKSGHSIISNAEPHTKRLYVFNVDIKGFFDAIHMGRVRGFLITNRDFSLNPKIATVLAQIICHDDKLPQGSPTSPVASNLIGHLIDIRLVQLAKRSGCTYSRYADDITFSTNKSEFPAPIAYRMDDTHSWIPGDSLLKIIHRCGFELNHDKTRMQYARERQSVTGLTVNKTSSAPAEFRRTIRAMTHKLFMDGDYFIPDEPKHQSSSRVELNYTQLNRLEGMHSYLHMISRFHRQKIVDNTVRRPEDIPLTAMEKMHGDFLFYKYFYASELPTIVCEGKTDNVYLTCAIKSLHAKYPRLAKPDSKGVMRLRIRFLNYSNLTHRVMGLNGGSADLGHLIRRYAKQCARYKGHPPLKPTIIVVDNDSGSQPIFQAIRDTTGDRYLTPSGKGKTFDKSKTVYYIAQNLYVVLTPLIKGGDSMMENFFPPAVLNTIYNGKKFEVVHKGPKGSAYSKHQFAQYVVKPNQKKIVFSRFSSILKSINSAIKDYPLIKITP

SEQ ID NO: 980 - protein, 580 aa, Pseudomonas fluorescens
  source 1..580: note = Related to CABVHP010000013.1
MSTLHRLQKAATLHDLAIIFNYTPASLAYLIYKKTNKYTEFDIPKSNGSKRRIMAPCDELKTLQRKIKKALDECLESIEKKAPSPGPISHGFKKGHSIASNADPHKKRLYVFNIDIQDFFGTIHMGRIRGFLISNREFNFHPKIATIIAQIICHDNKLPQGSPTSPIASNLIGHLIDLRLVQLAKKTGCTYSRYADDLTFSTNKPKFPKEIAYRLEETQSWIPGTPLLKIMHKSGFSLNHEKTRMQYACSQQAVTGLVVNQKANTPAIFRRNVRAMTHKLFLDGDYFIHENHKTKEKKELTYKNLNQLEGMFSYIYMIDRFNREKIVNNSNKRHEDFPKTAIERLHGDFLFYRYFYASPQPTIICEGKTDNVYLTCAIKALHVNFPRLAKTDPEGKLKLRVRFLKYSNLTHHVMGLSGGTPDIGHFIRNYAKQCAKYKAHPPLHPTIIVVDNDKGSDTIFKAIKDVTGTTYSIPAGKGTTLDKSKTLYKIAQNLYVVLTPLSGGNDTMMEDFFHRSVLSMPYEGKNFEVFRKGPPGTTYNKNTFALHIVKANQKTINFSKFSPILKSINLAIRDYPKIKL

SEQ ID NO: 981 - protein, 576 aa, Acinetobacter sp.
  source 1..576: note = Related to MELH01000002.1
MPRLRALQKATTLHDLAVILNYSPTALAYLLYKKTGKYSRFQIPKKNGTPREILAPCDELKSLQRKLKKLLDECLESIEKKRSPLGSLSHGFKANHSIITNAEPHRKRLYVFNVDIKGFFDSIHMGRIRGFFISNKDFNLNTKTATILAQIICHDDKLPQGSPASPVASNLIGHLIDIRMVQLAKRLGCTYSRYADDITFSTNKSEFPPEIAYRLENSHDWIPGGALLKVIYKSGFGLNHEKTRMQYARAQQTVTGLVVNQSTNTPAEFRRKVRAMTHKLFMDGEYYVHEENGPRSPKKTELNHSKLNKLEGMYSYIYMTDCFNRKKIIENSNRRHEDFPLSSLEKLHGDFLFYKNFYASPAPTIICEGKTDNIYLTCAIKSLHEKFPRLAKPDASGKVKLKVRFINYSELTHRVMGLNGGSSDLGHLIRRYAKQCGSYKAHPPLNPTIIVVDNDSGSQPIFQAIKDVTGDRYSIPSGKGKIFDKSQTLYKVAQNLYVVLTPLLNGKDSMMEDFFPPAVLRATYNGKSFEAVSPGPKGTTYSKHQFSQHVVKPNQKIINFSRFSHILKSINLAIRD

SEQ ID NO: 982 - protein, 435 aa, Pseudomonas fluorescens
  source 1..435: note = Related to CABVHX010000009.1
MCHDNALPQGSPTSPFASNLIGHLIDIRMVALAAKNGCTYSRYADDITFSTSKKNFPTQIAYCIDESNTWIPGSAVLKIISKCGFSLNHDKTRMQYTSSQQSVTGLVVNKIAHTPADYRRTVRAMLHRLFLDGTYFTIKKPKHLNKTERITIPFGQLNKLEGMLSYIYMVDRYNREKIVNNSKTKHEEMLMTSIEKMHGDFLFYKYFYAGDTPTIVCEGKTDNVYLTCAMKSLFAKYPELVSVDKDGKRILKSRFINYSELTHRMLNMFGGSADIAQFIRFYARRCKKYKAHPPLHPTIVVVDNDTGSKEIFGAIKDTTGGRYIIGAGKAQALDKSRTLYYIAQNLYVVLTPLNAGKDTMMEDFFPTTVLTMPHKGRSFEILKGVKPGNTYSKHIFAQHIIKANQKSIDFSGFSPILDSMKAALLDYPKIKLIPA

SEQ ID NO: 983 - protein, 583 aa, Pseudomonas edaphica
  source 1..583: note = Related to NZ_JACAOZ010000012.1
MSELRKLQKAATLHDLAVILNYEPKFLAYLIYKKTNKYSQFTIPKSSGAPRNISAPCDELKALQRKVKVLLDSCLETIALQVPNLATLSHGFKKDHSIITNADKHRKKLYVLNIDIQDFFGSIHVGRLRGFFITNRSFSLQPKIATILSQIMCHEDKLPQGSPTSPVASNLIGHLLDVRMVSLASKNGCVYSRYADDITFSTNKLKFPQSIAYKIDDTHDWIPGSDLLKIISKSGFGLNHNKTRMQYNRAQQTVTGLIVNSITHTPANFRRTVRAMAHKLFLDGDYYVQEKPKHLKKEKISIPRGQLKKLEGMFSYIYMVDNFNRAKIVSNSSKKQEEFSLRSIERIHGDFLFYKNFYGASAPTIICEGKTDNVYLTCAIKSLHAKFPELASLTKEGKTRLNLRFINYSNLTHRVLGLNGGSADIGLFIRNYARQCGKYKAHPPLNPTIVIVDNDSGSKPIFSAIKDVTGSTYAIPKGKGTVLDTSKTLYKIAQNLYVILTPKIGGKDSMMEHFFPAATLATQYKGKTFEVVRSGPPSTTYSKHVFAQNIIKANQKNIDFSGFEAILGSIKLALDDYPKIITP

SEQ ID NO: 984 - protein, 580 aa, Pseudomonas sp.
  source 1..580: note = Related to MUHV01000013.1
MLSLYALQKAKDLHDVASILGYEPKFLSYIVYKKNPKYTYFTIPKSTGAPRNIAAPCDELKTLQKKVKQLLENCLVSIQLQGTAQGSLAHGFKKGHSIITNAEPHKRRRFVFNIDISNFFGSIHVGRIRGFLISNNSFKLEPKVATILAQIMCHNDALPQGAPTSPIASNLIGHLIDIRLVNLAAKYGCIYSRYADDITFSTNKREFPEQIASNIEKDEWIPGTSLLKAIHKCGFSLNHNKTRMQYCENQQTVTGLVVNKTLNAPATYRRQVRAILHKLFLEGKYHLKDKPTEKNHSNISIYDYKKLENIEGMLSYLYMIDSFKRKKLSLNSKIRCEDMERTSLEELHGDFLFYKYFYANNKPTIICEGKTDNIYLGCAMKSLWKKFKRLAKEEDGDIKLKVNFINYTELTHRVLDLYGGTADISNLIRHYAKRCAKYKAHPPLKPTIIVVDNDSGSDKIFKAIKETTGKQYIITKGKETLLDKSRSIYYIAQNLYVVLTPLKNGNDTMMEDFFSKSTLKTKVDGRFFEVYKKSTTGTYNKNTFAQKVIKAQRKRKIFNAFTPILASITAAIVDYSKLKP

SEQ ID NO: 985 - protein, 580 aa, Pseudomonas helmanticensis
  source 1..580: note = Related to NZ_SOCQ01000001.1
MSLHVLQKAKDLHDLARILNYEPKALSYVLYVKKPQYTSFTIPKSSGAPRHISAPCDELKTLQRKVKRLLDSCIASIELQGPAKGALAHGFKKGHSIITNAEPHKRRRFVFNIDITDFFGSIHVGRVRGFLITNKSFQLAPKVATILAQIMCHENSLPQGAPTSPIASNLIGHLIDIRLVSLAAKLGCIYSRYADDITFSTNKKDFPSSIAIEVDENEWVPGTTLLKIIYKCGFSLNHKKTRMQYSDNQQTVTGLVVNKSINAPAQYRRQVRAMLHKLFLDGNYHRKDEPRYKAHANSTIYDHKSLEPLEGMLSYLYMINNFKMDKLSKNGKIRKEDIKRTSLEDLHGDFLFYKNFYANKKITILCEGKTDNVYLSCAIKSLHKKFIRLAKTTGGKVELKTNFINYSKLTHRVLDLNGGTADIANLIRSYAKRCGKFKAHPPSQPTIIVVDNDSGSDPIFKAIKDTTGKRYEIANGRGTSFDKSRPVYYVAQNLYVVLTPLRNGQDTMMEDFFSKNILKTKLDGRSFEVYKKGLPGKTYSKHTFSQKVIKAQQKRKIFNGFVPILSSISAAVVDFSKLKP

SEQ ID NO: 986 - protein, 586 aa, Pseudomonas aeruginosa
  source 1..586: note = Related to CP050147.1
MLSLNALQTAQTLHDLAHILNYEPKFLSYILYKKPVKYSHFTIPKSSGAPRDIAEPCEELKALQRKVKELLEVCLKTINNQKPQYGSLSHGFKKDHSIITNAYPHRKKRFVFNVDISDFFGSIHVGRVRGFFITNRDFRLSPKVATILAQIICHEDALPQGAPTSPITSDLIGHLIDIRLVEIAERYKCVYSRYADDITFSSNEKNFPSAIAFPVEGTTDWVPGRALLKAIHKCGFGLNHNKTRMLYRESQQTVTGLVVNQKVNPPATYRRQIRAALHKLFLDGQYFLQEKPRHSSSSKVDLGIDSLEKIEGMLSYVYMVDKFNRSLTVETSKSKKEEEIPKTSLEKLHGDFLFYKYFYAASKPTIICEGKTDNVYLTCAIKSLYKNYPELAKVSNDELKLNVKFINYSDLTHRVMGLNGGTGDIANLIRAYAKQCGKYKAHPPLHPTIVVLDNDSGSQQILNAVKDLTTPRYDVPNGKGTKLDTTQDFYKIAQNLYMVLTPLDKGKSTMMENFFPTKVLNTIYKGKTFEILKKSPPDQTYSKHIFAQHIVKAEQKKIDFVGFSPILDSITKAIKDYPTITLPKIK

SEQ ID NO: 987 - protein, 582 aa, Pseudomonas kirkiae
  source 1..582: note = Related to QJUQ01000005.1
MSKLNILKNAKTLSDLAHLLNYKPKYLSYIIYKKQNLYHQFTIPKSSGAPRTILAPCDELKALQKKVSELLQDCLENMNQDLQIHSSLSHGFMRGHSIMTNADNHRKKRFVFNIDIQDFFGSIHLGRVRGFFINNKSFQLDPKVATVLAQIACYNNSLPQGSPCSPVVSNLIGHLIDIRLVSIAKKAGCQYSRYADDITFSTNKTSFPSTIAIQDETTGNWSVSEQLAKIIKKCGFSLNTTKTRMTYRKSQQTVTGLVVNQKVHTSASYRKQARAMAHKLFNDGSFSIPDKASLAAKENSPKMIAGTLNQLEGIFSHIYMVDQFNRNKLRGNNGIRGEDLELTAIEKTHRDFLFFKHFYSTSLPTIICEGKTDNVYIQCAIRSLATQYPELATIDAQGKRILKVRFINYSELTHRVLDLNGGTADIARLICGYVHLCGKYHNTAPKHPTIVLIDNDQGSQSIFSAIKSTTKDTHTAGTGKNKQIDRSKNFYYIAQNLYVVATPLINGKDSMMEDFFKNATLATLVDKKTFSVRTPTAPTGSTYGKHIFAQKVVKANRDKIDFSDFSPILDSLKSVIQHFKLP

SEQ ID NO: 988 - protein, 577 aa, Pseudomonas sp.
  source 1..577: note = Related to NZ_CP052862.1
MSKLAILRSAQGLHDLAELLAYEPKKLSYVIYKMPNRYTKFTIPKSSGGTRSIAAPREELKALQVKVSKLLQLCIHNMNADLNITTSLSHGFTKGHSIMTNADLHRKKRYVFNIDIENFFGSIHRGRVFGFLTKNKSFSLNPKVARALAQIACHDDALPQGAPSSPVFSNLIGHLIDVRLVELASKLGCSYSRYADDITFSTNKKTFPKEIALVSPSNEWVASPTLIKIVSKCGFALNENKTRMQYQESRQSVTGLTVNRKINSPAVYRHQARAMAHSLFNTGSFSVPDKDPKVKAKIPGTINQLGGMLSYIYMVNTFNRSKIVENSAIRDEDIKLSAMEKVHADFAFYKHFYGNQKITILCEGKTDNIYLQCAIKSLAKKYTILAKLNADGKAVLNVNFFKYTDLTHRLLGLYGGTGDIGELIKRYVSCCGKYKNHPFKHPTIIVVDNDEGSQKIFTALKVVTGNKYMIGSGKAQNLDKSLDFYYVAQNLYVVFTPLKMSGDDTMMEDFFTSDTLNTIVDGQRFSVVHKAPNQLVYSKHTFSQKVVKANQKTINFLGFTPVLDRIQKAAKHFYSLP

SEQ ID NO: 989 - protein, 588 aa, Pseudomonas fluorescens
  source 1..588: note = Related to JAGGOG010000003.1
MIKLKLLQSAATLRDLSIALGFQPKAVSFILYKYSKERLYTSFTIPKKSGALRDIHAPCAELKNLQSRVSEYLQDCIQEINESKKITQTLSHGFKRGYSIVTNASTHRKRRLVLNVDLEDFFGSINFGRVRGFFITNKNFSLNPNVATVLAQIICFDNKLPQGSPCSPVMSNLIGHLLDIKLAQMATSMKCTYSRYADDLTFSTNKQQFPLELVSPGDNHHDWVAGAKLEQIISKCGFKVNARKTRLQYQDSRQDVTGLVVNEKVNVPAPYRRQARAMAHRLFEHGSFQVERLSIKDKGQVTSERIEGSVDQLSGMFSYIAMVSQHNKDLVLKAGLKNAQTELSSIEKVHRDLIFYKSFYANPMPTIICEGKTDNVYLRCAIRSLAKQYPLLATFEDKNKLKLNVSLFKYSRLNSSLLGISGGTSNLKPFISDFSKNIARYKSRKSPFPVIILIDNDRGAKEIYSTIKTTTKTADTIDGSIPYYHIAQGLYVVPTPKLNGALESKIEDFFPLQTLKETLDGKKFNDKNEDLKADEYGKHFFAEHVIKKKQNSIDFTGFKPLLDIISSIISQSVALHMSAVVPPAPPKV

SEQ ID NO: 990 - protein, 588 aa, Pseudomonas sp.
  source 1..588: note = Related to NZ_LT607556.1
MIKLKLLQSAKSLRDLSIILGFQPKAVSFIVYKYSKDRLYTSFTIPKKSGSIRTIRAPCPELKNLQSCVSKYLQDCIDEINESKKITHTLSHGFKRGYSIVTNASVHKKRRLVLNVDLEDFFGAINFGRVRGFFITNKNFSLQPSVATVLAQIICYENSIPQGSPCSPVVSNLIGHLLDIKLAKIASEMKCTYSRYADDLTFSTNKQQFPLELVSPGNSPHDWVVGERLERVIQKCGFQVNSRKTRLQYRDSRQDVTGLVVNEKVNVPAQYRRRARAMAHRLFESGSFQVEKLSIKDDGRAVSETRAGSVEELSGMFSHIAMVSQYNNDVAIRAGIKDLRGELTSIEKVHRDLIFYKSFYANPMPMIICEGKTDNVYLRCAIRSLAKQYPSLVTVEAPDKVRLNISLFKYSKLNSQLLGINGGSPHLRTFITDFSKAAAKYKSRRSPFPVIVLIDNDKGAREIFSTIKATTRTTEKIDGSMPYYHIAQGLYVVPTPKLNGALESKIEDFFPVATLSETLDGKKFKAENEDLKADEYGKHYFAEYVIKKKQGSIDFSGFKPLLDVISTIVSQNIALQMSAVVHQVVVKK

SEQ ID NO: 991 - protein, 609 aa, Pseudomonas fluorescens
  source 1..609: note = Related to NZ_CABVHD010000002.1
MSEYIAPDRLCKRAVQMGRYEFRVRVSISLFMKIKLLQSASNLRDFAILIGFQPKAISFILYKHPKDRLYTQFEIPKKNGSFRTITSPCPELKNLQSIVSKYLQDCLAEIDERRPKKGTLAHGFKRGYSIASNAAVHRNRRYVLNLDLEDFFGAINFGRVRGFFINDRNFSLKPDVATILAQIICFENKLPQGSPCSPVVSNLIGHLLDIRLVALASKYGCSYSRYADDITFSTNKKTFPIELASSQLIPNVWSLGPELSSMIVRSGFTINVSKTRVQYSDSRQEVTGLVVNKKVNTVASYRRTARAMAERLFRTGSFQIEKLVLDSEGKSKSGTVSGTVEQLNGMLNFITMINRLSEEFRVSSDKHDLSSIEKVHRDLLFYKYFYANTMPTIVCEGPTDSIYLRCAIRKLAAHFPALAGFNKEGEIELKVCLFKYSDLNARLLKLTGGTAPLRTFASGFSSNAAKYKSRKSIFPVIVLIDNDKGAKPIYSFIKQLPGNGGVVDGSQKHYHVAQGLWIVPTPRSEGVPESKIEDFFEDKVLKMELGGKHFNPENMDLSDDEYGKQYFAEHVIKANHKSISFDGFAPILSTISSLITDSINQAKSALNRP

SEQ ID NO: 992 - protein, 578 aa, Pseudomonas viridiflava
  source 1..578: note = Related to NZ_UTCV01000055.1
MKIKLLQSASSLRDLAILLGFKPKAISFLLYKVPKPYLYTQFQIPKKNGSTRTIMSPCAELKNLQSVISNYLQDCLEEIDEKRQKKGTLSHGFKRGYSIASNAAIHRNRRYLLNLDLEDFFGSINFGRVRGFFINDKNFSLHPDVATVLAQIICFENKLPQGSPCSPVVSNLIGHLLDIRLVGLASRYGCSYTRYADDISFSTNKKDFPAELAAPGSMPHEWHVGPVLTDVIMRTGFSINASKTRVQYSDSRQEVTGLVVNKKVNTAATYRRAARAMAERLFRTGSFQVEKMVLNSEGNSVSGVVRGSIDQLNGIFNFITMINRFSEVSRESIQKSELSSIEKVHRDLLFYKYFYANTMPTIICEGSTDNIYLRCAIRKLSANFPALAGVNEKGETELKVCLFKYSKLNARLLDLTGGTPPLRTFISEFANNAAKYKSRKSIFPVIVLIDNDKGAKIIYSLIKQLSGNASVIDGSQRHYHIAQGLWIVPTPKAVGVVESKIEDFFEDKVLEMELGGKHFNSENNDLSDNEYGKQYFAEHVVKANHKDISFDLFAPILSTISTLITDSINQANSARNRP

SEQ ID NO: 993 - protein, 579 aa, Saccharophagus degradans
  source 1..579: note = Related to JAHKPP010000027.1
MKHLDLIKSCNNLQDVAFVLGYKPSRLAYILYKMPNSTKYREFEIDKKLGGKRKIFAPCPELKTLQQRLSKLLQNCIAVINKEKGIQKSISHGFKRDCSIFTNAEQHRNKRFVLNIDLEDFFGTINFGRVRGFFIKNKNFEIDENAATVLAQIACFNNSLPQGSPSSPVITNLISHTMDIRLAALAKQLKCTYSRYADDITFSTNEKNFPIELAEPTNAEGTEWKVGKKLERKIQKLGFSVNHKKTRLQFSQSRQDVTGLVVNKKVNIKSEYHRSARAMAHSLFKTGKFHIKENKQDANGNIVETKREGKITELGGYLNFIDMADKYRKRHVDDYKERRILSSREEIYRDFLFFRYFYQPSRPIILCEGKTDYIYLKCAIKSQFSKYPNLCQKNKQDEKILKVDFFKYTEVKSRLFSLSGGASTLSTFIGNYTKFCETYSVEISKNPVIIVVDNDMGVNKVFSSAKTKKYGKSKGSNIDGSLPFYHLGENLYLTAIPKKLGKDTAIEDYFKPTVLSTKYNGKTFNYKNKTKNVNPKTEYSKAVFAEHVIEKNRDKIDFSDFTPILDNICAAINDYSKKK

SEQ ID NO: 994 - protein, 604 aa, Chromobacterium subtsugae
  source 1..604: note = Related to NZ_LCWR01000203.1
MQASPLKKFLTSSMQIPSLQDLKECRSRADIATLLGFKPAALTYILFKIDPPKKYRIFTIPKKSGGTREISSPCPEIKQLQKRLSYILSDAYTHLYDLNNTKKSVSHGFRKKHSIITNAVMHQKRKNILNIDLEDFFPTINFGRVRSFFIKNKDFNLHPDVATTLTQIVCHENSLPQGAPTSPIISNFIARPLDIRLLSLAKSHGCFYTRYADDITFSTNKSEFHSDIAKRNSIGNDWTIGGKLSSTIEKSGFILNDKKTRVMYSISRQEVTGLIVNKKINTRIEYRKLARSYVHSLINTGQYYLTSHEVENNKKIKVKRIGSIKQLDGILNFIYHTERFSNLKLNEKKNKKTNQNISYSNSEKTYRKFLKHTLFCENEFPFIICEGPTDDIYLKSALLMKGENFPLLYSSQSRPKIKLKFFKHSEKMRHLLGMSGGTGDIKNFIASYNKEIASEFKERPKNPIIVVIDNDQGSDEIFAWIKRNIEPFKSRKDSNVKGDENFYIVKPSLYIVPIPRINESDTAIENLLPSHLINNQIDGKEVNLSNKAVETNQINKMKLADHVRKNKKDIDFSGFNKLLESISMAYYHYKDETASVEKSYSHGM

SEQ ID NO: 995 - protein, 603 aa, Chromobacterium violaceum
  source 1..603: note = Related to CP069442.1
MSNLNKLKNCETRADLADLLGFKASSLAYILYKMPPEKKYEEFLIPKKAGGNRSIAAPCPGLKKLQKRLCEILTECYQELYGGSGIKKSISHGFRPKHSVITNSLMHQKRRRVLNLDLKDFFPSINFGRVRGYFIKNKDFAISSDVATVIAQIACHDGVLPQGAPTSPVISNLVLRSLDLRLLTLAKKNSCFYTRYADDITFSTNKTSFPEEIAIKDQLTHKWDVGGELESTILRSGFQVNDNKTRVMYKVSRQEVTGLIVNKRVSTREEYRDQVRSMVYSLTKRGEFYFKQISIVDGQATTVKEPGDVWQLDGMLNYIYNVDMAYLTWAVGEKKVSEKKDKDVVYSAREQIYRKFLFYTLLCKSESPYVICEGVTDDIYIRCALSSLVGEFPTLRVASDEKKIKLKFFNHSKKMKYLLGMGGGTGDIKKFLIEYKAVIIKTFSERPSFPVIVIVDNDSGFRGSKGMYSWVRANAEAIDGPGFGIGPKAKEGFYFVKPSLYIVPIPRGEESEVAIEDLLPSKILTSKIGGKEVNLNNNGVSSSAEIGKTRLVEHVRKNRKDIDFGGFRPLLRLIEGALTHYDAATKSGVELVAGPNAVVDASM

SEQ ID NO: 996 - protein, 558 aa, Ephemeroptericola cinctiostellae
  source 1..558: note = Related to NZ_CP031124.1
MTLLEQLRQARTLSDFAIILGYEPKKLSYLLYILPKEKPLYNQFSIKKRSGGERVISAPCEELKELQKRLLNLLDKCSQEINASKSKNHNSISHGFKKRHSIVTNAVKHKNKQYVFNIDLENFFGTINFQRVCGFFVKSREFQLHSKIAEIIALISCHQGSLPQGAATSPIISNLITHILDVRLVKFSTKIGVFYSRYADDLTFSTNKKNFPIEAALKSIELKHQWIIGKDLNEIINRSGFKVNSSKTRMQYKNSRQEVTGLIVNKKINTKREYKQKVRAMVHALVHRGEFNIFESDSGMYVKGSLNQLRGMLSFIESINPRDGCSKANEKMIGRDIYHKFLFYKYFYFGDKPILICEGKTDGVYIREAIKWFSGRDEFKGLKFDIFKYSKLNGRVLGLNGGYSDLTKFIAQYLTFFNVNTAPSSNMPVIVVIDNDDAAKKILKDERNENRDFYHKVKNLYVVTTPLVGTEVESEIEDLFKIEALRIELNGKTFHKEKDLNDGKHYGKHVFSEKIVKSKEYNIDFSGFEELLKRIQNAIKHFETQTNENRKSSIEPIN

SEQ ID NO: 997 - protein, 564 aa, Rugamonas sp.
  source 1..564: note = Related to JAEMNU010000126.1
MSKLKDLKNAKSLTDLAKLLGFKPKALAYILYVMPKELRYAEFEIPKRTGGLRKISAPCSKLKKLQKNLSDLLLICCDELHSQRESQHNRKIYSAISHGFVRKKSIITNAANHRSRRYVFNLDLNDFFGTITFPRIRGFFIENKNFNLDPTVATLIAQIACNNDALPQGSPSSPVISNLLAHILDIRIVALVSKVGCTYSRYADDLTFSTNKNNFPEELAKFDDVEKLWSEGEVLRNIVNSSGYKINSSKTRMQEKRSRQEVTGLIVNSKVNSRVEYRKSVRAMAYSLFETGKFHRNISRLNDEGKIIVIKELGKMSELNGMLNFVDMLSDYNRGKDRTSSVGNEHLRKEPRKMVQLNTNERIYRDFLFYKYFYSSDTPTIICEGKTDYVYLQCAIRKLHQKFPMLAGVNASGKIEFKIKFFRFSALTSKLFGLSGGATQLKQFIIDYDDACSRFKAAGLNKPVIVVLDNDAEAKPIYSLIKNYLNINVDGSELFYEYKRNLYIVATPLLPGLKETMIENCFSTDVTEKILSGKKFSWANDYKKDETYGKKYLAEYVVKKSAIQ

SEQ ID NO: 998 - protein, 580 aa, Collimonas arenae
  source 1..580: note = Related to NZ_CP009962.1
MTQLKNLKAAISLNDVATILGFTPKALAYILYKIPSAEKYAHFDIPKRSGGIRKISAPVARLKKLQTRLALTLQQCIIEINTSLKVKNVLSHAFTPKFSIITNAVNHRNKRFVFNLDLENFFGTINFGRVRGFFIENRNFQLHPDVATVLAQIACHENMLPQGSPSSPVISNLIGHILDIRLAELAHKTGCTYSRYADDLTFSTNKANFPSRVAQLINQTTHEWNTGKELERLILKAGFTINSSKTRMQYESNRQEVTGLIVNKKINTRTEYRHLVRAMAHNLYKTGQFYKTETVRDATGALVHTKVDGTVSQLNGMLSFVDSVGVYNLEKNEPKEFSVTKHKDAKPEAKLSAIETVYRRVLFFKNFYSPEYPVILCEGKTDSVYIKAALRKLVDDFPNLAVKKNGKVESKIRFFNYTKTADRIMNLNGGTGQINKFIVDYAPNCKKISAKGQLMPVIVLIDNDEGAKGIYSTVSKVTKKEVKNTDDFFFVAENLYIVATPLLEGKQSTIEDFFEPYVRDTKLHGKSFSGKNTFDPHTQYGKHYFAEYVVKKDESKISFEGFRPILARLDAALSDYKKKT

SEQ ID NO: 999 - protein, 601 aa, Pseudomonas sp.
  source 1..601: note = Related to RHQT01000006.1
MLGANAHISLPEWSTRLVTVIRVRVPINPFPSLIVMSKLASLKSATSLRELAVVLGYKPKNLSYILYIKPKKELYEEFEIPKKSGGVRKISKPCEELRALQRKLADFLQDCIDEINSEKKVKVSISHAFKRRHSIATNAFAHKNRRYVFNLDLEDFFGSLNFGRVRGFFMINKDFEFHEPVATVIAQIACFNGSLPQGSPCSPVISNLIGHVLDIRLAQLAKKTGCTYTRYADDLTFSTNKKVFPGDVAGFDVGASEWGAGRKLKKIIKDSGFVVNSKKTRMQFSTSAQSVTGLVVNKKVNVSYAYRRNVRAMADSLFKTGKFHLPGPEKKLGSVDQLSGMFSYIHMIIEFERAVRLNGSKDSQQERELLGIEKVYRQFIFFRKFYANPRPVVIYEGKTDAIYLHCAIRYFARIGKFPELAVKKGDEYHFNVEFFRFTKTTSRILGLSGGAEQLKNLIREYAQVCSLFKAPGNTKPVMMVIDNDKGAKNIYSLIKEFQKSEAPIDGSANNYNVVRNLFVIPTPKGKNKESKIEDFFDDQALASKLGDKTFDLNSDFDTANFYGKNAFAENVVNKNKDSINFVGFEPILARMVEVINYYKPS

SEQ ID NO: 1000 - protein, 555 aa, Pseudomonas stutzeri
  source 1..555: note = Related to CP066045.1
MLGFKPKALSYILYIKNKADLYNQFLIPKKTGGARTILSPCDELKAIQRKLSDYLQDCINEINSQRKITFSIAHAYKKKHSIATNARVHRGRRYVFNADLENFFDSINFGRVRGFFISNNNFKLHPDAATVLAQIACHNNSLPQGSPCSPVISNLIGHILDIRLARLASKEGCTYTRYADDLTFSTNKKIFPKSIAMLSDSEEHIWSTGKQLEKEIKKTGFAINNKKTRMQYKDSQQTVTGLVVNSKVNTRYSYRRTARAMADALFKTGKFTIKKPVQANGKSILLETPGTVEQLCGIFSYIHMIAEYNRSISMSNNKKLELSGIEKTYKELLFYRRFYANPRPLIIYEGKTDAVYLRCAIRSLIKLGEFPELGGINDKSEVEINADLFTYTKTASRILGLPGGAAPLKTLISEYLHNFSRYQAPGNTSPVIMLIDNDSGSKDIYSLIKQLRKEKNPIDGSEEHYYIAKNLFVVPTPKVLGKESKIEDFFTRNTLEMKIGTKSFDCSNDHDTETSYGKNAFAEQIVKANQNTIDFTGFRPILQRIVNVINYYRAI

SEQ ID NO: 1001 - protein, 576 aa, Burkholderia cepacia
  source 1..576: note = Related to JAIZSB010000002.1
MSRLAKLRRAAGIDDLAELLGFKPKAISYILYIKDPEKKYVQFEIPKRSGGTRLISAPCGDLMSLQRRLAELLQECIAEINEERKVRTVLSHGFRRKHCIKTNAWMHRGKRFVLNVDLSDFFGSINFGRVRGFFMANNNFKLNAKVATLIAQIACHENALPQGSPCSPVISNLIGHLLDLRLAELAKQSGCTYSRYVDDITFSTNKPQFPRNVAVQRDEDDHEWDAGADLVRIVGRAGFRLNDRKTRLQYHGSRQEVTGLVVNATLNTRVEYRHVARAMVHKLMTTGAFKRKRFVQNEDGTWALAEVDGKIEELNGMLSFIDSVDLYKRRRQLKEVERDKSLVTLKDLSATERYYGDFLFYKNFIFNERPVILGEGKTDNVYIQCALRSLLADYPSLIAKGANGFDQKISLFNRTSTIERLTQLSGGAEQFKTFVKEYLAARRKFPIKGKAPPIVIVADSDDGIGQVNAYLKNLTGSPVDMTADFTHIKENLYIVYTPLDAGGKGAPMENMFEKSVLQTQLGGKTFNPSNTKINHAKEYGKAYFAQHVVKKDADKIDFSGFKVLLDRIVKAIEHGS

SEQ ID NO: 1002 - protein, 579 aa, Burkholderia cenocepacia
  source 1..579: note = Related to QTSF01000012.1
MSRLAKLREATGLEELAKLLGFKPKSISYVLYIKDPEKKYAKFEIPKRSGGMRQISAPCSELMGLQRRLAELLQECIAEINEERGVKTVLSHGFRRKHCIKTNAWVHRNKRYVLNVDLQDFFGSINFGRVRGFFISNKNFQLKEKVATLIAQIACHDNALPQGSPCSPVISNLIGHLLDIRLAELAKQSGCTYSRYADDITFSTNKPQFPKNVAVQRDEDDHCWVAGADLAKIISRAGFKVNDKKTRLQYHGSRQEVTGLVVNTKLNARSEYRHVARAMVHRLMKTGSFTRKGYVLDKEGKGSIQEVEGTVESLSGVLSFIDSVDLYNRMSKIKKADREKPLVTLQDKTATERCYGDFLFYKNFLANEKPVVLGEGKTDNVYIQCALRSMFAQYPYLIKKNADKFDFQFSFFNRTSTTDRVTSLSGGSEQFKTFVKEYLAYRRKFPIKEKAPPIVIVADSDNGVKQLNGYIRSVTGSAVDMNADFTYIKENLYVVYTPIAADGKGAPIENLFEKNVLEKELNGKKFNPSNSGINPAKEYGKAYFAQHVVKADADSIDFSGFKVLLDRIAKAIAHGSAKV

SEQ ID NO: 1003 - protein, 577 aa, Burkholderia lata
  source 1..577: note = Related to CABWIJ010000002.1
MSRLAKLRGAAGIDELADLLGFKPKAISYILYIKDPAKKYTKFDVPKRGGGNRTISAPYDDLMNLQRRLAELLQECISEINGERKVKAVLSHGFRPKQCIKTNAWQHRKKRFVFNIDLQDFFGSINYGRVRGFFITNKNFKLTEKVATLIAQIACHDNVLPQGSPCSPVISNLIGHLLDIRLAELAKKNGCTYSRYADDITFSTNKPEFPRNVAVQRDEDDHDWVAGADLVKIINKSGFKINDKKTRLQYHGSRQEVTGLVVNRKLSARSEYRHVARAMVHRLMKTGAFVRTAFVQDKDGKVSLAKPAGTIPHLNGILSFIDSVDLYNRRSLLKVAERDKALVSLKDLSATERCYRDFLFYKNFLGNAKPMVVCEGKTDNIYIQCALRSLLAGYPSLIKKGVSGYEMELSLFNRTQTTDRLMSLSGGSEQFKTFVREYLNARRKYPINGKVPPIIIVADSDDGVKNFNSYIGGITGAPVDMKADFTYVKENLYVVYTPLGATGKGAPIEDMFDKSVLQKQLNGKTFNPSNSGINHATEYGKAFFAQHVVKKGAEGIDFSGFKVLLDRIVKAVEHSSK

SEQ ID NO: 1004 - protein, 591 aa, Methylobacter tundripaludum
  source 1..591: note = Related to NZ_JMLA01000001.1
MSHLKTLKEATTLHDVAHILGFQPKSLAYILYKKPSAEKYKHFTIPKRTGGKRSISAPYPDLMNLQKRLSDLLQNCISEINQARKIESTLSHGFRRKYSIITNAAIHRNKRYVFNIDLANYFGAINFGRVRGFFITNRNFELKPAVATVLAQIACHENTLPQGSPCSPVISNLIGHLLDIRLAALSSQVGCSYSRYADDLTFSTNKRNFPAKVAKLAEGNHQWQVGKELVRIIDRTGFTINNTKTRMQYMDSRQDVTGLVVNSKINTRAEYRRIARAMVHRLLNTGSFQRKQISYDDQGNLVETEVNGTLDQLNGMLSFIDSVSVFNKRKDKNPTEKEKDLMPSKDPDNNEKVYRRFLFFKNFYASANPLIICEGKTDNIYLKAAIQRLADAYPCLAEKKEKGGISLKVCFFRRNATSGRILGLAGGTGELINLIKMYATESKHITAPGKKQPVILLIDNDEGAKGIYGYVKNLTKSKGDSKAAFIFVTENLYIVPTPLTHDGKNTMIEDFFEESLKNTKLNGKTFNPSDKGFNSKTEYGKNYFAKHVVKENQATIDFNGFKPILTRIEAVLNYHSKKPSSESMAESMGSD

SEQ ID NO: 1005 - protein, 581 aa, Paraburkholderia tuberum
  source 1..581: note = Related to NZ_FNKX01000001.1
MSKLKILQAATSLHELADLLGFKPKAVSYILFKKDLAAKYTEFEIPKRAGGKRLIQAPYPELMNLQRRLSELLQDCIAEINAARDIDSVLSHGFRRKYSIITNAVVHRSKRFVLNIDLANFFGTINFGRIRGFFISNRNFALQPKVATLIAQIACHDHVLPQGSPCSPVISNLIGHLLDVRLSALAFQTGCTYSRYADDITFSTNKPLFPAKLAKAVEGDEHRWEVGKTLFRAITKAGFEVNAEKTRLQYTDSRQEVTGLVVNSKINTRSEYRRTARAMVHRLVSTGSFYRKRVERDGDGEVVISEKLGTLEQLNGILSFIDSVGVYNKKKGMKDDEREKPLTMPSSPDCQEKDYRKFLFYKHFFAIKQPMIVCEGKTDNIYLSCAIRRLAKSHLLLASPDGKGGSRLQVSFYKRTATTDRTIGLTGGTDQLISLIKEYRAESRRIKIAGKVQPLILLIDNDNGAKGIFAYLKNLLKVQIDPNAPYFEAHEGLYVVPTPLTSDAKGTMIEDFFDESVLKTMLNGKTFNPSNEGVNHKTEYGKAYFASHVIKKHENTIDFSGFKPILDRLEEVIAHHQKKHQ

SEQ ID NO: 1006 - protein, 577 aa, Polynucleobacter wuianus
  source 1..577: note = Related to JACVPK010000006.1
MSILEKLQAAQNLHDVALLLGYQPKSLSYILYVKPKTQKYTTFNIPKSSGGTREIKAPYPDLKTLQKRLSKLLQECIAEINLQKEITTSVSHGFRKKHSILTNAAVHKNMRYVLNLDLKDFFHSINFGRVRGFFIANQNFLLNPNVATIIAQIACHENCLPQGSPCSPVISNLVGHILDMRLVQLARKFGCIYSRYADDITFSTNKKVFPVDLATAALDGEQLWSVSKPLHDIIKRSGFDVNSAKTRMQYKFSRQEVTGLIVNSRVNVRFGYRRIARAMLHKLITRGEFHKPNSKKVSSVTNTTAPSLDYLNGVLSFINSVNLFVHKKHSFRVKSDSKKALEKSFLNLSISRGYRNFLLYKYFFAAKNPVIICEGKTDNVYIRSATRQLSTQYPILGKSSPDGTINLKISFFKRTKTTDMFLGLTGGASQFNKFIEDLRQPIFKDFLLKIKQPIIIVIDNDHEALKVFSYLYKNFNINCDKTVGFIEVFRGLYVIPIPLLSGANQSVIEELFDIKDLTRSLDGKKFNYKSDSYNTKLEYGKSAFATRIVQAKEDQIIFDGFKPLLTQIEEAIKSFRC

SEQ ID NO: 1007 - protein, 573 aa, unidentified
  source 1..573: note = Related to PHCU01000169.1; note = Betaproteobacteria bacterium HGW-Betaproteobacteria-12
MSFLTELKSAKSLHDVAYLLGYKPKSLSYVIYKMPVKYETFTVPKKTGGVRTISAPHPELKLLQRRLSDGLQSCWDEINSEKKISKPISHGFRRRSSILTNASVHRGRRFVFNVDIKDFFDSINFGRVYGFFLKNTDFALPESVAKILAAISCHEGKLPQGSPCSPVISNLIGQVLDIRLAQLARSHGCSYSRYADDLTFSTNKRVFPSAVAALGINHAWVVGDALSKIIERSGFQLNPKKTRMQYCDSRQEVTGLIVNRRANTRPEYRRLTRAMTHKLVTTGKFQIAGMKADASGTFAPTLVDGSISHLQGMFGFIDWVDLSHKKATETHDGPPSSISKVYKRFLMHRDFWASSLPVILCEGKTDSVYLRGAIRRLATAHPSLVSMTTVGKAEYKVRFFNYSYTSQRILDLSGGAPAVKSFITGYLKSVKKTPAPSNRQPLIVLLDNDSGGKVFYSLIKEYNGKKTPVDGMDDFYHLEANVYVVFTPIAKPGDNSSIEDFFEPALLATKIDGKSFNPSNEDLDENTEYGKAIFAAKVVRPNIPKINFDKFGLILARLERVMDAHVKKHVSKV

SEQ ID NO: 1008 - protein, 574 aa, unidentified
  source 1..574: note = Related to NCCT01000010.1; note = Hydrogenophilales bacterium 12-61-10
MSFLTILKNAKSLHDVADLLRYKPKSLSYVIYKMPVKYETFTVPKKTGGVRTISAPRPELKLLQRRLSDGLQSCWDEINTEKKTTNNKTTKPISHGFRKGASILTNASVHRGRRFVFNVDIKDFFDSINFGRVYGFFVKNKDFALPESVAKVLAAIACHDGKLPQGSPCSPVISNLIGQILDIRLAQLAHRYGCSYSRYADDLTFSTNERIFPSAIALSNIDHSWVAGVGLSKIIEKAGFQLNPKKTRMQYLDSRQEVTGLIVNRRINTRPEYRRLARAMTHQLVTTGKFQITAMKADALGTLVPSKIDGNIRHLQGMFGFIDWIDWRHKKARGTLAGMPSSIDKVYKRFLMHRDFWASSLPVILCEGKTDSVYLRGAIRRLATAHPNLVLMSAAGKAEYKVRFFNYSYTSQRILDLSGGASVVKKFITEYIKSVKKTPAPANQKPLIVLLDNDSGGKVFYSLIKEYKKTPVNGMDDFYHLAANVYVVFTPIAKPSDNSSIEDFFEPALLEMKINGKSFNADNEGLDKNTEYGKADFATQVVRPNIAKINFDKFDPILARLEGAMEAHIKKHVS

SEQ ID NO: 1009 - protein, 571 aa, unidentified
  source 1..571: note = Related to JAGFNH010000001.1; note = Candidatus Accumulibacter sp.
MFFLTNLKSAKSLHDVACLLGYKPKSLSYVIYKMPLNYTTFTVPKKSGGVRSISAPRPELKLLQRRLSDGLQSCWDEINDQKKITKPISHGFRRDASIVTNASVHRGRRFVFNVDIKDFFDSINFGRVYGFFVKNKDFALTESAAKVLAAIACHDGKLPQGSPCSPVISNLIGQILDVRLAQLAHRHGCSYSRYADDLTFSTNERIFPSMIALSNADHSWVAGAVLSKIIEKSGFQLNPKKTRMQYRNSRQEVTGLVVNRRINTRPEYRRLTRAMTHQLVTTGKFQLTKTKADVLGKLVPTKIDGSITHLQGMFGFIDWIDLCHRKNQEVPNVQQSAIGKVYKRFLMHRDFWANSLPIILCEGKTDSVYLRGAIRRLATAHPNLVSTNAAGKSEFKVRFFNYSYTSQRILDLSGGAPVVRRFITEYIKSVKKTQAPVNPKPLILLLDNDSGGQVFYSLIKQYNGKKTTVNGMDDFYHLAENVYVVFTPIDKPGDNSSIEDFFEPSLLAKKIDGKTFNADDTTFDKNKEYGKADFAAKIVRPNIAKINFEKFDPILARIEGVIEAHSKKHFP

SEQ ID NO: 1010 - protein, 594 aa, unidentified
  source 1..594: note = Related to JAIQFH010000036.1; note = Acidobacteriia bacterium
MSQLQALRAASTLEHVADLLDYKPKTLSYILYKIPAANKYTTFSIPKKDGNPRDINAPCSELKELQSHLSDFLIGCANEINEIRKFKDQLSHAFKPEHTIVTNAVRHKKKRYVFNIDLKDFFGTINFGRVRGYFLKDANFMLHAKVATILAQIACHDHKLPQGSPCSPVISNLVGHILDIHLCGLAFKNGCTYSRYADDITFSTNKPIFPENIAKLLPGQAHAWQVGNGLEKIVSRSGFTINHQKTRMQYRGSRQVVTGLTVNKKVNIKNDYRRTVRQFTQRVFNTGKFQYLAVVTDAAGAKTPTKIDGSLEQLHGMFGHIDFVDNENKEAEEKRDSGSSKAKNAAKDALYSKRKLYRRFLIFKDLYSAPRPVIICEGKTDNVYLLHAIKSLAANYPILASITTAGKVQIHVRLLKALDSSIGTILHLGHGASDLDRLAKQYAEEILRFKADGMEQAVVLLMDNDDGADEMYKLAKDLTGKNVSRAEPYFHLVGNMYVVVTPLIGTNKQSEIEDSFADTLKNVVLDGKTLSTKNKFDTAKYFSKHVFAQHVRENASKIDFSGFSGILDRVAAAIQANQIRIAASAAPQAVPATV

SEQ ID NO: 1011 - protein, 588 aa, unidentified
  source 1..588: note = Related to JAIQFA010000126.1; note = Acidobacteriia bacterium
MSQLQALRAALSLHQVATLLQFQPKALSYILYKKPLPTRYTSFNMAKRDGGVRTINAPSPELRLLQHNLSDLLQNCVEEINEGKKWKDQLAHGFKRDCSIITNAVKHRKRRYVFNIDLNDFFGTINFGRVRGFFIKDANFMLHPKVATILAQIACHENVLPQGSPCSPVISNLIGHVLDIHLCKLAASNGCTYSRYADDITFSTSKPDFPESIARRVTGQAHTWEVGGGLQNIVAHTGFSINPKKTRMQYRGSRQVVTGLVVNKKVNIRTEYRRRARSLAHELFKTGTFQHVKTIPDANGVVTPTAVEGTLAQLHGIFGHIDAVDHHNFKIQSKADPREAKIVLRSKEKLYRRFLMFKDFYAASLPVLVCEGKTDNIYLLHAIRSLAAYYPKLATVAANKKITLNIRILKTVKTSTGRVLQLEGGASYLKAFIEQYVSEIHKFKAPGMQAAVVLIVDNDSGADEIYNTIRKLAKIKAPRSDAYVPVAGNLYVVPTPLKAGATKSAIEDCFADEIKNLKLGGKTFNANSDEDTVAYFGKHILSVYIRENASKVDFTGFAGLLDRITAAIEAHQAKQAAVGIASAPAAQP

SEQ ID NO: 1012 - protein, 595 aa, Pseudomonas aeruginosa
  source 1..595: note = Related to NRAO01000002.1
MRNLELLKSIKTRSELAVLLGYKPKALTYLLFKMPPEQRYKSFPVPKRSGGQRTINAPCPELKALQKRLAGLLVNCSSELALAKKLPRISYGFNKGGSTLDNASVHRRRRYVLNVDLEDFFGSIHLGRVRGFFINNEDFKLLPDVATVIAQIACLDGKLPQGSPASPVISNIIGHILDVHLARLARRYGCSYSRYADDLTFSTNKPIFPQQIASLVDPLEHIWVAGGELEREITRCGFRVNHSKTRLEYNDSRQVVTGVVVNKKLNVPSEFKRGARAMADRLFKTGSFENVQVVELDGVKQFARTSGTINQLAGVFSYIYMVSHWNSKKLAIKPGTPLTSIERVHRDFLFYKDFYANQFPTILCEGKTDNTYLKCALKGLASSFPALIGRKPDGSPDYKIRFFRGSRLAARLLSLSGGTAQLKDFIAAYSSWCAKFKSQGGAKPVIIVIDNDAGATHIYNWYASVKRIPKPDGMLPYYYVGQNLYIVPTPKAAPADMSKIEDLFKADALGVILGGKRFNPNNDTENTTEYGKQYFADHVVKARQKTIDFSGFEPLLDTISKIILSHTTAVAAAAETSFAAAIEASTAVAPVAPPT

SEQ ID NO: 1013 - protein, 476 aa, Pseudomonas sp.
  source 1..476: note = Related to CP068986.1
MITNAINHRNKNLVLNIDLADFFGSIHFGRVRGFFLKNENFKLSPSVATVIAQIACHENALPQGSPCSPILSNMIAHILDIRLARLAAAEKSSYSRYADDITFSTNKKEFSESLVRCIDHVNHTWVAGTALENTINRAWFSINSKKTRLQYRDSRQIVTGLTVNSKVNVRAEYHRTAKAMTHKLFRTGSFEVLKANEHGIQEKTAGSLHQLNGILSFIYMINDYNRKLRAQNPLNPAFTPTPDRLKSIEKSHKRFIFYRDFYASPVPTIICEGKTDNIYLRAAIYSLSAKYPELVETNKDGSKKLKIKLFKYTEQIKHLMSLSGGTGEMTKFMTSYTKECAFFKAPIGLKPVIMLIDNDQGAIEIYKQIHKMKKLAKKPDGSDELHFIGRNLYVVPTPLNKGQNTMVEDLFEPKLLKTELNGKKFNPDDAKMTSNEYSKNHFAKFVVKAQQESIDFSGFEPILNTILKIVKQHGRL

SEQ ID NO: 1014 - protein, 590 aa, Pseudomonas fragi
  source 1..590: note = Related to NZ_CP065202.1
MSELAKLKKIISLQDLSSMLGFKSSALSYLLYKKPKTELYRTFEIRKKTGGIRIISAPCPELKLLQSNLARLLQKCVNEIQEARININQNKIQKHRSLSHGFKPGFSILTNAKSHRKKRVVLNIDLEDFFGSIHFGRVRGFFLSNRDFNLSPKIATIIAQIVCHNNSLPQGSPCSPIVSNLIAHILDIRLSKLAFENKCSYSRYADDITFSTNQEKLPDSIARCTCEESHIWIAGKNLLRIIKDSWFSINSKKTRIQYRDSRQEVTGLVVNSKLNIKAEYHRTAKSMAHSLFQTGSFTILKRNESNELERCYGTINQITGIFSFIYWINKYNRELPIGVPPDDVPPPKIEDLKSIERTHRKLLYYKYFFANEIPTIVCEGKTDNAYLKAAIQSLAQNYPALVEVDKDNNKILKVKFFKYSKQVKYLLALTGGTGDLEKLISNHPKECSSFKARAGTKPVILVIDNDSGANGIYNRLHKFLKLSKKPDGSQEFYYYGNNLYIVPTPLAADGGQTMIENLFDPTLLQTVVNNKTFNPDEKASSSLYYGKSKFVENVVMPNRSTIDFGGFTKLLDTISKVVDNHALLVSQSKP

SEQ ID NO: 1015 - protein, 605 aa, Pseudomonas sp.
  source 1..605: note = Related to JAHUWE010000017.1
MSELIKLKKTNSLSDLALYLGYKPKSLSYILYKKPKEELYRSFEVPKKTGGSRTISAPCKELKLLQSKLLEKLQACINEIQSLKNLRKTLTQPFKTEKNTSLSHGFKPGFSIITNARQHRHKRHVLNIDLENFFGSIHFGRVRGFFIKNQDFNLHPKIATILAQIACHDNVLPQGSPCSPLISNLVAHVLDIRLAELAKKNDCTYSRYADDITFSTNEKKFPSSLAVCVCEEDHIWIAGKTLVDLVKKCWFSINHAKTRLQYKDSRQEVTGLIVNSKVNVRAEYHRTAKAMAHRLFHSGKYETLGFDKDGLSKKVLGSVNQLSGVFSFIYMINKYNRNLRTINPLEKFPNPQPKLKSIEETHRKLLFYKDFYANEVPTIMCEGKTDNVYLRTAIRSLSEKFPALIEKDKDGEKRLKLKIFNYTDQVKYLMHLTGGTGDMVKFTSNYPKECSFYKSKGGLKPVILVVDNDQGASDLYTRIQKFGKMPVKPDGSKPFYFYSNNLYIVPTPLTPDGKQTMIENLFDPELLKTELDGKTFNPDEKTATASNYSKNHFAEYVVKANQKTIDFSGFEPLLATISKIIQDHERLSALATLPLATASHKVAKA

SEQ ID NO: 1016 - protein, 561 aa, Xanthomonas vasicola
  source 1..561: note = Related to CP028127.1
MSELNKLKACTTIGELALLLGFQAKTLGYIAWGLPSATKYSTFAIPKRSGGKRTIHAPSPQLKLAQGKLSILLQACEKEIEEELGVKHTVAHGFKLGRSILTNADVHRRQRYVLNFDLSDFFGTINFGRVRGFLINNRNFQLHPDVATLIAQITCHKDMLPQGSPTSPVISNLIGNILDVRLSKVARANGCAYTRYADDITISTSQTEFPKAIANQVDSTSGWTLAKDVEQAVAACGFRINHAKTRLLHHRSRQDVTGIVVNRHVNVNTDYRRAVRAMVNNLCSTGTYHRKKSIVAAEDTTTVSVEGSRPQLEGMLGFLLQVERYRRSDELPPPTLSSTELLLHRFLFFTTFASNDRPTILFEGKTDNIYISAAIRRLRESYPLLMAPGSKELLVKLLPHTKTRERIFNLTGGDNPLTSFIVSYRENYRRIKGPKGANPVIVIFDNDSGSNAVIAAIKKHYKLDMPDGDQYIRVYDNLYVLLTSKKGSGNHCIENYFSAATLAKTLSGKKLSLSNKKLKDDEYGKAWFAEKIIKPYYKDINFSNFSGLLDPICEIIQGHYP

SEQ ID NO: 1017 - protein, 561 aa, Xanthomonas translucens
  source 1..561: note = Related to NZ_CP064002.1
MGELAKLKACTNTGELARLLDFQTKTLSYIAWGTPSAAKYSAFDIPKRSGGKRAIHAPSPQLKLVQGKLSKLLQACEKEIEEELGVKHPVAHGFKQGRSILTNADVHRRQRYVLNFDLTDFFGTINFGRVRGFLIGNRNFQLHRDVATIIAQIACHDDKLPQGAPTSPVISNLIGNILDIRLSKIARAQGCAYSRYADDITMSTSQPQFPHAIARQLLATPNWVVTKEIEEAVKACGFKINHAKTRLLHHRSRQDVTGIVVNRHVNVNGDYRRAIRAMVNRLCSTGTYHLEKTVLAAGQTMLASIEGSRPQLEGMLGFLLQVERYRRSDDLVPPILSATERLLHRFLFFTTFAANDRTAILFEGKTDNIYISSAIRKQRATYPALIAPGSNELLVKLLPHTKTRERIFNLTGGDSPLTNFIVGYRDNYRKIKGPKGSHPVIVIFDNDKGSNAVIGAIKKHYKLDMPDGDQYIHVYANLYVLLTSKKGSGDHCIEHYFSEATRAKKLSGKKFNLSNKKLKDDEYGKAWFAEKIVKPYYKDIDFSGFAGLLDPICGIIKSHHP

SEQ ID NO: 1018 - protein, 561 aa, Xanthomonas sp.
  source 1..561: note = Related to NZ_NSGT01000016.1
MSELAKLRACTTIAEAAQLLGFQTKTLSFIAWGLSPAMKYSVFNIPKRSGGKRTIHAPSPQLKLAQEKLSRLLQACEKEIEDALGVKHTVSHGFKSGRSILTNAEVHKRRRYVLNFDLADFFGTINFGRVRGFLITNRNFQLHPDVATLIAQIACHEDKLPQGAPTSPVISNLIGNIMDIRLSKIARAHGCSYSRYADDITMSTSHPQFPGAIAHQIGTPFKWQISKELETAVGASGFKINHAKTRLLHARSRQDVTGIVVNKHVNVNTDYRRAVRAMVNNLCSTGTYYRENPVLGVDNTNMTLVEGSRPQLEGMLNFLLQVERYRRSDHLTPLELSATERLLHRFLFFTTFADNDKPTILFEGKTDNIYISSAIRRLRASYPLLMAPGSRDLLVKLLPHTRTRERIFSLTGGDSPLTNFIISYRENYRRIKAPKGTNPVIVIFDNDRGSNGIISAIKKHYKLDMQDGDQYIRVYDNLYILLTSKKGSEKHCIEHYFSEATRAKKLSGKKLSLSNKKLNDDEYGKAWFAEKIVKPYYKEIDFSGFAALLDPICEIIQSHSP

SEQ ID NO: 1019 - protein, 567 aa, Lysobacter capsici
  source 1..567: note = Related to JAJA02000003.1
MSDLIALRACTTIAGVAKLLGFQAKTLAYIAWGAPSATKYSVFDIPKRSGGKRTIHAPAPQLKLAQGKLSNLLQACEKEIEDSLGVKHSVSHGFKRERSILTNAEVHRHQRYVLNLDLLDFFGTINFGRVRGFLINNRNFKLHPDVATLIAQLACHEDRLPQGSPASPVLSNLIGNILDIRLSKMARAHGCAYSRYADDITLSTSKPEFPTAIAHQVDAFKWQASEDLESAVGASGFKINHAKTRLLHHRSRQDVTGIVVNQHINLNSDYRRNVRAMVNKLCSTGSYQRDKTILAADNTTKVSVEGSYAQLQGMLGFMMQVERHRRSGGPLPSTLSATERLLHRFLFYTTFAGNDKPVILCEGKTDNIYISAAVKRLSASYPKLIEPESKNLLVKILPHTATQERIFNLTGGDNPLVNFIIAYRDNYRLIKAPKGANPVIVIFDNDNGSNAVIAAIKKHFKIEMPDDTQYIRAYANLYVLLTTKKGTGNHCIEHFFPSKTLKKTLSGKKLNLSNKKLKDDEYGKAWFAEKIVKPYYHDIDFTGFSGLLDPLSEIITHHANHKIDEKG

SEQ ID NO: 1020 - protein, 569 aa, Pseudoxanthomonas sp.
  source 1..569: note = Related to FOAX01000001.1
MSNLSRLHACTSVVDLANLLGFQAKALGFLAWGLPPTARYSTFDIPKRSGGKRTINAPIPQLKLAQQKLAAILQSCEAEIELLLGVKRSVAHGFKPNHSILTNAAVHRRQRYILNFDLEDFFGTIHFGRVRGFLITNRYFKLHPDVATLIAQLCCHQNQLPQGAPTSPVLSNLIGKILDVRLSKLARIHGCAYTRYADDITMSTSAPEFPAALATECANSLTWQLSARVTSAIADSRFKLNPSKTRLQHRRSRQDVTGIVVNQTLNANSDFRRSTRAMVDKLCRTGCYQLVKPTLLAGDTVSEPREGTNAQLHGKIGFLLQVERFRRAGDPESPQLSATEKLLKRFLFYTTLANAERPVILFEGKTDEIYLRCAIKRLASAFPRLAAAATGEVLVNLFSHTPTRQRIFGLTGGDPPLTNFVNEYREHYRPIKGPKGTHPVIVLYDNDNGANSIFAAMDKIYKVKMADGLQFIRIYDNLYIVLSSAKCAPGTGHCIEHLFDKSVLTTTLSGKTLSLSNKPLKPTEYGKAWFAEKVIKTNYKSIDFSGFHPLLEAISTIVTTHKASSSPLP

SEQ ID NO: 1021 - protein, 562 aa, Luteimonas sp.
  source 1..562: note = Related to JAIWPR010000054.1
MSKLLALHLCNSASDVARLIGFQPKAIGYLAWGTKARYTTFEIPKRSGGKRTINAPILHLKIAQRKLADLLQECESEIEEAIGVKQRVSHGFRRDHCILTNASVHRGKRYVLNLDLEDFFGTINFGRVRGYFITNKHFQLKADVATLLAQLACHDSKLPQGAPTSPVISNLIGNILDIRLLKLARAHGCSYTRYADDITISTSAPTFPVEIALEGPTNTWTLSKTLNDSVKSSGFAVNAKKTRLLHRRSRQDVTGIVVNKCLNVNSDYQRRVRVMVHHLRSTGKFYRKLSSLTAAGDTEVQSRDGTRAQLQGMLGFVMHVERFRRGDEPLPEKLTGIEKLYRRFLFYTQFANHEMPVLLFEGKTDTIYLGAAIRALAPAYPTLIAASALQVHMLRNTPRIERLFGLRGGGDQLFNFVGEYHEEYRHIQGPKGTRPVIVVVDNDAIGRNMVKKVEGMTKTTIPVGSQWFRVQDNLYVVLTSPFDPKGAMHCIEACFDPKFMATALGGKTLSKGSKGKKLDPAKEVSKAWFAEKIVKPNTKSISFAGFSSLLDCISDVITKHVP

SEQ ID NO: 1022 - protein, 563 aa, Xanthomonas vesicatoria
  source 1..563: note = Related to CP018725.1
MSKLFALQQCSGASDVAHLIGFQPKALGYVAWGTKARYSAFDIAKRSGGKRTIHAPIPQLKLAQQNLAELLQECELEIEAALGVKKRLSHGFRRDHSILTNADIHCGKRYVLNFDLEDFFGTINFGRVRGYFTNNKHFRLKPDVATLIAQLACHESKLPQGAPTSPVITNLIGNILDMRLVKIARANGCAYSRYADDITFSTSAPEFPTAVASEIAPHAWTLSKTVEDSVKASRFSINASKTRMLYRRSRQDVTGIIVNKFVNVNSDYQKRLRVMVHHLRSSGIFHRKNSVLGASGNTSVQKEVGTRNQLQGMIGFALQVEAFRRYGAPPPPELTSTERLYKRFLFYTQFAAHDKPVLLFEGKTDVVYLKSAIKSLSASYPTLYTGSDILVHLLRHTPRMERLFGLSGGGHPLIAFIKNYHEEYRHITGPRGAKPVIIVVDNDQIGRNTINLIEKITKTVVAPGTQAVKVFDNLHVILTSPHDKDSELHCIEDCFDPAFIKAELDAKTIYNGKKIKKNNEFDPSIHISKSAFAETIVKAKAAAIDFAGFKPLLDHIAAVIAKY

SEQ ID NO: 1023 - protein, 645 aa, Lysobacter capsici
  source 1..645: note = Related to CP011130.1
MIQIGLANAHRKLALAALTSIASQAALCLLLGVAGRFGCRRIAASEAIARWICPVTLSATRRSLGVRESSCNPSFPASHGDGMSKLLALQICNSASDLAHLIGFQPKALGYVAWGTKARYSTFNIPKRSGGKRTINAPIPQLKLAQQKLSSLLQECEREIEETLNVRHRLSHGFRKQHSILTNAAVHRGQRCVLNFDLQDFFDTINFGRVRGYFMTNKHFRLRPDVATLIAQIACHDSKLPQGAPTSPVISNLVGNILDMRLVKIARANGCAYSRYADDITLSTSAPEFPEAIAIEGPTHSWTLSKAVNDAVKASGFRVNAAKTRLQYRRSRQDVTGIVVNKCVNVNADYRRRVRVMVHHLRSSGKFYRKSSGLSAAGDTEVQQHEGTIAHLQGMIGFVLQVERFRRGEDPAPAELSGIEKLYRRFLFYTQFANHEKPVLMFEGKTDVIYLASAIKSLAAVYPTLIVKPPELLIHLLRYTPRIERLFGLSGGGHQLITFIKNYHDEYRYIQGPRGSKPVIAVVDNDKIGRDTINLVEKITKTPMPTGAQSVRVYDNLYVVLTSPHDKAGKHHCIEDCFDPEFVKSELAGKKISKGTKGVKLDPVTEVSKAWFAEKITKPSFKPIDFSGFQPLLNEIAAIIAKHAP

SEQ ID NO: 1024 - protein, 589 aa, Pseudoxanthomonas sp.
  source 1..589: note = Related to JACVAG010000008.1
MSKLAALKACSSIGDLALLLGFKAQTLGYIARGLRDPAKYTSFDIPKRSGGKRTIHAPVPKLKLVQRKLCNLLEECQKEIESTLGVEKRLAHGFKKHHSIFTNADVHRRQKYVLNFDLEDFFGTINFGRVRGFFIANRHFKLNSDVAMLIAQLVCCNAKLPQGSPSSPIISNLIGNILDIRLAKLARANGCSYSRYADDITISTSLPDFPSAIASLVTGSHVWTLSSDVMNTISACGFKLNPKKTRLQYHHSRQDVTGIVVNRHVNVSSDYRRKLRAMVDRLRSTGSFTYSATELDTAASTKVSVKTGTRNQLQGMLSFALQAERYRQASTSTPAPECLTGNEKLLRRFLFYTTFASHERPLVISEGKTDGIYLASAIRSLAATFPELVAPKTGVPAVRFLRLTRSMERLFGLSGGDGPLKEFVHQYAEEYRHIKGPKGSMPVIAIFDNDTGAKGVLGLLKGFYKMPMPAGAQSVHVHGNLYVVLTSPHITGAPSHCIEDCFDAATLAITLSGKTLSLANKTLGPNEYGKAWFAEKVIKPNAKTIDFAGFNGLLGVISQIVKGHTPPPVAPPAPSSVALPLVTPKPSIP

SEQ ID NO: 1025 - protein, 580 aa, Lysobacter sp.
  source 1..580: note = Related to JAHCAU010000005.1
MSALTNIKACNTFNDFARLLGFKANSLAYLLWGMHADTKYTTFDIPKRSGGKRTICAPNPKLKLAQSRLSELLQQCEKEVEVIHAVKKSLSHGFKKEHSILTNAEGHCGRRYVLNIDLEDFFGTIHFGRVRGFFIKNRQFALNPTIAMTIAQIACHENKLPQGSPCSPVISNLVANILDIRLAKLSKIHGCSYTRYADDITFSTSMPDFPESIAFKQIDSNHWVLGKPLVDAIKACKFRINLSKTRLQYRRSRQDVTGIVVNKQLNVRSEYRKALRAMVYKLRETGSFSRNYSQLGANGDTQVIAKDGSRAQLFGMLSYVIQVERWRNRRIDSPPERLSANEWLMREFLFYTMFANADRPCIVCEGKTDSIYIREAIKNLGASFPYLAKSNAGNNEVIVSLVRNTDLLARLFGLSGGETRLKDFVKNYRDEYRKIKGPKGSHPVIILFDNDSGAKDVLNLLANLFKVIPVVGRQYFHVHDNLYVMLTSPVGAGPHYIEKCFDAATLAMTLGGKTFNPANQTLGPNEYGKGFFAEKVIAPNAQSIDFSGFSTMLAEFSSIIVSHAAPSPSLPVPPGMAPSP

SEQ ID NO: 1026 - protein, 713 aa, Stenotrophomonas maltophilia
  source 1..713: note = Related to NZ_CP018756.1
MSALKRLQAATTLSDVAKILGFKPRALAYLIRVMPAGSRYTEFEIPKRMGGFRRICAPNKKLALVQTRLADLLSDCAEEIAAQRSVKKYVAHGFRRGHSILTNADVHRGRKYVLNVDLLNFFDAIHFGRIRGFFHTSQDFQLELEVATVIAQIACHEAKLPQGSPCSPVISNLIANILDMRLAPLAQHYGCSYTRYADDLSFSTNRREFPEELAAQVKGQEPIWEVGPALLAAIKTAGFSINPKKTRVQYDCSRQDVTGIIVNKFLNTPIEYRRTLRSMVHHLTGTGKFYLKDVDPATGKKREGSRAKLQGMLGFAYQVEKWRSRRSPVVSGAHTAMEKLLQRFLYYTEFASPSIPAIVFEGKTDSLYLREAIRRTPSAMPMLATGVGGGYRLRVKLHRESVIMRKFFNLSSGGDPLKNFIRDFSKLFPRIVGPKGEMPVIVLMDNDSGFSSTKSMLKNCYGISVMPGDQKIHVFENLYILLTSPYAVGASHCIEDCFPSSVLATKLGSKSFSKSNDFDTSTHYGKEWFAEKVVKPGSKGIDFTGFNGIIDGVKAILLEHAVSFKAKALLPMAAPSVGGASIAAPSAARRLIPKVSKAPKTLAASTPSVASKSSTAVLDPTGPEAPKVPKAPNIPKAPKAPKAPKAPKAPKAPKAPKAPKAPKAPKAPTGPEAPKVPKAPKIPKAPKAPKAPKAPKAPKAPKAPKAPKAPSPK

SEQ ID NO: 1027 - protein, 572 aa, unidentified
  source 1..572: note = Related to SEBG01000120.1; note = Cytophagaceae bacterium
TTTIGFKPKALSFITRVTPPAARYIEFDIPKRSGGTRRICSPNKQLSLLQSRLAELLNECEVEIAQQRSIKRHVAHGFRKGYSILTNADVHRGRRYVLNIDLTDFFGTIHFGRVKGFFENSLDFQLKAEPALVLAQIACHEGKLPQGSPCSPVISNLIANILDMRLVALSKRHGCSYTRYADDLSFSTSKLIFSDALATPSEANKSIWQAGPDLIAAVHSAGFKINPLKTRVQLSRSRQDVTGVVVNRQLNTPVEYRRTLRSMVHRLCSTGEYLLQETDPATGKQKVGTPAQLQGMLGFAYQVERWRSRNDEPASGAQTAMERLLKRFLYYKEFASPMLTAIVFEGKTDSVYLREAIRRSGTAFPMLSKGAGTTFELKVKLHRESKIMKKLFGLTSGGDPLKNFIKCYRWEFSRIDGPKGQNPVIVLMDNDDGFTGTKAMLFNVYKISISSGQQFIHVWENLYILLSSPFGGAKHCIEDCFTASVLAVKLGIKEFSKTNDFDPNIYYGKEWLAEKVVKPNSATIDFSGFGNLLSALQDVILHHSATMLSARAANTGVPSLPMPLPIPGGPAP

SEQ ID NO: 1028 - protein, 585 aa, Paraburkholderia madseniana
  source 1..585: note = Related to NZ_WVHR01000032.1
MKKPTHIAQLRSLAALHGLATLLGYEAKGLAYVVYGIKDKDKYVDFPIPKRSGGTRIISAPVKSLKLLQSRLSTLLAACAEEIEVERGGKNKFFHGFRKNHSILTNATVHRGKRYVFNVDLSDFFGSVHFGRLTGFFTKNRHFELEPVVARILAQIACHNTVLPQGSPCSPVISNLIAHILDVRMAQLAARNDCYYSRYADDLTFSTNRNEFPSAIATRVGDSNEWVAGKSLLKIVKDSRFELNHSKTRMQFHRFRQDVTGVVVNKKLNVPSEYVRDVRAMVNSFVKTEKFTLRKKYRNDTGAWVLETVQGTKEQLRGMLSFIDNVRVFPQKKLAMEKKDKREQRIPRVEFKDMDGASRMYRRYLQYTQFFNPELPFVICEGKTDNVYIKCALRQLAGTYPQLVSKTASANKLLLNFFNYTKVADRILHLGGGTGDFQTFIGNYGSEFKGFKSEKKRNPVILLIDNDEGTAKIFSSIKTAIKSKSPVDGSEPFYHIADNFYVVAIPRKGGKSTTIEDFFDPALLKTKLGTKIFSGKDGFDPATEYGKHYFAEYIVKKGQKTIDFSGFHPILERLVAVLMAHAVKP

SEQ ID NO: 1029 - protein, 585 aa, Paraburkholderia bryophila
  source 1..585: note = Related to NZ_QLTK01000030.1
MKNPTHIAQLRAQTSLHGLARLLGYEPKGLAYVVYGIGDAYKYVDFPIPKRSGGTRIISAPVKSLKLLQARVSTLLGACAEEIEVERGGKNRFSHGFRKNHSILTNATVHRGKRYVFNVDLHNFFGTVHFGRVSGFFAKNRHFKLDPVVARILAQIACHNKVLPQGSPCSPAISNLIAHILDVRMAQLAARHDCYYSRYADDLTFSTNRKEFPESIATRVSDSNEWIAGKSLLKIIKDSRFELNHSKTRMQFHRFRQDVTGVVVNKKLNVPSEYVRDVRAMVNSFVKTGQFTLRKSYRNDAGAWVVEEVAGNKVQLRGMLSFIDSVRVFPQKKLAMEKKDKREQRIPRVELKDMDGASRTYRRYLQYTQFFNPELPFVICEGKTDNVYIKCALRQLADTYPQLVSKTASENKLLLNFFNYTKVADRILHLGGGTGDFQTFIGNYGSEFKGFKSKEKRNPVILLIDNDEGTAKIFSSVKTATKRKSPVDGSEPFYHIADNFYVVAIPRLSGKSTTIEDFFDPTLLKTKLGTKVFSGKDGFDSATEYGKHYFAEYIVKKGQKTIDFSGFHPILERLVAVLTAHAAKP

SEQ ID NO: 1030 - protein, 594 aa, Paraburkholderia sp.
  source 1..594: note = Related to JAAGPR010000055.1
MSADILPLTMKTPTHIARLRSISSLHSLARLLGYEPKGLAYVVYGIDDKYKYTDFQIPKRRGGVRTISAPIEKLKLLQRRVATLLDACVEEIDAERGVRNTLSHGFRKKHSILTNAAPHRNRRYVFNVDLHNFFGTVDFGRVVGYLKKNKHFQLNPTVARMLAQIACHQKVLPQGSPCSPAIANLIAHILDIRLGRLAARNDCHYSRYADDLTFSTNRPVFPSEIARRVGDTNEWVAGKILLKIIKESRFEINPEKTRMQFARFRQDVTGVIVNRTLNVRREYVKNARAMVDSYVTKGVFYSEKQYRDEKGAWTNELVDGTVGQLRGILSYIDSVRLFEQQKHASAKKTKRDYRVPRVEIKDMDSAARTFRRFLLHTQFFNPEKPLIICEGKTDKVYIQCALRQLVDAHPQLATRTKSGVDIHVSFFNFTKVADRILRLGGGTGDFQDLIAKYGTEFKGFYAKGQRQPVILLVDNDDGTKKIFSTVKTATGSKTAIDGSASFYHIADNFYVVAVPQLGKKDTTIENFFDPVVLTERLGTKVFSGKDQFDPATQYGKHHFAEYVVKKKQNTINFAGFEPILARLDAVLKEHAAKP

SEQ ID NO: 1031 - protein, 585 aa, Paraburkholderia kururiensis
  source 1..585: note = Related to NZ_BBJI01000006.1
MNKITHIARLRPLSSLHGLAHLLGYTPKGLASIVYGTPDSSKYNDFRIRKRSGGTRLISEPNDRLKLLQRRLANLLSECIDDIDSERRVTNSFAHGFRKKHSILTNASRHRRKRYVFNVDLHDFFGTVDFGRISGYLKKNKHFLLDERVARMLAQIACHNKVLPQGSPCSPVMANLIAHILDVRLARLAALHDCYYSRYADDLTFSTNRADFPSSIAKRVEDSNLWVAGKALEKIVSESRFQLNPSKTRMQLNRFRQDVTGIVVNSGINVRSEYQKTVRAMVHSLVTKGVFHIQKLHRDDKGAWVREKKEGTRAQLRGMLTFIDNVRLFEKTKRLPPDRAQDQRGQKGDPAEMDSATRTFRRFLMFTQFFHPEKPLILCEGKTDKVYIQCALRRLSTAYPLLSSKSATKTNIHVSFFNYTKIASRVLSLGGGTGDLNGLVATYGSEFAGFKSTTKRHPVILLVDNDEGTKGIFSAVKTRTKSTSPITGNEPYYHVADNLYVVSLPLVNSNMVTIENFFPKHVRDTKLNGKVFSGKNRFDAKNQYGKHVFAEQVIKKIQNAGDFSGFHDILMRIQAVLVVHSAKKP

SEQ ID NO: 1032 - protein, 583 aa, Burkholderia vietnamiensis
  source 1..583: note = Related to NZ_JZUR01000039.1
MTTTHIQKLQATAGLYSLSDLLGYSAKGFAYILHGISDDHKYIQFDIAKRSGGKRIISAPIPELKILQRRLAELLEACVVDIDNSRKLKNTFSHGFRPKHSIMTNASFHRKRRWVFNVDLQDFFGTINFGRICGFFAKNKYFQLDPTVARIIAQIACHEKKLPQGSPCSPVIANLIAHILDVKLARLASSYGCFYTRYADDLTFSTNSEIFPELIASRIDGSNEWTAGKKLLRIIKDCAFEINPAKTRMQFREFRQDVTGLVVNSKINVRTDYVKSARAMVNSLVESGEFYIKRRFRDENGAFRDETEKGEPDVLRGMLTFIDSVRQFDALKNVRDIDKADHRPTRPLAKDLSSADRTFRRFLLYTQFHNPQKPLIICEGKTDKVYIQCALKQRKDKFPDLSKKEDETDGKLSFFNYSKVADRILHLGGGTGDTDAFIARYGKEFKGFFENKKQHPVIVLADNDSGAKSTFGVVKKAGNIPSVDGSAPYYYICRNLYIIFIPKIDGKDTTIEDLFDKSVREAELNGKKFSGSDKFDAKTEYGKHLFAEYVIKPKQKEIDFSKFDSILKSIVDVLADFEKRQPT

SEQ ID NO: 1033 - protein, 584 aa, Cupriavidus taiwanensis
  source 1..584: note = Related to NZ_LT977071.1
MTTRLASLKAANSLHTLAQVLGYRAKGLAYVVHGIPDSIKYTDFQIKKRSGGLRTISAPIPELKKLQKHLAHLLEDCAAEINSTRGIKKSLSHGFRRKHSIMTNAAAHRGRRYVFNIDLQDFFGTINFGRVWRFFEKHREFQLNSAVARTIAQIACHNKVLPQGSPCSPAISNLIGHVLDIRMAQFAAKVGCHYSRYADDLTFSTNKKEFPALIATRMGDTTQWSPGTKLIREIRRCGFELNFAKTRMQFKDFRQDVTGVIVNSKVNVRTEYVKNVRAMVHALVTRGEFQIRKVFRDDSGAWTEAVAKGSEAQLRGMLSFIDSVRHFEECRDTPKNNGVPDYKLPRSSLDDMDGPARIYRRFLVFTQFFRPVQPLIFCEGKTDNVYIRCALRQLFAKYPALAAKKKSGEIEFKIDFFSHSKVADRILHLGGGTGDMCDFIAKYGSEFKGFKHDGKRNPVIILIDNDSGANRIYSAIRSAIKSKDTIDGSKPYYFVRDNLYIVPVPMLGGNPTAIEDFFEKKVLDTVLNGKKFSRADKFDAATQYGKHLFAEHVVKKGQKSIDFSNFAAILDRINDVLTIHAAKP

SEQ ID NO: 1034 - protein, 581 aa, unidentified
  source 1..581: note = Related to JAFEDJ010000026.1; note = Proteobacteria bacterium
MTRLKKLKAASSLHAFADVLGYKAKGLAYIIHGIDDSKKYKDFEIKKRSGGLRKISAPIPELKRLQKSVAHLLEDCVSEINSHRKTKGTLCHGFRPKHSIMTNAAIHRKKRYIFNIDLKDFFGTIHFGRVWRFFEKNRDFALDSSLARTIAQIACHNRELPQGSPCSPSISNLIGHILDIRMAKLAAQAGCQYSRYADDLTFSTNRKNFPPEIAQRVGDTNLWVPGKQLANEIKRCRFEINPAKTRMQFKDFRQDVTGIVVNSKLNIRAEYAKNVRAMVHSLVTRGEFTVRKTFRDEAGAWIEEVEAGTEARLRGMLSFIDSVRFFELHRQTIKKSVASDSRLSRRPVREMDRHERVYRQFLLFSTIFRPLQPLVICEGKTDNVYLRCALQKLSGKYPKLVNVSGAKITLQLNFFNYSNTTDRILHLGGGTGDLAEFIGNYGAAFKGFKYSEKRRPVIVVVDNDSGAQPIFAAIKKATFSKSAIDGSLPYYHIRDNLYVVPVPKQKGKETAIEDFFEKAVLDTKLGGKEFSRQDKFDPATQYGKHLFSEHVVKKNKGSINFDGFEPVLDRIVQVLDAHSVK

SEQ ID NO: 1035 - protein, 601 aa, Janthinobacterium sp.
  source 1..601: note = Related to CP062062.1
MYRSLCQGVSVVPFQTIYLFENMSRLASLKSATSLHDLGHILGYTAKGLAYILHGVPDTAKYSEFTIKKRSGGSRVISAPIPELKRLQQHLASLLNDCMVESDANRGVVNTLSHGFRPKHSIMTNAAMHRKHRYVFNLDLKDFFDTINFGRVWKFFEKNREFGLNTAMARTIAQIACHKGTLPQGSPSSPVISNLIAHILDIAMVQLAAKAKCHYSRYADDLTFSTNESEFPGLIATRIGTTTEWAIAPKVVREIVRCGFQVNPLKTRMQYKTRRQDVTGIVVNTKVNIRSEYSRDVRAKVSSLITKDTFSINKTFRNDTGAWTTETKDGTDAQLRGMLSFIDSVRLFERRRNEQIPPETHIPRIELKEMDGNLRVYRAFLLFTQFYRPVRPLIICEGKTDNVYVRCALHSLAAAHPMLAKTTGKISECLIDFFSYSKTSDRVLHLAGGTGDLGNFIANYANEFSRFKKIDSRNPVIILIDNDSGSSKIFSVIKKVTESTVNVDGSLKFYPIKDNLYVVPIPKIGGKETTIEHFFTKKILGTKLNGKVFSGTDKFDPATQYGKHLFAEYVIKKNKDDINFSKFSIILKNIEAALKFHYGMP

SEQ ID NO: 1036 - protein, 606 aa, Paracandidimonas sp.
  source 1..606: note = Related to NZ_JAJJOZ010000002.1
MAAFKITPPKTTLELFQTATSRAALASLLNIEPKDLTYLLYVLKDEDKYSVFSVPKRGGGERQISSPISQIKSLQERLADSLERCINDIELLTGRSNSASHGFRPEKSILTNASVHRNKRFVFNLDLEDFFPTITGRRIRGFLINDKNFKFHKDVATTIAHIACLDGKLPQGSPCSPVISNLIAGILDFHLARLAKACGCRYTRYADDITFSTNKKDFPKEIAFCDVEHTHIWKVGKQLRGLIAKSGFVINEKKTRMQYYTSRQQVTGLVVNKKINVTTEYRKLVRAYVFSLINHGKFTLKTTTKDASGQVTITTATGTRAQLHGMLGFIHSVDNVYRAEVKLHPYNYLGHQQSTKESVGNQAIYRRFLLYTRFYDNDTPLIVCEGKTDGVYISNAVHQSKAHFPKLLKKNDDGNDVLSFQLFKYARKHKKKDHVYLPNFSTASILGVGSGGGGNLGNLIRTYHKELEKFKTPVGASPVVFIVDNDDGGRAVYKVIKNILHITVSGHERFVHLFANLYIVPVPFKGSKDTSIEDLFSEVDISKGLNSRSFDFSKKIDARAAVGKADFAYEFVAKQAERMDWGGFYPLLQNICDALADYAKYRKENV

SEQ ID NO: 1037 - protein, 601 aa, Pusillimonas minor
  source 1..601: note = Related to NZ_JACJUU010000033.1
MAAFKLPAPKSALERFQYASSRAALASLLSIEPKDLTYLLYVLKNSEKYSLFSIPRKGGGLREINAPIPKIKSLQRRLAEGLELCVADIARLTGRSNSASHGFCPGKSILSNASVHRNKRYVFNLDLKDFFPTITGGRIRGFLINDKNFKLHKDVATTIAHIACLEGKLPQGSPCSPVISNLIAGILDFHLARLAKTNGCRYTRYADDITFSTNKKDFPKSIAFCEKDAHRWEIGKQLQGLIIKSGFVVNEKKTRMQYKTSRQQVTGLVVNTKVNVTREYRKLVRAYVFSLVNHGRYTIKTVVKDDKGRLVEETEEGRRSQLHGMLGFIHSVDNVYQSDVRDHPYNYPGQQRSNKNPTGNLAIYRKFLLYTLFYDNKMPLIVCEGKTDGVYISNAVHQSKAIFPQLLTKNDDGKDVLSFQLFKYTRQHKKKKSVYMPNFSTASILGASSGGGGNLGNLIRAYHKELNSFKAPIGDHPVIFIVDNDDGGRTVYKIIKETLKIAMSGHESFVRLFANLYIVPVPFNGNAQRSIEDLFTETDISKGLNGKRFDFSNNANSSASVGKAEFAYEFVAKQAETLDWTGFHSLLNNICAVLVDYETSA

SEQ ID NO: 1038 - protein, 596 aa, unidentified
  source 1..596: note = Related to JAHJHQ010000474.1; note = Gammaproteobacteria bacterium
MELLQAAKSRPGLAKLLQIEHSQLTYILYKKSDAEKYKTFEIPKRGGGLRTISAPIAELKLLQRRLGDVLYMCAVNVENSTGRINYSAHGFKPDRSILTNAAVHRNKRFVFNVDLKDFFPTISAKRIRGYLINDKYYRVVPEVATTIAHIASRDGILAQGAPSSPVISNLIAGILDFHLTRLAKSCGCRYTRYADDITFSTNKKEFPKEIARLVAGAEHNWEPGGALVRLIKKSGFEINGDKTRMQYKNSRQQVTGLVVNKKLNVTQEYRKLARAYVFSLITHGKYTVTKFTKNTLGNIEKEVIEGTFAQLHGMLGFIHSVDNVFRADRKNNPYNYVGYGGEGKNGDQKLQIFRRFLYYTNFYCNSAPLIVCEGKTDNAYISNAVHQSKALFPQLLKKGDEDNDVLSFFLMKYDRKHKKRRHIYLPNFSTVSILGVGSGGVDNLKNLLIGYRAEIDRFRAKPGPHPVIFIVDNDHAGKKVFGTAVELSSPKVSSITGDEKFINIFANIYIVPIPKVKKPETSIEDLFSAKDIPAAINGKPLKFSNDNDKSFAGKADFAFEHVVKNADAIDWGGFYPLLNNICDAIEHRKAKLEGAI

SEQ ID NO: 1039 - protein, 612 aa, Paraburkholderia fungorum
  source 1..612: note = Related to NZ_MCAS01000001.1
MLVPEITTLERFQAAHSREALANLLDIKHQHLTYLLYVKKDAGKYATFSIPKRSGGTREIRAPIKELKSLQRRLANRLQNCISDVSRITGRENQSSHGFCPNKSILTNASAHRNKRYVLNLDLQDFFPTITGQRIRGFLINDRNFKFHRDVATTIAHIACVDGVLPQGSPCSPVISNLIAGILDSHLSRLAQKNGCHYTRYADDITFSTNKKEFPSQIGFLDKSTSDKWVLGKELRRLVALCGFVINDGKTRMQCKNSRQQVTGLVVNEKVNVTSEYRHLVRAYVFSLVNRGSYKIRSTLKGGDGNEIVSEKDGTPEQLHGMLGFIHSVDSVFRTELKNNPHNHLPPYQLSGKTTPDPLPLRNLTIYRKFLLYTRFYRTTTPLVVCEGKTDIVYISSAVHQSKAVFPQLIKKNDAGKDILAFQFFKYDRKHKKKEHVYMPNFSTAAILGVASGGGPNLSNLIRTYHKESKKFQSPCGDKPVVFVVDNDSGATEVLKAIKDCSGKACDRDDPFIHVFGNLYVVLVPRNGLDKMDTEGLFSPLDLAKGHNGKTFDFSKDADSSTSVGKAPFAFEFVAPKAKELDWTGFHPLLANIIAAFDHYKGTMAAIVPSPP

SEQ ID NO: 1040 - protein, 601 aa, Paraburkholderia phenazinium
  source 1..601: note = Related to FSRU01000001.1
MSSEKTILQLFQAATSRSDVAALLDIKVKDLTYLLYVMKAEDKYKTFDIPKRSGGMRKINAPIKKVKSLQRKLADRLEQCLTLIEGTTGLTNPSSHGFRRGKSILTNAATHRNRRFVFNVDLQDFFPSITGRRIRGLLIKDRKFGFHKDVATTIAHIACHNGELPQGGPCSPVISNMIASVLDFHLSRLARDNGCAYTRYADDITFSTNKKTFPSAIAVCDEASGHNWKLGNQLAGLIKKSGFSVNEKKTRMQYRTSRQQVTGLVVNKRVNVTNEYKRLVRAYLFSLINHNKFTIKKVEPSELGDKVSLIDGTREQLHGMLGFVHSVDSVFRTNVKQHPQNYPGMQTDIKKDTKKPTGTLELYRRFLFFTRFFSNTLPLIVCEGKTDIVYLSNAVHQSKLAFPKLITKNSGGADVLNFRFLKYARKHKRKKNVYLPNFSTVQILGAGSGGGPNLGNLILNYQSEFPKFRAPKGKYPVIFVVDNDSGGKDVFNKVKNIVKITGHESFVRLFGNLYIVPLPLNGAAEKSIEDLFSPADIAKGMDGKPFDFTKDSSDATSIGKAGFAYDFVAKQAEDLEWSGFHPLLQNICAALDDYAALAATP

SEQ ID NO: 1041 - protein, 597 aa, Burkholderia ubonensis
  source 1..597: note = Related to NZ_LOVK01000019.1
MSSEKSILQLFQAASSRSDVAALLDIKLKDLTYLLYVMKDHDKYKTFDIAKRSGGKRQISAPIKNVKSLQRKLADRLEQCLTLIESAAGRKNPSSHGFRRGKSILTNAATHRNRRYVFNVDLEDFFPSITGQRIRGLLIKDKKFGFHKDVATTIAHIACHNGKLPQGSPCSPVISNMVAAILDFHLSRLARDNGCVYTRYADDITFSTNQKEFPIAIAVRKESNGHVWEASNQLQGLIKKSGFSINVGKTRMQYKTSRQQVTGLVVNKKVNVTTEYRRLVRAYVFSLINRNGFTVKKSRRTELGDEIVSVDGTREQLHGMLSFVHSVDSVFRTNVKQHPQNYPGMQADAKKPTGTLDLYRRFLFFTRFFSNTLPLIVCEGKTDNVYLSNAVHQSKVEFPRLITKGNNGPDVLAFHFLKYARKHKRKKHIYLPNFSTVQILGAGSGGGPNLGGLILNYHAEYTKFRAPKGKFPVIFIVDNDSGGKAVFNKVKHIAKVSGHEPFVRLFGNLYIVPVPLVGAAEKSIEELFAPADLAKGMDGRSFDFSKDSSDATSIGKAGFAYDFVAKQAKDLDWSGFHPLLQNICAALNDYDALSATL

SEQ ID NO: 1042 - protein, 601 aa, Pandoraea anhela
  source 1..601: note = Related to NZ_CABPSB010000021.1
MFPKSMLERFKVAKSRETLAMLLDIKHKDLTYLLYVKKDVEKYSVFSMAKKNGGSRDICAPIPELKSLQRKLATALERCIADVETITKKNNKASHGFRPGKSILTNAAVHRNRRYVFNVDLQDFFSSITGKRIRGFLIKDRNFAFDASVATAIAHIACREGKLPQGSPCSPVISNMIAGVLDVHLAKLAQMHGCTYTRYADDLTFSTNKEDFPVEIAFRNDSTGHTWRVGAELNRLILQSGFSINETKTRMQYRDSRQQVTGLVVNKKVNVSTEYRYLVRAYVASLVKNGTFTVKRQAVGVDGKPQTLEEEGVTAKLHGMLGFIHSVDSVFRTDVKKHPYNYPGQQANEKKPTGNLAIYRRFLIYTRFYANTVPLIVCEGKTDGVYISNAVHQTKNIFPSLVRKDGEGKDVLSFQLLKYARKHKKRKTVHLPNYSTITILGGGSGGGANLGNLIRAYHSELSKFKAPRGKQPVIFIVDNDSGGKTVFKVVKDTLKMTIIGTESFVHLFANLYVVPVPLGEDKERSIEGLFAPIDLAKGLNGKPFDFSSDSSSGTSVGKADFAYEFVAKHANELDWAGFHPLLENIVGAMDDYAERVRAADL

SEQ ID NO: 1043 - protein, 581 aa, Pandoraea pneumonica
  source 1..581: note = Related to NZ_CABPSK010000001.1
MLLDIKHQDLTYLLYVKKDPERYNVFSIPKSSGGSRDICAPTSELKSLQRKLAAALEQCLVDIAALTKRTNKASHGFRPGKSILTNAAAHRNRRYVFNLDLKDFFPSISGQRIRGFLINDRYFAFDAKVATTIAHIACRDGVLPQGSPCSPVISNMIAGILDAHLSKLAQMHGCTYTRYADDLTFSTNKEVFPAAIAYRDDSKEHSWHVGAELQRLILRSGFSINEKKTRMQYRDSRQQVTGLVVNKKVNVSTEYRYLVRAYVASLVKNGKYTVKRQVPDVHGKLQTFEEEGTPAKLHGMLGFIHSVDSVFRTDIKRHPYNYPGQQANEKKPTGNLAIYRRFLIYTRFYANTVPLIVCEGKTDGVYISNAVHQSKNLFPSLVKKNVEKEDVLSFQLLKYARKHKKKKMVHLPNYSTITILGGGSGGGANLGNLIRAYHGELAKFKSPGGKQPVIFIVDNDSGGKTVFKVVKDTLKLTITGDESFVHLFANLYIVPVPLGNAKERSIEDLFSQVDIAKGLNGKPFDFSSESSSTTSVGKADFAYEFVAKQAKELDWAGFHPLLANIVSAMDDYAARLAAAAA

SEQ ID NO: 1044 - protein, 581 aa, Cupriavidus sp.
  source 1..581: note = Related to NZ_LT984806.1
MLLDIKHQDLTYLLYVKKDAEKYNVFSIPKKSGGSRDIHAPIPELKSLQRKLATALEECIADIEKLTNRKNNASHGFRPGKSILTNASAHRNKRYVFNIDLKDFFPSITGKRIRGFLINDRNFGFDASVATTIAHIACRDGRLPQGSPCSPVISNMIAGILDAHLSKLAKAHGCIYTRYADDITFSTNKEEFPTAIAYCDDANEHCWRVGSELYRLVLRCGFSVNEKKTRMQYRDSRQQVTGLIVNKKINVSTEYRYLVRAYVAALVKNGKYTIKRQVADATGKLETVTEDGTPAQLHGMLGFIHSVDSVFRTDVKKHPYNYPGQQVSDKKPTGNLAIYRRFLIYTRFYANTLPLIVCEGKTDGVYISNAVHQSKTIFPSLVKKDGEGKDVLSFQLLKYARKHKKKKMVHLPNYSTITILGGGSGGGANLGNLIRAYHGELTRFKAPRGEQPVIFIVDNDSGGRTVFRVVKEVAKINITGEERFIHLFSNLYIVPIPLGSAKERSIESLFSDADIAKGLNGKPFDFSADSSSATSAGKADFAYEFVAKHAKDIDWTGFHPLLENIVGAMNDYSARVAAAAL

SEQ ID NO: 1045 - protein, 639 aa, Ralstonia solanacearum
  source 1..639: note = Related to WSNR01000001.1
MAFGNNVRTYAASGIIRRTPCVARGQFAMECLRGPHSMLLPKNKLQWFQAAKSRAELAILLDIKHKDLTYLLYVKKDPEKYKIFSIPKKSGGSRDIHAPIPELKSLQRKLATALEECIADVEELTNEKNKASHGFCPGKSILTNASVHRNKRYVFNIDLEDFFPSITGQRVRGFFIKDKNFAFDPSVATAIAHIACRDGKLPQGSPCSPVISNLIAGILDVHLSKLAKVHGCIYTRYADDITFSTNKENFPATIAYRDEANEHCWKVGEELRRLILKCRFSINEKKTRMQYRSSRQQVTGLVVNKRVNVTSEYRYLVRAYVAALVKNGKYTIKRQIVDATGKQETISTDGTPAQLHGMLGFIHSVDSVFRTDVRKHPYNYPGQQANDKKPTGNLAIYRRFLIYTRFYANALPLIVCEGKTDGVYISNAVHQTKSIFPSLVKKDKDGKDVLSFQLLKYARKHKKKDAVYLPNYSTITILGGGSGGGANLGNLIRAYHGELGKFKAPRGKQPVIFIVDNDSGGKKVFSVIKEVLKKNLTGEEPFVRLFSNLYIVPIPLGGNKERSIEQLFSDVDIAKGLNGKSFDFSADSSSTTSVGKVDFAYEFVAKQAKNIDWKGFHPLLQNIVAAIDDYAAHVVAEGL

SEQ ID NO: 1046 - protein, 612 aa, Acidovorax cattleyae
  source 1..612: note = Related to CP028290.1
MDTAYLYVTIGSRKSVCGATFTDGHHFPTVVLSSLSRLKAATSRAHLASILGIKLQDLTYLLYKKPIYKKYTSFEIPKRSGGKRKISAPIDSLKSLQRKVAEVLQECISEIETSTKKINRAAHGFRLDKSILTNAAMHRNKRYVFNIDLEDFFPSITFPRIRGFLTSDKNFNLAPVVATTIAQIACLESKLPQGSPCSPVISNLIAGILDVHLSRLAKVNGCTYTRYADDITFSTNKKDFPIAIAIESQGNANVWVLGRQLAGLIKKSGFSVNVSKTRMQYRTSRQQVTGLVVNKKISAPNEYRHQVRAYVNSLVRRGFYMVDNGEKVEEGGIQKLHGMLGFIHAVESVYRTDLQRQPYNYPGVVIDERRPTGNLSIYRRFLLYTRFYANHQPLLICEGKTDNVYIGNAIHQRKSEFPLLIKKNDDGKDVISFQFFKYARKHRRKSDIYLPNYSTAMILGNGSGGGPNLAGLMSAYRSELKKFTSPGGKCPVIFIVDSDSGGKPVFKVIEGITKKKPSGTELFIHVFENVYVIPISKDGKSNVSIEHLFSENDKSILMDGKPFDFSGESSDSILGKASFAYDFVAKYPEKIDWSGFSRLLKSISDILELHKA

SEQ ID NO: 1047 - protein, 592 aa, Hydrogenophaga sp.
  source 1..592: note = Related to NZ_JACBGE010000023.1
MSSWGSTYKMRKIEALKSVKSINGLADLLGFKASALGYILFKLPDAQKYNSFTIPKRSGGRRSISAPVPRLMLLQKKISTLLNDCLAEIEGKLSSPAHGFKLGRSIFTNAAHHRGRRYVLNLDLKDFFPSIHFGRIAGYFEKSRDFGLDPKIARILANVLCHKSSLPQGSPSSPVVSNLLARMLDIHLAKLAKRNRLTYTRYADDLTFSTNLNVFPEAVAKRVSEHVWQLGPELISTIGSCGFSINDLKTRMLYRSSRQEVTGLVVNDKVSVPVEYRRWARAAVARLVKTGAYFKPTPKGFIGPQPATPDAGSLDHLEGCLSHIYNAHRFQRSQAALGRALHHAPDELNSDEHVYRRFLFYTKFYVPEKPVIVCEGETDSIYIAAAISAMGGYYPDLIDAKLKPGEQNRFNVRFFKHSSIAGRLLELNGGTDALKNFCRIYVDQTKKFKGGLLSQPTIVIVDNDKAGRDVVNYAKGIAKNQGLPAIKGLNYVFTRPNLYVVSIQSPANAPDCVIEDLFPAHLLNTKLGGKVLTLSNQKVGDNEYGKMYFAKHVVPHADPKDFSGFSQLLDTLVEVIADFSSRVQVQPATKKA

SEQ ID NO: 1048 - protein, 573 aa, Variovorax boronicumulans
  source 1..573: note = Related to MRCN01000005.1
MKLGKLQAATSTIDLANLLGYQPSAFHYLIYKLSEAAKYSVFQIPKRNGGTREIRAPEPKLKLLQQHLAEYLSECLKEIESSSDYASPAHGFKPGRSIFTNAEIHRQRRFVLNIDLKDFFTTIHFGRVKGYFEKSREFRLNSTIALAIAKIACYDRCLPQGAPTSPVISNLIGRVLDGHMCKLAKKHKVTYSRYADDLTFSTNLKEFPSALAIQNEEHKWHHGKELGEVVKHAGFEINEKKTRVQYRASRQEVTGLIVNDRVSIRAEYRAWARVAVHRLVHKDGFFEPIAKTFVGPLPNEKAPGSLRKLEGILSFIYSAQVFRREMIIEKGGQNKEKKAELHSDERLYQKFLYYTKFYRNEKPLIVCEGKTDNVYIRAAIVAMGEKFPTLKQEKGEKDSLLVRFYPHPKYGNRLLEMGGGTAGLRNFSHTYVDKSRKFSQIAPRNPVIIVLDADDAGKSVYSFAQKNHAKKDDFQGIVFLHPNLYFICIPEPKNSTHKAIEGLFPSVLTDQKLGDKSFNWKNTPLKEKEYGKAYFAKNIVPLATPEMFVEFTPLLEGIAAAIEHFRKLPEAKS

SEQ ID NO: 1049 - protein, 601 aa, Achromobacter sp.
  source 1..601: note = Related to JADCNH010000007.1
MGPLDYQAVLYMSQLIALRNADTRREMAALLGYESSKLTYALHGLKEESRYTQFAIPKKNGGHRTISAPDDATKALQRKLAALLANCVREIRSVESPRLPGQRRGVLSHGFEPGLSIITNARVHRKRRWVFNIDLADFFDSIHFGRVRGYFENNRNFQLKPIAALVIAQIACFKSKLPQGSPSSPVIANLVASILDIHLSRLATQVGCSYTRYADDLTFSTNQEEFPSAIAHQVDRDSNRWEASKELVDVISRSGFKLNSRKTRMQYRHSRQEVTGLVVNRVVNVPSEYRREVRARVHRLITKGEFYISGIGEAGQSTQVAGTPAQLRGMLAFIDRVDLFNLNLARESKGEPPITPASDLVDLTRNEETYRKFLYFTEFYATPLPLVICEGSTDYVYLVHAIRALVDDFPELAYRTGDEEIKFKIRFYRYPRNSTRRLTRIRGGTADLKKFVATYGAEVQRFKAGGQQHPVIVDNDAAGREVYGPAKKLGVVFNKSRPLTRVSANLYLTATPLLGADESCIESLFKTEDTARLVDGKSFDPDDKADRSLTYSKAVFAHQIVAKHAAHINFDRFRPLLASLSDAVTMHRESRTEEVAPAAIT

SEQ ID NO: 1050 - protein, 604 aa, Pseudobdellovibrio exovorus
  source 1..604: note = Related to NC_020813.1
MMVNYLKELQQAKSLQDLAKLLGTNESNLNILLYKISRKSLYRTFEIPKKGGGFRIISSPDESLKVVQKRLASILSSILEPNYQLKHKKKLQNPKKERATRAYSNKSVSHAFKQNLSIATNAEQHLKKKYVLNLDLEDFFGSINFGRVRGFFIKDKQFKLDPVVATHIANIICHMDKLPQGSPCSPVMSNLIGRLLDRHLLRLANRRGCFYTRYADDLTFSFNGPKFPTEIAILEQDQWVIGDALTEVIEKSGFKIKKSKVRMHYRTSRQMVTGLVVNCHVNVPAEYYRDTRSMCLNIFTTGSCYLKTNRNKNLSMQQLEGRLNYIYQIKKFKNIYADQGGYRHSRHNGKYKSDSNLDRSTQYADNSHQVSLDGIKNIYGRFLFYKNFFAPQMPLIYCEGKTDPVYLKCALLALETKYSGMVSSGKLNVRFFAGNNLDGEMMKLVDGTGGMKYLISSYNRMKKECKFNGVPLHPVIIVVDNDSAGLEVKKAAKKKRSMTNGVFHIFHNLYILEIPKNPTDAVETVIEDYFTDKTLNMKFKGKTFKSGDLDEKDAVNHFGKAVLSMLVKKRCKKIDFSKFSEIFDKVDEIIKDYQTILSTKTSQE

SEQ ID NO: 1051 - protein, 561 aa, Aliikangiella sp.
  source 1..561: note = Related to NZ_JADPQF010000006.1
MSYLERLKSCSNLKEFAEYLGYKPSNLSYLLYVLNDDLKYRTFEISKKSKEARVIKAPEKSLKGLQRRLASRLENCQKEIESNLGIVNPVSHGFRKGHSIATNANIHKRKRYVFNLDIKDFFGTLDFGRVRGFFIKNYNYELAPEVATIIAQISCFDNSLPQGSPCSPIISNLIGNILDVKLLKLAKKNGCHYSRYADDLTFSTNQKVFPADIAIQDPIKGDWDCGAEIYKIMKLVRFQINDSKTRMLYRNSRQLVTGLVVNRKVNIAADYWRDTRAMLWNLFNTGSFFIKDNSEEVAEGTLSQLNGRLDFIYQIDAYNTNKSKGENVKTAKKEAYKKFLFFKSFYVNEMPTIVCEGKTDPIYLKCALESLADSHRELIDKDGKLNIGLFNYSKVAADVLELSGGNAPISKFLDQYQKMFSLFRVNSSQNPTIIILDNDGAGLRTLNHAKRGATSEVKMDGFDEPIQCLPENIYVFRIPRIIDKDLEIEDYFKEEAFQIKLNEKSFKRKGVIDKKKEFGKFLFAEKIVKNNKKNIDFSQFSLIFNVIQQIISHSKASAPTD

SEQ ID NO: 1052 - protein, 577 aa, Psychrobacter fozii
  source 1..577: note = Related to NZ_QJSU01000001.1
MNDFSKLKALQKTTTLSELAHLLRVQPKTLSYNIYIIDKNKTTTKKYSEFSIPKKSGGTRIILAPNQNLKFIQSQLSKILYSCIDEINKEKGVTGSLSFGYRKKSSIFDNAKVHKKKKFVFNIDLKNYFDSINFGRVRGFFIKNRNFCLDENVATVIAQIACHNNILPQGSPVSPVISNLIGHILDIRLSKIASSCGCSYSRYCDDITFSTNEKVFPKKLAYSNTDKTWHPSKLLISIVSQSGFEINMQKVRMSLFYSQQRVTGLTVNKKVNTTRAYRDLVRALVHSLCTKGDFEFRGDFYKDKISETNKLNSLQGMLNYISRIEYQELRGNRENKRFYPNINKLTKSEITLRDYVLFRYFFNPEKVTIFGEGKTDKSHLKHYLNFRSNIDTSKNPMPESFSDWKNMNFHDFESRIFDVISKSGGTGDIKKLVTEYKKYCNKFCIPEVQNPVIILVDDDDGSADLLMKLEKVKKDKLIKVVRKDFYHIDNNLYLIFLPRINSTDTDIESFYSKEVIDIPRNGLYFEKSNLSNNKRNYSKKVFATEIIPRNQELVDWSKFDQIFEKVQLAIEHFQSKK

SEQ ID NO: 1053 - protein, 583 aa, Halomonas johnsoniae
  source 1..583: note = Related to NZ_BMXO01000001.1
MSALKKLKSACDINDLAKLLNFKSSNIAYIIYRLKEEEKYSSFEIKKSSGGLRTIDAPEPKLKNLQSNLAYLLQECLTEIEKTSQIKSTASQAFQPKKSIITNASLHRKKRFLFNLDIENYFGSINFGRVRGFFIKNKNFELDPKIATLIAQIACYRNRLPQGSPASPIISNLISHILDMRLIELSAKNKCFYTRYADDITFSTNLTEFPPEIAYESEDKIWSPSQKLTKLILKNGFNINYQKVRMQLHFSRQEVTGLTTNRIINTPIEYRKNARAMVRSLIMKGSFHMPKEEQEASVEQLHGILSFIDHVKLVTKHGHSNDPHSLPAAKEEKKSSFEKDFADFLFYKYCYAPTKPLIICEGKTDNIYLKCAIKSLDSKYPKLIHPNNKQDFKIDFFKYSRSQGGDSQKGRLLELRGGEGNLKNFISAYDKKCTKIRAPGKLHPVIVLIDNDKGGKQILSLIKNLKRETSTVTGNEDYYFINNNLYVIPIPDIMGNKNTTIEDFFYKKTLNRKINGRVFNRKNDHSGKNFYGKYEFAQKIVQKDLKNINFKKFIKILDRFELVISDYKRYLKSKALQNSRANH

SEQ ID NO: 1054 - protein, 573 aa, Sulfitobacter aestuariivivens
  source 1..573: note = Related to NZ_JACTAG010000001.1
MTTMVSRLQACIGRSDLSSLLGFKPKAFAYVLFHVADAEKYTDFEIPKKNGGVRVISAPIPQLKLLQSRLSECLQTCLAEIEKADGVKESCAISHGFRKGRSIYSNAEVHKGRRWVFNIDLEDFFPSINFGRVRGYFIKNKNFALSPDVATVIAQIACHKNALPQGSPCSPVISNLLAHMLDMRISRIAKKARCSYTRYADDLTFSCSKKLFPDGIAQLSQADQGVWIPSDKLRHTIFSSGFKINKSKTRMQVYWSRQDATGLVVNAKVNVPREYVKTARAQCHQLITKGSVFNKEELWGQDVKVPYDPAKLQGKLSHIFNIKGQDLNFERQKGSLKTWPNFYRDYRSFLDYQSFGSSPKPVFLFEGKTDNIYIRCALNSLAADYPELISDGAPKQLMVRLFNYSRPTNAVQQLAGGTGDLQLLINNYELRLRGFSAATLAFPVILVVDNDKGSTDLFKAAGSKSDTKAKVDGSQPFYHITKNLYLVPTPTPKGMVESYIETFLPNSVLKKKLGKKTFHLPEKGFDVTKHFGKVLLAEQIVQRQQKAISFVGFKPLLDNMRAAMQDYAAKMAP

SEQ ID NO: 1055 - protein, 591 aa, Methylobacterium gossipiicola
  source 1..591: note = Related to NZ_FOPM01000016.1
MTLTVILRIESACKLTMSIERMNQLKNSQGKFGFANALGISLKQLTRAVYGIPVQNRYSTFLIPKSTGGHRVIHVPHREIKFVQKALANLLQICLSEIETKKGVVRPVSHGFHPGRSIFSNAWAHRNKNYVMNFDLENFFHSIHFGRICSFFEKNNDFLLHPKVANLIANLSCHRIDGGGTFLPQGSPCSPIISNFIAMPLDQKLRKLARDNGCRYSRYADDITFSTNKDLFPDDIAIFDVSSKKWIAGSGILKVISKSGFKLNIQKTNMSIAGTRQIVTGLVVNKQVSVSRPVYKWARAAADHMFKDGVAFKRDPSTASIHTTDRQVTLGHIIGQVNHICYARRKSNIPLLNSRKMVGPELLYRRLTYYERFFAHKETLIICEGETDNTYLKIAIDKLGHKFKNVARRADGNPQVKLLNVTPHITIYTALNGGSDQQKSFLQNYDNDMSIVGERWADKCVIIFGDNDSGANSIMQILRGKSIIPGDIKTADFTYYTRNLYVILTPIPNKNSISMIEDFLDPNASRVKLENKVFHLGGKGFDEKKHYGKKALSEHVRQNASKYDFSKFEIILKRIDLAIDDYSSRLAALKL

SEQ ID NO: 1056 - protein, 575 aa, Methylobacterium sp.
  source 1..575: note = Related to JAKSXV010000098.1
MSNGQLDRLKNAQGKLGLAMALGVPLRQLTRAVYGIPIPNRYTVFEIRKSSGGSRIIHVPHREIKFVQKSLAQLLQSCLSEIETRNGVKHPVSHGFHPKRSIFSNAWPHRNKNYVMNLDLEDFFHSIHFGRVYGYFEKNNDFLLNPKVANLIANISCHRNDVGGTFLPQGSPCSPVISNLIARPLDSKLRIFAKENKCRYTRYADDITFSTNLDNFPESIALLDSVKKYWVVGSGTTKIITKSGFRLNLGKTRMSVAGTRQMVTGLVVNRQVSVNKTTYKWARAASDRLFKEGVAFKRDPSTASIHTTDRQVTIAQLIGQVNHICHARRKSNIPLLHSRDMVGPELLYRRLTYYDRFFSNKNTLIICEGETDNIYLKIALKKFGANFKNLYNHVDDKATVQLLNITTHVTSYTALNGGSDQQKSFLQNFDNDMRIVKDRWADKPVILLGDNDSGANAIMQILRGKSIIAGDIKTAQFTHYIKNLYVIFTPVTSKTDNSMIEDFLDPKASKAILGGKSFHLGGKGFDEKKHYGKKALAEHVKENADKYDFSSFNSILKRLDLAVGDYAERLARSMA

SEQ ID NO: 1057 - protein, 586 aa, Aureimonas flava
  source 1..586: note = Related to QYRN01000007.1
MSSLPSESTLERLKACKGKLGLAMLLGVQLKHLTHALYGIPMPVRYAVFTIPKSSGGVRIIHAPNDRLKFVQSALAAVLQECLIEIETKSGVQRPVSHAFHPKRSIFSNAWVHRRKRFVVNFDLQDFFPSLHFGRVCKFFEKSSDFQLHPKVANLIANLATHPDGAGGTFLPQGSPCSPVISNLLTRPLDLRLRKLAQRCDCRYSRYADDLTFSSNTTAFPEAIAKLDNECWIAGDEFEKIVVQSGFFLNHAKTRMALKGTRQVVTGLVVNKQVSVNRDTYKWLRAACDSMFKKGIASRHDPRTVKVYTMARKLELKQLIGHAEHVFHARRKSGIELPAMSLMKGPELLLKRLIYYERFFAHDRPIVICEGDTDYVYLRIALAKFGHQFANLAPSKEGLPAIRFLRFTPVIGRFTGLQGGSDQLKTFLQNWDVNMAMVGDRYPSQPVILFMDNDSGANATMQILRGKKVISQDIKMMEFTHATKNLYVIFTPVPDVKSQSCIEDFVDPTAKSVKLDGKTFHPGGNATYQGKKWSDTLHYGKRVLAEKVVAENVAKYDFSLFKPILDRLDKAIADYPKQVAKIVASK

SEQ ID NO: 1058 - protein, 548 aa, Treponema sp.
  source 1..548: note = Related to JAFUJV010000004.1
MKYLKRLQDARTTEDFAKLLGFKAGNVSYLVYHYSGQKYYSFQIPKKNGGTRTINAPNDELKNLQRRLSDYLYKCLEEIHLQNNIHDTVSYGYQKNKCIYDNALIHRNRRYVFNVDLKDFFNSINFGRVRGFFINNKNFKLDPHIATLIAQTACNDNILPQGSPLSPIITILIGGILDHRILRLTHKIRCSYSRYVDDLTFSTNLKTFPPEIAFFDETGKWVIGKELNNILKTSGFESNEKKVSMQYKDSRQTSVGLIVNKKVDVPREYYKTVRAMCNSLITRGYFVKKDAAEDEPPTLNQLEGMLNYIFSVKSKNTNVRVKDHYPGFQNIYIDFYIYRFFFANEKPILFTEGKTDIIYIRSALKHLKAEYPKLITSEGLLNFQLMWINDYLQSVFHISSGCSGSLKLLVQYESFLKRYKKTESMNQVFFLFDHDSGIKEIVNKYKKYDSAKDYFSKNDFSSLSVEVYKNVRFIFTHEEHDKYIEQYFDEALLSEKINGKSFTPENNVHDPEHYFGKQVFATKIIKKKQDSIDYSNFRPLFNELSKYL

SEQ ID NO: 1059 - protein, 562 aa, Salmonella bongori
  source 1..562: note = Related to AANPCH010000002.1
MSFLTKLKQAKNVSDVAHILGCSPAALTYTIYKNNAKYTTFKIKKKSGGERCITSPDRKLKELQKRLAKGLQEYFDEINKGRDTETSAHGFVKGKSILTNAYKHKNKNLVLNIDLENFFDTINFGRVRGYFIYNKGFALTEKVASVIAQIACNENKLPQGSPCSPIISNLIGQILDVKLSSMAKKNKCFYTRYVDDITFSTNQKAFPESIANINDTQVIIGKKLRNEIEKAGFKVNDSKTRMQLRNSRQDVTGLVVNQKVSVRSEMRHLARAMTDSFFKNNTAFISIDGKEENISIERLNGILSFIYNIRTGVYGANGCKNTSLHDSFERMYACFLFYKNFAANKSTVIICEGETDNIYLKYAFRSLVGCYPELQVIKKGVKKRLDLSIYRQTKTLENLLNITDGTGNNIKFIKTYRQSMRRYASPPKVFPVIVLLDNDSGSSSIDGIINRDFIDTREVCDGFTYVCENLYIVKTPLIDKKKESKIEDFFDSHTLSKTLGSKTFTSENKFDKEQHYGKKKFAEIIVKQNYKEIDFSNFKKIIDLFNDVILHYQEKRNQRFNF

SEQ ID NO: 1060 - protein, 557 aa, Salmonella enterica
  source 1..557: note = Related to CP074306.1
MSFLAKLKQAQSTSDIAKILGCSPAALTYTLYKNRTKYTEFKIKKKNGGERIISVPEKKLKELQRRLSKGLQECINEINAKRKFETSSHGFVKGKSIFTNAYKHKNKNLVLNIDLANFFDSINFGRVRGYFIHNREFALSDKVSSILAQIVCYDNKLPQGSPCSPVISNLIAQILDVKLSALAKKHNCYYTRYVDDITFSTNQNKFSASIISFQEREVIVSGQLKKEIERAGFKINSGKTRLQFKNSRQDVTGLVVNKKVNVKHELKHIARAMTNSFFKLNSAYISIDNRVEEVSLDRLNGMLSFIYHIRSKMNDNNDTKNKGTLDSFDKMYSKFLFYKTFAANKSTVVICEGETDNIYLQYAFQNLVGSYPELQLIKKGVKKKINIFLYKQTKTLSHLLNVTDGTGNNIKLIKTYKQNMSGFVCPPQNYPVILLMDNDSGSNGIEGLINRDFSDTRKIHDGYTYVCENLYVVKTPLIDGKKETKIEDFFDCKTLSKKLGDKTFSASNNFDKSLYFGKRKFAELIVKQNHKEIDFSNFKMIIDLFYLVICDYQKRLS

SEQ ID NO: 1061 - protein, 448 aa, Dickeya aquatica
  source 1..448: note = Related to NZ_LT615367.1
MSFLAKLKESQNISDIANLLGCSPKSLAYTIYKSQNNYITFKIRKKNGGHRDIKAPAKKLKELQRRLAKGLQECIEEINGKKNKRISSHGYTKGKSIFTNAYEHKNKNLVLNLDLENFFDSINFGRVRGYFIHNKNFMLPEKTATIIAQIACHENSLPQGSPCSPVISNMIAQILDVKLSALAKKNKCFYTRYVDDLTISTNRNIFPNDIMELHDHKPIIGKSLINEIKRSGFTINDNKTRVQCKDSRQDVTGLIVNKKVNVKSEFKHLARAMANNFFKNNQAFISLNGEKTPISLEKLNGMLSFIYQIRNRMDMQNANGQPRKTHDSFEKTYSDFLFYKNFAANNRTVVICEGETDNIYLNYAFKNLVSYYPELQNYGKGIKKRIDIHLFKQTKLLYRLLNITDGAGNNIKLLNTYQKRMSRFSSPRESFQLYCYLITTADQLGSKE

SEQ ID NO: 1062 - protein, 568 aa, Erwinia rhapontici
  source 1..568: note = Related to JAGGMP010000001.1
MSALETLKKLKNLKDVAVFLDCKPKFLSYLLFFEKDKYSEFELRKKSGGVRIIHAPNKKLKAIQKKLSDVLYECQDEIYPKQKFKVLSHGFVRKEKIKNKILIHGALSNAKAHKNKNNVFNIDLENYFGSFNFGRVRGFFIKNKDFLLTDKCATVIAQIACYNNSLPQGSPCSPIISNLISRSLDVKLANLAKRNSATYSRYVDDITISTNKKIFPKNIALNDSHKISLGDEFSKIISSSGFTVNSKKTRLQYSDSRQEVTGLVVNKFVNIPHEYRSNLRPKAHSLFLTNSYFYVDNEGNKCEGSIDKLNGLFSYIHFIRKNTINHGKYIRDKNGELALDGSDYLYSQFLYYKYFANNDKPIVICEGKTDVIYLKAVLKTLAADYPDLIEVNNDKTSLKIQILPASKTVQDLLGLLTGTADLRKFILSYEARLEDFKSPSLLNPVIVLVDNDDGPRKINNAIKDKYKISPEAGKPSIIFSNMVYVRTPELEKKKETSIEDFFSDGIRKIKIDGRTFSPDIDDDTTAHFGKKTFAEEVILKKRKTLDFTSFKPVLNLLVESIRIYKKGA

SEQ ID NO: 1063 - protein, 311 aa, Cronobacter malonaticus
  source 1..311: note = Related to NZ_NRNL01000028.1
MTTLETLKKLKDLKDVAGFLDCKPKFLSYLLFFEKEKYTIFKVPKKNGGVREIYAPNQKLKAIQKKLSDILYECYSEIYPKNKYKVISHGFVKKENNSKKEVIYGALSNAVEHKNKRNVLNVDLENYFGSFNFGRVRGFFIKNKDFALSEKCATVIAQIACYNNLLPQGSPCSPIIANLITRPLDIKLACLAKKNSATYSRYVDDITISTNKKTLPKCFCLNNKHEIFPGKALVEIINKSGFSINDNKTRLQYSDSRQEVTGLVVNKFVNVPYEYRHNLRPKAHSLFNENSYFYEDNEGNRLSGSIEKLNG

SEQ ID NO: 1064 - protein, 578 aa, Pantoea sp.
  source 1..578: note = Related to SZZV01000010.1
MMSSLESLKKLKNLKDVATFLGCKPKALSYLLFFDENKYRTFEIKKKSGGSRKILAPNDKLKAIQKILSNVLYDCYAEIYPTKKYSVISHGYVRKEKNQINKENNHTKDQNLSYGTITNSIPHKNKHNVLNIDLADYFSSFNLGRVRGFFIKNESFKLSTECATVLAQIACYENELPQGSPCSPIIANLISRSLDVKLAGLAKENSATYTRYVDDITISTNKKVFPTKIAGVIDNKVTLGKSLQRIVIKSGFTINPPKSRLQFSDSRQEVTGLIVNKFVNVPSNYRHTLRPMVHSLFKNNTYTYMNDEGDNVKGSIDRLNGMLSYIHYIRSNTINKGKYVRDDKGGIRLDGSDQLYADFLFYKYFANNTRPVLICEGKTDVIYLKSTLKALADNYPSLIEKDGSKTHLKIQILPASKTIQNLLGLLSGADDLKKFMETYEARFSKYAKPSALHPVIVLVDNDEGPRNINSKIKNKYKVIPSPGTPVKVWGNLLYVQTPEIVGMKNTAIEDFFSSEIRKIKVEGRTFSPQTETETIAHYGKRVFAEDVISKKRKILNFDSFKPILDLLVSSIDLHNLKK

SEQ ID NO: 1065 - protein, 585 aa, Rahnella variigena
  source 1..585: note = Related to NSDJ01000002.1
MATGGSPYECDKSVYRPLPSIFNMDIMSKLADIRSLKSLSDVADFLGCEPKNLAYSLYFAKNKYKSFEIYKKSGGVRIINAPNEKLKSLQKILAGYLSECLDEIYNTHGGNKISHGFVKGKTIITNASQHRNKNLVFNIDLSDFFNTINFGRVRGFFIKNKYFSMDEKAATVFSQIACHEGRLPQGSPCSPVISNLILNILDIRLASLAFKNSCNYTRYADDLTFSTNRKEFPIDIVKDELGDWVVGNKLHKEITKCGFIINKSKTRLQYKDSRQDVTGLVVNKFVNVPSDYRRLTKSMAHELFRTNEFYIKLPDGESIEGTQNQLNGMLSYIYSTRKITIHKNFDSTIPRDGKGIPILDASDRLYSDFLFYKNFVANDKPIVICEGKTDVVYLKHAIKSRYEKYPNLVEIKKKEKALKIQILGASFLVNHLLDLLTGTTAIKRFVESYATRLSKYKCPPLNNPVIILTDNDDGIKGLIHAINGKYKESEDRDGIYFITSNLYLIRTPLLNDKNSSKIEDFFTKELLARKLDGKTFHPDNDTDNTMHYSKQVFVEKIIKKEYKSIDFSGFDSIINLLEKTIIDHK

SEQ ID NO: 1066 - protein, 557 aa, Klebsiella variicola
  source 1..557: note = Related to CP060807.1
MSKLTEISQLQSLRDVAIFLGCEPKNLAYSLYFEKNKYKSFEIHKKSGGVRIINAPNEKLKSLQKILACQLNECLEEIYRMHGGNKISHGFTKGKTIITNASKHRNKRLVFNIDLTDFFSTINFGRVRGFFIKNNHFNLNEKAATILAQIACHEGKLPQGSPCSPVISNLILNILDVRLAKLASTNSCTYTRYADDLTFSTNKNDFPSDIARQSAENTWIPGSRVRKEILRSGFSVNDKKTRLQYYDSRQDVTGLVVNKVVNVPSEYRRLVKSMVHQLFNTNEFYLKLSDGESLEGSQEQLGGMLNYIYSTRKTTIHHGKVKRDAEGNLLLDASDRMYADFLFYKYFVANNKPIIICEGKTDVAYMKYAIKSRSNHFPSLVEETEGKKQLKIQILAASNTVNHLLDLLNGTSSIKKFIELYDSKLKKYKNPILKNPVIILTDNDSGSSNLIPTIRGKYKNSEEKDGFYFITKNLYLIKTPLINGNDSSKIEDFFTKELLSRKLDGKTFHPDNDTDNTMHYSKNVFVEKIIRKEYKSIDFSGFDSILNFITNVISTHK

SEQ ID NO: 1067 - protein, 558 aa, Pectobacterium versatile
  source 1..558: note = Related to NZ_CAKLIS010000018.1
MSELIEISKLQNLSDVAHYLGCKPQSLAYTLYHEKNKYTTFEIKKKNGGVRLINSPCDKLKVLQRILANKLSECLDEIYKENGGNKISHGFVKNKTIITNASEHRNKNLVFNIDLTDFFNTINFGRVRGFFIKNNNFMLNEKVATIFAQIACHDGKLPQGSPCSPVISNLILNILDIRLAKLAFSSNCYYTRYADDLTFSTNKKVFSKNIVKYRDDGAPESGPLLTKEISRSGFIINDKKTRLQFCDSRQDVTGLIVNKVVNIPSDYRRLIKAMTHELFCKNSYYIKNANKKDQKGNLEQLNGMLSYIYSVRKNTIHKNITTRDSKGNPRLDANEKIYSDFLFYRYFVANDKPILICEGKTDVAYIKYAIRSRSSRYNSLVEEEYGEKKLKIQVLNSSGQVNHLLDLLNGTSSIKKFIENYSARLKKYEKPLFTNPVIILTDNDDGSSKLVPAIKGKYRGSKEINGFHFITNNLFLIKTPLFPDKPDSKIEDFFTKELLSRKLNGKTFHPDNDTDNTIHYSKNIFVEEIIRKEYKSIDFSGFDEILDLIVSVIDEYKK

SEQ ID NO: 1068 - protein, 638 aa, Pantoea coffeiphila
  source 1..638: note = Related to NZ_JAFBFW010000001.1
MSWRFLGSCQVCVRVPINLFKWGRRVNRLLLLKSAKTKPDLARILGVKPSALTHCLYIVKPENQYVQFEIPKRNGGKRFISAPSGMLKTLQSSLSDLLLDCLDEIIFLKFPDSEITRPKAKNSLFLKVKCSGSETKQPSLSHGFERKRSIITNAMMHLGKKHVFNIDLENFFSSFNFGRVRGFFIKNGNFLLEPEIATVIAKIACYNNELPQGSPCSPVISNLITHALDIKLAAVAAKHSCTYTRYADDITFSTRKESLPSSIAKSDNHTFVAGKVIRNEIVRSGFSINESKTRNQYKDSRQEVTGLVVNKKPNTKKEYWRLVRAQCNHLFNTGEFKETINGAEVSGNIHRLEGKLTFIDQVDHYNRLRQGEKLNPKYHLKKDAIRKSNPSIRRYLHTSRETTFSKFLFYRWFYGNTKPTILTEGQTDNIYLKSAIWKLAANFPKLATGKSATEPYKALTRFFKYNERTRYLLELFGGGDYLRDFVDNYKELFNAYKAPKPSHPVIIFVDNDSGPNNLINKVKRVKGIEIFPAGVGLADIRQSEFVHIFCNLYLVLTPQGAGSSETDIEYFFSDADRLREHKGKRFNTVADRDEVNDLSKEAFATHIVKTQKGIIDFSRFTHLLERIEKVIDHYNSIK

SEQ ID NO: 1069 - protein, 611 aa, Raoultella ornithinolytica
  source 1..611: note = Related to AP025009.1
MKKLDLLKAAKTKPDLAKLLGVKPSALTYCLYKTKPETQYVQFEIPKKNGGNRIISAPSGMLKNIQASLSELLLDCLDEIIIDKFPNSEIARQKAKNSIILKLKCSGSEIKQPSLSHGFERKRSIITNAMMHLGKKHVFNIDLENFFGSFNFGRVRGFFIKNKNFLLEPEIATVIAKIACYNNELPQGSPCSPVISNLITHALDIKLAAVASKYSCTYSRYADDITFSTRKDSLPSSIAKSDNHTFVAGKVIKSEIKRSGFSINETKTRNQYKDSRQEVTGLVVNKKPNTKKEYWRLVRAQCNHLFRTGQFKEIVDGVEVVGNINRLEGKLNFIDQVDHYNRLRQSEKLNPKYHLKKDALKNGYAKSRRYLHTSREKTFSKFLFYRMFYGNKKPTILTEGKTDNVYLKAAIHKLAALFPKLAIEKTALAPYKLLTQFVEYNERTKYLLELFGGTDYLKDFVIHYRHYFHDYKAPKPSNPVIIFVDNDSGPKNLINYVNGVEGIQIFPAGVADIRQSDFVHIFCNLYLVLTPQVEGCPETDIEYFFSNVDRLKQHKGKCFNTVADRDPSNDLSKEAFATHIVNAHKNDIDFSRFTSLLERLEKVIDHYNLIK

SEQ ID NO: 1070 - protein, 611 aa, Erwinia sp.
  source 1..611: note = Related to LMLK01000003.1
MKTLQSLKEAKTKPQLAKILGIKPSTLTHCLYVLNTNNQYIKFEIPKKNGGIRVIHAPTPILKMIQKSLSKLLLNCLDEIIFTKFPNSELARQKAKNSGILKVKISNAEIKQPSLSHGFERNRSIITNAMMHLDKKFVFNIDLHDFFGSFNFGRVRGYFIKNRNFELHPDIATVIAKIACYQNKLPQGSPCSPVISNLITHALDIKLAKLAKLSSSTYTRYADDITFSTRLSELPKSIAEKENHKYEPSKKITKEINRSGFSINTSKTRNQYADSRQDVTGLIVNKKPNTKKEYCRLARSQCNHLFKRGEFKELINGNEEKGNINSLEGKLNFIDQIDHYNRLRQTKKLNPKYQLKKDTIKNGNAKLRRYLHSSREKTFSQFIFYRHFYGNELPTILTEGKTDNVYLKSAINKLSAQFPELSRSKTSQAEYKLLLKFFNYNERTRFLLELFGGTDYLRDFIVNYKKNFSYYQAPKPKKPVIILVDNDSGPRDLINYAKNIEGVMIYPAGTTEIRDADFVHIFHNLYLVLTPKKPGHNETDIELFFKDVDRLRIYNGKHFNTAAQRDKNRDLSKEAFAEHVIHAQKDVIDFSEFPAILERLVKAMNHYDTIK

SEQ ID NO: 1071 - protein, 549 aa, Yersinia ruckeri
  source 1..549: note = Related to CP071802.1
MIQSSLSGLLLDCLDEIIHNKFPESELARQKAKNSKILKIKCSSAEIKQPSLSHGFERKRSIITNAMMHLGKKYVFNIDLEDFFGSFNFGRVRGFFIKNRNFLLDPEIATVIAKIACCNNELPQGSPCSPVITNLITHSLDIKLAAIAKKNSFTYTRYADDITFSTRKSDFSSSIAKKQNNKYVISKRVRNEIILSGFIINESKTRNQYKDSRQEVTGLVVNKKPNTKKEYWRLVRAQCNHLFKNGEFVEIIDSKETKGNINRLEGKLNFIDQIDHYNRLRQGEKLNPKYHLKKDAIKKGQAKSRRCLHNSREKTFSKFLFYRLFYGNNLPTILTEGKTDNVYLKAAIHKLASLFPKLAVVKSASSPYKILTNFIDYNERTKYLLELYGGADYLKDFIIHYKNNFNYYKAPKPSNPVIIFVDNDSGPKDLINYVSKINDIKISPTGLMDIRSSEFVHIFHNLYLVLTPQIKGYAETDIEHFFTDTDRLRPHKGKVFNTASKRDPDNDLSKESFATHIVHAKKHDIDFSGFTSLLERLEKVINHYDTVKE

SEQ ID NO: 1072 - protein, 547 aa, Escherichia coli
  source 1..547: note = Related to NZ_CP080146.1
MQSSLSRLLLDCLDEIVCIKFPDSELARQKAKNSKILKLKCSNSEIKQPSLSHGFERKRSIITNAMMHLGKKYVFNIDLDNFFGSFNFGRVRGFFIKNRNFALDPEIATVIAKIACYNNELPQGSPCSPVITNLITHSLDIKLAAIASRNSSTFTRYADDITFSTRKGEFPSAIAKNQNGKYIVSKKIRGEITRSGFIINDGKTRNQYKDSRQDVTGLVVNKKPNTKKEYWRLVRAQCDHLFKHGEFLEVIDGKEIKGNVNTLAGKLNFIDQVDHYNRLRQGEKLNPKYHLKKDANKNGHAKKRRYLHSSREKTFSEFLFYRLFYGNELPTILTEGKTDNIYLKAAIHKLASSFPNLAVAESPGLSYKPRTKFVNYNERTKYLLELYGGADYLKDFVIHYKQHFNRYKAPKPSNPVIILVDNDSGPKDLINYVSKVDNIGIFPTGVPDIRASEFVHIFCNLYLVLTPQVKGYTGTDIEHFFKDADRLRPHKGKFFNTVSKRDHDNDLSKESFATHIVHAHKHEIDFSGFTSLLERLVKVINHFDTVK

SEQ ID NO: 1073 - protein, 618 aa, Rahnella inusitata
  source 1..618: note = Related to NZ_CP065024.1
MNRLQSLKEAKTKPDLAKLLDVKPSALTYCLYILKPENQYTQFKIPKKNGGERTINAPNGLLKSIQSSLSKLLLDCLDEIIFNKFPDSELAAEKANNSKVLKIKCSAAEIKQPSLSHGFERKRSIITNAMMHLGKKNVFNIDLENFFGSFNFGRVRGFFIKNRNFELDQEIATVIAKIACYNNELPQGSPSSPVITNLITHSLDIKLAALAVKNSCTYTRYADDITFSTRKIDFPSFIANDKCGKFAPSKKLRSEIVRSGFLINDKKTRNQYKDSRQDVTGLIVNKKPNTKKEYWRLVRAQCDHLFKYGTFVEKIDDIEIKGNINRLEGKLNFIDQLDHYNRLRQAEKLNPKYQLKKDPTKNTQAKTRRYLHGGRESTFSRFLFYRLFYGNTLPTILTEGKTDNVYLKAAIHKLAALFPKLASEKSAGSPYKSLTRFLDYNERTKYLLELFGGADYLKDFVIHYKSYYKYYTAPEPSHPVIIFVDNDTGPKDLINYINKIDNASIFPKGLKDIRSSDFVHVFHNLYLVLTPQTKGYSETDIEHFFKDKDRLRQYKGKSFNTVSLRDPNNDLSKEAFSKHIIHANKHDIDFSGFTSLLERLVKVIEHFNSLKIKNSSAP

SEQ ID NO: 1074 - protein, 613 aa, Vibrio parahaemolyticus
  source 1..613: note = Related to LQCW01000011.1
MERLQLLKNAKTKPDLAALLNIKPSVLTFCLYKVKPQNQYTQFIIPKKNGGERIINAPTGVLKSIQSALSNLLLDCLDEITRNKFPKSELVIEKAKHSKVLKVKCSNSQSKQPTLSHGFERKRSIITNAMMHLGKRHVFNIDLEDFFASFNFGRVRGFFIKNKNFELEPDIATVIAQIACHNNELPQGSPCSPVITNLITHSLDIKLSALASKNSCTYTRYADDITFSTRKKEFPIDIARKKGEQFISGKKLRSEIIRSGFKINKGKTRNQYKDSRQDVTGLIVNKKPNTKKEYWRKVRAQCDYLFKYGEFIDTVNGKEVKGNIHSLEGKLNFIDQVDHYNRLRQTLPLNSKYQLKKDAIKNGQAKLRRYLHSGREETFSKFLFYRLFYANESPTILTEGKTDNIYLKAAIHKLAGSYPRLASEKNDNSPYKLLTRFVEYNERTKYLLELYGGADYLKDFVVHYKHHFKYYEAPNPQNPVVIFVDNDSGPNNLINYVNKINGKCIYPEHINDIRASEFVHVFHNLYLVLTPQVAGFKETDIEHFFVESDRLRPYKGMIFNTISKRNPEKDLSKDAFATHIIHAKKNEIDFNGFKSLLDRIVKVIEHYDSINKK

SEQ ID NO: 1075 - protein, 611 aa, Vibrio cholerae
  source 1..611: note = Related to KB662759.1
MTRLQALKKAKTKPELAHLLNIKPSVLTYCLYKIKPQNQYTQFKIPKKNGGERTINAPTGTLKSIQSALSELLLDCSDEITRNKYPESELAREKAKHSKILKVKCSNSIIKQPTLSHGFERKRSIITNAMMHLGKKHVFNIDLEDFFGSFNFGRVRGFFIKNKQFELEPEIATVIAQIACYNNELPQGSPCSPVITNLITHSLDIKLAALASKNSCTYTRYADDITFSTRKKEFPSFIAQQKDDQFFASKKLRSEIVRSGFKINPSKTRNQYKDSRQDVTGLIVNKKPNTKKEYWRTVRAQCDYLFKYGEFIEVIDGEGVKGNINSLEGKLNFIDQVDHYNRLRQTLPLNPKYQFKKDTIKNGQAKLRRYLHSSREDTFSKFLFYRFFYASELPTILTEGKTDNVYLKAAIHRLASSYPELALEKKGDSPYKLLTRFVEYNERTKYLLELYGGADYLKDFVIHYKQNFRFYKAPKPENPVIIFVDNDSGPNNLINYVSGIQGKYIYPESVKDIRASEFVHIFHNLYLVLTPQVAGFKETDIEHFFTDNDRLREYKGMCFNTILNRKPEKDLSKDAFATHIVHAKKNEIDFDGFKILLDRMVKVIEHYVSIK

SEQ ID NO: 1076 - protein, 611 aa, Vibrio parahaemolyticus
  source 1..611: note = Related to JACBSO010000017.1
MERLQTLKQAKTKPDLANILGIKPSTLTYCLYKLKPQNQYAQFNVPKKNGGVRVINAPTGTLKSIQAALSILLLDCWDEILKSKFPASEISREKAKHGKTLKVKCSNSETKQPSLSHGFERKRSIITNAMMHLGQKHVFNIDLEDFFGSFNFGRVRGFFIKNRDFELDPEVATVIAQIACFNNELPQGSPCSPVITNLITHSLDIKLAALASRNSCTYTRYADDITFSTRKSSLPKCIAQNRDGEFLVGKKLRSEITRSGFNINDKKTRNQYKDSRQDVTGLIVNKKPNTKKEYWRTVRAQCNHLFNNGFFIESINGKDVKGNINRLEGKLNFIDHVDHYNRLRQTLPLNPKYQYKKDAIKNGQAKLRRYLHTGREDTFSKFLFYRLFYANDLPTILTEGKTDNVYLKAAIHKLAGGFPKLATEKNGNSPYKLLTRFVEYNDRTKYLLELYGGADYLKDFVINYNHHYKYYKAPTPNNPVIIFVDNDTGPSGLISYINKIQDSVIYPDGVKNIRDSDFVHIFHNLYLVLTPKENGYDGTDIEHFFVEKDRLRKHKGKCFNTVADRDSENDLSKDAFANHIVHARKHEIDFSRFNTLLERIVKVIEHYDSIK

SEQ ID NO: 1077 - protein, 610 aa, Aeromonas sp.
  source 1..610: note = Related to JAKZFL010000005.1
MSKLQDLKKATTKPDLAHVLGVKPSVLTYCLYVLKTENQYTQFKIPKKTGGERVINAPTGKLKTIQSLLSNLLLDCLDEINHKAFPKSQLAKETVKNAEVLKIKCSTALVKQPALSHGFERKRSIITNAMMHLGKKQVFNIDLEDFFGSFNFGRVRGFFIKNRNFELHPEIATVIAKIACHNDELPQGSPCSPVITNLITHALDIKLARMASKNSCIYTRYADDMTFSSRESTLSKNIAYEDDNIFVVSKKLRAEITRSGFTINDKKTRNQYKDSRQEVTGLVVNKKPNTKNEYWRTARSQCDRLFKTGGFTELVNGEVVPGNINRLEGRLNFIDQVDHYNRLRQKLPLNPIYQTKKEVLKKTNQAKLRRYLHSGREDTFSKFLFYRLFYANELPTILTEGKTDNIYLKAAIQMLAKNFPRLATEKTAVSPYKLLLRFVEYTERTKFLLELHGGADYLRDFVINYKKHFEYYKAPRPENPVIIFVDNDTGPNDLINYVNKIEGITIYPSSQNEVRKSDFVHVFCNLYLVLTPRDSNGNTDIEHFFTNKDRLRQYKGRCFNVESKRDVKNDLSKDAFANHVVHANKASIDFDGFSGMLGQIAKVIEHYDSI

SEQ ID NO: 1078 - protein, 610 aa, Aeromonas salmonicida
  source 1..610: note = Related to QLLM01000001.1
MSRLQELKKATTKPDLAKLLGIKPTMLTYCLYILKTENQYAQFNIPKKNGGERTINAPTGILKSIQSLLSKLLLDCLDEINHKKFPKSELAREVARNSKVLKIKCSNALIKQPSLSHGFERKRSIITNAMMHIGRKNVFNMDLENFFGSFNFGRVRGFFIKNKHFELNDEIATVIAKIACHNNELPQGSPCSPVITNLIFHSLDINLAKLASKNSCVYTRYADDITFSSREKELPKDIAHEDNGEFVLSKKLRYEITRSGFIVNDKKTRNQHKDSRQEVTGLIVNKKPNTKKEYWRTVRAQCNSLFKTGVFTEIENGKAIPGSINRLEGKLNFIDQIDHYNRLRQAPPLNPKYQPKKEAIKNGQAKLRRYLHSGREDTFSKFLFYRLFYANELPTILTEGKTDNVYLKSAIHMLAKNYPQLSSEKTDKSPYKLLLRFVEYTERTKYLLELYGGTDYLKDFIIGYKQHLKFYKAPRPEKPVIIFVDNDTGPKDLINYVNKIDGKEISPSTEVDIRSSEFVHIFYNLYLVLTPKDNNINTDIEYFFTEKDRLRQYKGKCFNIVSKRDLDNDLSKEAFATHVIHANKKDIDFSGFTGMLDRIVKVLKHYDSIK

SEQ ID NO: 1079 - protein, 615 aa, Vibrio diazotrophicus
  source 1..615: note = Related to POSH01000027.1
MVKLKALKEAKTKPDLARLLGIKPSLLTHCLYVIKTENQYIQFKIPKKNGGERIINAPTDKLKFIQSALSNLLLDCLDEINYDKFPKSDFSNITSKRAKVLKIKIPNSNIRQQSLSHGFERKRSIITNAMMHLGKKYVLNIDLEDFFGSFNFGRVRGFFIKNRNFELSPEIATVIAKIACHNNELPQGSPCSPVITNLIVHSLDIKLAKLAEKNSCIYTRYADDITFSCRKRDLPKAIAYELNGEFILSKKLRSEITRSGFNINHKKTRNQYKDSRQDVTGLIVNKKPNTKKEYWRTVRAQCDNLFKTGAFTELVDGKDVEGNINRLEGKLNFIDQVDHYNRLRQTPPLNPKYQTKEDLIKNNQAKLRRYLHNGREKTFSKFLFYRLFYANELPTILTEGKTDNVYLKAAIHMLSKDFPKLSSVQTTTSKYKLLLRFFEYKVRTRYLLELYGGADYLKSFVINYRYQYNYYKAPKPENPVIIVVDNDTGPNGLINYVNGITEKKIFPSASKDIRTSEFVHIFNNLYLVLTPKGLGGCNTDIEYFFTDKDRLRTYKIKDSLKCFNTVDKRDPNNDLSKEVFATHIVHANKKDIDFSGFKVILERIVKAIDHYDSIK

SEQ ID NO: 1080 - protein, 611 aa, Shewanella sairae
  source 1..611: note = Related to BPEY01000057.1
MQKLQLLKKTKTKPDLAHLLGIKPSALTYCLYIVKTENQYSQFKVPKKNGGERIINAPTAALKSIQSSLSNLLLDCLDEINAEKFPSSEIVKEKAKNSKVLKVKCSNAKTKQPSLSHGFERKRSIITNAMMHLGKKHVLNIDLEDFFGSFNFGRVRGFFIKNKHFELSPEIATVIAKIACHKNELPQGSPCSPVITNLIVHSLDIKLARLASNNSCIYTRYADDITFSTRNRELPVALASERDGEFILSKKLRSEIRRSGFLINDKKTRNQYKDSRQDVTGLIVNKKPNTKKEYWRTVRAQCNSLFKTGGFTELVNGEVVKGNANVLEGKLNFIDQVDHYNRLRQSPPLNPKYNTKKEAIKNNQAKLRRYLHSGREDTFSKYLFYSLFYGNELPTILTEGKTDNVYLKSAVHMLAKSFPKLASEKTATSRYELLLRFVEYTERTRYLLELYGGTDYLKDFIINYRQHFKFYKAPKPKKPVIILVDNDVGPKNLINYVNHIEGKSIFPSSAKDIRASDFVHIFHNVYLVLTPLGKENSETDIEYFFSDADRLRKYNGKCFNTVSKRDPDSDLSKDSFATHVVHANKKDLDFSRFKGIFDRMVKVIEHYDSIK

SEQ ID NO: 1081 - protein, 610 aa, Photobacterium carnosum
  source 1..610: note = Related to WMDE01000004.1
MEQLKSLKKVTTKPEFAQLLGIKPSVFTYCLYVIRPENQYSQFKIPKKNDGYRTINAPTGTLKTIQSALSNLLLDCLDEINKDKFPSSEMFKAEAINSKFLKIKCSNSVIKQPSLSHGFERKRSIITNAMMHVGRKNVFNIDLENFFGSFNFGRVRGFFIKNKNFKLCPDIATIIAQIACNNNELPQGSPCSPVITNLIVHSLDLRLAKLASNDSCIYTRYADDITFSTRENKFPINIAKEDDNKFHSSKKLNSEIKSAGFVINDKKTRNQYKDSRQDVTGLIVNKKPNTKKEYWRTVRAQCDSLFKTGEFKELVGDSYIIGNINRLEGKLNFIDQVDHYNKLRQSVPLNPKYYLKKEANKSQAKKRRYLYTGREITFSNFLFYRLFYASELPTILTEGKTDNVYLKAAIHMLADKHSSLASAKSGNSSYKLLLKFVEYSERTKYLLELYGGTDYLMDFIKNYNLNYNLYKAPKPNNPVIIVVDNDDGPKGLINYINKIKDAKLFPQTAKDIRSSEFIHIFNNLYLVLTPRTEDNCPTDIEYFFTDKDRLREYKNKCFNTHSNRDTENDLSKDSFANHIIHANKNDIDFSRFNGLLNRIGKVIEHYNLGK

SEQ ID NO: 1082 - protein, 612 aa, Oceanimonas baumannii
  source 1..612: note = Related to NZ_SODO01000007.1
MTQLQALKDAKTKPDLARLLNIKPSIFTHCIYIVDTKNQYTQFTIPKKNGGERTINSPSDKLKKIQKSLSNLLLDCLDEINKLQFPDSEISRPRASNSKYLKVKCSNSKIKQPSLSHGFERKRSIITNSMMHVGKKHVFNIDLEDFFGSFNFGRVRGFFIKNKNFLLEPEIATAIAKIACYNNELPQGSPCSPVITNLITHSLDIKLSKLAFYNSCIYSRYADDITFSTNESKMPRHIARSVDGELIVGKKLYSEIRRSGFSINKNKTRDQYKDSRQDVTGLVVNKKPNTKKEYWRTVRAQCNMLFKTGSFNEVLNGEIIKGNINRLEGRLNFIDQVDHYNRLRQHPALEAKYQSKKEALHLRNMAKLRRHLHNGRENTFSKFIFYRLFYANETPTVLTEGKTDNVYMKAAIHMLASSYPQLAQENNGSTPYKLLMKFVEYSERTRYLLELFGGADYLKTFVMHYRQHYKYYKAPKADNPVIILVDNDEGPKDLINYVNGIKSKHVYPTSSKDIRSADFVHIFHNLYLVMTPRGNNNQHTDIEYFFKDFDRLRKYQGKCFNTISKRNPNTDLSKDSFANHIIHAHKKSIDFSGFDAILNRILLAIDHYKSRK

SEQ ID NO: 1083 - protein, 616 aa, Rheinheimera pacifica
  source 1..616: note = Related to NZ_FNXF01000003.1
MQKIEALRKITTKPELAALLGIKASVLTYALYIVKPQNQYIQFKIKKKNGGERLISAPTDKLKSIQSALSDLLLDCLDEIYKSKFPDSEIAKQKLKHSKVLKIKIGSAKNKQPSLSHGFERNRSIITNAIMHIGKKNVLNIDLEDFFGSFNFGRIRGFFIKNENFKLDSNIATVIAHIACCNKELPQGSPCSPVITNLIAHSLDIRLAALAKKHSCTYTRYADDITFSTREDTFPESVMRQEGGGYIAGKKLRSEIRRAGFSIKESKTRIQYADSRQDVTGLIVNQKPNVKREYWRTVRAQCNSLFKTGKFVEVAGEEQTVGNINVLEGRLNFIDQLDHYNRLRQKPALDPNYHLKRDALVQQKKAKQRSHLLNSREKVFSKFLFYRYFYAFDKPLILTEGKTDNTYLKSAIWKLAAHYPKLAKAKSNTSAYELLLRFFNYTERTNFLLELAGGGDYFKDFASGYAENYKKYKAPRPEHPVIIIVDNDSGPKDLVNLIATKKIGSIYPTNPAHSNVDVRNSDFVHLFHNLYIILTPLSAGSSSSDIELLFKDVDRLRLYKGKSFNTATKRDNSKDLSKEAFATHIVSAQKNIVNFDGFKELLDRVVSVINHYDSVK

SEQ ID NO: 1084 - protein, 615 aa, Thalassomonas viridans
  source 1..615: note = Related to NZ_JYNJ01000140.1
MRKLNSLAQITTKAELAALLGIKTSFLTHCLYVIKPANQYTQFKIAKKNGGERTINAPTNRLKSIQSALSHLLLDCLDELNRKKYPASELAKSSAQHSHILKVKCSNTKTKQPSLSHGFERKRSIITNAMMHTNKKNVLNIDLKEFFNSFNFGRVRGFFIKNDNFKLDPHIATVIAQIACYNNELPQGSPCSPVITNLITHSLDIRLALLAQKHSCTYTRYADDITFSTRESIFPPQIMREENGQFIAGKKLRSEIRRSGFSINNKKTRIQLKDSRQDVTGLVVNQKPNTKKEYWRIARAQCNNLFNTGAFTKTVNGETIKGNVRELEGQLNFIDQLDHYNRLRQKSPLNPKYHLKKDEIIKQKKAKQRSYLFSGREKTFSQFLFYQFFYASDKPTILTEGKTDNVYLKTAINILAANFPDLAKTKTVTTPYELLLRFVEYSERTKFLLELHGGTDYLKHFIMGYESKLKRYKAPKPKHPVIIVIDNDTGPQGLLHYVANISSAIISPNSLILKQDYRKADFIHIFHNLYIVLTPRGAGNTHTDIEYFFKDIDRLRTYKGKCFNTVANRDEERDLSKDAFAKQIIKAQKKVVDFSNLKPLLERFVMVIKHYSTIN

SEQ ID NO: 1085 - protein, 635 aa, Marinobacter daepoensis
  source 1..635: note = Related to JAHVIP010000004.1
MTKLELLQAAKTKSDLASILNIPPRALTYRLYKIRPESQYHTFSIPKKTGGSRTIRAPEKELKNIQSALSNLLLDCLDEINKKRFPNSELASPKARHARTLKVKCNSARQKQPSISHGFERNRSIITNAMMHIGQKNVLNLDLANFFESFNFGRVRGYFLKNENFKLTPEVSTTIAQIACTDNSLPQGSPCSPVITNLITQSLDIRLAALANRHSCIYTRYADDITFSTRKKSFPSQIIRNSQGIQTLGKKLASEIRRSGFSVNPKKTRVLYHSSRQEVTGLVVNQKPSVKKDYWRLVRAQCHQLFTHGSYLEEVDDNFVTGSITELEGKLNFIDQIDHYNRLREKPPLDPRYHYKKDALAKSSSSKSREYLFNNREKTFSQFLFFKYFYANSTPTILTEGHTDNIYLKTALLQLSSNYPSLTKGSPPKLSCHLFNYTERTKFLLELAGGTDYLKSFVEKYNTRYEKYNAPTPTQPVIIVVDNDSGPSSLLHSLKKYDQAKLFPTNLKISDINDVKKSEFIWIFHNLYLVLTPLKGKNDTDIESLFKEKERLRKHNGKCFNTVEKRNEEKDLSKDSFARNIIRANRKSIDFSNFHGLLNRITAVQKHYEGIKNDNGSKDIQPFLATLLKPSQSPP

SEQ ID NO: 1086 - protein, 612 aa, Marinobacter halotolerans
  source 1..612: note = Related to NZ_VMHP01000002.1
MGRLDELRAVKTKSELAKLLGIKPSFLTYQLYVVGLASQYKNFHIPKKSGGLRSITAPDAKLKSIQSALSNLLLDCVDEINKETFPRSELANEKAQHAKVLKIKCNSARTKQPSLSHGFERKRSILTNAMVHVGQKNVLNIDLQDFFASFNFGRVRGFFIKNREFSLTPEIATTIAKIACFNNELPQGSPSSPVITNLITHSLDIKLAGLAEKYSCLYSRYADDITFSTREETFPHQIMRETRGEYQPGKRLRSEIRRSGFTINNKKTRILYRSSRQDVTGLVVNQKPSVKKEYWRTARAQCHSLFRTGKFTKSTDGQIFEGNINELEGQLNFIDQVDHYNRLRQKPALNPRYHLKKDELSKNKDSKKKRQYLLNSREKTFSKFLFYRIFYANTKTTILTEGKTDNTYLKSAIRELSHSYPSLAKPNPYELQCQFLNYSERTKFLLELHGGGDYFKSFVESYLEKFRGFTAPKPNHPVIIFVDNDKGPQELISRIKGLKGVQIHPIHLDIQKDIRQAEFLHLRANLYLILTPQTSSLGETDIEYFFKDKDRLRQHNGKSFNTVKKRDEAKDLSKAAFAQHIVKSQKKSIDFSDFTLLLDRIVAVQNHYDSIK

SEQ ID NO: 1087 - protein, 610 aa, Hahella sp.
  source 1..610: note = Related to JAHMIN010000032.1
MSRLENLRAVVSRPQLANLLGIRPSFLTYTLYVRGVSSQYCKFSIPKKAGGKRYIKAPQKELKYIQSALSTLLLDCLDEINKEKFPKSELVSPKAEHSKTLKVKCNSARVKQPSLSHGFERQRSIITNSMMHLGKKNVLNIDLKDFFQSFNFGRVRGFFIKNEYFKLDPTIATTIAQIACYDNQLPQGSPCSPVITNLIAHSLDIRLARLAKKYSCTYSRYADDITFSTRERIFPPQLMREDDGIYTPGKRLKSEIQRSGFSLNDRKTRILYRDSRQDVTGLVVNQKPNVKKEYWRTVRAQCHWLFNIGAFTMVVDGKDIEGNINALEGKLNFIDQLDHYNRLRQKPALNPKYQLKREVKGRDSLKARRYLFSAREKTFSQFLFYRLFYANDKPTILTEGKTDNIYLKSAIQSLAASYPKLAIENPYQLLCHFVSYTERTRFLLELYGGADYLKGFIDSYKDNFEMYKAPKPRHPVIVFVDNDSGPKDIISRVNGLGEASVFPPKIEKVKDVRKADFTHLMKNLYLVLTPRSEADKDTDIEFFFKDEDRLRKFNGKYFNTVDNRDETKDLSKEAFARNIVKFQRKSIDFSKFTSLLDRVVAVIDHYETIK

SEQ ID NO: 1088 - protein, 609 aa, Pseudoalteromonas sp.
  source 1..609: note = Related to CP091442.1
MSKLAKLRAAKTKPELADVLGVHPSFLTYTLYVRGTNSLYTSFNIPKKSGGVRTIQSPDSGLKSIQSALSNLLLDCIDEINLANFPDSELASPKASHSNILKVKCNSAKTKQPSLSHGFTRHRSIITNAMMHVNKKAILNIDLKDFFSSFNFGRVRGFFIKNKNFELDDNVATTIAQIACHDNELPQGSPCSPVITNLITHSLDIRLADLARKNSCTYSRYADDITFSTGKRKFPSEIVSEENGICALGKKLKSEVRRSGFSINSKKTRVLYKDSRQDVTGLIVNKKPNIKAEYWRTVRAQCNLLFKTGKFYDLINNKEVEGNIYELEGKLNFIDQLDHYNRLRQKPALNPQYHRQKDALAKGGNQKQRRYLYNNREKTFSNFLFYKLFYANPLTMILTEGKTDNIYLKAALSRLATAFPSLAKSQPYEPLCQFFKYTERTRFLLELHGGGDYFKSFVGSYEERYRLYKAPKPANPVIIFVDNDTGPDQLISRIKGMKGIGIYPTSLNKGDIRKSDFVHISNNLYLILTPQSNTGDNTDIEYFFTDFDRKRPYNGKCFNTVKLRNDNVDLSKDAFSRHIVQAKKNVIDFSGFHKLLERIVLVQNHYKTL

SEQ ID NO: 1089 - protein, 606 aa, Alteromonas sp.
  source 1..606: note = Related to BLIJ01000065.1
MSRLDRLKAVNTKPQFARLLGIHPSLLTYTLYKKRPEHCYHEFKIPKKSGGKRTINAPDEKLKSIQRALADLLLDCLDEINAVYFPSAETLKPKAKHADILKVKCNSALSKQPALSHGFERKRSILTNAVMHLDKKHLLNIDLKDFFPSFNFGRVRGFFIKNNHFKLHPSTATLIAQIAILNNELPQGSPCSPVIANLITHHLDIRLASLAAKYSCTYTRYADDITFSTRRAAFPRQIMNEKDGGYIPSKRLASEVNRAGFRINSQKTRILYRDSRQEVTGLVANKKVGVKKEYWRTLRAQCHSLFTTDSFTKIVDGKKVEGNINELEGQLNFVDQVDRYNRLRQKQPLNPLLALRSEQKNGDKKSKRHLLNNRERTLSDFLFYKLFISNSKTTILTEGKTDNTYLKSAIQALAKRFPTLAETKPYQPLVQFMNYSERTRFLLELFGGCDYLKAFAENYSSRRKKYLKEKPTSPVILLLDNDQGPKDLINRFSKDKSITLLPSTSKNIRDAEFVHVCDNLYLVLTPISPKRKETDIEYFFMAKTRLLKDSKTGKCFNTISKRDEKRDLSKEAFAQLVKTNKGSINFSRFGPLLTRITKVQKHYAAL

SEQ ID NO: 1090 - protein, 618 aa, Vibrio natriegens
  source 1..618: note = Related to NZ_CP016347.1
MSKLKYLKSVSTKPGFAKALGVDAVFLTRCLYINQPETQYHQFSIAKKSGGKRVITAPSDELKSLQKRLSILLLDCIDEINATKYPNSQRARPKLRKNGDPDYAAEVLKIKVPTTEIKQPSLSHGFVRERSIITNAMMHVGKKHVLNIDLKDFFDSFNFGRVRGFFIKNVNFQLDPHIATVIAQIACFDNKLPQGSPCSPVITNLITHALDIRLASLAKKYKCTYTRYADDITFSTRKADFPPQIMRQDTDGYIAGKKLRSEIERAGFAMNTSKTRIQYKDSRQDVTGLVVNKKPNTKKEYWRLARAKCNQLFKTGKFTTIHDGNEIEGNLNELEGQLNFIDQVDHYNRMRQKAPLSMEYEHKKVTKSTRNILTGRERTFSQFLYYRLFCGNDKPTILCEGKTDNVYLKSAISELSTSYPQLSVTKDGKYELLVRFVEYSKRTRFLLELFGGADYLRGFIDNFEKNMRLYDKVKPKHPVIVFLDNDEGPKQIVNLLKQKSFQDKIELIPSSMNKMDDIRSSEFIHVVKNLYVIFTPLTEDGKETDIEYFFDEKTRLFKHPKNGKCFNTISKRNSKKDLSKEAFATHVIKEKKKDVNFNGLKPLLDSIVKVINHYDSIK

SEQ ID NO: 1091 - protein, 617 aa, Marinobacter sp.
  source 1..617: note = Related to AAXY01000057.1
MSKLRHLKSTSSKPGFAKVLDVDAAFLTRCLYIKKPETQYHQFSIAKKSGGTRVINAPSEELKSLQKSLSKLLLDCIDEINATKYPNSQWSKPKLRKNGETDYAAEVLKIKIPTAETKQPSLSHGFVRERSIITNAMMHVGMKHVLNIDLKDFFDSFNFGRVRGFFIRNANFQLDPHVATVIAQIACYDNKLPQGGPCSPVITNLITHSLDIRLASLARKYKCTYTRYADDMTFSTRRADFPAQIMRQSSNEYLAGKRLRREIESAGFAINSNKTRVQLKNSRQEVTGLVVNRKPNTKKEYWRLARAKCNHLFKIGRFTVAKNGNNVEGNLNELEGQLNFIDQVDHYNRMRQKAPSIPEYASSKIGKNTKNLLTGREKTFSQFLYYRLFYGNDKPTVLCEGKTDNVYLKSAISELNKYYPLLVDVKDEEYDLSIRFVRYSKRTRFLLEIFGGADYLRGFIDNFEKNVKLYEAIKPKNPVIVFLDNDEGPQQIVKLLSTERFQKKIEIIPSKLNKKNDIRKSHFIHVVKNLYVVFTPLTHEGKETDIEYFFNDKARLIKHSNGKCYNTVKNRDAKKDLSKDAFATHIIKENKKSIDFEGLKPLLNSIVNVINHYEKIK

SEQ ID NO: 1092 - protein, 617 aa, Vibrio nigripulchritudo
  source 1..617: note = Related to JXXT01000002.1
MSKLNRLRLISTKPSFARILGVDAAFLTRCLYINKPENQYHQFPVKKKSGGERIIHAPSDELKSLQKCLSILLLDCIDEINAKKYPHSQHVKPKLRKNGEPDYAAEVLKIKIPSALSKQSTLAHGFVRDRSIITNAMMHVGQRHVLNIDLKDFFGSFNFGRVRGFFIKNAHFQLDPHIATVIAQIACFDNKLPQGSPCSPVITNLIAHSLDIRLASLAKKYKCTYTRYADDITFSTRQAEFPAGLMKQDANCYVPGRKLKSEIERAGFYINGNKTRIQHKDSRQEVTGLIVNKKPNIRKEYWRLVRAKCNQLFKTGKFTSKEEEKEVEGNLYELEGQLNFIDQVDHYNRLRQKSPLSNEYAVNKVGKNTRLILTGREKTFSQFLFYRMFCGNEKPTMLCEGKTDNVYLKAAISSLKGNYPQLARVSGEKYELLVRFVEYSKRTRFFLELFGGADYLRGFIDSFERNMKIYNSIKPVNPVIIFLDNDKGSQQIVNLLTSKTFVNRIKLFPVTLDAKQDIRKSEFIHIVKNLYVIFTPLTNTGNETDIEYFFDEKTRLMKHSNGKCFNTLQNRNSKADLSKDSFATHIVKEKKKDIDFIGFKSLLDSIVKVINHYDSLK

SEQ ID NO: 1093 - protein, 617 aa, Vibrio cidicii
  source 1..617: note = Related to NZ_CP046804.1
MSRLKRLKSASTKPEFAKVLGIDAAFLTRCLYINKPENQYHQFSIPKKSGGERLINAPSEELKSLQKNLSILLLDCIDEINSEKYPDSQWSKPKLRKNGDPDYAAEVLKIKIPNAQVKQPSLSHGFVRERSILTNAMMHVGKKNVLNIDLESFFDSFNFGRVRGFFIKNANFNLDPHIATVIAQIACFDNKLPQGSPCSPVITNLISHTLDIRLASLAKKYNCTYTRYADDITFSTRKSEFPPQIMRQNESGYVPGRLLKSEIKRSGFSINSSKTRIQYKNSRQDVTGLVVNKKPNVKQEYWRLARAKCNQLFKTGKFTTIKDGNEIDGNLNELEGQLNFIDQVDHYNRMRQKTPLSTDYTHTKVGKNTKVILSGREKTFSNFLYYRLFCGNEKPTILCEGKTDNVYLKSAISELSKDYPQLAHRKGNKYELLVRFVEYSKRSRFLLELFGGADYLRGFVDNFEKNMKLYDAITPKHPVIVFLDNDEGPQQVVNLLKSKNFQKKIELIPSTLDKKEDIRKSEFIHVIKNLYIVFTPLAKDGGETDIEYFFDDKTRLMKLPNGKCFNTVKNRDSKNDLSKDAFATHIVKENKTKIDFNGLKPLLESVVKVINHYDSLR

SEQ ID NO: 1094 - protein, 617 aa, unidentified
  source 1..617: note = Related to AAVS01000020.1; note = Alteromonadales bacterium TW-7
MSKLKRLRSASTKPQLARVLEVDAAFLTRCLYINKTQNQYHQFSIAKKSGGTRLINAPSKELKSLQKKLSILLLDCIDEINAEKYPRSQLVKPKLRKNGDPDYAAEVLKIKISTAETKQPSLAHGFVKERSILTNAMMHVGKKNVLNIDLNDFFDCFNFGRVRGFFIKNENFKLDQHIATVIAQISCFDNKLPQGSPCSPVITNLITHSLDIRLASLAKKHKCTYTRYADDITFSTRLSEFPAQIMWHDSTTYRAGKALRKEISRSGFSINNSKTRIQYKDSRQNVTGLVVNKKPNIKQEYWRLVRAKCNKLFKTGKFTVVEDGEKKDGNISELEGQLNFIDQVDHYNRMRQKPPLSTDYSHNRVGRGTRSILNGREKTFSKFLFFRLFYGNQKPTILCEGKTDNIYLKSAISELSQSYPQLSSSKGDDYELLVRFVKYTKRTRFLLELFGGADYLRGFIDNFEKNTKAYAKITPEHPVIIFLDNDEGPNNIVKLLRDKGFQKKINLVPPTLDKSEGIRKANFIHVVENLYIIFTPLTPDGKETDIEYFFDDKTRLMKHPNGKCFNTLQKRDSKVDLSKDAFSTHIIKEKKKQIDFNGLRPLLDSVVNAIDHYNSVK

SEQ ID NO: 1095 - protein, 619 aa, Photobacterium angustum
  source 1..619: note = Related to PYOV01000005.1
MSKLNRLRIASSKPDFAKVLEVDSSFLTRVLYINKPESQYHKFTIAKKSGGLREISAPSIELKSLQKSLSKLLLDCIDEINAKKYPYSQLNKPKLRKNGENDYAAEVLKIKIPTSSIKQPSISHGFVRDRSIITNAMMHLGKKNVLNIDLEDFFGSFNFGRVRGFFIKNKNFRLDPHIATIIAQIACYDNKLPQGSPSSPVITNLITHSLDMRLASLAKKFKCTYTRYADDITFSTRLIEFPAQIMKQNEDGYIAGKILRREIKHAGFSINESKTRIQYKNSRQDVTGLIVNKKPNTKKEYWRLVRAKCNHLFKTGYFVSIVDGKEIKGNINELEGQLNFIDQVDHYNRMRQRAPLNPEYARSSVGKHTRNLLTGREKTFRNFLFYRLFCGNDKPTILCEGKTDNIYLKSAISELVKEYPQLARKKASEYELLVRFVEYSKRTRFLLELYGGTDYLRNFIDSFEANMKVYSNIKPKNPVILFVDNDKGTSNIKNLLSSKSFIKKIKISPSSIDKNEQIRKSQFIHVVKNLYVVFTPLASNDDFTDVEYFFDDKARLMKHSNGKCFNTVRNRNDNKDLSKDAFATHIVKENKKNIDFTGFKPLLNSIVEVINHYESIKKA

SEQ ID NO: 1096 - protein, 617 aa, Aeromonas veronii
  source 1..617: note = Related to NZ_CP024930.1
MSKLQSLKSISSKPELAKLLGVDAAFLTRTLYIVRPENQYHQFTIDKKSGGKRVINAPSEELKSLQRKLSNLLLDCIDEINKIKYPTSQLAAPKVRENGDIDYTAKVLKIKIPSSKSKQPSLSHGFSRKRSIITNAMMHIGKKNILNIDIENFFDRFNFGRVRGYFIKNNDFKLDPHIATVIAQIACYDNKLPQGSPCSPVISNLICHSLDINLSSLAKKYKCTYTRYADDITFSTRKSEFPKKIAEQNEGYYTLGNELLYEIKRSGFSVNNGKTRIQYKNSRQDVTGLVVNKKPNTKKEYWRLARAKCNALFKTGTFTTIEDGVSVIGNLDELEGQLNFIDHVDHYNRLRQKAPLSPEYSLKTIGKSTNILLSGREKTFSQFLYYRLFYGNEKPTILCEGKTDNIYLKSAISELMAHYPSLAIKTDGKYELLIRFVEYTKRTRFLLELFGGTDYLKGFIENFHKNMAPYKNLKPKNPVIIFLDNDTGPSNIVSLLQGNKFQKMITLIPSHLDKKDDIRKSEFIHVMDNLYVIFTPLGNSGEETDIEYFFDDKTRLMKHSNGKFFNTVEKRDTKNDLSKDAFATHIVKEKKKSIDFTGLKVLLDPIAKVIEHYKNIK

SEQ ID NO: 1097 - protein, 617 aa, Aeromonas sp.
  source 1..617: note = Related to JAHUWA010000001.1
MLNLERLKQISTKPDFAKLLGVDAAFLTRTLYIVKPDNQYSQFTIDKKSGGKRIINAPSDELKSLQKKLSNLLLDCIDEINAKKFPKSQSIKPKLRKNDENDYAAEVLKIKIPTSESKQPSLSHGFVRERSIITNAMMHIGKKNVLNIDLENFFDSFNFGRVRGFFIKNNNFKLNDHIATVIAQIACYENKLPQGSPCSPVISNLITHSLDIKLAFLARKYKCTYTRYADDITFSTRKDDFPNQLARHDGNTYILGKKLLREIKSSGFSVNNNKTRIQFKNSRQDVTGLIVNKKPNTKKEYWRLARAKCNTLFKTGTFTSIKDNVEVKGNLNELEGQLNFIDHVDHYNRLRQKPPLVPEYTLKTIGKSTRILLSGREKTFSQFLYYRLFCGNEKPTILCEGKTDNIYLKSAISEMKKDYPLLADTKDDHYELLVRFVEYTKRTRFLLEIFGGADYLRGFIDNFEKNMKTYENVRPKKPVIVFLDNDTGPDKIVNLLQGKGFQDKITLIPSHLDKSCDIRRSEFIHITKNLYVIFTPRGSAGEETDIEYFFDEKTRMMKHSNGKFFNTIKKRDTKSDLSKDAFATHIIREKKKNIDFKGLKPLLDSIIKVINHYDDIK

SEQ ID NO: 1098 - protein, 615 aa, Plesiomonas shigelloides
  source 1..615: note = Related to NZ_MUNJ01000002.1
MSKLKLLRKITSKPELAKLMGIAPVFLTKCLYVTRPEHQYHQFQIDKKSGGKRTISAPSEELKSLQKKLSLLLLDCLDEINSEKFPYSQVPSPKKRNNGDDYSANKLKIKIPSAKTKQPSLSHGFERNRSIITNAMMHIGKKNILNIDLADFFDQFNFGRVRGFFIKNKYFNLDTHIATVIAQIACYDNKLPQGSPSSPVITNLITHSLDIRLLSLAKKYKCNYTRYADDLTFSTRLDDFPEQIMKQVDGEYIPSSKLLHEITRSGFTINNKKTRIQFKSSRQDVTGLVVNKKPNVKSEYWRQVRAKCNSLFKTGEFFSIKNGKIIEGNINELQGQLNFIDQVDLYNRLRQKPPLQPEFELKKLGTSTKQILSSRERTFSQFLFYRLFIGNDRPTILCEGKTDNVYLKSAINSLKGDYPSLAKMEDGKYNLLINFVEYSKRTKFLLELSGGASYLRDFILNYEKNFKIYKDHSPKYPVIIFLDNDSGANTIINLLQQREWQRKISLSPNTLDKKDDIRKSNFIHVEYNLYVILTPRTPIGGDTDIEYFFDDKTRLLAHSNGKCFNTVSKRNPNTDLSKEAFATHIIKEKKNSIDFTSMKPLLNLIVDVVTDYNTR

SEQ ID NO: 1099 - protein, 336 aa, Pseudomonas sp.
  source 1..336: note = Related to DOLN01000112.1
MSRLDKLRSTSTKSGFADVLGVSAVFLTRCLYINKPENQYHQFTIDKKTGGKRVINSPSKDLKSLQKSLSDLLLDCVDEINSKKFPKSQLASPKLRKNKEPDYAAEVLKLKIPSANSKQPSLSHGFVRKRSIITNAMMHVGSKYVLNIDLQDFFDSFNFGRVRGFFIKNRNFQLNPDVATVIAQIACYDNKLPQGSPCSPVITNLISHSLDIRLASLAKKYKCTYTRYADDITFSTRMPTFPVQIMAQQDGCYYPSKALIGEIERAGFFVNNKKTRILYEDSRQEVTGLVANKKPNTKKEYWRTVRAKCDTLFKTGNFSTVIDGKKVEGNLNELEG

SEQ ID NO: 1100 - protein, 617 aa, Colwellia sp.
  source 1..617: note = Related to JABSPA010000005.1
MSRLEHLKSITTRPSFAKALGVNPSFLTRCLYIIRPENQYHQFEIKKKSGGKRIIKAPSVDLKSLQKKLSDLLLDCIDEINASKFPKSQLASPKMRNKKDLDYAAKVLKIKIPGAESKQPSLSHGFVRDRSIITNAMMHLGKKNVLNIDLENFFDSFSFGRVCAFFMTNRNFNLNKKIATVIAQIACYERKLPQGSPCSPVITNLITHSLDIRLAVIAKKYKCTYSRYADDITFSTNKSTFPYQIMNQYADAYIPGKELIWEIERAGFSINDKKTRIQYKDSRQDVTGLIVNKKPNTKKEYWRTARAKCNSLFKKGKFTSIKDNVETDGNINELEGQLNFIDQVDHYNRMRQKAPFIPEYTIKNHGKNTKLLLSAREKTFSHFLFYRLFYGNDKPTILCEGKTDNVYLKSAISELQANYPSLATIKDKKYKLLLRFVEYSKRTRFLLELFGGADYLRGFIDNFEKNTKQFEAPKPQHPVIIFLDNDEGPQQIVNLLQSKSFHNKISLFPDGLDPKKDIRKATFLHITLNLYVIFTPLNSSGKETDIEYFFDRKTRLMKHSNGKCFNTVRKRNSRTDLSKDAFATHIVKAQKKRINFKKFKSLLDPITKVIEHYKTLK

SEQ ID NO: 1101 - protein, 616 aa, Shewanella sp.
  source 1..616: note = Related to NZ_CP048031.1
MSQLNYLRRISTKPSFAKALGVDPRFLTRCLYIIKPENQYHQFTIEKRSGGKRIINAPGDDLKSLQKKLSDLLLDCIDEINISKYPSSQLAKPKMRNKKDLDYAATVLKIKIPTAESKQPSLSHGFVRERSIITNAMMHLGKKNVLNIDLKNFFDSFNFGRVRGFFIKNNNFKLDPHIATIIAQIACYDNKLPQGSPCSPVITNLITHSLDIRLAKLAKKYKCTYSRYADDITFSTRKSTFPKEIMNEDIDGYTPGKKLVGEIVHAGFSINHNKTRIQFKDSRQEVTGLIVNKKPNTKKEYWRTARAKCNNLFKKGKFTSIEDGFEIDGNLDELEGQLNFIDQVDHYNRMRQKAPLTAEYAINNIGKNTKNLLSARESTFSRFLFYRLFYGNDKPTILCEGKTDNVYLKSAISELLPKYPSLARIEDNNYKLLVRFVEYSKRTRFLLELFGGVDYLKDFINNFEKNTKCYTAPEPKHPVIIFLDNDDARIPNLLKGKSFNKKVTLFPSSLNSIDDVKKADFIHIFQNLYVVFTPLGKSGEDTDIEYFFHKKTRMIKHSNGKFFNTVDKRNPEVDLSKDAFAMHIIKAQKKSINFTRLKPLLNRIVKVTEHYDQIKK

SEQ ID NO: 1102 - protein, 617 aa, Shewanella sp.
  source 1..617: note = Related to JAHKRD010000030.1
MSKLKYLKSISTKPSFAKALGVDPRFLTRCLYITRPENQYIQFTIDKKSGGKRIINAPKDDLKSLQKKLSIMLLDCIDEINISKYPSSQLAQPKMRNKNDLDYAAEVLKIKIQSTESKQPSLSHGFVRKRSIITNAMMHLGKKSILNIDLEDFFGSFNFGRIRGFFIKNENFKLDPHIATIIAQIACYNDQLPQGSPCSPVITNLISHSLDIQLAALAKRYKCTYSRYADDITFSTRRSTFPSEIMNYESDSYVPGRKLIREIKRAGFSINEKKTRIQYKDSRQDVTGLVVNKKPNTKKEYWRIARAKCNVLFKTGKFSSISNGIEVEGNINELAGQLNFIDQVDHYNRMRQKAPFTPEYSPRVIGKNTKVILSGREVTFSRFLFYRLFYGNNKPTILCEGKTDNVYLKSAISELIADYPTLAKIEDKKYELQLHFVEYSKRTRFLLELFGGADYLKGFIDNFEKNTLPFKAPLPQHPVIIFLDNDKGPEKIKQLLQGKTFNEKISLFPKGLDPKTDVRKANFIHVIKNLYVVFTPLKNTGEDTDIEYFFDSKTRLIPHQNGKFFNTIENRNSTTDLSKEAFATHIIKSKKKNINFKGLKPLLDRIVEVIEHYNTIK

SEQ ID NO: 1103 - protein, 618 aa, Pseudoalteromonas fuliginea
  source 1..618: note = Related to NZ_SEUL01000049.1
MPRLTHLKTVSSKPGFARALNVDPRFLTRCLYVVRPENQYHQFSIDKKSGGQRLINAPSDDLKSLQSSLSNLLLDCIDEINKNKYPESQIASPKMLSPKKKDHIAEVLKIKIPSSEHKQPSLSHGFVRERSIITNAMMHLGKKNVLNIDLKDFFDSFNFGRVRSFFIKNINFRLDPSIATMIAQIACYKDTLPQGSPCSPVITNLITHSLDIRLASLAKDYKCTYTRYADDITFSTRKSVFPPQIMRGKVDDNHGYIPGEKLTNEIKRAGFLINHKKTRIQYKDSRQDVTGLIVNQRPNTKKEYWRTVRAKCNFLFKTGEFTSIKNDIVVAGNINELEGQLNFIDQVDHYNRIRQKSPLKPELALKNVGSNTKLLLSGREKTFSQFIFYRLFYGNDKPTILCEGKTDNIYIKSAISELVISYPKLARVAKNEYKLLVRFVEYSKRTRFLLELYGGASYLKDFIVNYRTQFKKYKAAKPQHPVIIIIDNDAGPKDAGIFGYISNQKEAKIYPQTLDLKKDLRSANFVHLFHNLYIVMTPKGIKDCDTDIEYFFTDKDRLREHSKKCFNTVAKRNADKDLSKGAFATHIIKAQKKNINFNGLKPLLDRIMMAIDHYDINK

SEQ ID NO: 1104 - protein, 619 aa, Pseudoalteromonas espejiana
  source 1..619: note = Related to NZ_CP011029.1
MLSRLKNLKGAATKPQLASILNVSPVFLTKCLYIIKPENQYHQFEVNKKSGGKRVITAPSEDLKGLQSKLSELLLDCIDEINTLKYPDSQLVSPKKNISKKNDPSAEVLKVKISNAAIKQPYLSHGFTRQRSILTNAVMHLGQKSVLNIDLENFFDSFNFGRVRGFFIKNKNFELSPSIATVIAQIACYKDTLPQGSPCSPVITNLITHHLDIRLASLAKRYKCTYTRYADDITFSTRLSVFPPEIMCDSLNGFAPGKRLKRAIKHAGFSINERKTRIQYKNSRQDVTGLIVNKKPNVKSEYWRTARAKCNSLFNTGHFITNKNGRSVEGNINELEGQLNFIDQVDHYNRMRQSPPLSPEYSLKNYGKRTNGLLSGRETVFSKFLFYRLFYANEKPTILCEGKTDNVYLKSAINQLHNQYKQLVNIGDEYKLLVRFIEYSKRTRFLLELYGGADYLRGFIDTYAVKSKIYNAPKPENPVIIFIDNDDGPKQIETLLQSRNFNKKTTLVPNTLDPKKDVRKAEFIHVIDNLYVVFTPRGDQDEDTDIEYFFGDDARLRKHTNGMFFNTVQNRDPLKDLSKEVFATQIIKAQKKHINFNGLIPLLDRIVNVINHYDSVKGL

SEQ ID NO: 1105 - protein, 380 aa, Pseudoalteromonas prydzensis
  source 1..380: note = Related to NZ_RRZA01000072.1
MSRLKYLKVAKTKPQLADVLGVSPVFLTKCLYVVKPENQYHQFEIDKKSGGKRKITAPKTELKSLQSKLSELLMDCIDEINKSKFPNSQQVSPKKNIQQKKDPAAEVLKIKISNSAIRQPSLSHGFTRQRSILTNAVMHLGQKNVLNIDLENFFDSFNFGRVRGFFIKNKNFELSPSIATVIAQIACYKDTLPQGSPCSPVITNLITHHLDIRLASLANRYKCTYTRYADDITFSTRLSIFPPEIMRDTLNGFAPGKRLKRAIKHAGFSINERKTRIQYKNSRQDVTGLIVNKTLGVKSEYWRTARAKCNSLFNTGSFTTERKGELVEGSINELEGQLNFIDQIDHYNRIRQKAPLQPEYSIKKVGKETRRLHSGREKNF

SEQ ID NO: 1106 - protein, 629 aa, Marinomonas spartinae
  source 1..629: note = Related to JAEMUI010000038.1
MSKLNYLRSISSKPEFAKALNISPKFLTHTLYVVRPENQYHTFNIDKKSGGQRTINAPSDELKSLQAALSNLLLDCVGEINASKYPKSQLASPKLKNNKIDSDYSAEVLKIKISNSAIRQPSLSHGFTKDRSIITNAMMHIGKKNILNIDLENFFDCFNFGRVRGFFLKNKNFQFNPEIATVIAQIACYENKLPQGSPCSPIITNLIAHSLDIQLASLARKYKCTYTRYADDITFSTNLSTFPTEIMAEEKGIYTSGKKLKNEIERAGFSINDKKTRIQYKNSRQDVTGLVVNKKPNVKNEYWRTVRAKCNSLFKTGRFMTTKNGVEVEGNINELEGQLNFIDQIDHYNRMRQKPPLVSEYAIKKIGINDHSTKELLTGREKTFSQFLYYKSFYGNDKPTILCEGKTDNIYLKSAISELAINYPNLASFTSEISKKGIPYKKYNLLVNFFEYSRRTRFFLELFGGVGDLKKIILNFEKSQRKYQCSNPKNPVIILLDNDTGPKDIVALLQRKPLVNKITLVPQGLDPKTDVRKAQFIHVTRNLYVIFTPLDPSGNATDIEYFFDDKTRLMKYSGKCFNTVKNRNGTTDLSKDNFATHIVKAQKKGVDFNGLKPLLDSIVSVIKHYDTIK

SEQ ID NO: 1107 - protein, 621 aa, Photobacterium damselae
  source 1..621: note = Related to NZ_UATK01000001.1
MTKIELLRKATHKRELAALLGCTTSALTYVLYILKVDTQYKQFEIDKRNGGKRIITAPTDRLKRLQASLSNLLLDCIDDINRIKYPNSQVNSPKLINKKFKDASADILKVKISNAKTKQPSLSHGFVRERSIITNAMMHLDKKNVLNIDLHNFFDSFNFGRVRGFFISNENFKLDPNIATVIAQIACYDNKLPQGSPCSPVISNLITHSLDIRLASLAKKNSCTYSRYADDITFSTRKSVFPTKIMRQEDGEYIPSKKLRNEIKKSGFTINNKKTRIQYKDSRQDVTGLIVNKKPNVKKEYWRTVKSQCHSLFQTGAFTKKVGDDIVEGNINELEGQLNFIDQVDLYNRLRQKKPLNPVYKHATHGYNTSILLSGRERTFSRFLYFTLFYGNTKPTILCEGKTDNVYLKSAINKLAATYPALAQAKTPNKEYELLIRFLEYSKRTRFLLELYGRTSYLNYFIGKFDKNFKFYKAPTPQHPVIIILDNDSGFVGKKDSGIAGKLKKIDSATAYPTTLKKDDFRNADFIHVIHNLYIVLTPLGTAKETAIEDLFDDETRQVKVSGKSFNHKDDRDNAKEYGKEVFAQKVIKAHKSSINFDGLKPLLDRVVQAIEHYDTISAAK

SEQ ID NO: 1108 - protein, 614 aa, Pseudoalteromonas sp.
  source 1..614: note = Related to NZ_CP012737.1
MTKLEALKKITTKKELAALLGVKTSFLTYTLYFIKPHTQYTQFKIPKKNGGERIISSPNGKLKTLQKKLSILFLDSIDEINKAKFPEAEAFKNINDKIMYSPILKVKIGSAKIKQQPSLSHGFVRNRSIITNAMMHLGQKNVLNIDLSNFFDSFNFGRVRGFFIKNDHFKLDPAIATVIAQIACYDNKLPQGSPCSPVITNLITHSLDIRLASLAKKNSCTYSRYADDITFSTRKKSFPSNIMSELSGEFTPSKKLSFEIKRAGFSINNVKTRIQYKDSRQDVTGLIVNKKPNTKKEYWRTVRSQCNKLFKSGKFTKTVNDKVEDGNINELEGQLNFIDQVDSYNRLRQAVPINHNYATSKHGHNTSKLLSGRERTFSRFLYYRLFYGNDKPTIICEGKTDNVYLKSAINRLMTGYPTLANKTLNSKSNKTEYKLLIKILKYTKRTRFLLQLYGGTSYLNYFISKFDKQYEYYDAPKPQHPVIILLDNDSGFDCIEKELKKVQPAIILPPPLKKHDFRNADFIHVFHNLYIVLTPMNNQPKTMIEDLFDVATRQIQVDNKTFNPEKDFDKTKEYSKQIFAQKVVSTQKSTINFDGFKPFLDRIVRVIEHYDTIK

SEQ ID NO: 1109 - protein, 621 aa, Moritella marina
  source 1..621: note = Related to CP044399.1
MNKLKSLQKVSTKSELASLLGVKASFLTHTLYVVKPSSQYTNFKIPKKSGGERSINAPTKKLKTLQSCLSKLLLDCIDEINTIKYPDLASYEVTRNKILKVKIPNSKIKQPSLAHGFVRNRSIITNAMMHVNQKNILNIDLNNFFDSFNFGRVRAFFIKNKNFKLPENIATTIAQIACNNNTLPQGSPCSPVISNLITHSLDIKLAYLAHEYSCRYSRYADDITFSTRKKAFPTKIMSYENNCYVAGKKLQGAIKQAGFSINDKKTRIQYKDSRQDVTGLIVNKKPNVKNEYWRRVRAQCHSLFTTGQFTKELKGEIVAGNINELEGQLNFIDQVDHYNRVRQSPPLDPKYHLKRDELLKTNQAKERQYLFTGRERTFSRFLYYRSFYANNKPTILCEGKTDNIYLKSAISERVKRHPTLASQKKGAVPYELLINFFNYSPRTRFLLELAGGTDYLKDFVINFNKHFNSFKAPKPKHPVIIVLDNDKGPNGLLHYLSNVKGASIIPNTLKLKTDYRKAEYIHVFHNLYVVLTPLSNKGKSQKIEDQYTDIESLFKKADLLRTYQKKCFNIASKRNEDIDLSKNAFANQIVKGQKKQVNFSGFNKLLNRIEEVIKHYDNMIF

SEQ ID NO: 1110 - protein, 575 aa, Halomonas sp.
  source 1..575: note = Related to RRZC01000044.1
MPKKNGGKREINAPIEKLKSLQSSLSNLLLDCIDEINKVKFPRSEVNKNRDKSSKANNHEILKIKVPNADIKQQSLSHGFVRNRSIITNAMMHLGQKNVLNIDLKDFFDSFNFGRVRGFFIKNKNFKLDSHIATVIAQIACYDNKLPQGGPCSPVITNLITHALDIRLAALAEKYSCIYTRYADDLTFSTREKVFPEKIARLDNGKYAAGKKLKSEISRSGFSINDKKTRVQFKDSRQDVTGLVVNRKPNVKKEYWRTAKSQCHSLFRTGSFTKIVSDVVVEGNINELEGQLNFIDQVDSYNRLRQKAPLNYVYQFAKHGHNTLPLLSDRERTFSRFLYYRLFYGNAKPTILCEGKTDNVYLKTAIKRLVSAYPKLAKTRVNSETKKPSYDLLVRFLEYSKRTRFLLQLFGGTSYLSYFISKFEAQYAFYKAPKPQHPVLIVLDNDSGFYKEIENKLKKIETPTVYPVSLKKHDFRKADFIHVMHNLYIVLTPLSATGKDTMIEDLFDDTARGVVVSGKTFNPKDGRDNAKEYGKEVFAKKVIQDQRNKINFDGLKPLLDRMVKAIEHYDSIKNS

SEQ ID NO: 1111 - protein, 320 aa, Halomonas sp.
  source 1..320: note = Related to JAFWFN010000035.1
MNKLNKLKAVTTKQELAELLGVKASFLTYVLYILRPENQYVQFSIPKKNGGKRKINAPIEKLKSLQSSLSNLLFDCVDEINKVKFPFSEINKDRDRNSKTNNYEILKVKVPNADVKQQSLSHGFVRNRSIITNAMMHLGQKNVLNIDLKDFFGSFNFGRVRGFFIKNKNFKLDSHIATVIAQIACYDNKLPQGGPCSPVITNLITHSLDIRLAALAERYSCIYTRYADDLTFSTREKFFPEKIARLDNGKYVAGKKLKSEISRSGFSINDKKTRVQFKDSRQDVTGLVVNRKPNVKKEYWRTAKSQCHSLFRTGSFTKVV

SEQ ID NO: 1112 - protein, 616 aa, Pseudomonas syringae
  source 1..616: note = Related to GL385078.1
MKKIEALQAVRTKPELARLLGVKASMLTYVLYVLRPENQYSSFTIPKKSGGTRTINAPHDRLRLIQRALSDLLQDCIEDINDSKPKSAVKGKFIAAKKDDNPDYRRHKFFEDVFTPTLSHGFVRKRSIITNAMMHIDRKNVLNIDLKDFFDSFNFGRVRGFFIANNHFGLSPEIATVIAQIACYNHKLPQGSPCSPVITNLIGHILDIKLALLAREHSCTYTRYADDITFSTRSKHFPDALMREYKGIYVPGLELENRIRQAGFRVNSKKTRIQYQDSRQIVTGLVVNEKPNIRSEYWRTAKSQCHLLFKTGAFTEGDKEKSLPGNIEQLEGRLNFIDQLDFYNRLRQKPPLNSEYVLEKHGVDTRKLLGGRERTFGRFLYYRSFYASSSPTILCEGKTDNIYVKAAINRLAADYPSLARVKASESEYKLLVSIFKYTPRTRFLLGLYGGASYLKEFITRFEEAYSYYKAPDPENPVIIIMDNDGGFDGVDSLLKGKKLHATPFPKGAGKLEYRGADFIHVTKNLYIVLTPMSSSGGSSEIEDLFTPSTRSEPFDGKHLCLEKDIDRATQYGKDTFANKVILPKKNSIDFSGFKVLLDRVVMCIEHYKSAKLALSK

SEQ ID NO: 1113 - protein, 615 aa, Pseudomonas amygdali
  source 1..615: note = Related to CP089282.1
MKKIDALRTVTTKPELARLLGIKASMLTYVLYVLRPETQYSIFEIPKKSGGTRTISAPHDKLKSIQRALADLLQDCIEDINDSKPKSAVKSKFINSKKNDNPDYRKSKFFEDVFTPTISHGFVRKRSIITNAMMHLNRKNVLNIDLKDFFDSFNFGRVRGFFIANDHFGLDEHIATVIAQIACYEHKLPQGSPCSPVITNLIGHILDIKLALLAREYRCTYTRYADDITFSTRSKEFPVELTREYKGTYIIGSVLENRIRQAGFRINPRKTRIQYKDSRQTVTGLVVNEKPNVRSEYWRTVKSQCHMLFKSGAFTEDGPEEPVPGNIDQLEGRLNFIDQLDFYNRLRQKPPLTPDYMLEKHGVNTHKLLSGRERTFSRFLYYRAFYGNARPTILCEGKTDNIYVKAAISRLAADYPRLAKIKTATSDYKLLVSIFKYTSRTRFLMGLYGGAAYLTDFVARFENTHRFYKAPRPTNPVIIIMDNDGGFDGVEGIFKGKKSNATPVPKGTGRTEYRGADFIHVVENLYVVLTPLGPSGSKSEIEDLFTSSTREELVDKKTLCLDKEIDRSSQYGKDTFANKVILPKKASIDFSGFKILLDRIVLCMEHYESSVLAST

SEQ ID NO: 1114 - protein, 479 aa, Pseudomonas amygdali
  source 1..479: note = Related to GL384649.1
MMHLNRKNVLNVDLKNFFDSFNFGRVRGFFITNNHFRLAPEIATVIAQIACYDNKLPQGSPASPVITNLITHILDIRLSILAREQSCTYTRYADDITFSTREKVFPEQIMKEIGDTYSPGHLLSGEIRRAGFSLNAQKTRIQYKDSRQEVTGLVVNKKPNVKKEYWRTVKSQCHLLFKIGNFVEIINDEPQPGNINQLEGRLNFIDQVDYYNRKRQKPHLNPEYALSKHGTNTHELLSGRERTFSRFLYYRSFYGNDKPAIICEGKTDNIYLKSAINRLAPVYPRLATAKSTTSDYTLLVDIFNYSARTRFLLELYGGTSYLKDFIVRFEKHYSFYKAPRPQNPVIIILDNDKGFDEIDKLLKSEKSKSTAYPEIAGQNKYRGADFIHVIHNLYVVLTPLAATGGQTAVEDLFPQVTRDEIVDGKSFSTDKEIDRTTQYGKDVFANKVIAAKKGSIDFSGFSVLLNRIVSCIEHYDSIK

SEQ ID NO: 1115 - protein, 613 aa, Pseudomonas viridiflava
  source 1..613: note = Related to NZ_UTBG01000001.1
MRKIDALKAVRTKPELASLLGVKASTLTYVLYVLKTSTQYKSFTIPKKTGGTRTIHAPHDRLKAIQSSLSDLLQDCIEEINSAKPKKAAKTKFVNTTKDKNPDYKKTKFLEDTFTPTLSHGFVRKRSIITNAMMHLNRKNVLNVDLKNFFDSFNFGRVRGFFITNNHFRLCEETATVIAQIACYENKLPQGSPCSPVITNLITHILDIRLAALARDNACTYTRYADDITFSTREKIFPEGIMRENDGEYSTGHLLNGEIKRAGFSLNIQKTRIQYSDSRQDVTGLIVNKKPNVKSEYWRTVKSQCHLLFKSGSFIEIIDGEPKRGNINQLEGRLNFIDQVDYYNRLRQKPPLNPEYEPSKHGHNTRELLSGRERTFSRFLYYRSFYGNEKATIICEGKTDNIYLKSAINRLAAAYPRLAKAKSASSAYQLLISLFNYSARTRFLLELYGGAPFLKEFISNFEENYELYKAPAPSNPVIIVFDNDAGFDIVDSLLRGKKIQAVAFPASSGRNEYRGADFIHVTKNLYIVLTPLTAAGTQTDIESLFTKVTRDEIFEGKTFSSAKDFDRALHFGKDTFANKIIAAKKGSIDFSGFNILLNRIVQCINHYDSIKQP

SEQ ID NO: 1116 - protein, 612 aa, Pseudomonas sp.
  source 1..612: note = Related to WIBD01000035.1
MKNIDALRAARTKPELALLLGVKASFLTYVLYVLKPDTLYRSFTLKKKSGGTRTIHAPYESLKSIQSSLSNLLQDCIEEINKAKPAKAIKTKFIITKKDKNSDHKKKKRPDHTFTPTLSHGFVRKRSIITNAMMHLNRKNVLNVDLKDFFDSFNFGRVRGFFITNRNFQLHPDIATVIAQIACYNNTLPQGSPCSPVITNLITHILDIKLAALARTYSCTYSRYVDDITFSTRKKIFPEQIMKDLEGSYTAGYLLNGEIQRAGFNLNPKKTRIRNQDSRQEVTGLVVNKKPNVNSKYWRTVKSQCHLLFKSGTFVDIIDDKPAPGNINQLEGRLNFIDQVDYYNRLRDKAPLNPEYMPHKPSNNTRRLLSGRELTFSRFLYFRSFYANEKVTIICEGKTDNIYLKAAIKKLSPAYPKLAKPKSATSAYQLLVSIFNYSARTRFLMELYGGTPYLKDFIAEFKENHKFYKAPKPANPVIIILDNDKGFNIVESLLRGDKVQATPYPRTPGQFEFRGANFIHVTENLYLVLTPLAPPPDRQTAIEDLFTQDTRDEQVDGKILSLEKEFDKATHYGKDAFANKVVLVKKSSIDFSGFNVILNRIMQCIEHYDSIK

SEQ ID NO: 1117 - protein, 611 aa, Pseudomonas chlororaphis
  source 1..611: note = Related to NZ_LHVB01000014.1
MKKIDALRAVRTKPELALLLGIKASSLTYLLYVLKPSTQYSSFEIPKKSGGTRTIHSPSERLKSLQSSLSILLQDCIEEINKDKPARANKTKFITTKKDKASDSKKSKFIEYAFMSTLAHGFVRKRSIITNAMMHLNRKNVLNVDIKDFFDSFNFGRVRGFFITNNHFRLDPNIATVIAQIACYDNKLPQGSPCSPVITNLITHILDIRLAALAQANSCTYSRYADDITFSTREKLFPTQLMSEEGGTYIAGNELKREIQRAGFELNAKKTRIQYQSSRQDVTGLVVNKKPNVKSEYWRTVKSQCHLLFKSGKFTAKKGDEILEGNILELEGRLNFIDQVDFYNRLRQKPHLNPEYALSKHGLNTRQLLSGRERTFSRFLYYRSFYANDKPTILCEGKTDNIYMKSAISSLATDYPKLARPKSATSPYQLLISLFKYNERTRFLLQLYGGTSYLKDFIETFAMHYKFYKAPKPNNPVIIILDNDGGFDSINALLNGDKTRATCYPNTPGKNEYRDAEFIHVLENLYIVLTPRGVPDKHTAIEELFTQKVRDEVVSGKTFNHTNKIDITKEYGKEIFAKKVILAKKGSVDFSGFRVLLNRVVQCIEHYDSIK

SEQ ID NO: 1118 - protein, 609 aa, Pseudomonas mangiferae
  source 1..609: note = Related to NZ_VJOY01000005.1
MKKIDALRAVRTKPQLALLLGVKASALTYLLYVLKPATQYSSFDIPKKSGGVRTINAPSERLKLVQSSLSELLQDCIEEINKAKPPRAPKGRFAKTEKEAGGKRSKHVEYVFTSTLSHGFVRKRSIITNALLHLNKKNVLNVDIKDFFDSFNFGRVRGFFISNNNFKLDPGIAKVIAQIACYDNKLPQGSPCSPVITNLITHGLDIRLAALAKKSSCTYSRYADDITFSTRERLFPSNIVKEIAGIYSYGDDLKAEFGRADFKLNEKKTRIQYHDSRQDVTGLVVNKKPNVKSEYWRLVKSQCHLLFKSGRFLVKEDGKVKDGNVLELEGRLNFIDQVDYYNRLRQKKPLNPEYALENHKLNTRKLLSGRERTFSRFLYYRYFYANEKPLVLCEGKTDNLYLKSAVNRLVAAYPRLAKAKTVNAPYHLLISFFKYSERTRFLLQLYGGASYLKDFIESYEKNYSFYKAPKPSNPVILVFDNDTGFNSVEALLKGSKMKEVVAHPVGSKKSSFRNSEFIHVFYNLYVVLTPLGAAKSTAIEDLFTRSTLDEVVSGKKFNPTKEIDVDKEYGKEVFAKKVVLAKKGSIDFSGFCPLLDRIVKVLEHYESTK

SEQ ID NO: 1119 - protein, 609 aa, Pseudomonas stutzeri
  source 1..609: note = Related to NZ_JYHV01000007.1
MRKVDALRAVRTKPELALLLGVKASALTYLLYVLKPSTQYTSFNIAKKSGGIRKINSPSERLKAVQSSLSTLLQDCIDEINKAKPPRAPKGMFAKTDRLSDGKRAKRVEYVYTSTLSHGFVRKRSIITNALMHLNKNSVLNIDIKDFFESFNFGRVRGFFIKNNNFRLRPDVATVIAQIACYDNKLPQGSPCSPVITNLITHSLDIRLAALARKNSCTYSRYADDITFSTREKVFPSNLVRWDSEGYVYGDDLESEFARAGLKLNKKKTRIQYKDSRQDVTGLVVNRKPNVKCEYWRTVKSQCHLLFRTGKFAIKDGDEIKDGSIFELEGRLNFIDQVDYYNRLRQKIPLNPEYALANHKLNTRGLLSGRERTFSRFLYYRAFYGNDKPTILCEGKTDNVYIRSAINRLAAEYPKLARAKTSTKPYELLVSLFKYNERTRFLLQLYGGSSYLKDFIETYEKHYDFYMAPKPANPVIVILDNDTGFNSIEVLLKSKMTNAAVYPTGLGVAGYRNSDFIHVLHNLYLVLTPLGTAKSTAIEDLFTRSTLKEIVSGKTFNPSNKMDPAKEYGKEIFAKKVVLAKKGNIDFVGFRPILDRLVQCIDHYESIKG

SEQ ID NO: 1120 - protein, 609 aa, Pseudomonas syringae
  source 1..609: note = Related to NZ_AVEF02000221.1
MRKIDALRAVRTKPELALLLGVKASALTYLLYVLKPSTQYSSFEIPKKTGGTRTIHSPSERLKVVQSSLSMLLQDCIEDINKAKPPRAPKGKFAKTEKLPAIKRTKLVDYVFTSTLSHGFVRKRSIITNALMHLNKKKVLNVDIKNFFDSFNFGRVRGFFIKNNNFRLDPNIATVIAQIACYDNKLPQGSPCSPVITNLITHGLDIKLAALAKKNSCTYSRYADDITFSTREKVFPLNVMKEEAEGYVCGDGLKSEIGRAGFTLNNKKTRIQYKDSRQDVTGLVVNKKPNVKCEYWRTVKSQCHLLFKSGGFVTKNGDEIEEGNIFELEGRLNFIDQVDYYNRLRQKAPLNPEYDLAKHGLNTRNVLSGRERTFSRFLYYRSFYGNDKPTILCEGKTDNIYIKSAISRLAAVYPRLAKVKALTSAYQLLVSLFNYTERTRFLLQLYGGTSYLKDFIETYEQHYNFYKAPKPINPVIIILDNDTGFNSIETLLKSNKKNQAVVYPIGVRGAGCRNADFIHVVHNLYIVLTPLGKEKSTAIEDLFTRPTLDEIVSGKKFNPSNKMDITKEYGKEIFAKKIVLVKKGSIDFSGFRVLLSRIVQCIEHYDSVK

SEQ ID NO: 1121 - protein, 607 aa, Pseudomonas sp.
  source 1..607: note = Related to QLTL01000007.1
MRKIDALRAVRTKPELALLLGIKASALTYLLYVLKPSTQYARFEIPKKSGGTRTIFAPSERLKAVQSSLSILLQDCIEEINKAKPPRAPKGRFAKNEGKTRGRRAKRVDYVFTSTLSHGFVRKRSIITNALMHLGKKNVLNIDINNFFDSFNFGRVRGFFITNNNFRLDPNVATVLAQIACYDNKLPQGSPCSPVITNLIAHSLDIRLAALAKKNSCTYSRYADDITFSTRKNVFPIAIAKDVSGSYECGLDIEREIIRAGFKLNAKKTRVQYKDSRQDVTGLVVNEKPNVKSEYWRTVKSQCHSLFRTGEFVINNGAVSRRGTLFELEGRLNFIDQVDYYNRLRQKLPLNREYALADHKLNTRELLSGRERTFSRFLYYRHFYANDKPVIICEGQTDNIYIRSAIHSLAAAYPRLANVKTPVAPYKLLISLFGYSERTKFLLQLYGGANYLKSFIEQYERHYGFYQAPKPKNPVIIMFDNDSGFGTTENFLKGKSSAVVYPVASRGAGYRHAEFIHVIHNLYIVLTPLGGAKSTAIEDLFLKSTLDEKVSGKKFNPDKNIDTATEYGKEVFAKKVILAKKGSIDFSGFSTILNRTVQCIEHYDSIK

SEQ ID NO: 1122 - protein, 608 aa, Pseudomonas putida
  source 1..608: note = Related to NZ_CP018743.1
MRKIDALRAVRTKPELALLLGIKASALTYLLYKLKPSTQYHTFEIPKKSGGTRTIHSPSERLKALQSSLSNLLQDCIEDINKEKPARTPKGRFAKLYKNLQGKRGKHINYVYISTLSHGFVRDRSIITNALMHFRKKNVLNIDIKDFFDSFNFGRVRGFFISNKNFRLNDEIATVIAQIACYDNKLPQGSPCSPVITNLIAHSLDVRLAALAKKYSCTYSRYADDLTISTREKLFPPNIMKEDAGVYTCGRDLVSEISRAGFSLNHKKTRIQYKDHRQDVTGLVVNKKPNVKCEYWRTVRSQCHLLFRTGKFLTKVGDEVRDGSIFELEGRLNFIDQVDYYNRLRQKPALNPEYALSKHGVNTRELLSGRETTFSRFLYYRHFYANEKPVILCEGKTDNVYIKSAINVLAAAYPRLAKAKTANSPYELLVSMFNYTERTRFLLQLYGGASYLKDFIETFKKHYGFYKAPKPSNPVIILLDNDTGFDSICSLLKGKSFGAEAYPPGLAMNDCRDAEFIHVGLNLYVVLTPRVAAKHSAIEDMFTKATLGEVVGGKTFNPSNKMDSSKEYGKEIFAKKVVLAKKGSINFSGFNVILKRIVQCIEHYDKIK

SEQ ID NO: 1123 - protein, 403 aa, Pseudomonas sp.
  source 1..403: note = Related to NZ_JZRI01000162.1
MRKIDALRAVRTKPELARLLGVRASELTYVLYVLKPPTQYISFKIPKKSGGDRTIHSPSDRLKAIQSSLSDLLLDCIDDINKSKPGKPHLDRFVKGKKEKLLDSKKKKPLEYIFSPTLSHGFVRNRSIITNAMMHLHKKNVLNVDLQNFFDSFNFGRVRGFFISNRHFQLDANVATVIAQIACYDNKLPQGSPSSPVITNLITHSLDISLAKLAFEHSCTYSRYADDITFSTREKIFPPQIMSEESGSYTAGSQLTHEITKAGFSLNSKKNRIQYNSSRQDVTGLVVNKKPNVKCEYWRTVRSQCHLLFKSGSFVTKINDEEVVGNINKLEGRLNFIDQVDYYNRLRQKPALNPEYTLSKHAINTRELLSGRETTFSRFLYYRAFYANEKPTILCEGCLLYTS

SEQ ID NO: 1124 - protein, 614 aa, Aeromonas veronii
  source 1..614: note = Related to JAGDEY010000009.1
MKKLDALRAAKTKPELAHLLGVKPSSLTFLLYKLKPSTQYSSFDIPKKNGGSRTIHAPSKKLKKLQSSLSNYLQDCIDEINSAKPAFSNKKKFIKIDKDRVLDGKTKNFTEYKFISTLSHGFVRERSIITNALMHLNKRNVLNIDLKDFFESFNFGRVRGFFISNRNFCLDPDIATVIAQIACYDNKLPQGSPCSPVITNLISHILDIQLAALAKANSCVYSRYADDITFSTRERVFPSDIMSIEAGEYIVGRKLRGIIKRAGFSLNEKKTRIQYKDSRQDVTGLVVNKKPNVKSEYWRTVKSQCHSLFKNGTFTVKKGCDIVEGSISELEGRLNFIDQIDLYNRRRQQPKINPEIALCEPGINTRILLNGREKTFSRFLYYCYFYANKKPMIICEGKTDNIYIKLAMSKLATDYPLLAKPKSSNSAYEPLVSLFKYSKRTRFLLQLYGGTSYLKNFIETYKKNFAFYKAPKPCFPIIIILDNDAGFKDINSWLDKSKYVTPYNINIKASENNKFRYAEFIHVVENLYIVLTPRENPDKNSAIEDLFNPEILKEEVSGKTFNPSNSKIDITKEYGKEIFAKKVIFAKRNSIDFSRFKVLLDRIVKCLEHYDSNK

SEQ ID NO: 1125 - protein, 500 aa, Aeromonas allosaccharophila
  source 1..500: note = Related to NZ_UETN01000024.1
MRKIDALQKVKTKPELAELLGIKASSLTYLLYVLKPSTQYSYFEIPKKNGGRRTIHAPSKRLKKLQSSLSKFLQDCIEEINNERPASTHKSRFVKINKDRVLDGKKTKFIEHKFTSTLSHGFVRDRSIITNAMMHLNKKNVLNVDIDNFFDRFNFGRVRGFFIKNRHFSLDPNIATVIAQIACFDNKLPQGSPCSPVITNLITHILDIKLAALANDNSCVYTRYADDITFSTRERVFPKEIMRLEDGVYTPSEKFERVIKKAGFKLNEKKTRIQYKDSRQDVTGLVVNKKPSVKSEYWRTVKSQCHSLFKSGHFTVKKHDEIIEGSISELEGRLNFIDQIDLYNRLRQKPCIPPEISIQQHGINTRELLSGREKTFSRFLYYRYFYAHDKPMILCEGKTDNIYIKLAMNKLAVDYPKLAKPKTATSAYEPLVSLFKYNKRTRFLLQLYGGTNYLKEFITTYKKHYFFIKHQSLVIQLLLSWITTKDSTLLTPCLKEIKSM

SEQ ID NO: 1126 - protein, 586 aa, Pseudomonas sp.
  source 1..586: note = Related to JACAQA010000043.1
MRKVDALRAVRTKSELALLLGFKPAAFTYLLYKLKPSTQYQSFTIPKKSGGTRTIYAPSERLKALQTSLSLLLQDCSEEIEKAWVGGSDSKSTLSHGFVRKRSIITNAMMHLHKKNILNVDLKDFFDSFNFGRVRGFFITNREFCLNPDIATAIAQIACHDNKLPQGSPCSPVITNLITNILDIRLAALARSHSCTYSRYADDLTFSTREKVFPSQIMKEDVGSYTPGKKLKSEIKRAGFELNHKKTRIQYMDSRQDVTGLIVNKKPNTRYEYWRTVRSQCHSLFKSGSFTKKVDGKFIEGNIFELQGQLNFIDQIDYFNRLRQHPPLNPEYALSNHLINTRKLLTGREVVFSRFLYYRHFYGNETATILCEGKTDNVYLKSALNKLALKYPRLAIPKSAANPYKLLVSFMNYTERTRFLLQLYGGTSYLHVFLNSFEEHYKFYNAPKPKNPVVVVLDNDSGFNSIDGLLKGKLSGTPYPDTLSKSEFRKADFIHVTKNLYVVLNPLGPKGEFSAIESLFSPATRNIKISGKSFNPENNMDKNTEFGKEIFASKVVVANKDTIDFSGFDVLLSRITMCLEHYDLIR

SEQ ID NO: 1127 - protein, 588 aa, Pseudomonas sp.
  source 1..588: note = Related to POEK01000001.1
MRKINALRAAKTKPELALLLGVKATALTYVLYVLKPDTQYSTFTIPKKSGGLRTICSPSDRLKTIQSALSELLQDCLDELTAVKVKENHDYKSNLSHGFLRNKSIITNAIVHTGQRNVLNLDLKDFFDKFNFGRVRGFFISNKDFQLNEHIATVIAQIACYDNRLPQGSPCSPVITNLITHILDIKLAALAESYSCIYSRYADDITFSTRERLFPPKLMKEIAGEYIPGKKLRSEIRRAGFEINAPKTRIQFQDSRQDVTGLVVNKKPNVKSEYWRTVKSQCHSLFRTGSFKKKVDGTFADGNIYELEGQLNFIDQVDYSNRLRQKPPLDTEYEQRKSNIKTRELLSGRETTFSRFLYYKFFYANEKPTIICEGKTDNIYLKSAISSLAANYPKLATPKSANNPYELLVKFFNYNNRTRFLLQLHGGTNYLHTFINDFESHYDFYKAPRPKQPIIIILDNDSGFNGIDGLLKGKASAKRYPVAKGKKKDFRNANFIHVAHNLYIVLTPPTATGGHTAIESLFTAATLNEKVQKKTFNPESKINTTTEYGKEIFAKKVILANKKTINFSGFDVILKRVIQCMKHYETAK

SEQ ID NO: 1128 - protein, 589 aa, Pseudomonas mediterranea
  source 1..589: note = Related to NZ_LT629790.1
MKKISALRLAKTKPDLALLMGIDASFLTNILYRLKPTTQYTSFTIPKKSGGVRTIYAPSDELKSIQSALSNLLQDCIQEINTSKGPKFKSTLSHGFVRDRSILTNAIMHLNKRNVLNIDLKDFFDQFNFGRVRGYFISNKIFQLDPAVATVIAQIACYDNKLPQGSPCSPVITNLITHSLDIRLASLARDNSCTYTRYADDITISTRKKDFPSNLTSDRASGYVIGSRLAAEIKRAGFSVNSTKTRIQYEDSRQDVTGLIVNKKLGTKSEYWRTVKSQCHALFQTGKFLENSSNPPQAGSIFVLEGKLSFIDQVDFFNRKRSKPLLNPEYELSKHGSKTRKLLNGRERTFSRFLFYKHFYGNTKPTIVCEGKTDNVYLKAAINKRAAAFPSLAKAKSGNAPYELLVHFINYTNRTRFLLELYGGTPYLKEFMLDYDEQFKFYKAPMPTHPVIIILDNDDGFGKIEGVLKGNKYSPTVFPVTLPVTDFRNAEFIHVVHNLYIVLTPLKGKGNKSSIEDLFTKKTRATKLGGKVFNKQNKTDSDTEYGKEYFASKVVAPNKHKINFSGFNPLLGRIDQCIQHFATVKLVKP

SEQ ID NO: 1129 - protein, 592 aa, Pseudomonas monteilii
  source 1..592: note = Related to JAJSQA010000022.1
MKKISALRLAKTKPDLALLMGIDASFLTNILYRLKPTTQYTSFTIPKKSSGVRTIYAPSDELKSIQSALSTLLQDCIQEINTSKGPKFKSTLFHGFVRDRSILTNAIMHLNQRNVLNIDLKDFFDQFNFGRVRGYFISNKIFQLDPAIATVIAQIACYDNKLPQGSPCSPVITNLITHSLDIRLASLARDNSCTYTRYADDITISTRKKTFPNNLMSGQTSGYIIGSRLAEEIKRAGFSVNSAKTRIQYKDSRQDVTGLVVNKKPGTKSEYWRTVKSQCHALFQTGKFLENSSNPPQAGNIFVLEGKLSFIDQIDFFNRKRNKALLNPEYELSKHGSKTRKLLNGRERTFSKFLFYKHFYGNTKPTILCEGKTDNVYLKAAINNRATAFPSLAKAKSGNAPYELLVNFINYTNRTRFLLELYGGTPYLKEFILDYDEHFKFYKAPMPTHPVIIILDNDDGFGKIEGALKGKRYNPTIFPITLPPTDFRNAEFIHIVHNLYIVLTPLKGKDTKSSIEDLFTKKLRATKLGGKVFNKENKTDSDTEYGKEYFASKVVTPNKHKINFSGFNPLLGRINQCIQHFATLKPVKPVKP

SEQ ID NO: 1130 - protein, 590 aa, Pseudomonas savastanoi
  source 1..590: note = Related to NZ_CP076652.1
MKMISALRVAKTKPDLALLMGIDASFLTNILYRLKPATQYTSFTIPKKSGGVRTIYAPSDELKSIQRALSNLLQNCMQEINTSKGTKFNPTLSHGFVRNRSILTNAIMHLNKKNVLNIDLNNFFDQFNFGRVRGYFISNKNFQLDPAVATVIAQIACYDNKLPQGSPCSPVITNLITHSLDIRLASLAKDNSCTYTRYADDITISTRREAFPNNLTSDGASGYIIESRLAAEIKRAGFSINPAKTRIQYKDSRQDVTGLVVNKKPATKSEYWRTVRSQCHALFQTGKFLENNSNPPQTGNIFVLEGKLNFIDQIDLFNRKRSKPLLNPEYEPSKNKSKTRKLLNGRERTFSRFLFYKYFYGNTKPTIICEGKTDNVYLKAAINKRASAFPSLAKPKSGNDPYELLVRFINYTSRTRFLLELYGGTPYLKEFILDYDEYFNFYRAPVPTHPVIIILDNDDGFGKIEGALKGKRYNPTIFPSTLPANDFRNAEFIYIAHNLYIVLTPRKGKTEKSSIEELFPIKIRATKLGGKVFNKQNKTDSETEYGKEYFASKVVTPNKDKINFSGFNPLLERINKCIQHFTTVKLVKPL

SEQ ID NO: 1131 - protein, 607 aa, Pseudomonas botevensis
  source 1..607: note = Related to NZ_JAHTKI010000003.1
MRKSARKPPHFPAWQQRVLKKIDDLRAARTKPDLALLLKIDSSHLTNVLYRLRPETQYKSFTIRKKSGGDRTIHAPSDELKSIQKALSTLLQDCAQEIEKSNGPKFKSTLAHGFVRDRSILTNSVMHLNRKNVLNIDLKDFFDGFNFGRVRGFFIANRNFQLHPEVATVIAQIACYDNKLPQGSPCSPVITNLITHALDIRLASLAKDNSCIYTRYADDITISSREKEFPLTIMAEGASSYTPGKRLQLEIKRAGFEINHPKTRIQYKDSRQDVTGLIVNRKPGVKSEYWRTVRSQCHSLFNTGAFKEDVSGTPTEGNIFVLEGKLNFIDQIDFFNRKRNKPILNPNYEPSNHGSNTRKLLSGRERTLSRFLYYKYFYGNAKPTVVCEGQTDNIYLKAAINRLAVGYPKLVRPKTVAAPYELLVQFINYTGRTKFLLELAGGTDYLKKFVAEFGSYFKSYKAPVPTRPVILILDNDDGFNAIEGILKGNKYKPTIFPSGLAANDFRKAEFIHVVHNLYIVLTPLAKSGTKTSIEDLFPQSVRDTKLGEKTFNKENKIDIMKEYGKEFFATKVVTPKRNEIDFSGFNIILKRLEQCIEHFATMTLTKS

SEQ ID NO: 1132 - protein, 587 aa, Pseudomonas sp.
  source 1..587: note = Related to NZ_LN854573.1
MISALRDAKTKPQLALLLGIDASFLTNVLYRLKPSSQYKSFTIPKKSGGVRTIYAPSEELKSLQRALSSLLQDCQQEIYKSKGPKFKSTLSHGFVRERSIMTNAVMHLNKKSVLNIDLKDFFDQFNFGRVRGFFISNTNFQLDPAVATVIAQIACYDNKLPQGSPCSPVISNLITHSLDIRLASLAKDNSCTYTRYADDITISTREKDFPVNLMSEEAGEYSPGKKLESEIRRAGFEINHKKTRIQYKDSRQDVTGLIVNKRPGVKCEYWRTVRSQCHALFNTGEFIENESSNSEKGNVFVLEGRLNFIDQIDYFNRKRSKPILNPEYQLSDHGSKTRRLLSGRERTFSRFLYYKMFYGNAKPTILCEGKTDNVYLKAALNRLAAGFPKLVKPKNGKDPYELLVQFFNYTERTRFLLELSGGTPYLREFIASFDEHFNYFKAPVPTRPVIMVFDNDDGFKVIESVLKGKKVKPVVYPNTLAASDFRNSDFIHVIHNLYIVLTPRAAANGDTAIEDLFPQTVRDVKLGGKGFTKKNNIDKDTEYGKEFFASKVVVPNRNNIDFSGFDIFLKRIMQCIEHFDTVKLTKP

SEQ ID NO: 1133 - protein, 570 aa, Pseudomonas duriflava
  source 1..570: note = Related to NZ_VLKY01000029.1
MGVNASHLTNVLYRMKPENLYKSFTIAKKSGGVRTIHAPVDELKSIQTALSILLQDCVQEINKSKGDKFTSTLSHGFVRERSILTNAVMHLSQKNVLNIDLKDFFESFNFGRVRGFFIANKNFQLDPAVATVIAQIACYDNKLPQGSPCSPVITNLITHSLDIRLASLAKENSCTYSRYADDITISTRKKEFPSNLMTDGQQGYSPGKRLQSEIKRAGFEINRSKTRIQYKDSRQDVTGLIVNTKLAVKKEYWRTVRSQCHSLFQTGAFKENASGTPEEGNIFALEGRLNFIDQIDLFNRKRNKTAPALDHDSSQKKYNTRRLLSNRERTFSRFLYYKLFYGNAKPTIVCEGKTDNIYLKSAIGRLAGAYPNLAKPKSGNDPYELLVRFVKYTERTRFLLELSGGTPYLKEFILGFDEHFKYYKAPAPKQPVILVFDNDDGFGKIEGVLKGKKYSPTIFPTTLPTDAFRKAEFIHVAHNLYIVLTPLKEKGEHTSIEDLFPQAVRDIKLGGKKFNKENEIDIDIEYGKEYFAKKVVLPNKNDIDFSGFNIILTRMVQCIEHFATLTLTKP

SEQ ID NO: 1134 - protein, 589 aa, Pseudomonas oryzihabitans
  source 1..589: note = Related to NZ_CP044074.1
MLKIDALRQIKTKPELALLLGINASHLTNVLYIKRLETQYSSFTIPKKSGGVRTIYAPSDELKSIQAALSHLLQDCIQEIRNSKGEVSKSTLSHGFVRGRSIITNAVMHLRQKNVLNLDLKDFFEGFNFGRVRGFFIANKDFQLDPVIATVIAQIACFNNKLPQGSPCSPVITNLITHSLDIRLASLAKKNSCRYSRYADDLTISTRKKDFPSNLMAEGVSGYSPGKKLQAEIKRAGFEINSSKTRIQYKDSRQDVTGLVVNKKPAIKSEYWRTVRSQCHALFQTGAFIESTSGTPEDGNIFVLEGRLNFIDQIDLFNRKRNRFDFVSEWDSSQKKINTRRLLSGRERTFSRFLYYKLFYGNSKPTVVCEGKTDNVYLRCAMAQRANGFPELFKSKAGDEPSELLVQFVKYTERTRFLLELAGGTSYLKEFILNFDEHFKYYKAPAPTHPVIIVLDNDDGFGKIEGVLNSKKFKAVSFPATLEGGSFRQAEFIHVVHNLYIVLTPLQGKGEHTSIEDLFPQAVRDIKLGEKKFSKKNEIDAATQYGKEFFASKVITPNKNTIDFSGFDIILSRMVNCIKHFASVDLAKS

SEQ ID NO: 1135 - protein, 586 aa, Halomonas endophytica
  source 1..586: note = Related to NZ_PNRF01000034.1
MSKLEALRKIKTKHELATLLGIKTSVLTYTLYVLKPDTQYSSFTLKKRSGGERTIFAPSERLKSIQSTLSELLQDCRDEINNKKQDDGKFNSTLSHGFVRRHSIITNSMMHLNQKNVLNIDLENFFDCFNFGRVRGFFIANNNFKLDPHIATVIAQIACHNNKLPQGSPCSPTISNLITHSLDIQLANLARTYSCRYTRYADDITISTRENLFPRKIMRHEDGKFIAGKRLRREIKRAGFTINEKKTRIQYRDSRQDVTGLVVNKKPNIKSEYWRTVKSQCHALFSTGSFKDKENGEFIDGNEKILEGRLNFIDQIDRFNRLRQKTPLNPDYALAKYGYDTSKQLSGRERTFSRFLYYRFFYGNKFPTILCEGKTDNVYLKCAIHMLTSGYPQLAKEKTETEPYKLLLTFLKYTKRTRFLLQLHGGTSYLSFFINSFDKHYNFYKAPKPNNPAIIIADNDSGFSSIESKLRKIDSAKGYHGKKAGKNYRQAEFIHVVHNLYIVLTPTTKTNKETAIEDLFDSSTRKIQVSGKSFNPSNDMNNDTEYGKEVFAKKVIQAQKGSINFNGFKPLLNRIVAAMNHYDAIK

SEQ ID NO: 1136 - protein, 587 aa, Thiothrix sp.
  source 1..587: note = Related to QOAT01000087.1
MSKLEALNKSTSKPQLAALLGVKAQFLTHVLYRLKPATQYTNFTIPKKSGGTRTIFAPSEKLKSLQSSLSTLLLDCIDEINEANTVKYTYKHALSHGFVRECSIMTNAVMHLNQKNVLNIDLKDFFDSFNFGRVRGFFIKNNHFKLDPHIATVIAQIACYDNKLPQGSPCSPVITNLITHPLDIKLASLARKHSCIYSRYADDMTFSTRKAVFPSQIMRQEHGKFITGKKLKNEIKRAGFFINDKKTRIQYKDSRQDVTGLIVNVKPNVKKEYWRTVKSQCNRLFHTGAFIKKTAAGDIDGNINELEGQLNFIDQVDRFNRSRKKPPLNHTYKLDNHGINKTPLLSGREKTFSKFLYYRLFYGNTKPTILCEGKTDNIYLKSAISILVKKYPNLASTKTNKAAYELLIRLVKYSKRTRFLLGLYGGASYLSYFTSKFDKQYVLYNEAPKPQHPVIIILDNDSGSTSVKKQFEKINSATAYPATLPKKDYKNADFIHVTHNLYIVLTPLTTKGNDTDIEYFFDDPTRLKQHNDKCFNTADKRDDKADLSKEAFAKNIIKAQKGSINFDGFKPLLDRIVAVITHYDSIK

SEQ ID NO: 1137 - protein, 587 aa, unidentified
  source 1..587: note = Related to JAHJJI010000033.1; note = Gammaproteobacteria bacterium
MSKLEALKQITTKPRLAALLGVKVQTLTHVLYILKPSTQYTGFTIPKKNGGTRSILSPSDKLKSLQSSLSNLLLDCIDEINETKHKKNYRYKHALSHGFVRECSIMTNALMHLNKKNVLNIDLKDFFDSFNFGRVRGFFIKNNHFKLDPHIATVIAQIACYENKLPQGSPCSPVITNLITHSLDIRLASLAKKYSCTYSRYADDMTFSTRESVFPRQIMGQEEGQFIIGKELKSEIERAGFSIHDKKTRIQYKDSRQDVTGLIVNKKPNVKKEYWRTVKSQCHLLFQTGAFIKKTVNGDVEGNINELNGQLNFIDQVDRFNRSREKPPLNPIYQLQNHGQNTTSLLSGREKTFSQFLFYRLFYANIKPTILCEGKTDNIYLKSVISILAEHYPKLANPKTKKNPYELLIQFVEYSKRSRFLLQLYGGASYLNYFVSQFDKHYRHYKAPTPQQPVIIVLDNDSGSSSIVTKLKALDSVKAYPATVKKEDCAKADFIHVVHNLYIVLTPLNAKNEPTDIESLFDDSIRLKQHDGKCFNTRDKRDEKVDLSKDAFANHIINAQKNTLNFDTLKPLLDRVVAAISHYDSIK

SEQ ID NO: 1138 - protein, 584 aa, unidentified
  source 1..584: note = Related to NVWS02000073.1; note = Zetaproteobacteria bacterium
MNKLERLKKITTKPALANLLEVNPSFLTHVLYILKPNTQYTTFTIPKKSGGIRTIKAPSVKLKSLQSNLSKLLLDCIDEINKSKSLEEKNYKQTLSHGFVRKRSIMTNALMHLNQKNVLNIDLKDFFDSFNFGRVRGFFIKNHNFQLDPAIATVIAQIACDDNKLPQGSPCSPVITNLITHSLDIKLASLARKHSCIYSRYADDMTFSTRKSVFPQQIICQEGDHFVTGKNMNSEIVRAGFSINENKTRIQYKDSRQDVTGLIVNKKPNVKKEYWRTVKSQCHSLFRTGTFTKKTAAGVVAGNIKELEGQLNFIDQVDRFNRPRQKAPLNPIYQYKNYGNDKTPLLSGREKTFSKFLYYRLFYGNTKPTILCEGKTDNTYLKSAISILAGSYPILASAKTRGSAYELLIRTVKYSKRTRFLLGLYGGAPYLCSFIKAFEKHYKFHKASKPKCPVVIVLDNDSGFKNFPKILKGIKSATPHPTTLESDDYRNAEFIHVIHNLYIVLTPLRSKGEETDIEYLFDDATRLKQHSGKCFNIVDKRNDETDLSKDAFAKHIIKAQKASINFDGLRPLLDRITSAINHYN

SEQ ID NO: 1139 - protein, 601 aa, unidentified
  source 1..601: note = Related to NZ_BDMN01000304.1
MKNLRALKDIRTKPELAKLLDVTPQNLTYTLYKIGRKNLYISFDIPKRNGGIRTIYAPVCNLKLIQSRLSNLLQDCIDEINNKPNKSSKLAHGFVRKGSIITNANVHKNQKYVLNIDLSNFFDSFNFGRVRGFFIKNRNFELDPHIATVLANIACFNNKLPQGSPCSPVITNLITHSLDIRLASLAKKNSCSYSRYADDITISTRKAVFPNQIMEQHENGKYLAGKKLTHEITRAGFSINEKKTRIQHQYSKQDVTGLTVNKKLNVKKIYWRTVRSQCYQLFCTGTFYKTTYKGREQGNINELEGQLNFIDQVDHFNRIRKTYNKNLHNSHHRKIGNSRERLFGRFLFFRSFYGNSQPTILCEGKTDIIYLKSAIKILATDFPNLARNNPKKGGYKLLIRFIKNSNRTNFFMDLPKDGGYGCLVTFMKKFNENSLGYKAPSPQHPVIIVVDNDKGFDNFTTAINQTKKEYSRKNKSTINPSNPTEEKDYRKKGFIHVIRNLYVVLTPLRDGESASDIEALFDEDTRLKKHEGRCFNTVLNRNDKDDLSKNAFATHIIKKQKTSINFSNFKCLLNRISGAIDHYAENGSVAKSVKTDYILVL

SEQ ID NO: 1140 - protein, 591 aa, Marinobacter salinexigens
  source 1..591: note = Related to NZ_VTUU01000001.1
MSKLTTLKSITTKKELADLLEIKRSNLTYTLYVLKPSTQYFQFQIPKKNGGFRTIDAPAKRLKDIQSKLSDLFLDCIDEINKGKEKNQHNEKHGIHTYPMLSHGFSRKKSIITNALMHINNKNVLNLDLDDFFDSFNFGRVRGFFIKNRNFELHPDIATVIAQIACYNNKLPQGSPCSPVITNLITHSLDIKLASLARKYSCTYSRYADDITFSTREEVFPRQLMAEEKGKYTPGKRLRREIESSGFTINSKKTRIQYKDSRQDVTGLIVNKKPNIKKEYWRTAKSQCHSLFRTGTFYKLTDQGMAIGNINELEGQLNFIDQVDFFNRLRQKPPLNPLYKLENHRKNTSNLLTGREKTFSRFLFYRYFYGNNKPTILCEGKTDNVYLKSAINVLQDHYPRLAKSKSKHGEYKPIVHFFNYSKRTRFLLEIFGGADYLKGFVENYQKNYSFYKAPKPKNPVILLLDNDSGSNGIINLIKGLRTTTIHPSTTKKNDIKNADFIHIMHNLYLILTPLNGSSDTAIEDLFDATTKSIKVGGKSFNPGKPDTSKEYGKEIFANRVVKEKKNSINFDGFKPLLNRISAVIEHYSKHT

SEQ ID NO: 1141 - protein, 599 aa, Aeromonas dhakensis
  source 1..599: note = Related to NZ_CP045311.1
MSILINLQNAKTKKDLAAILDINTSTLTNALYRKKVSSLYTEFKIPKKKGGERIIYAPQRELKIIQKKLSLILQDCLEEITSNDEKISNLSHGFMREKSIYTNATHHKNKKNVLNIDLKDFFDCFNFGRVRGFFIKNKNFELHQDIATVIAQIACYNNSLPQGSPCSPIISNLITHSLDIKLSQLASRYSCFYTRYADDITFSTRECIFPTPLARIENNEYVIGKKLRQEITRSGFEINTIKTRIQYLSSRQDVTGLIVNKKVNVKKEYWKSVRAKCDFLFKNGYYYVLDDTGKEIKGSLSQLYGQLNFIDQIDYLNKLKKPIEINPLYILAKHGNNKTPLFSSRERVFSHFLFYKSFYGNENTTVICEGKTDIIYIRCAIKSLYKSYPSLVDKDGIIKFDFFKYTRRTRYLLSLHGGTTYIADFIKNYRQYYSLYKSAKPTKPVIIILDNDKGLGDIIGGLQKERKPRLVTADGETTLNGINSLKKSLYVHVCFNLYLLIVPHLNQKETSIESLFDKSVLDTKLNGKSFTTENEFSHEKFYGKHVFATAVIENNKHKVDFSGFNQIFKAIEKIQDDYKDVQKNTAKPPIKGSTINATP

SEQ ID NO: 1142 - protein, 415 aa, Aeromonas veronii
  source 1..415: note = Related to NZ_CP012504.1
MAEILDINTSTLTNALYRKKVSSLYSEFKIPKKKGGERTIFAPQRELKIIQKKLSLILQDCLEEMTSEDERTPNLSHGFMREKSIYTNASCHKNKKNVLNIDLKDFFDSFNFGRVRGFFIKNKKFELHPDIATVIAQIACYNNSLPQGSPCSPIISNLITHSLDIRLSQLASRHSCFYTRYADDITFSTREYIFPTSLARIENDDYVIGKKLRQEIRRSGFEINSIKTRIQYHTSRQDVTGLIVNKKVNVRKEYWKDVRAKCESLFRTGTYYILDDNEKAKPGTLSQLYGQLNFIDQIDYSNKIRKPIKTNPLYVLAKHGSNKAPLFSSREKTFSRFLFYKNFYGNEKTTIICEGKTDIIYLRCAIKSLHNLHPSLVDKDGLANFEFFKYTRRTKYLLSLNGGTPYLSDFSRELL

SEQ ID NO: 1143 - protein, 610 aa, unidentified
  source 1..610: note = Related to JABXIW010000056.1; note = Gammaproteobacteria bacterium
MLADKLDSLKNIKTKRELAILLGVKPSFLTHTLYIRKPENCYSEFEIPKKKGGYRKIKAPNPQLKSLQSKLSVLLLDCMDIIKSINFPNVISHKRLSVSRNHLKIKVPGSPRKESTLSHGFERNRSILTNAVMHTNQKNILNIDLKDYFDSFNFGRVRGFFIKNRNFQLHSDIATVIAQIACFEDKLPQGSPCSPVITNLITHSLDIRLASLSKKHSCTYTRYADDISISTRKKTFPAKIAKEVNGEYVLGKKLRQEIKRSGFKINNTKTRIQYKDSRQDVTGLVVNNKPNVKKEYWRTVRSQCHSLFHTGEFTQRNSDGELEEGNINRLEGKLNFIDQVDRYNRMRQKEKINHLYALSNYGHKMSPYWSGREKTFSRFIFYRLFYSNVKPTILCEGKTDNVYLKAAINELVKDYPKLASPPTKDERYNLLVRFVEHTKRTKFLLELSGGSSYISFFIGNYKSRYGFYKAPKDNAPVILVLDNDSGFDCIEKKINKIDSVQIYPTTLKKDKLREAEFIHITENLYIVLTPISATAKKTDMESLFDDKTRLIKYDNKCFNTIDKRDEDKDLSKDSFSRHVIKNQKTSINFDGYRPLLDRLNKVIEHYDKLK

SEQ ID NO: 1144 - protein, 588 aa, Aliivibrio fischeri
  source 1..588: note = Related to WOBJ01000032.1
MDTITKLKNCRSKIDLALLLNCKPSHLTYLLYKQSPSQKYTQFSVNKKNGGIRNISAPISQLKELQSNLSHLLLDCIDDINATKSMKSTLSHGFVREKSIITNAEMHKNTKNVLNIDLENFFASFNFGRVRGFFISNNNFLLNKDIATVIAQIACHNNELPQGSPCSPVITNLITHSLDIRLANLAKKYSCTYSRYADDITFSTRKTQFPKEIMCERENVFTPSRRLNGEIIRAGFKINPKKTRIQYKDSRQDVTGLIVNKKIGVKKEYRQITKSMCNSLFHSGGFTKLVDGKHEKGSIEELEGRLNFIDSIDLYNRLTFPEKLSIHYPHVKHGIKTKKLLTGRERTLSKFLFYKNFFANEKPKILCEGKTDNIYLMAALNNLSSNYPSLASPATATKLFEPLVSFLNYSKRTKFLLELAGGTSYLVGFILDYHKYYSFYKAEKSNNPVIIILDNDDGLGEVIKAIAKIKTCVVEAPVIAGQNINDQVKSSRFVHVCHNLYLVITPLDQGKDTMIENLFEPQLWATPIKGRTFDPTEKKKPTDNYYGKNIFATEVVNPKKGQINFDGFKPLFDRMVEVLEHYKVNRQP

SEQ ID NO: 1145 - protein, 582 aa, Vibrio plantisponsor
  source 1..582: note = Related to NZ_JABEQC010000006.1
MNSITQLKNCNTRVDLALLLKVKPAVLTFTLYKKGPQNNYTSFNIPKKNGGVRTINAPIGKLKTLQTNLSKLLLDCIDDINKERGFNSGLAHGFVRERSIITNAIMHKNSKNVLNIDLDNFFGSFNFGRVRGFFQKNRNFLLNDEVATTIAQIACCNNELPQGSPCSPVITNLITHSLDIQLLKLANKYSCTYSRYADDITFSTRKSKFPPEIMVENNGVYNPSKRLKHEIKRADFKINDKKTRIQYRDSRQDVTGLIVNKKIGVKKEYRRTTKSMCNSLFHTGSYTKIVNDKHVAGTINELEGRLNFIDSIDLYNRINYPEKLSIHYTHRNYGYKTRALLTGREKTFSKFLFYKWFFAPSKPTILCEGKTDNIYLKSAIFQLAAHYPKLVKATPFEHLVNYFSYNKRSRFLLELSGGTSYLAGFISSYSDHYSLYSAPKSGQPIIIILDNDSGLNDIISALAKIDTCTVYPIDKATGNIKEDIKTADFIHVVHNLYIVLTPLNGKNDSMIENLFNPALWSTPIQGRTFDPTEKRTPKNSFYGKNTFATEVIKRQKATIDFSGFHPLFERMTLAITHYEGIR

SEQ ID NO: 1146 - protein, 588 aa, Vibrio echinoideorum
  source 1..588: note = Related to NZ_SMJS01000006.1
MNSIEKLKKCSSRNDLSILLDVKPSILSYVLFVESDASKYQEFTISKKTGGERLIKAPNDRLKEIQKSLSDLLLGCIDDINKEKNISNTLSHGFVKEKSIITNAEMHKKSKNILNIDLGNFFDSFNFGRVRGFFIKNNNFLLDPNVATAVAQIACHNNSLPQGSPCSPVITNLITHSLDISLAKLAKKNSCRYTRYADDITFSTRKNSFPVEIMAELDGVYKASKRLDKEISRAGFVINEKKTRIQYKDSRQDVTGLVVNEKVGIKKEYRRTVKAMCNSLFHTGSYTRLINDEHVEGSILELEGRLNFIDSVDRHNRVHYPEKLSTHYQHRHHGIRSREVWSSREKTLSKFLFYKWFYANSKTTILCEGKTDNVYLSSAIYKLKGKYPSLIDAKAKSGEPKSLVKFMDYSRRTKFILELAGGTSYLANFIDAYKERYEFYKSEKPEYPVLIILDNDDGLNDNGGIIAKLQKISTMSMHPTPPKKGNMKSKIKNSEFIHVMHNLYVVITPLNSGNDTMIENLFEQKLWSTPLNKRTFDPTEKKEPKSSYYGKNDFATRVVKKKQDSINFNGFIPLLDRMQRAIEHYKTV

SEQ ID NO: 1147 - protein, 585 aa, Shewanella baltica
  source 1..585: note = Related to NZ_CP028355.1
MDAIDKLQSCKTRRDLAILLNYNPSHFTHLLYHSIPEQRYKSFLIPKKNGGERSISAPNEKLKQLQRNLSNLLLECIDNINKRNGVNNSLSHGFVRERSIITNAEMHKNKKNVLNIDLENFFGSFNFGRVSGFFIKNNSFLLEEVIATTIAQICCFNNELPQGSPCSPVITNLITHSLDIRLASLAKKYSCTYTRYVDDITFSTRKSTFPIQIMNFEYGEYLPSQRLLHEITRSGFNINNSKTRIQFKDSRQDVTGLIVNKKVGVKREYRQLTKAMCNKLFNTGRFTKEIDGQEIEGSLLELEGQLNFIDSIDYYNRVNYPQNLSIHYTHRNFGFRTKLLLNGREKILSKFLFYKNFYSSDKPTILCEGKTDNVYLLSALHALSSSFKKLATPPTKTTDFKTEIKFLNYTKRTKFLLELAGGTSYLAMFIANYHSNYIQYKAPKPKHPVIIILDNDEGLKDIINELEKIKTCTFSPPKTKGSTTRDAVKTSTFVHVVHNLYLVITPLSDGNDTMIENFFEKELWETVVNGRKFDPTEKKEPKNIFYGKNIFANDVVKLNRKKINFEGFRPLFYRLEKVISNYNKI

SEQ ID NO: 1148 - protein, 584 aa, Vibrio jasicida
  source 1..584: note = Related to NZ_CAJFAE010000018.1
MNAITQLKNCHSRIDLAILLKCKPSFLSYVLYKKAASSKYHEFEIDKKNGGKRKICAPADDLKSIQRNLSDLLLDCIDDINKDKNYYNTLSHGFSREKSIISNAEMHRGQKNVLNIDLDNFFGSFNFGRVRGFFIKNRNFELNEEVATTIAQIACYENQLPQGSPCSPVITNLIAHPLDIRLAKLAKQHSCIYTRYADDITFSTRLKDFPAKLMAQPTPNEYVVGSKLNREIQRAGFNINHDKTRIQYKDSRQDVTGLVVNKKIGVKREYRQLTKAMCNSLFHTGSYTKLVGDNHIDGSLDELEGRLNFIDYVDLHNRLQYPEKLSIHYPHRNYGSKTRALLTSRETTLSRFLFYKYFVGNEKATVLCEGKTDNIYLKAALRQLAAHYPTLQNESNHECYLDFLNYSKRTKFLLELFGGTAYLAGFITSYNDLYSYYKGPKANNPVIIVLDNDDGFDAIASALNKTKSCTINPTPTHTTGHNFNSTEYKNSNFIHVCHNLYVVLTPLNNGSDTMIEDLFDRSLWQTSISGRTFDPTGKLKPSSSYYGKNIFATEVVAPRQSSINFDGFKPLLDRLTDVVGNYAP

SEQ ID NO: 1149 - protein, 585 aa, Photobacterium carnosum
  source 1..585: note = Related to WMDE01000033.1
MNKILQLKNCRTRIDLAILLKCKPSFLTFLLYKTKQEDHYEEFEIPKKTGGIRKICSPKGDLKLLQKRLSLLLLDCIDDINSKNKIKNTLSHGFEREKSIITNAEMHRGKKNVLNIDLNNFFDEFNFGRVRGFFISNKDFQLTPEVATTIAQIACYKNKLPQGGPASPVITNLITHILDVILSRLAKKNSCIYTRYADDITFSTRKKLFPSGIMEETDANIYIPSKSLNHEIKRAGFSINSKKTRIQYKDSRQDVTGLTVNKKVGVKREYRQLTKSMCNSLFHTGEYTKKVNNEDVAGTLKELEGRINFIDSIDFYNRKKHPKKLSIHYQQKNHGLNTRLLLSGREKLLSKFLFYKNFIGNDKVTILCEGKTDNIYIKSALKTLVNNYPKLAEKKAEEPYKSYLNILNYSKRTKFFLELAGGTPYLNFFIKNYEKHYNFYKSVPAEKPVIIILDNDDGFKLIINTIKEIKNHTCLPYPNRRQTPIEYLKNADLIHVTHNLYIILTPLSNGNDTMIENLFPPDLWNQDIQGRTFDPTEKLKPEENYYGKKTFATEVIAPNRDHINFDGFRPLFDRLTNVIEHYEKI

SEQ ID NO: 1150 - protein, 587 aa, Vibrio parahaemolyticus
  source 1..587: note = Related to CP040103.1
MNSIESLKSCVTRKDLARLLSCAPSHLTYVLYKLPAATKYKQFPVSKKSGGVRQINAPTTDLKKIQRCLANLLQDCIENISEEHEYDNKAAHGFVRKRSIISNAEMHKRQKNVANLDLESFFDSFNFGRVRGFFIKNRHFALSEEVATTIAQIACHNGVLPQGSPCSPVITNLIAHSLDIRLINLARKHSCVYTRYADDLTFSTRKATFPPQILREEDGKIIPSKTLRNEIKRAGFSINHKKTRIQYKDSRQDVTGLVVNKKVNVSSDYSRLTKAMCHSLYTKGFYTKEENGKLVQGTIKELNGRLLFIDSVDKYNRINYPDKLSVHYNHKTHGYRTRVLHNGREKTFSKFLFYKHFFANTKVCVLCEGKTDNIYLKCALDSIGAQFPKLYTPAGNGKDAITHIELFKYSKRTRFLMELYGGSSYLGGFIQSYKERLKSYKKLPLTRPVIILLDNDEGLSKHIRTEMKSAHATIYINGKIVTNFDKNIKKADFVHITDNLYAILTPLKADGSDSMIEDFFEPAVLNRQVNGRTFDPKEEKKPPEKFYNKNTFATQVVEADKKNINFNGFNSIFERISLAINHFESRT

SEQ ID NO: 1151 - protein, 617 aa, Amphritea pacifica
  source 1..617: note = Related to NZ_JAFFZP010000001.1
MVMDDEHSKLLKLARYNRLFSCDSRSELASLLHVSPVFLTNILYIQKPENLYRSFNIPKKSGGIRQIEAPAESLKEIQSKLANLLLDCIDALNTIKGNDSNLTGSFNNTLSHGFSRKKSIITNAERHRNRKIILNTDIEDFFGSFNFGRVRGFFLKNRNFSLSENIATTIAQIACYNNALPQGSPCSPVISNLICHSMDVRLAKLAKRHSLYYTRYADDLTFSTNKRTLPSEIAIENGSRYEIGSVFQREIHRSGFSINHNKTRVNFKDSRQVITGLTVNKKINTHRNYWRLERSKCHYLFMTGDIPDDGSSTDLASKINRLHGRLNFIDTMDRHNRVNLSKIEQHLISHKSINGILKEDIEEILLGKENGKNSRTKKKLNSREETFSKFLFYKNFYNNQKPLIILEGKTDNIYIGCALERLFSHYKDLIKYDIKEKKYEKNIKLYEHTKRARYLLDIHAGADHLFEFVRQYDKRYSYYKAPIDNHPVILLLDNDTGPKAIINFLKNTLLKRSGIDPKNEDFVHICHNLYLVLTPLNKGRDTSMEDFFDKSVLGTTIKGKTFDPSNEKSTGTTYGKHVFSTEVVKKNKNTISFASFRPILDRVTAVINDYASKKSSS

SEQ ID NO: 1152 - protein, 615 aa, Marinobacterium halophilum
  source 1..615: note = Related to NZ_PYGI01000034.1
MDEKKARSRKLDRYFRLSNCTTRSELASLLNISSVFLTNVIYIQKPDNLYRSFNIPKKSGGHRVIFAPAPQLKEIQSSLAHLLLDCIDAINIKKGENLKLGKPFISTLSHGFSRKKSIITNAEKHRNRRVILNTDIEDFFGSFNFGRVRGFFLKNRNFQLFPDIATTIAQIACYNNALPQGSPSSPVISNLICHTMDIRLAKLASKHSLYYTRYADDLTFSTNKKEIPVEIAINKGGQYEVGIALKKEIHRSGLSINHGKTRVNFKDSRQDVTGLTVNKKINTNRHYWRLERSRCHYLFMTGDIPDDGGSYDLESKISRLHGRLNFIDTIDRHNRVNLAKIEQHIISNKSINGILKEDIEEVLLGKDNNKKTKRNKKLNSREINFSRFLFYRNFYNNSKPLIICEGKTDNIYISCALESLSPSYPGLIEHDKKEKKYKKLIKLYEHTKRARYLLDIHGGADHLLDFIRQYEKRFSYYKAPISNSPVILLLDNDTGPKAIIQYLKNTLLKGTGIDPKNEEFIHICKNLYLVLTPLSNKKDTSMEDFFENTVLKTKVNGKSFNPSNDAATDTTYGKHIFSTEVVKKHKNSISFDMFRPIFDRIVAVIEHYESIKNSL

SEQ ID NO: 1153 - protein, 588 aa, Aeromonas sp.
  source 1..588: note = Related to NZ_CP077301.1
MSRLALLKQATTKRMLAKVLDVNPSFLTKTLYLTSDELKYKSFEIPKRNGDPRTIYAPNKELKDLQSRLSVLLLDCIDEINKERKITPKLSHGFVRNRSIITNAKNHIHKKNVLNIDLNDFFGSFNFGRVRGFFIKNQHFELHEHIATVIAQIACYKNFLPQGSPCSPVITNLIMHSVDIRLAKLAKKNSCTYTRYADDITFSTRENVFPKDIAIADKNKVHLGRRLSKEITDNGFTINEKKTRVQLMDSRQDVTGLVVNKKVNIKSDYWRITRAMCHSLFQTGSYIKCEQNGQAVAGTLYELDGRLNFIDYIDKYNNVKEKGPIDNRFSLRNHGLNYREKLNVREKTFSRFLFYKYFFGHNKPTVLCEGKTDNIYIKAAILRLSEKFELLSNAKTDEKEYELLVNFLEYNKRTRYLLDLYGGASYLKRFVERYRSDYSYYRAPAATQPVIIVADNDSGSTELISYLVNHKPLYPELKKDKAESNKIIKESSFVHVEKNLYIVFTPLIDGRDSFMENLFLPETLNIEVDGRKFSPQQEADTKNSYGKNTFATKVVSAKKHSIPFSGFEPLLTRMEEAIIHYRTKIEKK

SEQ ID NO: 1154 - protein, 581 aa, Mariprofundus ferrooxydans
  source 1..581: note = Related to NZ_KB902175.1
MTELERLRKATTKVDLAKILNLNAPFLTRTLYINKIENQYTQFQIPKRSGGHRTINAPTSELKDIQSRLSKLLLNCIDEINASKNVEPRLSHGFTRKRSIITNAEKHVHQKNVLNIDLSNFFDSFNFGRVRGFFIKNNNFLLHKDIATVIAKIACLNDGLPQGSPCSPVITNLISHSLDIQLASLAKKNSCTYSRYADDITFSTRNREFKPELVKVDGVDIFIGSKLLREVERAGFKINETKTRVQFKDSRQDVTGLVVNKKVSIKSEYWRTTRAMCHQLFISGSYTIKTSTGTREGTINELQGRLNFIDSIDRYNHMRPKGPPDKLHIPIQDRKNYREKLNVREKVFSKFLYYRNFHANEKPTILCEGKTDNIYLKAAIHSLSKQYGLLAKSKTKTTPFELLIKFFNYSKRTRYLLDLHGGGSYLKDFVQHYQENLKYYQKTIPKNPVILLLDNDSGPKELIDLLVHSKKFPDFPNGKDDIKNGEFVHITSNLYLILTPLKGNKDTMIENFFDKKTLSIKVDGRSFDYSKEADSTTKYGKNTFATKVVLENKSSISFKGFKPILSRIEKVIKHYKALSGG

SEQ ID NO: 1155 - protein, 585 aa, Desulfuromonas acetoxidans
  source 1..585: note = Related to JABWTG010000018.1
MTKLERIRLAKDKKDFAKLLKVSTVFLTNTLYLTPIEDQYEEFQIPKRSGGFRTIHAPTAELKDLQSRLSNLLLDCIDDINKEKEIISTLSHGFVRKRSIITNARLHVRQKNVLNIDLEDFFGSFNFGRVRGFFLKNNNFKLDKNIATIIAKIACLNDTLPQGSPCSPVITNLITHPLDIRLAQLAKKSSSVYTRYADDITFSTRERNFSEKIVSIENKKVTLSKKLKEEIRRSGFNINHKKTRLQFADSRQDVTGLIVNKKINIKREYWRETRAMCHSLFKTGEFTINENGNLRKGTIDELYGKLNFIDSIDRYNHYNCKESLDHRYSLKDRGIDTHREKLNGRESTFSDFLYYKNFIANNKPTLLFEGKTDNIYIKYALKSKSNTSNELKPTKNDNDQLELPVSLFDYTKRTRYLLDLYGGGNYLKFFSQRYKKSLKYYNVKTPQNPVILVLDNDNGPNGLIGWLSSQKIIFPKIEEDNKNNSIRNSDFIHIVSNLYLILTPRDNGNDSMMENLFDDKALSYKIDGREFEPSNEYDSTTKYGKNTFSLKVVKDKHKEINFDGFIPLLLRIAKVIKYHKKFVNS

SEQ ID NO: 1156 - protein, 586 aa, Morganella morganii
  source 1..586: note = Related to WJFN01000003.1
MVHRRNYLLLKQAKTKPELASLLDVSAAFLTRTLYRPGELSHVNSHYHQFDITKKSGGVRKISAPSDELKELQRRLSDLLLDCKEVIHFDNKVECTLSHGFEREKSIITNARIHRGKKNVLNLDLADFFGSFNFGRVRGYFISNKDFKLDPHIATTLAQIACYKNSLPQGSPCSPVIANLITNSLDIKLAKLAKRNGCSYTRYADDITFSTRKEIFPKDILKNVENTILGSKLLGEIRRSGFSVNPTKTRLQFKDSRQEVTGLVVNKKVSVKSEYWRLTRAMAHSLFKTGKFQIIEQDGSYRNGHLSELEGRLTFIDSVDFYNNLEKKKKPEPKYEPKVHTGINKFRGRLNSREKIYGMFLQYKNFFANEYPTILTEGKTDNVYLKSALSQLQALYPNLVNSKSATTEYSPKLKFPDLNRKTMYLLDIGDGATPFVRFVQRYVDDLKNFEDKKAKNPVILILDNDSGPKDLLNHLVKSVKSCPNDILMLKSSGFIHLFHNLYLILTPLNSGGKDSAMEDLFDSTTLATVIDGKTFSPEKNIDITKQYGKHIFSTKVVRSNKAKINFDKFKYLFDEIEKVKLHFLTL

SEQ ID NO: 1157 - protein, 562 aa, Marinomonas alcarazii
  source 1..562: note = Related to NZ_QKLW01000003.1
MIHRRNYLLLKQTKTKPELAEILGVSAAFLTRTLYKPGVQSHVNSHYHQFDVAKKSGGVRTISAPSDELKDLQRKLSDLLLDCKSVIHLDNKVECSLSHGFERERSIITNARIHRGKKNVLNLDLADFFGSFNFGRVRGYFISNRDFKLDPHIATVIAQIACYENRLPQGSPCSPVIANLITNSLDIKLSKLAKRNGCSYTRYADDITFSTRKKIFPTAILKDAENVILGSKLLGEIRRAGFSVNPKKTRLQFKDSRQEATGLVINKKVSVKSEYWRLTRAMANSLFKTGKFLIAEQDGSYREGKLSELEGRLTFIDSIDFYNNIEEKKKPEPKSEPKIHNGINKFRGKLNSREKVYAEFLQYKHFFANEYPTILTEGKTDKSDYSPKLKFPDLNRKTMYFLDIGDGATPFVRFVQRYADDLKRFENKKAKNPVILVLDNDTGPKDLLKHLVNKVKSCPNDMGTLKSSGFIHLFHNLYLILTPLNAGGKDSAMEDLFDAATIGTVIDGKTFSTADHIDISKHYGKHIFSTKVVRSNKAKINFDKFKYIFDEIEKVKLHYKKL

SEQ ID NO: 1158 - protein, 586 aa, Halomonas subterranea
  source 1..586: note = Related to NZ_FOGS01000013.1
MIHRRNYLLLRKAKTKPELASILGVSAAFLTRTLYRSGVKSHVNSHYHQFDIAKKSGGVRTISAPSDELKDLQRKLSDLLLDCKEVIYLDKKVECLLSHGFERERSIITNARIHRGKRNVLNLDLADFFGSFNFGRVRGYFIANREFELDPHIATVIAQIACYKDSLPQGSPCSPVIANLITNSLDIKLSKLAKSNGSSYTRYADDITFSTRKKSFPAAIVKDVKSITLGSKLLGEIRRAGFSVNPTKTRLQFKDSRQEATGLVVNKKVSVKSEYWRLTRAMAHSLFKTGKFQIAEQDGSFRDGHLSELEGRLTFIDSIDFYNNLEKKKQPESKFEPKIHTGINKFRGKLNSREKVYGRFLQYKHFFANEYPTILTEGKTDSVYLKSALNQLQASYPNLVNFKSSKEEYSPKLKFPDLNRKTMYLLDIGDGATSFLRFVQRYTDDLKYFEGKKAKNPVILVLDNDAGPKDLLNHLVKKVKSCPDDIAVLKSGGYIHLFHNLYLILTQLNAGGKDSAMEDLFDAETLSTVIDGKTFSPAKHIDVSKHYGKHIFSTKVVRANKEKINFDKFKYIFNEIERVKLHFSTL

SEQ ID NO: 1159 - protein, 601 aa, Shewanella saliphila
  source 1..601: note = Related to BMQV01000045.1
MSYFFALTIEECNLIHRRNYLLLKQAKTKPQLASILGVSAAFLTRTLYKPGVESHVNSHYHQFDITKKSGGVRTISAPSDELKDLQRKLSDLLLDCKAVIHLDNKIECTLSHGFERKRSIITNARIHRNKKNVLNLDLADFFGSFNFGRVRGYFIANRDWKLDPHIATIIAQIACYKDTLPQGSPCSPVIANLITNSLDIKLSKLAKRNGCSYTRYADDITFSTRKKAFPTAIVKDVKNITLGSKVLGEIRRAGFAVNPKKTRLQFKDSRQEATGLVVNKKVSVKSEYWRTTRAMAHSLFKTGKFQVAEQNGSFRDGHLSELEGRLTFIDSVDFYNNLENKNHPEPKFEPKVHNGLNKFRGKLNSREIVYGRFLQYKHFFANEYPTILTEGKTDNVYLKSALSRLQTTYPKLVNPKSAKAKYSPKLKFPNLNRKTMYLLDLGDGATPFVRFVQRYADDLKYYECKKAKNPVILVLDNDTGPKELLNHLAKKVKSCPDDIATLKSSGFIHLFHNLYLILTPLNAGGKDSAMEDLFDAATLGKTINGKTFSTANHFDDTKHFGKHVFSTKIVRSGKSSINFDKFKYIFDEIVKVKIHFSKIKN

SEQ ID NO: 1160 - protein, 586 aa, Shewanella sp.
  source 1..586: note = Related to NC_008750.1
MIHRRNYLLLKQAKTKPELALILGVPAAFLTNTLYKPGVNSHVNSHYHQFDITKKSGGVRTISAPSDELKDLQRRLSDLLLDCKAVIQFDKKIECTLSHGFEREKSIITNARIHRGKKNVLNLDLADFFGSFNFGRVRGYFIANKDFKLNPHIATVIAQIACYKDTLPQGSPCSPVIANLITNSLDIKLSKLAKKNGCSYTRYADDITFSTRKKCFPIAIVKNVESLTLGSKLLGEIKRAGFSINTSKTRLQFKDSRQEATGLVVNKKVSVKSEYWRLTRAMAHTLFKTGKFQITDQDGSVKDGNISELEGRLNFIDAVDFYNNLEKKKHPEPKFEPKAHTGINKFRGVLNSREKVYGRFLQYKLFFANEFPTILTEGKTDNVYLKSALNRLQNLYPNLVTPKSANIKYSPKLKFPDLNRKTMYFLDIGDGATPFTRFVQRYADDLKHFENKKAQNPVILVLDNDSGPKDLLNHLVNKVKSCPNDIATLKNSGFIHLFHNLYLILTPLNVGGKDSAMEDLFDTATLGRTLNGKTFSTAKDFDETKHYGKHLFSTKVIRSDKENINFNKFKYIFDEIEKVKNHFSNI

SEQ ID NO: 1161 - protein, 582 aa, Glaciecola pallidula
  source 1..582: note = Related to BAEQ01000054.1
MIHRRNYLLLKKAQTKPELASILGIPAAFLTRVVYKPGVSTHYHQFKIPKKSGGARSISAPSSELKDIQRRLSDLLLDCKAVIHVDNKVECTLSHGFERERSIITNARVHSNKKNILNLDLEDFFGSFNFGRVRGYFIANKHFKLHPHIATVLAQIACFENKLPQGSPCSPAIANLITSSLDIKLSTLAKRSGCSYTRYADDITFSTRKSAFPVAIIKDDENLTLGSKLLGEIRRAGFSVNPRKTRLQFKDSRQEATGLVVNKKVSVKSEYWRLTRAMAHSLFKNGKFHIPQQDGTHRDGLVSELEGRLTFIDSVDFFNNLANKKHPASKFEPRVHSGLNGFRGKLNSREVVYGRFLHYKHFFANEYPTILTEGKTDNVYLKSALSILQGTYPNLVTAKTATGPYKPKLKFPHLNRKTMYLLDIGDGATPFVRFVQRYANDLKQFEDKKAINPVILILDNDDGPNVLLNHLVNKVKSCPNDKATLKNSGFIHIFHNLYLILTPLKAGGKDSAMEDLFDKATLARKVGGKTFSTAEHFDNAKHYGKHIFSTKIVRSDKNNINFDKFNHLFEEVEKVIQHYETL

SEQ ID NO: 1162 - protein, 582 aa, Shewanella canadensis
  source 1..582: note = Related to NZ_RXNU01000007.1
MIHRRRYLLLKQAKTKPQLASLLGVSASFLTRVLYKPGANTHYHKFDIPKKSGGIRKISAPTSELKDIQRKLSDLLLDCKMVNHIDNEIECSLSHGFERERSIITNARVHRGKKNVLNLDLEGFFDSFNFGRVRGYFIANRDFKLDPHIATVIAQIACYNDTLPQGSPCSPVIANLITNSLDIRLARLARKNGCSYTRYADDMTFSTRKSEFPFGIVKDAGNRILGAKLLGEIRRSGFSVNNKKTRVQFKDSRQEVTGLVVNKKINVKSEYWRSTRAMAHNQFKNGSFEVVGINGESRVGTLSELEGRLTFIDSVDYYNNLQNKKHPKPIFEPMKHNGLYQFRDKLNSREVVYSRFLHYKHFFANELPTILTEGKTDNIYLKSALSMLQPIYPNLVKPKTINNQYEPKLKFPNLNDKTMYFLDLGDGATPFLRFVKRYVEDYKYYGNQEAKSPVILVLDNDDGPETLLKHLVKNVKSCPNDLVTLKKSGFIHIFHNLYLILTPLNAGGKDSMMEDLFSPATLSTVIGGKTFSTAKNIDITKEYGKHIFSTKVVRSNKSTISFDKFKYIFNEIEKVKAHFTSL

SEQ ID NO: 1163 - protein, 587 aa, Pseudidiomarina gelatinasegens
  source 1..587: note = Related to NZ_RSFE01000007.1
MILIHRRDYQLLKKAKTKPELASLLGITAAFLTRVLYHPGANDHYHQFEIDKKSGGKRKISAPSNELKDIQSRLSTLLQNCLDVIRFDTEVSRECLVSHGFERERSIITNAAIHKGKRNILNLDLDDFFGQFNFGRVRGYFIANKHFELDPHIATVIAQIACYENSLPQGSPCSPVIANLITASLDMKLLNLAKSCGCSYSRYADDITFSTRKKEFPSSIVKVLEPLELGGKLIGEIRRAGFSVNALKTRLQYKDSRQEATGLVVNRKVSIKSEYWRLVRAMAFRLFKKGEFEILDVNGEPRMGTLNELEGRLAFIDAIDRYNNIVARRRPKAPWGTIKHTGLNAFKGRHNSREAVYSRFLFYKYFYSSEYPTILTEGKTDNVYLKSALSELQGSYPSLVSPKGQDNAYSPKLKFPNLNKRTMYLLDLGDGATPVAKLVQRYETELAYFHGKKATSPAILILDNDSGPSELLKELAKPKYRSCPNSVTDIKKSGFLHIFENLYLILTPLNSGGKDSMMEDLFDAKTLATPINGKTFSTLSSFDTAKHYGKHVFSTKVVRSSKSSIKFDRFRYIFDEIEKVKAHFAKL

SEQ ID NO: 1164 - protein, 577 aa, Rheinheimera sp.
  source 1..577: note = Related to NZ_JAGPNM010000010.1
MLLQHARTKPDLALILGVSAAFLTRVLYRPGVDSHYHQFNIVKKSGGTRIINAPSEELKEIQRRLATLLQDCLEVVHFDNKISLECTVSHGFERNRSIITNASVHQGKKKVLNLDLNDFFGSFNFGRVRGYFISNRHFKLNPHIATVIAQIACYDNCLPQGSPCSPVIANLITNSLDMKLSRLAERGGCSYSRYADDITFSTRKSHFPKSIVKAIEPVELGGKLLGEIRRAGFSVNARKTRLQYKDSRQETTGLVVNKKVSIKSEYWRLTRTMAHRLFKKGAYEITEADGELRPGTLNELEGRLAFIDSVDRHNNVVDSRRPKPPYEIEKHSGLLGFKARHNSREAVYSRFLFYKHFYANEYPTILTEGKTDNVYLKSALSELQSSYPKLVNPKTNSKPYKPKLKFPDLDKRTMYFLDLGDGATPFLRFIKRYEAERSYFHDNKAKSPVILILDNDDGPSTILKHLAKEVKSCPNSVDDIKKSGFLHIFQNLYLILTPLKSGGKDSMMEDLFDTKTLNTTIDGKTFSTQSSFDGSKHYGKHVFSTKVIRSQKSSVNFDGFKHIFNEIEKVIAHFEKL

SEQ ID NO: 1165 - protein, 572 aa, Shewanella algae
  source 1..572: note = Related to NZ_JADZGP010000013.1
MLKQIKTKPELAALLKICPSFLTNTLYIKKSTTNYHDFEIPKKSGGVRTISAPPEDLKEIQRKLADLLQDCKQVIHFDKSIKCSLSHGFEREKSIITNASIHKRKKTVLNLDLEDFFGKFNFGRVRGFFISNKDFRLDPHIATVVAQIACYNDKLPQGSPCSPVIANLITNSLDIKLSKMARKYGCSYTRYADDITFSTRKIEFPKSIIKNNVPLELGGKLLGEIRRSGFSVNPNKTRLQFKDSRQEATGLVINKKVNIKSEYWRDTRAMAHRLFKKGKFDVYDSDGNVRDGKISELEGRLAFIDSIDYFNNVNSKNKVDKQKNGGLNSHLEKLNSRERIYARFLHYKNFFANEHPTILTEGKTDNVYLKAALCNLQNIYPNLVSKKTDTSQYIPLLRFPNLNSKTMYFMDLGDGATPFLRFVQRYTVDFNYYENQKPKSPVIMILDNDDGPKTLLNHLVKNIKSCPNTLPELKSKGFVHLFKNLYIILTPLNTDGSDSMMEDLFDKKTLGTVLDGKTFSTEKSFDEKKHYGKHIFSSKVVRSNKANVNFDKFTYIFNEIEKVRAHFSTLKF

SEQ ID NO: 1166 - protein, 585 aa, Oceanimonas sp.
  source 1..585: note = Related to NC_016745.1
MIRKRRYLLLKRATTKPELADLMNIDPSFLTRVLYVEKTKSHYTEFKIDKKSGGFRTIFAPSAELKDIQRSLSDLLLDCKDVIQFEKGVKFTLSHGFEREKSIITNASVHRNKKNVLNLDLEDFFGSINFGRVRGYFISNNNFNLDPHIATVIAQIACHNNSLPQGSPCSPVISNLIAQSLDIKLSKIARKNGCSYTRYADDITFSTRKEKFSKSIVKDVENVKVGSVVLKEIKRSGFSVNDKKTRVLFKDSRQEATGLVINKKVSVKREYWRETRAMAHSLFKKDFFEIQEGNSNARKGTLSELEGRLNFIDSIDHYNNIHEEKKPAHKYELKKHSGLYDYKNKLNSREKVYSKFLYYKYFISSEFSTILTEGKTDNVYLKLALSSMRNLYPKLVEVDKETKLYRPLLKFPNLNSKTRYFLDLDGGASHFTRFVQRYVKECEYYGERKPKSPVIMILDNDDGPKSLLNHLANHVKSCPNNIDSIRGSKHLRLFKNLYLILTPLGEYSKESMMEDLFEPTLLDTKLDGKAFSRNDKFDSDKYYGKHVFSTKVVAKNKAQVNFDGFKYIFDRILEVNKHYASLDKV

SEQ ID NO: 1167 - protein, 580 aa, Aeromonas veronii
  source 1..580: note = Related to NZ_JRBE01000001.1
MIHKRNYLLLKLAKTKPELAALLNISPSFLTRVLYHPGVEHHYNSFTIPKSSGGARSINAPSKELKDIQKRLANLLLDCKDVILRDNKVKCTFSHGFERKKSIITNAAQHQNKKVVLNLDLSDFFGSFNFGRVRGFFISNRYFKLDPHIATVIAQIACFNNSLPQGSPCSPIISNLISNSLDIRLSTLAQKNGCTYTRYADDVTFSTRKPTLPTSILKELNPVTLGSRLIKEIESAGFLINHKKTRVQLKDSRQEATGLIVNKKVNIRAEYWRDVRAMAHSLFKYGSYEIKEMNGNKRKGTIQELEGRLTFIDHLDHYNNIIRSKKPKPIFEPAKHLGLFHFRNKLSSREKTYSIFLFYKHFYANSYPTIMTEGKTDNIYLKCALNSLQNEYPSLAKKKSITQQYEPKLSFLNLNKKTMYFLDIEGGASHFQRFVARYESEFKYFTNQSPSAPVIMILDNDSGPNALINDLSKKQSSNSVPIRKQRFTHIIHNLYLILTPLGNSENTMMEDLFDKNTLSIKIDGKSFSKKDNFDIKKEYGKHIFSTKVITQHRDTIDFHKFKYIFDAIVDVCSHFSGNKG

SEQ ID NO: 1168 - protein, 585 aa, Vibrio vulnificus
  source 1..585: note = Related to ABBKEB010000006.1
MINLLPYFLLKQAKSKSDLASALGVTPSFLTNVLYRQRPENLYTDFDINKKSGGKRTISAPSDQLKDLQRRLSVLLLNCKDAIHYNQGTKFTVSHGFEREKSIVSNAAVHRNKKNVLNLDLMDFFGTINFGRVKGFFEKNRSFALAPEVALTIAQIACYQGKLPQGSPCSPVIANLIANTLDMRLVKLAKKCGCSYTRYADDITFSTRKSAFPKEIVKFTDGHSYELGGKLVNEIKRAGFDINPDKTRVQYQNSRQDVTGLIVNKKVNVKSEYWREVRAMAHQQFKKGSFHIADSDGKPRAGELSELEGKLTFIDQVDKYNNIQRKKQPKILFSLAPLKLSEHRLTLNSREKTYSRFLYYKYFYANNYPTILTEGKTDNVYLKCALNRLQKDYPTLVESTHSKTTQYKPKLLFPHLDKRTYYFLDLDGGATHFLRFIQRFSEEFSYFENQKPKSPVILVLDNDDGPKTILTHLAGKVKNCPNTVDEIRNKPFIHIFHNLYLVLTPLSGGGGTAMEDLFTQDTLQQVVDGKVFSRKDKLDTNKEYGKHIFSTKVVRDKMQEVDFAGFKPVFDAILAVNAHFSRLRF

SEQ ID NO: 1169 - protein, 587 aa, Vibrio splendidus
  source 1..587: note = Related to MAKF01000119.1
MSKNKSLLKLQEAQTKPDLAKLLGLKSHFLTYILYKTDIDSHYKEFEVKKKTGGVRVISAPSPELKDIQRRLSKLLLDCKDAIMVKNDIKKECMLSHGFERHKSIASNAYVHIGKKNVLNIDLEDFFGTINFGRVRGFFIKNRDFQLDPDVATVLAQIACHNNKLPQGSPCSPVIANLITNSLDIKLSKLSKSKGCSYSRYADDITISTRKAEFDKSIVKLVNGDITLGKRLVQEISRSGFSINPKKTRVQFKDSRQDATGLVVNKKVSVKSDYWRTVRAMAHSQFKKGSYETVNKKTGLVMKGSLAELGGKLAFIDSIDRFNNYLKKSHPKPIYELVQHKKSASYRNRLNGREAVYSRFTYYRTFYANEYPTILTEGVTDPIYLKSALYGLRQMYPNLVRRKLLDKTYKPKLLFPEFDSRTKYFWDLDDGAGTFSKFLERFESEFHYFKNQKPKNPVILVLDNDDGVGTLLGKLTNKKYPNCPVKTEDMRNQEFTHIFHNLYMILTPRKKGQAESDIEELFDEKTKAIKLDGKSFSKEPNPENEYGKKPFALKVVRANRDTIDFTNFKPIFDTIEKVKLDFEKRYS

SEQ ID NO: 1170 - protein, 604 aa, Vibrio crassostreae
  source 1..604: note = Related to CP016228.1
MPAAQGSVYKPTFFLPIYVTFMKSTQQDSIDCLNELKNAKTKSDLAHILGITPSFLTRVLYVEGTQNQYVQFSITKRSGGTRTISAPSIELKDIQSRLSKLLLDCNDALNFREGRKGGASHGFERKKSIISNAEKHKNQKNVLNLDLEDFFGTVNFGRIRGYFIKSKDFALNSDVATTIAHIACYDRKLPQGSPCSPVIANLIARILDVRLVKVAKKYGCTYTRYADDITFSTRKKVFPSSIVESVNDKDVVLGTSITREIRKCDFKINHKKTRVQFKDSRQDVTGLIVNKKVNIKREYWRDARSKCHKLFTDGEFFTKNSNGDKVVGKIKELEGTLTFIDSVDEYNNKRPKGYEKPVFQKIHKQKHYRIRLNVRERTYSEFLYYKWFCANETPTILTEGKTDVVYLKAALSQLASDYPMLAKSEPYKPQINFFGCSGKTNYLLNLDGGAAHFIDFVNSYELNASMYKNIKKTSPVIMILDNDTGPVNLLNQLKGKYGLPQTVDEIRKSNFLHIKSNLYLILTPLNGSSKTDMEDMFEDHVLNAEVKGKKFNKSNNINTSKEYGKHIFSLKVVQARKSKISFSGFCPIFDAINNVINHYDKMKS

SEQ ID NO: 1171 - protein, 597 aa, Providencia rustigianii
  source 1..597: note = Related to NZ_LR134189.1
MRKGVPAYSNLSEIIYMRNNMSSLNKLKSARNKVELAKVLGVSPVFITNILYIIKKENQYTTFTIKKKSGGDRVISAPNDSLKNLQQKLSDVLLNCLDQIRKDENISTNISHGFERKKSIITNAMKHIKKKNVLNLDLEDFFDCFNFGRVRGFFIKNNRFSLNEEVATVIAQIACFDNKLPQGSPCSPVITNLICSSLDIKLNKLAKKNKCTYTRYADDITFSTNKQSFDTEIVSSKSTFSDIIIGNELDKEIKKSGFKINSRKTRLQTKNSRQDVTGLVVNKKINTKVEYSKSVRAMCNTLFKTGSYTLIDRKTHEERNGTVNELGGMLSFIDYIDRYNNIIYKKSIDRPINNKVKIEKKLNKRERVYSDFIYFNKFHNNDFPTIITEGHTDQIHIKCALTSLNGNYNNLIENHDKNYHLKFRFLKLSNKLKWLLNISEGTDPIKKFISNYICNYRKYPCFKAKKPVIIILDNDSGSKGSGGILSILTNGSFSNITEDRNSLRRKNYIHVYENLYIIFTPMISDKDSCIEDLYDKEILETKLNGKKFKNSNIDLKVDEYSKNHFAKYVIQNNIENINFSNFKSILNTIDEIIRIYQ

SEQ ID NO: 1172 - protein, 575 aa, Providencia sp.
  source 1..575: note = Related to WLUH01000023.1
MSSLTKLKSAKNKVELAAVLGVSPVFLTKTLYKIKVENLYTSFTIKKKSGGDREILAPDDSLKDLQQRLSNILLNCLDDIRKNESTSTNISHGFERKKSIITNALKHTKRKIVLNLDLENFFDCFNFGRVRGFFIKNDRFLLNEEVATVIAQISCVYNKLPQGSPCSPVITNLICSSLDIKLNKIARKNKCTYTRYADDITFSTSKISFGNEIVSPNSTNKDIVLGKKLKKEIIKSGFTINYKKIRIQNKNSRQDVTGLVVNNKVNTKIEYHKNVRAMCHNLFKTGNFNLIDRETKKERIGTIDELEGMLSFIDNIDKHNNIIYKKNIKTNSKKSKLEKNLNKRERVYSDFIYFRKFHSNELPTIITEGHTDQIHIKCALTSLYSDFPNLIEMKNENYHLKFNFLKLSKKNKWLLGMGEGTDPIRFFISNYIKNYNKYPCFKAKKPVIILLDNDSGSKGSGGILSLLTQGTFSNIKENRNELRKKKYIHVYENLYVIFTPLIKGNDSCIEDLYDRKTLEKKLNGKKFKNSNLNLKPDEYSKNHFAKYVIQDNIENINFDNFKQILESLDKIILEY

SEQ ID NO: 1173 - protein, 581 aa, Proteus mirabilis
  source 1..581: note = Related to JAGKMM010000039.1
MKSRSLDLLRQTNNKVDLAKLLGVSPVFLTNTLYRIKVETLYNQIKIPKKTGGIRYIYSPDSRLKEIQRNLSNLLLNCLDEIRAENKTKAIISHGFEREKNIITNAKKHINKNIVLNLDLESFFDSFNFGRVRGFFIKNKYFLLNDEVATVIAQISCLNIQIGERKISILPQGSPCSPVITNLISSSMDIKLNSLAKRNRCTYTRYADDITISTNLMSFGKQIVKDVDENNNVSLGNKLISYIEKSGFVINDKKTRIQYKNSRQDVTGLLVNKKINPSRKYSDILRSMCNSLFNSGEFELIDKEKKKRKGTINELEGKLSFVDQIDRFNNKDILSKGGVLLKNRRENLYSKFIYFKKFIFNDEVTVITEGHTDHIYIRSAAISRKDKFNDLIKEDNKKIKLNFSFLKINNKIEYLLDVREGTSSIKKFIERFPENYSKYNIGKPKKPVIIILDNDSGSSGSGGIFQLLISDKFKNITNDKDEIRNVEFIHVFGNLYIIFTPLKDGKDTSMEDLFSDEILNKKMNEKKFNRTNKKCKNDEFGKDYFARFVIKPNVKTIDFSKFDTIFNRIKLVISDYEKKEI

SEQ ID NO: 1174 - protein, 585 aa, Proteus mirabilis
  source 1..585: note = Related to JH815505.1
MTSPLIKLKSCKSKPDLAHLLRLDPVFLTRVVYIRNTDNLYTDFSIKKKNGTNRIISAPDSELKEIQSKLSKLLQDCLDDIRESLKLNNTISHGFERKKSIITNAEKHKRRKWILNLDLSNFFDEFNFGRVRGYFLKNKNFSLDETICNLIAKIACYKNRLPQGSPCSPVITNLILLSLDQRLNKICKSVGCTYTRYADDITISTNKSFFPTKIVTSYDNESIVLNKKFLKEITSSGFSLNEDKIRLHNKTYRQEVTGLTVNQFVNVNAKYARKVRAMTHSLFINGIFHLVDKKTREIRAGTINELAGMLGFIDSLDKHNNKNIRDRTLQYSNKDKKLEHNKREKLYANFLYYKAFYANTRPMIITEGKTDITYLRVALNSLAGSYPSLIEKKLVGSDSICDYKLTFFKNSGKTKYFLNLDGGTGHLKDFLSKFDKKSKQYKGNENMNPVIMILDNDSGSDGSGGIFSILNGKSFPNITSSKDELRNKEWLWVIQNLYIIFTPLNGAKDSSMEDLFDKETLDIKLGNKVFNKTNKPCTENQYGKEAFATGVVLKQRENIDFSGFSLIFNSIVKIIEHYNSIKQMN

SEQ ID NO: 1175 - protein, 578 aa, Providencia rettgeri
  source 1..578: note = Related to NZ_CP086257.1
MPTRLEKLKKCTSKPDFARLLGVDPVFLTRVVYIRNTEKLYTEFKIKKKNGDDRIISAPDKELKEIQSKLSKLLLDCLDNIRSSLEIDNNFSHGFERKKSIISNAEKHKRKKWILNIDLKNFFDEFNYGRVRGYFLKNNYFSLNENICNLIAKIACYKNKLPQGSPCSPVITNLILLSLDRRLNQICKNSGCTYTRYADDITISTNKSIFPKKIISSYEENSITLGKKFINEIISSGFTLNEKKIRLHDTTHRQEVTGLTVNQFVNVENKYARKVRAMVHSLFTKGEFYLIDKVTQEARLGTVNELTGMLGFIDSLDKYNNKILKNTIKQSNFNIELNKREKIYANFLYFKSFYFNAKPVLLTEGKTDITYLRVALDSLAYKYPDLIGYKENGRNKIRDYKLTFFKNSPKTKYLLNLDGGSSHLKEFLNNFEKKARIYKTSGEINPVIIILDNDSGSGGNNGIFESLMNKLRGKISSKEELRSKKWIWVTQNLYIIFTPLNGKKESSMEDLFDKDTLNIKLGGKVFNRTNSKCTAEQYGKEVFANGVVLKKRKSINFSGFSPIFDAISEIITYHNSSK

SEQ ID NO: 1176 - protein, 573 aa, Yersinia bercovieri
  source 1..573: note = Related to NZ_JAJAVX010000005.1
MATRLEKLKECYSKPDFSRLLGVDPVFLTRVIYIRNTDKLYSEFTIKKKNGSDRVISSPDSELKEIQSKLSNLLQDCLENIRESLKLENNLSHGFERKRSIISNAEKHKQKKRVLNLDLSNFFDEFNFGRVRGYFLKNNQFLLNESICNLIAKIACYNNKLPQGSPCSPVITNLILLSLDQRLNKICRNAGCTYTRYADDITISTNKSIFPKNIITSHEDDLVTLNKRFIKKITSSGFSLNERKIRLLDTKCKQEVTGLTVNKFVNVDDKYARKVRAMAHRLFIDGEFHLIDKKTHKKRVGKINELAGMLGFIDSLDKHNNTFPHNKKLSLNKRERIYSKFIYYTAFCANTIPTILTEGKTDITYLRVALNSLADKYPNLIGDKKVANETVRDYKVKFFKNSAKTKYFLHLDGGSSHLKEFLVSFDKKTDGYKTVRNSNPVIMILDNDSGSTGGNGIFQALIGKSFPNITMSRDELRSQKWIWAVKNLYIVFTPLNGSKDSSMEDLFDVPTLQTKLEGKVFNRTNEKCAENEYGKEAFATGVVLRQRKSIDFSKFSSIFDSIIEIIDHHKDKE

SEQ ID NO: 1177 - protein, 574 aa, Serratia bockelmannii
  source 1..574: note = Related to NZ_VOUX01000033.1
MTTRLEKLKACNSKPDFARLLGIDPVFMTRVIYIRNTDNLYSQFAIKKKNGSDRIISAPDSELKEIQSKLSDLLQDCLNNFRENLKEDNHFSHGFERNRSIITNAEKHKSKKWVLNIDLCNFFDEFNFGRVRGYFLKNNNFSLNTELSTLIAKIACHQDKLPQGSPCSPVITNLILVSLDRRLSNLCNSVGCTYTRYADDITISTNKKEFPKGIIRDHDEKSITLNNKFLNEITSSGFKINHNKLRLLDKKIRQEVTGLTVNRFVNVDRRYAKTVRAMAHSLFKKGEYTLIDKKTRKERVGNINELGGMLSFIDFVDKYNNRLPHSIKSSHNNREKVYSDFLYYSAFWANTKPTILTEGKTDITYLRVALDAVSEKHPNLIGNKNPGNKTVRDYGIKFFKNTSKTKYLLNLDGGAPHLKDFIVGFEKKTEAFKVIANQKPVIVILDNDSGSAGANGIFQILIGKSFPNITLTRDELRNQKWTWVTRNLYIIFTPLNGLKDSSMEDLFHSSVLQTTLGGKVFNRTNTKCKDNEYGKEFFATGVVLKKRKTIDFSNFNYIFESISEIIEHNNSRKK

SEQ ID NO: 1178 - protein, 574 aa, Klebsiella grimontii
  source 1..574: note = Related to NZ_CP067391.1
MTTRLDKLKSCNSKPDLARLLGIDPVFMTRVIYIRNTDNLYSQFTIKKKNGSDRHISPPDPELKEIQSKLSDLLQDCLNNIRENSKEENNFSHGFERNRSIITNAEKHKSKKWVLNIDLSNFFDEFNFGRVRGYFLKNKNFSLNTELSTLIAKIACHQDKLPQGSPCSPVITNLILLSLDRRLSNLCNRAGCTYTRYADDITISTNKKEFPRKIIKSHNENSIDLNKKFLKEIISSGFQINLNKLRLFDRKCRQEVTGLTVNRFVNVDNKYAKKVRAMAHSLFTKGGYTLTDEKTREQRAGNINELGGMLSFIDYVDKHNNRLPHATKTSLNKRENVYSDFLYYSAFWANPKPTILTEGKTDITYLRVALDSLSANYPNLIGNKKIGNKIVRDYGVKFFKNTTKSKYFLNLDGGASHLKDFIVGYEKKTNAFKAIAEQKPVIIVLDNDSGSGGSNGIFQTLIGKAFPNITLSKDELRNQKWTWVTKNLYLIFTPLNGLNDSSMEDLFHSSVLQTKLGGKVFNRTNAKCKDNEYGKEFFATGVVLKQRKAINFSNFNYIFESITEIIDHNASRKP

SEQ ID NO: 1179 - protein, 576 aa, Klebsiella pneumoniae
  source 1..576: note = Related to UKYY01000005.1
MTTPLDKLNSCNSKPDFARLLGIDPVFLTRVVYIRNTDNLYSQFTIKKKNGSDRFISAPDDELKEIQRKLSNLLQDCLSNIRESLKVENNYSHGFERNKNIITNAEKHKNKKWVLNLDLSNFFDDFNFGRVRGYFLKNNNFSLNAEISTLIAKIACHNNKLPQGSPCSPVITNLILFSLDRRLSRICQQVGCTYTRYADDITISTNKSTFPRNIIKSLENEKINLNRKFLKEITSSGFSLNPEKIRLHDRKCRQEVTGLTVNQFVNVDNKYAKKVRSMVHHLFTQGEYQLVDKKTGEKRNGKINELAGMLGFIDSLDKYNNSLSHERNATLNKRERLYGEFKYYTTFWANTIPVILTEGKTDITYLKVALSSLAAKYPNLIGEKKLSNKVVHDYKIKFFRNTAKNKYFLDLDGGTSHLKNFMMKYNKKTDAFKLVATQQPVIIVLDNDSGSTGSDGIFNALVGKSFPNITDSMVTLRNKKWVWVTKNLYIIFTPLNGKSDSAMEDLFEDSVLQRQLGGKVFNRTNKRCEANEYGKEAFATGIVLKQRDNINFSKFSSIFDSVMEIIQHHAHQKSSS

SEQ ID NO: 1180 - protein, 580 aa, Pantoea allii
  source 1..580: note = Related to JAHVXV010000003.1
MTTRLKKLQNCKSKPDFARLLGIKPVFLTRVVYIRNTEKLYTDFKINKKNGDKRIISSPDPELKEIQSRLSTLLQDCLTDIRDSHEVINNLSHGFERERSIITNAEKHKRKKWVLNLDLSNFFDEFNFGRVRGYFIKNSNFKLNEEVSNIISKIACYNNRLPQGSPCSPVITNLILHSLDQRLNLICKKVGCTYTRYADDITISTNKSEFPKKIIASCESNIVNLNQIFLKEITKSGFSLNFSKVRLLGKNCRQEVTGLTVNKIVNVSDKYTRNVRAMANNLFKNGEFYLFDKQTNQKRLGSINELTGIFGFIDSLDKHNNKISHKNQGSLNKRERLYSDFLYYKSFCANEKPMILTEGKTDITYLKVALDSLAKDYPTLIGDKEERMSYVRDYKISFFKNSIKSKYLLKLDGGTPHLKDFLVNYDKKSSKYSKSKNEKPVIMILDNDSGSNGGGGIFQCLLGKSFPNITIDSKKSLRDEKWIWVTKNLYIIFTPLNGKQESSMEDFFDESVLKRTLSKKTFNRSNNKCKDNEYGKEAFAKGVVLKRRKKINFTKFSIIFDSINEIINHHESVNNLKTIA

SEQ ID NO: 1181 - protein, 572 aa, Pantoea ananatis
  source 1..572: note = Related to CP003085.1
MTTQLARLKLCFSKPDFARLLELDPVFLTRVVYMRDTEKLYTDFTILKKNKTQRVISAPDEELKEIQRKISDLLLDCLTTIRNENKSNNKLSHGFELGKNIITNAERHKSKKWVLNIDLLNFFDQFNYGRVSGYFIKNKFFELHSNIANLIAKIACYKNKLPQGSPCSPVISNLILQSLDQRLNNICKKNGCTYSRYADDITISTNKKKFPKAIVSNHSDKEINLNNGFIKEILRAGFSINNDKTRLRFNTLRQEVTGLTVNSKISVDDKYSRRVRSMVHKLFLSGEYTLIDKKTREPRFGTINEIQGMLGFVDSIDKYNNNLPNNSKHTPNKRERLLADFIYFTRFHFNTKPTIITEGKTDITYLRVALNALCKKYPSLIEKKKSYKGEINDYKFSFFIKNAKTKFLLKLEDGSSHIKNFIKDYDRNIEKYKADGGVNPVIIILDNDSGSTGSGGIFSLLLSNVFPNIKLSREDIRKVDWLWVTKNLYVIFTPLKDGQDSSLEDLFDTKTLATTLNGKVFNNTNKDCKPNEYGKEYFAKHVVLKNKDTIDFKNFIKIFDSIEEIIKHHSKK

SEQ ID NO: 1182 - protein, 571 aa, Citrobacter freundii
  source 1..571: note = Related to CP056336.1
MSTKIELLKQCTTKPDFARLLGLDPVFLTRIVYRKDTENLYSNFTILKKDMSERHISSPDSKLKEIQRKVADLLLNCIEDIRVLTESKNLLSHGFEKQRSIITNAERHKRKKWVLNIDLSNFFDQFNYGRVRGYFIKNTHFALDENIANMIAKIACYQNKLPQGSPCSPVITNLILSSLDQRLNKICKNSGCSYSRYADDITISTNKKTFPSEIVKSYDAEHVELNKNFTKEIMRAGFSLNDKKTRLQGRTQRQEVTGLTVNYNLSTDVNYSKKVRAMVHHLFMDGNYTLIDKKTRKPRNGTINEVEGMLGFIDSIDKYNNKLAYRAKGGLNKREKLYANFIYYRSFHSNEKVTILTEGKTDVTYLKVALHMLKGKYPTLISSKTVSHKTVNDYKLSFFKNNNKSNYFLGLGEGSSHFKNFVKKYQGKISEFKAVGGRKPVIIISDNDSGANELISLLNGKGFPHITSDKNELRKNKWLWITENLYIILTPFDGKTDTSIEDLFDTKTLSRSLNGKTFNRTNKECALNEFGKEYFAKHVILKDRDLIDFNMFSYIFDAILEIIKEHDSKVS

SEQ ID NO: 1183 - protein, 646 aa, Escherichia coli
  source 1..646: note = Related to CP061264.1
MFINTHVGRFVGCESQPVALMAGGIASLKSLIQSYTAGVLCEGVPACVSPWPFFLWDEEEMTKTSKLDALRAATSREDLAKILDVKLVFLTNVLYRIGSDNQYTQFTIPKKGKGVRTISAPTDRLKDIQRRICDLLSDCRDEIFAIRKISNNYSFGFERGKSIILNAYKHRGKQIILNIDLKDFFESFNFGRVRGYFLSNQDFLLNPVVATTLAKAACYNGTLPQGSPCSPIISNLICNIMDMRLAKLAKKYGCTYSRYADDITISTNKNTFPLEMATVQPEGVVLGKVLVKEIENSGFEINDSKTRLTYKTSRQEVTGLTVNRIVNIDRCYYKKTRALAHALYRTGEYKVPDENGVLVSGGLDKLEGMFGFIDQVDKFNNIKKKLNKQPDRYVLTNATLHGFKLKLNAREKAYSKFIYYKFFHGNTCPTIITEGKTDRIYLKAALHSLETSYPELFREKTDSKKKEINLNIFKSNEKTKCFLDLSGGTADLKKFVERYKNNYASYYGSVPKQPVIMVLDNDTGPSDLLNFLRNKVKSCPDDVTEMRKMKYIHVFYNLYIVLTPLSPSGEQTSMEDLFPKDILDIKIDGKKFNKNNDGDSKTEYGKHIFSMRVVRDKKRKIDFKAFCCIFDAIKDIKEHYKLMLNS

SEQ ID NO: 1184 - protein, 493 aa, Enterobacter chuandaensis
  source 1..493: note = Related to NZ_QZCS01000001.1
MKKNKSIILNAYRHRNKRIILNIDLSNFFGSFNFGRVRGYFMSNKDFLLNPIVATTIAKAACYRGVLPQGSPCSPVISNLICSIMDMRLAKLAKQYGCSYSRYADDITFSTNKPSFPTELALLQPEGVILGKYLVNEIKRAGFEINDAKTRLAYKPSRLEVTGLTVNKIVNVERRYSDKTRALAHTLYTTGEYKLPDENGDEVAGSLDKLEGMFGFIDQLDKFNNIQKKKSKQPEKYALAPATLHSFKSKLNAREKAYGKFIYYKFFHGNTCPTIVTEGKTDRIYLKAALRALSNNYPELYRERKDKKGKEIDLNILKITDKLNYFLNISGGTADLKKFVERYREHYSSYYGSIAKQPVIMVLDNDTGPNELLNFLKNKVKQCPDDVGAIRRMRYLHIFHNLYLVLTPLTEGGNETSMEDFFPTEVLSIELDGKIFNKNNDGDSKTEYGKHVFSVKIVKDKKRVIDFNRFSYIFDIVREIKIDYQKILIKNKP

SEQ ID NO: 1185 - protein, 518 aa, Lelliottia nimipressuralis
  source 1..518: note = Related to NZ_JAJNQS010000015.1
MVATSKLLLLKVASSRADLAKLLDVKLVFLTNILYRIGTDSQYKDFSIPKKGKGVRLISAPEDSLKDLQRRIADLLMDCRDENFKIKKIKNNYSFGFERNKSIISNAFRHRGKNIILNIDLKDFFESFNFGRVRGYFLSNRDFLLNPIVATTLAKAACYKGSLPQGSPCSPVITNFICSIMDIRLAKLAKSLGCSYSRYADDITFSTNKKEFPAELAISLPEGVVLGGILVSEIKRAGFDINDAKTRLSYKSTRQEVTGLTINRFVNVDRKYSNKTRALAHSLYSKGEYKLPDEDGKLVVGSIEKLEGRFGFIDQIDKFNNIQNKLSKQPEKYAPIHITLKNYRLKLNAREKAYSKFIYFKFFHGHASPTILTEGKTDRVYLKSAIRSLSTKFPEFLKKSADGKRNDINLNIFKSDEKSSYFINMSGGSADLKKFIERYMDEYSSYYGSIPKHPVIMLLDNDSGSDEVLNFLKNKVKSCPDDTDIMRKMSFIHVFKNLYIILTPLNASGEQTAMDYRV

SEQ ID NO: 1186 - protein, 591 aa, Arsenophonus sp.
  source 1..591: note = Related to NZ_CP084222.1
MTDTKKIDALKNASSRSDLAKLLNVNVIFLTNILYKVGTDNQYKQFSIPKRGTGIRVISAPNDKLKDLQRRIANLLIDCRQELFNSKKIKNNFSFGFEKDKSIISNASRHKGKRIILNLDLRDFFGSFNFGRVRGYFISNRDFKLTPVVATTLAQAACYKGVLPQGSPCSPVITNFICNIMDMRLAKLAKELGCTYTRYADDITFSTNKKIFPEELAIPELEGVILGSRLVNEITKAGFKVNDAKTRLAYKSSRQEVTGLTVNQIVNVDRRYAKKVRALAQTLYSTGKYKLPDKNGNMILGNLARLEGMFSFINFIDKSNNIENKKNKQPEKYVKVQEKLNGYRLRLNAREKAYSKFIYYKYFHGNTIPTILTEGKTDRIYLTTALHSLSAIYPNLIEETNNGKKIKLNICKSNTKASYFLDLSGGTANLKKFVMRYRDEYELYYGTDAKNPVIIILDNDSGPNKLLDHLKNKVENCPNDVKSMRRMKYIHVTHNLYIVLTPLSESVRETSMEDLFSPEVLNITLNGKYFNKANDQDTETEYSKHIFSTKVVRDKNRNIDFKGFKPIFDAIEAIIKHYQELSKSRIINKAR

SEQ ID NO: 1187 - protein, 586 aa, Klebsiella pneumoniae
  source 1..586: note = Related to QKNL01000001.1
MKNTPGLDDLKAATTRRDLAKLLNVKLVFLTNVLYRIGVDNQYSNFPIPKRSGGVRIISAPSSKLKDLQSKIAKLLINCRQEIFAINGIENNLSHGFEKDRTIITNALKHRGKNVVLNLDLSDFFKSFNFGRVRGFFLYNKDFKLHPDIATTIAKAACYQGSLPQGSPCSPVITNLICNILDVRLAMLAKKLGCAYSRYADDITFSTNKKDIPEELALNVTDGVTLGRKLRNEIERAGFEINDSKTRLSFKPARHEVTGLTVNRFVNVDRRYSKKVRALAHRLYQTGSYTIKNADGEVDGTLQQLEGMFGFIDQIDKFNNIVNKKNRKKEKYILAKQSILEHRSRLNAREKAYAKFIYYKNFHGSIIPTIMTEGKTDRVYIKTALLSLSGRYPGFIIRDNKTKKEKINLKIINPQFKEKYFLDIEDGAASFEKFVRRYDSEFKSFYGTKANNPVVMILDNDTGPNELLNYISRECPTCPNTVEDIRKMPFVHVMHNLYLILTPLDATGGMTAMEDLFDAKTLGKDLEGRKFNRGKKFNPKKEFGKDEFSIKVVRDMAKDIDFNGFNSIFEALTDVVKHYRDSIKAP

SEQ ID NO: 1188 - protein, 441 aa, Escherichia coli
  source 1..441: note = Related to AP022044.1
MFKPTYLARLQACCNKFELADLLQIKVTFLTNVLYRIRPENQYKKFTIKKKSGGEREIFAPDEKLKDIQQRLSELLYICQEEIWAKNNIKQNVSHGFEKNKTIITNAERHRDKNIVFNIDIENFFPSFNFGRVRGYFIANQNFKLHPNVATIIAQIACLDGSLPQGSPCSPVITNLICRILDFRLSKLAVTYGCSYSRYADDITFSTNKKNIPDALVSNEKENEPGKILVEEIHRAGFTLNHNKNRVSRCTSRQQVTGLTVNKKINVSREYIKNTRAMAHSLYFEGSYTLIEKDGKHRKGTLSELEGRFAFIDMLDKYNNVEAKKNARPERYVVKGFGLDFKQRLNSREKAYSKFLYYKNFYGNEQITILTEGKTDPVYLKCAIDSLFLDYPQLVREEKNTKNRVLKVNLFKTNDKKKIFSRFVWWSCRLFEVFQTTWFTL

SEQ ID NO: 1189 - protein, 589 aa, Enterobacter sp.
  source 1..589: note = Related to JABXQH010000001.1
MEFTIMFTPSYLERLKSCKTKFEFARLLQIKVSFLTNVLYRIRPEHQYERFIIKKKSGGDREIFAPTEKLKDIQRRLSDLLYVCQSEIWKTNNITPSLSHGFEKNKTIITNAERHRNKTNVLNIDLEDFFPTFNFGRVRGYFIANQYFNLHPSIATIIAQIACYDGKLPQGSPCSPVISNLICNILDIRLSKLALSNGCSYSRYADDITFSTNKNQFPDSIVINENSNELGPLLVNEIEKAGFKINNNKTRILRHTSRQEVTGLTVNKKINVNKDYIKKTRAMAHALYKEGDFTLLDISGKPRKGTLNELEGRFVYIDMLDKYNNINAKKHTLPEKYVLKKTGINFTLKLNSRETAFSNFLHYKYFYGNIKPTVLTEGKTDPIYLKCAIDSLYLSYPALVRVDDRTKNRILNITLFKTNAKKEYFLDLYGGAADYVRFFRRHREQCKKFERQPPKNPVIIVLDNDTGPSDFINNIIKEYSHLPRKSEDVRKHKFLHLENNLYVLLTPLLAGDKQSCMEDFFKDEVLTKTINGKSFDKSNNHDSTTTFGKDRFANNIIRENRQTIDFSLFKPILDAMVDINNHFKNLYYP

SEQ ID NO: 1190 - protein, 579 aa, Klebsiella quasipneumoniae
  source 1..579: note = Related to CP047281.1
MVAPTTIERLRLITTRQELAALLNLKAHFLTNILYRNGVNTQYSQFRIPKKDGSFRLISSPSSKLKDIQKRLAELLYECQANIHFERKINPVLSHGFEKNKTIVTNATRHRNKRILLNIDLENFFESINFGRVRGFFIANNDFKLSPLIATTIAQIACFNNSLPQGSPCSPIISNLICTILDIRLSKLAQKNGCQYSRYADDITFSTNKKEFPQELVIDNDVVNVGAVLLKEIERAGFRINHRKTRLLYSTSRQEVTGLTVNKKVNVDNRYYKKVRAMAHTLYKDQSFAIIKENAKPQKGTLNQLEGMMSFIDSIDKYNNKLKLANKQPQKYQSFNYGLNYEGKLNRREKTLSKFLYYKYFHGLHVPTILVEGKTDRVYLKCALRSLFLTYPTLVKKNNATGNINYSLNFFRESTRTSYFLDISGGAAEFEKFITRYPEQYKRFNHTPLYPVIMILDNDSGTRTIVRKISKSLGVTEDSIKKNSFTHIIHNLYIVLTPLLPGDRDSCMEDLFDSSVLSTVIDGRSFDKSNNYNKSTHYGKNDFSLKVIKVNEKNINFSGFLPVLNAVRDCLVHYNNISK

SEQ ID NO: 1191 - protein, 585 aa, Klebsiella pneumoniae
  source 1..585: note = Related to WBVV01000002.1
MAPLSILERLQNAANRQDLASILNLKTAFLTDVIYRLKAETQYTQFTIPKKNGAPRVISAPTTKLKDIQRRLADVLYLCRAEIYKKYNINPVLSHGFEKEKSIITNAERHRGKTLLLNIDLEDYFDSFNFGRVRGFFLSNRDFRLNNTVATTIAQIACFQNGLPQGSPCSPIISNLISGVLDIRLSKLAKKYGCNYSRYADDLTFSTNKKTFPKEIADVGGESVTLSPTLIKEIIKAGFKINDKKTRVCYKTSRQDVTGLTVNKKVNVGKEYAKVTRAMAHSLYKDGSFVIVTESGKIEKGTCAKLEGRFGFIDSIDKYNNLKLKNARQLEKYQSVNHGLNYTAKLNSREKAYSYFLYYKNFHGMEMPTILTEGKTDRVYLKCALKSLANSYPLLFNSSDDSSKNEYRVNFFKATEKTSYFLDISGGATDFKRFILRYQEQKKRFEKFKPKHPVIMLLDNDSGPKDLLNHLKDKVKNCPNDVDTIRKARYTHIFDNLYLLLTPLLPGGKESCMEDLFDSTVLSTVLDGKTFNKSNDTDTKTEYGKHVFSTKVIKANCKTISFEKFKVIFDGIEEIIADYSKRCKV

SEQ ID NO: 1192 - protein, 545 aa, Vitreoscilla sp.
  source 1..545: note = Related to JAGOYO010000023.1
MKISRLKLLSSPSELAQLLNIPQKFFLYHLYGQQPTNQYMQWSIPKKNGGKRNITSPNPELKMIQSRLANYLQECLQEIRSNQNFHINLSHGFEVDKSILTNAEIHIGQKYILNIDLENFFHSINFGRIRGFFIKNVHFQLHPTIATCIAHIACYNNYLPQGSPCSPVISNLICSVLDIRLKNLAKKYKCFYTRYADDLTFSTYLKYFPEQIAKSNYYLNVELSALLIKEIQKAGFNINPTKTRLQHTNIRQEVTGLTVNKKLSVHTDYRNLCRAKAHHLFSHGYYFTFDKQTLSQRSGSLKELEGQLAFINSLDKYNREINKAKTEKTNKRENLYGKFIFYKNFLCNEKTILLTEGKTDIQHIKCALIGLKLNTLSNSLQFYKHSPSKTFLMTYICQQKLNFCAGSPGLKAFIKAYNRLYKSILKGKHKPSNPVIIIVDNDHEGEDIKKIIMKEFNIPINTNQPTRIIYNLFIIFLSPPSFMSSHTNTAPHRNIEIEDLYPQYILDTQLNGKKFNRTNHESTDTEYGKDSFVSKVIKSKIDKPI

SEQ ID NO: 1193 - protein, 582 aa, Bacillus altitudinis
  source 1..582: note = Related to CP024204.1
MKEFNQIKTRNELADFLNIPRKQLSYVLYVKGINNLYNSFKIRKKNGGFREINAPLEELKGIQRRLQEVLYKKIGNKWINRNISHGFERNRSIITNAIVHRNKRIVLNIDLENFFESIHFGRVRGFFNKNKNFSLPIDVATVIAQIACYEGRLPQGAPSSPIISNLICEILDYRLLKIAKKYKVNYTRYADDLTFSTNDKNFLFLQREFYEEISQELIRTGFKINEKKNRLQLRDSRQVVTGLVVNKKINVNRIYYKETRAMAYQLYKQGSFKINDEPATINQLEGRFAFINQLTWHNNLVDGITANFNNFTSREQQYQRFLFYKYFFANSKPVIVTEGKTDVRYLKSALKSLYKDYPKLIVKHKDGSFEFKIHFLKKTKRLSYFLGIYKDGANALNNIYQFFGSKNSKLNYLNYFKKISGNSPENPVILLFDNEIKSGNKKPIGKFLNYAGLDDEKKTTLKKENMVNIVDSLYLLTVPLINGKLECDIEDLFDNNTLFLKIEGKEFSKKDSYDVSKYYGKEIFSQHISQNYSDINFNQFRPVLDNINKIIDVYTRQNDNMLVNLELKKVDKRNMNKVELFK

SEQ ID NO: 1194 - protein, 582 aa, Bacillus cereus
  source 1..582: note = Related to JH791914.1
MREFNEIKTRNELADFLNVPRKQLSYVLYKKGVDNLYTSFEINKKNGSVRKINAPLEELKDVQRKLAEVLYKHMRNKWKKKNISHGFEKNKSIITNAKIHRNKRLVLNIDIENFFESIHFGRVRGYFSKNNNFLLPIEVATVIAQISCYKGKLPQGAPSSPIISNLICEILDHRLLKIAKKYKLDYTRYADDLTFSTNDKKFLGLQKAFYKVISKELIRAGFKINEKKNRLQLRDSRQVVTGLVVNKKINVNRIYYKETRAMAHQLYKEGSFEINGEPATLNQLEGRFAFINQLTWYNNKVDGIKTNFNNFTSRERQYQRFLFYKYFFSNSKPVIVTEGKTDVTYLKSALKSLYKEYPNLITKHSDGTFEFKVSFLKKTKRLGYFLGIYQDGGSALNNIYNFFGSKKSTLNYLNDFKKISGNLPKNPVILMFDNEIKSGKKKPIGQFLSHAGLADKKRLILESEYMVDVIDSLYLLTVPLIDGKSECDIEDLFEKSTLSHKIEGREFSKKDHYDTSKCYGKEIFSQYILKNYSDINFSEFRSVLNNINNIIDIYKKRLADAEHNLEAENIDKSSADKMLLEI

SEQ ID NO: 1195 - protein, 581 aa, Cytobacillus firmus
  source 1..581: note = Related to JACWFJ010000008.1
MMEFDEIKTRNELADYLNVSRKQLSYVLYVKGINNLYTSFEIHKKNGGVRKINAPLEELKDIQRKLTEALHSHMKKKSKKKNNISHAFEIDKSIITNAEVHRNKRLVLNIDLKDFFGSIHFGRVRGFFNKNNKFLLPIEVATVIAQISCFEGKLPQGAPSSPIISNLICEILDYRLSKISKKYKLDYTRYADDLTFSTNDKNFLGLQDEFYIEISKELIRAGFSINEDKKRLQLKDSRQVVTGIVVNNKLNVNRDYYKETRAMAHQLYKQGKFEINGEVATLNQLEGRFAFINQLTWYNNKKNGIKPKSFRNLLSRELQYQKFLFYKYFFANPKPLIVTEGKTDIVYLKSALKNLHSEYPNLITKNSDGSFEFKVSFLKKTKRLKYFLGIYQDGGSALNNIYDFFTGKKNTPDFLSYFRLISNTLPKNPVILIFDNEGKNKPLGLFLNHAVLDVKKREILDSSYMVDLIDNLYLLTVPLIDGKSECDIEDLFEDITLSYEISGRKFTKEDKYDTSKYYGKDMFSKYILNNYADINFNEFRSILDNINSIIGIYTNGIVGTGQELEAKNIDKSSADKVLLEI

SEQ ID NO: 1196 - protein, 583 aa, Rummeliibacillus sp.
  source 1..583: note = Related to NZ_ML122604.1
MSEFSEIKTRNDLADFLNIPRKQLTYVLYVKGINNLYTSFEIYKKSGGARRINAPIEELKDIQRKLAEALYKHKKRKWKKKNNISHGFEKDKSIITNAKIHRNKRFVLNIDLENFFESFHFGRVRGFFIKNHNFLLPIEVATVIAQISCYEGKLPQGAPSSPIITNLICEILDYRVSKMAKKYKLNYTRYADDLTFSTNDKNFLRLQTEFLKNISKELIRAGFKINEKKTRLQLRDSRQVVTGLVVNKKINVNRIYYKETRAMAHQLYKQGEFEIKGEPATLNQLEGRFAFINQLTWYNNKIDGVKHHFNNLTSRELQYQKFLFYKFFFANPKPLIVTEGKTDIAYLKSALKNLYKEYPNLISKNSDGTFEFKVSFLKKTKRLKYFLGIYQDGGNALNNIYNFFDSKKPAPNYLSYFKTISNTLPMNPVILMFDNEIKSGNKKPIGKFLNYANLDAAKRETLENNYMVDIIDNLYLLTVPLIGGKSECDIEDLFEEITLLNKIDGKKFIKADKYDVTKYYGKEIFSKYIINNYTDINFTKFRAVLDKISNIIETYTKGLVDTGHNLETKIKDKSSADKVPLEI

SEQ ID NO: 1197 - protein, 585 aa, Bacillus thuringiensis
  source 1..585: note = Related to NFCM01000080.1
MMEFQDIKTRNDLADFLGIPRKKLSYLLYKKEINTLYTSFEINKKNGGVRKINAPLAELKDIQRKLSEALYKHKKKKQDIKNNLSHAFEKEKSIITNAKIHRNKRLVLNIDLENFFGSFHFGRVRGFFIKNNNFLLSSEVATVIAQLTCYEGKLPQGAPTSPIITNLICEILDQRLLKISKKYKLDYTRYADDLTFSTNDKNFLERQTEFYELLSSELIRAGFKINEKKKRLQLRDSRQVVTGLVVNKKINVNRIFYKETRAMAHQLYKEGKFEINGKLATLNQLEGRFSFINQLTRYNNKIDGDKHNFNILSSRERQYQKFLFYKYFYANPKPIIVTEGKTDIAYLKAALKNLHNDYPNLITKSSDGSFEFKVSFLNKTKRLAHFLGIFQDGGSALNNIYNFFDDKAKKTTPSYLDYFKEISNTLPTNPVILMFDNEINSKKNKPIGSFINHAKLGDKKKGILLEQNMVNIVDNLYLLTVPLIDGKLECDIEDLFEKSTLSQKINGREFCKKDKYDYSKYYGKEIFSKYILDNYTDINFNEFRSVLNNINNIIDIYTKGLVDTGGNPKAKSLDKSSEDKVPLEV

SEQ ID NO: 1198 - protein, 582 aa, Bacillus safensis
  source 1..582: note = Related to NZ_CP015611.1
MEFQDIKTRNDLADFLRIPRKKLSYLLYKKGINTLYTSFEINKKSGGFRKINAPLAELKDIQRKLSEALYKHKKKKRNIKNNLSHAFEKEKSIITNAKIHRNKRLVLNIDLENFFGSFHFGRVRGFFIKNNNFLLPTEVATVIAQLTCYEGKLPQGAPTSPIITNLICEILDQRLLKISKKYKLDYTRYADDLTFSTNDKKFLERQTEFYEILSSELKRAGFKINEKKKRLQFRDSRQVVTGLVVNKKINVNRIYYKETRAMAHQLYKKGSFEINGQPAKLNKLEGRFAFINQLTWYNNKVEGIKTHFSNFTSRELQYQRFLFYKYFFANPKPLIVTEGKTDVIYLKSALKSLYKEYPNLITKHTDGRFEFKVSFLKKTKRLGYFLGIYQDGGSALNNIYNFFGSKKSNLNYLNDFKKISGNLPTNPVILMFDNEIKSGKKKPIGQFFIHAGLADEKRKKLENEYMVNIIDSLYLLTVPLIGGKPECDIEDLFEKSTLSHKIEGKEFSKKDNYDVSKYYGKEIFSQYILKNYSDINFNEFRSVLDNINNIMDIYQKRLADTERNLEAKNIEKSSADKVLLEV

SEQ ID NO: 1199 - protein, 583 aa, Bacillus velezensis
  source 1..583: note = Related to CP048002.1
MREFNDIGTRNELADFLKIPRKQLSYVLYVKSINNLYTSFEIHKKNGGVRNIKAPLEELKDIQRKLAEALYKHKKKKQGRKNKLSHAFEKNKSIITNAEIHRNKRLVLNIDLENFFESFHFGRVRGFFTKNKNFLLPIEVATIIAQLSCYEGKLPQGAPTSPIISNLICGILDYRLLKITKKYKLNYTRYADDLTFSTNDKNFLNVQTKFYEEISNELIQAGFKINEKKTRLQYKDSRQTVTGLVVNSKINVNRTFYKETRAMAHQLYKQGNFKINSESADLNQLEGRFAFINQLTRYNNQKDGDKHNFYNLSSRELQYQKFLFYKYFFANPKPLIVTEGKTDIVYLKAALKKLYNEYPDLITKDINGTFEFKVSFLKKTKRLGYFLNIQEGGTGLKNINDFFNSNNAKKSAMNYLNYFKTISNTLPQSPVILMFDNEIKSGKKKPIGDFLHHAKVDNEQVDTLKSEHKINIIDNLYLLTVPLIGKSECDIEDLFDNTTLSHKINGKKFIKKDDYDTSKYYGKDIFSKYILDNYLNIDFNNFRSVLDNINNIINIYMKRVVDTGRNIETTKNIDESEKVPLEI

SEQ ID NO: 1200 - protein, 584 aa, unidentified
  source 1..584: note = Related to nan
MMEFNDIKTRNGLADFLKIPRKQLSYLLYFKDVNNLYTSFEIRKKNGGSRKIKAPIEELKDIQKKLAEALYKHKKEKRGKKNNISHAFEKDKSIITNAKIHRNKRLVLNIDLENYFESFHFGRVRGFFAKNNDFLLPIEVATVIAQISCYEGKLPQGAPSSPIISNLISKILDHKIMKIAKKYKLDYTRYADDLTFSTNDKKFLDLQSEFYEEISKEIKRAGFKINEKKKRLQFRDSRQVVTGLVVNKKINVNRVYYKETRAMAHQLYKYGKFGINGKPATLNQLEGRFTFINQLIWYNNKINGEYSNFNYLHSRELQYQKFLFYKYFFAHPKPLIVTEGKTDIAYLKSALKSLYKEYPNLITKKDDGTFEFKVSFLNKTKRLKYFLGINQDGGSALNNIYNYFDSKKPAPNYLSYFKQISNNSPINPIILMFDNEIESGKNKPIGKFLKHVGLDDGKKVILEDKYMVNLIDNLFLLTVPLIDGKAECDIEDLFKDDALLHKIDGREFIKKDKYDVSKYYGKEIFSRYISDNYSNINFKNFKSVLNNISNIIDIYTHRLVDTEHDTEGKKIDESNANKVPLSII

SEQ ID NO: 1201 - protein, 585 aa, Bacillus tequilensis
  source 1..585: note = Related to CP048852.1
MMKFNDIETRNDLADFLKIPKSQLSYLLYFKDVNNSYTSFDISKKNGGIRKIKAPTDELKEIQRKLAEALYKHREKKQNNNNISHAFKKDKSIITNAKIHRNKRFVLNIDLENYFESFHFGRVRGFFANNKNFLLPMKVATVIAQISCYDGKLPQGAPTSPIISNLISEILDRRIMKIAKKYKLYYTRYADDLTFSTNDKNFSNLQTEFYEEISEEITNSGFKINDKKNRLQFRDSRQVVTGLVVNKKINVNRIYYKETRAMAHQLYTHGKFEINGEPATPNQLEGRFSFINQLTWYNNKIDGEKHTFYNLSSRELQYQKFLFYKYFFANSKPLIVTEGKTDIAYLKSALKNLYAEYPNLINRNSDGTFEFKVSFLKKTKRLAYFLKINQDGGSALNNIYDFYNDRKRNKSTPNYLRIFKELSNTSPENPVILMFDNEIKSEGKKPIGSFLNHAKLNFKKKTKLSNDYMVDIVDNLYLLTVPLVKGKSECDIEDLFDDGALSQIIDGKEFTKENDYDHSKYYGKEIFSKYVESDYSNINFDRFKSVLDNMNFIIDTYKKEHLNKEHSLDTINTDNSNKDQVPLEV

SEQ ID NO: 1202 - protein, 562 aa, Sporosarcina sp.
  source 1..562: note = Related to JADPRZ010000022.1
MRAFYDVKNRNEFADLLKIPRKQLSYVLYIKGINNLYASFEIPKKDGGIRKINAPLEELKVIQRKLAEALYEHKKSKRKNNNISHAFEKDKSIITNAKIHRNKRFVLNIDLEGFFESFHFGRIRGFFLKNKDFLLSEEVATVIAQISCYEGKLPQGAPSSPVITNLICEILDHRISKVAKKYKMNYTRYADDLTFSTNDRKFLDLHVKFYGEISEELIRAGFIINEKKTRLQFRDSRQVVTGLVVNKKINVNRIYYKETRAMAHQLYKHGNFEINGEPATLNQLEGRFSFINQLTWYNNKIDGSKNHFSNLKSRELQYQKFLFYKYFFSNPKPLIVTEGKTDIAYLKSALKNLYNEYPNLITKNSDGTFEFKVSFLKKTKRLRYFLGINLDGGSALNNIYNFFDSKKPAPNYLNYFKSTSNTSPTNPVVLMFDNEIISGREKPIGKFLNHSALDTIKRKTLEKEYMVDVIDNLYLLTVPLIDGKPECDIEDLFEDITISHRIDGKEFTKDNKYDNSKYYGKEMFSKYILNNYSDINFNEFRLVLDNLNNIMNNYKNAFVERV

SEQ ID NO: 1203 - protein, 317 aa, Sporosarcina koreensis
  source 1..317: note = Related to NZ_LQYA01000064.1
MKEFYNIKTRNEFADFLNIPRKQLSYVLYVKGVKNLYTTFEIPKKNGGIRKINAPLEELKDIQTKLAEALYNHKEKGRKKNNNISHAFEKQKNIITNAKIHRNKRFVLNIDLENFFESFHFGRVRGFFNKNGNFLFPIEVATVIAQISCYEGKLPQGGPSSPIITNLICEILDFRIMKIAKKYKLHYTRYADDLTFSTNDKKFLNLQDEFYNEISKEIVRAGFNVNEKKTRLQFRDSRQVVTGLVVNKKINVNRVYYKETRAMAHQLYKQGSFEINGEPATLNQLEGRLSFINQLTWYNNKIDNIKHHFNNLSTRER

SEQ ID NO: 1204 - protein, 583 aa, Cohnella phaseoli
  source 1..583: note = Related to NZ_QRDZ01000063.1
MGEFNDIKTRNELADFLKVPRKQLSYILYVKGSNNLYTSFEISKKNGGTRNINAPSKELKDIQKKLAEALYNHKKKRGSADKISHAFEIDKGIITNAENHRNKRFVLNIDLEDFFDSFHFGRVRGFFNINIHFSLPIEVATAIAQISCYEGKLPQGAPSSPIITNLISEILDHRLLKIAKQYKLDYTRYADDLTFSTNDKNFLELQTEFYIKASEVIIRAGFKINEKKTRLQLRDSKQVVTGLVVNKKININSVYYKETRAMAHHLYKYGEFEINDKPATLYQLEGRFAFINQLTWYNNKLDGEKHHFQRLCSRERQYQKFLFYKYFFANPKPLIVTEGKTDVAYLKSALKKLYNEYPNLITKNSNGKFEFKISFLNKTKRLKHFMGIFQDGGTALKNIYDFFDSKKSDTTNYLSFFKKTSNTLPINPVILMFDNEIHSGDKKPIGNFLNHAKLDEKKREDLKHKNFVDIIDNLYLLTTPLIGDKSECDIEDLFEDSVLSHKIDGKEFTKKDKYDVSKYYGKEIFSKYILTNYSSINFTNFRTILDNIDNIINTHRKGGAGAGHDLEEKNIDMISAGKVLLEI

SEQ ID NO: 1205 - protein, 559 aa, Paenibacillus tritici
  source 1..559: note = Related to NZ_CP073365.1
MGEFNNIKTRNGLADFLKVPRKKLSYILFVKGTNNLYSSFEINKKNGGTRKINAPSEELKDIQKKLAEALYNHKKKKQRGSLEKISHAFEIDKGIITNAENHRNKRFVLNIDLEDFFDSFHFGRVRGYFHKNDHFSLPLEVATAIAQISCYEGSLPQGSPSSPIITNLICEILDHRILKITKQYRLDYTRYADDLTFSTNDKTFLESQTELYKRISEEINRAGFKINDKKTRLQHKDSQQVVTGLVVNKKINVSSVYYKETRAMAHNLYKYGEFNINGNLATLKQLEGRLSFINQLTWYNNKIDGEKHHFQHLCSRERQYQKFLFYKYFFANPKPLIVTEGKTDVVYLKSALKKLHKDYPSLIIKKSNEEFEFKVSFLNKTKRLKHFMGIFQDGGTALKNIYDFFASSKSNINYLSYFKKTSNKSPNNPVILMFDNEIESGNKKPIGNFLNHTKADDRTKMDLKQKYFINIIDNLYLLTIPLIGGKSECDIEDLFEDSVISHKIEGREFTKKDEYDISKYYGKEIFSKYISKNYSSIDFTNFRSILDNIDNIIKCTGCK

SEQ ID NO: 1206 - protein, 492 aa, Ornithinibacillus halotolerans
  source 1..492: note = Related to NZ_BMEY01000002.1
MITNARRHRNKRIVYNIDLEDFFETIHFGRVRGFFNKNRNFQLPIEVATVLAQISCFKGKLPQGSPSSPIISNLICQILDNRLLKVAKKYKLVYTRYADDLTFSTNDNKFLDNQFNFYKDLSEEINRSGFKINENKNRIQYKESRQVVTGIVVNKKLNVNRDYYKETRAMAHQLYKTGSFEISGESGTINQLEGRFAFINQLTRYNNELDNQKHDFHNLSSREYQYQKFLFYKTFYYNPKPVIVTEGKTDILYLKAALKNLYDEYPKLITKNNDGTFKYNISFLKRTKRLKHFLNINMDGASALTNIYDFFSNRNNKKAPNYLKYFKSLNNSLPKNPVILLFDNELNNNEKPISHFCRKVAKIGDEKIEALKTEFKVNLTENLYLLTVPLIGEKSECEIEDLFDESTLLERIEGKTFTKAAKYDVTKYYGKEIFSKYILKNYADVNFNEFRAVLDNINDIIDQYNVDFVTVGDKAKEVQLKRSDIDKVPVEI

SEQ ID NO: 1207 - protein, 575 aa, Paenibacillus sp.
  source 1..575: note = Related to FNNT01000003.1
MEQFNNLKSRNEFSDFLNIPRKQLSYLLYIKKINNSYTTFEIQKKSGGVRKISAPSDELKAVQKKLVEALYKHRKSGNGNKFSHAFEKQKSIITNARIHRKKRFVLNIDLENFFESIHFGRVRGFFNKNKNFLLPIEVATIVAQLSCYEGKLPQGAPSSPIISNLICEILDYRLFKIAKKYKLNYTRYADDLTFSTNDNNFVNNQDDFYNILYTELEKSGFKINEKKKRLQLNSSRQEVTGLVVNEKLNVNRVYYKETRAMAHQLYKQGEFTVNGNKATLLQLEGRFSFINQLTWYNNKIDDRKHNFHNLSSRELQYQKFLFYKYFFANPKPLIVTEGKTDVVYLKSALKSLYKEYPNLITKNKDGAFQLKVSFLNKTKRLQYFMGIFRDGGSALNNIYNFYDHKKSLPDYLKYFQNISNTSPSNPVFLLFDNEIKSKSKKPIGQFLNHISLTEKRKSLLEIDYIVKLIGNLYLLTVPLVKGKEECDVEDLFDNTVLSHTISGRIFTKEDNYDVSKYYGKDIFSKYILKNYNNINFNDFKPILDNISQVVDSYSKETVTNGVLEISHKDKVPLEV

SEQ ID NO: 1208 - protein, 565 aa, Halobacillus sp.
  source 1..565: note = Related to JAIEZV010000001.1
MLKFNEIKTRNELAEYLNIPRRQLSYILYVKGINNLYTSFEIPKKNGGSRKINAPSGDLKDIQLKLAEALYAHVKKKLNKKNNISHAFEKNKSIITNAKIHRNKRWVLNIDLENFFESIHFGRVRGFFNKNNNFLLPIEVATVIAQISCYEGKLPQGGPSSPVISNLICEILDYRLLKIAKKYKLNYTRYADDLTFSTNEKKFPELQMDFYKEISKEIRRAGFIVNEKKKRLQYEDSRQEVTGLVVNKKVNVNRTYYKKTRAMAHQLYKQGSFEIDGEPATINQLEGRFAFINQLTWYNNKIDGVKRNFRNLSSREREYQKFLFYKYFFSNPKPLIVTEGKTDIAYIKSALKNLHDEYPDLISKNSDGTFELKVSFLKKTKRLKYFLGIYQDGGSALNNIYEFFDSRKPIPNYIKYFKKISNSLPQNPVFLMFDNEIRSGKKKPIGKFIDHVKLGDEKKGILEKDYMVNIVDNLNILTVPLIKGKSECDIEDLFDDTVLSHIINGKEFNKKDNYDSSKYYGKEIFSKHILKNYTSVDFSEFRSVLNNINNIVNDQKKALKEKSMV

SEQ ID NO: 1209 - protein, 558 aa, Salibacterium salarium
  source 1..558: note = Related to NZ_RBVX01000055.1
MKELHNVKTRNEFADFLKIPRKKLSYILYIKKVNNLYHSFEIYKKSGGIRKINAPTVELKDIQQKLAKALYKHQADKWNKKRNNLSHAFEKKKSIITNAKIHRNKRFVLNIDLENFFESFNFGRVRGFFIKNNHLLLPNEVATVIAQLSCYQGKLPQGAPSSPIITNLICEILDLRLLKIARRYKVDYTRYADDLTFSTNKNSFLEQETRFLEEISKELKRSGFEINEKKTRLQFKDSRQVVTGLVVNKKVNVKRDYYKNTRAMAHTLYTQGKFEIDGEEATIDQLEGRFSFINQLDWSNNMKINRNNKDYKNRFASFKSSEREYQKFLFYKYFYANSKPLIITEGKTDIAYLKSALKNLYSEYPDLITKKNDGTFEFKISFLKKSKRLNYFLDINKDGAEGLKKIYNLFCEKGDVRNYSKYFNKISDTFPNNPVILVYDNEPSNGKPLNQIINYAGLERETIRDKLMITIVDNLYLLTVPPVNEPSESDIEDLFDIKTLEHKINGKTFNKNNEMDPTKHYGKERFSQFISENYCDINFDNFKHILNNISDIVKEYKK

SEQ ID NO: 1210 - protein, 550 aa, Alkalihalobacillus pseudalcaliphilus
  source 1..550: note = Related to LFJO01000006.1
MMEFYDIRTRRDLVDFLHISQKRFTYLLYRKGIDNLYTSFDLHKKSGGIRKIHVPNDELKSIQKALETILYTHKSGLLGGENNISHGFERKKSIITNAKIHRNKRLVLNIDLEDFFESFHFGRVRGYFKNNKNFLFSMEVATIIAQLTCYKGTLPQGAPSSPIITNLICKILDHRLLKISKKYKLDYTRYADDLTFSTNNKKFLEQQTEFYERIKGEIIRAGFKINDNKTRLQIKDTRQMVTGLVVNKKINVNRIFYKKTRAMAFQLYKEGNFQIEGKPGSLNQLEGRFAFINQLCRYNNKIDGEKHSFHNLNSRETQYQKFLFYKYFYANPKPLIVTEGKTDIAYLKSALKNLHLDYPNLITKKGGNFEFKVSFLKRTKRLRYFLNIDKDGADSLKNIYNYYDDKKQGPNYFSYFREISKDVPKNPVIFMFDNEIESGAKKPIGNFLKHSSIKAEKIEFLKTEYKIGLTSNLYLLTVPSIPGLPESDIEDLFNETTLSTLIGGKSXIDFNKFRPLLDKLNDTLEEYTKKRSKTLGVIKVSEKVKEPLNV

SEQ ID NO: 1211 - protein, 569 aa, Bacillus toyonensis
  source 1..569: note = Related to NVIC01000027.1
MKKFNDIKTRDDLSDFLKIPTSKLTYVLYKKKTSNLYTSFEIPKKNGGIRHIKAPLKDLKEIQKRLALSLWTHQKYIWKENGINPNISHAFQKEKSIITNAQIHRNKRFVLNIDLENFFDSFHFGRVKGFFEKNKHFLLPQGVATIIAQLTCYEGNLPQGAPSSPIITNLICNILDMKLLKISKKYKLNYTRYADDLTFSTNSKQFLVQQSDFHEEISKIIEKAGFKINEKKTRLQFRDSKQEVTGLIVNKKINVDRNYYKATRSMAHSLYTTGTFQIDGETGTINQLEGRFTFINQLDQYNNKINKSIDKTTKLGFHHLNSREKQYQKFLLYKYFFVNNKPLIVTEGKTDIDYIKSALKNLYIHYPNLVTKNSDGTFEFKVSFLNRTKRLRYFLDIQQDGADTMKNIYNYFNNNGKDSYPNHFKKFQESGFTPANPIIFILDNELSNKEKPLKNLTNHIKLDKDTAKKDFFKTNFYINITSNLYLLTHQLVKELPECEIEDLFDDLTLNQTINGKRFERDTKIFNSALHCSKAKFADHISQNYEKIDFNNFKCMLDNLNTIVSSYGNN

SEQ ID NO: 1212 - protein, 568 aa, Bacillus toyonensis
  source 1..568: note = Related to NVFR01000056.1
MDKFNNIKTLYDLSYFLKIPTRKITYILYKKGIDNLYTSFEIPKKNGGVRHINAPSKDLKDIQRKLVLSLWAHQKHIWEESGKNLNVSHAFQKEKSIITNAQIHRNKRFVLNIDLENFFESFHFGRVRGFFEKDKNFLLPKKVATIIAQLTCYEGHLPQGAPSSPIITNLICNILDMKLLKLSKKYKLNYTRYADDLTFSTNNKHFLDQQSDFYEEISKIIERAGFKINEKKTRLQFRDSKQEVTGLVVNKKVNVDRNYHKITRSMAHSLYTKDNFQIDGEFGEITQLEGRFSFINQLDRYNNLVKKDRDKNVKLNFRNLNSREKQYQMFLFYKYFYKNKRPLIVTEGKTDIEYLKSALKNLYKDYPNLITKKSDETFEFKVSFLRRTKRLSYFLDIKLDGADTMKNIYNYYIGKENNGYPNFVKKFKDLGSIPNNPVIFILDNELNNSNKPLKKIMNHMGLNKGVSKSSFFSEDYYIHITENLYLLTHQLVKDLHECEIEDLFDDSILNQKIHGKNFERDDKKFNINNHYGKANFADYISKNYRSINFSKFKCMLDHLNSIVTFKSN

SEQ ID NO: 1213 - protein, 571 aa, Acetobacterium woodii
  source 1..571: note = Related to NC_016894.1
MNKFNEIKTRNDLADFLDIPRSRLTYILYGKKIENFYTSFEILKKNGGTRQIDAPNKELKIVQKKIANALWNHYKGLAKKTSSKTNFSHAFEKEKSIITNAKIHRNKRFVLNIDLEDFFHSFHFGRVRGFFEKNNNFTLPKEVATVMAQLVCYEKHLPQGAPSSPIITNLICNILDFRMLKLSRKYKFDYTRYADDLTFSSNNKYFLEKHQEIYDEISNEIERAGFRINERKTRLQYRDSKQQVTGLVVNKKINVDRVYYKKTRAMAFSLYSCGSFEIEGDQGSINQLEGRFAFINQLDRYNNKLSSEKNDFRTLNSREKQYQQFLYYKYFFANKKPLIVTEGKTDVRYLKAAMKSLCDEYPNLITKSSDTEFEFKVSFLRRTKRLNYFLNITQDGADTISSIYKFSQANNEKGYINYLEYFKKISNTNPKNPVILIFDNELNGDQSKGKNNKNKPLQKFINLINLDNESHEKFKNSLSYNILGNFHLLTNQLVNNKDQCEIEDLIESKVWNNRIGGKTFSIDKEFDLDKHFGKEIFSQYIEQNYETIDFENFKPILDNISQIIDEYNVKS

SEQ ID NO: 1214 - protein, 566 aa, Eubacterium sp.
  source 1..566: note = Related to NZ_AP024845.1
MDTIDKVKSRNELADFLDIPRKKLSYILYIKGVDDLYTSFEIPKKSGGFRHIYAPQKDLKVIQRKLAEALYNCQKEIWNKCNVNPNISHAFQKEKSFITNAKIHRNKRFVINIDLENFFDSFHFGRVQGYFLKNRSFQLPSEVATVIAQLTCYQGKLPQGAPTSPIITNLICNIFDVRISKLAKKYRLDYTRYVDDLTFSTNNKEFLNIKNIFFEELEKEIINAGFSINKKKTRIQYRDSRQEVTGVVVNKKLHVSRDYYKRTRAMAYQLYKSGEYFIENEIKGTINQLEGRFSFINQLEWYNNKLNLEGKKLTYEYLNGRERAYSQFIFYKYFFANPKPLIVTEGKTDVTYLKAALKNLWKEYPNLVSRNSKGQFEYKVSFLQRSKRFAYFLNFKKDGADTMNNIYKFFSEEGGEKYPNYIEMFKNLGSTVPLNSVILLFDNELNNKNKPIYKFVSNKISDDRKKQLCTRTWINLLENLYLMITPLVGESEECDIEMLFDEATLSHEIGGKKFCKKDTYDTSKFYGKEIFSQYIMKNYSSIDFGGFKPLLNNIDVVIKDYKERIQ

SEQ ID NO: 1215 - protein, 565 aa, unidentified
  source 1..565: note = Related to JAAYPT010000052.1; note = Clostridiales bacterium
MNTIDKIKTRNELADFLEVPRKKLSYILYVKGVDNLYTSFDIPKKNGESRHIHAPQKDLKVVQKKLADALCTYQKEIWKRRNINPNISHAFQKGKSFITNAKIHRNKRFVVNIDLENFFDSFHFGRVRGFFLKNDDFQFSVEVATVIAQLSCYQGKLPQGAPCSPIITNLICNIFDIRLLKLAKKYCLDYTRYADDLTFSTNDVKFLEIEELFFEKLEKEINSAGFRINEKKTRIQFRDSRQEVTGVVVNRKLHVSRVYYKKTRAMAYNLYKTGEYFIEKDTQGTINQLEGRFSFINQLEWYNNKLYPGNKKLIFNNLNGREREYSQFVFYKYFFANPKPLIVTEGKTDVIYLKAALKSLWKEYPELVSRDKNGHFEYKIAFLRRSKRLAYFLNLKEDGADTMNNIYNFFSKNGGEKYPNYIEVFRKLGNRFPLNPTILLFDNELSNKEKPVCKFTKGKISEEQREELNSKTWIHMTENLYLLMTPLINERNESDIEMLFDNFTLSKEIDGKKFCKKDRYDTDKFYGKEIFSKYIMKNYSNIDFSGFKPLLSDIKIICENYKKKM

SEQ ID NO: 1216 - protein, 587 aa, Oceanobacillus iheyensis
  source 1..587: note = Related to NZ_LT727777.1
MSSILVGYLSASHNELPHVLFYVLGDSMNNFKDVRTRIALANLLGVPENKLTYVLYIKKIENLYTSFSIPKKNGESRHINAPQKDLKDIQKKLADCLYEYQKENRINNNIKTNISHAFERDKSFITNAKVHRNKRFVYNVDLENFFGSFHFGRVKGFFEKNKDFQLPSNIATVISQIACYQGELPQGAPSSPIITNLICNIFDIRLIKLAKKYKLDYTRYADDLTFSTNNKKFLDTISDFHSELSKEIKQAGFEINNNKTRLQFQDSKQEVTGLTVNKKLNVDKSYFKTTRAMAHHLYTQGSFKINDKDGTINQLEGRFAFINQLDRYNNKLDNGSHNIRELNSRERQYQKFLFYKYFYANNKPIIVTEGKTDILYLKAAIKKFHSEYPALINKRSDGKFEFKISFLRRTKRLNYFLDLQKDGANTMKKLYNFFSNKESRHFPNYSAYFKKNSVVPPKNPVIFVYDNELKNKKKPIIDFLNYANIKPEKRLELAEILSIKIINNLFLLTNPLIVEPESEIEDLFDEKTLSIVLNGKTFSRNDDSNDKEHYGKEIFSKHISSNYSKINFDNFRPMLDRITAIMETYEK

SEQ ID NO: 1217 - protein, 554 aa, Lachnospira pectinoschiza
  source 1..554: note = Related to JAJCRR010000003.1
MKKLKELQTREDLALYLAIPLQKLTYILYKSKPDSYYDTFEIPKKNGESRQIHAPSGDLKQLQRKLAQRLWDVYREFIEENEIQDNISHAFQKGKSIITNANIHRNKRYVLNLDLKDFFDHFHFGRVRGFFMKNKNFELPVEIATMIAQLTCYEGKLPQGAPTSPIITNLVCNILDMRLLKIAKKYRVVYTRYADDMTFSTNDKKFLENQENFMKSIKKEIESFGFEINDKKTRLLFCDSRQEVTGLVVNKKISVNREYCKRTRAMADAFYRRGIFEICGEEGSVNQLEGRISFINQIDCYNNKNDREQKHTFWTLNARERQYQKFLFFKYFYANTKPLIVTEGKTDIVYLRAALKKYYKEYPELIKKQDDNFEFQVTFLRRSSRLKYFLGIQKDGADTMKNIYNFYSGKNNAPKLYSWFAQNSCKKSQNPVIFIFDNEQVSDRPLKKFLNHLNNKGLLESSNYNHIQDNLYILTNPLVNGKKECEIEDLFDDVVLSHTIDGKIFSRKETDNEKYYGKAIFSQYVERQYDSIDFSNFKPMLEDIKSIVGSKKQG

SEQ ID NO: 1218 - protein, 552 aa, unidentified
  source 1..552: note = Related to JAFTZX010000234.1; note = Lachnospiraceae bacterium
MLKFNEISYRDELAEFLNIPLKKLTYILYVKKVDSYYTSFQIPKKNGDYRSIDAPYGDLKYIQKILAIKLWEYHNKYTSDNNINMKVSHAFEKKKSIITNAIIHKNKRFILNIDLSDFFASFHFGRVRGFFEKNKEFNLPIEVATIIAQLTCYKGHLPQGAPSSPIISNLICNILDMRLLGISQKYKLDYTRYAEDMTVSTNDFKFIYLVDDFMKEITKEIEKSGFSINNKKTRFVFNDSRQEVTGLVVNKKISVNRDYCKKTRAMADSLYRKGEYVINGSKGTIQQLEGRFAFINQIDRFNNNFNYVKHKIWDFNSREKQYQKFLFYKYFYANTKPLIVTEGKTDILYIKAALKKYYYKYPELIFKKDEDYIFNISFLKRSSFLEYFLNIYQDGADDIKNIYNFYVGNNHYPNLYEFFLEKSSLKPKNPVILIFDNEQNSDRPLKKFLNHIKIDSKNFKSGQCIYANIYLITNPLVKGKAECEIEDLFEETILENVIEDKKFSREKKYDINKFYGKDIFSKYINDNYKTINFDGFIPILDDINKVVTNMDF

SEQ ID NO: 1219 - protein, 561 aa, Trichococcus ilyis
  source 1..561: note = Related to NZ_FNYT01000006.1
MKKLMEIKTRNEFADVLEIPRQKLSYILYVKHVDEMYTSFQIPKKNGDFRNINAPIEDLKNLQKKLSELLWECQKEIRMNNGIDSNMSHAFEKEKSIITNAIIHRNRRIVLNIDLEDFFGSIHFGRVKGFFEKNRDFKLSSEVATIIAQLACYRGVLPQGAPSSPIITNLICNMIDIRLLKIATKYKVNYTRYADDLTFSTNNKPFLDKQSEFLSEVTKEIERSGFKVNNKKTRILFRDSRQEVTGLIVNEKISVNRKYYKKSRAMSYQLYKSGSFEIDNEEGSVNQLEGRFAFINQLDWYNNKRDGLEHNFWSLNSREKQYQKFLFYKYFFNNNKPLVITEGKTDIDYIKAALKNLYIEYPDLVTKNSDGTFNFKVSFLRKSKRLRYFLNIHLDGADTMKNIYKFYSDKENNKFPNFCKYFKELSGNIPTKPVILIFDNELTNKEKPLYKFVNYAGLNGLSQCIKEKLNTKLTDNLYLMTNPLVSNKTECEIEDLFDRETLSHEINGKFFSRNKTSDNNKFYGKEVFAKYISSNYREIDFDNFKPILNMLNDIVSLRKQA

SEQ ID NO: 1220 - protein, 570 aa, Pectinatus frisingensis
  source 1..570: note = Related to NZ_WIQQ01000012.1
MKFNEIKSRNELANFLGISIRKLTYILYSKKTESCYTSFDIPKKNGGVRNINAPTEDLKHIQVKLANALWEYKKSIIKEKNINVKISHAFEKRKSIITNAQIHRKKRFIFNIDLENFFNSIHFGRIRGYFEKNENFKFPIEIATIIAQLTCYNHCLPQGAPSSPIITNFICNILDMKLLKIARKYKMDYTRYADDMTFSTNDNNFLNEISTFYAEIEEKINQNGFTINGNKTRLAFQNSRQTVTGLVVNNKISIPREYYKLTRAMIYSLYKNGEFTANGVNSTIRQLEGRLAFINQIDLYNNRITDGPHSMRTLNSREKQYQKFLFYKYFFIPQKPLIVTEGKTDIVYLKAALKKYYYKYPDLITKIGDKFIFHISFLKRTKRLAYFLNINLDGADTIKNIYNFYTGIDSVPNICKWFDEKTNVRRINPVILIFDNEQENNKPLKKFINHMQKSRQNKEIKLENPRYKNIIDNLYLLTNPLMKGKNECEIEDLFNNQTLSHKINGKSFCRNGKFDSEQYYGKEKFSQYIASDYESIDFKNFQEMLNDINITINEYKSANENEEPIKKVCK

SEQ ID NO: 1221 - protein, 560 aa, unidentified
  source 1..560: note = Related to SAAV01000006.1; note = Clostridia bacterium
MDGFTNIASRNELADFLRIPRKKLTHILYIEEVNNLYTSFDIPKKSGEKRHINAPTDDLKSVQKRLAYALWEHQKNVWEEKDVNPNISHGFEKNKSIITNSRIHRNKRLVLNIDLENFFDSFHFGRIRGFFDKNIDFKVPIEVATVIAQLSCYKGCLPQGAPSSPILTNLIGNILDIRLLKLAKQYKLDYTRYADDLTFSTNNRDFLANYPTFIKELSIEIESSGFRINHQKTRLQYRDSKQVVTGLIVNQKINVDKCYYKVTRAMAHSLYSKGGLTINGKEGTINQLEGRFSFIDQIERYNNTIDEDSHDFRNLNGREEQYRKFLFFKYFFSNSKPLIATEGKTDVAYLKAALKNLFALYPDLISKTESDDFEFKVSFLRRTKRLRYFFGLSLDGADTLKNVYNFYTGKEGLPNYLKYFNVMSSDKPKNPVILLFDNELANKNKPLYKLVNNNGLNETQKKDLSDKLNVKISENLFLLTHPLAEGKDECEIENLFDIETLSHVIEGKTLSLDSKFDNNLYYGKEIFSKYISSNYKDIDFSGFRQLLDKLNEIITTFNST

SEQ ID NO: 1222 - protein, 594 aa, Enterococcus dispar
  source 1..594: note = Related to KE136354.1
MASFTDIKTQDDLFKLLNIPKKNMTYLLYNKEEKGPENAYHTFSILKKNGDKREIDAPNDELKFVQKRLAILLWANQKKSWRLNNTKPNISHGFEESKSIITNAKIHRNKKIVLNLDLEDFFPSIHFGRVKGFFEKNKNFKVPKEVALVIARLVCYKGRLPQGAPTSPIISNLICRILDFRLLKLAKKYRLDYTRYADDLTFSTNSSSFVDEEQFFLDKLEKEIIRAGFKINAKKTRLQFSNSRQEVTGLTVNKKLNVSKEFYKNTRAMAHKLYTTGEFLIDGESGTINQLEGRFAFINQLDKYNNGLEYEISLNKNNIEYQKFLLSTIKVENNHQIMLLNLNSREKEYQKFLYYKYFYGNEIPTIVTEGKTDIRYLKAALKKMYKDYPILIEKNGNDYKFKVHFLKRVNKKGNKDISRLKYFFNLPIDGADAMKNLYNFFSDKNNKLYPNYLEYFNFLSTSKPSNPTFFIFDNELNNDKKPLRGFINYINEKKNMQSLKDNGSLRVTENLYVLTNQLIGEAEENEIEDLFDKKTLEHKIGGKSFSKKSISEKNNFYGKEIFSKYVLDNFENIDFENFRPMLNNLSRIISDYGK

SEQ ID NO: 1223 - protein, 582 aa, Ligilactobacillus murinus
  source 1..582: note = Related to NZ_MPSN01000002.1
MNVFKDVENRDDLFERLGISKQLATYLLYGKGIDNCYSTFVIEKRNGDPRVINAPNKELKSVQKRLVNAILLQRSCNNQNGKSLKIAHAFEKNKSIITNAKVHRNKRFVLNVDLEDFFTSFHFGRVRGFFENDNTFKVPRKVATVIAQLTCYKGVLPQGAPSSPIITNLICRIMDLRILKLSKKFNLNYTRYADDLCFSTNDQKFLLDEQVFLSKLTREICKAGFKINSKKTRLQFRDSRQKVTGLVVNRKLNVPREFYKNTRAMANKLYANSEFTIDGKKGSIDQLEGRFAFINQIDRWNNSLELEQSITSNMLNYQKLLLRSKYQNKEIFGRLNAREREYQKFLYYKYFYGNDKPIVVTEGKTDILYIKAALKNLYQSYPDLVERIGNDYKFKVSFFKKSKNNKEIPRIKYFLNIPQDGADSMKNLYSFFSDKNSCYPNYLDYFQKKYSSKPLNPVIFIFDNEIENNKKPARNFVNHIKIRGALSELRDKQRLRIIGNLYMIVTPLVNSLKETDIESLFSSQTLGHKIDGKSFNRNGGKEYYGKGIFAQYVSKNYENIDFTNFKPLLDNLNKVIIDYKDG

SEQ ID NO: 1224 - protein, 594 aa, Enterococcus sp.
  source 1..594: note = Related to NZ_NGLI01000001.1
MSNLSEIKSREDLFRLLNIPKKNMTYLLYNKDKKGTENSYTTFTIKKRNGEDRIICAPNNELKFVQRRLANLLWVTQKKIWRENNIKSTISHGFEKNKSIITNARIHRNKKFVLNIDLEDFFSSFHFGRVKGFFEKDRNFKVPQEVALVIAQLTCYKGVLPQGAPSSPIITNLICNIMDLRILKLARKYKLDYTRYADDLTFSTNDIVFLHFEKEFLIKLEKEIVRAGFKVNPKKTRIQFSNSRQEVTGLVVNKKISVPKEYYKKTRAMAYNLYKNKEYFIDNVPGTINQLEGRFAFINQIDKWNNVLEYETSLDNNNLEYQKHLLTIKRKEKNHYNMLKLLNRREREYQKFLYYKYFYSNEKSTIVTEGKTDIRYLMAALKSLYKDYPNLVEKVGENFNFKVYFLKRSKKKDKREVSRFKYFFNLPIDGADAMKNLYNFFSDKNTLCPNYLKYFSSFESSKPASPNFFIFDNEISNKDKPLKTFINYVYAKSQSAKAEEMKEKLYLKIEENLYIVTHQVLDGCKENEIEDLFDEKTRGHIIGGKTFSPKGDSNNHYGKEIFSKYILKNYKYINFENFRPMLDNINKIITEYKN

SEQ ID NO: 1225 - protein, 572 aa, Listeria booriae
  source 1..572: note = Related to JAARYB010000009.1
MDYFSDIKTREDFFNILNIPLKNMTYLLYNKEKKGTENSYHSFEIKKRNGGVRVIHAPNKELKFVQQRLLKALWRNQTKVWHDKKINPSISHGFQKGRSIMTNAEIHRNKKFVLNVDLEDFFNSFHFGRVKGFFEKDRDFKVPQAVALIIAQLVCYKGALPQGAPTSPLITNLICRIMDLRLLKLAKRYKLDYTRYADDLTFSTNDSSFSRLSQEFLLKLESEIKRAGFNLNPEKTRLQYKNSRQSVTGLVVNKKLNVPNEYYKKTRAMAHTLYTNGSFLIDGVEGTLAQLEGRLSFINQLEKRNNLSINSGSKDYKNLGRREKEYQKFIYFKYFYANTRPTILTEGKTDSRYLKAALKKLYKNYPNLIEYKNGEFVFKILFLHRADKEKPNKTTRLKFFFNIGPHGADSLAELYYFSSNKKSKVPGYINYLEYFKKLNQNMLTKPTIIVFDNELSSNGKPLRTFINSLKDEQEMHISNIRRDLSTQVTDNLYILTNKLVGTRTEAEIEDLFDDKTRNKEIDGRTFSATDIGEQYYGKNIFSLYILKNYKEVDFSNFKPMLDKLNEIIINFK

SEQ ID NO: 1226 - protein, 598 aa, Enterococcus faecalis
  source 1..598: note = Related to CP022488.1
MVSYSDIQSRDDFFKLLNISKQHMTYLLYNKDKKGTENSYYTFEIEKKNGGVRVIHSPNDELKFVQKRLASVLWNKQKEIWNKKGIHPNISHAYEKNKSIITNAKIHRNKKFILNVDLEDFFSSFHFGRVKGFFEKDNNFKVPSEVALIIAQLTCYKGVLPQGAPSSPIITNLICKIMDFRILKIARKYRLDYSRYADDLTFSTNRTSFLDDKEAFMKILEKEINRAGFKLNENKTRLQYNSSRQEVTGLIVNKKLSVPREYYKQTRAMAHTLYKTGEFFINNEKGTVNQLEGRFTFINQLDKWNNKLEYDTTLNNNNFEHQKFLLSLNRKGDGGVQEKLKLLNTREREYQKFLYYKYFYGNTKPTIVTEGKTDIRYLKAALKKMYQDYPNLIEKKNNKFIFKVYFLKRIGNKETSRFKYFFGLEKDGADTMKNLYNFFSDLGNEKLYPNYLKYFNTFDKHPLNPTIFIFDNEISNSKKPLGSFMNYAFNKKKKVKQSKIDCLKENLFLKIEENLYVVTNQLLPEKDETEIEDLFDEKTLHHSINDKTFSKKGDPNLNYGKEIFSKFILSNYEEINFENFRPILNNINQIVRNFSKNL

SEQ ID NO: 1227 - protein, 591 aa, Listeria weihenstephanensis
  source 1..591: note = Related to NZ_CP011102.1
MPSFSDIKTRDDFFKLLNIPKQHMTYLLYNKEKKGTENSYYTFELEKKSGGVRIINTPNDELKFVQKQLTSLLWKAQKNIWNNSSLHPNISHAFQKEKSIITNAQIHRNKRFVLNIDLENFFNSFHFGRVKGFFEKDKNFKVPPDVALIIAQLTCYQGVLPQGAPSSPIITNLICRILDLRILKLAKKYKLDYSRYADDLTFSTNIRSFDAQEKEFLSVLETEIKRAGFKINTKKTRLQFNNSRQEVTGLIVNKKINVPKEYYRNTRAMANSLYKNEKFFINNEWGTINQLEGRFAFINQLDKFNNSLEYNSSLRKNSIEYQKSLLSTQLKENSNHNMLLLLNAREKEYQKFLFYKYFYANQKPTIVTEGKTDIRYLKAALKSLYKDYPEMIEKKGTKYIFKVSFFKRSKRFRYFFNFSLDGADSMKNLHNFFSDNNNKLYPNYWQYFDALNSSSSVNPIFFIFDNELSNKNKPLRNFVNHVCSVEKENADAQLKLLKEKLNLQLKDNLYLLTNQLLDGFTENEMEDLFDAKTLKHIIKGKTFSKNGDNKDHYGKEIFSKYILDNYTKINFENFRLILDNMNEIIHDYSPN

SEQ ID NO: 1228 - protein, 349 aa, Enterococcus sp.
  source 1..349: note = Related to NZ_MAEJ01000004.1
MRLTEIEDKNIFFEEFDISKRSMTHLLYVKGTDSFYESFEIPKKNGGFRNIDAPKGKLKYVQKRLAEILWETQIDVWKKYANTYEYNLYQKNLKDGIRYRVPMISHAFEVNKSIMTNAKIHRNKKFIINVDLKDFFKSFHFGRVKGFFEKNKDFKVPTEVAVIIAQLSCYKGVLPQGAPSSPIITNLICQIMDYRIMQLAKRFKLNYTRYADDLTFSTNNVQIVNEYQTFLKKLEKKIVKAGFEINEDKTRLQFNNSRQTVTGLIVNKKLNVPREYYKDTRAMANTLYKTGSFDVNERTGSINQLNGRFAFINQLDKYNNKLENNASIMKNNIEYQKYLLSVEKKEKNI

SEQ ID NO: 1229 - protein, 573 aa, Carnobacterium divergens
  source 1..573: note = Related to NRQF01000015.1
MIFINKFNAINSRNELFEFLKVKKEIMNYILYVKKTECSYNSFKIEKKSGGFREINAPDDELKVIQKKLALSLWLYQKEIWDEKGINPNISHAFEKDKSIISNARIHRNKKFVLNLDLENFFKSFHFGRVKGFFEKDRDFKVPPEVAVVIAQLTCYDGYLPQGAPSSPIITNLICRILDFRILKLAKKFKLDYTRYADDLTFSTNRKGFLADYIDFLEELSKEILRAGFKINDSKTRMQYSNSKQIVTGLIVNKKINIDSTYYRKTRAIAHTLYKGKEIEINGKKATIDNLEGRFAFINQLDRYNNAINAEITVGKKKKFAFNGREMQYRKFLFYKYFFANTKPLIVTEGKTDIKYIKSALKKLYKDYPNLVSKTSDGIFEYKISFLKKTNRLRYFLGIQKDGATALTEIYKYYAPSNGLNDPYINYMDEFKRISDSQAEKPVFLLFDNEMGKKSDKPLKKFVGCAKINEDKISELKDTLKLKLIDNLYVLTNPLVSNKEECEIEDLFDKKVLETVIKGKTFQRNEKKFNKEKHYGKEIFSTYIAENYESIDFSNFKKILDNIESISQKFKLG

SEQ ID NO: 1230 - protein, 576 aa, Megamonas hypermegale
  source 1..576: note = Related to NZ_NFIW01000013.1
MCEINNIKTKKDLVKILDISIKKLTYILYVKKVDNMYFSFDIPKKNGGVRKINAPEKTLRFIQRNLAKALSNYKKNICENEKISNRVSHGFEKNKSFITNARIHRNKLYVINFDLKDFFDCFHFGRVKGYFEKNIYFKLPKEIAIIIAQLTCYHGYLPQGAPTSPVITNLICNIFDMRILKLAKKYKLDYTRYADDLTFSTNEKEFIKVYSNFYKDLVKEIDKSGFKINEKKSRIQYSNSRQEVTGVVVNKKLNINREYYKKTRAMADSLYKTGRFFIDGKEGTINQLEGRFSLINQVVWYNNKILKEKEKHNKYIKKNVEIYKKSCTRERDYERFLIYKYFVINKEPLLITEGKTDKLYIQAALKSLYKEYPKLIIKNKNGNFEYKIDFFNRTKRINYFLDVNKTGADTLKNICNYYFDKVKNGYENYIEDFFKIINIKPKNPVILLYDNEFDTSGKKNNKPVAKLFNNDRLSNKKDYIIKNRFLKIKENLYVMVIPLVNDKKNCEIEDLFKDELLKQKIDDRIFDRKSNDNETKIGKDTFSKYVKANYKDIDFSNFRLLLDTIKNILNDYKNNE

SEQ ID NO: 1231 - protein, 582 aa, unidentified
  source 1..582: note = Related to nan
MCVIDHIKTRKELANILNISEKKLTYILYVKKIDNMYRTFSIPKKNGETREINAPEKMLNFVQKNLAKFLLNYRNGIYKTENINNKVSHGFEKEKSFITNAELHKNKRYVLNFDLKDFFDCFHFGRVKGYFEKNRYFKLSKDIATILAQLTCYKKCLPQGAPTSPIIVNLIFNMVDIQIIKLAKTYKLNYTRYADDITFSTNDKFFLEKYSEFENKFLYIIEKYGFVVNKNKTRLQYKDYRQKVTGLVVNKKINVTREYYKETRAMAHQLYKTGSFFIEENKSGTINQLEGRFSFINQIEKYNNIIDIKKGGKKHRIVTLSNKEKEYSKFLFYKNFFNMGKPIIFTEGKTDVMYIKAALKNLYKKYPNLIEETKTGFDYKIIFFRKSKKIRYLLNIEANGADTMKNIANLYSGSESFPNYIEYLKSISKQKPNNPIILLFDNEIESKNKPIKNFLSCKAVKSFYKDDILEKQLKEKNYACLKDNLYVQVTPLIGNIKEGDIETLFKKETLAHKINGKSFIKKDKYNNEYYYGKEIFSKYVYDNYRNIDFSNFVYLLDNINDIIKDYQIRKAGNDMHPKYWTY

SEQ ID NO: 1232 - protein, 555 aa, Fusobacterium sp.
  source 1..555: note = Related to CP024698.1
MSNYNNARESLSNFLNISLKYLTYILYVKKIENLYTTFKIPKKNGGCREINAPQNELKMIQKKLVFFLEEKMKDKFKTINISHGFVKERNIITNAKIHKNKKIVLNLDLKDFFDSFHFGRIKGFFEKNKDFKFSPELATLIAQLACYNGKLPQGAPSSPLITNLICNIFDIRVLNLARKYKLNYSRYADDLTFSTNYKGFIKNLEEFKEDILLEIKKNGFEANMKKYRLTFQNSRQEVTGLTVNKKINVSKIYYKNTRAMAYSLYKNGEFKIDGIKDGTINQLEGRFSFINQLDIYNNFEKNRTKKEKGKKDGIKSWNIYNSREKEYQKFLFYKYFFMNQKPLIVTEGKTDILYIKAALKNLYNDYPSLIIKEENKFIFKVSFLKRTKLLKYYLNLALDGADTIMNIYNHFVDAYSSFYNYNDYFKKLTKKQAFNPVVLIFDNEIETEKPLKKFLAHAFPKSREINEKKDIIKKNCKLNIIDNLYLLTINLVDDMKECEIEDLFIKDIHERFSFNKDNPDKNKFSKNILKNYKNIDFSNFKPFLNNLASILKEYN

SEQ ID NO: 1233 - protein, 559 aa, Fusobacterium canifelinum
  source 1..559: note = Related to NZ_CP068114.1
MFNFKNAREILSKILNIHLNYLSYILYVKKIENLYTTFKIPKKNGGYREINAPQNELKMIQKKFVSFLEEKMKEKFKTINTSHGFVKERSIITNAKIHKNKKIVLNLDLKDFFDSFHFGRVKGFFEKNKDFKSFFPELTSELSTLIAQLVCFNGKLPQGAPSSPLLTNLICNIFDVRVLKLAKKYKLTYSRYADDLTFSTNYKGFIRNLEKFEEDILLEIKKNGFEANMEKYRLTFQSSRQEVTGLTVNKKINVSRKYYKYTRAMAYSLYKNGEFNIDGIDGTINQLEGRFSFINQLDKYNNSESEKRKKFIARNVLNSREKQYQNFLFYKYFFMNEKPLIVTEGKTDILYIKAALKNLYNEYPNLITKEENEFIFKISFLKRTKLLKYFFNLSPDGADSMKNIYNYFGDKNSKFYDFYNYFKKLTNLEALNPVILVFDNEATENSKKPLKKFLNHIFSDKNDNDKKNLISYVRTKFKLKIINNLYLLTINLVDGLEECEIEDLFFEDTYKKFSFDKINPNKDKFSKNILKNYKNIDFSKFKPFLNNLESILKEYNKKD

SEQ ID NO: 1234 - protein, 566 aa, unidentified
  source 1..566: note = Related to JAGAAC010000102.1; note = Clostridia bacterium
MKLSEIRCREDLACLLKIKTSSLTYVLYRAKVNSFYKTFDIPKKNGGVRQINAPTDILKIIQERLASAIYSYMKNLRTEKNINVNIAHAFEKKKSIITNAQIHKNKYIVLTFDLEHFFDSFHFGRVAGFFEKNRDFHLPHNMAIILAQLTCYNGHLPQGAPTSPIITNLIFQICDMRILKLAKKYKLDYTRYADDLTFSTNNHSFIDEKESFQRELEREIGKAGFSINQTKTRMSLRNSRQEVTGLVVNKKINVNAGFYRKTRAMAHQLYQNGSFTIDGKEGSIQQLEGRFAFIDQLDHYNNKIDGKIHSFRDRNGREKQYSKFLFYKFFYANEKPLIVTEGKTDIRYLKAALKSLYLDYPELISRNKNGSYTFKVQFLHRTKRLSYFLDIAVDGAKPLYNIYKYFIKGRDSAYPNYYKFFSKDGEKKPRNPVVILLDNEMKPNKPLKGFLDQIKSTESEKNDLQQKLSLRLLASGNLYLLTNPLVDNKDECEIELLFTEETRGIKLEGKSLCLEEESFEKSNSYGKNIFSNYILQHYNEIDFSRFIPLLNALSSIIKNYSAEMRN

SEQ ID NO: 1235 - protein, 568 aa, Bacillus toyonensis
  source 1..568: note = Related to NVHA01000086.1
MKTFANIKTLDDLSIILKIPKKKLTYILYIKKPNNSYKSFKIPKKSGGERTINTPSTDLKDIQRSILKILWKQQKILWEEHKIKSNISHAFVKKKGILTNARVHKNKRYVFNMDLEDFFDSFHFGRVRGFFEKNRDFLFPQNIATILAQLTCYNGCLPQGAPTSPIITNLICNILDMRLLTVAKEFKLDYTRYADDLTFSTNDEKFVENLEDFKTKAKEIINHSGFKINEKKTRLQYKNSRQVVTGLVVNKKVNVNRDFYKETRAMANSLYKNGEIKINEKSATINQLEGRLSFINQIDRDNNKVNKKSNKKFHSHLSTLNGKEKQYQMFLFYKYFMANNNPCIITEGKTDIIYIKYALKKMHRDYPKLIKKNYDGTFQYKISFLNRTKRLKYFFNLELDGADTMNKIYEFYSNRNNDSFPNYNEKFEKFGVSPENPIIFILDNELSSKENKPLKKLISQVALDKTKIASFKENNFINITSNLYLTTHQLVKDLKECEIEDLFDNDTLNVKLNNKSFERDSKKFNDKIHYGKAIFADHVSKNYKNIDFSEFRPLLDNLNNIITNYSVN

SEQ ID NO: 1236 - protein, 567 aa, Bacillus sp.
  source 1..567: note = Related to NTTM01000084.1
MQTFENIKTLDDLSIILKIPNKKLTYILYIVKPDNSYKSFKIPKKSGGERTINTPSTDLKDIQRSIVKILWKQQKILWEEHKIKSNISHAFVKKKGILTNARVHKNKRYVFNMDLEGFFDSFHFGRVRGFFEKNRDFLFPKNIATILAQLTCYNGCLPQGAPTSPIITNLICNILDMRLLTVAKEFKLDYTRYADDLTFSTNDEKFVENLEDFKTKAKEIINHSGFKINEKKTRLQYKNSRQVVTGLVVNKKVNVNREFYKETRSMANTLYKKGKFEINGKTATINQLEGRFAFINQIERYNNGIYKNNNAPLKLCDLNGKERQYQMFLFYKYFFGNSKPCIITEGKTDIVYIQSALKNLYESYPKLVKKKADGTYQFKITFLRRSKRLRYFLDFQLDGADTMTKLHNFYCNTNNNSYPNYPEKFRKLGTTPKNPVIFVLDNELHNNEKPLRKLIKNVKLDKNLSEFDSSKEKYHINITSNLYLSTHQLVKGLQECEIEDLFDDNTLNTKIYDKTFERDSKKYSDKKNYGKAAFADYISKNYKDIDFENFKPLLNNINEIITTYSLS

SEQ ID NO: 1237 - protein, 568 aa, Sporosarcina sp.
  source 1..568: note = Related to NZ_CP071798.1
MYTFKNISTITDLAKILKIPKKKLTYVLYIKKTDNSYKFFKLPKKSGGERTIYNPSDDLKDIQRSIVNLLWTQQLIIWKENNIKPNISHAFIKEKSIITNARVHKNKRYVYNMDLEDFFDSFHFGRVRGFFEKNKDFLFPQNIATVLAQLTCYNGCLPQGAPTSPIITNLICNILDMKLLQIAKKFKLDYTRYADDLTFSTNDGHFLENIEEFKIQTERIIKYSGFKINKKKTRLQYQNSRQVVTGLVVNKKVNVNRKFYKETRSMANKLYVNGEFKINGKKASINQLEGRFAFINQIDRYNNSIKINNNKIQSKTRNLNGKEKQYQMFLFYKYFFANNNPCIVTEGKTDILYIKSALKNLYEEYPNLIQRNSDGTFNYKISFLNRTKRLRYFFNFELDGADTMNQIYNFFSNKNNDKYPNYQEKFRKLGSSPNNPVIFILDNELSNRDKPLKKLIKPLELENNSLKFNHFKDNNFVNLTSNLYLLTHQLVKNLTECEIEDLFDESILNTTLHNKTFEKDSKKFDDKLNYGKAAFADYISKNYNKIDFTEFKLLLDNLNEIITSHSSK

SEQ ID NO: 1238 - protein, 568 aa, Lysinibacillus sp.
  source 1..568: note = Related to JPUW01000004.1
MNTFENITTLDDLSRTLRIQKKKLTYILYVRRIENSYTYFTIPKKSGGERTINSPSTDLKEIQKSIDRLLRKQQIIFWEENNIKPNISHAFNKKKSIMTNAKVHKNKRYVFNIDLEDFFDSFHFGRVRGFFEKNKNFLFPQNIATILAQLTCYNGSLPQGAPTSPIITNLICNVLDMKLLKIAKKFKLDYTRYADDLTFSTNNTNFLENFEEFKDRVEAVIKYSGFKINEKKTRLQYKDSRQVVTGLVVNKKININRDFYKETRSMANTLYKHGEFKINGEQATLNQLEGRFAFINQIDRFNNDIYIKNNTVKPKLCDLNGKEKQYQMFLFYKYFFGNNKPCIITEGKTDSIYIKSALKKLYNLYPTLIKKNQDGSYNFKVSFLRRTKRLRYFFDFPLDGADSMKKLYNFYCNTNNDSFPFYAEKFKELNVVPKNPVIFILDNELENNSKPISKLIKATKLESDKQKLAFFKSKYYANISSNLYLSTHQLVKEKKECEIEDLFDVNTLETIINNKTFERNSTKYKDQNNYGKAVFANYVSKNYKKIDFNNFKPLLDAINEIVSNYTTT

SEQ ID NO: 1239 - protein, 571 aa, Enterococcus faecalis
  source 1..571: note = Related to VHRP01000005.1
MKTFENISTLDELSQILKVPKKKLTYILYVKRIENLYTSFEIPKKTGGERTISSPSTDLKEIQKNIAELLRKQQNIFLEENNIKPNVAHAFNKKRSIMTNANLHKHKRYVLNIDLENFFDSFHFGRVRGYFEKNKNFLFPQNVATILAQLTCYNGKLPQGAPTSPIITNLICNVLDMKLLKIAKKFRLVYSRYADDLTFSTNDRNILENLEEFLAQLEFIVNKSGFTINKKKTRLQYKDSKQVVTGLVVNEKVNVNRLFYKETRSMADTLYKTGEFRIGDDKGNLNRLEGRFSFINQIDRFNNKIGKGKNIGNKESKKLNGRERQYQMFLFYKYFYCNTKPCLITEGKTDIIYIKSALKKMYLSYPNLIEKNSDGTFHFKFLFLRRSKRMRYFFELKLDGADTMSKIYNFYCDTNNHNYPNYVKKFTEKSVSPINPTILIYDNELKNKDKPLSKVTNTTKIRQDEEKYNFLKTNHYVNVTSNLYVLTHQLVKGLPECEIEDLFDSNTLSVTINDKTFERDLKKFDENKNYGKAIFAGYISKNYLNINFDEFKPLLDNLNTIVTSYNLKSQT

SEQ ID NO: 1240 - protein, 564 aa, Enterococcus faecalis
  source 1..564: note = Related to NZ_CP046022.1
MKTFDNIKNLEQLSQVLKVPKRKLTYVLYVKRIENLYMDFEIPKKTGGTRKISSPSKDLKEIQKNIAKLLERQQEIFLKENNIKSNISHAFTKDRSIMTNALIHKRKKYVLNIDLENFFDSFHFGRVAGYFEKNENFLFPKKTAVILAQLTCYNGKLPQGSPSSPIITNLICNILDMKLLKISKKFKVDYSRYADDLTFSTNNNKFIEELDIFLSQLEKIINKSGFEINKKKTRIQYRDSKQMVTGLVVNNKVNINRKFYRETRAMAISQYHTGTFKIDNEEGNLKRLEGRFSFINQIDRFNKKITSKNTVVGKKTNILNGKEKQYQMFLFYKYFYCNSKPCIVTEGKTDIMYIKAALKNLYKFYPKLIEKKSDGTFHYRISFLKRSKRIRYFFDLSLDGADTMIKIYNCYCDVNNVNFPNYAKFFENKGVLYTNPTVLIYDNERSNTEKPLYKALKATKINENKEKLESLKSNYYTNITSNLYILTHQLVNGLAECEIEDLFDSKILEMKIDGKSFERNLKDFNDTEHYGKAIFADYILKNYHAINFDNFRPFLDCLNKIVES

SEQ ID NO: 1241 - protein, 575 aa, Listeria monocytogenes
  source 1..575: note = Related to CP076644.1
MDTFEDINSLEELAKILKIPKKFLTYILYKKKVENSYTNLLIPKKSGGQRNISIPMKELKDVQRNIVKVMLTQQNIFQFENNIKSNISHAFTKDKSIITNAEIHKNKRFVLNIDLEDFFKSFHFGRVQGYFEKNKSFLFPKNIATVLAQLTCYNGSLPQGAPSSPIITNLICNILDMKLLKIAKKYKLDYSRYADDLTFSTNNKNFEEKSEEFFYQLEIIIKQSGFKINPKKTRLQYKTSRQIVTGLVVNKKVNVTREFYKNTRAMANSLYKTGAFTINDTKGTLRQLEGRFSFINHINKVNNKKRQINDKESTLNFRCLNGQEKEFQKFLFYKYFFNNEKPCILTEGPTDILYLKSALKSLYEDYPKLIKKVNGEFIFKIFFLERSKKKKTQKVSKMEYFFGLKENGADTMIQIYNYYVSNKQKKHCPNYSELFKKMNVTSKNPCILILDNELSVKEKPLKNLLNYMGIIDGCKIAELKEKCYLNSTSNLYVATNPLVNELKECEIEDLFEEAVLKTELNGKTFEKSEKAFNDTRNYGKRALSKYVWNNYDNINFENFRPLLDAIDQIVTKYNH

SEQ ID NO: 1242 - protein, 583 aa, Bacillus subtilis
  source 1..583: note = Related to NZ_CP009684.1
MNTFEDITSIDNLSNILRTPKKKLTYILYIKKIQNSYTTFQISKKSGGQRIINVPSKDLKDIQRNIVNMLLNQQKKFYYENKIRLNIAHAFTKEKSIITNAKIHKNKRFVLNIDLENFFESFHFGRVQGYFEKNKNYLFPKNIATVLAQLTCYNGSLPQGAPSSPIITNLICNILDMKILKIAKKYKLDYTRYADDLTFSTNNKGFDEKSEEFISQLEMIIKQSGFKINRKKTRLQYKQSRQVVTGLVVNKKVNMPRNFYKNTRAMANSLYKNGSFTINGVEGSLKQLEGRFSFINHINKENNKEKKKIDKNSKLGFRNLNGQEKEYQKFLFYKYFFNNEKPCILTEGPTDIIYLKSALKNLYTDYPKLIKKVNDDFIFKISFLKRGEDPKASKAHKKIKGQKTSKLQYFFGLEKDGADTMKQIYNFYVSDKQKKDCPNYSEIFKNMNVNSKNPCIFILDNELNNKDKPIKTLTNYMDLKPDKLDELCDKNYLKIISNLYIVTNPLVNELNECEIEDLFELDTLKTELNGKTFERCEKKYNPSENYGKRAFSKYVWKNYEDINFENFRPLLDNINQIVTNYND

SEQ ID NO: 1243 - protein, 566 aa, Metasolibacillus meyeri
  source 1..566: note = Related to NZ_PYWN01000149.1
MDTYKDITSLDDLSRILKTPKKKLTFVLYIKKAENSYTSFKIPKKSGGERVINAPSNDLKDIQRNIVKMLLKQQRVFLFENNIKSNIAHAFTEDKSIITNAKVHKNKRFVLNLDLENFFESFHFGRVKGYFEKNKNYLFPENIATVLAQLTCYNGSLPQGAPSSPIITNLICNILDMKLLKTAKKYKLDYTRYADDLTFSTNNKNFADQLEEFTKQLEVIIKQSGFKINEKKTRLQYKQSRQVVTGLVVNKKVNVKKDFYKDTRAMVNSLYKNGSFTINDSEGSLNQLEGRFSFINHINKESNKERKKIDKNLKLNFRNLNGKEKEYQKFLFYKYFLSNKNPCILTEGPTDITYLKSALKNLYTDYPNLIEKVDENFHFKISFLKRTKKMKYFFDLEEEGADTMKKIYNFYTVNKEKNDCPNYSEIFKNINVLPKNPLIFILDNELANDNKPLKNLVNYMALKKEKIHELQTKNYINVTSNLYIVTNQLADNVKECEIEDLFDAETLDAKLNGKTFERDKTKYTDAANYGKKAFASYIWKNYKDINFENFRPLLDCINLIAKDYID

SEQ ID NO: 1244 - protein, 565 aa, Listeria booriae
  source 1..565: note = Related to JAARXI010000004.1
MGSFENIKTRGDLAGLLNIPSSKLSYILYIKKIENLYSSFKLPKKSGGHRVINSPEEDLKDIQKSLAKFLSRQQKIIWDARGINQNISHAFIEGKNIISNAENHMNKRFILNVDLEDFFDSFHFGRVRGFFAQNRDFRFPIDIATIIAQISCYNRTLPQGAPSSPIITNLICNILDIRLLKISKKYRVNYTRYADDLTFSTNDRSFSDKYMKFLVEISLEIKHAGFMINNKKTRLQLKDSRQEVTGLIVNKKVNVKKEYYKKTRAMADNLYRHKTFDIDGKPGTINKLEGRFSFINQLDRRNNEINRKRVELTQKSNSRHCLNTREKGYQYFLFYKYFFACPKPTIITEGKTDIRYLKAALKNLYLEFPKLIERKADGTFEFKVSFLRKTKRLKYFMELQLDGADTLKNIYNFYNEKGRQPNLSKYFEMKSKTKPDNPVIMVFDNEISNKNKPLYTFTNYASTQPESKQMLMKNLSINITNNLFLLTHQLVGQRTECEIEDLFNKKALDTKLDGKSFSKNPDTKQEYGKEYFSSYVLKNYQNIEFDNFRPMLQALNSIIESYSKG

SEQ ID NO: 1245 - protein, 563 aa, Veillonella magna
  source 1..563: note = Related to NZ_KE386795.1
MNQRGSGIQDKRDLCRKLRIQYRLLTYILYKKGIDSFYEQFKISKKSGGIRIISAPKRPLKFVQKRLAQMLQTFYDGSTTKKNNIAHGFLKSRSIITNARNHRNKRYVINIDLENFFDSFHFGRVCGFFEKNKNFLFPKEVAVTLAQLTCYEGSLPQGAPCSPIITNLICQILDYRVLRIAKKFKLNYTRYADDLTFSTNDRKFVNEYDEFIKQVEAEIIRAGFRMNTKKTRFMYKDSRQVVTGLVVNKKLNIPHEYIRRTRAMAHSLYTKGEFNIDGVLGSIEQLEGRLSFINYIDKYASTYAEYKRYNRFTPKEMSGRERLFQQFLFYKYFYHNELPVIITEGKTDKRYIKAALKSLCHHYPALVTAVGNGRFKFHISFLRRSKRLERFLGIQHDGADSMKVISNYYGSPNSEGLPDYYSYFSKYSCEATNPVFLLYDNEISNKNKPIRKMLNFWKQKVEDIVNIVEKQQYCCLQGNLYILTFPTLNGMAENEIEDLILKDNPLIQIGGRNFSREERYDISKFFGKNEFSQYVLDNYDKLRFDSFRPLLDTLNSIIKEYKE

SEQ ID NO: 1246 - protein, 567 aa, Pseudoflavonifractor sp.
  source 1..567: note = Related to NFKI01000003.1
MKKFCDIQSRNELADYLGISHKKLTHILYIKKPDNYYTTFEIPKRNGESRTICAPSGHLKALQVKLANMLWCYQKSIWEEKGVKPNISHAFEKEKSIITNAKIHRNKRFVLNLDLENFFDSFHFGRVQGYFEKNNNFKLPYDVSVILAQLTCYQGRLPQGAPSSPIITNLICQTMDIYLLRVAKKYKLDYTRYADDLTFSTNDRHFVENQEKFLAEAIAAIKRAGFSINEKKTRLQFRDSRQEVTGLIVNKKLNVNHAYVRKTRAMAHQLYSTGEYLIDGVPGTIKQLEGRFSFIDHLDHHNNILDPQEIKHDAFHLNGRERQYQAFIFYKYLYAHTVPVIVTEGKTDIRYIKAALKSLYTKYPRLIQKDAEGNFIYNFSFFKRTKRWKYFFGISLDGADAMKILYHYHAGNGKKIPAYHSYFRQLSGLEQHNPVILLYDNESKSERPLKKFLGEGVHATAEQKATLKSDLHIRLIPDSKLFLVTPPLVGSKEECEIEDLFSDELLSLNLDGKTFCRKDKFDDSKYFGKEIFSQYVYENYQTIDFSRFIPLLDVIDTIIAEAESPKK

SEQ ID NO: 1247 - protein, 566 aa, unidentified
  source 1..566: note = Related to JAGZJF010000013.1; note = Oscillospiraceae bacterium
MKKFCDIQSRNDLADCLGIPHRKLTHILYGKKPDSYYTTFEIPKRNGDPRTICAPSGDLKTLQVKLTNLLWSYQKSIWEEKGIKPNISHAFEKEKSIITNAKIHRNKRFVLNLDLENFFDSFHFGRVQGYFEKNCNFKLPHEVAVILAQLTCYQGRLPQGAPSSPIITNLICQAMDIYLLRVAKKYKLDYTRYADDLTFSTKDRHFVEKQEKFLAEAIAAIKRAGFSINEKKTRLQFRDSRQEVTGLIVNKKLNVNHAYVRKTRAMAHQLYSTGEYLIDGVPGTIRQLEGRFSFIDHLDHYNNILDPQEIKHDAFHLNGRERQYQAFIFYKYLFANDKPLIVTEGKTDIRYIKAALKSLYARYPRLVQIGADGNFTYNFSFFRRTKRWKYFFGISLDGADAMKFLYRYHVGKNHVPEYLKYFRQLSGCEQHNPVILLYDNELEHKKPLKQFLAEEVHATEEQKTELKSHLQLHLIPDSKLYVVTNPLVDSKDECEIEDLFAEEVQNINLDGKTFCRKDSFDNSKFFGKDIFSKYILENYKQIDFSRFIPLLNAIDSIIAQTQPTEK

SEQ ID NO: 1248 - protein, 566 aa, Intestinimonas sp.
  source 1..566: note = Related to NZ_JACOEA010000001.1
MKKFCDIQSRNELADYLSVPRNKLTHILYVKKPDSYYTTFEIPKRNGETRTICAPSGDLKTLQEKLSNMLWLYQKSIWEEKGIKPNISHAFEKGKSIITNAKIHRNKRFVLNLDLENFFDRFHFGRVQGYFEKNNNFKLPHDVAVVLAQLTCYQGRLPQGAPSSPIITNLICQPLDTYLLKIAKKYKLDYTRYADDLTFSTNDRHFVENQENFLAEANAAIKRASFSINEKKTRLQFKDSRQEVTGLIVNKKLNVNHAYVRKTRAMAHQLYSTGEYLIDGEPGTIKQLEGRFSFIDQLDRYNNVLDPQEIKHDAFHLNGRERQYQAFIFYKYLFAHNAPVIVTEGKTDIRYIKAALKSLYAKYPRLIQKDAEGNFIYKFSFFRRTKRWKYLFGISLDGADAMKILYRYHVGNGKKIPAYLGYFRQLSGGEQHKPVILLYDNEPNSDRPLKKFLGEDVHPTADQKAALKENLHMRLIPDSKLFVVTPPLVGDKEECEIEDLFADELLKLSLEGKTFCRKDKFDNSKYFEKEIFSQYVYENYQKIDFSGFIPLLDVIDSIIAQTESAE

SEQ ID NO: 1249 - protein, 567 aa, unidentified
  source 1..567: note = Related to QUKQ01000046.1; note = Ruminococcaceae bacterium TF06-43
MKKFCDIQSRNELADYLGIPRSKLTHILYVKKPDSYYTTFEIPKRNGDTRAICAPSGDLKVLQKKLSNILCLFQRNIWDENGIKPNISHGFEKEKSIITNAKIHRNKRYVLNLDLASFFDSFHFGRIQGYFEKNNHFKLPHDVAVILAQLTCYQGRLPQGAPSSPIITNLICQSLDAHLLKAAKKYKLDYTRYADDLTFSTNDRHFVENQKKFLAEAIVAITKAGFSINEKKTRLQFRDSRQEVTGLIVNKKLNVNHSYVRKTRAMAHQLYSTGEYLIDGVPGSIKQLEGRFSFIDQLDHYNNILDPQEIKHDAFNLNGREKQYQAFIFYKYLFANDTPVIVTEGKTDIRYIKAALKNLYNKYPRLIQKDAEGKFVYTFSFFRRTKRWKYFFGISLDGADAMRILYRYHIGSNKRIPPYLSYFQKLSDHEQHNPVILLYDNESKSERPLKKFLGEDVHATVDQKAELKAKLHMRLITSSKLFVVTPPLIGDKEECEIEDLFSDELLSLNLEGKTFCRKDKFDSNKYFGKEIFSQYVYENYRTIDFSRFIPLLDVIDMIIAQAESHKQ

SEQ ID NO: 1250 - protein, 563 aa, Caproiciproducens sp.
  source 1..563: note = Related to NZ_CP035283.1
MEKFCDIQTRNELADFLKIPRSKLTHLLYIEKPENDYKTFEIPKKSGGTREICAPSGSLKSIQSKLAEALWEYQKSIWADRKIHPNISHAFEKGKSIITNARIHRNKRFILNLDLENFFNTFHFGRVQGFFEKNYNFMLPHKAAVAIAQIACYKGVLPQGAPSSPIITNLICQILDTRLLKIAKKYKLDYTRYADDLTFSTNNRFFMDNHEKFLTEVALEIRKAGFTINHKKTRLIFRDSKQEVTGLIVNKKISVDRNYYKETKAMAHRLYTQGEFEINKQSATMQQLEGRFSFIDQLVHYNNKLDGGTHNPHTLNGREKEYQAFLYYKYFFANDRPLIVTEGKTDICYLKSALKNLHAKYPNLIEKDSKGKYVFKISFFKRSERWRYFFGIGLDGADTMKNLYHFFTSKNDAPDYLTRFRKLCKCSPRKPVILLFDNETESSRPLKKFLCENKINDEDKKQLEQNLHIRLIPESKLFLATTPLVSDKLECEIEDLFPDEVLKHKVDGRTFTRKDNYDKKKYYGKEIFSTYIAANYEKIDFSRFEELLNTLSMIVKSEEAPQD

SEQ ID NO: 1251 - protein, 571 aa, unidentified
  source 1..571: note = Related to JAGAWV010000307.1; note = Acidaminococcaceae bacterium
MKNINDLKTRSELADYLGISRRRLTYILFIKTPDSYYQTFDIPKASGGVRNICAPTGILKRLQTILAKRLWLKYVSDKVRNKIENTNISHAFEKRKSIITNARIHRNKRYVINLDLENFFDSFHFGRVLGYFEKNKNFMLPHEVAVALTQLVCYQKHLPQGAPTSPIITNLICQILDFRLLKIAKKYKLNFTRYADDLTFSTNDKKFLDLKEHFFKEITTDILRAGFSVNNRKTRIEFKDSRQEVTGLTVNKKVSIKREYVQNTRAMAHHLYTQGHFSIDGQDGDISQLEGRFSFINQLDVYNNRLLLQFLKIDKNNDLKLNKREKEYQKFLFYKYFYANEKPLIVTEGKTDVLYLKAALQNLYARYPELIEKNDKGHFSYKIAFFNRSDKWERLFKFVKDGADSIKNLYFCFSEKNNSSFPNYFKYFLKLSNEKQKNSVILLFDNEIDSENKPLKKFLGVIKASNDAKDTLRTSYTLQLIPDGKLFLVTNPLAVDKKESEIEDLFPVEVLNIKIEGKVFCRDDKFDKTKYYGKHIFSKYVYKNYKMINFTGFIPLLDVIRSITVNLSDQK

SEQ ID NO: 1252 - protein, 584 aa, unidentified
  source 1..584: note = Related to JAHAER010000020.1; note = Firmicutes bacterium
MKEFSDVNSREELALALRVPLSKLTYILYVATVDSCYRTFEIPKKNGGTRVINAPQRDLMDIQKNLAKLLYEHRSNIKNFNNVKCNIAHAFEKEKGIITNGSVHRNKRIVLNYDLENFFDSFHFGRVRGYFWKNRYFRMNLDVATIIAQLTCYQGKLPQGAPTSPIITNMICEIFDFKLLRLAKKYKLDYTRYADDLTFSTNNAEFENRIDEFTEELSKEIDNAGFKINRDKTRLQLRKSRQTVTGLVVNEKVSVDHRYYKATRAMAHNLYREGGFDICGEEGSLEQLEGRFSFVNQIDKYNNKLEMSGRIGRSGRASGRAGAGAGGNEKKKHDFRHLNGREREYRKFLFYKYFVAGERPMIVTEGKTDILYIKAALKSFYKEYPELIEKRKDGTFDFKIDFLRRSEKLKYFFGLTADGADSMKNLYNYFSDMNNNSFPNYAEYFGEKMKCAPLHPTILIFDNELEGKDKPLKKFTDHIKMQDRKESLKRDLAMHISGSLFIATLKLPEGKKEAEAEDMFAPSVLEHEIRGKRFSRSDEYDKSKFYGKNDFAQYVFFNYKEIDFSGFRPMLDSILMIKRKYRYM

SEQ ID NO: 1253 - protein, 569 aa, unidentified
  source 1..569: note = Related to JAAYIN010000072.1; note = Clostridiales bacterium
MGNFKDIATRNELADFLGFPRRKLSYILYVKSTDAYYQSFTIPKKSGGERCINAPTGDLKDIQKKLAMALWKHQLDIRTSRNIRTNISHAFEKGKGIISNAQIHRNKRYVLNLDLKNFFSSFHFGRVKGYFEKNRDFELPNQVATVIAQLTCFQGCLPQGAPTSPIITNMICQILDMKLLRIAKRYKLDYSRYADDLTFSTNNRAFLGMQSEFYEDVAKEVTSAGFTINEKKTRLQYKDSKQVVTGLIVNKKLNVDRIYARKTKAMAHTLYTNGEYTIDGKIGTLKQLEGRFAFINQLDKYNNKRDGKGEHKGWNLNSREKQYQKFLFYKYFFSNSKPIIVTEGKTDVVYMKAALRKLHAEYPCLIERKPDGTFEYHVSFLKRSKRLSYFLHISQDGADTMKNLFNFFSPTSDNKRVYPDYLTYFMKAGNCSAQNPVILVFDNELSSKNKPIKKFSDHVKLDDVRRETLKRILHLKLIDKGNLYLLTNPLVDGKDECEIEDLFDENTLSQVIDGRTFSRDIKKGDTQHYGKETFSMFVSRNHMNIDFSRFREMLNILNEIIGLYHKPEV

SEQ ID NO: 1254 - protein, 572 aa, unidentified
  source 1..572: note = Related to JAJCJJ010000005.1; note = bacterium 210917-DFI.7.65
MSFFQHIETRNELADFLGIPRKKLTHLLYVQRIENCYHMFEVPKRAGGTRVICAPTGDLKSLQRSLARRLQEHCLRCREERGLSVNIAHAFQPRRGIITNAYIHRNKRYVFNTDLEDFFGSIHFGRIRGYFQKNEYFQMPAEVATILAQLCCYQGKLPQGAPTSPVLSNLICEILDFRILKIAKHYKLDYTRYADDLTFSTNDKTFCSRYDAFYQQLQKEIRRAGFAVNEKKTRLEYRDARQTVTGLVVNRKLSVDRCYCRETRAMAHTLYKTGEYRIQGAAGTMAQLEGRFAFINQLDRYENKHSLSKPRDFKTLNGRERQYQKFLFYRYFYANTHPLIVTEGKTDILYLKAALMNLHRRYPELVVRQPDGTFAFQVRFLHRSKRLRYFFDLSLDGADAMKNLYELYTGKGAHWKTAYYPYFLALSGKKPQWPVILVYDNEINDKTRPISKLLHSIGMGEEGKERLKKSLKEQLVAGGNLYLVTHPLAEGKSVSEIEDLFAERTRAVVIDGRGLSLRDDYDPQVSYGKDAFSKYVLSHYQTIDFVRFIPLLDRIRDAVAETQAAEQEPEGV

SEQ ID NO: 1255 - protein, 620 aa, unidentified
  source 1..620: note = Related to SVGI01000005.1; note = Clostridiales bacterium
MTAFKNIKSRSDLADYLNIPPSKITYILFKRGVDSYYTEFEIPKKSGDPRRICAPTGDLKGVQRQLADALWEHQKSIYEELWIKPNISHAFEEGKSIITNAKIHRNKRVVVNVDLKDFFDSIHIGRVCGFFEKNKYFNLPHEVAVTIAQLACYQGKLLQGAPTSPIITNLICQVLDMHLLSLAKRYKLYYTRYADDMTFSTNDRSILERWDSFYEELDKKVKKAGFSINEKKTRITYRDSKQIVTGLVVNKKISVDHSYCRKVRAMAHSLYTNGSYQADGVEGTARQLEGRFAFIDQIEKYNNTCDSTGKHDAFVLNGREKQYQQFLFYRYFFDVDKPLIVTEGKTDVRYIKAALRNLYTEYPELIEKDAKGKFIYKVNLFKRSKRFKYLFVLALDGADSLTYLYNHFVSTGKDNRINYLDYFLKITQRVPQHPVIFVYDNEITNSKKPLYKFANHAKLDNNQRALLGTELFLRLTPRGNLFLLTNPLVEGKNESEIEHMFTEETRGVELGGKKLSLESKFDNAKFFGKDHFSNYVLENYAKIDFSGFRPFLNTIRTVLQEYERSIAKEQTTPMRTKILIGVCFSCQPLPHSKQRKDSAENCDEKTKNAEIAGFLRRNLL

SEQ ID NO: 1256 - protein, 565 aa, unidentified
  source 1..565: note = Related to BK026599.1; note = Siphoviridae sp.
MTFEYVCTRNDLADLLEIPHGKLTHVLYVAKVDSFYKIFEIPKKSGGTRKICAPTGDLKQIQEKLYSILLHHQQFLRKQNNIRTNISHAFEKGKSIITNGEVHRNKRIVVNIDLQDFFDSFHFGRVCGFFEKNRDFALPHELAIVMAQLTCYQGKLPQGAPTSPIITNYICQTFDMRIIRIAKKYHLDYTRYADDLSFSTNDKKFIEQWEPFYNELTHEVERAGFKVNTKKTSVQYRDSRQTVTGLVINKKLSVDHRYYKQVRAMADSLYKTGCFDNNGVEGTVSQLEGKFAFIDQLDKYNNIKDVSQQHSVFCLNGREKQYQKFLFYRYFFAHEKPVIVTEGKTDIKYIKAALKNLYTEYPELIEKTPEGHFEFKVSFLKRSKRFKYFFHMSQDGADAMKNLYNFFSDKNPKYTNYFKVFSGCSDKNLCNPVILIFDNELSNKCKPLHSFVSHIGLSSSDKDRLKEDLCMKIIDEGNLFLVTNQLVDGKAECEIEDLFDDTTRNHVIAGKTFSSNDKADKEKHYGKEIFANFIQSNYKSINFDNFRPMLNNIVKVIAEFAGTEG

SEQ ID NO: 1257 - protein, 520 aa, unidentified
  source 1..520: note = Related to NZ_NFJU01000007.1; note = Proposed Anaeromassilibacillus sp.
MLKKDGNIRTIKAPSSELKSIQKKLASKLESCQRNIWTGIGVNSNIAHGFKKGKSIVTNAQIHRNKKYILNIDLQDFFDSFHFGRVRGFFEKNRNFALPIEVATVVAQLTCFEGCLPQGAPTSPIITNLICQILDNRLLKLAKRYKLDYTRYADDLTFSTNDKAFVERKDEFLCAIQKEIERAGFKINEKKTRLVYKDSQQKVTGLVVNQKVNVAQDYYRKTKAMAHSLYKKGEFTIDGQAGTIEQLEGRFSFINQLNCYNNQHDGEKHEFGLLSGREREFKRFLFYKFFYGNDIPILVTEGKTDVRYLKAALKSLYNEYPNLITKSKDGKFRFKFSFMKRTKRLRYFLGVQADGADTIQNIYKYFVGGKGRESKNYPNYFAYFLRMGTQPKAPVILLFDNELESKRPLRKFLNEQKFSETQIDQLRNELCLKVFNSGKLYLLTNPLVLEKTECEIEDLFSEETLNLLIGGKNLCLKDKYDTEKYYGKEIFSQYVLNHFEQIDFSGFRPLLDKLSLIVRQ

SEQ ID NO: 1258 - protein, 561 aa, unidentified
  source 1..561: note = Related to BQOK01000001.1; note = Oscillospiraceae bacterium
MAQFCDIASRNELADFLGIPRQRMTYVLYVKKVESYYTSFEIPKKNGETRTIKAPTGELKFIQKKLVSKLVQYQREIWRSKGMKPNISHGFEKGKSIVTNAKIHKNKRYLLNIDLQDFFDSFHFGRVRGFFEKNRDFALPLEVATVLAQLTCFEGCLPQGAPTSPILTNLICRILDNRLLKIAKRYKLDYTRYADDLTFSTNDKTFAGLKDEFLCTIQKEIERAGFKINEKKTRLACKNSQQKVTGLIVNQKVNVAQDYYRKTKSMAHSLYTKGEFTIDGQTGTLEQLEGRFSFINQLDWYNNKLDNETHEFGVLAGREREFKRFLFYKYFYGNSTPIIVTEGKTDVRYLKSALKSLSKEYPNLITKSKDGKFEFRVTFLKRTKRLQYFLGIRLDGADTIQNIYRYFMGGKGRESKRYPNYFSYFLRMGAKPKKPVILLFDNELESKRPLRKFLTEQKLSEAQIEDLRSKLYLKILDNGKLYLLTNPLISGEKECEIEYLFSEETRNLKIEGKSLCLKDKFDTEKYYGKEIFSQYVSANFEQIDFSGFRPLLDKLDLIVQQ

SEQ ID NO: 1259 - protein, 561 aa, unidentified
  source 1..561: note = Related to DWWX01000035.1; note = Candidatus Gemmiger stercorigallinarum
MAKFCDITSRNDLADFLEIPRKVLTYVLYVKKTENFYASFEIPKKNGGTRTIIAPSGELKSIQKKLARELERYQQDIWASKGIKPNLSHGFQKKKSIVTNARIHRNKKYVLNIDLQDFFDSFHFGRVRGFFHKNKDFALPIEVATVLAQLTCFEGRLPQGAPTSPVVTNLLCQILDNRLLGIAKKYKLDYTRYADDLTFSTNDKMFVEHKDEFLRTIQKEIEHAGFKVNENKTRLAYKDSQQKVTGLVVNEKVNVAQEYYRRTKSMAHSLYKTGEFTIDGEVGTLQQLEGRFSFINQLTWHNNRQDGKEHSFGTLSGREREFKRFLFYKFFYGNDIPIIVTEGKTDVRYLKAALKALHKDYPDLIEKNKDGKFEFKIVFFKRTERLRYFLGIQLDGADAMQSVYKYFVGGKGRESKNYPNYFAYFQRMGAQPKKSTILLFDNETKSKRPLGKLLTEQKFTEEQIRKLKQELHLKVLDKGNLYLLTNPLVPGEEECEIEYLFSEETRSTLIDGKSLCLKDKYDTEKYYGKEIFSQHITDHFEQIDFSGFRPLLDALTSIVRQ

SEQ ID NO: 1260 - protein, 560 aa, Clostridiisalibacter paucivorans
  source 1..560: note = Related to NZ_JHVL01000054.1
MNRFYNIKNRRELASFLGIPLKKLTYILYKKGVDYYYETFEVPKRNSGARIINAPSGDLKTLQKKLSKILYEHQIIHIQNHKIKNKISHGFEKEKGIITNAEIHRNKRFVMNVDIKDFFESFHFGRVKGFFNKSKAFNMSEEVAIIIAQITCFNGKLPQGAPTSPIITNLICNILDMRILSICKEYKLDYSRYADDLTFSTNDKHFIKNKNGFYDNLKREIQGFGLLINEKKTRIEYKDSRQVVTGLTVNKKISVKREYYKNTRAMADKLYRTGEFTIGEKAGTIRQLEGIFSFINQIDYFNNKKDNNKKHNVNNLNSREREYQKFLFYRYFLSNSKPLIVTEGKTDVMYIKAALKKHYKEYPNLIEKHRDEFEFKISFLNRTKRLRFLMGIQIDGADTFLNIYNFYTGKNNFNNYFKYFNDKYKITPSNPVILIFDNEQKEKNKPLYKFKKAVKMNTIDLSSEIIANLFLLTVPLCNNKEECEIEDLFDEKALNHKIGGKKFSRKNENNKKYYGKADFAKYIYKNYKDIDFSNFKLMLDELNLVVNNHNNNSSLSTVGV

SEQ ID NO: 1261 - protein, 562 aa, unidentified
  source 1..562: note = Related to JAFVVV010000369.1; note = Clostridia bacterium
MKNLSEVSTRNELADFLGIPIKKLTHILYVKKPDTFYKQFEIPKKSGEPRIINAPTGALKSIQKRLLFAIEKTICDGSSNKSNISHAFEKNKSIITNAKIHRNKKIVINFDLNDFFGSFHFGRVCGFFQKNRCFNLPYEVAVAITQLVCFNGTLPQGAPTSPIITNLISQIMDVNLLKLAKKYKLDFTRYADDLTFSTNDKKFLEKYDEFYDQLSRTISFLGFEINETKTRLQFCDSHQTVTGLTVNKKIQVPRNYYKKTRAMAHSLYKSGSYTIDGEEGTINQLEGRFSFIDQLTKHNNKIDGQKHRLGTFCARETDYQKFLFYKYFFAAEKPLLVTEGQTDITYLKAALKNLYLEYPSLISKKEDGTFEFKISFLNRTDRLSYFLGFSKDGADAMGCLYNFFIKSKSKEHPNYYEYFLKTSGSKAHYPAIFVFDNELESKGKPLKKFFDNYVKDEETKKEIKTQLYVHLIKSANIYLVTNPILESSSKEAEIEHLFSKEVLETKIDGKPLSLSGDYDKSKYYGKVAFSKYIMNNYKSIDFSNFRIILDNIDKILKEYNEH

SEQ ID NO: 1262 - protein, 566 aa, unidentified
  source 1..566: note = Related to JAFYAQ010000001.1; note = Oscillospiraceae bacterium
MISFSEIKSRNDFADALQIPRSVLTHVLYIAKPESFYESFTIPKKNGEDRIIMAPKGTLKSIQTKLSKQLVEYRASISQKGQEKSNISHGFEREKSIITNAQIHRNKRYVINYDLKDFFDSFHFGRVVGFFEKNKHFLLPYEVAVIIAQLTCYNGRLPQGAPTSPVITNLICEILDYRVLKIAKRYKLDYTRYADDLTFSTNYSRFLEVFDSFAKELLQEISNSGFTINQSKTRLLYRDSRQEVTGLVVNKKIGVNREYVKSTRAMAQALYSTGEFTINGIPGTIKQLEGRFGFIDQLDHYNNVIDDAKHDAYSLNGREKQFQEFLFFKTFFFNEYPLVITEGKTDIRYLKAALKSLHQKYPELICKEDDGTFRFKISFFRRSKRWKYFFGISKDGADAMKLLYRFFTGQKGVKNYYRLFAEKYKAVQRNPVIMLFDNEMESKRPLNKFISEEVKIPSSEQQLFKEQLYYHLIPGSKTYLMTHPLPPGKTEAEIEDLFPTEVLGVKLDGKSFSTKDKFDTSKFYGKDIFSSYVYEHWKSIDFSGFIPLLDKINMLVQNEKKPGLNT

SEQ ID NO: 1263 - protein, 564 aa, Clostridium perfringens
  source 1..564: note = Related to ABABDZ010000001.1
MIKFTNIQDKNQLANVLNIKPKYLNYILYVKKVDNYYTEFEIPKKNGEMRKIHAPTGILKSIQKNLSILLSEYQSYPYSKNYKGNKISHAFEKNKSIITNAKIHRNKKYILNIDLECFFDSFHFGRVKGFFEKNNFFKLPSEIALILAQMCCYKGCLPQGAPTSPIITNLICKILDIRLLKISKSFKLDYTRYADDLTFSTNDNAFLENKTKFMKLLTKEIEHAGFKLNTTKTRLQYNTSRQEVTGLVVNKKINVKKSYYKTTRAMANTLYRTGQFTIDNNSGTINQLEGRFSFINQIDKYNNSLIKKKDFFNLNSREKEYQKFLFYKYFFSNEKPLIVTEGKTDIVYIKSALKNLYTEYPNLILKKDDGSFEFKISFLKRTKRLNYFFNFAQDGADSMKNLYNFFDKNKSNNSYPHYSNYFSKISNRKPNFPIIFIFDNELNTKNKPLHKFINYINLCESKSLKFQEYYKVNLVDNLYLLTNQLIQHKSECEIEDLFDNQTLTHIISGKTFNRNLKKLDGTNHYSKEIFSKYISENYKTINFDNFKPLLNNLNEILKDYISDI

SEQ ID NO: 1264 - protein, 572 aa, Campylobacter lari
  source 1..572: note = Related to AACDFA010000001.1
MLFKKEDCILSAELQKFANFFNIKANIISYVLYVKRTENCYTAFEILKKYKKETRIIHAPNKTLKNIQRNIAKKLHELQQDIDSKNNIKTNISHGFEKNKNIATNAMIHKNKRYILNIDLENFFNSFHFGRVMGYFNKNRYFNFDKKMSIIIAQLCCLNGALPQGAPTSPIISNLICRIFDYRILKITKKYKLNYTRYADDLTFSTNDNFFLHHYDNFLKDISSEIQKSGFKINKNKTRLQYKNSKQVVTGLVVNKFINTEKMYYKTTRAMAYNLYKSGSFTINDKEGELNQLQGRFNFILNIKSYSPVIQKDTKNNILHSKEKEYQKFLFYIFFYINTKPLLITEGKTDILYIKAALKNMYKNYPRFIIKSDNKFDYKIAFFKRSSKNIEEYLNIKKDGGHELVKIIIYYFNKKYFDFFYNLNKNITPNNPVIILVDNEKAKDKPLETLKKNIPQAYRNDLNFKEKPWFRIGDTNLYILTYRSNPNLKDIEVEDLLEESFIKELKIQNRVFDKTANKDSELYFSKNTLANYVYKNYLKINFNNFKFIFDDIQDIINDHNNHYPINQTLHTL

SEQ ID NO: 1265 - protein, 548 aa, Listeria sp.
  source 1..548: note = Related to NZ_FYBR01000008.1
MSLGKIKNRNELARLLEVPTKFLTYILYIKKTDNLYSRINILKKNGDERIIYAPEKELKSIQKKLASILYQERKAYFEGRGITPNISHGFEQKKSIISNARIHCNKHVIFNLDLEDFFGSFHFGRVKGYFEKNNQFKLDSQIAILIAQIACYKGFLPQGAPTSPIITNMICSILDYRLLKLAKQFKLDYTRYADDLTFSTNDKKFLDNKDVFYKKINREIEKAGFKINCKKTRLQFKDSHQEVTGLTVNKKVNVKRFYYRQTRAMAHRLYKTGEFEIDGKRGTVDQLEGRFSFMYEVASYGSTKKNYCYKEYKKFIFYKYLYMNDKPVVITEGKTDIIYLKAALKNLYEDYPSLISKQTDGTFKFKITFLNRKSERLKKLLNLQKDGADGIRTFINEHFLCKNPTAKYFKNIDGPLSKNAVICIFDNEIEDQDKPLRHVWNGFKKDSKRKEALKNNQNTHWVDNVYILTNPLVSGKKICEIEDLFDEQTLNQQIMGKKFDRSEENHKHFFSMFINKNYNDIDFTQFKPMLDNLDKIIYDYGNSMDKCQ

SEQ ID NO: 1266 - protein, 568 aa, Enterococcus sp.
  source 1..568: note = Related to JACVVC010000001.1
MGKLNEINNRSDFANLINVPIQKLTFILYKKKVENLYSSFSIPKKSGGYRRIYSPHEDLLDIQKKIARLLATQKNVFQEENRIKLNISHGFEKNKSIITNAKIHRNKRFVFNVDLENFFESFHFGRVKGYFEKNKNFQLPTEVAVILAQLCCYQGVLPQGAPTSPIITNLICNILDLRLLKLAKKYRLDYTRYADDLTFSTNDRHFLDLKSAFYYELNGEIKKAGFKLNEKKSNFQYKDSRQMVTGLVVNKMINVDRNFYKETRAMAHRLYQTGSFTIDNEEADIKQLEGRFAFINQIQWYNNRIDNEKHNFRSLNTKEKQYQALLFYKYFFANNKPLIITEGKTDIKYLKSALKKYYNEYPELVTKDEKNNYDFKISFLRRSKRLRYFFDLSLDGADTLTDFYKRFMSNSYPEKGAINYLMHFKKMSENKPKNPVIWIFDNEIANKDKPICKFINGVKLTEYKKECLKSSQQTLLHDNLFLLTNPLSNGAEECEIEDLFSEDVLKKEINGKTFCRDKKVDPEKYYGKEIFSNFIVNEYERIDFENFKPMLDNLTLIVRNYRSDSVIP

SEQ ID NO: 1267 - protein, 560 aa, Enterococcus faecium
  source 1..560: note = Related to QPVP01000009.1
MIKLKNVKNRKEFAEFIGVPLQKLTYVLYIAKIDNLYTSFQIPKRSGGVRTINAPQKDLLDMQKKLAKLLATHKSIVQEENHIKLNISHGFEKNRSIITNAKIHRNKRFVFNVDIENFFDSFHFGRVKGYFEKNNNFELPSEVATIIAQLCCYKGVLPQGAPTSPIITNLICNILDIRLLKLGKKHNLDYSRYADDLTFSTNDRLFLISESLFYDELTKEIESAGFKLNEQKSRLQFKDSRQTVTGLVVNEKINVDRRYYKETRAMANKLYKTGIFEINNQSATIKQLEGRLTFINNIQRYNNSIDGKKHDPWSLNSKEKQYRAFLFYKYFFANEKPLIVTEGKTDVKYLKAALKKYWELYPNLISKDSKGDFSFKVSFLNRTKRLSYFFGINRDGADALKNLYNFFTSSSQNNPPNYLYYFKKISNRNPANPVIMIFDNELVNKKKPLSKFANHCKLNEDSRNNLQTQLYIRLQDNLFLMTNPLVEGKEECEIEDLFGEDVLNTKISGKIFSREKKADPKEHYGKEIFSNFITNEYEKIDFENFKPMLDNLSRIVENYK

SEQ ID NO: 1268 - protein, 560 aa, Enterococcus faecium
  source 1..560: note = Related to NZ_CP042833.1
MENLKKAKNRKDFAELINVPLHKLTYVLYKAKVENLYTSFQIPKRSGGVRTIHAPHQDLRDIQKKLADLLVKYKNIIQATNNMKLNISHGFEKNKSIITNARIHRNKRFVFNVDLENFFESFHFGRVKGFFEKNEHFMLPSEIAVIIAQICCYNRKLPQGAPTSPVITNLICNILDIRILKLAKKYKLDYSRYADDLSFSTNDKNFLNSKDDFYNELVKEIIKAGFRVNDKKSRLLFKDSRQVVTGLVVNEKINVNRMYYKETRAMVNSLYTTGSFEINSKIANIKQLEGRLSFINHIERYNNNIDKNNHDFRKLSSKEKQYRSFIFYKYFFANETPVVITEGKTDIKYLKAALKKHYKEYPALVLKESDGTFSYKVTFLRRTKRLQYLFGLFRDGAPALKNLYNFFSPISNKDFPNYLDYFKKISNSNPKNPVIMIFDNELANKTKPLANFANHCKLDEGTRSILKEKYQVKLQDNLFLMTNPLVENKAECEIEDLFHDAVLKTIIGGKIFSREKNADPNKYYGKEIFSNYIMRNYSNIDFSNFKPMLENLNEIVGRYK

SEQ ID NO: 1269 - protein, 562 aa, Enterococcus mundtii
  source 1..562: note = Related to NZ_MCRG01000029.1
MVKINEVTNRDEIAYALGIPKKKLTYILYVKRTENLYYSFEIPKKNGGFRRINAPDKDLRDIQKSLADILVKYQKAIWDRKNIKPYISHGYEKDKGIMTNAEVHKNKRFVFNVDLKDFFDCFHFGRVRGFFEKNKDFCLPIEVATIIAQLTCYNGVLPQGAPTSPVITNLICNIFDMRVMKVAKKYKLNYTRYVDDLTFSTNDKNFFLNKELFFENLIIEVENAGFKINDKKTRLQFKDSRQTVTGLVVNKKINVDRRFYKDTRAMLDSLFRNGSFEIDGYLGDIKQLEGRLSFINQIEWHNNLKDNSKHNVYNLSSKEKQYQAFLFYKYFFSNKKPILVTEGKTDIKYIKAALKKYYLDYPDLIIKNEKQEFEFKITFLKRTKRLQYFFNLYKDGADAMLHIYNYFYDVNNDKFTNYVNFFTARCKRKPANPTIFIFDNEINVKGKPLKKFVDNVSLNALKVSKLLEDNYVDIAGSAYILVNPIIDRSKNESEIEDLFTPELLSHKINGKTFCRDKSFNSNKHYSKEIFANHVVKNYRSIDFTNFKPMLDNLDKIIKNYNK

SEQ ID NO: 1270 - protein, 560 aa, Enterococcus hirae
  source 1..560: note = Related to JAKNTG010000011.1
MEINEIKNRTELAWKLGIPKKKLTYVLYIKGTDQLYTTFEIPKKSGGVRKIHAPEKDLKEIQKNLANILVDYQSEMWKKRKIKPNISHGFEKNKGIMTNAEVHKNKRFVFNIDLENFFESFHFGRVRGFFEKNKYFELPLEVATIIAQLTCYKGTLPQGSPCSPIITNLICNIFDMRIMKLAKRYRLNYSRYVDDLTFSTNDKRFIDDKEYFFEELSGEVEKAGFKINENKTNLRYKDSKQIVTGLVVNKKINVDRCYYKKTRAMLNSLYKTDTFEIEGSTGTVKQIEGRLSFINQIDWHNNQIDSNKHGFRNLSAREKQYQAFLFYKYFFINDKPIVITEGKTDIKYIQAALKKYYLNYPDLIVKNDEHKFEYKIMFLKRTKRLNYFFGLNQDGADAMQNLYHYFYDYNNNITANYMKYFKDISKKLPRNPTIFLFDNELAGGEKPVRKFVKHISLDKAQYTKLEKEEYARLHESAYLLVNPLVDSKKECEIEDLFLPETLEHKINNKTFCRDKSFKSDVHYGKEIFSNYIMKNYKTINFKNFQPMLNNLSGIISSYKK

SEQ ID NO: 1271 - protein, 418 aa, Listeria monocytogenes
  source 1..418: note = Related to NZ_CP063383.1
MKTLKNIEDRKDLADYLNIPIKRLTYILYIKRTENLYYSFEIPKKSGGVRNIDAPKSELKALQKKLAASLTKYQEILQKSKRKAPNISHGFEKGKSIISNAKIHRNKKIVYNLDLENFFESFHFGRVRGFFEKNKDFELSTEVATIIAQLSCFNGALPQGAPSSPIITNFICRIMDMRILKLAKNYKLDYTRYADDLTFSTNDKKFIDQIDYFLHKLTKEIEKAGFKLNKNKTNLNFKDSRQLVTGLVVNKKINVDRRYYKETRAMAHRLYKTGEFQIDDKNGTLNQLEGRFSFINQVQRYNNVIDSSKHDFNNLNAFEKQYQAFLFYKYFYANNKPHIVTEGKTDINYIKAALKKHHLEFPNLIVKKEDGEFDFRVAFLKRTNRLAYFLNIKKDGADTMKNICKYFLILKIMRSPII

SEQ ID NO: 1272 - protein, 566 aa, unidentified
  source 1..566: note = Related to RKEI01000021.1; note = Clostridiales bacterium
MRKFCDAETRNEFADFLKISRSQLSYVLFVKHPHSYYKTFEIPKKSGGTRVINAPYGELKFIQEQLNKRLAEYQKYIWEVKGVRPAISHGFEKGKSIITNAKIHRNKRYVVNLDIENFFGTFHFGRIVGFFEKNRYFRLPHEVAITIAQITCYNGTLPQGAPSSPIITNYICQVLDRRLLLLAREYRLDYTRYADDITFSTNDIHFTDKYRAFLDAVDTEIQRAGFRINSKKTRLLFESSRQEVTGLTVNKKINSNKQFRKETRAMAHHMYANGEFSIAGDSGTLEQLEGRFSFIDQIEHYNNSLSGNKKNYHNLSGCEREYQKFLFYKYFFANQRPLILTEGKTDVRYLKAALRNLYNEYPTLIKKNEDGSFQFEVSFFKRSRRWEYFFGLSSDGADTLGNICQCYFSKRNTGLPQVFDYMKNISGRQPQHPVIFLLDNEMKSDKPLKKFLQKQRITDEKRRQLVARLYIQIMDGTNLFLVTNPLANGDEESAIEILFPEEVLLHEIDGKKFSLENDYDTATYYGKELFSKYIEANYESLDFSGFRPLLNALAAAVETYRLSCNT

SEQ ID NO: 1273 - protein, 380 aa, unidentified
  source 1..380: note = Related to JAFXUW010000045.1; note = Oscillospiraceae bacterium
MNPFSFVRSRADVADAIGIQLKSLTYILFVKRIENCYSTFLIPKKSGGNRTICSPCDELKLIQKKLADALWEQQQDIWKKANIHPNLSHGFEKGKSIFSNAKNHVNRRFVLNIDLENFFDTFHFGRVCGFFEKNRYFMLPHEAAVTIAQIACYNGKLPQGSPCSPIITNMICQALDIRLLQVAKKYKLDYTRYADDLTFSTNNRHFLDCYERFYKSLLREIQHMGFSVNETKTRLLYRNSRQTVTGLTVNQKININCDYYKATRAMAHSLYQKNEFQINGSPATINQLEGRFAFIDQIDHFNNRKDTFPHNARNLNRREREYQAFLYYKYFFTNDRVLIFTEGKTDVLYLKAALMALYTEYPNLVQRDEAGKFLFNVSFF

SEQ ID NO: 1274 - protein, 548 aa, Campylobacter mucosalis
  source 1..548: note = Related to NZ_LIWN01000009.1
MENFNDLKTIKEFAKFIDTPLQKITYIIHRQKIENLYNSFEIPKKNGGIRTIDAPHDDLKQIQIKIKNMLWKHQKKIWEKYNQNKIPNISHGFESGKTFITNATVHKNKRFVLNIDLLDFFYFFHFGRVKGFFEKNKYFKVPSEIAITIARLACYQQRLPQGSPCSPIITNLICNILDIRLLKLGKKYKLDYTRYADDLTFSTNNKIFPKHYDEFLFEITSVIEKAGFKINDKKTRLLYKNSKQEVTGLVVNKKLNVSNDYYKTTRAMANTLYKDGSFTINGADGTINQLEGRFAFIDRLSKHNNKLDTNKHDFWHLSGREKEYQKFLFFKYFLQNTKPLIITEGKTDIVYIKSALKNLYKNYPRLIIKEGNNFKFHISFLNKTKRLSYFLNINIDGGSVMSNIYKNMYNNENSLAKLFKDKYKTEAKNNVILLVDNEQKNENKPLRQLLNSAKINLNQNISSHITHNLYLLTHQLVDNKKECEIENLFTNETLGTKLNNKSLNLKEKDFNKEIHYGKEIFSQYVRKNYKHIDFSNFKPLLDELNNLL

SEQ ID NO: 1275 - protein, 568 aa, Campylobacter sp.
  source 1..568: note = Related to RBJN01000156.1
MLSLKDVKTRKDFAVFLGIELKLLTYILYHIKVENLYTTFEIPKKNGGTRIINAPDKKILKKIQNRLMNKLYNYQNKIKKDENIKINISHGFEKGKSIITNARIHRNKRFVLNIDLKDFFASFHFGRVVGFFEKNINFRIPKDIAIIIAQLCCYKGSLPQGAPTSPIISNIICNIFDMRILKLAKKYKLDYTRYADDLTFSTNNKDFLNIYNEFLLCISKEVEKAGFCINQKKTRLFYKDSRQEVTGLVVNKKISINHSYCKYTRAMANSLYKNKSFNIDGKDATMNQLEGRFAFINQIDRYNNIININDNKHNDGKKSNDKKLNCREKEYQKFIFYKYFFANQKPLIITEGKTDILYLKSAIKSLYAYFPDLIKKNSNDEFEFKVSFLRRTKRLEYFLNFVKDGADSIQNIYRFFVGREVVNYSEYFKKITKDIAANPVILIFDNEIPNNKKPVRKFINFTNKKEFENILEKKLYANIVDNLFIITNQLVRDKKECEIEDLFNDKTLNHKIDGKVFCRDSAIFDKQKHYSKEIFSKYISKNYKDKDIDFINFKPMLKNIVEIITNYK

SEQ ID NO: 1276 - protein, 502 aa, Campylobacter concisus
  source 1..502: note = Related to NZ_CP060707.1
MQKSIVFKILDHIRETEKDKYIKTNISHAFEKGKSIITNAKIHRNKKFILNIDLKDFFDSFHFGRVAGYFEKNRELKFSRETSILLAKIFCCDGKLPQGAPSSPIISNLICNIFDMRILKLAKKFKLDYTRYADDLSFSTNDKNFIKFYDDFMTKLNNEVKRAGFNINDKKTRLLYKDSRQEVTGLIVNKKISIKREYVKSTRAMANTLYNNGSFHINEKEANLNQLEGRFNFIDQIDRYNNKIQKTNKNHRMLNSREKEYQKFLFYKYFYANNKPLILTEGKTDILYIKAALKNLYSEYPKLIEKVNNKFNFKISFLERSSRLEYFFGITKDGADSLINIYNYYSGEDVKLNLLNFFEKKETKSCKPAILLYDNELHKINGIEKPLSKFIRKSVKENQDNFKKIIQKNLYNKLLGNLYLATIPIVDTNKQEAEIEDLLNKEVLEHKINNRSFSKDPKNGNEYGKNELSKYVFKNYSNINFQNFKKLLDTLQNIIEEYEIKI

SEQ ID NO: 1277 - protein, 556 aa, unidentified
  source 1..556: note = Related to JAFRHU010000008.1; note = Clostridia bacterium
MISIDQVETRDELADLLHIRHNLLTYVLYIAKPDSYYQTFYIPKKNGESREIQAPRRELKRIQKRLALELSVYQQSMYKTFDINTNIAHAFRKGRSIITNAKIHKNKRYIVNIDLKDFFHSIHFGRVKGFFEKNTFYQLPSTIATIIAQLTCYNGRLPQGAPSSPVITNLICQVLDYHVLRIAKKYRLDYTRYADDMTFSTNMTEFWNERETFLSDLTREIDRNGFRINDAKTRFIKRESKQTVTGLTVNKKINADRIYYKETRAMADRLYKTGSFNINGKPGTISMLEGRFSFIDQITKFNNKKDGKTHDIRTLCARERDYQKFLFYKYFYANERPLIITEGKTDIIYIKSALKKLYDVYPQLIKKNSDGSFCYKISFFHRTPRMKYFFNISMDGADTITKIHLFYSGNNKMPNYYQELSTNQKMKNAVIFLFDNETKSDRPLKKFIGYCKLDDAQKEELQEQCFTRLIDGSELYLATVPLVEGDDESEIEDLFPKAVKDIRIEGKMFYRKNDFNPKIHYGKEVFSKYIYNNYDAIDFSGFIPLLDAIVKAIKTK

SEQ ID NO: 1278 - protein, 554 aa, unidentified
  source 1..554: note = Related to JAFWMS010000015.1; note = Clostridia bacterium
MKLINDISTRYELADLLHIRLRPLAYVLYISKPNSYYRTFYIPKKNGDLREIQAPCGKLKYIQQRLMAELNNYQDYLSKTQGIKTNIAHAFIKKKSIISNASIHKNKRIVINVDLKDFFHTIHFGRIKGFFEKNHFYQLPSDIATMIAQITCYNGHLPQGAPSSPVITNLICQVLDYNILRIAKKHRLDYTRYADDLTFSTNKGDFMDNYQSFMTELSKEIERNGFIINENKTRLVRRESKQTVTGLTVNKKINVDRSFYKLTRAMADCLYKTGSFDIDGEPGTINMLEGRFSFIDQIVHYNNINDGKKHDYRSLCAREREYQKFLFYKYFYANERPLIITEGKTDVLHLKAALRKLYLQYPDLIQKKQDGSFEYKISFFRRTKRMKYFFNISPDGADTMKSIYQFYTGRNNVPNYFQTLSARNMENAVIFLFDNETCSERPLKKFMDWAKLQTAQRTELKSKLYAQLIDDSKLYLATTPLLAEKKETEIEDLYPESVQNIKLSGKEFCRASVFDSERYYGKDIFSKYVYNHYDSIDFSGFVPLLDAIRNAIQS

SEQ ID NO: 1279 - protein, 553 aa, unidentified
  source 1..553: note = Related to JAFZIH010000156.1; note = Clostridia bacterium
MIDIVETRDDLADLLNIRHSLLTYILYVAKPDSYYETFSIPKKNGDLREIEAPQRELKRLQKRLANELTAYQHYMYKQFEIKTNIAHAFIKGRSIITNARIHKNKKYIINIDLKDFFHTIHFGRVKGFFEKNEYYKLPSDVATIIAQLTCYQGRLPQGAPTSPVISNLICQIFDYRVLGIAKKYRLDYTRYADDLTFSTNRSEFWNEYQAFLSELAKEIKKNGFAINDAKTRIVKQESKQTVTGLTVNKKINVDRTFYRNTKAMTNCLYKIGSFTIDGQPGTLNMLEGRYSFIDQITRYNNKIEGKKPESRKLNAREKDYQKFLFYKYFFANERPLIVTEGKTDILYIKAALKKLYRKYPQLVIRNANGNFEYRVSFFRRTSRIRYFFQISQDGADAITTIYQLYAGKDDERNYYKKIANQTMRNAVIFLFDNETQNKKPLKKFIDVAKLNDTQKDNLRTKLYTRLLDNSKLFLATTPLPAGNRKSEIEDLFTEATRNTIIGGKRFSANDQHDTAQFYGKKIFSEFIYDHYDAIDFSGFIPLIDAINNAIQSK

SEQ ID NO: 1280 - protein, 422 aa, Schleiferilactobacillus harbinensis
  source 1..422: note = Related to JAGFBC010000073.1
MEIQGLQSRRQIAELLGVPLKELTYILYVQKPETFYRLFEIPKKNGGFRKIDAPEGPLIYIQRMLARRLTAWILEKKLNTSVSHAFKKGRSIITNARAHRNRRFVLSVDFRDFFNNIHFGRIEGFFRKNKYFGFSREAAIVIAQLTCYHGSLPQDAPTSRVLSNLICQIMDRRILELASKYRVHYSRYADDLTFSTNWANFGNESKNFLSELTVVIGQSGFQINESKTRLQYKDSRQEVTELIVNDKVGVPKRFVKNTRAMANTLYKTGQFEINGKQGSINQLEGRFTFINQIDWYNHRVIDGVEPTHSSTRARLMKLNSRERQYRQFLVYKYFISNSQPLIVTEGKTDIPYIKSALRSLNQQFPDLVTFNDEGEYSLKISFFEQGIRLDHGRSGNKKNQRLPYFLGLKMDGADELQHIYDY

SEQ ID NO: 1281 - protein, 584 aa, Dialister sp.
  source 1..584: note = Related to JAHADJ010000026.1
MEKFSDIITRKQLAQFLEVKLSQLTYILYKQGIDSNYHSFSILKRDGGFRRIDAPKNVLLKIQMSLVNRLWEVQESIWENKGYRSKTAHAFIKGRGIITNAKIHRKKRFVINLDLENFFGSIHFGRVKGFFQKNKYFNMLPEIATIIAQLTCYKGCLPQGAPSSPIISNLICQILDLRLRKIAKKYRLDYTRYADDLTFSTNADFISVEKDFFSEIKVEIERAGFHMNDRKTRIQDYHHRQNVTGLVVNEKLNVNSDYCRQTRAMAHNLYTKGTFTIGSIEGTMDQIEGRFSFINQLDWYNNQANNKANKKKNNFLGRVDAFNKREKEYMKFLFYKYFWQNKKPLIITEGKTDVRYLKSALKSLSLEYPELVNVEDDGGVKFLVSFLNKTRRLEYFLGINRDGGDTLTNLYSNYFDIKRNEREAGTNGRNNKSKFGYIEYFKKYSSTERKAPIILFFDNELSIRNKPLNKFSVKLNSEEKNRLKTNGYIQLNSDMKLFVMTMKLAENQTSCEIEDLFDERTLCHEDAKGRSFSREDRPDLNEFYGKDYFSKYVCSNYKQINFEKFKEVFNTIRSIMDECNYQEE

SEQ ID NO: 1282 - protein, 1009 aa, Dialister invisus
  source 1..1009: note = Related to SCPI01000001.1
MNKFCEIGTRKEFAEFIGVSLKKLTYLLYVKHVDNYYHSFEIPKRSGGSRQIDAPIGDLKKIQYSLADKLWEHQKIVWRENNIYPKVSHAFIKGKSIITNAKVHRNRRFVINLDLEDFFGGFHFGRVRGFFQKNRYFSLPIEIATIISQLTCYKGHLPQGAPTSPIITNFLCQTLDYRLIKLSKKYGLNYTRYADDLTFSTNRNFVDIQGNVLLEIEQEVGKFGFHLNRKKTRIQFNDSRQVVTGLVVNKKINVDRNYYRETRAMADKLYKTGCFSINDSYGDIKQLEGRFSYINQLNWYNNQLDDEKHNLYSLKGREKQYQKFLFYKYFWGNEKPLIITEGKTDIIYLKSALKKLYKQYPNLVNKKDDVFQFNLSFLNRTKRLKYFFGIEKDGADTMAGVYNKFWSSDKNKNTIDYINYFRTYAKQKTNKPIILLFDNEFKKGKPLYKFAESTGLKNRIQGMLKDKKRRLLYIKLREDYNLFLLTMKLPEGKEECEIEDLFDEKTLGHEDKNGKNFSRGSKFDNSKYYGKACFSQYILQNYQNINFDKFQNMLESIQQIVSGYRVAIRDLGVHGEGIGSVDGFTIFVPGALPGETVTAEITLLKKSYALGELLSIEWESPFRVVPKCPVYENCGGCQLSHLTYEGQLDMKYRRVKDVIERIAGESGDLVRPVLPAAHPFAYRNKMAVPAGLVKGKAALGCYRQGSHDIIPVSSCAIQKEENNRLLQFARRFIEKYRISVYNEKTRKGNLRHVMGRVGDDGKVMAVLVTASETLPEEKRWIEEIKKELPEVVSLWHNIQPKPGNTILGAKIRHLWGRETLTASLCGLRFEVSPYSFFQVHKEQAEVLYEKALEYADLKGGETVIDAYCGTGTISLCLAKKAKRVIGIEIVKPAIEDAKKNAKKNHMENTEFYAADAGKLMPQLYRKGLVPDVIVMDPVRAGCSGEVLKAAAGMKPKRIVYVSCNPATFARDAKILKSEGYEIKKVQPVDMFPQTMHVETVALMIRGKSK

SEQ ID NO: 1283 - protein, 566 aa, Eubacterium minutum
  source 1..566: note = Related to CP016202.1
MEYTKIKNRRDLSLALGVPPSELTYVLYKKGVDQYYSSFLIPKKSGGNREIDASKGALKYIQRRLVGLLWERQNTVWSEETILPNIAHAFQKKKSIMTNANVHKNKRYVVNLDLENFFGSIHFGRVKGFFAKNRYFCVGEEVATVIAQLVCYKGRLLQGAPSSPIITNLICGILDIRLLKLAKKYRLDYTRYADDMTFSTNSVTAEDYLNDFIADLAIEVEHAGFKINERKTRVIYRNSRQEVTGLVVNKRISVKRDYYKLTRAMAANLYKENEFTIGGTRGTITQLEGRFAFINQIDKWNRKMGVLSKELTSREEQYKKFLVYKYFFATERPVIITEGKTDVQYLKAALKANAEKYPDLVSKTDNDKFKFKISFFNRTKRIKHFFGSAEDGADAIKPFVLMYGSSKDAMIEWFKQFTGNNPCKPVILIFDNEDSKEKPLSKMIGTLLNDKVLRNKRKANDMRCELNEHGKMHVKDNLFFATTPKNANKDCEIENLFNKNELDGIRINGRTYHEGFEKSAGWDPAKHFSKNVLSLYVLKDYKNINFEGFIPLLDAINSIVKNDDHY

SEQ ID NO: 1284 - protein, 559 aa, Staphylococcus schleiferi
  source 1..559: note = Related to CP009676.1
MNLNKINDLKDLASYIGVKPSYLAYHIYHNPRIKLNQHYTEFEISKSSGGSRIIATPNKNLKIIQKKLAFKLNQHLKSLGFYRNNKILHAFIKENKPYQRGFISNSKIHRKKNYILNVDLENFFESIHFGRVRGYFQKDDKFNFNKDVATIIAQICTYKGSLPQGAPTSPIISNLIGNLLDSKILKLSKKYKLHYTRYADDMTFSTNDYKFVRNINQFNKELENIISSAGFKINTSKTRLQYRTSRQQVTGIVVNEKLNIPREYYKKTRAMAHNLYKNDEFEINGEKSTLNQLEGRFSFINQLEWYNNKNNKNKKKPYLKLSSKETEYQRFIFYKYFIKNDLATIITEGKTDVLYIKAALKKTWKEYPKLITKDNNGNFLFKIKFLNKTKRLNYFLGIGIDGGDSLINVYNHYKGKDNVNDLRKYFNKFNCNYSNPIIMLLDNEIDVKGKPLNKMINIIKFEKDELERNLYVNLVENLYLSTIPKTKEKNESEIEDLFNEETLNKGIEGRPFTKKDNYNKKEYCGKDEFSKYVYNNYTNIDFKKFHPLLKALSEIVNKK

SEQ ID NO: 1285 - protein, 558 aa, Staphylococcus saprophyticus
  source 1..558: note = Related to CP022056.2
MNFNQINDRKDLAKFLGVKPSFLTYHIYHNPQIKLNQHYTEFEIPKRSGGIRVIAAPNKKLKIIQKKLAFQLNEHLISLGFYRKNKSIHAFIKENKSNKRGIISNSKIHRNKKYVFNIDLENFFESIHFGRVKGYFQNDDKFNLSKDIAIILAQICTYKGSLPQGAPTSPIISNLIGNILDSKILKLTKKYKLHYTRYADDMTFSTNDYKFLENMAGFNRELENIIELSGFKINTSKTRLQYRTSRQQVTGLVVNDKVNIPRDYYKKTRAMANNLYKNGKFEIEGKEATLNQLEGRFSFINQLEWYNNKKFKNKKKPHMKLSGKEIEYQRFIFYKYFIKNEFLVIITEGKTDPLYIKAALKKYWKSYPQFIMKDSDGHFLFKIKFLNKTKRLNYFFGINKDGADSLINLYNHYKGSNGVNNLSDYFKKFNCKYSNPLIMLFDNELNIKGKPLKKFHNHIQFNEPELQNNLYVNLVENLYIVTTPLIDKKKESEIEDLLPQKILDEGIEGRSFTNQENYNKNKHCGKDEFSKYIYNNYNEINFENFIPLLDALCKICND

SEQ ID NO: 1286 - protein, 558 aa, Exiguobacterium sp.
  source 1..558: note = Related to NZ_JACSMB010000004.1
MTNFKDIKTRNELAEFIGIPIRHLTNVLYKINVDNMYSSFKIPKKSGGERVIQSPNKDLKNIQVKIAQSLDVHITKQQKYDNNISHAFKKNKGIITNSKVHRNKRIVVNMDLENFFESIHFGRVRGYFNKNDMFKLPIEVATILAQLTCYKGSLPQGGSTSPIISNLICEVLDYRILSLAKKYKLKYTRYADDLTFSTNNNEFVNLYSQFSDEISKVILKSGFRINQKKTRLQFWNSRQTVTGLVVNKKINVPREYYKNTRAMANQLYKTGEYVIDGDLGTIGRLEGRFTFIDQLTKYNNSLDDDIKHNRFHLSGREVEYQKFLFYKYFFSNSKPLLITEGKTDVRYLKAALKKHSLEYPELVEKDTNDNFNFKITFLKKTKRMKYFFGIVPDGASALNNVYNFYKGVNLDPNHYEHFMKISENRPTNPVVLLFDNEITKEKPLNKFINHAKINNKKSIIKQNLTLNVIGNLHLLTTPLMDNRLEGDIEDLFKTSELAIVIKGRKFDKTEKLDKSLYYGKDQFSKYVLLNYEEIDFDNFKPLLDKLSDLIRNHSVASK

SEQ ID NO: 1287 - protein, 557 aa, unidentified
  source 1..557: note = Related to JAFPWD010000023.1; note = Clostridia bacterium
MKKFNEIQSRNDFADLLKIPLSSLTYLLYVLKPDNCYNVFSIPKRSGGEREISAPNKRLKSVQTAVAMELWRYIKNIPDFNRSAVSHAFTKKKGIITNAAIHRNKRIVVSFDLNDFFPSIHFGRVVGFFEKNRHFKLPHAVSLIIAQIACHNGSLPQGSPCSPIISNLICQILDYRILRLAKKYKLDYTRYADDLTFSTNWKGFVDAETCFYSDLSVLISKAGFTINEAKTRTVFRNSRQTVTGIVVNKKLNINREYYKETKAMAHNLYSKGSFVINGKEGTINQLEGRFAFIDQIELYNNRIDGNRHNYRNLCGRELEYRKFLFYKYFYAADKPTLITEGKSDELYIKAALRKMFLMYPSLINKKADGRFEYKVRFLKRSKRLQYFFGFSPTGADAMTELRKCFIDESNSTSLFSFFNRICASGQIHPVIFIFDNETERDKPLKKFLNQKPATSEVDKEFLQNNLYLNIIKGSKLFIITNKLVSGKSEAEIEDLFSENTLSTEIGGKSFCRKDNFDESKFYGKAFFSKYIYKNYESIDFSNFIPMLDALNNIITTY

SEQ ID NO: 1288 - protein, 560 aa, Eubacterium sp.
  source 1..560: note = Related to JAFVFJ010000126.1
MEQGFNTISNRNELADYLGISRSSLTYVLYVKGIDSFYVSFDVPKKSGGTRTIHAPQGTLKGIQKILLIKLYNYRYTINENENIKLNISHAFENKKSIITNARIHKNKRFIINFDLKDFFESFHFGRVKGYFEKNKYFCMPEDVARIIAQLTCYSGTLPQGAPTSPIITNLICQSLDYKILSLAKKHHLDYTRYADDLTFSTNDKKILENYDTFYKSLVNIIHGSGFEINEKKTRFVYKHSKQIVTGLVVNKKVNVDSTYYRNVRSMAHHLYTEGTFWDNGNECTINQLEGKLSFINQIDKYNNKLCEEKKNLANLNRREREYQRFLFYKNFYGNPQPVIITEGKTDILYIKAALRKYYLDYPELIEKSNSGQFHYKLTFFRRSSIKQFFFGMSYDGADAIKKIYNFFTDNDSGRFPNYYEKFNQISAIKTSSPIILLFDNELNNKNKPIKNFCNYVGLKPETVDCIKNGGFIPIVDNKLFLLTHQLVNDLAECEIEDLFDEITLNHTINGKTFSRQSDFDIDKHYGKEIFSKYIISHYESIDFSNFKPLLNSINQLIAH

SEQ ID NO: 1289 - protein, 480 aa, Lactiplantibacillus plantarum
  source 1..480: note = Related to CP033618.1
MKKSPFYQISTRQELADALNMRLKSLSYVLYKLDPQSLYTIFSISKKSGGKREITAPKKPLANIQSKIANVLMLQPENSALRSKASHGFIKNKSILTNATVHRNKNYVLNTDIQDFFPSFSFGRVLGFFKKNNAFMMDHKVAVALTNLCCYKKKLPQGAPSSPPITNLIFHIVDFKIIKLARKYNLDYTRYVDDLTFSTNEKSFPKVSQNFLNELNALITHEGFKLNEDKTHLEYKNSRQEVTGVIVNKKLNVHKEFYKNTRAMADNLYKNTEFTIDGKLGTINQLDGRFNYINQLVRYNKKSIKRKVAYKTKYNVEKKDFKHQSRFILFSGKEQQYRKFLFYEYFIYGNSSIILTEGKTDVSYIKLALRVYKQEYPQLITSHGKKTEYSVSFLKHTQNTSTKGQKKGKKNNQMSHRIPYFIGISEDGGTSIDNFLNYYSEISTTNLNMYPNYPKYFISDLGKLPDKKVIILLDKADCKI

SEQ ID NO: 1290 - protein, 372 aa, Streptococcus thermophilus
  source 1..372: note = Related to WTXU01000099.1
MEKSPFYQISTRRELASVLNMQLKALSYVLYKLNPQNLYTSFSIPKKSGGVRNIVAPQKPLANIQNKIANVLMLQPENKASGSKASHGFIKNKSILTNAKVHRNKKYVLNTDIQDFFPSFSFGRVLGFFEKNNAFMMDHKIAVALTNLCCYKQKLPQGAPSSPPITNLIFHIVDFKIIKLARKYKLTYTRYVDDLTFSTNNHSFLKTYHDFLTELNALITHEGFNLNNNKTHLEFKNSRQEVTGIIVNKKLNVHKEFYRKTRAMADNLYKNNKFVVDNAEGRIQQLDGRFNYINQLVRYNKKVKKRGAPYKTKYTHSSESFSKLDRFLSFTGKEQQYRKFLFYKYFVYGDSSIILTEGKTDVSYIKLALKKY

SEQ ID NO: 1291 - protein, 667 aa, Lactiplantibacillus plantarum
  source 1..667: note = Related to VHJC01000059.1
MEMMMQMNKSAFFKISTRKELANALDIRLKTLTYILYKKKPQTLYTNFSIPKKSGGTRDIVAPEKQLANIQIKIAQILMSQPENDSSHSKASHGFIKNRSILTNAQIHRNKKYVLNTDIKDFFPSFSFGRVLGFFEKNNAFKMEHKVAVALTNLCCYNQSLPQGAPSSPPITNLIFHIIDFRIIKLAKKYHLDYTRYVDDLTFSTNENSFPVTYKKFLIDLNNLIDHAGFSLNQDKTHLAFKNSRQEVTGIIVNEKLNVHNEFYKSTRAMADKLYKTNSFSIDGTLGNIRQLDGRFTYINQLVRYNKQRKLIRYRTKYSTPHNEKETKNTISNKDRYRFFTGKEQQYRKFSFYEYFVYGNNSIILTEGKTDITYIKVALKKYAKNYPDLIKLQGNKYDFLISFLNHQKNKEKRSKNFKRKKTKILANQMSHRIPFFLGISEDGGTTYSDFLYYYAEMTIEKESISYNMQRSYPNYPKYFISDLNKLYKKKVIILLDNEGSNHPLDHFIKTCAKLKIKKKEDIENDFKNKGYSHLKYNLFLLTIPKKNTSNSQNCAIESLLNKDEIEKLNLKGKSFSSKNNETSKNSFGKQALVTKIKSAPTNFDLSGFRSLLDLISKINSLQPIGNEQYKYKKKKVETNKEVYIRNSLGFRIPIEYQSITQYKDFVK

SEQ ID NO: 1292 - protein, 624 aa, Apilactobacillus kunkeei
  source 1..624: note = Related to JXDF01000031.1
MSDLILFLYSGGIFLFKDVKSVESLSRYIGVSVKLINFVVYFKGVDSFYEEFSLPKKSGGSRFISCPKGPLKKLQKKLQKKLSEEYDNKYGSFNVSQAFIKKRNIMSNAKVHRNKKFILNLDIEDFFDEFNFGRVYGYLQKSNDFKMNKQLSVILSKIFTYKNKLPQGSPSSPVLTNFIFRIVDFKILKLSKKYKLDYTRYADDMTFSTNDSNFKYRYINFVEELKFLLYRQGFKINKKKTRLQFSSSKQEVTGLVVNKKINVSRKYYRDLRAQAFNLYSDGKYFIDGKKFDKLNKLEGRFAFVNQVKRYNFLIESRKYARKSKEYSNFIKSTTKYRYEPYLGGFDEQYRKFLFYKYFIHGSKPLIFVEGKTDIRYIKAAMMMYYNRYPELIRNNNGTFEFNIDFFKRGNEDLLKENYKRNEIDYSIKDYYLGLSDDGASVMSKIVEYWGIALDKKTKENKNYYDYFVNKLGNKSKKVILLFDNEYLDKKNKPLRSFLNHVYGNKATSQYRKLISEGKLVIADNLYLITLIKDKNYKKELENYIDDHINDKNFKGNNDLSIDIENLIDLSTITINQKTFNRNANKDSDKEFGKQTLSKYVYKHYNTVGLSGFIPLLDQLKEFCK

SEQ ID NO: 1293 - protein, 533 aa, Metamycoplasma phocicerebrale
  source 1..533: note = Related to CP033058.2
MSSKYKGNSSRFFIMKKFEEIKKVEDLAKALNITINKLYYFSNNSNKPNKLYTQFTITKKLGGERTINAPKKELKKALNKLFIILKNRHLNYTKEKKIKDKISFGFKKNNGIIDNAKNHRNKKYVLNVDIKNFFDSFHFGRICGFFMKSKEFKINSKNNDTVKKISILISNLLCYKQCLPQGSPCSPILSNLIFRTIDYEILKLSKKYKLKYTRYADDMTFSTNDNNFLNSYENFISELNECINKNGFKINDKKTQIEFYKSRQRVTGLVVNQKLSVRREFYKNTKSMALNFYRNGYFKINDKIGKLNQLEGRFSFINQIDKFNNIESNKYENKNKDFYYVLNSREKQYKLFLFYKFFYNPSKPIIITEGKTDILYIKAALKKFYEKYPNIIQKNLNGTFSYKVKFLAKENKQFSNYKERLDKNFQQIEIILKDVIENIDDKKLEDIIQYVIDSIEKIKEIFKSKIVANKTSFEKIKLKLNYFWEEIVNKKTSKELNEIWNEIINIYKNIKITNLKKVNKFLYFFKYWFFRGF

SEQ ID NO: 1294 - protein, 594 aa, Streptococcus sanguinis
  source 1..594: note = Related to JAJEOY010000010.1
MDWNEIKSCRDFARYLNIPYKHLTYLLYNRKIDKLYESFEIPKKNGGIRIIQAPKKELKEVQQQILKILEKRALSLEKENKISFRLSHGFIKYKSIITNAEKHRNKKIILNIDIENFFPSFHFGRIVGFFEKNKNFKLPKEVAIFLAQLTTVDGSLPQGSPCSPIITNLICQILDFRISKLAKEYKLNYSRYVDDMTFSTNKENFLDCYPEFFSKLSNVLIKAGFSINDKKTRIHFNRNKQIVTGLVVNKKINVQKNFYKNTRAMAHNLYKQGTFFIDEKEGTINQLLGRFNFIDQLERYNNKNKKQLSLQKNYIEQQKYLTKGQQEIKGDFGYLGKLSSREKEYRKFLYYFHFFSSSKPVIVTEGKTDSRYLKAAMKKCFKDFPNLIQKNEDGTFLFKVKFLKRTSLLKYYFKFYEDGADSMKNLSNFWITGEENKLFPNYNKFFQELTGRVASNPIIFLFDNELSNKKKPIRNFINHILKSTPNEAGSLRNEISNVKYINIVDNLYMLTHASLSGNEDEEIEDLFTNDVLNHRINGKSFSRENDYDFTKFYGKNDFSKYVLKNYRSIDFKNFIPLLNNLNKIILEYNSKLTF

SEQ ID NO: 1295 - protein, 592 aa, Streptococcus suis
  source 1..592: note = Related to NZ_CZFC01000010.1
MQWDEIKTREDFATFIGVPYKYLTYLLYNQRIENLYIAFEIPKKSGGVRIINSPEDRLKKILKKIMRKLEERMVFLEQEGKISSKVAHGFIKSKNIITNASSHRNRKIVLNVDIENFFPSFHFGRVKGFFEKNKYFKVPKEVAVFIAQLTCYNGSLPQGSPCSPIITNLICQILDFRIIELAQKYNLKYTRYADDMTFSTNDMQFVDTYIRFVEELGDLLTRSGFSLNDEKTHIQFQREKQTVTGLTVNKKVNVSRHFYKNTRAMVNTLYKKGEFMIDGERGTINQLFGRFNFIDQLVKYNNRIEREAIIRNDYVNQQKNLIKSVPDAENKFDYLKKLSAREREYRKFLYYYYFFSSTVPVIVTEGKTDSRYIKAALKNLYRRYPKLIERDEKGKFVFKIKFLRRTALLKYYFRFFEDGADAMKNLSNCWFGKTDEKLFPNYSELFKEITNRKALKPVIFLFDNELKNNKKPIRNFINHVSNNTIHDNKTIENEIRENNIFNVIDNLYLLTHPSETEDEEIEDLFDDPTLDYRIAGKVFTKESKFDVDKYYGKNDFSNYILQNYSQINFKNFTPLLDNLNKIVDVYEAKYKS

SEQ ID NO: 1296 - protein, 655 aa, Streptococcus parasuis
  source 1..655: note = Related to NZ_AP024276.1
MNRLKQVTNKDDFAKLLGFKNSRYINYVLYCIGTDKLYKEFEIPKKNGGVRIICAPKPELKLLQKKLAYVLWDCFVDDLSSKSKEKNYKIPMLSHAFEKNKSIITNAQAHRNKKYILNVDLKDYFETFNFGRVRGFFIKDKDFQVSPEVATVIAQIACYQGKLPQGAPSSPIITNLITRILDYRIVKIAKKYRFTYTRYADDLTFSTNRKLYSNKLKATKELDKFLEELEKLIVSSGFEINSKKTRLSDAMQRQEVTGLIVNKKLNVKREYIKNTRAMAFKLYKDEKFEIDGKQGTIEQLTGRFAFIFQIDQYNNYLLYKKSLVENSLNSQKNLLGRNLSKKSDSKYYWKYIFYNRDLRKELFYNKQHKTYNLPKEFYAISKEDKKNYMAFFDSKEKEYKKFLFYKYFYGNSNPIIVPEGKTDPRYIKAALKNLYLKYPELIKKSGNKFIFEIDFLKHSNTIEYLFNVPEGGPGFQYWYNYFSDKKDFPMSDKEKLLYPNYIEYFYNQTSAHPKKPTIFLFDNEPSGNPLYAFVNYAKDLEISSSNLNQIRGSSFSKIVKKNSLYIMATPLIKNWNQGTSSDIEDLIVSNDKNIEPIQNFMKINKIDSLNVLDVKKHKEIFSKFVLRNFNKFDFTAFIPLLDGIRDNILDYKMKK

SEQ ID NO: 1297 - protein, 652 aa, Streptococcus ovis
  source 1..652: note = Related to NZ_KB904582.1
MNKLKQLDNKDDFARLLGFKNSSYINYILYNIGTDNLYRVFSIPKKNGEVRPIHAPKPELKFLQKKLVNVLWDCYIDDLTVKSKEKNFKIPMLSHAFEKNKSIITNAQLHRNKQYILNIDLKDYFESFNFGRVRGFFIKDKDFQVAPEVATVITQIACYQGKLPQGAPSSPIITNLITRILDYRIVKIAKKYRFTYTRYADDLTFSTNRNLRSNKLKATKELDKFLEELEELIVSSGFEINSKKTRLSDDMQRQEVTGLIVNKKLNVKREYIKNTRAMAFKLYKDETFEIDGKQGTIEQLTGRFAFIFQIGQYNNYLLYKKSLVENNLEAQKNLLGKKSSKKSDSKYYWKYIFYNRDLRKELFYNKQHKTHNLPEEFYSIGKEEKKMYMALFDSKEKEYKKFLFYKYFYGNSKPIIVTEGKTDPRYIKAALKNLYPQYPELIERDGDKFIFKIDFLKHSNTIEYLFNVPEGGEGFNYWYNYFSNKEDFKMSAKEKLLYPNYIEYFQKLTSRQPKHPTIFLFDNEPTGHPFYQFASYSKDLDISPNNLDTIRNPMVNYRINQKSSLYIMSTPLVKNVNSGSSSDIEDLLIAKQKMPTLYLDGQNKTFKKNGGFNYYGKEILSNYVLKYYQNFDFSEFIPLLNGIRDNILDYRK

SEQ ID NO: 1298 - protein, 645 aa, Streptococcus henryi
  source 1..645: note = Related to NZ_AQYA01000033.1
MNKLKQLESKDDFARLLGFQNSKYINYLLYSVGTDNLYKTFSIPKKGGGERIINAPKKELKFLQRKLANVLWDSYIDSLKLKSKDKKFKIPMLSHAFEKNKSIITNAQVHRNKRYIINIDLKNYFDSFNFGRVRGFFLKDRDFCVTPDIATIIAQIACYQGKLPQGAPSSPIITNLITRILDYRIVKIAKKYRFTYTRYADDMTFSTNRDLYSNKLQATKELEKFLRELNELVISSGFEINSQKTRLSNEMQRQEVTGLVVNKKLSIKREYIKNTRAMAFRLYKDGYFEIDGKLGTIDQLTGRFAFIFQINQVNNYLLYKKSLVKNNLEFQKNLLAQQTLKKSESKYYWKYIFYARDLRKELFYNEKHKTYNLPTEFYDISKNEKRMYMSLFDSKEKEYKKFLFYKYFFGNDKPIIVTEGITDPRYIKAALKSLHQQYPELIEKVDDKFIYKVEFLNHSNTIEYLFNVPEGGEGFKYWYNYFSNKENFPMDSNEKILYPNYIDYFQKLTIRKPKNPTMFLFDNEPTGSPLYNFARYAKDLDINSNNLNQIRQPMLNYRINRKSSLYLMLTPLIMGSNSSDIEDLLLSKNTPPILKGKSFSKGGGSNNYGKDVFSKYVLKKYSQFDFSDFCPLLDKIRDNILDYRK

SEQ ID NO: 1299 - protein, 652 aa, Streptococcus minor
  source 1..652: note = Related to RQZA01000003.1
MNKLKKLDNKDDFARLLGFKNSTYINYILYNIGTDNLYRTFSIPKKNGGTRLVHAPKPELKFLQKKLVNVLWDCYVDDLTAKSKEKNFKIPMLSHAFEKNKSIITNAQVHRNKQYILNIDLKDYFESFNFGRVRGFFIKDKDFQVVPEVATVIAQIACYQGKLPQGAPSSPIITNLITRILDYRIVKIAKKYRFTYTRYADDLTFSTNRNLHSNKLKATKELDKFLEELEELIVSSGFEINSKKTRLSDDMQRQEVTGLIVNKKLNVKREYIKNTRAMAFKLYKDEAFEIDGKQGTIEQLTGRFAFIFQIGQYNNYLLYKKSLVENNLEAQKNLLGRNLSKKSDSKYYWKYIFYNRDLRKELFYNKQHKTHNLPEEFYSIGKEEKKMYMALFDSKEKEYKKFLFYKYFYGNSKPIIVTEGKTDPRYIKAALKNLYPQYPELIERDGDKFIFKIDFLKHSNTIEYLFNVPEGGEGFNYWYNYFSNKEDFKMSAKEKLLYPNYIEYFQKLTSRQPKHPTIFLFDNEPTGYPLYQFASYSKDLDISPNNLDTIRNPMVNYRINQKSSLYIMSTPLVKNVNSGSSSDIEDLLIAKQKMPTLYLDGQNKTFKKNGGFNYYGKEILSIYVLKYYQNFDFSEFIPLLNGIRDNILDYRK

SEQ ID NO: 1300 - protein, 658 aa, Streptococcus equinus
  source 1..658: note = Related to NZ_CP075172.1
MNKLKQLTTKDEFARLLGFKDTKYINYLLYKIRTENLYETFSIPKKNGGERVIHAPKRDLKILQKKLAEVLWDCYVFDLEKKSKNKNVKVPKLSHAFEKNKSIITNAQVHRNKKYVLNLDLKNYFDSFNFGRVRGFFIKDKNFQVVPEIATMIAQIACYDGKLPQGAPSSPIITNLITRILDYRIVKLAKKYRFSYTRYADDLTFSTNRDLSSNKLRSAKILEKFLCELENLIVSSGFEINSQKTRLSDNMQRQEVTGLVVNKKISVKREYIKNTRAMAFKLYKDEEFEIDGKQGTIDQLTGRFAFIFQISQYNNYLLYKKSLIENNFESQKNLLGRNSLKKSESKYYWKYIFYNKDIRKELFYNKQHKTYNLPQEFYSINKIEKEIYMSLFDSREKEYKKFLFYKYFYGNSKPIIVTEGKTDPRYIKAALKNLYRKYPELIEKKGDKFKFKINFLKHSNTIEYLFNVPEGGEGFKYWYNYFSSTMPSNIFKENFPPKSLGQDLYRKMYPNYIEYFQGLTTRKPNYLTIFLFDNEPAGSPLYKFVNHASELQIDTNNLDQIREKNFYRISTKNSLYVMATPLLNKGNSSDIEDLLLARNQLPVLNGKNFSKSGGSNYYGKDVLSKYVLKNFKKFDFTEFIPLLDGIRDNILDYRKNRI

SEQ ID NO: 1301 - protein, 659 aa, Streptococcus mutans
  source 1..659: note = Related to AP010655.1
MNKLKQLSTKDDFAELLGFKNSRFINYLLYSIGTDNLYETFTIPKKNGGERIIHAPKKELKFLQKRLANVLWDCYLYDLKSKSKEKKLKIPMLSHAFEKNKSIITNAQVHRNKKYLLNIDLKDYFDSFNFGRVRGFFVKDKDFQVTSEIATVIAQIACYQGKLPQGAPSSPIITNLITRILDYRIVKIAKKYRFTYTRYADDMTFSTNRELNSNKLRATKELENFLAELERLIISSGFEINPKKTRLSNNMQRQEVTGLVVNKKINVKREYIKNTRAMAFKLYKDGTFEIDGKQGTLEQLTGRFAFIFQTDKYNNYLLYKKSLIENNLDEQKYLLGRNSSKKSESKYYWKYMFYNRDLRDELFYNQKHNTYNLPKGFYSISENEKEVYMTLFNSKEKDYKRFLFYKYFFGNDKPMIITEGKTDPLYIKAALKKMYLNYPELVEKVGNNFVFKIEFLNRSNTIEYLFNIPEGGSGLNYLYNYFSNQIPANFFKQRFPTNNDRKDIYKELYPNYIEFFSNLTLRNPKNSTIFLFDNEPSGNPLFKFVNYAKDLQVESNNLDQIRGTAFKRITKKGSLYIMATPLLPNMNGGNSSDIEDLILSKNTAPILKGKTFLKNGGSNHYGKEIFSKHILKNYKQYDFSDFIPLLDGMRDNILDYRKK

SEQ ID NO: 1302 - protein, 325 aa, Streptococcus constellatus
  source 1..325: note = Related to CABHMZ010000033.1
MNKLKQLETKDDFASLLGFKNSKYINYILYSVGTDNLYKTFSIPKKNGGERIIHAPKEKLKRLQRKLAGVLWDCYLESLKIKSKNKSFKIPAISHAFEKNKSIITNAQIHRNKKYILNIDLKDYFDSFNFGRVRGFFLKDADFKVPEEIATVIAQIACYKGKLPQGAPSSPIITNLISRILDYRIVKIAKKYRFTYTRYADDMTFSTNCELSSNKLQATNELEKFLKELEKVITLSGFKINPQKTRLSNNMQRQEVTGLVVNKKVGVKREYLKNTRAMTFKLYKDEKFEIDGKQGTMEQLTGRFAFILQISQYNNYLLYKINCKI

SEQ ID NO: 1303 - protein, 650 aa, Streptococcus oralis
  source 1..650: note = Related to NCUE01000019.1
MTKLNRLETKTKNDFARLLGFKNARYINYLLYIIKTDNLYNSFTIPKKNGGERVIHAPKKELKFLQKKLADVLWECHLESVESKSKDKNFKTPVLSHAFEKGKSIITNSQMHRNKKYILNIDLKNFFDSFNFGRVRGFFIKDKDFAVSPEIATVIAQIACYQGKLPQGAPSSPIITNLITRILDYRIVKIAKKYRFTYSRYADDMTFSTNRELNSNKLRASKELDNFLTELEEVIVSSGFEINPQKTRLSNNMQRQEVTGLVVNKKINVKREYVKNTRAMAFQLYKDGAFEIDKKTGTLNQLTGRFAFIFQIDQYNNYLLYKKSLIQNNLDSQKYLLGRNSSKKSESKYYWKYIFYNKDLRKKLFDNTKHNTDNLPKEFYSIGKEQKKIYMSLFNSREKEYKKFLFYKYFFGNDKPVIITEGKTDPRYIKAALKKLYQKYPELIEKVRNNFVFKIEFLNRSNTIEYLFNIPEGASGLSFWYSYFSDIKYQTEEAKKLFYPNYMEYFSKFTSRKPKNPTMFLFDNEPSGHPLFEFANHAKDLKDSFKNLDSKRNTSSKKLAKKGSLYIMATPLSPDINYGYSSDIEDLLLSRNSAPTLKGKTFSKDGGANHYGKDIFSKYVLKNYKEFDFTEFIPLLDGIRDNILDYKSLF

SEQ ID NO: 1304 - protein, 685 aa, Streptococcus infantis
  source 1..685: note = Related to JYGT01000002.1
MTKLNRLETKDDFARLLGFKNARYINYLLYIIKTDNLYDSFTIPKKNGGERVIHAPKKELKFLQKKLADVLWECHLESIESKKTLQKRLAAILWECYLKCLNFNYIENNLANVLWECFLKVLEFRPKEKNPVLSHAFEKGKSIITNSQMHRNKKYILNIDLKDFFDSFNFGRVRGFFIKDRDFAVSPEIATVIAQIACYQGKLPQGSPSSPIITNLITRILDYRIVKIAKKYRFTYSRYADDMTFSTNRELNSNKLRASKELDNFLTELEEVIISSGFEINPNKTRLSNNMQRQEVTGLVVNKKINVKREYIKNTRAMAFQLYKDEAFEIDKKPGTINQLTGRFAFIFQIDQYNNYLLYKKSLIQNNLDSQKYLLGRNSSKKSESKYYWKYIFYNKDLRKELFYNKKHNTYNLPKEFYSIGKEEKKMYMSLFNSREKEYKKFLFYKYFFENDKPIIVTEGKTDPRYIKAALKKLYKKYPELIQKVGNNFVFKIEFLNHTNTIEYLFNVPEGGEGFKYWYNYFSDKEGVQMSDNEKVLYLNYIDYFEKLTKKSPKNPTIFLFDNEPSGNPLFKFFNYATDLNVSSNNLGQVRGTSFNRITKKNNLYIMATPLLSTRNNGNSSDIEYLLLSRNPSPILKGKTFSKGGGANHYGKDIFSKYVLKNYKKFDFTEFIPLLDGIRDNILNY

SEQ ID NO: 1305 - protein, 683 aa, Streptococcus sp.
  source 1..683: note = Related to NTGM02000001.1
MTKFNQLQTKDDFAKLLGLKSAKYINYLLYNIKTDNLYNSFPIPKKNGGERVIHAPKKELKFLQKKLSNVLWECYLESIESKSKDKNFKTPVLSHAFEKGKSIITNSQMHRNKKYILNIDLKNFFDSFNFGRVRGFFIKDRDFAVSPEIATVIAQIACYQGKLPQGAPSSPIITNLITRILDYRIVKIAKKYRFTYSRYADDLTFSTNRELNSNKLRASKELENFLTELEDLIISSGFEINPKKTRLSNNMQRQEVTGLVVNKKINVKREYVKNTRAMAFRLYKDGAFEIDKTPGTINQLTGRFAFIFQIEQYNNYLLYKKSLMQNNLDSQKYLLGRNSSRKSESKYYWKYIFYNKDLQKELLHNTKHHTYNLPTEFYSIGKEEKKTYMSLFNSREKEYKKFLFYKYFFGNDKPIIITEGKTDPRYIKAALKNLYQKYPELIEKEGNNFIFKIEFLNRSNTIEYLFNVPEGGEGFKFWYNYFSDKFYYNEKKEKKFFALNSEERILYTNYITYFKQLTNSLPNYPTIFLFDNESNNRNGNDKSALFLFASHAKDLMIPKNKDLEDSKNIKLEEKISDNLEKVRRDKPWRINKKDSLYIMATPLMPHMNDGKSSDIEDLLFSSSQNSLPILKGKEFHKDGGDNHYGKEIFSKYVLKNYKEFDFTEFIPLLDGIRDNILDYKSLF

SEQ ID NO: 1306 - protein, 659 aa, Streptococcus oralis
  source 1..659: note = Related to NZ_CP066059.1
MTKLNQLKTKDDFAKLLGFKNARYINHLLYNITTDNLYEPPIVIPKKNGGERVIHAPQKELKFLQKKLSNVLWECYLESIESKSKDKNFKTPVLSHAFEKGKSIITNSQMHRNKKYILNIDLKNFFDSFNFGRVRGFFIKDRDFAVSPEIATVIAQIACYQGKLPQGAPSSPIITNLITRILDYRIVKIAKKYRFTYSRYADDMTFSTNCELNSNKLRASKELDNFLTELEEVIISSGFEINPKKTRLSNNMQRQEVTGLVVNKKINVKREYVKNTRAMAFQLYKDGAFEIDKKPGTINQLTGRFAFIFQIDQYNNYLLYEKSLIQNNLDSQKYLLGRNSSKKSESKYFWKYIFYNKNLRKELFYNKKHNTYNLPKEFYSISENEKEVYMCLFNSKEKEYKKFLFYRYFFGNDRPMIVTEGKTDPLYIKAALKKLYKNYPKLIEKDGDDFIFKIEFLNRSNTVEYLFNIPEGGEGLKYWYNYFSNQIPANFFNQKFPAKNDGKKIYKELYPNYMEFFSHLTSREPKNPTIFLFDNEPSGNPLFKFFNHATDLNVSSNNLGQVRGTSFYKITKKDSLYVMATPLMPHMNNGNSSDIEDLLLSCNPSPILKGKTFSKGGGANHYGKDIFSKYVLKNYKEFDFTEFIPLLDGIRDNILDYTS

SEQ ID NO: 1307 - protein, 698 aa, Streptococcus sanguinis
  source 1..698: note = Related to NZ_LR134002.1
MNKLNQLKTKDDLARLLGFKNARYINYLLYDKQTDNLYESFTISKKNGGERIINAPKKELKFLQKKLANVLWECYLESLESKNFLQKRLAGILWKCYLKSLEINYIKNNLSDFLWECFMKVLGFKPKEIKTPVLSHAFEKGKSIITNSQIHRNKKYILNIDLKDFFGSFNFGRVRGFFIKDRDFGISPEIATVIAQIACYQGKLPQGAPSSPIITNLITRILDYRIVKIAKKYRFTYSRYADDMTFSTNRELNSNKLRASKELENFLAELEELIISSGFEINPKKTRLSNNMQRQEVTGLVVNKKISVKREYVKNTRAMAFQLYKDGAFEIDTKPGTLNQLTGRFAFIFQIDQYNNYLLYKKSLIQNNLDSQKYLLGRNSSRKSESKYYWKYIFYNKDLQKELFDNKKHNTYNLPKEFYSIPENEKEVYMSLFNSKEKEYKKYLFYKYFFGNDKPIIITEGKTDPRYIKAALKHLYQKYPELIEKDGDRFTFKIEFLNHTNTLEYLFNVPEGGEGFKYWYNYFSNQIPSNFFKQRFPTKNDGKDIYKELYPNYIEYFSNLTTRKPKNPTIFLFDNEPSDNPLFKFCNHAVDLKVSSNDLDQVRGTSFNRITKKDNLYIMATPLLSNRNNGNSSDIEDLLLSRNLPPILNGKTFSKSGGDNHYGKEIFSKHVLKNFTEFDFAEFIPLLDGIRDNILNYW

SEQ ID NO: 1308 - protein, 656 aa, Streptococcus sanguinis
  source 1..656: note = Related to CDMW01000001.1
MNKLNQLKTKDDLAKLLGFKNARYINYLLYNIQTDNLYNSFTIPKKNGGERIIHAPKKELKFLQKKLANVLWECYLESIESKSKGKNFKTPVLSHAFEKGKSIITNSQMHRNKKYILNIDLKDFFDSFNFGRVRGFFIKDRDFAVSPEIATVIAQIVCYQGKLPQGAPSSPIITNLITRILDYRIVKIAKKYRFTYSRYADDMTFSTNRELNSNKLRASKELENFLAELEELIASSGFKINPKKTRLSNNMQRQEVTGLVVNKKINVRREYVKNTRAMAFQLYKDGAFEIDTKPGKLNQLTGRFAFIFQIDQYNNYLLYKKSLIQNNLDSQKYLLGRNSSKKSESKYYWKYIFYNKDLRKELFDNTEHNTYNLPKEFYSIGKEQKKMYMSLFNSREKEYKKFLFYKYFFGNDKPIIVTEGKTDPRYIKAALKKLYLSYPELVEKVGNNFIFKIEFLNRSNTVEYLFNIPGGGEGLKHWYNYFSNKEKFQMDSKEKLLYPNYIEYFQKLTTRKPQYPTIFLFDNEPNNRKKDDKAPLFLFASHARDLEIDSDNLEQARRGSSSRITKKGSLYIMATPLLPNMNNGNSSDIEDLLLSQKKPPILKGKAFSKKDDPNHYGKEIFSKYVLKNYTQFDFTEFIPLLDAIRNNILDYQNIND

SEQ ID NO: 1309 - protein, 653 aa, Streptococcus salivarius
  source 1..653: note = Related to NZ_OU540596.1
MNKLTNVESKDDFARLLGFSNSRFMNYVLYVLRTEELYETFTIPKKSGGERTINAPKKELKILQKKLANLLWDCYIEDLESESKVKNKKIPNLSHAYEKNKSIITNAKLHRNKKYVLNIDLEDFFDSFNFGRVRGFFIKDRNFCVSSDVATVIAQIACYKGKLPQGAPSSPIITNLIARILDYRIVKIAKKYRFTYSRYADDMTFSTNRELASNKLRTTKELDKFLAELEKVIVASGFKINNKKTRLSNNMQRQEVTGLVVNKKINVKREYIKNTRAMAHKLYLSQRFEIDGREGTINQLIGRFAFVQQIDQFNNYLSYKKSLIKNNFDAQKYLIGKDSGKKSESKYYWKYIFSNRDLRKHLYYNSRHDTYNLPKGFYTIGKEEKKMYMSLFNSREKEYKKFLFYRYFYGNDKPIIVTEGKTDSRYIKAALKKLYYKYPELIEKNGSDFVFKIEFLKHSNTIEYLFNVPEGGSGFEYWYRYFSDKKRFQMGEVEKVVYPNYIEYFKKLTNRPPDNPTIFLFDNELQGPLYNFANFAKDLAISTNNFNQIRYSSFDRIVKKDSLYVMATPLIPKINNGVFSDIEDLLLVRNSTPILRGKQFSKHGGSNHYGKDIFSKHVLKNYSKYDFTEFIPLLDGVKNNIKDYYQKSNNRKN

SEQ ID NO: 1310 - protein, 651 aa, Streptococcus hillyeri
  source 1..651: note = Related to NZ_RCVM01000028.1
MSDYVNLKTKDDLAKNLGYRDSRYLNYLLYKVGVDNLYRTFSIPKKNGDERIINAPLKELKIVQRKLANLLWNRYLEILETKSRDRGIKIPSISHGFEKNKNIITNAQQHRNKKYIINVDLESYFDCFNFGRVRGFFIKDRDFKVSSDVATVMAQIACYQGKLPQGAPSSPIITNLIARILDYRIVKLAKKYRFTYTRYADDLTFSTNRNLLSNKLRAEKEFNEFLVELEKIITTSGFNINPSKTRISNSYQRQEVTGIVVNKKINVKRDYFKNTKAMAYKLYKDGEFEIDGKSGTLEQLSGRFSFIFQATQYNNYLFYKKSLIDNNLEYQKNLLGQGTNKKSESKFYWKYIIYNRDLRRELFYNEKHKTYNLPDEFYAISKEEKKNYMALFDSKEKEYKKFLFYKNFYGNDKPIIVTEGKTDPRYIKAALKKLYLYYPELIEKVDNRFVFKIDFLKHSNIIEYLFNVPEGGSGFMFWYNYFSNKEKFHLSNEEQLLYPNYIDFFRKFTSEKANNPTIFLFDNEPFGNPLYQFVNYAKDLQIDTNNLNTVRGPSFNRISKKESLYLMATPLVSNLNNGNSSDVEDLLISTNKLAIQTFFNIKKINYKRLEDVKNHKEIFSKYVLKNYEQFDFTEYIPLLDGIRNNILDYRK

SEQ ID NO: 1311 - protein, 661 aa, Streptococcus agalactiae
  source 1..661: note = Related to LR134265.1
MGKLQELETKDEFARLLGFNDARYINYLLYHNENNQDKKFINTENLYYSFTIPKKSGGVREINAPKDELKFVQRKLAEILWDDYVEMLKVNSKNKDFKIPSISHGFEKEKSIITNAKQHRNKRFVLNLDLDNFFDSFNFGRVRGFFIKDKDFGTTPEIATVIAQITCYQGKLPQGAPSSPIITNLIARILDYRIVKIAKKYRFTYTRYADDLTFSTNRELYSNKLKSRKELENFLEEIKIKVEASGFSINEKKTRLSDQSQRQEVTGIVVNKKLNVKREYFKNTKAMAFKLYKDEKFEIDGKEGTIDQLNGRFSFINQIDQYNNYLLYKKSLIQNTLSHQKNLIGQELSKKSESKYYWKYIFQSKDLLKETYYNKTHHTYNLPVEFYDIAKNEKKLYMSYFNAHEKEYKKFLFYRYFFGNDKPIIVTEGKTDPRYLKAALKNLYLNYPELIEKVEGKFLFKIDFLSHSDTIEYLFNVPEGGEGLKWWYNYFSDKNYQNKMSEEEKLLYPNYISYFRKRTGRDPRKATIFLFDNEPKGSPLFNFANYAKDLQIDSNNLEQVRRDNFYKISKKESLYLVAPPLLTNMNFGNSSDIEDLLLSRQKMPTLYMDKQMKTFNKNGGLKHYGKEILSKYVLKHHQKFDFTEFVPLLNAIRDNILDYNV

SEQ ID NO: 1312 - protein, 642 aa, Streptococcus orisasini
  source 1..642: note = Related to NZ_BCLE01000009.1
MNKLQTIQSKEDFAHLLGYKKYSSITYLLYKIGIDNLYTSFEIPKKTGGTRTIYAPQKALKKLQKRFASLLWEAYVENFQPTSNKKHKKLPNVSHAFEKNKSIITNAKRHRNKKFVLNLDLEDFFGSFHFGRVRGFFLKNRDFQVPEEVATLIAQLTCYKGSLPQGAPSSPIITNLICQILDHRIVKLAKKYRLTYTRYADDLTFSTNAELPAESFEAFFTQLQDIIHRSGFSINHRKTRISDNGQRQEVTGLIVNKKVNIKREYFKNTKAMAFHLYKDGQFEIDGKPGTIDQLNGRFAYIQQIENYNNYLLYKKSLSTNGIEYQKYLLPKYENKKGRDNFYHHYIFNEQDLVEPTNFWNSKHKKYELPQTFYKAEKNSNYNYMENFSSREKEYQKFLFFKNFFMNNRPLIVTEGKTDIVYLKAALKNLASKYPSLIEKEDNQFNFKINFFSHTATIDYLFNIPKGGGEVFKHLYNYFSDNTGIKQQKYLYPNYLKYFRELTSREPKNPTFFLFDNEPKGNPLYNFANHARDLKLDSQTLDILRINAVDIFVKNNLFLLLIPLLSGKSSSDIEDLLLAEQSMPILNNKSFSKNNNDEGRNSYSKEILSKYILRHYQSFNFNKFIPLFDALEKRILEYKESTK

SEQ ID NO: 1313 - protein, 560 aa, Holdemanella biformis
  source 1..560: note = Related to QSGD01000014.1
MKKKNILYNVISKRALATVLNVQYKTLTYVLYRRGVDSFYNGFEIQKKTGGTRIINAPQGELKTIQKNLAKILEKSINNSSNISHGFIKNKSIYTNAAIHRNKCFVLNMDLQNFFDSFHFGRVRGFFIKNRNFNCTNEIATMIAQIVCYKGKLPQGAPSSPVITNLVCGSLDYRISKLSKKYKLDYTRYADDITFSTNNRHFICEYENFLNEITEIIEKSGFKINDKKTRLTFSHKRQTVTGVVVNKKLSVPREYYKQTRAMAFNFYKNRIAYLDESNKTLNQIEGRFSYINSFDKLNNILESDKNNKKKNLKDLNNREKDYARFIFYKYFYMNSKPLIITEGKTDILYIKAALKNLVGSYKDLYNGEFKINFLRRSKRFAFLLKISTDGADTIKNFYKNYYTKPVIKDLSFDYFLDFGYYPDCPIIILLDNEPDGKHPLGKFVSSDKSSELLEQLRLNGFIRLNKVHNVYLSVVPKNPDKKLDRYEIEDLFDEELLHMELNGKKFNREGLKGYYTKDDLSKYVYSHYEEINFNNFNAMFENFRNIIVDYQKWYLANINN

SEQ ID NO: 1314 - protein, 657 aa, Streptococcus gordonii
  source 1..657: note = Related to RJOU01000001.1
MSCHALFIIMKYTEIKTIIDFIKAIKVNNYSYINYLLYGIKPNKQYSLFEIPKKNGDSRQIVSPNPKLKKIQKRIYSLLWQRYEEVMLSKTGKYQKTPSLSHGFLKNRSIITNAQKHRNRKIILNIDLKDFFDSFHFGRVRGFFLKNKYFKLPEEVATILAQLTCYNGKLPQGAPTSPLITNLICEILDYRIVTLSKKYRVTYTRYADDLTFSTNNNSFLQSVSEFIIELTNIIQKSGFEINDSKTHLSLYNQRQEVTGLIVNKKINVRREFYKKTRAMAHNLYKNGEFYIDENNNKGSINQLHGRFSFIYNIEKYNNFLSYKKSLSKNSVEYQKNLLSRNIGIKGNNDLYTKFLLQEHDINNTTYYSPEHNKLFLPKDFYSYFLKYESDYIKYLSAKEKEYQKFLFYLNFYGNSYPTIVCEGKTDPLYIKAALKNLYKDYPELVTYDDQKFTFKINFFKRTSDTNKLLFGVPEGGGSSLKFLYNYFSDIKPKNNTQEDIYTNYLEYFENLTLHSAISPTIFLFDNEGSGQPLSNFICHVAKDIRIPNNDLDDRRKEMYCQKVKKNLFVLSTPKAAHDTKSDIESLLINKPVINGRTFSSQESYKREFEYGKNELANYVLKNYKNINFEKFKPLLNTIREINISYKKEYNKLNSKRE

SEQ ID NO: 1315 - protein, 575 aa, Macrococcus equipercicus
  source 1..575: note = Related to NZ_SCWC02000010.1
MENLSLINTKRTLAFHLSIPYKSFVYLLYHLDHPYSTFEILKKNGESRVINSPHPKLKRLQYKIKDLLETQYNLMMKDRVSHNVSHGFIKERSIFTNAKIHRNKKIVFNIDIKDFFKSIHFGRVRGFLIKNKYFLLNDEVATTISKLICYEGSLPQGAPTSPIMSNLILNIFDMKVLDICQKYSVDYTRYADDLTFSSNSRKFYQSFGDFYYEIEQLINKNGFKLNGSKYRVQLNNSRQEVTGLVVNNRLNIKRDYYKATRSLVHKFLLDQSPIINEQVLNANQIEGRLSFIHSIEIYNKKIEYNKERQEKSYRKDFTTYLHDSVLNAKEREYQKFLFYNLFYKPNNIVVFPEGKTDIYYIKAALKKYYKEYPELVEFKDNKYHYKINFIKRNKRLYYFFDLAIDGADTMSKILNYYSSKPGGKHNKNPINYFQYFNERLDIQPSKPVVLLFDNEGKDKPLHKFINTAKKQLDIDSDMLKSKLNTCDPSPVNLIGNLYILTINKLEADKEYEIEDMIKEYTDNLVINGRKYLNKGEGNSISKIVLAQNVLENYETINLENIKPLLNKLKILKNLY

SEQ ID NO: 1316 - protein, 559 aa, Veillonella sp.
  source 1..559: note = Related to JAHAAI010000002.1
MNDYKAARAEVSRLFGIKLKMITYVLYKKGVENLYTSYDIPKKNGGTRVIYAPDSKLNKIQKKISEKLYEIHINYMNQEKIKSTISHGFEKNKGIITNAYRHKNKRYLVNVDISDFFSSFNFGRVQGYFHKSQEFGFSKEVSTIIAQLVCHNGKLPQGAPTSPIISNLIFNIVDRRILTLAKKYKLYYTRYADDMSFSTNNKEFQKEYKGFIQELTDLLEKSGFMINHNKTRFVYYSSRQEVTGLTVNNKINASRNFINQTRAMANQLYKKDNFQINGKDGTLAQLEGRFSFINQLDWFNNRLEYKRTNKKKNKKYISDLNAREKQYQYFLFYKYFFKPIKPTIVTEGKTDILHIKAALMKYCDRYPKLITKSADGKYEFKLYFLNKTKRLEYFLGIYREGADTMKNIWNFYKGAHGFTNIFSYLSKKCLGDSLNRVNPVILLFDNEQVTDKPLRKFLNHIGIKAKINPDLMNLTANLYLQTISLINDFDECEIEDLYSEDILNIIIKGKKFEKTVEKDKEDTFSKDIFSKYILEHYYEIDFSNFIPLLDSINDVCKTD

SEQ ID NO: 1317 - protein, 573 aa, Veillonella parvula
  source 1..573: note = Related to JAHAFZ010000010.1
MKNYKDARKKVAGWIKVNQKELVYVLYGKKVDYFYKSFPIPKKNGESRVIYAPKDELKIIQKRLSQKLYETHREYIRQYRIKSTISHGYEQKRNIITNARRHKNKRYLLNIDISDFFPSFNFGRVQGFFYKSREFSFSKEEATIIAQLVCYNGKLPQGAPTSPIISNLIFNIVDLRILSLAKKYKLYYTRYVDDLTFSTNHKRFKETCSDFIKELTDLLKKNGFEINQGKTRLEYYSSRQEVTGLTVNKKINASRNFINITRAMANQLYRTDEFQIDGEKGSLEKLEGRFSFINQLDWFNNKLEHKIKKGNFSKRYNSGFNGREKQYQYFLFYKYFFKPKKPTIVTEGKTDILHIKAALMKYSDRYPNLIVKEDNGTYKFKIYFLNKTKRLEYFLGISVDGADTMKNIWNFYHGMENCFNIFKYLSVKNNNATLDKANPVILLFDNEQEKNRPLKKFLNYTKINLEEANICQKLNFNLYLQTIPLIGKLDKCEIEDLYQEETLNLTINGKKFSRDAKFDQKIYFGKAIFSRYIIDHYNEIDFSNFIKLLDSINRICIKDQNAYLDINNKVLSN

SEQ ID NO: 1318 - protein, 556 aa, Peptoniphilus sp.
  source 1..556: note = Related to AWXD01000007.1
MNDYKIARKELARLISVDLKEITYVLYKTGIENSYVSFEIPKKNGESRVIDTPKDKLKWIQRKLSEKLYQMHSDYMTQNGIKTNVSHGFEKNKSIITNAYRHKNKKYLLNVDISDFFSSFNFGRVQGYFYKSREFMFSKEIATIIAQLVCYKGKLPQGAPTSPIISNLIFNIVDIQILALAKEYRLNYTRYADDMSFSTNNKVFEKEYLNFIQELSDLLGKNGFEINQNKTRLEYCSSKQEVTGLTVNNKINASQKFIKNTRAMANQLYKTNSFLIDGKDGTINQLEGRFSFINQLDWLNNKLEYRTTKKKTNKKFISGLNAREKQYQYFLFYKYFFRPNKPTIVTEGKTDILHIKSALMKYCDRYPNFITKVADGEYDFKVYFLNKTKRLNYFLGISGDGADTMKNIWNFYSGKNNYENIYEYMKKKNQAESSNKVNPVILLFDNEQKSDRPLKKFLTYSDVKMDDGQIFKQLKANLFLQTIPLANGLEECEIEDLYQKEVLNVIINGKKFCRNEEDDSEKYFGKHIFSVYIMEHYNEVDFSNFLPILDSIDSLI

SEQ ID NO: 1319 - protein, 549 aa, Veillonella parvula
  source 1..549: note = Related to NZ_ADFU01000011.1
MVAKLINVELRAITYVLYKKGIEKSYTSFEIPKKAGGTRVIDSPNKQLKRIQRRLGKKIYDIHKNYLDQNRIASNISHGFEVGKGIITNARIHKNKKYLLNIDIANFFSSVNFGRVQGYFNKSQEFLFSKEVSTIISQLVCYDKKLPQGAPTSPIISNLIFNIVDLRILSLAKKYKLSYTRYADDMSFSTNNRAFQTDYINFIQELRNLLENSGFEINENKTRLEYYSSRQEVTGLTVNKKINVSRKFIKQTRAMVDQLFKANSFYIDDTFGTEEQLEGRLAFINQLDWYNNELEPESKKQKANKKYMSGLNAREKQYQYFLFYKYFFKPSKPTIVTEGKTDILHIKAALMKHSDRYPNLITKNDEGKYVFNLYFLNKTKRLKYFFGIVQNGADTMKNIWNFYNGKNNCDNIFKYINDKSQYGVIRNVNPVILLFDNEKEPDKPLRKFLNHIGMQSGIDKPFLKLKANLYLQKIPRINNSDCEIEDLYSKEVLNISIDGKKFEKNVKDSVEDTFSKDIFSKYILEHYQEIDFKNFLPLLDSINNICKIE

SEQ ID NO: 1320 - protein, 558 aa, Anaerosphaera sp.
  source 1..558: note = Related to LTGD01000005.1
MSLYKNAREEVARMLNIHHKELTYVLYKVGIDKSYKTFKIPKKNGKYRIINAPTEKLKRIQKKLADELYNMHIEYLHNNNIKSIISHGFEKNKSIITNATVHKRNRYLLNMDILDFFPSFNFGRVQGYFEKSREFMFSKEVSTVIAQLVCFNGELPQGAPTSPLIANLIFNIVDMQILPITKKYKLNYTRYADDMSFSTNDYKFKQNYVYFIEELTNILEKNGFGVNTEKTRLQYYSKRQEVTGLTVNDKINANRKFINETRAMANQLYKTGGFKINGEAGSLLQLEGRFSFINQLDKSNNKMNGVSGNNRYINKLNAREKQYQYFLFYKYFYKPQKPTIVTEGKTDIIHIKAALMKYCDMFPKLVSKNDGHYDFKISFLNKTSRLKYFLGISEYGADAMLNIWNFYTGNNNRTNIYKNICDKSIRDKNENINPVFLLFDNEKESDKPLKKFLGSTKTELEDRETLKLLIYNLYLLTIPLEKGLKECEIEDLYSDELLNIIINGKKFSRSSLDDSKNHFGKHRFSIYVLNNYEHIDFEKFLPLLNTINSVIINNNNSN

SEQ ID NO: 1321 - protein, 507 aa, Bulleidia extructa
  source 1..507: note = Related to NZ_ADFR01000009.1
MHAPKDNLKWIQRKLNNKLFEIHLDYLEDNNIKSIISHGFEKGKSIITNASVHKHKKYLLNIDIADFFPSFHFGRVRGYFHKSKEFNFSKEVSTIIAQLTCYKGKLPQGAPTSPIISNFIFNIVDLRILKLAKNYKLDYTRYADDMSFSTNNKAFKKDYLAFIQELKELLEKSGFEINQNKTRLEYYSSRQEVTGLTVNDKINASRTFINNTRAMANQLYKTNSFQINGKDGTINQLEGRLSFMNQLDFSNNKLGCRITKKKANRKFFSGLNVREKQYQYFLFYKYFFRPAKPTIVTEGKTDVLHIKSALMKYYDRYPKLITKTSDGKYEFKVYFLNKTRRLDYFLGVSSDGADTMKNIWNFYTGKNNCANIFEYINNKNQNESLDKANPVILLFDNEQKSDRPLKNFLKYLDIKLDDGQISKQLRANLFLQTIPLMKGLEECEVEDLYRDEVLSVTIHGKNFCRSAEDDSEKYFGKHIFSMYIKEHYNRIDFSNFLEILDSINNLC

SEQ ID NO: 1322 - protein, 583 aa, Peptostreptococcus stomatis
  source 1..583: note = Related to JAEUGG010000004.1
MSSYTLFLFIMNNYREARQSVSKLIGIELRKLTYILYEKKTHSFYSTFIIPKKNGGNRKIYAPDDELKWVQKKLANKLHSIHAQYLEDNNIKSVISHGFEKDKNIISNAYIHKNKRFVLNVDISNFFDSFHFGRVKGFFIKNKAFNFSDEESTILAQLVCYNGKLPQGAPTSPLIANLIFNIADLQILKLARAYKLNYTRYADDLSFSTNISTFGSAYSLFLEELSSILIKNGFKLNEDKTRLQFFSSRQEVTGITVNQKLNVSKKFIKDTRAMADKLYKTDEFQINGTNGTLNQLEGRFSFINQLDWFNNKCEYKINKKSSEKKYIHSLNTREKQFQIFLFYKYFYNPDKVTLVTEGKTDIIHVKAALKKYYNKYPELIVKKGDEFEFKINFLKRTDRLAYFLGIVSDGADTMKNIWNFYTGHNNHYNINDYLENKSLNNIKQVNRKPSILLFDNEQIKDKPLDSFLKYTNLELKDNQISIKLISNLYLQTFPLISNMREAEIEDLYSTEVLNTEIRGKTFKKDKKINKNKKKNSDNDTESSNKHYGKHIFSQYIKENYASIDFTNFIPLLDSINTIVMNNK

SEQ ID NO: 1323 - protein, 484 aa, Mogibacterium diversum
  source 1..484: note = Related to JABZQL010000055.1
MNRYKLARKNIANLIDVNPSTLTYVLYVEKIEQSYKIINIPKKSGGTRDICIPSPQLKSVQRKLANMLCTKHSEYVVYNNINQAVSHGFERKRSIITNASNHKNKKYLLNVDILDFFDSFHFGRVKGFFKKNRNFVFSEEEATIIAQLSCYKGKLPQGAPTSPIIANLIFNIVDLQILKLAKKYRVYYTRYADDLSFSTDMNKFKNMLPSFLKELKLLLEKHGFELNDEKTRLQTRECRQEVTGVTVNEKLNPCPIFVRKTRAMADRLYKTGDIYLEGCVDDEDISLKKKRLEGRFCFINQFDSFNNMIEYGHNNSKLYKKHQAKLNKRETQYQRFLFYKHFYNPDAPLLVTEGITDIIHIESALMKHYVRYPRLITKTEKGFEFNFKFLNRTDKLKFFFGISEDGADTMVNIYNYYSGTNCTNIDKILEKKLPPKQSMGTRNPVILIFDNEQQGNKKPLKKFLNYSRKKLNGNLYSRICSNLY

SEQ ID NO: 1324 - protein, 543 aa, Coprococcus sp.
  source 1..543: note = Related to MNSF01000070.1
MYINEVNDRERLAILLDVPLQKLTYILYVKKTDNCYKQFQIPKKDGTMRIICAPNDELKVIQRKLANELWKYHLYYMEKKNIESNISHGFVKGRSILTNANIHVNKKYIVNMDIEDFFPSIHFGRVRGYFNKSNEFNLSENVSTIIAQLTCYQGVLPQGAPTSPILANLLCNILDMRLLKVCAKYKVDYSRYADDMTFSTNDKYFIVNQSRFIDEIEKEVEEFGFKINKKKTRLDFYSSRQNVTGLIVNQKIGVDKKFRKDTRAMAYSLYKNGEFKIDGEIGSVYQLEGRFAFIDQIDKYNNKSDIQKNIWGLNSREREYLKFLFYKNFFATNKPVIITEGKTDIYYLKAALQKYYVQYPKLITKKDEKFIYNINFFERNSKTQFFFNIKKDGADTLKNIYNLYTGLNNFPNLYKYFLEVCKYIPKTPVILLFDNEQKTNRPLKNFLKYINYKDGKLIGKKCLIGNLYIMTNPLVKNLEECEIEDLFDDEVLNVELAGKTFSRDKNIDLSKKFGKSIFADYVLKNYKSINLENFKPILDSINE

SEQ ID NO: 1325 - protein, 561 aa, Clostridium sp.
  source 1..561: note = Related to FMEJ01000011.1
MKNIKTRNDFAKFIGVKLQTLTYLLYIKKIDNCYNTLEIPKKNGDTRTICVPNKNLKKVQKKLYNKLSTYYDEIKTQNNFTSKISHGFEKNRSIVTNAEVHKNKRYVVNLDLLVFFPSINFGRVRSYFIKNNYFEINDDIATILAQLTCYKGTLPQGASTSPLIANMICNIMDIRILKIAKKYRLDYTRYADDLTFSTNNKYFLNDYDKFLEDIKNIIHRSGFELNSKKTRLLFSNSRQEVTGLVVNKKISVPKEYYKNTRAMAHSLYKNGYFLIDDEVGTIEQLEGRFSFINQINLYNIDNKKKNMWHLNSKEKQYQKFMIYKTFYANEKPLIITEGKTDVLYIKAALKKYYKYFPNLITKKDNGNFVFHVNFFKRKQKHSYYLNLVKDGADTIKNIYSNCYIKTKNNKNITTVHDFKKLCGERETNPVILIFDNEMVSNKDRPLKKFLNEIKVNASQKDKLKENLYINICDNLYLCTYQLNNKEACEIEIEDLFPADVLEHEINGRKFSKKDSTHDNGFYGKNEFSQYVYSNYESIDFSNFISLLSAINEIIELYPNNI

SEQ ID NO: 1326 - protein, 660 aa, Streptococcus suis
  source 1..660: note = Related to FIHB01000001.1
MFFKEIKDLNHLSSILGIDRNTLNNLLNQKYREKLYETYYIPKKDGSDRQICAPKEPLKSIQKKIAELLWQNQLWVNHKKEEKYIQDKKMLREEKYRIQTFSETLEDINSSYKLTLEIKKDYRFQNDIIQAFEKGKSILTNAEIHRNKKYIIKIDLEDFFDSFTFYRVKGYFEKNRDFQLSKEISMTLANLVCYKSKLPQGAPSSPILTNMIGRILDSRILKICKRYRLKYTRYADDMTFSTNDDTITKTLDDFLSELDNVIENSGFKINEKKTRVSYWNSRQLVTGLVVNKRVNIPREYYKATKGMAHQLYLGNDVHIKGKKIKKPINQLTGRFAFINQVERFNNERTNLEQTEFSSKEKSFQRFLFYKNFYGAEKPVLITEGKTDIRYIRAALKKLHDKHPSLITLEEGGKAKYKLTFFKKSDVIEQYLDLNKHGGSIFEKIWNLYCNNQIFKKKNFNNVYEYFKRIDSKYKSPVIMIFDNELDVKDSPIQQFINKFGSNVKIVWNTEYKENIHVKLQELKQAGKTRQQIDSEIKKFQKDFTENKKTQLITELRKKDYAHLKDNLYLMLIPLVKPNQSKSDIEALLLPEDIEKINQKLGKQFNPSEKEFIEKDNYSKDKLSKQVIYNYQNISFENFDSLFKNVEKIIQHNFLKRVFKK

SEQ ID NO: 1327 - protein, 311 aa, Streptococcus macacae
  source 1..311: note = Related to NZ_UHFV01000002.1
MIFKEIKDLNHLSSRLGIDRNILNNLLKQKYREKLYDVYNIPKKDGSDRQICAPKEPLKSVQKKIAELLWQEQLWINHEKEEKYIKDKKMLREENFRTQTFSEAIEDMNSGYKLTLETKKYYRFQNDIIQAFEKGKSILTNAQVHRNKKYIVSIDLKDFFDSFTFYRVKEYFEKNRDFQLSKEIAMTLANLVCYKSKLPQGAPSSPILTNMIGRILDSRILKICKKYRLKYTRYADDMTFSTNDDVIIKKLDDFLSDLNSIIDNASFKINEKKTRVSYWNSRQLVTGLVVNKRVNTPREYYKATNWTFCIH

SEQ ID NO: 1328 - protein, 350 aa, Streptococcus sanguinis
  source 1..350: note = Related to NZ_GL878548.1
MDLKDFFDSFTFYRVRGYFEHHKDFLLSREIAMTLANLVCYKSKLPQGAPSSPILTNMIGRILDSRIRKLCKKFRLKYTRYADDMTFSTNDDDCFARVKDFLHELNIIVEDAGFTVNDKKSRICYWYSRQTVTGLIVNKRISVSKKYYKATRGMAHQLYIGREVYVNKEKVDNPIKILSGRFAFINQVDQYSDNILGLERNIFSTREKTFQRFLFYKYFYGIDRPMLVTEGKTDIRYIRASLKKLNKKFPELINLENDGKAEYSITFLKKSTVLEKYLGLNKHGGSIFEKIWNLYLNNNLLNNKNFGDIYNYFKRIGSPYKSPVIMLFDNELDEPDRPIKQFLDKIQKNG

SEQ ID NO: 1329 - protein, 546 aa, unidentified
  source 1..546: note = Related to JAGZSC010000015.1; note = Clostridiaceae bacterium
MEFKDITDKRLLAKFLGIKYKELTYILYSKRTENLYQTFEIPKKNGKMRCINAPQEPLKYVQRNLAKQLISIQEKYYLETNNIIQGFTKKRDIISNGSYHRNKRYILNLDLENFFDSFHFGRVKGYFQKNQYFMLNSNVATCLANIACYKGKLPQGSPSSPVITNLICSILDRRLATIAQKYRMTYTRYADDLTFSTNRRDFLENKDELISELYAVIDKSGFKVNRNKTRVLFWNSRQEVTGLVVNKKISVKREFYKETRAMLDHLYKGLIVEHNGIEVSLQQIEGRLSFINQIDKYNNKHGGERKNVQKGMNGREKEYQQFLFYKYFFCPSKPVIVTEGKTDPVYIRSALQKFYIQYPKLIRKKEDGSFEYLITFLKRTSRLEFFLGIQQDGANAMKNIYNEYVGNNQYPNLYEPLRKYGLKSSNPVILLFDNETVTKRPLKDFLNHINNKSGMDYRLWLNIHENLYLATIPLVKGQKECEIEDLFSDEVLSHEIDGKYFDRKGKDGEKSYSKQIFASYIAQNISSIDFTNFVPLLDALNEIVKN

SEQ ID NO: 1330 - protein, 569 aa, Ruminococcus sp.
  source 1..569: note = Related to JAFUUI010000025.1
MLRIKECDNVYQLAMCLNLNTAVITNILYNIKTDNCYRQFKIPKKNGKTRTICAPNAELKSVQKRLANALYYELKLIREENNINSKISHAFEKKKSIISNCEIHKRKRFILNVDLKDFFDHFHYGRVYGYFLKNKYFLCTDETARTIANIACFQGKLPQGAPTSPIITNLIFQAVDARILQLTKKHHLDYTRYADDLTFSTNEQDFIETYNDFLNKLTRLIEKSGFEINQNKIRISCHDSRQTVTGLIVNDKINVCNDYYKLVRAYAHSFYKTDSFDIKDNNGKVIKSGNANQLEGMLAFTHMIDKHNKTIKKNPAELQHSLNKREREYQRFLFYKYFYHNERPLIITEGKTDQIYLCCAMKKYYREFPELIEQRKSGFHFKVQFMKKSKRMLEMFSFVQDGASAMTTLYLNYYKKNSKFPDYYQYFSQITCKSASNPVLFIYDNELCSKDKPLYELMKKEKKSMVDKIEKDGWVSMSSKKNLYIVTNPLVDSKKECEIEELFTTETLQKEINGKTFSLEKNYDTNEHFGKDIFSKIIAKEYEQIDFSRFIPFLERIRDAIVDYNNTEA

SEQ ID NO: 1331 - protein, 564 aa, Anaerostipes hadrus
  source 1..564: note = Related to NZ_WQRC01000021.1
MQMINEVTTRDELADLVGIPYRKLTYILYKKYVENMYTSFEIPKKNGGRRLINSPNEELKYIQKNLVKALYRYEQTLLDKDINIHSSVSHAFENEKSIFTNARIHRNKRFIINVDLENFFDSIHFGRVRGYFLKNNYFRLTDEVATVIAQLTCYKGSLPQGAPTSPIISNYICNIFDLRIMKLAKKYRMNYTRYADDLTFSTNDKHCIEYQDEFLLKLKKEIDRAGFSINQTKTRISYKNSRQEVTGVVVNQKISIKREYYKITRAMADRLYKTGEFFIDGEKGSIHQLEGRFDFINQAEWFDNKYFKKKRNFYSLNGREKEYKKFLFYKYFFANEKTLIITEGKTDVIYIKAALKNLYKEYPELVTRNEKGEYQYKFSFLKKSKRLDYFLNIKKDGADTLKNIYAYYSGKSEVNYPEYMTEFENSQGIRAQNAVIMLYDNELQQKTKPVAKFCKVNMSDDQIKKLKKEEYVLLNSNLYLMVTPLQKGKSISDIEDLFHSELLKTKLDGKIFTKNDKYDTKIYYGKDRFSKYVMKNYAKIDFEAFKPLLNNIKKIVYEYKKIEE

SEQ ID NO: 1332 - protein, 562 aa, unidentified
  source 1..562: note = Related to JAGZGD010000017.1; note = Lachnospiraceae bacterium
MKMINEVKSRNELADLLGISRKRLTYLLYIKHLENMYTSFEIPKKSGGQRLINAPNKELKLIQRRLANELYEYHTRLNKDKQINGVSQAFEKEKSIFTNAKIHRKKRFIINVDLENFFDNIHFGRVRGYLIKNKDFQLSEEVATVIAQLTCFKGSLPQGAPTSPIISNYICNIFDLRIIKLAKKYKLNYTRYADDLTFSTNDKYFMENWEAFLGNLEKEVERAGFHLNEKKTRISYEDSRQEVTGVIVNKKISIKREYYKNTRAMANNLYKTGEFYINGEKGSLNQLEGRFTFINQAECFGKKINFQQLNGREKEYQKFLFFKYFYANEKPLIVTEGKTDVIYLKAALKKMYRDYPELVTRDDKGGFHYNLSFLKKSMRLKNYLNIQSDGADTMKNIYLYYSKQSNKNYPQYIKKFENIRGSRPQNVVIMLFDNELKEKDRPISKFCKGTVKDEQKVELQDKLHILLETNLFLMVTPLKEGKEISDIEDLFPDEVLNIEIDGKKFTKKDKYDTKENYGKDRFAKYVMKNYGKINFDGFRPLLDKIKFIIMQYKEGDKGEKEN

SEQ ID NO: 1333 - protein, 557 aa, Butyrivibrio fibrisolvens
  source 1..557: note = Related to NZ_AUJA01000011.1
MLLSEIHTRYEFAQLLGIELKELTYLLYIEKVENLYTTFSIPKKSGGERCINAPQKKLKYIQKLLKVLLESYEEEICCANHINTGVAHAFKKRRSIITNAQKHKNKKYIINIDLENFFDSFNFGRVRGFFIKNKYWNLDPNIATLIAQISCYNGVLPQGAPTSPIITNMICNIMDWHITKIAQKYKLIYTRYADDLTFTTNDKKIVDKYDDFLLELNREIEKSGFKINNSKTRFTNNLNRQVVTGLVVNSKVSINREYYKKTYAMAHSLYRSGEFTIDEKKGTINQLEGRFSFIDQIDKYNNRIDCNIKHDIWHLNHREKKYQEFLFYKYFCANNRPLVITEGKTDIIYLKTAYRILRQDDTKLFIPEDNEIDYGVSFLRKSDRLDYFFNLKKDGASPMTNILDSYLGNKTFKISYYEQLMAKYKITPNAPVILLYDNELNKKGAVRDVINSKKLDIESLKEKNYIRVIGNLYIQVVPLVKGKEDCEIEDLITENVDDLIIEGRHFDRKGKADKEKFYNKDVLSHYIEEHENEFHFDCFKELFKTWDLIIEDYNSLK

SEQ ID NO: 1334 - protein, 573 aa, unidentified
  source 1..573: note = Related to KE159810.1; note = Lachnospiraceae bacterium 10-1
MNLEDVCTRNDLADFLGIKRGKLTYILYIQKVDTMYSTFSIPKKSGGERTINAPNDDLKQIQRKLADALWNYQVKIWEKNKIQTNISHAFQKSKSIVTNSMRHVRKRYVLNIDLKNFFDSFHFGRVRGFFMKNLFWGMTEEAATVIAQLTCYKGALPQGAPTSPIITNMICNIMDMHLLSIAKRYKLNYTRYADDMTFSTNDKHFMEHYDAFYKDLSKEVLGAGFQINEEKTRLLYNDSRQEVTGLIVNNKISIKREYYKNTQAMAHSLYTNGFFTINGEDGTISQLEGRFSFIDQIEKYNNSHDGAKHSAISLNHREKKYQEFLFYKNFCINPKPLIVTEGKTDILYIKSALRKMYLQYPDLIEKKDNQWIYNLSFLHRSSKLSYFFDFNVDGADTMQNIYNMYTGSGRTHVNYYRHFREKYDLNMHQPVILLFDNEFENSEKPIKKFMNNIGSDKKGKNKAKGESKQRETSLQNELFLHLIGNLYVQAVPLAPSETSGEIEDLLGKNILNMEIDGRKFDRTGKKDKSRFYNKDILSKYILSHYEEIDFSLFIPLFDTFRKIKNDYSDQKNT

SEQ ID NO: 1335 - protein, 564 aa, Lactococcus lactis
  source 1..564: note = Related to JRFX01000003.1
MSYNEARNNVAEKLGVPPKLLSYLFRRGIDKFYKEIEIPKKTGGLRKIMIPQNQLKSVQKEILKMLQKIYIENNVETTFSHGFEKNKSIISNARMHKNKYLVLNLDLEDFFGSFHFGRIRGYFEKSNNFQLSHEESAVLANLICYKGFLPQGASTSPIMTNMICHFLDLKLHYIAKKNKFTYTRYADDLTFSSNNIKTESECEQLLFNIEKQIKKAGFKINKSKTRLQFRNGSQKVTGLVVNKKVNVNNTYYKTTRAMANKLYREGSFNINGNKGTVNQLEGRFSFIDQLNFESNKNDKSMSTVKHGFSWGSDNRKDYLVNRREKSYQEFLFYKYFYANEKPIILTEGKTDITYLKAALKNMYQDYPSLIEKKDGKFNFKVEFMKRSKRFNYFFGYFEGGNGMKNIYRLFFHSPYKYYEKFYKKRQIENHNPVFLIFDNELVDNLKPLRSFINFTNLNTNDNIRFLEEQHYLNLDKNLYAITHQLMNDKSMMEIEDLFLEDVLNVRLNNKSFNRKDNADRESTFGKSRFSDYIAEHYKTINFENFKPMLDIIRNISDNEKNIRL

SEQ ID NO: 1336 - protein, 558 aa, Lactococcus lactis
  source 1..558: note = Related to NZ_JADPDD010000032.1
MNYNDARNSIADKINVPPKLLSYIFLTGIDKFYTEIEIPKKNGGVRKISIPQNQLKSVHQEVLKFLQKIYKNSDLATVFSHGFEKNKSIITNAQVHKNKRIVLNMDLEDFFYSFHFGRIRGFFKNNKFFKMTHEEATVLSNLICYKGVLPQGAATSPIMTNMICHFMDLKLQHVAKKHKCSYTRYADDLTFSTNNKNTVENYKELIKDIKTQINKAGFKINDDKTRLQSKENSQRVTGLVVNKKVNVSHYYYKKTRAMAESLYKTGKFYINDQEGDIKQLEGRFSFIDQLNFANNIQGKKDGTGYHGFFTTGNDGKIAVNNREKSYQKFLFYKYFYANDKPTILTEGKTDIKYLKAALKKMYLLFPNLIKKKETGFEFKVNFLERSRRFDFFFGYVEGAEGMKKIFELYFRKPFYYYNEFQLKRTFPNQKPVFLIFDNELKNNKKPIRKFINFTNGNVELKVSKVESENFLHIDKNLYLITHQLMNDKDEMEIEDLFSTDVLSAKVDGKIFDRNDNADRSKTFGKAVFAEYITRNYRNIDFSNFIPMLHRISEIISNT

SEQ ID NO: 1337 - protein, 636 aa, Leuconostoc mesenteroides
  source 1..636: note = Related to JAFREC010000076.1
MKNKNKANDIKKFVMDNIKIDTIRHSDDYLPYFYYLYPQWAPDHTKIINTLANISASYCNVSIPKKISGTRNLSVPNKFLKPLQEFVKLLITNQLKSNNFSFSPIAQGFIEGRGIYTNAHIHRNKKYILHLDLKDFFTSIHFGRVSGFFIKDKNFKLQPHIAYFFANLCCLDGVLPQGSPTSPIISNLIAQHLDKKVLLLSKKYHFTFSRYADDLVFSTNDTKIIVNELPNFLNSINSIVKNQGFEINWDKLSLMGPDVRHTVTGLSNNVRVSVTKNFYLETRAISENLYVSNSFFVDNKLFLGHSDKSITENLKIVEGRFAFIYDIEKRNRQFYSKKTFGKALQGKNNNNYQPNHKITFLESKNKKQGASDIGQNAFNGKIWAYSKFLFYKYFIYGDKLTIFCEGKTDPIYLKAAMGALGYNNAVTMYSIETWLNEKNVFVNLFGLPMGGSGLQKLIYYFLTPIKNSKSYYDFFEKKTLSMKPVVLLVDYELKKDKPLNNIINAICIAKKLSNNEKVKLKNEIESDLDKNGYYFLGNNVYIAVTIDFNSKKDTDRAIEEYFPTNTLLDIEGNQTRHFGDENCKVINKNKHLISNNSQPMEKIDFAIWSLNHRYNRNLFIGFINILNILITSEMTI

SEQ ID NO: 1338 - protein, 660 aa, Leuconostoc pseudomesenteroides
  source 1..660: note = Related to QFDJ01000030.1
MNIKKISLKISDFSHRDSFISTLEKYKKHFGTFDVQSTIQNASALYSEKKIPKKISGFRVISIPSPELKIIQVFVKELIENQLEYFDYKFSVVNHAFQKEKSIYTNAQVHRNKKYILHVDLKDFFSSIHFGRISGYLSKNKNFKLPSYMAYFFADICCLNGILPQGSPASPVISNLIAENLDKKVLSLSKEYHFIYTRYVDDLVFSTNDTAIIMNYMQDFLYKLNAIVENQGFHINWEKLNLMGPDVRHTVTGLSNNKRVSVTKDFYLTTRSIANNFYCTNSFYSKGILYSGYESSDRQKNLNFIAGLFSFIYDIEVRNKNFHKEKTYGESLQGLNHNNYQPRHKVSMETNNSLSDQIFNGKIFLYSKFLFFKYFLFGDIITVFTEGITDPLYLNAAIKSLDYQNEVELISIQEMQNKEMVFPKLFNLSRGGSALRRLIDYYNDTVKNGKTYYDFFKNKMVPLKPVVLLFDYEIKKNKPLGQAINLLLNYGHNSQTVEDELRENGFYFVGDNLYIATTVNFNDKTDDDRAIEDYLPIQFLGDVNGDHTRHFADEKSKFFREKKIAISELSTPMYKEELAQTVLKKTSDIVIFKDFSMILSIFSEIRLGYMNKVIDCINEDRINTIYNILDSKSASEIIDKNTELKKKFDEKLSDLLKIHA

SEQ ID NO: 1339 - protein, 695 aa, Lacticaseibacillus paracasei
  source 1..695: note = Related to NZ_CP086132.1
MKHFEYHRQKKISDFHSRDSFIHELHIVSWITDERKQLFSRLLNSPGNFYKEFSIPKKYGEGERIIDAPNEDLKSLQIIIKSLIENQLKVKEFVFGKYDQAYQKNKGIFTNAQIHRNKKYLVHIDLEGFFPSIHFGRVSGFFQKSRLFKLEPPMAFFFANLCCYKGHLPQGAPTSPLIANLIGEKLDREVLLLSKKFRFTYSRYADDLTFSTNNVKSITNDFRSFMDALNYMIEKMGFNINWDKVGIEGPDVRHTVTGLSNNKRVSSTVDFYKLTRAMANSLYVDNEFFDAKRSYNAYTQKSLEKAIQVIEGRYAFINDIEDKNKKLYERHSGGEEYQSITPTDFREHHYISSRLNGVSKENLPAIYSGKKLSYSRFLFYKKFLAGDAMTVFTEGKTDPMYISAAMKALTPNLKITFTIPQVEGENQTQFANLFDLNRGGASLRRILDIYFGISTGGHASISHPLYFEKKIISIKPCVLLLDFEFNDGQQKSEKANSKKKNSSSPHPLVVVLNYIFQNRRIAKKKASIIKDDLIKNGFYFVDENLYIATTTDRSGDKTNRAIEDYFPASFLNDPYGDGTKHFENAPMLKKDNGFKDSDSLRKYDFAKYVKTQTETVDLFKDFNVLFDIFNNIRKDYNRRLLKKIADVSTNYTILAKNTMYRILDSDILRKEIAHDSDLNQLFFDNYKKLFDVSSY

SEQ ID NO: 1340 - protein, 674 aa, Pediococcus stilesii
  source 1..674: note = Related to VBTH01000020.1
MTKFKYNREKKISDFKTRLSFVRELYSIGLNSIDIFKLSKNINNYYTEFTIPKKYGTGVRTISAPLGDLKQIQQIIKKLIENELTYCNYTFGKYNQAFQKNKSIFTNAQIHRNKKYIIHLDLKDFFSSIHFGRISGYLQKNSKFRLTKDMASFIANLCCYNGMLPQGAPTSPIISNLLGESLDRKLLKISKTYHLTYSRYADDLVFSTNDEKIIAQKLSELIEVISTSVKKSGFQLNWDKLNFMGPDVRHLVTGLSNNKRVSSTIDFYKNTRSMALNFYVKNSFYAGKHFYNGYTIRNQQRSMQVLEGRYAFINNIESQNRRLYENHLSGAEYHAITPQDFKDRHNLIKAKKHDEPSFSGKELSYSRFIFFKKFLFGNNISVFTEGKTDPRYIQAAMRALNSDIQLEVTSFQTESDLNTQFSKMFNLTQGGTSLKRIIDLYKGTNYQYGKRALSAYYNYFDLDNSKIKFVPMKPCILLLDFELLGPTSPLQTIINRLMGARKNSYTIDSKENIQKNLKEKGFYYIFDNLYIVTTIGSNDTENQKNRAIEDYFPKEFLADIYKDGTTCFENAENKSDNSRKLISKNDFSILIESNFFNDPEIFKNFQILFDIFGKVQFDYLNKLLNRIDNNPSAQHVIFNILDSNFIRNIINENHSLREKFLMIFNKYFLRNYQK

SEQ ID NO: 1341 - protein, 669 aa, Weissella paramesenteroides
  source 1..669: note = Related to SGAX01000001.1
MSYKISDLNTKNDIINYLMSTKSISSPKIFYKILNDVSAHYSDIYLKKKYSNDVRHINAPDEQLKSIQHKIKILIENQLSYKNYKFNNISQAYQNGKSIFTNAQIHRNKKYVLHLDICNFFDEITFKRINGFLQHNSKFMLNYTVSTIMTKLCCYDGHLTQGSPVSPIISNLLGEKIDLVLVKVAKKYHFVYTRYADDLVFSTNDTYTINEKLTEFINKVSEIINSQGFSINWDKLSIAGPDVRHTVTGLTNNKKVSVPLEFYKQTRAIANHFYIYDEFYNNQQIYRDCYVKNFNKTPMKIIEGRLNHIYNIENQNRTLYSDHLSGFEYQAITPIDYKRHVFSPTENKETHEVINEFSGKELEYSKFIFYKFFLYGDFITLFTEGKTDPLYIKKAKKILGIDDFDLKIYDADTEINKKSIFSRLFNLHTGGKSLIKIFEIYVGRATDQHFINYSKYFEEKTFSIKPTVLLYDFELYSRNSPLGNFISIICGKKYKHYGFKRNVIIKELKTKGFYRVYKNLYIAVTMDFNMIGLNTQEEDIKRSIEDYFPSQLLSNTNGLNTEHFEGVSAPNSHSVVIDKNQFSKRIQTYTDKKIFNNFNNLFDIFLDIQKDYLSVLLSRLDKSNLDNPVEKRMVINCLYRILNSNKTLQLIEQFKLTKLFMDVYNKNFL

SEQ ID NO: 1342 - protein, 665 aa, Weissella paramesenteroides
  source 1..665: note = Related to SDQQ01000001.1
MAKKLSDITNKNQLIQVLIVAHAITNGKTFYNVLNNIDKHYTEFSIPKKYSNELRTINAPDSELKKIQKQIKRLIENQLLSKKYYFNISSQAYQKNKSIFTNAQIHRNKKYILHFDIENFFDNITFRRINGFFQKNKRFKLPYNISTILTRLCCCKGHLVQGSPISPIISNLIGDGLDYKLRKLSNKYHFIYTRYADDMIFSTNDSKIITNKLQEFMKDLQDIIEQEGFSLNQRKYTLMGPNVRHYVTGLTNNKKVATPIEFYKSTRAMANHLYKYGEINVNGKIFDSNSYPSPVNIVEGRLNHIYHIEQENRKLYQEHSAGFEYFPITPLDYQKHTNKLKINNDTGSIINELSGKELEYSKFIFYKNFFYGDYIKVFTEGKTDPRYIKKAYSMLRPNDNSIRLSSVESLLNHNNILTKVFNLHQGGDGLTDIFNMYTGNQSNENKYFNYTQYFNLKTLPIRPTIILMDFELNNKNKTSPLNNFINNIVNTLLGGKGRNKEKERNKIKQELKEKGYYRIYSNLYLAVTTDLIEITSHTENKTIDRDIENYFDIDLVKDMFQRNMIHIKDIRSVCKVSELINKNEFSKSIKKINDATKFTGFQNLITIFSNIHLDYLELVLNKLLLTRDNPLIYTQTIKKIKSSNYIIHMITGNQKLNNLYKQLNL

SEQ ID NO: 1343 - protein, 606 aa, Leuconostoc citreum
  source 1..606: note = Related to BJJW01000002.1
MLNEAKTIDELAACIEMQPWQLKKVLYSGGGANTKYRQFEVIKKTGGIRKIDAPEQSLKHVQKRIAAKINDLLALEKGDAPFVPLSQAYQKGHGIYTNALVHRNKKLVLNIDISDFFPSLHFGRIAGFFMKNKNFLLSKEVAVSIAQLTCHNGVLAQGSALSPVISNLIFQAVDQHILKVTRKYKLTYTRYADDMTFSTNNFGFLNELEEFVKSIESQIKADGFSINWSKMRLSGPDVRQTVTGLSINKKVNVSKQYYKNTRSMALSLYTTGFFHVDGQRYDQNMLSKLEGRFSYINDIVRKNNLLYEQYSFEYLATRANNKSRLLNEKKSKPSLHPEAFSSSEKAYRNFLFYKYFYKNKKPLIVTEGHTDAIYLKTAIKNLKISNLNLDFLKRSKMTKYFFGFIKGGDSLKNIANLYLSSQKSNVNISNKMYNYGVIPDQPVILLLDHEMHKKEKKDSPLLPLANYLKGVSKFPEIEDFFCELHKHGFIHLTSNLYIAVVSKKGTTKDDIYEIENLFPNTLLNDVFGMGTFEKVYSGKGRKIDKNDFALIIRKHWNNDIFQGFKVMLDVIDKVCLDYEKRKQRMLEKRQNDEKKAVKVGNTNNKL

SEQ ID NO: 1344 - protein, 584 aa, Leuconostoc gelidum
  source 1..584: note = Related to FN822744.1
MYLNEAKTIDDLAECLEIKTWQLKKVLYSHGGANNKYFQFEITKKSGGTRKINAPEKSLKLVQKKLATKINDLLHEEKGEAPFTPLSQAYQKKHGIYTNGLIHRNKNLVLNIDLLNFFPSLHFGRVVGFFMKNKKFSLTNEVSVAIAQLTCHDGMLAQGSSLSPVISNLICQSIDQHILKISKEYKLTYTRYADDMTFSTNDFNFINRLEQFVKLLETQIKRDGFDINWSKMRFSGPDVRQTVTGLSVNKKVNVPYQFYKNTRSMALSLYTTGHFTIDGQEYDRDKLYKLEGRFSHINDIDWKNNLLYERYSFEYQAMRPNNKSHLLNGKISTPYLYPEAFSSREKAYRNFLFYKYFFKNKKPLIVTEGHTDIVYLKSAIKNLQRNDLNVDFLKRSKSTKYFFGFIKGGDSLKNISNLYHNSSLMNISNKMYKYGIKPDQPVILLLDHEMYKKVQKDSPLMPLANYWKDVSKFPIIQNFYDELHQHGFIHLTSNLYIAVVSKKGTTKDNIFEIENLFSDYVLDKVFGLGTFEKKYKGSGRKITKNDFSLIIRKHQKDSIFEGFDKMLDIIHLVCVDYEKRSGQQ

SEQ ID NO: 1345 - protein, 610 aa, Weissella diestrammenae
  source 1..610: note = Related to NZ_CP060724.1
MNLNEVNDVVDLARVLHYPSRKIKKILYRDRVDNQYFEFSLAKKSGGSRLINVPNEVLADLQNCILIELKRYMNNHDIKFSRVSQAYQKDREKGIYRNARIHRGRKYVINVDLEDFFPSIHFGRVVGFFEKNNKFKFTHRCAILLAQLVCYKGYLPQGASTSPLISNLICHTLDIHILKIAKKYHLRYSRFADDLTFSTNDDEISTEEQMHNFIKELTRQIGRDGFKVNWKKMRIAGPDVRHTVTGLVNNKIVKVKKEYYKNTRAMVNQLFYTHRFIIDGVKYNIENDESKKGGIKKLEGRLAFIDDINRRNNIEYLDDITKKAMTRVQNPKRYDKFSAFERMYRQFLFFKNFWQRNTPLIVTEGKTDVLHLKEAIKNSDILLPNISFFKPSSRFDFFLGIGFDGASKMDKFINLYIKENSFENLSIKFRKIDDIKKENDLFGLSGESKPVILLFDHEFADLESPINMFINNLSKDRTYRHIESKKIEELEKYESEKQNSNAIKKFLKKKLNENGFIHLVDNLYVLVIKKDVPSINEKYAIEGLYPIEVVNNVFGLGVLETYADNNFENVLSKNDFSKIIRHKPAEIFRGFRPTLSCIEEILKDSENRNN

SEQ ID NO: 1346 - protein, 564 aa, Exiguobacterium acetylicum
  source 1..564: note = Related to LFQN01000005.1
MKFNELRNRNDLASILKIPKNQFSYLLYKLNVNKQYEKFEIPKKSGGTRTIHSPNDRLKYIQKRLNEEILNFIDDSDYPKSKISHGYEKGKSISTNASVHVKKRYVLNIDIEDFFGSINFGRVRGFFNKNKFFSLPLEVSTIIAQICCKDGVLPQGAPTSPIISNLIGHTLDYRISILAKKYKMNYSRYVDDLTFSTNEKNFELYLENFLSEFDAHLNNAGFKRNKKKTRLQYKRSRQSVTGVIVNEDLSIPNDFYKNTRAMLNEFIKNEKFFIDKKDNYGTLNQLEGRLSYINHFEKMKNMRNAKNKEVNKKNHTKFSTKEKEFKKFLFYKNFIINDKPLIITEGKTDVLYLKAALKNLHSEYPNLIEKKDNGNYDFKVKFFQRSKRNRYFFIISKDGADAMKNLVDLFIDKRSNNVNECVMTKIKTMRKTKALNPVILLFDNEMVTDRPLKNFLNFIKISPEDRLKFGLSLNTCISDNLFLLTNDIPLKKKDVGEAEIEDLLPENILNHVINGKMMNYTNGKDKQSISKDFLSKYVVSNYEKINFDKFRPLLNSLNSIIENY

SEQ ID NO: 1347 - protein, 558 aa, Eubacterium sp.
  source 1..558: note = Related to DPHU01000079.1
MVISDIESREQLAFLLNIPLSKLTYLLYVKKIDNCYTSFDIKKKNNGVRVISAPNEDLKDIQRKLGYLLESHHKAFLKEKNIDNKISHGFEKNKSIITNAAVHRNNKYILNIDIKDFFDSIHFGRVRGFFNKNIEFNLPLDMATVMAQLVCYKGVLPQGAPTSPIVSNLICNILDIRILNLVKKYRMNYTRYADDMTFSTNDRCIVDNYDGILEEIANELDKFGLYINDKKTRLIYKDSRQEVTGLVVNKIINVNRDYCKKTRAMAENLYRKGSFYIGDEEGSIKQLEGRFAYINQLDFYNNKRKGEKKDCWHLNSREKNYQKFLYYRYFFNNEKPLIVTEGKTDILYLKSALKKMYDSYPNLISKTKNGFEFKVSFLKRSKRLEYFFNINQDGADTIKNVLNMYTGQKGFANYYKYFKDKSEKDGRNPVLLIFDNEQKTDRPLKKFKKDAKIQDVNIKNWINILGNLYLVTNPIVNGKDECEIEDLFSESTLNTLIGGKSFSRNSKSENDKYYGKAIFADYVMKNYQKIDFSNFVPFLDSINSVLDDYQKKNLIQSQ

SEQ ID NO: 1348 - protein, 608 aa, Streptococcus agalactiae
  source 1..608: note = Related to LBLH01000065.1
MMSYKEIDSKRKLALYIGVPVKQLTWLLYVRKIENCYNNSFSIKKKNGDDRIINAPNKSLKYVQRRLARLLLKRLNEVYVEGNIINNISHGFFKGKSIKTNAVPHRNKKYILNIDLKDFFDSIHFGRVQGFFKNNNHFKLPEVATIIAQLTCYEGKLPQGAPTSPVISNLICQILDYKILSLCKKYRLTYTRYADDLTFSTNDNNFKDNYSNFLSELDKVVVRSGFEINSNKIRFQEFNYRQTVTGLTVNKKVNVRQDYYKRTRSMAHSLYTTEKYEINGRNGTINQLEGRFSFINDLVKYNNRLVEQNSLRLNSIEYKKNLLYTQDSEFVNRTNKNPWKTNLNSLSIREKDYQKFLFYKYFIANPQITFIPEGKTDEKYIKAALKRYYKDYPNLVKKVGKKFVYNITFIDRSKRWKYFFGVLEGGGSDLYQLLNYFTNAENRTCRNYLSHFKSIIPNPPKKPVIFLLDNEFDKKKPLNQFIKKLLIANGLDSNKIESTVHEEYLYNIDLNAFIMTIPFDNIKNEDDKEIEDLLDIETINNELISNEFDGKIFDKNKQHDDPKYIGKEIFANTILKNHNSKLIDFTQFKPLLDLINQLSTNYSQFQNK

SEQ ID NO: 1349 - protein, 615 aa, Streptococcus parasanguinis
  source 1..615: note = Related to NZ_JALDUR010000001.1
MQYSDIKSIRTLAYALGVQTKQLTGLLYGIKIENCYTSFKISKKNGDERTINAPSKSLKYVQRRLTRLLVKRQEEFFLERNVKNNISHGFSKGKGIKTNAVPHRNKRYVLNVDLENFFETIHFGRVQGFFKNNEYFKLPEVATIIAQIACYEGSLPQGAPSSPIISNLICQILDYRIVHLCKKYRLTYTRYADDLTFSTNDKNFEDMKDEFEDELKKVISRSGFIVNSNKTRFQKNDSRQIVTGLSVNKKINVTRDFYKKTRSMADKLYRNGSFTINEKNGTIDQLEGRFSFINDLVKYNNRLDELNSLKSNLIEYKKNLLYTEERKYKNDNDNNQVLDWERNLGNLNIREKDFQKFLFYKYFIANPKVTVITEGKTDSRYIKAALREYYLEYPNLITKDEGGFKYNIHFLKPSKRLRYFFDYMSGGGGGFVLINLMEFFSGKDSRTKRNYIKYFNSILSEKTLPQKPTLFLVDNEWQGSNPLPGVIGKLVKDKNLERKDIEQKIKSDFLYHIDLNAFVITLPVESVDYKTNIEIENLFNLEEINNELIAPNYDGKIFDPKKKNGDNKKKIGKEIFSNYILSNYDSEVINYSKFKPLLDLINKLSEDYTKFKDNK

SEQ ID NO: 1350 - protein, 610 aa, Streptococcus sp.
  source 1..610: note = Related to UHFT01000001.1
MNYEDIHSRDMLAFALGIPIKQLTGLLYGVKIENCYTTFTISKKNGSERTISAPNKSLKYVQRKLARLLLERYEEFLTEKNTNNRISHAFFKGKSIKTNALPHRNKRYVLNVDLQDFFDSIHFGRVHGFFKNNDFFKLPDVATVIAQLTCYEGVLPQGAPTSPIISNLICQILDYKIIELCQEYHLTYTRYADDLTFSTNEKNFDNNYQDFLDKLDKLVTRSGFKINAEKTHFQEYNGRQTVTGLSVNKKLNVKKGFYKHTRSMAHSLYKTGKFMINGKEGTLNQLEGRFSFINDLVKYNNRLEELPSLKLNSIEYKKNLQFTDGKEFEVKKNEQKQILDWKKNLSTLSIREKDYQKFLFYKYFIANTNITVVTEGKTDSKYIKAALRKYYAEYPELVTKEKDGFKYKINFLPRTKRMRYFFGFLSGGGSDQIQLFNYFINRDNHISRNYIKYFKEISEDVPLPQKPTVFLLDNEWETKKPLHNIIKVLCSAQNLNNKDIIQKIHTDYLYHVDLNAFLMTLPVDNLSPKCEVEIENLFDLEKINTELIEPLHDGKKFDIKKEHDDDKSIGKEIFANTILTNYDSEIIDFSNFKPLLDKLSDISKDFTKYT

SEQ ID NO: 1351 - protein, 621 aa, Lachnoanaerobaculum sp.
  source 1..621: note = Related to JAGEKB010000001.1
MCKYSSIDSKEALASTIGVSVRQITGLVYGIRIDNCYHSFYISKKSGKKRQISAPNKSLKYVQRRLCRLLIEKLNDFYLEYNIKNQITHGFFKGKSIKTNALPHRNKRYVLNIDLKDFFGSIHFGRVQGFFLKNNYFKLPKVATLIAQLTCYNGKLPQGAPTSPIISNLICQILDYKIIILCKKYRLTYTRYADDLTFSTNNKVFSENYTLFLEELKDIVTSSGFDINAEKTHFQKFNSRQTVTGLSVNKKLNVQNDFYKKTRSMANTLYKTGEFTIDGKEGTIKKLEGRFSFINELVKYNNRLVEDRSLTSNIIEYKKNLLRTQEKLFRLSDRKIKTLAWDENLRSLSMREKDYQKFLFYKYFIANKKTTLITEGKTDPRYIKAALKHYYSDFAGLVSSDGNNFKYNVSFLSRSNRMRYFFGFKEGGGGELQNLLRFFTEGNTVENLLEYFRKIIPLKPSKPVIFLVDNEFSKDDPLYCVAKFLKNKIHTTEYIEKKLHTDYFYHVGLNTFIITLPISNIDMDNKDKSKLKGTDIEIEDLYNLNEINEKLIKPNHGGKIFNKKKEDNSKYIGKEIFSKFMISNYSNSCIDYSKFRPLLDLINDLSENYHLKTDGERYNTK

SEQ ID NO: 1352 - protein, 384 aa, Lachnoanaerobaculum sp.
  source 1..384: note = Related to JABZPB010000073.1
MYSYSSIDSKENLAANIGVTVKQITGILYGIGIDKYYHTFFIPKKNGQQRQINAPTGSLKYVQRRLNVLLLKRLDEFYLEHNIKNRISHGFFKGKSIKTNAFQHRNKRYVLNIDLKNFFDSIHFGRVQGFFLKNDYFKLPKVATIIAQLTCYNGKLAQGAPTSPIISNLICQILDYRILKLCKKYRLMYTRYADDLTFSTNNKAFSEAYTLFLDELSNIVNDSGFAINTEKTHFQEFNKRQTVTGLSVNKKINVQNEFYKKTRSMANTLYRTDKFTIDGKEGTINKLEGRFSFINDLVKYNNRLEEDNSLASNIIEYKKNILRAKEKHFNKSNNNQIKILDWNENLRCLSIREKDYQRFLFYKYFIANNKITLISEGKTDPRYI

SEQ ID NO: 1353 - protein, 615 aa, Streptococcus cristatus
  source 1..615: note = Related to VKGS01000001.1
MKYTDICSRDDLAIALGIGKRQLTGLLYGIGIDKCYSSFEIPKKNGGKRLINAPNKSLKYVQRKLNKLLLKRLDDYNRENGSKQNIAHAYFKGKGIKTNAFPHRNKRFILNIDLDDFFGTIHFGRVQGFFQKNAYFKLPEIATILAQLTCYEGKLPQGAPTSPVISNLICQILDYKILDLCKRYKLTYTRYADDLTFSTNDRKFFESRQQFVEELGRIIKKSGFNINNEKTYFQSSENRQVVTGLSVNKKINVTVDFYKKTRSMAQHLYKTGGFSVDGKEGNLNILEGRFSFINDLVRYNNQTKKNESLVSNSPEYQKYLSLPIEKLISLKGKRFTGKLTRNEKLYNLTIREKDYQKFLFYKYFVANPKTIIITEGKTDSRYIKASLKRYYTDYPNLIKKEGNKFSYNITFLPRSQRLKYFFGFLDGGGSDLINLVSFFIDTNNYSFRNYVSYFKSIITNNPPKPVIFLLDNEEKSGKPLGSFKSFISKNTSATSSQIDSAIKSDFFYHIDFNTFLMTLPVERTSNSDILDVEIENLFDLDKINNELIRGMHGGKTFSPKKAEGDDLHIGKEIFSKTILTNYESEIIDFSQFKPLLDNISNLSNNYSEYTKDKIQ

SEQ ID NO: 1354 - protein, 613 aa, Granulicatella sp.
  source 1..613: note = Related to NZ_KV790849.1
MKYYQISSIDMLAFALRIPVKQITGLLYGVKIENCYSTKEIPKKDGSKRILNAPNKSLKYVQRQICKLLINRLDELTEKNGVKNNISHGFFKGKSIKTNALPHRNKKYVLNVDLEDFFDSIHFGRVQGFFKNNKYFKLPEIATVLAQLTCFNGKLPQGAPTSPLVSNLICQILDFKILKLCKKYKLTYTRYVDDLTFSTNDPYFFYLYNYFLDELNNLINKAGFKINLQKTHFQPFNNRQVVTGLSVNKILNVKKEFYKITRSMANSLYKTGTFEIDGKKETVEKIDKLHGRFTFINDLVKSNNRLHEINSLRLNGIEYKKFLLTTYEKEFEYKSANQKSELKWKNNLGHLNLREKDFQKFLFYKYFIANTSVTILTEGKTDSRYLKAALKKTYSQYPELINFEDSKFKVNINFINRTATQRYFFGILEGGGGDLTQLLKYFTDGKNDIERNYLSYFKRIIPEAPKKPVIFLVDNESDNKSPLENVASFLASRQGVKKQDIVKKLQNDFYYHVDFNVFIVTLPTNIFNNKTNIEIEDLLNLDEINNQIIRERYSGKSFSPKKSHNDINHIGKEIFSNFINRNYSNPLIDFSGFRQLLDLIDSLSQDYHSYTNN

SEQ ID NO: 1355 - protein, 584 aa, Aerococcus sanguinicola
  source 1..584: note = Related to CP014160.1
MNLQINNFTTRTELANLLEIELQILTRLLYSPTQNVNTQYHTFELEKKRGGATRTIAAPNDSLKIVLRKLNDLLSQYYLKAFAFREAEKQISHGFVRKKNIFTNASQHRNKKYILNIDLEDYFDHFHFGRVRGFFEKDKRFNLSKEMATVLAQLTCYKKVLPQGAPTSPTIANMITAILDRRILSLCQKYKLKYTRYADDLTFSTNDNTFSDKYGEFLIELDRIVKACGHEINQDKTHFLTYNNRQTITGLSVNKIVNVPRTYSSKTRAMAHNLYTKGEYFIGDNVYNINENEKTLEILTGRFNFSNWIDNLKLQNNQFAQNNKSLRTYSKREKDFSKFLFYKTFYVNATPLLITEGKTDFSYIDSAYKSLLPRDIEVVNKFDYKLFKKNNSITTYFLNSKSDNKTGEGGDEISKLFFQYTSQITFGKGIVEDCEINIGLSKVSPHFYHYFRKYGHPFNHHPVVILLDNENSSNKPLKKFLKAIYTGGNYQPPYELLQSTNFLHLVGNLYLTTIPSPQKNPNAFEIEDLFTEEDKKRLSFSRDRKAPFSEAVEENRETINFDNFIKLFKILDDIKQHYLTFESY

SEQ ID NO: 1356 - protein, 586 aa, Staphylococcus aureus
  source 1..586: note = Related to NZ_UHCA01000002.1
MSDYNFSNIKTRKDLARFLKIPLKKLTFLLYIDQNLYTNFSIPKKSGGIRNIYAPNKNLKEVQRVIKHKLEQHINEYQKLNGIKNNVSHGFEREKNIITNSEIHKNKKIVFNTDIKDFFSTIHFGRVRGFFIKNKYFRMEENIATMLAQLVCYNGSLPQGSPTSPIIGNLICNTLDIKILKLCKKFKLNYTRYADDLTFSTNNKLFSDEFQLFYNNLEEQVNQSGFLINTNKNRFLCKDNRQTVTGLTVNKKVNVNRDFYLKTRAMAYCLYNSGEFYIDGEKANINQLEGRFSFINQLDKHQNIKKFNMLLPSEKKEKFFSNLFLNSREKEYQKFLFYKYFWRNSKPLILTEGKTDILYIKAALKKYYKAYPELIEKIGEDEFYYKISFFKRSDKMKFFFSFISDGADNLTNIFNYYIDNFDDKKNKSFNYCNYFKNKLSIPFKNPIIILYDNERQNKPLHKAIDNVITGLIRGKSEEKKKQRREKKESLKKSLNDSTPFAENILENIYFLTNPQLEDKNTEIEDLLTNITNHLELDGKSFNKDGGKNNFGKNILSQYVYKNYKKLDLNSLKPILDNIKDVKSKYF

SEQ ID NO: 1357 - protein, 575 aa, Salinicoccus roseus
  source 1..575: note = Related to JAIMFU010000001.1
MNKLSEIKTRSDLAATLSVSEGDLVKILYYEKDLYQNFDIAKKNGTSRKINAPKENLKKILQTLNILLNKHVHDYYDENNSSLNVSHGFEKGRDIVSNAEVHINKKFVFNTDIKDFFPSIHFGRVRGLFHKHTIFQMDEYAATMLAQLTCYNGSLPQGAPTSPLISNLICRELDIRMLRICKKFRLHYTRYADDLTFSTNNKNFQLNYENFYKKLNNEINSAGFSLKHNKSRLQQKTERQEVTGLTVNNKVNVNRKFYLKTRAMAHSFYENGSFYINNNIGTMRQLEGRLAFINRLDKENNIRKYERLTNEKDKMGFFKHKPLNAREKEYQKFLFYKNFWVRTKPLIITEGKTDPLYIKAALKKYYKEYPELIELNNNNDFEFKIDFFNRTSKLRYFFELEKDGADTMNRLINYYVHKNYNSKRNDKFNYYHFFHSKMGVPPLYPIVFLFDNEYEKKPLHKFIDNVAPLTNKPVKTLKKELNKTNPTPQNLIGNTYILSVPKSTPNVNGEIEDLLLNITKDLTIKGKKYNKNGGDQYIGKDILSKYIYQEYESLNLDSLKPLLDRIVNLKIMYEK

SEQ ID NO: 1358 - protein, 596 aa, Staphylococcus hominis
  source 1..596: note = Related to NZ_VELK01000002.1
MKYAFINNKYDFFNVLGVPATKMNYLLYNRERMGTNNMYHTFSIPKKSGGKRTIHAPNDELKNIQKKLAKVLENHYYESIQDNKNKDAFLQGFFKDRGIITNAKIHRNKKFILNIDLEDFFQTIHFGRVKGFFEKDNTFKVPSEVALIIANLVCYRGILPQGAPTSPIISNLIGRIMDVKLLKLCKRYKLKYTRYADDLTFSTNDNSFLELEDKLIYEIKNEIRKCGFEVNEKKTRVQDYRLRQSVTNITVNKKLNVSKTYIKNTRAMAHHLYKHQEYYIDNEVGTINQLEGRFAFINQLDKYNNNIVKIKSFEKNSIEEQKNLGSVFQTKKEISKTFFFKNLNSREKEYQKFLFYKYFYANPKPIIVTEGKTDVRYLKAALKNLYKEYPDLIEKNENGFDFKISFLNRFSNRHQKISKLHYFLNIVPDGADTIYNIYGYYDSKNSTYPNFIEFFKNISQSSPANPVIFLFDNELNNKNKPLAKFCKKLNMKEHQKEKLSSDNKIYLTENLYLITHQLLENCDENELEDLFSKSTLSKEINGKKFIKRDSFDNKKYYGKEIFSNYISSNYSVLDFNNFRPILNNIVDVLKKYKSIL

SEQ ID NO: 1359 - protein, 317 aa, Staphylococcus simulans
  source 1..317: note = Related to NZ_CP023497.1
MEYAFITDKNDFFQALKIPTQKMNYLLYNKHQMGPENMYSTFSISKKSGGERIIHAPSDELKSVQKKLAKLLENHYYESIRNNKNKDTFLQGFLQNRGIITNAKVHRNKKHILNIDLEDFFHTIHFGRVKGFFEKDKTFKVPSEVALIIARLTCYKGALPQGAPTSPIISNLIGKIMDFRLIKLCKKYKLSYTRYADDLTFSTNDNSFLKLADRLIIEIKNEVRKSGFKVNEKKTRVQNYRLRQDVTNITVNKKLNVSKTYFKNTRAMAHHLYKHQEYFIDDEIGTLEQLEGRFAFINQIDKYNNKLSRAETYEKNH

SEQ ID NO: 1360 - protein, 585 aa, Mammaliicoccus sciuri
  source 1..585: note = Related to JALGOX010000003.1
MKYTYINNKYDFFALLGVPSNKMNYLLYNRVNMGPENMYSTFTIPKKNGGERTINAPNKELKNIQKKLVVLLENHYNELVEKKKFRDSFLHAFIKDRSIITNARIHRNKNFILNIDLENFFETIHFGRVKGFFEKDFNFKVPSEVALIIAQLTCYKGSLPQGAPTSPIISNLIGKILDLRLIKLCKKYKLNYTRYADDLTFSTNDYSFVKNFNKILEDIKIEVNKSGFKVNDKKTRVQNYRLRQDVTNLTVNKKINVQKKYFKNTRAMANHLYRNNEFFIDGDLGTLNQLEGRFAFINQIDKYNNKNIIHKYNSSKKKSNKEYIHNLNSREKEYRKFIFYRLFYANPNPIIATEGKTDIRYIKAALKNLYDEYPELIEKNDNQFLFKISFLNRFRKKTDEMNKLQYFLNLAPHGADSLKNIFKYYKESESSYPNYMEYFKKLGNNMPNNPVIILFDNELHNKKKPLSKFCTNLKLTDDDKSILKLNLNICLKDNLYLLTNQLIGTSKENQLEDLFQEETLSKIINNKSFSTSDEYDKSIYYGKEIFSQYISSNYETENFDNFRPLLDNIVKIINDYKMNKCEDNN

SEQ ID NO: 1361 - protein, 595 aa, Staphylococcus pasteuri
  source 1..595: note = Related to CP068216.1
MEYNLIADKYDFFNMLGISTRKMNYILYNREHMGTENMYETFSIPKKSGGERTIHAPKAELRIIQKRLASILENHYYESIEDKKYSDTFIHAFIKNKSIITNAKIHRNKKNIMNIDLEDFFHTIHFGRVKGFFEKDSIFKVPSEVALIIAQLTCFKGALPQGAPTSPIISNMIGKILDLRLLHLCKKYNLDYTRYADDLTFSTNDKAFEKNTDTILSEIKMEIVKSGFKVNDKKTRIQNYRIRQDVTSLTVNKKINTKKTYFKNTRAMANNLYKNHEFFIDNKLGTIEQLEGRFAFINQIDKYNNKISKIKSFERNTLVHQKYLESMYLIKKENSKTQYFKNLNKREREYQTFLFYRHFYGNSKPIIVTEGKTDIRYIKAALKNLYKYYPDLIEKDGNSFIFKINFLKRFKSKPSKMNKLHYFLNILPDGADAMKNIYNYYNENDSYYPNYIKKFKLLGKNVPYNPVILMFDNELQNTKKPLSNFCKHAKLSNDKKNKLKTDYYINLIENLYLLTHQLMPNSNENELEDLFDQQALSKKIGGKTFKRGDGFDTNQYYGKEIFSQYIISNYKRINFDNFRPLLDNLVEIIKDYSKK

SEQ ID NO: 1362 - protein, 595 aa, Staphylococcus warneri
  source 1..595: note = Related to PZEX01000047.1
MKYSFITNKKDFFNLLGVSAKKMNYILYNKQFKGPENMYTTFLVPKKNGGERKISAPNGELKIIQKKLATILENHYYETYKSQNYCNNITHAFQKNKGIITNAKVHRNKKNILNIDLEEFFHSIHFGRVKGFFEKDSTFKVPKDVALIIAQLTCYQGYLPQGAPTSPIISNLIGNILDMRLLKLCKKYKLNYTRYADDLTFSSNDLSFSKVKDKIILDIEMEIERCGFKVNNSKTRIQNYKIRQEVTGLTVNKKINVKRSYYKNTRAMANNLYRNKEFFIDNKIGTINQLEGRFSFINQLDKYNNKILKYKSFEKNSVGHQKNLESLYKIKKESSNTQFFKHLNAREKEYQKFLFYKYFYNNPQPLLATEGKTDIRYLKAALKNLYIEYPDLIEQQDGKFVYKIGFLNRFNYNAKKMNRLHYFLNILPDGASALKNIYSYYNEQNSHYPNYVKLFKKLDDDKPLNPVILLYDNELANKKKPILNFCNHIDMSENEKASLQSGSYFHISENLYLLTHQLINSAKENELEDLFDKKTLSKIINNKTFCKKDKFDTSKYYGKDIFSKFVICNYNNINFENFKPLLDNIVRVVKDYENR

SEQ ID NO: 1363 - protein, 608 aa, Macrococcus goetzii
  source 1..608: note = Related to NZ_MJBI02000011.1
MNYNFIVDKQSFCNELGISVGLLNYLLYSNKENGIESFYINFSVPKKNGEERRIHAPNEQLKFVQKKVQELLQIRNDELFAKLNVENKIVHGFVPGKNIITNARKHRNKKIVINIDIQDFFESLHFGRVKGFFEKDKFFGLPKEVALIIAQLTCYKGHLPQGAPTSPIISNLIAKILDIRMLKMCKKYNLDYTRYADDMTFSTNKYLTTKQLEKLLKDLEKVISNSGFSINNKKTRIQQNNLRQDVTGITVNEKLNVNKEYIKKTRAMAHNLYCNNEFYIENEKGTLDQLEGRFSFINQLDKFNNNISKTKSVEYNLIKNQKNFSYISTYQKKVNTKSDQFFKQLNSREQEYQKFIFFKLFYGNPKPLIITEGKTDIKYLKAALKSLHKEYPGLVEKQGDKYIYKVSFLDKSSRKNKKISKLQYFLNISEHGGDVMKNIFSYYDVQNNYYPSYYDYFDELRNFTGANKPVILFFDNEVDRRKKDSPVKSFIKHAKISSKVDEFKKNKKIHITKNLYLLTHSLEEGALEGEIEDLFDEDVLNHEINGKIFSRKDEEETNKYGKEIFSKYVYSNFQNINFHNFKQILDDIVYIIEIYEMSKKNRKKVVTE

SEQ ID NO: 1364 - protein, 570 aa, Kandleria vitulina
  source 1..570: note = Related to NZ_JQBL01000009.1
MRLKDVKNRKDLAQLLDVKVKVLTYCLYVLPETMRYSSFVIPKKDGSERQILVPCAQLKRIQKKLAEVLNEDYLEINSNNVAQGFIKNKGIITNARYHRNKRVIINVDISDFFGTIHFGRVKGYFENNKFYKLNNKVATMIAQLTCYQGKLPQGAPTSPVIANMIGQIIDYHILKLCKQYKLYYTRYADDMTFSTNINYSLVEIEKFICDLSETLSRLGFEINTKKTRVCFNSSKQEVTGVIVNKKLNADKTFIKETRAMAQNLYSTGGFVIDNKIGTMDQLEGRFAFINQFDKYNNIVNNTSKGKHLEKLNVREKAYQQFLFYKLFLGNDRPVIYTEGKTDSRYIKAALKKLYIQYDDLIEKNENGKFEYKILFGSRNKKYEYFLDFMQYGADSFNIIALLYTGRNGYANLCSILKSKMRRKPNAPVILLMDNEQTNGKPLNKFLQSYRDEHYKNLTDHEKAFFNDYNYIRLVENLYLATFPLEPGVEEMEIEDLFSKEFLDGKINGKSFKRSPKKGETNVMSKDELSRYVLSHYRSINFSGFKGLLDVISAIKKDYEKYINMDDNKWY

SEQ ID NO: 1365 - protein, 596 aa, Acinetobacter nosocomialis
  source 1..596: note = Related to CP077398.1
MKYLKELKSCQTQKDLANLLGYSEKNFTRILFSQNISLRYQSFEIPKKNGDKRKILAPTSELKVLQTRLSILLSNCYEELELKRLSTSSYIKCISSHGFRKKLIVNIPASKQNRKIIEYKEINFGIYSNAKQHTGKRLVLNIDLKDFFESITFSRVVGFFTKNKLFLLPLDIAVLIAQIVTYRTSTSQEGFLPQGSPCSPIISNLIGNILDVKMVKLAKEYKFTYTRYVDDLTLSTNLPQFSEDIIEFDGEKWVLGSALNHTINSSKFKINPKKTRLTDKYNKQEVTGLTINKKVNIDRTYYRYTRSMVQKFCAEGEFFKSKVHMDKQKISREALNGILSHIYQIKNQQDINFPNCARNFSELNSLEKLYAKFLFHHYFVHPQRMLIIGEGYTDPLHFKLACHKLYKESLSFLKFSSLEGTKRFSKITGYGGGTGLLKIFLQNYKQFYKARNICLKPCLIIVDGDSDGDAVISKASAEFKTTFKKISHSSMTTAGLLDWYHIFNNLYILQLPKNKVIEDFYDPLILTIPIGSKTFHSDDKKKNTKFDSKIHYGKKVLLEKIIYEQQDTIDFSKFDLIFNTIFHIQFYHYIYCNMES

SEQ ID NO: 1366 - protein, 592 aa, Acinetobacter baumannii
  source 1..592: note = Related to CP059039.1
MKYLKQLKSCQTQKDLAILLGYSEKNFTRILFSENITTRYQDFEISKKSGGKRRIFAPTPELKILQTRLSILLSNCYRELELKRLSTSSYVNCISSHGFRKKLKINIPTSKQNRTSLEAKEINFGIYSNAQKHTGKRLVLNIDLKDFFESITFSRIVGFFSKNKLFSLPFDIAILIAQIVTYRESTSKEGFLPQGSPCSPIISNLIGNILDVKMVKLAKEYKFTYTRYVDDLTLSTNLPQFSEDIIEFDGEKWVLGSALNHTINSSKFKINPKKTRLTDKYNKQEVTGLTVNKKVNIDQNYYRYTRSMVQNFCAEGEFFKSKFHMDKHKTNREALNGILSHIYQIKNQQDIKFPNSTRNFNELNSLEKLYTKFLFHHYFIHPQRVLIIGEGYTDPLHLKLACHKLYPDSLKFIKFSSLSGTKRFSKIMGLTGGTGLIQKFLKNYNVIYKSQVISHLPCIILVDGDSDGEHVIKCANKEFNDFIKHISLTALNKSAILDYYHAHHNLYIIKLPKNTVIENFYDPSILLKTISGKTYNSSNSTFDLTKFYGKKDLFEKIIFQDQNTIDFSKFDLIFNTIFHIQFYHYIYCNMEE

SEQ ID NO: 1367 - protein, 591 aa, Acinetobacter colistiniresistens
  source 1..591: note = Related to KB850198.1
MNFLHQLKTCQTQKDLAALLGYSEKNFSRILFSQNIITRYRSFEIPKKNGNKRQILAPTSELKILQTRLANLLSNCYEELEVKRLSSSSYVNCISSHGFRRNITINIPTSKQNRTPIKSKKVNFGIYSNAEKHIGKRLVLNIDLKDFFENITFSRIVGFFTKNKFFLLPLDVAILIAQITTYRTSISQEGFLPQGSPCSPIISNLIGNILDVKMVKLAKEYKFTYTRYVDDLTLSTNLPQFSDDIVKLNNEKWVIGSILNHTVNSSRFTINPTKTRLTNKYNKQEVTGLTVNKKVNIDQTYYRYTRSMVQKFCSEGEFFKSKVHMDKQKISREALNGILSHIYQIKNKQDIKFQNITRNFDELNSLDKLYAKFLFHHYIVHPQRMFIIGEGYTDPLHLKLACHKLYKNSLEFIKFSSLQETKKFSKIMGYSGGTGLLQKFLKNYKLIYKGSLLSLKPSVILIDGDKAGDDVIKTAKNEFKDSFQEIKNSSMNGSYILEFKHVFKNLYIIQLPKNDVIENLYDVSVINTKIGTRTYNPSNNKFDLTKYYGKKELIEKVIFPNQNTINFSKFDLIFNTIFHIQLYHYIYCNGN

SEQ ID NO: 1368 - protein, 596 aa, Acinetobacter sp.
  source 1..596: note = Related to JAKZGD010000010.1
MNFLNQLKTCQTQKDFAALLGYSEKNFSRILFSQNITTRYISFEIPKKNGNKRQILAPTSELKILQTRLANLLSNCYEELEVKRLSSSSYVNCTSSHGFRRNITINIPTSKQNRTPIGSKKINFGIYSNAEKHIGKRLVLNIDLKDFFENITFSRIVGFFTKNKFFLLPLDVAILIAQIATYRTSTSQEGFLPQGSPCSPIISNLIGNILDVKMVKLAKEYKFTYTRYVDDLTLSTNLPQFSDDIVKLNNEKWVVGSILNHTINSSRFTINPTKTRVTNKYNKQEVTGLIVNKKVNIDKTYYRYTRSMVQKFCSEGEFFKSKVHMDKQKISREALNGILSHIYQIKNKQDIKFQNSTRKFNELNSLEKLYAKFLFHHYFVYPQRMLIIGEGYTDPLHFKLACHKLYKNSLHFLKFSSLEGTKRFSKITGYGGGTGLLKIFLQNYKQFYKAKNIFLKPCLIIVDGDSDGQAVISTARSEFKSTFKQINHSSMTTTGLLDWYHIFNNLYILQLPKNEVIEDFYDPSVLMYSIGSKVFHSDDKKKNTKFDPNIHYGKKVLLEKIIYEKQDIIDFTKFDLIFNSIFHIQLYHYIYSNLHN

SEQ ID NO: 1369 - protein, 593 aa, Acinetobacter indicus
  source 1..593: note = Related to NZ_CP039031.1
MNNLFLLRTCQTQKDFAKVLGYSEKEFTLILFSQSIQNKYQSFDIPKKNGNKRKILAPTPDLKILQTRCLSTLLTNCYEELEKKRLSKSSYVQSISSHGFRKKLLLDIPFTKKSRTPFEKKVIKLGIYSNASKHVGKNLILNIDLKDFFQSITFSRIIGFFSKNKYFQLNFDIAVLIAQIATYRPNQSQEGFLPQGSPCSPIISNLIGNILDIKMLKLGKKYKFTYSRYVDDLTLSTNLPKFNEEIVKLVDNTWVIGSELKNVVNSSKFKVNPQKTRLTNKYNRQEVTGLTVNRKVNVSKEYYRYTRSMVQSFCTEGNFVKSKVHMDKQKISREALNGILSHIFQIKNKQQIEFNNQTRNFDELNSIEKLYAKFLFHHYFIHPQRMIVIGEGYTDPTHFKLASHNLYPDILKFLKFSSLQETKRFSKIMGYSGGTGLLNKFLKNYKLIYKANVISCKPCLIIVDGDKAGNDVIKTARSEFSKTFKAINNVSLNLSAKLEFFHIFENLYILQLPKDQVIEDFYDTTVTGSLIGTRTYNSSNNKFDLTKYYGKKELLEKIIFPNQDTINFSKFNLIFNTIFHIQIYHYIYCNLKN

SEQ ID NO: 1370 - protein, 592 aa, Acinetobacter lwoffii
  source 1..592: note = Related to NZ_CP054822.1
MDNLFLLKTCQTQKDFASLLGYSEKEFTRILFSQPIQNKYKSFKIPKKNGSRRNILAPVPDLKILQTRLSILLTHCYDELEHKRLSKSSYVQCISSHGFRKKILVEIPISKKSRTSFESKVINFGIYSNAKKHVGKNLVLNIDLKDFFQSITFSRIIGFFTKNKYFQLNFDIALLVAQIATYRPNQVQEGFLPQGSPCSPIISNLIGNILDIKMVKLARKYKFTYTRYVDDLTLSTNLPQFSEEIIKLDGKSWVIGSTLKYAINSSKFEVNPQKTRLTNKYNRQEVTGLTVNRKVNISKEYYRYTRSMVQSFCAEGHFFKSKVHMDTDKTTREALNGILSHIFQIRNKQQIEFNNQTRNFDELQSTEKLYTKFLFHHYFVHPQRMILVGEGYTDPLHLKLACHKLYPNSLNFLKFSSLQQTKRFSKIMGYQGGTGLLNKFLKNYKLIYQAKNISLKPCLIIVDGDTAGNDVIKLAKSEFKETIKLINKSLLTTSSILKFFHVFENLYLIQLPENKVIEDFYDSSITGSCIGTRTYNPSNKKFDLDKYYGKKELFEKIIFTNQNTINFSEFDLIFNTIFHIQLYHYIYNNLKT

SEQ ID NO: 1371 - protein, 592 aa, Acinetobacter sp.
  source 1..592: note = Related to NEGA01000008.1
MNNLFLLKSCQTQRDLAILLGYSEKDFTRILFSKPISTKYQSFDILKKNGNKRNILAPTSELKTLQTRLSKLLTNYYEELEQKRLSTSSYVKCISSHGFRNKISVQIPISKKNRTSFESKIINLGIYSNAHKHVGKKLVLNVDLKDFFQSITFSRIIGFFTKNKHFQLPFDIALLIAQIATYRLNQSKEGFLPQGSPCSPIISNLIGNILDIKMLRLAKEYKFTYTRYVDDLTLSTNLPQFDNEIIKLEGDTWILGSTLKYTIQSSKFNINSQKTRITNRDNRQEVTGLTVNTKVNINQNYYRYTRSMVNKFCTEGEFFKSKVHMDKDKTSREALNGILSHIFLIKNQQQIEFPHTTKNFNELNGIEKLYIKFLFHHYFVHPQRMLIIGEGYTDPIHLKLACHKLFPNSLNFLKFSSLQETKRFSKIMGYSGGTGLLNKFLKNYKTIYKAKTISLKPCLIIVDGDNAGDGVIKTARGEFKETFRPINNPPLSSSGKFEFFHIFENLYIVQLPKNQVIEDLYDTTVTTSLIGKRTYNSSNNKFDLTKYYGKKELFEKIIFPNQDTIDFSKFDLIFNTIFHIQVYHYFYSNLNN

SEQ ID NO: 1372 - protein, 591 aa, Acinetobacter sp.
  source 1..591: note = Related to SGSS01000016.1
MKYLEQLKSCKTQKELAILLGYSEKNFTRILFSQKISTRYQSFEIPKKTGSKRIIFAPNSELKILQTRLSIILSNCYEELEIKRLSTSSYSQCISSHGFRKKLTLDIPISKSNRESLGSQIINLGIYSNAQKHVGKRLVLNIDLKDFFQSITFSRIVGFFNKNQRFLLELDVSILIAQIATYRETTEEGFLPQGSPCSPIISNLIGNILDVKMVKLAKEYKFTYTRYVDDLTFSTNLPQFSEKIVKLNDNNWVIGSTLKHVINSSKFEVNSQKTRLTNNYNRQEVTGLTVNSKVNINKEYYRYTRSMVQMFCAEGKFFKSKVHMDQDKNTRGALNGVLSHIFQIKNKQQIEFDPKTKNYDELQSIEKLYTKFLFHNYFVHPHRMVVIGEGYTDPIHLKLACHKLYPNSLNFLKFSSLQQTKRFSQIMGYNGGTGLLNKFLENYQLIYQAKSISLKPCLIIVDGDKAGDGVIRTARSKFKDTFQSIRYTPLNSSSILNFFHVFKNLYIIQLPKTKVIEDLYDTCVTSTLIGTRSYNPSNKDFDLSKFYGKKELFEKIIFPNQNTINFSEFDLIFNTIFHIQLYHYIFSNSKN

SEQ ID NO: 1373 - protein, 593 aa, Acinetobacter nosocomialis
  source 1..593: note = Related to JAGJSX010000002.1
MNILKFPISKLALASDKKDLSNLLNYDYKDFCWILYSQPIHMRYKLIEIPKKNGKIRIIHAPDSHLKQLQKNLAIQLNKIFEEKNLYEPAFSFAFRRNNNKQKFGIYFNAKRHRNRKLVINIDLKDFFHTIEFKRIVGYFKRNKYFNFPIDVAIGIAQIACYKDPNTGKTFLPQGSPVSPIISNLITEILDAKFTKLAKKYKFYYSRYADDLTLSFDTNNIPSEIVKCNENNYSLGREVIKAIKSSGFNINKDKVSFRTNFDRQQVTGLVVNKKINIPRNYYDFSKSMAYNYCQYATFKKSSYHTFAKKNSNQGESIIGVLNYIYNIKMEYKNRTTDKPPYIYTEFKIDKPKSPEQLFWSKNSFIRLLLQTYFQESFVYRKKIHLLCEGKTDPLHFKNYISTLPIEIQSYYDFTAFKEEDLTIFQKELNIRSGTPNLKRFIEIYSTLYISKMIFVNPTILIVDNDKAGNEVFQCATGRYKKTTKNGKVIINSIEIEYAYICKNLFIIKLPKINPETTIEDLYDTTLTSTILNGKSFTKDNVYDPNIHYGKVDFFKNVIRKNRTTIDYKNFEAIIEIINRIFNLNFYLNLTNIN

SEQ ID NO: 1374 - protein, 583 aa, Acinetobacter sp.
  source 1..583: note = Related to NZ_VOZD01000001.1
MLATDKKDLANFLNYDYKHFCWILYSQPIHTRYNIIEIPKKSGKLRVIHAPDSHLKQLQKNLAVQLTELFEQKNTGKPSFSFAYRRNNKEEKFGIYFNAKRHRNRKLVINIDLKDFFHTIEFKRIVGYFTRNNHFKFPIDVAIGIAQIACYKDPKTGKVFLPQGSPVSPIISNLITEILDAKITKLAIQYKFYYSRYADDLTLSFDTKKLPQEIIQSNENNFFLGDKIIKAIKSSGFNINNDKICFRTNFDRQQVTGLVVNKKINIPRNYYNLSKSMAYNFCQFATFEKSSFHTFSKNNSDKGKSIIGIMTYIYNIKNEYNNRTINAEPNIYTDFKMEKPKSPEHLFWSKNSFNRLFLHTYFQEFFVYRKKIHLLCEGKTDPLHFKNYISTLDKKIQNYYEFTAFNEDKLTIFQKELNIRSGTPNLKRFIDIYSTLYVSKLSFLNPTIIIVDNDKAGNEVFQCGVGRYNKTSQHGKTTINKLEVEYAYICKNLFILKLPKILKDTTIEDLYEPSVTSTLLNGKSFTKDNNYDSNLYYGKVELLRNVIKKNKLSINYKNFETMLEAIDRLFLMNLYLNLTNSIK

SEQ ID NO: 1375 - protein, 594 aa, Acinetobacter sp.
  source 1..594: note = Related to NZ_VOZV01000004.1
MSKQLNALKQCQTSRDLAKLLGYSYKGFCYVLYSAPIHTKYRMVTIPKKNSPIGRQILIPSNRLKILQQRLATLLTNIYLEINQNNPSCCYAFIPDSNTQNFGIVENAKQHINKNIVLNIDLKDFFTSITFSRIVGFFTKNIQFRLNYDVAITLAQIACYRASPTSHAYLPQGSPCSPIISNFVGQIIDSKITFLAKKFHFTYSRYADDLTLSFDKNQIDSKILEYDQTTREYKLGKLLEKEILKTNFQINYQKLCVRTKRERQQVTGLVVNKSVNVNKAYYYHTKSMALEYCRNGTFTRSTSHAKKIGQPNFHSLMGYFNYIHYIKRENLKRHQPLQPKIILPELTNNDIQRNKKIPKSLNSFEKMMIKAIFHYRFVHSEKIKILCEGKTDPQYLNLYLKIKKSNCFHPTAFSDHTPTFFQNELNIRSGTQNLKRFISAFQNLYISKNEYQLPTIIMVDPDKDGFDVFNYAKSKSNSYIEIQTNSSIKVAHVFHNLYLISLPQNSSINQQQINSIEDMFDKTLQQQKIGNKTLCLDNKCSGQKHNNHYGKVEYFEHIIKSQNNLSFSNFDRLYEVIENICYLHFFKCFSKTFH

SEQ ID NO: 1376 - protein, 565 aa, Acinetobacter kookii
  source 1..565: note = Related to NZ_FMYO01000016.1
MSSNLLLLQNCKNRQDLADLLDIDYNQFCYILYAQPISKHYNKALIYKKNGKPREILAPDNHLKYIQQRLAILLAKIYDEVNFRSTQLCYSYRKDSEQKFDFHENAKLHIGSKLVINVDLKDFFTNITFSRIVGYFSKNKNLKINYEVAVTIAQIACYKDPISNKSYLPQGSPCSPIISNFIGTILDDRLFKLANRKKFTYSRYSDDLTFSFNTNSFPSDIVTKIEKNWVLCKTIRNTINLCQFEINEEKIVIRDKYKRQQVTGLTVNKKANINANYYKYTRAMIDKYCKTGLYERSKHHSIGIDFSEKSLIGIANHIKNIKGIKYNHTNIIDKNLEPLQIYQNLKGFSKSYIDLMFHINFVHQSKIKIICEGKTDPQHIYNYLRNTDLFHKNQFDIISFEKHLSSFTQPLNLSGGTDQLCKFIKMYSHLYKSIDKSKYPTIIFVDNDPAGNSTFNTAKSYSTYNEIKILRDSIRVAFVCKNLYIIQSAKHCPGIEYLYPSHVLEEKLEGKTLNLSNDKIKDDSEYGKIVFFHKIIKPLGKKIYLGKFRYLCFGFYQIAQHLKNT

SEQ ID NO: 1377 - protein, 316 aa, Acinetobacter sp.
  source 1..316: note = Related to NZ_CP032279.1
MSSNLQLLKQCQNRQDLANLLILDYKLLCFTLYSQPIHNNYKKAIIYKKNGSPREILAPNKQLKFIQQKLALLLNDIFDEINFRKTQLCYSYRKDSDQKYGFHENAKLHTKSKLVINIDLEDFFTNITFSRIVGFFHKNKNLKINYDICIAIAQIACYRDPNTNDSYLPQGSPCSPIISNFLGTILDERLFKLSKRKKFIYSRYSDDLTFSFTTNSIPQDIAQKNGNIWTLNKTLINTINSCQFKINKDKIIIRDQYQRQQVTGLTVNKKANINKNYYKYTRAMIDKYCKSGLYERSAYHSLGMALLHKDLKYKAP

SEQ ID NO: 1378 - protein, 601 aa, Psychrobacter salsus
  source 1..601: note = Related to NZ_CAJHAW010000011.1
MSSLQALRKCEDRKDLATILGYSLKQFTAIIYAQSPQYKYNSFTIPKKTGGNRNILAPKSDLKQLQQKLATLLSKCYEEIECNRLTKLPKPVSILSFSSHGFRRKIDNKLSSDKFNFDIYSNAKSHTNKKYVLNLDIKDFFKSITFSRIVGYFVKNRDFLLDVDVSVTIAQIATYRETDSTEGYLPQGSPLSPIISNFIGSVLDIKILRLAKKYKLDYTRYADDITLSTNLKDFPYQIAVHRQDRWIVGLQLEKIIKSSGFEVNKSKTRLYTNNERQEVTSLSVNKKVNIRKEYYRYTRSMVNQYCMTGMYFKSSEHRRANIANDNSLNGILSFIYYIKRDRNLVVDDGYIKYCDMKGLQKLYTKFLFHYNFIYQSRTTVIGEGFTDPRHLRIAYKVIYNAHNTSIKFTYLGNTKRFSHFTGMKGGTGLINKFLSEYQLIDKSIAISKFPCIILLDGDKAGNDVIKMAEKLFNKTIRKINIPKVGIMLFYHVYNNLYILQLDKDVDVEKLYDSNVLQTKVDQRTFNPSNKKTDQTKFYGKKEFLEKVIEPNRSSINFSNFEIVFKTLNHIQLYHLIAYRSEAGLAAKTNLSLISAKSSNTT

SEQ ID NO: 1379 - protein, 586 aa, Psychrobacter immobilis
  source 1..586: note = Related to NZ_CAJGZW010000014.1
MNKLSNLRSCSDRKGLASLLGFSEKQLTNILYSSNINEKYYKFSIPKKSGGDRRILAPHASLKLLQSNMAILLSQCHDEIENERVTKTAQQSSILSFSSHGFRKALKTDNSLEPFSFNIYSNAKKHINKKYVLNIDIVDFFESITFSRIVGYFHKNRHFLLDIDVAILIAQIATYRPSISVEGYLPQGSPLSPIISNLIGSILDARILRLSQRYKLDYSRYADDITLSTNMKSFPTEIAYLKNDEWVVGSKLKKAIEGSRFTVNKKKTRLYTRNKRQEVTSLTVNKKVNISKKYYRYTRSMVNEYCKTGSYSKSSEHRYTEIDSDNSLNGILSYIYYIKKDRNDIAIDHKFREYEKLVSIEKLYVKFLFHYYFIYPEKMLVVGEGVTDPLHLKVACNQLSKSSRKYIKFSYLGEMARFSKFMRFSGGTGHIHNLLTNYHTIFKAKSLSLKPCIILVDGDKAGNDVVKHAKSLFKERQLVFKGANCIRAYHLDHNLYIIQLNKGKEIEDLYHPDIKKTKIGIREFSSENDSKKLDVTKHYGKKEFYEKIVVEEQDTINFSGFNDVLATLYHIQMYHFILWLFSERKI

SEQ ID NO: 1380 - protein, 592 aa, Acinetobacter baumannii
  source 1..592: note = Related to AAYLMD010000006.1
MNILEQLKSCTDLNSLATLLGYSPKVFSYILFSKSINYQYEKFEIDKKDGSKRIIHAPKEKLKELQRSLANVLNECYNIIEKNRLNLTNKYQCVLSHGFRNKLVLDLPISNKTNIKLKSKEFIFGITSNAKAHINKKYILNIDLKNFFHSITFGRIVGFFEKNINFNLTKKVAILIAQIATYRDSTNMVGFLPQGSPCSPIISNLISGILDKRLYEFAKENKCTYTRFADDITFSTNIKNFPTNLAILSNEKYTPSNQLIRIIEKTGFLINPTKTRLNTFEDRQVVTGLVVNKKVNVSSNYYRYTKSMVNKYCQEGIYYKSKLHTNEKITTSNSLQGILDFIFNIKKPAFVNPTNYKEFSKLDSIEKLSLKLNFHKNFIHNTETRIICEGVSDPMHFKNAYKSLYKSNKYPFFFKVLTSFNSLVKITGIGNGTGNLKHFLSMYKKINTSKINNINPCIVLVDGDNEGEKVLTAAKKIFDKNCYKELSFFSPFYNLDDFQVLHCEKNLYIVMLPTNFTIEDLYDPIYKTFTLGTRTLKLSNEDLDHTKFYGKTEFFEYVIKPNSHVIDFTNFKKIFEVLFHVQLYNFFHSNLS

SEQ ID NO: 1381 - protein, 586 aa, Acinetobacter baumannii
  source 1..586: note = Related to JEWN01000001.1
MNDLILLKNCKNLQDLAYLLGYTPRILSYTLFKRSILQPYTKFEIPKKSGGKRVILAPNKDLKKLQSALAELLDSCFNIIEKNRLENTSYTTCILSHGFRSKFKIDIPKSHKNREVLKTIDLKLGIYSNAFKHKNKKYVLNIDLKDFFTSITFNRIVGYFCKNENFLLDKKVAILIAQIATYREIRSSEGFLPQGSPSSPIISNLIAGILDNRLNNLAQRYKCTYTRYADDLTFSTNISTFPTELYDYENKVIGKKLNKIIKDSWFEINPSKTRLTHNQNRQEVTGLTVNKKVNISKNYYRYSRSMIHNFCINGTFTKSKLHNKPLVLNINSLTGITNYIFNIKNPNFEKSRTLRDLEDLSSIEKLYVSFNFHKYFSNNEQPNIICEGITDPLHLKNSWKNLNKDQLEYKITSLEEIKSLHEVMGLSNGVPNMTKFLRQYHKLHKSKYKNPQPCILLLDGDDEGEKLLTNISSSFKQKKSLDFYNFRDPSNSLLRVTHLINNLYIMQLPNGKCIEDIYDPSVLTLTLKGRTYNPSNNSFDTTTYYGKKDLIKKVIIPQKNSINFDSFNIIFDTILHIRLYSFFCSK

SEQ ID NO: 1382 - protein, 623 aa, Acinetobacter baumannii
  source 1..623: note = Related to NZ_VTRF01000001.1
MKNLENLKSCHTAEDLSTLLDFPYKRFLIILYHGHISSKYSSFEITKKDQSLRSINAPHKELKMIQERLADLLEQCLSEIENDRLKKNLEKFHENSPNKYPKFHLTSHGFRKKLYIDPPYNIHTITPGIFTNAYVHTNKNLVLNIDIKDFFTSIKFNRLVGFFIQNKYFELSEEVAFTIARIATFRKNDDEMGYLPQGSPCSPVISNLFTSMLDSRLVKLCKKNKCVYTRYADDITISTNLKKFPQEILTIINDKVKLNDRLERQFEAFGFNINNKKTRISNRKQRQVVTGLVVNKKVNVNRSYYKATRAMVDNYCKTNTFVKSKYHVFHELKIENSQSLNGILNYIYNIKKVEPYKLIENHDDYLKHHNDFIDKKNWESRLLYHHINTLNGLDKIYASYIFHKKYVYNEKKSIICEGVTDVIHFKKAADKLGITSIKFSSFSPDYQFEKLIHLDGGTDNLKKFLSNLKLLYKSEVSLNLLNPTIIIVDRDDAGKGVIAEAKKLFKNSWHEHSSSTVPNMKFYNFFKKFYIFHLPIVPYDPNKTVIEFLYNNSTLLNDTISINGKTLICEAIATSEQIKKKEVYSKISFIKTIIPKHEPSLDYKYFKQVLDVVDEISKLMKTA

SEQ ID NO: 1383 - protein, 623 aa, Acinetobacter ursingii
  source 1..623: note = Related to NZ_BKVP01000163.1
MKNLENLKNCENARDLATLLDIPYKRFSIILYRGHISSKYSSFEIKKKDQSLRKIHAPYEYLKILQKKLANLLERCLSEIENDRLAENLSKFQENRPNKYPKFHLASHGFRKKLYIDSPYNVHTITPSIFTNAHTHTNKNLVLNIDIKDFFTSIKFNRLVGFFIQNKYFELSEEVAFTIARIATFRENDDVMGYLPQGSPCSPIISNLFTAMLDSRLVKLCKKNQCLYTRYADDITISTNLKEFPQEILTVVNDKVKLNDRLQRQFEAFGFNINHKKTRISDRKQRQVVTGLVVNKKVNINQSYYKATRAMVDNYCKTNTFVKSKYHVFHEHQIENSQSLNGILNYIYNIKKVEPYKLLNSHDDYLDNHNNLINKRNWENRLLYHHINTLSGLDRMYALFIFHKKYVYDHKISIICEGITDVLHFKKASEKLGINNIRLSSFNSEYQFEKLLHLDGGTDNLKKFLSNLKLIYKSEIPLKDLNPTIIIVDRDKAGKGVIEEARKLFKNSFKEHNSSSVKDMKFYTLFQKFYIFCLPIVSIDSNKTVIEFLYNNRDLLNETMSVNGKPLICEAIATKEQIDQKKVYPKILFIKNILPKYESILDYTYFQQVFDVINEISTLMKTV

SEQ ID NO: 1384 - protein, 623 aa, Acinetobacter bereziniae
  source 1..623: note = Related to JADVON010000009.1
MKNLENLKNCENARDLATLLDIPYKRFSIILYRHHISSKYSSFEIKKKDQSLRKIHAPYEYLKILQKKLANLLEQCLSEIENDRLTENLAKFNENRPKKYPKFHLTSHGFRKKIYIDSPYEVHTITPGIFTNAYTHTNKNLVLNIDIKDFFSSIKFNRLVGFFIQNKYFELSEEVAFTIVRIATFRENDDEMGYLPQGSPCSPVISNLFASMLDSRLVKLCKKNRCVYTRYADDITISTNLKEFPQDILTIVNDKVILNDRLKRQFDAFGFNVNNKKTRLSSKKQRQVVTGLVVNKKVNINKNYYKATRAMTDSFCKTNTFIKSKYHTFHESEVSNSHSLNGILNYIYNIKKIEPYKLLESHSDYLKHHNELIDKKNWESRLLYHHINTLSGLDKMYALFIFHKKYVYNEKNSIICEGITDVLHFKKAAVKLGVDNLKFSSFHSDYQFEKLLHLDGGTDNLKKFLSNLKLLYKSEVSLKDLNPTIIVVDRDDAGKGVIEEAKKLFKNSLEEYSSSSISTLKFYCIFKKFYIFQLPIVPYDSKKTVIEYLYNNSTLLNETMTINGKTLICEAIATAEQIKKKEVYSKIAFIKNIIPKYESTLDYTYFKQVFDIVDEISTLMKTV

SEQ ID NO: 1385 - protein, 623 aa, Acinetobacter sp.
  source 1..623: note = Related to SJOH01000014.1
MTNLENLKRCETARDLAILLDIPYKRFSIILYRGHISSKYSTFEIKKKDQTSRKISAPYEYLKIVQKKLSVLLEQCLSEIENNRLAETLSKFQENRPNKYPKFHLVSHGFRKKIYIDSPYNFHSITPGIFTNAHIHTNKNLVLNIDIKDFFTSIKFNRLVGFFIQNKYFELSEEVALTIARIATFRENDKVIGYLPQGSPCSPVISNLFTAMLDSRLVKLCKKNKCVYTRYADDITISTNLKEFPEAILTMDENLIVLNERLIRQFETFGFHINNKKTRLANRKQRQVVTGLVVNKKVNINRHYYKATRAMVDSFCKTNTFVKSKYHVFHEPQIEDSQSLNGILNYIYNIKKVEPYKLLEQHDDYLKHHNEFIDKKNWESRLLYHHINTLNGLDKMYGSFIFHKKYVYNDKPSIICEGITDVIHFKKAAEKLGITNIKFSSFNSDYQFEKLLHLDGGTENLKKFLSNLKILYKSEVQLNLLNPTIIIVDRDGAGKGVITEAKKLFKNSWKEHSSTTVPTMKFLALFKKFYIFELPVVPFDPEKTVIEFLYNNSTLLNETMMINGKHLICEAIASKDQIDKKKVYSKISFIKNIIPKHESSLDYTYFKQVFDVIEEISTLMKTI

SEQ ID NO: 1386 - protein, 365 aa, Acinetobacter sp.
  source 1..365: note = Related to SJOG01000001.1
MKNLENLKKCETSKDLAILLNVPYKIFLITLYNGHISSKYSNFEIKKKDNTLRKIKAPIQNLKDIQKKLADLLEYCLSEIENERLKKIQLNFSEHSPNKYPKFHLTSHGFRKKIYIESPYNVHTINLGIFSNASVHTNKNLVLNIDIKDFFSSIKFNRLVGFLIQNKYFELNEEIALTIAQIATFRENDDEVGYLPQGSPCSPVISNLFTAMLDSRLVKLCKKNKCIYTRYADDITISTNLKEFPKEILTIDEDRIVLNERLIRQFETFGFNINNKKTRLANRKQRQVVTGLVVNKKVNINRSYYKATRAMVDSFCKTNTFFKSKYHVFHELQIENSQSLNGILNYIYNIKKVEPYKLLSPHDDY

SEQ ID NO: 1387 - protein, 610 aa, Necropsobacter sp.
  source 1..610: note = Related to NZ_LN776178.1
MNALSRLKNCNSIADIISSFSLNISPKNFSYILYILSDNDKYKEFTIPKSDSSIRTISCPEPRLKYLQKEFSKIINDCVIEIQHKNPSYLIGNHAFEKYKSIASNAYKHEKQRYILNIDIENFFSSIHYGRVVGFLQNDRYFSLSEKTSKIIAKLATHKGVLPQGSPLSPILASLIGNIVDSRLMKLARKYKLTYTRYADDITFSSNRNFSTDLLTFKDGIWVANKKLISAINHCGFKINHKKTRFSDQNHKRVVTGVIVNEFLNTDKKYRKNTRAMVNSLLSKGEFKILDRDNNEIQGTIEQLIGRLNHSISIKYRDRVLNPRLPRDVRIEVQNKIKENLIKIIQYKENTTFLPKNIGLDKIEKAFNIEKDEAKYLLSFVQKRDDRLIIPDCNIRLLRNVLFYKYFLSMDKPVIITEGKTDALYFKAAMKKLLISNDLYFVKHKKNGELDKLGLTGGTAPINAFFKYVYNDNNFVDFHKINVKPKSPVIFILDYDDGLDKVKNLLKKNFSEGKRFSQIKRNIYILLLNKFGDGEDFKKDNKVCIENLISFDGEKIAVSNERVSFQGKELSKNEFSKIVLEEYERFDFTNFSIVFSEINNIINHFNYNRD

SEQ ID NO: 1388 - protein, 617 aa, Pasteurella multocida
  source 1..617: note = Related to PPWW01000004.1
MSTLNKLRKCDSIEDLISSFSLKITASQFSYIVYRVQDSDKYHQFTIPKSDGTTRIISSPHKTLKYLQKEFSKIFMQCITEIQQKHPSYLAKNHAFEKYKSIASNASLHKRQKYLLNIDIKDFFSSIHYGRIIGFLKKDKYFCLSDRTAKIIAKLATYDGVLPQGSPLSPILASLIGNIIDTRLSMIARKYHLVYTRYADDITFSSNRDFSKYLLDNKNNIWHPNNKLISAINKCGFSINIKKTRYINRYHKQVVTGIIVNHSLNVDKKYKKHSRAMVNNLLRTSQFQIHKGYNYKYTGNIDQLIGRLNHAISIKYRDRILNLNLLSEIRKYIQFSIKRNLINIIKYNGRTDKIKKHIGIDRLERTFDINNEQVKKYLTFIQKKDDTLYPSDNQIKLLRNVLFYKYFIGIESTYIFTEGKTDHIYLKYAFQALNFTKNVKIIKHNSNLEKLGLSGGTEPINQFIGRAYTDNFYVDFDKINIKPKHPVIFLLDYDDGLKKIESYIKRCFKTGDQFAHIKENIYILLLEKLTPQQDKYNYTEKNKQTCIENLIHYNDSKIMISSNNHDCVIFDGKEISKNDFSIKVRENKNSFDFNNFSSLITAIRDIENHFKTKVKLD

SEQ ID NO: 1389 - protein, 613 aa, Haemophilus parainfluenzae
  source 1..613: note = Related to NZ_CP031477.1
MNTLSKLQKCNSIDELISSFSLNITPKKFSYILYVLQDNQKYKDFTIPKSGGGIRTISCPEPTLKYLQKEFNKIFISCIDEIKQINPSYLISNHAFEKYKSIASNAYKHKNKKYILNIDIKDFFSSIHYGRIIGFLQKDRYLKLSEKTAKIIAKLATYNGTLPQGSPLSPILASLIGNIIDARLLKLAKKYKLTYTRYADDITFSSNLDFSSFLLEKENNIWVPNKNLISAVESLGFKINNKKTRYTDKYHKQIVTGLVVNKFVNTDKNYKKKTRAMVYQLFKIGEFKLTGKNKDTITGSIDQLIGRLNHSISIKYKDRILNPFLLNNVRSEVKNKLRDNLINIIQYRGESNLLPKDVGINKLEESIFIEIEEAKKLLSFNKNKNDKLIIPDDSIKQLRNVLFYKYFISFAMNGPVIITEGKTDFFYFKAAMKSLSMNNNFKFIRQNNRSLEKLGLSGGTDPINKFIKNVYHDEKFVNFSKLKVRPKYPVIFILDYDDGLDKVSHIIKEKFKDGTQFAQIKENIYILLLKKITLNSSGKMDYTNEPSKVCIENLILLNGNKINVINDEVDYEGTRTSKSCFAKEVSSNLEKFDFSEFKNIFDKIEDIVTHFHT

SEQ ID NO: 1390 - protein, 614 aa, Aggregatibacter sp.
  source 1..614: note = Related to NZ_CP072548.1
MNLQKLRNCQSIEDLISSFSIKTTPRKFAYVVYKIPDNQKYIEFEIKKANGSLRKIAAPNSTLKYLQKLFADIILNCVLEIQQKDKNFLVTNHGFEKHKSIISNARIHQGKKYLLNLDIKDFFESIHFGRIKGFLSNDQHFLLHNKTAEIIATLATYGERKTLPQGSPLSPILSVLIGSILDANLMKIANKYNLSYTRYADDITFSSNKDFSKFLLRKDQNGNWQLKGKFEKYINKVGFHINKEKTRYTNINNKQIVTGLIVNKFTNTDQRYRKQSRAMVHKLFQTGTFTPDSKNDGRLYNEDYLIGRIYHSISVKYREIVINPNLLTNDINIINKEINKKISNLIRYDKVCAPDYKPNYTANDILNKLTPPFTDGLIESLSKSLVKRNMPIDSDNQIKLLRDILFFKYFVNINSPVIIPEGHTDSKYLKIAMKMLNINIDLKFYNINPSLDKLGLNGGTAKINSFIQNCYSDNNFVSFNKLKIKSKHPIIFILDYDEGLKSCDEILKYFKDGSNYARIKENIFVILLNKYKILEDKKKKDFNIKDHQVCIENLISHNSQRINVDKDNHDKVSFNNELISKSKFSELVENNTHLFQFLNFSTIFDTIKKIIHEY

SEQ ID NO: 1391 - protein, 582 aa, Rodentibacter trehalosifermentans
  source 1..582: note = Related to MLHL01000009.1
MAKYIDRLRKCTCIADLVSEFKLKVTAKEFGYVVYHLSDDLKYEEFDIPKKNGTLRRIHSPKPTLKYIQKEFSLIIFNCINEIRLDNANYLACNHAFERDKSILSNADLHKNKKFILNIDIKDFFDSIHYGRIKGFLANDSHFKLNEKVSQIIARLATYHKILPQGSPLSPILATLIGNIMDVRFLKLAKKYRFTYSRYADDITLSSNKAFDKNIVYWCENNKKWVAGEIVINILTDSGFTINSEKTRVSYSNDRQTVTGIVVNKQRNVTLEYRRTNRSMVYSLLSTGSFRLNDNVGKITQLMGRLNHSIYIKYYDSKFSIPLDMNERIKYKEKKQKELIKIINDNWKSDKNNITCADHQMKLLRSVIYFKYIINVDQTTIFPEGFTDPIYFSSAKEKLNINSNIKFQKINNGLKKIGLLGCASSVNTFIHNVKEKIDKFISYKQIGVIPKHPVIFILDYDDGLDDCRFILDKIQIDQQYVFIRDNIYVLLLEPKGKSKNHHKTIENMSCIENLISFEGNRIEAVQGKKEYINFKGIEFKKGSFANYVKEHSSDFDYSGFDKIFKKITEIEEDYAKRMITNA

SEQ ID NO: 1392 - protein, 597 aa, Lonepinella koalarum
  source 1..597: note = Related to VSFH01000001.1
MEVFISMSSYLEKLKSCTSISDLISEFELNITPQQFSYIVYKVEDSKKYQTFTILKKSGDDRIIQKPHNSLKEIQKSIANILMHCVDDIRKDKPNYLKCSHAFEWGKSIVSNSEIHINKKFVLNIDIADFFDSIHYGRIKGFFVSDYYFSLNETIARVIAKVATCNGTLPQGSPLSPIISSLIGNLIDIKFLELAKKYRFTYSRYADDITLSSNKELSDELVIWDRENNVWKVTNTIESLLNRKSGFKINEKKTRYNRFSSRQLVTGIVVNKEKNVVREYKKQNRSMVNSLLNTGEFFIKDISDEHIKGTIEQLIGRLNYCIYVKYYKPNNLTKLDLDSKIDNKEDNRKNIRKMVSLRIDKNDENFPLQKPDHQMYLLRSVLFFKYFTNITQTTIYPEGYTDPMYFSIATEKLNKKGLFYFQKINDSLKKLGLSGGASSVNYFISKFVEHSYFIRFSSIVPTHPAIFVLDYDNGLDGCQYILNSKRFGFIKKKNIQFSHIKDNVYVLLLSPISNEKSWKKKENYKCIENFITYQGKIIQVSDEEGEYVSFKDDKIKKYNFAQYIMNKPDEFSFSEFSNLFDQISLIESDYKERLAMK

SEQ ID NO: 1393 - protein, 590 aa, Haemophilus haemolyticus
  source 1..590: note = Related to NZ_JTLX01000008.1
MNKTTIDRLRSCTSIADLISEFQLKISPSKFSYIVYCLRDEDKYTKFEIPKKSGGVRIIHSPKDSLKYIQREVATILLNCIDDIKLSNPNYLRCNHAFEKDKSIVSNANLHEHKRFVLNIDIKNFFSSIHYGRIKGFLISDANFLLNEKVGQIIAKLATYNGYLPQGAPTSPILASLIGNILDIRLLKLAKEYRFSYSRYADDITLSSNQELPNELIYWEKEENIWIAGNKITKVIKKCGFELNPLKTRYIRNTNRQIVTGIVVNKKRNVVSLYRKINRAMTYSLLSTGQYTIRDVSGLLSNGTINQLIGRISHCIYVKYHNPPMIHPLNSQRADLRKKNSERVTKIISDNWNRDSKSNINYYSDHQTMLLRSVLFFKYFISNERTTIIPEGFTDPIYFKTALSSLEINLNLHFQKLNRELKKIGIYGGASFVNSFLCNIETEKKGFISYGMIKQTPQKPVIFILDYDSGLEDCKYLLSKMKDGEQYINITDNIYILLLRVKHNKDHKNINNHIYTERLISYQGNKIQAKDDNHEYILFKNEEYKKYNFAKYISQHKDEFNFDSFKDIFDKIKEIEDDYQAKLATKNIKL

SEQ ID NO: 1394 - protein, 586 aa, Neisseria mucosa
  source 1..586: note = Related to JQHF01000020.1
MTLYLEKLKKCNSISDFIREFNLGLSAKQFGYIIYGLPDHKKYDSFEILKSNGDLRTIHAPKKSLKFLQKQFASIFLQSILDIQKQNHHYLRCNHAFEKNKSIISNARHHQKKKFLLNIDISDFFGSIHYGRIKNFLINDKYFSMTEKGASIIAKLAVYQGKLPQGSPLSPILATLIGNLIDVRLTQIAKKYRLTYTRYADDISFSSNFPLPEKLVYWDDSQQIWVAGKILEKVILKTGFLINPKKTRYTTIPFRQLVTGIVVNIHTNSPSPYKKQNRAMVNSLLKTGKFYIEKNGIQTKGTLNQLIGRLNHTIYAKYHKPTTDIKLDQEEREKFKEENRNYIIEILSKKWHKGKSSYSEADHQTKLLRNVLFYKYFNSLDKTKIFTEGVTDSIYFQIAAEKFNLKDDLSFQKTNISLKKLGLKGGVPTIKSFFKNIKDNNFINLKQFKTNSEYPAIFILDYDQGLDGCPEIIEKFSNGRQYCHITRNIYVLLLKPYNGKGDYKKNKICIENLIRYEGGQIEVDGAKNENVCWNNSLISKMAFSKYISNHKTDFDFTEFKKIFNLIQDIERDYFRRLTQAQAQDEW

SEQ ID NO: 1395 - protein, 591 aa, Kingella potus
  source 1..591: note = Related to CP091516.1
MFNHLIKLKLCNNGIDVVNNFHNYLGISVKDFWYIAYSLNHFSQFTSFTILKASGGERTILIPPQPLKDLQKKFATILNFCIREIQQENPNYLICNHAFEIKKSILTNAQIHRNKRYVLNIDLSDFFGSIHYGRISNFFKADKYFRLNDKVAKTLAQLACFRDENNKTFLPQGSPLSPIIASLIGNLLDIRLVKISKEYKLTYSRYADDLTFSSNKPIPEDLVRWNSENFIWEAGDRLRRVIEDSGFKINDKKTRLFSAKKRQTVTGITVNKTLNISEYYQKHNRAMLYSLFTSGKFLIGDKEGTINQLIGRLNYVASVKYLKQHHDMSIQEWEEERKKFAYLCAGNFDNKENSNRSIRLLRQAIFYKYFIGNNKPIIFPEGITDSIYFKLANKILNPNEHKENYIIQSINSELTKISLGGGTALINSFLLHAYKDYFINLKNLKIKSKHPVIFVLDYDQGLDVKDKNEKSKNNIPETHHMKDGQQWVHIRENIYLVLLRPLALENKKPTFRNALEMTCVENLLSHVSIGKIKVDDENHENIKFRNRSYPKTVFAKYVAKRSTHFDFSEFKKIFEIIDEIKKHFYQNSISI

SEQ ID NO: 1396 - protein, 619 aa, Lactococcus lactis
  source 1..619: note = Related to NZ_CP042408.1
MKEKLSKLKKCTTRIDFLNILFPGEGSKNEYLKVIFSVPDEKKYSTFKIPKKSGGTREILAPKEDLKKIQKKLGDFLSDCYQELYGDKNNYSNAYLKEKSIITNAKKHRNKRYVLNIDLENFFPSITFGRVRNYFIKNKYFELTEEIATLIAKIACYKGILPQGSPCSPIISNFICQILDIRLGKLASKNKCHYSRYADDITFSTNLMMFPENIAHWNGDKIIVGQELGSEVTRAGFNCQHSKTRIYGKDKRQEVTSLTVNRKVNVSRKYFDSTKAMARKYYLTGTCEINGQEATYKQILGRFNYINQLEKYNNKIFFKQNEAKEPENIFTPANEKPLETNQKDSVIAPVQLTYNSKYHTFAVNGSKEKELGKYGYKVGYDYLSAREQAYSKFLYYSTFIANQKPIILTEGKTDILYLKAAIKNLYLEFPNLVEKVQDKFNFKISFYNYSKLNRYLLNIIPSGGGILRVLSPQYLFPSDSLISKHPTILLLDNEEKKGKPLARLLGNGKLKKEIVKKDFASLDKTKITLKESDELFNRVKGVDKFFLLTIPRIESDKESDIENLFTEDFIKEQEFDKESKGAKNELSKIVSRDYKKIDFTNFKPLLENLTNIIRANDNK

SEQ ID NO: 1397 - protein, 450 aa, Dickeya sp.
  source 1..450: note = Related to NZ_CM001979.1
MPIAPQLTIVKNKTKTMSKNNKLSELKSAKNITDLAKIISVPRQSITYVLYGINRLNLAKYHTFKIPKKDGSERTINAPVKELKDIQKKVSSLLQECFRIVCILEGHRNHLKKINSLSHGFIKGKSIITNATPHKNKRFVLNVDLKDFFGQIHYGRVYGFFKNNKHFQLSDEVAKVLANITCYQQGLPQGAPTSPVISNLIAGILDIKLASLAKKYSCYYTRYADDLTFSTNLKEFPPRIASIENGDVRIGSSLEGIIKKCGFDINHKKNRLQFCNSRQDVTGIVVNKKVNVPYDYRNKARVIWHKLKNGKEIYAINSQPEIKKDINYLIGILSHIHNVRREHRVTTKEEYIIPKKPNKKTFDDIFDADSRMYRDVLFFKNFVKNKKPVIVCEGKTDITYLQCALESQAAKHRSLIIKKELQISFFRPTKTISELFKVTGGTGDIGNLIS

SEQ ID NO: 1398 - protein, 576 aa, Pantoea vagans
  source 1..576: note = Related to CP011427.1
MSKNNKLSLLKSANNTKDLAEVLSVPFQAITYAIYGINRLRLPKYTTFTIPKKDGTARRINVPVKDLKDIQKKVAALLQECFRIICILEGHRDHDKEITSISHGFIKGKSIITNAIPHKNSRYVLNLDLKDFFGQIHFGRVYGFFKNNKHFELEDEVAKALANICCYQSGLPQGAPTSPIVSNLIAGILDIRLASLAKKHSCFYTRYADDLTFSTNLKEFPKELAIFENGNVTIGTSLNKVIDKCGFEVNVKKNRLQFCDSRQDVTGLIVNKKVNVPSDYRNRARVIWHKMKSGKEIYAINAKPEKKENINYVTGILGHIHNVRREHRITTATEYVIPKKPTKALMDSIFDADSRMYRDMLFFKNFVSGKKPLIVCEGKTDIVYLKCALHSQAAKHRSLILSKELKVDFFRPSKTIGELFRVTGGTGDIGNLISNYSSYCDEFKRFSLPQPVIILIDNDSGAPSVRSLVSQITKSKFDNTDTFTHIIKNLYILQTPLVMGGDSAIEDFFDAKTLNEKLGKKSFSYKGNFDSSKHYGKNHFAEYVVKVKKNSIEFKGFNVLFDSIKAIIKDYKSKPH

SEQ ID NO: 1399 - protein, 577 aa, Salmonella enterica
  source 1..577: note = Related to ABDODY010000002.1
MSTNSKLKELQEARSLEDLASILSTPLQLLTYVLHGRHHHGLVNYKSFNIIKKSGGIRTINAPIDELKSIQKKLSTVLQDCQKTINILEGHRTHDKKLVTIAHGFIKGKSIITNAEPHRNRKFVLNIDLQDFFDSIHYGRIYGFLVNNKHFKLNENIARAITNLACHDGKLPQGAPTSPIISNLIAGILDIRLAALAYKHKLHYTRYADDITLSTNLNEFPSSIAYIDNAHVVIGNKLRTSIEKQGFSINPQKSRLQFKNSRQDVTGLIVNKKINVKNEYRNRARVLWNKIQNGKEIYAIGSEPEKTKNINYLVGVLSYIYHVRNSNLVRNGIPSITHKKPTKKEIDSTLDANARMYRDVLFFKYFIANKKPIIICEGKTDIIYIRSALLSLARKHRSLIDKKEAKIDFLRVSKTIKELFKISGGTGDIGNLISNYSSYCEHFKRFSPMAPVIILIDNDSGAAPLRSLIKEITKTPFKKEDDYKYIINNLYIIQTPSIDGKDSAIEDLFDKKILQTKLDGKSFIHKQSTFDIKKHYGKNHFAEYVVRQHQKEIDFSRFNLLFDSIKKIIKDYKSKPH

SEQ ID NO: 1400 - protein, 577 aa, Enterobacter hormaechei
  source 1..577: note = Related to JAJKGJ010000001.1
MSTNNKLKELQDAKTLEDLATLLAIPLQMLTYVLHGRYKLKLENYRSFTLTKKNGGERLINAPINELKTIQRKLSILLQDCQRIISILEGHRTHQKEIKSIAHGFIKGKSIISNATPHRNKKFVLNTDLQDFFGSIHYGRVYGFFLTNKHFQLNEDVARAIANLACHEGKLPQGAPTSPVISNLIAGILDIKLSTLAYKHKLYYTRYADDLTFSTNQKEFPSSIAYEEEGIVVIGHALNSIIQKHGFEINASKNRLQYKNSRQDVTGLIVNTKINVKNEYRNRVRVLWHKIQNGKEIHAIQGDKDDKKNINYLVGVLSYIYQVRKSNKTRTNTITNLGKKPQKKEIDSILDADERMYRDVLVFKNFITNAKPLIICEGKTDITYLRSALLSLSNKHRSLIEKKEIKVDFLRITATIQELFKISGGTGDIGNLISNYSSYCDHFKRFTPASPVIILIDNDSGAAPLRSLIKEITKTPFTRETEYAHIINNLYIIQTPLIDGKDSAIEDLFESKTLNTKLEGKTFVYNKANFDTKKHYGKNHFAEYVIRQSRKDINFNGFNPLFESVKKIIKDHKKKPH

SEQ ID NO: 1401 - protein, 578 aa, Serratia rubidaea
  source 1..578: note = Related to LR134155.1
MSHSDKLSKLKNAKTLQDLADVINVPLQSLTYALHGMHRLGINKYNSFPIPKKSGGVRIINSPVKELKDVQKKLSQTLYDCYNEMLIVSGYRGLDKKGITISHGFIKNKSIITNAECHRNRRFILNLDLEDFFGSIHYGRVYGFFKTNKHFGLHDLIAHALANLVCYTHGLPQGAPTSPLASNFIAHILDIRLASLSKKHGLYYTRYADDLTFSTNKKIFPADIAYLEAGKTVIGFELNKIINKHGFSVNSAKTRLQFNDSRQDVTGLIVNKKVNIRKEYVRAARILANKLFNNKVIYRIESKKTEDDICDINYLIGVMAFIYNVRQSQLIRVSGDKSAELKNFTKKDIDSSLDANARLYRDLIFFKKFIVSDEPLIICEGKTDVIYLRTAMLSLSAKHRSLVTKGRVNVAFLNHTQTIKELFKIRGGTGDLGNLISNYSSYCGKFARFKPKSPVIIIMDNDSGAPKIRSLVKAITGKVYDKNDGFRHLTNNLYLIQTPPLAGGADSAIEDLFDKKTLDVRLSNKKFSYKGEFIKSKHYGKNHFAEYVVKPRRKDIDFNGFNPLLDEIKAVIKHYKKS

SEQ ID NO: 1402 - protein, 588 aa, Yersinia enterocolitica
  source 1..588: note = Related to NZ_CTIT01000003.1
MSSADKFLKLKQATTLSELAEILGYKHNSLSYILYGKFRLGLSNYSTFSIPKKNGGYRTISSPAPELMELQRRVSDLLHDCFVQIQIINGFRYRNKNIKTISHGFMRGKSIVTNAETHKKKKFVLNIDIENFFDSIHFGRIYGYFLSNKNFELNPTIAKILANIVCHNGSLPQGAPTSPIISNLVAHILDIKLAKIAQENSCQYTRYVDDLTFSTNKNIFPIGLGTIDEKHDCKINEKLIGLIKHSGFTINNKKTRVQYKDSRQEVTGLIVNKKVNVKSEYRNKARILVNKLYSNKEVYKINSTTNEPATIEYIQGVLNYIYQVRLHNSIKHTENILESQRKKCVSKEQIDTTLDADARMYRDFLFFKNFVINNSPLIICEGKTDVIYLRAAISVLSKEFPNLSNSDNGHQLSFFNNTNTTSQLFKINGGTGDLRNLISNYKKYFTKFERFTPESPVIILIDNDSGSATIRSILKEVTKKEFTKKDNFIHIEKNLYVMQTPLQKNQTESEMEDFFTKETLSLKLKNKSFCYKGEFNKNSHYGKNHFAEYVIKPQKKTINFSNFKVIFDIINLICDDYKQKIKNPIKTR

SEQ ID NO: 1403 - protein, 651 aa, unidentified
  source 1..651: note = Related to JAIBBO010000111.1; note = Methanobacteriaceae archaeon
MSWFCQSIGSSFVTFFSQKLFNKLELLLQSFQSFSQLLTGIKNMSENDLERLRNCKDLQDFSKLIGYKKTKNLSYIIYKIPENLRYNEFKIKKKNSEFRIIHAPVEKLKTVQSRLSSLLQNCYDLISVDLKSKEILSHGFIRGRSIITNALIHKNKRFVFNIDIENFFGSINFGRVRGFFIKNRYFKLNENIATIIAKIACHNNSLPQGSPCSPIISNLIASILDIYLFKLCKKYKLYYSRYVDDLTISTNLNYFPENIAYKNPSSKNEWVIGNELTKIFERVNFKFNFKKTRMQLKNSRQEVTGLIVNKKVNVKYEYKKKVRAMIHNLFMNGKIFIKKEDKEKNVEVEKKINSLHGMIQFIGHIIEYQLETFNLSKVDKKNENAISNMNYWLKMYENFIIYKYFYGIKAPTIITEGKTDTIYLKCAIERLNFQFCTNSFSSLSKAICFHPHTHRNNFQNKIKNKDNYKKSFDKKLKRKPVFLGGNSGATFLMKNYIPNNKLFKNADKILSAPLIYIIDNDESGKKSLNNFLSNKKFINHRLNDNTCFVGLNLYIIKLPQISSENNDYEIEDYFDTDTLSSIIDGKSFNKSNDSFDIKDVYFGKMDFALKIIKNNKNNIDFSKFNKLLDEINFVIQDFYNNKRHQNSLVSN

SEQ ID NO: 1404 - protein, 557 aa, Brachyspira pilosicoli
  source 1..557: note = Related to SAXY01000032.1
MFLIFENMYKKEEIERAVKKLEELVNCKSKKDFSDWLDIRLKTIYYILLINKEPLYNEFTIPKKNGSMRNISAPNEHLKRIQHNLKKNLDMCYIAITHNNFNKRLAHGFIRKKSIITNSQYHKNKRYVLNIDLKDFFPSINFGRVRGFFIKNKYFQLNEDIATLIAQIACHNNQLPQGSPCSPIISNLLALSLDKYLFSLSKKYRFTYTRYADDITISTNLREFPKGIAYFDEYEEKWFLGNKIIEVINNNHFDINFEKIRMQYKTSRQEVTGLITNKKVNIKRSYIRATRAMLDHLVLYPSSDDYISRRKIVEGRIAFIHQIRKINIENNRDLSLKMLENFFCFDNFINNNNITILVEGITDKIYIKSAFKYFKSEYKFKLKIITKNPFSRTNSQKNSGEGSLNQLLSRFKETKFLDRINMFLKRSKLVKPKNPIIIIFDRDNKKFVNDFEQKNAQYLFLEPNVYYFPIPELPDKKYISIEYYFSDEVLNTPFKGHKLELDIQNKDKKIFYKIGEKGLSKNKFAIHIVRKLAESEFINFKKIFDIINEINIDYKNK

SEQ ID NO: 1405 - protein, 563 aa, Brachyspira aalborgi
  source 1..563: note = Related to NZ_SAXU01000001.1
MDTLDKLKNCKSKFGLSKIIGIKLKKITYILFVKKYNLYTEFQIPKNNGKFRNISAPNKYLKIIQKKLKKVLEECYNEIQLNKNASHGFLKKKSIYTNSNFHKNKRYVLNIDLKDFFPSINFGRVRGFFIKNKNFQLNEEVATLIAQISCYNNQLPQGSPSSPIISNLIAISLDKGLSILSKKYKFNYTRYADDITISTNLKNFPIAIAYKDDDGNWKLGSEIIKMINNNHFDINFDKVRMQYKSSRQEVTGLIVNKKVNVKRNYIRKTRLMLYNLIKNPNSDDYQSIRNCIEGRIAFIYQIRKMNFENNKRDIAKKMKDMFFYFDKIINNQKITIITEGKTDKVYLSSAYSHFKEYYKLNFQIITKIPYTKHDSNNINNTGDQTLMNFVKELKEKNNIKPYKYLLEKSKIKNPKNPVIVIFDRDRINIIKEFEKNIKNENCKFVFFEPNIYYFVLPKLIGKEYLSIEYYFPNKILNKKIKGKNLSLCQEKHKKHIIYKIDENNDGLSKNEFSKYIKKLRYNTKRDNILNEKNKKYFDNFKSIFDIINDIRKDYKNKLQNINK

SEQ ID NO: 1406 - protein, 578 aa, Brachyspira hyodysenteriae
  source 1..578: note = Related to NZ_CP019600.1
MILEKLQNCQDKKDLALLLKCDLQNLSRILFKDFNNNYSIFFIDKKDGGKREILAPKKDLKIIQKKLSKILEECYIEISEKNNKINFNSINGFITGKSIITNAKKHTNKRYVLNIDLKDFFPSITFNRIVGFLKKNKYFKLEHDVAMLIAQIACHKGSLPQGSPSSPIISNLIMLSLDKEINILAKKHGLTYSRYADDITLSTNKKNFPNEIASGNGIEWNIHKKLETLINNYKFNINHKKIRMQYKTSRQEVTGIIVNKKVNVNRKYIRNVKAMLNKSIINHSMENYEYFKLSLRGKIDFIYQVRKLYMENDKSNEKDLISKIFNNFLYFNHFINNNKVTILTEGKTDKIYIDTAFSHFKNEYNYQINILKQSDMFTNITKLNGINNLVNFIKSYDSKNGIINKLINKSNIHIPKKPVIIIIDSDEPTKSKALELLDNKNGFIFKEPNLYCFQLPEIKDKKFFSIEYYFPERIRNYENNGKKLGENTKNKYNNKETIYKIEDGGNNLSKSYFSNYIKTLKHKEISDKKNKTKEDIDNIKRINEVNKNSFEEFKKIFNKIDEIINDYKKICNSKTSEQ

SEQ ID NO: 1407 - protein, 557 aa, Brachyspira aalborgi
  source 1..557: note = Related to SAXX01000003.1
MNLEKLKECKSKYDLANLLKYSLQSLSCILFKDIDSNYSMFYIDKKDGTKREILAPNEKLKKVQKNLSKILCKSYECINKNPKAVHGFIEKKSIITNAKMHKNKRYVLNIDLKDFFPSITFNRIVGFFKKNKHFQLEHEVAILIAQILCHKGKLPQGSPSSPIMSNLIMLSLDKELNILSKKYGLIYTRYADDITFSTNKRKFPKEIAYSINNVDWNVSKILERLINNYHFEINHNKTRMQYRTSRQETTGIVVNKKVNVSRTYIRNIRAMLNKMICNYTMDEYDSFKSSIKGRIDFIYQVRKDYIDLKDKKNYEKDLIVKLFNKYFYFDKFVNNSNVTILTEGKTDKVYIDVAFSHFKNEYNYDIDIVRHSDMFLNITKLNGIKKLKGFIDNYKDKYKQEIVPLLKKSKIENSKYPVVIIIDSDEIEFLKQLKLFDDKYNLKNKYIFKKPNLYCFHLPQLDDKEFFSIEYYFQENIRNKYINGKRLRDIIEKENIYKIDDKSLTKSKFSQYIRKLRYDNEKKTDINSNNKKIFSEFKKIFDLIDEILKDYNTRIQK

SEQ ID NO: 1408 - protein, 565 aa, Desulfovibrio sp.
  source 1..565: note = Related to NZ_VOIQ01000010.1
MYGLHGGPNGQYTDFTIKKRNGTDRNISAPTTALKAIQRSLAIRLSGVYEPKKAAYGYIKKSDNNQDKTVFGNALVHSKKRYVFNVDLKDFFPSIHFGRVMGLFRSNPYKLDRSIAILIAKIACYNDFLPQGSPCSPIISNMICSHMDRDLSDLAKNYRCYYTRYVDDITFSTNVKDFPEDIAFFDGIWNPGEGLVEIIDDHGFKINGEKTSLRTQSDRQIVTGLTVNDFPNVRKRSINQVRAMLHDWKVNGLELAYTKYIEKYDTRNNQHEEEDKTVFGKIIKGKLEWIGSVKDKRFEINEKHKGNKAKLNRLGYSKNLLERQSYKKYIERLKHLTINESDMVTVLGEGQTDWMHLKTAYKRLCSDPELSFPIYFYPHSRKEKGGEDNLWTFCSTAKDHYVTYRHPVVCVFDCDLERINNKHKGKKFIDHGNNVFSILLQKPEGSIYEKYAIEQIYDLHDMLKTDEYGRRLYLSSEFDGNSVHKMNPNIFSKKKTSNDEKIVDNEVFLRKKDGTEKSIALSKTNFAVSIARGIQPFRTMNFSGFMPTFLRIKEIYQLHISDSSH

SEQ ID NO: 1409 - protein, 399 aa, Maridesulfovibrio frigidus
  source 1..399: note = Related to NZ_JONL01000015.1
MTRINNLSRFQQISTLNQLALFLGFKPKDFSYILYRLSDGPNGQYTEFAIKKRNGKDRTIAAPHTALKTIQRSLTSKLEGIYDPKKAAYGYIKETPHNKDKTVFGNALVHSKKRYVFNIDLCDFFPTIHFGRVMGLFQSNPYKLKRNIAILLAKIACYNDCLPQGSPCSPIISNMICSHMDRELSDLAKAYGCYYSRYADDMTFSTNIIEFPRDIAFRDENWKPGEGLIEIIDKNGFEINSEKTTLRTQADRQIVTGLIVNDFPNIRKRSINQVRAMLHDWKLNGMEAAYEKFINYHDTRNSENKEDSTELFSMVVRGKLEWIRSVKDKRFNIQEIQNKAKSKQNRLSYSSRLLEKQSYKKYFNRYKHLRINESDMLTVLGEGQTDWRHFKNAYEVLYR

SEQ ID NO: 1410 - protein, 351 aa, Leptospira perdikensis
  source 1..351: note = Related to NZ_RQGA01000001.1
MELKLNRTDEEILALFKSLNSVETVANILEVSPKILNYYTFKSENYQKFFIRKKNGKPRTIYSPNTNIKILQQKLLYIFNLLYKPNQYAYGYIKERNIVDNANKHLKKKFILNVDLSDYFPSITYRRVIGYLVKNLKIENTAARIITKLICVEDEKNTFLPQGGVTSPLISNFISENLDKDLSYYLKRFRCEYTRYADDLTISSEDLKFPDKIAVEDQFRQVWLHNDFERIIKKNGFEVNYEKIRLRKPNQRQTVTGLIVNGSKPNVKRSYIRNLRSILYNWETKGYTHIQTAYELKYRKFDNAEFKPIPKIENVIDGKLNFLSMVKGKDDEIYLKLKKRFLKLKATLDDV

SEQ ID NO: 1411 - protein, 347 aa, Leptospira yasudae
  source 1..347: note = Related to JACCKC010000006.1
MKLELVKTNEEIIECFYSLRTKSDVADLLEIPIEVLNYYLYISSNYTIFTIPKRDGSPRVIYSPITPIKILQRKLLYVFNLIYEPDDNSFGFIKNRSIVQNAARHQNKKYVLNIDLKDYFPNITFGRILGYLKKNLMLGDEASVIITKLACVETEENTFLPPGSPLSPILSNMISRKLDVEISNFVKKYDCTYSRYADDISISTDRIVFPEQVAIRDLYGDIWLNAKFVKVISDNDFNINYRKVRLRSNKQRQEVTGLIVNGVRPNVKREYIRNLRAMIFDWEKNGLENAQSNFEINYWKPKDSDFKQIPRIENVIDGKLNFLSMVRGKDDLLYQKLKTKYDKLVSI

SEQ ID NO: 1412 - protein, 571 aa, Bacillus sp.
  source 1..571: note = Related to LITP01000001.1
MKNKFKRLVDFEDVALLLEIPTEFLWKILIRDKQINYTSFPLGKKSGGFRTIYSPSKNLAILQAKLAYILSLNFTPHNRAHGFIEKRSIVTNASEHLKKSFVLNIDLENFFESISFARVRKMFISYFKLGETVATTLANICIHPGGFLPQGAATSPIVSNILAKSLDKELKQLSIESKGVKYTRYADDITFSTNKRVFPRSIASLNEDGQVELSERLMQIIKKNGFNVNGKKVRMQDSKKNQSVTGITVNEKLNISRTYIRRIRSILNCIEKNIDDLDRAREVFERKYPFRQRAKENYPEMFSVLRGMINHVGHVKGKSDPVYLKLANRFNDVSPEHKVIKSVDKQSSKRKMYEDYTYVIEQENPVVAFASEQRNEFEHVYHNQGTGFLLKGFGLVTNAHVLKDLVDAIELEMVILEPYYVRVFKSNDINVHMMRIECYDIEKDIAILRSNSVDHNTEGFNYNELIQKEQLIDLVGYPDYRRGQEIRVDNGFVRGIRMHTDSSDKTTAHKRYEITPTIYGGNSGGPIVNEKGEVIAVAVKGATMNGVVPNEVIPISEVIELAKRQLFSHSL

SEQ ID NO: 1413 - protein, 551 aa, Paenibacillus tritici
  source 1..551: note = Related to JABMKX010000008.1
MEIPTEFLWKILIRDKSNNYTSFPISKKSGGYRTIHSPSSNLAILQKKLAYVLSLQFNPHNRAHGFIEKRSIVTNASEHLKKSFVLNIDLENFFESISFARVRKMFASYFKLSGVVATTLANICSHPEGFLPQGAATSPIISNIIAKSLDKELKQLSVESKGVKYTRYADDITFSTNKKDFPRNIAFLNEDSHVVLSEKLLRIIENNGFNVNEQKIRLQDRQSNQSVTGIVVNEKLNVSRTYIRRIRSILNCIEKNNNDLDAAREIFIRRYPFRQRAKVNQPEMFSVLRGMINHVGHVKGKSDPVYLKLANRFNSVSPEQKVIKSVEKQINKRKMYEDYTFVIEQEKPVVALVSKESTEFEHVYHNQGTGFLLKGIGMVTNAHVLKDLVSAIELEMLIPIPYYVRGFNSKDFNVHMMRIECFDTEKDIVILRSKSLDHNKEGFSYSEAIQTDQLIELVGYPDYRRGQEIRVDNGFVRGIRMHINSGDKTVTHRRYEITPTIYGGNSGGPIVNEVSEVIAVAVKGATMNGVVPNEVIPISEVIGLAKRNSLI

SEQ ID NO: 1414 - protein, 582 aa, Paenibacillus sp.
  source 1..582: note = Related to NZ_FCOQ01000017.1
MKPVLLSTDEEIKNKFKNLTDFGDVALLFEIPTEFLWKILIRDKWINYVSFPLHKKNGGYRTIHSPSKNLAILQKKLAYILSLNFTPHNRAHGFIEKRSIITNASEHLKKAFVLNIDLENFFESISFARVRKMFISYFKLSEIVATTLANICTHPDGFLPQGAATSPIISNILAKTLDKELKQLSIESKGVKYTRYADDITFSTNKKLFPKSIAFLNEDGQIVLSERFMKIITKNGFNVNKKKIRLQDSEGNQSVTGITVNEKLNVSRNYIRRIRSILNCIEKNINDLDYAREVFERKYPFRQRANRIHPEMFSVLRGMVNHVGHVKGTSDPVYLKLASRFNNVSPEHKVIKSVEEQSNKRKLYEEYTFVIEQENPVVAFPFKGSMDFEYVYHNQGTGFLLKGIGLITNVHVLKDLVDAIELEMYIPQSYYVRVFNSIDFKEHMMKIECYDIEKDIAILRSSSLDHNAEGFSYNELIQKDQPIDLVGYPDYRMGQDIRVDNGFVRGIRMHNDSCDNTVKHKRYEITPTIYGGNSGGPVINVNSEVIAVAVKGATMNGVVPNEVIPISEVIELANRKLFVYSV

SEQ ID NO: 1415 - protein, 589 aa, Paenibacillus tarimensis
  source 1..589: note = Related to NZ_JAKGAO010000024.1
MIFISTLVRPLLQSSDDKIKSKFKTLTDFEDVALLLEIPVEFLWKILIRDKQINYKSFPLAKKNGGYRTIYSPSKNLTLLQKKLAYILSLNFTPHTRAYGFIEKRSIVTNASEHLKKNYVLNIDLENFFESISFARVRKMFISYFKFNDTVSTTLANICVHPDGILPQGAATSPIISNILAKSLDKELLRLSLESKGVKYTRYADDITFSTNKKTFPKAIALLNDDKQVILSDNLIQIIKSNGFNVNERKIRLQDREGNQSVTGITVNEKLNVSRTYIRRIRSILNCIEKNINDLDFARSIFERKYPFRQRVKGNYPDMFLVLRGMITHVGHVKGKRDPIYLKLASRFNRISPKKMIINSAEKQNNKRKAYEDYTYVIDQDDIKCVFDPKMDDMVDLYYGQGTGVLLKGIGVVTNTHVLGTIIDALDNGAKLPSSYRIRVFKHDSELACTITCYDPERDIAILTPDDIDCSAIGLEYNTSITKGQSIDLIGYPNYRQGQEIRVENGFVQGKRIHKGTKGEYIRHEISPTIYAGNSGGPVVNENAEVIAIAAKGATENGVVPNEVIPISEIIKLAQDNGLLNERMSSVQL

SEQ ID NO: 1416 - protein, 568 aa, Bacillus sp.
  source 1..568: note = Related to NZ_CP033906.1
MRTELLANEDKIKRNFQNLNTFNDIANLLEIPVEFLWKILIRDRAHSYRRFELRKKNGDPRIIYSPNTNLSILQKKFLYVLELNFNSHQRAHGFVKNRDIITNANEHINKRFVLNFDLENFFESINFRRVRHMFISYFKLNETVASTLANLCCHPDGFLPQGAATSPIISNILSKSMDKELTRIAINVRGCNYTRYADDITFSSNKRIFPTQIAIQHSDGNIEISEEVIKIINKYGFSIKESKTRMSDWKQHQSVTGIVVNSKLNVSRKYVRKVRSILHSAEKNIDNLDVAVELFNSKYNFRQKNNNTYPDMFSILRGKIAHIGNVKGKIDPVFLNLAKRYNQIAHLNEEPLIIIPPNDIQFYQENTFVMECNEFELYIDKNDETGEFIYGQGSGFLLKGIGLITNAHVVKEVIDLMKNEVKFINKYYVAIHRASPYDIIYKARIICYSIEKDLAILEVENLDIESIGYSANESIKKDMQINLVGFPSYREGNDIKSQSGYVEGIRMHEKINVRYEISATIYEGNSGGPVFNASNEVIGVATKGTTSNGVSPNEIIPISEVLKLAKEV

SEQ ID NO: 1417 - protein, 586 aa, Paenibacillus sp.
  source 1..586: note = Related to JACBYI010000030.1
MSGHVNVELKSSPTDIRLKFRKLNTFDDIAHLLEIPVQFLWKILVRDKLVNYRTFKLRKKNGDERTIYSPLSNLAILQKKLSYILSLNFTHHDRSHGFIENRSIVTNASEHLRKKYVLNLDLENFFESISFRRIRHMFISYYKFNDKVASTLANICSHPDGFLPQGAPTSPVVSNIIAKTLDKELKRVAIGAKWTQYTRYADDITFSTSKEQFPKEIATINESGIITLNENIIKIIEKNGFKVNDKKTRLQNHKQSQSVTGITVNEKLNIDRRYIRRIRSILSCIEKNINNLDEAHKIFEMKYPFRQRKRGSNPDMFLILRGMISHVGNVKGKQDSVYWKLANRFNKVTPHEPIKLQLSRREFHEDNTYVIDSDYTAKYYNHNENIFDEALYGQGTGFILRTIGLVTNAHVIEGIIEGLEQKFIFSKKYYIEAYKSTLYSFPENAKVLCYDIEKDIAILSVEGLEIHEKGYMYNESIKEEQQIELVGFPGYRKGQDIKIQKGFVQGVRMHLSKDGTKRYKRREISATIYGGNSGGPIVNTDNEVIGLAVKGATMNGVSPNEIVPISEVIELAKKHGIINEHVSISF

SEQ ID NO: 1418 - protein, 585 aa, Bacillus cereus
  source 1..585: note = Related to NZ_JAKUFL010000007.1
MELKSDVSVINKRFKKLQNFDDIALLLEIPVEFLWKILVRDKHTNYRVFKLRKKNGGERTIYSPASNLAILQKKLAYILSLEYKVHSRVHGFTKKRSIVTNAFEHLDKRYVLNFDLENFFESIEFRRVRKMFISYFGFNDKVAATLANICCHPNGFLPQGAATSPIVSNIIANGLDKELTRIAKNSKWCKYTRYADDITFSTNNKKFPQEIAHIVDENIVLGETILNVVEKHGFKINHEKTRLQNHKQNQTVTGITVNKISNVNRTYIRRIRSILNCIEKNKNDIVNAEKIFKMKYPYRQKREDNKPDMFHILKGMIAHVGNVKGKKDPLYLKLATRFNGVVELSDLTPFRLPITKKGFQENHTYVIDNPDFEMYFTEDGYEEVMYGQGTGFLLKDIGLVTNAHVIEDVIKTVEKKQGKFQKEFYISFFRAVDYHVKHWAKLLYYDTDMDIAILDVKDINISKTGYEYNEFIEKGQNVELVGFPNYREGQEIRIQEGTIQGVRINESRDRSRKYIRHEITTTIYGGNSGGPIVNENNEVIAVAVKGATLNGVSPNEVIPISDVIKLINQNKQPEEKSEASIEVVQ

SEQ ID NO: 1419 - protein, 591 aa, Bacillus cereus
  source 1..591: note = Related to PPFT01000033.1
MSNHTYVELKSDVSVINKRFKKLQNFEDIALLLEIPVEFLWKILVRDKHINYRAFKLRKKNGGERTIYSPASNLAILQKKLAHILSLQYKVHSRVHGFTKKRSIVTNAFEHLDKRYVLNFDLENFFESIEFRRVRKMFISYFGFNDKVAATLANICCHPNGFLPQGAATSPIVSNIIANGLDRELTRVAKNTKWCKYTRYADDITFSTNNKKFPHEIAHIVDGNIVLGETIINIVEKHGFKINHEKTRLQNHKQNQTVTGITVNKISNVNRTYIRKIRSILNCIEKNKDEVARAEKIFESKYQYRQSRKGDKPDMFRILKGMISHVGNVKGKKDPVYLKLANRFNEVVELGNSTPFKLPMTRRAFHENHTFIIDNEDFEMYLNKDGTGDVLSEQGTGFILKGIGLITNAHVLEDFIKVLETEEGRFVNEFYISFFRSVSTHVKHKAKILYYNTDMDIAVLSVKDMDISKIGYEYNEFIERDQKIELVGFPNYRDGQEIKIKEGTVEGIRIQRSKDGSKRYERYEISATIHGGNSGGPIVNENNEVVAVAVKGATMAGVSPNEVIPISDVIKLINQKKQPEEKSEASIEVVQ

SEQ ID NO: 1420 - protein, 587 aa, Bacillus amyloliquefaciens
  source 1..587: note = Related to NZ_CP082279.1
MVYKLNFELQSNLEDIKQNFKNLSCFEDVALLLEVPKELLWKVLIKNKGANYKAFKLKKKNGSERVIFSPTLSLSILQKKLAYILESNYKNHRQSYGFVKGRGIVDNAQKHLNKKYVLNFDIENFFESITFRRVRSMFMTYYKFNEKVATTLANICCHPNGFLPQGAATSPIISNIICNRIDKEFSKLAKNNRCQYTRYADDITFSTSRRVFPHDIAYIKEGSIFLNSNVISIVEYQGFKINKEKTRLQNYRQNQTVTGITVNEKLNVKRSYVRRIRSILHCIEKNVEDLQKAEQIFEEKYPFRQKKYLDNINMFAILKGMISHVGHVKGKDDPLYLKLAKRFNKISYLSETISPFKLESLKKFHETYTYIIDYDDKVPLVCFENDKMEEILYGQGTGFLLKGVGLITNAHVIEDAIEAIKDNKKFNNEYGISFFRGNYPDLKYKAKVSKYDLDKDIAILDIKGFNIDNQGYEYNIDMKDGQKIELIGYPDYKIGQEIKIETGHLKGIRKHRDSTGTFHSRREISAIIYGGNSGGPIINESNEVIGVAVKGATLHGVSPSEIIPIEDVINLNSSNSEVSSKIATKPH

SEQ ID NO: 1421 - protein, 583 aa, Bacillus altitudinis
  source 1..583: note = Related to CP018574.1
MVYKLNIRLQSNLEDIKQKFQNLSCFEDVALLLEVPKELLWKVLIKNKGNNYNAFKIKKKNGSERFIFSPTSNLSLLQKKLAYVLKCNYKNHNQSFGFVEGRGIVANAQKHLNKKYVLNFDLENFFESVTFRRVRSMFMTYYKFNEKVATILANICCHPNGFLPQGAATSPIISNIICNRLDKEFSQIAKKNRCQYTRYADDITFSTNKRQFPYDIAYVREGSLFLSTNIISIVESQGFKINKEKTRLQNFKQNQTVTGITVNEKLNVKRSYVRRIRSILHCIEKNSNNLHKAEQIFKEKFPFRQKKLFDFNNINMFAILKGMISHVGHVKGKDDAVYLNLAKRFNDTVYLDPTISPFRLESLEKFHKSYTYIIQDDEKVPLAHFEDGMEVIGYGQGTGFLLKGVGLVTNAHVIEDVIKAIEDGKKLNIEYGISFFKGNDPNIKYKAKVAKYDLDKDIAILDIKNFNIGEHGYEYNINMTTGQKIELIGYPDYSIGQEIKIESGYLKGIRKHGDSTGKFHTRHEISAIIYGGNSGGPIINESNEVIGVAVKGATLRGVAPSEIIPIEEIINLNSNLTDVSKRI

SEQ ID NO: 1422 - protein, 586 aa, Bacillus cereus
  source 1..586: note = Related to KB976282.1
MSKKMNVRLLSEEDVIKKNFKSLKDFADIANMLEIPTKILHQILVESKKNNYSTFVIKKKNGTDRTIHAPKKNLSIIQKKLSNILALVYNNHLNSHGFIKNRSIVTNAAQHLKQKYVLNFDLENYFETINFGRVRAMFIHYYGFNESVASTLANICCHHEGFLPQGAATSPIISNIISFKMDKELTKIAKKYHCTYTRYADDITFSTKKSVFPKEIAFIKDSSVQISHEVVKIVKGNGFFINKDKTRLNHQQERLSVTGITVNEKLNVERRYIRKIRSILHCIEKNSSDIEVAKSIFNEKYTFRQRRDEGNPDMFDVLRGMISYVGLVKGKEDEVFLKLAQRYNKCVDAMGVSVIKLPVERRRFQELNTFVIEQEYCYYKYDGVPDNSQCVVVGQGTGFLLKGIGLITNAHVIGKDYFDLWELSGVEFNGISINRSKYEKDKTYYAKLLCYDYIKDIAILDVDGIDIDKVGFEYNDSISTDEEIQLIGYPSYQKGIGLSVKDGKVLEQRYTIEDELSRSIRYEISATVFGGNSGGPVVNMNNEVIALAAKGSSEKGNVPNEVIPIKQVIDLAIKKKLIPSREEISV

SEQ ID NO: 1423 - protein, 577 aa, Metabacillus idriensis
  source 1..577: note = Related to WKKF01000013.1
MLNRMKPELVCEDDAIKRKFKNLENFEDVARMLEIPVKKLREIIVLSKKNNYITFKIKKKNGNDRTIHAPNKNLSILQKKFSYILSLVYNNHLSAHGFIKDRSIVSNATQHIKQRYVLNFDLEDYFENINFGRVRAMFIHYFGFNEAVASTLSNICCHHDGFLPQGAATSPAISNILSFKLDKDLTKLARKHHCIYSRYADDITFSTKKNQFPKDIAFIENSSVQLSNEVIKIVKGNGFFINENKTRLNNNKEHLSVTGITVNEKLNVERTYIRKIRSILHCIEKNIDDIEVAKTMFNEKYKFRQRKENKNPDMFDVLRGMISYVGQVKGKEDEVFLKLANRYNRAIEFFDLPLIKIPVPKKKFQEDNTYVIESLNYDYTFGGERHYSLVSQGTGFILKGIGLITNEHVLKEYIEMLELGVQYDSSENIVIHRSKYSHEKQYAKLLCYDKIKDIAILSIKGLDIKKVGFDYNVSIEPDQEIQLVGYPNFRENMDISIKNGVILGERYTDKTGFVSEKRFETSAHIYGGNSGGPVVNMANEVIAVAVKGATENGVVPNEVIPIKEVIDLAKKNKIITT

SEQ ID NO: 1424 - protein, 581 aa, Bacillus wiedmannii
  source 1..581: note = Related to NUBD01000031.1
MIKKMSPELLCEDAILKERFKSLNDFEGVAHLLEIPVKELRKVLVLNKKYNYTTFKIKKKNGNDRTIYAPQKNLSIIQKKFSYILSLVYNNHLNSHGFIKERSIVTNAEQHIKQKFILNIDLENFFESINFGRVRAMFIHYFKFNELVATTLANICCHYDGFLPQGAATSPIISNILSFKMDKELTKLAKKNHCIYSRYADDITFSTKKNQFPKDIAYIENSFIKINSELLKVIMGNGFFINKNKTRLNSHREKLSVTGITVNEKLNVERKYIRKIRSILHCIEKNINDIEVAKSIFNEKYRFRQRKEHGKPDMIDVLRGMISYVGQVKGKNDQVFLKLAKRYNLIVELIDMDLPIIKLPISKRKFQEDNTFVIESLYYPYFIDGESAGEAPIGQGTGFLLKGIGLITNAHVFKGEYTEMLEIGATFKKIEIHRSKYSSGKKHYASLLHYDKIKDIAILSVDGLDMAKMGFEYNEFIEPNMEIQLLGYPNFRDNMDISIKSGTVLGVRYTDTYRLNSEKRYEISAHIYGGNSGGPVVNENNEAVAVAVKGITDDGSVPSEVIPIKEVIELAKKKNIIPLKG

SEQ ID NO: 1425 - protein, 578 aa, Bacillus sp.
  source 1..578: note = Related to PCNZ01000039.1
MTYKLNVDLVQNPEIIKEKFKSLSNFNDVANILEIPSSFLRQILIVSKKSNYGTFTIKKKSGDDRKIHAPSKNLLIIQKKLTSILNLVYKNHNNSHGFVKDRSIITNANKHIRKQYVLNFDLEDFFNNINFGRVRAMFIYYFKFNETVATILANICCHYDGFLPQGAPTSPIISNILANKLDKDLTRLAKRHRCDYTRYADDISISTDKNKFPKAIAHTKDKKTYLSSEIISIVKNNGFFINDKKSRLNSKFENLSVTGLTVNEGLNVKRSYIRRVRSILNCIEQNLDNLDEAKRIFIEKYPFRQISYATEPDMFAILKGMIAHIGHIKGKTNSVYRKLAIRYNDIAEIENILSIKLPSTRRQFQETNTFVIESSFFYKSGDDEEFEPCGQGTGFLLKGIGLVTNAHLFDIYFKKSNDGYNITNFSIEVHQSKYSTNKKYAKLLWHDRIKDIAILQFTNGNLTDQGFDYNTSIKTGMEIELLGYPAHTLDNSIKIESGVVRQERNNPMPDRQKQTRFEISPLIYGGNSGGPVVNKENQVIAIATRGITSNGVVPSEVVPIGDVITLFEKHNPILTKNV

SEQ ID NO: 1426 - protein, 570 aa, Niallia circulans
  source 1..570: note = Related to NZ_NPBG01000156.1
MTTIYINLKSDDDVIKNRFRTLDTFEDIANLLEIKPKMLRDILVINKGKNYKSFVIKKKNGGERTIYSPEKNLSILQKKFLYILNLVYRNHENAHGFVRDKSIKTNATSHLGQNYILNFDLKDFFENINFGRVRSMFMSYFKFNTIIATTLANLCCHEDGFLPQGAATSPAIANILSYNLDKTFSKLAKKEKCVYTRYADDITFSTNREKFPKNIAFQKKGQVLLSSYVEKIIRENGFLINESKTRLHNKYQNLSVTGITVNQKLNVSRKYIRKIRSILHCIEKNISNLELAEKLFCEKYTFRQRKNSNTPNMFDVLKGMISHLGNVRGKSDDIYIKLATRYNILVNNIDKPEIKLPISAQKFQERNTFVVDSLYSKYSLYGAEDQVLNGQGTGFLLKNVGLITNAHVLYDNIDLLDDGAEYKTEYYIRVHQSKYSIDNKQYYAKIVYYDSFRDIAILSIKDINLNTEGYSYNEEINPNQSIKLIGYPQYIDGQDLRVLDGHIMNSRIHTDGTRTQKRYEISATIFGGNSGGPIVNANNEVIAVAAKGISDKGSVPFEVIPISDVIKIYN

SEQ ID NO: 1427 - protein, 590 aa, Bacillus tamaricis
  source 1..590: note = Related to NZ_JAHQCS010000163.1
MNVELTKPDTLLIYEFQNLHSFSDIANLLEIPIEVLWKNVVDKKKYHSLKIPKKQSDKFRIINKPSKNLNIIQKKFNYILSLVYKSSHSTSHGFEKHKSIRTNAICHLNRQLVLNLDLEEFFSSIIFPRVRAMFMTYFKFNNEVATTLANICCDNNNKLPQGAATSPIVSNIIAYKLDKQLSRLARTNGCIYSRYADDITLSTNNKKFRFEIFNGNDGVKEVGEKVKQIIQSNGFKINSSKTRICENSKAQYVTGVKVNSKLNVNRTYVRRIRSILHTIEKNLDNIEEAVKIFKEKYPYRATLFNNYDMFNIVRGMISHIGHIKGKQDAVFQKFVIRYNRIISEINTKEGTNYAFLYRPYTWTEFRQQNIYVIEEDEISYRLGSLNKKIISSQGSAFLLQGIGLVTNWHVVKCFIEGVINNELATFNSNYYIPVTKSRYSDKIWFAKIIMFDKGRDIAVLKIDGVDEKLYGFDYSLDIKENMECCLLGYPEYIRDQTLHEVEGKIQSQRISRYYPNDYVRYTTTMAIHGGNSGGPVVNKENNVIAIAVKGSNNTVAEVIPIGDLLESINQQQMIKIEQHNIVQTTEVSKS

SEQ ID NO: 1428 - protein, 575 aa, Planococcus kocurii
  source 1..575: note = Related to NZ_CP013661.2
MHVDLKSEDTAILNKFNSLQTFDDIADLLEIPPKKLWEAVIQNKTYSEFTIPKKNSSNFRVINKPSKNLDIIQKKMNYVLSLAYKSTSNVSHGFEKNKSIRTNAQVHLRKKLILNIDLANYFSSITFPRIRAMFLSYFRFNEVVATTLANICCDNNNELPQGAATSPIISNIITYKLDKDLVRLARKHRSNYTRYADDITFSTNRKEFQSDIFNMDEDFYDVGDKVIELISKNGFSINTSKTRIHDSSQPKYVTGVKVNTKLNLNKRYIRRIRSILHCIEKNINSLDEAITIFEAKYPFRKTKFKNRDMFNIVRGMISHLGHIKGKQDHVYQKLAIRYNLIISAVNGSSNENYPYIHRPLTHSEFREQNVYVIESDFVNYKFFESKKNIVTYQGSGFLLKEVGLVTNYHVVKEYIEILEEENTSFEEEYYIPLSKSRYSQDIWFAKIIMYDKARDLAVLHINIVDHFEHGFNYNQSITEGMDSVIIGYPEYKESSSLHIDQGKILGERIHYYNDKRFTRYSTRMPIHGGNSGGPIVNMKNEVIAVAVKGKDNSVTEVIPVSDLLKSIEAKEMCLV

SEQ ID NO: 1429 - protein, 581 aa, Sporosarcina sp.
  source 1..581: note = Related to PDYK01000012.1
MSFQGSPKLQDSDDNITKKYKSLNSFQDIAGLLEIPQELLWKTLMKNKENNYRTFTLKKKSGGDRIINAPTNNLSIIQKKLNYILSISYKKSHTNSHGFVLKKSIVTNASQHVAKKFVLNFDLDNFFGTITYARVRAMFMTYYKFNNSVASTLANICCNNDGVLPQGAATSPIISNIISRRIDEDLSRLAKKMNCTYSRYADDITISCDSNYFPSEIAYFEESITKIGSQVKSIISKNGFSINMKKNRLRSQYQNQSVTGITVNQKTNVDRQYIRKIRSILNCIEKNIDDISMAEKTFREKYSFRQSQIKKPKMFDVLRGMISYVGLVKGKDDQLFLKLAKRFNKVIKNQNLAFIRVPISKVELREENTFVIDSLYSIYSMDGEKSEACNGQGTGVLIRNMGLVTNAHVLYENIEVLEYGAEFEREYYIRIHKSKYGSQEYFAKIDYFDSFRDIAILTIKDFDTSKYGFEYNEEIEFNQIIELIGYPSYKDGQDLRVSSGVVMGERTHADRVRKQKRFEISAQIFGGNSGGPIVNSDNEVIAIAAKGSTEKGSVPNEVIPISDVINVFDNKTRKFYHLAHS

SEQ ID NO: 1430 - protein, 356 aa, Salicibibacter halophilus
  source 1..356: note = Related to CP035485.1
MAKGRVTTALLLMLPRRCEFMEIEIRNTDEDVKRNFENLINFKDVAHLLEISAETLYKILFINKHLNYKEFTLNRGKVRTIYSPKKNLMIIQRKLAYILSLLYSHHTKSHGYIKEKSIISNANEHVQQRYVLNFDLKDFFDSISFGRIRAMFMTYFKFNDKVSTTLANICCHPNGFLPQGAPTSPIISNIISYRLDKNLDSISRRYNCKYTRYVDDITISTSRIYFPKAIGHGQKGSDQAVVSEKIKSIVHKNGFKVNDKKTRLNSKYENLSVTGITVNETLNVKRSYVRYIRVILHSIEKGIEEDNLDKAQKKFNEQYNFRQRKKGNLPDMYSVIRGRSPMLDKLKGRKIMSIIS

SEQ ID NO: 1431 - protein, 575 aa, Listeria booriae
  source 1..575: note = Related to JAARUK010000009.1
MNEKVSEFKNINGFESIAEFLEIPKPELWLMLVKRKKFNYTQFKIPKKNGEFRIIHSPSEKLAESQKRLASVIGHLYASNHTTHGFVAGKSIKTNAQEHVRQSSLLNLDLADFFENISYGRVRAMFGEYFKFNYKDSSTLANLVCHPDGFLPQGAVTSPMISNIICYSLDKEINRLAKRNGCIYTRYADDLTISSKKIVFPRSIAHKNINEGVVLNRQLESIINKNGFSVNASKTRLNTKYECLSVTGVKVNDKLNVNRVFVRRVRSILNSIEKCEGDLISAQKIFDEKYHSRNQGSGNSPNMFEAVRGMIGHIGFIKGEEDLVFIKLADRYNSIINGTSRSGLIKVPLSIEKSRQTYTFVVESNDFIKYKYEEDDGYFICEGGSAFFLKGIGLVTNAHLFGELKDTLKYCENGLIDLVMDEEYYILTHRSRYNAKKMKFRLVAIDFMKDIAILQPENKDAYKYGFEYSCDLKKGDKVVVLGYPEYKANQELRSMVGEILGERSHELETKPAEYAARYEVSATIYSGNSGGPVVNEANEVIGIATKGTTERGQVPNEFVPIVEIVELHKAMITRE

SEQ ID NO: 1432 - protein, 446 aa, Enterococcus gallinarum
  source 1..446: note = Related to NZ_CABGOR010000004.1
MHLQELKSFTDIASSLDVTAGHLRRLLFEEKNNLYFEFEIPKKNGSLRKIYAPNDSLLFIQKRLSAILSSSVKLHDKAYGFINKRSIVDNAQLHIRKNVLLNIDLENFFPSISFGRVRSMFMNYFRLDKNVATTLTNICCHPGGFLPQGSPTSPVISNILCKTLDKDLDRLAKNSFGATYSRYADDITFSTKTSWEEIISSKVTLFQKLNDILFDQTIVLDIASSYNPSIHKYEERLLKKKYYSALQSIGFISKHELDTDLSVLHGDIGEFLMHHLVSNYISDNNSVKYLYPKLVLKSNPKMPAYGNDGTIYVPSKKEIFYLEAKFYTNLTKAINKAVDSLKEHNEVTQENIDHKTELFRNIKTKSNDEIIEITDDVNEKLVLFLICDNIFKEEDVLKCLKKNNGLIELKKSFEVIIFVLPILSKSEFLESFKKQSILRGNQYYVQ

SEQ ID NO: 1433 - protein, 546 aa, Enterococcus alishanensis
  source 1..546: note = Related to JAHUZB010000013.1
MKMRLQELKSFNDIASSLNVTTGHLRRLLFKEKNNLYFEFEIPKKNGTFRKIYAPNDSLLFIQKRLCKILNSSVKLHNKAYGFINERSIVDNAQLHLKKNVLLNIDLENFFPSISFGRVRSMFMNYFKLDKNVSTILANICCHPNGFLPQGSPTSPVISNILCKTLDKDLDRLAKNSFGATYSRYADDITFSTKKSFKENIVIEKNGEIILGSSLTDIIRRNGFKINPNKTRLQKAIQHQEVTGIIVNQKLNVDRRYIRKIRAMLYSIEENSNNLSIPLEKFAEAGYKGNDIENILRVIKGMINYVSMVKGKYDAVFEQLANRYNTILEELEIENLKPIFIPPKICLEESVCVIKETAITLFSDKENMITAYYGQGSGFLLKNHGIISNYHVFEYLIEDLSRGFSTIKNEFFVEVFFGKRTSKLVKAKIEKYNKDKDLVLLVPEDSSLLDFGFEKFEDVLEQNTEVYLLGYPDFADGDQMKFEKGHYLRTVNSKGIKKYEISQIIFGGNSGGPVLDRENRVIGVATEGKRISINRIIPIEYLHDLK

SEQ ID NO: 1434 - protein, 552 aa, Carnobacterium sp.
  source 1..552: note = Related to WVEQ01000007.1
MRIQEFESFKDIADALGIKSGHLRKLLFEERNNLYSDFEIPKKDGSLRKIYSPSKKLLFIQRRLLLILENSIKVHPQAYGFVKGKGTVSNASLHLRKNYLLNIDLKDFFPNITSGRVRSMFLNYFKLNNTVASTLTNLCCHPKGFLPQGAPTSPIISNILCKTLDRNLDRLAKNSFGSSYSRYADDISFSSNRPFKENIVSEQNGNVILGSSLLDIISSNGFKINLDKVRLQKNHQHQEVTGIVVNDRLNLDRRYIRRVRAMLHSIEVNIDDLSIPTKKFEESNYKGNTFDNLLMVIKGMIDYIGMVRGKADNIYEKLAVKFNYILELLELDNIKPLFITEKIENNVCVIKFKKIFLFKTDFSEMVELDYGQGSGFLLKSYGIVTNYHVVEGLIESGFLNGFPKSTNEFYIETFFGKHSSKIVKAKINKYSKEKDLVLLIPEDLSLLDKGLDISTDALNLNEEIRLLGYPEFYEGDELKNELGNYLRTVVDNVEGNSIKKYELNTMIFAGNSGGPVINSDGKVIGVATEGRKIETNRAVPIDYIKTLQSLDI

SEQ ID NO: 1435 - protein, 542 aa, Macrococcus canis
  source 1..542: note = Related to NZ_CP047363.1
MKIQNINSFTELSFVLGYKSGHLRRILFNINSSSYTSFEIPKKNGEVRKIYSPQSQLLILQKKVAAILENSFNPHYKSFGFIKGKSIEKNAKLHLKRKYLINIDLKNFFESITAGRVYSMFVNYFKLDRNIAAILTNICCHPEGFLPQGAPTSPIITNILCKTLDKELNNLSKKYSVTYSRYADDITFSSNKAFNSCFLTREESLSDDIKRIIEQNGFFINDNKFRYSKFNQRKEVTGIIVNEKLNVDRRYIRKIRAMLYSIENNLDNLEVPRTKFDKSHYKGDSIENLLNVIKGMISYTTMVKGNNNISTKLAMRFNDILECLEIDSVKPIKVKPLDINEEKVCVIKLENVFFYSKNGEPYDIDYGQGTGFILKNVGIVSNYHVFEFIIEEIEKEKKPLCEDKYFINLYFGINCTKKVKAKVLKYDIDKDLVILQPKDLNILEMGFELEEGTIENNSKVTLLGYPSYNEGDRIKEEQGKLLRKINDIKGFEKYEISSVIHAGNSGGPVLNNKGKVLGVATEGRGNDINKVVPITNVLSMLK

SEQ ID NO: 1436 - protein, 560 aa, Bavariicoccus seileri
  source 1..560: note = Related to NZ_ATXL01000020.1
MRIQDISTFDQIAKALGISTGYLRRLLFEERDNFYTEIEIPKKNGDSRKIFVPSDELLQLQKKLNTILISSFNPSSRAFGFVQGRSTVQNASLHLKKKYILNIDLLDFFPSISSGRVRSMFINYFKLSSIVASTLTNLCCHPDGFLPQGAPTSPTISNILCKTLDKELINLARKLGKITYSRYADDITFSTNSTFSRKLVRRNNGEICLGNELIEIVEKNGFEINSSKTRLQNNNQHQEVTGIKVNRKLNIDRRFIRKIRAMLFSIESNLDDLSIPATKFAESDYKGDSIGRLMKVIKGMISYVGMVRGKNDALFIGLAKRFNKLLLVVDQFKDEKPIVIDSGLSQLPNLVCVVPQTNIQLWKKDNEMNIFSEIDYGQGTGFLIKGIGIVSNYHVFEFVIDSIKDGFLPRETEYFVNLRFGASQSKKISAKISFFSEELDLVILIPEDQIILNNGFERELREPEQNETITLLGYPDFSEGDQLKMERGDYLRTTFSKKVEMYEISPIIFAGNSGGPIINKSDKVIGIATEGRRIALNRAIPIKYVDEEKLTTLTYTLFKF

SEQ ID NO: 1437 - protein, 588 aa, Clostridium botulinum
  source 1..588: note = Related to CP027781.1
MAGKVELPFCFGGFLLLLKELKSFSDIAEALSVSSGNLRNIIFEYKKNSYEKFDIPKKSGGIRTIYKPNSQLAAIQHELCDILYNSYKPHYNAHGFIKDKSILTNAENHVGKKYILNLDLENFFESVKFPRVRGMFINYFGLKENVATILANICCHPEGFLPQGAATSPVITNILLKTLDKELTRLAKESNWAKYSRYADDITFSSNKKFIKNIVEEIDGQIVLGKELVWLIQKNGFKVNEKKTRLQTKYDHQEVTGIVVNKKLNVDRRYIRRIRAMLHSIDMNKNDLKIPKDRFKKKYFPRNCNCSGDLFLTLKGMITHVGHVKGIYNLVYKNLAMKFNRLLLECRLPYPAPINILEKSDVYYDNVFVIDSSKDIFFIDNNGDMESYDYGQGTGFYLKGYGIITNYHVLEYVLDEINSGKKPISSSGNQYFIEFFSGRDPSTIMKAKYLYGSKEKDIVVLEPSDSSLIGQGFDIFKSKIIPQNMELNLLGYPDYNKNDDLKIESGKFLRKIVPDGNSRIEITQTIFGGNSGGPVLNSDNEVIGIAVRGDGKYPNTAIPIYEVENLHASHIESLPNSSVKDNNLSMQR

SEQ ID NO: 1438 - protein, 575 aa, Lysinibacillus halotolerans
  source 1..575: note = Related to NZ_RHLQ01000054.1
MSLIFHISDIKNYQDLADYLEVTTGYLSKVINDPNRYQCFEIPKKDNSLRSIYSPTKDLLVIQLKIKKLIEQNFNPHYKAHGFINGKDFITNAYNHIGKNFVLNLDLNNFFESISIKRVNNMFQRYFKVRPNISTVLAHICCHPDGFLPQGAPTSPIISNVICKSLDKDLTELAKSLKLTYYSRYADDITFSCKKKDFPKILAEDINGNIVLSNHLTNLIEKHGFKVNLNKTRLQSKYMHQEVTGITVNKKINLNRRYIKRIRAILYSFKKYVDEPDIPIGKFCEFYNITNNNIEETKYRIFNILKGHIIHISHVKGYNDSNFLDFMRKFNELLELYSLSIPAIKVLDSSNNFFKRNTLVIYPLNSLDDPQYFVDRDFIKNGNFEIDSVCYGQGSGFYLKDIGIVTNYHVVSLIIEEVLEKKLTFCKEYYLEYFTESNGKQYKYHAKIIAYDKEKDIAILKPKYPDLVDSGFKYNKRFNINDSITLLGFPNHTTGSEFRSDKGKIIRKIKNKNISTYEIDAKIFAGNSGGPVLNYKNEVIGIATKGFTDRGIVPPEFIPIKYAIEVYKNHTDKKL

SEQ ID NO: 1439 - protein, 565 aa, Exiguobacterium sp.
  source 1..565: note = Related to NZ_ATCL01000009.1
MNNPFSNLTVKLKKSDDELINAFGSLSTFEDVASILEVSSHALWIILVKNKPYNYREASIPKKDGGERKVYIPNNNLFILQQKLKYVLELIYSPHFTSHGFVNDRSIISNAERHVNKKFVINIDLKDFFPTIKYNRIVNMFVKVFRCSPNIANTLANIVTHHEGFLPQGSPISPLISNVIARTMDDQLFKLCKEIKEVQYTRYADDLTFSTNRKKIPNSIVKNSNNSYELSDKLINIIENNGFEINYKKFRVQSEYDHQSVTGIKVNKKLNINKSYIRMVRVYLYIFEKNEDINQAIKEFNLRRPKKSNLKHRLIKNEFQNQIFHLKVLKGMIEFIGSVRGRRDRIFNKFSKRFNTICETAGLNNIQINIPLLLEEVIDNKILVVGNNDQYFYTLDQGINTKEISLSKSLAVSNNERGIISTKANWTTFRDDFEGTHYYDFHTIPLYRKNTTDVLSYLKINRVAENDLIYFEGPEELTKNLQEINTEIESLKIGNVILVGLHNNTIEIFEGILTKRILFGESKFIFKPISNENLPISFGFVFNQVGNLVGTLSRGNSELYVNSIK

SEQ ID NO: 1440 - protein, 566 aa, Listeria seeligeri
  source 1..566: note = Related to JACTIL010000004.1
MADKFTLLEEIDDVLNFKFRNLNNFKEIADMLEVSSEFLHSILYKKRSYETFFIQKKSGGYREIKTPNNNLKLIQKKLAYILSLNYKMHKSAFGFIKNKSIIDNANLHINKKWVFNFDLEDFFHQFNQGRVIGLLRKYYKFNNTVAGILAEICCYENTLPQGAPTSPILSNILAFELDREFQKECKKYHCTYSRYVDDISISTNKSHFPKNLAYKNSQEEIILGEIAQTILDKTSFKVNPKKVYLRHETQHQNVTGLVVNEGVNVSRTYIKRIRATLHNLRVSNEEDGKNKFFLELSKHSSSRSQQFDMYAILKGKIQFVGQVKGKENQVFRKLATSFNQLDLPASVKPISILSSTEKKRCQNTYIVEVGYEIGEELFYYTGTAFYMKGVGIVSAAHTFKNYYDCKEYADSHHLYLINENKLTEKINITKKYIDYELDIAIFDIDTQLNTDDWGFEYSNSIIEGQSCVLLGYPRHIDGNTLNTEFGKITQKINQKCPNRFNKKTGTLGVEQTRFKISSDIYSGNSGGPILNDDDRVIAIAVKGYGDNAVEVNTVVPISDIFTYMLP

SEQ ID NO: 1441 - protein, 565 aa, Listeria monocytogenes
  source 1..565: note = Related to CP030808.1
MTEKFTLLKEIDDVLIFKFRNLNNFKEIADMLEISPEFLHSILYQKKSYETFFIQKKSGGSREIKSPNNNLKIIQKKLAYILSLNYKMHKSSFGFIKNKSIIDNAKQHTNKTWVFNFDLKDYFHQFNQGRVIGFFRKYYKFNNVVAGVLTEICCYENTLPQGAPTSPILSNILSFELDREFQKECKKSNCTYSRYVDDVSISTNKFYFPKKIAYKDAQEEITLGEISKKILDKTGFEVNQSKVCLRHKTQHQYVTGLVVNEGVNVSRKYIKRIRAALNNLRTNNETNGKEKFFIELSKHSRNSSQQFDMYSILKGQIHFVGQVKGKDNQVFRKLATSFNQLDLPVSIKPISILSSTEKKRCQNTYIVEVGYENDEGIQCFTGSAFYMKGVGIVSAAHTFRDYYRCIKEAVNPYLYLINENKPTEKIEITKKHIDYDLDIAIFDIDSSEDTANWGFEYSNSIFEGQSCVLLGYPKHTDGNNLNTEVGRITQKLKQKHPNKFNKKMSDLGVEQTRYKISSDIYAGNSGGPVLNNDERVIAIAVKGFGDNGTEVNTVVPVSDIFSYMI

SEQ ID NO: 1442 - protein, 578 aa, Listeria booriae
  source 1..578: note = Related to JAARWF010000001.1
MDNKSILLNAIDDVLIFKFRNLNNFKEIADMLEISPQFLHSILYKRKSYNVFQIQKKNGGTREIKSPDNNLKIVQKKLAYIISLNYKMHRSSFGFIKKKSIVDNAKPHTNKKWVFNFDLKDFFNQFNQGRVIGLFKKYYKFNDSVAGVLAEICCHENVLPQGAPTSPILSNILSFELDREFQHKCKKYNCIYSRYVDDITISTNKAYFPKKIARRDAEGEIVLGSVSQEIVDKADFQVNQSKVYLRHSSQNQHVTGLTVNEGVNVSRKYIKKIRATIHNLKVNNEKVAEEKFFKEYLKGPIPKKTDLNMYSILKGRIQFVGQVKGKENSLFRKLAKEFNDLKLPKQVNPISILTALEKNRRRYCFIVEVGHILGEDIYHYTGSAFYLKGIGLVSAAHTFKEYYENKEYADKHYMYVVNENKPDEKIPIVKKHIDYALDIAIFEMPTKLRDNNEGFLYSTTVNVGQKCVLLGYPKHFVGNTLNTEFGQINQELKVRLPDKYNSVTGELGVIQKRYKISAVIYAGNSGGPIIDEREKVIGIAVKGHGENGVEVNTVVPISDIFTYIQDYSLEHRTSLSSK

SEQ ID NO: 1443 - protein, 564 aa, Listeria sp.
  source 1..564: note = Related to NZ_FYBO01000001.1
MQQIQLKEIDEVLVLKFRNLNNFKEVADLLEISPQFLRDILYEKRKYSHFYISKKNGGEREIFSPVNNLKIIQKKLAYIFTLDYTPFKSSFGFVKKKSIIDNAALHTNKKWVFNFDLKDFFHQFNQGRVIGLFRRYFNFNNVVAGVLAEICCHQNILPQGAPTSPILSNMLCFEVDRELQKLCSSKQCTYSRYVDDITISSSKDYFPRLFAFKDGEGRMRLGRLLEEILRKTGFDVNQEKIYLRTPNQNQNVTGLTVNEIVNVNRNYVKRIRASIHNLKVNTEEAAREKFFIEYTKRKAHINPNANVYSILKGQIQFVAQVKGRENPVFKKLASQFNSLNLPSNINPISPLTRVEKFRRRNCFIVEISFEREGEFFCNTGSAFYLKKIGLVSAAHIFKDYFEHYDSAVKREIYIVNEVDRKHKIKINKKYIDYDLDIAIFNLDTTIDTMNWGFNRSDTIYENQKCILLGYPEDCNGNTLNTEFGKITQVISNSFPNKFNSIEQELGLTQIRYKISATIYGGNSGGPILDIHENVIGIAAKGTSDNGITINTFVPISDIKFLMNS

SEQ ID NO: 1444 - protein, 561 aa, Carnobacterium sp.
  source 1..561: note = Related to ABHH01000013.1
MTKRIDQLKTEDSNLISNFRKLNSFYDIASLLEVTPKFLYYILNVEKSYTPFKIPKKNGDMRTIMAPSKNLKIIQKKLSYILTKSSSLNKSAHGFVQGKSIITNAAMHVNKKWVLNFDLKNYFDQFNQGKLIGFFKSYYKFNDEVIGILVSICCHNNILPQGAPTSPILTNILTYNFDKQMSQLCRKNNYIYTRYVDDITISTDKYEFQKRFVYYNENNDVQIGNAINKILEKTNFEINTKKTRLRINYQNQTVTGITVNRKLNVSRKYIRKTRAILHNLKVNNDNVAQKKFDEYYPVRHYRDYKASDKYNVVKGMIEHVAQVKGRDDRIFKKLALSFNDLNLPEHVYELNLYSPFEKNLRKNCFVVEIEYSLYGDFYPATASAFLLKGVGVITSAHTFKQYLEYKDEVEDIKIWAFRENETTLKRPLDIKNFDFTLDFAICHVAGINHTEYGFEFSKHISLGEDITLLGFPQYQHKNLLNKEHGVITQEINEYFQEKLNPKTQSPGYNQKRYGISSQIFEGNSGGPVLNSDYKVIGIATKGITSDAVKVNTIVPISDIFQ

SEQ ID NO: 1445 - protein, 581 aa, Brevibacillus parabrevis
  source 1..581: note = Related to NZ_RHHV01000019.1
MSYFRAKPTLQASDAKLVSSLKSLQNFDDVASLLEVTPKHLRYILFEKKVSGYYKCFDIPKKSGGSRKIWAPQGSLKILQEKLNKIFSLTYKPNITSHGFVKDRGIVSNATVHLRKRHVLNFDIEDFFHRINFGRVRGVLKSFFGMSWDAATVIANICCYNNVLPQGAPTSPIISNMICFNMDMEMRKLAKKHNCHYTRYADDLTFSTTRQTFPSAIAHLDEERVVYLGSKIQKILDNNDFAVKKSKTRLNNRDQNLSVTGITVNKITNVERNYIKKVRAILKCLESHPLSEAQKIFESKYYSKPGKKNAEIMNVVKGMISHIGYVKGKQDPIYEKLARRYNRLAGIETLKVGEAFLKDWSQNVFVIEVGYDNSGVFDPQQQGTGFFLKDVGFVTNHHVVKEYIDDPDIYEIRVHRSRYNKKCFQAKVKMYCKERDIAILEIDGFNITGFDYDLINYDGQSIKVIGYPRYGHEDSLFVDQGTIVQYRSEFMRTIYNKKTQELGLYQERIICSARIIYGNSGGPVINTRGQVIGIATKGFSNVSKKEEDDDSSAASYLVKIGDVFDMIGEKEESVPSPVSAI

SEQ ID NO: 1446 - protein, 578 aa, Paenibacillus xylanexedens
  source 1..578: note = Related to NZ_VDZO01000006.1
MSHFMAKSQLKASNEKLLESFRTLQSFDDVADILEVSPKHLHYILFKKPKSQYYRSFAIPKKNGGYREITAPTRSLKILQEKLNRIFSLVYKPNITAHGFIKGRGIVTNATVHVRKKHVLNLDLEDFFSTINFGRVRGILKSFFKIGDDAATVIANICCYNNVLPQGAPTSPILSNMICFKLDKEMRNIAKLYNCDYTRYADDITFSTNHQTFPKEIALFREENIVHLGIKVENIIESNGFKTNNSKTRLNNRNQKLAVTGLTVNKIVNVNRGYVRKTRSILRCIEKYSLEKAQEIYVEKFAKNHKGVKIINVVQGMITHIGHIKGKQDQVYEKLARRYNRIRGEEVLKIGDTFLSQNICVIEVGYYDDEQNFMPEVQGTGFFLRGVGLITNRHVIKEHLELPEIYSIKIHRSKYDYTYYNAVVRMSDEERDIAILDVIGIAPEGFEYDNDNYTGQNIKLIGYPDYGHKDSLYMDQGVITQYRKQWMPNVYNLDTEELGVFQERIVCSVRIVIGNSGGPVVNLNGQVIGIATKGFKKIDKSEKDDTSTEASHLVKIEDVFELLAEQEQKLLTNTLENV

SEQ ID NO: 1447 - protein, 579 aa, Paenibacillus lautus
  source 1..579: note = Related to NZ_BOSB01000004.1
MNYFNAKPELMANDQSLISSFKSLQSFRDVCNLLEVTPTHLRYILFEKTPSQYYTFFTISKKSGGIREIIAPNGALKILQEKLNKIFKLAYKPNASIHGFTIDRSIVTNARMHLGKNHLLNFDLADFFPSINFGRVRGVLISFFGMGSEAATVIANICCYKNSLPQGAPTSPILSNMVCFNLDKQLQLVARKNGCTYTRYADDITFSTTKHLFPKSIAFVENEIVYIGPKILKILEDNSFKVNHLKTRLNNRLQHLGVTGITVNKILNVKRDYIKKIRAILRCLEINSLEQAQFIFETKYTKIRNKAPNSEYPSILNVVKGMIDYVGAVKGTQDPIYEKLAFRYNQICKLPVFKIGEENTESWNKKVWVVELCIEAEDDGKIEYIPVIQGTGFFLNDIGFVTNAHVVRDYREYDIIRISRSRYGSEVKKASVIKLDRDRDIAILKIDDFEDWSGFNHSFVHYIGMDVKVIGYPNFGGNDSLYVHKGEILQYRVEHFPDKYNKATDSLGMNQHRTVISARIIAGNSGGPVVNMQGEVVGVATKGFKEISPGKHDDDTATSIMIKIEDVISFANEMEPTKA

SEQ ID NO: 1448 - protein, 575 aa, Bacillus siamensis
  source 1..575: note = Related to LYUE01000007.1
MSYFDAKIELQATDEELIHSFKDLENYRDVCSLLEVTPKHLHYILYKKKNLYYQFDIPKKNGGTREIYAPCDSLKILQQKLNYIMSLIYKPKYTIHGFVKSRGIVSNAKQHLGKSYILNFDLYDFFPSINFGRVRGILRSYFGLGDHAATIIANICCFNNSLPQGAPTSPILSNIVCFNLDKELQFIAKQHSCIYTRYADDITFSTTKKDFPKSVAFKTDSQIFLGKKILKVIEKNSFKVNENKTRLHNRYQNLSVTGITVNEKLNVPRNYIKRIRAMLRCIETNTPEDAQVIFLEKYKFRYRANMEPPNIMNVLHGMINYVGFVRGLDDEIFKKLALRYNLIVGNDKIKVKKDNLALWESYVWVVEVGYKDDDDFYAEEQGTGFFLKNVGFVTNAHVIEKYDGESINAIYLNRSRYSEEQKLASIITIDKDRDIAILYVEGFDIDYGFSYNIHHNLGQEIILLGYPNHGDGNSLYINKGQLVQYRSHYMPNTLNKETGKLGVKQERVTISSRIVTGNSGGPVINLQNEVIGIATKGFKDISPNLKDDSTAESMIVKIKDVLSVLSQMSKLHREN

SEQ ID NO: 1449 - protein, 580 aa, Priestia megaterium
  source 1..580: note = Related to NZ_VDST01000009.1
MSYFDANIELQAKDEDLIVAFKKLKDFRDVCDILEVTPTHLHYILYKKGPSKLYHPFNIPKKGGGTRQILAPNDSLRILQQKLNYIMSLIYKPKFAIHGYVKGRSIVSNAKQHLNKNYILNFDIEDFFPSINFGRVRGVLKSFFGIGKDAATIIANICCYNNLLPQGAPTSPILSNMICFQLDKEMQLIAKQHSCVYTRYADDLTFSTTKKSFPKAIAYHGDDCVHLGKRILATIESNGFKINNNKTRLHSKYQHLGVTGVTVNEKLNVKRDYIKKIRAILRCLEINSLDEAQKIFEDKYIRRHTKEVNFPNIMNVVRGMINYVRLVKGPEDSIFEKLARRYNKIAGVEVFTVGIQHSRFWTSYVCVVEVGCKDEDEFYADDQGTGFFLQGIGFVTNAHVVKKFNGIEFNAIYINKSRYDQTKIAASILTMDEERDLAILKIDGFESNIGFSYSTNYYGGQPITLLGYPNHGGTDSLYTENGEIKQYRPHYMPNKYDEKTGKLGVHQERIVISPRIVTGNSGGPVVNSQNQVIGVATKGFNEISPGSKDEPTADSIIVKIEDVLALHTEMRSDETPIANQ

SEQ ID NO: 1450 - protein, 581 aa, Salibacterium aidingense
  source 1..581: note = Related to NZ_AUCI01000050.1
MNTNFKANLQIKSSVEDIQKKFKNLSSFDDVSDLLEISPKHLRYILFEMKDRYKSFEIPKKNGETRSIVAPSKSIKILQRKLNYILSLNYSNRPTSHGFIKGKSIVTNAQPHVKQSVVLNFDLKDFFSTINFGRVRGVFIKFFDIGDDAATVLANICCKDNVLPQGAPTSPIISNIVCYKLDKELLKFAKKHSCVYTRYADDITLSTNKKHFPNEMIQLNKQTYTLSKSLFNKIENNGFKINDNKTRIRYCSQRMEVTGLTVNEKPNVTRHYIRNIRAIIRSIEKYGLEVAQEIHEGKYIKIHLKSTPQITNLLIGKLNYVKMVRGIEDSVFNKLAKRFNKAMGDELVETYKSKRELRELHTYVVDCGFIVDGEFINESQGSGFFLKGVGFVTNAHVVKLYKENNSNELPYEIRIHRSRYSDTVLKAILTIYNRDLDIAILNVEGFNSDYGYSYNLDNEYGQEIRVMGYPNHNKRDSLATDSGEIKQYRDNYLKETVNQETGELGDFQERFVVSARIVDGNSGGPVINNDDEVIGIATKGFRTLTDSGYDEDTDTSIAVKIEDVIKLIESKDQKDLNYQHY

SEQ ID NO: 1451 - protein, 487 aa, unidentified
  source 1..487: note = Related to JACPFP010000003.1; note = Candidatus Dojkabacteria bacterium
MDESQITNICTFDELANALEIEPSKLRYILWGKKPPSYYSRFTIPKANGTKRQISAPQGPIKVLQYRLLRILNAYYSPKRVVHGFTKGRSIVSNANSHINKNWVVNIDIKDFFPSINFGRVRGLFLKSFPGMTKESATAIAQLTSVFNSLPQGAPTSPIISNMICSRLDRDLMDFARQDNIKYSRYADDITLSGDGAVRSSIGEYSNGLLVLSSKCIKIFNDNGFQINSDKVRVSFKYRRQEVTGLVVNSKINVSRKYIRNLRALLHNIETLGLSEAQELYTEKYHGRGSLQSYIHGKLLFLRMVRGSSDNLYDRLVNSFNLNIADRPGNDSNTHLPTRAEIKAILSRLDPSYGNRYHRIWRELYDETDSTGENLKTALYLMREVIGGLIRRFAKNESVENYLNLSPNLRITRLQRCKYLSEKSLATGEERLAKLFMYIPGYYNDLNKLHSLEIVDKVDVKVLVDKVNELIIEVVKSIEMLELFRLS

SEQ ID NO: 1452 - protein, 552 aa, Acidithiobacillus sp.
  source 1..552: note = Related to JABBOU010000010.1
MSFVRNRVNSNRNRSETIKEFCDNIGVSKEGFLLYNKENEKEYKVFDLIKKNGSLRKVKAPSAGLAGLQRKISKILQTIYNQPNCVHGYVPDRSVVSNAQCHVNKRYILSIDINDFFGSITRNRILGLFRSIFSDQNLCEALTNICVVDGCLPTGSPASPVLSNMIMFKMDRKIMSICKNNHVFYTRYSDDLTFSTKTKSFPSEFVYLDACGSLTLGKSIVAIFKENGFSINLKKTKLRSRSNRQVVTGVVVNKITNIPSSYMSNLRAIKNSISKHGVDGAQKIFDENYKETRYKNRVNIGHHISIKDMVRGKIEYIGMVRGKQDALYRKNLDWYNKNFRSLGDPEECVYPIYFIIDMPEKSKQKDHRIKNDCGQGTCFFLEDVGILTADHFLPSVEDVEAAGDHLRLYFETKDGCKHNVKIENRYPKIDMAVLSLEDNLFRSKKLYVNTDFSHSDRLTVSLYGFPDCAVGESLQVRDSVITGTRNRADEKEIIIRDGIKAGMSGGPVTDQANRVVGVIHKGGIDESGKCYYKPINDLYHIIKPMHSSNRSR

SEQ ID NO: 1453 - protein, 568 aa, unidentified
  source 1..568: note = Related to LCCS01000006.1; note = Parcubacteria group bacterium GW2011_GWD2_42_14
MVLNKNFPVDIPEDIRDCRNITDLAKLLNINLKALFFFAYKKERLYLSFNIKKKNGGARNISAPIEALKNTTKKINSYLSVVYEEYKPKSVHGFVYDRDVVTNAGNHLDRKYILNIDLLNFFETITAQRIYGLFKRYPFIFGNKFASILTGIVTYNNCLPQGSPCSPVLSNMVCLKMDKQLINLANENGWRYTRYADDITFSANKISSNLANFASDGINVGEKIVNIINKNGFAINEKKTRLSSHNQSKWVTGIKVNKKCNVSRKYVRNVRAMLHVWEAYDEKLAEKTYNAKYNFGKNKKFRSVVNGKIEHIGHVKTKKDLIYIKLHNRYCELVGESHKRLPETKKDEYLNKVLMIQGQSGYGSGFFITQHLILTCAHVVKGSKKVKFTTRLNKLPVEFKEASVIDINIEKDYAILFSEKKFNEFVFKCNLNKGLNMYSHNDAYISVGYAGFRTDGNFWVEPSIADQKIVQTNQRKNVNSFDVSGAMWKGMSGGPIILEHTDYVEGYIVNGASSLDTSEDVKSHSFYPISNIPKKYYEPKFLTLLIDEMYGSRFTETKEVGMPDQFFT

SEQ ID NO: 1454 - protein, 527 aa, unidentified
  source 1..527: note = Related to NZ_CP037755.1; note = Proposed Pseudocnuella soli
MNLPEAAYHFFEMSLFAKDDKSLLEAFYSAKNYIDLADVFEITPKQFKFHVFMVPGDKKYVQFTLQKKSGGVRNIYAPNGNLKFIQNKLSYILYKIYKPTFSAKGFVLNESIVSNARLHSGKKAILNIDIKDFFESINFGRVYGLFKSKPFSFNTEIAAELANICCFDNKLPQGAPTSPIVTNMICVGLDKNLQSLAKKYNLIYSRYADDITFSTDFKFLPQAIALGKLNVVEVGETVKSILIKHGFKINDKKSRIYYHFNRQVVTGLIVNKQVNVSRNYIRNLRGIIHSIEKFGLPAAEIEFQRKYDKQRLPGKSVPPFTFYLKGKLSFLAQVKGTESSVYISIVKKLRSLIPGEFEKTLTKLEELRKDFDDLNKLVYKGASITARQRGFEFEKFLAELFSFFKIDVTESFKRVGDEQIDAAINFDSWHYLIECKWKSTQCDTRDVDSLTMKLSRSGSQTGGLFISINGWSANVVENLSRNPIKNTILINGDDIKDILVEKVALDQLLKFKLQRLNLYSEPYARWE

SEQ ID NO: 1455 - protein, 466 aa, unidentified
  source 1..466: note = Related to JAIOIR010000177.1; note = Melioribacteraceae bacterium
MLSITNNTMEVVTDTFNKKYSKYFRNIDESTISEEQFSNRLKSSWKSSSWVNDNESFFANYLVNDDFLLQIIKNSTLPDFQKHLALEEFKRRWQQYEIAKEKFLQIVSGRDLAVFFELKYQSFLSTIGLLKFNNQKKYSEFTIPKKSGGARIINSPNQQLLHLQRKLNFILNLFYDPPKAAHGFINKIINKEKVSSRGIVSNAKSHSGRKLILNFDLEDFFPSITGNRIFSFFRASPFNFNKEVAGLLTEICCDPNIKGLPQGAATSPILSNMIARRLDIKLIHLASKHKLIYTRYADDITFSSNKLDVPSDFLDEFYSVITSEKFKINREKTRQHRYSQKQIVTGLIVNKKANVSRKYIRNVRAILHNIENYGYDKCEEVLNEKYAKSKKGMISLENYLRGRIEFIGNVRGKNKEQDKNDIYNKLKNRFENLVVGPSFEPSPIIENETSNRNSKTLSERMKEIDK

SEQ ID NO: 1456 - protein, 577 aa, Arcobacter sp.
  source 1..577: note = Related to NVXJ01000024.1
MKIIRFLLNILEEFYLLHTRNFEYALWNIREYGYRTKKITKKNGTARELNIPPSFVKTMQKKINELLQEQYIAPKPVHGFIKADENNKKSIISNANMHTKKYIVINLDIKDFFDSINFGRVRGLFLSKPFEINEKIATRLAQLVINDNKLPQGAPTSPILSNFICKQMDHNLIKVAKKFSLTYSRYADDITFSSHKKNLNLKYIIKEITEVVKNNGFTVNTKKTRFQMAHHTQIVTGLKVNQKVNINTKYKKQIRSMLYSWFTDGLTKATQLHFKEYNKQKRKYLPEKEKSFKNIVIGKINFLGLVCGTDNPLYQKYRHTYFLLSDKFILTRKLDEYEELDINDIKRRKALSIFIQIYNSILIFTEGETDILYIKSALQSFQKKGMYLDLNLRFCNLRGWVNVKNIHEIFYKNTNKSNDLTLINRRKCVSPFIPKSFKLCFILDADDDGIRKYFKHQKHKNYHLIDEANQGYIEKFIDKNIIIDIIKNSGYSIDPTKAGTTKQKLIDHLKDNKEKDEIFSIDNYIVYKLLLIKKTELANIISKKDIDFSNFKEMFDFLKKLEPDNDYADELCCNSLY

SEQ ID NO: 1457 - protein, 568 aa, Sulfurovum sp.
  source 1..568: note = Related to SDAZ01000111.1
MNELEDFYTHNKKVIEYALLIIRKENYTKKYISKKNGSLRELNIPPPFVMQIQKKFNSLLQKLYSPPAPIHGFIEKKDDIVKSIVTNANQHIQKHIVINVDIKNFFATINFGRVRGLFLAEPFKTTEQIATRLTQLVITENQLPQGSPTSPTISNLISLKMDNQLTRLAKRHKMVFTRYADDITFSSYRKNINVQEVIEEIEKIVKINGFSLNPQKTRVQYPHQSQTVTGLKVNQKINLDRKYVRQIRSKLFSWYSAGLDKATELHFEKFNKQSVKYASADKTSSYKKIVLGKIHFLGQVLGQDNSHFIRFLHTYYLLESNFVLDREKVEEIYEKFDLNNPNPNDVIKTFSQIYDSMLIITEGITDVIYIKQALKYFQSKGKFIDLKLRYCTMGGYVDVIKLHKILHDKDLCKSFCDVEKRNFILPLINKNLKTYFVLDADEKQILDYFNNKNQLMKNYFLLDEVNRGYIEKMIDKEIIIDFIMSKGYDIDPTREELGDKSKNGLKEYLKSSKFTDEEIHAPKNTSYIAHKKKIIEKTRLAKHIKNKEDVDYGNFESLFLKLDEIKNH

SEQ ID NO: 1458 - protein, 574 aa, Sulfurimonas xiamenensis
  source 1..574: note = Related to NZ_CP041166.1
MHKIEEFYHSHKKIFEYALYQIRTKGYSEKIITKKNGGQRKLNIPPTFAKVVQKKLNTLLQDIYIPPKPVHGFIKSYKFDTKNIVSNALKHTKKSIVINVDIENFFNTVNFGRVRGLFISKPFEIDKDIATRLAQLTVFNNELPQGAPTSPIITNLICKKMDFQLLKVAKENSLVFSRYADDITFSTNKQNINIENIISDIEQVIVDNGFKINTSKTRVQLQNQTQTVTGLKVNQKVNLDRKYIRQIRSMLFSWYTDGLKEAAEKHFEKFNKQPDKYLTDLESSFKNILIGKINFLGQVKGRDNFLYIKYRHTFYLLDSNFSLSKKLNEFEKLDLNHLNQRCVTTIFTQIYSSILVFTEGITDIMYMKKALKYFQEKGKYEGLHLRYCNLESWSNVSNIHKVFYENQKDLSIINMRKCILPYVKDDLKFCFILDADDRNIKQYFERYKHTNYFLIDDDRSGYIEKLFEQGIVIDKIKKLGYTIDTTKEGLQKSTIKALKEYVSSELVTEEAIHSIPSTSYIAYKDKIIKKTDLANFITKDDSVTYDDFESIFVYLDSMKHNKDYVKPLCCNSLY

SEQ ID NO: 1459 - protein, 579 aa, Sulfurovum sp.
  source 1..579: note = Related to FAXN01000046.1
MKILEQFYNDYEKLFELALYDNRKKKYKRKNISKKSGGKRRLLIPPETTDKLQKKLNRILQTIYNAPNSVHAFIKSKENEEKKSIVSNAKQHVKKQIVINIDIKDFFDTINFGRVRGIFLAKPISLDETLATKFAQLISYDNKLPQGASTSPIISNIICKKMDHNLIQFSKKHSLTYSRYADDITFSTHKNSLDTDFILNEIEKIIVDNGFEINTLKTRIQLANQSQVVTGLKVNQKVNVPRKYIRQVRSMLYSWKTEGIEEASKKHFKSFNNQTKKYIDSKEESFKNIVLGKINFIGQVKGTDDLNYIRFYHTYYLLDSSFSLKEKLDYFEHFDFYNMQQDRAKLLLTQIYDSLLVFTEGVTDIIYIKEALKFFKNKKMFTSLNLRYSYFGGYADVIKMHRILYDEHIVRMSKLNELDIANIRKCILPNIDKSLKFCFVLDADEIAIEKHFEKHDYKNHFLLDLKNKGYIEKLLDKELIKKIIKKYGFKIDVNRKEFSEKTKTELNKYMKIKNKYSNISAVSNYIAYGVKIIEKTNLAKFISNKDDVDYSKFEDLFCVLEKINHNFRSPKQLCCQSLY

SEQ ID NO: 1460 - protein, 578 aa, Malaciobacter marinus
  source 1..578: note = Related to NWVX01000040.1
MNELENFYLTNKKNVEYALFLIRSEGYRNKTISKKNGNTRILSIPPDFTKIIQSKFNEILQELYIAPKPVHGFVKTNNDISKGIITNASMHIRKSYVINVDIENFFDTINFGRVRGVFLSEPFNTNEKIATKLAQLVSFENKLPQGAPSSPTISNIICKKMDHELIKIAKEYSLTYSRYADDITFSTHKKKINKIRILRAISKVIKNNGFTINENKTRVQKYIHTQIVTGLKVNQKVNIKREYIRQIRSMLFSWYKDGLASSADKHFDRFNKQESKYIDNREESFKSILIGKINFLGQVKGKENRLFIKFRHIYYLLRDEFKLLEKTNTKFSFEHIDVNNLTSNEVLKIFTQVYDSRLILTEGVTDVTYIKSALKYFQSKGEFQSLKLRYCWVGSISILVTFFKILYAHKMKELDIINKRKCVLPLVDKNIKISFVMDSNDDKINTFVKAKNFNNYYLLDLSNKGYIEKLLDKNKVIEFIESNGYIIDTTRPELKPDSKRGLEEYLLSSQKSDGEIHSVQKTSYIAYENKIIEKTKLSKLFEESEDIEYEKFRELFTHLEKIESISIQNEKLCTGSIY

SEQ ID NO: 1461 - protein, 574 aa, Arcobacter sp.
  source 1..574: note = Related to PDKI01000002.1
MNELENFYITNKKNVEFALLKVRDEKYVIKNISKKNGKTRILHIPPSYTKIIQKKFSQILQKQYIPLKPIHGFVKIENNTSRNIITNASNHINKRYVINIDIENFFDTINFGRVRGLFMSNPFNINESIATKLAQLVTYENKLPQGSPTSPIISNLICRKLDHQLIKIAKDYSLTYTRYADDITFSTYNKKINYIRIIRDIDKIIKNNGFIINKSKTRIQKFNQTQIVTGLKVNQKINVSRKYIKQIRSMLFSWYKNGLENASNLHFDKFNKQESKYILDRNESFKNILIGKINFLGQVKGKEDRLFIKFTHTYYLLRDEYFLKEKQNKFEILDINNLKYCEIIKIFTQIYDTKLVLTEGITDIIYIKQALKYFKNNNKFKNLKLRFCQVGSISNLIEIYKVLFENPKDLTVINRKKCLLPYIDKKLNMCFVMDSDDKQIELLKKTLHFHNYYLLAEDIGGYIEKLFNKNLIIEIINKNGYVIDTSNPKLQDSSKKGLEEYLRSTKKSDNEFHAVPKTSYIAYENKILKKTELSKFIIDSENVNYDRFENLFNYLENIKIIDFKYDKLCSNSIF

SEQ ID NO: 1462 - protein, 602 aa, Sulfurimonas sp.
  source 1..602: note = Related to MICH01000013.1
MFFKNFLRNTTKHVLNLFKKKKNYENILIDEFHNRESKIFYKNNKKIIELSLSNIRNNKAYFHKEISKKNGGKRRLSIPDSYTKVVQKKINILLTKFYHAPKSVYAFVKSSDNKKNIVTNAYMHINKKIVINVDIENFFNSINFGRVRGLLMSYPYNIDKDLATKIAQLTIFNNQLPQGAPSSPVISNMICYKLDKQLMHLAKEYRCMYTRYADDITFSTNDKYLNQKAFFKELNKKINENGFSLNSSKTRVQKYCHSQIVTGLKVNEKVNLSKKYIRQIRSMLHSLHKDGLAEASVKHFKLYNIDEKYSKDKEKSFKRILRGKIDFMGMVLGKEDYKYKKSIYLFYLATNNYLPLNYYQKLEKMNSEDEDFLKLSLQEMYSSIVVFTEGETDITYLKAALNFFHSKDKFLELKIRFVSLGGFPEVIKYHKAIFLTKNDNVTLELREKLSPYLNKSVNYYFLLDADDPDIKNYFNKTYVPNSFYLIMEKTDGYIEKCFQKELIKDIINKHGYKIEPEKSTKQKVTNQLLNHLRNNSKKDDFFSIDSYIVYAEKQIFKTILAKYICDNKEVDYSVFKDFFDFIIKNKTNNLIPTKLSIDDEYK

SEQ ID NO: 1463 - protein, 523 aa, Leptospira kobayashii
  source 1..523: note = Related to NZ_AP025028.1
MAKVRTLIWAFLYHMLTLDEFEEKIGISIGKLNYIGYILKEEDKYLNFEISKRNGNSRQINSPNSILKHIQNRIKLILEENFHPYSVVHGFVNDKSILSNAKKHLNAKWILNLDIENFFGTINFGRVLGLFLSKPYKFDKKIATLIAQLVTYQNVLPQGSPASPIISNLICNKMDRDFISFCKSKHLIYTRYADDITISSQKRKYMNFDSTLDEDLLEDIKKLVNENGFKINSDKVSFSYGKDGGIVTGLRVNEKINIPRKTIRSLRGLYHSIRSNGYQVANEIYNRKYKNLNRLPKENKELINHINGHLNFIFMIKGQFDDVYSNYYNKFKTQLKLNIKSPIPKSVWDYIFIMESESTQKQGTAFKLNKFGIISCEHVYDNYSKIFLKNNFSKKFDLELIKKDERIDLIKSRALDLFIEDGLEINLDFHYKIGSKLRLLGFPNYRIGDSGMDKLITIVSKRTVSGVERILVDSGIVAGNSGGPILDLNGAVVGIAVTGAEDHDKLDVTENHSFIPIKYLLQF

SEQ ID NO: 1464 - protein, 618 aa, Lacticaseibacillus paracasei
  source 1..618: note = Related to LKGI01000141.1
MDNPFSELDTNEISASFRHISNVSELASFLGVTRQKLFYYCAEHLNKKHYELFDIPKKNGGTRTIEEPTKGLKLIQKKIAFAVSINYHPAACVSAFTEGRSIRYGAERHKGARKVVCFDLENFFPSCPQYKVFGVFYKFFKLPKEVSDCLARLCCYKKHLAQGGPSSPILSNVMLNSMDKKFLSLAKKTKTVYTRYADDMSFSSKGDMPSLIWQNNNISSYITSIVQESGFHIKQEKTRILGRSCRMQVTGVVINKFPNVPRTYYRRVRAMLHNFKTTKDYEETKKNFLKYYGKSDDCNPAKVIQGMISYIFQVRNDGGTHSTLARNMMQEFNTIQWPGNEKFKVEMAMPHSYKLHKAVFAVETKIGEDFFYGTAFLCNNKIISCSHIFKKGHEKKLSDEIEYVHLIEHNVEDNSIYKKYNVTRIEYWPDFDVAYLHTDSCINKAKQKQFSTPNFLHQGGNKVFVVGFPASLQTGSSSRMYEEKETIQEDHRVELQYNEFAVGQKQTIIDKRRMTFISNQNGGINPGNSGGPILDISEKKVIGIALKGDNVKDSKSLSNNRSEFFDLYEWLNMDKPKAFTWEKIVGKLKFEFKHLYLFVYIHNSKNCDLLGRLHNKLF

SEQ ID NO: 1465 - protein, 406 aa, Lacticaseibacillus paracasei
  source 1..406: note = Related to NZ_CP065154.1
MLSNIILYAFDKQMLELARRTKTVYTRYVDDITFSSQNTMPRLLWQGENWSTTVKKIVEEAGFQLSEEKTRKFGKGNRLSVTGVVVNEKMNVRRMYVRKIRAMLHNFKITEDYDSTVKKFNGFYLKDKIVDPERVLKGMISYVYQIRSDPEQDQVLSRRLMQDYNSINWPGGSRFELKLAIPQKFKRYNAIFAVEVVTLFKDFFFGTAFLCDGKIYSCCHIFENRNEPDDQPKSIKLIEFDPETLEVHKTYKVDKVDLWSEDDISMLYSSALNKTKRKSFNSPAHPLKGPAKVDILGYPEAFQIGEKSRMYTAEETTIITIGDNISQSHKSENSRSVVLLTNDNGGIQSGNSGGPVVSIGNGTVVGIAIRGAQPKDGNYEVVRSEMVDFYNWLHSNKRTPETLRLR

SEQ ID NO: 1466 - protein, 580 aa, Pediococcus parvulus
  source 1..580: note = Related to BJWE01000002.1
MKDLFWTKNNTDIKRQFPDLKSARELASFLSIKYSQLTYYVSKGKKYKSFQVKKKNGEIRILEAPIVGLLLIQKKLAYTLGLIYTPSPSAMGFVKGRGIRKNAQVHVNSREVLNLDVENFFPSIRSNLVFGVFHKFFRFNIKLSDTLTKLVCLDGALPQGAPTSPILSNIIMNSIDRKFTALARSNHCLYTRYVDDITFSSRNTIPRTLFRNKDVSDLIKQILKEKGLKVNENKVRLRKRFQRQDVTGVLINKKINVQKNYLRLTRAILHSFELNEYKDAKKVFLSHYRNENHLGKKIEPEHVVKGMISYIYQIRKDPKDDEAVSRKLMQRFNRINWPYNSKFDQKISNPVLFQKLNSTFQVYVSFKKENGDFDRFTGTAFLCNGEIYSCSHTFVQGSRKNVGPELNDAQLVEFDSFKKNQRKCYKITKIEYNTDLDFCHIYTNHKFEGGFRKPTTAPYENEKLQVVGFPSILDHNNTVGLYQKSGRITSTFSEPNPDYDKEKGEVEDGKLFMPLKQRLLINTDATILEGNSGGPILTKDLVVIGIVLKGQNRESATNNTALDFNFALNSDFLMKKYYLK

SEQ ID NO: 1467 - protein, 538 aa, Oenococcus oeni
  source 1..538: note = Related to NZ_AZLR01000004.1
MNAESKKIRSQFTQLFNVDELASFVGTNAQTIQTITNKTTSYYKSFELKKRSGGSRTILAPKQQLLSIQKKIATTLEKIYPVSIYSHGFIYKKGIKTNAEEHLRSTELLNFDIDNFFDNIPEYRIFGIFRYYFNMNNYISGILKELTCVERHLPQGAPSSPILSNIICYKIDKDLGKLARRNHCKYTRYVDDITFSSKRKLPSSIYNRINKSCSNNIVKILSDSGFTINHRKTRLLTKSQRQEVTGITTNKQLNVSKTYIRSTRAMLYNFKNSKYQVANAKFKKYYKAKQNLNPNSEILPEEIIKGRISYIYQIRKSRKEQSLDNSVTHKLMQSFNMVYWPKGSKFDQKIANPEKFKLYNSIFEIEVKAKDEDLCEKDNIMTYTATAFLCEGKIYSCFHIFKKPKQIIEPKLKEYDCYTKKIRATYEIASIDFDQNFDVSIIHLNNTCKIKKSGFKSPKKDATENEQLILAGFPEFSHHQGNTLNLYKKNTQIEDIYKENITKLNKPPYSFSNKMKAEKNLLFFQYFSLFNKIIAVFV

SEQ ID NO: 1468 - protein, 584 aa, unidentified
  source 1..584: note = Related to JAAUUP010000156.1; note = Deltaproteobacteria bacterium
MDEDKKYKTFTIPKRSGGRRQILAPCGPILGLQHKLRDFLDACYEPPPSTHGYVPGRSIRTNAVPHEKCQYMMKLDIVDFFPSITFARVYGLFKAAPFRFTNKVASTLANLLCYREVLPQGAPTSPVVSNLICQRLDRDLLKFAREYSSQFTRYADDLTFSTKDGAQWGLVVLNDKRKCPHPEIERIIQENGFRLNEAKTRFLNKYCRRIVTGVVTNERLNVPQSYLRTTNRMLKLAGTNGLDNVGRWYCQDNHIFSSTVMNFADYVVKVLQGRIAYAKMIRGSDDPICQKHSIYLDNIVSGRPLTYGAGNYMKFAKLTPLRVLHLSDFHFRVETSWNATPLLEDLVNCIGDPARMSLLPPDLVVVTGDIAFSGRKAEYALAADFLSQLCARISLPINRVFMVPGNHDVDRAAVSDVALREQKDLLKLDEPGARISAMFKDADIRRVLLRRLDSYVDFCKNFYGSGLRAEPWWKETVQVRDMNIGISGLCSSWMSVSDGEQGQLMLGLPQVNEVMHRGFTHDLTMTLLHHPLNWISEKDAESVDEIRAWSDVVFHGHVHTSDIATTYSQCRGDDDIGSRSGVRW

SEQ ID NO: 1469 - protein, 346 aa, Arcticibacterium luteifluviistationis
  source 1..346: note = Related to NZ_CP029480.1
MKKLYLADIEERSRRFLGCRTIDDLCCLGFVKNELLLHSLNISYYSFELRKKSGKMRQIESPNESLKKVLRQFNYYLQCVYYIHQTDASQGYIITPKKSKVCKSILENARVHLRNRFMLNIDFQDFFHQISFERLAKRLSETPFKFDTSTSKLLALLFTYKGRLPMGAPTSPVLSNLCVMKLDMEMSEWSKKNGVTYSRFVDDLTFSRDDSEFISDTYTEINHICLKHSLKVNPAKIKYFGEGSLRKVTGLILRETIDIEDGFYHELDKDFNRMKNLVEVVIINHGVKSNDEVQTFKKEIEGQINFIGMVEGYNSPIFNQYRQKLKAVMNPAEEVLSVRWTNFNYV

SEQ ID NO: 1470 - protein, 346 aa, unidentified
  source 1..346: note = Related to nan
MRKLYRDEVKNRACQFLECQNMIDLHRLGFDTARIKLLALAPPYYCFDMPKESGGVRHIEAPEEHLKDVQRQFNRYLQCVYFEIQTPPSYGYIIRTKGQTPWKNVLENARQHLGARYMLNVDFKDFFHQFTLRRIHRMLQCPPFQFDNKTAHLLARLFCYKGRLPMGAPTSPALSNIGTIAFDNDMYAWASNQKLTFTRFVDDMTFSSPIVPLTDEHLAHINTICQKHALLINPDKTVFFGEADTKKVTKLLLRDTVDIDPDFYRELDKDIIRLKHLTEVNILMENHKRGQLLRKFKKEVEGQVNFIGMIEGFDSSIFYKYRMKMKEALKPDNKALSSRWTNFNYF

SEQ ID NO: 1471 - protein, 346 aa, unidentified
  source 1..346: note = Related to BQJU01000031.1; note = Saprospiraceae bacterium
MRKLYLKEVEQLAKQFCACENLKDLERLNFAINRIRLLSLNPQYDVFKVPKPNGKTRLIEAPEVELKEVQKQFSNWLQCVYFLLQPKSVFGYIQRVKDVLPAKNILEHARQHLGAIYLLNVDFQDFFHQVSHTDLVRLLQRPPFRWTKKAAAILAKLFTRNGRLPMGAPTSPVLSNFAAIQLDLDMEKWAQKQGINYTRFVDDLSFSTKDQALTTAHLDQVKTICAKHQFVINPQKIKWYPPGVSKKVTGLVINETVDIDPSFYQELNRNLNRLQGLSDVNAIVNQSRQNDLYQDFKKEVQGMINFIGMIEGYGSQLFFDYRQKLKEALHVSPECLSVRWTNSQYF

SEQ ID NO: 1472 - protein, 339 aa, Desulfobacula sp.
  source 1..339: note = Related to JAIOTP010000164.1
MNRCFSSFMAMREPGDMCALLRLPLFKLKLLSLRSVYNTFEIKKNGGARLIETPAQPLMKYLKSLKNFLQAAYYYLKTDAAYGYILNPGQTKNPRNIMTNAKIHLGNPWMLNIDLDDFFHQVKEKHVQQIFGMLPFRFSGELVQLLCKLSCYKGRLPMGSPTSPPMSNFAMIPVDNRLLKWARSNGIVYTRFVDDLTFSSQKPINSCTLTRIEEILYEYRWKINQDKVVLFGESDIKKVTGLELRNRVSVPDTYFEEVAKDIVRLEKAKELVIRAPFHESTAWIKKLEQHVNGQINFLGMVYGYGSPEYLNKRTKADAVLQRDYEPESLNWLDFPYQFF

SEQ ID NO: 1473 - protein, 336 aa, unidentified
  source 1..336: note = Related to PHDA01000024.1; note = Bacteroidetes bacterium HGW-Bacteroidetes-7
MLGKIKTTKELALYLGTSYEKLNKIDPEKSFASFYINKHGSTEKRLIEYPRGELFRILDRLSDGLQWLYLDHLTTAAYGFIRKLKPNKDPRNIYTNAKRHLGKKYLLNIDLDDFFHQVDTRKLQNLFSDYSLFSLNQESEQLLVKLVSYRGRLPMGSPTSPSLSNFATIGIDNDLSVWAGRNSFDYTRYVDDMSFSSNIKITQNHINQIIEILFAHRFLIDPNKTKIFGPQDTKEVTGLVLGKTITVPDEFINAFMKDINRFSEMHHLACQNPDSRVFEWLEKMRKVLQGRMAFLKMVHGPKNETYKLFQLKLDNIYKPELLETSVSWRYAGYEYS

SEQ ID NO: 1474 - protein, 348 aa, Cyclobacterium xiamenense
  source 1..348: note = Related to NZ_FNZH01000018.1
MAVGYRHIYRTARYLRSCRQLSDLEGLIKVSKADITLHSLHPKYYEFRVLKKNGGFRKIEAPQPGLMDLLRKLNFVLQCLYFFEKPPASYGFVMSHKGNKQPRNIRTNAERHINSACMLNVDFEDFFHQIKVDKVYAVLVNPPFHFSRESADVLATLCTFKGRLPMGSPASPALSNFAVRDMDWMLDAWSKERGYRFTRFVDDLSFSSETSAFHPTMMPEINAILSNFNMKINPTKTKWFGPGEVKVVTGLEVTDQVRIPGSFYYDLSNDLKRLKYSIEAQVQVMGSQHNEMVEKLKKQVRGKINFVGMIQGKGDRKYTDLLRDYDNAIHPDIDKLSVRWVDFPYQDF

SEQ ID NO: 1475 - protein, 344 aa, unidentified
  source 1..344: note = Related to JADJWN010000021.1; note = Saprospiraceae bacterium
MATPIKTIRTRNHAFRSMRVIGDLCRLTGESNLVLGLMADKPRYRQYFMRKKDGSKRPIEDPDARLKAVLRVINDHLQAVYYYLRPGAVHGFTISSTSDETERNILSNARAHMQSHYMLNLDLKDFFHQITQKSVVQLLSSHFDQWDDSLIHLVAGLCCFRGRLPMGSPASPALSNFAMTDLDHELMTLCKVYDVVYTRYADDLTFSSREPMSSVFRDMVNDAVRHRGFEINPKKVRYYIMEDSKVVTGIIVTKDELCLPEEYMHQLRKEIDLYRNSVIVDTMYETGMSGKKLSLFEQEITGKLSFAKMVMPDDDEVKELEDLFYNEVDVHSVMQSWLDIPYIF

SEQ ID NO: 1476 - protein, 350 aa, unidentified
  source 1..350: note = Related to JAGQVH010000109.1; note = Chitinophagales bacterium
MHMGSSSLRFFRSNAKRFASVRSKEQLARELDSSKYTLELLAVSPPYRSFKIPKKDGTWRSIEEPEEELKLVLKLLAFHLQTVYFFIKPPCAYGYILSHRSDPDKRNIVTNAHRHIQAHTLLNVDMRDFFHQCDEAEVVSVLRPHFPEMEQDCLELIANLTTYHNRLPMGSPASPVLSNYAAFRLDHAMLAWSQERNIVFTRYVDDMTFSSRTVLPVEYVKQLEEACAKFGFPLNPAKTKYYGPEDEKYVTGLMLTKEEVVLPGKYFSFLQDDLDRFAALYPVFSCLSDERSSAWVWHFEQGLTGRINHIGAVYGRSSATFRHYQKKLQAAKRPVAEEIYMNWLDLPYET

SEQ ID NO: 1477 - protein, 349 aa, unidentified
  source 1..349: note = Related to CP083757.1; note = Cytophagaceae bacterium
MTFGDIQTKASLVSKCDTLTELCFLLKTPRKALLAIADKPDYNEFFMPKPDGKGRRLIEDPVAVLQYIQEILNDYFQAVYYLIRPEAAYGFQLSFDDDHAGRNIRTNAERHLHKPWLLNMDFKDFFHQVTSQKVEMILRGDSFSFDKECVEVLCSILTYKGRLPMGAPTSPVLSNMAVMEMDNQLGQMAKEKRLIYTRFADDLTFSGHQEINEFTIKAIKAVVAQFDYFFNENKTRLFTPEMEKTVTGVKLGDRLGLEPKYLDKVSLEIQKYEHTKEIQGINGIESSEYLTKYEQQLSGHIEFIGFIYGKQAPEYVHLKKRYDKAESSSYFDSRSWMEFDRHYTFFNKK

SEQ ID NO: 1478 - protein, 348 aa, Runella zeae
  source 1..348: note = Related to NZ_KE384045.1
MARLNKIKKIKKLAEYFASIHTTEQLATFVGVPVYQLTLLAEFPAYNCFSIPKQNGKPRMIEDPHKPLKKVQQILNSALQCGYYCNKTHAAFGFLLNPEDDTDPRNILTNAQRHINRLWLLNVDYVDFFHAVSTHRVVELLLSDYFSFDEPTALLIAQLCTYKGRLPMGAPTSPVLSNWAARTLDEELLAWSHRHGFVYMRFADDLTFSRQEPILPQHVQEIRAISTVNGFTFNEQKLKICAPSAEKIVTGLVVGKNGVQLPSGFLGELEAEILKFRTVLEVQARAGRAQSVWVEEFRTQLEGHLSFASFVLGEDHADYRRLSRLLEEAMQPSVAHDSVSWLHFNYFF

SEQ ID NO: 1479 - protein, 365 aa, Lewinella agarilytica
  source 1..365: note = Related to NZ_FOFB01000012.1
MAKKVSIYELRRRANSFLACKGTLDLARHWRVDNVRLAVLAIEPEYREFRIPKKKPGTFREIEDPRPKLKAILRKLNRDLQAVYYFQRSPAAYGFLTSPARDPDPRNILTNAQQHLGAKWLMNVDMRDFFHQIETHEVAELFRQPPFSFPKATAKLLAGLTTYKGRLPMGAPTSPILSNWYAIPLDKTLTEFARQREWTYTRYADDITFSSKTSPIKFEDVGRVNVLVRGRELELNHNKTVIYPPDAPGKEVTGLIVGAEQVQLSSEFLAKVKDGLRRLNDVVDTKYLMPSGRLAKTPWVEEIAQQVRGLVSFAQKVLPPADPLGMELEEAYATALAPPQNYGPVSWLEFGYLDFRIDTNPDQIK

SEQ ID NO: 1480 - protein, 360 aa, unidentified
  source 1..360: note = Related to RFJJ01000149.1; note = Bacteroidetes bacterium
MPKRPTIRTLRRHAEQFRACRGQTQLSWLLRTEPVRLAMLAADPKYATYRIPKKRKGTFRLVEDPEPRLKRVQKRLNYYLQAVYYFHRPKNAFGFITNPVDDPDQRTIATNAARHLGCQWMLNVDMKDFFHLVNRERVYELFRASLLKFPKNLARVLADLCTYRERLPMGAPTSPVLSNLACIPLDHDLDHFAEQRGLTYSRYADDLTFSSREQPINWELIPQINEWITAYDFQLNPAKSKLYGPADPHKEVTGLIVGVQQVSLSPDYIASLRKGIQQLDQVVNAKYVMPSGRLRATTWVDEIAQQLQGRLAFASQILPDTDPLRIELETAMDEALAPPTEYGPVSWLDFGYTLFNMPPA

SEQ ID NO: 1481 - protein, 375 aa, Spirosoma sp.
  source 1..375: note = Related to SBLB01000002.1
MPGYRYESDGEEISIARGHTIDMKYTRKRVNWLARQFGQLTDPASLSQLLGVQLHLLQLLALQPRYNTFRVPKKNGTFRLIEDPEPHLKQVQKRLNTYLQCVYYLRRTPATYGFQISVDGDNDPRNILTNARRHVGNPWMLNADFLDFFHQVNYDWVYRLFTREVFTFEPDLAELLAKLTTYGGRLAMGAPTSPVLSNLATMPVDDALTELARSYDWTYTRFADDLTVSAQACIAPAQVQEFLNTIAPFGLAFNEAKFAVRSPAMPKTVTGLVVTAQDVQLPASFVTDTLTEIEKLGHLLEIHYRSGRPVTRWLEQYQQQVEGQLAFAEFILDDADSQLHSLRAAFVRIQQTPDLGEPVSWINAAYLEPASHTLY

SEQ ID NO: 1482 - protein, 350 aa, Lutibacter profundi
  source 1..350: note = Related to NZ_CP013355.1
MKNQKLTLNQIKRNDVLIKKCKTSKQIASLLNCSAKELTLHSFEPIYYHFKVPKKRKGAFRYIEAPSQEIKHLQRKLNYYLQSVYYLNQSKASYGYIIKAIGQKNTKNIYTNALQHLGSTYMLNADFKDFFHQIALNDVVQIFKSKLFNFNKNTAYTLAKICTYKGRLPMGAPTSPALSNLYSIALDHDLSTWATLNKLIFTRFVDDLSFSSKNNLLNQTHFKQINNIALKYHLNFNPNKTKYFSKTDKKIVTGLVLNNTVDIDKSYYNELDKDINRLQKVIEVHHITGKTQGLAFLKEFKQQIMGKINFISTIEGKNSKQYLTYLNSFHNALEVNNELVNRWTKFSNYI

SEQ ID NO: 1483 - protein, 349 aa, Lutibacter maritimus
  source 1..349: note = Related to NZ_FOZP01000010.1
MKQQKPTLNQLKWYENQIFNCKTLEEISVLLNCSKNELLLHSYNPEYYQFSIPKKSGTFRIIEAPNESLKRLQRNLNQYLQAVYYLNQSVCSYGYVISILGEKQTKNIYTNATQHLAKPFMLNTDFKDFFHQIKIDDVTQIFKSEFFNFDIYTATTLAKLCCYKDRLPMGTPTSPVLSNLYTLKLDNELLQWAKKHNTSYTRFVDDLTFSSVTTSFSPLHFKQINEIALRHKLNFNEEKTRYLNSDDIKTVTGLVLNTTVDIDNAYYLELGKDLIRLKNVMEVYYITGKTHIITFLKTFKQELFGKINFIGTIEGRNSKQFLNYLNLFYNALEPDTDLVQRWTKFSNYV

SEQ ID NO: 1484 - protein, 347 aa, unidentified
  source 1..347: note = Related to JAAYJT010000001.1; note = Bacteroidales bacterium
MKITFKKLKKEADLFCKLSTLNDLAAVISVSKNEILLMAFEPVYYHFTVPKSTGGQRYIEAPDIELKKIQRRLNYFLQKVYYLNQSRAAHGYIISVIGEKNPKTILSQAEKHLGANYMLNVDFSDFFHQISITDVKNIFQCSPFKFNQYAAYTLAKICCYKDRLPMGAPTSPVLSNFYTRSLDEDLIKWSMPQKITYTRFVDDLSFSSLDSPFNITHYEQITEITNNYGLVLNPSKTVYYDIKDEKIVTGLILRETVDILPEFYEELDKDINRLKAINEVVYITGKIQKPLMLSTFKQEVMGKIAFIAQIEGKNSPEYNHYMEKYEDAEAPDEELSVRWTKFGNYLI

SEQ ID NO: 1485 - protein, 350 aa, unidentified
  source 1..350: note = Related to JAIORQ010000052.1; note = Bacteroidales bacterium
MSKKHTKKQILNKAAEFSNCKNIKQVSFVLKVSPMQLATSALLPQYYYFKMKKLKGGFRNIEAPEPPLKKLQRKLNTYLQYCYYSEQTKAAYGFIINPRKQKAKNIVSNAQQHKNNSYMLNIDFDDFFHQISIKEVIAIFRKSPFNFNKNTAGILSKICTNKGRLPMGAPTSPVLSNFACSGLDKELQQWADTRIITYTRFVDDLTFSSNMPITKQHYNEIKEITDKYDFQIETTKTKWYGKEQEKTVTGLTVGETIAIPEAYYTELDKDLHRLQKTTEVHIITGQVYKADAGKKFKQEIMGKINFIAVVHGYDGNKYETYMQKYEDAINPPDKDELSMRWLRFSNYMQF

SEQ ID NO: 1486 - protein, 349 aa, unidentified
  source 1..349: note = Related to JABXHO010000062.1; note = Flavobacteriales bacterium
MKLNQKLTRKQIYKKAKMLFSCTTLKDVEQLIGAELNSISLHAFDPGYFHFTMPKSNGELRYIEAPEDELKRLQRKLNHYLQCAYFVVRTPSCYGFTIGAISEKNPRNILSNAQKHLNCSYLINVDVDDFFHQISTERVQFIFENDPFRFDRYISKTLAKLCTYKGRLPMGAPTSPVLSNFYTIEPDTELQKWSENQSITYTRFVDDLTFSSTKNLNSRHIESISGILDGFNLPLNSGKHKLYGPEDPKTVTGLVVGNSVEIAPSFYCALDEDLVRLKKVVEVHQITGMTSGLSFLKRFKQEVMGKINFVKQIKGTFSEEYVRYLDQFHEALEPDERFVARWTSFNNYV

SEQ ID NO: 1487 - protein, 350 aa, unidentified
  source 1..350: note = Related to JADLBE010000330.1; note = Saprospiraceae bacterium
MNKRHTSEWRRLGEDLLQTRTPDDLSRLLGITTARLADTAEAPAYATFYVDKRNGGKRLIEDPAPPLKALQRRLNDLLQGLYWLERSEAAYGFVVNPLDDPHPRHIVTHAERHLGCRRLINVDLEGFFHQIDNDRVRKTLLAPPLQLEAEAVELLVALTTWKGRLPMGAPTSPVLSNLAFRDEDLYLTRFARDRGWLYTRYADDLTFSSRNQDMEPHHLHEIVQHLEDGLKYTVHPEKRRYSDDGDIKSVTRLVLEGNQVTLPEEYFHQLDETLNDLSSARRVHHRMGGRHTLWLEDYNARIEGLLSYARYVLDERDPVYMDLKRRYDDANQASPDDFGAYTWFDFPYFE

SEQ ID NO: 1488 - protein, 347 aa, unidentified
  source 1..347: note = Related to nan
MLSLRQLQYRRNRLTKLRTMQELCLLLGKPGHKLELLCAQPMYNEFHIRKRNGGKRHIEDPRPPLKRVLGILNDLLQGVYYFEKTEAAYGFIAIARDDPAPPRHIVTHAERHLGCRWLMNIDLTSFFHQISTEMVLDRLKDPPFHFDDEVADLMARLCTYKGRLPMGAPTSPVLSNLVFQREDEVLKAWADDHGWLYTRYADDLSFSSQKEISSWEMQQTINLLENHSYAVHPEKRRLYGPDDVKNVTRLVLGDGELELPPDFLEELRDCIEDLRRTTRTHLRMGVARPPAWLTKYRQRLNGMMGFAKHVLGEYDEDFLQIQRSYDEAVNPPDEDFGTYSWLDFPYW

SEQ ID NO: 1489 - protein, 345 aa, unidentified
  source 1..345: note = Related to JAGQXW010001063.1; note = Saprospiraceae bacterium
MDNSIAALAGLRKAFFAMRTAGDLAELLAVSPAHLVAVAFRPWYHIFELPKKDGTMRLIEDPDDRLQPLQDGLNDYLQAVYWHQRSPAAYGFLVIPTGDPEPRHIETNARKHIGKPWLLNCDLEDFFHQITAGRVHKLFADAPFGFDEEVCDLLVRLTTFRGRCPMGAPTSPVLSNLVFSATDADLTDLARRRGWTYTRYADDLSFSSYDPLDWDDYTHIQRAVIRHDYEFNPEKAALFGPDDPKIVTGLLLGTQDVEVPPDFFPQLTDDIHQLAGAMRVQFRVNPRGSRTTARFRRSVEGKLRFAERIMGRKHPGVAKLWKDYRNAVKPPAKHIQRSWFDFEYW

SEQ ID NO: 1490 - protein, 355 aa, Haliscomenobacter sp.
  source 1..355: note = Related to JABAQK010000028.1
MADTITIKGMESRARRFLDVQTVEQLAKILGKDPMKLAVLAALPQYREFDIPKKNGGKRHIEDPAPPLKKVQRKLNDFLQAVYFFHRTDNAFGFITNPVDDPSPRHILTNAQAHLGCRWLLNVDMKDFFHLVSQERTEQLFEAPLFGFGEHVSTLLASLACYKGRLPMGAPTSPVISNLVSIPLDEDLNAFARERGWTYTRYADDMSFSSQTEIPPDAVQEIEAWVKAYDFELNPAKVKLFGPGSPNPKEVTGLHVGETEIGLGADYTGQLTGAIQHLNDIVDAQYLTPSGKSQPSRWVEELEAMVRGKLEFARQILGEADPLYQDLSLRLENALEPPETYGPLTWLEFGYATPR

SEQ ID NO: 1491 - protein, 353 aa, unidentified
  source 1..353: note = Related to JAEUUQ010000028.1; note = Saprospiraceae bacterium
MADTITIRGMRGRADRFLACQTFDQLARLLGKQPLQLVGLAAHPQYREFYIPKKSGGKRLIEDPVPPLKKAQRRLNDYLQAVYYFHRTASAYGFLTNPVDDPQPRHILTNAGQHLGRPWMLNVDMKDFFHQITQERAQELFKAPIFGFNDEISTALAALCCYKGRLPMGAPTSPILSNLASIPLDQDMEDYARDRGWVYTRYADDMTFSANEPITEAHFSEIENWITAYDFILNPTKKRFYGPGDKKEVTGLVVGDSEVELADDYLDMLTGAIQHFSDIVDAQHLTPSGKNQPSPWVAELQAQVKGKLEFARQILGENDERFIDLETRLIKAAEPPESYGPLTWLEFGYDVKL

SEQ ID NO: 1492 - protein, 354 aa, unidentified
  source 1..354: note = Related to JACJXZ010000021.1; note = Lewinellaceae bacterium
MADTITIQGMRNRAKRFLSSGTLEGLALSLGKASLKLLALAEQPSYNEFRIPKKSGGMRRIEDPTPELKKAQRKLNDYLQAVYHFQRTDAAYGFLANPVDDPSPRHILSNARVHMGCRWLLNVDAKDFFHMVSEERVKQVFQSGPFHFEEPIAGLLASLCCYKGRLPMGAPTSPILSNFASVPMDHALMELARKYDWKYTRYADDMTFSAQEEITEAHFAEVGAIIRSHGFLLNPEKKKHYGPEDEDKEVTGLLVRESRIDLPEGYLEQLEKAIDHLDKAIDAKYSMASGRGQKTAWLEELEQQIRGKLEYARQILGEGDLLYLDLVVQLDEALTPPDYYGPMAWLDFGYALPK

SEQ ID NO: 1493 - protein, 350 aa, unidentified
  source 1..350: note = Related to JAIUPL010000043.1; note = Bacteroidetes bacterium
MANHPSRLELRALKDAFLAIRTPADLCSLLAEDMLELSALALKEDNYEAFFVQKRNGEQRLIENPSPPLKRIQRKLNDCLQAVYHFHRSSAAYGFLSACSDDPPWAHRGIVANARQHLGRPWMLNMDVEDFFHAILADRVAWVFLNKPFSFDTELTNLLMRLCIYKGRLPMGAPTSPILSNFAARLLDTDLELLARSKQWLYTRYADDMTISSRQEITEDDVQLLRDYYRAHSFEANEKKTKLMGPKDVHTVTGIVLLENRLDLLPEFFEDLDSEIGKLSEIAGVKGRLGITLMDWVDDYAEKIQGMISFAAHVLGESDARVVKAEKALGKAQHGPKDYGAVSWLDFPYH

SEQ ID NO: 1494 - protein, 347 aa, unidentified
  source 1..347: note = Related to JACJXW010000005.1; note = Lewinellaceae bacterium
MDKKTRQRHQHNKAVFCSIRSIRSLCSLLKTDQRRLLLLARQPPYKVFTVPKKDGGERQIEAPGAELKKVLGHLNRYLQSVYYFEKSSAAYGFIVGVLNDDDRRNVVTNARKHAGRPYLLNIDLIDFFHAITREQVVEIFQSKPFQFKKDLPELLADLVTYQGRLPMGTPTSPVLSNLACRELDEQLSAFAEDMLWVYTRYADDMSFSSRKPIDADKIDSVRAIIEKAGFEVNQRKLKTYGPEDDKIVTGLLVTDKVTLAPDYLPQLDEDIRQLQNVLLIQNEQGQLSTRWVEQFKKNIIGRLNFAGFVLKRSDERYIDLKDAYYTAINPPQEDFGAVSWRGFPYNL

SEQ ID NO: 1495 - protein, 347 aa, Phaeodactylibacter sp.
  source 1..347: note = Related to JAGQXN010000602.1
MDKKTIARHQHNRDVFCSINSIRSLCSLLKMDQRRLTLLVRQPPYKVFTVPKKDGGERIIEAPGTDLKGVLGRLNRYLQSVYYFEKSSAAYGFIVGVHDDNDRRNVVTNARKHAGRAYLLNVDLTDFFHAVSRERIVEIFQSKPFQFKRDLPDLLAGLTTYQGRLPMGTPTSPVLSNFACRELDARLTTYSGNMLWVYTRYADDMSFSSNKPIDADKVDSVRAIIREEGFEVNERKLKVFGPEDDKIVTGLLVTDKVTLAPDYLSGLADDIHQLQNVLLIQNEQGQLSTRWVEQFKKNIIGRLNFAGFVLKRNNESYMELKDAYYTAINPPQEDFGAVSWRGFPYNL

SEQ ID NO: 1496 - protein, 347 aa, Lewinella sp.
  source 1..347: note = Related to JAGQXH010000872.1
MKKDTRERHQHRKMVFCSINSEHTLCRLLHIDQRRLQLLAKQPAYKSFTVPKKDGGQRQIEAPNAELKRVLGRLNRYLQSVYYFEKSSAAFGFIVGVTNDDDRRNVITNARKHLGKPYLLNIDLLDFFHSISRDRVYQIFREKPFNFRRNVPDLLADLTTYQDHLPMGTPTSPVLSNFACRDLDRELLIFSQTHDWTYTRYADDMSFSAAEPILQGQVEALGAIIQQAGFAINPRKTQLFGPEDEKIVTGLLLTDTVTLAPDYLPLLQAEIDQLRNLLLVQNEQGELSTRWVEQFKKQLMGRLNFAGFVLRRNHPDYMALKDAYYAAIHPPQEEFGAISWRGFPYNL

SEQ ID NO: 1497 - protein, 347 aa, Haliscomenobacter sp.
  source 1..347: note = Related to JADJZS010000008.1
MDKRTVERNLHVKTVFFGVRSIRALCGVLQIDQRRLLLLAKQPPYRSFTIPKKDGGERHIEDPGAELKKVLGKLNRYLQSAYFFERSMAAYGFILGVQNDNDRRNVVTNARKHLKRPYLLNTDLRDFFHTIARDRVYAIFAGPPFHFPKEIPEILADLTTYQGRLPMGAPTSPVLSNFACRNLDLELAAFSENMLWVYTRYADDMSFSSHQPIDADKIQSVRTIIEKEGFAVNERKVKVYGPNDLKIVTGLLVADDVQLAPDYLPNLEAEINRLQEVLVAQNEQGQLFTNWVEQYKKQITGRLNFAGFVMKRSNPEYMRLKDAYYTAIHPPQEEFGAMSWRGFPYNL

SEQ ID NO: 1498 - protein, 346 aa, unidentified
  source 1..346: note = Related to JACSRK010000282.1; note = Saprospiraceae bacterium
MDKKTRERHQHQKMLFCGIGSVRALCGLLQTDQRRLALLAQKPPYKTFSVPKKEGGERLIEAPGEELKRILSRLNGLLQSAYFFEKSSASYGFIVGVLNDDDRRNVLTNARKHAGRKYLLNVDLKDFFHYVSRDMVLKIFTGEPFRFKGELADLLADLTTFQGRLPMGAPTSPVLSNFACHDLDAGLITLSENLLWVYTRYADDMSFSANQPFNAEKIASVGALIHNAGFVVNQQKIKIFGPGDEKIVTGLLVTDTVALAPDFLPRLEADISHLQQIMKAQNEQGQLLTKWVEQFKKQIIGRLNFAGFVLKKSNDAYIRLKDAYYTAINPPEDEFGAVSWRAFPYN

SEQ ID NO: 1499 - protein, 348 aa, Haliscomenobacter hydrossis
  source 1..348: note = Related to NC_015510.1
MDKQALYQHQQQKTVLCSINSLNELARLLRLDQRKLTLMAERPNYRTFEIPKKDGGMREIETPGDDLKRTLGILNRYLQSVYLFEKSSAAYGFVVGVKNDDDRRNVLSNARKHIGKPYLLNIDLANFFHSITRERVLKVFTEAPFRFKRELPDVLADICTYRGRLPMGAPTSPVLSNLACMDLDRDLSILANSLFWNFTRYADDMSFSSDTPITPENIVSLRKIITDAGFTLNEQKLKLYGPADPKTVTGILLEADDCTLDPSYLDLLDEEIKRLHEVMRAQNELGQLNTRWVEQLKQQIRGRMAFAGFVLKRKNERFVELKNAFHSAINPPTEEFGSISWRGFPYNF

SEQ ID NO: 1500 - protein, 347 aa, Phaeodactylibacter xiamenensis
  source 1..347: note = Related to NZ_JPOS01000080.1
MDKRTRQRHLQLKTQFCSLRSVTEFSMLVKTEKRKLQLLAAQPAYNTFTVPKKDGGERLIEAPAPALKKAQGSINRFLQSIYYLEKTTAAHGFVVGVRNDDDRRNILTNAKKHLNKTYLLNIDLQDFFHTVTRDEVLDVFMKPPFNFKRQLPDLLADLLTYSGRLPMGAPTSPVLSNFACREMDRRLTAMAEDMLWAYTRYADDMSFSSNRNIDEETVNTVIRIIREEGFVPNKRKIKVYGPKDQKVVTGLLISDKVSLEDNYLAQLETDIRQLGDVLLAQNEQGQLATRWVEQLKQQVRGRLSFAGFVLGRRHERYNQLKDAYYNAVNPPQEEFGAISWRGFPYNF

SEQ ID NO: 1501 - protein, 347 aa, unidentified
  source 1..347: note = Related to JAAAOU010000417.1; note = Bacteroidetes bacterium
MDKRTRQRHLQNKKKFCGLRSVSELCLLLKTDKRKLELLANQPPYKTFTVPKKDGGERLIEAPGGPLKKVQGLLNRYLQSAYFLEKSTAAYGFVVGVRNDEDRRNVLTNAKKHLGKTYLLNIDLQDFFHSVTRDQVLDILLKPPFNFKRRLPDLLADLLTYNGRLPMGAPTSPVLSNFACRELDRRLSAMAEDLLWTYTRYADDMSFSGNRPFDEEKVNSVLRLIREEGFTPNPRKIKRFGPKDEKVVTGLLLTDKVQLEKGYLDQLQQDIQQLADTLRAQNEQGQLATRWVEQFKQQVRGRLSFAGFVLGRRHERYQQLKDAFYTASNPPQEEFGAVSWRGFPYNF

SEQ ID NO: 1502 - protein, 344 aa, unidentified
  source 1..344: note = Related to nan
MKTLSKRRLKQRRDKFLSMRYVDDLAELTSFVRYKLTLIAGVPQYHFFSVPKRNGGLRHIENPARKLKKVQRTLNNFLQAVYFFEKTEAAYGFIIRARDEAPRDIVSNAHQHLNVPWLMNMDLTDFFHYVKREDVFHIFCHVPFNFSEDLAEILTQLTTYKGRLPMGAPTSPVLSNFATIDMDIDLLAFAQARGWTFTRYADDMSFSMDTAPMDSEIEAIRQIAGKHQFLFNETKLKIYGPEDEKLVTGLRLGEEVTLSSAFLQEIREEIDRLQKVVEARAMAGQPPSKWVEKYTQQVQGRMAFAEKVLGEYDPIYVELEKAFNRALNPPDRFSSVNWLDFPYH

SEQ ID NO: 1503 - protein, 324 aa, Emticicia sp.
  source 1..324: note = Related to JACETV010000001.1
MARLLGIEHRTLDYLAERPQYNEFDVPKKNGGFRHIEDPDNELKNVLRLFNDYLQAVYYFRKSDAAYGFVRVPDNDTAPRNILSNAEKHRNRPWMLNVDFLDFFHQIKQIEIYELFVCPPFNFGEELAVLLSKLTTYKGRLPMGSPTSPVLSNFATLLLDQDLLGFATKKDLVYSRFADDLTFSANSPLSVEHLTGIRQICAFYGLKLNENKINFFLPHQTKIVTGLIVTNRVDIPHTYLEDLRKEIDKLRTVLEINYRTGRQASEWVQRFHQQIEGAIEFIRQIETSKSPDYQQIRQYYAESQQMAENYQPTSWLDFGYHKFI

SEQ ID NO: 1504 - protein, 356 aa, unidentified
  source 1..356: note = Related to JABARE010000025.1; note = Saprospiraceae bacterium
MTLFEQRNNPAMAGKIRTQGNAARFIQLRNCQDLAVSLRIDAYRLQLLVLQPKYNCYSVRKPKGGFRLIEDPQGRLKSVQSRLNDFLQSAYLPLRPECAYGFTRAKSEDDDRTVVGNALQHLGCRYLLNIDLKDFFHQVSDEKIDGVWQSHFRRFDAGLRQLLTGLVCFRQRLPMGAPTSPALSNFASLEMDHHLTEYAHRSCMHYTRYADDLSFSSTEPIGKGEYHDLRNIIGECGFEVNPSKVRWFGDGEAKEITGIELGEECLRLPGNYLGRLAREIERYRAFFELESRYQTGASGKKLKLFEQELRGKLEFARQVLTEDDPVWQKLAESFEQAQFALEDFESVDWLDCPYLY

SEQ ID NO: 1505 - protein, 345 aa, unidentified
  source 1..345: note = Related to JADJYQ010000001.1; note = Saprospiraceae bacterium
MSIKTAIKIRAKRFSKIETLRDLCSLIRKHEQQVVLMAHQPRYHRYEIPKSKGGLRLVEDPEKKLKIVQTFINEHLQAFYSLIRPECVYGFVIKREAGEDRTITGNAMQHLGCNYLLNVDLKDFFHQVSRVRVEEIFKIHFNHFHDELIDILARLTTYHDRLPMGAPSSPVLSNMASIEMDRELIQYSKHTGLVYSRYADDLSFSTLDLMEPEHLDNIKSIISQCGFNVNPQKIKWFGHEDRKEITGILLDGNRLGLPELYLEGLQKELMRYKSYMEVESRYRTGASAKKLKLFESELRGKINFALTVMPEDQGVGKLFDQFEEAKEIMQDFESVSWLDLPYEFF

SEQ ID NO: 1506 - protein, 344 aa, unidentified
  source 1..344: note = Related to JADJXG010000001.1; note = Saprospiraceae bacterium
MANRSTIRSKAKRFEKLRTVFEFAHWLGREEAKLQLLSFKPRYKEYQIPKPGGGWRQIEDPEPKLKSVLQKLNEHLQACYYSVRPASAYGFVISASEDEDRNIVTNAKKHLGCKHLLNIDLKDFFHQIREDKVVAIFSRHFPQFEDALIDLLARLVCYKARLPMGAPTSPVLSNYAAIPLDEQLMAYCSQSGISYTRYADDLSFSSKQAISRIDYEHFLHCVQTCGFEVNPKKIRWAKENNPKEITGLFLKMGEVCLEENYLRQLETEIGRYITYYEVEARYRTGASMKKLKLFEQELRGKLSFAQLVEPDNERIDYLRDQMDQAKEALEDFESVHWLDLPYGF

SEQ ID NO: 1507 - protein, 345 aa, unidentified
  source 1..345: note = Related to JADJKX010000012.1; note = Saprospiraceae bacterium
MAASSTVKLRARKFSQLRSVFDLAHVLKVPQHNLVLMGSKPRYRVYEIPKPKGGMRLVEDPEKSLKKIQSHLNDFLQAAYYLIRPDCAYGFTIACPGDQLRNIKTNAERHLNCKYLLNIDLKDFFHQVKDIHLINLFNRHYPEFDSELVSCLSNLFSYHGRLPMGAPTSPVLSNYAMLELDHGLQNYCKSGGIVYSRYADDLSFSSTNQIQDFDFVSIDAMIKDYGFEPNPKKIKWYEPKDKKEITGLVLGDDGVELQDGYLQHLYQEIQRYKIYLEVESRYRTGASLKKLKLFEQELRGKIQFATMILPENEELLNWMQMVEDAMSVLENFESVDWLELPYSIY

SEQ ID NO: 1508 - protein, 333 aa, unidentified
  source 1..333: note = Related to JADJZM010000017.1; note = Bacteroidetes bacterium
MKCRTTDDLAQACQTDANQLVLFGLKPRYKEYYIPKNKGEMRLIEDPSKELKKIQTHLNKLLQAWYYTQRSDASHGFGIATSKDEQARGIKTNASVHLQCNYLLNIDLLDFFHQIEFPRLQKTFETYLPKQKADIRNLLLQVCCYKNRLPMGAPTSPVLSNIACLDLDGSLQQLCKHANLNFTRYADDLSFSSLLPIEKEVQDMIKDAIMHEGFSINYNKVNYFSIEDEKLVTGLVLHPDGVRLPKEYVPLLLKEIERLKIINDVEYRYQTGMSRKKLNLLEQEIQGKIRFVSDVLGSHAIETLSIEKAYLNAIQAPEDFESLSWLELPYEFL

SEQ ID NO: 1509 - protein, 341 aa, unidentified
  source 1..341: note = Related to JAGOCA010000053.1; note = Saprospiraceae bacterium
MATGIPIIRKRQRAVLNVKSMSDLSKLLQCQEHVMAAHALTPEYDTYFIPKKNGKRLIEDPNPVLKEMQGILNDHLQAVYFYIRPAGVFGFCISSTTGEEKNIVSNAKKHIGNDYMINIDLKDFFHQIKTNRVAQIINDVFLHSETEVKEMMTALMVYKGRLPMGAPTSPILSNFALQNLDHEITNICQSFGVTFTRYADDLTFSSMEYMNDTFEAMIKDAIVYEGFEINPEKVKHYLPSSIKIVTGIVVGREDLRLPELFLDQLQKEVIIYGNVVLAEHRYQTGMSQKKLDQFRQEISGKINFAAMVDSENPKLLKITDTFNANDEIENLSFDWLDIPYA

SEQ ID NO: 1510 - protein, 344 aa, unidentified
  source 1..344: note = Related to JADJXD010000001.1; note = Saprospiraceae bacterium
MATNPRIIKKRKDAIDRVRTTADICKILGENELRLQLMANSPRYKVYTIRKKNGNLRLIEDPEIQLKEVLRTINDHLQAVYYYQRPDCVHGFCISSTHDPDRNVVSNAQAHMMSATMLNIDLKDFFHQISVSQVKGIIKRQFHRWDNYLAAMIASLCTYKKRLPMGSPTSPILSNFAMLELDHELMQLSRVFEVTYTRYADDLTFSSGSDLPTDFVKMVRDALQHHGFTVNENKVKYYQASDIKIVTGIIVNPTGLSLPDDYMTQLRTEIDLYRNSRLVDAMYQTGMSERKMTLFEQEIIGKLNFGYMVMPDDPELNELNQLFEVEIDVESMTQSWLDIPYNMM

SEQ ID NO: 1511 - protein, 345 aa, unidentified
  source 1..345: note = Related to JAIBAX010000022.1; note = Chitinophagales bacterium
MMSSLKIKQQVQSLLRSKSVDDLAKVLKFTAENITLLSISKKYEVYKIPKKDGSFRMIEDPYAPLKALQKRLNEVLQCYYATIRPSPVYGFCISTSPDKPLNIKTNAQRHVGNPWMINIDLKDFFHHISEKRVQNIFSTNFKHWDKNLVKTMAAIATYKHRLPMGAPTSPVLSNLACINLDHELQNFTKNSGITFTRFADDFTFSAHHELNKNDIDIIFSALHHYGFLENQKKVVIYPPDDIKIVTGLVVGNDDVSLPKDYIPQLLIEIDRLKNILSVEKRYQTGMSNKKLQLFKQEIEGKINFATTILGNQHVDIQHIEQAYIDATAPEDDYLSMNWLEMPYSL

SEQ ID NO: 1512 - protein, 341 aa, unidentified
  source 1..341: note = Related to nan
MKRKKLNTIYKKITSIRFIEQLGFLTGISPHIMVLQSVLPKYDMFYVRKRTGGKRLIENPNPILKNIQRKLNKYLQVVYYIHCPQPSHGFVINVKRGKKKGIISNAKVHIGNDYMLNIDLKDFFYYIKYNTVYKIFNSDLFNFNTYLVKILADLCCKDERLPMGAPTSPVLANLACIDMDLKLESICNSFAIKYTRYADDMTFSGLNPIPDHLIKKIYSIIDEYGFVVNEKKVKLRGINDQKKVTGIIVGDGLSLAEFFFEETLIEISKLKTLMELNYRYRGNKDKLVNKHKQKIDGYINYATQIYGKDNEKVQQLIDELDKAMSIEDFIEPMSWDDFPYV

SEQ ID NO: 1513 - protein, 311 aa, unidentified
  source 1..311: note = Related to CP058707.1; note = Bacteroidetes bacterium
MKSNPLYTDYRIKKNSGGFREIEDPCPVXKKIQRGLNGYSQLEYSSCRPQASHGFCVALPKEEIPRGIKSNALCHLGNPYMVNFDFKDFFHQIRSEQIHKILKEQFPEQHSDLRTTLXIRLTTRNDRLPMGAPTSPVLSNFACIHLDEELDSICRASSITYTRFADDLTXSSKKVIESVELKMIRDCINNHGFQINEQKYKYSGPGNEKIVTGIVLENDRLGLPKTFLSQLRNEIERYNHVLMVESRYKTGMSHKKLKLFEQELQGKLSFATEILFPDDPVLLELIREFEHLLNSPEDFELTNWLDIPYNF

SEQ ID NO: 1514 - protein, 343 aa, unidentified
  source 1..343: note = Related to JAEUUL010000001.1; note = Bacteroidetes bacterium
MKNSGITYQSNLFHALQRTADLEKLLHTDIPGLIQLFREKPYQSFYIPKKNGGRRLIENPKPVLKEMLKRLNLLLQCSYLQFRPKCVYGFTIRKGSEKSRNIISNARRHVRKKFLLNIDLKEFFHSVKENRVRQIFESKLGKKDPLLVLLLSKLVTLNGRLPMGSPTSPVISNLALLDTDWELEALCSNLQLEYTRFADDLSFSSNQRITTKDIQLLKQVIRYHGFEINREKVKLYGPEDTKWVTGLIVEETVKLPPDYLLLLEKEIFRFKEFTLLHHKYKSGADEDKIKLIQSEIRGKWNFANMVIPGDEKLMELQLQMEYAFNPVEEYESTNWLDMPYTFF

SEQ ID NO: 1515 - protein, 336 aa, unidentified
  source 1..336: note = Related to JACJYP010000014.1; note = Lewinellaceae bacterium
MYTFSEQKSELNTTQVTALGKRFENLRSVAELAGLLGTTEPLLSRQMARPVYYTFYIPKPGGQKRLIQHPAPALKIVQQSLNRYLQAMYYGVKPDCAYGFILSPSDELRPRNIYSNALAHLKGEWFLLFDLKDFFHTVTLTHLRDLFRNVLFFPPELCNALCQLCAYQGRLPMGAPTSPVLSNLCCLFFDYQLERLAAGAQAVYTRYADDLTFSFRSEPPSGFADEVRMVVLRHGFAVNESKVRLQSRPEQPEITGLVLGKNALPVPGKNWLKSLKQEIKIYTWLMSEAVRERGLFHAWVFDRFRRSVQGQIEFLGFILGKDHREYRKLAGKVRWG

SEQ ID NO: 1516 - protein, 334 aa, unidentified
  source 1..334: note = Related to JADLDL010000205.1; note = Saprospiraceae bacterium
MYTFSEQKSALHTTQLATLGQRFEALNDVQGLAKLLSVSEAVIAKHVDKPVYHSFHIPKPGGRKRLIQHPTAALKAIQQVLNHYLHAVYFGVKPDSAYGFILSPVDELRPRNIYSNALAHSKGEWFLSFDLQDFFHTVTLTQLRDLFRRVFFFPPELTAALTGLCTYQGRLPMGAPSSPVLSNLCCLFFDFQLEQLAASAKAVYTRYADDLTFSCRQAPPPEFGDQVRQVVLRHGFVVNESKVRLQTRLEQPEITGLVLGKKVLPVPGKAWLKRLKQEIKMYRWLMSEAVRERGLFHAWVFDRFRQSVAGQVEFVGFILGKDHGEYRKLAGMVR

SEQ ID NO: 1517 - protein, 336 aa, unidentified
  source 1..336: note = Related to QWGW01000034.1; note = Haliscomenobacteraceae bacterium CHB4
MYAYLPPKSDLTTLQLKALAQRFEALTDVPGLAKLLGITENSLTKAAAKQDYLSFYVPKPGGEKRLIQHPASALKMLQQTLNGYLQAVYHGIRPDCAYGFILSPADELQPRNIYFNAMRHIKNEWFLLVDLKDFFHTVTKTHLKNLFRHLFFFPPDLTSVLTDLCSCQGRLPMGAPTSPVLSNFACLGMDHQMEKLAETHRAVYTRYADDLTFSFSTPPPADFLESVRAIVLFHGFVVNDKKVRLQSRLEQPEITGLVIGKGSKPVPGKEWLKHLRQEIKIYRWLMSEAVRERGLFHAFVFDRFKKSVLGQVEFVGFVLGKGHKEYRKLAGKVRWG

SEQ ID NO: 1518 - protein, 336 aa, unidentified
  source 1..336: note = Related to JAGNMJ010000669.1; note = Saprospiraceae bacterium
MYYFQQFKSELSTAQLRTLSSRFEALESVKDLSVLLKKETPALMKMAESPSYQEFYIPKPGGEKRFIQHPAPTLKAVQQELNRYLQAVYYGIRPPCVHGFVVSPGDESQPRNIYTNALAHTRGHWFLNIDLKDFFHTVTAQHVFDLWRHIFWFPEHLSTLLACLCCYGGRLPMGAPTSPVLSNLVFYELDGQLLQLARSSDAIYTRYADDLTFSFPRPPADDFTDRVRHLLLTHGFTVNEKKVRLQGRLEQPEITGLVVGHGAKPVLSKSYLKTLKKEVVIYRWLISEAVQKRGFFQQWLFDQFRKSITGQIEFAGFVLGKGDRVYQRLAGKMRWG

SEQ ID NO: 1519 - protein, 333 aa, unidentified
  source 1..333: note = Related to SCUG01000636.1; note = Saprospiraceae bacterium
MYDIAPPSLELTLAQMDAKAARFLAIKHPGELAGLLKADAALLAKFAAKPHYAVFSIPKPGGAKRIIHNPHPDLKTIQQSLNLYLQCAYCQLMPPCAFGFIPRPTDEPRPRNIYTNALVHFGSQWVLNLDLKDYFHTVTSRHLTWVFRELFGFPEALANQLIALASYRGVLPMGAPTSPVLSNLAALPLDQELQPFANLLDAAYTRFVDDLTFSFDTQPTPEVIAAIRQKVEKHHFILNETKIRLTAKKDNPEVTGLILKSPHPDVSGSFLKKLKKDIRLYRRLTTPGMMQRGIFHASVLDKLRRSIAGQVQFVKFIRGRVEKGLKRWEKVVG

SEQ ID NO: 1520 - protein, 333 aa, unidentified
  source 1..333: note = Related to JACJYR010000001.1; note = Lewinellaceae bacterium
MYTIYPPSLDLTLAQSDAKAARFLAIKHPGELASLLKADAAKLAKFVAKPYYQVFSIPKPGGARRIIHNPHSDLKTIQQTLNMYLQCAYYQLKPPCAYGFIPRPTDEPKPRNIFTNAMTHLGSEWVLNLDLKDYFHTVTSRHLTWVFRELFGFPEALANQLLALVSYRGVLPMGAPTSPVLSNLAALPLDADLQSFANLLDALYTRFVDDMTFSLEQQPTPEVIAALRQTVEKHQFTLNETKIRLTAKKDHPEVTGLLLKEPHPDVSEHFLKRLKKDIRLYQKLTERSMMERGIFHANVLDKLRRSIAGQVQFVKFIRGRVERELKVWEWAPG

SEQ ID NO: 1521 - protein, 332 aa, unidentified
  source 1..332: note = Related to JABWBR010000013.1; note = Saprospiraceae bacterium
MYGVIPQALELTLAQLDIKANKFRALRHPGDLAGLLKADAAQLAKFAAKPHYQVFHIPKPGGDRRTIHNPQAELKTIQQNLNVFLQAAYYGIKPPCAYGFIPRPTDEPRPRNIYTNALVHEGSEWVLNLDMKDYFHTVTSRHLNWIFKELFELPEALSLHLIGLCTYKGVLPMGAPTSPVLSNLAALPLDAELQGIAAQYNALYTRYVDDLTFSFDAEPDILFTGVVREAVERHGFMLNESKIKLTRKRDHPEITGLILKPPKPDVSKTFLKHLKKDIKLYRELISADMMHRGIFHASVLEKLKKSIDGQLQFLAFIRGKQDKAYLRWAALA

SEQ ID NO: 1522 - protein, 342 aa, unidentified
  source 1..342: note = Related to JAHBTU010000001.1; note = Saprospiraceae bacterium
MQYFRQSFKKLTSQQVLAKGQLLVKARTVKAIAALTMTEETWMREQAVNPQYYAFQAPKANGTFRLIENPHPKLKEFQRALADMLQGVYYGIRPRASYAFVPSTADETSPCNIYTNALRHCKSKWILQLDLKDFFHSISAHRIKELFMRIPFEYPEDTAQVVARLVTSKNRLPMGAPTSPVLSNLICFELDHLLDKLSRDHGWTYTRYADDMTFSGAKRFSNESVEIIRQQIEGNDFVLNYEKTQQHRIEDEPEVCGLALKEDGKPDLSNMFVKDLKADIKTYKQLTSDKMIAQEIFSAEALNRFRQHIEGELAFVRFIKGPNNGLYLKLRFMLADGMLGVE

SEQ ID NO: 1523 - protein, 342 aa, unidentified
  source 1..342: note = Related to JADJYG010000004.1; note = Saprospirales bacterium
MQYFRQPFKQLTAQQVLTKGQFLLKAQTVKAIGSLLLCEEAWMREQAANPQYYAFQAPKANGAFRLIENPHPKLKDCQRLLADLLQGVYYGIKPRASYAFIPSTADETSPSNIYTNALRHCQSKWVLQLDLKDFFHSISAQRIKEMFLAIPFNYPEDTALVMARLVTSKNRLPMGAPSSPVLSNLVCIDMDHQLDKLARDQGWTYTRYADDITFSGERRFTNETVELIRQQIEGNDFVLNYEKTALNRTEDEPEICGLAVKPGGKPDLSERFVKDLKTDIKIYKVLTSDKMIAQEVFSAEAINRFRQHIEGELSFVRFIKGPHHGLYLKLRFMLADGMMGVE

SEQ ID NO: 1524 - protein, 342 aa, unidentified
  source 1..342: note = Related to JACJYO010000002.1; note = Lewinellaceae bacterium
MLYFRQPSKKLTTQELLTKGQFLLKARTLKAIGALLMCDDSWIREQAASPQYYSFQAPKSSGAFRLIENPHPKLKECQRLLADLLQGVYYGIRPRSAYAFVPTTADESSPCNIYTNALRHCRSKWVLQLDLKDFFHSISAHRIKTMFCALPFNYPEDIAQVLAKLLTSKNRLPIGAPTSPVVSNLVCIELDHQLDKLARDYGWTYTRYADDITFSGEKRFKNETVEHVRQHIESNGFVLNFEKTAISRTQDEPEICGLAIRPEGKPDLSSRFIKDLKMDIRIYKTLSSDKMIAQDLFPAEAINRFRQHIEGELSFVRFIKGPNHGLYLKLRYMLADGLPSAE

SEQ ID NO: 1525 - protein, 345 aa, unidentified
  source 1..345: note = Related to RFHL01000354.1; note = Bacteroidetes bacterium
MSTPEYHQLTPATVKLSTHQVAARARTFLSQPHLGQMAHLLGLDKNQLVLLSKSPRYDCFFIPKPKGGKRLIEAPREPLKGTQQRLAKWLQCVYFVHRSEAAFGFMMVPVDDEDPRHIYTHAQRHREATWLLNIDLKDFFHQIPADRVLRLFQQAPFGLTPKAAACLTGLCTFQGRLPMGAPSSPVLSNFACRDLDAELEALARREGWVYTRYADDLTFSGPKPFTQAHWESISGLIGAAGFKMNTKKMRLRHRKDKPEVTGLILKKNPDVSPDFLAGIEADLLVLEALVSERMLLRDIFSRQPVKRLRRSIQGQINFLKAIRGKDHKSCRKLQNRLDQSVIKLK

SEQ ID NO: 1526 - protein, 340 aa, unidentified
  source 1..340: note = Related to JACJYN010000022.1; note = Lewinellaceae bacterium
MYLKISTQTGDKPSAYELQEKGRQFIAADTFPALAELLNIKEETLRAKMYNRKYTQFFVPKPNGEKRLIENPEDWLKSLQGQLNKHFQAAYYMVRPPCAYGALLAVADEVKPRNIYTNALRHIGQKWLLNVDIRRFFPSISYEKVYMTLRRPPFSFNPNAAKCLSMLTTFEQRLPTGAPTSPILSNIICLPLDSMLLQLSKKHGWAYTRFIDDLSFSGENKFKKKHLRAIQGILLSQGFLINEKKLKINRVRDKPEVTGLILKKKKPDISPSFLKRLKKYIHLYHIMTEQDMLNRQLFPAELIQRYRNFINGQLAFIKFIRGEGDKDYLRLFKRFQPRGY

SEQ ID NO: 1527 - protein, 344 aa, unidentified
  source 1..344: note = Related to JADHTI010000120.1; note = Bacteroidales bacterium
MKRGKTRGYQKNAANFLGIRTHMELANLLGISLSQLEVLINKPTYKEYTIRKKRHGVRIIYDPSPMLKAVLKQLSFFLNAVYSTLQNDCVYGFIPHLDKTGPQKNIRENAIKHVGKNHLFSLDLKDFFHSISTKRVFQIFQEEPFNFYKSIAVPLALLTTYRKSLPMGANTSPILSNFACLELDAELSRLASRSDLEYTRYADDLTFSSDLPFTDQLKSDIREIIQKHGFQINEKKVRERSKNRRQVVTGIKVNTKPNLDRKYIRNLRALLFDWRINGIYKAVIHHYNLDGIPTFQQITHFLSSTRGRISFVGFVRGKEDPIYQKLQVEFERLTTFHGHKELSG

SEQ ID NO: 1528 - protein, 362 aa, unidentified
  source 1..362: note = Related to JAJTDX010000011.1; note = Cryomorphaceae bacterium
MKDIQQTAIEFNSEISNGAFETTLVNKKQFTRTQKKALELLRIESDQDLILFSGVSANALLRNINAPVYSEKNIRKKNGGFRSLDIPEKSLKLLQEKLNDHLQSVYTYLRPQTTHGFVRYPNRKSCNILKNASVHTSKNYVLNMDLKDFFHSVNALRVKHVFQNSPFKFNEHLSNCLALLTTYKGRLPQGAPSSPVLSNFAALSLDYKICKLCKTYAIDYSRYADDLTFSSQSFMPEAFKNELNNLIEKEGFHVNADKTRLRSKNRKQLVTGVVVNHKANVDRTYVRKLRAMIFDSEINGLPSAAAKHLNLTTKPTTDHISFFVRRLNGMLAFMSQIRGKDDALTLKMKNRFLNVLSIPLNQ

SEQ ID NO: 1529 - protein, 371 aa, unidentified
  source 1..371: note = Related to DPFD01000024.1; note = Chitinophagaceae bacterium
MRSPAELLAFAKSNKKIIFRYLYGNSDRCPAVLKQLRKHELSALLFLTIESPAELCRFLHTPFFQLENIINHPSYERYTIRKKKGGHRQILEPEEQLKHIQKCLNYSLQAYYLCVKPNQVHGFVVNPHYLGTQCNIVENAKAHTGKKQVLNIDLKDFFPTITAKQVKHVFTSSFFNFSEELANAFTXLLTTYEGNLPIGAPTSPVISNFVCYKLDSDLIHYCKINHLTYTRYADDLTFSSDSDITLYKTLEIVNLIKKNHFEINEKKLRKQSCNRRQSVTGLTVNEMVNVDRRLLKKIRAMLHDLTRSGMLAAAQRHFKMAWESEAQLKMMFMYRLRGYINFVGQVRGKSDALFLRLKASYENVVRTTDLV

SEQ ID NO: 1530 - protein, 378 aa, Pedobacter glucosidilyticus
  source 1..378: note = Related to JMTN01000017.1
MITIEEILTLSKTNKSELQKYFSGGSYHLDKSMESFQKHELNALYFLSIEEPKELTRFFKTSFFQLEEILNNPLYKNYTIKKKRGGARQICEPEKHLKSIQKRLNYFLQAYYLWIKPNEVHGFVVNPHYLGIHCNIVENAKVHVNKKDVLNIDLKDFFPSISAQQVKNIFSSNYFNFNEQISTALTLLTTYEGKLPIGAPTSPVISNFICHQLDNDLITFCKQNNLTFTRYADDLTFSSDNTISDDNTLNIFDLIKKNQFEINEKKVRLKRSHRKQTVTGLTVNSKVNVDRKLLKKIRAMLHDLVKNGIETSVKKHFNIGNIEQRHKVIFINRLKGYINFVGQVRGKNDSLYLKQKSTFNNILISSKGKSLEIDMKQA

SEQ ID NO: 1531 - protein, 434 aa, Flavobacterium branchiophilum
  source 1..434: note = Related to VFPJ01000001.1
MSNIYNIAVVFLQPKSSCKQENIAIYCDAHCVPLLINSKKTKDNLQRLFLNKNRMTVPEIQQLVQRHKKEFKKYFSDDFYLTNLALQDFKKHELNALCLLSIEEPFELAKFLTTPIYHLEELLNNPPYKHFTIQKKRGGTRQIFAPENSLKGIQKRLNYFLQAYYLWLKPHHVHGFVINPHYLGTSCNIVENAKVHVSKNFVLNIDLKDFFHSITANQVKDIFSSHFFNFSEPIAIALTLLTTYKGKLPIGAPTSPVLSNFICHELDDDLLRFSAENDLTFTRYADDLTFSSNFKISHDITLDIINLIKKNFFEINSKKIHLKTQNRKQIVTGLTVNQKVNVDKKLLKKIRAMLHDVSINGIEKAAQRHFKLNKIDKRYSSQFMNRLEGYINFVGQVRGKGDTLVLKFKEEFKLIFEIEIHKESNKKLDENNIK

SEQ ID NO: 1532 - protein, 376 aa, unidentified
  source 1..376: note = Related to JAFDYI010000013.1; note = Bacteroidetes bacterium
MPTIEEIVTFSKAHKSNIQKYFNGGHPYSTLPKLVQKIKKHERNALFLLSTETPTELCTFLKTPFFQLEEIINNPIYKQYEIKKKRGGNRQIYSPEKKLKAIQRRLNYFLQAYYLWIRPNEVFGFVVNPHYQGTFCNIVENAKPHTGKKHILNMDLKDFFPSISASRIKSVFASSYFNFSEQIATALALLTTYEGKLPIGAPTSPVISNFVCFQLDADLKNFCETTGLQFTRYADDLTFSSNLLISNETVLDIINLIKKNGFEINEKKLRLKSSNRKQTVTGLTVNERVNIDRKLLKKVRAMLHDLTTNGIDVAAKRHFNWSGETDAKQRSKFIHRLEGYIHFVGQVRGKNDAVYTKLKQPLDKFSATQQRAEQMW

SEQ ID NO: 1533 - protein, 372 aa, unidentified
  source 1..372: note = Related to JADLGP010000058.1; note = Chitinophagaceae bacterium
MPIVKEILTFSKDHKSKIQKYFNGGYLYSKTPKLLQEKKKHELNALFLHTIETPAELCKFLNTSFFELEELINNPVYKNYTIRKKKGGERQIYSPEKKLKAIQRRLNYFLQAYYLCIKPNEVFGFVVNPHYLGNYCNIAENAKPHTGKKHLLNIDLKDFFPSISASRIKSVFTSSYFNFSEQIATALTLLTTYEGKLPIGTPTSPVISNFVCFQLDADLKNFCKTNGLQFTRYADDLTFSSDTLISIDIVLDIINLIKKNSFEINEKKLRLKSSNRKQTVTGLTVNEKVNVDRKLLKKIRAMLHDLTTNGIDIATKRHFNLNGEIDTKHRGKFINRLEGYINFVGQVRGKNDTVYIKLKQPFDKVFSNTATC

SEQ ID NO: 1534 - protein, 366 aa, unidentified
  source 1..366: note = Related to JAGOLH010000034.1; note = Bacteroidales bacterium
MTNTSTIIEFARRNKGVLQNHLADGSLRLPVALEILEKHQLNALYLLSIETPIDLCSFFKSGLLQLESIINNPQYTHYTIKKKRGGNRHIYAPNKKLKAIQKRLNYFLQAYYLMIKPEEVHGFVVNPHYLGSHCNIVENAKAHTGKKHLLNIDLKDFFPRITAKQVLDLFSSPVFGYSDQVATAITLLCTYEGRLPAGAPSSPVISNFICLNLDADLKAFCATHNLEYTRYADDLTFSSNAAIETNTLLDIISLIQKNNFEINSNKLRIRPANRRQIVTGLTVNEKVNVNRKMLKKIRAMLHDLSTNGVETATRKHFKISGKAKPFQEGKFLQRLEGYINFIGQVRGKTDALYIGYKEQFEQAFEN

SEQ ID NO: 1535 - protein, 356 aa, unidentified
  source 1..356: note = Related to JAGNBV010000013.1; note = Bacteroidales bacterium
MIQKYHFEGLYLNNIVLQQFTRHELNALFILTVKKPLELVKIFNVSFCMLEEQINHPAYRYFTLPKKNGGSRDIYAPSVKLKSIQQCLNYYFQAYYLFIKPEEVHGFVINPHYLGKRCNIAENAKAHVKKKYVLNIDLQDFFPNIKAKRVKETFLSPVFNFNEQIATALTLLTTYKGLLPAGAPTSPVISNFICLKLDKELKYFSELNDLTYTRYADDLTFSSNHEIPGDMILDIICIIHRNDFRINEKKLRLKPSNRKQTVTGITVNQKVNVDRKLLKKTRAMIHDLGTHGLYAATSRHFKVAEDKNSSLNAKFIRRLQGYINFIGQVRGRDDAVYLKLKTTYLSLFSFQTEDFC

SEQ ID NO: 1536 - protein, 371 aa, unidentified
  source 1..371: note = Related to JACPOC010000038.1; note = Bacteroidetes bacterium
MNSQEEILSILIPAKDKIWNSFYGIPIRKKSKQLEQLKKHELNALLLLTINKPSRLAQFLSTPFFELEGIINNPNYRHYTIPKKKGGMREIYAPANSLKKIQRRLNYFLQAYYLCIKPKEVHGFVVNPAYLGKKCNIVANARLHIGKSHVLNIDVKDFFPSISAKQVKGIFSSHLFNFNDQISNALTLLTTFEGRLPAGAPTSPVISNFVCTKLDSDLIEFCSLNSLSYSRYADDLTFSSNNVIDNDIILDLINIINANNFKINDKKLRLKASNRKQTVTGLTVNEKVNVDRKLLKKIRAMLHDLTTNGIDKAAKHHFNINKDIDEKLRGKFIYRLEGYINFVGQVRGKKDLLYVGLKSKFDNEFKVIPLS

SEQ ID NO: 1537 - protein, 368 aa, unidentified
  source 1..368: note = Related to JADKCP010000006.1; note = Bacteroidetes bacterium
MNSPEELIYLARNKKWLVWKDNFLELAGKDLALHKFKKYELVALRLLSIETASNLVKLASVSLDTLQNNLNHPEYKHYQTKKKKGGSRLINAPTGELKKIQKRLNNYLQAYYLCLKPKEVHGFVLLAPLIQQRSNIVANAEVHVGKKFVLNLDLKDFFPSITAKRVKAFFMSPLFNYNEQIANALTLLCTFQGKLPIGAPTSPVISNFICLKLDADLQNFCAANELNYSRYADDLSFSSNSSISNDTILDLINLITKNDFTVNYKKLRLKSSNKRQTVTGITVNEKVNVNRVLLKKIRAMLHDLTSNGLEVATHKHFKFNGFVDQKYKERFLFRLKGYINFIGQVRGKEDFIFLKFRNELKMILIEIT

SEQ ID NO: 1538 - protein, 386 aa, unidentified
  source 1..386: note = Related to JAFDYB010000054.1; note = Bacteroidetes bacterium
MKNLPDISIALKNVRENFNSYFNWNSLPQNKSEKYKLHEINALILLSIKIPTHLCLALSNSISGIEVLINNPVYTELKVKKKSGEFRQIYAPNYELKRVQKRLNYFLQGYYLCIKPNEVNGFVINPFPFDAKCNIAENAKYHVNKKHVLNIDIKNFFPSISAYRVKKIFTSELFNFNEQVATALTLLCTYKGVLPIGAPTSPVISNFICFQLDRDLKNFCNEKNISYSRYADDLTFSSNEKITDEIISEITLLINKYGFELNKNKFRLRLSNRKQVVTGLVVNEKVNIDRKLLKKIRAMLHDMSRNGIEVAAKRHFKSENPPIKTNSLTNKNTAIFESEQSDNEINIAFACRFKKIVIGYINFVGQIRGTDDRLYNSFKAAYKNSW

SEQ ID NO: 1539 - protein, 392 aa, unidentified
  source 1..392: note = Related to JAIBCH010000012.1; note = Saprospiraceae bacterium
MMTVEEILKLSKTSKSKLQKYFSGGSYHLGKSMENFKKHELNALYFLSIDKPAELTRFLKTSFFQLEEILNNPTYKNYTIKKKRGGTRQIFAPEKHLKSIQKRLNYFLQAYYLWIKPNEVHGFVVNPHYLGTHCNIVENAKVHVNKKFVLNIDLKDFFPSISARQVKEIFSSTCFNFNEQISTALALLTTYEGKLPIGAPSSPVISNFVCLELDLALKEFCQKINSEYFYNDNNKLLHKKKQFVFFETYDIAYSRYADDITFSSNIPISTEMLSNIISIIHQYGFELNEKKLRFKLSNRKQTVTGLTVNEKVNIDRKLLKKIRAMLHDLTTNGIEQSVQRHFKVTNIEQRHKATFINRLEGYINFVGQVRGKSDSLYVKQKTAFDNVFEQRK

SEQ ID NO: 1540 - protein, 333 aa, unidentified
  source 1..333: note = Related to JADJOU010000017.1; note = Bacteroidetes bacterium
MKHEKIINFVESNLEIIRSNINSREIIFGILQGPQHKFQRNAAVFLSITHAYDLCNFLQLSYSVLQNQINNPVYKQFEIKKKSGGMRSIEEPNDILKGIQKRLNYYLQAYYLWIKPAEVHGFIIRPQQYEHRYNIVENARAHIGKKHVLNLDIKDFFSSISVAQIFELFQSDYFRFNENMCVALTLLVTHQKHLPTGAPTSPVLSNFICLGLDRDLREFAEANQLTYTRYADDLTFSSDVHIPEDVVLDVMNILKKHAFDINPKKIRMSSSFRKQVVTGITVNDKVNVDRKLLKKVRAMLHDFAENGLKEATSKHFKISVDEDSIYCRVLSID

SEQ ID NO: 1541 - protein, 362 aa, unidentified
  source 1..362: note = Related to REAG01000285.1; note = Cytophagales bacterium
MLTPFRFASLVFKIRYAPPNFVKKMIRIVNKRYHFLKIKNASDLSKLLFVSFENLQIEINQPTYKTFEISKKSGGKRIIHQPLDNTLRIQNELLSIFQNYYTKIKPNHVHGFVSYSKKDGKKSNILENAKPHVGKKHLLNIDLKNFFPSITAKKVKQLFESDFFKFNTNIATSLALLTTFEGKLTIGSPTSPVISNFICYPMDIILAEFCKKNNLTFTRYADDLSFSSYDYIKNDTLLDIINIITENGFDVNYKKLRFANSNAKQTVTGITVNQKPNVDRTFLKKIRAILYDINQNGLEMAAFKHYSISKKGENTLSFLNVLEGYILFVRQIRGVNDTYYQCFNNKLKEIRLKNLEIENKKI

SEQ ID NO: 1542 - protein, 364 aa, unidentified
  source 1..364: note = Related to JADKDL010000038.1; note = Bacteroidales bacterium
MNNIKNKAKQWRNKYVSTETKRFTFNKNERKRYTFNALHLLSLENETQLCRMLDISLDTLSEVINNPVYQTFEIPKKKGGKRTIDAPEDILKDIQRKLNYFLNAYYLMINPEVVFGFVIQPHELGKICAIAENAKPHVGKRQVLNIDIKDFFPSIKTTHVKALFQSELFQFDEHLASLLALLTTYKGTLPIGAPTSPAVANFICYQLDKELQEFCKENDLSFSRYADDLTFSSDTKFHSDTILDIVSMINKRGFSINEKKFRIQSANKKQTVTGLVVNAKVNVDRKFIRKLRAIMHDIRLNGVKIAAQHHFNLKQEPDEKLLAYFIHRLEGLINFVGQVRGNHDKIYTRFKYEFDEIFTTSLNV

SEQ ID NO: 1543 - protein, 368 aa, unidentified
  source 1..368: note = Related to JADKCJ010000003.1; note = Bacteroidetes bacterium
MNNRKEMARRWRKKYVSADTNRFKFNKKARQKHTFNALHLLSLENENQLCRMLDIQLGSLSNVINNPIYQSFEIPKKKGGKRNIDAPDDELKNIQQKLNFFLNAYYLMIKPNAVFGFVIRPSEYGKICAIAQNAKQHVGKYQVLNVDIKDFFPSINAAQVRALFQSEIFQYDEHLATLLALLTTYKGKLPIGAPSSPAISNFICQQLDDELQLLCNAKEIAYTRYADDLTFSSSVKIDTDFILDIVSIINKHHFRINEKKFRIQSENRKQTVTGLVVNQKVNIDRKYIRNLRAILHDIRLNGVEEAAKNHFKLKQRPNDTTINYFINRLGGLINFVGQVRGNQDFIYYRFKGTFDELFASRLKQPKYF

SEQ ID NO: 1544 - protein, 352 aa, unidentified
  source 1..352: note = Related to JADLAH010000132.1; note = Chitinophagales bacterium
ADTGRFFFRRDAPQRYPFNGLHLLSVEHESQFCKMLDVTLKAMSALIHHPAYTTFEISKKKGGKRTIEAPDEDLKEVQRRLNYYLNAYYLMIKPASVFGFVIQPKENGRYCAIAENARPHVGKKQVLNIDIKDFFPAIKAGRVKALFTSEIFGYNEHLATLLALLVTHKGALPVGAPTSPAIANFICYPLDMELMQFCSDHGLTYTRYADDLTFSAEETIDTDDILDIVSIINSHHFAINEKKFRIRSAHQQQMVTGVVVNRKVNIDRRLIRRVRAILHDIQQNGLIAATMRHFRIDEMPDDAAISYFSRRTVGLVNFIGQVKGPKDPVYLRYKRILDDLFPSSVSSPKTYF

SEQ ID NO: 1545 - protein, 359 aa, Flavobacterium sp.
  source 1..359: note = Related to NZ_CP089095.1
MTLINKIHTRLAEYNSYYYGPFEAIEFRFEQTFFVSKLLSLIEISDLCLLLKTRLFDIEHVINQPQYETFQIPKKRGGSRLIQTPESQLMFIQSRLNFYLQNYYHLIRPECVHGFVINPNKNEKKCNIVENAKIHVQQKYVLNLDLKDFFPSIQAYRVKELFLSDYFRYTEHIATALTLLVTYDGKLPIGAPTSPVISNFICLELDEALSVYCKKNEIRYSRYADDLTFSSNHFISKTIITDLEYIINSFQFKLNPKKTRIKTKNRKQTVTGLVVNEKVNVDRKIIKMVRAMLHDTLQNGISKAAKKHFKSINEIRNTSEAYFLNRLEGYINFIAQVRGNDDSIVIKFRYYYKMIFQLA

SEQ ID NO: 1546 - protein, 359 aa, unidentified
  source 1..359: note = Related to AAXX01000006.1; note = Flavobacteria bacterium BAL38
MILINKIHARLEEYNSYYYGPFEAIDFRFDQTFFVSKLLSVVKIADLSLLFKTRLFDIENLINHPQYETFQIPKKRGGNRLIQTPESQLMYIQSRLNFYLQNYYHLVRPEGVHGFVINPNKKEKVCNIFENAKIHVQQKYVLNVDLKDFFPSIKAYRVKELFLSDYFRFNEQIATALTLLVTYEGKLPIGSPTSPVISNFICLELDSALSAYCMKNEIRYSRYADDLTFSSNQSISKAQYTELKEIIEQNQFELNVKKTRLKSNNRKQTVTGLVVNEKVNVDRKIIKMVRAMLHDTLQKGISKAAKNHFKSKNEIRNTSETYFLNRLEGYINFIAQVRGHDDPIVLKFKYHYKMIFQLA

SEQ ID NO: 1547 - protein, 363 aa, Flavobacterium aciduliphilum
  source 1..363: note = Related to NZ_QLSZ01000003.1
MNNPLKTIDKIHTRLEEYNAYYYGYQGDVVFKFNQTFFVQQLLSVVKLSDLKVLLKLNFSWLGPLINAPHYDSFSIPKKSGGMRKIEAPEVLLRATQARFNFYLQHYYHLVRPEGVFGFVINPNKKESFCNIVENAKLHVHKKYVLNLDLEDFFSSIKAYRVKALFQSEYFRYTEEVANALALLVTYNGTLPTGAPTSPVISNFICLQLDAMLLAYCNENALHYSRYADDLTFSSDREITTLHLEELSKIIHSNHFTINSKKTRLRLHHRKQTVTGLIVNEKVNVDRKTIKMVRAMLYDALQNGVSKAAKKHFSITKETSQMSDTYFLNRLEGYINFIAQVRGKEDAMVQKFKEEFKMVHLLS

SEQ ID NO: 1548 - protein, 374 aa, Flavobacterium nackdongense
  source 1..374: note = Related to NZ_CP037933.1
MKHKLLLDKIHSRIEDYNRYFYSSENDVIFRFEQKFFVTKLLSIVTIPDLKILFKVHLSYIEKVINEPNYTSFLIPKKNGGNRLIQSPESDLKKIQMKLNFYLQQYYHWIRPDGIYGFVINPNKKEKICNIVENAKVHTNQKYVLNLDLKDFFPSIKAYRVKELFLSEYFKFSDCVATALALLTTYEGKLPIGAPTSPVLSNFICLELDADLVAFCNKNQINFSRYADDLTFSSNNEITDETINIISEIIKKNQFSINPKKTRLKSSNRKQTVTGLVVNKKVNVDRKTIKMVRAMLYDASNNGITIAAIKHLKLDRNANVVDVSYFLNRLDGYINFISQVKGDDDLLVLKFKSEFKNLAKMKTKHIKSNSYNNS

SEQ ID NO: 1549 - protein, 400 aa, unidentified
  source 1..400: note = Related to JADJXZ010000007.1; note = Crocinitomicaceae bacterium
MVTAFTCFCVAHCVPLLKADEIQIISNGSFFMLTSDELISTARRYKRWMKLNYRLRYSMRPAVLNHLSKNEFESARLLMIENSHDMICFFDQIPKSYLEKILNEPNYTEYALNKKKGGQRKIQIPEPVLKRMQKKINAALQAYYLLIGYENSFGFVKKTSHAAFTSGIATNASKHIGQQVVLNLDLKDFFESVSAARIFTLFKSPLFKFNEDIAAALALLCTWQKRLPTGAPTSPILSNFICLELDQNLHEFSLKNKLNYSRYADDLTFSTNERITEEMKIELKEIICRNQFEINAKKWRIRTQNQKQLVTGLVVNEKVNVDRKFIRKIRAMIHDLKLNGLENATGNHFRKSTKNNHELQFRFINKLHGYIDFIGQVRGREDTIYKKFKWELVPFGMADS

SEQ ID NO: 1550 - protein, 364 aa, unidentified
  source 1..364: note = Related to JADJEU010000021.1; note = Crocinitomicaceae bacterium
MTKTNDIIQYARANKKWAQHRKVSIANGTAGIKDVIQQREMAALHFLCMDSAHDLTRLFKRDISFVEYCMNYPVYVEHLIAKKTGSKRIILAPDKNLKRMQRGLNYYLQCYYNLIKPDVVFGFVKTIRRQKNPSAIVQNASMHQKKKYLLNLDLENFFPSISAKRILTLFSGPHFQFNSEIATALALLTTYQGKVPVGAPTSPILSNFICLEMDEQLIELASRHQLTYSRYADDLTFSSNEFITPEILKEIRSVIEQNQFKLNEKKLRFRNAGKQQIVTGLTVNEKVNVDRKFLKKVRAMAHDLEKNGLEDAAQKHFRRNSPSEEMNATFLNTLAGYVNFIGQVRGKEDGVYLRYKRIFSPIPS

SEQ ID NO: 1551 - protein, 352 aa, unidentified
  source 1..352: note = Related to JAIOZE010000006.1; note = Crocinitomicaceae bacterium
MKLKINSTMKWESILEKRDSHAANIRRLICTSNGVIPSFSHSLREGRVLTFLSVSNWIELSCFLQLSPIKLEQVINCPNYRQFTIPKKKGAPRLIFQPDPDLMKIQRKLNRYLQDVYSFQLPECVHGFVCKSNQVSRSIVTNAQPHINKQRVLSIDLENYFPSISAKRIKVLFCSWGFNEEIATALTLLCTFKGGLPAGAPSSPVLANLCTMELDSKLIEFSKNNELTYTRYADDLTFSSNDYILDDTILRVLEIIKSTDFSINMKKNRCMGRNSKQKITGIVVNEKLTADRKVKKKLRAMLHDLAKNGLEIATQRHYSIVGQPTDLEQNRFLKHVIGVQSFVNMVNNHRFS

SEQ ID NO: 1552 - protein, 342 aa, unidentified
  source 1..342: note = Related to JADJDM010000008.1; note = Bacteroidetes bacterium
MDKIEVNKIVNASKLNQFRTIELLDKLSCFLKVNTEVFSNRLNYPVYTTNRIPKKKGGWRELLVPETELMRIQSKLNVCLQLYFNKIKPDCVHGFLMNERTGEELRSIVSNAQAHVGKSFLLNIDLKNFFPSISAKRINELLHDKLSLFPNEKMANAVTLLCTYKGFLPTGAPTSPVLSNIVCLPLDYELSTYCENNQITYTRYADDLSFSSNRYFSEKCISEIRQIIKEQQFAINEKKFRINSRKSQQRVTGLVVNNKVNVDRTYIKTIRACLHNWKLNGLEHATAKHYFVIAPSTEEQAQFSNKLKGQIEFIGMVRGKKDEIYIKYKGEFKYLIGSSVFP

SEQ ID NO: 1553 - protein, 300 aa, unidentified
  source 1..300: note = Related to JADJDM010000011.1; note = Bacteroidetes bacterium
MVNPTIFEDRLNSPVYTTNRIPKKKGGWRELLVPEKELKYIQKNLNFYLQLYYNDIKPDCVHGFLMNERNGDKTRGIVSNAQAHTGKAFLLNIDLKDFFPSISARRIKHQLFNELDVFANENIANAITLLCTYQGYLPTGAPTSPVISNIICLQLDKSLMAFCKERNITYTRYADDLSFSSDNYFSDECINELKNLIEQHHFKINEKKFRINSSKSKQTVTGLVVNTKVNVDRKYIRNIRACIYNWRMNGLEFATAKHYQVISPDMEKQTEFANKLKGQVEFVGMVRGRKMKFIRDTEEI

SEQ ID NO: 1554 - protein, 397 aa, unidentified
  source 1..397: note = Related to SSGS01000121.1; note = Crocinitomicaceae bacterium
MHAFSTSFHTHAFHLKISTTALFLLLTMTHSDNKRTEKIREAFFAQIQSEAKEERKQNRLKAIQSREKFVGRFLRMQLAGDLCKLVKEDYNSLNEMINRPNYHSFSIPKKRGGKREITAPDKRLLRVQKKLNRYLQFVYLGVRPTAVHGFVMQVSDGSVQANIVENAKVHVGKRAVLSIDLVDFFPSISAKKVKDLLMGSPFNFNEHIAVPLALLMTAERKLPQGAPTSPVISNFICLQLDETLRIWALNHNANYTRYADDLTFSADLAFSEEQQADLRKLIEAYGFVINVKKLRQRLKNRKQTVTGLTVNTKVNVDRRYLKRIRAMLHDLNTNGIEEATIRHFKLVRRASPEQRLLFVNRLEGSIAFIGQVRGQSDPIYQRMRKAFFDMSSSKKEK

SEQ ID NO: 1555 - protein, 370 aa, unidentified
  source 1..370: note = Related to JAIOZF010000070.1; note = Crocinitomicaceae bacterium
MNKPANEFQPSISNGNFKQTLAERRIEVKKNRIKNFQMRENYSNRFLRMQCATDLCLLLNEPFYNLEFLINKPNYNTFSIPKKSGGKRDISAPEKNLLRVQKKLNRYLQFIYLRLRPTNVHGFVLQVGNHEIQANIVENAKHHVGKKAVLNIDLEDFFPSITARKVKELLKSAPFQFNEDLAIAIGLLTTHKGRMPQGAPTSPVISNFICLPLDHAMQQWSIKNKVNYSRYADDLTFSADIVFSPSQILELRAIIESFGFRLNEKKLRQRLNNRKQSVTGITVNTKVNVNRRLLKLVRAMLHDLRVNGIETATRNHFVSPENPYFDRKKFFLNRLEGSIAFIGQVRGLDDPLYTKMKTEFYLLLDSKNTD

SEQ ID NO: 1556 - protein, 359 aa, unidentified
  source 1..359: note = Related to JAJTDQ010000129.1; note = Cryomorphaceae bacterium
MTVYEFVEKQRPELKQSLRTQTMKIKSSPELTKHTISAGLLLSLQNAQDVCAYFQLPRAVLEQLINSPKYRSFSIAKKRGGKRLIQAPELGLMKVQRILNHGLQSLYACNPNPSVFGFVINDEQANPASPIVQNAAPHVGKAYVLNIDLKDFFPSIRAHRVKELFMSQQFRFNEQTATVLTLLTTYQGRLPQGAPTSPIITNFICAKMDAEMRKIANDKGWTYTRYADDLTFSADLFFDAEAVAEIRSMIVSNHFVINEKKIRQKGKGRRKEVTGIVVNTKPNVKRSYIRQVRAMLHDLEKNGRTIASANHFKNSPVVRENDHSVFINRLRGYISFIGQVRGKEDPIFLRFQEKMKALT

SEQ ID NO: 1557 - protein, 373 aa, unidentified
  source 1..373: note = Related to VEQH01000117.1; note = Flavobacteriales bacterium
MNQTELLAYKATYNSVFRQYLNSPRKTFKPPFLLSKSIQYALYFLAIERPLDMCAFFKIHHQELEDIINQPTYVTHFLLKKKQGLRTIKAPIGTLKLLQQKLNRHLQGVYLNLKPTCAKGFVINPPGSSLKANIVENALPHVAKKYVLNMDIRDFFTSISDKQIYHLFKSSPFDFSPQIAAAFTYLVTVDDCLPQGAPTSPILSNFACRSLDEKLMEFANHHQLNYTRYADDLTFSSDIPFTKEQIATIKKTLREEGFEPNEKKFRLRTSNKKQLVTGLVVNEKVNVDRKMLKRVRAILHDLRLNGASKAAQNFFKSESKPNETDILLFFKKLRGMIDFIGQVRGKEDVLFVKMRQDYSSSFAIEEDRMVYYR

SEQ ID NO: 1558 - protein, 383 aa, unidentified
  source 1..383: note = Related to JAFLBV010000001.1; note = Ignavibacteria bacterium
MLTAILDGIRKNYTKATFYTYRQIVVNKKKGGKRIISIPGLLLRKSQRSLLPFFQQLRTHSCAHGFVVGKSIITHASLHLAKESILTLDIQDFFGSITSEHLEKIFRSHGVQKSEDLELLIKLTTINGKLPQGAPTSPILSNAVVFEMDFELNEWATKNNLIYSRYADDMVFSSETRTIEKTCIDEVSQITQKFGFKLNNSKSRIMPRGKRQVVTGLVVNTKLNVKREYLRNTSAILHNISNNPFSALSQVSRGSVFATYQSYEKEYLSRNLSLSSFHYLIRNQKQQQKLINPTKIRLHRKSHFSNYPIFRLLLLLQGVNGRISFISSVIGENQISVQKLRNQFKEIEKELFGNYSINWSTNTTRLYKIILRECPQLRTRIKG

SEQ ID NO: 1559 - protein, 319 aa, unidentified
  source 1..319: note = Related to PCUD01000174.1; note = Ignavibacteriales bacterium CG18_big_fil_WC_8_21_14_2_50_31_20
MDYFYKKIKRLILAWEDGTPNSDNIPSNYDYSRFKIIKKDGGHRIIYSPYGHLKKIQRGISELLYKNVELHGASHGYTINKSIITNAKQHLKKNCIINIDLENFFQTINTVMLNKSLKLFFPDITDELLIKIIAICSFEGSLPQGAPTSPILSNLVCYSLDLKLSELAISHNLDYTRFADDMTFSTNNKIVELQLKNDINGIIQSEGFRLNEKKYRVLKKRHRQSVTGITVNEKINVTRKYIRGIRAALYNWETYGKKEASRRYFESAKTKICRSHNFEVSLRGKIEFVGNVRGKEDEIYSKFKNKFEIINLFEKINQF

SEQ ID NO: 1560 - protein, 630 aa, Flavicella marina
  source 1..630: note = Related to NZ_VYVA01000005.1
MNINTGILFFVMKKFNYHKIKYKNTELEEFISKELNSHLIKNILKHKSSFYKSFTVLKKNGAKRRIDQPHYKLMDIQKKIANYLLVKRKKNSSSHGFEYYRSIVTNAEKHINKNIVLNLDFKEFFKNISKSQVLSVLRNSFDITNESAYLLTELVTFNNCLPQGAPSSPVISNYVCNNLDNDLKTYCKEYNIIYTRYADDLTFSFNFKKLPRQIVDEIISIIVKHGFKLNDQKFRYFHKNSRQLVTGIVVNDHVNIKREFYKKVRAILHNWKTKGYVVTKQKFDLEYPNKNFRKTLLGWVNYIGYVRGKDNPMYLTLSSSLELLLRTKYPKSEFKTDEKYCDKCKTGILIETKEGGVKNNFKKSNDASYFFECNNEECNFSENIDSKYFFLKSKAYLKNNNLEKVKELLEKSIELDSNNYKAYNNLGVISYNKKEYKVSVEHYSNSIKAYRERAKPYYCRGRAYANLQQFENAILDYLKYIQLSTRKDVLNSVYFHLGQAYFKTHKYEEALNYVNLHIERFEITKAVIALKTACLNNLNNLNKRFELKIYKDASKIYDVIEKNENIWFEYQTIDSDESVKVALVSLIPKGILFNKEINSLSVKGYNLINKKEETYLIDNIANLINVPKEI

SEQ ID NO: 1561 - protein, 442 aa, unidentified
  source 1..442: note = Related to DPRR01000040.1; note = Ignavibacteriales bacterium
MGSSFFNFMSRKFTISQFRKLNNDFLDVESPNKLAEILGIKTSVLIKNIKYQRYTSFTSIHKGKKRIVAEPNFELKQIQRRLNNYLQAIYYFNKHENVHGFVKCVTNEKIRYSILSNALPHVGKSYVINADIFRFFPSITGKMVKDVFLGEPFFFEDNLASALALLCIQKNWLPTGAPTSPVISNLVCMELDEELNVLANKNNYSYTRYADDMTFSGENKPDEKFKDELTSILESFGFKLHKKKYRVLTKHTRQTVTGIVVNEKLNVKREYKRNLRALHHDIKVNGIENALLKNRSVQILTIQGIESFKNSTLSKSLFVDKVAEYSKAISNAGNIDGEVEYLLFADLELDGFIIDVFDNHKQAVKKMHELWHFIASLWTLSHNDIVGKISAISQKRYRLTEETRYETIGLEGCSNGFYTVGVVKLNNKFTQEEYEKKRGRIR

SEQ ID NO: 1562 - protein, 443 aa, unidentified
  source 1..443: note = Related to JAGRNG010001065.1; note = Leptospiraceae bacterium
MAKHYLRELQHIYNLKILSQYLGKDEYELQNLLYRKTYSSFLIPRKNGKHRSINAPSDELKYVLQNLNRFLSAIYNEMQGQEHPAHGFTLGKGILSNAKIHSGKAFVLNLDLKDFFPSISRNRIKEVFSSEPFMLKTEIADYLSELVTYYDTLPQGSPASPIISNLVCWNLDKTLSDFAKKNLLVYTRYADDLSFSSNQKIDTEIIKQIEDYIQKEGFQLNTDKTRIQNRTERQVVTGVTVNVKPNVSRKFIRRIRAILHSWETLGYEEADTIFQSSYKRRKGVFKAPSLKYYLIGNIAYIGHIRGQDDSIYNNFCIKLFRLSDRKVFKGQIERFIQSLQSDIDNQQFSETNLENRIFNLAKKAFEPHQIRYNNILRKYYTLRKKTKINITKGKNYSSLFLASLETSPEFKELLYESGRFGDKEYYSQYIKEAKRLIRNTNLI

SEQ ID NO: 1563 - protein, 342 aa, unidentified
  source 1..342: note = Related to JAGPCI010000303.1; note = Bacteroidia bacterium
MAIKTIAQLCSMLQVTAKEFQHILALPEYVSYSIPKKSGGIRAVEAPQGLLRELQGRLAKYMQPFYTQHKLPCVHGFVKAFNNEPKYGVLTNAKPHLNKPCVLNMDIKNFFDSISAKHVKQALQQYPFMVSDEVSTAIALLCTHNKKLPTGVTTSPLLSNIVFYRVDKALIDLVNEINSTKCKDDVAIYYTRYADDLTFSGEVKLVNEIQARIVEILASYGFEVNTKKTRLQKTYAAQWVTGIKVNNKPNVSRLYVRNLRATIHNLQNNTATDAVKKHLGTTPNKEIDLSDVHTMLASIRSKIAWVGLVRGKTDDVYLKLKRNFKEAEQKILLHEVPEKKRN

SEQ ID NO: 1564 - protein, 333 aa, unidentified
  source 1..333: note = Related to JAJTFA010000003.1; note = Sphingobacteriales bacterium
MRSLEELLKILAISSELLQQLLAAPEYTIYHISKKSGGTRTIQAPQGLLRQTQVLLAKYLQTVYSRHHLPCIHGFVPSAGLLKYGVLSNAVPHLNKPFVLNMDIKNFFESITAKKVKKSLCEFPYYFNEEVATAIALLCTYQKQLPTGAPTSPVLSNMVFYIPDVALLQWITDVNETKQIDETGISYTRYADDLTFSGSANLVLSLQARIISFFATEGFEINAKKTRAQTPHGPQWVTGIKVNERLNISRYYIRNLRAVIHQMRVHAAEAVVCRYLKLPATTQINTAHVKKMLSSVQSKIAWVGMVRGKADPIYLRLQTQFNVAREVMLVKES

SEQ ID NO: 1565 - protein, 348 aa, Flavobacterium sp.
  source 1..348: note = Related to NKJD01000090.1
MNTIILDNNNHWDSLLFINANTLDKMAFSLSCHLSFLQRQVESPKYFQFKVSKKSGGFREINAPNAELKYLQRNLSWKFNKIYSSPDGVHGFVKGTFLETRHIVSNAKLHIGKKWVWNLDIESFFSSITTQMVINRLMEAPFNFDENKAKYISLLIIYKRQLPMGSPCSPVVSNLVCENMDAQINQWVANQNKFQPEINLVYSRYADDITFSTDLAISDEHKLEIYDILNQYGFEVNRKKERIQSNKQSQWVTGIKINEKPNVDRSYIRNIRAALHQIRAKGLQEAATNFFNLKELANTTEIDRFLRILQGRISHVGFVKGKDDSAYLKYWRELGEVMAPIQKEPLIY

SEQ ID NO: 1566 - protein, 333 aa, unidentified
  source 1..333: note = Related to JAFDXR010000008.1; note = Bacteroidetes bacterium
MKSKYKFLDSQLAIEDISSILNIRFTELIKNIEKPNYTTFRIPKKSGGHRVVFAPCSDLMKIHNIVNNKLRSTYHMMQPKVVHGFTYKTAKEKYLDIGIKANAKMHLNKKCILNIDIKDFFPSISISRVRAMFECPPFNYDHNLATGLALLFCYKGQLPAGAPTSPLISNFYCLKLDADVLELSNSENITYSRYADDLTFSSNAIIDTKFVVKVSEILKNFGFEINRKKLRKASNFQAQYVTGIKVNQTLNLNRTYYRNLRAVLHSIEQIGVSASMLKYKGKKRYILGEEHKFLSSVRGRIEYLGYIRGNNDVLYKELKNKFNALIDRAPINY

SEQ ID NO: 1567 - protein, 330 aa, unidentified
  source 1..330: note = Related to RGVD01000053.1; note = Bacteroidetes bacterium
MKEITKNRFLSLQFVDELSMILGMSLGDFTSAIENANYKSFEIPKKSGGTRLISSPDSLTRKLQSKLYVYLKSYYHSVHPKCVHGFIPKFKAKASHHIKANAQVHLGMPYLLNIDIKDFFHSISTTRVRSLFANSPFYFSHEVSTALALLCCYERKLPMGACTSPVISNLICLQMDALFIKWSNEQKIKYTRYADDISFSSMMAFSHKQIEDIRTIIQNERFEINEKKLRIQSRYTSMWVTGIKVNQKLNVNRTYIRNLRAILYDIKTNGWEKACKKHFHLNENTKNEEELKSKFYFKIKGKIQHIGYVKGYSDEVYSKLNNQFLGLQIL

SEQ ID NO: 1568 - protein, 342 aa, Lacibacter sp.
  source 1..342: note = Related to NZ_CP060007.1
MEIKPFHRKITDLQIQQFLHFNSVHDLSHLINIDTDIIEHVLDEPKRYHEFPIPKRKGGKRLIHSPSRPLKDIQKRLSIYLTRIYHEYAPAYVHGFIRSNKKTSSRNILTNATQHLDRPYVLNIDIENFFPSINAELIKSAFNKLPFQMYSDEGASIISLLLTRNWILPAGSPASPIVSNIIFYETDIALHKYCIKNKLVYTRYADDLTFSGELINDHMTEAIKKIIIYHGFMINDKKVRLQSKQSAQYVTGIKVNNKLNVNRKYIRQLRSILHDWESNGIDIASTRYYAGKLHRYQNRLDMYTSFKASVHGKLAFLQQIKQEEPVLQGLYKRFIALKNTYM

SEQ ID NO: 1569 - protein, 333 aa, unidentified
  source 1..333: note = Related to VEQB01000383.1; note = Bacteroidetes bacterium
MNTHRIEKFIAAKSMRQLELSLLASRNELKQWVQNPDYRTFEIPKKKGGTRQLHAPAPPLKRIQQSINELLQILYVPTQNAYGFMLKQAGEINRNTLQNANCHLQRNFVWNLDIQNFFPSISTKRVKAIFMEGPFYMTDEIASYVALLCCYQKQIPAGAPSSPMLSHFACLQMDNSLQKFIAQAAFKPYQISYTRYADDLTFSLDLLPSDEIKNGIESIILEHGFVLNTSKNRIQHKHQGQWVTGIKVNQKPNLDRKYIRKLRAIIHHVEAKGIIAATARYLTLAEEQIKQKEISFFLNSVRGKINYVGAVRGKEDVVFKKLITTFNSAINGI

SEQ ID NO: 1570 - protein, 376 aa, unidentified
  source 1..376: note = Related to SHWY01000031.1; note = Bacteroidetes bacterium
MYLQSSENVADTNPDFPSENPEEEKRKFACLFLIIKQFKIYMNKNYDNLEQLANIKTPDELLNLLEVSPSSLIAMVENPQYETFHIPKKAGGYRCIDAPSEDLKRVQQKLASHLSYLFINFQTRSVMGFVPHYKGINNPAGIVENAKRHIGQPIVLNIDVADFFPSIKISSIKKMFMQKPFSFNDELAHLLALLTCYKGKLPQGAPTSPILSNFFLLRADLKIERIMKKRELNYTRYADDITLSGFLFPQDKLPDIVQEILTPFGLRLNEKKIRYQTFVGRQEVTGIKVNVKLNLDRRYIRRIRAILHCWDVKGIEHAATVFHKRKINNALEFTSTIRGMIAHVGNVRGKEDVIFLRFHEKFNSLSIFEEMKVVAM

SEQ ID NO: 1571 - protein, 550 aa, Paraeggerthella hongkongensis
  source 1..550: note = Related to NZ_QICD01000043.1
MVDNKHGALLDIESKEDFAYYLERPIKDLTMLAYAKNGIRYKTFEIGKKRSGEKRTIEAPVGYLKAVQRQLLELFNEAYRPPQCVHGFVSSCSIASNAMSHVKKSAVVNLDLRDFFPSITGDRIHGLFRKDPFSFPEDVANLLTELVCYKGSLPQGAPTSPILSNMICYRLDKQLVSYAAKNKLVYTRYADDITFSSTSRSAINKLFNESELGINSVSPEVRNIIGSNRFEINETKIHIARKSSRQQVTGIIVNEKCNFPRKEYRSLRVLFNNWALVGFEYAGAEYAKRNHSYSSKLFNEAGLISETLLKKHIRGRLEYYTMITGPNKKASQPLAKLWNMYHDVTGEKVPISTPERTVCQTEICYSRQNDQGDPIPLCENGTSFLTDKGYLFTCAHCLCDIHHEYKKIGDERCSFPTLKVLYEPELSDFLIDKTLDVAAIKAPPFMKNEAFALTNGNYFPQIGESVKAYGFAGGDSSIRCIEAAVAETLKAGRVRVDRPFIHGMSGGPVFNTRGEAIGLLTGGSAPDDYSHDGEFVLFSAISEQLPNAFR

SEQ ID NO: 1572 - protein, 549 aa, unidentified
  source 1..549: note = Related to JAFRJC010000116.1; note = Eggerthellaceae bacterium
MRTRADVAAFLGVTPQQLGFLAFSSVPKYTVFNINKKRPGEKREIKAPILVLKRVQRRLADVIASIYESNNPPNSVHGFRLNRSIATNAKCHVHREAVLNIDLENFFPSINGGRIRGLFLHEPFNFPEEVADTLTNLCCDAGGLPQGAPSSPVLSNCICKRMDKRLLSFARENDLVYTRYADDITFSAFNKRRLRHACLSDGSPSLQLSSELLKIIEGNGFSVNTTKTHLSTRSSRQEVTGVIVNEKCNFKRSDYRELRVLLHNWLDVGYKHAGKEYIKHKPEIALAIVDDDDTISERKLRSHIRGRLAFYTMLANQNPGISKPLRRLWTMYAGATKEIVPTVDPESAIWQIVTYYDYVSSKDGSVKNFSKVGTVFKADGECLITAAHCVADLDEVNVCSEAVCEIAYGPVPQFCELGNVDWNPKSDYAVLHEMPEMLNNITGLTCDGTYRAQVGETVWAYGYSDAKPQLRCIEARVSEVHSDGRFYRVDRPFIEGMSGGPIINSRGSVIGIAVHGSAPREYVYDGEFLSIAHVNLGTNYQTNESCSAS

SEQ ID NO: 1573 - protein, 549 aa, Olsenella sp.
  source 1..549: note = Related to NFIU01000004.1
MASQEISFTSIATNAQLAEYCGVSWDELKMLAYANRIKRYTEWLVPKRNGEGFRRISSPMANLRRVQRAIANGLSEFYSPLKCVYGFVCERNVAMNALQHARKRTVLTLDLKDFFPSISAPRVRGLFMKAMDFPQDVADTLTNLVCYEGSLPQGAPTSPVISNMICFKMDRALLNFAANSGFTYTRYADDLVFSSTSAYSARKMVDQGKNVVDGINRFIIDTIESNGFEINERKVHVANRGSRQIVNGIIVNQKCNIRRSQYREFRALFHRWIREGCSSAAAAYFGNKKNHCYKAKLCDGDELCDEKSFVRHIRGRLDYFSMVVGVNGHPTEPMAKLWTLFHQAAHERVPYLTFEKSAVQLSYVFDSKEKNDAVAAESSGVIVRDILLTCAHGLPEESTDANGDAVPIEIRTAFDERFYIKASSFRKCSGFDFAFVLLDAKLGNMGVRSINTAYLPQAGETIYASGYAGGKMPSHCVQASVLPNRYGNGSIVVDRAFIKGMSGGPVFNTRHEVIGIVLKGSDESSYSRDGEFLPFSAIADLEPFALLKK

SEQ ID NO: 1574 - protein, 558 aa, Mogibacterium diversum
  source 1..558: note = Related to JABZQH010000155.1
MALNFGKETFSDNVNITNSFLEIQTPEDLAAHIEENVKVLKKYAYPGKRIFYSILIIPKKDHSPRLIEAPCNDLKRILRKITDQLTYIYQPPACVHGFVCSKSVATNAHSHVNKYFVSSFDIKNFFPSISAKRVRGLFKNIFFYANDNLIDLLTNLVTLHKHLPQGYPTSPIISNMICLQMDKQITKYCKEKHLFYSRYADDITISGNSKRLISNIFISSKAEDLTLCPDFSNIIESNGFSLNSQKTHISFKSDRQTVTQIIVNKKCNIPREVYRSLRVLFYNWQKNGWQYAANEYAKFISDHHYISFRNDVNSPMLTDEQLFKKHIRGRLAYYTMIDAQNSIPSTPLTKLWEMYLQCTKEHVPMSLIENNVFQLEITYDYEIDGKSNNFTSSSTGFLTEKGLFTCVHGLKELNQKYDIPENTNVEVACLNKSLSRKFPSQIPIKDFLLCEEDDIAFYRYKNIKPLSNLVINFNYLPQISEHVTGYGIPGGETDVYPIEAIVDSFKLDKSCVRITPTFYKGMSGGPVLNARQEVIGIILEGSSFDDLSRCGLFIRLLS

SEQ ID NO: 1575 - protein, 541 aa, Collinsella aerofaciens
  source 1..541: note = Related to NZ_JADNOH010000001.1
MLNGFQSKADLAGFLDLSLEKLDLFVNPTSMYQLYRSRLVPKRCGGYRELLIPRSDLKKAQRIIACELEKSYSPLPCVHGFVKGRSIKTNAETHVGSQVIVGLDIKDFFPSISSKRVYGLLISKRLGLTPEVAFCISRLVATPKGLPQGAPSSPVISNMICLGMDKQLMHLFHEYHYQYSRYADDLTFSFRSSFFFYRHFYSGGKLRLPNKLRNAITNFHGIASFELNEDKSFYSFSFSRQLVTGVVCNKKTNIKREQYRRLRSTLHRLSVGDCNGAMGCYYGKSVGEITDAEIRMFEPSLRGSLDYYKSLIKDPWTSGPLMRLGSLYNNSKPEDAPVFPVALHQDSILYLEGVDCEQNPFEGLGFYLTGYGLVTAWHVICDAVSRDMESGEIRIFSSNKTPLARFIYSNDLLQENKRDAAILKDVPSEMIKNTPQLSPNIDLPTKGEKITAYQHHFSESGFSFELHGGELLRLGDPNEEGTLCYTNCSFMHGMSGGPVFNGIGQVIGIVHSATEQGKLGSFLPLRDCFRSTDVYGKWIIF

SEQ ID NO: 1576 - protein, 541 aa, Collinsella sp.
  source 1..541: note = Related to QSIL01000003.1
MVDELQTKKELADFLNLSLDKLDYFVSADSFYSLYRHRLVPKRNGGFRELLIPRSDLKRVQRIIAKQLEKHYKPLPCVHGFVRGRSIRTNADIHVGSQVIVGLDIKDFFPSISSKRVYGLLKSKKLGLSSEVAFCLSRLISTPKGLPQGAPSSPIISNMICLGMDKQLMHLSREYHYQYSRYADDLTFSFESSYWFYRHFYSDRKLRIPNKIRVAITEFHGNKSFEINENKSFYSCNYSRQVVTGVVCNKKTNIKREQYRRLRSTLHRLSIGDEEGAMGCYYGKSSSDLSEEEKGTFRASLRGSLDFYKSLLKNPWSSGPLMRLGSLYNQSKVEGDSVFPIALHQDSILYLEGINSKDEPFEGLGFYLPSYGLLTAWHVISDAVFDDREKRNIGVKSSAKISLGIFSFGKSTVQTGRHDAAILNDVPPEIIQSFPRVSVSTDLPSKGDKVFAYQLHHSENGFRFDLLDGELLEIGSPSEEGTLCYTNCLFQHGMSGGPVFNGMGKVVGIVHSATEDGKCGSFLPLRDCINSTEVYGIWKTF

SEQ ID NO: 1577 - protein, 570 aa, Collinsella aerofaciens
  source 1..570: note = Related to CP024960.1
MCCLHIIFCYVSIKYDSTEEPAINFKENLMLNELQSKTDLAGFLGLSIEKLDFFVNSSSMYDLYRNKLIPKRNGGYRELLIPRSDLKKVQRIIAKELEKSYNPLPCVHGFVKGRSIQTNAETHIGSQVIAGIDIKDFFPSISSKRVYGLLVSKKLGLTPEVAFCISRLVATPKGLPQGAPSSPLISNMVCLGMDKQLMHLSHEYHYQYKRYADDLTFSFKSSFYFYRHFCSEEKLRLPNKIRNAITDFHGTESFEINEDKSFYSCSFSRQLVTGVVCNQKTNIKREQYRRLRSTLHRLSNSDIEGAMGCYYGKSIAKLTDAERGIFQAALRGSLNFYKSLIKNPWTSGPLLRLGSLYNKTKPEDTPVFPVALQQDSLLYLEGEDDKETPFEGLGFYLTGYGLVTAWHVICDAVSHDMERREIKVSSSDKTPLAKFKFSKSIVQDNKRDAVILREVPQEILKKIPKLPAVMDLPVKGDKISAYQQHFSESRFSLELHSGDLLRVGDPSEEGTLCYTNCSFQHGMSGGPVFNDLGQVIGIVHTATEQGKLGSFLPLRDCIRSSDVYGEWQVF

SEQ ID NO: 1578 - protein, 570 aa, Lewinella aurantiaca
  source 1..570: note = Related to NZ_VOXD01000052.1
MKFKKITANRRNFIKFISPSDNEVYDFDTVKKLSQNRHNYYKKVKIPKKNGGFREILIVNGEIKRIQEKILELLQSVYNDSSTPKCVNGFVKGRSIYDNAAIHTNKKHVINFDIKDFFKSVTLEKINTYLSYKPISLPRNQYPNVLISYLCTYDRYLPQGAPTSPILSNIVLKNFDYAMIMLAKKHKLVYSRYADDLTFSGNEDIDFFSFKNTVAQKLNKHGFEMNMNKSRIQYSWQRQIVTGLVVNNKVNIKSEFVATTKSMIYNWENYGIDIAKEKFNQHRKHSDGIHFENVLRGRIDFIGSILNRSGEYKNPVFAQLNLKYWILLNCIDYSFVSEKSVRDKLFNRNYESEKIAYDSSLYESQEYRFISYCFKVYTQMEIIYKYYFYLRFNGDFMKIGMFMYDNSKNIRKQFKRMFSECEDEDKKIKLAKQRISGIKNLKEISTFNIESLFMDQLYRKRNRSLPKFFNFIREIRNYHAHAGEKIVKQTFEEVQSDVKSIIESKNLSEVTLESKTFTGVSHEELRKINHYQFYLWFQSSPFDDVREILKELAFEVKLIENRIKKNAHNT

SEQ ID NO: 1579 - protein, 343 aa, unidentified
  source 1..343: note = Related to DMWN01000144.1; note = Flavobacteriales bacterium
MITENHIQALKASTDADSFVQAMMPGVDYLIDSKRSKLEHSEIVKVVKNFELFTSSASIRRYRTFEIPKKSGGSRKIEAPVLPLKTLQRLILLFLESVYDAPAQVHGFVKDRSIITNAMSHSNKAHVLNIDIEQFFNSVRQTRVRALFNKHLGFSQYSSLMLSKLMCHRGCLPMGAPTSPLVTNLIFQRADKRIFAASKKMNVTYTRYADDLSFSCDSVESLHRTKRLIAVIIRQEGFKVNPKKTRLLHRADCQSVTGLVVNDKVNVLRTYRRTTRAINHRLEISIKEHSGDTNMALIAASEYHAMKTGQNDARPPISHLNFIKGRQAFEYGVLKSSQSPEES

SEQ ID NO: 1580 - protein, 788 aa, Vibrio alginolyticus
  source 1..788: note = Related to JAGDJZ010000001.1
MKSLLTPCSKKDTPPEDFSSQLQRWLIFRPEFDIKVLQKQNCWPITGQHYKSFNVQKRNGSTRQLVTVDKKLKSVQRNLLHYFEQYYDVSKHAYGFVGETANFKVNKKNLRTRGVITNALAHTNKKVVISLDLENFFPSITFPRVMGLLKSKPFNFSNKEAAILASLVCLPKAIDDKRGLPQGAPTSPIISNLICKKLDYQVGKMAQKYDLIYTRYADDLTISTNNLKRINANKIISLVRDCVERNGFRINKEKTKVMYRNQRQMVTGIVVNEGLNLPKKNVDALKATLHNLEHVYKNIDEAVDGSNKNNYDSFTPLVYCGVFYKGRYIRTISRGQKSTKPTSDKEFNYIYSRHILGRVLWYGQVVTTGINTPYDLSNRKHISPKQYSRIVKFEEMLSSLYRISIKFNWPIEHIIFRLSNKLSHLQSIVKTNPELSLESTEPNKDEIELKHRFSNLKNTKEDRKQFFDDSPSTLKRALIVENRSHSLFSFKSIKKHVEDGWYIPTVQQEVFKELDTGQLSDLFHRSANAQGHNVLNLILEIVKVVKPRSRYLSEEVKDKIVMVHKELLKLIRSEGEGVCIEYSKESTSTKLAIQAINDLKLSTRLYEDDTDNFYNRIVLDAVKQSGTEHLVNIDRQGMETRLVTDIKAWRDSIVHILFSIKQHADKSEVGIGSPQPKPYTIKFREENPITNIPRAVEIYRLNVDLPFNKKLNIASNIEYGLIDKWLTGRDLLLAIKRFMPIGDIFTHGNYLDCDNFTVNLTEHSFKKENNITHKSYGKLFISLQEINN

SEQ ID NO: 1581 - protein, 786 aa, Vibrio cyclitrophicus
  source 1..786: note = Related to NZ_MCSL01000005.1
MRNLLTPLSKKTSPQEDFFSLLQLWLTSRPEFDIKVLQKQNCWPITEQHYKLFTVEKRNGKTRTLVTVDKQLKSVQRNLLQYFEKKYEVSQYAYGFVGGTSNFQANTKHLRTRGVVTNALVHTNKKLVISLDLEDFFPSITFPRVMGLLKSKPFDFSNKQSAILASLICLPKGIDDKRGLPQGAPTSPIISNLICKKLDYQLGKMAKKYDLSYSRYADDLTISTNNLKKINANKVISIVKSHVERNGFRINSEKTKVMYCNQRQMVTGILVNEGLNLPKKQVDSLKATLHNLENVYKNVNESVKGANKNKYDSFSPVGFYKGGYRGRYIRSIGKGKKSNKPTSDKEFNYIYSRHILGRVLWYGQVVTTGINTPYDLSKRKYISPKQYSRIIKFEEMLSSLYRISIKFNWSMEHIIFRFSNRLSHLQSSVKMNPELLIEPIEFNTEEVELNNRFSKLKKNNEECKVFFDNCPASLQRALIVENRSRSRFLYGSIEKYIESGWYIPAMQQEVFKDLDNGQLSDLFHKSSNEKGHNVHRLLLDMVKLVKPRIRYLSEEMKDKILIVHKELLKLMRSEGESVCIEFGKDSEKSKLALQAISDLKLSTRLYEDDTDNFYNRIVLDAVKQSGTENLVNIDRLGMEARIVTDIKAWRDSIVHVLISIKQHSEKTELNLGSSQQKPYTIKLRDENPITHEPRAIEIYRLNVSLPFKKELNINTESGLISKWLTGRDLLLATKKFMPIGDVFSHGNFIDCEDFVVNLTTHNYIKKENIISDDYGKLFISLEEIKN

SEQ ID NO: 1582 - protein, 786 aa, Vibrio fluvialis
  source 1..786: note = Related to JAHUGE010000005.1
MKSLQTPLSKKAVSSTDLSSLFQRLLTTRPEFDTKSLREQNCWPITGRHYKEFTVQKRNGSTRRLVTVDKRLKSIQRNLQQYLEQNFEVSQYAYGFIGEATQSHKGRQDLRARGVVSNALAHTNKKVVISIDLEDFFPSITFPRVLGLLKSQPYSFSNKQAAVLASLICLPKSIDDKRGLPQGAPTSPLISNLICKKLDYQVGLLAKKYDLVYTRYADDLTISTNNVNKVPPIKILSLVKSCIERNGFKVNSKKTKVMYPNQRQMVTGLVVNEGLNLPKKQVSSLKATLHNLEFKYKNVDDAVKDSNKNNYDSFNPVGYYSGLHRGRYIKSVAKGRKSTKPTSEKEFNYIYSRHILGRVLWYGQVVTTGINTPYDLSKRQHISPKQYVRIIKFEEMLSSLYRISIKYDWSIEHIILRFSNKLSHLKSSLRLMPNYSLNTIEPPQEEVELKERLLNLKNTQEERKKFFDNAPTSLQRTLTVDNKSRKEISFVSIKNRIDNGWYKPDFQQELFKELDHGRLSDLFHRSSNDKGHSVQELLVEIVNVVRPRLRYLSKEMRERIVTVHRELLKLMLSEGEGAYIEYGKDSSAKPIIQAISSLKLATRLYEDDTDNFYNKIVLDAVKQSGTENYINIDRSDMELRLVTDIKAWRDSLVHILFSIKQHLDKTELDIDSLSHKPYTIVFRDENPISSEPRAVEIYRSNESLPYKKKLEIPLNSDSGFLDKWVTGRDLLLAIEKFMSVGDVFVHGNFKDCDKYKVNLTEHSYIKEDNATSKVYGKLFFTLQENK

SEQ ID NO: 1583 - protein, 786 aa, Vibrio lentus
  source 1..786: note = Related to NZ_MCTZ01000016.1
MKSLQTPPPSKNISHVDLSSLFQRWLISRPEFDTKALQQQNCWPITGRHYKEFVVQKRNGNTRRLVTVDKKLKSIQQNLLQYFEKKYEVSQYAYGFVGEVPRVQTNKQNVRTRGVVSNALAHANKKVVISLDLEDFFPSITFPRVIGLLKSQPYGFSNKQSVVLASCLCLPKSIDENRGLPQGSPTSPIISNLICKKLDYQVGRLAKKYDFVYTRYADDLTISTNNINKISAKEIISIIKSCIERNGFRLNKEKTKIMYRNQRQMVTGIIVNEGLNLPKKQVDALKATLHNLEYKYKSVDEAVKGSNKHNYDSFNPVGYYRGLNKGRYIKSISKGRKSTKPTSDKEFNKIYSRHILGRVLWYGQVVTTGINTPYDLSNRKHISPKQYSRIIKFEEMLSSLYKISSKFHWKMEHIIHRFSNKLSHLKSSLRLIPDFSLSSLELNSEDMDLKTRLPTLKSTLEERKDFFDLCPKSLQRTLVIDNKSRKKFKISSLENRINNGWYKPEVQKELFKELDNGRLSDLFHRSSNEQGHSVQDLLFEIIDSVRPRLRYLSEEVKEKIVVVHRELLKLMLLEGENSHIEYGKDSSTKPAIQAINDLKLSTRLYEDDTDNVYNKIVQAAVKQSGTENLINIDRSDMETRLVTDIKAWRDSLVHILFSIEQHADKTELDSAALHQKPYTVVFRDENPITQEPRAIEIYRLNKDLPFKKNLNIAPNSSSGFIDRWLTGRDILLATEKFISIGDVFVHGNFRDCECYTVNLTEHSYIKEQKPNSSNYGKLFISLQEIK

SEQ ID NO: 1584 - protein, 801 aa, Vibrio splendidus
  source 1..801: note = Related to NZ_PIEZ01000024.1
MKNLSIPSPKINPTQDSFLSMFFRQFDSNPEFDTTVLKKQKCWPITTEHYRPFTIRKRNGTLRELVTVDKNLKKIQSNLLIYFSKNYEVSKYAHGFVAKEIENQFPNNKEEYLVGGRLRAKGVITNALSHTNKKVVISLDLKDFFPSITFPRVMGLLKSKSFDYSNKQAAILATLTCLPSSVDTKRGLPQGAPTSPIISNLICKKLDYQLGKIASKYDLTYSRYADDLTFSTNNLKRISANKIISRVTECVKRNGFVINNPKTKIMYNNQRQMVTGIIVNDGLNLPKKEVDAIRATIHNLENKYKSVDDAVKGFGKLKNKNPYDSFVPLGYYTGGYKGRYIRNARKGKKANKPTTNKEFDSIYALHILGRILWYGQVVTTGVSTPYDLSKRKNISPKQYSRINKYEEILASFYRVSMRFNWPVEHIILRLANNLPHLQSLVKMSPQFLLEPIFLNSEETYLKNSISKLKKEKSDYIKFFESAPESLQRVLVVENCSHDNFIFNTIKKCVEKGWEVPSIQQELFKDLNTGDLSDLFHKSYDSTGHSVKKLIIDLVRVVKPRLRYLSSSIQNKIILVHKELLDLMRSEGEDVRIEYGNESTKTKQALQAIRDLRLAVRLHDDDTYNFYNKVVLEAVNRSGTSDLVNIDRDDMECRMVSDINAWRDSLTKVLMSIKQHADTTEKELSPSQHKPYTIKFKDENPINGESRRVEIYRLEVTLPFKEKLEIDTDFNEGIISKWKVGGDFNSAIKRFLAIGDIFVHGNFIDCENCTVNFTEHSYKLEKNIVRKNHGKLFISFQEIKSK

SEQ ID NO: 1585 - protein, 795 aa, Photobacterium phosphoreum
  source 1..795: note = Related to PYMT01000050.1
MTTKFSHPQKRNFNSFIRLNFFSTNAPEFSTTELKKNKCWPITEKHYKSFTITKRNKTERELVTVDKNLKVIQSNLYDFFKQKYNISKYAHGFVAKDPLILSLLKEQDKPLRSKGVITNALSHTNKKVVISLDLKDFFPSITLPRVIGLLKTQPYNFSNKQAAILASLICLPKNIDKKQGLPQGAPTSPIISNLICKKLDYQLGLISKKYDITYTRYADDLTFSTNNLKRISATRIVEKVAECVKRNGFKINDSKTKIMFSNQKQMVTGILVNEGLNLPKKDVDALRATLYNLDKVYTSTDDAVKGFWKLKGKNPYDTFTPVGFYLGGFKGRYIKSPSKGIKSTKPTIEKEFEKIYAQHLLGRITWYGQVVTTAINKPYDLVKKQHISPKQFSRIKKYEEMLATFYRISIKRKWPIEHIVLRRAYNLPHLQSLMKMNPIYLLDATFLDENKEIEQLKNKVSELKTDKEKYTEFFRSAPRSLQRVLRHENRSHNNFSLESIKKFTNFGWQDPIKQKKVFNAIDNGELSDIFHQSINRDGDNIKETIIKFVTVVGPQLIYLSKDVKNKLINVHKELLALLISEGESFNIDFYKENPKTEQALQAVRDLKSAIRLYEGNSENFYTKIVLEALKITETIDMVAIDKRDMAPRMVTDINAWRNALIKVLMSIKQHTDETEKHSNAQKQKPFTIMFREHDDDENITTAIEIYRLNSELPFKKELKIDTEVKNGNVKKWKTGGDLKSAVSNFLSIGDIFIHGKFNDCKDITFNLTEHVYKVNKEIKENEYGKLFITLEELNN

SEQ ID NO: 1586 - protein, 798 aa, Vibrio vulnificus
  source 1..798: note = Related to RCFZ01000008.1
MNKTSISSPKAKTVDLKSIFMAFEKWRSNRPEFDTAALRKRKCWPVTAKHYKKFTLKKRNGSMRQLVVVDKNLKEIQSSLAIHFSQNYKASEYAYGFVAKESELTAAKTQPELSLDKLRPKGVITNALAHTNKKLVISMDLKEFFPTITFPRVMGLLKSEPYKFSNKEASILASMICLPKEIDDKRGLPQGAPTSPIISNLLCKKLDFQLGRIAQKYDLNYTRYADDLTFSTNNLKRISANKIIHEATKCVERNGFHVNVDKTKVMYSNQRQMVTGILVNEGLNLPKKQVDAIRATLHNLEKKYKTVDESITSFWKIGKKNSYDSFVPLGYYAGGYKGRFIKSASKGYKGNKPTTEREFNYIYSMHLLGRILWYGQVVTTSINEPYDLKKRKFISPKQHSRIIKFEEMLVSYYRISIKYKWPVEHIILRLANKLPHLQSLIKMNPGFLLDSLLLSVEEHELIERFRKLGRDKEEYTRFFKSSPPDLQRVLRVANRSHNNFSHSTIKECVENGWQFPNKQQFLFNELNTGNLSDLFHKSLDKKGHNVEKLLSDLVLVCRPRLRYLSPNIKSKIVAVHRELLDLIRTEGGDVFIDLENETKKTELALQAIRDLKSEIRLYDGDSDNFYQKIVRVALNRSGDSNIFAIDMDGMASRMVTDIKAWQDALTKVLISIVQHTKSLDDKAQGQALYTIKFRDRNPINCKPRAIEIYRLNYELPFKQKLDIDANSNCGQVMKWLTGGDLTLAIKSFLSVGDIFVHGKFLDCDDVTVNLTEHQYIREKHEPIDKLGKLFITLQEISE

SEQ ID NO: 1587 - protein, 412 aa, Vibrio parahaemolyticus
  source 1..412: note = Related to NZ_NNOA01000433.1
MNNASISSHKPSNRDLDSIFMAFEKWLKNRPEFDTAILRKRKCWPITAKHYKKFTIKKRNGSNRELVVVDKNLKELQSNLAAYFAQNYEVSDYAYGFVPKEPERRIGGKEQSELLVEKLRPKGVITNALSHTNKKLVISMDLKDFFPTITFPRVMGLLKSQPYNFTNKQASILASMVCLPKDVDDKRGLPQGAPTSPMISNLICKKLDFQLGKMAKKYDVSYTRYADDLTFSTNNLKRVSANKIVHEATKCVERNGFRVNVDKTKVMYSNQRQMVTGILVNEGLNLPKKHVDSIRATLNNLEHKYKSVDEAVVGFWKIGKKNSYDSFVPLGYYIGGYKGRYIKAVNKGFKGNKPTSDKEFNKVYALHLLGRILWYGQVVTTSIGEPYALTKRKYISPKQHSRIIKFEEMLAS

SEQ ID NO: 1588 - protein, 807 aa, Vibrio lentus
  source 1..807: note = Related to MCVM01000002.1
MAQLLNMNNIQKDPSQDKNTTVDSFLEMFERWLLTRPEFDIAALGKRKCWPITSGHYHRFSIKKRNGSKRELVSVDKNLKALQANLATYFEETFEISKYAHAFVPKESADKATFKQQEGLLVNKLRPKGVVSNALAHKNKKVVISIDLKEFFPTITFPRIMGMLKSKPYNFSNKQAAVLASLICLPKDIDDKRGLPQGAPTSPIMSNLICKKLDYQLAKMASKYDITYTRYADDLTFSTNNLKRIPAKEIVSIVTKYVERNGFQVNTTKTKIMFKNQRQMVTGILVNEGLNLPKKQIDALRATLYNLEHEHNSVEDSVIEFWGLKNKQPYDSFIPVGFYNGGYRGRFIKSNKKGVKAHKPTSKKEFDKIYALHLLGRILWYGQVVTTTIDAPYDLSKRQYISPKQFSRINKYEEMLASFYRISIKFSWPVQHIILRLANKLPHLQSLVKMKSISELDPTILDEVGIELHGQVLKLRTEKEKYTEFFNSAPLSLQRVLRVHNQSHINFDLDIIKKCISSGWEEPFKQQKVFKEINNADLSDLFHKSSNRKGHNAKKLLNEIVRVVQPQTRYLSDNVRIKITKVYSELLTLIRLEGDSVCIDLENENTKTEQALQAIRDLKSEIRLYDNHTDNFYQRVVLPAVKNSETSSLVAIDKKDMNPSIVTDINAWRVALTKVLISIKQHCDKTELMEDTSSHRPFTITFRDDNPVTGAPRVIEIHRLNLDLPFKKKLEVDTTMVEGKVMRWLTNGDLSSAVREFLPIGDIFVHGNFKDCENATVNLTEHFYKINDELKVSDYGKLFFSLQEIKE

SEQ ID NO: 1589 - protein, 807 aa, Shewanella putrefaciens
  source 1..807: note = Related to NZ_UGYP01000001.1
MAQLFNMQNIQAGSSKPKNTNFSSFLKLFEHWLKTRPEFDIKTLKERKCWPITAGHYHRFSIKKRNGSKRELVSVDKNLKEMQSNLATYFEKTFEISKYAYAFVPKESEKKATIKQQETLLLDKLRPKGVVSNALAHQNKKVVISIDLKDFFPTITFPRIMGMLKTTPYDFSNKQSAVLASLICLPKDIDEKRGLPQGAPTSPIISNLICKKLDYQLAKMARKYDITYTRYADDLTFSTNNLKRISAEEIVSSVTQYVERNGFKVNETKTKIMFKNQRQMVTSILVNEGLNLPKKQIDALRATLHNLEHEYNSVEEAVNEFWSLKNKQPFDSFIPVAFYPGGYRGRFIKSNKKGLKANKPTPKKEFDKIYALHLLGRILWYGQVVSTTISVPYDLSKRQYISPKQYSRIKKYEQMLASFYRISIKFNWSVEHIVFRLANKLPHLQSLIKVKSKSELDPTILDKIGKELQGKVSRLRSEKEEYTEFFNSAPRSLQRVLRVQNQSHISFDLDTLKKCVEFGWNEPLKQKKLFKEINTSMLSDLFHKSSNGKGHNAEKLLNEIVRVVKPQVRYLSDNVRVKLTKVHSELLTLVQLEGKNVCIDLENENIKTEKALQAIRDFKSEVRLYDNDTDNFYQKVVLPAVKSSETSGLVTIDKKDMDPSIVTDINAWREALTKVLISIKQHCDKTELMEDASSHMPFTIKFRDENPVNGAPRTVEIYRLNSKLPFKKKLEVDTAIVEGKVMRWLFNGDLSSAVREFLPVGDIFVHGKFKDCEDVTVNLTEHFYKVDKTLKVNPYGKLFFTLQEMKE

SEQ ID NO: 1590 - protein, 791 aa, Photobacterium phosphoreum
  source 1..791: note = Related to PYMW01000008.1
MNNKRTAKNNNFLAYWLGIKSPELDIKVLKNIKCWPITANHYNRFTIKKRNGSKRELVSVNKSLKTVQSDLAEYFAVTYGISKYAHAFISKEPETLSVFSQEAILVDKLRPKGIVSNALPHTNKRVVISLDLKDFFPTITFPRVMGMLKGEPYNFSNKQAAVISSLICLPKDIDENQGLPQGAPTSPVISNLICNKLDYQLGKMSKKYDITYTRYADDLTFSTNNLKRISAEEIVSLATQYVDRNGFKVNEAKTKIMFKNQRQMVTSILVNEGLNLPKKQVDALRATLYNLENTYNNVEDAVDKFWNMKNKKAYDSLVPVGFYKGGYRGRFIKSKNKGLKGNKPVSKKEFDKIYALHLLGRILWYGQITTTAINTPYDLSKRQYISPKQHSRINKYEEMLAAFYRISMKFNWSVEHIVLRLANKLPHLQSLVKMNPNFLLEHILLDDLELELRDKVSKLRIEKEKYTEFFDSAPRSLQRVLRVFNRSHNSFALNKIKSCVESGWPVPLKQQILFEKLATEELSDLFHKSTNIKGHNVKTLLEDIVKVVRPELIYLSDNVRVKITRVHRELLSLMRTEGDGVCIDFENETAKTEQAVQAIRDLKSEVRLYESDIDNFYLKIVLPAVKNSRTLNIVDIDKDDMNPSIVTDIYAWREALTKVLISIKQHIDKSESIGNSSGKKPFLIKLRDEHPTSSLPRAIEIYRRDVELPFNKKLDIDVNSAEGKVMKWLTGGDLSSAVKAFLPIGDIFVHGNFKDCENVTVNLTEHFYKVEDNLEISGNGKLFFSLQEIKE

SEQ ID NO: 1591 - protein, 791 aa, Photobacterium phosphoreum
  source 1..791: note = Related to NQLU01000007.1
MNNKRNVKNINFFSFWLGIKDPEFDIKKLKDIKCWPITKNHYNPFTIKKRNGSKRNLVSVNKNLKTVQSDLAEYFTKNYKSSKYAHAFICKEPESLSILKQEALLIDKLRPKGIISNALAHTNKQVVISLDLKDFFPSITFPRVMGMLKGQPYNFSNKQAAIIASLICLPKGIDENQGLPQGAPTSPVISNLICNKLDYQLGKMSKKYDITYTRYADDLTFSTNNLKRISADKIVSLATQYVDRNGFKINEAKTKIMYKNQCQMVTGILVNEGLNLPKKQNDALRATLYNLENKNNKVEEAVAKFWGIKSKQAYDSLVPVGFYKWGYRGRFIKSKNKGLKTTKPALKNEFDKIYALHLLGRILWYGQVATTGINTPYDLSKKQYISPKQHSRINKYEEMLAAFYRISMKFNWSVEHIVLRLANKLPHLQSLVKMNPNFSLEHILLDKLELDLRDKVSKLRNEKEKYTEFFFSAPRSLQRVLKVSNRSHHNFTLIKIKSYVESGWPVPLKQKAVFDEIATGDLSNLFHKSTNINGHSVKNLLKDIVRIVRPELIYLSDNFRTKITRVHRELLNLMRTEGDGVYIDIENVTPKTEQAVQAIVDLKSDIRLFENDIDNFYLKIVLPAVKNSGTLNMVDIDKDDMNPNIVTDIYAWREALTKVLISIKQHSDKSESIGNIQGKRPFIIKFIDENPVNGSPRAIEIYRRNIQLPFNKKLEIDINSSEGKVDKWLTGGDLSFAVKEFLPIGDIFAHGNFNDCNNATVNLTENLYKIDGKLKLNDSGKLFFSLQEIKE

SEQ ID NO: 1592 - protein, 796 aa, Shewanella algae
  source 1..796: note = Related to NZ_CP068228.1
MKTTPILSSKVDSDDKFPFFSILESWGVNSPEFDTVVLKKLKCWPVSKKHYKPFTIEKRNGTERHLVAVDKNLKLMQQRLAVYFERAYPVSKYAHAFIPKRSKFAYELNSSPQIRPTGVITNALAHTNKKVVISIDIKDFFPNITFPRVLGLLKSKPYDLSNRQAAILASLICLPKGIDENRGLPQGAPTSPIISNLLCKKLDNQLGAFSKKNGITYTRYADDLTFSTNNLKHISTSKIVEHVTNFVERNGFNINTLKTKVMYKNQRQMVTGIVVNDGLNLPKKQVDAIRATLHNLEHNYKSVSEAVYDFWLVKGKNAYDQFVPLDFYPGGYKGRYIKSKNNGEKRNKPTSDIEFNKIYALHILGRILWYGQVVTTAVNEPYDLSKRKYISPKQHLRINKYEEMLATFYRISMKFNWPIEHIILRLANKFPNLQSLVKMNPMFLLEPVTLDANELAIKDKVNSLRSDKLEYTAFFESAPDSLKRVLRVENRSHTNFDLKNIKQCVEYGWETPTKLREVFNEFDNGKLADLFHKSSDRKGHKVVDLLKELVSFVKPRIRYFPARVKRKIIVVQKELLHLIRAEGEEVYIDLENETTVTKKASQAIRDLKFAIRLYDSDTDNLYNRVVLEAIKSSDTLELINIDKDNMNPRIYTDIDAWRESLTKVLISIKQHTHDDERVIDQKQLKPFTICFREENPLTGSPIAIEIYKANSKIPFKKKLNISEKSNSGLVNKWITGGDLQRAVRDFMPVGDIFVHGDFIDCKNITVNLTEHSYKKEKTVYHNKYGTLFISLQELRA

SEQ ID NO: 1593 - protein, 802 aa, unidentified
  source 1..802: note = Related to JABXHM010000094.1; note = Alteromonadaceae bacterium
MKKNNQKKVKEESATDFFDFIKDLLARRPEFDTKKLADKGCWPISKSHYHHFSIKKRNGSYRQLVTVDYRLKEFQSNLRRYFEKYFTISKHAHGFVSTSTSQVGATDLEKEFLSELNRPKGVVTNALAHTGKKVVISIDLKDFFPSITFPRVLGMLRKSPYDLSNKQAAVIASLVCLPKDMDEDRGLPQGAPTSPIISNLICNKLDYQLGRFAKKYDLKYTRYADDLTLSTNNLKRITPKKIIDEVTRHVERNGFQINDAKTKVMYQNSRQMVTGILVNDGLNLHKKHVDALRATLHNLENKYDSVERAINEFWTLKDKQPFDAFVPLGYYNSGIRGRYISSSKKGIKRPMPITKQEMHKIYALHLLGRILWYGQVVTTAVQSPYDLYKRPHISPKQYSRIKNYEEMLASFYRVSIKFKWPVEHIILRLSNRFKHLQSLVAMQPNLLVEPIVLNDAEQKLKVDVLKLRKKEDYLEFFRTSPESLKRAIWSISSSPSNHSLEDIKQYVNHGWPVPEIQREVFKQLDTGTLSNLFHKSYESGGHSVNELLEEIVKVVKTRLRYLSPVVRRKILSVHKELLAIFRLEGNDVRIDLEKKVKSHESALQAIRDLKAAVRLYEDDTENFYNKIVLPAVKESGMSNFVKIDNNDMEVRLITDIAAWKNALIKVLDSVKEHMESSERVRKASEQFPFTLKFREANPETEEPMALELYRTNAEIGFKKIPDLETNKSHGLVKKRLTGGDLSLAVKEFLPIGDIYVLGKFERKGECIKDISINLTDFSFVKCKSVKHSKYGQLMFSLVEKES

SEQ ID NO: 1594 - protein, 726 aa, Colwellia sp.
  source 1..726: note = Related to JACGVB010000087.1
MVSVDSKLKSIQTSIKEELEEKYPTSKFAHAFISNNLDTLDDIVRPKGVISNALAHTNKKVVISIDLKDFFPTISFPRVLGMFKQQPYFFSNKQASILASLVCLPKGVDANRGLPQGAPSSPLISNLICNKIDKQLGQLAKKLDCIYTRYADDITFSTNNINRVKPSALVNEIRKHVVRNGFEVNEEKTKIMFSNQRQMVTGIVVNDGLNLHKRHVDALRATLYNLEFKYKTTSQGIKAFWKLGSLRSFDSLVPVGFIKGETPIRFVKSASKEDGKKRLIKTTGKYQVKTYALHILGRILWYGQVVTTAISDPYSLSKNSYISPKQERRIKKFEEMLAAYYRIADKLNWPVKHIILRLANKYPHLQSLIHFDPRYTLKNIALLVAESDLITKVNKLGKDNQEYLDFYKESPETFQRHLLLRSRFKQSFKIHDIRTLAENGWVDPKLQNELFEELNTRKLADLFHKSDDGKGHKVEEILLELVKVVAPKLRYLSSNVRTKVLQVHKEFVGLIGAEGKDVKLDLEIETDLTKSAIQAIRDLKNATRLYEHNNDTFYSRIVLPSINDSDTTKLVDINTSGMAPRLITEIGAWKKALTKVLQSIKESASKVNLDSKQKPFKIKFKDANPVTGEPVTLEIFKVGHDNPFGKNLNLPENSSSGFIQKNLLGRDLTNAIEQFLPVGDIYVQGNFKDVDNAKINLTRHKFERIEEMSKDNKESLFFVLKEYQSK

SEQ ID NO: 1595 - protein, 898 aa, Thiohalocapsa sp.
  source 1..898: note = Related to JAIPFF010000020.1
MSDTTEPKEPAALTLAALIDRDEQSAAGDEQRKIDSRRDLARYIGIPLRHLADVLYEADRSRFYTVKTIPKASGGTRTLHAVSGKLKDVQRKALDKLQRKFPPSDRAHGFVPGRSIITNAIPHRRKKLVVKLDIVDFFPSIRVARVFGMFQAPPFRFGREAAMTLAQLACVPEHNGPLPQGGVLSPYVANVICRRMDQRLASIARQHRCNFTRYADDLTFSTNDANRLDADRLIAKVREVVEGEGFAINDAKTRVLRQSDRQIVTGIVVNDGLNVTRRYLRSLRAILHNMEKEGIEAQLIKGSGLKDRRASRLELVPDGDGYRLGNHKLTKEQAVERFLQHLVGRFAFVGQVVNAEGQDNQQIRYRRVVLYKRLLNRFRRSVRSAVHAGLGDGPKHCERAIRSLMERYASVEQESEWYRRAKERRESELERWRESKEGRRISAALARTTNASELCRFVQKEAKSDVRYWPVNCGDNPEALRVRVEENARYPSLNRGTTRQVVNGFKDTSDLGGLTHRGDATPASLLQILLDRYEPHYYELPNALRKLVDPMSAALRDIVLQDGEDVSLDLFKDPRLDRHVKQLKEGTRLIAPGSKKDEGKPITELLTDAYEKGLERAEKKPGTSVPWKDRFISPHQAIYTVVPALWISLVDIFHSIGIHSEHREIEVETYITEQGCFQIRISDANSSGLEIPPARDFAHGKIRHAAFELFAIAGYWIFTRFEDGAVHRVDMLTGKTARATDARYPGFTHLIVLPNEKGFIEEPSVGDAATGSDSAATPRRTVRVLIIDNNEQRRNDNVQCWSSLPDVELDAVAQIDRESYRCRELDLVLVHESNPESEWIHQDVEDRWPVVFFSGNNTLDCEVHEGRWFVSPVFLREHFGKLVDKIVHEGGKDCVGLS

SEQ ID NO: 1596 - protein, 877 aa, Allochromatium sp.
  source 1..877: note = Related to NZ_WNKT01000028.1
MEKMTTRTKIYWRRDLAQYIGVPLQDLLEILYKENRRDYYRIRSIPKASGGTRTIHAVSGKLKDIQRKVLDKLQADFPPSSRAHGFVPKRSIITNAIPHRRKKVLVKLDIRDFFPSIRFARVMGLFQSAPFHFGREAAITLAQIICVPGDNGPLPQGGVLSPYVANVICRRLDQKLAAIAREHRCHFTRYADDLTFSTNDVKCLNREQFIARVEAAVANEGFTINSKKTRVLRQSDRQIVTGIVVNDGLNVTRKYIRNLRAILHNIEKNGLETQLIKDGGFHDRRASRLELKRDGDGYRLGTRQLTKEESIERFLQHLVGRFAFVGQVVNAEGQENRQIRYRRVVLYKRLLKRFYICICRIEKNENLGKGPEKCKSTLEKLMKKYSSFDQQSEWYNRAKECRQSKLEQWQNSKEAQTIRDELACITTLEDARRFLTAQACSDVRYWIECSGNFEDIKIKLAKFAQYPAFNFFDTRQVLHGFKDTQDLGALTHHGSTPAHLLNILLKRYEPHYYKLPDYEPPYSLRGLVDPMSDALRNIVLEDGEDVFLDFNDPRIESKVAKLKQGTRLSARQGQAHIGTMIEEMLQSAYEEGLKRANQTPKKSVPWKGRLQNPREDIYTVIPALQGSLVDIFESMYRNRKSGQIEVETSVTESGCFQIRIADVDGASLRVPPGRDFAHGKLRRATRSLFVIAGYWIFARFNDGSVHRVNMLTGETVKVADDRYSGFTHVLVLPNNEGRIDPPSVGKSSLDVSVAKTSRRTLRVLVIDNNDQERYDNELRWQTLPDLELKTVAAIDRETCASYAPDIVFVHFNNDERKWITQENTNLCPIVLFSGEFMSECMIHEGCWCVSRTFLKERFGDLIDQIVRKERKDCVGLS

SEQ ID NO: 1597 - protein, 881 aa, Lamprobacter modestohalophilus
  source 1..881: note = Related to NZ_NRRY01000013.1
MEFTTTPSSLNSRKDLADYIGLPLGELNNILYAGNRSRFYKVKMIPKASGGERKLHAISGELKSLQRMALDKLQTDYPPSPRAHGFVPERSIITNARHHTNKKLVIKLDLLDFFPTIHYGRVVGMFQKPPFSFGYEVAKTLAQISCLSQEEAGILPQGGAMGPYIANVICRRMDKRLASVARNHRCNFTRYADDLTFSTNDVRRLEIPQLITEVSGIVESEGFKVNSEKTRVLRPSDRQIVTGIVVNDGLNVPRKYINSLRAILHNMEKEGIEKQLVKGKLFGANNPKISRLEFELVGEGYRLGSRAYSKDEAVDLFLRHLLGRFAFVGQVVNANGQQERQIKFKRVILYKRLLKRFHSCVIDPRNNGLGNGPKKCARAIVRMMKQYSSFDQESKWDRRIKEVRKSKLESWQQSGDGRKVCKALDRINNLSDLKVFLENESKRDIRYWWVCGRDFVTDKEQALKYASYPPVDYRWTRQVLCGIKNTQGKNLGILTHYGDDGHANTPAKLLEVLAENYEPYYYWLPIRLRKIIDPVSDALRNIVLQDGENASLDNFGDIRLEPVIKTFKLETRLSNSDRAADGTYIFQLLKDAHEAGQRQANRKEIKSLSLVMHQKMPSKQYTVVPSLRIALIDIFHSMYVNSESDGISVDTRITHRRCFQIRVTGPLHHPLLCRPSRNFAHGKLSRAARELFGIAGYWICSTFEDGREYRIDMLTGKAALISNEHKLSFSHIIVFPNDNDEIDESIHGVEVIDSVPENAPQQKIRVLLIDNNDRRRDENVKRWRALKNVDIKAVARIDRASYEKLDLDLVLIHESNPEVETNELVFDDQTRIIVFSSGNKTEDCVTDEGLFYVSSIFLQKNLAKLIDKIVVEGQKDCVDLS

SEQ ID NO: 1598 - protein, 634 aa, unidentified
  source 1..634: note = Related to JABJEJ010000239.1; note = Deltaproteobacteria bacterium
MEIPLKRLTYCLYKTSRESAYTRKDLPKSNGGVRTIHAVSGPIKGLQRTALDKLQEDFKPTAYAHGFTPEKSILTNAYVHQGSKIILRIDLKDFFPSINFGRVRGMFMSPPFKFGEQAATAMAQMSCLAGSEDVLPQGGVLSPYIANMLCRRLDARLAGLSRTWKCRFTRYADDCVFSTNDTKRLNAEKFVAQVEEIIREEGFQINPDKTRVMYPHERQMVTGVVVNDGININRRYYRSLRALLHNWKKYGISSQLVKSGGFKDERNPGPRFERDGDIFRLNGWEFSKEQAEEKFARHVLGRILFLLQATNFVPPSTEGYLEGEKDETAKKMVAKRKEALAEKPRSQAAQKLLLKYFHLVSKRKHLDDLKNAAYRQLQRYPIRELVARHPHLKIELRSGISRYQIRAQALQEYQKRPETRKCVERIHECDDLAEAGGLLDELANTDVRFAGLPRGDLRVLLKEMTKFASYPAFGANHARSFFASLRDSETGLGQILHHPEHSMSDLNESMGKFVDPVFWWLPFGLREDIDKIDDLLEGVSRQLGDDAKIDWLAHELTEKETLKLKKDTRFHRKEGTRLHEAVNEVVKRVAKTYDRELPEICNELSDKSTAYTHVRSVRLALDEIILSMITHSDK

SEQ ID NO: 1599 - protein, 916 aa, unidentified
  source 1..916: note = Related to QNFE01000008.1; note = Gammaproteobacteria bacterium
MPKIFLKKHQTEYIIKNRATNRKSIVAIMAGKKMKNMLSGDKIKKAYKKFTIAKAKKGTRTLHAPSTELKDLQRTILDKLQKPFRPSIYAHGFVKSTSNKARSIITNASYHKSKKYIIKTDIKNFFPSIKKEQITQMLVNEPFEFTIKTAEKISSLACLDGKKKVLPQGGVLSPYLSNMLCCNLDDKLSGLATKNHCNFTRYADDITFSTNDKKIKFKPLIQQIYKIVESYGFVVNRGKTKVLTPADRQVVTGIITNDGINVNRKYYRNLRAIIHNCEDESLNIFNIDTIAGQIGRFIKYKIQKRNKNNAIELKYSWSFKDSRCSRPNIFSDSVMRSEYILLNKKVGVQDVKLMRDYGGVNLQVPFLKGEFLNQLFGTDKFKNNEKYAMRLYKYNSDIESLSTGRLYLKNKKYAEILLDGKWIGCEKYTEKNPKIYNILENKFKVLQEKHKDNDRFFYKSVIYNKGFEEKEYMLENFALTKINTQQQTIQYENYNKVDKNHTGDYHIAVKKNYAVHSFFKHLLGRFVFYGSVVLSNNQDKNYDRYKRVGAYEKLLYRFYKLVEKHCNKSLQKQTLNLIKKTPKLKDDFNVLKKMTDDYKKQKEKSLEKFHYDSKYATEIDNTESIEALDDIAKKLSKKDVRFFRIDKYHKDEPKDYQNYLMAILKKPAIDLKKTMGVLLSFKGSQDGLGVITHDTEKLNSKQIFETVNKCFTQYYYYLPQGIREEFDNYIDALNNQDGRQSQRFQSQAEKLKKNTRFGNNSDEEFLLKDSVDEAILNAKKEVKKSDIKIHNEIKRASFYTHVPTIKQVFEKIIHSLYKNSKGSEITISCDHKDDEKKYQVIITDNSDANITNNGREFVNGKLSSVMGLTFGLCDYFIETEFNKKRKTINMHNGEFLKTLPTHKKGFTHILQFATKI

SEQ ID NO: 1600 - protein, 490 aa, unidentified
  source 1..490: note = Related to JABHVJ010000179.1; note = Candidatus Woesearchaeota archaeon
MTNDIIQEILRKRKINRSTPLMQKINNKKDLLSFFGDEIGQENFDNVLYGEEKEQYKKFVINKATGKPRTLHAVPPKLKHIQRIALDKLQSVKQYQPSSYAHGFVLKRSIITNAIPHRRKKRIIKMDLKDFFPSIHEDRVRDMFMGKPFSFGKEAATIMAHLSCLNDGSGILPQGGVLSPYVANMLCLKLDKKLAKVAIKNHCNFTRYADDITFSTNDVSEDSISNLIKETSNIIESEGFVVNTEKTKVLTPNRRQVVTGIIVNDGVNVNRRYIRNLRAAIKNCEEQGIGSQMQRFVFKDHRCSGPDKFDGTNGEIRNYFLHHLFGKITFFGNVVLSNNQDLKNKKNSDTYRRVQTYEEILYRFYDLIKNVKTSRRFKKSVVAAVNNRPNLSKRLSFAQQGVSIRGKALKKYRSTYKAKKLKDDLELVTNINQLRSFIGDVAETNPSFFNTAIPVDLDEAKEKLGTRLSFPPVNLDIATGVLQSLVEDEG

SEQ ID NO: 1601 - protein, 830 aa, unidentified
  source 1..830: note = Related to JABHPQ010000081.1; note = Candidatus Marinimicrobia bacterium
MPKESKNNKMTVSSRSDLADFFGVKNKYINWVLYADKSASGYKKFTINKASGKIRTLHAVTKKLKKLQRIALDHLQADKRFQPTAYSHGFTQQKSIITNAAYHKRSKRIIKMDIKDFFPTIHFGRVQGMFMAPPFKFGKEAATVMAQMSCLDDGSGALPQGGVLSPYIANMMCRRMDKRLAAVARNHSCRFTRYADDLTFSTNCISDENIGKLVQEASAIVEAEHFIVNKEKTKVLTPKDRQVVTGIVVNDGLNVNRKYIRNLRAIIRNCEQFGIKSQIVKLGGFKDNRNSRISIKGEENLSEERFLRHILGKLNFMGDVVFANLNDKDGKKIDDNSVNMNRMVRIKTHADLLTRFYKLVANESGVDGVYDKIEISIVNNGKKNPYCKIMDLISEINNQARKYLDEFERLEGVTRIVDEKKYPLVDKKQTRVFLDSFRNSINGMGAFTHAHGEEFTIHKAMGILLKKCHPAIYYLPEAFKKEIYSYIHYITNIGIKNGANYSWNVMSDTKSVALKRATRFDSMENSLSSTVDSCIRYVKKQNNISSDLNVINCIKNNQLLQIYTFVPGIESALNNIIHSMLKNTEAQINKYILIDVNQATDLIEIIVRSEDIMISSFVPEDKHGKLTLATKSTKGLCDYWVEVDSVSLDLTNKRVCFDMHTGKIIDGIIPSFSSGFVHKLRFDTADKIRDTDVENREISAITPIENKIDYLYKVLLLDHNIDDRREIKRNLLEIDGVSEQSLTILKNISQVDFESMKLDIAFIHKNNKETSNIALWETSGIKVIFFSGEIRQNSTINAEKSQFMVKEETMKSAARLKSYFEKKLSGKITT

SEQ ID NO: 1602 - protein, 730 aa, unidentified
  source 1..730: note = Related to JABHLS010000018.1; note = Bacteroidetes bacterium
MEIIFGSKTPGPTTVLAKQIGFPANKLRDILYGPNNRSAHYKRIAIPKNSSTPANPKIRVLHAVSKDLKNLQRATYDYLAAIYSPTKYAKGFVIGESILTNAWPHRRQAVLLKFDIKDFFPSINFYRVRGMFMAWPFNFSPATATIYAQICCMDNGPIAQGAVTSPYISNMICRRLDKRLSQFAQKHHLVFTRYADDITLSSNSKHLAIKKVQQEVVEMIESEKFIVNKEKSKVLFPSQRQMVTGIVVNDGVNVPRKYIKQVRAILYKCETLGVARVVSEHLTHVKPGQPCAPIHRELKPTGEYLDVDVPINRDVYMRNGTDKEISFYQVTLIFLSHLRGRILYIGQVAKANHESIWEVSYASANSPRGYPERTVYLKRYKIYRELLDRYNSIVNFEDYGKELSIKVKSLESRYMEEEEIDFFMARDIEQIKSDMSERAETEARFFYSISPAMLENDIKDKLLIMLNRFPPDIITTRAVLQSAQDTGSMIMRLLHNEVIQREEFDDYFNEYLTVKEKLPYRLEKEITAFLKEASYLFRRENIDEYNFYLDEQFNRDRVIPFKNNSRFVLNPRKTSGGTDAYEMIKGIVHSRAVRDKMNENSVRIMIPEDQNEWRIDLYTHVSSVKWSLHRIIESMVVNSQDTIIHITFEFQREGFSTLRVYNEDVTEIANTPSRALAHGKLKKAMEYLDGLAEYYIEANFAGTGWSSVNMYTNQSQEIESLIGFTHRIVF

SEQ ID NO: 1603 - protein, 679 aa, unidentified
  source 1..679: note = Related to JABGYV010000129.1; note = Candidatus Marinimicrobia bacterium
MKAHIFEVAQELNVKPGVIRTALYVGNRGDYYTLNEIPKRNGGVRTIHAVNGRLRVLQKVAYNWLSNNYSPRHEAKGFVIGGGIIENAKIHRNKKLVICYDLKDFFPSITFARVQGMFMSFPFEFAKPKATLFAQICCLPDENGPIPQGGVTSPFVSNMICRRLDTRLHKLAIKKRMHYSRYADDLTFSTDDNVGYEKFTKIVREIIEDEHFELNEEKSRIRTKSTRQVVTGIVVNEGLNVNRKYIRSLRAALHNCYVHGVLSQIDKKTKYKDPWNTCPPIKKIANKNYVLYKNGASIEIKDAKYKFLEHLFGRIQFIGHVAKSNEHLNPVHHNKRVEIYNNLLEMFEKVRENEKITGKLKIQAKKALYQQQDNALLESIKRYTLDELNEFVDEQKQTDPRYFTYSFSEGDIMEYRDEVGNLAQYPSPTNEMVMQYLNSLKDSENKILGKLVHDTTISFGEFNNFRMQFEKDKIELPKLLRDRLDGFINTDIMNFIKDKDVNFNIFSDITFVEKSINKLKKATRFFNGTGNIGDDETDLVKMIESVFKNARNPNNLNLKIDRLNTFGAYTDVQSVKYALSLIIDSMIDNSNGSTVFCKTDKQNKVIELFDDNSEPLDILPNRDFVNGKLRKTIFTLTALCEYSIIANFKKGGWKNINMMKGEVIESEEYPGFTHQLTFR

SEQ ID NO: 1604 - protein, 382 aa, unidentified
  source 1..382: note = Related to PDTW01000019.1; note = Candidatus Gracilibacteria bacterium
MKDLNLNLITIIIIFIVIIITIFKGKLSVFNKKKRNFNLKFLNKIPILNPDYNTFYIPKRDGSERQIDAPNTQLKNIQKNILRELNKTYLFPSFVSGFKKNASIKNNASKHTNKKIIINIDIEDFFHSITENKIRKTLRAYKELQNEEIEKLINLVTYRGRLAQGAPTSPFIANLVFLGIDNIIIKLLKKYDKKVSYTRYADDITFSSNNTKIKNAIRIIVDSILPKYGYVAKKKKTTIYRAHTKQIVTGLVVNKRVSYPRNKYMKLRAMVFNFLSKGDGNINIIKGHLSFLKSVDRKKYLKLKFYYRRNFKENNNYKVLFNKQKKKHKKASFTNPHTGKREVKFDYSGKKIEKNDYKYESAFENIKKSKKNNDDDKNDLII

SEQ ID NO: 1605 - protein, 341 aa, unidentified
  source 1..341: note = Related to AMFJ01000004.1; note = bacterium (gcode 4)
MLITIIVIISIIVFFITSKIWIGAKKKWIMKMSDLFKRVLEFDAPDLSYTTFTIPKKDWTSRQIEAPNAQLKKTQQTLLHLLSNNIILPWYVTGFRKKFSIKTNAKKHVGREVVINLDIKDFFTNVTTQKLRQRLEYLKVDNEIISRFEKLCFNNWHLPQWAPTSPFLANFIFVPIDEAIIKTAKKYDKNIIYSRYADNITLSSNVKNISNLIRIISEWIMPKFGYTINSKVNLSRKHTRQTVTWITVNEKISMPRHKYMLLRAQVHAYLTKWTWNTLEIAWRLAFLYLLDKKKYWKLQKYYKKKFWETQELSAVFRRNPKKVKLDIYKKWFINPRTWQKF

SEQ ID NO: 1606 - protein, 445 aa, Convivina intestini
  source 1..445: note = Related to NZ_QEKT01000010.1
MKKDFTNISTYQEFIEYIKSFSEYQYLTRTLSKDFLQRINETQNMGDFYTTKMISKKAGGNRELAIPIEELKHLQKALLGVLKKYQRLSIRKSKWSSNYDYISPAFKSIKIGSHNKFYVNKLDLKNRHTKGIPSHVVHASHHTNKKLVITFDFENFFTTIRPNRIRGIFKGYFKFSDFVCTLLTSITTHFKVGLPQGAPTSPYLSNLATYEFDKAFHKECKKLGIYYSRYADDVALSTNNYSVLYNNSIFSEKPKNGKRLQFCDYLNNLLEQNHLTIKGSKTRVMSYWNRQVVTGIVVNKKISIGKDELVRARSVLINIGKTLTILDYRMGIIAVDKQIKKFYDEYQLRNSHEEELQTIRDDNERSLCMLCIALLTIHSLIEYYSQVMPTNSKLIKIKELYNSIQYNLFYNKNYRHIIIKNNHLFKFNLHSFPIFLIEKLNFQSH

SEQ ID NO: 1607 - protein, 320 aa, Leuconostoc mesenteroides
  source 1..320: note = Related to JAFRDY010000085.1
MSKLSSINNVASLVKVINHKLYIKKYEPITIDFLKKNIHKYVDRNIPKKRGGFRTLNIPNDQLLHVQEILLELFYESQDRIVRENKWISQIDRSAPAYKPSNYYLNKPAHWIHAQNHVNKAIIVSFDFHDFFGSLYSGRIYSVFIKYFKCNKAVATILTNLTTFNHSLPQGAPTSPFLSNLVMYYFDKTMIKISRENSVRYSRYADDVILSSNDSQFLDNTNFFEKSFNNGQNIEFSEQISKLLLGYHLSLNPNKTRVYNYWNQQKITGIVVNHHTNISRRKLVVHRSILINLIKAIDTKDFDNIKGYEQLKININKALS

SEQ ID NO: 1608 - protein, 837 aa, unidentified
  source 1..837: note = Related to JADJNF010000001.1; note = Saprospiraceae bacterium
MNLFKITSSEFLNFIFANLESSKGIDKDFITLVKNIINYQYKFYQIFLIRKANGKLRPIAAPYPELKSIQKSIVKYLDLNFIPHPNSFGFQKNKDIKGNAKMHLNNKFVFNADIKDFFVSIKFSHFRKKMLPNENIFSDDSNPLSILRVFCFISDAENKQLSKEDTHYFLPQGAPTSPILSNIYFYDLDEKIFDLCKQLNINYSRYVDDLTFSSNENYFENNSDFRNKLVSILNSDGLSLNESKNKLYYKYNTQIVTGLIVNQKLNVHQRVIKDLRKWIYIYERYGIEKLNLIFENDYHSKNRNSRNFKINTFSALESKVAYVGYIKGYRDSTYLILKEKIGNILKHKVIESNEEKSLIILDSSFFIHGKKSYRLKFYDGLNIPIDEITVTKNYFKKNKWKFKKILSDWGISNQSVYFRIVINNPINIDLNTALVVKKGDTIYYEYEDTEFNNSSKRTDDNFEIQVVAYNITDENGYITIVSIDTPNAIKSVVATIPTVNVNQTSEQQKHLKDLRARFLKDKTFIPVKVSNTSSITDYRYGLFSEEKSTHRQVTEEDLLNPKAIVGILSTPWNSEKGEQATVFIKKEQVQLPYPAPIAQTGSVVLLIDNQIHVLHTKKIKDVPVKYKQLTKLLKQFASEANADVRNGIWKQLIGRGSTDGIVIYRTENSNIDVERQGEVVNNRGIGPQLFYNPDTNTIIYEGKRYNVNEENINDIIDDLAERRVHIEEALVETSKDYKKDIVEYLTTDLAELNTKTGTYQIAPTIYTEIGNVEVQDNTKTEVKLTPQEEQAALFDFLPSVAKETKEVVNPKTEEASETTIAKRILPKADGEDMSDIL

SEQ ID NO: 1609 - protein, 422 aa, unidentified
  source 1..422: note = Related to JACSSC010000036.1; note = Candidatus Competibacteraceae bacterium
MKNLMIKDKENILIQPGIFFYTHGYYSATHALDFIHSADSYKKISIPKRNGKIRTVYQPHPKLHAMQSTIKPFLHKVYFKICQKHGMISYEKRSHMSKQAWNRHIELRRRFPTIEDFADHIDELFDEYSDEADKRYGKENPNDKLHMSSMLLDFDYDFFCYKGIDPELSYKKTFKYYGSVVQHARNAVRKPYLFKCDIKDFYPSITDKKLYRILSSEPYNTYISPEIAALIVSVCTHRSRLVQGACTSPILANMFMIHADNFFSKNLKKSCTYNRYSRYVDDLIFASDQPIDAAEISKQISGYLSSMGLQLHPKKTRYLLPHQKKIVTGVVVNQKINIDRRYIRCIRAMLHDAEAQGIEHAALRHASGKHGKIEAIDPQYFLKRLQGMISWVQYVRSPHENNCQQLINRFNNLQKKWEQSKY

SEQ ID NO: 1610 - protein, 544 aa, Labilibaculum sp.
  source 1..544: note = Related to JAEINT010000042.1
MKKERINTVNDWNKLNKLSGNKEILSHLYKILSRFADTLKNEIIAEIEKKNKPKAEQIKLSKWSISIDRLLYLSGQDNLKKQYHKVEIPKKRGGVRILNIPSKKLRFVQRLLLDFLSENFETHKCAYGFVKGKSIVDNAKLHVNKKHVVCYDIKDFFPSITGRRIYGMLQQYPFNANKDVARIIANIATYYDDEKSEKILPQGSPTSPYLANMICRKMDSRIFNFFKEKNIHYTRYADDLTFSTNDSKKIELILKNVPRFIKEEGFELNNSKTRVQNYYKRQIVTGIIVNKKISLPREYIRGLRALLHNVEKYGWESQVNRKIISFESDDYLKFINFQKETNNEEENKKLQKLTKSKFDEYNKTQNNEHKLIHGKNYIDLRLKSQKYPSQRYTQVDMMKEIIKGKIEFWGMVRNIRDKEGKIIKTDNTYKNLKDEFELLNLMQRKEDVQYIKVSRKFENIIKSYENNKSIDEKTKKEIIDNINSLKKLKNENLSEIVKNMVSPILHNPKRTSEILIKFHKDDNVLKYTNHDWDKEDDNMKFLTN

SEQ ID NO: 1611 - protein, 716 aa, unidentified
  source 1..716: note = Related to CP020382.1; note = Rhodothermaceae bacterium RA
MRLPDWDKATVKAYETRWSALKASGPTDVYSAVATLLSTQSDNPVPEDLIRHLVGSKNRKRHYHTVEIPKRRGGVRTLTVPSDTMKWVQRGLLQVLTHLFPRHRCAVGFERGESPLTHARHHVRKRFVYVVDIEDFFPSITWARIYGMLQAYPFELPPHAARVLANLATYDGALPQGAPSSPILANLLCRKLDSRLFKWARTNGYQYSRYADDLAFSTNKNEFPVSDRKFIEQVIQEEGFSINAEKSRLMPYSRRQMVTGLIVNKKPNLPRSYVRGLRALLHNVERHGWESQVGRTPVFKRAYEWTLYRDKKMSPEKLLGIQLDQIFYDHLVHPTAVLHKARDVASLQRVVQGRIAYLGLVRGKDCPIYQRMRDQYLALVRQESEMARGRAIYQEKAREVESTPDEPKGPNRYAEIKKYEQLPEPEYRSKLQELGVRTLEYLFLLRTNQSFEDLKKVAARIAYSTTTSPEETARFFAEFDDDKTFRGLLHEPIGLELSPGELVGACEEALSRYKLPNKLRKRTEELLEECRVLLHANPDVYPWKNDNLRDKVLLPYKKDTRFDVAHGLTLKERLEEHIQILEKRYDKFFEVDADLMLRTFVPDVLNAIKILLISMAQHTSAGKIHIQVPEVLGQGPIEIHIFDEDSVMQCAPDLLKGVLKGESAGALRRLRGYAYWTITAPFSDGSSYTFNVMTNEKFKAPEPASGVRHTLTFPQV

SEQ ID NO: 1612 - protein, 360 aa, Kushneria aurantia
  source 1..360: note = Related to NZ_KB907919.1
MVTLGRRITSRHRNIKPVFTLKHLSALSGVDYGFLRHTVGRNTDAYTEFKIKKRSSSDVKKNYRTICVPSPALMKVQRWIAGNILSHVSAHPCSVAFSVGDRLFDAVAPHCPSKWLVKLDVRNFFESIKEVSVYHVFLQLGFEPLIAFEMTRLCTYVASNASNNNDRWHDSFFLPEHVITLYQYPEQGHLPQGAPTSPMLANLASRSLDERLAALADENLVRYTRYADDMTFSSDDVDFGRKRAGLLIKRVYQQLDRQSLSPNTAKTTVIPPGARKLVLGLSVEETVPRLTRQFKNSFRQHIHYLLRDDVGPTKHAAARKFASTTGLRHHLEGLLAFAAQIEPMWAAAQRNRLQAVSWPY

SEQ ID NO: 1613 - protein, 383 aa, Pseudomonas aeruginosa
  source 1..383: note = Related to DAFSJF010000019.1
MEHWNPQLFRNQAAGVPPELVAHMVTVGRRITSCHRAVQPVFTLKHLAVLSGVDYGFLRHTVGRRTDVYTEFRIRKRPSANGQNRYRTICVPSPALMKVQRWIARNILSHVPAHPCSVAFSAGDSLFKAVAPHCPSKWLVKLDIRNFFESIEETSVYNVFHQLGFEPLIAFEMTRLCTYARSDPSLGPNHRTDGLFLPERIITLYQHPAQGYLPQGAPTSPMLANLVCRTLDDRLSTLADEHSVRYTRYADDMTFSTDKVDFGRESAGVLIKLVYQQLARQALSPNTAKTTVVPPGARKLVLGLGVEEAAPRLTRQFKDLLRQHIHYLLHDDVGPIKHAAARKFASTTGLRHHLEGLLAFAAQIEPSWAATQRSRFNTVSWPY

SEQ ID NO: 1614 - protein, 383 aa, Citrobacter farmeri
  source 1..383: note = Related to NZ_RHWV01000005.1
MERWNSQIFRNNAVGVPPELVVHMTAVGKRITSYNREVQPVFTLKHLAVLSGVDYGFLRHTVSRDTNAYTEFRIRKRSSVHGQTHYRTICVPSPSLMKVQRWIARNILSHVPAHPCSVAFSTGDSLFKAVAPHCPSKWLVKLDIRSFFESIDEISVYHVFKQLGFESLIAFEMARLCTHVGAEPSHEPDMGHDSHVLPERIIKLYQHSRQGHLPQGAPTSPMLANLVCRSLDERLSTIADKHSVRYTRYADDMTFSSNEVDFGRERAGRLIQLVYQQLNRQALRPNTAKTTVVSPGARKLVLGLSVEEDVPRLTRQFKESLRQHIYYLLHDDIGPAKHAATRKFASTIGLRNHIEGLLAFASQIEPTWAALQISRFQTVSWPH

SEQ ID NO: 1615 - protein, 382 aa, Burkholderia gladioli
  source 1..382: note = Related to NZ_CADEYZ010000005.1
MQRWNPQLFRKQASGVKPELLAHLVKVGRRITQAHRDVQPVFTLRHLAALSEVDYGFLRQTVARRTEAYAEFKIKKRGSEHLSPQYRTICAPSPSLMKVQRWITQNILAHVPAHNCSVAFSKGDSLYKAVEPHCLAKWLVKIDVQSFFESISESTVYRLFNNLGFEPLVAFEMARLCTRDQHDAQHKKEQWKDYSPASLYVIEQYMHSVQGHLPQGAPTSPMLANLVCRALDERLAAIAEEQNLNYTRYADDITFSSLDPNFEREMAKALIQRVYRELARQGLKPNTAKTTVVPPSARKIVLGLSVEEETPRLARHFKDLLRQHIHYLTHPEVGPIKHATARKFASVVGLRHHVGGLLTYAAQIEPDWAAKQRMRFLEVKWP

SEQ ID NO: 1616 - protein, 384 aa, Pseudomonas fragi
  source 1..384: note = Related to JABEMH010000060.1
MERWNPQLFRKQASVVAPDVLAQCIAVGRRITALHRDVQPVFTLKHLAVLSEVDFGFIRQTVARRTDAYTEFRVKKRSTQNGDPRYRTICVPSPGLMKVQRWIAQNILAHVPAHACSVAFSKGDSLYKAVEPHCSAKWLVKLDIRNFFESISEASIYLTLQSLGFEPLIAFEIARLCTRVVDDGMHRNDRWLNNFKHLSPYVIAQYTQTQQGHLPQGAPTSPMLANLVCRALDERLLAVAERADVRYTRYADDMTFSSDDASFGRDRAQKLIQAVYKQLACQSLSPNMAKTTIVPPAARKVVLGLSVEEAEPRLTRQFKALLRQHIYYLSRRDVGVIKHASARGFTSVTGLRHHLEGLLAFAAQIEPKWAAIQRSHFQAIKWPY

SEQ ID NO: 1617 - protein, 383 aa, Rubrivivax sp.
  source 1..383: note = Related to SEFB01000022.1
MERWSPRQFRKEAKDVDPDVLQRAIAVGNRIVELNREVQPVFTLKHLSVLSGVGYGFLRQTVARRTESYTAFRIQKRPTPDGERRYRTICVPTPALMKVQRWIAQNILKHVPAHDASVAFSKDDTLYKAVEPHCSAKWLVKLDIRKFFESISEASVYLVFRSLGFEPLISFELARLCTRVVDAPMYRSDAWLNAHWNDEYVIEQYRQVWQGHLPQGAPTSPMLANLVCRKLDERLASISESFSVQYTRYADDMTFSSVDRSFDRARAMKLIGKAYEQLSLQGLGPNKTKTSVTPPGGRKVVLGLLVEEEKPRLTREFKAMLRQHFYYMLREDVGVVRHASSRGFISITGLRNHLQGLLGFAAQIEPEYAARQREKFSRVSWPL

SEQ ID NO: 1618 - protein, 386 aa, Paraburkholderia fungorum
  source 1..386: note = Related to JAHNIZ010000026.1
MERWSSHQYKKVAHERGVPSAVVENAVAIGREIVRKNPNVQPVFTLRHLAELCEVDYALLRQYVSRGFDPYESFRVRKRPGPNGERRYRIICVPNPPLMKAQRWITQNVLQYGVVHNASVAFAPKSKLLHATEPHCNARWLIKLDIKRFFESIPERFVYRVFRDFGYQALVAFEMARLCTRLYPGPLFDSRKWTSSGLRESPYKIHAYDQSWQGHLPQGAPTSPMLANLVCYKLDELLADLADSDGLQYTRYADDLTFSTNSKEFSREQAAAVVGKVFQHLAQMGFSPNRSKTSVIPPRGRKVVLGLLVDGSRPRLSREFKASLRQHLYYLTLDGWGPVKHAKVRGFASLVGLRDHVLGLIGYAGQIEPAYALARRREFETIKWPI

SEQ ID NO: 1619 - protein, 395 aa, Xanthomonas campestris
  source 1..395: note = Related to CP000050.1
MSDWRPQHYRKNAPAGSPASTIDAALEVASITSTANSRLPPIFSLRHLAHYTSINYNILRAAISRSGPEPYRSFRIRKRTEKSSERYRHISVPSHALMCVQRWINQRILQQCQVDDASTAFAKDSKLIEAATIHCKSRWLVKIDVRNFFDSINEISIYRVFNSLGYQPLVAFELARLCTRKSARHSKNWLNFRPETRDVWAAPDDEGKAWSSDMVIKSYDALHQGYLPQGAPTSPMLSNLAMRSFDEKVRDLALKRGFFYTRYADDISLSTERTSSRVTCVELIRDVHQLLHEEGLSPNFAKTKIVPPGAKKIVLGLLVNGEKPRLTREFRLRLRQHLHFLEKPNGPVEHAAKRKFASVSGLRHHLLGLAAYAAQIEPEYGQDIQQRLRNIPWPS

SEQ ID NO: 1620 - protein, 396 aa, Stenotrophomonas maltophilia
  source 1..396: note = Related to JAIOAG010000002.1
MSDWRPQHYRKHAPCGLGSGVLDAAIKVAAGTRQANAKLPPIFSLRHLAHYSGINYYVLRAAVSRSGVEPYRSFRIHKRPPSHVRRYRHISIPSPALMQVQRWINQRILQQCEVDEASVAFAENCKIFDAAKLHSQSRWLIKIDVRDFFDSINEISVFHVFNRLGYQPLVAFELARLCTRESHHRKGKNWKNFRLKDNEIPSLWDESEPRWKSNMVIKSYDSQHQGYLPQGAPTSPMLSNLVMKDFDEKVGALASENGFFYTRYADDITLSTADQSSRTDCVQLMRAVYQLLHEKGLSPNVAKAKIVPPGAKKIVLGLLVNGDKPRLTREFRLRLRQHLFFLEKENGPVEHAKRRKFASVSGLRHHLMGLAAYAAQIEPAYGLKIQQRLMTISWPS

SEQ ID NO: 1621 - protein, 396 aa, Xanthomonas axonopodis
  source 1..396: note = Related to NZ_RWJW01000004.1
MSDWHSQRYRKAAPAGQSSAVIDAAIQTASITKQVNAKLPPIFSLRHLSHYTSINYNILRAVVSRSRRESYRSFQIQKRSGRGASRFRSISVPSPALMQVQRWINQRILQQCKVDEASVAFAKHATLTEAAKIHCQSRWLIKIDVRNFFHSINEISVYRVFKSLGYQPLVAFELARLCTRQSLIGPGKQWENFRSTKDDIQAALDDKPVMWSSDMVIKSYDSPRQGYLPQGAPTSPMLSNLVMRSFDQKLRDLASESQFYYTRYADDITLSTTEPSSRATCLALMRKVYQLLHDEGLSPNAAKVQIVPPGAKKIVLGLLVNGDTPRLTREFRLRLRHHLYYLEKPNGPVEHAAKRDFASVSGLRHHLFGLAAYASQIEPAYGAQIQQRLRSIPWPA

SEQ ID NO: 1622 - protein, 397 aa, Haliangium sp.
  source 1..397: note = Related to MTCS02000083.1
MTRWRPQRYRAGAVAKGISPQIVEHALRTAEITHAVNGKLPPILTLRHLAEYTGVDYGTLRSVARRSDEVSYRVFRIRKRPAHKGERRFRVIAVPSAPLMQIQRWINKRVLMHADVHPASVAFAEDDNIREAAAVHCQCKWLIKLDVLNFFESISEISIYKVFRSLGYQPLISFELSRICTRISKSTANRSSERWINFRPGSAVDTDGVSSISGMTIRAYDEYRIGHLPQGAPTSPMLANLAMRELDQNLTEVAKVHGLFYTRYADDLTFSTREDSDRRKCQHIIGQIYRALANVGLSPNRCKTRIIPPGGRKIVLGLLVTGPEPRLMRDFKARLRQHFYYLERPNFGPSQHARKLGFSSVIGFRHHLAGLVSYAAQIEPEYGQRMRNRLKNIKWPI

SEQ ID NO: 1623 - protein, 392 aa, Rhizobium laguerreae
  source 1..392: note = Related to JAAXRA010000003.1
MTTWRPQHFRSAATAAGRDPSTIRNALAVAENIRRHNPALPPIFSLKHMAELTGNDYGVLRSIVKRDEPDPYRIFTIRKRPSFDGERRFRLITVPRPALLRTQKWICQQILAKATPHGSSVAFSKGNTLFDAARPHCESRWLIKMDVRNFFESINEIAVYRVFRSLGYQPLVSFELARVCTRLGGPTPLRSTPRWHYDPKNWPSISAYQVYRYGYGPRMGHLPQGAPTSPMLANLAMREFDHAVDEIAARHGLRYTRYADDLTFSTDSDDFDRGKAGHFIGLVYKEMGKVGLSPNITKTRVASPGARKVVLGLLVDGKRPKLPREFKQNMRRHIFCLTHEGLGPVRHAQERGFSSVRGFRRHIQGLLAFANQIEPEYAAGCRQQLRGVVWPL

SEQ ID NO: 1624 - protein, 392 aa, Rhizobium anhuiense
  source 1..392: note = Related to NZ_NWSJ01000022.1
MTSWRPQHFRSAAAAAGRDPSTIQNALAIAQGIRQHNAILPPIFTLKHLAELTGTEYAALRSIVKRDEPDPYRIFTIRKRPSYDGERRFRLITVPRPSLLRTQKWICQQILANIVPHSSSVAFSKGDTVYDAANPHCESRWLIKMDVRNFFESINEISVYRIFRSVGYQPLLSFELARICTRLGGATPLRMTPRWNYNSRQWSAISSYQVYRYGHGPRVGHLPQGAPTSPMLANLAMREFDRRVDHLATHHGLRYTRYADDLTFSTVSDDFDRGLASHFIGLVYAEMGKVGLSPNVTKTRVASPGARKIVLGLLVDGKAPKLTREFKQNMRRHIFCLTHEGLGPTRHAEERGFSSVRGLRRHIQGLLAYAKQIEPDYAANCRRQLQSVVWPL

SEQ ID NO: 1625 - protein, 390 aa, Sphingomonas pruni
  source 1..390: note = Related to NZ_BCYZ01000072.1
MTSWSPQHFQTVADSAERDPKVIQNALTAARVIRSTNPALPPVFTLGHLAHLTGSEFFQLRSVARRDEPDPYRLFRIRKRPSFEGERRFRIITVPQPHLLRVQRWITQAILANALPHQASVAFSKGNRLRDAAAVHCNSSWLIKLDVTNFFESISEISVYRIFRSLGYQPLISFEMARICTRLGGPTTRKRGERWRVHFKPREIKSYDVYRPFGGARVGHLPQGAPTSPMLANLAMRSFDTEVDKLAVEHGLRYTRYADDLTFSTKGEFSRDQAAHVIGLAYKAMGRVGLSPNATKSRVAPPGSRKMVLGLLVDGAEPRLPREFKESMRRHLYYLCRTDIGPVAHARARGFASTIGMRHHIEGLLSFAKQIEPSYAAECKRKFANIDWPI

SEQ ID NO: 1626 - protein, 372 aa, Komagataeibacter europaeus
  source 1..372: note = Related to NZ_CP021467.1
MANALATASQLKIPSLPPVFTLAHLAQQAGVDYGVLRRVAQRSPNEGYRVFRIRKRPAYTGERRYRQIAVPSPQLMKVQRWITQAILSKAAAHSASVAFSKGDKLADAAAPHCGCKWLIKMDVRNFFESINEIAAYRVFRSLGYQPLVSLEMARISTRLAGWSPRRATNRWRVEDWRHMERRWSEIEAYQAYRDDSGPLLGHLPQGAPTSPMLANLAMREFDAQAAAIAEQNGMIYTRYADDLSFSTDQPITKADCRRLIGTIYNLMGTIGLSPNVTKTRVSPPGARKIVLGLLVDGKKPRLSREFRALMRQHLHYLMKDGVGPVRHARARGFVSVAGFRNHLRGLATYARQIDVVYGDGLLRELDKVSWPV

SEQ ID NO: 1627 - protein, 383 aa, Mesorhizobium sp.
  source 1..383: note = Related to SADI02000018.1
MSRWSPQQYRSNAQNIDPDIVAHAIETARLIHEVNAEITPVFTLRHLAYATDVDYGLLRAIASRAHGEPYRLFVIKKRPSRSGEKRFRVIAVPSPGLMKVQRWITHRILGHIRPHPASVAFSKGDKIVSAVRPHCGARWVIKMDVRNFFESINEISIYRVFRSLGFQRLISLEMARICTRLGTPTISRLHQRWKSNYQRETIHVYGAGRMGHLPQGAPTSPMLANLAVRKLDELIEEIATKCGMIYTRYADDLTLSTKDMTFNRDQAGIVIGKIYAAMGLYGLSPNITKTNILSPGSRKIVLGLLVDGEKPRLSRDFRNLMRQHLHYLGSLKHGPAEHASKRGFSSIRGMKHHIYGLATYARQIEESYGIECIAALNKIEWPI

SEQ ID NO: 1628 - protein, 383 aa, Mesorhizobium sp.
  source 1..383: note = Related to RZQP01000036.1
MSRWSPQQYRRSAKDTDPGIVANAIETAKLIHAVNADVAPVFTLRHLAHAADVDYGLLRAITSRADGEPYRLFLIRKRPSHTGEKRFRVIAVPSPALMKVQRWITHRILGHVRPHSASVAFSKGDTLVAAAEPHCGARWIVKMDVRNFFESINEISVYRVFQSLGFQRLISLELARICTRLGSLTTSRKNPRWWSNRERETIKVYGARRMGHLPQGAPTSPMLANLAVRKLDELIEEIAAKHGMIYTRYADDLTVSTKDKTFNRDKCRAVIGEIYAAMAKHGLSPNTAKTIILSPGSRKIVLGLLVDGEEPRLQRDFRILMRQHLYYLTSPKHGPADHARIRGFSSIRGMRHHIHGLATFARQVEKPYGEECLSALNKVNWPV

SEQ ID NO: 1629 - protein, 385 aa, Devosia sp.
  source 1..385: note = Related to LMHK01000002.1
MTRWNPQQFKRDAERAGLDPAVTANAIRTARLVTSVDPDLPPVLTLRHLAALTRSDYLMMRGIAMRSQNEHYRLFRIRKKPAHDGEKRFRVIAVPEPGLMRAQRWIAQRILARIRPHGASVAFSKGDKLVEAARPHCGARWLIKLDVSNFFESINETAVYRVFRSLGYQPLVCMEMARLCTRLGTTTHYRSRPRWLLTRERSTIEVYSRRRMGHLPQGAPTSPMLANLAVRLFDEAIQELADANDLAFTRYADDIALSSQDAKFGRDRCAAVIGKVYAKMGEFGLSPNATKTRVASPGARKVVLGLLVDGDEPRLPRDFRANMRRHLHYLCVPGADIAVHAAARGFDSISGMKNHVFGLAMFARQIERDYGDECLSKLNAVAWPR

SEQ ID NO: 1630 - protein, 384 aa, Dyella sp.
  source 1..384: note = Related to JAAOYS010000006.1
MEDWLPQLYQKQGTEAGIAPRVLANANLTAKSIRAVNRHVPILFSLNHLAVRCGVPYSFLRAVVERHDFQFYRSFRIRKRPLKGRVRFRLISAPVPFLMRVQRWIAQEILSNGYPHETSTAYAKRSSPLKAAALHCDARWLIKIDVMNFFESITEVSAYRAFRRLGYQPLLSFEMARLSTRVRSALRQLPSPYWHTQAHRWPKIESYQCWRKGGLPQGAPTSPMLANLASIALDECLAEVARKYRLTYSRYADDLCFSTSGDFSRKDCAGVISEVYAGLRKFGLRPQTMKTTVSPPGARKVVLGLLVDRNTPHLTREFKARLRQHLHYLRKADVGPARHAERRGFSSVIGLRHHVEGLVEYASSVDAVYGESRRRELAEVSWPF

SEQ ID NO: 1631 - protein, 383 aa, Bacillus sp.
  source 1..383: note = Related to NADW01000002.1
MENWLSQRYRMDANKQGVDPEVVEHAVATAENIRSINPNVPLLFSLKHLALRAGVPYEFLRAVVERQERHFYRTFRIRKRPLEGRIRFRLIAAPVPPLMSVQRWIATQILSEGHPHEASVAYARHSSPLKAASFHCNARWLIKIDVMNFFESITEVAAYRAFRRFGYQPLLSFEMGRLCTRVRSWRRQAPPYWQSKSWRWGKIDSYKFSTKGALPQGAPTSPMLANLTALELDALVTRLANKHGLVYTRYADDLCFSTPGEFSRAQCSQLVGEVYKALRRFGLRPQTMKTVIAPPGARKVVLGLLVDGQKPRLPREFKARLRQHLHFLTHPSVGPALHAARRGFASIIGLRHHVSGLIEYAASVEPAYGARCRSQFANVQWPF

SEQ ID NO: 1632 - protein, 385 aa, Dyella solisilvae
  source 1..385: note = Related to QQSY01000005.1
MTHWSPQRYRSLGQRRGIDPSVLENAVRTGNITCAANPHVPTLFSLKHLAYRSGVDYSLLRAIVERRDPEPYRTFKVRKRSSSPQHARYRVIAVPSPALMRVQKWIAQRILAVAPAHSASTAYGKNCNISDAVLPHCSSRWLIKLDVRSFFESISESAAYGVFRKLGYQPLISFELARICTRVYSKTRLRSYKYWDVEPARWSAIPSYQYFRKGSLPQGAPTSPMLANLAVRQFDANITAIAEKYGLIYTRYADDLALSTSGEFSRQKCHSVIQKVYGEMRAFGLSPNATKTAISPPGARKLLLGLLVDTDRPKLTREFRAKLRQHVFFLQSPKAGPVKHARHLGFQSLIGFRHHIHGLVNYAYEIEPAFGERYKEALKAVEWPL

SEQ ID NO: 1633 - protein, 383 aa, unidentified
  source 1..383: note = Related to JACRPC010000021.1; note = Rhodospirillales bacterium
MTMWRPQSYQRRGKELGIEETLLARACAIGSAVIAVNPALPPVFTLRHLAYQVDADYGLLRAIISRSLRDPYKVFRIRKRPSTVGEKRFRVICVPDPELMRVQRWISQRILSHANPHSASVAYAKGSTILAGAEPHCGCRWLIKLDVRNFFETISEIAVYRVFRSLGYQALVAFELTRLCTRLGTKTPLRIGQRWQVHFGRHMVIGDYSASRMGHLPQGAPTSPMLANLAVLAFDGEVNEIANKHGLIYTRYADDIALSTTDKTFSRTVAAKVIGEVYAAMGRYGLSPNVTKTRVSSPASRKVVLGLLVDGNAPRLTREFKANLRRHLHYLGRPDVGPAKHAAARGFAAIAGLRHHVEGLVAFARQIEPEYGERSAKLLVDRL

SEQ ID NO: 1634 - protein, 388 aa, Pseudomonas savastanoi
  source 1..388: note = Related to CP032456.1
MKDWTPQHYRRAPGAANLPASVMEAAIAASGKTVAVHSSLPPILTLNHLAHLTQVPYKHLRDYVTREIESYKIFRVRKRARPGKPTTFRVICVPPPSLATAQRWIAQHVLSKARPNAASTAFAPGSKLVDATAPHCASRWLIKVDVQRFFESISEVDCYRVFRSLGYQPLVAFELSRLCTRTGNFSRLHRAIKWRRKISLSKSKIPGYASRDIGHVPQGAATSPMLANLVMREADTLMTSLADRLGLTYTRYADDLTFSTSDPKFDRQTAIKTVNEAYAILRRFGFTPNIAKTTIASPRSRKIVLGLQVDQDKPRLTRAFKMKMRMHMYYLERRDIGPLVHAERRGFSAVAGMRNHLMGLAAYAIQIEPEYGRNLRERLEALDWPVLY

SEQ ID NO: 1635 - protein, 388 aa, Pseudomonas veronii
  source 1..388: note = Related to NZ_CP018420.1
MKDWTPQHYRRAQGASSIAPLVMDAAIVTSQKTVAVHPSLPPILTLKHLAHLTQVPYKHLRDYVTREVESYKVFRVRKRGRLGQPTSFRVICVPPPSLSVAQQWIAQHVLAKAKPHAASTAFAPNCRLIDAASPHCTSRWLIKVDVKRFFESISEIDCYRVFRSLGYQPLVSFELSRLCTRTGNFSRIRRTVKWRRKVSLSKSKIPNYASRDIGHLPQGAATSPMLANLAMREADILLTELAERLGLTYTRYADDLTLSTTDVTFDREQARRTVNEVYRILQRFGLNPNLAKTTIASPRSRKIVLGLHVHQETPRLTRAFRMKIRMHLHYLERKDVGPLKHAERRGFSAVAGMRNHLMGLAAYAIQIEPDYGREVKARLEAVEWPVLY

SEQ ID NO: 1636 - protein, 388 aa, Pseudomonas protegens
  source 1..388: note = Related to PPEF01000002.1
MKDWTPQHYRRSKGASNVPTAVMNAAIATSQKTVAINPSLPPILTLNHLAHMTQVPYKHLRDYVARDVESYKTFRVRKRARPGRPTSFRVICVPPPSLAVAQRWIAQHVLAKARPHAASTAFAPKCKLIEAAAPHCSSRWLIKVDVQRFFESISEIDCYRVFRSLGYQPLVSLELSRLCTRVGHFSRMRRAIKWRRKAPLAKSKILKYASRALGHLPQGAATSPMLANLVMREADTLLTSLADRFGLTYTRYADDLTFSTADTAFDRKSARNAVNEVYGILRRFGLTPNLFKTNIVSPRSRKIVLGLQVGQDVPRLTRAFKMKMRMHLYYLEREDVGPLAHAERRGFSAVAGMRNHLMGLAAYAIQIEPEYGMGVKARLEAVQWPILY

SEQ ID NO: 1637 - protein, 388 aa, Pseudomonas aeruginosa
  source 1..388: note = Related to CP077977.1
MKDWKPQHYRRAPGASKVSVPVLAAAIATSEKTVAVHPSLPPILTLKHLAHLTGVPYKHLRDYVSRDTEAYKIFRVRKRARPGTLTSFRVICVPPPSLAIAQKWIAQHVLAKAKPHSASTAFAPNCRLVDAAKPHCASRWLIKVDVQRFFESISEIDCYRVFRSLGYQPLVSLELSRLCTRVGRFNGMRHGIKWRRKASIKKSKIVRYALLRLGHLPQGAATSPMLANLVMRDADELLTSMADQLGMTYTRYADDLTFSTASPVFERQTARRVINEIYQVLRRYGLTPNLAKTTIVPPRSRKIVLGLQVDQDEPRLTRAFKMKMRMHLHYLEREDVGPLKHAERRGFSAVAGMRNHLMGLAAYASQIEPTYGRDLKDRLEKLDWPVLY

SEQ ID NO: 1638 - protein, 388 aa, Pseudomonas sp.
  source 1..388: note = Related to NZ_LT629756.1
MKDWKPQHYRRAPGAADVPASVMAAAIATGAKIVAVQRSLPPIFTLKHLALLTQVPYPHLRDYITRKTDAYKIFRVRKRARPGQPTSFRVICVPPHSLAVAQHWIAKHVLAKGVPHSASTAFAPDCRLIDAAAPHCASRWLIKVDVQRFFESISEVDCYRVFRSLGYQPLVSLELSRICTRIGPLNSLRRSAKWFRKAPLAKSKIRSYAVPRIGHLPQGAATSPMLANLAMKEADVLLTALANRYSLNYTRYADDLTFSTADHSFKRNDARMAVHEIYGVLRRFGLAPNLTKTAIVSPRSRKIVLGLQVNQDVPRLTRDFKMKIRMHLHYLEREDVGPLKHAERRGFSAVAGMRNHLMGLAAYAAQIEPAYGQAIKARFERIAWPVLY

SEQ ID NO: 1639 - protein, 388 aa, Pseudomonas fluorescens
  source 1..388: note = Related to NZ_CABVIT010000001.1
MKDWKPQHYRRAAGAVGVPAPVMAAAIATGQKTVAIHPSLPPILTLKHLAHLTQVPYLHLRDYIAREIDAYKIFRVRKRARPGQPTSFRVICVPPHSLAVAQQWISQNVLAKGKPHHASTAFAPNCRLVDATAPHCSSRWLIKVDVQRFFESISEVDCYRVFRSLGYQPLVSLELSRLCTRVGPFNGLRRSRKWFRKAPIEKSKIRPYAVSRLGHLPQGASTSPMLANLAMREVDGLMTAMADRYGLTYTRYADDLTLSTSDPEFQRKDARKAIYEIYGILRRFGLNPNLTKTAIVSPRSRKIVLGLQVDRDEPRLTRAFKMKLRMHLHYLEHEDIGPLKHAERRGFSAVVGMRNHLMGLAAYAIQIEPDYGKDIKMRLERVKWPVLY

SEQ ID NO: 1640 - protein, 388 aa, Pseudomonas guguanensis
  source 1..388: note = Related to FNJJ01000006.1
MKDWKPQHYRRSPGASAVSSSVMAAAIATAQKTVAVHSSLPPILTLKHLAHLTQVPYLHLRDYVSREVEAYKIFRVRKRARPDQPTSFRVICVPPQSLAVAQRWIAQHVLAKGKTHPASTAFAPNCRLVDAAAPHCASRWLIKVDVQRFFESISEVDCYRVFRSLGYQPLMSLELSRLCTRVGPFNGMRRSRKWFRKPPLSRSKIKSYAVWRLGHLPQGAATSPMLANLAMRDVDVLMTGLADRYGLTYTRYADDLTFSTADPGFEREDARKAIYEVYGVLRRFGLTPNLAKTTVASPRSRKIVLGLQVDQDAPRLPRAFKLKMRMHLYYLERDDVGPLKHAERRGFSAVTGMRNHLMGLAAYAIQIEPAYGKDIKARLERVKWPVLY

SEQ ID NO: 1641 - protein, 389 aa, Jeongeupia naejangsanensis
  source 1..389: note = Related to JAESND010000005.1
MTDWKPQPYRRAAEDLGISKAVLDASIAASLAVVDVNPSLPPILTLKHLSHLSGVPYQDLRLIVSRENADPYKIFRIRKRPRRDGLTQFRVICIPEVKLAEVQQWIARKVLAHGRPHSASTAFAPGSRLVDAVQPHCGSRWIIKVDVRRFFESVSEIAAYRVFRRLGYQPLMSLELARLCTRVGPITKLRRTRHWTRVAPLDAATIRSYAVRHLGHLPQGASTSPMLANLVMCDADAELTKAAESFHLIYTRYADDLTFSTRNAAFDRSAAVTLIKQVYRVLGRFGLEPNLAKTQVVPPRARKIVLGLLADQDVPRLTREFKKKMRMHLYYLERADVGPVRHAQQRGFSAVAGLRNHLLGLAAYASQVEPMYGAELRKRLMAVSWPIVY

SEQ ID NO: 1642 - protein, 389 aa, Chromobacterium phragmitis
  source 1..389: note = Related to CP029554.1
MTDWKPQPYRRAAQSLGISEAVLDASVAASQAVVAINPSLPPILTLKHLSYLTGTPYQYLRQVVSRDELNPYRVFRVRKRPTPCGRVQFRVICVPDIKLAIVQRWIARKVLALGRPHSANTAFAPGSRLVDAVEPHCGSRWIVKVDVRRFFESISEISAYHAFRLLGYQPLMSLELARLCTRVGNFSKLRRQRRWIRLAPRHVAKISSYAVPRLGHLPQGAPTSPMLANLTMCEADAVLTKAAESFGMVYTRYADDLTFSTSKDSFDRKDAKVLIKQIYQILGRFGLVPNLAKTQVVPPRARKIVLGLLVDQSTPRLTREFKNKMRMHLYYLERADIGPIQHAQKRGFSAVVGLRNHLMGLAAYACQVEPKYGDELKKRLKAVPWPVVY

SEQ ID NO: 1643 - protein, 389 aa, Mitsuaria sp.
  source 1..389: note = Related to FOZE01000001.1
MDDWKPQPYIRQAQQLGVAQSILDAAVAASEAVVAAHPSLPPILTLRHLAHLTDTSYLKLRDWVSREIEDPYRVFRIKKRPVAPNCTAFRTICVPDVELAFLQRWLSRNVLSWGRPHSASTAFAPGSTLLAAVEPHCGSRWLVKLDVRRFFESISEVSVYKAFRRLGYQPLVSLELARLCTRVGPASRLYANARWTRRAPRYVAAIRKYAVVRFGHLPQGAPTSPMLANLVMRDVDEELTKVAKLHGMTYTRYADDLTFSTPRRDFGREIAVELIQKVYRSLGRFGLQPNLAKTQVVPPRSRKVVLGLLVDGKEPRLTREFKNKMRQHLYYLERPDVGAVRHAQARGFSAVAGLRNHLLGLAAYASQVEPQYGAELARRLNAVSWPVVY

SEQ ID NO: 1644 - protein, 390 aa, Alcaligenes faecalis
  source 1..390: note = Related to NZ_CP013119.1
MNDWKPQPYRREAQRRGVSPEVLAAAIAASEAVVAVNPSLPPILSLRHLSHLTGVPYQLIRAWVTREGAGESPYKTFSIRKRPKKDGTKQFRFICVPQHDLGLTQRWIASKVLALGRPHSASTAFAPKSKLFEAVEPHCECKWLIKVDVQRFFESITEIAVYQVFRKLGYQPLVSLELARICTRLGPPGRYRPPARWRRHAPLDAHIINSYSTRALGHLPQGASTSPMLSNLVMVDLDEKLSKLASSVNMTYTRYADDFTFSSHATDFNREAAERFIKDIYHALGQFGLKANLAKTQIIPPRARKVVLGLLVDGKTPRLTRKFKAKMRMHLYYLKHAEVGPLRHAERRGFSSIAGLRNHLLGLAAYAIQIEMEYGLELKTRLEAIQWPLL

SEQ ID NO: 1645 - protein, 389 aa, Pseudomonas sp.
  source 1..389: note = Related to AKJM01000112.1
MTDWKPQPYRRAAEELGVSEAVLEAAIAASEAVVAVHTSLPPILTLGHLSHLSGVSYQDLRSFVSRDEPDPYKVFRVRKRPQPDGRLRFRVICVPDARLGDAQRWIARHVLVHGRPHSASTAFAPKARLIDAVRPHCGSRWLIKIDVRRFFESISEISVYKVFRRLGYQPLVSLELARLCTRVGPNTWLTRTQRWWRRAPLHVSTIRNYALPRLGHLPQGAPTSPMLANLVMREADIELSKIAKSYGLNFTRYADDLTFSTTKPKFDRAAAGSLIQQVYQVLGRFGLEPNLAKTQVVPPRARKIVLGLLADRDAPCLTREFKNKMRMHLHYLEHEDIGPVRHAQHRGFSAVAGLRNHLLGLAAYASQIEPVYGAEIKTRLMAVPWPIIY

SEQ ID NO: 1646 - protein, 390 aa, Pseudomonas thivervalensis
  source 1..390: note = Related to NZ_LT629691.1
MKDWKPQPYRRIAQELGVSDAVLRSALAASEAVVAVHPKLPPVLTLKHLSRLSGVGYMDLRRYVSREDPHTYKVFCIRKRPQPDGRIRFREICVPEHSLCDVQQWIVRHILVHGRPHSASTAFAPGAKLIDAVQPHCGSRWIIKLDVRRFFESISEISVYNVFRSLGYQPLVSFELARICTRIGSDKTWLSKTRRWRRKAPLHVAAIRNYSAKQLGYLAQGAPTSPMIANLVMRAADAEISALSEPFGITYTRYADDLTFSTNSAHFDRTTASALIRKVYQTLGRFGLQPNLAKTQVVSPRARKVVLGLLADGVSPRLTREFKGKLRMHLHYLEHVDVGPIKHAQRRGFSAVAGLRNHLLGLAAYAIQIEPEYGYAVKARLMAVHWPIIY

SEQ ID NO: 1647 - protein, 389 aa, Bordetella sp.
  source 1..389: note = Related to NZ_VEHL01000001.1
MENWRSQHYQSVGRSQGIAPEILNAATQTGTAIVRTNARLQPVLTLRHLAYLADCDYGFLRAVVGRAIENPYRVFAIHKRPAPSGNARFRTICAPDPRLLGVQRWLVTNVLNHAPTVHPASKAFAPECTLVKAAEPHCGARWLVKVDVRNFFESISEIAAYRAFRALGYQALVAFELARLCTRLGRFTPRRSHPQWLRKRNRIYRIASYNHAEGRIGHLPQGAPTSPMLANIAMQAADAEFDMLASSAGMVYTRYADDIVFSTKDKDFTRDLAAGLVGSAYRILGKYGFSPNVAKTEIIPPRARKVVLGLLVDDLTPRLPREFKEKMRMHLYYLKRDDIGPVRHAKKRGFIAVASLRNVLYGLAAFATQIEPTYGSRIRRDLDAIEWPT

SEQ ID NO: 1648 - protein, 391 aa, Orrella marina
  source 1..391: note = Related to NZ_CP028901.1
MENWHPQHYQAVGHSQGISPDVLAAAMQTAKVILRVNPRLQPVLTLRHLAYLTDCDYGYLRAVIGRGIENPYRVFTIHKRPGPSGNARFRTICAPDSQLLKVQRWLVTNILNHATAAVHSTSKAFAPGCTLMKAAEAHCGARWLIKVDVQNFFESVSEIAAYRAFRNLGYQALVSFELARLCTRLGHNTPRRGHAQWLRKKAGVAYKISKYNHSMGRIGHLPQGAPTSPMLANLAMRAADAEFDNLARIDGMTYTRYADDLVFSTCDSGFTRDKASAIVGSVYRILGKYGFSPNVAKTEIVPPRARKIVLGLLVDEPSPRLPREFKEKMRMHLYYLKKDGIGPARHASKRGFISVAGMRNVLYGLAAFATQVEPTYGSSLRQDLDAIPWPT

SEQ ID NO: 1649 - protein, 390 aa, unidentified
  source 1..390: note = Related to JACRAR010000013.1; note = Betaproteobacteria bacterium
MENWRSQHYRNFGTRKGVSPEILEAAVQTGEAIVRTNARLQPVFTLRHLAYLTDCDYGLLRAIVGRSLQNPYRVFRIHKRPRSDGLNRYRTICVPDPQLLAVQRWLASNILNHAASSIHAASTAFAPGCTLLRAAEPHCGAKWLIKVDVQNFFESVSEIAAYRAFRRLGYQALLAFEFARLCTRLGNRTLRRSHQQWRRDPWRRYEIAAYNHSQGRIGHLPQGAPTSPMLANIAMHTTDVDLDALALSFRLTYTRYADDLVFSTTDPAFTRKLASSFVGSVYGILGKYGFSPNVAKTQIVPPRARKVVLGLLVDEPSPRLPREFREKMRMHLYYLKKDGVGPARHAVKRGFTAVASLRNVLYGLAAFATQIEPQYGAGIRAELDSINWPT

SEQ ID NO: 1650 - protein, 390 aa, Paraburkholderia sp.
  source 1..390: note = Related to QUNA01000002.1
MGNWRPQHYRTIGSEKGVPRDVLDAAVQTGKAIVRTDAQLEPVFTLRHLAYLTDCDYGLLRAIVGRSIQNPYRVFRVHKRPGPDGQKRYRTICAPDPQLLTVQRWLSTNVLNHASSSIHAASTAFAPGCTLLNAAEPHCGARWLIKVDVQNFFESISEIAAYRAFRGLGYQPLVAFEFARLCTRLGRKTSRRSHAQWRRAPWRRYKIAAYNHDQYRIGHLPQGAPTSPMLANIAMHGADEALHALARSSGLTYTRYADDLTFSTTALDFNRELASIVVRSVYRILGEYGFSPNVAKTQIIPPRARKIVLGLLVDEPNPRLPREFREKMRMHLYYIKKDGVGPARHAANRGFTAVASLRNVLYGLAAFATQIEPQYGLSIRKELDAVAWPT

SEQ ID NO: 1651 - protein, 389 aa, Methylobacter luteus
  source 1..389: note = Related to NZ_KE386569.1
MADWKPQPYRAKAQSLEVDPTILDAAVAAGNEVVAIHPSLPPIFTLKHLAYLTDTKYSVLRMMVGRHIEEPYRVFKIRKRPGPDGAARFRVICAPSPTLLAVQSWLARKVLVHARTKVHSASTAYAPGCSILEAASPHCGCRWLIKVDIKNFFESVSEISAYHAFRSLGYQPLVSFELARLCTRVGSQTRHRAHRQWQRHLPSTKSKIHDYVYWRLGHLPQGAPTSPMLANIAMYKADGELTAWGLKHGLVYTRYADDMTFSISDEGFNRNKAAAVIRGIYRIIGKYGFAPNVTKTQVVPPRARKVVLGLLVDQNEPRLPREFKMGVRMHLHYLKSPKFGPAVHAANRGFTAVAGLRNHLFGLVAYAAQVEPAYGTRIKSELEAVKWPI

SEQ ID NO: 1652 - protein, 386 aa, Methylobacterium sp.
  source 1..386: note = Related to JAIETD010000002.1
MLTKRPQHYRSLGRCAGIDDVIIERALATAAIQDRVGGRIPTILTLRHLAELAGVPYGFLRGVAARRFPDPYTTFQVRKIARPGEEGYRTITVPPPLLMSVQRWISGNILVHGRPHAASTAYAPGSSVVKAAERHCGCRWLIKLDARRFFESISEIAAYRVFTTDFAFQPLVALELARICTRLPENARTNRARRWLAKVSGYGAILDYHAAQLGHLPQGAPSSPMLANLAVREFDDEMARTAQQHRMTYTRYADDIALSTSDPAFTRSRASDVVLAAYAAMGRHGLSPNTTKTNVVPPGARKLVLGLLVDGDRPRLTREFKDSLRMHFHYCLMPDVGPVAHAEKRNFVSVIGLRHHLGGLVAFASQIEPEYGASLSEQMKKIVWPL

SEQ ID NO: 1653 - protein, 307 aa, Burkholderia lata
  source 1..307: note = Related to CABVPY010000024.1
MLAKGGTPSRGYRMISVPRPDLKHVQRWICDNILALEKPHSASKAYTPKSTLVEAVEPHLGCRWLIKLDLHAFFDSIPETSVYKVFEGIGYQPLVAIELARICTRLSPDSRWRAHSRWQSRRPERYSNVKGYAVKRLGYLPQGAPTSPMLSNLVMRVFDADLTAAAVKRGFQYTRYADDLAFSTKEMSSRNLCGALITDVYKLIAKYGLAPNLSKTAVTPPGGRKLLLGLLIDGEKPRLTKEFREELNRHLYFIDKYGVQSHADHRKFESIYGLRHHLFGLAYYARQIDPTYGQAVLARLNAVPWPI

SEQ ID NO: 1654 - protein, 386 aa, unidentified
  source 1..386: note = Related to JAFCZG010000487.1; note = Deltaproteobacteria bacterium
MCSWCPQQFRKEALKNNIDLNIIEHAIKNAELVSAVSSELPPLFSLRHLSHLTGVDYVVLRPVVERNYSNPYKIFRLKKGVKGHQNRGFRIICVPDASIMKAQRWIAKNILSCGEASSASFAYAKSSKIIDAAKLHCGCRWMLKLDVRNFFESFSEIAAYRVFRSFGYQPLISFELSRICTRLGNQTKTHSHPKWMATNKNYTVINKYISRRIGHFPQGAPTSPMLSNLAMKLFDNEVIGIATKHGLVYSRYSDDLCLSTADKKFNREKAKTIINAIYKEMMKIGLAPNITKTQIIPPGARKIVLGLLVDGEAPKLSRAFRSKLRMHFYYLKHVDIGPPLHAKNRGFESVMGLKNHIQGLIAYARQIDPAYASSCTDQMNGIDWPL

SEQ ID NO: 1655 - protein, 387 aa, Aliikangiella marina
  source 1..387: note = Related to NZ_VIKR01000006.1
MHIWCPQQFRKAGEANNVDPKVIENAIQVASAVQAVDKRLPPIFSLRHISHLTGVDYFVLRSLVERNYIEPYKVFKLDKKNKRSGNRGYRIISIPSPQLMIVQKWIAKNILKFGEVHTASFAYAENSKIIQAATLHCNCTWMIKLDVSNFFESFSEIAAYRVFRTLGYQPLISFEMSRLCTKLGTETRLRRHPAWQSSSFSKYHKISRYRNRAIGHLPQGAPTSPMLSNLAMKNFDSAVSKIALDNNLVYSRYADDLCLSTNDKSFDRTIARKVIISIYEKMNAIGLKPNLTKTQIVPPGARKIVLGLLVDGNSPKLSREFRAKLRMHFHFLCRSDIGPAKHAERRGFESVMGLKNHIQGLIAYARQIDPTYASSCDEHMDNINWPF

SEQ ID NO: 1656 - protein, 386 aa, unidentified
  source 1..386: note = Related to JAESRL010000013.1; note = Porticoccaceae bacterium
MHSWCPQQFKKNGIKQGVNPEVIEHAVQNAALVKAVSNNLPPIFSLRHLSNLVGVEYSLLRAVVERQQLDPYKVFKLKKRSKRTSSHPFRIICVPDEFIMKTQKWIAQHILSQGSVHHASKAYAKNSNIVDAANLHVECRWVIKLDVNNFFESFSEISAYRIFRSFGYQPLISFELSRLCTRLGPHTKLRSNSYWTATRHKYKIIKRYKNHRIGHLPQGAPTSPMLSNLAMKGFDKEVSVIAENAGLIYTRYADDLCLSTTSEDFSKSKAQIVINNIYEKMRNIGLRPNITKTQILPPGARKIVLGLLVDGDKPRLSRDFRSKMRMHLYYMMREDIGPVLHAKNRGFESVIGLRNHIQGLIAYAKQVDESYGLVCACKFETIKWPM

SEQ ID NO: 1657 - protein, 384 aa, Marinobacter sp.
  source 1..384: note = Related to NZ_CP034142.1
MHRWNPQQFRKAAEEQGVAPKVVENAISCAEITRSVDPRLPPLFSLRHLAHYVEADYSLLRKAVARSGDEPYTTFKLKKNGKRAYRIICVPDIFLLEVQRWIAQNILAFGTPHHSSVAYAKNCNIVDAASVHCGCRWLIKLDVANFFESFSEIAVYRVFRSLGYQALISFEMARLCTRLGAHTKTRSGNRWEVRDDRIYKIDGYKNCRIGHVPQGAPTSPMLTNLALREFDKDIGDIAAEYGMYYTRYADDMFFSTKDLSFNREIGKKLISRLYGRMKAEGFRPNISKTRIHPPGARKLVLGLLVDGAVPKLTREFRSKIRMHLYYMNKQHIGPALHAQNRGFDSVMGLKNHVEGLINYAHQVQPDLGARLRAEFKKIAWGASV

SEQ ID NO: 1658 - protein, 367 aa, Methylophaga sp.
  source 1..367: note = Related to VENF01000020.1
MSRKHSQLLPLQGLQPASASTGACFPVINSLKQLADMTETDYAILRQFVARQQPEPYKTFRIRKKSGGFRIIAIPDENLLKVQQWIYRQILTLVRPSPVSYAFQKGKSIQNAASVHCGCRWLIKLDLYNFFSAISEIDVYRVFRSLGYQPLIAFELARLCTRLGSLTAFRRRNRWQIADHYAVISQYHGQRMGHLPQGAPTSPALSNLVMVNFDRKVLCLAAEEQLTYSRYADDLCFSTPLRDFSRARARAFIHQIYRLMRSHGQSPNMSKTVIVPPGARKIVLGLLVDGEQPRLQKQVRNKIRQHIFHLNHADIGPEKHAQKRGFHSTAGFKKYLDGLLSYVSDIDPDLEQTYRHQLAGVRWPLET

SEQ ID NO: 1659 - protein, 364 aa, Methylophaga sp.
  source 1..364: note = Related to NZSL01000007.1
MGRKHSQLFFTHDSQEISASSNCLPPIKSLKHLADLTETSYRDLRKIITRQSPEPYKVFRIRKKSGGFRIIAIPDESLLKVQQWIYRHILSQAQPSPVSYAFQKGKSIRDAASVHCGCRWLIKLDLYNFFGAISEIDVYRVFYSLGYQPLIAFELARLCTRLGSLTAFRHRHRWEIEGNSTIISQYQGQRMGHLPQGAPTSPALSNLAMVAFDRKIMNLAAEEQLTYSRYADDLSFSTPLTSFSRELAKAFIHRVFRLMRTYGQSPNMTKTKIITPGARKIVLGLLVDGEEPRLQKSVRNHIRQHIFYLNHSDVGLQKHAQKRGFLSTDGFKAHLDGVLSYVHDIDPSLAQNYRHQLADVYRLV

SEQ ID NO: 1660 - protein, 400 aa, Burkholderia cepacia
  source 1..400: note = Related to NZ_CP013376.1
MKTWSPQNFQSRAKEKSGQAVIGNAQKIAKQIQTINPKLPVIFTLKHLSVRARISYGFVRSVVSRNPSEPYRSFSIRKRISAPRGKTSKRKAMGVKHEVGEHSFRRICVPTPRLMQLQRWIDKNILSVAPPHTASVAYSQGKKLIDAAQLHCGSTWLVKLDVKNFFESITEIDVYRVFLSLGYPALLSFELARICTRLGIDSKYARKDVFAVRRLARRKGHVAAYFGSRMGRLPQGAPTSPKLSNLVMRSFDEDMTNLAQKEGMTYTRYADDLCFSTRSRTYTRDKATKLIRSVYDALGATGLGPNRTKTVVVPPGARKVVLGLTVNDVRPRLPAELKSRMRVHLHYLKLFGPTEHAKRSGFSSTLGMYRHLAGICAFAQQIEPDVAKDWLTKLQGISWI

SEQ ID NO: 1661 - protein, 385 aa, unidentified
  source 1..385: note = Related to QBMO01000003.1; note = Alphaproteobacteria bacterium
MTPWRSQAFRAEAIAGGGSAGVITNAVATAAALHKHTPDAPPVFTLGHLAHLTDVHYRFLRQVVERQDPERYRRFRILKRTSGAGGAPRYRIICVPDPRLMRVQRWINANVLALGHVHKASTAFKAGDNIVAAAGVHCDAKWMIKIDILNFFESVSEQSVYHVFRGLGYQPLISFELARLCTRRGESSNARRGKRWAHSVGHAKRITNYHSSVLGHLPQGAPTSPMLANLAMKGFDEAVSRLADTYDLSYTRYADDLTLSSLGLFDRSRAQTIVSEVYDQLRCWGFRPNLAKTLIVPPGARKVVLGLLVDRQVPRLTKAFRARMRRHLYFLSHPQHGPVKHAAALGFASVYGLRNHVSGLIAYAQQVDANFAADAWGKFDAIVWP

SEQ ID NO: 1662 - protein, 386 aa, Nitrospina sp.
  source 1..386: note = Related to JABJCF010000323.1
MTPWRSRSYVDSGSTAGCDETIVKNAAETGKMLLERTPGAPPIFTLKHLSQLTGVNYSFLRRCVERVESEPYRRFRIRKRQNPNEKKQRYRIICVPDPRLMAVHRWINTNILQLVPPHAASVAFGKGNNIAEAAANHCASKWLIKLDIVNFFESISEQSVYHVFSRIGYQPLIAFELARLCTRLGQPSYARWSRRWSARSYRFEKISSYQKEQLGHLPQGAPTSPMLANLSMTAFDASIRQVANDFDLAYTRYADDLTFSTTSVEFNRNKSQTVIPKIYAELLKYGFKPNLTKTKISSPGSRKVVLGLLVDGAEPRLTKKFRDNIRQHLYFINHPNIGPVQHANKKGFKSIYGLRNHVQGLIAHASQIDKEYANAAWEQFNHVLWP

SEQ ID NO: 1663 - protein, 391 aa, Poseidonocella sedimentorum
  source 1..391: note = Related to NZ_FOYI01000015.1
MEPWRSQHFKKFAISKGSDLATVDAAIAIGKALQVKSPNCQPIFSLKHLAYSADVKYKFLREVVERSTEDKYRVFKIHKRGIPGQTSKRFRIICAPDPQLMKMQKWIARNILAHGRTHDASVAYQAGSNIVDAASLHCGCRWLIKLDIINFFESVTEQNVFRVFSDMGYQPLVAFELARICTRKGSATWRRNRAYKKWRTRNHIYTSIHAYSAVDILGHLPQGAPTSPMLANLAMVDFDKSVEDVANSFGLTYTRYADDLTFSTKSDAFSREVAQKVISEVYKVIRRFSFEPNLTKTQVVPPGARRVVLGLLVDGPTPQLSKKFRNQLRRHLHHVSADWPGVVEHAEKNHFQSVFGLRNHIEGLIAFAHSVDPEYAKKAWEKFAKIDWPQA

SEQ ID NO: 1664 - protein, 380 aa, unidentified
  source 1..380: note = Related to JAHLLJ010000012.1; note = Deltaproteobacteria bacterium
MWHPHSFKYQGKKEAVDDGIVQTAIEIADKTSSVHPELPPIFSLRHLAHLTNVSYGFLRHIVCRNIDEPYEVFQIRKRIYSKKKAYRIVCVPSPDLMCVQRWIAHKILRLGDTHPASMAYAPDSKIYRAALQHCECKWLVKIDVKRFFESISEMKIYHVFLQFGYHPLVAFEMARICTRVGKGSTFWRKPQWIPQRHVYYKITDYMSDRLGHLPQGAPSSPMLANLAMKSLDQKLQRIADKFQVSYTRYADDLTFSTKDKVFGKHNSRKIVRKVYDVLRAHGLLPNTLKTTISHPGARKVVLGLLVDGPKPRLSRQFRSRIRQHLYYLQKDPIAHARARGFISVWGLRNHIQGLLAHTKEIDTDFYDKTSSEFNLVDWPL

SEQ ID NO: 1665 - protein, 425 aa, Rhizobium lentis
  source 1..425: note = Related to JACHBD010000013.1
MAWNSQRFVRAGELAGVDADILNNAVIIAEQTLRVQSSGPPILTLGHLAHLSGQSVKYLRSLVSREGEDPYRQFTIRKRPVPNQSPRLRFIAVPEPQLMSLLRWILSEILEKAPCHPASSAFAPESKLFNAAFKHRGAQWLIKVDVRDFFESITEIDVYRVFLERGYQPLTALELARICTRLRDVHREKGSIATRNRRSSMRTPNGIGEYNSRIMGTLAQGAPTSPMLANLAVRALDEKLQGVSEKFGVRYTRYADDIILSTTDKTFGRQRSIQLVGEIYAALGLYGLAPNTSKTLIVPPGARKVVLGLLVDGSKPKLTREFRAKMRMHLHFLLHEGVGPRAHAANRGFSSVEGLRQHLLGLIAFAGQVDLPYALRYKNLFRSIDLERRRHLTSSQSESPLRLGWKHLLEPAGATLGSIRRSHPT

SEQ ID NO: 1666 - protein, 387 aa, Rhizobium laguerreae
  source 1..387: note = Related to JAAXSV010000011.1
MAWNSQRFVRAGELAGIEAEILENAVAVAEHTLGVRSPGPPILTLGHLGHLTGLSVKYLRSLVARDGDDPYRQFTIRKRPVPGQPPRFRFIAVPEPQLMGLQRWILSEILERAPCHPASVAYVPGSRLFKAANQHRRAQWLIKIDVRDFFESITEIDVYRVFLGRGYQPLTALEFARICTRLRDNLRESGAPAPRKRRTKMRGSESVAAYYSAVMGTLPQGAPTSPMLANLAVQGLDEKLQAIADKVGLRYTRYADDLIFSTSDKSFGRERSIQFIGEAYSALGEHGLTPNTSKTLIVPPGARKVVLGLLVDGAKPRLTRDFRAKMRMHLHFLLHKNIGPKAHASNRGFSSIEGLRQHLLGLISFAAQIDRSFANECRRQFRLVEWS

SEQ ID NO: 1667 - protein, 387 aa, Rhizobium leguminosarum
  source 1..387: note = Related to WUFA01000001.1
MVWNSQRFVKAGVLAGVSTEILDNAVTIAEHTLSFRSPGPPILTLGHLGHLTGLSVKYLRGLVARDGEDPYRQFTIRKRPIPGQPPRFRFIAVPEPQLMDLQRWILSEILQHADCHPASVAFAPGSRLRTAAYEHRRAQWLVKIDVRDFFESITEIDVYRVFLARGYQPLTALELARICTRLRDVHREKGSPAPRNWRTRMRAPNSVGAYYSAVMGTLPQGAPTSPMLANLAVKDLDDKLQAIANKVGLRYTRYADDLTFSTTDKTFGRERSVQLVGEVYTTLGLHGLAPNTSKTLIVPPGARKVVLGLLVDGSKPRLTRDFRAKMRMHLHFLLHEDVGPTAHAIHRGFSSVEGLRQHLLGLIAFAGQIDRSFAEECKVKLRSANWP

SEQ ID NO: 1668 - protein, 392 aa, Maritimibacter alkaliphilus
  source 1..392: note = Related to NZ_VNHV01000015.1
MRTWNSQRYFAEGLAAGVDESILNNAIATAEHTLRQPSPGPPILTLGHLGHLAGVDVGILKTYASRQDADPYREFSIRKRPIPGQPPRYRTIAVPEPPLLRVQTWIASEVLRHAPCHSASTAFAPGSRLAQAAARHCRAVWMVKIDLRNFFESLTEIDVHRVFLERGYQPLVAFELARLCTRLRDKHRNDTAVLPQRRTPKFRHSSLTSLYPRDLLGVLPQGAPTSPMLANLAVRDLDERLTAIAKTFGVRYSRYADDLTFSTTRKSFGRSRAHDLVGRVYETLAARGLAPNQSKTTIVSPGARKVVLGLLVDGDTPKLTRDFRSRLRKHLYHISAPDQGPVQHAARRGFASVEGLRQHLLGLIAFAGQIDPVYAAKCRAILDSSDWSQTRR

SEQ ID NO: 1669 - protein, 390 aa, Pseudorhodobacter sp.
  source 1..390: note = Related to NZ_PGOI01000009.1
MNDWHSQHYLDAGRQAGIDEELLQRAVAAAEYTLTRPNHGPPVLTIGHLAQLCGVETGLLHAYVAREGDDPYREFTIRKRPIPGEAPRYRFIAVPEPRLLQVQTWIATEILRQAPCHGASKAFAPGNRLITAAGVHCRAQWMIKIDVRDFFESITEIDVHRVFRERGYQPLVAFELARICTRLRDDHRHPTSFLPQRRKPKYYGGSGYSVYPRTLIGVLPQGAPTSPMLANLAVRDLDEVLTSLASQFGLRYSRYADDLTFSTRRKSFGRARAKDAIGQIYQALINRGLSPNRAKTAIVSPGARKIVLGLLVDGTRPRLSREFRSRLRMHLYFVAHPDHGPAQHAKMRGFASVEGLRQHLLGLIAFAGQIDALFADWCRAEMRRANWPLT

SEQ ID NO: 1670 - protein, 405 aa, Phaeobacter gallaeciensis
  source 1..405: note = Related to QOCE01000045.1
MDRAVPRCAAFLHGAIRTTLAESKQMTLWRSQPFLTAAKKDGREDQVVKNATKIATHLIRKSPGVEPILSLRHLGHLTGTPYNMLRSVVRRDEPEPYRIFRIRKRPLANEKLRFRTIAVPAPWLMELQRWLNVCILEHISPHSASMAFSRGNSIRDAAAPHCGARWLIKMDIMNFFESVTERQVFRVFEDIGYEPLVAFELARLCTRLGTRSTHAGHPRYRSSLNRMEIKDYSDPLMGQLPQGAPTSPRLANLVSRDLDKALTKLADERGFVYTRYADDLTFSSREALNRTAIKPIIGAISGIIGDNGFSPNVAKTTVSSPGARKIVLGLLIDGDEPRLSREFKQKLRQHLYYLREHGPVIHAGRNGNATTFGLRRHVFGLLQHARQIEPVYGNSCLEEFAKIQW

SEQ ID NO: 1671 - protein, 380 aa, Ruegeria sp.
  source 1..380: note = Related to JAGHRB010000006.1
MTAWRPQRFKAAAGKAGCEQNVVSHAVTVASHVLIRSPGVEPILSLRHLGHLTDTPYYRLRRLVRREDPEPYSVFRIRKRPLPNEKLRFRTIVVPSPWLMDLQRWLNVNVLEHVPPHPASVAFSRGNSVLEAAAPHCGARWLIKMDIKNFFESITERQVYRVFDDIGYEPLVAFELARLCTRVGNRTSRKYHQRYHSPWQAREISEYTNAFMGHLPQGAPTSPRVANLAARDLDKALSNLADARRFTYTRYADDLTFSTSKKIDRADVRPILGEISKIVSENGFSPNVAKTTVSSPGARKVVLGLLVDGEEPRLTREFKQRLRQHLYHLRKHGPAIHCLHNGNATPFGIRNHVLGLVMHARQIERPYGDACLQEFNSIGW

SEQ ID NO: 1672 - protein, 391 aa, Cereibacter sphaeroides
  source 1..391: note = Related to CP036420.1
MRRDPPHQRWSKQMTSWRPQPFSTMARAQGRDSATIQNSIDAAQRLAEITPNAEPIFTLKHLAHLTGAPYVLLRGIVSRHEPDPYRVFKIHKRPLPGEVTRFRTIVIPNQSLMDVQRWINVHILEHVKPHRASAAFTRGDSIKRAAERHCGARWLIKMDLRNFFESVTERQVYRVYLSIGYQPLVAFELARLCTRVASSHARLSRYHAPWGWKTIEGYRHPTMGHLPQGAPTSPKLANLVARELDENLEQLARSNGFVYTRYADDLTFSTLGASSRCAVRSFIGDVSESIAQAGFTPNQAKTQVSPPGSRKVVLGLLVDRDEPRLSREFKSQLRQHLFYLKRHGASAHASRQGSATIFGLRRHILGLIQHARQIEEQYGNSQLKSFKELHW

SEQ ID NO: 1673 - protein, 338 aa, Hyphomicrobium sp.
  source 1..338: note = Related to LR743509.1
MRHLSVRAGVPYAYLREIVERNATRDYRLFRIRKRPVRNQRLRYRIITVPEARLKKVQQWIDRHVLCAAEPDEASVAFTKRSSVYAAASIHCGARWMIKIDIRAFFESISERQVYHVFHEIGYQPLVAFELARLCTRLRRRAPPLKRWSLGFDRRYEISAYINGQVGHVPQGAPTSPRLSNLVVRELDEDIRTIAASAGLTYTRYADDLTLSKTTDDFSRAAAVKVIRKIYRVLGAHGFAPNLAKTQIVPPRARKIVLGLLVDGDRPRLQREFKARIRQHLHYLMHPKFGPAKHAKAQGNATIYGLRNHIKGLLAFAHGVDPEYARKQTELFNRVHWP

SEQ ID NO: 1674 - protein, 373 aa, Ruegeria arenilitoris
  source 1..373: note = Related to NZ_WPZV01000002.1
MISSSKRNPWHPSEFLEACQRKGAISTVAGPALEIAQRIKAQGPNLPVLLSLAHLAATVDVPIGLLLSYVERDKDPYRVFSVSKLGPNGETSNRRTICVPEPLLSKTQSWIAVQLLNNCTPHAASTAYAPGSSLYKAVRQHCGARWLLKIDLKNFFESINEMMVFDTFISLGYPRPICFQLARLCTRVFGAAQDDFARMRLGVLPQGAPSSPMLANLAVYKLDVSLSEIAAKNGWIYTRYADDLAFSTRSVSSRHETKELMWSILDQIRSFGLTPNKRKTSISPPGARKILLGLNVDTDRPRLTRSFKNNVETHVYAITNPAIGFNKHLEARGFESGPSMIRHIAGLIAYARSIEPDYADSLYKRLTTEAVRS

SEQ ID NO: 1675 - protein, 373 aa, Ruegeria sp.
  source 1..373: note = Related to NZ_JAEDOS010000003.1
MTSSSNRNPWHPSEFIDACQREGAVSNVAGPALDIAQRIKAQGQDLPVLFSLEHLAATVDVPIGLLLSYVQRGKDPYRVFSVSKQGSKGLRSNRRTICVPEPLLSKTQSWIAAQLLNNCTPHPASTAYAPGSSLAKAVRPHCEARWLLKVDLKNFFESIDELKVFDTFVSMGYPRPICFQMARLCTRVFGAERGDNASTRLGVLPQGAPSSPMLANLSVYRLDVSLSEIASRSGWNYSRYADDLAFSTRLESSRHATKDLMWSIFDEIRSFGLTTNKRKTIISPPGTRKVLLGLNVDTDRPRLTRSFKNNVETHVYAITNPEIGFNKHLEARGFRSGPSMIRHIAGLIAYARSIEPDYAEKLYKRLTTEAVRS

SEQ ID NO: 1676 - protein, 374 aa, unidentified
  source 1..374: note = Related to WUWG01000003.1; note = Proposed Oceanomicrobium pacificus
MTGWSRRNPWSPTAFMQACRREGEVETIAEPALGIARRIKAQGPDLPVLFSLEHLAATVDVPIGLLLSYVDREKDPYRVFSISKKRGPKSEASNRRTICVPEPLLSKTQCWIAAQILNNCKPHSSSTAYAPGSSLVNAVKEHCGARWLLKVDVKNFFESINELMVFETFSSLGYPRPLCFQMARICTRVFGTAQFEVSKARLGVLPQGAPSSPMLANLAVNELDEAISEIAIRRGWIYTRYADDLAFSTKRESSRHEAKELIFSIVDEIRSFGLSPNNRKTTISPPGARKVLLGLNVDTSRPRLTRRFKNNLETHVYAITNPSIGIKKHSEARQFRSEQSMIKHIAGLIAYARSIEPEYADKLYRRLTADAIST

SEQ ID NO: 1677 - protein, 385 aa, Rhodanobacter sp.
  source 1..385: note = Related to NZ_JACHCP010000006.1
MRSWRPQNFVREGQLRGVDDDVINNAVLTAARLRQRSPVLPPIFSLGHLAWLVGASYELLRDVVSRYTVDPYRSFQIRKRPLPGQGKRFRRICVPDTFLMLTQKWIASNLLVRVPAHSASVAFSKGDRIVDAVQPHCESTWLIKMDVVNFFESIDERVVYRVFRRMGYQPLVSFELARLCTRIGAPTAARRGRRWNPIRNSESKISSYEAPRLGHLPQGAPTSPMLANLAVIEMDERLSEVAGKAGFVYSRYADDLAFSSRRQLDRKSCREVIASASAILDVFGFSVNSAKTSVRPPGSRKVLLGLNANSVQPRLSRELRDRLLRHRYFLLHPQIGPAKHAKRLGFDSTIGFKNHLFGLVAYAAQVEPGFAMVLKEDLAQISWPL

SEQ ID NO: 1678 - protein, 384 aa, Vitiosangium sp.
  source 1..384: note = Related to PZOX01000020.1
MSSWRPHLYKSNGIAQGRARVTLLNAIVQAQKVQARGLPAILTLGHLSKHVGVPYLLLREVVRRKRDTAYREFPVAKRSGGWRRIYVPEPLLLRTQRWISRYVLANLTPHSASVAYVRESSVFKAAEMHCRCQWLIKVDIQDFFESISERQVYLVYLQAGYQPLVAFELARLCTWVFDEQSLRYRRKRWRTSPERRSVPGEIGGYRDSRIGHLPQGAPTSPMLSNLVMAKFDAAAEAIALSEGCVYTRYSDDLSISSDASDFGRSRAENVVRELFALMRGSGFEPNPEKTVIAPPGARKIVLGLLVDSDRPRLRREFKSRLEAHVHGLVKFGPVQHARQRDFKSIFGMKRHLYGLLTYAEQIDSAFAEPLRKKLDSVVWPGVEP

SEQ ID NO: 1679 - protein, 388 aa, Pseudomonas mangiferae
  source 1..388: note = Related to NZ_VJOY01000004.1
MSRWSSQPYLKAGRKAGVPGDVLKNAVKTAKQVKQGCPPILTLNHLSHLTGVPHSFLHRMVSRTYRTEAYNVFKLRKPNVGHSADRFRWICAPSEELLRVQRWINTHILSKVEPHEASYAYDNRHGVLDAAELHCGAQWLIKLDLTNFFESVLEPRVYELFRSFGYQPLVAFELARLCTRVRASGNPDRRFGNRELPAGLPYPADPRIGHLPQGAATSPRIANLVMQSLDESLHDYACDNELVYSRYADDLVFSSKNAFDRQEAIQHIKLIGKCLIEEGFWLNEAKTKIVPPGARKIVLGLLVDGDEPRLSKSYKKYVSDQLYYLSHPKIAPMAHAKRHGFQSLQGLINHVSGKIAYGFSIEPDWAKKQGKQLKGISGKLELDHVIFP

SEQ ID NO: 1680 - protein, 388 aa, Pseudomonas sp.
  source 1..388: note = Related to NZ_JH635998.1
MNRWSSQLYLKTGREVSVPDDTLQNAVKTAKQMKHGCPPIFTLKHLAHVANVPYPFLHRTISRTYRTEAYNVFKLRKPNVGHSPDRFRWICAPSEDLLRVQRWINTNILSRVEPHEASYAYDKRHGVLEAAELHCGAEWLIKLDLTNFFESILEPRVYDLFRSFGYQPLVAFELARLCTRVRSSGNPDRRFGNGELPAGLPYPADPRIGHVPQGAATSPRIANLVMQSLDESLQDYALEKDLVYSRYADDLVFSSKKAFDRSHAHQHIKSINARLIEGGFWLNEAKTKIIAPGARKIVLGLLVDGDTPRLPKSYKKFVSDHLYYLSHPAIDAKTHAKHRGFQSLQGLINHVSGKIAYGYSIEQDWAKKQGDRLKEICSKNELDHVLFP

SEQ ID NO: 1681 - protein, 388 aa, Pseudomonas simiae
  source 1..388: note = Related to NZ_CP007637.1
MSRWSSQLYLTTGRKAGVPGDILQNAVQTAKQMEHGCPPILTLNHLAHLAGVPYPFLHRTISRTYRTEAYNVFKLRKANVGHSPDRFRWICAPSEDLLRVQRWINVHILSKVDPHEASYAYDKRHGVLEAAVLHCGAEWLIKLDLTNFFESILEPRVYKLFRSFGYQPLVAFELARLCTRVRKSGNPDRRFGNTTLPVGLPYSGDPRIGHLPQGAATSPRVANLVMQSLDENLQEYARENELVYSRYADDLVFSSKNAFDRSQVALHIKMINACLIKEGFWLNEAKTKIIPPGARKIVLGLLVDGDRPRLTKSYKKYVTDHLYYLAHPNIDAMTHARHRGFQSLQGLINHVSGKIAYGFSVEPDWARVNGARLKEICSKIQVDYVLFP

SEQ ID NO: 1682 - protein, 388 aa, Pseudomonas plecoglossicida
  source 1..388: note = Related to CP031146.1
MTRWSSQPYLKEGRGLGVPQDILQNAVKTAKRMKHGYPPILTLNHLAHLTGVPYPFLHRTVSRTHEKEAYNLFALKKPNVGHSPDRLRWISAPCEDLLRVQRWINANILSHAESHEASYAYDKRHGVLEAAELHCGAEWLIKLDLTNFFESILEPRVYKLFRSFGYQRLVAFELARLCTRIRVSGNPDRRFDHRTLPAGFPYPADPRIGHLPQGAATSPKIANLVMYSLDEQLQAYATKNELAYSRYADDLVFSSSNPFDRPQAIEHVKAINECLIKAGFWLNKAKTKIIPPGARKVVLGLLIDGEQPRLTKAYRKYISDHLYFLSHPDIDAITHAEHRGFKSLQGLINHISGKIAYGYSIDPDWAKEHGNRLKMICRALEVDHVIFP

SEQ ID NO: 1683 - protein, 388 aa, Pseudomonas farris
  source 1..388: note = Related to NZ_JAHSTV010000019.1
MNRWSSQPYLKAGRKSGVPEDILKNAVKTANQMKHGCPPLLTLNHLSHLTGVPYPFLHRTISRTYKTEAYNVFKLRKPNAGHSLDRFRWICAPSEDLLRIQRWINVHILSKVEPHEASYAYDNRHGVLEAAALHCRAEWLIKLDLTNFFESILEPRVYELFRSFGYQPLVAFELSRLCTRIRASGNPDRRFGNKTLPAGLPYHADARIGHLPQGAATSPRIANLVMQSLDENLQAYATENELVYSRYADDLVFSSRNAFDRSEAIQHIQSINECLVEEGFWLNKAKTRITPPGARKVVLGLLVDGEKPRLPKIYKKYVSDHLYYLAHPEIDAMTHAKHRGFQSLQGLINHVSGKIAYGFSIEPDWAKKQGAQLKAVCKTIEVDHVVFP

SEQ ID NO: 1684 - protein, 388 aa, Pseudomonas sp.
  source 1..388: note = Related to NZ_CP085704.1
MNRWSPQRYLKAGRQEGVSEATLQNAIDTAKQMKHGCPPIFSLNHLSHLIGTTYPFLHETVSRENEEEAYKVFRLKKPNVGHSPDRFRYICAPCEDLLRVQRWINNHILSRIEPHEASYAYDNRHGVLDAAALHCGARWLIKLDLTNFFESILEPQVYELFKSLGYQPLVAFELARLCTRLRVSGNPDRRYKNKTPPEGLPYTGDTRIGHLPQGAASSPRIANLVMRSLDESLQYFASENDLTYSRYADDLVFSSRAEFDRSQATQHIKAINNRLVDEGFWLNKAKTKIVTPGTRKIVLGLLVDGKKPRLPKSYKKYVSDHLYYLSHPTIDAMAHAESRGFQSVQGLINHVSGKIAYGFSIEPVWGKEQGDRLRGVCRELDLDHVIFP

SEQ ID NO: 1685 - protein, 388 aa, Pseudomonas sp.
  source 1..388: note = Related to NZ_CP061943.1
MTRWSSQPYLKAGRQAGVSESILQNAVQTAKQMKHSCPPIFTLKHLAHLTDVPYPFLHRTISRKYRAEAYNVFKLKKQNAGHSPDRFRWICAPTEDLLRVQRWINTHILSKIQPHEASFAYDNRNGVLETAQLHCGATWLIKLDLTNFFESILEPQVYELFRSFGYQPLVAFELSRLCTRVRASGNPDQRHGNKPLPPGLPYSGDTRIGHLPQGAATSPRIANLVMQSLDETLQTYATENDLMYSRYADDLVFSSKGVFDRPQATQHIKAINKCIAEEGFWLNTAKTKIVTPGARKIVLGLLIDGGTPRLSKAYKKHVSDHLYYLAHPKIDAMAHATRRGFHSLQGLINHISGKIAYGFSIEPDWANEHGKRLKGICAKLHVDHVLFP

SEQ ID NO: 1686 - protein, 371 aa, Pseudomonas viridiflava
  source 1..371: note = Related to NZ_UVZC01000005.1
MPEDVLQNAVKTAKQMKHGCPPILTLNHLAHLTGVPYPFLHRTISRTYRKEAYNVFTLRKPNSGHSPDRVRWICAPSEDLLRLQRWINTNILSKVEPHEASYAYDSRHGVREAAELHCEAQWLIKLDLTNFFESILEPRVYELFRSFGYQPLVAFELARLCTRIRARRNPDQRHGNKSLPPGLPYSRDSRIGHLPQGAATSPKISNLVMQSLDETLQAYAEDNELVYSRYADDLVFSSRKPFDRSQALQHVKSINQCLVEEGFWLNKAKTKVITPGARKVVLGLLINGKKPRLTKAYKKYVSDHLYFLAHPDIDAITHAEHRGFKSLQGLINHISGKIAYGYSIEPDWAREQGNRLKVICAAHEVDHVIFP

SEQ ID NO: 1687 - protein, 387 aa, Pseudomonas aeruginosa
  source 1..387: note = Related to CP024630.1
MKRWSPQAYLKAGRAAGIPEDVLQSAVKIAAQMHEGCPPIFSLKHLANLTGVPYPFLHRTISRTYKTEAYTVFMVHKTNVGHSPDRFRTICAPSPELLKAQRWINKYILSNIPSHHASYAYEGRNGVLEAANVHCQATWLIKLDLTNFFESILEPKVFTLFRSLGYQPLVAFELARLCTRTRKTGNPRVMSRAGGGSPALPYKNSLIGHLPQGAATSPKIANLVMRSLDEKLFKFAQDNDLIYTRYADDLIFSSRQPFDRTVPSAYILAINQLLRAEGYWPNRAKTKVVTPGTRKVVLGLLVDGSEPRLTKTYKKYVRDHLYYLSHPEISPELHAKRKGFRSLQGLINHVSGKIAYGISIEPEWGTAQGEKLKEICQKWQVDHVLFP

SEQ ID NO: 1688 - protein, 387 aa, Pseudomonas avellanae
  source 1..387: note = Related to NZ_AVEP02000116.1
MKRWSPQSYLKAGHAAGIPEDVLQNAVKIAGQMLDGCPPIFSLKHLATLTGVPYPFLHRTIDRTYQTEAYTVFRLQKASVGHSPDRFRYICAPCPELLRAQRLINKYILSNLTPHHASYAYDGRNGVLEAASVHCQATWLIKLDLTNFFESILEPQVFKLFRSIGYQPLVAFELSRLCTRVRVRGNPDTKFWSGELSSSFPYKDSRIGHLPQGAATSPKIANLVMRSLDEKLYDLASKNELIYTRYADDLIFSSRQTFDRALASRHIRAVNQVLREEGYWLNRAKTKIVPPGTRKVVLGLLVDGPVPRLTKSYKKYVSDHLYYLSHPEVSAEAHAARRGFNSLQGLINHISGKIAYGISIEPLWGAEQGQRLRQICGRLLVDHVMFP

SEQ ID NO: 1689 - protein, 387 aa, Pseudomonas sp.
  source 1..387: note = Related to MKGS01000151.1
MNRWSPQHYLKAGRAAGIPEDVLQNAVSIAAQMHEGCPPIFSLKHLANLTSVPYPFLHRTISRTYQTEAYTVFRLQKANIGHSPDRYRYVCAPSPEMLRTQRWIHKHILASLKPHHSSYAYEKRNGVFEAASLHCQCIWLIKLDLTNFFETILEPRVYKLFRSLGYQPLVAFELTRLCTRIRPRGNPENRLWRGELTENLPYIGSAVGHLPQGAATSPKIANLVMKSLDEKLYEFASLNELTYTRYADDLIFSSTKSFDRALASKHIETINKLLRDEGFWINRAKTKVVTPGARKVVLGLLVDGAEPRLTKDYKKYVSDHLYFLSRLDIDAEAHAKRKRFDSVQGLLNHLSGKIAYGISIEPKWGAERGTKLRQICDRLSLDHILFP

SEQ ID NO: 1690 - protein, 382 aa, Pseudomonas sp.
  source 1..382: note = Related to NZ_FYDX01000020.1
MNRWSPQRYKSEGLNQGVDQNTLSNALSTAELLRANSPKLPPIFTLRHLAHEAGVPYALLRAVVARSERAEAYKVFKLKKAVASFGANRFRYICVPHPSLLKVQRWIHKHILMQVDAHPASYAYKEKTSPCDAATMHAGCTWMIKLDATNFFESILEPDVYFVFRDMGYQALVAFELARLCTRVRPTGNPVKANRVKEGQGNLPYRTIKIGHLPQGAATSPLLSNLVARKLDCALTGLANDRGLTYTRYADDLTFSSFGDFDRDISTNLVREIYEIMRTHGLWPNKSKTKIIPPGARKVVLGLLVDGPVPRLTKEFKAEVRTHIHFMLRPDVGVRKHLRARKFDTPWGMQNYLFGKLAYAQPIEPRWTARMRDLLRKIDWTS

SEQ ID NO: 1691 - protein, 382 aa, Pseudomonas putida
  source 1..382: note = Related to NZ_CP061723.1
MNRWSPQRYKSAGLNQNVDKGVLNNALRTAQLLHANFPLLSPILTLRHLAHEAGVSYGFLRGVAARSERVEPYKVFKLKKNVVSFGANRFRYICAPHPSLLKMQRWIHKNILMHVHSHPASYAYKEKTSPRDAAAMHAGCKWMIKLDATNFFESILEPDVYRVFREMGYQALVAFELARICTRVRPSGNPVKTDRFKDGMGNLPYKNVAIGHLPQGAATSPLLSNLVARTLDHSLAEFANSKDLAYTRYADDLTFSSFGTFNRDGAENIVREIYEIMRAHGLWPNKSKTKIIPPGARKVVLGLLVDGHVPKLSKEFKAEVRTHIHFMLRPDVGVSNHRKARKFDNSWGLKNFIFGKLAYAQAIEPIWTSRMRDLFMKIDWDS

SEQ ID NO: 1692 - protein, 382 aa, Pseudomonas sp.
  source 1..382: note = Related to NZ_LHVL01000030.1
MNRWSSQHYIRIGNDQGVAPAILKTAAETAKHLHKCNPNFPPVFTLRHLAHYTGVPYGFLRMVVARNKQVEPYRVFKLKKQVRSFGRERFRFVCAPHPYLLKAQRWINREILAKIPGHEASYAYSPGSSVYDAASMHAGCRWLIKLDATNFFESILEPKIYEIFRTIGYQPLVAFELARVCTRTRPSGNPVYSNRADPNKKGLPYNTVQIGHLPQGAATSPHLSNLAARDLDESLKNFALLNQLIYTRYADDLTFSSTEEFVREDVVKKIHEIYGFMRANGLWPNKSKTQIVPPGARKIVLGLLVDGAQPRLTKEFKQEIRTHLHFLQRSDIGVRKHLKARGFDSFWGLRNFLVGKLSYAKSVEPEWESKMNRLFVKINWDT

SEQ ID NO: 1693 - protein, 375 aa, Pseudomonas sp.
  source 1..375: note = Related to JACVBX010000001.1
MTRWSSQLYIKEGRSKDVPRDILRDAARTAELLISPDLPPVFTLRHIAHLTGVPYNFLREVVSRSSDPYRVFKLKKNSPNLVGRYRYICAPHPKLLKVQRWINREILESLQPHEASYAYTKGAGVLKAAEVHSGCRWMIKLDVTNFFESILEPRIYKIFRGLGYQPLVSLELARLCTRVRPYGNPVYRNKQDANLPGLPYMVAEIGHLPQGAATSPLLSNLAVYELDKELSSYSIEHELTYSRYADDMVFSSEAKFSRSAVLVMVHELYDIVRKHGLWPNRVKTKIVSPGARKVVLGLLVDGKKPRLTSEYKQEVRTHLHFLLREDIGVEKHLVKRGFDSRFGLRNFLLGKIAYAQHIEPKWAGEMRNMLHLVKW

SEQ ID NO: 1694 - protein, 388 aa, Pectobacterium versatile
  source 1..388: note = Related to NZ_CAKLIV010000056.1
MNSWNSQLFKTEGRARGIPNEILDNATKIAKQLKYAGLPPIFTLNHLSHLCGVKYSTLRYIVERKHNDDAYKVFKLKKSGVGFSDERVRFVSVPNSELFKVQRWIHNNILKLIPAHENSFAFHSNGGILKAAYPHCNKKWMIKLDVSNYFESILEPTVYNAFLKMGYEPLVSFELARICTRVKPHHNPVKKNRINWLLNTDLPYKTIEIGHLPQGAPTSPLLSNVCSIKLDELLSDFAGVNNLTYTRYADDIVFSSADFFNRDLCNGYIKSVYSIMRENNLWPNRTKTKIIPPGARKIVLGLLVDTDRPRLTKEYKKEILTHLYYIFNESIGLEKHCKARGFDSVYGFLNFINGKLTYANFIDPEWSKPLIYKLKCVARPYIDLDSSC

SEQ ID NO: 1695 - protein, 385 aa, Pantoea sp.
  source 1..385: note = Related to JACVUO010000002.1
MKIWSPHLYISQGIADGVSPDVLNSAVATAKKLRYLDLPPVFTLKHLSVLSGVSYSSLRFIVQRRDPSSNYKTFKLKKSNAGFHPDRVRFISVPEPSLLIVQKWIHEHILKKIPHSKSTMAFHADGGILKAAIPHCGNNWMIKIDIKNYFESISEVKVYDAFVQAGYQPLISFEMARLCTRVRNKSNPIKMYRHDDTLGTQLPYTTVEIGHLPQGAPTSPLLSNICTKKLDASFFEFSIAHGINYTRYADDIIFSSRSFFSRDICVSLIKEIKYILNKNGFWPNEAKTKIVTPGARKIVLGLLVDGPVPKLTSEYKKEILMHLHFASRKDIGIISHCNRRGFKSVTGFLNYLEGKISFASSIEPLWARKVNATFVYIKNKYNNTI

SEQ ID NO: 1696 - protein, 382 aa, Pseudomonas sp.
  source 1..382: note = Related to NZ_LPNO01000008.1
MTNWSPQHYVETGEQHHVSAAVLNAALKTASVIRSRNKDVPIIFTLGHLAALTGVPHSFLRAVITRDDFAPYKVFKLRKRSAGFAKDRFRFICAPHPKLLRVQRWINERILKHIPIDIASYAYRENTSIQDAAIQHCECNWLIKLDMSNFFESILEPKIYRVFRELGYNRLLSLELARLCTRIRHFGNPSMPKEKKLLKKFPYRKSRFIGHVPQGAATSPLLANIVSRGLDASIREFSRTMNITYTRYADDLIFSSKSKFDRQGAHSLVKDLYELIKAHGYWPNLTKTKVSPPGARKIVLGLLVDGRTPRLTKEFKSEIKTHIHFITRPDVGIAKHMLNRGFDSTAGLRNFLYGKLSFAAHVEPLWAAKMRSKLDQVNWPKR

SEQ ID NO: 1697 - protein, 382 aa, Pseudomonas corrugata
  source 1..382: note = Related to NZ_LIGO01000012.1
MTNWSPQRFLETGKQRLASPLVLEAALQSAKLIKSRNKNVPVIFTLGHISAHTKVPYHFLREVITRENLKYYKVFKLQKRNAGFTKKQVRFICAPHPYLLRVQRWINERILKHIPIDDSSYAYRANTSIADAAFQHCECRWLIKLDLSNFFESILEPKVYKVFRELGYNRLLSLELARLCTRTRNYGNPSISREKISQKKLPYIKNKYIGHVPQGAATSPLLANIISRDLDVSLKQFSKNLGLVYTRYADDLIFSTKTDLTRAQLNQHINELYKIIKSHGYWPNFTKTKISPPGARKIVLGLLVNGVTPRLPKEFKAEIKTHIHFISRSDIGVAQHMANRGFESAEGFRNFLYGKLSFANHIEPDWAARRKCELDRVDWAGL

SEQ ID NO: 1698 - protein, 388 aa, Paraburkholderia phytofirmans
  source 1..388: note = Related to NZ_CP014579.1
MVNWRSQHFINEGRQQGIAEPLLRNATLIARRIQAVNADLPPLFTLRHLSHEVGVPYLALRSIVSRKFTCEPYRVFSLRKKNVGHGSRRFRVICVPDPALLKTQRWIHSRILKFGRCHEASGAYSKGSGIYDVASTHCNARWLVKLDVTNFFDAILEPKVYQVFARLGYQPLMAFELARLCTRLRHDGNPKRKSKTGYRKIWTYGSSVVGHLPQGAPTSPLLANLVAYDLDSELFALAENANVRYTRYADDIVFSSSEKAFTRSDAEGLIRGAYACLERHGLWANRAKTHVVSPAARKIVLGLLVDGPVPKLQREFKDKLRMHIHYLHHPQIGPVEHARRRGFDNVLGLQRHLLGLAAFAMGIEPAWGRQQMDEIKRANWPIGIPPFK

SEQ ID NO: 1699 - protein, 388 aa, Burkholderia anthina
  source 1..388: note = Related to NZ_CADETV010000001.1
MVNWRAQQFINEGRQRGVSAPILQNAVQIARQIQSVSNDLPPLFTLRHLAHEVGVPYLALRGIVSRQFIDEAYRVFTLRKRNVGHDSRRFRVICVPNPALLKTQRWIHSKILKLGRCHEASGAYSKESRIYDVASIHCNARWLVKLDVKDFFDSILEPKVYQVFIKLGYQPLVAFELARLCTRTRYTGNPKRRSKRQYPKIQGYRNPVVGHLPQGAPTSPLLANLVAYDLDSELLALAGKTNVRYTRYADDIVFSSADKAFTRADAEKLIDETYACLKQHGLYPNRAKTNIVSPSARKIVLGLLVDGPTPRLQREFKDRLRMHIHYLHHPQFGPVEHAKRRGFDNVLGLQRHLLGLAAFAIGIEPVWGRQQMEEIKRATWPIGIPPFK

SEQ ID NO: 1700 - protein, 390 aa, Acidovorax sp.
  source 1..390: note = Related to QBTZ01000001.1
MNHWNSQRYLASGRSQKRAANVLANAASTAELIRKAAPGAAILFTLNHLARETGVPYHYLRSVTERGGLNSNTFYRVFSLKKHNGGFRGKRTRTICAPEPLLMKTQRWIHEHILTKGCPHSASSAYRPGSRIRDAAEQHRNARWLVKMDVTNFFESILEPKVYEVFRSFGYQPLMAFELTRLCTRIRKGGPKRHKVNDTARIGRYSSGSLGHLPQGAPTSPLLANLAAFDLDCELNSLATSNGMVYTRYADDIVLSSSAEDWSKSKAVTLLKQGHDILKAHGFQPNLAKATIAGPGGRKLVLGLSVSGAEPRLTRDFKNKLRAHIHYLQKYQSQGIPPHEKLKFDSRLGLQRHVFGLAYYAIGIERAWGAARLAELKALPWPVEHGISFV

SEQ ID NO: 1701 - protein, 389 aa, Noviherbaspirillum sp.
  source 1..389: note = Related to NZ_LMHZ01000013.1
MNHWQSQRYLKEGLATNKNIGLLNRAIATAEAIRAVNPHAPPILTLNHLAHETGVPYDFLRGVVTRGGSSDHSFYHVFTVKKNNVGHAHGRTRTICVPHPMLIKAQRWIHENILQFGRFHEAACAYRPGSKIVDTASLHCEARWMVKMDVTNFFESILETKVYKVFRSFGYQPLVAFELTRICTRIRKESPRRIQPSKAGISSYANNYVGHLPQGAPTSPLLANLAVYDLDKELSLLARQNGMIYTRYADDITFSSVTSTWSRAKAVQLLCDGHAKLKSHGFWPNHAKAHIVSPGSRKIVLGLTVDGTAPRLTKQFKNTLRAHIHYLERFQLSNRPPHQVLGFDSILGLQRHVFGLAYYAMGIERGWGAARLAELKSISWPAEHGIAFD

SEQ ID NO: 1702 - protein, 383 aa, Xylophilus ampelinus
  source 1..383: note = Related to CABFMN010000087.1
MTSWDSQHYLSSGLVAGIDAGLLARVDATARRMLAVNPTATVIVSLGHLASLCDVPYGYLRRVIRRDATLEPYRVFALARGGHGPTRRPRTICAPEPLLLRAQRWIHANVLQHAKAHAASTAYAKGCSVVEAARVHCGASWLIKLDVSNFFDSILEPKIYQVFLAQGYQPLVAFELARLCTRVRSKGNVARSTGSGVPGPYVYPSIGHLPQGAPTSPLLANLVSFAFDEEVSQLARRFCLRYTRYADDMTLSFRGTGFDRTKAREVIGACYRIMLDHSLWPNRTKTQVIPPGARKLVLGLLVDGNRPALTREFREQMRMHLHFLETQGPVSHAQHRGFGSVIGLQNHLFGLAAHAMGVNKAIGRDWMYRLQRLPWPAAFEMPV

SEQ ID NO: 1703 - protein, 402 aa, Massilia rubra
  source 1..402: note = Related to NZ_VUYU01000002.1
MTHWQSQLFEVDAPPDAPVDAALAIANAIRSINPLLPPLFTLSHLAHETGVPYKYLRNTVARGKVDEQYSVFRIQKRAPSATIQYRWIAAPHPLLLKTQRWINTNILKNIAVHNAAFAYIKEGSAYKAACLHNQAKWLVKVDIRNFFESILETKICKVFETAGYQPLLAFELSRICTRIATPEMERALAPNGRVPNSLKGLKYSISAYNSFALGHLPQGAPTSPMLANIVAKEIDDEISSLAEKYKLRYSRYSDDIVLSTPSTQFGKEMCKEVVGKLYRILLSAGYQPNVEKTKISGPGSKMIVLGLLVDGKTPRLTSEFKSKLRMHLFYCRTRSPQQHAVKRKFASLLGLKNHLIGLISYAGTIDAAFASKCYAELNACSWPIFDSADFDSIIESTVKILR

SEQ ID NO: 1704 - protein, 399 aa, Massilia rivuli
  source 1..399: note = Related to NZ_WKJJ01000024.1
MSNWQSQLFKQDAPPGAPVSAAIAIASEIRSTNPFLPPLFTLAHLAHETGVPYKFLRSVVARTGATEHYTVFKIKKRSQNAIKQYRWIAAPHPFLLRVQRWINDNILKKLPVNEAAFAYLEDRSAYKAAIVHKNAKWLMKVDIENFFETVLETRIYKIFLDAGYQPLLSFELSRICTRIANPELERAYSINGFAKVKTKGTKYVIEAYASSALGHLPQGAPTSPMLANLIAKDIDEKIAELADRFDLRYTRYSDDIVLSSKSNDFGKANAAKAIGQLYAILRRAGFQPNMEKTKVSGPGSKMIALGLLVDGNKPRLTSEFKDKLKMHLYFCRTRSPQAHAVARKFDSVIGLKNHLLGLISYARMVDSSFADECLAQMNSCHWPITGPIDLSLILESLKA

SEQ ID NO: 1705 - protein, 305 aa, Burkholderia pseudomallei
  source 1..305: note = Related to RKJT01000001.1
MAAPHPLLLRVQRWINTEILSKLQQHPASYAYRSGRCAFDAARRHQRARWLVKADVTNFFESILEPDVYSIFRSAGYQPLIAFELARICTRVRTVDEINPKDLRTSRTKSAAYKIQAYRSAYIGHLPQGAATSPLLANLVANPLDVTLSQVATRTGFRYTRYTDDIAFSSASLDTTRADAVSVAGAIHSALYKHGFSPNLAKSVIRGPGHRRIVLGLLVDGDRPRLTSEFKDTLTLHLRHLEMSGPIEHAKARGFHSIVGLKHHIDGLIAYAKGVDEAFAAKCAQKLGRVSWPLLTPLDLDAIVP

SEQ ID NO: 1706 - protein, 363 aa, unidentified
  source 1..363: note = Related to JAAUUP010000100.1; note = Deltaproteobacteria bacterium
MESKGVAVVLSLSHLSKLTGASYWSLRQVISRHGDMPYRPFRIPKRSGGARLIFEPHPMLRHVQRWILDSILSKVRPNDNAYAFVQGRNAIDAARKHCGAKWLVKADIVNFFESIQEFKIFKVFADIGYGPLVGFELSRLCTYPYRVGHPRYEQPEWTHRLGQEHGENGYIGSYFGSYFDSRIGHLPQGAPTSPALSNFTCKWLDQKLARYAEMHEWEYTRYADDIVLSKVAANRAEAIEALNYVRWVAARSGFMLNSKKTKIVPPGARKIVLGLLVDGDRPRLTKKFQNDLDMHCHYGLKLGAKRHSERRHFRSVLSFLDHVQGKISFAFQVDPLRAEGWASKFLIIRSEYLASVGSDVCNG

SEQ ID NO: 1707 - protein, 387 aa, Mesorhizobium sp.
  source 1..387: note = Related to JAIUHI010000001.1
MSAPSPQRYASGASRQGIDAVTLENALATLARIRATDPRITPVLTLRHFSVLTELPYLFLRRTVARRGHAEYRFVLLKKRIPGRSAKRMISIPPKSLAVAQRWLVDHVLRYAPVHPVSFAFHPESSPVQAAEQHPNTKWLLKVDIEDFFHSVSEGTVSAIFTRLGFPKLLAFEFARLCTIGLDRGPGKNPAPHAGPISFYALGYEGFLPQGAPTSPMLANLAMLRIDTLLASLAEERGLRYSRYADDLTFSTDTDRTLVEMRRLQRDVCGILNDSGFRHNQRKTGIRGPGTRRIVLGMLVDGPMPRLQRAYKDMIRLHLHYLSSPAYGPAKHALARKTGVSSLYHHVRGLISWAQQVEPAFGQQALEQFASADWPPIQPRQIEGRLG

SEQ ID NO: 1708 - protein, 388 aa, unidentified
  source 1..388: note = Related to JAAYVT010000069.1; note = Phyllobacteriaceae bacterium
MSTPSPQRYASGARQRGVDPATLKNALATFARIRTTDPRITPVLTLRHFSVLTELPYRFLRGTVARSGLVEYRTVYLKKRIPGRSAKRMISIPPPSLASAQRWIVDHILRYARVHPASFAFHPDSSPVHAAEQHPNTKWLLKVDIEDFFHSVSEGTVSAIFFRLGFPKLLAFEFARLCTISIDRGRSRNPAPHAGPITAYAYGYEGFLPQGAPTSPMLANLAMLRVDALLADLAEERGLRYSRYADDLAFSADNNRSLAEMHRLQRDVCQILNDAGFQHNRRKTVIRGPGTRRIILGMLVDGPTPRLQRAYKDIIRLHLHYLASPAYGPAKHALARKTGISSLYHHVRGLIAWAQHVEPAFGRQALEKFTSVNWPTIQPRWVERGSND

SEQ ID NO: 1709 - protein, 389 aa, Lichenicoccus roseus
  source 1..389: note = Related to NZ_VCDI01000012.1
MAAPSPQRYLSGGRRQGVATVTLDNALAAFARLRETDPRITPVLTLRHFSVVTGLPYFFLRRSVARRAHIGYRFVYLRKRIPGRSSMRMISIPPPSLAAAQRWLVDNVLRYVEPHPASFAFHPDSSPVLAAEQHPDTQWLLKVDIEDFFHSVSERHVSAIFASLGFPKLLAFEFARLCTIGLDRGPGRNPAPHPSPIALYQSNFEGFLPQGAPTSPMVANLAMVRTDEFLSMLAEARGFRYSRYADDLAFSSDKSRTIAEMRGLQREVCRILNEAGFRPNHRKTVIRGPGTRRVVLGLLVNGPTPRLSRAFKDNIRLHLHYLTSPDHGPAKHALARKTGTSSLYHHVRGLIAWATQVEPAFGAAALRTFRSASWPLIQPQEVGEEDDWL

SEQ ID NO: 1710 - protein, 394 aa, Sphingobium sp.
  source 1..394: note = Related to NZ_CP010954.1
MPVPSPQRYASGGRRQGIDSQTLDNAIAAITRIRATDPRITPVLTLRHLSVLTELPFLFLRRKVARQERVGYRTIFLKKRIPGRSSMRRISIPPKSLAHVQNWLVQNVLQYTSAHPASFAFHPDSSPILAAEQHPNTKWLLKVDIQDFFHSISEGTVASIFSRLGFPKLLAFELGRLCTIPCNRGPSRNPKPHPSPIEFYRSDFEGYLPQGAATSPMLANLAMSMTDQRLSALAEKFGFRYSRYADDLAFSSPNDHALADLQKLKRNVFHILNSSGFRPNLRKTVIRGPGARRIVLGMLVDGKEPRLSKEFKDNIRLHLYYLTSPQHGPQKHALSRKTGVSSMYHHVRGLIAWARQVEKTYGEEALAKFKSVNWPPIQPRMVHCSLDDLRDKDD

SEQ ID NO: 1711 - protein, 344 aa, Acetobacter persici
  source 1..344: note = Related to NZ_BAJW01000019.1
MRHLSALTGLPFLFLRRTVARKEHVNYRKVYLKKRIPGRSTKRLILIPPKSLAVAQGWLVQNVLRYTVAHPASFAFHPESSPVQAAEQHPSTKWLLKVDIQDFFHSVSEGRVSAIFAGLGFPKLLAFELARLCTVAADRGAGRNPQPFAGPINYYDNPFEGFLPQGAATSPMLANLAMLSVDEALSGIAKRTGFRYSRYADDLAFSTKKDSSVAQMNRLKREVIAVLNDNGFRPNLRKTVIRGPGSRRIILGMLVDGPDPRLSKEYKDNIRLHLYFLTSQKHGPQKHALSRKTGVSSLYHHVRGLISWAKQVEPAYGQLALEKFQTADWPPIQPRRIFKIEAEF

SEQ ID NO: 1712 - protein, 388 aa, Rhodovulum marinum
  source 1..388: note = Related to NZ_SLXP01000012.1
MPAPNPQRYRSQGRLEGVDDTVLDHAVETFERIRAVDPRITPVLTLRHLSHLTDIPFLHLRDLVGRRAHRPYKFFYLKKRIPGRNRVRMISVPNGTLMSLQRWIVDNILQFTRPHAASFAFHPDCRPYEAAAEHCGCAWLLKIDLEEFFHTVSEGRVAAVFENLGFPRLLSFEFARLTTVACERPGSRPDPGERWPAIPYYQCEHEGMLPQGAPTSPMLANLAMLKVDEILSALAEEYGMTFTRYADDLAFSCGEEYDFAHVQRFKRLVLEKLNKSGFRPNHRKTVIRGPGTRRIVLGMLVDSERPRLPREYKDNIRMHLHYLTSESHGPSVHAASRQTSVSGIFHHVRGLIAWAETVEPDYGARALENFESVDWPPLEPNRLLGHRG

SEQ ID NO: 1713 - protein, 390 aa, Sphingobium subterraneum
  source 1..390: note = Related to JACIJP010000010.1
MSLPSSQRYRSQGRREGVDDAVLNNALAAMRRIRAVDPRITPVLTLRHLSHLIDVPFLHLREIVARRARRPYKFFYLKKRIPGRSRMRMISAPNATLLKIQRWIVENILQYTTAHEASYAFHPGSRPFDAAQEHCGCEWLLKIDLEDFFHSISEGRIAAVFAHLGFSKLLSFELARLVTVGCERPGTRTDPAIRWPAIPYYQSKHEGMVPQGAPTSPMLSNLVMFKTDEILARLADAHGMKYTRYADDLAFSCGPGKNEIHVRRFMRLVLDQLNHAGFRPNHRKTAIRGPGSRRIVLGMLVDSDRPRLTREYKDMIRLHLHYLTSPSYGPALHALARKTSVSGIFHHVRGLIAWSQIVEPDFGAGALTRFEGVDWPPVQPDPYDEEANDT

SEQ ID NO: 1714 - protein, 389 aa, Sphingomonas paucimobilis
  source 1..389: note = Related to JFYY01000007.1
MPPGPQRYRAQGRREGVDETVLANALSVIDRIRAADPRITPVLTLRHLSELVGVPYPHLRDLVARRVPRSYKFFYLKKRIPGRTSTRMISVPNKTLLSIQQWIVSDILRFTSAHEASYAFHPGGRPLEAAEEHCGCAWLLKVDLQDFFHTISEGRVAGIFAELGFNRLLAFELARLVTVACERAKPSDPAARWPTIPYYQCAHEGMLPQGAPTSPMLSNLVMHRTDGVLARLARAHGMRYSRYADDLAFSCGADRDAAHVRRFKRLVLKSLNEAGFRPNLRKTTIRGPGSRRIVLGMLVDGDRPRLPKGYKDMIRLHLHYLTSPDYGPAAHAQARKTSVSGIFHHVRGLISWAETVEPAYGKQLLARFWSADWPPLEPTYLDDLSEDGD

SEQ ID NO: 1715 - protein, 391 aa, Sphingomonas albertensis
  source 1..391: note = Related to NZ_JACONT010000017.1
MPAPAPQRYRSEGRRKGVPPDVLANALASISRIRDTDPRIEPVLTLRHLAFLTDVPYRYLRQVVARSAATGYRTFRLKKRVPGRSRMRTISVPPPSLKEVQRWIVENVIQHVAPHEASYAFHPGSSPYLAAEEHCECSFLLKVDVQDFFHSIGEGSVAAVFEAIGFQKLISFEMARLVTRPIPSSKPAPDPAARWVAIPYYNYPHEGVLPQGAPTSPMLANLVMRHADQRLANLATRMGMRYTRYADDLAFSAPHGSAIALADMRRCRTQVLRILNEYGFSPNLRKTVIRGPGSRRIVLGMLVDGDRPRLAREFKDNLRLHLHYLTAPSHGPAAHAMARKTGVSSMYHHVRGLISWAQCVDPEYAADALALFRTANWPLVQPRWSGASDDD

SEQ ID NO: 1716 - protein, 387 aa, Methylobacterium goesingense
  source 1..387: note = Related to NZ_BPQL01000193.1
MNLPNPQRYRSEGRSLGVDEITLDNAIATIKRLQASSPSLPAVFTLRHLAHLTQVKYGYLRYIVRRKVNYRHFRISKKLPGRNRYRLISIPPANLSKLQRWISNNILRHLSPSSASYAYHPGSNPRFAAEQHCGCEWLIKIDVQDFFHAISEGRIAEIFYKAGYPRLLSFELARIVTCVLPGTIKRAASYSARWPVISQYQHDREGVLPQGAPTSPMLSNLAMRALDERLIALAAKNGMIYTRYADDLVFSCKNRTKPTIDKVKRSILRELSREGFQPNLRKTAVRGPGSRRIVLGVLVNGKEPRLTRDFKENLRMHFHFLTSEKHGPHNHANNRGTSISGIYHHVRGLIAWAKVIEPAYGANLMVRFHSINWPSLQPHSIFEDMEK

SEQ ID NO: 1717 - protein, 386 aa, Bradyrhizobium sp.
  source 1..386: note = Related to NZ_CP030037.1
MSLLSSQRYRSRGRRLGIDPTTLERAVATIERIQRSDPRLTPILTLRHLSELTGAQYGYLRRVVGRILGGYRHVHFKKRIPGRSRRRVISIPPRRLLEVQQWIAQNVLRFAEPSRASFAYHPSSSPVLAAEEHCGCEWLLKVDIVDFFHSITEGRVSAVFYRLGYPRLVAFELARLTTMQLIRGALQRDAERWSAIPYYQSEYEGVLPQGAPTSPMLSNLVMKDLDERLIELSKQHGMRYTRYADDLAFSCGKGRDRSHVERFKRLVLAELSREGFNPNLRKTVIRGPGTRRIVLGMLVDGPSPRLPREFKDMLRLHLHFLKSEGHGPSAHAQKRRKSISGLYHHVRGLIGWAMSVEPDYGARILAEFERVAWPPVQPRWSERPDR

SEQ ID NO: 1718 - protein, 416 aa, Rhizobium tibeticum
  source 1..416: note = Related to FNXB01000037.1
MLVSRSDIFMLRNGTSLSRRRLGGASCHYPPNGVKVMQSWSPQQYRYDGAQHGVSDETIESVIARVELIAAVNPSITPVLTLRHLSELCGVEYGFLRRIVSRSTVPYRVFSLRKRIPGRTRHRLICVPRNELKAAQDWIVRNILRHTKAHGASFAYHPKSRPELGAHRHCGCDYLLKIDITDFFHSVSEGRIFRIFAELGFSELVAFELARLTTIIAQGTERPDWIAAARWPAIPAYQTSYEGFLPQGASTSPMLSNLAMLALDARIAGMASDAGLVYTRYADDLTFSGRKPHDLKSMKRFKRKVFDALNEAGFRPNLRKSSIRGPGARRIVLGMLVDGPRPRLAKEFKDDLRKHLHYLRSKDYGPAKHAAANKTSISAMFHMVRGLIGWATRVEPQYGRSCLVEFRKVVWPPLIP

SEQ ID NO: 1719 - protein, 428 aa, Sinorhizobium meliloti
  source 1..428: note = Related to RPNF01000004.1
MGILDVQSIGFSMLVSRSDIFMLRNGTSLSRRRLGGASCHYPPYGVKVMQSWNPQQYRSDGAQKGVASETIESAIARIKLIGAANANVTPVLTLRHLSELTGVDYGFLRRVVSRSIVPYRAFSLQKRVPGRTRHRLICIPRDELKSVQDWILRNILTHTKAHEASFAYHPRSRPELAAQSHCGCHYLLKIDVQDFFHSVSEGRIYQIFVDLGFSELVSLELARLTTIIAPGTGRPDWVAAVRWPNIPAYQTPYEGFLPQGAPTSPMLSNLAMVALDARISAMASKAGIVYTRYADDLTFSARAPHDAISLKRFKREIFAVLNEAGFRPNLRKTSIRGPGARRIVLGMLVDGPRPRLAKEFKDDLRKHLHYLKSPDFGPAKHAAANKTSVSAMFHMVRGLIGWATRVEPEYGRSCLVEFRKVVWPPLTP

SEQ ID NO: 1720 - protein, 383 aa, Agrobacterium sp.
  source 1..383: note = Related to LXKM01000017.1
MQSWSPQHYRFHGTTENVPESILESAISRIELIRARNPNITPVLTLRHLSLLADVDYVFLRRVASRSTHPYRAFMLKKNVPGRTRLRLICVPNKNLKKIQDWIVRNILRHTRAHRKSFAYHPYSRPEFAAQAHCDCDYLLKVDIEDFFHRVSEGRVYKIFCDLGYSELVSLELARITTTVAEGTERPIESIHFRWPAIPAYVSPYEGFLPQGAPTSPMLSNLAMLGLDEQLDSMAREEGIVYTRYADDLTFSARRPHNAATIKRFKRRVLALLNDTGFRPNHRKTMIRGPGARRIVLGMLVDGPKPRLPNEFKDEIRKHLYYLQSEKFGPAHHSAANKVSISTLYHIVRGLIGWAARVEPEYGRRCLQQFKLIEWPPIDRGSS

SEQ ID NO: 1721 - protein, 446 aa, Rhizobium terrae
  source 1..446: note = Related to NZ_QJKM01000019.1
MGTTGVQSIGFSMLASRSLFFMLRTGTSLYRRRLRYASRQYPPNGVKVMQAWSPQHYRYEAERHGVQDETIDNAIARIELIVANNANVTPVLTLRHLSAMSGVEYGFLRSVISRSMMRKKYRVFSLRKNVPGRTRYRLICVPNEELKTVQDWIVRNILRHTRSHPASYAYHPKSRPEFAAKAHCGCDYLLKVDIQDFFNRVTEGKITRIFRDLGFSDLVSFELARLTTVTAQGMELPEGLSERRWPAIPAYQSRYEGFLPQGAPTSPMLSNLAMLALDEKLQELASSEGISYTRYADDLTFSARKPHDFESIKRFKRKVLTELNAAGFRPNLRKTHIRGPGMRRIVLGMLVDGQRPRLTKEFKDDLRQHLHYLTSDDHGPATHAQANKTSIGGMFHIVRGKIGWATRVEPEYGRKCLIQFRTIKWPPIERAKSGTISLDFDMIDEP

SEQ ID NO: 1722 - protein, 393 aa, Caulobacter sp.
  source 1..393: note = Related to PEGF01000002.1
MSSWNPQHYRFDGERQGVPGAVIDSALAIMERIRRVDPRMTPVFTLRHLSEMTGTRYGLLRSVVARRTHPYKVFTLKKAIPGRTRVRLICTPNRELKTTQDWIVRNILQHTRAHPASYAYHPGSRPEFAARMHCGCDFLLKVDIEDFFTRVTEGKICEVFEGLGYPDLIAFELARLTTVVASGGKSPSVDPAVRWPTIKAYQHAAEGFLPQGAPTSPMLSNLVMRHLDDRFAAMAAAANMKYTRYADDLAFSARKPHTRATVAAFKRKVLRELSEAGYRPNLRKTAIRGPGARRIVLGMLVDGPEPRLSREFKDDLRQHLHYLASEDFGPSRHAERQKLSVSTLYHRVRGLIGWAMRVEPKFGAKCLAQFEAVAWPPIDIRSPINAIDWDELA

SEQ ID NO: 1723 - protein, 384 aa, Marinobacter vinifirmus
  source 1..384: note = Related to NZ_NEFY01000006.1
MSFWSPQRYQFEGEKHGIDDDAIAASVEVIKRIQNINARLPIVLTLRHLSWLTDTNYGYLRKVVSRESGKYKRVLFKKKVPGRSRYREIHIPEASLLAVQKWITAKILSNTSAHPSSFAYHPDSQPIFAASRHCGCKWLLKIDIENFFHSISERMVYKVFRDLGYTKLLSFELARITTTTGLSNKKSEDIFRSDSSRWPSIPNYYCSDEGFLPQGAPSSPMLSNLVMKAIDKDLEYLANCNGFTYTRYADDLAFSTEKNATIADINRFKKEVNRLLIEAGFNPNRRKTAIRGPGARRIILGILVDSKNPRLSKEYKDQLRQHLYYLRSQEHGPSKHAEARKLSVSTLFHHVRGKIAWAEKVEPEFGALCLEKFESISWPPLDNW

SEQ ID NO: 1724 - protein, 380 aa, Rheinheimera sp.
  source 1..380: note = Related to NYXE01000056.1
MSSWSSQRYKFEGETQGIDDSVLDSSISAIGRIQKVDERLPIILTLRHFSLLTDCHFGYLRRVVSRESREYKRILFKKKVPGRSRYREIHVPEQELLEVQQWVTAKILSNTKAHHSSFAYHPNSQPIFAASQHCGCKWLLKIDIEDFFHSISERMVYKVFKDLGYNKLLSFELARITTIVKARDKSQASSDLTKWPAIPTYCKNSEGFLPQGAPSSPMLSNLVMKSVDEKLATLAKTNGFIYSRYADDLAFSTKLNVGMVSMRQLSKLVSCLLSAEGFNLNKRKTVIRGPGTRTIILGILVDSKKPRLSKEYKDDLRQHLYYLCSQDHGPSKHAEIRKISVSTLFHHIRGKIAWAEKVEPEFGAYCLEQFNGIKWPPLGY

SEQ ID NO: 1725 - protein, 388 aa, Longimicrobium terrae
  source 1..388: note = Related to NZ_JACHOW010000011.1
MPAWNPQRYQHEGKIRDIDQGILDSVVRIINRIRAVDARLPVILTLRHLSVLTDVPYKYLRDVVSRQAGDYKRVLLKKRVPGRTRHREISIPNPVLAGVQKWINENILQFTSAHPLSYAYHPESQAVFAATPHCGCRWLLKVDLTDFFHSISESDVYAVFKSLGYSPLLAFELARLTTMLSASSRPAPADFTERWSSIPAYACEKQGVLPQGAPTSPMLSNLVMRDLDEGLAQLAEAAGYTYTRYADDLAFSTAKDVGLEHVQRLRKSVLLKLAKSGFSGNLRKTVIRGPGARRMVLGILVDGHEPRLAREYKDALRQHLYYLLSPAHGPAKHAGARNLSVSTLFYHVRGKIAWAERVEPSFGSACLEEFEKVDWPPVDVARQRSRDA

SEQ ID NO: 1726 - protein, 395 aa, Bosea sp.
  source 1..395: note = Related to NBDP01000036.1
MRITSPQHYVAAGQGLAIDPLVLENASRAISQIWSRNINLFPLLTLNHLSVATGLNYGFLRRVVARKGGPYLYSHFYMRKRVPGRRKVRMISIPAPKLAQCQSWIVRHILKHVPPHSGSYAYHPHSNPVFAARRHTEAVWLIKVDIQDFFHAINEHAVYRVFRSLGYASILSLELARLCTMTAERPRQAKDPSARYVSPAVEYYQTPYVGVLPQGAPTSPMLSNLVMRDVDQGLSDLAKESAMRFTRYADDIVFSCADKRLGSSVRLVRNKILEILNQAGFRPNLRKTVIRGPGDRKVVLGMLVDSAHPRLMKEFKDELRLHIHYLRHPKFGPAHHALARKTSVTSIYHHVLGLIFWARTVEPTYGARLLKEFKLIQWPPITRRDYYATVRQAGD

SEQ ID NO: 1727 - protein, 395 aa, Mesorhizobium sp.
  source 1..395: note = Related to RCIZ01000007.1
MRITSPQHYVAAGHELAVDPLVLENASKVISRIWSVNPNLFPLLTLNHLSVASGVDYGFLRNVVARKTGNYRQFLMRKRVPGRRRVRVISMPVPKLMHCQHWIVENILKHAKPSPDSYAYHPNSNPVFAARRHTNSVWLIKVDIEDFFDSVHEHDVYRVFRSLGYAGILSLELARICTMAAKWRPDTDERWARYKGHGVAYYRNQWIGVLPQGAPTSPMLSNLVMRDVDQKLARLASSSCMRFTRYADDIVFSCSDRRTAETVRSVRSQILTILNEAGFRPNRRKTVIRGPGDRKLVLGLLVDGKKPRLAKEFNDEIRMHLHYLGHPDFGPARHATARKTSIAAIYHHVLGLIFWARAVDKTFGSELLRQFNSIAWPPVSERHYFATMEQQENHR

SEQ ID NO: 1728 - protein, 385 aa, Pseudooceanicola nitratireducens
  source 1..385: note = Related to NZ_JAHVKC010000001.1
MRQTSPQQYKAAGHELEIAPAVLNNAAAAMQRIASINSQLFPLLTLKHLSIESDVSYGFLRKTVAREAGRYRHIYLRKKVPGRKNVRMISIPEGRLLRCQKWISENILRFGAPHQASYAYHPGSNPVFAARAHTEAKWLIKVDIQDFFHAISEHQVYRVFRSLGYARLMSFELARLCTMPCERLEPDTADVKYLEATITHYYSPYVGILPQGAPTSPMLSNLVMKELDAKLAKLADDNAMNFSRYADDIVFSCKDARPSQSVNRVKRLILKALNDEGFRPNLRKTKVRGPGTRKVVLGILVDGKQPRLPREYKDKIRQHLHYLTHPDFGPAGHASARKTSVSRIYHHVFGLICWAKAVEPSFGEEALRSFNAINWPPISRPKFYS

SEQ ID NO: 1729 - protein, 323 aa, Rhizobium leguminosarum
  source 1..323: note = Related to WIEL01000040.1
MARWNPQRYQDEGEKQGIDPGVLDAASKAIANIQAVNPSLPPILTLMHLSKVTEVNYPYLREIVGRKIDPYKSFALRKRTPGLHRTRTIHVPEDYLLTVQRWISRAILRQAAPHSASFGYHPGSSPVTAARRHRNAKWLIKIDLKDFFDNIREPAVFDVFRSLGYGSLISFEMARIVTRAPDAKRAQIAIDEHRIPFYSVDSNGFLPQGAPTSPMLSNLVMRGLDAKLQELANEHDFRYSRYADDLVFSCRDQKSRSAAQTLRDAALQALRAGGFTPNMRKTTIVAPGGRKIVLGLLGAVEVQGFFWGLFVIQAADGTICADG

SEQ ID NO: 1730 - protein, 375 aa, Ponticaulis sp.
  source 1..375: note = Related to NZUJ01000046.1
MRFPSLQQYKAKLVSFAVAQPLFSRLVRVLLRIRSTSDSIYPIFTLRHFCQIVGADFKFLRLVIGRKFPYTYTTFYLKKNSPSRGFREINVPCNELRLVQRWLVENIISHVHPSEHSFAFHPGSSPYAAAAEHRNTKWLLKVDIKDFFHSVSEHEVYDIFYGIGFQKLLAFELARICTIPSTDSASLVSKERKIEDYQSNRIGRLPQGAPSSPMLANLAMRKVDHEIASCCAEYDLRFTRYADDIAISSDDDCGLDTLIQIRRQVFRILRAHGFDPNPRKSVIRKPGDRKIVLGLLVDTERPRLTSEFKNNLRMHLYYLMKPSGPSAHAKARNSSITTVHAHVLGLIHWARYVDSTYGNARLAEFKSVNWPKGTW

SEQ ID NO: 1731 - protein, 384 aa, Novosphingobium sp.
  source 1..384: note = Related to NZ_JABVZR010000001.1
MAHPWDPQTFIAGARLAGRSEVTIQACQAAAIAIKRTHPDLPVILTLNHLAHLADVNADFLQEVAHRKIDPYRVFRVKKRGVANLVPAQPRRYRTICVPEPRLMRVQRWIAQNILQVTPSHTASFAFIKNRDLKGAAEMHVNAKWVVKMDVRQFFESIPEAAVYRVFRTFGYGALLSFQMARICTRRPDHHRRDTRALLGRGGQRPYRLHPMGHLPQGAPSSPMLANRAVEALDRRLERLAISAGWTYTRYADDLAFSRTTDATRSEAMKLVKLAELSLQIHGLVVHRQKTSILSPGSRKILLGMLVDTGKPKLTKAFRNNIETHLYALTHKKIGAEKHRTKRGFSSLIGMRRHILGLIAYAHQVDEAYAATLYAKANSVDWTR

SEQ ID NO: 1732 - protein, 384 aa, Agrobacterium tumefaciens
  source 1..384: note = Related to JAALZB010000008.1
MAHRWDPQTFIGGARVAGRDEYTIEACKAAATAVKRIHPDLPVIFTLNHFAHLVDVDADFLAEVAHRKIDAYRVFRVKKRGVANLVSAPSRRYRTICVPEPRLMRAQRWIAQNILQVTPSHRASFAFTKGRDLRGAATSHANAKWLVKMDVRQFFESISEAAVYRVFRAFGYGALLSFQMARICTRLPDHHHSDNRDRLGRGGRGPYRAQAVGHLPQGAPSSPMLANRAVEALDRKVERIANKSGWTYTRYADDLAFSRSDDARRGDSMKLVKLIEMSLMSNGLVVHRQKTSITASGGRKILLGMLIDRGEPKLPKSFRNNIETHLYALSHANIGAEKHRATRGFASLIGMRRHIMGLIAHAHQVDKTYAAKLYAQVNLVDWNR

SEQ ID NO: 1733 - protein, 384 aa, Mesorhizobium sp.
  source 1..384: note = Related to VFSZ01000005.1
MPYRWDSQAFIVGARSEGRSESTIQACLAAATAVKRKHPDLPIIFTLNHLAHLADVNADFLQEVAHRKIDPYRVFRVKKRGVANAVPAPPRRYRTICVPDPKLMRVQRWIAQNILQATPSHHASFAFTRDRDLVDAAKKHAGAKWVVKMDVRHFFESIFEDSVYQVFRSFGYGALISFQMARICTRLADHNRNDARALLGRGGRRPYRQHSKGHLPQGAPTSPMLANRVVETLDQKLDLIAITADWAYSRYADDLAFSRITTTTRRQAMSLVKKVEAELAKFGLETHRQKTTIVSPGGRKVLLGVLIDTDKPRLTKNFRNNIETHLYALTSQKIGPEQHRLKRNFVSLIGMRRHILGLIAFAHQVDETYAAKLYTLFNTVNWNR

SEQ ID NO: 1734 - protein, 385 aa, Caulobacter sp.
  source 1..385: note = Related to NZ_QDKO01000010.1
MRHPWSSQQFRLGALAAGRSEAIIAAAESIARDIKRRNENLPVVLTLHHLAHLVDVPIEPLQKIIFRQIDPYRVYRVKKRGTPNGAAAPPRKYRTICVPHPQLMRLQRWIAQNILNEVAPHDASFAFTPKRNLVGAAWRHTEARWLLKMDVRHFFESISERQAYWVFRTLGYTALLSFQMARLCTRLTQHGVADPRRAAGRGHTGLPYWQHPQGHLPQGAPTSPMLANLVMRSFDRRVEALAQSTGWGYSRYADDLAFSRRDGSSRGAAMHLAKAVEHELALLGLVSHRAKTSVVPPGARKVLLGVLVDSTRPALTRAFRNNVETHLYALTSPKIGAAAHRAKRGFASSIGMRRHIEGLIAFAHQVDRAYGAKLYAQFNDIDWTR

SEQ ID NO: 1735 - protein, 389 aa, Brevundimonas diminuta
  source 1..389: note = Related to KB291762.1
MTFTWDPQQFEAGALGAGLDRRSVEAALAAGAAIKASHPDLPVVLSLGHLAHLTDVSAGVLDKIVRRRLDPYKVFRVQKRGTPKAGNAPARRYRTICVPTPGLMRVQRWIAQNILNVITPHAASYAFTPNVKMSDAIKRHANATWLVKVDVRHFFESISETQVYWFFRRLGYPALLCFELGRLCTRLAPDHRVYATDPPVTPGSRPSAGHDLPYPPRLQGWLPQGAPTSPMLANHIVEPLDVKLSAMARSGGWRYTRYADDLHFSRTSKFTRKAAVDWSHEVERELVRLGLRANRQKTTITPPGARKLVLGALVDSSTPRLNRGFRNNVETHLFALTHPDIGVDKHQAKRGFASTIGMRRHVQGLIAFARQIDRPYGDKLLVQFESIKW

SEQ ID NO: 1736 - protein, 378 aa, Ochrobactrum sp.
  source 1..378: note = Related to PCOO01000001.1
MLHPWDSQAFAEGAKKIGRSDATIANALAVADAIKKSNVNLPVILSLGHLAHLTDVGLPVLRNYTERSDDPYRVFQVKKNHVGKAPRRHRTICVPEPSLMRVQRWIAQNILNAQKPHPRSYAFAPCRSLVQAAERHAGCRWLIKMDFKDFFESIDERRVYLVFRSMGYGALLSFEMARLCTRLPGAYSAKPQEAAALSTGYKFQQPGFLPQGAPTSPMLANLVVRALDRRLERIGLKYGWVYSRYADDLAFSTKDISGRGAAIALVKQVEREVRDFGLRENPAKTSITPPGHRKVLLGLLVDRDQPRLTKSFRNNVETHLFALGHPKVGAMAHCAARGFRSVTGLRRHLAGLIAFAHAVDKPYAARLYADFDKVDWSR

SEQ ID NO: 1737 - protein, 378 aa, Pseudovibrio sp.
  source 1..378: note = Related to NZ_LMCH01000057.1
MKHPWDSQNFVRGARASGRDLDTISAAVSIAKAIKQVSPNLPVIFSLSHLAHLVDVSPKDLRPIVDRMSDPYRHFRLRKKSGGNGSKAPKRRFRDIYAPQPHILRTQRWIAQNILNLIQPHPSSFGFAPGSDMLAAATLHCGCAWLLKMDVSNFFESITERQAYQVFRECGYTALLSFQLARLCTRSIDKKHYSHLRETEFPHPSATEGFLPQGAPTSPMLANLAVYSLDVKLKQIADELGWKYSRYADDIAFSTEQSVSRTDALKLRGIVEGTLKSFGLSENSNKTRISPPGARKILLGVLVDRERPRLTRRYKDNIETHLYALNHEKIGVLAHQANRKFSSVTGMRHHVLGLISFAYHVDRKYGNKLYSEYNRVKW

SEQ ID NO: 1738 - protein, 378 aa, Martelella lutilitoris
  source 1..378: note = Related to NZ_CP066786.1
MKHPWDSQTFRRGARENGLDAVSIEAALSIAKAIKSTAPDLPVIFSLSHLAHLVDVSPKHLRPIVDRMSDPYRHFRLRKKSGRKGSKAPRRRYRDIYAPQPHLLRTQRWIAQNILNVLKPHSSSFAFAPDSDMLDAATQHCGCTWLLKMDVSNFFESITERQAYQVYRGCGYTALLSFELARLSTRSVDQKHYFHLQESEFPHPEAVEGYLPQGAPTSPMLANLAVRPLDMKLKRIAAELGWKYTRYADDMAFSTDRVRTRKEALQLKAIVETALTRFGLSVNQSKTRISPPGARKVLLGLLIDRERPRLTRQFKDNIETHLYALNHAKIGAQAHRDKRGFSSITGMRHHIRGLIAFAHHVDPDYAQKLYKDFNRIKW

SEQ ID NO: 1739 - protein, 380 aa, unidentified
  source 1..380: note = Related to JAEUMP010000012.1; note = Hyphomonadaceae bacterium
MSHPWDSQTFTAAARAAGRSDAVIDASLRAATYIKDRHPDLPVILTLAHLAHLTDVSGEFLRGVVDRETDPYRVFQLNKRSRPNAPQRAHRTICVPHPLLMRTQRWIAQNILNVIDPHRASFAFAPKRDIVQAAKRHAGCRWLVKLDVTDFFTSIREDAVYRVFRALGYGALISFELARLCTRAPGSSRRKHRASHDQRLPYHRKHCGFLPQGAPTSPMLANLASYQLDEDFEALATSRNWIYSRYADDLAFSTKHPSNRSEALHVSRKAEALLERHGFAANRSKTCIAPPGARRLVLGLLVDRGAPRLPRAFRDNIETHLYALAHADIGPLRHLNKRGFASLIGMRRHIEGLIAFAHQVEPTYAARLYARFKKVAWPAQ

SEQ ID NO: 1740 - protein, 380 aa, unidentified
  source 1..380: note = Related to VGDE01000018.1; note = Alphaproteobacteria bacterium
MQAWNSQRFRAGAKASGSSEETIQAAIEIAACIRKENPRLPVVFTFHHLSHLTDVSSEFLQDVAFRKVDAYRTFQLKKRGKPNSVPAPARRFRTISVPEPGLMRVQRWISQNILNVTTTHAASFAFTPKRDLKQAAMRHREAKWLVKMDITSFFESIKENKIYFVFRKLGYPPLLCFQMARICTRLPIEHGSKIPKQDKMLPYKRRTEGFLPQGAPTSPMLANLVAHALDNDLSMLAAQEGWIYTRYADDLSFSHTECRSRQEAVALVRRVESLLKRHGFLHNPTKTTISPPGARKIVLGLLVDREDPRLPKSFKNNLEAHLYALRSPKIGARAHVKRRGFTSHIGLRRHVYGLLAFAHHIEPSYAKKKYAEFNMIDWSA

SEQ ID NO: 1741 - protein, 380 aa, Agrobacterium tumefaciens
  source 1..380: note = Related to JXQV01000002.1
MLHPWDSQQFRRGAKDAGRPDQVIDRAIATARRIKRKNRDLPVIFSIFHLAHLTDIDVDSLLSVVDRTEDHYRIFRVKKRSVPGRVAPSRRYRTICVPSPALKRIQRWIAQNILNVTETHPASHAFAPESDLVEAANEHLRSSWIVKLDIINFFETVTERQVYYVFRSLGYAALLSFQLARICTRTLKLTPKGRAGSEGRVPHERYIAGHLPQGAPTSPMLANLAVRQLDDELDNLAKRLGWKYTRYADDLTFSLEGKSSRGKAAELMSLASQTLSRAGFTSNKLKAKIIPPGARKVVLGVLVDTDRARLSKKFRNNLETHLYALTSHKIGVRSHMQNRGFDSVIGMRQHIEGLLAFAHHVDEKYAAGLYRQFNSIDWLA

SEQ ID NO: 1742 - protein, 320 aa, Rhizobium populisoli
  source 1..320: note = Related to NZ_JAHYCB010000008.1
MLSFVERTHDHYRIFRVKKRATPGTTAPTRRYRTICVPSPALKRVQRWIAQNILNIIDPHEASHAFAPESDLVEAANKHLGCSWLVKLDIVNFFETIGERHVYYVFRSLGYTALLSFQLARICTRTLRLTPNGRAGNDGRLPHEKYIPGHLPQGAPSSPMLANLVARHLDEELTALASSRGWTYTRYADDLTFSVHGKSSRGKAAEIMAVATQALARQGFASNKLKSKVVPPGARKLVLGIVVDTEHTKLSRKFRNNLETHLYALTSDKIGVKLHMANRGFDSIVGMRKHVAGLLAFAHHVDEKYTARLYQQFNSINWLT

SEQ ID NO: 1743 - protein, 375 aa, Acetobacter tropicalis
  source 1..375: note = Related to NZ_LHZT01000085.1
MLSWNPQQFTREAKKEGCSQPLINAAIQTASLIKKVDIGLPVIFTLSHLAQITDTPLVKLGAYSRRTSKNSYRVFRLKKADRRKFRVICVPEPTLMHVQRWLAQNVFQTRAAAPHQASYAYYSDTRRGLLNAAKQHAGCLWLIKMDIQNFFGSIMEPQVYKVFRDLGYSALLSFQLARICTYVGDKPSPRRKKSYGIPNSYCENLGYLPQGAPTSPALANLTTRLLDSELEKLAQENGWRYSRYADDIAFSTTQTINREVAKSLVLLVREKLINFGFTPNDTKTVISPPGARCIVLGLLVDGPYPRLTNDFRNNLDTHLYALLSKKIGVKKHQEKRGFDSVTGMRRHIMGLLAYAHSIDREYSRKCYEKFNKIIW

SEQ ID NO: 1744 - protein, 408 aa, Rhizobium leguminosarum
  source 1..408: note = Related to JAAXBO010000012.1
MNYLTSQHFRSVGISLNIESKVLDNAVLVHQRIRKQSPNRGVVFTLAHLAHLTGVHYNFLRMCVSDPGTGSYREFFIKKSTSGQKKNKRAASRPMRRISIPAPMLMLVQRWILHRILHTAEGHEASVAFHKDADIKRAAKLHCGCRWLIKLDVQNFFESITEEQVFKVFVRLGYPRLLSFELARLCTKVIGPEDRSLSPTTRFANFGRGPYEDAAFIDPSTPRRLRRDAPLIVSRRVLPQGAPTSPLLANLAVTELDTEILAIAEEHGLIYTRYADDIALSTKRKDFSRDEASQVIGKVYAAFARARLLPHTGKACVRPPGALKIVLGLVVNGPEPRLTREYRNKLRLHAHILGRLGIEPADHAKALGFRSVLSMRRHIYGKVEHARRIEPDFASKIADTLSKVNWLL

SEQ ID NO: 1745 - protein, 314 aa, Rhizobium leguminosarum
  source 1..314: note = Related to NZ_CP090091.1
MRRISVPAPLLMHVQRWILHRILHTAAGHEASVAFHKDADIKGAAKLHCGCKWLIKLDVQNFFESVSEEQVFKVFVRLGYPRLLSLELTRLCTKVIDPEKRVRTRFTRLASYGRGPYEDDAFLDQSLKRRERLGSPILAQRRVLPQGAPTSPLLANLAVFEMDREIMEIAIEHDLVYTRYADDIALSTNRDNFTRDEASKIIGKVYACFARARLVPHPGKACVRTPGALKIVLGLVVNGTEPRLTREYKNKLRLHAHILGTKGIDPSEHAKALGFRSVLSMRRHIFGKLEHAKRIEPDFAVKIGNSLKAVNWLL

SEQ ID NO: 1746 - protein, 408 aa, Rhizobium gallicum
  source 1..408: note = Related to NZ_CP092346.1
MNYLTSQHLRNIGTSLQIEPEVLDRAVLIHRRVTSQNTKRAVVFTMSHLAHLTGVHYNYLRMCIGDPGLLSYREFFIKKSTSGRTKGKKSPSRTMRRISVPAPMLMLVQRWILHRILHTAAGHEASVAFHKEADIKKAAKLHCGCKWLIKLDVRDFFESISEEKVFKVFSGLGYPRLLSFELTRLCTKVLDPGKRIASQNTRLANVQRGPYEDDLFTDQRIPRRQRLDADVLTHRRVLPQGAPTSPLLANLAVFDMDEEIMEIAARHGMVFTRYADDIALSTKRTDFTRDEASKVIGKVYAAFEKAGLIPHPGKACVRTPGALKIVLGLVVNGSEPRLTREYRNKLRLHAYMLGTRGILPSEHAKALGFKSILSMRRHIFGKLEHAKRIEPEFANKIDITLKGVNWLL

SEQ ID NO: 1747 - protein, 425 aa, Erythrobacter sp.
  source 1..425: note = Related to NZ_CP065229.1
MSSFSPQHYKQIGRRLGVDPAVLETAAKIGTRITASAPDRAVVFSLRHLSALSGVPYQFLRDWVGRWGPDPYREFFLAKKPDGRTANKPSRRPKRRIAAPTPILMRQQRWLVERVLHHAPRHPSSMAFHRKADIVETARLHCQCNWLIKMDIRNFFESIYEPSVFNVFVELGYPRLLAFELTRLCTRIVPENRLKWASGLKHGLFDARRGPKFYSRVRKQPDAKGQHAIGKRDRFHEWVTGAIGSDRLPLPLGSLPQGAPTSPLLANLAVRGLDERINIIAAEHDMTYTRYADDVALSTERKDFSRKEAGQVIGKIKREFEREGLLPHHSKTRLVSPGARKIVLGLVVDGKAPRLTREYRNKLRLHAHMLGTRGISPSAHASALRFRSVISMRRHIEGKIAHARRVEEPFADKIAAQLAKVDWTL

SEQ ID NO: 1748 - protein, 425 aa, Blastomonas sp.
  source 1..425: note = Related to NZ_CP016461.1
MPSFSPQHYIQIGRRLGISPTVLARAGAVGTRITANAPDRAVVFSLRHLSALSGVPYRLLRDWVGRWGPDPYREFFIAKKSDNRRTNKPSVRPKRRIAAPTPDLMRQQRWLVERVLHHAPRHPASMAFHRDADIVETARLHCKCNWLIKMDIRNFFESIYEPAIFKVFIDLGYPRLLAFELTRLCTRIVPENRLEWKTGLRHGLFDPRRGPKFYNRVRGTPDVTGRRTIHTRDRFHEWAMGAVGSDRMPLPLGSLPQGAPTSPLLANLAVRALDERITLIAAEHDLVYTRYADDVALSTQRKDFTRKEAVQVIGKVLREFEREGLRPHHAKTRLISPGARKIVLGLAVDGNTPRLTREYRNKLRLHAHMLGARGINPSAHATALRFRSVVSMRRHIEGKIAHAHRVEPAFADDIKAKLQGVDWTL

SEQ ID NO: 1749 - protein, 391 aa, Pseudomonas salomonii
  source 1..391: note = Related to NZ_JACAQV010000005.1
MSVWRAQPYINAGRRAGADPVALAHAVRYGQSIVRHSASLVPIFTLKHLAVLSGTPYGVLREIVGRDATSMKDQPYRIFRIRKRIAKKGEAQRLRTICVPSPMLLRVQRYIHERILVRLPVHPASIAYNPGRVMVEDVAVHCGCQWLIKVDIKNFFEAIPEQVVYRVFRNAGYPALISFEMARLCTRVPMPFALERPFNFPPNRSERYSISAYSKRLQGSLPQGSPSSPLLANLCSRALDERIEELALRHGLVYTRYADDIALSSEDKSFGRGHARYIVRKLHAIMRDCGFAPNLAKTIVVPPGGRKVLLGLYVDTERPRLSREFRAKLEQHLHFCLRPDVGAIAHSKHRGFDAVLGFRNHVRGLVAFAIQVDPDYGAKRLSEFNKVEWPL

SEQ ID NO: 1750 - protein, 391 aa, Pseudomonas viridiflava
  source 1..391: note = Related to NZ_UWGW01000546.1
MSVWRAQPYVNAGRRAGADPVALAHAVRYGQSIVRHSASLIPIFTLKHLAVLSGTPYGVLREIVGRDATSMKGQPYRIFRIRKRIAKTGEAQRLRTICVPSPMLLRVQRYIHERILVHLPVHAASIAYNPGRVMVEDVAVHCGCQWLIKVDIKNFFEAIPEQVVYRVFRSAGYPALISFEMARLCTRVPMPFALERPFNFPLNRSERYSITAYSKRLQGSLPQGSPSSPLLANLCSRVLDERIEELALRHGLVYTRYADDIALSSEDKSFGRGHARHIIRKLYAIMRDCGFAPNLAKTIVVPPGGRKVLLGLYVDTDRPRLSREFRSKLDQHLHFCLRPDVGAMAHSKRRGFDAVLGFRNHVRGLIAFAIQVDPDYGEKRLTDFNKVVWPL

SEQ ID NO: 1751 - protein, 391 aa, Pseudomonas chlororaphis
  source 1..391: note = Related to NZ_CM001559.1
MSVWRPQPYKKAGELAGADPTALAHAVRYGQTIIRHNAEVTPVFTLRHLSVLSGTPYGVLREIVGRHATSKKDLPYRIFRIRKRMARPDGIERFRTICIPSPVLLRVQRYIHEHILVHLPVHPASIAYNPGKKLIDGVAVHCGCNWLIKVDIKNFFEAIPEQVVYRVFRQAGYPALISFEMARLCTRTVMPFSPDGPFNFTQNRPDKYKITSYSNRLQGSLPQGAPSSPLLANLCSRLLDERIEELALLHGLVYTRYADDIALSSEDKRFGRGNAKDVIRKLYAIMRDCGFAPNLAKTIVVPPGGRKVVLGLYVDTSRPRLSREFRSNLEQHLHFCLHPDIGAVAHAKHKGFDAVLGFRNHVRGLVAYATQIDPAYGAKQLADFNKVKWPF

SEQ ID NO: 1752 - protein, 391 aa, Pseudomonas viridiflava
  source 1..391: note = Related to NZ_UWJA01000102.1
MTVWRPQHFRKNGLKAGADKAVIANAIEYGKAIVRCDPALTPVFTLRHLAALSGTTYEVLREIVGRQAVVGKEQPYRIFRIRKRKPRPDGAERFRTICIPSPMLMRVQRYIHDHILTHLAAHPASIAYNEGKKIVDEVAIHCGCKWLIKVDIKNFFEAIPEQSVYRVFRGAGYPALVSFEMARLCTRVVPLNWTEGPRGNSQNLDSKYSIARYSNRYQGSLPQGSPSSPLLANLCSRRLDDRIEQLAIEHDLVYTRYADDLSLSTDDPEFNRTKASQVIGRLYAILAECGFAPNTMKTAVVPPSGRKILLGLYVDSDRPRLSREFRYKLEQHLHFCLHAGVGPVEHAKRRGFDAVFGFKNHVRGLVAYAVQIDPEYGAKRLAEFHKVAWPF

SEQ ID NO: 1753 - protein, 401 aa, Pseudomonas fakonensis
  source 1..401: note = Related to NZ_CP077076.1
MAIWRPQPYKATGQKLGVNQVALVNAIKYGKSITGHHPSLTPVFTLRHLAALSGTPYAVLRGIVGRQTETGTDRAYRIFRIRKRLSKKGEPQRYRTICIPSPVVLRVQRYIHEHILTHLAVHSASIAYSEGNKIAEEIAVHCGCKWLIKMDVKNFFEAIPEQAVYKVFRGAGYPALISFEMARLCTRVVPLNWSEGPTAYPTNRISRYSITTYSNPSKGVQPAGTQVQGSLPQGSPSSPLLANLCARGLDEMLSELADEYGLVYTRYADDLAFSTSDKSFDRRRASQVIGRVYAIMAKCGFVPNTAKTVVVPPRGRKILLGLYVDSDRPRLSREFRYKLEQHLHFCMHPKIGPVLHAKRRGFDAVLGFKNHVRGLIAYAVQVDPEYGAKRLAEFHKVMWPF

SEQ ID NO: 1754 - protein, 401 aa, Pseudomonas syringae
  source 1..401: note = Related to NZ_FOTU01000001.1
MAIWRPQPYQKTGQQLGIDPAVLASAIKHGKSIIGHHPSLTPVFTLRHLAALSGTSYAVLRGVVGRKTELGSDRSYRIFRIRKKISKVGGAQRYRTICIPSPVLLRVQRYIHEHILMHLPVHSASIAYSAGNKIAEEIAVHCGCKWLIKVDVKNFFEAIPEQGVYKVFRGAGYPALISFEMARLCTRVVPLNWTEGPHGYLNNRCSRFSIAAYSNPSQDARPAGTQIQGSLPQGSPSSPLLANLCARKLDEKIEELADDCGLVYTRYADDLALSTDDQCFTRRKAKQVIGRIYSLMASCGLTPNTAKTVVVPPGGRKLLLGLYVDSDRPKLSRDFRYRLEQHLHFCLHPGVGPVSHAKQKGFDAVLGFKNHVRGLIAYAVQVDPLYGEMRLVDFNKVAWPF

SEQ ID NO: 1755 - protein, 391 aa, Pseudomonas viridiflava
  source 1..391: note = Related to NZ_UUET01000191.1
MVVWRSQLYRKTGRQLGVDNSILDAAVLYGKAISNHQPCLVPVFTLRHLAALSSTPYNALREIVRRHQLGGGMHPYRLFRIRKRISKKGGEERFRTICIPSPVLLRVQRYIHEHILIHLPVHPASIAYNEGKRIVDEVAIHCGCRWLIKVDVKNFFEAIPEQAVYRVFRGAGYPALVSFEMARLCTRVISRSRDEGAFGYRDNRSLRYSIKAYSQALQGSLPQGAPSSPLLANLCSIPLDHEIEKLAEEYGLAYTRYADDLALSTPDTTFDRDQARQVIVRLYAAMARCGFVPNTAKTAVISPGGRKVILGLYVDTERPRLSRDFRYKLEQHLHFCLHDGVGPVEHAKHRGFEAVLGFKNHVRGLIAHAVQVDPEYGARRLADFHKIAWPF

SEQ ID NO: 1756 - protein, 389 aa, Burkholderia cepacia
  source 1..389: note = Related to NZ_LPFA01000028.1
MAIWRAQHYRQNGLLQGIDPQLLSRAIEYGDAITRSNRNLTPVFTLRHLALLCGASYAALRAYAGRKNDEANHPYRFFRIRKRTGPGERPRRRTICVPAPELRKAQRFIHDSILSYLPVHPGSIAYSRHTRPVEEIGIHCGCRWLIKLDVQNFFEAISERAVYRVFRNAGYPALISFEMARLCTRIVPGNRDEGPSGQTSGRVGRYSIEAYWNWRQGSLPQGAPSSPLLANLCSFGLDTLVANIASEYGMVYTRYADDIALSTTNHHFSRSDALRVIQQVYAAMRQCDLQPNTAKTMIAPPGARKIVLGLYVDQSTPRLTREFRSRLEQHLHFCLHPDVGPVAHARRKGFSAVLGFKNHLRGLIAYATQVEPGYGATKLVDFQRVAWPF

SEQ ID NO: 1757 - protein, 388 aa, unidentified
  source 1..388: note = Related to PBYJ01000011.1; note = Oceanospirillaceae bacterium
MNHWRPQHYRKQGTKSGKDPVIIKRAIEIGTSITRKYPTITPIFTLNHLALISGTSLHKLRKVVSRNESDGYHYRFFQISKRCRKKSKPTKRFICIPSSDLMRVQRVINSVILSKVPAHSASVAYTKGSSIYNAASIHCGCKWLIKLDIKNYFESISERSVYSIFRSIGFPALLSFEMARICTRVIPRRGLTYDSRWINPRFEKGKIKAYRNRDVGSLPQGSPSSPMLANLASVHLDEEIADLAYKNGLEYTRYADDITLSTDNEYFSRLKASKLIQEVYFVMRKYGFEPNTTKASVTPPGGRKVVLGLLVDGASPRLTRDFRSKLRQHLYFCRKDGYGPIKHAKHKNFASILGFKNHLAGLISYAKQIDPDFGKKMNDEFNKIEWPF

SEQ ID NO: 1758 - protein, 381 aa, Escherichia coli
  source 1..381: note = Related to CP059835.1
MKQWSPQRYRAEALIQGVKPEIIDSAILHTKKIINLNPKVIPILTLRHLAFMAGVEYSFLRKVINREHFHPYRFFLIRKRRSISKRKIFVPEPQLLKVQKFIHDNVLKHILPHDASFAYTPYSSIYDAAHVHINSRWLIKIDITNFFESISEIDAYHVFKYNGYSNLISFELARICTWPIPRSRNERLHRLQNKYLKEYKFYDRKQKLGSTPQGAPTSPCLSNLVCKNLDAEISFLCEKLQVRYSRYSDDITISSTNKSFSRHNAQHIIDSIYRILNKYGFNPNKYKTKIIPPGAKKIVLGLNVDKDSVGLDKEFKYKIKQHIHFCLHEKVGPVQHARFKGFSSVIGFRNHLYGLIVYARSIDVIFGEKMLSKYNEINWPF

SEQ ID NO: 1759 - protein, 381 aa, Yersinia enterocolitica
  source 1..381: note = Related to NZ_CP011118.1
MKQWSPQRYRSEALIRGVEPEIVNNAILHIKKIVNLNDKLLPILTLRHFAFMAGVEYSFLRKVINREHFHPYRFFLIKKKKSISKRKIFVPEPQLLKAQKFIHDNVLKNISPHEASFAYTPQSSIYYAANMHINSRWLIKIDITSFFESISEIDVYHVFKSNGYSNLVSFELSRVCTWVIPRSPKERLPRLKNKYLKEYDFYNRSSELGSTPQGAPTSPCLSNLVCKHLDSEISLLCEKLKVRYSRYSDDITISAVNINFSRTNALDIVDSIYRILRKYGFNPNKVKTKIIPPGAKKIVLGLNVDKNRVNLDKAFKYKLKQHVHFCLHEKIGPVKHSKFKGFSSVIGFRNHLYGLIIYARSIDAMFGEEMQKKYERISWPF

SEQ ID NO: 1760 - protein, 308 aa, Acinetobacter baumannii
  source 1..308: note = Related to CP018254.1
MRKKNSLEKRRIFIPHPQLVKVQKYIHQNILKFVECHENSFAYTPGISIVDAASLHTNSKWLIKLDITAFFESISEVSVYKVFRSLEFPALLSFELARICTWNSPRNRNTIPPRFKISKKTNYTVYSSTEGIELGHLPQGAPTSPSLSNLVCRELDKQLTAFSVKNELEYSRYSDDITFSSKNINFSRKDAIEIIKMVYKILINYGFTPNIQKTKIISPKAKKIVLGLNVDREKVKLDKKFKNKINQNIYFCLHPDIGPVRQAKYKKFSSVLGFKNHLHGLIIYALSIDKEFGEKALNNYNKIVWPIH

SEQ ID NO: 1761 - protein, 386 aa, Photorhabdus tasmaniensis
  source 1..386: note = Related to NZ_PUJU01000037.1
MRQRWSPQRFQASAKNQDIDQNTIEHAIKHAKNIIQHGKYILPIFTLRNLSFLAGVEYSFLREIVSREYIHPYRFFYIRKKGRNRRRKICIPNPQLCKVQRFLHKEVLQEFQVHPACFAYIRDSSIVDAASVHVESRWLLKLDIVNFFDSISEISVYRAFRENGFPALISFEMARICTWLSLRNPHEIDSRWKIDHRHNYKIYHRSSISEMGSLPQGAPSSPMLSNIVCFKLDETLEELAVENGLRYTRYSDDLTFSTNSINFNRKNATLFISKVFSILKSFGFEPNKTKTEIIPPSSKKVVLGLNVDKKSVSLDKNVKYKIKQHIHFCLHSDVGPINHAKRKGFSSVIGFRNHLKGLINYAKSIEPEFGEKMLSLYKKIKWPLDI

SEQ ID NO: 1762 - protein, 394 aa, Vibrio fluvialis
  source 1..394: note = Related to NZ_CP073273.1
MNNIWRPQLYISEARSQGIPTDIINNAVAIGDRITNKGLNIPIIFNLEHLAKLSGVDYDQVYKLTKRAGENSSGKDYYRIFAIRKKDTKSKRYICVPSKNLLRVQKYINQFILHNLKSHPSSMAYNKGCKIVDVANVHRQAKWLLKIDIEDFFENISEVDIYKIFFSSGYSKLLSFQLARLCTRIVPYQKEHAEKYSHSRWRAHKNYNNKNYNFHVIGSLPQGAPTSPLLANLVLRELDEKITKIALSYGVRYTRYSDDLTFSSCDIKFGRKNCYRLIREIYDSLYSNGFSPKKNKTKIISPGSRKVVLGLIVDGNKPKLTKEFKANILRHLHFCNLESVGPVQHAKHQKFDSVIGFNNHLKGLVSYSLSIDPKFGSKVKSLYESINWPSLPFN

SEQ ID NO: 1763 - protein, 393 aa, Photobacterium damselae
  source 1..393: note = Related to JACFTX010000002.1
MNNWRPQQYRIEAQRKGVPENVINSAIAIGDKISSTGLNIPIIFNLEHLSYLSGVDYNQLYKLTKRVGERFYEKENYRIFTIKKKNSKSKRYICVPNHKLLRVQKYINKFILQQIKTHHASMAYNSGCQIVDVAKLHCNSRWLIKIDIKDFFEEISEVNVYSVFNECGYSNLLSFQLARLCTRIVPYQKEDVLNNIKSRWKSSKQYRNINYNHDVTGSLPQGAPTSPMLANLFFRALDEKIMTIANKYNLIYSRYSDDIALSSRDDLFGRSKCHQVVKDVYKVLYSSGLSPQKGKTKILSPGSRKIILGLVVNGSSPKLTKEFKKNLLQHLHFCNLKSIGPVRHAKYKKFDSIIGFRNHLHGLISYALNVDPNFGKKVKQQYDHIDWPPLPFV

SEQ ID NO: 1764 - protein, 390 aa, Oceanospirillum beijerinckii
  source 1..390: note = Related to NZ_KE383828.1
MYKNWNPQRYRKNANRDNISHDVIRNAIEIGNRINSVNRDIPIVFTLNHLSVLSKSKLSFLESIASRNYEDKPYRFFKIRKKGKNSNDKRRVICIPEPRLLSVQQYINEEILSKIPSHECAMAYSKGKGVYDAAELHCGCRWLIRIDLKDFFDSISERQVYYVFNKLGYPKLLSLELARICTRVYPRFIYPSEKSKWISNRSKDSGIASYTCSGNMLGSLPQGAPTSPALSNLVCKSLDGDLLLFSEQHGFLYNRYSDDLYLSTTSDLSRKDIRCFLLSVYGLLNKREFQVNKNKTVISGPKTKKLVLGLNVDKEYPKVRREVKNQIKQHLHFCLRKDIGPVIHSQKKKFSSVVGFRNHLLGMINYVNQIEPMYAIKLRKSFDRIDWPFI

SEQ ID NO: 1765 - protein, 381 aa, Idiomarina baltica
  source 1..381: note = Related to NZ_CH672406.1
MNRWSSRAFKKHNSDKPAAVVETAALYGRKIQTSCPELPVIFTLNHLALKSGVPYNNLRSFVDRTIERPYRSFTLRKNGLGSNPRKFRVIKVPQQDLKKAQQFINQNILSKMEPHECSVAFSPGSKIYDAASEHCNARWLLKFDIVSFFESITEKSVYRVFRRYNYPALLSFEMARICTALKARPPINWGGAPPNIRYRTIPGYSNKNLGTLPQGAPTSPMLANLVSYNLDRRLKLIADAYNCHYSRYADDITFSTDSSLSRGEVSRIIAMINSTLREYGHTMNKAKTTIAPPGARKFYLGMNIHGDSPQLRKSFKRKLKQHLFFCEKNSVGPEKHSKHLGFVSVIGFKNHLRGLINYANQVDTVFGENCMKRFQSIDWPL

SEQ ID NO: 1766 - protein, 385 aa, Alishewanella agri
  source 1..385: note = Related to NZ_AKKU01000003.1
MNRWSSQLFQKEARRLGRSEDVIDNCLNAAALIQLKNSQITPIFSLRHLSYMAKADYGFLRAIVSRDDRIDSYRTFQIRKRKRRKNDKERYRNINVPSHDLKKTQQWINKHILSHVSPHQCSMAFYKDSSIIEAVNAHVGAKWVIKVDVKNFFESINEISVYRVFRELGFNALLSFELARICTKKRTMLPSRSRKWISTGRRETISTYAQPIQGFLPQGAPTSPMLSNLASLRLDQEIFKFCAHEGFIYTRYADDIVISVHRDVKKSECSNIINKLYRVMASNGLSPNKTKTIVLHPGARKVILGLMLTDKGVMLTKEFKSRLRQHLFFLNSENVGPVEHAQHKGFVSIIGLRNHIIGLLSFAKAVDKNFASKCQADFDRIVWPI

SEQ ID NO: 1767 - protein, 383 aa, Gluconobacter oxydans
  source 1..383: note = Related to NZ_LCTG01000001.1
MTLWDSQAYIVEARATGINPNIVTAALGHANAIRSVSRDLPIIFTLSHLAQACGVAHSYLMDVADRRIDPYRDYITKKREKPHRTAFSRRYRIICMPDPELKKVQRWVHQNILSKVTPHRASTAYSNSNTLLDAAARHTNARWLIKIDIERFFESIKEPYVAGIFERLGYPDLLSFQLARLCTRLPSLKSRKDIFCRRSKPVKGVMQNDWIGFLPQGAPTSPQLANLVMRRFDRRMTSLSRTEGLRYSRYSDDMIFSTLGSFSRPQATSFVHQVYDVLGAYGFEANRTKTSIAAPGARKVVLGLLVDRDEPRLTREFRSNIETHLHYLERPNVGPVAHAKAREFDSIIGLQNHLLGLIAFARQIDRKYGDELRARLHRINWPA

SEQ ID NO: 1768 - protein, 383 aa, Sphingomonas sp.
  source 1..383: note = Related to NZ_JSXI01000043.1
MTLWDSQIFTAGARAANVDPAVISAAVGHANAIRSVSIDLPIVFTLAHLAHLSGVSHRYLIEVAGRGSDPYRDYIAKKRQAPGSTAASRRYRTICMPDPELKKVQRWLQQNMLSKIAPHAASTAYSEDDTVFAAAARHVNARWLIKIDIERFFESIKEPYVASVFERLGYPDLLSFQLGRLCTRLPTLKSRKDIFKRRSKPARGVMQHEWIGFLPQGAPSSPQLANLVMRRFDRRATAAAKKAGLRYSRYSDDMIFSTAGSFSRERAEHFVHDIYDVLGAYGFEANRTKTSIAAPGARKIVLGLLVDRDKPRLTREFRAGIETHLHYLERPDVGPVGHAEVREFDSVIGLRNHLEGLVAFARQIDQPYGDRLKARLRAIVWPA

SEQ ID NO: 1769 - protein, 384 aa, unidentified
  source 1..384: note = Related to JAFKFG010000027.1; note = Alphaproteobacteria bacterium
MQNWNSQLFSKGAAAAGVSPSIIASANAYARRIISCNSDLPIVFTLKHFAHLTELPFDNLVKIVERKEDPYRSFLIKKRSRPGDRAVARRYRTICIPDTTLMFAQRWIDQKILSKVDPHNCSTAFHGNSSIVRAAQRHCGCRWLIKIDIQRFFESITESSVCRVFQSLGYPDLLSFELGRLCTREPSVLSRRWKFRRTRSYPSGVHQHPSIGFLPQGSPTSPRLANLTMREFDEGVNSISRSYGLVYSRYADDLIFSTDAATFSRVEAEALISRIYQVLLEYGFEPNRTKTMISPPRARKIVLGLLVDRDTPKLTRQFKQDLENHVFYLSHPRHGPSQHANKRNFTSVIGLQNYVQGLLAHAAQVDSAFADRMRAMLAQVKWPI

SEQ ID NO: 1770 - protein, 377 aa, unidentified
  source 1..377: note = Related to JABMRO010000623.1; note = Planctomycetes bacterium
MNRWVPHIYRQTGQQKDVPDAIINEALSQAHRVQNKELPAILTLRHLAFQTDVSYTNLHKIISRDVDPYRSFSIKKRSGGWRRISVPQFELLKVQKYIDHFVLSRIADSSYSYAFKSKTSIADCANQHLSCRWLVKIDLRHFFESLSEMQAYRVFNEAGYNNLVSFELARLCTKVLPLTAKKYSKPNWRSVGHISMYSFYEDKYNRIGHLPQGVPTSPRLSNLIVRGLDREIVEATDEYDLTYTRYADDMTFSTGSSCFSKKKGRDFINKIYSLLPKYGLRPHPQKAQIVPPGARKIVLGLLVDGDKVRLTKHFRSNLECHLYYCVKNPISHATNRGFASVLGLKNYVNGLLAYANQVDPDYVNKISSDVGKPDWPI

SEQ ID NO: 1771 - protein, 372 aa, Desulfonauticus submarinus
  source 1..372: note = Related to NZ_FNIN01000001.1
MKRWSPHLYKIYGKKNKKDDKLIENALNQADILQNRNLPVVLTLGHLARHTDIPYQTLRKLVARQVNAYRIFRIRKRSSGYRVICVPNKDLLKVQRWIDKFILSNLESSPYSYAFEEGQSIVDCASQHLSCRWLIKIDLRNFFESLSEIQVYRVFKVAGYNNLVSFEMARLCTKQSKSGWKLYNPYWKSYPREKIPLYNADVIGHLPQGAPTSPKLSNLIMKNLDFEVNNIAQKFSLVYTRYADDMIFSTIDSSFDYKKAKCFIKDIFNILPKHGLLPNRQKTKIIPPGGRKIVLGLLVDSEKVRLPKDFRNKLECHWYYCTKDITQHAEKRGFKSYLSMQYYIKGLISFARQVDSDFVEKLKKKYGEIKWL

SEQ ID NO: 1772 - protein, 383 aa, unidentified
  source 1..383: note = Related to JAGRCJ010000081.1; note = Caldilineaceae bacterium
MSIGPPHTYVTEGRKRGVSNQILRDSLEQARKVQEKGLPPVLTLRHLSSLTNVEYKLLRKIVARRQDDAYRSFLITKHSGGKRVICVPHPSLKRVQRWINQKILMNVSTHWRSYAYSRNSSIVDCAQQHCGCNWLIKLDIRQFFESITEIQVYQVFQNLGYQPLVSFELARICTRTYSSYNELELNKKWLSQPEAYSVIPFYQYKYLGHLPQGAPTSPMLANLVCKLMDEALFNIAHDEGLVYTRYADDIVLSSSDIHFTRKKAQSVIRKVSSVLTKYEFEPQHNKTSVVPPGARKLVLGLLVNNSTPRLTRTFKCKLERHIWAVGKFGLANHAHHIGFDSIWGFVRHLEGLISYAMMVERRFGESMQIAFQKTLDGNGWNNN

SEQ ID NO: 1773 - protein, 381 aa, Comamonas thiooxydans
  source 1..381: note = Related to VTRK01000013.1
MMWSSQHYLAQGRQLQISEAILQTAMKQSRRLVQRRPQSLPVLLTLGHLAKRTGIPYSSLRAYVGRQAIEPYRRFRIRKRSGGIRRICVPEPALSAIQGWIAENILQRVDVHSASHAFKKGDSIARCAEVHAGARWLVKMDIADFFGSISEIDVFRVFKSLGYNSLVSFELARICTELPLNSAKYAFSSWRRSHARRGIPAYNQQYVGRLPQGAASSPMLANLAMINTDQRLTEIANSFGLEYTRYSDDLTFSTTGDFDRASAYALIEQVANVLKRRNLFPNKAKTKVVHPGARRVVLGLLVDGVAPRLTRAFRDRLRQHLYFLEKRGIEAHVQARAFESAGGLYRHLRGLVDYANSIDSAYAAPVLARLEALPWRPEVKI

SEQ ID NO: 1774 - protein, 376 aa, Pusillimonas sp.
  source 1..376: note = Related to NZ_CP049990.1
MWSSQHYLAQGKQLQHNNEVLQEALKQSRRLVQHRPQPLPVILTLFHLAKRTGVPYSALHAYVGRQAIEPYRRFRIRKRSGGIRRICVAEPRLGSIQAWIAENILQRAEVHPASHAFRKGDSISRCAEVHAGARWLVKMDIADFFGSISEIDVFRVFKSLGYNPLVSFELARICTELPAKSAKYLLPSWQLHHTRRQIPGYSQKHVGRLPQGASSSPMLANLSMIRTDQTLSEIANSFGLKYTRYSDDLTFSTAGDFDKASAYALIEQVANVLKRRNLFPNRAKTSVVHPGARRVVLGLLVDGDVPRLTRTFRDRLRQHLYYLEKHGIVAHVQARAFESAGGLYRHLRGLIDYANSVDPAYAAPLLARLEALPWRS

SEQ ID NO: 1775 - protein, 376 aa, Pelomonas sp.
  source 1..376: note = Related to JAKZFD010000012.1
MWSSQPYLVRGRKLGLSPELLQEAVKQSRRLAQRHPQPLPVLLTLCHLAKRTGVPYSSLRAYVSRQAVEPYRRFRIRKRSGGVRRICVPEPTLGAIQTWIAEHILQRAQVHRASHAFKKGDSIVRCAEQHSGARWLVKMDIADFFGSVSEIDVHRVFVGLGYNPLVSFELARICTELPSRSDKYALSSWQCRYARRGIPAYGQQYIGRLPQGAPSSPMLANLTMVATDQKLEEIALKAGLLYTRYSDDLTFSTAGDFDKGRAYGLIEEVAAVLKSRGLFPNRAKTVIVHPGARRLVLGLLVDGDAPRLTRVFRDRLRQHLYYLEKLGIAAHVQARAFESAGGLYRHLRGLIDYANSVDPTYAGPLLARLEALPWAR

SEQ ID NO: 1776 - protein, 376 aa, Acidovorax avenae
  source 1..376: note = Related to NZ_CP028294.1
MWSSQHYLARGREIGRSPELLQEAVKQARRLVHRHPQGIPVLLTLCHLAKRTGVPYSSLRSYVGRQAIEPYRRFRIRKRSGGVRRICVPEPNLGAVQAWIAEHILQRVDVHQASHAFKKGNSIVRCAEQHVGARWLLKMDIADFFGSVSEIDVYRVFVALGYNSLVSFELARICTELPAASAKYALRSWNCHRFRSGITHYQQKYVGRLPQGAPSSPMLANLAMLKTDQLIAELASKEGLIYTRYSDDLTFSTSGDFDRRRANKFIEEVAAILKARGLFPNRAKTVVVHPGARKVVLGLLVDGDAPRLTRQFRDKIRQHLYYLEKNGIKAHVEARAFESIGGMYRYLRGLIDYAKSIDSAYAAPLLRRLEALPWPR

SEQ ID NO: 1777 - protein, 378 aa, Duganella sp.
  source 1..378: note = Related to JACEZU010000002.1
MWSPRHYLEQGRLQKQPSAVLAVAVEQIKRLQAHNPPLPPILTLKHLAKVTKVRKAKLECFVERIAPEVSYKRFNIKKRTSGYRKISIPEPDLMKVQAWISQNILQLPSVHSASKAFRKHDSILKCAEVHCGAKWMIKIDIADFFGSITEIQAYRVFKDLGYNPLISFHMARICTDLIPKSQKYKMQAWQIFENKYSITEYHNKNNFGRLPQGAPTSPLLSNLVMLRLDKTIAELAEKQGLRYTRYSDDITFSTKGDYSRKQAVEFVASVSALLKADGLYLNRKKTVIVPPGSRKIVLGLLTDREYPNLTKEFKEKLRQHLYYIKTLGVEAHMRRREFDSVGGLYRHILGLINYANLVDPTYAYKMKQQFKSLPWPGQ

SEQ ID NO: 1778 - protein, 383 aa, Parapusillimonas granuli
  source 1..383: note = Related to NZ_JACHHM010000011.1
MPWSPQRFLAEGLRRGRDHKALMEAIRQISRMQRQRPVLPTLLTLGHLACRTQISYEYLRDIIARNTGHPPYRSFRITKRSGGLRVISVPSPQLMKVQSWLTTHVLNKVQPHPTSYAFSPGSSIADCARQHAGATWLVKIDIADFFGSITEIQVFRVFQMLGYNKLVSFELARLCTILPIVSAKHKLKPWKTKFPRKPIDYYSEQLIGRLPQGAPTSPMLANLAMRDIDEELQHLADSLKLVYTRYSDDITFSTKGKFSRTAASAVIKQTTAILKRRGLFPNRAKTAVIHPGARKIVLGLLVDQEQPRLSRKFRDRLRQHLYYLETRGITAHLEARGFDSAGGLYRHLRGLIDYANMVDQPYAQKQLLRLQALPWGSTLNASS

SEQ ID NO: 1779 - protein, 381 aa, unidentified
  source 1..381: note = Related to SEEN01000026.1; note = Hyphomicrobiales bacterium
MLWSPQRFLEEGLLRDRDYYALQEAIKQITRMRRRGPGLPVVLTLGHLANRTRVPHEHLRDLVARNTGQPAYRTFRISKRSGGSRVISVPGPQLKKVQTWLTQHVLRKVKPHIASHAFSPGSSIADCARQHAGARWLVKVDIADFFGSVTEIQVFHVFRRLGYSDLVSFELARLCTTVPFASAKHSMKAWQVRFPRRRIHFYSEKLMGRLPQGAPTSPMLANLVMREADEELQNLADSYGLVYTRYSDDITFSTRGEFSRDQAVTVVRQSATILKRRGLFPNRAKTAIVHPGARRIVLGLLVDSDQPRLSRAFRDRLRQHLYYLETRGIMAHVEAREFDSAGGLYRHLRGLIDYANMVDQPYAQQQLSRLLALPWSSVAQV

SEQ ID NO: 1780 - protein, 394 aa, Pseudomonas neustonica
  source 1..394: note = Related to RKKU01000049.1
MWSSQRFIRQGLARGISQQILDAAVEQVEALAKGPIRLPAILTLGHLAQRTDVSYISLRRLVADEYRHPYRTFTILKRKANKSGYRGRREISVPTPELLTVQRWLSAHVLRQVRPHPASHAFSPGGSIVKCASEHCNAKWLIKLDIADFFGSISEIQIYHAFRKLGYQPLISFELARLCTDRPRKNVPPAFVRGRNRMPSGKVRFKARVIDQYDHRYIGYLPQGAPTSPMLANLVMRDIDVQLAAIASRYELRYTRYSDDINFSTTENFSRDKAHELIQRVAKCLIKKGLGLNKSKTTIAPPGAKKLVLGLLVDTAKPRLCHQFKDRLRQHIYYIERFGIEAHAQRRAFDTTAGFIRHIKGLLDFAYMVEPAYALDLTERLQVAVFSWDDSFVI

SEQ ID NO: 1781 - protein, 377 aa, Pseudomonas veronii
  source 1..377: note = Related to NZ_CP018420.1
MDEPTIRAVIAQVKATVAPPLRLPAILTLGHLAQRSGVSYDALRRLVAGTQHHSYRQFKIRKKSEQARKRRSFRIIHIPCPPLFEVQRWISTYVLRELPVHPSSHAFSPGSSIVKCAEIHCKARWLVKLDVHDFFSSVSEIQVYRVFRSLNYGALISFEMARLCTYRPNRETFKLALPGRFRVPSGIVRHPGRGIKSYSHKYVGYLPQGAPTSPMLANLAMKDIDVAISKIASDHGLRYTRYSDDLTFSTEGDFSRGKALNVIQEVAKKLIVHGLMLNNPKTTVAPPSARKIVLGLLVDGADPRLMKSFKDKVRQHLYFCGKYGVEEHAARRKFDSVGGFVRHLRGLIDFGNMVEPCWAADMYDQMSKVLGSNKFDL

SEQ ID NO: 1782 - protein, 396 aa, unidentified
  source 1..396: note = Related to PFJY01000128.1; note = Hydrogenophilales bacterium CG_4_10_14_3_um_filter_58_23
MWSSQHYRMNAKEHGLSKETIDAAIAQTIAVVEGPHKLPAILTLGHLALRTGVDYVALRGLLTGSCCHQYRHFKIRKRVNGPEKTIRYRKISVPTPDLYRVQRWIAVHVLRSVPVHGASHAFSPGNSIVKCAEKHCGAKWMVKLDILDFFGSISEMQAYRVFHSLGYQPLVSFEMARLCTYRPKHDVPPNFVLPRYQIPSGRVKKRNRVIESYNHPYMGILPQGAPTSPMLANLAMRDIDEKILSIANRFGLQYTRYSDDLTFSTRNDFDRQQASLLIQEIANLLIKRGLMLNRQKTAIIPPGARKIVLGLLVDGDLPRLSRPFKDRIRQHLYYLEKFGPDQHVSKRCFDSVGGFFRHLKGLIDFANMIEPQYARESYVRLCAVVSDAQIESPQNQ

SEQ ID NO: 1783 - protein, 381 aa, Rhizorhabdus wittichii
  source 1..381: note = Related to CP021181.1
MWSPQHYRERGRQLGADDDVIERAAAAIESFIDKHPNRPPLLTIGHLARRSGVSWFHLRQFVEGSRSGIYRYFRIRKRSGGHRQISVPDPKLMIVQRWIARHILAAIPVHRASFAFAPQSSIVGCARQHCRARWLIKLDISGFFGSISEIQVYRVFLGAGYAPLVAFELARLCTHAPSGSKRYAKRTWTAALTERAIRPYTQPHIGYLPQGAPTSPMLSNLVMRETDKLVAAVATKAGVTYTRYSDDMTFSTIGSFDRERALAVIREVTAILRRAGLSVNEKKTKIVPPGARKLVLGLLVDGAEPRLTRTFRDRLRQHLHYLQKLGPEAHRAARGFDTVSGTHRHVRGLIDFAQSVDPALAEKMREKFDAVAWSLDRPGAE

SEQ ID NO: 1784 - protein, 381 aa, unidentified
  source 1..381: note = Related to SECT01000232.1; note = Oxalobacteraceae bacterium
MWSPQHFRETGRQLGADHDLTERAATAIETFTDRHPTLPPILTLGHLAHRTGVSWFQLRLIVESGRWTNYTFFRIRKRSGGHRQISVPDTKLMIVQRWIAGHILAALPVHRASFAFAPKSSIVGCAAQHTGARWLIKLDIAGFFGAVSEIQVYRVFLDAGYAPLVAFELARLCTHAPSGSKRYGRQEWLAHATHRPIYAYRHPHIGYLPQGAPTSPMLSNLVMRGPDRKIATLATKAGLTYTRYSDDITFSTTGVFDRAKAMAVVRETTAILRATGLEVNGRKTRIVPPGARKVVLGLLVDGKVPQLTREFRDRVRQHLHYLETRGPEAHRAARNFDTVAGLYRHVRGLIDFANSVDAVFADRMLTKFDAVRWSLDSPEDT

SEQ ID NO: 1785 - protein, 384 aa, Sphingobium sp.
  source 1..384: note = Related to NGUN01000003.1
MWSPQHYHEAGQQLGLDDAMVQRAATAIEDFLDRHPKLPPILTLKHLASRTGISWYHLRKMVLGSRASDYTFFKIRKRSGGHRQISVPDAKLMAVQRWIAAHILSELPVHRASFAFAPKSSIRRCALQHCGARWLIKMDISGFFGSISELKVYRVFLEAGYSPLVALELTRLCTHAPSGSKRYDRPEWLAHATRRKIPAYRQFHIGYLPQGAPTSPMLSNLVMRELDKEIAALAARAGVTYTRYSDDITFSTNGDFDRARAMLLVRQVTARLRRVGLSVNGRKTCIVPPGARKVVLGLLVDGAEPRLTREFRDHLRQHLYYLEKVGPEAHRDARKFDTVSGMHRHIRGLIDYAKSIDEGFAAKMRLKFDSVPWSPDVAPPSEDA

SEQ ID NO: 1786 - protein, 381 aa, Pelagerythrobacter marensis
  source 1..381: note = Related to QFNB01000026.1
MWSPQHYREIGEKSGADPVVTDRAVAAIDAFMEKQPKLPALLTLGHLAQRTGVSWFHLRQYVEGQRSTEYTYFHIRKRSGGHRLISVPGQQLMMVQRWIAAHILAELPVHRASFAFAPKSSIVRCAKQHCGARWLIKMDISGFFGSISEIQVYRVFLQAGYAPLVAFELARLCTHAPNGSKRYARAEWLAPTTWHPIVAYRQPILGYLPQGAPTSPMLSNLVMRDIDKQIAALANAIGLTYTRYSDDITFSTMGEFNRERAIRVVRKTTAILRRIGLKVNDNKTRIIPPGARKLVLGLLVDGIKPKLTRGFRDGLRQHLYYLEKLGPEAHRKARNFDTVTGLYRHVRGMIDYAKSVDEPFFDEMRTKFEAVAWSLDSPADD

SEQ ID NO: 1787 - protein, 382 aa, Sphingopyxis sp.
  source 1..382: note = Related to JAEMRT010000003.1
MWSPQHYRDKGIEQGHEAELVSRAAAAIDSFVDAHPQLPPILTLGHLARRSDISYFQLRRLAEGPRWNHYTFFRIRKRSGGRRLISVPEHRLMIVQRWIAEHVLKKLPVHRASSAFADGASIVKCAKQHCRARWLIKLDISGFFGSISEIQIYRVFLAAGYAPLVAFELARLCTHAPSGSARYDRAQWRSRDNWQLPIMRYRQPHIGFLPQGAPTSPMLSNLVMVGMDKLLAALATAEGLTYTRYSDDITFSTTGAYDRQRATEVIRSTSRLLRTIGLKVNDQKTRVVPPGARKIVLGLLVDNPEPRLSRDFRDRLRQHLHYIEKFGPEAHRAARGFDTVSGLYRHVRGLVDFAKSVDRNYASAMRDRLDAIAWSPDFPVET

SEQ ID NO: 1788 - protein, 379 aa, Acetobacter sp.
  source 1..379: note = Related to NZ_JACRVS010000011.1
MWSPQRYRELGLEKGVDPEVVDRSAEAISDFLDSYATLPPILTLGHLAARTGIPYYKLRKIVVGQRTLEYQYFWIRKRSGGRRLISVPEPDLMHIQRWIAGHLLARQPVHRASAAFRPKASISKCARQHCEARWLIKLDISGFFGSISEIQVYRVFRRMGYAPLVAFELARLCTHAPANSKRYQQDSKWLVRKCESRKFYTQWGIGYLPQGAPSSPMLSNLIMVEADKKIAKLATNQGLTYTRYSDDITFSTTRGYDRERAKKIVRDTTAILRRMGLAVNDKKTRIIPPGGRKIVLGLLVDGSHPKLTRDFRDRLRQHLYYLQKFGPEAHQLERGFDTVSGLYRHVRGLIDFAKSIDANYAARVQKKFEAIKWSLDFSD

SEQ ID NO: 1789 - protein, 376 aa, Sphingomonas sp.
  source 1..376: note = Related to NZ_SCNH01000027.1
MWSPQRYIEHGLTEGYDAELVRSAAGQIDDFLEKHPDLPPILTLGHLGKRTSLPYARLRKLVSGLRSNDYSYFRIRKRSGGHRQISVPEADLMWLQRWVSAHILSKLKPHRASYAFAPKASIVSCAKAHCEARWLIKLDISGFFGSVSEIQVYRVFLAAGYAPMVAFQLARLTTHAPYFSMRYKRPEWRAVPDRARLPYLFRTRLLGFLPQGAPSSPMLSNLVMRQIDAKLHAIALSAGLTYTRYSDDITFSTRGGFDRERARAVVSKTRRILAKEGFTLNSKKTRIVPPGGRKLVLGLLVDGSEPNLTRAFKDSLRQHLHYVCTFGPDAHAKRRGFDTVSSLYRHLLGLINYAKSVDEDYALRARTKLNSVQWSL

SEQ ID NO: 1790 - protein, 343 aa, Bradyrhizobium sp.
  source 1..343: note = Related to NZ_CP013949.1
MRLASALPLFTYGEVKVTMSWSSQHYITKGLASGRDRELLETAAKEIERAVYSNPTPLPAVITLNHLARRCGVSYNSLRAIVARNGKQYSYFRIRKRSGGHRLISVPEAELLRVQKWIHTYILSQAKAHEACFSFLRKKSIRDCAAVHRGATWVIKIDISAFFGSISERDAFDIFKGFGYNPLVAFEMARIVTDAPLYSKRYQAVPWKRDPGEYEIAQYRSAKVGYLPQGAPTSPLLSNLFMINIDQQLQALAEHRKLRYSRYSDDMTFSTRGDFSRERAKELIHAVAAIIRVKGLRINTAKTRIIPPDGRKVVLGLLVDGTAPRLSRKLRDNLRMHIFHMRK

SEQ ID NO: 1791 - protein, 379 aa, Neorhizobium galegae
  source 1..379: note = Related to CP090554.1
MAWSSQRYISAGLKLGFSPDVLNIASEQLEQHITGLPPFPALLTLNHLAKRTNVPYLELRPLVRGQKPDAYHHFYIRKKSGGHRRISVPEPTLMRIQQWIATHILNIAPVHQASYAFSPGSSIYKCAYQHRKARWLIKMDVTGFFGSISEIQVYRVFRSFGYQPLIAFELARLTTYAPISSPRYLLKEWQARTHSSPIDDYHRANIGYLPQGAPTSPMLSNLVMRSVDERIAKIAEKYGLRYTRYSDDITFSTTAEFDRKRARDVIRSVTKMLTRVGLHVNAGKTVVVPPGGRKVVLGLLVDGPEPKLSRDFRSNLRQHIFFLESLGPMEHAKARGFETISGMYRHIRGLIDFANMVDADYAAELLSRFQRVNWPFAIP

SEQ ID NO: 1792 - protein, 383 aa, Citrobacter freundii
  source 1..383: note = Related to DACSWP010000009.1
MWSSHIYKKQGLTKGISPYLLTEAITQIELLVYSQNNLPSILSLSHLAKRTGVEYKLLRCYVMRTGATSVEPFEIYKKFSIRKRSGNRRFIHIPTPKLMRTQRWISEHILAKLPVHAASQAFNKGNSIKKCASRHCGAKWLIKIDIEDFFSSISEIQVYRFFRSLNYQPLVAFELARLCTVGTHNKSPRGVFSNWKIINPNNAIPSYNQKLLGYLPQGAPTSPLLANLIMNDCDKALQTIARKNDLIYTRYSDDLTFSTTDKKFDRSKAKTFIFDAYKILSKHGFRPQFRKTTIVPPGSKKIVLGLNVDSEQPRLAKHTRDSIRQHLYYLEKMDPVQHAFNRQFDSVWGLKMHLRGLIDYANMVEPDFAKACLAKFNAIEWPV

SEQ ID NO: 1793 - protein, 383 aa, Serratia proteamaculans
  source 1..383: note = Related to CP068391.1
MWSSQSYKKQGLANGLSVPLLNEAIAQSELLLYSEYTLPSILSLKHLAKRTSVEYEWLRSFVIRTAINGVENFEIYKKFSIRKRSGGRRFIHVPSPKLMHTQRWISEHILKALPVHPASHAFRKGNSIKKCALRHCGAKWLIKIDIADFFSSVSEIQVYRIFRSLNYQPLVAFELTRLCTVGTPGLSPRANFPHWKTKEFNEAIPLYHQTMLGYLPQGAPTSPFLANLVMKNCDKSLNALAQKNGLVYTRYSDDLSFSTRDKDFGRSRAKHFVFEAYKIISQSGFRPQFRKTTIVPPGGKKIILGLNVESEFPRLAKSTRDTIRQHLYFLEKVGPVQHAFNRKFDSVWGLKSHVRGLIDYANMIEPDFAEVSLEKFQAIEWPV

SEQ ID NO: 1794 - protein, 383 aa, Aeromonas veronii
  source 1..383: note = Related to NKWH01000001.1
MWSSQTYKQQGLAKGLSESLLTQAISQSELLIYSEYNTPSILSLNHLAKRTGIEYEWLRSFVMRKAIKGVENFEFYNKFSIRKRSGGRRFIHVPTPKLMRTQRWINEHILAKLPVHPASQAFRKGNSIKKCALRHCGAKWIIKIDIADFFSSVSEIQVYRIFRTLGYQPLVAFELARLCTIDTYCESPRRIFPQWRSKKSNKAIPSYDQELLGYLPQGAPTSPTLANLIMKDCDTALQTLARNNGLIYTRYSDDLVFSTKDKNFGRYRAKQFIFESYKIISKAGFRPQLRKTTIVPPGSKKIVLGLNVESEVPRLMKCTRDKIRQHLFFLEKVGPVQHAFNRQFDSVWGLKMYVRGLIDYANMIEPEFSKACLEKFNAIEWPV

SEQ ID NO: 1795 - protein, 453 aa, Celeribacter ethanolicus
  source 1..453: note = Related to CP022196.1
MTSASERFKFAPSGAKEDRYTTVRWMLGYGFRGLTEKPTHGWRRRTLPHPAYASGHQSAPSPAATHRSSFMWSSQSYKNQGLAKGVSETLLDNAIVQSELLIYSELSLPSILSLNHLAKRTCVEYEWLRGFVMRRAMNGVEDFESYKKFSIRKRSGGRRFIHVPTPKLMHTQRWINEHILKGVPVHPASQAFGKGSSIKKCASRHCGAKWLIKIDIADFFSSVSEIQVFRIFRSFGYQPLVAFELARLCTVGTYWESPRGSLPQWKTRHPNKSIPLYDQKILGYLPQGAPTSPLLANLAMKDCDRALQALAHKNGLAYTRYSDDLSFSTKDKGFSRSQSREFVCDAYAILSRSGFRPNLRKTTVVPPGSRKIVLGLNVETEHPRLTKSIRDRIRQHLHFLKKVGPVEHAFNREFDSVWGLKAHLRGLIDFANMIEPDFAEASLKEFDSVEWPV

SEQ ID NO: 1796 - protein, 310 aa, Salipiger thiooxidans
  source 1..310: note = Related to JAIUZF010000015.1
MHTQRWINEHILKDVPVHPASQAFGKGNSIKKCASRHCGAKWLIKIDIADFFSSVSEIQVFRVFRSLGYQPLVAFELARLCTVETYWKSPRGSLPQWRARRFNGSIPSYHQEILGYLPQGAPTSPLLANLAMKDCDKSLQTLAQKNGLAYTRYSDDLSFSTKDKNFDRTQSRKFVCDVYSVLSRSGFRPNLRKTTIVPPGSRKIVLGLNVETEHPRLTKNARDRIRQHLHFLKKVGPVEHAFNREFDSVWGLKAHLRGLIDFANMIEPDFAAAPSRNFTLLSGRCRHAAVLCERHFQAMKSTTVHTIQYW

SEQ ID NO: 1797 - protein, 384 aa, Mameliella alba
  source 1..384: note = Related to JAHVJB010000004.1
MWSSHTYELEAIELGRPRETIDASIEQIENLNETNPPAPAILTLNHLAKRTGVGYEWLRAFVMRQLMPGMDGDARPYRKFSIRKRSGGYRTIHIPEPKLMHTQRWINYHILREVSPHSASQAFTNGCSIKKCAIKHCGAQWMIKIDLEDFFGSVTEIQVYRVFRSLGYQALVSFELARLCTITPGDRSLRSRHPHWRVWKPNKEIPTYSKKYLGFLPQGAPTSPRLANLVMRRCDQEIQKLAKSYGLTFTRYSDDLCFSTRTKKFNRHAASKFIGEAYMVLAKYGYQPNLRKTSVVPPGAKKVVLGLTVDGQEPKISKEVRDKIRQHLYYLAKVGAAEHAHRRGFDSVWGLKCHLRGLIDFAHMIDEDLAQSYIKKFNEVDWPV

SEQ ID NO: 1798 - protein, 377 aa, unidentified
  source 1..377: note = Related to VIRH01000027.1; note = Rhodobacterales bacterium
MWLPQTYIKEAKSKGLDSQTIDAAVDQVDTVLRKAENIPSLLTLNHLATRVGVNVKELRQFVDRTDLDAYQRFSIRKRRGGRRFISIPAPQLMRTQRWINEFILKPLPVHGSSHAFERHSSIVKAASVHCGARWLIKIDVEDFFGSISEIQVFRLFRSLEYQPLVSFELARLCTIGTSPHSPRKEYPNWRVHKRNKIIQGYSQQLLGYLPQGAPSSPRLSNLIMKPLDEALYLEAKQKGLYYTRYSDDLCFSYHNTDFNRRNATELVSAVYRILSSAGYRPNMRKTTVVPPGSKKIVLGLNIENDQPRLSKPFCDKVDQHLYYIKKYGPVEHSHRRKFDSVWGMKSHIRGSIDFAKMVEPERSAVWLEDFNRVEWPV

SEQ ID NO: 1799 - protein, 383 aa, Rhizobium laguerreae
  source 1..383: note = Related to JAAXTE010000009.1
MWSSHRYRLEARQKNLPESVVQAAIAQSEKLLTADPSLPSILSLKHLAVRCDVPYSDLREFASRRPIDGNQPSLPYQNFSIRKRSGGRRFIHVPNPKLMVVQRWINNHILQEVKPHRASHAFTRNSSIKKCAQIHCGSAWLVKLDIADFFESVSEIQVFRVFSGMGYSPLVAFELARICTIRTPTHSPRQYFKQWVVRNINHTIYAYNDRYLGYLPQGAPTSPLLANLVMRQCDKELSEIAATFGMRYTRYSDDVTFSSLDPALGRDACRKLIFEAYAVLSSAGYRPNARKSTIVPPSARKLVLGLTIDGAEPGLTKEFKDRLRQHLYFLEKLGAIDHAFNRKFDSVWGMKAHIKGLIDFAKMIEPNYAAVCRERFNLIDWPV

SEQ ID NO: 1800 - protein, 383 aa, Rhizobium sp.
  source 1..383: note = Related to AHZC01000134.1
MWSSHRYRLEAREKQLSETVIQAAILQSEKLITADPALPSILSLNHLSVRCGIPYWELREFVSRRSIDKNEPSMPYENFSIRKRSGGRRFIHVPNRQLMAVQRWINNHILQDVKPHIASHAFSRKSSIKKCAQVHCGSAWLIKLDISDFFESVSEIQVFRAFQGMGYTPLVAFELARICTIRTPAHSPRQHFKQWLVKKANHTIYAYNDRYLGYLPQGAPTSPLLANLVMRQCDKELSEVAARFGMKYTRYSDDLTFSSHDPTLGRDPCRELIFEAYSVLSRPGYRPNARKSTIVPPSARKLVPGLTVDGAEPGLTKEFKDRLRQHLYFLEKLGPVDHAFNRKFDSVWGMKAHIKGLIDFAKMIEPKYAALCRERFQKIDWPV

SEQ ID NO: 1801 - protein, 383 aa, Rhizobium leguminosarum
  source 1..383: note = Related to WIDU01000012.1
MWSSHLYRVDARKKGLSEATIEAAISQSEKVINADPSLPSILSLKHLASRCGVPYSELREFVSRRAMFTIAPSMPYNKFSIQKRSGGRRFIYVPNRSLMTVQRWINTHILAQISPHGASHAFTKRSSIKRCALVHCGSAWLVKLDISDFFESVSEIQVYRSFKSMGYTPLVAFELARICTIRTPRHSPRERYGQWRIRELNEEIYAYNEHLLGYLPQGAPSSPLLSNIVMRDCDMLLSQIAAKFGMKYTRYSDDLTFSSLDPQFGREACRNLIFEAYAILSKAGYRPNARKCTVVPPSGKKIVLGLQIDGTEPRLTKDFKDRIRQHLYFLEKFGPLNHAFERKFDSVWGMKAHIKGLIDFAKMVEPGYAEICRRRFNLIDWPV

SEQ ID NO: 1802 - protein, 423 aa, unidentified
  source 1..423: note = Related to PAYC01000024.1; note = Idiomarinaceae bacterium
MWWEAGVPVLFGKALAEREHSHSGNVPSLARVARATVRSGLIGVIVMWSPLSYKRKGLEIGIAEELLDSAIEQTENVIEENPDLPSILTLNHLSTRTKTSLETLKAYISRDEPDAYRKFSIAKRSGGRRFIRVPAPQLAHVQKWIHHHILSHISPHRASYGFRKRTSIKDCARKHCGARWLIKLDIVNFFETISEIQVFSVFQKLGYQPLVAFELARLCTVSSDEYSPRRNYGNWWAFKSYKVIRNYEQKLLGYLPQGASSSPMLSNLVMWKCDEQISKIAKKNGMKYSRYSDDIALSTSSKDFNRALAKQVIQEVNRVLSQYGYLPHFKKCKVVPPGARKVILGLNVDGAVPVLQRETKDRIRQHLYFLKKHGPVEHALARGFDSVWGLQSHLRGLIDYAKAIEPEYAAKRLREFREIDWPF

SEQ ID NO: 1803 - protein, 377 aa, Marinomonas sp.
  source 1..377: note = Related to JXYC01000005.1
MWSPQLYLKLGIQEGHSTELLERAISQSDAVINSEYSLPSILSLKHLAVRTGVSYESLRSIVSRSAPKTYNKFSIRKRSGGRRYIHVPSLELMHAQRWINEHILKKIKVHPSSHAFIEGSSIQKCASKHCGAKWLIKLDITDFFESISEIQIFRSFKELGYQPLVSFELARLCTVPTHHKSQRRHYIQWRSWYRNESITDYNKSLIGYLPQGAPTSPLLSNIVMRKNDEELKKLAHKFKLTYTRYSDDLSFSTRSKNFDRYKAKELVFEVYRILSKSGYLPQYRKTKVISPSSKKVILGLNVDGDTPRLQKEFKDRLRQHFYYIKKLGLDEHIINREFDSVWGFKSHLRGMIDYANMIEPEYAKKQLETFKSIDWPI

SEQ ID NO: 1804 - protein, 374 aa, unidentified
  source 1..374: note = Related to JAAOIO010000006.1; note = Endozoicomonadaceae bacterium
MWSPQSYKKIGSEKGLSDELLETAITQSKAVFCNIPSILSLRHLACRTGISYRKLRCFVERSSYVPYKKFSIKKRSGGRRFIHVPDPDLMHVQRWFNEYVFKLVPVHPSSYAFTTGSSIKKCAAEHCGAQWLIKLDITDFFESVSEIQVFRLFKGLGYQPLVSFEMARLCTVLILDKSPRTHYSQWHVRKENKIIPQYNQKMLGYLPQGAASSPLISNLVMKECDEKLTNIANRYKLSYTRYSDDLSFSTRSKNFCRSKAKDVIFEVYEVLSKAGYRPQLRKTKIISPSSKKIILGLNVDGAEPLLQKEYKDKIRQHLYYIEKLGVAKHVEKRGFDSIWGFKSHLRGMIDYANMIEEDYAKKCLDRFSNIDWPV

SEQ ID NO: 1805 - protein, 376 aa, Vibrio parahaemolyticus
  source 1..376: note = Related to CP006008.1
MWSPHNYKEQGLEKGLSDELLERAISQSEDVIERNHDLPSILSLKHLSVRTCTSHQKLTRFVAREEFSYEKFSIKKRSGGRRFIYIPEPTLLHVQRWINEFILKPIPVHQASFAFNPGSSIRKCAAKHCGAKWLIKLDITDFFESISEIQVYRLFREFGYQPLVAFQLARICTIATPEMSPRRKFNNWKVRRKNKNIPRYNQRILGYLPQGGATSPIISNLVMRELDSEFSKIARKYRLVYTRYSDDITFSTRANTFERDSGRRLITEVYNLLNLSGYKPQYRKTKIVPPSAKKIVLGLNVDGRAPRLQKEFKDNIRQHFYYVETLGLSEHIVNRGFDSVWGFKCHLKGLIDYANSIEPEYARKLVVRFNNIDWPV

SEQ ID NO: 1806 - protein, 377 aa, unidentified
  source 1..377: note = Related to PUHN01000047.1; note = Rhodobacteraceae bacterium WD3A24
MWSPHQYRAAAKEKGLSDATIEAAIDQIETVEQGTPELPAILSLNHLATRARVPYQYLRSVVSRSEPSTYRKFSINKRSGGRRFIHVPEPPLAHVQKWINRFILRQVPVHKASFAFAPGSSISGCAARHCGAHWLIKMDITGFFESVSEIQAYRCFEELGYQPLVAFELARIVTVGPLDQSPRHRDPVWKVREPNAAIPSYSSGALGYLPQGAPTSPMLSNIVMKPVDEEIAAAARKAGLIYTRYSDDLTFSTPAKEFGRSAATDFVHTVGQILAAAGFRPQHRKTKIIPPGSRKIVLGLNVEGTAPKLRKEFKDNLRLHLHYLDKFGPAEHAKARQFETIWGMKAHIRGLIDFANMVEPVYAKGMLDQYEQIEWPF

SEQ ID NO: 1807 - protein, 380 aa, Ralstonia solanacearum
  source 1..380: note = Related to NZ_CDRJ01000001.1
MWSSQRYLSEGKKNGAAQLVIDNAISQIELVLDQNNNIPAILSLKHFSLRSHVGYKFLRSVVEREEEDDKQGVQVYRYFNIRKKSGGTRTISIPHPQLLIAQKWLATNVLSKLSASNYSFAFSPGSNIVACAKKHVEANWLVKMDVKDFFGSISEIDVYRQFRKLKYQPLVAFELSRIVTWPKSPRVDSPRWELDSVRSSIGSYIHTEIGCLPQGAPTSPMLSNLVANALDEELSRVANKFGVRYTRYCDDLTFSTRRKSFDRNQAKALIEAATMTMLPLGFSPNEKKTVVIPPGARKQVLGLNVDGPVPTLSKEFKSKIRQHLFFLTKNGPAAHAADREFDTIWGLKRHLYGLADYAFMVEPEYGKHVKSALSSINWPV

SEQ ID NO: 1808 - protein, 375 aa, Ralstonia solanacearum
  source 1..375: note = Related to NC_017559.1
MWASQHYFQEGKSLGVDEDILVSAVDQIERVLDVNGDLPSILTLNHLATRAKVGHAFLRRVISRTQNGAYRHFAVKKRTGGQRWISVPHPQLLNVQRWLAKHVLNQIDASRHSYAFEPESSIKKCAEQHIHAKWMVKMDVEDFFWSISEIDVYRQFVSLGYQPLVAFELSRLATWPLFAHGPAKAAVWRARPREGIPTYSWGNMGCLPQGAPTSPMLSNLVMRELDDRIHRAARKHRMVFTRYADDLTFSSRDETLGRAACRELIGEVGDLLRQRGFNPKHKKTVVVPPGARKVVLGLNVDGDAPRLPKEFKSKMRQHLYYLRTAGPAAHAAKRSFDTVWGLQRHLRGLADFAHMVEPEYGSELLRALQAVSWPV

SEQ ID NO: 1809 - protein, 395 aa, unidentified
  source 1..395: note = Related to JADGAR010000007.1; note = Magnetococcales bacterium
MEFPLHNYLKSLRDIGARDGYIKAIQRNAKPLADCGLPVILTLGHLAHITDVSHGILTDIIKRQIDPYRVFAIRKRNGGKRFICVPETGLLNAQRWIHDEILCSLAATKNLSCHATAYAPGCSHVINAKRHVGAAWILKFDITRFFESISERQVYRVFRGLGYRSQVAFCLTRLCTRVLPTNVDHRLLRHTKRWQTGDQRNQRNFSGARVIGHLPQGAPTSPMLANLVCIPLDTDMQNIAAREGLTFTRYADDMTFSGEMLDRAAAVKISREVSIVVGRYGFGINLQKTSIAKNGGRKIVTGLSVDGDVVRLPRAYKDAIRQELFYLDKHGIQEHCARIGHKNHLSYLLRLAGRIRYATSIEPVIGQRMMHLFLRIFPTFQETERLIFQDFVSDD

SEQ ID NO: 1810 - protein, 395 aa, unidentified
  source 1..395: note = Related to JADFZH010000217.1; note = Magnetococcales bacterium
MEFPLHNYLNSLRDSGARVEYISAIRRNAQPLVDCGLPVILTLGHLAHVTDVSHGILADIIKRQIDPYRVFAIRKRSGGKRFICVPEKGLLTVQRWIHKEILCAPVALRKLSCHATAYAPLSSHIVNAKRHIGAAWILKLDITRFFESVSERQVYRVFRGLGYRALVAFCLTRLCTRVLPSTVDHRLRLRTKRWQTGDQRNQRNFPGARVIGHLPQGAPTSPMLANLVCVKLDADLQKIAAREGLTYTRYADDMTFSGEVVDRAAAIRISREISIAVGHYGFGINLQKTSIAKNGGRKIVTGLSVDGEVVRLPRAYKDAIRQELFYLDKHGIQGHCARIGHKNHLSYLLRLAGRIRYAISIEPVIGQRMMEKFLRIFPTFLETEQMVAQVFVKDD

SEQ ID NO: 1811 - protein, 388 aa, Methylocapsa sp.
  source 1..388: note = Related to NZ_LMUI01000048.1
MEFPLHAYLNHLQTEGASGEFIAAVRRNAKPLADRDLPVILTLGHLAYATDVRYGTLNGIVRRQIDPYRVFAIRKRNGGKRSICVPEPGLLSVQRWIHEHILCSHYALSRLSNQSTAYAPGCSHLANARRHISAAWLLKLDITRFFESISERQVYRVFRGFGYRALVAFFLTRLCTRVLPFAVDRRLKRQIRRWRTGEPRRYLNAAVVGHLPQGAPTSPMLANFVCTVLDAELQTIAVREGLTYTRYADDMTFSGGIGVACSPAEIIREISTIVGKFGFGINSQKTSIAKNGSRKIVTGLSVEGDMLRLPRSYKDELRQELFFLKKYGIAEHCSRTNHKNHMSYLLRLAGRIRYAVSAEPIIGTRMMLQFQHLFPNFTEIEQSLFDRP

SEQ ID NO: 1812 - protein, 402 aa, unidentified
  source 1..402: note = Related to JADGBU010000012.1; note = Magnetococcales bacterium
MEFSLHTYLNRLRTRGASDEFVEIIRRHAKPLSDRGLPVILSLGHLAFATSNSHEVLHGIVKREVDPYRGFWIRKRSGGKRYICVPEGGLIRTQRWIHDHILCSTWGKKSLSMAATAYVPGSSHIDNAKRHSGADCVLKLDITNFFETISERQVYHVFHGFGYRPLVAFYFSRLCTRVLDPKHDVRSPTVRWAGKKKRWQTEANRKNNNYHTVGHLPQGAPTSPMLANLVCFGLDLELQQIADSINLVYTRYADDMTFSGSFTTKEQISQFICQVSAVVGKFGFSINQQKTSLSRTGGRKIVTGLSVEGDALRLPRAYKDAIRQELYYIERYGLSGHLERVGYANHLTYLMRLKGRIQYWFSIEPATATPSIEQFRAIFPNFNEINELVTGDSSRGIPGTPY

SEQ ID NO: 1813 - protein, 455 aa, Burkholderia pseudomallei
  source 1..455: note = Related to KN323041.1
MASQYPCRLFETHERGSESAVLDTAFLSARWVDDQLELRGLAIRPSSHHAERVKARNMKFSLHAYLKPLRENGASQEYIEALARSAKPLVDNGLPVLLTLGHLAHVCDVPYGMLVGIISRHTNPYRVFSIRKRSGGKRFICVPEPLLMQVQRWIHDQILCSPFALARLSRHATAYAPQNGPVPANQRRIADHVKNAERHLGATWIVKLDISNFFESISERQIYHVFREFGYRALVAFCLARLCTRVLPLTADKRLRSRAKRWHPGKEYKILATKVVGHLPQGAPTSPMLANLVCVELDRNLQSIAVREALTYSRYADDMTFSGEFHDRSDAVIVLRELSRVVAAQGFSINALKTNIAKNGGRKIVTGLSVDGDSIRVPRAYKDKIRQELYFIGKHGLTDHCNRIDQRNQLSYLLRLAGRIRYVSSVEAEAGNLMMKKLLSLFPTLLDTERILSEI

SEQ ID NO: 1814 - protein, 388 aa, Serratia marcescens
  source 1..388: note = Related to NZ_CP050013.1
MNFSLHSYIKHLRDTDASEDYIKTVQRHARTLVNNNLPVILTLGHLAHSTNSFHNTLLNIVKREVDPYRVFSIGKKSGGKRLICAPELNLLNVQRWINQYILKSELALKKISSNTTAYVPGGSHIKNAERHVGASWIIKIDIVNFFESISERQVYYVFRELGYRALVAFNLARLCTRILPHKLDNRKYNKKRWRSKKQYAYCNSKVAGHLPQGAPTSPMLANLVCVMLDAKLQCIASEYGLSYTRYADDMTFSGHFDDKKTALIFMREISNTVINYGFSINSQKSSIAKDGGRKIVTGLSVDGEHIRLPRAYKDKIRQEIFYIKKYSLESHCSRTRKGNRFSYIMHLAGKIRYAILVEPTFGNKMMSEFVNIFPDFLDMEQILKSSIR

SEQ ID NO: 1815 - protein, 388 aa, unidentified
  source 1..388: note = Related to JAFKLC010000111.1; note = Rhodospirillales bacterium
MNFPLHAYVRALKRSGASEQFIQQVRDKAKPLVATGLPVILTLGQLSFATEIPYRILLSIIGRAVDPYRLFSIRKRAGGRRFICVPEPRMMFAQRWIHQNILSAPSVTAGMSCAAMAYKNSASHVANARAHLASDWILKLDVTRFFESVSERQVYHVFHSLGYPALVAFGLARLCTRVSFGSRGGRHPGASARWSSRDRYDFLGYPDLGHLPQGAPSSPMLANLVCIPLDSQIEKIAEEHNLVYTRYADDLTLSGSLIGADETLEVIRKVSNSLGQFGFGVNVRKTRVVRRGTRMIVTGLSVEGETLRVPRDYKDRLRQELYYIEKFGLREHCQRIGQRNYAAYLRRLSSRIGYVSCIEPATGKKLEAKFTNLFPGFGELKELILSFP

SEQ ID NO: 1816 - protein, 376 aa, unidentified
  source 1..376: note = Related to RFVU01000153.1; note = Betaproteobacteria bacterium
MEFPRPATAVPLPFDATLAQLAHATGMTTARLQGIVSRRIDPWHTFSIRKRGGGRRTICVPDADLLALQRWVHRHLLCHPQSLARLMPQATAYRPGGSHLANAEAHLGAGWLLKLDLVRFFESISERQVWHVFRALGFAPRTALLLTRACTRVLPLAVDRRYFDRTPRWRTGAERSPNEKFHPRPRVVGHLPQGAPSSPMLANLVCHALDAQLQQLAQSCSEHAVRYTRYADDITFSGPPMTAAALNALCGRLLREATRAITRYGFGVQWRKVQLVRRGARRIVTGLLVDGDALHVPRPSRDALRQALYHLEQQGIEGHCAWLRIDDTQAYLARLRGQLAYLRSIEPVRGARMLAQFDRLMAARGTVGTTGQMRNA

SEQ ID NO: 1817 - protein, 397 aa, Agrobacterium sp.
  source 1..397: note = Related to JAFEJZ010000162.1
MTAFSLHDYLSVLRAEGSPSDYIEALRRNAQPLVSRGLPVLLTLGHLAFVTDVDYRYLNAVVRRTVDPYRIFSIAKRSGGKRYIVVADRKLALVQSWIHRNILTSAAAMRSISSAVTAYVPGSSHIANASRHRNASWLIKVDVARFFESISERQVYYVFRQLGYRALMAFALTRLCTRVLETKDFRARKKGRWQKRTVSPDRPLGIGHLPQGAATSPMLANLVCRKLDSSLSEIADDRGLIYTRYADDITMSGEFQDRMDAESTIGLISGLLGGVGFGINHQKTSIAKDGGRKIVTGLSVDGDKLRVPRSYKDNLRQHLYYIEKFGLNEHCVRIGQAHHLAFLLRLAGQIRYVRSVEPPLGAEMLNRLRRAVPEFDAIDGLVSAAYDTDTDPSQGGG

SEQ ID NO: 1818 - protein, 391 aa, Acinetobacter tjernbergiae
  source 1..391: note = Related to NZ_KB894370.1
MSTHNYITELNTPGVNPTYKRVVRQLVTPLLQKNLPVILSLKHLSVLLDIPYIVVHKIVYRDGDFYKVFAIKKRSGGKRWITIPDYFLMKAQKWINNNILNAQEAQAMLSINSTAYKKKSSHIVNASMHLGEKQLIKLDILRFFESISERQVFNVFKKLGYKNSVSLILARICTRVIPIHLDKRFIKNEQRWTTKYNYKYDQQKNKIKRIGHLPQGAPTSPALANFVCCNLDADIEDLIDQFNLNSYTRYADDIIISGNFQDKNTAISCIFRVSRILRNYGFKTNYLKTKYCGSGDRKIVTGICINDENQLRVPIEYKNKIRQEIYYIDKFGLLNHCERLNISNPLNYLMRLEGKINYIKTVELDKGIYFMNKLEKAIPNMNEIRLLNDLP

SEQ ID NO: 1819 - protein, 365 aa, Acinetobacter baumannii
  source 1..365: note = Related to NZ_NIWI01000032.1
MSTHNYLTELNKHDVNPSYKRVVRQLATPLLQKKLPVILSLKHLSVLLDIPYIVLHKIVYRDGDFYKVFAIKKRSGGKRWITVPNHFLMKAQKWINENILNIQSTQDFLSISSTAYKKSSSHIINASMHLGEKQLIKLDILNFFESISERQVFKVFKNLGYKNSISLILTRICTRLIPLNKDKRFFKKEKRWTTKYTYKYDNQNNKLKRIGHLPQGAPTSPILANLVCQDLDSEIQNLTDQLNLNYYTRYADDIIISGNFINKELAISCIHKVSKILREYGFKTNFLKTKYCGSGDRKIITGICINDENQLRVPIEYKRKVRQEIYYIKKFGLLNHCEKLKIYNPLNYVLRLDGKINYIKTIEPD

SEQ ID NO: 1820 - protein, 390 aa, Acinetobacter baumannii
  source 1..390: note = Related to KB849902.1
MSNHNYLTSLRNSENINSEYKKSISKYARPLIREELPIILSLKHLSVLTDVPYNTLYNIVFRKIESYRIFAIKKRSGGKRWITVPTPYLMRVQKWINKNILSNSHVLSYISNNSMAYKKKSSHIKNALVHHGETKLIKLDITNFFESISERQVFHVFKKIGYKNSVAFILTRLCTRILSLNNDIRLLNKEKRWFSLYQYKHLDNEKTIKRLGHLPQGAPTSPMLANLVCLELDKQIEDMCLLEDFNYTRYADDIVISGDFSDKENAINHIYEISKILRTHGFKTNYLKTKYCGAGDRKIITGLCINDPSSLRVPSHYKKKIRQEIYYIKKYGLIEHCRKLNIKNPLNYLNRLEGKIYYLICVENENGKKALENLEDAIPNIHELRQLAEI

SEQ ID NO: 1821 - protein, 372 aa, Burkholderia ubonensis
  source 1..372: note = Related to NZ_LPGQ01000067.1
MRKVPAVFTLMHLAHLTGTSWQSLRNTITRQQDDYRVFEIRKRSGGNRRICAPAPMLKSVQFWIHKNILCSLGARALLQEASTAYAPGSSIKKNAAIHAGAAWLIKLDIKDFFESISERQVYHVFRRLGYPALLSFEMARLCTRVVPPRDDKVPRRREKMWRWTNQTCKHFTPYPCETAVGHLPQGAPTSAMLANLVAVELDKKIQVIADANGASYTRYADDIVLTLAVATRVQCDTIFRAVADVVSHSGFRVNRIKSHVRGPGARKVVTGLVINDVRPRLARSMREDIKLALYHIKKHGLLGHAERRHSKNPLGYLNHLVGLIYFARSIEQDFGVWALSELRIAMDDHKDLLSILRTFDSSQDQRYSYRNI

SEQ ID NO: 1822 - protein, 352 aa, unidentified
  source 1..352: note = Related to nan
MRATVARSKDNYTTFEIRKRSGGNRRICVPAPALKLAQGWIHKHILCSPGALALLQQASTAYAPGSSIKMNASAHAGAAWLIKLDIKDFFESISERQVYHVFKSLFGYPALLSFEMARLCTRVVPPRNDGVARRRERMWRWTNRASKHFSPYSCVTAVGHLPQGAPTSAMLANLVAVEIDKQIQAIADANDATYTRYADDIVLTLSDGTRSHCDAILQKVAHVVNTAGFRVNRKKSYVRGPGARKVVTGLVINDDRPRLTKASREEIKLALYHIKKHGLLSHSERRHSKNPLGYLNHLVGLIYFARSIEEDFGARALIELRTIMADHRDLLSVLQTFEAMPAERESYSYRSI

SEQ ID NO: 1823 - protein, 381 aa, Caballeronia novacaledonica
  source 1..381: note = Related to NZ_BPUQ01000001.1
MSIADQLTENKVPLIFSLIHLAHVSGVKWSLLRSFVRRDSDFYGCYEIRKRSGGNRRICVPEPALKLIQKWIHANILRSTGALARLHSASTAYAPGASIKKNADSHVGAAWLIKLDIKDFFESISERQVYWVFRDLGYPALLSFELARLTTRVAPPRRDGTMRHRDKMWRWSNNASQAYPAYKPGRVTGNLPQGAPTSAMLSNLAVRELDVQIQLIAARHHATYTRYADDITLTLVQGSRPACAEIFRSVADAITHAGFRVNKCKSRISGPGSRKIITGLVITSKAARVAKNVRSEIEIALHYIKKHGLLDHIERCGHKNPVGYLNYLYGRIYFVRSIEFDFGTRALEELNALIKTYEGLGWSSKPFKIVRSDLVFHSAKK

SEQ ID NO: 1824 - protein, 352 aa, unidentified
  source 1..352: note = Related to JADKFD010000029.1; note = Rhodanobacteraceae bacterium
MVERKIDDYRVFTIQKRSGGNRRICSPSSTLRRVQTWIHRNILCAAGSLAKIHAASTAYAPGSSIRANAKVHTGAAWIIKIDIKDFFESISERQAYYAFRSLAYPALLSFELARLCTRIAPPRDDGAQRKRDLLWRWNNDRAKTGNPYGLVQSVGHLPQGAPTSAMLANLVFAALDVRINAIAQKHGATYSRYADDIVLSLTSGCRVECAKIFRDVTSVISHAGYRINRSKSRITPPGARKIVTGLVTNDVTPRLPREMKEDIMLSIYHIKKHGLLSHMERRKSSSPLGYLNHLIGRILFAQSIENKFGSCALNELRVAMAPYRDLLDMARMLNPKTSGSNDFTALYLLVFP

SEQ ID NO: 1825 - protein, 404 aa, Burkholderia cenocepacia
  source 1..404: note = Related to NZ_CP034547.1
MLGPSLHAIEFHARGFNEQYVKALVDTAKHLSAKRVPVVFTVMHLATLSKTSWSALMQTIVRQSENDYRVFSIRKKSGGFRRICVPAPHLMQTQRWIHDHILNSRGALDCLHGASTAYGKGSSILNNASAHAGSKWLIKIDIKDFFESISERQIYYVFRRFGYKALLAFELTRICTRAIPPRYDGRPRRRDKTWRWSNSQVVGKGPYLATATVGHLPQGAPTSAMLANYAVASLDEKIQAIADGVGATYTRYADDIVLSMTNSSRELCQTIFRQVCVEITTSGFRLNEKKCFVRGPGDRKIVTGLMVNDVKPRLTKSIKDEIEVSLHCIGKFGLLSHIKRKKIKSPLGYLNHLNGLIRFAYSIDDRFGNWATKELDRVLAPERETIELLKNFSGRPRPNRHMFG

SEQ ID NO: 1826 - protein, 404 aa, Cupriavidus basilensis
  source 1..404: note = Related to NZ_BBQM01000001.1
MLGPSLHAIKAHAHGLNEQYVKVLVDTARQMSVKRVPVVFTLMHFATLSNTPWAALIQTIGRRAENDYRVFNIRKKSGGFRRICVPVPHLKRAQRWIHDQILKSRGALDYLHEASKAYGDGDSILNNASVHAGSEWIIKVDIKDFFESISERQVYHVFRKFGYRALLAFELARLCTRTAPRRYDGQPRRRDKTWRWGSPQVAGKVPYRSRTTVGHLPQGAPSSAMLANYVAASLDTKIQTIADAAGAAYTRYADDIVLSLTNSDRESCQEIFRQVCLAVTTAGFRLNEKKCLIRGPGSRKIVTGLVVNDVKPRLTKSIKDEIELSLYYIGKFGLLSHAKRRKTKSPLGYLNHLTGLIHFAHSVDDRFGAWAQKEFDRVLAPERETVELLRSFSGRPRPNRHMLG

SEQ ID NO: 1827 - protein, 367 aa, Turneriella parva
  source 1..367: note = Related to NC_018020.1
MLLWTPHLFEKAGIQRKYDIPYIARLIDYGNQLSQRNLPVIFSLKHFSRLTDINYSYLRAVIDRTEYPYKTFKIRKKTEGFRRISVPDSRLLVIQQWLHKHILSKIQPHFSSTAFNPGCSIMRNAQPHCGANWLIKIDIENFFDSISERQVYTQFKALGYSKYLCFCFARLSTRLASREAKKYKKPRWQNKRHQYPEFIGNLPQGAPTSPILANLVCRQLDAQIHQLIQPMGLIYTRYADDIVISGNALTRKDASKLIQEISKILNRSGFQKNSLKTRILSPGARKIVTGLNVNGPNPTIPKKLKYSIRAELHYAKVFGVAEHCKKLGYHKIDGFRNQIRGKIDFVRSVNPKLADKFYAQLDDINWP

SEQ ID NO: 1828 - protein, 341 aa, Leptospira adleri
  source 1..341: note = Related to NZ_RQHG01000016.1
MLPNIIPLQTIGELANITGVPYSYINNIIKLKEDSYRSFSISKRSSNTKRKIFVPKPMLMKVQKAINRYILQNIQPHPIATAYSYGSNPIKNAAYHCNSSILLKFDIKDFFHSFDERDVYYLFLSFGYNRLLSFQLARLCTKIVESTWFPNEYKDHYIYPSLTIKKKSTFLPQGCPTSPMLSNLLMRTFDNKLEMLANKFSLKCTRYSDDLTFSSESKMSQDSIKIVIAEVNKMLGKKFRMNREKQKVYHKGQRKIVTGLIVNNDTPKLTKAFKNDLRMHVHFIAKYGYVEHALKRNCDPFSFYNHFNGRMKWAELIEPAFVNKLKHLLVNISIPFTYSAE

SEQ ID NO: 1829 - protein, 331 aa, Mixta intestinalis
  source 1..331: note = Related to NZ_CP028271.1
MTQWNPNLFRKEGLSKGYDSHYLTRLVEQGETINERNLPVVFSLAHLANLSHTLYSDLHGFVSRNELERKDFPYKNFSISKRTGGKRWISIPTPALMAVQYWINQNILNRVIPHAAAYAYVPKRKIIQHAQRHCGSGWLIKIDIKDFFGNISERQVFDVFLNLGYPKLLSFEMARLCTRVTPKRKGKRWCNTNNEHTITGYDSKFVGSLPQGAPTSPALSNLVCIGLDKQLTSLAISEGATYSRYADDICFSLPMGCRKSALHIKKEISKILHGYGFSDNSKKTRLIPPGARKVLTGLNVNNDTPRIPKEIRDSVRMHLYYAKKKWYRNSL

SEQ ID NO: 1830 - protein, 378 aa, Pectobacterium carotovorum
  source 1..378: note = Related to NZ_JUJG01000015.1
MTQWNPNLYRKEGLSKGYNVHYLTSLVEQGEKSNEKNFPVVFSLAHLANLSRTLYSDLHIFVSRTAIKRKDFPYKNFPIAKRTGGKRWISIPTPALMAVQYWINQNILNKATPHSAAYAYVPNKKIIQHAQRHCGAAWLIKIDIKDFFGNISERQIFDVFLELGYPKLLSFEMARLCTRVTPKRKGKRWRNIVTEHTISDYDSRFVGSLPQGAPTSPALSNLVCMNLDKKLTSFAISQGATYSRYADDLCFSLSDGCRKDALYIKKEISKILREHGFSDNSKKTRIVPPGARKILTGLIINDELPKIPKEIRDSVRMHLYYAKKNGIASHCTIRGFRSVIGFKNYLSGMIGYISSINPQQGKKLRTEFNSLPWIDFDL

SEQ ID NO: 1831 - protein, 378 aa, Pantoea agglomerans
  source 1..378: note = Related to NZ_CP091099.1
MTQWNPNLFRKEGKSKGFNPEYLTALVQQGEKTDGLGFPVVFSLAHLANLSRTLYSDLHSLVSRNELERKDFPYKNFPISKRTGGKRWISVPVPALMAVQSWINHNILSRTKPHAAAYAYVPKKKIIQHAQRHCGADWLVKIDIKDFFGSISERQVYNVFLGLGYPKLLSFEMARLCTRATPKRQGKKWRNEISTYSISSYNSEFVGSLPQGAPTSPALSNLVCFELDVALTSLATSLDATYSRYSDDLCFSLSEGNRKSALNIKRQASKILREHGFSDNSSKTRIVPPGARKMLTGLNVNNASPKIPKEVRDSVRMHLYYSKKLGIPQHCKNRGFRSIIGFKNHLSGVIGYIYSIDKDLGNKYKIEFDSLPWIDFGI

SEQ ID NO: 1832 - protein, 378 aa, Cronobacter sp.
  source 1..378: note = Related to JAANQB010000011.1
MTQWNPNLFRKEGISKGYAPNYLAALIERAEKINENNVPVVFSLAHLANLSGTLYSDLHSFVSRNALEQKDFPYRNFPIKKRSGGKRWISVPVPPLMAVQSWINTNILNKITPHASAYAYVCNRNLIQHAQRHCGSDWIIKIDIKDFFGNISERQVYSVFVELGYPKLLSFEMARLCTRATPKRKGKKWINYANDHTIESYNTPYVGSLPQGAPTSPALSNLVFSIVDKKLSSLALSHGATYSRYADDLCFSLIQGNRHISLALKKEVSKILNEHGFSDNSKKTRIIPPGARKMVTGLCINSSSPKIPKEVRDAVRMHLYYAKKLGIASHCMSRGFRSVIGFKNYLAGMIAYVSSVDVKLGTKFRQQFNLLPWIDFDI

SEQ ID NO: 1833 - protein, 377 aa, Massilia sp.
  source 1..377: note = Related to PPXQ01000003.1
MQWNPNLFRKEGNARGYDDLYLNALVSQGQRTAARGLPVVFSLAHLANLSRTLYADLHGFVSRSGIEYPDFPYKNFPIAKRTGGKRWISIPVPQLMAVQQWINQNILNKVVPHPAAFAYVPKRRLIEHASLHCGADWIIKIDIKDFFSNISEKQVFNVFLGLGYPALLSFEMARICTRVTPLRKGARWKNSFKAHSISSYDSRFVGSLPQGAPTSPALSNLVCMKMDEELTEWAISKSVTYSRYADDLCFSFVNSSRQSAYDLQREVTKILRKHGFSDNGKKTRIIPPGARKTLTGLNINAASPSIPKEVRDSIRLHLYFSEKNGISEHCEKRGFYSIIGFKHHLFGLISYVLSVDKSKGEKFRQQFNALPWLDFEN

SEQ ID NO: 1834 - protein, 378 aa, Zoogloea sp.
  source 1..378: note = Related to JADJBR010000009.1
MTHWNPNLFRKEGSAKGYELAYLNALVEQGDKSTALGVPVVFSLAHLANLSRTLYSDLHGFVRRAEISRADFPYKNFPISKRTGGKRWISIPVPPLMAVQQWINQNILNRVVPHAAAFAYVPKRKLIDHAKRHCGADWLVKIDIKDFFSNISERQVFDVFLKLGYPKLLSFEMARLCTRVTPKRRGARWTHVTGEHAISDYSSQFVGSLPQGAPTSPALSNLVCIELDKELTQLATALSATYSRYADDLCFSFVGGSRQSAFDLKREVSKVLWKHGFSENTKKTRIVPPGARKVLTGLNVNASFPTVPKEVRDLVRMHLYYAKLRGIPDHCKERGFRSVIGFKNHLFGLIGYVATVDVTHGEIFLSQFNSLPWVNFDL

SEQ ID NO: 1835 - protein, 377 aa, Achromobacter deleyi
  source 1..377: note = Related to CADILF010000059.1
MRWNPHFFRREGVNKGYDSNYLEALVRQGNLSSGERLPVIFSLSHLANLSKTLYSDLHGFVSREDIFRENFPYKNFTIGKRSGGRRWISVPVPPLMAVQKWISQNIVNSVLPHPAAFAYVRNRRILDHAYRHCGADWMLKIDIKDFFGNISERQVFNVFLSLKYTRLLSFEMARLCTKASPNRQGERWCNVDLDYSVSGYSSKFIGSLPQGAPTSPGLSNLVFSPIDHQLSELAQAESAVYSRYADDLCFSFTGSSRSAAVKMKRAVAEILWNAGFSENLKKTRIIPPGARKILTGLNVNDSTPTIPREVRNLVRMHLHYARVNGIPQHCRERGFRSVIGFRNYLLGVIGYVASINDQAGKKFLYQFNELNWIDFGL

SEQ ID NO: 1836 - protein, 378 aa, unidentified
  source 1..378: note = Related to JAEUMY010000005.1; note = Betaproteobacteria bacterium
MTRWNPNLFRKDGLAKGFNPEYLGALIAQGESLVSNQMPVVFSLAHLASLSRTLYSDLHGFVSRSDIQRKDFPYRSFPIAKRSGGVRWISIPAPPLMAVQQWICQNVLNRVEPHAAAYAFVPRRRLLDHAQRHCGATWLVKVDIKDFFSNISERQAFQVFLRLGYPKLLSFEMARLCTRVTPRRKGAKWTNSNDDHSIPEYDCRFVGSLPQGAPTSPALSNLVCMDLDRDLTELAVSKSATFSRYADDLCFSLTSGSREAAFALKRDVSKVLWKHGFSENPKKTRVVPPGARMVLTGLLVNANVPTVPREVRDLVRMHLHYAKKNGIPMHCKARGFRSIFGFKNHLLGLIGYVASVDKKHGADFYAQFNQLPWIEFDL

SEQ ID NO: 1837 - protein, 384 aa, Desulfotignum balticum
  source 1..384: note = Related to NZ_ATWO01000001.1
MTRWNPNSYYKEGKNKGYSSNYLNSLVVHGKKIAANNIPVIYSLKHLALLSGTNYNELYQIVSRLDIDPEGPSPNYPYKIFPIRKRRGGKRLIAIPYPTLMAVQRWVSQEILNKLPVHPAAFAYVAGKKNPLRDHAKLHCDADWILKLDIKNFFSNISERQIYKVFKTCNYYSLLSFEMARLCTMIVPSRRKRRWNNSKQFKNKNLYPCDHIGFLPQGAPTSPALSNLTCIDMDNELTKLALENGANYSRYADDLCFSFTISTRRDLLKFKRTACELLWKNGFSENKTKTKILPPGSKKVITGLIINSGKPMIPKELRDRVRMHLYFSKKLGIPEHCKRRGFRSIIGFRNHLYGLILYIKSIDPKKGEVFRAAFKDLPWVNFNI

SEQ ID NO: 1838 - protein, 380 aa, Shewanella algae
  source 1..380: note = Related to CP033575.1
MNRWNPNFYYKEGIKRGFNTEYLDKLIEQGRKIQENNIPVLFSLAHLASCSRTQYSELHSFVARTEYGPEGYPYRNFPIRKRSGGKRWISVPAPPLMAVQSWINKNILNSIPTHPTAFAYVNGIKSPLKAHAEKHCDADWVLKVDIKNFFSNISERQVYRVFRSLSYSKLLSFEMARLCTRITPGRTGKRWNIDWNESGVEGYSCTCLGSLPQGAPSSPALSNLVCFELDTQLHELALSRNATYSRYADDLCFSFIKSSRDEVYQFKREVNKALWDNSFTENPKKSHIIPPGARKIVTGLIVNSDKPSIPRELIDAIRMHLFYSEKFGIPAHCRKRGFRSVIGFRNHLKGLIMYVYSIDPKKGNEFLEKYNRLPWLEFEI

SEQ ID NO: 1839 - protein, 381 aa, Snodgrassella alvi
  source 1..381: note = Related to NAHO01000032.1
MKRWNPYFFRKQGEELNYNKNYLDKLIQIGSQIDSKLTPVIFSLSHLCKLASVSYQEMHDIIARKNFTSFGYPYRNFTIRKRSGGYRWISVPCPSLMIIQHWIASEILRQMKPHQAAYAYVNNLTSPIKSHVQNHCGAKWILKLDIEDFFGSISEKQVYKVFKNYQYPDLLSFEMARLCTKISRNRKGKKWVNDRKNNVELSSYFSKYIGCLPQGAPTSPALSNLVCINMDEELSLLSRNNDANYSRYADDLCFSFYTTNRRNVYMFKKQVCEILWKYGFQENIKKTHIVPPGARKIVTGLIINEHEPTIPREVKDNIKMHLYYAKKFGIPEHCKNKGFRSVIGFKNHLEGLINYVTSVNPEQGKKYEKAFLTLPWLNYKL

SEQ ID NO: 1840 - protein, 379 aa, Psychromonas antarctica
  source 1..379: note = Related to NZ_JAHNZV010000197.1
MNRWNPNTYHRNGLEKGFDPDYLLTLVKSGKAIKSKHKPVIFTLSHLANCTDTQYSDLHAFVSRKGYFSDTNPHYRTFSIKKRTGGQRTIHAPHPVLKIVQSWIARNILADANIHEAAKAYKKGESIVDNASPHCEAEWLLKLDICDFFHNCSERQVYYVFKSMNYSSLLSLELARLCTKVDDKRPLHRWNNTNKQYKIEEYSSFRVGSLPQGAPTSPALSNLICETLDEILIMLSLKYSGCYTRYADDLTFSFNNSTRAKVMDFKRQVSNELKKFGFEINKQKTRVIPPGARKIVTGLNVNGSQPSLTRELRDKIKADLYYCKKYGVVNHCEKNKYKSIIGFSNHMKGMISFVYSVNPELAGKYKIKYDELDLPTLVL

SEQ ID NO: 1841 - protein, 379 aa, Colwellia piezophila
  source 1..379: note = Related to NZ_KB905170.1
MNRWNPNIYHRNGVDKGFEPDYLLTLVQSGKAINSKHKPVIFTLSHLANVTDTQYSTLHEFVSRKGYFSNIEPHYRTFSIKKRTGGHRTIHAPHPVLKKVQSWIARNILADADVHEAAKAYKRGESIVDNALPHCESEWLLKLDICDFFHNCSERQVYYVFKYMNYSSLLSFELARLCTKIDDKRPLRRWNNTNKQYKIEEYGSFRVGSLPQGAPTSPALSNLICEKLDEILFMLSLKYSACYTRYADDLTFSFNNSSRAKVLGFKCQVSNELKKFGFEINKKKTRIIPPGARKIVTGLNVNGNKPSLTRELRDKIKADLYYCKKYGVVNHCEKNKYNSIVGFSNHMNGMISFVYSVNPSLAEKYKKQYEELDLPSLVL

SEQ ID NO: 1842 - protein, 379 aa, Vibrio anguillarum
  source 1..379: note = Related to CP010032.1
MNRWNPNTYHKNGIEQGFNPDYLVTLVKSGNAIKSKRKPVIFTLAHLANCTDTQYSDLYAFVSRKGYFSESEPHYRTFSIKKRSGGNRIIHVPHPVLKIAQSWIARHILDDGDVHDCAKAYKSGESIIDNASPHCESEWLLKLDICDFFHNISERQVYYVFRKMQYSSLLSLELARLCTKIIDKRPNHRWNNNPKNYKIKEYSSDRVGSLPQGAPTSPSLSNIICKDLDETLFMLALESNACYTRYADDLTFSFNNTTRKDIVNFKRKVSNELIKYGFKINAKKTRIVAPGARKIVTGLIVNGPVPTIPRELKDKIKADLYYCKKFGVANHCIKNKYQSIIGFSNHMRGMISFVNSVDKKLALKYKKAYDELNLPTLIL

SEQ ID NO: 1843 - protein, 379 aa, Enterobacter sp.
  source 1..379: note = Related to VWWR01000002.1
MNRWIPNTYHRNGLIQGYDKTYLKNLVQTGNIISGTHHPVIFTLGHLSKCTNTQYDDLHSFVSRKDYLSEIEPHYRTFNIKKRTGGYRNIHVPHPVLKIVQSWIARNILRQVDVHDCAKAYKVGESIYDNALPHCGAQWLLKLDIKDFFSNISERQVYYVFRKMNYPALLSLEMAKLCTKVDHLRVGKRWSNTEKNYAVKEYLFDKVGSLPQGAPTSPALSNIVFKELDELLFMLSLNHEACYTRYADDLTFSFHSSSRAEIIAFKRLVSKELLKFGFNINPKKTRIVPPGARKIVTGLIVNTHKPSIPKEIRDKVKADLYYCEKYGVINHCVKNNYKSIIGFSNHISGMISFIYSIDPVQGGKFKKVYDKLNLPLFVL

SEQ ID NO: 1844 - protein, 380 aa, Geobacter sulfurreducens
  source 1..380: note = Related to NZ_CP078092.1
MSIWSPLLFNAEGKKQGYDCRYLHKLTDQGNKLSDSGLPVIFTLAHLCAMAGVSFSLIHSCVSRKYDPYRSFTIKKRSGGYRQIVVPEPELMHLQRWINEFILKRAKVHSCAAAYISGSDIKMNASKHLGANWLIKLDIQRFFESISELQVYYIFHRLGYPKLLSFEMARICTRVDTQSNRHFRPRWNNRIHHFEILEYCDSRVGYLPQGAPTSPSLSNLTCRKLDKEIYDLSCRSDCRYTRYADDFAFSFIDLDREKASNFVNQVSRIISSYGFRKNARKTKIIPPGSKKIITGLVLGNGKVHLQKELKDYIRQNIYFATKYGVDEHCKKRGFVSIDGFYNHLEGIVNFALFIEPDFGEKAFEEFRAIKWPSLIVGLHA

SEQ ID NO: 1845 - protein, 370 aa, Leptospira barantonii
  source 1..370: note = Related to NZ_NPDS01000002.1
MLNGGPFKYIKESLIKSNSILYKIKISIYVRKLSSKNLPILFNLKHLCNIINVSYVKSKDIVSRKYYAYKHFTIKKRSGGVRHIHIPKDELRLIQKWVHNNILLKNSYDDSAFAYISGRNIKMHAERHCMARWVLKIDLENFFENTTERKVFHIFKKMGYSNIMSFDLARLTTIPVNIKAKEKLKKWKNKSSINKSDRILGSLPQGAPSSPLLSNLCFADLDREIFSIANSAEFVYTRYSDDLIFSTFEGDRMKVLNLLKDVRKLLSIGGYRINNKKVKILSPGARKIITGLNINQGFPKVNKSYIMEVKKHLYYCLKFGPLSHCEKINFRNIVSFKAFLKGRINYIKLIDPVVGLKLSQKFELIHWPII

SEQ ID NO: 1846 - protein, 320 aa, Leptospira interrogans
  source 1..320: note = Related to CP043881.1
MNVSYTKTKDIVDRKSYPYKHFSIKKRNGGFRNIHIPQDELRLIQKWIHKNILLKNNYKDCAFAYIPGRNIKMHAERHCMARWLLKIDLENFFENTTERRVFHVFRNMGYSKKMSFDFARLSTIPMNIKKKESSGKWKNRFPIGRLDRILGSLPQGAPSSPLLSNLCFSELDRKIISIADSFEFVYTRYSDDLVFSCFEGDRIKVIKLLKSIRKLLSMYGYRINNKKIKIITPGARKIITGLNINQNTPKVSKSYITEVNKHLYYCKKFGPLSHCERIKFRNTVSYRDHLKGRIDYIRLIDPVEGTKLLQKFELINWPLI

SEQ ID NO: 1847 - protein, 392 aa, unidentified
  source 1..392: note = Related to PSRA01000192.1; note = Bacteroidetes bacterium
METWSTHQLYQSAVASLGLDAAADLRVYCQRLRLKGVAVVFTLGHLARITDVNYQTLRESVNRRRESANYRMYAVKKRSGGRRFIHSVCTDLFKVQRFINQEILQKCMPHPASFAFHNSGGIRKCAAMHCGARWLFQSDLTDFFYNVTEIDAYRVFQEIGYRHVLAFELARLCTTTHLPRSQMRRLYVEEWAYFNKHARKQTGDGEDDSVTMPYAARFGVAGVLPQGAPTSPMLSNLAAAKLDESLQNFASKNGFVYTRYADDITISASDLPKSVSSLHRSIVQIIRKSGFKENRKKTRIAGPGSKKVVLGLLVDGDQPRISKETYRRIDRHLHASLKYGLVETAVHEGFDSAFGFHNHLSGLVAFVKDVDTKRWEEFALRLSKVRVPWSEN

SEQ ID NO: 1848 - protein, 398 aa, Aureliella helgolandensis
  source 1..398: note = Related to NZ_CP036298.1
METWSAHQLFTTAERSIGKSAAYALQSYAQSLEAKKLPVVFTLRHLSTITGVSYRVLHQTVNRKREACNYRMYAIKKRSGGRRIIHSVCEDLIRVQDFVNREILQRCQPHPASFAFHSSGGIKECASMHCGARWVFQFDLSDFFYDVTEIDVYRIFDDLGYRSLLAFELARLCTTTKLPRHLKHLLYHCANPDNLIQDFEDDFEKPGNGVRRLPYPERHGVVGVLPQGAPTSPMLSNLAARRMDELLQSFAFDSGFVYTRYADDLTFSAARLQDKHGVCSVRREVIGLIRKSGFKENSKKSRIAGPGSKKVVLGLLVDGDTPRISRETYRRIDRLLYGALQNGFESASAFNKFDSALGFYNHLGGLIAFVKSVDEKRWSEFSNRMRGIEQKWGDFGDI

SEQ ID NO: 1849 - protein, 394 aa, unidentified
  source 1..394: note = Related to JAAXWO010000007.1; note = Chlorobiaceae bacterium
MDAWSVHHLYENAKNQRDMQTAASLRDYAAQLRSSGLPVIFTLGHLAKIVGVETEILHETVNRQRESANYRMYAVAKRSGGRRFIHAVTPELFRVQQYLHKEILCGVKPHPAAFAFHSSGGIRQCASQHCGARWLFQYDLKDFFYEISEVDVYRIFNGLGYRKLLSFEIARLCTTTRLPISFKRYLRASYSEKPNFDNVELLDDAFSGYLKFKPYLHSQRTGVLPQGAPSSPMLSNLAARHLDESLHEYAFQLGFVYTRYADDISISAYDLPSKMSRGDIHRAIVHRIRKARFLENEKKTRIAGPGSKKLVLGLLVDGDSPRLSKETYMRIDRLLYAANKYGLVNTAKHENFYSAYGFYNHLSGLVAFVKDVDIKRWAEFKLRLSELDVPWETT

SEQ ID NO: 1850 - protein, 378 aa, Pirellula sp.
  source 1..378: note = Related to PNKZ01000003.1
METWSAHQLVTAAEPSLGPAIAEQLRRYSTQLRRQELPVIFSLQHLAKITGVQYQTLHDTVRRRREAANYRMYAVSKRSGGRRFIHAVCGELKAVQQFINAEILQRCKPHPCSYAFHSSGGIRQCAAAHCGARWLFQFDLADFFYDVTEVDVYRIFHGLGYRRLLAFEMARLCTTTRLPKTFLQLPATRRRDLTQVGDHEVDRIRPYQRHQRGVLPQGAPSSPMLANLAAAALDCTITEYADNNGLVYTRYADDITLSARDLRYDRARIRRQVISMIRKCGFRENPNKCRIAGPGSKKVVLGLLVDGESPRASRETYRQIDRLVYGVRKFGGKAAAAHFGFESEYGFRNHLAGLVAFIKSVDLDRWNELSEVLRHVGI

SEQ ID NO: 1851 - protein, 374 aa, Burkholderia cepacia
  source 1..374: note = Related to CP045236.1
MEDWSAHQLFQAASASLDRSTATALSAYARTLQSAKLPVVFSLRHLSGIVGVSYKMLRESVRRKREAANYRIYRIAKRDGTFRHIHEVTSDLFRVQTFLAHEILAKVSPHPAAFAFHAGGGIKKCAAQHCGARWIFQYDLSNFFYSINEADVYRLFCHLGYRPLLAFEFARLSTTIRMPPYMAGIINMVSPDHRGMPYADACNKLGVLPQGAPSSPAISNLVAKDLDDRLTKVAVHYKLVYTRYADDITISAMDVGKGRSRGEIHRSVIHAIRKSGFVENESKTRIAGPGSKKLVLGLLVDGPQPRLSRQMYERVDTRLYACRKFGLEATADFYKFDSAYGFYNHLAGLLSFIKDVDPLSWNSFAPRFKEIPPP

SEQ ID NO: 1852 - protein, 390 aa, unidentified
  source 1..390: note = Related to JAGRPC010000052.1; note = Verrucomicrobiae bacterium
METWSTHHLYNDALAVHDTDTALEIRSYAQNLITKGHPVVFSLEHLSRITHVSYAMLRATIERNRESANYRMFAVSKRSGGLRFIHAVTGDLQIVQRFINQEILQNCRNHPASFAFHSSGGIRKCAAQHCGAKWLFQFDLSDFFYAVNEAQVFRIFREMGYRELLAFELGRLCTTTRLPRNKHMYLKWRPGPPLFPRFGGEARGEGLPYPQSSGQLGVLPQGAPTSPMLSNLAAGKLDESLSAFANDLGFVYTRYADDITISATNIPRGVAIGTICHRVIDCIRKAGFTENREKIRIAGPGSKKVVLGLLVDGPQPRISRETYKRIDRHLHAAKIYGLEATAQHEGFDSAFGFHNHLTGLVRFVHDVDLKRWADFSQRLTSIEVPWQAMP

SEQ ID NO: 1853 - protein, 388 aa, unidentified
  source 1..388: note = Related to nan
MEVWSVHQLFEQAKADLGVDRSSELRKYAQYLIHSGLPVIFSLKHLSKITRVNYGVLRDTVGRRRESANYRMFPVKKRSGGRRFIHAVSGQLFSVQQFINADILQNVAPHTSSFAFHWNGGIQKCAAMHCGAKWLFQFDLSDFFYDINEIDVFRIFQQLGYRKLLAFELARICTTIHLPAHLKCTFKVHRYFPECHPPYGVSYDAGVLPQGAPTSPMLSNLAARELDERLFEFAVANGFVYTRYADDITLSARELPSRVSVGDIHRQSTHIIRTCGFRENKKKTRVAGPGSRKIVLGLLIDGDQPRISRETYNRIDRHLYAATKFGIVETASHEGFDSAYGFYNHLAGLISFVNDVDKKRWTEFHARLSKITVPWQTPSGTQYGEFSQ

SEQ ID NO: 1854 - protein, 394 aa, Pseudodesulfovibrio profundus
  source 1..394: note = Related to NZ_LT907975.1
MEEWSVHQFQQGAIAASAPCVDDLVRYARLLKNNGLPVIFSLGHLCKITRSNYKFLHNIVNRKVDSQNYRLFPIKKRSGGIRHIHAVAGKLYKVHDYINNDILQSCSPHPSSYAFHRSGGIFKCAKQHCESRWIFQFDLKDFFYSISEAMVFTALKNLGYKKLLAFELARICTTRHLPANKIRYTARFSKSLPSYYNNKPYRETYHHGVLPQGAPSSPMLSNLVALRLDETLSAYADENGLTYTRYADDITLSTLALPSKVSVGGIKRAVIKIIRRAGFIENPKKIRVAGPGSRKTVLGLLVDQSSPRISRHTYKRIDRLLYSISQYKLAGVAEHDGFDSSFGLYNHLHGLINYVKDVDYSRWEEFSKQFQPIKEQFESEFDVSNTAQFMLSST

SEQ ID NO: 1855 - protein, 395 aa, Novipirellula galeiformis
  source 1..395: note = Related to NZ_SJPT01000002.1
METWSAHQLYTEAESSLGEAAARNLQAYSEQLRAKGLPVIFSLRHLAELSGVRYWFLHETVNRMREVANYRMFAIKKRSGGRRHIHSVSNELGRVQQWINQHLLQNCKPHAASFAFHKEGGIRQCAERHCGARWLFQFDLVDFFYDVSERDCFNVFKGLGYRPLLAFELARICTTTRLPAWCPRAEFHGEQLRWENIWCEDDLNPVNPNTSRNFPYYERFGRLGALPQGAPTSPMLSNLAAKYLDESLQHFANKNGLIYTRYADDITFSACRLGVARGRVLWQVKDLIKRAHFAVNPKKTRIAGPGSKKLVLGLLVDGSTPRISRETYKRIERLLYGAKQFGFEAAASHFKFDSAYGFHNHLSGLVAFVKDVDRKRWQEFNAVLLNAKSSWGNDV

SEQ ID NO: 1856 - protein, 377 aa, unidentified
  source 1..377: note = Related to SHMQ01000020.1; note = Candidatus Acidulodesulfobacterium acidiphilum
MEDWSTHQLKENAIIKLGSEKANDLQKYTTNLKIQSLPVIFTLNHLGIITNTEYSFLYKTVCREREYVNYRMFPIKKRSGGTRFIHAVSKKLSIVQTFINNIILQSQQPHNCSYAYHPSGGIKKCAAMHCNAKWLFQFDLADFFYRINEIDVYNIFQRMGYRKLLSFELARLCTTIRLPRQLQSMLKQFKSFSLDDYPFYNNDFIGVLPQGSPTSPMLSNLAAMELDEDLYVFALKNGFIYTRYADDLTFSAINLPQGMSIGKIRWQIIQIIRKNCFKENSNKIRIAGPGAKKIVLGLLVDGNQPRISKEMYKRIEKIFYYVNRFKFENTAKHLGFNSTFGLINHLLGLISYLKDVDSDRYGLFNKKFNELMLSLGC

SEQ ID NO: 1857 - protein, 376 aa, unidentified
  source 1..376: note = Related to DNVK01000297.1; note = Lachnospiraceae bacterium
MEAWSTHHLAQQAAKTLGSDAAASLQSYAQVLISKGLAVVFTLGHLSRITGVSYQVLRDTVDRKRDSANYRMYAINKRSGGLRFIHSVSRDLLIVQRFINQHILQKCAPHPSSFAYHPSGGIKKCATMHCGARWLFHFDLKDFFYDITEIDVFHIFKAMGYRNLLAFELARLCTTTCLPKGQERLLFHSTNSKYNVYRDPNGIVGVLPQGAPTSPMLSNLAAQKLDEELSSFALMHGFVYTRYADDITFSASYIPKGLNIGNIQRQIIHIIRTTGFEENNQKIHIAGPGSKKVVLGLLVDGNEPRISREMYHRIERYLYAIEKYGLRNVACHEGFISAYGFFNHLTGLIAFVKDVDQKRWEEFSSRISRIQTPWHL

SEQ ID NO: 1858 - protein, 382 aa, Leucothrix arctica
  source 1..382: note = Related to NZ_QGKL01000023.1
METWSAHQLYNDAKHRFKDIEKASSLRSYAQFLIDKNLPVIFSLKHLAKINDLNYSFLRLTVERRRESSNYRMYAVKKRAGGRRFIHSVTKKLLKVQTFINTEILQYCLPHPSSFAFHPSGGIRRCAEQHCSARWMFQFDILNFFHAINEVEVFNIFTGLGYRPLVAFEMARICTTTHVPNHLKPLLFRKSNNTPYNFYANKSGAIGVLPQGAPTSPMLANLVAKKLDEELSSFVRKHGFTYTRYADDITISAVDLPDNLSIGEIHRSVISIIRRCKFRENIKKTRVAGPGSKKLVLGLLVDGDKPRISREMYKRIDRNLHALEKYPIADVAKYEGFDSSFGFFNHVSGLVAFTKDVDTERWEKFKKRIDGIELPWESKLVT

SEQ ID NO: 1859 - protein, 380 aa, Burkholderia sp.
  source 1..380: note = Related to CABVQD010000004.1
METWSVHHLSQQATSVLGKSIAQDLTSYAQRLRRSGLPVVFTLRHLSRIVGVDYSLLRASVERRRESANYRMFAIKKRSGGRRHIHAITGDLFKAQQFINAEILQKLNPHPASFAFHPGGGIRACAAAHCGARWLFQYDLSDFFHSISEADAYKVFFTAGYRPLLAFELARICTTTRLPDHLKHHLWAHRAWRDYKFYGDHTHAMGVLPQGAPTSPMLSNLAAHHLDIVLTEFADRHGMSYTRYADDLTLSTSSDLPDGMSIGNIHRAVIGIIRKSGFQENKKKIRIAGPGSKKIVLGLLVDGTAPRLSKETYKRIDRHLHATQKYGLANVASHEGFDSPLGFYNHLSGLIAFVKDVDLVRWKEFHDQFSKIESPMNGGV

SEQ ID NO: 1860 - protein, 383 aa, unidentified
  source 1..383: note = Related to SSEJ01000200.1; note = Gammaproteobacteria bacterium
MEAWSVHHLSQAVTPVLGKSAADHLKDYAQRLRRANLPVIFTLRHLAKITAVEYGVLRATVERRRESANYRIFAVKKRSGGRRHIHAVSGDLFKVQQFINLELLQKLRPHPASYAFHAEGGIHKCASVHCGARWLFQYDLENFFHALSESDAYRVFMKAGYRPLLAFELARLCTTTRLPAHLKHHLRPKRHAASMKAYQFYVERSGATGVLPQGAPTSPMLSNLAAFDLDEKLTAFADLHGFTYTRYADDLTFSAGGELPERMSIGDIHRTIVGVIRKCGFRENTKKTRVAGPGSKKVVLGLLVDGTVPRLPRETYKRIDRHLHATQKYGLVAVAAHESFDSAIGFHNHLAGLIAFVKDVDTARWEEFHRQFSMIPAPMSAGT

SEQ ID NO: 1861 - protein, 382 aa, Pseudomonas sp.
  source 1..382: note = Related to CVTP01000021.1
MEDWSVHHLHKAAELKLGASEAAQIRIYAQQLIRKKMPVIFTLKHLSMIAGVDYLALRRTVERRREAANYRMFAIKKRSGGRRFIHSVTEPLHRTQQFINSEILQKIEPHPASFAFHSSGGIRKCAEVHCGARWIFSFDLADFFFKISEAKAYEIFHKAGYRPLLAFELARICTTTRLPKKLHYLLRNTDNAWCQNENWGKYQIYSRHAYSIGVLPQGAPTSPMLSNLAALKLDVALTEFADKYGFSYTRYADDLSISSCSDLPSSLSIARICRIVIGIIRKCGFEENQKKTRIAGPGAKKIVLGLLVDGPTPRISKETYKRIDRHLHAIQKYGFAEVATHEKFDSPIGLYNHIHGLISFVKDVDPKRWGEFNCQLLAMPAP

SEQ ID NO: 1862 - protein, 382 aa, Verminephrobacter eiseniae
  source 1..382: note = Related to NC_008786.1
MEAWSVHHLSQKAEPILGQAAADDLKTYALRLRQAGLPVIFSLGHLSRITGVDYSLLRATVERRRESANYRMFAIKKRSGGRRHIHAVTGELFKAHQFINTEILQKLEPHVASFAFHADGGIRTCASEHCGAQWLFQFDLANFFYSVNEADVYGVFVGLGYRPLLAFEMARICTTTRLPKHLLPHLWTHRSHKSHGYQFYADRSGAMGVLPQGAPTSPMLSNLVARRLDEKLTEFSTQYGFVYTRYADDLTLSCGGNLPRGMAIGNLHRKVTGIIRKNGFRENLDKTRIAGPGSKKVVLGLLVDGEGPRISKETFKRIDRHLHASEKYGLPDVAKHEKFDSPSGFYNHLAGLIAFVKDVDKVRWEEFHARFSRLQSPMNSSA

SEQ ID NO: 1863 - protein, 382 aa, Pseudomonas aeruginosa
  source 1..382: note = Related to DAFPEA010000002.1
MEAWSVHHLSQKAEPLLGQAAADDLKAYALRLRQAGLPVIFSLGHLSKIVGVDYSLLRASVERRREAANYRMFAIKKCSGGRRHIHAVTGELFKVQQFINSEILQKRKPHAASFAFHPDGGIRACASEHCGARWLFQFDLSNFFYSVSEADVYGVLAELGYSPLLAFEMARICTTTRLPEHLKRYLWSALSHKVRDYRLYVDRSGAMGVLPQGAPTSPMLSNLAARNLDKALTAFSTQYGFVYTRYADDITLSSGGNLPEGMSIGSIHRSVIGVIRKNGFRENPDKTRIAGPGSKKLVLGLLVDGEVPRISKETFKRIDRHLHAAERYGLVDVAKHEKFDSPIGFYNHLEGLIAFVKDVERERWKVLYDRFSKLQAPMNVGS

SEQ ID NO: 1864 - protein, 394 aa, Shewanella algae
  source 1..394: note = Related to JADZHH010000033.1
METWSVHQLSTAAKSTLDESSVVHLKSYAQSLKRSGLPVIFTLGHLSKIIDIDYSFLRATVERRRESANYRMFAIKKRSGGRRHIHSVTGGLLQAQQFINSEILQKIEPHSASFAFHKKGGIRACASMHCGARWMFQYDLADFFYSVNEANVYGIFSALGYRPLLAFEMARICTTLRLPNHLGHLLIDPRTKVKGKFYNLYQRYMEVPGFGTMPYMSSMGVLPQGAPTSPMLSNLAARNLDVELTDYADQNGLIYTRYADDLTLSSSENFPEGLSIGDIHRSIVGIIRRNKFKENRKKTRVAGPGSKKLVLGLLVDGDSPRLSKETYKRIDRHLYSIQKYGILSVSKHEKFDSPLGFYNHLSGLIAYVKDVDTNRWKEFHRRLLEISYPIEMNY

SEQ ID NO: 1865 - protein, 387 aa, Cronobacter condimenti
  source 1..387: note = Related to NZ_CP012264.1
MEIWSAHQLYQNAESSLGKTQALNLRNYASNLKKNNLPVIFTLRHLSKITGVDYRLLRSTVSRRRESANYRMFAIKKRSGGRRHIHAVTGEIFKVQHFINSEILKKLVPHNTSFAFHPNGGIRKCAEQHCGAKWLFQFDISDFFYSINESDVYMVFKNAGYRPLIAFELSRLCTTIRLPQHLQSLISVPKHSTKEYKLYGQNKEKNLFWDISEPWPLGVLPQGAPSSPMLSNLATVKLDISLSEYANKYGFTYTRYADDITLSCGGTLPDSVSVGKIKNNIISIIRKHHFKENVSKIRVAGPGSKKIVLGLLVDGNVPRLSKQTYKRIERHLYSIKKFGLSEVARHEKFDSPIGFYNHVAGLIAFVKDVDNARWLEFSQKFVSIEHP

SEQ ID NO: 1866 - protein, 387 aa, Providencia heimbachae
  source 1..387: note = Related to JAAQVQ010000001.1
MEIWSVHQLYQEAEASLDKESALNLRNYANNLKKRNFPVIFSLRHLSIITGVDYSVLRSTVARRRESANYRMFAIKKRSGGRRHIHAVTSELFKVQHFINSVILQKIKPHNASYAFHSDGGVRKCAEQHCGARWLFQFDIADFFYSINESDIYNIFVSAGYRPLLAFELSRLCTTLRLPTHLRSLILLPKYSVKEYKFYNQYNTNHNSRIIPEPFPLGVLPQGAPSSPMLSNLASEKLDVSLADYADKNGFIYTRYADDITFSCGNDLADGVSVKKVRRDVISIIRKHHFIENTNKIRISGPGSKKVVLGLLVDGNAPRLSKETYKRIDRHLYAIQKFGLNEVAKYEKFDSPIGFYNHVAGLIAYVKDVDNARWLQFHQRFSIINHP

SEQ ID NO: 1867 - protein, 390 aa, Salmonella enterica
  source 1..390: note = Related to AAMXLY010000014.1
METWSTHHLSQEAEVLLGKESALKLTRYSNKLKRNDLPVIFTLRHLSKIVKVDYKLLRSTVNRQRESANYRMFAIKKRSGGRRHIHAVTGELFKVQHFINSEILQKIKPHNLSFAFHTNGGIRKCAEMHCGARWLFQFDIENFFYSINESDVYKIFLAAGYRPLLSFELARICTTLCLPAHLASLIQRNAHSRKKYKLYNPNKNCSSSFLDEYRPKPMGVLPQGAPSSPMISNLVAKELDISMEEYADKNSLIYTRYADDITLSSSSDLPKGVSTGKIRRDIIEIIRKNHFKENRNKTRIAGPGSKKIVLGLLVDSERPRLSKETYKRITRHIYAIEKFGIEEVAKYEKFDSALGFYNHICGLISFVKDVDHERWNDFHKKISKITPPTN

SEQ ID NO: 1868 - protein, 391 aa, Pseudomonas fluorescens
  source 1..391: note = Related to JAGGOG010000019.1
MVSWSAHQLYMEAKSKLGTQQATNLRQYARVLQRKNLPVVFTLNHLAKITGISHTLLRDTVERGRERKNSRIYSIKKSSGGERFIHVINDDLAFVQKFINSEILQKLTPHPCSYAFHESGGVRECAEIHCGARWLFKFDLCDFFYHINERHVFEVFLNAGYRNLIAFEMARLCTTTRMPSNLHYLLKPNKSGIETQDKKYRFYNQHNEKLGLLPQGAPTSPMLSNLVAFKLDQKLETFAREHGLTYTRYADDITFSTSDDLPEKTSIGYIQRSVIKIISQCGFRNNTGKMHVAGPGSRKIVLGLLVDGEKARISKATFKRVDRLLHSIKVYGLDAVSVHEQFKSPVGLYEHLRGLLAFVKDVDTARWDEFKIQFHQVTSPWTDEPIVSGSL

SEQ ID NO: 1869 - protein, 382 aa, Pasteurella canis
  source 1..382: note = Related to BQFX01000025.1
METWSAHQLFNKATDKLDNAASKKLRSYALALKNRKLPVIFTLRHLSHITDVDYSLLRKTVMRRREMANYRMFPVRKHSGGWRYIHQVSRDLFKVQQFINSEILQKLSPHPSSFAFHSNGGIKACASQHCNARWLFQYDLKDFFYFINEKNIYTLFKDSGYRSLLAFELARLCTTTHLPNHLLHYIKQDSHFFNNYNFYNDIKSRIGVLPQGAPTSPMLSNLVAYKLDELLTKLSEEYGLVYTRYADDITFSSIDDYSVQHSRFRLHREIVKIIRQNGFCENTKKTRISGPGARKLVLGLLVDGCEPRLSKEMYKRIERLLYASNKYGIIEVAKNEKFDTPYGLYNHLAGLVSFVNDVDKNRWQEFNDLFSKINNPFDLKTI

SEQ ID NO: 1870 - protein, 381 aa, Haemophilus influenzae
  source 1..381: note = Related to NZ_UEWY01000045.1
METWSAHQLLKKTSLKFDDITAQSLLKYCQELQNKNLPVIFTLRHLSKITNTDYLVLRKTIMRRRELANYRIFSIRKRSGGRRYIHQVTKELFQVQQFINTEILQKIQPHPASFAFYSNRGIKSCALKHCGARWLFQYDLKDFFYTINEKNIYKIFYKHGYRSLLAFELARICTTTHLPKHLLCYIHQEYNYFNLDSYKFYADSQQGVLPQGAPTSPMLSNLVAFNLDESLSKFANERGLIYTRYADDITLSSYKKSYTKYERFNIHKNIVKIIRQHDFLVNPKKTRIIGPGARKIVLGLLVDGDVPRIPKETYKRIERLLYASNKYGLLETARHEKFDTPYGFYNHLSGLLAFIKDVDNSRWIYLSKLFSNIENPFYKKI

SEQ ID NO: 1871 - protein, 378 aa, Haemophilus parainfluenzae
  source 1..378: note = Related to QEPO01000001.1
MEIFSAHQLFNKASSKLGDVSAKKLVSYYQNLQTQNLPIIFTLRHLSKITSTHYLVLRKTIMRRRERVNYRIFSIRKRSGGYRYIHQVNKELFKVQQFINSEILQKTLPHPASFAFHSNGGVKRCALKHCGAKWLFQYDLKDFFYTINEKNVYEIFYNLGYRSLLAFELARICTTTRLPKCLKNYINSYSNCINYKFYNNHLLGILPQGAPTSPMLSNLAAFELDTLLTDLAKKHDLVYTRYADDITFSTYLDKRKEKFTIHKDIVKTIVESGFIINNKKTRIAGPGARKIVLGLLVDGEKPRVPKETYKRIERLLYASNKYGLIETAKHENFDTPYGFYNHISGLMAFVKDVDFERWKYLNNVFSKIEDPLNIFIQN

SEQ ID NO: 1872 - protein, 388 aa, Snodgrassella alvi
  source 1..388: note = Related to NZ_CAJZCI010000001.1
MENWSAHHLFQKSIPILGNRSSQELKNYAISLHRRKLPVIFTLRHLSKITNVDYLLLRKTVMRHREMANYRVFTIKKRSGGRRYIHRVSKELFKVQQFINFEILQKITPHHASFAFHSKGGIHACALSHCGARWLFQYDLKDFFYSINEIDIYNIFKDNGYRPLLAFELARICTTTALPKDFFKLQNYLNYISNYKFNNLQNYKFYNNRSGLIGVLPQGAPTSPMLSNLAAFKLDNSLTELADKYGLIYTRYADDITFSSSSSLPRGKIITDIHKAIINAIRKNDFYENAKKTRIAGPGARKLVLGLLVDGAVPRIPKETYKRIERLLYAIKEYNLLEVAKHEKFDTPYGLYNHLSGLLAFVKDVDIVRWRKFQQLFLEIAPPNNQTI

SEQ ID NO: 1873 - protein, 377 aa, Fusobacterium sp.
  source 1..377: note = Related to FR900422.1
MEAWSIHHLIKEANRQGNLSKESIIDLQCYAQNLIKNDVPVIFTLMHLAFITNLNYDFLYGTVSRRFDKSNYRMFSIRKRNGKHRFIHAAIKNLHILHNYINKEILKNIPIHPCAYAFNRNGGILKCAQKHCGCEWLLQFDLKDFFFSITESNVYNVFKSIGYKDILAFELARICTTTRLPRSYNMPRNKNAYNYKQYKYDLIGVLPQGAATSPALSNLVAKNLDEELQEYAKNLGFVYTRYADDLTFSTVSLPNNLSIDTIRRQIIKIIRKNHFIENKEKSRIAGPGAKKLVLGLLVDGKQPRISKEGFKRIEGLLYIIKKFGLQSVAKERGFYSTYGLMNHLIGLMAYLKDVDIAKYNKIEPLFSEIKSRYGELF

SEQ ID NO: 1874 - protein, 376 aa, Akkermansia sp.
  source 1..376: note = Related to JAGZDN010000040.1
METWSAHHLFQEASKQLDCDTIFLLQNYALDLRSKKLPVIFSLGHLGKITGIDYDFLYRSVNRKYESINYNMFSIRKRSGGNRFIHAVNGKLFKLQKYLNEEILQKINPHPSSFAFHASGGIRQCANQHCGCRWLFQFDLKDFFYTIAEPHVFKIFKEIGYKKILAFELARLCTTIRLPKTKSSYIKYNKYVSENTPYFPQNYIGVLPQGAPTSPMLSNLAARRLDEMLYDYSQNYGLVYTRYADDLAFSASVLPPHKSIARIKRDIISIIRRNNFFENNKKIRIAGPGSRKTILGLLVDGEKPRLTKQLRNRIERNIFSIEKFGIREVANHDKFESVYGFFNHLSGLMSFIHDVDLTLWNKLQPRFATIKKLVEL

SEQ ID NO: 1875 - protein, 374 aa, Ramlibacter henchirensis
  source 1..374: note = Related to NZ_SMLM01000002.1
METWSAHHLFSAAATKIGVARAGRLAAYVAKLQRRNLPVITTLGHLAEIVGVSYSFLRQTVERKREAANYKLFAISKRSGGRRFIHEVGTQLLIVQRFLNQEVLQGIAPHPASFAFHSTGGIRKCAQMHCGASWLLHFDLKDFFYSISEWSVYEVFASLQYRPLLSFELARLCTTLHLPGASQAYLRPSTAAQRYSFYRKDVMGVLPQGAPTSPMLANLAAHDLDARLQDFADAAGMIYTRYADDLTFSTVRLSAPISQLQYEVSRQIGLTGFSENKRKRRVAGPGSRRTVLGLLVDGAEPKLSRQFIARVDRHLYAAKKYGLEAAASRAAFDSAFGFHNHLGGLVAYSMDAERKRGAMFLERLREIPVPWQTA

SEQ ID NO: 1876 - protein, 380 aa, Shewanella halifaxensis
  source 1..380: note = Related to NC_010334.1
MESWSAHHLNKKALETLSNDEVKDLTFYARNLISKNTPVIFTLKHLSEIMEKRYTFLRSTVERKREHSNYKMFSISKRSGGRRFIHAVSNQLQPVQQWINTEILQKQKPHNASFAFHANGGIKKCAAMHCGARWILKFDISNFFYCINETDVYQFFVSLGYRPLLAFELARICTTLRLPIQHQKYIRSRNSSRLEYKFYYQPEGCRGVLPQGAPTSPMLSNLIATKLDEQLTQYALENGFTYTRYADDLAFSAIDLPEKKSIGKIQFEITGIMKAQGFKENEKKTSVAGPGSKKMILGLLVDGEQPRLSKQMYKKLDRYLYAIEKFGLDSVATHEKFDSTFGFYNHLCGYISFVKSVDAPRGEEFEKRMNNITPPWTSHP

SEQ ID NO: 1877 - protein, 381 aa, Acinetobacter lactucae
  source 1..381: note = Related to NZ_BKIP01000082.1
MEIWSLHQLHSASVEKLGLSQANSLRQYSENLKENNLPTIFTLNHLAKITGVTYHFLRSTVLRNRELANYKMYAINKKSGGRRHIHSVNGKLLKVQTFINEEILQNIITSKSSYAFSKGKGIKSCAQAHCGARWIFKFDLENFFYSINEAQVYTIFNSLGYTSLLSFELARICTTTRLPVELSKLLKRGTFDPFNSINSYTIYNKNCFLGVLPQGAPTSPMLSNLVAKSLDTVLKELASTYGLTYTRYADDLTFSTSMDLPKNLSIGELQRQIIQQIRKQGFKENSKKTVVLGPGSRKIVLGLLVDTAEPRLSKAMLKRIDRLVYASSKFGIIEAAEHEGFDSPIGFFNHVSGLISFVKHIDNRKYQYFSSKFPDFDLHLT

SEQ ID NO: 1878 - protein, 378 aa, Acinetobacter sp.
  source 1..378: note = Related to NZ_LMED01000026.1
METWSLHRLYTCSAEKLGADKATKLKRYSENLKRKNLPTIFTLNHLAKITGVDYHFLRSTVLRNREIANYKMYAIRKRSGGRRHIHSVNGKLLKVQTFINEEILQNIPVSSSSYAFKKNSGIKECAQAHCEAKWIFKFDLENFFYSINEHQVYKIFKDLGYTSLLSFEIAKICTTTRLPTNLSNLLKVKNNSDFNSYRFYQNNYCLGVLPQGSPTSPMLSNLVAQNLDNALIGLASNYNLTYTRYADDLTFSTPINLPQNLSIGKLQREIFYEIRRHGFKENKKKTVILGPGSRKIVLGLLVDTSEPRLSKAMLKRIDRLVYAAHKFGIIEAAEHEGFESPIGFFNHVNGLISFVKHIDINKYHYFSSKFPIFEFDNF

SEQ ID NO: 1879 - protein, 379 aa, Acinetobacter pittii
  source 1..379: note = Related to CP029610.1
MEVWSLHQLYTESVEKLGANKAKQLRKYSTNLKENNLPTIFTLNHLAKITGVTYHFLRSTVLRNREIANYKMYAIHKRNGGLRHIHSVNGKLLKVQTFLNEEILQHTTVSRSSYAFSKNGGIKPCAQVHCGAKWIFKFDLENFFYSINEYQVYKIFKDLGYTPLLSFELARICTTIRLPTNMHSLLKESNNTFFKDYKFYQNNSRLGVLPQGAPTSPMLSNLVARHLDNALKELADNWGLTYTRYADDLTFSTPTNLPSNLSIGELQRKVISTIRKHGFKENKEKTVVLGPGSRKIVLGLLVDTHEPRLSKVMLKRIDRLVHASNKYGIVAVAKHEGFKSPIGFFNHVSGLISFVKHIDMNKYQYFSSKFPDFKFNDLS

SEQ ID NO: 1880 - protein, 380 aa, unidentified
  source 1..380: note = Related to QMMV01000171.1; note = Deltaproteobacteria bacterium
METWSAHHLFKKATAQLNDSVALDLSRYAQCLRNQELPVIFTLGHLAKITGIDYRFLHATVNREREAANYRMFAIRKRSGGKRFIHAVSNTLSSVHEFLNREVLSKVDPHPASYAYHRSGGIRACAQRHCGARWLLHFDLKDFFFTIHEAKVYQIFREMGYRELLSFELARLCTTTRLPRHLSHLTKPSDPCFKLNELPYRRYHSIGVLPQGASTSPMLSNLAARHLDQDLYLFAKELGLVYTRYADDLTFSAYDLPRGWSIGKLKFYVEKTIRKHGFRTNPSKFSVCGPGSRKIVLGLLVDGDHPRLSKWTRHRIDRLLYSVDKFGWEKVAEFDEFDSLYGFFNHLRGLIAYAKDADPMHGEQYRSRFEELIERFPVEL

SEQ ID NO: 1881 - protein, 369 aa, Haemophilus haemolyticus
  source 1..369: note = Related to SDPD01000012.1
MENWSLHTLNQKLEEDFSDEQLNTWIQYARNLRKQNLPIIFNLKHLSKITNINQHLLYSVICRFKEKDYYKIFRIKKKTGGYRFIHSPNNELKKVQYFINKYILSKLDIHKSCFSYHKDGGVLRCAEQHTNAKILFKYDLKDFFFCINEMSVYHLFKSLGYTKKLSFQMARLCTIILIKDHGKYIKKYKVKDKEIELGVLPQGAPTSPMLSNLLANQLDVKLSQLADTNNLIYTRYADDLTFSSNKKLSKIEIRTINSKILKIIKYEKFIINKNKISISRQGSRKQVLGLIVNNDTPKLSKDRKKKIDTFLYAIEKFGWESTTEHYGFRDSLGFFHHLDGIIIYAEHIDKDLGKKYRNKLDKLLPKLFR

SEQ ID NO: 1882 - protein, 380 aa, Enterobacter bugandensis
  source 1..380: note = Related to CP039452.1
MTIVPSHLYYLGGIKAKRIPAVLSATMAKAAKFLINDVVYIHNLQHLVKLSSVDKVYLDDIILRRKNEYEHYTVEKKSGGSRFISAPKEDLKQLQRWINYYILRNLKPHPCCYSYHKNSSIYSCAMVHCSSQWLVKLDVENFFDMTSERSVYEQFILIGYSPIVSFALARICTYQPTFLTKNHSKWVLYKRKNRELAYSRDNIKYIGRLPQGAPTSPMLSNMVFFELDKIIFKLVQSHGGLYTRYADDLFISFPKKDMNRSDISKIIGRVVDYLRKKGYSLNKTKIKVSPPGAKKIVLGLNVDKHIPHLSKEFKKSIDSHLYALSEFGPVAHARFRGFNSVYGMLEHIKGKIFFAKTISQDYGLKCIQEFYAALEKHGFN

SEQ ID NO: 1883 - protein, 380 aa, Escherichia coli
  source 1..380: note = Related to JAIOVT010000001.1
MTIVPSHLYYLGGVKARRTPAVLSAIMAKSAQFHTNDIVYIHNLQHLVKLTSVEKTYFDRVILREVHEYEHYSIAKKSGGYRYISAPKEDLKKLQRWINFYVLKNLNPHPCCFSYHKNSSIYNCALAHCASKWLIKLDIENFFDMTSERNVYDQFRLIGYSPIVSFALARICTYQPKYLNKNHDRWVLYKRDTQELVYSKKNVKYLGRLPQGAPTSPMLSNVVFYELDELIYKLVQENGGLYTRYADDIFISFPKKEMGRNDVSKIIGRVIGYLRKKGYSLNKTKIKVSPPGAKKIILGLNVNGDTPQLSKDFKNSINSHLYSLETYGPVLHAQYRGFDSVYGMLEHIKGKISFAKNISYDYGVKCYDEFYSALEKHGFN

SEQ ID NO: 1884 - protein, 380 aa, Serratia marcescens
  source 1..380: note = Related to NZ_JAKCWE010000004.1
MTIVPSHLYYLEGIQARRTPSVLSAVMAKSARFHIDGITYIHNLQHLVKLSLIDKKYLNDLILRKTHDYEHFSIKKKSGGHRYISAPKEDLKRLQKWVNFYVLKNLSPHPCCYSYHKNSSIYKCALAHCSSKWLIKLDIESFFDMTSELSVYKQFKSIGYSPIVSFALTRICTYQPKFLTNNHDRWILYKRKNKDFIYPREGIKYIGRLPQGAPTSPMLSNMIFYKTDELIYNFIKKRGGIYTRYADDIFISFSEEEFTRDDVSNIIGRIVGYLKSNGYSLNKTKIKISPPGARKTILSFNVNESTPKLSKEFKKSIESHLYALNTFGPVLHAQYRGFDSVYGMLEHIKGKIFFAKSIYLEYGIACFNEFNSALEKHGFN

SEQ ID NO: 1885 - protein, 380 aa, Klebsiella aerogenes
  source 1..380: note = Related to DAGCNY010000007.1
MTIVPSHLYFIGGVEARREPAVLKSLMAKSSKFHDHGLTYIHSIQHLSKLIYTDENYLKSIILRKSSEYDHYSIPKKSGGSRFISAPRDELKKIQHWINFNVLKNLTPHPCCYSYHKKASIYKCAAIHCSSKWLLKLDLETFFDMTSEVHVYKQFTSIGYSPIVSFALARICTYQPKKLTAHYSTWKLHSRVNRKEPFSRSGISYIGRLPQGSPTSPMLSNMAFYNLDEKIYSLVKYYGGLYSRYADDIFISFSSADINRTLISKLVGRLINHLKKEGYKLNKTKIKLSPPGSRKIVLGLNVDSETPKLSKEFKRSIDSHLYALAKHGPKLHALERNFQSVFGMLEHIKGKILFARSISREYGDKKLNEFYSALESHGFN

SEQ ID NO: 1886 - protein, 379 aa, Salmonella enterica
  source 1..379: note = Related to AAOBLA010000002.1
MTIVPTHLYYIEGVKKGRPSSLLKKLVYKSGLLAERNLPYIHSVKHLSLLTGCDENYLLSIINRSNRTYSFYTVPKRSGGVRFIHAPDEELKKLQQWINAQILINVPVHPCCYSFHKDSSIKKCAEKHCGVKWLIKIDIENFFEMVSEIEIYKVFIKLGYKPIISLALARICTYEPRYLTGFYNKWVIYKKSKRLPFTSENARFFGRLPQGAPTSPMLSNLVLSSLDERINRLIKYKNGVYSRYADDIFISFGDKDINRVYLEKVIGRVTRYLEDFGYKANKTKIRLISPRALKIILGLNVGGEIVKLNSNYKKDLQCHFYGINKFGLISHASHRKFNSVLGMLEHIKGKVNFACQIEPDYGIPLKEELKNILNKNGLY

SEQ ID NO: 1887 - protein, 380 aa, Klebsiella michiganensis
  source 1..380: note = Related to JAJVKY010000009.1
MTIVPSHLYYIEGVKKGRSPSILKSLIVKSSFFNYKNIPYIHDVKHLSHLLGCSQIDLTSIIKRNYSGYRFYTVPKYSGGVRFINSPNDFLKKIQRWINFNILSKVEVHPSCYSFHKNSSIKNCAEKHCGAKWLVKIDIENFFEMVSEVEVYKQFRKLGYKPIVSFALSRICTYEPTHLVNFQHKWINYNSRTDSLPFSRRNVNFFGRLPQGAPTSPMLSNLVLSSLDEKVTRLIRNKNGIYTRYADDIFISFSEMAVDRKFLRQIIGKLISYLNSFGYQANKTKIKIISPRSTKLVLGLNVAEDKVFLQKKYKNNLESHIYGMKKFGLVLHAKHRKFNSVLGMIDHINGMVNYASYIEPMYGNKLKEKIKHIVNINGLG

SEQ ID NO: 1888 - protein, 380 aa, Vibrio parahaemolyticus
  source 1..380: note = Related to MIRR01000104.1
MTIVSTHSYFQGGIKKGHSAKHLYSLMSKAHKLECYDIPYVHSIYHLAMLSRLPVHLLHSFTDRKSIHYTSYSIPKRSGGCRFLHAPSDELKSAQRWINDKILSQLPVHSSCYSYHSKGSILECAQKHCSSKWLIKLDIENFFDEISEVDVYKVFRTIGYKPMVAFILARICTYEPYTVRNNKHSWVQYNKNSDDLPYGKKHIKLFGRVPQGAPTSPMLSNLVLYKLDEKLSHFAQSRGGIYSRYADDLFISFGSDDFDRTKASQVIGSCLSSVRSYGYKLNRTKIKVVPPGSNKVVLGLNVNGDEVRLTKTYKKKIESHIYGIKKFGIDKHALHRGFDSVFSMIDHIIGLINHAKRVEPEFGADKHVEFQRILTNLGLG

SEQ ID NO: 1889 - protein, 356 aa, Vibrio vulnificus
  source 1..356: note = Related to DACRBQ010000013.1
MAQAHKLECLGIPYIHSFLHFAHLTKLPESYLRSVVNRHNASYTSYAIPKRSGGSRYLQIPSDELKGLQRWINCEILNRLPVHSSCYSYHKNSSIVQCAERHCSSNWLIKLDIENFFDTINEVEVYKVFRKIGYKPLIAFGLARICTYQPISVLQNKKNWVQFNKNSDEMPFQKKHIRHFGRVPQGAPTSPMLSNLVLADLDEKLSSYAQKRGGIYTRYADDLFISFSQNNFDRQQASQVIGSVLGHVKSYGYNLKKSKIKVIPPGSNKVILGLSVNDKQVRLTKQYRQKINSHIYGIVKFGVDKHAIHRGFDSVFGMIDHVFGLINYAKTVEPDFGHTKYQELQDSLRSSGLSCT

SEQ ID NO: 1890 - protein, 354 aa, Vibrio vulnificus
  source 1..354: note = Related to DACRBO010000012.1
MYKAHKMERWGIPYVHSIYHLAILSGLSVNKLNSIVGRQKQYYTAYAIPKRSGGSRFLHAPDDELKKLQRWINSEILIKLPVHPSCFSYHTGSSIVGCAEKHCSSSWLIKFDIENFFDSISEVDVYKVFRKFGYKPMISLILARICTYQSESISGDILHWVQYNKNSDELPFKKKHIRFFGRVPQGAPTSPMISNLVLSSLDEMLSQYAQKRGGIYSRYADDLFISFSQKDFDRVQASQVIGRVLNYVKSYGYKLNKTKIKVIPPGSNKVVLGLNVNGDSVLLTKTYKKRIESHIYGVGKFGIEQHALHRGFDSVFSMIDHITGLINHARLIEPTFGEKKHEEFKRLLSTLGLS

SEQ ID NO: 1891 - protein, 355 aa, Aeromonas dhakensis
  source 1..355: note = Related to CP023141.1
MSKAHHMQRWGTPYIHSIVHLSHLSNSRIELIKSIVDRKEDFYTAYTIPKRSGGSRFIHAPNAELKSLQRWINTEILYRLPVHNCCFSYHRDSSIIDCAKKHCASRWLIKFDIENFFHTIKDVDVYKVFRMYGYKPLISFMLARICTYQPKVVIENKLNWILFNTKSDDLVYSKKHVNFFGRVPQGAPTSPMLSNLVLRELDETLNQYAQKRGGIYSRYADDMFISFSQDNFDRKQASQVIGRVFTHVRKYGYNLNKTKIKVIPPGQNKVILGLNVNGRDVLLTREFKQRIESHIYGIKKFGVKEHMKYRGFNSIYGMIEHIFGLINYARQVDFSYGEIKHIELTEQLQATGLWS

SEQ ID NO: 1892 - protein, 380 aa, Vibrio parahaemolyticus
  source 1..380: note = Related to CP006008.1
MTIVSSQPYFSQGIIKGRNPQKLNALMSKARKMQAQGLPYIHSLHHLALLTNTTVDYLNTIVCRAYDDYTSYRIQKRSGGSRFINAPSDELKLLQRWINNNILYNVPSHWCCFSYHKNASIIDCAQRHCQSKWLIKLDIENFFDTINEVQVYETFHSLGYKPMIAFFLARICTYEPNWISTDKKYWVSYNTNSDELPYSKKNIKYFGRVPQGAPTSPIISNMVMFSLDDEISNLIQNKGGIYTRYSDDIFVSFSQPNFNRNDVSKVIGKIFQKSKRYGYKINKTKIKVLPPGSKKIILGLNVNQRKPELTKEYKNRIESHLYGMSKFGISNHAQHRKFDSIFSMIEHIKGLINYARQISPKYGTSKYTELSDILMKEGLS

SEQ ID NO: 1893 - protein, 384 aa, Marinicella sediminis
  source 1..384: note = Related to NZ_MVBD01000002.1
MGINLSHAYLNQGASLGYSIEKIESLLIESYELIKSGFPPLFSLNHLAKNSDVDFYNLRKVIQRKCTDFKYLYDIHKIPKRSGGFRFIHSPGSQIKRVQRWINECILYNSKPHWRCFSFHPGGSILDCASIHCESKWLIKIDIERFFDSITEKQVYEVFVELGYKPLISFELARICTVNHKKKIKKHYYKKWVMFNTDKGMPYKKDEIKTIGYLPQGAPTSPQLSNLVFKKHDEHIFEVAKKNDLQYTRYADDMTFSTVKKNFSREKAVTFVKELYSYLSKYGFSPNHTKLKIVPPGAHKVVLGLNVNSNTPRLSRVFKNRVENHLRCIEKYGLESHRIHIQFNSIFALIDHIRGLINYALQIDTNYGHKLSHRYLELLRSNGF

SEQ ID NO: 1894 - protein, 428 aa, Photobacterium andalusiense
  source 1..428: note = Related to FYAJ01000004.1
MLSVFYEKCLALIRSPLLHQSLVRSLPSINEAVLGSIKGSCMTIGPTHTYIQEGLEKGISEQKLKGIVYESLKRINPSVPYLFSLNQICHITGVSYPYLREIVRRNSTPYNFHRIPKKSGGHRFLTIPRTELKLVQTWIHKEILASQAPHFRCYSYHSQSSIFNCAREHCSSKWLIKMDIESFFDSISEVMVYKVFRKLGYKPLVAFELGRICTYQPTHLRISNTLKWRNFNTNSAEYPYKRKGVSFFGRLPQGAPTSPMLSNLVFQEIDEQLHSYATENGLVYTRYADDLTFSTIDNRFSRERAIKFVSYVKKVLRTENFNTNKTKLKIIPPGSRKIVLGLNVEAQEPLLSKGFKKRVEGHLRGIEKFGILQHVEHRRFDTIFGMLSHINGLIGYAKQIDNAYGFRLEAWFSSILTQNGIVNESFQE

SEQ ID NO: 1895 - protein, 387 aa, Proteus mirabilis
  source 1..387: note = Related to JACKXR010000006.1
MTIGPTHTYIQEGLEKGIPENKLRSIVRESLSRSNTSVPFVFSLKHVCHFTGASYPYLREIIRRRQTPYSFHKIPKKRGGHRFLTVPDIKLKRVQNWINRDILASQIPHFRCYSYHSKSSIFNCAREHCSSKWLIKIDVENFFDSISEVMVYKVFRSLGYKPLLAFELGRICTYQPTHLSIKNTLRWCNFNKNSSSYPYKRIEINFFGRLPQGAPTSPMLSNLVFQDIDEELHSYASSNGVVYTRYADDLTFSTSNRQFSRKKALIFVNKVKKILRTRNFSTNKSKLKIIPPGSRKVVLGLNIDGPNPLLLKGFKKRLEGHLRGIEKFGIQQHLEHKHFQTVFGMISHINGLIGYASQIDYEYGNRLKAKFSDILTQNGIVNESFQS

SEQ ID NO: 1896 - protein, 387 aa, Vibrio diabolicus
  source 1..387: note = Related to JAKJKN010000004.1
MTIGPTHTYIQEGLEKGISEKRLQGIVYESLKRSNTSVPFVFSLNHICHITGASYPSLREIVRRNETPYCFHRIRKKSGGHRFLTVPNAELKVVQTWINKEILASQAPHFRCYSYHSKSSIFKCAEEHCSSKWLIKIDIENFFDSISEVMVYKVFRKLGYKPLLAFELGRICTYQPTHLRIKNTLKWRSFNTNSAEYPYKRKGVSFFGRLPQGAPTSPMLSNLVFQEIDEELHSYASENGLVYTRYADDLTFSTIDRRFSRERAIKFVRHVKKVLRAGNFSTNKSKLKIIPPGCRKVVLGLNIDGQKPLLSKGFKKRLEGHLRGIEKFGIPQHLEHKRFQTVFGMVSHLNGLIGYAKQIDYEYGNRMEARFSNVLTQNGIVNESFQT

SEQ ID NO: 1897 - protein, 382 aa, Pseudoalteromonas mariniglutinosa
  source 1..382: note = Related to NZ_BDDU01000001.1
MAIGPAHIYLKKGIEKGIEKENLLAIYNSSLPQKRNFQTYIHSLGHLCHFSGVNYHYLRRVIKREIDCYDVYPIAKRSGGSRYISAPEDELKDVQRWINRYVLSNVKPHWRCFSYHAEASIYNAAKEHCGSKWIIKLDIENFFDSVSEIAVYKLFRELGYNPLLSFELARVSTIEPLRINKKMAAKWVNYNTSSDELPYSRRNVKYFGRLPQGAPTSPSISNLVFKGIDEEFQFFSEKNNLIYTRYADDICFSSHEKSFNRESAQQVVSYCSSVLRANGYATKKLKTKIIPPGVRKVVLGFNVDHDEPKLTKAYKKRLESHIRGVEKFGAIAHAKHKKFDSVLGMLEHVLGLVNHAKLVEYGYAVGLKNKLDTAKQRQGFIG

SEQ ID NO: 1898 - protein, 356 aa, Pseudoalteromonas sp.
  source 1..356: note = Related to JADYWQ010000015.1
MTINSTHSYIATGLSKNIDLTFLENIISESNSQKFNNRTYIHGLNHISHLTGVDYFFLHDIMTRKENPYKIFFIRKNLGNREIKEPNQRLKLVQRTINQQVLSKIPVHWRCFSYHKGASIVKCASEHLGAKSLVKFDISDFFGNINELLVYKSLIKLKYSGSSSYAMARLCTHPNSENDNFGVLPQGAPTSPSLSNLVFFDVDCKLQRLAHKNNLIYSRYADDITFSSFNDLSRQEFLDLKLSVVKILKYHNFELNRDKIKFISSSTPKFVLGINVGGETLKLSKRYKNDIDCHIYGLKKYGLVEHMRHREFTSVFGMIQELFGKINHAKSVEESFGLSRESELRNFIQTKGLFFN

SEQ ID NO: 1899 - protein, 354 aa, Aliivibrio fischeri
  source 1..354: note = Related to WOBC01000017.1
MAISSTHSYHSVGLRKNINPALLKKIILESNSQKLHNRTYIHDLNHISHLSGVDSLFLYDVMMRNNKPYHSFEMKKKNGTRTIKVPNDKLKVVQRVINQEVLSKIPVHWRCFSYHKGASIVKCASEHLGAQSLIKLDISDFFGSIDEFTVYKALLKLKYSPPSSFAMARLCTHPNKSGEVSVLPQGAPTSPSLSNIIFFDIDCKLQKLASKNNLIYSRYADDITFSSFYKMDRSTFLEIKLSVVKILNYYRFSLNKKKVRFIHSGMPKFVLGINVSGTTLKLSKKYKNDIDCHIYGVIKYGLHHHSLHREFASVFCMIQHVFGKIYHAKSVDYDFGISREQEFRNYLHTQGLFF

SEQ ID NO: 1900 - protein, 381 aa, Pseudoalteromonas sp.
  source 1..381: note = Related to NZ_DF820596.1
MTIGPTHSYLKTGLSKGFSKEKLLTILESSHEKESKSLSYIHSLKHISHITGVHYIVLRNIVLRNSNPYLVYNLKKKVSGYRDISSPNDDLKLVQKWIAQNILINIEPHWRCYSYHKGASIIKCAQEHVESKWLIKLDINNFFGSIQESQVYDVFKSQNYNSLVSFEMARLCTINTEFDHSSSIKHWVKYRNKRSTSPYSSLKIKRFGHLPQGSPTSPHLSNIIFKSADIELQSIAQRYSLVYTRYSDDLSFSTGDKKFNRKHAKAFITEVSKILKKHHYQLNSKKTKIIPPSKSKVILGLNVDGDTPKLTKSFKQRLNFHIRGIQEFGIIEHSQHSHFNSIFGMINIISGKINFAKSVDINYGNKTELIFKKILQQEGLI

SEQ ID NO: 1901 - protein, 404 aa, Photobacterium phosphoreum
  source 1..404: note = Related to WMCQ01000027.1
MVFSYSNSSVVVSVIVGVAEQNLSIKGSFVTIGPTHTYIYEGIRKGYSENQLLEIISRSSIQKSNGVSYLHSLNHISYITGTHYLFLRSVVDRTTLPYKQFTIPKKNGGERNVSSPVKQLKIVQRWICTHILADKIPHWRCFSFHKKASILNCAREHSGAKWLIKIDIENFFDSIKENQIYSVFKSMGYNSLVSFELARLCTLSSEISTSELINSNTKQLPYKRQENFTTGRLPQGSPTSPMLSNLVFDSLDVIFQRLAEKKSFVYTRYADDICFSSCQRSLGREECLQIIKIVSRILRSNNYQINRKKLKIIPPATTKSVLGLNVDWDTPKLSKQFKKRCQFHVRGITTFGLAEHAKYRRFESVYGMIKHVYGLINYCKQVEPSYGARLEILLITALEKEGFS

SEQ ID NO: 1902 - protein, 379 aa, unidentified
  source 1..379: note = Related to JAHKBA010000014.1; note = Gammaproteobacteria bacterium
MTIGPTHTYIQEGIRNGYSEAQLSDLLKLSSLQKEKGISYLHSLNHISHITGAHYLFLRAIVDRTSSPYKQFSIPKKNGGTRNVSAPDEQLKIVQRWICSNILSKAPPHWRCFSFHKKASIIKCAREHSGAKWLVKIDIENFFDSIKETQIYSVFKSMGYNSLVSFELARLSTALSESPADETNNEFSRASIESLPYKRQQGLLGGRLPQGAPTSPMLSNLVFEKLDNIFQRLAEKKSFVYTRYADDLCFSSCKTSLKRNDCLQIIKIVSRVLRANSYQINQKKLKIIPPGTTKSVLGLNVDWNSPKLSKQYKKRCQFHVRGIAEFGLAEHAKYRRFESVFGMINHVYGLINYCKDVEPSFGANLETLFTNALEKEGVR

SEQ ID NO: 1903 - protein, 392 aa, Bilophila wadsworthia
  source 1..392: note = Related to NZ_KE150238.1
MQRVSPNQIHRCAELKSSNEEFIQKLVKDSRKLYSKGLPIIFTLRHLSKLTDVNFKYLHSIVGKKINPYNNFSINKARGGKRNISSPNFYLRRVQDFIKQEILDTNYVSSQISESVFSYRKALSIVDNAKFHIGAKWIIKTDIENFFDSIKEYHIYHFFHSLGYASLLSLELSRLVTWPSFDINFDLGLSQDRSLNEDITFTSKYKFYCSSDVIGSLPQGAPTSPQLSNIIFSPIDEKFKILSEEYGYIYTRYADDLFFSTRNNIDINSARNLLNEVRYILNSSNYKMNNKKTKIILPRAKKVITGIVITDDKILLDRKFKDEIKMNIFFAEKNGLEAQRKFIKFHGNTHTFLKYLLGKLNFANQVEPDFANIWKKRLLNLAKNSGFTMIYY

SEQ ID NO: 1904 - protein, 390 aa, Desulfovibrio sp.
  source 1..390: note = Related to JAJQDW010000013.1
MQQLSPYTFLDLAEARGYSEAYKDAISNTADALSRSGCPIIFTLGHLAALADADYSYLHSIVSRTIDPYCHFSIPKRNGDRRAISAPHDKLKSIQKFILDTILNSSGVVAKISQFSFSYREKISIYSHAEKHVGAKWVVKIDIKDFFPSFTEIDVYRLMCSLGYAPLLSLEISRILTWPKNDLFLQDEEAETNHQKLLESKYKLYNGSVKKIGVLPQGAPTSPMLSNLLFKECDLLINEAAKEYGCLYTRYADDLIFSANRLSKQKAKELISYLRIILKCNKFEMNDSKTRVYFPGSKKIITGLYVNNNRPTLGKKYRDAIKKHIFFIEKFGIQKQADHAGSKDANTFLAHLIGKINFALHIEPNFALSQLQKLKNALKKANYINQKFYP

SEQ ID NO: 1905 - protein, 380 aa, Treponema sp.
  source 1..380: note = Related to NZ_JHVB01000001.1
MKIWQPALYRKTALKKGLSLSIINNAIKIYTHFSKTPFPCILTINHLSKILNIPYPALKRYTYNQIDNYKHFSIRKRSGGTRRIYSPNYNLLRIQQWINREILQKDTNISDFSYAFRKGLSIRDCASIHCNQSWLIKFDIKNYFESISEIDVYNYFHKLGYNKLLSFQLARICTVNDSRNKTIDTLPSKFIYHKNKQYKFLQNSEIGFLPQGAATSPMLANLITSQLDEDINNFLQSIDLDFNYSRYADDIFISTNSKQIDDTHIRKVLNSVYSIIISHGFEPNKNKTKIFRPGKCKNILGINVNSSDVKLTKHFRNILECHLFYFKKDKIQHTLNRGFNTVFGATAYIHGLLSYAEQIDSNYVKKLKKKYQIDTDFFNI

SEQ ID NO: 1906 - protein, 335 aa, Microbacterium testaceum
  source 1..335: note = Related to QDFT01000100.1
LTLSHLARETETKWGYLRSIVQRQIDDYTAIRRLKRDGTYRAIWAPMPSLMHVQRWILSNVLSGLKFHDAAYAYRRGRCIRDCAEQHIGARWLLKMDLHNFFGTIEEARVYGALRGMGYPALLAFEMARICTKPLWLDADKRWLEGRGVDAYGSPLRGVLPQGAPTSGALANAVAFSMDAMLRRLADSNGLSYTRYSDDLTFSSSGPFERASIVKLVTEVERAISLAGFVVHRKKTRVVPPGARKIVLGLMLTEREVRLVPEFRSRLDNHIRCVDKYGPAGHAAARRFDSALSMINYVDGCLAFALDIEPEWTADRNQRWLDALYRHGHPVNRDG

SEQ ID NO: 1907 - protein, 312 aa, Arthrobacter sp.
  source 1..312: note = Related to JAFIBQ010000001.1
MNEYSSIRRRKQDGSFREISAPNPNLMHVQRWMLSNVLTGLQFHDAAFAYRRGLSIKHCAEVHVGANWLLKMDLHNFFGSIEESRVYGVLRRLGYPALLALEMARICTKPITLPGMTKPRLSGRGVEAYSTPNRGVLPQGAPTSGALANAIAFRLDTMLASIADEGGLTYTRYSDDLTFSSYEGLSRTAVSKLILQIEHAISLAGFDVHNGKTRIVTPGARQIVLGLMLTPEAVRLLPEFRHQLDNHIRCVERYGPAAHANTRRFDSALSMINYVDGCLAFAVDIEPDWTARRKIRWRAALGQHGHPVAQDA

SEQ ID NO: 1908 - protein, 375 aa, Cryobacterium sp.
  source 1..375: note = Related to SOHL01000027.1
MSTPSPHLYQKAAIAAGVSASVARRAGSVSRDIQASGAFPVLTLRHLAHETGASYGYLRRIVKRYADEYQSIRRIKRDGTFRLISAPNPMLMDVQRWILEHILNTLPRHPGSFAYHRGIGIRQCAELHVGSRWLVKMDLHNFFGEIRENRVYRVFRQLNYPALLSFEMARLCTRLDRIDPFTEAVERGVGSYDDGRLGRLPQGAPTSGALANRVATDLDNELQNLADGSGFIYSRYSDDLTFSSPAPFSRPEGMRLISAVSRAASLAGFEPHRRKTRLVPPGARKIVLGLLVSDTGVKLLPEFRRQTQNHIRAAGKFGIQQHSSKRNFHSVLSMINHVDGRLAFAYGIDPEWTIPEMLAWTEVLEMNGYPSVAKA

SEQ ID NO: 1909 - protein, 374 aa, Cryobacterium sp.
  source 1..374: note = Related to NZ_PJJL01000059.1
MTKLSSHLYLANGTQLGRDAEVLRRASIANAAMVKSGVRPILTLRHFARDSELSYDYLRKVVRRGVDDYETIKRKKDDGSFRFISSPRPDLMHAQRWLLEHVLGNLDLHEAAFAYRKGVSIVHCAEVHVGAKWLVKMDLHNFFGEISESRVYSVFRNLNLSPLLSFEIARICTRVPSEAEMTGKVRLFSAYSQHAEGVLPQGAPTSGAIANAVATALDVKLDAIASRRGFVYTRYSDDLTMSTHEKISRDDASKLIADFARAIHGAGFRVHSNKTRVITPGARKVVLGLLVGDRNVRLLPEFKRQVLNHIRGVRNNGLVAHAAHRRFRSSLSMVNYLDGCLAFAHGVDREWAAAATSSWREALTNDGFLDSAGV

SEQ ID NO: 1910 - protein, 337 aa, unidentified
  source 1..337: note = Related to NZ_QETB01000005.1; note = Proposed Ancrocorticia populi
MSKDPASVASLGELATLTETPYWYLRSIVERRTDPYMSLQRAKRGGGVRPISAPEPPLMHVQRWILHNVLDGLDEHSASYAYRRGRSIAHCAKAHVGARWLVKMDIHNFFGTVTEQRVYKVFRDLGYERLISLEMARLCTREEMKSSTRAPGFRYTAVPSYVSGTIGVLPQGAPTSGALANAVATRIDRALSGLLGDRGITYTRYSDDLTFSTRDGFDRVRASDLISQVTGVVQSCGFQVHKKKTHVVPPGARHVVLGLLVTENNVRLLPEIRRRIEQHVRGVEGFGVRHHADHRGFDDPSAMIGYVGGCLSFALSVDPDWAAPMYRRWMKALSAPW

SEQ ID NO: 1911 - protein, 376 aa, Luteococcus japonicus
  source 1..376: note = Related to RKHG01000001.1
MSIDAPHLYRKAALAAGRSNAAVEATLSRAHTTALRGAVPIFSLGHLARLSNVDYQFLHDVVCRKVDPYQSITMRKPSGKIRPISAPNQELKAVQQVILYRALRNLDPNPSSFAYTKNLSVLDCAKRHVGARWVIKMDLRDFFSSVDERSAYRTFIKRGYASLMAFEMARICTRDRSPRRGAREYVDRYPRIPGYACGSVGMLPQGAPTSGALANEAARPLDRKLASLAASSGGIYTRYSDDLAFSWAQDVDRSHLHGFVSNVTELCALQGFSVHRRKTRILSPGSRKVILGLLVDESSVRLLPEFKRRVDNHIRCVAKFGASKHAEERGFMSIFEMVNHVDGCLAYSHGIEPGWTEVRNTKWKEALSKSGIQSAT

SEQ ID NO: 1912 - protein, 363 aa, Microbacterium sp.
  source 1..363: note = Related to JAJSDW010000001.1
MADGGDPSVVNRATAELARLKAQGAYPVLSLAHLAHETGASYSYLREIVNRTRDAYASVALPKRSGGTRPISVPEPILMDVQRWLLSNVLNRVPEHPASFAYRQGVSIVQCAEQHVGAQWMVKMDLHNFFGTVLESSVYRVFRTLGYSKLVAFELARITTRAEGNIRASGSEHVIGDYSMHNQGVLPQGGPTSGQLANAAAGRLDRLLQAYATRSGLVYTRYSDDLAFSGHSTFSRMKASGVIGEVSGLVRRAGFEAHRTKSRLVPPGARKIVLGLLVDDSVRLLPEDRRRIEVHLRGCEIFGLAKHAAHRGFDSVFSFIDHLDGWISFALGVERARATVWRQRLRQILSADGLPADLLRRVA

SEQ ID NO: 1913 - protein, 374 aa, Agromyces mariniharenae
  source 1..374: note = Related to NZ_VSSB01000001.1
MRPPHLYYRDGIALGVDPDVLERAADERARLRAQGAYPLLSLAHLAHETGASYTYLREVVSRTRDPYQDVAIPKADGGTRPISAPEPILMDVQRWILKHLLERTPTHPASFAYRPGTSIVHCAEQHAGASWMVKMDLHDFFGTVTETSVYRVFRRLGYAKLVSFELARITTRAQNARYAPWLAGNRTIRAYSVDAEGVLPQGGPSSGQLANAAATRLDRLIQSFALEAGLTYTRYSDDLMFSSHAAFRRVDAVNVIRRVSGLTRAAGFSPHRNKSRIVPPGARRVVLGLLVDDSVRLLPEHRRRIEVHIRACEKFGLAEHAAHRGFDSVFSFVDHLDGWISFALGVERDRAMVWRSRFNHVLSGAGLLSAIQRV

SEQ ID NO: 1914 - protein, 374 aa, Arthrobacter sp.
  source 1..374: note = Related to NZ_AP024651.1
MIPPHLYHQQGVNLGIEPSALKRASAERARLRAQGAYPILSLGHLASETGASYSYLREIVSRSRDPYRSIAIPKATGGTRPISAPEPILMDVQRWILRNILDKLPMHPASYAYRSKTSIVQCASQHMGARWLVKMDLHDFFGTVGEQSVYRVFRKLGYNKLVSFELARITTRTEDLERAPWLAANTVIGSYAVAGMGVLPQGGPTSGSLANAAATRLDQLLQKFSLQRSLNYTRYSDDLTFSSLDAFDRLTAESVVQEVSGLVRKAGFVTHRAKTRIVPPGSRKVVLGLLVDDSVRLMPEHRRRIEVHLRGCEKFGLANHAEHRKFNSVFALVDHLAGWLAFALGVDKVVALSWCRRFNKILEREGLPPMPHLV

SEQ ID NO: 1915 - protein, 376 aa, Microbacterium ginsengisoli
  source 1..376: note = Related to JYIY01000074.1
MADASPHLYIAQGLAQGHAAEVVSRASIVRSRLLANGVPPILSLRHLAQLTGVSYGYLREIVGRVRDPYLDINRRKRDGGIREISSPEPVLMDVQRWLLHNVFSSVPMHPASFAYQRDRSIVQCAEQHVGARWLVKLDLHDFFGSIQEKRIFDLLLRLGYSKLVSLEIARICTRLRGPRYEGYQNFWAYNAIPSYVVGSQGVLPQGAPTSGALANTVASNLDAKLHDLAASRGLGYTRYSDDLTFSAGPDYDRKQATALIAQVRNIVRDQHFVLHEKKTHVVPPGARTVVLGLLVDSQGVRLLPEYKRRLQVHVRGVGKFGLVEHASHRGFESVLSFVNHVDGLIAFAAGVEREYAQHARRAWNDALARSGYPLEV

SEQ ID NO: 1916 - protein, 380 aa, Demequina sp.
  source 1..380: note = Related to CP096184.1
MTRDSPHLYFKTGRALGRDEATLNSAIERSRLIQETNRRPVLSLGHLAALTGTRYAYLREIVERTSDPYSEHTRAKSGGGSRPISVPDPLLMQVQRWILEHVLGSTRTHPNSFAYTTGVSIKDCANVHLGASWLIKLDLRNFFGSIDENAVYSAFRRLGYGPLVSLEMARICTRPAGPRMQSLGGKRRYASVPSYAVESRGVLPQGAPTSGALANLVALRLDQQLSELATTRGVAVTRYSDDIAISAGPGFTRRDASELIARVARIAAGNGFELQDTKTRVIPPGARHVVLGLLVDGDSVRLVPEFKRRISTHVRGVSEFGLVAHTNHRGFRSAFSLINHVDGCIAFSQGIEPAYAASVRARWTAALNATNYPAGIGSER

SEQ ID NO: 1917 - protein, 374 aa, Rhodococcus sp.
  source 1..374: note = Related to WOXZ01000002.1
MNPSTLHQYVEAGRSAGVPLDVLRASVAQASATRSRGAGPILSLGHLAHLTGTPYLYLREIVQRQRDPYDDVILSKRSGGTRSISAPEPVLMDVHRTVLHRALSNLPLHPFSYAYTAGRSVQQCAEQHLGAQWMIKFDLHDFFGQIQERDVFRVFEGRGYSKLVSFELARLCTRLTVFDRPERGSGRYQAIPGYEVQVSGCLPQGAPTSGALSNMVATPLDYDMAGFAARSGFTYTRYSDDMVLSTTLNGFDRTQAKSIIREVSEIIGFHRFQLHQKKTRVVPPGARRIVLGLLVDGDRLRLTPEFRRRVEVHIRGVSKFGIAHHATHRRFDSMLSFVSHIDGCIAYAHSVQPDWADARQHEWLVALRKHGFPT

SEQ ID NO: 1918 - protein, 372 aa, Mycobacterium grossiae
  source 1..372: note = Related to CP043474.1
MNHPAPHRYFRLGQESGVPEQVLQASAARNAITQAHGAEPILSLGHLAHLSGAPYLYLRQIVQRTRDPYGDISRQKKTGGIRLISAPEPVLMDVQRLILRRALRNLPLHPFCYAYREGRTIQACAQQHLGAKWMIKFDLHNFFGQIEERDVYRVFDSCGYSALVSFELARICTRSRVADFHSRSGRYSAITTYDVDVTGRLPQGAPTSGALSNAVATPLDYTLHEFATGAGFVYTRYSDDMVLSTCQDFNRAQAVTIIREVSHLVATHRFRLHRKKTRVIPPGARHVVLGLLVDGGEVRLTPEFRRRVEVHIRGVREFGLSEHSDHRKFRSLLSFINHVEGSLAFARSIQPAWADEKRAEWRSILGSLGLTL

SEQ ID NO: 1919 - protein, 372 aa, Kocuria subflava
  source 1..372: note = Related to JAAVUN010000029.1
MNHSSPHHYSRAGREAGVSESVVRAALAQSHLIEESGSFPILSLGHLAHLSGAPYLYLREIVQRVRDPYQDISQRKKSGGTRPISAPEPVLMDVHRFILDRALASVPLHPASFAYTRGRNIKQCAERHLGAKWLFKFDITNFFGQVKEPSVFRVFRRQGYSRLVSLELTRICTRAPLSKNLGSRSRYDVIPSYSVDQRGWLPQGAPTSGALSNAVAAPLDHDLTSLADRHGLVYSRYSDDMFFSAGQGFSRPKAKALVREVDRTVQRHRFLLHRKKTRVIPPGARHIVLGLLVDSGQVRLLPEFRRRVEVHIRGVGRFGLDSHVEHRGFRSMFSFISHVDGCLAFASSVEPDWAESCRVRWEAVLKDQGFPI

SEQ ID NO: 1920 - protein, 374 aa, Actinophytocola oryzae
  source 1..374: note = Related to SOCP01000015.1
MDHSSPHLYRQAGLAAGVERAVLDHALEQMVRNEARDALPILSLKHLAHLTGAPYLYLRDIVARVADPYTDIVAPKRSGGKRHISAPEPGLMDVQRVILKRALGNIPQHPSSFAYRQGISIVECARRHLGARWLVKLDLHDFFGSISERQVYLVFRARGYSRLMSLELARLCTRAGLSGSQRVGSTRYSAIPSYAVNTVGYLPQGGPTSGALANAVATPMDYALAGLAQEWGLVYTRYSDDLVFSAGHGFNRAIAVRIIGKATSAVRSQGFILHERKTRIIPPGARHIVLGLLVDGDVVRLTPEFRRRINVHLRGVDKFGLRSHAIHRGFRSLFSFVNHIDGCLAFAMSVEPEWARETVSAWRQILRAQAFPVN

SEQ ID NO: 1921 - protein, 375 aa, Modestobacter sp.
  source 1..375: note = Related to NZ_LMQC01000012.1
MSQPPPHRYLARGRADGVSETVLRAAVKNTTKTDAHDALSILSLGHLSHLTGAPYLYLRGIVQRTSDPYDDIMRKKQTGGSRLISAPEPVLMDVQRLILERALTGTPMHPASFAYRRKRSTLMCAQQHVGARWMLKFDLHDFFGSITEVQVYKVFRSRGYEPLVSFELARLCTRSTTMPSWSTRHQVRYPVIQSYNGRTLGSLPQGGPTSGALANAVATPLDNSLSDLSHDHGFTYTRYSDDLVFSSANKFDRTVARAIINAVRRCVSGQGFRLHAKKTRIIPPGARHIVLGLMLSDDGVRLTPEFRRRIEVHVHGVSTFGLLAHAEFRRFRSVFSFINHVDGCLAFAESVESPWALRLRGEWQRVLRKEGFPAM

SEQ ID NO: 1922 - protein, 369 aa, Corynebacterium deserti
  source 1..369: note = Related to NZ_CP009220.1
MNNFSPNLYINQRPNEMPGRVAKIAWRGIVSQRDRGLTPILTLGHLASATGIDHAFLRSVVDRSWDPYQEIKISKKRGGTRKLARPHPLLMEAQRWILYNVLPNLELNDASFAYTSGRSIVDCAQRHVGARWILKLDLKDFFDSVSEKSIYRIFLNLGYEKLVSLELARLCTRVTPNSPRFGGNLDKYETIFDYRHPAQGQLPQGAPTSGALANAAMFRIDCALQKLARKHSYTYTRYSDDLVFSTGEKASRSQLITLKKKIQHEIVSTRFQLRKDKTRIITPGARKIVLGLLITESEVRLTPEFKRRILVHLRGVEKFGLYSHVQHRNFDSTLSFINHLEGLIEFASNVEPEFAHESLRNWREMVPLI

SEQ ID NO: 1923 - protein, 380 aa, Glaciihabitans tibetensis
  source 1..380: note = Related to PVTL01000007.1
MTSAPHLNWARTVDFGAAPGIADAMFHRSEILRRTGAPVILSLKHLALSASVDYGFLLGVIRRSAPAYRAIRIPKNTGGFRDLLSPSESLMAVQRWILHEVLTHQPRHRNNFAYFPGVTARECAARHAGAKWMIKTDLHNYFPSITEKKVFEVFEGLGYSRLVAFELARLCTWTISQTPTAVTTVQQRARSSTGLPYPVMLEGVLPQGAPTSGALANASTFSLDEKLSDLAIKSNLVYTRYSDDMTFSSASPLDRDVARLVIRHIRTIVGKSGLELHDKKTKLIPHGARKIVLGMLITEDGVSVLPEQRRMIDLHIHAVGKFGPVAYATQRRFESVLSFVNHVEGWLAYLSHIDRDWTAQRRLAWNAALDRHHVSVMSLG

SEQ ID NO: 1924 - protein, 380 aa, Cryobacterium arcticum
  source 1..380: note = Related to NZ_QHLY01000005.1
MRNEAHLSWAITSMSGERPALADAMMRQSETLRRTGAPVLYSLKHLALTTGVEYGYLRHVIQRNAPAYKAIRIPKNTGGYRDLLSPTDSLKHVQRWILHEILDTVPRHINNFAYFRDVTARECAIRHAGATWMIKTDLHQYFPSISEKLVYEVFQGLGYSRLLSFELARLCTWNKLGRLAPTGAVPRSHGSVRSLPYPPAPLGFLPQGAPTSGALANAATRRLDDALSDFAIANHLIYTRYSDDMTFSSPSAFSRTVASEFVVQIRKIVTASGLALHSQKTKVIPPGARKIVLGMLITPGGVGILPEQRRTIDLYVHAVSTYGPVDYAARRGFDSVFSFINHVEGWLAYLSHIDALWTAGRSRSWNDALRKHLIEVSSLG

SEQ ID NO: 1925 - protein, 378 aa, Arthrobacter ulcerisalmonis
  source 1..378: note = Related to NZ_UXAU01000021.1
MSTDAHLSWAPPVISGGDGPALANAMMFREETLRQHGAPVLYSLKHLALSTGVDYGFLRGVIRRNTQAYKAIRIPKNTGGFRDLLSPAPALMQVQRWILHEILSKVPRQINSFAYFAKITPKECVERHAGASWLIKTDLHNYFPSISEKSVYTVFLNMGYSDLVSFELSRICTWVRPGVQLEATESAITDSEIPYPRTPLGYLPQGSPTSGALANACTRQLDNDLSTLALNAHLRYTRYSDDMTFSSRGPLDRARAAEFIGQVRRLVTASGLTLHAKKTKIIPPGARKIVLGMLVTDTGVGILREQRRMVDLHIHAVAKYGPIDYAERRNFDSVLSYINHVEGWLAYLSHIDGDWTSRRRRDWTSALSVHNVSVTSLG

SEQ ID NO: 1926 - protein, 309 aa, Plantibacter sp.
  source 1..309: note = Related to JADKSK010000002.1
MRIPKNTGGHRTLHAPADSLRIVQRWILHEILHVIDRHENNYAYFPQVTVKECASRHIGASWMIKTDIHNYFPSVSARSVYGVFLGLGYAPLVAYELSRLCTWPIGGPDLSHLATLEPPTDSDLVYPSLWSEALPQGAPTSGALANACTREMDARLSSFAIKNRLVYTRYSDDMVFSGIGSFSRSLISELMTEVRKIVVSNGFALHLKKTRVVSPGSRKIVLGLLVQEESIALLPEHRRMIDLYIHATSRYGPVGYAGVRKFESVISFINHVEGWLSYSSHIDEEWTRERSVRWRAALDKHQVYVDSLG

SEQ ID NO: 1927 - protein, 514 aa, Streptomyces anulatus
  source 1..514: note = Related to NZ_CP080029.1
MVSASPHLYLRSVPERRSARTAKRALRQAADVRAHGLPPLVTLGHLAHVTGVPYGTLRRVVERRGFLYDPVHKPGKADRGPRKLLAPDPELMTVQRWLLHHVLDPLPVHPDAYAYVRGRSVADCARRHLGARWLIKIDIRDFFGSVGERRVHRVFRTHGYQPLVAFELARLCTWDDRHAGIDPARRDRYPKVTAYQGGWGGFLPQGAPTSGALANLAVRPMDDRLSHIAARHGLVYTRYSDDMVFSAGTTFVRRSAVAMLREFTHAIQGYGFAVHPRKTRIVAPGARRSVLGLLVDGDTPRLTPDFKSRVLSHVYGVEKFGLPSHQQHRGFASLAGLVHHVDGLIAYARGTEPEWAEPLRARWRAALEAQGWSSAYADDRAEGPPGGNPCRRPSGGGPHILGSVRPVFAAVAAVAGGGGAEGAVAVVAGLEGRDGDAGAGECGEVVDARRRRRKQFGEPVLEEFGGVLEGVGRVVGEGVADGVGAGAAFEPGRDAGDQLTDVVLGERELRCVTA

SEQ ID NO: 1928 - protein, 375 aa, Streptomyces atratus
  source 1..375: note = Related to BMRN01000021.1
MVSASPHLYLRSVPASRSLGTARRALSQSADAGTRGLPPVVTLGHLAHLTGIPYRTLRGAVERRGYHYTPIHLPGKPDRGPRKLLVPQPELMAAQRWLLHHLLDLLPVHPHAFAYVKGRSVAECARRHLGAQWLIKIDIQDFFGAIGERRVHQVFRAQGYQPLVAYELSRLCTWDDRRDDVDPVRKDRYPKITAYQGGWGGSLPQGAPTSGVLANLAVRPMDDRLSDIAARHGLVYTRYSDDMILSSGDPFSRPAAVAALRELTHAVQGYGFEPHARKTRIVPPGARRAVLGLLVDGDVLRLTPAFKSRLLAHLYGIEKFGLRAHQQHRDFASLAGLVHHVDGLVAYALGAETDWAHPVQERWRGMLRAQGWSLD

SEQ ID NO: 1929 - protein, 384 aa, Micromonospora saelicesensis
  source 1..384: note = Related to NZ_FMCR01000007.1
MTIGSPHLYRRDGRAEGKPEALLDAALAQAYAVEANGLAAVLTLNHLAVRTGVSYNYLRGIVSRTFDPYADLVIERRNGRKMRPISVPDPPLMRVQRWILHRIASRIPVHTDSYAYQAGSSIRACAMRHAGARWLVKLDIRNFFETINERQVFSLFHEAGYVRLVSLELARLCTRSAAHASHVDVRHFGGDVRDRVIQSYNQPVLGFVPQGAPTSGALANAIFHELDVTFSTLAHRERMVYTRYADDLTFSSIEEFDRSRAAQLIRKVGSELRSEGFSLHQQKTRIVPPGGRKLVLGLLVDRDDVRLSRSMRSRIAENVRGVEKFGLATHVLHRRFSSLDGFVRHVSGLLAFATDVEPGWARHMSKRWQAALRANNWLDFTFNR

SEQ ID NO: 1930 - protein, 382 aa, Actinoplanes durhamensis
  source 1..382: note = Related to NZ_BOML01000042.1
MTTGSPHLYRREGRARGKPEALLDAALTQTQSVEANGLAAVLTLNHLAVRTGVSYNYLRGIVERKWDPYDDIVLKRRNGRGMRPISAPHSPLMRVQRWILHRIVDRVPVHADSYAYQAGSSIRSCASRHAGARWLVKLDIRNFFETIDERRVYTVFHKAGYVQLVALELARLCTRSAAHASHVDSHRFLSNMRDRVISPYSQAVLGFLPQGAPTSGALANLIFYELDTTFSRIAQLERMVYTRYADDLTFSTIEEFSRSQATSLIREVGTELRRAGFSLHEKKTRIVPPGARKAVLGLLVDNNKVRLNRIVRGRITDNVRGVEKFGLAAHVAHRRFSSLDGFVRHVSGLLAFAADVEPEWAHALGEQWRTALHANNWSEPSF

SEQ ID NO: 1931 - protein, 385 aa, Amycolatopsis sp.
  source 1..385: note = Related to JAAGNB010000860.1
MITDSPHLYRRNGVINSVPEEVLSNSLMQAGRVEQYGLASILTLKHLAVQARSSYGFLRGIVERKFDPYTDIKIKRTNGRIMRPVSSPSPGLMPIQRWILAHIVSRLGTHPNSFAYTRNKSIKSCASKHLGANWLVRLDVQNFFESIDESSVYRVFAEAGYQPLAAFELARICTRYAPHAHHVDAERFRSKSHYATIRQYNMPYMGFVPQGAPTSGALANLVAKDLDLTLTQVAEKYGAAYTRYSDDMTFSSTSKFTRSKALSLIEESRTALFMNGFRLHDKKTQIQPPGARKTILGLLVDGDSVHLNKRIRSRIENHVRGAEKFGLRSHYSHVNFASLEGFVNHVSGLIAFWLDIDPENSQDIQKRWKETLRRDGWHQVDYWRM

SEQ ID NO: 1932 - protein, 413 aa, Streptomyces niveiscabiei
  source 1..413: note = Related to NZ_LIRL01000059.1
MITGSPHLYRSRGIKRNVATSVIDNAIAAAERVEKNGLAAVLTLNHLAHSTGADYGYLRQIVTRSIDPYTDIVIARRNGRKMRTVSSPEPSLLQVQQWILRSIAEKIPTHSSSYAYSPGRSVKQCASRHVGAKWLIKLDIRNFFESITEVPVYRVFRRVGYEPLPALELARVCTRYDERDPGMRLDRVLVRAKEYSSIQVYRKPLLGFLPQGAPTSGALANQVAMPLDERLSAIADSRGLIYTRYADDMTFSSGGPFTRSAALTLINQVSGAIRQRGFAVHDQKTRIVTPGARKVVLGLLVDGDRVRLTKKMRQRISLHVRGVETFGFIDHAKHVKFSSVDGLVLHVSGLISYASDIEPAWADEFKQRWRNVVAEKLDVELPSFNRDVGGKSYKSGQIRHLVPLSARLHRREN

SEQ ID NO: 1933 - protein, 409 aa, Phytohabitans houttuyneae
  source 1..409: note = Related to NZ_BLPF01000004.1
MRTDSPHLYRREGRRRGLSNEVIDRVEMASARLLAHGVAVVLTLGHLAWRSGAPYPYLRKVVERSIDPYHAFAINRRAGKNPRLISSPSPLLMDVQRWILARILDHVTPHPASYAYRRGVSIRMCAEQHLGARWLVKMDLHNFFHTIDERQVFKVFADLGYAPLLALELARLCTRRAWDGFPHPTRFQVRNHRHSVIPTYSADAIGFVPQGAPTSGAIANLAVRPLDEALAALGSAHRLVYTRYADDIVFSSAGAFDRRAAASLMHKARHEIAACGFAAHDKKTRLTPPGARRIVLGLLVDGDKVRLPSEMRSRIATHVHAAEKFGLREHQLSRGFTSVLGLARHVDGLLAFASDVDPAWTDDLRTRWRRTLLRDASALGAFEISDVYRQRDDGTTAAYTVAATPWDAL

SEQ ID NO: 1934 - protein, 399 aa, Virgisporangium aurantiacum
  source 1..399: note = Related to BOPG01000023.1
MTIGPPHLYRLHGRVRQQDEHMLQAAIEQAARVERRGLAHVLTLNHLAHRTGAPYPYLREIVERKRDPYHVFEIRRRVGGSGRVISSPDPTLMHVQRWILSRILNHVPVHPASFAYRTGFSIRACASQHLGADWLVKLDLHNFFHTIDERQVYQVIRQAGYTRLVALEIARLCTRQSTGTFPGSRRFHAMRIHDRVIANYTTNCLGFLPQGAPTSGALANLVARPLDDRLTAIADDHQLVYTRYADDIVLSGLGPFNRAHAASIIRLAGTAIRESGFEPHDGKTRVVPPGARRIVLGLLIDGERLRVPRDTRSRIEAHVYGAERFGLVHHQINRKFASALGLVRYVDGLLAFAHDVDPTWATPWWERWRRLVLDQAAAIAPFGPDSIVRAPTSADSPDQ

SEQ ID NO: 1935 - protein, 416 aa, Streptomyces sp.
  source 1..416: note = Related to CP063844.1
MDKLSNAWMVRGARAPTGVWRATRTSPPGRDTPKVGHPIDSPALYRSLGRRNGVTSSVIDEALEQMRRVRRQGLTPVLTLGHLAHQTGAPYLYLRRVVQRRQDPYTEFSRPKREPGKSRTIAAPAPVLMDVQRWLLANVVSPIPPHGASYAYQQGRSAVQCAQLHLGASWLLKFDLHDFFHSVNERAVQSILRSVGYNSLISFEIARVCTRVPGGITWPHFRSAYQAIPGYSAPVLGYLPQGGPASGALANLAARPLDEALSSVADRYRMTYTRYADDMTFSTLRSLDRSTLTRCVSEISATVSAARFRLHRKKTRIVPPGARKIVLGLLADGERLRLPRHTRRGLEDHIRGVAKFGLGAHKEHAGYSSVQGFVHHIDGLLAYGHGVDPVWTKPLAAQWERLMNAAGLTAQERRLW

SEQ ID NO: 1936 - protein, 340 aa, Streptomyces goshikiensis
  source 1..340: note = Related to NZ_BMVE01000002.1
MLTLAHLAHQTGAPYIYLREIVQRVRDPYAEFSRPKREPGKARVIAAPDGVLMDVQRWLLAGLFGRIQPHRASYAYQQGRSAVQCAQRHLGASWLLKFDLHDFFHSIDERAVQALVRESGYNRLVSFEIARVCTRLPGGNTVPYTRSAYQGIPTYRTGTLGFLPQGAPTSGAIANLIARTLDDSLVAIADRYDMTYTRYADDMTLSTSRNLDRSVLTRCVAEISATVARTRFRLHRKKTRIVPPGARKIVLGLLVDGDRVRLPRHTRRRLEDHIRGTTSFGLTAHVAHAGYSSLQGFVNHIDGLLSYARGVDAAWADQLKAKWEDAMAAEGLNGLERHAW

SEQ ID NO: 1937 - protein, 351 aa, Streptomyces sp.
  source 1..351: note = Related to FWZW01000013.1
MRGLDARGLTPVLTLAHLAHLTGAPYLYLREIVQRRRDPYTEFSRPKREIGKTRTIAAPDPVLMDVQRWLLRHVFGRLTPHQASYAYQQGRSAVQCAQRHLGATWLLKFDLHNFFPSINERAVQAVVHAAGYNKLISFEIARLCTRVPWVVEWPYSGSSYQTIDTYRTPRVGRLPQGAPTSGALANLVARPLDETLSALAERYDLTYTRYADDMTFSAFRRFERPALTRCVAEITQAVAATSFTLHRKKTRVVPPGARKIVLGLLVDGDEVRLPRQTRKRLEDHIRGVAKFGFTAHVEHIRFSSLQGFTHHVDGLLAYAQGVDAAWARPLTRQWEDLLTAEGFSILERSRW

SEQ ID NO: 1938 - protein, 389 aa, Verrucosispora sp.
  source 1..389: note = Related to SISL01000011.1
MSTDSPAAYQRIGRQRGVPDVVVEAALEQIRRVRAVNLTPVLSLKHLAHLTGASYIYLRETVQRKRDPYVEFSRPKRAEGQLRTISAPDPPLMAVQRWILQRIFSRLHPHSASYAYQAGRSARQCAEQHLGARWLLKFDLHSFFHSINERAVFGILAGQGYNRLVSFEIARLCTRYAGHVRGLNFSKFRATASWPHHFTIPSYSVPWLGFLPQGAPTSGAIANMTALQLDELLSDVADRYGLVYTRYADDLTFSTVGRLARSAARRCVGEVQAATAQAGFQLHQRKTRVVPPGSRKIVLGLLVDSDCVRLPADARSRLETHVRGVARFGLVAHAQHWKYNSLTGLIHRVDGLLAHARDVDPLWVAPLWRSWNDALEAQGFSDVEFRQWS

SEQ ID NO: 1939 - protein, 364 aa, Pseudonocardia sp.
  source 1..364: note = Related to NZ_BEGX01000067.1
MEGAGRAAILTLGHLAHLTGVSSHFLRQVVERRRDPYHAFSISKRSPERGKRTISAPSAEMMSVQKWLLKRVLNPAIGHPNSFAYEPGRSIRQCAARHCGARWIVSLDLHDFFHSVDEKRVFQVFETLGYNRLVSFELSRICTRLIGRNIKPSNVRPETYSISAYVSENLGFLPQGAPTSGKLANLVAADLDERLLSLATEYRLVYTRYADDLFFSSSGDFDRAVAVRLIREIGDLVAVSGFEIHRKKTRVLTPGSRKQILGLLVDDLAGPRLTRRTRAQIEAHLRGVETFGVVAHREHRRFDSTWGFVAHVWGLLAFAASIEPDWARPARFRWENALSRDGWGSDVFRPDLYFVNSHLAERES

SEQ ID NO: 1940 - protein, 375 aa, Nonomuraea sp.
  source 1..375: note = Related to SSXE01000007.1
MITDSPHLYVRNGLAAGLPIELLDLFVRRAQATEQQGIRAVLTLKHLAHQTGADHRYLRDIVGREIDPYTEFELRGKRRISSPRAPLLAVQKWMLTHILNHVPCHPSSFAYERQKSVAQCARRHLGANWLVKLDMHDFFASIDERQIFHVFSELGFGRLVSFELARLCTRPGIGARHSVAAEKAASSADYTVIDKYQTAVGLGFLPQGSPTSGALANLVMRDADMQIAEAVAGTGIVYTRYADDIAFSTSRKFSRREASELIRMTDHILGRSGFLRHNKKTQVIPPGARKIVLGLLVDGDRLRIPVDARNRIINDIWGAERFGLPAHARHRGFSSTISFGERLAGMLAYCHDVDPKWTAPLWRRWAKILSDYEIR

SEQ ID NO: 1941 - protein, 382 aa, Nonomuraea polychroma
  source 1..382: note = Related to SAUN01000001.1
MITDSPHLYRVRGLLADHSTALIENAIAQAHQVEARGLEAVLSLNHLARRTGATRNYLRDIVERRLDPYTEFQKTSSTRARTISAPRQPLMEVQRWILRNILGRVPAGPFSFAYEHNKSITMCARRHLGCKWLIKVDLHDFFSSIDEVAVYAIFHGLGYQALPSLELARICTRQGVGASHKRHFPSASRVDRYQRIPAYLSRALGFLPQGSPTSGALANLVMKSLDEHIAALSHPFGFVYTRYADDLVFSSADRFDRKIAIGLIHRVTDLLRTHEFIVHRAKTRVVPPGAKKIVLGLQVDGDRVRLPPDARRRITENIRGVERFGLTDHVAHRHYSSVVGFVERMRGLLAFSYDVDKEWTAPVWIRWGEALERAGYWERTAW

SEQ ID NO: 1942 - protein, 379 aa, Micromonospora aurantiaca
  source 1..379: note = Related to NZ_CP084582.1
MTLDSPHLYRAAAARLGISAETANNAIRETELLRDAGATPVLTLGHLAHLTGAKHSYLRAIVERRIDPYEEFTRMRRNGGKMRMISSPEPVLMEVQRWILTNVLTRAKPHHASYAYTRDRSVAACARRHVGARFMIKLDLHDFFHSINEYRVYSLYRNLGYNRLVSLELSRITTRYSEFALQTPIPAPRTGDYPMIPRYRVNYLGFLPQGGASSGAVANLVVRRMDHEIQSMASDHSLTYTRYADDLVLSGAGEFSRDTCRDVVRLIRRIVSHNGFHLHEKKTRLTSPGGRKVVLGVTVTDSGIKLSREIKARLANHLYGAGKFGIGRHASSRGFTSTVGFVRHMRGLLAYAHDIDPDFAAPLAARWREVEVRDGTRIA

SEQ ID NO: 1943 - protein, 377 aa, Micromonospora humida
  source 1..377: note = Related to NZ_JAFEUC010000033.1
MTYDSPHLYRKLGRERGVDDQVLDRAMRQISRLRAAGVTPVLTLNHLAHLTGAKYGYLRRIVARELDPYTEFTRQRRTGGKMRLISAPQPVLRDVQRWVLDRILHRIPVHPAAYAYVPGRSVAACARCHIGARYLLKFDLHDFFQSISEYRVFSVYRSLGYQPLISLELARLCTRDSAAVFGRRTLTAPQVERYQAIPAYRSGSLGFVPQGSPTSGAIANLVTRRLDTGLQRLAVSAGLTYTRYADDIVLGGSDAFDREHCRKLVREVRKIVRHNGFCLQEKKLRIIPPGARRIVLGVVLTDDGITISREVKDRLAKHLFGADRFGIHRHAEHYGFTSVFGFANHVTGLLAFAADIDPGYARPLIRQWQAIESRSGV

SEQ ID NO: 1944 - protein, 318 aa, Pseudonocardia pini
  source 1..318: note = Related to JACASO010000007.1
MISDSPHQYRLQGASREVPAQVIENSIAQAQVTESRNLRAVLSLKHLAHQTGCSYIYLREIVQRVRDPYSTFSRRRRSGVRMRSISSPNPPLMAVQRWILRNILNHVDPHPSSFAYQRNRSIVQCASRHIGADWLLKLDLFDYFPSISEEVVYWEFRRSGYSRLVAFELARICTRPTNESPPIRSRSKYRAIPSYASAKEAGILPQGAPTSGAIANLVSRQLDISLTRLANASGLTYTRYSDDLVFSGTGPLNRDTATQKIREIDNIISSCGFETHRKKTRIVTPGGSKDCSGPSSNSVRSPTASRVQAKDQDTHSRR

SEQ ID NO: 1945 - protein, 373 aa, Frankia inefficax
  source 1..373: note = Related to NC_014666.1
MVIDSPHAYRLRGLQQGHDPELLRRAVAEADRVEGRGLTSVLTLKHLAHQTGATYIYLREIVQRKRDPYTEILRSRANGRPMRLISAPDPVLMSVQRWILENIVGRLTVHPASAAYGKGNSVAACARRHVGASWLVKMDVHNFFHSIDERAIYKIFQNVGYSSLVAFELSRICTRPVPGSPHIHPVRRDRVIESYSTANLGILPQGAPTSGVLANISFFACDEILSSLAESCGLVYTRYADDIVFSAGESFTRRDADALIEIARDALLAHGLTPHRGKTQVVPPGGRHIVLGLLVDGDRVRLTREFRQRVQTHIRGVENFGLATHRRHRKFASTAGLINHVNGLLAFAFDVDPAWAGEIRAHWASILAAQMNR

SEQ ID NO: 1946 - protein, 382 aa, Mesorhizobium sp.
  source 1..382: note = Related to SAQH01000043.1
MTVASPHLYRRHAPENTDRQLVERALAQSSAPLSKGLPSILTLRHLGHLTGADYKYLRSVVQREYDGYRTFSIRKRSGGTRLIASPEPVLGEVQRWIASKVLNKVSVHKNSFAYKPGSNPKKCASVHLGASWLIKIDIHDFFESITERRVYYSFLDCGYQPLVAFELSRLCTRVFTGKPNVGPQWSTRRRHGSRVYATSELGHLPQGAPTSPMLSNMVSFELDHKLSTLANDYGFVYTRYSDDLAFSSGEKFTHKAAGEFVQNIDRILKSFGHVIHQRKTTIAPPGARKVVLGLLVDGSSPRLSKELRARVSDHVRGIEKFGLAMHASERHFASIWGMVNHVNGLISHVRGVDPELGSNLRSRLTTALAIQGWSAETIAGHP

SEQ ID NO: 1947 - protein, 388 aa, Mesorhizobium sp.
  source 1..388: note = Related to JAFKIC010000112.1
MTSIPPHLYRKLAPKELDPVIVDRALDQLLAVEANRLPGILSLRHLAALTRSDYLYLRSIVARETDAYRTFTIRKRSGGGRLIAAPQPELMALQRWISKEILANITPHVASHAYARKSSPLKCANLHVGASWLIKVDIHDFFESITERRVFFAFRQMGYQPIVAFELARICTRVRIDLPLRDRRFAAARRTVGIAKYGHSQMGYLPQGAPTSPMLANLVSFEMDRKLTEFGAEKGLTYTRYSDDLIFSSGRSLSHKTAETYVAIISRIINSFGHDVHERKTTIAPPGARKVVLGLLVDDTGVRLLRETRDRAADHVRGIEKFGLAAHATERHFASLWGMVRHIHGLLRHMNSVQPEVAGPLLARLEAVLAREKWQGSLDDNFWLNDLL

SEQ ID NO: 1948 - protein, 382 aa, Sphingopyxis sp.
  source 1..382: note = Related to NZ_LNSC01000016.1
MISASPHQYRASALARGITQQTVQHALDQAEQAEKRGAPAILTLRHLAHVTGADYKYLRLIVSRSEDGYKPFTIRKKSGGGRLIAAPEPQLLSVQRWISRNVLANRPVHSSSMAYAPGASPLKCAARHVGARWLLKFDIHDFFESISEDRVYWAFRSCGYQPLIAFELARICTRVHSPYVQIDSRWRSGRTHGPAEITAYSDDRLGHLAQGAPTSPMLSNLVSEPMDDLLAKIARERGLVYTRYSDDVVFSTGTTITRREVRNLVHDVKRVFNSFGHLLHRKKVVIAPPGARKLVLGLLVDGDEVRLSREYRARVESHVRGIEKFGLAEHAASRHFTSVWGMVRHVGGLIAHSRAVDQTYGDSMQLRLSAALEASGWSDASP

SEQ ID NO: 1949 - protein, 410 aa, Sphingomonas sp.
  source 1..410: note = Related to NZ_JAGIOU010000001.1
MISASPNLYRSEGAERSIDPLIVEHALQQALPVERKRLPAILTLGHLAHLTGINYAYLRAIVERHADPYTPFRIGKRKGGSRLISAPEPLLLALQRWLARNVLNNIEVHHASCAYAQDCSPARCATRHLGAAWLIKVDIHDFFESITERAAWRVFRSAGYQPLISLELARLCTRQPHGREIVNPKWHVEDAGSYSIRPYRTRMMGHLPQGAPTSPMLANLASFRLDEALEALGGRYGMVYTRYSDDIAFSTGGTFDRKRAGQLIIEVERIFRSFGHALHRKKISVAPPGARKVVLGLLVHGSRLRLTGPYRRRLADHVRGVEQFGLSAHKAHRHFASLWGMVRHIQGLLGYAESVEGKAAHADMRARLDAALARDGWPDGMPPETPMPAQQPPPDVGSAAVTSSALPPAG

SEQ ID NO: 1950 - protein, 383 aa, Tsuneonella dongtanensis
  source 1..383: note = Related to NZ_CP016591.1
MISASPHQYRADGRARGRPEPVLDAALAQAAGPELQGAPAILTLMHLAKRMDVSYKFLRSVIASKEGTHYRDFHISKRDGGGRRIAVPSPELMAVQRWIVREILRDRPVHRASFAYARGCSIYACARRHASAGWLLKLDIHDFFESIPEKAVYRVFREIGYARLVSFELARLCTRPWVAPPRGKRAERTVANPSRRGIEIYRRELTGYLPQGAPTSPMLSNLVFRVLDEHLSQLATRHGLIYTRYSDDLTFSGPASGFSRDRATEIISEVRDLLATRRFRLHERKITIVPPGGRKVVLDLLVDRAAPRLSRELRGRLEDHVRGIEKFGIAPHAAARGFASATGMINHIAGLLRFAGHIQPAFADPLRARFAAALARWRWSPVD

SEQ ID NO: 1951 - protein, 342 aa, Sphingomonas formosensis
  source 1..342: note = Related to NZ_WRPK01000013.1
MISASPHQYRADGRALGRPEPVLDAALAQAGRAEASGAPAILTLMHLAKRMDVSHTFLRSVVGSKEGTHYREFHISKRDGGGRRIAVPSPELMAVQRWIVREILRDRPVHPASFAYARGSSIYACARQHAGAGWLLKLDIHDFFESISEKSIYRVFREIGYGRLVAFELARLCTRPWVAPPRGTRAARSVANASRRGIEFYRRDLTGYLPQGAPTSPMLSNLVFRVLDERLSQLAARNGLIYTRYSDDLTFSGPASGFSRANAAAFIGQVRELLATRRFRLHERKINIVPPGGRKVVLGLLVDRSVPRLSRELRNRLEDHVRSAIPPAMVVRIGPPISTFSS

SEQ ID NO: 1952 - protein, 389 aa, Sphingomonas sp.
  source 1..389: note = Related to NZ_LMQP01000002.1
MIGASPHRYVVDGRASGRSDELLVRALAQARSVEVAGAPAIVTLRHLAARMGVDYRYLRSVIANRSGDRYRDFSISKRGGGGRRIAVPEPTLMAVQRWIVREILRGRPVHPDSHAYAAGSSIVACARRHCMAGWLLKLDIHDFFESVPERSVYDVFRTIGYQPLVSFELARLCTRPWVDPPQDRRAARTVSNHANRGIDLYRRELTGFLPQGAPTSPMLSNLACVGLDGRLSSLARSAGLTYTRYSDDLTFSGPPGTFDRSHAVAMVDGVRDVLRDHGFRMHERKISIVPPGGRKVVLGLLVDRDRPRLPGGLRQRLSDHVRGIEGFGIAAHAAERNFEAVTGMVNHIAGLLRFARDVEPAFADRLRVRFEAALARHGWGAAPESGSEP

SEQ ID NO: 1953 - protein, 705 aa, Streptomyces albaduncus
  source 1..705: note = Related to JACHJE010000006.1
MTTTDDFADLTPEQFLEAVVSGSIHPYTEHRIPKRRGGLRTLHAPVPRLSEIQQAVLARLETLPAEVQPHPAAFAYRRGRSVVDCATVHLRAHTVIRLDIADFFGSIRERHVHAALKDAWTRPTEPEYRVGLVKDDNGRRKIGLRRDGRTLDTYITARLVTVSPPEPSQTWTNRGTGRRSVYLAATGQEFSVRRPHLVYRHTREGFLPQGAPTSGYLSNIVMRDVDEVVAHQAESLGLRYTRYSDDMYFSSRGLVRHDDVDRLVAGVKEALEPLGMKLNAEKTYVARPGARRSVLGILVDGPTPRLTREYKRRITKHVRGAASFGIEQHRRHQEFEDLAELDAHVTGLLSFAHMIEPAWAEKQLTAWKRLRGIPLEHEEPVSAQHGLDLPWEEEMEVSQADLAKDSIDDLIRGAQRYRSSSDYLQMLEFVGRFKRYAPFNAMVVHIQKPGARYVLPSSEWESKYRRVLKPGAKPLLIFQPRGPYLLVYDVGDTEALPGALPLPRGITAPVSVSSRAGEREVLEVWHHTETNLAPLGIRLTLVDHGASSCGRTYRSRSGGSVKRPGGRRGDPPETYPTLFEIEVNGNLPLLDRYATLAHELGHLFCGHLGAGPGETWPDRQLRPLSEEDAVKAHARNEVEAESIAYMVLKRLDPDVRMGDYITGHLGPDRQVPETVALNLTFKAAGLIIEMGKKRLSSAKLQKPKK

SEQ ID NO: 1954 - protein, 705 aa, Streptomyces atroolivaceus
  source 1..705: note = Related to NZ_JNXG01000009.1
MTAADDFWDLRPEAFIHAVVSGSIYPYTEHRIPKPRGGLRTLHAPIRRLSWIQQEILARLGTLPARFQPHPAAFAYRKGRSVVDCAAVHLRAHTVIRLDVADFFGSIRERHVHAALKGAWPRTAGPEYRIELVEGDDGSPEIGLRRVGRTLGAYTTARLVTVSPPESNHTWPNRGTGRRDVRLEATGQRFSVRRPTLVHQHTHEGFLPQGAPTSGYLSNMVMRDVDAVLAHKAESWGLRYTRYSDDLYFSSRGPVRPERVDRLVTEVKRALEPLGMRLNAKKTYVARPGARRSVLGILVDGSTPRLTRAYKRRITLHVRGAASFGVMQHCYHQKFEDLAELDAHVTGLLSFAHMVEPRWAGEQLAAWKRLREIPLEHEEPVMTQHGLDLLFDEEVDVSQADLAKASIDDLVRGAQRYRSSADYVQLLDFVGRFKRYAPFNAMVVHIQRPGARYVLSSAEWKSKFLRVLRPGAQPLLIFQPRGPYMLVYDVGDTEALPGARPLPREVTSPVAVTSRAGAKKVAEVWHHTEANLAPLGVRLTLVDHAASSYGRTYPSRSDGFVSRPGGRPGDRPEKYPILFEIEVNRNLSLLDRYTTLAHELGHLFCGHLGAGPGDAWPDRRWRPRSDEERIAAHARDEVEAESIAYMVLKRLDPDVQMGDYITGHLGPDQQVPDSVALNLTFRAAGLIIEMGQKRVPAAKLQKTKK

SEQ ID NO: 1955 - protein, 705 aa, Streptomyces sp.
  source 1..705: note = Related to NZ_KL585423.1
MTTADDFVDLDPAQFLKAVVSGSIFPYTEHRIPKHSGGIRTLHAPVPRLSELQQGILARLETLPARFQPHPAAFAYRGGRSVVDCAAIHLRAHTVIRLDIADFFGSIRERHIHAALKDAWARPTEREYRIDLVKDGDGCREVGLRRIGRTLSTYTTARLVTVSPPGSSRTWTNRGTGRRSVYLEATGQSFTVSRPELLYKDTREGFLPQGAPTSGYLSNIVMRDVDAAVTHLAESLGLRYTRYSDDMYFSSRRLVRHEKADRLVDGVKKALIPLGMRLNTKKTYVARPGARRSVLGILVDGPTPRLTREYKRRITKHVRGAASFGIEQHSRHQGFKGLAELDAHVTGLLSFAHMVEPGWAEEQLADWKRLREIPFEHEEPVIAQHGLDWYGDEEVEVSQSDLAKASIDDLVRGAQRYRSSADYLQMLEFVGRFKRYAPFNAMVVHIQKPGARHVLSSSEWMSKYRRVLKPGAQPLLIFQPRGPYMLVYDVGDTEALPGAQPLPRTVTAPASVSSRVGEKKLVEIWHHTGTNLAPLGIRLTLVNDGASSYGRTYRTRSDGFVQRPGSRPGDRPERYPRLFEIEVNRNLPLLDRYATLAHELGHLFCGHLGAGPGDFWPDRRSRPSSDEERVTAHARNEVEAESIAYMVLKRLDPDVQMGDYIIGHLGVGQQVPESVALNLTFKAAGLIIEMGGRRLSATKLQKPKK

SEQ ID NO: 1956 - protein, 698 aa, Streptomyces caniscabiei
  source 1..698: note = Related to NZ_JACYXT010000015.1
MADDFADLSQAQFRKAVVSGSIYPYTEHQIPKRRGGLRILHTPVRRLSEMQRGILARLEHLPAGFQPHPAACAYRSGRSVVDCAAVHLRAHTVIRLDIADFFGSIRERHIHAALKDAWSHLAGREYRIDLVEDGNGRQEIGLRRTGRTLRTFTLARLVTVSPPGPNRTWTNRGTGRRSVHLEATGQSFSVSRPDLVYKHTREGFLPQGAPTSGYVSNLVMRDFDAVITHLAESLGLRYTRYSDDMYFSSRRLVRHEHVDRLLAGVKEALESLGMRLNTKKTYVARPGARRSVLGILVDGPAPRLTREYKRRITKHLRGAAAFGIEQHRRHQEFKDLVELDAHVTGLLSFAHMVEPGWAGEQLEDWKRLREIPLGHDEPVTVQHGLDLPWAAEVEASQAELAKTSIDDLVRGAQRYRSSSDYLEMLEFVGRFKRYAPFNAMVVHIQKPGARYVLPSSEWKSKYQRVLRPGAQPLLIFQPRGPYLLVYDVGDTEALPGALPLPKAITAPVSVASRASEKELAEVWHYTQVNLAPLGIRLTLVGHGASSCGRTYRSTSDGFVERPGSRPGDHPEKYPTLFEIEVNWNLPLLDRYVTLAHELGHLLCGHLGSGPEDAWPDRFLPKTVEVHARNEVEAESIAYMVLKRLDPDVQMGDYITGHLGPNQQVPETVALDLAFKAAGLIIEMGKRRIPATKLQKPKK

SEQ ID NO: 1957 - protein, 700 aa, Streptomyces alni
  source 1..700: note = Related to NZ_FONG01000017.1
MADDFADLAPAQFLEAIVSGSIYPYTEHRIPKRRGGIRTLHAPIPRLSRIQQEILTCLEALPARLQPHPAAFAYRSGRSVADCAAVHLRAHTVIRLDIADFFGNIRERHVHAALKDAWTRPTEREYRIDLVEDDHGGQEIGLRRTGRTLGTYAMARLVTVSPPEPSETWTNRGTGRRIVRLEATGQDFSVHRPSLVYQHTREGFLPQGAPTSGYLSNMVMREVDAAVTNLAESMQLRYTRYSDDMYFSSRRLVRHDDVDRLVAGVKRALVSLGMKLNAKKTYVARPGARRSVLGILVDGPTPRLTREYKRRITNHVRGAAAFGIEQHRDHQKFKDLAALDAHVTGLLSFAHVVEPGWADKQLTDWKRLRRIPEQEEPVIVQHGLELPWDEEVEVSQENLAKASIDDLVRGAQRYRSSSEYLHMLEFVGRFKRYAPFNAMVVHIQRPGARYVLPSSEWRSKYRRVLKPGAQPLLIFQPRGPYMLVYDVGDTEALPGAWPLPKAITAPVSVSSRADERDVAELWHNTETNLAPLGIRLTLVDNAASSCGRTYPSRSRGFVERPGSRPGDRSETYPTLFEIEVNRNLPRLDRYATLAHELGHLFCGHLGAGPGETWPDRRLRSSSEATNVHARNEVEAESIAYMVLKRVDPEVRMGDYITGHLGPDQRVPELVALNLTFKAAGLIIEMGKKRIPASKLQKAKK

SEQ ID NO: 1958 - protein, 660 aa, Cellulosimicrobium sp.
  source 1..660: note = Related to NZ_VEBQ01000002.1
MRLVGFRSHEYGECITVVTDAAHKEFLSAVVSGAVYPYVEHVVAKRTSGVRTLHAPVEQLAREQRMILTQLRERGGSVHPAAYAYRTGYSVVDCAQVHMNAHTVVRLDIADFFGSIRERHVYEVFEELRDGPTRSYELTRLTTVSPPTSTAWRNRGTGPSVKSGVIERSPRYMHNREGFLPQGAPTSGILSNLVMRAVDAHLHSYAERQGWRYTRYSDDLYFSSRKLADHRQIDRLIREVKRRLGLLGLHLNDKKTWVARPGARRSVLGILVDGPVLRLPQSYKRRITMHVRGVSSFGIAHHADHAGFITVDDLDSHVTGLLSFAHQVEPEWAAEQLHKWRRLRRLALTPSVSTDAADLVLAGATEAKASIDALVAGAHRYRSARSYADLLSFVGAFKRYSPFNAMLISLQRPGARYVLTEARWRSDFRRVLEPGAQPLVILQPGGPFMVVYDVGDTEALPGALALPPEVTDPVSVRATITAADLQQRWDWTVNNLAPLGIRLTSVDHANSSCGSTYRARTQGTVNRLAATGRTQPEEFPLLFEIEVNKNLKPIDRYATVVHELAHLFCGHLGTSPITKWPDRRGGAQSRNEVEAESITHMVLSRLDPDVAMGDYILGYVRRADDMPDVALNLMFKAAGEIIELGSGRIPTTKLRAERRA

SEQ ID NO: 1959 - protein, 657 aa, Cellulosimicrobium sp.
  source 1..657: note = Related to NZ_VEIN01000001.1
MHYMTMASAVGKSAPDRGATERFLAQVVRGEVFPYTEFPVAKRTSGIRVLHAPVPELAAKQLEILGRLQRTAVTDPAAFAYRAGYSVVDCARVHLRAHTVVRLDVANFFGSILERHVYSALQEVDDAPWSNYTTTRLTTVSPPGSPAWRNRGTGELVKDGSVERSDRYMHNREGFLPQGAPTSGMLSNLVMRKVDEALRAYAEHEGLRYTRYSDDLYFSSRTFVAHRQVDALVRKVRQSLAELGLRLNDRKTWVARPGHRRSVLGILVDGPTPRLSRDYKRKVTVHLRGAAAFGVADHASFRGFSAAEQLDAHLTGLLSFAHQVEPAWAAERLATWKRLRSLGTSHGTEALADPAHQLSGAAEAKASIDALVAGAHRYRGSQAYVELLKFVGTFKRYSPYNAMLINLQKPGARYALTEPRWRTEYGRVLEPGAQPLVILQPGGPFMVVYDVGDTEALRGAHPLPPEITNPVAVQSRISDPELKQRWDWTLNNLAPLGVRLTLVSHANSSCGSTYPARRSGTVTRLSATGKTRPEEFSLLFEIEVNTHLALVDKYATLVHELAHLFCGHAGPSPVASWPDRRGGSKARNEVEAESVAHMVLGRLDPDVTMGDYILGHLDKDGDMPEVALNVMFKVAGDIIELGSGRIATNKLRKELGR

SEQ ID NO: 1960 - protein, 445 aa, Nocardioides aquaticus
  source 1..445: note = Related to CP075371.1
MAVVHISNQGGASRRPTPTAFVQQVARRVDVPVTYARDVLTRSIFPYRRVEVRKRTGGQRILHSPELPLMRMQRLLLDDLLPSAPTHASSYGYVPGASVLDCASVHLRSHTVVRIDIADFFSSITERHIFRALSTTGWPSHIGGPVAGARTSHVGPRMSRLLAYELAVLTTVSPPGSATWPNRGTGSRVIDEDSAIPRAHPYSGQTEGFLPQGSPTSGALSNLVMRPIDDLVHDVARRMHLRFSRYSDDLFFSSTRPITPDTVARLVHEVRAALQIIGLHVNDSKTRVARPGSRRTVLGVLVDQSAPRVGRDVHRRIDMHLHGSRRFGIDEHAEHRGFIDPEDFRSHMQGLISWIQIVEPGRGHRYAEDWARAIRHSRLYASPDLALGESIAALSPVNPPTESAAKQSIDDLIVAGVRYRSTVEYLELLRFIERFHHYAPSTRCS

SEQ ID NO: 1961 - protein, 648 aa, Geodermatophilus telluris
  source 1..648: note = Related to NZ_FMZF01000003.1
MAADSGLDGDRLTALLNRSTWPYSVLQHRKPGGGSRTLLTPAPDLMRLQRRVLDEVLAHHAVHPAAYAYRPRRSVVECAQVHCRAHTVVRLDVAGFFDNIRERHVYASLRRRPAIGGPLSAVQAYELTLLCTTTPPDSESWINRGTGARRLGQRSTDPLVARAYPYQDQREGFLPQGAPTSGALSNLVMYEVDVELSGLADRLGLRYTRYADDLIWSSRALVPRRIIAQLVTDVRTVLATKVGLHLNDAKTRVSRPGSRRLVLGLLVDGSAPRVPRETYRRLECHVRGVRIAGLRAHAAHMGFETPEAARNAVDGLLSWVRFVEPAKGRLLTDAWSRALEVGDVELLGDPTSTELPSDLDTGEARESIAALLRHGSEYRSSAEFADLMRFIGGFHRYAPFNAMVVRLQRPGSTFVLTEARWRREYRRVPKPGAQRIMIFQPRGPYMVTYDVGDTEPLREAPPLPHGVTDPVSIRTAIPVQALETAWSTLLDNSVRWGVRVTLVDHAASACGRTYRTQMTDQLVRRPGPRGKGEDVRPLRFEVEVNRNLPVPDRLATLVHELAHLSCGHLGKHPELPWLDRRGGTRRRDEVEAEATTYLVLSRLDPTLTTDDYLLGHLGEGTELPDDLRLDLMVSCASRLLEMLLSRQP

SEQ ID NO: 1962 - protein, 638 aa, Nocardioides currus
  source 1..638: note = Related to NZ_PYXZ01000001.1
MRDVLARRRSPYRQFAIPKRAGGMRVIHAPEPELQILLRRVLRTALDQLPQHPMAFAYRNRTSIVECAHVHLRADTVIRLDIADFFTSVRERYVFEALMALTDDEWLPLGRPSRLAAHEMARLTTVTPDDSGAWLNRGTGTLTVDDRARPRSYPYKGQREGFLPQGAPTSGAISNLVMRPVDEAIFQVAEKLGLRYTRYSDDLYFSSRRRVLHHTVDALVSGVRPPLAELGLHLNAHKTRVARGGARRTVLGMLVDGHTLRLPREQHRNIELHLRGADRHGLEHHAESRGFDSVESLERHVSGLIGWAQHVEPMKGATYRSHWHRTRSRSSAAANPQVEHADPTVSVDDSARASIDRLLAQGHAFRQSKDYAEFIGFIGRFRGYSPFNAAMVRLQKPGSRFVATEQKWRTKYRRVIRPGGQPLVMLRPGGPYMVVYDVSDTEALPGSKPLPRHVTDPLAADSSLNSATVERLWKVTIDNAIRHGIRVTLVDNSPAHAGSARWSRLEGHVTRPGKKSGATPETYSLTHEIEVSRKLSAVDQYVTLVHELAHIYCGHLGTPDVALWPSRRGGVVRDEVEAESVAFIVMCRLDPQFTMGDYLLGYLSNSTEIPDGVSLQRMMQVASDIMQMGQRRLKAGEI

SEQ ID NO: 1963 - protein, 362 aa, Serinibacter salmoneus
  source 1..362: note = Related to PDJD01000001.1
MWLADPRDFLLGLKLARLLGDAGLGAERTRAIIRREVDPYRVLTVPRIRAAAREIRKPDADLMAFQRALLAEWTPGHVAHPRAFAYARGRSIVDCARLHLGAELVVRLDISNFFHSITERHVFRALPGPHSRNSFDAAQITRLVTAPSTSPLSWNQRRTGAIQLCNPRQCRCWPLRCEKVRANYFGHAPEGFLPQGAPTSGLLSNLVMREFDQRMYEWAEANRWVYSRYSDDMHFSSRRPRAHTDTDRLVTHVRRELGRLGMHLNDKKTTVARRGARRQVLGLLVDGHHLRLTREYKRELELHTRGVSEFGLEPHAHHWGFENAGALVTHVNGRLAHATHAEPDWGVPARERWLAATTHYSV

SEQ ID NO: 1964 - protein, 373 aa, Yonghaparkia alkaliphila
  source 1..373: note = Related to NZ_JACGWX010000001.1
MVERLDPNLRSYFDLSSLVQVSGADSGFIEDVVDRRLSPYYVSAVPKRTGGKRHIEKPNAEILAIQQPILRDILMTRSPSEKVFSYVKGRSPVQCARQHLGARWLLRVDLKAFFYSISEVDIYYLFLKEFGFKQLTAFQLARLVTVVSDDSLEVSEVDLLKAHPHVSKYRSRYVAGYTPQVLGHLPHGAPTSGALSNLVSRQLDHAIAALAVQHELVFARYSDDIYLSARRPITRTQSTKVLSDLSGVIRGNGFVVNQTKTRMSFEDDKKLVLGIHVDGDRLRLRREYRDRIDYELHMIETHGAESHAQKRGDKGVAFLLGRVSGLIAHAQDVDPEWGRGRRARFRAILMDGKSTEALLHKHLTERRERLRST

SEQ ID NO: 1965 - protein, 397 aa, Agrococcus carbonis
  source 1..397: note = Related to LT629734.1
MESPHLYRSKAPIGLDPAVIERAIRLSTTQSANGVQPILTLKHLANQAGVGFVFLERVCDRSIDPYVIYGVRKRVGSSRRMIAAPEEQLRVVQRWLLDHVFTNMHVHSSAFAYVKGRSAPMAARLHLGANWMLKLDVRNFFHAFDERQVYDVLAGTGYSDLVRLQVARISTRHVREYLPWLPEKYRESRSQEGASAARFAHTAAEIDAFELTALPHDGGSRLGYLPQGAPSSGAISNLLSRELDRDLAELGISRGLVYTRYADDIALSASTPFSRKEAEALMHDASRALRKHGLEPNHTKTRIVRPGLPIELLGVRVDGEYTRVSRRVREKIEFHIRAIEKFGLAAHAAHAGFGDAIGCANHVIGLVRYAHDVEPQRAGAYFARIERAIPGLQVRPL

SEQ ID NO: 1966 - protein, 397 aa, Curtobacterium sp.
  source 1..397: note = Related to QKSO01000004.1
MESPHLYRRNAPTDTEASVIDRAIQLMSLQSRSGATPILTLKHLAVQSGVRLSFLERIADRELDAYDVHEVKKRGRSSKRLIAAPHDELLRAQRWLLDNVFAHASIHSASYAYQTGRSAKLCAQQHLGARWAIKLDAKDFFHQYDEFQVFNLLRGFGYSPLVRLEIARICTRHVSTDQDWLPDKYRQPTRLRSIPELPPAEYMWSGPDLIDVEAYAHLPHSQGRRLGYLPQGAPTSGAISNALAYDLDQSFEKLAEANRMTYTRYADDIFLSSYSIFERPSAEQIVHQAHSIFEQHELQPHARKSRILTPGRPIELLGIRVDGESTQLPKRIKSKIEFHIRGVESFGVHVHASHSGFREGLGFVNYLEGMIRYAINIEPERGRRWNRRLRHALSGRV

SEQ ID NO: 1967 - protein, 396 aa, Agromyces mediolanus
  source 1..396: note = Related to JAINWC010000029.1
MESPHLYRKNAPSDLDPAVVERAIQLSQAQEAAGVAPILSLNHLAVQANAPLKVLERIAARAVDAYHIHEIRKRDRVSKRMIAAPTPELRQVQRWLLDNVFARVPVSPYAFAYVEGRSAPQCARRHVGATWLVKLDVKDFFHEFDEAQVFSVLRSVQYSALVSLEISRIVTRHVSTPQAWLPKKYASTSPRRPMPDAELVPDLFDHADDAPEYLSHPQGVRLGYLPQGSPSSGAISNILSRQLDEELAALASARGLTFTRYADDITLSSGEIFNRGRAEKILHEATAILHRNRLTPNRRKSRIVTPGLPLEVVGVRVDGDESRLPRRLRDRIEFHLRGIEQFGFAAHSRHVGFDDVLGFSNFLYGLIRYAHDVQPSLAAAYFARADAHFPAAQVGS

SEQ ID NO: 1968 - protein, 328 aa, Frondihabitans sp.
  source 1..328: note = Related to NZ_RKQW01000003.1
MSGVSYAFLRRVVERESDPYNIYTIRKRDGKSLRSIAAPSEALAAVQRWLLDQTFARMPSTPWSFAYEKDNSSVKCAQEHLGATWLLKMDLKDFFHQTDERDVYHLLRKYRYSELVAFELARIVTRSVRDPQDWLPPKYASTVEWRRGAGFPYGKRVRLGYLPQGASTSGAIANVLASGLDRALHELAISHGTTYTRYADDLTFSGGPYDRASAREFASSVTSAIFAAGYTPNKKKTRLIAPGRRLEVLGVLVNGSKLRVPARFRKRVEAHLYGLESHGVMGHLHSRGFRDIDGMSRHILGLIAHVHAVDSSLAKVYYTRFASAFPNP

SEQ ID NO: 1969 - protein, 384 aa, Rathayibacter sp.
  source 1..384: note = Related to PSVB01000001.1
MNLSPHLYRKNAPSGLDGAVVERAIKLTSEQRARGVEPILTLNHLAALSGTSGNYLHAVVDRQVDGYDLFNIRKRASGRRRSIAVPHPELAKVQKWLLTDVFSKVTVHSDCFSYRHGISIKDCASRHLHAEWMLKVDLSDFFHQIDERHVFGVASSLYEPLVAFEVSRIVTRQPHVGQPWLPKKYLRTVHQIPTKSSYPYKRSEKIGYLPQGASTSGYISNLVAKPLDTALSSIAAALELTYTRYSDDLAFSSARVLSRSQGLDVLREVARMVGKTGFHINESKTRFSTRANGLNLLGLTVDGESLRLQRHLRTRIEFHVSGVERFGANAHSIHCGFRDVLGMSHHILGLLAYASHIEPAKASIWRARLDASRDALLFGAPLAE

SEQ ID NO: 1970 - protein, 342 aa, Arthrobacter sp.
  source 1..342: note = Related to NZ_BPFW01000004.1
MFISKRPIPDLEHLALAVGLRPEYLRDVAARRSDPYHEFQVAKARGSVRTIAAPEPDLAKAQRWILDNMFLGSHAGGRSFAYRKGVSVKDCATVHVGARWLVKLDLQDFFHSIDSRRVARIFRKVGCDEVTSVQLARLCTRRNSGSIGQLAGPTPLDYLPQGAPTSGMLANLAAENLDRSMSRLASRTALKYTRYSDDLTFSSEEDFSRASAFALIRGARGEIARNHFSMHEDKIRISPPGSRLVVLGLLVDSDRVRLRGDFKKTLKWHVYGCARFGPNEYSASRGYASVEDYQSHVGGLFAHAVDIEPEWAAPLQRSWKELTAAQAEAASAGSLVVSASGD

SEQ ID NO: 1971 - protein, 326 aa, Pseudarthrobacter scleromae
  source 1..326: note = Related to NZ_BMKV01000004.1
MLINKRPIPDLEHLALAVGLRPAYLRDVAARSIDPYREFQVAKARGSVRTIAAPEPDLAKAQRWILEHMFLGSHAGASSFAYRKGVSVGDCARVHVGARWLVKLDLKDFFHSVDARRVATIFRKVGCDDVTSVLLAKLCTRRKNGSRGTLTGATPLDYLPQGAPTSGMLANLAAENLDRSMSRLASRYRLMYTRYSDDLTFSSNRDFSRASAFALVRSARGEIARNHFSMHEDKIRISPPGSRLVVLGLLVDSERVRMRGDFKKTLNWHVYGCTRFGPDKYSASLGFSSISEYQAHVNGLFAHAIDIEPEWAGALHARWKEITAPR

SEQ ID NO: 1972 - protein, 326 aa, Arthrobacter sp.
  source 1..326: note = Related to NZ_WVUN01000028.1
MELTNLQQLMQKTQVSETALFDLMRGQVDPYTEFRIPKGRNGAFRIIAAPSRDLGKLQRSILDNILSAPQRASQSFAYHRGVSITDCARVHSPARWLVKLDLKDFFGSVSAVRVAAAFSSIGLTEEFSSQLAFICTRRAGEEGTRFLPQGAPTSGLLANLVAAALDESLVLFAQHLNLRYSRYSDDLIFSSSGTFSRSKALRIVRQVRSKVAAHGFTLNEDKIRIRPPGSRLLVLGMLVDSEYPRLRHDFKRLIEWHVYGSERFGIAEYSASRGFASIESYLRHVDGLLAHALDVQPDWAAPMRQKWNFISSAPAGGLLRPPREVP

SEQ ID NO: 1973 - protein, 409 aa, Varibaculum massiliense
  source 1..409: note = Related to NZ_FNWI01000004.1
MELLPFNPIVKPSRVAPAQINSLRYLLRLHNLENPEESILYPSAHVAISSHNTAEIWLDHEKTTSLRKVPLYYKYRSVPKHSGGRRILSEPSSSLKSLQRWILRHCFTDDMVSPAAYAYRPGRSIQDCAAVHIGAKWLLKLDLKDFFGGISEARVYELFRAIGYKELVAFELARLTTFLPDKNIRRNIQALYNEKFEITPAARNYTKLEISIDSSSGPYPRYRGSAGKIIRGVLPQGAPTSGIIANICAGELDKELASLALYNGLRYSRYCDDLFFSPRPDHEHFDRSFAGLIIRDVNRAVLKHGFRINQGKTRVVPPGSKKLILGLQVDDSVRLDTAFKKNIDYHIRGIAKFGLQQHVAHTKGTPPPVLSFLNHLQGLIAFAKGIEYWYGETRETNLKRALSVGEVTR

SEQ ID NO: 1974 - protein, 355 aa, Kocuria sp.
  source 1..355: note = Related to NZ_PDDL01000005.1
MSNRGGSRNLFREIQKVNHDCSKFGVSPIYTLTHLCVVAKVAHKDARDVIFNHQAHYKSRRIKKKSGSGYRTIYEPSPQLKSLQKTILHNCLPTAPASELSFAFETGRNTLAAAGQHVGARAMIHVDVRDFFTSVASKQIYSVFHNLGYPELLSLEMALISTVGHTVTLRQFVEDGLVYEILDPGYLPQGASTSGKLSNMVCADLDEKLSAISHKWGGVITRYADDITFSSPVPLSRSKCTSIYHDLRKALLQSGFVTNSRKTKIFPNVREFKMLGLCVGQENVWLNKSYKKTLRAHLYSLEKFGIFKHSVSRNFDSDLEFMSYMWGHYAYCANVDKKFAGELRSRLEAAGIRKI

SEQ ID NO: 1975 - protein, 324 aa, Arthrobacter crystallopoietes
  source 1..324: note = Related to CP018863.1
MTHLCVIARVSHEVARDVIFNHRVHYKSRRLAKRPGHGYRTIYEPSAPLKSLQRAILQNCLPKASLTDLSFAFETGRSTSGAARRHIGARSMIHVDIQDFFDSIRSRRVYSVFAQLGYPELLALEMAVIASVGHEVALRGENDKGFTYEFLEEGRLPQGASTSGKLSNLVCLRLDDLLLQISDRWGGVVTRYADDISFSTPRPLSRKECASIYFEIQDAVHRSGFQLNPRKTRILPRGNEFRMLGLCVGQKHVWLNKNYKSAIRAHLYGVEEFGISAHAISRGFDSDYEFMNFIWGHYAYCVDVDVTFARELRSRLEIAGVSRI

SEQ ID NO: 1976 - protein, 334 aa, Pseudarthrobacter psychrotolerans
  source 1..334: note = Related to NZ_CP047898.1
MTHNVVPVYTLAHLCVIAKVPYEAARDVIFNHRAHYTSRKLVKRSGLGFRTIHEPSPQLKSLQRAILQNCLPRDASSALSFAFEAGRNTSQAARHHIGARAMIHVDIQDFFGSIGSRRVYSIFAKLGYPELLALEMAFITSVGHEVTLRGPDDRGVPYEFLKEGRLPQGASTSGKISNLLCRELDNLLSEIAVKRGGVVTRYADDISFSWPNPLIRSESGTILAEIDRAVSEAGFSLNRKKTRVIPKSHEFRMLGLCVGQEGIWLNRNYKSHIRAHLYGVEEFGLSEHAISRGFHSDLEFISFIWGHYAYSAYIDPSFASEVRARLEMAGVPDV

SEQ ID NO: 1977 - protein, 355 aa, Paeniglutamicibacter sp.
  source 1..355: note = Related to JAHRED010000024.1
MKRRNATEALIRSVRRIENDCSRSGVLPIFTLVHLCVVSKTPYNTARDVIFDPRVHYSTRRMAKRSGSGFRSIHEPSPPLKALHRAILENCLPVSGVSDMAYAFHPGRDTLAAVRAHVGAQSMIRVDIKDFFGSIGTRRVAAIFMNLGYPELLALEMALLTTVGHEVILRGEHDSGPIYEIHKEGRLPQGASTSGLLANLICAPLDQLLSMVALQWDGVITRYADDICFSSHTPTSREKCQDILRDIICAIESQGFKLNSKKTRIHPKGKVFRILGLCVGESDVWLNRNYKRSLESHIHGVKKFGLINHSYSRGYGSDLEFIEFMWGHYAYSIHVDPTFGIYLKNQLQENNIVSI

SEQ ID NO: 1978 - protein, 368 aa, Pseudarthrobacter sp.
  source 1..368: note = Related to VAHO01000005.1
MVGIASPHAYSAALSARGGSPQLLREIREIDRLTRSSHVIPLYTLTHLCTVAKVPYEAARDVIFNHRAHYSARKLKKHSGKGFRTIHAPSPHLKSLQLAILENCLPKRPTSDLSYAYEPRRNTLEAARRHIGAKTMIQLDLADFFGSISSTALYKTFVGFGYPKLLAFEMSLISSVGHEVTLRGPDEKGVVYELLKSGRLPQGASTSGKLSNLVCIGLDQLLGEVATAWGGIITRYADDITFSTGHAVSRSECNSILRDLKSAIHVSGFTMNERKTRVTRSGQEHRVLGLCVGQDSVWLNRNYKNSIRAHLYGLEKNGLADHGIHRGFSSDQEFMSFIWGHYAYCVYVDPDFGAEMRARLELAGVERV

SEQ ID NO: 1979 - protein, 370 aa, Kocuria rhizophila
  source 1..370: note = Related to QFNW01000102.1
MVEKIAPHEYFKELSERGGSRQLQKVITKVNQECAENNVLPVYTLNHLSVISKIPLFVTKDIIFDHSKYYTRQKVAKRSSPGFRTIYAPKFPLKQLQRAILSNCLPNNGQVGISYAFQKGSNAISACRQHLGARGMVKLDVANFYGSISTPSIYRIFHSLGYPELMSIEMALICSVGQVVEMRPDDQSGKIYKIKKRGRLTQGSPASGLLSNIHCRKLDRTLELIARDHGAIVTRYADDITFSTREPMSQYVVNSIIGSSIHALKRQRLNLNRRKTSVIRNGRSFNLLGLRVADDGLHLNSGYKSTVRNHLKKASLQGVSKYSLSLGYSSDLEFIFMLWGHYAYSMGVEKDFAAEISSKLHTLGIPRLTA

SEQ ID NO: 1980 - protein, 377 aa, Arthrobacter liuii
  source 1..377: note = Related to NZ_BMFW01000055.1
MSVSSHAFTEGLFAAGGSPALLRQIHRVNFDCGNAGVTPLYTLGHLAFLSAVPHGVLRRMLLETKSHYTEQRLAKKKPGTGYRTIRIPSPALLKVQRFILGRCLPPGPSSPISYAYTRGRGIRDAAERHVGARTVIKLDYSDFFSSVGSKAVYRVFESAGYPELLAFEMAMLCTYGATIQLNNEVNGNRPYKNVSRRFLAQGAPTSGALSNFALRSLDKSLGEFELSGFTLTRYADDITISSPRTMTQKEVGSLIRNITELSSTYNLSLNKSKTQVLRNKNSFRILGLSVTSSGVGLTRPYKRSFESELFGIKKGGLSNQAIYRGYSSPMDYIAFLWGHVAFAKGIDPIWSQRMSERLESMGVPFIDAIGVFGSSLP

SEQ ID NO: 1981 - protein, 361 aa, Bifidobacterium apousia
  source 1..361: note = Related to JACFRS010000007.1
MEAQHRGLDKDTIEASIRQYQSMLDCGILPILSLKHFAKLVNVDYSYLRRIVGRKIDPYKTIEQQKRSGGTRLISAPEKHLQDTQRWILDYVLSDAKTHPLSFAYENGKSILKCAKIHVGMRWMIKLDLRNFFDSIKENRIYKVFRELGYPSLVSFEMTRICTRSQGFNSIKKVANKYPVIHTYLYGASGCLPQGAPTSGKLANIVCYGLDEEINRLAIRNRFTYSRYSDDIFLSTCDSFNRKKAQQIISCVNNFIHKEGFSLQKKKTHIITPGARKIVLGLTVTDQGVKPMRGFRKQIESDIHGVKKFGLVQHVQHRHYHSIFSFINHVDGCIAFVYGIDSQLGDRYKKQWGEALSRYNL

SEQ ID NO: 1982 - protein, 369 aa, Micrococcus luteus
  source 1..369: note = Related to NRSP01000001.1
MSPPHLSSANEETSCEEAAIVSRMREISGIIESNDAHPIFTLNHLAYEAGVSYGFIRSVVARRINPYRHYEMRKRRGGYRVISSPVPDLARVQRFILRKILSVQRDNPASYAYREGKSIKDCASRHIGSRWMIKMDIEDFFGSVNSKQVYFLFRDLGYSSLVSFELSRLVTWGCSPTAMNWQPYDYKISDYRHSIVGSLPQGAPTSGKIANLIARDLDKSLHGLAKTYGAIYTRYSDDIIFSFRRNITRPEARVIVKKSYDLMRANGFSPNLKKTAVIPPGARKIAVGLVVSDNVYLSREFKRRTERLVHGVYKEGVVPFSERAKFRSPIGLINYIEGSLAFAAHIDRKWAEGQQQKLLSSMRKNTKIR

SEQ ID NO: 1983 - protein, 340 aa, Pseudomonas fluorescens
  source 1..340: note = Related to NZ_JSAL01000022.1
MRSVEEWKHFFLSRGIANELIERYLKQISLLSNTKSPIIFELEHLSLLVGVKYEVLLNMIRGSSSYYRTFSIKKRAGGERVIEAPYPSLLQCQTWIYHQILLKSPVHDCAHGYVPGRSIFTNATVHLGCKTLLKMDFKNFFPSVGIGWVIKFFSELGYDKNVAYALAALCCNRGRVVQGASTSPYLTNILLYNLDDRLFKLSSRSGLRYTRYADDLTFSGGYISTKFVDLVSSMVSEFGLVINDSKTRLLIEKNKKLVTGLSVSGSSLRITREMRRSITKDVFYIEKYGLFSHVSQMKIKDPFYLESIAGKVAFWIQAEPLNSFALRCRDILAGNFSRVE

SEQ ID NO: 1984 - protein, 360 aa, Pseudomonas putida
  source 1..360: note = Related to NZ_CP010979.1
MKKIDEWKRFFEKRGVIPELIEKYLDQIARLNKSGAPIIFEVEHLSLLIGIKYDTLLKMIHGGSSFYRKFTIKKKSGGDRVIEAPYPSLMQCQNWIYENILLKCEVHPSAHGYVRGKSIFTNASPHLNRSSLLKMDFENFFPSIKIGWVVSFFSRLGYSKKVSFALASLCCNDGCLVQGAPTSPYLTNILLRRLDKKLFQLAAKSDIAYTRYADDITFSAQLIPSYFPGLVASICARYALKINSNKTQLLVNKNKRVVTGLSVSGESLRITRELRRKIKQDLFYIEKYGLLSHISSQKIKDPFYLDSILGKVNFWLQAEPANEEALSYKEILLSYFSNSKVDVLLKRKSTRRSVGLLAAE

SEQ ID NO: 1985 - protein, 341 aa, Pseudomonas viridiflava
  source 1..341: note = Related to NZ_UTCV01000052.1
MKKLSEWKQFFLSRGLSQELIQRYLDQIKMLAGSGSPVIFELEHLSLLVGIDSKTVLAMVHGSSSFYRAFTIKKRSGGERIINAPYPSLLQCQNWIYTNILLNCPVHDNAHGYVRGRSIFTNASPHLNCAVLLKMDLKDFFPSIGINWVINFFSDLGYSKVVAQLLAALCCNRGALVQGASTSPYLTNILLRRLDERFSRLAQKNNLNYTRYADDMTFSGGYISKNLPQLISSITLDYGLTVNDAKTRLMINKNKKIVTGLSVAGTSLKITRDLKRTIKQDVFYIERYGFLSHVSQQKITDPFYLDSIFGKVNFWLQTEPGNAEAIRCRDILHPNFGISRL

SEQ ID NO: 1986 - protein, 342 aa, Pseudomonas haemolytica
  source 1..342: note = Related to JAEKDB010000004.1
MKKINEWKRFFLSRGIPQKTIDQYLDQIKLLTVSNSPIIFEVEHLSLLLGIEYLTIQAMINGTPKFYREFIIKKRAGGNRTIHAPYPSLLHCQDWIYQNILLNCAVHNNAHGYIPKRSIFTNASPHLNCKVLLKMDLKDFFPSIGIGWVVNLFSGLGYSHGVSYALASLCCNNGCLVQGASTSPYLTNVLLHGLDERLTKLASKSNLKYTRYADDMTFSGGYISNKMPALIESIVNDYGLVVNATKTKLMINKNKKIVTGLSVAADALRITRELRRSIKQAVHYIERYGFLSHVSQEKIKDPFYLDSILGKVNFWLQAEPHSSDAKNCRDVLLPYFGKNYQA

SEQ ID NO: 1987 - protein, 359 aa, Pseudomonas sp.
  source 1..359: note = Related to NZ_JAGYGI010000002.1
MNEAVVKTWRKHFERRGISRELIESYLPYIQKLCKTSSPVIFEFEHLSLLIGVEQHELRKMVNAPHAFYRSFQIKKRSGGLRKICAPYPSMLMCQDWIYNNILINKPVHSAAHGFVPGRSIFSNASAHLNSKCLMKMDLKDFFPSIPINWVVNYFLSLGYADNVSFYLAALCCSEGRLVQGSSTSPYLTNILLKNLDERISLLAKSYNLNFTRYADDLTFSGEYIPHKLIGVVTKIIVQYGLAVNDKKTRLQIGSNQRIVTGLSVAGSMLAVPRTFKRDLKLELHFIKKYGYGSHVSKMKIRNPYYIESLIGKLNFWLQVEPSNMDALSGIKLLKGIQQGEISLLQRSVGDSDQLNLHA

SEQ ID NO: 1988 - protein, 348 aa, Pseudomonas protegens
  source 1..348: note = Related to NZ_LHUU01000009.1
MTKSVKDWLKHFERRGISRDLVESYLPYIKKLNQTSSPVIFEFEHLSLLIGVDQHELRKMVNAPHAFYHSFQIKKRSGGMRKIHAPYPSMLMCQDWIYKNVLINKPVHSAAHGFVPGRSIFTNASVHLGSKCLMKMDLKDFFPSVPINWVINYFLSLGYADNVSFYLGALCCCEGRLVQGSATSPYLTNILLKGLDERISLLAKAYGLRFTRYADDLTFSGNYIPHKLIGVVSEIIVQYGLRVNDKKTKLQVGANQKIVTGLSVSGNALALPRKFKRELKMELHFIKKYGYVSHASKKKIRNPYYIDSVIGKLNFWLQVEPANMEALSGLELMRGIQLGHVSSLQSHV

SEQ ID NO: 1989 - protein, 340 aa, Pseudomonas aeruginosa
  source 1..340: note = Related to CP071730.1
MKKISYESWRKYFLSRGISPDYIQAYLSYIEKLSSTSSPVIFEFEHLSKLIGIEYDALRSMVNSPSSYYRVFNIKKRAGGLREIHAPYPSLLMCQDWIYRNILLSKPVHAAAHGFVPSRSIFSNASKHLGKKCLLKMDIKDFFPSIKINWVIKYFQTIGYADNVSFYLASLCCSDGALVQGSSASPYISNLLLYGLDARLSRLAKSYGVEYTRYADDLTFSGDYIPHFFIGFVTEIVGDYGLSVNEGKTRLKIGDGQKIVTGLSVAGEKLKIPREHKRRMKQELHFIRKYGYLSHMAKQKRRDPFALESLLGRFSFWLQAEPDSSDARGGVEYLKSIRWL

SEQ ID NO: 1990 - protein, 344 aa, Pseudomonas fluorescens
  source 1..344: note = Related to CABVIS010000011.1
MNNNTIVKNWLGYFRQRGVSGLLIEVYAEYIKTLVGNSVPVIFEFEHLSRLIGIDQARFRAMVNSPSSFYRTFHIKKRLGGLREISSPFPSLLICQDWIYKNILLNIPVHSCVHGYVPGRSIFTNATPHLNARCLLKMDIKNFFPSIKIDWVANLFNQMGYADNVSFYLASLCCKNGRLVQGASTSPYLTNILLRGLDHRLSSLAKSYNMEYTRYADDLTFSGEYIPHSVIGVVGAIISDFGLEPNVEKTRLQIARNQKIVTGLSVAGESLGVPRSFKRELKKDLHFIQKFGFESHLAKKKIRKPFYIDSLIGKVNFWLQAEPADQYAMQALSMLQGIHERRAV

SEQ ID NO: 1991 - protein, 343 aa, Pseudomonas sp.
  source 1..343: note = Related to NZ_JAIWYL010000001.1
MNEALIKQWLAHFRKRGVSGPLIDVYAVYIRTLIGNSVPVIFEFEHLSRLIGIDQARFRAMVNSSSSFYRTFHIKKRLGGLREISSPFPSLLICQDWIYKNILLNIPVHSCVHGYVPGRSIFTNAAPHLNSKCILKMDIKDFFPSIKIDWVANFFNQLGYADNVSFYLAALCCKDGCLVQGASTSPYLTNILMRGLDHRLYKLAQSYSMKYTRYADDLTFSGEYIPHTVIEVVDSIVSDFGLEVNTDKTRLQIDRNQKIVTGLSVAGKSISMPRSFKRELKKELHFIQKYGYQSHLSKKKIRKPFYIDSLIGKVNFWLQAEPADTYAIKSLFMLHEIQKGNSI

SEQ ID NO: 1992 - protein, 343 aa, Pseudomonas chlororaphis
  source 1..343: note = Related to NZ_CP027656.1
MNDIKIRNWLSHFRQRGVSEALVEIYAEYIKTLVGNSVPVIFEFEHLSRLMGVDQTRFRAMVNSPSSFYRTFYIKKRLGGLREISSPFPSLLMCQDWIYKNILINIPIHPCAHGFAPEKSIFTNATPHLKARCLLKMDIKDFFPSIKINWVANFFNQIGYADNVSFYLASLCCKEGRLVQGSSTSPYLTNILLYGLDQRLFGLAKTYNMTYTRYADDLTFSGEYIPHTVIDIVKSIILDFGLKPNSEKTRLQIDKNQKIVTGLSVAGDSLSAPRSFKRELKKELHFIRKFGYESHLAKKKIRKPFYLDSLIGKVNFWLQAEPNDQHAKQALVTLRELYESRKI

SEQ ID NO: 1993 - protein, 349 aa, Aeromonas veronii
  source 1..349: note = Related to NZ_CP095841.1
MIKKTFDNNSSLDSKVNNWIEYFNNRGVSLELIDEYKTFILNLISKDLPVIFELEHLSLLLGIQYSEFLKIINNPDEYYRKFDIKKRKGGKREILAPLPSLLHCQRWIYKEILTKSKTHNNAHGFISNRSIITNASLHLNKKCILKMDIKDFFPSIPINWVINYFSSLGYPNNISYYLSAICCCNDSLPQGAATSPYLSNILLFSLDDRLTKLSKKYNLVYSRYADDMNFSGEYIPSHFSEIVSEIILSYGLEANKNKTQLLTKKGKRIITGLSVSGEKLTLPRNKKREIRKEVHYIEKFGYLSHAAKLKIKNPAYIDSLEGKLTFWLQVEPNNAFAKSGLLLIKSIRE

SEQ ID NO: 1994 - protein, 348 aa, Citrobacter telavivensis
  source 1..348: note = Related to CP045205.1
MTFQKLDKVQELKINSWYLYLKNRGLPSDLIDEYISYIISLIDKNLPIIFELEHLSKLLSINYIELLKIINSPENYYREFNIPKRKGGTRNILSPYPSLLHCQKWIYKNILSKIAIHDAAHGFIKKRSIMSNAEKHVEKKCILKMDMSDFFPSIPINWVINFFHSLGYSNNVSFYLSSICCLNNGLPQGGATSPYLSNILLVSLDRRLTNLSKSYKLDYTRYADDMTFSGDYIPLKFSEIVSQIIDNFGLHINNDKTQLITKPGKRIITGVSVAGSKMTLPRDKKREIRKEVHYIKKFGYLSHASKMKIRNPAYLSVLEGKLNFWLQVEPDNEYAKQAIVFIRTLKNI

SEQ ID NO: 1995 - protein, 343 aa, Tolumonas auensis
  source 1..343: note = Related to NC_012691.1
MKKNNTIEYWISYLISHGVSLDIIEEYTPYITNLVDKNLPVIFELEHLSLLIGIKYLELLKMIHSPDSFYREFDIPKKKGGVRHIVSPYPSLLSCQKWIYNNILKKISIHPAAHGFNLNHSIVTNAQSHLNKKCLLQMDVKDFFPSLPINWVINLFSSLGYSHNVSFNLASLCCLNDKLPQGAATSPYLSNILLVGLDKRLSLLSTSYQLTYTRYADDLCFSGEYIPHELIQTIESIIIDYNLTPNKNKTRLQLNNNKRIVTGISVSGPKATIPRQLKRELKQELYYIQKHGYLSHVTKMKISNPKCLQSLEGKFSFWLQVEPDNDFAKKSLMFLIKLRKENT

SEQ ID NO: 1996 - protein, 344 aa, unidentified
  source 1..344: note = Related to JABSQN010000005.1; note = Piscirickettsiaceae bacterium
MNKKYNIPYWKKFYRSRGLSDEIISIYLPYIKKLQKNNAPVIFEFEHLSKLLGLKRAELSKIVNSPESFHRKFTIPKKKGGQREIVSPYPSLLHCQKWIYRNILLPQPIHDSAHGFVPNRSIFTYASMHLSKKALLKMDLKDFFPSISINWVICYFSSLGYANNVSFYLASLCCYKGHLSQGSSTSPYLTNILLKGLDKRLQKLSTTYQLIYSRYADDLTFSGKYIPHSYIEIVNACIVDYGLEVNEDKTRLHTKPGQRIVTGLSISGDELKLPRKTKRELKQEIHYIKTFGYISHISKNKISNPYYLESLIGKVNFWLQAEPDNLFAKDSLNHLLEIKRSALS

SEQ ID NO: 1997 - protein, 334 aa, Gimesia chilikensis
  source 1..334: note = Related to NZ_CP036266.1
MKDWEKYFIDRGLPTDTISTYLSYISQLSENQVPVIFEFEHLTKLLGLKRNVLAKIVNSPEHFHRKFSIRKRSGGKRIIVSPYPSLLYCQKWIYVNLLLKQKVHTAAHGFVPGKSIFSNAKLHLSKRSMLKMDLKNFFPSIPMSWVINFFHDLGYAKNVSSYLASLCCYEHRLSQGAATSPYLSNLLLKNLDDRLSSISNSYRLQYSRYADDITFSGDYIPSKLIKIIEEIVDDYGLAINQKKTRLHTKPGQRIVTGLSVVGEELTIPRKMKRDLRQEVHFIRKYGYLSHISKMKINHPFYLESIAGRFQFWLQAEPENEFAKESLTYLQKIKG

SEQ ID NO: 1998 - protein, 334 aa, Idiomarina abyssalis
  source 1..334: note = Related to NZ_CP081832.1
MFEQWIDFLNDRGVKTEVIESLSPIIQTLSSNKLPVIFEFEHLAKILGFNEASLASMINSPSNFYRTFYIPKRRGGKREICSPYPSLLECQRWIYKNILLKLDIHSAAHGFAPGRSIITNAKCHLSKNAVLKIDLKDFFNSIPINWVINLFYSLGYPRNISFYLASLCCLEGSLSQGAVTSPYLSNLLVKQLDSRLTNLSLKHHLVYSRYADDMSFSGAYVSKNFISSVGEVITDFGLMVNHSKTSLRTGNSKKAITGIIVSGNRLRASKQLKRKLSQEVHYIKKFGFLSHINKLKIRDPNYKLSLIGKLNFLKQVEPDNEFAIDALNYLRKLE

SEQ ID NO: 1999 - protein, 344 aa, Pseudomonas aeruginosa
  source 1..344: note = Related to CP049161.1
MHKEKHIIRAWEEHFKDRGISSDLIVQYTTYIKKLSENDLPIIFEIEHLSLLIGINLPSLRKIINAPEKFYRTFSIPKRRGGEREISAPLPSLLACQDWIYKNLLAKISIHDSAHGFVPGRSILTNASPHLAQKALLKMDLKNFFPSIPINWVMKLFSDFGYANNVAFYLASICCLNESLAQGSATSPYLSNILVKGLDKRLKALSDSYHLEYTRYADDLTFSGNYIPHTFPSTVEEIVSDFGLEVNIEKTRLHTKPGQRIVTGISVAGATPSLPRASKRQIRQEAHFIQKYGLISHISKKKIRAPTYIDSIEGKLAFWLQVEPNNEFARESLSHIRKIRRDHQ

SEQ ID NO: 2000 - protein, 316 aa, Rheinheimera sp.
  source 1..316: note = Related to PBKZ01000017.1
MVTTSLKNAVLLQDLPVIFELEHLSKIIGVEIRTLQKMIYCSRKFYRSFSIPKRNGSRRQIDAPYPTLLLCQKWIYENILKKTSVHHSAHGFIEKKSIITNALPHKNKKTLLKIDLKDFFPSIPLNWVVNHFLSLGYANNVSFYLASLCSLEGNLCQGAPTSPYLSNILLTGLDNRLTKLAASYCLEYTRYADDMTFSGNYIPHTLIVTIENVISSYGLSVNSEKTRLHLKKGQRIVTGISVSGDSLSVPREYKRALKQEIHFIERYGYISHVSKLKINDPLYLEKLIGKVNFWLQVEPENNFAKHALKLLRAARK

SEQ ID NO: 2001 - protein, 341 aa, Serratia fonticola
  source 1..341: note = Related to JAENMP010000010.1
MKNNKIKSWIDFFADRGVSNEQANLYIQYISGLLDSNSPIIFEKQHLSHLIGIDEATLDRMISSSKDFYREFNIPKKKGGMRKIVSPYPSLLMCQKWIYKNILLNDKPHDACHGFTPAKSIITNASIHLNKPCLLKMDLKDFFPSIPINWVINYFKHLGYTNNVSFYLASLCCYDRKLAQGASTSPYLSNLLLKGLDNRLNNLSKKYRLSYSRYADDMCFSGSYIPNKIIGVITEIIKKFGLSINEEKTSLLIHSNKKIITGLSVSGQQLSLPREYKRKLKNELHFIMKYGYISHITQQKIKDPNYLFSILGRVGFWLQVEPNNELAISSRDYLLSILKSN

SEQ ID NO: 2002 - protein, 342 aa, Buttiauxella noackiae
  source 1..342: note = Related to NZ_JPRU01000003.1
MKNNDINSWMEFFLDRGVSSDQINYYIPYIAKLLKTNSPIIFEKQHLAHLIGIDESILDKIISSPNHFYREFFIPKKRGGLRKITCPYPSLLMCQKWIYKNILLNDTPHVSCHGFTPSKSIITNASLHLKQKCLLKMDVKDFFPSIPINWVINYFKGLGYSDNLSFYMSSLCCHDKKLAQGASTSPYLSNLLLKGLDNRLNNLSRKYRLTYSRYADDMHFSGDYIPSDLVGVITSIINNYGLSVNEKKTALYIKSNKRIITGISVAGDELSLPRDYKRKLKNELHFIEKFGYISHITQKKIKDPNYLYSILGRVNFWLQIEPDNDAAIKGRDYLMRVLKNNL

SEQ ID NO: 2003 - protein, 341 aa, Serratia plymuthica
  source 1..341: note = Related to NZ_ARWD01000001.1
MKNNNISAWVDFFADRGVSDEQTDLYIQYITVLLSSEVPIIFEKQHLSHLIGIDESILDKMVSSSKNFYREFNIRKKKGGERKIVSPYPSLLMCQKWIYKNILLKDKPHEACHGFTPSKSIITNASIHLDKACLLKMDLKDFFPSIPINWVINYFRQLGYSNNISFYLASLCCYEKKLAQGASTSPYLSNLLLKGLDNRLSNLSKKYQLSYSRYADDLCFSGKYIPNKIIGVITNIIANYGLQVNSDKTSLLIKANKKIITGISVTGQKPSLPREYKRKLKNELHFIKKYGYLSHISQQKIKDPNYLLSILGRVSFWLQVEPHNELAITSRDYLLSILKNN

SEQ ID NO: 2004 - protein, 341 aa, Pectobacterium betavasculorum
  source 1..341: note = Related to NZ_JQHM01000002.1
MKNNELASWVDFFADRGVTDEQINIYIPYIKKILESKVPVIFEKQHLAHLIGIDENTLDKMVSSPDSFYREFNILKKRGGTRKIVSPYPSLLMCQKWIYKNILLKDSPDKACHGFNPSKSIITNASVHLGKASLLKIDIKNFFPTIPINWVINYFKKLGYADNVSFYLSALCCYEKKLAQGAATSPYLSNLLLKKLDDRLEKLSKAYHLSYSRYADDMCFSGDYIPYNIINIITEIIESYGLFVNKDKTSLLINANKKIITGISVSGETLSLPREYKRKLKSDLHFIEKYGYISHISRKKIKDPNYLLSILGKVNFWLQIEPSNETAINGRDMLLAILREH

SEQ ID NO: 2005 - protein, 344 aa, Morganella morganii
  source 1..344: note = Related to CP026651.1
MKKNENELTLWIDFLIDRGISSEQIALYVPYISKLLESNLPIIFEKQHLAHLIGIDENTLNKMTSSPHSFYRNFNIPKKRGGFREIFSPYPSLHMCQKWIYKNILLNDKPHNACHGFTPSKSIITNAAIHIGQSSLLKIDLKNFFPSIPINWIINFFKRKGYTHNVSFYLASLCCNNKVMAQGAPTSPYLSNLLLKGLDKRLYNLTKKYNIKYSRYADDMFFSGNYIPYDFIRVITNIIEDYGLNINKDKTAFLINANKKIITGISVNNNTLSLPREYKRKLKNELHFIKKYGYLSHINKQKIKDPNYLFSILGKINFWLQVEPMSKKAIESKKLIISILKMGA

SEQ ID NO: 2006 - protein, 343 aa, Yersinia intermedia
  source 1..343: note = Related to CWJI01000001.1
MNMKKNTLEHWSEFFHDRGISYELFEIYLVYIQKLISTDSPIIFEKEHLSQLLGINDSILNKMINSPNNFYRKFTIPKKRGGDRNIVAPYPSLLSCQHWIYKNILLTEQPHYSCHGFTPKKSIISNAKIHIGSKTLLKMDLEDFFPSIPINWVVRYFQQRGYANNVSFYLAALCCYDEHLAQGAATSPYLSNLLLKGLDERLTNLCLKYNLKYSRYADDLTISGEYVPHTLIEVITEIVSDYGLKVNIKKTALLINARKKIITGIAVTEDNIRVPRSFRRELKNTMNFILKYGFISHVTQLKIKDPYYLFSLIGKVNFLMQVEPENKNAREWKSTLINILKSQ

SEQ ID NO: 2007 - protein, 341 aa, Pantoea agglomerans
  source 1..341: note = Related to NZ_FXUX01000002.1
MNKNDIHSWLVFFQDRGLSHDLINKYIPYIIKLQKNNIPVIFEKQHLSHLIGIQERVLDKIIISPSKFYREFSIPKKQGGVRDIKSPYPSLLMCQRWIYKNILLKDSLHPNCHGFTPSKSIFTNANLHTNKKCILKMDLENFFPSIPMSWVINYFMKIGYTHNVSFSLASICCYDRHLAQGAATSPYLSNLLLKKFDARIEALCVKYNVTYSRYADDLTFSGEYIPHRFSSIVEEIIENYGLTPNKEKTRLLINANQKIVTGISVSGENIALPRKYKRKLKNEIHFVITYGYVSHINNLKIKDPNYLLALLGKVNFWLQVEPKNPLALRGKEYLSKVLRDK

SEQ ID NO: 2008 - protein, 337 aa, Janthinobacterium sp.
  source 1..337: note = Related to NC_009659.1
MKTNEWRAYFEDRGVSTARIDKYVSYIECLSKKNQPVIFELDHLSSLLGIQIEYLSKMIASSHSFYRKFSIPKRSGGKREILAPYESLLTCQQWILKNILKNIPLHSAAHGFRSGKSIKTNALAHINGKALLKMDLKDFFPSIPLSWIIKTFQDIGYAPNVAYYLASLCCYDEKLAQGAATSPALSNIVLTSLDKRLDRLAKKCSITYTRYADDLTFSGEHIHSSFSKLVTKIVDEYGLVVNTDKTRLKVKNGTRIVTGIGILNGRLSIPREYKRELKNEIFFIRKFGFVSHLSNKKISNPNYINSLLGKISFWLYIEPDNQLAIDSHKLVLQLIND

SEQ ID NO: 2009 - protein, 337 aa, Herbaspirillum sp.
  source 1..337: note = Related to NZ_AJVC01000002.1
MTLLEWKNYFQDRGIEPDLAKKYLAYIKGLQKNNCPVIFELDHLSQLLEIDLNYLARMISASGNFYRSFHIPKRSGGVREICAPHHSLLSCQRWILQNILNNIDLHPAAHGFTAGKSIKTNAISHLNSSAILKMDLENFFPSIPQAWVIQVFKEFGYAPNVSYYLSALCCCDGALAQGAATSPALSNLILRSLDKRLSKLARTCSLIYTRYADDLTFSGKRIHFSLPIKVEEIVKEFGLKVNTKKTRLKLTHGARIVTGICITNGKLSVPREYKREIKNDLFFIRKFGYLSHIANRKIKNPNYLSSLLGRISFWLFVEPTNEFAIKGRNTVLELMRS

SEQ ID NO: 2010 - protein, 337 aa, Massilia sp.
  source 1..337: note = Related to JAGPWD010000023.1
MESTQWRSYFRDRGIPNELTKSYVSYAGSLQKKNLPVIFEFEHLSLLLGLNIEPLARMIASPSSFYREFAIPKRSGGKRNICAPHESLLLAQRWILKNILEKSEVHVAAQGFLPGRSIKSNALIHLNSKNLLKMDLRDFFPSIPMSWVINVFKDCGYAPNVAYYLASLCCHSEALAQGAATSPALSNIILKSFDKRLTRLANKCGLKYSRYADDLTFSGETIHHSFSGAVEKITAEYGLAVNKEKTRLKIGHGARVVTGISIQGGRLAVPSKFKRELQNEVFFIRKFGLLSHLSNRKISNPNYLNSLLGRVSFWLHIEPENEKAQLARKLIMDTMKI

SEQ ID NO: 2011 - protein, 337 aa, Chromobacterium violaceum
  source 1..337: note = Related to MUKQ01000009.1
MNISEWRSYFLDRGIKEDLLGIYLSYIRKLNKFKVPVIFELDHLSSLLGINVKFLTRMISSPEDFYRNFLIPKRSGGKREISAPHQSILYCQRWILVNILTHIPIHYSAHGFCAGKSIKSNAQIHLNSKSLLKMDLKDFFPSIPKSWIINIFSDLGYAPNVSYYLASLCCYNDHLAQGAATSPALSNIVLRGLDNRLQSLADKCGLRYSRYADDLTFSGDKISVNFPELVEGIIHNYGLTVNKDKTRLKAKFGSRIVTGVSISGGSLSVPREYKRNLKNEIFFIRKFGILSHVSKKKIKNPNYIYSLLGKLAFWSYIEPENEYPIEAKKFLVELIKD

SEQ ID NO: 2012 - protein, 336 aa, Serratia sp.
  source 1..336: note = Related to PYUJ01000108.1
MECTWNNYFSDRGLSPDIIKQYVAYANNLERGNLPVVFEIEHLANLIGIKYPEINNIIFGAKSFYRTFKIPKRRGGCRVIQSPYPSLLSCQKWIYNNILKKVQTHPCAYAYKENISIIHNASIHLNADFVLKLDLSDFFHSIPKSWVVNFFSELGYANNVSVALASLCCVNDSLPQGGVTSPALSNILVSSLDERLNRLAHTFDLSYSRYADDMVFSGKRIPATIIKYVTGIIESFGFAINDEKTKLLIKERQKIITGIDTTGPKLTLPRNRRREIKKAMFFINKHGLVAHMNNEKIRNPNYLLSLEGKIRFWLQIDPENNEAKKFLGDIIRIKLN

SEQ ID NO: 2013 - protein, 336 aa, Proteus mirabilis
  source 1..336: note = Related to CP047112.1
MNKTWRHYFIDRGINDDLLDQYVIYADNLEKNGLPVIFEVEHLSNLVGIKYPEINNLIFGTKSFYREFKIPKRRGGYRTIQSPYPSLLSCQKWIYDNILQKIETHPCAYAYKKNCSIIKNASVHLNENVVLKLDLSDFFMSIPKSWVINFFSNIGYSGNVSIALASLCCLNDSLPQGAVTSPALSNILVSSLDERLYRLASVFQLNYTRYADDMVFSGKKISKSIIKYIAEIIESFGFTLNTKKTKLLIKKKQKIVTGIDITGSKLTLPRNTRREIRKTMFFIKKYGLISHMNNEKIKNVNYLSSLEGKIRFWLQVDPENIQAKEFLHDLIRIKFS

SEQ ID NO: 2014 - protein, 337 aa, Brenneria sp.
  source 1..337: note = Related to NZ_JAKMAJ010000005.1
MNNNWHDYLADRGLNNALIEEYLAYINRLEENSIPVIFENEHLSRLLGIKYPEFNKLIFGTHKFYRKFKIPKRKGGYRIIASPYPSLFSCQKWIYNNILKKIPTHVCAQAYKKDHSIIKNANLHLNNDVMLKMDINNFFSEIPINWVIKLFSDLGYSKNVSFALASLCCLDGVLPQGGVTSPALSNILMLSLDNRLHKLAEKFDLIYTRYADDMFFSGKKISSKLINYIKNIVEEYNLSINESKTKLLTKEKRKIVTGIDTSSSKLTLPRATRRNIKKSMHFIIKYGLIGHMNNVKIKNPNYLLSLEGKIRFWLQVEPENQEALYFLNEILKIKKLS

SEQ ID NO: 2015 - protein, 338 aa, Enterobacter mori
  source 1..338: note = Related to CP084692.1
MKNNWKDFFESRGIKDDFIDNYLKYIEYINKNEIPVIFEVEHLSHLIGIKYPEINNIIYSPSDFYRKFEIPKRNGGSREISTPYPTLMKCQRWIYENILSKIPTHQCAYAYKKDHSIIKNASQHVNNKNIIKIDLKNFFPSIPINWVINLFVKLGYSNNIPFILAALCCNENCLPQGAVTSPSLSNILLYSLDDRLFKLSEKLGLTYTRYADDMIFSGKHVSPKIIEYIRHIIETYGFELNNSKTKILSADKRKIITGVDISNNELKLPRRTKREVRKVMFFIKKYGLMNHMSNLKIKNPNYLLSLEGKINFWLQIEPTNEEALSYRDIIRVLKKWIY

SEQ ID NO: 2016 - protein, 338 aa, Klebsiella variicola
  source 1..338: note = Related to CP030173.1
MEQNWEEFFKSRGIKESYIELYLQYIKSIDKNDLPVIFEIEHLSHMIGIKYPEINSLIYGTKNFYRNFKIPKRNGGVRIIDSPYPSLMKCQRWIYTNILLKLSVHHCAYAYKKDTSIVKNASQHLGNECILKLDITDFFSSIKINWVINLFSRLGYSKKISFSLAALCCLHNKLPQGAVTSPCLSNILLYSLDERLFRLSVKLKLKYTRYADDIVFSGDNIHPNTIIYIRSIIDSFGFSINERKTKLLNNKKRKIITGIDISNNNLSLPRKTKRELRKSFHYINKFGLIGHMNSLKIKNPNYIQSLEGKVRFWLQIEPDNKEALDYLFLLKKLNLLTI

SEQ ID NO: 2017 - protein, 334 aa, Enterobacter asburiae
  source 1..334: note = Related to JAEKKB010000005.1
MRREWEDFYLEKGINTNFISTYLDYIKALESRNIPVIFEVEHLSKLIGIKYPEINDIVFGTKSFYREFKIPKKKGGYRKISSPYPSLRKCQTWIHEKILYSLRTHKNAFAYKKGKSIIDNAEQHLNNHFLLKVDIKDFFSSIPINWVIKLFDSLGYAKNVSYALASLCCLNGCLPQGGITSPSLSNILLYPLDERLSKLALKFNLKYSRYADDMVFSGEAIPSKFISYVTDIIESYGFILNKEKTKLLNNTKQKIVTGIDVSKDKLQLPRKTRREIKKIMYYVKKYGIFSHINNEKIKDPNYIKSLEGKIRFWLQVEPDNQEARSYIEHINQMK

SEQ ID NO: 2018 - protein, 342 aa, Halomonas denitrificans
  source 1..342: note = Related to JAHVIK010000003.1
MKKRKELTTKLWEDYFLDRGLSSELRKTYLEYINFISEKDLPVIFETEHLSNLIGINYQSLNSMVNNPDSFYRSFKIKKKRGGSREISAPYPSLMMCQTWIYENILVDYPIHHCAQAYRSKHSIVTNAKIHLGSRTILKMDLKDFFSSIPINWVIQFFSNLGYPNNLSYALASLCCLEDCLPQGAPTSPALSNILLISLDRRLYRLGKKYNLSYTRYADDLVFSGSYIPHKFIKVVANIVTNFGLTINDEKSQLIIGDKQKIVTGISISGSSPCIPRKTKREIKKELHFIKKYGLVSHVGKMKIRNPNYLASLEGKIRFWLQVEPNNKFALESLLFIRSKRA

SEQ ID NO: 2019 - protein, 340 aa, Vibrio quintilis
  source 1..340: note = Related to NZ_FRFG01000024.1
MNKTLKEWKSFFEDRGIELELIKEYLEYIDRLETNDCPVIFEVEHLSKLIGINYEDLNKMIFGEKSFYRTFYIKKRSGNKREISAPYPSLALCQLWIKENILSLDKSHFCSHSYTKKRSILSNAKIHINSNSILKLDIRDFFPSIKINWVINYFSSLGYSENVAFALASLCCLNDTLPQGGRTSPDLSNLLLKSLDKRLYRLAKKFSFKYTRYADDITFSGDDIPAIFINYVSDILVNYGFVLNNNKIRLIKGDKQKIITGLDVSGEKVRLPRKMRRDLKKQVYYIKNYGLLSHVSKQKIKDPNYIQSLLGKLAFWMYVEKSNKEVKGMYEFIKSLNRDN

SEQ ID NO: 2020 - protein, 340 aa, Vibrio cholerae
  source 1..340: note = Related to DADXPV010000013.1
MNNTLKEWKRFFEDRGIEPRIISEYLKYIDKLESSGYPVIFEVEHLSKLIGIRYEDLNKMIFGSESFYRTFKIKKRSGGKREISAPYPSLALCQSWIKENILELDKSHFCNHSYARKRSIVTNAKIHVNSNSVLKLDIRDFFPSIKINWVINYFFSLGYSENVAFGLASLCCLSDSLPQGARTSPDLSNLLLKSLDKRLYRLSSKFSFKYTRYADDITFSGDDIPVVFIKYVKDILVDYGFELNENKIRLIKGEKQKIVTGLDISSNDIRLPRKTRRDLKRQVYYIRKYGLLSHVSKQKIKDPNYIQSLLGKLAFWSYVEKNNNEAKEMYEYIKSLNRNG

SEQ ID NO: 2021 - protein, 372 aa, Vibrio parahaemolyticus
  source 1..372: note = Related to ABBBBM010000001.1
MALKSPIFRERNLKDFNAMHSLEGSFYKSFPMKRSQEIKNWQVFFADRGVSESLIEQYMPYVEKLLVADLPIIFELEHLSKLIGIEISELHKMIGNSSKFYREFSIAKKRGGRRTVYAPYPSLLMCQTWIYENILKSRTVHFCCHAYRHKRSIITNATPHLNKRAILKMDMENFFPSIPINWVIRFFSDLGYSNNVAYYLAAICCVEGSLPQGASTSPALSNILLKHLDNRLYQLSIKYNLSYTRYADDLTFSGEYIPNRLINVISNIVSDCSLSVNERKTSLIIGDKQKIVTGISVQGENLSLPRASRRQIKKEIHYIKQYGLVSHISKLKIKNPYYLHSLEGKLRFWLQIEPENESVLENLNFILELKDI

SEQ ID NO: 2022 - protein, 343 aa, Vibrio sp.
  source 1..343: note = Related to VHSP01000001.1
MKKKQELEIKSWELFFIDRGISEHLIAQYMPYVRNLTQANLPVIFEIEHLSKLMGVELSELQKMIANPRRFYREFSIPKKRGGRRPVSAPYPSLLLCQTWIYENILKAISVHFCCHAYIEKKSIISNATPHLGKTAILKMDMEEFFPSIPINWVINLFSNLGYAHNVSYYLASLCCLNGVLPQGASTSPALSNILLKHLDSRLYKLSKKYKLAYTRYADDLTFSGDYIPHKLIDVISDVITDTGLSVNKQKTSLIIGNKKKIVTGISVQGNNLTLPRSSKRQIKQEIHYIKQYGLISHISKLKIKNPYYIQSLEGKLRFWLQLEPDNEFASESLAFISKLRKV

SEQ ID NO: 2023 - protein, 345 aa, Aliivibrio logei
  source 1..345: note = Related to NZ_MAJU01000008.1
MNSKKTEQVVNEWKFYFLDRGISDHLIPQYLSYVEKLTNQQLPIIFEVEHLSVLIGIEYGELNKMVHDSSKFYREFEIPKRSGGKRCISAPYPSLLMCQDWIYNNILKSRNLHFCAHAYRTKKSIVTNAKKHLGKNALLKMDMQDFFPSIPINWIVNFFSGLGYSDNVAYSLASLCCLNDGLPQGASTSPALSNILLVSLDSRLYKLSKSYNISYTRYADDMAFSGDYVPHKIIEVITDIIYDFGFKVNEKKTKLIIGDKQKIVTGISVQGEFLTLPRKTRRLIKQEIHYINTFGLVSHIGKMKIRKPNYLLSLEGKLLFWRQIEPNNEYVLNNLEKISSIKWGL

SEQ ID NO: 2024 - protein, 343 aa, Pragia fontium
  source 1..343: note = Related to NZ_CP010423.1
MPDYQIQKWKTFFHDRGISDYLIVQYLPYIETLVSNKVPVIFEIEHLSRLIGVDITQLRKMINSPQHFYREFSIPKRRGGHRKILAPYPSLLMCQTWIYENILKSIPIHSSAHGYVKERSILSNATIHLKQNALLKVDLKDFFPSISINWVINLFSSLGYSNNVSYYLAAICCCDECLPQGAATSPYLSNILLVNLDYRLHKLSSKYHLNYTRYADDLVFSGKYIPHNLINIISSIIADFGLNVNQAKTSLIIGNKQKIITGLSVQKNELQLPRSKKRQIKQEIYYIKKYGLISHISKLKINKLNYHQSIEGKLRFWLQVEPNNKFALESLNYIHSLQNILIN

SEQ ID NO: 2025 - protein, 332 aa, Pseudoalteromonas galatheae
  source 1..332: note = Related to NZ_PNCO02000001.1
MKKISLRMQEWELFFKNKGVSTDLINIYLPYIEYLESQNLPVVFEAEHLSNLLGIKPVILYKMVSSPSSFYRSFDISKKKGGKRRISSPYPSLLICQKWIYENILMGLKTHYCAHGYIKSKSIVSNAKAHLNERVVLKMDLQDFFDTITINWVINLFSKLGYANNVSYILASLCCFNGALPQGAATSPALSNILLVHLDMRIYRLAKKYSLTYTRYADDLTFSGNYIPHTFIEIVNEIIVDFGLNVNKQKTKLIIGNKQKIVTGISVKNSRLQLPRKTRRTLKQELFYIKKYGLISHISKLKIKKPNYLDSLQGKFAFWTYVEPHNEFARHV

SEQ ID NO: 2026 - protein, 342 aa, Vibrio alginolyticus
  source 1..342: note = Related to LJTE01000008.1
MNSIHKNQIASWNRFFDDRGISSHLTQQYIDYISNLICADLPIIFELEHLSKLTGINIDTLCKIIGDSSHFYRDFSIAKRRGGKRLISAPYPSLMTCQTWIYENILKKSPSHFCSHGYSPNKSIITNARPHLGNKAILKIDIRDFFPSISINWVIKYFSDLGYSNNVAYYLASICCLNKALPQGAPTSPALSNILLRGLDRRLYKLSKCYNLTYTRYADDLTFSGEHLPYKVISIISQIVSDYGLSVNEKKTSLIIGDKQKIVTGLSVRGDTLQLPRSSRREIKKEIYYIRKFGLLSHISKLKIRKTNYLDSLEGKLRFWLQIEPGNKFVQESLILILSIKN

SEQ ID NO: 2027 - protein, 342 aa, Vibrio parahaemolyticus
  source 1..342: note = Related to AAXXVD010000006.1
MKNTHKNKIAGWTKFFDDRGVSSHLSEQYIGYISNLICSDLPVIFELEHLSKLTGINIDTLCKIIGNSNHFYREFSINKRRGGTRLISSPYPSLMTCQTWIYENILKKSPIHHCSHGYSPDKSIITNAHPHLGKKAILKLDIKDFFPSIPINWVIKYFSDIGYSNNVAYYLASICCLDEALPQGAPTSPMLSNILLRSLDRRLYKLSKTYNLTYTRYADDLTFSGNHIPHKITSVIEQIVLDYGLLVNEKKTCLIIGDKQKIITGLSVRGDRLKLPRASRREIKKEIYYIRKYGLLSHISKLKIRKTNYLASLEGKLRFWLQVEPENNFAQESLTLILSIKS

SEQ ID NO: 2028 - protein, 346 aa, Buttiauxella gaviniae
  source 1..346: note = Related to NZ_LXEP01000041.1
MTKSAEEIKKEINDWKKFFIDHGLETNLISDYLSYISSLIENNAPVIFEIKHLSQLIGINTSELLKMIYSPSDFYREFEIAKRSGGKRKISTPYPSLKKCQRWIYENILKKQSVSSHAHGYVQSKSIITNATIHAGKNNLLKMDIKDFFPSISINWVIVFFKKLGYAHDISFYLASLCCLKNHLPQGAVTSPCLSNILSLSLDNRLGKLSKKYKVTYTRYADDLFFSGDKIPLSLIKSVTNIVTSYGLNVNTEKTHLIRTSKRKIVTGVAVHNEVITLPRTYKKNITNTLYHIKKHGYLSHVSKLKVRNPYYLESLIGKLNFWQQIEPDNKFVEKSISYLKEIKKQ

SEQ ID NO: 2029 - protein, 346 aa, Salmonella enterica
  source 1..346: note = Related to AAMMPP010000001.1
MAMTADAIKKEISNWESFFVDHGIEEKFTSDYMSYISPLIANNVPVIFEIKHLSQLIGINAPELLKMIYSPSNFYREFEIAKRTGGKRKISTPYPSLKKCQSWIYENILKNRTISPYAHGYVQTRSIITNAKMHVGKNNLLKMDIKNFFPSISINWVIVFFKKLGYAHDISFYLASLCCLNNRLPQGAVTSPCLSNILTLSLDNRLGKLSEKYQVTYTRYADDLFFFGEKIPLSLIKSVTNIVTSYGLNVNIEKTHLIRASKRKIVTGVAVHNDVITLPRAYKKNIANTFYHIKKHGYLSHISKLKVKNPYYLESLIGKLNFWQQIEPDNEFVKNSISYLKKLKKQ

SEQ ID NO: 2030 - protein, 349 aa, Leclercia adecarboxylata
  source 1..349: note = Related to WQRG01000008.1
MKNEFLISPLRQNLDDWKDFFNDRGLEESLINDYISYIKPLLRNNVPVIFEIQHLSLLIGVPVIELKKMIFSPNHFYRTFEIPKKSGGSRQITTPYPSLKRCQKWIYNNILKKNRVHQNAHGYVLSKSILSNAATHVNQKNIIKIDIKDFFPSLKINWVVNYFKRLGYSHDISFYLSSLCCLNNSLPQGAVTSPYLSNILTLSLDRKLSKYAENHGLNYSRYADDIFLSGNFVPLDCFSEVKKIIKGYGFNINNGKSRFLNENKRKIVTGIAVHNEFMTLPRTKKKELMNVFYHIKKYGYISHVAKMKIKNPYYIDSLIGRFGFWKQIEPNNTLVIHCLAYLKNIKSNI

SEQ ID NO: 2031 - protein, 344 aa, Acinetobacter pittii
  source 1..344: note = Related to JAKUKP010000004.1
MSHEIEQVKTPKQWRLYFDDIGLKEEYIELYIDIVERLYKNKNPIIFEIEHFSKLVGVEVQTLFSMIFSEENFYRQFAIKKKLGGERIITIPSPSLMLVQRWIYKYILKTKKVHYAAHGFNFNKSIITNAKMHVGHKVFLKIDLKDFFPSIPISWIVNYFNQQGYPPKISYYLASFCTFNECLPQGAPTSPILSNILFYQLDKKLYKYSKKNNLTYTRYADDLIFSGDYIPLKFRNFVIYLIKQYGFKVNPKKTSLKVNAGQNIVTGILIKDDIFVPKKYKRKIRQEMFYINKYDLLSHISNANIKDPNYIYSLQGRINFVISVEPENEEFIRYKNEIDRIIKG

SEQ ID NO: 2032 - protein, 345 aa, Acinetobacter towneri
  source 1..345: note = Related to JACXZP010000005.1
MSYTIESVKTPKEWLIYFEDMGIKEEYISIYIEIIEKLYKNKNPIIFEIEHFSKLVGVEVDVLLSMIFSKKNFYRQFKIKKKLGGDRLITVPSPSLMMVQKWIYNNILIDKKIHYSAHGFNFNKSIITNAKMHVGHKVFLKIDLKDFFPSIPINWIINYFKQQGYPPKIAFYLASLCTLDNSLPQGAPTSPILSNILFYNLDKTLYKFSKKNNLTYTRYADDLVFSGDYISLKFRNFVIFLIKKYGFKVNSKKTSLKINAGQNIVTGILVKDSVFVPKKYKRKLRQEMFFINKFGILSHIATSNIRDPNYLYSLMGRINFVLSVEPNNEEFIEYQNKIKAIIKKG

SEQ ID NO: 2033 - protein, 346 aa, Acinetobacter wuhouensis
  source 1..346: note = Related to NZ_CP031716.1
MLYSIEPVKSPQEWRTYFDNIGLKEEYIEIYLQIIEELYRKKNPIIFEIEHFSKLVGVEVTVLLSMIFSKEKFYRQFKIPKKKGGERTITVPSPSLMLVQKWIYNYILINKKIHYSAHGFNFNRSIITNAKMHVGNKAFLKIDLKDFFPSIPIGWIVNYFKQQGYPPKISFYLASLCTLKDSLPQGAPTSPILSNIIFYNLDKVLYKFSKKNALTYTRYADDLVFSGKYISLKFRNFVIFLIRKYGFQINSKKTSLKVNAGQNIITGILVKDTIFVPKKYKRKLRQEMFYIKKFGLLSHIATTNIRDPNYVYSLMGRLNFVLTVEPENEEFIEYQNYIKRILKKAD

SEQ ID NO: 2034 - protein, 339 aa, Acinetobacter baumannii
  source 1..339: note = Related to CP077835.1
MDKKEIKKWTNYFLDVGLKDEYIIEYQDLITNLIKNDVPVIFEIDHLSKLVGINVSTLYAMIFSTEKFYRTFEIPKKNGGMRTITTPHKSLKLVQKWIHHNILKYKYVHKSAHGFVKNRSIITNALIHKESKVFLQLDIKNFFPSIPLNWIINYFYKLGYSKKISFYLAKLCCYENSLCQGAPTSPILSNLVFFALDKKLNHYADKNNIIYTRYADDIVFSGDNIPLSFKNFCIFLIKDFGFKINSKKTKLKIEVGQNIIAGIQIKDSDIWVPKKYKKKLTQELYYIQKYGLISHISKRRIKDPNYVYSLLGKVNFILSVEPGNTKFLEYKNLLNSIIK

SEQ ID NO: 2035 - protein, 339 aa, Acinetobacter sp.
  source 1..339: note = Related to NZ_VPDZ01000001.1
MTKHIAKNWTKYFEDIGLKDEYIEEYSEVIKKLVGNNVPVIFEIEHLSKLVGINVSTLYSMIFSTEKFYRSFDILQKNGENRRITTPFKSLKKVQKWIYQSILKQGYIHKSAHGFVEKKSIITNASVHKSSKVFLQLDIRKFFPSIPLSWVINYFHKLGYSKKLSFYLAKLCCYKESLAQGAPTSPALSNLIFFGLDKKLNNYAIKNNILYTRYADDMVFSGTEISLNFKNFCIFLIKKYGFKVNSEKTRLKINVNQNIITGVQIKNNNIFAPKKYKRELIQDLYYIKKFGLISHVSKKRIKDPNYVYSLLGKINFVLSIEPENLEFINYKNILKNIIE

SEQ ID NO: 2036 - protein, 338 aa, Acinetobacter cumulans
  source 1..338: note = Related to CP035936.1
MSNKAKEWVAYFNDVGLQEAYINEYGLVVEKLLKNKVPVIFEIEHLSKLVGINVKTLYSMIFSPEKFYREFEIPKKKGGTRKINAPFKSLKKVQQWIYINILKVKNKNAYAHGFLDGKSIITNAREHINSSVFLHLDIKDFFSSIPIGWIVNFFYSLGYSKKISFYLSRLCCFKDCLVQGSSCSPALSNILLVNLDRKLNKYALKNNLKYSRYADDLVFSGNYISLSFRNFCSFLIKNYGFKINTKKTRLKVNASQNIITGIQIKGNILSVPKQYKRKLKQEIYYIEKYGFISHVNKKKIKNPDYLASLIGRVNFVLNVEPNNLEFTEYKKILSNLIQ

SEQ ID NO: 2037 - protein, 340 aa, Acinetobacter chinensis
  source 1..340: note = Related to NZ_CP032134.1
MQLSQWETYFQDIGISEQYIDEYLEIISKLSKKKLPIIFEIEQFSKLVGIELNILYKMIFSPESFYHEFYIKKKKGGRRKIVVPFPSLLLIQRWIYKNILLKCTCHSNIHGFIQKKSIITNAKAHIGGRDFLKLDLQNFFPSISLNWVVRYFNELGYPKKISFYLARLCCYEEGLGQGAPTSPFLSNLLLFSLDKRLNNLAKKNESTYTRYADDIVFSGEKITKGFYSLVESIVGDFGLTLNESKTQLRKNKTQNIITGIVVVNDGIKIPKTYKKKIRQEIYYINKYGLMSHLSKIRNKNPTYLLSLLGKINYVLSVENDNQEFKDYQKKMENFIKNPLN

SEQ ID NO: 2038 - protein, 337 aa, Aliidiomarina iranensis
  source 1..337: note = Related to NZ_PIPJ01000004.1
MKLKSPKEWEGYIKSRGLEPELEKTLSAYASNLSSKNLPVIFELEHLSNILDIEHDEMRVMVNGSDWFYREFEIPKRRGGVRVIKVPYSSLMHAQYWLKEAILDKEFIHSKAHGFANGKSIKSHVECHCHSLHILKLDIKDFFPTFKKSWVANYFNQLGYAPNVAFYLANLTTDTVSLVQGAPTSPVLSNILFRKADRALNKIAVKYELSYSRYADDMCFSGNYIPKKLLRLVERILRYFGFQLNSRKTYLGPVNGCHITGIKVVDGQLKVSRKLKRELRKQIHFIGKYGLLSHVNKKRIRDVFFVERLMGQLNFWKFIEPEHEFPIEALSLLRQKL

SEQ ID NO: 2039 - protein, 364 aa, Belliella kenyensis
  source 1..364: note = Related to NZ_JAKZGR010000005.1
MRAANRKLFDHLLFLLTNMSKQKEINKWKTFFKNRGLSEEISDKYINYITKLLENRTPIIFEFNHLALLLGRQPFYLASVVNAPNNHYRSFKLKKRSGGFREITTPFPALLEMQYWIFNNILKNVSINPCAHGFAHKKSIITNATLHAGQNELLKLDLKDFFPSININRIIYVFKSLGYPNEIAFYLASICSYEESLPQGAPTSPVLSNIIAKQLDKRLINLAKKYNLKFTRYADDLTFSGKNIPAKFIEYIKVIIEEEGFDLNEAKTRLYKSNRKRIVTGISVLEKEIKIPREYKRNLRQELHFIFKYSFESHIKKKKIRKSNYLESLIGKVNFWLSVEPKNGFALDAKKRLFEIYKNYYPQQ

SEQ ID NO: 2040 - protein, 344 aa, Prevotella sp.
  source 1..344: note = Related to HF992628.1
MTSDAIIEKWNNFFTRKGINQTLHDKYIEYIKILVKNNVPIIFDFNHLRLLMGRSDLYFTSVINSPENHYRSFKLKKRNGGFREILAPYPALLEMQYWIYNNILKKIPISPYSHGFAHKKSIITNAKIHLGQKELLKLDLKDFFPSIKINRIIYVFKSLGYTNQVAFYLASLCSYNETLPQGAPTSPYLSNIIAKKLDKRLIRLSKKYKLHYTRYADDLTFSGDSIPAKLIEYINNIVNSEGFTLNSEKTRLYKHGGKRIVTGISVNGKELKLPKDYKRNLRQELYFIMKYGYESHIKKKKIRKVNYLNILLGKVNFWLSVEPSNKFALDAHSFLLETYKKHNK

SEQ ID NO: 2041 - protein, 339 aa, Dysgonomonas sp.
  source 1..339: note = Related to NZ_JAAKEL010000031.1
MAKDLIKEWYDFFTVKGIEPQLRDIYIDYISLLSENNVPIIFEFNHLALLLGRKQHYLASVVNSPENHYREFKLPKRKGGYREISAPYPALMEMQYWIYQNILKSIRIHSSAHGFINSKSIITNAKIHTGQTELLKLDLKDFFPSISLNRIISVFKNVGYPNQIAFYLAKICTYEECLPQGAPTSPCLSNIIAKNLDKRLMKLAKSLNLRYTRYADDLTFSGNKIPAKVIEYISTIIVDEGFVINQDKTRLYKNKGQRIVTGISVLEKELKLPREYKRVLRQELFFIEKYGLKSHLAKKKQRKANYIFSLIGKLNFWLSIEPENQFALKNIEKLKLILN

SEQ ID NO: 2042 - protein, 340 aa, unidentified
  source 1..340: note = Related to JAIPGO010000099.1; note = Candidatus Cloacimonetes bacterium
MKDDQYSQWKKYYESRGILPEIQDKLLNYAKIHIDNNTPVIFNFEHLTLLLGREKNYLSSVVNSPDSHYRKFKIKKRSGGEREITAPYLSLLEMQYWIYRNILINVKIHYAAHGFAQDKSIITNSRNHLGQKHLLKMDLKDFFPSIKLNRIIYIFKSLGYPNIIAFYLASICSYKGHLPQGSPTSPILSNIVSITLDNRLVKFARKMKLRYSRYADDLTFSGDKIPTNYIKYITDIINDEGFEVNDTKTKLYLKAGKRIVTGISVIGNDPKLPREYKRKLKQELHYIFTYGIGSHMAKKKIKKINYLYRIIGKVNFWLNIEPDNEYARNAKAKLLLLIDN

SEQ ID NO: 2043 - protein, 339 aa, Dokdonia sp.
  source 1..339: note = Related to NC_015496.1
MSNKETFNKWQSYLESRRVQEDVKEQYLSYIRILLDKNVPIIFTFDHLSLLLGRSKNYLASVVNSPDNHYREFKIKKRSGGFRKITTPFPALLEMQYWIYNNILKKIPIHSSAHGFTHKKSIITNSKIHAGENHLLKIDLKDFFPNIDINRIIFIFKELGYPNIIAFYLAQICCFDGTLPQGAPTSPILSNIVTRRFDKRLIHLAKKFNLKYTRYADDLTFSGSTISAIFISYVNDIVIDEGFVINDSKTRLYQKKSKRIVTGISVIEKEIKIPRNYKRDLKQELHYIFKFGLKSHMSKNKIRKANYLFVILGKVNFWLSVEPKNEYALEAKTKLKELI

SEQ ID NO: 2044 - protein, 350 aa, Chryseobacterium vrystaatense
  source 1..350: note = Related to NZ_JPRI01000002.1
MTKKEILREWRLYFENRQVRKDIYEKYIVYIGVLLENNVPIIFNFDHLCLLLGRSNEYLSSVINCSSNHFRDFEIKKRSGGHRAITAPYPALMEMQYWIYNNILKAIPINSSAHGFTHKKSIITNSNIHKGQKELLKLDLKNFFPSISINRIIYIFKQLGYPNNIAFYLSSICCYDNFLPQGAPTSPILSNIVSRKLDKRLITLAKKFALKYTRYADDLTFSGDIIPAKFIDYVTAIVCDEGFEVNINKTRLYKSKGKRIVTGISVSGDVIKVPRDYKRKLKLELHFIKKYGLESHIAKKKIRKYNYLFSLVGKVNFWLSVEPKNQEALDYQILLNEYVKKIQQPLDITL

SEQ ID NO: 2045 - protein, 364 aa, unidentified
  source 1..364: note = Related to JAGPCT010000083.1; note = Saprospiraceae bacterium
MLKHKKEVAHHLFLDMTKNQIYESWKCFFIERGLDEKYSRPYLVYIKKMLSNGLPIIFETEHLSLLLGRSASYLNSVAFSPSSHYRQFKLKKRSGGFRTIDVPYPALLECQYWIYRNILSVVPLNYCAHGFVPKKSIITNAKVHLGQNVLLKLDIEDFFPSISKDRVIGVFNFLGYPPKVSYFLASLCCLNECVPQGAPTSPTLSNIISYNLDKRILAFSKNFELKYTRYADDLAISGKNLPTKYIDYLRVIVEDEGFKINVSKTQLFTRQSKRILTGVSIGSGKLKAPKEYKRVLFQELFYIKKFGLNSHISKMKIRNPNYIQSLVGKLNYILSIEKDNFKAINYLNYLKENYNSQIIKIDIY

SEQ ID NO: 2046 - protein, 350 aa, Flagellimonas sp.
  source 1..350: note = Related to NZ_JACVMN010000002.1
MTNHKIIYNKWEDYFSNRGLEKNLLDSYLVYIDGLLTNNLPIIFESEHLSLLLGRNEVYLNSVVFSTELHYRDFKLRKRKGGFRIISVPYPALLECQKWIHKNILSKVKISPYAHGFAKKKSIVTNARKHTNQEHLLKIDLKDFFPSIKKGRVIAMFCKLGYSTEVSFYLASICCKMDCLPQGAPTSPSISNIIAKSLDNRLFALSQKFEIRYTRYADDLAFSGGNIPARFIDYVTEIVTTESFEINNSKTQLHKSKGKRIITGVAVNGEIVKAPKSYKRKLFQTLYYIEIFGLNSHRTKLKIRNPNYLESLIGKLNYVLTIEPDNSKAKNYLTMLIEIDKSRTHNSVYK

SEQ ID NO: 2047 - protein, 346 aa, Nibribacter sp.
  source 1..346: note = Related to NZ_CP047897.1
MSKKRILSNWSNFFEQRGIPEDIREIYLRYIKKLLVKDVPIIFDFNHLSKLVGRQQWYLASVVNNTSSHYRTFNLKKRSGGFREISVPYPALLGVQYWVYKNILQKIPINNSSHGFAKNKSIITNSKIHLGQSNLLKMDLKDFFPSIHLARVIKVFKALGYTTKVSYYLASVCCINDCLPQGAPTSPILSNIISFDLDRRLYLFAKKFNLKYSRYADDLTFSGENINVKMIHYISEIIVSEGFIVNDKKTRLHKESAKRIVTGISVAGSELKLPKKYKRDLKQELYYINKYGIHSHVSSVNIKHTNYIDVLIGKLNFWLSVEPGDEFVVEQLKMLYSIKYPESIPK

SEQ ID NO: 2048 - protein, 341 aa, Chryseobacterium sp.
  source 1..341: note = Related to PCOU01000016.1
MSKKDLFFWNSSFTKAKINDEIKQNYLRYIEVLLNNKVPIIFDFFHLTLLLGRNSKYLSSVVNSNISHYREFEIPKKKGGTRKITAPYPALLDCQRWIYNNILKNIKIHPCAQGFTKKKSIITNAKIHVNQDEFLKIDIKDFFPSITINQVINIFKSFGYTQKVSFYLASICCYDQNLPQGAPTSPILSNLVAITLDKRLFAFAKKFDLKYTRYADDLAFSGKKITSKHLEYIKEIISECGFEANDEKTFLQQKKSKRIITGISISDNTIKVPKQYKRKLKQEVHFIRKFGALNVIRRNKIKNPNYLYSIIGKLNFWMSVEPNNQFAKKAYNDLKQFINYN

SEQ ID NO: 2049 - protein, 339 aa, Myroides sp.
  source 1..339: note = Related to JACHTC010000027.1
MSNKIIQGWKSFFIKAKISVEAREIYLKYISTLLSNKVPIIFDFYHLTLLLGRNSEYLASVINSNTSHYREFQIPKKLGGFRTILAPYPALMDMQNWIYKNILNDVKIHPCAQGFTNKKSIVTNAKIHINQKEFLKIDLENFFPTITINQVINVFKNLGYTHKVSFYLASICCYNKNLPQGAPTSPILSNIIALTLDKRLFALAQKFNLKYTRYADDLAFSGDEINLKHIDYIKNIINECGFTLNEAKTVLQKNKNKRILTGISIAGETVKVPKNYKRKLKQEVHFIRKFGILNYIRRNKIKNPNYLYSILGKLNFWLSVEPKNEFAKKAYNDLKQQIQ

SEQ ID NO: 2050 - protein, 342 aa, Butyricimonas sp.
  source 1..342: note = Related to NZ_NFHW01000007.1
MSKLKLYNYWYSNFEKSGIKSEFVEKYMAYVSKLLNNNVPIIFDFNHLCLLLGRNGHYLASVVNSNVSHYRIFQIPKRSGGHRNISAPYPALLECQSWIYENILAKIKIHPAAQGFTTKKSIITNAKIHINQNHFLKIDLKDFFPSITINQVINVFKSIGYTNKVAYYLASICCCENVLPQGAPTSPALSNIVGKTLDKRLYSFARTYDLKYSRYADDLAFSGEQIPSKFIEYISDIIRSCGFSVNDRKTILQQQKNRRRIITGISISDDAIKIPREYKRKLKQEIHCIRKFGISSHIRRQKIKKTDYLLCVIGKVKFWLSVEPENQFATHALNDLLNIAQQ

SEQ ID NO: 2051 - protein, 354 aa, unidentified
  source 1..354: note = Related to JAFWZH010000322.1; note = Clostridia bacterium
MNTREQNIILKNWEQFYNSRGVEPELIKVYMSYVEKLVNQSLPPIFDFRHLSLLLNINEYDLASIVNSPSNYYRTFDIPKRNGGFRTITAPYPSLKNIQKWIYHNILSNIKIHGCAHGFATSRSILTNANVHINQKCLLKIDLKDFFPSIPMSYVLQLFKSLGYAPKVAFYLSSLCCYDECLAQGSPVSPAISNIVAKHLDRRLYRIAKKYNLNYSRYADDIAFSGESINVKFIEYIKEIITDCGFFVNENKIRLYKEYGNKILTGISLATGVPRLPRDYRRSLEKELFFIYKYGIKGHISHNKIRKSNYLESIIGKVRYWLMIEPNNTFAQQMYEKLYAEYKLQLNTSDIEVL

SEQ ID NO: 2052 - protein, 348 aa, Prevotella copri
  source 1..348: note = Related to CP042465.1
MTDLQLQKMMELWKAYYRSRGIAPEFANQCLAYARSLLKQDMPVIFDLPHLCLLLGLDVSYLHSIVYGADKHYRNFFIRKKSGGVRELSAPHYTLKYVQTWIYENILSKVKVNYCAHGFCPKKSIVTNARVHVSNKYLLKLDLKDFFPSITQNQVINVFRSLGYSNHVAFYLGSICCVDGHLPQGAPTSPALSNIIAHHLDNRLLGVAKKMGYKYTRYADDLAFSGDLIKPVFVQYVVRIISECHFIVNASKVKLYKGNGAKILTGVSLANGQIRVPREYRRKLEQELYYISNYGLGEHIRRRRIKNPHYLESVIGKTEFWLMLEPENEFAKQSLEYLRALYNQKYNQ

SEQ ID NO: 2053 - protein, 347 aa, Sulfurovum sp.
  source 1..347: note = Related to WTAE01000072.1
MIKKYPHEWKKYFDSRCIPQNVQDEYLSYIKNLHDQDIPIIFEIEHLALLLGMEISVLNRMIFGTKSFYRTFEIPKKSKDSVRIIDAPYPSLLSVQQWILKNILKNIHIDDSAHAYMKKKSILTNVTPHLNNKVLLKIDLKNFFPNIEKNRIIAVFLKLGYTQNISFALASLCTLNNHLPQGAPTSPTLSNIIAYRLDRRLSSLCKKSDMVYTRYADDMVITSKYISLKTKDLIITIIEDCGFIVNKDKTYLSTNQNKRIITGISIQDGTTKIPRKLKREIKQEMYYLNKYGFYSHINKRKITNPFYLERIRGQILFWNFIESDSTLAKEMLSDINRIIEIVENLSQ

SEQ ID NO: 2054 - protein, 343 aa, Aliarcobacter butzleri
  source 1..343: note = Related to NZ_CABVRY010000015.1
MNNTKIISIKEWKSFFKSRGIEQSLINEYISNIEKLKDKNLPIIFEIEHLSYLVNINIEILNKMIFSNKSFYQEFKIPKRNKGEFREIHAPYPSLKCVQDWIYNNILQYAKIHYNAHGYVKNKSIKTNAKKHLNKKELFKIDLKDFFPTIKIPRIIEQFKRLGYSKNMSLCLATLCCQNDYLTQGSPTSPALSNLVAYKLDKRLTALAKRNNLVYTRYVDDIAISGDDIHHFLQKLICEIIEEEGFIVNYEKTYLNKENSNKRLLTGIIIKDDKLTIPRETKRKLKQEIYYISKFGIKSHLISINNKNPYYYESLLGKLQYWKFIEPTSKDVDKLIKILNDSI

SEQ ID NO: 2055 - protein, 351 aa, unidentified
  source 1..351: note = Related to JABMQT010000738.1; note = Lentisphaerae bacterium
MDEQIDSTADRWVEHLGGTIKSRPFREACTAYASRLVENGFPVVFNLQHLAKVTGLKTRVVGSQVFRTERYYRKFSIPKRTGGLRTIHTPYPSLLLCQRWINYRVLTGIRVHKHAHGFVSGRSVLSNALPHLQKRWMLKMDIKDFFPSISIRRIVPIFRRCGYSRDVSYFLSRQCCLEDVLPQGAATSPTLSNIVLKRTDSRLTALAESFAATYTRYADDLTFSGDYLPARIIDIVSRIVTDEGFRVNTAKTRLVGPKGRKIVTGVSVSGASPRLPRQTKRVLRQELFHLHTKGYAKHTAVRQILDPLYAERLLGKLSFWLQIEPDSPFARQALDWMAEVRGTLQVLGRHT

SEQ ID NO: 2056 - protein, 342 aa, Sneathiella sp.
  source 1..342: note = Related to NVRR01000003.1
MEKDEIQLWNKNISEAVSSKRWVKAYSKYIDVLSENSVPVIFEIDHLAEILGLRSDLLVRAVNSVERFYRPFEIPKSSGGTRKINAPYPVLLDIQRWIGAHILSQVRISEQAHGFVKNRSIIRNAREHLGKECMLKMDISDFFPAISLKRVITIFLFLGYSPSVSYYLSVLCCLENQLPQGGAASPQICNIIATPLDRRLMSLALAYSLNYTRYADDLTFSGRYIPIKFIKIVESIASDEGFEINNKKTKLMRAKGRRIVTGISIGTGELKLPKSTKRSLRQEVYWLERNGIFAESGRDGIFDPLYVDRLLGKLNFWRSIEPENTYVIEKIDRLKELIISES

SEQ ID NO: 2057 - protein, 350 aa, unidentified
  source 1..350: note = Related to JAGQOP010000117.1; note = Phycisphaerales bacterium
MSAKNRLGSSAWRKHFDSIGCPSDLKSTYLAYIDRMTGRGFPPILDFGHLASLLGRTPAYLASAINGTKCHYRQFVIPKRRGGARTISAPYPALLECQQWINREILEHIDVHSAAHGFRRKRSIATNASQHLNKACLLKMDIKDFFPSIKLRRVIAVFRDLGYPKNISVYLGRLCSLDGQLPQGAATSPAMSNIIAKQLDCRLLGVAKKWRLRYTRYADDLCFSGPHISIQFPKLVSRICEEEGLQINASKTQLCRSKGRRIVTGLSVSGERLRVPRAFKREVRQEMHYIKVHGYWSHVSKRKIRNPFYLQSLYGKLMFWRWIEPDNSFVNSAFDVLRNLVHENGEFEKD

SEQ ID NO: 2058 - protein, 347 aa, Burkholderia cenocepacia
  source 1..347: note = Related to NZ_CADEUM010000003.1
MIEKNINIEPWANLIARRVRRPSIRTAALKYIERLIAVGVPPIFDFEHLSELVGVHRAILAGFVESAGSFYRTFKIPKQSGGFREISSPVPSLLMVQRWIKENILDEIPVHDAAHGFVKGKSVVTFAQPHVNKAALLHIDVSDFFPSIDLKRVYVLFRNIGYAPNVSLFLARLCCVNGRLPQGAPTSPSISNIIFSSIDARLIGLGCVAKLDYTRYADNIVFSGNYINIKFLDIVSEILSENSFKVNRKKTFLSTKKGKRIIAGISVSGERISLPRDTRRNLRQQVHGLLKFGFFEHTAHIGDLDPIYAERVLGRLLFWKYVEPNNSYVASSIQALRGMQMDLDSQV

SEQ ID NO: 2059 - protein, 377 aa, Bacteroides sp.
  source 1..377: note = Related to NZ_FQXY01000011.1
MDGILITILIITGFLIYKMISSSRKQEGYKRWKATASGGKEESASKSESGHGAWLRRALGVTAPQSPYVPKFDDESVVWCASLLGVEANKLKEILENIPTHYHEFWVRKRRGGYRMISAPLKELQSIQTTINSRILSSVTTIHPAAVGFRCGRSVVDNASPHLGKRYVLKMDIHDFFFSIRSPRVKATFEKMGYPANVAKVFRTLCCLHNSLPQGAPTSPALSNIVGYEMDKKLAALAAEYGLTYTRYADDLTFSGDVFPKEQIIPRIKQIIRDEKFEPNHKKTRFLHEYDRKIITGVSVSSGVKLTIPKTRKREIRKNVYFILTKGLVEHQRRIGSNDPAYLKRLIGELCYWRSIEPDNTYVSDSIIALKRLEKHY

SEQ ID NO: 2060 - protein, 376 aa, Bacteroides finegoldii
  source 1..376: note = Related to VWAM01000011.1
MDGILITIIVITAFLVYKMISSSRKQEGYKRWKATSSGKEEKTTKVKWEHGAWLRHALGETVPRVQYVQRFDESAVVWCANLLGVETAQLKEILRDVSEHYREFWMRKRKGGYRMISAPDKELQSIQTTINSRILSSVTMIHPAAVGFRSGHSVVDNASPHLGKRCVLKMDIHDFFFSIRSRRVKKTFEKIGYPENVSKVLGVLCCLYRHLPQGAPTSPALSNIVGYEMDKKLAALAVEYGLTYTRYADDLTFSGDVFPKEQIIPRIKQIIRDEKFEPNHKKTSFINEYGRKIITGVSVSSGAKLTIPKARKREIRKNVYFILTKGLAEHQRRIGSSDPVYLKRLIGELCYWRSIEPDNAYVSDSINRLKCLEKGY

SEQ ID NO: 2061 - protein, 376 aa, Bacteroides caccae
  source 1..376: note = Related to VVYG01000002.1
MNKILITILIITGFLIYKMISSSRRQEGYKRWKATGGGKEEKVDKTKWERGSWLSHAMGVTTPVAPYTPRFEKEAVIWCAALLGVEVNRLEEILNNVSGHYQEFWMRKRSGGYRMISAPDKDLQAIQSTIYSRILSSVTIVHPVAVGFRCGRSVVDNAAPHLGKRYALKMDIHDFFGSIRSPRVRQTFKKIGYPENVSKVLGALCCLHRHLPQGAPTSPALSNIVGYEMDRKLAALAAEYGLTYTRYADDLTFSGDVFPKEQIIPQVKRIIRDEKFEPNHKKTHFMNQSSRKIITGVSVASGVKLTIPKSKKREIRKNVYFILTKGLAEHQRRIGSHDPAYLKRLIGMLCYWRAIEPDNTYASDSIAALKRLEKGY

SEQ ID NO: 2062 - protein, 377 aa, Bacteroides faecis
  source 1..377: note = Related to CP081916.1
MDGLLITILIVTGFLVYKMISSSRKQEGYKRWKATGSGDTANEETAGNKWKHGAWLRHALGVTTPKARTYPVFDEEAVVWCAGLLGVEAVRLKEILQDVSSHYREFWIRKRKGGYRMISAPDKELKSIQDTIYHRILLPVNVHPVATGFRRQHSIVDNVRPHLGKRCVLKTDIHDFFLSIRSPRVKQTFENIGYPKNISKVLGELCCRRRHLPQGASTSPALSNIIAYEMDRKLAAMAEEFGLAYTRYADDLTFSGDVFPKEQVLVRVKEIIREEKFEPNHEKTRFLNEYDRKIITGISVSSGVKLTIPKARKREIRKNVYFILTKGLAEHQRRIGSHDPAYLKRLIGTLCYWRSIEPDNTYVSDSIAALKRLQKGD

SEQ ID NO: 2063 - protein, 394 aa, Bacteroides stercorirosoris
  source 1..394: note = Related to FQZN01000002.1
MNTTIYISKYSSSSFFIPIDTMNGILIAVFIVTCLLVYKIISSSRKQEGYKRWKAGNRDNTEHTANAGTTRKGWFSQLFETSAPRISPWFKEEAISQCANLLGVEEVKLKEILKDVSAHYREFWIGKRRGGYRMISAPDDELKPIQGAINHRILSFVNVHPAATGFRCKMSIADNVRPHLGKQCVLKTDIHDFFSSIRSPRVRNTFEAMGYPPDIAKVLGTLCCLHRCLPQGASTSPALSNIISYEMDKKLSALAAKYGLTYTRYADDLTFSGNVFPGEQILSQVKQIVREEKFELNHKKTRFLKEHSRKIITGVSISSGVKLTIPKARKREIRKNVHYILTKGLAEHQRRIGSHDPAYLKRLIGTLCYWRSIEPDNAYVSDSITALKSLEKKY

SEQ ID NO: 2064 - protein, 373 aa, Bacteroides cellulosilyticus
  source 1..373: note = Related to CP072251.1
MNGILIAVLIVTGLLIYKIISSSRKQEGYKRWKAGNRSNTEDTTDTETTRKGWFSRYFGTSALITIPWFDEEAVVKCANLLGVEEAVLKEILKDIPGHYREFWIGKRKGGYRMISAPDKDLKAIQDTINHRVLSFVNLHPAATGFRCKMSISDNVRPHLGKPYVLKTDIHDFFGSIRGLRVRKMFENMGYPPKIARVLAALCCVRRCLPQGASTSPALSNIISYEMDKKLAALATEYNLVYTRYADDLTFSGDVFPAQQILPLIKQIIREEKFEINHKKTRFLSGHKRKIITGVSISSGVKLTIPKAKKREIRKNVHFILTKGLAEHQRRIGSHDPAYLKRLIGILCYWRSIEPDNAYVSDSIAALKGLEKEY

SEQ ID NO: 2065 - protein, 371 aa, Bacteroides fragilis
  source 1..371: note = Related to SZUU01000003.1
MELLFCIVTVITALLVFIIIRSSKSQEGYKRWKAGNYVSDTPYAKEKKTSALFPRSLFGKDANFFGAKRFKAEAVSWCANLLAVEEDALREVLDYVPRQYKLFYIRKRSGGFRAITAPEDKLRVMQQTIYQRILLLAHVHPAVTGFCPGKSVADNAQAHLGRKNVLKVDIHDFFPSIRSPKVRAAFREMGYSGPIAKVLGELCCCYKCLPQGAPTSPALSNIIAYPMDKKMMALADEYGLVYTRYADDLTFSGDYLPKDEVLARIHGIVREEGFTINAKKTRFLSEYKRKIITGVSVSSGEKMTIPKVKKREIRKNVHYVLTKGLVGHQEHIGSTDPVYLKRLLGNLCYWRSIEPDNRYVSDSITALKRLM

SEQ ID NO: 2066 - protein, 371 aa, Bacteroides fragilis
  source 1..371: note = Related to CP037440.1
MELLLAIVIVVTGWLVFSIIRSSKGQEGYKRWKAGNYAGENPYAKEKKESVSSLKNIFGRKAVAFGSKRFDAGAVSWCASLLGVKEDTLREVLDYVPRQYTQFYIKKRSGGVRIITAPQGQLRVMQQTIYQRVLLLANVHPAVTGFCPGKSVSDNARVHLGRKNVLKVDLHDFFPSIRSPKVRATFREMGYSRPIAKVLAELCCCNRCLPQGAPTSPALSNIIAYPMDKKMMALADEYGLVYTRYADDLTFSGDFLPKDKVLSRIDQVIREEGFTMNVKKTRFLPEHKRKIITGVSVSSGTKMTIPKTKKREIRKNVHYVLTKGLASHQEHIGSTDPVYLKRLLGNLCYWRSIEPDNRYVSDSIAALKSLM

SEQ ID NO: 2067 - protein, 370 aa, Bacteroides fragilis
  source 1..370: note = Related to CP036550.1
MELLLGIVIVVTCWMVVRIIRSSKNQEGYKRWRAGNYASENPYAKEKASGPLSQGFFSKRIRTSGARRFDDGAIRWCANLLATEESRLREVLDYIPRQYTCFHVRKRSGGFRYISAPAGDFRSMQQTIYHRILLLANIHPAVTGFCPGKSVSDNARVHLGRKNVLKVDLHDFFPSIRSPRVRAAFREMGYSRPIAKVLAELCCLRCCLPQGAPTSPALSNIIAYPMDKKMMALAGEYGLVYTRYADDLTFSGDYLPKDEVLVRIHRIIREEGFTMNVKKTRFLSEHKRKIITGVSVSSGKKMTLPKVKKREIRKNVHYVLTKGLVGHQEHIGSTDPVYLKRLLGSLCYWRSIEPDNRYVSDSITALKRLM

SEQ ID NO: 2068 - protein, 359 aa, Tannerella forsythia
  source 1..359: note = Related to RQYS01000018.1
MTVILVTILIFICGMILLIIREKKKEKDLLNRHLPNDNSFRNGSVFYHTGICRQAVYDPEALKWCATFLNIGEKELSSFLHHPSEWYSLFWLAKRGGGYRMIAAPKKELKAVHRTIYEKILINSEIHPSATGFRRNKSIVENVRPHLGNAQVLKVDIHDFFGSIRKHTVRRTFKQLGYESGVAKILAALCCKSGRLPQGAPTSPALSNIIVAGMDEQLAAISRSVGLTYTRYADDLTFSGNLSSHHAFLAQVEKVVAEHKFALNRKKTRFLDMSHRKIITGISVSSGTKLTIPKVFRREIRKQVYHVLTKGLAEHQKYIGSSDPAYLKRLIGRLSYWHAVEPDNTYVIRSLKALKELNH

SEQ ID NO: 2069 - protein, 388 aa, Dysgonomonas sp.
  source 1..388: note = Related to JAEPKU010000005.1
MNINIVILIIVLGLWLLYKLFSSGRKDDYNRNTSSYNRNADNYDKGEEKKKNHRKFIFSFLQREKNKTEVKAKRQGFLTRIFSTPLPFDDAAITWCANFLIVEKKTLIEILKDTSDHYTHFKLGKRSGGYRTISAPNKTLLNIQRVIYKRILLSVNLNPASMGFRQNISVAHNAKAHLGNKQILKVDIVDFFGSIKKQRIIETFGKIGYPSNISEVLAELCTLEGKLPQGAATSPTLSNIVAHEMDVKLVSIAQKNNLTYTRYADDLTFSGENIFFELIFSEINNIVREGKFIIQRKKTRFLTEKRRKIVTGISVSSGKKLMIPKAKKREIRKNVHYILTKGLAEHQRFIGSTDPSYMKRLMGYLNFWLMVEPDNEYVKKSITALKKI

SEQ ID NO: 2070 - protein, 388 aa, Dysgonomonas gadei
  source 1..388: note = Related to NZ_GL891979.1
MNTILVILIIALGLWLLYKLFNSGGKDDYNRNTSGYNRNADNYDRGETKKENNKKSIFSFLHKKKSNTEKKAKRQSIFARIFSEPLPFDDGAITWCANFLIIDKNTLIGILKDTSDHYSHFKLGKRSGGYRTISAPDATLLNVQKIIYKRILLSVNVHPASMGFRQNISVTHNAKTHLGNKQILKADITDFFGSIKKHRIIKAFRRIGYPANISQVLAELCTLENKLPQGAVTSPTLSNIIAYDMDMKLASVAEKSNLTYTRYADDLTFSGENISFELTLSEIDRIIREEKFVLQRKKTRFLTEKKRKIVTGISVSSGEKLMIPKAKKREVRKNVHYILTKGLAEHQRFISSTDPSYMKRLMGYLNFWLMVEPDNEYVKKSIAALKKV

SEQ ID NO: 2071 - protein, 360 aa, Apibacter muscae
  source 1..360: note = Related to SELI01000017.1
MNIILVVFFIVLMLWLLFRLLNFDGNNVDVEKKENGSVLKAKKQSFLARIFSKPLPYDDEAITWCANFLIIDKNTLISILRNTSAYYSHFKLAKRSGGYRTISAPNEAMLNIQRIIYKRTLLTVNIHPASMGFRKNFSVTHNAKAHLGNNHILKVDLFDFFGSIKKDRVIKTFEKIGYPVNISQVLAELCTLGGKLPQGAPTSPTLSNIIAFNMDIELASIAQKNSLRYTRYADDLTFSGTDIAFEPLLTDIDVIIRKENFIIQRKKTRFLTEKKRKIVTGVSISSGQKMTIPRAKRREIRKNMHYILTKGLVEHQRFRGSTDPVYLQRLMGYLNFWLMVEPENEYVKRSIAALKKLKIT

SEQ ID NO: 2072 - protein, 381 aa, Dysgonomonas sp.
  source 1..381: note = Related to NZ_OEPV01000016.1
MNTTLIILLICLGLWLLYKVLNYRGGDVDNYNRNIDSYDKGEKNKSKSRIFSSRKSDSDFSSNPAKKQGFFARLFSVQLPFDDEAITWCANFLIIEKDVLIGILRNTSQHYSHFRISKRSGGVRIISAPSPALMSLQKTIYKRILVSVNIHPAATGFRSNTSIVQNAKAHLGKSQILKVDITNFFGSIKKRKVIKVFENIGYPPNISQVLAELCTLDNKLPQGAPTSPVLSNIIASDVDVKLAALSQKKELSYTRYADDLTFSGSNIDFETTLAEIDEILFKERFIIQRKKTRHITEKRRKIVTGISISSGEKMTIPKSTKRELRKNVYFIQTKGLAEHQRFIGSTDPTYLKRIIGQLSFWHMVEPDNDFVKKSLSALKKL

SEQ ID NO: 2073 - protein, 390 aa, Dysgonomonas hofstadii
  source 1..390: note = Related to NZ_JACIEP010000005.1
MNIALVILIIFLVLWIFYKLLNYSGGDEYSRDTRNYNRNPDNYDKGEEVKTTPKKSIFSVFSREKKVKQAKRQSFFERIFSAPLPFDDAAITWCANFLAVEKNELIDILKNTSIQYSHFKLGKRSGGCRTISAPNNVLLNIQKTIYKRILLSVSIHSAATGFRQNVSVIHNAKVHLGKTQIIKVDLADFFGSIKKPRIITAFEKIGYPSNISKVLAELCSLDGKLPQGAATSPTLSNIIAYDMDVKLIALARKHNLTYSRYADDLTFSGEDIAFELFLSEIDGIVREEKFVIQRKKTRFLTENKKKIITGVSVSSGEKLTIPKSKKREIRKNVHYILTKGLAGHQKFIGSTDPSYLKRIVGYLNFWLMVEPDSEYVKKSLIALSKLQGKS

SEQ ID NO: 2074 - protein, 387 aa, Dysgonomonas sp.
  source 1..387: note = Related to JACMIC010000003.1
MNILLGILAIALLYLLYKLFYKKRGDEYSRDTSGYDRGTNSNEKEERPKDQPKKSVFSFFGRKNIEKPQIAKRQGLIARLFLAPLPFDDKAITWCANFLVIEKNILIDILRDTSKYYSRFRLGKRSGGFREISAPVTALLNIQKTIYKRTLLSANVHTSCTGFRQNVSVVDNAKPHLGKPHVLKVDIVDFFGSIKKSRIIKVFESFGYPSNISQVLAELCSFEGKLPQGAATSPALSNIVAYDMDVKLMSIAQKHNFTYTRYADDLTFSGENILFEEVLSEVNNIVKDEKFVIQRKKTRFLTEKKRKIVTGISISSGKKLMIPKSKKREVRKNVHYILTKGLTDHQRFIGSTDPSYLKRLLGYLNFWLMVEPDNDYVKKSIASLKKL

SEQ ID NO: 2075 - protein, 360 aa, Dysgonomonas sp.
  source 1..360: note = Related to QVMQ01000008.1
MDILIYFAIAIIIIWAIFKLLNYDNSAEKDKTRINNKPQSPGLWQRITAPHVPYDNQSLSWCSKLLAVDVVELKKILAYRDIHYKSFRIGKRSGGYRTISAPNEQLLNIQKTIYNRILLPVGLHPAATGFRKDTSIKDNAKPHLGKRLVLKMDIVDFFGSIHEYRVRKIFQAIGYPVNVSDVLAALCCLRQRLPQGAPTSPALSNIAALEMDKKLAALATKYNLTYSRYADDMTFSGDEFEKDKLIKIVTKAVQSENFAVKRSKTRYMGEKQRKIVTGISISSGEKMTIPKSKKRQVRQQVHYILTRGLDAHQRHIGNNDPAYLKRLVGYLNFWLSVEPENRYVRNSIKALAKIKTVGIV

SEQ ID NO: 2076 - protein, 387 aa, Dysgonomonas sp.
  source 1..387: note = Related to QVMN01000003.1
MTGLVIISVAVIIIWLIYKYSRKEDDYSRTTDHYNRNPKGYNKEINTSPSYANNRKHSTPPPKVEKKGIFSQLFERKPSLPFDDKAITWCANFLSVDENALRLILAYQSNYYKKFLLGKRSGGYRTISAPQEPLISIQRTIYRRILAPVNIHPAATGFRHKKSVADNARPHLGKDYMLKVDIIDFFGSIKRDTIRKTFQKIGYPLNIAEVLTFLCCLRGQLPQGAPTSPALSNIVAYEMDQQLYALATENNLTYTRYADDITLSGNSLAKDEILPAIQRIVGEARFRIKHKKTRYMTPNRRKIITGISVSSGEKLTIPKTTKREIRKNVHFITTRGLNRHQQHIKSQDPSYLKRLIGQLCFWHSIEPQNEYVQKSLDVLKKIEKRIR

SEQ ID NO: 2077 - protein, 363 aa, Tannerella sp.
  source 1..363: note = Related to MIQD01000015.1
MTTTLLTTLAILFGILMLVLTLREKQRERRKLSGSTPDAPYRQQPPPANPPSTDRDPLNDIYGADAIARCAAQLCTTEGELRDVLRDIRWAGYTTFWMAKRRGGYRNIEAPNPHLKAIQRAILDRLLTPLPVHTAATGFRPGLSIADNARPHLGRRRALKTDLHDFFGSIRRPAIRRVFRDMGFDAHITKVLVDLCSHRNRLPQGAPTSPALSNLVAAKMDERLTALSLRRGLTYTRYADDLTFSGDSFNRNELIADIKHIAACDGFTLNAKKTRLMASSRRIVTGLSIGSGEKLTLPRERKREIRKNVHFVLKYGVTEHRERIHSSDPAYVKRLIGELCFWRSIEPEHPFVNRALRQLRALR

SEQ ID NO: 2078 - protein, 343 aa, Prevotella sp.
  source 1..343: note = Related to JAFPFX010000010.1
MKEHYQIWLKAIEESNTMSENDKNAFSKVVIALSKSGAPVIFNVKHLALLIGVDFRALKRMLYVRDRFYRSFSIKKRNGGERLIEAPYPSLKMVQRWILDNILVPSAFVHPCSVGFISKKTITDNARPHLGHSVLLKMDIKDFFPSVTEELVRSYFSNLGYRSDLASTLAYLCCKDGRLPQGSPTSPMLSNVLFYEMDNQLSKIAFWDGLSYTRYADDLAFSGDRIRISIIDNVAAIVLKYGLRINNEKTRRSGSTSRKIITGVSVSSGEKLTIPREVKRVIRQKVFYVLKYGLTDHLKHIQSRDLLAGYRLLGLLAYWHSVEPENKYVLDSSKALGEMLRGE

SEQ ID NO: 2079 - protein, 355 aa, Apibacter raozihei
  source 1..355: note = Related to NZ_CP034930.1
MVWKLLKSLFSTSFHKEDVPDVHADTQVQNNKINSKSLRPSVEYLLTKDLGHLCELLEIDNKTQLAPILLHPEEYYRTFRIPKRNGKSRLISAPFTPLYRIQKKIYEKILIHARVHSAAKGFCINTSIVHNAKEHLHAKDLLKVDIRNFFPSIHQSRVVAIFRNLGYEYTLAYQLAYLCCLNGKLPQGSPTSPALSNLALLRLDSKLSEIAGNRQLIYTRYADDLSFSGNILSKNELLAEISKTVQEEKFILNKKKTRFITGAKRKIITGISISSGKLTIPKSKKREIRKVIYYIKTRGIAKHLLHINSKDAEDWYLEKILGYLSFWRAVEPENAYVLQSVKYIQSLRKQLLYKK

SEQ ID NO: 2080 - protein, 341 aa, Dysgonomonas sp.
  source 1..341: note = Related to NZ_OEPV01000002.1
MNEQQNNIEIWYHEIDKANDLTSRQNSYAKKYVATLLKNNAVVIFDLYHLACLIGIKYHILLKMSHSSKHFYYDFTIKKRNGDDRVISAPFPSLKYTQKWIYQNILAKAPISPHAKGFVPNLSLLNNAEPHLHQNAILQMDIANFFPSISWKRVYNVFKNIGYNNRISAALTNLCCKHNSLPQGAPTSPILSNIILSKLDKRLSKLAEKHSLTYTRYADDITFSGYIIPNELINIISYIIEDEGFIVNNNKTRIARGNKKKIVTGISVNSEYLTIPRKKKREIRQAIYYIKTKGLSSHMENINNSDPIYIYRLLGYLNFWKFIEPENSYVIDSIRIIKSQL

SEQ ID NO: 2081 - protein, 358 aa, Emticicia sp.
  source 1..358: note = Related to PKRS01000005.1
MSYDSEENIEQKLKIIRKYSKQKNHYESLLKDISIMEQKGSILIINNKHLADLVGISFDGILKIINSSQSFYYSFSIPKKNGGYRVISMPFPSLMKVQRWIYENVLLKHQIHKVAKGFVKELSIKDNASEHLGSKELLKMDIQDFFPSISKKRIISIFKRLGYNNKVSYSLASICCLNQCLPQGAPTSPTLSNIIAYKLDNRIQGLANKFNIIYTRYADDLTFSGDTFPPFFYSTIQRILLEEGFNVNKDKTRLIKEGRQKIVTGISISSDKMTIPKIKKREIRHAVYFILKRGLFAHQQAIGNYDPIYIDRIIGYLHFWQFVEPENEFVRKSIIEIKTNLASLEEEFKVYIDSNLKY

SEQ ID NO: 2082 - protein, 356 aa, Elizabethkingia miricola
  source 1..356: note = Related to QNTX01000003.1
MYEALNNWDLYLDSKIKDAKVRSVLKKYVKNLLSNNTVIIFEFNHLSKLLGIEKSYLSRLVFGTHYFYQSFTIPKSNGEERLINAPKDILLDIQRWIYYNILKGISLNDNCVGYREGYSIRNNVEKHLNKEYLLKLDLKDFFPSINIERVIAVFKNLGYTPSISYILASICTLDGYLPQGSPTSPCLSNIIAKRLDARINGLCKKFDLDYSRYADDITISGNKLPKKMISYIENIIVDEGFEINLNKKRLLYKNNQRIITGVSISSGYLTIPKKKKRELRQIMFYIECYGLSNHLFKKGLNDPIYLERIIGYLYFWKFLEPNNKDIIRYFSIIKKEMIKQNEYFTDFRIPNFEFIG

SEQ ID NO: 2083 - protein, 304 aa, Chryseobacterium sp.
  source 1..304: note = Related to MAUH01000030.1
MNQDLDYWFFFIDKSFRKIKVRKALKIYVEKILSTNSPIIFEFNHLSLLLGIEKDYLAKIANKSALFYHEFHIPKRNGELRIINSPNTILLGIQRWIYQNILSHIQLHESCTGFRKDYNIKHNASKHLNSNVILKMDLKDFFPSINKRRVISVFKNIGYTRNISYTLASLCCKDDSLPQGAPTSPFLSNIIAKRLDRRLNALCQKFNLNYTRYADDLTISGDTISKKLISYISDIINDEGFIVNQDKTRLLYKNNRKIITGISISSDKLTIPKKRKREIRHSIYFIKKYGIFEHVNRQQKVDII

SEQ ID NO: 2084 - protein, 357 aa, Sphingobacterium sp.
  source 1..357: note = Related to JADEYP010000027.1
METAKYNLNIQRLIEDTFRGEKTLNALNIYSKGLINKNLPIILSKDHLASLLGHPLNLINNVIYSPESFYRSFYIPKKNNNGKRVIHAPKGILLDLQQKIYEYILSAIPVHEKATGYVANKTIKDNAIPHLNTNEILKVDLKDFFPSINFNRVINVFLKAGYTRDISFSLARICTLHNSLPQGAPTSPILSNLIIKRLDIRLEKLSKKLKLNYTRYADDLTFSGDSITISFLHYVKSIINSEGFKVNKKKLRILRKSHKKVITGISITNNELKVPREKKRIVRQAVYFIKKHGFLNHLEHIDRFDPIMLEKLLGYAYYWKFIEDSESSKSIISVLKLEIAKLNSSTSNLHTHLEFVK

SEQ ID NO: 2085 - protein, 360 aa, Odoribacter sp.
  source 1..360: note = Related to QUMF01000012.1
MKVVSPSSFFTIMTQEQEFEINKWNGFISENIKGDKTKKALSLYVEKLIQKDTVVIIDFNHLAMLLGIQANTFASIIANTESFYYNFEIPKRSGGTRTISAPYPVLLNAQKWIYDNILNKIKVHDNAKGFIKKTSIADNARVHLDRDYILKMDIENFFPSIKMNRVMSIFRNLGYTKKISYYLSSICCLHGFLPQGAVTSPCLSNIIAKRMDARITGLAARFALNYTRYADDFTLSGDILPPKIIDYIEEIVNQEGFLINKKKTSLIGKGKQKIITGISISSGELKIPREKKREVRQSVHYVLRNGLFEHQKHIDSFDPIYVERLLGYLFFWLSVEPDNNFVKSSISKLKDYTKVLDGIN

SEQ ID NO: 2086 - protein, 346 aa, Xanthomarina gelatinilytica
  source 1..346: note = Related to NZ_ANLA01000010.1
MNDNKNILVKEWDAFISENIRGAKTQIAVKTYVNKLISNNTVVILDFNHLALLLGIEVDVLARITSHSESFYYDFEIPKRDGKSRNISAPYPVLLQSQRWIYKNILSKQPIHDCSKGFKKNTSIVDNAKVHLNQKILLKMDIEDFFPSIKLNRVISVFRVLGYTKKISYYLASICCYKGALPQGGVTSPSLSNIITKRLDYRLNGLASKFDLKYTRYADDFTFSGEYLPIKIIDYIKSIVSNEGFKIKDSKTKMIGSKRQKIVTGISISSGKMTIPRKTKRELRKNVHYLLKNGLSKHLEHNRINDPIYTERMIGYLHFWHSVEPNNKYVKESLKKLKDYSIQLDS

SEQ ID NO: 2087 - protein, 316 aa, Pseudomonas fluorescens
  source 1..316: note = Related to LCYB01000004.1
MQIDSHVHMLLGISTEEELSVLSRIIASPSNFYREFKVPKKSGGTRTISSPYPSLAIIQSNILNNLFFPFEANSSAYAYVKGKSAIDHARIHVNGSELLKLDIKDFFPSISRQMVFEALQRSGAKADVCFYTSLICILDNGLPQGACTSPALSNLVFSPIDVRLTGLANFFGLKYSRYADDLAFSGEFIPRDLASLVGEILLEYDFHLNHKKTQLKLAGRKKIVTGVSISSGQVRAPKSFKRKLRAQIYELEKNIGSLARLPDFDPLIYERLIGRINYLLQIEPENNYAKVKKAYLSKCHQDFLGLVDEQIISAFV

SEQ ID NO: 2088 - protein, 317 aa, Pseudomonas chlororaphis
  source 1..317: note = Related to CP027736.1
MQMDSHILKLLGISSKENLAILSRIIASPPSFYREFKIPKRSGGVRTISAPYPSLSYIQSNIFNSFLSSVECNLSAYAYVKGKSAIDHARVHINGKELLKLDIKDFFPSISKQMVFEALQREGGENSACFYISNLCTLNDELPQGACTSPVLSNLVFSPIDIRLSALAKFLGIDYSRYADDLAFSGDFIPRDLASLVGKIILEYGFFLNEKKTQFKLDGRKKIVTGVSISSGELKAPRVFKRKLRAQIYELERNVSNLARLPSFDPLVYERLLGRLNYLLQIEPENQYAKAKKKTISESHQRFLGLVDEQQVVSLLL

SEQ ID NO: 2089 - protein, 315 aa, Pseudomonas aeruginosa
  source 1..315: note = Related to NZ_QDGR01000012.1
MEFEVYPILGIGSVEERAILSRIIADPPSFYRRFNIPKRRGGVRVIHSPFPSLANVQKSILTNVLADIPVSEYAFAYVSGRNAILHAKVHRESPELLKLDINRFFPSITRQMVFEALQSHGLSSKVSYFLSWLCTHKNELPQGACTSPVLSNIVFSTMDFRLSRLASEVGLSYSRYADDMAFSGGYVPRNLSRSISKILLEGGFYLNESKTQLKLAGSKKILVGVSISTGCLKAPKEFKRKLRAQIYELEKHSGNLSEVNDFDPLIYERVLGRINYLLQIEPDNRYALEKKRELSEMHQRFLSLGAGFSEALNWM

SEQ ID NO: 2090 - protein, 322 aa, Pseudomonas sp.
  source 1..322: note = Related to NZ_CP067098.1
MDNIESQIEVSGLMALYRDLNLSVEDLAIVSRMIARTDLFYRSFRIPKRRGGTRLISSPYPTLDKIQKSILQNVLEDYLPHDSAYAYVKNKCAVGHARYHLGSREILQLDIKEYFPSISRQMIFGALSRNGCDPKKASYISILCTLKNALPQGACTSPMLSNLVFFPIDVRFSKLASSLRLRYSRYADDIVFSGGKVPRDLPGLVRKILLDHHFCLNEDKTQFKIFGAKKIITGVSISSGVLKAPKAFKRNLRAQIHELERNKFHLSSQKEFDPLVFERILGRVNYLLQIEPDNIFALQKKKVLSFHHQEFLGLIDDFCLDI

SEQ ID NO: 2091 - protein, 322 aa, Pseudomonas promysalinigenes
  source 1..322: note = Related to NZ_CP077094.1
MDNIEDIYSYQGDVQALCMALELDHTQSLILPRAIARPDLFYRFFSIPKRTGGLRKIRAPYPALASIQKRILDCLLAEKHVHHLSFAYVKNKSAIDNAKVHLTSKEILKLDIQDYFPSIDSQMVIEALMRNGFSSATAFYISRLCTVDGALPQGACTSPILSNLVFNPIDNRLAKLAERLNLRYSRYADDIVISGERVPRNLINLIRKILIERRFSLNEKKCQLKLSGSKKIITGVSISSGVMKAPKAFKRELRSQIFALEKYSGDLSKLREFDPLFFERVVGRLNYLLQIEPYNEYARKKKATICSYHQKLLGLHPMAQPQ

SEQ ID NO: 2092 - protein, 322 aa, Achromobacter xylosoxidans
  source 1..322: note = Related to CYTI01000008.1
MTSLSAFATDLNLWEIKDFSIQILYGILADSSKYYRSFEIPKRRGGNRTIHSPYPVLAQIQKELLLILQDRCGTSEYAYAYCRGKNAIMHASAHLGCDELLTVDVENFFGSTTRQQVHQALLGASFENDFAHLASLVATLHGVLPQGASTSPLLSNVVFRPLDGRLARLASHLQIKYTRYADDLAFSGDKIPRNLPKLIGKIISEKGYKLNPGKTALKIRGAKKIITGVSISSGTSKAPRQFVRATRAAVHNLEKNIGKLSATNILDPLAYERTLGKINYWLQIEPHNYYAAKKKKILSEAHQRFLELGAGFNLDNYIENRA

SEQ ID NO: 2093 - protein, 322 aa, Burkholderia seminalis
  source 1..322: note = Related to JAIZSD010000010.1
MTILSLFSATMNLWEIEDFSTQILGGILADSEKYYRSFQLPKRKGGMREINSPYPVLAQIQQALTKYLRDQCFVSEHAYAYCRGRNAVMHATSHLGCDELLTVDIHDFFGSITRQQIHQSLLKNSIDASYSHIISVLATRKGILPQGAPTSPLLSNIVFSPLDLRFSRLAIKLGINYSRYADDLAFSGPRIPRNLPKLVEKILSEKNYKLNPQKTTLKIKGAKKIITGVSISGGTPKPPRKFVRSVRAEVYQVEKNINKLSSLSTIDPLSYERVLGKLNYWLQIEPHNKYALDKKNLISEAHQNFLNLSSSFDRNEYLQQLI

SEQ ID NO: 2094 - protein, 322 aa, Massilia rivuli
  source 1..322: note = Related to NZ_WKJJ01000010.1
MDILESFSKELNLFSLDGFSVQLLAGAIADSSKFYRSFKIPKRRGGNREISAPFPFLANIQKAIANKLRDRIPSSDNAFAYREGRNAIMHASTHLGNRELLTVDIRDFFGSITRQQIHQSLLECNFDGNFSHISSLLSTLHGTLPQGGCASPILSNLVFYSLDIRLARLASALDITYSRYADDLAFSGDYIPRNLPRMVEKIIKEKGFALNNEKTKLKIFGARKIITGVSISSGKPKAPRQFVRALRAEVHALENNKNRLHSLTVFDPLRYERVLGKLNYWLQIEPNNSYAIEKRIGISIAHQKFLGLSANFKLEDYIQLVA

SEQ ID NO: 2095 - protein, 324 aa, Cupriavidus necator
  source 1..324: note = Related to NZ_CAIGKG010000003.1
MPESEDLLALLNICEIESSNTPVLFSVLGSPDKFYRSFKIPKRNGGFRVIDSPYPSLEIIQRSILRNVLSNFPAHPNAYAFIKGRNAITHASHHLACRELITLDIKDFFPSITRQMVIDALIENGLANGVANYISLLCCLNGTLPQGACTSPALSNLVFERIDERLSRLAKTLKLKYSRYADDLAFSGDAIPRDMPQLIERILESRDLKLNKEKIRLKIAGAKKIITGVSISSGTLKAPREFKRLLRTQIYELEKNIDDISQMRSFDPLVYERVLGRLNYLLQIEPKNAFALQKKASLSQHHQRFLALSSGQWPALFPDADLAA

SEQ ID NO: 2096 - protein, 314 aa, Azonexus fungiphilus
  source 1..314: note = Related to NZ_RBXP01000016.1
MTINDETLAELVRHLEIDEHLLLTLVAAISSPNKFYRSFAIPKRRGGIREIESPYPSLGSIQKAILRKILDGFSVHPCAHAFTRKKKALDHAAYHLGCKELITLDIKNFFPSITRQMVFQALNNSGLSSHFSFYISLLCCLNDVLPQGACTSPALSNVVFSQLDERLHRLAIHLGLKYSRYADDLAFSGEKIPRNMIKTVQKVLATKGFELNTEKTRLKVFGAKKIITGVSITSGIPKAPRSFKRSLRVKIHELEKHIDNLASMKKFDPLVFERTLGKLNYLLQIEPGNEFALKKKKLLSEQHQKFLSLGRQVQ

SEQ ID NO: 2097 - protein, 310 aa, Vibrio splendidus
  source 1..310: note = Related to MCXB01000344.1
SLKNILSKFEIPISRENVSIFNKMISEPSAFYREFKIPKRKGGIRTITAPYPTLSYIQKLISERYLTKVNPSEHAFAYVKGRSVVDHARVHLNSTELLTVDIKSFFDSIRQQTIFEIYQSLGLSYSEAAYLTRISTLNGGLPQGACTSPILSNIAFYPLDVRLNNLAEKLGLKYSRYADDLAFSGTVVPKNLHRTIDSIIKSYNFELNQSKTKYKLEKSKKIITGVSISSGVLKAPKSFKRALRAEVYKLEKYKDNLSDMDGFEPLIYEKTIGKLNFVLQVEPNNLYAQEKRKTLISDYKVFSSKATNLI

SEQ ID NO: 2098 - protein, 310 aa, Colwellia sp.
  source 1..310: note = Related to CP014943.1
MHYNNDFSIFIQNLGLEASHETRAIVSSIIHASENHYRSFNIPKRKGGYRKIDSPYPTLKHLHGVILDVFQDKLKCHKNSFAFMKGNSAIGHAKHHLDCEELLTVDIENFFPSISRQMIFEVLHSVGMKTNDSNYISYICTLRNSLPQGASTSPILSNAVFYPIDIILEQIALKFDLKYSRYADDLAFSGINIPRNLPSLIEKILMNRGFNLNKSKTKLKIKGARKIITGISISSGKLKVPRSFKRDLRANVFELEKFKHNLFEMNNFDPLIYERTIGKLNYLLQVEPESKYAKIKIKLLLESYKDFQLS

SEQ ID NO: 2099 - protein, 312 aa, Photobacterium andalusiense
  source 1..312: note = Related to NZ_FYAJ01000004.1
MTDNNIVNLLEVISIKNTSHNIKIITNILNSNKNYYRFFSITKRKGGVREISSPYPTLKFIQQNIKKNILEKIVVNDNAYAYIKNKSYIDHAKIHCDSNELLTLDIKDFFPNIYRQDVFNIFSQYGFCDLQSNYLSYLCTLNNTLPQGACTSPIISNIIFNKIDNRLYKLALSFGLKYSRYADDLAFSGKKIPSKIIKLVALILEEYDFIVNESKTKLKKKGSKKIITGVSISNGEIKAPKSFKRNLRAVIYELEKNKDNIFKMPNFEPLIYEKTIGKLNYLLQIEPENKYAKEKKEKLISNYKEFISSPML

SEQ ID NO: 2100 - protein, 303 aa, Aeromonas hydrophila
  source 1..303: note = Related to NZ_CP028568.2
MNKDNLFELLEIDESFINAVNAISYSPEHFYRKFHIPKKKGGFREIHAPYPSLLALQKIISEKIQPYLKIHRSCFSYRKNISFIDNAAHHLGSKEILSLDIEDFFGNISRQKVFDVLSQSGFNNHLSNEITYLVTYKDYLPQGAPTSPIISNSIFYKIDARLYKLSEKLNLKYSRYADDITISGEKIPSNFPRYIEDILLQHGFSLNKGKTRLKKGHQKKIITGVSITSGRVMAPRIFKRNLRTEIYHLERNNYAISSPIDPMLYERLIGKLNFLLQVEPENTYAIEKKKALIEKYKKIILMI

SEQ ID NO: 2101 - protein, 301 aa, Aeromonas media
  source 1..301: note = Related to NZ_JRBG01000001.1
MNQDIFEFLAISEQQSPNLFAISHSPSSFYRTFRIKKRSGGYRELKSPYPLLLELQRIILEKSSQLLKIHDVCFSYRKEKSFIDNAKYHLNGECILTMDIEDFFGSITRQMVLDTFLFNGLTLELSQQLSYLTTCNNSLPQGAPTSPILSNAIFYRIDVRLSALSKSLGLKYSRYADDLVFSGKNIPKNFPSYISNILRQHGFSLNNEKTKLKLKSSRKIITGISISSGTLKVPKPFKRSLRSLIHNFERSSFSVSSSRNPMIFEEIIGKLNYLLQVEPHNNYAQEKRKLFLSEYRKFISY

SEQ ID NO: 2102 - protein, 342 aa, Mesorhizobium sp.
  source 1..342: note = Related to JAIUIU010000040.1
MTDETLAGALRERGVPVRWIDAYESYAQRLTENGVPVIFELKHLAILTEIDLSFVLSCVYATNIHYRIFIIPKKTGGTREICAPLPALLSIQRWINHQILEKFAVSEFAHAYVNGRSIVSHAQNHRSGRVLLKMDLQNFFGSITLSMVLGIFRAAGYSRNLSFDLAKICTLGDFAPQGAATSPSISNIIFYHIDQAIGSICAKNELIYSRYSDDICISGRHISKEIIATLRELIESNGFAINDKKTKLATSAGRRIVTGISIGSGRMLPTRAFRKDVKRRLARIRKIGVNSAMVEDGDPFVLDRLVGKLHFWSHIDPDNKRIRVALNEMISLAKGESQTTGT

SEQ ID NO: 2103 - protein, 341 aa, unidentified
  source 1..341: note = Related to nan
MINSDPLESALVELRVPSHWIKSYLQYRDRLESSGFPCIFELDHLAYHLSFEPSALRVLVHNPQGSYNFIEIPKKRGGIRKISAPLPALLYAQRWIKNNIVDKLNIDESAHAYVRTRSIVTHARLHIEGRVIYRTDIRDFFGSISFDSVVSLIYSLGYSQDVLFDIASICCLHGSLPQGASTSPALSNVIFYKTDRALSTLASSFGLRYSRYADDLCFSGEHIPRKFIDKSTSILNADGYILNSEKTRLETSRSRRVICGLSIGDGRVKPVKSFRRAVRAETNNFLKQTKERSVVYWEVTPFFIDRLLGRLNFWKSVEPDNKWIVEHEQIVRRRIRTILEM

SEQ ID NO: 2104 - protein, 310 aa, Oricola cellulosilytica
  source 1..310: note = Related to SJST01000002.1
MYRAGQILSLIHEICEKSGLPKDKITALAYRNRPRYRIFHIHTGKKQRLIKAPIPSLRAAQKALAAIISEKLKPEECAHGYVTDRSVITHAASHLGKKAFFKTDIVDCFGSINFPEIANTLREAKYNSVDSFIAASIATDEGSLPQGAPSSPLLCNLVLRSVDRPLSKLADKLCATYTRYGDDIVMSADDFDINIISIVRNVLSRHGFKMNEDKTYIAIEPQQNIITGISIATGYPKVRKSFKRQVRLETHLLLKKGIVSYLESDGYIDPFAADRVLGKLTWWSHVEPDAEFPKKHSIMIRSMMKEVARG

SEQ ID NO: 2105 - protein, 334 aa, unidentified
  source 1..334: note = Related to JAEPPB010000039.1; note = Pseudomonadales bacterium
MNTVNEWAEFFRDQQVPEDLILRYLPYIERLLTKNVPIIFEGKHLRKLLGIESSMLRSLVFNGSAFYRSFSIPKRSGGERTITAPYPELANAQAWIKQEILDNLKATPSATAYVQGKSILENANEHVGKKMLLKLDVEDFFGSIDVKKITAIFESCGYTNKVSYLLASICTLDGSLPQGAPTSPQLSNLASIPLDNRIHALAKKLELTYTRYADDIALSGEFIHSNVISYVEDILKSEGLKLNSNKTQLKQPGKRKILTGISVSSEKPMIPRAYKRQLRAEVFNALHKAQHELPFDPLNIERLIGKLNFVLHVEPENQFARRSLEALKQKKIAP

SEQ ID NO: 2106 - protein, 342 aa, Klebsiella variicola
  source 1..342: note = Related to NZ_CAKLOR010000001.1
MTEIIKSSWDHLVGTKSPDGRQKEIFKKYIQDLEKNGLPVIFEFEHFAYLLGMTTSTLAQTIINPEKSYRSFHIKKKRGGSRLINAPYPLISYIQKWINTNILSKIKNHESSFAYKKNSNAYLHALQHIDTNETLKVDIVDFFGSIKKIDIVRLFRELGYADNVSLYLASACTYANSLPQGAVTSPNLSNIIFYSLDNRFYHLAIKLNLTYSRYADDLFFSGEKIPSNLYKSIKSILQSSGFSINKEKTRHITNGKQKIITGLAVKENSVRIPKSYRRKFCQEAYIFIKNEKSNSSMENINFDPILIDRLIGKANYILKVEKNNERIMKLLKQLNEIKLNTF

SEQ ID NO: 2107 - protein, 344 aa, Pseudoalteromonas caenipelagi
  source 1..344: note = Related to NZ_JABBPG010000001.1
MNQLSYETWLDFLKKEGYGHKQSEKLAAYAHKLASNNVPIIFEIEHLAKLLGVELSLLSRIYGVSSYFYRSFSIKKRSGGARNIKLPYPKLKYIQQWIKQEILDNLTVDENAFAYVKGKSNIENAKLHIGSNELLKLDIKDFFGNVKVESIESIFRSCGYTDDVSYLLARLCTCFGFLPQGAPTSPTLSNLVLQALDKNLAHFANINSLTFSRYADDIFLSGKLITKEIKQDAVEIVEKSGLPINHNKTKIIRGNTCKIITGLIVTDSTVRVPKKIRREFRKNSFFMLKNKSSQMDGSRAKLNPLLIDEIIGVGNYIIRVEPSNKYVESVLGELQELKKDLFGK

SEQ ID NO: 2108 - protein, 343 aa, Pseudoalteromonas sp.
  source 1..343: note = Related to NZ_JACJFK010000033.1
MKPIYDKWFNFLKASNLSLQQSEALAKYASRLENSNFPVIFEQKHFSKLLGLELNLLSRMTGASSNFYRSFEFKKKKGGIRAIRSPYPKLAYVQKWIKKEILEEIPISKSAFAYVKGRSHIDNAKKHIGSKDLFKIDIIDFFDQIKFEKIYNAFIACGYSHKVSFDLTQLCTFWGKLPQGAPTSPSLSNIVLKKLDDELFNVCKASSLTYTRYADDISVSGIEISPKIRNEIIEVVENNGYPVNHKKTYFAQGKAKKVVTGLIVTDSEVRVSKSMRRDFRKKSFFLLKNGVNELNGKNKPINPLYIDEIIGLASYILKVEPNNKYVATELKNLKKLKQDLFLN

SEQ ID NO: 2109 - protein, 343 aa, Rahnella sp.
  source 1..343: note = Related to SLYT01000019.1
MADNNLDRKIFFKKNGLSESQSIKLDIYAKNLESKNLPIIYELKHLSKLLGMEYALLSRMSGINRFFYRSFSIKKRNGGRRIINSPYPKISYVQNWIKDKILSQVPISNNAYAYVNGLSHIEHARQHIGSDVFLKIDLLDFFGQISDQRVKKIFSELGYTDKLSLQLARLCTCNSSIAQGAPSSPILSNIVLKELDETLFTIANSNSILYTRYADDIYFSGKHVSKGFFSKIKGVINNFGMVINEEKSKIYKSHHKKIVTGIIVNQKEIRAPKHMRRRFRTESYILLKDKFKVFNGERGLFNPNYIDEILGLGMYILSVEPQNAYVIKIVKSLKALKKEFAQY

SEQ ID NO: 2110 - protein, 343 aa, Vibrio parahaemolyticus
  source 1..343: note = Related to NNHO01000001.1
MMEQSRWFKFFIENDLNKSQAQLLTKYAQILELKSLPVIFELEHLSKLLGVELSLLSRICTLNERFYRLFSLEKKHEGFRHIESPYPKLKYIQRWINDNILSVLAVHDNVYSYLQGKSHIDNAKMHIGCKQMLKLDLVNFFGHITISQIEKVFIECGYTKDLSNKLAKICTYYDHLPQGAPTSPALSNIIFYELDCILYDISQSNGLIYTRYADDLCFSGDNISQYVVDDILSHLKSHGFSINDEKSRLLTGNQRKVVTGLLVQSDTIRVPKKVRRKFRKDSYYLIKNGYDNLGNERLFNLLEVDELIGIGSYIKKVEPQNSYVSNALIELNNIKNSLMTSTS

SEQ ID NO: 2111 - protein, 343 aa, Shewanella halifaxensis
  source 1..343: note = Related to NC_010334.1
MVFQESRWFQFFIEHKLSSRQAALLTEYAINLECNSVPVIFEIEHLSKLLGIELSLVSRMTGVSNLFYRQFPLKKRSGGIRTIESPYPKLAYVQRWIKNHILEIKPISSNALAYVQGSSHIENAKRHIGAKELLKIDLVDFFEYIKLSTVKSIFTECGYTEKVSHQLAKLCTLRDRLPQGAPSSPVISNLVLVELDKRLQSISKKHELVYTRYADDLCFSGHAISDEFFSLVKDEIESEGFVVNQNKSGVVRGHKRKLITGLVVSEYGVRVPKKMRREYRKQAHYMLKNGIEQLNGNMGMLNPLHIDEVIGKGQYILSVEPGNAYVKDSLCMLLKLKNKLLIK

SEQ ID NO: 2112 - protein, 342 aa, Vibrio breoganii
  source 1..342: note = Related to NZ_MCYY01000073.1
MAYQESRWFKFFNEQQLSANQATLLAKYAQTLESNSVPVIFEIEHLSKLLGMELSLLSRMTGASSLFYRQFSLKKRSGGVRFIDSPYPKLAYVQRWIKNNILETRPVSSSAFAYVQGGSHIENARKHIGAKELLKIDLVDFFGHISFSSIVSIFEECGYSRSVSTQLAKLCTLWGKLPQGAPTSPVISNLVLLALDKRLQNLSDKNGLVFTRYADDLCFSGNEITEEFYSSVYDTLENEGFVVNEKKSGFVLGNKRKLITGLVVSESGVRVPKKMRREYRKQAHYMIKNGIEQLNGELGIFDPLYIDEVIGKGQYILSVEPDNAYVKESLCKLSKLKSDLLV

SEQ ID NO: 2113 - protein, 344 aa, Aeromonas veronii
  source 1..344: note = Related to JH823256.1
MTEEKSPWYEFFLKNNIGSRQATALSEYASRLDCNGVPVIFEMKHFSKILGLEFSLLSRMCGVNSYYYRAFYIKKRRGGVRVIQSPYPKLSYVQGWIKDNILDKNRISKHAFAYSKGKSHIDNAKCHIGSSELLKIDLENFFDQISISAVQEIFLRFGYTENISFKLAKLCTLRDTLPQGAPSSPAISNIFLYELDNFLASYSEINKLTYTRYADDIVFSGERISNESIVDIKKYITSYGLKINEKKSRLVKGAQRKIVTGILVGDTDVRVPKKLKRQYRAQAFNIIENGFSVFDGSIGKPNPLYIDEVFGKGQYILSVEPWNKKVVELQSSLRELMKEMSENI

SEQ ID NO: 2114 - protein, 344 aa, Vibrio vulnificus
  source 1..344: note = Related to NZ_CP060047.1
MSSEYIRWLDYLRSNGVQNKQARILAEYAHNLVKSNLPVIFEIEHFSKLLGIELSLLSRMSGASSLFYRGFSIPKKRKGVRKIDSPYPKLAYVQLWIKSNILERLPISDNAYAYTKGRSHIQNARAHIGAKELLKLDMRDFFNRISRLQVEQVFLKCGYSDNVASVLSNLCSYNGVLPQGASTSPILSNIVLKELDDVIQHVAEKYSLIYTRYADDITLSGNSISKNVCNEVMQYIEEFGLPVNEEKVHLLKQNDKKIVTGLIVTDSSLRVSKQMRRAYRQESYYLIKNGETQFDGSTKPLKPLYLDEVIGKGSYILQVEPENDYVRNTLRDLSKLKSRLFSNV

SEQ ID NO: 2115 - protein, 344 aa, Vibrio sp.
  source 1..344: note = Related to JAKGTN010000030.1
MSPEYIRWLDYLCSNGVHTKQANVLAEYANNLAISNLPVIFEVEHLSKLLGIELGLLSRMSGAPSLFYRSFRIPKKRGGVRGIRSPYPKLAYVQSWLKENILECLTISDNAYAYTKGRSHIENARAHIGARELLKLDIKDFFNRISKSQVRQVYINCGYAENVASVLSNLCTYNGTLPQGACTSPILSNIILKELDETLQDISGQYSLTYTRYADDITFSGNSISDDVCSELIHHIEEFGLPVNEDKVRLLKPKDKKIVTGLIVTDRSLRVSKKMRRAYRQESYYLIRNRERQFDGSIKPLKPLYLDEVIGRGSYILHIEPNNDYVRDSLKELLELKSQLFSNS

SEQ ID NO: 2116 - protein, 344 aa, Vibrio sp.
  source 1..344: note = Related to NZ_LNRB01000009.1
MSPEYKKWFEFLCTNDVSEKQATLLAAYADRLLKSNLPVIFEIEHLSKLLGIELSLLSRMSGMPPFFYRNFQIPKKREGFREICSPYPKLAYVQSWLKENILDGLTISDNAYAYTEGRSNIRNARAHIGARELLKLDIRNFFYNIKTLQVKRVYLNCGYSNNVASVLSNLCTYNGRLPQGACTSPILSNIILKELDDALQNISEKYSLTYTRYADDLTFSGNSISDDVQNEIKANIEGFGLPINEDKVRLLKPNQRKVVTGLLVGDSSLRVPKKMRRAYRQESYYLIKSGKSQFDGSIKPLKPLYLDEVIGRGSYILQVEPDNDYVRDSLKELSKLKSHLFSID

SEQ ID NO: 2117 - protein, 345 aa, Vibrio kanaloae
  source 1..345: note = Related to NZ_SYUW01000019.1
MKSNEREWIDFFIERKVDLNQAKILTSYAINLQEKSLPVIFEIEHFSKLLGIELSLASRIVTKPERFYRVFNVKKRRGGSRVISSPYPKLYYVQSWIKDNILQKIRVHESAFAYKKNTSHIDNARVHCFSDEMLKVDISKFFDNILKSNIVDIFVKCGYSKKLSEQLASFCSQGDHLPQGAPTSPVISNIFMFELDNRLSKVAEENNLKYSRYADDICFSGKRISQNLLELVNRAITDYGFQLNNRKTRLYKSQDVKSVTGIVVSNGKLRTPKRIRREFRADCHHLLSNGYLQFNGELGVFNPLMLDEVIGKGRYILSVEPENQFVSDQMSKLATLRSKYLSLSL

SEQ ID NO: 2118 - protein, 345 aa, Vibrio parahaemolyticus
  source 1..345: note = Related to DADYGM010000030.1
MKINEKRWIDFFIKNNVDLEQAKILTLYAVNIQKKSLPVIFEIEHFSKLLGIELSLASRIATKPERFYRLFNISKKRGGSRAISSPYPKLNYIQLWIKENILEKCPIHDSAFAYRKNRSHIDNARMHCDAIEMLKVDISGFFDNISASYIVKIFEKCGYSKKLSEQLANFCSHSDLLPQGAPTSPIISNIHMYELDKKLSDVSSEHNLIYTRYADDICFSGREISVNLLNIVNKLVNEHGLKLNKNKTRLYKSQHIKSVTGIIISDGKLRTPKKIRREFRLDCHYLLKYGYLQFNGEFGPFNPLLLDEVIGKGRYILSVEPENHFVKCQLSKLITLRNSYLSFNE

SEQ ID NO: 2119 - protein, 342 aa, Idiomarina sp.
  source 1..342: note = Related to SNWT01000008.1
MLNFSQWKSFLQSEGISEQQSEHLANYAERLANRGFPVIFELEHLSRLLGVEKNYLYRVMFKGSEFYRTFEINGRRKKRLISSPYPILSYIQSWIKEQILEKFVVSEHAYGYVKSRSILDNAKFHLGCTELLKLDIKDYFAHISRAMVNRVFNEAGFTPKLSYQLSKLCCVYGSLPQGAPSSPTLSNLVMRELDQSLFYLSDFYNIKFSRYADDLAFSGKAIPSDFIVKAVKQIENYGFMLNHEKFTHRKINQGKMISGLSISGDFVRVPKKTRREFRQKHHYMMLNKEKSFNGVHGDFDLLSLDKLIGLGQFIKFIEPNNTFVIRAVDDLNLLKKEIFRTG

SEQ ID NO: 2120 - protein, 342 aa, Pseudoalteromonas sp.
  source 1..342: note = Related to JACJFK010000046.1
MLNSSQWKSFLVNEGISVEQSDLLANYTEQLTSSGFPVIFELEHFAVLLGVEKNYLYRMMYKSREFYRTFKISGKKKKRLINFPYPILSYVQSWIKEHILENIEVSEQAYGYVKSRSILDNAKLHLGCTQLLKLDFKDFFGHISIHDVKRVFRDVGFTPKLSYQMAKICSVNGCLPQGAPSSPILSNLIMRKLDNELAHLSKFHNIKFSRYADDLAFSGEIIPSSFIVMIVKIIESNGFTLNHKKFAHKKSGQKKMVTGLCITGDRVRVLKKTRREFRQKHHYLMLNKEKSFNGDYGDLDVLYLDKIIGLGRFIKFIEPNNTFVSKAVEDLASLKKELFSIV

SEQ ID NO: 2121 - protein, 346 aa, Mangrovimonas sp.
  source 1..346: note = Related to JAAFZY010000006.1
MSANYQIKDWEELINNSSLSKKEKKEKLFFIRSAYHNGVPVILDLDHLAHLLGLKVGVLSAMIKKPLRFYRQFKIPKKRGGFRDIVTPYESLLEVQQWIVEHVLSKFQVHDAAHAYVKKRNIAQNASIHVGCDEMLKIDLKDFFPSIKIPRVRELFNRVGYSKEVSYYLTNLCCLNGSIPQGAASSPMISNIILFNLDKRLSVFSKNHGVKYSRYADDLVFSGNFQSFGFKNLVIMNIEDEGFKANTDKTREYCEGHRKMITGIVVEKDRIRLPKAKRREIRTEVYFLMKYGIFDQVKRYNDIYYADRVLGRLNYWKQIEPNNEYVIDSIKSIKKLYEETLKQIST

SEQ ID NO: 2122 - protein, 343 aa, Tenacibaculum sp.
  source 1..343: note = Related to FNSF01000001.1
MKVEYKISDWEDLINESSLTKKEKVEKMLFIKKAYDNNVPVILDLDHLSHLFGLKKGIVASMINSSQSFYREFKIPKKRGGYRDIVTPYQSLLEAQQWIIEHILSKFKVHDAAHAYVKKRNVAMNAMRHIGCDEMLKIDLKDFFPSIKIPRVRELFNRVGYSKAVAGYLTKLCCLNGSIPQGAATSPMISNIILNSLDRRLYVLSKNIGVKYSRYADDLVFSGEHIPHEFALNVVKNIEDYGFNINIVKSRHYKSQQRKMITGIVVGDDNIRLPKVKRREIKKEVHYLKKFGVLDQVKRYNDIYYIDRVLGRLSFWKQIEPDNIYVLNSIKEIKKMYEEFLKS

SEQ ID NO: 2123 - protein, 349 aa, Psychroflexus sp.
  source 1..349: note = Related to JAIQZE010000004.1
MSYTINDWKKTIETSNLSKIEKIERMQYVESAFKNKVPVIIDTKHLSQLLGLKIGVLTSMVQSPSSFYREFKIPKRKGGYRDIVTPYKSLLEVQQWIAKHILSCFEIHPSAYAYVKGKNIAQNAKLHIGSSEMLKIDLKDFFPSIKIPRVRELFKRLGYNKEVTYYLSKLCCLKEQLPQGAASSPLISNIILSNLDKRLFKFASNNQLIYSRYADDLVFSGDAIPSDFRILVAMNIQDEGFSLNPDKTIEYSENQRKLITGVVVKKDSIRLPKDLRREIKQQAHYILKFGILDQVKRYNDIFYVDRILGRLSYWKQIEPKNEYVINTLKEIILMYKETMNNIQNNDDGE

SEQ ID NO: 2124 - protein, 346 aa, Nonlabens tegetincola
  source 1..346: note = Related to BBML01000001.1
MDNNYKYEDWKEIIESSNLPNEVKVDRMDLVRNLYKNNVPVIVDLKHLSNLLGIKYTVLASMIFSTSSFYREFKIPKKSGGLRTIVTPYKSLLTVQKWIVKNILSQFKIHDDAYAYVKNRNIALNAKQHIGNPEMLKIDLKDFFHTIKIPRVRELFNRLGYSKEVAGYLSNLCCLNEALPQGAGSSPIISNIILRTLDNRLSNIASKSEIVYSRYADDLVFSGSKIPLDFEVVLTQKINDFGFKLNLKKTKFYKKGDRKLVTGVVVNSDGIRLPKSKRKQIKKEVYYLKKYGIQDQVFRHNDVFYIDRILGKLSFWKQIEPKNEFVLTSIIEIRNMYDKTMKNNKD

SEQ ID NO: 2125 - protein, 385 aa, Nonlabens ulvanivorans
  source 1..385: note = Related to BBMM01000006.1
MIKAPKSFYRTFKIPKKRGGTRTIVTPHNSLKEIQRWILDNILSQFMIHEAAFAYEVKKNVAMNASIHLGQDEMLKIDLKDFFPSIKSPRIRELFTRVGYSKEVSYFLNALCSLDGCLPQGAVTSPKISNIILYYLDKNLSTLCHNNEVKYSRYADDLVFSANELPINLKSIVSSSIIENGFEINYAKLTEYSSEQRKLVTGIVIKEKGLTLPRSKKLSIRNDVFFLLKYGIEDQIQKYNDIFYLDRVQGRLSYWKQIEPNNKFVLDSIDKLKSLHKDYLNQALDKLNFLKIQKTNPLNNYKEYIHQVAFVASGLKIQIQIEDLRQSMNYLGYRTKKGAKYLKGRGFHRLIGLTFKWLEKQNKNEEADKVALTFINADGSYSYKK

SEQ ID NO: 2126 - protein, 348 aa, unidentified
  source 1..348: note = Related to JABSPD010000014.1; note = Crocinitomicaceae bacterium
MKNNYSIEDWEKHILENTEANGLERVYYLETVKIAYQNNVPVILDVNHLAKLLGLKVGIVTSMIYGPHSFYRTFDIPKKKGGVRTIVAPYTSLLYCQRWISDEILSRFFVHDAAYAYRPNRNIVMNAEKHVGQKYMLKLDLVDFFGNITESRVRSLFQENGYDKGMSFFLAGLCCLDGVLPQGAATSPSISNIVLNELDHKFDYLCDKYGVVYTRYADDLVFSSDSPLDHIVDHIGDIIKGEGFTVNIEKSKIYTAGANKLVTGLAVQEDRVRLPKRKRRKIRQEVYFVKKNGIMKEVERSSDLFALERVLGKLYFWKQVEPNNEYVLGEILELKKMRKELLRSLTSS

SEQ ID NO: 2127 - protein, 349 aa, Mucilaginibacter sp.
  source 1..349: note = Related to JAHXPQ010000003.1
MIKWSEKLASNTSKPTELTEALIKYSKKLEKQGFPVIFDLAHLALILGIEKLTLASIVNSSSKFYRSFKIPKRRHNTFREINSPYPVLKKIQDWIKVEILEKIEMSHHCYSYRKNVSIIDNASVHLGNEVLYKLDLVDFFDNIKEDRILSIFLNCGYSYKVSYFLTSLCLLTTKLPQGASTSPIISNIIAKRLDKRLSALCSKYKINYSRYSDDITISGKFVPPFLRLIIKNIIADEDFIVNQNKEILINGLNKKKIVTGISITNNVLKIPRESKRIIKQEVFKFLKYDFMINPNEQEFDPYFTERLIGKLNYWINVEKGNENPIFLLRSVIEKNKLFMSRIIQEDFNS

SEQ ID NO: 2128 - protein, 314 aa, unidentified
  source 1..314: note = Related to JAIBAE010000002.1; note = Bacteroidetes bacterium
MNEIYPNIKSIRDLSIATEIPIKKIAGMIFSSENHYRIFSLPKRNSDGVRVIHSPYPNLYKVQRFILEQILRNVDGNNYCYSYKSGVSIKDNAMRHIGTKVFYKIDLENFFENIGFKKVIRVFRNCGYSDGVSYMLTKLCLCNNGIPQGAPTSPLLSNIVTSKLDKRLSGLSTKENLTYSRYADDLFFSGEYISTKCRELIKTIVEQEGLIVNNKKELLVIGYHKKKIVTGLSVTEKNISLTRNYKRELRLNVYKYLKYNHKVNPYNVDFDPLYKEKLLGQLYFWKFIEEDNEIPNILIEKVRNKEIIYPDLEL

SEQ ID NO: 2129 - protein, 350 aa, Burkholderia sp.
  source 1..350: note = Related to JAAGPI010000025.1
MKLSSGSDWRKYFEEIGLESARSAELCRYAATLADSSLPVIFSFEHLAALLGRTRHHLASIIFASEHHYRSFDLIKRRGGTRLIEAPYPSLLECQRWILKNILLKIPTSNNVHSYLHGKNIKTNALVHVGENSILKMDLRNFFHSIEMTRVLKLFESLGYAPEIAYFLAKLCVLRDRLPQGAATSPMLSNIIASTLDSRLNSLAKSQNLKYSRYADDLVFSGNDISPAFVGEIRSICEGEGFYVNEEKTKLKTGSSRKIITGLIVGEKKVSLPRTYKREVRQQVYYIIKMGPLEYLKRNRLSPTALSSLAGRLAFWNSIEPDNPFVRESLPILMRLMSGEQNETRRIKNT

SEQ ID NO: 2130 - protein, 346 aa, unidentified
  source 1..346: note = Related to JAGQWR010000133.1; note = Saprospiraceae bacterium
MKPSESISKWHDLLKAAPLNEDLKDALSLYIRSIIKSGFPVILNVEHLSHLVRIEYIFLKRMMNSSESFYYEFEIPKRRGGKRVIEKPYPTLILVQKWILRHILQKKAVHRSAFGFVKGKSMIDNAKCHINGKSLLTIDLKDFFPNIKLPRVISLFQRIGYPYHISYILASLCVKNGRLPQGAPTSPYISNLVTHKLDSRLDKLCDKFDICYTRYADDMAFSGGTINLTFVNLVRSIIADEGFIVNEGKVKLIHGFDKRKIITGVSISSKKTTIPKSTKRKWKLELFYLIKNGLDAQMKVLRINDPLYLDRCIGKLNFWLQVEPDNKFARASLDTVTEMKKLRSIE

SEQ ID NO: 2131 - protein, 343 aa, unidentified
  source 1..343: note = Related to JAGNNE010000423.1; note = Leptospiraceae bacterium
MNRDYWIEYINLNIQDEEKRLIYYELLNRLIENSLPILLKFENFEFLFKIKKEILALIYKDSRKFYRTFTIPKRNGSLRFIQSPLPLLQYIQRYILDEILSKIITHNNAFGFVKHKSIVDNVKPHLNSHTLLKLDIDNFFPSIKIKRVISIFQRLGYSNRISFLLAKFCCYDDSLPQGAPTSPYLSNIIAKRLDSRLYNLAKEHHLKYSRYADDMTFSGNHISKNFIDFAYKILIDEGFTPNYTKSKLIVGRGRKIITGLSISNKKITIPRNKKRELRSKAYSVLSSDAKYKINYAAIDDPIFVERLIGQFSFWNFVEPDNLYAVNTLKLLKEYSSQLDNLIE

SEQ ID NO: 2132 - protein, 347 aa, Ahniella affigens
  source 1..347: note = Related to CP027860.1
MRILNTIESWEAYFEDVCLREDIAAAHLKIISAQLKSGVPVIFDVEHLSLLLGVSSTYLASAVSVPRYHYRDFAIPKKRGGVRTISAPRAALKGVQRWILDNILNCFLPHKCAFGFRAKKSILNHARTHCTAGRILKLDVAEFFPSIKLDRVIGLFKSFGYTPGVAFTLASLCCLDRQLPQGAPTSPAISNLVCRRLDNRLHAFASKNRFRYSRYADDIALSGRDLNSSVIQIIRGILAEEGFALRDDKTRIYGVHSKRILTGLSASLDGVKLPREDRRQLRSVCHQIRKFGFLSYLANNKIRDPMFLARLIGRFSFWCYIEPENAFASEALAHLRGVERQFLAARS

SEQ ID NO: 2133 - protein, 338 aa, Stenotrophomonas maltophilia
  source 1..338: note = Related to JAFIXE010000059.1
MRALTSLDSWIDYFKDVGLSDDVVEKHARYVGELLARSLPVIFDVQHLCLLLGVSERFAAVVLNASQSSYREFKIPKRSGGSRTIIAPRRALKDCQRWILDNILARVGVHAAAKGFVQRRSTKSHCRPHLGRESLLKLDFQDFFPSIKKRRVIALFRSMGYSDSVSLYLAAFCCFGEVLPQGGVTSPAISNLICRRLDARLSALASSKRWRYSRYADDLVLSGRNLNYAVVGIVAKIAKEEGFRLNDGKTRLYRGEARPIVTGLVLGESALAVPRTFKREVVKQAHYVLTYGVLSHSAKTKSRNPYLVPTLLGKLNYWIHIEPENQRAVRLRDRLSAL

SEQ ID NO: 2134 - protein, 352 aa, Geothrix sp.
  source 1..352: note = Related to NZ_JAKZKY010000019.1
MNAYEGMPASIPGLRVWRKYFEDRGLSSEVVELYMGYIAPLYRRRLPVIFEWEHLGKLLGRTPHYLATAIASPAAFYRTFRIPKKCGGFREIQAPHRSLLDCQRWIVENILKRVPAHECAIGYVQGKSIIDYVTPHLQSADIFVTDISDFFPSIKIQRVIGLFQGFGYSNSVSYALASICCLGGALPQGAPTSPYLSNLICKHMDKRLSGYARKQNMIYTRYADDICFSSQAIRSVNKNTIRRIIFESGFSVNNLKTRTYIGNSTSKIVAGINLSGGKRTLPKDFTRPLLTEVYYIEKFGYISHRKKKKIKDPLHLMRLLGRAAYWRWVDPGSEKAQYCYGLLAGILREIAI

SEQ ID NO: 2135 - protein, 350 aa, unidentified
  source 1..350: note = Related to JACPYP010000009.1; note = Acidobacteria bacterium
MYDFVPAPLPSLHKWRKFFISRGVPEPRIQELLIYIKPLVKNRVPVIFNLEHLGRLLGRKTGYLAKIINSNEHFYRSFQIPKKNGAHRIINAPYPSLLECQRWINDNILSIVKIHDCAKGYLKNTSIIDHVEPHLGNNVVLLLDLKDFFPNITINRIIPVFRNLGYSQQVSLALSKICTLNDILPQGAASSPSLSNIICNRLDKRIACYSEKNDINYTRYADDLCFSSKHIEPHKIKMILKIINSEGFLINSSKYRLLGPQSSQKIITGINISNGAMKISNTYKRELSLAMYCIKKFGIRSHLQKLKIRDTYYLDSLYGKINYWLNIESTNKKAKFYKMFVRSLMQTYEP

SEQ ID NO: 2136 - protein, 352 aa, Ruegeria lacuscaerulensis
  source 1..352: note = Related to NZ_WQGP01000012.1
MKRSLTQVWESYFEEIGLDTELSAKYIPYIARCADAKIPPIFEQDHLAQLLGLELPMMLSMVFGTKSFYRSFSIPKRSGGRREIVAPYPSLLEAQRWIAENILDSVKVSVCATGFRRGKSILDNARLHCERDQILKIDIKDFFPSISFQRIMRVFTSIGYPNEVAYLLSKICTLGDSLPQGAATSPTLSNIVCRRMDVRFYKVCKRHRLRYTRYADDIAVSGKSIPSGIARLFFEIIEDEGFEVNQQKVRFLGKADRKIITGLDITSGVPRVPRKFRRELKKDVYFVWSAGLSTHVSRRKIFNPQYIDHLMGRIEFWRQVEPECVQLATVQRRVNEIVSQQKSYSGTSKFQL

SEQ ID NO: 2137 - protein, 345 aa, Sulfitobacter pontiacus
  source 1..345: note = Related to NZ_FNNB01000012.1
MNDNLLYKWHQYFEDIGLRSDLVRSYTPYIRRCISNGVPPIFESSHLAVLVGRNPADLSAMGFGAKSYYRSFKIRKRSGGLREIQAPYPSLLEVQRWIVGEVLSSVRLPVCSTGYREGVSILDNALVHCGRKEVLKIDLKDFFPSIGFSRVVKVFIDFGYPSNVAFLLANLCTLDRKLPQGAASSPLLSNIICRDLDQRIMKICKSRRLRYTRYADDIVISGKAIPKGIRRLFFEVIASEGFQVNEKKVRFLCEGDKKIVTGLDITSGKPRPTRQFRRDLKRDVYFVWSSGLSSHVARRRIFFPNYIEQLEGRARFWEHIEPDNVQMKKTMERVVELRKLYGRQR

SEQ ID NO: 2138 - protein, 343 aa, Brucella anthropi
  source 1..343: note = Related to NZ_CP044970.1
MNQNSIQQWSSYLEDIGIYPDLREQYIEYVKKCVRFGVPPIFERTHLSMLTGRHLGDLMSMIFATEKFYREFKLRKRSGGYRRILAPYPSLLEVQQWIKDNILSKYELQNCVTGFRDGYSIVDNARMHCGRDILIKIDIRDFFPSINFNQIMGVFHKAGYANNVCFYLSRLTTLDNQLPQGAATSPSLSNIVCRNMDKRFLLLSKNHRLRYTRYADDISISGKHISDGMIRLFFEIVESEGFRINTDKFRILNANDKKIVTGLDISSGRPRVTREFRRDLQRDIYFVWSQGLAAHIARRRIFFPNYVDHLTGRVNFWRSVEPESAQLKKVINRLKIIRSQYMI

SEQ ID NO: 2139 - protein, 348 aa, Rhizobium skierniewicense
  source 1..348: note = Related to JACIDV010000004.1
MATIPYQREHLSRWKAYLSDIGVRDDLKAIYLFHVKKSLEKGVPPIFEHEQLALLLGIDVAHLMRMLFGQKSFYREFSLKKRSGGYRTIRAPLPTLLECQRWINSNILSAVQLAQPAMGFRERHSIVDNARIHCGREELYKIDLKDFFPSIGFRRVMGAFVSLNYPKHVAFFLSTICTVDDELPQGAATSPTLSNIICNRLDMRLRAICRKRKLRYTRYADDITISGNKITDELKWIVHKIVEDEGFVINREKIRHVFAGEKKIVTGLDITSGVVRIPRQYRREVMKDVYFVWSSGLSNHMAKNRAFEPNYIAQLAGRLQFWKHVEPENPQMLKCLKRFKSVMLSYQK

SEQ ID NO: 2140 - protein, 344 aa, Methylobacterium sp.
  source 1..344: note = Related to NZ_BACT01000550.1
MSKSSVEKWEAYFSDLGINQDYIREYIDYAGPMLRAGVPPIFEDVHLSLLIGRDLGTLYAMVFGTGKFYRSFTIRKRRGGKRLIQSPYPSMLECQKWISEHILQKSQVSRCATGFRRNQSILRNASLHCKRDVLLKLDIKDFFPSISVNRVIDIFNSFGFPPNISFLLGRLCTLNGRLPQGAATSPIVSNIICKQMDDRLYSLCLSKNLRYTRYADDIAISGVQIEVGTNYLIREIINAEGFLINEEKTRICGPRDKKIVTGLDITAGKPRLTRSYRRELQRDVYFVWSAGLASHLSKRKIFNPNYMEHLQGKIAFWESIEPESAQMKKCKDRVSKIRRLMNKM

SEQ ID NO: 2141 - protein, 318 aa, Marimonas lutisalis
  source 1..318: note = Related to NZ_SKCI01000005.1
MAYVEPLVRNRVPVIFGFKSLSDLLGIEESTLSSIINSSSSFYRSFKIPKRSGGRRQIDAPYPSLLHCQRWIAQTILPSCKVSSVAHAYLPERSILTNARVHCGAQFLLKMDFKDFFPSISERRLVGLFSSLGYSTLVSVYLAKICTLKGATPQGSPASPMLSNVVARRFDLRLVGYARSRGLKYTRYADDIAISGEMDADEVQSFVTTCAVSEGFRINHKKTRYVESGQKMVVTGLDISTGTPRPTRKFRREVEKDVFYIWRYGVAGHVNAEKIYDPSYILRLKGKLDFWAQIEPDHPRLVRCRERFLSAAPDYLPL

SEQ ID NO: 2142 - protein, 383 aa, Asticcacaulis biprosthecum
  source 1..383: note = Related to NZ_GL883080.1
MNDVDEKVSPPPMSIDLEQWAAFFLDKAKGNQQLISGYLHFLKHCKQKDIPPIFEDNHLSQLLGINIRDLAFYLSGAQGRYRSFHIPKRKGGVRLINTPTPLLLHIQQWILSKILYKLPVSEFAHGGVPGRSIFSNAKAHLGARCVLRIDLKGFFDTVPLALGISIFRAAGYSPNVSRSLALLCFENGCLPQGAATSSTLANLAANSLDKRLSALAKKYGLSYTRYVDDLTFSGRSIGPRFAIAVKSIVEQCRFVVNPRKTQLMRGSSPKFVTGLAVGGQTLRVPRAFRRNVKNQAFQLVKRGVAGHLLATGDNDPLILERVAGKLAFWLQAEPESKTARQLCAALAEYRKTVDTDVSLPQPRRIVPINYPDELFSDIDLFTT

SEQ ID NO: 2143 - protein, 379 aa, Rhizobium leguminosarum
  source 1..379: note = Related to JAAXEP010000005.1
MNYVNLKVSPPIMPISVEDWRAFFSLSVKRDSKLVEGYIRFIELCENKGLPPIFEERHLAHLIGIPYSNMAYFFSVASGRYRTFTIPKRRGGRREINVPTPLLLAIQQWILHNILYKLPMSEFAHGGVPGRSILSNARAHLGAKAVLRVDLKQFFDSVEFPIGIPIFEAAGYSPKMSKSLALLCFENGRLPQGAATSSTLANLAAISLDIRLSKLANKFELTYTRYVDDLTFSGRSIGPGFISAVEGVVEQCRFVVNAEKTQLARGKSPKFVTGLAVGGDRLRIPRAFRREVRNQAFQITRRGVQNHLEAIESSDPLIIEKVLGQLAFWLQVEPESAMARKLFANLSLYRRTVSTDTLLPPPRRIIQIGTMPIDERRKE

SEQ ID NO: 2144 - protein, 367 aa, Sphingomonas sp.
  source 1..367: note = Related to NZ_CAKLBS010000005.1
MSDTAEQWRAFFQEHVKQDTALVRGYLAFIDQCIVRNLPIIFEERHLSRLIGVDYRDMAFYFTSSGGRYRQFRIPKRLGGTREINVPSPLLLAIQQWILRNVLYKLPITDAAHGGVPGRSIITNAGGHLGARSVLKMDLRGFFDTILLPRGVAIFESAGYSPHLSRSLALLCFEGGRLPQGAATSPALANLAAVALDGRLEALAQKFGLIYSRYVDDLTFSGHSIGVRFSAIVQDIVEDTGFVVNSDKTRLMRGQSPKFVTGLAVGGGRLRVPRAFKRDVRNRAFQLAKRGVERHLEATESSDPLVLEQVTGQLAFWLQVEPESKTARQLFDALTEYRRGMTTSVKLPDPRRVASIDDSHWRVIRDH

SEQ ID NO: 2145 - protein, 372 aa, Qipengyuania flava
  source 1..372: note = Related to NZ_CP022528.1
MDMVVEDWSSFFSKEIGKGSNLRGRSRILVDGYMAFIKHCADLGVPPIFENTHLRLLLGLDAAHFGALLTEHPGRYRKFTIPKRSGGERVISSPNPALLHVQKWILRQILDNAEVSDFAHGGIEGRSIVTNAREHLGAEALLKLDIADFYGSVGFGFGISTFQRFGYPRNVALSLTQFCFDGGSLPQGAATSASLANLSCRLLDRRCHGLAKKYNLTYSRYFDDISFSGSFINERLVEIVSEIAMESGFELNKRKTRLLLGKSTKYVTGISVGGDRLRLPKKTRRAIRNSAYLLTKTGDVQGFAESAKDPLIIETVLGQVAFWRHVEPEDDVAEELFQALVELRRETDVPVELPAPWRPSPIPELDLEKVSD

SEQ ID NO: 2146 - protein, 367 aa, Roseomonas sp.
  source 1..367: note = Related to JAJTGN010000370.1
MSESSSEIALKWLTLWDEKIRHRKWLFDSYSRYVGNLVRNGFPPVFEMRHFAALVGLEETTIAWMLEKNAGFYRTLQIPKRLGGVREISAPSPTLLHVQRWILRNILDKVKPHDCCYGYIPQKSAIENAKQHLGSKTVLKMDLANFFPSIELRRGIAIFRAIGYTGRVSYCLALLCFKDGKLPQGGAASPSISNIVGKRMDLRLSTLASRNNLRYTRYADDMTFSGDEISWKFVAAVELIAREEGFCVNREKTRLIREGRAKVITGVSISSGEARLPRRTVRDIKNEAYNILRNGLEQHAERTHNFDPIAIERLLGRINFWLQVEPTNQTALNYRYRLLEYQKFLDAHGLGLPEDRSDRSLILGGPS

SEQ ID NO: 2147 - protein, 361 aa, Sphingomonas sp.
  source 1..361: note = Related to NZ_JROG01000004.1
MTDSIRTIASNFQVDVRQWQSFFEENGSRRKRLIAGYLHFIEEMASRGLPPIFEGSHLGKLLGTTPVEFGRLTSAPEHHYRSFTIPKRSGDERTILAPTPLLLHCQRWVDAFILRKFPTHSAAHGYVVGRSNITNARVHIGNAQILCLDIANFFESVGVKKITEIFYEAGYPPNVAFLLARLCSYMGHLPQGGASSPQLSNIVMRDFDATMQTFAEKRGLRFSRYVDDIALSGDRVSDQDIQAVEEALEETGLTLNPHKIRFQRGRKKIVTGISIGSGRMLLPRELRRRFRNQAFLALKNLADAVDADPIALERHLGRFAYWKSVEPDNKRVQMVFDRLNELKNILVKRDTSLSDKDGFLS

SEQ ID NO: 2148 - protein, 345 aa, Gluconobacter kondonii
  source 1..345: note = Related to NZ_BEWP01000006.1
MIDSIRTIASNFRIDVNDWRSFFEIHGGRQKRLIAGYLAFVEEMATHGLPPIFEGRHLRKLLGATQAEFGSMTSNPESHYRSFTIPKRNGGERTILTPTPLLLYCQRWIDLFILRKIPVHDAAHGYIAGRSNISNAKIHLGSAQLLSVDISNFFENVNAGKVAYVFQSAGYPPAVVFLLTRLCTYKGHLPQGAASSPQLSNLVMRGFDETLQSYANVRGLRYSRYVDDIVLSGRHIGPNDVNAVEEALKQVGLALNPKKIHFQRGRKKIVTGISIGSGRLLLPRELRRRYRNETFLTLKNITAATERDPIALERHLGQLAYWTNIEPGNERALHLLKQVRSVSTC

SEQ ID NO: 2149 - protein, 361 aa, Qipengyuania aquimaris
  source 1..361: note = Related to JAHVKP010000001.1
MTDSIRSAASSYELDIELWSSFYSKRVERNKQLVAGYLKFIAEMADRGIPPIFEGHHLAKLLGLSLAELSRFTANPEKQYRTFEIPKRSGGAREISTPSPELLECQRWIDWYILRRLPVHDCAHGYVTGRSNRSNAVTHIGSRQVLHLDIRDFFGSIKFRRVISIFLKSGYPRNVAFLLARLCTQGGCVPQGGASSPQLSNVVMYDLDLEIAEFCKSNGLIYSRYVDDIAISGDLIRTTHIAEISRILLESGFLLNEKKTSLQRGRKKIVTGVSIGSGNPKVPRQMRRHFKNQAFIALKNLEHGEQIDEMSDPIHFERCLGQLSYWSMIEPENEKVAKLIDEIKNRLSDLEARLRPSRATR

SEQ ID NO: 2150 - protein, 348 aa, Acidimangrovimonas sediminis
  source 1..348: note = Related to NZ_PHSN01000004.1
MSKSSEEWRHFFEERGVKDKKALLGYLQYIEEIEAKGLPPIFEMQHLSELIGVNKSYIAAVTKDSSAFYRDFEVKKRSGGVRVISAPHPTLLLCQRWINGEILQHVPIHDSAFGFAQGRSVVDNAKMHISGNHLLGMDIKDFFPSIHIDTVRDTFLGLGYPPNVSAIMARLCCKDGRLPQGAPTSPAISNLVCRNMDKEISDLVKPRSLIYTRYADDISVSGEDLGSDVLGKIEFILKSFGFLVNEGKTRISKGGHKKIVTGISIGTGRPKLPRKEVRSIKADAHALLSYGLLSYIERSEKPDPLVVERLMGRVAFWLQVEPENSTAVKLKSNLQDLSNQMDRGRFRL

SEQ ID NO: 2151 - protein, 351 aa, Rhizobium leguminosarum
  source 1..351: note = Related to SJNG01000007.1
MTDFNYDEWQSFYHERVKGEHGLQLVRGYLAHAAALSARNLPPIFEFSHLAALLGVDKVTLATICHSPHNYYRTFAIPKRTGGRREISVPRPILMKLQRWILANIVELVNVHDAAHGFLKNRSIVTNARQHLGCNELLKIDILNFFPSISSGKVRSLFAELGYSGSVASALTRICTKNDGLPQGAPTSPAISNLAAKAFDVRIADHCAEEGLTYTRYADDIAISGERIAPHVRGKIIQILADTELKIHPVKSRLFGPKDRKIIAGISISSGKLMPPKDFVRSVRKDVYHVTTKGLLAHMAAIENFDPIYLERLLGRIAFWKHVTKNSDQSLRAEFALKQYMVVSGLAGEFQ

SEQ ID NO: 2152 - protein, 379 aa, Pseudovibrio sp.
  source 1..379: note = Related to LMCG01000027.1
MNNVKDWEEFLRTHLSHEQQQLEGAIGYVKHLISQSLPPIFGEKHFSILTGVSEIFLRKLADNSAHYYRTFSIPKRKGGFRNISVPSPTLLHVQRWIVANILRKIPVHEAVHGYVASRSVITNAKVHREQESILRIDIKDFFPTIESQQVQALFAAIGYRPELSVLMSDLCCRNNVLPQGAATSPAISNWAFAPLDRKLKELSQKYSYQYTRYADDIFISGKHIHDRIESEVAQILLEQKFRINRAKTRFMGPNRPKILAGVSIASGRLCLPREKKREIKQNAYYIIKYGLFEHCNWKASRDPLILEKLLGKINFWLMVEPKNPTALELQQKLRAISLEFDNSLWEKFEPKRARDIQDIFKPTPAANFEFPSSMRNSKS

SEQ ID NO: 2153 - protein, 353 aa, Mesorhizobium sp.
  source 1..353: note = Related to VFTI01000007.1
MKQSKYKSVLCGDLVPVQPYSQFLQEKTFRWPLKYAAKRGLIAYAERLESQGLPVILDIQHLAWHSGLEAKFIASVALDNRRYYSTRTIPKRRGGERSLFVPRPFLAGLQRWILDEILSKFGLHQSAFGFVKGRRTLDNARLHAASKCILKVDIRDFFGSIKYASVSDIFLGAGYSPKVSYYLSRICTLDDVIPQGAPTSPSISNIAMRQVDIQIAEFCAQNRLLFSRYADDICLSGDSIPESAFPFLSDCLSKFGLEIAEEKTVLAFEGQKKIITGISISSGELRLPKVYRRELRKTIHYICRFGLKSHKNKAGISDPIYRYRLLGQVEYWLSIEPNNSIALLGREILKESR

SEQ ID NO: 2154 - protein, 353 aa, Mesorhizobium sp.
  source 1..353: note = Related to NZ_AYXE01000006.1
MIGTIILCGNPVPVQLYSEFLRERTFRWPLKSAAKRGLVVYAERLENKNLPVILDMQHLSWHTGIKSQFIANVVLDGARYYRSKVIPKRRGGERILFVPRPFLAGLQRWILDEALSKLKPHCSAFGFIKGRGIVENAKVHVNSKCIVKVDIKDFFGSVSYVTVYDIFLQAGYSPKISYFLSNICTLNDALPQGAPTSPALSNMAMFQADTQIAEFCSQNALLFTRYADDICLSGDLIPESAFPFLSDCLAKFGYEVAEDKTVLAFAGQKKIVTGISISSGKLKLPKEQRRKLRQAIHYISKHGINSHLANLAILDPIYRYRLAGQIDFWLSIEPDNEVAKLGRRIIRSTISAG

SEQ ID NO: 2155 - protein, 314 aa, unidentified
  source 1..314: note = Related to nan
MELKFSFPPPAIQTLADLADVLNVERWCLGKAINSSRSFYRVFQLPKRSGGYRSISAPVPSLLSVQKIIYKSILSSVVCSDRAHGFLSGRSVRSHAEVHLNGRDFLLTDIENFSDSIKIEDVVSIFSKIGYVHEIASALALLCTLDGSLPQGSPTSPVLSNIYSIRLDNRLSNICSDLNISYSRYADDMVFSGDKMSLGFLRLAQSIINSEGLNLNSKKTMFAKSPSRLIITGISISNRTLKLPKETKRALRFKAHFIARNGILSELERQETADPFYIDRIIGQLCFWSFIEPENRFPKIYKNVIKNIINNNPS

SEQ ID NO: 2156 - protein, 321 aa, unidentified
  source 1..321: note = Related to SEDZ01001888.1; note = Proteobacteria bacterium
MVGRIELPFRTIRGLARQAEVRHSVLRAVLSKIESNYRLVRIPKATPGEYRSLSIPKPTLKQIQRTIYDSALKGIAISSSAHAYAPGRSIVSHARIHAGSTDFIQIDIKEFFPSVSPARVRVLFDELGFGSDVAQALTALCTFQGGLPQGAPTSPSISNAILKHLDEDLDAYAVSRSCRYSRYADDLVISGSSLDVADFEATIALVAKHGFRINDRKSRLMMNPSKVIITGISISSGVLKVPKSFKRQLRQMSHRLLVSPQLTISEDGHVDPFLFDRVIGRLTFWRMVEPEAVFPRRQIELLVSRYPSGVVSSRPERLPFV

SEQ ID NO: 2157 - protein, 311 aa, Rhizobium leguminosarum
  source 1..311: note = Related to WIEF01000046.1
MFEENLAIGSLTQLSLASGIPSSVISSLVFEREGRYRKHFIAKRDGGARTISVPLPALLQVQKTINKEILSTVDIHDAAVGFRKHHSIIDHVKPHLGNKKFAKFDIKDCFGSIAFNAVFSIYLRITNDPALANSLSELSTDEGKLPQGAATSPSLCNISLKFLDERIFGLCQRLGLTYTRYADDLLISGTKLDLYIYRTLKSYIEDCGFLTNEKSRLMEDPQRLIICGISISESDLKLPKQKKRDIRQAAHFLVNRPIVSESISDELFDPFHVDRVLGRLQFWRFVEPEAEFPIKYIPIIKERIASQIDTQ

SEQ ID NO: 2158 - protein, 347 aa, Roseovarius sp.
  source 1..347: note = Related to LR701476.1
MTGEDLREWRELYNSRISGNRGRALADGYIKYIESLQALGIPPIFEFSHLADLVGIEYETLAKVASRPQDFYRTFAIPKRSGGIRKIDTPRPILMQIQRWLLDQIVSKSRVSEQAHGFVVGRSIITNARTHLGCRELLKMDLKDFFPSVTASTVHYIFKDMGYPPNVCRALSRLVTLGACLPQGAPTSPALSNIACVELDSNLNNLALKYDLTYTRYADDLTFSGSSIPSDMTSLVANLTSKAGFSTNDKKTILSPAGHRKIVTGISISSGELKLPRTYIRNLRQRIHLLINHGILHPNNDSTAWDPLVLDRLLGMVSFWVSVCPESEAAKRAYSELKNFMMKFQTV

SEQ ID NO: 2159 - protein, 323 aa, unidentified
  source 1..323: note = Related to DXFG01000149.1; note = Candidatus Blautia pullistercoris
MKSDIWKYCNKSHTREFLLSLGLTGKLNLPEEKQLSLLYGLSNHAEEHYQKVQIPKRNGTWRTLYVPDSLLKYIQKQILHKILMQFPVSSCASAYKKGCALKENAAPHSGKPIVLKMDIWDFFGNITFISVYQHAFPGELFPPSVRTLLTHLCCYKDFLPQGAPTSPYISNLVLAPFDHYMENWCKGRNITYTRYCDDLTFSGNFEPEMLIPKVSSFLLRMGFEVNPKKTKVCRQGQQQIITGLIVNEKAQVPKAYRRSLRQEIYYIEKFGLSEHLAHIHSDLTPERYLEKLKGRIRYILQINPQDKVFQEAFTHLNKIHISH

SEQ ID NO: 2160 - protein, 323 aa, unidentified
  source 1..323: note = Related to DWUX01000243.1; note = Candidatus Blautia stercoripullorum
MSSDIWKYCDKNHSREFLLSLNLTGNLNLTKEKQLSLLYGLSNHTEEHYQKIQIPKRNGAWRTLYVPDSLLKYVQKQILHKVLTQLPVSYCASAYKKGCSLKENAAPHTGKSIVLKLDILDFFGNITYISVYQHAFPGELFPPPVRTLLAHLCCYRDFLPQGAPTSPYISNLVLFPFDRYMERWCKNQNITYTRYCDDLTFSGSFEPEAVIRKVSSFLLRMGFEINPKKMKICPQGQRQIITGIVVNEKTQVPKTYRRNLRQEIYYIEKFGLSEHLAHIHLDLTPEKYLEHLKGKLRYVLQINPQDREFQEALARLNRICISH

SEQ ID NO: 2161 - protein, 327 aa, unidentified
  source 1..327: note = Related to DXBG01000050.1; note = Candidatus Blautia pullicola
MNSDLWKYCTGSQCRDFLLSLNLTGNMKLSDEKKLALLYGLANHTQDHYKRVEIPKKTGGFRTLYVPDSVLKYVQRQILSNVLSQFAVSPCATAYQKGHSLICSAKPHLQKPMLLKLDISDFFGSITYISVYQHAFPGEIFPPSVRTLLTHLCCFQDMLPQGAPTSPYISNLVLAPFDKYMEKWCRDRAITYTRYCDDMTFSGSFSPGQVTAKVRGFLGRLGFQLNPEKTRVIHQGQRQIVTGIVVNEKAQTAKAYRRRLRQEIYYIEKFGIYEHLKNIHSSQTPENYLKSLEGKIRYCLQINPQDVQLLNPWEKFKKIKTEGISES

SEQ ID NO: 2162 - protein, 324 aa, unidentified
  source 1..324: note = Related to JAGZGI010000008.1; note = Lachnospiraceae bacterium
MAPSLWKYYTKEQTQDFLLSLHLTENLTHTPTAEMALLYALANHADEHYEKISIPKRNGTKRILHAPDSVLKYVQTQILRQVLREFPVSGYACAYQKGISLRSNAFPHQAQKLVLKLDIQDFFDSISYISVYQHGFPCERIPDSVRTLLAHLCCYKDRLPQGAPTSPYLSNLVMKPFDEYMGNWCRVREIAYTRYCDDMTFSGDFHPKEVLKKAEGFLNRLGFELNHKKTRICSQKNRQEITGIVANEKLQVPKNYRRRLRQECYYIRKFGLENHLSHIEYTGDKQKYLQRLLGKIQYVLQINPEDGEFCEWKRWITNSFFIHD

SEQ ID NO: 2163 - protein, 324 aa, Blautia argi
  source 1..324: note = Related to NZ_CP030280.1
MNSSLCNYCTENQIQDFLLSLHLTGTLTHSPKAELALLYGLANHAEEHYERVLLPKKDGSKRILHVPDSVLKHVQKQILRQVLMEIPVSSYSCAYQKGSSLSQNAAPHKGQKLLLKLDIHDFFGSISYISVYQHGFPCERIPDPVRTLLAHLCCYKDMLPQGAPASPYLSNLVMKPFDEYMGNWCREREIAYTRYCDDLTFSGDFNPKEVYRKAKGFLNRLGFEVNSRKTHIISQKNRQEVTGITVNEKLQVPKNYRRQLRQECYYIQKFGLENHLKQTGCQDSSAKYLQRLLGKIEYVLQVNPEDMEFQELKKRMKVYRKNDE

SEQ ID NO: 2164 - protein, 322 aa, Blautia hansenii
  source 1..322: note = Related to CP022413.2
MENSLWKYNTHNDSLDFLRSLHLTDGLNLASDNQLAFLYALSNHAQNHYSQVFIPKKNGKKRKLLIPDYLLKQVQTNILKHILVQFPVSPYATAYKSGCSTVFNAFPHLNQKLLLKLDIHDFFGSITYIDVYQKVFKSELFPPSVRTLLTHLCCYHDALPQGAPSSPYISNLILKPFDNYIGNWCKKQQITYTRYCDDMTFSGDFNPVLVKKKVQSFLMRLGFSLNPEKTHVCSQKNRQEVTGLVVNQKLQTSKEYRRRIRQECYYIKKFGLKDHLAHIGYKKGETHYLQSLNSKINYILYVNPSDSEFLLLKKELSSFFQV

SEQ ID NO: 2165 - protein, 323 aa, unidentified
  source 1..323: note = Related to DVGS01000147.1; note = Candidatus Egerieimonas faecigallinarum
MQNGLWKYCSSAQETEYLLSLDLAGALTASREKQAALLYALSNHAEEHYRRVRIPKKHGGFRTLDVPDRLLKSVQQRILTQVLEHLPVPECARAYRKGVSLLENAEPHAGQRCVLKLDIRDFFGSITYLSVYSLAFPGEFFPPAVRTLLTHLCCLHDSLPQGAPTSPYISNLVMAPFDRYISGWCEARGITYTRYCDDLTFSGDFNPNEVKSAAEGFLLRLGFELNPDKTRFFSSSRRQEVTGIVVNDRPHLSKSYRRKLRQEWYFLKKYGTENHLQHMGSPLTPEKYLQSLKGRILYVLSIDPSDREFADMLRELSAERSSI

SEQ ID NO: 2166 - protein, 330 aa, unidentified
  source 1..330: note = Related to DXGZ01000117.1; note = Candidatus Mediterraneibacter vanvlietii
MHYDIWKYCTKDQWIQYLLSMNLTGNLRLSDEKKLALLYELSNHAEEHYTTIRIPKHSGGLRVIRQPDSLLKYIQRQILFRILVQIPVSDCAFAYRKGFSAADNARPHAGKDTVLKLDIHDFYENITFMAVYQHAFPETLFPPPIRTLLTHLCCYDSILPQGAPTSPCISNLVMRPFDETMKQWCGEQGITYTRYCDDMTFSGHFPGNTAQEVIDKTRGFLLRLGFELNQKKTRLIRRGCRQEVTGYTVNDRVRTSKDYRRKLRQEWYYIRKFGLEEHLKTLLGTSHVTDAQKNSYLQSFTGRIAHVLRTDPQNTVFLAIQKEVKLMRNS

SEQ ID NO: 2167 - protein, 336 aa, unidentified
  source 1..336: note = Related to DXEY01000047.1; note = Candidatus Mediterraneibacter colneyensis
MSQELWKYCTKEQCRDFLLSLRLTGSLCHTDEKRVALLYGLSNHVDEHYHIRKLPKRGGGCRTICEPDPLLKYVQKQILCRVLSQFSPAPCACAYRKGMSLRDNALPHTGKEKVLKLDIRDFFGNITYSSIYQHVFPGTIFPPSVRTLLTSLCCYDSVLPQGAPTSPCISNLVMKPFDQYMENWCAKRSISYTRYCDDLTFSGSFDHVQVIRKVRSFLKRMGFELNTGKTRIITRGSRQEVTGLTVNDSPGVPRPYKRALRQEWHYIKKYGISSHLERTSGISSITLEAKKHYLIQLAGKAGYILQIDPQNLFFQEMRQEILQLIQETGWQDASQN

SEQ ID NO: 2168 - protein, 354 aa, unidentified
  source 1..354: note = Related to NFKT01000023.1; note = Proposed Lachnoclostridium sp.
MGAVLINHDTQIEEKQSEETTDSPAGHGLWKYCTPAQCRDFILSLNLTGSMRLSSEKQLALLYGLSNHTEDHYAKKKIPKRNGGFRTLYAPDPLLKYVQRQILRKVLVQFPVSGCACAYRSGASTRDNALPHVGKEKILKLDIHDFFGSISYISVCQHAFPGTIFPPQVQTLLASLCCYDSMLPQGAPTSPYISNLVMKPFDRYMEEWCRQRDISYTRYCDDMTFSGSFDARKVTAKVRAFLLRLGFELNEKKTRIITQSGRQEVTGLVVNDHIQVSKAYRRRLRQEWYYIRKYGLKGHLARINYSNTEEAYLASFSGKVNHILQCCPEDAYFQEIKLALQSRTDTRTDAATYH

SEQ ID NO: 2169 - protein, 328 aa, Ruminococcus sp.
  source 1..328: note = Related to JAJEQX010000005.1
MSGDLWKYSTKEHWVRFLLSLGLTEPLQLSESGALPLLYELSNHPEAHYTLHRIPKRSGGVRLLHEPDTLLKTVQRQILKNVLKPQSVSDCARAYRDGVSLKDNASAHTGKALILKLDIHDFFGSISYLNVFQHAFPGTLFPPAVRTMLTALCCCDDALPQGAPTSPYISNLVMKPFDNYTDIWCRQRGISYTRYCDDLTFSGDFDPREVQCKTEMFLLRLGFELNRKKTKVIRSSSRQEVTGLTVNEKVSVPKEYRRKLRQEWHYIEKFGLEEHLKRTAGPDTASPELTKKYLLSLSGRIGHVLQADPESAYFREMASNVKTLLQNG

SEQ ID NO: 2170 - protein, 333 aa, unidentified
  source 1..333: note = Related to JAGTTS010000004.1; note = Clostridiaceae bacterium Marseille-Q3526
MQAVCRGEQDIWKYCTKEQWKEMICSFGLLGDPEIPQEIQMAVLYRFSRHSSCYYREKKIPKRFGGVRCLMIPDSGLKAVQRRILKHILSERPVSSCACAYRKGVGIRDNAAAHVGQESVLKLDIEDFFGSITSSAVYGLAFPGTLFPPPMRGLLTALCCCKGRLPQGSPASPAISNLVMKPFDDSMDLWCRQRGIRYSRYCDDMTFSGSFEPGEVIRKVQSYLSELGMRLNRRKTGVYAKNCRQEVTGITVNQKAQLSKDYRRKLRQECYYCRKYGIESHMERLGAGGQEAEEQVLARLLGKIEYLLSVDPANREFQAQREYFRKLMKTLHT

SEQ ID NO: 2171 - protein, 337 aa, Clostridium sp.
  source 1..337: note = Related to NZ_CP085988.1
MGETGLWNHCSSRQCVEMILSMKLLGYASLTEEQELSVLYELSNHASRHYREAVIPKRTGGVRHLMVPDSTLKAVQRRILRNVLSGLELSEQAYAYRKGVGIRENAAVHTGQEKILKLDIHDFFGSITSSSVYGLAFPGTVFPPQVRGLLTSLCCLRGRLPQGSPASPAISNLVMRPFDEHMGLWCRERNIRYSRYCDDMTFSGSFDAGKVIRKVSGFLSERGMRLNWKKTGVYGKNCRQEVTGLTVNEKVQLPKELRRQLRMECYYCRRFGTESHMERLGLAESESEEHFLMRLLGRLEYALSVSPGAKEFEQEREYFREQLKALRERRAQKNQKG

SEQ ID NO: 2172 - protein, 350 aa, unidentified
  source 1..350: note = Related to JAGZWN010000002.1; note = Clostridiales bacterium
MSGNLWKYCTTDQWQDYLLSLHLGGSNLPLKKEMAVLYHFSNCQEEHYRKGRIPKKSGGYRTLWIPDGQLAGIQRRLLGRVLETMEVSEYAAAYRKGMGLADGARPHVGKPVVVKMDVKDFFGSIGYLTVYRKAFPPWLFPDPVRGLFASLCCFRETLPQGAPTSPYISNLVMRDFDCSLGSWCRERGIAYTRYCDDLTFSGDFDPGQVIRKATAFLEAMDFSVNREKTRVFTRGARQEVTGLVVNEKLQVPGKTRRRLRQEWHYCRMYGVEEHLKQTGLEESPEHYLERLAGRIQYVLSVDPGNSVFGRMKEEVARELAVRRATGASESFRPGSESDGKIRTKNRQKMD

SEQ ID NO: 2173 - protein, 328 aa, unidentified
  source 1..328: note = Related to HF995414.1; note = Firmicutes bacterium CAG:646
MDERTNIWKYCSREQSMEFLLSLRLTEDFRGAQDHRLAQLYEISNHPQRHYRKAVIPKKTGGNRVLWIPDTELAIIQRRILRNVLEERPVSSYAAAYRRGQGLKDHAECHRNQKLLVKVDIHDFFGSISWMQVYQKAFPWYLFPPSVRNLLTNLCCFREALPQGAPTSPAISNLVMASFDESMGGWCEERQISYTRYCDDMTFSGEFDPGMVIRKVSAYLEQMGMVLNRKKTRVYTRGSRQEVTGLTVNERVQVPRFYRKKLRQEWYYCKKYGVKEHIKALSLEAEPAAYLAGLMGKVQYVLQIDPENREFLQYRKEIQEEITKNYEN

SEQ ID NO: 2174 - protein, 339 aa, unidentified
  source 1..339: note = Related to DXHY01000007.1; note = Candidatus Eisenbergiella stercoravium
MSGELWKYCGKEQEKAFILSLNLLPASMRERMSGEAQLALLYVMSNHVEQHYRETRIPKKGGGSRRLLVPDGMLKGVQRNILHHCLDGRSVSRHACAYRRGLSPVDNAAPHAGGERDKILLKLDIRNFFDSILFPGVYGAAFPESLFPPAAAGLLTHLCCCHDRLPQGAPTSPAISNLVMKPFDDYIGKWCEERKVIYTRYCDDLAFSGRFDAKEVYRKVRGFLAAMGFELNEGKTVIAGRGRKQTVTGLVVNERPRTSAQYRRKIRQEMYYCRKFGVEEHLRMAGLLNGREDAGETSEKADAFLQSLSGRIGYVLQMEPENREFLEYQEICRKMMDSH

SEQ ID NO: 2175 - protein, 342 aa, unidentified
  source 1..342: note = Related to DWUW01000200.1; note = Candidatus Eisenbergiella stercorigallinarum
MSSKLWKYCGTQQEKEFLLSLNLLPSGIRERMSGEAQLALLYSLSNHTQRHYRETRIPKKGGGSRRLLVPDGLLKGVQRNILHHCLDGRSISAHACAYRRGRSPIDNAAPHAGGEKGRLLLKLDIRNFFDSILFPRVYGAAFPESLFPPAAAGLLTHLCCCYDRLPQGAPTSPAISNLVMRPFDDYIGKWCEARQITYTRYCDDLAFSGVFDAGEVYRKVRGMLEAMGFALNSRKTVVANQGMRQTVTGLVVNERVRTSAQYRRKIRQEIYYCCRYGVREHLKAVGSLSGKETEGEAATKEQAFLQSLFGRIAYVLQTEPENQEFLEYRDGCRSMLLEKERG

SEQ ID NO: 2176 - protein, 349 aa, unidentified
  source 1..349: note = Related to DXDD01000050.1; note = Candidatus Eisenbergiella pullistercoris
MSSQLWKYCGTQQEKEFILSLNLLPAGMRERMSGEAQLSLLYALSNHTERHYRRARIPKKSGGSRRLLVPDGLLKSVQRNILRHCLDGRSVSAHTCAYRRGLSPIDNAAPHAGGEKDKILLKLDIRDFFDSILFPRVYGAAFPESLFPPAAAGLLTHLCCCYDRLPQGAPTSPAISNLVMKPFDEYIGKWCEARQISYTRYCDDLAFSGVFDVGEVYRKVRGMLEAMGFELNRKKTVVARQGMRQSVTGLVVNDRVRTDAAYRRRIRQEMYYCTKFGVREHLKVAGKPDGMETEAEREAETAAEEYAFLQSLRGRIGYVLQMEPENREFLEYLEEWKRLWEELENRERK

SEQ ID NO: 2177 - protein, 345 aa, unidentified
  source 1..345: note = Related to DWWS01000044.1; note = Candidatus Eisenbergiella merdavium
MSSNIWHACTDRQVREFILSLNLLPDGSREELSGEKQLALLYALSNHPERHYRKVRIPKRSGGSRRLLVPDGLLKGVQRNILHHCLDGRSVSEHACAYRRGVSPMAGAAPHAGGGKDKVLLRLDIRDFFDSILFPRVYGAAFPESLYPPAAAGLLTHLCCFYDRLPQGAPTSPAISNLVMKPFDDYMGKWCREREITYTRYCDDLAFSGAFDVGEVYRKVRGLLEAMGFELNSGKTAVLKQGMRQTVTGLVVNERVRTSAQYRRRLRQEIYYCRRYGVREHLKAVGRLTGAETEADVSALETAYLCSLLGRIGYVLQTEPENAQFLEYREICRSLIEGADAAEWG

SEQ ID NO: 2178 - protein, 361 aa, unidentified
  source 1..361: note = Related to DWWH01000066.1; note = Candidatus Eisenbergiella intestinipullorum
MSGRLWKYLTPQQEREFILSLNLLPASCRKRMSGEAQLALLYAISNHVERHYRKVRIPKKDGKSRRLLVPDGLLKGVQRNILRHCLDGRSVSEYACAYRRGLSAADNAAPHAGGGKDKLLLKLDIRDFFDSILFWQVYGAAFPGSLFPPAAAGLLTHLCCCGDRLPQGAPTSPAISNLVMKPFDEFMGAWCRQRQIVYTRYCDDLTFSGAFDPKAVYHKARHLLEAMGFALNAEKTALRNRGMRQSVTGLVVNERVRTGVPYRRRIRQEMYYCRKYGVGEHLQAVGRLTGTETQEEAAEAERAFLCALLGKIGYVLLLEPENREFLEYREICRGMQAEQEKASCPPACGEREQKRRGGKEK

SEQ ID NO: 2179 - protein, 328 aa, unidentified
  source 1..328: note = Related to AP025576.1; note = Lachnospiraceae bacterium
MGNTQLWKYCTTRQCQDFILSLRLIPGGEKMSREKQLACLYTLSNQGIKNYRRVTIAKKGGGSRQLLVPCGLLKAVQRNILHHVLDERPVSPCALAYRKGTDIRANASAHLGKNKVLKLDISHFFDSILFPRVYGAAFPDTLFPPAAAMLLTSLCCCKERLPQGSPASPAISNLVMRPFDEYMEGWCREREITYTRYCDDMTFSGSFDAPALITKVRSYLEAMGFSLNEKKTKLLTEGVRQSVTGIVVNEKLQVSRDYRKKLRQEVYYCRKYGIEAHLARIEAAEGIRWDKERYIGSVLGRLRFVLQINPQDEEFARYCRDWKEQYLG

SEQ ID NO: 2180 - protein, 327 aa, Eisenbergiella tayi
  source 1..327: note = Related to NZ_MCGI01000005.1
MGNSPLWKYCTREQCQDFILSLRLIPGGEKMSREKQLSCLYTLSNRGSRNYRRVTIDKKDGGSRTLLVPCGLLKGVQRNILHHVLDERPVSPCARAYRKGTDIRGNASCHLGKRLVLKLDISHFFDSILFPRVYSAAFPETLFPPAAAMLLTSLCCCNERLPQGSPASPAISNLVMRPFDIYMDGWCRERGIAYTRYCDDMTFSGDFDAAALCSKVRSYLEAMGFTLNEKKTKLLTGDVRQSVTGIVVNDKLQVSREYRKKLRQEVYYCKKYGIDAHLERVEADTGIRWEKELYICSVQGRLHFVLQVNPQDDEFAGYCREWKELFM

SEQ ID NO: 2181 - protein, 328 aa, Eisenbergiella sp.
  source 1..328: note = Related to NZ_QVLV01000005.1
MSNSQLWKYCTKEQCQDFILSLDLVPHSAGMSREKQLACLYMLSNRGAENYHKEILTKKDGGTRTLMVPCSLLKAVQRNILHHVLEQRPVSDCARAYRKGTDILANAGPHTGRKQVLKLDISHFFDSILFPRVISAAFPDTLFPPAAAALLANLCCCRERLPQGSPASPAISNLVMRPFDESMRRWCEARQIVYTRYCDDMTFSGDFDPAAVYHKVKSYLEAMGFSLNEKKTKLLKDGVRQSVTGIVVNEKPQVSRDYRKKLRQEIYYCMKYGVTGHLERLREKTGNAVEEQRYICSVLGRIQFVLQVNPEDREFAEYCRIWKERFVK

SEQ ID NO: 2182 - protein, 362 aa, unidentified
  source 1..362: note = Related to RAYB01000053.1; note = bacterium 1XD21-70
MDIGESGGQGSAWTVSRKDLWRYCTDAHCQEMILSFRLLGENGWPREKVMACLYALSNHSERHYERISIPKKDGSRRILLAPDPLLKHVQKNLLRHVLEGLSIAGCATAYHRQAGIICNASGHVGKPLVMKLDIRDFFGSITFPMVLCHAFPVKYFPPPVGVLLTSLCCCGEYLPQGAPTSPAVSNLVMKPFDEYMAGWCRERKISYSRYCDDMAFSGDFDAWEVRQKAENFLRAMGFELNRKKTKVLPQNMRQTVTGLVVNERVQTSAQYRRKLRQELYYCRKFGVEGHLRQSGEAKHFLLPDGSLDKQRYLQALAGKVRHVLLTRPEDAWFLEAKGWLLTERKRQEGRQSRREMGTENGI

SEQ ID NO: 2183 - protein, 353 aa, unidentified
  source 1..353: note = Related to QXWS01000023.1; note = Clostridiaceae bacterium
MKETAISSSKDLWHYCTEDHVRTMLLSFRLLGDNDWPEEKILACLYSLSNHTQDHYKRIQIQKKSGGTRTLLAPDPLLKYVQRNLLHHVLDGLSLADCATAYRKNRDDLYKRGGQEDRDGSAYKECFGIVPNARIHVGKPLVMKLDIVDFFGNITFPMVLHQVFPARMFPPAVGNLLTSLCCCGEYLPQGAPTSPAVSNRVMKPFDEFMEAWCRERGISYSRYSDDLTFSGDFSPKEVRGKVKGFLGAYGFELNRKKTRILSLGTRQKVTGLVVNEKAQTSKEYRRKLRQEIYYCRRFGVKEHLQFQNKGEPACEADQERYLYRLLGKVNYVRMTRPEDKWFLEARQWLKGML

SEQ ID NO: 2184 - protein, 322 aa, unidentified
  source 1..322: note = Related to RAYY01000002.1; note = bacterium D16-56
MLLSFHLLGENDWSEDKILACLYALGNHGEKHYKKIRIPKKSGGFRILLAPDPLLKYVQKNILHHVLEGFSVSDQATAYRKKGNPANAVCGCVENASLHRGKPLIMKLDVENFFGNITFPMVLHSAFPIQYFPPEVGKLLAELCCYLEYLPQGAPTSPAISNLVMKPFDEYMAEWCRNRGIVYSRYCDDLTFSGDFDPEEVLKKSEGFLKAMGFELNRKKTRVLSKASRQTVTGLVVNEKVQPSREYRRKLRQEIHYCRKYGVEEHLRRRGTQGMLFAGKEDDRGKYLYSLLGKINYVRLTRPDDTWFLEAEKWVREQLSER

SEQ ID NO: 2185 - protein, 335 aa, Enterocloster bolteae
  source 1..335: note = Related to CP069520.1
MARTDLWKYCSAEQCREMMISFRLIGAGDWPPEKIMGCLYALSNHAEKHYQRVNIPKRSGGFRTLLVPDPLLKNVQRNLLHHVLDGFTVSDSAAAYRKGASVAANAGKHQGRKIVMKMDIEDFFGSITFPMVLHHAFPTAYFPPAVGVMLASLCCCHDRLPQGAPTSPAISNLVMKPFDEYMEAWCGEREIVYSRYCDDMTFSGVFDGSEVKGKVYGFLRSMGFEPNLRKTRILTRGTRQVVTGLVVNERVRVPAPYRRRLRQEIYYCMKYGAKEHLTRTGRQAYLNDGDGGTRRYLESLLGKTAYVLLASGDGDAWFREAQVKLREMLGQDMCL

SEQ ID NO: 2186 - protein, 332 aa, Enterocloster sp.
  source 1..332: note = Related to JAKNTH010000001.1
MAQADLWKYCSTEHCREMLLSFRLLGTRDWPPEKIMGCLYALSNHAQRHYRKVRIPKRSGGYRTLLVPDSLLKEVQRNLLHHVLDGFAVSASAAAYRKGASAAANAGIHQGRKIVMKMDIEDFFGSITFPMVLHHAFPAAYFPPPVGAMLAALCCCHDRLPQGAPASPAVSNLVMKPFDEYMEAWCGERDIAYSRYCDDMTFSGVFDTAEVKGKVYGFLRSMGFEPNQRKTRILTRGTRQTVTGLVVNDRVQVPAPYRRRLRQEIYYCLKYGAEEHLRRTGRDAYLKEGDAGVKRYLESLLGKTAYVLLAGGGDAWFREAQVRLKSMVRQGI

SEQ ID NO: 2187 - protein, 326 aa, unidentified
  source 1..326: note = Related to DWYS01000122.1; note = Candidatus Enterocloster faecavium
MGDGEIWKYCGKEQAVEMILSLQLLPSSGWQRERILACLYALSNHPEEHYHPVWIPKRRGGYRRLDVPDPLLKQVQRNILHHVLEGFSVSPAAAAYRKNRCAADGAAVHIGKPLVLKLDIHDFFGSITFPMVLGYGFPAAYFPEEVRVLLASLCCCRQRLPQGAPTSPALSNLVMKHFDEAMAAWCGPQNIAYTRYCDDMTFSGDLNPGAVIGRVRGFLETMGMELNHSKTAVCSQFSRQTVTGITVNQVCQLPREDRRKLRQEVYLCLRYGTGESRPADSVRRLEQILGKVSYLLQVRPDDRWFLEQREALKEMLKKERGQVYES

SEQ ID NO: 2188 - protein, 326 aa, unidentified
  source 1..326: note = Related to DWWB01000077.1; note = Candidatus Enterocloster excrementigallinarum
MGKGDVWKYCEKNQITEMILSLELLPSSRWERDQILSCLYALSNHPEEHYHPVWIPKRSGGFRRLDVPDPLLKQVQRNILRHVLEGFSVSPAAVAYQKNRCAADGAVIHRGKPLVLKLDINDFFGSITFPFVLGYGFPAAYFPEEVRVLLASLCCCRQRLPQGAPSSPALSNLVMRSFDDIMVSWCAAQGIVYTRYCDDMTFSGDFNPALVIGRVRGLLEPMGMELNRKKTEVCSQADRQVVTGITVNQVCQLPREDRRKLRQEVYLCLRHGAEGIEPAASVRRLERILGKVSYLLQVRPDDRWFLERRDMLKDMLRKERKRVYES

SEQ ID NO: 2189 - protein, 323 aa, Lacrimispora sp.
  source 1..323: note = Related to JAJCIC010000013.1
MPEHLGLWKYCDKEQCKDMLLSFRLVGSDSWTDGKIIACLYALSNHAKEHYHKTELPKKRGGRRILMVPDPLLKQVQRNLLHHVLEGFSVSPAACAYRKGASPLANASLHTGKRLVLKLDIRDFFGSITFPMVLHHVFPSTYFPPAVGTLLASLCCYRDRLPQGAPTSPAVSNLVMKPFDDHMLEWCRSRRITYSRYSDDMTFSGDFDPGEVIRKTESFLRAMGMELNREKTRVCAAGGRQSVTGIVVNEKPGLPRDYRRALRQELHYCMIYGVEEKSAACLRSLLGKTVYLLSVNPEDQWFQGAEAFLREELKKIEEKGEEK

SEQ ID NO: 2190 - protein, 317 aa, unidentified
  source 1..317: note = Related to DWWT01000008.1; note = Candidatus Enterocloster excrementipullorum
MNNMDIWKYASAEQYKDMLLSFALLSGPDWPPKRIMACLYALSNHPEAHYHALSVPKKSGGVRRLLAPDPLMKQVQRNLLHHVLEGFSPSEAAMAYRRGVSAKDHAARHCGQRVVLTLDIQDFFDSITFPQVLARCFPIIYFPRPVGVLLASLCCAYERLPQGAPTSPAVSNLVMKPFDEHMLAWCGERDITYSRYCDDMTFSGDFDFREVKGKAEGFLEAMGMALNRKKTRVSFRGGRQAVTGLVVNERPGVPREYKRRLRQEIYQYRKFGLPGTETDSEKYRARLLGKIRYVLSVHPEDAWFAQAEQELKRRNPS

SEQ ID NO: 2191 - protein, 328 aa, Clostridium celerecrescens
  source 1..328: note = Related to NZ_PGET01000001.1
MYHTDLWKYCTKEYCRDMLLSFRLLGNTSWPDQKVMACLYAFSNHTERHYRTVRIPKRDGRQRSLMVPDYMLMRIQRNILHHILDGYAVSSSATAYHKGAGVVSNARVHTGKHVVVKLDIKDFFGSISFPMILKSVFPVRYFHPAVGTMLTALCCCNDFLPQGAPTSPAVSNLVMKHFDESINKWCENKGISYTRYCDDMTFSGDFNPGLVIRKVSGFLNSMGFELNETKTRILYRNGRQAVTGIVVNEKLQVSLDYRRKLRQEIFYCQKYGVNSHLKRIGNAAGIPENQYLLSLLGRIQYILLVNPEDQWFQEAEQKLLAVLGRKSE

SEQ ID NO: 2192 - protein, 328 aa, Clostridium indolis
  source 1..328: note = Related to NZ_AZUI01000001.1
MYQTDLWKYCTPDYCRDMLLSFRLLGNTRWPDQKVMACLYAFSNHAERHYGIVLIPKKNGKSRKLLVPDYMLMKIQRNILHHILDGYSVSGCATAYHKGAGVVSNAAVHRGKNVVVKLDIKDFFGSISFPMVLSSAFPVQYFPTSVGTMLTALCCCNDFLPQGAPTSPAVSNLVMKHFDESINKWCEGKGISYTRYCDDMTFSGDFNPGLVIRKVSGFLNAMGFELNETKTRILYRNGRQAVTGIVVNEKLQVSRDYRRKLRQEIFYCLKYGVKSHIEKLGNDARISEDQYVLSLLGKIRYILLVNPEDHWFQEAEEKVLAVLGRKAG

SEQ ID NO: 2193 - protein, 332 aa, Clostridium aerotolerans
  source 1..332: note = Related to NZ_JHWJ01000001.1
MYGTELWKYSTPEHCREMLLSFKLLGEDWPDQKAIGCLYAISNHTERHYHTVLIPKSDGTKRKLLVPDDLLKMIQRNITKHVLSEFEVSSCAAAYRKGTSVLTNASVHTGKKLVLKLDIEDFFGSITFPMVLNGAFSGRYFPPSVGTMLTALCCYRDYLPQGAPSSPAISNLVMKPFDDYMKVWCEKRNISYTRYCDDMTFSGDFQPGPVIRKVSGFLNDMGFSLNQGKTRIISWGRRQTVTGIVVNRKPKVSPEYRRKLRQEVFYCLKYGAKSHIMVTGREEPDEERERRYLRSLLGKIQYLLFINPDDIWFAKAKGKIQSILETSYACLL

SEQ ID NO: 2194 - protein, 326 aa, Lacrimispora algidixylanolytica
  source 1..326: note = Related to NZ_MCIA01000032.1
MYQTELWKYSTKKHCQDMLLSFQLLGEDWPDQKVIACLYGVSNHTERHYHTAMIPKSDGTKRQLLVPDDLLKMIQRNIARNVLSGFELSSCASAYCKGTSVLKNASIHTGKRLVLKLDIEDFFGSITFPMVLNGAFSSKYFPPTVGTLLTALCCYHDYLPQGAPSSPVISNLVMKPFDDYMKVWCEEKNISYTRYCDDMTFSGDFQPGHVINKVSGFLDAMGFALNREKTKILSSGRRQTVTGIVVNERPHVSPDYRRRLRQEVYYCLKYGVKSHITMTGREEPKPEIERHYLFSLLGKINYLLFINPQDLWFKQAEGKIRSILDH

SEQ ID NO: 2195 - protein, 336 aa, Hungatella effluvii
  source 1..336: note = Related to NZ_QJKD01000014.1
MHEPDLWKYCTAEHCREMLLSFRLLEGEEWTDDKVISCLYAVSNHTEKHYNRLRIPKKGGGVRQIQAPDLLLKTIQRNILHHILEGLELSPCAAAYHRGASIRDNAARHTGKNVVLKLDIKDFFGTITFSMVQQRAFNSRYFPVPVGTLLTSLCCLRDTLPQGSPASAAISNLVMKPFDEYMDGWCRERDIVYSRYCDDMTFSGDFAAAEVIGKVKGFLDAMGFELNRSKTKVLTRHTRQTVTGIVVNDRVSVPAAYRRALRQDIYYCRKFGVREHIRSRSDKKYLELGEAGEVKYLMSLLGKIGFVLSVTPGDVWFMEAEEAVKTLLKEYQGQAS

SEQ ID NO: 2196 - protein, 337 aa, Hungatella hathewayi
  source 1..337: note = Related to NZ_WNME01000006.1
MHEPDLWKYCTAEHCREMLLSFHLLEGEEWTDEKVISCLYAVSNHTEKHYSRLRIPKKGGGVRQIQAPDPLLKAIQRNILHHILDGLELSSCAAAYRRGASIWENAACHTGKMVVLKLDIKDFFGSITFPVVHRSAFNSRYFPASVGTLLTSLCCLNDCLPQGSPASAAISNLVMKPFDEYMDGWCRERSITYSRYCDDMTFSGDFSAAEVIRKVKGFLGAMGFELNRSKTKILTRRTRQLVTGIVVNDKVSVPASYRKEVRQDVYYCMKFGVQAHLERRGEEKYLKMGPAGEVRYLTSLLGKIGFILSAAPGDIWFTEAKEAVKSLLREAAEPVPE

SEQ ID NO: 2197 - protein, 333 aa, Enterocloster aldenensis
  source 1..333: note = Related to NZ_QSGP01000002.1
MGEPGLWKYCTAGHCREMILSLRLLEGEEWTERRVLSCLYAISNHTEKHYNKQKLIKKGGGVRHILAPDPVLKTIQRNILHHVLEGLEVSPCAMAYRKGASVRLNAACHMDKQVVLKLDIKDFFGSITYPMVHRGAFNSRYFPVPVGTLLTSLCCCQDRLPQGSPASAAISNLVMKPFDTYMEGWCRDRGIVYTRYCDDMTFSGDFRVSAVYGKVNGFLGAMGFELNQSKTKVLTRHVRQTVTGMVVNDKVQVPLPYRRALRQEVYYCLKYGVKEHLRHRGETAYLAMGEEGELRYLQSLCGRIGFVLSADPEDKWFREAADLVTGNIKTYLK

SEQ ID NO: 2198 - protein, 331 aa, Enterocloster citroniae
  source 1..331: note = Related to FOZH01000006.1
MYDTDLWKHCTPRHCREMILSFSLLEGEEWTDERIISCLYAVSNHTEQHYTCLKIPKKGGGVRRVMAPDPLLKTIQRNILHHILEGYEIPCCATAYHKGASIRGNAMVHLGHEVVLKLDIKDFFGSITFPMVGQRAFGRQYFPEPVGVLLTSLCCYNDRLPQGSPASAAVSNLVMRPFDRYMAAWCGQREVIYSRYCDDMTFSGDFDVSEVMNKANGFLGAMGFELNRSKTKVLTRQERQTVTGIVVNEKLQVPSSYRRELRRDVHYCLKYGVQEHLKRRNERTYLDMGKDGETRYLMSLSGKIRFVLSVNPQDRWFREADDRVKRLLRYM

SEQ ID NO: 2199 - protein, 333 aa, Coprococcus sp.
  source 1..333: note = Related to NZ_FNWC01000007.1
MDNQRLWQHRSKEEDKEAILSLNLLERANVPKEKTLKCIYAVSNHIEEHYREVFIPKKKGGRRKLLVPDYLLHTMQKNILRIILSEEKVSKYAKAYCPGRRIRDNAFAHVGAETILELDIKDFFENITYIMVYQCVFSGEYYPPAVRTLLTQLCCYRDYLPQGAPTSPMISNLVMFSFDQYMGKWCEEREICYTRYCDDMTFSGKFDVREVKQKVRSYLQVLGFELNLKKTKVLKQYNRQSVTGIVVNEKAQVSKTYRRDVRQAVYYCGKYGVQEHLQRTGAQMWLQKGEERYLQHLMGKVNYILQVNPEDCTFQEVRKNLLRIQRQCKGGKP

SEQ ID NO: 2200 - protein, 319 aa, unidentified
  source 1..319: note = Related to JAGZOR010000071.1; note = Lachnospiraceae bacterium
MWKYCTDEEAIRSFHLTDGLRCKEGKEIQTLFAVSNHVEEHYHIAYIPKKKGGRRKLLVPDVILGRIQKNILRNILAERKVSSYAKAYVKGVGIVENALPHSHAEIILKLDIEDFFENITYLMVYQKAFPEKYFPPAIRTMLTHFCCYNDYLPQGASTSPIISNLVMYSFDEYMGKWCEERKISYTRYSDDLTFSGNFDVKEVKHKARSFLEKMGFSLNEKKTRVLKPYQRQTVTGIVVNEKPNISKNYKRQLRQEIYYCEKYGVAEHLRQKGICDKEEITYLKELLGKVNYVLQINSDNMEFREAREKINKMLLKVKG

SEQ ID NO: 2201 - protein, 338 aa, Blautia sp.
  source 1..338: note = Related to NZ_OIWX01000001.1
MAGNDLWKYCEAKEAEDVLRSFHLLEGTGVSDEKYLACLYAVSNHTEEHYHTAVIQKKNGGMRKLSVPDTLLRTIQRNIVKNVLCERSVSQYATAYRKKASVMENARPHVGAEMVMKLDIKDFFDCITFQMVYQYAFPAIYYPPSIRMLLTSLCCRNDCLPQGAPSSPAISNLAMRSFDEYMGAWCGERQMQYTRYCDDLTFSGTFDQKEVKQKVRNFLHVLGFELNRKKTRVQDQSHRQTVTGLVVNEKMQVSREYRNQLRAEIYYCQKYGVTSHLNKMGNPAWMREDEPDGKRYLQYLLGKINYVLAVNPHDGHFCKKREELSLMVREISTRSNTL

SEQ ID NO: 2202 - protein, 339 aa, Blautia producta
  source 1..339: note = Related to NZ_CP035945.1
MAERDIWRYCTAEQVEEVLRSFRLLQGTKVRGDRYMACLYAVSNHIEKHYHIAVIPKKNGGTRKLSVPDILLRTIQRNIVKYVLPERFVSQFATAYRLNASVLMNACPHVGTEQVLKLDIRDFFHSITFQMVYQSAFPAVYYPPAIRMLLTSLCCFMDCLPQGAPSSPAISNLVMKPFDEYMGSWCEERQIQYTRYCDDMTFSGNFDVKKLKLKVKNYLYKMGFELNEQKTKVQRQYQRQIVTGIVVNEKPQVCREYRRQLRAEIYYCGKYGVESHLQRMGISGGGSESPQDPERYAQHLLGKINYVLSVDPGDKYFLEKRDEILLLVKEFRGDSIISK

SEQ ID NO: 2203 - protein, 329 aa, unidentified
  source 1..329: note = Related to DNJM01000030.1; note = Lachnospiraceae bacterium
MSSGQLWKYCTSDQVKEVLLSLHLLDGVPIKEEKRLACLYAVSNHTEKHYHSAAIPKKNGQVRRLFVPDPLLMRIQKNILRHVLAEEAVSEYATAYRAGSAVIENVRPHVGKKKILKLDIQRFFDHITFPLVYQYAFPAVQFPPAIRRLLTELCCYKDYLPQGAPTSPAISNLVMKPFDEFIGAWCAKRKITYTRYCDDLTFSGEFDEKEVKCKVRSYLEAMGFDLNRKKTRLARQCSRQTVTGIVVNEKPQVNREYRRQLRAELYYCRKYGVKSHLERIYGQKRQIEDEDCKTYLRQQLGKVNYVLQVNPADPYFFQEVARLKKELKE

SEQ ID NO: 2204 - protein, 363 aa, unidentified
  source 1..363: note = Related to KE159610.1; note = Lachnospiraceae bacterium M18-1
MIMGGKDLWKYCTAEQVRITLRSLHLLDGVHMEEEKYFSCLYAVSNHPELHYRQASVPKKGGGVRNLLVPDHLLCRIQKNILRHVLADFPISDYAMAYKTGTAIVENAKPHAGMKEILKLDIRNFFDSITYFQVYRNAFPAVYYPPPIRTMLASLCCCRDSLPQGAPTSPAVSNLVMKPFDEYLGAWCEERGIRYTRYCDDLTFSGKFDRREVQNKVRGFLAAYGFELNEKKTRLQKAHQRQTVTGIVVNEKPQVSREYRRKLRAEVYYCSKFGVESHLQRYGGEGPQKESVPREAGEACVRYLQKLQGKINYVLQVNPEDPEFCRAKELVKEMLEARGCSAETEKKSSERGENDDRKSKKVI

SEQ ID NO: 2205 - protein, 351 aa, unidentified
  source 1..351: note = Related to QXWX01000071.1; note = Lachnospiraceae bacterium
MKGKDLWKYCTSEQVHAVLRSLHLLDGVRVEEEKYFSCLYAVSNHPERHYHPASVPKRGGGTRKLLVPDHLLCRIQKNILRHVLADFPVSDYAAAYKPGTAVTENAKPHVGAKEILKLDIRNFFDSITYLQVYRNAFPAVYYPPPIRTMLANLCCCRDSLPQGAPTSPAISNLVMRPFDEYMGAWCRERGIRYTRYCDDMTFSGEFDRREVKNKARGFLAAYGFELNETKTRLQKAHQRQTVTGIVVNEKPQVSREYRRKLRAEVYYCGKFGVESHLQRCRGEEGTKEISREMEGACVRYLRQLLGKINYVLQVNPEDAEFCRAKELAREMLAARSCPADFPDAKELQKNK

SEQ ID NO: 2206 - protein, 337 aa, Schaedlerella arabinosiphila
  source 1..337: note = Related to NZ_RHJS01000002.1
MGGKDLWKYCTQEQVRAALRSLRLLDGVHIREENYFSCLYAVSNHPEQHYHPASVPKKGGGVRRLLVPDPLLCRIQKNILRHVLAEFPISEYAAAYKPGTSIVENAEPHVGAKELLKLDIRHFFDSITFFQVYGQAFPSTCYPPAIRTMLANLCCCRDSLPQGAPTSPAVSNLVMKPFDEYMGNWCQERGIGYTRYCDDMTFSGEFDRREVQNKVRGFLAAYGFELNEQKTRVQKAHQRQTVTGIVVNEKPQVSRAYRRKLRAEIHYCSKYGVESHLQRRREGQAPEKERLMEADCVHFLQQLLGKINYVLQVNPEDTEFCRAKEIVKEMLAERASL

SEQ ID NO: 2207 - protein, 340 aa, unidentified
  source 1..340: note = Related to CP060635.1; note = Proposed Wansuia hejianensis
MTTYLSRCASREYDLWKYCTKEQIHEMLLSFRLLEGAPVREEKKLACLYAVSNHVRQHYHTAQIVKQSGGVRRLLIPDALLGTIQRNLLHHVLDGFSVSAYATAYKKKATVLDNARAHVGRERIMKLDIENFFSSITYPLIYQSVFPAIYFPPAVRRMLTEFCCYEEYLPQGAPTSPAISNLVMKSFDNYMGAWCEEREINYTRYSDDMTFSGLFDEKKLKRKVRNYLLAMGFELNEKKTRLLGRHTRQTVTGIVVNEKPDVGRAYRRKVRAEVYYCKKYGAVEHLRRCEKKEWMNGGQPDAARYLQHLLGKIQFVLQISPEDAQFRAAREDVQSMMRNI

SEQ ID NO: 2208 - protein, 337 aa, Blautia sp.
  source 1..337: note = Related to CP084061.1
MTTTLSNYDNDLWKYCTKEQIKDMLLSFRLLQGAPVREEKELACLYAVSNHIKKHYHTAQIPKRNGSVRRLLVPDALLNTIQKNLLHHVLDGLSVSVYATAYKKKTTVLDNALSHVGQEQVMKLDIENFFENITFPLVYQSAFPAIYFPPAVRRILAELCCYEDYLPQGAPTSPTVSNLVMKSFDNYMGAWCEERGIHYTRYSDDMTFSGVFDEVELKNKVKNYLLTMGFVLNEKKTKLLGKHTRQTVTGIVVNEKADVGRAYKREVRAEVYYCKKYGVMEHLRRCNKKEWMTEGESDTVRYLRHLLGKIQFILQISPEDVQFREAREDIRRLLRDI

SEQ ID NO: 2209 - protein, 332 aa, unidentified
  source 1..332: note = Related to NZ_LT574838.1; note = Proposed Bariatricus massiliensis
MTDQNLWKYCTREQSNEMLLSLGLLEGTGVKPEAALACLYAVSNHTGRHYRTAQIQKRGGGVRRLLVPDALLNKIQRNLLHHVLDGLPVSTYATAYRKRMSVVDNAAPHVGQALILKLDIKEFFENITFLMVYQSAFPAVYFPPAVRKLLAELCCYEDYLPQGAPTSPAVSNLVMKPFDEYMGSWCGERGICYTRYCDDLTFSGSFDWREVKHKVAGYLRVLGFELNEKKTRILKPHVRQTVTGIVVNDRLQTARSYRRQVRSEVYYCTKYGVEAHLRHLGNKGESYGDSRDVMHYLQHLLGKVHFILQASPEDEEFRRAKEEIERLMKEQE

SEQ ID NO: 2210 - protein, 337 aa, Ruminococcus gauvreauii
  source 1..337: note = Related to NZ_CABLBR010000003.1
MSGNDLWKYCTAEQEKEMLISFRLLDGIQMKEEKYLACLYALSNHADEHYHAAAVKKRGGGVRRLMVPDALLGAVQRNILHHILDGITPANASKAYRRGVTIADNALPHVGAKQIVKLDIRDFFENITYLLVYQYAFPAVYFPPAVRTMLTALCCCRECLPQGAPTSPAVSNLVMKSFDQYMESWCCRRGIRYTRYCDDMTFSGSFDAKELKNKVKSYLQVMGFQLNEKKTRVLKRHCRQTVTGIVVNEKPQVSRDYRRNLRSEIYYCLRYGAKEHLSRLGNSKWMTEEGPDTERYLRHLLGKINHVLQVNPEDEYFLWAREKVREISSRATKDEIR

SEQ ID NO: 2211 - protein, 397 aa, unidentified
  source 1..397: note = Related to GL945165.1; note = Lachnospiraceae bacterium 1_4_56FAA
MAGQDFWKYCTTEEIGRTLRTFDLLKGMDVPEEAYLPCLYTVSNQIETHYHPVVIPKKSGGRRKLLVPDALLRTIQRNLLHHVLEEFQISEFACAYKKGTSIVDNARPHVGAKLVLKLDIQDFFDQITWILVYQNAFPGTHFPPAIRKMLTEFCCVRDRLPQGAPTSPTVSNLVMRPFDVHMGEWCREREIRYTRYCDDLTFSGAFAPEEVIRKVRGFLQVYGFELNRKKTRVLGRGNAQSVTGIVVNEKAQVSRAYRRKLRQEVYLFDRYGIKTEEGPKNDEKERMRLLGKMRYVLSVNPEDVWFGNMYKKWKVGADSRKRTEEMQSISEEGGVAMKARVNEGCISCGACVATCPEVFRFDENDLAVAYADVTDETEAQAKEARDGCPVDVIDLEA

SEQ ID NO: 2212 - protein, 333 aa, Clostridium sp.
  source 1..333: note = Related to WQPN01000006.1
MSDLWKYCTAEQCREFLLSLELVGDSGWPDDKKLACLYAVSNHVEKHYHTAVIKKRSGNERRLLVPDPLLKGIQQKILHNVLEDYAVSRYATAYHKGAKLKDNAAPHVGKEKILKLDIENFFENILFKQVLQSSFPKKYFPPAVGTMLAYLCCYYDYLPQGAPTSPAISNLVMKPFDESMGAWCEERGISYSRYCDDLTFSGDFDAEMVKRKAGAFLGEMGFQLNRKKTRVISRGQQQNVTGVVVNCKPQVSKEYRRKLRQEIYFCRKYGIRGHLERIGDRKYLDLGEAGIERYRLRLIGKVNYVLQVNQDDRDFIGCLGDLTSGVKGFSKKP

SEQ ID NO: 2213 - protein, 323 aa, Clostridium sp.
  source 1..323: note = Related to PKUU01000015.1
MSDLWKYCTEEQCRQFLLSLELVGKDGWTDDKKLACLYAVSNHVEEHYHTAVIKKKNGKERLLLVPDPLLKGIQRQILHNVLEERPISKYAMAYHKGASLKDNAAPHVGKEKILKLDMENFFQNILFSQVLQSAFPGKYFPPSVGTLLTYLCCYYDYLPQGAPTSPAISNLVMKPFDESMGKWCEERGIAYSRYCDDMTFSGDFDADMVKRKAGAFLNHMGFCLNHKKTRIITRNRQQNVTGVVVNCKPQVSKEYRRKLKQEIYYCKKYGILGHLERIGDKKYLELGDAGIEKYRLRLIGKMNYVFQVNPEDKEFRGYLKDFV

SEQ ID NO: 2214 - protein, 328 aa, Clostridium symbiosum
  source 1..328: note = Related to AP025571.1
MENTGLWKYCTPEQSREFLLSLRLLGRTDREDGEQLACLYAVSNHIEKHYHPAEIRKRDGSIRRLLVPDPLLKKIQRNILHNILDQMPVSPYATAYHKGAGIRLNARPHSGAKLLLKLDIKDFFENILFSQVYQQAFPTIYFPPSVGTILTYLCCYRDYLPQGAPTSAAISNLVMKPFDTYMGAWCGEKGIRYSRYCDDMSFSGEFDADTVIRKAGGFLKAMGFELNTKKTKAVSCHQRQEVTGIVVNQKPQLSKEYRRRLRQELHYCGRFGLRSHLEAIHDTRFLPLGEAGIQRYRMSLLGKINHILYVNPEDAWFLNARQIVRTLR

SEQ ID NO: 2215 - protein, 330 aa, unidentified
  source 1..330: note = Related to RAYU01000170.1; note = bacterium 1XD42-8
MSRLWRYCTKEQCRDLLLSFQLFGETNWSFEKQIACLYTVSNHIEAHYHSIIIPKKDGSKRQLDIPDYILKKIQKNILHHIIEKFSVPECATAYQKGKGILNNVTPHIGKKTVLKLDIKDFFHSIIFPMVYARAFPEEYFPPSIRTLLTYLCCYRDRLPQGAPSSAAISNLVLKPFDTYMELWCKDRNIQYTRYCDDMTFSGNFHKKEVMKKVQHFLHLSGFSLNYKKTKELSSNRRQQVTGIVVNSKPQVSKEYRRRVSQEIYYCQKFGVLSHLKYIDDKEHLPLGQIGVRKYVSSLQGKVQYILYINPEDKLFRKLLDESIAKIWDSL

SEQ ID NO: 2216 - protein, 332 aa, unidentified
  source 1..332: note = Related to JAGZJZ010000010.1; note = Clostridiales bacterium
MGDQNLWKYCTREHCRKLLTEFQLFGEMNWSKERQIACLYALSNHISDHYHTAVIPKQDGTCRKLCIPDTLLKLVQRNILHHILDGLTVSSYATAYRKGVTILNNVSCHTGQEKILKLDIHDFFGSIPFILVYQSVFHSDRFPPSVGTLLTHLCCYNGCLPQGAPASAAISNLVMKPFDEYMGNWCGERKITYTRYCDDMTFSGSFEAYKVKNKVRSFLKVIGFELNEKKTKLLLAGQRQAVTGIVVNEKPQVSKEYRKKLRQEVYYCLKFGAASHLEHMNHDESGSKEGAERYLQQLLGKINFVLQVNPEDEYFRAARERLRKNQNERVNR

SEQ ID NO: 2217 - protein, 328 aa, Robinsoniella peoriensis
  source 1..328: note = Related to NZ_FMJR01000027.1
MGDHRLWKYCTAEHCRQLIMEILLFGEINWPEERQIACLYALSNHIPSHYRTAKIPKRDGTCRRLCIPDTLLKMVQRNILHHILDPIPVSSCATAYRKGVSLISNVSGHVGQEKILKLDIHDFFGNIPFILVYQRVFHSYRFPPAVGTLLTHLCCYEGCLPQGAPTSAAISNIVMMPFDEYMGEWCAKRGITYTRYCDDMTFSGSFEAYKVKNKVRGFLQVIGLELNEKKTKLLLAGQRQAVTGIVVNCKPQVSGEYRRKLRQEIYYCCKFGAASHLQHVQDQKYGTDATENIRYLQKLLGKINFVLQVNPEDKYFKTARESLKNLVT

SEQ ID NO: 2218 - protein, 328 aa, Lactonifactor longoviformis
  source 1..328: note = Related to NZ_FQVI01000010.1
MGNTDIWKYCTGEQCRDMLLELRLLGNVDWSREKQLACLYSLSNHAENHYHLKEITGKGGRQRTLQVPDAFLKKVQKNLLRNVLDGLPVSSYATAYRKGKSILCNAVPHTGKGKILKLDMRDFFGNITFFQVRQSVFGGLLFPGSVGTLLTHLCCYRDYLPQGAPTSGAVSNLVLKSFDESMGNWCRIREITYTRYCDDMTFSGSFDSREVKNKVESYLRILGFELNPKKTKVLDSGTRQMVTGIVVNEKPQADRDYRRRLRQECHYCLKYGPDPGRVSSNKSKEAYLAGLVGKVNYVLQINPEDMYFKEIKRQLTQLQREAGEFPMQ

SEQ ID NO: 2219 - protein, 333 aa, Cuneatibacter caecimuris
  source 1..333: note = Related to NZ_SGXF01000003.1
MSGEEMWKYCTGEQCRDLLRSLDLLRGTGVKQEQEIACLYSLANHAEAHYRRARIPKKNGGVRKLQIPDGMMKKVQRNLLHHVLDGLEPSPYATAYRKGAGLKENAAPHTGKKQILKLDLENFFENITFSLILENVFPSRLFPPAVGVLLTNLCCYRDYLPQGAPVSAAVSNLVMRPFDDYMGSWCGEQGIAYTRYCDDMTFSGDFDARKVKNKAQNFLKVMGFSLNAGKTRLYGQGHRQSVTGVVVNCHPQAARTYRKKLRQDLYYCEKYGVAGHLKRQGRDLGQEDAAGASFRYLQMLAGRAAFVLQVNPEDSWCREAKGRIARLQSELWV

SEQ ID NO: 2220 - protein, 328 aa, unidentified
  source 1..328: note = Related to DVJD01000043.1; note = Candidatus Fimimorpha excrementavium
MIWRYCTAEQCRELLYSYRLFGERKWSMEEQERCLYTLSNHAEQYYRNVWIPKKNGKKRKLMIPDPILAEVQRNILTQILADMPVSEYAKAYRKGLGLREMVQEHQGQNTVMCLDIRDFFGNITFFMVYQQVFSSLRFPPAIGTLLTNLCCFKDTLPQGAPTSPAISNLVLKPFDEYMGQWCRKRGIVYTRYCDDMVFSGELDPKTVKNKVRGFLRVIGFSLNEEKSSVRRQSQRQTVTGIVVNEKIQAAREYRRRVHQEVYYCRKFGVDDHLAKIGKDKKEPMDRQRYLLSLLGKLNYILQMNPQDGQAKSDLAALKEIIVSLGEKN

SEQ ID NO: 2221 - protein, 319 aa, Escherichia coli
  source 1..319: note = Related to CP065613.1
MDATRITLLALDLFGSPGWSADKEIQRLYALSNHAGRHYRRIILSKRHGGQRLVLAPDYLLKTVQRNILKNVLSQFPLSPFATAYRPGCPIVSNAQPHCQQPQILKLDIENFFDSISWLQVWRVFRQVQLPRNVVTMLTWICCYNDALPQGAPTSPAISNLVMRCFDERIGEWCQARGITYTRYCDDMTFSGHFNARQVKNKVCGLLAELGLSLYQRKSCLIAACKRQQVTGIVVNHKPQLAREARRALRQEVHLCQKYGVISHLSHRGELDPSGDLHAQATAYLYALQGRINWLLQINPEDEAFQQARESVKRMLVAG

SEQ ID NO: 2222 - protein, 319 aa, Pseudocitrobacter faecalis
  source 1..319: note = Related to NZ_BNAA01000006.1
MDATRVCLLALDLFSSPGWSANEEIRRLYALSNSTSKHYRTIVLSKRDGGERQILAPDYLLKTVQRNILRNVLSHFPVSPFATAYRPGSTVVHNARPHLSQPQILKLDIEGFFENISGLLVWRVFRQTTLPNAVVTMLTHLCCYRDALPQGAATSPAISNLVMRRFDERMGRWCQERHIVYTRYCDDMTFSGEFSARQVRNKAAALLAELGLRLNKRKTALIPAYKQQTVTGIVVNEKLHISREQRRLLRQEVHYCLKFGVAAHLSHSGKSTESALCYLQRLQGKIAWLLQVNPDDRAFRRALRDVQQMIRQIALPGTR

SEQ ID NO: 2223 - protein, 356 aa, Leminorella richardii
  source 1..356: note = Related to NZ_LS483470.1
MRRANALSTFSRLRDRLYRIVAADAFFKHQWDKEPTLDATRACLLALELIGRSDWSADREIRCLYALSNRSERHYRKIVLTKRDGGSRVLHAPGFLLKTVQRNVVKNVLSHFPVSPFATAYRPGSSTLCNASPHVGRKQILKLDIEKFFDNIRFTQVYRLFNKTELPAGAVTLLTHLCCYRDALPQGAPTSPALSNLIMARFDDLLGIWCKERDIAYTRYCDDMTFSGDFDAHQVTNKVRGLLNDMGFTLNSRKSRRIARGSQQTVTGIVVNHRPQLPSEFRRALRQEVYFCQKFGIASHLERIGSSETPLRYLQSLLGKIAYLLQINPDDAEFQRAKAAIGQLLKAETSLSYRAD

SEQ ID NO: 2224 - protein, 323 aa, Leminorella grimontii
  source 1..323: note = Related to NZ_JMPN01000024.1
MDAARACLIALELTGKTACPADKEIQCLYALSNRSDRHYRKIVLTKRSGGLRTLYAPDILLKSVQRNILRNVLSLFPLSPFATAYREKCSTLDNASPHVAQSNVLKLDIENFFDSITFFHVHRLFKKTELPAAVVTLLTHLCCHRDVLPQGAPTSPTISNLVMKRFDDVIGLWCQERDIVYTRYCDDMTFSGDFDARQVKNKVRGLLYDMGFTLNARKSRLITANQRQTVTGIVVNQKPQLTRDIRRKLRQEVYFCQRFGVASHLVQTGDFNPQESPREQRLRYLQSLQGKIAYLLQINPDDAEFQNARSAVRQLLKEESASA

SEQ ID NO: 2225 - protein, 314 aa, Yokenella regensburgei
  source 1..314: note = Related to NZ_RBIZ01000005.1
MNAAQLSLVSLELTGHPYWSPHKQLRCLYALSNHSERHYRTLSLPKRSGGMRNIQVPDPLLRQVQRHILRHVLSLLPLSPFATAWRPEYSLRHNVLPHLGKKQVLKLDIENFFPGIIFPQVQQLAFAKTCLPYAATTLLSHLCCYRDRLPQGAPTSPMLTNLVMRPFDDYIGDWCQQQEIAYTRYGDDMTFSGDFDARRVQNKVAGFLGEMGMVLNEGKTRVMRRGQQQIVTGIIVNESTPRAPREMRRALRQALYYYGKYGASAVPEGFDEQQWLQSLHGKITFILQIHPEDAALQHARGILQRQLKAIRSQP

SEQ ID NO: 2226 - protein, 311 aa, Enterobacter sp.
  source 1..311: note = Related to OBEF01000007.1
MNAAQLSLISLELTGHPHWSPAKQLRCLYALSNHSDRHYRELQLPKRSGGIRTIHVPAPLLKSVQRNILRHVLSLLPLSDYATAWRPGYTLLNNVLPHVRQKQVLKMDIDNFFQRIIFPQVWQQAFAKTRLPQATITLLSHLCCYRDRLPQGAPTSPTIANLVLRDFDNYIGRWCAEQEIAYTRYGDDMTFSGDFDARRVRNKVKGFLAELGFELNHDKTRLMSQGQRQIVTGIVVNGPYPQAPATLRRELRQTLYYYEKFGWSPAHSEMTERHWLQTMQGKIEFILQIRPNDSEFLHARHNVRRWLKRCA

SEQ ID NO: 2227 - protein, 345 aa, Enterococcus sp.
  source 1..345: note = Related to NGMM01000007.1
MSRDIWKYITVEQCNEFLLSFQLLGETTLSNKEQITCLYSLSNTLEKHYEQYTLVKSNGGTRKITKPDERLKLVQKNILANILSQRSVSIYATAYQKGVGLIMNAQPHTEKQQILKLDIEDFFDSISFSQVYAYGFPRSYFPKATAGLLTNLCCYNHCLPQGAPTSPMISNLVLRSFDDSIGQWCVEKGISYTRFCDDMTFSGTFDATTVKNKVQAFLVELGFSLNKKKTRVISKHEQQTVTGIVVNEKSQAPRTYRKQLRQEIYYCMKFGVSSHIARKTAVAPHLIEQRTIENYLLSLLSKTNFILQINPLDEEFLQARTQLKVLLTEPVSYTHLDVYKRQVYR

SEQ ID NO: 2228 - protein, 333 aa, Erwinia sp.
  source 1..333: note = Related to WLYM01000046.1
MSHRDLWKYCTPAKNREFLLSLQLLGQTELSDAQQISCLYSLSNHLEAHYRTYFLIKRNGSKRKISAPDLLLKKVQKNILTVCLTNRTCSPYATAYRKGVQLLENATPHLGQKQLLKLDIEDFFGSITVPMIARSAFPRTYFPSSVAGLLTQLCAYDDCLPQGAPTSPLISNLVMKPFDDSIGQWCAQRQITYTRFCDDLTFSGDFAPKEVKKKVQNFLFELGFTLNKIKTKQLSASQRQSVTGIVVNTKAQVPRSYRKKLRQEIYYCLKFGVRSHLIHQHTTSQPVLEQEEDQRYLQQLIGKTNFILQVNPSDQEFLQAKKALKELLQANYT

SEQ ID NO: 2229 - protein, 336 aa, Vagococcus acidifermentans
  source 1..336: note = Related to NZ_NGKC01000006.1
MPYFLGGIRPMNKSIWKYITTDQCNDFLLSFNLLAPTNLSPEKQLACLYAVSNSIESHYTTTYLKKKTGGHRVIHEPSPLLKKIQKNILVHVLEPQACSVYATAYQKEKSLLDNAAPHIGKKQVYKLDIDDFFDSISFTMVFQRAFPREYFPPQAAGILTQLCCFNDCLPQGAPTSPMISNLVLKPFDDYIGQWCRERNIAYTRYCDDMTFSGEFNVKKLHHKVRAFLEALDFSLNQKKTKLLATGKQQIVTGITVNEKMQVPKKYRREVRQSAYYCLNYGTASHLKRMNEGNGELDPETYLNSLLGKINFILSVNPSDKEFSLLKEEISKLLSHS

SEQ ID NO: 2230 - protein, 327 aa, Listeria goaensis
  source 1..327: note = Related to NZ_FYBT01000001.1
MQNQDVFGYATNAQINDFLYSLQLFGASDWSKEKQIGALYAISNHIEDHCTLFQVPKRNGSERTICAPSPLLKTVQKRILFAVLSERPVSEFATAYKTGVSILDNAAGHVGQKYVLKLDIENFFGSILFQDVMNFAFPRALFPKRVSALFASLCCYHDCLPQGAPTSACISNIVLKPFDDYIGRVAKEMGAVYTRYSDDMTFSGDFDTKKMYYKAKLFLEAMNFTVNEAKTQILTKKSQQKVTGLVVNEKVQVPKNYRKTVRQEAYFATKYGLTSHLAYRQNVQAAEVTQNAAFRYKLSLLGKINYILLANPEDQEFKKWQNEIKSL

SEQ ID NO: 2231 - protein, 327 aa, Listeria fleischmannii
  source 1..327: note = Related to KQ130610.1
MNHQEVFGYATDAQLSEFLYSLRLLGPSAWPKEKQLATLYAISNHLENHYKTFTVQKRNGQMRNIYAPSPLLKGVQRRILVSLLNERQVSPFATAYKNEGSIFFNAAKHARQKYILKLDIEDFFGSILFPDVMNYAFPKAIFPKRISGLLTSLCCYHDALPQGAPTSAAISNIVMKPFDDYMGKLASEMGINYSRYSDDMTFSGDFDTAYMYRKAKMFLNDMNFSVNHAKTKVLTRKMQQKVTGLIVNEKVQVSKAYRKKVRQEAYYVSRFGLRNHLAFIQQLNEVEISKEAVKRYQLVLLGKINHILCANPNDKEFLNWREKIKGL

SEQ ID NO: 2232 - protein, 333 aa, Listeria costaricensis
  source 1..333: note = Related to NZ_FXUT01000001.1
MNSHFWKNCSAQEERAFLLDLNLLRQYGDAWSDKEKIALLYTVSRTINQHYLTVKIPKRTGGLRTLHAPDPLLKMIQKNILSLLETRTLSAFATAYRKGGSILANATPHVGKKQLLQLDLLDFFDSLSFPMVMAAAFPKTVFPDNTRMLLTNLCCLNDALPQGAPTSALISNLIMRPFDDYIGEWCKERQIAYSRYSDDLTFSTNEGDLTLVKRKVEHFLEAMQLNLHPAKTKYTDQSMRQCVTGVVVNQHPQVPRRYRSMLRQEIYYLEKFGLTGHLACLKEKGEVAADLSEKQYLRKLIGKVQFVCAICPESAGFQDAYWRLQKLAISFEE

SEQ ID NO: 2233 - protein, 333 aa, Anaerovorax odorimutans
  source 1..333: note = Related to JAJFDR010000002.1
MRYTNLWKYCDIQQCQDFLLSLELFDESRLTRQERLKCLYAVSRHAEKHYRKTFRKKADGSLRPLLEPDYLLKQIQRNLLCNVLERVPVSEYATAYRKGVSVRDNAAAHVASPQILKLDIENFFGSITDSMVFTKAFPREYFPYPAASLLTAICCYEGYLPQGAPTSAAISNLIMKDFDRYIGNWCREKGVNYTRYCDDLTFSGDFDWVEVKNKVRAFLNAMGFEMNKKKTKLLTAGQRQIVTGVVVNEKLQTPRAYRRELRQIYFYMKKYGMRSHLHNKLGREAANEEMASYLEHVLGRVNFVLQIKPEDGCFKEMKAWILEKKKEEAHECL

SEQ ID NO: 2234 - protein, 324 aa, unidentified
  source 1..324: note = Related to DVGX01000291.1; note = Candidatus Ventrisoma faecale
MDLWRYCTAEKWQEFLVSLDLLGSAPADREAYFRCLYALSNHPEAHYRTLSVPKRGGGRRTLREPDALLKKVQKNILRHILAGAPVSEYACAYRKGMGVRQNAAIHLGQPMILKLDIHDFFGSITFPMVMWSAFPGTLFPPAAATMLTSLCCFRDVLPQGAPTSAAISNLVMEPFDRHMGAWCAARGIRYSRYCDDMTFSGVFDAGEVEAKVRAFLEVMGFSLNKKKTKLMTAGRRQTVTGLVVNEKLQVPREYQRALRQELYFCETYGVRSHLERKNGRAPSEEEAARYLESLAGKAAYVASVAPESENARRMQEKIKKLIKK

SEQ ID NO: 2235 - protein, 332 aa, Pragia fontium
  source 1..332: note = Related to LR134531.1
MPDTDVWKYCTTAQIKQFLVSLRLLGNTDWSDEKYIASLYAVSRNINNHYQQTTLLKRDGTQRHLLVPDKLLKKIQKNILRNLLQDVPLSAHATAYRQGTDIVANAQAHLGQRQILKLDIVDFFGSITFMMVCRSVFPSLYFPPSVGTLLTNLCCYNDALPQGAPTSPAISNIVMTPFDNYIGKWCQERKIVYTRYCDDMTFSGDFEAKQLKNKVRAFLQEMGFSLNQHKTKLFTCHTRQLVTGIVVNEKLQVSREYRKQLRQELYFCQKFGVLSHLTQINNGLIAKQEDVESYLQSLLGKANFIVQVNPQDAYFLQAQSLIKQLIRTHRAE

SEQ ID NO: 2236 - protein, 332 aa, Budvicia aquatica
  source 1..332: note = Related to PDDX01000001.1
MPDMPLWKYCTTAHYLEFLISLQLFGDTDWCAEKQISCLYTISNDVNAHYQRTTILKRDGTPRHLLAPDPLLKKIQKNILRNILAPVPVSPYATAYHKGADVVANAAAHLGQKLLLKLDIEDFFGSIIFPMVRRSAFPDIYFPPAVSTLLTHLCCYNDALPQGAPTSPTISNLVMKPFDSHIGEWCSARGIIYTRYCDDMTFSGDFDAKAVKNKVGHFLQALGFSLNKEKTKLLTRHTRQSVTGIVVNQKLQLSRDYRRQLRQEIYFCQKFGVVSHLKRMNYPLESGDVERYLQALQGKVNFLLQVNPGDDVFRQAMSGIKQMIKANRNSQY

SEQ ID NO: 2237 - protein, 334 aa, Saezia sanguinis
  source 1..334: note = Related to NZ_PQSP01000009.1
MPDNDLWKYCTAEHCKELLLSFRLFGNTAWTGEKQIACLYALSRHIGKHYARAVIPKRDGSARHLLVPDPLLKQVQKNILHHVLAEMPVSPHATAYHPKANVFANATPHLRQPQVLRLDIEDFFGTITFPMVYSQAFPYVYFPPSVRTLLTHLCCYRDYLPQGAPTSADISNLVLKPFDDHMGRWCSERGITYTRYCDDMVFSGDLDARAVKNKVQNFLQAMGFSLNLKKTRLSTRHQQQVVTGLVVNEKVQAPVQYRKALRKEIYFCQKYGVQSHLTQTADQTYLPHGHNGVMRYLASLLGKVNFVLQANPQDAYFQQAKSAIQHMRAQLKLA

SEQ ID NO: 2238 - protein, 321 aa, unidentified
  source 1..321: note = Related to JAFYPD010000088.1; note = Peptococcaceae bacterium
MDFSQSQIEEVLALPLLTDKTPEKRLKTLYALSNHAEEHYHPVTAAKRNGGRRKILVPDALLKQVQRQILHNILEKQPISRYAKAYHPGAAIRENAAVHLHQPGILKLDIENFFPSILFPDVLSSCFSSQRFSVPMGTLLTNLCCYQGYLPQGAPTSPAISNLVLYHFDVWIGQWCGQQHIRYTRYCDDLTFSGDFDAALVQGRVEGYLQTMGFMLNQKKTRWMTAHQQQMVTGVVVNEKMQVSRAYRRNLRQEIYYCRKYGVQSQAAYAAGKDAAEIGPGDGKRYLQSLLGKINFVLQINPDDAEFQRAEEEVKSWLTAK

SEQ ID NO: 2239 - protein, 343 aa, Ruminococcus sp.
  source 1..343: note = Related to JAFRDE010000015.1
MYIDHNEVIFQPFDVEYVVERGLERAMEEAFAFHQNCRLPFLMDVSQLAGFLSLTKKETFRFVFACDSMYRTFSLPKRTGGTRQIDAPMPELSWAQYRITREILNKLPISQYATAYHKGARLTQNASPHTGRRYLLKIDLSDFFHNIRMTDVHSRVFTPYYPKQIGYFLSLICCKDGTLAQGAPSSPAISNIVMRCFDEPFGQWCKKRGLSYTRYCDDITISGDVPLYRAYEKASLWLNNMGFTVNEKKTRFITDASRQTVTGLTVNEKVSVPSDYKRKLRQELYYVEKFGIRSAADHMRLPDALKYCQSLMGRINYVLSVEPANESFLRAKDALSGQFAFCV

SEQ ID NO: 2240 - protein, 343 aa, Ruminococcus sp.
  source 1..343: note = Related to JAFRBD010000130.1
MYIENNEVIFRSFDVNYVAKHGLEQAMDEAFAFHEKCRLPFLMDIAQLAGFLSLTQRETYRFVSKCSRMYRSFDLPKRTGGTRRIDAPLPELSWAQYRIDRTILRKIPISRYATAYHKGARLTRNALPHTGKKYLLKIDLSDFFHSIRISDVHGRVFAPYYPKQIGYFLSLICCKDGSLAQGAPTSPAISNIVMRCFDEPFGHWCEKRGLSYTRYCDDIAISGDVPLYRAYEKASLWLNNMGFTVNEKKTRFITNASRRTVTGLTVNEKVSVPSDYKRKLRQELYYVNKFGILSAAAYLKLPDALKYCQSLMGRVNYVLSVEPENESFIKAKEALSGQFAFCV

SEQ ID NO: 2241 - protein, 345 aa, Ruminococcus sp.
  source 1..345: note = Related to JAFRBX010000029.1
MYIDKDEVIFEFFDVEYVTKHGLEQAMDAAVAFHQKCRLPFLMDISQLAAFLSLDRRELFGLVKRCDTMYRSFLLPKRTGGYRQIDAPAYELTAYQYRILHRILGRIPISRYATAYHRGAALTKNASPHTGKRYLLKIDIKDFFHSVRLSDVHARVFAPYYPKQIGYLLSLLCCKDGRLAQGAPTSPAISNIVMRCFDEPFGEWCEKRGLSYTRYCDDITISGDVPLYRALEKASLWLNNMGFTVNEKKTRFITNASRQTVTGLTVNEKVNVPSDYKRRLRQELYYAAKFGVSSAADYKGLTDAEQYYQSLMGWLNHVLSVEPENESFLKAKQALRERYAADRRI

SEQ ID NO: 2242 - protein, 349 aa, Ruminococcus sp.
  source 1..349: note = Related to JAFORM010000263.1
MIVKNDSVTFEPCDMPFTRKFGCDEAAKMVLDFKAFHPKLPFLYDTHQLADFLKTGRKTLFDLTNHPEACYSTVSVPKKSGGTRTLNVPNDRLKAIQRKILYEILAYLPVSKHAAAYHKGARLTDNAAAHIHHRYLLKLDLSDFFGSIRFDSVFCSAFNAHYFPRQIGVMLTSLCCFDDVLPQGAPTSPALSNLVMKRFDNSFGAWCSARGFSYTRYCDDIAVSGNCPVYPAYKKARLLLENSGFEINDAKTRFVTDAGRQTVTGLTVNEKLSVPSDYKRKLRQELYYAKKFGLENVIQKQNLTDYISGGKADAARYAMHLLGKLHFVLSVEPDNAYFRNARQFLITQL

SEQ ID NO: 2243 - protein, 344 aa, Ruminococcus sp.
  source 1..344: note = Related to JAFOUX010000084.1
MLVSDNEVMFFESDMRFVKRFGLEAATDMVLDYSAINKTPFIYDFFQLSSFLRILPSDLRKLLDDIPGSYRSLQIPKKSGGYRELNQPLGRLPDIQERIYTGILKRLKSSPYATAYHQGAHLSDNAAPHIGKRFLLKLDITDFFGSIRFDMVLSSVFNTSLYPRHIGAMLTSLCCLEDVLPQGTCTSPTLSNLVMKRFDDIFGAWCKRHGFDYTRYSDDITVSGNTSLYPAYCAAKSMLHKMGFELNERKTHFITDSFRQTVTGLTVNEKVNVTAAYKRKLRQELYYTDRFGIESAAQYLHQPDAKKYYQQLMGRLNFVLSIEPDHTYFIKAKEKLSEQRAEII

SEQ ID NO: 2244 - protein, 331 aa, unidentified
  source 1..331: note = Related to JAFUNJ010000009.1; note = Clostridia bacterium
MRITEGTVRFDGCDRHFAEKFGAHQAAEMVLDFASTNTHPFLYDTYQLAAHLGLRRKALFELVRRPGRHYRTLRIPKRSGGSRTLSVPDDRLKTVQRTVLHTILCHFPASAYATAYQPGATLRQNAAPHCGKKYLLKLDLEDFFGSIRFDQVYGAVFHTRRFPKQIGAMLTALCCKDDALPQGAPTSPQLSNLVLKWFDDTMGAWCQRRGIAYTRYCDDITFSADRPLYDAYRKAVGLLEHQGFSINEEKTRFVTAAGRQTVTGLTVNEKVGVPADFKRALRQQVYYALKFGAEPPEYRRLLGKVQFVLQTAPEHPWFCDAREELIRRLKG

SEQ ID NO: 2245 - protein, 354 aa, unidentified
  source 1..354: note = Related to JAFRAJ010000055.1; note = Oscillospiraceae bacterium
MHFEGEKIVFSAADIERAKRTGIENMLLRADQYCSAFSIPYICDLFELSTELGLPAEDLARIGSRASMKYRCYYIKTGSGKFRKIEEPDFELRIVQNRILNHILRYYRISEHAAAYHKGASVKNNAMPHVGKRYLLKMDLSDFFGHITDSMLMDTVFSEQHFPYPVGRTLTDICTRNGSVPQGACTSPAISNIVMKGFDDRMGRWCSYRGISYTRYSDDLTFSSDEPLYPAYRKARRMLEEMGFGINDDKTHFITSAGRQQVTGLVVNDKLGIPADYRRRLRQEIYYVLKFGARDAFSRSDDCRNEPGMTLRRYLLRLIGKTEYVLQIRNDDRFFREAKIKLAEEIAKLSSAEE

SEQ ID NO: 2246 - protein, 352 aa, unidentified
  source 1..352: note = Related to JAFSIW010000012.1; note = Clostridia bacterium
MYTQNGRITFEKSDLKFLQKHGLSKAVVIYEEHCAHSNLPFVTDHHQLAGLLGCYTNVLFQTLRTVDELYYDAAIPKATGGYRTLQVPTHPLRYMQTVILHSILDKLPVSPYATAYHKGARITDNAKPHQHKKYLLKMDLQDFFSSITFEQVLSGVFHKGRFPTHVGVSLTALCCKNGVLPQGAPTSPALSNLVMSHFDGVMGEWCCRQGFSYTRYCDDITVSGNRPLYAAYQKAKGLLENMGFELNEKKTRFVTAAHRQTVTGLTVNQGIGVTADYKRNLRQAVYYTVKFGAADHIRQRNLTRFMVNGVPQTERYLAHLEGQIRYVLSVEPDNRAMVKLLADLSASPPYMG

SEQ ID NO: 2247 - protein, 337 aa, unidentified
  source 1..337: note = Related to JAFNUN010000059.1; note = Clostridia bacterium
MIINKKYESIVFDESDMNFVSKFGIQEATDMVFDYLSTNKTPFIYDVFQLADYLQIKLPKLFRLVNKADELYSNVVIKKRNKSDRILSVPDYYLGSVQKRINRKILSKIDISKYATAYYKGSNLLKNVENHCGKKNILKMDITDFFSSITFGMVLSSCFNTSRFPRNIGYMLTTLCCKDDCLPQGTSTSPAISNIVMKNFDDILGNWCEKRGISYTRYCDDLTFSSDEDLYPVYVKAKSMLNDMGFQVNEKKTHFIKNSNRQEVTGIVVNDHPQLSKDYRRKLRQELYFVFKYGIKDALEHINKKEVSNKEIYSYACQLSSKISYVLFINPNDKEFV

SEQ ID NO: 2248 - protein, 353 aa, Ruminococcus sp.
  source 1..353: note = Related to JAFSEL010000040.1
MKVVNETVEFFECDMNMVSKIGLMEAVEMVLDFSSTNTVPFIYDTYQLSDMFAIGRKNLFSLIRNCDQNYKQINIKKSNGDIRVLYSPRTRLKAIQNIILKEILYKIPVSKYATAYHKGAKLIDNAKPHCGKKYLLKMDLRHFFDSITFTQVYSSVFNTCRYPKQIGTILTTLCCHQDVLPQGAPTSPALSNIVMKSFDDYFGKWCEKRNFSYTRYCDDITVSGDSSVYPAYLKAEALLENMGFEINQNKTHFITNTNRQEVTGLVVNERARVSSDYRRKLRQEIHYVTKYGILDALKHLKDSGYESVYSYYSSLMGRINYVLQIEPENQQMLNLKADLEKSLEKYEWQTMLQ

SEQ ID NO: 2249 - protein, 353 aa, unidentified
  source 1..353: note = Related to SVPW01000009.1; note = Oscillospiraceae bacterium
MLIKGQSVTFHADDMHFVKKFGIMEATNMVLDFASTSNLPFVYDTYQLASLLQLRRSSMFKIVRKCNSYYRDVELKKNNGKVRYISAPLDILKWTQKCILTNILEKYPVSKFATAYRKGLKLVDNAKVHTSKKYILKMDLKDFFPSIGFEQVYSCVFNTRHFPKQIGVILTSFCCRNGVLPQGAPTSPAISNIVMRNFDDIFGAWCEKQGFSYTRYCDDITVSGNKSLYVAFVKAKAMLEKMGYEINTKKTHFLTNASCQTVTGLTVNERARIPSDYRRNLRQEIYYAQKFGVKDAVMRANREEYIVDGKVDEHRYISHLEGKVQYILQIEPENEYFKKALKTVQNLRPLGNF

SEQ ID NO: 2250 - protein, 366 aa, Ruminococcus sp.
  source 1..366: note = Related to JAFUKO010000119.1
MIIRNGTIEFGHGDMHFVEKVGLSEAVEMVLDFKSQNKIPFVYDTYQLADLLMIRRKDLFSLSKNADSFYTYATIKKRDGSKRILCVPDAYLKSVQRTILSTILSKLPVSEYATAYRKGCKLQSNAQPHCGKKYLLKMDICNFFDNITFMKVYSSVFNTRHFPKQVGVMLTQLCCRNDVLPQGAPTSPAISNLVMKSFDDTFGAWCLRHNLSYTRYCDDITVSGDIPLHNVYLKASEMLHKMGFEINKRKTHFVKYTDRQSVTGLTVNECIRVDSKYKKQLRQDIYYTLKFDVVSAMKRSLSFEFDENEDIDSAVIKYLNSLIGKTAYVLQIEPDNEYFKKLLKKLTDLLDETKLDIRRSKYFTFY

SEQ ID NO: 2251 - protein, 365 aa, Ruminococcus sp.
  source 1..365: note = Related to JAFOED010000001.1
MYIEDNIVKFEYCDMSFLKKFGVDVAADMYLDFKSVNKIPFIYDTYQLADFFGIRRTNLFKVTKNIDKFYYTTTIKKRSGGVRKLNVPDDTLKFMQRCILKRILSEFKVSKYATAYKKGATLKDNARVHSAKKYILKLDLKDFFDSITFMQVYDAAFSTRYFPKQIGVMLTTLCTRQDVLPQGTPTSPVLSNLVMKNFDDSFGAWCEERGFSYTRYCDDITVSSDNELKGVYSKCKFMLTKMGFEINEKKTRFLTNGSRQTVTGLTVNSSVKVPSPYKKELRQAVYYTLKFTAADALKRDKNFERKTDLPIDEEALRYLNCLIGKVAYVLQIEEDNVYFKSALIKLVNRKDELEFNIKRENNYNF

SEQ ID NO: 2252 - protein, 326 aa, unidentified
  source 1..326: note = Related to JAGBTD010000211.1; note = Clostridia bacterium
MIEDFYSVNSNKLPFLTDQRQLASMLGIELRTLYSILKSINANYTTHKFVQKNGKVRTINEPSTKLKSIQRLIYFRILQHLPVSKYAKAYRPRITIKQNALPHIGKKYLLKMDIKDFFPSITFTRVYGAAFNTKFFPKYIGTLLTTLCCKDDCLPQGAPTSPALSNLVMKNFDEYLGKWCEEKGIAYTRYCDDLTFSSDMPLYGVYLKAKYMLENMGFDVNEKKTKFISSKNRQTVTGLTVNKKLNISSVYKRELRQEVYYVLKFGAKTAILRGGHEDYIIGGETLKVDYLYHLLGKVNYVLSIERDNKWFQESKGYLTDMIIKYS

SEQ ID NO: 2253 - protein, 360 aa, unidentified
  source 1..360: note = Related to SVPP01000010.1; note = Oscillospiraceae bacterium
MLNKKEMQKMKITKGHISFEQSDMHFVEKFGISEAFRMVGDYVSERKTPFVYDTYQLAYLLGIGRKDLFSLVKTVDNHYRPVNILKKNGNIRTLIIPSSKLKRIQSVIAGRILSCYSVSEYAYAYLKRKTIYDNASVHCGKKYLLKMDITDFFSSICFDRIYSAVFNTKYFPRQIGVMLTALVCNDDVLPQGAPTSPAISNIVMASFDRLIGTWCKERGVSYTRYCDDLTFSGNVPLYGVFKKSKSLLEEMGFEVNEKKTRFITSSDRQTVTGLTVNEKVSVPSDYKRKLRQEVYYVLKHGIVNTVLFTENKEFISDGQVDEEKYYLSILGRVSYVLQIEPDNRFFSEARKRIMEDRYKT

SEQ ID NO: 2254 - protein, 349 aa, unidentified
  source 1..349: note = Related to SVJN01000007.1; note = Oscillospiraceae bacterium
MQIFIDDVTFDAWDLHFVEEFGVFRATEMVLDFFEHNRHPFLYDTYQLAHFLQVEQKQLLTILGRCDTLYRKVKLPKKNGGVRIISAPLRDLKQMQKIILEHFLKKLPVSEHATAYKEGGTIRKNASVHCGKKYLLKLDIEDFFDCISAERVYKSAFHTQYFPQKIGKILTRLCTKNGYLPQGAPTSPMLSNLVMRPFDMVMGNWCKKHNIGYTRYCDDITFSADVPLYVAYVKAKSLLEKMDFCLNEEKTKFIRSSNRQVVTGLTVNECIHVTADYKRKLRQEIHFVLKFGLKDALLHTTPNPFVTEQAVHTERYFQSLMGRIHFVLQIEPENRYFLEAEQKLKGINH

SEQ ID NO: 2255 - protein, 414 aa, Butyricicoccus sp.
  source 1..414: note = Related to QUJR01000007.1
MPKSDTLRRIANHFMILDSPPLNQTILYCKGLIFGRTLHMKIEGSCVTFEPCDAAFVKKFGPLEAANMVLDYHSVHPNMPFLYDAEQLAGFFDISCGELNHIVNHIQKEYKKAFLPKKDGTYRSLYIPSIRLQFCLGPIKDKILSQLPVSKFATAYQKGSSTRKNAEPHIGKKNLLKLDITDFFGSISFEQVLCAAFNTRYVSKQVGFLLTSLCCKNDALPQGSPTSPALSNIVMRRFDDQIGRWCNQRQITYTRYCDDMTFSSDRPLYGVYQKVKKILFEMGFELNEAKTHFISNADRQTVTGLVVNEKLSIPSSYKRNLRQEIYYTLKFGIEDSIVHGNRLNFLEDGQPIRCPTYMTHLIGSVQYVLQIEPENRWFLNAKQKLLDYARAYFRAEGLGEEYYLHRSRLREKDE

SEQ ID NO: 2256 - protein, 333 aa, unidentified
  source 1..333: note = Related to DMLP01000060.1; note = Oscillospiraceae bacterium
MPCRRYIRGKAPPDNTPTNKRITPLFSVRLRFYRVILYCKGLYSFRLKYYSAAVIFMNIIDSNVVFGSGDAEFVKKFGLFEAAQMVLDYKSRNNLPFIYDTYQLADFLGIKRKELFFISKNTDKYYNAFEIKKKNGKPRRLYAPASKLKACQAAINRLILKNLPVSEYAAAYQKGSQISKNAAPHIGKRYLLKLDITDFFGSIRFEQVYSAAFNTRYFPKQTGVILTELCCLNDALVQGAPTSPALSNIVMYNFDNSIGLWCKKRGIAYTRYCDDMTFSSDRPLYGVYQKVKKMLFEMGFELNEAKTHFISNADRQTVTGLVVNEKLSIPSSY

SEQ ID NO: 2257 - protein, 359 aa, unidentified
  source 1..359: note = Related to JACJKY010000027.1; note = Proposed Phocea massiliensis
MLIKKNRIIFEQSDMAFVEKFGVLDAAEMVMNYKTVCTLPFVYDADQLAEFLKIGRKDFFDLIKNCDTCYRPISLKKKSGTYRQIYAPNDILKRIQKTILDKILSKLPISQYAKAYRMGGTLIDNAAAHIGKRYVLKLDITDFFGSISFEQVYSAAFHTKYFPKQIGVLLTMLCCRKEVLPQGAPTSPALSNIVMCHFDNYIGSWCEARAIAYTRYCDDMTFSSDRPLFGVYQKVKTILGEMGFELNEKKTHFILNTSRQSVTGITVNEKLSVPIHYKRKLRQEIYYTLKFGLVEQIVRLGKTEFFMDARPNVQKYYNHLLGQIGFVLQIEPENNWFQNAMIKLKSSSFLQGEMELWRR

SEQ ID NO: 2258 - protein, 354 aa, Vescimonas coprocola
  source 1..354: note = Related to NZ_AP023418.1
MKIEKDTVTFEAPDADFVTKFGIQAAADMVLDFHCFHPQLPFLYDARQLAAFLSTSRQKLLYYVRHTAAAYHPVTIPKRNGDVRILSVPDDTLRRWQRKICRELLAYLPVAPQATAYRKGGAISGNAAPHVGKRYLLKLDISDFFGSICFEQVHSAAFHTRYFSRQVGFLLTSLCCKDGALPQGAPTSPALSNLVMRNFDTSMARWCQRRGIVYTRYCDDLTFSADRPLFAVYSKAKNMLAEMGFDLNEAKTHFITNAGRQSVTGLTVNEKVSVPAGYKRSLRQEVYYTLRFGLADSILRGGHATLLTDDLPDTERYRQQLLGRIQYVLQIEPENRWFREAKQKLLSCDDRPKV

SEQ ID NO: 2259 - protein, 355 aa, unidentified
  source 1..355: note = Related to DVGI01000013.1; note = Candidatus Fimenecus excrementavium
MIVKENTVIFEACDMAFVKKFGIAQATEMVLDYKSVNPLPFLYDTYQAAKFLGVGRLTLFQYAKNPEQGYKLITLKKRSGDKRRIYAPDIVLKHLQTGILRKILIYFPVSPYATAYSKNCTLRNNAAPHVGKKYLLKLDITDFFGSIRFDQVYSAAFNTRYFPKQIGVILTSLCCREEALPQGAPTSPALSNLVMRNFDNSLGRWCQKRGIAYTRYCDDMTFSSDKPLYPVYEKVKSMLYDMGFTLNEKKTRFVTSAGRQSVTGLTVNEKVAVSSDYKRKLRQEIYYALKFGLEDSIRFAKRTEFMRDGVLDAERYAQHLIGKANYVLQIEPENRWFREALERLQWTLKCLEMQG

SEQ ID NO: 2260 - protein, 342 aa, unidentified
  source 1..342: note = Related to SVPJ01000007.1; note = Oscillospiraceae bacterium
MHIQNGAVTFEPHDMWFVKRVGFEAACEMVLDYASQNKLPFLYDTHQLAHFLHIPRRYLFRWFRDMSSCYTPIALTKRSGGVRHLHVPVDPLMCAQRRILQDIVSRLPVSPYATAYVKGKRLTDNAAPHCGHRYLLKLDITDFFSSIRFDQVYSAAFNTTRFPKLIGVMLTALCCYEDVLPQGAPTSPALSNVVMRRFDDRIGEWCKKRGIAYTRYCDDMTFSSDKPLFAVYQKVRGMLAEMGLSLNEKKTRFVTHASRQSVTGLTVNERVAVSSDYKRDLRQQVHYALKFGYADALAKRGDTTFENGDHYAHHLIGRVRYVLQIEPHNTWFRDALPRLLWK

SEQ ID NO: 2261 - protein, 394 aa, unidentified
  source 1..394: note = Related to SVPN01000018.1; note = Oscillospiraceae bacterium
MILRFASACIRAICTATVRRFLVFEKGGVCVRKIGDTLIFTSSDMPFVKRFGIEEATKMVGDFYAEHDLPFLFDTYQLSSELGLRRKTLFSLTRNPEKLYYPVTLSKKNGGTRKLHVPFTVLRGIQRHILNAILNKLPVSSYATAYRRKHQPLHNAAPHCGKRYLLKMDIRDFFGSIRFDQVYRAAFHTRHFPVQIGAMLTSLCCYQERLPQGAPTSPALSNLVMKHFDEQMGEWCQKQGIAYTRYSDDLTFSADVPLYHVYKKAKAFLEHMGFELNDKKTHFITNASQQSVTGLVVNGDTPTVSRKTRRALRQELYYVQKYGLGDAIMRGNRTAFIKDGRPLVYRYLNHLEGRVGYMLHVMGEDDELKNALQMLHRRRQNLLIDAGVVLCDDD

SEQ ID NO: 2262 - protein, 350 aa, Pseudoflavonifractor sp.
  source 1..350: note = Related to NFIH01000004.1
MYIRENGTIYFHEWDRPFVAKFGEHTATQMVLAFQAEHRGLPFLYDTHQLAAFLQMNRKRLFDLVKQVDEHYDQVKIVQKNGKMRVLHVPDGALKAVQRQIQRNILMHFLPSPHATAYIRRRTLVDNAAPHVGKKYLLKLDITDFFGSIQFAQVYRSAFCSPYFPKQVGVLLTRLCCWQGALPQGAPTSPALSNLVMKSFDVYLGDWCQKHAIAYTRYCDDMTFSADRPLYMVYQKVQIMLEHMGFSLHEDKTCFVTRASRQCVTGLTVNETVSVSRVYKRRLRQELYYAQKFGLADSLRHTQRGGFFTGDTPDVERYRNHLLGQVGFVLQVEPENRWFQHARNALKTMR

SEQ ID NO: 2263 - protein, 361 aa, unidentified
  source 1..361: note = Related to JAFQCR010000001.1; note = Clostridia bacterium
MIVKNGAVEFSDVDMRFVEKFGIFKATEMVLDFHNLNKTPFIYDTHQLASFLGYGRRLMFLVTKDPESHYFPTEIPKRDGTARKLLIPDTLIMSMQRHILDGILKHLKPSRYATAYAPKTNIKQNAQPHIGKKYILKTDISDFFGSIRFEQVYSAAFNTRLFPKQIGVMLTELCCYNGYLPQGAPTSPALSNLVMKNFDNNIGYWCEKHGISYTRYCDDMTFSSDKPLYNVLQKLTKMLDEMGFELNAKKTKFVTSSSRQSVTGLTVNERLSVSRDYKRNLRQELYYGFRFGFEGAVSRTKHPEFFDDNNHFMHESYYNSLLGRVRYILSIEPNNTEFSEALDRLKQYDMYQYRKLPRIVY

SEQ ID NO: 2264 - protein, 355 aa, unidentified
  source 1..355: note = Related to JAGAOS010000040.1; note = Clostridia bacterium
MKIVKNHIMFGAEDTNFIKKFGLSEALEMVENFRTLNNLPFIYDSLQLAGFLDIPLGVMFRMVRKGCDSLYHSHTIKKKNGGERQLYSPYCVLKRCQSIILRNILMKLPVSKYATAYKPKVSIVDNANPHIGKKYLLKMDITDFFDSISFEQVYSAAFNTRYFPKHIGVILTNLCCRSDSLPQGAPTSPAISNIVMKNFDNNIGNWCEERGISYTRYCDDLTFSSDKPLYHLYVKVKKMLYNMNFEVNENKTRFVTSASRQSVTGITVNQKLTVSREYKRELRQKIYYVLKFGVKSSLVYETNGFLGDDVNAIATHMLNVLIGKINYLLSVEKGEGNNYFKKAKGILILMRDELE

SEQ ID NO: 2265 - protein, 349 aa, unidentified
  source 1..349: note = Related to JAFVIF010000076.1; note = Clostridia bacterium
MKIKGNTVFFDSSDKSFIKKFGFSAAADMVMDFRSQNKLPFIYDLLQLSGFLSVDFKDTVRFLKKGCDNDYRTLTIKKRNGNDRILNVPSPTLKRCQRIIYNEILKNLPVSKYAKAYKKGVHLQDNASPHVGKKYILKIDITDFFGSITFREVYSAAFNTRYFPRHVGYVLTVLCCKDEALPQGAPTSPALSNLVMKGFDENIGKWCEARGISYTRYCDDMTFSSDEPLYHVYKKVTSLLEEADFSVNQSKTKFITNASRQSVTGLTVNQKVSVNREYKRTLRQELHYLFLYGAENCLIKTDNKQYFTNGKPDKNRYLSSLEGRIVFVLSVEKDNPYFKTALEKLRALY

SEQ ID NO: 2266 - protein, 354 aa, unidentified
  source 1..354: note = Related to SVOI01000004.1; note = Oscillospiraceae bacterium
MFINGQSIKFQNSDMAFVKKFGLIAATEMILDYKKKNSVPFIYDTFQLSQFLDISNKQVYRAVRNCDKTYSYVTIKKKNGNDRMLLVPGKQLKRIQRIILRRILNKIPVSEYATAYKKGATLYSNASPHTNKKYLLKLDITDFFNSIDFLTVYRFVFIKYYPKQISYMLTKLCCKNGFLPQGAPTSPALSNLVLKSFDDYIGEWCKKRGVTYTRYCDDMTFSGDRPLLDVYKKVKNVLDKNGFDLNENKTVFVSSGNRQSVTGLTVNEKVNVSKDYKRKLRQEIYYALKFGFEDAIIKSDNKNFITVENGVEIADSMKYQDSLIGRVNYVLQIEPDNAWFRTKAKELAEKAVFD

SEQ ID NO: 2267 - protein, 353 aa, unidentified
  source 1..353: note = Related to SVOH01000020.1; note = Oscillospiraceae bacterium
MYIKDGTVRFDACDKNFVKKFGLIEAANMVLDFSSTHNIPFVYDVWQLSVYLGENPKCLWPIVKHVDDMYKVCFVPKRNGGTRQLCSPNSRLKAIQHNVLKKFLNNMPVSKYATAYIKGKTLSDNAKLHTNKKYVLKMDISDFFGSIHFDKIYNSAFNTTLFPKQIGYMLTSLCCRKDVLPQGAPTSPALSNIVMKRFDDYIGDWCKGRGISYTRYCDDMTFSSNKPLYNMYVKVKKVLEDMGFELNDKKTHFITSNSRQSVTGLTVNRKVSVSKDYKRALRQEVYFALKFGLAESIMHGDKTDFVKNNAPDTAAYYHNLLGRVSYVLQIEPNNNYFCEAIRELRTGKILAQI

SEQ ID NO: 2268 - protein, 357 aa, unidentified
  source 1..357: note = Related to JAFOYN010000067.1; note = Clostridia bacterium
MKENSFTISFEQHDMPFLKKYGLFKAMRKVRNHNKKYKVPFIDDTYQLAHALSITRKQLFDLSRNANKHYKQILLKKRKGGVRVINAPDPELKDIQRRILRRILYKSEISKYATAYAPDRKLKDNATPHVNHKYLLKMDITDFFGSITFLEVISSAFNSKIYPTQIGAMLTALCCKDEVLPQGAPTSPMLSNIVMKNFDNAIGGWCEKRDITYTRYCDDLTFSADIPLYNVYQKVEDMLIQRGFEVNESKTKFITNSGRQTVTGLTVNEKVSIPRDYKRQLRQEIYYALKFGLSESIVYGNKTEFMDSRGPNCWRYYQHLKGKLNHVFQVEPNNMWFRDADEKLWVAYIQPNMRYPY

SEQ ID NO: 2269 - protein, 352 aa, unidentified
  source 1..352: note = Related to JAFOFE010000078.1; note = Clostridia bacterium
MKLNKISVSFEHQDLHFLKKYGFFKAASMAKKHYKKYDVPFITDIYQLSHLFHDFNKNVFKLSKNANKHYKKKILRKSNGGIRILHAPDETLKFYQRRILEKILYKIPISKYATAYVPGKKLQDNASPHIKHKYLLKMDITDFFGSITYMQVISTAFNSNMYPVQIGAILTSLCCKDDVLPQGAPTSPMLSNIVMKNFDDILGHWCEKRNITYTRYCDDLTFSANIPLYHVYNKVSEMLEKRGFEVNEAKTKFISNTSCQKVTGLTVNEKVAIPKEYKRQLRQEVYYALKFGLKDSIIKGKKKEYIEFGVPDIHRYYDHLNGKLTYVLQIEPQNEWFENAHKKLKNLYTLCT

SEQ ID NO: 2270 - protein, 358 aa, unidentified
  source 1..358: note = Related to JAFXAP010000013.1; note = Clostridia bacterium
MKLNKFTVSFEQQDMHFLKKHGFFKASSMVKKHYKQHNTPFIYDTYQLANELRIFHKDVFELSKNIRKHYKLIMLRKKNGGLRYIYSPDANLKHAQLQILKNILNNIKISPYATAYVKGKNLKDNAKPHTNHKYLLKMDITDFFGSITYLQVLSTAFNRKRFPTQIGAMLSSLCCLNDVLPQGAPTSPALSNIVMKNFDDIIGAWCKKRNITYTRYCDDLTFSANSPLYNAYIKVKNMLEERGFELNEEKTKFITNSSSQRVTGLTVNEKVSIPKEYKRQLRQEVYYAIKYGLADSIVKGNKSEYINYGKPNIHSYFSHLEGKIFYVLQIEPDNTWFVKAAEKLNDRFCYEIKSTQCT

SEQ ID NO: 2271 - protein, 352 aa, unidentified
  source 1..352: note = Related to JAFTLW010000024.1; note = Clostridia bacterium
MRFHNGILSFDASDRYFLEKHGLHNTIKAAGKHYDSYETPFIRDTYQLAHQAGTFRKTLFELCKNTSKHYKTITLKKKSGGVRYIHAPDGTLKCAQQYILRNIVNKIAVSPYATAYVKGKRLHDNAAPHTNHRFLLKMDITDFFGSITFLEVISSAFPAKMYPVQIGAMLTSLCCLNDVLPQGAPTSPMLSNIVMRSFDDFIGSWCQKRGVTYTRYCDDLTFSSDAPLYGVYLKVKETLENRGFTVNEHKTKFITNASSQRVTGLTVNEKVSIPKEYKQQLRQEVYYAVKFGLANSILFGNKTDFVKNGVPDPVSYYEHLLGKLQYVLQIEPHNQWFGKAIKDLCDRYYLSK

SEQ ID NO: 2272 - protein, 350 aa, unidentified
  source 1..350: note = Related to SVRX01000013.1; note = Oscillospiraceae bacterium
MKKASNIIRNIQVFVKKLIGIFANSHSSKKQKSNKGISKELQSLADTLGTTTGELFALSKKADSCYKEIRIPKRSNGFRIIHSPNGKLKKVQKKILQSIISKAETSPYAMAYKKGKNLKDNADPHINHLYLLKMDISDFFSSITFHQVLSSAFPSTLFPTQCGVILTSLCTKDGVLPQGAPTSPALSNLVMKSFDEHIGFWCNERGIVYTRYCDDLTFSADYPLVVLSYKIEDMLNRWGFQVNKKKTKYIFFSSRQTVTGLCVNKKVSIPSDYKKTLRQDVYYALKFGLEDSMIHGKKNDFFENGKWDTARYKCHLIGKVNYILQIEPENKWFQAAKENLSKSFDPPLNS

SEQ ID NO: 2273 - protein, 355 aa, unidentified
  source 1..355: note = Related to JAFVQI010000036.1; note = Clostridia bacterium
MMVKRFITRFEKQDMHFVAKHGFFRAARMVRAHKKKHNAPFIADTYQLAHELGVRRRELFGLTRHPEYHYRILTLRKRNGGLRVLHAPLYQMKQVQQHILKRILPHLPVSPYATAYVQGKALADNAAPHVGHKYLLKMDITDFFGSITYLQVLSTAFPSTFYPPQIGAMLTDLCCYKEALPQGAPTSPTLSNIVMCRFDNAIGGWCKKRGIAYTRYCDDLTFSADTPLYHVYEKVKDKLEGMGFAVNERKTHFVTAASRQTVTGLTVNEKVAIPADYKRQLRQEVYYAIRFGLADSINQGGKPFRTIGNNPDVRRYYNHLNGKLNYVLQVEPHNRWFACAKEDLRRQFEDEICRW

SEQ ID NO: 2274 - protein, 361 aa, unidentified
  source 1..361: note = Related to JAGBGQ010000166.1; note = Clostridia bacterium
MIINDWSVRFENADAHFVEKYGFFHACHKVRQHVEKYDTPFVQDTHQLAATLALRHRQFFRLLREADAQYERVEIPKKNGGVRVLYAPNPLLKRVQFLILRLFLDGMPISRFATAYCKGKSLRDNASPHTGHTYLLKMDITDFFDSITFPQIVGTAFPKDMYPSHIRAMLTALCCRNEQLPQGAPTSPAISNLVMRRFDDVLGEWCEKHDIAYTRYCDDLTFSANKPLFAVHQKATAMLEGMGFTVNEAKTRFVKNTSRQAVTGLTVNEKVSISAEYKRALRQELHYAIKFGIRDSLVKGLKTAFLTNGQPDTERYYRHLRGKINYVLSVEPQNTWFADALKRLEVVYHWEVYEYVRYGKR

SEQ ID NO: 2275 - protein, 347 aa, unidentified
  source 1..347: note = Related to SVPL01000026.1; note = Oscillospiraceae bacterium
MIVRKDGVVLKKEDDNYIKKFGLMKAAEIAIEYKQTHKTPFIHDLFQLAAFIGPGKRSFFKLLKNVNNEYSFFEIKKKNGGFRKIYAPSPELCRAQRVILRGILSCYDVSPYASAYIEGKGLISNAQPHTNKKYILKMDITDFFGSISFEQVISTVFNKNYFPSAVGYALTTLCCYKGYLVQGAPTSPMISNLVLKHFDDVMGVWCEKRGISYSRYCDDITFSANEPLFCAYSKAKAFLSEMGFEINKKKTRFVSHTSQQNVTGLVVNEKVSVPKEYKRDLRQKIYYFLKFDKKDTAFKQSGREYYSYINYLLGRANYVLSIEPNDKFLKESILVLREKSDVEYWNE

SEQ ID NO: 2276 - protein, 328 aa, unidentified
  source 1..328: note = Related to RKDE01000011.1; note = Clostridiales bacterium
MFYRKYHSCIFKGYIMNDFSLTEIFNMREKEIYYVSNHISKHYKRVEIPKKTKGVRILYIPSKKLIYMQRIILNAFLSEYKISECATAYHKGSTLVSNALPHRNKKYVLKLDIEDFFGSITYGRVYKMFFKHFPVKYAKLFTELCCYNDKLVQGAPTSPAISNIIMLDFDNRVESYCKENNISYTRYCDDITLSADFSLDRTYHRIKKELQKAGFELNKRKTHFVKNTHQQKITGVVVNEKIQVPIEYRKKLRQELYYLYKFGANNVILKNNYTDYISNGNTLDVKYINSLLGRINYVLQIDPDNNEFAKEKEKLCSYVQQIKIQKIF

SEQ ID NO: 2277 - protein, 304 aa, Eubacterium sp.
  source 1..304: note = Related to JAFUWO010000134.1
MLESTFNMSKRELYYVSNNIGKHYKKIIIKKKSGENRTLYAPDKKLKYIHRIILKEFLSDYKISACATAYHKGAQLVDNALPHINKKYLLKLDIKDFFPSIMFGRVYKLFYSKFPEEYAKLFAELCCYDDCLVQGAPTSPAVSNIVMLNFDNELEAWCKSNFISYTRYCDDITLSSDEPLVSAYHYVKKLLNKNGFEVNKKKTRFIKHTHGQYVTGIVVNEHLQVTREYRRKLRQDLYYLYKFGARDVILKNKLDDYILGKTTLNAKYMQSLMGRINFVLQVDPDNKEFKEEKTKLINYMNIRI

SEQ ID NO: 2278 - protein, 322 aa, unidentified
  source 1..322: note = Related to NZ_HG005285.1; note = Candidatus Stoquefichus massiliensis AP9
MWKYMNQEMCNQFLLSLHLIDGDLSDQEKIKLLYTISNTIENQYEIIKIKKNSGKLRTIYCPHPLLKSIQRKILHQILNHKSISSYAKAYHPHIGLKENALPHVHQKRILKLDIQDFFNHIQFINVYESCFSLAYFPKPIGMLLTQLCTYHDDLPQGAPTSAYISNLVMKDFDEEIGDWCSQRNISYTRYSDDMTFSGDLIPADVIRKVKQYLNPLGLKLNYQKIHVINHSQQQNVTGIVVNEKIQVPRLYRRKIRQTMHYIEAYGLQSHLEKIGYQKSPERYLNHIYGQVLYILQINAQDKEFQIYKDKLKEYENSYTFSV

SEQ ID NO: 2279 - protein, 315 aa, unidentified
  source 1..315: note = Related to NZ_LN852692.1; note = Candidatus Stoquefichus sp. SB1
MWKYMDQNQSQEFLLSLHLLHNQLSDKEKVKMLYSISNSIEENYNIIKIKKRNGSLRTIYQPHTNLKLIQRQILKTILNNRSVSTYAKAYHKNIGLKDNAYPHVHQKRILKLDIKDFFEHIQFIDVYNACFSLAYFPQSIGHLLTQLCTYHGYLPQGAPTSAYISNLVMKEFDEQIGEWCENKHICYTRYSDDMTFSGDFNPREVIQRVRKALYPLGLEINNQKIHVIGNGQQQNVTGLVVNQKVQTSSRYRKKVRQAIYYMKKYGLESHLSAIQYQQSPQNYLHHLYGQVQYILQINPLDQEFQSYQEYLKKIK

SEQ ID NO: 2280 - protein, 317 aa, unidentified
  source 1..317: note = Related to DVII01000099.1; note = Candidatus Coprovivens excrementavium
MIIHTKEDCNNFLLSLNLINKNISDSEKLRLLYTLTNPIEKNYKIYKIRKKNGQFRQIYIPNNLLKSIQRKILKNILNNKKISIYAKAYKKGVCLKDNAYPHLNKKIILKLDIINFFDNIEYYDIYRTCFSKEYFPPSVGHLLTNLCTYESRLPQGAPTSAYISNLVLKEFDEEIGHWCDEHNISYTRYSDDMTFSGDFNPQEIIKKVRHYLNYLNLKLNNKKIKVISNSKQQRVTGLVVNKKIQVPKKYRYKIRQEVYYIKKYGLLSHLQKINYEDKPLHYLNSLLGRLNYLLSINSNIEFIKYKEYLTKLRKTYL

SEQ ID NO: 2281 - protein, 313 aa, unidentified
  source 1..313: note = Related to SVAU01000015.1; note = Firmicutes bacterium
MINHTKEQSKEFLLSLNLINSKDVLKKLYSISNRIESNYKVYKIRKHNGKYRTIYSPNTLLKSIQRNILKNILNNKKISKYAKAYHKNISLKDNAMPHLNKKIVLKLDIIDFFENIEYPTIYRYCFNEIYFPKSVGHLLTTLCTYESRLPQGAPTSSYISNLVMNDFDNTIGEYCEQNNISYTRYSDDMTFSGDFNPSKLITIVRRELYKLGLKINNKKIHVINNSQQQNVTGIIVNKKIQVSSSYRNKIRQIIYYIKKYGLKDHLNRINYQESPSTYINSLYGKTLYVLSIDKTNKEFINYKEYLKELKKAI

SEQ ID NO: 2282 - protein, 318 aa, unidentified
  source 1..318: note = Related to DVML01000007.1; note = Candidatus Fimihabitans intestinipullorum
MWKYIGTKECNDFLLSLHLIDCLDQRKYIKTIYSISNNIEKNYKIYKIKKSNGGYRTIYEPNPLLKQIQKRILTSILNHKAISRYAKAYHKGTQLKDNAFPHVNKNMMLKLDIKNFFETITFLDIYNSCFSIEYFPKSVGMILTYLCTYDNHLTQGSPTSPYISNLVMQEFDEELGSWCDLMGISYTRYSDDMTFSGQFNPRKIISKVRKMLYRLGMELNDSKTHVVYKSSSQKVTGVVVNEKMQVSKRYRNKIRQEIYYIKKFGLNSHLKKCNIDINSITYVNILYGKILYVLQINETDKEFIKYKQFIKDLKGNIG

SEQ ID NO: 2283 - protein, 317 aa, unidentified
  source 1..317: note = Related to JAFRQS010000031.1; note = Bacilli bacterium
MWKYIGTKECNDFLLSLNLFNCKDENHYIKTLYSISNNIENNYRIYKIKKRNGKYRTIYEPNPLLKHIQKQILINILNNKTISEYAKAYHKGISLKDNANPHINKDIILKLDIKDFFENISFLNIYNSCFQIEYFPKSVGMLLTTLCTYDDHLTQGSPTSAYISNLVMKDFDEELGSWCKENSISYTRYSDDMTFSGSFNPSDIIKKVRKMLYSLGLQLNSDKIHVVTKNACQTVTGLVVNNKVQVGIKYRKEIRKEVYYINKYGLQSHLKKINIKDKNKYLNSLYGRILYVLQINKNDKEFISYKKIINKIKSDLS

SEQ ID NO: 2284 - protein, 317 aa, Clostridium sp.
  source 1..317: note = Related to FR887372.1
MWKYIGKEECNEFLLSLKLFNCKDKKKYLNTIYSISNNIENNYKIYKIKKKNGKYRTIYEPNSLLKHIQRQILVKILDNKAISKYAKAYHKGINLKDNAIPHLNKELILKLDIKDFFENISFIDVYNSCFSIEYFPKSVGMILTYLCTYDDYLMQGAPTSAYISNLVMKEFDEVLGLWCEENNISYTRYSDDMTFSGEFNPREVIVKVRKMLYKLGLELNNKKIHIIHKSSNQNVTGIVVNEKVQVSAKYRKEIRQEIYYIRKFGLESHLKKRNIDIEKEKYINILYGKILYVLQINNKDNEFNKYKKFMNDFKNKF

SEQ ID NO: 2285 - protein, 318 aa, unidentified
  source 1..318: note = Related to DLWG01000243.1; note = Firmicutes bacterium
MWKYIGLKECNEFLLSLNLFDCKDEKKYIRTLYSISNNVENNYKKYKIKKSNGKYRTIYEPSLLLKHIQRQILNNILNDRMISSYAKAYRRGSSLKDNAIVHQNKKIVLKLDISSFFDNISFIDVYNSCFSIEFFPKSVGMLLTSLCIYNDYLPQGAPTSAFISNLVMRSFDEEIGSWCSLKNISYTRYSDDMTFSGDFDCKEVINKVRKMLSIKGLELNKDKIHVIKNSSCQKVTGIVVNNKVQVCSNYRKSIRQEIYYIKKYGLESHKKYRNILSSNRKYLNSLYGKVSYVLQINRDDKEFIDYKNYLLKLLKDNL

SEQ ID NO: 2286 - protein, 316 aa, unidentified
  source 1..316: note = Related to JAFRAB010000047.1; note = Erysipelotrichaceae bacterium
MWDYIGVKECNDYLLSLHLFDCEDERKYIRTLYAIANNIRNHYRKFQIRKHNGKMRTIYEPSGILKHIQKRILGEVLEDLKVSPYATAYTRGKSLLDNACPHVGCKMILKLDIKNFFENIWFLDIYNSCFPIELFPKSIGMLFTYLCTYDDHLVQGAPTSAYISNLVMRDFDYAVGNWCRQQGIEYTRYSDDMTFSGDFDPAAVIRKVRRELYRLDMELNDSKTRVIYRSHRQCVTGVVVNEKPQVSKKYRKEIRKQMYYIEKYGLSEHLKRTGKAEKGYLETLKGCICYVLQINPDDAEFRQYLKKANELLYADK

SEQ ID NO: 2287 - protein, 316 aa, unidentified
  source 1..316: note = Related to JAFWHJ010000089.1; note = Erysipelotrichaceae bacterium
MWDYIGVKECNDYLLSLNLFDCDDRQKYIRTLYAIANDVRKHYTKYQIRKHDGKMRTIYEPSGILKHIQKRILTEVLEDMRVSPYATAYTKGKSLLDNAQPHVGQKMILKLDIRHFFENIWFLDIYNSCFPIELFPKSVGMLFTYLCTYDDHLVQGAPTSAFISNLVMREFDYEVGNWCNQKNISYTRYSDDMTFSGDFDPSGVIRKVRRELYKLDMELNDSKTRVIRRSHRQCVTGLVVNEKRQVSREYRKEIRKQIYFIQRHGLSEHLARIGRDEKGYLERLKGSICYVLQINPDDAEFRKYLEDIDELSYANK

SEQ ID NO: 2288 - protein, 322 aa, unidentified
  source 1..322: note = Related to JAFTRC010000024.1; note = Bacilli bacterium
MWKYITKEQVQEFLLSLNLLDNKLNDKDNINKLYSISNNIENNYKIFKIKKRNGKFRTIYEPNYTLKNIQRKILNNILNNKSISKYAKAYKKGTSLKDNAKEHLNKNIILKLDIKNFFESIQFIDIYNSCFPIEYFPKEIGMLLTFLCTYNNYLPQGAPSSSYISNLVMKEFDEYIGDYCDKNNISYTRYSDDLTFSGNFNPSIIIKKVRKDLLKMGLEINDSKTHIIKKGNRQSVTGIVVNEKLQISSDYRKEIRKQIYYIKKYGIESHLEFTNNNISEIKYLNSLYGKINYVLQINKDDNEFIEYKKYINKLLKEKRPKN

SEQ ID NO: 2289 - protein, 321 aa, unidentified
  source 1..321: note = Related to JAFQQQ010000003.1; note = Bacilli bacterium
MWKYITKEQTKDFLLSLNLIDDKLSDKEKINILYSISNNIENNYRIFKIKKRNGKLRTIYEPNPTLKNIQRRILNNILNNKSISKYAKAYKKGICLKDNAVEHLNKETILKLDIKDFFENIKFSDIYDSCFSIEYFPKEIGMLLTHLCTYNNHLTQGSPTSAYISNLVMKEFDEYIGDYCEDNNISYTRYSDDLTFSGNFNPSNVIKIVRKALLKLNLEINDDKTCIINKGNRQTVTGITVNEKAQICSTYRKNIRKEIYYIKKFGIDSHLKFTNNNITPLKYLRYLSGKINYVIQINNNDKEFLKYKIYINELLREKRVD

SEQ ID NO: 2290 - protein, 317 aa, unidentified
  source 1..317: note = Related to JAFQTN010000005.1; note = Bacilli bacterium
MWKYLSKDKEKEFLLSLHLINGVNDEDILNKIYTISNNIEKNYKIFKIKKRNGKTRTIYEPNPNLKIIQKNILHNILEDRYISYSAKAYKKGISIKDNANEHVDKDMILKLDIKNFFNNITYIQVYCSCFKEIYFPKSIGTLLTNLCTYNDSLPQGAPTSSYISNIIMLDFDIKIGEYCKENNVSYTRYCDDMTFSGNFSKMEIINLVKSELKKLGLTLNHDKTKLITKKNRQYVTGIVVNKKAQVSIDYRKEIRKNIYYIKKYGLNSHMNYQKMSLPKEKYLNILLGRINFVLEVDKANKEFIEYKKYILKLIKDR

SEQ ID NO: 2291 - protein, 317 aa, Coprobacillus sp.
  source 1..317: note = Related to HF998250.1
MWKYTTKEVCNDYLLSLFSFDLISSNQETLKLLYKISNNKEKYYHVIKIKKKSGGYRTIYQPSPTLKYIQKTILDKVLKEKGISKYAKAYYNGASLTTNAKPHLNQKIILKLDIKNFFPSTNYLTIYKACFSKELYPKSIGTLFTSLCTYQDFLPQGSITAPYISNLVLKDFDNGIGTFCQKRNINYTRYCDDMTFSGNFDPHHIIKCVANKLHKIGYELNKKKIHIITNNKRQEVTGIVVNKKLQVPKDYRHKIRQELYYVTKYSLSSHLERNNIKDKETYLQSLYGKILYVLQIDPSNKEFIKYKELISLELNKM

SEQ ID NO: 2292 - protein, 317 aa, Mycoplasma sp.
  source 1..317: note = Related to HF993109.1
MWQHLTKKQINNFILSLNLISFNNLSNKEKLKLLYTISNHGEKHYKVFKIPKKNGGYRTIYEPDYTLKMIQENILTNVLNERIISSYAKAYKKGLSLLDNALPHLRQKIVLKLDIKDFFPSIDFLKVYKKAFPRHIYPEAVASLLTNLVTYNNTLPQGAPTSSYISNLVLRSFDIKIGSFCQSKNIAYTRYCDDMTFSGEFNPQEIINLVKTELFKENFILNKKKIKIIKSNKAQIVTGIVCNEKLSIPRTYKKFIRQNMYYINKYGLNNHLKYINYLDSKDYLNKLYGQILFVLQIEKNNKEFLNYKNELIKLKEN

SEQ ID NO: 2293 - protein, 319 aa, unidentified
  source 1..319: note = Related to DVMT01000048.1; note = Candidatus Aphodocola excrementigallinarum
MFRYLSLDKYNDLLSSFNLVNTTDIKKINKMLYNISNNIDANYEEIIIHKKTGGLRFLYAPSKELKSIQKRILKNVLEEKKLSRYSYAYRKKVSVLDNAKPHVKKDVIVKLDIKDFFDNITFSMVYDSCFNETLYPKKMGMLFTNLCVYNNRLPQGAPTSGFISNIVLRNFDEKVGSYCEKRKISYTRYSDDLTFSGNFNVKDLIKYVNKLLYEYNFRLNKKKIKVVSKKTRQQVTGIVVNEKVNIRRNYKRKIRQEMYYIKKYSLKSHLKNIAYKCDEKTYLLNLLGRINYVYNITKDTEFYNYKKDVTKLVKKLDLK

SEQ ID NO: 2294 - protein, 317 aa, unidentified
  source 1..317: note = Related to HF990861.1; note = Firmicutes bacterium CAG:822
MLDNVTKDMANEFLLSLNLIDEKLSDKEKIRKLYTLSNNIEKNYKKTVILKKDGNKRIIYEPNYTLKKVQRNILDNVLSGFKVSKYAMAYVKGKSVKDNANMHVNKKLILKLDIKDFFNNISFMDVYNKVFLEEYFPKQARTVLTYLCTYNEFLPQGAPTSSYISNLIMQDFDEKIGLFCEKNNISYTRYSDDMTFSGDFNVKMVIFKVKDELKKMGMQLNYDKIHVIYSNMSQQVTGITVNEKPQVLKVKRRKIRQEVYYIKKYGLYSHLKRINVKDEFSYLRSLLGKINFVLMVNSEDLEFFKYREFILKIFNNL

SEQ ID NO: 2295 - protein, 313 aa, unidentified
  source 1..313: note = Related to SVAM01000009.1; note = Firmicutes bacterium
MWKYLTKEHKKEFILSLNLIGGKFSDTEKLNILYAISNNSEKYYTTKYINKKDGTKRELLVPNKTLKNIQKNILNNALNDLEVSKYACAYIKNKSLKDNASPHINQKVVLKLDIKDFFTSITFEEIYKVIPNELFPTSIKVLMLKLCTYYDYLPQGAPTSPYLSNLVLKNFDNYIGTYCKERNINYTRYCDDLTFSGDFDVKKLKNKVQAFLEEIGYNLNDKKTKVIKNNKRQIVTGLVVNEKVNIPISYRKKIRQEMYYINKYGIDSHLKYINNTNKEKYINSLKGKINYCLNINPNNTEFQSYLKKLNNLL

SEQ ID NO: 2296 - protein, 315 aa, Ruminococcus sp.
  source 1..315: note = Related to JAFWVI010000074.1
MIDTDVLIISETLDVPVNKLYMLSNNYTSRKKHRRSKYENYHMVVIHHGIVHKKRMLSVPNAFLKTVQRRILDQYLYQLEESEYSTAYCKGKSLLDNASPHVGKECVLKLDISHFFDSIDDDMVYLVMKRLGLSVPATALLTHLCTYRAKLPQGAPTSPYIANLAMKQFDEKLGRWCSERNIAYTRYCDDMTFSGSKAAIRESRIISKVRSMMYRMGFMLNDKKTVFISSSQQQRVTGIVVNEKPVLSRTQRRAIRQEVYYCQKYGAAKSIKRRKLNISPDKYLHSLLGRIAFALQIEPDNSEMKGYFETVKNMI

SEQ ID NO: 2297 - protein, 315 aa, Ruminococcus flavefaciens
  source 1..315: note = Related to FPJT01000001.1
MLDADIIKISEALDVPVNKLYMLSNNYKPRKKRRGSTYENYHTVVIHHGRGHKNRRLSVPNAFLKMVQRRILECYLYQLEVSDHSTAYCKGKSLLDNASPHVGKECVLKLDISHFFDSIDDDMVYLVMKHLGLSVPATALLTHLCTYKTRLPQGAPTSPYIANLVMKQFDEKLGCWCRRNNITYTRYCDDMTFSGTKSAIRESRIISKVRSKLYHMGFTLNDKKTVFISSSQQQRVTGIVVNEKPVLSRSQRRAIRQEVYYCQKYGAVESINRKGLDIPSDKYLRSLLGQIAFAMQIGPDNAEMRRYFDTIKNLI

SEQ ID NO: 2298 - protein, 317 aa, Ruminococcus sp.
  source 1..317: note = Related to JAFTYF010000065.1
MIDADVMKISETLDVPANKLYMLSNNYTARKKRRGSKYENYHTVIIHHGRGHKNRKLSVPNAFLKMVQRGILEQYLYQLEISEYSTAYCKGKSLLDNASPHVGKECVLKLDISHFFDSIDDDAVYLVMKRLGLSIPATTLLTHLCIYKARLPQGAPTSSYIANLVMMQFDERLGSWCSERNITYTRYCDDMTFSGNKADIRSANVVGKVRRMLYRMGLTLNDKKTVFISSSQQQRVTGVVVNEKPTLSRSQKRSLRQEVYYCQKYGAAKSINRRGLDISPDKYLHSLLGRIAFALQIEPENAEIKEYFETVKNLINT

SEQ ID NO: 2299 - protein, 314 aa, Ruminococcus flavefaciens
  source 1..314: note = Related to NZ_JAEF01000007.1
MYNDIPYIAETLRVPVGKLYMLSNNYKPRKKRKGSIYENYHTVVIHHGRGHKNRTLNVPNAFLKLVQRRLLDNFLYQLKVSEYSTAYCKGNSLLDNAAPHVGKECVLKLDISHFFDSIDDDKVLFVMKRLGVSITATVLFTHLCTYKGKLPQGAPTSPYIANLVMKQFDEKLGHWCSEYNITYTRYCDDMTFSGYKADIHSAKVVGKVKRMLYHMGFTLNDKKTVFINSSQQQRVTGIVVNEKPTLSRSQKRTLRQEVYYCQKYGAAESINRKGLDISPDKYLHSLLGRIAFALQIEPDNSEMREYFETVKNLI

SEQ ID NO: 2300 - protein, 318 aa, Ruminococcus sp.
  source 1..318: note = Related to JAFPPE010000436.1
MDSDVISIAENLGTTAAKLYMLSNNYSPKNKRHGSRYANYHKVTIQKPGSHKSRTLHVPNGFLKMIQRRILDKYLYTLEVSEFSTAYRKGTNLLDNALPHVGKECVLKLDISDFFGSIDDDAVYMAMKGLGLSVPATALLTHLCTYHGILPQGAPTSPYIANLVMRHFDGKLGKFCISRNIAYTRYCDDMTFSGSREDILRAKLPGKVKAMLAARNFILNDSKTVLVYASRQQRVTGIVVNEKTTVPRSSRREIRQQVYYCRKFGAQDCIRRKGLDITPEKYLSGLLGRITFALQTDPENKQMQEHFRTVREMIGKLT

SEQ ID NO: 2301 - protein, 317 aa, Ruminococcus sp.
  source 1..317: note = Related to JAFXEJ010000141.1
MTDSDVLKIASEIEISVNKLYMLSNNNSPRHKSRKKKHRNYHTVIIHRGRGHRNRILSVPNTLLKLVQRKILDCFLYQLETSEYSTAYCKGKSLLDNASPHIRKECVLKLDISHFFDSITDDSVYLVFKQFGLSVPATSLLTHLCTYKGKLPQGAPTSPYIANLVMKNFDKKLGKWCKERNITYTRYCDDMTFSGDKTSVRKNKIIVKVKAMLGSMDMKLNDKKTIFISSSQQQRVTGIVVNEKAAIPREMRRSIRQEVYYCTKFGISDSLQQQRLDISPDKYLHSLLGRISFALQIDPYNSEIQKYFDTVKQLMNA

SEQ ID NO: 2302 - protein, 317 aa, Ruminococcus sp.
  source 1..317: note = Related to JAFVBU010000121.1
MIDKDVLQISETLGVPVGKLYMLSNDYIPRKKSRKSKYNNYHTVVIHRGRGHKNRVLSVPNNFLKMVQRRLLERYLYRLDVSECSTAYSKGKSLLDNASPHVGKECVLKLDISHFFDSIDDDMVYMIMKQFGLSDPATALLTNLCVHNCKLPQGAPTSPYIANLVMTHFDEKLGAWCSERSIAYTRYCDDMTFSGTKEAVKSSHIIRKVKRMLYRMGFELNEKKTVFISSSQQQRVTGIVVNERPQLTREMRRSIRQEVYYCTKYGVKESLQHRGLDISEQKYLHSLLGQISFALQIDPQNEDMRRYFDTVKNLMNT

SEQ ID NO: 2303 - protein, 317 aa, Ruminococcus sp.
  source 1..317: note = Related to JAGAMS010000071.1
MIDADVIKISETLDVPVGKLYMLSNDRFPRKRRRKSKYTNYHTVIIHRGRGHRNRKLSVPNSFLKMVQRRILEHYLYNLDVSAFSTAYCRGKSLLDNASPHIGKEYIVKLDISHFFDNIDDDMVFMIMRQLGLTMPATSMLTNLCVHNGRLPQGAPTSPYIANLVMKHFDEKLGVWGAENNITYTRYCDDITLSGTKKAIESSHPVGKIRRMLYRIEFNLNEKKTVFASSSQQQKVTGIVVNEKPQISREMRRAIRQEVYYCAKFGVTESLKRNGLNISAKEYHHSLLGRISFALQVDPANDEMQSYFNTVKNLISK

SEQ ID NO: 2304 - protein, 320 aa, Ruminococcus flavefaciens
  source 1..320: note = Related to UETD01000003.1
MTDVDVMLISEVLGVPVRKLYMLSSDRVPRQKRGGSYSNYHQSVIYTGRTKKKRVLTVPNGFLKLVQRRILDRCLSKLPVSEYATAYRKGTSVRDNALLHTGKEFIIKLDISGFFDSINDDAVYMVMKQFRLSPRATSLLTHLCVHRGVLPQGAPTSPYIANLVMKHFDEHIGAWCAERNITYSRYCDDMTFSGSRDDLLGSRLVGKVGRTLYAMGFTLNREKTVFAGSSQRQTVTGLVVNEKADLPREKRRELRQEVYYCLKYGVREHLSQRGSSDAPLRYINGLMGRLAYQLQQRPEDEKLREWFVQIKKLRESEGDK

SEQ ID NO: 2305 - protein, 317 aa, Ruminococcus flavefaciens
  source 1..317: note = Related to NZ_ATAX01000036.1
MTDVDVMLVAEVLGVPVHRLYMLSSDRMPRNKRGGSYSNYHKSVIYSGRSKKKRVLTVPNGFLKTVQRRILHRCLYKLPVSEYATAYCKGRGPADNASPHTGKDYIIKLDISDFFGSINDDAVYMVMKQLKLTPRATSLLTHLCVHNGVLPQGAPTSPYLANLVMKHFDGRIGSWCAERNISYTRYSDDMTFSGRRGDLLASGLTGRVRNMLYSMGFELNSKKTVFAVCSQRQTVTGAVVNEKVNVPSELRRKLRQEVYYCTRFGVEDHLARCGSGEAPKAYISGLLGRLSYALQLRPDDEWLRSGFEKIKAMSNDI

SEQ ID NO: 2306 - protein, 319 aa, Ruminococcus sp.
  source 1..319: note = Related to JAGPNI010000006.1
MTDSDVLAVSHALDVPVGKLYMLSNERIPRQAKSSSSKYKNYHTVVIKKGLFRKSRKLSVPNALLKMTQRRILHQYLYRLELSSFSTAYQPGRSLKDNASPHLHQEYLIKLDISKFFDNIDADMVYSVMRQLGLSQAATVLLMRLCVHNSVLPQGAPTSPYIANLVMKRFDEHLGEWCGRRGINYTRYCDDMTFSGRKTDLLTCDLVRKVRRMLHGMGFELNERKSLFLSCANQQKVTGIVVNEKLQVPRELRRQLRQEVYFCLKFGPKESMKRRGLKTSPEQYLHSLLGRIAFALQIDPDNLEMQGYHSQIKELTAQL

SEQ ID NO: 2307 - protein, 319 aa, Ruminococcus sp.
  source 1..319: note = Related to JAFUAO010000003.1
MTDRDVTELSRALGVPVGKLYMLSNERIPRKPKRGSSKYKNYHTVVIKKGLFRKSRKLSVPNGLLKMTQRRILHQYLYRLEASRYSTAYQPGRSLRDNASPHLGQEYLIKLDISKFFDNIDADMVYNVMRQLGLSRAAAVLLMRLCVHNSVLPQGAPTSPYIANLVMKPFDEHLGDWCRARGINYTRYCDDMTFSGRKADLLTCHLVGKVRKMLRRMGFELNDKKTLFLSRGSQQKVTGIVVNQKLKVPRELRRTLRQEVYYCTKFGAEESLKRRRLDMAPEEYLRSLLGRIAFALQIDPEDSEMQGYHSQIKALAAQK

SEQ ID NO: 2308 - protein, 320 aa, unidentified
  source 1..320: note = Related to JAFZOZ010000090.1; note = Clostridia bacterium
MADADVIKIAQSLGVSVKSLYMLSNNPMRLREKRRKPRYENYRRVVIHRGRGRKNRVLSVPNEFLRRVQRGILKKYLYNLEPSEYATAYLPGFSVRANALPHTGKEFIVKTDILHFFDSIDEELVWRTVRELGFSIPATTLLTDLCVYRDRLPQGAPTSPHLANLVMRRFDEKIGAWCKERGITYTRYCDDMTFSGQKDALCGVGLIGEVRKELHRIGLQLNDEKTAFIPASQQQRVTGAVVNKKTRLSRDARRELRQAVYYCEKFGVKEHLAHRNDPSAPEEYLRSLLGKISFALQLDPTDGEMREMFRKIKKLTDGSK

SEQ ID NO: 2309 - protein, 325 aa, Ruminococcus sp.
  source 1..325: note = Related to NZ_HF545616.1
MNDIDNDIIRISEELDVPLKKLYMLSNNRIRYHKRNQKKCYSNYRKVIIHRGRGHKNRVLKVPNEYLKLVQRRILERYLYTLSVSEYATAYCKNSSLLKNAEPHIGQQRVLKLDVSGFFDSIDFGKVYGVMCELGFSKPATTLLTNICTYNSILPQGAPTSPQISNLMMKRFDERIGKWCGERGINYTRYCDDMTFSGGKAVLNAKEITQLVSRALWKMGFKLNMKKTTLIGSSQRQQVTGIVVNEKAQISSKQRREIRQEIYYCEKYGVSQSLFFKGADITPEKYINSLLGRISFALQIDPADVKMHEYFKVVKKLKSEVCVEK

SEQ ID NO: 2310 - protein, 319 aa, unidentified
  source 1..319: note = Related to JAFWIW010000020.1; note = Candidatus Saccharibacteria bacterium
MNEQEVNYMSSLFLGASTLEKRDLINLMPNKIVRKYYIRHDIPKRTGGIRVIYEPSQTLKTVQRRINRWFLKDAPVSDFAFAYVKGRCILDNAKPHVGKPILLKLDIHHFFDNIHFESVFDIFKSLGFSENFARLVAGLTTVDDYLPQGAPTSPALSNLFLKEFDEEIGEYCSKNDIVYTRYSDDLTFSMYRFNPDLVKFVREKLGALGLELNRKKSKIICGPLQKRVTGVVVNNKPQVPRSYRHKIRQEMYYISKYGLDASLNTRNITDKEKYVSCLLGQINFVLQINKNDDEFKKYREILMTPSLDNLRSQLTNLLN

SEQ ID NO: 2311 - protein, 310 aa, unidentified
  source 1..310: note = Related to JAFSSJ010000008.1; note = Bacilli bacterium
MNSNEKKFLLSLFSFDKNLSDNEKIKKMYIMSNRIEKYYHHFTIKKRNGTERNILCPYTQLKKIQLNILNGLLYDKSVSVFAKAYIKNSYLVDNTIIHRGHKYILKLDIHNFFENISYVDIFNIYKEYGFSNALCSLLAHLTTYNDYLPQGAPTSPYLSNLVLRNFDYKVGKWCEKQNINYTRYSDDMTFSMNEYNKDLIRFIRINLFKQGLELNNEKICLIHHSQQQKITGIVVNDKIQVDSKYRKKIRQELYYINKYGLDEHLERNKTKDKKKYLKILYGKILFVLSVDKNNKEFIKYKMIVRKILNG

SEQ ID NO: 2312 - protein, 350 aa, unidentified
  source 1..350: note = Related to JAFTUG010000010.1; note = Clostridia bacterium
MLYLNSQKALIDLLYEDWCEDISKEVFTAFIYRISNNPQNFYRRNQIYQKNGKVRNVDVPSQGLKIIQRIILKRILENIPVHNSARAYIKGSSLRDNAGAHCGRKCVVKLDIKRFFEHIDEKSVYLIFRRLSYPPDVCRMLTKLCCLKGRLPTGAPTSPYLSNLFMKKFDREMSLFCENKNISYTRYSDDITFSFDSFDKTRLIRVTRNFLGLYANGLPLNQKKIFVVTSNKKQKVTGLVVNEKTSVDKELRRNIRQAVYYIGKFGVSDHIRHLQSSEYGGWVMFIADDWHFRMVKLRYLRTLQGRISFCLCADPDNTEMKQYAEFIKEIIKKEKEEICILKMSFQNAKK

SEQ ID NO: 2313 - protein, 306 aa, unidentified
  source 1..306: note = Related to SVTP01000007.1; note = Oscillospiraceae bacterium
MIVYQELASIERDLGFSAKTLYGLSNHLEKHYHNVLIPKSDGSKRKLSVPELILKRVQRSIADHILVQFPVSNYAKAYKIGGSVQHNAQPHVGKKKILKLDIEGFFDHILYSQVKEKVFCKEKFAEPIRILLTMLCYYKESLPQGAPTSPAITNIIMYDFDQTVGAFCNERGISYTRYCDDMTFSGDFDEGEVIAFVKGELYRLGLFLKNRKTVVVPASKRQTVTGIVVNEKINLTKEYKKKIRQEMYYIQKFGIDEHLTRLGVSDKRGYLLSLMGRISFVLQTVPNDCEFAKYRKMLTQGSFQNA

SEQ ID NO: 2314 - protein, 303 aa, unidentified
  source 1..303: note = Related to SVQS01000086.1; note = Oscillospiraceae bacterium
MIVYKELASIEQDLGFSARTLYGLSNHLEKHYHNVFIPKSDGSKRKLSVPDLILKRVQKSIADNILVQFPVSRYAKAYKVGSSVQRNAQPHIGKKKLLKLDIEGFFDHILYSQVKDIVFCEEKFAEPIRILLTMLCYYKESLPQGAPTSPAITNIIMFDFDETVGAFCNKKNIAYTRYCDDMTFSGDFDEGEVITFVKKELFKLGLFLKNRKTVVLPASKRQTVTGIVVNEKLNITKEYKRNIRQEMYYIQKFGMDEHLNKLGISDKRGYLLSLKGRISFVLQTIPNNREFVEYRKVLNANLL

SEQ ID NO: 2315 - protein, 377 aa, unidentified
  source 1..377: note = Related to SVRN01000036.1; note = Oscillospiraceae bacterium
MASRHLFTHAQLIRCTSPTKDFLRKLLLNGLVPLSRNAHRSAARLRKLHLADLRLRVSPCKLVLFYDPSGKESDMIVYKELASIEQDLGFPARTLYGLSNHLEKHYHNVFIPKSDGSKRKLSVPDLILKRVQKSIADHILSQYPISRYAKAYKVGSNVQRNAQPHVGKKKMLKLDIEGFFDHILYSQVKNIVFYKEKFSEPIRVLLTMLCYYQEALPQGAPSSPAITNIIMYDFDERIGAFCNEKHIAYTRYCDDMTFSGEFDEREVISFVKEELSKLGLFLKNRKTAVIPASKRQTVTGIVVNEKLNVTKEYKKAIRQEMYYIKKFGVDDHLARLGISDKQHYIRSLAGRIAFVLQTTPSDGEFAGYKKFLAECSL

SEQ ID NO: 2316 - protein, 303 aa, unidentified
  source 1..303: note = Related to SVST01000008.1; note = Oscillospiraceae bacterium
MIVYKELASIEQDLGFSAKTLYGLSNRLEKHYHTVYVPKSDGTKRKLSVPDLILKLVQKSIADNILVQYPISRYAKAYKVGSNVQKNAHPHVGKKKLLKLDIEGFFDHILYSQVKDIVFYQEKYAEPIRILLTMLCYYHDSLPQGAPTSPAITNIIMYDFDETVGAFCDSKNIAYTRYCDDMTFSGDFSEKEMIGFVKNELSKLGLHLKKRKTAVIPATKCQCVTGIVVNEKMNLTKDYKKKIRQEMYFIKKFGLDGHLKKMGVSDKEQYLLSLKGRIAYVLQTIPNNDEFTEYKKILHSIRV

SEQ ID NO: 2317 - protein, 302 aa, unidentified
  source 1..302: note = Related to JAGALS010000020.1; note = Clostridia bacterium
MIIYKELSSIEKVLAYPAKTLYGLSNNLEKHYHTVFVPKSDGSKRKLSVPDLILKNVQRSIADHILAYYPISRYATAYKVGSSIQKNARPHVNKKKILKLDIEGFFDNILYSRVKDVVFYEEKYSEPIRILLTMLCYYQESLPQGAPTSPAITNIIMYDFDEKIGAYCTEKGVSYTRYCDDMTFSGDFDEKEVIALVTSELQKLGLFLKNRKTVVIKNTKRQTVTGIVVNEKINLVKEYKKKIRQQMYYIKKFGIESHAEHLGITDVFGYLSSLKGQVAFVLQTCTQNAEFKGYQEFLQNLK

SEQ ID NO: 2318 - protein, 302 aa, unidentified
  source 1..302: note = Related to JAFTNT010000011.1; note = Clostridia bacterium
MIVYKELCSIEKDLGYPAKTLYGLSNRIEKHYHTVFIPKSDGTKRRLSVPDLILKSVQRSIADNILAYYPISEYATAYKVGSSVQRNARPHVNKKKILKLDIEGFFDNITYSRVKDIVFYEDKFSEPLRVLLTMLCYYRDSLPQGAPTSPAITNIIMYDFDEKIGAYCSKNGVSYTRYCDDMTFSGDFNEQEVISLVKEELRKLGLFLKNRKTAVIERTKRQTVTGIVVNEKINLTKEYKRKIRQEIHYIEKFGIEGHAKKQAITDVAEYLTSLKGRIAFVLQTCPDDSEFLKYKAIVHPLH

SEQ ID NO: 2319 - protein, 302 aa, unidentified
  source 1..302: note = Related to JAFVUY010000073.1; note = Bacilli bacterium
MIVYRELNTLATDLGFPLKTLFALSNNIDKHYHNAFIPKSDGTKRKLSVPDKILKLVQKSIADNILAYYPVSKYACAYTYGSNVQKNAAPHIGKKKILKLDIEGFFDNIIYSRVKDIVFYKEKFSEPVRVLLSMLCYHRDALPQGAPTSPAITNIIMYDFDEIIGCYCNEKGISYTRYCDDMTFSGDFDEKEVIVLVKQELKKLGLFLKNRKTAVIPNTKRQTVTGIVVNEKINLAKEYKKKIRQEMHYITKFGLDEHLKRTGETDKKKYLLSIKGRIAFVLQTTPNDKEFLEYKSLLTKEK

SEQ ID NO: 2320 - protein, 302 aa, unidentified
  source 1..302: note = Related to SVHW01000007.1; note = Clostridiales bacterium
MIVYRELKSIEHDLGFSAKTLYGLSNNLDKHYHNAFIPKSDGTKRKLSVPDLILKKVQRSIADNILAYYPTSKYACAYAYGASVQKNAMPHVGKKKILKLDIEGFFDNIIYSRVKETVFFKEKFSEPIRILLSMLCYYLDSLPQGAPTSPAITNIIMYDFDEKIGSYCAEKGIAFTRYCDDMTFSGDFNEKEIIELVKSELKKLGLFLKNRKTAVVPNKKRQIVTGIVVNEKINLTKEYKKKIRQEMYYIKKFGLEDHLRKIGQSDKQRYLLSLKGKIAFVLQTIPDKNEFLEYKELLSRKY

SEQ ID NO: 2321 - protein, 301 aa, unidentified
  source 1..301: note = Related to JAFXAN010000018.1; note = Clostridia bacterium
MIVYKELKTIEHELGFPAKTLYGLSNNLESHYRTVFIPKRDGNKRKLSVPDSILKMVQRAIADNILSYYPVSSYAMAYSPGCSVQRNASHHIGKKKILKLDIEGFFDNITYSRVKDIVFFKEKFSEPIRILLTMLCYYKESLPQGAPTSPVITNILMYDFDERVGEYCREKQISYTRYCDDMTFSGDFDEKKIIAFVKNELKKLGLFLKNRKTAVVPVTKRQTVTGIVVNERINLTKDYKKKIRQEMYYIRKFGIDGHLKKLEITDKKAYLNSLKGRISFVLQTIPNDKEFLEYKNILKCQ

SEQ ID NO: 2322 - protein, 302 aa, unidentified
  source 1..302: note = Related to JAFTHO010000004.1; note = Clostridia bacterium
MIVYHELASLQKDLGFSAKTLYGISNNIAKHYHTVLVPKKDGTKRKLSVPDVMLKRVQRAIADNILSQYPVSRYATAYKPGASVQKNAGKHVGKQKILKLDVKGFFDNILYSQVKDIVFYEKKFSEPIRILLSMLCYFNDSLPQGAPTSPAIANIIMYQFDQNVGSFCKQNNVTYTRYCDDMIFSGDFDERQIVSFVTSELKKLGLFLKDKKTAVIPNSKRQIVTGIVVNQKANVARQYKSKIRQEMFFIKKFGIDGHLQKTGINNRQKYLNSLKGRIAFVLQTLPGDKEFLKYKNYLANLK

SEQ ID NO: 2323 - protein, 315 aa, unidentified
  source 1..315: note = Related to JAFVYN010000052.1; note = Clostridia bacterium
MIVYHEVATVARELGIPLKTLYGVSNNISAHYHKVALPKKNGGTRILSVPDPVLKTIQCAIADTLLPLSPVSRYAKAYKPAASVKANALPHVGKKKLLKLDILHFFDSILYSTVKEKVFPASRYAEPIRILLTMLCYERDALPQGAPSSPAITNIILFDFDETVGAFCHERGIAYTRYCDDMTFSGDFDEKEVTAFIEAELRIRGFFLNRSKTAVIRHTRRQTVTGIVVNEAPALPRATRRELRQAVYYCKTYGVANHLARIQSSTSPGKYLEKLLGKISYALSVDPDDADLQKARKTVLLLIGLEKHIPDPTQP

SEQ ID NO: 2324 - protein, 305 aa, unidentified
  source 1..305: note = Related to JAFTKF010000062.1; note = Clostridia bacterium
MIVYRELSTLERDLGFSAKTLYAVSNSIDRHYHKVTLPKKSGGTRTLSVPDEILKKIQRAIAEKLLAYHPVSQYAKAYKPAASVKRNAMPHVGKKKLLKLYILHFFDSVLYNTVKDRVFPETVFSEKLRILLSMLCYYRDVLPQGAPTSPVITNIILYDFDETIGDFCLSRGIAYTRYCDDMTFSGDFDEKEIIKTVQQELNARGFLLNRKKTAVVPSSKRQVVTGIVVNEKLSLSRSARRSLRQALYYCKTYGVSEHLAHCGIHDTPKHYLESLLGKIAYALSIDPDDSELLNCKETVTRLLQE

SEQ ID NO: 2325 - protein, 307 aa, unidentified
  source 1..307: note = Related to JAFTRY010000008.1; note = Clostridia bacterium
MIVYTELRSLEIDLGIPIKTLYAVSNNINAHYYSKSIPKSDGSQRVLSIPDEPLKKIQRAISEKLLVYEPVSIYAKAYKPTSSVRKNAVCHVGKEKLLKLDIYKFFDSINYSLVKEKVFPSNKYSEQIRILLSLLCYKGEPLPQGAPTSPVISNIIMRDFDQTVGEWCKERKISYSRYCDDLSFSGSFDETDVIEFVTVNLKSLGCILNKKKTHCFKGKEKKTVTGVVVNEKINTQKSYRRQIRQEFFYCQKFGVQEHLSRIGSSEKPYNYLSRSLGQINYVLQITPDNKEFLSYKVQILALLKEHK

SEQ ID NO: 2326 - protein, 307 aa, unidentified
  source 1..307: note = Related to SVSM01000002.1; note = Oscillospiraceae bacterium
MIVYKELQSLETDLGVTAKTLYATSNNINAHYHNKSIPKSDGSIRVLSIPDEPLKKIQRAISEKLLAYEPVSIYAKAYKPASSIRKNAICHVGKEKLLKLDIYNFFDSIKYSLVKEKVFPAKKYSEQIRVLLSLLCYKGESLPQGAPTSPVISNIIMRDFDQTVGEWCEERKIRYTRYCDDMSFSGSFDESNVIKFVEGELKSLGFILNRRKTRCFTGGNKKTVTGIVVNEKINTEKSYRRQIRQEVFYCKKFGVQEHLTHMGSPENPYNYLSRLLGQINYVLQITPDNKEFLNYKVQILNILKDNQ

SEQ ID NO: 2327 - protein, 311 aa, unidentified
  source 1..311: note = Related to JAFVSI010000037.1; note = Clostridia bacterium
MVVYRELSSIEADLGIPARTLYRLSNNIGKHYREKKIPKSDGTVRLLSVPDEILKKVQRSIAEKLLAYEPVSLYAKAYRIGGSVISNAAPHVGKEKILKLDIYHFFDSISYSSVKEKCFPAEKYAEKIRILLAMLCYHGESLPQGAPTSPIISNIILRDFDIEVGRWCSERKIFYSRYCDDMTFSCDGDFDGAEVTAFVKQKLGVLGFILNDRKTRLLKKGDKKTVTGIVVSEKLNASKEYRRTVRAEIHYCQKFGVEGHLSRTANALAENPSKYLASLMGKVNYVLQITPENKEFLEYKEYLSDIIKEFK

SEQ ID NO: 2328 - protein, 306 aa, unidentified
  source 1..306: note = Related to SVRW01000015.1; note = Oscillospiraceae bacterium
MIVYKELKSIEKELGFSSKALYGLSNNLGKHYHKVEVPKKSGGTRTLSIPDEALKKVQRAIVQSLLEFENVSFHAKAYKYNSSITKNASPHVGKEKILKLDIYRFFDNISYSAVKEKVFPAEKYSEQIRILLSMLCYYNEALPQGAPTSPIITNILMREFDNVLGEWCKKRNVDYTRYCDDMTFSGSFDEKEIIDYVIHLLCGFGLRLNDKKTKVFTSSQKQIVTGIVVNKKMNVSKAYKREIRKEVYFCKKFGVENHIEHEEIQLSPERYLNSLLGRINFVLQVCKNDKEFKEYKKIISKIIKNK

SEQ ID NO: 2329 - protein, 307 aa, unidentified
  source 1..307: note = Related to JAFTKI010000072.1; note = Clostridia bacterium
MIVYRELSTLSRDLGIPAKTLYAVSNAQDKHYRLIKIPKKDGTDRTLSIPDEILKKIQRAISEQLLSREPISRYATAYRPASGILKNALPHVGKAKLLKLDILHFFDSILYSAVKERAFPADRYSESNRILLSMLCYYRDTLPQGAPSSPAITNIIMRDFDEAVGAWCAERKIAYTRYCDDMSFSGDFDEEEVIEYIAARLKELGFTLNRRKTVVKTNSQQQTVTGIVVNQKPNISAKYKREIRQAVFYCTKFGVTEHQKQIGSSQSPVAYLQALLGKINYVLQVCPNDTSFAAYRKSVLALLEKNR

SEQ ID NO: 2330 - protein, 307 aa, unidentified
  source 1..307: note = Related to JAFVTO010000133.1; note = Clostridia bacterium
MITYKELATVEGELGIPLKTLYSVSNNVNAHYRRVLIPKKDGTYRNLSVPDAPLKRIQRAINEKLLVYEPISRYATAYRIASGIRNNALPHIGMPKVLKLDIKGFFDSVTYSLVKERVFRKEKYSEPVRVLLTILCYYKDVLPQGAPTSPVITNIVMREFDEVIGEWCGKKGIAYTRYCDDMTFSGDFDEKEVKAFVAGELKKQGFFLNAQKTVVATAAKRQTVTGVVVNKKANVSSEYRREIRKEVFFCQKYGVAEHIERLGLDVDTKNYLRKLLGRINYVLQISPDDGVFQGYKNAVTEMLANER

SEQ ID NO: 2331 - protein, 307 aa, unidentified
  source 1..307: note = Related to JAFTUH010000073.1; note = Clostridia bacterium
MIVYKELSSVEADLGFPAKTLYGLSNNLSAHYREVKLPKRDGSFRTLNVPDEILSRVQRAIADKLLSYEPISTYATAYRIAGSVCKNAVPHVGKAKLLKLDIAHFFDSVLYSTVKENAFPKEKYAEKIRVLLAMLCYCGEVLPQGAPSSPMITNIIMRDFDEAVGKRCRALGVSYTRYCDDMTFSGDFDEGEIVPFIRDELRKRGFFLNEKKTAVVPFCRRQIVTGVVVNEKLNISADYKRKIRQEVFFLRKFGVADHLRRTASPFSEKQYLMRLLGRINYVLQISPDDAKFLDYKEAVIRILKEAK

SEQ ID NO: 2332 - protein, 328 aa, unidentified
  source 1..328: note = Related to JAGBRZ010000213.1; note = Clostridia bacterium
MCGTTFRPIAIQMYCLAVVYVSMIVYTELKSVEQDLGISAKTLFSVSNSLSSHYKRVKIPKKNGSFRELSVPDEVLKKIQRAIVQKILVYEPISKYAQAYKTGASVQRNASHHVGKKKILKLDIKHFFDSILYSTVKDKCFPAERFSEPIRILLSMLCYNREALPQGAPSSPIITNIIMRDFDEKVGDFCRERNIIYTRYCDDMTFSGDFDEKPIIEFVKAALFEYGYLLNSKKTTVVSSSGRQIVTGVVVNEKMTVPAEYKAKIRQEVYFCKKFGVENHLEHIHYSKDTKAYLQSLLGRVSFVLQTEPGDQEFLEYKTYLTEILSQI

SEQ ID NO: 2333 - protein, 306 aa, unidentified
  source 1..306: note = Related to JAFTOR010000034.1; note = Clostridia bacterium
MIVYTELKSVERDLGIPLKTLFSVSNNLSAHYRTVKIPKKNGSFRELHVPDEVLKKIQRAIAKRILAYEAISTYAQAYRFGASVQRNASHHVGKKKILKLDIKHFFDSIIYSTVKEKCFPSERFSERVRVLLSMLCYYRDALPQGAPSSPVITNIIMRDFDERVGAFCKERNISYSRYCDDLTFSGDFDEKPVVEFVKTELFQRGYLLNHQKTTVASSSQRQLVTGVVVNENMTVPCEYKAKIRQEMYFCQKHGIEDHLHHIQYTGEVRAYVSSLLGRVSFVLQTEPENKTFMEYKAFLINALRRF

SEQ ID NO: 2334 - protein, 307 aa, unidentified
  source 1..307: note = Related to JAGAMD010000012.1; note = Clostridia bacterium
MIVYTELKSIEKDLGIPLKTLFSVSNNLSSHYKKVKIAKKNGGTRELRVPDYILKKIQRAICDTFLVYEPISKYAQAYRFGSSVQKNASYHINMKKILKLDIKHFFDSILYTTVKDKCFPSDRFSEPIRILLSVLCYYGDALPQGAPSSPVITNIIMKDFDIEVGSFCEKRNISYTRYCDDMTFSGDFDEKEIISFVKEKLFSCGYLINNKKTTVVKEGKCQLVTGIVVNKRLSTPSEYKAKIRQEIYFGTKYGFENHLNHTGNQTELKSYIESLLGRVSFALQTEPDNNEFKKYKAQLIKYKKSIS

SEQ ID NO: 2335 - protein, 307 aa, unidentified
  source 1..307: note = Related to JAFQLX010000091.1; note = Clostridia bacterium
MIVYRELSSVESDLGFSSRELYALSNSIDRQYRAVKLPKSDGTYRTLSVPSQKLKAVQRAITEKILVHMPVSRYATAYRYGASVQRNARVHIGKEKVLKLDIYHFFDSIRYQQLKDKVFTADRFSESIRILLSMLCYYRDVLPQGAPTSPAVSNIIMRDFDDTVGAFCAERGLAYTRYCDDMTFSGSFDYAEIIKFIKNELHKNGFILNGKKTKLVSSANRQTVTGMVVNKKLSTPSDYRRGIRREVYFIKKYGAAEHLKHIESNLSPKQYLQSLLGKIAFALEAAPFDKHLVEAKNAIISEIKKEP

SEQ ID NO: 2336 - protein, 314 aa, unidentified
  source 1..314: note = Related to JAGBUH010000087.1; note = Clostridia bacterium
MYCSGEKMIVYRELSSVEADLDFSAKTLYSLTNDIEKHYRRVEIPKHDGTFRVLYVPDTLLKTVQRRIANRILLLEPISRYATAYKRGSFIRKNASCHVGKETVLKLDIKHFFDSILYSHVKDKVFTEKRFSEPIRVLLTMLCYYKDRLPQGAPTSPVITNIVMRDFDETVGNWCNQRGITYTRYCDDMTFSGSFDVNEVKIFVKSELRKIGFFLNEKKTVSAKGTQRQIVTGIVVNEKLNVSSEYRKKLRQEVYYCRKYGVEEHLKRIGNSVDAKKYLQGLLGRISYVLEVRCDDKSFLADKEFIAGLIKQYE

SEQ ID NO: 2337 - protein, 309 aa, unidentified
  source 1..309: note = Related to JAFSIE010000307.1; note = Clostridia bacterium
MKIVYKELSSIEADLGYSAHMLYALSNSIAKHYRSVSIPKHDGTSRTLSIPDAPLKAVQRRIASVILPLLPISQYATAYRCRGGIVANASPHRGKDKILKLDIYRFFDSIMYSAVKDRVFTRDRFSEPIRVLLSILCYYDDRLPQGAPTSPAISNIIMREFDDAVGKWCSRRGITYTRYCDDMTFSGDFNAARVVAFVRRRLKKYGFLLNDKKTHVARYFNKQVVTGIVVNRKLNVPSSYRRKIRQEMYFCRKHGIEEHLKFIHDPTPPQEYIRRLLGRVGYVLSVSPDDGEFRKYRDFLRRALAQESE

SEQ ID NO: 2338 - protein, 306 aa, unidentified
  source 1..306: note = Related to JAFTLM010000135.1; note = Clostridia bacterium
MIVYRELGSLESDLGFSLKTLYALSNNIKKHYVSVEIPKRNGGVRCLSVPDEILKRVQRRITEVILSGQRVSKYATAYRYGAGILKNASEHVGKPKVLKLDILHFFDSISYSEVKENVFVKERFSESVRILLTMLCYCGDRLPQGAPSSPAITNIVMRDFDEKVGAWCKEQGIAYTRYCDDMTFSGDFDERSIIAFVKQELLKKHLVLNYGKTSVTTPGKRQIVTGIVVNQKPNISADYRRKLRQEIYYCKKYGLEEHANRIGEDDTQKYLLGLLGRVSYALQVRPDDVALKEVKRWLTQTINERG

SEQ ID NO: 2339 - protein, 306 aa, unidentified
  source 1..306: note = Related to JAFNUZ010000041.1; note = Clostridia bacterium
MIVYKELKSLESDLGFSLKLLYALSNNIKKHYSTVEIPKRSGGVRRLSVPDEILKGVQRRIAVVILSGQSVSRYASAYRYGASVVKNAAEHVGRKKVLKLDILHFFDSISYSAVKENAFPSERFSEPVRILLTLLCYYGDVLPQGAPSSPVITNIVMRDFDETVGAWCEEKGISYTRYCDDMTFSGDFDEKAVIDFVKEELRKKRLLLNYKKTSLTNRGGRQTVTGIVVNEKPNITSEYRRKLRQEVYYCQKYGVSEHTKRIGEADAKKYLRGLLGRVSYALQIRPDDAWLVKAKCELLKLIKERH

SEQ ID NO: 2340 - protein, 306 aa, unidentified
  source 1..306: note = Related to JAGBSO010000048.1; note = Clostridia bacterium
MIVYRELSSLSKDLGVSKSSLYKLSNSINKNYHKVEIPKKNGGTRVLSVPSENLKEVQRKITKVILSKETVSIHTTAYRYGASTAYNASHHVNKDVVLKLDILHFFDSILYSDVKDKVFPAEKYSEQIRTLLAILCYHKDSLPQGAPSSPAITNIIMRDFDNTVGEWCRKKNIAYTRYCDDMTFSGNFDAKEVIGFIKIQLRENGFLLNTAKTRVIRRNRSQTVTGIVVNEKINIPADYKRKLRQELYYCKKFGVNSHMARMDFDGNEMSYINRLLGKINYVLSVTPHDKQMLDYKKWLINELEYF

SEQ ID NO: 2341 - protein, 302 aa, unidentified
  source 1..302: note = Related to JAFQKX010000056.1; note = Clostridia bacterium
MIVYRELSSLEQDLGINAKILYAVSNSINKHYRETSLPKKSGGFRYLSVPDKILKSIQRQIAEVLLIHMPISKYAKAYRFGSSTLRNAKHHVGKQVVLKLDILRFFDSIRYSTVKDKVFPKEIYAEPLRILLTMLCYYKEGLPQGAPSSPPITNIILYEFDEQIGQWCREREISYTRYCDDMAFSGDFDPAEVIRFVRVQLKKMGFLLNEQKTRIQRLGQQQTVTGIVVNKKLSAPADYRRKLRQELYYCRKFGIREHLQKLGLEINEHTYRMQLLGKVNYVLQFCPDDQELKAAKKWLQAK

SEQ ID NO: 2342 - protein, 304 aa, unidentified
  source 1..304: note = Related to JAGAUY010000021.1; note = Oscillospiraceae bacterium
MIVYRELSSLEQDLGISSKTLYAVSNNISKHYHRAKLPKKSGGYRNLSVPDEILKAIQRQISEVLLIHMPVSRYAKAYRFGSSTLRNAKHHVGKQVVLKLDILHFFDSIRYSTVKDMVFPEEIYAEPLRILLTMLCYHKDDLPQGAPSSPAITNIILYEFDEVIGQWCRERGIAYTRYCDDITFSGDFDPAEVIRFVRLELKELGFLLNEQKTRIQRPGQQQSVTGIVVNEKLSIPAVYRRKLRQELYYCRKFGIQEHLQKIGLETPEDTYRMQLLGKVNYVLQVHPDDKEMLEARKWLQQSTK

SEQ ID NO: 2343 - protein, 304 aa, unidentified
  source 1..304: note = Related to JAFQIL010000045.1; note = Oscillospiraceae bacterium
MIVYRELSSLEQDLGISAKTLYAVSNNLNKHYRKAKLPKKNGGFRNLSVPDEALKTIQKRIAEVLLIHMPISKYAKAYRFGGSTLRNAKHHVGKQIVLKLDILHFFDSIRYSTVKDVVFPEKIYAEPLRILLTMLCYHKDALPQGAPSSPAITNIILYEFDEQIGGWCRNQGIAYTRYCDDMTFSGDFDPSALIQFVRLELKKMGFLLNEQKTRIQRSGQQQTVTGIVVNEKLSIPADYRRKLRQELYYCRKFGIREHLQKIGLDIPEDAYRMQLLGKINYVLQLYPDDRDMIAAKNQIIAKSR

SEQ ID NO: 2344 - protein, 304 aa, unidentified
  source 1..304: note = Related to JAFQNL010000019.1; note = Oscillospiraceae bacterium
MIVYRELSSLEQDLGISSKTLYAVSNHINKHYHKATLPKKSGGFRTLSVPDEALKSIQRRIVEVLLISMPVSRYAMAYRYGSSTLQNAKHHVGKQLVLKLDIFRFFDSIRYSTVKDKVFPEEIYAESLRILLTMLCYHKDALPQGAPSSPAITNIILYEFDERVGQWCRDQGIAYTRYSDDMTLSGSFDPAEVIRFVRLELKKMGFLLNEQKTRIQRPGQQQSVTGIVVNERLSIPADYRRKLQQQLYYCKKFGVQSHLTKIGLEVSEATYRMQLLGKINYVLQLSPNDRDMLEARRWLQQSAE

SEQ ID NO: 2345 - protein, 303 aa, unidentified
  source 1..303: note = Related to JAFVXA010000039.1; note = Oscillospiraceae bacterium
MIVYRELSSLEQDLGFSARTLYAVSNNLTKHYHETKLPKKSGGFRKLSVPDQVLKAMQKRITEVLLIYMPVSRYAMAYRFGSSTIQNARYHVGKQIVLKLDILHFFDSIRYSDVKDKAFPTAIYEEPLRILLTMLCYHKDALPQGAPSSPAITNIILYEFDEQIGQWCRERNITYTRYCDDMTFSGDFDPAEVICLVRQELKKLGFLLNEQKTRIQRPGQQQTVTGIVVNEKLSIPSDYRRKLRQELYYCRKFGMQEHLQRTGSEISADTYRRQLMGKINYVLQLTPDDRDLLQAKEWLSNEG

SEQ ID NO: 2346 - protein, 306 aa, unidentified
  source 1..306: note = Related to JAFTVM010000054.1; note = Oscillospiraceae bacterium
MIVYRELSSLEQDLGIRAQTLYAVSNNLGKHYRNAKLPKKSGGYRTLSIPDAVLKSIQKQIAEVLLIHMPVSRHAKAYRFGSSTVRNAKPHVGKPIVLKLDILHFFDSIRYSTVKDKVFPAEIYAEPLRILLTMLCYHRDALPQGAPSSPAITNIIMYEFDELVGQWCRERNIAYTRYCDDLTFSGDFDPYEVIRFVRQELRNMGFLLNEQKTRIQRSGQQQSVTGIVVNEKLSIPASYRRRLRQELYYCRKFGVSEHLRKSGLEILESTYRMQLLGKVNYVLQVSPDDQDMLDARRWLQQTSKSC

SEQ ID NO: 2347 - protein, 310 aa, unidentified
  source 1..310: note = Related to DVGO01000036.1; note = Candidatus Faecousia faecavium
MIVYRELSSLERDLGIPAKTLYAVSNSLSRHYRMVSIPKKTGGVRNLMVPDTALKTIQRRISDVLLAHMPVSSYATAYRFGTCTLRNAAVHVGKPVVLKLDIYHFFDSIPYSLVKEKAFPAHIYAEQIRTLLTMLCYHKDVLPQGAPSSPAIVNIILANFDERIGRWCTQRGIAYTRYCDDLTFSGDFDPKDVIAFVEGQLKSLGLLLNTNKTRVQRQGQQQLVTGVIVNEKPGVPAVYRRQLRQEMHYCQKFGVGEHLKFLGQGISEEAYLRQLLGKVNYVLHIVPDCEEFQQYRTWVLQKLQNISLAK

SEQ ID NO: 2348 - protein, 309 aa, Pseudoflavonifractor sp.
  source 1..309: note = Related to WNBA01000006.1
MIVYREAPTLARDLGVGLHTLYALSNRLSAHYHTVELTKPNGGVRRLTVPDEALKGVQRSIARNLLACRELSPYATAYRYGAGTVRNASAHVGKARLLKMDIYHFFDSVNYSAVKDAVFPAEVFSEPLRILLTMLCYYQDALPQGAPTSPAVANILMRDFDEDVGGWCARRGIAYTRYCDDLTFSGDAGLAGAYRYAEARLREKGFLVNRRKTLYLDAGRRQCVTGLVVNEKVDVPAEYRRALRQELYYCKKFGLEEHLRSVGWEGDPTAYARRLLGRFSYALQIRPEDRALLEGKAWLVEELNRRAGK

SEQ ID NO: 2349 - protein, 306 aa, Oscillibacter sp.
  source 1..306: note = Related to KE159708.1
MIVYREAASLARDLGVELKTLYALSNSLPAHYRTVEIPKADGGVRRLTVPDEALKRVQRAILNNLLVHMPVSPYATAYRYGGGAVCNAARHVGRPQVLRLDIRHFFDSVRYSAVKDAVFPPEIFSEPLRVLLTMLCYYRDALPQGAPTSPAIVNILLRDFDRRVGGWCRERGIVYTRYCDDLTFSGEDLSGVRAVTEAELRDLGFFLNERKTRLRSAGQRQTVTGLVVNEKVRVPREERRAIRQAVYCCRRFGLEDHLARTGVGLTPEACLNRLLGRVGYVLQADPDCAWALEARRWLLEERRRRI

SEQ ID NO: 2350 - protein, 313 aa, unidentified
  source 1..313: note = Related to DXIA01000170.1; note = Candidatus Pygmaiobacter gallistercoris
MIVYTHTETLAQDLGIPAATLFGVSFHLDRHYRRVTLPKRDGGVRTLCVPDPILKKIQRRILRVLLFHRPVSPYATAYRPGVGLRANALPHCGRQCVLQLDIRQFFDSVRYLQVKEIVFPKEIFSEKLRVLLSCLCYGRDGLPQGAPTSPAISNLLLRDFDLRVGDWCAARGIRYTRYCDDLTFSGAFDPKPVIRMVSDALWREGFVLNPRKTRFSRSGQRQTVTGVVVNDRPRLDAARRRALRAELYYCRRFGVADHLSHIGDPRTPRAYLLSLLGRLDFALSLGAEPQLAEGRRWVLEQLKPSKQKEEIDG

SEQ ID NO: 2351 - protein, 310 aa, Anaerofilum sp.
  source 1..310: note = Related to JACONZ010000001.1
MIVYTETATLERDLGIPAKTLFAVSHDLKRHYRRVELSKADGTVRVLSVPDAVLKKIQRSINANLLAYMPISPYATAYRPGGGVRRNALPHCGQEQLLKLDIRRFFDSVRYTQLKETVFPAAVYAEKLRVLLSILCYSKEGLPQGAPTSPAIANILLRQFDETVGGWCGARGIAYTRYCDDLAFSGRFDPAAVICTVQEALRREGFSLNAQKTRLAGPGGRHLVTGAVVNLRPRAPAEERRALRQELYYCEKFGVRGHLVQTGDPRTAQAYLAALLGRLDYALSLSPEPRLAQGRRWVLDRLREERTARP

SEQ ID NO: 2352 - protein, 307 aa, Flavonifractor plautii
  source 1..307: note = Related to CP048436.1
MGIVYQEGPSLARDLGLPLRTLYAVSNRIPAHYHRAEVPKRDGGVRVLRVPDPVLKDIQRRIARVLLSGMPVSPHATAYRYGAGVVENARRHVGRPELLKLDILHFFDSIRYIQVKEAAFPAEIYAEPLRTLLSMLCYDRDVLPQGAPTSPWIANLVLRPFDEKLGAWCRARGVVYTRYCDDLAFSGTALDGVEERAEEGLRALGFRLNRAKRALCRDGQQKRVTGLVVNERVAVPACCRRRLRQELYFCRRRGVEEHLRAVGLAEGREQCLRRLLGQVDFWLQAQPDSQEAAEYRRWLLDEMRDGR

SEQ ID NO: 2353 - protein, 309 aa, Butyricicoccus pullicaecorum
  source 1..309: note = Related to JAGZAL010000035.1
MKIVYREASTLARDLGIPLDILYAVSNRLDAHYHTAVLPKRDGGTRTLTVPDGLLKRIQRAILETLLVHMPVSRNATAYHYGARVTKNAAPHAGKRFLLKLDIARFFDSIRYTSVKEAAFPPEIYAEPLRILLAMLCYHRDALPQGAPTSPAISNLVMRPFDEQVDGWCRARGIVYTRYCDDMTFSAGRPLGGVHGFVQDALGGMGLLLNERKTARFHAGQRQTVTGLTVNDRPNVPPAYRRALRQELYFCRKFGAASHLAHIGLDMDVPTYLHRLLGRVSFWLQADPGNQEAAAYRRWTLAQLDSALP

SEQ ID NO: 2354 - protein, 313 aa, unidentified
  source 1..313: note = Related to BQNX01000001.1; note = Eubacteriales bacterium
MIVYRELSTLAGDLGVSGRTLYAVSNSLPKHYRTVELPKGDGAVRRLSIPDRELMEIQRRILNRLLVYMPVSPYAAAYRRGVDHAAGARPHIGRPVLLRLDIRHFFDSILYSDVKEYAFPAHIYAEPLRVLLSILCYCGDALPQGAPTSPVVSNLVLRDFDLETGAWCSARGISYTRYCDDMAFSGAFDPVEVSRLIAGKLRERGFFLNEEKTRAMFAGQRQTVTGLVVNERLNLPREYRRALRQELYFCRRFGVSAHLARTGAAPEPEACLRSLLGRVSYVLQISPENREMLGYREWLLQELALLHSGERDS

SEQ ID NO: 2355 - protein, 309 aa, unidentified
  source 1..309: note = Related to QALD01000098.1; note = Oscillospiraceae bacterium
MIVYRELETLTRDLGIGAGVLYAAGNRPEAHYRTVSITGGNGTVRTLSVPDPMLMAIQRRILFRLLVHMPVSPQAAAYRCGVSTLSAARFHIGKPVLLCLDIRHFFDNIRYADVKRYAFPPDIYAEPLRVLLTRLCYLRDALPQGAPTSPAISNLVLADFDRALTSWCAPRGIAYTRYCDDLALSGDFDPDQACEIAAALLRQHGFLLNPAKTRIRRAGTRQQVTGLIVNERPSVPREYRRALRQELYYCRRFGVASQMQRRGFCGKETSYLQSLLGRVNYLLQIRPDDVAAKQDRDWLLALLHTQQTP

SEQ ID NO: 2356 - protein, 311 aa, unidentified
  source 1..311: note = Related to JAFURT010000015.1; note = Clostridia bacterium
MPDRIVYNELSSIELDLGFTAQQLYAVSNSLHRQYRQVKLPKANGGYRTLSIPSPLLKAIQRRITTVLLAQEPVSPYATAYRYGGGPLRNARQHVGRQMVVKLDIRGFFDHILYSDVKDAAFPADRYAEPLRVLLAMLCYYGDSLPQGAPTSPAISNIVLRSFDDAVGAWCRAHGIVYTRYCDDMTFSGPPEVTEVIPFVQAQLEQRGFYLNRRKMVVAHRGCKQTVTGLVVNRRLNVPAGYRKKLRQELYYCRKFGLVQHLAHIGDTTPPMTYARRLLGRVNYVLAVSPDREEFREYRHYLTEWCQTYTE

SEQ ID NO: 2357 - protein, 312 aa, Fournierella massiliensis
  source 1..312: note = Related to JAFBIO010000002.1
MIVYRELSSLVRDLGVEAKTLYALSNSLEKHYHQVKIPKRDGGYRQLSVPDEQLKRVQRQIDRVLLARMPVSPYATAYRCGCGIGRNALPHLGQPGVLKLDIRHFFDSIPYTAVKERAFPGTIYGEPLRVLLTMLCYYRDSLPQGAPSSPAITNIIMAKFDARVGQWCAQREIRYTRYCDDMTFSGSFDPQEVVAFVRPLLREMGFFLNEKKTRFLPAGRRQVVTGIVVNEKPGLPAEYLRRLRQEVYFCQKYGTADHMARCGIQGPASGYLRRLLGRVNYGLQILPGKKELLEARAWLMKEMAREQEGDRP

SEQ ID NO: 2358 - protein, 314 aa, Flintibacter sp.
  source 1..314: note = Related to NZ_CP044227.1
MIVYRELSSLVRDLGIPAKTLYGVSNTVETHYHKVQLPKRDGGVRELSVPDPILKHIQRRITQVLLLPMPISRYASAYRYGASTLRNAAPHAGQPGILKLDIRHFFDSILYSTVKEKAFPPEIYAEPLRILLAMLCYYRDTLPQGAPSSPAITNIIMAQFDEDVGAWCRSRSIRYTRYCDDMTFSGAFDPREVKAFVSQKLREMGFFLNESKSKYLPAGQRQTVTGLVVNEKPAVPSDYLRSLRQELYFCQKFGVSDHMAHLGIKESEAHYLARLLGRVNYVLQITPGKKEWAQARAWLLVQLSSLNDSSPVIS

SEQ ID NO: 2359 - protein, 308 aa, Pseudoflavonifractor sp.
  source 1..308: note = Related to JACJJD010000020.1
MIVYRELSSLARDLGVDARLLYAVSNSLDRHYRQVCLPKKDGGVRTLSIPDQLLKTIQRRITQVLLVHMPVSPYATAYRYGGSAWRNAAPHVGQPALLKLDIRHFFDSILYATVKERAFPPEIYAEPLRILLTMLCYYRQSLPQGAPSSPAITNIILSGFDQEVGAWCAGKGIRYTRYCDDMTFSGLFSPEEVTSFTEARLQPFGLFLNGRKTRFIPAGRRQVVTGLVVNETVGVPAHYLRTLRQELYYCRKFGVSGHMARLGVPEPEARYLARLLGKVNYVLQVTPGKREFQQARAWLLQALAHCEG

SEQ ID NO: 2360 - protein, 320 aa, Dysosmobacter welbionis
  source 1..320: note = Related to NZ_CP034413.3
MIVYRELSSLVRDLGIPAGTLYAVSNTLDRHYIRRQLPKSSGGVRELSVPDPLLKHIQRQILRVLLVHMPVSPYATAYRYGGSTLCNAAPHVGKPCVLKLDICHFFDSILYSAVKETAFPAEVYAENLRILLAMLCYGWDRLPQGAPTSPCITNILMRDFDNEVGAWCRERQIAYTRYCDDMTFSGDFARDEVLRCVEPRLRALGFYLNPGKTKWLPADRRQLVTGIVVNKKCNVPSEERRALRQELHFCQKFGISGHMARAGIDGPEDRYLAQLLGRVNYQLQITPGRRELQEARDWLIKAQPQYGGGRETSPAEKQIL

SEQ ID NO: 2361 - protein, 310 aa, Intestinimonas sp.
  source 1..310: note = Related to NZ_LR130816.1
MIVYRELSSLVHDLGISARTLYAVSNGLDQHYRRAELPKADGGVRALSVPDPLLKHIQRRITQVLLVHMPISPCATAYRYGGSVLVNAAPHVGQSAVLRLDIQRFFDSIRYTSVKEAAFPADIYAEPLRILLGMLCYHREGLPQGAPSSPAISNIVMADFDAQVSAWCRERGLTYTRYCDDMTFSGAPVPSEVVSFVSDRLRPLGLFLNRRKTRYLPSDRRQLVTGIVVNQALNTPAEYRRKLRQELHFCQRYGVAAHMAWQGLTCSEDAYLARLLGQVNYALQISPGRSDLEQARAWLRAGGGRTEPHT

SEQ ID NO: 2362 - protein, 320 aa, Ructibacterium gallinarum
  source 1..320: note = Related to NZ_JADCKB010000012.1
MHILYGFSRRKGPNHMIIYRSIDTLAKDLGFSPKTLYAVSYQTDRHYEQVSFACGGKTRLLSVPDPLLKSIQRSIYRNLLCHMPVSPCAAAYRFGTSIAQHARLHAGQKLVYQMDIQNFFDHILYSTVKDKAFPEIIYSPSLRILLTMLCYYRDRLPQGAPTSPVIANLVLKDFDEKVCAWCRQRHIRYSRYCDDLTFSGSFDPVSLYEFVKGALYQEGFYLNPKKTRLLSQSRRQTVTGLVVNQQVSVPSAYRRQVKQEIYYCQKYGITAHMSRQNIADTPEHYLRSLLGRVDFILYYHQDASWAMDGRQWLITQLKNF

SEQ ID NO: 2363 - protein, 303 aa, unidentified
  source 1..303: note = Related to JAGBHD010000062.1; note = Oscillospiraceae bacterium
MIIYKEISSIEQDLGYDIKTLYSISYSLHRHYISIKMPKKQGGYRILSIPDAPLKCIQKRIAEVLLSQINISPYAIAYRYGGSTLRNAAPHINKDIVLKLDIHDFFNNILYSTVKEKAFPKEKYSENIRILLSVLCYYNDTLPQGAPTSPAISNIIMCDFDNTIGSWCKKHSIAYTRYCDDMTFSGSFDPKEVIKCVESELKKMRLFLNKKKTIVARKSNKQIVTGIVVNEKLNIPRQYKKDIRQALYYCRKFGVENHMADANINDTNEHYILKLLGKVNYVLSVCPNDKEFINYRDFLKGLI

SEQ ID NO: 2364 - protein, 303 aa, unidentified
  source 1..303: note = Related to JAFXAP010000004.1; note = Clostridia bacterium
MIVYKEISSIEQDLEYDIRTLYSISYSLHRHYHSIKISKRQGGYRVLSIPDMPLKCIQKRIADVLLSQITISPYAKAYRYGGSNIKNATPHINKDIVLKLDIRDFFNNILYSTVKEKAFPKEKYSENIRILLSMLCYYNDALPQGAPTSPFISNIIMCEFDNAVGSWCGKHGVAYTRYCDDMTFSGNFNPNEVIKYVRFELRKMGFFLNNKKTIVAHKSNKQIVTGIIVNKKLNIPRKYKKDIRQAIYYCKKFGVYNHMESTNINDTVESYILKLMGKVNYVLSVCPNDKEFMGYRNYLKSLI

SEQ ID NO: 2365 - protein, 308 aa, unidentified
  source 1..308: note = Related to DVKV01000137.1; note = Candidatus Faecousia intestinavium
MIVYRELSSLERDLGFPASTLYAVSNRLNRHYRKVELPKGDGPLRTLSVPDNLLKTIQRRIAQVLLSTLPVSPYATAYRPGGSVVKNARPHVGKPVVLKLDIYHFFDAVCYSRVKKEIFPPEIYSEQNRILLSMLCCYQDKLPQGAPTSPAISNRILLEFDQEIGSWCARQGISYTRYCDDLTFSGDFAPGDVIRLVRERLKVRGFLLNNRKIQVLRQGQRQSVTGVVVNQSLQAPVSLRRELRQQVYYCRKFGVSDHLARTKQTVSEEDYLRRLLGQVNFALQINPADQELADARQWLLAEIRRKRT

SEQ ID NO: 2366 - protein, 310 aa, unidentified
  source 1..310: note = Related to JAFQDF010000039.1; note = Clostridia bacterium
MRSYSIVYKDIYALSGDLGVSPRILYSLSNRISGHYHTVAIPKKNGTYRKLSVPDDILKYVQRRINKVLLCYMPSSGYAMAYEYGKSILKNANPHSNKKCILKLDIDDFFDTVKYSQVKEKAFPAAHFAENLRVLLSQLCYNGEGLPQGAATSPKIANLILRDFDERIGSWCAQRDITYTRYCDDMTFSSDKGLDGVYKYVRDELFKEGFLLNKDKTKFIDSHHRQKVTGIIVNNSPKVPTEYTKKIRQEIYYCRKFGISEHLSHTDSDKSLCEYLASLLGRINYVLSVTPKNEEMKDYKDQVTIWQKSL

SEQ ID NO: 2367 - protein, 305 aa, unidentified
  source 1..305: note = Related to JAFUMW010000045.1; note = Clostridia bacterium
MIVYKSLESVEADLGVSLKTLYAVSNNLQSHYRNVELPKKNGGIRHLCVPDDVLKHIQRRITEVMLVHMPISKYAGAYRYGASVIHNASAHLGKKRILKLDISKFFDSVLYSQVKEYAFPEIIFSEKVRVLLSILCYYKESLPQGAPSSPAISNIIMRQFDEKVGAWCEERSISYTRYCDDMTFSGDFDANDVKKLVERELGKYGFYLNPVKTKTVTSDHRQSVTGIIVNEKLSLPSEYRRKLRQELYYCRRYGVDAHMERIGVSGSAGSYLSRLLGKVNYVLSVRKDDAEMKEYKAWLVAELKK

SEQ ID NO: 2368 - protein, 310 aa, unidentified
  source 1..310: note = Related to JAFPLT010000171.1; note = Lachnospiraceae bacterium
MIVYHELSSLCADLRLSPRTLYAVSNAMEKHYHTVRIPKKSGGFRKLTVPDDLLKMIQRRITEALLLPLPVSAAASAYYPGRGIKRNALPHVGKPVLLKMDIYHFFDSVLYRDVRDCAFPAEIYSEPLRVLLTTLCYGMNELPQGAPSSPAISNRILYRFDEKVLKLCRKQGIHYTRYCDDLCFSGDFDAEALRKEVTKLLIEEGFFPNRKKTKVQKGGTRQCVTGLVVNERANVPAEYRRKIRQELYYIGRFGLRSHMERTKAEGSELSYLRKLLGRISYCLEIDPENDEMKRDREMVLELIGERTGRQ

SEQ ID NO: 2369 - protein, 308 aa, unidentified
  source 1..308: note = Related to JAFZQQ010000087.1; note = Oscillospiraceae bacterium
MIVYRELSSLSTDLGFSAKALYSVSNSITKHYHPVKIPKGNGEYRQLTVPDEFLKAIQRRINDKLLCFEPISPYATAYRVGGSTKANACPHVGQKVLLKLDIRHFFDNLIYPVIKEAAFPKERYSEANRILLTILCTYQGYLPQGAPTSPTISNIVMRQFDDTVGTWCEKRGIHYSRYCDDMTFSGDFDPKPVKSMVAGELRKLGLFLNTKKMVVAGKGQKQTVTGIVVNEKASVPTGYKRKLRQELYFCMKYGTDSHMNHNEINMEKGNYILSLLGRVNYACSIETDNEELKSYRDWLLLESQETKR

SEQ ID NO: 2370 - protein, 334 aa, unidentified
  source 1..334: note = Related to SVKP01000140.1; note = Oscillospiraceae bacterium
MGLRIQRDSCHILTVLLHGNRGRRACCMIVYWELSSLSTDLGFSPKALYSVSNSIGRHYRLVQIPKGNGELRRLTVPDRFLKAIQVQIYEKLLRLEPVSPHAAAYRPGGSTLVNARPHVGQAVLLKLDIRHFFDSLIYPQVKDAAFPVERYSEANRILLAILCTYRGILPQGAPTSPAISNIILRNFDDTMGEWCGRQGVRYTRYCDDMTFSGDFDPAAVIEKTAAELKNMGLYLNAGKTVVARKGQKMIVTGIVVNEKTSIPRDYKRKLRQELHYCTEYGLASHLAHTHSQMEQRDYVLSLLGRVNYALSVEPANAELGQYRVWLTEAMKQIS

SEQ ID NO: 2371 - protein, 304 aa, unidentified
  source 1..304: note = Related to JAFWAC010000028.1; note = Clostridia bacterium
MIIYKEFSSLLSDLGFSGKTLYSVSNHINRHYHPVKIPKANGEFRELNVPDKLLMTIQRAINNKLLCLENVSRFAMAYKPGSSTKMNAVAHVAQPVVLKLDIRHFFDHLIFPLIKEKAFPAARYSEQNSILLTFLCTYKDALPQGAPTSPTISNIIMKDFDNFVGGWCNERGIAYTRYCDDMTFSGDFDPKAVIILVKKELKKLGLYLNDKKTVVVRKGQRQSVTGIVVNEKRSIPIEYKKRIRQEMHYCMKYGVASHLERIGIDEAPKTYTLKLLGKINYVLSVEPNNSNMRQYRSWLMEQKF

SEQ ID NO: 2372 - protein, 306 aa, unidentified
  source 1..306: note = Related to JAFQMR010000111.1; note = Clostridia bacterium
MIVYKELSSLTSDLGFSSKALYSVSNHIGRHYRAVSVPKGNGESRRLHVPDALLKAIQRRINDRLLSLEAVSAYATAYRAGGSTKRNAAPHVGKPVLLKMDIRHFYDSLIYPLVKEKAFPKERYSEQNRVLLSLLCIYNDTLPQGAPSSPTISNIIMRDFDERVGQWCAQQDITYTRYCDDMTFSGDFDPHPVIRFVRKELQSLGLFLNNRKTVVARTGQKQAVTGIVVNETTHIPSGYKAALRQELYYCRKFGIASHLLHCGIDESPERYAQKLLGRVSYVLSVEPQNRQMQDYRAFLQSCLQSR

SEQ ID NO: 2373 - protein, 308 aa, Flintibacter sp.
  source 1..308: note = Related to NZ_JACOPN010000001.1
MVCKSYSDLERLLGISVKALYSVSNASWKHYRSVKIPKNDRGEFRELHVPDEFLKTVQRRIADRLLSAYPVSPYATAYRPGGSTIVNARPHVGKNVLLKLDIHHFFDNILYATVKEKAFPAEDYSESIRILLTILCVHKDALPQGAPTSPVISNIIMRDFDCTVGGWCDARGIAYTRYCDDMTFSGDFDSREVVSLVRTELRKMGLFLNEKKTVRAVRGQRQSVTGLVVNEGLRIPAAYRKKLRQEVYYCRKFGVAAHLQRMGSGERAEEYLPKLLGRINYACSVMPDDQELRQERRWVMQQLHTLER

SEQ ID NO: 2374 - protein, 310 aa, unidentified
  source 1..310: note = Related to SVSR01000007.1; note = Oscillospiraceae bacterium
MIVYKELSSLTNDLGFSVKALYSASNHISSHYHKAKILKKTGEYRELSVPDDFLKSIQKRIVEKLLVYEEVSPYATAYRYSTSIIKNARVHLHNNTILKLDIRHFFDHIIYPVVKEKAFPKEKYSEENRILLSLLCLYHDALPQGAPTSPIISNIIMKDFDNTVGAWCKSKKIRYTRYCDDMTFSGDFNIREVISFIKRELGKMGFYLNDAKTVVARSGQKQIVTGIVVNDKLNTPLLYRKKLRQELYYCKKFGIASHLRQKSIDMSEREYILKLLGRVNFVLSVGQTNKEMQEYKSWLLDQNNLFITEK

SEQ ID NO: 2375 - protein, 306 aa, unidentified
  source 1..306: note = Related to JAGBHE010000095.1; note = Clostridia bacterium
MIIYMELSSIIHDLGVSAKALYALSNHTEKHYHRAKILKGNGEYRELAVPDNFLKSVQRKIADTLLVHEEISPYATAYRYGGSVIANAEPHLGNSSILKLDIRKFFDTITYPLIKDNAFPKNRYSEKIRILLTFLCVYNDVLPQGAPTSPVISNIIMREFDNTVGAWCRQRNICYTRYCDDMTFSGELNREEIIDFVKKELKKMGFFLNDKKTAFIHDGQKKIVTGIVINKKLNTSKKYRKQVRQEIFYCKKFGVASHMKHINSDKSKNDYLLSLLGKVNFILSVDKCNAEALGYKKWLSEEIKNN

SEQ ID NO: 2376 - protein, 308 aa, unidentified
  source 1..308: note = Related to JAFSXU010000033.1; note = Clostridia bacterium
MIVYRELSSLSEDLGVSKKALYTASNHASSHYRRIKIPKGNGEFRELAVPDNFLKSIQKRIADKLLIYEEISKYATAYRYGGSVVANAKPHIKNGTVLKVDIRHFFDHIIYPIVKDKAFPAYRYSEPNRIMLSLICLYKDTLPQGAPTSPVISNIIMKNFDDCIGQWCDKKGIVYTRYCDDLTFSGNIIPGEIICFVKQELAKMGFYLNNKKTVIARNGQRQLITGVVVNDKLNIPLDYRKKLRQELYYCKKFGVSSHLSKINSEQNEEKYLQKLLGRVNYALMIDKSNAQMNGYRQWLVNELKKYNG

SEQ ID NO: 2377 - protein, 308 aa, unidentified
  source 1..308: note = Related to JAFYQP010000074.1; note = Clostridia bacterium
MITYKELSSLTNDLGFSARALYSITHNIHKHYKPVSIPKGNGEMRKLCVPDKFLKAVQRSIARNLLSYEEISPYATAYRLCGSTVVNARPHLGAEVILKLDICHFFDHIIYPVVKDKVFPGEKYSEANRVLLTLLCTYRESIPQGAPTSPAISNIVMRDFDDTVGVWCEDRGICYTRYCDDMTFSGDFSPKEVISFVRTELGKKGYFLNNRKKVIAKRGQKMQVTGIMVNEKLNVPNTYRRKLRQELYYCRKFGIKSHMEKIGVEITEQEYIMKLLGRVNYLLQVTPDDKSAKEAKLWLIKELKKASL

SEQ ID NO: 2378 - protein, 312 aa, unidentified
  source 1..312: note = Related to JAFPRS010000057.1; note = Clostridia bacterium
MFRKREGGFAVIVYSELSSLCRDLGFTARELYAASRNTDRLYRKAVLPKAGGGVRELSVPSPLLKAIQTAVYEKLLSQEPVSRYACAYRPGGGIKRCAAPHVGRGQVLTLDIRRFFDSAIYPLIKEKVFAPERYSAPNRVLLSMLCTYRDALPQGAPSSPAISNILLYGFDEAVGEYCRERGIRYTRYCDDMAFSGLFDARELTAFVESELRKLGFYLNRKKTRLVRPGQRQAVTGVIVNEKLAVPREYKRRLRQELYYIEKYGMEEHLSRLGGEAQNVDYAARLLGKVNYVLSIEPGNIEAAHWARLLKDK

SEQ ID NO: 2379 - protein, 309 aa, unidentified
  source 1..309: note = Related to JAFRLE010000126.1; note = Oscillospiraceae bacterium
MIIYNELASLEADLGYSAKQLYSLSNGINRHYHPAEIPKSDGGSRSLSVPDAQLKAVQSKIADRLLSLEDISVYATAYRPGGSIVRNALPHIGHSDVLKLDIRRFFDSITYPLIKEKAFPAKRYSEKNRILLAILCTYKEALPQGAPSSPAISNIILRNLDDAVGSWCRSRYITYTRYCDDMTFSGRISTALKKEIINTVEQQLRKAGLYLNADKTVFVHDGQRKCVTGIIVNEKVSIPAGYRRDIRQKMHYICSYGIKSHIQHTGSKLSEEEYLRKLLGRISFVLSIDPHNEEMLGYRSKLIEIRRTL

SEQ ID NO: 2380 - protein, 305 aa, Ruminiclostridium sp.
  source 1..305: note = Related to JAFQUH010000074.1
MIVYREFSSLTEDLGFSGKALYSLSNKIHRHYKKVEIPKADGSVRSLSVPDDFLKAVQRRIADRLLSMEEISPYAIAYRPGGSPLKNARPHIAKNTVLKLDITCFFDHITYFLVKEKAFPKERYSERNRILLTMLCIYNDALPQGAPTSPVISNIIMKDFDNAVGRWCRERRIVYTRYCDDMTFSGDFDVCEVKNFVSGELRRMGFFLNSKKTTAVRRGQRHTVTGIVVNEKPSISANYKAKLRQELYYIMKFGINSHLEKCGIDIPAEKYLQKLLGRANYILSVEPDNKKVKEYKGWLTAQLKK

SEQ ID NO: 2381 - protein, 306 aa, unidentified
  source 1..306: note = Related to JAFQPT010000004.1; note = Oscillospiraceae bacterium
MIVYRELSSLETDLGVSAKVLYTLSNSRSSHYHTVMLPKENGELRQLSVPDGLLKSVQRKIARQLLVYEEVSPYAMAYRLGGSTLHNAVPHVGQPMVMKLDIRKFFDHCFYPLVKEKAFPAARYSEPNRVLLSLLCVYHDALPQGAPTSPAISNIILRDFDNAVGSWCAKRHIVYTRYCDDMTFSGSFDPAEVKTKVRTELRKVGLFLNDNKTVVLNGGQRQTVTGIVVNERVSVPSDYRRKLRQELYYCRKYGIAAHLEHIGSEADVRSYERQLLGRVNYVLYADPCNQEMQEYRRWLQNTLTGK

SEQ ID NO: 2382 - protein, 303 aa, unidentified
  source 1..303: note = Related to JAFUPP010000033.1; note = Clostridia bacterium
MITYKEISSLENDLGVSAKALYTLTNEIHRHYRTVMIPKDNGELRKLSVPDPFLKSVQRKIAHNILFFEEISPYATAYRPGGSTLINALPHVSKNTVMKLDINKFFDHIIYPIVKEKVFPAHKYSEANRILLTLICIYKDSLPQGAPTSPVISNIVLKDFDNKVGEFCFKRNVTYTRYCDDMTFSGEFDPQQIKRFLQNELKKLGLYLNSKKTVILKNGQQKKVTGIVVNEKPNVCAKYKRKLRQEIYFCQKYGIKNHLDKTGSCLTEAQYKAQLLGRINYCLSVSHKDKNMQGFKEWLINNK

SEQ ID NO: 2383 - protein, 372 aa, unidentified
  source 1..372: note = Related to JAFPOZ010000331.1; note = Clostridia bacterium
MNVNFLTAAASRCGQTYTFDSRFAPEKLTAQYTGPCSMGWRILLRIFSMRISIASHAFREGSSVVIVYRELSSLVSALGFSAKTLYGVSNRVTTHYRQLKIPKSNGGFRTLHIPDQLLKSIQRQINMQLLLPEPVSPFATAYRPGGSTRINALPHVGKPIVLKLDIDHFFDHAFYPLVKEKAFPAMRYSEKNRILLSLLCTYKDTLPQGAPTSPAISNMIMYDFDMAVGKWCVMHNVSYTRYCDDMTFSGMFDIAEVIAVVKDALKDWGFFLNARKTTVIRSSQRQTVTGLVVNEQVHIPSSYRNALRQELYYCRKFGIQSHLEHRHIKMEPEAYALSLLGKINYCLSIHAADPMMLEMKQWLMQQIRNNCF

SEQ ID NO: 2384 - protein, 317 aa, unidentified
  source 1..317: note = Related to JAFZOL010000002.1; note = Clostridia bacterium
MIIYREFSSLSRDLGFSGRTLYGVSHAVTKHYRPVRIPKRGGGTRELHIPDPLLKAIQTRIAETLLPLEEISPCASAYRPGGSTKRNALPHVGRQTVLKLDISGFFDHITYPLVKKKAFPASRYSESNRVLLAMLCVYKDSLPQGAPTSPAISNIVMKDFDDAVWRYCAAREIAYTRYCDDMTFSGDFDPAPLIAFVKARLKKMGLFLNEKKTAVLRQGRRQQVTGVIVNERPGVPAEYKRAIRQEVHYCEKYGAADHLSFRGDPTPPADYLMSLMGRVNYVLSIEPQNEEMRGYKTLVAAWLKEAAQPKKTPEEQP

SEQ ID NO: 2385 - protein, 307 aa, unidentified
  source 1..307: note = Related to JAFURU010000174.1; note = Clostridia bacterium
MIVYRELSSLARDLGVSGRTLYALSNHVVKHYRRVLLPKGSGEYRELHVPDDLLKMVQKRIAERLLAMEPVSPYATAYRVGGSPMLNAKPHVGAPVLLKMDIRHFFDHVIYPVVKEKVFSAERYSEKNRVLLTLLCMYKDSLPQGAPTSPVISNIIMRDFDDRIGSYCRERGIRYTRYCDDLTFSGDFDPAPIKAFVREELIKMGFYLNDKKTVVLREGQKKTVTGIVVNERLNTSSAYRRSLRQDVRFCKKYGVADHLKHIGKVGVSEYSYLSQLLGRANYILQVDKDNAEVKGYKRWIIEQMTKH

SEQ ID NO: 2386 - protein, 303 aa, unidentified
  source 1..303: note = Related to JAFTEJ010000045.1; note = Clostridia bacterium
MIIYRELSSLSDDLGFSAKTLYSVSNSISSHYRCVSIAKPGGGYRELSVPDCLLKSIQRRINEKLLWMEEISPYATAYRVLGSTKKNAFPHKGNPIVLKLDIRHFFDSIIYPVVKEKVFPNYRYSEQNRVLLSLLCVYKDALPQGAPTSPAISNIIMRDFDNKIGSWCSERGVVYTRYCDDMTFSGNFDPKPLRAHVKSELRSMGFFLNDRKSVILNRGQCHIITGVLANERLRAPSDYRRRIRQEMYFCRKYGIGSHLRRIGIEDDVAHYRLVLLGRINYALSLDPADSELVSYKKWLCEND

SEQ ID NO: 2387 - protein, 307 aa, unidentified
  source 1..307: note = Related to JAFQEI010000172.1; note = Clostridia bacterium
MIVYREFSSLAGDLGFSARTLYGVSYHRASHYQTVRIPKANGEYRELHVPDALLKSIQRRILSVILDREEISPYATAYRYGGGIAKNAAPHVGKPVVLKLDIRHFFDRVIYPLVKDRAFPADRFSESNRVLLTMLCMYRDALPQGAPTSPAVSNIIMREFDDTVGAWCARQQIAYTRYCDDMTFSGDFDPKPVIQKVRQELQKMGFFLNDKKTVVVRDGQKKLVTGVVVNRRLRAPAEYRRNLRQELYYCRRFGVSRHLEHRALQQTEGQYLRGLLGRVQFALQLDPDDRELRDDRAWLLSRISDCT

SEQ ID NO: 2388 - protein, 307 aa, Butyrivibrio sp.
  source 1..307: note = Related to JAGAYD010000015.1
MVVHRELSSLCQDLGYSARALYSLSNSVSEHYHDAMIPKANGEYRLLHIPDKFMKAVQKSIAQNILSYEDISPYAMAYRPGGSTKANAFPHVGASMVMKLDVRKFFDHITYPMVKEKVFPSEKYSESNRILLSVLCVYNHAIPQGAPTSPAISNIILRDFDNRVGDWCGKSGITYTRYCDDLTFSGEFEPKEVKAFVKKELFKEGFFLNSKKTIVLRNGQRKEITGIVVNEKAAVPARYKKRIRQELYYCRKFGIDEHVKRLGLPESTEAYARKLLGRINYVLSVEPDNDEMKRGRAELLSWFQSTS

SEQ ID NO: 2389 - protein, 303 aa, Butyrivibrio proteoclasticus
  source 1..303: note = Related to FOXO01000040.1
MVVYRELSSLCHDLGYSARALYTLSNSVAEHYHDVMIPKANGEQRLLHVPDKFMKSVQKSIARNLLAYEEISPYAMAYRPGGSTRANARPHVGAPMVMKLDVRKFFDHITYPTVKEKVFSSEKYSESNRVLLSVLCVYSHTTPQGAPTSPAISNIIMRDFDNRVGDWCDKRNISYTRYCDDLTFSGEFNPSEVKTFVKEELFKEGFFLNSRKTVVLRNGQRKEITGIVVNEKASVPAEYKKRIRQELFYCQKYGIDEHVKRLGLCESGESYARKLLGRINYVLSVEPENEEMKRGRTNLLLRL

SEQ ID NO: 2390 - protein, 309 aa, Eubacterium sp.
  source 1..309: note = Related to JAGBKD010000016.1
MIVYRELSSLCQDLGYSARALYTLSNTVTEHYHDVSIPKANGEYRLLHVPDTFMKSVQKSIARNILEYEEISPYAKAYKPGGSTISNAEPHVGAQMIMKLDIRKFFDHITYPMVKEKVFLAEKYSEANRILLSVLCVYSHTVPQGAPTSPVISNIIMKDFDNRVGKWCSEKSITYTRYCDDMTFSGVFKPAEVRKYVGEELFKEGFFLNGQKTVVLREGQRKEITGIVINNKLSIPKAYKNKIRQELYYCRKYGIEEHIRRLEIKERPERYLRKLIGRINYVLCVEPENEEFKAGKEWASEEIKKLSDL

SEQ ID NO: 2391 - protein, 309 aa, unidentified
  source 1..309: note = Related to JAFOYD010000138.1; note = Lachnospiraceae bacterium
MIVYKELSSLCHDLGFSARALYTASNSVDQHYHTVEIPKGNGETRTLHVPDPYMKTIQKSIAKNLLAYEEVSPYAIAYRFGGSTKANAAPHVGHPVILKMDIRKFFDHITYPMVKEKVFPEKKYAESNRILLSILCVYDHTIPQGAPTSPAISNIILREYDDIVGKWCENQAITYTRYCDDMTFSGDFEPAPVIAFVKKALFEQGFFVNNKKTVVLRNGQRKEVTRIIVNQKISVPASYKKSLRQELYYCEKFGIESHLKHIKANENEEHYIERLLGRVNYILSVEPDNQEMKKYRQWLLNQKPYMTKA

SEQ ID NO: 2392 - protein, 305 aa, Pseudobutyrivibrio sp.
  source 1..305: note = Related to FOWB01000004.1
MIVYRELPSLCKDLGFSARALYAASNTINKRYHKVRIPKADGDYRELYVPDDFLKSIQRSIAKNILAYEPISPYACAYRINGSTALNACTHVGEPTILKLDIRKFFDHITYPMVKEKVFPAEKYSEQNRILLSILCVYLQTVPQGAPTSPAISNIILREFDDRVGEWCKARNINYTRYCDDMTFSGSFDAKELKQFVENEIQKEGFFINAKKTVVLHDGQRKAVTGIVVNEKLSVPAEYKKDIRQIMYYCNKYGVIDHMMANKIIGYKSDYLNVLLGKINYVLSVEKSNKQFIEYRSQVKKWLAE

SEQ ID NO: 2393 - protein, 312 aa, unidentified
  source 1..312: note = Related to JAFQLL010000109.1; note = Clostridia bacterium
MITITYKELSSLTNDLGFSARALYALSNHSTKHYHKTVIPKHSGGERVLHVPDEFLKAVQRSIVRNLLAYEAVSPHARAYCYGASTVKNALPHKGHRVLLKLDIQNFFDSINYPLVKNKVFTKERFSESNRVLLSLLCTYKDTLPQGAPTSPFVSNIIMKDFDNTVGTWCNERNITYTRYCDDLTFSGDFNQDEVKTFVSQELRKMGFFLNAKKTTLLHDGQQKCVTGIVVNDKLNAPLRYRKGIRQEVYYCKKFGIEEHIKKQGIEKTREGYLKSLLGRINYVLSIDDTNEEMKSYKAWALKECKTAQLKK

SEQ ID NO: 2394 - protein, 309 aa, unidentified
  source 1..309: note = Related to JAFUOO010000022.1; note = Clostridia bacterium
MITITYKELSSLTCDLGFSARALYSLSNHASKHYHKTVIPKGSGGERVLHVPDNFLKAVQRSIVRNILSHEEVSPYARAYRYGASTLKNAMPHKGHKVILKLDIKNFFDSIIYPLVKKKVFPSERFSESNRVLLTLLCMYKDALPQGAPTSPCISNIIMKDFDNTVGTWCKERNITYTRYCDDLTFSGDFNVDEAKAFVEAELKKMGFFLNAKKTTVLRDGQKKCVTGILVNDKINAPLEYRKSIRQAVYYCKKFGIDEHLKRNGIEKAAEGYLKSLLGRINYVLSIDNTNEEMKGYKAWAVKQLKKLK

SEQ ID NO: 2395 - protein, 307 aa, unidentified
  source 1..307: note = Related to JAFXHP010000039.1; note = Clostridia bacterium
MIVYKELSSLTTDLGFSARTLYSVARMVRKHYHEVSIPKKDGTERKLSVPDELLKRIQRRIAEKILMYEDISPYATAYRVCASTLINAKAHLDKKCILKLDINHFFDSIIFPVVKNKVFTEEKYSYANRILLTALCIYEDSVPQGAPTSPVISNIILREFDFHIGSWCSERGITYTRYCDDMTFSGEFEAKEVIKEVEDALAKEGFYLNRKKTAFLKDGQRKEVTGIVVNDKVSVPKEYRRKIRSEVHYIKKFGIDSHLSHIGCNMDKVKYLMSLFGKINYALSVSPDNAEMKNCKKIIGKILYKLK

SEQ ID NO: 2396 - protein, 312 aa, unidentified
  source 1..312: note = Related to JAFYHQ010000006.1; note = Erysipelotrichaceae bacterium
MKNTYFELKTLENDLGVKAGTLYRLSNNINSHYRSVSIPKPDGSKRTLSIPDPVLKHVQKRINDVILSTMNVSVYSKAYSFGDSPLRNAIPHLKQKLILKLDIRKYFDHVTYPLIKEKVFKDDQFSESNRILLSLLCIYNESLPQGAPTSPAISNILLYDFDNVIGEWCRQRNFVYTRYCDDMTFSGNFDGLHPIDIIRKVELELKKYGLFINRKKIQSLHDGQRKKITGIVVNDKPNVPANYRRKIRQEMYYINKYGLQDHLKKTGSKQTEAEYLRSLLGRINYVLSINCSSEFEVYRTKTVSLLDALLSV

SEQ ID NO: 2397 - protein, 309 aa, unidentified
  source 1..309: note = Related to JAFRKA010000015.1; note = Erysipelotrichaceae bacterium
MMNTYFELNTLEKDLGISARTLYSLSNNINSHYHSVVIPKSDGGSRKLSIPDYSLKNVQKRINNVILSCMNVSIYAKAYTNGDSPLRNALPHLDKKTILKLDIRKYFDHITYPLIKESVFKKENFSESNRILLSLLCMFNESLPQGAPTSPAISNILLYDFDNWIGEWCRRQDITYTRYCDDMAFSAEELNSDIIIERVRLGLKKYGLYINNKKTQIIHDGQRKKITGIIVNDKPNVSIDYCKKIRQEMYYIRKFGIDSHLKAIGYEKTVDDYLRSLLGRINFVLSISFSKEFDDYRTTIAYIRNTIFS

SEQ ID NO: 2398 - protein, 315 aa, unidentified
  source 1..315: note = Related to JAFYHQ010000014.1; note = Erysipelotrichaceae bacterium
MKHTYFELETLEKDLNVHAKTLYGLSNNINAHYHSRIIKKSNGGDRVLSVPDFILVKVQNQINDVILSRMPVSVYSKAYSAGDSPLGNAAPHLRNDTVIKLDIRQFFDHVTYPLVKEKVFRKELFSESNRILLSLLCMYNESLPQGAPTSPAISNILLYDFDNRIGEWCRQRNIIYTRYCDDMTFSGDFENWDPIDIIRKVKLELKQYGLFINGRKTKILHNGQRKKITGIVVNDKPNVSIDYRKKIRQEMHYIRKYGLKNHIRKTGCDKSEMEYLRSLLGRINYVLSVNRIEEYERYRDDVVSYLRHMGLRQDL

SEQ ID NO: 2399 - protein, 323 aa, unidentified
  source 1..323: note = Related to JAFRQF010000031.1; note = Erysipelotrichaceae bacterium
MKHTYFELKTLEKDLGVSAKVLYTLSNQINRHYRSVEIPKSDGGTRKLSVPDPLLKSVQRKINEVILSRMDVSSYARAYSYGDSPLKNASSHVNKKEIFKLDIRKFFDHVTYPLIKERVFTADRFSESNRILLSLLCMYDESLPQGAPTSPSISNILLYEFDEELGIWCKERDVSYTRYCDDMTFSANSLTPEEIEHKVSSMLKQYGLFINQKKKQYIRGSRRKKVTGIVVNEKPNTPVEYRKKIRQEIFFINKYGLKDHMERIKCTDSQGSYLSSLLGRISYVLSINQSEEFEKYREQISTLLKEQDDMRIIQKSEETRRLL

SEQ ID NO: 2400 - protein, 308 aa, Solobacterium sp.
  source 1..308: note = Related to JAFUCV010000276.1
MIVYRTMQALETDLGFSARTLYSAANTIDRHYHEVRIPKRDGTERILHVPDEFLKRIQRRINDVLLAGMPVSRYATAYNPGNSIMQNAQPHAGKHFLLKLDIRDFFDHITYPLVKEKVFPEHIYSEQNRILLSVLCVYHDSIPQGAPTSDLISNIVLYDFDRTVGRYCRERNIAFTRYCDDMSFSGDFDPQELTAFVSEELRKDGFFLNRKKTVTARPGQAMRVTGLSVNETVNVPSEYRRKIRQEMHFIQKYGTAQHIKRLGIGMEEQAYLNSLKGRIAYVLSVREIPEFREYLKQISLLEKRQMIQ

SEQ ID NO: 2401 - protein, 328 aa, Eubacterium ventriosum
  source 1..328: note = Related to DS264270.1
MVYYKDLSTLEKDIRIPRKVLYKFSRNIFSNYKTVEIMKNNGEIRTLHVPKDNLKSIQRKIRFYILRKMPTSIYATAYIRGEGIVNNAKVHVGAENILKLDIRHFFDNITYPMVKEKVFKPDIFSEPIRILLSILCVYEHSIPQGAPTSPDISNIIMRDFDKEIGDWCKERNINYTRYCDDMTFSGKFDKEPVIEKVESELRKMGFYINNRKTTYLHSGQSKNVTGIIVNEKLSAPRKYKKEIRQEIYYCKKYGIENHMKHSVLKKKSRQLSDALKGQIDIDIDVEISTEQYINSLMGRINYVLSVEDNEEMREYKEWLYGCGNTQKF

SEQ ID NO: 2402 - protein, 324 aa, unidentified
  source 1..324: note = Related to JAFTAK010000098.1; note = Clostridia bacterium
MTNAKKKYSDLSSLALDLGFTGKELYTVSNAITRYYLEVAIPKSNGETRTLHVPSGMLKMIQTSIARVLLPKVPVSRYACAYKPGASAVKNAMPHVGAPIVLKLDIRKFFDHIIFPIVKEKAFPEKMFAEKLRILLTILCIYKEALPQGSPASPGISNIIMRDFDDKVGGWCAERGIAYTRYCDDMTFSGDFDPKPVKDLVRNELRKMGFFLNDAKTVVAHDGMRKQVCGIVVNERPSVPKDYIKKIRQEIYYIRRYGLASHLKRTNPGVDPVNYINSLSGRIRYSIYVSKASDRCADPELSGYLDVIKKEMDILAGRDYRDRT

SEQ ID NO: 2403 - protein, 341 aa, unidentified
  source 1..341: note = Related to SVBR01000043.1; note = Erysipelotrichaceae bacterium
MLAAEQHTSRVHALTGCPAAALQNILKWCQKGGRMIVYRELSSLCSDLDVSAKTLYTLSNSITSRYRTAQLLKKDGGYRTLRIPDPLLKEVQRKIVQVLLSRMEISPYATAYRYGASIKKNASVHVGQKTVLHLDIRRFFDRILFPQVKEKVFPKERYSEPIRILLTILCFDGENLPQGAPTSPWISNIILCDFDNTVAAWCRKRGIHYSRYCDDMTFSGEFDPAAVEDFVERQLKKEGFFLNRKKTRRMDRSRRQYTCGLVVNDQVSVPSSVRRKIRQEMYMIQKYGLDSHLRKIQYEGSEEEYLNSLLGRVGFVLSIQASDEFLRYKQTLLRMMKKRNI

SEQ ID NO: 2404 - protein, 310 aa, Solobacterium sp.
  source 1..310: note = Related to JAFUHN010000140.1
MIVYRELSSLSRDLEVSVKTLYSLSNSISRHYHTVQLPKKDGGVRTLRVPDPLLKHVQRRIAEVLLAQTEISPYATAYHYGASIKKNAAVHTGNEKVLRLDIRQFFDHILFSQVKQKVFPAERYSEPIRVLLTILCFDEETLPQGAPTSPWISNIILKDFDDAVSAYCRSKGIHYSRYCDDMTFSGELDEKELTEFVSEQLKKEGFFLNRKKNRLMKASQRQYTCGLIVNEKVSVPSDTRRKIRQEMYMIQKYGLSSHLEAVHFEGSLEEYLYSLLGRVNFVLSIEKREEFLKYRKALLEMISGNTDTHA

SEQ ID NO: 2405 - protein, 344 aa, unidentified
  source 1..344: note = Related to DPVX01000340.1; note = Erysipelotrichaceae bacterium
MGPGTAAARRNIRKWCFGREERRMIVYHELSSLCLDLGIEAKTLYALSNNVSSHYHEVKIPKKGGGMRTLHVPDDVLKHVQKRIADQLLACEEISAYAYAYRYGCSAKMNAKRHVNQEIVMRLDIRDFFDHITFAQVREHAFPKWKYSEPLRTLLSVLCIDEDSLPQGSPASPAISNIIMRPFDDVMGEWCRRKKITYTRYCDDLTFSGSFEPNEVIAQAALFLSHLGFFLNEKKTVIRRKEQRQFTTGLIVNESVSVPPEYRRKIRQEMYYLQKYGLSSHLEQINETDEKTYLRSLLGRIRYVLYIHSSEEFRNYEAIVLKLTEETSHGRDNQKTDCDAGRAE

SEQ ID NO: 2406 - protein, 315 aa, unidentified
  source 1..315: note = Related to SVGZ01000005.1; note = Clostridiales bacterium
MIFYGLAKLEKALGYEAKTLYALSNNVKKHYHPAQIPKKNGEMRNLLVPDMALKSVQKAIAEKILQNFPVSPYAYAYRKGFGIKKNARQHTGKEKVLNLDIEKFFDHILYTQVKDYAFPKAFFAEDVRILLSILCYGEKGLPQGAPSSPAITNLVMHDFDMKIGKWCEKQGIDYSRYCDDMSFSGDFDEKAVISFVKKELRRLNMSLKREKTRVAKKGSRQTVTGIVVNEIPSVPSEYRRKLRQEIYYLKKFGAGHQLRHYGLKMTAKDYFLSLLGRVNYVLHISPDNYEMWQYRRYLKNMLRQSRLQPRRSVLL

SEQ ID NO: 2407 - protein, 323 aa, unidentified
  source 1..323: note = Related to JAGCGE010000004.1; note = Clostridiales bacterium
MAYLDPDVIAVLLHVPVHILYAFSNSSYKHYRLISIPKKNGKTRQLTVPDNDLKIIQRSIYFRFLRGREVSPAAKAYLKKGTTTENAKPHVGKPMILKLDIRHFFDNVLFWHVKEKVFTSDIYSENARVLMTYLCTYDGHLAQGAPSSPAITNILMKDFDDEILRFCGKDGVCYTRYCDDMTFSGVFEPDQVISKVAWELKKMGLHLNPAKTRVIWQGQQMNVTGLVVNDKVSVPASYRRKIRQEIHYIWKYSVEDHLKHMGREEDEQYSYLSNLLGRINYVLSIHKDDFEFQEYKDYVVMGCDGRLRYKERPYQIGIDELLG

SEQ ID NO: 2408 - protein, 335 aa, unidentified
  source 1..335: note = Related to JAFQLL010000102.1; note = Clostridia bacterium
MKRSIKKLIRPKDAAMWLYKAQSGKEVTEALMLLYDMSNNAPKYYQKKEIPKKQGGKRVLSVPVTELKRVLCCIKAEILDYIPVSDYARAYKKGGGIAHAAKEHVGHETLLRLDIEGFFDHITYKEVYKHVFGRYYPRKVAGLLTALCCYEKHLPQGAPTSPAISNIVMKGFDDEVAVFCKMNNIHYTRYCDDCIFSGKFDVGAVIKKVKSELLKMGLRLNDEKTKVISQGQRQIVLGVCVNEKMQAPAAYRNRIRQEIYYCKKYGVKNHLLRLNDERFVKKTPGGVFVDAVGYLMQLKGKISFVLSINPDDKEMREYFNLLSVSKKSTRAKKSC

SEQ ID NO: 2409 - protein, 407 aa, unidentified
  source 1..407: note = Related to JAFZLF010000009.1; note = Clostridiales bacterium
MNRSLYLPQMDSLYAFAYQYLRVNGRSCRSDDIYSCGGEIKAILDDTRPHYRKILIPKPNKKEMRTVFEVTQDLRSLQHFIKRYILDRLDAMYTSPYAFAYRLGLSARDNASAHAGHRYMLKLDIRHFFESTRAGQVYSMFRKYTPYNRQILGTLTRLVCYKGALCQGACTSPQIANLILSDFDMAIGTCCRDMCITYTRYCDDMTFSSVLPFDKSALERTVALMLQPYHYKLNTRKTRFLGPGHRLEVTGAVVNERVHAKREYRQKIRQELYYTNRYGVADHLERTRPAWYHTPCSCAQIRHFLYSLQGRINYVRMLDPDDPFLGDAQYQLFRLFLREQSAFRNIYADVGPVSQRQGSTSGFFPEEGPVGFDDLDTDLMEPPFNIPDMDPPELPFDVLGWDDPFSG

SEQ ID NO: 2410 - protein, 382 aa, unidentified
  source 1..382: note = Related to JAFZVE010000038.1; note = Clostridiales bacterium
MDSDEIYACAGEIKAILDDVRPHYRKILIPKPNQEEMRTVFKVTSDLQLLQYFIKFRILDPLDRAYTSPYAFAYRRGYSARDNASQHSGRKYMLKLDIRHFFESTRAGQIYSMFRKYTPYNKTILGTLTRLVCFNGALCQGACTSPQIANLVLSDFDRTIGSYCKCIGVTYTRYCDDMTFSAYWPFNKVAVKDMVEDLLRPYHYKLNTAKTRFLGPGKRLEVTGAVINDRVHAKREYRHKLRQELYYACKYSVAEHLERTRPKWYHSPCTAEQVRHFIYSVQGRINYIRMLDPEDPFLEYAQDLFQVLHLSEVSAFSRNGHFRGSEPDEDLPDPLDIPDLFFTDLEEPPFDVMGDYFPGEEFFHPGDYPVPGPQDDPLFGSE

SEQ ID NO: 2411 - protein, 491 aa, unidentified
  source 1..491: note = Related to JAFZQI010000003.1; note = Clostridiales bacterium
MKPTLPKMDSAYTFIKAYRRSKGYSENRNRAFRDTRELLSVLDEISEHYEKHFVSKKNSDELRTVFSVSYPLREYQEFIRAQVLTPLDLAYTSSFAYAYRRGLSTKDNAKVHEKSRYMLKLDIRHFFESTRKRLVFATFEKYTSYNRSILGILTKLVCYNGSLCQGACTSPTIANLVLADFDASVGLFCDGLGIRYTRYCDDMTFSSPFEFEAKNVEEFVRLQLKPLRYSLNDRKTRFFRPGQRLEVTGAVVNTRVRAPREYRQKIRQDLYYINKYGFIFHLEKTRPSWYSGKATEYDILHLLKIMKGRIAYVKMLDPDDPFASNARKELDAAALRYGVGDLSKMQDRQISFEIENAKILRFMTLEERLQRSVSPEVHLMVWHAMRGLEYHPEGNGGFVSDEEDDGLFSDERDVRDNRCFADEGHTSMQDANDTLPFEAVNFPTFDEVSIPPFDEDFPTFDEHRIPSFDEVIVPSPDEDKTPPLGNEFPDD

SEQ ID NO: 2412 - protein, 513 aa, unidentified
  source 1..513: note = Related to FMTG01000031.1; note = Ruminococcaceae bacterium YRB3002
MVVNWEKKRRRRLTELEQKILAERPGEPAFNAGSGDLPVIGSLMSLVMLARGNSFSSEEGFWREYRRASAMVDDTSPYYRHYPIPKANGRGYREIYTVDDGLRVYQEAIRGTILDPLDEKYSSKYAYAYRRGRSVRDNAAVHAGHGYIVKLDIKDFFDSTGKSDVYRMFSRYTNYSRAAKTVLTALVCRDGHLSQGSCTSPQIANLVMVDLDGELAAYCEPQKITYSRYCDDMTFSSDEPFDHEALIRFVSLRLRQMHYRLNCRKTKVLGPDSRHIVTGIVVNNERIRVTKEYKKKLRQEIYYIRRYGITSHLKRIRPGEYTPVFEGAGSKHEIHYLAHLLGQAAYALYIDHDDEELRAMVDYLKQAVTECVASTGTRRSEYLSVISRQILNNRMCSVNDRLKIRVSCQYDEIVVTASFRLIDDPDVREVADHYTKYSRVQRRCRGRFVKPGRGTGRGTESATESTTATGGDGIICYEVVIPERDFSRYNEAVPEVMDDITWIYSDFMKYKLI

SEQ ID NO: 2413 - protein, 526 aa, Eubacterium sp.
  source 1..526: note = Related to JAFWKC010000096.1
MKLQIEDFENVKVDIKEFIEYIMPSNKQSMNKLARILYPDSNEKDYDSLTNYLYVMLDGIEKDYEEFTIKKKNGKLRTISKPNEALADIQKRIYEYILRNAPVSPCAAAYVKGKSIRDATAKHIGQPILIKIDVKDFFYNIFFDSVNDAFTNLGFDKYQAITLANFCCYKGSLPQGTSTSPMLSNLVFRDFDDEMEKLCLKYNIRYTRYSDDMLFSGSFDNEFDTKRFVPYVKFMLEDFGFQMNLSKTKIIKQGQRQTALGVVLNEKQQVTKEYRKQIRQEIHYCSEHSVKSHLEHIQDERFLLPNGEPDYIGYIDNLNGRINFALQINPDDMEMVSYKNSLKSLSSSMYQAKVVEQNQLMECLYKVFSDYVNSKIKYTILYKKLLEYGFSNSQLSKIGIYEEKIVYGFDEVYLTKDDKGNYLSLITKHSCSEHLGNVIINPYCDGFFGSRFDKNLGYLTVTSDKIAAVTSGLTNYVSFNNAPSKFFLSKKKLEMIRKYGNKVVVADCSGAEYIRLQMIANHIEVI

SEQ ID NO: 2414 - protein, 321 aa, unidentified
  source 1..321: note = Related to DOBY01000149.1; note = Oscillospiraceae bacterium
ETVYITKASGKKREINKPDIVLKSFQKSVYKNILLHIPTSYYAVAYKKGSSLRYSTAVHIGKPMILKLDIKNFFGSILYKTVQEMFLKQGYDYFMATTLATLCCYKGRLPQGTPTSPAISNIIMKDFDDKVACFCYARNIAYTRYSDDMTFSGSFDSDEVIEFVKNKLNKSGFQLNNKKTKLIKQGQRQTVTGVVVNEKQQLPKGYRKQIRQEIHYCQKYSVKSHILHTNLTAYIRPNGDVYYKEYLLNLYGRINYALQINPTDEEMLKYRSVVKSAIDKLDIIKRKINDEIFRLAVDFFTSDKYKTNKIYLYLKESGYTN

SEQ ID NO: 2415 - protein, 357 aa, unidentified
  source 1..357: note = Related to JAFYNQ010000087.1; note = Oscillospiraceae bacterium
MYWNRETNAISISAGDMKIMRQCNISMERLMQKPANPQLPPLWSILSYAMLRSDGDAAVGIWRNFRLYQKLFENPNQFYFGKEICKTDGSVRELNVPMSRLRCEQEFVFENILSKLPVDSHAYAYRKGISMQDCARPHVGKKVLIRLDIQDFFGSVTENMVYNRLLEDTGYPRKLCRFLAKLCCYQHHLPQGAVTSPMLSNIVFRPLDEKLAEFAGFCGMAYTRYSDDLYFSGDEIDVTSFISCVKLVLGNSGFRLNGKKTRVRMPQHRQAVLGLTVNEKLQVSRTYRRNLLQEIYYLEKFGKNCLGAQKEGNYLRYVQRLLGKVNYAIASGAEDPKLKAAAEMLKKRIFLIEREFY

SEQ ID NO: 2416 - protein, 354 aa, unidentified
  source 1..354: note = Related to SVKT01000009.1; note = Oscillospiraceae bacterium
MKWKERSSTFCLEPQDMQIIAQCKMSLTEMVRHDHPNKNIPPLWSVLSYVMLQSTSHANIWYRYRALREMASNTKLWYYTQYIPKSNGGARRISVPTHAIRTQQKYILAKILKGLPVSDHAYAYREGRSIQDCAKPHESQDVLIHLDLTDFFGSISENMVFLTFYRETGYSRSLCRFLAKMCCLRGSLPQGTVTSPMLSNIVFYRCDEDLARLAARYGMNYTRYSDDLYFSGNSALDVGEVLKKITRILLYYGFRINEKKTKIRRRQHRQTVLGLTVNDHIQVSRKYRRDLLQELYYLDRFGENCKGAVACGDYLKYMQQLQGKLAYVLHADPENVKMREAHSKLIRRIHQYSE

SEQ ID NO: 2417 - protein, 365 aa, unidentified
  source 1..365: note = Related to JAFQFC010000021.1; note = Oscillospiraceae bacterium
MKWEGKQVLFSAADLQVLMQARFRPDEVPDMEEVKEGLPPLWSPLSYTLWKCHGETSRKNLWRQHREALLMAKSGSGYYHHMLVRKNGGSGVRRISVPCYELRDHQRFIYKNLLSRLPLSPRACAYRKGVPLRRCAEPHCGAEVLVHLDIRDFFPSITEEKVSFALHRATGYEEELCDFLAGLCCENGRLPQGAVTSPALSNLAMAGMDGTFGAMAAMLGFTYTRYADDIYLSSSDRSADAARIVKLARDFLRSEGFELNRDKTRIIRQGRHMAVLGLSVNEKVQVSRRYRREVRQKLHYLKRYGADAQGVQEAGGQEPYALHLLGKVGYILQVNPMDQQALRARLELLTGLHRLHRGMPFWWSA

SEQ ID NO: 2418 - protein, 421 aa, unidentified
  source 1..421: note = Related to JAFSHB010000043.1; note = Oscillospiraceae bacterium
MEWDPRREKLSLSERDLKIMKDCGMTPAEILRAVESRGRIVPLWSVLSFFMLYETSESPKAFWRTYRQGETAARYRDCLYHDRKIPKRCGGVRTIAMPMWPLAQMQTCIAEKILQHIMPDDHACAYRRGMSVSDCAEPHRKKRIVIHLDIRDFFGTIREDMVFDALLRETGYSKKLVRFLSRLCCYQDRLPQGACTSPALSNLVFKPCDEAIGGFAASLGMDYTRYSDDLYLSTSGEVDTGLVIETVRKILADHGFRLHNEKTKIMGRQQRQSVVGIVVNEKLRPSRTYVRTVLKDVYYVSRFGAGSNQVAAFGDYYSYLRQLQGRVNYVRCFMPEDRAVLEAVQTVRSLIGAYHRTLLDAVTALEAQCRDGYVVVFSENYYRPLVKLKEQLAVVRRFLPRDYRFHDAEERVYAMLGEELY

SEQ ID NO: 2419 - protein, 367 aa, unidentified
  source 1..367: note = Related to JAFXTM010000067.1; note = Oscillospiraceae bacterium
MRWYPSGKLNFTAADLAVLSHPAFASKPWAGAGAWLRADPAYPPIPSALVFSLLAGPRESRPERMWKQYRKLLEIANDPAQYYVSHEIVQHRKPRTISAPFYELAQYQRWILKNILERAPTTDFAFAYKKGLTLADNARVHLGRSVIVKLDLVHFFDSITFGMVYEVFAGQLRYPQETAVLLANLCCLNGRLPQGACTSPYLSNLCFAKADGELAGYCREKGLAYSRYSDDLTFSGDRIDVKELIAFVRETVKKYGFSLNYRKIHVDGKGRRHRVTGIVCNEKLNAGADYRRKVRQEIYYLRKYGAADHLRRRNDPAYRNADGTPCVERYYAALLGRISFILQVDPEQEEFWSYRDYVRDLMLRAAE

SEQ ID NO: 2420 - protein, 358 aa, unidentified
  source 1..358: note = Related to JAFTYM010000022.1; note = Oscillospiraceae bacterium
MIWRKRERINLSELDVFVLRKYAGQTNPMEEILNSEIPENLPPILTPYHLPLFMHNFKKMYYFWENYRDIMKCSNEPREFYRRYDIMKRYGKMRTVYKVSGVLADVQHWILRNILDELPVSRHATAYAKGRKIMDNAAPHVGKKLVVKADITDFFGNVKYLSVYDVFKNAGYSKSVATLLANLCCCDGHIMQGACTSPALSNLCFTKIDSVISEFCTERGITYTRYSDDMTFSGDFAPSELITYLRRVLKFYGFTMNDKKTKVLYRHHRQTVTGAVVNDKPQPTKEYRRRIRQEMYYIRKYGVLGHMDRLKDEKSYVSPINYLENLYGRMNYVLQYTPDDEELKRWMHEVDRIEQSLF

SEQ ID NO: 2421 - protein, 330 aa, unidentified
  source 1..330: note = Related to JAFQMH010000077.1; note = Oscillospiraceae bacterium
MDEILKSNIPENLPPLLTPYHIPTLMHNFPKVISFWKSYRELIHCSNHPEEYYRCLVLPKRDGKMRKVYAVSGALAQAQHWILRNILDELPVNPHAMAYVKGRSLLDNANPHAGKKLVVKADIEDFFGSVKYISVYHVFKSAGYSERVSAVLANLCCCKGHIMQGACTSPALSNLCFAVIDEKISAFCALRGITYTRYSDDMTFSGDFAPSELITYLRGLLKFYGFTMNDKKTKVLYRHHRQTVTGAVVNERPQPTKEYRRRIRQEVYFIRKYGVLEHMDRLKDNKCYVSPINYLESLIGRMNYVLQYNPHDEELLSWMDEIDKIEQGLF

SEQ ID NO: 2422 - protein, 342 aa, unidentified
  source 1..342: note = Related to NZ_LT835157.1; note = Proposed Anaeromassilibacillus sp.
MIQTLEEFCEWLDPSVSPRILQKKVYWLRSLRSAKKKRKEYGLFWLAKRGGGYRPVASPSPGLKQVQRGILSLLAYGEIAPPATAYRPGRNLLDNAAVHVGQPILVKLDLLHFFGSIHFPSVFCAIDRTLSQNPEIAPYSKESNGKNAGSTRADSFNALLSFFFTTFCTLDGILPQGSPASPMLSNLVFFPLDQQIAAFCGQRHIHYTRYSDDLTFSGDFSPEPLIRFVYQLLRKNGFLLNPAKTIIARQGRRQQVTGILVNDHPQVGRDYRRRIRQEVHYLRRFGVASHLLHEGQTGWALHPAPYLQSLLGRIQFVLQICPYDREFLEYRAYVLRLLKSSL

SEQ ID NO: 2423 - protein, 339 aa, unidentified
  source 1..339: note = Related to NZ_JADNJD010000005.1; note = Proposed Anaeromassilibacillus sp.
MIQTPEDFCQWLQPDASIRSVQKSLYWLLSLRSARKKRREYQVFWLAKRGGGYRPVAAPSLGLKKVQRGILSLLSVGEVSPHATAYQPGCTLLRNAAPHVGQPFVVKLDIANFFGSIPFPAVYAAIDRALCRNPEIQSSAKASSAREGATESYNAALSFFFATLCTLDGVLPQGAPTSPLLSNLVFFPLDCRIAAFCEGRKIHYTRYSDDLTFSGDFSPDTLIRFIRRLLCEHGFLLHESKTVIARRGNRQQVTGILVNDRPQAGRKFRRRIRQELYYIQRFGLSSHLLHEGRTGESCAPGPYLHSLLGRIQFVLQVCPYDREFLGYRAYILQQMKHYT

SEQ ID NO: 2424 - protein, 344 aa, unidentified
  source 1..344: note = Related to NZ_LN868536.1; note = Proposed Anaeromassilibacillus senegalensis
MLRTLEDFCRAVYPGLTPEQFRKNSHQLAAYADSRKRRKSYRECWIPKKHGGARRILVPSPGLKQIQRAAAALLKNGSVSPYATAYQTGRSVLDNAAPHVGRELLVKLDIRNFFGSIRFPAVFHAIDHALRRNPEVGRHCKDYPHGSRESHNYNSVLSFYLAQFCTLDGVLPQGAPSSPILSNLVFDSLDCKIAAYCERRNIQYTRYSDDMTFSGCFHPEVLIHFVRRLLAEYGFTLHEEKTVLAGRGCRKSVTGVVINETPQVSRSYRRNLRQQIYYIRRFGLREHLLHLGRTADAGQPEQYLRQLLGKVSFVLQICPEDPEFQQYRAYCLGLLRAHAGKKAL

SEQ ID NO: 2425 - protein, 367 aa, unidentified
  source 1..367: note = Related to CP042469.1; note = Clostridiales bacterium
MRRAMNHTLREFLESIKSKHTYLLFRYTDEAYKLRRCYRPVILKKKNGGFRVLQVPDENLKRLQRQLLTYLQHAEISPCAAAYVKGRGLSEHAHYHAGRSMLLKLDIEDFFGSISFSKVLFAVKEALKRSPLVGQEQRSEIGWFIAKACTLDGVLPQGAPTSPILSNMVFLHLDQEINSYCIQRGIHYTRYSDDLFFSGDFRPSEIIPLIRKLLRRNGYTLNENKIVAAGRGSKKLVTGVVVNQRPQADRSYRREIRQSIYYIGKFGLEEHLKRKGLLDEGMQPEDMRSEAAGNEDFGREDVIIRAQMVKELQRLIGRIVFVLQIDPQNREFQDYKKFCIGLLNRLPVIFNGRLLSEAEINEGWGSA

SEQ ID NO: 2426 - protein, 344 aa, unidentified
  source 1..344: note = Related to DXES01000132.1; note = Candidatus Anaerotruncus excrementipullorum
MLHTLEAFCAWHYGGGDPLRLARRTRWLMRLARGRRLEGEYRPQEIPKRKGGTRKLLVPSHRLAHLQRGILRLLEAGEVSAAATAYEPGCSLRQNALPHRGARLLVRLDLADFFGSISFQQVFQAVDRALRRSPLVGRHLLDGYDRLQREERVYNQVLSFYFARFCTYRGHLPQGAPTSPHLSNLVFFPLDEALLRYCTRRGITYTRYSDDLAFSGETFSVGELLRFVQRLLAAHGFRLNEGKTVVAGPGQRKRLPGVVVSHKLQADVGLRRQLRQEFYYIGRFGLASHLERTGEQRPPSAYLRRLLGRTGFVLQVNPEDREFQEYLERGKRWLKEQEERAAEG

SEQ ID NO: 2427 - protein, 331 aa, Clostridium sp.
  source 1..331: note = Related to VFMF01000001.1
MLHTLEDFCRYLYHNRDERKFYRCYYQLLRLSREKYRCSCYTLRELPKGEAGTRLLCVPNRALRRVQKGILGLLPAAGPCCVTAYLPGKSVLDNARPHLGQPLVVKLDIRAFFDSISFAQVFRAVDRALEASPYVGCHYLNADDRSSLENRNYNSVLSFYFARFCTRGGSLPQGAPTSPLLSNLVFGPIDGQISAYCGRRGIAYTRYSDDMTFSGTFNPLALIDFVRRVLAENGFTLNDRKTRILNRGQRRKITGVVANQKLQAPREYRRDIRKELYYIRKYGWESHLSHENIAQGPEEYRRGLLGRVGFVLQLCPADGEFQQYRQWLLEN

SEQ ID NO: 2428 - protein, 352 aa, Oscillibacter sp.
  source 1..352: note = Related to JAFXOM010000274.1
MEDAARFERETGLPYFPDAHQFADAYLPTDRSEEHGENVRRLYDLANAPRWYYRSVSIPKQSGGTRTLHIPYGTLKSVQHFLLHSVLERLPVSPCAVAYVRGVSLSESVRVHVGKPLLVRLDLKDFFDHIGFLQVYQNAFAAYPKAVRVLLSRLCTYTLPSGRSCLPQGAPTSPYLANLCMRRADDAIYAYCARRSIAYTRYADDMTFSGSFEPERLIETVRSILRREGGFELNEEKTRILRACRRQSVTGAVVNERPRASATYRREIRQECFYCKKFGVRSHLLRTKKAPFVRPSESVKDGYYVSQTRYLEHLLGKINFTLSLDPKDREMRLCRKEVLLWLAERNAAPRER

SEQ ID NO: 2429 - protein, 353 aa, Flavobacterium sp.
  source 1..353: note = Related to NZ_QNVY02000005.1
MDFNHYKEAFIKESRKIGFSLPNIQHCLDYAEVLFSHHVPVIYNPSHLSALVGYKKEYLKKASLFPNYFYRDFEVAKKNGTKRLISEPLPSLKEIQIWILRSILYKIPVSPFAKAYKPNVTLLENLRFHKNQSKIFTLDLENFFPSISAELVEAEFLELGYSKIVSKLLSRLCTRNGNLPQGAPTSPYLSNLIFKKADAEIASYCKDYKIRYTRYADDMSFSGDFDHEELLKKVTETVEKLNLRINAKKTKLMTPNMRQTVTGVVVNQKPQVIFYKRNELRQTLYYIQKFGFEEHKIFKKNNHNNYLEHLLGKINFVLQINPKDAEFIKYKAVLFDLKHKQDLTAIENELFPI

SEQ ID NO: 2430 - protein, 353 aa, Flavobacterium sandaracinum
  source 1..353: note = Related to NZ_SMFN01000003.1
MDFTHYKDAFIKEAHKTGYSLTNIQRCLDYAEALFLHEVPVIYNPSHLSSLVGYKKEYLKKASLFPNYFYRDFEVAKKNGTKRLISEPLPSLKEIQIWILRSILYKVPISPFAKAYKPKVTLMENLRFHKKQPKVFTLDLENFFPSIRMETVQNVFLKLGYSKIISKFLTRLCTRDGTLPQGSPTSPYLSNLIFKQADAEIASYCKDYKIRYTRYADDMSFSGDFDENELLQKVTETVEKMGLRINAKKTNLMTPNMRQTVTGIVVNQKPQVIFKKRNELRQALYYIQKFGFEEHREYKEIDQKNYLEHLLGKINFVLQINPKDAEFIKYKAVLFDLKHKKGIKTIDNEFFPI

SEQ ID NO: 2431 - protein, 353 aa, Flavobacterium sinopsychrotolerans
  source 1..353: note = Related to NZ_FODN01000006.1
MDFAHYKDAFIKEAHKTEYSLTDIQRCLDYAEALYLHQVPVIYNPTHLSGLVGYKKEYLKKASLFPNYFYRDFEVAKKNGGKRLISEPLPSLKEIQIWILRNILYKVPSSAFAKAYRPTVTLLENLRFHKNQPKVFTLDLENFFPSIRVEAVENEFLKLGYSKIVSKLLSKLCTRNGTLPQGAPTSPYLSNLVFKEADAAIATYCKEHKIRYTRYADDMSFSGDFDENELLQKVTETVEKIGFRINAKKTKLMTTGMRQTVTGVVVNEKPQVVFYKRNELRQALYYIQKFGFEEHREYKEIDQKNYLEHLLGKINFVLQINPKDAEFIKYKSLLIDLKNKQDLKALEDELLPI

SEQ ID NO: 2432 - protein, 353 aa, Flavobacterium ranwuense
  source 1..353: note = Related to NZ_SMLH01000005.1
MDFAQYKETFTDKSHKIGYSLPNIQRCLDYAEVLFSHDVPIIYNPTHLSLLVGYKKEYLKKAAVYPRYFYRDFEIAKKNGTKRLISEPLPSLKEIQIWILRNILNKVPISPFAKAYKTNVSLIENLKFHKNQPKVFTLDLENFFQSITIKLVEKEFHQLGYSKMVSRLLSKLCTRDKTLPQGAPTSPYLSNLILKDADAQIAAYCKLHKIRYTRYADDMSFSGDFDENKLLHKVIEIVEKLNLRINKNKTKLMTSNTRQTVTGIVVNEKPQVVFHKRNDLRQAMYYIKKFGIEEHREYKEINQKNYLEHLLGKINFVLQINPKDIEFLEYKSILKDLKKKQDLKAMEDELLPI

SEQ ID NO: 2433 - protein, 353 aa, Flavobacterium sp.
  source 1..353: note = Related to NZ_JQMS01000001.1
MDFTQYKESFTEEAHKMGYIEQNIEHCLEYAEVLFSHDVPVIYNPSHLSLLLGYKKEYLKKVSLFPRYFYRDFEILKKNGSKRLISEPLPSLKEIQIWILRNILYKVAISPFAKAYKPNVCILENLRFHKNQPKVFTLDLEHFFPSITIEKVEKEFRELGYSKMVSKLLSRLCTKDGSLPQGAPTSPYLSNLIFKDADEAISDYCKQHKIRYTRYADDLSFSGDFNENKLLHKVTEVIEKLNLKINKNKTKLMMPNTRQTVTGIVVNEKPQVVFYKRNDLRQAMYYIKKFGFQEHREYKEIDQKNYLEHLLGKINFVLQINPRDTEFISYKSILIDLKKKQDQKELEDALIPI

SEQ ID NO: 2434 - protein, 353 aa, Flavobacterium sp.
  source 1..353: note = Related to NZ_JSYM01000001.1
MDFIQYKETFSHDAQKKGYSEQNIKRCLDYAEVLFAHDVPVIYNTTHLSLLVGYKKEFLKKAALYPKRYYRDFEILKKNGSKRLISEPLPSLKEIQIWILRNILYKVPISPFAKAYKPNISILENLRFHKNQPKVFTLDLEHFFPSISFEAVEKEFLELGYSKMVSKLLSKLCIRDGSLPQGAPTSPYLSNLIFKKADAVISDYCKQHKIRFTRYADDLSFSGDFDENKLLHKVTETVGKLNLRINKNKTKLMMPNTRQTVIGIVVNEKPQVVFHKRNELRQAMYYIKKFGFEEHREYKEIDQKNYLEHLLGKINFVLQINPKDEEFIGYKTILIALKKKQDLKTMEDELIPI

SEQ ID NO: 2435 - protein, 353 aa, Flavobacterium caseinilyticum
  source 1..353: note = Related to NZ_SMFM01000002.1
MDFPHYTCVFTREASKLGYSPKNIQRCLEYAEVLFSHGVPVLYNPSQFALLVGYKKEYLQKAALYPNYFYRNFHITKKNGSKRLISEPLPSLKEIQLWILRNILYKVPVSAFAKAYKPTVSILENLKFHKKQPKVFTLDVENFFPSIKYDSIQKVFLQLGYSKMMSRLLTRLCSCNGALPQGACTSPYLSNLIFKEADAAISNFCMQRKIRYTRYADDLTFSGDFDENELLKHVTEIIERQNFRINGNKTKLMTPNSRQEVTGIIVNEKPQVVFHKRNDLRQALYYIKKFGFEEHLEYKEINHRNYLEHLLGKINFVLQINPRDMEFISYKSFLIDLKKKKDLKMTTVFPLLM

SEQ ID NO: 2436 - protein, 353 aa, Flavobacterium aquariorum
  source 1..353: note = Related to NZ_QKXH01000002.1
MDFEQYRNNFSKEALKLGYSEQNVVRCLDYAAVLFSNNVPVIYNISHLGQLVGYKKEYLKKASTYGDNFYRNFEITKRNGTKRLISEPLPSLKEIQLWILKNILYKIPVSPVAKAYKPKARIIENLKFHRNQPKVLTLDLENFFPSIKMKATQNVFLNLGYSKYMANILSKLCTKEDSLPQGAPTSPYLSNLIFKSADALIFDFCRQREIRYTRYADDLSFSGDFDEKMLLGKVTDIIESLGFKINNTKTKLMTPNTRQTVTGIVVNQKPQVVAHKRNALRQALYYIKKFGLKEHQEYKEIVQKNYLEHLLGKVNFVLQINPNDNEYKNYKDFLIDLKKKNELGIKNASPSLI

SEQ ID NO: 2437 - protein, 350 aa, Flavobacterium sp.
  source 1..350: note = Related to JAHWYN010000011.1
MDFTQYSFAFSKEALKFGYTEQNIKRCLDYAVVLFSHDVPVIYNTSHLAQLVGYKKEYLKKATLYTNSFYRNFEIVKKNGSKRLISEPLPSLKEIQLWILKNILYKIPVSPVAKAYKPNVRIIENLKFHRNQPKVLTLDLKNFFPSIKINAIKNIFIDLGYSKFVSRLLAKLCTKEDALPQGAPTSPYLSNLIFKKADALIFDFCKQRKIRYTRYADDLCFSGDFNEEELLEKVTDIVEDMNFSINKSKTKLMLPNTRQTVIGIVVNEKPQVVFHKRNALRQAVYYIKKFGLNEHQECKGILQNNYLEHLLGKINFVLQINPKDTEFRNYKDFLIDLKKKNEWSKPVFHH

SEQ ID NO: 2438 - protein, 353 aa, Flavobacterium sp.
  source 1..353: note = Related to JAGGNA010000001.1
MDFAQYKNTFTQEASKNGYSEQNIQRCLDYAELLFSHEVPVIYNTSHLSNLVGYNKKYLKKASYYPQYFYRDFEITKKNGTKRPISEPLPSLKEIQIWILKNILYKIPVSPFAKAYKPNTALIENLKFHKKQPKVLTLDLENFFPSISVKSIEKIFIEMGYSRMVSQLLAKLCTRDKTLPQGAPTSPTLSNLIFKDADVAIADFCKQRKIRYTRYADDLSFSGDFDEKELFEKITETVENLNFHINKSKTKLMTPNTRQVVTGIVVNEKPQVVFHKRNELRQAMHYIKKFGIDEHREYKEINQRNYLEHLLGRINFVLQINPKDLEFIGYKAVLIDLKKKQALKMKKNQPLLM

SEQ ID NO: 2439 - protein, 352 aa, Flavobacterium xinjiangense
  source 1..352: note = Related to NZ_FRCL01000005.1
MDFTHYKEAFIQEASKNSFSEHNIERCLEYAAVLFSNNVPVIYNTSHLSALVGYKKEYLKKASLYPKYFYRDFEITKKNGSKRAISEPLPSLKEIQIWVLKNILYKIPISPFAKAYKPNSGLIENLKFHKKQPKVFTLDLENFFPSISIKSIEKVFLTAGYSRMVSKLLSKLCTRDGTLPQGAPTSPYLSNLIFKDADAVISSYCIERKIRYTRYADDLSFSGDFDEKELLSKITSIVENLNLHLNTAKTKLMTPNMRQTVTGIVVNDKPQVAFHKRNELRQDMHYIKKFGIDEHREYKEINHSNYLEHLLGKVNFVLQINAKDLEFIGYKAVLIALKKKQQKTQMIQPLLM

SEQ ID NO: 2440 - protein, 351 aa, Flavobacterium frigoris
  source 1..351: note = Related to NZ_FOFZ01000005.1
MDFSNYKDTFTNEAIKRGYSEQNIKRCLDYAAPLFSNDVPVIYNTSHLSVLVGYKKEYLKKAALHTKYFYRDFEIVKRNGKKRPISEPLPSLKEIQHWILKNILYNIPVSPFAKAYKPNISLIENLKFHRNQPKVFTLDLENFFPSITIDSIEKIFIELGYSKSVSDLLAKLCTRDGTLPQGAPTSPSLSNLIFIEADALIADYCIQRKIRYTRYADDLSFSGDFDEKELFDKVNGIIKKMNFNINTAKTKLMTPGSRQTVTGIVVNEKPQVVFHKRNELRQAMYYIQKFGIDQHREYREINQRNFLEHLLGKINFVLQINPKDTEFIGYKSFLIDLKKKRDLNYDTLKII

SEQ ID NO: 2441 - protein, 353 aa, Flavobacterium degerlachei
  source 1..353: note = Related to NZ_FNMV01000002.1
MDFSQYEDAFTKEATKMGYSPQRIERCLDYAEMLYSNDVPVIYNSSHLAGLVGYKKEYLKKAALHTKYFYRDFEILKKNGKKRPISEPLPSLKEIQHWILKNILYKRPVSAFAKAYKPNVSLIENLKFHKNQAKVFTLDLENFFPSIGIESVEKVFADVGYTRSISDLLSKLCTRDGSLPQGAPTSPYLSNLIFEEADKVISQYCIQKKIRYTRYADDLSFSGDFDEKELFNIVTEAVEKLKLKINPSKTKLMTPDSRQTVTGIVVNEKPQVVFHKRNALRQAMYYIQKFGIDEHREYKEINQANYLEHLLGKINFVLQINPKDSEFIGYKSFLKDLKKKREASNNRIMPLLM

SEQ ID NO: 2442 - protein, 370 aa, Flavobacterium granuli
  source 1..370: note = Related to NZ_PVUB01000001.1
MGVSDSKSPHSINDSDAMDFVHYKDSFTKEALKIGYSQQNILSCLDYAQILLTKDVPVIYNSSHLAVLVGYKKEYLKKAAHHTKYFYRDFEITKKNGKKRPISEPLPSLMEIQHWILKEILYKLPVSPFAKAYRPNISIIENLKFHKNQPKVFTLDLENFFPSIKIEAVERIFTELGYSKNISNLLAQLCTRDGRLPQGAPTSPFLSNLIFKDADLMISDYCKEHKIRYTRYADDLSFSGDFDEKKLLHKVTETIEKLDFKINAAKTKLMTPDRRQTVTGIVVNEKPQVVFHKRNTLRQTMYYIKKFGIDEHREFKEIDQTNFLEHLLGQINFVLQINPKDSEFIHYKAFLIDLKKKQDAKNIKRGLLLM

SEQ ID NO: 2443 - protein, 353 aa, Flavobacterium soyangense
  source 1..353: note = Related to NZ_JADHEC010000014.1
MDFTKYKKDFTDEATKMGLSKRNIQDCLDYAEVLVSHNVSVIYNPSHLSALVGYKKEYLKKAALHTSYFYRNFEITKKNGKKRPISEPLPSLKEIQIWILKNILENIPVSPFAKAYKPKMRLIENLKFHKNQPKVFTLDLENFFPSIKIEAVEKIFLKLGYSKIVSELLAKLCTKDNALPQGAPTSPYLSNLVFRDADAIISEFCKQRKIKYTRYADDLSFSGDFDENELLDKVTETIKTLNLRINESKTKLMTPDMRQTVTGIVVNNKPQVEFNKRNELRQAMYYIKKFGFEEHRVYKEISQANYLEHLLGKINFVLQINPKDYEFSAYKALLIELKKKQNLKIKKELPLLL

SEQ ID NO: 2444 - protein, 353 aa, Flavobacterium sp.
  source 1..353: note = Related to PNNA01000057.1
MDFTKYKVDFTAEASKKGLSKNNVQRCLNYAEALISKGIAVIYNPSHLSALLGYKIEYLKKAALHPSYFYRDFEIAKKNGKKRAISEPLPSLKEIQVWILKDILEKVPVSPFAKAYKPKTSLTENLKFHRNQPKVFTLDLENFFPSIKIDLVEKVFLELGYSKMVANLLAKLCTRDNALPQGAPTSPYLSNLIFKEADAIIADYCKQQKIRYTRYADDLSFSGDFDENKLFEKVTNVVEKLDLRINKSKTRLMTPDKRQSVTGIVVNNKPQVAFKKRNALRQAMYYIKKFGIDEHRVYKEIKQANYLEHLLGKINFILQINPKDTEFMEYKTLLFDLKKKEDLKIRKPLPLLV

SEQ ID NO: 2445 - protein, 345 aa, Epilithonimonas hispanica
  source 1..345: note = Related to NZ_QNUG01000026.1
MKFEQYKEAFEKKASIFGYSEDNIQLCLIYAELLFKNNVPVIYNTSHLSALVGYNKEYLKNATKHTPSFYRDFQIKKKNGTLRTISEPLPSLKEIHIWILENILANVKLSPFAKAYRKKIRIFENLKFHKNQPIVYTIDLKDFFCSINTDAVEAIFKSLGYSLLISNLLAKLCTKDNSLPQGAPTSPCLSNIFFKETDNLIANYCLEQKIKYTRYADDLSFSGEFNENVLLEFVKNSIEKIGLKINEDKIRLMRTGSRQTVTGIVVNEKPQVVFYKRNKLRQDLFYIKKFGLAGHMSHRKIEKTNYLEHLLGQINFVLQINPDDKEFQGYMTYLIELKKLSEIRD

SEQ ID NO: 2446 - protein, 344 aa, unidentified
  source 1..344: note = Related to JACPUU010000004.1; note = Bacteroidetes bacterium
MNFERYKEAFEKAASNSGYSEENINYCLGYAEVLFRNNVPVIYNTSHLSALVGYKKEYLKKAVVHTPFFYRDFQIKKKNGKLRTISEPLPSLKEIQTWILDSILSNVSVSPFAKAYRKNVGLLENIKFHKNQPLVLTMDLTDFFTSVKTNSVEEIFRSLGYSDLIANLLAKLCTKDNSLPQGAPTSPALSNLFFKPVDERIAAYCKLNHIRYTRYADDLNFSGDFDAEKLKAYVKGAVESVGLMVNDSKTRVMKSGSRQLVTGIVVNEKPQVAFQKRNKLRQDLFYIRKFGLEDHMKRRKIKQANYLSHLLGQVNFIVHINPDDKEFQDYKTYLVGLKQTLGHA

SEQ ID NO: 2447 - protein, 345 aa, Zobellia uliginosa
  source 1..345: note = Related to NZ_FTOB01000002.1
MTFEQYKIAFEKAASNSGYSELNIKRCLDYAKPLIENNVPIIYNTSHFSSLVGYKKAYIKKAVYYTKSFYTDYAIKKKNGKTRTISEPLPSLKEIQTWILQNIFQQLKVSPYAKAYKRKVSIVENLKFHYNQPKVFTLDLKDFFPSIKIHSVEQIFKSLGYSDLISNLLAKLCTKENCLPQGAPTSPYISNLYFLPADNHISEFCKQHSIRYTRYADDLTFSGNFDENAVLNFVSEQIVKLELVIHPDKIKLMTPNQRQSVTGIVVNQKPQVVFHKRNKVRQELYYIKKFGLANHMERKGIKKRNYLEHLLGKVNFIIQINPTDTEFIEYKEYLIKLKSEISGQT

SEQ ID NO: 2448 - protein, 342 aa, Cecembia lonarensis
  source 1..342: note = Related to NZ_AMGM01000138.1
MKFEQYKQEFEIKASQSGYSAENITRCLNYAKPLIDKGFPVIYNTSHLSVLVGYRKDYIKRAVVYTPYFYRDFEIKKRNGKMRKISEPLPSLKEIQDWILVNILEVEKVSPFAKAYRKKVGLIENVKFHKNQPKVLTLDLKDFFPSIKRENVESIFRSFGYSALISNLLSKLCTRGGCLPQGAPTSPYLSNIFFKSADDIIIKYCLANDIRYTRYADDLSFSGNFDEKMLIELVDDTVRQLGLTLHPDKIKIMKPNERQTVTGIVVNEKPQVVFHKRNKLRQEMHYIIKFGIQDHMQRKNIKYRNYIEHLLGKINFVLHLNPKDTEFQKYKEHLIELKKQTI

SEQ ID NO: 2449 - protein, 342 aa, unidentified
  source 1..342: note = Related to NZ_CP083760.1; note = Candidatus Sulfidibacterium hydrothermale
MNFEQYKVIFEKEASNSGYSETNIRRCLTYAEILFANKVPVIYNTSHLSVLVGYNKRYLKRAVVYTPYFYRDFQIKKKNGKFRKISEPLPSLKEIQTWILENILSNIPISPFAKAYKKNTSIIENLRFHVNQPKVFTLDLENFFPSIKTDSIESIFLNVGYSKILSNLMAKLCTRDNSLPQGAPTSPYLSNIFFKPVDDIISRYCIDNKIRYTRYADDLSFSGDFDENSLMEFVSNVISELNLTINKNKTRLMTPNMRQTVTGIVVNKKTQVVFHKRNNLRKDIYYIKKYGLHNHMKFRNIKQSNYLEHLLGKVNFVLQLNPNDIEFKRYKNFLIELKNKIE

SEQ ID NO: 2450 - protein, 346 aa, Flavobacterium oncorhynchi
  source 1..346: note = Related to NZ_MUHA01000018.1
MDFDQYKTEFATLASSVGYTEQNIQKCLKYAKPLLDKKLPVIYNTSNLSNLVGYKKEYLKKAVRYTSSYYRDFEITKNNGGKRKISEPLPSLKEIQIWILDNILSQIEISPYAKAYRQNVTLIENLKFHKNQPKVFTIDLENFFTTIKQDSIQKIFGEMGYSRLISNLLSKLCTRDDSLPQGAPTSPYLSNIFFKSLDIEITKYCNENKIRYTRYADDLSFSGDFDEKILLEFVTEKITKAKLVINPDKVKLMKKNTRQIVTGIVVNEKMQVVFHKRNKIRQDMFYIKKYGLVNHMEHLKIKKNNYLEHLIGKINFILHINPNDKEFIDYKSFLNDLKNKVNKTNA

SEQ ID NO: 2451 - protein, 343 aa, unidentified
  source 1..343: note = Related to nan
MTFTQYKRKFTAEAFKSGYSQQNIDRCLVYAERLFSNKVPVIYNTSHLSGLVGYRKSYLKKAALFTTYFYRDFEILKKNGKKRQISEPLPSLKEIQLWILENILYKVKISKFAKAYIPKVNLKQNLKYHVGKPLILAIDIENFFPSIRQNNVEKIFQELGYSNLISNLLAKLCCRGESLPQGAPTSPYLSNIYLKPLDDDVSEYCLERNIHYTRYADDLTFSGMFNDKELCKYLHIEIEKLNLKINNDKTKVMTPNTRQTVTGIVVNEKPQVCFVKRNGIRQTIYYIKKFGLENHMDRIKIKKQNYLKHLLGQVNFVLFINPSDKEFIEYKNYLRTLIIHPLS

SEQ ID NO: 2452 - protein, 340 aa, Flavobacterium sp.
  source 1..340: note = Related to MQTN01000055.1
MSFEHYQKEFTSKAVNSGYSEQNIFDCLEYAKKLISNNVPVIYNTTNLSALVGYKKSYLKRAAIYTPYFYREFDILKKNGKKRKISEPLPSLKEIQLWILNNILYKVEVSKFAKAYIPKVSIKQNLVFHKKQAKVLTIDLENFFPSIKIDQVIVIFKSLGYSNIISSLIAKLCCLNDCLPQGASTSPYLSNIFLRNSDDIISKYCLGRNIRYTRYADDMTFSGDFDEVELLKFVRTEIKTLNLQVNDEKTKLMLPNSRQVVTGIVVNNKPQVEFNKRNKIRQEMYYIIKFGLENHMNRKNIKKANYVPHLLGKINFILQINPLDNEFIEYKKHLKALTLV

SEQ ID NO: 2453 - protein, 347 aa, unidentified
  source 1..347: note = Related to JADJAG010000004.1; note = Chitinophagaceae bacterium
MNFEQYSLAFSREASQSGYTEQSIIRCLKYAEKLFSNKVPVIYNTSHLSVLVGYRKNYLKKASFYTPYFYRNFEILKKNGSKRIISEPLPSLKEIQIWILNNILYNIEVSRFAKAYIRKSHIKQNLVFHKGQLQVLKLDIENFFTSIKLSSIQDIFMSVWYSQLISNLLAKLCCHRGSLPQGGPTSPYLSNLYLKSVDESIYHYCMQKEIRFTRYADDMTFSGVFEEKGLIKFVTEELRILDLKINEKKTKMMSRSSRQLVTGVVVNEKLQVPFYKRNKLRQDLYYIKKFGLENHMQRRKITKSSYIEHLLGKINFILSINQEDQEFLSYKNYLIELKRKSREIRPE

SEQ ID NO: 2454 - protein, 343 aa, Citrobacter freundii
  source 1..343: note = Related to QFQQ01000035.1
MSFIVYEKLFTAKAVKAGFSQDNIQKCLAYAKPLIDKGLPVIYNTANLCALVGYNKNYLKRAALHTQFFYRKFFIRKRNGKARLIVEPLPSLKEIQLWILHNILYEVKASRYAKAYIKGRNIVDNVRYHREKDIVLRIDIKDFFPSIGFSKIQLLFEQLGYSSNISNLLTKLCCVYETLPQGAPTSPYLSNLVLKNFDKRLAEFCVAKNIRYTRYADDLTFSFAKTIDPNEVRLFVENELSKEGFSANPDKTQILTPNKRQIVTGIVVNKVLQIPKIDRKLIRQEMYYISKFGLRDHMKKTQNTKASYLLHLLGKTNYALQINPEDKEMKKYKAIIWQMLNQE

SEQ ID NO: 2455 - protein, 349 aa, Sphingobacterium spiritivorum
  source 1..349: note = Related to NZ_UGYW01000002.1
MDFLEYKVKFVKKALEAGYSEVEIDQYLTYAKVLLDKKLPLIYNTSHLAALTGYSTRYITRAALYPKSFYRTFKIKKKNGKMREINEPLPSLKEIQLWINKNILLNIKPNKFAKAYIKKTNILDNVKYHKRKKYVFNLDLVNFFPSISTKTVEMFFKKLGYSDNLSNLLAKLCCFGDGLAQGAPTSPALSNHILYEFDDLLGSFAVENNLRYTRYADDLTFSFNDEFDVSIIEEKVINTLDKTVLYSKLTVNREKTKLLRQNDRQIVTGVVVNDKTQVPSSYRKQIRQEIYYIRKFGLSNHLNRLNEVRYNYLYHLLGKINFVLLVNSEDKEMKEYRNAIKMLISNRPT

SEQ ID NO: 2456 - protein, 362 aa, Pedobacter sp.
  source 1..362: note = Related to NZ_JAFEWD010000003.1
MFKGPARKLAGLNEINMTAAQYESAFRKKALVAGYSEENIQKCLSYAIPLLSKGFPIIYNTTNFAGLVGYNKLYLKKAALFTASYYRTFKVKKKKKKDYREIKEPLPSLKEIQLWILYNILYQERPSKYAKAYIQKRNLRENVKFHVGKNKVLNLDFKHFFPSIKQDAIEKIFLSFGYSSNISNLLSKLCCLDGSLPQGAPTSPYLSNLYLKTFDEDVFGFCKNKHIRYTRYADDMTFSGDFNELEVINFIKEKIEDSPLEINDEKTRVMRRNQRQVVTGILVNDKTQVSKKYRNNIRLEMYYISKYGIAEHLAKSKNSRANYLSHLLGKIEYTLHFNPDDVEFLEYRSKLKQLLPKKQDAE

SEQ ID NO: 2457 - protein, 344 aa, Mucilaginibacter sp.
  source 1..344: note = Related to JACHBZ010000008.1
MNFQQYSEAFRKKALAATFSEDEIIYCLDYAKPIIEKGLPVVYNTTHLAALVGYRKVYLKKAVLYTSYFYRRFVISKRNGKPRTISEPLPSLKEIQIWILKNILENLPVSKFAKAYLAKKDVRDNVRYHIGKPIVLKLDIKDFFGSITQQSVQQIFLDANYSSNIANLFSKLCTLRGTLPQGASTSPYLSNLFMNKFDEVVGGYAIKEKTRYTRYADDLTFSGNFNPDNVIEFVQTEIEKIGLRLNLSKTAVMRQNSRQFVTGIVVNEKMQVPKKDRQNLRLEMHFIQKFGLENHLRRVKNKKANYLPHIIGRINYFITINPDDEEFVSYKKYLIETYVNENLT

SEQ ID NO: 2458 - protein, 355 aa, Pedobacter zeae
  source 1..355: note = Related to BMHZ01000001.1
MGPEISFWPHKKMNFSQYEKTFRIKATKIGFSEEEITACLNYAEPLISNKLPVIYSTANLAALVGYKTNYLKRAVKFTKYFYRDFQIKKKDGKLRTLYEPLPSLKEIQSWVLKNILSEVKPNRFAKAYIKNKSLIENVKYHKGREGVLTLDILDFFGSIKTAHVAGIFSEMGYSANIASLLAKLCTYDGYLPQGAPTSPYLSNLYLKNFDDIVSKYCSENNIKYTRYADDMTFSGKEEDLNITSFIEVQLFNIGLYLNSDKSKLMKRNEKQVVTGIVVNDKLQVPREDRDFIRNEVHFLTKFGLNDHLNRTLNKKANYIEHLLGKINFALHINPDDLKMKRYKAKVIEYAKSIEE

SEQ ID NO: 2459 - protein, 343 aa, Olivibacter domesticus
  source 1..343: note = Related to NZ_FOAF01000001.1
MNFAQYEKKFRLKALKSGFSEDNIVACLNYAKPILEKGLPVIYNTANLAALVGYRTTYLKRAAKFTKFYYRSFTIKKSNGKLRTLMEPLPSLKEIQTWILENMLSEIPVSKFAKAYVKHRSLKENVKHHNNKEGVLTCDIATFYDSVRFKDIEKIFNELGYSEVMSNLLAKLTTFNGSLPQGAPTSPYLSNLVLREFDQKISDYCINNNIRYTRYADDLTFSGEVKSLKLKNLVEAELNKLGLELNPDKTKLRKFSQRQMVTGIVVNEKTQIPKFERNFIRNEVHFLTRFGLKDHLRKTKNKRENYLLHLLGKINFALHINPADKKMESYRSQVQKIIQTDAG

SEQ ID NO: 2460 - protein, 346 aa, Chitinophaga sp.
  source 1..346: note = Related to QGTG01000019.1
MTFPQYEKKFRVKAIKSGFSEYEISACLLYAKPLIESNLPVIFNTANFGALVGYKTNYLKRAVKYTPYFYRAFTIRKKNGGSRELVEPLPSLKEIQTWILENILREVKVSKYAKAYVKSRTLLENVRYHKGREAVLTLDIENFFGSITLLHIEHIFLGLGYSSNISNLLAKLCTYEGVLAQGAPTSPYLSNLYLRRFDEIISKFCNQNDIRYTRYADDLTFSGQKDALDIVEFIRKTLQKFSLKLNKDKEKLMVRNQRQVVTGIVVNEKLQIPKAARNFIRNEIFFIKKFGLDSHLEKTDNKKSHYLEHLIGKINFALHINPNDLKMQSYKSIVLKIYQSRDEDKI

SEQ ID NO: 2461 - protein, 339 aa, Zhouia spongiae
  source 1..339: note = Related to NZ_CP094326.1
MTNQQLYAKKFTEKAIENGFSSDYIEKCLSYASPLLENNLPVVYNINHLSGLVGYNVSYLKRAVKFPKYFYREFEIEKSNGKKRKLHEPLPSLKEIQLWILDEILYKLKVSRYAKAYVPKRSIKEHTIYHTDEPFVLTLDIKNFFNSIQFDSVESLFKKIGYSEKMANLFTKLCFRDDELPQGAPTSPYISNLILKDFDFAVSKYCMEHNIKYTRYADDLAFSGDLNAEEIEKLIKDELSKIGMELNDEKRKLMKPNQPQLISGIIVNKKAQLPKKIRNSLRNEMYYIKKFGLPSHLERTNQKKPNYLKHLMGRINYILQINPRDKEFIEYRKHLHELK

SEQ ID NO: 2462 - protein, 339 aa, Pareuzebyella sediminis
  source 1..339: note = Related to NZ_VTZS01000003.1
MNNQQLYVRKFTEKASENGFSSDYIKKCLSYANPLLEKNLPVVYNINHLSGLVGYSVSYLKRAVKFQKYFYREFQIEKRNEQKRTLYEPLPSLKEIQLWILDEILYKLKVSRYAKAYVPKRSIKEHTMYHTDEPFVLTLDIKEFFKSIKFESVESLFRNIGYSEKMSNLFTKLCFRENELPQGAPTSPCISNLILKDFDNAISGYCIKNEVKFTRYADDLAFSGNLNAEEIEKLVKDELSKIGLVLNDEKRRLMKPNQPQLISGIIVNKKPQLPKKVRNSLRNEIYYIKKFGLTDHLERTNQKKPNYLKHLMGRINYVLQINPRDEEFIEYKKYLHELR

SEQ ID NO: 2463 - protein, 342 aa, Aquimarina agarivorans
  source 1..342: note = Related to NZ_AFPB01000170.1
MNNQQLYLEKFTQKALEHGFSSEYINKCLSYANPLLENNLPVIYSINHLSGLVGYSVSYLKRAVKFQKYFYREFEIKKRNGKNRTLYEPLPSLKEIQLWILDEILYKLKVSRYAKAYVPKRSIKEHTIYHTNEPLVLTLDIKEFFNSIKFESVEYLFFSIGYSRKMSNLFAKLCFRENELPQGAPTSPYISNLILKDFDTEVSKYCMKNKIKFTRYADDLAFSGNLNAEEIKKLVKKELSKIGLELNEEKTKLMKPNQPQIISGIVVNKKAQLPKKIRNSLRNEMYYIKNYGLASHIERTNQKKSNYLKHLMGKVNYVLQINPRDVEFKKYKEYLQEQYKSS

SEQ ID NO: 2464 - protein, 339 aa, Bizionia argentinensis
  source 1..339: note = Related to NZ_AFXZ01000051.1
MNDQQIYTKKFTEKALENGFSSDYIKKCLNYAKPILANNLPVIYNIDHFSNLVGYNVSYLKRAVKFQKFFYRKFEIDKRNGKKRILNEPLPSLKEIQLWILNEILYKNKVSRYAKAYVPNRSIKEHTIYHTDEKFVLTLDIKEFFKNIKFEFVESLFKSMGYSRKVSNLLTKLCYLEKELPQGASTSPYISNLILKDFDNVISNYCISNKIKYTRYADDLAFSGNLNTDEIGILVNKELSKIGLELNDEKTKLMKPNQPQLISGIIVNKKAQLPKKIRNSLRNDMFFIKKFGLVNHMERTNQTKSNYLKHLIGRINYVLQINPRDKEFIEYRKYLYDLK

SEQ ID NO: 2465 - protein, 344 aa, unidentified
  source 1..344: note = Related to NZTP01000067.1; note = Proposed Altibacter sp.
MEKAFDKYKKQFVTKARKNGFSEDNINKCLDYSKPLITKDLPVIYNTTHLSQLVGYNLIYLRRAARFTKYFYRSFKVLKNDKTYRTISEPLPSLKEIQIWILKEILYKNKVSKYAKGYVPKRSIKDHVRYHTKESKVLTLDIKNFFDSIKIDYTLKMFIQMGYSKSVSNLLTQLCYLEKGLPQGAPTSPYITNVLLYEFDESIAKYCRQKELKYTRYADDLAFSGQIKKTELIKLVRSELRKIGLKLNNDKIILMKRNQRQTISGIVVNDKTQVPKYKRNSIRNEMFYIKKFGLNNHQKRTNQTRDNYLKHLIGKINYILMLNPKDKEFLDYKKYLYEQNKASR

SEQ ID NO: 2466 - protein, 349 aa, Tenacibaculum sp.
  source 1..349: note = Related to JABXHT010000059.1
MNITFNKYKKLFTEKAINSGYSEDNIVKCLSYAEPIINKGFPVIYNTSHLSSLVGYNKNYLKRAVNHTKYFYRKFEISKKDGTKRVLLEPLPSLKEIQNWILNEILYKHKVSRYAKGYIPNRSIKDHVRYHTKEEKVLTLDIKKFFDNVSFELVEKIFIHIGYSKIISNLLTKLCFLDGKLPQGAPTSPYISNIILFEFDEKISKYCSNNNLKFTRYADDLAFSGKIKKTELVKLVRSELKALGLKLNNEKIKLMKRNQPQIISGIIVNEKAQVPKRTRNQIRNEMFYIKRFGIDSHMQKTNQTKSKLAYLKHLIGKINYLLTINPKDNEFIEYKNILHKEIKPAGNNV

SEQ ID NO: 2467 - protein, 352 aa, unidentified
  source 1..352: note = Related to PAVO01000044.1; note = Crocinitomicaceae bacterium
MDYNKYKTQFSAKAKNAGYSEDNISRCLAYAKPILEEGYPVIFNTTHLSSLVGYNKNYLKRAVAYQKYFYREFSITKKNGELRTLREPLPSLKEIQSWILNNILYKHEVSRYAKGYIPKRSIKDHAKYHTNELKVLTLDIKSFFDSISFGQVEAIFSNIGYSNIVSNLLAKLCFLEKNLPQGAPTSPCISNILLLEFDNVISAYCSEKKIKYTRYADDLAFSGDVKKTALIKLVRSELKKLGLRLNNQKIKLMKQSQPQIISGIIVNKKVQVPKKNRNKIRNEMFYIKKFGFQSHMEKTKQTKSNYLKHLIGRINYLLTLNPKDTEFLEYKKILYQLESTADNSTQMSNRPS

SEQ ID NO: 2468 - protein, 360 aa, Kaistella gelatinilytica
  source 1..360: note = Related to NZ_JADPVI010000001.1
MKDFTKYKKKFREKAEDIGFSEDNIVKCLNYSEKLSNNNLPIIYDSSHLAGLVGYHRSYLTRALISTEFFYRTFKIPKKNGKIRIISEPLPSLKEIQYFILNEILYKQKVSKYCKSYIPKRKFREYLRFHTDEKQVLTLDIKDFFPSIKFNHIHEYFLNLGFAKDVSLYLACLSTYTHKENDFIEFKRFLPQGAPTSPYLSNLILTPFDDKVAEFCFDKKIKFTRYADDMAFSGEYIDQEELLIFIKNELNVYGLELNEEKINFMKQNVPQIISGVIVNKKLQLPKAQRNEIRKVMYFINEFGIDNHLEKTNETREYYLSHLLGRIQYALNLNPDDSAMKEYKNQIIEIKNEQNLKFLIE

SEQ ID NO: 2469 - protein, 358 aa, Chryseobacterium endalhagicum
  source 1..358: note = Related to NZ_JAELVM010000001.1
MKDFESYKKIFREKALNSAYSEENIIKCLKYSENLVNNNLPIIYNSYHLSGLVGYQHDYLSRAILSTEFFYRHFKIEKKNGKSRKISEPLPSLKEIQYFILKEILYKQKVSKFCKSYIPKKKFKEYLRFHSNEKEVLTLDIKDFFPSIKFNLIHNYFSKIGYSKDVALYLSCLCTYTDVNVEKKNNTSIRYLPQGAPTSPYLSNLVLIDFDNDVANYCSEKKLKYTRYADDMAFSGDLIVKNELVEFVNAQLKKYNLELNDEKINYMKQNVPQIISGVVVNKKLQLPRKERNDIRKVMYFIIKYGIESHIEKTQETREYYISYLLGRIQYALNLNPNDAELKKYKDFLVELKKNILIL

SEQ ID NO: 2470 - protein, 359 aa, Flavobacterium covae
  source 1..359: note = Related to CP013992.1
MDLELYKRHFREKALNSGFSEETIIKCLKYSEVLASKNLPVIYNSYHLAGLVGYKHSYLSRAIISTDFFYRKFKIQKKNGKYREISEPLPSLKEIQYFILKEILYKQKVSKYCKSYIPKKKFREYLKYHSNEKQVLTLDIKDFFPSIKYEFIYTYFMNLGYARDVSYFLATLCSYVPKAPKGEKTDLSKRFLPQGAPTSPYLSNLILSNFDDLVAKYCNENKLKYTRYADDMTFSGDIIQEDELISFVQSELNKIGLKLNIDKINFMKQNVPQIVSGVIINKKVQLTKEDRNKIRNVMYYISKFGLEDHLNRTNEKRDYFVFHLLGKIQYGLSLNPNDHELKRYKEILIEEKKKYYSKS

SEQ ID NO: 2471 - protein, 358 aa, Moheibacter sediminis
  source 1..358: note = Related to NZ_FWXS01000003.1
MVDFELYKKHFREKALNIGFSEEIIIKCLNYSENLVSKKLPIIYNSYHLAGLVGYQHSYLSRAINSTEFFYRKFKIQKKNGNFREISEPLPSLKEIQYFILEEILYKQKVSRYCKSYTPKRKFREYLKYHTNEKQILTLDIEDFFPSIKFNNIFNYFLALGYAKDVSYYLSNLCTYVTKGKKGQRVNISNRYLPQGAPTSPYLSNLILSEFDDSVAKFCIQNQLKYTRYADDMTFSGGNINKEDLITFIIVELNKIGLRLNIEKTNFMKQNVPQIISGVIVNKKVQLPKAERNKIRNSMYYISKFGLEDHLKRTNEERNYYVFHLIGKIQYGLSLNPEDLELKRYKEILIEEKKKYYS

SEQ ID NO: 2472 - protein, 358 aa, Elizabethkingia miricola
  source 1..358: note = Related to CP040516.1
MKDFELYKKQFREKALNNSFSEDIIQKCLNYSENLFSKNLPIIYNSYHLAGLVGYEHSYLTRAIISTDFFYRKFNIVKKNGLLREISEPLPSLKEIQYFILKEILYKQKVSRFCKSYIPKRKFREYLKYHSNEKQVLTLDIENFFPSIKYKHINNYFTELGYAEDVSSFLASLCTYSISKKKKEKVELNERFLPQGAPTSPYLSNLILMKFDDTIANYCKEKSIKYTRYADDMAFSGSDFDKEILIKLVQSELNKVDLKLNKSKINFMKQNVPQVISGVLVNKKIQLPKEIRNEIRNTMYFITKYGYEDHIKRTNETRDYYLLHLLGRIQYALNLNPNDSELIKYKSVLLEYKKKYYN

SEQ ID NO: 2473 - protein, 353 aa, Chryseobacterium sp.
  source 1..353: note = Related to NZ_CP075682.1
MEKTNSYKKKFTELAISSGYSEEYIEKCLKYSEPLLNKNLPVIYSINHLSALVGYSQSYLTRSMISTSFFYRHFKIKKRNGNLRSISEPLPSLKEIQNFILKEILYTQKVSKYCKSYIPKKSIIEYLKYHVNEKEILTLDLQDFFPSIKFELIKNFFLQLGYSDEVSYYLSTLTTYCDKQEKFDDSQRYLPQGASTSPYLSNLILKDFDNNIGKFCNNKIKYTRYADDLAFSGDKIPSEDIIDFVNKELEKLGLKLNPKKVNFMKQNIPQIISGVVVNNKMQLPKQQRNEIRQKMYFINRFGIESHLERIQEKRENYIPHLLGRIQYGLNLNPDDLELKKYKKDLQEIYNKVK

SEQ ID NO: 2474 - protein, 343 aa, Tenacibaculum maritimum
  source 1..343: note = Related to CACSGR010000184.1
MKTFEIYKQEFTKKALDAGYSADELNKCLIYAEPLYNRRLPIIYNLSHFSAYVGYNAKYIRRAIKTDSTKFFYREYSILKKNGSLRVINEPLPSLKEIQKWILDNALNNMAISAYAKAYTFNRSIKDHVKYHKNQKSLLTLDIENFFNNITADKVEKLFINKGYSLLVSNLMSKICTLKNCLPQGAPTSPRISNILMLPFDDKISKYCKTKGNIKYTRYADDLAFSGEINKEEIVELVTNELKELGLTLNIDKTIEKKQSQQQIISGIVVNKKIQVPRKKRDELRQSMYYIEKFGLENHLVKIKCSKSNYLKHLLGIANYIIFINPKDEKTIEIRTKLFKMIE

SEQ ID NO: 2475 - protein, 349 aa, Polaribacter sp.
  source 1..349: note = Related to NZ_CP058984.1
MNTFNIYKKEFTKKALESGYSADELNKCLVYAEPLFNKRLPIIYNLSHFAAHVGYSTKFIRRAIKTNGTEFFYRKYSIPKKNGSSRVINEPLPSLKEIQKWVLDNILNNMPISAYAKAYTFNRSIKDHVKYHENQNVVLTMDIENFFNNITSDKVERLFIDKGYSPLVSNLLSRICTLNNSLPQGAPTSPRISNILMLPFDNEIAKYCKPKFIGGKKVQVKYTRYADDIAFSGEINKAEFVELVSNELQKLDLSLNEDKTIEKKRNQQQIISGIIVNQKIQVPRKKRDELKQAMYYIEKFGLENHLARIKCTKANYVSHLLGIANYIVFINPKDKKTLEIRTKLFEMKD

SEQ ID NO: 2476 - protein, 344 aa, Nonlabens ulvanivorans
  source 1..344: note = Related to NZ_JPJI01000026.1
MKNFESYKSEFTKRAYNEGFSSDEISKCLNYSETLLKKNLPIIFNSSHLSALVGYNKDYLNRVSKVNKTSYFYRDYYIPKKNGEKRLIREPLPSLKQIQRWLLDNLFIKLPISPYAKAYRAKKGIRDHVRYHKKEEVVITMDIEKFFDNLESGLIVNILLSKGYSFQVANLITKICTLNDVLPQGAPTSPAISNILLYEFDNEISKYTNSKGLKYTRYADDLAFSGSIQDVDTLIKIVKENLAKINLKINHSKTRVMSKKARQIISGIVVNDKIQVPRKDRDDLRQAMYYIEKFSLEEHLKKIDCNKANYIEHLLGKANYMLKINPKDEKIKVIYNKLKVMKTG

SEQ ID NO: 2477 - protein, 351 aa, Trichodesmium erythraeum
  source 1..351: note = Related to JAGGDU010000099.1
MRFSSYEKEFRRIAEKRNYPSSVIENCLKYAKVLLDNGVPVIYNTTHLSNLIGYTKSYIKRATHHTPYFYRKYSILKKNGSKRFLSEPLPSLKEIQIFILTNILSSIKVSRYAKAYVSGRTLIDHLKFHKGQKCVLTLDIENFFSSISTESIEKIFLEIGYTDIVSNLLARLCTLENSLPQGAPTSPYLSNLYLKGFDQELAKIVRPMGINYTRYADDMAFSGDTIDKEAIIEHVSRMLSGLGLVLNPDKTLLMVKPSRQVISGIVVNEKIQVPRKIRRSIRQSVYYIRKFGFESHKQKTKIYKRNYDKHLLGLINYILFINPKDQEFQSYKEELEKIIKDADNNGYTQAG

SEQ ID NO: 2478 - protein, 342 aa, Saprospira grandis
  source 1..342: note = Related to JH719942.1
MTFSSYEKRFTDLAKKRNYSSEVITKCLSYAEPLIRKKVPVIYNIAHFSSHVGYTVKYIKRAIKHTDYFYRHYEISKKNGGKRKISEPLPSLQEIQNFILTKILYKQKVSRYSKAYVPGRSILMHAKYHVNNHTVLTIDLKDFFSSIRTHHIEAIFKEIGYSQIVSNMLAKICTLNGGLPQGASTSPALSNIFFSKIDELIAKEVRPEINYTRYADDLAFSGETIDKEVLVAKVQSILEPYELKINASKTKLMTQHQQQIITGIVVNKKLQLPSKDRRKIRQELYYIKKYNMASHMSKKNIHNKKYAARLLGKINFALLLNPKDKEFIEYKKVMHEIIQHTI

SEQ ID NO: 2479 - protein, 338 aa, Ulvibacterium marinum
  source 1..338: note = Related to NZ_RBCJ01000001.1
MEFEIYKKKFEAKALKTGLTDLEITDCLNYALPLIEKGLPVIYNTSHLSKLVGLRKTYVKRAAIYTKSYYRNFTIAKRSGMPREISEPLPNLKIIHKFILEEILENIKVSAFAKAYKKKSNILENTRYHINQNKVVTLDIENFFPSITTDKVENIFRGLGYSDLISNLLSKLCTLNNSLPQGAPTSPYLSNLFMKGFDSKLADFCLSKKIRYTRYADDITLSGDFNEKEAIDYISVLLKELDLDLNCKTKIMKRGQQQIVTGIVVNEKSQVPRKERLKLRQEIYHIKTKDLDSHKKFKQITQRNYLYHLYGKISYVVFVNPKDEEFIEYKKFLKTLMN

SEQ ID NO: 2480 - protein, 339 aa, Chryseobacterium jejuense
  source 1..339: note = Related to JAGIPR010000013.1
MEYNIYKEKFTKKAIKEGLTETEVNECLIYAKPLIENGLPIIFNTSHFSKLVGVRKTYIKRAAIYSRSYYRSFTIAKRNGNPREISEPLPNLKLIQNYILSEILYNVKISAFAKAYKKKTTIIENTRYHVNQKKLVTLDIRNFFSSIKKEQVYIIFNKLGYSEIISDLFSKLCTLNDQLPQGAPTSPFLSNIFMSDFDMFVADYCTSKNIRYTRYADDISLSGDFDEKEIIELIIERLKEKGLELNNEKTKIMLRNQRQIVTGIVVNEKNQVPRKERLKLRQEVFHIRTKTLEVHKEIKNIKNRNYLYHLYGKISYVVFINPNDKEFIEYKEYIRTLFK

SEQ ID NO: 2481 - protein, 343 aa, Chryseobacterium scophthalmum
  source 1..343: note = Related to NZ_FSRQ01000001.1
MDFTTYQKRFTEKATRQKMSDSDIADCLEYANVLFKNNVVTVYNTSHLSKLVGIRKAYIKRASIYTKSYYRSFEIAKRNGNPRTISEPLPNLKVIQDFILEEILNKVTVSAFAKAYKKNSSIKENVRYHVDQKIVLSLDIQDFFSSVSIEMVEKVFLDLGYSELLSDLFSKLCTLNKCLPQGASTSPYISNIILKGFDKKIADYCLDQNIRYTRYADDITLSGDFDTGTAITLIEDELLKLNLSINRNKTKVMTRNMRQVVTGIVVNEKIQVSGKERNKLRQNIFYLKKFGLLDYIEHEKIKFNNYLYHLYGKLSYIVYINPKDQEFIDYKIYVKDLIKKHYY

SEQ ID NO: 2482 - protein, 345 aa, Kordia periserrulae
  source 1..345: note = Related to NZ_QBKT01000004.1
MSFEIYTRKFREKAENLGYSESNIVKCIDYASPIYEKGLPIIYNLTHLSRLVGYEKNYIIQAAIASKHSEAYYRYHKVLKKNGDVRKIKEPLPNLKAIQYWLLHNILEKIEPSAYAKAYVKKRGLKQNIRFHKGQKKVLSIDIKDFFPSITFEKVENIFLTIGYSVELSNYLAKLCCLKEKLPQGAPTSPYISNLIFKNIDEIIAVYCKNLNIRYTRYADDLTFSGDFDETSLLNYINEIMTENNFILNKDKTKLMLYSERQIVTGIVVNDKPQLDKETRKEIRQHLYYIKKYGLESHMERNNINSNTFLTNLMGKISFGLYLNPKDEHLRDSINYLSQLYKQIM

SEQ ID NO: 2483 - protein, 345 aa, Maribacter caenipelagi
  source 1..345: note = Related to NZ_SNZW01000015.1
MSFEVYAKKFRVNAENLGYSEENVVKCINYARPIYENGLPIIYNLTHLSKLVGFEKNYIIQAAVVSKHSEAYYRYHKVLKKNGDFRKIKEPLPNLKAIQHWILANILEEIEPSVYAKAYVKKRGLKQNIRFHKAQKKVFTIDIKNFFPSININQIEKIFIETGYSIELSNYLAKLCCLKNTLPQGAPTSPYISNLILKDIDNSIAIFCKELKVRYTRYADDLTFSGDFEEESLYEFVNALLEKNGFELNKEKTRLMLSSQRQIVTGIIVNSKPQLDKETRKLIRQEIYYIKKFGLESHMERAKLSGSLYLNQLMGKISFGLYLNPSDMKLRSYIKYLAGLYKELY

SEQ ID NO: 2484 - protein, 347 aa, Chryseobacterium aquifrigidense
  source 1..347: note = Related to NZ_VFPD01000001.1
MDYKTYSERFKIEAYNVGYSESSVALCLNYAKILFDKNLPVIYNVTHLSNLTGIKKNYIIQAATVSKHSHAYYRDFSIAKKKKGERRFISEPLPNLKQIQYWILNNILYQVKVSPYAKAYIKNFGLKQNLRFHKNKKKVLNLDIENFFSAIKFEKVEKVFLNLGYSNTVSKTLSKLCTLKEQLPQGSPTSPYLSNIIMMSFDTEVSLFAKNLNISYTRYADDLTFSGDFDENVVEDFIETKLLEIGFTLNRNKKKLMYDSQRQIVTGVVVNKKIQLSKEQRKKLRQIHYYIKRFGIESHLERQKLSKKKYLSKILGQINFGLYLNKQDKNLLEMKACILKYKKEFDL

SEQ ID NO: 2485 - protein, 518 aa, Prevotella pallens
  source 1..518: note = Related to JABZUV010000100.1
MDFKEYKQLFSEKAKNKGRDLNYIDSCLAYAERLYDKQVPVIYDITHLSLLVGVKEDYIRRSITYTKKYYWSFDIPKSNNKKRTINEPLPLLKEIQLWILHNILEKQATHPCAKAYVPHKKLKENAKYHTRQKIVISFDVQNFFPSINLEGVSKIFNIIGYSKKNSYLLAKLCCLDDKLPQGAPTSPYLSNLYMFSFDENLICYCRKNGMIYTRYADDITISSQKDVDINALTKLVEEELSKKGLSLNISKSKVMHKSDSQVVTGIVVNERMRLPKKKRQKLRQEMYYLITRGLEDHINFIKCKKRNYLKHLAGKVMYALHLEPSNTEFKDYYIFLQRLINPDFKRKKKRLILDSNVILNEVLIEKLPEDYTTYIANNNSIKKIKNLDLCYGPNLCHANSLLFAIMLKEQYPTIEVNISEGIVVRTNGFAYTHFWVHILHNNEQEFCDVTRDCFEKKILQAKERRYYKVKNHTIDEMTQRMASNNVFLDSKEYLSLYYKKYPKYFELYNTLNIMLHQQ

SEQ ID NO: 2486 - protein, 468 aa, Prevotella sp.
  source 1..468: note = Related to NZ_HE999448.1
MDFKEYKRLFTEKAQNNGRDSDYINLCLSYAEKLYNQQVPVIYDIKHLSLLVGVKEDYIRRAITYTNKYYWNFHIPKLNGGKRTINEPLPLLKDIQLWILHHILEKQETHPCAKAYVPQRKLKENAKYHTRQKLVISFDVHNFFPSIDLEAISKIFINIGYSKKNSFLLAKLCCLNNELPQGAPTSPYLSNLYMFSFDDNIMRYCREKGIIYTRYADDITFSSKSDINIKTLTEFIKHELRNKKLSLNPAKSKVMYKSDAQIVTGIVVNERMRLPKKKRQELRQEMYYVITRGLENHINFIKCNKKNYLKHLAGKIMYALYLEPSNTEFQDYHTFLQRLMNPNYKRKKKKLALDSNIILNEVLIEQLSENYITCIENDNSIQRVGSLELHYGLNLCHANSLLFAIMLKEQYPTVKVNISEGIVVLTNGFAYTHFWIHVVQNNKEEFCDVTRDCFEKKYYKQKNVDIIR

SEQ ID NO: 2487 - protein, 345 aa, Prevotella loescheii
  source 1..345: note = Related to JADYUK010000009.1
MEFDKYSFQFAQLAILNGYTTEYVDSCLKYAKKLADNNLPIIYDSEHFSELVGFKLSYIKTVVEYPKSFYWMYKIKKHSGGIRKINAPLPNLKQIQYWILENILNTQKVSPYAKAFVQGKKLKENVRFHRNRKIVIKFDVHDFFGSIRENSIKAIFRSLGYINPVADLLAMLCCLDHVLPQGAPTSPYLSNLYMLDFDTHIAQYCKEHTIYYTRYADDLTFSSDSNIDEYELTSLVKKELNIIGLYLNNDKTKVMPRNTRQVVTGIVVNQKLQVDKDKRRKIRQEVFYIKKWGLESHLQKIGCSKKNYLKHLLGEMTFMLSLTPQNLQLKADIEYIRKLWEENLM

SEQ ID NO: 2488 - protein, 354 aa, Bacteroides sp.
  source 1..354: note = Related to JACOOE010000015.1
MTFDEYRIKFSTKAYQYGYSEVYVSKCLNYAARLFDKNLPVIYDFEHFCRLVGYSSSYIKRAVNSPRSFYYDYNVPKKNGNGVRLISQPFPSLKEIQYWILNNILYKLEVSPYAKAYVPHRKFKDNLRFHKNKKFVITYDVANFFPSIKKEKIEAYFIELGYTELLSNLFSKLVTHRGYLPQGAPTSPYLSNLYMKQFDNKIAAYCKCRKIFYTRYADDLTFSSNEDVDINDLFNTIKIELSILNLELNQDKTHIMNSSSRQIVTGVVVNKRLQVPKEFRSEIRKECYYINKFGLSEHLARIKQTNEKYYIKGLLGRINYVLQIDPTNKEFKSYKKEMQRFVIRDINLDDYDVL

SEQ ID NO: 2489 - protein, 342 aa, unidentified
  source 1..342: note = Related to SEFL01000207.1; note = Sphingobacteriales bacterium
MNYNDYKREFTEKALRSGFSYEVLQACLQYAEKLFSNDLPVIFNLTHFASLVGYKQTYIQRAIVFTHHFYRKFEISKANGSQRKISEPLPSLKEIQGWILKHILYKLKVSRFAKAYSPGISIKQNLQYHRDQPLVLSIDVKDFFTSLTRDKVEQVFKMAGYSSSLSNLFSKICTLDGRLPQGASTSPYLSNLILYKFDEEIGSFCKQQSIRYTRYADDITISGNFDPDLLRQKVQIELDKLSLVVNEKKVKVMKAGVRQVVTGVVVNKKIQVPRNKRKEIRQAIYYITKFGLQGHLSRESVNRRNYINHLLGQVSFVLFLNPLDKEFIGYKDFLVMQKQQDS

SEQ ID NO: 2490 - protein, 341 aa, Mucilaginibacter gotjawali
  source 1..341: note = Related to JACHWX010000002.1
MELELYKRRFTEKALATGYSAEKIERCLKYAEKLLSYDLPVIYNLEHLCALVGYHSSYLLRAVDHPNFFYRSFKIKKNNNQFRDIDEPLPSLKEIQDWILTNILYQIAPSKYAKAYVPGTSLKQNILFHRDQPIVLTMDIKDFFPSVKRSQITALFFRLGYSIAISDLLAKLCCLNDCLPQGASTSPYLSNLILASFDDAIAVYCIPLGIRYTRYADDLTFSGKFDCEVLKLQVIKHLSIHGLKINEQKTRIMRFGERQIVTGVVVNKKMQVSKEKRMAIRQQMHFIKRFGLEEHMKARKLSKGNYVRHLLGKINFILYINPDDLEFIKYRDDLLKLGIEK

SEQ ID NO: 2491 - protein, 341 aa, Oscillibacter sp.
  source 1..341: note = Related to NZ_WQOA01000003.1
MRWDSYERKFRDLAGKSGAAQEKIESWLLYAKELTSNNLPIIFDQTHLALLLGIDNEYLHRMSNAPEYFYRTFYIRKRNGKQRRIDEPLPDLKKVQSWILTEILYKVPCSKFAKAYVPHTSIKDNSRFHRNQKIVAGVDLKNFFPSIKSGSVLSVFLSMGYNLPTAVFLTRLCCLRESLPQGAPTSAYLSNLIMRHFDEQISAYCMERKIRYTRYADDLTFSGDFDVAALLYRIDGELKYLHLRRNPQKLKVMRGGDRQKTTGIVVNEKQQLPREYRMKIRQEIHYIQKFGLDDHLAHIGETRTHYLQHLMGKIEYALFINPKDEKMKAYREVLRAYRPRE

SEQ ID NO: 2492 - protein, 341 aa, unidentified
  source 1..341: note = Related to JAFQBT010000084.1; note = Oscillospiraceae bacterium
MRWDLYEPRFRDLAERQGILDKNINEYLAYAENLYKKNLPVIFDHTHLSLLIGIDNEYLHRISNAPKYFYRTFHIKKRNGKLRRIDEPLPDLKKVQTWILKEILYKIPCSKFAKAYVPKTSIKDNTRFHKKQKIVLTLDIKDFFPSIKSGYVLNLFLSCGYNLPVAVFLTRLCCLNESLPQGAPTSAYLSNLVLKKFDYNISEYCKKNNIRYTRYADDLTFSGDFNIASVLFLVDTELKYLNLKRNNKKVKVMRNNSRQCVTGIVVNDIQQLCREYRMKIRQEVHFIEKFGLDDHLAHIGEQRVNYVEHLSGKINYVLSVNPKDEKMQEYKKSIDTIKYQT

SEQ ID NO: 2493 - protein, 345 aa, Listeria newyorkensis
  source 1..345: note = Related to NZ_BJEY01000003.1
MMEWNEYKDRFTKKAEQSGYKESYIEKNLAYAEVIVKKGYPIIYDVVHLSKLVGVSYEYIFKVSNASKYFYRRFEIKKKNGKKRTIHEPLPLLKSVQMWILRNILEKKEVSIYAKAYKKEVSLKENVRFHRGQKIVMKLDVLDFFSSIEPRFVDNFFRSIGYSKNLSRVLTNICVLNHGLPQGAPTSPYLSNIVMYNLDRKISSYCRVEKIRYTRYADDMTFSGDFKPAKIIHFLKKELSKLNLELNYKKTKILRQNDRQNVTGVVVNQKIQIDRTTRNNLRLEMYFKKKNQKKHLSNACEAGQERKYLIGLLGRVNYGLHINEKDTVLLNYKEIIYEVLSRYRI

SEQ ID NO: 2494 - protein, 344 aa, Listeria booriae
  source 1..344: note = Related to JAARWV010000001.1
MEWSEYKDKFTEKAKQSGYTERYIEKNLAYAEIIANKGYPIIYDVAHFSKLVGVSYEYIYKVSNASKYFYRKFDVKKKNGKKRVIHEPLPLLKSLQMWILRNILEKKEVSIYAKAYKKRVSLKENVRFHRGQKIVLKLDILNFFSSIESIYVYDFFRSIGYNKSVSRVLTNLCTLNRGLPQGASTSPYLSNIVMYNLDRKISNYCKKKKIRYTRYADDMTFSGDFKPAGIIHFVKKELSKLNLELNYEKTKILGQNDRQNVTGVVVNQKIQIDRITRNNLRLEIYFLKKNQENHLRNICEAGQESKYLMGLLGRVNYGLHINEKDTVLLKYKEIIYEALSHYRT

SEQ ID NO: 2495 - protein, 343 aa, Bacillus cereus
  source 1..343: note = Related to NUVJ01000020.1
MEWELYKESYEKEAQNHNLSDETIKSNLKYAYNLYKQNVPIIYDQLHFSLLVGISYEYILKVTNAPKQSYRRFSIAKKNGDKRIIHEPLPTLKIIQEWILHEILNNIDVSPYAKAYRKKVSLKDNVKFHRNQKKVLRLDIKDFFGSIKQNQVLSIFLKIGYTIDVSTLLAKICTLSGKLPQGSPTSAALSNLVMRGFDKEISLYCNEKKIRYTRYADDMTFSGDFKEQKLIKKVKSYLSWIRLELNLDKTNLMRKHNRQLVTGITVNEKIQVNVQKRRKLRQEVYFIRKYGLCSHLRHRGFAEYDSEMYIKSLIGKIGYCLFINPKDEEFREYLKFLKSELSK

SEQ ID NO: 2496 - protein, 348 aa, Enterococcus faecium
  source 1..348: note = Related to CP065770.1
MNNDEWENYKKIFEKIARKNGKSQNYINKNLQYAEMLVKNNMPIIYNADHLGLLIGIKSSYFYKVTNEDKLFYRKFSIKKKNGDSRIIHEPLPNLKIIQKWILENILYKLEVSKFAKAYIPTISVKDNVRFHRKQKYVLKLDIKDFFSSLSEIHVYKIFKKIGYTDSLSVLLSKLCTLKGVLPQGASTSAYLSNLILLDFDKSVSLYCLERSIRYTRYADDLTFSGEFDHKALLNFIDYKLKALGLKLNQSKTRLLRQNQAQVITGIVVNEKIQVPRDYRKRIRLEVYYIKKFGIYNHLKSNHSKVDAKTYLKALNGKINYCLFINPNDLDMKNYRDIIEDAYQKLSI

SEQ ID NO: 2497 - protein, 353 aa, Paenisporosarcina cavernae
  source 1..353: note = Related to NZ_CP032418.1
MDWEYYKKKYCLVAFENNISSHEIENNLFYAKKLYDRGLPIIYDEIHLGQLIGISHEYMFKVANDASYFYKSFRIKKLNGGSRKISEPLPNLKIIQKWILEEILYKLNIHPSAKAYVKGLSIKDNVKFHRNQKTVLKLDIIRFFNNVKEDLIYRIFKEIGYSKEISWLLTRLCILNGALPQGAVTSPYLSNLVMLNFDRKIYSYCKKKRIRYTRYADDLTFSGEINKHHVISRVKNELLKIHLQLNESKIRVLKNHQRQIITGIVVNKKIQTSIIYRKKIRQEVYYIKKFGIYNHISKTLGITDINTELELKYLKSLIGRIHFVIFVNKFDKEMSTYLHDLKMVYDELSNTHE

SEQ ID NO: 2498 - protein, 352 aa, Bacillus thuringiensis
  source 1..352: note = Related to NUJF01000002.1
MDWSIYKQKYTSMALDQGIETKTIEENLSYAEVLYNKQLPIVYDEVHLGQLTGISHDYMFKVSNDSKKFYKTFRIKKRTGGYRKISEPLPNLKIIQNWILNEILYKIVAHPSAKAYRKDISIRENVKFHRNQEIVLKLDIQSFFNNIREKYVYRIFKELGYKKNIANLLTKLCTLSGSLPQGAVTSPYLSNLILRKFDKKIYTYCRRKGIRYTRYADDLSFSGEFNKRHLISRVENELSKLKLKLNTKKIRVLRSHQQQIITGIVVNEKIQVSKKYRKLIRQEVYYINKYGLNNHLSVKYNLEESDEFKKTVYLKSLIGKAEYVLFINKNDKEMPEYIALLRNLLVKLKLEN

SEQ ID NO: 2499 - protein, 364 aa, Enterococcus faecalis
  source 1..364: note = Related to PJWF01000007.1
MILNWEEYEIAFREKNSELNRFSQSELENKLRYAKKIYENRATVIYDAKHLAELVGVKYFEVYKIANSNSRFFYKEFLLQKKNGGERKIKAPLPTLNIIQKWIFENILANLKCSVYCKSYQKNLSLKDNAKFHRRQPILMKLDISSFFDNISWGLIYNIFKNLGYSVEVSTLITKLVMYTENGKVKGIPQGAITSPMLSNLVLKKFDENIGYYCVNNKIRYTRYADDLTFSGNFDTYKLKAFVNKELHKNGFFLNNRKTKILKSNDRQVVTGIVVNEKMQVSRKYRKNLRLEIYHLLFRTQQHFEYKKLKNYDEKSMYLKTIIGKVNFVLQVNSSDKEFKTYKKEIYKIIDSINNSELNKNNWN

SEQ ID NO: 2500 - protein, 352 aa, Ruoffia tabacinasalis
  source 1..352: note = Related to NZ_JACCEL010000030.1
MNWEEYKKKFIERNELTKRFSESELNEKLNYAKNLHNNKMPIIYNVDHLSRLIGVSYSEIYKITNSESKYYYKEFKLKKKSGGFRKIKAPLPTLNIIQKWIFENILQNTKASIYCKSYSKGVSLKDNAKFHRRQNIVLKLDIANFFDEISYEVVYKLFKDFGYSNEIVIVLARLVMYTNNKITKGIPQGASTSPIISNLILKKFDNEIASICLKENIRYTRYADDLTFSGDFEVTFIEEIIKEKLRLLGLKLNAKKRKILHKNNRQIVTGIVVNEKLQAPRKYRKNLRLELYYILNHSKNHFNKNGLYNHDARKNYLITVLGKVNYVLQINPQDSEFIDFKKKLYKLLTTQF

SEQ ID NO: 2501 - protein, 356 aa, Mycobacteroides abscessus
  source 1..356: note = Related to FSLI01000179.1
MNWEQYKNNFIQKNKIHKKFDENELSLKLNYAYNLYENNLPILYNVDHLSKVMGINKEYLYKVSNSNFKYFYRTFYLPKKNGGTRRIDTPLPNLKLAQKWIYDNILLKLETSIYCKSYKPNFSIKDNAKFHRNQNLVLKLDIKNFFKNIRHKDIYLLFKEIGYNNDICNLLTKLVILNDDTKIKKIGIAQGAITSPSISNLILKGFDNKIAEYCKQSKIRYTRYADDLTFSGDFNPNNIINFVEKNLNKQGFVLNKNKIKKIYKNESQIVTGIVVNEKLQVSRQYRKNIRLEIYHLLNHTKEHLNKKEVTNYFEQREYILALMSKINFVLSINKNDKKMIEYKNKLYKLLRSLDRM

SEQ ID NO: 2502 - protein, 316 aa, Enterococcus columbae
  source 1..316: note = Related to NZ_KE136496.1
MNVKYLTIEKLLTDCNLSKKDFLTLCDLDSKYVYDIFLIPKKTTGFRTIRVPNAQLKILQCWINKNVLSKADISKFCKSYRKNMSIVTNARLHKNQKIVLKLDIADFFSSISWSQVYKIFVELNINEEISEYFAKLVTINDGEVRLGIPQGACTSPTISNCILKDFDNKLGSYCIKRKIRYTRYADDLTFSGDFNYKKVILFVKKLLDKFGFKLNNSKIRVMKSGQSQIVTGIQVNEKIQVPRKYRHNLRLEIYHILNHPNDHFKMKNLYNSAEKSQYLKSVLGKVNYILQVNKKDGEFIKYKNLLHKILVEVLTI

SEQ ID NO: 2503 - protein, 346 aa, Listeria monocytogenes
  source 1..346: note = Related to CP007689.1
MNDKQWEDYKSKFIELAKLNNKTQKYIDQNINYAFNLFQKGLPIIYDTTHLGLLTGIKKEYIYLVVSSPRHYYRHFKIPKSNGFLREIDEPLPNLKIIQKWILNNILQNVPVSPYAKAYLHKTTLIDNAKFHKRQKIVYKLDIQNFFPSISSHMIYNFFCEAGYDLKLSRVLSRIVTLNNGLPQGAPTSPYLSNIIFKEIDLKIAKYCQQHKIRYTRYADDLTFSGDFNYNKLKTFVEWNIQKSGFNLNNSKTKILPKNKRQIVTGIVVNEKLQISKNERKKIRHELHYLKLDTNKHLSLRANNEKAQIKYLQQLLGKINYGLQINGKSKELLLGKIFILNILKQF

SEQ ID NO: 2504 - protein, 362 aa, Janthinobacterium lividum
  source 1..362: note = Related to FPKH01000001.1
MMSSCFFFAKEMNWENYATSFENAALSNNFDASYVKRCLAYGKVLFDKSLPIIYSLDHLANLVGYDSEFIVAVSFRQNGYYRNFFIPKKSGDYREISEPLPSLKIIQRWITENILYRISASRFAKAFVPTRSIKDNARFHKNQKLVLTVDIKDFFLSLSSKLVYKFFLGCGYSKRVSYFLTRLTTLNGSLPQGAPSSPYLSNLLFSESDEEISTFSRSEAIRYTRYADDLTFSGDFSPCKIITRVRRVLGKLDLRINEKKTRVMKPHQRQIVTGIVVNNKLQAVREIRRNLRQNIHYIEKFGFEYHVARIREHRANYQFHLMGQANFILFINPRDKDAIFALEVLRKNLQHSANSESQHDNN

SEQ ID NO: 2505 - protein, 348 aa, Nitrosomonas sp.
  source 1..348: note = Related to JAHBZZ010000012.1
MNWIDYQKEFTAKSISAGYKKDYIERCLTYAHRLYERNLPIIYSLDHFASLVGYEKSYLNYIAYRQNPFYRNFEIPKKSSGKREISEPLPNLKKIQRWVLDNILYRVSPSQYAKAFVPGRSIKANARFHRNQKMVLTLDINNFFPRLSSKLVKQFFTKCGYSKKVTYYLTRLCVLNGGLPQGAPTSPALANLMLKDFDLNIAKYCKSKTIRYTRYADDLTFSGVFAENELIKQVKKELKKIDLELKNSKTRLMLKHQRQEVTGIVVNNKLQAPREFRRNLRQAIFYIEKYGLENHLAKLNEFRANYVSHLLGQANFVLFINPRDQDALKALEILKDCRSSNFMITSDD

SEQ ID NO: 2506 - protein, 326 aa, Herbaspirillum rubrisubalbicans
  source 1..326: note = Related to NZ_JWZY01000031.1
MDWEIYSSRFAKAAQDRGDHYIERCLAYAKRLNDQSLPIIYSPDHLGKLTGYDPAYLRYVAYKQRSFYREFSIPKKSGGVRSISEPLPNLKSIQQWILTSILYKLEPSVYAKAFVPQRSIKENARFHRSQEMVFTVDIRDFFPSLSVKRINNIFLSLGYERRVAYYLTRLCSLDGGLPQGAPTSPALSNIIFSPTDNRIAKYCTPLGIRYTRYADDLTFSGNFSVSDLLKIIRRELSALELTLNDSKTRLMKKHERQIVTGVVVNEKLNATRELRRGLRQSAYYIQKYGLENHINRIDEKRGNYLLHLIGQATLGVSEFLCKRDFV

SEQ ID NO: 2507 - protein, 353 aa, Paenibacillus yonginensis
  source 1..353: note = Related to NZ_CP014167.1
MNWNEYKNKFYYFAKFHNKDDNYINDCINYAEKLFSKNLPVIYDVTHFSYLVGYKESYIMKVANSQSPFYREFLIPKKNKDEYREISEPLPNLKVIQRWILDEILHKLNPSPFSKAFRIGYSIKDNAKYHRKQKLVLNMDIKDYFNSISNDKVFMFFKSLGYSKQVALVLSKLCILDNGLPQGAPTSPMLSNLVTQQIDKRIASFSAKHNLRYTRYADDLTLSGDFDEGFVINCVKRILNSEGFCINEKKTRVRKQNQQQEVTGIVVNEKLQASKKYRKNLRQKMHYIKKYGFEDHISKLEIDNKIKYLYHLLGTANFILNVNPYDKEAKDSFEYLKQLLFHYKLKTSISEFD

SEQ ID NO: 2508 - protein, 353 aa, Paenibacillus sp.
  source 1..353: note = Related to NZ_FNAZ01000007.1
MNWDDYKNRFYHFAKYDNKDDNYIDSCLNYAEKLFLKDIPVIYDVTHFSKLVGYKEAYIMKVSNSQGSFYREFKIPKKKKGEYRDIYEPLPNLKNIQRWILDEILNKLKPSPYSKAFRVGYSIKDNAKYHRNQKKLLNLDIKDYFKSIGYKKVYNFFRSLGYSKHVSVVLANVCTLDDELPQGAPTSPMLSNLITQRLDLRIAKFASKNKIRYTRYADDLTFSGDFEEGIVINFVRKVLLSDGFLINEQKTRVRKQNQQQEVTGIVVNEKLQASKKYRKSLRQKIYYIKRYGLEDHISKIEFDNKIRYLYHLLGTANFILNVNPNDEEAKEYFNYLKQLLFQYKLKKLDQEVE

SEQ ID NO: 2509 - protein, 346 aa, Sporosarcina limicola
  source 1..346: note = Related to NZ_JADBEL010000024.1
MNWEVYRDNFYSSAKTKGYKENYINRCLEYSKILFDQKLPIIYDQKHLSLLIGYQEIYLIKVSNSQEPFYREFKIPKKNKNEFRKIHEPLPNLKNIQRWILEEILNILEPSPYSKGFRKGYSIKDNARFHKKQKKVLSIDIENYFGSISYDMVYSFFRNLGYSKQVSVMLANLCVLEGRLPQGSPTSPMLSNLITKRLDNRIGGYAKKRGIRYTRYADDLTFSGDFNEGALINFVKNVFESEGFVINEKKTRVRLQSQQQEVTGIVVNEKMQASRKYRREFRTKMFFIKKYGLDSHLDYVEEEKKIEYVYHLLGTANFIVNVNPNDLETREHYIYLKELLSDLKKS

SEQ ID NO: 2510 - protein, 344 aa, Rummeliibacillus suwonensis
  source 1..344: note = Related to NZ_VCBL01000006.1
MEWEEYKSKFYHYASFEGKDPDYIDNCLNYAEKLFNKGLPVIYDQLHLSLLVGYEEIYLIKVSNSQDSFYRKFDILKKNKRDYRTISEPLPNLKNIQRWILSEILSKLKPSEYSKAFRPGLSIKDNARFHRKQKKLLTVDIKDYFGSIDFKKVFIFFRNLGYSKQVSVMLANICTLNNGLPQGAPTSPMLSNLITKNLDQRIAGFSKKNNLRYTRYADDLTFSGDFNEGHVIEFVKEVFKSEGFTINDSKTRVRKRNQRQEVTGIVVNEKMQASRSYRRDFRQQMYYIKKYGLDSHVNNIEGGDTLKYLYHLLGMANFIININPNNQETKEDYHYLKDLLQKLK

SEQ ID NO: 2511 - protein, 343 aa, Bacillus halotolerans
  source 1..343: note = Related to JAEACL010000003.1
MNWEEYKFKFYHYASFNGKDQDYINSCLNYAEKLFNKGLPVIYDQFHLSLLVGYDEKYLIKVSNSQELFYREFNILKKNKKDYRTISEPLPNLKNIQRWISKEILSNLEPSEYSKAFRTGYSIKDNAKFHRRQKKVLTIDLKDYFGSIDYKKVFTFFRDLGYSKPVSVMLAKICTLNDGLPQGSPTSPMLSNLITKNLDHRIAGFSRKQNIRYTRYADDLTFSGDFSEGYVIKFVKMILNSEGFTLNDSKTRVRKRNQRQEVTGIVVNEKMQASRKYRRDFRKRMYYIKKYGLNSHVEKIEAGNSLNYLYYLLGMANFIININPNDKATKEDYNYLKNLLLKS

SEQ ID NO: 2512 - protein, 355 aa, Lysinibacillus xylanilyticus
  source 1..355: note = Related to NZ_LFXJ01000013.1
MVIGLNENGDIMKWEEYKKKFYHYATYNQKSEEYISSCLDYAERLFMKDLPVIYDQKHLSQLVGYREEYLFKVANASELFYRNFKVLKKNKKDYREISEPLPNLKDIQRWILDQILYKLEPSEYSKAFRKGVSIKDNAKFHRKQKKVLTIDIENYFGTIKFKAVFKFFKSLGYTKQVSMMLAKLCVIDDELPQGAPTSPMLATLITKNIDKRLSAFANKEKIRYTRYADDLTFSGDFNEGYVIKFAEKVINSEGFKVNPFKTRVRLQHQRQEVTGIVVNEKLQASRQYRRKFRQNMFFIRKFGLESHIININVSDPKSYVYQLIGTANFIRNINPKDIDVQVDYEYLKELLQTYK

SEQ ID NO: 2513 - protein, 347 aa, Bacillus sp.
  source 1..347: note = Related to JAEKFM010000007.1
MIWEKYKRNFTESALKAGYDSMYIEENLKKAHSLHLQGIPIIYDQMHLSYLVGYDIEYLLKVSNSQKGFYRYFKIPKKNGGFRNIAEPLPNLKSIQKWILEEMLYSCKTSEFAKAYKKNVSLKDNARFHRGQKMVLTIDIKDFFGSIRHIDVYNFFSSLGYSQDVATLLTNLCTLKGALPQGAITSPALSNLLMKDIDKRISAFSKKKKIRYTRYADDLTFSGDFQVGEIIKFVTTVLRSKGFSINDKKTRVRFPHQRQEVTGIIVNQKIQAPCEMRKELRKNIYFIKKYGLNSHLEFIKKDKYQYLKHLLGIANHIYFINPTDSRVYEYLNYLKELWQVEKITSED

SEQ ID NO: 2514 - protein, 338 aa, Bacillus mycoides
  source 1..338: note = Related to NZ_CP071813.1
MNWKSYSEAFSKKAKQNKYDQNYINECLGYAKPLFEKKIPIIYNQEHLSLLVGYSEEYLLKVSNASDRFYRNFSVPKKNGSSRQIFEPLPNLKDIQRWILEEILYKCPISDYAKSYVPRRSTKDNARFHRRQKKVLTLDIKDFFPSIRFHKIYLFFFNLGYTESLSMMLANLCCLNGSLPQGAISSPALSNLIFKSFDKRISVFCKSNNIRYTRYADDLTFSGDFQPGMLIKFVENILVPEGFQLNNKKTRVRLQHQRQEVTGIVVNQKLQAPRKMRRELRQKIHYIEKYGLDSHLERSQITRVNYIKHLLGIAHYIRHINPGDEKINSYIEKLKAYL

SEQ ID NO: 2515 - protein, 338 aa, Brevibacillus brevis
  source 1..338: note = Related to LR134338.1
MNWETYRVNFTLRAKEFEYDEEYINKCLQYSKNLFDRSLPVIYDQQHLSALLGYKYSFLLKVSNSAKNFYRNFAISKKNGGFRKISEPLPNLKEIQRWILEEILYKNNVSEFAKAYLKGKSIRDNVRFHRGQKYVITIDIKNFFPSISEEKVFVLFIEMGYSKPVSVMLAKLCCLNGKLPQGAVTSPMLSNIIMKRLDKRIAAFAVKNRVRYTRYADDLTFSGDIEPGKVINFVKKVLDADNFKINDSKTRVMTKNQRQLVTGSVVNEKLQAPREVRRKIRQELYYIKKFGLASHLEKLNSYKANYLKRLLGLINYCLLLNPKDAELIKGKNYLKELL

SEQ ID NO: 2516 - protein, 351 aa, unidentified
  source 1..351: note = Related to JAFQBM010000021.1; note = Lachnospiraceae bacterium
MNWNEYENNYIRLAKLSGKSDEYCIKQLEYAKHLFEQDLPVIYTQEHLCRLVGYATEYVYAISNSASCFYRTFSIKKKNGKERIINEPLPSLKEIQDWILKEILERINISPYAKAYVKGRSIKDNARFHKRQNKVLTMDLKDFFPSITFGRVLNVFRKVGYRENVAVMLANLCCLHNELPQGAPTSPALSNIIVSGLDYKIAEFLKGKEIRYTRYADDLTFSGDFIEGDIIKSIERIVCRQGFKINHSKTRIRKRNQRQEVTGVVVNEKLQVNRELRRRIRSDAYYIEKYGFYSHVDYTSQNRSNYLYYLIGIASYSLFINPYDDKMREYLEIFKKELARCKQEGVDVCSP

SEQ ID NO: 2517 - protein, 347 aa, Eisenbergiella sp.
  source 1..347: note = Related to NZ_LT969517.1
MKWNEYENNFIQIAKMQGKTEEYCIQQLEYAKKLFANNFPIIYNQVHFCKLVGYAEEYVFSACNQPKSFYRTYYIPKRNGKKREISEPLPSLKEIQNWIYQEILCNVKVSSYAKAYVKGKSIKDNARFHKRQIKVLSMDIKDFFPSIGFKRVLNVFRNIGYRENVAVLLANLCCLNNSLPQGAPTSPVLSNIITSKLDDKIVNYVSKERIRYTRYADDLTFSGDFNEGDVIKNVERIANSLGFKINEEKTRVRKRNQRQEVTGIVVNEKMQLSRKIRKRIRSDMYYIQKYGVESHLEHIGESRENYLYHMMGLVSYAAFINPYDENLKKYRLFLKEELNKHVALVDN

SEQ ID NO: 2518 - protein, 338 aa, Spirosoma endophyticum
  source 1..338: note = Related to NZ_FOLQ01000021.1
MKWSDYASKLIEEAIKLDYTKEAIDEYLSYAEHLHRAKLPIIFDQIHLSFLVGYKYEYLLGVSNAPQSFYKIFYIPKKNGEVRTISEPLTSLKEIQSWILKEILYKCKVSSNAKAYVIGKSIRDNARFHKKQNKVLTIDIEDFFPSIKINKVIGVFRRAGYSKAVSTLLARLCCTDNGLPQGAPTSPAISNLVMYYLDMRIFGFCRKRAIRYTRYADDLTFSGDFDDNELISFTRSILERKNLFINNQKTRLRKRHQQQEVTGVVVNEKLQVPRDYRERFRQELYFIKKYGLVGHVKHINAGDPDRYIRVLIGKANFISQINPNDTEIKDYLKILYTL

SEQ ID NO: 2519 - protein, 346 aa, Dorea longicatena
  source 1..346: note = Related to QRIC01000038.1
MKWIEYKSKFIEVAQKNNKNKKYCDRWLKYARNLWERDVPIIYTQDHLCALLGYEPTYVYAVSNSPHNFYHCYQISKKNGGKRSISEPLPNLKEIQRWILENILYRFEVSPYAKAYIKDKSIKDNVRFHRRQRKVLSLDVKNFYDHLTDWMVYQLFIEVGYSESVAMMLTNLCCLEGSLPQGAPTSAALSNILMKDFDYKIGAFCKMYKIRFTRYADDMTFSGDFDEVKVISFVRKSLKDLQLTINDAKTRVRKQGQQQEVTGIVVNYKPQLAKSVRKGIRKDVYYINKYGLQSHLKYVQEERSNYLEHLFGLINYALFINPNDEEMKRYKIDIKYLMKKENDEFK

SEQ ID NO: 2520 - protein, 342 aa, Ruminococcus sp.
  source 1..342: note = Related to FMEZ01000001.1
MEWIEYELKFAEIAKKHNKSQKYCKRWMEYAKKLWDRGLPIIFTQNHLCALLGYQPVYVYAVSNAPCNFYHYYKVQKKNGGTRNISEPLPNLKEIQRWILENILYRFEISPYAKAYVKNRSIKDNVRFHRRQRKVLSLDVKDFFGHLTDWMVYQLFIESGYSESVAMMLTNLCCLEGSLPQGAPTSAALSNILMKDFDYKIGDFCKMFKIRFTRYADDMTFSGDFDETKVISFVKKNLRDMQLTINDAKTRVRKQGQQQEVTGIVVNYKPQLARSIRKDIRKDVYYIKKYGLQSHLQYIQEERSHYLEHLFGLINYALFINSDDKEMKRYKMDIKYLMSNEK

SEQ ID NO: 2521 - protein, 350 aa, unidentified
  source 1..350: note = Related to JACRSZ010000030.1; note = Proposed Jingyaoa shaoxingensis
MEWNEYKIAFIEAARKSGKNNAYCEKYLNYAEQLWMHHMPVIYTQEHLCALLGYLPTYVYAAANAPEDFYRQFLIPKKNGGSRMISEPLPNLKEIQEWILKNILYKAEISTYAKAYIPGKSVKDNVRFHRRQKKVLSLDIKAFYDHLTDWMVFQFFIEKGYNEAVAMMLTGLCCLRGCLPQGAPTSAALSNLLMVEFDEKVGLFCKEKKIRYTRYADDMTFSGDFDELEVIRFVRQELKSIGLRLNMKKTRTRKQGQQQEVTGIVVNYKTQLPKSIRKEIRKNMYYIQKFGLESHLEYIGLECRNYREHLLGQIGYALFINPKDQEMKRYKEIIHDVDICCKKQTPDRFV

SEQ ID NO: 2522 - protein, 342 aa, Solobacterium sp.
  source 1..342: note = Related to RKBT01000103.1
MNWDIYKENFIHEAKKHHKNENYINKWLEYAHNLNSKKLPIIYDQNHLCELIGFDKNYVYAISNGGKHFYRTFEIKKKNGGTRIIHEPLPNLKDIQHWILKNILDYVEVSPYAKAYRKGYSVKDNVKFHRRQKKVLCLDIHSFYDSLKSNLVLDVFIELGYKNDVAIMLTNLCCLNYKLPQGAPTSSSLSNIIMKNFDYSVSDFCKDNAIRYTRYADDMTFSGDFDEINVIRFVRNELKKINLRLNNQKTRVRIQGQQQLITGIVVNEKTQLPKKKRKEIRQTMYYIKKYGINEHMNFKNIDKSYYLEHIMGIVNYGLFLNPRDSELIEYRSILQVLKNSQD

SEQ ID NO: 2523 - protein, 342 aa, unidentified
  source 1..342: note = Related to JAFYBR010000063.1; note = Lachnospiraceae bacterium
MSEEKKCPQIGRPRELCSLLGHKAEYVYGIANETHKYYQHSRIPKKRGGFRELYEPLPELKKMQTWILHHILDLLEPSPYAKAYRKGYSVKDNAKFHRRQKKVLSLDIEGFFDHIRRYPVFRVFLDAGYKKDVAMLLAALCCRNGCLPQGAPTSAALSNLVMLGFDAKVGAFCRERGIRYTRYADDMTFSGDFEETEAIRFVKEECGKLSMKLNREKTRVRKQGQQQEVTGIVVNEKTQLPESERKKIRQEMYYIRKYGLESHLRHLREGLASGKNHLQEASGNGKESCLRETGTSRDLSKERYLSQLLGRISYALFINPRDEAMREYKKAVIEWMKTDIIK

SEQ ID NO: 2524 - protein, 346 aa, Blautia sp.
  source 1..346: note = Related to NZ_LT635539.1
MDWNKYREDFLIKAKNQKKDKKYCDKWLSYAHNLYEQELPIIYNQEHFCKLVGYMPEYVYAASNSADHFYRTFFIPKKSGGLRKICEPLPNLKEIQKWILETILSKMQVSVYAKAYIKGKNVKENARFHRAQKKVLSLDIQDFFSKISPFLVYETFINVGYNKDVSMMITMLCCKEGGLPQGAPTSALLSNIIMKNFDNVIGDYIIKNKIRYTRYADDMTFSGEFDELEIIRLVRHELKKYGFCLNGKKTRLRQEGQRQEVTGIIVNKKLQISKDQRKKIRQEIYFIKKYGLQSHLTYTNEQRKGYIEHLFGKISYALYINPKDEELKEYREFLLQYKSNSEISLN

SEQ ID NO: 2525 - protein, 349 aa, Fusobacterium nucleatum
  source 1..349: note = Related to NZ_CP028101.1
MEWIEYREQFITTAKKASKNSGYIKKNLKYAEKLYNQKLPIIYNASHFSKLVGYSLQYLYAASNDSSKFYREFEIKKKNGGSRKISEPLPSLKEIQKWILENILNKIQKEKVSKYAKAYQKKISIKENVKFHRGQKKVLSLDITNFFLNIKIDKIYEVFYNLGYSKSLSTLFSNLCTLNYSLPQGAPTSPILSNIVMLNFDNEIEKIVLEKRIRYTRYADDMTFSGDFLEKEIIKYVKENLNKIGLKINNKKTRVRKNWQQQMVTGIIVNEKIQISRKKRDELRQTMYYIEKYGIDSFLKYKGIKNKVYYLSHLKGILEYAYFINKNDKKLFNYIEYLKNNFFKEKSSI

SEQ ID NO: 2526 - protein, 341 aa, Clostridium sp.
  source 1..341: note = Related to WWTL01000016.1
MNWKNYCVEFRKEAALKGKNEEYCDTWLQYAKVLFDKGLPIIYNQEHLCLLLGYKEEYVFAVSNSASNFYRNYEIPKKNGGVREISEPLPSLKEIQRWILDNILSSINISVYAKAYVKKKSIKDNARFHKRQEVLLTLDVSNFFDSISSDKIYNLFLDLGYKEDVVVMLTNLCCLNGWLPQGAPTSPMLSNIILRQFDNVMGKYTNEKKIRYTRYADDMTFSGTFNPGQIISVVRKELFRLGLQLNENKTRVRRKGQCQEVTGIVVNEKLQLPKNVRKKIRQDLYYIRKYGLESHMEYCDISKEKYLQHLKGRIQYGLFINPYDYELQGYLSYLENMYGQY

SEQ ID NO: 2527 - protein, 341 aa, Blautia sp.
  source 1..341: note = Related to NZ_LT635469.1
MNWDKYCNEFCKEAEHNGKNATYCNTWLQYAKSLYEKKLPIIYNQKHLCLLLGYKEEYIYAASNSAINFYRTYKIPKKNGGTREISEPLPSLKEIQRWILDNVLAPVNISVYAKAYVKKKSIKENARFHKRQPIVLSLDVERFFDSITSDKIYSLFLKLGYKEDVSVLLTNLCCLNGCLPQGAPTSPMLSNIVLTEFDNIIGKYTNEKKIRYTRYADDMTFSGDFKPGQIISFVKYNLSNLGLKLNERKIRTRKKCQRQEVTGIVVNEKMQLPKPVRKQIRQEMYYVRKYGLESHMQYCDISKENYLQHLKGRIQYGLFINPYDYELQDYLGYLDKVYGKY

SEQ ID NO: 2528 - protein, 339 aa, Eubacterium sp.
  source 1..339: note = Related to QTVG01000007.1
MDWEDYKNEFIRVAKKNEKNEDYCDKWLKYAKKLYDKRLPIIFNQEHLCLLLGYKKQYVYSVSNSPADFYRYYKIPKKNGNFRQISEPLPSLKEIQKWILDNILVNVDTSVYAKAYIKKKSIKDNARFHRKQKVLLSLDIKNFFDSISSDKIFDLFWNLGYKEDVVVMLTNLCCLNGSLPQGAPTSPMLSNIVLEDFDNEIGLYTMEQKIRYTRYADDMTFSGDFHPGKIISKVKRQLNDLGLKLNDEKTRTRGRGQRQEVTGIVVNEKMQLPRPERKKIRQEMHYIIKYGIESHLEYCKIEKANYLSHLKGKIEYGLFVNPYDYELKEYLSYLNNIKD

SEQ ID NO: 2529 - protein, 352 aa, Geobacter sp.
  source 1..352: note = Related to VMKF01000001.1
MTILLVLVEGSFFIMQWEIYKRKFTHKAKSARFDEGYIERCLNYAENLHKQGVPIIYDIEHFSHLVGYDVSYLLRASNAQARFYRHFTIPKKNNTERSISEPLPSLKEVQRWILDNILDKLALSRFAKGFVKNRNIKENARFHRKQRYVLSLDIKNFFPSIKYKQVFHLFSSIGYCESVSTLLSNLCTLDNSLPQGAPTSPAISNLVCRRVDSRLSGFALKNKIRYTRYADDITFSGDFDPGRILRFTSKVLSESKFTVNKTKTRLMEQHQRQEVTGIVVNSKMQAPRELRKKLRQQIYYIKEFGLESHLKATNNKRANYLSHLKGLAGFVLFINNKDSDAKEAIDFLETFS

SEQ ID NO: 2530 - protein, 348 aa, unidentified
  source 1..348: note = Related to QZJW01000035.1; note = candidate division WS5 bacterium
MGLVEKKFNWEDYSEKFTVLARNEGRDAIYAELCLSYAHRLYSNNIPIIYDVEHLCKLVGYDKYYVLGASYETEKFYRKFKIPKKSGGFRTIHEPLPSLKEIQRWILDNILYNINISKHAKGFIHDLSIKDNAKYHRNQPCVLSLDIKDFFPSIMRHRVYGIYRSIGYTQLISNILSRICTLNESLPQGAPTSPALSNIICFNLDRRLAGFSKKYDYRYTRYADDITISGNIVAGRVIRFVKKILGDYDLFLNDNKTRLMQRHQRQEVTGIVVNEKMQTPKEIRRHVRQEVYYINKYGMDSHLDKIKDVRSNYVKHIIGIVNYIKFVNPNDRHAAQALSILMENYNKK

SEQ ID NO: 2531 - protein, 345 aa, Maridesulfovibrio ferrireducens
  source 1..345: note = Related to JAEINN010000002.1
MPSSLIWKKYSQAFAKKGKKEGHSKEYIHTCLNYAEQLYKRSAPIIFDPVHFSLLVGYSPKYIMAVTNSPDNFYRQFSISKKNGGSRNITEPLPSLKEIQHWILTNILNNIPVSKYAKAYISKESIKSNARFHRKQPTVLCLDIKDFFGSIHGGIIFNLFRTIGYRSSIASLLTNLCIYDDALPQGAPTSPALSNIIMKGFDQRAAGFCKKREIRYTRYADDLTFSGTFFPKEIIRFITSALSDLKMDLNPTKTRILGQGQQQRVTGIVVNEKMQVPRKTRRNLRQSIFYIKKYGISSHQNHEKIYKSNYVRHLLGIANHILFINPKDADALNALSVLKPLLNKK

SEQ ID NO: 2532 - protein, 341 aa, Desulfocapsa sulfexigens
  source 1..341: note = Related to NC_020304.1
MNWKKYRKEFTIQATAKSLDEKSMQHALSYARGLYKANLPIIFSQNHLSRLVGYNIDYIRNASSTKSDQFYRCYKIKKKSSDTMRTICEPLPSLKEIQRWILDNILSQVTISKFAKAYVVGFSIKDNARFHLRQKQVLRIDVKDFFPSIKGQNVFHIFKNIGYSAEVSAMLTGLTTLKNCLPQGAPTSPTLSNIFMNRCDARIAGYCLARKIRYTRYSDDLTFSGEFDVGKLISFINMVFKDSGLLLNKTKTKQMFKHQRQFTTGLVVNERINVCREKRRKLRQEIFYIKKYGLDGHLIRTEEKRTNYIMHLLGLSNFITHINANDRDALEAKEILRKYIT

SEQ ID NO: 2533 - protein, 342 aa, Hymenobacter sp.
  source 1..342: note = Related to NZ_CP040896.1
MEWQQYKALLIAEAQAKGYSDEKLLETLDYANNLINKSLPVIYDLKHLSLLVGYKTAYIQRATHRSQFFYRRFEIRKKSGATRVIFEPLPSLKEIQLWILKNILNNCPISKYAKAYVRKKSIKDAARFHKNQKYVVTIDIVQFFEFINYPTVLGKFILMGYSREVSTILTKLCCKNDSLPQGAPTSPSLSNIVFADIDFEISEYCYANNIRYTRYADDLIFSGDLEPKLLIGKIEGILLNNGFILNNSKTRIMRPWQRQIVTGLIVNEKSKVQVPIEARRKLRQEMYYINKFGLDSHLSYTKNYKAKYLIHLLGVAKYMFFINPNDTKVANYIYQLESYINN

SEQ ID NO: 2534 - protein, 370 aa, unidentified
  source 1..370: note = Related to SEFI01001149.1; note = Sphingobacteriaceae bacterium
MMPLRLRLRDYIISYNHCNAAVSSSIMVWQTYQADFTAKALAARRPIAETEILLAYAKNIHDKGMPIIYDIGHLSLLVGYKVDFLVAASTYPRAYYRNFRIKKKSGASRVISEPLPSLKAIQTWILENILEKFEVSLYAKAYVKGRSIKENARFHRNQNNVLTIDIKNFFGSITKVRIISFFSSLGYSRQVALLLARLCCKNSRLPQGAPTSPTLSNIVLVAFDEKLFNVCSLNKVRFTRYADDITFSYENKNLTGPLIEYARELLRGEGLVLNRDKTRLMERHQRQEVTGVIVNKKLQVPIEIRKDLRQIFYYINKFGLDSHIERIQEKRSRYLYHVLGLCNFVLFINPNDKEVKGYLITARDYLTSEE

SEQ ID NO: 2535 - protein, 345 aa, unidentified
  source 1..345: note = Related to JAFVUY010000108.1; note = Bacilli bacterium
MKWEVLKDKIIKECKFANKSEKYTSAYLEYCRKLYEKELPIIASPKHFSLLVGIDHEYVCKMAYSQNLFYRSFKINKSNGKKREIKEPLPDLKYVQKWILNNILNKVEVSDYAKAFVKNRTLKHNAKFHKKQNVVVTLDIKDFFPSITLYDVADIFKDLGYFENVALFLANLCCYKKQLPQGAPTSPYLSNLRFRKIDDSISSYTKELNIRYTRYADDMTFSGDFNPHQLIKKISDIIHNSGFNINSKKTRVAYKNARQEVTGIVVNSHMQVSKNKRRDIRQQVYYIKKFGLDSHLTHIQETRANYLNHLLGQINFCLFVNPKDNEMKQYFGQIKDLMQKQNSDD

SEQ ID NO: 2536 - protein, 342 aa, unidentified
  source 1..342: note = Related to SVPN01000006.1; note = Oscillospiraceae bacterium
MKWEVVEKNIKKECKARHKDSVYIQKYIAYSKNLFDNDLPIISSPEHFSLLIGMEHQYVCNMAYAADRFYRHFTIPKSNGKKREIDEPLPDLKFVQSWILENILEKCPISEYAKAYYKGRTLKHNARFHRAQSIVLTMDIKEFFSSISVRDVTKIFEDMGYFHELSCFLAYLCCLNNVLPQGAPTSPYLSNLRMRILDNKISQYTSQRKIRYTRYADDLTFSGDFNPHHVIKDISKLVYDEGFVINPDKTRVARRNARQEVTGIVVNSHMQISKEKRKQIRQQVYYIKKFGVESHLERINESRANYLNHLLGQINFALFVNPKDEEMKEYFNVIKTLLVDQN

SEQ ID NO: 2537 - protein, 346 aa, Caproicibacterium amylolyticum
  source 1..346: note = Related to NZ_CP060696.1
MEWSTLRNAIIRKCKEHRKGDEYSEALLSYSEKLFVQNLPIITCPAHLSLLIGLEHDYVCRMAFSPEHFYRHFTIKKANGKDRSIDEPLPDLKFVQQWILSNILENVPVSTYAKAFIKKRGVKENARFHRAQTVVVTMDIKDFFPSINLQQIVNIFCTLGYSNDVSNFIAHLCCYHYSLPQGAPTSPYLSNIRMREFDKKVVDYSSPLKIRYTRYADDISLSGNFNPHTAIKYLSSLVFKEGFSINAEKTRVAYQNARQEITGIVVNSHMQVPKAQRKKIRQEVYYIKKYGLDSHLSHISETRENYLNHLLGKINFARYINPKDQEMQEYYETIKKILILFRNESF

SEQ ID NO: 2538 - protein, 363 aa, Ruminococcus albus
  source 1..363: note = Related to NZ_FOAT01000022.1
MYAKNSLVVQSIKCYVALLGDYMKKNYYDKIILECKKHNKSQEFVDTYLAYYENLTQKGLPVISSPKHFSMLVGMDHDYICSMAYSPKHFYRTFYIEKANGMKRKISEPLPDLKYVQKWILKNILEKVKVSPYAKAYVSNSSVKHNARFHRKQKVVLSMDIKSFFPSVKVKSIVDIFKSFGYTENVSCFLAYLCCNNYCLPQGAPTSPYLSNLRLLKFDSIISQYTSLRKIRYTRYADDLTFSGDFDPSNLIRFVSKCVWEEGFKINSDKTRVAYGNTRQEVTGIVVNDKMQIPKTGRKKIRQEVYYIRKYGVSSHLSHINETRVHYLNHLLGKINFALFVNPNDIEMKGYYDYIISIIEDVD

SEQ ID NO: 2539 - protein, 347 aa, Faecalibacterium gallinarum
  source 1..347: note = Related to NZ_BQKV01000037.1
MMDWDKFKTQAIQKARVDRIRDIELRSYLSYAEKLVKQNLPVIVDAASLASFVGIDLLYLCQMAYGTEYFYRRFQISKKSGGMREIAEPLPDLKAVQNWILTNILNYTSVSKYAKAYVKNQSIKSNARFHREQKVLVSMDVKDFFPSIKIEDVFKIFVNLGYIENVSWFLAHLCCLNGELPQGAPTSPYLSNLRMRNFDSEVGTYALENGWRYTRYADDLTFSGDGNVKELIRTVSGLLLKNHLYPNTKKTRVARQNTRQEVTGIVVNKKIQTAKQYRKKIRQEVYYIKKYGLDSHLTFCQISQKNYLNHLQGKILYALFVNPKDKELLEYKEFISDLLIKTKSSLK

SEQ ID NO: 2540 - protein, 344 aa, Faecalibacterium prausnitzii
  source 1..344: note = Related to WKQN01000003.1
MDWNEFCNHAKFQASVDGINEEELKKYLQYAKRLVRKDLPVIVDPYSLAKFIGIDFHYLCNMAYGTEHFYRNFLIPKKSGGTREISEPLPDLKQVQHWMLNNILNYIEISKYAKAYVKKQGVKSNARFHRGQKVLVSMDVKDFFPSIKKIDIFHVFHGLGYDENVSWFMAYLCCLNGELPQGAPTSPYLSNIIMSSFDKDVASYAIEKKWRYTRYADDLTFSGDGNVEELIRVVSELLLKYHLYPNTKKTRVAYQNARQEVTGIVVNKKLQAARQYRRKIRQEVYYIKKYGIESHIAFCQISQKNYLEHLQGKIGYALYVNPKDIELLEYQKFLHEVSDSLQNQ

SEQ ID NO: 2541 - protein, 351 aa, unidentified
  source 1..351: note = Related to DUPM01000091.1; note = Clostridiaceae bacterium
MQNKNCTWDQYRSAFIELAQKSNKSKPYIRRCLEYAEPIFERGLPIIFDVHHLSKLTGRSAKHIFSLSRFARCHYRSFSITKKSGGERRIDEPVEDLKYIQRWILHEILERLPVSPYAKAYVPGLSVRDNARFHQNQDKILTVDIKDFFPSVRSKSVFFVFRNAGYSDTVATILSNLCCLEHRLPQGAPTSPMLSNLVFSDLDKVIADFSIQRGLRYTRYADDLTISGSLDIRETLHFLYPLLNNRGFRLNPEKTRVLSRNMRQAVTGIVVNQYLQVPLNIRKNIRQDVFYIRKFGLKSHMEHIDETGDNYIDRLIGIVGYAIFVNPHDNEMKDYFSYLRSLKNDEKVQTA

SEQ ID NO: 2542 - protein, 356 aa, Pedobacter sp.
  source 1..356: note = Related to NZ_QGNY01000001.1
MKESNYSWNEYKFRFEQKAIDFGHPLSKIEGLLLYAQKLFAANLPVIYDLRHLSYLTGYREEYMLRATSRPENFYRYFRIAKKNGHSREISEPLPGLKEIQYWLLDNVIKKLPPNKLNNAYLEGRSIISNAKFHTKQQKLLNIDIEKYFNNITKKQVEGFFSSLGYNLEVSSLIAGLLTMKDGLPQGSPSSPYLSSIMTVQIDVTLLAECRALGLRYSRYADDISISGEFNTEEVVKKVNAVLLANGFKANSRKTTVKKSHQRQMVTGVVVNKKLSVKKKVIKELRQELYYIHKYGLEQHLRRKEIQRRNYLNVLEGKLNYFCSVKRNNAELSYIRRMLSEIKIRESAEQLRSAFE

SEQ ID NO: 2543 - protein, 347 aa, Mucilaginibacter sp.
  source 1..347: note = Related to NRSW01000001.1
MQESIFSKNEYLFKLEKKAQELGLPNQSVLGLLSYAKTLQEKNLPVIFDIKHLSYLTGFKVDYILRAIKSPDKFYRTFFIRKKNGRSRQIKEPLPGLKSIQYWILNNIIKKVPTSRFNNAYSIGKSTVSNAKFHTKQQFVLNLDIEAFFDNITASMVSLFFSNLGYNSDVVSVLSSLCTLNGSIPQGSPSSPYLSSILTIDIDENLYKYCRERNLRYSRYADDITISGSFHAGVVIAGVRKLLNSLNFSINDSKTRVKSQHQRQLVTGLVVNKKIAVKRSDLKEFRQEMYYIMKFGIESHVIKQNVTKNNYIDHLLGKANFYLFVRKKDSDLFKYKTYLIDVLKGKK

SEQ ID NO: 2544 - protein, 347 aa, Paeniclostridium sordellii
  source 1..347: note = Related to CDNR01000033.1
MNYNKYSIIFKQEANNQGLSEDEIEVYLTYAKVLLDKSLPIIYNQDHLSKLLGIHPIYLYTLTNSSDKFYRKFKINKKNGKKRNIEEPLSILKEAQYWILEHILLKCSCSNYTKAFKANSSIKENAKFHKKQNIVINLDIEDYFGTIKGHKVYEFFRTLGYNNEVSIMLTKICTNKDSLPQGSPTSPYLSNIITENLDNKLAELAKKEEYGLRYTRYADDITFSTNNKINITNLIIDTKYVLKQEGFKINYKKTKVISSNKRQMVTGIVVNDKLQVSKQQRRKVRQAMYYIEKYDLESHIRNIGWQKGKDKYLRHLLGNINFVLFINPKDKEHLKYKSQLIQKLKEI

SEQ ID NO: 2545 - protein, 346 aa, unidentified
  source 1..346: note = Related to SEFT01000010.1; note = Sphingobacteriales bacterium
MFTTKPSLSEYKLSFSKEARRKDYNDYDIKEFLDYAEILYLKDLPIIYNIKHFSLLVGYKETYLARAAETTFNFYRSFDIRKRNGKLRKIDEPLPSLKEIQTWILTNILYKLDCSKYSKAYKKKNSIKTNAKFHRDQDVVLSLDVKDYFGSIRVEDVEFFFADLGYEENLSGMLASLCCLNGSLPQGSPTSPYLSNLITIELDNDLSELAKLYNVRYTRYADDITFSGTFTVGVLINKAKEVATRYGFEINDKKTRAMGKHEQQLVTGIVVNTKKLQVSRERRKDLRQQLYYIQKFGLENHLAKRNINKRNYLQHLLGLTNHILMVNPKDEEALRYKQVIFSYMND

SEQ ID NO: 2546 - protein, 346 aa, unidentified
  source 1..346: note = Related to JAFYNR010000020.1; note = Clostridia bacterium
MNFLTYEQKFKEQAELSGKSEYYIDECLNYARNLNKNGLPIIYDDVHLSKLLGIRLDFLISISNSQKDYYRFFSISKSNGKSRKIAEPLPLLKEIQHFILDNILLKVPCSVYSKAYKPGAKLKSNAKFHRNQPVLIKMDLKDYFPSLDEHRVYKFFHHLGYKDSVSVLLAKLCTLNKALPQGAPTSPYLSNLLTRELDEDIYLFCKENGNLRYTRYADDISISGNMIPTNIIKGVVKIIAKHGLKINKEKTAVIPNSNRQVVTGVVVNQKLQASKPYRHSIRLEMHYCMRYGIEDHIKKSKKISNNTNKRKYCQQMLGKVNHCLQLNPNDSEMKSYRDFLLQKIVE

SEQ ID NO: 2547 - protein, 351 aa, Flavonifractor plautii
  source 1..351: note = Related to JAKNGR010000030.1
MNFSTYQREFIAEARKHDKNDEYIEKCLAYAKNLVDKRLPIIYDEKHFSQLVGIDLDYLLSAANSPKHFYRYFTIPKRNGKIRRISEPLPVLKEAQYYILNNILKKVPCSIYAKAYKPGATLKGNAKFHRKQPILVKLDLKDYFPSLHESRVFQLFHQSFGYGKSVSILMSKLCTLDGGLPQGAPTSPYLSNLLTSEMDDKIYQFCSSNGNLRYTRYADDISISGSMNPSDIISGVSRIVSEHHLQINKSKTAVFRPHKRQVVTGVVVNNKIQAPKDYRRSIRLEMHYCMKYGIESHILRATKRSSDAVDRVKFCQSMLGKINYCLQLNSKDTEMQRYRDYMLEQLHGNAQ

SEQ ID NO: 2548 - protein, 360 aa, Butyricicoccus sp.
  source 1..360: note = Related to QUJF01000028.1
MNFITYEKMFTEAARKAGKSDDYIKNCINYAKALADKHVPIIFDIHHFSQLIGIRLDFLLAISNSPRNFYRYFTIPKASGKFRKIAEPLPILKDIQHYILHNILKKIPCSIYAKAFKPRASLKGNAKFHRNQQTLIKLDITDYFSNLHESKVFYLFFHTVGYSKSLSTLLTKLCTLNGGLPQGAPTSPYLSNLLTIDMDTAIFQFCSENGGLRYTRYADDISISGAMNPSSVIHAVTKIVSDNGLKINKLKTAVIKHHSRQIVTGVVVNQKLQAPKNYRKSIRLEMYYCQKYGLISHLQKSGKSSTPLDAANYCQSLLGKINYCLQLNAYDTEMKKYREYMLKQFHHYNQSLYSASQALK

SEQ ID NO: 2549 - protein, 303 aa, Fusobacterium necrophorum
  source 1..303: note = Related to NZ_CP028107.1
MEFTIYDVLKFNPFIIKKILANKDKYYKIFIIKQRNGKTRQITAPVRELKVLQKNILKSLLEKMEYSKFAKAYTKQKSIKDNANFHQKQALVICLDIKNFFDNIRFNSVKDVFQKISIGKAEILAEICTYHGKLPQGGVTSPYLSNLIMEPIDKKISNFCFKYDLNYTRYADDITISTHLLSKNERERFVKLVIENINNILSEYSFTLNEKKIKVQYAYQQQRVTGIIVNNTMQVPKEYRMKIRQEIYYIKKYGLDSHLMRNHQEKQKYINILKGKINYVLFVNPKDEKMKEYLHYIENHLRC

SEQ ID NO: 2550 - protein, 346 aa, unidentified
  source 1..346: note = Related to JAFVWM010000017.1; note = Alphaproteobacteria bacterium
MDLNEYIEQFTKNAIHKLNPEEINVCVRYATNLMNKGLPIIYDLKHLSYQTKYETGFLYLCINFKDKVYRQFSIKKRNGSDRNISEPLPNLKNIQTWIKKNILEKLSVHKVAKAFRKNQSIKNNAYFHKNQDTVLALDIKDFFNNIDGKTVYLLFRRCGYSRRVSNILKELCTFNDCLPQGAPTSPIISNLIFAAIDNRIYNFTRKENLYYTRYADDITISGNDIKIKKVISFISMVLKENNFELNQDKIKIMRKNSCQLVTGIVSNNSVLNAPKYKIKDLRKEIYYIRKYGIDDHMAYVGIKKAHYIEHLMGIANFILFINKNNKIATEALDFLRELQKQRNHPF

SEQ ID NO: 2551 - protein, 346 aa, Fibrobacter sp.
  source 1..346: note = Related to JAFWOM010000088.1
MNWTDYKKQFELKCDLKKIPQVQVDVWITYARCLWEKSFPIIFDKAHLSKLLGYECSLLDKIIHRPGKFYRSFSISKRNGEFRELNAPYPTLNEIQKWILVNILEKKKVSPYAKAYIKRKKILDNIRFHTNHEVVIKLDVDDFFGSIHKSAIIKIFNSMGYSRQLSFDLASLCCLKKSLPQGAPTSPCLSNIFCEQIDARLSKYLKKLNLCYTRYSDDITISGNISDVQIPQIMSFCKYLLSDYGLNLNEKKTKVLRQHQKQYVTGAVVNKKMSADIKLKKDLRQQMYYIQKYGLNSHMVYKRIDQQNYVYHLMGKIQWVLALEKSNQEFLRYKEHLTEILKNLKF

SEQ ID NO: 2552 - protein, 346 aa, unidentified
  source 1..346: note = Related to JAFXYS010000380.1; note = Candidatus Saccharibacteria bacterium
MNWISYKEKFKETCQKKNISEIQIQKWLGYASVLYQNGLPIIFDKKHLAGLLGFKWELLRNIIHSQTKFYRTFYIPKKSGGRRCLKEPYPSLKEIQNWIKDFILKKCSISRFAKAYAPKRSVYENVRFHKKHAVVMKFDVEDFFGSINKWQVTSLFEKMGYNQDLAEILAGLCCLDNHLPQGAPTSPYLSNIFAKDIDNRLSKYLLKRGLYYTRYSDDITISGNISDKQVPQIISFCKYLLSNYGLRLNNEKTKILRQHQKQYVTGAVVNENVSVESKTKKKLRQQMYYIQKFGLESHMNHLEIKKQNYVYHLMGKICWVLTLEKKNEEFKRYKDVLKELLDAPKN

SEQ ID NO: 2553 - protein, 346 aa, unidentified
  source 1..346: note = Related to JAGBFB010000015.1; note = Spirochaetaceae bacterium
MDWGNYQKRFKISAKKRNLPDSFISECLDYAKKLYDNKVPIIFDTEHLSLLLGCKIQFLYKITNNLNKNYRIYKIPKHNGKMRTITEPYSDLKNIQQWILVNILQKMPVSIYAKAYISNTSLKSNVRFHVKQPVIIKLDVQDFFPSIHQISLVKLFRKYGYELNLSRMLSRLCTYEGVLPQGAPTSPYISNLYCRRIDNRIGKYITNAGFRYTRYSDDITISGNISDKQIGTIIQFCRKCLAEEGLKLNEGKTQILRSHHRQLVTGVILNQKISAGTKKKKDIRKQVYFIKKYGLESHIEHEKIEKQNYIYHLAGLINWVLFLENNNKEFLEYKKFVNEIIKQINS

SEQ ID NO: 2554 - protein, 350 aa, Prevotella copri
  source 1..350: note = Related to NZ_VTYX01000020.1
MDFFKYISDFTLAATESGYNEEEILSFLQYARTLYDKSLPIIYDQEHLSLLVGFDYYCCLLPISNWQVDFYKKYEIPKKNGGIRIIEEPYPALKEIQTWILKHILEPASLRYVSPVAKAFMPGKNLRENARFHRKQELVVALDLHDFFGSVKAVSIFQLFRKFGYNKSVSMMLSKLCTLRNSLPQGAPTSPMLSNLIFYELDKKLFRYCQARNIRYTRYADDMTFSGDSFSVSHLIAYVKMLVGTRHYKLNEEKTNVMRKGCCQKVTGVVVNDKIQVSKSYRDKIRQEVYYCIKFGVADHMRKISLPGWITTPTIYLHHLLGKVNYVLQINPKDKVFLEYRKCLCDLLLN

SEQ ID NO: 2555 - protein, 345 aa, Prevotella sp.
  source 1..345: note = Related to JAGZTO010000032.1
MNFKKYRSEFLKRALEHGYQRSEVDSLLVYAKVLFDKNLPIIYDQEHLSLLLGYDYDYLLALCNSQTMFYKQYEIPKKNGAKRLILEPFPNLKDIQTWILKSILEPASVKMVFPQAKAFMPGKNLRDNARFHRNTNVVVALDIHDFFGSVKEKYIYNVFYTMGYKMPIVVMLTKLCTLNGFLPQGAPTSPMLSNMVFSNIDNKIFKYSRKRSIRYTRYADDMTFSGKEIDVENLIRYIRSLIGHKQFLLNEEKTKVMRRGCRQIVTGVVVNKVLQVPKKYRDKVRQEVYYSMKYGFTSHMRSIELPSWISTVEVYKHHLLGKVNYILQINPKDTEFLRYRDWLRA

SEQ ID NO: 2556 - protein, 349 aa, unidentified
  source 1..349: note = Related to SUXO01000014.1; note = Bacteroidales bacterium
MDFKEYKKAYIEQALAFGISTNAIDIAIEYAEHLHNRKLPIIYDQQHFFQLVGYDEAYVMAIVNQPKSFYKEYSIPKRNGDRRIIHEPLPSLKEIQTWILKYILNPGAKIFVSSVAKAYIPKQSVRDNARFHKRQKYVLCLDLKDFFDSISFQQVFSVFRNMGYSKALATLLSNICILNNSLPQGAPTSPMLSNMVFKYYDDKIFDYCKSRNIRYTRYADDLTFSGDFNCKAVVSFIRKVLSKTSFAINDNKTKFVSRGNRQEVTGVVVNEKLQTAAIYRKKIRQEVYYIIKFGVDKHLEAIEWKRPIIEYLHHLLGRINFTLTINKNDSEMRKYYEYIHSVLKEYKEE

SEQ ID NO: 2557 - protein, 327 aa, unidentified
  source 1..327: note = Related to MKRS01000610.1; note = Bacteroidales bacterium 45-6
MELLLNYAQSLNSHNFPIIYDQSHFSKLVGYRYGYILCICNSPDVFYKEWKITKRNGKLRTIHEPLPSLKEIQNWILKEILNTAVNEFVSPVAKAYTPDRNIRDNARFHKNKKIVVCLDIVDFFGTVTYKQVYSIFRQFGYNKSIATLLSNLCILEGSLPQGAPTSPMLSNLIFYHIDTAIFKFCKERKIMYTRYADDLSFSGDFNVGLLISYISNLLSYHGFSINEKKTKVLSRGRSQQITGIVVNEKIQVSRRYRKRIRQEIYHIIKYGLENHLKKIAYPKSSIQYLHHLMGKINFVLLINKSDNEAIRYMEYLKSIYNSYKTLI

SEQ ID NO: 2558 - protein, 343 aa, Pontibacter silvestris
  source 1..343: note = Related to NZ_JAJJWI010000010.1
MNWVKYQTNFINRASDRGLDEGTINFLLAYAKALYDNELPIIFDKYHLANLVGYKVSYLERATKNTSRFYKTYEVPKKQGGKRIISEPLPSLKHIQKWILVEILNKLKPSKYAKAFIKRRNTKSNAVFHRNKNIVLTIDIKDFFGSIKAPAIIDLFKKLGYTNHLSCLLGDLCTLNGKLPQGASTSPALSNLIFFEVDNKISDYCSSNNIFYSRYADDLTFSGDFNVGKMITFVRECFNEANFTINEEKLRTRRPHQRQEVTGIVVNQKLQAPKDYRRHFRQEVYYIKKYGLQGHLEFIKEKRNNYLLHLIGKGNYIYFLNKNDIYVKESLIFLKELYFKMMR

SEQ ID NO: 2559 - protein, 342 aa, Rhizobium leguminosarum
  source 1..342: note = Related to JACIGQ010000001.1
MLNFRFSKEYVQLDLFDDFGNEDRGAVVQQYIKCISDNKAKPILDTQHLSKLVGYTEQFLFSVSASPLHFYREYKIAKKNGGVRTLNEPLPTLKAVQKFIAGEILNDVEPHKVAKAFRKNHTLRGNAVIHRRRPFMLKIDIKDFFSNITEHAIYTMFFEIGYTRQVSRLLTGLCTLNNGLPQGAPTSPMLSNLVMREFDHTVFEHCVQNDIFYTRYADDMAFSASDDRVKSLIPFIRSELKKYGLEINQKKTSYSGPGARKYVTGIVVNERLNVLRIDRKNIRQEMYYIRKFGINGHLRKTNNSSPNYVDRLMGRLNFAFFVTKEPHFLEDMRYLKELKKVL

SEQ ID NO: 2560 - protein, 342 aa, Rhizobium sp.
  source 1..342: note = Related to JACYUZ010000001.1
MLNFRFSEEYIQLDLFHDFGLADRESVVSEYIERISSNRAKPIFDTQHLSHLVGYSEQFLFSVSASPVHFYREYKIAKKSGGLRTLNEPLPTLKAVQKVIVHDIFRDVEPHKAAKAFRKNHTLRGNAVIHRRRPFMLKVDIKDFFSNIDQHAIYTLFYETGYTEQVARLLTGLCTLNGCLPQGAPTSPMLSNLAMRSFDNAVFEHCVQNEIFYTRYADDMTFSAVDERVRNIIPFIRSELKKCRLQINEKKTSFSGTGARKYLTGVVVNERLNILKEDRKNLRQEMYYIRKFGINGHLRKTENHSSNYIDRLAGRLNFAFFITKEAHFQEDMRYLQELKKVL

SEQ ID NO: 2561 - protein, 342 aa, Rhizobium sp.
  source 1..342: note = Related to NZ_LJIB01000039.1
MLKFQFAQEYVQLDLFSDFGSEDRYEIVQEYIDGIAINNAKPVLDSLHLSKILGLSEYFLHSVSASPENFYREYKVPKKSGGMRIINEPLPTLKLVQKSIVDDLLRNVEPHKAAKAYRKNHTLRGNAVIHRKRPYMLKVDIKDFFPNIDTHSIYQLFFGLGYTAQVARLLTGLCTLNNGLPQGAPTSPLLSNLVMRGFDAAVFGHCIEKEIFYTRYADDMAFSSKAPDLPSLLPFLRQELKKCRLQINDKKTDFAGKGARKFVTGIVVNERLNILKDERRKLRQEMYYIRRFGLNGHLRKTDNDSANYIDRLLGRLNFAYFVTKEAKFQDDMRYIIQLKRVV

SEQ ID NO: 2562 - protein, 345 aa, Brucella anthropi
  source 1..345: note = Related to NZ_LSVB01000004.1
MSKFKITQSLTHTQLDLFNNSSFLDHEEIVTRYGNNIRSNGAVVIYDTKHLSRIIGYAESLLHAISSSPQHFYRTFEIPKKSGGVRVINEPLPTLKEIQRFIIDYILRGVEPHKSARAFRKNYTLRGAAVIHKSRNYMLKLDIKDFFGSIKSFGVYDIYYNLGYTSQVAGLLSGLCTLDGELPQGAPTSPLISNLFLKDFDEYIFDYCKNNSIFYTRYADDMTFSSNEDTMKHIIGIVRSRLSKHGLKLNQKKTSLSGKGARKFVNGIVVNEKPNILRSERRSLRQTMYYIKNYGIDGHIRVAKIDTPNYLDHLLGKLTFAHFVTKEEVYKNYIDYIRSIKSILK

SEQ ID NO: 2563 - protein, 342 aa, Agrobacterium sp.
  source 1..342: note = Related to JAAXMM010000032.1
MPDFRFSQEYVQLDLFNDFGSLDRREIVATYVTELTRNKALVLFDVSHFSRLVGFSEGLLHAISAAPFYFYRRFDVPKKSGGLRTICEPFPTLKLIQRFIAEQVIANSEPHKAARAFRQNHSLRGAAVIHKARPYMLTLDIRDFFPTISGFSVYRVFFDLGYTAQIARLLSGLCTLENGLPQGAPTSPALSNLVLRRFDEVIFNECKSRGVFYTRYADDMTFSSREDNLADLIGVVRKELRTDGLKLNSKKTVMAGKGARKYVNGVVVNERPNILREKRRNLRKDLYYIKKYGINGHVRFSNIDIPNYLDHLIGKLTYAHFITKDQKYKEDAAYLYELKKLT

SEQ ID NO: 2564 - protein, 343 aa, Aureimonas leprariae
  source 1..343: note = Related to NZ_VZDO01000003.1
MSTFAFDKDLQQLDLFDSFKNENREVIVAEYSRIILENGAAVIFDTEHLSRLLGFSQELLFSISAASNKYYREYTVLKRSGGRRVINEPLPTLKMIQRFILAELLDGVRLHKAARGYRKNHTLRGGAIIHRGRPYMLTLDVQDFFPSINQYQVFQALLKLGYTKQISRLITGLCTLHDGLPQGAPTSPLLSNLVLYQADKAIFDHCVVRGLFYTRYADDMTFSSKEDNVVEIIPVVRTQLSNVGLRINPRKTNVSRRGSRKYVNGIVVNVKPNILKTERRSLRQEMFYIKKYGIEGHIRWSKVEAPYYVDKLIGRLTFALFVTKDKRYSQEIRYLSALKKAMQ

SEQ ID NO: 2565 - protein, 343 aa, Tritonibacter mobilis
  source 1..343: note = Related to CP015231.1
MTPSALNIRFDDGVDENHRELVYLYASRIESKGLTVILSPEHLGHLLQMRLEDIYAISNAPQHFYREYRAKKKSGGTRKISAPLPLLLSIQRWVLKNILEPQAIHPAAKAYLKKSSIKQNARFHRGQRHLFKSDVRDFFGSISSRWVYSHFQSLGYSRAVSMVLTAICCKENALPQGAPTSGYLSNIYMTSFDKAVFSYCTERKFRFTRYADDISISGSGINFSELSAFVNRELRDIDLKMHSGKTRLIRSHQRQKVTGVVVNEKLGPGRDFIRKLRQEYYYISKYGVEEQSRVSGWNNSIAYLNNIHGRIAHAIFLTGHDARLLEMKNAVESLLRKSEYIRG

SEQ ID NO: 2566 - protein, 343 aa, Leisingera caerulea
  source 1..343: note = Related to NZ_KI421513.1
MNFSDLKIKFDDGVEDGHKDLVHQYISRLESQGLSVILSPEHFGHLLQIRLEHIYAISNSPRHFYREHQAKKKGGGTRKISAPLPLLLFIQRWVLKNILEPQAIHPAAKAYLKKSSIKHNARFHRGQAHLFKSDVKDFFGSISSGWVYNHFLGLGYSRAVSMLLTAICCKENCLPQGAPTSGYLSNIYMTNFDQVVFSHCLKRKFRFTRYADDISISGSEINFKELSTFIDRELRNIDLKMHTGKTRLIRSHQRQKVTGVVVNEKLGPGRDFMRKLRQEYYYISKFGVNEQARVSGWNSSTAYLNNFHGRVTHALFLTGHDEKLSEIKNAVENLLQRSEYILG

SEQ ID NO: 2567 - protein, 339 aa, Roseomonas sp.
  source 1..339: note = Related to JADCGC010000017.1
MTSSGIKIVFAEAMKPEQSAAVRAYIKHFEEKNLPAILSGEHLSLQLGIKQSTLYAISNSANAFYRTFYVQKKNGGKRQISAPLPLLLATQQWILSKILQSVTVHPAAKAYKKGSSIKENARFHKGQESLFKSDVEDFFGSISQFWVYEFFHSLGYTTAISRLLAGLCCKDGVLPQGAATSGYLSNIYMCVFDDAVFTYCQTNRLRYTRYADDIAISGAGIDFDKTKDIVSTLLENHKLRINLRKTRIQRRNTRQKITGVVVNDRLGPDRQFLRRIRQDLHYIRKFGVHGHARQRGFKSPLFCINNLLGRITHAKFLLGRNTPLEGEKKYLERLLDQIS

SEQ ID NO: 2568 - protein, 339 aa, Thalassobius mangrovi
  source 1..339: note = Related to NZ_WWEN01000004.1
MSLLSDNFEFGGKIGIAEREAVEKYAQRLIDKGLPVIFSPEHLSHITNIRLEALYAMSNSQESYYRSFDIPKKSGGRRRIDAPLPSLAFLQRWTLDNILNSVPLHASAKAYRKGNSIFDNARFHRKQRVVLKVDVKNFFGSIEEHSAFLIFKGLGYSKRLSKLLSMTASLHGSLPQGAPTSGALANIYMKTFDDAVFNACKESKVRYTRYADDLTFSGSDFDTDAQIRLVDKQLSKIGLSVNARKTRVLLPHVRQDVTGLVVNEKISVPQDYRRRLRQECYFIQKFGIHGHAREVNAANPRVRLEEVIGMLSYVKSIHKNEPYWSDAHSRMLEIRASFF

SEQ ID NO: 2569 - protein, 339 aa, Shimia sp.
  source 1..339: note = Related to JAEPMN010000068.1
MDFQVERIEFGEKIGLAEREAVNKYAQFLASQSLPVIFSPGHLSYITNMRIESLYAMSNSQESFYRRFEIPKKSGGRRRIDAPLPSLAHIQRWILDNILQGVALHPSAKAYRKGYSTFDNARFHRKQSIVLKVDVKNFFGSIEEHSVFSIFHDLGYSKRLSKLFSMIATLDGVLPQGAPTSGALSNIFMRAFDEKIFADCKRQGIRYTRYADDLTFSGDAIDLREHIRLVDKEFSKVGLTLNSKKTRVLFPHMRQEVTGLVVNDSVSIPQAFRRQLRQECYFIKKFGIHGHAREVNARNPRILLEEVIGKLSYVKAVHAKDPWWAKNHAIMLEVRKNLI

SEQ ID NO: 2570 - protein, 359 aa, Mesorhizobium sp.
  source 1..359: note = Related to RZOF01000138.1
MQKSELISRNINVIFDGLTEAQIAAVQSYSASLADRDLPTIYSPVHLCQVVGVSPQYLFAVSNDPKRFYRGFSIPKRNGGRRFIQEPLPLLKAVQRWLLANILEKVGVSPFVKSYIKGINLKHNSRFHIGQDFVFKLDLESFFDRILTKDVVEVFYKAGYTRDVSIFLAKICVSNGRLCQGSPTSGAISNIVLLEFDLTLFEFCRSRGFRYTRYSDDITISGKMDAGTNFHEILLFISELASANGHKINKGKSQVLYRHNRQKVTGIVVNEKLTVPRPVRRRFRQELFYFERYGPRGHAERIGEGLDQCVARLIGQASHLLFVRPDDEFVRVKKDLLLRVLRQMDADPQFGFDLGGRPL

SEQ ID NO: 2571 - protein, 354 aa, Rhizobium leguminosarum
  source 1..354: note = Related to SIPE01000001.1
MLITREIDLVLDENLGVAAKENISAYCGKLSERGLPAILSADHFSLMIGVDGRYIYGVSNNADRYYRVFQLPKRREGFRTICEPLPILKMIQRWILDNILSKIPPAKCVNSYIVGRSIKSNARLHLGQESLIKLDVKDFFGSISSHHVYKLFFDLGYTKAVSVFLSRLCTYKGFLPQGSPTSGSISNLVLRGVDEALLTFCTERKIRYTRYADDMCFSGTNIAAPDLIEFVRKNLGELGLKLNNDKMRILKQSHRQIVTGIVVNKRLAVPRLRRQRLRQEIYYLKKFGFVSHAMNTDDSDPVALLRRLIGECAFLMHIHSKDVVDIRDIEFLKALLREELARQRHWTNGDEDLF

SEQ ID NO: 2572 - protein, 342 aa, unidentified
  source 1..342: note = Related to JAJBAV010000004.1; note = Candidatus Cloacimonetes bacterium
MNWSEYEAAIRRACREIHGIPPDRTRLLLERARRLYDQELPVILDQKNLAWFLGFDISLVMCIANRPHKYYRCFRIPKRNGGFRELHEPLPTLKEMQRVILDLILARLPVDPAAKAYQPGSSVKDNANFHTRQPLLLKLDVSDFFGSLREYQVYQVFHGVGYHPQVATLLAKLTCLNGSLPQGAPTSPTLSNLIFREADQRIFHFCRQANIRYTRYADDLTFSGDFKPGLVIRRVASVIETLGLRLNPEKNRVIRRHRRQEVTGVMVNNGLRAARSRRMHLRQQLYYLSRFGLADQAAKHGTKTHLWINHLLGLAGYIRFLDPSDREAARAIAMLKTLRGST

SEQ ID NO: 2573 - protein, 351 aa, Stenotrophomonas maltophilia
  source 1..351: note = Related to NZ_CP090423.1
MTAHSLQSLPDFNEYSARFTEALISRDGEDYDPSYLSRCLSYAKGLLERRLPVIFDREHLCALTGYSSRFIESAVGSPHLFYRNFEIPKKSGGFREISEPLPSLKDVQRWIYQNLLLRIPVSVAAKAFVPGKKLRDGVRFHVGQKFVIRVDIADFFPSITRGRVFGLFRSLGYSSEVSGDLASLCCVCDCLPQGGVCSPYLSNIIMRSADRRLLAYARENSLRYTRYADDFTVSGQKFSKSIIEEVMSVIKSEGFTVNQKKTRVSRSGGRQVVLGHVVNGKVNAPREYRRELRKVAYYVDRFGLDNHLAYLNERRSSASDYYLGKASFVLSANHRDRDALDLKRILLDEVE

SEQ ID NO: 2574 - protein, 313 aa, Xanthomonas arboricola
  source 1..313: note = Related to NZ_KL638873.1
MKYSKKLLDKGLPVIFNREHLCALTGYTPHFVESAVGSPHLFYRHFNVPKKAGGVRLISEPLPSLKDVQRWIYENILLRVQVSVAAKAYVPGRKLRDGARFHVGQKFVVRVDISDFFPSITRKRVFGLFRAMGYSPSVSADLSNLCCSEECLPQGGVCSAYLSNIILRSADARLLKYARARGLRYTRYADDFTISGEAFSPSILNDIQWVIRSEGFEINPKKTAVMRAGGRQMVVGHVVNSRVNAPREYRRGLRQAAHYIEKFGLDNHLARLGETRGSAREYYLGKVSFALSANRSDRDALKLSEVLSVGGSE

SEQ ID NO: 2575 - protein, 354 aa, Stenotrophomonas maltophilia
  source 1..354: note = Related to NZ_JVIE01000007.1
MNAHSLHALPSFEEYKKLFVERYVMRYGNGSDDGFLERCLEYSKNLLSNGLPVIFSRQHLCALLGYEEGYIDAVANSPHLYYREFEIPKRSGEKRLISEPLPSLKEVQRWIYKEILLRVPVSSAAKAFVPRRKVRDAARFHARQKHVLKIDIADFFPSITRDRVFGIFRLIGYSSEVSSTLARLCCVNESLPQGGVCSAYLSNVVLRSLDGDILKYCRGRSLRYTRYADDFIFSGDSIDYGFVKFISSLIVSHGFNVNPKKTTVMGRACRQVVVGHVVNDRVNAPREYRRRLRQIAYFIAKHGMDSHLSHISENRSGAREHYLGRASFVISANPRDRDALFLRNVLTCRMVDIE

SEQ ID NO: 2576 - protein, 352 aa, Methylobacterium sp.
  source 1..352: note = Related to NZ_CP029551.1
MISSIRHVKQSSNYETEWRRYAAAFLSAAKAKKLSQDDIDACLQYAKPLTLGGFPVIYDTDHFCGLVGYTPHYVLGAIKSTDRYYRQFSIKKKSGGDRTILEPLPSLKEIQHWILRNVLERVAIHRAAKAFQKGTSIRDNARFHRGQACVLTIDIKDFFPSIGINRVFSVYHRIGYSKQISSLLADLSCFELSLPQGAPTSPYISNLICRSLDERFFAYARSAKLRYTRYADDLTFSGADIGSSFVSNAYEIIREYGFEPNLSKTRLLRQHQKQMVTGVVVNSKLQADRALRRQIRQYAYYIERFGLEGHAAATSVQRRNFERHLMGLAQFVCSLNPYDRDARNLIELLKID

SEQ ID NO: 2577 - protein, 344 aa, Methylorubrum populi
  source 1..344: note = Related to NZ_CP039546.1
MNADEKETEWRIYSASFFEEALDVGLTANEIEICLAYAQPIFERGLPVIYDNDHLSNLVGYKIKYIQRAAKAPVNFYRNFTISKRSGKPRTISEPLPSLKEIQLWVLRNLLDKMPVHPAAKAFVAGRSIKNNARFHRGQRRVLTVDVKDFFPSISSDRVKAIFVKAGYNSRISSLLANLCCLNGKIPQGSPTSPAISNIVCLDMDEEFFQYARSRKLRYTRYADDMTFSGDVIRHSDIKHIYRIMRSYHFEPNLEKTRLMRPHQRQQITGIIVNNHMQVSREYRRELRQNAYFIGKFGIEEHAVVNEITHIRFRDHLLGRANHALHVNSSDRDAIRLKEALKRF

SEQ ID NO: 2578 - protein, 344 aa, unidentified
  source 1..344: note = Related to JAGQPV010000303.1; note = Planctomycetaceae bacterium
MQDASTAPSFEEYSAIFRSTAGADALQPEYVERCLQYARKHLQDGRAVVYSANHLSSLVGYDISYLYGVANSGGNYYRTFSVPKKSGGKRRISEPLPSLKEIQRWILTYILSPVQVHTHVKSFRMGYGLRANARFHRAQKIVLRLDVLDFFGSIRVKRVADFFLKLGYAKPVATLLAGVCTLNGKLPQGAPTSPALSNLVPWPVDVRLSTFARNEGIRYTRYADDMTFSGEFKPGKVISMASRVLRENGFQLNVKKTNVMGEHQRQLVTGVVVNEKLQVPRGVRRGLRKEVYYIEKFGLTEHVRRMGVSDPKYVSRLRGMAAHILAVNPNDEEAKNALRFLGSL

SEQ ID NO: 2579 - protein, 354 aa, Rhodovibrio salinarum
  source 1..354: note = Related to NRRE01000008.1
MRTHRDLASSWAAYEAAFIIEARRRGYSDDDVRTCLSYAKKLHLSNLPVIYDQAHFSDRVGYDISYIRRASNDPEHFYRTFNVPKKSGGVRQINEPLPSLKEIQRWILDNILGAMSVNPCAKAFVVGRDVRDNARFHRNQRIVINVDVKDFFPSITHRQIRMIFLKAGYSPEVGELLTQLCCLDGVLPQGAPTSPYISNLVCRPLDERLFGYAKKNGLRYTRYSDDISVSGDMEPAEVLQFVKKVCREHGFKIHPDKIRVLGPGRQKRVTGIVVNKHLQVPRKKRRVLRQSVYYIKKFGLDEHLSKTKNNRRNFLDHLMGQVNYVLFVNPKDREAQDWLRQLREIKNGAIDYRD

SEQ ID NO: 2580 - protein, 354 aa, Chthonobacter albigriseus
  source 1..354: note = Related to NZ_JACDIT010000005.1
MNSLYTPEYFVKVAEHCSNAGFAADAIEDVLVYAIQIANQGLPIIYDDQHFSQLVGYDLQYIYGVTNDQSKFYKSFTKKMRSGKKREIDQPYPSLMEIQYWILHNILEKIECSPYAKAYIKGRTLKDNARYHVGKNFIVKVDIKNFFPSIKTGSVYKLFYDCGYTKQLATLFSRVLTLNGHLPQGAPTSPAISNLVCRSLDEVLSTIAHDRKLSYTRYADDIAFSANEYPKFLIREIRSCMRDHGFELNETKTRVMRQSGRQQITGIVVNKKMNVSKERRRRIRQELYYIEKYGIEDHIRYINETRKNTIAHLAGSLSYAIWIQPRSAELKKYSKMLATLHKDLEGEDDIQTEQ

SEQ ID NO: 2581 - protein, 347 aa, Methylosinus sp.
  source 1..347: note = Related to NZ_AP022332.1
MTTLDLPYVTDRYKEIALQCGLSSKDILSIERYAQKLEANGLPVIFDEKHFSALVGYDISLLYAISNDQRKFYRSFNIPKRNGKLRQIDEPLPTLKEIQRYILDNILSNVEISKASKAFSRHSDIKKNARIHIRQPEILKVDIKDFFPSVNISSVYKALYALGYTDSLAMLFAQICCLDKSLPQGAPTSPALANIVCRDLDHDLLKYCTDRNLRYTRYADDITISGERIKKETITEVRFMIKSFKFKLNEEKTSIMRSGSRKVVTGIIVNTRMQAPRETRREFRKNVFFIRKFGVDGHISQIEEDRNNYLRHIIGVGEFILWVDNKNKEVVSDLNFLKRLLKSESVV

SEQ ID NO: 2582 - protein, 373 aa, Thalassospira xiamenensis
  source 1..373: note = Related to JALLPZ010000001.1
MKRKYRHDWTAYAARFKRAAKSINKDDEYIANCLSYAKKLYEKNLPVVYSQEHFSFLCGYEYNYILSACNSEKYFYRKIVIKKKNGGNRILNEPLPSLKDIQRWVVENILEKVEVHPAAKAYVPKKSIKDNARFHVNQNVVISVDIKDFFPSIHISRVYNIFSSLGYSAAVSKMLAEICCYKNCLPQGAPTSPYLSNIVMHDLDDDLFAYARRNGLRYTRYADDITFSGDIKPSKLIATLYQLITEYGFKLNKQKISVMRRGARQIVTGIVVNQKMQFQRVRRKKLRQDVYYINKYGLNSHCIREGINKRNYLSHLIGVANSILFINPNDKDAQDAYQIIIDLLKDESKLDGQGRLDLRVSVEDSRTESPKTH

SEQ ID NO: 2583 - protein, 332 aa, unidentified
  source 1..332: note = Related to SUWI01000086.1; note = Lentisphaerae bacterium
MISGITVERIAEETGLNRRFLLLLSNNIPDYYRIYRIPKKNGNFRTIEAPASVLKRIQQYILWTILPRQIPCTPEKLAETAEILKGNGISFHRSNLARMLSAATAFEPRSSIKKNAQEHCGKPVVVSLDVKNFFPSLKYDLVRSLFQRIVHEDGVAVMLSKFCTLNGHLPQGAITSPHLSNLLLHDFDIKLRQYCLAHKLAFTRYADDLTFSGDPGNEEITGLIRYVKQELGKLGLRLNHEKIRIQRQGMRQEVTGVVVNAKTSAPREVRRRLRQQMYYLNKHWEREWRKLDEHSLNVLLGQANFIWDMDRDNPEFTEYRRQLLEIKHFFHN

SEQ ID NO: 2584 - protein, 317 aa, unidentified
  source 1..317: note = Related to JAFSTP010000085.1; note = Lentisphaeria bacterium
MNSKFLYLLGNHIPDHYRIYRIPKKNGNFRTIEAPAPILKLIQRYILVRVLPVRLPWGESRLRETEARLRENGIRFRPGEIPRMLSAARAFERGCSIGRNAAAHCGKPIVVSLDVKNFFPSLKYGPVRAIFQELAEDDASAVMLAKFCTLNGHLPQGAVTSPHLSNLLMRDFDAALAEYSLLHGLAYTRYADDLTFSGDPSNEEITELIRRCRSELATLGLRLNRDKIRIQRKGMRQEVTGVVVNAKVSAPRKIRRELRQRMYYLNKHWETEWRKLDEHSLNVLLGKANFIWDLNRNDPEVAEYRRQLLEIRRFFHN

SEQ ID NO: 2585 - protein, 453 aa, unidentified
  source 1..453: note = Related to DNXH01000048.1; note = Lentisphaeria bacterium
MNGDGESLSLTGSCRKGMSGKQMFTRIPCAPLARTSTPIICVISPWNFLGGHTLRCAQVRSAAVNSKSLCRKASEYLFRALFAKFVFSDKTAVSGFLRVFMKQNTFTIQKMAEDLGINVKFLYLLSNRTQEFYKIYRIPKKNGKFRTIEAPCAILKRIQEYILRFVLPDKISLGGTRCTKALQSLRRQDPEADVTRNEITGLMSAATAFEPGTSIKGNAENHCGRPVVIALDVKDFFPSLKYSRVLALFRRYTETENAAVMLAKLCTLYGHLPQGAVTSPHISNLLLHDLDFTLKLYALDHNLEFTRYADDLTFSGNPDNGEISGLIQICRQELRKSGLRLNNDKIRIMRKGMRQEVTGIVVNSKMNAPREDRRHLRQQMYYLNKHWEHEWRKLDEHSLNVLLGKANFIWDLNRENPEIAEYRRQLLEIKRSFQREAKKAICSAPQDSAEQAN

SEQ ID NO: 2586 - protein, 317 aa, unidentified
  source 1..317: note = Related to JAFXSU010000015.1; note = Victivallales bacterium
MKMATFLLTMYCKIPKTLSELTQCLGSTTEFLYWLSNHIQEQYTIFQIPKKNGKTRTIEAPSQLLKKIQRRILSKILFQRAERSAMAFEKRRNIRKNASAHLGAAVVLCMDVKDFFPSLKFSQVTDYLESLGMQRNVSVLVAKICTLQGHLPQGAVTSPHLSNLLLAPLDKAIRNFCKVKKYHFTRYADDLTISGKMNDEDIREAIAVCKKNFMTIGLKLNPDKTHVMRNGNRKMVTGITVNQKLSAPKSLRKRLRQRMYYLNHFWEKDWHRLTEEELNNLLGLVNFVWSIDRENQEFSQYRTQLLEIKRFWNSVPR

SEQ ID NO: 2587 - protein, 314 aa, unidentified
  source 1..314: note = Related to JAFTIQ010000013.1; note = Lentisphaeria bacterium
MINGKLSEKLTSVNMLARKLGLTVKQLFFIVYNLEKFYTVYQIPKKNGKFRTIEAPDPLLKKIQGRILQKLVSRHTSKTATAFEKKRNIIQNAQIHLNQPVIVGLDVKDFFPSLKFELVWKYFRDQNIAREPARLIATLCTFKGHLPQGAVTSPFLANRLLHDFDEVMSQHCRQVKVNYSRYADDITLSGNISDALKEKLISFAREGLYLYGLQLNNEKIRILRRNNRQEVTGIVVNEKLQAPRELRRILRQKIYYLNRFWENDWQKLTENDLDKLLGQVNFVWSIDKTNSEFTEYRKQLLEIKHYFTLSTKEK

SEQ ID NO: 2588 - protein, 328 aa, unidentified
  source 1..328: note = Related to JAFRDO010000027.1; note = Kiritimatiellae bacterium
MGGPLLSCAFSLFFVGGSVMVRFPDGSLSIATVEAIADVLQVSPKFLYYLSNNVGKHYRITKIPKKNGKFRTIEAPDSYLKHIQRMILDNLLPQSVGEIATAFEPGVGLMDNVVQHVGNPVVLALDLKDFFPSLRLHRIVRVLRELDFPRASAVLLAKLCTLNGHLPQGAPTSPHLANLAMRTFDDRLSLLCRQENLAVTRYADDITISGNIDRHCAESLIASCRVMLKEIGLRINYRKLRILRQNARQEVTGVVVNEKPSVPRHIRRELRKKMYYLRRHGVVGYEPVTLEALRSLLGSVMFVNYVDPDNFEFRQYAEELKVRIKECA

SEQ ID NO: 2589 - protein, 306 aa, unidentified
  source 1..306: note = Related to JAFTIA010000086.1; note = Lentisphaeria bacterium
METLPIIRTVDELAELLCTDARLLYAISNETPAWYKCFQIPKNNGSMRNIEAPRPYLKTIQRRIQKKILSCFTVHDCATAFLPGKNIRRNALFHVNKSVVLNCDIKNFFPSLKSRAVFEFFRRRTGYEPDVCMMLSRLCTLYGHLPQGAPSSPMLSNLLMFEIDETICQWCAKHYLSYSRYADDMTFSGEIDVRVQADILQMVKRNLTLLHLKLNIAKTKVYRSNRRQLVTGLVVNEYVGVPREKIREFRTWLYYTELDIINENFYYDSDEIESRLGLLNFYYSINCNENLLRWRDRLLEIRRMYS

SEQ ID NO: 2590 - protein, 330 aa, unidentified
  source 1..330: note = Related to JAGZDB010000161.1; note = unidentified bacterium
MFEKVHWEYSEFLPVLPTVRDLAGCLDADPRLLYRISNHSAEFYTIHTIPKRNGGCRTIEAPHPILKRIQQRILRKILMQVSTHPAATAFEPGRSIRDNAIRHVGRPVVISLDIRNFFPSLKAGVVYAFFRKLGYDVPVAVLLTRLCTLYGHLSQGAPTSPRLSNLLLLPVDCGLAAWIGTKPVVYTRYADDLTLSGALEREDVSEAIGVCRAALARMGLRLNSRKTKVRRRGSRQTVTGLVVNESVRVPRETKRALRQFMYYLDCFGWESCREHFGPGDEMLLDRVIGFVNFMWDMDKTDLVLREWLDRLLLLKLHPEQVPPPAYRAFQ

SEQ ID NO: 2591 - protein, 321 aa, Victivallis vadensis
  source 1..321: note = Related to NZ_QEKH01000020.1
MDAEETASGLPELPDVEALSELLQIAPKWLYRISNHTPRFYRVYAIPKRNGKFRIIEAPRPLLKRLQRRILTSLLNPVEASPYATAFERGRSIADNARFHLNQPVVLKLDIRNFFPSLKSPPVYRLFFELGHPPPVAALLTRLCCLCGHLPQGAPTSPRLANLLLRPADYRIAAWIGRRPIQFTRYADDITLSGDFGPEHIAEAIQVCRHELGRLGLRLNRGKIRIERRCRRQTVTGLTVNETLHAPRQMIRKLRQEMFYIRKYGWEDRPESELHRLIGIANFIRDVDPGDAACTAHLEKLHAILWNRRQKQLSEQFRRGL

SEQ ID NO: 2592 - protein, 1424 aa, unidentified
  source 1..1424: note = Related to RGCV01000062.1; note = Flavobacteriia bacterium
MKERISPEVLERQVLDASVFEDLFAFLYLLDIESPLDERYYLQHVIPRSDGTKRVLYEPKPVLKALQQKLLQVLYDVLEKPQPYTEYYRFQQKYLLSPCATAYRPKMSVIQNANFHQGNEVVLKVDIHDFFGSIPAAKMKSTWVELLYFCSNRLIQSGLLVHRMKREFVAQVINTLADKIIYITSLNGALPQGSPTSGAIANLYMVQLDRKILHYSVRNRLNYSRYSDDMTFSGEAEDLKTGKILHFLNGLLGRNGLRLKRSKTQVLRKHKRQTVTGIVVNASKNAGRTYQRSVRQSMHYFKKFGKEHALRTHRTLDAFLREITGQVAWILQVQKSNTEFLRYKAELNIISRFHRQGKPVAEAMDYLRNLAQQAEQWKANETVVIGGLEWKKESEVYEGEDMDGIYTFQRRGQKRSFFTRKALEKYVNNHPEWRLPTLHEYERYFDETRYHDRIQLGLTLPSDPRYNGIVNGTEFLHFNRVGAYWTCDLRPRMTLRMAKNRLGRKVLCVAAKNWPFQHHLAKIRCDLSYVRHDHVMDLRVPVNVPGTMEYSSSSDDTQVLLPEEAFSVKLVREIRPNEPMTNFQGMDFALRKLSNSRFSTNFKGLQLTEIPKEVLASWQSSSMLFANNQIEHFDLRNVPPVKLLNLENNRLKGFDFSALHPGLRHLLLKGNPGLKGVEIPWIQLMRQLHELSLDDLPDLVGTMPLESIYLQALGGEVWTILENEQELDALIGQQKPVSHLLVRYRVGIDTLDSRTLFEKLNRIAPKHLYVCFEPQDEGLRRRLDRLKYMTASWEKEIEELDGYIKNLSLRKDIETRVTLFPQHLDNNRIKHLMIDFSWLPNLCFEGDFRIKPDSYHLLHPGIPTLLLPAISQRFHRPTVLMKIIGNKIVPTQHEFPEAVSLDVCYPLAKKHRKIRLSNLHTLVPMHQEHVGDLVLVLSEDAGKQLEQGRIEEVYPRAYELRSGSQFWHDVMAHSKSEKTTFRQRISSIPLLGLSMQFDVYSLSLPIESVPKINRFGVLNLTEVGENNTMTYNDTDLKQFLERSSPSTEFAYLSIFAHKTPAILQLVRDSKRKRNADLPYVIRKNIYATEPLERSQTIDALRAGELLAISLSKPNRRDREIMLAAVEANPFAMAFAHKALKQDAGFILAAMNISLRTLVFLSKDLFKSRNHPNSALQQVLKALMERYNPEDFNFIVGRLSRHINIEKEPVYRFVLEPKPLDSSAVLMSFEQEKKILNNRFCQRSGMYKPIRNYFFKEAERRGFINVNGYFNDIFKALSQNTSVRFLDLSFAGGRTLYALDRLGDIPGLRKLKLTECKFINSLPGLKTLEVLNINRTSNFWSYHDGKTMHQSLPNLKRLEAKYIHISMQEIEDLMVHHPCLEYLAISVTYDDELAEINAIIEKVSAQGKVIEIVLDKSEYIGELPF

SEQ ID NO: 2593 - protein, 1417 aa, unidentified
  source 1..1417: note = Related to VGML01000001.1; note = Bacteroidetes bacterium
MIDQNNQIVQISVNDFLKTDFNVTRLKFNALKLLHELELSEELSEECYIKHVIPKHDGTKRILYEPKPLLKEIQKQLLNLLYTLKKHRDYPVLSRNIKYKYLPTRSSTAYLKGSSVVKNANFHIGKDVVVKLDISNFFNSIPKNKIELFWFDILNLKVKYLIHLGIIEKDETEDKKQLIISGLAKKVLSSTTLNGFLPQGSPTSGYIANSYLVSFDKKMLEFCVNKSLCYSRYSDDITVSGSNSELVSKQVIKFVQHQLYKKSLKLKKSKTKVLKRHKRQTVTGIVVNEKRSAGRAFKRGLRMQMYYLKKFGLDHVSRTHSNINSFLLELAGKVNWVLQVNKVDPEFKRYKGELSIIKRFLALGKTVGDATNYISELENKDFKIKNNSVFIAGLFWRISDDDTQTDYPSIDRKNKSVQLFTEESIELALKNNPGWRLPTMDEFNNFIKETNFEDRRVLGIRYPFDPHFNGLADENGYRYYNRVGLYWTSDLAHLSKERSTKGRIARKAICFLSFDQRIKKKINHNTACYISSKTFSLSVNKKQKFELTNNRSIDYYLNPPLNEDFQAIVGACSIRLVMSEEMTKKPMISKTLWDSIQLSKFSVDLSNLNFEEFSFSLKNVNASSILLYNNNLKHVNLTEIAPVKRIDLRNNKLESIKLNNLPKGVKHIRLEENKDLKLLDIPWKRLLQSSHELTADQLIFERQKSLGEIYLSALGGESWRTVSSDHELNELIDSKNAVEFLKVRFEIGTNKIDSKELFNRLSKLEAIHLFIEFETNHEQINQLIHRLKMSFGSITPLNEHLNSLERDNNHQENIFLKQYVFNASDLKNIHLKSLIIDFSWIPNIKFIGDFHVKPDLYHLLHPGTSFTSLPATSVEFHRPNILVKVLGEKRIGNEQTYLHVTYPFDSIEERHQNIQTIIPKNQIFIDELILVLSNENEKELKKGQIEEHFPKLYAINRYNSKPHASKLTTNLIYSKRVSGFPLLGFALQFDVHKLSVPLESFYKKDKLLFNPERFKREKGPIMDWTEVNFNQKIHSEKKTRLGKENLLSDLDIFSHKKESKPPTIPPSDDRPLNRPYIIKHGVFAKHKLYSASDNSRNKVMTMLASGEIAAKHLPSKLKNDEEVMLIAIKRNPYSMVFASKRLKENPAFLLKACKISARTLVFLPKKLATKQVKSDSIFNQLIDYLLSFLTPAEFHFVIHKLGTHISQSDGEYRYFTCEETALEKSHVISSFESEVFYQESTTRAGMPNIIRKTFLSEATKQGIFNSNGYYNSLELAKQNKENCRYLDLSFSGYHHDLTALESFKNLKTLNLSYTSVNCKLPNIPSLENLFVDNTRNFFSYNTPTLLNPIFPNLKIIYARETGYLSLKEITSLLNLLTKIEIIDLRPYFYINEKEILALQQQLIQQGRTLEIPIKTPK

SEQ ID NO: 2594 - protein, 1231 aa, unidentified
  source 1..1231: note = Related to JAJTDX010000087.1; note = Cryomorphaceae bacterium
MNNSELTHRSFTADFLKSDKIEYTFNALRLIHDLTLPEHFDESYYNKHVIPKSDGSSRVLFEPKPVLKEIQHQLLEFFNSILEQVPRGYRQKDRIRKKYLPSSCATAYRKGKNVVTNANFHIGNEALLKADIENFFDSIDVSEMSSMFMDFLYIKSGYLSLIGILDENWSDIEKAKVRLSLAKKIVTVSSLNGGLPQGSPTSGILANFYLAKFDRKFLNYCIRHKLNYSRYSDDLTVSGNQKDLAPGALLHQMNKLLKPLKLRLKKSKTKILRRNKRQVVTGIVLNEKRSAGRLLKRSLRQEIYYLKKFGESHVSKHSSSTKKYLRELSGKVSWVLQVQSADNEFRRYSGELQIISRMVRSGKTLADAASYIQFLENKAKELKGPEPLMVCGLEWRKNDLFYARDLYNLFEREMYAGRVGGNKEEPGLVFTRRGVEKKLYTEEMMLRVVSRLIKWRLPTSEDFADYIRETFYEDRALLGLRVPSDPQYNGIAENHGLCFYNKMGAYWTADMVHVKDPKSSVRAKVGRGVFYVKSRHWSTKNRLDLFGGEWMSKTTGIKPVNAVYYFLDQRFHKNLATNVPIKDRPWVESTQLACSIRLVRTQSIEWEAHHISDKFWQSVSSTRFSSDLSGKHISSVPTTYLKNWNSSSLLLARNKLDQFDLTACPPVKRIDLSGNKLKHFDFSSLPKGLRHLLIDDMDALEGAKLPWDKLFSSLHELTIKNPHDEPQLTDISELYALGFGYSDCVEVTSDEELQALIQNGEKIKFLKVKVLLGSGAISNEGLFGLINQIAPLTVLITFLCLDQGLQQTLDRLKMASGNIQPYMEELEAYLQTVYSTSLEEYNWLHKPLVLNPDQLNSNRIRHLILDLSWFPNIVFNGDFGIKPDLYHILHPGVDSLQLPSTSTEFHRPGILMKILADSYQPVPQEYPFIVTYQPLNRWNKRVAKKHMLTLLPANQNHVSEIVIVVAGKSAKEFQIGRINVNFPRAAHVMFEKEFLFYFTREKYSFTVSRKTFEFPLLGYSRRFDVHKLNFPPESIFRNGRWSSLISDVLEQDSEHESAVHWLDFYSQNMGYFEGGEPNNNVPHKSFNNNFEFAIFPAFKDPDFSRLNSRNLEKFGFPYSVKDGVRFSGVDYRSLSREELLTGLNSGELNPKYLPSKYKKDAELMLAAIRFNSFAFLYAHKGLKGDSDFVIKAMQISLRVLVFLTKDTFKNRLHPNGLLQQIFSILSAKFSP

SEQ ID NO: 2595 - protein, 1452 aa, unidentified
  source 1..1452: note = Related to JAJTDQ010000005.1; note = Cryomorphaceae bacterium
MRVRRVSQVSLVNYQDLGKEVLSFDNIPNLPTFNALCLVHQLEIDGPLTEEFYTKHTIKKQNGKLRILHEPKPVLKEVQGQLLQFIYTNENKEWKNRRYPRKVNKFILRDCAVAYRPGISVVRNANFHVANELVMKLDIKDFFGSVKTDKLLPFWLNLLSTKSHYLYQLGILARELSQEEKLVELTKLSKKLVNVISLNGFLPQGSPTSGILANHYLVRFDKFFLDYCIRNGLNYSRYSDDITVSGSKDKLKPQAVLGTINRLIKLEQLQLNRTKTRVLRKHQRQIVTGVVVNEKKSVPKTLKRGLRQQMYYLKKFGEEHIEKLKTTRPKYLQKIKGEISWVLSVEKANAEFHRYFGELSIIIRFCEANKKITEAVDYIESVEALAAKLNTQEFTIIGDVEWKKEDELAVEQSGTATEGLVQLSKWGKNRTLYTEASMIEIVSKLNDGWRLPSTDEFELYLKETLYEDRQRLGLRIPMDPQYNGFFNSITHARAFNKVAAYWTSSMTHLPHMSQSNTRLGRNVFLFLPKKGGYKASLNRRFKKCSRTSGYIPVNDFLSLSGTVSDGDGHFYPRLFSLYRKTQTYSSAFSLRLVRSLNIEAKLKTIDLSVHFWNSVSTAKHSTDLGNLGIASVPSNVLINWQSSSILLANNKLTSIDLEQLAPVNRIDLSNNELENFDVNLLPSSVKHLILHQNTKLVDMVVPIKKLIPRLHEFTLDAPELPTLDFSELYENALELMFYRCDSDEELDQLIQQQITVVALQVTVQIGSNKIESTRLFERLNQVKGLETLSILFEPFHEDLRNRLTILKNAEVFHLSSLLELNEFVGLDQSQSELFVDPIDAELLSKKHVFYPEHLQSNCIHSLIIDFSWLPNLVFNGNFNVKPEKYHLLHPGIQVTDLPATSESYHRPNLLLKIIGVRGACPSDYFSNGQFQNLTIFYPLNSLLFEQETNVLFDILPTKQFHVENFVLVCANNEKRSVRRGNVLSLFPGSKAFKGVAQSQGRSYNKIVGLGKSKTFFNFPLVGYSLKYDVYKLSVPFRTMFRVVSEYRNSLVLNEETGLLKRMSEGRTEFSVFHSSTKYDLSQMNQLNRISIFPMLYDDAAKRLQVLPSILRKKYVIKRKQHANDPMIGSLNREDLLANLKQGAIDPFKLSRRMFKDEEIMLAAIYGNPFSFILAHPSLKLNSSFVLAALERSLRILVFLNQTIREEKRRKNAVLPAVANYLTEKYAAQDLYYILNQIYRRVSYDTKGMYTFVHEGNEHSKLSDLQSIEQELFTFFLGNRAGMSVKYYDYFVKYAIEKKYFNANGFYMSLNISDEAALDCVCLDLSYLKLSQPLTLPSMPNLKTLKLSFTRFFNIANVPLFPSCEELYFDGLNASNLGDINIFCSKFPKLKKLYARCSNFLMPEHFKTIIEHCLELNFIDVSHFNEFDSMGKELRELCKKLDRTIEIREDIKK

SEQ ID NO: 2596 - protein, 319 aa, unidentified
  source 1..319: note = Related to DNNR01000174.1; note = Spirochaetia bacterium
MIRLISPVPQINSLLDLTVVLKTQVPIINEILRNVKNEYNCFSIYKRNGKKRNIFAPNPLLKDIQKNILTKILDKCRISRYAYGFKKNYSIIDNARMHIGSKKLVKMDIKDFFPSIRHNRILRIFMEIGYSRNISLYLTKLCCLDNKLPQGAPTSPALSNIFFKDIDNEIIGFSICRNIIYTRYADDLAFSGNIHPHSIFDKISXLQRYKLKVNQKKCVLRRPYQQQKVTGIIVNEKLNTQKKYRKKIRQEMYYIKKFGLRAHCQNINNKILRKKYLMGLYGRINFVLRVNPNLQEFSEYKQYLLSLYDLNHYDLLRVG

SEQ ID NO: 2597 - protein, 408 aa, Burkholderia cepacia
  source 1..408: note = Related to QTRC01000029.1
MGTYCSPTTRAQVRAQLVATLWPADKFFIRENLDQNIKASFNVVGKAAPKMTANSEELLRLVGATYKSQKKISQYKNYINTLTNRGLPVIFSFRHLADVLGVAPATLHTMSFRTDLYYKRFDIPKRSGGIRKISAPHETLAAIQRWILENIISRAYQIISPSVVGYVKNKSIKDHVTVHAQSKQLVKFDLKDFFPSISVENVKHIFSEIGYSHSVSRTLAALVTLEGGLPQGASTSPAISNVFMQSFDNAMTTFCDEKCFLYTRYADDIVVSGESGVTESLFDLKAKFSEFGLTLNHGKTRVYADLQRVKFVTGLILCDGNVRLPKSMRRRIRVQCHLFLTQLERMTGLGPTEDNVSVPSSWRSRERVFDPTFPERVLGKLNYWLFIEPDNAYANRMKASILERLEAL

SEQ ID NO: 2598 - protein, 358 aa, Iodobacter fluviatilis
  source 1..358: note = Related to NZ_UGHR01000001.1
MLSNADLLELVKAKYKTEKKINLYAEYISKLEERSVPVIFSFYHFSDILGISPKTLRAMSFDTHLFYKSFEIPKRSGGIRNIYAPYPSLESVQRWILTNILEKAFCDFLPMVVGYQKNKSIKDHVSPHASSECILKFDLKNFFPSILFDHVYLIFKNIGYCHSVSKILSSLVTFNGSLPQGASTSPCLSNIYMKIFDAELTLYCEQKGFFCTRYADDIAVSGGVELINCLKSIKKLFNDNGLSLNHAKTKVYDRAKEVRFLTGLVVNKGVVRIPKEMRRRIRAQCHLFIKEIDCLVSNLPRPEYKLPSESWKNKELVFDPIFPERILGKLNFWLFIEPDDKYALSMKKMIEEKLNEIV

SEQ ID NO: 2599 - protein, 350 aa, Methylobacillus methanolivorans
  source 1..350: note = Related to NZ_JAJAVF010000002.1
MLEINEEIYEHLSSHMELDQRDDLLKLIQKFDDMQIPAIITFDIFARTVNINKKSLAAMCYGAEKFYRTFKIPKRSGGMRQIDSPFPSLSLVQKWISNNILEKLDIDNESACAYIKEKSIKNHVEKHIDSAFILKIDLQDYYPTISTRDIIYTFSEIGYPVNISTSIAHILSLNGGLPQGAPSSPLLSNIITLGLDVKIKEYCQKNNFLYSRYADDLAISGENISEDNILEIYRLISSEGFIVNTSKSKLYTPKQPVRHLTGLIINNGKIRIPKQTRKMVRQKLFYIRNYYLSDLESSSNHNLFSLHDPLLLERVLGYLNFWLWIEPDSEFATVSIQEIKSIKTKLLESI

SEQ ID NO: 2600 - protein, 342 aa, unidentified
  source 1..342: note = Related to JAAXXU010000024.1; note = Geobacteraceae bacterium
MNWEEYKSKFQDQAIIVGLPLGDVEECLSYAFGLYERGLPVIYDQAHLSYLVGYDVKFILKASNSNGPFYRTYEIPKRNGGLRIIDEPLPTLKSIQRWILDEILSQVEISEHAHAFAKNCSIVKNARPHLASKKILSLDIENFFGTIDFPRVYSLFTRLGYNSVVATTLSHLVTIRGVLPQGAPTSPAISNIVTLKMDRRFSGYAKKLKLEYTRYADDITFSGEFTSGTVISFARRVVEEEGFKLNEAKTRSMGRHQAQEITGIITNVKLQVPRQTRRKLRQIAYHISTYGLDDHLRMTGELRVNYISHILGLASHVLHANPQDKDAMFLKSVVCVNQTDSF

SEQ ID NO: 2601 - protein, 363 aa, Alistipes sp.
  source 1..363: note = Related to JAGBVG010000074.1
MDFPRDSFIKEINSARPEYKKAVLDYADNLLSKNLPVIFSLNHFAELFGIDINELRFMLNNIDEFYAYYLIKKKHGGKRRIVSPYRNLKRIQEWILHEILDKIQVHPQCKGFVRGSSTLQNAKPHIGQQYIRKFDLKDFFESITIDRIYGIFHSIGYSPAVSYDLATICTLKLSDYKYVSMSRLQKNWFGYLYSKEKPVLAQGAPTSPALANIACRRLDARFWKYALSNNVQYTRYADDLTFSSEQIRSLPNTAFVNKVIQEEGLTLNYSKTGTYGRCSRQMVTGILIDGEKPRVPQKFKRQIYRHLHFCKKFGAKNHFEHIMPQHTNARQWLYGKIMYVYSIEPEEAKKMLKLAESLEWGIM

SEQ ID NO: 2602 - protein, 363 aa, Bacteroides uniformis
  source 1..363: note = Related to CZAO01000003.1
MDFSRDSLLKELENTNVEYKKVIIEYTDNLLKKDLPVIYSLNHFAGILGLDLSELKTIIHNIDGYYAYYLIKKKHGGKRRIVTPYRNLKMIQTWILHEILNKIPVHSQCKGFVKGSNTLQNAKPHISKQYIRNFDLKDFFESITIDRVYGVFLSLGYSTAVSFDLASLCTLKISDYKFENLSRYKKNYFRYLHVKPQAVLAQGAPTSPALANLICRHLDERFWKFSLSRGIQYTRYADDLTFSSNQLELLPNTSFVNKIVNEEGLQLNYQKIGTYGKSSRQMVTGILINGESPKLPQKFKRQIYRHLHFCKKFGTYSHFNHIMPNYAHARQWLYGKIMYVNSIEPDEAKKMLSIANSLDWGLL

SEQ ID NO: 2603 - protein, 321 aa, Prevotella oris
  source 1..321: note = Related to NZ_LR134384.1
MAGIVSVEYSELISIKDHIDGYYAYFTIKKKHSSKRRRIVVPYQNLKCIQRWILHEILDKIPVHPQSKGFVKGGSTFQNASPHVGMSFIRKFDFKDFFESITVQRVYGIFLEIGYSPAVSHDLATLCTLKLKEEKYQSLRGYKQSCFRYLYNKPKAVLAQGAPTSPALANLICRGLDSRLAKFADLNGIHYTRYADDLTFSANELEKLPTQSFLKKIVEEESLKLNYSKTGTYGPESRQMVTGILIDGEKPRVPQKFKRQIYRHLHFCEKYGTQAHFDHVMPGYSHARQWLYGKILYVYSIEPEIAKDMIAKANALDWGLL

SEQ ID NO: 2604 - protein, 364 aa, Parabacteroides distasonis
  source 1..364: note = Related to JAFBIU010000027.1
MEFPRDSFIQQLNGCTPEYRSAIIQYTDNLLAKKLPVIFSLKHFAGIVGMDEGEIRRILDHTDGYYAYYTIQKKHSKKRRRIVVPYQNLKRIQRWILQEILDKVAVHRQAKGFVKGGNTLQNALPHLGKKYLRKFDFKDFFESISAERVYGLFYELGYSPAVSHDLAALCTLKLSDYKYISLKGYKQRCFKYLYDMNKAVLAQGAPTSPAIANLICRGLDGRFAKYADLNGIQYTRYADDLTFSADSLDLLPSFGFVNKVVREEALKLNYSKTGTYGPESRQMVTGILINGVKPRVPQNFKRQIYRHLHFCEKYGAQEHFSHVMPGYSHARQWLYGKILYVYAIEPEVGKDMLVKANSLDWGLI

SEQ ID NO: 2605 - protein, 363 aa, unidentified
  source 1..363: note = Related to JAGHRT010000012.1; note = Bacteroidales bacterium
MEFPRDSFLSLIKDSPDEYKKATTEYADRLLSKGLPVIFSLKHLGVLLNVEYRDMCMLVHFPDGYYAYFLIKKKKGGYRRIVVPYDNLKHIQRWILHNILSKIPVHKQCVGFMKGKNTLDNAKAHVGKKYIRKFDFKNFFESINARQVYYVFRNVGYSPSVSRCLASLCTLKIEDNKYDYLPPYKKIWFKDLHDTTIAVLPQGAPTSPALANIICNNLDKRFFSYAFKKNLTYTRYADDVTFSCDDPSLLPNVSFVKKVVESEGLSLNEKKTGTYGQDSRQMVTGILIDGEKAHVPQKFKREIYRHLHFCKKYGTHEHFRHIAPDKSNPRAWIYGKIHYVNAIEPEEAKKMFALADELDWGIL

SEQ ID NO: 2606 - protein, 367 aa, unidentified
  source 1..367: note = Related to JAAVFK010000042.1; note = Bacteroidales bacterium
MTMEFPRNDFITKAKKAGHSADFIKATLRYADSLDEKGLPVIFDRNHLAFLLMMDIQELLCFVRESSCFYKYFAIKKKRGGLRRIIAPYSNLRKIQVWIKECILDKIEQPYYVTAFAKNRNTLKNARIHEDKKYILKFDIADFFESICFKQVNSAFCNMGYLPEVSSCLARLCTSKIDEYKYSQLEEQKDIQALFDDLKTKNEAFLIQGAPTSPALANIVCYRMDRRIIGLSKGIKFNYSRYADDMTFSADRLSDLPKVGMIRRIVESEGFHLNDQKTQLLHVGKRQIVTGLLVDGHVRVPGRYKKDIWRHIHFCLKYGGRDHFNRIAPGLAYGKEWIEGRIRYVHSVEPDVAKKMWVEFEKIDWGY

SEQ ID NO: 2607 - protein, 365 aa, Alistipes sp.
  source 1..365: note = Related to JAFQIH010000031.1
MGFPRNDYLTAAKDKKHSDEFISETLSYADGLDSKGLPVIFDQQHLSYLLCMEHRNLRQLVKSASSYYKYFAIKKRRGGLRRIMSPYSELRDVQIWIKENILDKIELPNCVKAFVKGRNIMENAKMHEGRKYILKVDITNFFESIGVRQVYVAFRKMGYDRSVAAWLANLCTAKIEDYKYEQLEDQEEIQKLFNDLYHKSEPFLVQGAPTSPGLANIICNRMDKRMMGLANKHGFTYSRYADDMTFSADKKDRLPKVSMIRKIVETEGFHLNEEKIELLHEGNRQIVTGLLVDNHVRVPGRYKKDIKRHIHFCLKYGGREHFHRIAPGKAFGKEWLAGRIRYIHSVEPETAKKLWAEFERIDWGY

SEQ ID NO: 2608 - protein, 365 aa, unidentified
  source 1..365: note = Related to SUYB01000005.1; note = Bacteroidaceae bacterium
MGFPRNDFITEATLQGRSQQFITEALRYADVLDGKGLPVIFDTSHLAFMLNMSHRDLVHIAFMASVFYKYFAIKKRSGGYRRIMAPYMHLRQIQVWINKNILSKVQQPEYVTAFVKGRNTQMNAKMHENRAYVLKVDLSNFFESINVRRVCAAFMWMGYESSVASCLAKLCTAKIDDYKYDMLEEQPEIQTLFDELMQRHEPFLIQGAPTSPALANIVCGRLDKRMKRLSQEMGFNYSRYADDMTFSADDRAMLPKIRLIRKIVKEEGFTLNEKKTELVHQGNKQMVTGLLVDGRVRVPGSYKRDIMRHIHFCQKYGGRGHFDRVMHGKAYGREWLEGRIRYVYSVEPEAAKKMWAEFEKIDWGY

SEQ ID NO: 2609 - protein, 362 aa, Flavobacterium psychrophilum
  source 1..362: note = Related to BJSX01000096.1
MNFPRNLFIENANAEKRSAEYLTKTLNYIDRLSAQNLPVIFSTKHLAQLLNIEYHELNNIIENRTYFYTYYLIKKRTKGHRRIIAPYSNISEVQNWIKNNILDNLTTNINSTAYQKGNSISNNAKIHENNQVIFNIDLENFFETITERRIYGVFKSIGYTKNVAIDLAKICTTIISQEKFDDLNDDVKTHFEDYIKLNECVLPQGACTSPTLSNLICRKLDIRLSKLANKLGIQYSRYADDITFSGSLEKLPNIKLLKKIIEEEKFKVNDNKVKLLKKGNRQMVTGLLVDGKVRVPQKYKKEIFRHLRFCEKFGGFTHFNKINPEKSFRKEWLHGKICFVHSVEPEIAKIMFQKLKDINWEK

SEQ ID NO: 2610 - protein, 362 aa, unidentified
  source 1..362: note = Related to JAGPFU010000113.1; note = Paludibacteraceae bacterium
MDFPRNLYIETANNEGHSPEFLTSTLGYIDNLTSKNLPVIFSLKHFSLLIGMELSDVIKIIHNRNYYYSFYLIKKKKGGYRRIVAPFKKLKLMQSWIKENILDKLEVSQHATGFIKGRSILNNAKSHENNDVILNLDLSNFFETIVERRVYGIFSSLGYSKNLAVEFAKICTAQMPKEKYDEIDPEKQEYFNKLYRLKESVLVQGAPTSPTLSNLICRRLDLRLSMLANKLGLIYSRYADDITFSGKASNLPSIELLKKIIEDENFEINWEKVGKYKKGQRQMVTGLLIDGKVRVPKSFKKEIYRHLHFCSKYGAFSHFQRICPDKAYRKEWLLGKIYFVYAIEPEEAKKMLKIANAINWEI

SEQ ID NO: 2611 - protein, 362 aa, Flavobacterium anhuiense
  source 1..362: note = Related to NZ_CP016907.1
MDFPRNIYIEAAKNEGHTSTFLENTLSYIDNLRSKNLPVIFSLKHFSILIGMELSDVIKIIQNRNNYYSYYLIKKKKGGLRRIVAPYKDLKFMQSWIKENILDNLEVHQLATGFIKKKSILNNAKNHENSDVILNLDLRNFFETINEKRVYGIFSSLGYSANLCVEFAKICTAQIPEDKYEIMSSEEQEYFEELYNLKESVLVQGAPTSPILSNLVCRRLDLRLSKLANKLVVNYSRYADDITFSGDRNNLPNIGILKKIIEDENLKINWDKVGKYKRGQRQIVTGLLIDGKVRVPKKFKKEIYRHLHFCSKYGAYSHFKRICPEKSYGKEWLLGKIYFVYSIEPEEAKKMLKIANSINWEI

SEQ ID NO: 2612 - protein, 362 aa, Flavobacterium lindanitolerans
  source 1..362: note = Related to JAEUTX010000024.1
MNFPRNTYLELANTSGKSPEFIESTLNYADNLIHYNLPVIFSLKHFSQIIGVDFHQLLNVIENRGHYYSYYLIKKRKGGYRRIIAPHKNIRYLQDWIKINILDKVKIHSSATGFTKGKSILDNAKSHLDSEVLLNIDLENFFESITEKRIYGVFKWLGYHKNLAIEFAKICTVKMPEEKFDNLNDISQEYFFDYYLLKEAVLVQGAPTSPSLSNIICIKLDNRFNKLANKRGISYSRYADDITFSGNKDSLPSYNLVKKIIESENLKINWTKVGRYKKGQKQVVTGLLVNENIRVPKKFKKEVLRHLFFCEKYGAASHFNRIAPDKSFRKEWLIGKILYINSIEPEVAKSMFERIKKISWEI

SEQ ID NO: 2613 - protein, 362 aa, Alistipes indistinctus
  source 1..362: note = Related to AP023049.1
MNFPRNLYKQEAIRLKRSAPFITSTLNYIDNLISCNLPVIFSRQHLAILTGMSRYDMDKILENREYYYKYYLIKKKRGGFRRIIAPYKQLKELQRWIKENIIDQVDINQFATGFVKDKSIYHNAKIHEDANVILNIDLKNFFESITEKRVYGLFKSLGYAHNLAVDLAKICTSPICDEKLDELDESALPYFQDIQMQFESILIQGSPSSPAISNLICRRLDRRLSKLANSTGANYSRYADDITFSGSEDNIPKVSLIKRIIEGEGFSINWEKVKRHKKGQRQIVTGLLVDNEIRVPKKYKKDIYRHLHFCEKWGSRSHFEKINPGKGYGKQWLLGRIMYVNSIEPTEAKKMMALVKQIDWDR

SEQ ID NO: 2614 - protein, 350 aa, unidentified
  source 1..350: note = Related to PDLQ01000082.1; note = Lewinellaceae bacterium SD302
MAFLRSLFINEAKKKGRSEEFLKTTLEYADFLDGKGLPVIFSPLHFSLLVQTDYHYLKHLISVRSDFYANYYIRKRRGGKRKISVPFVPLRIVQKYINDFILNKVDVHPKAFAFVRNKSIVDNAKVHVNQEWILNIDIKDFFTSIGVDKVYTTFRSLGYVDNLCYDFAKLCTAKLEAKSKREFLPQGAPTSPNLSNIIMRNVDRRFENFSIKNDICYSRYADDITFSGKKSKLPKISFLRKVFKEEGFQLNEKKTQYYGPNSNRRFVTGLIVKDDVKIPNRFINSTSRQIYMCEKHGVDNHIDWLKKNHGITGNYYYEWLMGKIAFINMVEPSEAKFLYDRVNRIDWGLK

SEQ ID NO: 2615 - protein, 364 aa, Chitinophaga filiformis
  source 1..364: note = Related to NZ_FNBN01000017.1
MSSPRNLIIQEAEETHHSKEYLNDILAYYDKLYNQGLPVIYSIHHLCLLMGDLDKKVPKIITSRNSNYATFKIKKRSGGKREISAPFVPLRNIQQWIYQNILSKVPIHPSAYGFVKHKSIMDNAKVHVNQDFILNIDLLDFFTSIPEKRVYGIFKSLGYHPNLAVYLAKACTKNLVKEIDIEVLDWLNQAPFHQNNSVLPQGAPTSPQLSNLVCRRLDKRLNNYAVKNGCKYSRYADDITFSGSEVNNIKLGVIFRIINDEQFNVNLDKVKFFHKSSNRKIITGLIVSDKIRIPKKFKREIARHLHFTTMNGTQNHIQHLRQYHNFDKVNYRDWLYGKICYIKMIEPDFGLKLMTKFKSIDWGI

SEQ ID NO: 2616 - protein, 364 aa, Chryseobacterium viscerum
  source 1..364: note = Related to PPEG02000004.1
MTFNKDLFIKVSRLRNHSNEFIKETVDYANNLLEKDLPVIFSLKHFSLLANVDYDELVKIINIRSSLYKFYQIKKKNGKGFRQIVVPYNNLRCIQDYIKTEILDKVQIHDNATGFVKGKSIYDNAKKHSNQQEILNIDLFKFFDSITERRIYGIFKSLGYAKNLALDFAKLTTVALPEEYLSSFKFDERRLYDEIVRKGECVLPQGAPTSPILSNLITRRLDLRMSSLADKLKVNYSRYADDLTFSGNYGTVPTFTLLDKIINDEGFRINWSKAKISKKGRLQMVTGLTVSNDIHVHRKFKKEVKKHIYGCLNFGVNNHLAHIQKDDIGYYKEWLAGKIYFIYSVEPDYAKKLLDDYNKIIWPL

SEQ ID NO: 2617 - protein, 364 aa, Cellulophaga sp.
  source 1..364: note = Related to JAAALB010000001.1
MPFSQDEYIATAKSHGHSQEFIDITVAYAQNLVAKNLPVIFTTEHLSSILDMPILELKTIINHRSSFYKFYQIKKRNGNGFRQIVSPYNNLRVIQQYINEEILSKIPLHESATGFTKGKSILNNAVPHKNKKAILNLDLLKFFDSICERRVYGIFKSLGYAKNLSIDLAKLTTVELPEDYLKTFEEKELKSYRELVPKDSCVLPQGAPTSPTLSNIILRRLDFRLSKLAEKLKVDYSRYADDITFSGDLENLPKIKLLRSIIRDEGLNINWKKVGIYKKGRKQLVTGLTVSNDVHIHRDFKKEVKKHIYACCNFGVETHLRFMELENTHLYKEWLLGKIYYINSIEPETAKKMMNDFNKIVWTI

SEQ ID NO: 2618 - protein, 364 aa, Arenibacter sp.
  source 1..364: note = Related to JALKBC010000033.1
MAFPFSEKSTSEPVNHSDEFLTDINNYGDNLKKNKLPVIYTLYHLCQMAEVPVKEILRVCESTRIEHYKRFKIRKKRGGFRVIQTPSDSLKYLQRWILVNILNELDSHERCFGFEKKSSILKNASVHLNQPAILKLDLQRFYDSINEKRIYGVIQSFGYHSNLSVYMAKLLTVLPNDYFFESFKKTESNLKNKLQKLNQGVLSQGAPTSPKISNLVCRRLDQRMYELAIKNGLNYSRYADDITFSGNIEVLRKVKKAAYYIINDEKFFVNYGKTKFIKAGGKFLVTGLNIENGSVTVPKKKKMEIEHHLYHCLNNGVINHLKTSKMPQRNFKDWLLGNIAFVHSIEKNVAKVYFEQFNKINWPI

SEQ ID NO: 2619 - protein, 351 aa, Muricauda sp.
  source 1..351: note = Related to NZ_LXTT01000008.1
MDHSQEFLSDIKEYRERLDEKGLPLVFSIHHLCLLAGVSVTEILEICKSDRIRYYKRFKLKKKRGGFRVIQTPENTLKFLHRWILKNILNRVESHEKCFGFDKESSIVKNASAHLGQPAILKIDLQRFYDSINEKRIYGVILSFGYHPNLAVYMAKLLTVRPDSYFLSTFKKKESSLKDKLEMLNEGVLSQGAPTSPKLANLVCRRLDERLNKLALKNQLNYSRYADDITFSGNLVQLEKIKKTVYFIVRDENFYVNYSKTRFIKSGGNFFVTGLSIKDGVVKVPGKKKKEIEHHLYHCLKNGVINHLKSAGVSQRNFKDWLLGNIAFVHAVEKDVAKDYFEQFNKINWPI

SEQ ID NO: 2620 - protein, 365 aa, Bizionia paragorgiae
  source 1..365: note = Related to NZ_FNQK01000016.1
MTYPFYHIKRNQEPIVHSSEFNQDIKIYSDLLAKKGLPVIYSVPHLCLLAGVHIERILTITKSNRIESYKRFKLKKKRGGFRVIQTPNDELKYLQRWILKNILEKVPSHPSCKGFDKNTSIKHNADTHLKSEALLKLDLLRFYDSINERRIFGIFKSLGYHPNLAVSLAKICTIVPDEMFISSFRKKETELKEYIVSKNEGILAQGSPTSPKLSNLITINLDKRLAGLANKNGLNYSRYADDLTFSGNFKQLQKVKKVVYRIIREESLFPNYSKTKFIKLGGKFLVTGLNIQNNVSTVPKKKKKEIEHHLFHCIENGVENHIKTAKINNRNFKDWLYGNICFVFSIEEKKGIQYFKEFEKIQWPI

SEQ ID NO: 2621 - protein, 360 aa, Cyclobacterium roseum
  source 1..360: note = Related to NZ_WNKF01000001.1
MTSPLNKTLENHSAEYQNEIKAYQHVLEKNGLPVIYSLNHLCLMAGVNLEHIKNCCISNRQENYKRFKLKKKRGGFRVIQTPQDELKYLQRWILENILNKKNSHNACKGFDPDTSIKLNAEKHLKQEGILKIDLLRFYDSINEKRVYGLFKSLGYHPNLSVSLAKICTIVPDNTFLSSFKQKEQHLKQKIKQDGLGVVPQGAPSSPKISNLITISLDNRLQNLADKHNLNYTRYADDLTFSGTIETLSKIKKVVYRIIREENLYPNYSKTKILKRGNPFFVTGLSVHNDTVTVPKKKKLEIEHHLHHCIKNGVQNHLTTSKITNRNFKDWLLGNIAFVNGVEKELGKKYFKQFNEIQWPI

SEQ ID NO: 2622 - protein, 364 aa, unidentified
  source 1..364: note = Related to MENU01000192.1; note = Bacteroidetes bacterium GWE2_29_8
MTSPLDNISEETPPIHSVEFLADIMAYDLKLNSKNLPVIYSLQHLCLLAGVNIKNITKVCNSTRISEYKRFKLRKKRGGFRVIQTPTDELKYLQKWILVNILEKVPSHSSCKGFDKTLSIKLNAEVHLNKESILKIDLLRFYDSINEKRIYGVFKYIGYHPDLAVSLAKICTIVPDNKFLSSFKKKELDLKCIIIKKTEGLLPQGAPSSPKLSNLISISLDNRLSKLALKNELGYSRYADDLTFSGSLETLKKVKSTIYRIVEDENLFVNYSKTKLLIKGNPFFVTGLSVNNDHVTIPKKRKIDIEHHLFHCIKNGVEAHITRCEIKNKNFKDWLLGNIAFVYSVEKELGEKYFTDFNKIQWPI

SEQ ID NO: 2623 - protein, 367 aa, Flavobacterium fluviale
  source 1..367: note = Related to NZ_CP030261.1
MTIPSIIKNSIPKEIPAPPSPEFLNDIAQYRAHLIDQGLPVIYSVHHLGLISKFNINNMIHLCNMPRDGFYKRFKMKKKKGGYRVIQTPSSELKYLQRWILKNILENRPSHECCKGFDLKASIKNNAESHLNKEAILKIDFLRFFDSINEKQIYRIFKGMGYHGNVAFALAKICSVVPDKMFFKSFKKNEKHLKKVVLEHDGGILPQGAPTSPKLSNLFCLSLDHRLTLLASKNNLSYTRYADDLTFSGDYETLISVKKTIYKIIKDEKLFVNMGKTKILKRGSLFFVTGLSVNNKKVTIPRKKKKDIEHHLHHCIKNGVENHMQKSNITNRNFKDWLFGNIAFVYSVEKELGAEYFKIFGSIQWPI

SEQ ID NO: 2624 - protein, 366 aa, Flavobacterium soyangense
  source 1..366: note = Related to NZ_JADHEC010000003.1
MTFPFNKLIPISNEEIVHSEEFYEEIRKYGSFLSDKKLPIIYSLPHLCLLSGVNINNIKKLCGSNRIDDYKRFKLKKRRGGFRVIQTPNEELKYLQRWILFNILDKITVHDSCTGFEKEKSIKQNAEIHLKSEAVLKIDLMRFFDTINEKRIYGLFKNFGYHKNLAVSFAKICTIEPNEKFMKSFKKNEIGIKNFIIENEEGILPQGSPTSPKLSNLVAFKLDKRLYGLALKSKLNYSRYADDITFSGNLDTLKKIKSIIYKIINEERFFVNHSKTKLLIRGNPFFVTGLSVNNNYVTIPKKRKIDIEHHLFHCLENGVEEHMKICEIKKRNFKDWLLGNIAFVYSVEKELGQKYFDSFNKIQWPI

SEQ ID NO: 2625 - protein, 365 aa, Polaribacter sp.
  source 1..365: note = Related to NZ_CP074436.1
MTYSLDIYKKRAAELKRSEEFIKETSEYIELISKKGFPPIFSLPHLCLTSSVSIKNTITICESNRRVFYKRFKLKKKKGGYRVIQTPVSELKFLQRWILDNILEKIPSHHSCKGFDKNTSIIKNAECHLNSECILKIDLLRFFDSINEKRIYGIFKSLGYKENLCVSFAKICTIEHEEKFYDSFEKSEQKLKSYLTNKKEGVLPQGAPSSPKLANLILRRLDHRLSKLCEKRKINYSRYADDLTFSGNSIELQIIKKIVYKIIHNENLFVNFSKTKFLKRGSPFFVTGLSVHNSEVKVIRRKKKEVEHHLFHCLKNGVMGHLTKAKITNRNFKDWLFGNICFIYSVEPIIGQEYFDKFNKVDWPI

SEQ ID NO: 2626 - protein, 365 aa, Chryseobacterium sp.
  source 1..365: note = Related to NZ_LR824569.1
MTFLLDKYKEHALASNHSNEFISETIQYANFLSSKNLPVLFSLPHLCLASAVSIKNTLEICNSSRIEYYKRFKIKKRRGGYRTIQTPTNELKYLQKWILRNILEKFPSHKSCTGFDKLSSIKKNAEIHLNAECILKIDLLRFFDSINERRIYGIFKSFGYQNNLCVSLAKICTVKQNETFYNTFKKNEDNLKQYLLSKDEGILPQGAPTSPKLANLILRNLDKRLERLCSKYNVNYSRYADDLTFSGKKENLLYLKKIIYKIIYSENLFVNIGKTKFIVRGNPYLVTGLSVHNEEVKVIRRKKKEIEHHLYHCIKNGVILHLIKSNIGNRNFKDWLFGNICFVYSIEPKVGQNYFNDFNKIEWPL

SEQ ID NO: 2627 - protein, 365 aa, Muricauda sp.
  source 1..365: note = Related to PASE01000008.1
MTFPLDNFITKAKFQRHSDEFIDDAKNYIQKLEKAELPILFSIFHLCLSAKISIKLILALCRSDRIHYYKRFKIAKKRGGYRIILSPNNELKYLQKWILINILEKIPSHKSCQGFDKNKSIKKNAEIHIGSECILKIDLLRFYDSINEKRVYGIFKSLGYHKNLAVSMAKICTVEVKENFLKAFTKNESDLKNKISSQKEGILPQGAPSSPKLSNLILRRLDQRLHCLAKKNGINYSRYADDLTFSGKEEKLKELKKIIYMIIKDENFFINYGKTNFLKRGNRFFVTGLSVHNEKVTVPKKFKSNIEHHLYHCIKNGVIAHTKKNGIENRNFKDWLLGCICFINSVEPELGEDFFEKFNEINWPI

SEQ ID NO: 2628 - protein, 365 aa, Chitinophaga niabensis
  source 1..365: note = Related to NZ_FSRA01000001.1
MTYPLDVFFEYAKEMDHSPQFTEEVEKYVSSLLNRNLPVFFSLPHLALAASFSINHVERIVKSNRRDYYKRFKLAKRRGGFRIIQTPDQELKYLQKWILLNILNKVNSHPACKGFDPKSSIILNAQDHLNKEAILKIDLLRFFDSINEKRIYGVFKGLGYHPNLAVSLAKLCTLKPDNTFFIAFKKNELMLKELIKKRDEGILPQGAPTSPKLSNLIARNLDIRLDKLCKKHGISYTRYADDLTFSGEKTKLMLLKKVVYKIVKTEGFYINYGKTKFLTRGNKYFVTGLSVHNKTLKVPRKKKLDIEHHLHHCLKNGVHVHMIKSKIKNRNFKDWLLGSICFVWSVEQELGQKYFDEYNKIEWPV

SEQ ID NO: 2629 - protein, 365 aa, Mucilaginibacter sp.
  source 1..365: note = Related to JACCBZ010000002.1
MTFPLDDFLIKAQAAGHSDKFIAETTAYIHKLSKDNLPVLFSLEHFALEAQVNIGRLGMIVRSDRTFYYNKFKLKKRNGGFRTIQIPNSDLKYLQKWLLINILNKITSNAACKGFDPGTSIKGNAEIHLNKQAILKIDLLRFYDSINEKRIYGIFKSIGYHANLAVYLAKACTIKPDNTFFIAFKKNELLLKQVIEKRDDGVLPQGAPTSPKLSNLIARSLDKRLQGLCDKHDVNYSRYADDLTFSGDKATLAKIQKIIYSIVEKEGFFINYGKTKMLVRGNKYFVTGLSVHNNAVKVPKKQKKEIEHHLYHCLKNGVHLHILKSGLKKRNFKDWLLGSICFVNSIEQNLGSKYFELFQRIEWPI

SEQ ID NO: 2630 - protein, 364 aa, Arcticibacter tournemirensis
  source 1..364: note = Related to VFPL01000001.1
MDYPLDDVLEAARDEGHTTLFVADIEAYVKYLTARQLPVIYSLAHLAISMGMNIDMMVRLAESNRRDYYKRFKLQKRAGGFRTIQSPDNPLRYIQRWILANILNKIPSHPACLGFDPTTSILKNATVHVNQKAILKIDLLRFFDSINEKRVYGIFKSIGFHPNLSVSLAKLCTIVHGKNFFSEFREHEVEIRDRIISDSTGILPQGGPTSPKLANLVARRLDSRLQGLCEKNGLKYSRYADDLTLSGDKDILERVRKTVYKIIRDEGFFPNLSKTRLLLRGQKFMVTGLDISNEKPRVSRKKKKEIEHHLYHCQKGVQRHIQKAKITQRNYKDWLLGSICFVHGIEPSVGKLYFSEFAKIEWPL

SEQ ID NO: 2631 - protein, 369 aa, Bacillus sp.
  source 1..369: note = Related to CP095875.1
MNGDFPRNDFIHQAKAEGHSKEFIQSTTEYAEKLENLGLPVLYSLKHLALTLDIPYIQLREIIRNRRKYYGLFKISKKVKGYREIRCPQNTLKDIQHWILYSILAKVRTHKSCIGFKKGDSIKKNATIHLGQPAILKLDLYCFFDMVTEKQVYNVFKSLGYHPNLAVDLAKLCTVPETGEYVKKLYQDTCPTNFIYHDNPFLPQGAPSSPALANLVLYHLDVRLKGLADFLGIQYTRYADDITFSGEDDRLPKISLIDKIVRDEGFYLNHSKILLRKKGQQQKVTGLIVSGTSLRVPRKYKRDIWKHLLFLKKRGVKEHLEYIKNKNGSNKSAYRDWLLGKIMFVKSIEPTVGNKMLFEFNQIKWPFYD

SEQ ID NO: 2632 - protein, 365 aa, Bacillus toyonensis
  source 1..365: note = Related to JAJPGG010000002.1
MNNIFPRDAFEKVAEARGHSKEFILSALEYADKLIKSELPVLFSTKHFCEVIDITYGELKKIILNRTNQYGNFKIRKKSGGFREIRSPKEKLKNIQKWILNNILSKVSPHGSCIGFKKGDSIIKNALPHLGKEAILKFDLFHFFDTVTEKRVYSIFKSLGYHSNLAVDLAKLCTVPSFPSHKKKFLENFNISDNPFPFDSFLPQGAPTSPALANLVAGHMDKRFKGLADFLGLDYSRYADDLTFSGNYECLPNVNFVKKIILEEGFYINESKTCLRREGQQRKVTGIIVSGDTSKVPKAYKKDIWKHLYFLNKFGVKKHLRNIKNNKSSFQDWLLGRIMFVRSVEFEEGNRMLYKYNQVNWPFYE

SEQ ID NO: 2633 - protein, 377 aa, Brevibacillus sp.
  source 1..377: note = Related to VFNO01000006.1
MNCEFPRNDFVKEAIKQGHSQEFINECLLYADNLTYKGLPVIFSTKHFCELLDISFKQLNYILDNREDFYGTFNLRKKRGGYRRIQYPLPILKNIQRWILDYILTRVPLHSSCKGFRRGESILTNATPHLTKKTILHLDIEDYFGSITQKQVFNVFSKLGYNKSLAHDLSKLCTIHKVEIEKTIETDSFLATEQKEFLESIKRYSQKKIDFILPQGAPTSPTLANLVSVKLDKRLFSLAEKLGVTYTRYADDLTFSTDTEILPRLAIIKKILSEEGFQLNKSKTATRKQGQRQIVTGLLVSGEKAKVPKKYKQDILKHLFYADKYGPKDHSMEIQKNPATFQEWLLGRIMFVRSIELETGNMMLEKYNQIEWGFNLK

SEQ ID NO: 2634 - protein, 350 aa, Paenibacillus sp.
  source 1..350: note = Related to NQMO01000005.1
MDIRFPRDAFVQEAQNQGRSQLFIEECLLYADGLQYKNLPVIFSTKHLSLLLELEYKELNNIILNSYRYYKTFSIAKKRGGERQIKCPNHILKSLQRWILNNILINVRVSSACKGFRKGESIITNADTHLGCQAILRVDLENFFDTITENQVRKSFIRIGYSTNLSVDLAKLCVTSRLDSTTGEYVSSLPQGAPTSPMLANIVAYRLDKRLSSLANKLGVRYSRYADDLVFSGNTTQLPKIELLKKIITEEGLKINNQKTLLRREGQKRMVTGIIVSGDKLRVPKKYKKDIWKHLHYALLYGPDGHTSRIKVNPATFKEWLLGRIMYVRSVEKDAAEDMLKVFNEISWGF

SEQ ID NO: 2635 - protein, 344 aa, Bacillus subtilis
  source 1..344: note = Related to CP026036.1
MNFPRNDFEKYARDEGKSQQFIDATLSYVDKLNSMQLPVIFSIKHLALTLDYPYNKILDIANHSEKYYKSFKIRKKRNPQQFRRILAPNPDLKVIQRWIYNNILKNIEPDESSVGFSQGCSIQKAAAMHTNQEVVLRVDLSNFFENITQKQVYYVFRNLGYHKNLAVDLAKLTTIYTKEGSYLPQGAPTSPALSNLVVRKMDKRLRCLSEKLGVNYTRYADDLIISGNKKDIPRLGLIKQIIKEEGFKLNSEKTAIQRAGNKQLVLGLTVTNGVHVPKDFKKEIWTHLRYCKKYGPIDHLRYINKSDKGAFKDWLFGKISFVKSVEPAVGEKMMNLFNEINWPL

SEQ ID NO: 2636 - protein, 344 aa, Bacillus sp.
  source 1..344: note = Related to CP043830.1
MNFPRDVFEQQARKEGKSDSYIKSALVYIDRLNSMEIPVIFSLKHLALILDFPYKKISDMANNPNTYYSTFKIRKKRGGFREIQAPQPEMKIIQKWIYQTILKEIRTDSSCMGYSKGSSIRENANVHKNQEVILRVDIYKFFENISFKQIYYVFKSLGYTKYVAIDLAKLTTVKSEGSNVRYLPQGAPTSPALSNLVVRKLDKRLRSLSNKLQVNYTRYADDLIFSGEKGCLPQIGLVTKIIKDEGFKINPNKTAIQKKGNRQIVLGLSVTNGVHIPKKYKKEIWTHLKYCKKFGPIKHLENIGESNKAAYKDWLFGKICYVKSIEHEVGKKMMAAFNDISWPL

SEQ ID NO: 2637 - protein, 346 aa, Aquibacillus sp.
  source 1..346: note = Related to NZ_JAIZAP010000009.1
MYFHRDIFEEKAREQGKSNAFIESSLAYVDKLNSMQLPVIFSLKHLAVTLDISYKKISHMIKFPNEYYNTFRLRKKSGGVRIIQAPKPELKIIQKWIYVHILKNIKVDSSCTGFTVGSSTSKVARMHQNKEVVLKLDLENFYDNIDRNQVYYVFKSIGYKDHVAIDLAKLTTVNPIKTQRNVFILPQGAPSSPSLSNLVSRNLDRRLRLLSEKVNVIYTRYADDLTFSGEKKNMPSLKLVTKIISEEGFQVNNKKTSYQKKGNKQIVLGLTVSNDVHVPKKFKREIWTHIKYCKKYGPVKHLININQANRASYKDWLYGRICYVKSVELKVGEKMMEEFNLIDWPF

SEQ ID NO: 2638 - protein, 315 aa, Tumebacillus amylolyticus
  source 1..315: note = Related to NZ_JAEQNB010000004.1
MAGVDRTRLLRITEQRDRNYHRFLLEKRAGGFREILTPKPLLKRIQRLIYVNILATVELDQSCLGFREGRSIKDNAQIHANQDAVMKVDLYRFFDTISEKRVYGMFKSLGYHTNLSVDFAKLTTLHPSEQYYLEIMNDKNLPDHYPDPHFARLPQGAPTSPVISNIIARNLDFRLRKLAEKLGVNYSRYADDITFSGVLTKLPKIHLINDIVRSEGFFINGSKISLRKKGTKQLVTGLTVSNGVHVPKKYKQETWRHLYYSKKYGAKDHLRRIGKTGISGFEEWLLGRIHFIRSIEPEVGDAMLEKYEVIDWSLI

SEQ ID NO: 2639 - protein, 366 aa, Bacillus cereus
  source 1..366: note = Related to JH792281.1
MSTNIPRDEFVLVSKESGHSKEFISKALSYINTLENKNMPVIFSIKHLSQILNLNYSLVLDIIKTREQYYRGFKLKKRRGGFRYVQSPNSNLREIQTWIHNNILLNVPIHENCFSFIKQKSIRDNASLHANAEAILKLDLYRYFESIDQRKIYKVFLDFGYTKNVAIDLSKLTTILPNQYYEDIISKDKLTPEKFVLSKHGFLPQGSPTSPILSNIVAEKLDIRLNGLAKALNVKYSRYADDITFSGKRDKLPKVSFVEKILNEEGFYLNNKKTKLRVKGQRQIVTGLSISNGVHIPKHYKRKIRQHLYYCKVLGPKRHLQNINLEKSNFKDWLYGSICYIRSIEKNLGDKMLEDFDKINWLFYYD

SEQ ID NO: 2640 - protein, 402 aa, Maribacter algarum
  source 1..402: note = Related to NZ_VATY01000001.1
MTLPLKHILKNIKFNIQERVTATMSFPFNQFALEAKEQNKSQEFIDACLAYASNLSEQGYPVTFSIEHLAMQIGVQSDYLRNLIGDGKRDITYDYEHKYKRYNYFKLKKRDGNFREIMSPAKDLKFIQKWILVNILSKYRLAESCKGFRKRISIYDNAKVHENSEIILKVDLLKFYDTITEKRVYGLFKSLGYATNLSFSLAKITTAKHRKNYWRDFNNSSKEILSELVQTKPAILPQGSPTSPMISNILATKMDYRFEGMAKKQNFRYSRYADDLTFSITKEGSLPSLNVISKIITQEGFFINHKKTQYLKKGCKQYVTGLTTTNGINVNKKYRKQISEHIYFCRKYGVKSHLARRKKDFPNSNSLSFHNWLYGHLCFINSVNSKASKTLLEEFNKINWSV

SEQ ID NO: 2641 - protein, 378 aa, Polaribacter sp.
  source 1..378: note = Related to NZ_CP058986.1
MSFSFKQFEIEAKKQEKSQEFIDACLVYAKKLTQNDYPVTFSLEHLAMQIGIQSDYLRNLIGDDKNGITNNYEHKYKRYNYFKLKKRHGGFREIMSPAKDLKFIQKWILVNILSKYKLADSCKGFRKGISIFHNANVHENSELILKVDLLKFYDTITEKRVYGVFKSLGYAKNLSYSLAKITTAKHRDKYWRNFDDDSKERLKELVMAKPPILPQGAPTSPMLSNILATKMDYRFEALSKTQNCRYSRYADDMTFSITKEGKLPSLKLITKIISDEGFFINDKKTRYMKKGCKQYVTGLTTTNGTNVSKKYRKEISEHIYYCRKHGVDGHLERRVDFSGYNNIKFHNWLYGHLCFIKSVNEEASKKMLDSFNKINWYI

SEQ ID NO: 2642 - protein, 379 aa, Winogradskyella pacifica
  source 1..379: note = Related to NZ_QREI01000003.1
MSFPFKQFEEQARKQEKSQEYIDFCLAYARKLSENGYPVTFSLEHLAMQIGVQSDYLRNLIGDDKNNIEYNYELKYKRYNYFKLKKRDGGFREIMAPAKDLKFIQKWILVNILSKFKLADSCKGFRQGVSIYDNAKVHENSEIILKVDLLKFYDTITEKRAYRAFRLIGYVKNLSYSLAKITTAKHRDSYWRNFDDISKETLKELIIVKPPILPQGAPTSPMISNILATKMDYRFDALAKKQNCRYSRYADDLTFSITKEGKLPSLKLITKIITDEGFFINDKKTRFMKKGCKQYVTGLTTTNGINVSKKYRKEIYEHIYYCRKYGVSSHLSKREEEFSGFNSIKFHNWLYGHLCFIKSVNKAASNKMLEDFNKIDWFV

SEQ ID NO: 2643 - protein, 379 aa, Flavobacterium tiangeerense
  source 1..379: note = Related to NZ_VLKO01000001.1
MSFPFEQFIIQAREQNKSLEFIDACLSYGKALEEKELPVIFSLEHLAIQIGIQSVYLRNLIGDGKWDINYEYEHKYKRYNYFKLKKRDGKFREIMAPAKDLKYIQKWILVNILSKYVLADSCKGFRKGISIKDNAKVHENSEVILKVDLLKFYDTITEKRVCSVFKSLGYVSNLAYSFAKITTAKHRESYWKDFDENSKEILNELVDNKPPILPQGAPTSPAISNILATKMDYRFEALSRKLNFRYSRYADDLTFSIKNGGKLPSLKLITTIISDEGFFINSKKTKYMKRGCKQYVTGLTTSNGTNVSKEYRKTITEHIYYCRKYGVNSHLERRKEEFPKYNNIKFHNWLYGHMCFIKSINEKASKKMLEDFNKINWYV

SEQ ID NO: 2644 - protein, 379 aa, Flavobacterium hydatis
  source 1..379: note = Related to NZ_MUGY01000012.1
MSFPFEQFIIESKEQNKSQEFIDACLTYGKKLDDKEFPVIFSLEHLAMHMAIQSDYLRILIGDDKKNLVYGSEYKYERYNYFKLKKRDGKFREIMSPSKDLKYIQKWILVNIVSKYVLADSCKGFRKNIFIAHNAKVHENSEVILKVDLLKFYDTITEKRVYGLFKSLGYINNLAYSFAKITTAKHRDSYWNDFDENSKEILKELIENKPPILPQGAPTSPMISNILATKMDYRFEALARKLNCNYSRYADDLTFSIKREGKLPSLKLITKIISNEGFFINDKKTKYMKKGCKQYVTGLTTTNGTNVSKGYRKTITEHIYYCRKYGVNSHLEKRIKDFPKYNNIKFHNWLYGHMCFIKSINENASKKMLEDFNKINWYI

SEQ ID NO: 2645 - protein, 379 aa, Tenacibaculum sp.
  source 1..379: note = Related to JABXHT010000077.1
MSFPFKEFTEKAKEENRSQEFINACIQYAKKLSSKKLPVIFSLEHLAMLMGVESNYLRTLIDDGKNDFVYSYEHKYKRYNYFKLKKRDGGFREIMSPAKDLKFIQKWILVNILNKYKLRNSCKGFRKEISIYHNAEVHQNSETILKVDLLKFYDTITEKRVYGLFKSLGYANNLAYSFAELTTAKHRDYYWRSFDANSKKVLNTLYNHRPPILPQGAPTSPMISNILAAKMDVRFEKLAEKLNCNYSRYADDLTFSIKNEGKLPSLKLIYKIISDEGFFVNEKKTKYMKKGCKQYVTGLTTTNGVNVSKAYRKSIKEHIYYSRKLGVKKHLKNRNEEFGGYNNIQFHNWLLGHLCFIKSVNQEAYKKMIKDFNKINWYI

SEQ ID NO: 2646 - protein, 379 aa, Flavobacterium hercynium
  source 1..379: note = Related to NZ_MUGW01000002.1
MSFPFEKFIIKAREHNKSEEFINACLVYGKNLVEKKLPVIFSLEHLSIQIGVKSDYLRNLVGDGKNDIIYNYEHKYKRYNYFKLKKRNGTFREIMAPAKDLKYIQKWILVNVLENYPLAESCKGFRKKVSIYDNAKVHENAEVILKIDLLKFYDTITERRVYGIFKSMGYVENLAFTLAKITTARHRESYWIDFDRNSQEILSKLLKEKPSILPQGAPTSPMLANIIATKLDYRFEALARKINFNYSRYADDLTFSIQKKGKLPPLKLINKIISEEGFFVNTEKTKYMKKGSKQYVTGLTTTNGVNVSKKYRKEISEHIFYCRKYGVVSHLKRRENEFPKYNSMNFHDWLYGHLCFIKSINETASKNMLEDFNKINWFV

SEQ ID NO: 2647 - protein, 381 aa, unidentified
  source 1..381: note = Related to DTTW01000005.1; note = Flavobacteriaceae bacterium
MSFPFKEFISKAKEENRSQEFIEATISYADKLDKNNFPVIFSVEHLAMLMGIQSSYFRHLIGEPKKHHYQDEPHKIFRYNYFKLKKKREGYREIMSPSKDLKFIQKWILVNILEKKNLQNSCKGFRKGISIKDNAMPHENSDLILKIDLLKFYDTITENRVFGVFADMGYRKNLAVSLAKITTAPHRFQYWKNIPKAELDIMGYKHNNFPSILPQGAPTSPMLANIVASKLDLRFEKLSEKMGFNYTRYADDLTFSIKGNQRLPNLKLIRKIISDENFFINETKVKYLRKGGKQYVTGLTTANGINVSKKYRQEIDSHIYYCRKYGVKGHLSWIGEENEKSQRVLPFHDWLYGHICFIKSINPKAAEKLLKDFSRIDWLFD

SEQ ID NO: 2648 - protein, 383 aa, Epilithonimonas arachidiradicis
  source 1..383: note = Related to NZ_RAQH01000007.1
MKPFPFEQFITNAIKEDRSNDFIEECLRYAYKLEVKNYPVLFSIQHLAMAMGVKSQFLLALIGEDKRNIFDYLTDNRATIKHYNHFFIKKKRGNYREIMAPHKDLKYIQKWLLFNILSKFPLAESCKGFRSGISIYDNASLHNNAKIILKVDLLKFYDTITEKRVYGVFAKMGYAKNLAYSLAKLCTAKHHEKYWSDFNLNDKEVLSYYLEFKPPILPQGAPSSPTLANIVATNMDKRFEGLSKKLKFSYSRYADDLTFSIKDIGTLPSLDLIRKIINEENFYINEDKITYMHRGSKQYVTGLTVTNGVHTSKKYRKKIARHIYFCRRYGVENHLIKNIDHFPNYNILKFHDWLYGHICFINSVDKEASKRLLNDFNKIIWPL

SEQ ID NO: 2649 - protein, 382 aa, Chryseobacterium glaciei
  source 1..382: note = Related to CP015199.1
MKSFPFEQFIKNANSEGRTQNFIEACVQYAHNLEDRDYPVFFSIQHLAMAIGIQSDFLTALIGENENSRYLYENEGVKLKKYNHFFIKKKRGSYREIMAPHKDLKYIQKWLLFNILSKVPLAESCKGFRSGISIYDNASIHSNAKIILKVDLLKFYDTITEKRIYGVFEKIGYAKNLAYSLAKLCTAEHHDKYWSDFNQNDKKILSYYLEFKPPILPQGAPSSPTLANIVATKMDKRFEGLGEKLKFSYSRYADDLTFSINHIGTLPPLNLIRKIIEEENFYINEDKITYMHRGSKQYVTGLTVTNGVHTSKKYRKKIARHIYFCRKYGVENHLLKNIEQFPTYNSLKFHDWLYGHICYINSVDKEASKKMLSDFNKITWSI

SEQ ID NO: 2650 - protein, 382 aa, Flavobacterium sp.
  source 1..382: note = Related to CP059431.1
MSFPFEQFIQNAREENRSEKFIDACVKYAEKLESNNYPVIFALPHLAIVMGVQSDFLKALIGESKDIRYILQSNEGFKIKKYNHFFIKKRNKGFREIMAPHKDLKYIQKWLLFNVLSKYPLTDSCKGFRKGISIRDNALVHSDAKVVLKVDLLKFYDTITERRVFGVFEKMGYAKNLSYSLAKLCTAKHHDKYWLDFSYSDKQTLTELYKERPSILPQGAPSSPTLANIVATKMDKRFDALAKKMNFSYSRYADDLTFSIKDEGRLPNLKLIREIISDENFYINENKISYMYKGSKQYVTGLTVANGVHTSKRYRKEIERHIHFCRRYGVEEHLSRNKKKFPYYNSLKFHDWLYGHICFIHSIDRKASEKLLNDFNKINWFI

SEQ ID NO: 2651 - protein, 382 aa, Chryseobacterium scophthalmum
  source 1..382: note = Related to NZ_JAFLHF010000002.1
MKSFPIEQFKEVAINQGHSQEYIDFCLKYANQLIDKNYPVIFTIEHLAVVIGVESDYLRFLVGDIKHEQFEFDRFEYKEKRYNYFKFTKKRGGYREIMAPHKDLKYIQKWLLFNILDKYPFKNSCKGFRQGISIKDNALPHEKSDVILKVDLLKFYDTITEKRIYGVFKTMGFHGNLAVSLAKLCTAKHQSDYWENFTEKEKLILSEFIKTSPSILPQGAPSSPALANIVATRMDGRFDALSKKMNFSYSRYADDLTFSVKEKAVLPPLKLISKIIQEEGFYINEDKIQYMKRGNKQFVTGLTIANGVHTSKKYRKQIARHIHFCRKYGVENHLDKNNKEFKGYNILNFHDWLYGHICYINSVDKEASKKMLNDFNKITWSI

SEQ ID NO: 2652 - protein, 382 aa, Chryseobacterium cheonjiense
  source 1..382: note = Related to NZ_JABBGF010000003.1
MKSFPIEQFKEAAKEQGHSKEYIDLCLKYANQLIDKDYPVIFTIEHLAVVIGVESDYLRFLVGDIKWEEVEFDRFEYKEKRYKYFKFKKKRSGYREIIAPHKDLKYIQKWLLFNILNKYPLKESCKGFRQGISIKDNAKTHEKSDIILKVDLLKFYDTITEKRVYGVFRAMGFHGNLSVSLAKLCTAKHQPDYWEAFTEREKLILSELVKTKPSILPQGAPSSPALANIIATKMDSRFEALSKKMNFFYSRYADDLTFSIKGDGMLPPIKLVLRIINDEGFYINEDKIQYMKKGTKQFVTGLTITNGVHTSKKYRKQIARHIHFCRKHGVENHLNKNYNEFKGYNSLNFYDWLYGHICYIHSIDEKYSNRLLNDFNKINWFI

SEQ ID NO: 2653 - protein, 383 aa, Chryseobacterium aahli
  source 1..383: note = Related to NZ_JALDNB010000003.1
MNSFPIERFKILAKEQGHSDEYIRICLEYALKLTEKKYPVLFTLEHLAIAIGVKSSFLRLLIGDLKTEEKISKLKYPLKEKRYKLFFIKKRRGGKREIMAPDKDVKYIQKWILFNILGKYPLRDSCTGFRPNISIKDNALMHEGAFKILKIDLLKFYDTITEERVYGVFKSMGYRSNLAVSLSKLCTYKHKPEYWNSFNSKEKELLAYYVKEMPAILPQGCPSSPMLANIIASKMDYRFEELGKKMSFSYSRYADDLTFSIKGNGILPTLSFINKIITEENFHVNTDKTRYMLKGQKQYVTGLTITNGVHTSKKYRKKIARHIHFCRRFGVEVHLNRIRKDFLGYSTLNFHDWLYGHICFINSVDKEYSQKLLTDFNKINWFI

SEQ ID NO: 2654 - protein, 376 aa, Brumimicrobium mesophilum
  source 1..376: note = Related to NZ_PVSS01000003.1
MEFPLNEFIELAKTKDKSQEYINSVIHYVKNLESNDFPIIFTRQHWASMMQIQSTFIDYLLNDYGEDFEDVLQSKYSCFTLRKRNGGERLIMAPKEDLKYLQKWIQFNILNNYKFEDSCTGFIIGKSIKDNAKKHEFAETILKIDLLQFFDTIKVERIYYCFKKMGYIGNVSHDFANLCTVVHPKEYWKKVDSEVKSVIGQTINSSSRVLPQGAPTSPLLANIVASKMDKRFGGLSKKLGFNYTRYADDLTFSIKKGQKLPSLNVIYQIIESEGFYVNKKKTKFINKGCAQYVTGLTIANGVNVNKKYRKMIERHLYFCRKYGVDNHLNKNKKTLFGFNRLSFHDWLYGHICYIKSINENCYKKLIEEYKKITWTI

SEQ ID NO: 2655 - protein, 371 aa, Mucilaginibacter sp.
  source 1..371: note = Related to MDJS01000005.1
MPFDFEEFRKIAKSNNHSEEYIFETIKYAEKLNKKDLPVIFSTVHLAIELKIPSNILNSLLKSYNYTFFNLHKRSGGFREIMVPNEKLKYVQRWINFNILQKLPLEKVCTGFRPNYSILTNANIHANSKMVLKVDLLRFFDTITDRRVYGYFKSLGYLKPLSYDLAKLVTARHKKSYWDFVSKDNCPQLADIANSNSPVLPQGAPTSPMLANLLASRMDERFIILSQKLNFRYSRYADDLTFSITEEGQLPFTRVIKKIIEEEGFFMNDSKTKIFSRGMKQYVTGLTVTHGVHVSKKDRKDIFMHLHFCKKLGPNEHLKNWSKKNGLNREPYGFQDWLLGKISFIYSIDKIIGTKMFKEFDKINWSFENSN

SEQ ID NO: 2656 - protein, 377 aa, Chryseobacterium taeanense
  source 1..377: note = Related to NZ_FNDW01000013.1
MPFPLELFILEAEKQGKSKEYIDVCVEYIKKLDSNGFPVIFSLHHLAQEIGVQYKYLRFLIGENDNKYEHKYKRYNYFSIKKKRNGYREIMAPSKDLKYIQKWILLNILYVYKLEDCCKGFMPNQGILNNAIVHENSEKILKVDLLKFYDSITFDRVVQVFESVGYIKNLAISIAKIVTASNRESYWNCFDEYSKLKLSSIRNAKTPVLPQGAPTSPMLANIIATNLDKKIINLSKKLNFRYSRYADDLTFSVKKNEGVLPYSKLIIKLIESEGFFVNPSKTIIKKKGQRQYVTGLTVTSDVNLSKKYRKEIFKHLHYCRKFGVNNHLERNKDFRKYNIIQFHDWLFGHICYTNSINKDVANKMFDIFRKINWSISE

SEQ ID NO: 2657 - protein, 393 aa, Aquimarina sp.
  source 1..393: note = Related to NZ_UYXD01000050.1
MIYSPETFAISARNQGHSEPFIELCLAYLNKLNNRGYPVLFSIHHLAQEIGIQTSFLNELIGDTYYFYDGEEKIVVRSKVDYFDQGRYRYYKKFKIKKRTGGYREIMAPQGELKYIQKWIYINILLKYQLTDNCTSFRKGRSIYDNAKPHERKKYILKIDLLKFYDTISEERIFGLFKAMGYVENLSFALARICTAKHSRDFWNSISGDSAKILKTLIENKPAILPQGAPTSPTLANIVANRMDKRFVKLGQIRDFEYTRYADDLTFSSNNFNSLPSISFIKEIVKEEGFFVNQKKTKLFKAGGKQYVTGLTVTNGVNVSKKYRKNIFQHLYYAKKFGPRNHLIKWAKDNKKNPDIMAFQDWLYGHICFISSINKIAGKKMLSEFNKIDWTIL

SEQ ID NO: 2658 - protein, 377 aa, unidentified
  source 1..377: note = Related to DPWF01000030.1; note = Chitinophagaceae bacterium
MPFLFEEYIEEARKKQRSEAFIESTVQYAKKLDDNGLPVIFSRAHFASLVGMPSREIFTILHYRVTQYVQFSIKKKNGGLRHIMTPEKKLLYLQKWINKNILQQVSVLDCCTAFVPGTSLATNAYTHRNAHRILKVDLTRFFDTINEKRVFGLFKYLGYHPNVAYDLAQLTTAFPSYQYWKSQSLKDLRQTVEKITFYDAFLPQGAPTSPQLANLIAKPLDSRLLMLSEKFGCRYSRYADDLVFSTNKPEGKLPPLHLVKRIIESEGFLVNEDKTAYLKKGMKQYVTGLTVTHGFHVSKKQRQEIYKHLYYARKYGPFEHLKRWTTDNWGDERKTPYGFKDWLLGKISFINSIDRKNGIRMLDEFNKIHWGFECEDG

SEQ ID NO: 2659 - protein, 363 aa, Sphingobacterium multivorum
  source 1..363: note = Related to CP068086.1
MSFDRKLFIEECKNQEKSEQYIVNTLKYADNLVNRGFPVLFSLKHMAYELGINYEDLKTIEDHRENYYKHFHIKKKKGGLRHLSVPFTNLKLIQSWIYHNILLHHHPTSSAYGYIKNRSIKENADQHVAKRFILNVDLLKFFETITEHKVFKLFVEIGYTKTLSWSLSKLVTVPIKEDYYLQLSHIEQKLFNKTFEQEYGVLPQGAPTSPSISNLVLRNLDGKMVELAELKGSTYTRYADDITFSGNDIKNIPTKTEIMRVVMSENLLINWNKWTLRKKGMRQKVTGLNTTHGLSVPKSYRKDVKRHIHFCLKYGPESHQKKIGVDKQFYRYWLLGRIHYIRFISPEIGNKMLKDFNNIQWPL

SEQ ID NO: 2660 - protein, 373 aa, Bizionia arctica
  source 1..373: note = Related to BMFQ01000008.1
MSNEIVNSVMSSSLYKIVEQISKSNHGDDYKKSLIEYSQNLSSKNLPIIFDAYHLAYSIGIQPYRIINIIKDRDHLYNTYRVRKKTGGHRWIMSPIEELKTIQTWIKINILDKIQTHNSANGFVKEKSIVTNAEKHINKETILNIDLYRFFDTITEKRIYQLFKKLGYTNKLSYDLSRILCVNPPKKYWKELKKENKLKKKFIKMKPSILPQGAPTSPIISNLLCIKLDEILFKYCEKSHLSYTRYADDITMSGDNKNMPELKKIKSIIRHNGFTVNIKKIRFISKHKKQTVTGITVNNGLFVDKKIIKEISQELYYCIKYGYKSHLEYKFKKSKIKANYKDWLYGKICFVYSVEKEKGESFFKKFNMIDWNI

SEQ ID NO: 2661 - protein, 373 aa, Tenacibaculum sp.
  source 1..373: note = Related to SJXJ01000003.1
MSNEIVNFIMSTSLHKIVEQINQSNHGNDYKEKLIEYSQNLSSNNLPIIFDAYHLAYSIGIEPYRLINLIRDRDDLYNTYKVRKKSGGYRWIMSPMEELKIVQTWIKVNILDKVNIHESANGFIKDRSIVTNANKHVKKETILNIDLYRFFDTISEKRVYHLFKKLGYTEKLSYDFSRLLCVNTPKKYWKEIKRENRLRKKVIRMKPSVLPQGAPTSPIISNLLCLKLDQVLYKYCEKSNLDYTRYADDITISGNKKSMPKLKKIKSIIRQNGFTVNINKIRFTSKHKKQTVTGLTVNDGVYVDKRIIKEINQELYYCIKYGYKSHLEFKFKDSKIKSNYKDWLYGKICFVYSVEKEKGQQLLKKFNMIDWNI

SEQ ID NO: 2662 - protein, 364 aa, Flavobacterium sp.
  source 1..364: note = Related to MUFX01000009.1
MSTSLYKTVELINNSDHSLEYKTLLINYSQDLTSKNLPIIFDAFHLAVMIGIQPYRIINLIRDRDALYHTYKIRKKSGGYRWIMSPQNDLKNIQNWIKTNILEKVEIHESANGFTKDKSIITNANEHIGKEIVLNIDLYRFFDTITEKRVYGLFKMLGYTEKLSYDLARLMCVNAPKKYWKEIKKENKLNKKIIKLKSPVLPQGAPTSPIISNLLAKNLDISIFEYCNKSNLSYTRYADDMTISGDKKDLPNLKLIKGIIRKNGFTVNIKKIKYISNHKKQTVTGITVNNGLFVDKKILKEVNQELYYCIKFGYINHLKFKFQNSKIKSNYKDWLYGKICFIYSVENKTGEELFKKFNLIDWSI

SEQ ID NO: 2663 - protein, 365 aa, Parabacteroides sp.
  source 1..365: note = Related to QSQY01000003.1
MSSPLLHILEQVENSNHSTEYKRLIKDYSIRLASRNLPIIFDIYHLSYLIGIQPYRMINMIKDRHSLYNVYKIRKKAGGYRWIMSPIDDLKRVQYWIKLNILDNINICDSACAFIKGKSIRDNAQKHVGKELILNVDLYRFFDSITEKRIYGVFKSLGYTEKLSYDLAQLVTAQPPKAYWKEIKKENRFKKKHIKSTPAILPQGAPTSPSLSNIISIKMDEIFDKYANECKISYSRYADDLTFSGERGSIISLLAVKKIIRQQGFTINLKKTKYLRNSGKQSVTGITVNNGLFVDKSVINMIKQELYYCLKFGYKAHLKYKQAKGESIKSGYKEWLFGKICFIYSIDKNRGVNFFKIYNQINWDI

SEQ ID NO: 2664 - protein, 305 aa, unidentified
  source 1..305: note = Related to SEDT01001166.1; note = Proteobacteria bacterium
MVNDTANYYKTFKLRKKTGGYRWISVPNEELKLLHRKLNLMIFMRIRPSESVHSFVKKSSIRTNAEVHVNAKTCLNVDLYRFYESITDKRVFGYLCKLGYHPNVSYVIAALVTIQLPKAFWQEVRKENKFRSKYIRRKPKARVLPQGSPCSPFLSNLVLTHLDFRIEQACKGLGFSYSRYADDITISSKGDNFFALTTLKKIIRSEGFTINIQKISFRRSSSRIQVTGITVNNGIFVNKSLYKKVVSHLYYCKKYGVRDHLEKVKLTNKSNYKDWLLGNILFINSVEPDKAKKLFTEFNQIDFLL

SEQ ID NO: 2665 - protein, 366 aa, unidentified
  source 1..366: note = Related to JAEUTP010000018.1; note = Bacteroidia bacterium
MTSPLDNILDKAKAEEHSPEYISDITAYAKNLIDKKLPVIFSRTNLALSIGIPRSHLEFLLANREMKYKFYKLRKKHGGYRWISSPEKELKYIQGWIKVNIFDNIEIHPAACGFSKGTSIKKNATAHQKQDLILNIDLYRFFDSITENRVFGILNWLGYHKNIAIDMAKLLCYQPTDKYFEEVAKEGIFSKSILDQKPSILPQGSPASPVISNLLSYKLDVRLSKMASKLGINYSRYADDITFSGERKNMVSLNTVKKIITEEGFYINKDKIKYLAQNRRQDVTGIVVNKGLKINSKYKKKVLTEIYFSEKYGVKNHLGYLIDRKGAEKKANYKDHLLGKIYFIYSVEPEVGKKMLEKYDQIKWEI

SEQ ID NO: 2666 - protein, 366 aa, Mangrovimonas sp.
  source 1..366: note = Related to NZ_LBIQ01000028.1
MPSQLDNIKNSLDEANASKDFKIEIINYSQNLEKKGLPIIFSLPDLSFKIGLPFHVIQEILKNKSNHYKTFKIQKKTGGHRWITSPDEQLKRIQRWIYENILKNVPEHDCSFGFVNERSIIDNAKKHVNQDTILNIDLYRFFDSIEQKRVAGVFKHLGYQPNLAYSMAELLTAKMSRAYWKEIEDEKVLSDTFIEECPQILPQGSPASPRIANFIAHSLDTRMAKLAKKLDVNYSRYADDLSFSGDYKKLPSIKTLRKIIMNEGFFLNEKKVKYFKRSHRQIVTGVVVNDRISVPREFKEKLRTELYHCIKKGPAAHLNWLMSNKDFKIKTNYRDHLLGKACFVYAVEPETGKDFLEMYNQIKWEL

SEQ ID NO: 2667 - protein, 349 aa, Prevotella sp.
  source 1..349: note = Related to SUYI01000044.1
MTMTDTWESLFKERAVEEKHSEEYIAQCIEYAGKLHERNLPVIFDFVHLAYYLGIYSDKLRGIVANAETHYRAYEIKKKTGGTREIEAPDEILKDVQRWIYANILCRDKSVQSCVHGFVPRLSEADKVRGVLSNAVPHSGHDWLINLDLKNFFPTVTLTMVRDYYDSLGYEEEVSKTLTALCTYKSRLPQGAPTSPMLSNIIATKMDIALLEYCKKYGITYTRYADDLTFSANLDVEVPPLKDLYAIVFKHGFIVNRQKTKIRGRGYKKEVTGLTVTEGVHVPKKYRKEVWRELYFCKKFGVYEHYHNMGTNKGLYKDWLRGRIMFIRQIDPACGNKMLEKFNELNWLV

SEQ ID NO: 2668 - protein, 347 aa, Prevotella sp.
  source 1..347: note = Related to JAGCRH010000046.1
MTETWESLFKEQALEEKHSDEYIVQCLEYAGKLHERNMPVIFDFLHLASYLKCLAKQLQGIVANVESHYQEYDIKKKSGGKRRIEAPDYLLKNVQRWIYVNILCRDKSLQNCVHGFVPVLTENDRARGILTNAMPHSGHDWIINLDLKNFFHAVTLDMVKDYFDSLGYEEEVTKTLTALCTLKSRLPQGAPTSPMLSNLIAAKMDKAMLEYCKERGITYTRYADDLTFSANLDVEMPPLKELYAIVFKHGFIVNRQKTKVRGRGYKKEVTGLTVTDGVHVPKKYRKEVWRELYFCKRFGVYEHYHNMGTDKGLYKDWLRGRIMFIRQIDPACGNKMLEQFNELNWLV

SEQ ID NO: 2669 - protein, 347 aa, unidentified
  source 1..347: note = Related to JAGCCF010000043.1; note = Paludibacteraceae bacterium
MTETWESLFKERALEEGRSEEFISQCIEYAGKLHEKNLPVIFDFVHLAYYLGFYSEKLQGIVANVEGHYRTYHIRKKSGGTRMIEAPDAMLKDVQHWIYGNILCRDKSIKDCVHGFVPALTEKDKVRGILSNAAPHSGHEWLINLDLKDFFHTVKLDMVKAYFDSLGYVEEVSKTLTALCTMKSRLPQGAPTSPMLSNLIATKMDEEMMAYCGKRGITYTRYADDLTFSANYDVEMPLVKELYAIIFRNGFIVNRKKTKIRYSGYKKEVTGLTVTNGVHVPKKYRKEVWRELYFCKKFGVYEHYHQMDTDKGLYKAWLRGRIMFIRQIDPACGNKMLEQFNELNWLV

SEQ ID NO: 2670 - protein, 347 aa, Coprobacter fastidiosus
  source 1..347: note = Related to NZ_RBXN01000012.1
MTDTWESLFKECAVENNHTENYLKECFEYAGSLHQRNLPVIFDFVHLAMYFECCAETLKGMVANVEKHYTEYKIRKKSGGDRLIEAPDFLLKNMQRWIYINILCKDLSINDCVHGFIPAFKNRDKVRGILTNAAPHAGHDWLINVDLKNFFHTVELDNVNNYFHSLGYEDEVVKTLTALCTYKSRLPQGAPTSPMLSNIIASRMDEMMLEYCKKRGIVYTRYADDLTFSADYDVKIPALEDIYKIVYLNGFKVNRMKTKVRYKGCKQEVTGLTVTNGVHVSQKYKKEILRELHFCKKFGVYEHYQHLKTTKGLYKDWLRGKIMFVRQIDPACGNKMLEQFNELNWLV

SEQ ID NO: 2671 - protein, 346 aa, unidentified
  source 1..346: note = Related to MKTD01000020.1; note = Bacteroidia bacterium 43-41
MEETWESLFKKQAVKKKHSDEYINECMQYAFHLHEKNLPVIFDINHLSEYWNLDIDLIKSIIECPPRYYAEYDIRKKSGGTRHLCAPHQVLKYIQRWIYHNILLKDITISEHVHGFIPKDQFDSKRTILSNAQAHEKCKWLINMDLKDFFNTIKQERVKKYFLSIGYTEDICELLAKLCTLHYRLPQGAPTSPTLSNLIAREMDKELECLCAKNHWCYTRYADDLTFSGIYIDETPSINELEKIIIQNGFLVNRQKTKFRLRGNCQMVTGLTVTHGVFVPKKYRKEVWKELYCCKKFTPYAHCQYRYPDKGFYKDWLKGRIMFIRSIDPACGNKMLDAFNQLKWVL

SEQ ID NO: 2672 - protein, 346 aa, Prevotella copri
  source 1..346: note = Related to VZAS01000054.1
MEQTWESLFSEQAGIEGHSQQYISECLAYAGILHSHNVPVIFDKCHFFSFFPDIKKGRMEMFLLNLCCYKNYSIKKKAGGVRMISAPYSDLKRVQRWVYENILLKDLYSVSPCAEGFMPKDKDDIRNIVTNARRHARSKWLINVDIQNFFDSIKYDSVWEYFSKLGYEKEVADVLAKICTYQFRLPQGAPTSPMLSNLIVRSMDDAFVELASKCKCFYSRYADDITLSGNSDSIMPSMRDIYQIVYAHHFRPNKKKTKISFSCDRQMVTGLTITDGVHVPKKYRKDVWKELYCCKKFGVASHIAYRHPDQGMYRYWLLGRIMFIKSVEPECGEKMLQEFNSINWGI

SEQ ID NO: 2673 - protein, 305 aa, unidentified
  source 1..305: note = Related to JAGBLT010001022.1; note = Bacteroidaceae bacterium
MKDTWESLFKKEAKKQGHSDAFIQECIGYAAKLHANNVPVIFDFKHLSAIFDMESRDLFFMCKHLGQQYTTYSIKKKSDPKAIRLLTAPGWQLKKIQLCILRNILMRDNSVSEHAHGFVRKKSIVTNAKAHEGARWILCMDLKDFFGTVRKGKVYDYFESLGYEKSVVETLATLCTYENHLPQGAPTSPCLSNLMAKGMDEEIEAYSEQNGFVYTRYADDITISSKTDIKPEKNTINAIVRKHGFRVNHDKTKLRHNGQRMEVTGLTVGRGVHVPKAYKKALFRELYFCRTQGPKEHSEMVYKGK

SEQ ID NO: 2674 - protein, 304 aa, Porphyromonas gingivalis
  source 1..304: note = Related to NZ_FUFJ01000030.1
MEHLLDYYWTGQFPRANACCQFDWAYRDYRIQKKTGGFREISAPNPTLKWCQHWIQHNILEHVVNRLPSSVHGFVQNRSIQTNALPHVNSEWIINIDLKDYFDSIFQKKVLDFFLQLGYEDSVSEFLSNVCTKFSCVTYQRALPQGAPTSPLLANFLTINLDKDLERLAQELDMRYTRYADDITFSGLQKTCPVTPRDIENIIYEHGFRPNKSKTRIRHKGSRMMVTGLTVGNGVHVPKEYRKQVLRELHFAKKYGPENHCRKVRNEKGYFREWLLGRIMFVRSIDKEAGARMLEIFNEINWMM

SEQ ID NO: 2675 - protein, 316 aa, Coprobacillus cateniformis
  source 1..316: note = Related to WSNW01000001.1
MEDLGNEFIKKLPVILDIYHLSNLVGIKYNLLKDILSNKDKYYHTFYISKKMGGKRKIEAPNEVLALLQKYIKNEILDNILVSEYAFGFVKEKNILLNAKRHLNQEMILNIDLENFFPTIKEKRVFYIFYKLCKYDYHISKVLTNLVTLQGRLPQGACTSPVISNIAAYKLDKRLSTYAKKLNLIYTRYADDITFSGSKKIINNFFLKNIQNIIKECGFVINDKKTRFCSQYGRQEVTGLIINDNYIHINKKYIREIRQELYYINKFGISNHRNNKDFSNMYYREHLLGKILFVKSIHQDIGLSFFNQFQNIDWEK

SEQ ID NO: 2676 - protein, 348 aa, unidentified
  source 1..348: note = Related to DPQP01000004.1; note = Firmicutes bacterium
MSKKNIYEQYKAKVSNNENYTDEKKKKYLEQIEILKAKNSEIILNTYHFSNLVGIKWNTLKKIIDDPDKFYYNFQISKKTGGKRTINVPNNSLELCQKYIKEKILDNVKLHSAAHGFVNNKSIITNAKVHVNSEMILNIDLKNFFPSISRKKVFYIFNKICGYDNSLSHCLTKLVMYKNGLPQGACTSPIISNIVTFKLDLRLKKLSDKLGLNYSRYADDITFSGNKNVINSKFLDFVKTIINECGYQINDKKTRFESKCGRQEVTGLIVNNGKVSIPKQYIQNLRKDLYYIKKYGIEEHKKRNNIYNAFYQEHIKGQIMFVYSVSKNKGIKLLKKYNLIFDDTKYGN

SEQ ID NO: 2677 - protein, 354 aa, unidentified
  source 1..354: note = Related to CP074573.1; note = Tenericutes bacterium
MENKNLYRKKIENSDISFNEKQKLLSNLGNIKDDYPIILNGYHISNKVGIKWNDYLKLLKNTNKYYHVYYMAKKSGGRRKITIPDQILMDIQYFIKNNILENIKIDESAFGFRKQKSILANATYHREGEKVLIMDIENFFPSIHKGRVYYVFNKICGYSREVSYDLTRLVTYNNGLPQGAPTSPIISNIVAYKLDLRLKGLSYVIGIKYSRYADDLTFSGAENKINDKLLYTVSNIIEDEGFKLNLKKIRFYGKNSTKIINGLVINNGYVTIQKRYIDKIKQELYYIRKFGLESHLNYVGFKNKHYAEHLKGKILYVYSIDKEKGKQLFSLYNELNIENKPNLVRGGFDEMPVL

SEQ ID NO: 2678 - protein, 361 aa, unidentified
  source 1..361: note = Related to NZ_NQYJ01000016.1; note = Candidatus Izimaplasma sp. ZiA1
MFTRLRMFLMSLLEKKKKYTKSIKVTQIKNENVTPLKKHTPLKYDLPAISNALHLSNKIGIKWEVYKDIARHPENHYHVFHIKKKNGGFRTIAAPNEELSMIQNYINENILFAYKIHKSAFGYVKGKSIIDVANHHLKSENFLSLDLENFFPSIGAERLYYYFGKLGGYDKSISDNLVRFCMYGTGIPQGACTSPQISNIIAYKLDLRLGELCQSKGLKYSRYVDDLTFSGETEHINDKLLFTVQKIIADEGFKLNSKKTRFGNNRNGFIITGLMIRNNSICVPSSYIKKIKNELYYINKYGLLDHKKREKIENSNYLEHIKGKINYVMHVDESKGLLVKEQFDKTILKINSMESDMRGLL

SEQ ID NO: 2679 - protein, 336 aa, Paenibacillus sp.
  source 1..336: note = Related to KE150412.1
MDLNLLESSLTQKGYGKRYKKICINYAKALNEQGLPVIFDNNHLSLLMGIESKILGHYIMNSNKFYKEYQIAKSNGSLRTISTPSYNMKTIQRWVLDNVLSSFAIHSNAFGFVKGRNIKDNALLHTKKKVVLNIDIKNFFPTIKFDRIFYMFYHHGYTKELSYTLAALTTYNGSLPQGAPTSPYISNILCQRMDKRLLALAKKMNADYSRYADDITMSGDENVRQYIETIKSIIINEGFDINYKKLRLQTDNNMQEVTGLIVNEDVKVKRKYKKRLEQHIYYCKKFGVYSHLKKIESESKSYFKEYLYGIANFIKMIEPDEGLEFLKKLDEINWGN

SEQ ID NO: 2680 - protein, 331 aa, Paenibacillus odorifer
  source 1..331: note = Related to NZ_MKQM01000043.1
MEAMLIKKGYGQRYKETCMQYAQELADHGLPVIFDNKHLSLLMGIESNILGYYIISSNKFYKEHQIAKSNGSLRTISTPSYNMKTIQRWILDNILSSFAIHSNAYGFVKGRNIKDNAIIHTKKKLVLNIDIKNFFPSIKFERVFYMFYHNGYTKEISYSLAALTTFNGALPQGAPSSPSIANIICQRMDKRLLALAVKMNADYSRYADDITISGDENIRKYIETIKSIIINEGFDINYRKLRLQTNKNMQEVTGLIVNEDVKVKRKYKKRLEQHIYYCKKFGVYSHLKKNESESKSYFKEYLYGMANFIKMIEPDEGMEFLEKLDEINWGS

SEQ ID NO: 2681 - protein, 338 aa, Bacillus sp.
  source 1..338: note = Related to NPDG01000102.1
MDYIAALQEALIQKGYGNKYQKLCVDYASNLLNNRLPVIFDKKHLALLMGVNYQTLTYYLINTDNFYKEHKIIKSNGGYRTISAPSFNLKAIQRWVLDNILYKYQVSDNANGFVKGKSIKNNAESHIGKEIILNIDIKNFFPSITFQQVFYLFYNSGYTKEMSFTFAKLLTFKGRLPQGSPASPYLANILCKKLDSRLNGFAIKIGASYSRYADDITFSGDADIYRHISFIRNIIESENFKINEKKLRVQKSNSKQEVTGLIISNGEVKVKRNYKKKLEQHIYYCKKFGVFNHLKYTGASDKSYFKEYLYGMASYVSMIEPDTGKSYLNSLNEIIWDY

SEQ ID NO: 2682 - protein, 337 aa, Priestia flexa
  source 1..337: note = Related to NZ_JAERMG010000001.1
MDYINSLREALIQAGYGRRYQKLCLEYADNLLNNQLPVIFDKKHLSLLMGVEPSILGYYIFNSDNFYKEYKIPKSNGDLRVLSAPSFNLKSIQRWILENILYNYQVSNNANGFVIGKSIRDNAEPHIGKEIVINIDIKDFFPSINFERIFYLFYNSGYTKEISYTFAKLLTYNKLLPQGSPASPYLANIICNRLDKRLSGLASKIKASYTRYADDITFSGEANIVNYIKTLRNIIESENFSINENKLRIQKQNSMQEVTGLTVNNGVKVKRKYKKNLEQHIYYCKKYGVYSHLEHTGAKDKSYFKEYLYGMASYIKMIEPDVGEYFLRNLDEINWDY

SEQ ID NO: 2683 - protein, 337 aa, Clostridioides difficile
  source 1..337: note = Related to JALMMK010000003.1
MDYLSRLEKKLIELDYDNNYKSICIKYAKKLLDNEALVVFDKKHLSLLMGIDLKILNYYIVNTDEFYNEKKIPKKNGRYRIISMPSYNLKRIQRWILDNILYKLRVHSNATGFIRNKSIVDNASCHVNKDVVVNIDISDFFPSIDFDKVFYMFYNLGYTKELCYALSKLLTYKGILPQGAPSSPYIANVIMINIDLRLDGLTKKINSNYTRYADDITISGNKYIVLQLPFIKTIIESQGFKVNLEKLKIQYRKSRQEVTGLVVNDRISVKREFKKNLRQHIYYCKRFGVYEHLKYTGNEEKSFYKEYLYGHAYFIKMVEPECGERFIKELDSINWDS

SEQ ID NO: 2684 - protein, 337 aa, Romboutsia sp.
  source 1..337: note = Related to NZ_NOJY02000076.1
MDYLNRLEKKLNELEYDDYYKSACITYAEKLIDNEVPVVFDKKHLSLLMGINLATLNYYLVNTDEFYNEIKIPKKNGRYRVISMPSYNLKKIQRWVLDNILYNIKVHNKATGFVRNRSIVDNAKYHVKKDVVVNIDISNFFPSIDFNKVFYMFYNLGYTKELCYVLSKLLTYKDTLPQGAPSSPYIANIIMMNIDLRLDGLAKKINSDYSRYADDITMSGNRDIVVHVPFIKSIIESQGFKVNLDKLKIQYRKSRQEVTGLVVNDRLSVKKELKKSLRQHIYFCKKFGVYGHLKYTGNEGKSFYKEYLYGHAYFIKMVEYECGKRFINELDSINWNS

SEQ ID NO: 2685 - protein, 339 aa, Bacillus sp.
  source 1..339: note = Related to JAIUKX010000001.1
MDYLSKLELKLTDNGYSKKYKELCISYASALQNRNLPVIFDIKHLSKLMGVRYSVLFYYITKSEEFYKEFKIPKKMGGIRAIYAPSLNLKKIQRWILENILTYFDVDDSAKGFKRSMGIVENAAIHTNKSLVYNIDIRNFFPSISYEKIYFLFYNAGYSSEVSFAISRLVSYQGYLPQGSPCSPILSNIVCRKMDEEMKRLAFKVGASYSRYADDMTISTDDIRLFVSKKEAFKEIIERNGFILNNKKERMQYYNQPQFVTGLLVNEGVKIRRSFKKEIEKHIYFCEKYGIFNHLKQIGMEEKSFYKEYLYGKVNFIRSVEPETGKYFLERLNKLDWTY

SEQ ID NO: 2686 - protein, 339 aa, Bacillus sp.
  source 1..339: note = Related to NZ_HG428741.1
MNYLDELKVKLIAKGFSDKYIKRCTQYAENLYNENFPVIFDVKHLSMLMGINYNTLFYYIINTETFYKEFKIPKKSGDYRIIEAPSLNLKKIQKWILDNILLHFPVNACATGFKKQTSIVDNAKVHVNKELVYTIDIKDFFPSISFKDVYFLFYNVGYSSQISYAFACLTTHCGKLPQGSPCSPTISNILCNKMDESMKVMANEISANYSRYADDMTISTNDIPLFLSKRKAFKQIVEFYGFNLNNKKERMQFKNQAQFVTGLLVNNGVQVKRAFKKEVEQQIYYCEKYGIYGHLRAKGMAEKSFFKEYIYGKVYFIKSVEPEVADQFLERLNRLHWSY

SEQ ID NO: 2687 - protein, 339 aa, Paenisporosarcina antarctica
  source 1..339: note = Related to NZ_CP038015.1
MDYVDELKMKMINRGFSTKYIDKCTTYAENLYNKNSPIIFDIKHLSKIMGISYPILFHYIYNNQKFYKEFKIPKKSGSYRVIDAPSLNLKKIQRWILDNILVNFSISKYAMGFKKQVNIVENAQIHTNKELVYNIDIKDFFPSISFENVYFIFYNIGYSSEVSYAFAKLMTYKGYLPQGSPCSPIISNILCINLDESMNSLSKNIGANYSRYADDMTISTNDIPTFLVKKGAFKNIIEFYGFKLNDKKERMQYKNHPQFVTGLLVNNKVRVRRVFKKEVEQQIYYCEKYGIFNHLKELGLEDRSFFKEYIYGKVNFIKSVEPEVAERFLERLNRLKWSY

SEQ ID NO: 2688 - protein, 340 aa, Paenibacillus stellifer
  source 1..340: note = Related to NZ_CP009286.1
MQNTFLDELKQKLYDNGFDDAYIGLCLDYSKRLIANRLPVIFDKIHLSMLFGMEVKELTVLVKSIENQYTIRNIPKKNGDTRELYIPSLKLKEIQRWILDEILYNIKVSPYCTGFMKEKSILENARIHENKACVMNLDIRNFFPSIRFESIYRVFYYYGYTSEVSYYLARLCTVHNFLPQGAPTSPYLSNIVCLRLDKRLSSLASKYDANYSRYADDITLSGTGSSIVPRLPLIKIILDSEGFKINYKKVRVQKQQERQIVTGLVVNNKARVPREVERELRQQIYYCKKFGVNEHLKRKKKNKLSGFKEHLYGLAMFIKMIDNRKGERYVSDLNEISWDY

SEQ ID NO: 2689 - protein, 340 aa, Paenibacillus odorifer
  source 1..340: note = Related to NZ_MPTF01000003.1
MKEYEYISRLKAALIQENYDDDYIKLCNDYSYRLLENSLPVIFDKEHLSRLLGLEERYFFQLFMMADGFYKEVQIPKKKLGQFRNISVPTEVLKYVQRWILDNVLYNIRVSEATTGFVKGKSIVDNAKKHVRKECVINMDLKDFFPTITYDSVFRLLKYYGYTNEIAFILSKLCTFRDVLPQGAPTSPFISNIVCYKLDIRFIKLCNKIGADYSRYADDLTISGPRYIVGYLNLFSDIIVEEGFQINESKTRIQYPNNRQEVTGLIVNDKISVPKETKKYLRQQIFYCKKYGVNSHLRKINIQKSNYKEHLYGIAFFIKMVELELGEKFLEQLNEIEWDY

SEQ ID NO: 2690 - protein, 300 aa, Paenibacillus sp.
  source 1..300: note = Related to NZ_MDER01000051.1
VIFDKNHFAKLIGLKKEYIFQILMVTEMFYKEISIPKKRLGEYRDISIPAQGLKYIQRWILDNILYNIPVSEVCTGFVKEKSIIDNAKKHINKDCVINMDIKDFFPSITYNDVFFIFKYYGYTNEVSFLLSKLCSYKGSLPQGAPTSPYISNIISYKLDVRFMLLAKKLKADYSRYADDITISGNKYLVKYLKVFKNILIEEGFKVNERKTRIQYSNKRQEVTGIIVNNKLSVPKETKQYLRQQIYYCKRFGVNSHLARIGIQKSNYKEHLYGMAFFIKMIQQEEGENMLNNLNDIDWDY

SEQ ID NO: 2691 - protein, 338 aa, Lysinibacillus sp.
  source 1..338: note = Related to SADX01000003.1
MSSYIESLVSGLREKGYRDQYINLCVEYCERLINNNLPVIFDKDHLALVMGIRDEYLAKLFMFPEKFYKQARIPKKKKGEYREISIPYQTLKHLQRWILENILYRLKVSDSSKGFVPKLSIVENANKHLQKECVINIDIKDFFPSIQFNEIFNIFYYYGYTKEISFILARLCTYEGRLPQGSPASPYLSNLVNVKLDRRFENFCKKIGADYTRYADDITISGPKYITKYIHQLKEIITDEGYNLNEEKTRILFKHQRQEVTGLIVNDVLGVPIKMKKYLRQQIHYCKKFGVSNHLMKIGNQRSNFKEHLFGLAYYIKMVEKEKGEKFIEDLNTLNWDY

SEQ ID NO: 2692 - protein, 338 aa, Bacillus wiedmannii
  source 1..338: note = Related to NUBN01000013.1
MDTYTHRLKYEMNLHNYDENYIKLCCDYSKRLETNNLPVIFDKVHFSLLLGIEENYLAKLFMITEHFYKLARIPKRKPGMYREILVPFKNLKEIQRWILHNILYNIDVSSATTGFKPDSSILENAKPHVNKPCIIKLDIKDFFPSIGFDQVYRIFAYYGYTNEVSYLLAKLCTYKGYLPQGSPTSPYISNIICLKLDKRFKELCKTLNADFTRYADDITISGDSFIAKYIDTFKSIIESEGFVVNEDKLKVRYSNERQIVTGIIVNTKLSIPRETKKSLRQQIYYCRKYGVYNHMLRTNLDRANYKDYLYGLAYFIKMVEKDVGQKFIDDLNTIYWGY

SEQ ID NO: 2693 - protein, 337 aa, Clostridium beijerinckii
  source 1..337: note = Related to NZ_CP053893.1
MEDYINRLKEEIELREIEESYGQLCIEYAERLIENNLPVIFDREHIALLLGINYDYVNKIMLFTDKFYKVYKMKKKNGDYREISIPNVRLRYIQRWLLDNILYKISVSEHVTGFVPKKSIVDNAIKHVNKELVLAMDIKEFFPSVKFEKIFNIFYYYGYTKEVSYCLARICTLDGSLPQGAPTSPYLANIVCKRMDMRIESLCGKINAIFTRYADDITISGKRNIIEYLSLMQNIIKDEGFEINNKKTRAMYSNRQQRITGLIVNEKVNVPKNKIKYLRQQIFYIKKFGVTRHLEKNGYCYGNLKEHLYGLAYFIKMVNEEKGIKFIEELDGINWES

SEQ ID NO: 2694 - protein, 337 aa, unidentified
  source 1..337: note = Related to NZ_LN879457.1; note = Proposed Desnuesiella massiliensis
MSDYLYKLKEALNFEKVDIKYSELCIEYASRLINNNMPVIYDKKHFSLLLGIEQQYINKLVLCTDRFYKKFSIRKKNGGDRIISIPNIRLRCIQRWILDNIIYNIRVSENVTGFIPNKSIVDNARAHVDSDAILALDIKDFFPSISFDKIFRLFNYYGYTTEISYCLARICTLNNTLPQGAPTSPYLANIVCKKMDKRISSLSKKIGAKYTRYADDITISGKKNITSYSKLIKDIIRDEGFLVNNEKTRVMYRNRQQRVTGLIVNKKITVPKEKIRYLRQQIYYINKYGVVGHREKSKVKHRNIKEHLYGLAYFIKMVDEIKGEKFLNDLNKINWES

SEQ ID NO: 2695 - protein, 337 aa, Clostridium beijerinckii
  source 1..337: note = Related to JABSWM010000001.1
MENHIEKFIDKLKVMQYSDDYINLCIEYAERLTDNNLPIIFDIEHFSFLVGLEKEYINYIIHKKKHFYIEFTIKKRKGGNRLLSIPSKKLKYIQRWILDEILYKIPVNEHAKGYIPNKSIVDNAKPHVKKKCIIKLDIKDFFDNIDYNRVFRIFYYYGYTKNMSYKLAELCTYENKLPQGAPTSPYISNIVCLKMDKRFSKLCNKFNATYTRYADDITISGDNSITKYFKAYVRIIESEGFEVNAEKVISIKGNRTKRVTGIVVNEKLSVGREMKRKLRQQIYYCKKYGVRDHLKKIECEKSFYKEHLYGIAYYIKSVEPIDGEKFLEELDEIMWEY

SEQ ID NO: 2696 - protein, 344 aa, Clostridium formicaceticum
  source 1..344: note = Related to NZ_CP017603.1
MECYRMDYIERLREQLIKQGYGKRYIYLCEQYCTRLLQNGLPVIFDNIHFSLLLGMTTQDLGKMIFLTDSLYNSISIPKKSGGKREISIPTVNLKYVQRWILDNILYNIRVSSQATGFVKGLSIVDNARPHVNKECVITIDIENFFPTISFETIFRLFYYYGYTKEMSYVLAKLCTYEGKLPQGAPTSPYLSNIVSLKLDKRFNSLVNKLSDLNASYSRYADDLTVSGDKKIVKYVPLFKEIIQDERFIVNEKKFRVQNKPDRQMVTGIIVNEKISVPIQTKKYIRQQIYYCKKFGVDRHLEHIKSIRSNYKEYLYGIAYFIKMVENDYGTSLLEELNTIVWDY

SEQ ID NO: 2697 - protein, 338 aa, Fusobacterium nucleatum
  source 1..338: note = Related to CP013121.1
MDEYIKKLKLLLENSDYEEEYKRKCIEYAERLLLNGLPVIYDLEHLILVLGIKKKILTKMIFAYHNFYSTVEIPKKSGGSRKLQIPSVELKYIQRWILDNILKKIKISKHAIGFCNEKSIVDNAKIHIGNKCILNMDIKDFFPSVNFEMVFRIFIYYGYTKELSFIFTRLCTYDGFLPQGSPASPYISNIVSLKIDKRLSRLAEKYHANYSRYADDITFSSNSSMKKLPEIIQKILLEEGFMVNKKKTRFQYFYQRQEVTGLIVNNGRVRVKKSYKKELYQTIYYCQKFGVNNHLEKINCYKNFYKEYLYGKAYFINMVEPEEGKKIFKLLEEIQWDY

SEQ ID NO: 2698 - protein, 338 aa, unidentified
  source 1..338: note = Related to JABXYS010000002.1; note = Peptostreptococcaceae bacterium oral taxon 081
MENYIYKLKILLKKSGYGKHYSEKCVEYANRLIENNLPVIFDIQHFSLVSGAPKELIGKMLFADSKFYSLALIPKKSGGVRELHIPSAELKYLQRWILDNILSRIHVSQFAMGFCNNKSIVDNAKMHIGNECILNMDIKDFFHSITFKMVFRIFAYYGYTKELSFVFAKLCTYEDVLPQGSPASPCISNIVSLRIDKRLSLIAEKYQACYSRYADDITFSGNRGIKKLIEITSNVLEEEGFSLNNKKTRMQFPHQRQEVTGLIINGGMVRVNKKYKRDLYQACYYCKKFGVDSHLKKIKCDKSFYKEHLYGKAYFVNMVEPDEGKKLFNLLDKIHWDY

SEQ ID NO: 2699 - protein, 338 aa, Clostridium algidicarnis
  source 1..338: note = Related to NZ_JAHLDH010000001.1
MENYLESLKIEITEQGYDEYYTTKCIEYAERLLSNGLPVIFDTDHLSLVTGAPKQLILKMIFANSCFYSEARLPKKSGGIRVLNIPSIELKYVQRWILDNILKKINVSSYATGFCDNKSIVDNAKVHIGRECILNMDIKDFFPTITFKMIFRIFVYYGYTKEVSFTLARLCTFENFLPQGSPASPYLSNIVSLKIDKRLSLLAKKYKANYSRYADDITFSGNHGIKKMSSIVSEILEDEGFKVNDGKTRLQYSYQRQEVTGLVINNGKVRVNKHYKRELYQILYYCIKFGVNSHLQKINSTKTFYKEHLYGKAYFVNMVEPDEGRKLFDLLECIQWDY

SEQ ID NO: 2700 - protein, 341 aa, unidentified
  source 1..341: note = Related to JAFUNX010000099.1; note = Clostridia bacterium
MNKEEYLQELKNGLAYQGYDSRYIQACFEYAQNLLIHGLPVVFDVHHLSLLLGMTTKQLNAYIFGSGKRLYSTKHISKKDGGVRVLSIPCETLKYIQRWILDNILKRMYISECCKGFVDDCSILDNASCHLGAEVILNMDIKDFFPSISLLQVYRVFRYYGYTQELSYVMAKLCTYRDQLPQGSPASPYLSNIIALKIDKRLMALAESYGAHYTRYADDITISGFGCLEKMIPIISSVISEEGFVVNSKKTRVARKGQRQEVTGLIINSGKACVPKEYKRKIFQEIYYCQKFGVTNHQEHIGDDHRYYKEHLYGKAYYVHMIEPHIGKKMLSELDKVNWEV

SEQ ID NO: 2701 - protein, 341 aa, unidentified
  source 1..341: note = Related to CP042469.1; note = Clostridiales bacterium
MDKEKYISELRIQLESMEQSQKDIDSCISYAIRLIDSSLPVIFDKRHLSLLLGIELEELTTILATLEENYYNEMSIPKKSEGYRTLNVPAMKLKMIQRWILDNILEHIPVSDHVTGFCKERSIVTNAKKHIGKQCVISFDIKDFFPTIDIESIFMVFYYYGYTKEISYALARLCTYDGYLPQGSPASPYISNILCLKLDKRLSLLAEKYVADYTRYADDITFSGNYGLSNIINIVKNIIQEEGFTVNERKIRVKYKHQRQEVTGLIVSDNKVSVSKLYKRKLWQEIYYCQKYGVSSHLEHINCKKSFFKEHIYGKVYFIYMVEPEEGRKLLIALDKIAWDY

SEQ ID NO: 2702 - protein, 341 aa, Acutalibacter muris
  source 1..341: note = Related to NZ_CP065321.1
MDKERYLKKLEEALSESSSSIPESLACIRYASNLLTFDFPVIFDRTHLAHLLGIKPSDLSALIYSIDSYCYHEFHLAKKSGGMRVINIPSVDLKDIQRWILDNIISKMHISEFANGFCKGKSILTNALSHIDQECVINLDIKDFFPSVGIDRVFMLFKYYGYTKEVSFALAKLCTYRGILPQGSPASPAISNVICLKLDKRLSKLAESYNGVYSRYADDLTLSGTKNITQLIPTVIAIVEEEGFCVNAQKTHIAYAHERQKVTGLLVNEGKVRVSQKYKRRLRQEIYFCQKFGVSDHQKYCNENFQFFKEHLYGKAYFVSMVEPEVGNAFLEALDNIAWEY

SEQ ID NO: 2703 - protein, 341 aa, Dialister sp.
  source 1..341: note = Related to JABMAY010000023.1
MDKIKYLASLRSAIIASGKSEKYSIVCCNYASSLLNSNLPVLFDNSHLARALGITPLDFGKLLYSIDDYCYHEIKIPKKNGGVRTLDIPSMDLKYIQCWILDNILNKMHVSDYANGFVKNRSILTNAQNHINSECVVNIDLKDFFPTVKFEQVFRIFKYYGYTKEVSYTLSKLCTYRGILPQGSPASPAITNIICLKLDKRLSALGQKHEATFSRYADDITFSGKKAIVHLLPYAINIIRDEGFAVNLDKTHTSFKHQRQEVTGLIVNGDKVHVSQKFKKRFRQEIYYCKKYGVQSHLKHINDHHAFYKEHMYGQAYFINMVEPSLGQELLRLLDSISWEY

SEQ ID NO: 2704 - protein, 341 aa, Erysipelothrix sp.
  source 1..341: note = Related to JAHRFW010000235.1
MDKTNYLKEIEILLKNNDESNENISNVLKYAANLLNLDMPVIFDKSHLATLLGLSVSDFNHYVIGSNDSQYNTLMIPKKSGSFREISIPSVELKKMQRWILDNILYKIEVSEYATGFVRKKSIKDNAKCHLENNCVINLDLKNFFPTIHFDRVFKIFYYSGYTKEVSFLLSKICTYKSILPQGSPASPQISNIACLKLDYRLSKLSKCFRASFSRYADDLTFSGDYGITKIIDTVKKIVNDEGFEVNEKKIRIQFKHQKQNVTGLTVNDFKVRVSREYLRKFRQEIYFCQKFGIRDHLRFINSDRRYFRDYMYGKAYFINMIDVDEGKLLLNKLNQINWEV

SEQ ID NO: 2705 - protein, 340 aa, unidentified
  source 1..340: note = Related to PGZS01000061.1; note = Firmicutes bacterium HGW-Firmicutes-3
MNNNPYVKELYSVLSQKGEKQEDIDAACKYAENLIALNLPVVFNKEHFSLLVGRKYKEITTLMATLETNYYHLAYIKKKNGGERTLNIPAVSLRIIQRWILDNILKNMYISQYAMGFCKNKSIVTNAKYHLGKTCVINVDLKDFFPSITQKQIFNIFYYYGYTIDVSYMLSRLCTCEGRLPQGAPTSPCLSNIVCLKLDKRLSEVSKRFKAEYTRYADDITFSSNSDISNILPIVKEIIQDEGFQLNEKKTRILFKHQKQEVTGLLVNGNQIRVDKKYIKKFKQEIYYCKKYGVEDHLEHIDCKKHFYRDHMYGKAYFVKMVDEKVGKKLINELDSIDWE

SEQ ID NO: 2706 - protein, 341 aa, unidentified
  source 1..341: note = Related to JAJFDX010000002.1; note = Proposed Lachnoclostridium pacaense
MNNEGYLENLEKELIDSNEKVKDIEAAKKYAKNLLNLGLPVIFDKQHFALLVGRELSEITKMMAMIETNYYHEANIVKKSGKMRTLNIPAVSLRLVQKWILDNILYKIRVSQYCNGFCKKKSICTNAQNHLNQDCIVNMDMSDFFPSISQKQIFRIFYYYGYTVEVSYILARLCTYDGYLPQGAPTSPYLSNIACLKLDKRLAGLAKKYESTYSRYADDITFSGKCGIQKIIPVAEKIIQDEGFSLNVNKTRIAYYYQRQEVTGINVNGKKMHVDKRYVKGFCQEIYYCEKFGVHDHLQHIKCNKHFYKEHMYGKAYYINMVDKDLGRKLLSRLDNIDWDD

SEQ ID NO: 2707 - protein, 353 aa, unidentified
  source 1..353: note = Related to QUMM01000064.1; note = Lachnospiraceae bacterium OF09-6
MGNRCTETWRLYMKTEEYLNELRTVLVAADECEADIVAAEQYAENLMQLGMPVIFDLHHFAKLVGKEARDIGNMMMHQEDFFYRQVQIEKKHGGYRTLDIPAMNLRNIQKWILKNILYQISVSEHACGFCKKRSIVTNAERHVGKECVINVDIKDFFPSVHGDQIFKIFYYYGYTTEVSYLLSRLCTYRDYLPQGAPTSPYLSNIVCLKLDKRLSRLAKSYQAEYSRYADDITFSGNAGIKAMLPIVEGIVNEEGYLLNKDKTRIAYKHQRQEVTGLLVNGTTVRVSKQYLKKFSQEIYYCKKFGVRSHMEHIHCEKRFFRDHMYGKAYFIQMVDRDMGKRYFAELEQIDWES

SEQ ID NO: 2708 - protein, 337 aa, Dorea longicatena
  source 1..337: note = Related to QVIB01000063.1
MNYIQKLQEKMRESEQSEQYIKTCSTYAQRLIDNGVPVVFDFSHLALLLGFKTADIAFYLFAEDDLFYKEIEIPKKRGGYRKIDIPSERLKCIQRWILDNILDNMEVHECCYGFCKGKSIYDNALLHVGKKCVLNMDLKDFFPSIKQKDVFNIFYKKGYTKKVSYYLSKLLTKNGELPQGSPASPMVSNIVAEHLDTRLSALAKRYCAEYSRYADDITFSGALNVKNMIPIITGIIEDEGFNINEKKTRYAYYYQRQEVTGLIVNKKVSIPKEYIKELKKEIYYCEKFGVTSHLERTNMHKSFYKEHLYGKAYFVNMIDKNMGQQILKHLDTIMWEY

SEQ ID NO: 2709 - protein, 337 aa, Roseburia hominis
  source 1..337: note = Related to JAGZKG010000016.1
MGYVQKLKDKMIEQGADENYVELCVSYAQKLCSNSVPVIFDFKHLSLLLGYEPSELAFYLFAPEDSFYTQMKIPKKSGGMREIEIPSDKLKSIQRWILRNVLENIEVHEACYGFTKGKSIYDNALLHVGKECVLNMDLKDFFPSITQKDVFNIFYQKGYTKRVSYYLAKLLTKDGVLPQGSPASPKISNIVALHLDKRLSELAKCYRATYSRYADDLTFSGASNIKNMIPIINKIIHEETFLVNEKKTRYSYYFQKQEVTGLIVNKKVSVPKEYLKELNKEIYYCKKFGVSSHLKKTENHKSFFKEYMYGKAYFINMVDKELGQKILRELDTILWEY

SEQ ID NO: 2710 - protein, 337 aa, Eubacterium ventriosum
  source 1..337: note = Related to WQOO01000018.1
MEYCQELQKMMREQEMDETYIELCTSYAKRLLKNDMPVIFDFKHLSMLLGIEPYEMAFYLFADEKLYYTEIQIPKKRGGVRIIDIPSERLKDIQKWILDNILSRYTVHECCYGFIRGKSIYDNALQHVNKRCVLNLDLKDFFPSITQEQIFKIFFSVGYTKKVSYYLAKMLTKNKKLPQGSPASPMLSNIVAKKLDSRLNGLAKKYGAVYSRYADDITFSGEGNIKNMIPIVEKTIQDEKFQVNKSKTRYSYYFQRQEVTGLIVNKKVSIPKEYIREINKEIYFCKKFGVSSHLEKIQNYKSFYKEHLYGKAYFIKMINKRKGNQILEQLDEIEWDY

SEQ ID NO: 2711 - protein, 338 aa, unidentified
  source 1..338: note = Related to JAAVHR010000078.1; note = Clostridiales bacterium
MIRIDLEKYKEFLSKKNIKKKNKELLIQYAERLTNNNLPIIWDIRHFSIITDIPYKRILSYIYETEKFYHEIDIPKKRGGVRTLEIPSLELKTLQRDILHELLECINTSEQAYGFLKGKSIVDNARQHVGKRYILGIDIENFFATINVDRIFKIFYYYGYTKEVSFMLSRIVCKDGYLPQGAPTSPYLSNIVCRKLDRRLLGVAKKYGATYTRYADDITFSGEIHPDVYVDLIKKIIVEEGFCINSNKTRILGNNQRQEVTGIIVNKKVKVNKKYKEYLRQQIYYCNKYGIDSHLEKIGNNVTGFKEHMYGIANFIKMVEPDEGEKWINKLNEISWYY

SEQ ID NO: 2712 - protein, 344 aa, Adlercreutzia muris
  source 1..344: note = Related to NZ_CAKODJ010000004.1
MTYDAQSDQYLLELDSLLEANGTPFEDRAICIEYATNLRRSGLPVIFDRDHLAFLLGITLHDLMYFVMQQDDHYARYYLSKKRGGRRPVDAPSERLKSVQRWILSSILEKMRVSDYAFGFVKGRSLLENARVHLGKHCVVNVDIEDFFASVQADNVFRVFSYYGYSKEVSFCLSRLCTLSGVLPQGAPTSPCISNLVFLKVDKRLARLAKTYEASYSRYADDLTFSGRGNLGNIIPAVEHILREEGFTLNDAKTRVAFSHQRQEVTGLNVNGDSVRVPRSFKRDFFQQVYFCKRYGVDSHLDRTNQLFAFYKEHMYGKAYYLCEIEPEVGRRALGELDAIEWTY

SEQ ID NO: 2713 - protein, 392 aa, Blautia obeum
  source 1..392: note = Related to QSJW01000007.1
MCCVSSAWQHIAHGASPIVGLPIVSLAFHAKDGFATGTVGTGTITVIVDSNVCFYMEEENLQIALEKGIIEPAVYERVIAYKERLEENQVPVIYNLRHLRKIFRIYKKEQDFFFGDKKEELYRTFKIPKKSGGYRTIEAPCERLKQIQRWIKDEIIDKLVMSEYATGFRKNLSIVDNAKKHVGKELVIGMDLKDFFPSVTYEEIFLMFRYVGYRKDVAHLLSKLCTNAENVLPQGSPASPSIANHVLLKLDKRLGILAETIGADYSRYADDITFSGKKSIASIIPLVEKIVAEENFTINKTKTRLQYKNQRQEVTGLIVNNKISISREMENEIKNAIYFIGKYGVCEHMRHIECNKSFYKEHLYGIAYFINMVDREKGQKYLRQLDLLEWEY

SEQ ID NO: 2714 - protein, 336 aa, unidentified
  source 1..336: note = Related to JAFTTZ010000019.1; note = Lachnospiraceae bacterium
MEKNNLQIALQQGVITQDAYNSITEYKQRLNDNNVPVIYNLRHLRKIFRIKKREQDIFFGENKRSLYRSFSIPKKSGGVRQIEAPCKRLKEIQRWIKDEIVDKFVVSEYATGFRKNMSIVDNARKHVGKELVINMDIKDFFPSVTYADILLMFMYIGYRKDVAHLLTKLCTNAENVLPQGSPASPSISNHILLKLDKRLGRLAESVGADYSRYADDITFSGKRGISTIIPLVEQIIEEEGFLVNENKTRLQYSNQRQEVTGLIVNNKIAVSTAIEDEIRNAIYFIKKYGVDDHMKHIGCNKSFYMEHLYGIAYFINMVDRDKGKKYLAQLDEIIWA

SEQ ID NO: 2715 - protein, 336 aa, Ruminococcus sp.
  source 1..336: note = Related to JABLYG010000002.1
MGNDKLYEASRRGVISEKTYREILKYKERLQKNGVPVIYNLRHVRKIFQIRRKEQELFFGAQREALYYQFEIPKKSGGKRTIEAPCDRLKKIQRWIKDEIIDSFYPSEYATGFRKGISIVDNAMPHIGKELVINFDLKDFFPSVTYAEILKLFVYMGYRLDVAHLLTKICTNSENVLPQGSPASPSISNLVLLKLDKRLSSLAKTISCSYSRYADDITFSGNKSIKSIVPLVIQIIIDEGYTVNENKIRLQYANQRQEVTGLTVNTKLAVSKNITDEIEKAIYFCNKFGVSSHMKHIACDKHFYREHLYGIAYFIMMVDPQKGKIYLKELNDLNWV

SEQ ID NO: 2716 - protein, 336 aa, unidentified
  source 1..336: note = Related to JAFXDF010000036.1; note = Clostridia bacterium
MARQEELLAAVEKGIITEDSANRILEYNARLDEHGLPIIYNLRHLRKILKIRKRDQEIFFGPRRNELYREFQIPKKSGGIRKIQAPNEELKAIQTWIKAEILDKYSASKYATGFRKGYSIVDNANRHVGKELVINLDIKDFFPSITYADVIKIFSYMGYKLEVAHLLTQLCTNGENVLPQGSPASPALSNLAVIKLDKRLGTLADSLNCDYSRYADDITFSGKKNIRSIVPLVKKVISEEGFEVNESKVRLQYAHQRQEVTGLIVNKKVSVSESVVSELKNAVYYCGKYGVESHMQHIGCDKAFYKEHLYGLAYFVKMVEPAKGRAYLNKLDSIVW

SEQ ID NO: 2717 - protein, 333 aa, Anaerocolumna xylanovorans
  source 1..333: note = Related to NZ_FRFD01000005.1
MYEDAKEKSIISQDAYQLIKIYIGRLEDNDIPVIFNLRHLRKILKIPKQKQSAYFGVNRNEMYRKFMIPKKSGGYRKIEAPSEELKLRQLWIKENIIDKFKISDSAQGFRKNHSIYGNALPHVGKELVINIDIKDFFPSITYQKVFKFFRYIGYTNQVSHLLTKMCTNVDNVLPQGSPASPSLSNIVLLKMDKRLSKLAGAVECDYTRYADDITFSGKKVIKSLVPIICKIIEEEGYDVNKGKLRLQYSNQRQEVTGLTVNKKVSLSKRTIKEIENAIYYCKKYGVQEHMTRIKCDKSFYKEHLYGIAYFIKMIDKEKGKKYLEELNRIEWLY

SEQ ID NO: 2718 - protein, 310 aa, unidentified
  source 1..310: note = Related to JAGAKL010000084.1; note = Clostridia bacterium
MATKEKIDNALQKGIITAETANELKEYNDRLTRNNMPIIYNLRHLRKILKIKKKEQNKYFGNERNEYHTFYIPKKNGSKRMIEAPSDRLKSFQLWIKENILDKINVSTNARGFRKNYSILDNAKEHVNKDLVINIDLKDFFPSITYNRVYKIFAYVGYTNEVAHLLTQLCTNKENVLPQGSPASPVISNIVALKLDKRLGALANKFNCSYTRYADDITFSGCVGIKNMLSTVERIIIEENFSINDAKVRLQYKNQRQEVTGLIVNKKIAVSPKIIKEIDNAIYYCLKFGVASHMQKIGCDKSFYKEHLYG

SEQ ID NO: 2719 - protein, 336 aa, Eubacterium sp.
  source 1..336: note = Related to MNSK01000018.1
MMEHIEKAYQAGVITEEEKRLIEEYNQRLTDNNVPVIYNLRHLRQLLGIHKSAQDRLFGDKKCDSYRVFHIPKKNGGLREIEAPNEELKRIQLWIKENILDKFSVSQFAKGFVKGVSIYDNAVQHTGKELVVNIDLKDFFPSIQYREIYKIFKYIGYTDSVSKLLTNLCTNARSVLPQGSPASPTISNLVSLKLDKRLGRLADKIGASYTRYADDITFSGKKTIQKYIELIRKIIYEEGYEINEGKFRLQYAHQRQEVTGLIVNKEVAIPQKRINELENAIYYCKKYGVVDHMSHIGCEKGFYKEHLYGLAYFIKMVNPEKGLKYLLQLNEIEWPI

SEQ ID NO: 2720 - protein, 330 aa, unidentified
  source 1..330: note = Related to SVIM01000022.1; note = Clostridiales bacterium
MASTKELQKAYESGYITQGDMSLIEEYNQRLLSNNVPIIYNLRHLRQLLGIRKKDQDKLFGKDRKDSYRNFKVPKKSGGFRSIEAPNEQLKKIQLWIKENILDKFTVSEHAKGFKKGFSIYDNALPHVGKELVINFDLKDFFPSIDYCDIYKIFKYIGYTDGVSKLLTKLCTNPENVLPQGSPASPVLSNLVSLKLDKRLGELAKRIGASYTRYADDITFSGEANIQKYEILIREIIFEEGYRVNEDKFRRRLYFQKQEVTGLIVNDKVSIPKRKIKEMENAIYYCKKYGVTNHMKHINCEKGFYREHLYGLAYFIKMVNQPQGEKYYKN

SEQ ID NO: 2721 - protein, 330 aa, unidentified
  source 1..330: note = Related to JAFVRR010000006.1; note = Clostridia bacterium
MAFDKGIIDECQKKLLTEYIERLHMNNVPIIYNLRHLRKLFDIPRDEQNKFFGHERSLLYKTFYIPKKNGGYRKIEAPNEKLEKIQCWIKEKILDNFNVSEYAKGFKKGTNIVDNALPHCSKEVLINIDINNFFPSIKYSSVFRMFNYMGYTKEVCHLLTRLCTNAENVLPQGAPTSPAISNLVNLKLDKRLSSLAISGGAAYTRYADDITFSGDKLILKYIKLIKRIINEEGYSINDKKFRIQFKNQRQVVTGLIVNSRVKANKQIFNELDKAIYFIKRYGIQDHMAHENINRSAYKEHLYGLAYFINMIDRTQGKYYIEQLNSIEWLY

SEQ ID NO: 2722 - protein, 335 aa, Planococcus glaciei
  source 1..335: note = Related to JAHZTB010000004.1
MSNYIEKLKKRMLQQELPNDYIEECISYATKLLNKGLPVIFDSEHFAKLVGINYEDLRKLTISDNYKEVKIPKKNGIRTLLIPNQDLMFVQKWMLVNLISKVKISKHSRGFIKNTSLVDNAKHHVKKEYVITLDIKNFFSSIHNVVVYRIFRSLGYTKELSGLFTKLLVTKDGLPQGAPTSPYLSHIVCKKLDRKIFIELKSLKNCDFTRYADDITISGEYDITEKIENIIGIIESLGFEINLKKKRHQLRSQQQMVTGLVVNDKVNIPKSYIRKLKQEIYYCKKYGVNSHMNKTNINNSNYKLFLFGKAYYIKMINKDLGEKFLKELDEIDWPY

SEQ ID NO: 2723 - protein, 335 aa, Neobacillus sp.
  source 1..335: note = Related to NZ_CVRB01000003.1
MHDYLIKLKSAMQSQGCPPNYINDCTKYASKLLNKGLPVIFDREHFSRLIGFKLEELEELLKKDNYRVVKIPKKDGHRDLYIPNPRLKLIQKWMLMNLISKVKISKHARGFITDTSLVDNAIEHVNKDFVVSLDIRDFFPSINKYRVYRIFRSLGYCNDLAGIFTALLVTNNGLPQGAPTSPYLSHIVCKKLDSRISKELKHFEGCSFTRYADDFSISGGNEILEKISNIIYIISSEGFELNFSKTRIQSNSQKQLVTGLVVNEKVNVPSSYKRRLKQEIYYCKKYGVNSHMKRLGINKSNYKLYLYGKAYYIKMINQKLGEKFLSELNEIDWPY

SEQ ID NO: 2724 - protein, 363 aa, Paenibacillus rhizophilus
  source 1..363: note = Related to RQPI01000007.1
MVLNLSFVFFCNNPLLCCLKSSLGSGTMSEYLDSLRGKMVSTGYSTEYIELCIKYANDLENNNVPVIFDKAHFLLLTGLKTSELRNILTNKPEHYHEFELLVNYRLRNILAPNPLLKQVQKWIQVFILKPLKVSSWATAYKPGTSIIKNAKVHVKQDCVINLDLKNFFDSITSVRVHKIFRSAGYTKELATLFTQICTLEKCLPQGAPTSPYLSNLICRNLDQDLAIFCQSRAIRFTRYADDMTFSGGVEIENYIPNIRKTITKHGFVINEDKSQVLFRNQRQVVTGLVVNDKVAIKKEFIRKLSQEIHYCLRFGVSNHILNSRINKSNYKDHLFGRVYYIRMVNKPLGDILLKKLESIDWEY

SEQ ID NO: 2725 - protein, 336 aa, Paenibacillus baekrokdamisoli
  source 1..336: note = Related to AP019308.1
MSEYTDNLRKSMLELGNSNDYIELCINYARKLEKSHVPIIFDKIHFLVLTELKSSQLNDFLNNRAGYYREFELIINNRKREIHAPNNILKELQKWIQLYILKPLRVSDWATAYIPGTSIIKNAAIHIGQECVVNLDLKNFFNSISAVKVHRVFRVAGYTKELATLFTKICTVNNCLPQGAPTSPYLSNLVCIKLDQELADFCQSLGIRFTRYADDMTFSGGKEIVKVLPQIYKIISKQGFLINNDKTKILNCGQRQEVTGLVVNDKVSVKKEFIRKLSQEIHFCLRFGVSNHILRTGIRKSNYKDHLFGRAYFINMVDKSLGDDLLKKLQSIDWEY

SEQ ID NO: 2726 - protein, 340 aa, Paenibacillus sp.
  source 1..340: note = Related to NZ_CP075175.1
MSNSLNYLILLEEQMVQEQYPTDDIQLVKLYAQRLISNSVAVIFDFDHLCYLLECSPEDMRSYMYNKEYNYHSFEIPKKSGGTRQLEAPSYPLKMIQRWILDHITCQVPISSHAFGFRKKRSILDNAKIHEGQECIVNIDIANFFPSIKGIQIYKLYRYLGYTKQVASILTTLCTKDDCLPQGAPTSPYLSNIVCKKLDKRISGLANAIGAKYSRYADDITLSGSSSITNYIGTLKKILTDEGFIINYKKLRIQFNNQKQMVTGLVVNQKVNVPNEMIRSLRQEIYYCKKYGVNGHMRQRNIRNSNYKEHLYGKAYFIKMINPDLGLDMIRQLDQILWEY

SEQ ID NO: 2727 - protein, 323 aa, Neobacillus bataviensis
  source 1..323: note = Related to VIVN01000020.1
MYKQNCNSQYIKLVIDYAENLLKNNVEVIYDLDHISLLTNKSIGDFLDINNYYKEIQISKRNGETRTLAIPDDNLKSVQKWILKSILEKMPISNSAKGFKKGLSIVENAKPHTNKDCVLSLDLKDFFPSITQGSVYFIFKEIGYTEEVSRLLTRLCTYQGQLPQGAPTSPYIANLVCRKLDIKLQEFACNQNIAYTRYADDLTFSANKELSEYIPRIKEIVIIQGFKVNDSKTRCRYRHQRQLVTGLVVNNEKVSIPRELKRKLRQEIHYCKKFGVHGHLYWGIKYYSNYKDYLLGMALYVKMVDKNLGKKLLEEIKSINWEY

SEQ ID NO: 2728 - protein, 354 aa, Bacillus cereus
  source 1..354: note = Related to KB976825.1
MWLIKDFLVGSPLIGVENMDNYLEKLEREMRNRNFDLEYINLLKDYAKRLLDHKVAVIFDQEHFSLLTEVPVDTIKALLNNFNSYNEIQIPKKNGGNRTLLIPNEELKSIQRWILNNILNSIPISDYAKGFKKGLSIVKNAEVHTNKECLLNIDLTDFFSSIESQRVYKAFRYIGYTKEISAMLSRLCTYNNFLPQGSPTSPYLANIICKKMDKRLFSLCKDKGIDYTRYADDLTFSGDIKLSKYLPIISEIVEDEGFQINTTKTRISYQHHRQVVTGLTVNKGLNIPRDMKKKLSQEIYFCKKYGVQGHLAQTGQTYSNYKHYLLGKAYFIKMVNKELGEKFIRRIAEIAWDY

SEQ ID NO: 2729 - protein, 335 aa, Peribacillus sp.
  source 1..335: note = Related to JAJNAF010000001.1
MNLLSLEKEMIKQNYDKEYINIVKVYAHRLVENNIPIIFNFEHLCFLTNYSTEKLRYFIHNNQSLYKEIEIEKKSGNTRLISIPNNELKVIQRWILDEILSKIPLSPHAKGFRKGQSIINNAQLHTNKECVMNLDIQDFFGSVTQKQVYKIFRYVGYTKQVSSILSLLCTKDGVLPQGAPTSPYIANLVCKKLDKRISNLFINKPINYTRYADDITVSGEATIKDYLPILIKIITDEGFEINTNKTRIQYSYNRQIVTGLVVNQKINVPKKMIKQLRLEIYYCKKYGVAGHIDKRHIEYSNYKHHLFGKAYYIKMVNPKLGQKFLNELNEINWDY

SEQ ID NO: 2730 - protein, 335 aa, Rossellomorea arthrocnemi
  source 1..335: note = Related to NZ_CAJGBF010000001.1
MNIDTLKKMMENEQLSEDYINLCVTYARSLEDKGLPIIFDSIHLAKLIGIGTKELYSYYELAQTLYSTAVIPKKTGGSRKLNAPSENLKYIQKWIVENVLYRLDTSKVATGFVPQKSIVDNAKPHVGKECVINLDLKDFFPSIKYVWIYNLFISLGYTRHLSMLFTGICTLNNELPQGAPSSPYLSNLICEKLDSRLSSLAENMGASYTRYADDLTFSGDKEITKYIKLIKRVIKEEKFELNEKKVRVRFSYHQQMVTGLIVNEKLSVPQKTKKYLRQQIYYAKKYGVSSSLQKQGVTKSNYNGHLFGLAYFIKMVEPDCGTKFIEELKQIDWET

SEQ ID NO: 2731 - protein, 335 aa, Sutcliffiella horikoshii
  source 1..335: note = Related to NZ_VTEU01000001.1
MKIDTLKTKMEDEQFSEDYINLCVSYARNLEEKGLPIIFDSIHLAKLIGIETKELYSYYELAQILYRTAVIPKKTGGSRKLNAPSENLKYIQKWVVENVLYRLDTSKVATGFVPQKSIIDNAKPHVGKECVINLDLKDFFPSIKYIWVYNLFKNLGYTRHLSMLFTGICTLNNELPQGAPSSPYLSNLICEKLDSRLSGLAEHIGASYTRYADDLTFSGSKDIVKYIKLIKRVITEEKFELNEKKVRVRFSYHQQMVTGLIVNDKLSVPQKTKKYLRQQIYYAKKYGVSSSLEKQGVTKSNYNGHLYGLAYFIKMVEPDSGTEFIEELKQIDWET

SEQ ID NO: 2732 - protein, 335 aa, Exiguobacterium sp.
  source 1..335: note = Related to NZ_JACSLM010000003.1
MDIKSLAAEMMKKNYDKEYIDLCISYAINLEKNGMPIIFDSIHLAKLIGIETKELYSYYEFAPRLYKVAVVPKKSGEKRFLDLPSENLKYIQKWILENILYKIKVSDYATGFVPQKSIVDNAKPHIDKECVVNLDLQDFFPNIKYIWVYNLFYNIGYTKHLSMIFAGICTLENKLPQGAPSSPYISNLICHGLDTRLSDLAIHIGAQYTRYADDITFSGNKEIAKYISLIKRIIKEEHFIVNERKVRVQFKHHQQIVTGLVVNTKLSVPKKTKKYLRQQIHYAKKYGVNDSLIQQGINKSNYIDHLYGLAYFIKMVEEKCGSEFIEDLDTLDWES

SEQ ID NO: 2733 - protein, 326 aa, Cytobacillus luteolus
  source 1..326: note = Related to JADCLJ010000021.1
MVEEQFSEEYIKLCVTYATNLIENGLPIIFDARHLSCLIGIDTKELYSYYQLASTLYRKAVIPKKSGGSRTINAPSENLKYIQRWILENILYKINSSQEATGFVPQKNIVDNASYHVGKECVINLDMKDFFPSISFVQVYNLFNRSGYTKHLSMILTGLCMYNNELPQGAPSSPYISNLVCKNLDLRLSKLASQIGAKYTRYADDITFSGEKVIVKYIKLIKRVIKEENFNINHKKVRVQFSYHQQMVTGLVVNEKIRIPPKTKKYLRQQIYYAKKYGVTSSLSKQGQTKANYKGHLFGLAHFIKMVEQEYGDNFIRELKEIDWES

SEQ ID NO: 2734 - protein, 335 aa, unidentified
  source 1..335: note = Related to VENA01000064.1; note = Firmicutes bacterium
MDINKLKNNMLTEEYDKEYIDLCISYAYNLEKNGFPVIFDSTHLAMLIGIKVKELYSYYELAQSLYKKIIIPKKTGGNRILNAPCENLKYIQKWILDNILNNSESLDVSTGFVQGKSIVDNAKQHIGKECVINLDIKNFFPSIRYIQIYNIFRSFGYTRHLCMVFTGLCTYKNVLPQGAPTSPLLSNLVCKRLDTKLLDLANHIGASYTRYADDITFSGEKVITKYIKLIKRVIKEEYFQVNEKKVRVQFKHHRQMVTGLVVNTKLSVPKKTKRYLRQQIYYAKKYGVNNSLDRQEVSKSNYEGHLFGLAYFIKMVEPKNGVEFIEQLKQIDWES

SEQ ID NO: 2735 - protein, 335 aa, Alkalihalobacillus pseudalcaliphilus
  source 1..335: note = Related to LFJO01000006.1
MDIIKLEQSMRLEGHRADYIKLCKDYAINLKRNELPVIFNIEHLAKLIGINADECYAYYQLSSNLYNELLIPKRTGGQRVINAPSENLKYIQRWILDNILSNVSISVHANGFINERSIVTNAIQHIGKKCVINLDIKDFFPSITYIQVYNLFNRLGYSRHLSMVFTGLCTLDNKLPQGAPTSPYLSNIICKNLDDRLSLLASHINASYSRYADDITFSGDRGITSYIKLIKKVVQEERFLINEKKVRVQFQYHRQMVTGLIVNEKLSIPKKTRNYLRQEIYYCQKYGVKDHMSKKGLYKTNYQGHLTGLAQFIKMVDSKLGEEYLKSLDKIDWES

SEQ ID NO: 2736 - protein, 378 aa, Rhodococcus qingshengii
  source 1..378: note = Related to SMZU01000020.1
MTLFRRALNKVIPQRRSFWGMRKKKPSSVVNWKEPVENILERKMDLQKLYEELQNGNHDEDYTELCINYARTLLNNGMSVIFDTDHLSKLIGISSHELYSYYLFANNLYTEVKLPKKNGSFRTINAPSENLKYIQKWILDNILYNKNCSHFANGFIKDKSIVDNARPHVGKPCVINLDIKDFFPTIKYIDIYKLFKGFGYTSHLSMVLTGLSTYNNVLPQGAPTSPYLSNLICRNLDVKFESLANRISASYTRYADDITFSGEKSITKYIALIKSIIKSEGFTINEKKVRVQYQYHKQMVTGLIVNEKLSVPKSTKMYLRQQIYFSIKYGVTNNLERQNINKSNYKDHLYGIAYFIKMVEPLVGEQYIKQLNGIDWES

SEQ ID NO: 2737 - protein, 337 aa, Sporosarcina sp.
  source 1..337: note = Related to NZ_CP060287.1
MNNYISTLTDRMIKEGYETDYIKTVVGYSERLMQKDLPVIFDLAHLALYLDESEETLSEMVNNSTSFYSKAKIKSKKGKVRNIYIPYEKLKKIQIWILYKILYKVETPKCVKGFKLGSSIVDNAIPHVNKNYVLNLDFKNFFETIKEKQIITVFTSLGYNKIVSSALSKICNYNGSLPQGSPSSPYLSNLVCRNLDNKIIELIKFEDVTYTRYADDLTFSSNQKLDSLIPLLEELIVSEKFKINESKTRMQLKNQRQLVTGLVVNSQVSVPRKYIRELRSEIYYCKKYGVSGHMDRKGILYSNYKLHLYGKALYIKMVDKSKGESFLKELDKINWQY

SEQ ID NO: 2738 - protein, 337 aa, Streptococcus oralis
  source 1..337: note = Related to PKIG01000001.1
MSQLEELKKLDIPVFCNLEELRENIGTNKKFFYKVLYSHNKLYKEITIPKRNGGNRVLNVPNIALKSMQRWILDNILYKVQSDPSATGFMPMKSIVLNASIHLKKKYILKMDIKDFFPSIDFRKVRSLFFELGYNKDVATALANICVFRGQLPQGAPTSPYLANLVCRELDKRIDNLCRKYRLSYTRYADDITISGNSKIFWIKGIVEEIIRSYQFSLNNEKTIFLKPGDRKRVTGIIVNEKLSVPRSVTRNLRKEIYFIKKFGLEEHLDKNSFTGSKEQYIAHLYGVASYIKMVELTKGIFFINQLNSIFSGNEQLETGKNLHIEFASIDWTIFGE

SEQ ID NO: 2739 - protein, 340 aa, Streptococcus sanguinis
  source 1..340: note = Related to APLR01000002.1
MSEKINLTVLSIESITSLEDLRKKMGVKKKYFYRVLFSHDKFYREIEVPKRKSGQFRKLSVPSMALKNMQRWILDSILYKISVNENAMGFVPSKSIVTNAYNHLAKKYILKLDIKDFFPSIGFGKVLDIFQKLDFPAEISSALANICIYKDELPQGAPTSPYLANIICKQMDFRIGSLCKKYELNYTRYADDITISGDRRVFWIEKQIEKIVNSCHFTLNKEKTVRLKPGDRKRVTGIIVNEKISVPKNIKRTLRQNIYYIEKYGLESHLDKIQFTGLSNQYIRHLYGMASFIQMVEIERGIEFIDKLNSLFNQKNDTDYQISEDDLLSFDHIDWSILDI

SEQ ID NO: 2740 - protein, 341 aa, Lactococcus piscium
  source 1..341: note = Related to NZ_JAGYWS010000004.1
MRHLDFSFSNENIPVFSSLEDLRKKMGISTAFFYKAIFASDFFYKEILIPKRKVGKFRTLKVPPVFLKNMQRWILDNILYFISCHRNATGFIPNKSIVDNALVHVRKKYILKMDIEDFFPSINFYLVREVFIKMHYSKVISNALASLCICEGQLPQGAPTSPYIANLVFIDIDIRISQLCLKHNLNYSRYADDITISGSSNIFWVRKVVEKILKEKKFKVNKDKTVIIKPGDKKQVTGLIVNDQLSVPKSTIRELRKNIYYIKEFGIDSHLNKIKYEYAKEKYIDSLYGTASFIKMISPEKGINFFNELNSIFRRGNQYNSEQIEPSFIDFSETQWTVFEN

SEQ ID NO: 2741 - protein, 405 aa, Streptococcus parasanguinis
  source 1..405: note = Related to JYOW01000001.1
MDESSYLSINGYKYLSLYEAPLPITRAKFCKFLPWGVLLRGGPQPHCPTGKGFYKVKLVLVTQKRFNMIKFDKIISLDIPVFLTLEALRKNIDIDKKYFYRTLFYRNNLYKSIQILKKNGSDYRQINAPILPLKRIQRWILENILYKIPIEDCAHGFVRGKSIITNAYPHVNSKYILKMDIVDFFPSIHFGLIKKFFYDLGYSNTIACALANLCTFNSQLPQGAPTSPYLANIICIEMDKRIQGLCKKNRLKYTRYADDITISGNSNVFWIKDIVEKIVNCYGFQINQNKTVVIKPGDRKKVTGIIVNEKLSVPKSIVRKLRQDIYYIKTFDLESHMERISFTGTKQQYISQLYGVASFIKMVDIDKGLYFISTLDSIFKPFSPSIAEVDLELDDYFDNLFNDLF

SEQ ID NO: 2742 - protein, 332 aa, Macrococcus epidermidis
  source 1..332: note = Related to NZ_PZJH01000006.1
MKYKVEVFPAIDSIEDLRNMIGVQSNYFYKCLYSNEYFYKTVKIPKRRNDEYRELTIPTMALKNIQRWILDNILYKFSVHPCAKGFVPGKSIIDNAIPHINKKYVVKMDVKNFFPSISFKDVRILFLNLGYKIEVAIALANLCTYKNTLPQGSPTSPYIANLIFYKIDKRISGFCNKNNLTYTRYADDITISGKSNISFSIKIINQILTQNRFELNDKKTKVLKPGDRKIVTGIIVNEKLTIPKDFIRNVKRDLYYINRFGLLNHLNFISIAEDNSEYYLNSLSGKISFIKMVDYKQGYILQNELDNIIGYNDKHEEKYIDLEDIDIKWEKL

SEQ ID NO: 2743 - protein, 313 aa, unidentified
  source 1..313: note = Related to nan
MIGIKSDYFYKCLYSNEYFYKTVKVPKKRNDGYRELTIPTMALKSIQRWILDNILYNFPVHHCAKGFIPGKSIIDNAIPHINKKYIAKMDIKNFFPSISLKDVIMLYLNLGYNYKVATALANLCTYKNQLPQGSPTSPYIANLIFFKIDKRIFGFCKKNYLTYTRYADDITISGRTNIAFSIKIINQILNQNKFELNDKKTKILKPGDRKIITGIIVNEKLTVPKDFIRNVKKDIYYIKKFGLASHLNFIDFPIENSEYYLDSLYGRISFIKMIDYKLGNMLQNKLNNFIDYSKRREEKYIDLEDIDIKWKKL

SEQ ID NO: 2744 - protein, 331 aa, Staphylococcus aureus
  source 1..331: note = Related to JAJHOZ010000001.1
MVNKTYLAINSLEELRNMIGIKSDYFYKCLYVNDHFYNVIKIPKRKKDEYRELMIPNMALKNIQRWILDNVLYRRQVHKCATGFVPRKSIVNNAIPHVGQKYILKMDIENFFPSITFKQVRKIFSEMGYKFELATALANLCTVNNQLPQGAPTSPYIANIIFYNIDKRIFSYCQKNNLRYTRYADDITISGSNKVSFSKEIIREIVNQYNFRINESKTIMFKPGDRKKVTGIIDNEKISVPKTLIREVRKQIYFVNKFGLEEHLIRNNYSLDYEQQFIMSIYGKISFIKMIDFKKGVSLQKKFNEVLGNIESSNMYRDNIDFDDIELHWIN

SEQ ID NO: 2745 - protein, 315 aa, Lactococcus piscium
  source 1..315: note = Related to JAAECV010000003.1
MKLIDNGLDDLSRPVFLCTKDIQQAIGIDPKIFYTFLNPKNISYIKIKIPKRKKGEYRELSIPSPALKNLQRWVLEHILYSFPCHGSANGFIPNKSIVTNAIPHISKEYILKMDLKDFFPNITFSMVKNQFLTMGYNDHVSHSLALLCTYNDSLPQGAPSSPYLANLLFSPFDELIYTHCSKNNLSYTRYADDLTISGGKYILNIPQYVKDILRDSDFQINNSKTLIIKKGDKKQVTGIVVNEKISIPKNYLRELRQIIYYINKYGLDSHLKKIDYKGSKYKYINSLYGKASYIKMVDFKKGIKIFTELNKISLD

SEQ ID NO: 2746 - protein, 333 aa, Carnobacterium maltaromaticum
  source 1..333: note = Related to NZ_CP045040.1
MSSDKNPLSLKEEWSAEDIKKYSSMLKRNNVPVIFDTEHFRRLLGLEKTDFYNILFKLEYQYHEVEIPKKKQGELRTLFLPSIKLKYMQRWILDNILYSQECNNEVTGFVPSKSIIDNAKPHIGQKYILKLDIQDFFPSISKIRVFLMFKHFGYTNDLSNTLSNICIYKNELPQGAPSSPYIANLICKKMDNRFLGLCKKNNLKYTRYADDITISGGKSVYKFKQFFINIVTDEKFFVNKKKVKLLKNGDRKQVTGIVINEKLSVPKNVIRDLRRDIYYITKYGLNSHLKRTGNIASSNYKAHLFGKAKYIYMVDREKGALYLEQLDAIDWET

SEQ ID NO: 2747 - protein, 332 aa, Listeria newyorkensis
  source 1..332: note = Related to KQ130593.1
MNSDDKLSKLKENWTAMEIENYSSSLKKKGVPVIFDVEHFRRLLGLRSEDFYSILFKLEYHYHKLEIPKKIVGTYRQLLLPSIKLKYIQRWILDNILYTQSCITEVTGFIPGKSIVNNARPHLKQKYILKLDIEDFFPSIDEKRVFNLFKNFGYTNRLARTLSRFCSYENELPQGAPSSPYIANLICRKLDARLTALCAKYALNYTRYADDITISGGRMVFKLKKHIINIISDENFSINKSKIKLLTAGDRKKITGIIVNEKLSVPKKVVRELRQEIYYIKKFNLESHMKKTGNVSKSNYKGHLFGIAKYIFMIDKDLGTYYLDKLNGIDWE

SEQ ID NO: 2748 - protein, 327 aa, Streptococcus gordonii
  source 1..327: note = Related to NZ_LS483375.1
MKKWTDQDIREYRNKLEANGVPVIFDLEHLRRLIGIEKKYFYKVFYKLEYQYREITIPKRKPGQFRILSVPSRNLKLIQRWILDNILYCIECGEIVTGFIPLKSIADNAKPHTQKKYIYKFDLKDFFPSIPRRKVYYLFRNLGYSSDLSNALATLCCFNNYLPQGAPTSPYIANILCGKLDRRINSFCQKNNFTYTRYADDLTISGDEKLVHYKSLFRKIINDSGFCFNEDKARLIRCGQRKLITGIVVNEKVTVPRSYVRSLKKELYYIHKYGLKGHLEHCDIKTPPNIYSKEIIGKINFISMVDSKLGEEFKSLFKDALKKNKIF

SEQ ID NO: 2749 - protein, 319 aa, Streptococcus sp.
  source 1..319: note = Related to AJMM01000006.1
MNWTEENITNYKNRLIEKGVPVIFDIEHFRRLLGIKKSYFYKLFYGLKYQYKEVEIPKRKIGEYRKLTVPSKNIKKIQRWILEFILYSNLCDDCVTGFIPTKSIVENALPHIGHDYIYKFDLKDFFPSIPRSKVFYLFKDLGYTAELSNYLASFCCYNDCLPQGAPTSPYIANLVCKRLDKRLKILCERNGFTYTRYADDITISGDFKIVHFRNLFETIIEDSGFIINELKTKLIRNGQRKIVTGVVVNEKPTISREYVRELKKEIYFINKFGIENHMKRIGEAGSVKDYRRKIYGKINFVKMVDRELGLELRRKVNSF

SEQ ID NO: 2750 - protein, 357 aa, Paenibacillus sp.
  source 1..357: note = Related to VTZR01000027.1
MDLDLLKSKLIEKNIPLNDIEATISYAQTLKNNGVPIIFDMQHLRRLLKLTESDFKRLYYARDLQYRTIEIPKNNGSGTRTLSLPSIDLKYIQRWILDNILYNVHVHEYAIGFVTGKSTVLNASHHINQEYVLKMDIKDFFPTISGGRVYGLFKCLGYSSSVALTLTNFCIYQNSLPQGAPTSPYISNLVCRKLDQRLELLSRKRKLKYTRYADDMTISGGRKIKKTIPYVKQIIEEEGFRCNESKTKLIYKSNRQQITGIVVNEKLSIPKSMFKSLRQEIYYMKKFGVSSHLDKKGLKHKSHVKEHYFGLANYIMKVDREKGKQILNDLNAIDWISKSHKGNKQFTAQEKNKDIYE

SEQ ID NO: 2751 - protein, 334 aa, Paenibacillus sp.
  source 1..334: note = Related to NZ_JACXZA010000007.1
MIERNVPNEEIESTLSYAHILQENGVPIIFDSQHLRRLLKLTDTDFKRLYYSKEMQYRTREIPKNNGSGTRTLCIPSLDLKYVQRWILDNILYKVKINEHAIGFVKGKSTVSNAGYHMNQEYVLKMDIKNFFPTISNSRVFGLFKSLGYSSSVAMTLTNFCTYNNELPQGSPTSPYISNLVCRKLDRRLELLCRTRGLQYSRYADDITISGGRKIKKTISFVQRILEEEGFKNNENKMNLIYKSNRQQVTGVVVNEKLSVPKVIYKSLRQEIYYIRKYGLESHLDKKGLNRKSHVKEHYYGLANYMMMIDKDKGQQFINELNAIDWKRKSLGRD

SEQ ID NO: 2752 - protein, 356 aa, Bacillus safensis
  source 1..356: note = Related to NZ_CP084677.1
MKDSMGSVIYALLNKKDGKMDLAILESKMIEQNIPTMDIESTISYARALKDNGVPVIFDIQHLRRLLRITKSDFKRLYYAKKNQYKTVEIPKNNGTGSRLLSIPSIDLKYIQRWILDNILYKVEINNLAIGFAKGKSVVVNASYHIKQEYVLKMDIKDFFPNITANRVFGLFKSLGYSSSVAITLTNLCTYNDSLPQGAPTSPYISNLICRKLDSRLKNLCQKRNLNFSRYADDITISGGKKVKNTIPCVEKILEEEGFNVNEQKTRIIFKSKRQQVTGIVVNEKLSVPKSIYKNLRQEIYYMSKFGVESHLDKKGLKNKSHVREHYYGLANYFLMVDRVKGEKVLSELNSINWND

SEQ ID NO: 2753 - protein, 336 aa, Lysinibacillus sp.
  source 1..336: note = Related to LKPY01000055.1
MNLEVLESKMSEENISLEEIESTLSYARNLKENGVPVIFDIQHLRRLLNLNKTDFKRIYYARQHQYNTIEIPKNNGKGTRTLSIPSLDLKYVQRWILDNILYKIEVSEYANGFVKGKSVVTNANYHVKQEYVLKMDIKDFFPTITAGRVFGLFMSIGYSSNVAIVLTNLCTYNNSIPQGAPTSPYISNLICRNLDLRLSLLCNKRNIKFSRYADDITISGGRKVKKTIPFIRKIINEEGFIVNQEKTKLLYKSGRQQVTGIVVNDKLSIAKEILRKLRQDIYYIKKFGLNSHLEKKNMINKSHVREYYYGMANYILMVDQNKGQKLFNELNKINWK

SEQ ID NO: 2754 - protein, 337 aa, Exiguobacterium sp.
  source 1..337: note = Related to LR733429.1
MDLSILKQELMSRDLNSVDVEFIISYAQSLLDKDIPVIFDLEHLRRLLGLKRSDFKQVYYANSNQYHNIEIPKNNGSGTRKLSLPSDKLKKVQRWILDYILYNFEVNEKATGFTLDKSIVTNANFHTNQKFVLKIDIKDFFPTITSNRVYGLFKSFGYNNSISLALTKLCTHENCLPQGAPTSPYISNLICRHLDIRLNGLAKKNNLNFSRYADDITFSGEFIPSNIVEMVQWILIEEGFWINELKTKLLNKSQRQKITGIIVNQKLSVPKEITKTLRQEIYYMKKFGVQSHLERKNLQTKTNVKEHYFGLVRFILMVDNEMGKKLSYELKKINWDS

SEQ ID NO: 2755 - protein, 382 aa, Psychrobacillus sp.
  source 1..382: note = Related to FNHY01000009.1
MDLILLEQELKAMELDNDIINNYISYASNLKNNNVPVIFELEHLRKLLHISREEFFGIYYSIKYQYHTIYIPKSKIKYETNKGITRQSKKYILPKVYYDNEVRHKFKRYNKVITDLTNNKSSYYRKLDLPSKKLKYIQRYILDNILYRVDVHNAAHGFVPGKSTISNARVHVGNEFVAKLDMRDFFPAITAQRVYGLFRSFGYNKSLSFTLTKVCTYNGSLPQGAPTSPYISNLICRKLDYRISTLCIKNNLNFSRYADDITISGGRKVKRVLPIIKDIIKNEGFRINDEKTKILHNSHKQKVTGVVVNQKVSIPKSFYRNLRQELYYMNKFGVSSHLLEKQTMFKSNTKAYYFGLVHYCYMVDPIKGEKLLQLLEKINWNS

SEQ ID NO: 2756 - protein, 332 aa, Streptococcus sp.
  source 1..332: note = Related to VFSH01000008.1
MWTKESIKIYERQLESNRLPVIFNIEHLRRLIGVEKKYFYKLTNSVDASYISRFIDKRNGGKRKLLIPGFNLKLIQTWILHNILYTQPVFTSATGFIKQKSIIDNATPHIGKKYIFKTDISDFFPSIKFKNVFLLFLNFGYTKEVSNVLAILCTYEGYLPQGAPTSPYLSNLIFRDFDKKLENICSLSEYKYTRYADDITISSNEKISSIEVDYLSKTIEQSLQTINNFLKLNLDKTTVLRPGQRKIITGVLVNETLNVPKKILSEIRLEIYCLQKYGASNRIEAYNQKHNTNLDKYSYRQKLYGKICFVNMINPKKAEKFYEQFYDINWIK

SEQ ID NO: 2757 - protein, 332 aa, Streptococcus parasanguinis
  source 1..332: note = Related to NZ_JVKT01000024.1
MWTEESIENYERLLESKGLPVIFDVEHLRRLIGVKKKDFYKLTNSIDACYTCRLIDKRNGGKRELLIPSFNLKIIQTWILNNILYTQSVSSSATGFIKGKSIVDNAEPHIGHKYIFKTDILNFFPSIKLRNIFLLFFYFGYTVEVSYILASLCTYEGYLPQGAPTSPYLSNLILRDFDIKLQNICSSLNYTYTRYADDITISSDTKITKFYIEYLLDTISQLLNSITYFLKLNLDKTKVLHPGQRKIITGVLVNKRLNVPKELLSEIRLEIYCLQKYGASNRLKAYNLKNNTDLNIASYRQKLYGKICFVNMINPIKAEKLYDQFYDINWMK

SEQ ID NO: 2758 - protein, 332 aa, Streptococcus salivarius
  source 1..332: note = Related to JAGZIK010000037.1
MMWNEQSIRNYIGLLESKGLPVIFDLEHLRRLIGVEKQYFYKLTNSINESYSFFTIRKRNGGSRTISIPFSNLRTIQNWILNNILTTQQVAESATGFIKGKSIVDNAKPHIGHKYIYKTDIVDFFSSIKFKSVLALFLRLGYVKEVAYILARFCTYDGYLPQGAPTSPYISNLILYNFDIELQKICCLSKFSYTRYADDITISSNGEHLIDSNLLSATITKLLQDISFELKINFKKTKVLHPGQRKIVTGVLVNEKLNVPKEIISDIRLELFCLNKHGLSKRIKHYNEKHKTALSVALYRQKIYGKICFVNMINPKKAEKLFQEFYKIKWLL

SEQ ID NO: 2759 - protein, 340 aa, Paenibacillus sp.
  source 1..340: note = Related to JABBEA010000018.1
MIKQVIFNIQLSDLPEQEKKDLIYYAENLYFKQCPVIFDNQHLMKLFELQDHDLKRFMTENTNHYSIKKRNGDLREVWKPNYKLKTIQKWILKNILNEIKVSECAHGFVKSKSILTNAETHQYKEQFWVFSMDIKDFFPSIKYHEVKRIFMGIGYSNEVSEALSLLTTVHGKLAQGFPTSPMLSNLFFRDIDEEFQQIASRYHIRYSRYADDITFSGVQKKGYLVLSEKLKQIVTSVLSKHNFIVNEAKTRLMKGKHPKIITGLVVTSQGVRIPQKYIRRLNKEIYYCRKFGVNGHLKYQGLITIANYKGYLIGLARFIYMVDPVKGAKFIKMIKDLDWD

SEQ ID NO: 2760 - protein, 340 aa, Pontibacillus yanchengensis
  source 1..340: note = Related to NZ_AVBF01000002.1
MFDKILDNIKKSSLLEKEKEAYIQYARNLHLKNSPIIFDINQLVMLFDLPNDNIKEFVLENTNQYTISKRDGSSREVWKPSYKLKTIQRWILKNILFNIKVSESAHGFVKNKSILTNAEVHQYNEPFWVYSTDIKDFFPSIKQNEVKKIFLEIGYTEKVSEALSSLTTINESLVQGFPTSPMISNIYCREIDEEFKKQANKLNISYSRYADDITFSGPQKNGYLKLIKNIKNIVLHNFRENNFLINEKKTRVRKNKHTKIVTGIVVSQYGVRIPQKYYRRLNKELYYCQRFGVNEHLKYHGLITISNFKGYLIGLARFIYMVDPDKGSEYIKKIQKLDWE

SEQ ID NO: 2761 - protein, 340 aa, Bacillus cereus
  source 1..340: note = Related to JH792149.1
MIKQVLHNIVLSDLSEEEKKFFMQYAKDLHSNHCPVIFDINQILRLFELPDDDLEKFVIDNTNHYYVSKRNGEPREVWKPNYKLKTIQKWILKNILNKIEVSACAHGFVKSKSILTNAEVHQHQEPFWVFSTDIKDFFPSIKYKEIKKIFIGIGYSDAVSEAFSLLTTVNKELVQGFPTSPMLSNIFFREIDEEFQQLASRYNIRYSRYADDITFSGVQKKGYLKLVKKIKEIVSCVLSKYNLIINNKKTRLMKDRHTKIVTGLVITPQGVRIPQKYIRRLNKEIYYCQKFGVNEHLKYHGLITIANYKGYLIGLARFIYMVDQSKGIELIKKIQELDWD

SEQ ID NO: 2762 - protein, 340 aa, Amphibacillus marinus
  source 1..340: note = Related to NZ_FODJ01000007.1
MLNKVINNIRLSDIEEVEKRELIHYSEQLYSKNCPIIFDVNQLLLLFEIESDDLENFVLNNTLHYFVKKRNGEMREVWKPNYKLKAIQKWILNNILYNIKVSPHSHGFVKKKSILTNAQVHLHEDPFWVFSTDIKDFFPSIKQNEIKSIFMEIGYSKPVSEVFCLLTTVNQKLVQGFPTSPYISNIFFRNIDEKFREIEYKYSIRYSRYADDITFSGIQKKGYLTLVNKLKQIISNTLSKYNLTINEKKTRLMKDKHTKIVTGLVLTSKGVRVPQKYIRKINKEIYYCERFGVNEHLKYHGLITRANYRGYLIGLARFIYMVDSIKGAELLKKIEDLDWN

SEQ ID NO: 2763 - protein, 340 aa, Bacillus subtilis
  source 1..340: note = Related to CP035226.1
MIKQVLHNIELSDICEEEKRKLIHYAEQLYSIHCPVIFDVDQLLLLFEIKVDELEKFVTDNTNHYFISKRNGKSREVWNPNYKLKAIQKWILKNILNNIEVSNCSHGFVKNKSILTNAQVHLHQEPFWVFSTDIKDFFPSIKKNEIKKIFMGIGYSESVSEALCLLTTANESLAQGFPTSPAISNIFFRKIDEEFQQVASKFSIRYSRYADDITFSGIQNNGSPSLVKKLKRIISYTLSRYNLYINETKTRLMKNKDTKIVTGLVVTSQGVRVPQRYIRMINKEIYYCQKFGVNEHLKYHGLITIANYKGYLIGLARFIYMVDSIKGAELIKKIQDLDWN

SEQ ID NO: 2764 - protein, 340 aa, Planococcus koreensis
  source 1..340: note = Related to JACHHE010000004.1
MIKQILHNIISSNLSKEDKEILTQYAENLYLKNFPIIFDVNQFFLLFELTDNDLEKFIIDNTNHYHINKRNGELREVWQPNHKVKIIQKWILKNILNKIEVSPYAHGFIKNKSILTNAEVHLYQEPFWIFSTDIKDFFPSISYNDVKKIFMEIGYSDKVSEAFSLLTTVDGKLIQGFPTSPMLSNIFLRDIDEEFQKIAVRYNIRYSRYADDITFSGIQKKGYLTLVKNIKRIVSFILEKHDLAINNEKTRLMKDKHTKIVTGLIVTSKGVKIPQRFIRKLSKEIYYCQKFGVNDHLKYQGIITIANYKGYLIGLARFIYMVDKIQGAKFIKEIYDLDWD

SEQ ID NO: 2765 - protein, 340 aa, Bacillus toyonensis
  source 1..340: note = Related to NVGO01000019.1
MINDILKNIKLSKLSEENRASLTRYAISIHNNNCPILFDKNHVLLVFNLVEEDLQKFIKENSNKYFIKKRNGSLREVWQPSYKVKEIQKWIYKNILNDIQVSECVHGFVKNRSILTNAQNHIHEDKFWVFSMDIKNFFPSIRIERIEQIFLKLGYSLEVSKALSLLCTVDGKLVQGFPTSPSLSNIIMREIDEEFKTIADRYNLKYSRYADDITFSGDQKKGYLILVKRLEKMICFILKNADFEINNSKTRLMKNKHAKIVTGLIVDSDGVRIPKKYIRKLKKEIYYCKKFGVNEHLKYIGLITIANYKGYLFGLARYIYMVEKELGIMFIKQLNDLEWD

SEQ ID NO: 2766 - protein, 345 aa, unidentified
  source 1..345: note = Related to SAAR01000159.1; note = Erysipelotrichia bacterium
MDNIVFQNINRSSLTDNEKNHLTIIASSLIIKGVPVIFDIHQVRLLFGIDGEIGIFVQKNCAKYSILKKNRDERTIYQPSYKLKKIQRWIVSNILSKIKISKSCHAFVPEKSILTNAKAHVHEDPFWIYKTDIINFFGEINFITVKDIFFSVGYSQDVSEILTSLCMYDGVLAQGFPTSPIISNIVLSNFDEELDVISQRYNFVYSRYADDITISGTQLRNKDIEKIKNIITYKLHHLGFEINKNKTKFFGFKADKKVTGVVIKNGQLFCPQKYKKLLNKELYYINKYGVDSHLIHNEKTLISNYIGYLYGYAGYIKMIEPDVGDEYVKKLNSIFWISNSEQAPS

SEQ ID NO: 2767 - protein, 309 aa, Companilactobacillus nantensis
  source 1..309: note = Related to BJZH01000076.1
MNFTNTKQIKSVFKISQDMTVEKFVSKNINQYYFIKKKSKNPRQIYIPSIQLKTIQKWILKKILTKEFSSSEVAHGFISGRSIVTNAREHLYKEPSWILTMDITNFFDSIRFDSIEHLFRQHGYTKEVSRTFATLCTYRGKLVQGFPTSPFLANLYLKSFDVYLKSNLQKYNVKYTRYADDLTFSGNIEKNYESFILESERMVEKGLTKLQLRVNSKKTNIQTKERKIVTGIWLYKNKLSVSNNYLKKFRREIYYCKKYGVIDHLIHTNKVEISNFHGYMYGKAYFVKMVDENLGMKLLKELNDLNWPM

SEQ ID NO: 2768 - protein, 310 aa, Lactiplantibacillus plantarum
  source 1..310: note = Related to PZPN01000074.1
MKLKNTNQIKKLFKITGNDISSFVTDNIASEFKIKKSNKERIIVVPSLHLKSIFRWLLDNIFEKEFIPHECVHGFVKNKSIVTNAKAHLYHSPNWVYTIDINNFFGSITRNDVLSIFIEKGWPTSVANAFADLCTYKNTLPQGFPTSPCLANAFLNKFDTHIHDFCKTYGIRYTRYADDLTFSSTDFVSVKKINEEVSCTLKKQNLFLNPKKEHLQKGKHKKITGININGHKLVSSRRFRKKFDNEIFFCKKYGIMDHLARTGTLTRSNFKSYMYGKACFINMIDQDLGQQYFRKLQHLNWPEIPNNAYF

SEQ ID NO: 2769 - protein, 339 aa, Solibacillus silvestris
  source 1..339: note = Related to LZRJ01000059.1
MLETILNNINLGNIDKENKNILIENSKYLYSKGLPIFLDERHVSLVFNIEGNIKSFVENSTSHHIIKKHNGDSRDVFVPSEHLKEIQNWLLVNILEKKMISNSTYSFVKGKSIIDHALNHIYLKDFWLVTFDVKDFFPSIRKDAIKNIFFELGYTSDISDTLSSFCSIKNNLVQGFPTSPIISNIYLNELDSVLQEFCQSHNITYSRYADDLAFSGEGEKIQKSLYDKLYQLVVNTLAIYELKLNKNKIKIYDYNHPKKLTGIMLTTNGIRVPLKIKKKILKEIYYCEKYGVEDHLKKTGRLELANYKGYIYGIAGFIRMVEPETGIQLFRRLDNIYWG

SEQ ID NO: 2770 - protein, 311 aa, Streptococcus suis
  source 1..311: note = Related to SSXP01000002.1
MNSILVSEQQIKLLFKIAMTEDVIDFVKDNNLVYSKCKYNGETRFISSPSEHLKIIQRWIVDNILVQKSISDVAHAYVREKSIFTNARVHVGNKAILKMDISNFFDSIPITKVKEIFLSLGYNSAVSQVFAELCTNNGYVRQGFVTSPFISNIILKDFDDKLINTLKKSCYSKYEFKYTRYADDITISSKYKVKSKLKEIEQEVMDILEVSGFSANLGKTRLIIGESPKKITGIIVKESSISVPNRFKKELLKELYYCRKFGVISHLIYTGNYGKLNYIEHLKGLAMFIKNTDQKFYESVISQISELDLNS

SEQ ID NO: 2771 - protein, 311 aa, Streptococcus oralis
  source 1..311: note = Related to NCUR01000009.1
MIPKLISVQQLKKLFKIELTSNIEDFVENNNQVYPRIKKNGEIRFISSPTIHLKSIQKWIVEHILSKKDCSEFCHAYVKEKSIFTNAGTHIGNQNLLKMDIHNFFDSIPHISVKNIFITMGYNLEVSHSLALLCTYKGYVRQGFVSSPMISNIIMKEFDDWIIKSLHEEEYLKFDFKYSRYADDIAISSKKKAVAPLVIIKENISDYLEKYGFIVNNDKIKLIKGKGPKLITGIVVKDNSISVPNKYKRKLLKELYYCEKYGVESHLLYTGQYGKTNYKEYLLGIAMYIKNTDNQFYNTIRERIDALNIDY

SEQ ID NO: 2772 - protein, 336 aa, Ligilactobacillus murinus
  source 1..336: note = Related to CP023565.1
MLVFQRPSSKRMAFCVGGFIVKVSRSISVKQVSEAFGINENIDEFVDNSSWFYPIEKKNGDIRYIFIANNQLKAIQSWILENILEDVKISDAANAYVSKKSIFTNAQCHVGYKGMIKLDIMNFFDAINRDDISKIFENLGFSKDVAMLFGKLCSNKNILNQGFSTSPMLSNIFFYKYDKLIEKILNEKYGKNTFVYTRYSDDITISTSKTFTFDDLMKLSSEIENLLLPKFKINKMKKKIILGKYPAKVTGINVFKEYMSVSKKIRRRIKREIHYCEKFGVSGHLKYVGEYNRQNFFGYLRGTAHFIGNTDKKLALKLLERIDMLEFRDRVTQKKL

SEQ ID NO: 2773 - protein, 330 aa, unidentified
  source 1..330: note = Related to SVLF01000041.1; note = Oscillospiraceae bacterium
MANSYIKRLEAAMTEQGAENEAISRAVDYAFNLLNQNLPVLFDDIHVAEVLLLSRLSLYSYHTFPVSQIDKTRIITAPSLNLKQRQKWILSEILNKIPSSEHAHGFESGHSIKTNALIHANNDYVFCMDIKDFFPSISRQSVCEIFRNVGYSPKASDMLSKVCCYNNCLPQGAPTSPKLSNIFFAKIDAELANLAKLNNAIYSRYADDMTFSSKHDIPALHKAVEEIIGKYNFTLNHKKTRVFYPGQPKRITGLIVQNGCIRVPKHFKRRLRQEIHYCRQYGVTVHLENTNASHCINYREHLYGKAYFVHMIEPDTGDKLLNMLDEIDWM

SEQ ID NO: 2774 - protein, 335 aa, unidentified
  source 1..335: note = Related to JAFSGO010000067.1; note = Clostridia bacterium
MDYVYITNLMHGLFQKGYDDKFVIRCCKYAEKLMRKNLPVFFDEEHIYEVLRTRGISLEDSYHTFDLIHDNKVRTILAPSKKLKARQRWILDNILNNIKVSKYAHGFELNRSIKTHAQLHANHDFVICMDIKDFFPSISEEKVFTLFKQIGYTTRASQELTRLCCFKGALPQGAPTSPKIANIICKRMDREIQRFAKENGITYSRYADDLTFSSNSEMPQLIPEITAIVNKYDFSINTEKTQSFVCGEPKFITGLVVQNGTVRVPKRYKRELKKEIHYCQKFGVLIHLENSNATHFVNYREHLYGKAYYVHMIEPDIGEKFLDELDKISWPEYMV

SEQ ID NO: 2775 - protein, 351 aa, Ruminococcus flavefaciens
  source 1..351: note = Related to NZ_JHXF01000028.1
MEQNVKDMYIERLCHTLNDSKLSDMHKNKIISYAQQLLDKNMPVLYDKKHIAMIFDLRNIRLISSNYNKFYIDEKHKKRLIEAPSKKLKSIQKWILNNILEQLDTSEYAYGFRKGRSILQNALCHLGKKNVLCLDIKDFFGSIDEKTVFWLFRNIGFTSEASKTLKKLCCYKKALPQGAPTSPCIANIVCINMDKKLAQLAKKYNAVYSRYADDITFSSDEDISFLNKEVEKIIRKYNFFLNDKTKYYSGDHPKFITGLVVHKDKIRVPKKIKRELSKEIHFCRKFGVDMHLNNSGAEKRVNYREYLYGKAYYIKMVEHETGEKFLGMLNMIDWPDWALGSSNTSDNESVL

SEQ ID NO: 2776 - protein, 334 aa, Anaerotruncus colihominis
  source 1..334: note = Related to NZ_CP094682.1
MEPNDYVNRLRHAMEISENPRFSPEYIAQCCTYAENLLKQGLPVLFDQTHIRKVLGMAAPRLCDYHRFTIPKHNGSRIITAPSRKLKLRQQWIYQNILIRKEASPYTHGFVPERSIVTNAILHIGYAYTYCVDITDFFPSITKKQVLPIFRNMGYSGSAANTLCDLCCCDGVLPQGAPTSPYLSNMICRDLDDELGAMARRFRGIFTRYADDIAISANQQQPQLLDALGLILGKHGFSMNLDKCRIYNPGQPKRITGLTVHNRVSVPKAFKRKLRQEIHYCQKFGVTAHLENTKAARSIHYREHLYGKAYYVKMVEPELGAHFLDELSKVDWPE

SEQ ID NO: 2777 - protein, 424 aa, Dorea longicatena
  source 1..424: note = Related to CABHNM010000079.1
MGKYKYIDRLRQAMGGKYSEEYINYCAEYAAKLLDKNLPVIYDARHVDEILRLHGIKPDCYHIFVIAGKNKERKITAPSREIKQRQQWILEEILEKQDVSDNCHGFVKKRSILTNAKMHMGHKNILNLDIRNFFPSITETMVIFQFQQMGYSKSAAEALAGVCCYEGKLPQGAPTSPYMSNLILKKMDQDLENFCQKKGITYTRYADDMSFSSNEEIEGFFKDIKFIIGKYSFEINEKKTCYYQDPYRKIVTGLLVKENEVCIPKKFKRKFRQEIYYCRHLGVQRHLENTGNQERTGFREYMYGKAYFIAMVEPEAGKKYLEANTFDTFKVEPSLMTVFEQSHTWDELICHFVDSYVVETDKKAVSAFYDRGYIAEKLKGLETELALECRITLNGEERWIRNVIIRGEIEDSEYAMIFLRDEKT

SEQ ID NO: 2778 - protein, 331 aa, unidentified
  source 1..331: note = Related to JAFVDW010000052.1; note = Lachnospiraceae bacterium
MDKKAYIVRLENAMKGTYSKEYIDVCTKYASSLLDKDLPVIFDETHLYEILQLYAIKPDVYRKFHILGKRGKLRTICAPSRSLKLRQRWILDNILEKIPVSECCEGFRKDHSIYTNAKKHIGYEQMLNIDIKDFFPSIAEKTVIEIFHEIGYSRAAADELGAICCHDGCLPQGAPTSPYLANLACREMDRELLEFAQNHKLIYTRYADDMTFSGNVEMDKLIKGIVQIVYAHGFMVNTRKTRISTGNQRRLVTGIIVKKDGLAVPRNYKRKLRQEIHYCKQFGVANHLENTSSERKANFREYLYGKAYYIKMIEPKTGEQFLRELDEIQWQ

SEQ ID NO: 2779 - protein, 353 aa, unidentified
  source 1..353: note = Related to VIRA01000076.1; note = Lachnospiraceae bacterium MD335
MDEYIVNLKKELIKKEKSIEYIDRCCKYAKKLLDNGKPIIFDATHVKIILKMEGIKRNGYHYFNAGNIYKQRLIEAPSVNLKARQRWIAKNILENEPLGDWIHGYVKGKSIITNALVHAGKKRILHMDIKNFFQSITDEMVENEFAKMGYSESAAKELTSICTFSAEMVYWQEVEKLEDISSSQKYLPHGAPSSPWLSNLVFQNIDLQILDILKNKNIQYTRYADDLMFSSNSDKLVWLKDEIEKLVSKNGFAINVGKTKLFEEKDQKLIMGLNLTNGIKIQNSYKRKLRQEIYYCKKYGIENHLQKVGASNRSNFVAYIYGKVYFVKMVEPELGKELLENLDQIFQEEPLFY

SEQ ID NO: 2780 - protein, 351 aa, unidentified
  source 1..351: note = Related to DNJW01000315.1; note = Lachnospiraceae bacterium
MNEYIIRLEEELRKNNKEEAFITACCTYARKLLEKNKPVLFDADHVDKVLRMEGIKRDGYHTFNAGTRKKARIIEAPSVSIKKRQRWIVKNILEGEELGGWIHGYVKGRSIVSNAKVHAGKKRILRLDIKNFFPSITKGMVEKIFSAMGYSPSAAGELAAICTFSSDMLYQVKGRTEEEEASEEYRYLPHGAPSSPYLANLIFQNTDLEILESLQGREIRYSRYADDMFFSSDTEELQQLDEEIEGILSKHGFRLNKNKTKLMAEKDQKLVMGLNITNGIRVQNSYKRKLRQEIYYCNKYGIQDHLERTGNKGKSNFMGYLYGKAYFVNMVEPAEGKRLLEELDRLFADEQ

SEQ ID NO: 2781 - protein, 331 aa, Cellulosilyticum lentocellum
  source 1..331: note = Related to NC_015275.1
MYNYEYTIRLCETLKSLSADDVYISKCCNYAEGLLDKELPVIFDPTHLKQILRLDDISLDEYHIFYIDKKNGGSREINAPSEELKKRQRWILKNILEKISISHNVHGFIKGKSIVSNARKHLNKEYVLNIDIKDFFPSVTKYSVEKIFRRMGYCNSVAQLLARVCCYRGGLPQGAPTSPYLANLAFDEVDQEIINVVRNRDITYTRYADDMTFSANYDLSTFKKEVYKSLGKYRFSPNIMKTHQMSGEKRKLVTGLIVDDKVKVCKKYKRKLRQEIYYCKKFGVTNHLRNCHSEKSINYKEYLYGKAYFIKMVEEIVGEKFLADLDSIDWY

SEQ ID NO: 2782 - protein, 328 aa, Coprococcus sp.
  source 1..328: note = Related to QULM01000001.1
MENNYIYRLKINMFEQGFSTSYIDKCCSYATLLISQSLPVIFDKNHLDQILMLDTLKLDCYHEFEIYTKGKSRIILAPSKPLKSRQRWILDEILNKLPTNQCCHGFVQQHSIKTNAEMHVNKAQVLCMDIHNFFPSINIDQVFEVFHRVGYTSDVAQALAQLCTHNGILPQGAPSSPDLANIIFNPIDQQILNSISTKDITYTRYADDLIFSSSHEIDFLIPLISEIISTNGFKINNDKTHLMKNPYRKMITGLIVTDTVKVPKYYKRKFNQELFYCEKYGVASHLKNCRTHKKVNFKEYMYGKAYYIKMIEPDLGEEYLRRLDAIRW

SEQ ID NO: 2783 - protein, 393 aa, unidentified
  source 1..393: note = Related to AP018794.1; note = Lachnospiraceae bacterium KM106-2
MLKANELIILSYINKFQRIDLYEIQKTINEPLVQLMDSIYRLYENKYIVNDGIDKFSVTEKAKEENIGSWNIWTLKYKEKNINNNVFKYNKKYTGEFCDNGVPKISSVHQINDILELNHIDIESYHGFVLSYGGKNRMILAPGLNLKERQKWILHNILEKIPVEDCAHGFVKGRSIKTNAEVHVNKKEIVCLDIKDFFPSIKRVQVENVFLELNYSEEVAKKISSLVTYNDELPQGAPTSPYLSNLVFRNVDMGLKKLAKENDLEYTRYADDITFSANHSIDNIIKEAEEIIERAGFIVNEDKTHIMKDNYRKMVTGLVVNHKVRIPSAYKKKFRQEIYYCKKYGVSQHLRAIGRENAVNFQEYMYGKAYYIKMIEKELGEKLLLQLDSIFGV

SEQ ID NO: 2784 - protein, 374 aa, Clostridium saccharobutylicum
  source 1..374: note = Related to CP016086.1
MRKEVQKALEDYISYFGIQKAKEQLKSYKKHSEKYNKKGYVFFDENHFDKIVESNTQIGVYQVDYYYDVYKIPKKRGGYREIASPSLELKSIQEFINENILLYGDVSDYCHGFVKERSIVTNALNHCNKELVICMDIKDFFKSIKIEDIISVFSNMGYNKEISNALGMWCSFKGALVAGSPSSPALSNLVFSKLDEIINDISIKYKFIYSRYADDMVFSTNKKNANYNQLIEEVEKCVNNFNFSINAEKTKIYPKCGKQEVTGLIVNNTVKVKSKIKKEVLTHIYYCEKFGFENHLSRYDKEYILKNSIEQIKIKRHFINYIRGKINFIKMVEPLNGGNVEKRYLEVFAEEEAKLKLEEKPIEIGFEELDDIYI

SEQ ID NO: 2785 - protein, 332 aa, Carnobacterium sp.
  source 1..332: note = Related to NZ_CP067364.1
MSNNLSKHNEKNDYEKKIKSYSQKIHENGVPLIFDSEHLRRIIGVNKKSFLEIINSIDIQYHTIYVPKKREGFREINKPSINLMIIQRWILENILYKKKVHNNSFGFEPKKSVISNAKEHLNKKTVLSVDIEDFFHSIKEDYIKKIFLDMGYTKKLSELLAKICCFNGMLPQGSPSSPYLSNIYCIELDKDIYKLCQNYDLKYSRYADDITISSNNHINSEEVITNLIKIFNKYGFEMNSSKTRVSLKGNRQIVTGILVNDKLNVSKKYRNDLRQEIYYLNKYGLENHLDKRDDIMRRSNYKEYIYGKVNYLKLFDIEKANNYYEVLNRIDW

SEQ ID NO: 2786 - protein, 329 aa, Vibrio sp.
  source 1..329: note = Related to JAJSDZ010000009.1
MEISAHPQALSKLKNLGLPAVSNLNELSSQMRLSSGLLQQLIYKSDDHYHVYYLDKKSGGKREIAQPSRAMKAVQSWILRKILYRLSSSGNSKGFEIGESILSNAKPHVGAHVLLNIDLEDFFHSVPASNVYSIFHSIGYNKNISYILTSLCTFNGRLPQGAPTSPKLSNLACQRLDSRIQGYSGPKGIMYTRYADDITLSARNEAKIRKAQPMIEEIIQDEGFIINHKKTKICGTRKRKEVTGLVISPNSVGIGRSEYRRIRAEVYSMLTSDNSKLPTINGRIAHIKSVDKNNYEKITKYILSLKKKHPENDLFNLIVCIKGHISQGV

SEQ ID NO: 2787 - protein, 327 aa, Vibrio parahaemolyticus
  source 1..327: note = Related to MIQX01000067.1
MTTLQDSKNLSRLKNLGLPPVTNLDELSSQMRLSTGLVQQLVYKSDDHYKVYHLDKKTGGKREIAQPSRAMKAAQSWILRNVLSRLNSSQNSKGFEIGESILSNAAPHVGAHVLLNIDLEDFFHSVPASHVYSIFHSIGYNKSISHIFTCLCTFNGRLPQGAPTSPKLSNLACQRLDSRIQGYSGPKGIMYTRYADDITLSAFNEAKIRKAQPMIEEILQDEGFILNPRKTKICGTRKRKEVTGLVISTDSVGIGRKKYRQMRAEIYTMLKSDTSKLAQVNGWLAYIKSVDESNFNRLIKYIIALKNTFPNNDIFDSIPFIKATSPK

SEQ ID NO: 2788 - protein, 332 aa, Providencia rettgeri
  source 1..332: note = Related to CP076406.1
MTQYSNINNLSRLKNLGLPPIGDLNELSNQMRLSSGLIQKLAYLSDEHYKVYYLKKKSGGQREIAQPSRAMKAVQSWILRKILYRLSSSQNAKGFEIGESILSNATPHIGAHVLLNIDLEDFFNTIPASHVYSIFHSIGYNKTISNIFTRLCTFKGYLPQGAPTSPKLSNLACQRLDSRIQGYSGPKGIMYTRYADDITLSAFNETKIRKAKPIIEEILKDEGFFINDSKTKICGTRKRKEVTGLVISIDGVGIGRRKYRQIRAMIYTMLKSDGSKIEQVNGWLAYIKSVDEKNYFRLVKYILTLEKNFPENKIFESISSIREKRVDKGNYL

SEQ ID NO: 2789 - protein, 324 aa, Pseudoalteromonas sp.
  source 1..324: note = Related to NZ_WTLA01000004.1
MPNHQIVTSLSRLKNLGLPPVTNLKELASQMRLSSGLLQQLVYKSDEHYKVYYLDKKSGGKREIAQPSRSMKAVQAWILRKILYRLFSSQNSKGFETGESILNNATPHIGAHVLLNIDLEDFFHSIPASHIYSIYLSIGYNKKISNILTSLCTFKGRLPQGAPTSPKLSNLVCHRLDARIQGYSGPKGIIYTRYADDITLSAFNESKIRKAHPIIRSILVDEGFTVNQSKTKICGTRKRKEVTGLIISKDSVGIGRKKYREMRSEIYTMLQTDPSKLPKINGWLSYIKSVDTTNYNRLIKYITKLKTTFPDNLLFEKILFIQKK

SEQ ID NO: 2790 - protein, 323 aa, Shewanella psychromarinicola
  source 1..323: note = Related to CP034073.1
MGSQYTNNLSQLKNLGLPAITNLAELASQMRLSVGLVQTLVFKSNEHYRVYFLDKKSGGEREIAQPSRAMKAAQSWILRKILYRLNSSQNSKGFEIGESILSNAAPHIGAHILLNIDLEDFFHSVPASHVYSIFHSIGYNKLISQKLTSLCIFKGRLPQGAPTSPKLSNLACQRLDSRIQGYAGSKGIMYTRYADDITLSAFNESKIRKAKPMIEKIVLDEGFSINHKKTKLCGTRKRKEVTGLIVSANGVGIGREEYRKMRAEIYTMLQSDPSKLAHINGWLAYIKSVDTTNYARLIKYIRTLKKIFPDSEVFNLIPAIKKN

SEQ ID NO: 2791 - protein, 324 aa, Colwellia sp.
  source 1..324: note = Related to JAESPX010000111.1
MTIPSSPTDLSRLKNLGLPPITNLKELSSEIRLSKGFLQKLNYKSDEHYLVYTLDKKSGGKREIAQPSRAMKAVQSWILRKILVRLKSSKNSKGFEIGESILSNASPHIGAHVLLNIDLEDFFHSVPASHVYSIFHSIGYNKLISHIFTNLCTFNGRLPQGAPTSPKLSNLACQHLDSRIQGYAGIKGIIYTRYADDITLSALNESKIRKAKSMIEEIVVDEGFIINKKKTKICGTRKRKEVTGLVISKDSVGIGRKKYRKMRTEIYTMLKSEPAKLPQVNGWLAFIKSVDIKNYNRLKKYILTLKKVFPENDIFELIPSIQKK

SEQ ID NO: 2792 - protein, 328 aa, Vibrio brasiliensis
  source 1..328: note = Related to JAKEUX010000001.1
MSDTNTSNNLSQLRNLGLPPVATLADLASHMRLSVGLLQLLSYKSDEHYKVYYLKKKSGGRRQIAQPSRAMKAVQSWILRKILSRLSSSANSKGFEQGESILSNALPHAGAHVILNIDLENFFNTVPASHVHSVFRSIGYNKTISQILTNLTTYNGRLPQGAPTSPKLSNLTCQQLDARIQGYAGPRGIIYTRYADDITLSAFNESKIRKAQPMIEEIVNSEGFTINDKKTKISGTRKRKEVTGLVISIDGVGIGRQEYRRMRAEIYNMLTEDSDKLSQINGWLSYIKSVDKTNYHRLIRYILKLRGHIKNEAVFSEIACLNKYTNQS

SEQ ID NO: 2793 - protein, 323 aa, Enterobacter kobei
  source 1..323: note = Related to FKGF01000007.1
MTTLSKNYPLRNFGLPVISSLEDFASSTRLSVSFIKYYLFQTDSHYKVFSIPKKKGGERIIAQPSRNLKAIQSWILRNILDRLSSSENSKGFEKGDSILNNALPHSGASYILSIDIEDFFPSISANKVHSVFRSLGYNSDVCKILTTFCTYKGRLPQGAPTSPKLANLVSQQLDARIQGYAGPKGIIYTRYADDLTLSSNTVKKLEKARDIIGLISKSEGLKINSLKTKLTGSRSRKSVTGLIVTKEGVGIGRAKYRELRSHIYNLFKDNNGDINKLTGHLSYVYSVDKRNFKRLKTYINNISKKYPNPIYFLHLSKIANVKK

SEQ ID NO: 2794 - protein, 320 aa, Acinetobacter baumannii
  source 1..320: note = Related to DADBIP010000003.1
MTGIYRLKNIGLPVIKNIDDLAHFTRLSSTKLNYLSNSSKFLYKVYALPKKGSGIRIIAQPSRELKAVQAWILRNILDRLSSSDCSKGFEIGSSILDNAKPHIGSNYILNIDLKNFFPSISANKVYSVFSSLGYEKKVCILLTNFCVYNGFLPQGAPTSPKLANLICSKLDSRIQGYTGPRGLTYTRYADDITISANTIKKIINARDFLETIINSENLSVNKNKTQISGVRKAKKVTGLIVNQANVGIGRGRYREIRAEIHYVYLNKKTNLHRINGHLAFVYSVDKKMYNKLVAYLNKLIEKNPHCLLKDLNIFKNLIKK

SEQ ID NO: 2795 - protein, 339 aa, Herminiimonas arsenicoxydans
  source 1..339: note = Related to CU207211.1
MQLDNRKFQLKIFNLPVIETIDDLAECTRLSPPLIKYLTYRADHLYKVFHIPKKIGEFREIAHPCRELKAIQGWILRHILDKLSPSENSKGFELGSSTLENASPHIGSNFLLNIDLKDFFPTIVASKVYGVFHSIGYNKKIAGALTSLCVFKGRLPQGAPTSPKLANLVCLKLDARIQGYAGPRGIVFTRYADDISLSAQTLKKIQNAKNLIHTIVASEGLEINNRKTSISGTRKRKKITGLVITENSVGIGRDLTRQIRAKIHHLFIEKSTNFSHVNGLLAYTYSVDKKSYRKLDSFIEKLKLKYPLCPATTELYKIKNSTITQFTKVCYRTSRIKKL

SEQ ID NO: 2796 - protein, 320 aa, Idiomarina sp.
  source 1..320: note = Related to SNWT01000002.1
MPQDSHIYRLRNLGLPVMKSSEDFANYTKLSASRIRLLHLRADKFYKVYRLPKKSGGTRLIAQPSRELKALQGWILRNILDKLRASDQSKGFEIGSSILDNAAPHTGANFILNIDLEDFFPSIKANRIFSIFRSIGYNKELCVLLTNLCTYSGRLPQGAPTSPKLANLTCAQLDARIQGYAGPKGIIYTRYADDITLSAQTATKIYKARYFLDYLIADEGFTINRQKTRVYGTMSRKCVTGLVVSESAVGIGREKYREIRAQIHHLFSGKADSYRYLNGLLAFCFSVDTKSYRRAYKYMRKLQEKYPNSNAMNSIIPEKE

SEQ ID NO: 2797 - protein, 323 aa, Aeromonas veronii
  source 1..323: note = Related to NZ_CP047155.1
MMTTQNIYRLRNLGLPAMKSLEDFASFSRLSPSKIRHLSRSSEFLYKTYKVPKTNGSYRLIAQPSRDLKAVQAWILRNILDELSCSSYSKGFESGMSILDNAKPHIGSQYVLSVDLQDFFPSVSANKVYGVFSSVGYNKEMCVLLTNLCVFKGGLPQGAPTSPKLANLVCSKLDSRIQGYAGPKGITYTRYADDITLSSNSALKIQKAKSFLGTIISDEGFKINKPKTTLSGVKKQKKITGLVLSDNNVGIGSLKYREIRAEIHYLFAGKSNNYRRVNGLLSFVYSVDKKMYTRLHAYISSLKKKFPQSPAASSLNKEIVISR

SEQ ID NO: 2798 - protein, 324 aa, Colwellia sp.
  source 1..324: note = Related to JAHKPR010000010.1
MTINNIYRLKNIGLPVMQSIEDLAKHARLSIEKIRYLSVRAEFIYLTYELPKTNGKTREIAQPSRELKAIQSWILRNILDKLSPSIYSKGFEKGTSILDNAFPHIGSTFVLTIDLENFFPTVKASKVFTLFKSVGYNKEMCVLLTNLCVYKGGLPQGAPTSPKLSNLICDKLDSRINGYAGPKGIVYTRYADDITLSANNIQKLQKAKDFIGTIISDENFKINKSKTKLCGTKRQKMITGLVLSESSAGIGRVKLREIRAKIHHAFVGKHNEFDHINGLLSFTYSVDKSSYKKLYRFIDKMNKDYPDSLAVLELHKNLLKKQLQ

SEQ ID NO: 2799 - protein, 319 aa, Vibrio parahaemolyticus
  source 1..319: note = Related to CP006004.1
MTSNSIYHLKNLGLPALTSLDEFAHAMKLGSNTVRSLSISSNSLYKTYKEPKKSGGFREIAQPCRELKAVQSWILRNILDKLNCSPYSKGFEKGKSILDNAQPHAGASYLLSMDLENFFPSIGSYKVYGVFSSIGYNKEMCKLLTNLCTYYDSLPQGAPSSPKLANLTCSRLDARIHGYAGPKGITYTRYADDITLSANTAVKIEKAKAFIGTIVHDEGLKVNKTKTKICGTKRQKKVTGLVLSGNSVGIGQKKYRELRSALHRIFVGRSTEYSFVNGWLSFTYSVDKKAYNQLYLVIDSLSKKYPQSDALEHLYAKKG

SEQ ID NO: 2800 - protein, 319 aa, Vibrio aphrogenes
  source 1..319: note = Related to NZ_AP018689.1
MTSKNIYSLKNIGLPAMASIDDFANEARLSPGKIRYLSATAESHYRIYPIPKVGGKSRLISQPSRELKAVQAWILRNILDKLSSSPCSKGFEIGTSILDNARPHIGSNYVLTIDLEDFFPNVSASKVFGVFSSIGYNKELSILLTNLCTYSGGLPQGAPTSPKLANLVCAKLDARIQGYTGPRGIVYTRYADDMTFSAHTASKIRKVKHFIGTIISDEGFKINHKKTAICGTKRQKKVTGLILSESSVGIGRVKHREIRAKLHHLFTGKSAEFSHVNGLLSYTYSVDRRSYNKLYSYIAGLSKKYPNSNAIIEISPKIV

SEQ ID NO: 2801 - protein, 319 aa, Proteus sp.
  source 1..319: note = Related to NZ_CP034105.1
MTSKNIYSLKNLGLPAMVSVDDFANESRLSSAKIRYLSATADLHYKVFSIPKVTGKSRLISQPSRDLKAIQAWILRNILDKLSSSSCAKGFERGSSILDNARPHIGSNYILTIDLENFFPSIAASKIYGVFSSIGYNKQLSVLLTNLCTYKGGLPQGAPTSPKLANLVCAKLDSRIQGYAGPKGIVYTRYADDMTFSANTALKITKTKQFIGTIISDEDFKINSQKTVISGTKKQKKVTGLILSENSLGIGRVKYREVRVKLHYLFTDKLSNFSYMNGMLAYIYSVDKKSYNKLLSYIAKLKNKYPNSIAVNFINSKNK

SEQ ID NO: 2802 - protein, 322 aa, Paraglaciecola agarilytica
  source 1..322: note = Related to NZ_BAEK01000003.1
MSSNNIYSLKNLGLPALKKIEDFAFVTRLSQGRITYLAYRTEHLYKTYDVPKKSGKKREIAQPNRELKAVQAWILRNILDKLSSSPHSKGFDLGTSILENAVPHQGANYILTLDLEDFFPSISANKVYSIFSSIGYNKEVSSLLTNLCVFKGGLPQGAPTSPKLANLVSAKLDARIHGYAGPKGIVYTRYADDLTLSAQSVQKLEKAKNFIDKIITDEDLVINRSKTKLCGTKRQKKITGLVLSQNNVGIGREKLREIRAKIHYLFIGKNIDYSHVNGFLAFTYGVDKKSYTKLYRFIEKMKAKYPSSEAVTELHNKAIKRI

SEQ ID NO: 2803 - protein, 324 aa, Nitrosomonas sp.
  source 1..324: note = Related to FOFX01000033.1
MPNKAHLYRLKNLGLPAIESIEGFADKTRISLEKIKYISYRSGHLYKVYEIPKINGKKRRIAQPNRELKAVQSWILRNILDKLSTSEHCKGFETGTSILDNAVPHVDSNYVLTVDLEDFFQSVKASSVYRIFNSIGYNKQVSSILTNICTSDGGLPQGAPTSPKLANLACAKLDSRVHGYAGQKGIVYTRYADDITLSAQTPKKIYNAKQFIGTIISDEGFAINKAKTRISGTRSQKKITGLILSENRAGIGRNKYREIRCKIHYLFVGKNKDYSHVNGLLSFTYSVDKKAYKKLYSYIKMLKNTYSDSKAGDLLVAEITKIPA

SEQ ID NO: 2804 - protein, 323 aa, Rheinheimera tangshanensis
  source 1..323: note = Related to BMLH01000001.1
MSNKSYIYRLKNLGLPAIESIDDLADACRLSLGKVKYLSYRTEYLYKVFCIPKKTGKTRTISQPNRELKALQAWVLRNILDKLSSSEHSKGFDKGASILDNASPHVGANYILTIDLEDFFSNVKASHVYKIFHSIGYNDKISAILTNICTFKGALPQGAPTSPKLANLVCAKLDSRLHGYAGPKGIVYTRYADDLTLSGQTPQKIYKASQFIGTVISDEGFSVNKAKTNICGTQKQKKVTGLVVSEHHAGIGRQKYREIRSKIHYLFEGKSNDFHQVNGLLAFTYSVDRKSYKRIYSYVNKLKLRYSGSEASKKIAAEIGIKA

SEQ ID NO: 2805 - protein, 322 aa, Halomonas sp.
  source 1..322: note = Related to NZ_VBVC01000001.1
MNEKQKKYGLKNLGLPAIETISDLANEIRLSDNKIRYLAYRAQHLYKVYSIPKKSGGSRLIAQPSRELKAVQGWILRNILDKLSASEHSKGFEKESSILDNAMPHVGANYVLTVDLQDFFPSIKANKVYSIFYSVGYNKLISSVLTSICTYDGRLLQGAPTSPKLANLICAKLDSRLSGYSGPLGIVYTRYADDITLSGQAARKIYKARDFINVIISSEGFKVNEKKTKICGTQRQKRITGLVVNENHAGIGRKRYREIRVKLHRLFVGKSDDYNHVNGFLSFVYDVDYKSYKKLFLYINNLKEKYPSSSAGLNIFPEINKS

SEQ ID NO: 2806 - protein, 324 aa, Escherichia coli
  source 1..324: note = Related to UGCT01000004.1
MTSATPSQVFRLRNLGLPVMSSLEDMSREMRLSVDILRLYIYRADKYYKVYSLPKRDGKRSRIISQPSRELKALQAWVLRNILDKLHSSPFSKGFEKGQSILNNASPHVGANYVLNIDLEDCFNTILIEKIYTVFHSLGYNSTISNALARLCSFNGSLPQGAPSSPKIANLVLTKLDYRIHGYAGSKGIVFTRYADDLTLSAQSLKKILKAKSFVCSIIPSESLKVNYNKVAIHGPKARKEVTGLVLSIDNVGVGRIRYREIRSKIHYLAVKRNSDFEHVKGLIAFVKSVDKKNYRKLMTFSNKMSETYGVDLSVLFPKNKKAI

SEQ ID NO: 2807 - protein, 321 aa, Serratia oryzae
  source 1..321: note = Related to NZ_SOZF01000025.1
MTSIIQSQVFRLRNLGLPVMSTLDDMSREMRLSVEILRMLIYNADKYYTVYSVPKKDGRRVRVISQPSRKLKSLQSWILRNILDKLYSSPFSKGFEKGQSILNNASPHIGANYILNIDLEDFFDNIPSRKIYTLFHSLGYNSLVSNALTRVCSHKGSLPQGAPSSPKIANLILTKLDYRIQGYAGGKGIVFTRYADDLTLSTQSLKKIVKAKKFLCTIIPTEDLKVNYRKVVINGPRAKKSVTGLILSIDNVGIGREKYREIKSKIHHLAVGRTSDYEHIQGLVSFVKSVDKTNYRRLLAFSKKMSSIYKLNINQLFPSKK

SEQ ID NO: 2808 - protein, 321 aa, Pectobacterium sp.
  source 1..321: note = Related to NWTM01000001.1
MNNFSSTDVFRLRNFGLPVMSSLTDMSREMRLSVELLTLLITRADDFYKVYSVPKTGTEKGERVICQPSRRLKALQAWVLRNILDKLNSSPFSTGFERGQSIKDNANPHVGSNFVLNIDLEDFFPSISSNKIYTVFNSLGYNKYISSVLTKICCFKNKLPQGSPASPKLANLVCMRLDHRIHGYAGIRGIIFTRYADDITLSAQSLKKIEKAKDFLFSIIPTEQLIVNYNKVIISGPRKQKKITGLVLSIDDVGIGRQKFREIKSKIHYLSVGRSENYAHVGGLLAFTKSVDEKNYRRLIVFAQKLNKKFNLDLDKLFKHG

SEQ ID NO: 2809 - protein, 319 aa, Serratia liquefaciens
  source 1..319: note = Related to NZ_CP033893.1
MKSTEHLNTFRLRHLGLPVMNDLHDMSKATRISVETLRLLIYRADFRYKIYSIKKKNSHSIRTIYQPSRELKALQGWVLRNILDKLSSSPFSIGFEKNQSILNNATPHIGANFILNIDLEDFFPSLSAKKVFGVFHSLGYNRTISSSLTKICCYKNLLPQGAPSSPKLANLICSKLDYRIQGYAGSRGLIYTRYADDLTLSAQSMKKVLKAKDFLFSIIPTENLVVNTKKTCISGPRSQKKVTGLVISQEKAGIGRLKHKELRAKIHHLFSGRSKNIEHVRGWLSFVLSVDSKSYRRLFVYIGKLEKKYGWNPLSKTKT

SEQ ID NO: 2810 - protein, 320 aa, Klebsiella quasipneumoniae
  source 1..320: note = Related to NZ_CAAGXM010000002.1
MENEHYMNTFRLRNLGLPVMSDLSDMSKETRVSVEALRLLIYRADYRYHIYTLDKKGPGNKKRTIYQPSRELKALQGWVLRNILDKLSSSPFSMGFEKKQSILNNATPHVGANFILNIDLEDFFPSLTAHKVFGVFHSLGYNRAIASSLTRLCCYKNLLPQGAPSSPKLANLICSRLDYRIQGYAGRRGLIYTRYADDLTISAQSMKKVVKAKDFLFSIIPSEGLAINKEKTCISGPRGQKKVTGLVVSQDKVGVGKRKSKEIRAKIHHIFVRRSNEVEQVKGWLAYILSVDVRNHKRLVAYINKLEKKYNWNPFKKEDH

SEQ ID NO: 2811 - protein, 319 aa, Serratia ureilytica
  source 1..319: note = Related to JADTXC010000013.1
MPSATNSHVYQLRNQGLPVMSSIVDMAREVRLSVEMLRFLTYRTDYLYKTFEIEKKGTTSKRVICQPSRKLKAIQGWILRRILDNLRSSEFSKGFEKGQSILDNAVPHVGANFILNIDLKDFFPSVDASKVYGVFSSLGYNKEISSILTNLCTYKGKLPQGAPTSPKLANLTCARLDARIQGYAGSKGIIYTRYADDLTFSAQTLKKIIKTRFFIQTIIPTEKLSVNNHKTLLCGPRKQKKVTGLVISHDKTGIGRQKLREIRSKIHKIYTGEKTNTNHVYGLLSYVYSVDKRNYRKLIIYIEKLNKKYNKSEFLKIKK

SEQ ID NO: 2812 - protein, 319 aa, Yersinia frederiksenii
  source 1..319: note = Related to NZ_CGCI01000022.1
MTLVTATHSHVYQLRNQGLPVMSTISDMAREVRLSVEMLKFLTYRTDYLYKTYEIDKKGKGSPKRIISQPSRKLKAIQGWILRHILDHLSSSEFSKGFEKGQSILDNAVPHIGANFLLNIDLKDFFPSISASKVYRIFRSLGYNKEISSVLTNLCTYKGKLPQGSPTSPKLANLICSRLDARIQGYAGRRGIIYTRYADDLTLSAQTLKKIEKAKFFIKTIIPTEDLKVNNSKTLLCGPRRQKKVTGLIISHDKAGIGREKLREIRSKIHKIFTEESLEYNHVRGLLAYVSSVDKKSHRKLVMYIDKLTKKYSGVEFII

SEQ ID NO: 2813 - protein, 327 aa, Advenella mandrilli
  source 1..327: note = Related to NZ_JAENGP010000011.1
MKTESTANIYRLKNLGLPPLATIEDIANATRLSPEYIKYLAFRTNFLYKTFTIPKRSGGNRKIANPSRALKGIQGWILRNILDKLSSSEFSMGFEKGTSILDNALPHTGSTFILTIDLEDFFPSITGEKIFGVFNSIGYSRSISHILANLCLFEGRLPQGAPTSPKLANLVCSRLDSRINGYTGPKGIVYTRYADDITLSSQSLNKLYKAYNFIPFILQDEGFSLNPNKTIFSGTRKKKSVTSLIISGDTVGIGREKYREIRSKFHKEFTGITTNKEHLHGWISFINSVDRKSSIKLKNYIACLIEKYPDSEASKNFLKITEKNKTQ

SEQ ID NO: 2814 - protein, 330 aa, Aeromonas hydrophila
  source 1..330: note = Related to NZ_CP065651.1
MQKNTIYTLKNLGLPAITTLDDLSFLTRISRERIILLSTQHKRFYNTFLMPKKSGGHRQISQPSRDLKALQSWILRNILDKLSASKFSKGFEKGSSTLDNATPHIGANYILSLDLEDFFPSIKSGYVFSIFRSIGYNVPVSHTLTNLCVYNGGLPQGAPTSPKLANLVCSRLDARISGYAGKKGITYTRYADDITFSAQTAKKITKVYSMAKFIIHDEKFVINKNKTYFSGTKKNKRITGLVVTERSVGIGRVMLRSIKAKIHHLLVGRNDDLPHIIGLLSYIYGVDKKNYKHLIRYIQKLSLKYSGVPQELKDMVAKHNNLAASTLSEV

SEQ ID NO: 2815 - protein, 326 aa, Cellvibrio sp.
  source 1..326: note = Related to NZ_BBUL01000097.1
MTKKIIFKLKTPPKINDIHDLARETRLSEKLISYIAYRSNFLYRTYYVPKKSGGKRLIAQPARELKAIQSWILRNILELRPSSNQSMGLERDQSILTNALPHIGNGYLLNIDLENFFPSIKSKRVFHLFKKMGFNNNISTIFTRICTFNDGLPQGAPSSPKIANLICSKLDARIQGYVGKRGINYTRYADDLTFSAPSYEKINKLEIFIKKLISDEDLFINSNKTTFSGPRKQKKVTGLVLTNDSVGIGRGKYKAIRARIYYYFLGIEKDIASINGYLSFIYSVDQKRYSMLQHYISSLFERFPVIPSANFGQFTNIHFLPQSALG

SEQ ID NO: 2816 - protein, 328 aa, unidentified
  source 1..328: note = Related to JAESQK010000141.1; note = Crocinitomicaceae bacterium
MKDSKTAKKYRLKSLGLPIIESADDFTRLLKISSSIIQQISKQTTKDRFYKEYRIPKKSKGFRQIAQPVRKLKALQIWILRNILDKLTTSDSSKGFEKGTNIKDNVRPHVGARVIMSLDLESFFPSISSNKVFGIFYSLGYNTEASWLFTNICTYKNKLPQGSPSSPKLSNLICWKLDFRIEGYTNKRDIVFSRYADDLTFSSKSIKKIIKAKNMVKHIIEDEGFVINEDKTRIMGPSRQKKVTGLIVSGHKVGIGRKKYREMRVKIINLFTHESDDFSHVMGWMSYINSVDKSVYKRLILYIEKLSIQFSNSIAVEEFKALIKNGNL

SEQ ID NO: 2817 - protein, 319 aa, Flavobacterium sp.
  source 1..319: note = Related to SMGE01000001.1
MSNNGIIKLNMFGLPVIQTLDDFSFISHISKYTIYQLSKNSDYYYKIYFIKKKSGKHRKICQPSRKLKGLQSWILVNILEKIKVSNSCKGFEKNSSTLDNAIPHAGANTILTLDLKDFFPSITSNQIFNIFKTLGYNDLISTVFTNICTFDGCLPQGSPCSPKLANLTAWKLDSRIQGYVGKRGISYTRYADDLSFSGLNPVKVVNIIPMIKEIIEDENFLINNSKTRISSSGRAKIVTGLVITDEKIGIGKKKFNNVRSKIHHLSMPRENGNIKLLNEVQGWLSYLNSVDRERLIKTQKYIDHLNQKYPNSMIKFLVK

SEQ ID NO: 2818 - protein, 321 aa, Flavobacterium sp.
  source 1..321: note = Related to NZ_JAGFBU010000005.1
MSNNGIIKLNMLGLPVIQTLDDFSLITHVSKYTIYQLSEKSDFYYSIYSIPKKSGKPRIICQPSKKLKGFQSWILVNVLDKIKVSSSCKGFEKKSSTLDNAIPHKGANTILTLDLKDFFPNITSKQVFNIFKTLGYNDLISTIFTNVCTYKEFLPQGSPCSPKLANLTAWKLDLRIQGYVGKRGINYTRYADDLSFSGLNPANVVRILPMISNIIESENFIINHSKTRIASSARAKIVTGLVISDDNIGIGQKKYKNVRAKIHHLTKPIEKGNVKLLNEVAGWLSYLNSVDKNRLAKANKYINELYKKHTKSMIQYLIKLD

SEQ ID NO: 2819 - protein, 319 aa, Flavobacterium swingsii
  source 1..319: note = Related to NZ_FOJT01000006.1
MSKSEIIKLNMLGLPVIQTIDDFSLITHISNYTIFQLSKNSDNYYKTYDIPKKSGRPRQICQPSRKLKGFQSWILVNILDKTKVSSSCKGFEKKTSTLDNALPHKGANTILTIDLKDFFPTITSKQVFNVFKTLGYNNLISTIFTNICTYKGFLPQGSPCSPKLANLSAWMLDLRIQGYVGKRGINYTRYADDLSFSGLNPSNVVNIYPMIKTIVESEKFKINNSKTRVASSARAKIVTGLVISDEKIGIGKQKYKNVRAKIHHLTLPSEMGNVKLLNEVGGWLSYLNSVDKERLSKARKYINELHKKNPKSMIQYLVK

SEQ ID NO: 2820 - protein, 319 aa, unidentified
  source 1..319: note = Related to JABHCC010000144.1; note = Bacteroidetes bacterium
MSQTNSIKLNMLGLPVIQSIEDLSMLTHISKYTIYQLSIHADKYYKTYEIPKKSGRNRTISQPNKKLKGFQSWVLRNILDKVKVSDSCKGFEKGSSTVENALPHRGANTVLSMDLKDFFPTITIQRVFSIFKVFGYSDLISTILANITTYAGALPQGSPCSPKLANLSAWKLDLRIQGYVGKRGMNYTRYADDLTFSSLNPSNVVKIIPMIKEIIESESFFVNHSKTRIAGSSRAKIVTGLVISGENIGVGKQKYKRIRAKIHHLTLPAEQENSRLLYEVSGWLSYLNSVDKNRLLKAKEYIKELSEKHPDTLIANLNN

SEQ ID NO: 2821 - protein, 319 aa, Flavobacterium sp.
  source 1..319: note = Related to NZ_VOGZ02000014.1
MAKTEIIKLNMLGLPVIQSIDDFSVVTHISKYTIYQLSHHSDKYYKTFEIPKKSGGKRTICQPSKKLKGLQSWILVNILNKIQVSPSCKGFRKGSSTLDNALPHIGANTILNLDLKDFFPTVSSKQVYNVFKTIGYNKLIATVFTNICTYNDMLPQGSPCSPMLANLTAWNLDLRIQGYVGKRGISYTRYADDLSFSGLNPTKVVKIIPMIKTIINDENFEVNHKKTRIASSARAKIVTGLIVNEDSVGIGKQKYKDLRAKIHHLILPTEQKNEKLLYHVGGWLSYLNSVDKLRLQKAKKYISELTKKYPTTLIARLDK

SEQ ID NO: 2822 - protein, 334 aa, Flavisolibacter ginsenosidimutans
  source 1..334: note = Related to NZ_CP042433.1
MSKSDKFKLSMAGLPVMENLNDFSRLTHISNYTLFQLSKYSDKYYKHYYIPKKSGKPRLISQPCRKLKGIQSWILNNILDKLCVSNSCKGFSKGTSIIDNVDPHKHSSVVLTIDIKDFFPSIRRDKVYNIFKAIGYNKFMSTIFTNLCTCNGALPQGGPCSPKLANLSAWTLDVRIQGYVGRRGITYTRYADDLTFSTTNPQKLIKRISTITSIIEDEKLHINPSKTRIAGSARARKVTGLIITNESFGIGRQVYLKVRAKIHHLTLNREQKNFDLINEVQGWLAYLKNVDKLRYKKAADYIRSLKEKYPATLISQIILPPLILEVATVITAVE

SEQ ID NO: 2823 - protein, 319 aa, unidentified
  source 1..319: note = Related to JACRII010000139.1; note = Planctomycetes bacterium
MSKTDNIKLHMLGLPVIQMVDNFSQVTHISKYTIYQLSKHSDKYYKTYTIPKKSGKLREISQPSKKLKGLQSWILANILNKLKVSNSCKGFEKGSSIADNAEPHKDANTILTLDLEDFFPTVKRNQVYSIFKTIGYNKAISTILTNICTFQGILPQGSPCSPKLANLSASKLDARIQGYVGKRGINYTRYADDLSFSGLSPAKVVKIIPMIKSIIENENFVVNPEKTRIAGAARAKKVTGLIISNNTFGIGKQKYKDLRAKIHHLTLPSEQTNTKLLNEVIGWLSYLNSVDKKRLSKANKYITKLTDKHPTTLVAKLKR

SEQ ID NO: 2824 - protein, 329 aa, unidentified
  source 1..329: note = Related to SEFI01000651.1; note = Sphingobacteriaceae bacterium
MVESTSGLIKKGSKDNFRLNMLGLPLIQTMGDLSSLTHVSEYTLYNLSKNADFHYRIYDIPKKNKTPREISQPSKRLKGLQSWILVNILNKLRVSNHCKGFEKGSSIADNAEAHIGANTILTIDLKDFFSSIDSIRIYNIFKSIGYNSLIATALTNICTFRGVLPQGSPCSPKLANLSAWMMDVRIQGYVGQRGISYTRYADDISLSGLHPSKVVKLLPMIESIINDEKFVVNSDKTRIAGSARAKKVTGLVLSDNSYGIGAKKLKNIRAKIYHLVLPEEQKNIKLLNELKGWLSYINSVDKRRLEKLHLYIKKLLNKNPETLLAQLSI

SEQ ID NO: 2825 - protein, 322 aa, Crocinitomix catalasitica
  source 1..322: note = Related to NZ_JHXV01000023.1
MVKNENIRLNMLGLPIIQSIDDFSHITHLSKYTLYQLSEKSNFHYKKFPLKKKTGGTRTICQPSKNLKGLQSWILVNILNKLKVSDSCKGFEKGSSIGDNARPHINANCILTIDLSDFFGTVTDIQVYNVFKSIGYNKLISTMLTNICTCDGSLPQGSPCSPKLANLVTWKLDKRIQGFVGKRGITYTRYADDLSFSGLHPANTVQILPVVKSIVEDEGFIINPKKTRVAGASRAKIVTGLVISNNKFGIGKTKYRILRSKIYHLTKPKEQKNTDLLNEVNGWIAYLKSVDKSRFNKVFKYVTKLKKEHPKTLVNQITISNN

SEQ ID NO: 2826 - protein, 323 aa, unidentified
  source 1..323: note = Related to NZ_CP040710.1; note = Proposed Aggregatimonas sangjinii
MIKNENIRLNMLGLPIIQSINDFSHITHLSKYTLYQLSEKSDFHYKKFPLKKKAGGTRTICQPSKNLKGLQSWILVNILNKLKVSDSCKGFEKGSSIGDNARPHINANCILTLDLSDFFGTVSDIQVYNVFKSIGYNNLISTMMTNICTSDGSLPQGSPSSPKLANLVSWKLDKRIQGFVGKRGITYTRYADDLSFSGLHPANTVQVLPVVKSIIQDEGFRINPRKTRVSGASRAKIITGLVISNNRFGIGQTKYRILRAKIFHLTKPKEQNNIDLLNEVNGWIAYLKSVDKLRFNKVFKYVSKLKKEHPKTLINQMTIANIV

SEQ ID NO: 2827 - protein, 320 aa, Pedobacter sp.
  source 1..320: note = Related to JAJMPA010000005.1
MNKSNIIRLKMLGLPVMEKVDDFAELTRLSRSIIYQMSSFANEYYITYQRPKKTGGKRTISQPSRKLKALQAWILVNILNKLSVSPSCMGFEKGTSTYQNAKAHIGATAILTVDIQDFFPSISQRHVFNIFRAVGYNNLISIILSKICTFENKLPQGGPCSPKLANLVAWRLDNRLQGYVGKKGISYTRYADDLSFSGPMPSKVVRSLPFIKSIITSERFEVNDKKTRIAGPSRAKIVTGLVVGNDGVGIGREKYKLFRAKIHRLTKQTEQTNLKLLSEVHGWLAYLHSVDVKRLNKAKKYIANLKNKYPESLVSKINWK

SEQ ID NO: 2828 - protein, 326 aa, unidentified
  source 1..326: note = Related to WPIF01000004.1; note = Nitrospirae bacterium
MARKTLKKTDNVRLNMLGLPVIGTLDDFSALTHLSKYSIFQLSKNSGKYYKVYEIPKKSGKKREIAQPSRKLKALQSWILVHILNKLKVSPSCKGFEKGQSILENANPHVGSNAILNIDLKDFFPSVKSNYVFNIFKSLGYDHTISTILTNICTFQGKLPQGSPCSPKLANLACWQLDNRIQGYVGKRGITYTRYADDLTFSGLSPNKVIKIAKTVDKIIQNEGLLINTDKTHFAGTAKAKKVTGLVINDKSAGIGKKKYHELRAKFCNLAKPENQEKKDKLYHAIGWLSFLKSVDIVRYKRILHYIAALKTKYPNTQLDMIKTDQ

SEQ ID NO: 2829 - protein, 321 aa, Epilithonimonas zeae
  source 1..321: note = Related to NZ_FSRK01000003.1
MTSTIRLKILGLPNITDLEDFAYLINLSKNSIYQLSKNSEYYYKTYQIAKKNGKLRDISQPNKQLKGIQLWILNNILNKLKVSEYSKGFEKGQSISDNVRPHIFSNCLLNIDIKDFYPSINSIKVYNLFKSIGYNNLISTLLTNICTYKNSLPQGSPCSPKISNLICWKMDSRLQGYVGKKGIIFTRYADDITFSSIMPDKLIGVLPFVEKIIIDEGFTLNKYKTRFTGKLRRREITGLVIYDNNFGIGRKKLRIIRSKVYNFTKTTDNVNHKALHHLYGWMNYIKSVDEVRYKSLLEYIKLLYQKNPKTDIKTLYNYYNS

SEQ ID NO: 2830 - protein, 333 aa, unidentified
  source 1..333: note = Related to JAIBBL010000001.1; note = Ignavibacteria bacterium
MKRKNNFKLNLFGIPIINTLDDLSLLTHITKSTLFRLSKKSYLYYKEYTVPKKNKGVRKISQPSAKLKGIQSWILQNILEKLKVSPSCKGFEKGTSTADNTKPHVGANAILVVDIKDFYPSIKGNFVFSLFKLIGYNNLISTILTNLCVLNDSLPQGSPCSPKIANLVAWKLDIRIQSYVGKRGIIYTRYADDLTFSSINPANLIKILPIVKDIIESENFEINKNKTRFIGISRCRKITGLVLSDNNFGVGKRKYKNIRSKVFKLKDIEKIEDDKEKRKIKEMKEVYGLIAYLKSVDKERYLRILDYIRTLSVKYPNSILTNISFNTKTTIAK

SEQ ID NO: 2831 - protein, 321 aa, Nitrospina sp.
  source 1..321: note = Related to JABHDM010000238.1
MASPSQTSKLRMLGLPIFDDLESFAQVTRLSKKFLYLHSSFSDQHYKKYFIPKKSGGQREISQPSKAHKAIQGWILRNILDLLQVSQASKGFAKKQTTADNAIPHIGANAILSLDLEDFFPSITANKVYSIFHSLGYSKPISIMLTSICTCGGKLPQGSPCSPKLANLVCIRLDNRVQGYVGARGVTYTRYADDLTFSAAHPGKLMHIFNFIRRIITEEGFSLNESKTRLAGTRLRKKVTGLVVTEGAVGVGRIKYRELRSKVFNLTKTQDIFYDQKEINEIYGWLGYLKSIDSKRYEKLVSQIETLKKNHKETSLDYLLV

SEQ ID NO: 2832 - protein, 337 aa, unidentified
  source 1..337: note = Related to JACDNW010000012.1; note = Candidatus Marinimicrobia bacterium
MNTKMRLHLLGLPSISSIDELSDTTHLSKSLIFRLIKYNDKFYRVYKLPKRNGGYREIAQPSKELKALQAWINRNILDRLEVSPACKGFERDTSILDNATPHVGSNAVLILDIEDFFPSITANKVCSLFKRIGYPSQAAAILAKLCTFKGRLPQGSPASPKIANLVCLRLDLRILGYVGKRGIVYTRYADDLTFSGPSTSSLLKLLYVVKTIINDEGFEINNYKTRIIGPSRQHKITGLIVNNSFAGIGHRQMRVIRSKVHRLCKYDAYSVPQKELNHVMGWLAFVKGVDTKRSLILYRYIQGLKEKYPDSGIQKLKIDFLLNKPSKRSIASGEPDL

SEQ ID NO: 2833 - protein, 317 aa, unidentified
  source 1..317: note = Related to JAHJJL010000216.1; note = Candidatus Eisenbacteria bacterium
MSSDRIRLGLIGLPKLVSISDLSDAIRLSKGLLFRCAKYPNKQYYTYTIPKKTGGTRVISQPSAELKAVQGWILRTILDRLSVSPACKGFVPGASTRDNATPHIGAKAIMCLDIQDFFPNVKASHVYSLYRTIGYSTQVASILTSLCTFHGGLPQGAPTSPALANLTCVRFDARILGYVGKRGIVYTRYADDLTFSAYSYSSLPRALPMITKIIESEGFLVNRQKTRIRGPARRHTVTGLVVTQNNVGVGRKTYRELRAKLHRLATMPIKAVKRKEIAKVKGSMAYLNSVDKVRRDRLDDYLIHLKMNYPKSILTKM

SEQ ID NO: 2834 - protein, 323 aa, unidentified
  source 1..323: note = Related to QQUH01000007.1; note = Chloroflexi bacterium
MSSDKYRLSLFDLPKIDSLEDLSYLSRLSKGQLYRFAKYSDWFYKSYRIPKKSGGERIIYQPSFKLKAIQAWILRNILERLSISSASKGFSIGSSIKDNVKPHVGANAILAIDIENFYPSIPANRVWFVYRTAGYSPQIAAVLTSLTTYNSFLPQGAPSSPRLSNLVCWSLDKRMLAFVGKREITYTRYGDDLSFSASSYQVLSKSFHTIKSIVRNEGFSLNESKTRFMGPAKQRRVTGLILYENQFGIGRKQYRILRSKIHKMCFIPSDEIDSFLLNHIAGWLSYVKDVDTNRYNKLAKYILDLKKKFNSSAVSLLNVEISA

SEQ ID NO: 2835 - protein, 334 aa, Bacillus sp.
  source 1..334: note = Related to WBOQ01000050.1
MDNNNNIASYFLGIPTINNQKDLANHLNLSEYTLHKVIKCTDKYYKEIRIPKKNGGTRRLACPSKKLKAVQAWILRNILDHLSVNPSATAFKKRTNITSNIERHTDNQFFLCLDIDNFFESIPQKNINNFFKALGYNKHVSFILAKICTYKGFLPQGGVTSPALSNLINIKLDKRISGYCSKRNIVYSRYADDFTFSSNNPNKLIQSIKILKKIINEENYQLNNNKTRIIRPGNAKKITGLLITDEGKISIGRKQRKTLRATIYNSLNNDNLTIQEKIDIENHINGWLSFLKGIDYNSYQQLLKWKEEFEKKAQTNKIAKQLEKEEFEEMLRSF

SEQ ID NO: 2836 - protein, 329 aa, Bacillus toyonensis
  source 1..329: note = Related to JAIUXW010000030.1
MDNNNNIASYFLGIPTINNQKDLANHLNLSEYTLYKIINYSDKYYKEINIPKKNEGIRKLACPSKNLKAIQAWILRNILDPLSTNPSATAFKKETNITSNVERHLDNQFFLCLDINNFFGSIPQKNINNFFKTLGYNKHVSLMLTKICTYKGFLPQGGVTSPALSNLINIKLDKRISGYCSKRNIVYSRYADDFTFSSNNPNKLIQSIKTIQKIINDENYELNNKKTRIIRPGNSKKITGLIITDNKKISIGRKQKRILRATMYTLYNNDALTQKEKIEMENHINGWIAYLKGIDYNSHKQLLKWKKKFSHERDQKVMKELLKQFQMEL

SEQ ID NO: 2837 - protein, 351 aa, Bacillus cereus
  source 1..351: note = Related to NTXH01000057.1
MVSMFIDPLKNHKKRLNMDNNNNIASYFLGIPTINNQKDLANHLNLSEYSLYKVINFTDWYYKKVQIPKKDGTFRNLACPSQTLKAIQAWILRNILDPLSVSASATAFKKETTIKFNVERHSDNQFFLCLDISNFFESIPQKKVISFFKALGYNKHIALILSTLCTYEGSLPQGGVTSPALSNLINTKLDKRISGYCSKKNIVYSRYADDFTFSSNNPNKLIQARNIIKEIINDEGYQINKKKTRFIRPGNSKKITGLVISDDNKIGIGRKQKKILRAKIHQYFLKDQLTPQDKEELKNHIEGWISYLKGIDYNSFKQVQKWQREFSLKAKKEKRKKAAEKKEFQELLRSF

SEQ ID NO: 2838 - protein, 319 aa, Terribacillus saccharophilus
  source 1..319: note = Related to NZ_NPBP01000019.1
MNIAAYTLGIPKIDSLLDLSNAINLSEYTLQRILNSVDDQYYLIKIPKKDNSFREVYSPSPALKAIQKWILENILQPIAVDPSATAFQKGVTIRNNVELHIDNQFLLCMDIKDFFPSIKKNRVYQLFRSVGYDEHISLVFSRFCTYKEFLPQGAVTSPSISNIISIKLDRRLNGYCSLRNIVYSRYADDFTFSSNNTDKLRKSINILKAIIEDEGYTLNTSKTRLLIPGNKRKVTGLIISDSKSISIGRKQRRILRAKIHHSIFKMEKNTDSWRLFNKHINGWLSFLKGIDYESYISLLKYRENLKQKKKEQEDIISVF

SEQ ID NO: 2839 - protein, 323 aa, unidentified
  source 1..323: note = Related to JIBW01000002.1; note = Bacillaceae bacterium JMAK1
MNIAAYSLGIPKIENLKDFSNEINLSEYTLQRVLSSVNKQYNVGKIPKKDQSFRTIFIPSNALRAIQTWILRNILDLISIHPSAMAFRKNTTIKNNVEVHIDNQFYLCMDVQDYFPSVGKNKVYQLFHSIGFNKQMALIFSNFCTYENFLPQGAVTSPSISNLVNIKLDRRINGFCSIRNIVYTRYADDFVFSSNNSDKLKKSISTLKTIIEDEGYKLNDSKTRLLSPGNKRKITGLIVSDKNKISIGREKRRKLRARIHHSIFKLEEDKNLASWYEMHINGWLSFLKDVDQISYQHLVDYKMKLEDKKKKQDELMDELTSVF

SEQ ID NO: 2840 - protein, 312 aa, Bacillus cereus
  source 1..312: note = Related to NVKL01000039.1
MNITAYSLGLPRVDNIEELSYKINLSEHTLHKVLKTVDLQYKTIHIPKKSGFTRTVHSPSMVLKAIQAWILRNILDPILVDPAATAFVKNTNIKDNVKRHNGNRFFLCMDIEDFFHSIGQNKVYQFFKGLGYNSHMSLVFSKFCTYDDYLPQGAVTSPSLSNLINIKLDRRIFGYCSSKNIVYSRYADDFTFSCNNPHKLIKAKYMLEKIIEDEGYELNENKTRILRPGNARKITGLIVAEDGKIGIGRKKKRLIRANIYNLYNKDLPDDEYKKLENHIQGWFNYLYSVDQVAYHQLKNYQSEVKLNSIFAF

SEQ ID NO: 2841 - protein, 324 aa, Bacillus subtilis
  source 1..324: note = Related to PYWO01000004.1
MNIATYSLGIPKIENIEELSHKINLSEYTLHKILKSTDQHYKIIKIPKKNGEFRELSCPSFILKGIQKWILKNILTPNSIDPSATAFIKTKGIKNNVNRHQGNQFFLCLDIDDFFPSIQQNKVYNLFKSIGYNPHISLVLSSLCTYRGVLPQGGVTSPTISNLVNIKLDRRISGYCSSRNIVYSRYADDFTFSSNNPHKLTKSIATIKSIIQDEGYKLNNKKTRFLKPGNKRKITGLVLSDETGEFGIGRKQKRILRAKIHTLVFKLNENDKSWKALNEHINGWLSYLKGIDFEAYSQLSTYKEDLKDKKATLSAKQRELFDLF

SEQ ID NO: 2842 - protein, 333 aa, Bacillus solimangrovi
  source 1..333: note = Related to NZ_MJEH01000025.1
MSNIASRFLNLPTINNLKDLSLLMNLSEHFLNQLSRNVDYQYKEVKIKKKDGSKRLLACPTQRLKAVQAWILRNILEKLSCDSSATAYIKGYNLKNNAQMHTGSSFFLCLDIKDFFGTIPQKHVYQLFRALGYNEHVSIILSNFCCYKGVLPQGGVTSPILSNLINIRLDRRIQGYVSKRNITYTRYADDITLSANNPDKLIKVKGFVEKIIKNEGYILNENKARFLRPGNLVKITGLVISTDGSISIGRKKKRLLRAKIHKLYFDTNLSKLEKDKLSLHINGWFSFLRSIDPDGLNQLKLYTKKLKQKKIKQKKYKISQKMNKQKEHQLSIF

SEQ ID NO: 2843 - protein, 317 aa, Ornithinibacillus sp.
  source 1..317: note = Related to NZ_JAGXBY010000001.1
MSNLFGIPNIEGINDFSNKTNISSYTLFKMSSKPDLNYKKVLIPKNLGRGTRVLACPSYKLKAIQAWILRNILDNIQSHRNATAYNGKSLDVNLKGHVGNKFLICIDIVNFFPSTKRERVYDLFKSLGYNEQSAIMLTKFCTFEGGLPQGGVTSPALSNLINKDLDDEISKYCNAKSIAYTRYADDITISSNNKNKLDEALKYIEKVIQGHGYQINRDKTRHLHPGKQRKITGLVYSNDQKVGIGRRKRRILRSKIYNYENKEKFSSESTMIYNQIIGWLSFLKSVDSESYKYLKTYWKTLRNNDLETEVAATKQDK

SEQ ID NO: 2844 - protein, 370 aa, unidentified
  source 1..370: note = Related to VGFC01000313.1; note = Armatimonadetes bacterium
MAVRRPGRKQTLTAVSRRQVAPRAALASLLVFVMCFWARAGPPPKPGGARVASDSYRLRVFGLPVIESVAELAAATHLSPALLYHLCQFPDRFYRRFSIPKKSGAGARQIRCPARPLKALQAWLLRAILDSVKVHPAATAFRKGHGLRSNVTPHRENRYFLCLDIEDFFPSIGYAKVWTVFRTLGYNAHMSHVFASICTCDGVLPQGGVTSPALSNIVCFRMDARLAGYCGKHNVAYTRYADDMTLSATSPRVLVAARRMCTRITRDEGFALNERKTRVMGPRQCRHVTGLVVSDRGTVGVGRRRERVLRAAIARGATRDTGLTDAEGRRLRHRIRGWLDYLQDVDRPRADRLKRYRTALLERWQVSDQA

SEQ ID NO: 2845 - protein, 316 aa, unidentified
  source 1..316: note = Related to QBUM01000164.1; note = ANME-1 cluster archaeon GoMg2
MSGNRYRLRMAGLPLMEDLKDLADYVHLSAGLLYRLSKYNDKFYKSFQLPKKSGGFRIISCPSKDMKAVQAWILRNILDQIHVADSATGFRTGKNILDNAKYHEGNRYFLCLDIENFFPSIQYAKVYTVFKTIGYNTHISHIFASLCTCRGKLPQGGVTSPALSNIICIRLDHRISGYVGKRNVAYTRYADDMTFSSLSPGRLVGIKRVALKIIRDEGFELNERKTRFLGPCRQRKVTGLIISDDSLGVGKKRKRILRATIHRLVTADLSEIERQKLRNHIDGWFAYMNSVDPKGFEQLKTYEERLSLACSGEDTI

SEQ ID NO: 2846 - protein, 336 aa, unidentified
  source 1..336: note = Related to MGVG01000053.1; note = Elusimicrobia bacterium RIFOXYA2_FULL_53_38
MTDKSKKSYLLQLFSLPILNNLEDLSVCTHFSKKILYRLSKFNSKHYARFSIPKKSGGNREILCPSLEMKAIQVWILRSILEKIQVSKAATAFRPKTSIAQNVDQHLGNQYVYCLDLENFFPSISYSKVYTIFNTIGYIPHVAHILASLCTCDGKLPQGAVTSPALSNIICLRLDNRLNAYVGAKNISYTRYADDICFSALSDSRLWGIRNTVKRIIESEKFVINKQKTRMQGPTGCRKITGLVFNKDSYGVGRKKKRVLRAKIFNYISTFTSMSPDVQLKTAQHIHGWISFLNSVDSQGCQQLTKFSKIVFNQAVVAKKIDPAKIPAPFLKVLSR

SEQ ID NO: 2847 - protein, 318 aa, Clostridium chromiireducens
  source 1..318: note = Related to MZGT01000125.1
MLDTTDILRIPRIKDLKDLAFQTKLSIGLLYKMVNIPDKFYIQIEIDKKNGRKRKIECPSKKMKAIQAWILRNVLDKIDVNPSAKAFRRRMNLSSNVKPHDNNNYFLCLDFKDFFCSINFGSIYNIFSVLGYDDSMCFILTRLCSYNGRLPQGGVTSPTLSNIACIKLDERLSNYLGIRDIVYTRYADDITLSAKQPDKLLKALPTVKQIIEEEGYTLNNDKTRILGPKLQRKITGLIYDGSKFGIGREKKRTLRSAIYNYVYGRDEEDERERKFQWINGWMNYLKSVDKNSYNILKNYWIQLSCKAEVAVTNENTFD

SEQ ID NO: 2848 - protein, 318 aa, unidentified
  source 1..318: note = Related to JAIPIQ010000092.1; note = Candidatus Marinimicrobia bacterium
MSEVKHRLRLLDLPFFETIEDLAALIRVDAGRLRLLSSHPEKFYRTYRISKRSGGWRKICSPSKELKAIQAWILRNVLDKLSPSQYATAYVSGKRLLDNVSPHANNRYFISMDIRNFFPSVTSFRVRAIFEALGYSMLAGSTLARLCCYFHGLPQGGVTSPALSNLVCLRLDRRLAGLAARRNIVFTRYADDITFSSNNRNALCRMLPITYKILISERFQPNEDKLRVMGPRVRCSITGLVKDASVGRFGIGRHKKCAMRAVMHNLLARHEASPDYTDEASIVGWLSFLQSVDGESYRQMTRYWKQQKDKWLCSVRPV

SEQ ID NO: 2849 - protein, 313 aa, unidentified
  source 1..313: note = Related to RPRI01000079.1; note = Desulfobacteraceae bacterium
MNNIVHRMQLIGLPFFDTVEELAALIRIEPGRLKLLSIHPERFYRTYHIRKKSGGWRKISSPSKELKAIQAWILRNILDKLSPSPFATAYLKGKKLIDNVSPHASNRYFLSVDIKDFFPTVMKDRVCLLFEALGYSNRAALALTRLCSYFSGLPQGGVTSPALSNLVCLRLDRRLAGLSSRRNIVFTRYADDMTFSTNNRNALCRLLPLVCEILRSEWFEPNENKHRFLGPRVQCRITGLVKNASEARFGIGKAKKIRMRAIIHNLLAENRPHPDYPTELSIIGWLSYLKSVDPDSHRQMMQYWEKQKSKYKH

SEQ ID NO: 2850 - protein, 316 aa, unidentified
  source 1..316: note = Related to JACQVI010000042.1; note = Ignavibacteriae bacterium
MLENIQRLRLLGLPVFDNIENLAALIRVDSKRLTILVLQSERFYRTYRIPKRSSGWRKISSPSKEIKAIQAWILRNILDKLSPSAYATGYILRKRLVDNVNPHASNRFFLSVDIRDFFPMIGSWRIRRLFEVLGYSEMAAVTLTRLCTYFGGLPQGGVTSPALSNLVCLKVDRRLGGLASHRNMVFTRYADDITFSTNNRNALCRVLTLVFEIIRNEGFEPNLEKVRLLGPRTQCRITGLVKNSSEARFGIGKKKKIRMRAVMHNLLVKGRHDSTYPDGASIEGWLSFLKGVDPGSHEQMTRYWNTLKAKYGSKTR

SEQ ID NO: 2851 - protein, 314 aa, unidentified
  source 1..314: note = Related to JAGGWH010000150.1; note = Bacteroidales bacterium
MKSNSELLRLLNLPVFSDEEELASLMHITPERIKMLSKFPHRYYKKYKIPKSNGKLREIRQPRKDLKAIQAWILRNILDKLSPTTFATAYIKNRNISDNVTPHSNNRHFVLLDLEDFFSSISIRRAAKVFLLIGYSKKAASILARLCTCDGSLPQGAVTSPSLSNLIAAKLDRRIAGYTSRRNIIYTRYADDITLSSNNPATLSLSLPRIIKIIKSEHLKPNMDKLRVLGPRKRCSITGLVKNNSEPEFGIGKKKKKQMRAVIHHFLFNLSKDDKYTNKASIIGWLNYLKSVDKESFEQMNNYWNQLIKKSNSV

SEQ ID NO: 2852 - protein, 324 aa, unidentified
  source 1..324: note = Related to JAHJUE010000035.1; note = Bacteroidetes bacterium
MSSPRVWTSLPNIIMSTTELLRLRDLPVFDNIEEFASLCHISKIDISAIQYNAYPFYRRYPMLKKNGKIRIVYQPNPTVKAIQCWILRHILDKVNPSEYSTAFRKNKSTLDNVSPHKHNRFFFRTDIVDFFPTINRSRVFFLFKNIGYDTKQAILLARLCTCSNLLPQGAVTSPSISNLVVNKMDRRLAGYANKKNIVYTRYADDLTFSSNNRSVLNNSIRLIKRIIEEEEFIVNLEKTNFIGPSKSCKITGLIKNTSEPSFGIGKKKKNRMRCVMYYHIVKKITIDPNYSSDNSIIGWLSFLNSVDKASFKYMNNYWLSLKAL

SEQ ID NO: 2853 - protein, 325 aa, unidentified
  source 1..325: note = Related to JAGROQ010000226.1; note = Proposed Cephaloticoccus sp.
MRSNRTVLRLFDLPPFSSLNEFCALAHFNTARVRVIATESKRFYKRYNIPKRSGGEREILQPTAEVKAIQAWILRNILDKLKASNSATAFTRGVSLMLNVQPHASNRYYLCMDIENFFPSVSSFQVQQVFSAIGYSPNVSYWMTKICTVGGRLPQGGVTSPSLSNLVCLKLDRRLSGYAASKGLVFTRYADDMTFSSNNPKLLRNSVATVRRIVQAEGFIINTKKTHLAGPNLRCVVTGLVKNASMPAFGIGRKRYRMVRAEIHNFVMRGGAKRYNSKESISGMISFIEGINRAQGESLRKYWYGLEQCSRAQVIIDPETDRPTQ

SEQ ID NO: 2854 - protein, 310 aa, Klebsiella michiganensis
  source 1..310: note = Related to JH603153.1
MAKYSQSLYTQRLLSLPILQSIEDLSVKTRLPSPLLSQYLNDNSRYYCHISVPKKNGGYRPIDSPNRQLKAIQRWILRHILEKLQPSVYATGFVPGIALKRNAIPHTGNQYILKLDLKDFFPSIKASYVYSVFRAAGYSKQIAYSLTSICTLNGYLPQGAPTSPCLSNLVCLRLDQRIGKYCDRHALTFTRYADDISISGNKLSIVKKAWVVIKLILSEEGYVINKKKEMLSGPRSKREITGLVVTPKLGIGQRKYNMYRNKIFHLCHKNDNESILIIQGILAYIKGVDHDRYSKLKRYYDALKTKEVTE

SEQ ID NO: 2855 - protein, 303 aa, Enterobacter sp.
  source 1..303: note = Related to CP017087.1
MAKHSQSLYTQRLLSLPILQSIEDLSVKTRLPHALLSQYLTDNSRYYCHIKVPKKTSGYRSIDSPNRQLKALQRWILRNILEKLQSSPYATGFISGISLKQNVQPHSGNQYILKLDIKDFFPSIKASYVYSIFRAAGYSKKIAFHLTSICTLNGYLPQGAPSSPCLSNLVSLRMDQRIGKYCDRHALTYTRYADDISISGNKLSVIKKAWTVVKLIICEEGYSINKKKEMLSGPRSRREITGIIATPKLGIGQNSYNSYRNKIFHLSKKGDPNSKEIILGILAFIKSVDLERHDKLLRYYKKL

SEQ ID NO: 2856 - protein, 305 aa, Pectobacterium carotovorum
  source 1..305: note = Related to NZ_CP066552.1
MVNHSQSLYTQRLLSLPILQSLEDLSVTMRLPVSLISQYVNNNTRYYYNIPLAKKNGGLRSIDSPNRQLKAIQRWILRNILENLSPSGYAKGFVPKLSLLDNALPHGGNQYVLKIDLKDFFPSIKATHVYSVFRAVGYSKNISYYLTSFCTLNGYLPQGSPCSPYLSNLVCLRLDQRVGKYSDKNALIYTRYADDITISGNKLSTIKRAWKVIRMIIEDEGFVINKNKEMLSGPRSKREVTGLITHPVVGLGTKKYNFYRNKIFHLTKKNSCESHEVINGILAFVASVDSKKYEKLKLYYDGLNI

SEQ ID NO: 2857 - protein, 312 aa, Serratia marcescens
  source 1..312: note = Related to JADTQF010000001.1
MANRYQGLFTQRLLSLPILQSIDDLAIRTRLPVSLISKYLRNNTRYYRHLVLKKKTGGLRPIDNPNVELKALQRWILKNLLINLSPSIYAKGFIKGISITENAAPHSGNQYILSIDLKDFFSTVKASHVFTVFKSVGYSKKISYALTSICTLNGVLPQGAPTSPALSNLVCLRLDQRIGKYCDNKALTYTRYADDITISGNKLAVIRKAWRIVRLIIESEGYFINKNKEILSGPQSQRKVTGLIVTPKVGIGREEYNHYRKEIFILVKKDDEYSTYKIQGILSFIKSVDIERYKKIKEYYESIVKKPTKKSE

SEQ ID NO: 2858 - protein, 306 aa, Serratia marcescens
  source 1..306: note = Related to NZ_PEHC01000003.1
MASRYQGLFTQRLLSLPILQSVNDLAIRTRLPVNLVSKYLRDNHRYYTRLPLKKKTGGFRPIDSPNTELKALQRWVLRNLLANLSPSIYAKGFIKKSSITDNAAPHAGNQYILSIDLKDFFTTVKASYVFTVFKSVGYSKKISYALTSLCTVNGALPQGAPTSPTLSNLVCLRLDQRIGKYCENKALTYTRYADDITISGNKLTVIRKAWGIIKLIIKDEGYTINKKKELLSGPQSQRKVTGLIVTPRIGIGRDKYNYYRGEIFKLVKKGDTYSIDRLNGILSFIKNVDKDKYNKLNEYYKKITTS

SEQ ID NO: 2859 - protein, 308 aa, Pectobacterium brasiliense
  source 1..308: note = Related to JACHAQ010000011.1
MPNQYQGLYTQRLLSLPILQTLDDLATKTRLPKTLLVKYIHDNERYYNSSYIKKKSKDLRTISNPNRELKAIQRWILRNVLSSLSPSPYANGFIPKKSIIDNARPHRGNQYILSIDLKNFFTTVKASYVFTVFKSVGYASKMAYYLTSICTLNGVLPQGAPTSPMLSNLVCLRMDERIGKYCENKALTYSRYADDITISGNKLAVIKKAWIIIRKIISEENFTVNKKKEMLSGPQSQRKVTGVIVTPEIGIGREKYNYFRKRIFILVKKNGDNMSNVVNGILAHVKSIDLGKYKKLNDYYEQLINKTI

SEQ ID NO: 2860 - protein, 310 aa, Yersinia enterocolitica
  source 1..310: note = Related to CTIP01000008.1
MMKNQGIYTQRLLSLPSLNDLNDLSIHTRLSHDLISKYVSNNKRYYHHFNMTKRSGGVRPIENPDEELKAIQRWILRNILDKLFPSIYAKGFVKKMSILNNAKPHLDHQYILNIDLKDFFSHVKASHVFTVFNALGYSKMMSYYLTSICTLNGYLPQGAPTSPSLSNFVCLRLDHRIGKYCENKALSYTRYADDICISGNKLTVIKDAWHMLRVIIESEGFIINSKKEKLSGPKSRREVTGLIVNPSLGIGRSKYNYYRKKIFILLMANDPKREQIISGILSYVKSVDAKRHIYLCKYYDSIKLKASTSI

SEQ ID NO: 2861 - protein, 315 aa, Vibrio cholerae
  source 1..315: note = Related to CP053744.1
MTYISNKQKTNNSGLYTQRMLALPELQSLNDFAAKIRVTPELLTKYTGNNKHHYAVHQEEKKTPGQYREISSPTSELKALQRWILRNILDKLSPSPYAKGFIKKKCLFDNAKPHEGKQYVLNLDLKDFFSSVSSKNVCTLFKSLGYPPLLSYQMTNICTLNGCLPQGAPTSPALSNLVTIRMDYRIGKYCEKYALTYTRYADDMTISGNKLSIVKKARIMINKIIREEGFYIHPKKNKLSGPSVRREVTGLVVNESLGIGREKYNFYRTKMFKLHKEQHPNFESVSSGIIAFVRSVDIVRAQKLHAYFEKLRIKN

SEQ ID NO: 2862 - protein, 309 aa, Dickeya oryzae
  source 1..309: note = Related to NZ_ML762925.1
MNTHQGKYTQQLLSLPILENVDDLSQSLRLPKEVISKFSLNNDKYYHRIEMKKKTGGIRHIESPLRELKAIQRWILRYILDKLAPSIYAKGFVRKKSIIDNAKPHEGNQYVLNLDLQDFFTNVPASHVYTLFRNIGYNNNIAFILTSFCTKSGYLPQGAPTSPALSNLVCLRLDHRVSTYCKKRALTYTRYADDLCISGNKILILQKASYLIKMIIADEGFTVNTKKEKFLGPKVRREVTGLTVTPRITISKKNYCVYRKRIYDLVRNEVQNKNEIIRGILSFVQSIDKEKGKKLSTFYQKQISLITDI

SEQ ID NO: 2863 - protein, 307 aa, Escherichia coli
  source 1..307: note = Related to JNMO01000114.1
MNTHQGKYTQQLLSLPILENMDDLAQFIRLPKEVISKFSFNNHRYYHRIEMEKKSGGIRYIESPVKELKAIQRWVLRYILDKLSPSVYAKGFVRKKSILDNAKPHEGNQYILNLDFKDFFNNVQASHVYTLFKNIGYNNNISYILTSFCTKEGYLPQGAPTSPALSNLVCLRLDHRLSTYCNKRALIYTRYADDLCISGNKILILQKSSYLIKEIIRDEGFTINTKKEKFLGPKVRREVTGLTVTPKITISKKDYCVYRKRIYDLVRNEVPNKHEIIKGILSFVRSIDKDKEKKLTAFYNKQTSIIR

SEQ ID NO: 2864 - protein, 312 aa, unidentified
  source 1..312: note = Related to nan
MNNHQGKYTQQLLSLPIIENMDDISLSSRLPVEVIAKFSFKNDRYYHRIEMKKKAGGVRLIESPIRELKAIQRWILRNILDKLSPSIYAKGFIKNRSILDNAKPHEGNQYILNLDLKDFFTNVKASHVYTLFKNIGYNNTVAFALTSFCTKGGYLPQGAPTSPAISNLVCLRLDHRISTYCKKRALTYTRYADDLCISGNKLLTIEKASYLIKEILGDEGFSINEKKEKLLGPKVRREVTGLTVTPKITISKKIYCLYRKRIYDLVRNKIPNKHEIILGIISFVQSIDKGKGKKLTAFYEKQKSLILPSLIV

SEQ ID NO: 2865 - protein, 313 aa, Providencia alcalifaciens
  source 1..313: note = Related to WLUC01000011.1
MNAYQGKYTQQLLSLPIIESVEDLSYLMRLPKETIIKFSTKNDKYYHKIEMVKKNGGIRLIESPIKELKAIQRWILRNILDKLSPSVYAKGFIKNKSILDNAKPHEGNQYILNLDLKDFFNNIKASYVYTTFKSIGYQSNIAFILTSFCTKGGYLPQGAPTSPALSNFVCLRLDYRISTYCKKRALSYTRYADDLCISGNKIHTLQKSSYLIKEILLDEGFIINIKKEKFLGPKVRREVTGLTVTPKITINKKNYNIYRKRIYDLVRNTVPNNVDIINGIISFVKSIDNDKANKLNNFYKKQLDEIKNSTIKV

SEQ ID NO: 2866 - protein, 315 aa, Laribacter hongkongensis
  source 1..315: note = Related to JAJAXF010000024.1
MVYSSKNSTSSTYRARMTGLPEIRSVKELSHLLRIPESTLHSFSKKNHTIGYVEFCIPKKPNGFRVIHAPVRTLKYIQAWILQNILYHFKSHKSATGFEKGCSILENAKPHAGQSYAINVDIKDFFNSISSDKVFNLFSTIGYEREIAWILTNLVTFKGHLPQGSPCSPKIANLICHRLDARIYGFCKTKNMQYSRYADDITISTSHRKNISQTLRFINNVIEYENFSLRNEKTNVFGRGNAKIITGLVVSNEIRVGREKYREIRAKMYKAIKEDDKYEKEYLDGYLNFLKGVDAKTHQLLITYQEKITKKLKSI

SEQ ID NO: 2867 - protein, 378 aa, Bacillus mycoides
  source 1..378: note = Related to CP035974.1
MKELGLFCSIKSYNCSFLGTIEIVPFLFRRIFTNMNSDALYNLSQQMDTKYPIITDVLRNKKHHYNQLDAKKRNGKIRKLYSPSKILKYYQKWIATEILSKTMIHECCTAYQKGISLNENLIPHQKHMYFLCVDIEDFFQSINFKRILHLFKKLTNDTQMAYSLSELCTLHKTLPQGAVTSPVLSNAVNYRLDKRIHGYAKKHGLVYTRYADDITISGNDMGAIKSAYYTVKCIIESEGYKFNKEKTRILKPGVKRKVTGLLINEEQEIRIGREKYRELRSMIYTYKNSRAITGVEKEHLFLRIKGWISYLKHVDFKTCKMLLEYINKIYVNDEKNPFSFLDKRSDEMGYIIPQLQQLESNMNFLTSENTHVNLVIKN

SEQ ID NO: 2868 - protein, 344 aa, Bacillus mycoides
  source 1..344: note = Related to CP036026.1
MNSDALYNLSQQMDTKYPIITDVLRNKKHHYNQLDAKKRNGKIRKLYSPSKILKYYQKWIATEILSKTMIHECCTAYQKGISLNENLIPHQKHMYFLCVDIEDFFQSINFKRILHLFKKLTNDTQMAYSLSELCTLHKTLPQGAVTSPVLSNAVNYRLDKRIHGYAKKHGLVYTRYADDITISGNDMGAIKSAYYTVKCIIESEGYKFNKEKTRILKPGVKRKVTGLLINEEQEIRIGREKYRELRSMIYTYKNSRAITGVEKEHLFLRIKGWISYLKHVDFKTCKMLLEYINKIYVNDEKNPFSFLDKRSDEMGYIIPQLQQLESNMNFLTSENTHVNLVIKN

SEQ ID NO: 2869 - protein, 313 aa, Planococcus chinensis
  source 1..313: note = Related to NZ_JABWTK010000005.1
MGELVFTKVTKDLKTKYPILKDVINFKEKHYQTISIRMKNGKLRTIHNPSKALRYYQRAIVEKFLNEVPIHICCTSYQKGKSLKANVLPHANNMYFLHVDIANFFDHIKFSQVHKLFTDLIEDKYEAKFYAELCTLKGTLPQGAITSPSISNAVNFRMDSRIFGYSKKHNIVYTRYADDITLSSNDFASIQRSLYVVKQILQDEGYQLNTRKVRITKPGIQRKVTGLLINEDQEVRVGRKKYRELRSMIYNYKNNTSVTRKENRALFRKIVGWLSYLNVVDEKTYSLMVMYIKKLYGNTKNPFETMLISKEKI

SEQ ID NO: 2870 - protein, 685 aa, unidentified
  source 1..685: note = Related to JAGGZR010000020.1; note = Candidatus Bathyarchaeota archaeon
MGKHNKGKVIKKYYNPLTPLEVFFNELNSFLRVYGLKFSYEDYCNFIKNKNEYYTTFTIKKKNGGLRRIDSPNRLLKHIHRYILFKHLYNFKAHPSATGFIRGRSIFDNANYHVNKNHVYKLDLVDFFPSITKDMVFNVFISKGYNSEISTVMSELCTLNNVLPQGAPTSPAISNLVCYRLDTRLSSLAKKCKLSYTRYADDITFSGWYIKKGVTKLIEKIITDEGFKVSKEKTKLIKNKKNFRQVVTGVVVNKKLSMGEKRYLMLRAMIHNCKVKGIYQVQMETKEKHGKGYFARRDLYSAKVDMFNYLLGIVELFRQMKDYKRYLTMLRDLYYLDWVRYYVEAGELNANELGIMRKKIIERRIKKFVRSELKDIKSRSDSLNNKLKRYNSRLERLKEYIRQNTYSEKERLIDEFLRLQERIDTLTQETNNMSRFLSFVSDFISKNWGRSLMKLLNSVTEEVEETMSTKYTVQNNFIKLGNEFLEKNINVNLSVNYNNINVEGSLSKHISPDKPFSNISYFWGLIRSNRGYIKWLDKYFNKSGFRLLTDEIGDDPKYKSISILMSIYPFVGGENKESAIRKVERFIDIFKRFKEEMRNKGISVELRILDKDSSAEIHDRVIIFEENAYTVPSIDTLMRGQHSYIFPINPIDFPFDEYWNRSFDILSDRNKINELIDKYVNNKKK

SEQ ID NO: 2871 - protein, 592 aa, unidentified
  source 1..592: note = Related to JACJVW010000001.1; note = Candidatus Woesearchaeota archaeon
MVKKFINRNSESKFLDDLRRHIDFELTQEDLDIFFQDKYNKKNKLHYSSYSISKHSGKKRRINAPSRELKKVQEYILYKHLYYFPVHKNTYGFIKNKSYVDNAKQHIRKPHVFKTDVEDFFPNIRHERIFSFLVNGFSSKDYDSVFDSNPQLEIRKQRRGYSEKIATLITELVTLDGSLPQGAPTSPALSNLICFPLDYRLSRFAKKGRLTYTRYADDITFSGKYIRKDFISKIKTIIVDECFKINEDKSKFISRKRARIEVTGLVVNTKLSYGRERYRKIKAMLDQCKKNGISSLNKDNNDETGIKNHIDFYQHIIGKIDIFNQIKHYKKHMVLLKILFQINWADYYTKQEDLLESYNKHNHSSFTSTELGEIRKKSIEKLTHKAVLKQEREDKKRDTRRAAYYAKKNKSILEDIKTKLSQQDQLISVYSETLSKEYEDKYNLIEKIQADRLKIQELEKNLEDANKKAKQAEKFNTDLTKILDRVDKNSKTLERLEKQGQKTQDIVTSIDKKIDSIADRLGKNMVSLFDAIKESKEAITKEIKANHISLEKGIEEIHKATQMLVEIQKDKDPDLWERCREKVQKRLSWWKV

SEQ ID NO: 2872 - protein, 541 aa, Methanosarcina sp.
  source 1..541: note = Related to NZ_CP009524.1
MEQLSPICGRVKVLNEADYNNEFQYFKQLKSKKLPYIYDIDHFCKLIHLSSNQVKFFLSHKEKAYVTFRVPKKNGDFREINAPSKKMKYIQRWILDEILYKLNPGEYAHGFIPGKTVYTNAESHVNKDLVLGIDIKDFFPSIKFVSVYNVFKSAGYTEKVARQLADLCTYHWKLPQGAPTSPMLANLVALDLDKKISQYCKRANFGYSRYADDITISGSYDLAIHKETIVRIINGAGFEVNNQKVRMVSKGSRQKVTGLVVNHKVSIGRTKKKTIRAIVHNILMNGPVLENRCNDPFFRERIFGHLGCASAIDPEFALPLIDSLKKIDWSEYCEHIKEVKESEINKNRIKRINKVLIVKFDELGFFRKIGEVPRDAFTEEFKIKLGTLQEMCSKEIHGVVACSNCLNVKNEIYKSCMKYILGQYTGTTGGHHHGHEIYDMKAVTDYNGENIVVAFLMKSGTNSPTKENSVFTQAFDCAGYNENIDLISLVSNHNLSNKLCERLEIMIRDKNRGKEKEQLYCLIMKSEMERILYDFNKNKDC

SEQ ID NO: 2873 - protein, 560 aa, Methanosarcina lacustris
  source 1..560: note = Related to NZ_CP009515.1
MTEKLTKNERLKVLFDDRIEEGVVPKLSEEDYNKEFKYFTQLKSKKLPYIYDIDHFCKLTNSSSKQVKFFLSNKEKAYATFKVPKKSGDFREINAPSKKMKIIQRWILDKILYKLNPGNYAHGFIPGKTIYTNAKAHVNKDLVLGIDIKDFFPSIKFVAVYDVFKFAGYTARVARQLAELCTYHWKLPQGAPTSPMLANLVALNLDKKISQYCIRENFEYSRYADDITISGSYNLAMHKEIIIKIINENGFEVNYKKVRMVSKGSRQKVTGLVVNDKVGMGRTKKKTLRAIVHNILMNGPVFENRDNDPFFRERIFGYLGCANAIDPEFTSPLIDSLKKIDWSEYEECIKEIKESEINVNHIKRINKVLLVKFDELGFFRKIAELPEGAFSEEFKTKLESLQEKCDVKIHGVEACSDCLDVKKVIYNKCMKYVLGHYTGTTGGHHHGHEIYDMKALTDYNGENITVAFLMKSANKPAKENNSNKENSLVVQTLDCTDYNDSINLISIVSNNNLSNKSCERLEKIIKGMSKGKEKEQLYCFIMKKEMKRILYDFYKNYQSS

SEQ ID NO: 2874 - protein, 564 aa, unidentified
  source 1..564: note = Related to DUKH01000154.1; note = Methanosarcinaceae archaeon
MTKRLTKNERLSILFDDCIEEGIVPVLNEAEYKEQFKYFKKLKSKKLPYIYDIEHFCKLSNSSSDQVRFFLSNKEKAYTTFKVPKKSGGFREINAPSKKMKNIQRWILDNILYKLNYGDYAHGFVPGKTIYTNAEVHVNKDLVLGIDIKDFFPSIKFGAVYNIFKSAGYSVRVARQLADLCTYHWKLPQGAPTSPMLANLVALNLDQKISQYCIRRNFGYSRYADDITISGSYKLPMHKEKIIKIINENGFEVNNKKVRMLSKGSRQKVTGLVVNDKVSIGRTKKKTLRAIVHNILMNGPVVENRNEDPFFRERIFGHLGYAKAIDPGFSTPLIESLKEIDWSEYNEHIKEIKENGINTNQLKRVYKTILVKFDELGFFTKIAELPEGAFTEEFKIQLNSLKEKCDAKTHGVEACSDCLDIKDEIYNKCMKYIIGHYTGTTGGHHHGHEIYDMKATTELYDDTIAVAFVMKSGDISNKKERRKGTDSENSAFRQFFKCTCYEDLDLISIVTNFNLNNELCEELKIMMRNNNKAKERDQFYCLIMRNEMKRILYDFNTKKAENLT

SEQ ID NO: 2875 - protein, 550 aa, unidentified
  source 1..550: note = Related to CAJPFJ010000036.1; note = Methanosarcinales archaeon
MEISNNEKLKILFDSYIETAIIPSLNEDEYRKEFKSFKRLKSKKLPYVYDIDHLSNLTNSSSKQVRFFLSNKDIGYTTFRIPKKMGGFREINASSKKLKIIQKWILNNILYKLDSSDYVYGFIPGKTIYSNAQIHVNHDLVLGIDIKDFFPSIKFGSIYHIFKSAGYSNKIAWTFADLCTYHWKLPQGAPTSPMLSNLAGKRLDMRIAKYCNRRHFTYSRYADDITISGSYKLPMHKEKIIKIIEGNGFTVNKKKTRLFSKGSRQKVTGLVVNDKVSIGRKKKKWIRAIVHNILMNGFVAENKENDPFFRERIFGHLGYTNMVDSEFARPLIESLKKIDLSEYNEAIIETRESEIKVNYLKRKSKSILIKFDDLGFFQKIAEFPEGAFNDDFKNQINNLLEKCEKHGVEACSDCLDIKNEIYKKCMKYIIGHYTGTTGGHHHGHEIYDMEAETRLFGKTIAVAFIMKSGTSDSTKENSIFRQVAKSFRFDGIDLIGIVTTSNLKSELLEDLKSLIMNHNNGKKKEQLYCLIMRPEMKRILYDFNKVVTNS

SEQ ID NO: 2876 - protein, 563 aa, Methanosarcina acetivorans
  source 1..563: note = Related to AE010299.1
MVSVENKLTEDEKLQILFKNYTEEGIIPNLTEEEYEEQFKSFKRLKSKNLPYIYDINHFCKLTNSSLKQVNLFLSNKKKGYITFKLPKKNGDFREINAPSKKMKYIQRWILDNILYKLNSGDYAHGFIPGKTIFTNAKVHVNQDLVLGVDIKDFFPSINFRSVYYVFKSAGYTKKIAWTLADLCTYHWKLPQGAPTSPMLANLVALKLDKKIAKYCARRNFRYSRYADDVTISGSYKLPMHKEKIIGIIEDDGFVVNHEKTRMFSKGSRQKVTGLVVNDKVSIGRNKKKNLKAIVNNIQTNGPVAENRSNDPFFRERIFGHLGCANAVDPEFATPLIESLKKIDWSEYNEHIKEIKESEINTNQLKRVSKTILVKFDELGFFTKIVELPEGAFTEEFKKQLNNLKEKCSTKIHGVEACSDCLDVKNEIYKKCMKYIIGHYTGTTGGHHHGHEIYDMKATTEFYGDTIAVAFVMKSSDISDKNERRKNTDSENSTFRQFFKCTCYEDLDLISIVTNFNLNNELCEELKIMMRNNNKAKEKDQFYCLIMRDEMKRILYDFNKNCG

SEQ ID NO: 2877 - protein, 502 aa, Methanosarcina sp.
  source 1..502: note = Related to JJOZ01000022.1
MSNKEKAYSTFKIPKKNGGLREINAPSKKMKNIQRWILNNILYKLNAGNLAHGFIPDRSILTNASIHVGQDLVLGIDIKDYFPSISFRSVYYIFKSAGYTKKIAWSLSDLCTYHWKLPQGAPTSPMLANLSTVDLDYEIDNYCTRRNFRYSRYADDITISGSYKLPMHKQKIIEIIERNGFVINEEKTRVLSRGSQQKVTGLVVNDKVSIGRRKKKILRAIVHNIQKNGAETENREKDPFFKEKICGELAFAKMVDPDFANPLIEKLKGFNWLSYDENLKNSRDSELIVRSLEKKHYFHPVDANNIIESESDFLKAIATTITELKHYIEDRRWTEPFWDEAREVEMDGKKYKIPAVPKKESKIQPTIHIFFCRNLLPFGIHVLRETDEGIGKLDFKFLVTIKGNIPVNVCAEFKLAHNEELEHGLTKQLPLYLKASPSKSGLFLVMWFKDEKEEYFKRPTNQNKTQMLKYLEETIKKINECGKFKIESVLIDASKRPSASHS

SEQ ID NO: 2878 - protein, 572 aa, Methanosarcina sp.
  source 1..572: note = Related to NZ_CP009524.1
MANRLTKNERMKVLFDNYFEEGIISPLRDVEYNDNFKSFKKLKSQKLPYVYDVNHFCFLSNSSSKQVNYLLLKKEKAYVTFNLPKKAGGFREINAPSKSMKHIQRWILDHILYKMSLGDYVHGFVPKRSILTNASIHVSQNLVLGIDIKDFFPSIDFNSVFRIFTSVGYTQKAAHFLAALCTYKSKLPQGAPTSPMLANLAIASLDIIIDKYCRRRNFKYSRYADDITISGSHNLPMHKQKIIEIIEGNGFTVNEEKTRLHSRGSRQKVTGLVVNDKVSIGRSRKKTLRAIVHNILKNGYEIENREKDPFFKEKIFGELAFARMVEPDFANPLIEKLKCANWASYDEQTIDSRESELLMRSLEKKSYHKPVDATQIIESESDFLKAISSTIAELKHYIEDRRWIEPFWDDARVIEINGEKHKIPASPKKETKIQPTLHVFFNRNLLPLGVQVLRETDEGVGKLDFKFLVTLKGNIPLNVCAEFKLAHNEELEHGLTKQLPLYLKASPSKSGIFLVMWFKDDKGKYFSKPISQNKSQMLNMIEEAIKEINNKEEFKIESILIDASKKPSASNN

SEQ ID NO: 2879 - protein, 580 aa, Methanosarcina barkeri
  source 1..580: note = Related to NZ_CP009517.1
MTRKVAENIKLKILFNDYFEDGIIPTLKGKEYSDNFNSFKVLKSQTLPYIYDVHHFCFLSNFSAKQILFFLKNKEKFYVTFSIPKKSGGFREIDAPSKQMKLIQQWILNKILYKISIGDYVHGFVPKRSILTNASNHINQNLVLGIDIKDFFPSIDIKRVTEIFLCMGYTQKTASFLAELCTYEGKLPQGAPTSPMLANLAVKELDIAIDDYCKKRNFKYSRYADDITISGSQKLAMYKQKIIGIVESNGFAVNEKKTRLHSKSSRQKVTGLVVNDKLSIGRENKKKLRAIVHNILMKGPIAENRNNDPFFRERIFGYLGYANTIAPEFATPLIESIKNIDWSEYYESIKEIKENEMNINHIKKMNKTILIKFNDLGFFRMVVEFPEGVFSEAFRNQLDNLQEKCGEHGIVACSDCLDIKKEIYSKCMKYVIGQYTGTTGGHHHGHEIYDMKSKTDLYGDSITVAFLMKSSAPKKESKTKNKANKTSNRRITAVDDSLFRQFYECTRYENIDVIAIVTNSNLNNELSERLEQLIKKINKADNKEQLYCLIMRNEMKRILYDFNKKTTNETGQYDNAFNNM

SEQ ID NO: 2880 - protein, 560 aa, Methanococcoides sp.
  source 1..560: note = Related to JABKBV010000155.1
MTNKITENEKFKILFDDYFEEGVVPSLSKEEYNTNFKSFKKLKKMKLPYIYDLEHFCNLSNSSSKQIGFYLSHKDKAYSTFNLRKKTGGLREINAPAKNLKHVQRWILDHILHKIDVGTSAHGFVPGRSIVTNASIHVNQDLVLGIDIKDFFPSISANSVYYVFKRVGYAREVSRLLAEVCTHNWRLPQGAPTSPTLANLVALSLDSDIEKYCSKRNFKYSRYADDITISGSSNLPMHKQKILEIIEKNLFIVNEDKTRMFSQGSKQKVTGLVVNDKVSIGRNRKKKIRAIVHNILKNGPVRENRENHPFFKEKIFGELAFVKMVDPEFANPLIVKLKQLDWEDYNKKIEDSKEAKLRVNSLMRKSYAEPMYVNQKIESEDDFFKAITDIFEKLRWYVEDQRWTEAFWNDCNPPTPKKETKIQPTLKMFFKQELNPIGIHVERETHEGIGTLDFKFLITIKGSPLVVCAEFKLAHHKKLEHGLTTQLPLYLKASLSKSGIFLVMWFKDEKEEHFKEPTNKNKSEMLTYLEGKVKEINENEDFKIESILIDASKKPSASQS

SEQ ID NO: 2881 - protein, 659 aa, Methanococcoides sp.
  source 1..659: note = Related to NZ_JABKBV010000010.1
MDKLPNDDKLKIMFNHYFEKGIIPKLSKNEHINNFNSFKKLNANNLPYIYDRDHFCSLSNSSSKQIGYYLFKKEIAYSTFNLPKKNGSLREISAPAKPMKYVQRWILNHILYKLDVGDFSHGFVPGKSIVTNASIHVNQDLVLGIDLKDFFPNIQFNSVRYIFKSAGYSPKVASLLAEICTYHHTLPQGAPTSPTLSNLVALKLDKKIATYCAKRNFKYSRYADDITISGSSNLPKHKQIIIEIIEKNGFIVNEDKTRMFSQGSKQKVTGLVVNDKVSIDRKRKKNIRATVHNILKNGPEMENRENNPFFKEKIFGELAFVKMVDPDFANPLIDKLKQLDWINYNKKLSNPREMELMVRSLQKKSCIDPETYNQPIESEGDFLQVICDVIAEMKRGIEKPRAYKAFWNEGSTEILDGNEHKISPTPKIEKNIQNIIVLFIEDRLLHQGIQTIEESDEEIGYFGFKFLFTTQKRKALNISTGFKLAHDSQLEHGLIKQLPSYLEASSSKSGIFLVMWFKDENGTFFNKPINRSKSEMLAYLRETVKEINENEDLKIESILIDVCEKSSASKTEYKNDHDDEGGKGKNISYYLSIIKCKIQKLWKIIIGLLVLIGLLADAINGWPVIKEFMTSISTSFINYSSYIFSLNIQLSSIFAVFFK

SEQ ID NO: 2882 - protein, 568 aa, Desulfobacula sp.
  source 1..568: note = Related to JAIOTP010000268.1
MPESMILTVSQFEEFMESIKPPLSSEDIEFQRKHFEKLTYNKLPYFFNVDHLANSIGFSSPQLHLFISNKRVAYSTFKLPKKNRGFRLIDAPSKDMKIVQRWILDNILYKLNVGEYAHGFVPGKSIATNASIHVAQDLVLGIDLKDFFPSITLGRVIGLFRGIGYNEEIAHALGELCTFNWKLPQGAPTSPMISNLIAWNIDIKLSGFCKKRNLNYSRYADDITISGGKRLPKYKTLIFRKIEEEGFSINWEKVRLHDRGSSQRVTGLVVNDKVTLGRKKKKTLRAIVHNIVKNGPETENRENEPFFKEKIFGQLAFAKMIEPDFADSLLDSLKHVDWNSYDKKLTGLIEGELSVRSLEKKKYCIPVVEDQDIKSETDLLKVICDVITELRYYVEDRRWIDAFWDDSREVEVDGNKIKLPAFPKKETKIQPTLYVFFDRRLYPLGIHVSRETDEGIGKLDFKFMVTTKSHIPLLICAEFKLAHSTKLEHGITVQLPAYLKANRSTSGLFLVMWFKDEEEKFFDKPNDQNKLQMIEFIEDKINVIKYEEEIDIKSILIDASKKPSASNL

SEQ ID NO: 2883 - protein, 332 aa, unidentified
  source 1..332: note = Related to MT630658.1; note = Methanosarcinales archaeon ANME-2c ERB4
MRMTKDQILTEDQFKVFISSIKPPLSEEEHESQCSSFKKLKRNELPYILNIEHLAELTGSSPAQLHLFISDKRKAYSSFKLPKKRGGFRKIDAPSKKMKTVQRWILDNMLYKLDAGNYAHGFVPNRSIATNASVHVGQELVLGIDIKDFFPSITLKRVVGLFQSIGYNEEVSHGMGELCTFNWRLPQGAPTSPMISNLIAWHIDIKLSKFCNKRNLCYSRYADDITISGGTELPRYKTLIFRKIKEEGFSINDEKTRVHGRGSSQRVTGLVVNDTITLGREKKKRLRAIVHNIAKNGPIAENRDNDPFFRERVFGHIGFAKMVEPDFAKSLQ

SEQ ID NO: 2884 - protein, 548 aa, Methanococcoides sp.
  source 1..548: note = Related to JAIORO010000110.1
MILIDSQFKKFMDSIKPQLSREEYDLQLTSFEKLKKNELPYILNIDHLAHLSGISPQQLHLFIKNKRIAYSSFKLPKKNGGFRSIDAPSKNMKLVQRWILDNILYKLNAGEYAHGFVPKKSIATNALVHVGQELVLGIDIRDFFPTITLNRVEGLFKSIGYNEEISYALGELCTFNWRLPQGAPTSPMISNLIAWRMDIKLSKFCEKRGLIYSRYADDITISGNKNLPRYKTLIFRIIEEEGFSINEKKVRLLGRGSSQKVTGVIVNDKISLGRKSRKRLEAIIHNILKNGPIAENLNNDPYFKEKLFGHLGFASMIEPDFALPLLQSLKKIDWEPYDCALETSKESELNYKSLSRDSHSNLIKFDNLGFFKDVETLPLKWKDELITQLDELKEKCEEQSIDACKNCMHVRKELYEKCIKYILGHYVGCTCGPHHGHEVFDVGGETDLYGDSVFVAFLAKAGKLDRKSKDSLFHQFFECTIQEGLDVISVVTPEILDNRLKMDLRILFRDCGKEKLFCLIMRDEMSRILYSFQRIISNNMCEDEKKAP

SEQ ID NO: 2885 - protein, 560 aa, Methanosarcina mazei
  source 1..560: note = Related to CP009514.1
MNCSAICDEKQFEEFMDSLQPSISKEEYDTQYESFLMLSEKNLPYIYDLNHLSLLIGESTKQLDFFVRNKRKIYVSYRMKKKRGGYRTIDVPSKKLKFVQRWILQNILYNIKVSKHSHGFIPGRSIATNAKIHVGQELVMGIDLKDFFPSIKFNRVRGFFKSVGYNNHISTILADLCTFNWQLPQGAPTSPMISNLIASRLDRRLAGFCKKKELLYSRYADDITISGGKVLPRYKTLIFRIITEEGFEINCEKVRIQGRGSCQLVTGLVVNDKVSIGRRKKRIIKSLVHKISENGSIEANETENPFFKEMVYGLLSFTNVVDPEFAQPLIEKLNLIDWKEFTEAYSQYQKSEIIERSFKKCPTIRRILFNDLEFFKGIKLIPQNELTKEFLKELSLLKEKCSEHKKENCQDCLLTEEISDKTCMKYILGHYIGSTGGAHHGHEVYDIGEITEYKSQEVFVAFLMKSKDDTNSKNSLFTQFFDCTENGGIDIISVVSTEDLDHKTILRLQRVMKQFAKEHLYCLILRKEMASILYSFKKEFSKNNREKSLFHNGDQSSLLI

SEQ ID NO: 2886 - protein, 533 aa, unidentified
  source 1..533: note = Related to JABXKB010000305.1; note = Candidatus Lokiarchaeota archaeon
MDLERQKINFDIPYQSFNQYRRDFRFANKHLGTQCIKFCINYAKALKKKNLPIIYNLEHLSHHVKLSKKSLYFIIKQKEKFYQLFEIPKKKEGVRNITAPSKILKNVQRWILDCILYNIDIHKNATGFYLDKSIIKNANFHLNQKMVLNIDLKDFFPSIKNKRTYHIFSSCGYNHSVCKILSELCTFNNELPQGSPASPMISNIVCKSLDSRLFGFCKKNNLNYSRYADDITISGERNLTKYILFIFKIIENEGFKISTKKIRLTGRGNAQIVTGITVNDKISFDRKKLRKIRAIIHNCKKIGPEKANKNKHPFFREYLYGYVAFLKPIKPELSKKWKKELDSIDWGAYKKKYDVDIIINDSEKELSNPTAFISYSWDSKKHREWVIRFAANLIKNGINVLIDEWDLKDYNDDLNYFIECGIRDSNHVIIICTPKYAKKANKRLGGAGIETAIITGEIYEKTNAGKFIPIALNYQKSMKECLPTYLKNKFTFDFNEEERYEEKIELLLRKIYKKPKYKKPKLGTIPDFKSKDI

SEQ ID NO: 2887 - protein, 390 aa, Paraclostridium bifermentans
  source 1..390: note = Related to NZ_MWJI01000004.1
MILESLNLPKIYNLESFSTEIGLSTTILYLLSQRQDKFYHQVIIPKRKSGNRTLSIPSMSMKIVQKWIKLKILDKIPVSNCAMAFRKGNSYGIKTNAELHKYNTYILRLDLKDFFNNIKKEKVFFLFREIGYNNYISNILSNICTFNESLPQGGITSPSISNLICKKLDIRLESLASKRDITYTRYADDLIFSCNDEVLLIKTKNAILDILKSEGMEVNKLKTKFIRPGSRKKITGLHIDKNRVIVPRDTKRKVRAMIHYSIATGDYSKLDEIKGYISFISSIEENYISKIKSYINKIANNEQYRLFEDIVESYNKNKIFKDLDTMNFIDEYIEEIDGIEYDLSSTYFYNRIDFLKKNELQEVIDNITNGEDNNVDDIATTYLDNETCPF

SEQ ID NO: 2888 - protein, 379 aa, Clostridioides difficile
  source 1..379: note = Related to CP037830.1
MHLKYSNLMTLESLNLPKIYNLESFSTEIGLSTTILYLLSQKQDKFYHQVIIPKTKSGNRTLSIPSISMKIVQKWIKVKILDNIPVSNCAMAFRKGTNYGIKMNAELHKYNTYILKLDLKDFFNNIEREKVFYLFREIGYNNYISNILSNICTFNEVLPQGGVTSPSISNLICKRLDRRLENLASKRDITYTRYADDLIFSCNDEVLLIKIKNVILDILKSEGMEINKLKTKFIRPGSRKKITGLHIDKNKVVVPRDTKRRVRAMIHYAITKEDYSKLDEIKGYISFISSIEGNYISKIKSYINKIVNNGQCRLFGPIVESYNKNKIFKNLELVSCIEEMDWVITKGAFYNREKYELKEVIEKSTEYGEDNINGETSPF

SEQ ID NO: 2889 - protein, 378 aa, Intestinibacter bartlettii
  source 1..378: note = Related to NZ_CABIXZ010000002.1
MFIIKDDIRKYGNLMILEALDLPKIYDLNSFGREIGLSNTILYLLSQKTERFYKQTKIPKKKSGTRQISIPSISMKIVQKWILINILEKIPISNYAMAFRKGSKYGIKTNAELHKYNECIIRIDLKDFFNSIEKEKVFYLFKSIGYNNLISNILTNICTLDGCLPQGALTSPILSNLICRNLDRRLEGLCSKRDMIYTRYADDIILSCNNEVLLIKTKKIVSAILCDEGFKINQSKVKFMGVSSAKRVTGLHIEENKVVVPRMLKRKVRTMIHHTIVVGDYSEIDKIKGYIAFISSIEPNYRKKVIEYINKITSKQQYRIFKEIVDGYNSNKILKECKDMEYFNEECNEDIENDFYSERENFINMLLKEKNDTGSYGE

SEQ ID NO: 2890 - protein, 402 aa, Clostridium tagluense
  source 1..402: note = Related to NZ_BHYK01000003.1
MFTIKRVKYRNIIILEALNLPKIFDIKSFSISIGLTPTILYLLSKETERYYTSIKIPKKKVGTRQLRIPSFSLKLVQKWIKINILDKIPISDSAMAFRIGKDYGIKQNAELHKYDSYIFKIDLKDFFHYIHREKVFYFFYNLGYNNLISNILSNICTFNDVLPQGAVTSPSLSNLLCKKLDSRLEGVASKRGISYTRYADDLIFSCNDKVLLIKTQKMIYEIVEDEGFQVNSEKVKFMGPATRKSITGLLIVENKVIVPRSLKRKVRRMIHYMIATSDYSRLDVVKGYISYISSIEKKYIEKIKRYINNMVNNDQYKVFDDIVNLYNENIFLECNEMEHVSFESCIDIVDGTVLDFGEHYVDERITFFKKHNICGRLSSLGIEYEEIAATVNVTSENDGGGK

SEQ ID NO: 2891 - protein, 396 aa, Clostridium botulinum
  source 1..396: note = Related to JACBEK010000003.1
MKVKYENTVVLGILNLPKIYDLYSFSEEIGLSTTIIYLLSKKTDRYYNTIHIPKKKKGRTRQIDIPSFSMRIVQEWIKNKILDSIPISDSAMAFRKGKKYGIKKNAELHKNNQYILKLDFENFFSNINKEKVFYIFKSIGYNNTISDILTNICTYNESLPQGAITSPSISNIVCKMLDSRLEGLSNKRNITYSRYADDLIFSSNDEVLLKRTTKVIFDIINDEGFYINKEKIRFIYPQMRKSITGLLIAENRVVVPKEMKRKVRAMIHNMIASADYTDIDKVKGYIAYISGIESEYIEKVREYVNKMIEKEQYKVFDDVVTEYNKNKLLKGTEDMELLPIGSCIEEDELGFYSQDFAEDYYEERIEFLQEKYPEKVKKLSITYKEANSENNEELLI

SEQ ID NO: 2892 - protein, 408 aa, Clostridium sporogenes
  source 1..408: note = Related to NZ_JZJQ01000041.1
MLTINNLKYSNSIIIDTLGLPKIYDINSFSTEIGLSPTILYLLSQKQDLFYKDTYIPKRDGSNRQISIPSISMKLVQKWIKVKILDKLYISDMSMAFRRGNSYGIKKNAELHRYDLYILKIDLTDFFHSIDRMRIFYLFKGIGYNNLISNILTNLCTYKERLPQGAVTSPVLSNLVCEKMDKRLSGVASKRGISYTRYADDMYFSCDDEILLRKTQSMIYEIIKDEEFKINNKKVKFMGPSSRKCITGLVINDSKVVVPREMKRKVRVMIHHGIATGDYSKVDSIKGYISFISSIEKDYENRIKKYCQSLIDKDQYKVFDDLIEKYNQNKFIDTNEMKQVDEDELLYEFEGIELNHIDSYIYERIEFYKKNNLENKMKDFYIENKEIACVLNEEIIMNSDDNNEDFGF

SEQ ID NO: 2893 - protein, 353 aa, Clostridium collagenovorans
  source 1..353: note = Related to NZ_FQXP01000010.1
MLTIKNLKYSNSMILETLGLPKIYDIESFSTEIGLSPKILYLLSQKQYLFYQNKQIPKKDGSSRQISIPSTSLKLVQKWIKIKMLDKLPLSDFSMAFRKGKSYGIKKNAELHKYDSYILKIDLKDFFHSINKTKVFYLFKGVGYNNLIANILTNICTYEDRVPQGAITSPVISNLICKKLDYRLSGVASKRGISYTRYADDMYFSCDDEILLRKAQNIIYKIIKEDDFIINNKKIKFMSPHSKKFVTGLIINDTKVLVPKEMKRKVRSMLHHAIATGDYNNIDSIKGYISFISSIEKDYRIKIEKYCEELIDKKQYRVSNDLVDKYNNNNFLKTKSMEYIQDTEFNEYEELIF

SEQ ID NO: 2894 - protein, 404 aa, unidentified
  source 1..404: note = Related to JAGZKV010000024.1; note = Clostridiales bacterium
MSQNIPTLLMNSLKLPYFETIEELSELTRLSTQLLYCLSTKTSKYYIIKKIPKKNGGLRELSIPSYTLRIVQRWILTEILNKILPSDRAMAFRKGKDFGHKQNAYYHANTLYGLSIDIKDFFPSITVNKVYTIFSTLGYNSFAATILTNLCTLEGKLPQGSPCSPAISNIICSSLDRRFVGLCEKRGIRYSRYADDMYFSCDDKILLLKNFPIITRIVESEGFILNTRKVHFHTPSNKKQITGITVSPTNIEDYVELKAPRTLKQKIRAEIFTCLISGQYQNKDHILGEIAYVDFIEKENKSKYLERIKNYIGKQLVKIQLFPELVMEYNNNKFYEDLPLAISIDINIVTEEDFDDIECLFRERKKFLQKNGIKDICKYSKWPDIIINSSYNIAENIADIECPF

SEQ ID NO: 2895 - protein, 344 aa, Clostridium fessum
  source 1..344: note = Related to PYLO01000002.1
MSQKISPLLINSLKLPVFETLEELSEITRLSTRLLYCLSKKTDRYYNVIEIPKRNGKMREISIPSYTLHIVQRWILMEILNKLVPSSSAMAFRKGDNFGHKQNAIYHADTLYGLAIDLKDFFPSITANKVYTLFSNLGYNHFAAAILTNLCTLDGRLPQGSACSPAISNIICMNMDKRLIGLCEKRGIRFSRYADDMYFSCDDKLLLLKNYPIIKKIIEDEGFLLNERKTHFHTPSNKKQITGITISPGKAENAVELKAPRKLKQKIRAEIFTCLMTGDYKNREHILGEIAYVEFIERENKYPYKDRIRHYIEEKSTKIQYFPELVQAYNENRFFKDMPLLEGK

SEQ ID NO: 2896 - protein, 401 aa, unidentified
  source 1..401: note = Related to JAFQFZ010000002.1; note = Clostridia bacterium
MRKISQSLLINSLGLPRFSTIEQFSEITGLSTRLLFCLSNLTEKYYRNKKIPKRNGDMREIFIPSYTLRIVQKWILKNILNKIVPSNQSMAFRRGSSFGNKQNAAYHAYTLYGLSIDLKDFFPSISANKVYNIFSSLGYNEFAATILTKLCTLDSKLPQGSPCSPAISNLVCITLDNRLAGLCQKRGIIYTRYADDMYFSCDDKTLLLRYYYAFKQIIENEGFVINDRKTHFNTPSNRKRITGVTIVQHHLDEKFELKAPKEMKRKIRAEIFMCLMSGDYKNKGKILGEIGYVSFIEKDNNFNYISSIKQYITTTAEKIIYFPELVDAYNNNLFFDDLEEIESALIDPKDEEELYYYGDMYNSRKIYLNKRNLSDVCTYKDWPQVITSQNNSSTDNTDLPF

SEQ ID NO: 2897 - protein, 382 aa, Pectinatus frisingensis
  source 1..382: note = Related to NZ_WIQR01000001.1
MKVNNLLIKSLNLPEFKNIKELSILIGVSSRLLYCLSQNTEKYYTHKIIPKKNGTNRCLSMPSYTLKIVQRWILKRIIEKIIPSKSAMAFRVGKNFGYKQNASFHSDTLYMLSIDLKDFFDNIKSFKVYCFFISIGYCEFAAMILTKICTLDNKLPQGGVCSPALSNLLLSSLDKRLIGLSEKRGIRFTRYADDMCFSCDNKVELLKIFPTIKKIISEQGFIINDHKTYFSTPSNRKKITGITISKKNNIIELKAPRKLKKQIRVEIFQCIVSGDYSKKNHIIGEIAHVNFIEKENKIKYINNMKKYIETTGKKISCSPELVTAYNENLFFNDINKLEIMPLINIACRRNAVDFFKNRKEYLGKRHIVDICKYNGLMIYCDI

SEQ ID NO: 2898 - protein, 408 aa, unidentified
  source 1..408: note = Related to PGZR01000048.1; note = Firmicutes bacterium HGW-Firmicutes-4
MSNLKRLNYIYINTLKIPAFQNIYELSRLTGISSRMLYCLSKNNVEYYKTFTILKKSGDPRTINAPLYSMAIIQKWILRNILEKITPSNRAMAFRKGSEFGCKMNAKYHVGTLYGLSIDLADFFTSIKSNKVYCLFRNLGYAETAATILTNICTLDGALPQGGVCSPTISNLICITLDNRLIGMCEKRGIRYTRYADDMYFSCDNKDLLKKTFPKIKTAIEDQNFTINNNKTRYHTPSNRNQITGVVIVKTNQYEEYELKAKRKLKQSLRAEIHNAIMTGDYKNKGHILGIISYINFVEKENSDNYLERIKEYIVKCANKIIFFEELIKAYNENLFFNNMEKIAYDKDQIVDFFKEEDSYLKLLDKRIEREAYLQKYHRDDICMYLDWPRGLDPNNNNDIGLMDDCPF

SEQ ID NO: 2899 - protein, 412 aa, unidentified
  source 1..412: note = Related to BK019570.1; note = Siphoviridae sp.
MQKNNLLLINSLGIPYFECLEEFSRIIGLSTKLIYLLTNKTEIYYSFKEIPKKNGKKRIIAIPSYTLKITQRWILKNILNKIRPSDYVMAFRKSSNNNKFDIKKNAYYHSDSLYGLSIDLSDFFPSINAAKVYRIFKGIGYNNTASAILTNLCTLENKLPQGAVCSPALSNLICMRLDRRLFGLCSKRGVLYTRYADDMYFSCDNKGLLLKMFPIIEKIIKSEGFIINQDKLHYHTPKNKHLITGVVISHSNDTSELKVSKEFKRKIRAEIFRCIMTGNYENAAHIKGEISYVCFIQSENRQDYKQSIIQYINRTSKKIEYFCELVDAYNENFFFDEQEPLEFLDINKLEIDCPEKDTDNYDQYLFETIEAIFQYRKEYIKNNNLTDICKYQNWPKNTTENEFDASSEETPF

SEQ ID NO: 2900 - protein, 393 aa, Bacillus thuringiensis
  source 1..393: note = Related to NULM01000015.1
MNKNFTNSFILNALNLPIIRDLDTFSNSIGVSKRLLYLLSQSSEEYYRSFFICKKNGDQREIHTPTYSLKLVQRWILEEILEKIDVSEESMAFKKGPGNGIKKNAEIHLYSLYLLQLDLKDFFTSIKREKVFYLFKDLGYNIVVSNILASLCTYNGYLPQGGVTSPYISNLVCYKLDKRLKGLCAKRDILYTRYADDLTFSCDNRETLKKVQKVIEDIIEDEGFNVNSLKTRLLSPSSHKKVTGITVNEKTVKASKKLKREVRTMIHHAFVTTDYSSNDRIRGYIAFISSIEEGYKDTIYKYINKLVNNENYRMFRDIVEAYNNNKIFKNMEDMKDMKFEKSGYLVEEYLNDLAQERASFLRNRDIQTDLFTNSSADEIASTSMERKDFKDLF

SEQ ID NO: 2901 - protein, 395 aa, Bacillus mycoides
  source 1..395: note = Related to NZ_CP035996.1
MKKSYTNSFILNALNLPIIRDLDTFSNSIGVSKRLIYLLSESTEDYYKNFLIPKKNGEQREINTPTYSLKLVQRWILEEILEKIGVSEESMAFKKGPGNGIKKNAEIHLYSLYLLQLDIKDFFINIKRKRVFYLFRDLGYNVAISNILANLCTYKDYLPQGGITSPYLSNLICYKLDKRLKGLCAKRDILYTRYADDLTFSCDNRESLKKVQKVIEEIIEDEGFKTNPLKTRLLSPSSHKKVTGITVNERYIKANKKLKKKVRAMIHHAFISADYSSNDCIRGYIAFISSIEEGYKDTICKYINKLVNNKNYRIFEDIVEGYNNNKIFKDMEEMRFKETVFLDPDYPLNSHLSDIVQVRTDFLQNRDIKIDVFPDSSEDEIASANMEEIEIDDLF

SEQ ID NO: 2902 - protein, 398 aa, Bacillus thuringiensis
  source 1..398: note = Related to NVKK01000033.1
MKKHYTNSFILNALNLPNIRDLETFSNSIGVSQRLIQLLANSAHVYYNNFSIPKKNGTQREINTPTYSLKLVQRWILKEILEKIDVSEESMAFKKGLGNSIKKNAEIHKYSVYLLQLDIKDFFISIKKEKVFYLFRDLGYNIVVSNLLANICTYNGFLPQGGVCSPYISNLICYKLDKRLKGLCAKRDILYTRYADDLTFSCDNKETLKKVRNIIEDIIKNEGFEINPLKTRFLSPSSHKKVTGITVNDNRIKASKKLKKKVRSMIHHSFVSADYSSNDQIRGYVSFIDSIEEGYKDKICEYIDRLANDKDYKYFEDIVVAFNNNKIFKELADMPFEDLSFNDPDDPDDLVTYFISNSVEERYSFLKDRRIKIDAFPDEYEDEVAAANQNEIEVEDIF

SEQ ID NO: 2903 - protein, 369 aa, Bacillus thuringiensis
  source 1..369: note = Related to NVCK01000005.1
MKNDFTNSFILYSLDLPIIKDFESLSNSVGISKTMLYLLSKKTDMFYNSFDICKKNGTKREINSPTYSLKLVQRWILAEILEKIKVSNESMAFRKGIGNGCRKNAEHHRYSLYLLQLDIKDFFTSINRERVFYLFKSLGYNSLVSNILANLCTYKGYLPQGGVCSPYISNLICYKLDKRLKGLCSTRDVLYTRYADDLTFSCDNKVILRKVKNVIEDIVIDEGFAINPSKTRLLSPSSHKKVTGITVNDNKIKASKQMKRTVRAMIHYALVNRDYSEKNVIRGYVSYIDSIEEGYIDKIKNYINKLTEKDYSSSSEIVESFNKNKLFNDLNDMVYNEASIIDEAFDWDIFELDTYKHISATKQEDDFNF

SEQ ID NO: 2904 - protein, 350 aa, Clostridium tagluense
  source 1..350: note = Related to NZ_BHYK01000016.1
MTTDFTNSFILNSLKLPIITNIDSLANTLGLSKTIIFLLSQKTSYYYKPFKILKKDGNSRQIFSPSYSLKLVQRWILNEILEKIDVSHESMAYKKGNDNGIKKNAEMHKYNLYLLEFDLKDFFTSIKRERVFFMFKNLGYNNMVSNILTNICTYNDYLPQGGVCSPYISNLVCYRLDKRLSALCGKRGIVYTRYADDLTFSCDNKQSLKKVKDIIKDIIESEQFKINDSKTRLLSPTSHKRVTGITVNDNKLKANKNMKKLVRAMIIKSLFSMDYINNNIIKGYIAFINSIEDGYKCKIIEYINKTINKSLPYSNEMVIAYNENKFFKETNDMCYHGYDNIDDKYEDYEG

SEQ ID NO: 2905 - protein, 392 aa, Acetivibrio clariflavus
  source 1..392: note = Related to NC_016627.1
MIQKDYTDSFILNALNLPTISDLDSLSDAFAISKRLIFLLTKKTENYYKRFYIKKRDGTSREILSPTYSLKLIQRWILKEILEKVSLSEQAMAYKKGKNNGIKKNAMHHRYSLYILEMDIKDFFHSIKRERVFYLFKNLGYNNMVSNILTNLCTYNGYLPQGGVCSPYISNLICYRLDNRLSGLCGKRDILYTRYADDLTFSSDNKQTLTKAINIIINIIEDEGFKVNKNKTRLLSPGSHKKVTGITVNDSKIKASKQLKRTVRAMIHQAIVTADYSQIDRIRGIVSYINSIEVGYREKVITYINSLSNKDYAFFEEIVERFNDNKIFKEIQDMNYKGYDYDDQVSLELEKIVSARQEYLGKIGKVDFLSAHIQSQQDEFKTNAAATKETYE

SEQ ID NO: 2906 - protein, 393 aa, Planomicrobium sp.
  source 1..393: note = Related to VOHC01000030.1
MKSDFTNSFILNALNLPVMKDLNDISYLTGLSNQLLFLLSQNSESYYKKFYLDKKNGEVREINSPSYSMKLVQRWILSEILEKVKVSNESMAFKKDFGNGSIKNARYHQYSLYILQLDLESFFDSIDKERIFLVFKSLGYNTYISHVLTNICTLNGTLPQGGVCSPYLSNLICYKLDRRLTGLCSKRDVLYTRYADDLTFSCDNKLTLKKIKNIIEDIIIDENLKINHFKTRLLSPGSHKKVNGITVNNGNLKASKELKKKVRAMIHHSIVSEDYSKNNIIRGYVSYINSIEKGYLEKIKEYIINIFKKDYNHFSSTVNAFNENKLYRDIESAEYVEFVGAGYSDDYEWLYYEERRFEFLVEKGYLKGLRDYFKKAENLLVENKDDEDPTSIF

SEQ ID NO: 2907 - protein, 406 aa, Bacillus thuringiensis
  source 1..406: note = Related to NFEK01000132.1
MNNKNNVTNSFILNALNLPIIKDLESLSNHIGISEKLIYLLSVRNSEFYESFTIPKKDGTERKIESPSYSLKLVQRWILKEILEKIPVSVHSFAFNPGRNGIKDNAELHKFSLYLLQMDIKDFFTSIEYKRVFYLFKNLGYNSFISKILTEICTHEERLPQGGVCSPYISNLICYRLDNRLQGLCSSRDIIYSRYADDLTFSCDNKEALRKIKKVIEEIIFDEGFKVNHKKTRYTSPSSHKVVTGITINDQKIKVQKDLKRKVRALIHHAIVCGDFSEINTIKGYVSYINSIEVGYREKVITYINKLLMEKDYKYYNDIVESVNGNLMMKEQISMVYDEYVDDEYVDDEYIPADIVFAETILRKRIDFFKKRGKELEIEDKYKEYFEDEVASTVVVDADDDDELPF

SEQ ID NO: 2908 - protein, 428 aa, Sporolactobacillus laevolacticus
  source 1..428: note = Related to NZ_AWTC01000001.1
MNNTHSNTILLNNLQLPIIHDIFDLSDNTRISDGKLYLLFQFHNYYYNTFFINKKNGKKREISSPQRPLKLLQKWILEEILLNIKVSAESQAFIRKKNGILENALLHKDNLFLLQMDIENFFPSIDDKRIFYFFRQIGYNSFVSDILKNVCTFKGKLPQGGVCSPYLSNLICYSLDRRIAGLCARRDIIYSRYADDLSFSCDNKDNLRKIRPLVELILSKEGFKVNKSKTRFSFSHKTITGLNIAKDNNNMNVVKVPRKLKRKVRSIIHYSFVSGDFSNQNVVLGYIAFIYSIEPEYISKIIKYIQSLQNKDYKFFSDIVNAFNKSDLAKISNFCWNFDDTYESKIDVEKVLRKYKISDRKDLDLFAEYLPDEYWGFQEKFEKRFFYLKRHKVLTDHLVSIYQNKLYDLNFLNREDSTNSFHQDLFEF

SEQ ID NO: 2909 - protein, 414 aa, Thalassobacillus devorans
  source 1..414: note = Related to BMCJ01000003.1
MSKDPTNIFILNSLKLPIIEDLYTLSNSTGISLKMIYLLSKNPGNFYTNHKIPKSDGTFRDIYSPNLSLKIIQRWILEEILCNIENSSEATAFKKGLNGPYENAAYHKDSLYFLQMDIKDFFPSITRKQVYYLFKNLGYNKFISNILANLSTLNNKLPQGGVCSPYLSNLICYKMDRRLKGLCSKRDILYTRYADDLTFSCNNKVALRKVKQVVEKIVINEGYLINHKKTRYSSPISPKKITGVTITSQKKLKADRQIKKKVRAMIHKAIVTGDYQHTNKILGYIAYINSIEKDYKEKIISYIEKLIDKQYKHFDKVVKAYNSNKFFRSLPDMTQVDINTQLADEKLKWELGIDVYDYYIFEEYKNMLEQRIDFMDKKGIFDQELKNEFERINDEVASSLEDEITPPKDDDIQF

SEQ ID NO: 2910 - protein, 372 aa, Marinococcus halotolerans
  source 1..372: note = Related to NZ_ATVM01000016.1
MIKQQDQFYSSFQLLKKNGSYRNISKPKFSLKLTQRWILEEILYKIETSNEALAFKKNVNGPKDNAEHHKYSLYLLQIDLENFFPSITKKQVFYIFKNIGYDNKVSNTLSNLCTYKDVLPQGAVTSPYLSNLICYKLDRRLKGLCGKRGILYTRYADDLTFSCNNKNDLKKIFKVVQKIINSEGYQINSDKTRFLSPVSHKKITGITVDSKNKLKADKSLKKKVRAMIHKAIVSGDYSQSNKIKGYISYIDSIENGYYKKIIEYIHKLINKEYKSFHQVVDCYNSNRNKLLKDLEKMEYEDFIEEPPENLDESDIEDYIGEQFKDYVDILKERKKFLNKHNFSVKEIKHELSLLTIGEKPLPKNTGKPEDLF

SEQ ID NO: 2911 - protein, 408 aa, Lederbergia wuyishanensis
  source 1..408: note = Related to NZ_JALIRM010000001.1
MKRDFTNTFILNSLELPVIDSLDTLSNQVGISKRMLYLLSQQTNKYYKQFQIPKKNNTFREISSPSYSLKLVQRWILEEVFYKINVTDEALAFKKGVNGIKQNATYHLYSLYILGIDIKDFFPSISREKVFYLFKNLGYNNFISNVLSNLCTLDNSLPQGAVTSPYISNIICYNLDRRIKGLCEKRDIVYSRYADDLTFSCDNKDTLKKMYKVLEGIIVDEGFEVNRSKTRFLSPISHKKLTGITIDHQKTKADKELKKKVRAMIHKSIVTGDYSNNNIILGYVSFINSIENGYKKKVINYINILIMKDYKHYPDLVDAYNKNKLFQELNNMVQIDFHTSFAFDIKTYYRQYFKHGFDLDEMEYYEYLNMLESRRVYLEKYHLKDTELEKELGTLQSAADIEEDTDLF

SEQ ID NO: 2912 - protein, 383 aa, unidentified
  source 1..383: note = Related to JAFVTV010000006.1; note = Clostridia bacterium
MIKEYINKTFIESLDLPMMKSFDDLVQNLRLSAKLMHWLTSSSSGKYKTFYLIKKDGSKRRIDAPARSLKIVQRWILDNILAKIKVSPYSFGFKSGEKGSPLVKCAEKHKNNLYILKVDLKNFYPSINKERVYYTFLDLGYNSSVANLLTDICVRDGYLPQGAVTSAYLANLICRDLDYRVAGYCNKRDIIYTRYADDLTFSCDNRETLHKSLFTIRRIIEGEKFQLNTNKIHFMTPKCKKSILGITLNDTSIKAPREMKRMVRSVIHYQVATGDYTDNDKIRGYISYINSIEETYKDQVLSYIQKLAESQLCLFEELVDAFNKNKLYQELPDMILRDAGDFVNAYEEDEFMTAVYYEHREFLIKYGLLEEETDTSNLEEIPF

SEQ ID NO: 2913 - protein, 370 aa, Ruminococcus flavefaciens
  source 1..370: note = Related to FRCT01000015.1
MIDNKNKIILDSLGLPCLVSFEDLVKAIRLDSKLIYWLSSETENKYKTFEIPKKNGGVRIIHAPVYSLKQVQKWILCNIIYKIKTSPYSLGFKRSSNLGSPLYISAQNHKYNLYVLKLDLKDFYPSITKKTVYNLFLSIGYNSQIAFLLTNICTHHGALPQGAVTSAHLANLICRKMDYRLAGYCQKHDIVFTRYADDMAFSSDNRDTLKKAYKTICKIIKDEGFIVNDLKTRFMTPKCRKQILGITINDNQIKVSKDLKRKVRAMIHRSIATGEYNNNDVIKGYISYINSIEPGYLEKTKKYISELITNSPLELYPEIINRFNSNKIYSDLPNMELKEPSYFVESPYDTDYMNNEYELHQDYLEGIKCK

SEQ ID NO: 2914 - protein, 367 aa, Anaerovorax odorimutans
  source 1..367: note = Related to NZ_AUFC01000039.1
MKKYINKTVLDSLNLPILTSFQDLVEQLRLTDKKVYWASSNHIIDKYNTFYIKKSNGNKRRIDEPKYSLKIIQRWVLENILYKIKVSPYSYGFKYTEGSPLVACSNKHRLNLFVLKMDLKDFYPSISKEKVYFQFLNIGYNTKVSNLLTNICTYNNSLPQGAVTSAYLANIVCRKMDYRIAGYCNKREIAYTRYADDLIFSSDNRELLHNTYGMIEKIITDEGFTLNKDKTTFMSPKNHKKVLGITINDNQVKAPKKLKREVRAKIHYQIATCDYSEQMKTKGYISYINSIEPNYKEKVTKYITGLSKSPLCLFPNVVKAYNDNKYFSELPNMILKSYGDFVQPSLIEEFEEHINSEYLKYLSEHSK

SEQ ID NO: 2915 - protein, 385 aa, unidentified
  source 1..385: note = Related to JAJEQN010000018.1; note = Lachnospiraceae bacterium CLA-AA-H224
MNKYSNKIVIESLGLPMLTCFDDLVKEVSLSEKLVYWLTKRDAEGRYNPFFIKKKDGNKRKINSPSLALKIVQRWTLENILYKIKTSQYSYGFKRDIRKGSPLVYCAEKHKNNLYILKLDLKNFYPSIKRESVYYIFKNVGYNADISNLLTNICVVNDELPQGAVTSPYLANLVCRKLDFRIAGYCNKRNIVYTRYADDLTFSCDDRELLRKIYGMIKKIVEDEGFCLNQRKTVFMTPKNHKEVLGVTINDGLLKAPKEVKKDIRAMLHYEVATGDYAMNDEIRGYVAYVDSIEKNYKNKCISYLKRLSESTLCLFPDVVKAYNSNKIYKELPDMKEKQVADFCEEDEDEFANMIYQEHEQYLILKGILNKTNEEDITDLQNPFW

SEQ ID NO: 2916 - protein, 383 aa, Blautia luti
  source 1..383: note = Related to NZ_JADPGV010000001.1
MKKYSNKTVIESLGLPMLTCFDDLVKELSLSGKLVYWLTKQDAEGRYKTFFIEKKDGDKRKINAPSLSLKIVQRWVLENILYKIKASQYSYGFTKGDRKGSPLVYCAEKHKNNLYVFKLDLKDFYPSIKREKVYYAFANIGYNADVSNLLTNICVVDDELPQGAVTSPYLANLICRKLDLRIAGYCNKRNIVYTRYADDLTFSCDDRELLRKIYGMVKKIVEDEGFCLNQKKTVFMTPKSHKVVLGVTINDSLLKAPKEIKKSIRAMIHYEVATGDYTMNDKIRGYVAYVDSIEKNYKNKCISYLQKLSESTLCLFPDVVKEYNSNKIYKELPDMVEKRATDFVELKDADDFYDMIYYEHEEYLISNGLLNEKEDITDLEEPF

SEQ ID NO: 2917 - protein, 371 aa, unidentified
  source 1..371: note = Related to RAYQ01000024.1; note = bacterium 0.1xD8-82
MKQYSNKVIIDSLHLPMLTCFEDIVREVRLSGKLVYWVTKKDAEGKYKTFYIDKKDGTKREINAPSLSVKIFQKWILENILYRISASQYSYGFERGRRKGSPLVHCAEMHKNSLYVLKMDLKNFYPSIKQERVFFEFRNKGYNDEVSSLLTNACVRDDKLPQGAVTSAYLANLICRKLDARIAGYCNKRNIVYTRYADDLTFSCDDRDLLKRIFGTIKKIVENEGFLLNENKTIFMTPKGHKKVLGVTINDNLIKAPKELKRIIRAVLHYEVSTGDYSMNDKVRGYIAYIDSIENNYKNKCISYLIKLSQSTLSLFPDIVEAYNNNKIFKELPDMEEKNPIDFVDLEDVNDFSDMIYWEHEEYLISHGINK

SEQ ID NO: 2918 - protein, 370 aa, Lachnospira sp.
  source 1..370: note = Related to JACOPD010000001.1
MKKYNNKMVIESLGLPMFEDIETLAEETRLTEKLVFFITKEDAKGRYKKFYIPKKDGTSREINSPCMSLKVIQRWVLENILYKVRVSQYSIGFVKNGKGSPLVQCAERHKNNLYILKMDLKNFFPSVERGRVYNQFLQLGYNTYASNLLTNICTLNGSLPQGAVTSPYLANLVCYKMDIRIAGYCNKRDITYTRYADDLIFSSDNRDLLRKIYGMIKKIVEDEGFVVNEEKTRFLSPKVHKEVIGVTVNDGVIKAPKEMKRMVRAMIHYEIVTGDYSDNEKIRGYIAYIDSLERNYRNKIIKYIEKYLDDTITLFPELVEKFNQNKLYNQIPDMKQHDISRFVNFEDEADYYSMVVNEREDYLSRHGIAI

SEQ ID NO: 2919 - protein, 354 aa, Agathobacter sp.
  source 1..354: note = Related to JAFQRZ010000003.1
MFEDIETLAEETRLTEKLIYFLCKEDAEGRYVSFKIPKKDGRYRDINAPCMALKTLQKWVLQNILYKVRVSPYSIGFKKDGKGSPLLQSAERHKNNLYILKMDLKDFFPSVKREQVFNQFLQLGYNTYASNMLTNICTLNGCLPQGAVTSPYLANLVCYKMDVRIAGYCNKRDIIYTRYADDLIFSCDNRDGLRNIYGMIKKIVENEGFCLNEKKTRFLTPKSHKKIVGVTVNDGLVKAPKEMKKMVRAMLHYSIVSGDYSNNDRIRGYVSYIDSIEKNYRKKIVKYITNYINDSITLFPDAVKKFNDNKLFNEIPDMVPKKISDFVDYEEEDDYFQMITYEREEFLTKHGIEV

SEQ ID NO: 2920 - protein, 308 aa, Veillonella sp.
  source 1..308: note = Related to JADJOK010000004.1
MQNILYKVRVSQYSIGFIKNGKGSPLVLCAERHKNNLYILKMDLKDFYPSICRAKVYNQFLQLGYNTYAANLITNICILDGKFSQGAVTSPYLASLVCYKMDTNWQDIVIKRDIVYTRYADDLTFSCDNRDELHKIYGMIKKIVEDEGFTLNQKKTQFLTPKGHKKVVGVTINDGMLKASKDLKRSVRAMIHYQIITGDYTKNEQIRGYIAYIDSIEKNYKKKIIKYVTGYCQDTITLFSDAVKAFNANKLFKEIPDMVQKDISSFAKWEEDQSDYMEMVMYERESYLAKHGLIESDIEDESNLEMFE

SEQ ID NO: 2921 - protein, 369 aa, unidentified
  source 1..369: note = Related to JAFUIR010000009.1; note = Lachnospiraceae bacterium
MKKYTNQNLITSLNLPFVTDIHSLSMQLRLSEKLVYFLTNERTYKKYRIFRIPKKDGTFRTISAPIASLKIVQRWVLENILYKIKVSDYSYGFSRNRKGSPLAACAEKHRNNLFMLKMDLKNFYPSIQRDQVFFQFLNIGYNTYAANLLTNICYNQDGLPQGAVTSPYLANMICYKMDVRIASYCNKRDITYTRYADDLAFSSDNRDSLRNIYGMIKKIVEDEGFSVNDEKTCFMTPKNHKVLLGVTINDANIKAPRQMKKMVRSMIHRAVITGDYSLKNVICGYVSYIDSIEKGYKDKIKKYIHKYYEDPITLFKDAVDAYNKNKFYEDMPDMKNRNIDFFLDGDEWDEDEVLTAFYEEREAFLITHK

SEQ ID NO: 2922 - protein, 337 aa, Butyrivibrio hungatei
  source 1..337: note = Related to FRDH01000006.1
MIDKTNKLILDSIGIPYFWDINSFAQKVRYTNKLLFFLSNYKAVERYNIFYLTKKNGKMRKIMAPSFSLLMLQRWILHNTLYKIRVSEYSYGFVKSNSDSESPLVEVAGAHKNHKYILKIDIKDFYPSISRARVFFLFKNLGYNFCCANMLANICTNNNELPQGAATSARLANILCTRLDARISGYCNKRDITYTRYADDLIFSCDNRNVLHHIYKMINTIIQDEGFEINQSKTRFLSPKNHKVVLGVTINDGYCKADRKLKRKVRAMIHSSIVNGNYSERAIIQGYIAYFSSIEKDYTEKIKRYINKFYGTLPKDKAIAYNNNKFLNKMPDMSTQS

SEQ ID NO: 2923 - protein, 375 aa, Eisenbergiella sp.
  source 1..375: note = Related to QUES01000001.1
MFMINQTNISLLKLRSLPIFNDLSSMSRVTGFSEQLLYYYAISDDAKKYTIFEIPKKDSCNTRKIYAPNYALKILQRWILENILYKIECSEYAFAFKRDMGSPLKKNALVHKEHVFLLEMDLENFFHSIKRQRIVYLFSNLGYNVPISNWLANICTYEDILPQGSVTAPYLSNLVCLQLDKRIAKYCSKRDIVYSRYADDITFSCSNKAVIKSIYGTIKKIIESEHFTINQKKTRFIGKSSRKSVTGVIIDNDCIKAPKEYKRLVRCLIHRAIISGDYSNINRIRGYIAYISSIEDDYMQKVVKYINTFKTKRDVIFLDSTVEMFNANIFLPGVDQISQIRMTMEEEDNFGDYVTERLEFLKKRHMKVPPELGKL

SEQ ID NO: 2924 - protein, 342 aa, Blautia coccoides
  source 1..342: note = Related to NZ_UFVT01000001.1
MNIGNNVVLNTLGVPVINSFEHLCEQLSITEQLLYYLTYRKEHCYYETEIPKKNGKTRILHVPNLSLKVVQKWILTEILEKIFVSEQTMAFVPHKNGLRENAERHKKNIFLLEMDITNFFGTITEEQVYSLFCNIGYGSKVAGILANLCTYDNYLPQGAVTSPYIANLVCYHMDSRINGYCSRKDIVYTRYADDLTFSSNNRMLLNKVERFIKYIVVDEGFTINEKKTRYFSNDVKKTVTGITINDDDIHVDKNFKRNLRAQIYNSIKTRSYDNNSQILGKIAYVNSIEDGFRDKMEKYISSIIIRSEFVQDLDIVNAFNANKLFAKLPDMVFMNEDKNPFI

SEQ ID NO: 2925 - protein, 342 aa, Ruminococcus sp.
  source 1..342: note = Related to JACOPE010000001.1
MNIGNSVVLNTLGVPVINSFEHLCEQLSVTEQLLYFLTYKKKYCYFEKKIPKKDKTERTLNVPSLSLKVVQRWILKEILEKIYVSEQAMAFIPHKNGLRENAERHKKNIFLLEMDITNFFGTITEQQVYRLFCNIGYNSKVAGVLANLCTYDGYLPQGAVTSPYIANLVCYHMDARINGYCSRKDIVYTRYADDLTFSSNNRTLLNKVEKFIKYIVADEGFKINDKKTRYLSNDVKKTVTGITVNDDSIHVDKKFKKDLRAQIYRSIKLKDYQNNSQILGKIAYVNSIEEGYRDKIFKYITDVITKPEFTGHIDIVNAFNDNKFFPDLPDMMFKEVWESPFD

SEQ ID NO: 2926 - protein, 342 aa, Mediterraneibacter faecis
  source 1..342: note = Related to JAJBQL010000016.1
MNIGNSVVLNTLGVPVINSFEHLCEQLSVTEQLLYFLTYKKKYCYFEKKIPKKDKTERTLNVPSLSLKVVQRWILKEILEKIYVSKQAMAFIPHKNGLRENAERHKKNIFLLEMDITNFFGTITEQQVYRLFCNIGYNSKVAGILANLCTYDGYLPQGAVTSPYIANLICYHMDARINGYCSRKDIVYTRYADDLTFSSSNRTLLNKVEKFIKYIVTDEGFTINDKKTRYLSNDVKKTVTGITINDDSIHVDKKFKRDLRAQIYRSIKLKDYQNNSQILGKIAYVNSIEEGYRDKIFKYITDVITKPEFTGHIDIVNAFNDNKFFPNLPDMMFKEVWESPFD

SEQ ID NO: 2927 - protein, 339 aa, Eisenbergiella tayi
  source 1..339: note = Related to MCGH01000001.1
MNLSNNVILNTLNVPIINGFTHLAEQLSLTQGLLYFLTYKKDYCYTLKEIPKKDGTFRKICVPNLSLKVVQKWILVEILEKIDVSPQAMAFVPKNNGLKSNAEYHKKNIFLLEMDIKNFFGTIKEGQVFKLFCNIGYNTKVSTILTSLCTFDGELPQGAVTSPYLANLILYHLDIRLNGLCSRKDIVYTRYADDLSFSSNDRAKLNGIENFVKNIVSDEGFEINEKKTRYLSNDVKKSITGITINNEEIHVDKKLKRDIRALIFSSIASKNYALNDKIRGSIAYVNSIEPGYQEKMINYIERIINKDELKNDLGVVKTFNENKLYKVLPDMKYEESPFI

SEQ ID NO: 2928 - protein, 339 aa, Roseburia sp.
  source 1..339: note = Related to FMFO01000004.1
MNMSNNVILNTLNVPIINDFKHLAEQLSLTQELLHFLTYKKQYCYTQKEIPKKDGTSRTLYVPHLALKVVQRWILKEILEKINVSYQAMAFVPKRNGLRVNAEYHKKNIFILEMDIKKFFGSIQKKQVFQLFCKIGYNTDVSAVLANLCIYEDVLPQGAVTSPYIANLVTYHLDVRLNGLCSRKDIVYTRYADDLSFSSNNRTKLNSIEKIVKYIVKEEGFEINEKKTRYLSNDVKKTITGITINNEEVHVDKALKKKIRAMIFNSIVNKDYTRNDKIKGSIAYVDSIEMGYKEKILNYIIQITEKGQFKNNIDIVNAYNKNKFFKSLPYMQYEESPFY

SEQ ID NO: 2929 - protein, 334 aa, unidentified
  source 1..334: note = Related to QXXC01000007.1; note = Clostridiaceae bacterium
MNTNSNLILNTLGVPIIYDLESLSERLSITKTFLYMLSRKQHLFYETAEIPKKDGSTRKIHAPVLSLKVVQKWILVEILEKVRVSPYAMAFVPGKNGLKENAMLHKDRLFILEMDIHDFFGSITQKDVFQLFTKIGYNYTISAILANLCTYEEVLPQGAVTSPYIANLICYNLDMRLSALCNKRDIVYTRYADDLSFSSDNRTRLNRIERLLREIVQDEGFEINDRKTRYFSNDRKKTVTGITINDREIHADRKLKQRIRSKIFHAVSEADYSEAAQIRGLIAFVDSIEDGYRDQMACYLEGLALKESLRRSAKVVKAYNNNKLFQDLEDMMPL

SEQ ID NO: 2930 - protein, 304 aa, Clostridium sp.
  source 1..304: note = Related to FR902276.1
MKNIKDFAKELSLDVKTIEKLTRDNFNYYHFTIPKGNGEKRLITAPKGKLKVIQKWILVNCLEKFAVAECATAFIKGKHGIRVNAESHQYNKYILEFDLKDFFPNISFWDVQNLFLRMNLSQKLSILFAKLCTYDGYLPQGAITSPYISNLICYDLDLKLLELCDYYDITYTRYADDLTFSSDELYLLLSLMQEISSIIHYYGFKVNYNKTKVLLPSNKQTITGITVNNGEIKVDKKLKRMVRAKLYYGIKNNDIKDFDILLGFISYICSIEIDYKSKMISYVQYLLNKFGRHDNWGLLKILNK

SEQ ID NO: 2931 - protein, 304 aa, Clostridium sp.
  source 1..304: note = Related to HF987425.1
MKNIKDFAKELSLDVKTIEKLTRDNFNYYHFTIPKRNGEKRLITAPKGKLKVIQKWILVNYLERYAIAECATAFIKGEHGIRVNAEAHLNNKYILEFDLKDFFPNIKFWAVRDLFLRMNLTRKISLLFAKLCTYNKRLPQGAITSPYISNLICYDLDLELLELCNNYDITYTRYADDLTFSSNSLYLLFSLMKEISDIIRSHGFKINYEKTKILYPSAKQTITGITINNGTIKADKKLKRMIRTKLYYGVKNNNITELTKLIGYIAYVNSIESDYKLRLYDYFSSLLQKFSKEDSWGLLKILNK

SEQ ID NO: 2932 - protein, 333 aa, Acinetobacter sp.
  source 1..333: note = Related to MNTZ01000028.1
MVNFFYNSDKLQEYLQLPQIYTLDDLAYFLLFTKEQLHDFSYRKNEHYVTFLIPKKNSTEKRVINAPKKRLKMAQKLILKEILEKVPCSSASAAFIKKENGLLKNALTHKENLFLLKMDFKNFFQNINEAKIIQIFENLGYSPYIALQLAKLCTFSKKLPQGGICSPYLSNLACYEFDKDISSYCDEKNIAYTRYADDLLFSANDIDLLKNLKNDIYSYTKKHSVAGLNIQINHKKTKLIKNTSHKKVTGITINDQKIKASKKLKNTIRQNIRYNLIHNQFDNKLIGKIAFVISIEDKEYKNRIFKYCKRIENKFKLNKKENQLLKVLYKMTK

SEQ ID NO: 2933 - protein, 326 aa, unidentified
  source 1..326: note = Related to DMXX01000019.1; note = Cyanobacteria bacterium UBA10660
MNKIELLKLPKIENLKDLNHLLLFTEKQLNDFVRLKSEQYVSFKIPKKNSIEKRIINAPKKYLKLAQKIILNEILEKVPCSNAATAFIKNKNGLFENANMHKDNLYLLKFDFCNFFQSIKFERIRLLFIELGYNPKISKILAELCTYCKELPQGGICSPCLSNLICLELDNDLLEYCEGNDIKYTRYADDLFFSSNNKEVLLKLKEDIETLILKHRTEFFDIKINRQKTKFITEPWHKKVTGITINNNKIKTSKTLKRDIRRELYFTIIKNKTDYNKLIGQIAFVISIEKDYAEKIKKYALSICEKNNIHEHKIIQILDKMVKSQV

SEQ ID NO: 2934 - protein, 337 aa, Enterococcus alcedinis
  source 1..337: note = Related to BMDT01000015.1
MNNVNSRPFLLGINGLPVMTNISDISRQIGISSRRIYEYTNYTSSFYHTFEIPKTDKSIRIINAPFSGLKMVQRWILETILYKIKVDTPSYGFLKGKKSPTKQNAEIHSNNLYLFQTDIINFFTNVDFKRVYSIFLKIGYNKEVSLTLARLCCLDGYLPQGGVTSPYLSHLVCFRMDRRIMGLCQKREIVYSRYADDITLSSDNKNDLKKARVYLEQIISDEGFEINPRKTRYSFQKKLVTGLTIHNNKVLVPRILKRELRSKIYNTIVFNDYSSCEVILGYVSYINSIENGYINKVKDYIETLLNNKSIEPERLSIIRLNYKKSPLGSWMENVHTQ

SEQ ID NO: 2935 - protein, 301 aa, Salegentibacter maritimus
  source 1..301: note = Related to JAEHOK010000008.1
MNRLDKLILEIGLSRNVIENYITFADKHYKSHYLPKKGGGKRTIDCPGKNLKTIQRWILKEFLNKLEVNKRANGFVKNRGIKRNALYHLKKKHILTVDIKDFFYSISQRQVFETLNANYNDRDFALKIAKICTYQRYLPQGAPTSPALSNLVFKPIDDEIMKYCNSELIHYSRYADDLTFSSDNKQSLQYAYRFINDLLYKNGFNLNSKKTRYLSGKGNMSVTGVNINTGKPKADPKLKKQVRAELHHYIIKEKEINLNKLAGKISFIRSIEEDYSQNLDFYIKRLYKKKAFIQKMASKTH

SEQ ID NO: 2936 - protein, 300 aa, Jiulongibacter sediminis
  source 1..300: note = Related to NZ_LGTQ01000015.1
MKKFENFILEIGLTKSAIENYVTFSDASYNTFYIPKKKKGEKRVIDCPNANLKAIQRFFLKKYLNKVEVNKRVNGFVPKRGIKRNALFHMKNKYLLTIDIKDFFPSISQKKVFEVLYEIYYDKDFALKMAKLCTYKRSLPQGAPTSPALSNLVFKGIDDEIMKYCNSEMVNYSRYADDLTFSSDNKNSLQYVYKFVSHLLYTNGFNINKKKTRYLSGKGKMSITGVYINSGKPKVSSELKKQLRAELHQYIINGKEINLNQVSGYISFISSIEDDYLKKVESYIEKLKKKKTLMLTLKAE

SEQ ID NO: 2937 - protein, 345 aa, Aliarcobacter butzleri
  source 1..345: note = Related to NZ_CABVRK010000001.1
MNSFRDTYLYNYKDTLDEIISKIKDFLLTETYKKIFKDEDKLQYINHFTFLDILSNTKKFYTKRIIYTNKKERIVFEPSVELYLIQKFILYNYLIQRDSSLSENLTSYRKNYSVKNNAIKHINKRTIIKIDIKNFFPTINRYRIYKCLLNLNIEEKKAYLFSRLLSYQDKLILGTPSSPFLSNLVSRKLDLRIEGYIKAYQKSKVHISYTRYSDDMTFSFNQRINTQKFISFIYQIILDEGFVPNYEKTQIISSNHKQKVTGIIVNRDTISVSKKERDDVEFIIKLWLNYSKDIALQKYNKIFKKNYTNERDFHQILKSKILYIKFINDEQGKKLIRKFEEIKIG

SEQ ID NO: 2938 - protein, 322 aa, unidentified
  source 1..322: note = Related to SAAG01000082.1; note = Candidatus Gracilibacteria bacterium
MHRLKYNYGSENNSLDLLNLFGFTNNELRFFSMSKKRRYKKIIIPKRDGSNRILHAPVYKLKNAQRIILKNILYKKHNDLLIDNITGFIPNKNIKNNANFHVGKKYILKVDIKDFFPSITQDRVYGLLRKEYNLDHSTSMYLSSLCTYNNQLPQGAPTSPMLANLIARFLDYRIIGLLKSYNLNEGLELSYSRYADDLTFSFNKRIDINLFINYVISILIEEGFYPNYKKIHMISSGKQQKVTGLVVNDKVSVGRRYYKKFKSIFYNISKNGFDDELKKWNNINSKKIESVEKFKQVIGGYISFIKDISPDYYEKLKQFNVL

SEQ ID NO: 2939 - protein, 321 aa, Sphingobium yanoikuyae
  source 1..321: note = Related to NZ_CP047218.1
MAQRKKIPQIPAEQSHLYGIKSPHALANRLGWELDKLRDLAKSGGYRIYNHRKTGREIQEPGAALQSLHKQIHKYLARIQAPDYLHSAVKGKSYLSNAQAHVGDIPLIKIDIAKFYQSVPQHKVMHFFRDVMNCATDVAGLLANLICFRGALPTGSSVSPIISFYTYKFLFDDLADLAAGHGLTMTCYVDDITMSGPMASREVLHEARTMIFRAGLRAHKDRSFSPDGPKIVTGVAVSKHGIGLPFGRWQKIRNQIRELERCDDDNQKLAIYQQLISRLYEATQIDPRCRISAEYHHARFRELKRVLAQAASEPVPLKLAA

SEQ ID NO: 2940 - protein, 321 aa, unidentified
  source 1..321: note = Related to SDYH01000014.1; note = Alphaproteobacteria bacterium
MTQRKRNQPIPIEQSHLYGIKSPHALANRLGWELDKLRDLTKSGDYRVYNHKKTGREIQEPGAALQSLHRQIHKYLSRIETPDYLHSTVKGKSYISNAQAHIGEVSLIKIDIAKFYQSVSQHKVMHFFRDVMNCAPDVAGFLANLICFRGALPTGSSVSPIISFYTYKLLFDDLAVLADSHGLTMTCYIDDITMSGKLASRKILHEARRTIFRAGLRAHKDRSFSPNGPKIVTGVAVTTYGIALPFGRWQKIRNQIRELERCSDDNKKLVIYQQLISRLYEATQIDPRCRGSAEYYHAQFKELKRVLALVGHGPIALSMTA

SEQ ID NO: 2941 - protein, 316 aa, Stakelama sediminis
  source 1..316: note = Related to NZ_JACIJI010000005.1
MSTKSPKEKALVRIPIERCHLYKIGSPHALAKRLGWDLNKLDDLAAYGGYKVYKHKYTGRTIEEPGAALQSLHRQLHRYLSRIEVPPYLHSAVKGRSYLSNARAHVGDGRIIKIDIAKFYQSVPQHRVMHFFRDRMKCAPDVSGLLAALICYDGHLATGSAISPLISFYAFESLFDDLANIACKYDLEITCYVDDITMSGKRASFKVLHEVRRTIFRAGLRAHKDHAFAYNSPGIVTGVVVTGQGISLPFERWKKIKNQIRLLEACEIRDDKLEIFPSLVSRLYEAAQIDPACRSKAEYYHAAWRKLKYEKMARAA

SEQ ID NO: 2942 - protein, 325 aa, Sphingomonas sp.
  source 1..325: note = Related to JACYUG010000012.1
MPKAKRKSSQPIPIERCHLYGIRSPHALANRLGWDLNKLDQLAAYGGYKVYPHKQTGRMIQEPGEALQSLHRQIHHYLARVEAPAYLHSAVKGRSYVSNAQAHVGAGGLVKLDIAKFYQSVPQHKVMHFFRDVMHCAPDVAGLLANLICFHGKLATGSAASPIISYYTYKSLFDELKALADCRGLTMTCYVDDITMSGPGAGRAVLHEARILIHRAGLRAHKDCAFQPGAPRLVTGVIVGDMGIDLPFSRWRKISEAVREVERCVDPVQRLEKYPKLVSRLYEAAQINSRCMTRARYHHERWRALKRSLQAAPLNAGGGQPVIAA

SEQ ID NO: 2943 - protein, 323 aa, Sphingomonas sp.
  source 1..323: note = Related to NZ_CP050137.1
MSQGKQAKQPRIPIDRCHLYGIRSPHALAKRLGWELNKLDSLAAYGGYRVYNHKDTGREIQEPGAALQSLHRQLHRYLARIEVPVYLHSAVKGRSYLSNARAHVGDGKLLKIDIAKFYQSVPQHKVMHFFRDVLSCAPDVAGLLANLICYRGVLATGSSISPIISYYAYKSLFDGLAGLAAQHGLVMTCYVDDITMSGPGASRAVLHEARSAIFKAGLRAHKDRSFTGDTVKIVTGVVVGPDGIALPFSRWQKISHAAREIAACSDDAEKLRLYPKLVSRLYEAAQIDSRCRSRAEFHHCQWRDLKRRIAAGALIAAAVDKAA

SEQ ID NO: 2944 - protein, 323 aa, Sphingopyxis sp.
  source 1..323: note = Related to FNWK01000001.1
MSTNRRRTDQRIPIDRCHLYGIRSPHALAKRLGWDLNKLDGLAAYGSYRVFQHKETGRLIQEPGPALQSLHRQLHRYLSRVQMPEYLHSAAKGRSYLTNARSHVGAGALIKVDIAKFYQSVPQHKVMHFFRDEMRCAEDVAGLLANLICFEGKLATGSAISPIISYYSYKNLFDSLANLANKHGLVMTCYVDDITMSGPNASNLVLHEARTMIFRAGLRAHKDRRFPSSAPKVVTGVVVTDQGVELPFSRWQKIRAQIREIEGLGNAADKLRLYPRLVSRLYEAAQIDSQCRARAEYYHAQWRQAKRQVAIGSMADGTEAVAA

SEQ ID NO: 2945 - protein, 320 aa, Acetobacter thailandicus
  source 1..320: note = Related to JAERLA010000016.1
MSKARKKKLPQIPLNQCHLFRILSIHALAKRIGWELDTLNKIAKDGSYRIFKHRETGRQIQEPGPLLQNLHRQLHRYLSRVQTPEYLHSAVKGRSYLTNARAHIGCDNLIKIDIAKFYQSVSQHKVMHFFRDTMQCAPDVAGLLANLICFNGMLATGSSISPIISYFSYKKLFDDIHNIALRENLVMTCYVDDITLSGKNASGKTLHKVRTTIFQYGLRAHKDSQFSEGNPKLVTGVIVGKEDIALPFSRWKKIHLQIREIEGCSDIEQKLRLYPKLLSRLHEAMQIDPKCTALAKKHLTDFRLLKRRGVVKTLPLPRAA

SEQ ID NO: 2946 - protein, 313 aa, Parasphingopyxis lamellibrachiae
  source 1..313: note = Related to QRDP01000004.1
MKTAKKHRPLIPLDRCHLYRIGSPKVLAKRIGWKLDTLEDLSMNAKYRVFRLKRSGRQVEEPPPPLQSLHRQIHGYLSRIETPNYLHSNRKGRSYISNAKPHVGALAMIKIDVKKFFPSVEQHKVMHFFRDDLKCAADVAGLLAALLCKDGKLPTGSSSSPIISYYAYKAMFDDIQSFAAKNHLVMTCYVDDITLSGANATLRQLHEVRKIIMRHGLRAHKAKWFMGLGAKPVTGVMVTKNGIELPHSRWKAIKADLKAIKQCANREEKLEIYPKLVSRLYEASQIDPGCRKLADIHHRLWKEALAGDVQLAA

SEQ ID NO: 2947 - protein, 313 aa, Erythrobacter sp.
  source 1..313: note = Related to NZ_LMAF01000001.1
MSKTKNKTIVPIPLERSHLFRVRSIHLLAKKLGFTVDGLERLANDAKYRIFNLKESGRLVEEPPPVLQALHRRIHRYLAKIEVPEYLHSAVKGRSYITNAKAHVGVGPMVKIDVKKFFPSVPQHRVMQFFRDTMLCAADVAGLLANLLCRNGRLPTGSSASPIISYYSFKAMFDEIEGLCVANQLTMTCYVDDITISGAGANRALLHDVRQIITRNGLASHKAKFFDQSRPKEVTGVIVKGNGIDLPHSRWKAIKESIREVKKAGSDEERLALYPALISRLHEASQIDPSCRPIALHHNQKWRELRRAVVAHS

SEQ ID NO: 2948 - protein, 320 aa, Bradyrhizobium sp.
  source 1..320: note = Related to JACIHD010000001.1
MTRKKARRDLEPEQCWLYAISSPADLAHRLSTPRHKLKASDLSPLARDTGNYRLFQIEDGNGKSRAIQWPKRRLQTLHARVHTLLSRVAVPAYLYSAVRGKSYVDNASAHNPLVPTIKIDVKKFFPSVSRAVIFDFFFQRMRCRRDVAGLLADILTFDAHLPTGGAASPIIAYYSFKPMFDEIHKFALSQGLIMTCYVDDLTLSGVRASKNTLHEIGKIISRSGLKSHKARAFAASQPKVITGVCNTKSGRRVPNKLHLKIKKGFDDLTAAKTPLEINRIAQPLLGRLRAAGQIDPKFRARADTVSANIAASSVQTKTSP

SEQ ID NO: 2949 - protein, 330 aa, Bradyrhizobium canariense
  source 1..330: note = Related to LT629750.1
MTSCELVDPMRKKPRTDLPLSDCWLSAIDSPSTLARRLSTPGHKLCVDDLSSFARDTGNYRLFPIFNEKGKARPIQWPKRRLQGVHARIHKLLSRVAVPKYLHSAVRGKSYISNAAAHDPKMPTIKIDVKKFFPSVSRVVIFNFFAGPLKCRRDVAGLLADILTFDAHLPTGSAASPIIAYYSFKPMFDEIAQFAESLGLTMTCYVDDMALSGPRANKGVLYAIRGIIARHGLKSHKAHTFSGLQPKVVTGVCNTAAGPRVPNKLHLKIKNGFDALAKAQNAVEEGKILRPLLGRMEAAAQIDPAFKARAKTVRAKYSRPKDVGGLEKIE

SEQ ID NO: 2950 - protein, 321 aa, unidentified
  source 1..321: note = Related to nan
MLEISDCWLSAIPSPAILAARLSTDANKLTVATLQELTKDDGNFRVFPLVGNNGKVRIIQEPKRQLQRIHSRVHTLLSRVMAPDYLYSAVKGRSYVGNAQAHDPNHPTVKVDIKNFFPSIPRVAVYNFFHRQLKCRVDVAGILADLLTYDGHLATGSAASPILAYYSYEALFDEVHEFAKARGLKMTCYVDDMALSGPGADKSTLYEVKKIIARHGLRSHKAHAFSSAQPKVITGVCNTVSGPRVPNRLHLKIKNGFDALASASTQSEKLKALNPLIGRLEAAAQIEPIYKARVATLRADYADVLLTARRPVCAEPACVVG

SEQ ID NO: 2951 - protein, 309 aa, Methylosinus sp.
  source 1..309: note = Related to JAHLJF010000013.1
MNKRRTNLKLSDCWLYALASPTDLARRLQTAKHPIKVAELSMLAKDAGNFRLFSQTNAAGKSRQIQEPKRRLQWVHGRIHALLSRVEVPGYLHSAVRGRSYISNAAAHDPSMPTFKVDVKKFFASVPRSAIFNFFVGPMKCRRDVARLLADILTFDAHLPTGSAASPILAFYAFKPMFDEIEQFALAHGLTMTCYVDDMALSGPRANKSTLFEVRKIIARHGLKSHKAHVFGANQPKVLTGVCNTPTGPRVPNKLHMKIKAGFDKLLAATTPDTRSEALRPLLGRLEAAGQIDPGFRARALTVRAAYSK

SEQ ID NO: 2952 - protein, 322 aa, Rhodopseudomonas palustris
  source 1..322: note = Related to NZ_LCZM01000200.1
MTIAGPVKLRRRKRARLDLKLSECGLYALASPAHLAGILSTPGCKFSVEELQGLSRDEGNFRLFDLVSDGGKARRIEWPKRRLQQVQRRIHVLLSRVEVPDYLHSAVRGKSYLTNAAVHSAEMPTVKLDVKKFFVSVPRVAVFNFFATTMKCRPDVAGLLSDLLTFDAHLPTGGAASPIMAYYAFKSLFDEIYAFASSQNVTMTCYVDDMTFSGGAVGKRFLYEVRRIVARHGLKSHKSRMFDARQPKVVTGVCNTTDGARVPNKLHAKIKDGFDKLSKADGSAQKAKILPPLLGRLEAAGQIDPRFKARAVTLRAAHQSGR

SEQ ID NO: 2953 - protein, 322 aa, Ancylobacter defluvii
  source 1..322: note = Related to NZ_JAHBGD010000028.1
MAPKNKASLRIEDCWLFAVASKEDLARRLSTDRQKISVSDLERLSADAGNYRLFSIRQGTKERPVQEPKRELQQIHARIHRLLSRVVVPEYLHSAVKGKSYLTNAREHGHGISIIKIDVKKFFPSVPRFRVFTFFKIVMKCRKDVSGLLADLITFDQRLPTGSSASPIIAYYAFKPMFDEISRFAESAGLKMSCYVDDMTFSGSNANRFNLYEIHKIISKYGLKSHKMKYFVDQEPKIITGVCNTPSGERVPNKLHLKISIGFEELRAAKSHTSAVKLLRPLLGRLDAAGQIDPRFRARALTLRSTFKTKSRISNGAIKGRV

SEQ ID NO: 2954 - protein, 310 aa, Afipia massiliensis
  source 1..310: note = Related to NZ_JACHIJ010000007.1
MRKRRNDLRLDECFLFAIESPRDLARRLSTKSMQFSEADLLGLSAGIIGNYKLFKIDGRPIQEPKRRLQAVHLRVHRLLSKVAVPEYLHSAVRGRSYISNAAAHARDEPVIKIDIKKFFASVPHAAILRFLRTSLRCRSDVAKLLANLLTFEGKIPTGSSASPILAYYAFKPMFDEISALATSLGLTFTCYVDDMTFSGRAATNSTLMQIRTIVARYGLKSHKVRKFSANDPKVITGVCVASEGDRIPNKLHRKIAADFKSLEVGDEGMQREKTLSSLLGRLQAAGRINPVFKARASTLRASASRRRQSI

SEQ ID NO: 2955 - protein, 310 aa, Tardiphaga robiniae
  source 1..310: note = Related to NZ_LVYV01000034.1
MKKIRRDLRLNECFLYAIDSPADLAWRLSSKAMKLDAKDIDFLVRGSANYKFFKIKDRPIQEPKARLQAVHLRVHRLLSRVAVPAYLHSAVKGKSYLSNALAHDASQPLIKVDIKKFFASVPEDAVVRFLRSDCKCRSDVARLFASMLVCNGKIATGSSASPILAYYAFKSMFDQIATLAGEHGLTFTCYVDDMTLSGPTATNAMVIKVRAIIAKFGLKSHKVRRFNASSPKVVTGVCIMPDGIRVPQKLHLAISRNFQERSTETDTKKREKITASLQGRLDAAGRIDAKFKSRADTFRASTKKAQPSVP

SEQ ID NO: 2956 - protein, 319 aa, unidentified
  source 1..319: note = Related to JADFZH010000009.1; note = Magnetococcales bacterium
MKRYALDQSPFFKLKSRQKLSKILDADLNELEVFARNDPVDNYKLFETSGGKPRPVQCPKHRLQVIHRRVCDLLARIDTPDYLHSAIKGHSYLSNAKAHAANVPMVKVDIKKFFPSVTINAVKRFFLKTMECSPDVAALLSKVLTVYGHLATGSSVSPILSYYAHRDMFEEIAHLSAGRGAVMTCYVDDMCFSGETVTRKFLSDVRVIIRSHGLKSHKIHYFSSNMPRIVTGVVVTNSGIKLPNIRHKKIVDGYAQLQAALSDEEKLKLLPSLIGRINEAAQIDPRWTPKAKQLTLEMKRISSIAASSMNPSSRPSSWA

SEQ ID NO: 2957 - protein, 312 aa, unidentified
  source 1..312: note = Related to JADGBZ010000028.1; note = Magnetococcales bacterium
MNRHPLNQSPFFKLRSRKKLANILGLGLKDLEVFAQNEADENYRLFEIRRGGKARPIQWPIPCLQRIHKRVCDLLARIETPNYLHSAIKGRSYLSNAKAHSGDTALVKVDIRKFFPSVTVQSVKSFFLKTMGCSPDVAAVLSKVLTVYGHLPTGSSVSPILSFYAHLDMFGEIEQLARKRGAVMTCYVDDMCFSGRSVTRKFLYEVRLIIHRHGLKTHKIHCFAPGVPRIVTGVVVTGDGMKLPNKRHQAIAEDFAKFQSSLDEKQKLKIFQSLLGRVNEASQIEPRWKNKATSLCQEVNKMLYCGRQNDGC

SEQ ID NO: 2958 - protein, 301 aa, Brucella pecoris
  source 1..301: note = Related to NZ_VEWK01000024.1
MALHALNQSQLYKVMSPADLARRLGILAEDLEELANRTDNYKRFKVGAQKKRHVQEPKDRLKQAHNKVTRWLSRIETPDYLHSAVRGRSYITNAAVHSADSNLVKVDIRSFFQNVTTHAVYLFFAKTMKCRGDVAMLLAKLLTVDGHLPTGSSVSPILSYFAHKPMFDEIAKLASHVDLRFTVYVDDVCLSGEKASRSVLFQVRGIIAKHGLKSHKCHFFPTGVPRVVTGNALTLGGVRLPHVRHLKIKKAFDELDKMAEGPAREKALKALKSRLYEAAQLEPVWGARARSLFGRKAQVTS

SEQ ID NO: 2959 - protein, 316 aa, Rhodospirillum centenum
  source 1..316: note = Related to NC_011420.2
MKNYPIDQSPLYKLHSKRKLENILCTNLDIEKMANYEGKNFKFFYITQGNKKRKVESPIPEIQELHRKIARLLCRIDPPDYLYSATKKRSYLSNAQRHIGRHALIKVDISKFFPSVSRLKVYNFFRFKMKCSPDVSAIIAKLLTVDGHLATGSSASPILSYYANIDMFEELYLLAKNRSATMTCYIDDVCFSGEHVSKKLLYEVQKIIRRHGYVNHKQKARYYSPGEVKLITGVAVTSLGVRLPLRRHRAIRDGYTHIFTAKTDSDRLTQLEKQVGRLFEASQIDPSFKDKAKRASQARANLKRRLLSKAFHPSSP

SEQ ID NO: 2960 - protein, 306 aa, Qipengyuania citrea
  source 1..306: note = Related to NZ_WTYG01000004.1
MNTHKRVPLKGSALFRLTSPRRLAEMLLVPRATLERLVEAGDDNYLVRPDRKSGRIIEEPKPQLKLIHQRFARLLAQIETPDYLHSGVKGRSYITNANAHGADDACVKLDIKKFFPSSSSHHVQRFFEDVLEYPPDVASRAKQLLTHDGHLPTGGNASPILSFWAYKPMFDEIDTLARENDCEFTLYVDDMSITGVFANRKFQQAARKIIARYGLRAHKAKTFSPNQPRVLTGIAKTRRGREVPHRRAKGIAQLEQQEAEAETTADKLRVMPSLIGKLSEAAIVDPSWTARKNAAVQRRRKMKASG

SEQ ID NO: 2961 - protein, 312 aa, Sphingomonas sp.
  source 1..312: note = Related to QFPK01000008.1
MSMSKHKRIALKGSALFRLTSPRRLAEVLLLSRSALERLIVAGDTNYIVRFDQKSGRIIEEPKPQLKLIQKRFARLLSQIETPNYLHSGVKGRSYITNADAHEANQSCVKLDIKKFFPSSNSHHVQRFFEDVLEYPPDVAARAKQLLTYGGHLPTGGNASTILSFWVYKPMFDEIEALSRQHNCKFTLYVDDISITGLFANRRCQQAVRKIVSRYGLRTHKTKAFSAGQPRVLTGVAKTRRGRELPHRRAKGIAELEQLETATDSTAKKMKLLSTLIGKLSEATIIDPLWAGRKEAAVKRRRKLKQEDRIKR

SEQ ID NO: 2962 - protein, 313 aa, Erythrobacter sp.
  source 1..313: note = Related to CP031357.1
MSTHKRVPLKASALFRLTSPRRLANILMVTPTALERLVRWGDENYLVRPLAQVEGKAPRMIEEPKPQLKLIHQRFARLLAQIETPDYLHSGVKGRSYITNANAHTADKACIKLDIKKFFPSSSSHYVQRFFEDVLEYPPDVAARAKQLLTYDGHLPTGGNASTIMSFWAYKPMFDEIAALAVELGCEFTVYVDDMSITGVFANRKCQQAARKIIARYGLKAHKANSFSPGQPRVLTGIAKTRRGREVPHRRAKGIAELEQVEAAASTVEDKMKVLPSLIGKLSEAAIVDPSWTGRKDAAVHRRRRLKVGAGAE

SEQ ID NO: 2963 - protein, 308 aa, Sphingopyxis fribergensis
  source 1..308: note = Related to NZ_CP009122.1
MSTHKRVPLRGSAVFKLTSPRRLAEMLLIPRSTLERLLDFGDSNYLVRHDRKSNRTIEEPKPQLKLVQQRFARLLAQIETPDYLHSGVKGRSYITNANQHGAEQACIKLDVQKFFPSSSSHYVQRFFEETLEYPADVASRARRLLTYDGHLPTGGNASTILSFWAYKPMFDEIDAAAKRLGCEFTLYVDDMSITGKFANRELQREAAKIVALYGLRTHKLKNFSPGQPRVLTGVAKTKRGREVPHRRAKGIADLEQEEASATTAVEKLRLLPSLIGKLSEAAVVDSSWSGRKNAMVLHRRRLKAGISR

SEQ ID NO: 2964 - protein, 321 aa, Sphingomonas sp.
  source 1..321: note = Related to NZ_CP082839.1
MARRCAKRVSLRGSALFKLTSPARLAHILCISPGQLAYLVRNAEANYLVRTDRKTGRLIEEPKALLKQVHARVAKLLQQIETPDYLHSGVRQRSYVTNASQHGAKDSAVKLDIKKFFPSVRAAAVYSFFHELMEYPADVASRMTRLLTIGGHLPTGGNASCILSFWAYKPMFDEIAELAVAKSCAFTLYVDDMTISGRFASRSMQQAARQIVGRHRLRAHKNKVFVPNQPRVVTGVAVTVRGLELPNRRAKAIDDATQVVTHTADGSAKLALLPVLIGRVSEAAEIDPAWNGRKTAAVNLRRTLTGRIATASRPGGGEPPA

SEQ ID NO: 2965 - protein, 312 aa, Sphingomonas sp.
  source 1..312: note = Related to NZ_LARW01000108.1
MKGKPHKRVSLRGSALFKLTSPVRLAQILCIPPAQLDRLLRRGNTNYCVRTDRKTERLIEEPKALLKQVHARVAHLLAQVETPAYLHSGIKKHSYITNAAEHRVEGGAVKLDVQKFFPSVRAAAVCHFFADVMEYPMDVASRMTKLLTINGHLPTGGNASCILSFWAYKNMFDEIAALAAAKGCTFTLYVDDMTITGQFATRAMQKEARAIIGRYRLKAHKTKIFSHRQPRIVTGVAITARGPELPNRRARKIAITMAGVEAAATDSQRLALMPSLIGRVSEAVEVDPLWAGRKAAAVGMRRTIRSRVEKSR

SEQ ID NO: 2966 - protein, 303 aa, Rhodobacter flagellatus
  source 1..303: note = Related to NZ_VMDU01000019.1
MSHDRNQSILYKVTSPQMLADRLLISRGELHALLANADPYKRWIDKKSGRAIQEPRPKLAKVHRRIATLLTRIDTPAYLHSAKKGRSYISNAAAHSVDDGCVKIDVRRFYPSARAQAVYHLFLDRMACDGDVAGMLAKLLTVDGHLPTGSSASPILSYFAYEDLFHELAVLAEASGCKMTVYVDDIVFTGAGATRRLLFEARKAIGKRHLHGHKTKLFRPGQPRIVTGVAVTNNGLRLPNRRQVRIAEDQKLFDDLPLGREKLIVARRLTGRLFEASQIDAGWRVRAEAMAALRDDIQRKIGR

SEQ ID NO: 2967 - protein, 302 aa, Poseidonocella pacifica
  source 1..302: note = Related to NZ_FOJU01000001.1
MSYPRNQSIFYKITSPQMLADRLRVTLDELNELCAASDNYKRWTDKKTGRPIQEPKPKLDKIHKRVAALLAKMETPDYLHSAIKGKSYITNASGHSVGTGCVKIDVRKFYPSVRSQAVHHFFLDRMLCTGDVAGILTKLLTVDGHLPTGSSSSPILSYFAYEDMFEALAALAKANGCIMTVYVDDVVFTGTGATRGLLYAARKVFASYRLYGHKTKLFRPGQPRIITGVAVTKEGMKLPNKRQRGIADDLATFDSLPNGREKLVVARRLTGRLFEASQIDPAWRSKAEAMAAERDSLQRIIS

SEQ ID NO: 2968 - protein, 308 aa, unidentified
  source 1..308: note = Related to RFJA01000102.1; note = Alphaproteobacteria bacterium
MPERRSYPRDQSRLYKVKSPAQLADIFFLQPHELDLLLDANENYIRWTDKKTGREIQRPKPLLEKVHRRAGMLLSRIETPDFLHSAIKGRSYISNAQRHMPDEPTAKIDVRKFYPSARAQAVFHFFRDRMLCDGDVAGMLARLLTVDGHLATGSSVSPILSFFAYEDMFTDIEALAIERGCEMTCYVDDMVFTGPGATRRLIYDIIQIVRQYRLWGHKTKLFKPGQPKVITGVAVIRVGQRLPNRRQKTIADEMDVLKSTRDDAERLAIIRRLLGRLYEAAQVDSSWYVTADAMADEKRGLERRSARA

SEQ ID NO: 2969 - protein, 342 aa, Variibacter gotjawalensis
  source 1..342: note = Related to AP014946.1
MNMPKAKSSKKLKLEECFLHSVASPVDLARRLLIDLPDLERLANADHRFKQWTTKKGRKIQEPVRELQVVHGRVMRLLSAVEPPLYLYSAVAGRSYITNARQHVGAYPTVKLDLQKFFPSVKRAAIRNFFVREMKCAGDVASILAKILTCNGALPTGSRASSIMSFYAFKSMFDELGDLAIANNCTMTVYVDDIAISGEGARPRLLVKARRIIARYGLKSHKTKFFQALQARIITGVVVDPAGIALPHSRRVQIERGLAVLAAECDPKWKLEILTRLVSRVYEAAQIAPAEFLALATELSKARAELLKKASELAVASVAPDRRSHLRLVHSDASTSDRVASP

SEQ ID NO: 2970 - protein, 338 aa, Alcaligenes faecalis
  source 1..338: note = Related to MTBI01000002.1
MTHYRKSYAISNSPFFKLSSKKKLSELLGVSLHTITDIRQSGLHRQYRIFKDKKTRRLITEPVGELLRVHKKILKLFKRIQPPAYLHSAIKKRSYKTNAEAHLQNRRTLKIDLKKFFPSIRFHHVYGFFLKNMQCSSDIATILANLCTADTKSHGTHLPTGSCISPLLSYWINQNLFDQLHDITSQEGCHMTLYVDDITISGEKATPEFLNKIAIAINSHGYKYHKVACYGNGVATITGLIVNEGKLELPHVRAQKIRRLEKELMEAENDIDRKRILNSLMGRLTEAEQIVPAYTAKKNEIMKLFKNIWGDIVQQRAQRAQLKRRIKKQPVLADIAGG

SEQ ID NO: 2971 - protein, 337 aa, Methylomicrobium sp.
  source 1..337: note = Related to JAERVK010000007.1
MMTSRRSKTPHRYEIEFSPLYRLSNKKKLAALLNVDVSIISSPDKSKLCSQYRIFVDKKTKRFITEPIGDLLAIHQRLLKFFSRIAPPEYIHSAIKKRSYLTNAEAHRKSSNILKIDIKKFFPSIKFQCIYGFFLNTLKCSSDIATILAKICTVQTNNYGTHLPTGSCISPILSFLANQQLFDSIKIICEKEKCKLTLYVDDITISGENASPALLTLIAMEIFKHGYGYHKIKIYKDQPAIITGLVVYNKKVCLPHERAKKIRELIDALKISVGPLRQKMLASLVGRLSEAEHIESQYKAKRVSIISQYRKEWDEVVANRNSKCKVSRNKKLAKNNT

SEQ ID NO: 2972 - protein, 333 aa, Herminiimonas sp.
  source 1..333: note = Related to QAJP01000003.1
MTKNPTRGSKKYDLESSPLYRLSNKRKLADLLGVEPSKILGLKKSAICSQYKIFKDKQTSRFITEPHSDLLLVHRRLLDLLTRIQCPPYLHSARKKHSYKTNAEAHQHSSAVLKIDIRKFFPSVKFHYVYDFFKNEMSCAPDISTILAKLCTVTTLKFGIHLPTGSCISPLLSFLVNKVMFDEIDALCRAHDCKFTLYVDDMTISGDKASRALLTSIAMIIHRFGYGYHKIKTYHQVPTVITGLVVYKGMLRLPHRRAKLVRVASQALAQAVSGSMRKKLLGSLIGRLSEAEQINPLYKVRKEVLLTRYKSEWQTIMDERVEKSLKVRGTKSK

SEQ ID NO: 2973 - protein, 341 aa, Thiobacillus sp.
  source 1..341: note = Related to JAIBFA010000065.1
MKITKAKEPQRYEIERSPLYKLSSKRKLSELLEVELTTLSSLEKSGLTSQYRIFKDRKTRRVITEPIEQLAVIHKQLLKLFSRIAPPSYVHSAIKKRSYKTNAEQHKDPANVLKIDVKKFFPSIKFSHIHDFFLNGLCCSKDIAVILSKLCTVQTVKHGVHLPTGSCISPILSFLANRRMFDAVKKICDREGCVFTVYVDDITVSGVNATRALLSEITTVIHKHGYQYHKIKTYHGQPALVTGLVVADGRLRLPHERAKKIRELSKALKALRASKSTPLRSKMLASLVGRLSEAEHINKAYKPLRQKILSSYSAEWSGVIAYRLRKSRTKRLMRNCVITAS

SEQ ID NO: 2974 - protein, 353 aa, unidentified
  source 1..353: note = Related to NZ_CP041335.1; note = Proposed Chitinolyticbacter meiyuanensis
MTQKKKTGTPQQHRYTIDRSPLFGLSSKKRLSELLGVELRLIRDVEKAGLTRQYKIFVDRKSRRFICQPVDELEKIHRRLLKYLIRIAPPSYVHSAIKSRSYRSNANAHLLNGPVLKIDIKKFFPSIKYDRIHSFFFDTFKCAPDIATILAKLCVVCSKNHGVHIPTGSCLSPAISYLANIKMFDRIAEICAKAGCRFTLYVDDITISGAKANHQLLGEVASVIFQRGYKYHKTNVQQSGHALITGLVVTPQGLRLPFKRVKKIRDLSETLFAASVLNLAQARKREILASLVGCLSEAEQIESRYKLIRARIVEEHCDTWNEIVKNRTKRAALKRQQATRAVIPPAMKNCTSK

SEQ ID NO: 2975 - protein, 330 aa, Duganella sp.
  source 1..330: note = Related to JACEZS010000033.1
MTSSLRKPKQYELEKSPFFQLKSKKKLAELLNVSLPSLSRTQIEKLASCYRIFVDRESRRFITEPVGELQVIHQRLLQYFSRIAPPDYLHSARKKRSYKSNAEQHIGNTNVLKIDIKKFFPSVQFSYIHDFFSNQLQCAPDIAAILARLCTVKTSRHGVHLPTGSCISPVLSFLANKPMFDRVAALCASQRCTFSLYVDDITISGAGATHALLTSIAVEINNAGYGFHKIKSYFSEPAVVTGLIVTHDRLCLPHERQKKIREVAEALRISIDTGIRERLLASLVGRLSEAEQIDTKYGNYRKIVLARYSADWKRVVAHRLARMKKSAKRP

SEQ ID NO: 2976 - protein, 355 aa, Janthinobacterium sp.
  source 1..355: note = Related to PGES01000001.1
MKPSPRKPKQYELEQSPLYKLSSKRKLAELLQVDLVTLGVTELAKLTSNYRIFVHCETGRFITEPVGTLIPVHKRLLSLFSRVVPRDYIHSATKKRSYKTNAEKHIGNQNILKIDIKKFFPSVRFCYVHNFFANTLKCSPDLATILAKLCTVRTKKHGVHLPTGSCISPILSFLANRDLFDRIEKLCIEADCTFTLYVDDVTISGPNATRALLTRIAMEIHKNGYGYHKIKTYHAVPAMVTGLIVTEGRLILPHARCQKIRQYAEALECSVGGQIREKLLASLVGRLSEAEQIDAKYRTARQDVLKRYAVDWGRVMALRIASAKHRARKTASVNKPSTTLLDQQGDTVRSITASS

SEQ ID NO: 2977 - protein, 344 aa, Paraburkholderia domus
  source 1..344: note = Related to NZ_CAJNAZ010000001.1
MANNPTHKRKQYIIAKSPFFRLHSRQALAELLGITLPQMEALASSPSDALYRMYDDEASGRYITAPLPELQRIHKRIARLFSRVIPPAYLQSATKKRSYKTNAAMHRKNLRIAKVDIRQYYPSITFGAVFNFFKKKMECSVDVSTVLTKICTVSARGRTHLPTGSSLSPILSYWVHSDLFNRIKLICDSAACVMSLYVDDITVSGTNATASLISKIEAEIAKAGLTSHKIKVFDRVPATVTGVIVHKGRLALPHERAKDIRLLRGIMAKLPLAEAEADATLSRLVGKLNEAEQFVTGYGAIKKNVLSEHASAWNRITAARVAKSKAAARRKRLKAAATRISKSS

SEQ ID NO: 2978 - protein, 341 aa, Burkholderia pseudomallei
  source 1..341: note = Related to KN150957.1
MATILTKRNQYAITKSPFFRLHSRQTLAKLLGITLLEMETLASRPSNALYRMYDDSASKRHITAPLPELQRIHKRIARLFSRIIPPAYLQSATKKRSYKTNAAMHRDGQKIAKVDIRQYYPSITFGAIFSFFKNRMQCSPDVSTVLTKLCTVSTKGRTHLPTGSSLSPILSYWVHSELFDRIKSICDDLGCKMSLYVDDITISGKNADAALVTKIEREIEKTGLTAHKIKIFDGIPATVTGVVVHKGRLALPHDRAKDIRMLREALNKLPEKDADSTLSKLIGKLNEAEQFVAGYGAIKKNILSDHAPVWTRITTVRVEKSKAAARRKRLKAIGTSGSKTS

SEQ ID NO: 2979 - protein, 339 aa, unidentified
  source 1..339: note = Related to NC_015265.1; note = Burkholderia phage KS5
MAKSQTTRKQYTKNRSPFFRLESRRKLATLLATTLKSLEELAGLPSNQRYKMFFEQESGRYITEPIGELRRVHKRIAKLLCRVSPPDFLQSATKGRSYKTNAEAHIGGQNIIKLDIKEYYPSVTFGAIYHFFLNNLKCSQDVATLLTKICTVSACGRTHLPTGSSLSPILSYWAYSHLFDEINSLCAAKGCTMTLYIDDITVSGPNADKLLLAEIRNRIDATGLVAHKFKASQGMPIKVTGVIVLRDGITLPHDRARDIRKLQAELATTSPEEVDPTLSKLVGKLNEAQQFVATYGEIKRAVLRQHSNAWNRIVTERATQSRRAMLRRRRKTAVKKASG

SEQ ID NO: 2980 - protein, 309 aa, Thiomonas delicata
  source 1..309: note = Related to NZ_LT592171.1
MSEQPKRYPIDQSPLYSLCGKGKFETVIGVSWDAVPELCSSSNYRVWTNENGREIQAPFKGLAATHRKIGLLLSRIDVPGYVYSQKGRSYADNARQHLGHHPVIKTDIQGFYPSISRARVYGMFRQDFHCAADVAARLADICSYQGLHLPTGSPLSGRVAFLAARHLFDDIAKLASASDCTFTVYVDDITLSGANATKRLLAEVRRLIEKHGLRSKRGKSKSFSPSSPKSVTGVILVGEDVRLPNSRHQKIWETRRALLTATGEERLKLERQLKGREQEANQVLCSPRNIEPPRVSWRLVGLSHAGMAC

SEQ ID NO: 2981 - protein, 300 aa, Ideonella sp.
  source 1..300: note = Related to JAGQDF010000002.1
MSGFRNAMPSSAPRKAYALNQSPLFRLRGKGRFEDVIGVKWESVTDLLAAESFRVWKGPKDREIQAPIHWMAAVHKVIADLLARIEVPDYVFSQKGRSYADNARQHLGNHPVIKTDINKFYPSVTRAMVFRMFVRDFECAADVADRLADICCYRQLHLPTGSPLSGRVAFFAARGLFEDIAKLAVASGCKLTIYVDDIALSGPNATKRLLGEVRMLIARHGLKSKGKKSATFAAGAPKSVTGAVIVGEELRLPNERHRKLHETRSAYVAADGDERAKLGRQLRGRQQEAAQILRPVARAT

SEQ ID NO: 2982 - protein, 311 aa, Burkholderia gladioli
  source 1..311: note = Related to NZ_CADEWJ010000013.1
MKSKGTPERYPLHQSPLYRLKGKGQFEKILGVEWSAVNRLLAAGNYRVWKNDKGREIQQPLGWLAHVHGRIGKLLSRIELPDYLYSQKGRSYADNAREHVGGVPLIKTDIHKFYPSTTRQMVYRMFVVDFMCAEDIAHCLADICCYRQRHLPTGSALSGRIAFFAAKHMFDDIADLANDEQCRMTAYVDDVTISGPAATKKLLGEVRKVVSKYGYKTKQRKSKTYAATSVKVVTGAVVVGRELRLPNERHRKIWQTKQELLRCEREEKAPLMRALRGRLQEASQILNNLSGDLHNSDLMLGRSLSNRDGSS

SEQ ID NO: 2983 - protein, 306 aa, Methylotenera versatilis
  source 1..306: note = Related to NC_014207.1
MSESLSRLMPKQYAINQSPLYKLVGLRQLELCLGIDLERLDKLLKDGSYRTWVNDNDRAIQHPLGWLAQVHSKIAHYLAKIETPDYVYHKKGRSHVKNASEHTGYHLVAKTDISNYYPSITRAMLKSMFVKKFKCALDVAGILADICTYQRTHLATGSGVSGYLAFWASKDLFDAVYELSRARGCVFTLYVDDLTISGNAASKKLLTEVRAIVKRNGLKTKETKSKTFAAHATKMVTGVVLKGNESLLSNKRHKEIADNRIAIANTGNANIKATLQKSLKGRLMAAKQIIDSNEIKTVTSSDLIYS

SEQ ID NO: 2984 - protein, 304 aa, Variovorax sp.
  source 1..304: note = Related to FOLP01000049.1
MQSKKTPDRPYPLASSPLYGIRGKGQFERAIGLTWDQTDRLLHRRYYRVWTTKKDREIQQPLYELEKLHARIANLLARIEMPSYVFSRRGRSYVENADRHKGLSPLIKTDLTKFYPSTSWPMVFRLLVSRFNCAKDVAHRLADLCCYQQKHLPTGSALSGYLAFFAAQPMFDRIADILGRHGCEMTLFVDDLTASGAGATKHALEEVRAEIRHHGFATSEAKSKVYRAAAPKLVTGAIVTPTRLMLPNKQHLKIWAARRSLPVLPKIMRAAALRALRGRIQQAHQVLNYSGPTFELAAPVEPSG

SEQ ID NO: 2985 - protein, 305 aa, Pandoraea bronchicola
  source 1..305: note = Related to CABPST010000009.1
MSARPTYPLDQSPLFRLPSKRRAAEVLGIDLHQIEQLVGERNYRVFVNAKGRTIQHPVGELAGVHKRIASLLGRLDVPSYVRSVKGESYVSNAGSHVGNGPLIKTDIAQFYPGTNFSAVYGFFRRDMGCAPDVAHLLARLCCFRQRHLPTGSYLSGPLAFFAHRAMFDQIYCLAQDRGCVMTCYVDDIVISGPGASKELLYRVRGLIRAAGRTSKDDKSKTFPAHKPKTVTGVIVTSDALRLPNSRHKQIHEARAAIRAAGGDGEQMSLRASLRGRLQEAGQIANWNVRNPGGGVLVRGVVPDVS

SEQ ID NO: 2986 - protein, 341 aa, Legionella longbeachae
  source 1..341: note = Related to NZ_CP045306.1
MVKQIDRYPLERSPLYNAKSLKKISCLLSLSSLKVNKNDRSKPMLQKLYKLTPTDLDNFAAQQNYTIKELIDKKGKSRSTEIPAIDLKWLHYRLEHLLKKIEPPPYLFSAIKGRSCKDNARMHATNTQLFKIDIKTFYPNINFGKVYNFYRHILHCEHHIATILTKISTYNGHLPTGSPLSPILSFYACKPMFDEIYQLALEHNCVMTLYVDDICVSGDKATKALLWKIKQIIHRYGLRYHKVKFYFQKQPKTVTGVIVTENSIKLPNRRHQAITERITYIQSPSITAKEKRQANNSLLGQLNEAMQLEPKLAKTKALLIQQGVLKPHMSLPRSNSKRKTK

SEQ ID NO: 2987 - protein, 317 aa, Pseudodesulfovibrio indicus
  source 1..317: note = Related to NZ_SOBK01000001.1
MTSKYSLSQSPLFKLKSKKKLADLLGQSLGDLQSLAKSNDNYNVYTLSPKSKLDHPYFLRKERQVQEVRPHLKNVHERILNLLKRVQTPDYLHSATKGKSYRSNAEAHLSKDVIYTVDIKSFYESVTFGRIYHFFHSTLKCSPDISHLLTRLCAYKRNLPTGSCISPLLSFWTNVTMFQELDLFSKTNGLTMTLYVDDLTFSGTDLPKKTCFKIDKIIASYGYKPHKQQLYINKKAKIVTGLALCGARLDIPNKRRGKIRVLIEAIARERDAEKKEKLCNSLVGMTYEAAQFNRGYARLIAKQIRKKCPCTRQQINL

SEQ ID NO: 2988 - protein, 317 aa, Pseudodesulfovibrio sp.
  source 1..317: note = Related to NZ_CP051216.1
MKTKYSLSQSPFYKLSTKKKLAQLLGQPLADLQALAKSNGNYNVYTLLPKSKLSHPYFVKKERQVQEVRPHLKTVHTRILNLLKRIKTPTYLHSATKGKSYKTNAESHLNRNALYKVDIKSFYESISFGRIYHFFHEIMKCNEDVAHLLTRLCAYQRNLPTGSCISPLLSYWTNVTMFDDLYIFSRAHGLTMTLYVDDLTFSGNEISKRTCFEIDKIIAGYGYKPHKQKQYSTKKTKIVTGLALCNDRLDIPNKRRGKIRVLLEAISQEKDAAKKEKLCNSLVGMTYEAAQFNLRYAQIIAKKVRKKCPCARQHITI

SEQ ID NO: 2989 - protein, 321 aa, Cupidesulfovibrio termitidis
  source 1..321: note = Related to NZ_KI632512.1
MSRDRYAIDQSPLFKLKTKKKLATLLDSSVRELQALSVSSDSYRVFDLPAESLVQHPLFARKSRKIQQLKPELDAIHRTLHKYLSRINVPDYLHSAVKCKSYATNAKTHSGCLYLYRVDIKKFYESVNWRTVYRFFYKTLDCAPDVSALLTNICCYEDKLPTGSCLSPILSFFVNQEMFDELYEYASQRDLTMTAYVDDIVFSGREFHRINAHSIRGIINSYGYECHKERICPPRKSKIVTGLSVTRTGVAIPHKRMAKARVLLQELAKRMRQSHKEKLCASLTGMITEMSQFDRAKAKYLATLGKKYCRTIQNIHFKLCK

SEQ ID NO: 2990 - protein, 301 aa, unidentified
  source 1..301: note = Related to PFXG01000051.1; note = Zetaproteobacteria bacterium CG_4_9_14_3_um_filter_49_83
MQKKRQGNYPLNQSPLYKLCNKRNLAAEFNLTLRELDSLLKRQNNYRAFFLTQGEKKRPVEAPKPIIERVHRRLFQLLTRITPPEYLHSGVRGRSYVSNAEQHRKNPVLYKLDIVKFYPSTKQWHAFEFFRSTMKCSRDVAGLLAKIVTVDGHLPTGSCLSQIMAFYAHFDMFEALYGLATSYNLVMTCYVDDIVFSGNKIPKSFQLEAKKIIQSSGLLSHPRKEKLFFGEKPRIVTGVVISQSQLKIPNRQHLMIKEALFELPTLVADSPEREKLYRQVVGRIVSASQIEPKFFKHKKVK

SEQ ID NO: 2991 - protein, 307 aa, unidentified
  source 1..307: note = Related to JAFLCR010000159.1; note = Alphaproteobacteria bacterium
MKKEEKKRGNYALNQSPLFKLRSQRRLAQLLRTPLNDIYGLLNTGNNYRVFPQGNRTCHDPKPKMKGIHKRLQILLNRIAPPEYLHSATKGRSYVTNAAAHLGNDVLHKLDIRKFFDSTTYKHVHDFFKNTMQCSADVAALLSRITTYDDRLPTGSPISPILAYFAHKSLFDQINQEATATNVMMTCYVDDLSFSGSTVPKAVLRKAKKGIIQRGLEYHKEKRFQKGDTKIVTGVALRDEQMLLPNKRHKKIHEEKQRSLEIDDAKKKREIIHKLISQTGEAARIEPSQFEPLKQALMQVRRNLPKP

SEQ ID NO: 2992 - protein, 355 aa, Pseudoxanthomonas sp.
  source 1..355: note = Related to JACVAG010000005.1
MAKTLKLHESPLYRLTSKKKLAALFGVKVADIKFLRKLDGNYRVWPLKQKHQDVLAGMPVSDKVRMVQQPKPTLDAFQRRLAKFLGAIEKPDYVYSATKKRSYLENALVHRHSQPALKVDIRSFYPSVKRRAVKSFFEEQLGCAEDVAHVLSELCCHEGKLPTGSALSPVLSYFSCAPMFARIAALADAKGLRFTLYVDDMVFSGTGLDDKFLAQVLNELNREGYSGHKVRFYKARRPKVITGAVVWPSRVDVPHKRRWKMRLYERALKVAKPEDKAILGRALLGQYRESSRINPSFKVAASRLQKFMDDMGGKTKAAKPRKRPRGRSSYSLFLSRISRLRAEVAAVRTVAGSAP

SEQ ID NO: 2993 - protein, 358 aa, unidentified
  source 1..358: note = Related to NZ_CBTJ020000001.1; note = Candidatus Competibacter denitrificans Run_A_D11
MVKNSGYSIDQSPLFRLSSKKKLAGLLGVSVKYLHSILTLDNYRIWEAPQKYQDILAGFPPPSKTRKIQEPKQLLLRLHKKLSIFLSRIKKPDFVYSATKGRSYVDNAREHMNFGRAIKIDIKDFYPSVRRKLVRDFFINDMQCAPDIAYVLSLLCCVKDSLPTGSPLSPVLSYFACSRLFCKIAHMAAVKNLKFTLYVDDMVFSGANATRSFCYQVVKELAYNGFIGHKITRFSSRQVKVITGVAVWPHKIGIPHKRQKRIRFFERAFKLNNNPDEIKILGGTLIGQYREAERLQPGSSMRARPIQERLNLINLQCVSVSPVTKKRRRRRLSSKLSKGIIDTLQTQKNKKKNDISSE

SEQ ID NO: 2994 - protein, 354 aa, unidentified
  source 1..354: note = Related to JADKCY010000002.1; note = Xanthomonadales bacterium
MMHSLCYPLDQSPLYMAGSKVRLCELLGITTKDLRLLLALENYREWTAKQKLADKLANLPAKSRNIEEPKPLLRLLHKRIALLLDKIEKPDFLYSARKGCSYFSNALQHQRSEGAVRVDIKSFYPSVRQRMVKEFFESQMRMPADVAHTLAKLCCHDGKLPTGSPLSPILSYFACSPFFSRVAAIADRLGLQFTLYVDDMVFSGKGANRALADQIKRELAGVALIGHKVSYFPAGGAKVITGAAVFPDRIEVPFKRQRRIRKFEEAFAKTTNVATRGAGTPWAAWGPGAGRPGPGPRARPVEVRLAALEARTPEIHGKANAKRRKKPVGKSIMREIARKAAVLREHRLEADVCS

SEQ ID NO: 2995 - protein, 313 aa, Paenibacillus dendritiformis
  source 1..313: note = Related to NZ_LDIG01000020.1
MVEPRTYPLQQSPLYRLTSKKRLALLLGISASELKLLCDLQDYNFKRWELGQRERDKLIGLPAKAKKRSIQQPKTALHAVHKRIALLLGRIEKPAFVYSATKRRSYVDNAIQHQRDEPCVKVDVKEFYRHVKFGRVRRFFLENLQCADDVAHVLAILCCVDGALATGSAVSPVLSYFACASMFAEIEDFAQRRRLVFTLYVDDMVFSGAAANRAFADGVRYLLKGKGFVGHKVTCYRAHDVKVVTGVAVRAGFVDLPFSRQGRIRRTEVAFAKSTDPNELRILGRALLGQYREAERIRPGIKAKAAPVEARLR

SEQ ID NO: 2996 - protein, 372 aa, unidentified
  source 1..372: note = Related to SCUI01000013.1; note = Xanthomonadaceae bacterium
MANARAYPLTSSPFYRLASKQKLAAILGVSLRDLRLLLKQPDNYRLWDTRRRRRDELVGIPHKARAIQQPKPLLAIIHKRLAILIGRIEKPDYVYSATKARSYFDNARPHAIGEPTVKIDIKNFYSNVTRRFVRDFFERRLQCSPDVAHVLTELCCITTASSSALPTGSAVSPVLSFFACSEMFRRIAEIAKDHGLIFTLYVDDMVFSGSKANRHFTSKVVHELAKNGFVGHKITHFRGDATKVVTGVAVSAGRVDLPFRRQRKIRQFEEAFWAATNPEDISLLGATLLGQYREAERIKPGTKLRALAVAARLEKLGLSNGLPPSVKKRRGYPGKRLDAKRFDRLRSAVSLNPSTTSGGPETLVNTGVVMAA

SEQ ID NO: 2997 - protein, 368 aa, Xanthomonas citri
  source 1..368: note = Related to LN647463.1
MKAPKRYPYHQSPLYALTSKRRLADILGVPLKDLVFLASLKDHNYQVWPLKQKRRDQLAGIKPPEKSRFVQQPMPLMRLLHDRIASLLGKIEKPQFVFSATKGRSYLDNALQHRDNIAQPAFKVDIRSFYPAVKSQWVRRFFEVDMKCAPDVARFLARLCCVNGALPTGSPISPTLSYFACAPIFRWMAEFAESNGLVFTLYVDDMFFSGAKASKDLSKLVLGHLAANGFRGHKVAHFRAGQPRVITGAAISQDGVSIPFKRQMRIRLYERAFASTNDPEAIQTLGKALLGQYREGERLQRGSRERAKPIQDRMDAINAVRFEELTQVQPKRKKRGPLSTAAMKNHVQKLRERRSGQLHPVTDTPQWQ

SEQ ID NO: 2998 - protein, 322 aa, Lautropia mirabilis
  source 1..322: note = Related to NZ_LR134378.1
MISKKQYNKDQSPLYSIKSKRRLARILETDAKTIIRLASDTSKHYKLWETKQKPRDKICNITHTPRKIQEPKEDLLKIHKKIAKFLSRIKKEEFVYSATKGRSYLNNAEFHKDRIHEPSFKVDIEKFYPSVKIKKVHNFFQNEMKCAPDIARLLAKICCIHGALPTGSPISPTLSYFACKDMFSWIGNLARSNNLCFSLYVDDMFFSGEAASQELRNKVITHLKKNDLRGHKISHFSANKTRVITGVAITPKGLRITNKRHKKIRIYSNAFFRSKSPDNIQTLGKTLLGQYREASRVEPHLLQRTGKVQSRMDLFKDKSQNM

SEQ ID NO: 2999 - protein, 376 aa, Stenotrophomonas sp.
  source 1..376: note = Related to DQEG01000261.1
MRPLGRFLFMLQGEQEMVRKKEEKRYSITSSPLYGLSSKKKFAELLKIDLADLRFLAKFGDSNFKVWSTAQKLVDEVAGLPAKKSRVVQQPKIVLSVVHRRIAEYLSRIERPEFLHSATKGRSYLTNAMVHAWNMPGCKIDIKEFYPSVKRNLVKSFFENRLKCTHDVASFAADLCTYNGALPTGSAVSPILSFFACLEMFERIDLLARQRDLRFSLYVDDMFFSGDKADKGMAKSVVDLLSRHGFVGHKVVCFSANETKLITGVAINGCETSIPNARQNKMRLFSRALRRERNRERAILLAQALVGQFREAERLQPGTKARALPFERRLIKLKGAEKKTVSVVRRRRRRSRPKVLTSTLLRAIALMRAAPKIVNV

SEQ ID NO: 3000 - protein, 317 aa, Thiocystis violascens
  source 1..317: note = Related to NC_018012.1
MPNGYSINQSRLFKLANKRKLAGILGITIKELSLCANTANNYRLWSTKSKYPSKLQILSHKPRDIQEPIGLLRRIQDRLSDLLVRIETPEYLLSAKKGGSYVKNASLHMGFGQVIRIDIKGFYKNASEVFVFRFFWHDLQCSQDIARILTDLICWNGCLPTGSPVSPIISFFAYRPMFDELHALALAINAVMTVWIDDIVFSGDNVNGTLIPKAKIVIKKSGLQGHKISVFNRGQASVVTGVAITADGQLHIPNKRYRKIRALENEYCAASNQADRAIYGKALIGQYFEGSQLDPGLAKKAKVLQADMKCKNSNHPR

SEQ ID NO: 3001 - protein, 311 aa, Lysobacter antibioticus
  source 1..311: note = Related to NZ_CP011129.1
MSKVLRKSYPAAQSPLFRLRSKARLAELLDETPRRVRELITDKNYCEWFTKAKYPDSTHPALVHKPRAIQQPLGALDMAQRRLNSLLSRIELPDYLHSARKGRSYRTNAAAHSSAGRAIKVDIRQFYRSINDSYIHAFFRDVMECSPDVTHILTELASFERYLPTGSSLSPIVSFFAYWPMFDKLNSVASSVGAQMTVYVDDVVISGPGVSGSLIPICKRIMKDHGLRGHKVAYYHSGKTRVVTGVAVSPRGLSIPNKRLMKIRALRQEMDAAVDPATKALYKQAVLGQLREGSPLDPSFRTYSQAIERMA

SEQ ID NO: 3002 - protein, 317 aa, Variovorax paradoxus
  source 1..317: note = Related to NZ_CP091716.1
MSTAKGYQLDQSPLYKLESKRKLAKLLFWDLSRLQALANRTDNYRSKKTMHANKERSLEVPKPALENVQRRIYQLLDRIEKPDYLHSGRKQRSYITNAQVHAGAVWLIKLDIKKFYAAVSSARVYRFFQDVMRCSPDVASLLAKLCTARGHLAIGSRVSQLLAFFSAKPMFDELHARALEYSIKDTYYVDDLTWSGTRATAGFLWEVKKIVHRHGFEYHRARLYAPNNPKLVTGVQIIGDRIAVPPYRDRELWDAIRTLKKPSACTTLKVAETLLSKAAAYAQVEDRFQLQVRQLRALRASMKLTASTDHIDGPQGV

SEQ ID NO: 3003 - protein, 304 aa, Variovorax gossypii
  source 1..304: note = Related to NZ_RXOE01000007.1
MPASRSYPINESPLYKIRSRRRLAAVLFSNLPKLEALANQTDNYRRFDVVYAGKKRSVELPKPALARLHRRIFQILNCIEKPDYLHSGCKQRSYITNARVHVGLVPLVKLDIKKFYASVSSAHVYRFFNSGLQCSPDVSGLLARLCTANGHLPIGSSASQLLAFFSAKPMFDELHRHSVRHEVRDSYYVDDLTWSGVNATPRFLWAAKQIVHRHGFRYHSDRVYTASQPKIVTGVLIAGDRIAVQPRRELELWNTINTLCMQDPAKRLETINSLIGKAVANAQIDERFLARVRQLRAYKIKMQL

SEQ ID NO: 3004 - protein, 313 aa, Variovorax paradoxus
  source 1..313: note = Related to NZ_KB905036.1
MKSYALNQCPLFKMASRRKLASLLGFDAGVLQTLANRTTNYLCFDIAQGSKKRRVEVPKRALERVHRRLFALLERIEKPDYLHSGRKKRSYITNAQVHTGLAPLVKLDLKKFYPSVASSRIYRFFNEVLLCSCDVAAILTKLCTVDGHLPTGSCISQLLAFFAAKPMFDELHEYSFKLGNRDSCYVDDLTWSGSNATPAFLWAAKQIVHRHGFKYHKDLVYRADQQKVVTGVLISGGELTVQRSREHELWRSIHALGGQDPAKRLKAIDSLIGKVIANGQIENRFLLRVQGLRARRVMLMGSRAEVVSSLQRG

SEQ ID NO: 3005 - protein, 322 aa, Rhodoferax sp.
  source 1..322: note = Related to JAGPDY010000016.1
MAIRKKSYAIHQCPLFKIASRKKLAALLGFDLSVLEGLSTATNNFRTFEIKQGIKLRKVEVPKRRLELVHRKVFSLLERIEKPEYLHSGIKGRSYITNAKVHVGPVPLVKLDLKKFYPSIDGARVYRFFQQALQCSPDVSGLLTKLCTIDGHVPTGSCVSQLLAYFSAKPMFDELHMLSSQWGLRDTCYVDDLTWSGERATPAFLWNAKKVVYRHGFKYHKDHVYTADEQKLVTGVMIDGDRIAVLPSRELKLWKDINALGMSEPVERLAAVNSLIGSVVANGQIEPRFLQRLRRLRDTRISLIRQLEVNFSRQPSLLPSDR

SEQ ID NO: 3006 - protein, 310 aa, Acidovorax sp.
  source 1..310: note = Related to NZ_NIAZ01000004.1
MATRKTYALDQCPLYKIASRKRLAQDVFNVDLPFLERLAANEGNFRVFTIKQGDKDRQVEVPKVVLERIHRRLFNLLERIEKPDYLHSGVRGRSYISNAKVHVGAVPLVKLDLKKFYPSVDGARVSRFFTGTMRCSPDVAALLTRLCTFENHVPTGSCVSQLLAFFAAKPLFDELHALAESAGLRDSCYVDDLTWSGHGATPAFLWAAKQVVHRHGFAHHKDRCFAAGDRKLVTGVMLEGNRIAVLPSKEFDLWKNIQALGGFQPQERIVAVNSLIGSAVAAGQIESRFLRRLLRLRRVRAAAIAEAALT

SEQ ID NO: 3007 - protein, 315 aa, unidentified
  source 1..315: note = Related to JAHJNJ010000041.1; note = Gammaproteobacteria bacterium
MKSRKTYPIDQCPLYRLQSRKKLAKDVFNLELSHLESLAKNTSNYRIFKIPSGDKERQVEVPKPILERIHRRLFALLERIHKPPYLQSGVKGRSYITNAQLHVGLAPLVKLDVKKFYPSIDSARVYRFFNTILLCSPDVSGLLTKLTTCEGHVPTGSCVSQLLAFFAAKPMFDELDYLATKQSLRFSCYVDDMTFSGTLATPSLLWAAKQIVHSHGFGYHKDRCYTAEQDKLVTGVMVTSDRIAILPSREFELWRKTQDLGTGDIEQRIAAVNSLIGTVVAASQIEARLLSRLKRLKGIKAAFEQEASTSSPSQR

SEQ ID NO: 3008 - protein, 308 aa, Pseudomonas kirkiae
  source 1..308: note = Related to NZ_QJUP01000005.1
MKVRKTYPLHQSPLYRMQSRKRLAAEIFNADIDLLERIAGHGDNFRVFHIIQGEKRRQVETPKPILERLHRRLFVLFERIEKPAYLQSGVKGRSYITNAQEHVGAVPLVKLDIKKFYPSVDAARVYRFFHEVMRCSPDVSGLLTKLCIYDSHVPTGSCVSQLLAYFATRPMFDELSALAESRGVKFTLYVDDMTFSGRSATPAFLWDVKKVVHSHGLQYHKDRIYAADSQKVVTGVLVSAQGIAVLPSKEFGIWLQSRNLGSGDLAERRAAIESLLGSVIAAGQIEKRLLSRVRGLRILHADALRSAG

SEQ ID NO: 3009 - protein, 335 aa, Pelomonas sp.
  source 1..335: note = Related to NZ_LMDK01000001.1
MKRPYLSNQSPLYCLESRKRLAGEILGLSLPKLEGLAARANNYRECTRVTGGKQRTVHVPMPLLLAVHRRLAVLLNRIAVPHYLQSGQTHRSHLTNARAHETARNIAKLDIRHFYPSITKDRVWHLFVDGMLCSRDVASLLARLFTHQGSAPIGSPVSQVLAFHVVRPMLDELQELASRHRLRFTCYVDDLTFSGDGADHGFLALAGDVARRHGFLPHAEACYGPGEDKLVTGVMLTRDGLRVPAPQLRRIDAARQELLLAEGNESRRVLLSRLIGHLAAAASVDDSFRPELSSRCFAARKLAAALPARPSPSDSKVASVVPRLRPMRLSYGVGT

SEQ ID NO: 3010 - protein, 307 aa, Kinneretia sp.
  source 1..307: note = Related to NZ_CP049919.1
MSYAFHQSPLYVMRSRRRLADEIFGISLTALEGLVENGNNYIESRRVTGGKERLVRAPKPLLRHIQERLAQLLNRIEAPDYLHSGRKQRSHISNALAHQGATRVLKLDIRKFYPSITRARVWNYFAGQMRCSPDVAALLAKICCFEGSAPIGSPVSQVLALQVVRPMLDEVDVLARAHGLTFTCYVDDLSFSGEKATPAFLWQIKQLIRRHGYRYHGGTAYGPDAERRVTGVLLTAQGPRVPPAHLQGIRAARHAFEAAKEASDREATLSVLIGRLAAAAAIEKRFLAQIGDLRRRRRRFRPPSFGG

SEQ ID NO: 3011 - protein, 317 aa, unidentified
  source 1..317: note = Related to JAFEEP010000236.1; note = Proteobacteria bacterium
MTDHPIHHSPLHGLRSSERLARRDVLGLSLERLSALAGDASSYRAFIRVTSGKKRAVTEPLGDLLAVHDRLYDLLDRIEKPDYLHSGVRGRSHVTNAGAHLGDKATVKLDIRQFYSSIDVPRVSRFFGRQMACSAPVTDLLTRLCTFRGHVPIGSRMSQHLAYFAARPMLEDLRRLSERQGVVFTCYVDDLSFSGTAATPSFLWQVKRLVHHHRFGYHNGCCYRAGESRIITGVVVTGEKLAVLREQAERIRQDVRDMDKLTVDDQRRALQRMIGRTAAAASIDLEYRKVMKQLVARRARLKSAPPSPCMVRPFDEV

SEQ ID NO: 3012 - protein, 337 aa, Rhizobacter gummiphilus
  source 1..337: note = Related to NZ_CP024645.1
MAQSGNQTELEQSPLFGISDPRELAELVATPLPSLWRIARARDNYTALQMETGGKLRTVNRPCRALGAVQRRIQHLLSFIPLPDYLHSGVPGRSNLTNATVHRDGAWLCQIDLKAFFVQVTDAKVFHFFWQRMQCEPEIATLLTRLNTTNGHVPLGGHCSLQLAFLVAQPLLDDLDRTAREEDIRFSTYVDDLSFSGAKATPSFLWAVKQIIHRHGFRYHHDRCHRPGGRRLVTGVLLHKSCMEVRPQLVQRIWTDWSAMFTAPSDDASLRPLQGRLAVASQIEPRYREAHDSMKVMRKTLRDSPEPALAPASVSALANRKLVRARLSTSGSAHFDT

SEQ ID NO: 3013 - protein, 352 aa, Geomonas subterranea
  source 1..352: note = Related to CP077683.1
MAQKNYDIKYDITQSPLYKLRSKKKLISLLNLGSLSDLKSIMRTDSPYRKFPIMSKGKLRPVEVPSRVLLPIHNRLFRLLKKIHLPSYLHSGVKGCSYLSNARAHRDRKEAYTLDIKKFYPSVTRAKVVTFFRETMKCEPDISAILANITTCDDHIPTGSSLSQVLAYLSCKEMFDALHDLSQEAGVTFTCYVDDLTFSGDRISKKWIYDRVKPMINKFGMRSHKDKHFRAGQVKEITGVIVDGCIVKVCNRMHQSIHKLTLQIAETEEPLLIDSLYDKLIGKLCAAGQIEERFKLQRVMATKTRRKLLGPKFGSSRIKLNNGNQEIRKKLTPILPSIWRPVDHLDESIPWD

SEQ ID NO: 3014 - protein, 300 aa, Alteromonas mediterranea
  source 1..300: note = Related to CP018026.1
MVLKSRYALNQSPLFKLHSKKKLASLLRLDSKELLALAANPNNFHKFNVEKNGKLRSVQVPKKDLEAVHLRLFNLLRRLETPPYLHSGIKGCSHVTNALAHDGAVSTAKLDIKKYYPSTGREYVYNFFKISLCCSADVAKVLSDLSCVDGHIPTGSALSQLLAFFATQQMFDEIAVLASDSDICFTLYVDDLTFSGTRVNPNFIWQVKQIISKYGYTYHKVESAPPNKTKIVTGLALTANGAKVRNSHHEKIHELYVQYLDDTIATKDLARLIGMLSSASQVNQRMANKLRNLLESRASK

SEQ ID NO: 3015 - protein, 323 aa, Aeromonas hydrophila
  source 1..323: note = Related to NZ_NKXI01000009.1
MMKRVSKHKSYPLNQSALFKINSPTKLAKILLVSDMSVLFKLQNKGEENYYFGTTGSGRDIEVPLSQLRRIHNRINKLLSHISVPDYLNSGVKERSNIKNAAAHVNAKKLLKIDITKYYQSITEEQVRKCFRKTFQCSPDVSSLLASLCCVRGHLPTGSTISQSLSFAVNRPVFDSINIYSNSKGVKFTCYVDDLTFSGDDIPPSEFCDYIVGYIKKSRGYKCHKIRRYNSETDKPVTGVIISNGHLKVMNRHVKVINSLYKSMNKMTARFSSTDKELIHYFQVLQGHLFSAGQINPRYKRLGWHVVDIRKELSVPALNQNTM

SEQ ID NO: 3016 - protein, 321 aa, Aeromonas jandaei
  source 1..321: note = Related to CP043321.1
MMSRVNNKSYPLNQSPLFKINSPARLAKILLVSDASVLIKLKEKGEKNYYFGSTDKGREIEVPLSQLSRIHSRINKLLSNITPPDYLYSGVKKRSNVKNAAVHAGNKKLLKIDIAKYYQSISEEQVFRCFRKVFQCAPEVASLIASLCCVKGHLPTGSTISQSLSFAVNRPVFDNINIYSHSKGIKFTCYVDDLTFSGDEIPSGFCDYIVGYIKKNRGYKCHKIRRYNAETDKRVTGVIISDGKLKVMNRHVREINYLYKNVNSMLKKHAATDKELIHFFQRLQGHLFSAGQVNLRYRRLGASVVQIRKSSAVPALNQNTM

SEQ ID NO: 3017 - protein, 328 aa, Alcanivorax sp.
  source 1..328: note = Related to DMHG01000210.1
MRYGWSLLANNNKGVKQYPVHQSPLFKLRSHSKLAAVLGTKPKTLKTVVRRADKNYKFGTTESGRAIEIPKSQILRYHNRINKLLCRISPPDYLMSGVKGRSYVDNAAKHRGERAVAKQDIQKFYQSTTRDIVYRGLRKRLHCSSDIAQTLADLCTVKGHIPTGSPISQSLAFFVNFGVFEHINQYASSRGLRFTLYVDDLTFSGQKIPKNFLRYISGYLEKNRGYKVHKNRTYHATTEKEVTGVILKQGGIDVKNRHRQKIDSMLRRLSYFSDESQESDAKTRDYFQRLIGHLYSAGQVSPGYRTRGKEMVEIRKAIGIEGQNQNNK

SEQ ID NO: 3018 - protein, 319 aa, Vibrio cholerae
  source 1..319: note = Related to AAXMMD010000082.1
MKKNKSYKINQSPLYKLSSHKKLAACLGLDNEKTLSNILQHGDNNYYVSTLPSGRVIEVPKPQLNRIHRRLNKLLTRIEVPDYLNSGVKGRSNVKNAQDHIGELAVLKLDIQNFYQSVTQQQIARCFVKSFACPKDVAETLSKLCVIHGHIPTGSSISQSLAFIVNRPVFDHINIYSISKGIRFTCYVDDLTFSGQTIPKGFSSYITSYLKRNRSYKCHKMRVYKTLTPKLITGAVVVGKLLKVKNRHRNQIQKLLHSYDSMVKSYKPDDNKLINYFQTLQGHLYSAAQINPRYRQMGDIIVQRRCHLGVPALNQNTKK

SEQ ID NO: 3019 - protein, 319 aa, Pseudoalteromonas piscicida
  source 1..319: note = Related to NZ_CP074587.1
MKKNKSYKIHQSPLYKLRSHKKLASCLGLEKEQTLRRLIKQGDKNYYVSKLPDGRVIEVPKPQLNRVHRRINKLLTRIEVPEYLNSGVKGRSNVKNAREHTGELSVLKLDIKKFYPSVTEQQIARCFVKSFGCTKDVAETLSKLCVVDGHLPTGSSISQSLSFTVNRPVFDHLNTYAKARKIKFTCYVDDLTFSGQAIPKEFCKYVTAYLKRSRGFKCHKIRVYKAITPKSITGAVVVGNVLKVKNCHRKRIQKLLHLYNYMVKRYKPDDENLINYFQRLQGHLYSAAQVNPRYRQMGDIIVQRRCNLGVPALNQNTKK

SEQ ID NO: 3020 - protein, 327 aa, Paraglaciecola arctica
  source 1..327: note = Related to JAHKQO010000049.1
MEKQYHLNQSPLYKLRSFKRLAKILDCPQKSLEKLLLQPNNNYYTSHINQEKIIKGSKQIVQRKIQVPKPQLNRIHKKVQKFLSKIEKPGYLFSGVKRRSNVSNALYHVETDYMRKMDIQKYYEKTSAKYVYKCFVNTFRMAPDLAKVMTKLCTFNSHIPTGSSLSQNLAFFCNLHLFNQIESFCKKRKISFSLYVDDLTFSAKHKLTKDLTNRIVHIFNKNSDYVIHKFQVYNKETPKLVTGVILKNNIMLVPNKLRVKMLNHDKEKSIIIDNLSNDRDGAINFYQRFIGLVSCANQISPNYKLWTKELCEERKKYGIQAVTGKKD

SEQ ID NO: 3021 - protein, 323 aa, Alteromonas macleodii
  source 1..323: note = Related to NC_018632.1
MELKKYDINQSPLYKLNNYKRLLKILDIKDKSLTKLLVAGDNNFYTSEIGGRKVQVPKPQLSRLHKRLQKLFSRIQTRPFLYSGVKGRSNVDNARVHEKSSHLLKVDIAKYYESTNFKRVLKCYINIFKVSPDLAEILARLSTYSGHVPTGSSISQSLTYFCNIKVFDQVMLYCKKRGVTFTLYVDDLTFSSRVPLGNGFLGGINLIFSKNTDYKLHKIRAYNPTTPKKVTGVILKGTSLDVPNDIRKRLNEFKMKHRRVVLNYVNNSTPSSYENAIAHFQKFIGLVSCASQISPYYKLWTDSLCNERRVNNIPAVNQNNPMP

SEQ ID NO: 3022 - protein, 313 aa, Denitrificimonas caeni
  source 1..313: note = Related to NZ_CAJHOA010000005.1
MIKSYNLNQSPLYRINSHKKLSSVLGVKSSSVLTKIVSKSDNNYYLSKVDDRDIQVPLNQLRRIHKRIDSLLRRIEQPDYLYSGVKGRSNVLNARVHDNNYNVLKLDIKSYYQSVSKDQVARCFISVFKCSQDVAKTLSEICTYNNHIPTGSPVSLSLSMAVNRPVFDHIHKHSHSRNIRFSCYVDDLSFSGKVIPLSFRDYIVYYLKKSRGYECHKIRSYNPSTPKKITGVVLTKNGLKVMNRHRSTISSLLNDRKRILKNNKKDDELTINFYQKLIGHLFSAGQINGRYKQLGRILVNERKLYSIPACNKK

SEQ ID NO: 3023 - protein, 312 aa, unidentified
  source 1..312: note = Related to VXNK01000080.1; note = Rhodospirillaceae bacterium
MPYEIENSPLFKITSIHRLSEVLQLRVGRLRRLEYLTGQFKEGTTERNGKQRKTETPIRTMCRVHNRVQKLLSRIQMPNYLHSGKRKRSYLSNAVAHSGLIQSFQVDIAKFYPSCTWHHVYLCFIRQFQCSSDIAGIMATILTYRGHIPTGSPTSSLLAFLSHKEMFDALYELAQSHNLTMTVYQDDISFSGSSISESFRSEVRCIIKRCNLVPKRSKQRYCHGGRSPNITGVVLTSRGPKAPRSRHLALRQSIDEFDAAESEIDLRISYHRMMGRLSEIERVQGRLFDLKPKLKSRFRSRLKAMSQCPQVE

SEQ ID NO: 3024 - protein, 351 aa, Pseudomonas syringae
  source 1..351: note = Related to JAKMVT010000021.1
MKQKRKKSVKRERKSYDICQSALYNTSTKSKLASLFSIGLHELRECIGDYRQFQLIPEPDPFKAGKLPKARQVQKPSARLLVIHEQILKLLRCVRVPEYMQFALKGTSYKINAESHLSKNTVATLDIRNFFGSTSKSKVFNFFKEDLKAPGDVANLYADLITFENCLPTGSPLSPLISFYANKNLYEDINNLAKAHNLKFTCYVDDLTFSGDKISSGFMWQIEEAIAKYGHVVARDKTKIYKNGRPAHITGVIVHDGVIRVPNARHRKMRLIKAAIARGKGTHGFSKKELEYKLGGLLGEAAYLDPSHLPAAIEFNKSVQRYSLVATEYKSNRPETGSEQPLDSPVNLPWD

SEQ ID NO: 3025 - protein, 351 aa, Pseudomonas sp.
  source 1..351: note = Related to NZ_CP056030.1
MRQKREKVVKRERKSYEICQSALYNTSTKSKLASLFSIGIQELKECIGDYRQFQLKSEPDPFKAGKPPKVRQVQKPSPRLLVIHERILKLLRCVRVPEYMQFALKGTSYKINAEAHLGKNSVATLDIRNFFGSTSKSKVFNFFKEALKAPGDVANLYADLITFDNCLPTGSPLSPLISFYANKSLFDDIDNIAKAHNLVFTCYVDDLTFSGDKISDGFMWQIEQTIAAHGHVVASDKTKVFKNGRPAHITGVIVHDGLIRVPNARHRKMRLIKAAITSGKGTHGLSKKELEYKLGGLLGEAAYLDPSLLPAAIEFNKSFQKSNTKTIEHKADHTNKNDKQSPDSPIDVPWE

SEQ ID NO: 3026 - protein, 350 aa, Pseudomonas marginalis
  source 1..350: note = Related to FNSP01000003.1
MRQKREKAVRRERKSYDISQSALYNTSTKLKLASLFSVEIGALKDCIGDYRQFELIPEPDPFKAGKPPKSRLVQKPAPRLLAIHERILKLLRCVRVPEYMQFALKGTSYKRNAEEHLHKKCVATLDIRNFFGSTSKSKVFNLFNNDLKAPGDVANMYADLVTVDNCLPTGSPLSPLMSFYANKNLFDDLSKLAHAHNLTFTCYVDDLTFSGEKISESFLWQVERAIAAYGHIVASNKTKLFQNGKPAHITGVVVHSGAIRVPNARYRKIRLIKAAIATGKNNYGLTRKELEYKLGGLLGEAAYLDPSNLPAAIEFNKSFKRSSSPLPEHVPDNPAATEKTFDDASDLPWN

SEQ ID NO: 3027 - protein, 371 aa, Pseudomonas sp.
  source 1..371: note = Related to JAEKFB010000009.1
MKLRREKKPKKERKSYDISQSALYNTSSKAKLAAIFSTDIQEVIRCIGDYRRFELIPELDPFKLGKPPKVRQVQKPAPKLLAIHERILRLLRCVQVPKYMQFALKGTSYKNNAEMHLLGRCVATLDIRNFFGSTSKSKVFNFFNGPLKAPGDVASLYADLTTFDDCLPTGSPLSPLLSFYANKALFDDLNIIATEHGLTFTCYVDDLTFSGESISRRYLWQIENTIRQYGHVVASRKTRLFKDGIPKHITGVVVHEGSIRVPNVRYRKMRLIKEAIHGSGKNHGLTRKELEYKLGGLLGEAAYLDPSNLPAAIEFGKTSHKNFLKTITSVQEYLEPPKPNATDEKFHPPWHEQELITMLLPEHANDGNEAD

SEQ ID NO: 3028 - protein, 351 aa, Pseudomonas viridiflava
  source 1..351: note = Related to NZ_UWFM01000116.1
MTLKRERKTKKERKSYDLSQSALYLTRNKSRMAAILATTTQNLTDCIGDYRRFETVPENDPFKLGNQPKPRQVQKPAAKLMAIHERILKLLRCVKVPEYMQFALKGTSYKKNAEAHISGKYVATLDIRNFFGSTSQSKVFNFFNGPLRSPGDIANIYAQLTTIDNCLPTGSPLSPLLSFYANKKLFDDLNDIAKEHELTFTCYVDDLTFSGECISNRFLWRVEERIRKSGHIIAANKTRIFSETMPKHITGVVIQDGGIRLPYVRQRKIRLIKDAISGKAKNHGFTKKELEYKLGGLLGEAAYLDPRNLPAAIEFSKSVRMNSFKFFKLFDYVELPKPAAPDENFIPPWQE

SEQ ID NO: 3029 - protein, 353 aa, Pseudomonas lundensis
  source 1..353: note = Related to JAAQYG010000033.1
MRLKRVKKTKQEKKSYELSQSALYKTSSKCKLSAIFSLSAPDILNSIGDYKRFEMSPVLDPFKIGTPPKTRWVQKPKGKLLAIHERILKLLRCVEVPEYMQFALKGTSYKKNAEAHLAGSMVATLDISNFFGSTTKSQVFNFFRDRLKCAGDIAKIYAELVTCDDCIPTGSPLSPLLSYYSNKPLFDELSCLAKNANLHFTCYVDDLTFSGAYIGRGFLWQVEKTIKKYGHITASKKTRLFGLGVPKHITGTVIADGALKVPNVRFRKIRLIKLAIEGRISKFGFSDVQLKYKLGGLLGEAAYLDNDFKSLADEYNRKIRELNLASLEGGETYRSSTKPLELADDNFIPPWEI

SEQ ID NO: 3030 - protein, 359 aa, Pseudomonas pisciculturae
  source 1..359: note = Related to NZ_JACVZE010000010.1
MKPKRVKKAKQEKKSYEISQSALYKTTSRSKLAAILSLSIHDLLCSIGDYKRFEMTPKPDPFKIGKPSKTRWVQKPKGKLLAIHERILKLLRCVKVPEYMQSALKGTSYKRNAEQHLSGCMVATLDISNFFRSTKKSHVFNFFRDRLECPGDIANFYAELVTCDDCIPTGSPLSPLLSFYSNKPLFDELSVLAKNSNLQFTCYVDDLTFSGSHITHDFLWEVQKIVKKHGHVTATKKTRLFGAEVPKHITGTVVAEGVLRVPNARFRKIRLIKLALEGKRDSFGLTKTQMEYKLSGLLGEAAYLDNDFKSLADRYNTTIREINLASLGDGKYRPSLKATDLIDDKFIPPWETEQSSSKS

SEQ ID NO: 3031 - protein, 359 aa, Pseudomonas protegens
  source 1..359: note = Related to NZ_LUUE01000002.1
MKQKPVESHIKNYKSYALNQCAMFNTSSRTRLAAILLKPLHLIMESIGSYSKFKKDPKPDPFSHKKPRRPRSVQKPKGELLHIHNRMLRLLKRVVVPDYMQAALAGTSYRKNAAMHVGGPCVATLDIRNFFVATNKSKVFNFFETDLRCTGDIASIYSELVTCNDSLPTGSPLSPLMSFYANKRLFDELDVLARNNGFIFTCYIDDLTFSGNNISGSFLWDVERIVHCYGHEVTAGKTRLFKAGRPKHVTGVVLFDNEVSVPNSRYKKLRNINAALEGRASMHDFSEVELLNMKAGVLGEIAYLDPKKGFLARRAIDELKLRDLKILGDGKLKISTSPPAYLSPGEVPPWQPLPLATPD

SEQ ID NO: 3032 - protein, 333 aa, Burkholderia pseudomallei
  source 1..333: note = Related to CP008911.1
MPGNASAKLLARRSRSKRYDIDQSHLFRVGSPARLSMVLGVSLDKLLALSRRTDNYKLFQKEDVDPFARHHRRRRDIQEPKAALKKIHERVAKLLKFVRVPTYLHSAIKGVSYRTNALEHAERGVSILTMDIADFYPSTGASRVFNFFRDVLECAPDVSKLMAKLLTWRGVLATGSPASPLLSFHCNRPMFDEMAAVAVKSEFTFTCYVDDVTFSGVNVRRGLVSEIACIARRHGHRIKEHKTRFYSAGQAGIVTGVVVEDGSVSVPHERRLKGRRIETAIDGATDPVERLALTEKLMGLAGEAAYLDKAFRPWVDSIRGKLKVLRRSYASRR

SEQ ID NO: 3033 - protein, 330 aa, Burkholderia ubonensis
  source 1..330: note = Related to NZ_LOVC01000028.1
MPESTPKKVVRRRDGSDRYEIDQCALYKTGSLRRLAKILLIEKSDLIALSNRRDLYSVYDLEDDDEFSDKRGKVRKIQDPVEELKKIQRRVAKLLHYVRVPRYLHSAVKGVSYRSNVKAHAHAGSNILTMDVASFYSSTRESQVFRFFRETLLCAPDVARMLTRLLTWHGVLPTGGPASPLLSFHCNREMFDEIAREAERAGVVFTCYVDDITFSGTNVKRGFASLIDRIVRRSGYRIAAQKTRFYRPNQAALVTGAVIQDGKVSVPHARRRKARRIEIAARSTKDPARRLALTEKLMGLAGEAAYIDPAYRGWAYAVRGRLVALRKSAA

SEQ ID NO: 3034 - protein, 337 aa, Pusillimonas sp.
  source 1..337: note = Related to NQMK01000010.1
MAKRGLYDINQCALYKLGSKARLAQILGVPKARLLILVRRSENYRVFTLPQEICEFTGKVRKERLVQEPKPELRRVHERIQRLLSRIRPPEYGHAAVKGRSYRTNAEAHLNGPRIATFDVRRFYPSTSRSAVRNFFSEQLCCAPDVADLLAQLCCWQNVKESNSSSGLPTGSPLSPILSLYANRPMFDVLNDYAGRHQLVFTCYVDDLTFSGEMLPAGISKFVEKIVTAGGHTLATEKTRLFRRNQVKHVTGVVLSNSQVKVPHARFLKARAIASAITAHETADARYRLLLQRKLAGLLGEAAFLDSRFAGWANRAYADLRAVQAEVHMAESLHVES

SEQ ID NO: 3035 - protein, 336 aa, Achromobacter marplatensis
  source 1..336: note = Related to CADIJU010000003.1
MAKRELYDINQCALYRLGSKTRLSILIGVPKSKLLALVNSLENYRVFPLPQEVCQFTGKVRKERLVQEPKPELRRVHERIHKLLSRVRPPEYGHAAVRGRSYRSNAEAHINGRRVATFDVRRFYPSTSLSAVRNFFADQLCCAPDVADILARLCCYRNVKEASSLLGLPTGSPLSPLLSLYANKPLFDALYHYAGRHKLVFTCYVDDLTFSGALLPRGLSQFVTKMVESCGHTLAQEKTRFFRSNQVKHVTGIVISDNEIKVPHARFLKARAIASAIAKHAPADVQQRLLLQRKLAGLLGEAAFLDGRYAGWANRSYVDLRAIQEEARAAELHSPE

SEQ ID NO: 3036 - protein, 347 aa, Achromobacter mucicolens
  source 1..347: note = Related to CADIKQ010000001.1
MATRGFYSIDQCALFKLGSKTRLAELLHVPKSHLTKLAAGSDNYRLFELPREVCEFTGKVTKARWVQEPKNDLRQVHERLQKLLARIRPPEYGHAAVKGRSYRTNAAAHVHAAVAATFDIRRFYPSTPRLAVRDFFLHTLRCASDVAELLTTLCCYQDRTEEGAQCGLPTGSPLSPILSLYANRAMFDRLHRFALQHELTFTCYVDDLTFSGPLLPRSLGRFVRKTVDAYGHSLAVEKTKVFRRGQAKHVTGVVIVNNKIKVPNARFKKARAIAAVIQRTASDDYMRLLALQRKLSGLLGEAAFLDPAFSDWARRSYRDLKKINEEAATSTSGVGAAKEGTGAVAFL

SEQ ID NO: 3037 - protein, 340 aa, Alcaligenes faecalis
  source 1..340: note = Related to MSZO01000007.1
MLFMKKQKSYSIDQCVLYKVGSKKRLADILNIPLSSLLKLAKSKNNYRVFELPFEQCEFTGKTKNARVVQEPKKLLKAVHARLQKLISRIEAPKYGHAAIKGRSYRSNASEHISSVYLATLDVRKFYPSTRQSLVRNFFADQLRCAPDVADILTKLCCFFGASKTGGSVGLPTGSPLSPILSLYANKPMFDKLQGYSNDNSLIFTCYVDDITFSGEALPKDIVRKVGEIVYSYGHTIAVEKTKIFREKDTKHVTGVAIKNNRISVPHSRFKKARAIERIISNTPQEELAKKRTLQRKLAGLLGEAGFLDSRYKPWASRSYVDLKKLEYDFNQQSRQVDFK

SEQ ID NO: 3038 - protein, 334 aa, Janthinobacterium sp.
  source 1..334: note = Related to CP062062.1
MTNPPLRLVTKTPKKFYPINQSALYKIGSKKRLAKILATSLERILLLSTATDNYKIFCLPEEVCEFTKKTKKSRWVQEPKRPLRSIHERIQKLLKSIIYPDYSHAAVKGRSYRTNAETHKDATRVATFDLRKFYPSTSSSRVRDFWAEQMLCAPDVADLLAKLTCHEGCLPTGSPLSPLLSLYANRPMFDDLNELANSHNLKFTCYIDDLTFSGPIIPIGLPRLVSNIVHRSGHTLSVEKTKIFRSDQRKHVTGVVVYGNSLHVPYSRFFKARAIQNAFDLEKNSIAKLALARKLSGLLGEAAYLDTRYADLAKKSYVELKRINEEIMRDKLPF

SEQ ID NO: 3039 - protein, 319 aa, unidentified
  source 1..319: note = Related to nan
YTIDQCALYRLGSKARLSAVLGITLDWLLQLAESEKNYCLFNLPEEVCPFTRRVKKARAVQAPKNGLRTVHERILHLLRPIILPTYAHAGIKGKSYRSNAAAHKDSPRLAAFDIRKFYPSTTASRVYYFFADKMLCSPDVARLLTALTCYKNGLPTGSPLSPLLSLHANMPMFDSLEALALSNDLVFTCYVDDLTFSGEKLPIGLPRLVKGIVEKYGHKVSEEKTRLYRRRQGKHVTGTVLLDGRILVPNTRFHKARAISAALASERDPALRLELGRKLSGLLGEAAFIDDRYAKWASDSYISLRKLQADFACEEASLD

SEQ ID NO: 3040 - protein, 334 aa, unidentified
  source 1..334: note = Related to JACQDW010000206.1; note = Burkholderiales bacterium
MQKSLPNPPPTKKIKRTYSIDQSALYKIASMKRLASLIGLPRGKLLRIAGGAHKYKTFVLPEEKCPFTGKVRKSRKVEEPINELRYIHERIHALLCKVDHPEYAHGAVKGRSYRSNALAHVESQSLATFDMREFYPSTSESRVYTFWVEQMCCAPDLANVLAKLICYKGRLATGSPVSPLVSLYANKPMFDELSRIALSRNLKFTCYIDDITFSGQNLPRNFEQWIASIVGRYGHALSEKKTRFFRSEQAKHITGAIIKDGLVTAPHSRFQKMRLIGSALRQVKDFNLRKSLLRRQAGLIAEIAYLDKSFSAMAESANQQFRDLRVKAATDIVD

SEQ ID NO: 3041 - protein, 348 aa, Polaromonas sp.
  source 1..348: note = Related to RDZZ01000077.1
MPRGLYEVTQCALYKINSKARLAGLLHVSVPVMLGMASSRKYQEFTLKEKVCPFGGKSRKARMVQTPTEALRPLHDRIHDLLRRCAPPNYAHAAVKGRSYRTNAEAHKGSCVAATFDLESFYSSTSETTVFRFFVDQMKCAPDIASLLARLICVERDDSYPCLPTGSPLSPLISVYANKPMFDKFAHLAETHALSFTCYVDDLTFSGLAMPKGLERMVTSVAKRYGHTLATHKTMTFGPSSAKHITGVVIFNGKITVPNARFRKARKIQAAINAENDPIKKISLMQKLSGLLGEAAYLDNRYSNLAKKAQHSMSEFRLNSPAITMSAIPVTQEDASKAGFVLTNDVPF

SEQ ID NO: 3042 - protein, 340 aa, Xenophilus azovorans
  source 1..340: note = Related to NZ_JQKD01000066.1
MAGYALNQCALFKVGSKAKLASVLLLKQRDLVDLSEDGQYRQFRLEASVCEFTGKRTKARDVAEPKKALKRVHQRIGDLLSRVLLVEYAHAAVKGRSYRTNAAAHQHGDEIATFDIENFYPSTTHAHVYHFFFREMKCAADVAHLLARLLCFRATPEALGCLPTGSPASPIMSVYANKPLFDALHRLAQELGLVFTCYVDDLTFSGPQIPPSLGRRVDSIVAAHAQRLHASKSRVFRKGKPKHVTGVVIADGKLAVPDARFFKARRVEQRLVAETDPGERARLSRILCGLLGEAAYLDNKYANWAKDSYRKLAAETRLAVVTAAGTIAFAATRADPPTGA

SEQ ID NO: 3043 - protein, 370 aa, Achromobacter dolens
  source 1..370: note = Related to CADIJW010000048.1
MSENQKPPAPAKPRKTYALNQCALYKVGSKKRLEKILGVNVADLIRLSADEGNFQVFELEAEVCEFTGKTRKARWVQNPVPELKAILARITKLLSRVRVPDYCHGATPGRSYRSNAQAHVGAQSVATFDLKDFFPTTTSKQVFQFFSKDLECAPDVAGLLTDLCTHGHVLPTGAPTSPILAYWANRRLFETIDRRGKVLRLKLSVYVDDITLSGDAIPRSLADQIEGIVKSHGHKLSGHKTKIFGPSRPKHVTGVVITGQSLRVPHARFHKARAIRIALYAEKDSRKRVLLAAKLCGLLGEAAFLDPAYKRMASDSVKLLAAAKAQVAPRLSRSIGGPRRKRGRSNPRTVATMGGVQLREQLDLSDAPTN

SEQ ID NO: 3044 - protein, 327 aa, unidentified
  source 1..327: note = Related to JAECRL010000003.1; note = Burkholderiales bacterium
MAAKRLKSYPLDQCALYKVGSKKRLAKILDVDLPKLVRLSADQGNFQVFEIPEEVCEFTGAKKKARWVQNPVPDLKAILKRIAGLLSRVQVPDYCHGAMKGRSYRSNAAVHVEEESAATFDLKDFFPSTTSAQVFAFFRHTLQCAPDVAGLLTDLCTYGKILPTGAPSSPILAYWANRKLFDVLEGRGRDLSLKLSVYVDDVTFSGDAIPRSLPEQVDGIVSKHGQKLSAHKTRIFGPGKPKHITGVVVAGGRLGVPHARFRKARAIRAALAAAKDDEQRELLASKLCGLLGEAAFLDPRYRRWAEDSARQLAAIKAARLSAKRAVK

SEQ ID NO: 3045 - protein, 333 aa, unidentified
  source 1..333: note = Related to nan
MKNKRPPKSKDKKYEINQCALFKVTTKKRLASILGVDTGTLSRLSIDERNYNVFEIAEEKCEFTGKIVKARLVQNPVPELKDIHRRIHDLLSRVVAPDYCFGGAKGRSYRSNAAAHTDSVAAATFDLKSFFPSTKSAQIFGFFKDKLLCAPDVAGILTDLCTYKGALATGSPASPQLAFWANLPLFEVLETIAHRYNLILSVYVDDITMSGPRVPAQLQHQVNEVVQKYGHKLSPGKTKIFRRGNPKHITGVVVHNGFLRVPNSRMKKARAISEALTRTSATDLTQREHLASKLSGLLGEAAHIDSRYRPWAQRSYRDLRFLQRLANVPPIAF

SEQ ID NO: 3046 - protein, 368 aa, Azohydromonas caseinilytica
  source 1..368: note = Related to NZ_JABBFW010000053.1
MKEEFKSKKKRKLYSLDQCALFKIGSKKRLAAILRVSQDRLEPLGVDKGNYFVFTLKEQICPFTGKVKGARRVQNPLPELKLVQRRILSLLARVEMPEFCHGAKQGSSYRSNAKAHVDAKNVATFDLKSFFPSTSASRVFSFFRNTLQCAPDVARILTKLCVCHGALATGSPVSPILAYWANCELFRVLNRLAEENHLLMTVYIDDFTISGDVLPRNIVWQVKSIVEKYGHSLSLSKTKIFRENEAKHVTGLVIYEGNLTVPHIRFKKARAIEKAIAVASNDEERLDLMRKMGGLLGEAAYVDKRYKSWAFKIYSKISQAQSVLRRKEASASEKRKFEEACVPDVMPDKASWSDISPKAQDNSSSMKS

SEQ ID NO: 3047 - protein, 329 aa, Pseudomonas syringae
  source 1..329: note = Related to NZ_MLEM01000008.1
MQPKKNTRKKRKPDNQLPIHQCFLYKIGSPKRLADLLNVSAAELEDTLRSENNYKLFNKLLSPNPFTGKLRKKRAVQEPKSRLRKMHERILALLRRVQYPSYVQGGVKHRSYQTNAATHLGARQTATFDLKNFYGSTRYCLVHDFFHKSLCCPTDIAGRLASLTTWNGVMPTGSPLSPLLSFWAAKGFFDKCETLAAKYRLNFTCYIDDLTFSGDKISGKFQSELEIIASRFGYELAKEKTKVFRFGIPAHITGVISHKAKLSVPHSRLKGARKIQDAIEGRGEAYGFTTAQLKQKLAGTINEAATIDAVKYEKWATHTRKAAEDNEKE

SEQ ID NO: 3048 - protein, 329 aa, Pseudomonas fluorescens
  source 1..329: note = Related to JAEKIK010000020.1
MQPKKNIRKKRKPDNELPIHQCALYKVGSPKRLADLLNISTIELEVILQSESNYKLFNKVLAPNPFTGKSRKNRAVQEPKSRLRKLHERILSILRRVQYPGYVQGGVKHRSYQTNAAIHLGARQTATFDLKNFYGSTRYCLVHDFFHNTMCCPTDIAGRLASLTTWNGVMPTGSPLSPLLSLWAAKGLFDKCEVLAIKYGLNFTCYIDDLTFSGDQISGKFQSELKIIASRFGYELAKEKTKIFRFGVPAHITGVISHKAKLSVPHARLKGARKIQDAIDGKGKAYGFTEAQLKQKLAGTINEAATIDAVKYEKWAIYSRKDAGDELSQ

SEQ ID NO: 3049 - protein, 328 aa, Pseudomonas veronii
  source 1..328: note = Related to NZ_CP018420.1
MQLKKSTRKKRKPDNELPIHQCGLYKVGSPRRLAELLKISEIELKKFLESQNNYKIFTKVLAPNPFTGKFRKKRAVQEPKYRLRKLHERILCMLRRVQYPDYVQGGVKHRSYQTNAAIHLGARQTATFDLKDFYGSTRYCLVHDFFLDVMCCPTDIAGRLVSLTTWNGVMPTGSPLSPLLSFWAAKGLFDKCEELAVKYGLNFTCYIDDLTFSGDQISGGFQAELKILASRFGYEIAKEKTKIFRFGVPAHITGVISHKATLSVPHSRLKGVRKIQDAIDGRGAAYGFTAVQLKQKLAGAISEAASIDAVKYEKWAFYSRKDIEGDLV

SEQ ID NO: 3050 - protein, 331 aa, Pseudomonas aeruginosa
  source 1..331: note = Related to CP004061.1
MQPKKSEKPKRKPDNEIAINQCRLYKVGSFRKLSDILKTSPAEIMDLLVSDKNYKKFTVSQSANPFTGKPRKQREVQEPKSKLRRVHNRVLALLRRVGYPDYVQGAVRYRSYQTNAALHIGSRQTATFDISDFYGSTKRHLVHSFFHDVMKCPTDIAGKLARLTTCDGVIPTGSPLSPLLSFWVAKGLFDECAAVAKEYGMKFSCYIDDLTFSGDRIPRELKSRLKIICRRYRYRLKSEKTKVFRFGEPAHITGVIKMDAVLSVPFARLMAVRKLMDAIEGRGDSYGYTVEELKRKLAGTVSEAASIDGQFKKWALHAKQDAKSSSRPSAS

SEQ ID NO: 3051 - protein, 325 aa, Pseudomonas aeruginosa
  source 1..325: note = Related to LN831024.1
MQPGKSKRVERKPDNSLELDQCRLYKIGSEKRLAEILGLSLQDLRLLLRSESNYKKFTISQSENPFTKKPRKKRAVQVPMNRLRRVHAKIFSFLRRVKYPDYVQGAVKGRSYQTNAAFHARSRQTATFDISKFYESTKYHLVHEFFLGALKCPTDIAGKLARLVTCDGVMPTGSLLSPLLSFWVAKGMFDECAALAETYDLKFTCYIDDLTFSGDRIPRELKSKLKIIVSRYGYKLAIEKTKVFRFGAPAHITGVVKLNGELVVPFARLMAARRISDALDGKSPDYGYTKNELKRKLAGTIAEAATIDGNRFSKWAAFAQKEARD

SEQ ID NO: 3052 - protein, 334 aa, Pseudomonas fluorescens
  source 1..334: note = Related to CP031450.1
MRIEMQPKKNEKTKRKPDNQIPINQCRLYKVTSPKRLAEILNLDMTGLLELLNCSTNYRFFDIPLSINPFTGKSRKKRSVQEPKQKLRRVHKRILLLLRRMSYPNYVQGAVKHRSYQTNAEVHKESRETATFDIRDFYGSTKYHLVHDFFLRVMGCPTDIAGKLANLTTCNGAMPTGSPLSPLLSFWIAKKMFDECHALAESHKLKFTCYVDDLTFSGNHIPRILKSKIKIIASRYGYSIANHKSRHFRFGQPAHITGVISLDKKLHVPFSRLMAVRKVTDAIDGNSDTFGFTKTELKKKLAGMVSEAATIDNRFGKWAIYTQNEVSDSSTPSD

SEQ ID NO: 3053 - protein, 323 aa, Pseudomonas aeruginosa
  source 1..323: note = Related to JAIZEG010000001.1
MQQKKKEKNECKTAKSYPIDQCSLYKVGSAKRLAAVLGIELDKLKKLLLSDFNYKVFDIAGSVDPFSGKIFKTRHVQEPKDDLRAVHSRILRLLQNVSIPPYVHGAIKGRSYQTNAAAHVKGKQAATFDIHNFYGSTKSNLVHDLFHDVLACPSDVAGKLARLVTYKGMMPTGSPLSPLLSYWVAKPMFDEYACLARQYGLEFTCYIDDLTFSGDRIPRDLRYRVGIIARRYGYRISKKKTRLFVQGKVKHITGVAVAESGLMVPFSRLKAARKIMGAIEGSGESHGLSSEKLRQKLAGLIGEAATIEQRFGKWARKARTACS

SEQ ID NO: 3054 - protein, 333 aa, unidentified
  source 1..333: note = Related to NZ_BDMN01000231.1
MQRKPTKRKRKLFKRYPVNQCALYKVGSIKKICQLIGIKKSNLNSILKNPLQYREFVNKESFDHFSLKTSKTRQIQEPTGNLKKIHERILYLLEPVELPNYSHAAVKKRSYRSNAASHVLSKKIATFDLENFYGSTKNHLVYNFFLDKLKLPHDIAKKLTKITTFNNSMPTGSPLSPLLSLHAAKPMFDELESLAQKYNLIFTCYIDDLTFSGSTIPKSLNRQIVHIINRYGYNLSNHKTRIFNESEVKHVTGIIINKERLRAPYSRFMTARRIKKAIDGKAPMHNFSKIKLLEKRAGLLGETAYLDPTYKRAAKNAQIELKNARNQIKKSTL

SEQ ID NO: 3055 - protein, 326 aa, unidentified
  source 1..326: note = Related to NZ_BLYC01000085.1
MLRKPTKRKLKYLKHYPINQCALYKIGSIKKICDIIGIEKNELNLILKSPPKYRQFVNKESFNHFSLKKSKERQVQEPVGDLRKIHERILDLLKPVEPPDYSHAAVKKRSYRTNAAAHVLSKRIATFDLKNFYGSTKNHLVYNFFLDQLKLPHDIATKLTKLTTFHNSMPTGSPLSPLLSLHAAKPMFDELESLAQGYNLIFTCYIDDLTFSGSTIPKSLSKQIVHIIKRYGYNLSNHKTRIFNESEVKHVTGIIINEERLRAPYSRFMTARRIKLAIDGKASTHNYSKIKLLEKRAGLLGETAYLDPTYKGLAQKAQLDLKTARG

SEQ ID NO: 3056 - protein, 346 aa, Methylobacter sp.
  source 1..346: note = Related to JADMKV010000009.1
MLKKPTKRKRKCLKRYSIDQCSLYKVRSAKRLSEILGVEKQRLDSILKSSAKYREFTIEETTNPFSSKFIKSRQVQAPSDELRRIHERILYLLEPIELPNYAHAAVKGRSYRSNAATHVNSARMATFDLKNFYGSTQRYLVYSFFLDNLKCSPDIAGKLTELTTFRNALPTGSPLSPLLSLHAAKPMLDELSKLAQLHDLIFTCYIDDLTFSGKKIPRSLERRVSRIVGKYNHQLSIHKTKIFDEDKPKHVTGVVINKGKLAVPHSRFLTARKLELAIAGKFPMHGNSMLKLCEKLAGLLGETACIDPTYKKWAEKAQEDLRKARTKDSSIVGPDSTDFGSCQQID

SEQ ID NO: 3057 - protein, 360 aa, Pseudomonas kairouanensis
  source 1..360: note = Related to QUZU01000011.1
MWPKGLSQYLNGIKTEMRPQQSSAKKRRSFKLYTINQSALYKITSPKKLSNALNRSELEIDVLLGSDENYREFTLLEELNPFSHKRKKARLVQTPNKDLRSVHERILKLLQRIEYPEYAHAGVKKRSYRSNAQAHQKSKEVATFDLSNYYGSVKAHHVYDFYLKQLQCVRDVSGILTRLSTHRNCIPTGSPLSPLLALHSSRTMFDSLDCLAKRYGLVFTCYVDDLTFSGDAIPPSLEREVVSIVRRNGHSINKKKTRIFRAHQAKHVTGTVIINGNITVPHARLVTVRRLEDAINGKMDSFGFSETKLMEKLAGVLNEASYLDSKFRSKALAARSNLSSPSPSPSPSPSPAPQVADASI

SEQ ID NO: 3058 - protein, 333 aa, Pseudomonas sp.
  source 1..333: note = Related to JAJHPU010000021.1
MNGIKAEMRQPKTSAGSRRTSKLYPINQCALYKLTSPKKLCEALKIEKSLLSDVLESDENYREFTLLEEVDPFSRKIKKKRLVQTPNKKLRNIHERILQLLQRIEYPDYSHAGVKKRSYRSNALVHVNSKTIATFDLKGFYGAVKSYHVNTFFSEQLNCVGDVAGILTKLTTFRNCVPTGSPLSALLALFTSKPMFDDLDALAKKHKLKFTCYVDDLTFSGDSIPSSLERDVSSIVRKHGHSLSINKTKIYRENQPKHVTGTVILNNRIHVPHTRLLAARRLQSAINGEIESFGFTEEKLIQKLAGMLNEASYLDVRFKYKALTAKAMLKSAK

SEQ ID NO: 3059 - protein, 335 aa, Paraburkholderia sp.
  source 1..335: note = Related to SCRP01000034.1
MCAQKTKVGAVRASHQRYPISQCCLYKIGSRSRLADLLYIEKVDLVTLPGERSYKVFTLPEKRDEFSGKIKKKRIVQDPKRPLRRVHDRILYLLNKIELPEYVHAAVKGRSYRSNAAAHTTAAHEVLTLDIKSFYPSVSYLLVREFFRYKMKCASDVATTLADLCTYKGALPTGSPLSPLLSYFACGDMFDELNRLAVECGLKFTCYVDDLTFSGEKIPGDLESRVKSVLRRYGHRLAVDKTIRYRPHSPKSVTGCILHNGAIHVPHSRFRKARMLAAAIATTDDPALTHKLYERLAGLLGEAAYLDGRFTSWKEDTARLLKLATQKLGAAKEAT

SEQ ID NO: 3060 - protein, 312 aa, Pseudomonas syringae
  source 1..312: note = Related to JACYWI010000012.1
MKKRKNLQLKKDIPLDQCALYKIRSKRRLCQILNIPISSLKGFMNDDRNYHTVDIEEFFNELTGKRKKARTASVPNYWLKKLHSRVHRLLSSIAAPLYAHGSIKSRSYITNALVHVGSKEVLTMDLRDFFRSVKRHHVYFFFKDKLCCSPDVAGVLSNLLTYQGALPVGSPASAIIAMWACHTMFERLNQLASEYRLKFSVFVDDLTFSGEVVPSGYQSLVERICAQSGLSVREDKTVLYKHGTAASVTGVIIYAGAIKPPHSRYQNLRKLSAILSQQGAHAIVNGKHAKYSFQGGRNETMLLRNISIPHVD

SEQ ID NO: 3061 - protein, 315 aa, Pseudomonas sp.
  source 1..315: note = Related to NZ_BCBP01000051.1
MKKRKSSPPDKSIPLDQCALFKVRSKRRLCEILRVPLSSLKGLMDDDQNYHAVEIEEFVNELTGKRKKARIASVPNFWLKKLHLRVHDLLSAITTPIYAHGSIKKRSYITNALVHVEAKEFLTMDLRDFFRSVKRHHVYFFFKDKMACSSDVAGVLSYLLTYQGALPVGSPVSATLAMWVCHAMFEQLNKLASSYALKFSTFVDDLTFSGDVVPSKFQLLVERICQQSGLSIREDKTFLYKNGMAASVTGVIIHNGSIKPPHSRYQNLRKLSTVLSQQGRHAVINGKYARYSFQGGRNETRLLRRINNVQSNDSI

SEQ ID NO: 3062 - protein, 315 aa, Pseudomonas putida
  source 1..315: note = Related to CP045551.1
MKKRKNLLPKKSIPLDQCALYKIRSKRRLCQILNIPSSSLKTLMDEDSNYHLVEIEEFVNELTGKRKKARTASVPNFWLKRIHSRVHCLLSAIVVPVYAHGSIKKRSYITNALVHVNGKEVLTMDLRDFFRSVKKHHVYFFFKDKLCCSPDVAGILSKLLTYQGALPVGSPVSALLAMWTCHSMFDGLNKLASEYKLKFSTFVDDLTFSGELVPSGFPLLVDRVCIKFGLSIREDKTVLYKNGVAASVTGVIVHEGNIKPPYSRYQNLRKLSVVLSQHGAHAVVNGKYAKYSFCGGLNEARLLRKFNEEKCSLVS

SEQ ID NO: 3063 - protein, 317 aa, Pseudomonas helleri
  source 1..317: note = Related to WIVT01000008.1
MSQKRRKLLHKKRYPLNQCALYKLTSKKKLSAILGVSLANIKSLCDNDRNYHLVEIEEEFNELTGKRKKARQANVPNFFLKKVHSRVHNLLSRIQTPGYAHGSIVARSYVTNALAHVESWEFLTMDVQDFFRSVKREFVYYFFKDAMFCSPDVAGILSNLLTYKGALAVGSPVSSLLSMWTCKEMFDRLDSLAIKNNLTFSTFVDDLTFSGLKIPASFHEEIESTCRRYGLSIRKDKTKFYKNGMPALITGVIVVSGGIEATYSRFRSIRKLSTILSEEGAHAVVNGKYAKRSLRGGLLEARRIGHISDSRLQSSGG

SEQ ID NO: 3064 - protein, 350 aa, Agrobacterium vitis
  source 1..350: note = Related to JACXXJ020000005.1
MRRKLVRSSIERYDLERSPFAQRPTQRDIGDLLGTTRNHLRYLVTHKEHFIVRRQEEIGKKKKLRELKFPVADLRGVHERLKYHLNKIRQPSYLFSPRRHRGQRDNAALHLGQNQYLTLDLKQFYPSTTATMVRRWFQDEMGIYPDVAGLLTHLATIDDHVSFGSPLTPVLCTLIHRPMFDKIADLCGSHGLRYSLWVDDLTISGRFVHGDIVCEIRKIIADAGLRSHKIRFRTGSRPVYITGIGVVGRELVAPNSLNLRIKELWEALHLAETLDERDDCIQALLAQLGTQRHICGASSAIGRKAADQMNALRQKRRKMHLEAAEKAAADRLPRSATIVQAPEDAPFDLG

SEQ ID NO: 3065 - protein, 350 aa, Agrobacterium vitis
  source 1..350: note = Related to CP081837.1
MRRKLFRPPVERYDLVRSPFAQRPTQRDLGDLLGTTRDHLRYLATHKEHFVVRRQEVIGKKMKLRDLKYPVADLRGVHERLKFHLNKIKQPSYLFSPRRNRGQRDNAALHVGQHQYLTLDLKQFYPSTTADMVRRWFRDEMGMYSDVAGLLTHLCTIDDQVSFGSPLTPVLCTLIHRPMFDKIADLCERHGLRCSLWVDDLTISGQFVHGNVIREVRQIIASAGLRSHKIRIRTGSRPVYITGIGVVGRELVAPNTLNLRISDLWENYHLAETTEERDASIQALLAQLGTQRHICGPSSDLGRKAADQMNSLRQKRSKMYRETAARATAARLSRSLALPHAPEDAPFDVV

SEQ ID NO: 3066 - protein, 350 aa, Agrobacterium rhizogenes
  source 1..350: note = Related to JAAMDS010000038.1
MRRKTARPPIEKYELPRSPFAQRPTQRDIGKLLGASRDHLRFLATHKEHFIVRRQEKIGKKQKLRDLKYPVSDLRGVHERLKFHLNKIRQPSYLFSPRRNRGQRDNAALHLGQHQYLTLDLKQFYPSTTADMVRRWFRDEMGMYPDVAGLLTHLCTIDDQVSFGSPLTPVLCTLIHRPMFDRIADLCERHGLRYTLWVDDLTISGEFVHGDVVREIRQIIAGAGLRSHKVRFRTGNRPVFITGIGVVGRELVAPNAMNLRIKELWEVYHLAETVDERDACIQALLAHLGTQRYISGPSSDLGRKASDQMNSLRQKRNKMHIEASAKALADSLMRSLTEQHSDQDAPFDLV

SEQ ID NO: 3067 - protein, 349 aa, Brucella thiophenivorans
  source 1..349: note = Related to NZ_NNRJ01000027.1
MPRKRRPPIEIYELPSSPFSQRPTQRDIGSLVGCTRDHLRFLATHKESFIVRRQEIIGKKQKLRDLKYPVADLRRVHERLKFHLNKIVQPSYLFSPRQKRSQRDNAEIHLNQQQYLTLDLKQFYPSTSAGMVHRWLQEKMGMYEDVAGLLTHLCTVDGFVSFGSPLTPVLCTLVHRKMFDEIADLCANNGLNYSVWVDDLTISGKFVHGDIVSEIRDIISRAGLKSHKIAYRTGNRPVFLTGIGVVGRNLIAPNILHLRIKELWASYHTAESYEEKNACIQSLLAQLGTQRYICGAKSVLGRKASDQMNSLRQKRSKMRREAIEQSISNRALRITKEVGLKEDAPFDLA

SEQ ID NO: 3068 - protein, 302 aa, Rhizobium pusense
  source 1..302: note = Related to NZ_PVWU01000025.1
MPRKARATFSERYPIERSPFAQRPTQREVAALLGETRDDLRFLATHKEHFIVRRQAILGKQKKARDLRYPVSRLRAIHERLKFHLNKIKQPSYLFSPRKNRGQRDNAALHLGQRQYLTLDIKQFYPSTTAQMVRRWFRDELGMYDDVAGLLTHLSTIDDVVSFGSPLTPVLCTLVHRRMFDEIADLCEQRNLRYSVWVDDLTISGDFVVRDFVRELRDIIRRYGLKSHKIQFRTGNKPVYITGIGVDGDQVIAPNSLNLRIKTLWHELSQAKTIPERDGLIQPLLAQLGTQLHVVGNSSKVG

SEQ ID NO: 3069 - protein, 350 aa, Rhizobium leguminosarum
  source 1..350: note = Related to JACDJD010000002.1
MPRRPRRPVFEKYDISKSPFAQRPTQRDLGELLGENRNNLRLLVDYKEQFVVRRQEVIGKHQKVRDLKYPVSRLRAVHERLKFHLNKIKQPSYLFSPRKNRGQRDNALRHVNQDQYLTLDLKQFYPSTTATMVRRWFQDELGMYPDVAGLLTHLSTIDDRVSFGSPLTPVLCTLIHRAMFDEIAGVCERRGLRCTLWVDDLTISGKFIPGELVNEIREIIRAAGLRSHKVRYRTGNRPVFITGIGVVGTKLTAPNAVHLKIKSLWDDYHQAETLEEKESCSQLLLSQLGSLKHIVGAASLAGRKASDQMNTIRQQRRRMHVAATAAAAATRLSRALMPKESPEDVPFEIS

SEQ ID NO: 3070 - protein, 343 aa, Paracoccus sediminis
  source 1..343: note = Related to FZNM01000001.1
MRHSRKPHPYEIYGLERSPFAQRPTQREVADLLGETKADLIRLANYKDQFIVRRRENIGGKDRDLAYPVSRLRGVHERLKFHLNKVQQPSYLFSPRKKRSQRDNAALHLDQDQYLTMDVKQFYPSTTEEMVYRWFVDELGLFEDVAGLLTRLSTIDGKASFGSPLTPVLCTLVHRPLFDRISDICGHRGLRHSLWVDDLTISGKFVPGQVVTSIREVIRQRGLRSHKIRYRTGNRPVMITGIGVVGRDLLAPNSLNLRIKQYWQDLHDAMTAEERASCAQRLLSQLGTVRHIVGTKSNVGQRASDQMNMLKQKRDKWISEASQEASKKSADEAAPMEHEDIPF

SEQ ID NO: 3071 - protein, 343 aa, Sulfitobacter guttiformis
  source 1..343: note = Related to JASG01000004.1
MRRNSKPPQYERYDLERSPFAQQPTQRDVAALLGETKADLQRLINYKDEFIVRRQEKIGGKVRDLAYPVSRLRGAHERLKFHLNKVRQPNYLFSPRKKRSQRDNAELHLDQDQYLTLDLKQFYPSTTETMVYRWFVDELGMYEDVAGLLTRLSTVDGIVSFGSPLTPVLCTLVHRPMFDNISDICDARGLRHSLWVDDLTVSGKFIPGKVVTSIREAVRERGLRSHKINYRSGNRPVILTGIGVVGRNLLSPNSLNLRIKRYWKDLHEAETNEEKVACAQLLMSQLGTVRHIVGQKSDVGMRAADQMNMLRQKRNKWLQETSVSLPAPEETETASADTENIPF

SEQ ID NO: 3072 - protein, 340 aa, Pseudooceanicola onchidii
  source 1..340: note = Related to NZ_SPUW01000001.1
MRRNKKPAYERYDLDRSPFAQRPTQRDVADLLGETKADLERLINYKDQFVVRRQERIAGKDRDLAYPTARLRGIHERLKFHLNKVRQPSYLFSPRKKRSQRDNAELHLDQDQYLTLDIKQFYPSTTDAMVFRWFKDELGMYDDVAGMLTHLCTIDGKASFGSPLTPVLCTLVHRPMFDSISDICSARGLRHSLWVDDLTISGRFVPGKVVTSIRTVIQDCGLRSHKIRYRSGNRPVVITGIGVVGRDLVAPNSLNLRIRRYWDDLHEAVTADEKAACAQLLMSQLGTVRHIVGAKSDVGQRAADQMNMLKQKRAKWLREANAVTPARQHDASVDAEDMPF

SEQ ID NO: 3073 - protein, 343 aa, Cereibacter sphaeroides
  source 1..343: note = Related to NZ_QRBG01000022.1
MPRNRRSPVYERYDLSRSPFAQRPTQRDVAQLLGEAKADLHRLVNYKEQFIVRRREIIGGKVRDLAYPVSRLRGVHERLKFHLNKIRQPSYLFSPRKKRSQRDNAALHLDQEQYLTLDLKQFYPSTTEAMVFRWFKDELGMYEDVAGLLTHLCTIDGKASFGSPLTPVLCSLIHRPMFDEISEICTKRWLRHSVWVDDLTISGRFVPGQVVEEIRSVIRSAGLRSHKIRYRSGNRPVFITGIGVVGGCLLAPNSLNLRIQKYWQDLREAGTVDEKISCAELLLSQLGTVRHIVGARSDVGQRVADQMNMLKQKRGKWLHEALHLTQLKERTEPTFTGVCDIPF

SEQ ID NO: 3074 - protein, 346 aa, Agrobacterium tumefaciens
  source 1..346: note = Related to NZ_APLP01000010.1
MRPRKARVRFERYEIERSPFSQKPTQREIAKLLGESRDGLRRLIEDKENYIIRREAFVGKKQKKRDLRYPIRRLRAVHERLKFHLNKVKLPSYLFSPRKNRSQRDNAALHLDQDEYLTLDLKQFYPSTTAQMVRGWFRDELGMYDDVAGMLTHLSTIDGAVAFGSPVTPVLCALIHRPMFDRISEICDDHGLRYSLWVDDLTISGKQITGEVVEKIRKVIRDAGLKSHKIRIFRGKKPVFITGVGVVGANLVAHSSLHLRLGAAWAEYDSAETLEERDHCTQTLLSLLGTIRHIVGAQSEAGQKAANQMNTLRQKLAKSRAEAAVANVKRRMLAVQTTEHARDAPW

SEQ ID NO: 3075 - protein, 347 aa, Agrobacterium vitis
  source 1..347: note = Related to NZ_AP023278.1
MRRKKVRDRFERYELARSPFSQKPTQRDIAKLLGESRDDLRKLINYKEQFVVRRKAIIGKKQKERDLRYPVSRLRAVHERLKFHLNKVKLPSYLFSPRRNRGQRDNAVLHLDQDRYLTLDLKQFYPSTTAQMVWKWFRDDLGMYDDVAGMLTHLSTIDEKVSFGSPLTPVLCALIHRPMFDRIAEICDEHELRYSLWVDDLTISGRHISVEILKKIRAVVQEAGLKTHKIRFHSGRKPIFITGIGVVGAHLVAANSLNLRLKTAWAEYHGAQTINERDHCTQVLLAQLGTLRHIVGAKTDAGQKAANEMNSLRQKLKKHRVQDAKLQAAKRQIAASQTITEAADAPF

SEQ ID NO: 3076 - protein, 351 aa, Agrobacterium sp.
  source 1..351: note = Related to CP033022.1
MSGKIARKNFERYGIERSPFSLRPTKRDLAALLGESVKDLKTLAIPSFKEQFVVRRQAETGTKKKKIRDLVYPESRLRGIHERLKFHLNKVRQPSYLFSPRKDRSQRDNAAMHLDQEMYLTLDLKQFYPSTTSAMVRKWFQNELGMFPDVARLLTDLSTIDEKVSFGSPLTPVLCTLVHREMFNEIADVCELHELRYTLWVDDLTISGRSIPAIVLERIREIIRKHGLKSHKIRFHKGRDPVFITGIGVVGRKLIAPFSLNLKIKKCWAEYHAATTTSERDQCIQTLLANLGTARFIVGANTLAGQKLSDEMNALRQKKAKMWRQDVKQSLARNMHLSGISDLAPAGDAPF

SEQ ID NO: 3077 - protein, 351 aa, Neorhizobium galegae
  source 1..351: note = Related to CCRK01000005.1
MSGKVARKNIERYDIKRSPFSLHPTKRDLAVLLGETVNDLKTLSIPSFKEQFVVRRQAETGKKKKKLRDLVYPESRLRGIHERLKFHLNKVKQPSYLFSPRKNRSQRDNAETHLDQDVYLTLDLKQFYPSTTAAMVRKWFQDELGIYPDVARLLTDLSTIDEKVSFGSPLTPVLCTLVHRKMFDEIADVCDAYELRYTLWVDDLTISGRSIPAEILDKIRQIIRNHGLKSHKIRFSTGRRPVFITGIGVVGRKLIAPYTLNLKIQECWADYHAANTVAERDQCIQTLLANLGTARFIVGPKTAAGQKLSSEMNSLRQKKAKMYREDAAESLKRRTEARSLIGSSQIADVPF

SEQ ID NO: 3078 - protein, 345 aa, Aureimonas sp.
  source 1..345: note = Related to NZ_AP025032.1
MLPRSQQRERYELERSPLAQKPTQRDVAQLLGETRDDLRRLRNYKEHFIVRRTAIIGKKGKIRELAYPEGRLRALHERLKYQLNKVKQPNYLFSPRLRRSQRDNAALHLEQNQYLTLDLKQFYPSTNESMVRSWMRDQLGMYEDVSGLLTDLCTVDGKVSFGSPLTPVLCSLIHKSMFDQIARICDNRGLTYSVWVDDLTISGRFIPGEVLNEIRWVVRDAGLKSHAVKYRNGNRPVFITGIGVVGRKLIAPSSLNLKIRVAWSEYHTALSDDERDEICQRLLSYLGTLRHISGSTSETGRKISDQMNSLRQKRSARRFASEATRNEVTKSPPAPKMADPLGLPW

SEQ ID NO: 3079 - protein, 349 aa, Pelagibacterium sp.
  source 1..349: note = Related to MEEU01000016.1
MKSQTLRNRTPTHERYDLSRSPFFQKPTQREVAELLGETRDDLRRLINYKEEFVVRRTIVTGKNDKVRDLAYPVSRYRACHERLKFHLNKVRQPSYLFSPRKHRSQRDNAALHLGGLQYLTLDLKQFYPSTTDTMVRRWFRDELGLYEDVAGLLTHLCTIDGKVSFGSPVTPVLCSLIHREMFDEVARLCEVRGLHFSVWVDDLTISGLFVPGELVDQIRAIVRAAGLKSHAIRYRTGNRPVFITGIGIVGSKLVASNALNLKLKQGWADYHDAETDDEKDFLTQRMLSLLGTVRQISGAGSDRGRKAADEMNSLRQKRNERQRRARASKSALRHVSDPAELVPADAPF

SEQ ID NO: 3080 - protein, 352 aa, Methylobacterium mesophilicum
  source 1..352: note = Related to JADCRT010000002.1
MPRSSQKDKKFERYELSRSPFAQKPTQRDVAKLLGEKRDDLRRLVNYKEQFIVRRQAKTGKKEKLRDLAYPENRLRAVHERLKFHLNKIKQPNYLFSPRRKRGQRDNAAHHLDQDQFLTLDLKQFYPSTTDKMVRRWFRDELGMMDDVAGLLMHLCTIDGRVSFGSPLTPVLCSLIHRPMFDRIAEVCDTYGLQYSVWVDDLTISGRFVPGDVLNKIRQIVHAAGLKMHDIKFRSGNRPVFITGIGVVGANLVAPNSLHIKIRDCWTEYHSAITADEKDAVSQQLLSHLGTLRHITGSSSEAGRKAADQMNSLRQERDARRKAEQKCRQAERNARASVEIFDLSDAPFEMTL

SEQ ID NO: 3081 - protein, 348 aa, Bosea sp.
  source 1..348: note = Related to VFMG01000001.1
MPRKSTAASHYERYGVDRSPFAQRPTQRDLASLVGETRDDLRRLASYKEQFIVRRQVETGKKAKLRDLAYPEGRLRGVHERLKFHLNKVKQPSYLFSPRKGRGQRDNALHHLDQDQYLTLDLRQFYPSTSSQMVREWFRDHLGMYDDVAGLLTHLSTIDDKVSFGSPLTPVLCSLIHRPMFDRIADICEARGLRYSVWVDDLTISGRFVPGEVLRQIREVVQQFGLQSHKISYKTGNRPVFITGIGVVGSRLVAPNSLNLKVKEAWTGYHNAVTDDEKDAMCQRLLSYLGTLRQIVGGKTEAGRKAADQMNSLRQKRDARRKAAAEAYRIEREQRQAVPSAVAADAPF

SEQ ID NO: 3082 - protein, 354 aa, Paracoccus sp.
  source 1..354: note = Related to JACEMU010000004.1
MQKRADKRNGERYPLNRSPLAQNPSQSDLAMLVRETKADLNTLATPEFKEQFLVRRTIETNGKTRNLVYPEGRLRAVHERLKFHLSKIVQPSYLMSPRKRRSQRDNAVAHLEATQYLTLDLKQFYPSTTRQMIRNSLVAQFGMQADVAGLIAHLATADDRACFGSPLTPVLASIVHRPMFDLIAGRCNVDGLSYTVWVDDLTISGPQITGQFRSDVRGIIAQNGLRSHKLRSQTGNHPVFITGIGIVGANLIVPKRIELRSKELWAEFKASQTFEELDSSATRLLSHLGGVKAVVGPSTIRGQKLSSEMNSVRQKREKARRFHQAFVAEQRTRSSQACCIQNGDGVGEQAEISF

SEQ ID NO: 3083 - protein, 351 aa, Ruegeria atlantica
  source 1..351: note = Related to NZ_WQCG01000003.1
MRKRYRLKSGEKYPLERSPFAQKPSQRDIAELVRESKDDLNRLATPRYKEQFLVRRTIETNGKTRDLVYPEGRLRSVHERLKYHLSKIAQPSYLMSPRKGRAQRDNAVAHLEAAQFLTLDLKQFYPSTTRQMIRNSLMEQFKMEADVAGLIAHVATADDRACFGSPLTPVLASLVHRPMFDRIADRCVEDDLSYTVWVDDLTISGLRITGNFRADVRKLVAQSGLKSHKLRTQTGNRPVFVTGIGIVGANLIVPKRLELRSKELWTELKAAQTQEEMEACSVRLLSHLGGIRAVVGASSHRGQKLASEMNSIRQKLSKARRENKARLAEEKAAAQEISRVDPDNEKENIPF

SEQ ID NO: 3084 - protein, 355 aa, Roseobacter litoralis
  source 1..355: note = Related to CP002623.1
MAVRKRRVRKAYERYEIDRSPLAQRPSQRDIASLISENKSDLNRLATPQFKEQFLVRRSIESGGKTRDLVYPEGRLRAAHERLKFHLNKIVQPSYLMSPRKNRSQRDNAAAHLDAAQYLTLDIKQFYPSTTRGMIRNSLVDLFGMEADVAGLIAHVATADDRACFGSPLTPVLASLVHRPMFDAIADLCASYDLGHTVWVDDLTISGNQIPGRFVSQVRAIVASHGLRSHKLKYRTGNKAVFITGIGVVGSNLVVPRSVERRSKDLWRDFQKADTVDEIDTAGSRLLSHLGGIRHVVGKSSKRGQKISSEMNSVRQKRTKALRIGSEKSASTSNLRYLTAEEQEERRDEIDAIPF

SEQ ID NO: 3085 - protein, 346 aa, Roseovarius sp.
  source 1..346: note = Related to NZ_CP045393.1
MYERYELERSPFAQKPTQRDIAALVRENKEDLNKLGTDRFKEQFLVRRTIETSGKERRLVYPEARLRAVHERLKYHLNKIIQPSYLFSPRKNRSQRDNAEVHLSAFQYLTLDIKQFYPSTTRRMIRNSLAVQFGMAGDVAGLIAHVATADDRACFGSPLTPVLASLVHRPMFDEISDLCVSYGLSHSIWVDDLTISGPKIPGAFIAEIRRIIASYGLRSHKLKYYTGNKAVFVTGVGIVGSNLVAKKKVELRSKELWRALKNAETLDEIDTATTRLLAHLGGIKQIVGKSSKRGQKLSNEMHSIRQKREKAFRKNTERLINEASGLRRLSPEEQEARREEIDALPF

SEQ ID NO: 3086 - protein, 354 aa, Exiguobacterium profundum
  source 1..354: note = Related to CP059262.1
MPRIRSSGLRERYPIERSPFSQNPTQRDIAELLHETKASLQTLATPHYKELFLVRRKVKTSGKERLLVYPVSRLRAVHERLKFHFSKITQPSYLMSPRIGKAQRDNAAAHLAAAEYLTLDLRQFYPSTTRAMIRNSLMSQFRMAADVAGMIAHLATADDRACFGSPLTPVLASIVHRPMFDEIADLCACYDLSYTVWVDDLTISGARVPGEFRRKVREIISNHGLRSHKLRFRTGNRVVFITGVGVVGSLLVVPRRMELRSKELWDDLHSSETFNEIDAASSRLLAHLGGIRYIVGHESLRGQKLADEMNSIRQKRKKAYLSDAARRSAESASLRYLTDEEXEARKLEIAAIPF

SEQ ID NO: 3087 - protein, 333 aa, Sphingobium sp.
  source 1..333: note = Related to JACESO010000004.1
MPRIQRRLNQVERYELARSPLSQRPTQRDLAALVGETRDDLRRLVNYKEQFIVRRQTETGKKKKLRNLAYPSGRLRAVHERLKFHLNKVKQPDYLLSPRKGKSQRDNAAAHVGQDQYLTLDLKQFYPSTTGGMVKRWLHAQLRMEEDVAGLLAHLVTVDGKVSFGSPLTPVLCSLVHRPMFDKIASLCRHRGLNYTVWVDDLTISGRFVPSALLVQVRRIIQDHGLRSHDIRFRSGNRPVFITGIGVLGRNLVAPQALHLSIRSSFEEYHAAITDVERDSVEQKLLSQLGTLRHVVGVSSKAGQNAADQMHSIRQKRDKLRTAEQYSTTLAAG

SEQ ID NO: 3088 - protein, 348 aa, Devosia sp.
  source 1..348: note = Related to FOFL01000001.1
MPRRAPAKSERYQLHRSPLAQRPTQRDIAKLLGETRDDLRRLVNYKEEFVQRRKIESVKSGKIRELAYPVGRLRGVHERLKFHLNKIKQPSYLFSPRRGFGQRDNAAYHIRQDQFLTLDLKQFYPSTSGAIIKRWLWEDLGMPEDVAGLLMHLVTVDEKASLGSPVTPVLCSLIHRKMFDRIAEICDARGLRYSVWVDDLTISGRFVPGDVLMQVRDIIRTSGLRSHKIKFRTGSRPVFITGIGVVGPHLVAPNTLHLRIQAGWADYHDAVTDDEKDAACQTLLSFLGTLRHISGRKSKAGQKVADQMNALRMEREVRQKFAIQLDKEKAELRVQTNYCAVEDLPFDL

SEQ ID NO: 3089 - protein, 342 aa, Devosia enhydra
  source 1..342: note = Related to NZ_FPKU01000001.1
MPVTKKVQRAERYPIARSPFSMRPTQREVARLLGESRDNLRRLVNYKEQFVQRRDLEINGKLRHLAYPESRLRSAHERLKFHLNKIQQPAYLFSPRRGKSQRDNAALHLEQVQYLTLDLKQFYPSTTSAMVRRWFINDLGMYQDVAGLMTHLVTIDDKVSFGSPLTPVLCTMVHRRMFDQIADICRARGLNMSLWVDDLTISGQFVTREVLREVRTVVRAFGLKTHKIKYRTGNRPVFITGIGVVGSNLVAPAKMNLKIKAAWEAYHAAQTDAERDACAQHLLTLLGTVRHIARRGSPLARRVADQMNSLRQKRAVLTVTTTTRSAQAGAALIANDAVGDPF

SEQ ID NO: 3090 - protein, 319 aa, unidentified
  source 1..319: note = Related to WRPF01000034.1; note = Caulobacteraceae bacterium
MTKRTHERYALTRSPLAQRLTQKKLANLLRRPLPQLKGLIKYKKSFVVAEVREIDGKARPLCYPRGPLRSVNEALKYQLSKIRLPDYVASPRRGRGQRENAAVHVDAKQILTLDLRKFYPSVSRRYIARFFREEFSMHPDVAGLITELLTFEGRVLYGAPATPVLVMLAHRKMFDQIDNACLAFGTKMSLWVDNLTISGAEVPGALLVQVREIIASHGYKTHDIAFVTTNRDSTVTGVVVRCGELHPANSSNLAIRDLEAALRNSVDPSEYEAKANRLLSRLGGQLHILGTQREWGQKIARRMNVIRQKRDKRVRSNSK

SEQ ID NO: 3091 - protein, 328 aa, Methylobacterium sp.
  source 1..328: note = Related to NZ_LMNU01000047.1
MTIKRKEPSHRSDRYELEASPLYQKPTQKQFAELVGLSKSKLRGLIDHKKQYIIRRDAEINGKKRRLVYPFGKFRSVHEKLKFHLNKIIQPAYLYSPRKGRNQRSNAVFHLGQTQYLKLDIKQFYPSTSSEHVFRWAKYDMRMSDDVAGLLVHIATIDDVVSFGSPLTPVLATLVHRRMFNAIAEECSARGLRISLWVDDIVISGKFIPGPLVSRIRDLTRSNGLKSHKLEYFTGYRRVTITGVVVKGDEIHSPRKLHTEISNAYGLAIQSNSRIEAEAAVDRLLSTLGRYRVMVGKGSPMGRRASSRMNAIRQKRVRFVSERCSTTD

SEQ ID NO: 3092 - protein, 346 aa, unidentified
  source 1..346: note = Related to nan
MTVKRHKQNKYERYPFENSPWTQDLTQRDLAELLGWKKQQLEALVRDKDRYIKRGPKLIGTKTRELAVPTGKLRTIHERIKIHLNKIKQPEYLFSPRKGRAQRDNAEHHVGQNQILSLDIKQFYPSTTDEHIFRWAYHVAGLRADVAGLFTKLVAVDGKMPFGSPVSPVLTTLVHRQMFDAISDICKEQDLKMSLWVDDLVISGSFVRGKVMEDVRAAIRRFGFQTHKIQFRSTARPVPITGVPVTKTSIGAPLSLHRRIQSGYAELRQRLTDAQRTQATDKLLAALGTYRYHLGASSEQGRLAANRMNALRMRRARLKPRYVTYPVGSTPDETSTEIDDGTPPWE

SEQ ID NO: 3093 - protein, 346 aa, Rhizorhabdus wittichii
  source 1..346: note = Related to CP021181.1
MTRRKQPPYERYHFDQSPWVQDLTQRDLAALLGWKKQQLEALIRDKERFIKREAKLVGTKMRNLAVPTGKLRTIHERLKFHLNKIKQPGYLFSPRKGRAQRDNAEHHAGQTQFLSLDIKQFYPSTTDEHIFRWAHHMAGLRADVAGLFTKLVAIDGRMPFGSPVSPVLTTQVHRTMFDEIHAICEANRLHMSLWVDDLTISGVFVRGAIAEEIRAVIRRHGFQTHKVAFRNAHRPVVVTGVPIKNKRVVAPRSLHKRVQAGYQALRESRTDIERGIAIDRLLSALGTYRYHLGASTAEGRTTSNRMQMLRVRRARLKMSAITVPTVGPAQATSVLAGAEGLDLPWD

SEQ ID NO: 3094 - protein, 343 aa, Sphingomonas sanguinis
  source 1..343: note = Related to NZ_LDTE01000007.1
MKQHKQRYERYLFKDSPWVQDLTQRDLAELLGWKKHQLEALIRDKERWVKREPKQIGLKLRNLAVPTGKLRTIHERLKFHLNKIRQPEYLFSPRKGRSQRDNAEHHAQQTQFLSLDIQQFYPSTTDEHIFRWAFHVAGLRSDVAGLFTKLVAIDRKMPFGSPVSPVLITHIHRAMFDEIFAICQANGLRMSLWVDDLTISGTFVRGELVEQIRGIIRQRGFQTHKIEFRSAARRVIVTGVPIERRRVMAPRALHQRIQNGYAALRGDLTDVERGKAIDKLLSALGTYRYHLGPSEPGGRKAADRMEALRVRRAKLDMTMVTLPAVENVITASSTLPGSELPWE

SEQ ID NO: 3095 - protein, 348 aa, Sphingopyxis sp.
  source 1..348: note = Related to NZ_AP017898.1
MKRRKQQEYERYPFSDSPWTQDLTQRDLAELIGWKKHQLEALVRDKERYTRRKTELIGSKLRDLAVPTGKLRTVHERLKFHLNKIKQPTYLFSPRKGRSQRDNAEHHVEQVQFLSLDIKQFYPSTSDEHIFRWAYYVAGLRSDVAGLLVKLIAIDGKMPFGSPVSPVLTTHVHRSMFDEIYELCRSQGLKMSLWVDDLTVSGQFVRGELVEAIRVIIRRQGFKTHKIKFRSVGRAQGGRPVVVTGVPVRARRVDAPFSLQKRVQDGYAKLRPDLTDVERAQAIDSLLSALGTYRYHLGRSSPEGRKTADRMQALRQRRAKLDLTVITQPSGPIKPWGTTTRDSDVPWE

SEQ ID NO: 3096 - protein, 348 aa, unidentified
  source 1..348: note = Related to CP011344.1; note = Proposed Citromicrobium sp.
MKRRRQQKYERYSFRDSPWTQDLTQRDLAELIGWKKQQLEALVRDKERYTKRKREKIGSKMRDLAVPVGKLRTVHERLKFHFNKIKQPPYLFSPRKGRSQRDNAEHHAKQIQFLSLDIKQFYPSTTDEHIFRWAYYVAGLRSDVAGLLVKLIAIDGRMPFGSPVSPVLTTHVHRHMFDEIYDLCCRRGLKMSLWVDDLTISGQFVRGELVDAVRAVIRRQGFKTHKIKFRSVGRAQGGKPVVVTGVPLRAGRVDAPFSLQKRVRDGYALLRTDLTDVERAKAIDSLLSALGTYRYHLGRGSPEGRKAADRMQALRQRRAKLDAKGYVTGPKAEGSFEDRVTTSDVPWD

SEQ ID NO: 3097 - protein, 317 aa, Qipengyuania flava
  source 1..317: note = Related to JAGHQS010000004.1
MKTTKGRLEWLIENKERFTKREDRQIGRKTRNLCYPVGKLRGVHELLKFHFNKIRQPPYLFSPRKGRSQRDNAEHHADKVQFLSLDIKQFYPSTTIEHVFRWAYHEAGLKADVAGMLAHLICIDGKLPFGSPVSPIAATHIHRSMFDAVYDICLENDLQMSLWVDDLTISGAFVRGELIEQIRSVLRRHGFQTHKIKFRQSDKPVIVTGVPVKNRRVIAPRSLHQRVEDGYAELRGAESDNATVSAINQLLSALGTMRYHYGAQSVEGRKAADRMHALRRRRDAIQQASSRQIPSDLSIRKQDEAVTGDGHLPWVAD

SEQ ID NO: 3098 - protein, 345 aa, Sphingobium sp.
  source 1..345: note = Related to JADOUC010000001.1
MRQRKPKRYERYALEDSPWVQNLTQRDLAELLGYTKTQLEALIRDKDNWIGRRTEMIGSKLRNLAVPRGKLRAVHERLKFHLNKIKQPDYLFSPRKGRAQRDNAEHHVSQGQFLSLDIRQFYPSTTSEHIFRWAHHELGLRTDVAGMLVHLVSVDGRMPFGSPISPVLTTLVHRSMFDAIKLICDAHDLRMSLWVDDLTISGRAIPGTLIEDVRAEMRQRSFQTHKIQFRSGNRPVIVTGVPIDGDRVAAPRSVHERVRTGYAALRVPLADPDRAQQIDKLLSALGTLRYHVGRSSPEGRRAANRMDALRRRRSSLSKSVTTLPTLTDREASAELPVSTSSLPWE

SEQ ID NO: 3099 - protein, 345 aa, Sphingopyxis sp.
  source 1..345: note = Related to NZ_JACBGA010000006.1
MKRRKVSRYERYAFEDSPWVQKLTQKELATLLGYTKDQLEALIRDKDKWIGRRAEVIAGKKRNLAVPYGRLRGLHERLKFHLNKIRQPDYLFSPRKGKAQRDNAAHHVGQTQFLTLDIRQFYPSTTGEHIFRWAHHEAGLRPDVAGMLVHLVAVDGKMPFGSPISPVLTALVHRPMFDAISGLCAERDLHMSLWVDDLTISGREVGGDLIDQVRAIMRKAGFQTHKIRFKMGNRPVVVTGVPIDGSRVTAPRSVNERVRIGYANLRVAANDNERRQAIDALLSALGTYRYHMGRGTAEGRKAANRMDALRRRRSALSNSYRSPAEVELDSASEAAAYDGEAPPWE

SEQ ID NO: 3100 - protein, 326 aa, Sphingomonas sp.
  source 1..326: note = Related to LMKH01000010.1
MWAQNPGQRDIASLIGMTKGQLGAIVRDKERYIRRDTIDINGKLRNLTVPTGKLRMVHERLKFQLNKIKQPPYLCSPRKGVGQRDNAEMHVAGHQLLKLDIRQFYPKTMQEDIWRWAHYSLGIMDDVAGLFAKLAAIDGRMPFGSPISPVLTSLVHRGMFDKVYAICGSHGLKMSLWVDDLTISGAEVPGGAVTDIRQAIRAGGFQTHKIEYLMTARPTEITGVPIAKGRVLAPHAIHRRIKEGYEALKVAASDTERSNIIDKLLSALGSYRYHLGSSTPEGRLAADRMQSLRQRRAKMTIVAETPQTLSSIQAVTFGAPDTLPWD

SEQ ID NO: 3101 - protein, 341 aa, unidentified
  source 1..341: note = Related to SDYE01000871.1; note = Alphaproteobacteria bacterium
MKRPRDRRYERFGLDASLWAQDPTQQDVARLLGMTKDQLEAIVRDKERYTSRRTLEINGKLRNLAIPTGRLRRIHERLKFQLNKIKQPPYLCSPRKGIGQRDNAERHVDGAQLLKIDIRQFYPRTMQEDIWRWAHHTMGIRDDVAGLMAKLVAIDGRMPFGSPVSPVLTTLVHRPMFDRIYEVCGVRALAMSLWVDDLTLSGTEITANTIVAVRQIIRDGGFQTHKIEHLATARPVDITGVPIAAGRVLAPLALHRRIQEGFTALRAATTDADRASIIDKLLSALGTYRYHLGTSTLEGRRAADRMHALKQRRARMAITAVTVPATTTVHEAKSSAALPWE

SEQ ID NO: 3102 - protein, 383 aa, Novosphingobium silvae
  source 1..383: note = Related to WVTD01000004.1
DRKRADLRPRRPSRSRSRRAADHHVCGAGLSAVPKNRLRQRAAKRPRYERYELADSPWTKKLTQRDLAVLLGTTKDRLEALVRDHENYVHRRDENIKGKLRKLAIPRGKLRAVHERLKGHLNKIKQPPYLYSPRKGRGQRDNAFLHASSAQVLKVDISQFYPQTTVEDIWRWAHYTVGMREDVAGLFAKLVAIDRKMPFGSPISPVLTSLIHRPMFDRVYQLVREAGFEMSLYVDDLTISGQGITGEFLAAVRSEIRSGGFNTHKIEFLEAARPVVITGVPIAGKRVLAPTALHQRLRRSYADLKSARSDKERAEVIDQILIALGTYRHFVGASSDEGRKAANRMHALKQRRRNLSIELVTMPTVDFVPTATLSPAAPGVPWA

SEQ ID NO: 3103 - protein, 354 aa, Reyranella sp.
  source 1..354: note = Related to JAFKJN010000009.1
MAKPTDKTISERYAFSESPLVGLSTQRKLAQLLGSSKSRLHKLVAAVESDPSNCYKIEDRQVGEKLRTFSVPVGQMRKIHERMKILLGRISLPEYVMSPRRGKTIATNATAHRHAAELLKVDVKSYYPSTTDELVFRLFHHRFGIPGDIAGLLTKLLTVNGRVPIGSPASPILAFWASKPAFDKIASAVQSRGLKPTLWVDDLSISGRHVPREIADVVSYELGKLGYMGHKVKFQSRRRGFSITGVRIDSRGPGPTNAINLKIRDGLRRLERKSNTDEETSKLLAQLIGLNGHRLGTMAKDHPAAPRARKLQQHLHQRRRRHLMTMQETLSSSGQADSKGLSASAASRAFRSAS

SEQ ID NO: 3104 - protein, 305 aa, unidentified
  source 1..305: note = Related to MEQK01000113.1; note = Bdellovibrionales bacterium RIFOXYD1_FULL_55_31
MAETNTLPLSQSALYKVQSRARLAKTLLISPRHLKFLARGTQYKLTSILDKNVKPRMLQVPQGDLRKVHDRVRYLFAQLKAPEYLHSGVKGRSPVTNAKKHRSGAAGMRVDVRKFFPSCSRLSLAKFFHHDMGMAGDVAHQLSLLCTCDGALPTGSPLSMSLAFWMHRRVFDRIERMARERGYVFTLFVDDANFSADLSIPREFELAVRSELRRVRLRAHPRKTSRVAPGTARQITGVILPNSDEIRVPNAQRLKFLRGLETIKQNSALKAERVNSLRGLLAWMRQIEPTIFPRAGGELTRLNSK

SEQ ID NO: 3105 - protein, 342 aa, Burkholderia vietnamiensis
  source 1..342: note = Related to JAIZSQ010000047.1
MPMKNPSHRREKAFGRARLRKNKSARYPIERSPFWRLSSIHQLAALLDVPVEDLEATCMAPSYNRFDDQPKPGKEARHIQEPTEATLKIHYRIARHLDSIQRPDFLHSATKCRSHVTNARAHLASGGAVVAMDIRKFFESTTYHHVKAFFYKDLGCSHDVARLLATVCTADGHLPTGSCISPLLSYFTHRQLFAEIEKLCVVTNVIMTLYVDDLTLSGIHATKSMLYRIKALIVRHGLQTKSTKDAVLRPGKSAIITGAIRAGDQLRLRNKHHGAIVEIQDQMSLGRTPPLDQLRGRIASARAVDPQAAARLEARLERIVRRGQLANGEGDLSGIVRKKPGI

SEQ ID NO: 3106 - protein, 333 aa, Burkholderia vietnamiensis
  source 1..333: note = Related to JAGSTU010000036.1
MKNPLHKREKALGRARLRRNQSARYPIERSPFWRLSSIHQLAMLLDVPVQEIKATCMEPSYNRFDDHPKPGKEARHIQEPTDRTLKIHYRIARYLDSIERPEFLHSATKKRSHVTNARAHLPSGGAVVAMDIRKFFESTTYHHVKAFFHRDLGCSHDVARLLANVCTADGHLPTGSCISPLLSYFTHRLMFAQIERLCVGKGVVMTLYVDDLTLSGMHATKSMLYQIKNLIVRHGLQTKATKDAVVRPGKSAIITGVMRAGEQLRLRNKHHGAIVAIQDQIAAGETESFHQLRGRIAAARAVDPQAATRLEARMKRLAHATSGDVATGEDARS

SEQ ID NO: 3107 - protein, 329 aa, Burkholderia sp.
  source 1..329: note = Related to NZ_JAFD01000236.1
MKNPSDRRDKAAGRARLRKNETGRYPVERSPLWRLSSIHRLAVLLGVPVQELEAACMAPSYHRFVDPPKKTGKEARHIQEPTGATLGIHYRILRHLDSIQRPDFLHSATKNRSHVTNARSHLASGGAVLGMDIRRFFESTTYHHVKTFFHKDLGCSHDVARLLATVCTADGHLPTGSCISPLLSYFTHRRLFAEIEGLCVEKRVIMTLYVDDLTLSGVHATKSMLHQIKALIARQGLRTKPSKDAVVRPGKPAIITGVVRDGDQLRLRNSHHDAIVQIQDLIAHGNAPSLHEQLRGRVASARAVEPTAAARLEARLIRLMSGERPADSK

SEQ ID NO: 3108 - protein, 328 aa, Burkholderia pseudomallei
  source 1..328: note = Related to CP009157.1
MTRDAHKRDKSAGRARLRKNKSARYPIESSPLWSLSSIHQLAVLIGIPVDELEVTCTSPTYHRFDEAAKEGKEPRHIQEPTGATLRAHYRLVRHLDSIQRPDFLHSATKKRSHVTNARAHAESGGAVVAMDIRKFFESTTYQHVKRFFHKDLGCSHDIARLLANICTVDGHLPTGSCVSPLLSYFTHRHLFADIERRCVERGVTMTLYVDDLTLSGPHATKSLLFAIKAMIKRCGLRTKDAKDAVVRPGKAAIITGVVRSDGGVRLRNKHHGAIVAIQDSIATTGDNNDDVLRGRLAAARAVEPNAATRLEERLKRIIGNQQRNASAK

SEQ ID NO: 3109 - protein, 328 aa, Rubrivivax sp.
  source 1..328: note = Related to JACZKT010000108.1
MKSLQHRVDKAAGRKRLRKNKSARYPIEQSPFWGLASIHTLASLLGVPVKDLEAVCLSPAYNRFDEPPKPGAKPGKEPRHIQEPVDATLRIHYRIVKHLDSIQRPDFLHSATKQRSHVTNARAHVDAGGAVVAMDIRKFYESTTYHHVKAFFHRDLGCALDVARLLATVCTADGHLPTGSCISPLLSYFAHRKMFAAVEALCVEKQVTMTLYVDDLTLSGAHATKTMLYQVKALIKQQGLRTQPTKDAVVRPGKAAIITGAVRDGQQIRLRNKHHNSIVTLQDRIASGDDVSFNQLRGRVAAAQSVEPVAAARLVARLDRILSNDKAA

SEQ ID NO: 3110 - protein, 331 aa, Acidovorax sp.
  source 1..331: note = Related to SDXY01000242.1
MSNATNNKHRRQRLALKRENRRSPSEKYPLERSPVFELGGPRELATLMQLSIEQIRAIAANPEYHFFDEEPKREGKAARHIQDPRGDTQTLHYRFAKFLNRIERPAFLHSATRGRSHISNAAVHRGTYPVVCADIEKFYENTTRAHVKGFLFRELHWPMDLAALMADALTVNGHLPTGSAVSPILSYFTHRRMFAEIEAMCIATGCTLTLFVDDITVSGARASMSLLRQIKQILLGRGLRAKANKDKSAPTGSAVVITGAVRQGDRLRIRNEHRKGIVELLARYEAGEGAVEEQLVSKIAAARCVDSAGAVPLERRFTQLRSVARSSASGV

SEQ ID NO: 3111 - protein, 325 aa, Burkholderia glumae
  source 1..325: note = Related to CP001505.1
MNKKRSALKRRLRANQSCRYELSRCALYGVRQLSVLTDLLQTTNKALRQSAQAPEFATWVDRSRPEKPRDIQDPRGTTERLHYRICELLDRVIRPEFLHSATRKRSSITNASQHVSHGPCVTTDMKSFYEATSTKQVEEFFSDSLNMAPNLARKLANLCTTDGHLPTGSPLSPLLSYWAHHQTFDKIHELVVERGVVMTVYVDDMAFSGAHASLALLRQVKHKLRLRGLETHKDKSFGRGQFKHITGAAVNGRGIHVPNRRLKQIVDDQGVLAKGEFDAETVASLRIKLSGRIASASAISRKTAAWLKRRDVYNPKGRRGAITAG

SEQ ID NO: 3112 - protein, 320 aa, Cupriavidus campinensis
  source 1..320: note = Related to VCIZ01000019.1
MNKRRLALKKRLRANKQARYSLEGCALFGVTEMSVLSRLLQADNKSLRLTCKAPEFAVWVDTTKPLKPRNIQDPRGITERLHYRLCELLDRVVKPDFLHSATRKRSAITNAARHISKAPCVTTDMKSFYEVTTTQQVAAFFREDLHMAPDLALKLAQLCTVNGHLPTGSPLSPLLAYWAHRRTFGQLYEMSWSAGIVMTVYVDDLAFSGEHASLAFLHIVKQILRRRGLHTHKDKSFGAGQFKHITGAAVSSKGLHVPNGRLKRIVDGIDELTVVSDPAQQADLRRRLVGRIASASAISRQIGNALKRRHIQSAESAVTD

SEQ ID NO: 3113 - protein, 312 aa, Rhizobacter sp.
  source 1..312: note = Related to JADMJX010000176.1
MNTPRDPYALESSPFFRLTSIHELAKLLRLTVGQLRQECLHPAFAPMRVVRKPGPRSKTRNVSPPLKTTLLLHQRLLRFFDRVRRPPYLHSATRRRSHVTNAAAHSGQRHLVKADIRKFYESTTYSHVVAFFHHELQMAGDLARLLARLCTREGRLAMGSPLSPLLSFWVHKKMFDRLDALSRQHRLRFTAYFDDLTISGNRITESFFQTIRRSVAIQGLELKEQRASVVRVRAGVEVTGAWLSRGALFVPQPAYLLARQAIAAVSSAEADELATAIRTAEGHVSASSAIRRGAGKALNRLMARAIHAKKPL

SEQ ID NO: 3114 - protein, 341 aa, Prosthecobacter fusiformis
  source 1..341: note = Related to SOCA01000009.1
MIGHSQIMILSKTRADEDIKISKLYFVGTKKRLATVLKSNPSVLRRLAKTGDANYQHIFVTSRGKKRAVQNPNPELKEIQVRINQLLQRINYPEYMMAGLKGLSYEKNASAHLGLESTRVCTVDIEKFYPNCQRGAVIRSLEKWFNQKHDVAVQLADLVCLNGHLPTGGPASLLFSFWSNRDVFDEIKLAADAHGLKMTVYVDDMTFSGENAGLKFLHDCVLPVLKRAGLRGHKIKSYHKSCPQEITGIILNKGKLCLPYRRFKDIDKNILALNAARKPVARLKLINSLVSRLYSVSAFFPKCKTKAKAMGKKQKALLSKFPYLKLRHRFGKQAASLKTGR

SEQ ID NO: 3115 - protein, 313 aa, Rhodovulum viride
  source 1..313: note = Related to NZ_MUAV01000008.1
MPKTQPEEGYQLKDSPFFRLRSRKQLAKLLRVSADTLDEISHRHDLYVRRWKHKKLKDDEKGAWLKHPPTPEQAENYRPIDIPDPQLKAMQGRIGDLLGRVKAPEFLFSPVKGRSYVENAAHHKEAKAFWLLDVADYFPSCSANNVARFFHRELECSRDVTAVLVHVATLGGCLPQGSPCSPILAYYSNSHIWLAVEKLVRAKGCKLSLYADDITISGDVVPKALIWEIKKLIFGNGLRLKTSKEVSLINAPADITGVIVKDGATHLPNRQLKRLAELKQERANTTNPKLQQRIDNQIAGRLSQRKQVENPKT

SEQ ID NO: 3116 - protein, 313 aa, unidentified
  source 1..313: note = Related to CP046620.1; note = Rhodobacteraceae bacterium 9Alg 56
MPKKQSDGGYHLKDSPFFRLRSRKQLAELLRVSANTLDEISHRSDLYVRRWKHKKLKDHERGAWLKQPPPPEKAESYRPIDIPDVQLKAMQKRIGDLLGRVKAPEFLFSPVKGRSYVENAAHHKESKAFWLLDVADYFPSCSANNVAHFFHRVLECSRDVTAVLVHLVTLNECLPQGSPCSPILAYYSNSHVWLAVEELVKARDCKLSLYADDITISGDVVPKALIWDIKKLIFGNGLRLKDSKEVSLINAPADITGVIVKEGGTHLPNRQLKMIAELKQLRARTTNPKLRGRLDEQISGRLSQRKQVENPKT

SEQ ID NO: 3117 - protein, 309 aa, Pseudovibrio japonicus
  source 1..309: note = Related to NZ_BMXE01000001.1
MRKTQLKDGYQLRDSPFFRLANRKKLSTLLRVSEETLKALSTSQDLYTRRWKHKTKKDKEVDAWKNYIPENADEYRPIDIPIPKLKATQNRISDLLSRVQAPDFLFSPVKGRSYVENASHHVEGTAFWSLDVADYFPNCKANNVARFFRRDLECSRDVTAILVALTTLNKCLPQGSPSSPILAYYGNSHMWLKVADLVASYSCKFSLYADDITISGPIIKKELIWKIKKIIHANGFLLKPSKEISLIHAPADITGVIVKQGKTHLPNRQLKRLAELKKERAHTKNPASQAVLDNQISGRLGQRRQVERV

SEQ ID NO: 3118 - protein, 308 aa, Luteovulum sphaeroides
  source 1..308: note = Related to FZOV01000003.1
MPLKLGYRLVDSPFYKLKSRSKLARLLRVSTETLDQLSSGRMLYARRWKHKKLEKWLCQPPSEDAADIYRPIDIPDPCLKAVQSRIASLLSRIHPPDFLFSPVKGRSYVENAARHVGSEAFWLLDIADYFPSCAANKVARFFRSDLDCSPDVSAVLVRLTTHNECLPQGSPCSPILAYYCNRPMWLAIEKIVTDAGCKLSLYADDITISGDVVRKSMIWEVKKIVHGNGLRLKASKEVSLIKSAADITGVIVKPDGTHLPNRQFKKLAELKALHSTTVNPKDKARIENQISGRIAQWRQVESFRIAPD

SEQ ID NO: 3119 - protein, 311 aa, Gemmobacter sp.
  source 1..311: note = Related to NZ_LJSC01000031.1
MQKTPPRQAYQIKDSPFYKLSSRRKLASLLRTSSDTLAELASGKPMYVRRWKHKKLDQWLREAPSTTDADVYRPIDIPDPRLKAVQSRIAALLARIEPPDFLFSPVKGRSYVENAARHVGSKAFWLLDVADYFPSCTANNVARFFHRDLLCSEDVTAVLVKLVTLRECLPQGSPCSPILAYYCNRPMWLAIESCVKASGCKLSLYADDITISGDVVRKEMIWEIKKIVHGSGMRLKASKEVSLISAPADITGVIVKPTGTHLPNRQLKKLAELRKLHTLTTNAKDKARIENQISGRVAQRRQVESFQPSNE

SEQ ID NO: 3120 - protein, 311 aa, Sphingopyxis sp.
  source 1..311: note = Related to NZ_SCMU01000003.1
MPLRHSATPYTLRDSPFFRLRTRKKLATLLRVSEAALADISARNDLYVRCWKHKKDKDIWLREQPAPDIAAHYRPIDIPDSGLKAVQSRIAGLLSRITPPDWLFSPVKGRSYVDNAASHKGARAYWLLDIADYFPSCSANNVAHFFNRKLECSPDVTAILVHLTTWQQCLPQGSPCSPILAYFSNLDLWQEIEQSVMQAGLKHSVYADDITISGQMIRKELIWEVKQSVHKHGMKIKADKELSLIDSPADITGVIVVGDRTKLPNRQLKRLFELRAERHRARDAIKKRLLDNQISGRVAQKRQVEQAYNAK

SEQ ID NO: 3121 - protein, 307 aa, Sphingorhabdus wooponensis
  source 1..307: note = Related to NZ_RWJI01000001.1
MPTRHRAVPYTLRDSPFFRLRRRKDLAKLLHVSETTLATIASRNDLYERCWKHKKLKNNWLDDEPSADIAHLYRPIDIPDGGLKAIQSRIANLLGRITPPDWLFSPVKGRSYVGNAACHRGSKAFWLLDIADYFPSCTANNVAHFFQRKLECSPDVTAILVHLTTLQQCLPQGSPCSPVLAYFSNLDMWREIEQSVSKAALKHSIYADDITISGPIVPKKVIWEIKQAIHKHGMKIKADKELSLIDSPAEVTGVIVVGDRTKLPNRQFKRLFELRGERHRERSKTLMRLLDGQIAGRVAQRRQVEQF

SEQ ID NO: 3122 - protein, 300 aa, Sphingobium yanoikuyae
  source 1..300: note = Related to CP060122.1
MSYELRDSPFFRLKTRKKLAATLKISEMALNTLTVRTDLYVRKWKHKKEKDKWLETPPPPGESHLYRSIDIPDSDLKAVQSRIAKLLSRVTPPDWLFSPVKGRSYVDNAARHRGSIAFWLLDIADYFPSCTANNVAHFFRTRMECSPDVTAILVHVATWHQCLPQGSPCSPILAYFSNLGLWEEIESAVIEAGLKHSIYADDITISGAIVRKKVIWEIKRSIHKHGFKIKAEKELSLIHRPADITGVIVAGDDTKLPNRQLKRLFDLRAERHKAKGKLLISQIDNKISGHLAQKRQVERT

SEQ ID NO: 3123 - protein, 313 aa, Sphingomonas sp.
  source 1..313: note = Related to NZ_JPDP02000039.1
MLPLPNGSQYALRDTPFFRLRSRKKLAEILLVSDAALQRVLNEENLYERRWKHKKEKDSWLNFEPKPEVSHFYRPIDIPDKGLKSIQSRIAKLFAKVTPPDWLFSPVKGRSYVNNAARHVGARAFWLLDIADYFPSCTDNNVAHLFHTRLECSPDVTAIIVKLITLCGCLPQGSPCSPIMAYYSNHTMWLKISEIVTDSGLTHSVYADDITISGNLIKKEVIWNIKATVHKHGLRIKAEKELSIIDSPADITGVIVKGGRTMLPNRQLKRLFELRGERQRAKGSLAKAALDSQIAGRLAQQRQVEHQYRHPPS

SEQ ID NO: 3124 - protein, 312 aa, Profundibacter amoris
  source 1..312: note = Related to NZ_CP032125.1
MLKETTINTYSLRDSPFFRLRSRKKLAQLLRVSPKTLSEISQREDLYSRYWKSKKGDVWLKSPPDEVDADKYRPIDIPVHRLKSLQARIAKLLSRITPPEWLFSPVKGRSYVDNAAYHKGAKAYWLLDIENFFPSCSGNNVVHFFSSKLECSPDVTAILVHITTILDTDTDRVGLPQGAPCSPILAYFSNLDMWAEIESIVKRASLKHGVYADDITISGGMVPKAAIWEIKKAIHKHGHKIKAAKEVSLIHAPADITGVIVAEGKTKLPNRQWKKLNELRAARSVAKGSKLKQRLDNQISGRIAQKNQVEQS

SEQ ID NO: 3125 - protein, 310 aa, Rhizobium herbae
  source 1..310: note = Related to NZ_JAGGJV010000004.1
MPRKAFPFHKLEASALFNVRTRKKLADILMCSPAHLKSVDAIEIRYKKRWKPKDSDTAPWLKQPPPAEKAGNYRPIDIPVDPLKKLQTRIANLLSRIEPPSYLCSPVKGVSYVDNARRHVNSNAFWLLDIADYFPSCTADRVAWFFSTVMKCAPDVTAVLVSLVTDSGRLPQGSPCSPILAYFSNKKMWDDVAEAVASAGCILSVYADDITLSGTTVPGALVWEVKQIIVKNGFKLKREKEVSLVGSPADITGVIVRNGTLKLPNRQLKKLAETKKLHKLATDKVTLIKLEHQVKGRLAQRRQIEEALKP

SEQ ID NO: 3126 - protein, 307 aa, Agrobacterium tumefaciens
  source 1..307: note = Related to JAGIPO010000002.1
MRRKAFEFHNLEASALFNVRTRKRLAEVLLCSPAHLKAVCEIAIRYKKRWKPKDSDTAPWLKQPPPAEQTANYRPIDIPIDPLKKLQARIANLLSRIEPPEFLCSPVKGVSYVDNAKRHINNNAFWLLDIADYFPSCSSNRVAWFFNTVMKCAPDVTAVLVSLVSENDSLPQGSPSSPILAYFSNKKMWDDVALAVANSGCTLSVYADDVTLSGTTVPGALVWRVKQIIVKNGFKLKREKEVSLIGSPADITGVIVRDGTLKLPNRQLKKIAEIKKLHTNATNSRLAIKLENQLKGRLAQRRQIEEA

SEQ ID NO: 3127 - protein, 309 aa, Rhizobium sp.
  source 1..309: note = Related to NZ_LMPE01000005.1
MSHRAVKSHDLRDSALFNIGTRKKLASVLLCSPDHLNLVQKLEVKYKKRWKPKDSDTAPWLTQPPAPHEADCFRPIDIPVDPLKKLQGRIADLLSRVKAPPYLCSPVRGVSYVDNARAHIEGSAFWLLDIADYFPSCTANRVAWFFRTVMKCAPDVTAILVAIVTDSGRLPQGSPSSPILAYFSNLKMWGEVAALVHRAGCILSVYADDITISGKTVPGALVWNVKQTIVKNGFRLKREKEVSLVCCPADITGVIVRNGSLKLPNRQLKKIVETKKLLRASTDKMTADKLKTQIAGRLAQRRQIECASC

SEQ ID NO: 3128 - protein, 308 aa, Rhizobium sp.
  source 1..308: note = Related to JAILYH010000012.1
MPRKSFRFHKIEDSALFNVSTRKKLANVLMCSLPLLKAVEGLDVRYKKRWKRKDSDTAPWLTQPPPPDQATQYRPIDIPVDQLKKLQARIADLLSRIETPPFLCSPVKGVSYVDNAGRHVNNRAFWLLDIADYFPSCSADRVAWFFGTIMKCAPDVTAVLVSLTTDMNRLPQGSPCSPILAYYSNMKMWHDVATLVAGAGCILSVYADDITISGKTVPGSLIWQVKQVIFRNGFKLKHEKELSLMASPADITGVIVRDGKLKLPNRQHKKIVDLSKQQKIATDTKLLAKIESQIRGRLAQRRQIEEAI

SEQ ID NO: 3129 - protein, 308 aa, Rhizobium bangladeshense
  source 1..308: note = Related to JABDWX010000001.1
MPPKPRQFHKLNDSALYQVSTRKKLAEVLMCSPQDLKDVLALSVRYKNRWKRKDSDTAPWLTHPPAPDEASNYRPIDIPVPPLKKLQGRIADLLSRVEPPEFLCSPVKGVSYVDNARRHINSHAFWLLDIADYFPNCRADRVAWFFRTKMKCAPDVTTILVALTTDKDRLPQGSPCSPILAYFSNMRMWRDISTLVTNAGCVLSVYADDITISGSKVPGGLVWQIKQTIHKNGFKLKRDKELSLIASPADITGVIVQNGQLKLPNRQRKKLVELVSQQKATSDKKLLAKLDNQIQGRIAQRRQIESVD

SEQ ID NO: 3130 - protein, 309 aa, Rhizobium sp.
  source 1..309: note = Related to VIUA01000006.1
MPPKQQRHFYKLQDSALYNVTTKKRLAEVLLCSPDDLKNVLATKVRYKNRWKPKDSDTAPWLTQPPPPEEAANYRPIDIPIPSLKRLQARIAYLLSRIEPPSFLFSPVKGLSYVDNARRHVGSRAFWLLDVADYFPSCRADRVAWFFRTEMKCAPDVAAILVALTTDKERLPQGSPCSPILAYFCNMVMWNDIATTVENAGCVLSVYADDITISGANVPGQLIWQVKKTIHKNGFRLKREKELSLLDRPADITGVIVRNGQLKLPNRQLKKLVELVEKHKSETKKKELAKLFNQIQGRLAQRKQVENAN

SEQ ID NO: 3131 - protein, 308 aa, unidentified
  source 1..308: note = Related to NZQL01000081.1; note = Hyphomicrobiales bacterium
MRPGHRIVDSALYKVRTRRRLAELLFTEVGFLESLEKNQPKYVVKYKPKYDDKAPWLAMPPPPELADNYRPISLPPTALKRLQARLAKLLGMITVPPYVFSSVKGVSYVDNAAVHVGARAFWLLDIEAFLPSCTAERLTWFFRDKLQCSPDVAAILVEIVTFDGCLPQGSPCSPILSYFCNARMWSDIYQLAGEYGCTLSIYADDITLSGAVVPKKLVWRIKEVLKNNGFRTSRSKEVSLVNAPADITGVIVRDNKLFLPNRQFKKLRVELAKRRDAKTSIEKRKIDNRIAGRKAQARQIEKHSKSGR

SEQ ID NO: 3132 - protein, 305 aa, unidentified
  source 1..305: note = Related to NZ_JAINWL010000001.1; note = Proposed Citromicrobium bathyomarinum
MKVASLRGNALFRISNRRLLAERLLLKPEALAAALNLDLPYVRRWKSKKGDEWRSEEPDADEARAFRPIDIPHPHLKQVQRRIGRLLSSARPPDWLFSPVKGRSYVDNAARHLGSTAFCMLDIADYFPSCTTSAVAGMFLNELHCPPDVASILTSLVTKDGSLPQGSPCSPVVAFYSKVGMWNEIARLVDERGLIHSVYADDLTISGPVIPGEAVWGVKKIVHKHGMRLRRDKEVGLFCRPADITGVIVTNGGLRLPNRQFKRLAELRAQRQASREKEREMIDRKIAGRIAQRRQVEGHDGQSAP

SEQ ID NO: 3133 - protein, 316 aa, Sulfitobacter sp.
  source 1..316: note = Related to NZ_QBFD01000015.1
MASSSNATENASSLFGCQRKRDFAKILGITRGRLRWLANQKNEYPEGKTANSLYTRLWKPKRGEGKWLRVEPLPEVASNYRPIDELKVLQRHLHDDLSNIEVPAWLFAPALGKSYVDNAAAHSGSSHFHLLDLEAYFPSCRSHRVYDFFRRKLHCSSDVAELLTHVSTLGGSLPQGSPSSPILAYLSNVDVWNNIADLCRSEGVTLSVYADDITLSSHKSISGELVWNIKSALYSKGLGTKKSKEASMVHKAADITGVIVGKQGVRPPNRQVKRLKELEEVASQRPNNEVLVRKIRGRRAQLNQIASASSNPAAKK

SEQ ID NO: 3134 - protein, 324 aa, Siculibacillus lacustris
  source 1..324: note = Related to NZ_SJFN01000052.1
MNPNMGYTERESPFFRLNSKNKLAKLLFIGLPKLKELAAGADLYYSFQKVKKSGGMRMISAPRDDLKKVQKRISDLLQRIAPPDFLFAPVKGRSYVDNAAVHIGATAVHLLDIEDFFPSCTANKVIWFFKTRFECSPDIAVILKNIATRNGSLPQGSPCSPALAYFCYVDMWKEIEAHVKQRGCKLSVYADDLTISGDVVPGELVFDIKATMLRHGHQYSAKKERSKIMKPVEITGVIVANNQLLIPNRQHRSIVIAQRKLGKEKKLRERLKITNELKGRNAQKNQIKNHPGQPTTDAIPTPTGYYQSTTRSTSSSVTSSDRRS

SEQ ID NO: 3135 - protein, 308 aa, unidentified
  source 1..308: note = Related to RXIY01000013.1; note = Hyphomicrobiales bacterium
MRNPRRRKTTDMAVKGGYQERDSPFFRLKSKTKLATFLFIGSQKLKDLSDGRDLYRSFQKLKGNGKTREINAPRDDLKKVQRRIADLLQRIQPPDYLFAPVNGRSYVDNAAVHVGANAVHLLDIEDFFPSCTANKVIWFFKTRMECSADVSVILKNIVTRKGCLPQGSPCSPILAYLCYADMWNEIEEAVRRHHCQISVYADDLTISGKVVPQQLVWEIKATLRKHGHVISAHKERSRFKRPVEITGVVVTNGRMSVPNRQLKRIVETRDKLANEKKPKAVEKLQNELKGRISQVTQIKNHPRQPAHY

SEQ ID NO: 3136 - protein, 304 aa, unidentified
  source 1..304: note = Related to WBUK01000026.1; note = Ignavibacteriaceae bacterium
MLRKKPVLKSKSKKYHNERDSAFFRLRSKNNLARLLFSSEKKLSDIAREDGLYKDFEKLKKNGKDTRTVSAPRADLKAVQSRISDLLMRIRPPDWLFSPVKGRSYVDNARPHANAASVRLLDIEDFFPSCTGNKVVWFFKERMECSPDVVAILKGIVTKDDALPQGSPCSPILAYLCYIDMWEEIESLVNKAECDLSVYADDLTISGEKVPEKMIWGIKQILKRHGHSYHAGKERKKWHKPAEVTGVIVRGDGLLFVPNRQHQATAKIRKKLASKCSIKERAALQAQLLGRESQMKQITTLNDF

SEQ ID NO: 3137 - protein, 302 aa, Agrobacterium vitis
  source 1..302: note = Related to CP055265.1
MTDRRKYSLRDSPFFRLRSKAKLASLLYVSREKLQTLSEGEQRYFEFTKPKKSGGVRKISAPNAPLKAVQSRIADLLRRVTPPDYLFAPVPGRSYADNAAFHVGARSVRLLDIEDFFPSCTVKKAIWFFRTRMECSEDVAAILANIVTFKGALPQGSPCSPILAYLCYLDMWGEIAKLVEDGGCKLSVYADDLTISGVSVPEAQIWEIKKTLYRHGHRYARSKERSVRDKSVEVTGVVLLRGSVVAPNRQHAKIAKVRDELTRTASADHRKALESQLRGRLAQVGQIKAADQRRRASEAAKI

SEQ ID NO: 3138 - protein, 303 aa, unidentified
  source 1..303: note = Related to WGNU01000009.1; note = Alphaproteobacteria bacterium
MKKVESQGYALRDCGLYNIQTKAVLAKRLLVSPSRLTRLTNKQDRYRCWTEPKKSGGTREIEAPLDDLKDVQKRISELLGRVRAPSYLMAPVKGRSYVDNAAIHVGSQCFRLLDIEDFFPSCTEKRVFWFFRTVMRCSVDVAAVLARLSTRNGRLPQGSPCSPILAFYAYFDMWETINATVESRKCYLTVYADDITISGESIREFDVWRIKQTLFKFGHRYNRSKERAIINRPADITGVIVRGDILLLPNRQHKALTEVIRKRSSAGTSLERNAIDRQIRGRIAQAGQITRHLEKIGAKIASA

SEQ ID NO: 3139 - protein, 300 aa, Pontixanthobacter aquaemixtae
  source 1..300: note = Related to WTYX01000002.1
MSKTKKPWRRKAKKFYPLEASPFYKLQSKKRLASLLFTSLTALRGMADKSVPHYEYWEEQKADGSMRPLCRPHEGLDKTQSRIAYLLACVQTPDYVHAPVPAKTYVTNAASHQGARAFSLLDIESFYPSCKEEKVLAFFRHRMKCSIDVSTLLARLCCDNGSLPQGSSSSPILSYWAYAEMWDAIYTITSNAGNNFTLYLDDLTISGDRVLGNTLWRIRQQIHKHGLQIKESKSRRIIDKPADVTGVIVTNQGLRLPNRQHQKLAHAKSDFSKPGGNRKRKGNVLRGRNAQAVQILNHNS

SEQ ID NO: 3140 - protein, 312 aa, Azospirillum lipoferum
  source 1..312: note = Related to NC_016587.1
MTKKIKSYPLDQSPFYKLTTKRKLAELLRLPLGRLKRIALLSPNMYNEWIQENAKGKKRQIEDPARPLKLAQGRIANILSSISAPNYLHCPVKGRSYISNAAEHIGAKHIRNIDISNYFPSTKSTRVYWFFNTILKCTPDVSGILTALTTYKGHLPCGSPASSILAYFAHYDMWQSIDQIVSENGCKLSVYMDDITVSGEMVTERVIFQVRRCIFRAGLQPKKEKERWYRHGIGIVTGIVVRPSGLSAPNSAHLKRFTLRRQIASSCNESEKSSLRRSLKGIEGQQSQIDRWNRRLHNSKSNAKEHVNLKPN

SEQ ID NO: 3141 - protein, 309 aa, Azospirillum oryzae
  source 1..309: note = Related to NZ_FXAK01000010.1
MKTKKIKNYPLDQSPLYKLTTKRKLAELLCLPLARLKRIATLSPNMYNEWTQEKKNGDLRTIEDPARPLKMVQSRIAKILSSISAPEYLHCPVKGKSYISNAAQHIGSKHIRNVDISNYFPSTKSRRVYWFFHNILKCSPDVAGLLTTLTTYKGHLPCGSPSSSILAYYAHYDMWQNIYQIVSESGCKLSVYMDDVTVSGGVVTERVMFQVRRCIYRSGLQPKKEKERWYRRGIGIVTGIVVRSGGLSAPNAAHLKRFKLRNKLATSSNDEERITLQKSLRGIDGQQSQIDKWNRRLNTSTKSVRADLQ

SEQ ID NO: 3142 - protein, 303 aa, Azospirillum thermophilum
  source 1..303: note = Related to NZ_CP029353.1
MTTKTKSYPLNQSPFYKLTTKRKLAELLRLTPAKLRKLSALSQDLYREWPQTNLKGKTRLIEDPAPALKEVQRRIYRLLSCITPPYFLHCPVRGRLYISNAAYHVGSRHFRNIDISDYFPSTKSRRVNWFFRRILKCAPDVSGILTELTTYKGHLPCGSPASSILAYFAHCDMWEQIARIASENGCKLSVYMDDLTVSGDVVPDRVMFQIRQRIYRAGLQPKKEKEKWYRRGVGVVTGVVVRPSGLSAPNSAHLKRFKLRCQLATASSADERATLQNSLRGVEGQQSQIDRWNSHFTSYNAEE

SEQ ID NO: 3143 - protein, 313 aa, Caulobacter sp.
  source 1..313: note = Related to QDKQ01000014.1
MLSLGRKLMATLPRTHPIKQSPLHKLGHHKRLASLLKIEVAQLRGLAKAGSAAYSEWDEDKPNGGTRRIENPKPRLKRLQSRLATILSLIDPPAFLSCPVKGRSYISNARAHLGSKEFVTLDVKSYFPSTTWNRVYWYFNKRLLMPRDTAWTLASVATIDGRLPTGSPLSPIMAYLAHEDMWLKVAKLAEDVGCRLTVYMDDITISGARVPEATVWKIKQEVHKVGLRLNDKKERRFSDVGVITGVVVTPDGVRLPKRSHLNLSIARKAALVVDGEAKLRAMRRVRGLEAQHRQVLAPTDFTDNLSGSHRGSS

SEQ ID NO: 3144 - protein, 302 aa, Nodularia sphaerocarpa
  source 1..302: note = Related to NZ_CP060140.1
MQKSKYARYELDQSPFYCLKSKAKLAELLHISQSKLKCLTCTEDLYVERDTFNPGRRKSRRIEQPKLPLKLVQKRIEELLKRIKLPNYIHSPGKGRSYISNAKAHVNAKELRILDIEKYFTSTPARRIYWFFHKQMKCSPDIAGILTKLSTFKDHLPTGSPSSPILSYFSHIDMWEEINRIVEPNNCILTVYMDDVTISGEHVPGELIWQVKKQFKRYGLRSNKKKEKHYIGKKSYEVTGVITTQSGELRVPNRQHLQMRNIRRLISLESEPEKLAKLRRSLKGLEAQSEQIRRANSLLTET

SEQ ID NO: 3145 - protein, 302 aa, Nostoc sp.
  source 1..302: note = Related to JABXKF010000035.1
MRKSKYARYELDQSPFYCLKSKAKLAKLLRVSQIKLKLLTNTEHLYVESDIFDPERGKSRRFEKPRQDLKCVQTRIEELLKRIKVPNYIHAPAKGRSYISNAKAHVNSTEVRSLDIEKYFPSTPARRIDWFFRKQMKCSSDVANILAKLSTFKDHLPTGSPSSPILSYFAHIDMWKAINEIVDLANCTLTVYIDDVTISGDRVPGELIWQVKKQFNRYGLRSNKKKEKHYIGKKSYEVTGIIATKEGELKIPNRQHLKMYRCRKLLKLGIRYEKGKDMLKRLRGLKAQMQQIRKVNNSSIET

SEQ ID NO: 3146 - protein, 301 aa, Coleofasciculus sp.
  source 1..301: note = Related to JACJOI010000059.1
MPRIKQAGYELNQSPFYCLKSKKNLASLLQISQSKLNNLTRSEELYIEENRFDKKRGKIRHIEEPKPDLKRVQKRIKNLLTRIQLPNYVHAPAQGHSHIGNAKAHVGAVVVRSLDIEKYFPSTPAKSIFWFFYKQMKCSSDVAGILTKLSTFKGYLPTGSPLSPILSYFSHIDMWETIGEIVRNASCTLTLYMDDVTISGNSVSGELIWEVKKQFHHCGLRSNKKKEKYYFRKNSYEITGIIVTKEGELKVPNRQHLKTHQIRQELHCETEPKKCKKLRQRLQGLEAQIQQVKRVNYPLPE

SEQ ID NO: 3147 - protein, 306 aa, Nostoc sp.
  source 1..306: note = Related to BA000019.2
MPVLRIKKIGYKLDQSPFYCLQSKAKLATLLGVSRSRLIQLARSESLYIEKEIIHPRRKKSRLVEKPKYELKLIQKRIEGLLKRIEIPKYIHAPTKGRSYVSNAKAHLNSYVISSLDIVKYFPSTKSKRVYWFFHTRMKCSPDVAAILTKLSTYKEHLPTGSPLSPILSYFAHIDMWEEINNIVEDAGCILTVYMDDVTISGDYVSRNLIWQIKKKFHRYGLSSNTKKEKYYIGKNSRKITGVILDFEKGVLKIPNRQHKKMYSIRKQISKETHPDTYAHLMSKLKGLKSQVQQIHKANNTQTNEN

SEQ ID NO: 3148 - protein, 306 aa, Nostoc sp.
  source 1..306: note = Related to JABXKI010000057.1
MQRSRCKQYTLDQSPFYCLKSKEKLAKLLYITQRKLEVLAHTEELYIERDKFNPKKGKTFRVEEPTPPLKRVQKRIDEILKRVKMPNYIHAPGKGRSYISNARAHINVAVVRSLDIKQYFPSSQSWRVYSFFDKRMRCSSDVAGILTKLSTFKKHLPTGSPSSPVLSYFAHIDMWEAINELVEGAGCTLTVYMDDVTISGSSVSDELIRKIKREFDRCGLRDSRDKEKHYVGNKPREITGVIVKDGELKLPNSQHKKMHDCRQAIQLETDPAKLAHLMQSLKGLESQAQQIRKANEIRVDNGCNDL

SEQ ID NO: 3149 - protein, 303 aa, Calothrix sp.
  source 1..303: note = Related to NZ_KB217482.1
MKKDKCKQYPLHQSPFYYLKSKDKLAKLLHISQKTLEILTSTEQLYIEQDRFNLKKKKFFRVEEPKPLLKQVQKRIGELLKRIEVPNYIHAPAKGRSYISNAKAHINGFVVRSLDIEKYFPSTQSQRVYWFFHKQMECSSDVAGILTKLSTFKNHLPTGSPSSPMLSYFAHLDMWKAINELVESAGCVLTVYMDDVTISGSFVSGKLIWLIKKEFYRCGLHDSRKKEKHYVGNKPRETTGIIIDNGQLMLPNSQYKKMHECRQAIRQETDADKRYILMRTLKGLESQAQQIRKANETYIDTEC

SEQ ID NO: 3150 - protein, 307 aa, Sphingomonas faeni
  source 1..307: note = Related to NZ_QAYE01000001.1
MPTKRLYQLNQSPLFKLGSRSKLAKLLGMTPGALRALAAGDGLYKEFEVEKKSGGKRGVENPCRPLKLAQATLARLLGRIQPPDFLFCPVKRRCYVTNAAAHRHSRMVQCLDIKKFFPSVSQRRVFWFFATVMKCPRDVAGLLAQLACYKGHLPTGSPLSPIMAYFAYYDLWAAIDALCKARGYTFTVYIDDVTISGTHVPKSAIWEVQQMIHGAGLRYHKQKTFVDKPAEITGIILKDGQLLAPFRQHRKLKDTRAALRAADPVDRKALKSRLTGVTAQIGQIERQNLCAPQRKGGSTKIYRLSEV

SEQ ID NO: 3151 - protein, 300 aa, Microvirga sp.
  source 1..300: note = Related to JABMLM010000386.1
MRTNAKLYKLDQSPLYKLRSRAKLARLLGVSVADLRRLTKNADSLYKEFEIRKKNGEMRPVQNPERYLKVVQGRLAKVLARIAPPDYLYCPVKGRCYVSNAGQHRGNRDVRCLDIRRYFPSTPSRRVYWFFRSVMGCEKDIAATLARLATYKGCLPTGSRLSPIMAYYSHIDTWDAIACICKEKGYRLTVYIDDVTISGQSVDPDDIWRIKQVIHRSGLRYHKEKAYTDRPPEITGVIVDGERLIVPNRQIAKLAKTRKSLSSTTDPEELKKLHDKISGLRGQMAQVAIKALELPQLSTT

SEQ ID NO: 3152 - protein, 334 aa, Stenotrophomonas sp.
  source 1..334: note = Related to CP026002.1
MTLPRKSANRYDVSSSALYRLPTLKALARFLEWKGSPSALRALCKRPDNFSEFYQAHPRTGKMRLIQAPSKVIKPLQKRLNVLLKQVRVPDYLHSGIPKRSHLSNSEQHMLAAGATVTVDVSDFYPSITRQRVFRLFKNVFQCRGDVADAMADLVCYQGKLATGSPASVLVSFWACRDMFDSMAQRVATQGGTFTLYVDDVAITGDTIGHGDIQWLDRLLRRFGFSSKVEKAKLFRKTRAKVVTGRAFRHGISRAPNRKHKEMHEARAEIESGRATIKAKRGLVGQLENIGNLDQERGTSLKAEAKKLRSTLPRPRRRRRATARPVKTRSEIAT

SEQ ID NO: 3153 - protein, 334 aa, Xanthomonas campestris
  source 1..334: note = Related to JAJGQF010000003.1
MSLPRKSANRYEVTSSAFFRLPTLKALARLLQWEGSPSALRALCKRPDNFTEFPRIHPRTKKERVIQAPSDVVKPLQKRLNVLLKQVRVPDYLHSGIPKRSHLSNSESHMWAEGATVTVDVSDFYPSITRQRVFRLFRNVFECPGDVADAMADLVCYKGKLATGSPASVLISFWACRDMFDMIADRVATLGGTFTLYVDDVAITGNTVGHGDIQWLDRLLRKFGFSSKLEKAKLFRKDSAKVVTGRAFRHGISRAPNKKHKEMHEARTEAKSIGASVKVRRGLVGQLENIGNLDHERGTSLKAEAKKLRSTLPPPRRRRRAITRPNHISPEAAT

SEQ ID NO: 3154 - protein, 334 aa, Stenotrophomonas maltophilia
  source 1..334: note = Related to NZ_AP021867.1
MTLPRKSANRYDITSSAFFRLPTLKALARVLQWDGTPSALRALCKRPDNFSEFYQTHRRTGKKRLIQAPNAVVKPLQKRLNVLLKQICVPDYLHSGIPKRSHLTNSECHMLAEGATVTVDVSDFYPSITRQRVFKLFRNVFQCPGDIADAMADLVCYNGKLATGSPASVLLSFWACRDMFDLIAKRVADQGGTFSLYVDDVAITGNTIGHGDVRWLDRVLRRFGFASKVEKAKVFRKASAKVVTGRAFRDGISRAPNRKHKEMHESRNLVKGTSASTKVKRGLVGQLENIGNLDQKRGKALKAEAQKLRSTLPPARRRRRSAALPTAISAAEEA

SEQ ID NO: 3155 - protein, 336 aa, Stenotrophomonas maltophilia
  source 1..336: note = Related to CP049368.1
MTLPRSSANRYDVPSSALFRLPSLKALAKVLQWGGNPSALRALCKRPDNFEEFYRTHPRTKKKRLIQAPSDQVKPLQRRLNVLLKQLRVPDYLQSGIPKRSHLSNSELHMRAEGATVTVDVSDFYPSIKRKRLFRLFRNVFECRPDVADALADLVCFNGNLATGSPASVLLSFWACRDMFDMVAERALSQGGTFTLYVDDIAITGNAIGHGDIRSLDRLLNKFGFNSKKEKAKLFRKADAKLVTGRAFRDGVSRAPNKKHQELHETRKQLRDTTASIRLKRGAVGQLENIGNLDARRGSSLKAEAKKLRTTLPPPRRRRRSSSALPLEAGILDPKA

SEQ ID NO: 3156 - protein, 322 aa, Xanthomonas arboricola
  source 1..322: note = Related to MIGU01000085.1
MTLTRKSANRYDVSSSALFRLPSLKALASALLWPGTPSALRALSKRPNNFQEFNRVHRRTGKARKIQAPCEEVKPLQKRLNLLLKQLRVPDYLQSGIPGRSHLSNSGKHMTAEGATVTVDVSDFYPSITRKRVFRLFRNVFQCEPDVADALADLVCFNGHLATGSPASVLLSFWACRDMFDVIAERTSLSGATFTLYVDDIAITGDKIGHSEILFLGRLLKDFGFSSKEQKAKLFRKREAKVVTGRAFRDGVSRAPNKKHKELHESMRQLREHKATVKERRAAVGQLENVGLLDEKRGALLKAEAKKLRSTLPPSRRPKRLP

SEQ ID NO: 3157 - protein, 311 aa, Pseudoxanthomonas sp.
  source 1..311: note = Related to RRYK01000010.1
MAKKERLPRSLENSGLYRLRTMGALARLLHWKKSPSALRALCSRQDNWDEFDQARPGKKPRRIQAPKPAIKALQRRLNDLLQRIDAPEYLHSGTVGRSYLTNSALHRDAEGATVTVDISDFYPSVTRKRLFVLFRTVFQCSSDVADALAGLLSCGGSLATGSPASALVAFWAAKDMFDGIAERAKRLGGRFSLYVDDITLTARTAGRGDVSFIERHVGRYGFRLARKKSRVYRAGQPREITGRVLRNGQSRAPNKQHRYMHEALSAMGPETPPAEVRSAIGRIQHVGILDDVRSQELMASARRLREKLASS

SEQ ID NO: 3158 - protein, 318 aa, Luteimonas sp.
  source 1..318: note = Related to NZ_LASZ01000005.1
MIALDQSSRYELELSPLYRLGRTKDLAALLRWRGNPSQLKAFSKRDDHFDEYDQVDPKTLKKRHIEAPKAGLKRLQRRLNALLQRIHAPPYLHSGIRGRSYLTHAGTHTQAEGATLTADISDYYPSVSTERLQQLFRKDFRCSIDVAWILARLLSCRGHLATGSPASAIVAFMANRSIFDELAKRATKRGIAFSLYMDDLAFTGRGVNRSDAAAAGELLIRHGLRIKAKKTRLFHADQPKLVTGVAWRNGIKRAPNAQHKLMREALLVLQRAPREPGHYRTAIGRVQHIAMLDDVRGPQLRKKARELRVGLKALESPR

SEQ ID NO: 3159 - protein, 318 aa, Xylella taiwanensis
  source 1..318: note = Related to CP011800.1
MNQQTTKPVSTKRRTERYRIASSHLYGIRRHTKLAEILWWAGTAGQLQTFTRQPDNYTRYIDTSKPGKDRLIEAPARRLKGFQRRLLDLLIRIELPDYLHSARPGYSYLSNSAAHCKADGSTVTMDIDSFYQSVTLHRVAQFFEQKLNCAPDVSETLAHLLCCDGHLATGSPASPLLSFWAYHNLFDSINDRVRSRGGVFTLYIDDMAITGNGFGHTDARWVGRLIRRSGLRLKDSKTRVFRADAAKLITGRACRNGVSRAPNKQHRKMREAQAQLEQNPHDLTLRASVAGLKRHLALLDDVKRDQHRADASRISKRH

SEQ ID NO: 3160 - protein, 318 aa, Luteimonas sp.
  source 1..318: note = Related to NZ_WUSX01000002.1
MSQQTTKPASTKKRTERYGITLSHLYGIRSHTRLAEVIWWAGTAGQLRTFSRRAGNYSRYIDKSKPGKDRLIEAPAASLKGFQARLLCLLSRIELPDYLHSARPGYSYLSNSAAHCNAHGSTVTMDIDSFYQSVKLHRVAKFFESKLNCASDVSETLAHLLCCDGHLATGSPASPLVSFWAYRDLFDSVDERVRSRGGIFTLYIDDMGMTGNGFGHTDARWVGRLMHRSGLRLKDSKTRVFRADAPKLITGRACRNGVSRAPNKQHRKMREAKARLEQNPNDPTLRASVAGLKRHLALLDVKKRDQHRADASRISKGR

SEQ ID NO: 3161 - protein, 320 aa, unidentified
  source 1..320: note = Related to SEHC01000018.1; note = Xanthomonadaceae bacterium
MTLQTKKKAIPLKRRTERYGISSSHLHGIRSHSRLAEILRWGGTAGQLRTYARREENYNRYIEKGKPGKKDRQIEAPEPRLKEFQKRLLDLLNRIELPEYLHSARPGYSYLSNSAAHCNATGCTLTMDIDSFYQSVKVQHVARFFEKALGCSGDVSETMAQLCCCDGHLATGSPLSPLLSFWAFKEVFDAINHRVKSRGGVFTLYIDDIGITGKGFGHTDIIWTTRLLRKSGLTVKESKTRVFHADAPKLITGRACRNNVSRAPNKQHRKMRDAQLKLESNPNDPSLRASVAGLKRHLGLLDDKNRDQHRSEARQILKAR

SEQ ID NO: 3162 - protein, 319 aa, Xanthomonas oryzae
  source 1..319: note = Related to CP036255.1
MNTPRTKKTTPTQKRTERYAIDSSPLYGMTSHTRLAAILRWAGTTGQLREFCRRPTNFSRYIDRSKPGKERLIEAPAKSAKTFQTRFLELLRRIELPDYLHSARSGRSYLSNSATHCEADGCTITMDIDSFYQSATRERVIHFFEVHLKQPRDVAETLASLLCCDGHLATGSPASPLVSFWAYREVFDAIDERVRSRGGVFTLYIDDMGITGKGFGHTDVGWISRLLRKAGLTVKETKTRVFHADAPKLVTGRACRNGVSRAPNKQHRKMRAAQTQLELNPNDPGLRASVAGQKRHLALLDDANRDRHRAEAERLTKGR

SEQ ID NO: 3163 - protein, 322 aa, Lysobacter capsici
  source 1..322: note = Related to NZ_KQ061217.1
MSTPNPKKHPRPKRRTECYDVADSHLHGLESHSRLASILYWAGTPSQLKTFSRREDNYSRYTDKSKAGKERLIEAPAERLKVFQARILDLLSRIKLPDYVHSGRIGRSYLSNSAAHCSADGCTITMDIEGFYQSVTLQRVARFFEVWLKCSPDVSLTLAHLLCCDWHLATGSPASPLMSFWAYREVFDAIDSRVRARGGVFTLYIDDMGITGKGFGHTDVQWVSRLLRRYGLKIKEAKTRVFHADRPKLVTGRGMRHGVSRAPNKQHMKMRQAQALLEANPNDPTLRASVAGHRRHLALLDDEKRAHHRAEAARVSRLKLKV

SEQ ID NO: 3164 - protein, 312 aa, Rhodanobacter sp.
  source 1..312: note = Related to JACHCO010000001.1
MASKQTNSAQRYGVGTSPLYGIQSKRRLAEVLFWAGPTSALASFARDPDNYARYIDRRRSEKPRLIEAPQARLKGFQKRVEDLLKRTVMPDYLHSGIPGRSYLTCSAAHRDAAGCTVTMDISDFYLSISQDRVTRMFIVLFACTRDVAEVLAQLLCCDGHLATGSPASPLLSFLANKETFDQIAAHAGRRSGAFTLYIDDVALTGKGIGTAEVKWITRLLKRSDFTVKRSKTKIFRASRARLITGRVLYGGQSRAPSRQHQKMKAAIEASNALPKDKALKASAIGRVRHVALLDDVRRDGMRATAKRLAPPK

SEQ ID NO: 3165 - protein, 326 aa, Luteibacter rhizovicinus
  source 1..326: note = Related to NZ_LGRQ01000750.1
MNPKVRTKKERLEKPLKQYAPDQCALYGIKGVGQLMRVLRWRGTRAELEAFDRAPGSYRFWANEQGREIQAAGAEMRKLHARVAVLLRRIMPPEYRQSGVRKRSFLTNAQFHTLDEPSVKLDIKSFYPSTTFAHVRRFFQNDMKCAGDVAFLLAKMCCVNQRHLPTGGVHSEVLAFYCHRNAFEQLYQRAKARGGVMTVYVDDIMMTMPRASLTDLEWARRLFANHGIKIHPGKSKVLAKAKRKTITGVDIHRGKISAPKAQHQLILQRHVELNAAVNPTLAVTAARSLLGHLDHVAQIEPRFRSRAEGTRAWLAAVLAETDAPGE

SEQ ID NO: 3166 - protein, 320 aa, Luteibacter sp.
  source 1..320: note = Related to NZ_JQNL01000001.1
MKMPVRKKKQRLEKPRKQYRIDQCALYGLKGVGQLMRALRWTGTRAALEGFDQAKGSYKAWANETGREIQAAGADMRKLQARIAVLLRRVMPPDYRQSGVRDRSFLTNAKLHRADEPSIKLDIKSFYPSTTFAHVRRFFHQEMKCAGDVAFLLAKLCCYHRRHLPTGGVHSEVLAFYCHRRAFEQLYRRAKGRGGEMTVYVDDIMMTMPGASLTDLEWARRLFAKQGVKIHPGKSTVLTKDRPKTITGVTIHRGKLQAPKAQHHLIRQKFEDLAKAEDPAAATAAARSLIGHLDHVAQIEPHLRDRANGTRALLRRTLAP

SEQ ID NO: 3167 - protein, 328 aa, Rhodanobacter sp.
  source 1..328: note = Related to JACYXL010000002.1
MTTVQKRKKPPRLETPKKQYALTDCALSGIRGIGQLLHVLRWEGSRQELEDLPAAQGSYKVWRTDQGRAIQAVNLKEANGSKLRQIQARIAVLLRRVLPPEYRHSGVRGRSFITNAQQHLQDDPSIKLDIKSFYPSTTFQHVRRFFVEAMRCSGDVAFLLAKLCCYQQRHLPTGGVHSEVVAFYCHKRSFDQLWERVKARSGKMSVYVDDIMLTMPNASLTDLEWARRLFAKQRVKIHPGKSKVLSKRSIKVITGVEIRGGKTGAPKEQHRLIKQRFDEIRAAASADELAGAVKSLLGHLDHVAQIDPRFVNRARGTRARLKAVIDHN

SEQ ID NO: 3168 - protein, 323 aa, Xanthomonas hydrangeae
  source 1..323: note = Related to LR990730.1
MTKTIRKSKRRRQPRLEKPKKQYALHDCGLYGLKGLGQLAKALQITQDELDELANLRGGYTVWNQNGRAVQQARPALRKIHARIATLLRRVASPDYRHSGVRDRSFISNAAQHIAPHASLKLDISKFYPSTSVHHVWKFFFRKMHCARDIAAILAGLCCFERRHLPTGGVHSEVLAFYCHKDMLDSLNERVVSRGGVMTVYVDDIVVTMPGACESDLHWAQRLIARARLAMNLRKSRVINADKEKLITGVLIRRGKISAPAGQHKKVKLLHEAIGSATAGDDVTPQIRSLQGHLDHIAQIDPKFLSRAKGHRAKNRLALLPPI

SEQ ID NO: 3169 - protein, 319 aa, unidentified
  source 1..319: note = Related to JADJBZ010000003.1; note = Proteobacteria bacterium
MARLEQLDRPKYAMTTSPLYGIRSRKRLVEVLDWQGSVKALDGFVEQPDNYNCFLHEEDGKKPRPVQQPTPKLEALHRRVARLLLRILPPDYLHSGLRKRSFVTNAAQHVNGHPAVKLDVHKFYPSTLHSHVCGFFKNQMACAPDVAGLLASLCCVTVNGVRHLPTGSPLSQILAFYSHRQMFDELSAYVAARGGVITVYVDDITASMEFASVGDIRAMGRIITRHGLMWHKERFFPRGHSKAITGAIAKVDHLEAPKKQHLKYATARDRVDHPSLLVADQKQAARSAIGLLQCIAQIDERQIRVARGMAQKLTAVAGL

SEQ ID NO: 3170 - protein, 310 aa, Allochromatium vinosum
  source 1..310: note = Related to NC_013851.1
MKKIKSPYAINQSPLYKIYSLKKLCEVLKFDRKVIAKLLKSQDNYKKFHQHDGAKSRLIEYPKPRLEAVHKRVFSLLSRITTPEYLHSGVSGRSYITNAQQHSSALAGFKLDIKSFFLSTTTDHIYKLFRFSFGCSFKVSQTLASLLCVSGHLPTGSCASQVLAFFAHKKMFDKLAKTVNQFGGKMTLYVDDLYVSIQYVKRWHIRRLDRIIRGNGLFAHKGRVYQRVKPKLITGVILIDGKMKLPHAKHRKIRDTRNAARICSSRSQKSLLMRSLVGQLTTGSLLDPSLKSRVKPARSYLQRLEKQHQV

SEQ ID NO: 3171 - protein, 316 aa, Klebsiella michiganensis
  source 1..316: note = Related to NZ_CP061930.1
MKKRKKLKISTKNKSYGVMDSPFYKLKSKKKLAGLLCISVNDLSILKNDEGNYSVFDQLSKKGKSRKIQKPLDKLDIVHTRIASLLSRIALPEYLHSGKKRCSNVTNAKAHLNHEKMMTTDIKAFFPSTTRIMIFSFFFSVMKTSSDVADILSHICTCHDRLPTGSRISMPLAYFANSRMFGEMYELCQKLKVKMTVYVDDLTFSGANVNRLFCAVIRKVISKHGHIMHPTKTKLYAKDKPKLVTGIIVLGDALKVRNEQHRLMARDIEYWKIIKDAENAKETSIAKTLFGRLHSMGVIEQRYKSKVLTLKVNTAS

SEQ ID NO: 3172 - protein, 316 aa, Escherichia coli
  source 1..316: note = Related to CP056584.1
MKKRKKLKVNTKNKSYDIMDSPFYKLKSKRKLANLLCVSLEELYSLRKDEGNYSVFEQLSKKGKARKIQKPLEKLELVHTRIASLLSRIALPEYLHSGKKKCSNVTNAKAHLNNEKMMTTDIKAFFPSTTRGMIFSFFFSVMKMSSDVADVLSHICTCHDRLPTGSRISMPLAYFANSRMFGEIYQLCQKLRVNMTVYVDDLTFSGGNVNRLFCAVIRKIVNKHGHVIHPTKTKLYARDKPKLVTGVIVFGNALKVRNEQHFLMAREIDYWKIIKDAENARETIIAKKLFGRLHSMGVIEQRYKSKVLTLKANTAN

SEQ ID NO: 3173 - protein, 316 aa, Enterobacter hormaechei
  source 1..316: note = Related to NZ_JAIFPH010000003.1
MKKRKKLKIFTNNKSYGVMDSPFYKLKSKKKLACLLCVDTNDLYALKKDEGNYSVFEQLSKKGKPRKIQKPVDKLDVVHTRIASLLSRIALPEYLHSGKKKCSNVTNAKAHLNHEKMMTSDIKAFFPSTTRSMIFSFFFSVMKMSSDVADILSHICTCHERLPTGSRISMPLAYFANSRMFCEIDELCRKLRIKMTVYVDDLTFSGANVNRLFCAVVRKVISKHGHNMHPTKTKLYAKDKPKLVTGVIVFGDCLKVRNEQHRLMARDIEYWKIIKDAENARDTPIAKTLFGRLHSMGVIEQRYKSKVLTLKVNTAI

SEQ ID NO: 3174 - protein, 316 aa, Escherichia coli
  source 1..316: note = Related to UGAA01000001.1
MKKRIKLKVSTKNKSYPITDSPLYKLKSKKKLANLLCVSINDLSALKRDEGNYSIFEQLSKKNKIRKIQKPLEKLDVVHTRIASLLLRIAMPEYLHSGKKSCSNITNAKAHLNHQKLMTTDIKSFFPSTTREMIFSFFFSIMKMSPDVADILSHICTCHERLPTGSRISMPLAYFANSRMFDEMNQLCEKFRVKMTVYVDDLTFSGDNVNRLFCSVIRKIINKHGHVMHPTKTKLYAGDKPKLVTGVIVFGDSLKVRNEQHYLMAREIELWKIIKDVEQAKDTRTAKKLFGRLYSMGVIEKRYRSKVLTLKANTSV

SEQ ID NO: 3175 - protein, 316 aa, Enterobacter sp.
  source 1..316: note = Related to CP074170.1
MQKPKKLKISTKNKSYGMMDSPFYKLKSKRKLAELLCVSLSDLSALKKDEGNYCIFEQLSKKGKLRKIQKPLDKLDIVHTRIASLLSRIALPSYLHSGKKGCSNVTNAKAHLNNDKMMTTDIKSFFPSTTRVMVFSFFYSVMKTSSDVADFLSHICTCHGQLPTGSRISMPLAYFANSRMFDEIYQLCQKLTVKMTVYVDDLTFSGANVNRLFCAVIGKIINKHGHAVHPTKTKMYGKEKPKLVTGVIVLGDSLKVRNEQHRLMARDIECWKMIKDMEKAKETSFAKTLFGRLHSMGVIDQRYKSKVLTLKVNTAN

SEQ ID NO: 3176 - protein, 316 aa, Escherichia coli
  source 1..316: note = Related to CP023960.1
MKRRIKLKISTKNKSYDIIDSPFYKMRSKRKLASLLGVDVGDLSTLKKDEGNYSIFEQLSKNGKPRKIQKPLEKLDVVHTRIASLLSRITLPDYLHSGKKGCSNVTNAKIHLNNERLMTTDIRAFFPSTTREMIFSFFFSVMKMSSDVADVLSYICTCYGRLPTGSRISMPLAYFANSRMFGEIHQLCNKLHVNMSVYVDDLTFSGQNVNRLFCSVIRKIINKHGHVMHADKTKIYSREKPKLVTGVIVLGGSLKVRNKQHLLMSQEIEYWKMIKDAACARETHTAKKLFGRLHSMGVIEQRYRSKVLTLKASTAL

SEQ ID NO: 3177 - protein, 316 aa, Acerihabitans arboris
  source 1..316: note = Related to NZ_WUBS01000011.1
MKKRKKLKISTKNKSYSLNDSPFFMLKSKKKLATLLGITISDLSLLKKDDENYSIFEQLSKKGKPRKIQKPLDALDIVHTRIASLLSRIALPEYLHSGKKGRSNITNAHAHLNTSKTMTSDIKAFFPSTTRHMIFSFYFSVMKMSSDVADVLSHICTCYGQLPTGSRISMPLAFFANSRMFDELNALCNTLKVKMTVYVDDLTFSGDNVNRLFCSVVRRIIYKHGHIMHPTKTKLYSEYMPKLVTGVIVTAGCMKVRNEQHRLMARDIEYWMLIKDADRARETSVVKTLFGRLHSMGVIEPRYKSKVLTLKMNTAI

SEQ ID NO: 3178 - protein, 316 aa, Dickeya zeae
  source 1..316: note = Related to NZ_CP006929.1
MRIKPKLKIITRSKEYNLTDSPLYKINSKRKLAKIINVDFNTLKSLKDDKMNYSIFDQVSKKGKVRKIQKPVQRLDIVHTRIASLLCRIATPSYLHSGKKHHSNITNADVHKNEFNLLTTDIKSFFPSTKRSMVFSFFLTVMKTSPDVADILSHLCTCHNHIPTGSRISMPLAFWANVRMFEELKRLCSNLDITMTVYVDDITFSGENVNRLFVSCVKKIIVKHGHQMHPTKTKFYNSTAPKLVTGVIVVSNCLKVRNEQHQLFANEFEQWRIIKEEPHAINANITNKLIGRLYSMGVIEKRFKEKVRTVKNSTAL

SEQ ID NO: 3179 - protein, 316 aa, Escherichia coli
  source 1..316: note = Related to CP010122.1
MKSKPKLKISTRDKSYNLIDSPLYKLKNKKRLAQLLNINLCDFRTLTSDDENYSVFEQLSKKGKVRKIQKPVHKLDVVHTRIASLICRIQTPLYLHSGKKTCSNISNASAHINELNLLTTDIKSFFPSTTRNMVFSFFYSVMKTSSDIADILSHICTCHGHIPTGSRISMPLAFWSNIRMFTELENLSLSLNVTMTVYVDDITFSGEKVNRLFMSCMRKIVAKHGHQVHPTKTKLYGAKLPKLVTGVIVHSNVLKIRNEQHLLLSRELEQWRIIKDEPYAINANITSKLVGRLYSMGVIEQRYKEKVRTIKSNTAF

SEQ ID NO: 3180 - protein, 317 aa, Vibrio splendidus
  source 1..317: note = Related to MCYV02000002.1
MNRKSKLRINTKCKSYQLQDSSFYKLTSKKRLASILNLSLQNINSLRCDLGNYTEFEELGKSGKPRKIQKPCHRLDVAHTRIASLLCRIQTPTYLHSGKKSHSNVTNAASHVNFHQLLATDVKSFFPSTSRKMVFSFFLTVLKCSPDIADILADICTCHNHIPTGSRISMPLAYWANCRMFEELERVSDKHHVTMTVYVDDLTFSGEKVNRQFRSLVKKIISKHGHTMHPKKTKLYQGSQPKLVTGVIVSDGVLKVRNEQHLMYSSELAQWDSIKNLPLASETNLVAKLIGRLHSMGVIDTKYKAKVKSIKNATCSD

SEQ ID NO: 3181 - protein, 317 aa, Vibrio splendidus
  source 1..317: note = Related to PIFL01000078.1
MNLKSKLKINTKQKCYPLNDSPLYKLKSKKKLASILKVQLPEILALRCDDGNYAEFTELGKSGKPRSIQKPCYKLDVIHTRIASLLCRIENPPFLHSGKKFHSNVTNAATHANSHQLLATDVKSFFPSTSRPMVFSFFLTVLKCSPDVADILADICTCHKHLPTGSRISMPLAYWANCRMFEELQRISLKHGVTMTVYVDDLTFSGQAVNRRFKSLVKKVVSKHGHIIHPTKTKLYKGTQPKLITGVVVVDGVLKVRNEQHLKYSSELAQWDSIKDLPAASETKLVAQLIGRLHSMGVIDMKYKAKVKSIKNATCSD

SEQ ID NO: 3182 - protein, 316 aa, Vibrio cholerae
  source 1..316: note = Related to VTLM01000009.1
MTRNSKLKLETKNKSYPLQDSPFHKLTSKKQLRKLLDIDSEKLKKLRQDKGNYSEFEDVSVSGKARKIQKPTRELDVVHTRIASLLCRISTPDYLHSGKKQHSNVTNARQHKNEYALLATDVKSFFPSTTWNMVFSFFYGVMKCSSDVSEILSDLCTCHKHIPTGSRISMPLAFWANIRMFSELDCLSNKHGVTMTVYVDDLTFSGREVNNLFRSSVKKIINKHGHIMHPTKTKLYKPNQPKLVTGVVVNGGHLKVRNEQHFKMHQELQIWCKIKDTPYALSSSITSQLLGRLHAMGTIDDRFKQKARTIKLSTAP

SEQ ID NO: 3183 - protein, 316 aa, Vibrio vulnificus
  source 1..316: note = Related to LMYA01000001.1
MTRKSKLKLETKNKSYPLQDSPFHKLTSKKVLRKLLDVDADKLKKLRQDKGNYSEFDDIGESGKARKIQKPARDLDIVHTRIASLLCRISTPQYLHSGKKQHSNITNARQHQNKYPLLATDVKSFFPSTTWDMVFSFFYGVMKCSSDVSEILADLCTCHKHIPTGSRISMPLAFWANIRMFSELEALSTKHNVTMTVYVDDLTFSGMQVNKLFRSSAKKIITKHGHIMHPTKTKLYKSNQAKLVTGVVVEGESIKVRNEQHRKMHEELGVWFEIKDMPYAMSSSITSKLLGRLHAMGTIDDKFKQKAKTVKKSTTS

SEQ ID NO: 3184 - protein, 316 aa, Grimontia hollisae
  source 1..316: note = Related to NZ_CP035690.1
MSRKSKLKIDTKNKSYSIIDSPFYKLFSKKKLATLLKCDLSELKKLRDDEGNYSEFEDIGKSGKPRKIQKPSRNLDIVHTRIASLLSRISTPTYLHSGKKEHSNVTNAKAHLETSALMTTDIRSFFPSTSHRMIFSFFYGVMQCSSDVAELLADLCTCHKHLPTGSRISMPLAYWANCRMFEELNSLSSKHGVTMTVYVDDLTFSGSKVNKLFTSTVNKIISKHGHTMHPAKTKLYSSHEPKLVTGVVVDKGVLRVRNEQHLKLFEDISLWSFIKDEKYALGSSITSKLIGRLHAMGTIEPRFKSKAKSVRNSTAM

SEQ ID NO: 3185 - protein, 314 aa, Providencia rettgeri
  source 1..314: note = Related to NZ_CP058958.1
MSQKLTLNNKNKAYQLTDSPFHKLSSKKKLAILLRTPLSQIRSLRADSGNYSEFESIGKSGKIRKIQKPSRNLDVVHTRIASLLIRIITPEYLHSGKKGYSNVTNANIHLNTNALMTSDIKSFYPSTSWNMIFSFFYSVMSCSADIAEILADLCTCHKHLPTGSRISMPLAYWANVRMFNELENICQKHDVIMTVYVDDLTFSGKNVNRLFKSTVKKIISRYGHEMHPTKTKLYPPNGTKLVTGVVIDRNNLLVRNEQHFKLFEELSMWNSIKNNQYAISMSITSKLIGRLHSMGTIEPKYKTKAKSVRKSTAI

SEQ ID NO: 3186 - protein, 316 aa, Vibrio alginolyticus
  source 1..316: note = Related to NZ_CP054700.1
MPKTKTKLKIDTRGKFYALKDSPLYKLRTKRRLAEVLNHSLQTLRALRTDQGNYKEFEDNSGGKARKIQQPARSLDMVHTRIASLLCRIDTPDYLHSGKKGVSNVTNAEAHIDSHNVLTTDIRSFFPSTTRRMVFSFFYGVMKCAPDVADLLADLCTIHSHIPTGSRLSMPLAFWANHTMFNELNELSIKHNVKMTVYVDDLTFSGKEVNRLFSSCARRIISKYDHCMHPNKTKLYSATSPKLITGVVVQGSLLKVRNQQHQYLLSEMTQWLSIKDSPRALHLNITNRMLGRLYSMSVIDKRYRAKARMVRNSTAL

SEQ ID NO: 3187 - protein, 317 aa, Endozoicomonas arenosclerae
  source 1..317: note = Related to NZ_LASA01000054.1
MKQRKSKLKIQTKGKSYSLHDSPLYKLKTKRKLASILQHSLPDLKLLCSDEGNYAVFEETKKGSKPREIQKPNPKLEVVHTRIASLLCRIDTPNYLHSGKKGHSNVSNAYAHVNSDNLLTTDVKSFFPATSRRQVFSYFYSIMQCSPDVADMLADLCTYNAHIPTGSRISMPLAYWANVSMFNELQALSLKHSVKMTIYVDDLTFSGKKVNKLFRLCVKRILENYDHAMHPAKTILYRAAQPKLVTGVIVTEGQMKVRNEQHQQLASELDIWKAIKDHPYAAGMKPTSKLLGRLYSMAVIDSRYKSKAVTVRKSTHT

SEQ ID NO: 3188 - protein, 316 aa, Aliivibrio fischeri
  source 1..316: note = Related to NZ_LTYZ01000001.1
MTKKSKLKIELKGKSYDIRDSPFFRLRSKKKLSSLFNLTLPQLQELKSDIGNYAEFEDVGKTGKARKIQKPNLELDKVHTKIASYLSRIKTPDFLHSGKKYHSNITNAKAHLDSTNLMVTDIKSFFPSTKKNMIFSFFYSVMECSSDVADLLAQLCSIHGFLPTGSRISMPLAYWANCRMFNELDTLSRSHGITMTVYVDDLTFSGENINRLFKAVVNKVISKHGHTMHPSKTKIYSAKQPKLVTGVIVKDNELKVRNEQHQKLYADLEFWKLIKDSPLTKNAKISSQLLGRLYSMGFIEQKFKQKALTIKSALNS

SEQ ID NO: 3189 - protein, 317 aa, Vibrio metoecus
  source 1..317: note = Related to NMSO01000008.1
MTKKSKLKIVTRKKSYELSDSPFYKLKSKKKLAHLLKVNVTKLQQMTKDSNNYNEFEHNKDDGGKVRKIQHPIGELDVVHTRIASLLCRIKTPDFLHSGKKHHSNVTNAKAHCNKHPLMTTDVCSFFPSTSREMVFSFFYTVMNCAPDVADVLSRICTIHGHLPTGSRISMPLAYWANCRMFKELEELTKKHQVKMTLYVDDLTFSGKSVNTLFKSITCQIIERHGHKMHPRKTKLYEAKSPKLVTGVVIKDNQIEVRNEQRKKLVSDIACWKSIKDFPNAISMQVTNTLLGRLHALGSIDSKFKDRARTIKAATQK

SEQ ID NO: 3190 - protein, 301 aa, Xenorhabdus koppenhoeferi
  source 1..301: note = Related to NZ_FPBJ01000003.1
MLYRILLSINLSQKKKLASLLKVDMQTLFRMMNDTENYNEFEKKGKKGKVRKIQHPVGELDVVHTRIASLICRIATPNFLHSGKKQHSNVSNAHVHCNNFPLMTTDVCSFFPSTKKSMVFSFFYTVMECSSDVADILSCICTIHSHLPTGSRISMPLAYWANCRMFSELEQLAIKHDVTMTLYVDDLTFSGAQVNSLFKSIIRQVIERHGHQMHSTKTKLYSGNKPKLVTGIVIKGEMVSVRNEQRMKLVSDITCWKSIKDMPNAINMPVTHTLLGRLYALSSIDPMFKDRAKTIKANTQK

SEQ ID NO: 3191 - protein, 316 aa, Vibrio europaeus
  source 1..316: note = Related to VTYH01000022.1
MRKKSKLKLQTKGKSYPLCDSPFYKLRTKKKLAELIGFPLIELQKLRSHIGHYIEFEEEGKKGKKRKIQQPINEMDRVHTRIASLICRIDVPNYLHSGRKGFSNVSNAKAHLDSSKLMATDVKSFFPSTTRRMIFSFFYSVMQCSPDVSDILADICTIHGHLPTGSRISMPIAFWASCRLFEELDSLSKHHDVKMTLYVDDLTFSGANVNRLFKTTVRKIIERHGHTMHPTKTKLYDEHQPKLITGVVVDNGVLRVRNQQRKQLITDFACWDLVKDVENASLLPCTNSLIGRLQSMGMIDGAFKERAKTVRGQTHK

SEQ ID NO: 3192 - protein, 323 aa, Vibrio splendidus
  source 1..323: note = Related to PIFP01000042.1
MKKSKLKIKTKGKEYGIKDSPLYNLRTKRHLANLLNCSNSDLKKYAKDDGNYHEFEEKGANQKARKIQQPMRGLDKVHTRIASLLCRITTPDYLHSGKKKHSNVSNALAHTAKENSRTPLMTTDVKSFFPSTSRKMIFSFFYSVMKCSADVSDILADICTVHHFLPTGSRISMPLAFWANCRMFSELEQLSKKHDNLMTVYVDDLTFSGVNVNPLFKTTVKKILNRYGHIMHPDKTKVYDCDDAKLVTGVIIKGGTIMVRNEQRKQLVNDLSCWSVIKNQPDAINNTFTQRLIGRLHSMGVVDETFKKRAMTIRNQTNRTPIS

SEQ ID NO: 3193 - protein, 319 aa, Vibrio fluvialis
  source 1..319: note = Related to CP073273.1
MKKSKLKIKTNGKEYSLKDSPFYNIKTKKRLSILIGCTLSELKAFSKDQGNYHEFLEKSTGGKSRKIQQPVRGLDRIHTRIASLLCRIETPDYLHSGKKNHSNVSNAKTHAEKHFDNVPTMTTDIKSFFPSTTRKMIFSFFYSVMKCSADVADVLADICTIHKFLPTGSRISMPLAFWANSRMFEELEALSIKHDIVMTVYVDDLTFSGCNVNKLFKTTVKRVIERHHHTMHPDKTKIYRKAEPKLVTGVVVHNGEIRVRNEQHKQLVTDLACWNSIKAIPEAIRMPYTNRLIGRLHSMGVIESVFKDKATAIRNQTAK

SEQ ID NO: 3194 - protein, 319 aa, Shewanella algae
  source 1..319: note = Related to JADZHF010000006.1
MRKPKFKIKTKGKSYSIKDSPLYNLRTKKHLANLLNCNTQDFSTLSKDDGNYNVFETTGKNGKKRKIHKPQPQLDKIHTRIASLLCRIDAPDYLHSGRKNRSNITNAQAHITNHSSETAILATDIRDFFTSTHRKNVFNFFYTIMKCSTDVADILAKLSTIHEHVPTGSRISMPIAFWANYHMFEELHALSSKYNVCMTVYVDDLTFSGNNVNPLFRTVVEKIVSRYGHKIHPTKTKLYAKAAPKLVTGVIVKNQSLQVRNEQFKQLVTDFTCWKAIRNTPQAIFDPHTYRLLGRLHSMGSIEPVFREKARTVKGATNR

SEQ ID NO: 3195 - protein, 317 aa, Shewanella decolorationis
  source 1..317: note = Related to AXZL01000070.1
MQKLKIKTKGKSYALKDSPFYNLRTKKRLSILLGCDTKDLPLLAKDDGNYNVFSIIGKAGKPRQIHKPINKLDKIHTRIASLICRINLPSYVHSGRKKHSNLTNAKAHLSADGFDTKVLTTDIKDFFTSTRKKQVFGFFYSDLKCTADVANLLADMCTIHGHVPTGSRLSMVLAYWANYHLFEELSSLSKQHSVTMTVYVDDLTFSGTGVNELFKTVVRKVLSRYGHTMHPTKTKLYGKESPKLVTGIVVKEGQLQIRNQQFKELVTDFACWHAIRQTPHAIFDPHTYRLLGRLNSMSSIDPVFKEKAQTVKGNTCR

SEQ ID NO: 3196 - protein, 318 aa, Photobacterium profundum
  source 1..318: note = Related to NC_006371.1
MNRKRSKKLKIQTNGKSYTIKDSPLYRLRSKKKLANILKSDLNNLKKLRLDADNYHEFEDKGKGGKPRKIQCPCNGLEKIHSRIASLLCRIKTPDYLQSGKKGHSNVSNANVHLGSSCLLATDIKSFFPSTKRYMLFSFFFHSMECSADVADILSDLCTINGHIPTGSQISMPLAFWANSHMFDELYLLSVKHAVKMTVYVDDLTFSGDAVNKLFMSVTQRIITKHNQVMHPDKTKLYRGYESKLITGVVVKGDNLLVRNEQHKMLFSDVECWKAIKDIPSAINSNIAKKVIGRMHSMSVIDSKFKDKVRTLRISTAT

SEQ ID NO: 3197 - protein, 301 aa, Aeromonas salmonicida
  source 1..301: note = Related to NZ_CP060032.1
MDSPLYKVKTKRKLASLLNSTIPDLNRLKIDDGNYNEFDDLKKPEKPRKIQQPVKSLDVVHSRLASLLCRISVPEYLHSGRKGRSHVTNANAHVGNHSILTTDIKAFFQSTKRDMIFTFFYKKMQCSADVADLLSDLCTCHGHIPTGSRISMPLAYWANSDMFDELYALALKHDNNMSVYVDDLTFSGGNINELFCSIVKKIIIRYGQTPHPNKTRIYGKNSVKIVTGVAVHGDELLVTNYQHYQHYQLYSDVEVWKAIKDTENAMELNTSKRLIGRLNSLAVINRKYRDKARTIKAATSK

SEQ ID NO: 3198 - protein, 315 aa, Aeromonas caviae
  source 1..315: note = Related to JAEHHN010000014.1
MKPKINTLGKSHPIENSAFYKLTSKNVLYKLLGVPKEEVIRLLGDPDRYNEFQDLTNIDKPRAIQKPKKALDVVQSRIASLICRIEVPEYLESGRKGHSHVTNAIAHVSPNNTSVAFLTTDIRSFFPSTTVVMVYDFFRSTLRCSHAVSEILSNLCTCRGFVPTGSRISMPIAFWANYPMFLELEKLCIKHNIRMSVYVDDLTFSGNNINTLFLACVRKIIIRHGHEPHPDKTKLYARNDVKIVTGVAVVDNSITATNKQHLKLYQEIEAWKAIKDIPDALETNTVKRLIGRLNSLTLIDYRFKDKARSIKSATS

SEQ ID NO: 3199 - protein, 309 aa, Klebsiella pneumoniae
  source 1..309: note = Related to UFGU01000001.1
MKVKKQKIKTKGKSYPLQGCIFYKLSSKKRLEKILFTSIKELQFLSNDINYVLFYEKSDINKKRLIEKPNEKLDIIHTRIASLISRITQPQYMHSGLIDKSYISNAKQHLGKKPTLTTDIKSFFPSTTRQKVFNFFYKKLCCSSDIADLLSLLCTINNHIPTGSRISMPLAYWANANMFNNLYAISCANNIIMTVYVDDITFSGEKVNKQFLSRVKKIITSESHIMHPTKTILYSGTEIKKITGVIISNDKLKVPNSLHNKIYLDIEEWKSLDNNENTAVKNRLLGRVYAAANIDNRFKDKARTIKKYV

SEQ ID NO: 3200 - protein, 308 aa, Providencia rettgeri
  source 1..308: note = Related to NZ_CP087584.1
MKAKKRKIKTKGKSYSLQECVFYKLTSKKKLEKILFSSIQELKLLSDDRNYILFYEKSDINKKRLIEKPNEKLDIIHTRIASLISRIIQPQYMHSGLKDKSYISNARAHLGKKPVLTTDIKSFFPSTTRLKVFNFFYKKLRCSSDIADLLSHLCTVNNHIPTGSRISMPLAYWANADMFNNLYAISRANGNKMTVYVDDVTFSGEKVNSKFLSSAKRIIASESHIMHPTKTILYGSIQIKKITGVIISSDELKVPNSLHNKIYIDMEAWKRSNNKNYTGIIDRLLGRVHAAANIDNRFKDKARTIKNK

SEQ ID NO: 3201 - protein, 311 aa, Obesumbacterium proteus
  source 1..311: note = Related to LXEX01000068.1
MRRKKPKINTKNKSYSLQDCALYKCITKKRLVKILKSDLGKLKNLSRDIDNYTTFYEKTDIQKKRLIERPNEELDVIHTRIASLLCRVTQPDFMHSGLKLHSHVSNAKKHIGVHPLLTTDLKSFFSSTSKAIVFDFFFKKLLCSPDVSELLSNLCTYNNHIPTGSRISMPLAYWANSKMFLELNALSKALGICMTVYVDDITFSGRSVNKLFKSKVNKIIESHSHIMHPVKTILYKPYQNKLVTGVIVSGDNLRVRNKQLKDIHVQMKEWENSNLIISRNIVKERLLGRLNSASTIDIRFKDKARTLKKTT

SEQ ID NO: 3202 - protein, 310 aa, Yersinia sp.
  source 1..310: note = Related to CP042173.1
MAKKKGRINTKGKSYSINDSALFNIQSKNKLAEVLLTNLDNIKSLLSNDNYIVFDNTNEDGKKRTIQTPSDKLNVVHTRIASLLCRITQPEYVHSGIKNKSNVSNARKHVGTHPVLTSDIRSFFPSTSKHQVFNFFNRKLKCAADVSDLMAELCTYANHIPTGSRISMPLAFWANYDMFNEMNTISNKLNITMTVYVDDITFSGNAVNRLFLHKCKRIVEKNGHVLHPKKTALYSAKEPKTITGVIVHENEIKVRNLHYKKIYFDLDAWKKTDDAIEKENLKNKVLGRMHSLSTINEKFKDKARSFRSID

SEQ ID NO: 3203 - protein, 316 aa, Nitrosomonas sp.
  source 1..316: note = Related to JAGRFN010000264.1
MSQKKRRLKIDVRNKKYPIVDSCLFRLQSKRKLSEFLNTELFALKNLTDDRNYNCYIDTSGHKPREIEHPCFELDKIQTRIASLICRIAQPDYIHSGVKGRSHITNAKQHVGRHNVLTSDIQSFFPSTTQRMVFNFFYKRLQCSSDVADLLANLCTCKGHIPTGSRISMPLAFWANEPMFNLLHKVSLSQGITFTVFVDDIVFSGSSIDERFVYNIKKLISNHGHTAHPRKTKLYKAGNTKLVTGVAVDTNGLHVANRHRKNIYQDMSQWKVSKQAGLQFDDLNKRIIGRMNAQSLVDYRFKDKARTLRLSIKKKN

SEQ ID NO: 3204 - protein, 315 aa, Cellvibrio sp.
  source 1..315: note = Related to NZ_CP031727.1
MKIKHSKLKIIRKGKSYALKDSSLYKITSKKKLLSILSQASVTISDLTKAIGDYSIFIDNKNPLKPRTIEKPNKNLDIYQSRIASLLCRIESPDFIHSGTKRRSHVTNAKIHLANENTFTTDIKSFFPSTPIEKVFSFFYGVMKCEPDVADLLAKLCTCNGHIPTGSRISMPMSFWANEKMFRELQNLSIQHNVTMTLYVDDITFTGSNVNKIFVNTVKKIITRHGHIMHPKKSILYPKGSVKVITGVVIRNGTALAKNEQHKNLYQDIELLKGFSGKLSPPEKLIDRTLGRINSLSVIESRYKDKARSLWSLIK

SEQ ID NO: 3205 - protein, 316 aa, Cobetia pacifica
  source 1..316: note = Related to NZ_CP047970.1
MNNPLKINTKSKSYSLQDSALYKIKSKRRLLSLLNLSHQELKSLLSDGNYNIYQDNTQEKPRLIEHPQRQLERIHTRIASLLCRIKQPEYIHSGIKGKSHLTNARTHIGPAPTLTTDIKSFYQATHIHSVFDFFKNSLDCSPDVAKLLSELCTCNGHIPTGSRISMPLAYWANAHMFNELYRYSSERDIIMTVFVDDITFSGNKVTRTFKQNVKKIIEKHNHVMHPTKTVLHKENSLKVITGAVVGSKKLQIRNLHHESIYSELSQWMLIRDENSKNSSIFTEQIKNRLLGKINSQGQIDNRFKDKARSIKNYRKV

SEQ ID NO: 3206 - protein, 312 aa, Photobacterium gaetbulicola
  source 1..312: note = Related to JWLZ01000077.1
MKRKKNNKINTNGKSYPLHDSPFYKLRSKKVLFSLLKTDKEKIAHLKSDQGYNTFTQKSNKKTREIEHPVDALDIAHTKIASLLCRVTTPTYVHSGVKGRTHVTNAKEHLGKKRVLTTDIKSFYPSTTRQHVFKLFFNTFKCSPDVADILADICTFQGHVPTGSRLSMPIALWANINMFDELNVVSRKHDITMTVYVDDITFSGNLLNGRFKSLVKKIISRYDHVMHPKKTVLYKDDEIKVITGVVLDQDGIKIKNSQHKLIYQDIEQWKLFKGLAALPPESLNSRLMGRLHALSVINPRLKDKARSIKNCM

SEQ ID NO: 3207 - protein, 313 aa, Psychromonas antarctica
  source 1..313: note = Related to NZ_JAHNZV010000205.1
MPRKKYKINTNDKAYSFESSSFYKLSSPNILANLLHIPLADLKKLKNSKDSYKPFVIKKEGKKDRTIECPKRLLEKVHTRIASLLCRIITPDFLHSGIKGRTYITNAKSHLGKHKVLTSDLRSFYPSTSKKMIFKLFRYNFHCSVEVADLIASVATYEEHLPTGSRLSMPLALWANIEMFLEIESLAKKHSINMTIYVDDLVFSGKNLNELFSSTVNKIVLKHGHEIHSGKTVLYKSDEIKLITGVIVHNDEIFIRNCHHQNMHNDLEEWKTYKNGFMVPDDLKSRLLGRINAFAQIDPRLKDKARSILAIEH

SEQ ID NO: 3208 - protein, 330 aa, Shewanella benthica
  source 1..330: note = Related to NZ_LS483452.1
MSQQRRKYKINTNGKSYQIHDSPFYKLSSKKKLLSVLCITKEQLQSVLSNELNYNVFSQVGKTGKPRKIEHPINSVDKIHTRIASLLCRISQPEFMHSGVKGFSHVTNAKAHLGSHKTLTTDIKSFFPSTKKSMVFHFFYKRMKCSPDVADIMARITTFESHIPTGSRISMPLAFWANMDMFFELEKLAKLHNAIMTVYVDDLTFSGKAVNNLFKSIVKKIISKHGHIMHPKKTILYQHDDVKVITGVVLKNDSIAIKNQQHANIHADMIFWKIVRDDLFVPQGLKNRLLGRLNSLSVIAPSLKDKARSINNYKRKSKKSRVENKKQMVS

SEQ ID NO: 3209 - protein, 318 aa, unidentified
  source 1..318: note = Related to MZ568827.1; note = Shewanella phage vB_SspS_MuM16-1
MTRKKLRLKINTAGKSYRLHDSPFYKLIKQSRLLSILCITSEELSYLRYSPERYNVFIQKGNNEKERVIEHPREKLEKVHTRIASLMCRIEPPPFLHSGMKGLSHITNAQSHSTNSKVLTTDIKSFFPSTTREMIFRFFYKTLKCSSNVADILADICSVNGHLPTGSRISMPLAFWVNAEMFFELEKLSNMHDVCMTVYVDDVTFSGVTINKLFTKTVKSIISRHGHLMHPRKTVLYKGDDTKVITGVVLSGSKIAIKNQQHKKIHEDILLWKVVRDKYVPASLKNRLLGRLNSLSVVEPRLKDKARSIKNYKPNPQV

SEQ ID NO: 3210 - protein, 320 aa, Colwellia piezophila
  source 1..320: note = Related to NZ_KB905161.1
MKKQKRPKFKIKTLNKAYEISDSPLYKLTTKRKLAALLLLEPVTLNALIKNTDNYNVFEQVNSNGKKRIIEHPNLELDKVHTRIASLLCRIKIPDFVHSGRAKHSHITNARIHIGHHKVLTTDIRSFFPSTSRTHLFNFFNRKMKCSSDVSDILSKICTYNEHLPTGSRISMPLALWANIGMFLELEKIAVKHDIKMSVYVDDITFSGDKLNKLFISTIKRIVERHGHIIHPVKTVLYAKDDAKVITGVILKDGKQFVKNEQHRNVYQDIEQWKILKDTPYMPETLKNRLLGRLNSLSAIEPKFKDKARSIRNHKTPTPY

SEQ ID NO: 3211 - protein, 327 aa, Teredinibacter turnerae
  source 1..327: note = Related to NZ_KB889976.1
MAEKKLPNNKQRRLRLQTRGKQYSVCDSPFYKLCSKTKLAEMLGCTLPELKNLSSDEDYIVFNEEKSGKRREVQQPKPKLDKIHTRIGSLLARIKTPDYLHSGVKGRTHITNAKCHNSNSRILVTDVKSFYQSTTFKMIYGFFNHRMRCSPDVSWLLTKVSTYNNSIPTGSRLSMPLAFWSSIGMFEKLNQLSISESVVMTLYVDDLTFSGEKINKLFCHKVKKIVSSYGHLCHPKKTKIYNQNQAKVVTGVALLENGPAISNKQHKSIYEDMLQWEIIKNEALFESLNNRLLGKLNSQGQIDFRYKDKARSLMNEIRRRKPYSQVV

SEQ ID NO: 3212 - protein, 319 aa, Pseudoalteromonas sp.
  source 1..319: note = Related to JABEPJ010000003.1
MRNSRSKLKINSNSKKHSINQSPFFKLKTKKKLIELLGLASSELSIAKKDIGNYVVFEQMGNNGKSRTIQHPKDKQNEIHNRIANLLTRIELPAYLHSGRKKHSHITNATQHLGSKKVLTTDIKSFFQSTTKKMVFNFFNRKLLCSPDVSHILSCICTFNGHIPTGSQLSMPLAFWANIDMFERLENLSSSLNVDMTVYVDDLTFSGEQVNRRFLSLIKKIIISSGQVPHPLKTKLFKKNDLKIITGVALKEDKTLITNKQHMLIYQSFESWKGCRDEPVIANYVMPKLLGRLNALSGIDPKLKDKAKSLINYKPTSLL

SEQ ID NO: 3213 - protein, 320 aa, Colwellia sp.
  source 1..320: note = Related to NZ_JACGUS010000120.1
MRNRSKLKINSNSKKYSLNQSPFYKLKTKRKLIELLSLSMPELSIAKKDIDNYQVFDQMGNNGKPRTIQHPKNKQNEIHNRIANLLTRIELPDYLHSGRKKHSHITNATQHLGSKKVLTTDIKKFFQSTTREMVFRFFNKTLHCSSDVSDILSYICTFNSHIPTGSQLSMPLAFWSNIDMFEQLDNLSASLDVKMTVYVDDLTFSGEQVNKHFQSIVKKIIISNGQTPHPLKTKLFNKNDLKIITGVVIKDDKTLITNKQHKLIYQSFESWKGCRDEPLLESYIKIKPKLLGRLNALSGIDPKLKDKAKSLMNYKSAAEI

SEQ ID NO: 3214 - protein, 322 aa, unidentified
  source 1..322: note = Related to BDMN01000366.1
MRNKSKHKLKTYEICDSPLYKLRSKKKLLSLLYMSKEEIGIAVQDTDNYVVFETIRKKGKSRTIQHPKDRHKEIHCRLANLLIKIKVPNYLHSGRKEHSYVTNANQHLGEKRVLTTDISAFFQSTARDNVFCFFLNIMKCSSDVADTLSHICTYNGHIPTGSKLSMPLAFWSNLRMFDQLEKLSIKHNVCMSVYVDDITFSGNSINRLFLSTVRKIITSNGHTPHPEKTKIFGKKDIKVITGVVINGDDTLITNKQNKLIFQSFVEWKASRDEPLTERLITQKLLGRLNALSMIDPKLKDKAKSVTSYKKIVIKYVTTQRVF

SEQ ID NO: 3215 - protein, 324 aa, Alteromonas macleodii
  source 1..324: note = Related to NC_018692.1
MPKKSKLKIDHSRRKHKLFESSLYKLKTKRKLAELLQVTIPELKLASADVGNYVVFEQEGKSGKARTIQHPKDSQKKIHCRIANLLCRIEFPEYLHSGRKEHSHITNAKAHTGNKKVLTTDIKSFFPSTTRKMVFNFFYNTMKCSSDVADLLASICTYNGHIPTGSQLSMPLAFWANIRMFEQLNNLANKHDVKMTVYVDDLTFSGDSINRQFLSVIKKIIVSNGHISHPDKTKLFEKSDVKVITGVAIKCNDVGITNKQHKLIYESLEQWKGCRDEPLISSFVIPKLLGRLHAHSNIEPKLKHKVNSILNYKPVKNPHSKSTD

SEQ ID NO: 3216 - protein, 310 aa, Thorsellia anophelis
  source 1..310: note = Related to NZ_FOHV01000014.1
MKKTKKLKLISNQKCYHLDQSPFYKLQSKKKLLALLCINEAELKDCITSPLNYNVFLNGTRVIETPIGVLKKVHWRIASLLIRVNVPEYLQSGKKKHSNISNAKVHIGDTNLLSTDIKSFYPSTLRYKVFNFFLNIMKCSVYVADILSKLSTYNDHIPTGSQLSMPLVFWSNFRMFSQLNGLAEKHNAKMTVYVDDITFSGNSVNNLFLSVVKKIIISNNHTPHPNKTKLYASKENKIVTGVVIKGSKILIMNKHHKAIYQDLTVINACKLSGGAPSCYEITKKRLLGRVNALKLIDTRLQHKIEYFSNL

SEQ ID NO: 3217 - protein, 318 aa, Pseudoalteromonas sp.
  source 1..318: note = Related to PNDR01000076.1
MTRKLKLDIDHRRRKYTLIESPLYKLKTKRKLAELLLVQTNELKNLTQDQGNYRVFQQIGKSGKPRAIQHPKDSLKIVHCRIASLLGRVELPDYLHSGRKEHSHISNAKKHLGQHNVLTTDIKSFFPSTTRKMVFDFYFNLLKCSADVADLLASISTYNCHIPTGSQISMPLAFWSNIRMFEQLYSLAKKHDSEMTVYVDDLTFSGHAVNKRFASVVKKIIHTNGHIAHPDKTRLYAKDEVKVITGVAIKGNETRITNDQHMKIYETLEFWKGCRDEPIIAELIKPKLLGRLNAHLQIDTRIRDKVKSITSYKPKFSI

SEQ ID NO: 3218 - protein, 317 aa, Pseudoalteromonas luteoviolacea
  source 1..317: note = Related to NZ_JAGJED010000003.1
MNVKKNQKSKLKIQLKNKSYQVKDSPFYKLATKRKLANLLNISVSELLTLTKDAVNYKVFSQSKGYGKQRVIQKPIGRLEYVHTRIASLLCRVSVPSFVHSGRKGHSHVTNAKQHLGNNRVLTTDIKNFFPSTTEEMVFKLFFHTFKMNGDVAKLLANLCCFSGHVPTGSRVSMPISFWSNSKMFDELSSLSTKHDVVMSLYVDDLTFSGDGINRLFLSTVRKIVQKHGHIMHPDKTKVHTKNSRKVITGVVVQGDTLNITNKQNLMIYRELAQWKVIKNLPFIPKSLESRLLGRLYAMGQIDKKYKDKAMSVRNSS

SEQ ID NO: 3219 - protein, 312 aa, Pseudoalteromonas phenolica
  source 1..312: note = Related to PPSX01000023.1
MRKNHSKLKITTKQKAYSISDSPFYKLSNKKKLAELLFVKASEFKNLTSDENYKVFKQLNSKGKSRQIEQPLLNLDRVHTRIASLLCRIDLPNYLHSGRKGRSHVSNARAHVGNKKVLTTDITNFFPSTTEKQIFSLFYNIFKMTPDVARVFAKICCYKQHVPTGSRLSMVLAFWANYKMFEELNSFSLFRNVRMTVYVDDLTFSGENINREFSSLIRKIIKKHGHLAHKGKTHQKQSHEVKVITGVVVKGNDIKPKLSQFKELHNDIQAWKLVRDTGLPLSSLRDRISGRLYSMGQINKRFKDKAKSVRNY

SEQ ID NO: 3220 - protein, 312 aa, Halomonas sp.
  source 1..312: note = Related to NVVS02000010.1
MKQKRLKPRIITKNKSYPIEDSVFYKLSSKKRLANLLFSTSQELKSLGESDNYRCFTQTKNGKPRLIQEPLPRLDKIHSRVASLLCRIDTVDGLHSGKKGRSNISNAHAHLGQGKKVITADIKSFFPATTRQNVFDFFYTTMQCAADVADLLSKILTYNDHIPTGSRISMPLAYFANKRMFDEIESAASEFSAKMTIYVDDLTFSGAMLQKSFIGRLEATAKKYGHKIHPSKTRFYEASEVKLITGAAIKGDEITPRNKHLKQLRGELSVWLDNPGNDEKLTNRILGRMTFIGSIDPRYKDKAKTFRKSVFK

SEQ ID NO: 3221 - protein, 312 aa, Alcanivorax hongdengensis
  source 1..312: note = Related to NZ_AMRJ01000028.1
MKQKRRKPKIITKQKSYPLQDSVFYKLSNKKRLANLLSSTPQELKMLAGNDNYRCFTQTKNGKKRLIQEPLPRLDIIHTRVASLLCRIETIDGLHSGKKGKSNISNARAHVGLGKKVITADIKSFFPTTTRLNVFDFFYNTMRCSPDIADLLSKMLTYDEHVPTGSRISMPLAYFANKKMFDEIESAANDCGATMTIFVDDLTFSGTTLKRSFIGRLETIAKKYGHKIHPSKSRFYGANEVKLITGAAVKGNDISPRNKHLKLLRSELSEWLKCAQKDEKLTNRVLGRMTFIGSIDARYKDKARAFRKTAFK

SEQ ID NO: 3222 - protein, 312 aa, Alcanivorax sp.
  source 1..312: note = Related to JAFMPS010000045.1
MKRRLPKNRIITKKKSYPLQDSPFYKLSSKTRLASLLGSTPKELKSLVGNDNYHCFTQTKKGKPRLIQEPLPHLDKIHSRVASLLCRIETVDGLHSGKKGRSNISNARAHLGPGRKVITADIKSFFPSTTRLMVFDFFYNTMQCSSDVADLLSRILTYDEHIPTGSRISMPLAYIANKRMFDEIEDAAMRVGAKMTIYVDDLTFSGVMLHKDFVKTLEMIAKKHGHRIHPSKTRFYSENAIKLITGAAIGEDRIFPRNRHLKALKEDLQIWINSPQKDRKLINKILGRLTFIGSIDPRYKDKARTFRNVAIK

SEQ ID NO: 3223 - protein, 308 aa, Legionella sp.
  source 1..308: note = Related to RZGU01000003.1
MNTQKQKIITKNKYYPAKDSLFYKLSSKGRLAKLVSSTVQELKSLTKNDQYHCFTQSKRGKTRPIQEPLPKLDKIHSRIASLLCRIETADGLHSGRKGRSNISNASAHIGVGKKVITLDIKNFFPSTKRSSVFDFFYNTMCCSPDIADLLSHICTYDDHIPTGSRLSMPLAYFANKRMFDEMEQTANECNAKMTIYVDDLTFSGEELSKNFITRIELIAKKYGHKINSSKTRFYAEDAVKLVTGVAVIDNQLKPRNKHLEALFKKTNDWQVNKSMQSRNCILGYMTYLGSIDSRYKDRARTFRQKAIF

SEQ ID NO: 3224 - protein, 307 aa, Legionella pneumophila
  source 1..307: note = Related to CP000675.2
MKQKKNKIITKNKCYPIKDSVFYKLSSKGRLANLLSSTVQELKSLTKNDQYHCFTQLKRGKTRLIQEPLPKLDKIHSRIASLLCRIETVDGLHSGCKGRSNISNAKAHVGVGKKVITLDIKSFFPSTKRSSVFYFFNNTMSCSPDIADLLSQLCTYEGYIPTGSRLSMQLAYFSNKRMFDEMEQAASECGAIMTIYVDDLTFSGAELSRNFIKRLEFIAKKYGHKIQSSKTRFYSENEVKLITGVAVIGEQLKPRNKHLAALTQEIEYWRVNKSQQSANRILGYMTYLGSIDSRYKDKAKTFRHQMA

SEQ ID NO: 3225 - protein, 310 aa, Marinobacter sp.
  source 1..310: note = Related to NZ_KB889904.1
MTQNRRKPRIQTKNKSYPLQDSPLFKLTTKRKLAKIIFSELAELKQLCNDNNYSCFTEITKGKTRFIQAPLRRLDMVHTRIASLLCRIDVPNELHSGTKGRSIFSNAKAHLGVGRRTVTVDIKSFFKSTSRSQVFDFFSDTMKCAPDVADLLSRLLTFNDHIPTGSRVSMPMAYFANQKMFCDMQAVADARGATMTIYVDDLTFSGTKLNHQFVDKISNITEKYKHTLHPDKTRFYGPKAAKCITGTVIVGNELRPRNCQYKAVHEDMQNWLSINKPDDALAARLLGRISFIGNFDARFKDKAVRFRRAL

SEQ ID NO: 3226 - protein, 320 aa, Marinomonas pollencensis
  source 1..320: note = Related to NZ_QUNG01000011.1
MIKKKKSKLKIRTNGKIYRLQDSPFYKLTSKKRFASLLNLEYDQLKQLLSNSDSKFEKFTQVKEGKKPRAIQKPITSFAPLHCRIASLLCRIGTPEYLHSGKKGRSNLSNAQSHSGKHKLLAVDIESFFESTSHEKVYSFFRGHLKCSSDIADALCKLCLCDSHIPTGSQLSMPLAYWANSNMFNELDMLATKHRVKMSVYVDDVVFSGEQLNKLFLSTVKKICARYGMTVHPDKIRLYNKEQPKVVTGVAIIGGELKVDHKQHKLLENDLKLWNACKEDPIASDLSLPRKISGRLSAMGSVEKEYLDRARSFRKKNSIR

SEQ ID NO: 3227 - protein, 316 aa, Acinetobacter indicus
  source 1..316: note = Related to JZRF01000008.1
MNQINLKPKLITKNKSYKIQNSALYMIKTKNHLARVLLVDIEEIKNIENICTQYNVFQIEGKSSKLREIQTPINFLEIVHNRIASLLCRIETPNFLHSGKKSHSNITNAKAHLGYNLQVLTIDIENFYPSTTAQKIYKFFLHGMKCSETISKILTKICTYNEHLPTGSRISMPLAYFANMLMFQEIEKLSIKHEIKLTVYVDDITFSGFKVSTLFYKLIRNIIFRHQHLVNIKKTRFYLKNQPKLVTGVILKENSIFIRNKHHKELYELKELYEITKTNNPEQLFSIRNKLVGKLYSCGVINSKYKSEAKIYLNTP

SEQ ID NO: 3228 - protein, 316 aa, Acinetobacter chengduensis
  source 1..316: note = Related to NZ_RCHC01000004.1
MIQKNSKPKLVTKNKSYSIQDSALYMIKTKKHLARVLLIDVEKLKNIKDICTQYNVFSTNGKSNKLREIQTPINVLETIHNRIASLLCRIKTPDFLHSGKKNHSNISNAKVHLGENLKILTIDIEKFFPSTASKKIYEFFLYGMKCNKTVSKILTQLCTYNECLPTGSRISMPLAYFSNMLMFQEMALLASKHQINMTVYVDDITFSGSNISTLFYKLVKKITIRHQHSINDDKTRFYTEYQPKLITGAILKGNSLLIRNKHHKELYEFKELYSFTKDNNPTQLSEVRNKLIGKLYSCGVINVKYKSEAKVYQNYL

SEQ ID NO: 3229 - protein, 316 aa, Acinetobacter baumannii
  source 1..316: note = Related to JAIWSZ010000041.1
MNSKLKIVTLKKSYNIQDSALFKVRSLKHLAKVLLIDIEKLNDLSFTKDQYRIFTITGKSGKEREIQNPTGLLAQIHSRIASLLCRIKTPDYLHSGKKGRSNVTNAKYHTGHNLEILTVDLVDFYPSTTSNKILNFFLCTMKCSYKVACILTTLCSYNEKLPTGSQISMPLAYFANCMMFKEIEALSNKHNIKMSIYVDDITFSGEKITRLFYSLIKKIVVRHGHSLKHTKTRYYKKSSAKLITGVVVKDANLLIRNKHHQEIYQTKELLTIAIHSDSKEQIGSLRLKLIGKLHACGSIDPKAKSEAYYYQRQSIN

SEQ ID NO: 3230 - protein, 315 aa, Pseudohongiella sp.
  source 1..315: note = Related to JABMOK010000124.1
MKLPAKHSPKLHIKSNKKSYLPSDSALYNLTTKKRLEAIIGKTIAEIEAAGIDENYRVFGLKKGGKTREIQAPKYSLDVIHTRIASLLVRVAVPDYLHSGIKGRSNITNAKAHIGNHPLLTMDIQKFYPSISKKSIFNFFHIRMNASRDVAGILAEVCSYKDCLPTGSRISMPLSFWVNYEMYSKLESLCLNKGIIMTVFVDDFTFSGDQVDEKFKKHAKKIIKESGLEVHPRKTRLFGKGFPRVVTGALVDGSGIKVRNKHHKSIYTLFGEIEKCSDDKKLEKMQMQLLGKLSAAGQIDKSFKNKAAQFRKAIC

SEQ ID NO: 3231 - protein, 329 aa, Cricetibacter osteomyelitidis
  source 1..329: note = Related to NZ_SLYB01000032.1
MKKKKKLITHNKEYTLDKSPLFNIEYIKRLVSVLNADEEIITSLIKYKAENYNCFSQGKKKREIQTPINELYLIHNRIASLLARIKLPKYLYSGVKNRSYIDNAKEHLNSKAILTTDVTAFFPSTTRTMIFWFFKDKMQCSSRMANILADLCSINDHLPTGSQISMPLAYWVNSSMFKELHRLAEDHKLKMTVYVDDLTFSGEKVPKGFKYQVEQIIKKHKHQIKSEKTTLYNNQSVKEVTGLILKEGKLLPPNRQLKKLHQHLNLWEKLIESPRNGIKIEWLYPKVIGVLNNITYFRPEYKNVIFAIQKEYHQYKNTPSNYKNQIDAN

SEQ ID NO: 3232 - protein, 325 aa, Glaesserella parasuis
  source 1..325: note = Related to NZ_MNAL01000052.1
MKKKKLITHNKSYAIDKSPLYNIQYIKRLSDILQINEKTIFSLIENKTKNYNCFLQGKKKREIQSPINELYLIHNRIASLLARVKLPEYLYSGVKNRSYIDNAKAHLTSKEIITTDITAFFPSTTRTMIFWFFKNKLKCSHKIANILADLCSINEHLPTGSQISMPLAYLVNASMFDELNNLAEKNKLIMTVYVDDVTFSGEKVPKGFKYQVERIIKKHKHNIKAEKTTLYKNQSVKEVTGLILKDNTLLPPNRQFKKLHQHLTLWKTLIAKPRNGIKIEWLYHKIVGILNNISYFKSGYKNVVFAIQKEYHQYKNTPTNYKKAD

SEQ ID NO: 3233 - protein, 322 aa, Pasteurella multocida
  source 1..322: note = Related to NZ_CP076113.1
MKKKLITHDKSYQLENSPLFKIQYTKRLSQVILQSEETISSVFESKAQYYNIFQQGNRLIEVPLRTLYAIHNRIASLLARITPPDYLYSGIKNKSYITNAQQHLDSDVILTTDITAFFPSTTKEKIFWFFKDKMQCSTKIANHLAELCTIDGHLPTGSQISMPLAYWVNANMFDELNRLAKENELKMTVYVDDVTFSGARIPKEFKFLVERTIKKYRHSIKLEKTKLYKSQSAKEVTGLILKDGKLLPSNRQIKKLHQYLNLWGELLSQPRQGRKIEWLYPKLVGVVNNIAYFKPEYRNVVFAIHREYNQYKNTPSNYKKEV

SEQ ID NO: 3234 - protein, 316 aa, unidentified
  source 1..316: note = Related to JAGYHV010000039.1; note = Alcaligenaceae bacterium
MKYPVKYSKPSYPLSKSPFYRLCSISYLKRILEVCVWYEEELLNEIEQFYSCYDSSGHQKRFPYPIDELYGIHNKIASYLARMEMPEYIHSSKKGASYLTNAQVHQGTKETFKTDIRSFFQSTTKAMVFKFFRKKMLCSRAVSEYLAHLCTLDNALPLGSQVSMRLAYFANMDMFEQLFLLAQSHNLRMSVYVDDITFSGDKIPKGFKGQVAQIVHRHGHKIKRNKTKCYSQNKKEITGIMIDGETLKLPDRKLLQIHNEFNKFKALLKTTERDKEKILYKTRYLFGLLNHAAQFDPKYQLIRKELKAKINEKCGL

SEQ ID NO: 3235 - protein, 390 aa, Actinobacillus capsulatus
  source 1..390: note = Related to NZ_KB893940.1
MAIHKRHTLQTSPLYGLKHLHQLQHLLYHSRYFRNTNIDLDKQYKLSETAHREVFYPDDTLYNFHSELNKFLSKIEKPEFIKSGKKGESYLTHVSSHINKNQYFSLDIRSYYSNINRLDVFKFFRNNLGCSHKIANYLAYFCTYKDQLPLGSPMSMNLAYFINEPMFYCLNEIAVKNNLSMTVYVDDIAFSGRVITSKVKYDIIGVINKHGYSINEDKLRFYKSKKTYRETSGLLIYKGKLLPNKEKLDKLHKMLSEWDALLRLDKPLETKNHFIRLISFISYLCQIDTKYMQLKYKVIKEYNNKKEGDLLAIYQDRITEWNTLLSNHETSFHALNEKHAELNELIKNLSKLNKKHLILYKQIKYEHEKFKKHKRSSIGRFFSAFSKYLA

SEQ ID NO: 3236 - protein, 310 aa, Neisseria perflava
  source 1..310: note = Related to PKJP01000009.1
MILCTTDEIFSIINNKIFYYNMFEIGGRVCHTPCYELKGLHSRLAQFLVRIKKPRYLYSGVKGLSYVDNARVHSVYYETFKTDISEFYSATTQAIVFKFFRNKMQCSHKVANILAELCTLEGKLPTGSQLSMILAFWANSDMFEQLNQLAQEHHLVMTVYVDDITFSGAKIPAGFCQQVAQIMSEHGHAMNKKKTRLYQANSHKEITGLIINRVGDSPIPPNRFYLKLHNKLAEFNQIYAEIKNGKSKMEEDTLRQLTNHLIGLLNHASQFDKKYKMVKKHIQKQHDDLIQYLQTTHKVGSGKLGKLCIR

SEQ ID NO: 3237 - protein, 328 aa, Actinobacillus capsulatus
  source 1..328: note = Related to NZ_KB893930.1
MNKIRRKSLKIPIRQTKEYDLNQSPFFKLVSIKKLLSILRVSQEELKDILDNPTSHYSIRIENKRDIQSPKKYRILYRIHNRIAHHLRAIITPDYLFSDKKGCSIYDNAIVHFGCKMLLNVDISKFFPSTNRNKIYSFFKYSMQCSSEISDIMSYLCSINNHIPTGSQISMRLAYLVNKKLFDDLYKFAKDKNLKMSVWVDDVSFSGDKIDSSVIYVVEKIIKKHGFNVSKNKTQIRHSTENKSVTGIFISGDIMEASKELYKKRRIKLREWKNFIKNKEISLEELEKVKDSLLGLLNYLNLFEPSSSKYIALIENDFLSYSNKRISI

SEQ ID NO: 3238 - protein, 326 aa, Mannheimia granulomatis
  source 1..326: note = Related to NZ_CP015030.1
MNKIRKKSLKIPIKQNKEYELNQSPFFKLVSLKRLLSILRVSEDELKDILDNPASYYSIRVENNREIQSPKKTKSLYRIHNRIAHHLRAIITPCYLFSDKVGCSIYDNASVHIGCKMLLNVDISKFFPSTNRNKIYSFFKKDMECSPQISEILSYVCSINGHIPTGSQLSMRLAYLVNKKLFDHLFHFAESKSLKMSVWVDDISFSGEKINSNFLNSVEKIIERHGFNISKHKTKLKHSTESKSITGIFISGEKMEASNESYQKRRVLLEKWKESIKNKEIPIKELEKLKDSLLGLLNYLNHFENSSKKYIFQIEKDFIEYLKRVS

SEQ ID NO: 3239 - protein, 329 aa, Haemophilus parainfluenzae
  source 1..329: note = Related to NC_015964.1
MKKKFKKLHITQTKEYELTQSPFFKLYSVDKLLNILKVEREILEDILNFPGNYYTFKTSNGRNIQTPSKDLSLYLIHNCIANHLRAIITPDYLFSDKKNCTVYDNASVHLGCDILLNIDISKFFPSTTYIKVFKFFRYRLLCSTEIADILAHLCTINDHIPTGSQISMRLAFLVNQGLFNDLYNLAISKNIKMSLWVDDISFSGAEVTPTFKYKVYKIIEEYGFKVSEHKTKLSYKGQPKSVTGIFIDGDKSIGANEHYKKRRVLFKKWKDACKKKTFNKKQFQRIKALRIQILGLLNYLNHFEPSSKNYINIIENDFKKIKNKFLYKI

SEQ ID NO: 3240 - protein, 319 aa, Actinobacillus delphinicola
  source 1..319: note = Related to NZ_LR134510.1
MTKLNTRNKSYNLEESPLYNIQYEQKLLKILNISQNDLIFVRENLKDFYHSFSKKHRIIQTPKNLLKQIHYRIGDLLARIAMPDYLMSGKKGASHIENAKLHLQEDLHVFTADIEKFFPSTKRQAIFKFFKNKLQCSHNIATILSELCTTHEGRLPTGSQLSMHLAFWTNFNMFEKIAKLSNQYDLRFSIFVDDLTFSGKTIPHNFKYQLKKIITSYGYQINTQKILLFKPFKIRRVTGIYIKNGDTHLPNTFLRELHTALQSWKDILKTSPDKLDKKKLETTYNKLLGSINYAALLDKKYKQIRKKVIAEKQKITQYQ

SEQ ID NO: 3241 - protein, 319 aa, Psychrobacter sp.
  source 1..319: note = Related to JADGFW010000011.1
MSKKKLKIKSSKKYSINQCRLYKVTSLKKLCEILGINNRELKLIIDKSKNREFYNCYINQKGRLIQEPINLMYRVHNRIANLLARVETPSYIHYSKRGYSHISNAKAHLDSKQLITFDIKSYYQSIDYETLRRFFREKLKCEQDVAYILSMICSFEGSLPTGSQISVYLCNLTNLDMFDEMYLQSNRVDQKFTVYADDITISGRTVNNSHYNVMKKIIERYGYIIKEQKTKRYTSNQIPIVTGVALRNTVDVKNEYYKGLRKLCEGVNFNIDNEPYAQLKDRYLSLKGKTQYIKQLNKEVPYFILQTQMLLEKKLEGQL

SEQ ID NO: 3242 - protein, 319 aa, Psychrobacter sp.
  source 1..319: note = Related to VOBE01000007.1
MSRKKLKVKADKRYSIDQCRLYKITSLKKLCEILSINNEELKLLIDKSRNSKFYNCYTNQKGRLIQEPINLMYRVHNRIANLLARVETPSYINYSKKGCSHISNAKAHLYSKQLITFDIKSYYQSICNEALRRFFRDKLKCEQDVAYVLSIICSFEGSLPTGSQISVYLCNLANIDMFHEMYLQSNRFQQEFTVYADDITISGDIVNDSHYNVMKKIIERYGYIIKEEKTKRYTSNQTPIVTGVALKDTVDVKNVYYKGLRELCESINLNVDNESYAQLKDEYLSLKGKIQYIKQLNREVPCFILQTQSLLEKKLEGQL

SEQ ID NO: 3243 - protein, 319 aa, Psychrobacter aquaticus
  source 1..319: note = Related to AUSW01000014.1
MSGKKLKVKTDKKYSIDQCRLYRVTSLKKLCEILGINNQDLKVLIDKSKNSEFYHCYVNQKGRLIQEPINLMYRVHNRIANLLSRVETPSYIHYSKKGCSHISNAKAHLHSKQLITFDIKSYYQNIGNETIRKFFRDKLKCEQDVAYILSIICSFEGSLPTGSQISVYLCNLVNLDMFQEMYLQSHKAQQQFTVYADDITISGQIVNDSHYNVMKKIIERYGYTVKEEKTKRYNSNQIPIVTGIALKNTVDVKNVFYKESRKLCENININIDNEPYAQLKDKYLSLKGKAQYIKQLNKEVPYFILQTQMLLEKKLEGQI

SEQ ID NO: 3244 - protein, 319 aa, Psychrobacter sp.
  source 1..319: note = Related to NWFK02000001.1
MSKKKLKVKANKTYPLNQCLLYKVPSLKKLCVILKITKEELLTLMADSESNGLYNCYENKEGRLIQEPRDLMYVVHNRIANLLSRVKTPDYIHYSKKGHSHISNAEVHLDSNQLMTFDIKSYYPSISSELIRKFFRHKLKCEQDIAYLLSKLCTIDGSLPTGSQISVYLCNLVNLDMFNEMKLQCDRFNHKFTVYADDITISGESVNESHYNVMRKILERYGYEIKESKTKRYTSNQTPIVTGIALTKNLDAKNDFYKQLRQLCDDINFIIDNASYAQLKDEYYSLKGKAQYLKQLQQKVPEFVFTTQARLEKKLEGQI

SEQ ID NO: 3245 - protein, 317 aa, Psychrobacter sp.
  source 1..317: note = Related to NZ_CAJHBG010000001.1
MSKKKVKANKIYSLNQCRLYKVTSLKKLCSILKITEEELSLLVESYENSDFYNCYINKDGRPIQEPKKLMYRVHNRIANLLSRIETPEYVHYSKKGHSHISNAEVHLHSKQLMTFDIKSYYSNISSESIRVFFRHKLQCEQDIAYLLSKLCTLNGSLPTGSQISVYLCNLVNLDMFDEMKLQCEMFEQKFTVYADDITISGKSVNKSHYNVMSKILERHGYEIKESKTKRFTSNEIPVVTGIALKKTSDVKNSFYMELRQLCEGIDIHIDDASYAQLKDEYYSLKGKAQYVKQLNQKIPKFVFQTQAKLEKKLEGQL

SEQ ID NO: 3246 - protein, 321 aa, Psychrobacter namhaensis
  source 1..321: note = Related to NZ_JABUZJ010000058.1
MKVKSNKLKVKTDKYYPLNQSALYRVNSKKKLAEVLLISGTELATLIRDDDKIKFYNCYLNEKDRLIQQPQGLMYKLHNRVANLLSRIETPEYIQYSKKGLSHITNASIHANSKQVITFDIKSYYLSIKRESVQNFFREELECEIDIAFILSKLCTLDEALPTGSQISNYLCNLVNLVMFDEMNSLASRFGMSFSVYADDITISGDNLDSSHLNTMRKIIERYGYCIKDEKTKIFKGNETAVVTGIALKESLDIKNEFYSDLRKLCELVNSYIDKESYAQLKGDYFKLKGKIQYIKQLNQTIPRLALNTKALLERKLDGQI

SEQ ID NO: 3247 - protein, 318 aa, Psychrobacter sp.
  source 1..318: note = Related to NZ_CAJHAZ010000027.1
MKKKRKLKVRHFNKQYPIHQSPLYRLSSLKKLSVLLAMPLKDIRKLNGNNDSRYNVFTNKDDREIQEPFNEIYVIHNKLASLLSRIDTPTYLHSFKKQYSHITNSKTHLGSEQVITFDIKAFYQNITQDKIRMFFKNDLKCSPDIAFLLSKICSYDNHLPTGSQVSIYLNFLVNRTMFDEMHSLAETLKICLTVYADDVTISGEKVDMGMLNTMSKIVERHGHTINKQKTRKYSNNQVPVITGIALCNGKTQPTNEKFKELRQKSNFLLRVSNDLDLDFLKKESMSLDGTLNYFSQLSSEVPKSTLEARDRLAKLLGI

SEQ ID NO: 3248 - protein, 318 aa, Moraxella osloensis
  source 1..318: note = Related to NZ_CP047226.1
MSNKKRLKIKNHNQYPFHQSPLYKLKSKKRLADIFNVELSELKSWFNTIPSEYNVFLNEKDREIQTPLNNLYIIHNRLANLLSRIETPSWLHSFKKNFSYLTNAKSHIDSRQVLTFDLKSFYQSTTQNAVRKFFKDTMLCSEDVSFFLSKICCYNNHLPTGSQVSIYLCYLVNIKMFDEMRRLAVSRNALLTVYADDITVSGDKIDYSLLNTMRKIIVRHGYKLSEDKTLRFKYNEIPVITGIALVQGELRPTNKFMSELRSKVYFLNRNAEELDIELLKKEKQRINGKINYIESLNRPIPSQAIDINKKLDKLVPIK

SEQ ID NO: 3249 - protein, 319 aa, Citrobacter freundii
  source 1..319: note = Related to VHJG01000001.1
MKSTKRTPSLQRFPKLYPLNQSPFFKLKTRTKLLEIIGLSRSQADKLMLDSAYKEFINDAGRSIQEPIAQLKAVHKRIGILFSRIELPQYLHSGRKKHSTLTNAESHRHATELLKLDIHKFFPSTSAAKVYKAFVEKFEMSPDVAYVMTNLATFAGKVPTGSPISMAIAFWANKDMFDELSNLATLSNLVFTAYVDDVAFSGAKIPKGFASQAKKCIHSHGLTSKDKKERFYPASEGKLLTGIVIQNGKLKVRWAHNDSIGKEFATLAEAKDNAAKISHLEKLAGKLHAAGQIDFRQKDKARFFTQQLKVAKKQSEQDS

SEQ ID NO: 3250 - protein, 325 aa, Enterobacter mori
  source 1..325: note = Related to CP084692.1
MKSTKRTPSLQSPPKIYPLNQSPLFKLKNKRKSLEIIGLSKKQADKLMLDSAYKEFVNDAGRTIQEPIAQLKAVHRKIGVLLSRIELPPYLHSGRKKHSTLTNVESHKLATELLKLDIHKFFPSTRAAKVYKAFVEKFEMSPDVAYIMTNLSTFAGKVPTGSPISMAMAFWANKDMFDELSNLAASNSLVFTAYVDDVAFSGSKIPKGFAAQAKKCIRSHGLTSKDKKERFYPSSEGKLLTGIVIQDGELKVRWAHNDSIGKEFATLAEAKDNATKIIHLEKLAGKLHAAGQVDFRQKDRARFFYTAAQSHKKALRTRYLKQQVD

SEQ ID NO: 3251 - protein, 319 aa, Kosakonia oryziphila
  source 1..319: note = Related to NZ_FMBC01000051.1
MISTKRSSSLHSSPKLYPLNQSPLFKLKSKKKLLEIIGLSKKQADKLMLDSAYKEFENDAGRAIQEPIAQLKAVHKRIGALLSRIELPPYLHSGRKKHSTLTNAKCHRHATELLKLDIHKFFPSTKAAKVYKAFAEKFEMSPDVAYLMTNLVTFAGKVPTGSPISMAMAFWANRDMFDTLSELASSNNLVFTAYVDDVAFSGSKIPKGFAAQAKKCIKSYGLTSKDKKERFYQSSEGKLLTGIVIQDGELKVRWAHNNSIRKEFADLAKVKDNSAKIIHLEKLAGKLHAAGQVDFRQKDKARFFTQQLKAAKKQSTESS

SEQ ID NO: 3252 - protein, 321 aa, Pectobacterium brasiliense
  source 1..321: note = Related to JAFJZU010000002.1
MISTKRSSSLHISPKLYPLNQSPLFKLRSKKKLLEIIGLSKKQADKLMLDSSYKEFENNAGRTIQEPIAQLKAVHKRIGALLSRVELPPYLHSGRKKHSTLTNAECHRQATELLKLDIHKFFPSTKAAKVYKAFVEKFEMSPDVAYVMTNLATFAGKVPTGSPISMAMAFWANKDMFDELSELATSHNLIFTAYVDDITFSGLKIPKGFSSQIKRCIHSHGLVSKQKKEKFYSSSQGKLLTGVVIRDGKLKVRWAHNSSIKKEFNELAKAKDDTEKIIHLEKLAGRLHAAGQIDERMKNKARFFSKKLKEAKQSLLIRSTK

SEQ ID NO: 3253 - protein, 305 aa, Pectobacterium polaris
  source 1..305: note = Related to NZ_JAESHX010000078.1
MNQSPFFKLKTKKKLLEIIGLSKAQSDKLMQKSAYKEFVNDAGRTIQEPIAQLKAAHRRIGVLLGRIELPTYLHSGRKKHSTLTNAESHIQANELLKLDIHKFFPSTTAAKVHKAFVEKFQMSPDVAFLMTNLVTFSGKVPTGSPVSMAMAYWANKDMFDELSDLAISNSLIFTAYVDDVAFSGVKIPKGFSSRVKKCIHSHGLVSKQKKETFYDSTQGKLLTGVVIQDGKLKVRWAHNSSIKKEFDELAKAESDTDKIIHLEKLAGRLHAAGQIDERMKNKARFFSQKLKEAKQHLAAQSSEKS

SEQ ID NO: 3254 - protein, 319 aa, Pectobacterium brasiliense
  source 1..319: note = Related to JADOXZ010000029.1
MKSTKRTPSLHRAPKLYPLNQSPFFKLKNKNKFFEIIGLSKHQVEKLSFETAYKVFINESGRTIQEPIPQLKAVHKRIGILLGRIELPIYLHSGRKKHSTLTNAESHRYATELLKLDIHKFFPSTSAAKVYRTFIDIFKMSPDVAYLMTNLVTYSGKVPTGSPISMAVAFWANKDMFDELSRLAFSNGLIFTVYVDDVAFSGEKIPKGFAAQAKKCIHAHGLVSKKEKETFYPSSKGKLLTGIVIQNGKLKVRWAHNASIKNELDTLAKAENTPEKITHLEKLAGKLHAAGQIDYRLKDKARFFTRQLKKAKTQSEQEN

SEQ ID NO: 3255 - protein, 325 aa, Pantoea agglomerans
  source 1..325: note = Related to JACYNZ010000001.1
MKNTKRTPSLHSKPKLYPLHQSPLYKLKVKSKLFQLLGITKSQLAKLSQDKSYNVFTNENGRTIQEPIPQLKLAHKRIGKILSRIEMPSYLHSGRKKHSTLTNARAHIKANELLKLDIHHFFPSTTAARVYNLFHRKFDMSPDVAYLITNFVTYSGRIPTGSPISMALAFWANWEMFDEINKLAISHDLVFTVYVDDLAFSGEKIPKGFASQVKSIISSNGLISKRKKEIFYPSSKGKLLTGVVIQNGELKVRWAHNASIKNEFDNLSLASQDVQLRIKLLERLTGKLHAAGQVDYKLKDKARFFTKQLKIARCTLIQQPHLSHQ

SEQ ID NO: 3256 - protein, 318 aa, Pantoea stewartii
  source 1..318: note = Related to JACETZ010000001.1
MKNTKRPPSLHCAPKTYPLNQSPFYRLKVKKKLYQLLGLTKAQVERLSQDNSYNVFTNEKGRVIQEPISQLKLAHKRIGKMLARIELPDFLHSGRKTYSTLSNAEAHINADELLKLDIHKFFPSTTAAKVYKVFNEKFEMSPDVAYVITNFVTFSGKIPTGSPISMAIAYWANWELFDEINKVSIANRLVFTVYVDDLAFSGRKIPKGFASQIKSLIASKGLIAKKNKEVFYPKSKGKLLTGVVIQNGTLKVRWAHSASIKDEFKNLAIMSRNKESTVKLLEKLAGKLHAAGRIDYKLRDKARFFTKQLKIAKCVLID

SEQ ID NO: 3257 - protein, 328 aa, Erwinia persicina
  source 1..328: note = Related to JACYMO010000013.1
MKNATRSSSSFSSLKNYPINQSPLFKLTTKKKLLALLGFSLPQIEKLSKDSSYRVFLTPSDRCVQEPILQLKKIHKKIGSLLNRIEQPDYIHSGRKKRSIITNAKVHQNSYQLLKLDIHKFFPSTSGSKIYRLFVNDFQMQPDVAHLLTNLVTYNYSVPTGSPLSMVLAYWANKSMFDELYQLANENDLDFSVYVDDVAFSGEKIPKGFSHCAKSCISKHGMKSKSKKEMFYQENQAKLLTGVIISDGVLKTRWKHSQMIKKGFETLALQTSDGDRVIALEKLTGRLHAAGQIDPRIKSKAIHFSKILRAAKLDIIAAKNENDKPDVS

SEQ ID NO: 3258 - protein, 316 aa, Vibrio ostreicida
  source 1..316: note = Related to NZ_MPHM01000037.1
MSKNRSPSFKYYELNQSPLYKLQSKNKLNALLGINKNQIPSLLSDELFNQFLNKDNRLIQHPIGKLELVHKKIYCLLNKIIKPSYLHSGTKKRSTSTNAEIHKNNKEMLKIDISKFFPSNSERKIRNLFLYQFEMSIDAASYLSKLICINGILPTGSQVSMQIAYFANKVMFDRLNTLAKENNLSMTAYVDDVAFSGEKIPTGFLKKVKTIVNESGLTIKNKKIKIYREKQPKMITGIIIKNNMLTVRNKNLRKIKQTFLEIFTPNAHLSLEEKEVIYTRLKGQLHAAGQINKRFKQKAKHINKNQKKYLKQNQTL

SEQ ID NO: 3259 - protein, 300 aa, Acinetobacter baumannii
  source 1..300: note = Related to CP012952.1
MESSPPCDYAKYVYELELLSSPLFHITSKKRLAILLHSSVKELNNIVRSKDQMYQYFNETQTDNSGNIIKVRPIQNPHDRLKQIHSRIGKFLGNLKAPEYLHSKRSKSAISNAKAHVGIKGHTLNIDITDFYPSTSRAKVQAFFGYTLQYPTDIAKYLSEICTVKNCLPTGSPLSSALAFWANKSMFDEIYRVAKSRAITMTVYVDDISFTGRAVNQNFLKKIIQIVGKYQHKIKQEKIKFFPEYSVKFVTGVAILNGRLQPAHRHYRDIRVLQKIDNDLQATLRLMGKNNYIKQITNQV

SEQ ID NO: 3260 - protein, 300 aa, Acinetobacter sp.
  source 1..300: note = Related to NZ_VPDH01000112.1
MGNSQPSDHARYVYDLELLNSPLFHITSKKRLAMLLCSSVKELNHISRSKNQMYQCFNKKQTDNNGNVIKVRPIQDPHERLKQIHSRIGKFLGNLKAPDYLHSKRSKSAISNAKAHVGLKGLTLNIDITDFYPSTSKAKIQSFFGYTLQYPTDIAKYISEICTVNNCLPTGSPLSSALAFWANKAMFDEIYRIAKSRSINMTVYVDDISFTGKAINQKFLKKIVQIIEKYQHKIKEEKIKFFPENGVKFVTGVAIVNGHLQPAHRHFRDMRHLQKFDNDIQVALRLAGKNNYIKQITNHS

SEQ ID NO: 3261 - protein, 304 aa, Acinetobacter baumannii
  source 1..304: note = Related to DADBFC010000020.1
MKKLSYVSFDYVEHIKDLAIFNIQSKRYLAFVLKTQLPLLKDISRNPNNFYRFKVKEIVKNEKLKIRRIEEPNSILKPIHKQIHNLISQLPAPDYLFSKKKSSCVLNAKVHSLAKGKTLNIDIENFFPSTAKWKVQNFFGYYLQYNRDVAAFFADICTVDGHIPTGSPLSLMLAFWANQPMFNELNKLSKSRQITMTIYVDDISFTGEAVSEKFKNKVIEIVNKHHHTVNADKVRFFGKDLKFINGIAIVNNQLEPSNELSGKVRNLKKSKEIQYIKNLNGKIGYIKYIKKVDSLNRDITTECK

SEQ ID NO: 3262 - protein, 303 aa, Acinetobacter variabilis
  source 1..303: note = Related to NZ_CP060811.1
MSSQLKGNYELNQCVIYKLKSKRKLKKLLNLSENSNLKIYFNDDYFSCFDLMQEDGSARNIQTPINELQQIHIRLANFFKYVKTPDYLHSGKKKHSIVTNAKAHIDSSKPTLTIDIAKFFPSTKREKIFNFFYKKMHQSADVADILSRLVCYNNHVPTGSSISMLIAFWANKEMFDELYKLCEANNIIMTVYVDDISFTGNGVGKLFLKKVTEIIERYGLNIKKEKVKFFKANSPKTITGVIVKNNRIYARNEHYKKLRVMESAYKITKVEDVIEKGIMQKAYNGQLAFLVQIHPQLRNKMVF

SEQ ID NO: 3263 - protein, 300 aa, Acinetobacter sp.
  source 1..300: note = Related to NZ_VPER01000044.1
MTKMTPRCSANYDISQSILYKLHSKKKLSEILGLPLSVLKICKNDSYYSCFDLEQKNKIRSIQQPIDQLFIIHQRIASLLTRIYHPDYLHSGRKKHSIITNASQHLISDKKTLTIDIEKFFPSTTQNKVFHFFRTIFKQSVDVADLLSHLLTFNNHVPTGSPVSMSLAFWANKNLFDELSRFSKNRNTIMTVYVDDLTFTGSGVNSNFLKNASKIIEKHNLKVKKSKVFLYKENQAKFITGTVVLNNKLEAEFKQFKALRVSEFLFLNDPKNEVYRNAYNGRLAFLSQIKPNLKIKMNFK

SEQ ID NO: 3264 - protein, 311 aa, unidentified
  source 1..311: note = Related to DABN01000043.1; note = Candidatus Gastranaerophilales bacterium HUM_16
MNVHNGIKIEDSSLYRINRECLFLLLGIKNNDELKTLLSNNNYKVYTVGPKNRIIEEPDKKLKNIQTKFNKLLQQIETPPYVFAGRKKMNHISNAKAHIDCNDMICADIKKFFPHTKIKYLQEFLETNLKFSPDLALDVANLLTINGHLPTGAPSSPLLTFWSYKIVFDKIYDFATNLGITMTIYIDDMTFSSKSKVSKKLIPFVGAELTRVGLELHPEKLKNFKCSKYKHVTGVCIDRKHRLVVKNEHRDNLLKILNSKDDITQLSTEQIETCIGMIKSMQLIEPKIFEPTLKKLKEIYKLRPKRIVKKR

SEQ ID NO: 3265 - protein, 307 aa, unidentified
  source 1..307: note = Related to nan
MTIKDNFKSFESLDKTLKLLDVSLEEMQQAINKGYRRYKTFKNGKFRWIEEPNDELKIIQQKILLYLQNNLECPTYCTAGFKGQNNIKNAEKHRNKREVLTMDISHYFPNTQEKYVRKIFSEFIGVDDNVLNLLVKITTFNGYLPTGAATSTILSCFVHKEIFDNIFKKMKSLDIDMTVYVDDITLSTHKHISNWVISHINNSLQSHGLFLKKSKIKRYGYKHAVVTGVHIAQSGKMSAPFKIGHSAICALCDKDLKQMSLTELRKIIVKISYIQQFNPLKMIKVKKQAIKQLKKLQKISANKNERI

SEQ ID NO: 3266 - protein, 317 aa, Paenibacillus sp.
  source 1..317: note = Related to CP013653.1
MNTLMKKRYDITQCSFYKCRSKRRLMNLLMLNEEEFKNIKKKICYHSFTQAKKDGDKRVITAPNEELKRIQKRILKLFSYVKRPEWLISGERGKSYIDNGRYHINSNYFLTMDIRKFYDNCKREYVYRFFNDNLEMSKDTAAILTDLVTYEGKVPTGCPTSQIIAYYAYQKMFHSIHKVAEMHGCKFSLYVDDMTFSSSSPFNPDSLRNDIDKILRKYGHRPKYSKVKYYSKNKFKLITGVTISSDHKLLVSNTLRKKIYDGAMSQIEMDRQKKVTIPKELRRLKGRIQAARVVNPHIFPEVNRFVEEKLYSSGSYK

SEQ ID NO: 3267 - protein, 321 aa, Paenibacillus algicola
  source 1..321: note = Related to NZ_CP040396.1
MTQIRKKHELDQCALYKCKSKRKLAYYLKIDYEKLKTISNITLYHSFSLQKNDGDPRLITAPKAELKKLQKRILRLLEKVKRPDYLISGEKGKSYLNNALTHQHSDYFLTIDIRKFYDNCKREYVYNFFIKMLQTSKDVACILTDIITFDNKIPTGCPTSQMLAYYAYFDMFTELKEISQRFNSIFTLYVDDMTFSSKTSFNPKALANEVDIVLRKYGHRPKYKKVKYFSKEDFKLVTGVVITKEHALTVPNRLREKIYTGSMAEKERLYTYNPREISKRIKKLRSIKGQVQAAKNIQKTIFPEIDRLIDDKLLDISSHTR

SEQ ID NO: 3268 - protein, 319 aa, Brevibacillus agri
  source 1..319: note = Related to CP026363.1
MSLKKKRYDLNQCALYKCRGKGRLAYLLHMNKEEFDNLEKLIEYYSFTTDKNDGDKRLITAPRNNLKKIQKRILKLITFVKRPEWLISGERGKNYIDNGKFHQQSHYLLTMDIKKFYENCKREFVYRFFRYTMCMSGDIAEILTNIVTLEQKIPTGCPTSQLIAYYAYQEMFENIKKIANKYNCVFTLYVDDMTFSSKRPFNPDKLRNEIDIELRKYGHRPKYSKVQYYSRNSNKLVTGVVISKDHNLLVANKLQKKIYDNAMKLKKVNGNKKEAKIAYQLESDLRSLKGQLQAARNVKKGIFPEINRLVENSMINLSK

SEQ ID NO: 3269 - protein, 315 aa, Paenibacillus taichungensis
  source 1..315: note = Related to NZ_JABMCC010000107.1
MARIVKRYRLDQCALYKLKSKKKLAHYLNVDYETFKETGELIHYSAFSLKAEGKKDRSITAPNSKLKSLQKRVHKLLLKIERPEWLISGERGKSYIDNGKMHQKCNYALCMDIRSFYTNTKREYVFRFFIEEMLMSKDTAKIVTDILTFKDSIPTGSPASQLIAYYGYHRMFQEIESISTNKYGCVFSLYVDDMTFSSEKPFQMKGLRNEIDIILRKYGHKPSYKKTKYYSRNKAKPITGTTVSSKHELLIPNSLQLKIIRGAELILEKPQELSRAQLASFRGQVQAARIIQKRAFPELNKLAEEMLSNPLKIPT

SEQ ID NO: 3270 - protein, 308 aa, Paenibacillus pabuli
  source 1..308: note = Related to QGTZ01000022.1
MARIVQRYKLNQCVFYKLKSKKQLAYFLKVDYETLREINELIHYKSFSLRTEGKKDRDITAPNKKLKDLQKRIHNLLLRIERPDWLISGERGKSYIDNGKMHQNCNYALCMDIKSFYRNTKREYVFRFFTEEMLMSKDTAKVVTDILTFQNSIPTGSPASQLIAYYAYHRMFHEIKSIATNKHSCIFSLYVDDMTFSSDTPFEVNVLRKEIDILLRKYDHKPSYSKTNYYSRNKAKPVTGTTISKNHELLIPNTLQMKIKRDSEMVLQKGRELSTKQRASFNGRVKAARIIEKLAFPELNKLAERMLN

SEQ ID NO: 3271 - protein, 322 aa, unidentified
  source 1..322: note = Related to JAFYLK010000105.1; note = Clostridia bacterium
MKAPIKRYPLHQCALYKCSSKKKLELRLKLNAGDASLLENMIQYHKFSIPKKDSTKLRDITAPADDLKKVQRRILRLLQRIERPQWLISGERGKSYVDNGRAHINSMYLLAADIKSFYDNCRRDYVYRFFTERLKTAPDIAKLLTDIITYKGGIPTGCPTSQIIAYYAYERMFSEIAQVAERHGCIFTLYVDDMTFSSQTPFDPKRLKREIEMILLRYGHRLKDSKVKYYARDDAKPVTGTIITKEHRLATPNQLQKRIVTEFQALKEQMNGQALTPEEKSRYATLQGRIYAARNIEPCIFPEIHRQVTAVKHSPENGKGVE

SEQ ID NO: 3272 - protein, 309 aa, Ructibacterium gallinarum
  source 1..309: note = Related to NZ_JADCKB010000021.1
MNSAMHKYEINQCALYKCSSKKRLEHLLLLKENELKQIKQYTRYYNFSTPKKDGSPRKITAPCDKLKKIQRRILRLLSPIKRPDWLISGERGKSYIDNGKSHINSKYFLTMDIKNFYPNCQREYVFRFFTDVLLTAPDIAKILTDIITYNNGIPTGCPTSQLIAYYAYENMFKSIYEISLNYGCKFTLYVDDMTFSSNFPFDPKKLEQEIDIQLRRYNHKPKYSKVKYYPANTYKLVTGTTVSPDNKLLVTNNLRQKIVENFKILKNYQKLSNDERKKKIDSLKGQIQAARNVNKTIFPEINRLTNDLK

SEQ ID NO: 3273 - protein, 311 aa, Coprococcus sp.
  source 1..311: note = Related to QTZF01000005.1
MREKSHKYDITQCALYKIKGSKQLKKVLCITEEEYKDILSIVHYHSFQIDKKDSTEKRNITAPDKRIKEIQTRILKLLQNVERPIWLISGEKGKCYIDNGKSHLNSNYFLTMDIKKFYDNCSREYVFLFFKNRLMMAGDLAGLCTDIVTYDGGIPTGCPTSQIIAYYAYESMFNEIYSVACKYGCEYTVYVDDMTFSAKEPFDINRMKNEVDCILRKYGHKPKYKKVKYYSKGKSVPITGTIVTGQHELKVPNRLQKRVYDDFQELKYLGGKELSDIEIRKLNSLKGRILASRNIEEGKFPEINRLTNFIS

SEQ ID NO: 3274 - protein, 311 aa, Faecalicatena contorta
  source 1..311: note = Related to JAFBIY010000001.1
MAKQYKRYDITQCALYKCISPYNLKRVLKITDEEYKDIVKIVRYHTFQIDKKDGVEKRNITAPDRRIKEIQTRILQLLQKVERPEWLISGEKGKCYIDNGKKHIHSNYFLTMDIKKFYDNCEREYVFRFFRDRLLMAGDLAGLCTDIVTYEGGIPTGCPTSQLLAFYAYENMFNEISEVAYKYGCIYSVYVDDMTFSSEVAFDVKKMRSEIDQKLRKYGHKPKYRKVKYYSHGQYVPITGTIVTGNHELKVPNRLQKRVYDDFQEIKSFEGRKVTSEEQKKINSLKGRIQASENIEPGKFPEIKRLTKLIG

SEQ ID NO: 3275 - protein, 311 aa, Clostridium indicum
  source 1..311: note = Related to NZ_QOHO01000034.1
MENKWKKYDITQCAFYKCNSPKNLKRILQIKDEEYNDIFSIVKYHGFSIDKKDGIEKRNITAPDKRIKAIQGRILRLFQKVERPEWLISGEKGKCYIDNGKQHVFSNYFLTIDIKKFYDNCKREYVFRFFKDRMLMTGDLAGLCTDIVTYEGGIPTGCPTSQLIAYYAYENMFKEIYEVATEYSCIFTVYVDDMTFSSEKAFDVNKMVNKVDCTLRKYGHKPKYKKVKYYSQGQYVPITGTIVTGKHEIKVPNQLQKKVYDEFQEIKTLNTENLTDKEQKKINSLKGRIQASRNIEDGKFPEIRRLVNKIG

(The sequence listing continues in the following parts.)
